United States Patent Application Publication US 2017/0009304 A1 - sequence listing, part 18

SEQ ID NO: 366744 - DNA, 100 bp, Homo sapiens
ggaaaaagaagaatttattcactcaagactaaaaactaaaggcctgggcctgagaactgaatcaggtgtggatgaggtcaccattgtcaacattttgacc

SEQ ID NO: 366745 - DNA, 75 bp, Homo sapiens
tttaccgatgctttaacatacagccactagacctgatggccaaaagaaaggaagaaaatttttcctctcctaaaa

SEQ ID NO: 366746 - DNA, 75 bp, Homo sapiens
agggagcggagtaccagcacttcatccagcagtgcacaggagaactacgatgacccgcacaaaacccctgcctcc

SEQ ID NO: 366747 - DNA, 82 bp, Homo sapiens
cgaggaggcgcgggaggtgttcgagaacgaccccgagacggagggtgtgaagacagagaatgaccacatcaacctgaaggtg

SEQ ID NO: 366748 - DNA, 74 bp, Homo sapiens
aacaccctgagtgcggatttctgctatgatgacagaatgacagcccatatcaaggcggtgtattctttttgaca

SEQ ID NO: 366749 - DNA, 100 bp, Homo sapiens
gcctacctcactttttgcttgcagcgtccatgaagcagtgtttgaggcacgagagcagaaggtgtaattgaaaagtgatcctctcttcagagatgtcaaa

SEQ ID NO: 366750 - DNA, 49 bp, Homo sapiens
atcaagtgtgtggtggtgggagacggtagagacggggtttcaccgtgtt

SEQ ID NO: 366751 - DNA, 100 bp, Homo sapiens
cggtccctggggaatatgcggcgcgcgtggatcctgctcaccttgggcttggtggcctgcgtgtcggcggagtcgcaggcattttggagatcaaagatgg

SEQ ID NO: 366752 - DNA, 75 bp, Homo sapiens
ggcctggactcaggccctcccgtcggtcattaagcccctgaagaagatggccgaccggatcaggaagtatcagat

SEQ ID NO: 366753 - DNA, 83 bp, Homo sapiens
cctcgctactcgcttgcctacccgccggcccgcgggtctacttcctcaaagaaaagcctgccattgctccgcccgtctttgtg

SEQ ID NO: 366754 - DNA, 83 bp, Homo sapiens
ctttgcggcgctacactagagcagagtacgagtctgaggcggagggagtaatggtcaaatgaagcgcaacagaggggaagaaa

SEQ ID NO: 366755 - DNA, 83 bp, Homo sapiens
tggatgttggtagaaaaagcaagagtttgttatatagcagggtcttgctcctcagaacaaaccagaattgcagaaggtgatgg

SEQ ID NO: 366756 - DNA, 100 bp, Homo sapiens
gaccaagtcccatcactggtcgcactgagggtgaagtggcaggaggaggaggaggggctccggctggtctgtggtgagatcgcagagacctatgccttcc

SEQ ID NO: 366757 - DNA, 85 bp, Homo sapiens
gagttcagagcaaaaactaacagggatcttgaaattaaagatcaggacaggaaaggccatgtgaggacatagggagaaagcagcc

SEQ ID NO: 366758 - DNA, 100 bp, Homo sapiens
cttgtcaactgctcacgacagaaggcgtctcatggcgttggaataccggctctcagcggctgattggccatttgatgatggagctccaccccctaatcag

SEQ ID NO: 366759 - DNA, 100 bp, Homo sapiens
cgagtacaacgccaaggagctggtcgattacttcctaaatgtggccactgcccaggcgcatcccggggaaatggtgggggctctggctgcgcagtccctt

SEQ ID NO: 366760 - DNA, 80 bp, Homo sapiens
caccctcagtgacccggtgcagctagaagtccatatcgagtcattttctgaggatgaatggaatttactgtatgttgcag

SEQ ID NO: 366761 - DNA, 50 bp, Homo sapiens
ggtggaggtgttaaatgaaagcagcacgctggctcttctcctgaacttcc

SEQ ID NO: 366762 - DNA, 100 bp, Homo sapiens
cccaacatgatcttcattggtggtatcaactgccatcagggaaagccgttgcctatggattccttcctcaaggctcagcagtggctgaaggacctggagg

SEQ ID NO: 366763 - DNA, 101 bp, Homo sapiens
cctggatgcttctctctgctctgccctggctgggccactacagatttggagcaagaggtggtggtggccttcccccgaagaaatttggtaatcctggggag

SEQ ID NO: 366764 - DNA, 75 bp, Homo sapiens
gtatgtgcttcagtaacattcaaaaactatattaaaaggaactggagaattggcttccgttacaagatgaggtct

SEQ ID NO: 366765 - DNA, 90 bp, Homo sapiens
gccgcagaggaaagcgggctggcaggcgagggagcccgcgtcggctgagagcccacaggcccccacaggccacccagaggagaaggccac

SEQ ID NO: 366766 - DNA, 75 bp, Homo sapiens
agaagtgagaaaccaagatagattcatctcgacactgaaattacaggtcaaaatgcagatcttcgtgaaaaccct

SEQ ID NO: 366767 - DNA, 98 bp, Homo sapiens
ggaaaaaggaagtttgtcctgtcctggatcagtttctttgtcatgtagccaagactggagaaacaatgtctgcctcagccacctccctgacgctgtcc

SEQ ID NO: 366768 - DNA, 100 bp, Homo sapiens
gaggatcgggccgtggaaagccgcaccaccgacctgctgactgactgggagaagaccaagcctgtcacgactcatctttcaagaggactttagactaatt

SEQ ID NO: 366769 - DNA, 90 bp, Homo sapiens
cgagacacgcggtgaggcggcgacgggctccggttccagatttcggaaggttcacgagtgttgccgacacgccctcccaactgcagacat

SEQ ID NO: 366770 - DNA, 88 bp, Homo sapiens
gttctgctttcatggagttcacagaagagtcgaggaggccaaagatgaagaggaagcctttctggattggagtgatgatgatgatgat

SEQ ID NO: 366771 - DNA, 98 bp, Homo sapiens
cagagctggatcggaggatagttgccctgcgcaagaagaaccaggccttgctccgcaggtaccaggcaagtagcctgcagtatgaaatgctgctgctg

SEQ ID NO: 366772 - DNA, 91 bp, Homo sapiens
cactcagggcaagggtgtccgacggctggagcgggggatatgagactttctactcggaatatcctgagtgttgcgtggatgtaaaacccat

SEQ ID NO: 366773 - DNA, 75 bp, Homo sapiens
ctcatgcaagtggaacttacagcttccttgatcggactcagcattcagagagccggacagggcagcggccggcac

SEQ ID NO: 366774 - DNA, 113 bp, Homo sapiens
aaaagaggccaaagatctgacagaactggttcagcggagaataacatatcttcagggccgttgctccagggagaactgcaaatatcttcatccacccccacatttaaaaacgc

SEQ ID NO: 366775 - DNA, 80 bp, Homo sapiens
cgccgtcccgtccgacagccaggcccgggagaaattgggaagatattgattctgatgaagaattggaatgtgaggatact

SEQ ID NO: 366776 - DNA, 98 bp, Homo sapiens
ggagcccccggcccaagggcgacttctccagccgggcccgcgaagtgctactggggataaaggaaggagaaataagtcaactaaaatttgagcacctg

SEQ ID NO: 366777 - DNA, 75 bp, Homo sapiens
tcatgatgagaggctcttgggtggatgctattcctatgatcagcaaactgaggtacaatcccagatttgacaaag

SEQ ID NO: 366778 - DNA, 82 bp, Homo sapiens
tgggattcgcgctgctgggcacccacggagcctccggggctgagttctctgtggcccatgaccttcggcctggcctgctgcg

SEQ ID NO: 366779 - DNA, 100 bp, Homo sapiens
tggagtaagaaggagaaacacagtcttgcccctaacgttgtggcctttacccggaggtttaaccagatatgtcatttcagcaccaaaaatattccgtgtt

SEQ ID NO: 366780 - DNA, 74 bp, Homo sapiens
gagcgacagagacaagctgagcttgccgcacaaaaagctagagaggccaccaccacctatcatgacagatggtg

SEQ ID NO: 366781 - DNA, 96 bp, Homo sapiens
cacgctgcctttggcagcctaccagcactacatcctggccaaggtgctaatgtctcttcatgaaatgttcccagcagtacatgcagcagaaatggc

SEQ ID NO: 366782 - DNA, 75 bp, Homo sapiens
tgatcttggacttcctagcctccagaaccgtgagaagtaaatttctgtttgtgaaatgacaatggatgctctgtt

SEQ ID NO: 366783 - DNA, 100 bp, Homo sapiens
cgcggaggggcgggggaggcgccgggaagtcgacggcgccggcggctcctgtgatttaaatctaccacccagctgtagttgaatctacaatctgctcagg

SEQ ID NO: 366784 - DNA, 50 bp, Homo sapiens
atttgccatgaaggtgcttaaaaagaaatgattctggggaccattctgac

SEQ ID NO: 366785 - DNA, 98 bp, Homo sapiens
ccgacattggtttacatttctcttgactgagaatggtgccacgtgtggtctgtaagtaggccctagcaacagaccacctatcagagccgaaggcagaa

SEQ ID NO: 366786 - DNA, 51 bp, Homo sapiens
gccttgctactactgatgatgttaattggactcctgagattaacaaagaac

SEQ ID NO: 366787 - DNA, 99 bp, Homo sapiens
ccgtggagagatcataatttggggttcaagattccaggtagtgggcagcagtcagtgacaggtgtaacctctgtggatgacagcaacagttactggagg

SEQ ID NO: 366788 - DNA, 75 bp, Homo sapiens
gctcggggagccggtctatggactttccgaagacgaggaatactctgaagatagtaactccgagccaaatgtgga

SEQ ID NO: 366789 - DNA, 90 bp, Homo sapiens
ggaaggcaagcctgcctgcttctgcatcgacagatagccgtcttcagcttgagccccatcactaggatttggtgctatggagaaattttt

SEQ ID NO: 366790 - DNA, 101 bp, Homo sapiens
tgaaggatgagcttcaactctatggagctctagaggacaaaatcccagtccttggcacaaactcaggaaatggaagccggagtctgttttttgtggggctg

SEQ ID NO: 366791 - DNA, 75 bp, Homo sapiens
gactgagaagatgcatgccagagacttcacagtttctgctctgactattgcagatatcatccgaacatgtttggg

SEQ ID NO: 366792 - DNA, 75 bp, Homo sapiens
caggcaggagaattatgggagcgcatttccccaggtatgtccgtggttcagaccctgtattaaagcttttggacg

SEQ ID NO: 366793 - DNA, 82 bp, Homo sapiens
cgcagggcctggcactggccaaggagattgcggagctggagtttgttcagatcatcatcatcgtggtggtgatgatggtgat

SEQ ID NO: 366794 - DNA, 75 bp, Homo sapiens
gctactactaccactttgggctgatggcaactgagttttgcggcctccaggtggtggatccaatttttcattagg

SEQ ID NO: 366795 - DNA, 97 bp, Homo sapiens
cggctggagagcctgttggagaaacacaaagaggtttattcttcagtccaaggaagcaattcacagtcagctgttagagaagcagaaaatagcagaa

SEQ ID NO: 366796 - DNA, 82 bp, Homo sapiens
tgggagagaggtacctctccttttccctctccctttccctaaggtcagttcaccgggacctggaggcccagattgcgatcgt

SEQ ID NO: 366797 - DNA, 143 bp, Homo sapiens
gtggaataaactgagcaattcatcaccatattaagctggatattcctgtttagtaaatatctttccctagctgtatgatcttagctttgataaatgactgaagctggagaagccgtggttgaagtcagcctacactacagtgc

SEQ ID NO: 366798 - DNA, 82 bp, Homo sapiens
aagcagaaagccgcctcttggtttgcgtcctgcactgaaaggaaatgacggattttcatatgaaacactctcagatgctaat

SEQ ID NO: 366799 - DNA, 82 bp, Homo sapiens
ggaaggatttggagatttttcccccacagatgttcatagacaacctcatgatgatcctgagacttgtcttgttgctgctctg

SEQ ID NO: 366800 - DNA, 83 bp, Homo sapiens
gaaggaatcaaacagttttatattaatgttgagagagaggccttagcagtaggaggactaggctccattataagagttcttac

SEQ ID NO: 366801 - DNA, 93 bp, Homo sapiens
cttcgagtgggtctacaccgaccagccgcacgccgaccggcgccgggagatcctggggagcatttcctgaagacgtagtcatgcagcacgtca

SEQ ID NO: 366802 - DNA, 98 bp, Homo sapiens
atggccagagcagctattcttcttatggccagagccagaacaggccaagtgatccagttctaagtgtcatcttttattatgaagacaataaaatcttg

SEQ ID NO: 366803 - DNA, 82 bp, Homo sapiens
ggggtccacactgcaatgtttttgtggaacatggtcagcccaaggccaaccccactgtcactctgttcccgccctcctctga

SEQ ID NO: 366804 - DNA, 101 bp, Homo sapiens
cttgtggatattatggctaataacacaacaagtttagggagtccatggccagaaaacttttgggttactccacaggatccgctgaacataggatgttgcca

SEQ ID NO: 366805 - DNA, 83 bp, Homo sapiens
ggtcttcagcggggcgctccaggaggcactcacagccatatccagaagacccagcagtttataaaccactctcccaggaagag

SEQ ID NO: 366806 - DNA, 100 bp, Homo sapiens
attttggaacgcccgtgccgcgtctccgcgttcccagcccgggtccccgcgttcacagccccagcgcagggatgtttcagcagcccctgagaaggaagag

SEQ ID NO: 366807 - DNA, 98 bp, Homo sapiens
gaatatgccaaggaaaaactggagagcttcatcaaaaatagtgatagctttgataaggaaacagaagtacctgtgcgccagcagaaatgattgcacta

SEQ ID NO: 366808 - DNA, 100 bp, Homo sapiens
tagagcgtctggccaagaatcagaggaagtgggtgtaaagcaggccctctggctcaccaagaccaagttaatagaaggccttcccgagaaagtgcttagc

SEQ ID NO: 366809 - DNA, 75 bp, Homo sapiens
caggcattgagctccagcattgaggaggggctacgcatgcaggccatgcacagatacttggcatatcgaaatttt

SEQ ID NO: 366810 - DNA, 100 bp, Homo sapiens
aagcgcacgtttaaacatctcaagtgggtaattccagaattgattggccataccattgtcactgtattactgctcatgtcattgcactggttcatcttcc

SEQ ID NO: 366811 - DNA, 75 bp, Homo sapiens
cgagaaccaagtgcggacgctgtgcgagaagatgagacaccaattattgcggtgatggtggccctgtcctctctg

SEQ ID NO: 366812 - DNA, 102 bp, Homo sapiens
gaggtggagccgcccccagatcggccagtccgagcgtgccggacacagccaggagagaagatgactgaggaggaggtggagaccgttctggcaggacacgag

SEQ ID NO: 366813 - DNA, 82 bp, Homo sapiens
ctgtattctttacctgcttcccaatcccactgatgaggatcagcccatggactggaaggatcaccagcacatatgcggccag

SEQ ID NO: 366814 - DNA, 100 bp, Homo sapiens
cgctcctggccccgcgcgggcggacggcggaggcgcctcccagacattcacggcatggtgtaactcccacctccggaaggcggggacacagatcgagaac

SEQ ID NO: 366815 - DNA, 98 bp, Homo sapiens
gaaacaataggacggaaacgccgaggaacccggctgaggcggcaggtctacttccccagcaggacagcatcattctcctatatcttctagacatcact

SEQ ID NO: 366816 - DNA, 82 bp, Homo sapiens
aaagtaacaagaatcattcttgcagcatttcgtcttccagctgatcttaccaagatgcatctcacagaaaaccctcatccac

SEQ ID NO: 366817 - DNA, 51 bp, Homo sapiens
tgttgctgctcagttgccaagcaagttgagtgaatccaagtctgatggtag

SEQ ID NO: 366818 - DNA, 74 bp, Homo sapiens
tgtgattggctaccttctcccatcaccccaggtaattttaaccaatcagatgacaacaaagattgatagaaatc

SEQ ID NO: 366819 - DNA, 97 bp, Homo sapiens
atcaaggtcatagaaagtgaagattatggccaacagttagaaatcttggattggatgctgctggcaagacaaccattctgtataaactgaagttagg

SEQ ID NO: 366820 - DNA, 93 bp, Homo sapiens
agttggaagcagccgatccagcctgcggagcctgtggggcaggtcgcctgcgaggccgctggccaggcctgagcctctgccaccatggccatt

SEQ ID NO: 366821 - DNA, 98 bp, Homo sapiens
gtcgcttgtcttctattcaccatggcttcttctgaacgtgaagctcttggagcaatttgtctgcgcccacacgggtatcatcttctatgctccataca

SEQ ID NO: 366822 - DNA, 82 bp, Homo sapiens
cttcaacaagaggacccaggagaaattcgccctcaaacagcccctgtcaaagggaacaggaagcagtccacggagggtgacg

SEQ ID NO: 366823 - DNA, 100 bp, Homo sapiens
ttaccactgtctgtgtgagattactgcttgagagcaaagaaaagaagatcagggaattcattcaagatcctgtgttgccataagcccttggcccacattt

SEQ ID NO: 366824 - DNA, 83 bp, Homo sapiens
ctcagccgcttggggcccgcacggaccctctacttcagctcgcttctcatatgtgcggatgaaatatcttttcttttcctggt

SEQ ID NO: 366825 - DNA, 100 bp, Homo sapiens
tatcaggttcacgccaacagtacctcattgctctttggcgactcttattgattatagcatttgatgagctgaagactgattacaagaatcctatagacca

SEQ ID NO: 366826 - DNA, 97 bp, Homo sapiens
gctctgtgagcggcgggtggcagcaggggactcctgacacttccccttccccaccgaaccgcgatgcgttactagagcaggccatgattggaccatc

SEQ ID NO: 366827 - DNA, 82 bp, Homo sapiens
aactgactgaccttcgagttgagaaggagtccttggaaaagagaggaagaagctattcagttggatggattaaatgcatcac

SEQ ID NO: 366828 - DNA, 75 bp, Homo sapiens
gggagatgatcctggcggattttcagtccaaggacaaaatgatgagaggctctcgcagaggatgtgttagactca

SEQ ID NO: 366829 - DNA, 89 bp, Homo sapiens
gactacataaatatatttccaaagagaaaagctgcatatgattcaaatgggcaccgaggaagagaaccaatggcagaggccacatgtgc

SEQ ID NO: 366830 - DNA, 77 bp, Homo sapiens
gccgggatctcaggtcctcgggggcggcggccacgccaaggacggggtgataaaagaaaatgtggctgaagttaccc

SEQ ID NO: 366831 - DNA, 100 bp, Homo sapiens
acgacgtgaaggagcagatttacaaactggccaagaagggccttactccttcacagatcggggtgtcgccatccagatgtgttggaagcttcccctcctg

SEQ ID NO: 366832 - DNA, 95 bp, Homo sapiens
acacggatctataccaacgccaaacgcacgagtattacccctatctcagcagtgatggggagagccatagcgtacctttgtgttggatgaattta

SEQ ID NO: 366833 - DNA, 100 bp, Homo sapiens
gggaattctttgggagtggagacccttttgcagagctctttgatcgaggagtccgtgcgctacatggttatgcgctacggcagccggctgtggaaactcc

SEQ ID NO: 366834 - DNA, 88 bp, Homo sapiens
ttatttgaggaattgaagttgactttatggagctgataagaatcttcttggagaaaaaaagactgggcacgtgtggttctcaaatata

SEQ ID NO: 366835 - DNA, 100 bp, Homo sapiens
gggggaggcgaacagtctcgttgctgcctctgtgtacgctgaggggggagcaataagagctaactgccatcaagagccatcagtatgtcttcaagctgca

SEQ ID NO: 366836 - DNA, 98 bp, Homo sapiens
acaaagaaacactctccttctgccacatttgttttgagctaaatattgaggggatgatatcgctgatttagtagaagctaaaaagttgcttaaggaag

SEQ ID NO: 366837 - DNA, 127 bp, Homo sapiens
catctaagccctggtccaaatgcacttcagccaccatcacagaattcctggatgatggccatgacattgtacccatcctgacgtcaactgtgattgagtgtcacagggcaggcctgaagaactctgc

SEQ ID NO: 366838 - DNA, 101 bp, Homo sapiens
catcctgccgtccttctccactttcgccagcccgtgccgcgagcgcggcctgcaggagggactggtgattgcagctggaagtgcccatgaccgagctggcg

SEQ ID NO: 366839 - DNA, 120 bp, Homo sapiens
gtcggccgcctcttgagtgctttggacgatcttcagctggccaacagcaccatcattgcatttacctcggatcatgagagatggaaccatgtaaccaccacgaccaagaggccagtaacc

SEQ ID NO: 366840 - DNA, 80 bp, Homo sapiens
gaccgagcgcctcgacctcggtctgagtaagactttgaccccgacgcaggcttcagtgattgccgcggatcagaagcctg

SEQ ID NO: 366841 - DNA, 75 bp, Homo sapiens
cccctgagcccgaggtgctgacgtcgcaaaaaaattggatagggcaggagctgatgggtgcattaactgcacaga

SEQ ID NO: 366842 - DNA, 106 bp, Homo sapiens
agaggaggaatatggcgctcttaggcagccgagcggagctggaagcggacgagcatatcgcacggatgactgccatccctgggttttgccagtagtgaagaaagtg

SEQ ID NO: 366843 - DNA, 75 bp, Homo sapiens
cggcttaggacccccagctccgacgtgagaagccctaccactgcaactgggacggctgcggctggaagtttgcgc

SEQ ID NO: 366844 - DNA, 120 bp, Homo sapiens
gctgctgctactgctgtttccaggggctgcagagcatggactgttaaatcttgcacttcttctgagtgaggttcctcatgccatgcacctgctgtcacccagcatgcaccctattttaag

SEQ ID NO: 366845 - DNA, 74 bp, Homo sapiens
acaagatctactatcctgacttcatcgtcccagacccaaagaggggtgatggagaagtcctttctggagtatta

SEQ ID NO: 366846 - DNA, 90 bp, Homo sapiens
ctgatactaacagttttacgatttaaaacttcgccagaatttctgggaatggaggaagaagatgtgattgaagtttatcaggaacaaacg

SEQ ID NO: 366847 - DNA, 75 bp, Homo sapiens
cggcgcccgggcccacgcggaacgacggggcgagaccctacagcttggggcctgggctcctctgaccatcctcat

SEQ ID NO: 366848 - DNA, 100 bp, Homo sapiens
gacgaaagtgttggatctgttggtttcaaggttaactacaaagacaagttggatggcttgaggactggtactaaaaggaaacgtgactgggaggccattg

SEQ ID NO: 366849 - DNA, 101 bp, Homo sapiens
caaatgcccaaatcagagattaccaaagaatcggcgatgtcatgctgaagaacattcagggcatgaagactgaccccaattcttggcattcagaaacattc

SEQ ID NO: 366850 - DNA, 74 bp, Homo sapiens
gcatctactcggccctcattctgcacgacgatgaggtgacagtcacgagctgcaagcgtttgctcaccacggcc

SEQ ID NO: 366851 - DNA, 98 bp, Homo sapiens
aagcacaatggatgcaataagtgcagaagggtttactgatattgatataggtcgagtctatgctgtcttgtcaaagagagaaggtcgggtacttcaag

SEQ ID NO: 366852 - DNA, 100 bp, Homo sapiens
cctggagctctacgcctcctacgtttacctgtccatgacttaattcagtgcacaaatgagatgaatgtgaacatcccacagttggcagacagtttatttg

SEQ ID NO: 366853 - DNA, 101 bp, Homo sapiens
gggctaaggaaaagagcactgggctgagactcaggagacctggtttctagccccagctgtacctctaattgtaaccttggaaagcagatctggctgtggca

SEQ ID NO: 366854 - DNA, 80 bp, Homo sapiens
atgagattgaggtctgggggcactgagggtctcttggctgaaaaattggagtcatgctgcaaagcttggagcccagctgg

SEQ ID NO: 366855 - DNA, 98 bp, Homo sapiens
ccccacccaactacctgtgccacctgtgcttcaacaaaggacactacatcaaggactgcccccagctcctacagaagaagggaaaaaagagctgctgt

SEQ ID NO: 366856 - DNA, 100 bp, Homo sapiens
cctgacgttctcttctacccactgagaccagagttagtggaatccacatatctcctctaccagtgttggaggtcggcgccggcccccgccttccgcgccc

SEQ ID NO: 366857 - DNA, 97 bp, Homo sapiens
ggcttccagatcaacctcaacccgctcaaggagccactcggcttcatcaaggtcctcgagtggatatggagtctggagaacggttaccatcctcagc

SEQ ID NO: 366858 - DNA, 90 bp, Homo sapiens
ctatctagggacgagatctagaatcaactgagagagatgcttaaaaatcaccagttactttaatgaaagagaagctgaatttggacgaca

SEQ ID NO: 366859 - DNA, 95 bp, Homo sapiens
atgatggcccagatgcagatgagctctttgcagatgccaggaatgaacactgtgtgccctgagcaggagtggaagtattatccacttcatgggag

SEQ ID NO: 366860 - DNA, 103 bp, Homo sapiens
tccaattacagacttcacatcaagttcaaggagtctcttgttaatgtgaccattgtgaggtagatattttgttctaattttccagatgaggaagctgagaccc

SEQ ID NO: 366861 - DNA, 90 bp, Homo sapiens
cgctctccgttcggcggcgctcccatggcgcacattaccattaaccagtacctgcagcaggccggtctaattgaagccaacggagaactc

SEQ ID NO: 366862 - DNA, 100 bp, Homo sapiens
gggctctgggagcgtggtaacgtggctgcaaccttagcgacatcaggaagaacagggtcgaggatcgaggaacttagtgatttggcccgtgaccctccag

SEQ ID NO: 366863 - DNA, 88 bp, Homo sapiens
gctctcatgaagcaaccgcccattcagtctacggctggggccgtcccagttcgcaatgagaaaggcggtaaccagcgtgagctcgccc

SEQ ID NO: 366864 - DNA, 75 bp, Homo sapiens
cgccaactatatgcccaaggacgaccgcgaggcccagaggagccaaggcaaagagggaccactgtgctcatggac

SEQ ID NO: 366865 - DNA, 90 bp, Homo sapiens
ctgaaattgccagacaaaaccctcattgacctctatgaacagatgtcagtattgaatatggtggtgaggcgtgaccctggcaacactgaa

SEQ ID NO: 366866 - DNA, 75 bp, Homo sapiens
ggttccatcatggcgtcaatgcagaactcccccactggaaaggattctgaaagaaatgaagtcagccctcagaaa

SEQ ID NO: 366867 - DNA, 100 bp, Homo sapiens
gaaaatggggagcaggaggctgacaatgaggtggatgatgaagacttacaagatgaacctttacagatcacagttcttgaccatgatacttacagtgcaa

SEQ ID NO: 366868 - DNA, 75 bp, Homo sapiens
catcagatacatcctactcagatatggctgctggatcagaggtgctttcttctgcgacctggtactcatctacct

SEQ ID NO: 366869 - DNA, 74 bp, Homo sapiens
acagacaaactgaaggagctttatggacaagtgtcttatcgggacctcaaagaagtaactcctgaagggctcca

SEQ ID NO: 366870 - DNA, 101 bp, Homo sapiens
gcgagtatctccgtttcctggatgtgaaccactattcctgatcagagaactccagttgcttcaacacacagtatcagtagtgcagccaccccagatcgaat

SEQ ID NO: 366871 - DNA, 80 bp, Homo sapiens
tgaccgagaccgcggccgggaccgagggtgcagtctttgcaagccacatttggaacttttgagtccatcttgagaagctc

SEQ ID NO: 366872 - DNA, 101 bp, Homo sapiens
aagggaggctccaagacctcatcaacaattaagattgatgccaagaaggaacagctagcagatgcccggagagacctgaaaagtgctaaggctgatgccaa

SEQ ID NO: 366873 - DNA, 74 bp, Homo sapiens
atgttaaggacatgagcaaatccttaaccaatgaccggagtaggccctatgatacttttaacttgcactcgttg

SEQ ID NO: 366874 - DNA, 90 bp, Homo sapiens
cactgaggatgtggagaaggccacagatcccgactgggcctcctacactctgggcgtcttcatctgcctgagctgctcgggaatccaccg

SEQ ID NO: 366875 - DNA, 75 bp, Homo sapiens
agctcctgggcatcccgctggaccagcaattctgtggtgttcttggtcacacatttatggagtttctgaagggca

SEQ ID NO: 366876 - DNA, 100 bp, Homo sapiens
ttttggcatcaaggacaaacccaccttcatcaaagggggttttcagagaaagatgctgatgaggtgaaaggaatttttgtagataccaacttatacttcc

SEQ ID NO: 366877 - DNA, 75 bp, Homo sapiens
gagagcttgaagcaagggaccttgttatagaagccttaaagtgcatttgcccagtataacatggatcagttcacg

SEQ ID NO: 366878 - DNA, 75 bp, Homo sapiens
cagaaacagaaacgattgtggaaacagttgctgccttcactgaagtcttgaacccctcaaagtcattcatgaaat

SEQ ID NO: 366879 - DNA, 83 bp, Homo sapiens
ctcatcccctggatgggggaccacaagatcctcatcgacaggaagccatcttcgacaagagcacagggaaggttgttttgaag

SEQ ID NO: 366880 - DNA, 88 bp, Homo sapiens
gctccggcgccggcctcgcctcctcgcagcagcgccatgggggggccctcagcctcttggccttgaacgggctgttcatcttgattca

SEQ ID NO: 366881 - DNA, 90 bp, Homo sapiens
ggagttcttacaacatggcagacattgacaatttcaggtttagctgtgcctcccagtgactataatgacaaggaagctgtaaatgtattt

SEQ ID NO: 366882 - DNA, 75 bp, Homo sapiens
agaacacaggagtgtggctagtcaagtgaactttgaggcgctgatcatcaccatgtcggtagtcgggggaaccct

SEQ ID NO: 366883 - DNA, 100 bp, Homo sapiens
cgcaaccccagatccatttacactttacattgactatattgtggagtatgactatgatgctgtacatgatgatgaattaactattcgagttggagaaatc

SEQ ID NO: 366884 - DNA, 51 bp, Homo sapiens
ccaggaaactgttgatgaagaagttgatatggacttcagcagaaatcttta

SEQ ID NO: 366885 - DNA, 100 bp, Homo sapiens
cattaccttagaggaagaagcactccagagacgactaaatggccagaaatgtacacacaggagagctggctgcagtaaaaatcattaaattggagcctgg

SEQ ID NO: 366886 - DNA, 80 bp, Homo sapiens
aaaatattcacagttcataaactttcctatttatgtatggagcagcaagttatcaggaactgttgccgttattacatcag

SEQ ID NO: 366887 - DNA, 99 bp, Homo sapiens
ggcggacgggaaggcgggagacgagaagcctgaaaagtcgcagcgagctggagccgccggaggtctgtgactcttatcctactgaactgtacgttccca

SEQ ID NO: 366888 - DNA, 115 bp, Homo sapiens
ggaataacccgtccccacgtgtagaatgtgtcctggcagagctcaagggcgttacatgcgagaacaggaattacatgaatgacagtcttcgaaccaatgtgtttgttcgatttca

SEQ ID NO: 366889 - DNA, 100 bp, Homo sapiens
tcggccgctgccgaggcctcctgcagccatcatgtccgccagcgccgtctacgtgctggacctgaagggcaaggcccggcttctctaaagaagtcaggaa

SEQ ID NO: 366890 - DNA, 80 bp, Homo sapiens
gctggacccggaccggttttgggggggtcctgtggagatccttcccttcctctacctcggcagtgcctaccatgctgccc

SEQ ID NO: 366891 - DNA, 75 bp, Homo sapiens
gccttccatagggctgagtctgggaccgaggcgaacagctgcttggagaactacaagtgaagaaaagaaagcatt

SEQ ID NO: 366892 - DNA, 122 bp, Homo sapiens
agccgcaccatgccgctcctaagcctgcacagccgcggcggcagcagcagtgagagggtcccgacggcctacacatggggcgctgtgggcgccgtggggctggtgtgggccaccgattggcg

SEQ ID NO: 366893 - DNA, 111 bp, Homo sapiens
aggatatcgacgtcgtgatccagaagtccagagctgaggactgcctgtttgcaggtctcctctgagcctccggcctccataagacccaaaacagatgacacctcttcccag

SEQ ID NO: 366894 - DNA, 80 bp, Homo sapiens
ctccaagaaccaacccccaaattggctgggacagcaagagtgagccatggagctacgtgtggggaacaagtaccgcctgg

SEQ ID NO: 366895 - DNA, 99 bp, Homo sapiens
gtgagacgtgcctttgaccttctgccatgattgtgaggcctccccagccacgtgaaactacattccactgcccttctcccaaaaagatgtcttttcgaa

SEQ ID NO: 366896 - DNA, 82 bp, Homo sapiens
ctctgcgagacccaatatttgccaataagaatggttatggaaagctccaaccatggccatggggctcttccgcgtgtgtctg

SEQ ID NO: 366897 - DNA, 86 bp, Homo sapiens
gaactggagagaactgctggaaggagactggatgatagaatttgatcctggtggagggattgaaatgtctgagttcatccgagagg

SEQ ID NO: 366898 - DNA, 80 bp, Homo sapiens
gagatggagatgggcagacggattcatttagagctgcggaacaggacgccctctgatggatcctgaaactccgccacatc

SEQ ID NO: 366899 - DNA, 100 bp, Homo sapiens
ggagcaagggaaagaggcctggagtatgaagagacatgagatcatggtggccaaacccacaggaaactggccaagaagcggaaagagaccatgagcagca

SEQ ID NO: 366900 - DNA, 98 bp, Homo sapiens
tgagagtggttccccgggtgagaacggatctccgggcccaatgggtgaccgtggtgagaccggccccgctggaccccctggtgctcctggtgctcctg

SEQ ID NO: 366901 - DNA, 90 bp, Homo sapiens
gctcttgtcgtaggacctggcttgggtagagatgatgcgcttctcagaaatgtccaggctgtggaaaatctctgttctcacaaagtctcc

SEQ ID NO: 366902 - DNA, 98 bp, Homo sapiens
aggcgattggcatcgatctctccatcccttccgaggcccgacttcggtctgctgagaacagacccagtccctgaggaaggagaagatgttgctgccac

SEQ ID NO: 366903 - DNA, 74 bp, Homo sapiens
ggacacgctctgcttcgacaaggacgagttcatgaagaaggagctcaaaaagtgggatgagtttgaagatattt

SEQ ID NO: 366904 - DNA, 101 bp, Homo sapiens
gagccgcgccgcaccatgcccgccgtggacaagctcctgctagaggaggcgttgcaggacagcccccaggaaggcaacagcccccaggggagcaaccaggg

SEQ ID NO: 366905 - DNA, 83 bp, Homo sapiens
tgttaaggattccaagtaactcttatttgcaatagcgtttatggcagcatttagcggacacagaagcacatctgaaagtggag

SEQ ID NO: 366906 - DNA, 73 bp, Homo sapiens
agatgtattcaaatggatcttcaaaggctttggtcctcttagatgtcactcctgaccagtcaatggtagatga

SEQ ID NO: 366907 - DNA, 126 bp, Homo sapiens
atagcagaagaataccatgaggtcaaaaaggaaatcaccctgcttgagcaaaggaaacagaatgttgctgcgggatgtaaaagctcttaccctccactatgaccgctataccacctcccgcaggct

SEQ ID NO: 366908 - DNA, 100 bp, Homo sapiens
aacctcctctggcccccggaaaacctaaccatgaagacttgaacttaatacagcaagaaagaccatcaagtttaccactcctacagaagaatggtcagct

SEQ ID NO: 366909 - DNA, 87 bp, Homo sapiens
tttctgaggagccgttcgaactgtctcaccacttccctgcagctcccggtgctgataagactgtgaaaggcccagatggactgaccg

SEQ ID NO: 366910 - DNA, 101 bp, Homo sapiens
caaaatggccacttacctgactggggaactgacggagttggatgcactaggtgatgagcttctggctgatgaagacagttcttatttggatgaggcagcat

SEQ ID NO: 366911 - DNA, 51 bp, Homo sapiens
atgtggcacctcgcatgttcaaaattgctctggaagcagccaaagcactgg

SEQ ID NO: 366912 - DNA, 94 bp, Homo sapiens
ctgagggaattgggaggtcggcggccccaaaaacaatgcagatcttcgtgaagactctgactggtaagaccatcaccctcgaggttgagcccag

SEQ ID NO: 366913 - DNA, 100 bp, Homo sapiens
tcttggatttggctacacacttatagatcttctgcactgtttacaggcacagcttcctggaaagaatcgacagcgtcagcttggttgactacacacccac

SEQ ID NO: 366914 - DNA, 51 bp, Homo sapiens
aagctctcttaagagattatgcatggacatccgtgaattccagcttcccag

SEQ ID NO: 366915 - DNA, 101 bp, Homo sapiens
gagagaccccgagtcccccggagtccgactcgctacgcgggtcttgcgagatatctggccgcctctgccgcagctggagcttttcctccgcaaccatgtct

SEQ ID NO: 366916 - DNA, 100 bp, Homo sapiens
ggagccgctcaagaagtcgagatcgaagatttagaggccgctacagaagtccttatccagtgtgaaaaaagccagtattaaaatactgaaaaattttgat

SEQ ID NO: 366917 - DNA, 95 bp, Homo sapiens
cagcgtgcctggttacagctgtttccacgtgcggtgctcgtcgggagtgatcacctaccctacagggaagtcgagacaacatgagtgtgattttg

SEQ ID NO: 366918 - DNA, 50 bp, Homo sapiens
ctggacccagatgtgtgacataaaagatagacaagaaagatttgctgata

SEQ ID NO: 366919 - DNA, 75 bp, Homo sapiens
gctcgccatctatgatggctttgacggcttcgccaagggccagttgaactgctggcttataaagtagagcaggag

SEQ ID NO: 366920 - DNA, 98 bp, Homo sapiens
cagatgcaggaaaatttcgatattgaagtgtcaaaatccatagatggaaaagatgaatatgatgctgtggctgagaaagctggtaaagtagaagctga

SEQ ID NO: 366921 - DNA, 49 bp, Homo sapiens
gtttcttctgatttctgccattggggtgcaaattgagcatgacccagaa

SEQ ID NO: 366922 - DNA, 83 bp, Homo sapiens
gctgatttccttgttggagtcttcaccactatgagcagccctggccaacgtcaacattgggagcctcatctgcaatgtagggg

SEQ ID NO: 366923 - DNA, 75 bp, Homo sapiens
tctgtccgtctagaggtttggcttctacaaaccaagacacgaatgcagagtttgagtccagatcccaaagcccag

SEQ ID NO: 366924 - DNA, 99 bp, Homo sapiens
ctttaagaaaggaatgaacatgtatttaaccaagttccaacaaaagaatgctgccgcaggctgagcacagggttgctccaggtgggcccaaatgctgaa

SEQ ID NO: 366925 - DNA, 75 bp, Homo sapiens
tccagcctcgctctccgccgcccgcaccgccgcccgcgccctcaccagaccctgaggggcgagctgcgcttcgac

SEQ ID NO: 366926 - DNA, 100 bp, Homo sapiens
cctcaagaagaagaagttgcgaaggatccccaacggggaggccaacgtgaagaactgctgatgcaaggaatcccctgggctcccgtccactccactgctg

SEQ ID NO: 366927 - DNA, 74 bp, Homo sapiens
ggcctactcgcccgccaccctgcgctgccgccgctctgaggagttaaagactcagaaccgtgctgcatactatc

SEQ ID NO: 366928 - DNA, 50 bp, Homo sapiens
cgtctaccaccagcccttcccagctgctgccctcaggattctctctcgga

SEQ ID NO: 366929 - DNA, 75 bp, Homo sapiens
gagttacagcctgtactacctgaaggagcttcagctgcccctgaagaagcttcatgtttcctgttgcaggtggga

SEQ ID NO: 366930 - DNA, 100 bp, Homo sapiens
agagcgcgttggtggcgacggccgagtcaggtgtgatgaatgcagactctgctaccattttggctgtttggatcctcctttgaaaaagtctcctaaacag

SEQ ID NO: 366931 - DNA, 100 bp, Homo sapiens
caggatctcacagctgcagtctaatagtaacacagaggtaaaagcagctgttaagtatgcccttagcgtaggctaccgccacattgattgtgctgctatc

SEQ ID NO: 366932 - DNA, 133 bp, Homo sapiens
gagataatgatgaagaagatccttcaaaattaaaagaggagcagcatggcatttcagtcactggtttgcagagtccagggcattttgtcagtgatgctgatctttgccttcttccaggaacttgtaatagctg

SEQ ID NO: 366933 - DNA, 100 bp, Homo sapiens
tggcaatgaaagtagttaaaagtgctgaacattacactgaaacagcactagatgaaatccggttgctgaagtcagctaagacatcaagcacacaaagaat

SEQ ID NO: 366934 - DNA, 100 bp, Homo sapiens
ggagttcttacaacatggcagacattgacaacaacatggccaacgccctggccagcgccacttgcgagcgctgcaagggcggctttgcgcccgctgagaa

SEQ ID NO: 366935 - DNA, 100 bp, Homo sapiens
gtgaatgtcagtagcctctcactgaatgagcctgaagacaaggatgtgactgaacagattatggcctttgcaagcaaatgagtactcctctcctaaagaa

SEQ ID NO: 366936 - DNA, 82 bp, Homo sapiens
gtgctctcgccccaacccgcgcgccagcagccgaatccagtggagcagcgttacatggagctcttagccttacgcgacgaat

SEQ ID NO: 366937 - DNA, 100 bp, Homo sapiens
ccgcagtgattgaagctttgataaatgaaatcttcctaagtataggggaagtcatctacaataagaccgaccgagccggctgccatttctacgcagtgtg

SEQ ID NO: 366938 - DNA, 100 bp, Homo sapiens
ctggaaaggaccgtccacccctccgcgctggcggtgtggacgcggaactcagcggagaaacgcgattgagattatgtttgagaccttcaacaccccggcc

SEQ ID NO: 366939 - DNA, 100 bp, Homo sapiens
aaacatttcagggcaagccaattatggatgctggaggtcagcagattggcttcttgctaggaagctgtggtattgccttagctcttaccagtgaagtttg

SEQ ID NO: 366940 - DNA, 75 bp, Homo sapiens
taaggattccaagtaactcttatttggaaacctatgagaatatcccaggccagtcaaagatcacattcctcttac

SEQ ID NO: 366941 - DNA, 83 bp, Homo sapiens
ttacttctatagaaatggctgaaggaaaacctccttatgctgatatacatccaatgaggaccaactgccagagttttctctgg

SEQ ID NO: 366942 - DNA, 76 bp, Homo sapiens
gttttttcctgtatgaagcggttggcaccactgaagtgaccgaatgaggttggacgtgataagtatgagcctgcag

SEQ ID NO: 366943 - DNA, 80 bp, Homo sapiens
tactcttcagggatgagtcatgtggcagtggaaaatgcgctcgggctggaccagcagggaccttaaaccggaaaacattt

SEQ ID NO: 366944 - DNA, 74 bp, Homo sapiens
aagctgatggtgaatgtgtgcggacacactctctgcctgctgaagatgaagtcttactacagaaattaagagag

SEQ ID NO: 366945 - DNA, 122 bp, Homo sapiens
cgagaggtggttacattcgttgaaggacaccagctgcggaatttgcggctttggcaggaaagaccacagcaagattctttcattcgtctcctcctagcctgggggaccaggctcgaactgac

SEQ ID NO: 366946 - DNA, 100 bp, Homo sapiens
gtgggtagtcctggagtcaacggtgctcctggtgaagctggtcgtgatccgattccacgactcttctttgcgggagaacatacgatccgtaactacccag

SEQ ID NO: 366947 - DNA, 74 bp, Homo sapiens
gcggaacgcaggagacacaagaagcggatccaggtcatttggatccaggattcctagcaagtgacaaaacatct

SEQ ID NO: 366948 - DNA, 100 bp, Homo sapiens
ctgacctcatgatccaccggcctcggcctcccaaagtgctgggattataggcgtgagccaccgtgcctggctgaagccaataggagctctgaacccaaaa

SEQ ID NO: 366949 - DNA, 75 bp, Homo sapiens
ggtggcgctcaagtaccagcagcaccaggagtccctctccgcccagttacaagacccaacatgagtgaagtttcc

SEQ ID NO: 366950 - DNA, 100 bp, Homo sapiens
agatcgccaagctgtacgagctgcacgtcttcaccttcggcagccggctgtacgcacacaccatcgcagccacaaagatccaagctgcctggaggggctt

SEQ ID NO: 366951 - DNA, 50 bp, Homo sapiens
atctctttctccacccatcccgagaacagccctcgggaccaaggatcacg

SEQ ID NO: 366952 - DNA, 98 bp, Homo sapiens
tttactactgtgacaacattaacgacagttgatattcataaagagaaagttgcaagaagagaaattggtattttgactaccaataaaaacacttcaag

SEQ ID NO: 366953 - DNA, 75 bp, Homo sapiens
cgccatcgttgctgccttcttcgtcaaggcagctatcaatggtgtaataccacaggaaaatggcattctacaaag

SEQ ID NO: 366954 - DNA, 100 bp, Homo sapiens
atttggggaccagagatggacggtcactcagcctatggagggcagagcggcttgggtaaatccaccttaatcaacaccctcttcaaatccaaaatcagcc

SEQ ID NO: 366955 - DNA, 82 bp, Homo sapiens
tggtgccggcgtttgggctacggttgttgttggcgactgtgcttcaagcgctttcagcttatgtggagaagtcgctgtgaag

SEQ ID NO: 366956 - DNA, 75 bp, Homo sapiens
gttgatccatccagatgaggatatatccctgccaaatttgtatcctactgtggggcttcaaacaccaggagaagt

SEQ ID NO: 366957 - DNA, 75 bp, Homo sapiens
cgaacaggagtaaagaatggctgttgaacatccacaaggcacctgcaagctcgactttctcaggatactgtccct

SEQ ID NO: 366958 - DNA, 98 bp, Homo sapiens
cctgtggcctcgctcctcggagggagcatttcctccctctgctatttatacacggaaagacttactacagcgatctacccatattgccaccaagactt

SEQ ID NO: 366959 - DNA, 100 bp, Homo sapiens
tgtggctgcaagatacggtcatgagcttttgattaacaccttaataaccagcggagctgacacagccaaaaaacatccagtacagacctttctgatatcc

SEQ ID NO: 366960 - DNA, 110 bp, Homo sapiens
atgcatgcatgtaccgaccttctgaacaaggccaacacctatgcagatttgctttgaggtcacattgatatgaaatatggagtcaccttttataacttcacctgggaaag

SEQ ID NO: 366961 - DNA, 90 bp, Homo sapiens
gccgctggggtcccttttgcctcagatactattttgaagtcttccaggatctcaaccagttctctcactgcagagtctggagaagcccag

SEQ ID NO: 366962 - DNA, 105 bp, Homo sapiens
cgacagaaggcgtctcatggcgttggaataccggctctcagcggctatgactttgaagaagccaaggaaattttgacaaagatgagatacttttcaaatatagaa

SEQ ID NO: 366963 - DNA, 100 bp, Homo sapiens
accatccgttcaattggtacaaagctgagggcagaggtggctcagagagaggcggagaccttaagggaacagctctcatcggccaatcactccctccagc

SEQ ID NO: 366964 - DNA, 82 bp, Homo sapiens
gcctcctgattagctgggattacaggttgcctgtggctggagaaaggaatgtgctcatcaccagtgccctcccttacgtcaa

SEQ ID NO: 366965 - DNA, 101 bp, Homo sapiens
aagaccatctacatctcccacaggaagtgtcacacagcagtcaagtatgtcccaaacgtctgtcagcagcaaggacaagatggagtaaaagtccagcaagc

SEQ ID NO: 366966 - DNA, 50 bp, Homo sapiens
agattgggttcttggtgcttggcatgaggccaacaaatggaattttcttg

SEQ ID NO: 366967 - DNA, 90 bp, Homo sapiens
aatgggcagtgtctaccagatattgttctgaaaatccagaatggcttgatgtttacatgcacattttacaactgcttactacagtggatg

SEQ ID NO: 366968 - DNA, 100 bp, Homo sapiens
gatgaggggagcatgggtgccaaggagtcacggatcggattcctcagctacgaggaggcgctgaggagaggtattgctggccttttcacaattttctcaa

SEQ ID NO: 366969 - DNA, 73 bp, Homo sapiens
ggcttcgaggtgaactggaccgagcagcagcagatggatggccaggccatgttatgggatctcaacgaaggca

SEQ ID NO: 366970 - DNA, 100 bp, Homo sapiens
gaaggagctatcctgagatctgtactgctacaatcatttggggaagaatctacagttgctgatggacagagtggatgaaatgagccaagatatagttaaa

SEQ ID NO: 366971 - DNA, 98 bp, Homo sapiens
tgtggatacctatctaaaagaagaaaactgatggctaagtttgcatgaaaactgcactttattgcaaacattgctacaagtggttggtgtggtctctg

SEQ ID NO: 366972 - DNA, 75 bp, Homo sapiens
ctaagggagaagtggacagaagaagatattgctccatatattcagagaaacctcaattatttttccaatgcttat

SEQ ID NO: 366973 - DNA, 99 bp, Homo sapiens
atttcttgctggttgaatacctccctctccactcccatcttcagggtgaccaagaatatggcccaggtgaccaaagccctggacaaggccctgagcacc

SEQ ID NO: 366974 - DNA, 97 bp, Homo sapiens
ggagaagcctttaatcggttagacttctcaagtgcaattcaagatatccgaaggttcaattatgtggtcaaatagccggatcgagctgggagatgtg

SEQ ID NO: 366975 - DNA, 75 bp, Homo sapiens
ccgagctccagccgaaggagaaggggggtaagaatgattgatgttggctgatattggagtgctcattcacatgaa

SEQ ID NO: 366976 - DNA, 83 bp, Homo sapiens
ctagttttgtacccatcagcgcaggagaaggtgctccagagatcttctgttcttcagaccctcaaactgacacaagacctaca

SEQ ID NO: 366977 - DNA, 97 bp, Homo sapiens
gaacccatcgcttctgctcagtttggtgctactgcaggaacagaatgccgtgagagaacgccgagccgtcgccgcagcctccgccgccgagaagccc

SEQ ID NO: 366978 - DNA, 100 bp, Homo sapiens
caactgacaagcccttgcgcctgcctctccaggatgtctacaaaattggtggtcctggtgaacgccatcatcaacagtggtccccgggaggactccacac

SEQ ID NO: 366979 - DNA, 101 bp, Homo sapiens
gaaagcgacaccgaggaattctatgatgcccctgaagatgtgcacctagggggcggctaccccgtggggccccttcacagatgtagtcactacaaatctta

SEQ ID NO: 366980 - DNA, 100 bp, Homo sapiens
gcagtggtcgcttcttctccttgctaccaggtgcagggtactaaaacatttaaaggtagaaaatgcaccaattgtaaaccgatttgactatgcacagtgc

SEQ ID NO: 366981 - DNA, 74 bp, Homo sapiens
ggcgtgggcaagtcggcgctcaccatccagttcatccagggacagagcagaatgggctgatatagatccggtgc

SEQ ID NO: 366982 - DNA, 82 bp, Homo sapiens
aaccgagagtgcctcatctacagcagctgcgcaaaccatgcaggatgatttactgatggacaaaagcaaaacccagccccag

SEQ ID NO: 366983 - DNA, 83 bp, Homo sapiens
aagctctccgtggaacataagcagcgtcccaaggtggagctgatgccaagaatgcggctggccacgcccagatttcttctacc

SEQ ID NO: 366984 - DNA, 75 bp, Homo sapiens
ctggagcggcggcgggcaggcgtgcggaggacactcctgcgaccaggtgagaagccctaccactgcaactgggac

SEQ ID NO: 366985 - DNA, 48 bp, Homo sapiens
gtaaatctcccaagtccaaagggacagtcattttgtttactcattcag

SEQ ID NO: 366986 - DNA, 75 bp, Homo sapiens
taacttctctgacatagtagaaggtgtttctgaaagatctatccagcactccgatggccagcaacaacaccgcca

SEQ ID NO: 366987 - DNA, 100 bp, Homo sapiens
ttgaagaacctaatcttgctggtgaagcactggtaccaccagaacattaaccaggtggtatttgttggaaatttcttgagaattaatacgatcgccatgc

SEQ ID NO: 366988 - DNA, 83 bp, Homo sapiens
cttcatcaaaaatagtgatagctttgataatgtcttaaagacttttctacatgatcctcttgtggaatggagtaaaccagtga

SEQ ID NO: 366989 - DNA, 100 bp, Homo sapiens
caaagcaacagaagtttatcaaggctgtcacacatcaagttaaatttggtcaacaaaatccacgtcaggtcttgacccctgaatttaagaaattcttaaa

SEQ ID NO: 366990 - DNA, 75 bp, Homo sapiens
tttagcagctagtaacttcacttatttcaggaaggtggaagcaggagcacctgtcacagctccctggaatcgaca

SEQ ID NO: 366991 - DNA, 75 bp, Homo sapiens
gtgaggagtttaaggagctgaaagcgcggaaggcactgatcctgaaactgaagaccccaaccacctccctccaga

SEQ ID NO: 366992 - DNA, 100 bp, Homo sapiens
tggacacacgactgggaaacctctccatttcaaaggatgcccttttcatcgaaacgcaaacatgcagatctttgtgaagaccctcactggcaaaaccatc

SEQ ID NO: 366993 - DNA, 98 bp, Homo sapiens
agccctcccaaaggatttgatacgactgccataaacaaaagctattacaatgtgataacaacgaacttgatgcaagtgataggtttgccaaggtcaga

SEQ ID NO: 366994 - DNA, 83 bp, Homo sapiens
gtccaggttcaccagctgctcgccgggagcggcggcgcccggacgccgaggcgtctctggccgagcctctttttgtggaaaac

SEQ ID NO: 366995 - DNA, 74 bp, Homo sapiens
ttcgtctttatgcagaagagggctatccagtcagttcgctgctattcccatgggtcacaggagacagatgagga

SEQ ID NO: 366996 - DNA, 100 bp, Homo sapiens
atggggtggagacgtggtactcagcaagctcgagttaaagttggatgtgctggaacagacgctgaccggaaaggagattgagattgacattgaacctaca

SEQ ID NO: 366997 - DNA, 76 bp, Homo sapiens
cagccaccgagaaggctacggcaccatgtacatgaagacacggcttttccaggttttagctaaagaagatactgag

SEQ ID NO: 366998 - DNA, 82 bp, Homo sapiens
cacacaccctcgtattctcctgcccttccccaggtgcatggctgcctcctaatcccatagtccagaggaggcatccctagga

SEQ ID NO: 366999 - DNA, 86 bp, Homo sapiens
ccatgccgctcctaagcctgcacagccgcggcggcagcagcagtgagaggtgtgcccccgagagcctgaagacacgcaccttctcc

SEQ ID NO: 367000 - DNA, 75 bp, Homo sapiens
agacaggcagaagaggacagacagatggacactgaggatcaaaatacttgctggatggtggactcagagaccaat

SEQ ID NO: 367001 - DNA, 100 bp, Homo sapiens
gcgggagggctcgggccggttttccctgcccggagccacgtgcttgcaggaaagaccacagcaagattctttcattcgtctcctcctagcctgggggacc

SEQ ID NO: 367002 - DNA, 100 bp, Homo sapiens
catcaacaagctgaaccccaaacccaaattcttcgttctgtgcggcgacctcatccacgccatgccaggtgtcttcatctgctgctggttcaccatcctt

SEQ ID NO: 367003 - DNA, 100 bp, Homo sapiens
ggaatgtgaagagacatgagatggtaactgaacccccaggccaggagtggtggctcacacctgtaatcccagctctgggaggccaaggccagtggattgc

SEQ ID NO: 367004 - DNA, 50 bp, Homo sapiens
gtattctggtgcttatggtgcctcaggactctgtctactagtgacgatgt

SEQ ID NO: 367005 - DNA, 90 bp, Homo sapiens
gaagcccaagcccatcccctatatttatggcaggtggagccgccaccaaaatgcagattttcgtgaaaacccttacggggaagaccatca

SEQ ID NO: 367006 - DNA, 100 bp, Homo sapiens
ccgacgcgctgttgcccgcggccccccagccgctggagaaggagaacgacggctactttcggaagggaccgacgtcatggttcggtgcctcaagctgctg

SEQ ID NO: 367007 - DNA, 82 bp, Homo sapiens
cttcaatccagttccaaggactccacggggaactgtggctgcaccatctgtcttcatcttcccgccatctgatgagcagttg

SEQ ID NO: 367008 - DNA, 100 bp, Homo sapiens
ccggggaaccaaagctctcatggatgaggtggtgaaagccacttctaggggctgcatcaccatcataggttgcaagacaacagacagttcagaggcaggg

SEQ ID NO: 367009 - DNA, 90 bp, Homo sapiens
gttgctgtcatttctggagaagccctgggaataaagagtcgtgccccaatttctgcaaaacttgtggccaatatgctgtcggtggctggg

SEQ ID NO: 367010 - DNA, 76 bp, Homo sapiens
ctccacatcgccttttgccacctttccctttatttccggagtgttatagttttgccgctggactcttccctccctt

SEQ ID NO: 367011 - DNA, 75 bp, Homo sapiens
agagcaagatcaccgtgacatccgaggtgcctttctccaaaaggttggtcaaagaaaaagtgatgtatgaaaaag

SEQ ID NO: 367012 - DNA, 100 bp, Homo sapiens
ctggaagttacttgtggacatgaattatatccagatcgagagacagaagattctgaaagggttcaatgaaatgagagtcatcttggacaatgaggagcag

SEQ ID NO: 367013 - DNA, 82 bp, Homo sapiens
cagaagtcgcgtgtctaggtgagtcgcggtgggtcctcgcttgcagttcagcgaccacgccagcgtcccatgctcggtggcc

SEQ ID NO: 367014 - DNA, 100 bp, Homo sapiens
tctttctggccgccgatatcttcgccatcgccagcatcgccaacccggactggatcaacaccggggagtctgcgggaactcattatacaatgacaaatgg

SEQ ID NO: 367015 - DNA, 50 bp, Homo sapiens
ctgtacagggtttctgacctgtgggaacgatcagcgttggagtagatgcc

SEQ ID NO: 367016 - DNA, 48 bp, Homo sapiens
cttatgggacttgaggccctcaagacagtgatctgacacaaacacagc

SEQ ID NO: 367017 - DNA, 75 bp, Homo sapiens
gatgaagcaaggcccaatgacccaggcgtacaaaacgtttaattgtggatgtcatccggttccagccaggagaga

SEQ ID NO: 367018 - DNA, 98 bp, Homo sapiens
ttagaagtcgggattaatgaaaattgtactcagctcaggtgaccaaagccacgtaatgtccgtagttcgctcatccgtccatgccagatggattgtgg

SEQ ID NO: 367019 - DNA, 100 bp, Homo sapiens
tctacctgggcacgacgtttgcaggggccatgtatattttggggaccatcgagatttttctggtactaccgctgtgaccgaaacctggtgtggaacgcag

SEQ ID NO: 367020 - DNA, 100 bp, Homo sapiens
gcgggccaactttgatgaagaaaatgcgtttcattgtttgcggaacttttcaacgaaatgcttcaaagagattttggtgtccgtatatacaaatcattac

SEQ ID NO: 367021 - DNA, 75 bp, Homo sapiens
ctgcaactgtgtctgatggcggagtacttgattcttcagaaaacctccaaagtagatgtggactcaagtggaaag

SEQ ID NO: 367022 - DNA, 99 bp, Homo sapiens
ggaagtctgaattccagtatctgggatggatctgaagttctgaggcgaatccgaggaccactgcttgctcagcttaacagagcgttccaaaaagaggac

SEQ ID NO: 367023 - DNA, 100 bp, Homo sapiens
acagcagatgtaccctcagtacgccacctactattacccccagtatctgcaagccaagatacacagtactgtttgacagttcatcacttcaccagccacg

SEQ ID NO: 367024 - DNA, 75 bp, Homo sapiens
cctggaacttcatcatcatctacttcacaggaattgccattttactatactggcaattgctggagaagattttgc

SEQ ID NO: 367025 - DNA, 100 bp, Homo sapiens
gacggctgcgtcgcccgaggcgaggaggagcgctggcgatcggtcgcttggttatcggacagaatggaatcctctccacccctgctgtatcctgcatcat

SEQ ID NO: 367026 - DNA, 100 bp, Homo sapiens
gtattgcagaggagtcaatgctattgtttcaaatctgaacatcaatgatgtactagggaactactcattgactcttgttgatgcattggatacacttgca

SEQ ID NO: 367027 - DNA, 100 bp, Homo sapiens
tggtcgtagcggtgctggcatccgaacaccgggtggctggtgcagccgaggtcttcgggaattccagcgaggatatctgtatgcccttggacagaaggtt

SEQ ID NO: 367028 - DNA, 49 bp, Homo sapiens
gttcatcttcctcaaaactatgcgaggtctgctccagctcagccacctg

SEQ ID NO: 367029 - DNA, 144 bp, Homo sapiens
gccatcctcattgggatgagccagtggaactccaatgacctcgtggagcagatcgagaccatggggaaactggacgagcatcaagtgtttctgccacccacttagcagacaaggtagaggaggcagttctggatcgtttgaagc

SEQ ID NO: 367030 - DNA, 75 bp, Homo sapiens
gtggccgccgtgcaggcggccgtcagcaacctcgtccggcaaaatgatgcttcaacacccaggccaggtctctgc

SEQ ID NO: 367031 - DNA, 97 bp, Homo sapiens
gaggagtaggaagtaatatgagcaggaactcttgggaggccagaacaaccaacctgcgtatggaggaagaaatagaatttctctacaatgagaacac

SEQ ID NO: 367032 - DNA, 97 bp, Homo sapiens
gtcggaggctgatcgcgcccagaagattgtgaaaactgctgagagagacttgcaatccagtcacataagtataataaagaaatattggtcctcatgg

SEQ ID NO: 367033 - DNA, 83 bp, Homo sapiens
tccttcacgcaggctttaagatgatgagcaaaatcatggaagggaagtggttgctgtgtatgttactggtgcttggaactgct

SEQ ID NO: 367034 - DNA, 74 bp, Homo sapiens
cgccgtcttcatccccgtgaaccgctccccggaaatgcagtcactctctgaaagagaacaaagtaattttctga

SEQ ID NO: 367035 - DNA, 90 bp, Homo sapiens
cgagcagcgccctgggagccctcacgagtcccgatcccagattacaggaatgcagtaatcgtggccaagtctccagcctcggcgaagagg

SEQ ID NO: 367036 - DNA, 74 bp, Homo sapiens
aaaccggtagcgcttgcagcatggcttcgggagcaggaaagaaaagaagcagaagaagctagtcaaaaggaaat

SEQ ID NO: 367037 - DNA, 75 bp, Homo sapiens
cggttgggccggtgtactttcccggaatcagagaagatcattgctgagttgaatgaaacttgggaagagaagctt

SEQ ID NO: 367038 - DNA, 100 bp, Homo sapiens
cggagagccccggagtgagcggagtagcgagtcggcaacccggagccaagaaatatttttcttcatggccctgatcagcaagtaaaaataggagactttg

SEQ ID NO: 367039 - DNA, 74 bp, Homo sapiens
caatgtgcccccatactgcacagagactagacgcttgaagcaaagctgccatcccagaagacgacatgctctca

SEQ ID NO: 367040 - DNA, 97 bp, Homo sapiens
gccaatcattaaagaaattttaaaaaattttccaaaagagagatgaggggtgtttgatgcttccctcaaaatggctggcttctatggattgtatacc

SEQ ID NO: 367041 - DNA, 96 bp, Homo sapiens
gaaacttttatctcatctggcttggcgcctgaggttctcccattagactctaaaatagagctcaagcttgagaagagagaaccactaaagggcaga

SEQ ID NO: 367042 - DNA, 75 bp, Homo sapiens
aaacctcaagtatacaattaaatggcaattaagttggaatatgcaaggttggttaagttggcccaagaagacacc

SEQ ID NO: 367043 - DNA, 100 bp, Homo sapiens
cgtctctctgctgcggcgcggggaccgctgtgctctcgaattctgcttggtcagaatcgtgatggcattgtgttcagcactgatgactattttcaccatc

SEQ ID NO: 367044 - DNA, 90 bp, Homo sapiens
gggtatcatggaaggcaactgtgtttcacttaccagaatactacgttcagctaaattaagaaaagcatcagatttttctttggaagcatc

SEQ ID NO: 367045 - DNA, 83 bp, Homo sapiens
gcggctgcgaaggcggcggctcctgccctctcgctttccctctcgcgtctctggctgcagacaccattcgcttttcacccaag

SEQ ID NO: 367046 - DNA, 130 bp, Homo sapiens
gtcgcttgaaaagactgggcttgtccttgctggtgcatgcgtcgtcggcctctgggcagcagacaccaaatggattgcttctgactccgagtccactgctctccagcatacatttctggagcagccttag

SEQ ID NO: 367047 - DNA, 99 bp, Homo sapiens
gttgtgtggtcgcgtctcggaaaccggtagcgcttgcagcatggactgactgcattgcacagatgatggatatttacgtatgtttgaaacgaccatcct

SEQ ID NO: 367048 - DNA, 90 bp, Homo sapiens
gggcaggggcggaggcggaggcagaggtggaggcgctttgaaagcgctcctggttgcagccagaatgcatgacttcaggaggactgtgaa

SEQ ID NO: 367049 - DNA, 136 bp, Homo sapiens
cgcggcccggggccgagccggccggcctggcgcacctggactattaccacggcggcaagaatttttccgagagctcctggagaatgcagaaaagtcactaaatgatatgtttgtacggacctatggcatgctgtac

SEQ ID NO: 367050 - DNA, 82 bp, Homo sapiens
agcagagacatcccgatctggggaaacctcctgccccccgaggtctgcagtctcctgaacccagcagccatctacgccaaca

SEQ ID NO: 367051 - DNA, 51 bp, Homo sapiens
ggatctgtatgctttgagcaagtttctggaactaatgcaactgaagtatca

SEQ ID NO: 367052 - DNA, 83 bp, Homo sapiens
ccactgtcttctcttcctcctccaccgagtcgtgctctcgccccaacccgcgcgccagaacatacatatgatagttgagaaag

SEQ ID NO: 367053 - DNA, 98 bp, Homo sapiens
ggctgcccacctaccgctaccacgtcctgctggggctagtcgtgtccctgggcggcttgacggagtcgacggaaaccactgattgcttgtgtggagaa

SEQ ID NO: 367054 - DNA, 101 bp, Homo sapiens
atgactttgaatgggtgcatgttagtgctcaagagcctcattatctaccacccgagatgccccaagtaggtaaccagttaggggccttggtacatcaaagg

SEQ ID NO: 367055 - DNA, 82 bp, Homo sapiens
agggcctgcagcgggagctggacggcgagcgcgagcggcgcgagaaactccatgtccatccgctggccgggccgccccctcg

SEQ ID NO: 367056 - DNA, 80 bp, Homo sapiens
caaggaccatactgtgcgctctactgattatgtggtagctatcctcaagagctcatagtgcctgcctggatcactgacaa

SEQ ID NO: 367057 - DNA, 103 bp, Homo sapiens
caaggtcggcagagcaaggggcttacgcagaaggacctggccacgctctacgaactcgacggggaccccaagaggaaggaattcctggatgacttgttcagct

SEQ ID NO: 367058 - DNA, 98 bp, Homo sapiens
gtgactattcagatcatccaagtggaggttcctacagagattcatatgagagttatggggccaagaaatgaagcttcaggcctgtgaagttggagagc

SEQ ID NO: 367059 - DNA, 83 bp, Homo sapiens
gccaacagtgtaccagcagggcgttggctatgtgcccatcacaggttgggcccgaaggcatcctgcagaacggggctgtggac

SEQ ID NO: 367060 - DNA, 129 bp, Homo sapiens
gctggcccccgatcaccatgtcggctttcgacaccaaccccttcgcggacccagtggatgtaaaccccttccaggttgattcttcaccacactgaaaccattaggaaaaatccttgtggttaacagcag

SEQ ID NO: 367061 - DNA, 83 bp, Homo sapiens
cgaggcaccgaggcactcagaggagcttcctgggtctgcaggtccagccggctggcaccctccatgtacccaggggagattcc

SEQ ID NO: 367062 - DNA, 75 bp, Homo sapiens
cccgggccatggccgccgccgatgccgaggtgaccttgggaaaggtgttgaaagtgatcgtcgtcatgcggagcc

SEQ ID NO: 367063 - DNA, 75 bp, Homo sapiens
ttaagagaagaagttaaaacatttcagggcaagccaattatggttcttcacacacccccattcggcgtagtaccc

SEQ ID NO: 367064 - DNA, 101 bp, Homo sapiens
tccaaggaaacatcacgcaaatccagatctccatttgccaggagatgcccagcctggaggtgatcacgctcaggtacctcgctcctgctgtcatgctcagc

SEQ ID NO: 367065 - DNA, 87 bp, Homo sapiens
tttaagaggtctgcctggttctgggaaaacaacattgtctcgatgtaatgatccccgaaagccctgaggcctatgtaaaactcacag

SEQ ID NO: 367066 - DNA, 50 bp, Homo sapiens
agagtgttgagaagtttattcagaaaagtgaagatgaagctggatgtagc

SEQ ID NO: 367067 - DNA, 82 bp, Homo sapiens
gaccagtgaggcggccgccgcagcccaggcgcgggggcgacgacaggtcaaaatgcagatcttcgtgaaaacccttaccggc

SEQ ID NO: 367068 - DNA, 75 bp, Homo sapiens
ggggggccggagaggagcatgaatggagcaaaatggcggatcatgtgcagagctccgagaggccttcagagaatt

SEQ ID NO: 367069 - DNA, 101 bp, Homo sapiens
gcgggcagatcacttgagatcaggagttcgagaccagcctgctgcaagctttcttcctggtggcagatgacatcatggattcatcccttacccgccgggga

SEQ ID NO: 367070 - DNA, 100 bp, Homo sapiens
atgagtttccgctttgtggccacatggtgtcagatgaatatgagcagctgtcctctgaagcccagtgtgccatcataatgtttgatgtaacatcgagagt

SEQ ID NO: 367071 - DNA, 75 bp, Homo sapiens
ctggatattgatgcgccagtcactggtggcgacatgtctaagaatgtgagccagtcacagatggcaaaattgaac

SEQ ID NO: 367072 - DNA, 100 bp, Homo sapiens
ggaaccggatatttaagtacaatggtgggcttaattttaggcccttgatgggttcttctttgtagtgaacctggaaggcaacgttgtgtttgtgtcagag

SEQ ID NO: 367073 - DNA, 97 bp, Homo sapiens
tgtgggttccagcccttcaaccaacatcttctgccctgggtcaagtgtacaaccgtcttcagatctcatcctgtctcagaaagaagagtgggagagc

SEQ ID NO: 367074 - DNA, 98 bp, Homo sapiens
aagaaccgcagcagcgtggaagtgcgcatggagtttgtcaggcaggccttggcgtaccttgagcagagtggaagccgtgaggtggtggatgaaggctt

SEQ ID NO: 367075 - DNA, 88 bp, Homo sapiens
ggaggagctgctcttggaggggaagaaggcgctgcaactcggccactccccacctgtcctgcctttgtgtgcctctgtgtctttgctg

SEQ ID NO: 367076 - DNA, 95 bp, Homo sapiens
gaacggatctgtgtgcccacagctcctggagccccacaggccgagacgcatccagagctttcgtgaccggggactgttctgaagcaggcctcgtg

SEQ ID NO: 367077 - DNA, 80 bp, Homo sapiens
tgaagagcctgctgatgtcagtgggacccattcagcttcttaatgaagaggataactcagaatcatcggctatagagcag

SEQ ID NO: 367078 - DNA, 50 bp, Homo sapiens
gaacagtttcaggcagatataaaaggttttttgcatgtctgacacccatg

SEQ ID NO: 367079 - DNA, 50 bp, Homo sapiens
tggggacgcaggcgggtcgtagagagcggcaagttaaagtcttcagagcc

SEQ ID NO: 367080 - DNA, 75 bp, Homo sapiens
cactgaatgagcctgaagacaaggatgtgactcaaggtgtccctgccttcactgtgctccaacctgaaggtcccc

SEQ ID NO: 367081 - DNA, 75 bp, Homo sapiens
gttcggtcctgctgttgcggccgctgccccagggctgcggggacggaaaaccaattctgtgtcctcggaggacca

SEQ ID NO: 367082 - DNA, 75 bp, Homo sapiens
cagggcttggcaacccccaggatgtgacctattttgtggcctatcagagacaaccttttagtcctcacggtggcc

SEQ ID NO: 367083 - DNA, 98 bp, Homo sapiens
cacgcacgggatccagagcgccgcgcacttcgtcatgttcttcgcgccctgacctcctgccccccgaggtctgcagtctcctgaacccagcagccatc

SEQ ID NO: 367084 - DNA, 100 bp, Homo sapiens
caagcagactctgaagatgatcagacaaggcaaagcgaaattggtcattctcgctaacaactgcccagctttgagagatcgagatggtgatcatggagcg

SEQ ID NO: 367085 - DNA, 83 bp, Homo sapiens
caccttgtggccctgggctttaccatctttgtggctgtgcttgccaggcctggctccatttcactgttacatgccttgaagtg

SEQ ID NO: 367086 - DNA, 96 bp, Homo sapiens
ctttctcaagcactgtgatcttcaaatgtcgtgacccgccttatccacctactgagccagaaaattctagggaatttgcagcagctgcaaggaccc

SEQ ID NO: 367087 - DNA, 101 bp, Homo sapiens
tgcagcaactgcagatggagaaggagaggctgcggctgaaacagcaagaactgcttcggcagagcgtgcagcatgagaacacctaccgggaccccatagca

SEQ ID NO: 367088 - DNA, 50 bp, Homo sapiens
ggggaggaggttcttcagtgtatgcctgctgaatgtggtgcatctgcaac

SEQ ID NO: 367089 - DNA, 82 bp, Homo sapiens
caccacgcaccgactatgtcgcctgccaccgagccgggcccacctccccaccaaggaaggtggacgacatccttggagaagg

SEQ ID NO: 367090 - DNA, 82 bp, Homo sapiens
aaagacgctaaacgtgccctactctgccccgggggagaggagaatggggtactaagagaaaagcacgaagctgtggatcata

SEQ ID NO: 367091 - DNA, 75 bp, Homo sapiens
cgtggcatgtcgatttgtccttcactacaggctcacctttcgagtgcggagggtgacggacgccccccgttcaag

SEQ ID NO: 367092 - DNA, 100 bp, Homo sapiens
gatggtgggacttgataatgctggtaaaaccgcaacagcaaagggaatccaaggaggaaccattggcactggcaagtggggctctgccagactggtgtga

SEQ ID NO: 367093 - DNA, 98 bp, Homo sapiens
aaaacaagtccaaggatgaatcccagtccctgttacggcactttcagaccatgctgaagtctaaattgaatgtcttaacactgaaaaaggaacctctc

SEQ ID NO: 367094 - DNA, 100 bp, Homo sapiens
tctgattttaagctggcaaagtgggaaaaataaagtgttgagtaaacagaccaagttgggcggtgcgtctttctacgtgaataggattttgtggctggcc

SEQ ID NO: 367095 - DNA, 101 bp, Homo sapiens
cggcgccctggttctgcggatcaggcccgcagccgtgccgggtgctcttcagcatgtccttcatcccggtggccgaggattccgacttccccatccacaac

SEQ ID NO: 367096 - DNA, 98 bp, Homo sapiens
ggaagttacatctttggcaaagtctctcatcaaatcctggaaaaaattattaggggtttggtgcagaaagaaagatccgtcaagctggtgtcattgac

SEQ ID NO: 367097 - DNA, 107 bp, Homo sapiens
cttttctcagatgttggatatttgcttggaaaaacgtgtgggtacgaccttgggggatatgagactttctactcggaatatcctgagtgttgcgtggatgtaaaacc

SEQ ID NO: 367098 - DNA, 82 bp, Homo sapiens
gaagtggagcgtgtcctgaaggagttccaccaggccgggaagcccatcgggagtccatagaggccactgtattctattgaag

SEQ ID NO: 367099 - DNA, 75 bp, Homo sapiens
actggcatcatctgtaccattggccctggccaacgtcaacattgggagcctcatctgcaatgtaggggccggtgg

SEQ ID NO: 367100 - DNA, 90 bp, Homo sapiens
ggaagctttggagcagtgtattttgtttcagtgttgactggtgggctcttggagtgctcatgtttgagatgatggcaggaaggtctccat

SEQ ID NO: 367101 - DNA, 80 bp, Homo sapiens
atccgagggtgtcctgttacttccaagtcatcaccagaaagatatgtgattctgttggactggcaaaacagatagctttg

SEQ ID NO: 367102 - DNA, 100 bp, Homo sapiens
agacaggcagagtggaaaaaagagaggatttgcttttgtaacttttgatgatcatgatacagttgataaaattgttgggcacttcaaactccagtgcaaa

SEQ ID NO: 367103 - DNA, 46 bp, Homo sapiens
cgcgcaagtcttcttcctcaaagcaggatcaggcaaaaatgatcat

SEQ ID NO: 367104 - DNA, 75 bp, Homo sapiens
tccttgctaagcattaccaagactgcatggaagacatggatgggcgggcaccagctgacttccctacacctagta

SEQ ID NO: 367105 - DNA, 101 bp, Homo sapiens
gggcattgttattgatggatttccaagagatgttgcccaggctctatcttttgaggaccaatcgaacaaaaatctggatatatcaattaatgcatcaaaca

SEQ ID NO: 367106 - DNA, 97 bp, Homo sapiens
agggggcggcaccgccggtcggctccagtcgcctccggaggaaggaagaagaggacgccgggcgcgcaggtcatttggatccaggattcctagcaag

SEQ ID NO: 367107 - DNA, 83 bp, Homo sapiens
ctttgaggtgcttgtcggtctggactgatgaaaatccatatgcaattctgtggtgttcttggtcacacatttatggagtttct

SEQ ID NO: 367108 - DNA, 88 bp, Homo sapiens
ccttttaagcaaggaaattgaactaagaaatggagagtcctcctgcatatgcccaagaggattgggagtggaatggacaccagcagaa

SEQ ID NO: 367109 - DNA, 100 bp, Homo sapiens
cactatggtcgtgagagtcgtcagtgccctattccttcacatgtaattcagaaattagggacaggtggatgaaagccaaactggagaacccggctggctt

SEQ ID NO: 367110 - DNA, 90 bp, Homo sapiens
ctccagtcaagacaattctgtgaagttctttggggtgactttcaagatggactctactctaacagcaagtgaaatccggcagcgatttat

SEQ ID NO: 367111 - DNA, 120 bp, Homo sapiens
gatcctctaacatcacctgcttcatccttgtttaatgactttggtgccctcaacatctctcagagacgaaagcacacttcatagctgccacgatatagttttacgaagaagttacttggg

SEQ ID NO: 367112 - DNA, 82 bp, Homo sapiens
aagatcctgggcagcctccagcagggacctgtgacagctgcggataaccgtctggtccttgtgcacaaaatccgtgtcttac

SEQ ID NO: 367113 - DNA, 100 bp, Homo sapiens
cctgtttgagagtgggaacatgacgcaggtgcaggtgtctcttctcgccctggcggggaagggtatttgaagtataccatacaactgttttgaaaatcca

SEQ ID NO: 367114 - DNA, 100 bp, Homo sapiens
gcagcaacatggaggaattcgactccgaagacttctctacgtcggaggaggacgaggactacgtgccgtcggatgcttgtttgctactgatgggtgtgag

SEQ ID NO: 367115 - DNA, 100 bp, Homo sapiens
gaacgtgccatggagacgcttaacgactctcagcgttctcatctctcttccttcaccatgaagctgatggacaaattccactcacccaaaatcaagagaa

SEQ ID NO: 367116 - DNA, 100 bp, Homo sapiens
ttgggttttgccagattgcgccgggctcctctttgtgacgcgcggccagccccgcatcccccccggagccggggctggttgatatgtgaagagccaacct

SEQ ID NO: 367117 - DNA, 50 bp, Homo sapiens
ctcccactgattctacattatggcctttctctatagaaccagctattgga

SEQ ID NO: 367118 - DNA, 90 bp, Homo sapiens
gccagggcacgtcactgcaggccaggtgatggtaatgcccgaaggagcagacacggtgtccaggcccagtcccgactaccccatgttacc

SEQ ID NO: 367119 - DNA, 101 bp, Homo sapiens
gttcagagttctaggagtggaagaggagaaattggcgtgttagccaaggctttcattgaccaagggaaactcatcccagatgatgtcatgactcggctggc

SEQ ID NO: 367120 - DNA, 89 bp, Homo sapiens
aaaaatgactggacggaacttgccaagaagtctgagtaaaggcatgacttcctggcaccacagggaaaatcgggtgcaagcccagaaac

SEQ ID NO: 367121 - DNA, 75 bp, Homo sapiens
ttggagcgcagaaccggccgcgcccggggatgttcgtctaaccccagaagactttgctagagctcagaagtactg

SEQ ID NO: 367122 - DNA, 80 bp, Homo sapiens
cggacggcacaccctacgttaccgtgctcaaggagcccagcagccggggccgccctattacaccgacccaggaggaccgg

SEQ ID NO: 367123 - DNA, 100 bp, Homo sapiens
ggaacagcttgttcagatttaagcatcttgcaactggaaactatttagctgcagaggaactgcaagcacatgttgaccagataactgaaatggcagcagt

SEQ ID NO: 367124 - DNA, 83 bp, Homo sapiens
gtgctggccacttgcttgggatcctttatcctggtcatcttctatttccaaaggccatgaagcccccaggaggagaatcgagc

SEQ ID NO: 367125 - DNA, 75 bp, Homo sapiens
cagggctggctgtttctgtgcttaaagccatcttccaggaagtgcatgtacaggaatctatggatttcctgaaat

SEQ ID NO: 367126 - DNA, 98 bp, Homo sapiens
gacaacggagaccagacctactgcagccacgcgggcgagcggctgtgtggatgtcggcgaagccgcgggcgagtgtgacagcgagagcggcccggacg

SEQ ID NO: 367127 - DNA, 80 bp, Homo sapiens
cgggccccgggacctgggctgggaacccgcggtggagcgggacacgaacgtgtgatgtcttggcattgcccattttcaag

SEQ ID NO: 367128 - DNA, 75 bp, Homo sapiens
cttcatgatcatgaacttcttttggccaagctcaaggagtgtttctcaggagctatcagaaactatcctcaccat

SEQ ID NO: 367129 - DNA, 97 bp, Homo sapiens
tggacataaagaaagggaatactctggatgctataaaatcaccacggtctttagccatgcacaaacggtagttttgtgtgttggctgctccactgtc

SEQ ID NO: 367130 - DNA, 75 bp, Homo sapiens
gtttcagggagcagcaagacaatcactgcagagataccaggttcaagcgtcctcagtaagccttgttcagtgact

SEQ ID NO: 367131 - DNA, 100 bp, Homo sapiens
tgttgatagattggataaagatctgaccattggccagatgcaaggaggacttccggaataaagtggatgactacatcaaacgttatgccagatgataaaa

SEQ ID NO: 367132 - DNA, 100 bp, Homo sapiens
ctttgtctgaagatcctctgggtgatcatggttcagcgctttagcctcaggaggcagctatccaagtaagcccagaggtctccaccccacgggaggaagg

SEQ ID NO: 367133 - DNA, 100 bp, Homo sapiens
cggttgcactggaccaatttttaaacttatgaacatccaacagcaactaatggtttgtggtaaatatgccagctctagaacacatgaatcagattttaca

SEQ ID NO: 367134 - DNA, 100 bp, Homo sapiens
ctgagaaagtgagccagaaacatgctgagcctttgacagaaagaagattggcccatgcacaagctggaatgttctcccatggttgtttttggggaaaact

SEQ ID NO: 367135 - DNA, 80 bp, Homo sapiens
atcgcccaagtccctctactcgcgaggtcttccccagggaggtcctgaactacacagctgagaacatctgtaagtgggcc

SEQ ID NO: 367136 - DNA, 83 bp, Homo sapiens
agcggcggccgagttctccagcctgctgcgcaggataaaaggcaaactcttcacctggtcaaaatgcagatcttcgtgaaaac

SEQ ID NO: 367137 - DNA, 100 bp, Homo sapiens
cgaagaacactcgccaggacaactccatccttaaggcttggcttggactcatcgtcaacagcagcagcatcatcatcatcaccatcatcatcatcatcat

SEQ ID NO: 367138 - DNA, 74 bp, Homo sapiens
gctgatggaagcataagaacatgagaactgcgactcagcatgcagaagaggttgacggatatattcagacgtta

SEQ ID NO: 367139 - DNA, 75 bp, Homo sapiens
cctggacgacatcgacctgtccgccctgcggggagtggagcaactgctgtagtccaagcagcttattgtgcccct

SEQ ID NO: 367140 - DNA, 80 bp, Homo sapiens
ggccagatggactgatgggctgctatacttgggtaccatcaaaaaggaacaggcctttgagagcagccagaagtacaaag

SEQ ID NO: 367141 - DNA, 75 bp, Homo sapiens
ttggaatcttgggatccaatgttgaaggaaaacaggttttacagaaaacagacatgaagaccctgttaccagtaa

SEQ ID NO: 367142 - DNA, 100 bp, Homo sapiens
ccagtggatcagcttggcttcttatccaagttggtttatagagtcaattcctattggtttatcacatatgctgtctggctagtcctctgggttacgtgga

SEQ ID NO: 367143 - DNA, 96 bp, Homo sapiens
caaggaaacaggatgctgatagtctccagcgggcctggactgtgggctggtgtgtggaactggacagtcattttgtttactcattcagccctgttg

SEQ ID NO: 367144 - DNA, 100 bp, Homo sapiens
ccaccaaggaaatatttatgtttttgacttacatggaaacagatgagcccattattgaagagccaagccgcctccaggagtcagtgatggaggccagcag

SEQ ID NO: 367145 - DNA, 75 bp, Homo sapiens
ttaatgacctcaggtttgtcggtcgaagtggaagagaatgtggccccgtcccagagcaccacccgagacatcagg

SEQ ID NO: 367146 - DNA, 109 bp, Homo sapiens
cgcagttcttgtttgtggatcgctgtgatcgtcacttgtgggaatgtaagacggacttagatattgcatacaaatttggaaaaactgtggtgagctgtgaaggctatga

SEQ ID NO: 367147 - DNA, 51 bp, Homo sapiens
aagagcccctcatcgagctcttcgtcaagctaggacttctctcaaacttgt

SEQ ID NO: 367148 - DNA, 83 bp, Homo sapiens
ccgcagccaggagatggttcgggcctagcggagccgggactggaggtgagaagccctaccactgcaactgggacggctgcggc

SEQ ID NO: 367149 - DNA, 100 bp, Homo sapiens
accagtacagatgcatttgtcctccaggaaggactgggaaccgctgtcagcatcaggcccagactggagctttggttcggagacaggcaaaggagccatg

SEQ ID NO: 367150 - DNA, 100 bp, Homo sapiens
tgagcggcggcctcggcctccggcgcagcccggaaatgtccggcaagatcgagaaagcagatcttacagactctttcagcacctacgaaaaatttagaac

SEQ ID NO: 367151 - DNA, 98 bp, Homo sapiens
ggtcatggaagaacaactgacttgtccaagggtttggacagaggagccaaaggccaaatttccactttcagcagttttatttcagctgttagcccgaa

SEQ ID NO: 367152 - DNA, 78 bp, Homo sapiens
caaaagctccatttctatgaccgctgggctccggactacgaccagcctgggagctcccatcgaccatggcagtcctac

SEQ ID NO: 367153 - DNA, 83 bp, Homo sapiens
caatgtggcagccctgcctggaattgttcatctcctggatctcccaggtatcattgaaggtgccaaggatgggaaaggtagag

SEQ ID NO: 367154 - DNA, 98 bp, Homo sapiens
ccggcggtccacggccggaatggcagcaagctcagagctccactggttcaacagcctctcctccagtttcgaccccagtcacaggacacaagagaatg

SEQ ID NO: 367155 - DNA, 82 bp, Homo sapiens
ccgccggcagcgcgacaggaacccctccgagacccagtccaaaaggatgaccgagtgggagacagcagcaccagcggtggca

SEQ ID NO: 367156 - DNA, 97 bp, Homo sapiens
caggaaacatccaagaaaaatgtccttaaagcaattgagcaggctgatctactgcaggaggtgatttttgaagtgataacttctggacatcaaggct

SEQ ID NO: 367157 - DNA, 100 bp, Homo sapiens
ttgatacacctgtatttgaactaaagcttttcctactcttgccaagagggagaaaccaaggagctctggtcatcaggtcaccatctcaaggcctgccgag

SEQ ID NO: 367158 - DNA, 90 bp, Homo sapiens
aggaaatacccagactgttactacaacctcgggcgtctgagcgccgccctgtgctgggctgccgggagctcgtcttcaggaacctctcca

SEQ ID NO: 367159 - DNA, 98 bp, Homo sapiens
tcattgaagctatgcagtatttctttggcatcactgcagctagtaatttgccttctggattgtaagaatgattgatgttggctgatattggagtgctc

SEQ ID NO: 367160 - DNA, 100 bp, Homo sapiens
tgcaagaggaaaaagaaaggggaagaatcatgtgtctaatgttgtaagctgcagtacagcaatggcgatcagaaggtagaacagctgtatggctgcacat

SEQ ID NO: 367161 - DNA, 82 bp, Homo sapiens
tgaagtcggtgtctgctgcgttcacggcaggattcggttagacactaatatctggagctgtggtagaacaacttgatttcct

SEQ ID NO: 367162 - DNA, 76 bp, Homo sapiens
tcctgttcttatttgctttatatatcatgtgtgttcctcactcaggtgtagcaagtaatactatccaacctactcc

SEQ ID NO: 367163 - DNA, 74 bp, Homo sapiens
gcctcttataccccggactgcagaatcctcactatggatgggctcattgaggacattaagcatcggcggtatta

SEQ ID NO: 367164 - DNA, 75 bp, Homo sapiens
ccgaagcctaaattccaggagggtcatcatcagatttgaaatatttaaagtggatacaaaactatttcagcaatg

SEQ ID NO: 367165 - DNA, 99 bp, Homo sapiens
aacttcctccccaggaggattctaaggcagagactccccctaatgggccagattgtggctatggctcctttcaccagcagtactggcttgacggaaaga

SEQ ID NO: 367166 - DNA, 100 bp, Homo sapiens
cacttaagcaaacttaatataccagacactgcaactgcctggagcattggtaagcgtcacactgccaaagtgagagctgctggagaactcataatcccag

SEQ ID NO: 367167 - DNA, 98 bp, Homo sapiens
aagaatatgaaatgagtctggaaaactgggccaaagcagtgaaacgctccatgaattgtactaaggctcgtacgtctgcatcgattatcttacgtggg

SEQ ID NO: 367168 - DNA, 100 bp, Homo sapiens
tctatagtcccgagtatgtcagtatgtgtgactccctggccaagatccccaaacgggttttgacacaagggcgcatatcttcaaagcacctagtacctcc

SEQ ID NO: 367169 - DNA, 98 bp, Homo sapiens
atctgccttctactccatcgtgggactcagcagccttggtgctcaggtgccagatgcaaagctgtttgatgaagacaatccagtacacaagtctggaa

SEQ ID NO: 367170 - DNA, 90 bp, Homo sapiens
ccagacacgacgtctggcaggaacctcggcctcagagcttgcagttgcaaacaacaggatcattaccttacaagaagaaatggaacgagt

SEQ ID NO: 367171 - DNA, 75 bp, Homo sapiens
gattttatgtgctacagtctgcggaacggagcagtatttcaatgtggagaaacatcaatggattctcgacttcaa

SEQ ID NO: 367172 - DNA, 100 bp, Homo sapiens
tcctgcttctccttttcatgagtgttcctgtggtctctgcacctcctttcttggatggaactgaggttcaacactctggcaaaatgcccacactgcaaaa

SEQ ID NO: 367173 - DNA, 90 bp, Homo sapiens
gtagcccccacccctctccgtccatggccccagatgacacttcaggaaagaccacagcaagattctttcattcgtctcctcctagcctgg

SEQ ID NO: 367174 - DNA, 75 bp, Homo sapiens
atatgttttaaaagaattacagactactcttgtccgtggataccaggtctctaaagagcaacagaataattgcag

SEQ ID NO: 367175 - DNA, 82 bp, Homo sapiens
aaaacaaggcgattccgcagtccccccgttccctggaggtcctgtggaatgctttgaagatactgctataatttgaaaattt

SEQ ID NO: 367176 - DNA, 82 bp, Homo sapiens
agtcacaacagatgaagacagcaccaggttccaaatcatcaatgaagcaagtaagagtggaacagatgtgcattcagattaa

SEQ ID NO: 367177 - DNA, 50 bp, Homo sapiens
ctgctcatgaaccacttggcaaagttttgagcaaaattttggactgtgaa

SEQ ID NO: 367178 - DNA, 75 bp, Homo sapiens
tttcaaagatgaagatgaaaccaagcccttggaattggcagcaatgaaacagattctcgttaagatgcatagtaa

SEQ ID NO: 367179 - DNA, 100 bp, Homo sapiens
ccggcgtggagagccgccagggctctatcaaggggctggtgtactccagcaacttccaggaggcagttcccatgttatacgcagcagatacttacggagc

SEQ ID NO: 367180 - DNA, 83 bp, Homo sapiens
cgggtagctggcaggcgccgacttccgaaggccgccgtccgggcgagttcccatttcatcagaaccaccagaggaaggagaga

SEQ ID NO: 367181 - DNA, 75 bp, Homo sapiens
aaagagttaaaggtgttggattcaaagacagcccagaatctctagagacaagagagacacctccaacttcgacaa

SEQ ID NO: 367182 - DNA, 82 bp, Homo sapiens
cacggagtcgccgcggagcgcagccgaggtgctcggtggagtcatggcagtgccctttgtggaagactgggacttggtgcaa

SEQ ID NO: 367183 - DNA, 98 bp, Homo sapiens
tgcgcccgctgtcaccgccatggctgccccgtgtttgctgcggcaaggacgagccggggcgctgaagatggcctgatatgaaggagtcacgcctcccg

SEQ ID NO: 367184 - DNA, 83 bp, Homo sapiens
gaagaccatgacaggaggccgagcgcagagcattggcaggaggggcaaggtggaacaggtagtgggcagcagtcagtgacagg

SEQ ID NO: 367185 - DNA, 76 bp, Homo sapiens
cgagggcatcgaggacccccaggcactcctggagggtgtgaagcgtgagtgcatctccatccacgttggccaggct

SEQ ID NO: 367186 - DNA, 118 bp, Homo sapiens
cagggagtgatggtcagctaggactcatgactactgaggattctgtggcagtgcccagctttcaccaacaatcaccagtggtttacacaacattgcaaggagcattgaaactcgaaac

SEQ ID NO: 367187 - DNA, 83 bp, Homo sapiens
gacacggctttggaaacgacgtcatgtgttagttccagtctcatcagattttccatgtcctggtggtggcagcagcctttgtc

SEQ ID NO: 367188 - DNA, 98 bp, Homo sapiens
ctccagggccgggatttcactggcaaagtggttgtggtcactggagctaattcaggaataggtgtgatgaatgcagactctgctaccattttggctgt

SEQ ID NO: 367189 - DNA, 100 bp, Homo sapiens
caacaggcaggagaattatgggagcgcatttccccaggacacatcaccttcactttgggatatggaatttgataagcagttagccacagaatatgaacaa

SEQ ID NO: 367190 - DNA, 100 bp, Homo sapiens
cgggagcgcggcgcgggagcccgaggctgagactcaccggaggaagcggcgcgagcgccccgccatcgtcccggtgtcttctctttagggatggtgaggt

SEQ ID NO: 367191 - DNA, 50 bp, Homo sapiens
ttggttaaaacctgacacttttaacaggcgtcacctcctcctgtcgcctg

SEQ ID NO: 367192 - DNA, 74 bp, Homo sapiens
tctaatattacagctggaaatagggcacagatccagatggatcctgtgcaaaaagcggttattaaccatacatt

SEQ ID NO: 367193 - DNA, 50 bp, Homo sapiens
cccagccctgtctgttaagagtgagggagagcttatggatggagaccaaa

SEQ ID NO: 367194 - DNA, 82 bp, Homo sapiens
acgtcatttgctactatgggaaccgaggggagcctgatcctatcgttttgacgccaggaacccaagacagaccaggatgagg

SEQ ID NO: 367195 - DNA, 75 bp, Homo sapiens
cttatcccctcaacaacttttcagtggcaattctggagagtcttggcttctgggaggaagtcagagggattatct

SEQ ID NO: 367196 - DNA, 144 bp, Homo sapiens
ttgcacttttgattgtgtattatggataccaaggaagagaagaaggaacggaaacaaagttattttgctcggatgtaatccctgttcattactacttaatacctccaccaacaaagactaagaatggcagcaaagataaggaaa

SEQ ID NO: 367197 - DNA, 96 bp, Homo sapiens
cgacagcgctggggccctgtgtagaagctccatcccccttgtctttgtgcttgcctgcgtccccagactcagagggaatgcagagagcaaccaatg

SEQ ID NO: 367198 - DNA, 102 bp, Homo sapiens
aagaaaatggactccctggctgctggagagttgaatgccagccaccagccatggtggaacctggtgtgtgaggacgactggaaggccccactcacaatctcc

SEQ ID NO: 367199 - DNA, 100 bp, Homo sapiens
ttctcactaaaatgaaagaaaccgctgaggcttatttgggaaagaagcctgggttactaggtgtctttcagaagctgattgcatccaaagcaaatgacca

SEQ ID NO: 367200 - DNA, 50 bp, Homo sapiens
ggacaagaccatcgagctcatgcttttcgctgtggcctgcagtttttagg

SEQ ID NO: 367201 - DNA, 100 bp, Homo sapiens
agcagttacctgccagctgagcaactggtcagagtggacagattgctttccgtgccaggacaaaaaggtaatcaaatgcaaagcagctgtgctatgggag

SEQ ID NO: 367202 - DNA, 80 bp, Homo sapiens
agctcaagatggcggacaaaacgccaggcggatctcagaaggccagttcaaaggtgcctgtgtcagtggccatgatgact

SEQ ID NO: 367203 - DNA, 82 bp, Homo sapiens
atttgaaccactgaataaaccagacagcaccattcaggatgctggtttataccaaggacagcatttcatttagatagaagaa

SEQ ID NO: 367204 - DNA, 75 bp, Homo sapiens
ggaaaagctactattagaattgggcaagaggattatgacagattacgaccgctgagttatccacaaacagatgta

SEQ ID NO: 367205 - DNA, 51 bp, Homo sapiens
aacaaggtggacccgggaagagtaaccttcgagaaagctttgaatgccggc

SEQ ID NO: 367206 - DNA, 153 bp, Homo sapiens
ctgcaagcggcctcacagtcatggatctggaagctgagggcacgtgtttgcggttcagccctttgatgaccgcagcagattgtcctaaagcagttggatgggaaaagaaccagaaaggaggcatgggaccaaggatggtgaacctcagtgaat

SEQ ID NO: 367207 - DNA, 75 bp, Homo sapiens
ttacaggagtcctccacttgccactgggggcaagattcttgccaagagaattaatgtgcgtattgagcacattaa

SEQ ID NO: 367208 - DNA, 100 bp, Homo sapiens
agcccagctgctccaggatcctaggtcctgtgaaggcgtccatccaggagtgcatcctccctgacagtcctctgtaccacaacaaggtccagttcacccc

SEQ ID NO: 367209 - DNA, 90 bp, Homo sapiens
tgcacaaaagcaagataccctcgtggacctacacgtcctcccgcttttcaacaccctgatgcctgaaggctgaccggttccctgatgtgt

SEQ ID NO: 367210 - DNA, 75 bp, Homo sapiens
cgagaggcaaataggtgccatctcccaattacgagaactggtcagcatgtgcatctgccctgacccccaccagag

SEQ ID NO: 367211 - DNA, 90 bp, Homo sapiens
ccacgcctgggccttgctgccaggaagcttcggccccgcagctcggcttgctgcggtctcaggtcatgcttcaccccttcctccatctgc

SEQ ID NO: 367212 - DNA, 100 bp, Homo sapiens
cttgtccctgtttcgccacagttcctaccttatgagctcggttttcttatgcttataagagtggaacagtgtctttggtgcaacactaacaaggcttgtc

SEQ ID NO: 367213 - DNA, 98 bp, Homo sapiens
ttctttgtggtgctcaccttcatcgtcactatggcccactgcgtgaccttggttcagctgtccatttcctgtgaccatctcattgacaaggacatcgg

SEQ ID NO: 367214 - DNA, 87 bp, Homo sapiens
aggggtggtaacagagactgaaaggaattctcaaaatccagcccttgagtggaatatggccagcagccacgacgtttttccaccaca

SEQ ID NO: 367215 - DNA, 83 bp, Homo sapiens
ccgggcccaggccccggcagcgcctgggacaagctgcggttggatttctcacgatgtccagtgttatctccatgtctgcccct

SEQ ID NO: 367216 - DNA, 80 bp, Homo sapiens
ggccaacgacctgtttgagagtgggaacatgacgcagacaatgcagatcttcgtgaagactctgactggtaagaccatca

SEQ ID NO: 367217 - DNA, 100 bp, Homo sapiens
ctggctccgggctgagcttcctggagaagaggaaggactgagcagggggaggaacatttaagctgatggaagtggaagtggaagttgctgtacattggca

SEQ ID NO: 367218 - DNA, 75 bp, Homo sapiens
gagcaaaatggcggatcatgtgcagattggtttatcttggaagctaaagggcattgctcatcctgaagatcagct

SEQ ID NO: 367219 - DNA, 75 bp, Homo sapiens
ctgcagtgattttaaccaaggcagttggtggaaatgaggcactactgcagtcttcagttaagcaacaagtagaag

SEQ ID NO: 367220 - DNA, 99 bp, Homo sapiens
ttgtatctctaattggaagcacttccacgagttctgcatccgtggctggtgcatcgtgggaaagaagcaaacgtgtccctactgcaaagagaaggtaga

SEQ ID NO: 367221 - DNA, 50 bp, Homo sapiens
aaatagtgatagctttgataaccaaaattgcctggaaaagagcagtgaga

SEQ ID NO: 367222 - DNA, 75 bp, Homo sapiens
cggaggaggaagaagaagtgttatatgtcctaaagtaaggtttcaggcagtgaaatcaactgtgcagaccatcac

SEQ ID NO: 367223 - DNA, 100 bp, Homo sapiens
ccccttcatgcatgcgcggaggccgcctgctagcaaggctaaagaattacctccaaagccattgtcaagaccacagcagtcatctgcaccagtccagctg

SEQ ID NO: 367224 - DNA, 101 bp, Homo sapiens
aagccctcagtaccagagacagaagcagatggattcgtccttttagttggcctttaccagagtttgatccaagccagattcgactgattgtatatcaagac

SEQ ID NO: 367225 - DNA, 100 bp, Homo sapiens
ggagagaaaaaggagagcctctgagctcaacggaggattgtgcctgagaagaacccacagagttgcggtccagcacagagctccatccagacctgctcac

SEQ ID NO: 367226 - DNA, 82 bp, Homo sapiens
tttaaatctactgaagtgcagaaatcacaaagtacagctcagaatttgacttcaggacgccaggaaagcatgtgcagatgca

SEQ ID NO: 367227 - DNA, 90 bp, Homo sapiens
gctgtacaaactgttgctccaatgccagaagattcagctgaaaatatgaggaaacagagcaaatgcagcgttacaatcaaagacttattg

SEQ ID NO: 367228 - DNA, 74 bp, Homo sapiens
gaagctgagcctttctggacagaccaacctgtcagtgctgcaaagtgcagtgggccatgagtatgttgccgagg

SEQ ID NO: 367229 - DNA, 75 bp, Homo sapiens
acggaggaggagcagacgctcaaccagcttctggtagaaatggatgtggtctaccatcacggcaacagtgcgacg

SEQ ID NO: 367230 - DNA, 101 bp, Homo sapiens
cggatggggaacccctgagccgcatggactcggaggacaggctctttggtgtaacgggaaactgcgctgcctgtagtaagctcatccctgcctttgagatg

SEQ ID NO: 367231 - DNA, 82 bp, Homo sapiens
tgtgaaggagcagtatccgggcatcgagatcgagtcgcgcctcgggggcacagtcaatggctcatattttgaaagcaagaaa

SEQ ID NO: 367232 - DNA, 121 bp, Homo sapiens
ggccagcagcgggcgtgggagatacgggcatagaggatgcaaacgctgtcaggggttcagcctctcagccccagcaccacggcaccagcctcacctgtcaggtgaccttgcctggggccgg

SEQ ID NO: 367233 - DNA, 98 bp, Homo sapiens
gatcaaaacacccctgtcgtccaccctcctcccactccagctgccaatggctctaatgaagatagaggagaggttgcagatgaagataagagaattat

SEQ ID NO: 367234 - DNA, 100 bp, Homo sapiens
gttctgaatggcatccgtcctaccggaaacctaggaaaaggtctccaattgagaaacatggcactgtttttcctgcactctacccacctattgctggact

SEQ ID NO: 367235 - DNA, 75 bp, Homo sapiens
attttgatgtggatgatgccaaagttttattagcactgccagtgaaagatgtagaagataaacctgaacaacaaa

SEQ ID NO: 367236 - DNA, 82 bp, Homo sapiens
gctgtgctcgcgctactctctctttctggcctggaggctatccagcatctcacattcttgaaggtggcattgaagagcacta

SEQ ID NO: 367237 - DNA, 100 bp, Homo sapiens
cacatggttaaggaacaggaggaaaccattcagagggagatacttcaggggattaccggaagattctgctgaagatctgtggtggcaatgactgaacagt

SEQ ID NO: 367238 - DNA, 98 bp, Homo sapiens
caccattgctaggagtgagcatgagatttctgaaattattgatgggctctctgagcaggagaaatgcactcggtgatggaaagagagccactattctg

SEQ ID NO: 367239 - DNA, 99 bp, Homo sapiens
gtgccaccgaagaggtgagaacaaaatcatgtgatgtggagccaactgcaccgatggaggaacccacagtggtggaggagtcccagggcaccccggaag

SEQ ID NO: 367240 - DNA, 100 bp, Homo sapiens
gcagtatctcgctcacagagagctgggctacaggtaaggggcctggataccaagaagtgactgctcatctaatccataaagctatgttaacagattggag

SEQ ID NO: 367241 - DNA, 100 bp, Homo sapiens
ggaagaagggcagcaggagaatgggcccattttcttggataccaaggacctactctatactctcagtggcttaggatggatgtggagaaaggcaagattg

SEQ ID NO: 367242 - DNA, 87 bp, Homo sapiens
ttgctgccctccaagaagagagcagctccctgctgcaggataagatggacctgcagaagcaggctttcgggtcacctccagcagctc

SEQ ID NO: 367243 - DNA, 90 bp, Homo sapiens
gaacaaggacacaacgtcactctcatggtgcaattagaagagtctaacaaagtgccagtggtgcagcaccctcaccatgtccaccccctc

SEQ ID NO: 367244 - DNA, 82 bp, Homo sapiens
gtgaagaaggcgcatcactcccagctgcgcaaagcttgcgaggtggcgttagggaccagttactctccacaagaaaattcac

SEQ ID NO: 367245 - DNA, 82 bp, Homo sapiens
gaatccttctagagacgtccacggctttatcctgtggataaacgcagagtgaacgagtttggggagtcctacgaggagaagg

SEQ ID NO: 367246 - DNA, 96 bp, Homo sapiens
cagagctctgccaggcagaaggcctctctcctgatacagcaggcgctcaccatgttccctggagctgggacgatgccggagtgtgaaggagtttga

SEQ ID NO: 367247 - DNA, 98 bp, Homo sapiens
gcttgggccgccgagctggacccggaccggttttggtctcatctttggactcatcacctgcctgaccggagtcctgggtgtgggcctgggtgtggaga

SEQ ID NO: 367248 - DNA, 100 bp, Homo sapiens
agacgatctgcacttcgcattttggcattgacatttaattttagggtcctttatatagaagggagagtagtggtggacttgctttgtgaagagacagttc

SEQ ID NO: 367249 - DNA, 100 bp, Homo sapiens
ccaacgcagagggccagcacagtggttttggcccccagcccaaccctgagaaagttcagaaccacagatcttgcttctgaaatatctacctgggatggag

SEQ ID NO: 367250 - DNA, 100 bp, Homo sapiens
gaatcctgcggcagaagccgagttcaacatcctcctggccaccgactcctacaaggttttaaaatcaaagatgggaaaatcggagaaaattgcccttccc

SEQ ID NO: 367251 - DNA, 74 bp, Homo sapiens
tggagcccctgccatcacactgctaatacgagaaaagatttccacaagacggcaccctatgtcgtcactggcag

SEQ ID NO: 367252 - DNA, 75 bp, Homo sapiens
tggaaaaccagttattgaatatcaagaggaggagttgttgtactcaagggaaagaagctcagtttgccagcataa

SEQ ID NO: 367253 - DNA, 97 bp, Homo sapiens
cgctgttacttccaagaaggcaggtcctacgatgaggccatcctgcacctcgtagtggcaggtctgagtgtacggtttgcagatatgcctggaaaat

SEQ ID NO: 367254 - DNA, 90 bp, Homo sapiens
tgactaccctggaagtagcaggccgcatgcttggaggtcagaatggcggcagcggagcatcgtcattcttcaggattgccctgctggccc

SEQ ID NO: 367255 - DNA, 100 bp, Homo sapiens
gatggtacctaaagcctggtacttgaattttgatcaagataagctgccttaagttctcttcattacacttgagacatttgggaaatgatgaagtgcacat

SEQ ID NO: 367256 - DNA, 95 bp, Homo sapiens
gcagatgttctggctacacaggaaccctggattgcttgttacagtatgcaaccgaggatggacttatacacacaaatgaccaggccaggactcta

SEQ ID NO: 367257 - DNA, 90 bp, Homo sapiens
ctgcgcgaagctggccaaagcctgcccagacggctcacctgtgcgggatggaacaaaaggagccagcaccgctctttgaccttgccatgc

SEQ ID NO: 367258 - DNA, 101 bp, Homo sapiens
cagctttcacagtttgcgggactcagtcccatcactccaaggagagaaggtaaagagtgtgtacaacagttagctgaaaacaccaggtatttcaggagacg

SEQ ID NO: 367259 - DNA, 101 bp, Homo sapiens
ctttccatagggtcactcctagatatctccaacacaccagagtctagcattaactatggaggatgcaggctggctggtgggagtgaaggaatcagactggc

SEQ ID NO: 367260 - DNA, 74 bp, Homo sapiens
gtggaagtgagaccgaaatagactctgaagtaatatctggactttgaaattgggacggcaaaacagaacagaaa

SEQ ID NO: 367261 - DNA, 101 bp, Homo sapiens
cggcagaagccgagttcaacatcctcctggccaccgactcctacaaggatgttaaagtctttagtgaagatgggacaagcaaagtggtggagattctagca

SEQ ID NO: 367262 - DNA, 100 bp, Homo sapiens
ttcatatgcaccagaaggagatgaagaaggcaacagactactgcaacagaaactatccttagatgggaaccccaaacctatacatggaacaacagagagg

SEQ ID NO: 367263 - DNA, 100 bp, Homo sapiens
agtgtgcccaccacccttccctctgccacgcaggtgccgatggaagtccttaaggtgatggttgctgaagccttggatatttccagagaaacctacctgg

SEQ ID NO: 367264 - DNA, 100 bp, Homo sapiens
cggcggcggcggcggaggatgagcctgcagagcgcgcagtacctccggtggaaatggatattgttgaaaaactggtgaaaatgataccttgtgagcatga

SEQ ID NO: 367265 - DNA, 88 bp, Homo sapiens
cggaacccgtggtcctccgcttcatataagccaatggacacgtcagtgttatctgaagaaggaggagagccttttcagaagaaacttc

SEQ ID NO: 367266 - DNA, 83 bp, Homo sapiens
tccattatctttcgggaaagctctctggggcaggccatcactggtgcaagctatatttaacggagatcctgatgaagttcgag

SEQ ID NO: 367267 - DNA, 87 bp, Homo sapiens
aggaaggggacgggacggacggtgatggtggtcgccgcggcggcgtgtgcgcccctcaggtgccggggacacgggcggcaagccgtc

SEQ ID NO: 367268 - DNA, 101 bp, Homo sapiens
cgtggaattcgcgaagctgccaaagccttagacaagaatggaaactgaaagtggaaatcaggaaaaggtaatggaagaagaaagcactgaaaagaaaaaag

SEQ ID NO: 367269 - DNA, 74 bp, Homo sapiens
agctgaagacatcaagaagatcttcgagttcaaagagaccctcggaacgcttctccagggaaagtgaccgaggc

SEQ ID NO: 367270 - DNA, 90 bp, Homo sapiens
gccgggcctgagcgtgcgcgcacgcgccgacagacagcgccgttccagccctcgcccgatgcacggctgcccctgagcctggacctgccc

SEQ ID NO: 367271 - DNA, 100 bp, Homo sapiens
gcaccgcaaagcggggacccagaccctggagcctcagttggaagcagccgatccagcctgcggagcctgtggggcagaactcccccactggaaaggattc

SEQ ID NO: 367272 - DNA, 82 bp, Homo sapiens
tgtagagtcattcctgcctttgagcggactcccttttaagacaaatttacatgtattggagaccagaccagaagcccttctg

SEQ ID NO: 367273 - DNA, 82 bp, Homo sapiens
acaagaagacgtccaatctgagcgtgctgcggacggcgctgcggtacatccaggtccctgtgcgttttattgcgacctgccg

SEQ ID NO: 367274 - DNA, 82 bp, Homo sapiens
gaagccgagttcaacatcctcctggccaccgactcctacaaggatggatagaatgacagaagatgctcttcgcttgaatctg

SEQ ID NO: 367275 - DNA, 50 bp, Homo sapiens
aggacctgcccccagagagaattgacttgatgcacaacatcacaaaggcg

SEQ ID NO: 367276 - DNA, 100 bp, Homo sapiens
ctggccacggggactctcttctggatggcaaagttggccaagaattacggcatgacccgcatggacccctactgccgactgcgcctgggctacgcggtgt

SEQ ID NO: 367277 - DNA, 82 bp, Homo sapiens
agtttgctgcaggaggcacagaacaacttgaagatatttaaggtgccagaaccctgtggagcatcatgaactgggaagagta

SEQ ID NO: 367278 - DNA, 98 bp, Homo sapiens
gtgggcgaacgagtgacattggctgacatcacagttgtctgcaccctgttgtggctctataagcaggctaaagaacgtgccaatggaatggagcttga

SEQ ID NO: 367279 - DNA, 98 bp, Homo sapiens
tttggccgtgaaggagaaacaccagctccaagccaagctggagaacctagaacaggtcctgaagatgccatggacaatattaccaggcagaaccaatt

SEQ ID NO: 367280 - DNA, 82 bp, Homo sapiens
cccacaaccccgccgggcacatgtgaaaggatctcgaggacctggaagaagcagaggagccagacatggaggaagacgatga

SEQ ID NO: 367281 - DNA, 98 bp, Homo sapiens
ctacgtcccgctgccgtcgccgccgccaccatgcccaagagaaagtctgcgggccaggcatcgacatccgcaacgactatcagcagctgaagcgcctg

SEQ ID NO: 367282 - DNA, 100 bp, Homo sapiens
ttaggaatccagtataaagccctaaaacctgaagtggataagctgaacattatggcagccaaaagacaacagatggcttccggaaagtggtccacatcga

SEQ ID NO: 367283 - DNA, 78 bp, Homo sapiens
cggcgcaggaggcggtggagcgcagagcgggcgagcgcgccaagaaggatcaagaaggtggagaagaaaagaaatctg

SEQ ID NO: 367284 - DNA, 100 bp, Homo sapiens
acaacaaagaatttctcttgtcaatggccaacagagggaaggatacaaatggttcacagttcttcatgtgagtacccagaacatgaagatgggtgggctg

SEQ ID NO: 367285 - DNA, 100 bp, Homo sapiens
ggatccttgatagtttcaagtagctatgatggtctctggccacccttaagtacaatgttctcctacctaagaaggcatctggattttctctttccttgga

SEQ ID NO: 367286 - DNA, 125 bp, Homo sapiens
ccgcagccgctgttcccaggatggtgatccgtgtatatattgcatcttcctctggctctacagcgtgtgtgtgagcacagcaaagagaatcttatgaccccctccaacatgggagtaatctttgg

SEQ ID NO: 367287 - DNA, 98 bp, Homo sapiens
agatcacttggattcctccaatagtttttccgtgacaaatgctttttcagaagaggagccccgccgaggcatgagggccgtgctccccccagaggaag

SEQ ID NO: 367288 - DNA, 96 bp, Homo sapiens
gaaacaataggacggaaacgccgaggaacccggctgaggcggcaggccccgagcattcctctgattcagaatacactctctcagagccggactccg

SEQ ID NO: 367289 - DNA, 100 bp, Homo sapiens
aaatggcggatttcgaagagttgagggtccctcgtctgagctggctcactcgcccaccaacagcgggaagaagctctttgctcccgttccgtttccttca

SEQ ID NO: 367290 - DNA, 100 bp, Homo sapiens
gggaaggcgggagacgagaagcctgaaaagtcgcagcgagctggagccgccggaggcacagtaaccttggtgcacgaccgaaagggctgtctactctggt

SEQ ID NO: 367291 - DNA, 83 bp, Homo sapiens
gtcgccgtggcgccatgggtgttgtccgcagccgcaggtttactcctggcttgggggcattaggaagcactggaggctcttcg

SEQ ID NO: 367292 - DNA, 75 bp, Homo sapiens
ttcctgcatggcccagaggacagatgcaggattttatcctggaacattacagtgaagatggctatttatatgaag

SEQ ID NO: 367293 - DNA, 100 bp, Homo sapiens
gcctgcttgaaaaccaactcagcgtgggtgactttgtaaaaatacagaaggcctttgagggccgttgctccagggagaactgcaaatatcttcatccacc

SEQ ID NO: 367294 - DNA, 132 bp, Homo sapiens
atattggccgacaaggaagtgaagaaggcgcatcactcccagctgcgcaaagcttgcgaggtggcgttaggtgccagcgagatttcagattcctgtaaacctctaaagaaaaggagtcgcgcctcaactgat

SEQ ID NO: 367295 - DNA, 50 bp, Homo sapiens
ggaagcaatacatccagtatgagacttggccctaaaccacacagaagagc

SEQ ID NO: 367296 - DNA, 75 bp, Homo sapiens
tgcgcgaagccggggcggagcacgcgagctatgtgcctccggagccagcgtggtggccatagacaacaagatcga

SEQ ID NO: 367297 - DNA, 100 bp, Homo sapiens
gcgagaacgtccactgcgggccggcgaaagctggaccgccgggagagcctgcccacctccccaccctggacgccgggcgcgtcccggccccccagcagcc

SEQ ID NO: 367298 - DNA, 98 bp, Homo sapiens
agaaaacaagtccaaggatgaatcccagtccctgttacgggtgtggatgaggtcaccattgtcaacattttgaccaaccgcagcaatgcacagagaca

SEQ ID NO: 367299 - DNA, 84 bp, Homo sapiens
gctttttattacaagactacggagcataggaggaaaattcatcatctggaatgggtaccacagaccatgtcatcgtcctggcgt

SEQ ID NO: 367300 - DNA, 75 bp, Homo sapiens
gtggttttgccatgttctgttcaggaggtgattgcatactcggaacatcgttaccgtatctttggggaaaccatc

SEQ ID NO: 367301 - DNA, 87 bp, Homo sapiens
gacttcgccgccgcctggagccggctggccgcgacctcagccgcccgccgcccgccggggatcaatgtccgagttaccaccatggat

SEQ ID NO: 367302 - DNA, 100 bp, Homo sapiens
tagatactacactgaatttcctacagttcttgatattacaggtgaccaagaatatggcccaggtgaccaaagccctggacaaggccctgagcaccatgga

SEQ ID NO: 367303 - DNA, 126 bp, Homo sapiens
ccccggcgggccgcgcctggtgatcggctccttaccagctcacctctcaccgcgcatgtttggaggttatacattggctcttcaaagacgttcacctcatcagagaaatccctgactcctttgcag

SEQ ID NO: 367304 - DNA, 83 bp, Homo sapiens
ccgacagcttctcgggcaggtttgaagggtcactcagctgccgcaaggagcaaggcaagttctatgaccatctcctgagggac

SEQ ID NO: 367305 - DNA, 75 bp, Homo sapiens
cgacctctcggacacggtgcaggcagctcaaatctaatccaagtgaaaatgaagaaaaggaagcacagtctcaac

SEQ ID NO: 367306 - DNA, 96 bp, Homo sapiens
cttcctggctttgttaacctgcatagtaccgaaacccaaacggctgacttggcgggagatggatattcgaatcactgatgcaactaatgaagcaaa

SEQ ID NO: 367307 - DNA, 98 bp, Homo sapiens
ggcgagccaagttccgcagcctggcatggcttctggggacctttacgaggagtcagaaataccatcagaggaggggtactgtgactttaatagtaggc

SEQ ID NO: 367308 - DNA, 100 bp, Homo sapiens
gagcctccaggagcccagacaccagccccccaccatgggaaggtggccatccagaaggaggacttgcagaagtaccacaacagggacacctggttccagc

SEQ ID NO: 367309 - DNA, 100 bp, Homo sapiens
atttgaaacgagcgcagccaagttgaagaggaaatattggtggaagaattgcaagatgtggcaccatttattgagtttctgaaggccatacaagatggaa

SEQ ID NO: 367310 - DNA, 100 bp, Homo sapiens
taaaaaaccatctggtgatgatagatacaatcagtttcacataagatggactagaggcttttaccagatttcttaaaactgaattcagtgaagaaaatat

SEQ ID NO: 367311 - DNA, 101 bp, Homo sapiens
ctctatcttcaaccaaacttggactgcaaacaggtccggacactgtttgtcagcggcctccctgtggacattaaacccagagaactctacttgctcttccg

SEQ ID NO: 367312 - DNA, 98 bp, Homo sapiens
tctgccatagcaaaacaagctgccgaccagatgaagaatcaggagcagctaattcaggaggaatcagatatgtggaaaataagagaactggaaaaaca

SEQ ID NO: 367313 - DNA, 87 bp, Homo sapiens
aagaaaagctgtggcaaccgaaatgagactccctcagatccagtgataattgacaggaccgtataatagacgctggccccaaaggaa

SEQ ID NO: 367314 - DNA, 50 bp, Homo sapiens
tccttttcctccacctaccttcccgaaacaccttccaccatgaccacctc

SEQ ID NO: 367315 - DNA, 75 bp, Homo sapiens
ctgcaccccaccttgatccagcggacttacggggacccgagctgatccagaaagccaacggtctccacggcttca

SEQ ID NO: 367316 - DNA, 97 bp, Homo sapiens
tttgaaactcctgcaccaaactattacaatgttcacctagaaatcaatgacccaaacgtcatttcacaagaggaagcagatagtccttcagatagtg

SEQ ID NO: 367317 - DNA, 101 bp, Homo sapiens
taaactgcgaggacagagccactggtgagatggaagattttcgaggtatagcagaagaatcatttccaagctttctcaccaattcattatttggtaacagt

SEQ ID NO: 367318 - DNA, 100 bp, Homo sapiens
acataacggggttcgggtgtctcgtgtgtgaacatcacagatctgttacctaaagcaataaaaaatggccagaggatcagtgtccgatgaggaaatgatg

SEQ ID NO: 367319 - DNA, 75 bp, Homo sapiens
caaattccctcattactttggaaagccttgggagaccatttcagaggaagtgaatatcgctggagactctctcgg

SEQ ID NO: 367320 - DNA, 75 bp, Homo sapiens
gtgcggtgctgctgagcttggcctcggcgtcctcggggactgtgcagagtgtggggccttcaggactggcccact

SEQ ID NO: 367321 - DNA, 97 bp, Homo sapiens
ggaacggagttatctgtgaaacccagtcgaatgagtgatttgagtgtaattggtcatccaatagattcagaatctaaagaagatgaaccttgtagtg

SEQ ID NO: 367322 - DNA, 75 bp, Homo sapiens
gaggaatttgaagtgaccaaaacagcagggctgacaaagaagagaaccaaagtccagaagaagtcactgcttctc

SEQ ID NO: 367323 - DNA, 101 bp, Homo sapiens
aaattaaaagcttttcctgaagatcagctttctattcctgaatatgtatcttgtgcaacttgctttggtgtttgctgttttattgccacagatgacattac

SEQ ID NO: 367324 - DNA, 75 bp, Homo sapiens
agatccctggaatatgaagagacacagtatggtagccacacccccaggcgctgagatgcgtctggagagccagag

SEQ ID NO: 367325 - DNA, 73 bp, Homo sapiens
gctggctggcttcagtggaccaggaactcgctgtcggcgctgctggacggcaaagccacgctcaccttcctga

SEQ ID NO: 367326 - DNA, 82 bp, Homo sapiens
cgaaaatctgggctaagtgctggcaagagcgatgtctactacttcaggttgaagaaatatggagatcaacacaaaactgctc

SEQ ID NO: 367327 - DNA, 90 bp, Homo sapiens
gcgatgtgaggaaaggcacctccaccagctttgagagagaaaagaaccacagtggttgcacaactgaaacagcttcaggcagaaacagaa

SEQ ID NO: 367328 - DNA, 100 bp, Homo sapiens
tctccgcggtggaggtctgcgttgctcttgcttttcctcgctggggtgtacggagttaaagttcctcgtaattttcgcttgttggaagaacttgaagaag

SEQ ID NO: 367329 - DNA, 100 bp, Homo sapiens
gtctaagtccgggcagccgaagagtgtgcagcctcacgtcaaagcattcgcagagtatctttggaggaagttctggaattactaggaacagggtttctac

SEQ ID NO: 367330 - DNA, 73 bp, Homo sapiens
gaaatcgggctgaagcgactgagtccgcgatggaggttatgaagacagtatggagtttccagaccatagtaga

SEQ ID NO: 367331 - DNA, 100 bp, Homo sapiens
caggcaatcttcagcggtgatccagaggagatccggatgctcatccataaaactgaagatgtgaatactctgattatccctggcgctggagccgggccgt

SEQ ID NO: 367332 - DNA, 76 bp, Homo sapiens
ccaggctaaggccattaacaccctggagactcgggcatgtaatgaatttactacacatgtgatgaaccttctccga

SEQ ID NO: 367333 - DNA, 101 bp, Homo sapiens
aggtgtaaagcaccacagtggaggtgaaaaacctttccaagctcaaaaacaagattcttctgatgtagagcgactggaaagattcttcgactcagaagatg

SEQ ID NO: 367334 - DNA, 87 bp, Homo sapiens
ggaggaatacacttatttatgaaagccctatgagtttgtctctctggaatggctgcaaaagtggttggatgaatcaacacctaccaa

SEQ ID NO: 367335 - DNA, 100 bp, Homo sapiens
atttactggagttgcaagtgggagcactggaagtacgggcagttgcagtgttggagctaaagtactgcttaggatgaatatgatttggagaaattccatt

SEQ ID NO: 367336 - DNA, 74 bp, Homo sapiens
gcagagtactactgcgccaaatttggtgcctggagtaggaggagaacgcccatataaatgtgaactttgtcctt

SEQ ID NO: 367337 - DNA, 83 bp, Homo sapiens
tcttaggctgtgctgtgaactgtgaacagaagcaaggtgcagaaaagccctgtgttccggagggacggcgcagacatccactc

SEQ ID NO: 367338 - DNA, 51 bp, Homo sapiens
tctgaggatgagctggaggagggggtcagccccagttgatgctgacagcag

SEQ ID NO: 367339 - DNA, 80 bp, Homo sapiens
cgccagcgccccatcctgagccgattttaggtgatgggcaagtcagaaagtcagatggatataactgatatcaacactcc

SEQ ID NO: 367340 - DNA, 100 bp, Homo sapiens
tggaagatgaggaggtcgctgagagctgggaagaggcggcagacagcggggagtacctctctctagaactgtacgctgtacctgcatcagcattagtaat

SEQ ID NO: 367341 - DNA, 75 bp, Homo sapiens
gtggttcctgctgccctcaaggtcgtgcgtctgaagcctacaagaaagaagctgctaacctgtgccaaacctcca

SEQ ID NO: 367342 - DNA, 100 bp, Homo sapiens
aagccacccacaaacaaactacccattttcttttttggaactcatgagacgacccagatgatgtggtaccagttggccaaagaagagcctggtgttggtg

SEQ ID NO: 367343 - DNA, 82 bp, Homo sapiens
catgttgttaaagtaccagcttcacaggattatgacttgtgtatcacctgctataacactaaaaaccatgaccacaaaatgg

SEQ ID NO: 367344 - DNA, 98 bp, Homo sapiens
tcagaggccgccatcaaccgccagatcaacctggagctctacgcctcctacgtttacctgtccatgtgtttacgaaaatggggttacagaagatgtga

SEQ ID NO: 367345 - DNA, 89 bp, Homo sapiens
atcatgaaccaggaaaaactcgccaaactgcaggcacaagtgcgcattggtgggaaagaggagatgttaaagtaacccatcttgcagga

SEQ ID NO: 367346 - DNA, 50 bp, Homo sapiens
cgcacgggagccagctgggtggtttggtgcacctcgatttggaggaagta

SEQ ID NO: 367347 - DNA, 80 bp, Homo sapiens
caggtagaaaaatacaagaaaaattatcttccaatgcaagctagatgctggtgtgccagaaaaaataagcctgatttcca

SEQ ID NO: 367348 - DNA, 100 bp, Homo sapiens
ttcatggagttcacagaagagtcgaggagatatgttgggaaaacggattcgataaccattagcgtgtggaaccataagaaaattcacaagaaacagggag

SEQ ID NO: 367349 - DNA, 51 bp, Homo sapiens
gttcctccccagggatgatggacatgcatgaagcccctgaatgtgacagtg

SEQ ID NO: 367350 - DNA, 82 bp, Homo sapiens
agattatagctctgtatgagaaggacaacacctacttagctgtttgacaaggccaacaaacaccacttcttacacagcctgg

SEQ ID NO: 367351 - DNA, 100 bp, Homo sapiens
tagatgttgtgtttcaagaaaatgaagtgatggtccttgcagttgaccatataagacgtctgcaaatgagacccattgggcatgatggctaccatcccac

SEQ ID NO: 367352 - DNA, 75 bp, Homo sapiens
aggagattcatgcaaacgtttgtccttgctcctgagactgtgagtcgacacttcaggaacatacctgtgaatgaa

SEQ ID NO: 367353 - DNA, 82 bp, Homo sapiens
ataccttcaatgatgtgtgcaataatgaatcattagtatcggacacagaaacgtcattagtaattatcagcactttagatgg

SEQ ID NO: 367354 - DNA, 75 bp, Homo sapiens
gaccggcatgccctattctgtgggcttccgcgaaattgctggactcgctgaagagagactacgcaggaaagcccc

SEQ ID NO: 367355 - DNA, 97 bp, Homo sapiens
tggaccagctagagaccctacagaccaggcactccgtcagtgagatggcctccaacaaggtttcgacacagccccaactgctggtacctgagaaact

SEQ ID NO: 367356 - DNA, 97 bp, Homo sapiens
ctgtccaccgtggccgcggtggtgctaggtggacagtgcaaagccctttggtgagaatatttcagagcatcatttgaggaggtctagaagaaaatct

SEQ ID NO: 367357 - DNA, 100 bp, Homo sapiens
ctgtcatcatgccacacaacatgtacctgcattctgccttagtcaagcctccacctcctggatgccctcccaatgctgctcagcttgcagtcatgcaggg

SEQ ID NO: 367358 - DNA, 78 bp, Homo sapiens
aaagtgaagggaatggtttttctcaaaggaaagctgctttggagtttaacccttctgccaatccagaggcaagcacaa

SEQ ID NO: 367359 - DNA, 83 bp, Homo sapiens
cgcggattcgccgaggcaccgaggcactcagaggagcgaggaagaaaggacccggtttcaggagctgctggccagtccggcct

SEQ ID NO: 367360 - DNA, 75 bp, Homo sapiens
aggcgcccttgaaacgattcaatgacccttctgaaatcatatggaagagggactcagtgaaagtaaagaatatga

SEQ ID NO: 367361 - DNA, 50 bp, Homo sapiens
tgctgggctcggcgtgctgcgctattgacctgaaaagtggttctggaaaa

SEQ ID NO: 367362 - DNA, 102 bp, Homo sapiens
gattacaccgtcagtggttgccattgtaggacctcaactctctatgtttgccagtggtttattttacagttttttgctccactcaagcctgttagaatcacc

SEQ ID NO: 367363 - DNA, 75 bp, Homo sapiens
ccgcggtctggacaagcgaggaagtttctttaagaggacagttatgggatggatgggaaggttaatcagccccgt

SEQ ID NO: 367364 - DNA, 80 bp, Homo sapiens
cctgactactccttctccaagaggtgctgcagaaattggggaaagctgtagaaaccaaagatgaacgatttgaacaaagc

SEQ ID NO: 367365 - DNA, 83 bp, Homo sapiens
agcgcctcagtggtctttaaagaacagtatgccaccacgggctgttccctgaccctgcaccatacggagaaaccagaacatga

SEQ ID NO: 367366 - DNA, 98 bp, Homo sapiens
atacagaaggacatgcaaaacttgcagattttggggtagcaggtcaacttacagcaacagcattattgagaaaagcccttacagaagagtgtggccgt

SEQ ID NO: 367367 - DNA, 75 bp, Homo sapiens
gctgaggctgagtctcagtgttgccctgttcagtctgagaggttgttggatggatgtatgggaactaatgtcgca

SEQ ID NO: 367368 - DNA, 100 bp, Homo sapiens
cgggacttggccgagcggatcctaataaggggaaaatgaggtggtgggacacacgcaggggccactagatgggagcctgtatgctaaggtgaagaagaaa

SEQ ID NO: 367369 - DNA, 83 bp, Homo sapiens
ggaaacacctctacctcctgcgaggcctcccgggctccgggaaaactacactggccaggtcctgaacgaggctgtgggggccc

SEQ ID NO: 367370 - DNA, 75 bp, Homo sapiens
attctgaaagctgaacagagaattctggcactgcactgggtaggaaaaagattcctcacctattcctacctcttg

SEQ ID NO: 367371 - DNA, 75 bp, Homo sapiens
ccggcataagctcaatcttcgggatacctacctggtttatattctaaatgaattggctggaaactcctttatgat

SEQ ID NO: 367372 - DNA, 105 bp, Homo sapiens
ttaagattaaacttgggcttcgcagtcctctcacctccataccccggatttggaggcaccgtggtctcatccgcctgcacagctgagtccagtgggagctgacgc

SEQ ID NO: 367373 - DNA, 98 bp, Homo sapiens
gtactttgccaaacaccctcgacttggttacctgcctgtccagacagttcttgaaggtgacaacttagagacccccatggctgggggttatggagtga

SEQ ID NO: 367374 - DNA, 82 bp, Homo sapiens
aaaagactgggcttgtccttgctggtgcatgcgtcgtcggcctctgggcagcaggggcctttatcatctgctggactcctgg

SEQ ID NO: 367375 - DNA, 75 bp, Homo sapiens
ttgttcactacctggtcccatcacctacagcaagccaacatccagagcctcagctcaaaggcatcgtcaccaaac

SEQ ID NO: 367376 - DNA, 156 bp, Homo sapiens
agtggggtacccccagctgagtgccgtcattgagtgtgccgactctgcccatggcctgaagggccacatcatctctggccggtgcataaacttctcccgagttccatctcagtaaaagggaagcaggaagaccaagaaggtacgaagatggcacat

SEQ ID NO: 367377 - DNA, 75 bp, Homo sapiens
cgcagaaggactgcctcactgagcaaccaagacatgtagagcgcatgaagtacaggacaataaagcttcctacac

SEQ ID NO: 367378 - DNA, 50 bp, Homo sapiens
gagccgcgcacgctacagtacaaggtggtcgtcggttttctgagggtact

SEQ ID NO: 367379 - DNA, 101 bp, Homo sapiens
gcctggaggcaaagggaagcgccttcctgaagtttactgcattgtgagccgcctgggatgcttcagcctcttttcaaggtagggacggggtttcaccatgt

SEQ ID NO: 367380 - DNA, 78 bp, Homo sapiens
tggcatccacgtcatgtggtcagaaatcagctggtgccgaggtgaaaggaatcccagtcagaagttccagcctgccac

SEQ ID NO: 367381 - DNA, 88 bp, Homo sapiens
ttgagaaagtggaagttcatcgtctgattagggatgaactcaagcggcattacaacctgggggagtactggattgaggtggagatgga

SEQ ID NO: 367382 - DNA, 93 bp, Homo sapiens
aggaccatgctgctgaaagagtaccggatctgcatgccgctcaccgtagacgaggacagacccacgaagtcaagcatgcggagtgcagccaag

SEQ ID NO: 367383 - DNA, 96 bp, Homo sapiens
ttataaactgcctggccgaatcagccttttcacgctcaaggaacatgatctcaggaacacatatctccttttccagccggaagtacctgagagaga

SEQ ID NO: 367384 - DNA, 75 bp, Homo sapiens
ccaagaccgtgctggtctttctcaacctcatcttctggggggatatgagactttctactcggaatatcctgagtg

SEQ ID NO: 367385 - DNA, 100 bp, Homo sapiens
ctatgactttcaacgggactattatgatagtctttaggcccagtgggatttatgaaaagtgccatctctttagctgaggatgaagaatggaagagaatac

SEQ ID NO: 367386 - DNA, 50 bp, Homo sapiens
gtggacgaggtgttggcggaagacaagttggatggcttgaggactggtac

SEQ ID NO: 367387 - DNA, 75 bp, Homo sapiens
ttagaaattctcctaaaagatgaccgtctgggatgcattcagtctactagcatattcagatccctggaacagccc

SEQ ID NO: 367388 - DNA, 85 bp, Homo sapiens
atgaggccagggcgatggtgttctcagcgttcctgtgcatggcaaaccagcaataacacttatatcagttttagagaatgtggcg

SEQ ID NO: 367389 - DNA, 100 bp, Homo sapiens
ggaggctctgctcccccaccattccaccctgccttcttgtcccccagctgcccagtgggaggccccatggacgccagcgtggaggaggagggtgtgcggc

SEQ ID NO: 367390 - DNA, 82 bp, Homo sapiens
gtcgaagacatggaccagggctacggaggtctcggcgcggaagatggccggcggcgtggacggccccatcgggatcccgttc

SEQ ID NO: 367391 - DNA, 90 bp, Homo sapiens
gagcgggtagtgccagctacggtccgcggctggggttccctcctccgtttctgtatccccacgagcaattctgtggtgttcttggtcaca

SEQ ID NO: 367392 - DNA, 87 bp, Homo sapiens
tagtttatgacataacagatgaagattcttttcagaagattggccaaaatgggaaggattggattccactctcttccacgaagagtc

SEQ ID NO: 367393 - DNA, 100 bp, Homo sapiens
agcggcgttatgacaggaagcagagtggctatggtgggcaaactaagccgattttccggaaaaagagcacatggaagatctttttgcacttcttgcagca

SEQ ID NO: 367394 - DNA, 76 bp, Homo sapiens
aaagatctttcggaatgaccggaggagatgttaaagtaacccatcttgcaggacgacattgaagattggtcttctg

SEQ ID NO: 367395 - DNA, 100 bp, Homo sapiens
ccatgaaagtactcaacagcatcgcctacaagttcagcggaccaggagaggagaaattgaaacatgctgctgctaccttttgcagtaaccaacctttcgc

SEQ ID NO: 367396 - DNA, 88 bp, Homo sapiens
cctgtggaagaacagcaggaagtaccaccaggatgttgcttcagagtgtgaagtcaaatgcatgccaacattccagttttttaagaag

SEQ ID NO: 367397 - DNA, 118 bp, Homo sapiens
ctaccgtctcgctatagccgtttgagggaagaaggaggaaaattacccggtatcgttagaggagccaaaaacctgtatatcatctccgtgaaggggatcaagggacggctgaacagac

SEQ ID NO: 367398 - DNA, 96 bp, Homo sapiens
gtggtgctttgtgaggtcatcacggcgcgacgacgagctgcagttgtgggcaccttgtatgcgttgtcgagatgtccacagaaggaggatttggtg

SEQ ID NO: 367399 - DNA, 82 bp, Homo sapiens
tcatgctggccaagaagatcatcattaaggacggaggcacggtaaaaaagagtgtcaagtggacatgcaaagcttgtggaga

SEQ ID NO: 367400 - DNA, 50 bp, Homo sapiens
cgggacccgcccgcccgcgggagaagaggactgtcagaaggacgtagaag

SEQ ID NO: 367401 - DNA, 100 bp, Homo sapiens
cagattgcaaagagttatggatattctggtggggagatgaacccaacctagtgggtgtaatacatcatgaactgcaggccgtgctggtatagaggactct

SEQ ID NO: 367402 - DNA, 74 bp, Homo sapiens
cgatatatgttctctaggccttttagaaaacatggtcaataactgggagatggacaaactagagatggaagatg

SEQ ID NO: 367403 - DNA, 87 bp, Homo sapiens
ctgacttctccactggttcctgggcaccgaaaggttctatgtcaatgggcccaggattctgaaacatagtccatgttgtcataaagg

SEQ ID NO: 367404 - DNA, 90 bp, Homo sapiens
caggaaccttccgctgcgagtgtgtggagggctaccagttttcagatgagggaacgtgtgtgggctcagcaacagcctcaccaaggactc

SEQ ID NO: 367405 - DNA, 100 bp, Homo sapiens
agacaaaagatattccaggtagcccaagagctatcaggggaagatatgcatcagttccatcgagccattactacagggaaacactactatgaagtatcct

SEQ ID NO: 367406 - DNA, 89 bp, Homo sapiens
acgactggagggattaagaagaactcttaggagcagcttggcctaaagggaatggcggcgctagatagtaaggcatcagggaagatggg

SEQ ID NO: 367407 - DNA, 50 bp, Homo sapiens
cctccccagccacttggaactgtgcccaagcaaggaaagaaataatgaag

SEQ ID NO: 367408 - DNA, 75 bp, Homo sapiens
tattttaccacttccttgaatagactgggtctcccaagaggaatcagaactttgtctttcacacactgataacca

SEQ ID NO: 367409 - DNA, 50 bp, Homo sapiens
gacatgagatgattgccaaacccccagaacttgatggagagtttggattc

SEQ ID NO: 367410 - DNA, 102 bp, Homo sapiens
tctcccctaacccacccaacctcaccaagaagatgaagaagattgtggatgccgtgatcaagtacaaggacagggactggtgattgcagctggaagtgccca

SEQ ID NO: 367411 - DNA, 98 bp, Homo sapiens
ttcccacggttggaaagggtatcatggaaggcaactgtgtttcacttaccagaatactacgttcagctaaattaaggaaatggtgtggtaattcatct

SEQ ID NO: 367412 - DNA, 100 bp, Homo sapiens
tgtagctcgacataaagcacgtatccgtggactattcagtgctattacccgttctttatagctccaagctctacagattcttcaaatatattgagaatag

SEQ ID NO: 367413 - DNA, 50 bp, Homo sapiens
ctacgaggaggcgctgaggagagatattaggttgaaaaagctggttgatg

SEQ ID NO: 367414 - DNA, 89 bp, Homo sapiens
ggccggcagaagggaggcacttgagaccacagagtattcagccatggcctcgctggctggtgggctggacgacatgaaggccaatctgg

SEQ ID NO: 367415 - DNA, 82 bp, Homo sapiens
ggacagtcgcgaggttcgagtgttgcagagcctgcggggcaagatctagatagagtttcaccatgttgtccagggtggtctc

SEQ ID NO: 367416 - DNA, 75 bp, Homo sapiens
ctttgcatcccacgccggaggaggcattaacgagaccgggtaaggcatcaacttctaactcatctcgccaggaga

SEQ ID NO: 367417 - DNA, 89 bp, Homo sapiens
ggacatctgggggccacaaatgctccttctcctggagacgcaactcaaggagaactgcgctatcctcaaggagctggtgacgctgcggg

SEQ ID NO: 367418 - DNA, 100 bp, Homo sapiens
gcagtgtccaagcaacaagcctccgctcctccttcctgcaccctggggctcctgaaactcacatggaaaatatatgcagatgatgaacattcttaagcca

SEQ ID NO: 367419 - DNA, 75 bp, Homo sapiens
aaggagtgcagaggcatcacctgaaagatggaggagatgtataagaaagctcatgctgctatacgagagaatcca

SEQ ID NO: 367420 - DNA, 95 bp, Homo sapiens
gttgtctcacccattgccacgagtgaaagctgaaacttaccactgctgtctggaaatcacgaaggacctctttgtttttagacatgaattggcca

SEQ ID NO: 367421 - DNA, 100 bp, Homo sapiens
cctccccttgcgggtgcagaagatccgagccggccggagcacgccaggcctgagggtgtcaaattgagaaccaggtagatccccaccacctacagtaaaa

SEQ ID NO: 367422 - DNA, 80 bp, Homo sapiens
gagtgcgtgggggaccggctgttggcgggtgagttgctacagtggctggagagacgacatctgctccatgggctggtggc

SEQ ID NO: 367423 - DNA, 88 bp, Homo sapiens
ccgggacgcggagcccggagctggggcgacgaggcgattgcgggggcctgggctaggaagagagaagggcacagttacctaagtatca

SEQ ID NO: 367424 - DNA, 100 bp, Homo sapiens
tcatcggtaattactattcgtctgagagaatggctgagcccccctccatgcgcctgaaggcccgacccagcagccctggcttttccgtgcttacctgcag

SEQ ID NO: 367425 - DNA, 100 bp, Homo sapiens
tgatctataaatgcggtggcatcgacaaaagaaccattgaaaaatttgagaaggaggctgctgaggatggagatgaagatgaggaagctgagtcagctac

SEQ ID NO: 367426 - DNA, 82 bp, Homo sapiens
ccatcccaccagagcacggcaagcgcctggagcggctggccatcgggcgtctctggccgagcctctttttgtggaaaacgac

SEQ ID NO: 367427 - DNA, 100 bp, Homo sapiens
accttcaagggagtcgaccccaacagcaggaatagctcccggttcacccacccatccttgatgctaggttctggtgtacctggtcacccagcagccatcc

SEQ ID NO: 367428 - DNA, 50 bp, Homo sapiens
gggccactcagagtcgcccgagaaggagaagaaatgggtgaccgttggtg

SEQ ID NO: 367429 - DNA, 112 bp, Homo sapiens
cagtcactgcagtagaattccttgtagataagcaactggattttttaactgaagatagtgcctttcagccctaccaggatcatggggttgacagcagcattttccagaatcc

SEQ ID NO: 367430 - DNA, 107 bp, Homo sapiens
ggccgggcacctccgagcgcaaggacagcgcgaggtccgcgcagcccagcgcagccatgaactgtggctgcaccatctgtcttcatcttcccgccatctgatgagca

SEQ ID NO: 367431 - DNA, 119 bp, Homo sapiens
tagagacagcaccggggcaagtgagagccggacgggcactgggcgactctgtgcctcgctgagggtttggtgcacctcgatttggaggaagtagggcagggcccttatctggaaagaag

SEQ ID NO: 367432 - DNA, 85 bp, Homo sapiens
tggagagttacctgcgttgtctcttggacatgtatctgctttccttgatgagatcaatgtaaccactgtgcgggaatatctgcca

SEQ ID NO: 367433 - DNA, 100 bp, Homo sapiens
aggtgactctctggatggaccagaatacgaggaggaagaggtggccataccgttgaccgctcctccaactaaccagttgggggccgtcccgctcctaagg

SEQ ID NO: 367434 - DNA, 100 bp, Homo sapiens
ggcttctgctcaccaacagatgaagacagatgcaccaacgagccgcagggccgtaggcagccatggcgcccagccggaatggcatggtcttgaagcccca

SEQ ID NO: 367435 - DNA, 74 bp, Homo sapiens
ctcgcatcaggtggccgggcacatgtacgggaaggacaaagtggcctcaagtactacagccttccagcagcctt

SEQ ID NO: 367436 - DNA, 98 bp, Homo sapiens
ggagattacacagaagcaaaagccttgatagcatggatttctgtgagctcactgacacattggcgtgagacctgggagtacgttgtgccaaatcattg

SEQ ID NO: 367437 - DNA, 100 bp, Homo sapiens
acgtaccagaggtggaagtccaagtcaaacgcagaaggactgcctcactgagcaaccaagagtgctggagaatctggtaaaagcaccattgtgaagcaga

SEQ ID NO: 367438 - DNA, 100 bp, Homo sapiens
tgctgctgctgctgcccgcgtccgaggctcgcgggcggcgggcccggatcaaggatccattttgttggacaaagacgggaagagaaaacacacgagaccc

SEQ ID NO: 367439 - DNA, 100 bp, Homo sapiens
ttttaatcaatcataagaacaatgattcatcagtggggaagtcatcatcatatcccatgatggctattgatcaggcccacaggcagaatgtctcctctct

SEQ ID NO: 367440 - DNA, 90 bp, Homo sapiens
gaggaggggtgccggccgggattcgcggcccggagctcgggaccgagggtgtttgtgagatatggttgaccagtgaagacacgggggctt

SEQ ID NO: 367441 - DNA, 50 bp, Homo sapiens
cgagaatagctccgtccagcagggcttgctctcaattttgcgcaagttga

SEQ ID NO: 367442 - DNA, 90 bp, Homo sapiens
ctgataatgaaggctggataccactacatgcagcagcttcctgtggatatcttgatattgcagaatctccaggacttcaagttagatgtg

SEQ ID NO: 367443 - DNA, 100 bp, Homo sapiens
ggcagccagccaggaagggaggcagaagcatgctaagaacaacagtcaggccaagccttctgcctgtgatgacttcccaagtaagaagcggaagaggagc

SEQ ID NO: 367444 - DNA, 87 bp, Homo sapiens
ccacttcatctttgcacagaaaaacttctttacaggactttaatttttggaagtgaataaaacttgttttagaagacgagatgacta

SEQ ID NO: 367445 - DNA, 75 bp, Homo sapiens
ccagagatgaccctgctttcttggtcctgttaagtatctggctctgtgcttcttggacacttaatgattgttggc

SEQ ID NO: 367446 - DNA, 100 bp, Homo sapiens
ccctgctccctctcagcacctgggcggacggcgtcttggctgcccacaagataatggctagctccccagacatggacctggccacagtttctgctctcag

SEQ ID NO: 367447 - DNA, 100 bp, Homo sapiens
cactacagaaacctcacagaacacagcaaagccgattcgaagacagtctcttacacctcctcctcagaacactattacatgggaagaatatatatctgct

SEQ ID NO: 367448 - DNA, 75 bp, Homo sapiens
gggccttctggagatgcttccgaactgtgggcaaaaatggcggtggttcccctctctcagcgaagtggtgttctt

SEQ ID NO: 367449 - DNA, 100 bp, Homo sapiens
tcgccggggaccgagcgcgctcgctccggcgccggcctcgcctcctcgcagcagcgccatggacagagcgggatgccaccagcttgtccaaagggaagtt

SEQ ID NO: 367450 - DNA, 99 bp, Homo sapiens
ccgcggccgtcgcggcttttgtgctgtacaagtgtttgcaggcctcatggcggtccgagcttcgttcgagaacaactgtgagatcggctgctttgccaa

SEQ ID NO: 367451 - DNA, 74 bp, Homo sapiens
gcccgctcggcccctcccatggtcctagcagaagatgtgactcagactgcctctgggtggggctggctggccca

SEQ ID NO: 367452 - DNA, 84 bp, Homo sapiens
agggcctgcagcgggagctggacggcgagcgcgagcggcgcgagaaagacgtggcccagtggaacatcgggagcctccggacca

SEQ ID NO: 367453 - DNA, 100 bp, Homo sapiens
gaccccaatgagaccaatgaaatcgccaatgccaactcccgacagcttccaattctagaaggggaagtttttgattctgtgaagccaggactttctgctt

SEQ ID NO: 367454 - DNA, 49 bp, Homo sapiens
cttcgagttcaaagagaccctcggaaccctctacggcagacacatgcag

SEQ ID NO: 367455 - DNA, 74 bp, Homo sapiens
cggcggcggcggcggctgcggcccaatatagcagcctcgtcttacagcgtgactgcaaagaaaaagacttttgt

SEQ ID NO: 367456 - DNA, 101 bp, Homo sapiens
atgcccaccatgcggaggaccgtgtcggagatccgctcgcgcgccgaaggtatgattttgtagaagttgaggaacccagtgatggaactatattagggcgc

SEQ ID NO: 367457 - DNA, 75 bp, Homo sapiens
cctggaagaaaaagatacaacgaactagcacaacgaggcttgaaacggagactttctactcgttcctcaattttg

SEQ ID NO: 367458 - DNA, 100 bp, Homo sapiens
cctactcccagatgcatccgtgtcagagagtactgggcaggctgcaaatgtctgtgttaaaacagctctgctgggctaagacaggacagaagcagacagc

SEQ ID NO: 367459 - DNA, 82 bp, Homo sapiens
actggatagacttcgaacatttaaacaggtttccgcagacatgcagctccagttacaagaaggcagttcccacacggtgcac

SEQ ID NO: 367460 - DNA, 96 bp, Homo sapiens
gcagctggatattgagccggatagacctattggatatggagcctttggtgttgtctgagttcttcgtaagtacatcttaaagctgtcaagatggtt

SEQ ID NO: 367461 - DNA, 100 bp, Homo sapiens
tcttcaccaccatggagaaggctggggccgccctacagaagctgaaggcagaggagtatgttcaacagaagagggagctcctgaccctctatcgggacca

SEQ ID NO: 367462 - DNA, 95 bp, Homo sapiens
taaggcctactttaagagataccaagtgaaatttagaagacgacgagggaatgggtactgttcaaaaaggaatgccccacaagtgttaccatggc

SEQ ID NO: 367463 - DNA, 82 bp, Homo sapiens
tcagccaagttccccaacggctccccgtcgtcctggtgctgcagcgatacattttgcagaggcatcagaaaactaaagaatg

SEQ ID NO: 367464 - DNA, 100 bp, Homo sapiens
gcggcggccatggcccggctggctgactacttcatcgtggtaggctatgaccacgagaagccagaaaagctttgacctggaaatactacgcaaaaaaaat

SEQ ID NO: 367465 - DNA, 100 bp, Homo sapiens
gggtagcggccgcggtgcagctgctggtcaccctgagcttcctgcggagcgtcgtcgaggcgcaggctgctttgtaccgcctcagtggagactggaatcc

SEQ ID NO: 367466 - DNA, 75 bp, Homo sapiens
atgtgatgatggagaactacagcaacttactctcactggacatagggcctgattacattccaacagaggaagaaa

SEQ ID NO: 367467 - DNA, 100 bp, Homo sapiens
atttaacgtcacagtttttgaagaccaagatatagccagtaccaacgtatgctgagcacgctgtctcaatgtgaattttcaatgggcaaaactttactag

SEQ ID NO: 367468 - DNA, 98 bp, Homo sapiens
gtgctcccgtggttgcgggcgcagcgggcagtgtcggaggccagcggggccggaagcggcggcgcagcttctcttttaaaaggactaaaacatgctaa

SEQ ID NO: 367469 - DNA, 75 bp, Homo sapiens
gcaaatacagtaatagatttttggaggatgatatgggagtataatgttgtggatggtaagcggatgtttggcacc

SEQ ID NO: 367470 - DNA, 90 bp, Homo sapiens
catccctatactcgtcctgtcggagacctacagtctttgccatcccgctgcttccagctgccatggtgatgccaccccagcccgtggtcc

SEQ ID NO: 367471 - DNA, 50 bp, Homo sapiens
gcctcccaaagtgctgtgattacagaattcaaatgggatttacactggct

SEQ ID NO: 367472 - DNA, 98 bp, Homo sapiens
cgagaatgagaacatcaccgtggtgaagggcatccggggaggtatggaaacattggaacttcaaaaggacatcaaagaagaatcagatgaagaagaag

SEQ ID NO: 367473 - DNA, 74 bp, Homo sapiens
gtccccacgagctgtgtggtccatgatgaggaacctctttcaggagctataaaagaaagggaggaatcatgtcc

SEQ ID NO: 367474 - DNA, 90 bp, Homo sapiens
tgaaacgggcagccatggccctccacagcccgcagcatcctgaggttagcattacacttctcccagtggagcccatgacttctgatcagg

SEQ ID NO: 367475 - DNA, 80 bp, Homo sapiens
gaaggattcaccacctccaggaaaagcttggatcctagcatgactatacattgtgacatggtcattacatatggattaga

SEQ ID NO: 367476 - DNA, 100 bp, Homo sapiens
catgtcctgttgtggggcttttacagcctttgggctctttattgagaaactaccaaaacatcgagattacaaatctgctgtcattcctgaaaagaaagac

SEQ ID NO: 367477 - DNA, 82 bp, Homo sapiens
gtatgaagctcaagatgtggggagtggcagagagtatgcattaaagacgagccaaactcaggctgtaccttgagcagctcaa

SEQ ID NO: 367478 - DNA, 83 bp, Homo sapiens
gccatttagtaacttctttgcaagcaaattgtggctactaatttgccccctgaagatcaagatggctctggggatgactctga

SEQ ID NO: 367479 - DNA, 88 bp, Homo sapiens
ggtgatagcagttgttgctggaattgttgtgctgatccccgtcgaggtcaagatcaagatccaggtctatttcacgaccaagaagcag

SEQ ID NO: 367480 - DNA, 75 bp, Homo sapiens
gaaatcctatcagagcaatgcaaaggcccaggctttggtgcagtacctggaggagcccctcacccaagtggcggc

SEQ ID NO: 367481 - DNA, 75 bp, Homo sapiens
gcggcgcagtacaccaacgcggtgcgcgaccgggagctggacctccggggtacccactgatggtaatgctggcct

SEQ ID NO: 367482 - DNA, 100 bp, Homo sapiens
agtggtttttcggatcatgtctggtggctccgcggattataacaggatgagttccacccgttcatcgaggccctgctgcctcacgtccgcgccttcgcct

SEQ ID NO: 367483 - DNA, 99 bp, Homo sapiens
accttgggaacctagctgatgataggggggttccatctcccaacttgtccataggaggaacccgttttcactagacaagacagcaatcgcagtgaaaag

SEQ ID NO: 367484 - DNA, 83 bp, Homo sapiens
ccacccacttctgatacaaagtcagatactgcaacagttgttgacctcctgtactggagagacattaagaagactggagtggt

SEQ ID NO: 367485 - DNA, 82 bp, Homo sapiens
cgccatgatccccaccttcacggctctgctctgcctcggtctcggcgcggaagatggccggcggcgtggacggccccatcgg

SEQ ID NO: 367486 - DNA, 50 bp, Homo sapiens
cgtacccccgtagcggaaaaacagtgcagcagctgccccgagccccgtgc

SEQ ID NO: 367487 - DNA, 151 bp, Homo sapiens
agatttcggaaaattaactataaaggagagcgccaaaccattactgatgatgtggaggttaacagctatctttctactctttttgatcagaacaatgctgcaaaaaaagaagagtcagaaactgccaacaaaaatgattcttcaaagaagt

SEQ ID NO: 367488 - DNA, 100 bp, Homo sapiens
cgaagagaagatccaggcctcagaggaggagaaaggccggagccagccgaggtattgttgcagcatctggcagtgagactgaggatgaggacagcatgga

SEQ ID NO: 367489 - DNA, 75 bp, Homo sapiens
ctgctaacagaactggaccttttcggaatgtgtttctgatcatctgaatcttaatcatgtccaactgcctgcaaa

SEQ ID NO: 367490 - DNA, 74 bp, Homo sapiens
gtgaagcagaaatatctgagctttactcctcctggtgcaagaaagcctttgaggtgaaggtgtatgaaagtcat

SEQ ID NO: 367491 - DNA, 75 bp, Homo sapiens
gaacaacccccgcctcctggctcagatcgatgcgtccatgccaatggagatcttcgtggatgatgagacgaagtt

SEQ ID NO: 367492 - DNA, 141 bp, Homo sapiens
gcggcttcctcaacttcacgctggcgcgagccccgtcctccttcgccgccgcgcacaaccgcacgtgcaggtgttccccccacactggggctcccactactgcgaggagtgacccacgaaggccacagagatggccggggc

SEQ ID NO: 367493 - DNA, 87 bp, Homo sapiens
acaaatgtttttctgttttgcctgaatacatgatttaaacaagagatttccacagaagctggtgtatccgaacgacttccggctcac

SEQ ID NO: 367494 - DNA, 100 bp, Homo sapiens
cttcaccactgggttcagccgcatgagcgagcggcagctggctctctggaatccggaatcgcttaattctgaaagtctggtgagaagacacggcgagaat

SEQ ID NO: 367495 - DNA, 50 bp, Homo sapiens
gagaagagatgctggcgtgaaggggttgttaaaggccttacttatttgtg

SEQ ID NO: 367496 - DNA, 75 bp, Homo sapiens
tttgtcaccaaatgtgcctttcagcataagaagctgggcccccgaggcgatgtggatgtcaacatggaggacaag

SEQ ID NO: 367497 - DNA, 98 bp, Homo sapiens
aatccctcgaaacacaacctttaatgttgagtctaccaaaaagaatgaaccgcttgcttcttatttagccaagaagtatgatgcgtttttggcctcag

SEQ ID NO: 367498 - DNA, 83 bp, Homo sapiens
tgcagcgggagctggacggcgagcgcgagcggcgcgagaaatgccaggccgggcacctggtgtgtaaccaatgccgccagaag

SEQ ID NO: 367499 - DNA, 74 bp, Homo sapiens
gtgaacttccagcagccggcggacggctactgcagcactggggtgtcagttgttggtccgacccagaacgcttc

SEQ ID NO: 367500 - DNA, 100 bp, Homo sapiens
cagaacgcagatcagaggtagtcggacctttcccgctggcgcgcagcctcagctaggttatgatggagggtggtcgcagcaaagggtttggttttgtatg

SEQ ID NO: 367501 - DNA, 51 bp, Homo sapiens
agaagcgcgatgacggctacgaggccgggagtgcatccgccccaacccttt

SEQ ID NO: 367502 - DNA, 90 bp, Homo sapiens
gtcgtctcggcttggaatctttttgccataaattctaagtctcctctgagcctccggcctccataagacccaaaacagatgacacctctt

SEQ ID NO: 367503 - DNA, 100 bp, Homo sapiens
ctgggtgcagatgcagtgtggctctggatagcaccttatggacagcaatggctgccatccggaagaaactggtgattgttggtgatggagcctgtggaaa

SEQ ID NO: 367504 - DNA, 100 bp, Homo sapiens
cacctgcacagtctgccaaagacccttcccaggggaggacattcggggaggcttctacagagcacaactgcatgaggacaaagagtcgagacccgctggc

SEQ ID NO: 367505 - DNA, 100 bp, Homo sapiens
ggtacagtctctgcacctcgcgccccagcagtgctctatgcccaggtctctgtggctgggctgctccagcctggcggacagcatgccttcgctgcgatgc

SEQ ID NO: 367506 - DNA, 74 bp, Homo sapiens
gccggatcctcactgctgcgggcagctgtgagggccccaaggctgttgcagctcctcgacctgatcggttggtc

SEQ ID NO: 367507 - DNA, 75 bp, Homo sapiens
cgcgaattggagaaaaagttcagtgggaagcatgtcgtctttatcgctcaggcgaaaattttgaccagagtcctt

SEQ ID NO: 367508 - DNA, 100 bp, Homo sapiens
cactcaacaattctagccaagaggtcacaaaggatctgcttgatatgattggccagaagcctgtcttagatgttcatgcagaactagacagaattacacg

SEQ ID NO: 367509 - DNA, 100 bp, Homo sapiens
gataatatcaagtacgaggactgcgagcacatggattaattgatgtatgttgagtttatggagctgccttttggtggcttgctttatctgcagtttttaa

SEQ ID NO: 367510 - DNA, 100 bp, Homo sapiens
aagcgcacagaaaaacacaagaagattcagccctgtcatcttgtgcaaagtgaaaggtgtagcagtcactcggcctacacccacagcatcgaccttgtga

SEQ ID NO: 367511 - DNA, 82 bp, Homo sapiens
cttgaacattgaaatgcacaagcagtcttctcaagtcttaggattgcagcaacacgctcggctgcccaaacccaaggcgaag

SEQ ID NO: 367512 - DNA, 90 bp, Homo sapiens
ggccaatcagctccccttcacacttccaggagggcagtgcaccaccgtacagttaagtgggcagaccaacatccacctcagcaaaaactt

SEQ ID NO: 367513 - DNA, 100 bp, Homo sapiens
cgcccgggatttcgatctggacctggcctggcggggcaatgtattccaagatgcagtcttcaatcaaacagttacagttattgaaagagaggatgggtta

SEQ ID NO: 367514 - DNA, 100 bp, Homo sapiens
gggacgggcagctagcgcgaccctgagccggcgcccgtggtccggccatggacgacctcggagctggaaaatgcagaatttatccccatgcctgacagcc

SEQ ID NO: 367515 - DNA, 75 bp, Homo sapiens
caccaaatctggcctgggggcccgagaagcttcctctcaggttcgagaacttgtcttggacaattgcaaatcaaa

SEQ ID NO: 367516 - DNA, 88 bp, Homo sapiens
acaagttttggtggcacgcagcctggggactctgcctcgtgccgctgagcctggcgcagatcgatgccatcccgcccactttctacag

SEQ ID NO: 367517 - DNA, 100 bp, Homo sapiens
cttcgctaagaacccagggcagaaaggtttaggtagcatcacgcagattgccatctcagaagagagcatggaagaggcagggctggaatggaactcagct

SEQ ID NO: 367518 - DNA, 90 bp, Homo sapiens
tcctcattgctccaaactgtgttgtttcagctgtattaggtattggtaaaggttttcaaggtgtcatgaaaagatggggatttaaaggcc

SEQ ID NO: 367519 - DNA, 98 bp, Homo sapiens
cacttctttgagtttctcaccaaggagctagccctgggccaggaccggtgttaactgtctggcctatgatgaagccatcatggctcagcaggaccgaa

SEQ ID NO: 367520 - DNA, 90 bp, Homo sapiens
gctggggaggtcctccatgcgcagtcatgagtcgcttcaagtttatcggtggaggaaggagaggccagtctaccctcccctgccatgacc

SEQ ID NO: 367521 - DNA, 98 bp, Homo sapiens
atcactcgctcccttgatgatcttgaggaccaagaatcgccttcagccctgtctggtgcatccttggcagaaagtgaggaggaaaacacccccattgt

SEQ ID NO: 367522 - DNA, 100 bp, Homo sapiens
ccttgctgtgctgaatcctggctgtgtgaccccaattttcggctttgtgagaaaccttaccatcaaacacgatggccagcaacgttaccaacaagacaga

SEQ ID NO: 367523 - DNA, 50 bp, Homo sapiens
ctcacctacccgcgggctgtggtgaaatgctgacttttaacccacacaag

SEQ ID NO: 367524 - DNA, 74 bp, Homo sapiens
gaggaggaggggctccggctggtctgtggtgagttttttgtagcatcagatccaacagttaaaacagatcgact

SEQ ID NO: 367525 - DNA, 98 bp, Homo sapiens
ttccatgattttttgaatctagactgggctgttctctgtgttaaaccaatcagttgcgaccttctcttaacagggttattttggagctgttggagcac

SEQ ID NO: 367526 - DNA, 75 bp, Homo sapiens
ggcccacctgctgacatctacctgccaggcccactgctcagtggagcgtggaggacgaggaggaggccgtccacg

SEQ ID NO: 367527 - DNA, 75 bp, Homo sapiens
cgaagagcgggacccgagccctggtgccatcatggaagaacaggcagcagaactccttggagtgaagatgtgcac

SEQ ID NO: 367528 - DNA, 82 bp, Homo sapiens
agtttcctgctaatttgcagcttcctccaggcccctacgatggccacgtaccaggtggtggagctgcggatcctgactaact

SEQ ID NO: 367529 - DNA, 83 bp, Homo sapiens
cacagagagggcctgggagcttgctgcagcttcagatgccatggacaatattaccaggcagaaccaattctacgatacccaag

SEQ ID NO: 367530 - DNA, 100 bp, Homo sapiens
aagcattgctggtatttcgaaggactctatccaacctattatatcggacaaggcaaaatctcagcaagttcggacctctagtacaataaggcgaacctcc

SEQ ID NO: 367531 - DNA, 50 bp, Homo sapiens
gtgttatatgtcctaaagtaaggtttcagatgaagtcttgctctgtcacc

SEQ ID NO: 367532 - DNA, 100 bp, Homo sapiens
cagcgatccgcgggctggcgacgtagaggaggacgcctcacagctcatctttcctaaagcatcaacaacagcaacttgtgattggcggtgaccggatatt

SEQ ID NO: 367533 - DNA, 100 bp, Homo sapiens
ctaccagcacatgctgcgtgtcatcaagaagtactggctccagttccgggaaggcccctggggttgctccttgagggcaggacagttcttatggctttat

SEQ ID NO: 367534 - DNA, 83 bp, Homo sapiens
gctgttgcccgcggccccccagccgctggagaaggagaacgacggctactttcggaagacaatgcagatcttcgtgaagactc

SEQ ID NO: 367535 - DNA, 90 bp, Homo sapiens
tgaatgtgaaatacagaacccagcgagtgccaaccgcagtgacccagtcaccctgaatgtcctctcctcacttctaaacttctggaaccc

SEQ ID NO: 367536 - DNA, 100 bp, Homo sapiens
gctgggctgtgctagggaaggggactggagcaggttgaaggggcccggccaggactcggggaagggtggcctgagagcagcgatgacctctggggtcact

SEQ ID NO: 367537 - DNA, 100 bp, Homo sapiens
cgctggtaggccttggagaggcgggttaggaagggctattactgtgtttcgaccccaaaacttcaatcaatttttcatccagcctgaagaatggaaagga

SEQ ID NO: 367538 - DNA, 100 bp, Homo sapiens
cctcatttaacaccattgaagactctgggattaatgctaaatttgtgaatgctgtgtatgataccttacttaatactgcatcagcttctggtgatgtgag

SEQ ID NO: 367539 - DNA, 119 bp, Homo sapiens
cgacgggcatgccaagaagatgagaccgggggaggcgacgctaagttgctgatcgtggcgtgatcagggccaaagcggtcagtgagaaggaagtggactctggaaacgacatttatggc

SEQ ID NO: 367540 - DNA, 100 bp, Homo sapiens
catcgggaagcatcaatccggagtaactggcaagcaggaagactatgaccgtctgaggcctttatcttacccaatgaccgatgtcttccttatatgcttc

SEQ ID NO: 367541 - DNA, 100 bp, Homo sapiens
ataaaacagttgatagcaaagaagataaagttgacagcagaggcagaggattttttatcaagcagaaatgcatcgaacaacgagaatcaagatcactgag

SEQ ID NO: 367542 - DNA, 90 bp, Homo sapiens
ttcgggttcgtcctcttcttggtgctgtggctgatgcatttcatggctatcatctacacaatcacagaactgattggttaccaccctgag

SEQ ID NO: 367543 - DNA, 76 bp, Homo sapiens
cccagtttctacaaataaaagatgggtggattattttctcgatggagggacagtcattttgtttactcattcagcc

SEQ ID NO: 367544 - DNA, 82 bp, Homo sapiens
aagaatattcagagagaagaattttaggacccctccacgtcgctgcgcgcaatggcttaaaggtggtagttgaggagttgct

SEQ ID NO: 367545 - DNA, 75 bp, Homo sapiens
gtgttttagaggataccttggtcccagagtcatcatgaaggttcttgatcaatatgaacgagaaggatttaactt

SEQ ID NO: 367546 - DNA, 100 bp, Homo sapiens
tcacagtttgctctgctcttccaacaccagtggaagatgatcacatcccaggttattgcagctgactgcaaaagggtcacagtgctgaagtattttctgg

SEQ ID NO: 367547 - DNA, 75 bp, Homo sapiens
cagtccccagtgagggtgtacaaatacccctttgaattaattatggcttgatcagggccaaagcggtcagtgaga

SEQ ID NO: 367548 - DNA, 100 bp, Homo sapiens
cagtggcacctgcgcgaagctggccaaagcctgcccagacggctcacctgtgcgggatggaacaaaagtgatgtccttgcattgcccatttttaagcaag

SEQ ID NO: 367549 - DNA, 50 bp, Homo sapiens
cgggtgtggatttgtcttgacggtctgctcaccaggtggccagataccgc

SEQ ID NO: 367550 - DNA, 90 bp, Homo sapiens
aaccaggtcatgctccaaataagttaaaatgcattttgctaatcagtcaatagaacctttgggaagaaaagtggaaaggtctgaaacttc

SEQ ID NO: 367551 - DNA, 50 bp, Homo sapiens
ctgaactactatgctatgatgtttattttaggacagtggaacttatagaa

SEQ ID NO: 367552 - DNA, 100 bp, Homo sapiens
ctggcgtctaccaccagcccttcccagctgctggttgtccaataactgcatcacctacctaggggcagaagccctcctgcaggcccttgaaaggaatgac

SEQ ID NO: 367553 - DNA, 82 bp, Homo sapiens
agagaagaggattccggcgggaactcgactcttggcgccaccgcctcatgcactgtacaatgcagatcttcgtgaagactct

SEQ ID NO: 367554 - DNA, 100 bp, Homo sapiens
ccatcggcaagggcaacttcgcggtggtcaagcgggccacgcacctcgtcaccaaggccaagacccaacatgagtgaagtttcctgcaagaaacgggacg

SEQ ID NO: 367555 - DNA, 150 bp, Homo sapiens
tctggaaattaactgcctccattacactgctgagtcacacacaacgcttgttatgttttcatcacttctctccagaagctttaccaacagggacgcttatgtcaactgggcagtgaattttgtgaattggaagtttttgctaaagtactg

SEQ ID NO: 367556 - DNA, 96 bp, Homo sapiens
atgtggagaaagacattacaccatctgaattgcctgcaaacccagatgagattgtggggaacctgggtgaaggcacctttggcaaggtggtggagt

SEQ ID NO: 367557 - DNA, 82 bp, Homo sapiens
ctacaacttcaagtccgacatctggtccctgggctgtctgctgtacgagatgaaaataaacccatctggatgcatgctgaag

SEQ ID NO: 367558 - DNA, 100 bp, Homo sapiens
aacagattttgcaggatgatggaaaagaaggctgatcctacagttaaagacttaatcggaggcttcacggctcttcactatgcagccatgcatggccggg

SEQ ID NO: 367559 - DNA, 103 bp, Homo sapiens
cacgctgagagggacacgcagtgacgagcggccgaagcagctttgcggctaccaagcagtttctcgaagagattaacaagtggacagttcagtacaatgtttc

SEQ ID NO: 367560 - DNA, 98 bp, Homo sapiens
aacagcccccgaaaacgctacgtgagctgggccctgggccagaggcagaaaacggacggaagaaaaggtctggccggaggatgtgaaaatgctctccc

SEQ ID NO: 367561 - DNA, 100 bp, Homo sapiens
gcggccgaacgatgtgcgagaactgcgcagacctggtggaggtgttaaatgaaaggttgtgagtcccggcccagcccctccacccccctgcccccccgat

SEQ ID NO: 367562 - DNA, 76 bp, Homo sapiens
aaaagatggtcccaaacgttctgtactgtccaagtcagttcctgggtacaaggaaagaccacagcaagattctttc

SEQ ID NO: 367563 - DNA, 75 bp, Homo sapiens
caggacctccactaatcaccagaacaaaatgtgcagttgcaggacgaggagcggaggcggcagcagcagttagaa

SEQ ID NO: 367564 - DNA, 100 bp, Homo sapiens
ttggagcggctttgcagggacatgcagagcatcctctatcacgggcttatccgtgaccagatagaagaagtcagagatgccatggaaaatgaaatgagaa

SEQ ID NO: 367565 - DNA, 80 bp, Homo sapiens
cagaggaaaatgcaagaagactgatggagcaggcttgcaatattaaagtatgatccgaaggagaacaagtggactcgggt

SEQ ID NO: 367566 - DNA, 75 bp, Homo sapiens
gctgcaggaggccaaggacggcgttctggatctcaaagcgtgatgtcttggcattgcccattttcaagcaggaag

SEQ ID NO: 367567 - DNA, 101 bp, Homo sapiens
ttggctgaaccccgtctgcccctgcagctggatgatgctgttcggcctgaggcagaaggagaagagggtatatttacttctggcacatgggaagagaaatc

SEQ ID NO: 367568 - DNA, 51 bp, Homo sapiens
aaccctgaagagaacagccaggcctggcagctgccagacccggccatcgag

SEQ ID NO: 367569 - DNA, 100 bp, Homo sapiens
agcaagaggtgtcggaggtctcatctttgaactactgccggagcttctgccagctgtatgcaggagctattcttgaagtttgtggatgaaaattgggaag

SEQ ID NO: 367570 - DNA, 98 bp, Homo sapiens
tcaaagaataaatatttgtggacagctcaatcttgtttgctttgacaagcccatcctctattcctatttccgaagctcctgctcatggagagttcgaa

SEQ ID NO: 367571 - DNA, 50 bp, Homo sapiens
gcaggggaggaagccacctcgagcttctggagctatttgacagcgaagac

SEQ ID NO: 367572 - DNA, 100 bp, Homo sapiens
cggaccccggcccaggcggccttcgagaaaatgcaggagaagcgggttaaagctgaagctcaacaaagatatagtgatctctgtgggcatttataatctg

SEQ ID NO: 367573 - DNA, 100 bp, Homo sapiens
aaaagcgaaggattgtggtcccgcctcacctggggtatggagaggaaggaagagatatccatttggggatgaagtctactttgacagctagcaaggcgac

SEQ ID NO: 367574 - DNA, 100 bp, Homo sapiens
ggctgaagaagctggagagcagacgaggtgctattcgagtgctagtggtggaacgggaccacacgctggagaagcgactggaggagtggttggggaggac

SEQ ID NO: 367575 - DNA, 75 bp, Homo sapiens
ctcttttacactcaactaattggcatcatcacagtgccaaatctgattccagttttgatgttcaaattgggaaga

SEQ ID NO: 367576 - DNA, 100 bp, Homo sapiens
gcagcatccgctggaggcccagggaacctccacaaggagctcattttctttccagaagtctagatgatgccttaaaacttactgaacaaccagaattagc

SEQ ID NO: 367577 - DNA, 75 bp, Homo sapiens
ttcagagaaaggggttgtggaggaatggttgtcagagtttaaggttttcctcctccaccaggcgctccacctcca

SEQ ID NO: 367578 - DNA, 75 bp, Homo sapiens
cggagggaggatgttaaagccccgcgcctccacctcagatatatgacaagcagttggatgaaagagaacacacaa

SEQ ID NO: 367579 - DNA, 87 bp, Homo sapiens
cctcccacaccgaccaatcctcacgattgagtgtcaaagaagatgtttccattcctgaaaaacccaagcttagatttattgaaaggg

SEQ ID NO: 367580 - DNA, 75 bp, Homo sapiens
gtcttcaccttcggcagccggctgtacgcacacaccatcgcaggaacaagcacatcatgattgacttggggactg

SEQ ID NO: 367581 - DNA, 50 bp, Homo sapiens
gaaagagtcaacagcagtggcaacaggttctccagcatttggctcaaggc

SEQ ID NO: 367582 - DNA, 99 bp, Homo sapiens
gcagcatgaagcgcaccccgactgccgaggaacgagagcgcgaagctaagatgccttcaattaagttgcagagttctgatggagagatatttgaagttg

SEQ ID NO: 367583 - DNA, 76 bp, Homo sapiens
ccggggttcctcgaagcagttttcaggacttaaggctctgggagctggagtgcagtggcgcgatctcggctcactg

SEQ ID NO: 367584 - DNA, 75 bp, Homo sapiens
cttggctgaccttgagtgcagctccccctataagcctcggcctccacaggttttgagcaaaattttggactgtga

SEQ ID NO: 367585 - DNA, 98 bp, Homo sapiens
aagaagcacctggatgagacatttgctacagcatcccacattaagtcaacgtgagaaggcaaccaaagtgcaggacatcaaaaacaacctgaaagagg

SEQ ID NO: 367586 - DNA, 100 bp, Homo sapiens
ttggagcgaggctatcacaagctgcaccagcttctaaccgagtatctgcccaaactggaacttatgctgtagacatttctttgtggtttatctaaaaacc

SEQ ID NO: 367587 - DNA, 50 bp, Homo sapiens
gggagctgtgcagctccttatcatggttcgatacaagaggctgttttcct

SEQ ID NO: 367588 - DNA, 83 bp, Homo sapiens
catgaatctcatcgccaccatctttgtctttgcagtggtcatctatttccaggacacctgctccacttcaccttttgccatga

SEQ ID NO: 367589 - DNA, 97 bp, Homo sapiens
agaaagtctaccttgtacttcaacacccaggagaagagcgccaggcgccgcgggggttgtgaactaaaggccgacaaagattatcactttaaggtgg

SEQ ID NO: 367590 - DNA, 83 bp, Homo sapiens
ctgaggtcatcggggatgtggacgaaggggccgacctcctaggcttaatgccagaccgggagttggaggtgtccgatctcgag

SEQ ID NO: 367591 - DNA, 75 bp, Homo sapiens
atgaggagggacgtgaacggagtgaccaagagcaggtttgaggtactccaaagattcaggtttactcacgtcatc

SEQ ID NO: 367592 - DNA, 75 bp, Homo sapiens
atgcgcccgtgatacaccaagaaatgattatgtggaagactgaggcctgttgaaagtgcagagctcagccctggc

SEQ ID NO: 367593 - DNA, 120 bp, Homo sapiens
cgcgctgcctggtcgctggtgaagcccgcggcgcgcgcctctcccggaccctgcaggatggtggagccagggcaagatttactgcttgctgctttgagtgagagtggaattagtccgaat

SEQ ID NO: 367594 - DNA, 100 bp, Homo sapiens
cagcctcagtgatgtccatgagattcacaatgacatcctttcaagaagtcccattgcagacttccaactttgcccatgtcatctttcaaaatgtggccaa

SEQ ID NO: 367595 - DNA, 50 bp, Homo sapiens
ggcgaatggagcaggggcgcgcagaagcggatgcggggtccagggaagga

SEQ ID NO: 367596 - DNA, 117 bp, Homo sapiens
cagccccgagccatggctctcgccgtccgagtcgtttattgctcccatcccagatctcaaagtgtttgagcgtgagggagtacagctgaatctgtctttcattcgaccccctgaaaa

SEQ ID NO: 367597 - DNA, 85 bp, Homo sapiens
gcacagagcctcgcctttgccgatccgccgcccgtccacacccgccgccaggtatcgagaaccttccctgcgaacttcagaggaa

SEQ ID NO: 367598 - DNA, 101 bp, Homo sapiens
gcgtgcgtcctgacgcacaggagagagctgaagctggcccgagataacttcttccgctgtggtgtgctgtatgaggactccctgtcctcccaggtccggac

SEQ ID NO: 367599 - DNA, 75 bp, Homo sapiens
ttgatcgtcttcctcttcagccatccagtttcatccaggatcgagcagggcgaatggggggggaggcacccgagc

SEQ ID NO: 367600 - DNA, 80 bp, Homo sapiens
gtggcccatgagccggttgcgccacccgaggacaagctgtttttggaaggaagaaagatggaaagcggtgcagttctgct

SEQ ID NO: 367601 - DNA, 100 bp, Homo sapiens
gcccccacaccccgacccacaagtatacctccaaaagaggaaactacaccttacatagctcaagactgttatctcagtgtatggagtattttgatttgag

SEQ ID NO: 367602 - DNA, 75 bp, Homo sapiens
tgtggaaacagcaagtttaaaaatttggaatgcaaattacttcctgaatcagagatcattgatttcttcctgggg

SEQ ID NO: 367603 - DNA, 82 bp, Homo sapiens
caaagataagaagagaaaaagagaagatgaagaaacccagcttgatatgttggctactgcagcactggggtgtcagttgttg

SEQ ID NO: 367604 - DNA, 87 bp, Homo sapiens
aacatcctgctagacttgttaagctcctggtaacgtttttatccatggatgacttgcttgggtaaggacatgaagacagttcctgtc

SEQ ID NO: 367605 - DNA, 51 bp, Homo sapiens
tgaaattggcagatacccatttaaggatcaatgtgactctaagaacaaatg

SEQ ID NO: 367606 - DNA, 100 bp, Homo sapiens
tctgaggaagcccaactcctatgagctcctctctggcaggccaataacggaaaactgcctgacaacaaagtcattgctagtgaactaggcagtatgccag

SEQ ID NO: 367607 - DNA, 90 bp, Homo sapiens
ctgcaggaggggctcaggaacctgggcatccctctgggccaggacgccgaggagacatcacttagtgctcttacccagctgatgaaaaag

SEQ ID NO: 367608 - DNA, 50 bp, Homo sapiens
tggatctcttatccatcacatggggaatctttgccacctcctcatagctc

SEQ ID NO: 367609 - DNA, 100 bp, Homo sapiens
gcggccatggcgcgaggagacgccccgcgggacagaaatcaggtattatgatgagctgtgtacagcaatggctgaggaattgaatgctgtcattgtttcc

SEQ ID NO: 367610 - DNA, 96 bp, Homo sapiens
attcagatctataaatactgaagtggtagcatgctctgttgattcacagtttacccatttggcctgggtgagacatcccctccttggagatctaag

SEQ ID NO: 367611 - DNA, 100 bp, Homo sapiens
ctgggtcccccggtggcctcaccagcctccagcagcagaagcagcgcctgatcgagtccctccggaactcacactccagctcctctggtgcaagtgtggt

SEQ ID NO: 367612 - DNA, 100 bp, Homo sapiens
ggagccggcagccgacggcaaaggtgtcgtggtggtcattaagcggagatccggaaatctgaaatagagtactatgctatgttggctaaaactggtgtcc

SEQ ID NO: 367613 - DNA, 100 bp, Homo sapiens
ttccggaagttcctggtccacaatgtcaaggagctgagagtgctgctgatatgcaacaagctggtgtacagggagcaacaccggagctggtgcacgctgg

SEQ ID NO: 367614 - DNA, 100 bp, Homo sapiens
ggagagtaaagtcagcatgagcaaaaactccaaactcctctccaccagcgccaagagattgaaaaggaagatcaggccaaccccaaagaagaagtgacca

SEQ ID NO: 367615 - DNA, 75 bp, Homo sapiens
acttcaggaacaaagctacgtttttccaggacttcagggccacaggtgctgccaagatgctccagggcacctgct

SEQ ID NO: 367616 - DNA, 100 bp, Homo sapiens
gtggattctgaggaccggaggagccgccactgcccgtacctggacaccattaacaggtcccctctgagccctctcaccttgtcctgtggaagaagcacag

SEQ ID NO: 367617 - DNA, 83 bp, Homo sapiens
gttctcgctccggagccgctgcacatttcggacctccggctagcctgtttcagccacctcgtcgtcctggccttggaactgtt

SEQ ID NO: 367618 - DNA, 86 bp, Homo sapiens
cgaggaggaacgcgctaaggcaaagcacctggttgcttctagaactgctggagttactgtttgacaagtttaatgctgtagccgct

SEQ ID NO: 367619 - DNA, 98 bp, Homo sapiens
ttgagctccaggagttcgtctcttacgtctgcggaagtgcagctgcctcagttcttagcgcaggagcgaatccgtttagctcgacagattgagaaatc

SEQ ID NO: 367620 - DNA, 51 bp, Homo sapiens
cgaagaattcatgaagcaattatccagagattggaagtaaaggaagatcag

SEQ ID NO: 367621 - DNA, 100 bp, Homo sapiens
gggcgcagtcggcgccgctgcccatggagggagtggacatcagccccaaacaggacgaaggcgtgctgaagggcgcaccctacgacgcgcacaccaccgg

SEQ ID NO: 367622 - DNA, 100 bp, Homo sapiens
catgtttctagtagcgcttagtgaatatgatcaagttctcgtggagtcagacaatgagataacaggaggcgcagggttcgtgggctcccatctaactgac

SEQ ID NO: 367623 - DNA, 91 bp, Homo sapiens
caggctccggcttccgtcccggacagagcccgtggtcgcgcagataacgaaggaggcccaacttcattcaataaggagcctgacggattta

SEQ ID NO: 367624 - DNA, 82 bp, Homo sapiens
ctaccacctatatagatccccgcacaggaaaatctgccctgtgactctcctattccatctgtttcttcgggatcatcttcac

SEQ ID NO: 367625 - DNA, 74 bp, Homo sapiens
acacctgtgctcctatacaagattaacattcatcccagttgtgacatgatggaactaaggcgccgttatcaaaa

SEQ ID NO: 367626 - DNA, 83 bp, Homo sapiens
ccaattacaatgacagatacgatgaggtcttgcaagagcaaaatccgtccctagccacacatactccaacgaagtggttacct

SEQ ID NO: 367627 - DNA, 100 bp, Homo sapiens
ccagccggcgcctgcgtgtgcttgaggccgaaacccaggtatggcccatctcctgtacgcttggagcgacctttggctacgtggctggccttgttatttc

SEQ ID NO: 367628 - DNA, 88 bp, Homo sapiens
ccagctcaaccgcttcgtgcaactctccgggcggccgcacctgccagataagcaacgatgtgctgagctgaagaaagccttgtgtact

SEQ ID NO: 367629 - DNA, 50 bp, Homo sapiens
cagctggaagccctgttgctgccgccgccgcgccgccgtcgctctccaac

SEQ ID NO: 367630 - DNA, 101 bp, Homo sapiens
tcagaatcaccatccgcggcgcgggagacgagccggccgtcccgggccgggggacccgcccgccatggccaccaaggatctgtctggctccattgatgacc

SEQ ID NO: 367631 - DNA, 60 bp, Homo sapiens
ctgatgggtatgaaaagtcccaggaagtgtcacaccatgtctgaccggaaggcagtgatc

SEQ ID NO: 367632 - DNA, 50 bp, Homo sapiens
gcggggaccgctgtgctctcggtggttgtgtcaaaccgattggtgacatc

SEQ ID NO: 367633 - DNA, 82 bp, Homo sapiens
cggcgctgagcgggtcccccccgcagactgagaagccgacccactacaggctccctggggaagggaatgcagggttgctggg

SEQ ID NO: 367634 - DNA, 74 bp, Homo sapiens
ggcttttggagtcctcagtgaaaccttgtatgagctgctgcagctggcccaggaagtacacgagaagctccgag

SEQ ID NO: 367635 - DNA, 100 bp, Homo sapiens
taatgctagaaaatttacagaaacactcaacaccccatgctgcattccagccaaattcccaggatgactgtcttaggtcattgacgagatttgccgcagc

SEQ ID NO: 367636 - DNA, 83 bp, Homo sapiens
cggctcctcagagagcctcggctaggtgagaagccctaccactgcaactgggacggctgcggctggaagtttgcgcgctcaga

SEQ ID NO: 367637 - DNA, 120 bp, Homo sapiens
cactgcggcgccgaggcgcggcggcaggacgggaaccacgcgagctgcagccaggtcaggagcgggtcgtgattgccgacgatctcccgcacccgttcggtctgacgcagtacagcgatt

SEQ ID NO: 367638 - DNA, 83 bp, Homo sapiens
gtgcagaggatcctggaggcctgggaagccaacgaccacacgcagctgaaggggatgctaagggagataaagcaaaggtgaag

SEQ ID NO: 367639 - DNA, 74 bp, Homo sapiens
gtcaccgtgtgggagcgggagctgcggaaagatggtgagaacaagaccaagattggaaagccagcttcagagga

SEQ ID NO: 367640 - DNA, 51 bp, Homo sapiens
ttctctcaattcaccacttggatcacaggcttgcttccggcgtcatggctc

SEQ ID NO: 367641 - DNA, 90 bp, Homo sapiens
cggcggcggtggcctgaggaggcccgagcggcggcggtggcggcgaaggccgaggcgatgatgtgcgaggtgatgccgaccatcagcgaa

SEQ ID NO: 367642 - DNA, 75 bp, Homo sapiens
ggcctcccgaagtgctgggattacagatggaaactgtcaagcaaggcgttgatcagaagctggtggaaggccagg

SEQ ID NO: 367643 - DNA, 74 bp, Homo sapiens
gcttctctgaggcggcgagagatggtcaggtctggagctcgaccgggccaggaggattctctatgggaggatgc

SEQ ID NO: 367644 - DNA, 74 bp, Homo sapiens
catttcgtggttcacccgctgccgggcaccgaggaccagctcaatgacagtttttacccacctcttgatgaacc

SEQ ID NO: 367645 - DNA, 74 bp, Homo sapiens
cgggtggaaaccaggcggccagccagctggaggccatctcaatcagtgaccacactgcccttgctcaattctgc

SEQ ID NO: 367646 - DNA, 100 bp, Homo sapiens
tggatcttctgccgcaccaggctcatcctgtccatcgtgtgcctgatgatcacgcagctggctggcttcagtggaccattggcaaatggatggatttatg

SEQ ID NO: 367647 - DNA, 75 bp, Homo sapiens
tgtctacaaaagattgattgacgtcccagtgcctgatttgagatggggtcccaggtctcggtggaatcgggagct

SEQ ID NO: 367648 - DNA, 75 bp, Homo sapiens
attgactggaaagcaatgtgtcaaccgcattattactgaaaagcgactgcatttgcctccagacttgtcagacac

SEQ ID NO: 367649 - DNA, 100 bp, Homo sapiens
ctacaacaggcctgcgccggcggcagagaggatatcttgggcgggggatgtgagcgctgagcccttggcagatttctcacattggcaaactgagagattt

SEQ ID NO: 367650 - DNA, 100 bp, Homo sapiens
ttctgctgcagcggctggcagacggggccatcgacctctatgccatggtggtggttctctcgaggttggggtgaccaactcatctggactcagacatatg

SEQ ID NO: 367651 - DNA, 49 bp, Homo sapiens
ctaaatattgcggcagttttatactgcaaaattcaaaatggggctcaag

SEQ ID NO: 367652 - DNA, 82 bp, Homo sapiens
atacccccaggagtaagagcccatagcagtctgccagacaatagagcatatggatatcagttttagagaatgtggcgtggag

SEQ ID NO: 367653 - DNA, 75 bp, Homo sapiens
gcgctctataacccctaccgccacgcctttagaagaagccacactctctgaattaaaaactgtcctcaagagctt

SEQ ID NO: 367654 - DNA, 96 bp, Homo sapiens
aacacccgctgctgcccgcccgctgcctgcctgcctggcatctctctctcccggctcacagaacatttcctgcctgttgctcacactctgttgtcc

SEQ ID NO: 367655 - DNA, 75 bp, Homo sapiens
ggaagcggcgcgagcgccccgccatcgtcccgttctcaaaagtctatggccctgtgttcactgtgtattttggcc

SEQ ID NO: 367656 - DNA, 75 bp, Homo sapiens
cagtccaatgtcaacattgcccagcaagtggttctagtaaataccgcttgctgtgttttgatgttggtggctaag

SEQ ID NO: 367657 - DNA, 100 bp, Homo sapiens
gtgaactctatagattctgctggtatacagctacatccaggagagaatgctgacagtcctgcaggtgctggagaatctggtaaaagcaccattgtgaagc

SEQ ID NO: 367658 - DNA, 87 bp, Homo sapiens
catcaccaagctggaggtggacgccatcgtcaacgccggggtcgggccccggctcagtggtcccaggcagctcgggtgtcggaaccc

SEQ ID NO: 367659 - DNA, 99 bp, Homo sapiens
aggagctgcagaacagaacactttctcatgtccagggtcagattacaagctgcagtgttgtggtataaatggcacgagtgattggaccagtggcccacc

SEQ ID NO: 367660 - DNA, 90 bp, Homo sapiens
gggtggctctgaggtcgcctggggaccccagaaggccatcgaggagggcacgctggaggagatcgaagaggaggtccggcagaagaaatc

SEQ ID NO: 367661 - DNA, 98 bp, Homo sapiens
gccaagtaggggattgcgttccctccagtcgcagatgcaggagaggtgtatgtttggggaagcaacaagcatgggcaactggctaatgaggctgcttt

SEQ ID NO: 367662 - DNA, 100 bp, Homo sapiens
taatttggaagaaggaagagcaacctggaaactgacaggaaaggatgacaagttgggagtcacagatagatggctccccaataccagaagtgagttcggc

SEQ ID NO: 367663 - DNA, 96 bp, Homo sapiens
ccggagcgacagaaaacttggaactaagctggaggacaccgagtactcttatgcagtccccatgtgagacctgcggaccagcaacatcacatcgtc

SEQ ID NO: 367664 - DNA, 100 bp, Homo sapiens
ccccgccgccgccgccgccgccgccgtctggccccagctatatgttctcctttcagccaagacctttcaccagtgcaggggatagaagattcattccaca

SEQ ID NO: 367665 - DNA, 82 bp, Homo sapiens
gcggagtagagcggagcctggcgggcgtgggaacccaggccccgccgaggcggccagtttaatggatcgagaagtggcgttg

SEQ ID NO: 367666 - DNA, 83 bp, Homo sapiens
cagcactctgggcgaaaattggatgtgaaaatgaagccagaccgagcccctgaatgtgacagtgatccgcaggggggaaaaac

SEQ ID NO: 367667 - DNA, 101 bp, Homo sapiens
aatgaaccagaactttttacaagctctattccagaaacaagtcgagttttagctcaggcaagtggcaatggtgttatccatttgctagatcttaaatctgg

SEQ ID NO: 367668 - DNA, 74 bp, Homo sapiens
tggagccatcctctacaggacccgctttctaccattaaggaaaagctgcaggtagccctgcagaggctgataaa

SEQ ID NO: 367669 - DNA, 82 bp, Homo sapiens
gctggctttgggggacccacctgtgagacagggttatatcctgtgttgtgacctcatggtttaagtgggaataaagatgagt

SEQ ID NO: 367670 - DNA, 90 bp, Homo sapiens
gtgaagtggttgcggtaacctggcctgggcctgaagtgagtgagaggcacatgaaggtgatgagacaaaccatgcttctgccacatcaac

SEQ ID NO: 367671 - DNA, 100 bp, Homo sapiens
ttttgctttccatagaatgttggctcaattaagaaacatcagggagataaattcaacccagtgggaatgaaggatggcagcatgccgtgcattaaaagct

SEQ ID NO: 367672 - DNA, 90 bp, Homo sapiens
cttgcaacagtggccgcacgcatagagctgacatcgcgctgatcggattggccgtcatgggccagaacttaattctgaacatgaatgacc

SEQ ID NO: 367673 - DNA, 82 bp, Homo sapiens
tgaatcctaacagaccaaaagtgttaaatgtgatcagccttgaattttcagatacaaaaaaccccagtatatcgattctcgt

SEQ ID NO: 367674 - DNA, 100 bp, Homo sapiens
tgcgggaaatacttcctgtttggcttcaacattgtcttctgggtacccattcctggcccagtgggtaacaagagaatggttcatttttccccggattctc

SEQ ID NO: 367675 - DNA, 99 bp, Homo sapiens
atatgtcccttatgaacaaggagcaccttgtgccagttgcccagataactgtgacgatggactatgcagatttgctcgaatatttgggtacccagtagg

SEQ ID NO: 367676 - DNA, 83 bp, Homo sapiens
caagcttaggaccacccaccatgcctatccagccatgccagtgacggtaacccgcaccaccatcacaaccaccacgacgtcat

SEQ ID NO: 367677 - DNA, 100 bp, Homo sapiens
ggctgtacagctcctcaagtgcaacaagtcccacttccgaaaccacaagtttgccgatgccatcaccatcgaggctgagccaagagctgatggcagccgc

SEQ ID NO: 367678 - DNA, 73 bp, Homo sapiens
cgccacagcccgcgaagccaacgagtgcgtgggccgagacgcatccagagctttcgtgaccggggactgttct

SEQ ID NO: 367679 - DNA, 82 bp, Homo sapiens
caaagcctgtttggtggtctcttcccacggacgcgcgagacaatgaggagggctacttctacaagtccgaacagccagtcca

SEQ ID NO: 367680 - DNA, 98 bp, Homo sapiens
gatgacacagaacgcttgcccagcaaatgcgaaggtggtgaaaacaggaatgagaacgaggagtcaacctcaaaggctgaaacctcggaagattcagc

SEQ ID NO: 367681 - DNA, 101 bp, Homo sapiens
catgagcggcggcggcgacgtggtgtgcaccggctggctgaggaaatcgcctcccgagaagaagttgaggcgctatgtatattactcgaggggtttttaaa

SEQ ID NO: 367682 - DNA, 97 bp, Homo sapiens
gttgacgtgtcaagcactaactgtggtagaaggacagcccccctgccctgagacaacactcggaggcctgtattccagcgagagtgccctgacaaga

SEQ ID NO: 367683 - DNA, 75 bp, Homo sapiens
atatgcagtttggtttggaggatcaatgctggcttccacggatggtgtcaccctcccggcatctgtcaccagtga

SEQ ID NO: 367684 - DNA, 48 bp, Homo sapiens
ggggaagggcctcaaagccagaagggaactctaatgatccaggacaaa

SEQ ID NO: 367685 - DNA, 98 bp, Homo sapiens
gtccactcagtggggcctgctattcccctgagttcaaaggtcaaatctgcagggtcaccacaaccactctgcttcatttttgggagaaaacttctcac

SEQ ID NO: 367686 - DNA, 100 bp, Homo sapiens
acgaccttcctgcccttcacgctccaggagctaggtggggcaggagaccctgtaggaggaccccgggccgcaggcccctgaggagcgatgacggaatata

SEQ ID NO: 367687 - DNA, 100 bp, Homo sapiens
tccttcgtacccacagtgcttcatgagaggtgtgtgatcctgtaaaattaaatcttccaagatgatctggtatatattaattataggaattctgcttccc

SEQ ID NO: 367688 - DNA, 101 bp, Homo sapiens
acgagactgggcatccttgctttgttcctaaacaggaggtgaaaacattcagtcttctgccattagatattaacctggctgcagagccaaaagtgaaccga

SEQ ID NO: 367689 - DNA, 99 bp, Homo sapiens
cccgcgtcaacaaggagcatgagcacaagctgaagggtgcgatagcgaactcgctgacctgcgtgcagctgcacaagagagctgagaagatcgccgtga

SEQ ID NO: 367690 - DNA, 83 bp, Homo sapiens
ctctccatcccttccgaggcccgacttcgggcgaactttctgaccaagtatacaactacccagagggcctaggagaagtgctg

SEQ ID NO: 367691 - DNA, 98 bp, Homo sapiens
tcgtcatggagacaggtgctctcggttgcacaataaaccgacgtttagccagatttcgacctcatcaggatgcaaaccccgaaaaaccacgtgttgct

SEQ ID NO: 367692 - DNA, 100 bp, Homo sapiens
gcgctgtcgtgctcctctactcgagtcagatggagttcagtatctccgccctatccatccaggagccgagcaacggcaccgccgccagcgagcccagacc

SEQ ID NO: 367693 - DNA, 50 bp, Homo sapiens
ccaaaagattgggttggtatattcaagagtaaagccaatcccagctgaag

SEQ ID NO: 367694 - DNA, 100 bp, Homo sapiens
gtctgagatctcttacctttcaaagtggtgggatattatagatattcagaagaaggatgctgttaaaaggctttggtatcaggatgattctggcctcata

SEQ ID NO: 367695 - DNA, 100 bp, Homo sapiens
ctgtggaagggctccttcaagcccagcgagcatggtcacttcctcctaacccatctgctgctagagaaactaaaggaatcagccccatcaaggatagtaa

SEQ ID NO: 367696 - DNA, 75 bp, Homo sapiens
ggaacctgccgtttacctctaggaggatttgctgagctcatgggtgctggagaatctggtaaaagcaccattgtg

SEQ ID NO: 367697 - DNA, 83 bp, Homo sapiens
cccgcccgcaccgcgtcggggcgccctctccactgcgcgcggaaggatgcctgtggccctcggagagcacagtgtcaggcaac

SEQ ID NO: 367698 - DNA, 75 bp, Homo sapiens
tggggaccgggaccgggatcgtgaccgtggagggtcccaggtgtgacaccttcagcaggtctcagggaagatggc

SEQ ID NO: 367699 - DNA, 100 bp, Homo sapiens
tctggctactatccggatgaaagctacaatgaagtatatgcagaggaggtcccacaggctcctgccctggactaccgagacatggatgggtgcaaaaaag

SEQ ID NO: 367700 - DNA, 101 bp, Homo sapiens
tcaggattcttaacgaagccaagaagttagcaaatgatgtaaaaggttttgaaagttgtagtaatggtgtaatatcaaataaagcacatcaatcatattgc

SEQ ID NO: 367701 - DNA, 97 bp, Homo sapiens
gctgtctggacaagaagtcgtagggggtgagggtggaagctgggaaacccacaggaggcaaccacactagtttagtccctgtgtgagggaatgcgta

SEQ ID NO: 367702 - DNA, 75 bp, Homo sapiens
attgatgaccacacagacctcgccattgagtatgaggtggattacaaagctgacgagtggctgatgaagaacatg

SEQ ID NO: 367703 - DNA, 75 bp, Homo sapiens
accttcaactatggcaaatattgtgaaaggcctgtataccctcagaccagatcctatgaatgcactccagagcct

SEQ ID NO: 367704 - DNA, 50 bp, Homo sapiens
ctcatctgctccatcccgctcgtgatgccagagtggtacagttcgaacaa

SEQ ID NO: 367705 - DNA, 100 bp, Homo sapiens
ccgtgaccgagagcgtgaccgagagcgcgaatatcgtcatcgttagaagagtcaccatcatgtctcttctcaccaccctctgaatctgcattagccagtc

SEQ ID NO: 367706 - DNA, 83 bp, Homo sapiens
cttctcgcggccccttagcgcggtcaggccgccctccttttccagagaagcagggccctgagcggaagaggattaagaaggag

SEQ ID NO: 367707 - DNA, 74 bp, Homo sapiens
ggtgaggcaggctcgagtgcacggagcgtcccttccatcaggagaggagctgctgctcttcctccagaacctgc

SEQ ID NO: 367708 - DNA, 75 bp, Homo sapiens
ctttcttacaacttcccttccagcctatcgagctcaactccttcaccaagactacatgaggaaataattgacttt

SEQ ID NO: 367709 - DNA, 75 bp, Homo sapiens
gaggaggaggaggaggaggaagctaaagaacgtgccaatggaatggagcttgatgggcgtaggatcagagttgat

SEQ ID NO: 367710 - DNA, 51 bp, Homo sapiens
ccagaaactgtgccaggatcacggcgcgggcggtgatgaactttgtggttc

SEQ ID NO: 367711 - DNA, 75 bp, Homo sapiens
accgcctgagctttctacaccgggctccctggggaagggaatgcagggttgctggggctgggcccagaagcagca

SEQ ID NO: 367712 - DNA, 87 bp, Homo sapiens
aaagaatactgtgaattatgcaagcacagatttgcttttacaccaagaggcaagtgaggcctatctggttggcctttttgaagacac

SEQ ID NO: 367713 - DNA, 90 bp, Homo sapiens
aggcctccccagccatgtggaactgggagttgctgagtcagcccagaccggaaggagtggcagagatcatttgccccaagaacggcagcg

SEQ ID NO: 367714 - DNA, 100 bp, Homo sapiens
ggaggatgatggtgaggcaggagaggaggacgaagaggtgtgtgatggatgatgacaatgaagtaagggaccgagccaccttctacctaaatgtcctgga

SEQ ID NO: 367715 - DNA, 122 bp, Homo sapiens
ctgcagtttcaaaagaattggccaaagaagttgagaaaatgggagcagttttcatggatgcccctgtttctggtggagatatgtcagtattgaattctcccagacatcagagctgtataatg

SEQ ID NO: 367716 - DNA, 80 bp, Homo sapiens
tggaaaccaagataaagatgcccattttccaccaccaagcaagcagctgtgcctttggctgcaacaagtatgttgattac

SEQ ID NO: 367717 - DNA, 80 bp, Homo sapiens
ctgaacagcattctatcatggaaggaggagatgaagggcaagggccaaaatgatggaagcagtcaattatagatttcttc

SEQ ID NO: 367718 - DNA, 87 bp, Homo sapiens
ctcctcgctgggcatgatcgaggccacagcccaggtcacagtgaaagccgctacatctgttacttttgttggtgttatgggaatgag

SEQ ID NO: 367719 - DNA, 83 bp, Homo sapiens
gcatctagtctttccgcttcttgaatttctctctgtaaaggaggaatactcccccagttgcaagaggcgcaggaccgtggaag

SEQ ID NO: 367720 - DNA, 75 bp, Homo sapiens
aactttggccctgcgcctcgtccagcctaggttccacccttttctgggaaccgcttctctgaagtagctttggaa

SEQ ID NO: 367721 - DNA, 75 bp, Homo sapiens
gtcgtggcagagaaaaccagctgagacagggcgccacttactaggtattaatctctggagaagacacatccacag

SEQ ID NO: 367722 - DNA, 99 bp, Homo sapiens
tgcccagaaggacctgtacagggatgtcatgctggagaactacaggaacctggtctcactggggctttgtggagtggtcaaaagctccacaacaaacaa

SEQ ID NO: 367723 - DNA, 82 bp, Homo sapiens
ggcagccttgcgctgctctaatggtccggacttccgtgtggtttgccttcccggattgggcctacaagccagagtcgtcccc

SEQ ID NO: 367724 - DNA, 100 bp, Homo sapiens
cgtcaatcagagcgtcctgtgcggtcacccgtgtgaacagaaagtgagaggttgtagcacattgccaccgtccagatctcgggtcatctcaaacgatgga

SEQ ID NO: 367725 - DNA, 100 bp, Homo sapiens
tcctggcgcgggatctgctgaggggtcacggctgctgagcttcgtgcttatctgaaatctaaaggagctgagatttcagaagagaactcggaaggtggac

SEQ ID NO: 367726 - DNA, 90 bp, Homo sapiens
caagagcttagttgaactccttacattaaagtatgtgtcctttgtggatgaatcccacattaggatggtgaaccagcagctactagggag

SEQ ID NO: 367727 - DNA, 89 bp, Homo sapiens
gtagtgggcatcctcaacttcgtagcctacactctagggccatgctatgatagtggaagcttatccaaaataatagatccagaagaagt

SEQ ID NO: 367728 - DNA, 99 bp, Homo sapiens
aatctttcgctccctacacaccctggttggacagcagatataatttctacagtagaatttaatcattctggagaattactagcaacaggagataaaggt

SEQ ID NO: 367729 - DNA, 100 bp, Homo sapiens
aggagctggactccctcaagtacagtgacctgcagaacttagccaagagtctgggtctccgggccaacctgaggaataatccagaatggctactctgatc

SEQ ID NO: 367730 - DNA, 76 bp, Homo sapiens
agccgcggcggcagcagcagtgagaggggcagggtggacaggaagcagctcagcccagcctgggagaggccaaggg

SEQ ID NO: 367731 - DNA, 75 bp, Homo sapiens
actcttcagcgaccacgcaggcactttcccggtccccagtctagagcatgtttggaaaggattcaagaattagag

SEQ ID NO: 367732 - DNA, 100 bp, Homo sapiens
gcagatggcggatgccctgcagtacctgcagaaggtctctggagacatcttcagcagttcttttagaactcatcaaattgaagctgttccaaccagctct

SEQ ID NO: 367733 - DNA, 75 bp, Homo sapiens
tttacacatctcacccaattcaggtgtgactgcacagaaaagttacaaaacaaatttgactttttgcgctcacag

SEQ ID NO: 367734 - DNA, 103 bp, Homo sapiens
cagcagatggcggatgccctgcagtacctgcagaaggtctctggagacatcttcagcaggtgaaatgacaatggatgctctgttggctcgattgaaacttctg

SEQ ID NO: 367735 - DNA, 75 bp, Homo sapiens
aaatacttcatatttggcttcaatgtcatattttggccaataggagctctgaacccaaaaagagcagcattcttc

SEQ ID NO: 367736 - DNA, 82 bp, Homo sapiens
cgacgagtacgactacctattcaaagcaaacggggattcagcgtccgatcctttggaacagggactcacgtgaagcttccag

SEQ ID NO: 367737 - DNA, 102 bp, Homo sapiens
gccccgcgagcacagagcctcgcctttgccgatccgccgcccgtccacacccgccgccaggccactcttcacctccaccatgagcctggacatccagagcct

SEQ ID NO: 367738 - DNA, 100 bp, Homo sapiens
cttcacactgcagaactgggttctggactttgggcgtcccattgccatgatcatcaatgctgtggtactgttgattttattgagtgccctggctgatccg

SEQ ID NO: 367739 - DNA, 80 bp, Homo sapiens
tgcaagtaatcagtctttgacaagtgatgagaagctgtcggagcttcccaaggatgtgaggtctggaacagctgcagcca

SEQ ID NO: 367740 - DNA, 100 bp, Homo sapiens
gtggaaaatttcctagaagcttgcagaaaaattggtgtacctcaggtaaattggcaggatgaggagcagcaaatcaaaagaggtgcctttaccaaatcca

SEQ ID NO: 367741 - DNA, 82 bp, Homo sapiens
ggctctgatcagagaaaacaagcaaatgctgccttccttgttggatgctacatgggggtgaatctctacattaagaacttgg

SEQ ID NO: 367742 - DNA, 90 bp, Homo sapiens
ctagtttggatgtggaggggaatagactccatctatccatatgagaagcactaccacaggaagagcaagaaggaagtggaagtgaggaga

SEQ ID NO: 367743 - DNA, 75 bp, Homo sapiens
gtggctgagaaatacctcgacatccccaagatgctggatgcagagggaccatcagcacgtgcccatcgacatcca

SEQ ID NO: 367744 - DNA, 96 bp, Homo sapiens
agtcaataacagccaaactgagacacataatgttttctacgatctcacacgttcacccatgccggagtgcagctgtatgatcttggttcactgcaa

SEQ ID NO: 367745 - DNA, 75 bp, Homo sapiens
ggtgacagcctcaagggcttcagcaccgcgcccatggcagagccagacctccacaggaaacgtgtggatgacaca

SEQ ID NO: 367746 - DNA, 100 bp, Homo sapiens
ctcggaagagcgctcccaggagaaacaagtgacgccttctgggccccatctgtccttcctcacagcaccctcagcaccttaagccaccaccctcagccac

SEQ ID NO: 367747 - DNA, 50 bp, Homo sapiens
gggcaaagttagaccttccagaacctggttgtggcagcactgcctgaagg

SEQ ID NO: 367748 - DNA, 98 bp, Homo sapiens
agtgttctgctttcatggagttcacagaagagtcgaggagcccttcagcatgccggcaaacacatggaggattgcattgtggcctcctacacagcact

SEQ ID NO: 367749 - DNA, 51 bp, Homo sapiens
gctactgcgaagacagctggcaggtactccaaagattcaggtttactcacg

SEQ ID NO: 367750 - DNA, 95 bp, Homo sapiens
gacggaaagcttgaattacctacatggattggcagccaccatttgcatgtgatgttgataaacttcattttacgccacgtatccagagactgaat

SEQ ID NO: 367751 - DNA, 100 bp, Homo sapiens
cagtagggtgagcacataaaaaatccatgtcttgcacctgtattttagcgtactatgcagaatgatatggaacctagcaaagctgttccactgaatgcat

SEQ ID NO: 367752 - DNA, 100 bp, Homo sapiens
cttgcaagaaactcctcaagggcctcttccggcagggcctgcaatgcaaagagtgggaagctttggggtggccggtttgtgggtgcagtggaccccatca

SEQ ID NO: 367753 - DNA, 100 bp, Homo sapiens
gatggctgctgcggaggcgttggagcgcggaaatctggaaccgggatggcgacgtctacactgagtcggaggcgaagaccatcatcaaagaggggatgct

SEQ ID NO: 367754 - DNA, 75 bp, Homo sapiens
caggagtcatcggacgccagaatctgtgaaggagaacgacctgctcagaatgagaagaggaaggagaaaaacata

SEQ ID NO: 367755 - DNA, 73 bp, Homo sapiens
ttcaagaccagcagagaccggaaggatcacatgggcgccaatgcttcggcattagagaaagagattggtccag

SEQ ID NO: 367756 - DNA, 75 bp, Homo sapiens
ctggggtcccttttgcctcagatactattttgaaggaccgtataatagacgctggccccaaaggaaactactctc

SEQ ID NO: 367757 - DNA, 107 bp, Homo sapiens
ctataaagttatccaggagccacaaagtgagggctattcacgaaaagcagcagctctagagttcttaaaccgctttgaagaagccaagcgaacctatgaggagggct

SEQ ID NO: 367758 - DNA, 100 bp, Homo sapiens
caggaggcggcaggacggccaagaccagcgcgagggccctgggcaaggcccgacagatctgccgacaccccaggccatcgagccccaggccatcgtgcag

SEQ ID NO: 367759 - DNA, 98 bp, Homo sapiens
aaagatgatatcaagagggtcatggcggcgatcgagaaagtgcgcaaatggtgtcatggagaaactccagctgggcccagagattctgcagcgggaaa

SEQ ID NO: 367760 - DNA, 50 bp, Homo sapiens
ttggcagctgtcctccagtcttaaaagcatgctggtagctgccatccagt

SEQ ID NO: 367761 - DNA, 75 bp, Homo sapiens
actgaagatgccttctcagtcagttgaggaagcagttcaggtacttttgaagcattctgcagatgttaatgctcg

SEQ ID NO: 367762 - DNA, 50 bp, Homo sapiens
cggccaaggatgaagcctcacttcagctgctgatgcaaggaatcccctgg

SEQ ID NO: 367763 - DNA, 100 bp, Homo sapiens
gcttgaggccaagcaccgagagagaatgtcccaggccactgagaatgcaaaggaggaagtgaggcgaattctggggctgctggatgcttacttgaagacg

SEQ ID NO: 367764 - DNA, 83 bp, Homo sapiens
ccttattgtggcattgcgccgtacattcgagagtttgagattgatctggatactattgatgtaagcaacctcaacagacagtt

SEQ ID NO: 367765 - DNA, 75 bp, Homo sapiens
aaagtgattccccggaatcgtgtgctgggctggtcccccttggagcctgctgcagtcggtccaggaggccctgga

SEQ ID NO: 367766 - DNA, 99 bp, Homo sapiens
aacaaatcttgttatgaagatgatttagactatgtgtttgcgcacttcagtggcatctttcttacaagtactgtctactttctggcctactgcatagcc

SEQ ID NO: 367767 - DNA, 82 bp, Homo sapiens
gtgatttgctccccctcgtgcagcaacccccacacccagcaccaggcttgggcactgtttaaaggaaagttccgagaaggca

SEQ ID NO: 367768 - DNA, 51 bp, Homo sapiens
ctggacacagaagtatttgtgacaggtgatgatgaacagtctacacagatg

SEQ ID NO: 367769 - DNA, 90 bp, Homo sapiens
acatgcatccaagttccagtttgtggcctcctaccaggagctcatggttgagtgtacgaagaaatggtgagaactaggacagttgctgag

SEQ ID NO: 367770 - DNA, 82 bp, Homo sapiens
aaccaactgttacaatcaaggtctatgaagaggccagtgctgctgaggaagcagatgtgcacgtagctgtggtggtgagacc

SEQ ID NO: 367771 - DNA, 100 bp, Homo sapiens
aatatatctactcccagaggaattccagacacaccaactctacaacattacctgtcatatactgaagaatctcttcttccagttatgcagcacctggcta

SEQ ID NO: 367772 - DNA, 82 bp, Homo sapiens
ccaaagcagccgtcccctctgcagcctctctgacaagtgtttccaacatggctagatccatcagaaactgaagccgtggaga

SEQ ID NO: 367773 - DNA, 109 bp, Homo sapiens
gtacgagcgacaggagttcatctacccggagaagcaggagccctactcggcagaaacttcagtgctctcaagaaggaaaatatttatgaaaacaataaactggtgagtg

SEQ ID NO: 367774 - DNA, 75 bp, Homo sapiens
ggcgcgggatggcagttttacagtctccgcacagccccctacagaagctaagcagcatggacccggccatgctgg

SEQ ID NO: 367775 - DNA, 75 bp, Homo sapiens
ctcgacctgctaacagaactggaccttttcggtgagtcctgcaaatgttaagtgatttgctcaaggtgcccattt

SEQ ID NO: 367776 - DNA, 101 bp, Homo sapiens
caggcagtcattaccactcacactgtacttccagggagacaccgattataagaagagaaactcagcgctggggaagaagataaactcatcctgaaagtcgc

SEQ ID NO: 367777 - DNA, 101 bp, Homo sapiens
atcctaatgacagtctccaaattcgcctccatctgtaccatggtgatggcttggacaacagtgtagcttcccccagcacaggtgacgatgatgaccctgat

SEQ ID NO: 367778 - DNA, 90 bp, Homo sapiens
ctgcaggaaaagatctctctacttctcctaaggaccacatggtgacaatgcatgatgtgcttgatgctcagtggctgtatgataaccaca

SEQ ID NO: 367779 - DNA, 74 bp, Homo sapiens
ccagtggaagcgggaggcagttgcagctttcaggagggccctcctggacccgggagcggaccctggtggcggtg

SEQ ID NO: 367780 - DNA, 100 bp, Homo sapiens
atcgcagtccaggccccatccacaggaggaagaagcgacccccccaggctcctggcgcgcaggacagcgggcggggtgttgggctcttcattggtgtgga

SEQ ID NO: 367781 - DNA, 100 bp, Homo sapiens
aggagaccggcacccagacaggtggcgacggcagaggatcaagagaatccatcccattaaatgacctgaagtcagaagtatcaccacggatttcagcaga

SEQ ID NO: 367782 - DNA, 100 bp, Homo sapiens
gaggaggtggcggcgggcagaggtgatgtctgggagcccttccttgacagcccgggccgagaagatcgccatggatcggatgaagaagatcaaacggcag

SEQ ID NO: 367783 - DNA, 100 bp, Homo sapiens
gcagccaaatgtggactatcccctgagaaggtaaagcttcagcgactgaaggagtgtggactttttgaatttcaagaacagtaaagttggaacacagcag

SEQ ID NO: 367784 - DNA, 100 bp, Homo sapiens
aaatacccctttgaattaattatggctgcagcagaacaaggacggccccctgagcacaccagcaagttttatgcgaagggagcactacagtatctggttc

SEQ ID NO: 367785 - DNA, 98 bp, Homo sapiens
agatatggtccaccgtgcctatttaaaggacacttgagcaccaaaagtaatgagaggtgtgggaaatggaactggatagactcaagaatcaggatggc

SEQ ID NO: 367786 - DNA, 99 bp, Homo sapiens
gaaaagttccctcaaacagcactgaaactgtaatagaatctgactgccagttagagaaattgcccatgaggccccgggaccggtcccgtgtgattgatg

SEQ ID NO: 367787 - DNA, 100 bp, Homo sapiens
gaacaagctgtggtacaagcccgtggaacaattcatcttaccagagattgccagcatactttgttgtccccacccctcttcctgaagagaatgtgcagcg

SEQ ID NO: 367788 - DNA, 75 bp, Homo sapiens
atcaatttaggaaatgtcttgaaagaggcacgcatttttgacagttttggaccaatcgaatacaaaggccccatg

SEQ ID NO: 367789 - DNA, 83 bp, Homo sapiens
cgggtctgctcgggggtctacttcgagggtgacacccagggcagctacactcagaagccacaaggaatgctagtggagcccct

SEQ ID NO: 367790 - DNA, 100 bp, Homo sapiens
cacgcattgggcgcgccgggactgtgagacgacaggctgtggatgtgtcccccctgcgccgtgtgaaccaggagagaagatgactgaggaggaggtggag

SEQ ID NO: 367791 - DNA, 100 bp, Homo sapiens
gatcgccgagcccgacctcgggcgccccgccggtcacctccgcgcggacaccaggccgccatggcatcagatgaaggcaaactttttgttggagggctga

SEQ ID NO: 367792 - DNA, 76 bp, Homo sapiens
attctggctctgattcaccttataaagcaaaggtgggagactacactggaaaataaagagttagctccaaattctg

SEQ ID NO: 367793 - DNA, 90 bp, Homo sapiens
gcgctgcaacacaagatcaagaactccatctggagtggacgcttctcttgtgagccagctggaggtcttacctctttgactgaaccaccc

SEQ ID NO: 367794 - DNA, 90 bp, Homo sapiens
accacattggcgtggccgtcaaggagctggacctctacctggcctacttcgtgcgtgagcgagtctgtggcaagcgctacaagaaccgac

SEQ ID NO: 367795 - DNA, 97 bp, Homo sapiens
taccccagcggccagatcggcttcatgctgtgcagcaagaacccggttctgctccagacgagcccttaccacgttgactcactcctgcagctcagcg

SEQ ID NO: 367796 - DNA, 101 bp, Homo sapiens
gaaagatggtgcccaccacatggaggccagcctaggtcttgtatgaaacctgtgagttggtagctggcagtgttgtgatggcttttgaagaagtatgcccg

SEQ ID NO: 367797 - DNA, 50 bp, Homo sapiens
caggcatgcaccaccacgcccagactatggaaatgatattagacaaaaag

SEQ ID NO: 367798 - DNA, 100 bp, Homo sapiens
ttgacatttaattttagggtcctttatatagaagggagagtagggattacttctgactctttagttgctgaaactagtataacatcagtggaagagctgg

SEQ ID NO: 367799 - DNA, 83 bp, Homo sapiens
ctgcggcccagtctccaccgtccccacacacgcccctctgaagaacccggcgcgaggagctgctggttggactttgagcaggg

SEQ ID NO: 367800 - DNA, 75 bp, Homo sapiens
agcccaacacatgcaccagttcttaggtgatcagaacctcagtatgatcatacagctggatcctcccagtctttg

SEQ ID NO: 367801 - DNA, 111 bp, Homo sapiens
gtccgccttctctgtcagctctttccccgtcagcatcccagccgtgctcacggcttgggcactgtttaaaggaaagttccgagaaggcatcgacaagccggaccctcccac

SEQ ID NO: 367802 - DNA, 88 bp, Homo sapiens
gcattttggcattgacatttaattttagggtcctttatatagaagggagagtagacaggtagagcaggtctctctgcagccatgtcgg

SEQ ID NO: 367803 - DNA, 82 bp, Homo sapiens
aaccgtgatgacgtccagggctatgccgccaagaccgtctttgagattaaaaggagcccaagccccatctcatcctagcaca

SEQ ID NO: 367804 - DNA, 75 bp, Homo sapiens
ccgaaattgcagaacaggccaagcatgaacaggcctttgagagcagccagaagtacaaagaggggaagtacatca

SEQ ID NO: 367805 - DNA, 83 bp, Homo sapiens
taacagtttatctgagttgagaagacttgtgccaactgcttttgaaaaacaagtgacatgctgatcattgaagaagaccaaac

SEQ ID NO: 367806 - DNA, 75 bp, Homo sapiens
agaccaaaaacccaccaattctggacacattgggattaaagaaaataatgttgagtttccatgaagaacaggaag

SEQ ID NO: 367807 - DNA, 100 bp, Homo sapiens
gggcatccagggctcgtacttctgctcgcaggcagtgaaatcaactgtgcagaccatcactgttggaggagtgagcacatcacagtttaagacaattatt

SEQ ID NO: 367808 - DNA, 75 bp, Homo sapiens
ttcggcagtccacccaccgccgccgcctcccagtgaagatagtgatccggggagacaggaacacgggcaagacag

SEQ ID NO: 367809 - DNA, 102 bp, Homo sapiens
agctttacgttcatgtaaacagcatgacgtgaggccgtggatgcaggcattaagagctccttaataagcatttatagtcagtttttggcagcaatagaatca

SEQ ID NO: 367810 - DNA, 82 bp, Homo sapiens
atctgaaaactcgtgaggggaacgtgcgcgtgagtcgtgagctggcaggacacacagcttccaccaacactttcttccaaat

SEQ ID NO: 367811 - DNA, 88 bp, Homo sapiens
aggtgctagcgctgctgggggccgcccatgaaagcgcagccatggcgggatctgcatctccaatggatactgaggggtttggtgagct

SEQ ID NO: 367812 - DNA, 74 bp, Homo sapiens
caaaggcccatgaggggatgcagttatgggctctgtcgccgtgggagccaggaggaactctctcccagtccgcc

SEQ ID NO: 367813 - DNA, 51 bp, Homo sapiens
gtcagccttcccagtagctggaactacagatcggcttcaccaccgaccctc

SEQ ID NO: 367814 - DNA, 90 bp, Homo sapiens
acgcccaggcggacgaggccgtgttagctgctgggcatgctgtgtgcttgcatcgtgttgtgcagaaggagtagagatcctgcttacgag

SEQ ID NO: 367815 - DNA, 83 bp, Homo sapiens
agccagcagccaagccggggcagtttcagtctccaccccaaatgcagctgcgtttggatgaagcacaggaagcagagtgccag

SEQ ID NO: 367816 - DNA, 90 bp, Homo sapiens
gctccatgagctcagtggcctcctctgtgagcagcaggcccagtcggacaggactagcctaccttctggctggatactattacactgcca

SEQ ID NO: 367817 - DNA, 90 bp, Homo sapiens
aagttgagaccgagaatgtggaaacaggtctcctctgagcctccggcctccataagacccaaaacagatgacacctcttcccagtccccc

SEQ ID NO: 367818 - DNA, 90 bp, Homo sapiens
tggccgcgcggcctcgggaacggcccaggtccccgcccgcaggtcccgggcaggaaaggcagcaacaggtggaagctgttgagttggagg

SEQ ID NO: 367819 - DNA, 100 bp, Homo sapiens
agctgggagaccagagaaaatggatgatgaagaccccattatgggtaccatcacctcggcagttccggcgaggggggagcctcagcaggattgctgtgtg

SEQ ID NO: 367820 - DNA, 100 bp, Homo sapiens
ggggttcagcgtagactctggaccaggagaggcccgcggtgaccgaggcctgggccccggtcggaccctttcctggggatgattatgggcctcggaggag

SEQ ID NO: 367821 - DNA, 50 bp, Homo sapiens
tttatctccaagcggaaagaaagaaagtgacttcagtgatgattttagtg

SEQ ID NO: 367822 - DNA, 100 bp, Homo sapiens
tcattaacagaaaagaagaggagaatgctaagcagaattgagaggatccagaatccagatctctggaatagctaccaggcaaagaaaaaaactatggatg

SEQ ID NO: 367823 - DNA, 90 bp, Homo sapiens
cagctagtaacttcacttatttcaggcctggacaggacccggaatcaaaccgcaggccctgggtcaccgctgccggaaagagccagttcc

SEQ ID NO: 367824 - DNA, 100 bp, Homo sapiens
aacgccaagaacatgctggtgctgaacctcagccacaacaggatacatcattcactctttggggacgtgaagaagctcatcactgatgagtttgtgaagc

SEQ ID NO: 367825 - DNA, 75 bp, Homo sapiens
tataataccttgggatgtggacacaatttgtaagcccctcatatggaaaatttgaaatgcagaggggaaacagta

SEQ ID NO: 367826 - DNA, 75 bp, Homo sapiens
tgagcagcagccgcctgagcagtgaggaaaccccgcggacagcgcggactcaggagatcctccccttgttcagcg

SEQ ID NO: 367827 - DNA, 75 bp, Homo sapiens
gaacaaccgcaggtcgaattgttcgtgaaggttaacacagaaatctgcctcctgggccatgccgcttctaaggcc

SEQ ID NO: 367828 - DNA, 75 bp, Homo sapiens
catcaccacaggtgagaggctcatccgagtgctgcaagccaaaactggacaagccaaggcatctgtagccaaagt

SEQ ID NO: 367829 - DNA, 105 bp, Homo sapiens
caggccttgcatcctgtgctgccaactccatcaatcagtgctggtcccaaaggcgataacatctatgaatggagatcaaccattctagggcctccaggatccgtg

SEQ ID NO: 367830 - DNA, 100 bp, Homo sapiens
tcacatgtcattataccttcacccagcatttcatccctcgtcgaaaggattggattggcatctttagagtgagaaaaactggaagcttgaagaccatggt

SEQ ID NO: 367831 - DNA, 90 bp, Homo sapiens
tgcacgacacatggaaattggactaaattaccagaatgcaggggacaagatgacctcatccagcatcaagatatgaggatcttggagcta

SEQ ID NO: 367832 - DNA, 50 bp, Homo sapiens
caggaatgggacctcgagtcactgtggctccccacaggtgcaggaagccg

SEQ ID NO: 367833 - DNA, 73 bp, Homo sapiens
gggttatggtgggaggagccgatactgagcttcttcctatttgccatgggaaactctgatgaggaagaaagtg

SEQ ID NO: 367834 - DNA, 90 bp, Homo sapiens
cgggatcgtgaccgagaccgtgaccgagagcgtgaccgagagcgcgaatatcgtcatcgttagaagatccaaaatacggagctggcatat

SEQ ID NO: 367835 - DNA, 90 bp, Homo sapiens
tcggagttgcagccaaaaatcagtaacaaatgtggcaattattttggatctatcacctgtcatcataactggcttctgcttgtcatccac

SEQ ID NO: 367836 - DNA, 75 bp, Homo sapiens
ggtggccgtgagggtccggcccatgaatcgcagaggcttcgtgacggagttatcagagacattgagaggcaaatt

SEQ ID NO: 367837 - DNA, 80 bp, Homo sapiens
gatctttctgacaacaaactcgaagactggcatgagaaggaatgactgcatggacggaagaagaatgccgaagctttgaa

SEQ ID NO: 367838 - DNA, 90 bp, Homo sapiens
ccaagaacaggaaacggaccaatgtctgtgttgaaaactaagcatggggaagagctgcaaggtggtcgtgtgtggccaggcgtctgtggg

SEQ ID NO: 367839 - DNA, 75 bp, Homo sapiens
gcggaggcacccgaatgctgcccgggtgagggtttccaggcctgaggtgcccgccctggccccaggagaatgaac

SEQ ID NO: 367840 - DNA, 100 bp, Homo sapiens
caccaatcagcatgctgtgtctagctcaaggcacaccagattaatattggttattatttgacattactgtttttatatggagtagcactcactgaaagag

SEQ ID NO: 367841 - DNA, 74 bp, Homo sapiens
cagaacagtcgttcccgcctcacaacctgctggatgatggggttggcatgctgggaagctggcacacggttcga

SEQ ID NO: 367842 - DNA, 115 bp, Homo sapiens
tgaaatggggtgaatcatttgacaaactgctttcccatagagatgttcgaagaagaacaatttatgaataccaccgagtagagctacaaatgtcaaaaattaccaacatttcggc

SEQ ID NO: 367843 - DNA, 90 bp, Homo sapiens
gtcagtccgccgctcaccccgcggccgcaccttcccgccttctcagcttcggaaccaaaaagaagcttcccagagccggggccaggagcc

SEQ ID NO: 367844 - DNA, 88 bp, Homo sapiens
gccgggggtcgctggctctgctgctgccgccggcgaaggaggaggcgttgccggggtctcactccattgcccaggccagagtgcgggg

SEQ ID NO: 367845 - DNA, 50 bp, Homo sapiens
gttcctggagattctgattgaggtgctgcagggtgcacagctgatcgccg

SEQ ID NO: 367846 - DNA, 50 bp, Homo sapiens
cgccctaatggaggtctccagtttcggtgatcccattaagatactaatgc

SEQ ID NO: 367847 - DNA, 98 bp, Homo sapiens
tgcggaagggcacctccacccgaataagaccacagcttgccaaagagaagattgaaggatgccatatttgtacatctgtcacaccaggagagcctcag

SEQ ID NO: 367848 - DNA, 100 bp, Homo sapiens
ctattggactaccgtgaggatggtgtgaccccatatatgattttctttaaggatggtttagaaatggaaaaatgtatccatcatgttacacaaaatggag

SEQ ID NO: 367849 - DNA, 50 bp, Homo sapiens
agacgggaaaaatagtagcaccaagcaactgtggcctggaagagaaaatt

SEQ ID NO: 367850 - DNA, 100 bp, Homo sapiens
ccgtgagcgcccggagcggtccgcgagccaccgaggcccaggggccaaaccagtgctcctgccacctctctggctgccccctagagcctgcccatcccag

SEQ ID NO: 367851 - DNA, 74 bp, Homo sapiens
tcctccttcttcctcaactatctcgctgacacgcaggttcgatacaagaggctgttttcctagcgtggcttgct

SEQ ID NO: 367852 - DNA, 100 bp, Homo sapiens
ctataaatctcgcccaaacaggaaaggtttgtggtaaatatgccagctctagaacacatgaatcagattttacacatcttgtttgtatttttaccctttc

SEQ ID NO: 367853 - DNA, 51 bp, Homo sapiens
caatctaaataggcagtttttatttagtctattatcctcccagtccacaac

SEQ ID NO: 367854 - DNA, 80 bp, Homo sapiens
ggacggcacaccctacgttaccgtgctcaagcggagctggagtttgttcagatcatcatcatcgtggtggtgatgatggt

SEQ ID NO: 367855 - DNA, 105 bp, Homo sapiens
cgccatcttcatccgcccccgctccctggagaatgtgctaaactaatctggattcactccctctggttgatacccactcaaaaaggacacttctgattaagacgg

SEQ ID NO: 367856 - DNA, 74 bp, Homo sapiens
aggccttccagctgtttgaccgaacagagtcatcttagtgggatttggggaagcaacagggctgtgtggggtaa

SEQ ID NO: 367857 - DNA, 100 bp, Homo sapiens
tcggctgtcggagtgggtgtcctcaagaaagtgctatgctggaaaatgagaagaagaagcgtgaaatggcagagaaggagaaagagaagattgaacggga

SEQ ID NO: 367858 - DNA, 48 bp, Homo sapiens
gcctacagttttcacaaatctcacggatgataccatcggggaccttaa

SEQ ID NO: 367859 - DNA, 90 bp, Homo sapiens
gaagtttctaggaaaggccggacaccagccctgggcgctgcctatggcacagccaagagcggtaccggcattgcggccatgtctgtcatg

SEQ ID NO: 367860 - DNA, 50 bp, Homo sapiens
cctcctacctccttctgcttcggctatttgtcgtagatgtccagacaagc

SEQ ID NO: 367861 - DNA, 75 bp, Homo sapiens
acaattaatatatatgctactggacattctagcaaggcttttgatgaattaccacattatgctttgttaaaagaa

SEQ ID NO: 367862 - DNA, 75 bp, Homo sapiens
accttcgaggtgaccggccaggaaacggtcgcccagatcaaggctggcatgactcacatcgtgcgggaagtcgac

SEQ ID NO: 367863 - DNA, 100 bp, Homo sapiens
ggaaattggactaaattaccagaatgcagggggttcagactaggcaatgtggtacatgctatacaggcaactgagcagagcattcatgccactgacctgg

SEQ ID NO: 367864 - DNA, 83 bp, Homo sapiens
catctttacggctctggggatcgtgatgggacaggtggtcggactcaggaactgtggctgcaccatctgtcttcatcttcccg

SEQ ID NO: 367865 - DNA, 98 bp, Homo sapiens
caaccagcagagcttccaggacatcaagcccatgcgggaccagatcatccgcgtgaagcggaagatctgctaccaggaagtgtcccagtgtttcgggg

SEQ ID NO: 367866 - DNA, 101 bp, Homo sapiens
ccgaagccacgctccggatggaaaacgtggacgtgaaggaggaatggcaggacgaagatcttcccagaaaaatggctacaaacttcctagcacatgagaag

SEQ ID NO: 367867 - DNA, 101 bp, Homo sapiens
acgtgacggtccggcagggggagagcgccaccctcaggttcatctgcagaagccagcggacgcctctgttcaacttgtgggttacctggctcatgagacct

SEQ ID NO: 367868 - DNA, 100 bp, Homo sapiens
gacatgagcaagaaaagcctctgggagcagaagggaggctccaagacctcatcaacaattaaggtaatcaaatgcaaagcagctgtgctatgggagttaa

SEQ ID NO: 367869 - DNA, 75 bp, Homo sapiens
catcgtccggtttctcactgtgatgatgaagcatgctgtcaataccagcaaatatgcagaaagctatcggatcca

SEQ ID NO: 367870 - DNA, 100 bp, Homo sapiens
ttcatggccaacatccctctcctcctctaccctcaggacggcccccgcagcaagccccagccaaagatcaaagatccagctaacaggcgctacgaggtgc

SEQ ID NO: 367871 - DNA, 101 bp, Homo sapiens
cctcaacaacccgtacgtgcggaaggccctcaacatcccggagcagctgccacaatgggacatgtgcaagtcggcttcttcaagcggaaccggccacccct

SEQ ID NO: 367872 - DNA, 98 bp, Homo sapiens
cgcccgccgcgcgccgcccacgccccgggaccggaccctcgcgccgcccgcgggggggccctcagcctcttggccttgaacgggctgttcatcttgat

SEQ ID NO: 367873 - DNA, 82 bp, Homo sapiens
ggacgccgctgaccaccctcaacacggatatcagcatcctgtccttgcagagggaagtgatgagctttcctttgatccggac

SEQ ID NO: 367874 - DNA, 74 bp, Homo sapiens
gggaacaggcatcatggactgtgcgcccaagcaatggctgccatccggaagaaactggtgattgttggtgatgg

SEQ ID NO: 367875 - DNA, 98 bp, Homo sapiens
ctctgctctgcctccggggacaagaaactagagcaaataaccgttttgaaattaaactatccaactctggccaatattgaaaggaagaagaagttaaa

SEQ ID NO: 367876 - DNA, 100 bp, Homo sapiens
cagaaattaaagttgacaagaatgaaatagaggatgcccgctggttcactagagaacaggatcaagattataggaccggcccaagtgaggagaaacccag

SEQ ID NO: 367877 - DNA, 75 bp, Homo sapiens
cctgcctcagcctccagagtagctgggattacagtggatgagtgctcgtctgactacacaattgtgcttcctgtg

SEQ ID NO: 367878 - DNA, 82 bp, Homo sapiens
ccattcctcccattcatgtgcctccaggttatatctcacagaattgcggcgagcagtaagaagcagcgtgtggaaaagggag

SEQ ID NO: 367879 - DNA, 51 bp, Homo sapiens
tttcagcaacaccagcaaacagtggtggcagtagagaagagcatcacagaa

SEQ ID NO: 367880 - DNA, 100 bp, Homo sapiens
ccttgagaagggtagtctcgggatgccgtccgaagtcggcgacagcggccggggcgcaggcgcccgtgcggaatggcagcgggaggaagcactgaaacaa

SEQ ID NO: 367881 - DNA, 117 bp, Homo sapiens
tctggcaacagctttgcagaagctggaggaagctgagaaggcagcagatgagagtgagaggtatgtccagaaagcagtagaagtatccgggaggtacagtgtgcatcctacaacaac

SEQ ID NO: 367882 - DNA, 100 bp, Homo sapiens
gctcggagggcccggctggtgctgcgggggccccgggaggtctgggaggggctgaacgtggtgaagacaggccgagtgatgcttggggagaccaatccag

SEQ ID NO: 367883 - DNA, 100 bp, Homo sapiens
cgcagccccctcctggcgacccgcaagtatgatctcgtgaaatcttgagagaaactgaatgacgaatgaaactattgttcctgtttcacacagaagaaaa

SEQ ID NO: 367884 - DNA, 96 bp, Homo sapiens
gtgactttgaacatgctggtgccgctagccaagctgtcctgcctgggtgatctttacggagccataggctctccagtgagactgactcgcaccgta

SEQ ID NO: 367885 - DNA, 75 bp, Homo sapiens
acctcattgtcagctccacccaacagttcttcaactgagattgagaggatccagaatccagatctctggaatagc

SEQ ID NO: 367886 - DNA, 83 bp, Homo sapiens
gtgttttaagaaagtggacaaagagaggagtcagagcaaacatgaacgttggagttgcccacagtgaagtgaatccaaatacc

SEQ ID NO: 367887 - DNA, 78 bp, Homo sapiens
aaaggccaagatccaggataaggaagtgtaccacatgaaggaagatggttgggtgaaagtagaaagtacagatgtcag

SEQ ID NO: 367888 - DNA, 98 bp, Homo sapiens
gcctgtctgatggccgctttctcggtcggcaccgccatgatgtccagggtgctgcagaaggacgcggagcaggagtcacagatgagagcggagatcca

SEQ ID NO: 367889 - DNA, 98 bp, Homo sapiens
tctaagtggattggatatggttggagtggcacagactggatctgggaaaacattgtctagagaaaaggaacagttccgtaagctctttattggtggct

SEQ ID NO: 367890 - DNA, 104 bp, Homo sapiens
cctggactcaagccgtcctcctgcctcagcctcccaagtagctaggaggtgtgtaccaccacacacagacggctctacatttggcctgtgccaatggtcatcca

SEQ ID NO: 367891 - DNA, 109 bp, Homo sapiens
cagcaggcggacgaggcggaagaccgcgcgcagggcctgcagcgggagctggacggcgagcgcgagcggcgcgagaaacacacttccaccctgggcagcgtgtttgggg

SEQ ID NO: 367892 - DNA, 130 bp, Homo sapiens
gactctccatggtttctctcaggttctgagactctaggcaggctggcaggcaacaccttagggaatcagctgacaagcctactagacgagaaaacccccacaagtatctgctctacaaaccaaccttcag

SEQ ID NO: 367893 - DNA, 100 bp, Homo sapiens
aagcagagtgtctggatggaacctgagctgggtctctgactcacttctgactttagaaatgcactcggtgatggaaagagagccactattctgaagaaca

SEQ ID NO: 367894 - DNA, 98 bp, Homo sapiens
tactgcgacgccaaatacgtctgggcagccacggccgggggcgtctttcagagcattacggttcatctgcagaagccagcggacgcctctgttcaact

SEQ ID NO: 367895 - DNA, 88 bp, Homo sapiens
ctacgccaacgacgccttcccagaggaatacgtgcccactgtgtttgaccactatgcagaatgtcgttcatgagctaagaataaccaa

SEQ ID NO: 367896 - DNA, 83 bp, Homo sapiens
gcagccgcgaggaggcgcgggaggtgttcgagaacgaccccgagacgcaaccatgtccaagggacctgcagttggtattgatc

SEQ ID NO: 367897 - DNA, 100 bp, Homo sapiens
attcgtcagcaaacagacatttacaaacagatacgtgctaataagcgccctcacaaagccaatgctgaggagatgaccaagtaccacagcgatgactaca

SEQ ID NO: 367898 - DNA, 100 bp, Homo sapiens
tgaaaagaagcatgtttctttaaataaagcaaagaaacgacgtttgccgcggtggcagtagagaagagcatcacagaagttgctcaggagctgacagagc

SEQ ID NO: 367899 - DNA, 98 bp, Homo sapiens
aaacgatgacattttcaggaaaatcctggaatattcaacgaagcagctgaccaatctggtgaatgtttgcctgggatcccatatcaataagaaagcaa

SEQ ID NO: 367900 - DNA, 100 bp, Homo sapiens
ggctcctttaagacggtctacaaaggtctggacactgaaaccaccgtggaagtcgcctggtgtgaactgcagcctggaagctccgaccccaggagccagc

SEQ ID NO: 367901 - DNA, 75 bp, Homo sapiens
acagcctggatctcctccatcctgctggccatgctctacgggacaggcgttgacccggacgacacctataatgag

SEQ ID NO: 367902 - DNA, 75 bp, Homo sapiens
caaggcatcaaagctgacagagaaactgttgcagtgaagaaatctccaacctgctggtggctactaagaaagccc

SEQ ID NO: 367903 - DNA, 90 bp, Homo sapiens
gccggcgaggatcaaaatcttcgaaggaggccctcctgattctggggcctcccaggatggagcacctgaggcacagcccaggccctgggg

SEQ ID NO: 367904 - DNA, 82 bp, Homo sapiens
aaagaaccaagattgttctaaaggaatttatgcattagcagtgaatgatttgggaggggacttcaaaggagttggtaaaggc

SEQ ID NO: 367905 - DNA, 75 bp, Homo sapiens
gtcttcactacccagaatcatttaatcatccatttcatcaaaaaagcttagcagtgtctgcaaaaacgaatcttt

SEQ ID NO: 367906 - DNA, 50 bp, Homo sapiens
tggcaagtcaagaaaagccactgccatgtttgaccgtgagaacaaggccg

SEQ ID NO: 367907 - DNA, 90 bp, Homo sapiens
tcctaccatggtatttgctaacgtttagagagtgcttccccttgccgagcactggctggattttcgtacacccccaggttttgaccgaac

SEQ ID NO: 367908 - DNA, 100 bp, Homo sapiens
ctttgcagaagtattgctgagaactggaaaattggcagaggctaaaaataaaggagaagtatttccaacaactgaagtcaccagggaagaaccatctact

SEQ ID NO: 367909 - DNA, 100 bp, Homo sapiens
cgcgctggtgcacttcgcgctgaattggagcgttattcagtatattaatgtcttattgataatggcagaacatccaccactactggatacaactcagatc

SEQ ID NO: 367910 - DNA, 100 bp, Homo sapiens
ctctttgaggccgacgctaggggcccggaagggaaactgcgaggcgaaggtgaccggggaccgaggtcctggcattgatgtgcctgctccagacatgagc

SEQ ID NO: 367911 - DNA, 74 bp, Homo sapiens
tagtggcatggaagatccatttggcaccatggctgaggaaacagctccagcagttcttgagcggcaccaggggg

SEQ ID NO: 367912 - DNA, 90 bp, Homo sapiens
gctggatctgtggtcgcggctggggacgtgcgcccgcgccaccatcttcggctgaagctgaacaaaaggttcatcctcagttttctccat

SEQ ID NO: 367913 - DNA, 80 bp, Homo sapiens
agttagtatccttgctcgacaaagtgatcaggaaactggagcacccatcctaactgatgatgttagcctgcaggtgttca

SEQ ID NO: 367914 - DNA, 75 bp, Homo sapiens
ccagcaagaggatggggccctggatgagggggaagggcctcaaagccagaagggacatctctacaccgttcccat

SEQ ID NO: 367915 - DNA, 99 bp, Homo sapiens
ccctgtcattgaaaatccccagtactttggcatcaccaacagtcagctcaagccagacacatttgtggaatacagactcacgttcaaaggtggctgatt

SEQ ID NO: 367916 - DNA, 100 bp, Homo sapiens
cctgcacctgtctggcctgggcgccagcgcggctgcaggccaagagggaagtgtaacatctcccatttttctgacatatttgctgctagagagtttaaag

SEQ ID NO: 367917 - DNA, 100 bp, Homo sapiens
tgttcccttgttgaattgagtgatactcaggatgaaacacaaaagtcagattcggagaatgaagatatgggcacggttatgaaatattttgtgttacttg

SEQ ID NO: 367918 - DNA, 82 bp, Homo sapiens
gatgaaggcagagcgtgtggcatctccacctcaaggaaatgcactcggtgatggaaagagagccactattctgaagaacact

SEQ ID NO: 367919 - DNA, 100 bp, Homo sapiens
ctgagatcaaatggcacttcattggccacctacagaaacaaaatgtcaacaaattgatggggacaatgatgttaattatcgggctgaatatgctatttgg

SEQ ID NO: 367920 - DNA, 82 bp, Homo sapiens
aacggattgccagagaattggcagaagaatggacgcgatctctctatctggtccagtggcagccggcacatgaagaagcaga

SEQ ID NO: 367921 - DNA, 97 bp, Homo sapiens
aataattgatgtgagcactgttaaagaactgtgcagggtggttctcttcccaaagtggaagccaaattcatcaattatgtgaagaattgcttccgga

SEQ ID NO: 367922 - DNA, 100 bp, Homo sapiens
tcttcttcaccgccaggacctccttcttcaggagagcgccccagggcaagccccgctccggccaacaaggtggctcctatggacggaaaacagtcttaag

SEQ ID NO: 367923 - DNA, 50 bp, Homo sapiens
gggaaccctgtacttcatatcagagatggtgctttctcagctattgccta

SEQ ID NO: 367924 - DNA, 100 bp, Homo sapiens
gttctctctggaacgggagaagaaactgttaggctaggcagcacgctggctcttctcctgaacttcctcgcctgcctggccagcttctgtgtggaaacca

SEQ ID NO: 367925 - DNA, 71 bp, Homo sapiens
aagagcgccaggcgccgcgggggaagtattgatgaagatgttgtggtgatagaagcttcctccactcccca

SEQ ID NO: 367926 - DNA, 100 bp, Homo sapiens
ctcgcgcctctcccaggacccgcctggctgcgagatatacaatagttgaacttgcagagacaggaagtctggacctcagtatattctgcagtacctgttt

SEQ ID NO: 367927 - DNA, 51 bp, Homo sapiens
tttctggaatgtcattatcagacacaatggaagaatgttggtgaaaagcac

SEQ ID NO: 367928 - DNA, 100 bp, Homo sapiens
caaatctcagcagaactcaagcaggcataccaaggctgggaagacagatgctaatagcaattcctcttttaacctggagacttgccggcttatggtttca

SEQ ID NO: 367929 - DNA, 82 bp, Homo sapiens
agacctgcaagctctttgacacacagcagttcttgtcagagaggtggagaagagcgagtacttgagaaagaagaggaagaag

SEQ ID NO: 367930 - DNA, 100 bp, Homo sapiens
gagtcacccgttctacgacgtggccagacatggcattctgcaggtggcaggtcagccatgtcatctgagcctcccccaccaccacagccccccacccatc

SEQ ID NO: 367931 - DNA, 100 bp, Homo sapiens
gtcggcggtgcccagcggtgtggaatgagagcgctgcaggtgcgcaccgggaagttcagcttcctgcctgacacagctcacttcaagaagtgcacaatgt

SEQ ID NO: 367932 - DNA, 83 bp, Homo sapiens
ctgctctgtggggctctggccgcgcctggcctggccgggaccatgagcaaacgaggcccctgagagctccacctagttcacag

SEQ ID NO: 367933 - DNA, 90 bp, Homo sapiens
actcgcctcacctgagcctggccgggcccctcagatgagagctgcacccaggccagcaccagtcgctcagccaccagcagcggcaccccc

SEQ ID NO: 367934 - DNA, 51 bp, Homo sapiens
gctattggatcctttcctaatggtggtccagtgccaagagacatttatcag

SEQ ID NO: 367935 - DNA, 121 bp, Homo sapiens
tcggaaattgttggattgccagaagaagaagaaatcccagcaaataggaaaattaagtttagtagtgctcctattaagggtgcatttgagaagatcttttctctttggccattgtccaagt

SEQ ID NO: 367936 - DNA, 51 bp, Homo sapiens
ttttgagggaagaaacacagttcacagtgctcaatggtgcccaggctggag

SEQ ID NO: 367937 - DNA, 100 bp, Homo sapiens
aaaaaattcatctgggcggtatctggaacttggcaactcgctgatggcgccggtaggccgctggcagaagggccgcgacctcacctggtacgccaagggc

SEQ ID NO: 367938 - DNA, 100 bp, Homo sapiens
accccgaggagccctgttccaaagcctcctggaccgtccaagaaggtgcaggagccgtgggcggacagagccagggttctctccctgttagaagtctgcg

SEQ ID NO: 367939 - DNA, 100 bp, Homo sapiens
actttgtagccatcaacccgagtgcagtttcgatggaaaatgaagaattaaacaaccaccatgtcgagcaaaaaggcaaagaccaagaccaccaagaagc

SEQ ID NO: 367940 - DNA, 100 bp, Homo sapiens
tggaaggaatgttttgctagctgctaaaaccacctttgtcaccagaatgaatgaagtgcttcagatttaaatagggataaaaacattcagatggcagatc

SEQ ID NO: 367941 - DNA, 100 bp, Homo sapiens
tgagaaaggaaacattaaggcgggcccaaacatgaaccactctcgccagttctgcagggtgaggacgcttgagcggaagttagaagcaaaaatgatcaag

SEQ ID NO: 367942 - DNA, 71 bp, Homo sapiens
gtgttgaggaccatcttgcctggagcaaggttgcagatgaatacatgttttccctagaagagaataagaag

SEQ ID NO: 367943 - DNA, 83 bp, Homo sapiens
actcggacaagtacttcgacgaacactacgagtaccggtctcctccgggctggggctgagcaagccctcggagtgaccgtggg

SEQ ID NO: 367944 - DNA, 76 bp, Homo sapiens
gaggcaacagggacatggccacctgggacgaaaagattcgagattacggtgagccctttcaggaagcaatgtggtt

SEQ ID NO: 367945 - DNA, 88 bp, Homo sapiens
attcgcagtggtcgcttcttctccttgctcgagagctagccttgcagcaggaggaagggaagaccgtgatgtacacagctgtgggctc

SEQ ID NO: 367946 - DNA, 83 bp, Homo sapiens
caggcagagtgctgatgtgaaaaataccacgacaaaaccaccctaatatgtgtcacaaagatgtctacacggaactgccaggg

SEQ ID NO: 367947 - DNA, 82 bp, Homo sapiens
ctgggcttctgcggcctgaccgcgctctacttcctgatccgggcgtttagtaatttctatgcagcccccgacccagagccga

SEQ ID NO: 367948 - DNA, 110 bp, Homo sapiens
caagtacccgtccatcatagtcaactgcgtggaagagaaggtgaaaggtgtagcagtcactcggcctacacccacagcatcgaccttgtgaacccagcgacctgactgcc

SEQ ID NO: 367949 - DNA, 51 bp, Homo sapiens
tgagggccgggcccagtcaccgaccgcagttctgccttgagctaaatggac

SEQ ID NO: 367950 - DNA, 104 bp, Homo sapiens
agtcaaatatgagtggggtggctggcgtgtatgggtagacactttatcaatcactcattcaaagataacaacgaacttgatgcaagtgataggtttgccaaggt

SEQ ID NO: 367951 - DNA, 100 bp, Homo sapiens
gttggaaatctcgcgatggagggaggaggaggatggaaaggcagatgtaaagtccctcatggcgaaatataacacggggggcaacccgacagaggatgtc

SEQ ID NO: 367952 - DNA, 88 bp, Homo sapiens
aattacaaaactttaatggagaacaacataaacatttttatgtagtgattcctcagatttacaaggaaggagtcaagactgagaacaa

SEQ ID NO: 367953 - DNA, 82 bp, Homo sapiens
cggcgcgagctcaagctgctgctgctcgcgctgataaagcagtttgtgtccgacgtggcctggggggagctggactacctgg

SEQ ID NO: 367954 - DNA, 82 bp, Homo sapiens
cgcgcagggagctctcgaggcaacgccggggcgcccgaggtctggaaggcgcaggcaatgaatcgctccctggctaatgtga

SEQ ID NO: 367955 - DNA, 100 bp, Homo sapiens
atggttgcgatttcttgataaagtcttggttgctgccaacaaggatgccagaagcctcaaaaatggaaaaccccctgtgcttcacatctgaaaatctctg

SEQ ID NO: 367956 - DNA, 83 bp, Homo sapiens
gaagtggaaaggatggcccccaaattggaatcgaagcctcttaaaatggcagatgacttggacttcgagacaggagatgcagg

SEQ ID NO: 367957 - DNA, 75 bp, Homo sapiens
cagatctggagcaagtacctaaggttcaacagagtttggaaaagatttctaaactggagcaggaaaaagaacatt

SEQ ID NO: 367958 - DNA, 100 bp, Homo sapiens
gcccgaggacagggaggtgcgtctgcagctggcgcggaagagatggagtcatcagaacccactgtgaggaagtgacttctccttgaggtcacccagacac

SEQ ID NO: 367959 - DNA, 90 bp, Homo sapiens
ggagaagggaccgcgccgtgcacatccagcatcctccaggagaagcagcgaaaggccgagggggacggcaagatgcacatcaccctctgt

SEQ ID NO: 367960 - DNA, 101 bp, Homo sapiens
gaagcttgatgtctactgttttgaagcgttcgatcttttaacatcacatcacatgctgacagcacaagaagatcattgtaatggcctgccgagaatttgag

SEQ ID NO: 367961 - DNA, 100 bp, Homo sapiens
ctggaaccgtgttggtggattttgttcctgaaaatcaccagttccgtgctccattatgtcgtgtgcttccccggtccctctaaatgatatgtttggttat

SEQ ID NO: 367962 - DNA, 75 bp, Homo sapiens
ggatatcgacgtcgtgatccagaagtccagagctgaggactgcctgtttgcagagaagagcaagttagtaccttg

SEQ ID NO: 367963 - DNA, 100 bp, Homo sapiens
catggtgaaaatggctaaagactggaaaaccgtgcctgagagattccactgtgtgggaggctccgtgcaggaccctgacctcctctcaagtcctcactgc

SEQ ID NO: 367964 - DNA, 100 bp, Homo sapiens
ttggtcaaaaacacactcaagtcgtctccaagttcgaagcattcagcaaacaatggcaaggcagagccaccagaaaggcccggtacaagcagagccttga

SEQ ID NO: 367965 - DNA, 75 bp, Homo sapiens
cgagaccgcttaccgcatctggctggagccctgcattcgcggcgtgtgcaggaaccagtgaccttccgggatgtg

SEQ ID NO: 367966 - DNA, 75 bp, Homo sapiens
attttggaagtgtgccagaattgaaggcagacggtaacaagtactccttgctggattgaacttcatctgaatgga

SEQ ID NO: 367967 - DNA, 75 bp, Homo sapiens
taagcctgcacagccgcggcggcagcagcagtgagagggacagaagatgagcctgtcggtcctggagggtatggg

SEQ ID NO: 367968 - DNA, 75 bp, Homo sapiens
ctgtctcctcagatggacgagaagtactaggagggtcctccctgtggcccagtgaactgcaatgaaaagatcgtg

SEQ ID NO: 367969 - DNA, 74 bp, Homo sapiens
tggaggcggccgagtacctggagcgcagggatcgagtaagactttgaccccgacgcaggcttcagtgattgccg

SEQ ID NO: 367970 - DNA, 96 bp, Homo sapiens
attcatctataatcacaagggggaggtgctcatctcccgagtctaccgagatgacatcgggtggaagttaaacgagctgagcctcgggacagcaag

SEQ ID NO: 367971 - DNA, 75 bp, Homo sapiens
ccagggtccctgaagagggaagacacgcggaaacagctttttaaagatgacatcaggtatctgttgacaatggac

SEQ ID NO: 367972 - DNA, 75 bp, Homo sapiens
acagactgagcgcgtccaggcctgacagctctgcggctcgggccctgagatgttgatcttgtctcagaatattgc

SEQ ID NO: 367973 - DNA, 75 bp, Homo sapiens
cccgcggcagccgcgctcggggctctaaggagcagcatttctttctattactactatctatgctgagactggttc

SEQ ID NO: 367974 - DNA, 82 bp, Homo sapiens
gccaagatggcggtgctgtcagggggatatgagactttctactcggaatatcctgagtgttgcgtggatgtaaaacccattt

SEQ ID NO: 367975 - DNA, 100 bp, Homo sapiens
cagacaacactgaaatctcagacggtggcccggaaccggagtggggtcacaaatactcacactatcttctcactgctgggagtggaccatgcttatgtca

SEQ ID NO: 367976 - DNA, 90 bp, Homo sapiens
ttcgcctccttcaccgccgcagaccccttcaagttctagtcatggataaggaagcctgtgtgggtaccaacaatcaaagctacatctgtg

SEQ ID NO: 367977 - DNA, 82 bp, Homo sapiens
ttgcatggtctccagatcattctcatgtacagtctgaaaatacagcctgttgagaaaatgcatctagctgtagttgcctgtg

SEQ ID NO: 367978 - DNA, 100 bp, Homo sapiens
gacttcaaccagcctttggtcatcaccagggtgacttaagagattaaaattaatttggttgctgttggttctgaacaaataatgagttcttttatttgag

SEQ ID NO: 367979 - DNA, 100 bp, Homo sapiens
cagaatttcacccaggttctgacagcctgcagaattttcttcctgccccttgaactctgatgaagaagtgaataaatggttgcatttttatgaaatgaaa

SEQ ID NO: 367980 - DNA, 100 bp, Homo sapiens
ggaaaacatactgctttgatgctttccccagtgccggtggtggtgtgcacattgagccccggtatagacagttcccccagctgaccagatcccaggtgtt

SEQ ID NO: 367981 - DNA, 51 bp, Homo sapiens
gcctgaacaggcagggccagacccagcatgccaatgaagatgtggaaagaa

SEQ ID NO: 367982 - DNA, 88 bp, Homo sapiens
tctgcgaaggccgggacccggttccccggcccacagtgggggtgtgcaaacccgagagaactgggttggagtgggtggagatcatcga

SEQ ID NO: 367983 - DNA, 78 bp, Homo sapiens
cagccccagccccaagggcagaggggaggaactggacttgcggctcattcggacaaaggggggtgtggacgcagccct

SEQ ID NO: 367984 - DNA, 50 bp, Homo sapiens
gcacttatggccatttcagccaattgtcacggattctgcctctgtggagc

SEQ ID NO: 367985 - DNA, 98 bp, Homo sapiens
cactcaagaatcgtaggccaggctgatggagagctgaacattactcttccagaagaggagttattcctgatgaagctaaagctttgtctctgttggca

SEQ ID NO: 367986 - DNA, 80 bp, Homo sapiens
gcgcaggcacaggaagctggtgacggcgatgaacggcccggcctgcatgcctacgaaaaggaggacagtgatgaagtcca

SEQ ID NO: 367987 - DNA, 82 bp, Homo sapiens
gctcttgtcctggcattgcatccacaggaggggcaggaaattctttgaagttgcatttgctggtctggcctttgcgtccttc

SEQ ID NO: 367988 - DNA, 90 bp, Homo sapiens
tctgcttcgtagggaggctggaaaaggacacgtcttctgggggcccagcacgtgcttatccagttggtggcctttgctattacctgtccc

SEQ ID NO: 367989 - DNA, 82 bp, Homo sapiens
tcaatttaagcctgatctaacccctagaaacaggaagatgagaatgtgcctactgctcctgatcctccaagtcaacatttac

SEQ ID NO: 367990 - DNA, 99 bp, Homo sapiens
cagccatagctgcagacaaagcacacgattgctgggcactgtggctcaagagaaggaggagatgatgaggaaaatgaagctcgggctggttaactgact

SEQ ID NO: 367991 - DNA, 75 bp, Homo sapiens
ttagatacagaactacgatataagccaggaccaggaagaaacaggctcctgccagcaccgacagcaacgaaaatg

SEQ ID NO: 367992 - DNA, 75 bp, Homo sapiens
catcttcctgacccgcttcaagaagcctgctgagttcaccacaggagatcctgctgggccgtggcttcacctttt

SEQ ID NO: 367993 - DNA, 82 bp, Homo sapiens
ccgggcttctgtgaaacatggcggtaggctgggaccataacacaaggtgtattttgattacatgagaagctggatccaaatg

SEQ ID NO: 367994 - DNA, 100 bp, Homo sapiens
tgggaacgaggggtgaagcggcccaggtgcactttacaggtccccgatgaaccaagagaaccctccaccatatccaggccctggtccaacggccccatac

SEQ ID NO: 367995 - DNA, 82 bp, Homo sapiens
tgaacagaaacacctaggaagggagaactgagccaaatctcctcagccacctgttgaagaagaagatgaacacttcgatgac

SEQ ID NO: 367996 - DNA, 100 bp, Homo sapiens
gggaattcagcatctccagaagctgtcccaagagctagatgaagccattatggcggaagagagcaaaagcgaaagcttcggatctacatttccaatacgt

SEQ ID NO: 367997 - DNA, 75 bp, Homo sapiens
atctcaggcggcaccctgtccccgaggaggggaccatgacacacagcctcccgcgacgatgcccctcaacgttag

SEQ ID NO: 367998 - DNA, 74 bp, Homo sapiens
tcatgcacttgaagcacctgaggaccctgctgagccctcagcttcaaggttactgactttttatgatgtttggt

SEQ ID NO: 367999 - DNA, 78 bp, Homo sapiens
tatccacatccaggaactgacaatctgttgatgttaaatgccgtgctatcaagactaatcaggaccttctcccagaaa

SEQ ID NO: 368000 - DNA, 75 bp, Homo sapiens
cacagcggcttcgagctctcctctgatggcaggacctgccaagacctgcctagagctggaacgttacctccagag

SEQ ID NO: 368001 - DNA, 82 bp, Homo sapiens
cgagccggagcgcggagcccggctcccgcaccatggaggaggacgacagctacggtaccacatggaatgcttggacccccct

SEQ ID NO: 368002 - DNA, 100 bp, Homo sapiens
ctccgtttcctggatgtgaacgagcctgtggtgctgaccgacacaaatcttgtgtatcctgccctgaaatgggaccttgaatacctgcaagagaatattg

SEQ ID NO: 368003 - DNA, 100 bp, Homo sapiens
caaagcctcattaattgaatatataaagcaggtgcacctaggtgaccattgtgaggtagatattttgttctaattttccagatgaggaagctgagaccct

SEQ ID NO: 368004 - DNA, 108 bp, Homo sapiens
gccgctgcgcaccccagcggagccaagccccacgctggccggacagggccgcctgtcgccgggtgctggagaatctggtaaaagcaccattgtgaagcagatgaggat

SEQ ID NO: 368005 - DNA, 97 bp, Homo sapiens
aggatcaggagccgcggccgcggcggcggcggccgggaaggaggagatcatgcacgccctgaagatgacctggcacgtgcactgctttacctgtgct

SEQ ID NO: 368006 - DNA, 75 bp, Homo sapiens
cttcgtctatgtggcgcccggcatagtggaagtatgcgagacttaagagctcaagtgactagtggtctcctgcca

SEQ ID NO: 368007 - DNA, 109 bp, Homo sapiens
gtggaggagctgtgcagccgcgaggaggcgcgggaggtgttcgagaacgaccccgagacggtcacggagctgctggacgtctccatggagctgggctgtttcctggctg

SEQ ID NO: 368008 - DNA, 73 bp, Homo sapiens
ccagagaatgacacaggtgaaaggtatttgtggaatcgatgaatttgataagatggggaatcaacatcaagcc

SEQ ID NO: 368009 - DNA, 101 bp, Homo sapiens
cgatggcgcagaaaccccgttgacaaggcactgctttttcatgacgattcacaatgacatcctttcaagaagtcccattgcagacttccaactttgcccat

SEQ ID NO: 368010 - DNA, 75 bp, Homo sapiens
gggcgggggggatggcgtctccccgactccacctgagggactggctcctgggaccatggtgaatccgggcagcag

SEQ ID NO: 368011 - DNA, 100 bp, Homo sapiens
gaccgagccggagctgctcgacgaccaagaggcgaagaggaggccccgtgtgggccgcggcccggccctcaccatggagtccatgttcgaggacgacatc

SEQ ID NO: 368012 - DNA, 83 bp, Homo sapiens
gagcaggcgaggtggccggagccgtgtggaccaggaggagcgctggggatatgagactttctactcggaatatcctgagtgtt

SEQ ID NO: 368013 - DNA, 100 bp, Homo sapiens
ccgtcctctgaggcgacggccgcggctgcacaggagccatgtggctagaaatcctcctcacttcagtgctgggctttgccatctactggttcatctcccg

SEQ ID NO: 368014 - DNA, 74 bp, Homo sapiens
actatccaagctgctaaaacttttgggaacaccaggcacttatttgacttctcataatcaggcttcctacactc

SEQ ID NO: 368015 - DNA, 75 bp, Homo sapiens
atgcatgcttctgtcaaaaacaaggttctggaaacaactgggcatatgggcagcctgcttctgcaaagtggtacg

SEQ ID NO: 368016 - DNA, 82 bp, Homo sapiens
acggttttgacttacatctgcaactccaaggctacaggcaggaaatgacttcaaacctgcttctattgacacttcttctgaa

SEQ ID NO: 368017 - DNA, 101 bp, Homo sapiens
cgcggcgatttcaactctcgaatgggaggaggcagtatagagaacctggagctggttgaaaaaggcttcagtaacttgaagaaacaaattgaaaatgccag

SEQ ID NO: 368018 - DNA, 90 bp, Homo sapiens
ttagcacagcagaccttggtgatgtgctacagaacatccatgatagcagtcttctgtaaatcgaacttttcaagaattctctgaaggaac

SEQ ID NO: 368019 - DNA, 75 bp, Homo sapiens
cagctggagcctcaggcggcagcgcttctagaagtgggccaccatatctggaaactacagtctatgctttgaagc

SEQ ID NO: 368020 - DNA, 74 bp, Homo sapiens
ctggacagcattcttgtagacaatgttgcactacaattttttatgggcagttgtgaaaaacttcaggacaaaaa

SEQ ID NO: 368021 - DNA, 75 bp, Homo sapiens
gaggagaagctggcagctctctgtaagaaatatgctgatcttatgtcggtgcagatctcttgtccatgtgccagc

SEQ ID NO: 368022 - DNA, 75 bp, Homo sapiens
aactctgaagagctgccacagcctgtgccagggtgacatcagggtgtgggtacgccacgctgcatcacgtcattg

SEQ ID NO: 368023 - DNA, 98 bp, Homo sapiens
tcctgagcgctctccatgcgcccggcgcgaggctcataaaggactcagtgcagcatttacagaccctgacgcaatccggagctgaccagcacgaggct

SEQ ID NO: 368024 - DNA, 75 bp, Homo sapiens
ggccgcagtcggcaaggagagacgtcgctgaggggcttgcctgaagcgagggagcaatggtggaacaaagcggca

SEQ ID NO: 368025 - DNA, 97 bp, Homo sapiens
agatggacacccattgagtactttaataataaaatcgtatgtgacctcatagagaacaaagtgagttgatcaagaacttaatggaaaacaagatgaa

SEQ ID NO: 368026 - DNA, 50 bp, Homo sapiens
ccaggaggagtttgagcataaggtgagccagcaactgcagaccatgttcc

SEQ ID NO: 368027 - DNA, 100 bp, Homo sapiens
ttccattccagaaagatggcatcatttttgccctcaaaagaaatggcagtgacgagtagcacagcccctctatggtttagatggcagtgctgcaaaggag

SEQ ID NO: 368028 - DNA, 100 bp, Homo sapiens
atggatgaagacggcggcggcgagggtggtggcggagaagaagttgacagacagctgtgcagagatgccatcttccccatccctgtggcctgtgatgccc

SEQ ID NO: 368029 - DNA, 100 bp, Homo sapiens
atttcggtgtagaagtggcagcacggcagaggcgtagaggctccggtgttttttgtgccaattgcctgaccacaaagacctctctctggcgaaagaatgc

SEQ ID NO: 368030 - DNA, 100 bp, Homo sapiens
ccggaaacggaaaattccacaagcccgtcactctaggaagcggcagcgaacgttctcggcagacctgttatcctaaactaggtgagtcagcttttggtac

SEQ ID NO: 368031 - DNA, 101 bp, Homo sapiens
cgaggatgcaccttcccctgccttggaaagacgtgaagccctccaatatgctagtaaacacaagaggacaggttaagctgtgtgattttggagttagcact

SEQ ID NO: 368032 - DNA, 100 bp, Homo sapiens
cttcgcccggctttgcagcggggacttcggcggcggcgcctcaggcacctcggcccgggcctccggtgtggctgtctctgatggtgtcatcaaggtgttc

SEQ ID NO: 368033 - DNA, 100 bp, Homo sapiens
cgggtggtgcagcaggaggagggctggttccggctgcagcccgaccagtccaagagccggcggcatgacgaggtcctgcagttctgagcttgggttccct

SEQ ID NO: 368034 - DNA, 100 bp, Homo sapiens
ggatgtacagcaacagaatgagaagctacaaacaagaaatgggaaaactcgaaacagattttgtcctgcaaccctggttccagtctggcaagcattgtag

SEQ ID NO: 368035 - DNA, 83 bp, Homo sapiens
gagcgcgagcggcgcgagaaactgtgttggggtggaagaggaggaggcgcccgacatcgacatataccactgcccaaactgtg

SEQ ID NO: 368036 - DNA, 100 bp, Homo sapiens
gttgcctgctcccggagggagacgcgctgccgaggagaacccagcggatgacgtccggttgtttgccttcgtgcgcttcaccaccggggatgccatgagc

SEQ ID NO: 368037 - DNA, 100 bp, Homo sapiens
tttatgttttccttacatctcaatgaagcaagggactatgaagagttctaaatgtcgcacagtgcttgcttcgccccagaagattgaaggttttaagcgt

SEQ ID NO: 368038 - DNA, 97 bp, Homo sapiens
cggagccgtctaccagatcaacgtcctccgggaccggagtcagaaccctccgcagagtaaagggacttgcaacaaagcattgccagagaacctagtg

SEQ ID NO: 368039 - DNA, 100 bp, Homo sapiens
atcgaagacagtcaagtgtagactctcgccaaagccgctctgggcaaggattttttatcaagcagaaatgcatcgaacaacgagaatcaagatcactgag

SEQ ID NO: 368040 - DNA, 100 bp, Homo sapiens
caaaaaaaaagaagcctctcactttcagtccaagctaattacacctcctcctccaccaccctcaccagaaagaaaaatccagttacactcttaaaggaat

SEQ ID NO: 368041 - DNA, 83 bp, Homo sapiens
agcaccactgcagccagaaagcgaggtgatgtgtccaatctagatcccaacttctcatttgaaggcaccaaactggatgtggg

SEQ ID NO: 368042 - DNA, 50 bp, Homo sapiens
cctcgtgccgctgagcctggcgcagatcgaccccaagactgcttctgaga

SEQ ID NO: 368043 - DNA, 75 bp, Homo sapiens
atccctgccccatctgtcgagatcacaagttgcatgttgactttaggttaagtgggcagaccaacatccacctca

SEQ ID NO: 368044 - DNA, 82 bp, Homo sapiens
agaaggcgatcaaggccaagtatccgccagtcaataggaagtacgagttgacaaccatgagtggaaaaaactaattatggtt

SEQ ID NO: 368045 - DNA, 50 bp, Homo sapiens
tggagtttgatgttgttgaaggagaaaagtttggatttaggtggcgagta

SEQ ID NO: 368046 - DNA, 88 bp, Homo sapiens
attcatcagtttgttgtgcttgtcaagatcagttttgcagaacactgaaatctatggactctaaaatggacttcatttaaagaaaccc

SEQ ID NO: 368047 - DNA, 120 bp, Homo sapiens
ggggaccgagcgcgctcgctccggcgccggcctcgcctcctcgcagcagcgccatggatgatgactttgagttcactggcagccacctgacagtaaggaatggctactcgtgtgtgcctg

SEQ ID NO: 368048 - DNA, 100 bp, Homo sapiens
agccctgcccatgtgactcactccggggcagaagaagagttcaacatagagaaaggtcggcttgtgcaaacccaaagactaaagattatggaatattatg

SEQ ID NO: 368049 - DNA, 75 bp, Homo sapiens
tgaagtgcagaggtttttttctggcagagatcctacaagaatccaggatgatgatcccagattgccagcgcaggt

SEQ ID NO: 368050 - DNA, 78 bp, Homo sapiens
ggtggcggcggcggcagctgcagtgacatgtccagcatgaatcccgaatagggaagatgatgacgacgatgaatgtgg

SEQ ID NO: 368051 - DNA, 76 bp, Homo sapiens
tggctgccgtccccgctgctgtgcattggctttgcccgaagtttttacatacaaattctactagtcacacctggcc

SEQ ID NO: 368052 - DNA, 99 bp, Homo sapiens
tcgctgcccagaagaagggaaggcgcgagtgaggaaaggaggtactgtaggaatcattgtagtcaatcattttccagttctcagccgctcagttgtgat

SEQ ID NO: 368053 - DNA, 100 bp, Homo sapiens
tgacaacacggccagggcccacccagccaaagcccgggacctgtacaagggccgccagctacaaggtgctggagaatctggtaaaagcaccattgtgaag

SEQ ID NO: 368054 - DNA, 50 bp, Homo sapiens
caagatttaaaaagcatcgtagagatctgacaggagctcaagatggaagt

SEQ ID NO: 368055 - DNA, 90 bp, Homo sapiens
taaaaagagatgtggggggattctcgacctgctaacagaactggaccttttcgaacccttaggagaaatcttgagagtggacagcaattg

SEQ ID NO: 368056 - DNA, 127 bp, Homo sapiens
aaaagatggagccctgcatatgattggctctttagctgaaatacttctgaagatagttatgaccagagtgcattacaggcggttcagctggaagatggtaccacagcttatatccaccatgcagtgc

SEQ ID NO: 368057 - DNA, 51 bp, Homo sapiens
gcggtcctggcgctcagccatacagaaaaaaccgggaagatcctgacggag

SEQ ID NO: 368058 - DNA, 100 bp, Homo sapiens
tgctgcgttgaaagccttgaagtacttgtttagattcatcatccaatcccgagtgctctacttgaggctccaaaagaagcacttgctcagtgtgtcttgg

SEQ ID NO: 368059 - DNA, 98 bp, Homo sapiens
gatgatttttggatcctgagaattgatctatgttggatcagtcatcatcagatttgaaatatttaaagtggatacaaaactatttcagcaatgcagac

SEQ ID NO: 368060 - DNA, 83 bp, Homo sapiens
ccaagaaccaaccctgccagcacctggaccttggacattcagacttcagaatgatcttcaaagctgctgcgggcattctatgt

SEQ ID NO: 368061 - DNA, 96 bp, Homo sapiens
ggtgttgtcctatcgacccagctggatcgtgtaaccagtctatgggaagtgagactgttcgccatggatttccctatcaaccctcagccctggcct

SEQ ID NO: 368062 - DNA, 100 bp, Homo sapiens
acttttcaagaaaaagcaatggagattggatggatgcacaatcggagacaaagccaaaactggacaagccaaggcatctgtagccaaagtaaacaaatct

SEQ ID NO: 368063 - DNA, 100 bp, Homo sapiens
catatatcctaaaggagatggaagtgatgtaccatcatgggtagcctttgataaacagatggattaattgcctctgaaggagccataagtcccgatttct

SEQ ID NO: 368064 - DNA, 96 bp, Homo sapiens
cagactcttaggccctgccgggacctgctgaatcggaacctgcaatttaccaagacctgtacacacattacataagatgattgaagaatcactgaa

SEQ ID NO: 368065 - DNA, 89 bp, Homo sapiens
cagagcctcgcctttgccgatccgccgcccgtccacacccgccgccagccggtggctgctggcagcggaatcccccagatcaagtgctt

SEQ ID NO: 368066 - DNA, 83 bp, Homo sapiens
gtgccgtgcgccgcagcccgggcccaggccccggcagcgcctgggacaagatatgtgattctgttggactggcaaaacagata

SEQ ID NO: 368067 - DNA, 50 bp, Homo sapiens
agcttttttcttgctgaaacattaaagtattaccaccttgctcttgactg

SEQ ID NO: 368068 - DNA, 100 bp, Homo sapiens
ggcggacggttttcgtacgggcggccgtgcgcgaggcgagctgagctgactgctgcccactttggaggaggcggtgggctccttcacaagaagactcaac

SEQ ID NO: 368069 - DNA, 95 bp, Homo sapiens
tctgtttctctgctgcaccgacctcgacgtcttgcctgtgtcccacttgttcgcggcctatagcccaacagcatggtggtggaacaccccgagtt

SEQ ID NO: 368070 - DNA, 101 bp, Homo sapiens
aagaatattattagcacaagagcaccatactttgagggttccagcaacagatagaaatgctttaagttcactctggggaaagctggcctctgaaatcttaa

SEQ ID NO: 368071 - DNA, 51 bp, Homo sapiens
gtcttccagagcgtgaagatcaagatcgatgcctgtgaggagccaccaaca

SEQ ID NO: 368072 - DNA, 100 bp, Homo sapiens
gtgatggctggaagttcctctgtaccagacctgcctagagctggaacgttacctccagagcgagccctgctatgtttcagcctcagaaatcaaatttgac

SEQ ID NO: 368073 - DNA, 83 bp, Homo sapiens
acttgcaggccgggcagtgcggcaaccaaatcggcgccaagacaaatttacatgtattggagaccagaccagaagcccttctg

SEQ ID NO: 368074 - DNA, 98 bp, Homo sapiens
agacttggaatcctcagatgagactgatcacagcagcaaggaccacatgcaaagggccaatgtgccagcagatctgagctgagaatcatcctggtggg

SEQ ID NO: 368075 - DNA, 100 bp, Homo sapiens
cttagaactactagagaatcttaatcagctcatagccgttgacaaccaacttctgcatgtgaagcctcagcaggtagagcagatggaaataccacctgta

SEQ ID NO: 368076 - DNA, 90 bp, Homo sapiens
ataatcatgattggagatggtgccacagatatggaagcctgtcctcctgctatctccagtctatgtgctgaagaagcagcagcccaagag

SEQ ID NO: 368077 - DNA, 99 bp, Homo sapiens
actgatgggaaatcagccctggacctggcagatccttcagcaaaagctgtccttacagtaatcctaaattggagagtcagagagtaaataaaaaagtca

SEQ ID NO: 368078 - DNA, 74 bp, Homo sapiens
ggggggcctggccgcgcagccgattgggtaactcaaggcgtccctggagtacactgaggataagtgtttgagaa

SEQ ID NO: 368079 - DNA, 71 bp, Homo sapiens
ctgtatcaagccaaacatgcagaagggttacacatcattttggaatgactgtatatcatctggattacgtg

SEQ ID NO: 368080 - DNA, 100 bp, Homo sapiens
cacgaatctgcccacccctcctgtaacccagcctgtttcacttcttggttaaatggaagctgatcggcgttcacatggaatcctcctcacgtagctcaga

SEQ ID NO: 368081 - DNA, 50 bp, Homo sapiens
ctgggcccgtgagccactcggcctcaggctggagtacaatggcgtgatct

SEQ ID NO: 368082 - DNA, 98 bp, Homo sapiens
gggatccggctcctccagctaccggcccaaggccatctacctggacatcgatggacgcattcagaagaactggacttgaagccatcatggagacatat

SEQ ID NO: 368083 - DNA, 75 bp, Homo sapiens
cgggaccgccgccgccgccgccaccatgaacacactgttgcagcagctaggagtggctcctttttctgagggccc

SEQ ID NO: 368084 - DNA, 100 bp, Homo sapiens
aaaatattaaaaagttagcagaccagtttttagaggaacaaaagtggacatttgggagcaataaaaataagaagaaaggaaaagccagaaaaatagagaa

SEQ ID NO: 368085 - DNA, 74 bp, Homo sapiens
cgccttaacccaaggaagtgactcaaactgtgagaacttcagcggccctccaggcactgaagcgtaagaagagg

SEQ ID NO: 368086 - DNA, 90 bp, Homo sapiens
gcaagcagggaaagagagcgccaggtgcttagcagaaatcatgaggtccaatggattttgtttagcaaataccgaaacaatagttattga

SEQ ID NO: 368087 - DNA, 100 bp, Homo sapiens
agaaaatgtcactacaaagagtaatttctctagcacagaaatatcttcaacgttttgtgatttcctgacgatgaaatgcactcggtgatggaaagagagc

SEQ ID NO: 368088 - DNA, 100 bp, Homo sapiens
cgggcccggagcagccgccgccgcagcgcgaacatggacgccgtcaacgccttcaaccaggaggtgagttccaacaaattggttcaaaaagaggggggat

SEQ ID NO: 368089 - DNA, 74 bp, Homo sapiens
gaaggatcaaggacggatgatgaagtagtacagaggcactacacgctggatgcttccctgcctttgcgtctgcg

SEQ ID NO: 368090 - DNA, 75 bp, Homo sapiens
gtttcaactgctgtattgcagaacagcctcagcctgatcatccttccttgtgggttagcaggcagttataagatt

SEQ ID NO: 368091 - DNA, 83 bp, Homo sapiens
aaacaattgtagatcccttcagttcaaaacataatgtgattggtatgagggtgctggttgatgctcgagagaagcttcatatt

SEQ ID NO: 368092 - DNA, 100 bp, Homo sapiens
tcagtcctggctctgacaagccctccagcatttgacattgtgcagcaaagaaatggttatggagaagcccagtccgctgcttgtagggcgggagtttgtg

SEQ ID NO: 368093 - DNA, 83 bp, Homo sapiens
gcagcccttgccttgagtcagtgcgccgctctccagcccgcttgaacgaatagcctaacatggcagaccagagacagcgctca

SEQ ID NO: 368094 - DNA, 100 bp, Homo sapiens
gccctgcacatataccatctctggctccagggaatgtgagggaggtggggaagacagggctccagctaccacaggacgggctctgggtatagccgttcca

SEQ ID NO: 368095 - DNA, 100 bp, Homo sapiens
cttgtggtgcggcctcaccatacaggaacagggcagacgttagcgtgagtgatcactctcaatcccgggcaaacgagatgctgctcagtggacggaagct

SEQ ID NO: 368096 - DNA, 75 bp, Homo sapiens
gtcggccagcctgagcaagcggaggacctacgccggcctgggcacagccaaaattggtcagaaaggggagtaaag

SEQ ID NO: 368097 - DNA, 97 bp, Homo sapiens
ttggattgtgagctatttcagaactgttctcaggactcattattttaacatttgggagaaacacagccagaagggcagctgcaatgactctccgcac

SEQ ID NO: 368098 - DNA, 100 bp, Homo sapiens
tccatggcagcagcgcgggccagagcgcagcgccgagcgcggcccgggcgccatcgagccttggcggcggacgtgcaggctggggccgggctggcggggc

SEQ ID NO: 368099 - DNA, 100 bp, Homo sapiens
gacacagcagcgttaatggatgagagacccactgctaaggagttattgaagcacaagtttatactacgcaatgcaaagaaaacttcctacttgaccgagc

SEQ ID NO: 368100 - DNA, 100 bp, Homo sapiens
ccagattctgccaattcgttttcaggagcatctccaggtcacctcatcatctcaaggaggagcattcccctgggctaaggcactggggccgaactctagg

SEQ ID NO: 368101 - DNA, 110 bp, Homo sapiens
ttaagggacaaatactgtcagactgaccaccatcatcacggatgctgtgaaccagggcagcttttggcaaggagtctgaagttcttattgggaacctgggtgataaatta

SEQ ID NO: 368102 - DNA, 75 bp, Homo sapiens
acaatggtgggcttaattttagacttaattcagtgcacaaatgagatgaatgtgaacatcccacagttggcagac

SEQ ID NO: 368103 - DNA, 74 bp, Homo sapiens
attttggcagttctaaatttgaatttgaggaaacctgtaggaagtgtcagggactctggaaagaacataatggc

SEQ ID NO: 368104 - DNA, 100 bp, Homo sapiens
ataagctttgcaacagaattacagagtatgatgagaataaaggcagccccgttgatgactgaaaatgacaaagcatccacctaacagacgaggaatcagc

SEQ ID NO: 368105 - DNA, 127 bp, Homo sapiens
tggcgctcctgctcctccaggcgctgcccagccccttgtcagccagggctgaacccccgcagattggcagattgctactctggctttactcctgggcggcgctgccatcattctcattgcattcctg

SEQ ID NO: 368106 - DNA, 98 bp, Homo sapiens
gggactgaagttactgaaaaggaggtagaaatactcttcattcaagtcaatcagtttgcattggcttgaagaaaatttgcctacacgttgtggatttt

SEQ ID NO: 368107 - DNA, 98 bp, Homo sapiens
ggcggtggactcgtcggagccgcgggcggtcagggctgatggagttatgagaacaatgaacacagaaaaactcctaaaaactgtaccaattattcaga

SEQ ID NO: 368108 - DNA, 51 bp, Homo sapiens
ggagatgaagcctaagaatatgatcagacaaactttctgcctccttggaaa

SEQ ID NO: 368109 - DNA, 75 bp, Homo sapiens
atgggcacccctttggttggccttccaacggcttcccagggccccagggccatcctttcaggatgacaggtcgca

SEQ ID NO: 368110 - DNA, 82 bp, Homo sapiens
gttttcaatgcacaaggggaaatttggcttgcaattcatcactttgaaaaggtatgatctcgtgaaatcttgagagaaactg

SEQ ID NO: 368111 - DNA, 75 bp, Homo sapiens
cagacccagcagaacagaggcttcgcatttgtgcagctgtcctctgcaatggatatgggccctcacattttccaa

SEQ ID NO: 368112 - DNA, 100 bp, Homo sapiens
cggagtccctggagaaggggacgcggagggcgactgccgagggtctcagcgggatctggagtcaggggctggagcattggatttgctaaaggagcttaag

SEQ ID NO: 368113 - DNA, 75 bp, Homo sapiens
gagcatatgagaaattctttcattctccagattgagtttgtgacgggcaccaaaaaaggcaccacgaccaacgcc

SEQ ID NO: 368114 - DNA, 82 bp, Homo sapiens
cagcattagactctacatcttcatctatgcagcccaggaatctgagaaaaaggggttgattgaaagaatctatatggtacag

SEQ ID NO: 368115 - DNA, 96 bp, Homo sapiens
tgaaggctggcaacattctctttaccttagatggagatatcaaattggtgtggcaaaggagcagagaactttgacaagttcttcacacgaggacag

SEQ ID NO: 368116 - DNA, 99 bp, Homo sapiens
cgcgccgccaaggcggcgcgcgagctggagcactcgcatgagcagcaccagcagtaagagggctccgaccacggcaacccagaggctgaagcaggacta

SEQ ID NO: 368117 - DNA, 100 bp, Homo sapiens
cgctgagtgaacccatcctgccgtccttctccactttcgccagcccgtgccgcgagcgcggcctgcaggagcattccacgcctacgggaaggcaggcaag

SEQ ID NO: 368118 - DNA, 100 bp, Homo sapiens
aagccccagtatgggaatttaaatatggagacctcctgggacacttgatgtgtcccaaacatggcacagactttttggaatataaatgtcgctactgctg

SEQ ID NO: 368119 - DNA, 82 bp, Homo sapiens
gggaaccctggtcaccgtctcctcaggaaggtgtcttgctgcaggtaactaatgaagaagtggtcaaccacagagtcttcaa

SEQ ID NO: 368120 - DNA, 51 bp, Homo sapiens
gtgttatatcctccaggaatactggccagtcagaaaaagtggacagggcag

SEQ ID NO: 368121 - DNA, 88 bp, Homo sapiens
cggtcctgtactggctgctgctgccctgcgcgctgctggctgcaaacggggattcagcgtccgatcctttggaacagggactcacgtg

SEQ ID NO: 368122 - DNA, 75 bp, Homo sapiens
acagagagaaaattgagacggagctaagagatatctgcaatgatgtactgaatcctgatgtccatccaacagaag

SEQ ID NO: 368123 - DNA, 90 bp, Homo sapiens
ttgtgtttgaagccttggtgatatacatggagagtctggccttagcacatgcagatgagaagtccttagcaactccgaagtcaagcccgc

SEQ ID NO: 368124 - DNA, 100 bp, Homo sapiens
gtcaagcaccggctggtggagaacatgagttcagggaccgcagatgctctgggcctgagccgggccatcctgtgcaatgcttccaatcagaagactatac

SEQ ID NO: 368125 - DNA, 116 bp, Homo sapiens
cggccgacggcgacgactcgctgtaccccatcgcggtgctcatagacgaactccgcaatgaggacgttcaggtatctctcctaaatgtgtgatcaaggaattaccaccaacagaga

SEQ ID NO: 368126 - DNA, 75 bp, Homo sapiens
gaagaggaaagcaaaggcgtcaggaatggttcttcctcagacccaacatgagtgaagtttcctgcaagaaacggg

SEQ ID NO: 368127 - DNA, 75 bp, Homo sapiens
tcaggacacggcctacaacaccaagaggcctcaaggggaaggtatatcaggaacctttgtcccccaatgcctgca

SEQ ID NO: 368128 - DNA, 90 bp, Homo sapiens
ccggcggcggccatgggagatatcccagccgtgggcctcagctcctggaaggaatgtatcctgtcaggtataatgtcagtgaatggcaag

SEQ ID NO: 368129 - DNA, 75 bp, Homo sapiens
tcttgtagcagcgcctcctcggatgctcgctctatggcagcagctgctgcatccctcgggggaccccgagcaaac

SEQ ID NO: 368130 - DNA, 76 bp, Homo sapiens
ttttcacgtcacctggagagatgcacagacttaccagcgttataggccagtatcaacttcaagttcaaccactcca

SEQ ID NO: 368131 - DNA, 100 bp, Homo sapiens
ctcaggtacagacccaggctcttcgagactttgagaagagatacaatcttgcttgaccgtttgggacatcaatcttccacatgaagtgcaaaatttagaa

SEQ ID NO: 368132 - DNA, 100 bp, Homo sapiens
gcttactggtgaaggaatgggacaagacccatctttatgcaaagccagcgttacagtaatgttccagaccactaaggcttttcttcctacgatgctggag

SEQ ID NO: 368133 - DNA, 50 bp, Homo sapiens
cttcagtacaagaggctacttctactagggaatttatcgtgtgtgtggaa

SEQ ID NO: 368134 - DNA, 100 bp, Homo sapiens
gaaagccaagacggacctcaagctctgggggatcgaccgggacagctaccggcgcatccttatggaatactcccccagttgcaagaggcgcaggaccgtg

SEQ ID NO: 368135 - DNA, 100 bp, Homo sapiens
gtgaccaggctgaccagcaccagccctgatccagaccctggctgggcatccatcagcaggggtgtgctggtgtgtgacgagtgctgcagcgtgcaccgga

SEQ ID NO: 368136 - DNA, 76 bp, Homo sapiens
ggaagacctattatcagatcaaccaccaaagtgggaaacattgaaatcaagttggatccacttgaacaagcaaaag

SEQ ID NO: 368137 - DNA, 100 bp, Homo sapiens
cggggttggcctaggcgaagatccggactctgggtgttttgctaccgtgaccgtttaggccaaagatgaagaggaagcctttctggattggagtgatgat

SEQ ID NO: 368138 - DNA, 75 bp, Homo sapiens
gatagatacatcagtgtgggaagccaagcagatacaataagactttgaccccgacgcaggcttcagtgattgccg

SEQ ID NO: 368139 - DNA, 90 bp, Homo sapiens
gagcacacattgaatgggccaaggaaaaatcgagcagaaagaatgtctttcaggtccggaccctatttgtcagtggccttcctctggata

SEQ ID NO: 368140 - DNA, 82 bp, Homo sapiens
ctcagtgcgaagaagctgcagccgcacctggccaagggagggcatcctggctgtttcacccgtggacttgaacttgccattg

SEQ ID NO: 368141 - DNA, 100 bp, Homo sapiens
catgctttgaggcagtagtagtcaccaataccatacctcaggaggacaagatgaagcattgctccaaaatacagatgtctttggtggacttgggaaagag

SEQ ID NO: 368142 - DNA, 75 bp, Homo sapiens
cagattttcagtctgataaccggcagcccaatggatccaatggtgatgaagagacctcagttgtatggcatgggc

SEQ ID NO: 368143 - DNA, 90 bp, Homo sapiens
ctgggaagagattgcctgattaatgctgctaagacatccatgtcttccaaaatcattggaattaatagctcttcaagtctgcaataaaaa

SEQ ID NO: 368144 - DNA, 100 bp, Homo sapiens
aaatgatgtattttgtgatcgcagcgatgaaaggtgctggagaatctggtaaaagcaccattgtgaagcagatgaggatcctgcatgttaatgggtttaa

SEQ ID NO: 368145 - DNA, 89 bp, Homo sapiens
attatggaaacctggtctcactgggtgaagactcgtggactagaagagattccagtttttgatatttctgaaaaaacagtaaatggaat

SEQ ID NO: 368146 - DNA, 117 bp, Homo sapiens
cggccttcgagaagcctcagatcatcgcccatatccagaagggcttcaactacacggtgtttgacttcagccataatggcaggtgaagaaattaatgaagactatccagtagaaatt

SEQ ID NO: 368147 - DNA, 100 bp, Homo sapiens
cgaggatccgcgggagctgcccggcagggcggagcctcccctcgcaggaaaaggggaagatagtgatgtactcagtataaatgcagatgcttatgacagc

SEQ ID NO: 368148 - DNA, 101 bp, Homo sapiens
gtcactccaacctcttttcgctggtcccttaatatggactttgaaaatcaagataaggagaaagacagtaatagttcttctgggtctttcaatggcaacag

SEQ ID NO: 368149 - DNA, 100 bp, Homo sapiens
gcagggggctgctgtcatacctttggaaagaatggccttgaatttgacacagactctgaacaggaagtgcctcctggaaccacagagtcggttcagtctg

SEQ ID NO: 368150 - DNA, 82 bp, Homo sapiens
acaaaggaagacttgtaacctggagaagaggatgtaatccctgttcattactacttaatacctccaccaacaaagactaaga

SEQ ID NO: 368151 - DNA, 83 bp, Homo sapiens
atcaacggcaaagttttgcagatcttcaacaagaggacccaggagaaattcgccctcaaagagcatattaatgaaaagtgcca

SEQ ID NO: 368152 - DNA, 75 bp, Homo sapiens
ttagcgaccccgcccgggccccctcaggtgcaagaattgtttatccgtgattatggagagatttttaatgtccag

SEQ ID NO: 368153 - DNA, 101 bp, Homo sapiens
ctggagctgtgagctctgctacttcaagtaccaggtcctggcgatcagcaccaagaacccactgcagaatcatcggactcaggtacatctgtgagtgagaa

SEQ ID NO: 368154 - DNA, 114 bp, Homo sapiens
tcagctgccacctgcctttgacctttttgaagcctttgcaaaagctgagtcatcactagagagtgggaagggcagcagcagcagagaatccaaaccctaaagctgatatcacaa

SEQ ID NO: 368155 - DNA, 82 bp, Homo sapiens
aataattttcacaaccttcaagaaattcgggtgtcttcagtgccctgggtttgcctgtgacccaatgcccactgggactgaa

SEQ ID NO: 368156 - DNA, 100 bp, Homo sapiens
gagagctcatctggaattttgccgatttcatgactaaccagtgcccaaccgcttgcttatcctccacggcttcctggacgaaaacgtgcactttttccac

SEQ ID NO: 368157 - DNA, 100 bp, Homo sapiens
tgctgccaaaagcataaccaatggcagtgatgatggagctcagccctccacctccacagctgctgggcatgctgtgtgcttgcatcgtgttgtgcagaag

SEQ ID NO: 368158 - DNA, 100 bp, Homo sapiens
agactgcgctcctggccctggggtattctcacagctctgcggcccaggcccaagatattgaagcacagattcgagaaattcaaggcaagaaggcagctct

SEQ ID NO: 368159 - DNA, 107 bp, Homo sapiens
ctgagtggttgtgtggtcgcgtctcggaaaccggtagcgcttgcagcatggtttacccaaggtccagcctagcccctaggcaccatgtcggacagtgatctaggtga

SEQ ID NO: 368160 - DNA, 100 bp, Homo sapiens
catgagggttggtgctgttttattaaatctacagccacctaatgatccccatggtatccagagagaagacctcatcctgagtcttcgcgctgtgctggct

SEQ ID NO: 368161 - DNA, 74 bp, Homo sapiens
ttttggcttagagatcactaatccatcttcagcttcaattacaaaccctcaatatagtaacctggtctccctgt

SEQ ID NO: 368162 - DNA, 82 bp, Homo sapiens
gtcctgctgttgcggccgctgccccagggctgcggggacgcatttcctgtgttacatctgcaaggaatacgtagaggatctg

SEQ ID NO: 368163 - DNA, 73 bp, Homo sapiens
agcgccttcatcctggggctgcgatgtagctgctgctggtggtgacaatgtcaaataacggcctagacattca

SEQ ID NO: 368164 - DNA, 100 bp, Homo sapiens
aggaactattcaaggatgaagccactgatggaggagatcgggcgcatctccattgagatgaacgggaccctggaggaccagctgagccacctgaagcagt

SEQ ID NO: 368165 - DNA, 87 bp, Homo sapiens
gccgcggcccgcgctcggccgcccgccggaccctgatgcttggtgtgacctgagtaaatttgacctccctgaggaaccatctgcaga

SEQ ID NO: 368166 - DNA, 75 bp, Homo sapiens
atatacatcagtagtaaccttggtgaaacctcatttagtaaaggttgattgcactgccaacactaacacctgtaa

SEQ ID NO: 368167 - DNA, 82 bp, Homo sapiens
actttcattgtcttttccgcccgcttcgatcgcctcgcgccggctgctctttccgggaacaagcacatcatgattgacttgg

SEQ ID NO: 368168 - DNA, 82 bp, Homo sapiens
gcagcaagcggggcgctgtgtccccaagctccccgtcctcggagcggaaacgcttgggcattggccagtctcaggagatgaa

SEQ ID NO: 368169 - DNA, 75 bp, Homo sapiens
ggagggcctcgggggactgactggtgtgcgagaagagcagagatctccattcaatgatcgttttccacttaagcg

SEQ ID NO: 368170 - DNA, 74 bp, Homo sapiens
ctgagtcaccatgctagcactgtgcagctggaagacccaggagaaggcggaggctcaggtgcccacatgatcag

SEQ ID NO: 368171 - DNA, 75 bp, Homo sapiens
gtgatgaggaacacggtgtatgctgtgaagaggctgaaggagggtctgttcctggtttcccagatgcataaagga

SEQ ID NO: 368172 - DNA, 88 bp, Homo sapiens
atcgtctctgtcttcagccttcagctcttctgggtgtgtgcttattgtaccagcatctgccggcaggccctaaaggacagcaaggtgg

SEQ ID NO: 368173 - DNA, 80 bp, Homo sapiens
ggaaggatcttctcatgcacagaggcaacaaatggcaactttctgaatgctgttgatggagtaatgaatggtgaatacta

SEQ ID NO: 368174 - DNA, 75 bp, Homo sapiens
ccggctgcagagacaggcgttcgaggagatcatcctgcagtcttcaagaccagccagccttgatagtggcagaac

SEQ ID NO: 368175 - DNA, 111 bp, Homo sapiens
ggcgaagctggccgagcaggctgagcgatacgacgcaaagtacccacgtttgttcgaatgctggccccagagggagccctgaatatacacgagaaagcctggaatgcttac

SEQ ID NO: 368176 - DNA, 100 bp, Homo sapiens
ggcggatctcatatcttcacttggcaaactcaacaagatacagaattcgttgttgggaaggactggggaaacagctgtaacatttgccaccctcagaagc

SEQ ID NO: 368177 - DNA, 100 bp, Homo sapiens
atttgagccaccaatgctggatttccatgaacagtgtgatgaatgcagactctgctaccattttggctgtttggatcctcctttgaaaaagtctcctaaa

SEQ ID NO: 368178 - DNA, 90 bp, Homo sapiens
gggctgctcacaatttatatggccaacttggcaatggtggcttgctatccgggaaatggaacaggttatgttcgccacgtggacaacccc

SEQ ID NO: 368179 - DNA, 88 bp, Homo sapiens
agcatgtacggcaaaggcaagagtaacagcagcgccgtcccgtccgacagccaggcccgggagaagaacatccaatacttgggcaacc

SEQ ID NO: 368180 - DNA, 101 bp, Homo sapiens
ccgcctccaccatgccgccgaagttcgaccccaacgagatcaaagtcggctgaccccgcactacatctacccaccagccatcgtgcagcccagcgtggtga

SEQ ID NO: 368181 - DNA, 50 bp, Homo sapiens
tgcgccatcatcctcatcatcatcatagggcagagcggcttgggtaaatc

SEQ ID NO: 368182 - DNA, 74 bp, Homo sapiens
aaaaggtgatctggacaaaggaacaggtatctcaggttcctgggtggagctacccatgaacagcagcaatggca

SEQ ID NO: 368183 - DNA, 90 bp, Homo sapiens
caaacttgttatgcagcatataacagggaaagcattaacttttgagctacgtccagaatagcatcatcttcatgggtattccctactcct

SEQ ID NO: 368184 - DNA, 50 bp, Homo sapiens
gttctgatcactactgacttgttggaaggaaaatcacctcggcagtgttt

SEQ ID NO: 368185 - DNA, 50 bp, Homo sapiens
gtgcaatgccccgggctgtggacaggtaattcagtaccaaactgttcgat

SEQ ID NO: 368186 - DNA, 100 bp, Homo sapiens
ggccccgaaggctctccatcgaaggcaacattggtgagtggtgtcattgagcaaacacgaagtcgggctcatccaaggatgagattttgccagagaaagg

SEQ ID NO: 368187 - DNA, 123 bp, Homo sapiens
ctggatctgcctgtggccattattaatctaaaagaatatgatccagatgatcatctgatagaagagattcgccatgaagtcagcgtaaataatgtaacacataaactgtgcagtaaccattgc

SEQ ID NO: 368188 - DNA, 100 bp, Homo sapiens
gccagagccgcctgccatgccccagccagtccccacagcataacaggctgagattgcaaactatgaggcgtgcctcaaggaggaggtagagaagaggaag

SEQ ID NO: 368189 - DNA, 100 bp, Homo sapiens
cggatcccggagagccccggagtgagcggagtagcgagtcggcaacccggaggacttgcccctttcgtctatttgtcagacgaatgttacaatttactgg

SEQ ID NO: 368190 - DNA, 90 bp, Homo sapiens
cctcagctgtgattggctaccttctcccatcaccccagggcagcatctcatcacggcagttgctgaccatctatttaagctgaagacaac

SEQ ID NO: 368191 - DNA, 141 bp, Homo sapiens
ttgggaaaggacaaaaaaattcctggaaaaagaagtccaagaagcaaaaaagggactgctaagaagataccaccaggtactccaaagattcaggtttactcacgtcatccagcagagaatggaaagtcaaatttcctgaat

SEQ ID NO: 368192 - DNA, 99 bp, Homo sapiens
tgctttggatgtaggaagaggccccacattggaactaagacaggacagtcattttgtttactcattcagccctgttgcaggtcccaataaactcttcat

SEQ ID NO: 368193 - DNA, 100 bp, Homo sapiens
cgcctcatgcagaactatgaaaagggccggtgcataaacttctcccgagttccatctcagtaaaagggaagcaggaagaccaagaaggtacgaagatggc

SEQ ID NO: 368194 - DNA, 90 bp, Homo sapiens
cagcgtgggaggccgctgccgtcgcgcgccttgccacagcctggcagctctgatcaggaaagtgaggaacagcaacaattccggaacatt

SEQ ID NO: 368195 - DNA, 121 bp, Homo sapiens
tgagcaccctgtggctggtgggggccggccccggcctggtcctggccccggagctgttgctggacccctggcagggtaagcagctgctccctttgtccagcagtgtacatagcagtgtggg

SEQ ID NO: 368196 - DNA, 100 bp, Homo sapiens
cctgctctattaccagaccaactacctggtggtggctgccatgatgatttccattgtggggtagatgacattaatgctgataagaatatctcttctgcac

SEQ ID NO: 368197 - DNA, 75 bp, Homo sapiens
ttcactttcttcattcacaatcccaagcgccaggaccttgaagttgagggtgatctggaccctctggcatctctc

SEQ ID NO: 368198 - DNA, 75 bp, Homo sapiens
cgtggagctccgccgccccgaaactttcaccgcgagcggcattttctgcattagcaaatatcgacctggctttag

SEQ ID NO: 368199 - DNA, 75 bp, Homo sapiens
ctgtcgctcttgtgccctagcaccccgagaaccgtcagtttgagccagatgtctgtagaagagaagctttctcta

SEQ ID NO: 368200 - DNA, 98 bp, Homo sapiens
ctggcccgggacctgcagtgccccaagaagatggggaagggatccttcaagtatgcctgggtgctggacaagctgaaggcggagcgtgagcgcggcat

SEQ ID NO: 368201 - DNA, 82 bp, Homo sapiens
ctggagatggtgccttctatggacctaagtttaagtgctgtggggctgctaactacacagattgggagaaaatcccttccat

SEQ ID NO: 368202 - DNA, 122 bp, Homo sapiens
tctgaagatggttggatttccctttggaggggctgggctcctactgttcttagagatgtacctttctcaggtgaccaagaatatggcccaggtgaccaaagccctggacaaggccctgagca

SEQ ID NO: 368203 - DNA, 80 bp, Homo sapiens
ccgcgccgagccggaggccgcgtggacccgaaagccgctgggaaaaagacacctatggctgccgatgaaggctcagcaga

SEQ ID NO: 368204 - DNA, 50 bp, Homo sapiens
tctaaagaaggagttgaatgtgaggtcaacctggtgttcctcatggtgac

SEQ ID NO: 368205 - DNA, 100 bp, Homo sapiens
gggagggctcggcccaggtcaccggcagcccaggcgcaggcgtgatgagaggctggacctacagtggagtctggagggacatcagctgggagtggtgtct

SEQ ID NO: 368206 - DNA, 100 bp, Homo sapiens
ctgtgcggggccgtggcggccgcggcgatgactcggacccagcaccctcatcacatgtgtggattctgggattctcagagtctggcatgacaaggacaag

SEQ ID NO: 368207 - DNA, 98 bp, Homo sapiens
cttctttgtcttacttgtcatttgaaggtgcaactaaaagaaacagaccaaatgtgcaggaattctcaagaaatttgaggaagaagatttggatgaca

SEQ ID NO: 368208 - DNA, 89 bp, Homo sapiens
aaagataattcgcagtgatgtgaaactggcctcccaagccctgataattccaaagcccaagaggagaaatggggtgaacttctccctag

SEQ ID NO: 368209 - DNA, 95 bp, Homo sapiens
gctccgtggccttagctgtgctcgcgctactctctctttctggcctggaggctatccagcgccagcggagcctgcaccaccgtggagacaacctg

SEQ ID NO: 368210 - DNA, 87 bp, Homo sapiens
gtactagtcaagacaagaaaatcaacaggctttcagccttgaggcaacattggatattattgagatttggagcaagaggtggtggtg

SEQ ID NO: 368211 - DNA, 96 bp, Homo sapiens
gggccgcacccgccggccccatgaggagggacgtgaacggagtgaccaagagcaggtttgaggatgtacagttacccagcacgtgtacctcctcct

SEQ ID NO: 368212 - DNA, 75 bp, Homo sapiens
atgaccagcttagcttctgtcctaaagtgggcatccccaccatcagatggtgcggggcagagggggactacaacg

SEQ ID NO: 368213 - DNA, 49 bp, Homo sapiens
cttcccagtagctggaactacaggctctgtgtggctgcacagtgaacgt

SEQ ID NO: 368214 - DNA, 87 bp, Homo sapiens
cgttggccttcgtacccgtcttgattgagtggccacagatgtctttaattccaaaaacctggccgttcaggcacaaaagaagatctt

SEQ ID NO: 368215 - DNA, 80 bp, Homo sapiens
gaggggctgcggccggagcgggcggctgagacaaaggcgacgcttccccgggcgctgcctggacaggcctgcctgcgtgc

SEQ ID NO: 368216 - DNA, 75 bp, Homo sapiens
aaaggaagtaatccctagtgtcagcagattcagcggtactggtgtataatagaaaaagcttgtggtgaagggggg

SEQ ID NO: 368217 - DNA, 100 bp, Homo sapiens
cacttgcctcgccgaccgccatttcacatccagcagaggaggcgggggcagccgctgagacggtttttcacaagggttacgactcactgattaaaaagag

SEQ ID NO: 368218 - DNA, 83 bp, Homo sapiens
cgcacctcgtcaccaaggccaagtactggtgctgtaagtgctcgcaacattatgctgttgaaaaagaaacaagcccgctgtca

SEQ ID NO: 368219 - DNA, 96 bp, Homo sapiens
ctcggtatgtcctcagtcttctgctgcatgacagctatgactacgacctgcaggaacaggagctcaacaggacctgtcgggccatgcagcagcgca

SEQ ID NO: 368220 - DNA, 75 bp, Homo sapiens
acccacagcggggcggcggcggcggcggctgcggcccaatatagtttcttcactagttgaagaaggagaaaaaca

SEQ ID NO: 368221 - DNA, 98 bp, Homo sapiens
gcaagatagaatatgatgatttcgtagagtgtttgcttcggcagaaaacggttgattcttcaccacactgaaaccattaggaaaaatccttgtggtta

SEQ ID NO: 368222 - DNA, 98 bp, Homo sapiens
cctcacgcaaggcgaagaccagtactatctgcgggtcaccacgcctatatatgcaaacagatttgcagtaccaacctatgcagccaagcaacctcagc

SEQ ID NO: 368223 - DNA, 98 bp, Homo sapiens
acagtcggccgcagaccgcgctgggttgccgctgccgctgccgccatcgtgccagcccctcggtatcaccttttgccatgatagcatttctttcattg

SEQ ID NO: 368224 - DNA, 98 bp, Homo sapiens
ccatctggctggcagagcaacgggtgcccctgagtgtgcaactgaagcctgaggtctccccaacgcaggacatcagtttgaagaaaacaggtctgaaa

SEQ ID NO: 368225 - DNA, 100 bp, Homo sapiens
accaaatattatggatcctatctgaaggtgaaaggtgtagcagtcactcggcctacacccacagcatcgaccttgtgaacccagcgacctgactgccttg

SEQ ID NO: 368226 - DNA, 100 bp, Homo sapiens
caagcagatgacttcctccaggactatactttattgatcaacatccttcataggtgcccctgggcgctgggattgctctagcctgtaagtataatggaaa

SEQ ID NO: 368227 - DNA, 125 bp, Homo sapiens
ctgccagggacagaggccagcgcgctgcaacacaagatcaagaactccatctggtgctggagaatctggtaaaagcaccattgtgaagcagatgaggatcctgcatgttaatgggtttaatggag

SEQ ID NO: 368228 - DNA, 100 bp, Homo sapiens
gaagagggctttagcaacctagaaggtacagtgaaggtgaaattcgatttaatttaatggccattgtgtctgacagaaaaatgatatatgagcagaagat

SEQ ID NO: 368229 - DNA, 89 bp, Homo sapiens
cagacgccggccatgtgtgccacctgtgccatccaaactgcacctacggcaaagaacagtctgaacttgatcaagatttggatgatgtt

SEQ ID NO: 368230 - DNA, 82 bp, Homo sapiens
cggggagccgagctggagctgccgcggcgcagccaggctcccctggctccagccctaaggtgctctcccagccgtccgacct

SEQ ID NO: 368231 - DNA, 78 bp, Homo sapiens
gggaaaaaagcagaggccagggcgccgatgagttttgatcatcctgagaaaaatgggccttggcctgcagacccaata

SEQ ID NO: 368232 - DNA, 75 bp, Homo sapiens
ggttggtgccattcgctacaaaggtactaggttttgacaagcttgcatcatgcgtgagtataagctagtcgttct

SEQ ID NO: 368233 - DNA, 96 bp, Homo sapiens
aagacctcctcctccacaggggagacagaggaatgtcgttgtctgctgggtcttcccctcttcattcccccaagattactccacatacttctcctg

SEQ ID NO: 368234 - DNA, 74 bp, Homo sapiens
tttgccctcaaaagaaatggcaggtaaggtactcaactgtgtggggtactacataaatcctgaaagactacaat

SEQ ID NO: 368235 - DNA, 90 bp, Homo sapiens
ggggaccttaacaatccacctaagaaattcagagctgcttttctaacccaaactgtatgtcttgatgacactacagtaaagtttgaaata

SEQ ID NO: 368236 - DNA, 100 bp, Homo sapiens
atctcagcaacccctgtgcttctccccaggtccagccaatgcattcagaagccaaaatggttgtttacattcagagctctatcaataagaggaatacata

SEQ ID NO: 368237 - DNA, 76 bp, Homo sapiens
taagagcaaagaatactattgttgccacaggcaattctgacgacaatatgttgaaaaacattgaactgtttgataa

SEQ ID NO: 368238 - DNA, 98 bp, Homo sapiens
aatgaacaggagtcaatggcaaggctaaagaaattaatgacaataatggatagtatgaatgatcaagatgagacaccaattattgcggtgatggtggc

SEQ ID NO: 368239 - DNA, 96 bp, Homo sapiens
agtgttcagagggatttcatggaccccactgtcaataacatttctgatgaagaattgaaaagaagagtagctgaggagctggcattggagcaagcc

SEQ ID NO: 368240 - DNA, 90 bp, Homo sapiens
taccggacccgcaagcatgcccaccactgccacaaacgccgcaccaggtcttgtagcagcgcctcctcgctgcggttggatttctcacga

SEQ ID NO: 368241 - DNA, 74 bp, Homo sapiens
acactgcctcaacacacttttctccaggttatggctgcagcttcgattgccaatattgtaaaaagttctcttgg

SEQ ID NO: 368242 - DNA, 100 bp, Homo sapiens
ctgcccataagatcagcaaacattccagtggaacatgatctggatcagattgactacatagacagctgcaccgcagaggaagaggaggccgaggtgagac

SEQ ID NO: 368243 - DNA, 74 bp, Homo sapiens
tgtggatgtcacagccaaaacagcaggaaagtccaatccaaccttttatctccagaagggctttcaaacatatg

SEQ ID NO: 368244 - DNA, 75 bp, Homo sapiens
gggagaggatatgtagcgaggaggaacgcgctaaggcaaagcacctgacggagtttcgctcttgttacccaggct

SEQ ID NO: 368245 - DNA, 73 bp, Homo sapiens
gactagagggcgggaaagatttgagctacgcctgcgcagaggttatcaatactctggctgaccatcatcatcg

SEQ ID NO: 368246 - DNA, 100 bp, Homo sapiens
gagatttggggacggcacccgatgaggccgtgagggccccactggactgggcgctgccgctttctgaggtgaggaattttaaattggaacaagagcaaga

SEQ ID NO: 368247 - DNA, 99 bp, Homo sapiens
accgccgttcccgccccgctcttccctgggtggactggaggaggccgcgccgatgaacctgaccgaggatgtacagttacccagcacgtgtacctcctc

SEQ ID NO: 368248 - DNA, 82 bp, Homo sapiens
agagtggaggggaagagacaatggaatttaaggcttgatgtattgaagcccctgggtgataatttgatggaggaaaacataa

SEQ ID NO: 368249 - DNA, 71 bp, Homo sapiens
tgaagaatagtactttatacatctggatctgcacatcaggcaaaggtctcttgcaacgtgtgagctgcctc

SEQ ID NO: 368250 - DNA, 90 bp, Homo sapiens
cttcacccatctgaagggaggaaatagtggcaggtgacagtctgcatgtgcagttttcaggtgtcctctccctccccgcatacttcagcc

SEQ ID NO: 368251 - DNA, 98 bp, Homo sapiens
catcagcttgtaggagacagaggggatgtggagacgctggtagcggggccaggaaggctccggacggagcaggttttctggaccacagacacactgcc

SEQ ID NO: 368252 - DNA, 71 bp, Homo sapiens
aacaatgagtcatctgatagctcatcaattggttgtgatcgtagccaaaaccttgtggacatttgtagaga

SEQ ID NO: 368253 - DNA, 75 bp, Homo sapiens
cctcgcccccatgctggaggtggctctcaccctgtcacactcgtcctacagagcaacccagtgttttgcctttgt

SEQ ID NO: 368254 - DNA, 98 bp, Homo sapiens
ggggccgctggattctgaggaccagcagatggccagtcacgagaacccaggccacccagaggagaaggccaccccgcctggaggcacaggccatgagg

SEQ ID NO: 368255 - DNA, 75 bp, Homo sapiens
ttgcccctcggccgggcggacggtgttacacataatattgcattacttcgagaggtgataatcaactcacgcttt

SEQ ID NO: 368256 - DNA, 100 bp, Homo sapiens
ctgggtcgtcacggaggacgggaaaatccagcagcagggctacagaactggctacccttatcgataccctgctctgagagagaagtctaaaaaatacagc

SEQ ID NO: 368257 - DNA, 87 bp, Homo sapiens
agaaaatgaagagcatggggccccagaactgtggtgccatccagcttgccgggccttgtctctgaaggagtctgagaagatggcgct

SEQ ID NO: 368258 - DNA, 115 bp, Homo sapiens
attctacttattcatcagtttgttgtgcttgtcaagatcagggttttgacccaccacatcagagtgacacaagaaccatctacgtagccaacaggtttcctcagaatggccttta

SEQ ID NO: 368259 - DNA, 100 bp, Homo sapiens
gggacccggctaccctggacagcgcatcgccgcccgcccgggtcgccgcgccacagccgctgcggatcatgctcctgagaaccatgtctatgcccaaagg

SEQ ID NO: 368260 - DNA, 98 bp, Homo sapiens
gctcatgctggaccagcagtatgacaccttccacaatggcagctgggtccacctcaccatcaacgattttacctggagtgaaagtggttattgttaat

SEQ ID NO: 368261 - DNA, 100 bp, Homo sapiens
ctcgcactgtgacatgtctgatcccttgctcccatccctgcagcatgaacaaggttgttggaagaggagcctttggagttgtttgcaaagctaagtggag

SEQ ID NO: 368262 - DNA, 101 bp, Homo sapiens
aaacagattcagtggcctgcattgagaagttgtcacattcaaccatttcctggaagcggcagctgagaaggaggttcaagggaaagcccggctccaggact

SEQ ID NO: 368263 - DNA, 150 bp, Homo sapiens
gggaagcgctccgggcctggaatccctacgcgtccctttgggtttagcacgatgagctcaatcggcactgggagcaccgggggtggacgcggcgctttgcaaaaccaaaaagacacagtgctgccgcgacgcgctattgagagggaggag

SEQ ID NO: 368264 - DNA, 75 bp, Homo sapiens
gatatgctaagaaagaatcttgtcactttagccactgctactacagaactacatcaagatcgttcttctccccca

SEQ ID NO: 368265 - DNA, 100 bp, Homo sapiens
cgtggtgaaggtccggggcttgccctggtcttgctcggccgatgaagtgcagaggtttttttctgggtgtgggccgaagatatgctcatgtggtgttgag

SEQ ID NO: 368266 - DNA, 98 bp, Homo sapiens
ttcagccagcacactcctcgcgagcaagaacttacgatttccaacggccccaaaaaccactcggtcaatgaagaagagcaggaagaacaaggtgaagg

SEQ ID NO: 368267 - DNA, 75 bp, Homo sapiens
ccgcggcgtggacctcgaccagctgctggacatgtcctaatcatgctcagtggtgccggtgccctcacccctcag

SEQ ID NO: 368268 - DNA, 100 bp, Homo sapiens
ctgtatctaaaatagaaatacagaaggagagctgacaatttccatcattctctagtaagtaaatgccagtccctaggaagagagaaccaaaatgtctacc

SEQ ID NO: 368269 - DNA, 100 bp, Homo sapiens
caacctgacaattctgtcgtgtcccgcggacaaacataaattgcagagattcctgactgctgacatggccctggtggcgacagtctatgcgccaatcact

SEQ ID NO: 368270 - DNA, 80 bp, Homo sapiens
gccagctctgtccgctgcccacagcctagcagtcgggaccgtactgaggttttaaaatcaaagatgggaaaatcggagaa

SEQ ID NO: 368271 - DNA, 75 bp, Homo sapiens
cagcaaaactatgggcagaaaagaatctgtcatttgattgcccgcctcagaacgatggatctgcatctcttcgac

SEQ ID NO: 368272 - DNA, 90 bp, Homo sapiens
cggtgctgcagacggcgagacctcctgcacaggactgagcacggaaggcatctaccgggtcagcgggaacaagtctgagatggagagtct

SEQ ID NO: 368273 - DNA, 109 bp, Homo sapiens
aaacctgtgataacctgtctcaaaaccctcctcatcatctactccttcgtcttctgggaggagatgaccgccgggttctgctatggcacatggaacaagccatccactc

SEQ ID NO: 368274 - DNA, 90 bp, Homo sapiens
tcctttatatagaagggagagtagcagccatggcaatgacaggctcaacaccttgctcatccatgagtaaccacacaaaggaaagggtga

SEQ ID NO: 368275 - DNA, 100 bp, Homo sapiens
ggggagcagaacttcagtgcagaggagttctctgacatctctggctgttttggagtcagcggaagatcaccaaggccagggagtggttccaccgcactgt

SEQ ID NO: 368276 - DNA, 100 bp, Homo sapiens
ggagcaaataaaagagccctgcaatttgaagatacatgagacagcagccaaacccccagggatccagaaggcttacgagtattttattatcttgtccagg

SEQ ID NO: 368277 - DNA, 98 bp, Homo sapiens
gcctttaccaacgccatcaccgacctcatcagtgagctgtccctgctggaggagcgcttccggagagaactcgatgccaccgcaacggtattggcgaa

SEQ ID NO: 368278 - DNA, 82 bp, Homo sapiens
aaaatatcaggctgccaaatgcaggcactcaggtatcagaacaaggtttaatagaaatccttaaaaaagtaagccaacaaac

SEQ ID NO: 368279 - DNA, 100 bp, Homo sapiens
aagatgccaggaccacctggaagcctagaaatgggctcaggaggagtgaaagcctgtcagaaaaacaagtgaaggaagcaaaatctaaatgcaaaagcat

SEQ ID NO: 368280 - DNA, 88 bp, Homo sapiens
gaaattcagatcgatttgtctcaatgaaggttgatttcatcagactaaaaagttacaggggagaagttatagcactggataaaatctt

SEQ ID NO: 368281 - DNA, 101 bp, Homo sapiens
cccctgtgcgccaccattgcagccaaagtgtttacgaaaatggggttacagaagatgtgaagatatttgttggattaaaaccaataaaaacaatcctggga

SEQ ID NO: 368282 - DNA, 82 bp, Homo sapiens
agtatgtcctggccatcatgaacattgatgccgaggaatgtgacagggctgggagtgtggccacctgccaggccgtcatgcg

SEQ ID NO: 368283 - DNA, 75 bp, Homo sapiens
cgtcctgaacctgttatcacctggagacaccttacaccaactgatgttccatttaagcagacctcttccatagct

SEQ ID NO: 368284 - DNA, 94 bp, Homo sapiens
gtgtggtcgcgtctcggaaaccggtagcgcttgcagcatgccccataggctccttcaatttccgtgatcctcggagtccccaggagaccaggtg

SEQ ID NO: 368285 - DNA, 109 bp, Homo sapiens
gaagaatttattgcttttgagcatcctgaagaagttgattatatgacgccatccagtccaatggatcagatgggcaagatgagacctcagccatatggcgggactaacc

SEQ ID NO: 368286 - DNA, 100 bp, Homo sapiens
aaatgacaacttgaagttttcccaggaatatgaggtaggataattgcggactgaaccctcgggctgcggtcatatatgagaacttgctccgcgcggtccc

SEQ ID NO: 368287 - DNA, 48 bp, Homo sapiens
cctgcagcctcctggcaccaaagatggaggagatgtataagaaagctc

SEQ ID NO: 368288 - DNA, 75 bp, Homo sapiens
ttttccgcccgcttcgatcgcctcgcgccggctgctctttccgggcgaaagggcgtgtggttgcgcctgaggaag

SEQ ID NO: 368289 - DNA, 134 bp, Homo sapiens
tatgaagatctgcgggatggccataacctgatctctctgttggaggtcctctcaggcatcaaactggattccagacagcattggaaaagacatagaaaaggcttgccaatctatttatcctctccatgatgtct

SEQ ID NO: 368290 - DNA, 74 bp, Homo sapiens
gtgggagacaaagaagagcctgaaagagccaaatcttaccttctggaccatgagtaccaagttcgatccatagc

SEQ ID NO: 368291 - DNA, 98 bp, Homo sapiens
gaagaaaccgtgctcagaaactagccagattgaagctgcagatctgggacacggccggccaggagcggttccgcaccatcacccagagctactaccgc

SEQ ID NO: 368292 - DNA, 90 bp, Homo sapiens
caggtggggagctggttatccaacagaagcttctggtgcccaaagaatcttatgtgtgggctcgggatgagtttgaaggcctcttcaagc

SEQ ID NO: 368293 - DNA, 76 bp, Homo sapiens
gccagggtccctgaagagggaagacacgcggaaacagaatgctgaccccctgaaggtgtacccgccactgaagggg

SEQ ID NO: 368294 - DNA, 83 bp, Homo sapiens
cgagtccggaccggagactttggggcctaactagatataacacgtgggaaccggaggagaacatcctggaccccaggctgctg

SEQ ID NO: 368295 - DNA, 99 bp, Homo sapiens
tatgaacccagaggtcgtggaggtggccgtggaggcagaggtggcatgggcttcgagagcatgcagaggctctgcgacaagtacaaccgtgccatcgac

SEQ ID NO: 368296 - DNA, 75 bp, Homo sapiens
ccgagaaggagggaggggaaacacaaagccggctacgcgctgcgagctgcagaaccttggcctgaaaatgctaca

SEQ ID NO: 368297 - DNA, 121 bp, Homo sapiens
cctccgtcgctgtcgctgagagcctcacgagtcgaggtcctgcaggtggagctccggcagccgccctggcctttgtggaggcccagaataagattactgtgccatttcttgagcagtgtcc

SEQ ID NO: 368298 - DNA, 98 bp, Homo sapiens
ggcgtcccgcggccggcgtccggagcatggcggacccccagagctggtccaggtgcaggtacagcagtctccgcaacaggtctcggctcagctctccc

SEQ ID NO: 368299 - DNA, 75 bp, Homo sapiens
ttgaacagactagaaattgcaccacagatatatgggttgtatctggaatcccggcgcctagaacgtgtttttcgg

SEQ ID NO: 368300 - DNA, 73 bp, Homo sapiens
gatggtgccgtcgctcatcaagcagcaggtccttaaggctgctgtccccaaggcccagcctcctcaccccgac

SEQ ID NO: 368301 - DNA, 75 bp, Homo sapiens
tcttgctctcctttctgtaaacacagagccccagtttgagggacagcgggatatccaccatgctgctgtgagact

SEQ ID NO: 368302 - DNA, 75 bp, Homo sapiens
ctcgctgtgacagagacaacaccgagtatgagaaagaaaattcctgttccaagagaaaataaggcaacatcaatg

SEQ ID NO: 368303 - DNA, 96 bp, Homo sapiens
aaaactcagaaaatacgtggttggagagctcatctggaattttgccgatttcatgactaaccagtgccgttgatgctcactgccatcagctgcatc

SEQ ID NO: 368304 - DNA, 83 bp, Homo sapiens
atgatccttttgctcctggtggaacagttgttgcagcaagcgattcaggacttgcaattgtgaccaaatatattacaaagggc

SEQ ID NO: 368305 - DNA, 53 bp, Homo sapiens
cggagcgtcccttccatcaggagaggacatgctgggcctgcgccccccactgc

SEQ ID NO: 368306 - DNA, 96 bp, Homo sapiens
ctcagacccgcagtgaggtctgacgtcatttcctgccggacaatgatgttaattatcgggctgaatatgctatttggtcctaagaaaaaccttgac

SEQ ID NO: 368307 - DNA, 49 bp, Homo sapiens
gctcaatatgttggagcagcaataccaaaagttttggaaggtctccatc

SEQ ID NO: 368308 - DNA, 100 bp, Homo sapiens
ctggctgacattattgcaacagggttcttttgaagtaaccagtgatcttttttgcttaccctcatcaacagaatggatgaagatagatttgactgtgtgc

SEQ ID NO: 368309 - DNA, 95 bp, Homo sapiens
tggagatcagcagcagcttccccacccaggacaaggcctaggtgaatatgtttacaaaccaaggaacagtgatccactttaacaaccctaaagtt

SEQ ID NO: 368310 - DNA, 60 bp, Homo sapiens
actgcctggccgaatcagccttttcacgctcaagctcagagtcaagatctccactgaagt

SEQ ID NO: 368311 - DNA, 100 bp, Homo sapiens
ttgccaaattggcattgaattttgctactcagataaaagtattgtgtatggatgcaaagatcaattttgactctaattcagcctatcgccaaaagaaaat

SEQ ID NO: 368312 - DNA, 88 bp, Homo sapiens
agatctcccaggtggcagctgcctccccaagacagacgaatctagaacatgatgtctatgaaagacttactaacctgcaggaagggat

SEQ ID NO: 368313 - DNA, 83 bp, Homo sapiens
tggctttggtggcatctgcctaacgttcacttcactcacgacaatgcagatcttcgtgaagactctgactggtaagaccatca

SEQ ID NO: 368314 - DNA, 82 bp, Homo sapiens
ttctaccggaggcgggacatctccagcaccctcatcgccctggccgacaagcacgcaagggcactatggcagacaaagttag

SEQ ID NO: 368315 - DNA, 50 bp, Homo sapiens
caaaagcacaagctgaaatgcagtccagaacctgctaaggctgcctcaga

SEQ ID NO: 368316 - DNA, 80 bp, Homo sapiens
atggtcacggagaaggcagcctacatagtgtactaatggtcacttgatgtgcgctggctgttttatccacctactagcag

SEQ ID NO: 368317 - DNA, 74 bp, Homo sapiens
agggaaccctggtcaccgtctcctcagagccccccaagatgaacccagtggtggagccactgtcctggatgctg

SEQ ID NO: 368318 - DNA, 82 bp, Homo sapiens
cgaggagaacgtcccgctggatctgacccgagatcagcttgaacgggtctttttacgacttggccatgctgaaacagatgaa

SEQ ID NO: 368319 - DNA, 82 bp, Homo sapiens
gtttcgggatctcggtgctgcagacggcgagacctcctgcacaggctgcctgctgtttcccggggagatcatgaaacgaggt

SEQ ID NO: 368320 - DNA, 100 bp, Homo sapiens
taccctttcaaatctccatctatagatctaattatcatggacctgcgacagtttcttatgtgcctgtccctgtgcacagcctttgccttgagcaaaccca

SEQ ID NO: 368321 - DNA, 75 bp, Homo sapiens
agaggaggaattaaattttaatgaagatattctgtgtccacatgttccagtgtctcgccccatcctcaccctcag

SEQ ID NO: 368322 - DNA, 100 bp, Homo sapiens
ccgggagtacattgagataatcaccagcagcatcaagaaaatcgcagactttctcaactcgttcgattgatatcagtaaatgccattatttagtggattt

SEQ ID NO: 368323 - DNA, 100 bp, Homo sapiens
cttttcttgtccagtcaaacttcatagagacccgagagggactcacttatgggaattcatccgcgacatcctcttgaacccagacaagaacccaggatta

SEQ ID NO: 368324 - DNA, 75 bp, Homo sapiens
caaaaaaactccagctgtgaaagcaacataaatgggaacagagttcagaggcagcagaaactggagttagtgaaa

SEQ ID NO: 368325 - DNA, 82 bp, Homo sapiens
gttctggagagcggggtgtgggctcaccatggatgatgatatcgccgcgctcgtcgtcgacaacggctccggcatgtgcaag

SEQ ID NO: 368326 - DNA, 100 bp, Homo sapiens
agaagaccgcagtgggataaatctcaaagatctcgtacaagatccttctttactttgaataatgagatgagtacagatgaagacaatgaatatgcagaag

SEQ ID NO: 368327 - DNA, 98 bp, Homo sapiens
cggcatttaaaaattcacacgggacaggacccagggcgcttgtacgcggagccaggctgctctccaggcattgtgtaagcctcttgtgttgtgctctc

SEQ ID NO: 368328 - DNA, 80 bp, Homo sapiens
ggaactcaaagtggatgaggaaagggacggcaaaacagaacagaaaggcggagataaaaagaggggtgttaaaagaccac

SEQ ID NO: 368329 - DNA, 75 bp, Homo sapiens
gcgcttggaccccggcttctgggacgcgtcaggttaaagctgaagctcaacaaagatatagtgatctctgtgggc

SEQ ID NO: 368330 - DNA, 95 bp, Homo sapiens
ctggtctctggctccctcctcccagggccaggcgccgctcagaacgatatccttggaacagaagatcttattgtggaagtgacttccaatgatgc

SEQ ID NO: 368331 - DNA, 50 bp, Homo sapiens
atcaaaatatgcagtctcttttaccagcaacagggtcttgctgtgtcgcc

SEQ ID NO: 368332 - DNA, 80 bp, Homo sapiens
caggaaagtgtaacatcagttacagaatgggaaagggctccttcaagtatgcctgggtcttggataaactgaaagctgag

SEQ ID NO: 368333 - DNA, 51 bp, Homo sapiens
gggggagcgactcatggagctgccgtaaggctaaggcagctggataagcac

SEQ ID NO: 368334 - DNA, 90 bp, Homo sapiens
cacaattataaaatgtcagcttttaaggcctttctgagaaaagtctacagcattctttctctgcaggttctcttaactacagtgacttca

SEQ ID NO: 368335 - DNA, 78 bp, Homo sapiens
ggctggaacttgccctgtctcctcgcagatgagatgggcttaggtcacgagcaaggatttggagccccttgtttaaaa

SEQ ID NO: 368336 - DNA, 82 bp, Homo sapiens
ccgcagctgcagccgcctgaccacggcgactggacttacgaggagcagtttaagcagcagcccctgtcaaagggaacaggaa

SEQ ID NO: 368337 - DNA, 82 bp, Homo sapiens
ctggttcagctcatacaacagcttcttagataccatgatatgcctgacgttatagatttcctagtcttgagacaacaatttg

SEQ ID NO: 368338 - DNA, 100 bp, Homo sapiens
caaggataatcactaaattctgccgaaaggactgaggaacggtgcctggaaaagatattttatgacctggtcagacagataaataggaaaacaccagtgg

SEQ ID NO: 368339 - DNA, 100 bp, Homo sapiens
gggcgtgaacgctctggggctcagccaggcctgcgcgggcccgaggccggaggaacccggactccggcgtagcgatgtaggtgcaaaaaactacagacat

SEQ ID NO: 368340 - DNA, 100 bp, Homo sapiens
atgtaatgcggagcagtctgcagaaactcttggaaggtgtcttcagtgccctgggtttgcctgtgacccaatgcccactgggactgaatgccaaaggact

SEQ ID NO: 368341 - DNA, 100 bp, Homo sapiens
ctggtgcgtaataagaaggtgggcgttatcttccgactgatccagctggtggtcctggtctacgtcatcgggaaccctaaggactctgcaatatgaataa

SEQ ID NO: 368342 - DNA, 80 bp, Homo sapiens
cgccagtgtcagcgacagcagcggcttcagcgactcggagacagatgccgacctggccgaggggccccctccctggacac

SEQ ID NO: 368343 - DNA, 82 bp, Homo sapiens
tttgctcaaggatcccagttttctctggatgacgtggtgtcgtgaaaactacccctaaaagccaaaatgggaaaggaaaaga

SEQ ID NO: 368344 - DNA, 101 bp, Homo sapiens
agcaaatgagatgaaccatcttcctgcacacagccacgatttgcaaagacggttgatgatgaagcgccggccgtgtaaatgaagatcgggtgaggagcagg

SEQ ID NO: 368345 - DNA, 90 bp, Homo sapiens
tgtccctccgggtacacgatgaattccagcaagttctcccatgggcaggtggtctctctggatgagctgcgccccttccaggacccagac

SEQ ID NO: 368346 - DNA, 100 bp, Homo sapiens
gaatttatacaaggagaagcactggatccaaagcatgtctgcaacccagccattttcagctttaatgaagcaccagttgagattcccagtccttctgaaa

SEQ ID NO: 368347 - DNA, 109 bp, Homo sapiens
aattcagaaggagctagctgaaataacccttgatcctcctcctaattgcagtgagtccatgacagaagaaaccctgaaaagggcaaaggagattgggttctcagataag

SEQ ID NO: 368348 - DNA, 99 bp, Homo sapiens
aaacacaacttcagacttgcagaaaaccagtgaaggggctatcagctgtactctgaactgtagttgccaaagtttcaaacccgggaaaataaaccaccg

SEQ ID NO: 368349 - DNA, 87 bp, Homo sapiens
gagacagtggtcacaacccaggcagaggttttccctcctcctgttgctatgttgcagattgattataccggaacagagccttccagt

SEQ ID NO: 368350 - DNA, 101 bp, Homo sapiens
gtcgtgatcgtgactattcagatcatccaagtggaggttcctacagagattcatatgagagttatgaactgataaatttcaaacggaagagagtggcagca

SEQ ID NO: 368351 - DNA, 50 bp, Homo sapiens
tgacaaggatgccggcctggcccaggtccgggcccaccagctggtcttgc

SEQ ID NO: 368352 - DNA, 86 bp, Homo sapiens
gcctggccttattttatttatggaccatcccaaccctccagtcgtccactccgctttgcttacaagccatctatgatgcatttgac

SEQ ID NO: 368353 - DNA, 75 bp, Homo sapiens
ctttagtgcacccgctgccagaagggctgagggcttctgcagatgctaagaagcttaatcctgattatcgagatg

SEQ ID NO: 368354 - DNA, 98 bp, Homo sapiens
ttggacggtttctcattgatttcaaatcgaagcaaacgcttggagaaggtccatgtggttattgggcctaaatcgtgtgacttggattctctcatttc

SEQ ID NO: 368355 - DNA, 90 bp, Homo sapiens
ttcccgagaccgtcctggcgcgatgcgtcaagtacactgaaattcatcctgagatgaggaaatttggtgagcggcctccacctaaacgac

SEQ ID NO: 368356 - DNA, 100 bp, Homo sapiens
agcttctgctgtccttctttgtggagagcaaggtacagagcatgaagcagacgaacagcagcctgcgccaagccctggagggcggtattgatccactacg

SEQ ID NO: 368357 - DNA, 75 bp, Homo sapiens
cgagaagctgatccgcgagaaagacgaagagggcgggatgtacatcttccagctgtttgactactatgcttccag

SEQ ID NO: 368358 - DNA, 103 bp, Homo sapiens
caacgccgcgcggttgtaactcggccctagttacctggccagggtacgcgacaattggcggaggcatagagaaggagacgtgccagaagatggaagaagacgg

SEQ ID NO: 368359 - DNA, 99 bp, Homo sapiens
gatgaggagatagtggaatgctggcacaaaggacaaagtaaaaggccaagctatgatagcaactggtggagtgataactggcctggccgccttgaaaag

SEQ ID NO: 368360 - DNA, 74 bp, Homo sapiens
ccggcgcaggagcggccgcgtttcggcctcagaagtggccagcatcgaaatgttcagccttttagtgatgaaga

SEQ ID NO: 368361 - DNA, 49 bp, Homo sapiens
cggctcagccccatcatgctgggtactgcttctccgagatggccccagt

SEQ ID NO: 368362 - DNA, 82 bp, Homo sapiens
tttgaagtcaccactgaggaggaattcaccctgttcgtctatgtagacccaaatgatttgtacattgtagaacccctcaagt

SEQ ID NO: 368363 - DNA, 100 bp, Homo sapiens
gccgctcacggtcccgccgccgctgctgctgctgctgtgctcaggcctggccggacaggtgaaggacttaactaagtacttggatcccagtgggctcggc

SEQ ID NO: 368364 - DNA, 95 bp, Homo sapiens
cgccagttctccggcgggaaggaaaaccgcgcagagaggactttctgcagggcgactgcaccaaagcgaaacagaagctgaactggaagccccgg

SEQ ID NO: 368365 - DNA, 101 bp, Homo sapiens
cgctactccggacgcaaagctgtcatcgtgaagaactttgataatggtgattctcgcctggactccagtgaattcctgaagtttgtggaacagaatgaaac

SEQ ID NO: 368366 - DNA, 138 bp, Homo sapiens
gagctaatgttccacgttcccaaggttgtgagtgcttatggccacattcctgcatcagctcagccatcgcggtatgtcgagagtaccaacgtggcaattgcaaccgaggagaaaatgattgtcggtttgctcatcctg

SEQ ID NO: 368367 - DNA, 83 bp, Homo sapiens
tccgctcccgccgagacatccgctccttgcccgagaacatccagtttgatgtttactacaagatttgatggtcctcgaagatt

SEQ ID NO: 368368 - DNA, 74 bp, Homo sapiens
agaaggaaggcatggaaagttccagccggttcgagagctagttgcagagtgggcaggatcttaagacccgatag

SEQ ID NO: 368369 - DNA, 100 bp, Homo sapiens
cccaggtgtaagcgcagaaagcaggcgaacccgcggcgcaataacggagctgtgcggtcttatgcattggaacttaatttgacagattcagaaaatgcca

SEQ ID NO: 368370 - DNA, 74 bp, Homo sapiens
gaatttcacccaggttctgacagctgaagctgagggtcagaatgatacaattgaggaacccaacaaggtccaga

SEQ ID NO: 368371 - DNA, 80 bp, Homo sapiens
gggacatcgtggagacggtgctcaacctggccgctttgtagttcagaatgtttctgcacagaaagatggagaaaaatcta

SEQ ID NO: 368372 - DNA, 82 bp, Homo sapiens
tcagcaagaacgggaacaaaactctgccttgtcctgccaagaagttactgatgatgaggtcttagatgcaagctgcttgttg

SEQ ID NO: 368373 - DNA, 100 bp, Homo sapiens
gaagaactcagagccgggaagcccccattcactagaagcactgagagatgcggccccctcgcagggtgccatcgcctgcaggattctttattcagctctg

SEQ ID NO: 368374 - DNA, 75 bp, Homo sapiens
gccaccaccaccaccaccaccacagagtctgtggaagaggtggttcgaggtgccgtgagcgatgtggagatgcag

SEQ ID NO: 368375 - DNA, 100 bp, Homo sapiens
gaagaaaatggggattaaaagtggatttacgttttggaacctcgtctttttattgacggtgtcttgtgtgaaagatgtctcagagcatgtcttcagtatc

SEQ ID NO: 368376 - DNA, 115 bp, Homo sapiens
acaatgactgctgtgggtgctgcggcaacgagggctgtgggaagcgatttgcggactttgtggttggcctctccatcctgctgcggggcacagtccacgagaagctcaagtgggc

SEQ ID NO: 368377 - DNA, 100 bp, Homo sapiens
tgcaccctgcagttccaggagctgctgcgcacgaccggcgcctcggacaccttcgagggttggggaagtcgagacaacatgagtgtgattttgatctgtt

SEQ ID NO: 368378 - DNA, 82 bp, Homo sapiens
gcgggggcggcgtgggcaagtcggcgctcaccatccagttcatccagatattgaaatggattccaggcgtgtgcctcgagac

SEQ ID NO: 368379 - DNA, 100 bp, Homo sapiens
ttatagaagtttcagttctgaagtttaagaggagtttcacttcatcccttttcattttgaaggaatgaatctgaagtctgctgcagtaaaacacagaagg

SEQ ID NO: 368380 - DNA, 90 bp, Homo sapiens
ggcctaggacgagggcggcggagaacgcggggagaagcccacccgtgaggagccagctgccgcgacgtgaggagctggtttcacctgagg

SEQ ID NO: 368381 - DNA, 90 bp, Homo sapiens
cgaggatggtgtctactggaagtactgtgagatacctgcttgccagagctcctgggtagaactgcacttcagcaataatgggaacggggg

SEQ ID NO: 368382 - DNA, 100 bp, Homo sapiens
gcggacttccagctgcacacacatgtactttgagaatcactacaagaaaaactccttgtggtgaaggttctaagacgtgggatcgtttccagatgagaat

SEQ ID NO: 368383 - DNA, 101 bp, Homo sapiens
cagagaatgagttaatctcctcagaaatcactaaatactactctgaggggcttagaaattaacaggtgtgcaaagatccaccttacaaagtagaagaatct

SEQ ID NO: 368384 - DNA, 73 bp, Homo sapiens
tacgttttgctggtgttgtccctcccgtggcaggaacaaccaggaagctatatgagaaaaagcttttgaaact

SEQ ID NO: 368385 - DNA, 100 bp, Homo sapiens
ctcaaccttgtgggatgtgaaaactctgttactgaaggtcctgatgaagttgtagggccagaaggaatggaaaaattttgtgaagacattggtgttgaac

SEQ ID NO: 368386 - DNA, 87 bp, Homo sapiens
tccacgtctggaataatgggtactctttcctcgtggaatttgaagattctacagataaatcaggttggacgtgataagtatgagcct

SEQ ID NO: 368387 - DNA, 75 bp, Homo sapiens
tggaggaggaggaggaggaggcttgggcttgcgccgttgaagatgaaggatttgggggcagagcacttggcaggt

SEQ ID NO: 368388 - DNA, 83 bp, Homo sapiens
tgataactgcaattgaaatgagcagtctttctgaggcctttttgcaaatgtgtaacttgcctatcaaagtagtttgtagggca

SEQ ID NO: 368389 - DNA, 101 bp, Homo sapiens
gagagggacctggtgaaccgactgaagctgattgggcagaaagtggcccatgctctggcagagggactcggagtaatcgcctgcattggggagaagctaga

SEQ ID NO: 368390 - DNA, 90 bp, Homo sapiens
aggagctgtacagagacgtgatgcggatgaactacgagctgttggcatccttgggcaagtatatcgcgtcaacacagcgacctgacggga

SEQ ID NO: 368391 - DNA, 51 bp, Homo sapiens
ccgtttcgtgagcagcgccaagttctcttgcaactagcaagtgaagccttg

SEQ ID NO: 368392 - DNA, 98 bp, Homo sapiens
gtctcaccacggctaatttgatggagaaggttcgaggcctacagaacctagcctatcagctggggctggatgagtgtaagaatgattgatgttggctg

SEQ ID NO: 368393 - DNA, 100 bp, Homo sapiens
ctttggttacctatgtacctgttaccactttcaaaaaagcctggctacagataagggaccaaaatgactgactcaaaatatttcaccacgaccaagaaag

SEQ ID NO: 368394 - DNA, 100 bp, Homo sapiens
gatcaacgaacctggacattgaggagctcaagtgtatagtctttgctatgacttctggccagatgtggaaccatatccgtggacctccatatgctcataa

SEQ ID NO: 368395 - DNA, 88 bp, Homo sapiens
aagttacagagatcaaacaattgtagatcccttcagttcaaaacataatgtgattggaggaggaagccaagaatctggtgagcgaagc

SEQ ID NO: 368396 - DNA, 99 bp, Homo sapiens
gcagtgccactggcctagctcgatattatccaggggggacacagcgattgccacgcgccattggaatgtccctggccaaggagctcatattctctgcgc

SEQ ID NO: 368397 - DNA, 50 bp, Homo sapiens
ctgaggacggcgtacggagtgtggaagtagacaatgtggcacaatgtcac

SEQ ID NO: 368398 - DNA, 88 bp, Homo sapiens
aacgtcttgcaacagtggccgcacgcataggttagagcagccagcgggtacagaatggattttggaagagggagtcaccactggacct

SEQ ID NO: 368399 - DNA, 100 bp, Homo sapiens
gactaggcggcggcggaagatggtgccgggggtcgctggctctgctgctgccgccggcgaaggaggaggcgttgccggcattgcagtgtcgagatggcta

SEQ ID NO: 368400 - DNA, 90 bp, Homo sapiens
tcagtagttaattctcagctggcaggttccctgagtgcagctggctcgataatgttaaaaagtgctctgggtgatcggattaaagaaaag

SEQ ID NO: 368401 - DNA, 73 bp, Homo sapiens
tgtgcttggctggaaaaccccaaaagtgtacataaggtggataattactgtaccttcctcatggaaaaagttt

SEQ ID NO: 368402 - DNA, 98 bp, Homo sapiens
cgggcggccccggagcgctggtgccggcagaggcggcgacggtggcgcccctcctcatcatggcactgggctccctctgctccccgtgggccgctccc

SEQ ID NO: 368403 - DNA, 100 bp, Homo sapiens
caacaatcaaaaagaaagctgctgttatcatcatggctgtagagatatggctcgtggacagcagaaaattcagtctcagcagaaaaatgccaaaaagcaa

SEQ ID NO: 368404 - DNA, 100 bp, Homo sapiens
gttttggccaaattgggcgagggcacaaaataaccacttaccccttctcaccgaggaagagcgggagaaagggtcaatgtgacggtggactacattagac

SEQ ID NO: 368405 - DNA, 100 bp, Homo sapiens
tgtgaaagagagcagctaagggtagtggctctttatgactacacagcgaatcgatcagatgaactaaccatccatcgcggagacattatccgagtgtttt

SEQ ID NO: 368406 - DNA, 100 bp, Homo sapiens
gactgccgaggaacgagagcgcgaagctaagctctactgagatgaagaaagaaaaagaatacctgctcagctccagagacacgtaaagggacagagattg

SEQ ID NO: 368407 - DNA, 97 bp, Homo sapiens
aatgatgtcatcatgcatgctctcactaagcagttggaggctgtgtctggtattgcacatctattacaaatttcctggttatgggaggattccagct

SEQ ID NO: 368408 - DNA, 75 bp, Homo sapiens
ctggagccacccgcgaaaattcggccagggttctcgctcttgacaccatgccacaaggagagtgatctcttcccc

SEQ ID NO: 368409 - DNA, 82 bp, Homo sapiens
cggatctcaccgccgctcaggaaactatgttccaacttcctgtcaacaatcttggcagtttaagaaaagcccggaaaactgt

SEQ ID NO: 368410 - DNA, 74 bp, Homo sapiens
tcgcagatcctgagacccggacagtggcagtgaaacagttccccaatgaagaagactcatttcataagtttgtg

SEQ ID NO: 368411 - DNA, 99 bp, Homo sapiens
ttcctctggaaggcaaagagccgtgagcatagccagcattctgaccaacacaatggaagaactggaagaagttcgggaactcagagtttgacccccccg

SEQ ID NO: 368412 - DNA, 100 bp, Homo sapiens
ttcggctacccagagaagttcagtgcccagctctactgagaagaatgctgttctggaggacacgtgccggcggcaggacttcaacccctgtgaatatgat

SEQ ID NO: 368413 - DNA, 50 bp, Homo sapiens
gtcatcgagtgtgacgtggtgaaagttcttggccaggctgactgagagat

SEQ ID NO: 368414 - DNA, 75 bp, Homo sapiens
tcaagaccaaggaaaagctggcacagaccgccacggggggggccctcagcctcttggccttgaacgggctgttca

SEQ ID NO: 368415 - DNA, 100 bp, Homo sapiens
gagatgaatcctgcggcagaagccgagttcaacatcctcctggccaccgactcctacaagaggccacaagaggaagctgaatgaagaggacgccgccagc

SEQ ID NO: 368416 - DNA, 88 bp, Homo sapiens
cttttatagatccaagcaccttggaacaacagtggtcctttggcgtgctcctctgggagctgatgacaagaggagccccaccttatcc

SEQ ID NO: 368417 - DNA, 90 bp, Homo sapiens
acctcatatctcagccatacaacaccatcaagagaaattggaggctagtgactgtgatcaccagcagaactcacctactctagaaaggcc

SEQ ID NO: 368418 - DNA, 50 bp, Homo sapiens
cacactgcaatgtttttgtggaacatgacatatggcatccaggagaaaga

SEQ ID NO: 368419 - DNA, 51 bp, Homo sapiens
cccggagcccccagcgcagcggccgcgtcgtggcattcctggtggctttcc

SEQ ID NO: 368420 - DNA, 90 bp, Homo sapiens
taccattggagtttggggactatcaccctctgaaacccataacttcctcccaaaccgaaggaccctgtatctgcagctgtgccagcacca

SEQ ID NO: 368421 - DNA, 51 bp, Homo sapiens
gaagtgcagaggtttttttctgtatgagcaagctgccgatgcagaactagc

SEQ ID NO: 368422 - DNA, 75 bp, Homo sapiens
agaagacagcagaggggttgccgaggcatggatgagttgatggaggtgtctttctcgcccctggcggccacaggc

SEQ ID NO: 368423 - DNA, 100 bp, Homo sapiens
cgtcacctgggcagcactgaagcccagagcgggagagactggctcaagaccatgggtgtcatggagaaactccagctgggcccagagattctgcagcggg

SEQ ID NO: 368424 - DNA, 98 bp, Homo sapiens
cgccatggagcccgactcggtgattgaggacaagaccatcgagctcatgcatttgacattgtgcagcaaagaaatggttatggagaagcccagtccgc

SEQ ID NO: 368425 - DNA, 82 bp, Homo sapiens
gtgcgtgggggaccggctgttggcggacttcccaagtaagaagcggaagaggagccgctggaaccaagacacaatggaacag

SEQ ID NO: 368426 - DNA, 50 bp, Homo sapiens
gcggagctcccccaagagccggaaagatctctgccatcccgagatcatca

SEQ ID NO: 368427 - DNA, 50 bp, Homo sapiens
gccttccggcagaagctggtcagtcaaattcctgtgcctcctgattgctg

SEQ ID NO: 368428 - DNA, 50 bp, Homo sapiens
aactctgagcaatgttgaggtgtttatgattgaagaggagctggctgccc

SEQ ID NO: 368429 - DNA, 83 bp, Homo sapiens
gaggaggcagccaagctcgtggcctgcctctgcgtgcgggacaccgtggtgtttaaggatggccagtactggatccgaggccg

SEQ ID NO: 368430 - DNA, 100 bp, Homo sapiens
agctcatattacagtgtgcacaggagactaagctggacttcagtgtagtcaggaattgctcctgcgttgctaagacaagcatcatatggcaccattaaaa

SEQ ID NO: 368431 - DNA, 100 bp, Homo sapiens
tatacattcggcgccagctgtgtgactgcctgtcccttgagtgagatcattggccgagacctgagtggcttccctgcacctcctggagaagagcctcctg

SEQ ID NO: 368432 - DNA, 75 bp, Homo sapiens
tcctgcataccctggaccagcagaaacctagagtgcttctgtacctaagaaggcaggtcttgaggatgccaaggc

SEQ ID NO: 368433 - DNA, 51 bp, Homo sapiens
ctggggcgcaccgccaagagctgggatacgtaggtaacctttccagagatg

SEQ ID NO: 368434 - DNA, 82 bp, Homo sapiens
tcaaattggaactttgtagaagaactgctgaaaaagtccatcagtgttcagccagaagatcagctgccatgttacttgactc

SEQ ID NO: 368435 - DNA, 100 bp, Homo sapiens
atcaagagttttcttactgtacctcaggtttctgcatttaatgccagttactcagattctggactctttgggatttatactatctcccaggccacagctg

SEQ ID NO: 368436 - DNA, 98 bp, Homo sapiens
catatttcctgtcaccaacaaagatttcagactggacgccgggcatggcagtgccacgggacattgcagccgcctacctgctccagggaagcttctat

SEQ ID NO: 368437 - DNA, 74 bp, Homo sapiens
ggctgctcagtcttttgaatgatttccactctggaaaacttcaagcatttgttttcaaaccagaagaactacga

SEQ ID NO: 368438 - DNA, 50 bp, Homo sapiens
ggtggagaagggatcagtgctacggttagtccgttcattgatgacaacac

SEQ ID NO: 368439 - DNA, 100 bp, Homo sapiens
tggcgggctccgtggaagcgtggccggcagcgtcccggacgaggagagatggagtttcgctcttgttgcccaggctggagtgcaatggcatgacctccgc

SEQ ID NO: 368440 - DNA, 96 bp, Homo sapiens
atctggtcagccacgttcccttgggggtggacagactggttatggctgtggcagtattcatggaaggcaggtgacagcagggacatgtctcgggag

SEQ ID NO: 368441 - DNA, 90 bp, Homo sapiens
gggcacggtagcaggcgccgccgtgctgctcaagaggagaagatgaggaaggaagaggaagaggccaagaagcgggcagaggatgatgcc

SEQ ID NO: 368442 - DNA, 100 bp, Homo sapiens
taagtcccggcagcgggaacacagagagcgaagccagaatgaccagtcaacaggggacataaaagtaattggtggagatgatctctcaactttaactgga

SEQ ID NO: 368443 - DNA, 97 bp, Homo sapiens
ctcggccctcgggagagcggcgggcatcaccgacctggctcttaccttggcacctatcactctcgagatgagagtacagacagtggactaagcatga

SEQ ID NO: 368444 - DNA, 75 bp, Homo sapiens
agagcacccaagatgaagatgctgttagcctttgcagtctcgacataagtacctgatggccaaaagaaaggaaga

SEQ ID NO: 368445 - DNA, 100 bp, Homo sapiens
caaatatgctgcaagatttggggaatctatagttaatcttggcgacattgacaatgatggctttgaaggtcctgttattgccttggagtttaatggggat

SEQ ID NO: 368446 - DNA, 50 bp, Homo sapiens
taaggattccaagtaactcttatttgagtggtggacatgacaacagagtc

SEQ ID NO: 368447 - DNA, 75 bp, Homo sapiens
ccgacatcctgcggacctactcgggcgccttcgtctgcctggagattatccttatgtgaagattcatctgatgca

SEQ ID NO: 368448 - DNA, 88 bp, Homo sapiens
aagactcccgaatacttcagaagtggggaaatggtatgacctggacgcgtgtgacattcaagaaaaatacccggatttatttcaagtg

SEQ ID NO: 368449 - DNA, 82 bp, Homo sapiens
taaagacaaaccatagagcagaatctcagctcattgtggacaatgctacaagctagaacaacagaggcagcagttgcttact

SEQ ID NO: 368450 - DNA, 90 bp, Homo sapiens
caccaaacccaggaggagactctccctggaaaacttcccttccctttcggtgttcaggcgcttcgtggaggttggccgggtggcctatgt

SEQ ID NO: 368451 - DNA, 100 bp, Homo sapiens
acgtgtttggagggaaatgggaatgtacacgataattaaagagtaaagttgtgctcaacgtctattatcctcccagtccacaacgctgaaccgtggctgg

SEQ ID NO: 368452 - DNA, 75 bp, Homo sapiens
ggatccaacccagttagttacttcctgtctagagttgtagcttccacctggtcccagtagggatggcacaatcag

SEQ ID NO: 368453 - DNA, 109 bp, Homo sapiens
cccggtcccctcccacctcgtctgggctcgcggcgtctccggggaaagccgtggccccgagggcggatccgaggtaagaatgattgatgttggctgatattggagtgct

SEQ ID NO: 368454 - DNA, 50 bp, Homo sapiens
tcagccctcagtggatttggttcatcagatggtgtatcaagagctggagc

SEQ ID NO: 368455 - DNA, 100 bp, Homo sapiens
ttggaaaatgtgataaaaacaaggtggaagattcttccaaggaaccagtgcgaagatctgctagccctacttttgaagaggaaacttttgaaggaatgaa

SEQ ID NO: 368456 - DNA, 100 bp, Homo sapiens
cgagagcgtgaccgagagcgcgaatatcgtcatcgttagaagaacctatgagaaccccaaagacattaaagattgctgaaatacaggcaagacggattgc

SEQ ID NO: 368457 - DNA, 76 bp, Homo sapiens
cgatgtcggggtggttgtgtacgttgcacccgcaaaggccatcatctctcagcaaggtgacatatttgtttttgac

SEQ ID NO: 368458 - DNA, 83 bp, Homo sapiens
ctcaaacaaaaaatcactgcattacatcagcaggaaattatcagttcattgcctagcatagtaaatgacaaatatggaaggaa

SEQ ID NO: 368459 - DNA, 92 bp, Homo sapiens
gcctggatcggctgccggtgcctgccagtgggccattgagacccagagcagcagttctgaagagatagtgcccagccctccctcgccacccc

SEQ ID NO: 368460 - DNA, 75 bp, Homo sapiens
ctttcgcccgcggctcctgagggatcggtctcagccgcgcgggctctgattgtactttctccacaagcttcagca

SEQ ID NO: 368461 - DNA, 132 bp, Homo sapiens
ggttcaactgcgcagaatctaccaacttcgccaccctgcggtggattgactacggcaaagtggccactcagacaatgcagatcttcgtgaagactctgactggtaagaccatcaccctcgaggttgagccca

SEQ ID NO: 368462 - DNA, 75 bp, Homo sapiens
ggaagaactcgtcatgctctttgtagcgtggtgcttctgttgctcacagaggcatcccaacacgctgtcttttcg

SEQ ID NO: 368463 - DNA, 90 bp, Homo sapiens
tgccgctgctggcggccctgcttcaggagttggtaatgcttctcttagaatataatgctgatactactattgttaatgggagtggacaga

SEQ ID NO: 368464 - DNA, 82 bp, Homo sapiens
tcctcaaagaggaacaaagtcatcaagctagtggacatcacggacatccagaagtgcagagcagagcgggcggaggaccccg

SEQ ID NO: 368465 - DNA, 50 bp, Homo sapiens
ccgaggctcgcgggcggcgggcccggatgcagacagacatgctgaactat

SEQ ID NO: 368466 - DNA, 100 bp, Homo sapiens
aaagagccctgcaatttgaagatacatgagacagcagccaaacccccaggtgactctcctattccatctgtttcttcgggatcatcttcacctctttcag

SEQ ID NO: 368467 - DNA, 100 bp, Homo sapiens
tccactcggccatggaacgcacgcccccacatctgctcaaggagatcattctggtggatgacaacagcagtaacggattactacagcatcccatttccca

SEQ ID NO: 368468 - DNA, 111 bp, Homo sapiens
ttctggccgccgatatcttcgccatcgccagcatcgccaacccggactggatcaacaccggggagtctgcggctgatgcttttttcaaagccgctataagccttgttccgg

SEQ ID NO: 368469 - DNA, 143 bp, Homo sapiens
gactttgtgtttccattgcttcccaatgaagaattgagagagaaatacaggcgctacctcttcagggactatgtggagggtgaaaaggctgatagcttttacatcatagagtctggcgaagtgagcatcttgattagaagcag

SEQ ID NO: 368470 - DNA, 97 bp, Homo sapiens
cttccccagcacaaactgacctgcttcagctcaggagcatctatcggctgcacgccaacatcaacacaggcgaagatggtctccaagcgcattgccc

SEQ ID NO: 368471 - DNA, 100 bp, Homo sapiens
agcgacgccacacaccacgtcctctgtcctgatacagtggcagataacccagcagccaactggcttcatgcgcgctccactcggaaaaagcggtgcccct

SEQ ID NO: 368472 - DNA, 51 bp, Homo sapiens
ggacctggccgagcaggaggcgccatcatgctaaaaagtttgcagagaccc

SEQ ID NO: 368473 - DNA, 82 bp, Homo sapiens
ccggaagtgagatgcaaggcggcgattttcccttctgtcaggccaaagatgaagaggaagcctttctggattggagtgatga

SEQ ID NO: 368474 - DNA, 100 bp, Homo sapiens
ccgggaccgccgccgccgccgccaccatgccattctaaatggcacaggctcacctaccaaatttaaaatgccgttcaacaatgccaagaaaatgacacac

SEQ ID NO: 368475 - DNA, 83 bp, Homo sapiens
cccaggtgtaagcgcagaaagcaggcgaacccgcggcgcaataacgggaaagcaggcaggatgggagagtcgccgatagaacc

SEQ ID NO: 368476 - DNA, 83 bp, Homo sapiens
ccagcacacgactacttcgagttcttcgccgccgacctgaggtgctatacttggtagatcagaaactcaggagtgtcttttct

SEQ ID NO: 368477 - DNA, 100 bp, Homo sapiens
gcaaactttactctggggcgcagaccgacggcaacatgagtgagaatgaggaagaggaaatttctcagcaagaaggcagtggggactatgaagtcgaaga

SEQ ID NO: 368478 - DNA, 100 bp, Homo sapiens
agcgccgcggccgcatctacatccaggcccacatcgacagggacgtcctcattgtcctcgtatctgacgaagcaagtggaacttctacggcagatgaacg

SEQ ID NO: 368479 - DNA, 83 bp, Homo sapiens
ctccgggtgaggccggccacgccccgcacgaagctggcagggcggagatgctggaccacgccgtcctgcttcaggtgatcaaa

SEQ ID NO: 368480 - DNA, 80 bp, Homo sapiens
cccaggaagatccactaaaggaggccatccttccgccttcttctgcaggagtcaggctcacgaggcccagggaatcctct

SEQ ID NO: 368481 - DNA, 51 bp, Homo sapiens
agatcatcgagcatttcaaacggtgattttacaacgagatgctgctctcca

SEQ ID NO: 368482 - DNA, 100 bp, Homo sapiens
ctgcgggacggctagcggccctgcgtgattggagatctcactgggtattgcaccaatccgaaccgtcatcagatggggtgggctaaacgcaatgtggacc

SEQ ID NO: 368483 - DNA, 101 bp, Homo sapiens
gcacaaccatcgcagttggaagcccatggggcagatagttttgaggcagctgtgccatcaaatagccacattgtttcggaacctggaaagaatgtcacact

SEQ ID NO: 368484 - DNA, 75 bp, Homo sapiens
cagttgttgaacctgtttgcctatgggacatacccagattacataggatctcacttgcttatctgaagaagattg

SEQ ID NO: 368485 - DNA, 90 bp, Homo sapiens
gccgcggtggggctcgggggcgcgtccacgtggccagagggcggccacccggagccagcggagggacagataagtatgctgtgcgcttca

SEQ ID NO: 368486 - DNA, 75 bp, Homo sapiens
cagctctaccaggaaatcatccactacttcgacaaaggcaagggcggcgactggcggcgcgatggacctgaccgg

SEQ ID NO: 368487 - DNA, 83 bp, Homo sapiens
aaggagatgatggagaaggcgcgggaagcctataaccagggggacactgggtccccttggagcctccccaggcttaatgattg

SEQ ID NO: 368488 - DNA, 98 bp, Homo sapiens
caacaagctgccaagcaaggccacgtcaatctcacggtgcggcgtaaagtggtttttgcggtctttgagagttcaggccctggtccgagaggattcaa

SEQ ID NO: 368489 - DNA, 90 bp, Homo sapiens
tttgagaaagacaaagatgatgatgaggtttttgagaagaagcaaaaagagatggatgaagctgctacgactgaaactgttgaggagccc

SEQ ID NO: 368490 - DNA, 74 bp, Homo sapiens
caaggtcagatggcagagcaaggtggtggatgtgcatgcaccctggcggcatctgctgctccctttgcataaga

SEQ ID NO: 368491 - DNA, 100 bp, Homo sapiens
cagcaagtgcgcggttggggccactgcgaggccgttttaggtgtgactgcacagaaaagttacaaaacaaatttgactttttgcgctcacagttgaatga

SEQ ID NO: 368492 - DNA, 90 bp, Homo sapiens
tgtaccaggcgaagctggccgagcaggctgagcgatacgacggaaacgatttgaacagcagcaaaaactcttagaagaagaaagaaaaag

SEQ ID NO: 368493 - DNA, 96 bp, Homo sapiens
aagacatgttttgtggagactaaagaatggagaactggagaatattaagcctaaggaccgcctggcccggtgcaccatgcattgcaacgacaaagc

SEQ ID NO: 368494 - DNA, 90 bp, Homo sapiens
ctcattggccctgacataaaactgcttttggcttctggatgccctcctccagtacacatcgtatggggtgacaccgcctagcctcagtca

SEQ ID NO: 368495 - DNA, 75 bp, Homo sapiens
aggaatgggacctcgagtcactgtgtttctgtagaaaatgtttcctgactgcaatgagggaaagcggagcacatt

SEQ ID NO: 368496 - DNA, 100 bp, Homo sapiens
aggagaccatcaaaggattccagcagattttggcaggtcctggtgaacgccatcatcaacagtggtccccgggaggactccacacgcattgggcgcgccg

SEQ ID NO: 368497 - DNA, 75 bp, Homo sapiens
cacagcggcctcggcctccccttggattcagacgccgattcgcccagatctggcaggggatcgacattgagacca

SEQ ID NO: 368498 - DNA, 90 bp, Homo sapiens
tataaattcaacaccagccttgcggctttaaactccagagaacctcatatgtgtttagtaagagatatttcaaactgctgggcccccaaa

SEQ ID NO: 368499 - DNA, 101 bp, Homo sapiens
ccatggagagagtaactctgtccttattatcggaccccgaggatcaggaaaaactatgtttgaacggctgaatgttgcacttcagagaacattggcaaagc

SEQ ID NO: 368500 - DNA, 90 bp, Homo sapiens
ctcctcctcctccccaccaccaccatctccatcacccaccaacaacaccacaataatccacagccaaggcgacactaacaggtgaagatc

SEQ ID NO: 368501 - DNA, 75 bp, Homo sapiens
ccggagacagcccaaatatcctcggaagagcgctcccaggagaaacaagccccaaagcccaagaggaaggtggag

SEQ ID NO: 368502 - DNA, 95 bp, Homo sapiens
cagcgttcccctctggcgcctttgctgctcctctctctgcacggagcgttcctgggtgcctgtgtggctgggtctgatgagcctggcccagaggg

SEQ ID NO: 368503 - DNA, 75 bp, Homo sapiens
gtcgctggagcgggcggagctgtgcgagagcctcctcacttgggtattagaaaactactcggatgctccaatgac

SEQ ID NO: 368504 - DNA, 100 bp, Homo sapiens
ctgtccatcgtgtgcctgatgatcacgcagctggctggcttcagtggaccaatgtataagcattccaataataaggccatgactacgggggcaattgctg

SEQ ID NO: 368505 - DNA, 102 bp, Homo sapiens
cctggcgcaaggactcggtggtcatgctgctccaccacgtggtcactctcatcctcatcgtctcctcctacgccttccgacagggtctcactctgtcaccca

SEQ ID NO: 368506 - DNA, 56 bp, Homo sapiens
tgttgaagtttgctgagctccttgaatctaacgcatgctgattctgcaaaatccac

SEQ ID NO: 368507 - DNA, 121 bp, Homo sapiens
gggtaaagttcaccttgaattaaaactgaatgaactgataacggagaatggaactgtatgccagcagcttgttgtacagagcaggaaaattcagattcgaaacatccctcctcacctgcag

SEQ ID NO: 368508 - DNA, 100 bp, Homo sapiens
ggagctcaagaggcaggccctgaggttgctcctcccggggcccttcccgggcaagggaatggatttgtaaactcaagagcttctccaaatttgattggag

SEQ ID NO: 368509 - DNA, 96 bp, Homo sapiens
ccacccaagtctgcaatcttaccagggaggccaagcgaccacccaaagaaggtgatggttggattcataatgtcacaacaaattgttggaaacaac

SEQ ID NO: 368510 - DNA, 96 bp, Homo sapiens
atcgtgaccgagaccgtgaccgagagcgtgaccgagagcgcgaatatcgtcatcgttagaagtggtctggaactgaaagtgatgcgtatttctgag

SEQ ID NO: 368511 - DNA, 74 bp, Homo sapiens
catatgacattaacagacaagacacttttcagaaagacaggtaatgtttgaaacttaccagttttccggtgtat

SEQ ID NO: 368512 - DNA, 73 bp, Homo sapiens
cagaagacaatatcatgcaagtgtggcaaatggttcccaagtggggcccaggctcggaccatcctgtgtgtga

SEQ ID NO: 368513 - DNA, 98 bp, Homo sapiens
tgagaaggggagaaagcttgacgtcactgacctgcttgctgatcctgtggtccggatccagagaaaaatgcaggctcaacagtaccagcagcagcgtc

SEQ ID NO: 368514 - DNA, 82 bp, Homo sapiens
cttgggacccaccgctgccctcagctccgagtccagggcgagatctgactgcagccatgagcagcaatgagtgcttcaagtg

SEQ ID NO: 368515 - DNA, 100 bp, Homo sapiens
tcattggccttgaggaagaagacatgctctacagtgctcagtctttgaggatagagagatgaactaccaacagaatcctagagacaactttctttctttg

SEQ ID NO: 368516 - DNA, 109 bp, Homo sapiens
ctggtgccggcgtttgggctacggttgttgttggcgactgtgcttcaagcggctggctacagcaaacatcattcaagatgtccagcaaagggagcagcacagatggcag

SEQ ID NO: 368517 - DNA, 100 bp, Homo sapiens
gagcaccaggtcatgctaatgagacagggtggtggaggtggatacagcagtcggagaacatctggcagagacaaatacggaccacctgttcgtacagaat

SEQ ID NO: 368518 - DNA, 83 bp, Homo sapiens
ccctacccgcttctcgtagtcctgggagcacagcagaagtgagaactgcgacacatcaccaagctgaagccctggagcctctt

SEQ ID NO: 368519 - DNA, 75 bp, Homo sapiens
ccgacgcgcagatagcagagccatccttgggtcaagctgtattagtcgacaggaccatttacatttcaggacaga

SEQ ID NO: 368520 - DNA, 100 bp, Homo sapiens
attcgccccctgaggagtgttgatccaacacagactgagtaccaaggaatgattgagattgtggaggagggcacagaaaactgaatctgtagataacgag

SEQ ID NO: 368521 - DNA, 90 bp, Homo sapiens
ccgagagcgcgaatatcgtcatcgttagaagcactgctgatggttcttcagaactcaggaatcgtgttgcatgcattgtttctacccacc

SEQ ID NO: 368522 - DNA, 75 bp, Homo sapiens
acatccctgaatcttggtgtttggacataggaggaggaaagcagaagtcatgcttggacatggattgttttcatt

SEQ ID NO: 368523 - DNA, 100 bp, Homo sapiens
ggacgtgtccgcgaagatggcgggccgggtgttgggatggccaccaactgggggagcctcttgcaggataaacagcagctagaggagctggcacggcagg

SEQ ID NO: 368524 - DNA, 75 bp, Homo sapiens
agagcaatatggatgtttaaaaatgagaaggcttcggtagattgcaaatgacctgctttctttcggatcccgggc

SEQ ID NO: 368525 - DNA, 75 bp, Homo sapiens
gaagcagtgaagaagaggagggtatcgcaggacttccctttcctccaccccagtgagaccagtgtcctgaatcga

SEQ ID NO: 368526 - DNA, 88 bp, Homo sapiens
ccctcaagtccctgatggcctcagaggaggaggtagagggtgagaaacagcaggagcacgaggtgcagtggctgcgggagcacctggc

SEQ ID NO: 368527 - DNA, 90 bp, Homo sapiens
gaggcagacgttgtggcggagaagggcagtggctgtagctgccctttccgtttccagggttccgaccagtggaagatagatgataagcct

SEQ ID NO: 368528 - DNA, 98 bp, Homo sapiens
cgatacctgcctgcaggagttcctcagcatactaaataagcttactcctgaaaagtttgacaagctatgccttgagctcctcaatgtgggtgtagagt

SEQ ID NO: 368529 - DNA, 98 bp, Homo sapiens
ggcggaggacgacgcgctcaaccagatcgcgcgggagagaaccatggagtctggcagtaccgccgccagtgaggaggcacgcagccttcgagaatgtg

SEQ ID NO: 368530 - DNA, 100 bp, Homo sapiens
acgacgccgcctctcaggaagaccacgacaaaccttacgtctgtgacagtgttggacaatcagataaagaaagacctggctgacaaggagacactggaga

SEQ ID NO: 368531 - DNA, 100 bp, Homo sapiens
aaccctgccaaatacatcagcttgtaggagacagaggaatgaatctgaagtctgctgcagtaaaacacagaaggctttaaaatgttttcttgcataaaat

SEQ ID NO: 368532 - DNA, 50 bp, Homo sapiens
gctggtcaccggggtctgcctgggaatccataacactggaggatgtggct

SEQ ID NO: 368533 - DNA, 97 bp, Homo sapiens
tccgactcggaggacagcatccccccggagacccacgaaaaccgagagcacctggtgatgatggagaagatcctagggcccatcccatcacacatga

SEQ ID NO: 368534 - DNA, 120 bp, Homo sapiens
actctgaaagggccccggccagcgtccctgagacgccaacggcagtcactgccccccattccagctcctgggggactcgggcaagggtgccgaagatagacaagaggcacacagagacag

SEQ ID NO: 368535 - DNA, 100 bp, Homo sapiens
actgcacttgcgaagggagcttggggaggaagaccaagaatcgccttcagccctgtctggtgcatccttggcagaaagtgaggaggaaaacacccccatt

SEQ ID NO: 368536 - DNA, 90 bp, Homo sapiens
cttgctgctgctggccctggctgcgctgctggcctttgtgagcctcagcctgcagttctcatatactttagaagaacagaagaacctcac

SEQ ID NO: 368537 - DNA, 83 bp, Homo sapiens
ggaaggaacgaggcaaggagctaaagcagcgtgcgttcagccctggggtacggacattgctgcaggagaagaggttgccatca

SEQ ID NO: 368538 - DNA, 100 bp, Homo sapiens
ggggcaggacgttcagccctgggattctggccgaccctcgccttccttctctgcagcttccccgcaggctgaccggttccctgatgtgttacctgcttct

SEQ ID NO: 368539 - DNA, 85 bp, Homo sapiens
gcaaggagcacgtggcagcgcaggaaacagcctgacatttaccccggtaactgctgggcatttaaaggctcccaggggtacctgg

SEQ ID NO: 368540 - DNA, 100 bp, Homo sapiens
gagactggtacctgatttggaaaagcttgagaaggttgatcaatttaagaagttgcttgatagatttgactatgatgatgagccagaagctgtggaagaa

SEQ ID NO: 368541 - DNA, 100 bp, Homo sapiens
gaaacactaacctttctctctacctgatgtctccagaatttggaaagtatttagcaaacgaggcccctgagagctccacctagttcacaggataaaatcc

SEQ ID NO: 368542 - DNA, 100 bp, Homo sapiens
tattcggccatcttggctcctccctcggcctatatgaacccaatagcaatggcgagatcaaggggtccaatccagtcttcagggccaacaatacaggatt

SEQ ID NO: 368543 - DNA, 100 bp, Homo sapiens
tctacaaccctgaagtgcttgatatcacagaggaaactctgcattctcgcttcctggagatgacaggattggacattgagaaggaccagattattgagat

SEQ ID NO: 368544 - DNA, 100 bp, Homo sapiens
tacctatcagtgatgtccgggccagcataggtgctgggttcatttaccctttggtcggaacgggatggcaccacagatgtgacgcggacaatgcattttg

SEQ ID NO: 368545 - DNA, 75 bp, Homo sapiens
gtgtttccaccagctcatgaaagacacgactttgaactggaagggaccttaccaggacacattagaatttttgtt

SEQ ID NO: 368546 - DNA, 83 bp, Homo sapiens
gccagagagagaagatcggggggctgaaatccatcttcatcctaccgctccgcccgagatcatgaatcagacagataaaaatc

SEQ ID NO: 368547 - DNA, 100 bp, Homo sapiens
gaaccattggataaggataaagttacagatgaggacacagtaaagaggtattttgccaagtttgaagagaagtttttccaaacctgtgaaaaagaacttg

SEQ ID NO: 368548 - DNA, 82 bp, Homo sapiens
gtttacatggaactcagacatctgcaaatcatgatctattaatgagatgaagcggttggaagaaatgtcaaatatgtttcag

SEQ ID NO: 368549 - DNA, 75 bp, Homo sapiens
gtggacatagaggacaacgcagatatagaacatttcttttatcacagtgctatacttggtagatcagaaactcag

SEQ ID NO: 368550 - DNA, 80 bp, Homo sapiens
gaggatgatgtttttggtgaaggttttcaaatggaacattttgatgcatcacttagtacctatttcaaggcattgctagg

SEQ ID NO: 368551 - DNA, 83 bp, Homo sapiens
gactagcagcttcattttgaagtcctgtccaaaatgcattgctgtcttcacaagagtcagtgagccaaggatacaatttccag

SEQ ID NO: 368552 - DNA, 75 bp, Homo sapiens
aatcgggctgaagcgactgagtccgcgatggaggccccttcacagatgtagtcactacaaatcttaaattgcgaa

SEQ ID NO: 368553 - DNA, 75 bp, Homo sapiens
aatacagacctcagcttccccattatttcgaggaaggaagtggatggaagtttgcttagttgaagaattgccacc

SEQ ID NO: 368554 - DNA, 100 bp, Homo sapiens
gctttgcagggacatgcagagcatcctctatcacgggcttatccgtgaccaggaaaaatttctgccgtttctggacatgttccaaaaagagagtgtgcgg

SEQ ID NO: 368555 - DNA, 100 bp, Homo sapiens
caagcaatcctaccatgtcagccttcccagtagctggaactacaggttgccatggctccgtagaaaagagctcctctgggagaataacgttaggagagca

SEQ ID NO: 368556 - DNA, 83 bp, Homo sapiens
aagatttgcattgaaggccggtctaatgtagtttggtgccctggttgtcagatgttggaaagcagtaggacggaacatactct

SEQ ID NO: 368557 - DNA, 88 bp, Homo sapiens
tgggcctgggctgcagaagaatagttttggctacgggcctccacctccaccgccagatcagtttgcccctccgggggttcctcctcca

SEQ ID NO: 368558 - DNA, 101 bp, Homo sapiens
gttcagtgactgctattgaaccaccaaaagtccattatgaaactggactcacaccacccggcaagaactgctcactacggctccctgccccagaagtcaca

SEQ ID NO: 368559 - DNA, 90 bp, Homo sapiens
gaaaattatccagaggcttgtggaaatagttcatccatcgcaagaagaagatctgtcagtggtagctataggaattaacatatacagaac

SEQ ID NO: 368560 - DNA, 100 bp, Homo sapiens
aggaggagctggtgaagggcgtgctgatggccggcctctaccccaacctcatccaggaagaggagatcccagaactggagattgacgtggatgagctcct

SEQ ID NO: 368561 - DNA, 100 bp, Homo sapiens
tggcatcgatctctccatcccttccgaggcccgacttcggtctaagagtgtaaccagttccagtagcagtagcagtgacagttctgccagtgattcttca

SEQ ID NO: 368562 - DNA, 74 bp, Homo sapiens
accgacaactccatccggcccgaggagctgctggctctgacgcccgctctgcggcttcggtgtttgaacaggcc

SEQ ID NO: 368563 - DNA, 97 bp, Homo sapiens
ttccagttagtggatatagcacaccatccccagccagaactgtggctgcaccatctgtcttcatcttcccgccatctgatgagcagttgaaatctgg

SEQ ID NO: 368564 - DNA, 60 bp, Homo sapiens
cgcacggagaggtgcagctgggttcacagctggagcaaagctgttgtttcacctgaggca

SEQ ID NO: 368565 - DNA, 100 bp, Homo sapiens
cctgaccaggaagcgggtctctgccagttccccaagctagcttgtcactttctgcaaaggtttccctcagggagcctcctgctgccaggcaccatgacag

SEQ ID NO: 368566 - DNA, 100 bp, Homo sapiens
cgccgccgcgggagccgctgcccgaactcccggcccgaactccagggtttccaggcctgaggtgcccgccctggccccaggagaatgaaccagccgcaga

SEQ ID NO: 368567 - DNA, 96 bp, Homo sapiens
atgatgaagactgaaggtgtagactcagcctcactctgtacaaagcatcataagggttgtattccatgacagacggctacaatacacagagcatca

SEQ ID NO: 368568 - DNA, 133 bp, Homo sapiens
aggcccgagcacgcgcgagagcggttgcaggacgactcggtggaaacagtcacgtccatagaacaggctgacaaacgggctcatcataatgcactggaacgaaaacgtagggaccacatcaaagacagctttc

SEQ ID NO: 368569 - DNA, 98 bp, Homo sapiens
cttcagccaaagaaacaagccgtggaataggtgtatcaagtaatggtgcaaagcctgaaaaaccagactgtgatgactgggagagcgggctgaatgca

SEQ ID NO: 368570 - DNA, 101 bp, Homo sapiens
gtcatcatgagcgatgttaccattgtgaaagaaggttgggttcagaagaggggtgaatctggattgggaaagtcgacattaatcaactcattattcctcac

SEQ ID NO: 368571 - DNA, 85 bp, Homo sapiens
agttcgcctcagacgcggtggagccgccggagtctgagaagaacatgaacgattggatgcccatcgccaaggagtatgatccact

SEQ ID NO: 368572 - DNA, 98 bp, Homo sapiens
ggtggaaaccaagatagatgtgtcctatgaataccgcttcctggagttcacgactctgagtgctgcaagaagttgagaagtttacagacctagagaaa

SEQ ID NO: 368573 - DNA, 95 bp, Homo sapiens
tttccggctgcagggcggtaaggatttcaacatgcctctgacaatctctagtgattttctgccgtctcttggcaaaaatggcaaataatgatgct

SEQ ID NO: 368574 - DNA, 46 bp, Homo sapiens
actaaaacatttaaagacctgattcagaatggacagtttagaagaa

SEQ ID NO: 368575 - DNA, 87 bp, Homo sapiens
gtcgcaagacacagagcagtgggcctgggctgcagaagaataatccacgatgactgcctgcaagcggtgggccatgagtgtgactgt

SEQ ID NO: 368576 - DNA, 101 bp, Homo sapiens
agccgctgccgctatggatgatcgagaggatctggtgtaccaggcgaagctggccgagcaggctgagcgatacgacggtttctacgataaagacagttcag

SEQ ID NO: 368577 - DNA, 50 bp, Homo sapiens
ttggatgtgaaaatgaagccagaccgagtatgccgagattttgctgtcct

SEQ ID NO: 368578 - DNA, 96 bp, Homo sapiens
ccggcctagcgtcctggaattacttcaatcaagtatggacctgtctgccaatcaggacgaggagaccgaccaggagaccttccagctggagatcga

SEQ ID NO: 368579 - DNA, 115 bp, Homo sapiens
gaagcttcccccaccaccccctcaagccccacctgaggaagaaaatgaaagtgagcctgaagaaccatcgggccaaatttgagtttcatcatggtgactatgaaaaacagtttct

SEQ ID NO: 368580 - DNA, 82 bp, Homo sapiens
ccgcgcggctcggagccctggaagcagcagctcaccgaggacggggactccttcgagagctgtgcccaggagtgaacaacca

SEQ ID NO: 368581 - DNA, 90 bp, Homo sapiens
gcggggtccgatggttctcgaaggcccgcggcgccccgtgctgcagtgaaaatgcctcgtgtaaaagcagctcaagctggaagacagagc

SEQ ID NO: 368582 - DNA, 105 bp, Homo sapiens
cttcccttgccctgggatgaaaattaagtggacagtttcataaagcataacatgagtagaagaatctactgccaataactgtttattatctgcaatcaagtgggc

SEQ ID NO: 368583 - DNA, 50 bp, Homo sapiens
caaaacgtgactccccacaataagtctcgaagtgctgcagctaaaactca

SEQ ID NO: 368584 - DNA, 96 bp, Homo sapiens
tgtaatggcggagcgtggcggggacgggggcgagagtgaacgattcaacccgggggagctcagcccttctgcagaggccgggctggaggagaagat

SEQ ID NO: 368585 - DNA, 75 bp, Homo sapiens
acagtattgggaaatctgtgaaaggcaaccggtgaccaaaaacactttcaggcagtatcgagtgctaggaaaagg

SEQ ID NO: 368586 - DNA, 83 bp, Homo sapiens
cagcacgcctgggccgggggctgcagcatggagccttcacgtaaatgggtccagtcatgcctcccagtaagaagccagaaagc

SEQ ID NO: 368587 - DNA, 98 bp, Homo sapiens
ccgtgacaactttcgtttccctctgagggaattgggaggtcggcggccccaaaacactcctgtaggaggcctgctgatggcatttcagaagtactctg

SEQ ID NO: 368588 - DNA, 75 bp, Homo sapiens
ggaaccaaggagacgctcctggcactgcaggaagttctacagactttgaccaagttttgtttccccttctatgtg

SEQ ID NO: 368589 - DNA, 100 bp, Homo sapiens
cagaggaatttctctatggcgttcaggcctccggaatgccccccgctgctgggcagtgatccagcccctgctgtgtgccgtatacatgcccaagtgtgag

SEQ ID NO: 368590 - DNA, 100 bp, Homo sapiens
aatacactgagacccggaatcagttccttgatgagctcatggaggtctacatccgcacgccttccggtgaggtgcagacagtccttgtccaggacagccc

SEQ ID NO: 368591 - DNA, 83 bp, Homo sapiens
tggaagcagccgatccagcctgcggagcctgtggggcaggcagcaattccatttccgtgagggcgtttctagatgaagatgac

SEQ ID NO: 368592 - DNA, 98 bp, Homo sapiens
ctcgaaaaggcactctgtcacgtgtacacaggaaagggccctgacaagaggatgggactgcagttgtggctgccaggttggagtgcagtggcgcgatc

SEQ ID NO: 368593 - DNA, 103 bp, Homo sapiens
tgattatgagcaaccactggaggtgaagaacaacagtaatctgcagagaatgggctcctccgagtcaacagattcagccacaggtggaattaagaaatctggc

SEQ ID NO: 368594 - DNA, 90 bp, Homo sapiens
ccagtgttgcttactagtttgaacggaaagcaagaggtatctgctgtgcgtttcagtcaacaatacagcttgtgttcgacaatattcctt

SEQ ID NO: 368595 - DNA, 83 bp, Homo sapiens
ttcaaagtggtgggatattatagatattcagaagaaggatgctgttaaaaggaccctgatgctcccataagacagaaaatgcc

SEQ ID NO: 368596 - DNA, 90 bp, Homo sapiens
aactgggtacagacctccaccgccacccccgacacaagagacttatggagaatatgggtccctgtgaaggtgaccaacgtcaaggatggc

SEQ ID NO: 368597 - DNA, 75 bp, Homo sapiens
cagaaggtctctggagacatcttcagcagctctccaagaggctgaagaaagtgtggaagccacagctgtttgagc

SEQ ID NO: 368598 - DNA, 100 bp, Homo sapiens
gccaatcccaggaggaaaaacggctgcagcgctggtggaggaggaaactcgcagataccgacctactaagaactacctgagctacctgacagccccggat

SEQ ID NO: 368599 - DNA, 90 bp, Homo sapiens
aaagcagtcagtactcttattgattcacttaagaaaactcagcctgagaatgttactccacaggatccgctgaacataggatgttgccac

SEQ ID NO: 368600 - DNA, 50 bp, Homo sapiens
tggacggtcactcagcctatggaggttcatgaaccatcgagctccagcca

SEQ ID NO: 368601 - DNA, 78 bp, Homo sapiens
tcaagaaacagatggacaagttggatcccctggcccatcctctcctgcagtggacctcagcagccatgtcgaagcccc

SEQ ID NO: 368602 - DNA, 98 bp, Homo sapiens
cttcagatctggtcactatggtacgagaacgaaaatgcatattatgccacatcgtgtacagctcaaaaaaggtttgcatcgccagcttctatatatta

SEQ ID NO: 368603 - DNA, 100 bp, Homo sapiens
tgggagggagccgcgcgcctttgtgcgcgcgccgaggtatgggaggacatggctatggtggagctggtgatgcaagttcaggttttcatggtggtcattt

SEQ ID NO: 368604 - DNA, 100 bp, Homo sapiens
agaattctgggcttccacacaactccagtgctaactcaacagatctcatggtggatgttcctggacatggaaaggtgatggtggacattgcatatggcgg

SEQ ID NO: 368605 - DNA, 90 bp, Homo sapiens
cacatgagtgcagatggcacctacatgcctccgggggaagctgctcgctgatctggccaggcgcctgggcctccactatgtggtctacag

SEQ ID NO: 368606 - DNA, 100 bp, Homo sapiens
ccagttccccggcagcgggacccggcgaagacgcgaccgcggcgcgagtcaccatgatgatgggactcaatttaaagccaatgggtcagtttctctgcag

SEQ ID NO: 368607 - DNA, 75 bp, Homo sapiens
ccattcaactagccaaggaaaaaaagcagagaggagcggggagcaatgcagggcctgtcctcccaaagccaactc

SEQ ID NO: 368608 - DNA, 90 bp, Homo sapiens
gcaacgcgagtgggagcaccaggatctcgggctcggaacgagactgcacgctgatgttctaatcatgtcagataaagatgatattgagac

SEQ ID NO: 368609 - DNA, 101 bp, Homo sapiens
gccatcttggatccgcgggacaagaaaattcatgcggatcaagtcttccataccagggaccaggccaaaaccagactgccactgcccctacttgggcccca

SEQ ID NO: 368610 - DNA, 100 bp, Homo sapiens
cctgcctcagcaagcgtacctgagaatacttttaaaggaacctgttgataaatgcaaaacagtggctgttgcaggcatgaagctttgctgtattatgttt

SEQ ID NO: 368611 - DNA, 100 bp, Homo sapiens
gcggagcgcgagagcttcgagcggactcaggatgttgacaatgcgtctctggcacgtcttgaccttgaacgcaaagtggaatctttgcaagaagagattg

SEQ ID NO: 368612 - DNA, 100 bp, Homo sapiens
ttgccgtcgacggcgagcccttgggccgcgtctcctttgaggggcaccaccacgaggcgatttgtgggccataccaaggatgtgctgagtgtggccttct

SEQ ID NO: 368613 - DNA, 101 bp, Homo sapiens
cggtgtgcctcggcagccttgcgctgctctaatggtccggacttccgtgtctgctgatgcaaggaatcccctgggctcccgtccactccactgctgaccag

SEQ ID NO: 368614 - DNA, 99 bp, Homo sapiens
tctcacgttgaaacagaatgaagtgcttcctggagctaaggattatgaagaagctgtgctcttgctgttagaaggagctgcctgggaagaagctttgag

SEQ ID NO: 368615 - DNA, 101 bp, Homo sapiens
gttgtaggtagcggtaccttgagtggcaacagcaagactgaggattggggatatttaaatgaagatggagaactcggcttggcctaccaaggcctaaagca

SEQ ID NO: 368616 - DNA, 100 bp, Homo sapiens
gttggttttatgcatctttatccaatcaagtgcccttggacaaagcctgaaaccaggtcttttagataaccctgaacttcgtgtggtccttgtctttggt

SEQ ID NO: 368617 - DNA, 126 bp, Homo sapiens
cggttcttgggggactatgtggtggacttggacacgtcccagctctctctgggcatctggaaagggagctcactcagtgggtttgatgtggtggatgctggctcgggaagttctgcgcatgcgtgg

SEQ ID NO: 368618 - DNA, 74 bp, Homo sapiens
cacacctgttgccattatagagctggaattaggcaaatatggacaggggtgattctaggaccgttaagatctgg

SEQ ID NO: 368619 - DNA, 95 bp, Homo sapiens
gctgctcaaaatcagcctacatgccatctttggattttttatcaagcagaaatgcatcgaacaacgagaatcaagatcactgagctaaatcccca

SEQ ID NO: 368620 - DNA, 75 bp, Homo sapiens
cttggcacccatcaaaatacccctccggacgtcccccgtctcagaataaaagccgccctcattctaggggagaat

SEQ ID NO: 368621 - DNA, 82 bp, Homo sapiens
cgctctccagcccgcttgaacggcagaagctcctcctggggtagagacagatcttattgatgttggattcacagatgatgtg

SEQ ID NO: 368622 - DNA, 82 bp, Homo sapiens
ggcaccttctccatgcattgcaagtttcctgctctacgaaacgcactcttttgccttgaagcggcattggacagtggtgtca

SEQ ID NO: 368623 - DNA, 109 bp, Homo sapiens
cccgcatgcccatgatctggctggacctgaaggaggccggtgactttcacttccagccagctgtgaagaaggtttttagaacttcagccataaaaatgggcagaatttt

SEQ ID NO: 368624 - DNA, 74 bp, Homo sapiens
atgtcatccgacagctgggcagcctgagtttccatgtgatccccactatctcaagcatcgtcccggagagctgc

SEQ ID NO: 368625 - DNA, 82 bp, Homo sapiens
gttttgcctgaatacatgatttaaacaagagatttccacagaaggtgtggtggacacaggcctattcatcaacatggctgag

SEQ ID NO: 368626 - DNA, 74 bp, Homo sapiens
tactctcgctcacgcagcaggagcaggggacgaagaaaacatcggttgtgaagagaaagccaaaaagaatgcca

SEQ ID NO: 368627 - DNA, 96 bp, Homo sapiens
ggctgggaaggcgtgggcgacccggtgtgtggcgcgcccagagccccgcgtttcagccctagggaaggtaagaatgattgatgttggctgatattg

SEQ ID NO: 368628 - DNA, 83 bp, Homo sapiens
attgatggtcaacagaaaagattttgctgtcaaagttgtgtcagtgaatacaaacaggttcattggcatggaaaaatgttcag

SEQ ID NO: 368629 - DNA, 97 bp, Homo sapiens
ctctgcgtgagtgtggtctacgagctgtttctcatctttatactcttccagtgatcagggccaaagcggtcagtgagaaggaagtggactctggaaa

SEQ ID NO: 368630 - DNA, 100 bp, Homo sapiens
cctgccttgtgaagatcattaatgaagtaaagcccacagagatctacaaccttggagcccagagccacgtcaaatttaagctatgaagaaggacatccct

SEQ ID NO: 368631 - DNA, 89 bp, Homo sapiens
ccgtggccccgagggcggatccgagggatgagtgccacctctcgtaaacggaaagaagaattagctgaagcattgaaaaagcttatttt

SEQ ID NO: 368632 - DNA, 75 bp, Homo sapiens
ttcctaccatctaaaatacgaaggtttctggctggtgcttttatgggaccaacgctgggtggatttctgtatgag

SEQ ID NO: 368633 - DNA, 100 bp, Homo sapiens
taaaaacagagtccgatgaaaggaatgggtctgggaccttaacagggagccatgcttatgcttgatacatggaatgagtcaatcttttcaaacataaaaa

SEQ ID NO: 368634 - DNA, 100 bp, Homo sapiens
aaggtccagtttgaatgaccgctctcagctggtgaagacatgacgaccctggactccaacaacaacacaggaagcaatgaggctccccaagaacacacct

SEQ ID NO: 368635 - DNA, 90 bp, Homo sapiens
gcgaggaggcctcgaggtgcccagacaagcccaaggaggagctggagaaggacttcatctcccaggtctgggaggggctgaacgtggtga

SEQ ID NO: 368636 - DNA, 100 bp, Homo sapiens
acaagcctgatgaagggaaacgaggggatgcctgtgaaggtgacagtgggggaccctttgtcatgaaggcatgaaaacagccctggaagtctgccctggc

SEQ ID NO: 368637 - DNA, 75 bp, Homo sapiens
tgggggtcaccgtccagagccaaggtccagggggcaaggtcgtgaatgacagcccatatcaaggcggtgtattct

SEQ ID NO: 368638 - DNA, 75 bp, Homo sapiens
tgccccggcagctcagcgcggcggccgcgctcttcgcgtccctggccggctgaccaactgactgaagagcagatt

SEQ ID NO: 368639 - DNA, 75 bp, Homo sapiens
tttgtgggggcagcaggagcctctcagctttttcgtatttggaggtggttatcactaggctaaaactggacaaag

SEQ ID NO: 368640 - DNA, 112 bp, Homo sapiens
agactccgagttctcggtactcttcagggatgagtcatgtggcagtggaaaatgcgctcgggctggaccagcagatgaaggatttgggggcagagcacttggcaggtcatga

SEQ ID NO: 368641 - DNA, 75 bp, Homo sapiens
cggagtcggggacccaggagtttcctgtgtccagcgctgccggagccgcctgagcatggcaccacactcctgatg

SEQ ID NO: 368642 - DNA, 100 bp, Homo sapiens
ttcatgcaaggaaacataagttggaggttctggaatctcagctgctgacgacccagcgggtgagctgcgcccacatctacagtgccctagacccgacagc

SEQ ID NO: 368643 - DNA, 82 bp, Homo sapiens
cccccgccgcagcagcaccggcgacaggccaccagcttgggctccccacggagggcagcaagtgggacttggggaacccggc

SEQ ID NO: 368644 - DNA, 100 bp, Homo sapiens
aggagcattaccacctcagccaccctgaccactatcatcaccatggaaaaagtgacttgagcaggacgacatagacagcctaaacccagttctcagggac

SEQ ID NO: 368645 - DNA, 80 bp, Homo sapiens
gggcgctccggtggcggcggagacctccttgaggcccgccgcccgcgggcccacgagtgcctgggtgaggctctgcgtgt

SEQ ID NO: 368646 - DNA, 100 bp, Homo sapiens
tgctcctcttagcggccaccgccctcctgacgcacggccaagaggaaggccaagtcgagggccaagacgaagacatgtactatgaggggctgcaggacaa

SEQ ID NO: 368647 - DNA, 82 bp, Homo sapiens
tatcccgggcccgccggccctgagctcccggcggcgcagatttagctttggagtcaaacccttctgaccatccaagggcaag

SEQ ID NO: 368648 - DNA, 100 bp, Homo sapiens
caggaggcagtaaattcttcagctgctcggacagatgaagctccccaaggagctgcaggaggaccatgacatcatggaagccgatctggacaaagacgaa

SEQ ID NO: 368649 - DNA, 88 bp, Homo sapiens
aaaaatattgcagtgtcctaaatgtgataaaacatttgaccgaatagtccagtgtgaaaaaagccagtattaaaatactgaaaaattt

SEQ ID NO: 368650 - DNA, 75 bp, Homo sapiens
gtgtaccatgaggacatgacggccacccggctgctctgggacgatgtactaatggtcacttgatgtgcgctggct

SEQ ID NO: 368651 - DNA, 75 bp, Homo sapiens
gagaagctaaaaggagaacttgaaagttcggaccaggcaccgttcctgccttgggcgctcatgggcttctcgctg

SEQ ID NO: 368652 - DNA, 84 bp, Homo sapiens
aaataagctatatactttggttacctatgtacctgttaccactttcaaaagaaaattgcctaagaattatgacccaaaagttac

SEQ ID NO: 368653 - DNA, 75 bp, Homo sapiens
tacatcagcttgtaggagacagagggtattacttatgaccatgtcgaattaaatgtatacttgaatggaaaaaac

SEQ ID NO: 368654 - DNA, 100 bp, Homo sapiens
cataggtcaaagctgtttggagaaaatcagaagtacagttttatctagccacatcttggagcatacagtttgaacatttattcgcctcctgagcttgtac

SEQ ID NO: 368655 - DNA, 100 bp, Homo sapiens
tgatgggcagcccccaccacccgcccaggccagccccagcagcaacagcagcacagatgattcattccggactcgtaatgccagtagcgttccatcttcc

SEQ ID NO: 368656 - DNA, 75 bp, Homo sapiens
aagccctcatcagtggctggctcttcttccgatacctggctatcggaggccctgggaggagcggggacactgagg

SEQ ID NO: 368657 - DNA, 101 bp, Homo sapiens
ctccgccgccccgaaactttcaccgcgagcgggagcaggaactcaaagcagccgctgatggcgtactatctgaagtgaggaaaaaacaagcagataccaaa

SEQ ID NO: 368658 - DNA, 74 bp, Homo sapiens
cagcccaagatggccgacttcgatgatcgtgtgtcggatgaggagaagaaggtctgaagaaaaccctgcgggat

SEQ ID NO: 368659 - DNA, 99 bp, Homo sapiens
cttggatgaattgcttgctttggaggcagtgctcggaatgtgaccaggcagggagcagtgacatggaagcagatatggccatggaaaccctaccagatg

SEQ ID NO: 368660 - DNA, 75 bp, Homo sapiens
ggagagcccgtcattagcgtgaaaaccacaagcaggtccaaagagagacgtgagtgcatctccatccacgttggc

SEQ ID NO: 368661 - DNA, 75 bp, Homo sapiens
gcccgtaaaatggtcccctcggctggacagctcgccctgttcgctctgggtaagaatgattgatgttggctgata

SEQ ID NO: 368662 - DNA, 82 bp, Homo sapiens
aaggacaacaaggtcccagtggcccctcctcaggtgggtgtttctctatgagaagggctaccagacctcgagcggcctcatc

SEQ ID NO: 368663 - DNA, 100 bp, Homo sapiens
caaccccagatccatttacactttacactgctctgttaaaagcgaaaatgaaacaattgcctgcggcaacagttcgactcctttcaagttctcagatcat

SEQ ID NO: 368664 - DNA, 98 bp, Homo sapiens
tccaaagaggagccagttaccatgactcatccaggtcacgagaagagaatgccttctagatgcaaaatcacctccaaaccagaccacttttcttgact

SEQ ID NO: 368665 - DNA, 100 bp, Homo sapiens
tccgaggcgcagaagtggattgagtttctcctggcggcgctggtcctgtctctcattctgccgaggagcagccagtacatcaagtggatcgtctctgcgg

SEQ ID NO: 368666 - DNA, 105 bp, Homo sapiens
ggagccatgaggcgccagcctgcgaaggtggcggcgctgctgctcgggctgctcttggagcaaaatgatgcttcaacacccaggccaggtctctgcctcggaagt

SEQ ID NO: 368667 - DNA, 100 bp, Homo sapiens
aagggcttgttccggtttcagaggatcctgtagccataaagattgcaggtaaaatttggtaataccacctttaaaacagatgtgtaccttaagtcactca

SEQ ID NO: 368668 - DNA, 100 bp, Homo sapiens
gacctgtgtcctgttccgcttctccgaggacgccttcaactccacttttatctccaccataggtgacagagctgaatgaacctctctccaatgaagatcg

SEQ ID NO: 368669 - DNA, 90 bp, Homo sapiens
tggagttgagctgcagcgaagcacctctttacactatatcatcatgtacatagaaaaatccaaaggattctgcaaaaaagctactagaac

SEQ ID NO: 368670 - DNA, 96 bp, Homo sapiens
gtgcttcttcgggcggaggaggaagtaggggtgcacctcagcactatcccaagactgctggcaacaggaggtggaggccggaaaggtcgcaccaag

SEQ ID NO: 368671 - DNA, 96 bp, Homo sapiens
ggggactgcacgtagcccggcgctcggcatggctctcctggtgctcgcctcataaggagaatggctcagagcgtggtggaagtcatggaggactca

SEQ ID NO: 368672 - DNA, 106 bp, Homo sapiens
gggagacgtcatttgctactatgggaaccgaggggagcctgatcctatcgttttgacgccagctcctgggcaacgtgctggtctgtgtgctggcccatcactttgg

SEQ ID NO: 368673 - DNA, 89 bp, Homo sapiens
tttgccattggggtgcagcagctgcaccccaccttgatccagcggacttacgggaagctcttcgtgggcggtcttgactggagcacgac

SEQ ID NO: 368674 - DNA, 99 bp, Homo sapiens
atgacaaaacttcaagccaaacatcaagcagaatgtgatttgcttgaagatatgaggtgacaaacagcatgtttggtgcttcaagaaagaagtttgtag

SEQ ID NO: 368675 - DNA, 75 bp, Homo sapiens
gttagtgtctggagccatgaaggccttgtgctgaccaagctgctcacctcgtctccctctgatgccgagcggaag

SEQ ID NO: 368676 - DNA, 101 bp, Homo sapiens
agggaacatatggagagcaacttgttcctgagctgtgcaaccaatcagagtccagtggagaagagcttactcacatagcatattggtatatcaaaatgaaa

SEQ ID NO: 368677 - DNA, 100 bp, Homo sapiens
ctgtcaatcccagatttgttgccataatcatagaggcaagtgggggaggagcgttccttgtcctccctctgcacaagatacaaccgaaggaagtactcag

SEQ ID NO: 368678 - DNA, 75 bp, Homo sapiens
ttcagctacagggtgaccaacgcaagaacatatgccagttcctcgtagagtgaccttcctgatgcaaaatcgaga

SEQ ID NO: 368679 - DNA, 83 bp, Homo sapiens
ctggaatgcatccaagagaatccctcaacatgctggatcagtttgacaacttagaaaaacacacacagtggggaattgatatt

SEQ ID NO: 368680 - DNA, 90 bp, Homo sapiens
ccagctcatcgactccatggccaactccttcgtgggcacgcgctcctacatggctgagcttctggaagaggtgaagaaggaattgcagaa

SEQ ID NO: 368681 - DNA, 96 bp, Homo sapiens
gagcagaccacggtggcttcgttaggagagctgtccgtggcacagtgcacgcagcggcccgtggacatcgtcttcctgctggacggctccgagcgg

SEQ ID NO: 368682 - DNA, 114 bp, Homo sapiens
gaagaggcaaccacgttctccaatgcaatgctgtttgccctgaacatcatgaattcccaagaaggagatgacagcgcttctgctgcaagtagcatggaggtgacagaccgcatt

SEQ ID NO: 368683 - DNA, 100 bp, Homo sapiens
gcagaccctggtctatgagaactacaacaagttcatctcagccacaggtatttacatgaggaatttccagagtcctggtcagttcccaggttggctgaag

SEQ ID NO: 368684 - DNA, 90 bp, Homo sapiens
gaagacgcagcctttctccaggttctgtctctcccattctgattcttgacaccagatgcagccgcggcccatggagcccgccggcccggc

SEQ ID NO: 368685 - DNA, 103 bp, Homo sapiens
agtgtatgaccacaaacagccatcaaggacagagcgggatgccaccagcttgtccaaagggaagttccaggagctcctggtgggcatcgttgtggagaatgac

SEQ ID NO: 368686 - DNA, 75 bp, Homo sapiens
gggggagacgggacgctgctgtacgcttcctcgcttttccagctgccattcgatttcacatggaagatgctaaag

SEQ ID NO: 368687 - DNA, 70 bp, Homo sapiens
atgaggaaaatggggagcaggaggctgacaatgaggaacgagttgaagcagttaatatggctgaaggaat

SEQ ID NO: 368688 - DNA, 83 bp, Homo sapiens
cttgcccctcggccgggcggacgaacatccagtcatggataaaaatgagctggttcagaaggccaaactggccgagcaggctg

SEQ ID NO: 368689 - DNA, 83 bp, Homo sapiens
cggcttgtcctggctcttgccctcatcctggttctggaatcctcagttcaagctcagaggcgtctgtactactgaaataggac

SEQ ID NO: 368690 - DNA, 98 bp, Homo sapiens
gagaaaaacatccgaattcatcccctaggacatataaatggagctttcagctcagagagcacagaatggggattcaacacctcggcaatgccctttta

SEQ ID NO: 368691 - DNA, 75 bp, Homo sapiens
cgacgctgctgggtccgctgagcggggcgacccgagaatcctcactatggatgggctcattgaggacattaagca

SEQ ID NO: 368692 - DNA, 75 bp, Homo sapiens
atgtgtgatagaatggttatctatttcttcattgctgcttcttatgctccatggatgcaaagccggaataagagc

SEQ ID NO: 368693 - DNA, 100 bp, Homo sapiens
gaggctgaatcctggatgcgggagaaggaacccattgtgggcagcactgactatggcaaggacgaagactctgctgaggattctgaaagactaatggagc

SEQ ID NO: 368694 - DNA, 73 bp, Homo sapiens
cgacagctgcggttggcgggcaccataggccgaagcacccgggacacatgttcaaagagcataattaactttt

SEQ ID NO: 368695 - DNA, 50 bp, Homo sapiens
gaatttggaatcttcccttgaagagtgagacggtttaagcggaagcatct

SEQ ID NO: 368696 - DNA, 112 bp, Homo sapiens
gttccggacgctgcttaggaaccggggactcaggagtgcccgcgccctgagcgctcagctccagaggcggattcactccttctccagttgcacagccacacccttcagctgg

SEQ ID NO: 368697 - DNA, 75 bp, Homo sapiens
tttggtttaatatctgattgggacaacattcagacccatttccagtcatgatgaagtacatgcgagaagccacgc

SEQ ID NO: 368698 - DNA, 82 bp, Homo sapiens
gtccttctccactttcgccagcccgtgccgcgagcgcggcctgcaggagcaaaacacttactattttggagtttaaagtatg

SEQ ID NO: 368699 - DNA, 100 bp, Homo sapiens
atcctaccatgtcagccttcccagtagctggaactacaggaatgatgagaagacagcagctgattacaagattttaggtggttcagtccttcacctggtg

SEQ ID NO: 368700 - DNA, 100 bp, Homo sapiens
gtcaaaagatatggcgccatatcaggtatgattcatccagccttccagctctgttatttaaagcaagaacacttctgggagccgaaagccatctgcgaaa

SEQ ID NO: 368701 - DNA, 100 bp, Homo sapiens
gtccaggccatgaagagtcctgaccacaatggggaggacaacttcgcccgggacttcatgcaggaagaagatgagccttaggtctgaacgccgaggaatt

SEQ ID NO: 368702 - DNA, 97 bp, Homo sapiens
caccgtttgccaggcttgcaagaaactcctcaagggcctcttccggcagggcctgcaatgcaaaggatgccccggaggcccagctagccccagactt

SEQ ID NO: 368703 - DNA, 80 bp, Homo sapiens
aactcccaggctcaagcagtcctaccatgtcagccttcccagtagctgggaccacagtggtgaagcagcgcttgcagatg

SEQ ID NO: 368704 - DNA, 75 bp, Homo sapiens
gttaaagggaatgacttcattacaaatacagattctgttcatcttgctctgaaattaaataattctgaactcatg

SEQ ID NO: 368705 - DNA, 100 bp, Homo sapiens
aggtatccgagaaaaaagaacgcctggtgaacggcatccaaaagctaaaaaccacagcctctcagaatcaaaggcatgggaggttgatacctgccggggc

SEQ ID NO: 368706 - DNA, 75 bp, Homo sapiens
tgagatgaaggtcaaagaaaaagttcaaaaactgaaggactctgaagctgagagatagaatctcactatgttgac

SEQ ID NO: 368707 - DNA, 50 bp, Homo sapiens
ttaaatggttgtcacacttgattgtaggattttgtgaaaatggaaaatta

SEQ ID NO: 368708 - DNA, 82 bp, Homo sapiens
cgtggagatctggaagatcaagaagctcattaagagcttggaggcggcccgcgggtatagaacaagatgcagtgaatacttt

SEQ ID NO: 368709 - DNA, 90 bp, Homo sapiens
actgcagaatggctcagacttgcagttcatcgaaatgcagattttaacttctagtcatggcgaatgatcgcaggagagcacagactggac

SEQ ID NO: 368710 - DNA, 75 bp, Homo sapiens
tgccattccagcactggactcatggaggctgagcatttattcagagaccttcagagaagacatggcttccagaaa

SEQ ID NO: 368711 - DNA, 98 bp, Homo sapiens
accatcagtgacctggacctctcgggggcccggctgctcgggctgaccccacctgaggcagcggaggaggagaaagagatggacctcccggactcggc

SEQ ID NO: 368712 - DNA, 100 bp, Homo sapiens
ccgctccgagcagtgctacagagacgtgtctgatctaaagaacacttcctcgtgggtactgtataacatggcttcattttactggagaattaagaatgag

SEQ ID NO: 368713 - DNA, 75 bp, Homo sapiens
agacagcgtccacagcctgctcagcatcctggacatcatcacctgcctccggagccagcgtggtggccatagaca

SEQ ID NO: 368714 - DNA, 100 bp, Homo sapiens
aacgttctaaaaagaggcgaaaggaagcaagcagttcagaagagccaaggaataaacatgcaatgaacccaaaagggagatgaccaggatagtgaaaagt

SEQ ID NO: 368715 - DNA, 100 bp, Homo sapiens
tatatgcgaatctataagaaaggtgatattgtagacatcaagctctctggcctgacaaccaatgttgtggacattattttggctcatcactttgggcagg

SEQ ID NO: 368716 - DNA, 100 bp, Homo sapiens
gtccaaaacagtttacctcttatctaacagactctgcaggtcctctcagatcttgtgcggaaggccaggagtcggaacattggcatcttccatccatcct

SEQ ID NO: 368717 - DNA, 90 bp, Homo sapiens
cccccggagcctggctcccggctcgggccgcaccgccagggactggggtgagcggcccagctgagctgcccctcctggacctgatgaagc

SEQ ID NO: 368718 - DNA, 87 bp, Homo sapiens
agcttaataaaataaccgtccccgccagtcagaagttgaggttactgaaggacggcctcaaggactctcagttcagcatccgctacc

SEQ ID NO: 368719 - DNA, 83 bp, Homo sapiens
gcttcttcagctctgagaccaccgcagcccactccctaggtcgcaatggaagaagagatcgccgcgctggtcattgacaatgg

SEQ ID NO: 368720 - DNA, 100 bp, Homo sapiens
tgaacccccagcactgccaccaaagatcggaactccaacaagaccctgccctctaccacctgctcccctcccacccggtcactccgtccagcaagcacgc

SEQ ID NO: 368721 - DNA, 100 bp, Homo sapiens
ggagcatgaacgcccctccagccttcgagtcgttcttgctcttcgagggcgagaagctggcgcccatgcggctctacacgctctccaagcgccactttgt

SEQ ID NO: 368722 - DNA, 95 bp, Homo sapiens
ctccaagcgtgaccagctttctgttgggaacactcaaaggtgcagcggaactgctgcctgacgctctgcaacttcagcatccccgaggagctgga

SEQ ID NO: 368723 - DNA, 83 bp, Homo sapiens
gggaggatgacggagctgcagtcggcactgctactgcgaagacagctggcagctctggcaggctgccctgagcacgctcaacc

SEQ ID NO: 368724 - DNA, 108 bp, Homo sapiens
gattccagcatcttggaagcaagtgctccactggaaaataaaagccacgtggagctggccctcagcgcactcctgaagttcgtgcagctggaaggagcgcaccccctg

SEQ ID NO: 368725 - DNA, 75 bp, Homo sapiens
agaccgcggccgggaccgaggctgatccagtgtctctttgggccacttcaggcggggccgagcaatgcaggaggc

SEQ ID NO: 368726 - DNA, 100 bp, Homo sapiens
gtgcatgaagacagcagccacatcattgctttatgtggtatctcaggagattacatttcagcttgaaaaagggtcggtggaatttaaaagaagaggaaca

SEQ ID NO: 368727 - DNA, 75 bp, Homo sapiens
tcttttgaaacacgttctgattaaccaaggagttgatctctctaatgtattagatcttcatgcctttgatagtct

SEQ ID NO: 368728 - DNA, 76 bp, Homo sapiens
tggacagccagccaccacaatgaaaggattactacagcatcccatttcccacacccactactccgctgactgggag

SEQ ID NO: 368729 - DNA, 141 bp, Homo sapiens
tggaatgatgtcgtcagtaatgcctggaatgatgatgtctcatatgtctcaggcttccatgcagcctgccttaccgagagacacgggctcaaggaacccaagagagtggaagaactgcaaaacaagattgtaaattgtctc

SEQ ID NO: 368730 - DNA, 74 bp, Homo sapiens
agcctggctgagctggagctggagctgtcggaagattctgaaaaagagttccacgtcctcccttatcgagtctt

SEQ ID NO: 368731 - DNA, 90 bp, Homo sapiens
ccgggagttacaccgccaccgccagatctggagcagcaaccatttgttccccagtgcagagaaagcgactcttttcctcggcacactgga

SEQ ID NO: 368732 - DNA, 82 bp, Homo sapiens
tcgaccagctgctggacatgtcctattatctccagaagaagaagagaaaaggagaatccgaagggaaaggaataagatggct

SEQ ID NO: 368733 - DNA, 101 bp, Homo sapiens
tgattttcaaagaatgactagcattcctaaggaagaactaccacactgtcctgcaggcctgcagtactcaactgacaatcaatttgtacaacggctcaaag

SEQ ID NO: 368734 - DNA, 83 bp, Homo sapiens
gggatgtcgtctcagcagtgctcgggcgcaggtcgcaatggaagaagagatcgccgcgctggtcattgacaatggctccggca

SEQ ID NO: 368735 - DNA, 75 bp, Homo sapiens
atgatgtggtctacagaccaggaggctgctggaaagtacagacaacaaggcagaaattatattgttgaagatgga

SEQ ID NO: 368736 - DNA, 102 bp, Homo sapiens
tcgccttgggaaggggtcgagggaagcagttagacggctgccgggcggcggctgccgcgcggcacacaataaaattggggaggagttcctgactgacctgag

SEQ ID NO: 368737 - DNA, 98 bp, Homo sapiens
tcttgttgaaatccgaaatttcttgggtgaaaaatatatccgcagggttcggatgagaccagcctctactcttcatggatcttttggatgaaagaaca

SEQ ID NO: 368738 - DNA, 100 bp, Homo sapiens
tggtgtgtatgatggcctggcgacccattcaggcacttatggccatttcagccaggtgtttgttctcctagcagccctcagacctcagtggtgtagcaga

SEQ ID NO: 368739 - DNA, 100 bp, Homo sapiens
taatgaaatccaaaaggaaaactgatcacatggagagaactgcaagtgtccttcgacgggaggtaaaatctgtaaaaactgggtcagttttttggacaat

SEQ ID NO: 368740 - DNA, 74 bp, Homo sapiens
gatgtgaaaaataccacgacaaaaccaccctattgttgacctcctgtactggagagacattaagaagactggag

SEQ ID NO: 368741 - DNA, 83 bp, Homo sapiens
agaagatcatcattaaggacggaggcacggcccctagcagtcttcttgatgctttggaacaacatttagcttccttggaagga

SEQ ID NO: 368742 - DNA, 89 bp, Homo sapiens
cgcgtgacgaccgcattcgtggcaggaaagaccacagcaagattctttcattcgtctcctcctagcctgggggaccaggctcgaactga

SEQ ID NO: 368743 - DNA, 98 bp, Homo sapiens
ggaggacctgctgacactggattcctgaaccaggaagtgcccaccgcgtgccccgattggagaggggaccttctgcaggttgtgcaagaggcctttga

SEQ ID NO: 368744 - DNA, 100 bp, Homo sapiens
ggcagaaagaaattgtaatcgatcgaacgatctggaaaaattttcaaaaggtattggcaggtttacaagagaagatcccacatttaaagtatactttgac

SEQ ID NO: 368745 - DNA, 100 bp, Homo sapiens
ttaccaatgttttggaaggtatcgggctaatcgagaaaaagtccaagaacagcatccagtggaagtctgagtagcgacagtggccttgggggcagctcgg

SEQ ID NO: 368746 - DNA, 84 bp, Homo sapiens
ccctgtgggtgctgggcctctgctgcgtcctgctgaccttcgggaaatcctcattgacgattcaatttgttgaaggccaatttg

SEQ ID NO: 368747 - DNA, 100 bp, Homo sapiens
gttttgaagatgaacaccaagatgaaagcagcagttttcatcatctaagtgaaagtttctgtagaaaatgtttcctgactgcaatgagggaaagcggagc

SEQ ID NO: 368748 - DNA, 145 bp, Homo sapiens
cggaagtgagcggcggcagctgcgaggctcggagaaacaggcgccgcgggctccgcgcccggccggacccgggcccgagcggggatctgacgagcttttctctacttgtgtcactaacggaccgtttatcatgagcagcaactcg

SEQ ID NO: 368749 - DNA, 100 bp, Homo sapiens
gaaagctgcccagccaccagcaaccccccaggagaatgaagtttctagattagaagacataatgcagcatttaaaatcaaagaagcgggaagaaaggtgg

SEQ ID NO: 368750 - DNA, 100 bp, Homo sapiens
gcccatcagcgcggcgctggccgagagccgcggctccgtgtttctggaaagtgacagcagagatagagctgcctgctttgctattcagaaaggattacag

SEQ ID NO: 368751 - DNA, 100 bp, Homo sapiens
gaagactatgatgtttataaaagtgatgtggagctggagtttgtccttccaccgagactacgagggcctttgatgcttagtggaatgtgtgtctaacttg

SEQ ID NO: 368752 - DNA, 100 bp, Homo sapiens
ttcgactagcctctgctgaaaggaaacccagcgtttgctggcagaaccagttcctggcatcaaagccgaaccagatgagagcaacgcccgttattttcat

SEQ ID NO: 368753 - DNA, 98 bp, Homo sapiens
atcggcaggcgagattgcctgacccaggcctgctcggccctcacagggaagggaaaaggccgaggcatcagcgtgtgaagaccgcaaagacgatcccg

SEQ ID NO: 368754 - DNA, 100 bp, Homo sapiens
ggcgtcgccgcatcccggacggtacttctgccactgctgctccgtggagatcgtcccgcgcctgccgcggaagaccctgaagaccctgcgggaccaatgg

SEQ ID NO: 368755 - DNA, 82 bp, Homo sapiens
aatccagtgactgtcaggtcgatcatatatacgggacgtgcaggaaacactgatgccccaggtcctgaccaccctggaggag

SEQ ID NO: 368756 - DNA, 100 bp, Homo sapiens
acatcgatggcctactggggataacattcatgcagaacatcaggagttgatccctgaattttattatctccctgagatgtttgtcaacttcaataattat

SEQ ID NO: 368757 - DNA, 49 bp, Homo sapiens
ctcccaagtagctggtattacagactatgtcttcagcagtggtgcagtt

SEQ ID NO: 368758 - DNA, 100 bp, Homo sapiens
gctaaaactggtcaaagtgctgactctggtaccattaaggcaaaattgaaccatatttatttagagtcagaatggagcgatttgtagtaacagcaccacc

SEQ ID NO: 368759 - DNA, 101 bp, Homo sapiens
tgaaacttgtaaatcaatcacatattctttagtttcgccgtgaggaagatgcggaaaaggctgtgattgacttgaataaccgttggtttaatggacagccg

SEQ ID NO: 368760 - DNA, 88 bp, Homo sapiens
cttttttcattgttccactggacgctcatcagagggaagatctttttcctcaattgatgacttcaaacctgcttctattgacacttct

SEQ ID NO: 368761 - DNA, 90 bp, Homo sapiens
ggccgctatgaagagctggctcggatgctgatggggctggacctgctggtgttcgcccacgaccatggtcctcagaatggttggaatgac

SEQ ID NO: 368762 - DNA, 80 bp, Homo sapiens
cggatggcccccggtgcaagaggcgcaaacaagccaatcccaggaggaaaaacgacgactgcaagaacattgccaacatc

SEQ ID NO: 368763 - DNA, 75 bp, Homo sapiens
ctgcaccggaaatgtgcctaccagtggttagcaggaagaagatgagccttaagtctgaacgccgaggaattcatg

SEQ ID NO: 368764 - DNA, 75 bp, Homo sapiens
agcagttgtatgtgtagaaagtgaaatcagaggagatgtaactatcggttgaactcccaccacctgatcttggac

SEQ ID NO: 368765 - DNA, 74 bp, Homo sapiens
cgccagggtccagggtccaggttccagcgcccggcggcccagcattttgaaagcgaagcagaagccgtagaatc

SEQ ID NO: 368766 - DNA, 74 bp, Homo sapiens
aagagcaagcctaactcaagccattggcacacagcaattaccagctctggctgggtcgccacaacttgtttgac

SEQ ID NO: 368767 - DNA, 74 bp, Homo sapiens
caggtgaaggccagtgctctcaaggcagctgagtatgtcccagagaaggtgaagaaagcggaaaagaaattaga

SEQ ID NO: 368768 - DNA, 50 bp, Homo sapiens
gaggagactcctgaccctcagaatgtatgccaccacgggctgttccctga

SEQ ID NO: 368769 - DNA, 75 bp, Homo sapiens
ggctgccgtcatcaccatcaccttcaatccgctctactggaatgtgaatcctcactatggatgggctcattgagg

SEQ ID NO: 368770 - DNA, 98 bp, Homo sapiens
ctgtccagcccaagcctgactatggcttctcagtgaatggacagctcattggcaacaaggccaggagccctgggcagcatgacggcacgtacttcggg

SEQ ID NO: 368771 - DNA, 75 bp, Homo sapiens
actgctcagtgttccaaagattctccgcatctcctctggatgacttggaagactccatgatcggccctgaagttg

SEQ ID NO: 368772 - DNA, 100 bp, Homo sapiens
cagagtacgcagagccccaggacaaagaatgccccatcactgccctccagaacatgctacaaaactgctccagctattattcatggactatccagtctaa

SEQ ID NO: 368773 - DNA, 90 bp, Homo sapiens
cggggatggacctccagatttccttactgtgttctaagaacggaagcatctgggctggatggaatttagcatcaagcagagtcccctttc

SEQ ID NO: 368774 - DNA, 87 bp, Homo sapiens
agggcctgcagcgggagctggacggcgagcgcgagcggcgcgagaaaggctgaaatctctttaatgatggagggaagcaggcagacg

SEQ ID NO: 368775 - DNA, 100 bp, Homo sapiens
catcagcaccatgtctgtgggcatcgaccacttggctttggatgaaatcaagaagcgtgagattagtcgcctggacctgggtctaagtgtggaggtatgg

SEQ ID NO: 368776 - DNA, 83 bp, Homo sapiens
caacttcggtgcctctctccagcagactgcgcagcctcccgcgacgatgcccctcaacgttagcttcaccaacaggaactatg

SEQ ID NO: 368777 - DNA, 100 bp, Homo sapiens
ccttcgggagaggatatgtagcgaggaggaacgcgctaaggcaaagcacctggtgttaagtgtgatgcttccataatacatttggatgctgtcagctaag

SEQ ID NO: 368778 - DNA, 50 bp, Homo sapiens
cggagctttcgcagctggagaagctgggctcaaaatgcagagaactcaaa

SEQ ID NO: 368779 - DNA, 74 bp, Homo sapiens
ctccgccacgcagccggccaccgccgagacccagcacatcgccgaccagatggagtcatcagaacccactgtga

SEQ ID NO: 368780 - DNA, 75 bp, Homo sapiens
ctcagcagcaagcacagagtatgaccaccactattaaacctacagcttactccttgatgtggaggactatgaaag

SEQ ID NO: 368781 - DNA, 75 bp, Homo sapiens
gaccagcgggcgggggcccacgagctgcctgctgtttcccggggagatcatgaaacgaggtcgccttcccagcag

SEQ ID NO: 368782 - DNA, 118 bp, Homo sapiens
ctgaaccacatgggctggccagagcacacaccaggcactgtctttcccagggaactccgatgaagtgttccaacaaaatgagcgagtgaaccaagaagaggatgacattagatccagg

SEQ ID NO: 368783 - DNA, 75 bp, Homo sapiens
gtacccaccggagcctggcgcagcctccctctattaccagctatatgttctcctttcagccaagacctttcacca

SEQ ID NO: 368784 - DNA, 75 bp, Homo sapiens
cattgctgctccttgcagccctggctgtggctacagggccagggctgtgggacagatgatgtctaccatgttcta

SEQ ID NO: 368785 - DNA, 100 bp, Homo sapiens
cttttggctgccctgagctggcagtacctgaccactctctcccagggtcagtttgaaaaggaggatcgagctcactgtggagtatccatggagatgtgga

SEQ ID NO: 368786 - DNA, 95 bp, Homo sapiens
ctattgctgcaaaaaatgcagaactagaacaggagcttatggtggataattactgtaccttcctcatggaaaaagttttatttaaagtgttattt

SEQ ID NO: 368787 - DNA, 100 bp, Homo sapiens
gcaacaggaagcataattctgtgcctcttcagagaggtgagagacttcagaggctgccctttcttttcatctgctgcttgtgaaaggaaaacatcttggg

SEQ ID NO: 368788 - DNA, 97 bp, Homo sapiens
tcttcccaacctcatgaatctcatcgccaccatctttgtctttgcagtggtcatctatttccagcctagactcaagtctgggtttcagctgccgcca

SEQ ID NO: 368789 - DNA, 114 bp, Homo sapiens
agctgtcctttcaggaaggagccattatttatgtcatcaagaagaatgacgatgaatgcccaggaaaaccatgggctggctgtgcccaccccctcggttccagatgattttgca

SEQ ID NO: 368790 - DNA, 87 bp, Homo sapiens
gctgtatggagtcatggttacactgaagcttcgggggtaaaaaacaactccatcaagtatgatggtgaaggatgaatatgtgcatga

SEQ ID NO: 368791 - DNA, 100 bp, Homo sapiens
gcggcgcggccggctgccggaaaagtatgaagagtgtaaagacctcataaaatttatgctgaggaatgagcgacagttcaaggaggagaagcttgcagag

SEQ ID NO: 368792 - DNA, 100 bp, Homo sapiens
caaaagtggtgcgcataggcaagtcatttatgaaggagagcagttgaagacatctcttcatcgaggactaacccctacagttatgcaatgagtactgaag

SEQ ID NO: 368793 - DNA, 82 bp, Homo sapiens
gcagaatctccaacaactttacaggtatatttgcttacttaaactaccatgttcctcgaacgagacgagaaatcctggagac

SEQ ID NO: 368794 - DNA, 74 bp, Homo sapiens
ctggctcttgccctcatcctggttctggaatcctcagttcaagtaggtgatttcaaatcggagaagtccaacgg

SEQ ID NO: 368795 - DNA, 51 bp, Homo sapiens
aagggccttactccttcacagatcggtcgtggagggcccccaagacccaac

SEQ ID NO: 368796 - DNA, 100 bp, Homo sapiens
tgtcctgtttcccagaggaacagttcatttcaacagccagggagaaagcctggatgctcaagttatgatcctcttctgaaatcaggaatacgaccccaag

SEQ ID NO: 368797 - DNA, 101 bp, Homo sapiens
acttcattggcagttcagcagatgaatctgcagatgatctttgcacggtgcagattccaacaacttggagaacaattgctctaggtcgtaaccagcctttg

SEQ ID NO: 368798 - DNA, 101 bp, Homo sapiens
tctgtgcagtggcacctgcgcgaagctggccaaagcctgcccagacggctcacctgtgcgggatggaacaaaagaaaacctcgtcattaaagacaaattta

SEQ ID NO: 368799 - DNA, 100 bp, Homo sapiens
gcagcacagatgggcaatgaagcagtgcagcagattctgagtggcctaatttgtagatatcctcaagaagattatgagtcattctcactaccggaatctg

SEQ ID NO: 368800 - DNA, 100 bp, Homo sapiens
cttggatattccagtcgatgtatttgtacaccaattatctgatgatggccgctatgtcttgttatcaataagggaaggatgtgatccagtaaaccgactc

SEQ ID NO: 368801 - DNA, 97 bp, Homo sapiens
aaaaggcgctccgtcatggggatccagacgttccagtctcatcagattttccatgtcctggtggtggcagcagcctttgtccacttctatggagtct

SEQ ID NO: 368802 - DNA, 75 bp, Homo sapiens
tcctggacttcgcctttcccgagccctggaggtggggagaaaagaacctatctacaagacctcttgtgctttgac

SEQ ID NO: 368803 - DNA, 51 bp, Homo sapiens
tgcagtctcatgggcagtggtttgagattggatttgtcctgtatcccccca

SEQ ID NO: 368804 - DNA, 51 bp, Homo sapiens
aaggcgggcggcagaggcgatcagttccagggtctccctccactgctgtag

SEQ ID NO: 368805 - DNA, 97 bp, Homo sapiens
agaatttgaaaaatgaagatgatgtagacactggactattagatattgaagcacagattcgagaaattcaaggcaagaaggcagctcttgatgaagc

SEQ ID NO: 368806 - DNA, 75 bp, Homo sapiens
agatgaagtttgcagcctcaggcggctttctccaccacatgactgaggctgatgtgaatccaaaggcctatcccc

SEQ ID NO: 368807 - DNA, 83 bp, Homo sapiens
tgctggggacagctgctggtgtggttcggagccgcgggtacggacattgctgcaggagaagaggttgccatcaagcttgaatg

SEQ ID NO: 368808 - DNA, 75 bp, Homo sapiens
tgactactggggccagggaaccctggtcaccgtctcctcaggtacaactccaaaaggagacattggagaagaacc

SEQ ID NO: 368809 - DNA, 75 bp, Homo sapiens
acgctcgctccgctcgtcccgctcgtcatggcctacccgggatacggaggagggaaatgcactcggtgatggaaa

SEQ ID NO: 368810 - DNA, 50 bp, Homo sapiens
aggatggcggagtcggggctcctgacgaagcctggaaataatgtacgtcc

SEQ ID NO: 368811 - DNA, 75 bp, Homo sapiens
agcaaatctacttttgggttacaaaaatccagaccagagacagatgggaccgtgttcagaattcacacaaaagct

SEQ ID NO: 368812 - DNA, 97 bp, Homo sapiens
tacatgctttttattacaagactacggagcataggaggaaaattcatcatctggcttcagcaaccaggagggattgactgagatcttaacaacagca

SEQ ID NO: 368813 - DNA, 100 bp, Homo sapiens
tgtttaccttggaagaactccgtgcccagatgctcataaggattgtcctctttctacaaaagctgagatctgtatctgtggacctgaatgttgatccctc

SEQ ID NO: 368814 - DNA, 100 bp, Homo sapiens
cttgactggtcttacattgctgcatcaagaaacccaagctgctgaggcctgcaacgagttcaccacccacgtgatgaatctcctgcgagagcaaagccgg

SEQ ID NO: 368815 - DNA, 98 bp, Homo sapiens
cagcgcagggccatggaggaggcggccgcagctccgaactctaagaaggagctgatgtggaggagcagctgagacagttcaagatgacgaccacagta

SEQ ID NO: 368816 - DNA, 90 bp, Homo sapiens
ctgaacttaggtgtaaaccattgccctggcagagggaacctacccagtccattgctgcctgctacaagaagctgacgggtcgcctcatgc

SEQ ID NO: 368817 - DNA, 75 bp, Homo sapiens
tccagctcagagacccctgccaggaccctgcccttcaccacagagagcatcagtgatgtcacgtttggagcaggg

SEQ ID NO: 368818 - DNA, 100 bp, Homo sapiens
aatgatttttccagaaggaacttgtacaaacaggacctgcctaattaccttcaaacctgggcattcagtacctgactgcattggagagtctcaatctcta

SEQ ID NO: 368819 - DNA, 75 bp, Homo sapiens
aaggagtatgtacacctggtatgccagatgagaatgacagattatgagcctcaaacaatttgtgagcatctccag

SEQ ID NO: 368820 - DNA, 82 bp, Homo sapiens
acggcaaagttttgcagatcttcaacaagaggacccaggagaaattcgccctcaaagagccattccgtagtgccatcccgag

SEQ ID NO: 368821 - DNA, 99 bp, Homo sapiens
accttcacccagcatttcatccctcgtcgaaaggattggattggcatctttagagtctatgttaacaatgaatgggcaaccagtgttggggaaggaggg

SEQ ID NO: 368822 - DNA, 90 bp, Homo sapiens
cgttcggcctggaggagccgcagtgggtcccggacaaggagtgccggtggtggtgtgcacattgagccccggtatagacagttcccccag

SEQ ID NO: 368823 - DNA, 100 bp, Homo sapiens
ctcagttgtgcgttgcggccagtcgccactgcttcccagcagaagtgcatcgtgatctttgccctggtgtgctgctttgccattctggttgcactgatct

SEQ ID NO: 368824 - DNA, 100 bp, Homo sapiens
cgaacgacgcgggcgagcggggctttggacgccggtggagacgcaggcgagatgccgctcctacgaggactgctgtggctccaggtgctgtgtgcgggcc

SEQ ID NO: 368825 - DNA, 98 bp, Homo sapiens
aagctgctggataattttatcccagggtggctgaatcacggaatgaggaccttatcatgtccttcactgtatccatggcaatcgggctggtacttgga

SEQ ID NO: 368826 - DNA, 75 bp, Homo sapiens
actaactgccaagagagaatccagcattggacctagatgtgaaggctggtggaggctgtgtaatgaccattggag

SEQ ID NO: 368827 - DNA, 100 bp, Homo sapiens
gtgacaggctcagacgcatcgggaccggacccgcagcttgcggtcaccatgggcttcacggggttcggacctgacatgaaacgcagatctagtggcagag

SEQ ID NO: 368828 - DNA, 50 bp, Homo sapiens
cggagcagtatttcaatgtggagactgaccactgctctaagcagtgttgg

SEQ ID NO: 368829 - DNA, 74 bp, Homo sapiens
agacaacatcaaataccagcctaaaggggggcagtcctttgagcgagtgttggtagaaaacaagctgcatggcc

SEQ ID NO: 368830 - DNA, 75 bp, Homo sapiens
gccaaacaaataagccatctcttcagttaattttggatccgtctaacacagaatccacattcatctcaatggaag

SEQ ID NO: 368831 - DNA, 100 bp, Homo sapiens
aataggagctggggagcccttctgcgccacaggaatttagataatgggctgtgtgcaatgtaaggataaagaagcaacaaaactgacggaggagagggac

SEQ ID NO: 368832 - DNA, 75 bp, Homo sapiens
catgatgaggtggccaacaagcagaccatggaggagctgaaggacctgctgaagaatggcaccttgaaaattatc

SEQ ID NO: 368833 - DNA, 75 bp, Homo sapiens
acgtggagcaccacgacttccccagcatcccgggctacaacctgccgctgatctctgttgaggagctggcgcgga

SEQ ID NO: 368834 - DNA, 74 bp, Homo sapiens
gagatgctgtgcataacaagttatggctccagaccctcaaactgacacaagacctacagagaaaaccctttgcc

SEQ ID NO: 368835 - DNA, 100 bp, Homo sapiens
gtcgtccggaaatccattgcccgtgttctcacagttattaaccagactcagaaagaaaacctcaggaaattctacaagcggctatgtgactacgtttgtg

SEQ ID NO: 368836 - DNA, 75 bp, Homo sapiens
gcaagttcattggatcaaacatgtcacaagagtcggacaaacccaacatgagtgaagtttcctgcaagaaacggg

SEQ ID NO: 368837 - DNA, 100 bp, Homo sapiens
ggcctctccaccgtgcctgacctgctgctgccactggacaggaagatgtcacccaagcgcatagctaaaagaaggtcccccccagcagatgccatcccca

SEQ ID NO: 368838 - DNA, 98 bp, Homo sapiens
ggactttagtgaggatcaggggtacccagaccctccaaatccctgtcctgttggaaaaacagaggagaaggcagagcccccccaggctatgaatgccc

SEQ ID NO: 368839 - DNA, 75 bp, Homo sapiens
ctgtcgccttcgcctcctaatccctagccactatgatagcctgggctggaagctcttctacgtcacaggctgcct

SEQ ID NO: 368840 - DNA, 100 bp, Homo sapiens
cccaggggtcgctgtcgcctgctgctggctcctcactggctcctgggtagaactgcacttcagcaataatgggaacgggggcagcgttccagcctcggtt

SEQ ID NO: 368841 - DNA, 100 bp, Homo sapiens
aaatcatgtctgctgctctaggcccatagtcagcagcagctctgagccagttgcagctcacctaactgatttattcaagcagtctttggctacgcctcca

SEQ ID NO: 368842 - DNA, 74 bp, Homo sapiens
tggagacccattcagataacccactaaggatgtaattggctgtactcaggagatggatttcattctttggcctc

SEQ ID NO: 368843 - DNA, 99 bp, Homo sapiens
cctgcatctcagtcctgacatcgctgtccctggagcatcctccgctggagctggagcttgacaggtttctggtcctcataccgtgtggttgagtgaaat

SEQ ID NO: 368844 - DNA, 75 bp, Homo sapiens
gatcggcatgtccaccaaggcaggccatgtagggcaggaccgggtggactttggccagactgagccgcacacggt

SEQ ID NO: 368845 - DNA, 83 bp, Homo sapiens
ggaaccagatatcttgaaaagctgccagaaaggtgcccgtggttgacacgagctgtgtccccagctgttcccgtctacaatgg

SEQ ID NO: 368846 - DNA, 90 bp, Homo sapiens
cttagcgatggcctggaaatccggcggcgccagccactcggagctaatccacaatctccgcagctatagaaagcgcaattggtggtaacg

SEQ ID NO: 368847 - DNA, 90 bp, Homo sapiens
cgccatgttttatacaaaccgagtcctcaaagagtacaaagatgttgtggagccccctggagctgagatcaggatgttccgcttcatgag

SEQ ID NO: 368848 - DNA, 100 bp, Homo sapiens
aggcggaggcagaggtggaggcgctttgaaaggttgaaatcacaaagattagacacctttttagataggtgttcttcagcaccactgacaacacggttct

SEQ ID NO: 368849 - DNA, 83 bp, Homo sapiens
tgatctgcccatcttgttactccctagcagtgtggtaagggaaatcctcattgacgattcaatttgttgaaggccaatttgtg

SEQ ID NO: 368850 - DNA, 98 bp, Homo sapiens
cgggctccatccgggaagccggtggggccttcggaaagagagagcaggctgaagaggaacgatatttccgctccgtggccgccctgacggaatgcatg

SEQ ID NO: 368851 - DNA, 100 bp, Homo sapiens
ttgtcatctgtgtactgtgtaacttttgatcgaactggcagacggatatttactgattcggacggagagcgcgaggactcggcggctgagcgcgcccgac

SEQ ID NO: 368852 - DNA, 90 bp, Homo sapiens
gaggaaattcatcgtttgggttcaaaaatcgttccccatcaggaagtcctcgcagaagtgcaagtcctgaaagaatggactgaagctctc

SEQ ID NO: 368853 - DNA, 83 bp, Homo sapiens
actctgaggctgatatgcaatgtcacttacaacattaatcagatactgcatttaaggtcacgagaagagaatgccttctagat

SEQ ID NO: 368854 - DNA, 141 bp, Homo sapiens
tgagcggaagcttcgaggcatgatggtcgactacaagaagagggcggagcggagacgggagtattatgaaaagatcaggacaaaagcatgtcttcccttcctgggtgcattggtttggatgcagcaacagctacagtggag

SEQ ID NO: 368855 - DNA, 75 bp, Homo sapiens
ttgggatagcagattgtttgcctactccaggtctatcagccacagtctctgcaagtttccaagagcagcagaaaa

SEQ ID NO: 368856 - DNA, 88 bp, Homo sapiens
cccagctgctcctggtgcagtggaagcagaggcacccacgctcctacaatgatccagtttatggaaaaggaaaacttggagaaatcca

SEQ ID NO: 368857 - DNA, 90 bp, Homo sapiens
ggaaacttgcagagaatgaaatcactttgtgtcaaaaagaaataactcagctgaagcatcagacctcacctccacccgcgacaacccagt

SEQ ID NO: 368858 - DNA, 100 bp, Homo sapiens
gggaaactgcctgggctcaggagttctgaatgtcagcatctgcaagaatgcctgggcagaggagcagaataagttggtgcatggcggaccctgcgacaag

SEQ ID NO: 368859 - DNA, 100 bp, Homo sapiens
cagacattgaaatagttcgcagagttttttcttctaaaaggagtaatgtaaactttgtgacagagatatttcgtcaggaaaagaccagtgccctcagtct

SEQ ID NO: 368860 - DNA, 100 bp, Homo sapiens
ctggttgttccgttgcgagctgcagctgcgatctctgtggtaggcccagaattttcaagaaatgattcctgcctttggaattttcagactgctgatcatc

SEQ ID NO: 368861 - DNA, 83 bp, Homo sapiens
gtcctggctcttgccctcatcctggttctggaatcctcagttcaagctacccgtacagtgaggacgcccgccagggtgagcag

SEQ ID NO: 368862 - DNA, 83 bp, Homo sapiens
gacacacaaagaatagagttgagcctgtgggacacttcgggtgtgagatgcacaatgcgaaacctaggccccagcttttacac

SEQ ID NO: 368863 - DNA, 99 bp, Homo sapiens
caaagtattagacaagaaatggaagcttatacacccaagttaactcagcttatcacacagactttcagccaccacaatcagctggcacagaagacccgg

SEQ ID NO: 368864 - DNA, 100 bp, Homo sapiens
cccacgcccgcctccgccaactttcacgctgcctcggcggcccggcccggctcgacgccaatgggacctgagagtcagtatactaagactgcccaggaga

SEQ ID NO: 368865 - DNA, 100 bp, Homo sapiens
ttgtcggattaccccgacattctccacctcctgggaggccagccattcccaaatgccccaaggatgaagaacggagacgttttctggatatgccgcagaa

SEQ ID NO: 368866 - DNA, 101 bp, Homo sapiens
ctggttttagttttaaggagaaaatatttattgctttagcatggatgcccaaagctacagtacaggcgcctgtgtctggcagagctggtgtgagacgagac

SEQ ID NO: 368867 - DNA, 50 bp, Homo sapiens
gttgacttggggatccaaaggcacagtggtgtttccccaggatctgctgg

SEQ ID NO: 368868 - DNA, 82 bp, Homo sapiens
cgggcgggcccgacacacgccggaggagccgggtgagaagccctaccactgcaactgggacggctgcggctggaagtttgcg

SEQ ID NO: 368869 - DNA, 100 bp, Homo sapiens
ctcggtttaggcctgtctgcggaatccgcaccaaccagcaccatgcccatgatactggggtactgggacatccgcgggctatcatggtgaacttacttca

SEQ ID NO: 368870 - DNA, 75 bp, Homo sapiens
agtaaactgaccatgggacctggggagtcagccagcctgaaagagcaggatggatcttgatgtggttaacatgtt

SEQ ID NO: 368871 - DNA, 100 bp, Homo sapiens
ggatcaaaatcagacagtgaagatataacaagatcagcaaatctaactgaccaggtttttcgttggaatatacgttgcacatttatggcgattctgagtg

SEQ ID NO: 368872 - DNA, 100 bp, Homo sapiens
tttagaaaaagctattggatcactgaaggaagtaatgacatggttaatagtgaaagattcctttttattgtatatgaaaccagacagcggtgccattgcc

SEQ ID NO: 368873 - DNA, 75 bp, Homo sapiens
gcgcacttggaatagtagcaggcggcggcggcggaacgccaggcagagtgaaccagaggaaatgcctccagaagc

SEQ ID NO: 368874 - DNA, 75 bp, Homo sapiens
gtcacatcagcgttctgcgtcatgggggagtgctgatcaactaaaagagaaacctccacagctgttgagaaaaag

SEQ ID NO: 368875 - DNA, 100 bp, Homo sapiens
ggcaacttatgcaagaaactgttgaattagacccgtttcctatagatgagaaaccatacaagctgtgaatgttgtaccatctttgggtaggcagacttcc

SEQ ID NO: 368876 - DNA, 100 bp, Homo sapiens
tccggcagctggagatgtccgagcccaaggcaattgatcccaagttgtcgacgaccgacagggtggtgaaaggatggagggtacagagtctgcctacatc

SEQ ID NO: 368877 - DNA, 90 bp, Homo sapiens
cagccctatgagcatctcatctgcggcaagaacgccaatggttctcctgaaaagaaagctgaacattcatctataaatcaagaaaatggc

SEQ ID NO: 368878 - DNA, 100 bp, Homo sapiens
acatggggttgttctcataataattcagatggagaatatatggctggacagctagctgcttatggctataaaattacagtgtttcctgaggttataggcg

SEQ ID NO: 368879 - DNA, 100 bp, Homo sapiens
caaggagctaaagcagcgtgcgttcagccctggggaacgatttgtaaccctggaccgcggaagtctatgtctaagctgctttacatccgcctggcgctgt

SEQ ID NO: 368880 - DNA, 50 bp, Homo sapiens
agcaatgccttcaaaacttggaacagagaagatggcgaattagaagatgg

SEQ ID NO: 368881 - DNA, 95 bp, Homo sapiens
gttacaagttggcttatgagtggaacatggctagcaggaatgcttactgttgcgtggttcgttattaacaggaaatgggtcctgatgaatatgaa

SEQ ID NO: 368882 - DNA, 100 bp, Homo sapiens
gcggactccagacagcgaccccagatgaagattggctctaccagtgcacctggacagggaggaatcctggctcagcgggagtttgacaggcgattctccc

SEQ ID NO: 368883 - DNA, 101 bp, Homo sapiens
gcggccggcacatcctctcggtgttcccgctggcggcgggcatcttcttcgtgaggctgctcttcgagcggatgccaaagaagagtgaatggcccacaaag

SEQ ID NO: 368884 - DNA, 82 bp, Homo sapiens
ttttccagaaggaacttgtacaaacaggacctgcctaattaccttcaaacctgtttggtgccctggttgtcagatgttggaa

SEQ ID NO: 368885 - DNA, 100 bp, Homo sapiens
caattcttcgacatactctccagcttcaagaaggatctgagtctctccctgcggagacagccctgaagaactcctgtaacgtcaagctggcaatttccaa

SEQ ID NO: 368886 - DNA, 50 bp, Homo sapiens
caggagacgagtccccggttgtcatgagacgtctcccacaacctgctccg

SEQ ID NO: 368887 - DNA, 100 bp, Homo sapiens
agatgaagatgaaggaattcctagtgagaatgaggaagaaaagaaaatgttggacaccagagcccgagaattaaaaggaatttgagagcgtattttgcgg

SEQ ID NO: 368888 - DNA, 107 bp, Homo sapiens
gctccgtggccttagctgtgctcgcgctactctctctttctggcctggaggctatccagcggagtatgcggttaatgaagttgtggcagggataaaagaatacttca

SEQ ID NO: 368889 - DNA, 75 bp, Homo sapiens
gcgtctgccgcagagtcggcacctgaaggacatggaggtggagttgtgctcatatctggaacaggctccaactgc

SEQ ID NO: 368890 - DNA, 100 bp, Homo sapiens
tgctactgcacggtgaacctggaccaggaggaggttttcaggaccaaaattgtggaaaagtcactctgtgacaaagcataaatcatggacaccagagaat

SEQ ID NO: 368891 - DNA, 75 bp, Homo sapiens
aagaggcaaaacttcggacatagaggccaaccaacctttggagtgctgaagctgctgaaagatggcagaagaagt

SEQ ID NO: 368892 - DNA, 103 bp, Homo sapiens
gccggctgctccagtactcctgttgccccgtggtggtcctcccagacaccttggagagtggtagaggcacagaagatgatgaggctgttgaactgtggaggca

SEQ ID NO: 368893 - DNA, 73 bp, Homo sapiens
aaaatgtcaacaaattgatgggattttctgccgtctcttggcaaaaatggcaaataatgatgctgttctgaag

SEQ ID NO: 368894 - DNA, 100 bp, Homo sapiens
ctgaacaacaagcagagttgattcttcaaagttacatggacacagaacagtatgaagaagcagtacgagactatgaaaaagtataccagacagagaaaac

SEQ ID NO: 368895 - DNA, 75 bp, Homo sapiens
gaggatgatgtttttggtgaaggtcctcgatgggcttcctggaatattggtgtgtttatttgcatcagatgtgct

SEQ ID NO: 368896 - DNA, 82 bp, Homo sapiens
tacaagctcctgcgggccggcggggaacttgctactaccagcaccatgccctaccaatatccagcactgaccccggagcaga

SEQ ID NO: 368897 - DNA, 74 bp, Homo sapiens
gcctcaggcggctttctccaccacatgatgtgaaaggaccacccacccaccgtctgtcttgtggtcagtcaccc

SEQ ID NO: 368898 - DNA, 75 bp, Homo sapiens
aggccgtggggaggctgcctggaacaacatgcagcaatcaaggagaccgcgaaggcgtacattcccgggtgttgc

SEQ ID NO: 368899 - DNA, 126 bp, Homo sapiens
cctctttaaaaattccgccgaaaaagagaagacgctttacccgactctttgggccgttatctcacgcatgatgggcccacctcctggtatgagacctcctatgggtcccccaatggggatcccccc

SEQ ID NO: 368900 - DNA, 100 bp, Homo sapiens
gaaaacaacttcgagggcagaccttgaaaagatcttttgaggtcgaggaggtcgagacacccaactccaccccaccccggagggtccagactcccctact

SEQ ID NO: 368901 - DNA, 100 bp, Homo sapiens
gcctatctcttcaagtacatcataatcggcgacacagctgttccatttcctccaagtcaccggcttacagcaaaagaagtgtttgataatgatggaaaac

SEQ ID NO: 368902 - DNA, 82 bp, Homo sapiens
gccgagcgggcggcttcctggcctgggcgctccggtggcggcggagcagaaaaatatggctcaggagactaaccagaccccg

SEQ ID NO: 368903 - DNA, 83 bp, Homo sapiens
caagcaagggctgtatgagctctcagcaagcaactttgagctgcacgttgcacaaggtgaaagatatgatcctgagcccaaat

SEQ ID NO: 368904 - DNA, 80 bp, Homo sapiens
gaagcgttgatcctgcagcccaaggtgacggaggccatcgaagacggcaatttggaggaaatggaagaggaagtacggct

SEQ ID NO: 368905 - DNA, 98 bp, Homo sapiens
ggagcgcccttcagtcaccagctataaggaggtgctgaggcagtgcccattagcccttgatgccattctaggggaaagctctggcaatttaaatgacc

SEQ ID NO: 368906 - DNA, 48 bp, Homo sapiens
ctttgggcgtcccattgccatgataactgaactgcttaatgatgtgga

SEQ ID NO: 368907 - DNA, 100 bp, Homo sapiens
atggatgcagaccccatgcacaatccgtgattctaactgcaactatgaggcctttatgaacattattaaattgagtgacaatattggagagctagaagca

SEQ ID NO: 368908 - DNA, 100 bp, Homo sapiens
aaatcgtcgtagtgggaacgcagattcctgacattcagacaactgacttgtaactgacttataactgacttgtaatacactgctactatatcaaaccgac

SEQ ID NO: 368909 - DNA, 51 bp, Homo sapiens
agatgaagcattgctccaaaatacaggtccggcccggagcggccatgtccc

SEQ ID NO: 368910 - DNA, 90 bp, Homo sapiens
tggcccctccgcctcctctctcctctcccagttccgcagtccttcctggcaaacaggttaatttggagtggcccctggagtcagtttcct

SEQ ID NO: 368911 - DNA, 100 bp, Homo sapiens
acagaatcgcgtttggctgtgctggctttcatgagaaggacaagaagccatattgccgaaaggatttcttagccatgttctcacccaagtgtggtggctg

SEQ ID NO: 368912 - DNA, 82 bp, Homo sapiens
cagagccccagctcctgtctggtctgtgagatgtcctcactgtttcaggagctccttccgcttccagccgttcgagtcctat

SEQ ID NO: 368913 - DNA, 97 bp, Homo sapiens
gttcccaaccctgtaatcaacccctaccagccagcacctccttcaggttacttcatggcagctatcccacagagaacaaatccgtcaaggcctagaa

SEQ ID NO: 368914 - DNA, 100 bp, Homo sapiens
tcccagcctcaggcgtgcgcggacggtgtgcgggaggcatacaccatacatggtacagccagagtaccgaatctatgagatgaacaagagactgcagtct

SEQ ID NO: 368915 - DNA, 100 bp, Homo sapiens
gctgcggtcagcgcttcgatcctgagaccaattccgacgaacagctttgctgagccatcaaggtctaatggaagcatggttcggcattcttcatctccat

SEQ ID NO: 368916 - DNA, 82 bp, Homo sapiens
cgtgcacgcagcccggcgggaggataaagaccaccacggtacatgtcccagagcaagcacacggaggcccgggagctcatgt

SEQ ID NO: 368917 - DNA, 74 bp, Homo sapiens
ttatagaaaatatggatctttacatgttgaatccttgcagcactaaaatttgtgcaattcctgggtcataggtg

SEQ ID NO: 368918 - DNA, 100 bp, Homo sapiens
caagcgactctccatggtttctctcaggttctgagactctaggcaggctggcaggcaacaccttagggaaaagaagcccatctgtgtccagagatcagaa

SEQ ID NO: 368919 - DNA, 50 bp, Homo sapiens
agagtctggatggacatttgcaggaaggaattacggagatatagaattgc

SEQ ID NO: 368920 - DNA, 100 bp, Homo sapiens
ttcctaccgaaaccctgcagagggaacctggtacatccagtcactttgccagagcctgagagagcgatgtcctcgaatctcgctctgtcgcccaggctgg

SEQ ID NO: 368921 - DNA, 100 bp, Homo sapiens
gaagactaaatgaagattttaggcggtatcaaatggaaagtttttccaaatattcatctgtacaggaaaaatatattcagggggaagagatgtaatagat

SEQ ID NO: 368922 - DNA, 75 bp, Homo sapiens
gtaagaagaattccagtcttataaagagcagtatagcatcaagttctagaggaattgggagccattgcaaatctg

SEQ ID NO: 368923 - DNA, 75 bp, Homo sapiens
ttttcatagagctggactattggaagttgctgggcatattggattttacccatcataggcgctgttctcttaggt

SEQ ID NO: 368924 - DNA, 97 bp, Homo sapiens
agtaaagatcaaaagaattcgaagggagttggtaaacgctggtgcttttgaagatgatgatatcacgcacgttgaaggaagtgtagatcctattcga

SEQ ID NO: 368925 - DNA, 90 bp, Homo sapiens
gttccaggtagacatggaggccgtcggggagacgctgtggtgtgactggggcaggaccatcaggagccagggagtaacgaagagatcaaa

SEQ ID NO: 368926 - DNA, 80 bp, Homo sapiens
gaagaacagctcgagagagcattacaagccagcctctgggaccgaggctggcagcctcgttggtttgttttagataatgg

SEQ ID NO: 368927 - DNA, 82 bp, Homo sapiens
gggctacggggcagatggactcggagcgccccgccgcatcaagatggtgctcatgtggaccagtggtgacgccttcaagacg

SEQ ID NO: 368928 - DNA, 98 bp, Homo sapiens
tgggttcgttttattcagcggcagtggtgctttcccgaatctcagaatgccgctaattcacctaaataagattgatcctcatgctccaaatgaaatgc

SEQ ID NO: 368929 - DNA, 142 bp, Homo sapiens
gagcattctccagggaaaggatgacatatttttggacctgaaacagaaattctggaacacctatatggtgaaaggtgtagcagtcactcggcctacacccacagcatcgaccttgtgaacccagcgacctgactgccttggg

SEQ ID NO: 368930 - DNA, 90 bp, Homo sapiens
cctgatgctttgtttatggtagcctttcagctgtttgacaaagctggcaaaggagaagtaacttttgctgtgagaaaaagccctgagctg

SEQ ID NO: 368931 - DNA, 96 bp, Homo sapiens
atgatttaacaacgttaccagcatccattgcaaaccttattaatctcagggaactggatgtcagcaagaatggtatcttgagaattacaaatgcta

SEQ ID NO: 368932 - DNA, 100 bp, Homo sapiens
gggaaatcgggctgaagcgactgagtccgcgatggagggaatggatccaattacacgtcaagtaggacaacatattgaaatggaaccagagtgggaagca

SEQ ID NO: 368933 - DNA, 50 bp, Homo sapiens
gtatgataccttacttaatactgaatgtatcctgtcaggtataatgtcag

SEQ ID NO: 368934 - DNA, 74 bp, Homo sapiens
cagccgatccagcctgcggagcctgtggggcagatccgagatgagtggggcaatcagatctggatctgccctgg

SEQ ID NO: 368935 - DNA, 75 bp, Homo sapiens
tctgctgctattctccgagcttcgcaatgggcaactacactttccaatgcagtgtcttccctggcaagcactggt

SEQ ID NO: 368936 - DNA, 100 bp, Homo sapiens
ctgccctctgggtcacctggaatgtgttcattatctgcttttatttggaagtaggtggactctcaaaggtttctggcatttgaagtcaaagagtattcag

SEQ ID NO: 368937 - DNA, 96 bp, Homo sapiens
tgggctacaagtaggatggcagatctgatgcaggagacctttctgcatcatgccacgctctgtcagctgcagagaaggatgcacacactgtggcag

SEQ ID NO: 368938 - DNA, 100 bp, Homo sapiens
gtcgtgactccgtggctgcctccagggcacaggtgcccgtggttgacacgagctgtgtccccagctgttcccgtctacaatggcatcatcttcctctttg

SEQ ID NO: 368939 - DNA, 51 bp, Homo sapiens
ggcataacaggacaagagttggaaagacagatcactcatgctaggtatgga

SEQ ID NO: 368940 - DNA, 83 bp, Homo sapiens
cagccacatactatccgtttgttcaggaaccaccagtgacagagttgtcttcaaccaccttactcctccaccgcccgatgaac

SEQ ID NO: 368941 - DNA, 80 bp, Homo sapiens
tcacactccgccgccatcatggtgaagctcgcgaaggatcccatgacagattctgttgtcacgtctccttacagagtttg

SEQ ID NO: 368942 - DNA, 98 bp, Homo sapiens
accatgagctcttggaggcgagcctgctgcgggaggaggagaaggagaagcggcgcctcgaccagctggaacgtaagaaggagacgcagcgcctactg

SEQ ID NO: 368943 - DNA, 82 bp, Homo sapiens
attactagattttctctcaaactacgaggagcagttgcagaagctcgaggttgaactgagagaagtcactaagaacaaggag

SEQ ID NO: 368944 - DNA, 50 bp, Homo sapiens
cagacaccagccccccaccatggttcatgggcgggggtggtgagagctgc

SEQ ID NO: 368945 - DNA, 98 bp, Homo sapiens
gacatatggaccacatgttcctgagcttgagatgctaggaagacttggctggattgccttttgcaattcttacttcaaggcatacccccttccaacga

SEQ ID NO: 368946 - DNA, 112 bp, Homo sapiens
cgcacggtttggccaaagaagcccccatactcccggtgaaaaagttggaaaggtctttcaagttcatgagagaagctgaggaccaactgaaggccattccccagttctgttt

SEQ ID NO: 368947 - DNA, 100 bp, Homo sapiens
agtttttagccttttaacattcaaggattagccaaaccccctaaaggtctccacactgctgtttaacggcacacttgacaatggcttcagcagcacgctt

SEQ ID NO: 368948 - DNA, 99 bp, Homo sapiens
gcctgagggagtcgctgacgggcacgctgactggaggctggcggacaggcgacagcgacctgcggcagccaatatgggaggtccttccagcctcgggac

SEQ ID NO: 368949 - DNA, 101 bp, Homo sapiens
tctacatcaggggacaccgaggaggaggaggaggaggaggtggtgccattctcctcagatgaacagaaacggagggacaatgactcattcttcccaggaca

SEQ ID NO: 368950 - DNA, 100 bp, Homo sapiens
cggacttttgctaactgcggcgggcgagacgttctcaggtctcctctgagcctccggcctccataagacccaaaacagatgacacctcttcccagtcccc

SEQ ID NO: 368951 - DNA, 75 bp, Homo sapiens
acagagcttccggcccgccatgcggagggaagcatacgtgatggctggtgtgggctccccatatgtctcccgcct

SEQ ID NO: 368952 - DNA, 74 bp, Homo sapiens
agtcctccctcatcaactccctccggaggcagcacctcaggaaaggatggtgccatgacaatggtgtgaactac

SEQ ID NO: 368953 - DNA, 96 bp, Homo sapiens
ccccatcttgggacggccagctctaagaattcctgctacgacactgaattcaaccaggagaaggtgggtgcggctgctatttggacgagagttccc

SEQ ID NO: 368954 - DNA, 90 bp, Homo sapiens
ggaactacagagataccttactcggaagattggctttgaggcagtcatgaggattcggtgcaccaaagctctatgttctatgatgaggat

SEQ ID NO: 368955 - DNA, 74 bp, Homo sapiens
tgaggaagggaaagcagcaatttcacaactcaggtgcccaccagaagtatgtccgacaagcctggcagaaggca

SEQ ID NO: 368956 - DNA, 75 bp, Homo sapiens
ccttctgcctcagcctcccgagaaggtactccaaagattcaggtttactcacgtcatccagcagagaatggaaag

SEQ ID NO: 368957 - DNA, 75 bp, Homo sapiens
cgaagcgctgcgctcgcgcccggatccctcagggtgtccgcaatgttgccagtgtctgtctgcagattggctacc

SEQ ID NO: 368958 - DNA, 100 bp, Homo sapiens
aatgcttgaagacagagatttattcgtaatgcgactcaaagctgcacggcagtctgtttatgaggtgtttggagcatctactaaacagattgatgtttac

SEQ ID NO: 368959 - DNA, 118 bp, Homo sapiens
gtggcagacagatgaagaaggcgttcgcaccggaaaatgtagcttcccggttaagtaactctgggtggattttaactacaactcttgtcctctcggtgatggtattgctttggatttg

SEQ ID NO: 368960 - DNA, 75 bp, Homo sapiens
ggcgaagatccggactctgggtgttttgctaccgtgaccgtttagactattgggaagaagttacctgcaactaca

SEQ ID NO: 368961 - DNA, 100 bp, Homo sapiens
gccccaggatgccgtgggccgcagccactcaggactgtcaaaggaaaagcccgatggctccccagtatttattgccttcagatcctctacaaagaaaagt

SEQ ID NO: 368962 - DNA, 90 bp, Homo sapiens
ggtacactataggctcggggaggagctcttgtccctggcaaagcgaaagcgcagtgactctgaggagaaggagccgcctgtgagtcagcc

SEQ ID NO: 368963 - DNA, 75 bp, Homo sapiens
ccagccgggctgccgcccgcgtcccggaagccacgacgtttttccaccacatcaacctgcagtatagcaccatct

SEQ ID NO: 368964 - DNA, 75 bp, Homo sapiens
gtcagaatttcctgtgttccctttgccgctcctggagttcactgtttaccgtggtttctgggcagtcctgatgct

SEQ ID NO: 368965 - DNA, 75 bp, Homo sapiens
ggccgaggaggcagcgcgacctccgcacgaaaaagatcgttcagaagtttaccagaattaaaagatgctgtcttg

SEQ ID NO: 368966 - DNA, 100 bp, Homo sapiens
agcggcagcgtcggtggcgtcgagagcgagcgggcccgggaacggcgcgggtggtagaggaggagccgcgggctcgacggagtctcgctctgtcgcccag

SEQ ID NO: 368967 - DNA, 100 bp, Homo sapiens
caaatcacacgcataatggatgaaaggaaccgacaggtacaaacccgtagtgctgatgaaccaatgacaacatttgttgtctgtaatgaatgtggaaatc

SEQ ID NO: 368968 - DNA, 97 bp, Homo sapiens
ctgtcctaggccaaccagagattcatctttcatgcagtgacatgttgataaaaaatgatgagagggagccggcatcagaaaacaacactgggagctg

SEQ ID NO: 368969 - DNA, 90 bp, Homo sapiens
agtcttctgctggaggttccttcactgtgcgtgctgaccatgggaagcctctgcacatcaaaccacgtctgtgaggaccccagggaccgg

SEQ ID NO: 368970 - DNA, 75 bp, Homo sapiens
tgagatcttcactcggatgtttgctgaccctcatagcaagctgagcgggctttggacaccatgaactttgatgtg

SEQ ID NO: 368971 - DNA, 90 bp, Homo sapiens
tggatatctctactcgctccaaagtacgctacttcctgaagaataaggtcagccctgatttgtgcaatgaggacggactcacagccctac

SEQ ID NO: 368972 - DNA, 97 bp, Homo sapiens
cctcacccatcagaagcgatgagccagcctgcagagccaagcctgatgccagcatgtcggtcctgaccgccagcctgtcgtacatggtggggatgat

SEQ ID NO: 368973 - DNA, 74 bp, Homo sapiens
gtacgccacctgggaggtggaccggagctcgtccagctgcgtgcctagaactttcacgatggccgtaaagcaca

SEQ ID NO: 368974 - DNA, 83 bp, Homo sapiens
aagcagccaaccatgctcaacttcggtgcctctctccagcagactgcggttatcaatactctggctgaccatcatcatcgtgg

SEQ ID NO: 368975 - DNA, 75 bp, Homo sapiens
ggggcgacgaggcgggacgtcatggaagtgggagtaggttgcatctttgttgaaatgatccaaggagttgctgct

SEQ ID NO: 368976 - DNA, 75 bp, Homo sapiens
tccgcatcaacaagatgttgtcctgtgctggggctgacagcgctagtcctgctgatgggcaaagaaggtgtccac

SEQ ID NO: 368977 - DNA, 75 bp, Homo sapiens
cgccatgggggcctgcctgggagcctgctccctgctcagctgcgccaggaatagttgctgaacaccccaggcctg

SEQ ID NO: 368978 - DNA, 96 bp, Homo sapiens
aacacattcactgacaaactctcacgctcacaccgggtcatctgattttggccctcacattgggcgttactgtggacagaaaacaccaggtcgaat

SEQ ID NO: 368979 - DNA, 100 bp, Homo sapiens
acttcttgcatgcgagggaccattgcgtcacacatcccgggtcctgagtctgaccatgagcccagatggggccacagtggcatccgcagcagcagatgag

SEQ ID NO: 368980 - DNA, 115 bp, Homo sapiens
ggaggagatcccggtgcagaagaacatcctggcggcggccagcccgtacatcaggtcagactatgatgactggagaccgtctctggccagtttgcttcaacccattccattcccc

SEQ ID NO: 368981 - DNA, 73 bp, Homo sapiens
cgagactctggcctgcagtcgccgccgccgccgccagagagatgccaaaggccagtacctgtttgaccttctt

SEQ ID NO: 368982 - DNA, 100 bp, Homo sapiens
gttcaaggggaagcagcgtgtgtcagtattccacatttagatctgaagaatgtttctgatggtgataaatgggaagggaaacagaagtacctgtgcgcca

SEQ ID NO: 368983 - DNA, 75 bp, Homo sapiens
gcactctagatgccctcaactatgctctccgctgtgtccacagcgttcaagactttgagaatcactacaagaaaa

SEQ ID NO: 368984 - DNA, 80 bp, Homo sapiens
aaaacggaggaacaaatccaaaaagaataacagcagtagcaggtaatttggaggaagagttcatcgattggtggagcaaa

SEQ ID NO: 368985 - DNA, 83 bp, Homo sapiens
gagctccctggtgactgccagcccaaactgaaggggctggacttgctacctgtatagaactgtgtgtaaaggctcttcgcttg

SEQ ID NO: 368986 - DNA, 75 bp, Homo sapiens
ggcggcggcggcgccgggcccgggggtggtgacagcaggtctgagtcagatacagagttttgggataagatgcaa

SEQ ID NO: 368987 - DNA, 74 bp, Homo sapiens
gagcaaagctcaccctcccgagttgaaaaagaaaatcctgccttgcttcgttgggcctatgcaagaacaataaa

SEQ ID NO: 368988 - DNA, 100 bp, Homo sapiens
gatgccaacaagattcagaagaactgttgaaactagcaacatctataagtgaaaccttggaagagaagggaatcttggacattgtagtgctaagtaaagg

SEQ ID NO: 368989 - DNA, 90 bp, Homo sapiens
ggagaagagccatggacatcatttgcaggtcatacctgcttgggcagaagcttcatgaggcagatctggagttgcagaggaagcgggagt

SEQ ID NO: 368990 - DNA, 100 bp, Homo sapiens
cggggatgacattgcctggatgaagtttgacgcacaagggatggtgttccatactgtgagtccgactaccatgcccagtttggcattaaatgtgagactt

SEQ ID NO: 368991 - DNA, 101 bp, Homo sapiens
ctatttacccagaagtagtccatatgcctgtgcaggagacatggcggacgcagcatctccgtgctctgtggtaaacgacctgcggtgggacctgagtgccc

SEQ ID NO: 368992 - DNA, 76 bp, Homo sapiens
acggctttagcggtgtcttttgcggtgttcagattttgcaaatctaaatgtcataaaaactttaaaaagaagcgca

SEQ ID NO: 368993 - DNA, 88 bp, Homo sapiens
aaatgagtatgcaggagctgaatccagaaaccagcacagactgtgacggtgatggaatatgagaataggattcgagcctactccacgc

SEQ ID NO: 368994 - DNA, 80 bp, Homo sapiens
tcccatggccagcacgaggatcaggaatcagtttgctgaggctaaacactatcatgccaagttggtgaatataagaaaag

SEQ ID NO: 368995 - DNA, 82 bp, Homo sapiens
ggagcagccctggtgtcacctatcagtaaaaggagaattgacatctcaccaagtaccctgaggaagcatacccgtttagcag

SEQ ID NO: 368996 - DNA, 98 bp, Homo sapiens
gccaaccagcctgtcgtgatcgacaacatacggatataatgcaggagaagctacccaccatgcggtggattctgcggtcaatgttggcgtaactgcct

SEQ ID NO: 368997 - DNA, 100 bp, Homo sapiens
cttgtacagcaatctcctcctccactgccactacagggaagtgcatcacatgtcaggaatcatattgacaggtcatgaaaatgagaccaaaagatctctg

SEQ ID NO: 368998 - DNA, 82 bp, Homo sapiens
agccgatccagcctgcggagcctgtggggcagactcactgccacaacgacattgtcaaccttctcctggactgtggggccga

SEQ ID NO: 368999 - DNA, 100 bp, Homo sapiens
tactgatgcggttgagattgctatcgacaacacggcttttatggacgagttcttttctgaggatgagcaattcttaggttttggctcagatgaagaagtc

SEQ ID NO: 369000 - DNA, 75 bp, Homo sapiens
ggaatcatgactcctggagaacggatcaagtgcttattacagcaatggctgccatccggaagaaactggtgattg

SEQ ID NO: 369001 - DNA, 75 bp, Homo sapiens
gtgtctcttctcgccctggcggggaagtgtggacgaatgtggaacctcgctctgtggctgtgttcccttggcact

SEQ ID NO: 369002 - DNA, 101 bp, Homo sapiens
atatagataccccagatgattttggcaggacttgtctacatgcagctgcagctggaggacctctggggccggagagtctcctgcttcgtggagccagatta

SEQ ID NO: 369003 - DNA, 82 bp, Homo sapiens
ggctggtggtgcttccaactgcgggacaggaagtggccgtagcggcttgttggataaggcggaattctccacgagttttgag

SEQ ID NO: 369004 - DNA, 88 bp, Homo sapiens
gtggcacggatcctgacccacgaggcgggaatcactgacattgtggtgttacaggaccatcagcacgtgcccatcgacatccagacca

SEQ ID NO: 369005 - DNA, 74 bp, Homo sapiens
agcaggagctggcgtctctggagaaagcggagcgtgctttggacaccatgaattttgatgttataaagggcaag

SEQ ID NO: 369006 - DNA, 75 bp, Homo sapiens
gaaatttgcagccaactcagatttaaagatactgcttttgcaaaaaataaagatgatggaaaatggtactatttt

SEQ ID NO: 369007 - DNA, 100 bp, Homo sapiens
atggcatcacacaaaatgtgctggttgatggtgttaagaaactctcagtttgtgtttctgagaaaggctcgtggtcccaagaagcatctgaagcgggtgg

SEQ ID NO: 369008 - DNA, 95 bp, Homo sapiens
gtcagagcgagtctcggagaagatgtggtggcttccgtttgttggtggaggaggtggcaggcctcggcgtggtggtgaccgcggtggcttcaaaa

SEQ ID NO: 369009 - DNA, 75 bp, Homo sapiens
atacaacagttatcatatggcaagttgatccggggttctttccagcccttgtcctcctaattggattatatatga

SEQ ID NO: 369010 - DNA, 50 bp, Homo sapiens
ctgacagctctgcggctcgggccctgaggaagaacagtcattgggacacc

SEQ ID NO: 369011 - DNA, 83 bp, Homo sapiens
aagggatgtcgtctcagcagtgctcgggcgcagacctcctgccccccgaggtctgcagtctcctgaacccagcagccatctac

SEQ ID NO: 369012 - DNA, 87 bp, Homo sapiens
ccttctcatctttgtggtcgtgtttttaaagtaggagagcctacatattcttgcaggtcagggaagtcaaagatgcatccctgagtt

SEQ ID NO: 369013 - DNA, 100 bp, Homo sapiens
tgtggagaacaaatccaagattagcacaggactgactgcattgcacagatgatggatatttacgtatgtttgaaacgaccatcctggatggtggacaata

SEQ ID NO: 369014 - DNA, 143 bp, Homo sapiens
gtacattaggaaacatgctagaattacctggaacttcatcatcatctacttcacaggaattgccattttgccggtggtggtgtgcacattgagccccggtatagacagttcccccagctgaccagatcccaggtgttccagag

SEQ ID NO: 369015 - DNA, 90 bp, Homo sapiens
aggatattgtccttttggagcagggcaggttttagctaaagaagatactgaggcagctattcaatcaatattatacaaagaaaattctgt

SEQ ID NO: 369016 - DNA, 101 bp, Homo sapiens
gcgggagagccgggtaccggccgtggaagcggccaccgactactgtcagcagctgtgccaggaggaaacacaattattactagaaaacctgcatgtttatc

SEQ ID NO: 369017 - DNA, 100 bp, Homo sapiens
cgtgcggctttcgccgcgctattgcttgccagtactatactggcaattgctggagaagattttgcaattgttgcttctgatactcgattgagtgaagggt

SEQ ID NO: 369018 - DNA, 117 bp, Homo sapiens
aaaagattgaaggaaggtgatacaatgatggggcagcaagtggccaagtctctcaggcagctgcagagcttcaacagtactgtatgcagaatgcctgcaaggatgccctgctggtgg

SEQ ID NO: 369019 - DNA, 75 bp, Homo sapiens
agccgtccgtgtcaccgccggaacctggcgcagtctgaaccggacggcttttctcatttccacttgtacgtgtgc

SEQ ID NO: 369020 - DNA, 100 bp, Homo sapiens
cacagatagtgatgagatttcacatattgttaatcgtattgctcctcagctccaaatgagaagatgaagcaagtgttaaagaagactatagaagaagcca

SEQ ID NO: 369021 - DNA, 100 bp, Homo sapiens
gaatttgcctcggggacgcctctccagtttcaggtttagctgtgcctcccagtgactataatgacaaggaagctgtaaatgtatttgagttaagcttttg

SEQ ID NO: 369022 - DNA, 75 bp, Homo sapiens
gggagggccaccaatgggacaagtccgtaaaagccctgggctcagccagagcagggcagaggatgacgggatgac

SEQ ID NO: 369023 - DNA, 101 bp, Homo sapiens
gcgaggccagagcctagggctagcggccatggtattctctgaaaagtatagatcctgtattaatggctcctacatgtgtgtttttggcatccaaagtagag

SEQ ID NO: 369024 - DNA, 100 bp, Homo sapiens
gaccttggcactggcaggatcaagtgatgctttttctggaagtgaggatgccagaccagtttgaccaggcggttgtgctgaaccagctgcggtactcagg

SEQ ID NO: 369025 - DNA, 75 bp, Homo sapiens
ccaccgagccgggcccacctccccaccaaggaagatcaggcctttgtgacactaaccacaaacgatgcctacgcc

SEQ ID NO: 369026 - DNA, 119 bp, Homo sapiens
gcagaagtcgcgtgtctaggtgagtcgcggtgggtcctcgcttgcagttcagcgaccacggttttaaaatcaaagatgggaaaatcggagaaaattgcccttccccatggccagcttgt

SEQ ID NO: 369027 - DNA, 90 bp, Homo sapiens
catgattatctaccgggacctcatcagccgtgcggaatgactggctggacttgcgggttcccatctgggaccaggacatacagtttctcc

SEQ ID NO: 369028 - DNA, 100 bp, Homo sapiens
gttgtggaaaaacagtgatcgctaagaactttgccgataccttaggatacaacatagaacctattatgctctatcaggaggaagaaggcacctacgatca

SEQ ID NO: 369029 - DNA, 100 bp, Homo sapiens
aggccttcattagttcaaacgcaggaggctgaggatggcattattgcttatgatgactgtggggtgaaactgactattgcttttcaagccaaggatgtgg

SEQ ID NO: 369030 - DNA, 100 bp, Homo sapiens
gcccgatgctccgagcaggtgcacctggcagctgggccggcctgcctccgagtccccacatcaccacactgccccgttgtactcgtaaaacaaggatcat

SEQ ID NO: 369031 - DNA, 75 bp, Homo sapiens
gtgcctcaggattttgataataattctggatattggaacaggaatagcgggttttgcagcaattgttgcatatgg

SEQ ID NO: 369032 - DNA, 100 bp, Homo sapiens
gaagaagcaggaggctaagaaagtggtgaatcccctgtttgagaaaaggcctaagaattttggcattgctcactaccctgggaaatcttacaccttcaag

SEQ ID NO: 369033 - DNA, 75 bp, Homo sapiens
ttgaattacagagaaactttcagctcatgagggacctagaccaaagaacagaggctctggattaatcgaattaca

SEQ ID NO: 369034 - DNA, 75 bp, Homo sapiens
gggatgagtatgcggaggacagctctgatgaggagcccgtggaccgggagcccgtggaccgggagccggtggtgt

SEQ ID NO: 369035 - DNA, 100 bp, Homo sapiens
caaggtggtcatcaagtccaactttaaaccctcactgctggctcagaagatcgaggtgtgggcccatcgctggatggatctgtcagaacacggctttggg

SEQ ID NO: 369036 - DNA, 75 bp, Homo sapiens
attttagggtcctttatatagaagggagacttctcaataggtttggcatggacaagatctatgaaggccaagtgg

SEQ ID NO: 369037 - DNA, 94 bp, Homo sapiens
ccaatgcaatgctgtttgccctgaacatcatgaattcccaagaaggaggtactccaaagattcaggtttactcacgtcatccagcagagaatgg

SEQ ID NO: 369038 - DNA, 83 bp, Homo sapiens
ccactgcacaggcccgaagggcagaggtcttcagaactactagcagataatttggggggacttcatattcagaagtctatata

SEQ ID NO: 369039 - DNA, 75 bp, Homo sapiens
aaaaacctacactctcactcggagagcccgtgtctactcaggagagaaatgtggaagatgtgaaatttgtcatca

SEQ ID NO: 369040 - DNA, 100 bp, Homo sapiens
acagaatcctgtacagtgatgatgggcagaaatggactgtgtacagagagcctggtgtggagcaagataaggttgcaattgtagctcaagacttggcagc

SEQ ID NO: 369041 - DNA, 101 bp, Homo sapiens
gtcttcatcgtcgcggttctgctgccggactatttgcactctttggggaaggctcgaacagctcaagtccaaaaagatgcacggattggagaagcagaggc

SEQ ID NO: 369042 - DNA, 115 bp, Homo sapiens
gtttcttatatgtgatgccattccagcactggactcatggaggctgagcatttattcaggcacgtgacacaagctgacctcaagagctccacgttttggcttcgagcaagttttg

SEQ ID NO: 369043 - DNA, 74 bp, Homo sapiens
ggcggtgctgcaagagaaggcactcaagtttatggctgaagccgacgtagcttctctgaacagacgcatccagc

SEQ ID NO: 369044 - DNA, 82 bp, Homo sapiens
ggaccccaactgctcctgctcgcctgtggcacccctagctgttcctggaaggacctgaagaccatgaccaatttctacctgg

SEQ ID NO: 369045 - DNA, 75 bp, Homo sapiens
ctgcagggaccatggaatccagagctgaccagaggacctaatgaacatgcagcactgcaacctcctctgcctgcc

SEQ ID NO: 369046 - DNA, 82 bp, Homo sapiens
caggagctgggattcagcatggatgattgtcgcaaagctcttttggcgtgtcaagctgcattgtcttccttgaggtatggcg

SEQ ID NO: 369047 - DNA, 100 bp, Homo sapiens
ctgggagctggatacctgccctggcagcatggctcagactgcatgacagttctttatcaacaagactgagattgaggactttccccgctttcctcaccgg

SEQ ID NO: 369048 - DNA, 75 bp, Homo sapiens
ggcgcggggaccgctgtgctctcgaaagaaatgaccgcccggatgtgccactgagagccccgcgggtctcccggt

SEQ ID NO: 369049 - DNA, 98 bp, Homo sapiens
ccagatctacctgacgggcctgcgagggttgaagattgtgaagcaatagcctaagatttggcagctgatcggaagctctttcgtcttgtctccaatga

SEQ ID NO: 369050 - DNA, 100 bp, Homo sapiens
ggctgccagcccgggccttggtggaagaggcccttgcccagcgattccaggagagaagatgactgaggaggaggtggagaccgttctggcaggacacgag

SEQ ID NO: 369051 - DNA, 100 bp, Homo sapiens
cccgcatcgcagtccaggccccatccacaggaggaagaagcgacccccccaggctcctggcgcgcaggacagcgggcgacagccgctccgaccgctggtc

SEQ ID NO: 369052 - DNA, 75 bp, Homo sapiens
gtgctgtctgggcttcatagcattcgcctactccgtgaaggtggagccttttgccagcttgaccgaggccgtgcg

SEQ ID NO: 369053 - DNA, 75 bp, Homo sapiens
gtcacaggctccggctcatggcatcaagtggcatccatcataagtccagtgtgaaaaaagccagtattaaaatac

SEQ ID NO: 369054 - DNA, 138 bp, Homo sapiens
aaaacgtaatgaggatgaagattcaccaaataagctatatactttggttacctatgtacctgttaccactttcaaaaaataactgaagtgaagtgatggactccgatttggagagtagtaagacgtgaaaggaataca

SEQ ID NO: 369055 - DNA, 75 bp, Homo sapiens
tgtccggcaagatcgagaaagcaggagcagtgaggagaatgaataccttccaagaccagagtggcagctccagta

SEQ ID NO: 369056 - DNA, 97 bp, Homo sapiens
tttggaccacattgtcaattcacaccggttatgatgtgattgctcaagcccaatctgggactgggaaaacggccacatttgccatatcgattctgca

SEQ ID NO: 369057 - DNA, 100 bp, Homo sapiens
tgactatctttgtatctcttttgaatatagcactattaaatgtagagatctcagacctgctgaagttcccatgatgtcacccaatggatccattcctccc

SEQ ID NO: 369058 - DNA, 100 bp, Homo sapiens
acagaattacactgaagaagtagagtatttcaaccataaagacatcttaattgggcacgaaagaggctgaccccgcactacatctacccaccagccatcg

SEQ ID NO: 369059 - DNA, 83 bp, Homo sapiens
gctgccgggcaccgaggaccagctcaatgacagatccagacatttaatgtggatgcaccatgccagaccgtggaagatttaac

SEQ ID NO: 369060 - DNA, 100 bp, Homo sapiens
ggctgggtaacccagatcgctactaccccgcagttcccggacatgatcctctccgcctctcgagcacagtttaatggcaacgagaagcggcagtcatccc

SEQ ID NO: 369061 - DNA, 88 bp, Homo sapiens
tggccactgcgcagaccagacttcgctcgtactcgtgcgcctcgcttcggtgctggagaatctggtaaaagcaccattgtgaagcaga

SEQ ID NO: 369062 - DNA, 75 bp, Homo sapiens
ccacactgaggagcgcggccagccctgctcgcagaattaccgcctcttctttatcaaataaagtgcccgtggtgc

SEQ ID NO: 369063 - DNA, 100 bp, Homo sapiens
gaccatcgaggggtctggacgcacagaacacatcaagtgtccacttgcgaaagcagcattcctatattgagcaaggcaagaaatgccgttactgtgatgc

SEQ ID NO: 369064 - DNA, 98 bp, Homo sapiens
ttagcaacaatctccttgaaaattgttgcatttgtaaaggttgggattgagtttcaacagcatctctgctgttgacaatggctctctggccaacacgc

SEQ ID NO: 369065 - DNA, 100 bp, Homo sapiens
aattgaaattcttcttcgttatggacagcatccaaacattatcactctaaaggatgagtctactcttcatcttgtgttgagacttcgtggtggtgctaag

SEQ ID NO: 369066 - DNA, 87 bp, Homo sapiens
ttccgcttcttgaatttctctctgtaaaggagtcattaacagctgaagagaagacgattacagaaaagcaccttgaattatgcccta

SEQ ID NO: 369067 - DNA, 83 bp, Homo sapiens
aaagcagcgtgcgttcagccctggggtacctgcaccagtcaggggccctgaccatggaggccctggaggacccttcccccgag

SEQ ID NO: 369068 - DNA, 50 bp, Homo sapiens
gaaggtgaaagtggagaaatcaggcggcttacagggagaacacagttggc

SEQ ID NO: 369069 - DNA, 100 bp, Homo sapiens
cttaatgcacagccacaagttacaatgcaacaggcaaggattcactgaccttagtgtttgtggagaccaaaaagggtgcagattctctggaggatttctt

SEQ ID NO: 369070 - DNA, 89 bp, Homo sapiens
ctctcctagcgcggtgcccgcgccgtgactccgcagggtgaggtggctttgaccccgggttgcccggccagcacgaccgaggaggtggc

SEQ ID NO: 369071 - DNA, 75 bp, Homo sapiens
actgggttctggactttgggcgtcccattgccatgaaatgcactcggtgatggaaagagagccactattctgaag

SEQ ID NO: 369072 - DNA, 75 bp, Homo sapiens
ttcttcatcatcatttacctgggaccaatggttttgatgataatccgcatggatttaggagaatgtaccaaaatc

SEQ ID NO: 369073 - DNA, 53 bp, Homo sapiens
aaaaggcactgggaaggaaagacctgcaaacttccttgataacatgcttttgc

SEQ ID NO: 369074 - DNA, 83 bp, Homo sapiens
gggccctgtgggtgctgggcctctgctgcgtcctgctgaccttcgtgaggagatttctagtgaagatgatgagctggtagaag

SEQ ID NO: 369075 - DNA, 80 bp, Homo sapiens
gtcctcggagcaccccatccctgacgacaaaggctgtgctcttggtgaggaagttagttgtggaaagtaaaaatgtagcc

SEQ ID NO: 369076 - DNA, 100 bp, Homo sapiens
aggcaattgatcccaagttgtcgacgaccgacagggtggtgaaagactaatagggatgccaaaggaaaaatatgatcctccagatcctcgcagaatttat

SEQ ID NO: 369077 - DNA, 100 bp, Homo sapiens
tagaaatctcaaagccatgtctcagtactgccaaatctgtcgaaagggagataatgaagaactgcttcttctttgtgatggctgtgacaaaggctgtcat

SEQ ID NO: 369078 - DNA, 51 bp, Homo sapiens
gccaatgttggtgctggcaaaaaggcccgctacaacttcatccgaagcatg

SEQ ID NO: 369079 - DNA, 51 bp, Homo sapiens
tagcgatggacactctggatcgagtagtacaaatcttcctattttcaagct

SEQ ID NO: 369080 - DNA, 100 bp, Homo sapiens
gggtgaccctggaggtgggcaaggtgatccagcaaggtcggcagagcaaggggcttacgcagaaggacctggccacgcaacacgggattcccatcccggt

SEQ ID NO: 369081 - DNA, 83 bp, Homo sapiens
gtatgagccacacatccccgaccacttgcggcctgagtatgaaaaatggctacaaacttcctagcacatgagaagatctggtt

SEQ ID NO: 369082 - DNA, 136 bp, Homo sapiens
gtggaatacaagggcctcagggccggctaccactgcggctactgcgattccaaggagggcaaagcgtcctgcggccggtctaattgaagccaacggagaactcaaggtcttcatagaccagaaccttagtcccggg

SEQ ID NO: 369083 - DNA, 100 bp, Homo sapiens
tgactcggctcaagtctcaagggcatagggtccttatctactcccagatgaccaggatgatagacctactggaggaacgaatgatcacacactttgaaag

SEQ ID NO: 369084 - DNA, 95 bp, Homo sapiens
aaatccagcagggaggtccagatgaaaaagaaaagactaccgcactgaaaggccctctggtcctggaggcaggatcatgtggtggattcttggca

SEQ ID NO: 369085 - DNA, 100 bp, Homo sapiens
ctcatggcgttggaataccggctctcagcggctgtagcatcacgcagattgccatctcagaagagagcatggaagaggcagggctggaatggaactcagc

SEQ ID NO: 369086 - DNA, 90 bp, Homo sapiens
tgacaccgtagtgttttcaaaactggatatggccaggatgctatagcattgtcagtatcctgtttgaccaaactcagagatcaattaagg

SEQ ID NO: 369087 - DNA, 83 bp, Homo sapiens
gacaaccaagggcctccgtctggatttccaaggaagaatttcctctgaagcaccggcagcagcccagacgcggcacagagagg

SEQ ID NO: 369088 - DNA, 82 bp, Homo sapiens
caaccgcgtgaccttgattgagttaatgaacttcacgcctcagcgtccaggtaatagcctgcagctggtgttttgagaagcc

SEQ ID NO: 369089 - DNA, 82 bp, Homo sapiens
tcctggtcctcgatccgcccacagacctcaaattcaaagggtaacaagatgctcaactatagtgctcccagtgcagggggtt

SEQ ID NO: 369090 - DNA, 97 bp, Homo sapiens
cggccacacaccggcaacgcggtcacggcccagcgcgttcgatgcagacaacatatgttttacagagtcttcatttgaggattccagaaatttcaaa

SEQ ID NO: 369091 - DNA, 100 bp, Homo sapiens
aggaggaagaggaagatgaagaagagtcagagtccgaggcctctgctttaggcccagaaggaaaagaagcttacaggagacaatcagtcttacactcttc

SEQ ID NO: 369092 - DNA, 74 bp, Homo sapiens
gattccaagtaactcttatttggtctatcatctcatgaagaactgctgggagacagaggcgtcctttcgcccaa

SEQ ID NO: 369093 - DNA, 100 bp, Homo sapiens
ttgtgctgcatcccagaggtttgggttacaggaaatacaggaggcagaggaacaaataaaagacaccacgagaaacagacacatccagaacgtggaatat

SEQ ID NO: 369094 - DNA, 100 bp, Homo sapiens
ggttgcccatcgtctttactgataacaacgaacttgatgcaagtgataggtttgccaaggtcagacctctcatcatccggatgaactgcaatttccagaa

SEQ ID NO: 369095 - DNA, 100 bp, Homo sapiens
cacggatcggattcctcagctacgaggaggcgctgaggagaggctgctatccatgtccagggccaaacatgaatcctattgctcttgggagccgctggct

SEQ ID NO: 369096 - DNA, 75 bp, Homo sapiens
agctagtgaactatttggcaaatgacttaaggttaatttggagtggcccctggagtcagtttcctacaccatccg

SEQ ID NO: 369097 - DNA, 100 bp, Homo sapiens
taccctgtgcttatgacaagactgccttggcattagagattatgtggtagctatcctcaagagctcatagtgcctgcctggatcactgacaaagaactgg

SEQ ID NO: 369098 - DNA, 75 bp, Homo sapiens
ctttgctgcaaaaaattacggttagttgaatccatggacatgaaacccacagatatagagggttggcccggtgca

SEQ ID NO: 369099 - DNA, 100 bp, Homo sapiens
ttgcccccaggcggtccttcctggagtgtgaacatggctacgcctcttcattcccgtccatgccgagcccccgactgcagcattcaaagcccccacggag

SEQ ID NO: 369100 - DNA, 83 bp, Homo sapiens
caggtgcccccggcctgcgctcccatccacacgctcggtgacttaagagattaaaattaatttggttgctgttggttctgaac

SEQ ID NO: 369101 - DNA, 89 bp, Homo sapiens
catggatgcttgttggatgaattaatgaaccttgacccacaccaaggaaagtggagaatgaggacatgaataaagaccagatcttgctg

SEQ ID NO: 369102 - DNA, 100 bp, Homo sapiens
tgatgacatcgacatgttgaaaggtacttcgtactggatttcgaggctggcatcctgcagtattttgtgaatgagcaaagcaaacaccagaagcctcgag

SEQ ID NO: 369103 - DNA, 50 bp, Homo sapiens
gtggaggcagaggtggcatgggccctaccacttatgtcttggatgaagat

SEQ ID NO: 369104 - DNA, 75 bp, Homo sapiens
ggattcccaggcaaagttggatcacctggcccacctggccctcaagcagagaagctcaacgggacccaggtggag

SEQ ID NO: 369105 - DNA, 74 bp, Homo sapiens
ccgagggcaccaaggcggtcaccaagtacaccagctcgaaattcatgatgttgctatcaaaagttgagaaattg

SEQ ID NO: 369106 - DNA, 75 bp, Homo sapiens
agtccccccaagtctcctgaagaggaaggagcggtgtcctcttaagaaaatgagacgagttgtactgctgtcaca

SEQ ID NO: 369107 - DNA, 75 bp, Homo sapiens
cacagtgcagtcttcttcgtggctgaacagacgcaaacatgcagatctttgtgaagaccctcactggcaaaacca

SEQ ID NO: 369108 - DNA, 74 bp, Homo sapiens
acgacaccggcgaggaacttggcaggagccacacaggacagttgacccaacacttctgccacctgaagaacgac

SEQ ID NO: 369109 - DNA, 83 bp, Homo sapiens
cctacttggagctggtgctttgcgtgctggtcagcatccggaacaacaggtgaatgaaaactttgccattgatttgatagcag

SEQ ID NO: 369110 - DNA, 100 bp, Homo sapiens
gaagattgcttctcttctctcctccaagggagcgctgacccagctgatccagctctatcatcgcttccaccgggtgctgtcccagccgcagctccgagcc

SEQ ID NO: 369111 - DNA, 100 bp, Homo sapiens
aagatggctactctggagttgagacgatcgccccgtgagagcaagcgagcggaaggcttcccgactgcattttgcatcagaggactcactcgactccaaa

SEQ ID NO: 369112 - DNA, 75 bp, Homo sapiens
ctcggcgctgcctacggaggtggcagccatctccttctcgacggtctggaaaatcccgaagcagaagcccgtatt

SEQ ID NO: 369113 - DNA, 75 bp, Homo sapiens
tgaggaggaagacctggaagacagatctgagatgaggtctcactctgtcacacaagttggagtgcagtggtatga

SEQ ID NO: 369114 - DNA, 100 bp, Homo sapiens
gcaagccctcttcttcaagaagaaattccaggagcggctggctgaggcaaagcccaaagtggaagtgcctcagagtgacccaagtccagggactccaccc

SEQ ID NO: 369115 - DNA, 100 bp, Homo sapiens
catccttcgaaaagctgccaagttgaaaatggacgagtaatcgcctgctttgattcattgaaaggaatctggaaacatcaaagctggattagaacatctg

SEQ ID NO: 369116 - DNA, 74 bp, Homo sapiens
cagtcttccgcaggaaggagatgtggttgagataagtcgaagagtgactctggaaaaactccctcctgtcctcg

SEQ ID NO: 369117 - DNA, 97 bp, Homo sapiens
ccagctcttaattcagtcttctggacagtaacagtagctgggaacttttatggaagccagtctctgaaattctgaaatagccctctaacatcagaag

SEQ ID NO: 369118 - DNA, 75 bp, Homo sapiens
cgagaaaaggaagaggcaatcagacagaaaaccagcgaggtgcaggatcccccagaagaggcagaactgctgcta

SEQ ID NO: 369119 - DNA, 100 bp, Homo sapiens
caacaccaaaaagctttctgctagggtgagagtaacacatgcgcactgtggattcctttgtgaatacataaaaggaaaagttaaaactcttataattcac

SEQ ID NO: 369120 - DNA, 140 bp, Homo sapiens
cccggtgctcggagccggcaccgccagcccgtcaagaactcaggccacagtggcttggccaatggcacagttgctgggcatattggattttacccatcataggcgctgttctcttaggtttcctgtaccgctactacaca

SEQ ID NO: 369121 - DNA, 100 bp, Homo sapiens
agactctgagcccccgaactctgcaaagcctccagaggacataccacctccaggatcaggatgcagagtattctaccttgtaaatactgttatttgtata

SEQ ID NO: 369122 - DNA, 95 bp, Homo sapiens
tgaagatctctcaccatccaaaaaagaccttctaccgctttgaggctgtgtgggatagctctctgcataactcccttcttctgaaccgagtgaca

SEQ ID NO: 369123 - DNA, 100 bp, Homo sapiens
agctgcacctgccccgccgggatctccggcgccaactgccaggaagccattaatttgctagaaccaatgacaaacgaccccgtgaactacgtgaggcaag

SEQ ID NO: 369124 - DNA, 75 bp, Homo sapiens
cccgcgagtcgcatctgctcaacgacgaggacctgacgcaggagtctactcttcatcttgtgttgagacttcgtg

SEQ ID NO: 369125 - DNA, 100 bp, Homo sapiens
aagtttggtgttcttgctaagattgtgaattacatgaagagaattcagcctcagcccccagatgaagatggggatcacagtgacaaagaagatgaacagc

SEQ ID NO: 369126 - DNA, 125 bp, Homo sapiens
gtggacctaactgcaccagtagcttttctgagaatacttgctgaaaaggaagttttctggaatgggaatactctgaagatagtaactccgagccaaatgtggatttggaaaatcagtactataat

SEQ ID NO: 369127 - DNA, 50 bp, Homo sapiens
tccgcagggttcggatgagaccaggcaagctgtggattttctgagcaatg

SEQ ID NO: 369128 - DNA, 51 bp, Homo sapiens
taagcccttctcccgcctcacttccgaggggtctcactttgtcacccaggc

SEQ ID NO: 369129 - DNA, 88 bp, Homo sapiens
gaagccgggaagtttcgcgaatgtcagcattgacatgtgtgcgatcatagacagctcctcttttgacttggactatgactttcaacgg

SEQ ID NO: 369130 - DNA, 75 bp, Homo sapiens
catcaaggagcgccgagcagtcatcatcctcaggaatgctccgctcagccttacccgagtcacagtggtcctgct

SEQ ID NO: 369131 - DNA, 90 bp, Homo sapiens
gtagatctttccacagaagatattcaagagcaatggtcagaagaatttgagagccagcctacaggggaaatcctcattgacgattcaatt

SEQ ID NO: 369132 - DNA, 98 bp, Homo sapiens
cgctccctccgccgccgcgcaacgattttctggcatccttaaatcttgtgtcaaggattggttataatataaccagaaaccatgacggcggctgagaa

SEQ ID NO: 369133 - DNA, 75 bp, Homo sapiens
acaggcccctgtttgactatttcctgaagatgccaaacgtctgattggacgcagatttgatgatgctgttgtcca

SEQ ID NO: 369134 - DNA, 50 bp, Homo sapiens
gaagccaccccgtcacatgtagtggtatgagcacctctgaggagttggat

SEQ ID NO: 369135 - DNA, 71 bp, Homo sapiens
ccgtcgccgctcccgaagcttttccaggctcaccagctggattccctcctgggggcttcattcccaaaacg

SEQ ID NO: 369136 - DNA, 72 bp, Homo sapiens
tttgaccgagacataaactgcagaagagcagcctctatggactcaccctgtcacccaggttggactgcactg

SEQ ID NO: 369137 - DNA, 74 bp, Homo sapiens
ctgtgtcaagagcggcaggggctgcaggagataagagaaacgggctcccccccaaccaagcggcagcggcggag

SEQ ID NO: 369138 - DNA, 75 bp, Homo sapiens
acagatgtccagtactactggggagccatgtgttcacatgtcatgtggaccagtatttaactgtggaaaccgcgg

SEQ ID NO: 369139 - DNA, 50 bp, Homo sapiens
caacatgtcccaacattacatcccaaatctggaggtgaactggatattgt

SEQ ID NO: 369140 - DNA, 74 bp, Homo sapiens
atccacagcatccgggacctccagcgactcctggagatagactccgtaggccctgctgctcctgggggccgccg

SEQ ID NO: 369141 - DNA, 101 bp, Homo sapiens
gtctggtacctggtacccggcacactgtgagttcctggacatcaagggctggggatcccaacaagccctcaggattcagaagtgttaaagctcctgtcact

SEQ ID NO: 369142 - DNA, 75 bp, Homo sapiens
ggagataaagctgtgtactgccgttgttggaggtccaaaaagatccatccttttacaatccctgctattattcgt

SEQ ID NO: 369143 - DNA, 75 bp, Homo sapiens
tgttccagtggcaaacagctgtataaactcttgtaaacagattcagcgtttgttggaagcacagtctctgatgcc

SEQ ID NO: 369144 - DNA, 101 bp, Homo sapiens
catcagtgtaagactccaataattcaccgggatctgaagatgttggtcccattccaagatactcctgtggaagttgaacagaacacagagctacctgacta

SEQ ID NO: 369145 - DNA, 75 bp, Homo sapiens
ttacaatctgaccagatgttcttgcaaaactgacaaatttacatgtattggagaccagaccagaagcccttctga

SEQ ID NO: 369146 - DNA, 99 bp, Homo sapiens
tgctatatggcaagcactaaaccactatgcttaccgagatgcggttttcctcgcagaacgcctttatgcagaagctcaaaaagtttccaagaagacagg

SEQ ID NO: 369147 - DNA, 96 bp, Homo sapiens
aatgtaaaggccaagatccaggataaggaagcctgtgacattctggccattgataagtccctgacaccagtcaccctggtcctggcagaggatggc

SEQ ID NO: 369148 - DNA, 83 bp, Homo sapiens
atcagtcaggcagatgtttgtcgactggaatggttggcagatgcactacctgaacactcccctgccaaaacctctgctgtgag

SEQ ID NO: 369149 - DNA, 74 bp, Homo sapiens
caaatcccactgcaccgacggaagaggctggaaaggcttttgaatgaatttgacaagtatgcgcccaagctgga

SEQ ID NO: 369150 - DNA, 100 bp, Homo sapiens
atcatggcggatggccccaggtgtaagcgcagaaagcaggcgaacccgcggcgcaataacgtgatcaggaacctccctattcaatgataacattacacga

SEQ ID NO: 369151 - DNA, 100 bp, Homo sapiens
agagacgctactggaggcggcccgcttcctggaatggcaagcgcagcaacaacagagagcacgtggaaaatatatgcagatgatgaacattcttaagcca

SEQ ID NO: 369152 - DNA, 100 bp, Homo sapiens
cccgtgcctgtcttcagatcttcacagcacagttcctgggaaggtggagccaccagcctctccctgcaaaaaggcattgggatgaacgagccgctggtgg

SEQ ID NO: 369153 - DNA, 100 bp, Homo sapiens
ctcttctgcaaggtccggctgctggatggaggggattttgtcagcttgtcgtcaagaatgttcgtggcatcagagagaaagatgagagctcaccaggtgc

SEQ ID NO: 369154 - DNA, 50 bp, Homo sapiens
ggtatttcctgtgctctggacgctggaaaacagttcctcctgaggatttc

SEQ ID NO: 369155 - DNA, 88 bp, Homo sapiens
acaaggacagcctgggggatgagatgttggcggctgcgctcctaaaggccaagtcccagaattttaccttcaatgatgacttcagtcc

SEQ ID NO: 369156 - DNA, 75 bp, Homo sapiens
caaatgcaggagggagaggtgccaagaagcagcggtacaccaattaccagctctggctgggtcgccacaacttgt

SEQ ID NO: 369157 - DNA, 97 bp, Homo sapiens
tgtgcggcgtccgctgtataaggccaagacccatgttcttgacattgagcagcgactacaaggtgtaatcaagactcgaaatagagtgacaggactg

SEQ ID NO: 369158 - DNA, 74 bp, Homo sapiens
tacgcctacaccaagcagaaagcgacaggggctgttgagctaatggaccgaactgaaatgccatgccaggcatt

SEQ ID NO: 369159 - DNA, 100 bp, Homo sapiens
tctattacttcagcaacagtccttcaaaggaaatggtgttcacactggccctgaatcaagggaacaccagttttcacatgctggcagaagcaatggccgg

SEQ ID NO: 369160 - DNA, 100 bp, Homo sapiens
aagaaagcctctttgcaaccgggccattaagtgctgtttagcagatcttccacaatctattggcatgtggacaccagatgcagtgctgtggttaagagat

SEQ ID NO: 369161 - DNA, 124 bp, Homo sapiens
ctggagcctcagttggaagcagccgatccagcctgcggagcctgtggggcaggtgaccttgggaaaggtgttgaaagtgatcgtcgtcatgcggagcctgttcattgatcgaacaatagtaaag

SEQ ID NO: 369162 - DNA, 82 bp, Homo sapiens
ggagacggtggggaggcttcccatggtttggaggatagcaacatcagttgatcatcatggagacccgcaagaaagatggcac

SEQ ID NO: 369163 - DNA, 89 bp, Homo sapiens
taccgtcaagctggccaagcacaaagagcttgctccctacgatgagaactggttctacacgcgagctgatttctaacgacccaagtcca

SEQ ID NO: 369164 - DNA, 100 bp, Homo sapiens
cgagcgtaaggtccagctggtcaccgacagggatcacttcatccgaaccctcagcctcaagccgctgctcttcggtcatactccctgtcacaaactccag

SEQ ID NO: 369165 - DNA, 76 bp, Homo sapiens
taacctgcttcagattcagcgtcatgatgattacctggtaatgcttaaggcaagaagcctgtggtaggtaagaaag

SEQ ID NO: 369166 - DNA, 73 bp, Homo sapiens
gcttctccaacgctgctccctgtctgcaactgacttaaactacctgaagaagcaggtcacacccctcttcatt

SEQ ID NO: 369167 - DNA, 76 bp, Homo sapiens
cgagagcatctctacctcgtcctcttctttgacaacaaacgaacctggaggaggaagccaagaatctggtgagcga

SEQ ID NO: 369168 - DNA, 124 bp, Homo sapiens
agagcctctcatgacctatgagttacatggagatttcattgttccagccagtatgggttcatagaagggcacgtggtgattccccggatccaccccaactccatctgtgcagcaaacaacacag

SEQ ID NO: 369169 - DNA, 46 bp, Homo sapiens
gaagcaagatcattagttgaatcggaaaacggacgatgtattacta

SEQ ID NO: 369170 - DNA, 75 bp, Homo sapiens
accttggagagaggagaacgaacatcttctggacctttgtccagaaatggtggagtcaatgaagaaagtagcagg

SEQ ID NO: 369171 - DNA, 100 bp, Homo sapiens
tgatgtatacacgtttaatttttctaaagagtcttgttatttcttctttgagaaaaacctgaaagatgtctcaatgctgcctcgaactctgtcactgaga

SEQ ID NO: 369172 - DNA, 50 bp, Homo sapiens
cgacctcgtgaagatccgcttcgccggtttgtctacagattttgagcgtt

SEQ ID NO: 369173 - DNA, 100 bp, Homo sapiens
tccttcaagatccggggcattgggcacttctgcaagaggggtccccagccccaccccagccccaaaggaggctgttcgagagggacgtcctccggagcca

SEQ ID NO: 369174 - DNA, 80 bp, Homo sapiens
ggatattgggcttgacagctgcaaggagttactgaagacaaatttacatgtattggagaccagaccagaagcccttctga

SEQ ID NO: 369175 - DNA, 49 bp, Homo sapiens
gatgatgccaaagttttattaggttccagcagcactgatgtgaaggaaa

SEQ ID NO: 369176 - DNA, 87 bp, Homo sapiens
gctcgcctcgactccaaatggttgaaaacagatatacaggatttcctaatggaaacattcatcatgtttaagaacctcattggaaag

SEQ ID NO: 369177 - DNA, 85 bp, Homo sapiens
ggaaaacaacttcgagggcagagaattctcacactcaagaaagcaaatgaacttcttctgagcacaggcatgcccggcagttttc

SEQ ID NO: 369178 - DNA, 90 bp, Homo sapiens
ctggagacttgacctaaacagcaaagagtggatccgacctttggcttcagcaaaaaatcccagaagtgggatgaaatgaacatcttggcg

SEQ ID NO: 369179 - DNA, 75 bp, Homo sapiens
agggcttactggggcttccagaggaggaaactgagcttgatgatttgttaaggattccaagtaactcttatttgg

SEQ ID NO: 369180 - DNA, 100 bp, Homo sapiens
aggcttgctgcttcctcctcctcggcctcaccagccatgtccattggagcccgttcccaatcagctcgtacttacttggagagacatatgtctgaattta

SEQ ID NO: 369181 - DNA, 73 bp, Homo sapiens
tagtgagatatggtttgaatatgaaggcacaccactgaaatgacaaatttacatgtattggagaccagaccag

SEQ ID NO: 369182 - DNA, 97 bp, Homo sapiens
ggttagcggtggcaggggctgactgagagcgtctgcttggttgtagatgagcatgagagtgtggagcagagtcggcgagcgcaagtcgagcccatca

SEQ ID NO: 369183 - DNA, 75 bp, Homo sapiens
ctggtcggcgcgtggctcaagctaggacatggacatcttccagcaacagatctcgagaagacagctggctaaaat

SEQ ID NO: 369184 - DNA, 111 bp, Homo sapiens
ggaggtcctgccgtccatgcggaagatcgtcgccacctggatgctggaggtttggtgcacctcgatttggaggaagtagggcagggcccttatctggaaagaagtttggaa

SEQ ID NO: 369185 - DNA, 74 bp, Homo sapiens
aaaattggctggcagagcaacagaaaatgcaggaacaacagatgcaggtctgttgcggttctcccacttttcca

SEQ ID NO: 369186 - DNA, 75 bp, Homo sapiens
ctggtgtcctgaacctggaagttgtgctttttaagggaccattgcaatttagagatgtggccatagaattctctc

SEQ ID NO: 369187 - DNA, 90 bp, Homo sapiens
gatgaatctaacactacaaaatacgctggtctgccatcatggatgttctcgcagaagcaaatggcacctttgccttaaaccttttgaaaa

SEQ ID NO: 369188 - DNA, 74 bp, Homo sapiens
ccaacttcagcaccaaggccatgcgggaggagaatggtctgaagcagaaagtgaaactcttcactgctcacaac

SEQ ID NO: 369189 - DNA, 117 bp, Homo sapiens
cgatgggttgtccgactgggagcagaggaagccttgaggacctactcacagataggaattgaagcccccaaatacatcaagatgtttgtactggatgaagctgacgaaatgttaagc

SEQ ID NO: 369190 - DNA, 75 bp, Homo sapiens
ctcttcccgcccgccttccgccgtctcttcgagttcttcgtgctgctcaagtaagactttgaccccgacgcaggc

SEQ ID NO: 369191 - DNA, 101 bp, Homo sapiens
agcccccgaaggccctatcaggacatggagtatgaaagacgggacaattcaagctttcgaaatacaaaaatcacattgtgagagtacacaagctggcaata

SEQ ID NO: 369192 - DNA, 100 bp, Homo sapiens
cagaagccatctgcaaggagcaacacctcttcctgcctttctcctacaaggtggttctcttcccaaagtggaagccaaattcatcaattatgtgaagaat

SEQ ID NO: 369193 - DNA, 97 bp, Homo sapiens
gccacgtgtgctgggcctggctccctggctggccagcctctgcttggcatccccttgctggacagtggctgtgatgctgaggtgctgctggacagtg

SEQ ID NO: 369194 - DNA, 100 bp, Homo sapiens
tggcacttagaaccgcagcagggacgtcggtttgctatcgggactcggcgaggacgctctgcttatgataatgtcaacaaagttcgagtagctatcaaga

SEQ ID NO: 369195 - DNA, 82 bp, Homo sapiens
gtccagggctaggagcctcagccggcggacgccaggaaacaggtaccgaggagaaggcattgtatatgggacactagaggag

SEQ ID NO: 369196 - DNA, 75 bp, Homo sapiens
gggtaccacggagagggcaataagagcctggtggtggcccacgcgcaggtggagtattgctcctggaaaatccaa

SEQ ID NO: 369197 - DNA, 88 bp, Homo sapiens
aagcacctatgtttccaaaccagtcagctgggctgatgaaacggatgacctggaaggagatggaaattacattgctgtaggaaacatg

SEQ ID NO: 369198 - DNA, 74 bp, Homo sapiens
tcagccagaacacttaataataaattaagtctttcaaaaccaaaattttcggacatatttggagaagactgtgt

SEQ ID NO: 369199 - DNA, 101 bp, Homo sapiens
tcggtggcctccgggcctggcagtcatgaaggtggtttggctttgaatgacagcaagaactctgtctttaatggcttcattggtagcgtatgatgattcgg

SEQ ID NO: 369200 - DNA, 99 bp, Homo sapiens
cgggagatctttctcagccagcctattcttttggaattggaagcaccgctgaaaatttgtggatttgcctttattcagcatccaagtctaatgttcgag

SEQ ID NO: 369201 - DNA, 98 bp, Homo sapiens
cttcttggatcttggaggtggtgtaaaggaagctcaagtatatcaagcattcaaattgctcacagctgatcctaagggaatgacagaggaagaggaag

SEQ ID NO: 369202 - DNA, 50 bp, Homo sapiens
tgccagaggtggcatctgtgaactgttatgaagacagtatggagtttcca

SEQ ID NO: 369203 - DNA, 100 bp, Homo sapiens
ctgcactttggggagcctaagtcctgcttgaaatggcgattgaaaacctccaaaaaagcgaaggaatcacatcacacaaaagcggtttactcaacagcca

SEQ ID NO: 369204 - DNA, 100 bp, Homo sapiens
ctgggctcgccagtcttggggacagtgtcagctgactgagatgctggtaaatgtcctcaacatctgctcagatgatgaactagggtcagaagaagatgga

SEQ ID NO: 369205 - DNA, 73 bp, Homo sapiens
acctccttgttgcccccactgttgccttgagaattgaagacatgtagagtacagagagatggatgaaagcttg

SEQ ID NO: 369206 - DNA, 82 bp, Homo sapiens
cgagctggacccggaccggttttggatgtggacgagtgcagctccgggcagcatcagtgtgacagctccaccgtctgcttca

SEQ ID NO: 369207 - DNA, 90 bp, Homo sapiens
aagaattgacccttgaaggaatcaaacagttttatattaatgttgagagagagaatctgaattatccagaacagaaagttgtgactgttg

SEQ ID NO: 369208 - DNA, 73 bp, Homo sapiens
gccggctgctccgcaccccggggtcccaggaagggcggcccaggggacaccgtggtgtttaaggatggccagt

SEQ ID NO: 369209 - DNA, 100 bp, Homo sapiens
acacggtgccgctgacagcagccatcgaggcgagccagagcctgcagtcccacacgttttatctccatctcgaagtgcaagagtccagtttcatcttatg

SEQ ID NO: 369210 - DNA, 100 bp, Homo sapiens
ccatctttctcttgccgcgtgctggtgttggaggaccctccctgcttcagaagaagcagactacagtgcctttggtacagacacgctaataaagaagaag

SEQ ID NO: 369211 - DNA, 100 bp, Homo sapiens
cttataagtgtttagcagcagctttgatagttctgacggagtctggcagacacctggatttcattagcatcatgacctacgattttcatggagcctggcg

SEQ ID NO: 369212 - DNA, 102 bp, Homo sapiens
gacagggccatgtatggaatatttgcttcatcacaagatcttggaaacattatataccttggggaaagctgatgaacgtccttgtgaagacctttatctgag

SEQ ID NO: 369213 - DNA, 49 bp, Homo sapiens
agcggcgttggaggccaccgtttccagaaatcttcccaaggctgcagac

SEQ ID NO: 369214 - DNA, 74 bp, Homo sapiens
agaactccaccccggcgcccgcgccatgcggcgggagaggtcaaaatgcagatcttcgtgaaaacccttaccgg

SEQ ID NO: 369215 - DNA, 75 bp, Homo sapiens
atcctaagactcgaaggcagcacaggacctggaaaaattacatgtgcacacatcttgaccaactcagcagcaagg

SEQ ID NO: 369216 - DNA, 100 bp, Homo sapiens
tctggtcagcagtgatgatgaagagcctagcacctcttatactgatttctttatagctccaagctctacagattcttcaaatatattgagaatagggatg

SEQ ID NO: 369217 - DNA, 100 bp, Homo sapiens
gactggttgatcagcagattggaaagactggaagcttcttcagatctatccatactaatggaaatgtaactggaactgactctgatgataaaatcaagga

SEQ ID NO: 369218 - DNA, 75 bp, Homo sapiens
ttggagtccggacatctgaaacttgaaacgcttcgttaagggactcaggcagtacgggaagaacttcttcagaat

SEQ ID NO: 369219 - DNA, 88 bp, Homo sapiens
gcccttccttctgtatatggctgcgccccaaatcagtgcctggctctctggctatgaaaatcctgtggtgtctcgaattaatatgaga

SEQ ID NO: 369220 - DNA, 71 bp, Homo sapiens
ccaggatgtggagtggacttcctagcagaggttggtgacatcgtgaaagtcacaaggatgaatataaatgg

SEQ ID NO: 369221 - DNA, 98 bp, Homo sapiens
agagatcaaggcagagttatttggtcatggaagaacaactgacttgtccaaggaggcaggtggaagtcatcataaagtttctgtttcacccgtcgtcc

SEQ ID NO: 369222 - DNA, 121 bp, Homo sapiens
ccgcctgtgagagtggagggcccacacccagcctcagccacagggacgcctccaaggaactgttcagaggccggtgccctcgaccgcctcctggatctccccgccgcagcctcctcagaag

SEQ ID NO: 369223 - DNA, 100 bp, Homo sapiens
agatgaacacagtattgaaatgcatttgccttatacagctaaagccatggaaaggtagccctaatggagaaccttgtggaaagacttgtttggaagagag

SEQ ID NO: 369224 - DNA, 100 bp, Homo sapiens
cagttattgccgtgtgcagtataataacctggaacagaatcattgaaaaatggctctgctacaggtggtggaaataaagtttattcttttcagaatagaa

SEQ ID NO: 369225 - DNA, 90 bp, Homo sapiens
aaatgcacagccaagcctagcagctcgggcaaggatggtggaggcgagaacactgaggagtttggcacatggaagcatgcacggcgatat

SEQ ID NO: 369226 - DNA, 100 bp, Homo sapiens
cttcatgctgggctcgctgctgcggacgttcaagcagacgttggacctctcgaacaaccagctgagcgagatccctgcagagcttgcggactgccccaag

SEQ ID NO: 369227 - DNA, 74 bp, Homo sapiens
acaaacttgcctacgtcagtaacagccaccaagttgatacaccaaaatcggcaagctatcttaaaccagtttgc

SEQ ID NO: 369228 - DNA, 74 bp, Homo sapiens
ggagcttgacgcgctggagcttgagaggtcgctttggtcatcttggcttagccatcaacttgatcacatatgat

SEQ ID NO: 369229 - DNA, 74 bp, Homo sapiens
gagaacaggcgtggccagcactggctccttgatggtgttaaaaaagatattgagaagctttatgaagctgtacc

SEQ ID NO: 369230 - DNA, 100 bp, Homo sapiens
tcccaatcccactgatgaggatcagcccatgaatttcgctaaggagtttgtgatcagtgatcggaaggagctggaggaagatttcatcaagagcgagctg

SEQ ID NO: 369231 - DNA, 100 bp, Homo sapiens
ctccagggtagcggctaccggagcgctgcagggggctgcgcctgcctgctccgccccagacctgtcggcgaaaggaaaagccaggactctatttgaaaaa

SEQ ID NO: 369232 - DNA, 82 bp, Homo sapiens
ggctcggcgcccggcggggactgcagaataccgtagcagtaggcaggacagttccaattcaacaaaaacctctttaccctgg

SEQ ID NO: 369233 - DNA, 98 bp, Homo sapiens
gttactttgccacttcttcacggaccagtttcagttcgccgatgggaaacccggagaccaaatccttgaaagtttacaaagaggattttgagaaggag

SEQ ID NO: 369234 - DNA, 50 bp, Homo sapiens
cacctgaatatttgttccccctgagccagcaccgctctttgaccttgcca

SEQ ID NO: 369235 - DNA, 100 bp, Homo sapiens
caataagatagttgcccggactgcacaactagcaagacttcaggtgaaggagtacctcctggcaactatgggaactatggctatgctaatagtgggtata

SEQ ID NO: 369236 - DNA, 105 bp, Homo sapiens
aaggaaactcagcctccagaaacggtccagaactggattgaattacttagtggactaccgaccagactcccggaaatcatgttggtaggatcccagtctttttcg

SEQ ID NO: 369237 - DNA, 100 bp, Homo sapiens
tccttccggggccgggaagtccacgctgatgaacatcctggctggatacaggatctagtttgaagcactaagaagaataagacatcagtttgaaaagagg

SEQ ID NO: 369238 - DNA, 101 bp, Homo sapiens
aaaagaattgaatttacatgaggatttgtataagtccttgaaaacactatctgcagaactggtaccttggcttaatttgaagaagcaggatgaaaatgaag

SEQ ID NO: 369239 - DNA, 90 bp, Homo sapiens
tggcggcgctggagagggggcgctgagctgttgggggaccatggctaaacctcctggatcattagccagaagcagcagcctgtgccgttc

SEQ ID NO: 369240 - DNA, 80 bp, Homo sapiens
gtgagctataatcttctcacagaggttcccgtgagatctccagatcacactaagtttgtgggaagcttcaaaaccaaaca

SEQ ID NO: 369241 - DNA, 90 bp, Homo sapiens
cccacgctcatgatcgacttcctcacccgcgcctgcgacctcggaaaatctccatgatgccagcaggcgtgtccacagaggaaggggcga

SEQ ID NO: 369242 - DNA, 100 bp, Homo sapiens
aactcaccagatcaacagcaacctgaggagcataggccaaaaataggactaagtcttaaactggactgtctgcaactttacagatggtgcattggttcag

SEQ ID NO: 369243 - DNA, 101 bp, Homo sapiens
ctgcttcctgactcgctctactccgtggaagcacgctcacaaagggtgattacaattcagaaattcatcagatcacaagagaaagagatgaacttcagcgt

SEQ ID NO: 369244 - DNA, 100 bp, Homo sapiens
aaagaggctgcccagaaagcagttaacagtgccaccggtgttccaactgtttaaaagttcattgccaaattttaaacaaaacgagttttcagttgttcgg

SEQ ID NO: 369245 - DNA, 75 bp, Homo sapiens
tcatcacgccctttctcttgctcaaggctggacggcagtctggaaacgaccaatgagatcttggactctgcctct

SEQ ID NO: 369246 - DNA, 90 bp, Homo sapiens
tttcaagagtcacttctttacttggtgcaggaaggcagtctttgctacgtacagcaaaaggcatcaagcatgatggaaccatgtgtgata

SEQ ID NO: 369247 - DNA, 96 bp, Homo sapiens
cgctgccgctatggatgatcgagaggatctggtgtaccaggcgaagctggccgagcaggctgagcgatacgacgacaagttggatggcttgaggac

SEQ ID NO: 369248 - DNA, 89 bp, Homo sapiens
ggccgcgctgcggggccgcccacgctgcgctccagatgtgtatatctcatgattgatatggagaaactagtcatgggccaaaggtcaag

SEQ ID NO: 369249 - DNA, 99 bp, Homo sapiens
cggacatgctcagggctgcggccgcccgaagaggagagagcgcgggcctctaggaagtgagatgaacccggtacctcagatggaaatgcagaaatcacc

SEQ ID NO: 369250 - DNA, 82 bp, Homo sapiens
ctgggattggagattccacccaaacttgctggtcactgggagggatgtttcagcagcccctgagaaggaagaggaggaagct

SEQ ID NO: 369251 - DNA, 98 bp, Homo sapiens
gagaattatccaacaagaaaaagacctgtggctattaagatagatgatgtcggagcaattccaataaagcactttccaaagcatgttgcagatttaca

SEQ ID NO: 369252 - DNA, 83 bp, Homo sapiens
cgggctcttgggcgctgctctgaggttcgagaacttgtcttggacaattgcaaatcaaatgatggaaaaattgagggcttaac

SEQ ID NO: 369253 - DNA, 95 bp, Homo sapiens
ccttacgcccagagaactgctgggaggctgtggcgcgaggcgggactcaaatgctggaggaaggaggaactagccagctgtggatggagtaagaa

SEQ ID NO: 369254 - DNA, 90 bp, Homo sapiens
gggctgcagtgacagccggcggcggagcggccggtccacggaggaggcttcaacggaccacaccaaaatgccatctcaaatggaacacgc

SEQ ID NO: 369255 - DNA, 49 bp, Homo sapiens
ataacactgcatgaaatgttagagaattggcagagggggtcgatttggg

SEQ ID NO: 369256 - DNA, 75 bp, Homo sapiens
ctcagccatggacgcgtccctggagaaggagaatacttatctctggcgcacatcactatatttggctgcctctgc

SEQ ID NO: 369257 - DNA, 100 bp, Homo sapiens
aagctctgcagaaagacttaaacctcatggccccaggtctcactatacagtttgcagtgttgatgtgggtatttacctatgttggtgccttgtttaatgg

SEQ ID NO: 369258 - DNA, 90 bp, Homo sapiens
cgctcgagttcctggaccgtgagagcatcaagctcgtgtccatcggaaattcgcccccgtctgcagcatctgtgaaaatcccatcatccc

SEQ ID NO: 369259 - DNA, 82 bp, Homo sapiens
gtgggccgcgtcgaagacatggaccagggctacggaggccaccagcttgggctccccacggagggcagcaagtgggacttgg

SEQ ID NO: 369260 - DNA, 100 bp, Homo sapiens
agcttaaagaacgagaaagacgtttaaagatgtgggagcaaaagctgacagagcagtccaacaccccgaatgcaatgagagccactatggaacaccatgc

SEQ ID NO: 369261 - DNA, 90 bp, Homo sapiens
gcccggctgcctcgcactccgcctcccccggctcagcccccggccgcggcgggacccgaggttcgtcaatggcgagcccaccaagaagag

SEQ ID NO: 369262 - DNA, 100 bp, Homo sapiens
ggcctgtgctgaactacctgagacacggcaagctggtgattaacaaagacctcgcggaggaaggcgaacctcttcccggccgctctggtgcacttgggag

SEQ ID NO: 369263 - DNA, 82 bp, Homo sapiens
aaatgtctgactctgactctcggactgagaaacgcaagatgtgcactcccagcaacacccctgccacgccgcccaacttccc

SEQ ID NO: 369264 - DNA, 98 bp, Homo sapiens
aagcaggagggtgtcctgaacagcaagctgcctgtggaggaaccgattgtgtccacagatgaggtcatcttcccactcaccgtttcactggatagact

SEQ ID NO: 369265 - DNA, 50 bp, Homo sapiens
gatcccaccgcacgttcagaagtcggacttaattcagtgcacaaatgaga

SEQ ID NO: 369266 - DNA, 50 bp, Homo sapiens
gcgtcatcgagtgtgacgtggtgaaagatggactcaccctgtcacccagg

SEQ ID NO: 369267 - DNA, 96 bp, Homo sapiens
ttttggtagagaagaatgaacattgtattgagaacaatatagatttgcagtttggggggaaagagctcagagatgaggaacagacagctgagagca

SEQ ID NO: 369268 - DNA, 98 bp, Homo sapiens
acggggcaggctgagttcctcttgctcacagagctctgtaaaggcagtacgccccgaggtgctccgtctgctctgagcccatcatgcctgagcctggc

SEQ ID NO: 369269 - DNA, 96 bp, Homo sapiens
gttgtgtcagtgaattaggagaacttggaaaggttcagtttcgtgacggacacggccaacacggtgaaggaaaagttcgggaggaagctttatgaa

SEQ ID NO: 369270 - DNA, 101 bp, Homo sapiens
tctctgagctggtcagcacagcctgcggtttccggctgcaccgcggcatgaatgtgcccttcaagcgcctgtctgctcaaactggaggattataaggatcg

SEQ ID NO: 369271 - DNA, 100 bp, Homo sapiens
aggcccaaattgaggcgcaatgatgagaggatgtggtggtctactctgatgtcaatcttgagggctagatgccttcgtgaacagccaggaatggacgctg

SEQ ID NO: 369272 - DNA, 75 bp, Homo sapiens
taaaaacaaaattgccagaaaatctttcctctaaagtcaaactgggcgacatggagtccaatgggaaatacatca

SEQ ID NO: 369273 - DNA, 51 bp, Homo sapiens
tggagacacggccagatctgccctccagggtccagattttatggaaatgag

SEQ ID NO: 369274 - DNA, 98 bp, Homo sapiens
ccattttcttggataccaaggacctactctatactctcagtggcttaggaatttgctgattcccttggaattccgtttttggaaaccagtgctaagaa

SEQ ID NO: 369275 - DNA, 100 bp, Homo sapiens
cgagcggtgactccccgccgctcccgggggccgtgacggagaagttgccccagtgcaaggcactgcattcgacctgagaaagccagtggagcttggaaaa

SEQ ID NO: 369276 - DNA, 100 bp, Homo sapiens
agccaccagttcccgcaagcccagacaatgccggtggaggaatttgtggctggctggatctctgaggagcccaaggtgggcatcaagaccatcaaggtgt

SEQ ID NO: 369277 - DNA, 88 bp, Homo sapiens
cgtcggttgagcggcggcgaacatgcgcttttgacacattggaggactcacagaaaacactggacttccccggaagctacttgaaaaa

SEQ ID NO: 369278 - DNA, 80 bp, Homo sapiens
cttcgaagactggcaagcacggccacgccaaggtctggccagcatgacccagaacttagagccacttctgaagaagcagg

SEQ ID NO: 369279 - DNA, 98 bp, Homo sapiens
gggggaccgcagtgtgctctacaagagttcagttgattccaccatctctagttcttcttccactaaaggaataaagaggaaagctacagaaattagca

SEQ ID NO: 369280 - DNA, 50 bp, Homo sapiens
ccggcgcgatgcccttcaggaaaggtacaccaggggttggaaaaaccaca

SEQ ID NO: 369281 - DNA, 74 bp, Homo sapiens
ctcaggccatgcactgttacttaaaggaacctaagaagcggcaccatgtactacagacggctcatccctcccct

SEQ ID NO: 369282 - DNA, 75 bp, Homo sapiens
tgacggcgccggttcgctgcccggtccgcccgcggtgagagctacctgacttacatcaagctatcaacggcaatc

SEQ ID NO: 369283 - DNA, 100 bp, Homo sapiens
gcagaaccccaggctggtgtacgtgttttccaagcagtgaagcacttgccgtgttgaactgaatgcactactggagaatgttctgggtccaagatgctct

SEQ ID NO: 369284 - DNA, 100 bp, Homo sapiens
ggatcatggccgcagccgctctggggcaggacattctgagcatgtgagacctgaggactgcaaacagctataagaggctccaaattaatcatatctttcc

SEQ ID NO: 369285 - DNA, 75 bp, Homo sapiens
gagaaatcgaggagctgcggctctaccccccggaccaaactatgaattactggaaaaagaagtagaaaaaagaaa

SEQ ID NO: 369286 - DNA, 100 bp, Homo sapiens
gactcactgacggagaagcagtggctcaaggcactggtgaggtggattgatgatgaatcttctggcacacctggagcaactccagaacacagtcgtgagg

SEQ ID NO: 369287 - DNA, 100 bp, Homo sapiens
ggttggagagctcatctggaattttgccgatttcatgactaaccagtgaggcaagtgaggcctatctggttggcctttttgaagacaccaacctgtgtgc

SEQ ID NO: 369288 - DNA, 82 bp, Homo sapiens
tatgtcttctaaaaatattgcacagcttatgttcctgaggaagaattgaaggcagcagaaatagatgaagagcacgtggagg

SEQ ID NO: 369289 - DNA, 50 bp, Homo sapiens
ctatgttacagaagtcagagagtgtaccacatgaaggaagatggttgggt

SEQ ID NO: 369290 - DNA, 75 bp, Homo sapiens
attcattctggattggtggatctgaagtacaaaatattttccaggatcgacccttcgaggacacctgtcatggaa

SEQ ID NO: 369291 - DNA, 75 bp, Homo sapiens
catcctggaagctgggaaatggtcaacaacggttccagcctcagggatgagtgcatcacaaacctactggtgttt

SEQ ID NO: 369292 - DNA, 74 bp, Homo sapiens
tactgtccaaatgaattatgtcagcaacgtatccaagaccaaactagagtcagaacgaatactagcatcagtgg

SEQ ID NO: 369293 - DNA, 100 bp, Homo sapiens
ggagggggggaggggatgtcggtcagtgcgagatccgctgctgctgaggagaggagcgtcaacagcagcaccatggttactccacaggatccgctgaaca

SEQ ID NO: 369294 - DNA, 50 bp, Homo sapiens
tgcatctagaggaattgaaatttatgatgtctctggagcagcaagtgaca

SEQ ID NO: 369295 - DNA, 51 bp, Homo sapiens
ccctttatctcggctctctgatcaaagaggaaacatgatgaaagtattgag

SEQ ID NO: 369296 - DNA, 100 bp, Homo sapiens
gcaccggacaacttgcgagccatggggctggcggatgcgtcggggggccagctggagatcagcagcctggtgcccctggggcccaagtatgtggtgaagt

SEQ ID NO: 369297 - DNA, 75 bp, Homo sapiens
ttggggagtatgtggaaccgcaggactgcagggtctctccagagagaactcgatgccaccgcaacggtattggcg

SEQ ID NO: 369298 - DNA, 100 bp, Homo sapiens
gtgatggccaatgacctgcctccctatgacccacagtgtggcatccagagtagcgagagtttgacttacaaggaatctggagtagatatcgcagctggaa

SEQ ID NO: 369299 - DNA, 83 bp, Homo sapiens
gcaggagaagctgagcctttctggacagaccaacctgtcagtgctgcaagaactgtggctgcaccatctgtcttcatcttccc

SEQ ID NO: 369300 - DNA, 50 bp, Homo sapiens
gacaaatccaagaagcagagggccgggcggccggcgcggggcgcaggcgg

SEQ ID NO: 369301 - DNA, 98 bp, Homo sapiens
gagcaaagttaccggacagcaattaaacacagaaggaaatacccagactgttactacaacctcgggcgtctggtaagagcttctgttcgtgtgcaggg

SEQ ID NO: 369302 - DNA, 94 bp, Homo sapiens
ctacagtaaaggaaaaggggattttgctcgcaaggtactgtccaagaagctggaacattattatccagcaagaatgttcgtgtcaactgtttgg

SEQ ID NO: 369303 - DNA, 82 bp, Homo sapiens
ccgagtgtgcgaagctagccaaggttgatgataattagaagcatgctttccactgaacttcccgacaacatttgttatgcag

SEQ ID NO: 369304 - DNA, 100 bp, Homo sapiens
ccgccctggggacgaagagctgcagctcctcctgtgcgggagatgacttacagtctcttctgtttcactttttggatgaatggctttataagttcagtgc

SEQ ID NO: 369305 - DNA, 100 bp, Homo sapiens
cagctccctgaagcggctgtttcgagccacgcgcccatcggcttcggaaccaaaaagaagcttcccagagccggggccaggagccccaagcgccctctag

SEQ ID NO: 369306 - DNA, 82 bp, Homo sapiens
gtctggatttccaaggaagaatttcctctgaagcaccgatgtgaagttcatttccaatccgccctccatggtggcagcgggg

SEQ ID NO: 369307 - DNA, 91 bp, Homo sapiens
cttctccactttcgccagcccgtgccgcgagcgcggcctgcaggaggctgaaggggatgctaagggagataaagcaaaggtgaaggacgaa

SEQ ID NO: 369308 - DNA, 78 bp, Homo sapiens
aaaccttactcatctggagctcattggtcatgcaagacaagataatctgccttccgaaaagagtgcagcctgctcaga

SEQ ID NO: 369309 - DNA, 75 bp, Homo sapiens
tggcgggatgggcgtttgcctaacgtatttaatggagcaatctgcacatcgtgctgccacacgaggcttcattcg

SEQ ID NO: 369310 - DNA, 101 bp, Homo sapiens
ggttggaaaagagactgttcaaaccactgaggatcagattttgaagagagatatgccaccagcatttattaagatctagtgaaaagccatttgatgtatgc

SEQ ID NO: 369311 - DNA, 100 bp, Homo sapiens
gcaactgctggtttgtggcagcctgctcgtcacttgcctcccgggagtcgctgtggcaaaagacatgggagtcccaccgtattgtccaggctggtctcga

SEQ ID NO: 369312 - DNA, 50 bp, Homo sapiens
ctccagcaggcgctggctcctgctcagagctccactggttcaacagcctc

SEQ ID NO: 369313 - DNA, 89 bp, Homo sapiens
ctgctttgaaatttaatggtgccttgaccatggcagttggaacaaccacagggcagcacccttacccttctgaagaacagaaaaagcag

SEQ ID NO: 369314 - DNA, 100 bp, Homo sapiens
gtcatctgggcgtgcgggtcccgggttttgatcgcgcgtttgtgtagctctacttctgcaggccccatcccttcccagaaagaagaggaaatgactgagt

SEQ ID NO: 369315 - DNA, 100 bp, Homo sapiens
cgcagagaagaaacagcagtgcagcttcaagggcaaggacccacagatgaggagcgggaaggcctcctgcaccctggagaccgtgtgggaagacaagcac

SEQ ID NO: 369316 - DNA, 75 bp, Homo sapiens
cacgctacctctttctgggtgactatgtggacagaggctatttcagtatagagggattgtcaatgaggcagatca

SEQ ID NO: 369317 - DNA, 100 bp, Homo sapiens
ccccaacataagtgcttcactgatcttaagtattatcggtttgctgtctcaactaggctgacgccaagatggtgtgtgatgtggtgagtcggatggaaga

SEQ ID NO: 369318 - DNA, 50 bp, Homo sapiens
aacactgatggcagcagttccggatggtgaagtggatgctgaagaacttc

SEQ ID NO: 369319 - DNA, 100 bp, Homo sapiens
tgatgatttagttgattctctgaagtgaaagcaagttgaatacattggtgcagaagcttcatgacttccttgcacactcatcagaagaatctgaagaaac

SEQ ID NO: 369320 - DNA, 101 bp, Homo sapiens
ggtaccggctgggccggaagatcggcagcggctccttcggagacatctatctcgaacaccttccaccatgaccacctcagcaagttcccacttaaataaag

SEQ ID NO: 369321 - DNA, 80 bp, Homo sapiens
ctccaaccatgggaggccgcgtctttctcggccaagaataaggagacgggtgctttggctgcggccaaagtcattgaaac

SEQ ID NO: 369322 - DNA, 100 bp, Homo sapiens
attctgctcctctcctgggcggcggggatgggagctcaaattgaaattattccatgcaagatctgtggagacaaatcatcaggaatccattatggtgtca

SEQ ID NO: 369323 - DNA, 100 bp, Homo sapiens
gcggcgagctgggtggtctggagaccatggagaccctcacggagctgggcgacgagctgaccctgggagacatcgacgtgtcttgggacaaggtgcgcat

SEQ ID NO: 369324 - DNA, 82 bp, Homo sapiens
gcaaggtcgccctcaaggccatgatcaaaacattgtctaaagccccaggaaaaatggtggaaaattcaccgtcgccattgcc

SEQ ID NO: 369325 - DNA, 100 bp, Homo sapiens
gagaggcaccgggatcgtgaccgagaccgtgaccgagagcgtgaccgagagcgcgaatatcgtcatcgttagaaggagctttttaatagatacgagagag

SEQ ID NO: 369326 - DNA, 101 bp, Homo sapiens
agtcaagatgttgccaacattcgtaaggtccattcctgatggctctgggaaatcctcattgacgattcaatttgttgaaggccaatttgtggactcctacg

SEQ ID NO: 369327 - DNA, 74 bp, Homo sapiens
gtcaacaggtgggctcttcagtgatggtggccacaccttcctacagaacttaaacctctgcgccatgagagcca

SEQ ID NO: 369328 - DNA, 90 bp, Homo sapiens
tgccattgaatatattcggcaaggaagcctctctgctaaaccccctgacgtagacaagtttggcaacgagatcacccagctggcccggcc

SEQ ID NO: 369329 - DNA, 82 bp, Homo sapiens
ggtttgcaggggtgcagtgtgtctggtcttatgagaggaatgttacggcatccggagtcatccctcagatttctctgatcat

SEQ ID NO: 369330 - DNA, 90 bp, Homo sapiens
tgcgaattgacgccttttataataaagacacttatcttgcccaagagctgggtgtgatgaatgcagactctgctaccattttggctgttt

SEQ ID NO: 369331 - DNA, 100 bp, Homo sapiens
atctgttggaggagccaactagcatggaagtgcaggaagcactacagttcgtaaggagatcatcaggaataagatcagagccattgggaagatggcacgg

SEQ ID NO: 369332 - DNA, 115 bp, Homo sapiens
ggaatatgttagcgttgtatcttgggagaaagacacagtctccatcatcccagactggacccttgtcgaaactcctcctggggaggaacaagccaagcagaatgccaactcccag

SEQ ID NO: 369333 - DNA, 100 bp, Homo sapiens
ttttgtccagggcagcatctctggtgcatgctgatgacgaaaaaccataccataaagtctccaaaggatggcacagtaaagaaagtgttctacagagaag

SEQ ID NO: 369334 - DNA, 98 bp, Homo sapiens
cccagttccaggtagacatggaggccgtcggggagacgctgtggtgtgactggggcaggaccatcaggaatactcccccagttgcaagaggcgcagga

SEQ ID NO: 369335 - DNA, 83 bp, Homo sapiens
gagcagaacgtgagggtgtaacttacaaaaaggtgaggcggaaccaaccctcctggccatgggaggggccgtggtggacgagg

SEQ ID NO: 369336 - DNA, 100 bp, Homo sapiens
tgacttggaagcaatgtttgaacaaactcgaagaacagctgtggaaagaagttgcaaaacactgggaatggaattctgctgttgagaagctgaagagtga

SEQ ID NO: 369337 - DNA, 98 bp, Homo sapiens
gtcacgccaacaacaggggtaccaacaatgtcacttcacacgcctccatctccaagcaggttgtccgagcggaactgcattgagattgttaataaatt

SEQ ID NO: 369338 - DNA, 75 bp, Homo sapiens
cctgatttcaccgaagcgcatttggtcacctcctctgttacagaatgtctgaaggggacagtgtgggagaatccg

SEQ ID NO: 369339 - DNA, 100 bp, Homo sapiens
gacgaaggtctcccagatggtctaagcttcagataaaccagtcgatcattttctgtaactcctctcagcgagttgaattgctagccaagaagatttctca

SEQ ID NO: 369340 - DNA, 82 bp, Homo sapiens
ttctttagtttcatctctctataaagttatccaggagccacaaagtgagacttccttgtgaaacctcctagtagaaaaagtt

SEQ ID NO: 369341 - DNA, 88 bp, Homo sapiens
cggcgctggaggagcgaggcagctgtactaggactgggaacggtgttacctggaatgtcagagagctgaaagcagtcatattttggga

SEQ ID NO: 369342 - DNA, 100 bp, Homo sapiens
ataccaattcttgaatgacatccgagcgaaagagaaagagcacaagctccgggtggataaggcagctgctgcagcagcggcactacaagccaaatcagat

SEQ ID NO: 369343 - DNA, 83 bp, Homo sapiens
taaacgaggcgcagcgggtgaaggtctggtgtggcagatgtggatagctggaccctcctgggtgcctctgcgttatgtcgttt

SEQ ID NO: 369344 - DNA, 75 bp, Homo sapiens
cccgagacatggccaaagactacatggagaggatggcagcgcagcctagttgattcctagaggggagtgcctgcg

SEQ ID NO: 369345 - DNA, 83 bp, Homo sapiens
tgataagattgaatgccaagcagaaaattacctaaatgcactctttcgaaagaaagccatcactggtgcaagctatatttaac

SEQ ID NO: 369346 - DNA, 112 bp, Homo sapiens
ctatgatggagactttgtctttgatgactcagaagctattgttaacaataagattccacctgctcctacgaagcccgactttgatggtcctcgagagaagatgcagaaactg

SEQ ID NO: 369347 - DNA, 74 bp, Homo sapiens
aagggaccacggtcaccgtctcctcagttttatgtgctgaaagagttggccagatgactaagacatataatgac

SEQ ID NO: 369348 - DNA, 98 bp, Homo sapiens
ttggatgtagcaaggaagaaattgttcagttcttctcagtgcaactgcagatagaagacctgactcgtaaactgcgcacaggagacctgggcatcccc

SEQ ID NO: 369349 - DNA, 74 bp, Homo sapiens
gcggatcccgtccgagccccggccccaagtaacgccgccgccccggagccgccaaactggcgatggaatatgag

SEQ ID NO: 369350 - DNA, 90 bp, Homo sapiens
ggcgacaatgttggcctgtctgcaagcttgtgcaggtgagctgaagagacgcctgaaagctgagaagaaagtagcagagaaggaggccaa

SEQ ID NO: 369351 - DNA, 95 bp, Homo sapiens
ccgagctttgcgggaaagcagcgatgccatggacaatattaccaggcagaaccaattctacgatacccaagtcatcaaacaagaaaacgagtcag

SEQ ID NO: 369352 - DNA, 87 bp, Homo sapiens
cttctcttaggacatttgaaaagttttagatgttgagactggaaatgagtatgggaatttaaagcaagaagtttctgaagaaatgga

SEQ ID NO: 369353 - DNA, 100 bp, Homo sapiens
tgggccgggtaccatggacgtgggcgaacttctgagctaccaggcatagaatgtcaagctaaccaggcgtccgctacttcagaagagtgtactgtcgcat

SEQ ID NO: 369354 - DNA, 100 bp, Homo sapiens
gcatggccggcccgctgcccgacgagcaggacttcatccaggcctacgaggaggtgcgcgagaagtacaaagacccgggaaaaggagaagatgaaggaag

SEQ ID NO: 369355 - DNA, 76 bp, Homo sapiens
acaagttcaacgtcaccaagcctgtggagtacctcaacccccgagtgttctttcaactacctgccacccatccaac

SEQ ID NO: 369356 - DNA, 82 bp, Homo sapiens
tcagggcaagggtgtccgacggctggagcggttcttctgtgtggcagttcagaatgatggatcaagctagatcagcattctc

SEQ ID NO: 369357 - DNA, 98 bp, Homo sapiens
ggaggaggctttggggaccgggaccgggatcgtgaccgtggaggtactaacattctgagagagcctgtgtgtttaggaggatgtgagcacatcttctg

SEQ ID NO: 369358 - DNA, 50 bp, Homo sapiens
gggaacgcagctgaaagcgtgaactaagagaagctgaatttggacgacag

SEQ ID NO: 369359 - DNA, 91 bp, Homo sapiens
ccgtggaccacaggccctcgttgcccagataaagttcaggagccctggaaaggagaaggaataagacggcaggaggaagagagagagaggg

SEQ ID NO: 369360 - DNA, 73 bp, Homo sapiens
taacaggatattcctcatgacattgctgtctgttggaatcaactggactcggccttagtagtagtagactaag

SEQ ID NO: 369361 - DNA, 74 bp, Homo sapiens
ggatatctctactcgctccaaaggactaatttattattgtgcaactgccagtcctgcgcattccagctacgcta

SEQ ID NO: 369362 - DNA, 89 bp, Homo sapiens
tacagtgctcattcctaacagtggatttacttaattaaacaaccaccatgtcgagcaaaaaggcaaagaccaagaccaccaagaagcgc

SEQ ID NO: 369363 - DNA, 75 bp, Homo sapiens
acgggcacgctcaccaccaatcagatgtctgtctgccggtttgggcttcctgtagacacccttttcctgcgcaac

SEQ ID NO: 369364 - DNA, 96 bp, Homo sapiens
aggctgtactgctccccaagaagactgagagtcaccacaaggccaaggaatatgacagatacctagcatctagcaaaataatggcagctgcttacc

SEQ ID NO: 369365 - DNA, 50 bp, Homo sapiens
tccaggttcagcagccgcagcaggttcagaaacactttgtgctactctgt

SEQ ID NO: 369366 - DNA, 87 bp, Homo sapiens
ctgcaaagctgggagagactggaccagaccatgggcctgagcatcagagctcccagctcctccagcagccgacaggaggcccgtcaa

SEQ ID NO: 369367 - DNA, 106 bp, Homo sapiens
cacgctgcgcggcacccctacctgcccatcaacagcgcggccatcaaggccgagtgtgagaagccctaccactgcaactgggacggctgcggctggaagtttgcgc

SEQ ID NO: 369368 - DNA, 90 bp, Homo sapiens
aaagcttttggacattcctggggagccagcaccgctctttgaccttgccatgcttgccttagatagtccagagagtggctggacagagga

SEQ ID NO: 369369 - DNA, 100 bp, Homo sapiens
tattgaagtcaaagccactgaaaactgtgctaaagaagctatttctgccccgtgatgtgaccaacttcaccgtgggtggctttgcgcctatgagtccccg

SEQ ID NO: 369370 - DNA, 96 bp, Homo sapiens
gccgcctggacggctcgggcgctggaggattacagtttaaagacaatttctgtgatcaagttgtcatttggaagattaaacccatttcacgaggac

SEQ ID NO: 369371 - DNA, 75 bp, Homo sapiens
ttgagccaaaacgtgctgtagcaagagagatttcaaaagaacaaggccttgaagttctaccagaacatgatccaa

SEQ ID NO: 369372 - DNA, 90 bp, Homo sapiens
cttttaccaagtacagaggcttcatcttatgaaatggacaagagggcccggattgcatttctacaaggcgaaagaaaaggtcaagagaac

SEQ ID NO: 369373 - DNA, 100 bp, Homo sapiens
gcccagtgtgaaggggaagcctgggaagaggcggagttcgccatgttcagcgggacccacgtggagcgggactttgtggaggcgccgtcgcagatgctgg

SEQ ID NO: 369374 - DNA, 75 bp, Homo sapiens
tccaacacagatgtccaagctgccaagacatcaggcccactggtgtaaccaaggtgcagatgacctaaggtgtgg

SEQ ID NO: 369375 - DNA, 100 bp, Homo sapiens
ggcaacttttctctgaatgcagcctttgagatcaagctgcactggatggcggtgaccgcagcagtactcttcgagatgggtctaaaattcccaggactcc

SEQ ID NO: 369376 - DNA, 80 bp, Homo sapiens
cttgggatccggagggaggaagctgggacacccgggagtcaggaaatgaaaagagtagttgaacagctacggaagaacct

SEQ ID NO: 369377 - DNA, 75 bp, Homo sapiens
tgaaagtgctgtacaccaaccgagcccaggaaacaggagggcgttagtggatcagaagtcatctgtcattaaaca

SEQ ID NO: 369378 - DNA, 83 bp, Homo sapiens
cttgtaatcatcctttatgcctcagacacggcatcagcgaggagatacgcatcctctaaccttagatgaaattttggatgaaa

SEQ ID NO: 369379 - DNA, 75 bp, Homo sapiens
cctgtatgaagcggttggcaccactgaagtgaccgaatgagagaaagatgctggtttcgagttttggagatcctt

SEQ ID NO: 369380 - DNA, 100 bp, Homo sapiens
tgcctcccgcctccgtgtgccctggttgtgagaagacgtctgtgtcgtgcgtggtggtcgtggtgacaggactggccgctatggagccactgaccgctcg

SEQ ID NO: 369381 - DNA, 75 bp, Homo sapiens
taagaaagaatcttgtcactttagccactgctactacagccccagtggaccacctgcatttgccgcccacccctc

SEQ ID NO: 369382 - DNA, 75 bp, Homo sapiens
agcagttcccaggatctgcataaaggctcaactggagaagctacaggcagagatttcacaagcagctcgaaaaac

SEQ ID NO: 369383 - DNA, 100 bp, Homo sapiens
ggccgccgccgcgggccggagccgagcagccgtcggcaggcctagatattatcctactgaagatgtgcctcgaaagctgttgagccacggcaaaaaaccc

SEQ ID NO: 369384 - DNA, 100 bp, Homo sapiens
cagacatcaagctctttgggaagtggagcaccgatgatgtgcagatcaatgacatttccctgcagttacagaatgtctgaaggggacagtgtgggagaat

SEQ ID NO: 369385 - DNA, 95 bp, Homo sapiens
ccggataattctttttatgtgcgaacatgtaacaagaatccaaagaaaacaaaatggtggtatcatgtctatttgcgcagccgtggcatttttct

SEQ ID NO: 369386 - DNA, 100 bp, Homo sapiens
acagcaaatgctgaggactcagaccagtctctgcaagaaccacggtgtgaacacatgaacagaagacgaaaatttcttctagcctcagtacttgctctcc

SEQ ID NO: 369387 - DNA, 101 bp, Homo sapiens
caaggatattatgactgatgctgttgtgattccctgctgtggaaacagttactgtgatgaatgttacattggcgaatttgaaatcattgatgaccacagag

SEQ ID NO: 369388 - DNA, 100 bp, Homo sapiens
tcagcaaacagccaacccatgagagtcgaattggagaacttgttggagtgctggtgaatcatttcaagaggtggaaaaggattattcatacctgaaggag

SEQ ID NO: 369389 - DNA, 75 bp, Homo sapiens
atgttcattttactccgcccagaagacaacatcaggctggcatgttatttgaaagcaattgagacgcaaccgaac

SEQ ID NO: 369390 - DNA, 50 bp, Homo sapiens
gtgcaggcctgctcctccgtttgcaagagctggaagtcgagtgtgctact

SEQ ID NO: 369391 - DNA, 83 bp, Homo sapiens
gtccgtttcctggagtccaaccatatctacacttactgtgaatccacattcatctcaatggaaggatcctgccttaagtcaac

SEQ ID NO: 369392 - DNA, 73 bp, Homo sapiens
atgaacctgaggggcctcttccaggacttcaacccgaggccaagcagatagaacttcagttcactattggcga

SEQ ID NO: 369393 - DNA, 83 bp, Homo sapiens
ttcatgatttcacaaaaaatgttggtttgatgatctgtggccatgtacatatgagttgatctctctaatgtattagatcttca

SEQ ID NO: 369394 - DNA, 80 bp, Homo sapiens
tgaagattgtgaagcaatagcctaagtttttggctttcacccccaaccagtgaccaaagacttgaccactcaaagtccag

SEQ ID NO: 369395 - DNA, 99 bp, Homo sapiens
ggaggaagggaaccaacccactttctcggcgccgcggctcttttctaaaagtgtcagcccaaggccaaccccactgtcactctgttcccgccctcctct

SEQ ID NO: 369396 - DNA, 83 bp, Homo sapiens
ctgttccaggaggacagctacaagaaacacctgaagcatcactgtaacaagaatcccgttctgcttccagaagtggaagtgct

SEQ ID NO: 369397 - DNA, 51 bp, Homo sapiens
tgaacctcctgttcctctgctatccgttgtacatcctggagacctgaagaa

SEQ ID NO: 369398 - DNA, 100 bp, Homo sapiens
gcagacgcaggcctctatgtggctcgggcccaaaactctagcggcgctctctcttccaatgtcatcctccacgtgacagacatgccaccactgctctttg

SEQ ID NO: 369399 - DNA, 82 bp, Homo sapiens
agccgatccagcctgcggagcctgtggggcaggtttctaagcatgaattgaggaacagaagaagcagagcagatgatcggag

SEQ ID NO: 369400 - DNA, 100 bp, Homo sapiens
gctacatcatttgaggaatcagaacgcaagcaaaatgcgttaggaaaatgtgatgcatgtctcagtggcatgagtacagtaccagaagttatcgttgcac

SEQ ID NO: 369401 - DNA, 100 bp, Homo sapiens
gagatcggccgctccatctccaccctcatgtcagacaagatggagcaggcctttgcccgatacttgctggagcagactccagagcagcaggcagccattc

SEQ ID NO: 369402 - DNA, 75 bp, Homo sapiens
cctggagcctcagttggaagcagccgatccagcctgcggagcctgtggggcagggtttggaaatcccttgtctcc

SEQ ID NO: 369403 - DNA, 100 bp, Homo sapiens
cctatggctcaaagaaagatgattatggcggcaccttcctacttctgcccagccacagccctcccctcacagttgagcacctgtttgcctgaagttaatt

SEQ ID NO: 369404 - DNA, 97 bp, Homo sapiens
ggagttctacgtgtcccccgaggatctggaggcacagctgcagtctgacgagagggggacccagacatggagctgcgggaagaagcctggtctccgg

SEQ ID NO: 369405 - DNA, 75 bp, Homo sapiens
tagagacaaattgaaacaacagcaagctgcagatgtatgttgtccaataaggcaagttcccacaggtaaaaagca

SEQ ID NO: 369406 - DNA, 74 bp, Homo sapiens
tcgtttttcgccgtcatgggcgcctcggccgccatggtcttcagcgatgtgaagttcatttccaatccgccctc

SEQ ID NO: 369407 - DNA, 75 bp, Homo sapiens
cggaagaggtctcacgaggctgtcatcaccgccatgcccaagaataaaggactcgggacctggttcgggccgggg

SEQ ID NO: 369408 - DNA, 82 bp, Homo sapiens
gattaacctggagttaaggaacagatccccggaggagaatgaagaagcagtacgacgtctcatctgggaaaagaatctaaag

SEQ ID NO: 369409 - DNA, 50 bp, Homo sapiens
cccgagctatagagaaaggagatgaggttaatttggagtggcccctggag

SEQ ID NO: 369410 - DNA, 107 bp, Homo sapiens
ggctgacaggtgttttctttgtggacatctgatcatggacatggtcaaaatgcagatcttcgtgaaaacccttaccggcaagaccatcacccttgaggtggagccca

SEQ ID NO: 369411 - DNA, 101 bp, Homo sapiens
gaagtctataagctttgcaacagaattacagagtatgatatcctggcgcccctgtgaaattgccttgtctgccagtgaaactgtcgcctccgctacctcca

SEQ ID NO: 369412 - DNA, 112 bp, Homo sapiens
tgtcagtgttaaaggaacctctacaacgaaggtgaagccacggaagataagctcctgccagggccatccaggtgaccgtgtccaacccctaccacgtggtgatcctcttcca

SEQ ID NO: 369413 - DNA, 98 bp, Homo sapiens
tgcagtgggacaggtggcggcgaccggcggcgtccgaggagatggcggcagctatgccatccacgactcccaggcccccagtctcagctctgggggtg

SEQ ID NO: 369414 - DNA, 75 bp, Homo sapiens
gaagcaggatgctgatctaaacgtggaaaaaaacccttaggagaaatcttgagagtggacagcaattgtgaagat

SEQ ID NO: 369415 - DNA, 50 bp, Homo sapiens
gggattttggcacaggaaattgtgaagaacattaaccaggtggtatttgt

SEQ ID NO: 369416 - DNA, 75 bp, Homo sapiens
ccgccgccaccatgcccaagagaaagcttcggaaccaaaaagaagcttcccagagccggggccaggagccccaag

SEQ ID NO: 369417 - DNA, 82 bp, Homo sapiens
tttcagagcccggcaccacccatcttgagtatctgttcagagaagccgaactgggattaccatgcagaaatacaagcttttg

SEQ ID NO: 369418 - DNA, 74 bp, Homo sapiens
cgcgaccgtccgccagtcgtcccgaggccagaagccaaggagtcctcagtgacggtgggatccacaacatctcc

SEQ ID NO: 369419 - DNA, 73 bp, Homo sapiens
tgtttgtattttggctgctgcaggagccattttaggatctttcatgatggtgaacagctctgggagagcctct

SEQ ID NO: 369420 - DNA, 50 bp, Homo sapiens
ttccgttttcgcgtggttcttttgcaagactggctcttcgtggttgtggt

SEQ ID NO: 369421 - DNA, 50 bp, Homo sapiens
gggcgccaagccgcggagcctccagacggtgcctccggagccagcgtggt

SEQ ID NO: 369422 - DNA, 101 bp, Homo sapiens
gtttaggaagtggtatcatgagagatatagcccacttagaaatcacaaaatacaggtatcaggatgaagatacacctcctcaagagcatatttccccacaa

SEQ ID NO: 369423 - DNA, 101 bp, Homo sapiens
aacgaggtgtgggagatcgtgggcgagctgggcgacggcgccttcggcaaggtttacaagagttatcattaccatgttggtgacctgttcagtttgctgct

SEQ ID NO: 369424 - DNA, 51 bp, Homo sapiens
ggcgttcagctgcttcaagatgaaggtacaagttcaggaaacagtcagaga

SEQ ID NO: 369425 - DNA, 82 bp, Homo sapiens
cgggccatacccaataaccaggtgcttggcaaaatcgagcgggccattgttcaggacctcaaggggctcggctatgagaagg

SEQ ID NO: 369426 - DNA, 50 bp, Homo sapiens
gtgctctacaagctacaccttcccccaggaacagatggagtcggataact

SEQ ID NO: 369427 - DNA, 100 bp, Homo sapiens
attttattgacagaccatggcgatgtaaaattagtgtgcagcaaacaacttcctccttgtaacctgagtaaagaggacctgttacagaacccatacttca

SEQ ID NO: 369428 - DNA, 100 bp, Homo sapiens
tacaattaaggatgactgaaaacatcctggaatcaaatagtgttacggcaacaaggactgactgcattgcacagatgatggatatttacgtatgtttgaa

SEQ ID NO: 369429 - DNA, 90 bp, Homo sapiens
gaggatccaagcaatgccatgccggggtttaaagccaatttgtctctcttgaggaggcctggagagaaaacttacacacagcgatgtcgg

SEQ ID NO: 369430 - DNA, 100 bp, Homo sapiens
tcttcatcacgctcatcctccccctcaagttcaaggtctaggtccaggcagttgagaattttgaaccagcaactcagagaacaacagaaaactcaaaaac

SEQ ID NO: 369431 - DNA, 100 bp, Homo sapiens
aaacaacactgacagccagtgcaggtgggctcggtggtggccgtgggctggatccgctcccgcaaggctgtggactggcgcctctttcggaacatcttcg

SEQ ID NO: 369432 - DNA, 97 bp, Homo sapiens
tgagatgaaccggaacatcagccggctccaggctgagattgagggcctcaaaggccaggaaaggccgagggggacggcaagatgcacatcaccctct

SEQ ID NO: 369433 - DNA, 50 bp, Homo sapiens
gaaattactgtctcaagtgatacggtactaggttttgacaagcttgcatc

SEQ ID NO: 369434 - DNA, 95 bp, Homo sapiens
cccgggaggaaggaacgaggcaaggagctaaagcagcgtgcgttcagccctgggttgattatggaagattcccacaagagtaccacgtcagagac

SEQ ID NO: 369435 - DNA, 100 bp, Homo sapiens
tccccggaagaagaagaaggatattcgcgattacaatgatgcagacatggcgcgtcttctggagcaatgggagccaagaccgaggataggtgtggccatt

SEQ ID NO: 369436 - DNA, 98 bp, Homo sapiens
cgcaaccgtcggtgggtcggggatcggtcgcctgagagcgcccgggggctggagaaggccaggcagcagctgcaggaggagctccggcaggtcagcgg

SEQ ID NO: 369437 - DNA, 83 bp, Homo sapiens
ctcaattacacttcgactctcaaagcaataccaggatagctgttgtttcagagaaagtaatctcaggggcgatataatcaatg

SEQ ID NO: 369438 - DNA, 82 bp, Homo sapiens
ccgccccgcgtcatgcggctcctcggctggtgagttgtctgctggttctcagcttgaagaagattctgcagtccttattgat

SEQ ID NO: 369439 - DNA, 48 bp, Homo sapiens
aaaatggtggtctctttataatggaggagcatattatttaatatctag

SEQ ID NO: 369440 - DNA, 90 bp, Homo sapiens
acctaggggctactgagaacgcggtgctctgcacagcatcagaaaaccttcagtgtttctctgcagaaacaaaataaaatgaaatttggg

SEQ ID NO: 369441 - DNA, 100 bp, Homo sapiens
catcaagccccctccacctgaggtaaggcacctatatatctgtgattttcacaaaaatttcatccagagtgtccgaaataaaaggaagaggaagacaagt

SEQ ID NO: 369442 - DNA, 75 bp, Homo sapiens
caagcgtgaccagctttctgttgggaacactcaaaggaattttcagatcagcatccagaaaatgcagctgaaatt

SEQ ID NO: 369443 - DNA, 83 bp, Homo sapiens
gtttttctgttttgcctgaatacatgatttaaacaagagatttccacagaagaaatacagcccctcggaccctgcatttgcat

SEQ ID NO: 369444 - DNA, 100 bp, Homo sapiens
ctacacgtatcctcctgcctagcgcagggaggagagagcgatggcttttttcacccagaaggccagccccagcggcttccccagcctccggaagtgggac

SEQ ID NO: 369445 - DNA, 100 bp, Homo sapiens
aagaaatctcaagatattaaagttactgctgttaaaaaggactaatggctgaaggataaatcaacatggcaactatgattccaccagtgaagctgaaatg

SEQ ID NO: 369446 - DNA, 100 bp, Homo sapiens
cacgcacctgcagctctgctgagagagtgcaagccgtgggtgagctgaagagacgcctgaaagctgagaagaaagtagcagagaaggaggccaaacagaa

SEQ ID NO: 369447 - DNA, 100 bp, Homo sapiens
gggagcccggcctcgtgcgccgcgctttgaggttatgaagacagtatggagtttccagaccatagtagacatttgctacagtgtctgagcgagcagagac

SEQ ID NO: 369448 - DNA, 98 bp, Homo sapiens
agaagtgggggtcctcctcctaagagatctgcaccttcaggaccagttcgcagtagcagtggaatgggaggaagagttggctggggaacagaccaggg

SEQ ID NO: 369449 - DNA, 100 bp, Homo sapiens
tttccaaacgtatggacagctttttatcctccgttgcagacatggttcaaagctggagctctcaaacactgctgtcctgcaccagatgcggcgggaccag

SEQ ID NO: 369450 - DNA, 97 bp, Homo sapiens
gggaacaaaatacaaatcatggagccgctggggtcccttttgcctcagatactattttgaagacccctgaatggttggacagtgattcctgccaaaa

SEQ ID NO: 369451 - DNA, 75 bp, Homo sapiens
ttcacctctgcaaatatgagagattctgcagaagatcctcacaaaggattcagtgacaattagcgtggatggtgt

SEQ ID NO: 369452 - DNA, 82 bp, Homo sapiens
caacgcctggctcggagcagcagcctctgagcagcccctgtcaaagggaacaggaagcagtccacggagggtgacgccctag

SEQ ID NO: 369453 - DNA, 80 bp, Homo sapiens
tccagcatgcaggggctgctcaggtcagcccaaggccaaccccactgtcactctgttcccgccctcctctgaggagctcc

SEQ ID NO: 369454 - DNA, 100 bp, Homo sapiens
ccacgcctgcatccccatcaagaactgggcacctccgggctgtgaaaagttagggaagtgtctgacacctccagaatccattcccaagaagtgcctctgg

SEQ ID NO: 369455 - DNA, 100 bp, Homo sapiens
acggccaggagggctacgtgccgcggaactacttcgggacaacgtctgcatcgactccatgagcgtcaacctcacccgccggacccttgaccggtgccag

SEQ ID NO: 369456 - DNA, 82 bp, Homo sapiens
cggccgcctccgcgagggcaccatggaggtgaatgcagccctgggcgctgcctatggcacagccaagagcggtaccggcatt

SEQ ID NO: 369457 - DNA, 101 bp, Homo sapiens
taggaatctatgatgctgatggtgatggagattttgatgtggatgatgccaaagttttattagttatggctgattgtcctcacacaattggtgttgaattt

SEQ ID NO: 369458 - DNA, 90 bp, Homo sapiens
aggctgggcaagctcttttgggctgattcagatctccggcgaattgaaagcagtgatctctcagccctagaggtggtagatgctttctgc

SEQ ID NO: 369459 - DNA, 98 bp, Homo sapiens
tgaccgagaccgtgaccgagagcgtgaccgagagcgcgaatatcgtcatcgttagaagggtcttgctctgttgcccacgctggagtgcagcggcgtga

SEQ ID NO: 369460 - DNA, 75 bp, Homo sapiens
ctcccatccagtccggcacccagtaccatattctctggaggttttagacactttaattagacacttcagaatttt

SEQ ID NO: 369461 - DNA, 97 bp, Homo sapiens
ttacagaaggatgtggtacagctccatgctcctcgatatcagtctatgagaaggaattctaccaaatatctggctgggtagctgccctcgtcaggtg

SEQ ID NO: 369462 - DNA, 90 bp, Homo sapiens
ctggatttttagttgaagagtctcttcccctttcagagctcacagagacttcaaatggttgtcgccgttgctcaggatcatccccatctg

SEQ ID NO: 369463 - DNA, 87 bp, Homo sapiens
ataagaccgttggttctgacgaggcacagcgtttcttgcaagaatgggagatgtatttatttgtgggggctataatggagaggtgat

SEQ ID NO: 369464 - DNA, 100 bp, Homo sapiens
ctgcatcttcgcactggctgtgcgggtgcgctacaaggaggagtttgagaagaacaagggcaaaggtttcagcgtagtggcagacacgcccgagctccag

SEQ ID NO: 369465 - DNA, 82 bp, Homo sapiens
ggctgtggaagatgctcccagctacagagggtaccgggatgcctgcaccattactggctccaaccaggaatggagacgccat

SEQ ID NO: 369466 - DNA, 100 bp, Homo sapiens
ggccacgcctgggccttgctgccaggaagcttcggccccgcagctcggcttgctgcggtctcaggtgtccctggccagtgtccttccacctgtccacaag

SEQ ID NO: 369467 - DNA, 90 bp, Homo sapiens
ggatttgttaaggattccaagtaactcttatttgctcaccgcagatggctccatctccttcccaagtccagatgctctggcctctggtgc

SEQ ID NO: 369468 - DNA, 75 bp, Homo sapiens
gccgcgggcaggacgcgcgctgcagtgtggacgaatgtggaacctcgctctgtggctgtgttcccttggcactcc

SEQ ID NO: 369469 - DNA, 122 bp, Homo sapiens
cggccaatgtgggatcgatgtttcaatattggaagcgctttgatttacagcagctgcaggtgctggagaatctggtaaaagcaccattgtgaagcagatgaggatcctgcatgttaatgggt

SEQ ID NO: 369470 - DNA, 82 bp, Homo sapiens
ccgctggcgagcgccaccgcatggagccatccaaaactctgtttgtcaaaggcctgtctgaggataccactgaagagacatt

SEQ ID NO: 369471 - DNA, 90 bp, Homo sapiens
aaactggaggtcacctcgaaagttctcaccactaaagaatatgacagatacctagcatctagcaaaataatggcagctgcttaccttgac

SEQ ID NO: 369472 - DNA, 50 bp, Homo sapiens
actctgactctcggactgagaaacgcaagctgtcgcctggttgggcccgg

SEQ ID NO: 369473 - DNA, 74 bp, Homo sapiens
gtttccacggccactccagtgccaacagccaattctacagatgatgattctgataccgagacgtcaaatgactt

SEQ ID NO: 369474 - DNA, 82 bp, Homo sapiens
cctgggcgctccggtggcggcggagctgtcccctttcctccaacccaacggcttactttcaaggaagtatttgagaatggga

SEQ ID NO: 369475 - DNA, 73 bp, Homo sapiens
tggtggaacaaatatcattaagctgattgacactgtaaaggaccccgtgtcacgaacccccgccttggttttt

SEQ ID NO: 369476 - DNA, 98 bp, Homo sapiens
tcctttcctttctccctcgcgttaggctactgcagcactggggtgtcagttgttggtccgacccagaacgcttcagttctgctctgcaaggatatata

SEQ ID NO: 369477 - DNA, 75 bp, Homo sapiens
cacctcgggggccacactgcaggcctccgcgctcagtgctcaccatggatgatgatatcgccgcgctcgtcgtcg

SEQ ID NO: 369478 - DNA, 100 bp, Homo sapiens
tgcgcgccctggcgggtccggaccaagctatacacagaatgggattttacatatgctggacagaaataagagaatcaagccccggccagaaagattccag

SEQ ID NO: 369479 - DNA, 100 bp, Homo sapiens
ccgagggcttccgcaagcgaggcccctcggtgacggccaaggtgtcagcttcctctggtgcaaccagcaagtcttccagtatgaatcccacagaaaccaa

SEQ ID NO: 369480 - DNA, 100 bp, Homo sapiens
atggaggacgagcaatggctgtcgtccatctcgcagtacagcggcaagatcaagcactggaaccgcttccgagacgttatgaagacagtatggagtttcc

SEQ ID NO: 369481 - DNA, 98 bp, Homo sapiens
cacggccgcgctgctcatccccaaggaggacggcgtgatcacggccagcgaggacaggtgaagattttactgaagtacatcagaattggaatgctcat

SEQ ID NO: 369482 - DNA, 50 bp, Homo sapiens
tctgaagtaatatctggactttgaaattgggacaggcaaatggtatgaat

SEQ ID NO: 369483 - DNA, 83 bp, Homo sapiens
ctaaaggagcccatcgtgcgggtcttgcaaagacttaattcagtgcacaaatgagatgaatgtgaacatcccacagttggcag

SEQ ID NO: 369484 - DNA, 75 bp, Homo sapiens
atcgtcgtgaggatcgtgtgcattacaggagtcctccacttgccactgggctcctcctgctggaccctccagccc

SEQ ID NO: 369485 - DNA, 50 bp, Homo sapiens
atgaagtgcttcctggagctaaggagacaaagcattatctaactgtgaac

SEQ ID NO: 369486 - DNA, 100 bp, Homo sapiens
ggatcctggatctgggcatcacgggccccgagggacatgtgctgagccgacctgaggagaacctgtcccgggggctggtgaacgtggccgccaagctgac

SEQ ID NO: 369487 - DNA, 75 bp, Homo sapiens
gtggaatcaggccggctggtgagggtacaggtgagacgtggtcttgtaacacagtggttaagaatgtgactttgg

SEQ ID NO: 369488 - DNA, 90 bp, Homo sapiens
tgtcttgttttttccctgcaacagatggatgggaaagtaccagtctcagtgaggaggaggatgctgatggtgaatggattgatgtgcaac

SEQ ID NO: 369489 - DNA, 74 bp, Homo sapiens
gatgaggaagtactgagcctgttggaggaactggcccggaaacaggaggacagccctgaggatgatgacaggaa

SEQ ID NO: 369490 - DNA, 100 bp, Homo sapiens
agcatcgggctggcccagctgctgctcttcgcccagcagatctgcgaggacttcactgaggatgtcaactgtgcttttgagttcctgctgaagctcaccc

SEQ ID NO: 369491 - DNA, 75 bp, Homo sapiens
actggaatctggatgagcagctcaagcaggtcggatcatgctaaaaggagataatattactctgctacaaagtgt

SEQ ID NO: 369492 - DNA, 83 bp, Homo sapiens
ctcatcgggagaatgctcttcaggatagtatcttggccagggaactcaaacagcagatgcagagtcacctctactttcctgct

SEQ ID NO: 369493 - DNA, 90 bp, Homo sapiens
attgtcatgattgtttatcctaatcccaatgctgaagtaagattgtcttggaaatactaagttgggagatatgtcagtattgaattctcc

SEQ ID NO: 369494 - DNA, 76 bp, Homo sapiens
gctggcgcagcccacgctcatgatcgacttcctcacccgcgcctgcgacctcggctgaccccgcactacatctacc

SEQ ID NO: 369495 - DNA, 100 bp, Homo sapiens
gtgaagctaacaaagcgaagtggccatactcaggctgagtcatcactagagagtgggaagggcagcagcagcagagaatccaaaccctaaagctgatatc

SEQ ID NO: 369496 - DNA, 100 bp, Homo sapiens
aaagaattcagaaggaacttgcagaaatcacattggaccctcctcccaactgtagtgatatcagtatcaagataaaagtttggaatgggagaaaaattct

SEQ ID NO: 369497 - DNA, 50 bp, Homo sapiens
ctaagactgcttccaatgtagaagagagttcttggagtctctgcggagtc

SEQ ID NO: 369498 - DNA, 83 bp, Homo sapiens
cctggaccttggacattcagacttcagaatgcttccatgaggcaggctgaacctgcagatatgcgcccagagatatggatcgc

SEQ ID NO: 369499 - DNA, 100 bp, Homo sapiens
gccgccgctgccaccatccgcgaggcaggagagaggaggaggagtgcggcgcggcggccccgggaccaaggaggtctcctctgagcctccggcctccata

SEQ ID NO: 369500 - DNA, 100 bp, Homo sapiens
gaatggcttgacaaaatcgagaagggctctttggtgacgtgtgagttcctcctacagaatggtgctaatgtcaaccaaagagatgtccaagggcggggac

SEQ ID NO: 369501 - DNA, 73 bp, Homo sapiens
attgggcaagagaagaattcagaagaaacaaaagtgccaccgaagagattcatgatgttgctatcaaaagttg

SEQ ID NO: 369502 - DNA, 100 bp, Homo sapiens
caaacgtctacactgtacatgctttttattacaagactacggagcataggaggaaaattcatcatctggctcatatgacattaacagacaagacactttt

SEQ ID NO: 369503 - DNA, 90 bp, Homo sapiens
cccgaaggaaaaggaggaattcgccgtgcccgagaatagctccgtccagcaggctgatcaggctgccaaggtagagaagatgcgccagag

SEQ ID NO: 369504 - DNA, 100 bp, Homo sapiens
atgaaatgattgaatctggtgttatcaacttaaaagatgccacctctaagggcaccagaactagcacctctgaaaagtaaaatgatctatgcaagctcca

SEQ ID NO: 369505 - DNA, 134 bp, Homo sapiens
aaagctgtcctaggccaaccagagattcatctttcatgcagtgacatgttgataaaaaatgatggtgctgccttcacctgcctggagactgccttccgcctggacgccctgcaccggcagatgaagcttctggg

SEQ ID NO: 369506 - DNA, 80 bp, Homo sapiens
gcaaggagctaaagcagcgtgcgttcagccctgggtcagggccgggacctgaagctgtgcctgtgggacctcgcggaggg

SEQ ID NO: 369507 - DNA, 99 bp, Homo sapiens
tgcggagcgtctgggatgcacactacctcagctagctgttggggcagcctactgccagttcatggacatgctcttccccggctgtgtgcacttgaggaa

SEQ ID NO: 369508 - DNA, 103 bp, Homo sapiens
ctgcagtacctgcagaaggtctctggagacatcttcagcagcaacacagtcactcctggcggcaaaccaaacaaaaccagagtcatctggggaaaagtaactc

SEQ ID NO: 369509 - DNA, 100 bp, Homo sapiens
cctgctaccccatgccatcaacctgcgtgaggtcaacctgcgcccccagatgtcccagggaactgctcgcagaaagaagaaggtggttcatagaacagcc

SEQ ID NO: 369510 - DNA, 84 bp, Homo sapiens
ccgcccttcgccttcgttgagttcgaggacccgcggattttttatcaagcagaaatgcatcgaacaacgagaatcaagatcact

SEQ ID NO: 369511 - DNA, 75 bp, Homo sapiens
aatagcaatcctccccccatcataaaggaagaggagttgtacgcatgtcagagaggttgcaggctgttttcaatt

SEQ ID NO: 369512 - DNA, 100 bp, Homo sapiens
agaccatccctctgacagacaatacagtgattgaggagcacctggtcatcgaagaagccaactggatgactctggacaaagatgtgccccagtcagcaga

SEQ ID NO: 369513 - DNA, 100 bp, Homo sapiens
gaaggaggagagtgctgcttcaggaggagcagcctatacaaagaggcatataagtggtatgagcttgggcacaagagaggacactttgcatctgtctggc

SEQ ID NO: 369514 - DNA, 100 bp, Homo sapiens
gccgcgaacacctcactattgatggtgtagcgctttaggggaagttttcggctttgtgagaaaccttaccatcaaacacgatggccagcaacgttaccaa

SEQ ID NO: 369515 - DNA, 100 bp, Homo sapiens
cgaagcctgacccgactgcctctctcagtgagctgctctgttaaaagcgaaaatgaaacaattgcctgcggcaacagttcgactcctttcaagttctcag

SEQ ID NO: 369516 - DNA, 90 bp, Homo sapiens
gttttcctaaaagactgaaatgggggcgaccattcttaggcccttgatgagcctccctatttgacagtgggcactgatgtgagtgctaaa

SEQ ID NO: 369517 - DNA, 98 bp, Homo sapiens
gtatctgtagatggctacatgaacatgcaggtcattgcacatgaaatatctcatagctggacagggaatctagtgaccaacaaaacttgggatcactt

SEQ ID NO: 369518 - DNA, 90 bp, Homo sapiens
tgtggaaatcgatgatgcattgtatagaaaacctcggatcaattctcagctggtggcacaacaagtggcacaacagtatgccaccccacc

SEQ ID NO: 369519 - DNA, 100 bp, Homo sapiens
ctcctgcaaaagtggaagcgaagccgaaaaaggcagcagcgaagactctgaacaggaagtgcctcctggaaccacagagtcggttcagtctgtggattac

SEQ ID NO: 369520 - DNA, 50 bp, Homo sapiens
gagttgagccttccaagaagaggcagcttcgtttggcaacatattgactg

SEQ ID NO: 369521 - DNA, 100 bp, Homo sapiens
gcatcatggactgtgcgcccaagacttaattcagtgcacaaatgagatgaatgtgaacatcccacagttggcagacagtttatttgaaagaactactaat

SEQ ID NO: 369522 - DNA, 96 bp, Homo sapiens
tggtgaggcaggctcgcctcctccagctgttgttgctgctgctgtgcaagttcattcgcaaacgtcctagaagtggaactgctgggtcaaagtgca

SEQ ID NO: 369523 - DNA, 75 bp, Homo sapiens
cttaaatgatgtattttgtgatcgcagcgatgaaagatgcggcattccaaaagaactcactgtcctgattgggat

SEQ ID NO: 369524 - DNA, 99 bp, Homo sapiens
aaggaactgtggcttgtgatccatgggcgagtctacgatgtcacccgcttcctcaacgagatctacgcagaccccaccaagaggctggagctgtacttc

SEQ ID NO: 369525 - DNA, 75 bp, Homo sapiens
tactcttattgattcacttaagaaaactcagcctgagaatgttgtattccctgaatgactataaaccacccattt

SEQ ID NO: 369526 - DNA, 90 bp, Homo sapiens
ggagaaggtgaaattctgtgtgctccctccggcgagagactttgtcagctcccgcacagtaacgtacctactgtcaacaacgggaagtgg

SEQ ID NO: 369527 - DNA, 75 bp, Homo sapiens
tcaggtttttctggatggaaatgaggtttctaagcatgaattgaggaacagaagaagcagagcagatgatcggag

SEQ ID NO: 369528 - DNA, 75 bp, Homo sapiens
tttgaagattttctctttactaaaagcataataccacttcagccaaaggatttctgtccccaggatcacgtagcc

SEQ ID NO: 369529 - DNA, 100 bp, Homo sapiens
tccaaagagatacagggcagaggaaaatgcaagaagactgatggagcaggcttgcaatattaaagaaaaagaaagtgatgctgtgaagccaaagaatcag

SEQ ID NO: 369530 - DNA, 83 bp, Homo sapiens
ggcgcctcttcctcgcagtctccactcggcaaccaccatcggaaataagtggcatgtctgtgacccagtgctccaaggaggac

SEQ ID NO: 369531 - DNA, 82 bp, Homo sapiens
gaatttgaaagctagacaggatcgtcaggctgaaggaatcttggtaaatgggaacgtcaaggtcgtgggaaataaaaggcag

SEQ ID NO: 369532 - DNA, 75 bp, Homo sapiens
gtcagagctgaggtacttcgtgaaggtgcactgggacagaaacgacacaaacttaattcctaatggaagtagcat

SEQ ID NO: 369533 - DNA, 82 bp, Homo sapiens
taaggattccaagtaactcttatttgatggcgttcaggaagtggcttatattcactcaaaccagaatgtaattggatcgagc

SEQ ID NO: 369534 - DNA, 87 bp, Homo sapiens
ccgagtctccgccgctgcgggcccgctccgacgcggaaggcctgttacatgaacagaatatggcaaaaatgagactacttactttta

SEQ ID NO: 369535 - DNA, 75 bp, Homo sapiens
ggccacgccttcaccctcgttggccgtctggacagctgggaggatgaatacgacgacattgtggttcacagcagc

SEQ ID NO: 369536 - DNA, 75 bp, Homo sapiens
agcctgcggagcctgtggggcagactctcagcgttctcatctctcttccttcaccatgaagctgatggacaaatt

SEQ ID NO: 369537 - DNA, 83 bp, Homo sapiens
aagtagaaactgccaagaaatccaaaaagccgagtagagaagttatcaggctttatcctgtggataaacgcagagtgaacgag

SEQ ID NO: 369538 - DNA, 100 bp, Homo sapiens
gatccccaccacctacagtaaaaaggtctgacctacgagaaacatggcaaccagcgccgtccccagtgacaacctccccacatacaagctggtggtggtg

SEQ ID NO: 369539 - DNA, 82 bp, Homo sapiens
gtgtggccaagaagctggtgtgcggagatgaaggaactgtggctgcaccatctgtcttcatcttcccgccatctgatgagca

SEQ ID NO: 369540 - DNA, 100 bp, Homo sapiens
aggggacccagtgcgcccgcatcgtcgagctactccagctccaagtgagaaaggagaaggcataaggacacctcttgagaaggaggaagctgaaaaccag

SEQ ID NO: 369541 - DNA, 100 bp, Homo sapiens
acctgttcaagcagagctattggaatcacagtggtggacttgctttgtgaagagacagttcatgaacaagagtctttcaggacctggacagtgaagggag

SEQ ID NO: 369542 - DNA, 75 bp, Homo sapiens
aggcctccccagccatgcagaacttgctgggcctaaaggagataacatttatgaatggagatcaactatacttgg

SEQ ID NO: 369543 - DNA, 95 bp, Homo sapiens
gttgttttataaactgcctggccgaatcagccttttcacgctcaaggttcaagcactgtcttcctgttggccctgacaatcatagccagcacctg

SEQ ID NO: 369544 - DNA, 90 bp, Homo sapiens
ggccggcatcgtctttccgtcctctgaggcgacggccgcggctgcacagaaaacattgagagccatgctggtatatactccttgccacag

SEQ ID NO: 369545 - DNA, 98 bp, Homo sapiens
ctcaaacgtctaccattacagtggtacagaatgagcacatgttgttggtgtacgccaggtggtgcttccaccattgacttcctaaagcgctatgcttc

SEQ ID NO: 369546 - DNA, 73 bp, Homo sapiens
tttcttccagcttctgctgtccttctttgtggagagcaaggccccaataagaaacccttttccctgaaggaga

SEQ ID NO: 369547 - DNA, 83 bp, Homo sapiens
ctcagacaccatggggaaggtgaaggtcggagtcaacggggggatatgagactttctactcggaatatcctgagtgttgcgtg

SEQ ID NO: 369548 - DNA, 75 bp, Homo sapiens
gccctggggctgacaggaatcttctggtgtactctttttatgaaaagatgcctggaatgatgtcgtcagtaatgc

SEQ ID NO: 369549 - DNA, 96 bp, Homo sapiens
gctcaaggggagcctgctggagctgcagagagccctgcatgataagcagctcaacatgcagatctctgacatctacattagtggagaatcagggga

SEQ ID NO: 369550 - DNA, 100 bp, Homo sapiens
aagagcactaagatcggaagatgagtgagcttgaccagttacggcaggaggccgagcaacttaagaaccagattcgatgacatattcgatgccatgttcc

SEQ ID NO: 369551 - DNA, 95 bp, Homo sapiens
ttaattgactcgagttgtcttttagaaacactagaaacatatctgcgaaaacacagtgatgttcctccatcttacgttcaaactaaattttctag

SEQ ID NO: 369552 - DNA, 123 bp, Homo sapiens
aagtcgggggctttcgcccgggtcctcctagaaattccccccgaagaagactcccccacatctgggtgtcgtgaaaactacccctaaaagccaaaatgggaaaggaaaagactcatatcaaca

SEQ ID NO: 369553 - DNA, 75 bp, Homo sapiens
agcacccctttcttgaaccgaacagagtcaagtggaatcaaagaactgataaatttcaaacggaagagagtggca

SEQ ID NO: 369554 - DNA, 75 bp, Homo sapiens
cagagctttacgatgtcacttgggaagggtcatcgagcagctcggtgggaagcagctggtcatgaaccacatgca

SEQ ID NO: 369555 - DNA, 100 bp, Homo sapiens
cgacggcaccctgctctacaccatgcggctgggcttcccaatgatggttgtgtcctgcactgttgggatgtgttatctccttgtggctcatgtggtggtg

SEQ ID NO: 369556 - DNA, 87 bp, Homo sapiens
ttatcagatgttcttgacagagtgtcagtttctaggcttgtgtacatctatacatccagaaggttaccaggatcgtgaaataatgtt

SEQ ID NO: 369557 - DNA, 100 bp, Homo sapiens
cgcgcggcgcctcgagctgcctcgggcctctgacgtttgcctatctggggcgcctggctcacgaggttggctggaagtaccaggcagtgacagccaccct

SEQ ID NO: 369558 - DNA, 98 bp, Homo sapiens
ttccaacaccagtggaagatgatcacatcccaggttcaaaccttgtactactcagctgatcacaagctgcttgatgggaacctactagatggacaggc

SEQ ID NO: 369559 - DNA, 82 bp, Homo sapiens
cccggtgtgtggcgcgcccagagccccgcgtttcagccctagggaagtgtaggaagaatgatgatggagacacagttgttgt

SEQ ID NO: 369560 - DNA, 100 bp, Homo sapiens
cctctgagctttctggacttccagctgggcctgacagagaaggctcactcaaggatcagttggctttagcaattggctgaactcacgggaatcaaatggc

SEQ ID NO: 369561 - DNA, 83 bp, Homo sapiens
agtgcagggaagagagaccttagaaaggatcaggactggcggggggatatgagactttctactcggaatatcctgagtgttgc

SEQ ID NO: 369562 - DNA, 73 bp, Homo sapiens
gagaaatttgaagagatgattcaacaaggtactccgaaaacaaataggacaaataaaccttctacccctacaa

SEQ ID NO: 369563 - DNA, 51 bp, Homo sapiens
tctttgcatccggagagtggacaagaaactctagaggacaaaatcccagtc

SEQ ID NO: 369564 - DNA, 85 bp, Homo sapiens
ggaggtgacactcacggaccttagccaccgccgccgccatcgccaccatggcaagtcaagccagagatctgttatcaaaaatgtt

SEQ ID NO: 369565 - DNA, 76 bp, Homo sapiens
aaccaactcagaatgcttctgagaaggctaaagaacgtgccaatggaatggagcttgatgggcgtaggatcagagt

SEQ ID NO: 369566 - DNA, 145 bp, Homo sapiens
cgcagggagctgcttggcagtgccagagcccaggccccagagccctgctggagaggaggcagactgaggcagcaggagaaagtggatgaggaggggctgaagaagctgatgggcagcctggatgagaacagtgaccagcaggtgg

SEQ ID NO: 369567 - DNA, 75 bp, Homo sapiens
acttcctgaaaggatgtgcaaccctccaagtggaagagaattcgcacaaccacggggacggtgcagaggacttca

SEQ ID NO: 369568 - DNA, 88 bp, Homo sapiens
gaggagactgttgctgatctttggatgttctgctctgcttatgataatgtcaacaaagttcgagtagctatcaagaaaatcagcccct

SEQ ID NO: 369569 - DNA, 75 bp, Homo sapiens
ttccaacacagatgtccaagctgccaagtatggcccatctcctgtacgcttggagcgacctttggctacgtggct

SEQ ID NO: 369570 - DNA, 75 bp, Homo sapiens
gtaaagcgccctccctgcttcccagacaatgcagatcttcgtgaagactctgactggtaagaccatcaccctcga

SEQ ID NO: 369571 - DNA, 51 bp, Homo sapiens
ccggcgctggcgccgcgtggcagtggggtaccaggtcatcagtacaccatc

SEQ ID NO: 369572 - DNA, 82 bp, Homo sapiens
ttaggttcaaaattccggtactgatcctcacaaaggattcagtgacaattagcgtggatggtgtggtctattaccgcgttca

SEQ ID NO: 369573 - DNA, 74 bp, Homo sapiens
cacggtcctggtaacccccctgggcgcccttggagtaccgttcgggttcgaagtcaacaataccattcttcacc

SEQ ID NO: 369574 - DNA, 99 bp, Homo sapiens
cgagggcgtgcgcggcacctgcgaagatgcttccctgtgcaagagtgtggggtgatcagccccagatttgacgtgcaactcaaagacctggaaaaatgg

SEQ ID NO: 369575 - DNA, 74 bp, Homo sapiens
ctcatttcattgaggagcagcaggcacagcagcaggaccctgatgctcccataagacagaaaatgccccttgat

SEQ ID NO: 369576 - DNA, 50 bp, Homo sapiens
gaagaggaggttgcccagaagaaaaaggggaaggaggagtttgagaagac

SEQ ID NO: 369577 - DNA, 82 bp, Homo sapiens
tcgatgacaccattgcagaaggaataaccttcatcaagttttatgctccatggatggctgctctttttctaaagaggttaac

SEQ ID NO: 369578 - DNA, 90 bp, Homo sapiens
gacaagggccccaacagtgcattagtgcagcagcttatcaaaggtgaagcggtgagtgctggagatgcattatgtgaaattgagactgac

SEQ ID NO: 369579 - DNA, 75 bp, Homo sapiens
tacttggtgcaggaaggcagtctttgctacgtacagcaaaagccatgctgtgacctacaagcaaactaaatagcc

SEQ ID NO: 369580 - DNA, 90 bp, Homo sapiens
gcccagggtcggctggcggcgtcggggactgccagggagtggaggggagccaggcggccgcctcagaaactccaagaggaggaggaggag

SEQ ID NO: 369581 - DNA, 76 bp, Homo sapiens
cccggcccaagggcgacttctccagccgggcccgcgaagtgaaagcgtggatacccatcaacgaagttttgatatt

SEQ ID NO: 369582 - DNA, 75 bp, Homo sapiens
caagaactggctcaagaaatttgcctcgaaaaccaaggtgtccgtgccgctgctgaagacgctggaccacgtgct

SEQ ID NO: 369583 - DNA, 49 bp, Homo sapiens
tctacttcacaggaattgccatttgccatcgaggagggcacgctggagg

SEQ ID NO: 369584 - DNA, 96 bp, Homo sapiens
gaaacctgggaaggtggtgcttgtcctggctggacgctactccggacgcaaagctgtcatcgtgaagatttggaacattgctaccaataaactgac

SEQ ID NO: 369585 - DNA, 75 bp, Homo sapiens
gggtaccctctatgaaaaacagaatggaaaagagtcttctgggtgtccgcaatgttgccagtgtctgtctgcaga

SEQ ID NO: 369586 - DNA, 90 bp, Homo sapiens
gggcctcatcctcaaccccattttccgccagaacctccgcattgcccttctgggccttggacaagattcgctatgagagcctgacagacc

SEQ ID NO: 369587 - DNA, 96 bp, Homo sapiens
cgcctggagtttcatataagtaagttctctacagaaagaaccaatgaacccaataggaacaaattctctgtggaaaacaaagcatagctgtagtag

SEQ ID NO: 369588 - DNA, 83 bp, Homo sapiens
ccggtcctgaccaccgtgaacggacagtcccccccagaaaattgtacaagctggagataaggaccttgatgggcagctagact

SEQ ID NO: 369589 - DNA, 98 bp, Homo sapiens
tcttctggcaaacagtgtttgcctctggttcagctcatacaacagcttcttagtgggagctggtgaggtggccaacttcgctgcgtatgcgtttgcac

SEQ ID NO: 369590 - DNA, 83 bp, Homo sapiens
aacctgcagaagaactggcttcgggaattttaccagggagtgcatccgccccaacccttttccccctcgtctcctgtgagaat

SEQ ID NO: 369591 - DNA, 90 bp, Homo sapiens
tttctcttgtcaatggccaacagagggaaggatacaaatggttcacagttcttcatcatattccaagccctgccaagaaagtaccaagac

SEQ ID NO: 369592 - DNA, 75 bp, Homo sapiens
agatggctgcagcagctgccagacctattaatgccagcatgaaaccagggcttctttcgccgcacaatccagaag

SEQ ID NO: 369593 - DNA, 98 bp, Homo sapiens
gaaggaaacagttccctgtcttgggaaaaggagaactcctgactgattagcattcacaccagattgggagtgtgcttttgaggaagaccacagagata

SEQ ID NO: 369594 - DNA, 73 bp, Homo sapiens
aggaagaggaggaggaggaagaggagaatgtgatccgagaatttaacttaaatgagctataccagcgggccaa

SEQ ID NO: 369595 - DNA, 100 bp, Homo sapiens
ctgcattccagccaaattcccagaacaagaggaaagtatggggaaggagccaagcaggagacgttcacctttgccttaactttggtcttcattcaatgtg

SEQ ID NO: 369596 - DNA, 106 bp, Homo sapiens
cgcggtggtgccctcagccccgtcctcttgtcctcctcagcctcgacaatgcagatcttcgtgaagactctgactggtaagaccatcaccctcgaggttgagccca

SEQ ID NO: 369597 - DNA, 87 bp, Homo sapiens
tcactgaagaaatcctggaactgctgaatcagcgaggccttcgagatccaggggtctcggcgcggaagatggccggcggcgtggacg

SEQ ID NO: 369598 - DNA, 101 bp, Homo sapiens
aagacatggatgtcaaatactttgcacaggaagctataagtgattgatatcagtaaatgccattatttagtggatttggacaccatgagagaaacaccccg

SEQ ID NO: 369599 - DNA, 75 bp, Homo sapiens
gcagcagggctggcaccctgtgtcacaggtgcgtgctctggaggaggccaacgccgacctggaagtgaagatccg

SEQ ID NO: 369600 - DNA, 74 bp, Homo sapiens
cgagtgcctgcaggatgtgagggaggatcttagaaatgaagttgaaaaattacgcaatgaagtgaatgaaagag

SEQ ID NO: 369601 - DNA, 82 bp, Homo sapiens
agaagtggagcgtgtcctgaaggagttccaccaggccgggaagcccatcggatggggacccagagcctgctcttgggaacag

SEQ ID NO: 369602 - DNA, 100 bp, Homo sapiens
gagctttatgtctagcaagcacatctttgcactctttaatacagagcaaaggtcccccggcagagggcagtagagatggccggcccaaggcctcggtggc

SEQ ID NO: 369603 - DNA, 50 bp, Homo sapiens
tatcctgtgggatgagacggatgtggctctgccagcagacagccttggca

SEQ ID NO: 369604 - DNA, 75 bp, Homo sapiens
cgtgagcccaagccgcggtcccgggtcctggtgcttgatggtcgaggccatctcctgggccgcctggcggccatc

SEQ ID NO: 369605 - DNA, 100 bp, Homo sapiens
acaggagtcaccttccacccagatcagtacaaggccttagattttagtgatgatgaaaaagagaaggaagccaaacagaggaaaaaatctcagattcaag

SEQ ID NO: 369606 - DNA, 90 bp, Homo sapiens
aaggacacctacagccccgacgaacatttctgggtgacactcaacaggattcccgatatttggagttcttacaacatggcagacattgac

SEQ ID NO: 369607 - DNA, 75 bp, Homo sapiens
ctaccgggccacgcaccgcctgctgctgctggatggtcatcatgggccagtgctactacaacgagaccatcggct

SEQ ID NO: 369608 - DNA, 80 bp, Homo sapiens
tcttgccagccaccactcagtctcctgctcgatccaatggatttgaacagaagcgctttgccaggcttgccagcaagaag

SEQ ID NO: 369609 - DNA, 75 bp, Homo sapiens
actgcctgcctgcctgcctgctacgcaagcggctggattatgtgaaccatgccagaagactggctgaagatgact

SEQ ID NO: 369610 - DNA, 101 bp, Homo sapiens
tgggaggagccgatactgagcttcttcctatttgccatggtatcaccttttgccatgatagcatttctttcattggacagttccttacaagggctccactc

SEQ ID NO: 369611 - DNA, 87 bp, Homo sapiens
tagccaagctgtcctgcctgggttgggcccatgagatgtgtgctctgtatattccggaggtacaatttgccagtgtttccacaatgg

SEQ ID NO: 369612 - DNA, 74 bp, Homo sapiens
gcagcaacaacagcagccggcccttgttaactacaacagaccatctgggttttggccaaattgggcgagggcac

SEQ ID NO: 369613 - DNA, 107 bp, Homo sapiens
caggcctcacggaacgtcagcaacgatcccgatgtcatcaagttgcaagagattccaaccttccagccccttttgaaagccacagagaagatccgcgaggttgtctg

SEQ ID NO: 369614 - DNA, 100 bp, Homo sapiens
acatcaccgacatgaagggaacaggcatcatggactgtgcgcccaagaacatacatatgatagttgagaaagacacatattctgatcatgaagaaataaa

SEQ ID NO: 369615 - DNA, 73 bp, Homo sapiens
caattagcatctgaacaattgcaagcatacgaattggagcaatgttggcttatacacctctggatgagaagag

SEQ ID NO: 369616 - DNA, 101 bp, Homo sapiens
tgggagcactggaagtacgggcagttgcagtgttggagctaaatcagcagataagcagagagccctagaagaaaccaaagcctacaccacccaatccttag

SEQ ID NO: 369617 - DNA, 74 bp, Homo sapiens
catttaattttagggtcctttatatagaagggagagtcttaacccatatttaactttgaacacctctggtagtg

SEQ ID NO: 369618 - DNA, 100 bp, Homo sapiens
aggatgatgaagcagaagaggggtaaaatccagtacaaggaatatatcattgaaggatttgaaaacatgccagctgcatttatgggaatgctgaaaggag

SEQ ID NO: 369619 - DNA, 82 bp, Homo sapiens
gctgtgcgggatcgacgcggacagcgggctggagcctgacgagctggcgggcgccatgtcagaaccggctggggatgtccgt

SEQ ID NO: 369620 - DNA, 83 bp, Homo sapiens
caagaagatggtaccgtgcatcgcacctatttaagaggtaacaattcaggttttaaaccagcttatccaaaagattcgagaag

SEQ ID NO: 369621 - DNA, 83 bp, Homo sapiens
attctgcacgcttcaagctctggtacacgctggacagagcccctgaagacctcctgccccccgaggtctgcagtctcctgaac

SEQ ID NO: 369622 - DNA, 100 bp, Homo sapiens
ctactgcagacgacgagctgagcttcaaaaggggggacatcctcaaggttaccatgccagcaatgattccttttgagtttctgacagaagatagtggttt

SEQ ID NO: 369623 - DNA, 100 bp, Homo sapiens
ggtgctgtcgccgctgtccccaccactgcagccatgatctccttaacggacacgcagagctttcagtccagtgtaaagctgttggagcgcgggagcaaag

SEQ ID NO: 369624 - DNA, 100 bp, Homo sapiens
accctcgctccctctgctcttcctcccttcgctcgcaccatgtgttatagttttgccgctggactcttccctcccttcccccaccccatcaggatgatat

SEQ ID NO: 369625 - DNA, 101 bp, Homo sapiens
aggcgatcaaggccaagtatccgccagtcaataggaagtacgagtgtgatgggtaattccagaattgattggccataccattgtcactgtattactgctca

SEQ ID NO: 369626 - DNA, 97 bp, Homo sapiens
ccttttgcacctccgggagctgctgctgttatggctgcagcttcgattgccaatattgtaaaaagttctcttggtccagttggcttggataaaatgt

SEQ ID NO: 369627 - DNA, 80 bp, Homo sapiens
caggcggtgatgaagaatccccccgaaaggaccccccagacaatgattgaagctcacgttgatgtcaagactaccgatgg

SEQ ID NO: 369628 - DNA, 100 bp, Homo sapiens
gtggacgccgtcatccgccactgcgcagggcggctgggcagctatgtcatcaacgggcgcaccaagtgctgcaatagtattttctacacttacacttctc

SEQ ID NO: 369629 - DNA, 75 bp, Homo sapiens
tcttacattgctgcatcaagaaacccaagctgctgagagataaggtctcaccatgttgtccagactggacttgaa

SEQ ID NO: 369630 - DNA, 100 bp, Homo sapiens
cccaacttcgtggcgacctatggccgtggctaccccggatttgctccaagctatggctatcagttcccagcctctggttgaacggtttgagacattctgc

SEQ ID NO: 369631 - DNA, 75 bp, Homo sapiens
ggataacaagttttgtgcagattgccagtctaaaggggtctctctttttggcatgtcggccctgttactccctgg

SEQ ID NO: 369632 - DNA, 82 bp, Homo sapiens
tcctcggctggtggcaagtattgctgtgggtgctgggacttcccgtccgcggcgtggaggggcttttgttgtaacaccctga

SEQ ID NO: 369633 - DNA, 75 bp, Homo sapiens
tccgggtcctggcccttccagcagtcttgtacatttgccttgccgtcagagattatttctcaagatgaagctgac

SEQ ID NO: 369634 - DNA, 98 bp, Homo sapiens
acagattctataagcagttaggatctggagatagggccagatttgagtgtgtgaatttttgagtgaaacctggaacccaaatgagaagaaatctgcaa

SEQ ID NO: 369635 - DNA, 98 bp, Homo sapiens
ttccactcccttccagcttcagtgccacttggaaaatgttcatagtccctatgaatctactaatgtgttcagagcaacattgttttgttgacacaagc

SEQ ID NO: 369636 - DNA, 82 bp, Homo sapiens
gtcatcattccacgagaggaggggaagccaacaaatggaattttcttgagcatgtttctaatcgttttgccattggaatcca

SEQ ID NO: 369637 - DNA, 103 bp, Homo sapiens
tcactattgatggtgtagcgctttaggggaagctttggggccatttggatcacacgatgttttttcaagattttagaccctttctaagtagcagtccactgga

SEQ ID NO: 369638 - DNA, 98 bp, Homo sapiens
cagaggcagaggcgtagtcgagccgaggaagaggaaagtggcctccggggaagccagagctgactgaaggtgaaagaaaatggcccgaaccaagcaga

SEQ ID NO: 369639 - DNA, 100 bp, Homo sapiens
tgttgggggactcccagccttccgcgcgtccggaggaggagaagcggcggcgccgggaagcaggatgatccggatgaagcgaaccagaactacttagcag

SEQ ID NO: 369640 - DNA, 83 bp, Homo sapiens
gtgaaggagatgtacaatacctacaagaacaacgttggtggtcaaaatgcagatcttcgtgaaaacccttaccggcaagacca

SEQ ID NO: 369641 - DNA, 100 bp, Homo sapiens
catggactggatggaagagatgaaggatcctctacaccacatactacgagtccatcagcaacaggggccccttcttcggctactacttcttcaacgggct

SEQ ID NO: 369642 - DNA, 100 bp, Homo sapiens
taccgatgtgaggtggtggtcacccctctgaaggcacagggaacagtccagcttgaagttgtggtggttgaccctgcctgcgttcgctgcaggcctctga

SEQ ID NO: 369643 - DNA, 118 bp, Homo sapiens
atatatgttggcattgagtcaaaccatcttctcccaaggtttttgcaggatatgttcaaggaatgagtgatttactttcccctcttttatatgtgatggaaaatgaagtggatgcctt

SEQ ID NO: 369644 - DNA, 83 bp, Homo sapiens
ccgccgacgacccagcagccgccatggctctgctccgagctgtgagccgtgagctttgaggcggtgggatgtgtcagcagaat

SEQ ID NO: 369645 - DNA, 100 bp, Homo sapiens
ctatgcatgtaaacaaatgaagcagcgctttgaaaggtatctagaagagcagaagacagagaatggaaaagataaggaacagaaacaaacaaataccgat

SEQ ID NO: 369646 - DNA, 100 bp, Homo sapiens
tccagcccaggaaaatggagagaacaccttccaccatgaccacctcagcaagttcccacttaaataaaggcatcaagcaggtgtacatgtccctgcctca

SEQ ID NO: 369647 - DNA, 100 bp, Homo sapiens
ttccagttcattcctagctcagaaagcaacgttttgagccacaactgtcacaactccagctgcccctgctgggagtggggctgaacacgacaattctgac

SEQ ID NO: 369648 - DNA, 100 bp, Homo sapiens
gccatggccccagacttgtcgcacggatgcagaaaacttaatggaggaggctgaggctgtattcatcaccaaagaaaaaacttacaccaatgcagaaatc

SEQ ID NO: 369649 - DNA, 100 bp, Homo sapiens
ccgaggagctgcaggtggcagcccaggcggtccgaacccgtcggccggccgagcctggaggtctgtggtttaccagcagagttcaaaagaatctgccact

SEQ ID NO: 369650 - DNA, 90 bp, Homo sapiens
caggaaaactcgtgtccatcaaaatccagatgctggatgacacccaggaggcatttgaagttccaaaaatgtggacacagacttgccagg

SEQ ID NO: 369651 - DNA, 100 bp, Homo sapiens
gtgtggggttggtgtgattagcttcgcagtctggaaagctttaggagttcacagtataaattctgatgtccagccttttattaaagaaaagaccagtgac

SEQ ID NO: 369652 - DNA, 100 bp, Homo sapiens
tctgcatcagattggcccctaatgattgtttatgaaggcgagcgtgccatgacaaaggataacaacctgcttggcaagtttgaactcacaggcatacctc

SEQ ID NO: 369653 - DNA, 97 bp, Homo sapiens
gggagcccggcctcgtgcgccgcgctttgaggacttcagggccacaggtgctgccaagatgctccagggcacctgctccgtgctcctgctctgggga

SEQ ID NO: 369654 - DNA, 50 bp, Homo sapiens
cagaacatgatcaagggtgttacactggtcaaaatgcagatcttcgtgaa

SEQ ID NO: 369655 - DNA, 75 bp, Homo sapiens
cacttattattggttggcaaccagatgcagacaatctctttgaacatgaattgggggctctcaatatggctgcat

SEQ ID NO: 369656 - DNA, 119 bp, Homo sapiens
gcctccactccgtcccccgcgggtctgctctgtgtgccatggacggctctacgaactcgacggggaccccaagaggaaggaattcctggatgacttgttcagcttcatgcagaagcgag

SEQ ID NO: 369657 - DNA, 109 bp, Homo sapiens
ttgacgccatgtcgggttattcgagtgaccgagaccgcggccgggaccgaggccatcccaggcctcaggacctgagttctccgacgcccacatgacatggctgaacttt

SEQ ID NO: 369658 - DNA, 98 bp, Homo sapiens
ccctgggcaaaggcacctacggcaaagtcaagcgggccaccgagaggttttctggccgagtgggcgtctctggccgagcctctttttgtggaaaacga

SEQ ID NO: 369659 - DNA, 100 bp, Homo sapiens
tccgacctgggcgctcagcccccggatcagcctgcctctggctgcgccaacggaggaggctactaccactattcctactcggtggtgaggggctgcgacc

SEQ ID NO: 369660 - DNA, 100 bp, Homo sapiens
tggcccagcagggccagcaggggcagatggcaagtggagacagcaatctcaacttcagaaggggtagaagagccatccaaaaaacgagttatagaaggaa

SEQ ID NO: 369661 - DNA, 89 bp, Homo sapiens
aggaggtgcgggcggctgctgaagaacagattaaggtgctggaggtgacggaggggtcatccgcacagaatggcagcgcattaaagagg

SEQ ID NO: 369662 - DNA, 100 bp, Homo sapiens
tgtggtgcttttgaaccactggaaagtgaggaattttgaagtacaccgtggtgacattgtatcattggttacgagctcaactggaggcagtcctgtgcgg

SEQ ID NO: 369663 - DNA, 75 bp, Homo sapiens
ttctgataggaagaagagagcgctacagaagaaagatgtagttgaagactgggatagtttccaagctattttgga

SEQ ID NO: 369664 - DNA, 98 bp, Homo sapiens
ttgactccagtgttaagagaagaaatgaggacatatcagtatcggtgggatgtgtgtgggctgaaattccgagctgcggttgtgcatgagaatacacc

SEQ ID NO: 369665 - DNA, 75 bp, Homo sapiens
ctgagctagagggtgaagctggcggagcaggaggatgggcggtacttgttttggctccaacaagggaactggcaa

SEQ ID NO: 369666 - DNA, 75 bp, Homo sapiens
ggtgcctggagatgaagctggaaaggagattgtcagaaatggaggagggggcaccagatccaaggaagtgcccgg

SEQ ID NO: 369667 - DNA, 75 bp, Homo sapiens
gaagagtgcaaagactttgtggacaacggtgatcgttggctcctacttgattgcacacggtttcttcagcgtcta

SEQ ID NO: 369668 - DNA, 100 bp, Homo sapiens
tgcctttcctcaagagaagagcccccaggagaaaagccagtattgcttgtgctcctaacaacctgtctcttggtatgccccagagtgcctgaaggagtat

SEQ ID NO: 369669 - DNA, 74 bp, Homo sapiens
ctgaggacccaaagtcatttcccaggctggcggagagccctgggaggagcggggacactgaggacctctctcca

SEQ ID NO: 369670 - DNA, 114 bp, Homo sapiens
cggggaggtcacagctacgtgctgggcacagtcagcccttcccgccccaaagcaggtaccgggcgatgtaccagtacaggccccagaacgaagacgagctggagctgcgcgagg

SEQ ID NO: 369671 - DNA, 83 bp, Homo sapiens
gggaggggggcagctggagcctcaggcggcagcgcttctagtgtttcctgaggttataggcgggtgtttgaggagtacatgcg

SEQ ID NO: 369672 - DNA, 50 bp, Homo sapiens
cgactgtggagatgtggtgcgactaggcagaagagcactgatcgtactgg

SEQ ID NO: 369673 - DNA, 75 bp, Homo sapiens
gctcggcccgcgggggagccccgggagccgcacggggcaagctctgtgtgattgattggaagacatcagagaaac

SEQ ID NO: 369674 - DNA, 82 bp, Homo sapiens
gggccagggaaccctggtcaccgtctcctcaggctccctggggaagggaatgcagggttgctggggctgggcccagaagcag

SEQ ID NO: 369675 - DNA, 76 bp, Homo sapiens
tagctgtttgtattttggctgctgcaggagccattttaggtattgaaattgttggcggagatgagttcattttgtg

SEQ ID NO: 369676 - DNA, 100 bp, Homo sapiens
gctcttgcagaacattctgaaaatgtgcatatttcaggagtgtcaactggaagagccaggacttctgaatttaccttgaatacagacaggaggatgttgc

SEQ ID NO: 369677 - DNA, 75 bp, Homo sapiens
aaagtattgcaggacaagagatttaaggatccactgaaagatggtgaggcaaagatcaaaagcgactatgcacaa

SEQ ID NO: 369678 - DNA, 88 bp, Homo sapiens
caggaatgttctccaagcagcaatccaaaagagtctcaaggatccttcaaataacttcagggacatggatttgattgacatactttgg

SEQ ID NO: 369679 - DNA, 98 bp, Homo sapiens
caggacaggggccctgagtaacggtggcctggggtcagagccaggttcagctgcgaggctgctggtggctgtggaggacccttgaacatctgtgaaga

SEQ ID NO: 369680 - DNA, 100 bp, Homo sapiens
acagcagcagcccccgctgcccgagcgggaagagactggagatgaggaggatgggagtcccatcgaacccacaatacattatatgcaccagaaatgctag

SEQ ID NO: 369681 - DNA, 83 bp, Homo sapiens
attcctctgccatggagtcctacgatgtgatcgccaaccagcctgtcgtgatcgacaaccacccagaagggggcatatgcaag

SEQ ID NO: 369682 - DNA, 100 bp, Homo sapiens
ccgagcaaattgaagagacgttaaaatacttccgttgcttataaaaagggagtcaaacatctttctgctcttcttgatccagaggtcctgtccattttcg

SEQ ID NO: 369683 - DNA, 96 bp, Homo sapiens
aatcgtcatctttctgaaatggtgatgaaattggaattgggtttacatgaggcgatggatgactacagtgtgatcggccgctccctgttcaaaaag

SEQ ID NO: 369684 - DNA, 75 bp, Homo sapiens
cttttcgatccgggacggccggtcaggctcgccgccgagctggaagctcttcgtgggcggtcttgactggagcac

SEQ ID NO: 369685 - DNA, 98 bp, Homo sapiens
ggcgagcggacggctgcatttacggggtctcccggagggccagagtcgaacctaaaggcagacccagaagagctttttacaaaactagagaaaattgg

SEQ ID NO: 369686 - DNA, 50 bp, Homo sapiens
cgccgccgcccgaggtctctgcgaaaggtttacaggtacatacattacac

SEQ ID NO: 369687 - DNA, 75 bp, Homo sapiens
tggcttccagtggaggcattttggggcagaatacagagatatggaatcagaaagtagcacgtctggaaattgaga

SEQ ID NO: 369688 - DNA, 100 bp, Homo sapiens
tctataatattttttgatgaaatagatggattagctccagttcgctctagcagacaagatcagatccacaggtctccaggaaaagttgggctttcaacat

SEQ ID NO: 369689 - DNA, 100 bp, Homo sapiens
aacatggaacagctgcttcagtctgcaagtatggagctcaagttcttaattattcagaatgctgcggttttccaagaatgtgaggaaattatcaggaaag

SEQ ID NO: 369690 - DNA, 100 bp, Homo sapiens
gtcttcctatccttacccgacctcagatgctcccttctgctcctgatcttcataaacaatgaatggcatgattcagtgagtggcaagaaatttcctgtct

SEQ ID NO: 369691 - DNA, 100 bp, Homo sapiens
ggcaggcacagctcggccgtcgatcacctccgggcacaggatgcgaggccaggagtggtggctcacacctgtaatcccagctctgggaggccaaggccag

SEQ ID NO: 369692 - DNA, 90 bp, Homo sapiens
ggagaccgtgtggaacgatgccaaagaattgagctgaagcagggctacacatttttcatcccttccggacttcattcacctctcagccac

SEQ ID NO: 369693 - DNA, 74 bp, Homo sapiens
cgacattgacaatgatggctttgaagagccaaggagcaataactgaacgtttaagaagcttcagtatgcatgat

SEQ ID NO: 369694 - DNA, 100 bp, Homo sapiens
ctggggtacacctggacaggtgtatgatgtggaggaggtggatgtgaaagatcctaactatgatgatgaccagggagttgaccacatttggccatttccc

SEQ ID NO: 369695 - DNA, 83 bp, Homo sapiens
ctggcctccatcttcggcaccgagaaagacaagattttttatcaagcagaaatgcatcgaacaacgagaatcaagatcactga

SEQ ID NO: 369696 - DNA, 75 bp, Homo sapiens
tcatagacgccgcgtgtacccggttgtcctcaggcgctgtcaggttctagagccttctttccgccaggcctttcc

SEQ ID NO: 369697 - DNA, 98 bp, Homo sapiens
aggtgctgcggcgctgcgtagaagtatcaatcagccggttgcttttgtgagaagaattccttggactgcggcgtcgatgaaaccagcagtgtgtgtag

SEQ ID NO: 369698 - DNA, 75 bp, Homo sapiens
cttttggaatctgaacaagggtgataaacaagcaactttgattcctgatgaggtgtttgatgcagtaaaaagcaa

SEQ ID NO: 369699 - DNA, 74 bp, Homo sapiens
aacatgaccgctgagcccatgagatgaagactggcccatttgcagagcactccaaccagctgtggaacatcagc

SEQ ID NO: 369700 - DNA, 100 bp, Homo sapiens
cagctgcctcagttcttagcgcagatgaagactggcccatttgcagagcactccaaccagctgtggaacatcagcgccgtcccttcctggtccaaagtga

SEQ ID NO: 369701 - DNA, 82 bp, Homo sapiens
gtcgcgtctcggaaaccggtagcgcttgcagcatgcagggtttccaggcctgaggtgcccgccctggccccaggagaatgaa

SEQ ID NO: 369702 - DNA, 100 bp, Homo sapiens
ctgacagatgccagcgtagctgaatccagtaccaaaaacgtcaacaacagttttacggtggcttgctttggtgaaggtattcatacagccttcctaaagg

SEQ ID NO: 369703 - DNA, 95 bp, Homo sapiens
cgtctgcggaagtgcagctgcctcagttcttagcgcaggatgtctcgggctgttcgtcttccagtcccctgtcctgttcaacttggtaccttaag

SEQ ID NO: 369704 - DNA, 75 bp, Homo sapiens
cgcagggcggtcctcgggtccgcggaggctgcgctctgcgatgatgaaacatgcttggaataattataaaggtta

SEQ ID NO: 369705 - DNA, 100 bp, Homo sapiens
tacagcagcgagtgggacggtcatgaggagctgaaggccatcgtatgggtgtgcaggcgactgggaatcatagaagttgactattttggactgcagttta

SEQ ID NO: 369706 - DNA, 82 bp, Homo sapiens
gcgagcgcgagcggcgcgagaaagcagcggaggaggagaaagagatggacctcccggactcggcctcgagggtcttctgcgg

SEQ ID NO: 369707 - DNA, 75 bp, Homo sapiens
agcagcccccgaaggccctatcaggacatggagtatgaaagacgattagtgacaagagctggggttaggatccgg

SEQ ID NO: 369708 - DNA, 75 bp, Homo sapiens
ggaaaatctcaggaatctggtctcattgggttgctccttgagggcaggacagttcttatggctttatccgttgcg

SEQ ID NO: 369709 - DNA, 74 bp, Homo sapiens
aatatcctcggaagagcgctcccaggagaaacaagatcccttggttccagtaccccattatctatgacattcgg

SEQ ID NO: 369710 - DNA, 100 bp, Homo sapiens
cagagtcaaagaagaaaccgtgctcagaaactagccagattgaagtactatactggcaattgctggagaagattttgcaattgttgcttctgatactcga

SEQ ID NO: 369711 - DNA, 82 bp, Homo sapiens
tcgggagcgcaaggtcgccctcaaggccatgatcaaaacgaaggtgctcgggtcttcggggcactgggtcccatcggtccct

SEQ ID NO: 369712 - DNA, 75 bp, Homo sapiens
ggtgccggcctagcgtcctggaattacttcaatcaacaagcttgcgggttcgagtacacctctaaacttcagcgc

SEQ ID NO: 369713 - DNA, 100 bp, Homo sapiens
gatgctcttcttggaaaaccagatccagaaactggaggagtcccgctcgaagctagtctgaacaggaattaagaataactcaaagtgaatttgatcgtca

SEQ ID NO: 369714 - DNA, 98 bp, Homo sapiens
gactatgcagagacatgagatggtagccaacccctcagggtcaacatatttcactggcacctattcacaagcttgaagaagctctgtatgaataccag

SEQ ID NO: 369715 - DNA, 83 bp, Homo sapiens
cagggtggtcattgcaatattaagggggatatgagactttctactcggaatatcctgagtgttgcgtggatgtaaaacccatt

SEQ ID NO: 369716 - DNA, 100 bp, Homo sapiens
gcctggcgaggatgcaccttcccctgccttggaaagtgagaaagatcagtctaaagaaaaggagaagaaagtgaaaaaaacaattccttcctgggctacc

SEQ ID NO: 369717 - DNA, 50 bp, Homo sapiens
aagaagaagatgcctttaccgaccacgcacacgcataccccagcgcccgg

SEQ ID NO: 369718 - DNA, 51 bp, Homo sapiens
ctcgatccgcctgcctgcgcacctgcgtggagccgccaccaaaatgcagat

SEQ ID NO: 369719 - DNA, 101 bp, Homo sapiens
tcaacgatttcctttcctcgaaatgaaaatcccatccttaggatctgagcaagcaccagaagcaccaggcttttgaagcagagctgcatgccaacgctgac

SEQ ID NO: 369720 - DNA, 90 bp, Homo sapiens
ttgagattgactacggtgatctgtgtgaggatctgaaggctcagcaacagcctcaccaaggactccatgaatatcaaagcccatatccac

SEQ ID NO: 369721 - DNA, 76 bp, Homo sapiens
ctgaattggtgatcgacttctgattctgcctaaacggaccatcagcacgtgcccatcgacatccagaccagcaagc

SEQ ID NO: 369722 - DNA, 80 bp, Homo sapiens
gaccacaaaccgctgccagaaaaactacgtctactttgagaactcctccagcaacccatacctgatccggagaatcgagg

SEQ ID NO: 369723 - DNA, 100 bp, Homo sapiens
atctccaagcccgaacgccccatgaagttcctccgggagcacttcgagaagctggagaagtgcccattcatggacgagcggatcatgtgtttacacagta

SEQ ID NO: 369724 - DNA, 99 bp, Homo sapiens
ggtgaacatgccaggagagcaatgcaaaaggagcggcagcgcatgtctgaccgtctggaggacaccagcctgcggctcaaagatgagatggacctgtac

SEQ ID NO: 369725 - DNA, 74 bp, Homo sapiens
ctcaagctcatattttgaagtgtttacgggagcctgaacgaactgcgggtgttgctgctggaggccaatcgtca

SEQ ID NO: 369726 - DNA, 75 bp, Homo sapiens
gacatcccagagagcttccagagccccttcacagatgtagtcactacaaatcttaaattgcgaaatccatcggat

SEQ ID NO: 369727 - DNA, 100 bp, Homo sapiens
ctgtataaacagaaaattattcgtggtttctgtcacttgtgtgatggtcagtagtttatgccaacgtgacttcattcatacagatgaaccaaggatcggg

SEQ ID NO: 369728 - DNA, 75 bp, Homo sapiens
catgcagcccatctgctgacattgggactactactgagatactctcttaacttactggaataaagtatcacctca

SEQ ID NO: 369729 - DNA, 80 bp, Homo sapiens
catgtgctgaaatgtttgacgacactgatggtttggatggcccaacagcaggccttgaggttccgaggtccggctccccc

SEQ ID NO: 369730 - DNA, 100 bp, Homo sapiens
gtaaaattacgaactcactgagctggaagtcattcaacgggaattgaatagcttatagtgatttaggatactacattatcaataaactgcaccatgtgga

SEQ ID NO: 369731 - DNA, 100 bp, Homo sapiens
tggacaagccacgtacagaaccacctgtcaggacttcagaatccttgaccgataccaggagaaggaagccaacatccttttggagccatgaatattgtcc

SEQ ID NO: 369732 - DNA, 75 bp, Homo sapiens
tgaagaactcgcaagctcctacgaaagaaagctcatcgagattgtgttcaattagaccttcaggacctctccaag

SEQ ID NO: 369733 - DNA, 100 bp, Homo sapiens
aaccgtcagtttgagccagatgattttgagatacagagtgaaaatggggagaactgtaatcaagacatgtttgagaatgaatcacgtaagatattctcgg

SEQ ID NO: 369734 - DNA, 126 bp, Homo sapiens
ccgaaacgcgagtccggagaggagttccgcatggagaagttgaaccagctgtgggagaaggcccagcgaacaatgcagatcttcgtgaagactctgactggtaagaccatcaccctcgaggttgag

SEQ ID NO: 369735 - DNA, 100 bp, Homo sapiens
ggagaactcccgacgggaccgttctgcttgctgagctgtgggatactgacctttttggctgtcttgggccgctacgtccctgggcttctgctgtcctact

SEQ ID NO: 369736 - DNA, 125 bp, Homo sapiens
ctccgtggccttagctgtgctcgcgctactctctctttctggcctggaggctatccagcgtcatcatcagatttgaaatatttaaagtggatacaaaactatttcagcaatgcagacaattaagt

SEQ ID NO: 369737 - DNA, 100 bp, Homo sapiens
ctggaagctgagcagcagcttgccgctctagaaggtgcagaccatgaattacgtggggcagttagccggccaggtgtttgtcaccgtgaaggagctctac

SEQ ID NO: 369738 - DNA, 100 bp, Homo sapiens
ggggcgagcctctcagccggccgggatggctaccacggccgagctcttcgaggagaaaatatggagaagtcttgtgcaagcaaggaagaagtcaaagaag

SEQ ID NO: 369739 - DNA, 90 bp, Homo sapiens
ccatttgtgtccattgatctcttggagcagctggggatcatggttttccagcttgcagctcatctggtgtactggggcaaggccatcatc

SEQ ID NO: 369740 - DNA, 75 bp, Homo sapiens
gtttttctcaggtgaaaggagcagtagatgatgatgtagcagaaggcccgatgagagaaagggaaagttaaggat

SEQ ID NO: 369741 - DNA, 101 bp, Homo sapiens
agagaacagggtggccgcttggtccaggtgtatactcttgatgtaccagatgcattctattactgttatagtccagaccctggtaatgcaaagggaaaaga

SEQ ID NO: 369742 - DNA, 100 bp, Homo sapiens
gcttcagagatggccctcccctccgtggatccaacatggatttcagagaacccacagaagggtgtgcaatataaagattatatccaaagtgagaggaatt

SEQ ID NO: 369743 - DNA, 82 bp, Homo sapiens
ctgctgctgtgcgcggtcctggcgctcagccatacagtttggtaactctcattcgacatccatctgaactaatgaatgttcc

SEQ ID NO: 369744 - DNA, 100 bp, Homo sapiens
cttttggctgtgcgaagcctccgcaggcaatgaatcgctccctggctaatgtgattcttggaggctatggcaccacttcaacagctggtggaaaacccat

SEQ ID NO: 369745 - DNA, 74 bp, Homo sapiens
agcaggatgatgtggttcagcttgaattacccgttacagagaatccagcaagctaaagtgcaaattcttcccga

SEQ ID NO: 369746 - DNA, 75 bp, Homo sapiens
caactcccagctcaatgcaatggagttcccaaaagtcgacgaggagaaatttggcagtttctggctttacagtac

SEQ ID NO: 369747 - DNA, 122 bp, Homo sapiens
caaccgcaaccattgacgccatgtcgggttattcgagtgaccgagaccgcggccgggaccgaggccgcggcgagtcctttgcacatgttggcaacacacgcatccgcatcggcctccctgcc

SEQ ID NO: 369748 - DNA, 100 bp, Homo sapiens
ccgcccgcctgcgcctccggggccggccctgcaggcacccgacaggaggatcctttattcgtccgaacaaggtaaattttggaacagactttcttactgc

SEQ ID NO: 369749 - DNA, 82 bp, Homo sapiens
ccggcgcgcgggagcgctacggccccaacggtccagcccagaatcaaatgcaggttccatctggatatggattgcatcatca

SEQ ID NO: 369750 - DNA, 97 bp, Homo sapiens
ggcgttggtcttctgatagcaactttaatgtgctctgaggatgaagtggatgtgcttttacatggaactcctgaccaaaaacgaaaactcatcagag

SEQ ID NO: 369751 - DNA, 75 bp, Homo sapiens
cgagcttcagcaagctctctccaacggtatggcccatctcctgtacgcttggagcgacctttggctacgtggctg

SEQ ID NO: 369752 - DNA, 75 bp, Homo sapiens
gcttccggatcgggggcaagcggaaggtgatgcccaagatggaccaggtgagcgagtgctgtgctttcatgggcc

SEQ ID NO: 369753 - DNA, 100 bp, Homo sapiens
attggcctatgtcgttatggtgggaggattgactgctgctggggctgggctcgccagtcttggggacagtgtcagcattatcttagaagacctaggactc

SEQ ID NO: 369754 - DNA, 75 bp, Homo sapiens
aatgtggtacaatcatacttacagcagaggaattaaactgttgcagggatcaccccttctgtgtcattctctgag

SEQ ID NO: 369755 - DNA, 75 bp, Homo sapiens
gggtgaagtggcaggaggaggaggaggggctccggctggtctgtggtgagccggagcggttgcagggcacacatt

SEQ ID NO: 369756 - DNA, 82 bp, Homo sapiens
gctgcgcacgctgcccctggccgatcagatcaagatcctgatgaagaatgacctgcaggctgggacaatgaaaagaaaatag

SEQ ID NO: 369757 - DNA, 101 bp, Homo sapiens
cacgatcactgtttggtgccagagacctacctggtggttctgtgccttcccctactctcttctcatcttcgtatatgacgaagtcagaaaactcatcatca

SEQ ID NO: 369758 - DNA, 100 bp, Homo sapiens
cggggtcacccgctacgggaagcaggcctcgccacaggttaacacagaaatctgcctcctgggccatgccgcttctaaggcctgtttcttctcatgagcc

SEQ ID NO: 369759 - DNA, 75 bp, Homo sapiens
gagcgaagagctgcttctgtatcttaagtaacaacatgctgtaccccaaggaagacaaggagaaccgcattctgc

SEQ ID NO: 369760 - DNA, 98 bp, Homo sapiens
tggagcgggcggagctgtgcgagagcctcctcacttgggtgaaagaaaagatgttgtcccggttaagagtagtttccaccacttgtactttggcatgt

SEQ ID NO: 369761 - DNA, 74 bp, Homo sapiens
catcagtgcccttgtggcgaatggggctcacgtcgaggtaagtctggatatgatgtccgtgcaagctaacacgg

SEQ ID NO: 369762 - DNA, 98 bp, Homo sapiens
gagtgaaagtaacctggttgtcacatacccccagcttagaggtgcttcaccctgccccaaggggctggtggcagcagcgtcgtcataggtaatattgg

SEQ ID NO: 369763 - DNA, 127 bp, Homo sapiens
ggaaaaaaaccttcgactatgcagagacatgagatggtagccaacccctcagatttggctagctgattggctgctgaaaaataatcctaacaaacccaaactttgtcaccatccaattgtagaagaa

SEQ ID NO: 369764 - DNA, 97 bp, Homo sapiens
aaaaatctggagggactccaacttcaatgggctcttccgtgggcggcggcttcgcgggcttggagttcgcgcggccgcaggagtcggagccgcgggc

SEQ ID NO: 369765 - DNA, 100 bp, Homo sapiens
cgcgctgccgaggagaacccagcggctgatccaccttgagatcaagccggccatccggaaccagatcatccgcgagctgcaggtcctgcacgaatgcaac

SEQ ID NO: 369766 - DNA, 76 bp, Homo sapiens
aggattccaagtaactcttatttgactgtacagtggaagcctggtgcacggactatgccagcaactgctagcatcg

SEQ ID NO: 369767 - DNA, 98 bp, Homo sapiens
agggagctgtcaccgtggtcggcggcggcggcggcggcggcggcacagagccggtggtggagccgccgaggagcggttggttccccgaggcgtacgtg

SEQ ID NO: 369768 - DNA, 98 bp, Homo sapiens
gatgaaacaattcacatttatgacatgaaaaagaagattgagcatggggctctagtgcatcacagtggagaaggaagccaacatccttttggagccat

SEQ ID NO: 369769 - DNA, 76 bp, Homo sapiens
gatcagaatgccaaatgtgtttgcatgctggccagagactgctgctactttgaaacgtacgatagaggccctgatg

SEQ ID NO: 369770 - DNA, 90 bp, Homo sapiens
gcccttcatctccaatgtttgaaagatcagaggttcctgtcaagctcttgcagccaatgccggaacaggatttgctgttgctgagcctca

SEQ ID NO: 369771 - DNA, 100 bp, Homo sapiens
ttgttctcagctacttgggactcctctctcaagagaagctgcaagagcaacatctttcctcaccccaagaaatgcactcggtgatggaaagagagccact

SEQ ID NO: 369772 - DNA, 75 bp, Homo sapiens
gctgccgtcatcaccatcaccttcaatccgctctactggaatgtgacatgcttcagcttatcaacaaccaagaca

SEQ ID NO: 369773 - DNA, 82 bp, Homo sapiens
ctgccaggcagaaggcctctctcctgatacagcaggcgctcaccatgttccctggaggtggaaaggagactatggaaccagg

SEQ ID NO: 369774 - DNA, 96 bp, Homo sapiens
agaagccggtacaggtgccctgcggacacgtgcatccgagatgtttccaaatggagtgagagaacaagaaagcctctagaagccctctatgggtat

SEQ ID NO: 369775 - DNA, 101 bp, Homo sapiens
gaaaccaagataaagatgcccattttccaccaccaagcaagcaggtattgatgtcaagaaaggccgaggtcgatacattgatacctgcatggtcatctttg

SEQ ID NO: 369776 - DNA, 146 bp, Homo sapiens
gggactggtttggctgaaagacaaagaagcaacacattgtaaactttgtgaaaaggaattctcactctctaagagaaagaagacgtaaagcaggctaccagcaattttgagaacttgcaaaaacagcttgcaaggaaaatgaagct

SEQ ID NO: 369777 - DNA, 116 bp, Homo sapiens
gctatggctgttactgcttgggagaagggcctagaaagtttgcccccgctgcggccccagcagaatccagtggtggtggttggagccccccaaaagataacagctgccaaccaaac

SEQ ID NO: 369778 - DNA, 75 bp, Homo sapiens
tttgccccagccattggatttcctcaagctacaggtgctgttccagaattcaaagaagagaaactgcagctgcaa

SEQ ID NO: 369779 - DNA, 100 bp, Homo sapiens
caatgttggtgctggcaaaaagggtaaacttcatgatccagaaggcatgggaattattccaagaatagtgcaagatatttttaattatatttactccatg

SEQ ID NO: 369780 - DNA, 98 bp, Homo sapiens
gcacaggccggtggaatgggtccaggccgtggtcagccgcttcgacgagcagataattatactggggtaacatctgacaggaaggacgcaggagcagg

SEQ ID NO: 369781 - DNA, 100 bp, Homo sapiens
cgaggagagccggagtcggggacccaggagtttcctgtgtccagcgctgccggagccgcctgagggagatgcacttatttacatggaaccagagaaacaa

SEQ ID NO: 369782 - DNA, 90 bp, Homo sapiens
gttagtttctgcgacttgtgttgggactggtacgacaccgagcttctggtcaggtgatggctcttaagatgaacacattgagcagtaacc

SEQ ID NO: 369783 - DNA, 51 bp, Homo sapiens
tgcattggaacatgacatgagattaagaggaggaacccgttttcactagac

SEQ ID NO: 369784 - DNA, 86 bp, Homo sapiens
aactacctgcactttggggagcctaagtcctggttacgggcaggacttgagtggcttcggacagggcttctcagaccccagccagc

SEQ ID NO: 369785 - DNA, 100 bp, Homo sapiens
cagagacgtaaacatgcctctagtatcaaggatctcaccaaacaacttcagcaagccaaaactggacaagccaaggcatctgtagccaaagtaaacaaat

SEQ ID NO: 369786 - DNA, 130 bp, Homo sapiens
agcattgcagcagcagatacagaaacatgaagagactttgaaggatttctttaaagacagtcagaaactggatggcttctacagggagccaggcctctgatatagacgagatttttggattcttcaacga

SEQ ID NO: 369787 - DNA, 100 bp, Homo sapiens
ttggctccttccgctttttttggatccagaatgtcagtcttaagtttcagcaacaccagcaaacagtggtaatgagagatccaaacaccaagcgctccag

SEQ ID NO: 369788 - DNA, 100 bp, Homo sapiens
attcagtggtgtttttctcaggtgaaaggagcagtagatgatgatgtagcagaagggagttctgggaaatcgttcattcatttacagatgaacagaaaag

SEQ ID NO: 369789 - DNA, 100 bp, Homo sapiens
tgaaacaaaaatcacaagattctctgccacaaaaaaatataataaggctgagtgcggagccaagatcaggagaacctcagtctgacgacattgaagctag

SEQ ID NO: 369790 - DNA, 75 bp, Homo sapiens
aactacagatactttgaagtagaagaagctgatggctttcatgagaaggacaagaagccatattgccgaaaggat

SEQ ID NO: 369791 - DNA, 75 bp, Homo sapiens
gagccggccggggcttcctccccggccggcagggtggacggtgggctcgttgaaatcacaaagattagacacctt

SEQ ID NO: 369792 - DNA, 74 bp, Homo sapiens
cgtcgctcacgggtcttaccccatcccaacagaatacaggtttgagaaatttctgtggttcattagctcagaga

SEQ ID NO: 369793 - DNA, 100 bp, Homo sapiens
cggggcgcagtcggcgccgctgcccatggagggagtggacatcagccccaaacaggacgaaggcgtgctgaaggtctaaatctcaaaacatcctcagcac

SEQ ID NO: 369794 - DNA, 100 bp, Homo sapiens
gctcgggcaggccttccgagaggaacctctatgccgacatcgacgccgcctggcaggccctgcgcaccagctggccgccaccgctgccacctgctcagag

SEQ ID NO: 369795 - DNA, 58 bp, Homo sapiens
ttccaaatgaagagatgcctggtctcatcacaactacgtcaaggaagctagaccgaga

SEQ ID NO: 369796 - DNA, 50 bp, Homo sapiens
tggagccactgattatacctctagtatagaccctctttcccagctgcccg

SEQ ID NO: 369797 - DNA, 100 bp, Homo sapiens
gttctcttcacggtggaaaacacagatccagagtgttactggcttacaaattggattgagaaggagcatatcccagcgctcttgggaatggcaacggctt

SEQ ID NO: 369798 - DNA, 73 bp, Homo sapiens
gtcactggaggggactgacagtgaggaagaggatggagatgaagatgaggaagctgagtcagctacgggcaag

SEQ ID NO: 369799 - DNA, 97 bp, Homo sapiens
accggcacagtgacggcttcagagggaaaattgcctaagaattatgacccaaaagttaccccagatccagaaagatggctgccaatgcgagaacgtt

SEQ ID NO: 369800 - DNA, 98 bp, Homo sapiens
ggagagggtgctggctgccgcgcggccgagaaataagcgggttttgaaaacaaaaaaaagaaggagtggaagagggggccaggatccaggcctccatc

SEQ ID NO: 369801 - DNA, 100 bp, Homo sapiens
gttgctgccgccatacgcgctctccctgtttagatgaggaaactgagacccagaaaggtggaagcacttgtctaaggtcacgcctccaggaagcagtgtg

SEQ ID NO: 369802 - DNA, 51 bp, Homo sapiens
accagctacatccagctccctgaggcaggagaaataaagtgtagtccttct

SEQ ID NO: 369803 - DNA, 74 bp, Homo sapiens
ggatccaatactctggtaccgacagtgaacagcgtcacgctggccgtgaacctggtgggctgtctcgcgtggct

SEQ ID NO: 369804 - DNA, 100 bp, Homo sapiens
cctggagagccgcccagcagcacaacacagggaagcttggggagatacagccccaagagcccctcgctacagtccgagaccgtccactacaagagagggg

SEQ ID NO: 369805 - DNA, 100 bp, Homo sapiens
atctcacagttttgtggctgaagcaaagccacctacagttactatgcctcgaatcaaggtgatctgtgaaaatggttcgctattcacttgacccggagaa

SEQ ID NO: 369806 - DNA, 100 bp, Homo sapiens
ggaccacccaccatgcctatccagattctacaagggggttgctcctctctggatgagacagataccatacaccatgatgaagttcgcctgctttgaacgt

SEQ ID NO: 369807 - DNA, 95 bp, Homo sapiens
ctgctgttctggaaagtcgtggatctggccaacaagaaggacttgcaattgtgaccaaatatattacaaagggctggaaagaagttcatgaattg

SEQ ID NO: 369808 - DNA, 75 bp, Homo sapiens
gggacttctcgatctctggaggcacctgttgcaagtgacagtaagactttgaccccgacgcaggcttcagtgatt

SEQ ID NO: 369809 - DNA, 50 bp, Homo sapiens
cacaacttccaggttcccatcctgcgataacgaaggaggcccaacttcat

SEQ ID NO: 369810 - DNA, 82 bp, Homo sapiens
cgcagtttctcacgacgggccgagcctgccactgctgaagctcagggccctgtctgctctgtggactcaacagtttgtggca

SEQ ID NO: 369811 - DNA, 50 bp, Homo sapiens
ggaccagcaaggacctcatcagaataggaattgaatgatctggcacggga

SEQ ID NO: 369812 - DNA, 51 bp, Homo sapiens
gagctgctcaagtcaaaccatttttacagacggggtctggctctgtcaccc

SEQ ID NO: 369813 - DNA, 82 bp, Homo sapiens
gataacgggaggtgaatttccatgtcaacatagtcctgatgatgatgtgcctgcagatatggttgcagaagaatcaggtcct

SEQ ID NO: 369814 - DNA, 76 bp, Homo sapiens
cactggactcatggaggctgagcatttattcagggaccagttactctccacaagaaaattcacacaaccacagtgc

SEQ ID NO: 369815 - DNA, 82 bp, Homo sapiens
ccgcggaattccctccgcacctccaggcgggtcaaaatgcagatcttcgtgaaaacccttaccggcaagaccatcacccttg

SEQ ID NO: 369816 - DNA, 75 bp, Homo sapiens
agagagcgcacacaccaacaccaggcatctacatgggcagaccaactcaagctcacaatgtctctctgcaccaag

SEQ ID NO: 369817 - DNA, 100 bp, Homo sapiens
cgtggggatggccaccagtttccggacagcttcgtgctggatcacttctgtatgtaacttttttacatacattcgatacattcagcagggactcgtgaaa

SEQ ID NO: 369818 - DNA, 74 bp, Homo sapiens
cttcttcgagtatttgtagaagggaatcagtgtctgtccctgaagggtcattaaatcagctatgttcttcagaa

SEQ ID NO: 369819 - DNA, 75 bp, Homo sapiens
cgcgggacaagaaaattcatgcggctccagaaatgggaattaaatacatacttgtatgccccaaaagatgactac

SEQ ID NO: 369820 - DNA, 75 bp, Homo sapiens
tacccagtgccccaggggcctcagtactgtataccacagggcctaggaaaaactattcaagccattgcatttctg

SEQ ID NO: 369821 - DNA, 82 bp, Homo sapiens
tcggcgtttgtagaagaggagcatctgctccaggggaagatggtgaaaggaatgggaggtgctatggatttagtgtccagtg

SEQ ID NO: 369822 - DNA, 75 bp, Homo sapiens
cggctgtgtggatgtcggcgaagccgcgggcgagcagttggaattgatcacaccttttcagttgtacttcaatcc

SEQ ID NO: 369823 - DNA, 82 bp, Homo sapiens
tctgttggtgtagatgcgcgtcatccttctttcttcctctacagaagtggtgtgcctaccgcatgttgccgctgctgtttct

SEQ ID NO: 369824 - DNA, 51 bp, Homo sapiens
actgggtgctggtgcctatagcatgaggtatcatctttatcagaaagtgag

SEQ ID NO: 369825 - DNA, 100 bp, Homo sapiens
gagaaaaagagaagatgaagaaacccagcttgatatgttgaacagagagtacctgattgagaagctgcttacaagaacaccagacatagcccaaagagcc

SEQ ID NO: 369826 - DNA, 88 bp, Homo sapiens
acttcactccagtgcctccgacgcctcctgatggccacggcgtatgcctccgaggacggggtcctgaccgaggccatgatggacaccc

SEQ ID NO: 369827 - DNA, 82 bp, Homo sapiens
ctggattgggaaagaccatggcaggtgctcatggaaacaacctcattgctgttctagccaaatacatctaccacaaacatga

SEQ ID NO: 369828 - DNA, 101 bp, Homo sapiens
cttgggccgccgagctggacccggaccggttttgggcggaaggtgctctaccagcgtgcacccaggaatatccaccgccatgtgatcctctctgagatcaa

SEQ ID NO: 369829 - DNA, 83 bp, Homo sapiens
ggaggattcagggaataggagctggggagcccttctgcgccacaggtgtggacactgccagcggctgcagccgacttggaatg

SEQ ID NO: 369830 - DNA, 100 bp, Homo sapiens
tgctggaccgcttttacaatgcagcggaagatccatccaaaagctatgtgaaattacgagactttgtgcttgtgaagctttgtcaagatttgccctgttt

SEQ ID NO: 369831 - DNA, 50 bp, Homo sapiens
agttgtatccagtgcaaaccatcataaagtgtttgagcaacacacctcca

SEQ ID NO: 369832 - DNA, 100 bp, Homo sapiens
tgggccgaagctggccgcctgcggcatcgtcctcagcgcctggggagtgatcatgttggtgtgtgtgaaagggccaaatgtatttcagggctacttgaag

SEQ ID NO: 369833 - DNA, 100 bp, Homo sapiens
ctcctacatgcccatctggaagtttccagatgaggagggcgcatgccagccttgccccatcaactgcacccactcagacgggtttcactgtgttagccag

SEQ ID NO: 369834 - DNA, 89 bp, Homo sapiens
aaggattccaagtaactcttatttgtggatggcattcccaatgacagtagtgatagtgaaatggaggacaaaactacagctaatttggc

SEQ ID NO: 369835 - DNA, 100 bp, Homo sapiens
cccgcagtacaagaactggagaggttgtggaaaatgcccttaaagtgaacccaatactaggtccacaaatgtttcaaccgattttaccctatgttttcaa

SEQ ID NO: 369836 - DNA, 96 bp, Homo sapiens
gaaagcgtcacctggaaagaggctcctgaagcacaaatgcaggctttcaccaacaatcaccagtggtttacacaacattgcaaggagcattgaaac

SEQ ID NO: 369837 - DNA, 82 bp, Homo sapiens
gggctgacatcagcggctctttgtatgatgacgtggctattatcatggaaaactaatttttcccagagaatttcctttcaaa

SEQ ID NO: 369838 - DNA, 100 bp, Homo sapiens
ctcaccccccaagcggatactggtcttctcgtcggattgcccatgcacttgttgcagaaacagccaaggcccgacaacaagctcaaatacgtcaccaaat

SEQ ID NO: 369839 - DNA, 100 bp, Homo sapiens
ccgggcaccgaggaccagctcaatgacagaagaatgtcttccaagcaagccacctctccatttgcctgtgcagctgatggagaggatgcaatgacccagg

SEQ ID NO: 369840 - DNA, 100 bp, Homo sapiens
gtcaagaccatcatcactttcattgtctcggacgtgcggggcctgggcctcccggtccgcaagcaggtcacccgtgtgaacagaaagtgagaggttgtag

SEQ ID NO: 369841 - DNA, 75 bp, Homo sapiens
gtggactattcctttgaatgtattggtaatgtgaaggtcatgttcacagaagaaaagcttggccaggctgagaag

SEQ ID NO: 369842 - DNA, 82 bp, Homo sapiens
ccgggagtaggagactcagaatcgaatctcttctccctccccttcttgatatggctcgtggacagcagaaaattcagtctca

SEQ ID NO: 369843 - DNA, 75 bp, Homo sapiens
agagcttctctccagagtagaaaggaaagctgtgtgaagagacaaagggagaatgccatgtgaagatggaggatc

SEQ ID NO: 369844 - DNA, 100 bp, Homo sapiens
tgtaacccagcctgtttcacttcttggacagagcgggatgccaccagcttgtccaaagggaagttccaggagctcctggtgggcatcgttgtggagaatg

SEQ ID NO: 369845 - DNA, 75 bp, Homo sapiens
gagcccaaggcccgctcgtgggatgagagcagatgccgcgaacccagcgggtgccgcttctccacccgaggcttc

SEQ ID NO: 369846 - DNA, 90 bp, Homo sapiens
gacaaactggacgttgccacaatgacagagtgctattcaagatctctggcagtggaggaagtctctttaagaaaatagtttaaacaattt

SEQ ID NO: 369847 - DNA, 50 bp, Homo sapiens
ggatcatggccgcagccgctctggggcagagagaagaagaaggaggttcc

SEQ ID NO: 369848 - DNA, 88 bp, Homo sapiens
tagcctcagtacaacatgtgaaaaatctgttacttgatgaacttcagaagcatgcaatgatgctacctgttctgacccatcatatccg

SEQ ID NO: 369849 - DNA, 100 bp, Homo sapiens
ccgggaccgggattaccgcgcgctctgcgacgtgggcaccgccatcagctgttcgcgcgtcttctcctccagaaggaagacagcctcctccaggagcatc

SEQ ID NO: 369850 - DNA, 48 bp, Homo sapiens
tgcaggtgcgagagttgtaccagtaagctcttgaatgtcgtctctcaa

SEQ ID NO: 369851 - DNA, 100 bp, Homo sapiens
agccaaagaaacaagccgtggaataggtgtatcaagtaatggtgcaaagcctgaacaatacttcatgctgttgctgctgactgatggtgctgtgacggat

SEQ ID NO: 369852 - DNA, 98 bp, Homo sapiens
gatcagtgactttggtgaaagctaagaaggttcaaacaaatttgcaaatgatatacaacttctaaggacccagatgatgtggtaccagttggccaaag

SEQ ID NO: 369853 - DNA, 100 bp, Homo sapiens
aagaagataactacaaaagactcagagactatataagtagcttaaagatgacaccttgcattccctatttagcttgtagattttcagtggaaactgggta

SEQ ID NO: 369854 - DNA, 100 bp, Homo sapiens
tggatcctgtccttcatgcagtctctcattggcttctttgagactgaaatggcaggcaaagcctttggttgtgttggagggtacatcgccagcacgagtt

SEQ ID NO: 369855 - DNA, 90 bp, Homo sapiens
cgcgccacgctcagcagcatcagacacatgatccgcaagaacaagtaccgccccgacctgcgcatgggaggctgccggcgtggaccgcgg

SEQ ID NO: 369856 - DNA, 82 bp, Homo sapiens
gacaagttgaagatgaccttgtgataatatgcagcatgcatactgggaactgaagagagaaatgtctaatttacatctggtg

SEQ ID NO: 369857 - DNA, 100 bp, Homo sapiens
atcgacgccgcctggcaggccctgcgcaccagttgtcgccgtgatcctgaaggcgctgacctacgacgagaagcggggtgcctgcagcgtgggcaccaac

SEQ ID NO: 369858 - DNA, 75 bp, Homo sapiens
tcaagcagcaggagcagcccgcggcgaccaagatcaggaacctgccctggctgagaatcaggctgaaagccgggc

SEQ ID NO: 369859 - DNA, 99 bp, Homo sapiens
caagaagttgaaaaacgcttttcacgtcacctggagagatgcacaggtgtggatgaggtcaccattgtcaacattttgaccaaccgcagcaatgcacag

SEQ ID NO: 369860 - DNA, 75 bp, Homo sapiens
cagaccaaggaaaaatccaagtgatggagcagcattttcaggttttggagccctctcttaagtcagaactctgtc

SEQ ID NO: 369861 - DNA, 75 bp, Homo sapiens
gctgccagcaagaaatgatcagtagcaccagtgtttatggcatgtggagaccccaaggcaaaaccatcctatctt

SEQ ID NO: 369862 - DNA, 96 bp, Homo sapiens
gcgggaggtttggggtcaaggagcaaactctgcacaagatggcggcggtagcggcagtggcggcgcgtaggaggcgagacggggtttcaccgtgtt

SEQ ID NO: 369863 - DNA, 80 bp, Homo sapiens
gacaatgtcaagaaagaaaactcctccttgtacctagttgcagaggaaagtggtcgcttatggtcagaggagcagcctgc

SEQ ID NO: 369864 - DNA, 75 bp, Homo sapiens
tgggaactctttccagcttgtgtctgggaaagccagagagctgtgcagttactcctcgatttcccaaatcaaaag

SEQ ID NO: 369865 - DNA, 100 bp, Homo sapiens
tccccgctccggggctccggctgcagagagcaaggagatcgtgcgcggctacaagtgggctgagtaccatgaattggactttcaagccactgactaggaa

SEQ ID NO: 369866 - DNA, 100 bp, Homo sapiens
tcagtgactgaattaaaaggtgtcaagaagctcagaatggtggcgacatgtctaagaatgtgagccagtcacagatggcaaaattgaaccaacaaatggc

SEQ ID NO: 369867 - DNA, 100 bp, Homo sapiens
aatctcctcagggaaggggcagcacagtgatggcttggacaacagtgtagcttcccccagcacaggtgacgatgatgaccctgataaggacaaaaagcgt

SEQ ID NO: 369868 - DNA, 96 bp, Homo sapiens
gtcgacgactgggacaatgagaacagctctgcgcggctttttgagcggtcccgcatcaaggctctggcagaagttaaaatgcattttgctaatcag

SEQ ID NO: 369869 - DNA, 139 bp, Homo sapiens
ctgcggtctctggccagcacgctggactgcgagacggcccggctgcagcgagcgctggacggagaggaaagcgatctaatgaggcgtcaagaagaactcagacgcttggaagaactcagaaaccaagagttgcaaaaac

SEQ ID NO: 369870 - DNA, 100 bp, Homo sapiens
gcctgcgcgagccgccgcccgtctaccccgacttggcggaggtggtgggctaccagccatcccaatggaaattgcttcgacaggaactgttgaagtacct

SEQ ID NO: 369871 - DNA, 90 bp, Homo sapiens
agaggggcttattaactcgtctgctgcaggtcatgaagaaggagccagcagagtcgtctttcaggaattacatgaatgacagtcttcgaa

SEQ ID NO: 369872 - DNA, 101 bp, Homo sapiens
atggcggtggaggacgaggggctccgggtcttccagagcgtgaagatcaagatcgggatgcccgctgtctgtagccccggcatggtgcccgtggccctgcc

SEQ ID NO: 369873 - DNA, 50 bp, Homo sapiens
ctcaccctgccgcagctgtgcttcccagattgtacctgagcctggttctg

SEQ ID NO: 369874 - DNA, 100 bp, Homo sapiens
gtcctcagctccttccagatgaccaacgagacggtcaacatctggactcacttcctgcccacctggccggatcacctcaacagtcacgtcagacaagtgc

SEQ ID NO: 369875 - DNA, 100 bp, Homo sapiens
cggcacgcaccatctgttgccatcccggccggccgaggccattgcagtggaccgcatcatcggcctggaccaggtggccggcatgtcggagaccgcactg

SEQ ID NO: 369876 - DNA, 76 bp, Homo sapiens
ggaagagactccagcagcagatgcagcaggtcctggagtacaatgccattggaggcaagtataaccggggtttgac

SEQ ID NO: 369877 - DNA, 100 bp, Homo sapiens
atcgccaggactgtgatggtacaggaagggaacgtggaaagcgcatacaggaccctaaacagcgtggatcctttggtcaccttcagatattttagagcta

SEQ ID NO: 369878 - DNA, 97 bp, Homo sapiens
cgcgcggagccgagccggaactgcggcagtctctccctgccaggctcttcatccaaggtgaggaaaatagcagctgaatactatgacaacctccctc

SEQ ID NO: 369879 - DNA, 100 bp, Homo sapiens
acacagtaaatccagcaaggatatggagagccatgttttcctgaaggccaagacccggtaatccagtccctcatagcactggtgaatgacccccagcctg

SEQ ID NO: 369880 - DNA, 83 bp, Homo sapiens
ctgggatccgcaggttccctacacggtctcctgggtcaagttctccaggtccccgtgcttgcccatggaggatgctgcagaga

SEQ ID NO: 369881 - DNA, 75 bp, Homo sapiens
gtgaagtgtctgcgctgcctgctctacgccctcaatctgctcttttggctgtggtgtgatttccacgctgagaag

SEQ ID NO: 369882 - DNA, 101 bp, Homo sapiens
ggcgcacggcggcgaaggggtcgagcagggagcagcgcagcgcgcgcagagcgtcgtccagggagagctggtgacggcctccaaggccatcattgaaaagg

SEQ ID NO: 369883 - DNA, 90 bp, Homo sapiens
ctgctccctctcagcacctgggcggacggaaagtcgtggaaggcgctgacgctgtcccagaagaggccgtacgtggacgaggcggagcgg

SEQ ID NO: 369884 - DNA, 101 bp, Homo sapiens
cggtgcttatgtctttggctgcccgggtggaacgcatggagcagttccagaaggagaaggaggaactggacaggggctgccgcgagtgcaagcgcaaggtg

SEQ ID NO: 369885 - DNA, 82 bp, Homo sapiens
gcgcgcacgcgccgacagacagcgccgttccagccctcgcccgatgcacggttcgtgccctcgtgaggctggcatgcaggat

SEQ ID NO: 369886 - DNA, 83 bp, Homo sapiens
gggaaccaacccactttctcggcgccgcggctcttttctaaaagtatgccatggacaatattaccaggcagaaccaattctac

SEQ ID NO: 369887 - DNA, 50 bp, Homo sapiens
gtgggaacttcggagagctcagattagggaaattggattccaagatccat

SEQ ID NO: 369888 - DNA, 102 bp, Homo sapiens
gccctccggctccgcgggcggcccacggcgagcaacatggccaacgccctggccagcgccacttgcgagcgctgcaagggcggctttgcgcccgctgagaag

SEQ ID NO: 369889 - DNA, 75 bp, Homo sapiens
aatgaacccaaacatagacttgcaagagaagaagttatggcagaagaaagtactgatggagaggtagagactcag

SEQ ID NO: 369890 - DNA, 75 bp, Homo sapiens
caccgtgggagctctcctcatgctgacaggggtgagcccctccagactccgaataggagatcaagagtttgattc

SEQ ID NO: 369891 - DNA, 98 bp, Homo sapiens
ttgaggataactgacttaaaatctggatgtggaagatgtgaaatttgtcatcaattatgactaccctaactcctcagaggattatattcatcgaattg

SEQ ID NO: 369892 - DNA, 83 bp, Homo sapiens
cactttgctctatctggaaaatattctcgggaattcttcaatcgcagaggtcaaagattctaaactgcctgcatataaggatc

SEQ ID NO: 369893 - DNA, 101 bp, Homo sapiens
gagacccctctgctgcaccacttcatgccagctgaggtgggtgtcctggttggcaaagaccggtcaagtttttacgtgaatgggctgacacttgggggcca

SEQ ID NO: 369894 - DNA, 83 bp, Homo sapiens
attcgcagtggtcgcttcttctccttgggttcttgtggtgcttgctgggctttcagtgctgtgggggccctggaagcacagct

SEQ ID NO: 369895 - DNA, 98 bp, Homo sapiens
agaaattttagcacaactccggacacttgttttccagtgtgatcttacccttaaagctcctcaaggaataggttctcctagtgtctatcatgcagtta

SEQ ID NO: 369896 - DNA, 100 bp, Homo sapiens
agtggccatggaagaagaaggattagcagatgaagagagactccttcagggtgagcaaaggcctggaaacctgtatgcagttaaagaaaaggaaagaaag

SEQ ID NO: 369897 - DNA, 50 bp, Homo sapiens
aagacatccctgctgagagagccaagaacccgaaagtttgtaagaggaag

SEQ ID NO: 369898 - DNA, 100 bp, Homo sapiens
tcaactcaaatgcaagtccaagaggaggaggaggcggaggtccaagcggaaaggataaggagccccgtggaatcatccctttagagaatctgagtatccg

SEQ ID NO: 369899 - DNA, 90 bp, Homo sapiens
cagattcgcagtggtcgcttcttctccttgcatccacccgttttgtcaagtgtgaaaagtgtcatcatttttttgttgtgctatctgaag

SEQ ID NO: 369900 - DNA, 50 bp, Homo sapiens
gacaacagcctggtggcagcgataccccagaatcttccatgctccgtcac

SEQ ID NO: 369901 - DNA, 83 bp, Homo sapiens
catccatatcataagtggaattttggagatattcaaaggaattacatgaacgacagccttcgcaccgacgtcttcgtgcggtt

SEQ ID NO: 369902 - DNA, 98 bp, Homo sapiens
cggcgtgtgccccgacggcgacgaatttcacagagatgatgagagccctgggataccctcgacatatttctatggaaaatttccgtacacccaatttt

SEQ ID NO: 369903 - DNA, 100 bp, Homo sapiens
ctgggtacagacctccaccgccacccccgacacaagagacttatggagaatatgagtcagaaataccatcagaggaggggtactgtgactttaatagtag

SEQ ID NO: 369904 - DNA, 74 bp, Homo sapiens
tttgaaccaaattatgctgcaaatgttaaaaagatcaagtggcatgagcagccttttggggaaaattggtgcca

SEQ ID NO: 369905 - DNA, 100 bp, Homo sapiens
cggctggctcacacacccgtatggcaaagggagcccacccacctttgggttcctgttggacatcgatggagtgcttgtgcggggccacagagtgatccct

SEQ ID NO: 369906 - DNA, 100 bp, Homo sapiens
gtcgacctgtcccgccgcttcctcgtccacgactccttctgggctctgcctgaacagttcctgggcaacaaggagatctattgggaaactgattataacc

SEQ ID NO: 369907 - DNA, 96 bp, Homo sapiens
gccgggggtcgctggctctgctgctgccgccggcgaaggaggaggcgttgccggtttttcagttatgggacaaaaatattatatcaaaacactgaa

SEQ ID NO: 369908 - DNA, 82 bp, Homo sapiens
aaggccctgctcaatgtcatccacaccccgggaaggagatcacgttgctgatgcagacattgaatactctgagtaccccaga

SEQ ID NO: 369909 - DNA, 50 bp, Homo sapiens
ggaattcgtgtgttgtacagacccttaagactttcttgtctgcacagaaa

SEQ ID NO: 369910 - DNA, 83 bp, Homo sapiens
cttcggcagtccacccaccgccgccgcctcccaggcaagccggtatattcggggcccaggagcaaggaaaagtggccttttgc

SEQ ID NO: 369911 - DNA, 97 bp, Homo sapiens
aaagaagataattacaagcggacacgggaatatatccgaagcctgaagatggttccaagtattccctatctaggtaaagctacttcttcttctaatc

SEQ ID NO: 369912 - DNA, 97 bp, Homo sapiens
gacgaagagttccctcagcctccggccttgtgtgtccgactcggcagcagtggtgtcatggagaaactccagctgggcccagagattctgcagcggg

SEQ ID NO: 369913 - DNA, 51 bp, Homo sapiens
aacagtgggaccagttgccccgggcatgaatcatacaaaactcaatataga

SEQ ID NO: 369914 - DNA, 50 bp, Homo sapiens
gtcaatcagagcgtcctgtgcgaaatgagccgtcagactgctacagcatt

SEQ ID NO: 369915 - DNA, 100 bp, Homo sapiens
tgaggacttgcgagccgctcagctcccgggacgtttggtaattttaaccaatcagatgacaacaaagattgatagaaatcaggccttgcttgttcctgca

SEQ ID NO: 369916 - DNA, 76 bp, Homo sapiens
atggggagaggctctaccaggaagcccggaagatcgtgggggccatggtccagggcccgcccttcatggagagcct

SEQ ID NO: 369917 - DNA, 100 bp, Homo sapiens
ccccggccctgcagccagcccagggatgccctgagccagtgggctcgggatgagtttgaaggcctcttcaagcagccagcagaaaatgtcaaccagtacc

SEQ ID NO: 369918 - DNA, 90 bp, Homo sapiens
cgactgtgtggagaaggaatatcccaaccgggcatgttttccacaaatcctgcgtggatccctggcttagtgaacattgtacctgtccta

SEQ ID NO: 369919 - DNA, 100 bp, Homo sapiens
gtgcaagtaggatgtttaccaaccctgataatggtgtgaaatctaagaatcccctgccaactcttgagggctcaatccagaatgttgaattgaagtactg

SEQ ID NO: 369920 - DNA, 80 bp, Homo sapiens
taatgagaagatctccattcctgaggaggagagagagctatccaaaatcacgaatgcctagggctcagagctacccagat

SEQ ID NO: 369921 - DNA, 100 bp, Homo sapiens
tgtcgccttccgctacttccgggagctctttgggatccggccagatgattacttggcaccgtctgcgtcctgctgtccttccccttcatcttcagcccct

SEQ ID NO: 369922 - DNA, 90 bp, Homo sapiens
ggagtgatgagtttggttcttggcaggaatatggaagacaggcacgtgtggttctcaaatataggcattctgatgggaacttgtgtgtta

SEQ ID NO: 369923 - DNA, 50 bp, Homo sapiens
tcacagagttagagagagggatggtggtatggcacagtcacaagggtggg

SEQ ID NO: 369924 - DNA, 75 bp, Homo sapiens
gattcgctcccagagcagctgcggccaggagcttctctgcagactgacacaccctcccccaccccgggtagtgga

SEQ ID NO: 369925 - DNA, 75 bp, Homo sapiens
acttcatattttggaaagcagtttttaagacaagaacttgctactaccagcaccatgccctaccaatatccagca

SEQ ID NO: 369926 - DNA, 107 bp, Homo sapiens
tttcaatccagtttcaggaggattgccagaagttagagatgtttatgattacttccgagctgtcctgcagcgtgatgaaagaagtgaacgagcttttaagctaaccc

SEQ ID NO: 369927 - DNA, 51 bp, Homo sapiens
caaagtgctggaattacagggggctactacaaagttctgggaaagggaaag

SEQ ID NO: 369928 - DNA, 75 bp, Homo sapiens
gcttatgaatgctcgacttcagtacaagccagctgccatgttgtgagcacataccacatagctccatggagatgc

SEQ ID NO: 369929 - DNA, 97 bp, Homo sapiens
acgacaagaaaaacaatcgcttcaatgatgggaaggtggatcccgccgggaggtactttgctggtgactccctgtcctaccacagtggccagaagtt

SEQ ID NO: 369930 - DNA, 100 bp, Homo sapiens
agtcgccacctaccacagagccatcaaaatcacagtggatgggccccgagaacctcgaaatgagagtccggagtgttgtcatgtgaagcctgccatccag

SEQ ID NO: 369931 - DNA, 100 bp, Homo sapiens
actcttcattcaagtcaatcagtttgcattgttatttgaaggattgaaggcatttcgaggagtagataataaaattcgactgtttcagccaaacctcaac

SEQ ID NO: 369932 - DNA, 82 bp, Homo sapiens
gccgctctgggatcccggccaccagcaattgtccggctgcagttcatggagctcgtttcaaagggcaagatctaaaactggc

SEQ ID NO: 369933 - DNA, 96 bp, Homo sapiens
ccagtagcttttctgagaatacttgctgaaaaggaagttttctggaatggcacctggctgcagtggaagaaagaaagatcaagtccctggtagctc

SEQ ID NO: 369934 - DNA, 99 bp, Homo sapiens
cctgagaaggagcaggggaaagagatcaaaatggactcacagatgacgaagcaggcgctgaatgagattgagacgaggcacaatgagatcatcaagctg

SEQ ID NO: 369935 - DNA, 80 bp, Homo sapiens
atcactcattaagaacagaggaggctgcctgttactcctggtgttgacaatgcagatcttcgtgaagactctgactggta

SEQ ID NO: 369936 - DNA, 82 bp, Homo sapiens
ggagcttccgggagggcggctcgcagaggtggggctggtgtccgagcacttctcgcaggccccgcagaggctgtccttctac

SEQ ID NO: 369937 - DNA, 75 bp, Homo sapiens
aaggggaatggggtcaaaatgagcaggaactggcatttgatccatatgaatcgtatgctcgagatattttgcgac

SEQ ID NO: 369938 - DNA, 96 bp, Homo sapiens
tggcacttcagagggtacgggaagctgctgaaaaggctaaatgtgaactctcctcatctgtgcaggtagagctgagtaaagaagaagtaaaacgcc

SEQ ID NO: 369939 - DNA, 100 bp, Homo sapiens
caggagtacctggaggctcaacggcagaagcttcaccacaaaagcgaaatgggcacaccacagtattagttcagaagcaggcctagaaattgatagccag

SEQ ID NO: 369940 - DNA, 100 bp, Homo sapiens
gatcagcgtagtataattcttcatctcatttcacaactcaaacttggaatggatttgaccaaggtttaactatagatcaacacatcatcttgcatctcat

SEQ ID NO: 369941 - DNA, 101 bp, Homo sapiens
cagtcttcttggagtcactttggctggagcagtttttgcaagaaaggatcaaagtgaacggaaaagctgggaaccttggtggaggggtggtgaccatcgaa

SEQ ID NO: 369942 - DNA, 90 bp, Homo sapiens
aggcaagtttggtgtccagatggacagagttgatcaggtcatccgcaagggctggctgactatcaataatattggcatcatgaaaggggg

SEQ ID NO: 369943 - DNA, 82 bp, Homo sapiens
catggagggcgcgggtgttgtgatcgcagtgggcgagggagtcagcgaccgcaaggttggaaagggcaaagaaattacaaga

SEQ ID NO: 369944 - DNA, 50 bp, Homo sapiens
gccgcctgtccgtcgatgcaccgaaaaggccaggggttatcaccatgcaa

SEQ ID NO: 369945 - DNA, 114 bp, Homo sapiens
cttggagtccaggaaaacccttcgatcaggacttaattcagtgcacaaatgagatgaatgtgaacatcccacagttggcagacagtttatttgaaagaactactaatagtagtt

SEQ ID NO: 369946 - DNA, 98 bp, Homo sapiens
cctttcacagctggctgtagctggccaaggagttctcgattaaagaggaaggggcagtgctcacatttctgggcagctacctctacccagatggaaag

SEQ ID NO: 369947 - DNA, 75 bp, Homo sapiens
tccaaaaaccactacactcctgtgcgtacggccaagcagactccagagaccacctgggaacgtcccagcagttct

SEQ ID NO: 369948 - DNA, 50 bp, Homo sapiens
gagaatcatcatcaaggcaccgtaggtcaaaatgcagatcttcgtgaaaa

SEQ ID NO: 369949 - DNA, 98 bp, Homo sapiens
acatcaccaagctggaggtggacgccatcgtcaacgccggtatcgagaaccttccctgcgaacttcagaggaacttccagctgatgcgagagctggac

SEQ ID NO: 369950 - DNA, 83 bp, Homo sapiens
cgagcggctccctaacaggcccgcctgtctgctcgtggccagcggcgccgccgaaggtgagaagccctaccactgcaactggg

SEQ ID NO: 369951 - DNA, 98 bp, Homo sapiens
tcattacagtgatcatcataggcttatgtcttgctgcagatgttccatttaagcagacctcttccatagctgtagctggagcggtaattggagctgtt

SEQ ID NO: 369952 - DNA, 83 bp, Homo sapiens
ccaagccgccctggatggagactcccagatgatgaaactgaggcacaaactgcttaatgaacttgtccatggtaaagaagaaa

SEQ ID NO: 369953 - DNA, 80 bp, Homo sapiens
caccaatctgcgaccagaccattgattcccgactgaagtcaccttcaggccattcagaggaggaaagagaggggaatatg

SEQ ID NO: 369954 - DNA, 100 bp, Homo sapiens
gttaaagctggtctgttctaactgagatgctccagccagtgagaacaccaaggccccagagatgaaatcccggaggcccaagagctctcttcctcccgtg

SEQ ID NO: 369955 - DNA, 90 bp, Homo sapiens
acggcttccccgaacgcaaggagcgcgggaatcccgctggctccgtggtgatggaacgcatccggatggacattcgcaaagtggacgccg

SEQ ID NO: 369956 - DNA, 78 bp, Homo sapiens
agcttttaagactctgtttggcagggagagcctgacaaggagctgaatcctaagaagaagatttgggagcagatccag

SEQ ID NO: 369957 - DNA, 100 bp, Homo sapiens
actcattcaaggttacccagttgtccaatatcagatggaaatgatgcggagccttcgccatgtaaacattgatcatcttcacgtgggctggtatcagtcc

SEQ ID NO: 369958 - DNA, 82 bp, Homo sapiens
ctggctcttgccctcatcctggttctggaatcctcagttcaagtctattgaagacaatgaagtatatttgcctaatgatgaa

SEQ ID NO: 369959 - DNA, 83 bp, Homo sapiens
gggagaggtaaacagaacaccaggacatcccagagtctgggaaatggaagctcttcgtgggcggtcttgactggagcacgacc

SEQ ID NO: 369960 - DNA, 50 bp, Homo sapiens
cattgacaatgatggctttgaaggtggaacaatccaaagttttaatcaaa

SEQ ID NO: 369961 - DNA, 100 bp, Homo sapiens
caaagaagtgatgctggagaattacaggaatcttctctcattgggtggagccgccaccaaaatgcagattttcgtgaaaacccttacggggaagaccatc

SEQ ID NO: 369962 - DNA, 83 bp, Homo sapiens
gtgagctcggccggcaaccgagggacccgcgtccagaccatggtgaatccgggcagcagctcgcagccgcccccggtgacggc

SEQ ID NO: 369963 - DNA, 90 bp, Homo sapiens
ggaacacgtagaaagtgcaagcaaagggattttatattggaagacatggatcttgctgccaacgagatcagcatttatgacaaactttca

SEQ ID NO: 369964 - DNA, 50 bp, Homo sapiens
tgtagaattctatgctccatgatgtccgtaggagaattgaacttattcag

SEQ ID NO: 369965 - DNA, 75 bp, Homo sapiens
cttcctaacgcagactcgagtgcgaagcgcgcagtcgccgggatagaatcacttgaattcctggatgaaatggag

SEQ ID NO: 369966 - DNA, 100 bp, Homo sapiens
ccaaagcccagtgttaaaagaatggacaaacagacggaagagattctgtttctggcgtctgcatacgcaagtccccaactcgctgaggagagctgttcag

SEQ ID NO: 369967 - DNA, 75 bp, Homo sapiens
tggagtgcgtgggggaccggctgttggcgggcgagaaccactgtctctgatcaacgtgcggaagaggaacgtgga

SEQ ID NO: 369968 - DNA, 98 bp, Homo sapiens
ggcgaccggcggcgtccgaggaggtacaggtttgcagattccgccagcagcacagcaagctctacagatgagtggctctttggcatttggtgctgtgg

SEQ ID NO: 369969 - DNA, 82 bp, Homo sapiens
gccctgaaaaagtatcgtcgagaagcctatcatcggaactgtggctgcaccatctgtcttcatcttcccgccatctgatgag

SEQ ID NO: 369970 - DNA, 100 bp, Homo sapiens
agcagagctctgccaggcagaaggcctctctcctgatacagcaggcgctcaccatgttccctggagccatccgggtgacctgcataggttcctgcggggt

SEQ ID NO: 369971 - DNA, 100 bp, Homo sapiens
atggtcagctaggactcatgactactgaggattctgtggcagtgcccaggaccgtcctccttctaatatttggaagaaaatagatcaatccagggactat

SEQ ID NO: 369972 - DNA, 83 bp, Homo sapiens
gctgctgctgctgacgctgctgctgcccggcctcgggggcgccctgcgtccggcagaggaggcgagcatcccgctcaggtgat

SEQ ID NO: 369973 - DNA, 75 bp, Homo sapiens
attacaactattatcctcctgtagagtcacaaacataacaatggtcagcccatttggtttaccctgggcatcctg

SEQ ID NO: 369974 - DNA, 100 bp, Homo sapiens
cgcccgactgccagagtctgctacggggcatgatcgaggtggacgccgcacgccgcctcacggtggtcaaacctgtcctgacacccagaggtctgcatga

SEQ ID NO: 369975 - DNA, 101 bp, Homo sapiens
ggtgtgattctgctgttcagcaggagaaaatttcagagctgcaaaattatcaggtcaagaaagatcttaagactggtcattcaaaggggtttggctttgtt

SEQ ID NO: 369976 - DNA, 100 bp, Homo sapiens
tgaagatgaggaagtctgggggccgagaccacacagttccaaagaggtgtttgaaagctcgagaacattttggtacagtaaaaacacatctaacatcttt

SEQ ID NO: 369977 - DNA, 74 bp, Homo sapiens
ctgaaacaatgggacccatgggttgccaggtgattggtgaaaacactaaacaaccctgagcccagggccaaccc

SEQ ID NO: 369978 - DNA, 101 bp, Homo sapiens
tgaccatggctccctgcagtaccctttaacggccggggtttgaagtctcacgcctacattcacagtgtccagtttagccaccatgttttcctcaacctcca

SEQ ID NO: 369979 - DNA, 80 bp, Homo sapiens
ccccgcaccaaattgcatcgtttcccagagtttacagatgcttcctcagcaacggaaagccatagctaagttcaaggagc

SEQ ID NO: 369980 - DNA, 90 bp, Homo sapiens
gcatcagaatttcttcagaatgcagtttacattaaccttcgacaggtacctgtttcccaggcaactactgatcaggcatttctggacccc

SEQ ID NO: 369981 - DNA, 115 bp, Homo sapiens
gaagaatttggacttgatgaagaagatgaagatgaggatgaggatgaagatggagatggcgatggagatggagcaactggaaagaagaagaaaaagaagaagaagaagagaggac

SEQ ID NO: 369982 - DNA, 80 bp, Homo sapiens
gaagagctcgtggcgtgcgacaacgcggcgcagaagtggctgcagtgggacaagagccacaggtatttggaagaagtctt

SEQ ID NO: 369983 - DNA, 74 bp, Homo sapiens
ctttgagctggaccgattagaggagaatgggtaccgatccctctgtgaacaggagtggtaaaatttcagccttc

SEQ ID NO: 369984 - DNA, 50 bp, Homo sapiens
cgggccctgggccgccgccggccagcctacagcctggctcccgcgacgcc

SEQ ID NO: 369985 - DNA, 98 bp, Homo sapiens
ggcgaagtccccggagaactctaccctggaggagattctggggcagtatcaacggagtctccgggctatgtttccagtgtcctctgggtgtttccaag

SEQ ID NO: 369986 - DNA, 97 bp, Homo sapiens
cgctggctgcggcagcaggggactagcgtgagagctgggagtgtccactcgccttccaccagcatggcaacgtcttcacagtaccgccagctgctca

SEQ ID NO: 369987 - DNA, 75 bp, Homo sapiens
gcagcggcgccaggagcccgtgcgcggcccgggcagccgcgctttcccataattcgccaaaatgacgaacacaaa

SEQ ID NO: 369988 - DNA, 83 bp, Homo sapiens
cttgtttgtggatcgctgtgatcgtcacttgcttccttcaaaatgtctactgttcacgaaatcctgtgcaagctcagcttgga

SEQ ID NO: 369989 - DNA, 89 bp, Homo sapiens
gctttcccgagaccgtcctggcgcgatgcgtcaagtacactgaaattcatcctgagatgagcaaaagatacagatattgtggatgaagc

SEQ ID NO: 369990 - DNA, 90 bp, Homo sapiens
aacgaggaaggaaggagcagttggttcaatctctggatgcgacctaaagtcatgtggcacctccttcgaaggtacatggcatcccggctc

SEQ ID NO: 369991 - DNA, 99 bp, Homo sapiens
tgcaaggccacgacccacgagatcatggggcccaagaaaaagcacctggactgagcatctttccttgaagaagtacattattgacattgtggttgaaag

SEQ ID NO: 369992 - DNA, 83 bp, Homo sapiens
gaaagttgtgggtcagctgaccaggaaactctttatacagtgaaacaggaggaaagaaaaatgcagcaataaagataaataag

SEQ ID NO: 369993 - DNA, 82 bp, Homo sapiens
gctcccgctacggacacctcaggtcaaaatgcagatcttcgtgaaaacccttaccggcaagaccatcacccttgaggtggag

SEQ ID NO: 369994 - DNA, 120 bp, Homo sapiens
ggctgcaaggaacgccacttcgtcactatctcctctccactggccacgcagatccctcaggatgccatggacaatattaccaggcagaaccaattctacgatacccaagtcatcaaacaa

SEQ ID NO: 369995 - DNA, 100 bp, Homo sapiens
ggcaggctggagggcaggagctggggccacgctggtctgggatagttgggcagggagaggaaccgctgctgctggccgaactcaagcccgggcgccccca

SEQ ID NO: 369996 - DNA, 89 bp, Homo sapiens
gttttttcctgtatgaagcggttggcaccactgaagtgaccgaatgaggtggatccataaagaacccagccaacccgcagagggagggg

SEQ ID NO: 369997 - DNA, 101 bp, Homo sapiens
ttcccggagccggagaccctcccttgaaaccggcactgggacttctcgatctctggaggcacctgttgcaagtgacagtgtgctggagaagagaaacgagt

SEQ ID NO: 369998 - DNA, 83 bp, Homo sapiens
ctggatgctgcagacactgaacgaggagccagtgctatgaagacggccaagtgggagatgcaaatattaatacacaagaagga

SEQ ID NO: 369999 - DNA, 100 bp, Homo sapiens
tttccatctaattatgacctccttcgccacttacagtatgcaacacattttcctatacctctggtagttagaaacaaacctgtggcaaggcaggctcctg

SEQ ID NO: 370000 - DNA, 139 bp, Homo sapiens
cggggtcccggtcgcgaggaggaggaggatgtggcgcgcggaggggaaatggctgccgaaaacaagccggaagatgaaggatttgggggcagagcacttggcaggtcatgaaggggtccaacttctcgggttgttgaac

SEQ ID NO: 370001 - DNA, 75 bp, Homo sapiens
tcaacactgtgttctataacactgacctttgtgtcacttcagtgtcaaaaggaggatttgaaagggaagaaacgg

SEQ ID NO: 370002 - DNA, 50 bp, Homo sapiens
tttaaactcattctactggagcaaatgagttcgaaatttgagcaacccag

SEQ ID NO: 370003 - DNA, 100 bp, Homo sapiens
ccattctgttggttttatgcatctttatccaatcaagtgcccttggacaaagcctgaaaccaggcatgtgggcacattccatgacagtacaggattatca

SEQ ID NO: 370004 - DNA, 100 bp, Homo sapiens
gaaagagaatgtaagacaggaaaataattaaatattcttaccgaggtgacttgcttttggagggcttcaacaactacaccttcctctccaatggctttgt

SEQ ID NO: 370005 - DNA, 96 bp, Homo sapiens
aaaatagtgatagctttgataactctgcctgcagttgaacacaaagacctggaggagactcccacctccttcagggagaagaaaggaggcagcgaa

SEQ ID NO: 370006 - DNA, 98 bp, Homo sapiens
cttggcaactttcctggcccttttgaagaggaaatgaagggtattgccgctgttactgatatacctttaggtcctaggcctacttacaagcctccagt

SEQ ID NO: 370007 - DNA, 75 bp, Homo sapiens
gaatagctgcatcgtttgtaacatgggacattccaacacagagattgacgtggaatcagagatcattgatttctt

SEQ ID NO: 370008 - DNA, 100 bp, Homo sapiens
cagcttctttgtcaccataggagacatggacgaagccttcaaatccatcaagctcatcaaaaggtatgggatgcgatatgtggccaaagtcctgaaggca

SEQ ID NO: 370009 - DNA, 100 bp, Homo sapiens
gagcagacttccgagttcactttgggcagattttcaatttgcaaatagtcaactggccggagagtttaacacttcaggagaatgacatcttcctgggctg

SEQ ID NO: 370010 - DNA, 83 bp, Homo sapiens
atcggacgccagaatctggtgaggatccagagaggcctaatgttatttctcaaactctgaggctgcggagttcacacattgaa

SEQ ID NO: 370011 - DNA, 75 bp, Homo sapiens
ttcacggagctctggagaaacatgaagttcgggactatcttctggtgtgatccctcacatccacaaatctctgat

SEQ ID NO: 370012 - DNA, 75 bp, Homo sapiens
agccgggcggcctgccccgccggagcagcatcatcaagatgctattaactgagtacttggatatgaaaaatactc

SEQ ID NO: 370013 - DNA, 50 bp, Homo sapiens
cgaaactttcaccgcgagcggagccacccagagttccctcactgaagatc

SEQ ID NO: 370014 - DNA, 100 bp, Homo sapiens
ttaaagtacgtccgcgggttgctgcagacagagccccagaacaaccaggccttcatcgagatgaacacggaggaggctgccaacaccatggtgaactact

SEQ ID NO: 370015 - DNA, 85 bp, Homo sapiens
cgggcaaggccatcggcgtcctgaccagcggcggcgacgcgcaaggtgcagaggccaagaccgttttgcccaagaaggagaaaat

SEQ ID NO: 370016 - DNA, 97 bp, Homo sapiens
ccaggcagatttataaccctcccagtgggaaatatagcagcaatttgggcaactttaattatggccgacgcctccccccagggtcagctgcgggctc

SEQ ID NO: 370017 - DNA, 100 bp, Homo sapiens
ccacagaggccacggaaatgatgggtgcccttgtggccagtaggcaatcacctgaaggatctgacttccagaagactgcttttggcttctggatgccctc

SEQ ID NO: 370018 - DNA, 82 bp, Homo sapiens
gcaggcagtcccgcggcagcaggatcacagagtgaagacatttccacctggacacctgaccatgtgcctgccctgagcagcg

SEQ ID NO: 370019 - DNA, 75 bp, Homo sapiens
ttggaaatggcacctatggacaagtctataaggaaccactgtgtctcttgaaacaacaaatagtctcttggattt

SEQ ID NO: 370020 - DNA, 75 bp, Homo sapiens
tcaccttcgacccccgctcgggatcgaatcatcaatttagttgttggcagcttaacatccttattgattctagta

SEQ ID NO: 370021 - DNA, 127 bp, Homo sapiens
gaaaacctaaccatgaagacttgaacttaatacagcaagaaagaccatcaagtttaccagaatgtatcctgtcaggtataatgtcagtgaatggcaagaaagttcttcatatggatcgaaaccctta

SEQ ID NO: 370022 - DNA, 50 bp, Homo sapiens
ctttagactaattgcagataattaaggaatgtatcctgtcaggtataatg

SEQ ID NO: 370023 - DNA, 90 bp, Homo sapiens
tttactgttgatttttcatctcttgccaacatactttgtagatactgcaatctactctgacatatcaggatgctgagctttttataccac

SEQ ID NO: 370024 - DNA, 50 bp, Homo sapiens
ttccacagatgtgtcaccaaaccagctggactgtgctgctgccatctcgg

SEQ ID NO: 370025 - DNA, 82 bp, Homo sapiens
tttgccgatccgccgcccgtccacacccgccgccaggcataatcaccagcaacacccgggacaataatacgggggccaccta

SEQ ID NO: 370026 - DNA, 100 bp, Homo sapiens
tcttctgacttgagcctgcagtgtgctgtgagagatctaccactaggtccctcgtctgagctggctcactcgcccaccaacagcgggaagaagctctttg

SEQ ID NO: 370027 - DNA, 50 bp, Homo sapiens
atgagagcagagcatgatcctcttaaggatccagctatgggacacagcag

SEQ ID NO: 370028 - DNA, 100 bp, Homo sapiens
agaagctattgaaaaacagtacatttctgcaattgagaaacaggcacacaagtgtgaggagttgctaaatgctcaggcgtctgtggctttggaggcccct

SEQ ID NO: 370029 - DNA, 100 bp, Homo sapiens
ccctgttgtacatccactggacctaaaatatgaccctgatccagggccgcgatgggcctcttggaacattggtgtgttcatctgcattcgatgtgctgga

SEQ ID NO: 370030 - DNA, 80 bp, Homo sapiens
aggaaggcgtccgttggccttcgtacccgtcttgattgagttccagtgtctcgccccatcctcaccctcagggttcccag

SEQ ID NO: 370031 - DNA, 75 bp, Homo sapiens
tgtgctctgattcacgtttagaagctgaccagacaaagagaggtagcagcaattgcagagacagatgaatctgca

SEQ ID NO: 370032 - DNA, 82 bp, Homo sapiens
gcgaaggccgccgaacctgcctggctagccggcgacttgagtgacgaggactttgaacatgtcggggatcgccctcagcaga

SEQ ID NO: 370033 - DNA, 74 bp, Homo sapiens
gaggcaactcggcgacagcaggctacatccagaatgacagggtccagaaactggcgagccacgagggacatgtg

SEQ ID NO: 370034 - DNA, 82 bp, Homo sapiens
acaccccatcagccaagagagacccttggtagggaagacatatgagctactcaactgtgacaagcacaagtctatattgttg

SEQ ID NO: 370035 - DNA, 75 bp, Homo sapiens
catatgattggctctttagctgaaatacttctgaagctttggacatcagacagtgcaggagaagaatgtgatgcg

SEQ ID NO: 370036 - DNA, 50 bp, Homo sapiens
tctggcgccgccgccgccagcgcgatttaatccagagactgacttcacta

SEQ ID NO: 370037 - DNA, 51 bp, Homo sapiens
gtcccttcctccacttatgttcccaaagtacataccgagcatcaaatatta

SEQ ID NO: 370038 - DNA, 75 bp, Homo sapiens
tggagactgccgagcagccttgagccggtgccctgccagtcagcgtcgtcagcctctgccctgggcggtgtcaaa

SEQ ID NO: 370039 - DNA, 100 bp, Homo sapiens
agtggatgggggtcaccgtccagagccaaggtccagggggcaaggtcgtggaaattgaaggatgtcccattactgccctccttggattatgagaaactga

SEQ ID NO: 370040 - DNA, 100 bp, Homo sapiens
catggacgagatgggaaggcacagggagaagggataaccctacacccagaccccaggcccctacaaaggcttcagagtagatatctctgccaacatgagg

SEQ ID NO: 370041 - DNA, 75 bp, Homo sapiens
cgctgactgtcgggcggtggtgatctctggtgcaggaaaaatgttcactgcaggaaacaacccggtggacgaaaa

SEQ ID NO: 370042 - DNA, 75 bp, Homo sapiens
ttagcgctatggaagatgaccagaggactagacctgaagtttcaaagtgggaatgtaagacggacttagatattg

SEQ ID NO: 370043 - DNA, 75 bp, Homo sapiens
gaccctcacaagtcagttactgaaaaggtgcaagcatctcttggcagtttacctgagtcaggttatgaggacctg

SEQ ID NO: 370044 - DNA, 75 bp, Homo sapiens
cggcagacggcgacagtggcggcggcgccatggcagggcttgcagccagagactgctgctactttgaaacgtacg

SEQ ID NO: 370045 - DNA, 95 bp, Homo sapiens
ctatcaaggaaaacaagtgtctgcttatgtcgggaaatcgtgatgagaaccagagtataaaccaccaaatggctcaggaagatgctcagcgtctc

SEQ ID NO: 370046 - DNA, 98 bp, Homo sapiens
ttcatctctataggggaggcaggcttttgcaagatcttcataaacaatgaatggcatgattcagtgagtggcaagaaatttcctgtctttaatcctgc

SEQ ID NO: 370047 - DNA, 98 bp, Homo sapiens
ccgggacccggttccccggcccacagtgggggtgtgcaaacccgagagaactggcatgttggcagataaattgaacatgactccagaagaagctgaaa

SEQ ID NO: 370048 - DNA, 90 bp, Homo sapiens
ttcgcagtggtcgcttcttctccttgaggtcatgacgccagtcagatcacactagccttgggcacagctgcctcctaccccagggcctgc

SEQ ID NO: 370049 - DNA, 74 bp, Homo sapiens
tgggatatatttttgagaccaaattaatcagcacattgatttataaggacagagcgggatgccaccagcttgtc

SEQ ID NO: 370050 - DNA, 98 bp, Homo sapiens
gcgaagtctgtggtttatcattgtaatcagcttcttaccaaatacagaagctgtatgcaggagctattcttgaagtttgtggatgaaaattgggaagg

SEQ ID NO: 370051 - DNA, 100 bp, Homo sapiens
gtcattcctgcctttgagcggactcccttttaagagttgaaactggttgacaaccattaacctgggttgcaactacaggtggcactggaagcagactggt

SEQ ID NO: 370052 - DNA, 96 bp, Homo sapiens
aggagcctgtcctccatgttttataagtattgacattacacagtgttaacaatgcatccacagaggacgagattgaggagctgcgggccgagatgc

SEQ ID NO: 370053 - DNA, 100 bp, Homo sapiens
gagtccccaaggggtgtttggatgcaagctgaaatcacctttaagaagcccatgcctaccaagatttggccaattgggagagaaatcaactgtaagtgct

SEQ ID NO: 370054 - DNA, 98 bp, Homo sapiens
taagaaatgattatatcaactgggtccaacagcaggcctatggaatgatacttggtgcttgaaaaactgaagaaggaagacgctgaccgaattcatat

SEQ ID NO: 370055 - DNA, 107 bp, Homo sapiens
ggaagcatacagatctgggaccgaaatttgactattgaagaagagatgttggctttgcagaatgagcgcacagaacgaatacgaagcctgttggaacgtcaagccag

SEQ ID NO: 370056 - DNA, 147 bp, Homo sapiens
tgggctcagagcaaggatgcgtgaaattgtccatattcagattggccagtgtggcaaccagatcggagccaagagactctgacctgtttttgttggacacccgtgtagtatgggcctcagaagaaggctggctggaatttgacatca

SEQ ID NO: 370057 - DNA, 101 bp, Homo sapiens
cggccatggactggaaagaagttcttcgtcggcgcctagcgacgcccaacacctgtccaaacatcgcaatgtatctgctgagcaaaaagatgaaaacaaag

SEQ ID NO: 370058 - DNA, 51 bp, Homo sapiens
gctttgcactatgcagtggaactcttcacagatggaatcacaaataaactt

SEQ ID NO: 370059 - DNA, 100 bp, Homo sapiens
tctgcgaaggccgggacccggttccccggcccacagtgggggtgtgcaaacccgagagaactgggtttaactatagatcaacacatcatcttgcatctca

SEQ ID NO: 370060 - DNA, 100 bp, Homo sapiens
ttgagcctgactaccgcctttttgttgtgcacctgctccccaagctccagcagctggataatgtgcactttcaaaactcagcacagattgctaaagctct

SEQ ID NO: 370061 - DNA, 75 bp, Homo sapiens
gttcaattagaccgctctttccagctggctacttctatgatacacaggttgcagggagagtagctgaagaaaggg

SEQ ID NO: 370062 - DNA, 75 bp, Homo sapiens
agaaggagatacattaaatgcaatagcccttcagtactgttgtacggttggaagcgaagtggaagcactgaacct

SEQ ID NO: 370063 - DNA, 83 bp, Homo sapiens
tgaagatctcaagatctggactactgttgaaaaaatttccagtgaggtatcatgatattagctggtttgacatcaagtcattt

SEQ ID NO: 370064 - DNA, 83 bp, Homo sapiens
aagctacaagggatttgttgacataacggtggcagcacaccctgggccccccactccccgccgcaagtcctgaggatggccag

SEQ ID NO: 370065 - DNA, 75 bp, Homo sapiens
cctggatagtgatggccaacaccccagatgcaagcgtggattggggttccaagttccccatcaagtggacagccc

SEQ ID NO: 370066 - DNA, 73 bp, Homo sapiens
gggagaaggcgctgcgcaagcacgctgaggaggttcgactagtgatagtggatggtattgcttttccatttcg

SEQ ID NO: 370067 - DNA, 100 bp, Homo sapiens
ggagcagccggaacgatgccggccgtgagcctcccgcccaaggagaatgcgctcttcaagcggatcttggtgctgactgggttacttttttaaacactag

SEQ ID NO: 370068 - DNA, 75 bp, Homo sapiens
ttggaactgtgtttgggagcctcatcattggttatgccagatcaaacgcctactccaactagattcctgaagaac

SEQ ID NO: 370069 - DNA, 100 bp, Homo sapiens
gcgtcacactacgacagtgagaaaggaggtcctactgctctgttggctcatgaaataggttttggaagtaaagttacaacacaccctcttgctaaagaca

SEQ ID NO: 370070 - DNA, 118 bp, Homo sapiens
atgatcgagaggatctggtgtaccaggcgaagctggccgagcaggctgagcgatacgacgcaatggctgccatccggaagaaactggtgattgttggtgatggagcctgtggaaagac

SEQ ID NO: 370071 - DNA, 74 bp, Homo sapiens
agaaacatcagttactctgaagggcatcatgcatcttactgaagaatgccagctgatgaagaccgagaggccgc

SEQ ID NO: 370072 - DNA, 100 bp, Homo sapiens
caagttcctgatgatgaacagtttgtcccagattttcagtctgataaccacagagaatgggctccaggacaatgacatcaagctgagggtcagtgagtgg

SEQ ID NO: 370073 - DNA, 82 bp, Homo sapiens
cgggacagtgacgacgacagcgtcctcgaagccaccagctcccgggacccgctcagcgatcacctcaatttccacggacagc

SEQ ID NO: 370074 - DNA, 100 bp, Homo sapiens
ggcaatgtcccgccgcaaacagggcaacccgcagcacttgtcccagagggagctcatcacccgtactccaaagattcaggtttactcacgtcatccagca

SEQ ID NO: 370075 - DNA, 100 bp, Homo sapiens
acctgtacttgccgccgtcccggctcacctggcggtgcccgaggagtagtcgctggagtccgcgcctccctggggtcagtttgaaaaggaggatcgagct

SEQ ID NO: 370076 - DNA, 100 bp, Homo sapiens
ccacacggagcgccgcggccgcatctacatccaggcccacatcgacagggacgtcctcattgtcctcggtgggccatgcacagacacagctcatgtctca

SEQ ID NO: 370077 - DNA, 100 bp, Homo sapiens
actggaagcactgtggaagaagatggagggtgtgctctaagcgaaagacatgaggcctcagcctgaaatgaggttgttttgaggtcatctgatttctgac

SEQ ID NO: 370078 - DNA, 50 bp, Homo sapiens
accacacactgggaaacatcattaaatctttggtaactctcattcgacat

SEQ ID NO: 370079 - DNA, 89 bp, Homo sapiens
gctggtggacagctgctgtcagcacctagaaaaacatggttgctccttgagggcaggacagttcttatggctttatccgttgcgtaagc

SEQ ID NO: 370080 - DNA, 90 bp, Homo sapiens
cttacaaggtggatatatgctggcagcctcgtattggccaaaggtgtatgtggaatttgatgatcttgaatgggataaacgagagtgggt

SEQ ID NO: 370081 - DNA, 78 bp, Homo sapiens
gcttatggctatgaatatttgttcaccaaccttagtgaagaattaggagtccaggttcatgtgaataagctagacatg

SEQ ID NO: 370082 - DNA, 82 bp, Homo sapiens
gaaacaccatggctgcggcggcccagctctctctgacacagcttaatgcagataccgaaagagaagaaggcgaagagtttga

SEQ ID NO: 370083 - DNA, 75 bp, Homo sapiens
gacactgcatcggaatctggagctggagcacaaggagctcggggagaggatgaagcctgctgggagcgtgaatga

SEQ ID NO: 370084 - DNA, 75 bp, Homo sapiens
caggcagggaatggctcatggggatatccgatggtccccacagagcttgttgagaaagaattttggagactagta

SEQ ID NO: 370085 - DNA, 98 bp, Homo sapiens
catcaagctgtctaagtccaaagatttttacccagattgccacggcagtgaagtttctacagaattcccgggtccgccagagcccacttgcaaccagg

SEQ ID NO: 370086 - DNA, 100 bp, Homo sapiens
gaagaatctagacagacaggcctttctaggtccgcccgtctgcgcccctcacaggaagccggagggtcgctctgatcccgaatctcccacaggcgtgaac

SEQ ID NO: 370087 - DNA, 100 bp, Homo sapiens
ggagccggtgctgcagaaccagatccgggagcacgtcatcgccatcgaagagagccagctgctccccgggaacaacttcaccaatgagtgcaacatacca

SEQ ID NO: 370088 - DNA, 100 bp, Homo sapiens
atcgctgccttgatatacacttttcaaaatgctttggtgggaagaagtagaggactgttcgggaatgcatatcagtccacgtgggccaagcgggagttca

SEQ ID NO: 370089 - DNA, 101 bp, Homo sapiens
ctgggccgagaacccgctggtttattgcgacgggcacggctgcagcgtcgcggtgcatcaaggagcctgatgcccaggaccctcgagagccagatcacgct

SEQ ID NO: 370090 - DNA, 100 bp, Homo sapiens
gagcctgagggggatgggagcaaggatttggcgcataaacttggaggaggcagtggagagagcatcctggtatcacagcttcagcatggactgacgttag

SEQ ID NO: 370091 - DNA, 75 bp, Homo sapiens
ccgggatagagaacgggaccggcaccactgagaaagatgcctctttgacaaggccacttcatcatcaagcttctg

SEQ ID NO: 370092 - DNA, 73 bp, Homo sapiens
gatggcgtagaaagtaatgacagacttggagtccaggtgtgagaaatttctacaaaaagacatttttgaaatc

SEQ ID NO: 370093 - DNA, 98 bp, Homo sapiens
cagcccccaggagcaagaccaagaccgcaggaaggactggggccacgtggagctgctggaggagtgcaaggatgtgaacaaggtcgcctactgccccc

SEQ ID NO: 370094 - DNA, 98 bp, Homo sapiens
gcgcagtacacctgccccatctgcctggaggtctatcaccggcccgtggccatcggcagctgcggccacacctgagctgactgctgcccactttggag

SEQ ID NO: 370095 - DNA, 100 bp, Homo sapiens
aagcttttgatcaccattggctgggaaggaaaaacagaatcagctgttccctgcgaaagggttcttttcctatgactccatcaattccagctaatcctcc

SEQ ID NO: 370096 - DNA, 115 bp, Homo sapiens
ccacaatctctcagtatgacaaggaagtcggacagtggaacaaattccgagacgtgagcctgaatttaaatacattgggaatatgcatgggaatgaggctgttggacgagaactg

SEQ ID NO: 370097 - DNA, 101 bp, Homo sapiens
attacaaatgagaagctggctatggttaaagcgcagtctgagctatcagctgaagaaagtccagaaaaattaggaacctcccagctacatcgccggaaagt

SEQ ID NO: 370098 - DNA, 100 bp, Homo sapiens
gatcgccgggaacccttgccgctgctgtcctgcgaccccaagcaggtgtcttctctttagggatggtgaggttggaaaaaggctcctgtaaccctcctcc

SEQ ID NO: 370099 - DNA, 75 bp, Homo sapiens
cagcaagctgttcaatgaggaggttaaaaataagaagttggttgagctgctgagaaggaaagttcgtctcgccca

SEQ ID NO: 370100 - DNA, 96 bp, Homo sapiens
ccaatgatgagacgcgtgtgaatgcaacgatggaagatgtgaatgactggctgactgaactctgtgggagatgagggagcaggccacttcgtgaag

SEQ ID NO: 370101 - DNA, 90 bp, Homo sapiens
cggcgagcagccgccgcccgccgcacccatgagatgtggccccatggtattggatgctttaatcaagattaagaatgaagttgactctac

SEQ ID NO: 370102 - DNA, 51 bp, Homo sapiens
gaaatccaacgacctttctatccagaaaatcctgacttccgagaaatccgc

SEQ ID NO: 370103 - DNA, 75 bp, Homo sapiens
atgccaatgatgggccctcctcctcctgggatgatgccagtgggacctggtgatagctgcaaacattgggtacgc

SEQ ID NO: 370104 - DNA, 75 bp, Homo sapiens
ggggaagcggcggcggcaaaggatgccttcaattaagttgcagagttctgatggagagatatttgaagttgatgt

SEQ ID NO: 370105 - DNA, 51 bp, Homo sapiens
catgattctagtggacattttccaggtacagcagggaagaactggaaactc

SEQ ID NO: 370106 - DNA, 100 bp, Homo sapiens
cactgatggcctcagcctctccgtgcctgccacgcgccagaaaccagcctggacaccaagtctgtgtcagaaggccacctcaagaggaacatcgtggtga

SEQ ID NO: 370107 - DNA, 74 bp, Homo sapiens
ccccgatggccccgaccgcgtgctggagctcttcgacccacccaaggaatggaagttggatacactttgtgact

SEQ ID NO: 370108 - DNA, 82 bp, Homo sapiens
ctgaacagtacccagggggagattcgtgtcggtcctagtcatcagatgtgaagttcatttccaatccgccctccatggtggc

SEQ ID NO: 370109 - DNA, 97 bp, Homo sapiens
tctgaggggcttagaaattaacagggatgcatcatctgcagacatcagaaaagcatatcgtaagctttcactaactttacatccagacaagaataaa

SEQ ID NO: 370110 - DNA, 100 bp, Homo sapiens
ggctccctggctggccagcctctgcttggcatccccttgctggacagtggctgtgactggggcagcacctactccgtgtcagtggtggagaccgactacg

SEQ ID NO: 370111 - DNA, 85 bp, Homo sapiens
gcagaagaaacacttcctataaatctcgcccaaacaggaaaggttttaaaatcaaagatgggaaaatcggagaaaattgcccttc

SEQ ID NO: 370112 - DNA, 100 bp, Homo sapiens
aatcttccatcttcatgagctgccagagtttaacctcatccactccctgaggttgacatcatggacatatgtgagtccatcctggagaggaagcggcatg

SEQ ID NO: 370113 - DNA, 75 bp, Homo sapiens
aatccttctgaccccagagtggctggtgagaagccctaccactgcaactgggacggctgcggctggaagtttgcg

SEQ ID NO: 370114 - DNA, 98 bp, Homo sapiens
gtgggcaagacctgccttctcatcagctacaccaccaacgcctttcccggagagtacatccccaccgtcaggagcttccagcccgtgtgaacctctca

SEQ ID NO: 370115 - DNA, 96 bp, Homo sapiens
tgatgagaaataaggacaaaagccaagaggaggacagttcgctacacagcaatgcatcgaggtctcctaaaaacccagaacagaagatcattaaga

SEQ ID NO: 370116 - DNA, 76 bp, Homo sapiens
cgcaagagaaaaatccactgccttccaaagaaacattgcacaggagaagtcggcctgagtggtgcggcgctcggga

SEQ ID NO: 370117 - DNA, 96 bp, Homo sapiens
ggcgagctagccgggagttacaccgccaccgccaggttcgtttaccaagcaaaagttgggggtcgctggttcccagccgtctgcgcacacagcaag

SEQ ID NO: 370118 - DNA, 75 bp, Homo sapiens
aggctttcaaggatatgctgtattcagctcaggaccaggcaccttctgtggaagaaacctctgcgccatgagagc

SEQ ID NO: 370119 - DNA, 75 bp, Homo sapiens
cggccacgcctgaaaggcgactctcctcaattctgtggtgttcttggtcacacatttatggagtttctgaagggc

SEQ ID NO: 370120 - DNA, 100 bp, Homo sapiens
ggactcggtggacttctcgctggccgacgccatcaacaccgagttcaagaacacccgcaccaacgagaaggtggagccccacgccaccattgcggagatc

SEQ ID NO: 370121 - DNA, 50 bp, Homo sapiens
tctggatggcattttctcagagcagggcttccgttacaagatgaggtctg

SEQ ID NO: 370122 - DNA, 83 bp, Homo sapiens
cccctgcctgcccgcgcctagaccccattcagctgaccccgcactacatctacccaccagccatcgtgcagcccagcgtggtg

SEQ ID NO: 370123 - DNA, 83 bp, Homo sapiens
ctggaggttccttcactgtgcgtgctgaccatggttggtttcatcgactacattgtccatccattgtgggagacatgggcaga

SEQ ID NO: 370124 - DNA, 75 bp, Homo sapiens
tcaagtttagagtggaattcgtgtgttgtacagacccttaaggcatcacgttgggtggtttccatttagaccgag

SEQ ID NO: 370125 - DNA, 51 bp, Homo sapiens
ggacagggcacaacaaccgtttctggaaacccctgaacttccagaacctgc

SEQ ID NO: 370126 - DNA, 89 bp, Homo sapiens
caacccgaccaccggagaattcctggggcgcaccgccaagagctggggcactactgcagtcttcagttaagcaacaagtagaagctatt

SEQ ID NO: 370127 - DNA, 51 bp, Homo sapiens
ccacccaccgccgccgcctcccagattcgacttccacctgaagtaaatcgg

SEQ ID NO: 370128 - DNA, 74 bp, Homo sapiens
cgctgaagatgttgatggagaagctctaagtacactcgtcttgaatagggtgtcttttatgaataatcaaaagc

SEQ ID NO: 370129 - DNA, 90 bp, Homo sapiens
caagagattctacatcagtttggtttcactcagaccggttacttcctcagaatgttggcctcctgtatgttggaggttatgaaagaccct

SEQ ID NO: 370130 - DNA, 100 bp, Homo sapiens
gagaaacagtgttgatagagactcagctgaaagcatgtgcctcttttatacgaaccagcatgttggcagataaattgaacatgactccagaagaagctga

SEQ ID NO: 370131 - DNA, 100 bp, Homo sapiens
cgccaggctggggtgtcccagaagagccaggaatcgaaatgcttcatggaacaaccaccctggccttcaagatgatggtgtgagcatccccggggagtac

SEQ ID NO: 370132 - DNA, 74 bp, Homo sapiens
tccgatacagcaccaaacaggaggcggccaaggcccaaactgcactgcacatgccattctcaagcacaacctgg

SEQ ID NO: 370133 - DNA, 100 bp, Homo sapiens
ccgggatctcaggtcctcgggggcggcggccacgccaaggacggggactttgaacatgtcggggatcgccctcagcagactcgcccaggagaggaaagca

SEQ ID NO: 370134 - DNA, 100 bp, Homo sapiens
tcgcgcccgccgccgcccgtccccagcaataagagctaactgccatcaagagccatcagtatgtcttcaagctgcatgcccagaaagctggattggtttt

SEQ ID NO: 370135 - DNA, 82 bp, Homo sapiens
gaaagcgacgttcggccaccggaggagcgggagccaagcaggttccagcaacagatagaaatgctttaagttcactctgggg

SEQ ID NO: 370136 - DNA, 136 bp, Homo sapiens
cccggggcctgttgcctgggggcacacaggtgctggatggtacctcggggttctctcctgcccccaagctggctcacggatgattgatatccagaccaggatggctgggcgagcattggagcttctttatctgcca

SEQ ID NO: 370137 - DNA, 98 bp, Homo sapiens
gcttcacgcagaagttggcaggagcatgggcttcggaggcctatagcccgcagtgtggacaacagtgagtatatgcggaatggagacttcttacccac

SEQ ID NO: 370138 - DNA, 75 bp, Homo sapiens
ccgcctcggcaggaaccgggaccgccagcgcaggagcagcccctgtcaaagggaacaggaagcagtccacggagg

SEQ ID NO: 370139 - DNA, 82 bp, Homo sapiens
tgaactggatcttcacagccatcacagacaccatcgcgtggaacgtgctcccccgggagatgccctgtatccaagcccaata

SEQ ID NO: 370140 - DNA, 80 bp, Homo sapiens
cccgtgatgccctggccaaggggctctatgcccgcctcttcgacttcctcgtggaggtcatacttacctggttgcttgcg

SEQ ID NO: 370141 - DNA, 100 bp, Homo sapiens
agatggggtgctggaggagagcttgtgggagccaaggagcaccttggacatctggagtctggcaggagtacatcactcaggaaggccacaagctggaaac

SEQ ID NO: 370142 - DNA, 50 bp, Homo sapiens
tgaagtacaaaatattttccaggtattcccggcgtttccacaagactcta

SEQ ID NO: 370143 - DNA, 100 bp, Homo sapiens
gcgtctggacttggatgcctgcaaagcgaggctgaagaaggccaaggctgcagaagccaaagccacgcttgctatggcatcgttcaggtgccaacgggac

SEQ ID NO: 370144 - DNA, 50 bp, Homo sapiens
tccagatgttgctcatcctgcaggcctcctcgaaagatgttgtcagacag

SEQ ID NO: 370145 - DNA, 100 bp, Homo sapiens
tcagattccgatttgacgggcaaccaatcaatgaaacagacacacctgcacaggtgctaccatattggggaaatcctcatgatagaaaagtcatcagaag

SEQ ID NO: 370146 - DNA, 97 bp, Homo sapiens
gccagatctgccagtgagcctcaggctttaggaactgaagagtatcgcgcttactatggagcatttaaggatgtcaaggagaaaaacaggacctctg

SEQ ID NO: 370147 - DNA, 100 bp, Homo sapiens
atggaaacccggagggagagtcccgcctgaagaaacctggatctttgctagaaagagaggacctgaaggagaagaaggagaaggtggaggagaaggcaag

SEQ ID NO: 370148 - DNA, 100 bp, Homo sapiens
ttgtcggctccgtgttgtgatgacaggagaatgtgtgtgtgtcccgggcccagacgaattggcctctcttcagcttctggagacctcactatcctattat

SEQ ID NO: 370149 - DNA, 73 bp, Homo sapiens
aaacagcgacgagagatccgtgcaggcacagccttttacattgatcagatttcctttgacctcgctgagtaca

SEQ ID NO: 370150 - DNA, 98 bp, Homo sapiens
tcgaaagcgttggagaggtgttaccggaacggcggcgacaagggtgttcccgaactagagtgggtgaatgaaaactttgccattgatttgatagcaga

SEQ ID NO: 370151 - DNA, 100 bp, Homo sapiens
gcggaggcggcggaggccagggaggaagatgtcgtaatgagcgccactgaggcggctcccagctgcgttggcgacatggccgacacccccagagatgccg

SEQ ID NO: 370152 - DNA, 50 bp, Homo sapiens
actgataagttgccttatgtcaccatggtgctcccatgccctacctcata

SEQ ID NO: 370153 - DNA, 100 bp, Homo sapiens
caggttccaaatcatcaatgaagcaagtaagcattttcctaagttgggatccctctaccacattgccacctaggcctgaccctacacaccaaacatcaga

SEQ ID NO: 370154 - DNA, 75 bp, Homo sapiens
ggtgatccttcgggacaagattcgcttctatgaggtgagtgacctgcaggaagaaggcaagaatgccatcaactc

SEQ ID NO: 370155 - DNA, 75 bp, Homo sapiens
agagcgcgaatatcgtcatcgttagaaggctgttgccaaaatggttcaacagtgctgtacttatgttgaggaaat

SEQ ID NO: 370156 - DNA, 100 bp, Homo sapiens
cgcggggcggcggcgaaaggacggacccagatgatgtggtaccagttggccaaagaagagcctggtgttggtgcatgtgctttggactagcatttatgct

SEQ ID NO: 370157 - DNA, 100 bp, Homo sapiens
gggctgcggcgcacgccttgcccgcccaggaccaagaatcgccttcagccctgtctggtgcatccttggcagaaagtgaggaggaaaacacccccattgt

SEQ ID NO: 370158 - DNA, 83 bp, Homo sapiens
ttcgaggacagcacccgccaacctcctggaaggtagccatgtccattggagcccgttcccaatcagctcgtacttacttggag

SEQ ID NO: 370159 - DNA, 100 bp, Homo sapiens
agagctcccagggcggacagcagcctcgggtgcaatcctggagccccccagtgagggattattacagtggtggctactatcctgcacaggacccggccct

SEQ ID NO: 370160 - DNA, 80 bp, Homo sapiens
ggcgctgtgcatccacactggacgcgagctgcgctgcaagcctcccgcgacgatgcccctcaacgttagcttcaccaaca

SEQ ID NO: 370161 - DNA, 82 bp, Homo sapiens
tcaggacatggagtatgaaagacggttggtcaaagaaaaagtgatgtatgaaaaagaggcaaaacaacaagaagaaaagatt

SEQ ID NO: 370162 - DNA, 101 bp, Homo sapiens
ctctgtcttcggaacttcctgtggtcatctccctgacaacccagataacagttttgagtatccgaggagcccaggaggaggaacccacagacccccagctg

SEQ ID NO: 370163 - DNA, 100 bp, Homo sapiens
agaagaggatgaatggagaagtgacagaaaaagtgagagttacagcgaaagttcaagggatgatccaccaacacattctcagccagacagtgatgatgaa

SEQ ID NO: 370164 - DNA, 103 bp, Homo sapiens
gtccagcttcctcttcaacctcaataatgaccttctttggtaacgtgaacgagtcggcggtggtgcgccatgacctgcacttccacttcactgcgcgctacat

SEQ ID NO: 370165 - DNA, 74 bp, Homo sapiens
ccatcgccagcatcgccaacccggactggatcaacaccggggagtctgcggacacttcgtgtatgatcatgtgt

SEQ ID NO: 370166 - DNA, 95 bp, Homo sapiens
ggcggtggtggtggcggccgctggccagtagtcgggtttctccattcaaggacatgattttatgcttctctgaagaggattggtcccttctagat

SEQ ID NO: 370167 - DNA, 100 bp, Homo sapiens
gttggctcctaagggagggactaaatggttatgtggtccgaatcagtggtgggaacgacaaacaaggtttccccatgaagcagggtgtcttgacccatgg

SEQ ID NO: 370168 - DNA, 75 bp, Homo sapiens
aaaaggtgatctggacaaaggaacaggtatctcaggcctgggcggatgatgtggagcggtttcagaaaatgttca

SEQ ID NO: 370169 - DNA, 75 bp, Homo sapiens
ctggcccagcagctgagatcacaggttctgtttggattctgcaaagcagactcgtcagaaagttgctgtgaactg

SEQ ID NO: 370170 - DNA, 82 bp, Homo sapiens
ctgcgaacacagtagtggaagatgtaaagcaatatttcgagcagtttggcaagaacatggtccaagacaattcctgggaaag

SEQ ID NO: 370171 - DNA, 100 bp, Homo sapiens
gtggagctccttttcctccacctaccttcccgaacattgcctaagatactgagccatatcgccccagcattttgcatgagcagctgtagcttcgtagtgg

SEQ ID NO: 370172 - DNA, 101 bp, Homo sapiens
cagaagtgtcttggagccaactagaggcagggtcatccttgcccttgtcctcccctttcatccctatgtggaaaacgcactgctggatctcatacagtttc

SEQ ID NO: 370173 - DNA, 100 bp, Homo sapiens
ggcgggggagcgactcatggagctgccgtaagcattttgaaagcgaagcagaagccgtagaatcagcggcgagcctgttgaaagaacccacaggtgcatt

SEQ ID NO: 370174 - DNA, 100 bp, Homo sapiens
attagtttccagctgggagaagagtttgatgaaaccactgcagatgatagaaactgtaagtacacagctgtcttctgggcacactgtggctgtgatgggc

SEQ ID NO: 370175 - DNA, 50 bp, Homo sapiens
ccaggaccggccgaacgcagaggcttaatgccagaccgggagttggaggt

SEQ ID NO: 370176 - DNA, 100 bp, Homo sapiens
caggatttaactatcagaatgaagatgaaaaagtcaccttgtctttccctagtactctgcaaacaggtcagaatggcggcagcggagcatcgtcattctt

SEQ ID NO: 370177 - DNA, 75 bp, Homo sapiens
ttacctgtgagatgtttcatcccaacatttacaggagagccgaccattttcagttgactttttcaggaaaatgat

SEQ ID NO: 370178 - DNA, 113 bp, Homo sapiens
gcgagggcgcggagttccaggtcgagcagttaggccgcgagcgactgcggcgccgagccggtctccacctctgggcaggagagttgccgaccacctcgggggtgctttctctg

SEQ ID NO: 370179 - DNA, 50 bp, Homo sapiens
tgatgaagaagttattcaagatgacatcttcatttgattgtacaccatct

SEQ ID NO: 370180 - DNA, 75 bp, Homo sapiens
caaaactggcactgattcaaattcaacagaatcctctgaaacttccacaggccatgctggagtatctgccaacat

SEQ ID NO: 370181 - DNA, 100 bp, Homo sapiens
ggcccaggcagaccttgcagtcaaagtgtggatgtggaagcagccaagcgggcagaagaggaattgctccttcatgacacgaggtgctggctgaatgggg

SEQ ID NO: 370182 - DNA, 100 bp, Homo sapiens
agtgctttttcccggtgctgagctgtctggctgtgctgggcatggaaagctcacctgatgggcccagccggctgcacgatgaacctgcgcaagacacaca

SEQ ID NO: 370183 - DNA, 106 bp, Homo sapiens
tccaacccgcggccccggcgccaagccgccgtcatcttcttcctgtgccagggtggtgaaggaggagatctttgatgacaatgccaagcttccctgcttcaacggc

SEQ ID NO: 370184 - DNA, 100 bp, Homo sapiens
caagcataccacctcaatctttgatgactttgcacattatgaaaagcgtcaagaagaggaggaagccatgcgtaggagacttgaggtttaacagaataag

SEQ ID NO: 370185 - DNA, 98 bp, Homo sapiens
aaagaaacaagttcttggcaagagaggcatcctccttgaagtatttggctgaggagttttcaatcccacctctgcctgtgagtttctggatattgtag

SEQ ID NO: 370186 - DNA, 87 bp, Homo sapiens
cagactcagaagccgacgttcgagaggaagattcttacctctttgatctcgacaataagatcacctctgcagcctgcacagccgggc

SEQ ID NO: 370187 - DNA, 100 bp, Homo sapiens
ttgcagccagtactctatatgaacaatccgtctggatcacggatgtaggaagtggggaatctgcaacattaagaagcttattgctcaatccacacctcag

SEQ ID NO: 370188 - DNA, 100 bp, Homo sapiens
tcccacagccgcgtggagatcatggtcaaggctcggacatcatcatgcagctggacgacgtggttagcagtactgtgactgggccacgtgtggaggaggc

SEQ ID NO: 370189 - DNA, 99 bp, Homo sapiens
gaaaccaccatttattcagcactcagaatgctccaggcagtgtaatctcattccatcttcattcatgactccagacagcggatactctgttttcaagga

SEQ ID NO: 370190 - DNA, 50 bp, Homo sapiens
ggtgcagcctcccccacgtcaccaacactccacctcagcactccagctca

SEQ ID NO: 370191 - DNA, 100 bp, Homo sapiens
tgaaacttgtccgtgccaaatttcctgaacacaccattatggttaccacacttgtaaactgtccccagaacccttccagcaggaaaaaaggacgttcgaa

SEQ ID NO: 370192 - DNA, 82 bp, Homo sapiens
aatgtcatgatagagaagtacaagaaaatgtcttctgaggctgatctggtgtctcacatctgtaatcccagcacttggggag

SEQ ID NO: 370193 - DNA, 101 bp, Homo sapiens
cctggagcggctctgctcggtcctcaaagggtaactaaggaagtggatgctacatctaaagaggccaaatccttcttcaagcagaatgagaaagaaaaacc

SEQ ID NO: 370194 - DNA, 100 bp, Homo sapiens
gggagccccggagtccgcggcagcgccgagggcccctcccccaggcctctgggctctgaggcctcgaaaaagcccaagacagcagaagcagacacctcca

SEQ ID NO: 370195 - DNA, 75 bp, Homo sapiens
aggtgttcgagaacgaccccgagacggagtgttggaggaagcagaattttacaatatcacctcattaataaaact

SEQ ID NO: 370196 - DNA, 82 bp, Homo sapiens
gaaggcaacgacgttccatctgtggaaggacctaccaaccagactccatcaagaatgctggaggaagggtgtttgtccactg

SEQ ID NO: 370197 - DNA, 100 bp, Homo sapiens
cagcacctatcacttgttccctccaagacaactgaatgtgcagtcattggagaaatcgatgaagaaacagattctgcgcttgatttggggaatattcgag

SEQ ID NO: 370198 - DNA, 83 bp, Homo sapiens
tataaactggctgaagcccatccagactgtttgatgctgaacttcaccgttaagttggttgaagccatggataacagaaccca

SEQ ID NO: 370199 - DNA, 75 bp, Homo sapiens
gcctcagcctcttgagtagctgggattacaggtattgggaaatgagagagcagcgcacccccactttgaaaggca

SEQ ID NO: 370200 - DNA, 87 bp, Homo sapiens
gtaccaggcgaagctggccgagcaggctgagcgatacgacgctctccctgtccagccgcctgcagctgaccctgtaccagtacaaga

SEQ ID NO: 370201 - DNA, 100 bp, Homo sapiens
cccccatctccggcggagagaccgtccgaggtaattgtctgccacgagtgcacattctgaaaacaggaatatgatgaagaatgggctaagaaaattcaga

SEQ ID NO: 370202 - DNA, 90 bp, Homo sapiens
gatcaaatggcacttcattggccacctacagaaacaaaatgtcaacaaattgatggttccagaagaaggcttcttattgggatgtgtgtt

SEQ ID NO: 370203 - DNA, 75 bp, Homo sapiens
atgtgtggactgcagtttctacacagcaagggcatcatttacaggtctctggacctctgactgacactgtgcctg

SEQ ID NO: 370204 - DNA, 100 bp, Homo sapiens
gcggaggaagcccccaccgaggccccccggcaccgcgcctgctgccgggttgcgctccgtgcacctcttgcggggttttgtctccacaattatccgttta

SEQ ID NO: 370205 - DNA, 73 bp, Homo sapiens
taagatactgtgcctttgctccagggcatttgtggaattgcagagggaatggcatacatcgagcggaagaact

SEQ ID NO: 370206 - DNA, 75 bp, Homo sapiens
cgagggcagcggaggggcgacaaaatcagacctattgtgaccgcctggtgcaggacacgcctttcctgacaggcc

SEQ ID NO: 370207 - DNA, 75 bp, Homo sapiens
caggaagtcggagtttgagccccggaggcagagcggctgccatgggaactctaatgatccaggacaaagaagtta

SEQ ID NO: 370208 - DNA, 95 bp, Homo sapiens
agctctcagtaaaattgcatgataaagttcataccgtagtagcatcaaacaatgggtcagtgttctcgtcggagtctagccagtcagaggcgtct

SEQ ID NO: 370209 - DNA, 50 bp, Homo sapiens
tgcaccgacttggagctctttgcatcaacaacagcaacttgtgattggcg

SEQ ID NO: 370210 - DNA, 101 bp, Homo sapiens
actgagcgtatgtgccacgccgcccaggagacccctctgctgcaccacttcatggtccgtaaaagccctgggctcagccagagcagggcagaggatgacgg

SEQ ID NO: 370211 - DNA, 74 bp, Homo sapiens
ggacgtgggggcggcagccagctcgcagggctacagcatgctggccatagggattggaaccctgatctacgggc

SEQ ID NO: 370212 - DNA, 83 bp, Homo sapiens
tgacaacagtgttaaatatcagcaaagaaaacatgaccctcacagaaaatacgagatcatcagatgttcattcatctggatct

SEQ ID NO: 370213 - DNA, 100 bp, Homo sapiens
ctttttagagatcgttttgatggatatatcttccttgacagcaaagatacattccaccgttgatctgggggaaaagtggacacatccagacagccttgta

SEQ ID NO: 370214 - DNA, 100 bp, Homo sapiens
cgagaaggagttgtttcccattgcagcccaggtggataaggaacatctcttcccagcggctcaggtgctgtccctggacaccaacatcacaaaccaggtg

SEQ ID NO: 370215 - DNA, 82 bp, Homo sapiens
aatccagatggcagccagtcagtggtggagacctggaatcatttttctgataatgaggcagagcgggttaaaatgatggaag

SEQ ID NO: 370216 - DNA, 100 bp, Homo sapiens
agtcttacaccactcccaagaagaataagcacaagagaaagaaggttaagctggctgtcctgaaatattataaggcgatttgtgtggaacttcttccgcc

SEQ ID NO: 370217 - DNA, 100 bp, Homo sapiens
ggagacagaagacagtagccaaacacccaggtcaaatttgtattcaggcagaagtcttctgcaggggcagagccctcatggagaacctgcgctagggcaa

SEQ ID NO: 370218 - DNA, 87 bp, Homo sapiens
aagaatcatcttcacacaacaacacaaatggctgggttggggtgctggaggactgcttcaccttcctgggcatcttcctggccatca

SEQ ID NO: 370219 - DNA, 74 bp, Homo sapiens
acaccccacacctgagaacacggcagctgattgggcagaaagtggcccatgctctggcagagggactcggagta

SEQ ID NO: 370220 - DNA, 90 bp, Homo sapiens
aggttttgagaacagagtgctgttttagagctggcagcagcatctcagcccaagagaagccttcaaatgtttatctggtgtgactgtatt

SEQ ID NO: 370221 - DNA, 97 bp, Homo sapiens
cttactttaccagattcttgatggtatccattacctccatgcaaattgggtgcttcacagagacttggtgatcgaggaaacatctcaacatcttcta

SEQ ID NO: 370222 - DNA, 98 bp, Homo sapiens
cgggatcgtgaccgagaccgtgaccgagagcgtgaccgagagcgcgaatatcgtcatcgttagaagaaagtttcctacactactgaggtttaggggca

SEQ ID NO: 370223 - DNA, 90 bp, Homo sapiens
cggcaaagttttgcagatcttcaacaagaggacccaggagaaattcgccctcaaaagagcatcagtgatgtcacgtttggagcaggggtc

SEQ ID NO: 370224 - DNA, 100 bp, Homo sapiens
tgagaagtcatttccttggagatcaacagttgttgacctcctgtactggagagacattaagaagactggagtggtgtttggtgccagcctattcctgctg

SEQ ID NO: 370225 - DNA, 100 bp, Homo sapiens
ccgagctccagccgaaggagaagggggttgacattcgtgaaattaaggagatccgcccagggaagacctcacgggactttgatcgctatcaagaggaccc

SEQ ID NO: 370226 - DNA, 100 bp, Homo sapiens
aagaagcaatgatccagtgctcattggaagcttgtcggattcttgacactttgggattgcttcggcaggaagcagtgctgggctttgacaaacttcctct

SEQ ID NO: 370227 - DNA, 87 bp, Homo sapiens
gaaatttctacacctacccattggtctaaacttgatccaaagacaatgaagctacaaaagaccccacagctgtagagagagcaaact

SEQ ID NO: 370228 - DNA, 98 bp, Homo sapiens
aggcactgaggaggccgagagatgaggccggagcccaccaagttctgggaaatgccatggacaatattaccaggcagaaccaattctacgatacccaa

SEQ ID NO: 370229 - DNA, 49 bp, Homo sapiens
ggaggagaagctgcaggagaaagattttgggaaccagtaggacattgac

SEQ ID NO: 370230 - DNA, 100 bp, Homo sapiens
aacctcaagagtgagcactcccacgcccccgtctctggtcctacctgggtccaaggccgatgtggacccttgaacatctgtgaagaaatgactattctgc

SEQ ID NO: 370231 - DNA, 90 bp, Homo sapiens
gctgcgggcccgggccatggccgccgccgatgccgaggcatcgactacaagacgaccaccatcctgctggacgggcggcgggtgaagctg

SEQ ID NO: 370232 - DNA, 100 bp, Homo sapiens
ctaatgaccgtggttcccactgaggtggttgtgagacaacttcaacaagaagtggctgattcccttaaaaaattaactatgttagagtctccactggaag

SEQ ID NO: 370233 - DNA, 97 bp, Homo sapiens
gaaagtatacagaattacagctggaagttacacttccaggggctccccactcagtccccagtcatctatcgacagtgagctgagtacttcagaattg

SEQ ID NO: 370234 - DNA, 100 bp, Homo sapiens
ctgtgaaagacgagggagaaatgttttgtttgactccagtgttaagagaagaaatgaggacatatcagtatcggagatacagcagcgacatggattagcc

SEQ ID NO: 370235 - DNA, 110 bp, Homo sapiens
acaggactaatgatgtctgttaactttagtacccaggtttatcaggtagaagatgtgtgtgaagaagaaatgccagaagagtcagatgaatgtgtccggatggatagaac

SEQ ID NO: 370236 - DNA, 109 bp, Homo sapiens
cactgcgggccgcctgggtgcagacaaccgccctgtgagcttctacaaggctgtgcctgcgcccagaagcagctacacttcatggaccagttgctcgataccatccgga

SEQ ID NO: 370237 - DNA, 75 bp, Homo sapiens
gtttatctcatacatgctggtacatgctggggaacttaggctgcggaactatgtcccggaggatgaggacctgaa

SEQ ID NO: 370238 - DNA, 50 bp, Homo sapiens
tttggatccaagctggagtgcctgccccccgaatccaagcccaacttcac

SEQ ID NO: 370239 - DNA, 75 bp, Homo sapiens
ccctgtccccgctggcgggcttccctgtcgccgttcgctgcgctgccgggaggtcgagttgtgtcgtgttagcag

SEQ ID NO: 370240 - DNA, 83 bp, Homo sapiens
aaaaggaggaattcgccgtgcccgagaatagctccgtccagcaggttttaaaatcaaagatgggaaaatcggagaaaattgcc

SEQ ID NO: 370241 - DNA, 100 bp, Homo sapiens
gctcctaccgctgtgtccgggactgcgatcctgggtaccacgcgggccccgagggcacctgtgacgacgcaaacatgcagatctttgtgaagaccctcac

SEQ ID NO: 370242 - DNA, 75 bp, Homo sapiens
gaaaaatgctggccaggctgtcacaattgttgcacaatatcgacctgaaggtagtaggtgtaaccttgaagaaaa

SEQ ID NO: 370243 - DNA, 75 bp, Homo sapiens
cttcaaccaggtctcctgcaaccaggcgctggccctgcataactcccgtttcctgagtctctgctctgagctgga

SEQ ID NO: 370244 - DNA, 101 bp, Homo sapiens
gccaacattatgcgaagaactttacgtggacatcccatttaattctcagaagccgatcacaagggcttatttcaaaacctttgtccctcagttccaggagg

SEQ ID NO: 370245 - DNA, 75 bp, Homo sapiens
caaagagcagatgccaaatctgacatatctgaagagatggattaagaatgctttggattaaggattgtggagcac

SEQ ID NO: 370246 - DNA, 100 bp, Homo sapiens
tgaaggctgcgagggactaagagcagagattcctacaggaagcaagtagtaattgatggagaaacctgtctcttggatattctcgacacagcaggtcaag

SEQ ID NO: 370247 - DNA, 83 bp, Homo sapiens
cggggaactcgacttgaccggcgccaaacagaacacaggagtgtggctagtcaagatggtcagtaggacagaaggtaacattg

SEQ ID NO: 370248 - DNA, 100 bp, Homo sapiens
cgccagccagccgtcccgcatgcgcgtttgggcggcgtggagcctgctgccatgaagtcagcgccctggccaacgtcaacattgggagcctcatctgcaa

SEQ ID NO: 370249 - DNA, 80 bp, Homo sapiens
tctccctcctttaaacagcttctccgggtctcagcatgggtgataaaagaaaatgtggctgaagttacccgaagttcagc

SEQ ID NO: 370250 - DNA, 90 bp, Homo sapiens
gtggtggccgtggatgacggagactctcaggccttggcagctgctctgttaaaagcgaaaatgaaacaattgcctgcggcaacagttcga

SEQ ID NO: 370251 - DNA, 100 bp, Homo sapiens
gccagcctggaggccacatttgtgaagggggtacatgagtccaggggcgtgactgaggactacctgcgcctggagacgctggtccagaaggtggtgtcgc

SEQ ID NO: 370252 - DNA, 107 bp, Homo sapiens
ctgggcggccggccgacccttcctgtcgctgacggcgactgcgggaggccaggctctattccgttcgctggttcgccacctcaggggaacgatggccatggagtcca

SEQ ID NO: 370253 - DNA, 83 bp, Homo sapiens
ctccccctcggcctcgcggcgacggcggcggtggcggcttggacgactcggagagccggtgtccctggccagtgtccttccac

SEQ ID NO: 370254 - DNA, 100 bp, Homo sapiens
aggtcgaagaggtggaagagggcagaattcagcatcgagaggagggtctcaaagaggaagagtcacctctgacaaaattctggggacgctgggaacactg

SEQ ID NO: 370255 - DNA, 80 bp, Homo sapiens
tggcgctttcctgggttgcttctggcggccatggtgttgctgctgtactccttctccgtgcaccaattccagctggacat

SEQ ID NO: 370256 - DNA, 98 bp, Homo sapiens
taaaatcttgctcctaagaaatctcaagcttcttttgtgcaactagaagccatttgtgtcaaggtaacgtctggagaaacaaaaggtcaggaaaggcc

SEQ ID NO: 370257 - DNA, 98 bp, Homo sapiens
ggaggggtgcaagaacttttaaatcaacgacctgatcccaaccttgaagaaagtcctaaaagaaaaaatattacatatgaggaattaaggaataagaa

SEQ ID NO: 370258 - DNA, 98 bp, Homo sapiens
cccaaggagagcaacctcttcaaacgcatcttgccccggccctggactcggcggccgcggaggacctgtcggacgcgctgtgcgagtttgacgcggtg

SEQ ID NO: 370259 - DNA, 100 bp, Homo sapiens
gaggcgctggctctttggcggctcggaggagcggctgctgctgctgctgctgctgctggtggcccctttgcagccaagaaggatcaagaaggtggagaag

SEQ ID NO: 370260 - DNA, 80 bp, Homo sapiens
ggatggatggatggatggatggtttggattggagagggctcactggatcccaatccttggagctggatcattggattcaa

SEQ ID NO: 370261 - DNA, 83 bp, Homo sapiens
gccgttttcatggctgcttaaaatggtctatggtctgtctctgccatcagcatcagcaaagccatcaacacccaggaggcccc

SEQ ID NO: 370262 - DNA, 101 bp, Homo sapiens
tgccacgccgcccaggagacccctctgctgcaccacttcatgtgatcagggccaaagcggtcagtgagaaggaagtggactctggaaacgacatttatggc

SEQ ID NO: 370263 - DNA, 50 bp, Homo sapiens
aatccgtaaagacccatttctctatgaggccccagggccctgtgtgcagg

SEQ ID NO: 370264 - DNA, 97 bp, Homo sapiens
cggatgagcgtcataaactttgagtgcaataaaaccgcagccgctgccatggcccagacactgcagatggagatcccgaacttcggcaacagcatcc

SEQ ID NO: 370265 - DNA, 100 bp, Homo sapiens
tgaggattcaggcgaataccactgcgtatatcactttgtcagcgctcctaaagcaaacgccaccattgaagtgaaagggtttttggagtctctggatgat

SEQ ID NO: 370266 - DNA, 75 bp, Homo sapiens
ggcgtcggtggtgttggcgctgaggacccggacagccgtgaccgcttagattcatctgctgtccttgacaccggc

SEQ ID NO: 370267 - DNA, 82 bp, Homo sapiens
ggctcgacggagaccagctagggaaggtgctcgggtcttcggggcactgggtcccatcggtccctcctcacctgggctcacc

SEQ ID NO: 370268 - DNA, 100 bp, Homo sapiens
tgccttccttgttggatgctacatgcatctcaaagacaaattttggaattttattttctacaagttcattttcatctttggtgtgctgaatgtccagaca

SEQ ID NO: 370269 - DNA, 96 bp, Homo sapiens
cccatgccctgcatttcttcgctaccccacagcttctgctcatgtgaaactggaacgccaagctgaagaagaacgaatacggaagcacaaagcagc

SEQ ID NO: 370270 - DNA, 95 bp, Homo sapiens
cctcctctcctaggtgccggccgggagggcggccgcagcaggtggtggctaatgccgtagcggcattatctgaaatcagtgagtctcacccaaac

SEQ ID NO: 370271 - DNA, 100 bp, Homo sapiens
gtcatattaataccaaatggtcagcacctcagcagaattttttgcaggggaaaacatccagtgtggtggaaatgtgttctggacttggtgcctctttctg

SEQ ID NO: 370272 - DNA, 98 bp, Homo sapiens
agggacgtgagcccagccgaggtaccgctgaagaggaatcaattttgaaatgcactcggtgatggaaagagagccactattctgaagaacacttggcc

SEQ ID NO: 370273 - DNA, 88 bp, Homo sapiens
aaattattcgtggtttctgtcacttgtgtgatggtcagaaacttctattaagacaagctttcccatgactgttaaagtcgatggtgta

SEQ ID NO: 370274 - DNA, 75 bp, Homo sapiens
gctggccctggtccggacccgcatgcaggcacaagactggcacagcctccaggttggcgggctcatctgcgctgg

SEQ ID NO: 370275 - DNA, 90 bp, Homo sapiens
tcctcagtgcgaagaagctgcagccgcacctggccaaggggagaagcagcagccaaccccccggctcacactccgggacctgcagaataa

SEQ ID NO: 370276 - DNA, 85 bp, Homo sapiens
aactagaaagaccacgaacttcaaaggggaaagcaaggccaaagacagggagaagaattagtgcactgaaaggctccaaaggaaa

SEQ ID NO: 370277 - DNA, 75 bp, Homo sapiens
aaagaatgccacagaatcaggggaggcatgcttcagagactgacttgcataccaaatgtgtggtggatgtggatg

SEQ ID NO: 370278 - DNA, 75 bp, Homo sapiens
gatgcttattagtcatcaccgttattcctactaacgtcctgtgtcactgagagctctcaacgaaatgtggaagtg

SEQ ID NO: 370279 - DNA, 82 bp, Homo sapiens
gtgatgctcgggagggagactgttgttcccggagatgcggcgcgcagataacgaaggaggcccaacttcattcaataaggag

SEQ ID NO: 370280 - DNA, 98 bp, Homo sapiens
gctcacctgtgcgggatggaacaaaaggcaacaatttgggatgaatcccaaagacattatgctgaatgggagaaatcatttttgaaacggttgtatac

SEQ ID NO: 370281 - DNA, 75 bp, Homo sapiens
agagacctctacttagctcagcaattcttaccttacctcccagtgccaagtgtataagcgtgtccagaattggtg

SEQ ID NO: 370282 - DNA, 100 bp, Homo sapiens
tgagacttggtgggaacggaccttcctcttaggaggtgaagattgacaagaacctggagcccgggcttcgggtgactgtgcgactgaaccagcagcagca

SEQ ID NO: 370283 - DNA, 100 bp, Homo sapiens
gaagagggggcggatttacctaaaggctgaggttgctgatgaaaagctccatgtcacaggttcaaaagatgtcgtgataaaggcacaggttttagctggt

SEQ ID NO: 370284 - DNA, 100 bp, Homo sapiens
gggactatgggcggctggccttggtgacagatgcagacagcacttttctgtagaaggtcagttggaattcagggcattgctatttattcctcgtcgggct

SEQ ID NO: 370285 - DNA, 76 bp, Homo sapiens
gctcttgccctcatcctggttctggaatcctcagttcaaggttttataggatcacattgacaaaagtaccatggag

SEQ ID NO: 370286 - DNA, 75 bp, Homo sapiens
ctgcaactaactccattcttaattgaacagctttgctgagccatcaaggtctaatggaagcatggttcggcattc

SEQ ID NO: 370287 - DNA, 100 bp, Homo sapiens
ggattaaaatctcccaagaggaatgacaaacaaccagctcttcagatccaggatgagaagactgataaaagaagaagctagctgaacagctgtaaaatgc

SEQ ID NO: 370288 - DNA, 75 bp, Homo sapiens
cgtctctctgctgcggcgcggggaccgctgtgctctcggaccaagctacaggaccctctggttttatttgaatcc

SEQ ID NO: 370289 - DNA, 100 bp, Homo sapiens
gatcaatgtgaacaatattctcaagactgacaggccaactgttatagaatacgatgatcacgagtatatctttgaaggattttctatgtttgcacatgcc

SEQ ID NO: 370290 - DNA, 100 bp, Homo sapiens
tgtggctctggatagcaccttatggacagtccaagtggtaagaagttcagaagcaagcctcagttggcaaggtacctgggaaatactgttgatctcagca

SEQ ID NO: 370291 - DNA, 100 bp, Homo sapiens
acagacactgccaccctcaaggagttcacgttcatgggcgagggaacagatgagaaacccggcaatgaaacatctggaacttctcctggtctctcagctg

SEQ ID NO: 370292 - DNA, 96 bp, Homo sapiens
gagagagcgagctgagtggttgtgtggtcgcgtctcggaaaccggtagcgcttgcagcatggaagctcttcgtgggcggtcttgactggagcacga

SEQ ID NO: 370293 - DNA, 80 bp, Homo sapiens
cagcgcgtcgtggggcgagcggcaggtactccaaagattcaggtttactcacgtcatccagcagagaatggaaagtcaaa

SEQ ID NO: 370294 - DNA, 100 bp, Homo sapiens
tgatgaccggatttgggtgacagagcatttttcagagttgaaaggccagaacgatctgggagagaagtatcagggcacagtgtgagaggcgctccccctg

SEQ ID NO: 370295 - DNA, 97 bp, Homo sapiens
ctgcatcggatcaccggcgtgccccaccatgtcagacgcagccgtagacaccagctccgaaatcaccaccaagaggagctgatcacgcagtacctgg

SEQ ID NO: 370296 - DNA, 90 bp, Homo sapiens
ctggtgagaaggtggtgaggcttcccgtcatattccaggactcacaccacccggcaagaactgctcactacggctccctgccccagaagt

SEQ ID NO: 370297 - DNA, 121 bp, Homo sapiens
ccacggcctcagtcacctgcccgcgcgagggaggaagagaactactcctttttacctttggttcacaacatcatcaaatgggcaaatttattcggatcaactttgatgtaactggctatat

SEQ ID NO: 370298 - DNA, 50 bp, Homo sapiens
agtcctgaccaaagcagtcaagatttggagcaagaggtggtggtggcctt

SEQ ID NO: 370299 - DNA, 50 bp, Homo sapiens
cttggagaggcgggttaggaaggttttgaacgaagaatgtgatcagaact

SEQ ID NO: 370300 - DNA, 98 bp, Homo sapiens
gcgggggccatgcctgcccgtggaggaaagcggcgttccgggaaggcgtggaagtgcgagtggccagaatcttcaacacctttgggccacgcatgcac

SEQ ID NO: 370301 - DNA, 87 bp, Homo sapiens
cagtacctgctggagaagggagactacaaggacagcagcgactttggggcccgtcaccctcaggaacttctgggtcaaccagttcag

SEQ ID NO: 370302 - DNA, 100 bp, Homo sapiens
caggcttgtgacatcacgggaggactgtacctgaaggtgcctcagatgccttctcttctgcagtatttgctggctgaccagtgcaccggtcttcagggct

SEQ ID NO: 370303 - DNA, 75 bp, Homo sapiens
cctcctggcgcccatccgcagcaaggacgtccgcagcagcggagcgtgctttggacaccatgaattttgatgtta

SEQ ID NO: 370304 - DNA, 100 bp, Homo sapiens
gtctgcctcagccacctccctgacgctgtcccactgtgtggatgtggtgaaggggcttctggaatgcaaccttaaaatcagtgacaagaaacattccaaa

SEQ ID NO: 370305 - DNA, 83 bp, Homo sapiens
gtttcccaaacagatgttaagacattcttggaagccttaccggatgaaaactttcggaagagaaagttgcctgtggtaagttc

SEQ ID NO: 370306 - DNA, 100 bp, Homo sapiens
gatcttatggaaaggttcatggagcaagtggtttttaaatatcttcgagctgaacctgaggaccattattttttaatgatgcattgctgtttgctccctt

SEQ ID NO: 370307 - DNA, 101 bp, Homo sapiens
agaggaaataaaaacagaacaggaggtggtagagggcatggatatctctactcgctccaaaggtatgtacaagctgtgaggacaacgcagaagccaatggg

SEQ ID NO: 370308 - DNA, 75 bp, Homo sapiens
tcttgggaacgtactgggacaactgtaaccgttgcctctctacatatgacatcgtgatcactacctatagcctcg

SEQ ID NO: 370309 - DNA, 80 bp, Homo sapiens
atcgccctttggaggatgtaccacaggaggctttccggcagctgtcgcaccgcttccatggcaagggctcaggcaagatg

SEQ ID NO: 370310 - DNA, 82 bp, Homo sapiens
cgccgccggcccggacatggccgccaacatgtacagggtcggaggcacattcaggaccccgcgagccagcggctgacgtgga

SEQ ID NO: 370311 - DNA, 100 bp, Homo sapiens
tgcgagagatcgagagcactgacacggcctgcatcgggcccacgctcaggatggcttaaattccttggtccttgatttagattttcctgctttgaggaaa

SEQ ID NO: 370312 - DNA, 83 bp, Homo sapiens
atgagaccaatgaaatcgccaatgccaactcccgacttatcaaactggtttcaaagcacagagctcaagtaatttacaccaga

SEQ ID NO: 370313 - DNA, 75 bp, Homo sapiens
agagctggaaactatcatggacagagagaaagaagctgttagaaaacgaaaagctgcttgagagcaaagcctgcc

SEQ ID NO: 370314 - DNA, 100 bp, Homo sapiens
cacgtctggaataatgggtactctttcctcgtggaatttgaagattctacagataaatcagttttcggctttgtgagaaaccttaccatcaaacacgatg

SEQ ID NO: 370315 - DNA, 100 bp, Homo sapiens
ggcatcagaacgagagcaaatcgaggaaatacttagccaaggacataagcagctctatgaccaatagcacagctgccagtagacccccggtcaccctgag

SEQ ID NO: 370316 - DNA, 100 bp, Homo sapiens
ctgctttcatttttgtgatgactatgtacacacagctttatcatcggcaacgtagcttacagagtttggaggcaagcttgcatgctatggagtctaccag

SEQ ID NO: 370317 - DNA, 83 bp, Homo sapiens
tagaaaacggcgagagtgggcgagaacgtccactgcgggccggcgaaagctggtgcgcgcggagccatggttatcatgtcgga

SEQ ID NO: 370318 - DNA, 52 bp, Homo sapiens
ggcagaggctgcggagccccaggaggcgatgtcaccatttctacctgccacg

SEQ ID NO: 370319 - DNA, 83 bp, Homo sapiens
agaaaatacaaatcacacgcataatggatgaaaggaaccgacagccttatgtttacacaacaccgccctttgtcagagtgaca

SEQ ID NO: 370320 - DNA, 76 bp, Homo sapiens
cccaagatgggcatctattacattccatttaggtagaagcttaggctattgatttgaacccactattttttctaat

SEQ ID NO: 370321 - DNA, 75 bp, Homo sapiens
aaagaacagaatgctaaggaagctgtggcaaagactgtgcagttgatccaacttgtgttttgtgcatggagtgct

SEQ ID NO: 370322 - DNA, 90 bp, Homo sapiens
tcaggaccgcaagtcccgtcttatgggacttgaggccctcaaggaagctgcagtaaaggaagatgaagaagaagtttcagataagggcag

SEQ ID NO: 370323 - DNA, 74 bp, Homo sapiens
gacgaaacataccgcgagctcttcaacagtatgtgcttgaagtttctgggaagtcggcatccaaccctggtgct

SEQ ID NO: 370324 - DNA, 101 bp, Homo sapiens
ggaactcctagggcttttttgagagtggtttcttgagtacaggcgatcaggctgcaaaggggaactatggactccttgatctcatacaagctttaagatgg

SEQ ID NO: 370325 - DNA, 100 bp, Homo sapiens
agcttttcgtaaagggaagtcatttctactggacttcatgcttagatacatgtataacaagagccaactgggagccgggatgggaaactactaaagtttg

SEQ ID NO: 370326 - DNA, 74 bp, Homo sapiens
gccgaggcctgggacagctaccgcagcatgagcgaaagctacacgctggagagagaacgaggtgctcaaagtcc

SEQ ID NO: 370327 - DNA, 100 bp, Homo sapiens
cgcagccaggagaaggagttcgtgcaggcgtacgaggatgtgctggagcggtacaaagatgccttattggaggaactggaacgctccacccttcaggaca

SEQ ID NO: 370328 - DNA, 83 bp, Homo sapiens
gcatccaaacattatcactctaaaggatgcacctacaaaggcagcacctaagcaaaagattgtgaagcctgtgaaagtttcag

SEQ ID NO: 370329 - DNA, 82 bp, Homo sapiens
cagcttcggagaatggagtcttccatcaatcatatctcacagcaattctgtggtgttcttggtcacacatttatggagtttc

SEQ ID NO: 370330 - DNA, 75 bp, Homo sapiens
ctgccgctgctgctgctgctgctgcgcctgggccaggaagcaatgaggctccccaagaacacacctgaggaaaag

SEQ ID NO: 370331 - DNA, 75 bp, Homo sapiens
gtcacaagcgatgaaaagagcaccttgaaggttgtctgcattcaaaagagcattctattaaagctaccttaattt

SEQ ID NO: 370332 - DNA, 139 bp, Homo sapiens
cagcagtcggcttctctacgcagaacccgggagtaggagactcagaatcgaatctcttctccctccccttcttggtgatggctcagtgttccgagacttggttattaagtacggtgcagttgacccactgttggctctc

SEQ ID NO: 370333 - DNA, 100 bp, Homo sapiens
ccttgctgtgctgaatcctggctgtgtgaccccaaagccaggctttcgaggactgactcctccaattccttgggaacatgcaccgcgtccccatttcccc

SEQ ID NO: 370334 - DNA, 98 bp, Homo sapiens
catggcgaagtccccggagaactctaccctggaggagattctggggcagtatcaacggagtctccgggatggcaagattattttatcataaaccccag

SEQ ID NO: 370335 - DNA, 90 bp, Homo sapiens
gagaaagcgggacagaggagcgggcagcaagcggaaacggtgtccgcaatgttgccagtgtctgtctgcagattggctacccaactgttg

SEQ ID NO: 370336 - DNA, 82 bp, Homo sapiens
ctgctaccccatgccatcaacctgcgtgaggtcaacctgcgcccccagatgtcccagccattgctccagtcctcctggatgc

SEQ ID NO: 370337 - DNA, 82 bp, Homo sapiens
cgctggtgaccctgccgctggcgagcgccaccgcatggatccggaacatggtggcggtgctggaagtcatctccagcctgga

SEQ ID NO: 370338 - DNA, 100 bp, Homo sapiens
ctgttccagaagtgctgcctggtgcagaggatcctggaggcctgggaagccaacgaccacacgcaggagtaccctgacttctaccggaagctctacggcc

SEQ ID NO: 370339 - DNA, 75 bp, Homo sapiens
aggctcgcctcgactccaaatggttgaaaacagatatacagacttcatcacctgattcttccaatgagaattccg

SEQ ID NO: 370340 - DNA, 75 bp, Homo sapiens
cggatgagtacgataccgaagcgggctgtgtgccccttctccacccagaggagatggggaagaagatgaaggtga

SEQ ID NO: 370341 - DNA, 51 bp, Homo sapiens
ggcctgtctgccgcgatggatgacagtaagacttaattcagtgcacaaatg

SEQ ID NO: 370342 - DNA, 90 bp, Homo sapiens
gatgttcttcttcgagtatttgtagaagggcaaactaggcgtggcaactgctggctgcgtgaatgaagttacagagatggagtgcggtcg

SEQ ID NO: 370343 - DNA, 51 bp, Homo sapiens
gaggctggactcggattcgttgcctgagcatttaaatcaaacggtattgag

SEQ ID NO: 370344 - DNA, 74 bp, Homo sapiens
acagctctttgcatccggagagtggacaagaaagtttgtaaccaaattattggaagatctcatattctttgttg

SEQ ID NO: 370345 - DNA, 73 bp, Homo sapiens
cagccgcgctcggggctctaagggttgtctcctcacagactatgagctccttgaaagagggaatcgtgtctta

SEQ ID NO: 370346 - DNA, 111 bp, Homo sapiens
gcttgaaattaccaactgctttcctttccctcagcacacagaggatgatgctgactttgatgaagatatggtccggaaaaagaacccccctctgagaaacgttgcaagtga

SEQ ID NO: 370347 - DNA, 98 bp, Homo sapiens
aactttctgcatttgacagataaagatggtgaacaacctcaaatactgctgatcctacgagttcttggtgaaaatgcaattgctgttcgaacaaaagc

SEQ ID NO: 370348 - DNA, 80 bp, Homo sapiens
gaattcagaaggagctggcggacatcactttagaccctccacctaattgcaggtagtcaaaccacacactccattaataa

SEQ ID NO: 370349 - DNA, 103 bp, Homo sapiens
tgggagccaaaagtccctacgttgatgacatgggagcaatagcttactgcagagtgggtctgggcatctgctacgacatgcggtttgcagagcttgcacaaat

SEQ ID NO: 370350 - DNA, 98 bp, Homo sapiens
tggaagatgaggaggtcgctgagagctgggaagaggcggcagacagcggggacaccatatctcagaagacggtagagattgcatctcctgcaaatatg

SEQ ID NO: 370351 - DNA, 75 bp, Homo sapiens
atttggacatgctttagagagagtatggcatgcagctgtaccagaattatatgcatccatatcaaggtagaagtg

SEQ ID NO: 370352 - DNA, 90 bp, Homo sapiens
ttcaaacttacattttggatagcgtgatggaccatttgcttgcagctgatgtgttattagagaaggtgttcgccagcctcccgcaggtgg

SEQ ID NO: 370353 - DNA, 82 bp, Homo sapiens
aggtgtttgataaacatccagggatctatttgtttttagtccatcccaatgaaatggctggagtgaagtggcacgatctcgg

SEQ ID NO: 370354 - DNA, 90 bp, Homo sapiens
ccgagtggagggcaaacctgtgaacccacccgagagcaacaaagcaggcgactacagccacgtgaagatatatgggcaataggttgtata

SEQ ID NO: 370355 - DNA, 100 bp, Homo sapiens
actgacacctcagggacaaagagatctggacagaatcgccggacaggtgctgggtaggccaggtttcagcatcgcagacaagaagcgcaggacaggctgc

SEQ ID NO: 370356 - DNA, 100 bp, Homo sapiens
ctgaacaggcgttccaggcgagtcagatcaaggagaatgagctgaggagaagcatggagcctcctgtataagaagtaccgtattttctgcccatcatact

SEQ ID NO: 370357 - DNA, 75 bp, Homo sapiens
gctgatcatctgaggttgcctgcatggcagtgaagaacatggacctttggagagagtctacagggagattgaaca

SEQ ID NO: 370358 - DNA, 73 bp, Homo sapiens
tattttcacgtggacaaacttcattggtttaaatatcagccaatggtaatgatagtaaaaaatttaaaggaga

SEQ ID NO: 370359 - DNA, 89 bp, Homo sapiens
ggccgagtggtctaaggcgccagactcaagatattcgagatatttggacctgttgcacatccattttatgtgttacggtttaattcttc

SEQ ID NO: 370360 - DNA, 100 bp, Homo sapiens
caacaacgttgaggactgcaagatgatgggtgtgctggaccggttttctcaaattcagccaaagctcatcttctctgtggaggctgttgtctataatggc

SEQ ID NO: 370361 - DNA, 97 bp, Homo sapiens
tcaccgtatcaggaacacaaaactgcggcccttgtctgcaaacagtggtatcgacttatcaaaggaagccattaatttgctagaaccaatgacaaac

SEQ ID NO: 370362 - DNA, 87 bp, Homo sapiens
cggctttgagatcttcctcagctccttccaggtacaggtttgcagattccgccagcagcacagcaagctctacagatgagtggctct

SEQ ID NO: 370363 - DNA, 100 bp, Homo sapiens
aaaggtgtacttgcaagaaacctcaggacttgagtaacagcaacatgatgaggaaaatgaggcccaaagaagtgatgccacttggttaaggtcccagagc

SEQ ID NO: 370364 - DNA, 100 bp, Homo sapiens
atatcatctttggtacagttattcaggaagtgaaaacaagcaatgtggctagagaggattctggagtgaagcagatgttactcgaccttttgtctcccag

SEQ ID NO: 370365 - DNA, 100 bp, Homo sapiens
ccaaataagagataaagaagaccctcaagagatgccccactctcccttgggctctatgccagttggatggatttattgctcgaaactgggccaatcaaag

SEQ ID NO: 370366 - DNA, 89 bp, Homo sapiens
ccagcccttctggtgtcacctcccagggtgactcaactccagattctgaaggaagatttccattaggtaatttgtttaatcagtgcaag

SEQ ID NO: 370367 - DNA, 99 bp, Homo sapiens
ggaaaagactcaggacggacaagcacagtcttcggaagattataagcgccatggctatggctagtgttaaattgcttgccggtgttttaagaaagccag

SEQ ID NO: 370368 - DNA, 75 bp, Homo sapiens
ctgttccagggaggtgggattgatttgtgaagtgtggatatgcaggctctaactttccagaacacatcttcccag

SEQ ID NO: 370369 - DNA, 98 bp, Homo sapiens
ctccgggctccttcggccccgccatgggctgctgcagctccgcctcctccgccgcgcaggtgtgcaactgaggaacatggctcaagaaactaatcaca

SEQ ID NO: 370370 - DNA, 82 bp, Homo sapiens
tctagatgtaattaatcaaacttggacagctctctatggctcttgtcaggatggtgaagctgttcatcggaaacctgccccg

SEQ ID NO: 370371 - DNA, 82 bp, Homo sapiens
tggcctggaggctatccagcgtggaccaggtgctctgaggctggcgtacagacacagcacgtgcgacggagtggtgttggtc

SEQ ID NO: 370372 - DNA, 100 bp, Homo sapiens
caccagggagctgaaactcaactcagagtcaagatctccactgaagttggcatcacaaatgttgatctttccaccgtggataaggatcagagcattgcac

SEQ ID NO: 370373 - DNA, 74 bp, Homo sapiens
cccggcccacagtgggggtgtgcaaacccgagagaactggcttcactgcacggtgcctgcttacaatttcccag

SEQ ID NO: 370374 - DNA, 100 bp, Homo sapiens
agagcaggtgtatgatcttttggaggaggaggatgaatttgatagagagatcatggaagggaagtggttgctgtgtatgttactggtgcttggaactgct

SEQ ID NO: 370375 - DNA, 98 bp, Homo sapiens
gaagccggtggggccttcggaaagagagagcaggctgaagaggaacgatatttccggttgatggaaatcacaatcttctgacaaagctttctctggaa

SEQ ID NO: 370376 - DNA, 83 bp, Homo sapiens
cgaagctggccgagcaggctgagcgatacgacggctcgagtgcagtagcgagatctcagctcacctcagcctctgtctcctgg

SEQ ID NO: 370377 - DNA, 75 bp, Homo sapiens
gtgcaatgaattctcacagatatttcaactgtgtcagtttgtaatggaatgaatctgaagtctgctgcagtaaaa

SEQ ID NO: 370378 - DNA, 50 bp, Homo sapiens
ccggagtgaccagaggagggacacgatatccttggaacagaagatcttat

SEQ ID NO: 370379 - DNA, 101 bp, Homo sapiens
gagcccgcgcgccgagccccacgttaaaaagatcaagtggcatgagcagccttttggggaaaattggtgccaagaagcagaaaatgagcacccttgagaag

SEQ ID NO: 370380 - DNA, 83 bp, Homo sapiens
cggtgctgctgagcttggcctcggcgtcctcgggtatcatgaactgatcactaaatatgggaagttggagcctttggcagaag

SEQ ID NO: 370381 - DNA, 74 bp, Homo sapiens
gagatagagcttcgcggagacggcggaagcggagagcaacagcgcgccggcagcacacttctgcttttgttcct

SEQ ID NO: 370382 - DNA, 75 bp, Homo sapiens
ctcgggagggagactgttgttcccggagatgcggcgcgcagcagcaagatgaagagcgacgtcggcagctgagag

SEQ ID NO: 370383 - DNA, 82 bp, Homo sapiens
atggaggcgtcgggcgtgagcggaaatgaggaggagatggtggaggaggctgaagcaattctgtggtgttcttggtcacaca

SEQ ID NO: 370384 - DNA, 100 bp, Homo sapiens
ccaggagaaggaagaattcattagcactttacaagcccagctcagccagacacaggcagagcaagctgcacagcatccaccagctgaggaacaaagtatc

SEQ ID NO: 370385 - DNA, 100 bp, Homo sapiens
cttgttccaggcattgctggagatggatctgctgaccgatccctgcatgtcactgagtccaccatgctttacagaagaagacagatttagtctggaagct

SEQ ID NO: 370386 - DNA, 75 bp, Homo sapiens
ccggttcgcgtctctctgctgcggcgcggggaccgctgtgctctcgggagaaaagatccatgaggacatttttga

SEQ ID NO: 370387 - DNA, 98 bp, Homo sapiens
gaggaagttccagtccccacccgacagtcgcgggcacccctacgtcgtgtggaaatccgagtgtcttctacaaatgcttctgggaactggaggaccca

SEQ ID NO: 370388 - DNA, 83 bp, Homo sapiens
gctgacaccgtagtgttttcaaaactggatatggccaggatgctatagcattgtcagtggatgaattgtaaaagcaacatcag

SEQ ID NO: 370389 - DNA, 98 bp, Homo sapiens
tggcacttcattggccacctacagaaacaaaatgtcaacaaattgatggttctgccttcccaggaccctgcccttccccagaaggagcaggagaaaat

SEQ ID NO: 370390 - DNA, 90 bp, Homo sapiens
tcctttatatagaagggagacttaccctcttctccacctgctccccggctgcccgcaccttccgggcctccgcggcgaatttctttttcc

SEQ ID NO: 370391 - DNA, 123 bp, Homo sapiens
gtgcagccctcctctatgagtactgtcagcaaaagggaatttcctacaagcagtgtggcaagcctatggaccagctctcattgaacactgtcttttagaaaatggattctcgggtaatgtcaa

SEQ ID NO: 370392 - DNA, 88 bp, Homo sapiens
ggtgaaaaaagattcagagttggataagcacttggaatcacgggttgaagttgaccagcaagtcaagtccctgtcgtcggtcctgtcg

SEQ ID NO: 370393 - DNA, 51 bp, Homo sapiens
accatccacacatcataaagctttaccagatccagatgcagaggtgtgcct

SEQ ID NO: 370394 - DNA, 98 bp, Homo sapiens
tggagttgcaagtgggagcactggaagtacgggcagttgcagtgttggagctaaaaatgaaactagtgatcgagaagatggcctccccaaaggacatc

SEQ ID NO: 370395 - DNA, 75 bp, Homo sapiens
ttcttcagattggaaaataccacaggatggagactacgagtttaatgagatgctggaggaaggacatgagtatgc

SEQ ID NO: 370396 - DNA, 100 bp, Homo sapiens
gactcggggcgccagtccgggcaggggcagcgggagccggccggattgcaggaggagatgcttcagagagaggaagccgaaaacaccctgcaatctttca

SEQ ID NO: 370397 - DNA, 154 bp, Homo sapiens
aagatgagggattgctactgcacggtgaacctggaccaggaggaggttttcaggaccaaaattgtggaaaagtcactctgatcgcccaggaccacaccgcagcgtaactgcaggcctctcagcgaaaaagggggaaagcaaagacccgggtgtg

SEQ ID NO: 370398 - DNA, 82 bp, Homo sapiens
agactccagcagccaagatggtgaagcagatcgagagcaagagctccacgcaggagatcggtgaggagctgatcaacggagt

SEQ ID NO: 370399 - DNA, 100 bp, Homo sapiens
gggccagtgcggcatcacctcctccaagaccgtgctggtctttctcaacctcatcttctgggagtctccccaggacagtgctatcacccgggatattaac

SEQ ID NO: 370400 - DNA, 98 bp, Homo sapiens
cctgaacaaggagctcgactgggccagcatcaacggcttctgcgagcagctcaacgaggactttgagggctctgaagagactgagggactcggccaat

SEQ ID NO: 370401 - DNA, 100 bp, Homo sapiens
gtataaaagacagctgagtgaggatggaagacagctaaggcgagggagcctgggaggagccctgactggtgcgggagatgttaaagatgagggactccaa

SEQ ID NO: 370402 - DNA, 75 bp, Homo sapiens
gccttctctgtcagctctttccccgtcagcatcccagccgtgctcacggtgtagtcgccgccgccagccgccatg

SEQ ID NO: 370403 - DNA, 99 bp, Homo sapiens
tagcccagaggatcggaatgacagatatgagatggaccaaacgcccccggcgcgtcctgaatatctggtctcagggattcgaactccccctgtgaggag

SEQ ID NO: 370404 - DNA, 75 bp, Homo sapiens
gcgacactacctgggccatacagactgtgtgaaatgcttgccatcgagacatttataaaggagttgatatgagag

SEQ ID NO: 370405 - DNA, 100 bp, Homo sapiens
aaaggccaacggaaaggaatgcgcttcaaagacataagcagctctatgaccaatagcacagctgccagtagacccccggtcaccctgaggctggtggtcc

SEQ ID NO: 370406 - DNA, 101 bp, Homo sapiens
gttcaaacagcactgccaaatagcagaagaataccatgaggtcaaaaaggaaatcaccctgcttgagcaaaggaagatatgttcaaggaatgagtgattta

SEQ ID NO: 370407 - DNA, 82 bp, Homo sapiens
ctgcgggtcagggagcatccagagatggggccctatgtacaagggggacttgatctcatcttcatgccaggccttgggtttg

SEQ ID NO: 370408 - DNA, 75 bp, Homo sapiens
tggacagtctgcaccttctcttactgctggcctgaccattcccggagtaataaatccagttggagcagcagtgat

SEQ ID NO: 370409 - DNA, 82 bp, Homo sapiens
caagatgacactgaacatgaagaactacaagggctacgagaagaagccctactgcaacgctccttggatagctggggcacct

SEQ ID NO: 370410 - DNA, 100 bp, Homo sapiens
atggtggactcagagaccaataaaaataaactgcttgaacatcctttgactggttagccagatattaataaggcagcggaaagaagaaatatgaatacgg

SEQ ID NO: 370411 - DNA, 51 bp, Homo sapiens
tgtaatactaaatgtgttaccataccaaggagcctgttaaaagagttctag

SEQ ID NO: 370412 - DNA, 96 bp, Homo sapiens
gcggggcaagatggcggcgcccagacaggcctggagcacgtatgaaaatgaaagtcttcagaatggaaggaagtcaactgaatttccaagaaaaat

SEQ ID NO: 370413 - DNA, 83 bp, Homo sapiens
gccccatcgagaaatggccgcgtcggcagcacatgattaagtaccggtacatcccgttcacacatgggaagagaaggtacaga

SEQ ID NO: 370414 - DNA, 83 bp, Homo sapiens
cgcagggggacggggaccagcagctgtcgccgccgctctcaggttttagctaaagaagatactgaggcagctattcaatcaat

SEQ ID NO: 370415 - DNA, 51 bp, Homo sapiens
tactcacagagttagagagagggatggtggaactctaatgaatcattgatt

SEQ ID NO: 370416 - DNA, 100 bp, Homo sapiens
gcggcttcagcaccgaggagcgcgccgcgcccttctccctggagtaccgagtcttcctcactgcactgggtgttcaacagccatcactccttggagcatc

SEQ ID NO: 370417 - DNA, 100 bp, Homo sapiens
atggagatgaacctctaacacagtggaaaggaaccgttctggatcagatacttgccagaactaatacagctgatgaaatacctgaccttttctgctccag

SEQ ID NO: 370418 - DNA, 98 bp, Homo sapiens
atcatcccaaaacgtcccgggttcacctaatagtgcaagaacgtactcaggaaaagtggggatttccaatgtgccactatttaaaggaagagagatgg

SEQ ID NO: 370419 - DNA, 73 bp, Homo sapiens
tcgctacggaccttaaaatacccgcaacagccccttcgtcccaagtgtctgtgacctttgaggatgtggctgt

SEQ ID NO: 370420 - DNA, 82 bp, Homo sapiens
gctggctgcagggacccggtgacagcgtgagagatcatggaagggaagtggttgctgtgtatgttactggtgcttggaactg

SEQ ID NO: 370421 - DNA, 100 bp, Homo sapiens
gccgtccccagaacgcagatcagaggtagtcggacctttcccgctggcgcgcagcctcagctaggtgactgaaaactcctgaggcatttcctggactaga

SEQ ID NO: 370422 - DNA, 99 bp, Homo sapiens
ctggcaccttttaaaggtctgatcatcaattgtctctctgggcggccacctatgagacttcatctgtgtggagtccaaaactacttacctggaagacct

SEQ ID NO: 370423 - DNA, 75 bp, Homo sapiens
ctcccactgagattgagagacgcggcaaggaggcagcctgtggaggaactggcctggtgagacgagtggaccgga

SEQ ID NO: 370424 - DNA, 99 bp, Homo sapiens
cctctgcgagccccgggtcccgccctggggccggcgatgtgccaccgaggctgaggatgatggtagattgccaggtcgcaatggaagaagagatcgccg

SEQ ID NO: 370425 - DNA, 83 bp, Homo sapiens
ctcgactccagcggccccgacagcacggaagcagctggataaagaacagagaggacatgtactcccaggattccatagatctc

SEQ ID NO: 370426 - DNA, 98 bp, Homo sapiens
ggataacattggatcacaactgctgcttaactggtgtgtccagatagctaagggttttgactctgggaggagggctgccttatttggagcaccttaat

SEQ ID NO: 370427 - DNA, 90 bp, Homo sapiens
cagagagggctaccttgtgaagaaggtccttgctgcgaaagtgctcaaccttgtgctgccaaacttgtccctcgggcccatcgactccag

SEQ ID NO: 370428 - DNA, 75 bp, Homo sapiens
aaaagctgtggcaaccgaaatgagactccctcagatccagtgataattgacaggaaaatcagttggagtggaaat

SEQ ID NO: 370429 - DNA, 98 bp, Homo sapiens
ttggctgataaccatatcctgctgtgggatttacaggaaagctcgagccaggctgtgttcgtgccctcgtgaggctggcatgcaggatggcaggacag

SEQ ID NO: 370430 - DNA, 75 bp, Homo sapiens
gaatgtcatggactttgtggtggtgctaacgggtctgtggtccgaagacaaccctatgaggcatcagtagggttt

SEQ ID NO: 370431 - DNA, 100 bp, Homo sapiens
cggacgaggcggaagaccgcgcgcagggcctgcagcgggagctggacggcgagcgcgagcggcgcgagaaagtgcagaggccaagaccgttttgcccaag

SEQ ID NO: 370432 - DNA, 98 bp, Homo sapiens
aaagcgagcgatcgagcgagcgcgcgcgcgaaaactccgggcagattcagaatggacagtttagaagaacctcagaaaaaagtctttaaggctcgaaa

SEQ ID NO: 370433 - DNA, 76 bp, Homo sapiens
gacgccgccgctgcctcccgcgtgatctgcaactctttcaccatctgtaatgcggagatgcaggaagttggtgttg

SEQ ID NO: 370434 - DNA, 98 bp, Homo sapiens
tggataacactgtacaagctttcaaagtcaattggaatgcagtagccctctgggcctgggatattgtggttgataactgtgccatctgcaggaaccac

SEQ ID NO: 370435 - DNA, 90 bp, Homo sapiens
cagatacactcatgcagcaaacacagttgtttacagctctaacaaaatagacgagcaaatttttcagaacataaaacaagaatatagtcg

SEQ ID NO: 370436 - DNA, 82 bp, Homo sapiens
ctcacaggccgacaagatacctctcgcatgtccacctcacaggcaggaaaaatactattgtattacaaggctcggaccaaag

SEQ ID NO: 370437 - DNA, 100 bp, Homo sapiens
agggccatggcagcgcattgcgcccttgcgcgtgctcagcttcgatatcgagtgcgccggccgcaaagccgcttacaaacacgcagatggcaagaagatt

SEQ ID NO: 370438 - DNA, 100 bp, Homo sapiens
catcaagggaaaatggggtgaggaagattttgaagacaatcgtcacttatacagtgatgatgatgatgattttgatgatgaggaagctgaagaaaaagcg

SEQ ID NO: 370439 - DNA, 100 bp, Homo sapiens
gacatctgggggccacaaatgctccttctcctggagacgcaactcaaggtgctggagaatctggtaaaagcaccattgtgaagcagatgaggatcctgca

SEQ ID NO: 370440 - DNA, 82 bp, Homo sapiens
ctggtgggccgcgtcgaagacatggaccagggctacggaggtacatgtgaagattttttggcagcttagcgtggaaaccatt

SEQ ID NO: 370441 - DNA, 74 bp, Homo sapiens
gatgatccaccagcggttccatcctacacttgggccaaggcagaggcttcctcaggagaccatcccactgacac

SEQ ID NO: 370442 - DNA, 100 bp, Homo sapiens
ctcagagagatgatatcatctaacattcaagcaatgatcatcaaagtagcagctttggatgaagatcagcttcgtgcaaagggttatgacaaaacaccag

SEQ ID NO: 370443 - DNA, 146 bp, Homo sapiens
caaggagcatgtctttacctggtggatgtttatgccatagaaaaatcaactgcttttcccagaacacagagagcagagggtccccttctgcttgttatagccccagtagtcctgtccaggttctagaagactccacctacttttcc

SEQ ID NO: 370444 - DNA, 51 bp, Homo sapiens
aatgaatcgaaacatgaagaactggcagattgttaaaggaaatgggctggc

SEQ ID NO: 370445 - DNA, 123 bp, Homo sapiens
cggcgacgtggtgtgcaccggctggctgaggaaatcgcctcccgagaagaagttgaggcgctatcatttcttatactgaagcagtggagatcttaaagcaagcatcccagaacttcaccttta

SEQ ID NO: 370446 - DNA, 100 bp, Homo sapiens
gtggaaaggacgctgcggtctcgccagcggcagaactacctgcgtatgtggagtagctccttctggccggcagcaggaagagtggccctgtgtgtgccag

SEQ ID NO: 370447 - DNA, 100 bp, Homo sapiens
ttacctgttttcaacaaagacacatttatctgaggtccaagcagctcagtctgaggctaaggttgtatctcagtatcatgagctggtggtccaagctcgg

SEQ ID NO: 370448 - DNA, 74 bp, Homo sapiens
tggcagatattatcatagttgctgcagggtgtcaaattgagaaccaggtagatccccaccacctacagtaaaaa

SEQ ID NO: 370449 - DNA, 82 bp, Homo sapiens
tggcgtcatggacatcggcctggacagccaagacacctagctgttgggcagaagagggtgcagaaaagaggtcacatcagcg

SEQ ID NO: 370450 - DNA, 142 bp, Homo sapiens
cgccctgcgccccgctctgctgtgggcgctgctggcgctctggctgtgctgcgcgacccccgcgcatgagatccgtgctcagctcacagagcagatgaaatgcctggaccagcagtgtgagcttcgggtgcaactgttgcag

SEQ ID NO: 370451 - DNA, 75 bp, Homo sapiens
attgctcacagctgatcctaagaaagctacatccatattggaattttaccgggaacttggattgccgccgaaaca

SEQ ID NO: 370452 - DNA, 100 bp, Homo sapiens
gggcccccgccgccgccggagcgcggaagatccatccaaaagctatgtgaaattacgagactttgtgcttgtgaagctttgtcaagatttgccctgtttt

SEQ ID NO: 370453 - DNA, 75 bp, Homo sapiens
cgtcagtatttgaggagaaagcatttgacatatctgaagagatggattaagaatgctttggattaaggattgtgg

SEQ ID NO: 370454 - DNA, 118 bp, Homo sapiens
actactactactactacatggacgtctggggcaaagggaccacggtcaccgtctcctcagacaatgcagatcttcgtgaagactctgactggtaagaccatcaccctcgaggttgagc

SEQ ID NO: 370455 - DNA, 82 bp, Homo sapiens
tacctgcagtttgcctactataagttgccactccacgggcagtccccactagtgacgggtgaacgtgtggccaccagcatgc

SEQ ID NO: 370456 - DNA, 83 bp, Homo sapiens
atcttaattgggcacgaaagaggtggatccataaagaacccagccaacccgcagagggaggggaggggctgagctgtgaggag

SEQ ID NO: 370457 - DNA, 82 bp, Homo sapiens
tgaaagggtgaagcaagagaatctgaacctcgtctgtattcccacttccttccaggtcagcccaaggccaaccccactgtca

SEQ ID NO: 370458 - DNA, 82 bp, Homo sapiens
tggaaattgcgctggaccgtcgccttgctcctcgccgcggcggggactgcaggctgatcagctgaccgaagaacagattgct

SEQ ID NO: 370459 - DNA, 83 bp, Homo sapiens
tgcaatatgactttggaggaattctcggctggagagcagaagaccgaaagctctcgtggcattatccttcagtggggctattg

SEQ ID NO: 370460 - DNA, 82 bp, Homo sapiens
ctgaaggtccaggagtacccgaccctcaaggtagagcaggtctctctgcagccatgtcggccaaggcaatttcagagcagac

SEQ ID NO: 370461 - DNA, 88 bp, Homo sapiens
tctccaacttcaacaatgccctggagtcaaagactgctgccagcggggtggaggcgaacagcagaccatacgtaggtaacctttccag

SEQ ID NO: 370462 - DNA, 74 bp, Homo sapiens
caggaagtcggagtttgagccccggaggcagagcggctgccatggttctgcggggagtgtctccagccctgcct

SEQ ID NO: 370463 - DNA, 98 bp, Homo sapiens
caagactctcggctatggagtccccatgttgacaatctgctgggaatttcttgggttgacagctcttggatccctattttgaacagtggtagtgtcct

SEQ ID NO: 370464 - DNA, 100 bp, Homo sapiens
gcggcacgcacgcggtgcagggtaacatggcggatgcggaagtgatgacgaggacgaggaggaggaggaggaaggagaagaggaagaagaggaagcagaa

SEQ ID NO: 370465 - DNA, 74 bp, Homo sapiens
atcgagaccgcttaccgcatctggctggagccctgcattcgcggcgtgtgcagcccatgaaacccctgaaggcc

SEQ ID NO: 370466 - DNA, 50 bp, Homo sapiens
gcctggctcaatatctaatcaatgtcaggcagccatgttgttcagttctg

SEQ ID NO: 370467 - DNA, 100 bp, Homo sapiens
tctgaagccatgaagctgacacagtcagagcaggacatggtctgctatacagctcagactctcgtccgaatcctctcacatggtggctttaggaagatcc

SEQ ID NO: 370468 - DNA, 80 bp, Homo sapiens
tgaccatcctcttgccgaaaaaacccagacctgcctagagctggaacgttacctccagagcgagccctgctatgtttcag

SEQ ID NO: 370469 - DNA, 100 bp, Homo sapiens
cgctgacatcccccgcatcctggtggccggtgaacagcagagaatttcaaaggaccttgctaatatctgtaagacggcagctacagcaggcatcattggc

SEQ ID NO: 370470 - DNA, 82 bp, Homo sapiens
atcctacaagcaagctgaatggaggccagatagtaccatgatagctgtatcagctactgcagcactggggtgtcagttgttg

SEQ ID NO: 370471 - DNA, 82 bp, Homo sapiens
cgggagttcaagaagaacactccagagtttttcagaagaagtgaagtcaagatgaagaaccatttgcttttctggggagtcc

SEQ ID NO: 370472 - DNA, 101 bp, Homo sapiens
ccagagagaccaatccagccgaactcggggtttgccacctgaaagatgtctgaaaattccagtgacagtgattcatcttgtggttggactgtcatcagtca

SEQ ID NO: 370473 - DNA, 100 bp, Homo sapiens
tgggcctgcaggtctctgtcgagcagcggacgccggtctctgttccgcaggatggctaccggctctctgaccagttccacgacatcctcattcgaaagtt

SEQ ID NO: 370474 - DNA, 82 bp, Homo sapiens
cgctgagcttggcgcacgggccgaccagatgaaggatttgggggcagagcacttggcaggtcatgaaggggtccaacttctc

SEQ ID NO: 370475 - DNA, 74 bp, Homo sapiens
ggctggagccctgcattcgcggcgtgtgcagtgcaccaattccagctggacatcactgtgaaaatgggacggga

SEQ ID NO: 370476 - DNA, 100 bp, Homo sapiens
tcccagatcatcatgaaggacacttaactattgggaaaatgaggtacgttagtgttcgcgattttaaaggcaaagtgctaattgatattagagaatattg

SEQ ID NO: 370477 - DNA, 97 bp, Homo sapiens
aggaggctaagaaagtggtgaatcccctgtttgagaaaaggcctaagaattttggcattggagcatctttccttgaagaagtacattattgacattg

SEQ ID NO: 370478 - DNA, 97 bp, Homo sapiens
tcatcatgaccttccagaattacgggcaagcgctgttcaaacccatgaaatttattcaggagattgagcatgctctgggtcttggcccagccaaaca

SEQ ID NO: 370479 - DNA, 75 bp, Homo sapiens
gtcgtgttctgatcactactgacttgttggccctgtctctgcccctggtggtcatcgtccatggcaaccaagaca

SEQ ID NO: 370480 - DNA, 100 bp, Homo sapiens
cctcctttgaaaaagtctcctaaacagacaggctacggatggatatgtcaggaatgtgattcttcatcttccaaggagccaaaaacctgtatatcatctc

SEQ ID NO: 370481 - DNA, 100 bp, Homo sapiens
tcagccggagaagcgagtttcagctggtgccggagcaattcttattcctcgtttagacattgtgatttccttcgttggagctgtgagcagcagcacattg

SEQ ID NO: 370482 - DNA, 100 bp, Homo sapiens
ggccgcttctcgcgggccggggccacgctcagcgccgagggcgagatcgtgcagtctccagagaatacagagggcaaagatggatccaaagtaactaaac

SEQ ID NO: 370483 - DNA, 75 bp, Homo sapiens
gtcaccagaaagggaaaccagttccacgtatagctgaactcatggacaagcctcccctggtgaagacacaaactg

SEQ ID NO: 370484 - DNA, 100 bp, Homo sapiens
ggcggggtccgggccggagtacgtcgttcccgctgcgctaggggaagcgggcaggtatggaacgccgtggactccgggcactgcctgcagacctactccc

SEQ ID NO: 370485 - DNA, 100 bp, Homo sapiens
ggctcccggctacgaagcgaggaacgagcgggcggcgggcacgagttgatattcactgatggactccaaagaatcattaactcctggtagagaagaaaac

SEQ ID NO: 370486 - DNA, 73 bp, Homo sapiens
tggcggcgcagccaccccgcgggatacgcctcagcgcggacatcggcagaaactagatgatcagaccaagccc

SEQ ID NO: 370487 - DNA, 90 bp, Homo sapiens
taccgatgaagatgaaaaaacaaaaggactgtgggattccattaaaagggagaaaactggttgtcctggatgtttgaaaagttggtcgtt

SEQ ID NO: 370488 - DNA, 74 bp, Homo sapiens
cctcgaacgccacagaaacatccggcccagacatgactatcaagatgaataatacggcagctagtccaatgtct

SEQ ID NO: 370489 - DNA, 98 bp, Homo sapiens
tgagactctgcccactcccagggagaggaacctagcatccccatcaccttccactctggttgaggcggaaggagtcccccgggcgtacacctacagcg

SEQ ID NO: 370490 - DNA, 98 bp, Homo sapiens
tcacaagtctctgaagccgtgcccgttcttcctggagggaaagtgccgctttaaggagaactgcaggagggagccatggatttgctgcgggagctgaa

SEQ ID NO: 370491 - DNA, 100 bp, Homo sapiens
aatcgttaaacatctgaaagggtcaggttttgtagtgcatccctgagcatgagcacagaatgaagcggcgtttggatgaccaggagtcaccggtgtatgc

SEQ ID NO: 370492 - DNA, 98 bp, Homo sapiens
ggtgctcaaggatgaggtcctagaggatgacgacagatatgagcaggcgagtgacgtccgggcacagctcaagttttttgaacagcttgatcaaatcg

SEQ ID NO: 370493 - DNA, 100 bp, Homo sapiens
aacgagctgagctggcagagtccatacatctgtggatggatatactgaaccacacatccagcctaccaagtcgagtagcagacagaacatcccccggtgt

SEQ ID NO: 370494 - DNA, 100 bp, Homo sapiens
agggcaagccccgctccggccaacaatgcctgcccaagtgactgacttgcatgtggccaaccaaggaatgaccagtagtctgtttactaactggacccag

SEQ ID NO: 370495 - DNA, 95 bp, Homo sapiens
atgaagcaaggcccaatgacccaggcgctccttcgagaactcatagaacggaagaccagctccttggatcccaacgatcaggtggccatgggaag

SEQ ID NO: 370496 - DNA, 75 bp, Homo sapiens
cgcgccgctgctggttgctgtccctggcgcttacagcttttagatggggaatatgaagtagccatgcaggaaatg

SEQ ID NO: 370497 - DNA, 101 bp, Homo sapiens
aatgtgggatcgatgtttcaatattggaagcgctttgatttacagcagctgcagagctgtaggtaaaacttgcctactgatcagttacacaaccaatgcat

SEQ ID NO: 370498 - DNA, 83 bp, Homo sapiens
cgctgttcgacgtgcggcccgaatgccagcgcctcttctaccggggcaagcaggtgagaagccctaccactgcaactgggacg

SEQ ID NO: 370499 - DNA, 96 bp, Homo sapiens
gcgagggcatttgaagccaccggcgttgagtacttcaacacgcggccctgggagagcctcagctctgctatatcctggatgccatcctgtttctgt

SEQ ID NO: 370500 - DNA, 100 bp, Homo sapiens
tgaaggtccggggcttgccctggtcttgctcggccgatgaagtgcagaggtttttttctgtgccaactacctcaggaaccgggagtgaaactactggggt

SEQ ID NO: 370501 - DNA, 50 bp, Homo sapiens
tgggaatcgtagtcttcctaggagttgtttatttatgaaacagagcatca

SEQ ID NO: 370502 - DNA, 101 bp, Homo sapiens
gggaggataattgggatgatgacaatgtagaggatgacttctctaatcagttacggtgcgtatagcagcaaaattcatcattcatgcccctcctggagaat

SEQ ID NO: 370503 - DNA, 82 bp, Homo sapiens
gcagcccccggccctgtggaggaagctttacaggaagtatggtgctggcatctgcttggcttctagagagtcttacaatcgt

SEQ ID NO: 370504 - DNA, 97 bp, Homo sapiens
gtacaacatctacaatgttggctcaaggtactatcgtggtgcagtgggggccctcctggtgtttgacctaaccaagcaccagacctatgctgtggtg

SEQ ID NO: 370505 - DNA, 100 bp, Homo sapiens
ctggacgctcaccccagtgcaacgccctgagtgacggaaagagtaagcggcgggctcgccagcctcgagcgaaagtgtgactgcgaacgggcaggcgcgc

SEQ ID NO: 370506 - DNA, 100 bp, Homo sapiens
cctggaggaggaccacgcctgcatccccatcaaggccaaggccaaggatcaaaccaaggcccaggctgcagccccagcttcagttccagctcaggctccc

SEQ ID NO: 370507 - DNA, 96 bp, Homo sapiens
atcgtctatcattggatgaagtggctccggagatgatgagcagcagcaagagatggccgcttctgccgccttcatagaccggcattacgggcacct

SEQ ID NO: 370508 - DNA, 98 bp, Homo sapiens
cctccggagatgacaagtgagaaagaagtgtccggccgggccatccccttcagttgtctgggttcatgtctaagcttgttccagctatccagaatgcc

SEQ ID NO: 370509 - DNA, 100 bp, Homo sapiens
gcagcgcgcgaacgtgggcgtggggatggccaccagtttccggacagcttcgtgctgggtgggtcatgataactgggtacgtggagttctgttccattct

SEQ ID NO: 370510 - DNA, 50 bp, Homo sapiens
atgagctcctgtttagccactgcaggtggcctgcatgcagtttataaatg

SEQ ID NO: 370511 - DNA, 74 bp, Homo sapiens
gaatgtgcaacttgcaagggaactggagacaatgaaaatcttgtcagctgtcaccactgactaaagaagagaaa

SEQ ID NO: 370512 - DNA, 112 bp, Homo sapiens
agacattacaccatctgaattgcctgcaaacccagccgtataggtgagggacttgatcaggctctgccctgtctgacagaactcattctcaccaataatagtctcgtggaac

SEQ ID NO: 370513 - DNA, 50 bp, Homo sapiens
ctgaattgtgctgccttggccaaaagagtggaaggagcctgggagaggcc

SEQ ID NO: 370514 - DNA, 83 bp, Homo sapiens
agaaacattaagacctactaccagcttcctgcctgacacagctcacttcaagaagtgcacaatgtcagaacgtggaattaagt

SEQ ID NO: 370515 - DNA, 100 bp, Homo sapiens
gacatctttgagattcctctcaacaggatttcctaagagagctgttcattcggctcctaaagaagtagcagtgtccaaggaacaagaagagaaatctgat

SEQ ID NO: 370516 - DNA, 80 bp, Homo sapiens
aatgatccagatggacctcattcagacagaatctattaccttggtcagccctgacaaaggtcagctagccccttgaggac

SEQ ID NO: 370517 - DNA, 88 bp, Homo sapiens
aggcttcaagcgttctcgaacccttgaggggaagttaaagggaaatgtttcaacgtgcgcaagcgttgcggcggcgggcagaggacta

SEQ ID NO: 370518 - DNA, 75 bp, Homo sapiens
acaagcttttgtccccaaaccagagggaagtttaattagcattgacagcacctgtacagagatgggcaattttga

SEQ ID NO: 370519 - DNA, 82 bp, Homo sapiens
agagtttgtagcctattggaggaaaacacaccaaggggttgtagaaggtgatttagctgccatagaagcatacaagtcatca

SEQ ID NO: 370520 - DNA, 100 bp, Homo sapiens
gtttgccaccgtttacaaggccagagataagaacaccaaccaaattgtcgccattaagaaagtaagaagagttcctgggtcaagtggtcaccttcataaa

SEQ ID NO: 370521 - DNA, 90 bp, Homo sapiens
ggagtactggcccttggagctcggagggagctctgacagcctttcgcaagacatatgacaaaactgtggccctgggtcaccgattggata

SEQ ID NO: 370522 - DNA, 100 bp, Homo sapiens
ctccagaggttgggattcgtgtctggctctggaattgctactgctgcctctgtcactcctggtgaccagcattcaagaattcaattcgccacaatctctc

SEQ ID NO: 370523 - DNA, 50 bp, Homo sapiens
caggagtcagtttattactggaaagagttattcctgatgaagctaaagct

SEQ ID NO: 370524 - DNA, 75 bp, Homo sapiens
accttaatgggaggccccgggaggccgaggttcggaatgagatgtgcctggccacacaacagctttctaagcaac

SEQ ID NO: 370525 - DNA, 75 bp, Homo sapiens
tcggagaagccctcgagcatccccacagattgtagaaggcatgaaacaaaaaatgtggagtattgaaaatattgc

SEQ ID NO: 370526 - DNA, 90 bp, Homo sapiens
gctcaagatggcgtgcttgttggagaccccaatccgcatgagcgtcctttcgatgtggtggtacagtgggagctattctgacatgtccac

SEQ ID NO: 370527 - DNA, 76 bp, Homo sapiens
cctagactggatgcagagcatggtacaggtttgcagattccgccagcagcacagcaagctctacagatgagtggct

SEQ ID NO: 370528 - DNA, 100 bp, Homo sapiens
tggtgagcggctgagtcacctcgggcgtcctgggagcagatgaccgcacctcgagcaggagtggggatgccacgtctgcccccagcgcccggccctctgt

SEQ ID NO: 370529 - DNA, 75 bp, Homo sapiens
cagggtgtgagcagggctgagatgggcaccgcggatctggggccgtcctcagatgactatgctcagctgtgtaac

SEQ ID NO: 370530 - DNA, 82 bp, Homo sapiens
gctggtgccgctagccaagctgtcctgcctgggaagttcagaaaaaagtgtcacgttttaatctgcagatggacataagtgg

SEQ ID NO: 370531 - DNA, 100 bp, Homo sapiens
ggttgggttcagttttcttcagaagaaggacttcggaatgcactacaacaggaaaatcatattatagatggagtaaaggatagatcactgcgaccagagg

SEQ ID NO: 370532 - DNA, 75 bp, Homo sapiens
gagagcgtgaccgagagcgcgaatatcgtcatcgttagaaggacatgtattcctctgagaaaccttggacagcag

SEQ ID NO: 370533 - DNA, 100 bp, Homo sapiens
ctcagagcaggcagctaataaagatgtcaacggtcaggagtccactcctggaattgttccagatggtctggagcccggcactgtggtcataacagagcag

SEQ ID NO: 370534 - DNA, 98 bp, Homo sapiens
atcaaactgtatgatatggcagatgtatgggtgaagatccaagatgttctacagtatcctggtgtgaaccagctatcctccagtataggaggattgag

SEQ ID NO: 370535 - DNA, 98 bp, Homo sapiens
ccagatatggctgaacatgagtatatgccctcattttgcttaagacctctggccagagcagggcatggaagattccttttaaaaagtaatactgagaa

SEQ ID NO: 370536 - DNA, 88 bp, Homo sapiens
agaggactgtgccgcagacctgcagcttcagggtaaactgctgctctccaggacagcccagaaacttgcaggacctgtgccgaattaa

SEQ ID NO: 370537 - DNA, 98 bp, Homo sapiens
tgaaagcacctgctatgttcaatataagaaatattggaaagacgctcgtcaccaggacccaaggaaccagtccagtggcattgcagagcacggatggt

SEQ ID NO: 370538 - DNA, 98 bp, Homo sapiens
ttcattccgcagcagcactccgacagatctcccttgagtttagaaatctggctgagaaataccaaacagtgattgccgacatttgccggagaatgggc

SEQ ID NO: 370539 - DNA, 99 bp, Homo sapiens
gtgagaaaggcccacctgtgtcctggttgagggtctccagggttctttggggcccgagatggagttcgctcttgttgcccaggctggaatgcaatggca

SEQ ID NO: 370540 - DNA, 97 bp, Homo sapiens
ggggcctagctgcagccggagcctgggagacggaatcctatccatcttcttcaccgatatggtttgtggattctgaagacccaaatctgacatcagt

SEQ ID NO: 370541 - DNA, 74 bp, Homo sapiens
agctatggtgaaacaccactgaagcattgccaagcattcttgttatttaacacgggaaggaggtgacttcgcct

SEQ ID NO: 370542 - DNA, 118 bp, Homo sapiens
atcttcccagctttggttggaagacctattatcagatcaaccaccaaagtgggaaacattgaaatcaagcacccttacccttctgaagaacagaaaaagcagttggcacaagacacgg

SEQ ID NO: 370543 - DNA, 98 bp, Homo sapiens
aagcgattcaagccaagctgaccaagaagccaaagaactggctaggcaaataagctttaaggcaaccatcggcttgatcaggaatctggccctgtgcc

SEQ ID NO: 370544 - DNA, 100 bp, Homo sapiens
cttcgtgttcttcctagcttccctgtatgtgatgatgaccgtcaccaactggttcaagctgtggaaaatctctgttctcacaaagtctccccaatgctct

SEQ ID NO: 370545 - DNA, 82 bp, Homo sapiens
atcgctaatgagtatagcgaccgctgcacgccgttatggaaacaaaggacatgctttacatcgtcactgaatttgctaaaaa

SEQ ID NO: 370546 - DNA, 75 bp, Homo sapiens
atgcgctgagccctacaacacccccagcggccgccggctcccccacgagccaactgggtacatggaaaactcagt

SEQ ID NO: 370547 - DNA, 73 bp, Homo sapiens
cctcataaaggctgataaggaggctcattggtgggcagtattacttatgggaattgctctgatcatgctaatg

SEQ ID NO: 370548 - DNA, 118 bp, Homo sapiens
ttccctatgtccaaaaacgtttttcctgataactggaaagttcctcaagatggagactttgactttaatcccgcccattgtcagttcctgttaaagccatgttgaatatatctgaaag

SEQ ID NO: 370549 - DNA, 87 bp, Homo sapiens
gagctgcgggtgcggcacctggaggaggagaaccgaggaagagagacatcatgcagaatattgtacagattttggaatcggtacagt

SEQ ID NO: 370550 - DNA, 98 bp, Homo sapiens
tgggagcgagcgcagcaaagcgcccagcctgccgcctcgctgtccctgcggcttctggggacagatttgaccagttttgggccatcaatcggaaactc

SEQ ID NO: 370551 - DNA, 98 bp, Homo sapiens
aattccttatggatctctgagaaggcgcagcgttgaaaggcatcatcagcatcatgctattacaatcccaaaccatgggggtttctcacagctttaca

SEQ ID NO: 370552 - DNA, 98 bp, Homo sapiens
ggagaggagtctccaccaggactgaccgctgccgcccagcacgtccaggactttttttatgaagacatggagtccttgacgcagatgcttagggcctt

SEQ ID NO: 370553 - DNA, 100 bp, Homo sapiens
agggcggcgggactgcactcgagtgtccagacctgctcgatggtgctttgaagaagagtctcacagccaagcaggtccaggcggatttcataactctggg

SEQ ID NO: 370554 - DNA, 75 bp, Homo sapiens
ccttgttatcagtgatggctcttctctggaagatcttgtggagaagagcatctttctcgtggcccacaggaaaga

SEQ ID NO: 370555 - DNA, 100 bp, Homo sapiens
ctttactgggggatttgcctcagatggagttacaggtttcccaacctctttcccccactgaagccggagacggtggcccggaggacagtggaagctgtgc

SEQ ID NO: 370556 - DNA, 75 bp, Homo sapiens
tggcaaacagtgtttgcctctggttcagctcatacaacagcttcttaggaagcagtatatctcaactcagttttg

SEQ ID NO: 370557 - DNA, 97 bp, Homo sapiens
tacggggtgctgtcacgctgcctttggcagcctaccagcactacatcctggccaaggtgtgatgaatgcagactctgctaccattttggctgtttgg

SEQ ID NO: 370558 - DNA, 98 bp, Homo sapiens
ttgctgtggtcctgggtgtcatttggggagttttgccattacgagggttcttgggaatagcaggggaatcggatctcttcctgctcgacagccgtacc

SEQ ID NO: 370559 - DNA, 75 bp, Homo sapiens
ctggggcctggaccagcctcttctgaaacactgggatggcgttcaggaagtggcttatattcactcaaaccagaa

SEQ ID NO: 370560 - DNA, 75 bp, Homo sapiens
atggccgccgcgaggccgggaaggtgaagggataagaagcatgtagactgggtcaaagcttatttaagtatatgg

SEQ ID NO: 370561 - DNA, 98 bp, Homo sapiens
tttgactactggggccagggaaccctggtcaccgtctcctcaggggccggtgagcccaacttcgatggcctggagagtaatccatacagaagccggaa

SEQ ID NO: 370562 - DNA, 90 bp, Homo sapiens
atttgaagcttcatgacaacccccttacagatgagaataaagaacacgaagctgatacaggtggccagagaacacagacaaaaagtggac

SEQ ID NO: 370563 - DNA, 82 bp, Homo sapiens
gggccagggaaccctggtcaccgtctcctcaggttgggggccgtcccgctcctaaggcaggaagatggtggccgcaaagaag

SEQ ID NO: 370564 - DNA, 73 bp, Homo sapiens
tacaagatggacagggatgataattgggcctccaagacccagcatcagcggggtggaccttgataagttccgc

SEQ ID NO: 370565 - DNA, 117 bp, Homo sapiens
gctgggcgtcagccgccaccggcagcagcagcaccaccggacgggccaagaccagcttcaagtctccatggtaccagaaaacaacaacctcacagcacctgaacctcaagaagaggt

SEQ ID NO: 370566 - DNA, 75 bp, Homo sapiens
gatctggggatcttcgcactatcccaagaaacttgaagggtcaaagtgcaaagggcagcttttgatttttggggc

SEQ ID NO: 370567 - DNA, 83 bp, Homo sapiens
ctggaagcagaaggagtctttgaaaaagaacacaccacagccatcagcactggaatgcaaagaccagaacaaacagaaggaag

SEQ ID NO: 370568 - DNA, 100 bp, Homo sapiens
agtctgccgataaccagcctgagacctgtgaaagactcgatgaagatgcagcttttgaaaagaccaggatgaaagagcagctgagctcagcagggagcag

SEQ ID NO: 370569 - DNA, 80 bp, Homo sapiens
aacgctctcatccggaggcaggaccagctgcagctgctgagatgttacagcccagatagctcttcagcctgcactgaagt

SEQ ID NO: 370570 - DNA, 100 bp, Homo sapiens
gtttcttgtaaccattttaaacaaagccgtctgtagaggatcctttccccattctattcaaagtgtgattagagctgggcttggtggcttgcatctacag

SEQ ID NO: 370571 - DNA, 75 bp, Homo sapiens
gcaagaacgggaacaaaactctgttggattggatgctgctggcaagacaaccattctgtataaactgaagttagg

SEQ ID NO: 370572 - DNA, 101 bp, Homo sapiens
ccgcttgtcagtgtgatgaagattggcacccagactcggtgaaatacctggagtgctcagctctcacccagagaggcctgaaaaccgtgttcgacgaggcc

SEQ ID NO: 370573 - DNA, 74 bp, Homo sapiens
aattttccaattctatccctcagtcccagacagatgtttcagaaagaacaagtggatcctcttcagatgaaatt

SEQ ID NO: 370574 - DNA, 82 bp, Homo sapiens
cccgcttcctggaatggcaagcgcagcaacaacagagagcacgtggtggaaatgagttctcaacagtttcctcggttaggag

SEQ ID NO: 370575 - DNA, 75 bp, Homo sapiens
acaaaaacggcccttggatgatggaggtgaatcaggtctaggaaaatcgactctcataaacagcctattcctaac

SEQ ID NO: 370576 - DNA, 90 bp, Homo sapiens
ccatatttccatcagatgggggtccgcgggtttgggaggagtatgccaaccagcatggccctggacaggactgctctacactgggcctgt

SEQ ID NO: 370577 - DNA, 100 bp, Homo sapiens
aggcagcggccgcgcggcgctggactggagcagaaccccaggactgcgcccccgggagcgggcgcccagagattgagaggatccagaatccagatctctg

SEQ ID NO: 370578 - DNA, 74 bp, Homo sapiens
gcagatggaaaatacgtcttagttgctggaaaaggatgcgcctccacttagcaaggctgggcaggatgtggttc

SEQ ID NO: 370579 - DNA, 100 bp, Homo sapiens
ctcccgcaggatcccgccattgttcaggatgtctccccgttcaatgttgtggcctggcacgggaattatacaccctacaagtacaacctgaagaatttca

SEQ ID NO: 370580 - DNA, 100 bp, Homo sapiens
cttgggtcctccgagagcagcagcgagatatgaatcaggttcttgatgcctatgaaaataagaagccattttatctgtacacgggccggggcccctcttc

SEQ ID NO: 370581 - DNA, 78 bp, Homo sapiens
ttttaactctactgcaaggggtccatcagggtgctgggtttcaggacagaccctgatgctcccataagacagaaaatg

SEQ ID NO: 370582 - DNA, 75 bp, Homo sapiens
ttatgatctacctaccaatcgtgaaaactatattcacagctgtctttagccaaagcctgtgcaaatgcaaaccag

SEQ ID NO: 370583 - DNA, 92 bp, Homo sapiens
atgacgaaaacatgtactacagccagtcttctatgtttccacatcggtcagaaaaagatatttggagcaagaggtggtggtggccttccccc

SEQ ID NO: 370584 - DNA, 90 bp, Homo sapiens
ccttcccagtagctggaactacaggaattacatgaacgacagccttcgcaccgacgtcttcgtgcggttccagccagagagcatcgcctg

SEQ ID NO: 370585 - DNA, 82 bp, Homo sapiens
cccgcgaccgtccgccagtcgtcccgagacggcgggcgctaacaccaccgacaaggagctagaggttctctccttgcacaac

SEQ ID NO: 370586 - DNA, 75 bp, Homo sapiens
tgatgctggagaccttgacacttatatcctccctgggttttctacagcctctgctgtccccctggccaaaacaga

SEQ ID NO: 370587 - DNA, 110 bp, Homo sapiens
gtgcgagtccatagctgaagaggagcgccagatggtggaggaatacacttatttatgaatgggaatgtaagacggacttagatattgcatacaaatttggaaaaactgtg

SEQ ID NO: 370588 - DNA, 100 bp, Homo sapiens
atccgaggtgcctttctccaaaagtgtcctgttggataaacgttttcgagctgagtgtaagaattatggcgtcatcattccgtatccaccgtccaatcgc

SEQ ID NO: 370589 - DNA, 100 bp, Homo sapiens
catccctggaggagacctggcagcaggtaaacactacacgtgaagagtggtgaaagggaacattgattactgaagtgccctggagagggaaagcactggt

SEQ ID NO: 370590 - DNA, 101 bp, Homo sapiens
tgacaaactgctgagcctgccaatgcaacagccacggaagattaagcagatgtaaagacgaccgtggtttaccctgccacagagaaacacctgcagaagta

SEQ ID NO: 370591 - DNA, 75 bp, Homo sapiens
ggcaggaccagctgcagctgctgcatcacgttgggtggtttccatttagaccgaggccggttcagaacttcccaa

SEQ ID NO: 370592 - DNA, 82 bp, Homo sapiens
gcttcatatgcaccagaaggagatgaagtgttcagaatcaagtggatgaagttattgatgtcatgcaagaaaatattacaaa

SEQ ID NO: 370593 - DNA, 83 bp, Homo sapiens
cacagagtgcaagacgctgagcaatgcagacttaattcagtgcacaaatgagatgaatgtgaacatcccacagttggcagaca

SEQ ID NO: 370594 - DNA, 101 bp, Homo sapiens
cagacaccgcctacaggagtatgatgcaaggactccctggaggaaaagcggaagcggcagcggtctgaacgcctggaacggattttccaacttagtgaggc

SEQ ID NO: 370595 - DNA, 112 bp, Homo sapiens
ctgtcaaagccatcatatatcagtatatggaagagggcactctggccgtgctggccctgcagctggcaaggcagatccacttccaggcatccctgccagcaggacctcagcg

SEQ ID NO: 370596 - DNA, 50 bp, Homo sapiens
aacatttagctgggatgaaagacagcaagtgtccttgaagtagaaaagtc

SEQ ID NO: 370597 - DNA, 75 bp, Homo sapiens
gttcaattgaagattttaaggatcacattccaagggaaactgatatgaagttcatcaatggtgctaaggaaattt

SEQ ID NO: 370598 - DNA, 83 bp, Homo sapiens
cagatgtcgaacctgctgcttttctcgctatgctgaaagatagaatctcactatgttgaccaggctggtcttgaactcttggc

SEQ ID NO: 370599 - DNA, 89 bp, Homo sapiens
atttgtaaaactgctggaccagctacacaactcactgaggatcgacctctctacatacagggaggaggtgcgccagtctgtaactcctg

SEQ ID NO: 370600 - DNA, 100 bp, Homo sapiens
cccggtttccctcggcgtgctactgtgcgctcgatccagcaccatggggaagcgggacaatcgggtggtaaaaatgtctccatcgtatcatcagtccaaa

SEQ ID NO: 370601 - DNA, 75 bp, Homo sapiens
ctaaacttgatccaaagacaatgaaggagtctcatagaagagaaagtcaatgaaattaaagaagacagtcattgt

SEQ ID NO: 370602 - DNA, 90 bp, Homo sapiens
agaacatgccaagtggtttccaaggtgatactatcaaccaaagcaccctgccctcacagcagaaccgtttcccagactaccttgaagcca

SEQ ID NO: 370603 - DNA, 89 bp, Homo sapiens
aagttactgccgcgccaccgagtccggaccggagactttggggcctaactagagaaactccagaaaatcttgccaaacttctgaccagg

SEQ ID NO: 370604 - DNA, 83 bp, Homo sapiens
tccagcccggcccggcagcgacatggaagacatgaagagtatttctggagaagaatcatcccatggagtgattatgacaaggc

SEQ ID NO: 370605 - DNA, 98 bp, Homo sapiens
cacgctacgggcctttacctgcgacgacctgttccgcttcaacaacatgttatgaagacagtatggagtttccagaccatagtagacatttgctacag

SEQ ID NO: 370606 - DNA, 83 bp, Homo sapiens
aacatctgcaagtttttagtcttgctcatcccactcttccttttactaggctgcaaattattatacaaacaggattttgccag

SEQ ID NO: 370607 - DNA, 75 bp, Homo sapiens
gatcagccttgcaaataatcacagattagctaaccacaatggacactgccagccatagccttgttcttctccagc

SEQ ID NO: 370608 - DNA, 82 bp, Homo sapiens
gcctccaggccaagagggatccttcacccgtgtctgcaattctgtggtgttcttggtcacacatttatggagtttctgaagg

SEQ ID NO: 370609 - DNA, 100 bp, Homo sapiens
cgaaggggtcggtgtcttccagaaaaagcttgtggtgaaggggggcaaaaaaaagaagcaagttctgaagttcactcttgattgcacccaccctgtagaa

SEQ ID NO: 370610 - DNA, 100 bp, Homo sapiens
catctctaggtaccatccctgacctggtcctcatgctgccgaggctgttgctgttgatctgtggtacgcagattttctgaggcattcttttgttttgagc

SEQ ID NO: 370611 - DNA, 48 bp, Homo sapiens
ctactatgagggtcgagcagagacacgaagatcgattgagaagttatt

SEQ ID NO: 370612 - DNA, 96 bp, Homo sapiens
ttttgtggaattcgtgaaacttgtccgtgccaaatttcctgaacacaccattatggcctgtgttgcctactgcttcatcaccatcccctccctggc

SEQ ID NO: 370613 - DNA, 100 bp, Homo sapiens
ccaggtcaccagcatccactggagctacaagaggactttgaacatgtcggggatcgccctcagcagactcgcccaggagaggaaagcatggaggaaagac

SEQ ID NO: 370614 - DNA, 75 bp, Homo sapiens
ccaagaggcccagagacatgctgaaacatcgaagaagaaaaagtcagcactttttgaagtgtctgaggttatacc

SEQ ID NO: 370615 - DNA, 95 bp, Homo sapiens
ggtacggaaccggcgccgcgcttgctgctggtaacagggccttgcctagtgggccttccttcccagggcgccatgttttggaagtttgacctgca

SEQ ID NO: 370616 - DNA, 74 bp, Homo sapiens
agacaaaggtagaaaggatggtggaggactacctggcaagtggttatcagggtgttcatttagaagaaagcaac

SEQ ID NO: 370617 - DNA, 101 bp, Homo sapiens
gcacacccaacgcacccctgcactactatgagaccgttcgcatggcagccatcaaagagtgttgatgggaaccattttcagcatcctgctggtgactgtca

SEQ ID NO: 370618 - DNA, 83 bp, Homo sapiens
cagaggcatgggtgtcgaggactgccttatgctgcggaccgagacagtgcagaagctgtgcccaggggggcagctcccattcc

SEQ ID NO: 370619 - DNA, 100 bp, Homo sapiens
ctgagcgcaacacttctccgagccagcgagccagcgagccgccgacccgccgagcaaaatgggaagcagagactttcaaggaacaaggaaatgcatacta

SEQ ID NO: 370620 - DNA, 101 bp, Homo sapiens
ttcacggaagagtaccagctcttcgaggaattgggcaagttgtaaaggcatatgatcgtgtggagcaagaatgggttgccattaaaataataaagaacaag

SEQ ID NO: 370621 - DNA, 99 bp, Homo sapiens
cggattggcgctgaggtggcccgtggggcagaaagctctgggtgtgcggcagtaccatgtggcctcagtcctgtgccaacgggccaaggtggcgatgag

SEQ ID NO: 370622 - DNA, 90 bp, Homo sapiens
gaccccagacaccggagactgggaaatggaaaatcctgccttgcttcgttgggcctatgcaagaacaataaatgtctatcctaatttcag

SEQ ID NO: 370623 - DNA, 98 bp, Homo sapiens
gcaccttccgctgtccgccgctgcagccgcctcctcctccagaggtaccaatcttgggaaaaagaagcaacacatttgtcatataccaggatgtggta

SEQ ID NO: 370624 - DNA, 74 bp, Homo sapiens
gaaccccgacctcagagaagatggatgaggttggatccatgccgtctacacccctgtagactctttggtgttcg

SEQ ID NO: 370625 - DNA, 75 bp, Homo sapiens
gaaaatgcgcgtcccgggcgcggacagagctgctgcctcggtgtggggaagtagagtctgtgggaaaggtggtac

SEQ ID NO: 370626 - DNA, 100 bp, Homo sapiens
ggccctcacaccttcctcagaatggacccccaggaaatgggtcctgatgaatatgaagagatggaagaagaggaggaggaggaagaggaggaagacgagg

SEQ ID NO: 370627 - DNA, 100 bp, Homo sapiens
gcaaacgaacctggagagagccaaagtaccatagggcaacgggcatgaggaggtagttgcatgcgcctgggatggacagacatatatcattgatcacaac

SEQ ID NO: 370628 - DNA, 90 bp, Homo sapiens
agcaccccttttaccactgcctggttgcagaagtgccgaaagagcactggactccggaagtaccacttccgctgtcacggtaaagtccgc

SEQ ID NO: 370629 - DNA, 89 bp, Homo sapiens
agggaagcctggaggaggggaggagggccactgggctcccagcagcccaggttcagattgtagatgtaaatggcaatgttctacctcct

SEQ ID NO: 370630 - DNA, 96 bp, Homo sapiens
taaagctgttttggaactgtcaggtacctcaaagcgtctctaattaacagaagatggcaaagcccagccacagcagctatgtccttcagcagctaa

SEQ ID NO: 370631 - DNA, 50 bp, Homo sapiens
ggggccgtcccagttcgcaatgagaaagattctggatgaaattgaagaac

SEQ ID NO: 370632 - DNA, 88 bp, Homo sapiens
tgccaaggaaaaactggagagcttcatcaaaaatagtgatagctttgataaatgacagtcgtctagaggagctcaaagccactctgcc

SEQ ID NO: 370633 - DNA, 100 bp, Homo sapiens
caagaatcgtaggccaggctgatggagagctgaacattactcttccagaagagagtgaccctccacgaaaaggagaatcttatgaatgcagagaaccttg

SEQ ID NO: 370634 - DNA, 100 bp, Homo sapiens
ctctgtggggtgacaaatgaccactggcagcctatgctcacattgtccctgtgtctagcagtttcagagccccccgaatccaagcccaacttcacccctc

SEQ ID NO: 370635 - DNA, 96 bp, Homo sapiens
gcgacttgttaatcaaccggtcaggctggacgtgcacgcagcccggcgggaggataaagaccaccacggtgactctgacatcattagaagcatgcc

SEQ ID NO: 370636 - DNA, 96 bp, Homo sapiens
agcatccccaaggactcgctccggatggccatcatggtgcagctacgtggtgaacatgggtctgattgacaaactgtgtgcctgcttcctctcggt

SEQ ID NO: 370637 - DNA, 88 bp, Homo sapiens
tcaatgacaaaaagtttgtcattaaacccatcgacaagaaggcacctctgcagaatcctactggatgtccacttggatgtcctgaagc

SEQ ID NO: 370638 - DNA, 95 bp, Homo sapiens
agaaaaaagcaagagagactattttacacagttggtattagcatgtttgtattataatgactatggagatatcatcaaagaaacaatgagtaaaa

SEQ ID NO: 370639 - DNA, 49 bp, Homo sapiens
gcgcggtcgagatcgccatgcctacccgcaggtgacagcagggacatgt

SEQ ID NO: 370640 - DNA, 98 bp, Homo sapiens
tttgacctgactgtccgcacgcagaagcagggggatgacagctctgaatgggggaactccttcttctggtgcactttacaggtccccgatgaaccaag

SEQ ID NO: 370641 - DNA, 51 bp, Homo sapiens
agggaggttatgaggcttaataaagaaggtgctggagaatctggtaaaagc

SEQ ID NO: 370642 - DNA, 100 bp, Homo sapiens
ggctgtggatgtggcagaataccatctgagcggacacattcagctaacgtattttagcaggtggagtgaggttgaagattcctgtgacagcgatgccata

SEQ ID NO: 370643 - DNA, 74 bp, Homo sapiens
acgtgacctaaagctggagtattttgagattggagaattaagggccacgcctggctgaaagatgacgaagcgac

SEQ ID NO: 370644 - DNA, 100 bp, Homo sapiens
ccgccttccaggtgacccagggaacgggaccggagcttcatgcctgcaaagagcttggttctacagccattgggatccagacatcagagggtgtgtgcct

SEQ ID NO: 370645 - DNA, 80 bp, Homo sapiens
actctggtactgtgacctacagcaggaatccagtggcatcgcggaattaactcctgaggagagagcccaaaagattgcca

SEQ ID NO: 370646 - DNA, 90 bp, Homo sapiens
cttcactgctctgctgtctcctgcaagaactggctcaagaaatttgcctcgaaaaccaaaggaggaagatgactatctctttgatgatcc

SEQ ID NO: 370647 - DNA, 109 bp, Homo sapiens
ccctgcagtcgcctccaacacccgctgctgcccgcccgctgcctgcctgcctggcatctctctctcccgagtgtgaacatggctacgcctcttcattcccgtccatgcc

SEQ ID NO: 370648 - DNA, 90 bp, Homo sapiens
ccggagtccgactcgctacgcgggtcttgcgagatatctggccgcctctgccgcagctggagttgtgtactgtcagctatggaaaagtca

SEQ ID NO: 370649 - DNA, 97 bp, Homo sapiens
tcgacttctgaaacatccaaacatcgtgtctgcacatcaccgaacgatgagagaggactacagcgacaaagtgaaagccagccactggagtcgcagc

SEQ ID NO: 370650 - DNA, 98 bp, Homo sapiens
cagaatgcaatggctgtaccaagactcaggttttgggtctagtaatactggttctgtgtttggtcaagcagccagtactggtggaatagtctttggcc

SEQ ID NO: 370651 - DNA, 74 bp, Homo sapiens
aagaaaactgaaattaggaactggggaaatgaacggagcgtgctttggacaccatgaattttgatgttataaag

SEQ ID NO: 370652 - DNA, 90 bp, Homo sapiens
aaaaacaaagcaaaaccagttaccactaatcttaagaaggactcgctgattcttgagaagagtcaaaactggagctctcaaaaaatggac

SEQ ID NO: 370653 - DNA, 50 bp, Homo sapiens
ggaaaatggagcccttcaccaatgtggctggcacatgtgtatcaatccca

SEQ ID NO: 370654 - DNA, 75 bp, Homo sapiens
ccgcagatgttgtcaaggtggcctaccaggaggccaggggtgtcgccatgagcactgcagtttcctcctgaaggc

SEQ ID NO: 370655 - DNA, 100 bp, Homo sapiens
aataaaggccatggcgccagcagaaatcctgaacgggaaggagatctccgcgaatcctctatgtccccaggggagctgaagctgactgtgtctccttccc

SEQ ID NO: 370656 - DNA, 87 bp, Homo sapiens
ttagatatctgccagatgaaaaagtttggtgaggattcatcaacctccagtatgatgtctgtgaactttgatgttcaatcaaatcag

SEQ ID NO: 370657 - DNA, 82 bp, Homo sapiens
gtcactgcagcgtttgctttgcgttcagatgcggcagctcagcgcagctggctgcccttgagatggagttgctgcctctttg

SEQ ID NO: 370658 - DNA, 75 bp, Homo sapiens
ccgaggtagaggcagtggcgcttgagttggtcgggggcagcggcaggattgccaaggatccaagatttgaacgat

SEQ ID NO: 370659 - DNA, 100 bp, Homo sapiens
taagactccacttcctccagaattagctgatgttcaggcataaggttgtttacaggccgtggaggatatagaggtcgtggaggctttcaagggagaggtg

SEQ ID NO: 370660 - DNA, 51 bp, Homo sapiens
ggacgtggcaaggacctggagcgttgaagtgtcacaacaaatgtaccaaag

SEQ ID NO: 370661 - DNA, 100 bp, Homo sapiens
ggcctataaaatgcttcaagtagtcctgtgctcaacattgcttatcggtcagatgtaccaacagtaccagcaacaggccggctatggtgcacagcagccg

SEQ ID NO: 370662 - DNA, 87 bp, Homo sapiens
ctcctaaacagacaggctacggatggatatgtcaggaatgtgattcttcatcttccaagcggacaaggcaaaatctcagcaagttcg

SEQ ID NO: 370663 - DNA, 78 bp, Homo sapiens
tggccttgtgggattggctgtgtgcaatactcctcacgaggaaaatgtctaatcaacaggagaagtatgaagctcaga

SEQ ID NO: 370664 - DNA, 74 bp, Homo sapiens
tcggagcttatggtgttgacggacctgttatgcaatggtctctgcaagatggtttattcttgaattggaccttt

SEQ ID NO: 370665 - DNA, 100 bp, Homo sapiens
aagctatgcatcggatttatgatgcacaggttggtggagtccacattcaaactggtattgactgcgaacctctacttttaaatgttcttcatctagacac

SEQ ID NO: 370666 - DNA, 76 bp, Homo sapiens
atcccggggctcaagtggcttaacaaggaggcactggctacaattaggcttctcgacgtcctgtgcgaaatgactg

SEQ ID NO: 370667 - DNA, 75 bp, Homo sapiens
cttcgggccccggccccgcgcgccccggcccggccccgcgagacaatgcagatcttcgtgaagactctgactggt

SEQ ID NO: 370668 - DNA, 75 bp, Homo sapiens
tgtcagtgcacaaaatggcgccctacagcctactggtgactcggctgcagacagggtcttactttgtcacccaag

SEQ ID NO: 370669 - DNA, 75 bp, Homo sapiens
atgaagaatataacctggaccaagagtctttagtagctttcccaaaactcaaacggcaagttttgttgtatgaac

SEQ ID NO: 370670 - DNA, 75 bp, Homo sapiens
ccagaaaggatttcatccacacagcaaggatccacctctgttctgtagagtcacttctgatagaaccatgctact

SEQ ID NO: 370671 - DNA, 95 bp, Homo sapiens
ggggaaactaaaaacgcatctatctaacgtttaccctagcaaaccagcaccagttggagatgccaggacattactctcatctggctgccttctat

SEQ ID NO: 370672 - DNA, 82 bp, Homo sapiens
taagcaagatggtaaaaatctggtgtcatttacaggaaaacaaggtgaaatgagagaaatgcaacagctttcaggtggacag

SEQ ID NO: 370673 - DNA, 50 bp, Homo sapiens
ggatgggatccagctgttagtcggggaggttcccctgaaggatgctaagg

SEQ ID NO: 370674 - DNA, 80 bp, Homo sapiens
atgccctcacaccagacctacggagggagctggaaattcctgacgttcattgatctgacctgcctagagctggaacgtta

SEQ ID NO: 370675 - DNA, 100 bp, Homo sapiens
ccggaaccactctttgtgccgcagcttcgcaggagctggatggcctgttggaaatcaaccgcatgacccacaagctgctgagccggtacctgacgctgga

SEQ ID NO: 370676 - DNA, 50 bp, Homo sapiens
ggtcttgaaacacaaatggtttttggataaaagaatcagagtgtctcaac

SEQ ID NO: 370677 - DNA, 97 bp, Homo sapiens
cccagaccagcctgcactgtgccttaacagaaggtcttgagattctaagtgggaatcatttcagtatttagcatttacgtgtggcttaatcagaggt

SEQ ID NO: 370678 - DNA, 75 bp, Homo sapiens
atcaagcgcaagcacaccctaccgaattacaagatcaggagcagggaaaacctgaggtgcttggaggtccagaca

SEQ ID NO: 370679 - DNA, 74 bp, Homo sapiens
aagaaaaatttcagaaccatcacaaactgtggtgggggaaaagtagctccagctcaaccatctgaggaaggacc

SEQ ID NO: 370680 - DNA, 98 bp, Homo sapiens
ggagatatgttgtgaaagaagcagtagcagtgaatctacagggacgccatcgaatccgggcatgaactacttggaggaccgtcgcttggtgcaccgcg

SEQ ID NO: 370681 - DNA, 101 bp, Homo sapiens
tgaaggacctgaaaatcatatagagaaagacagatggaagtctttaaggttgacatcatggacatatgtgagtccatcctggagaggaagcggcatgacag

SEQ ID NO: 370682 - DNA, 75 bp, Homo sapiens
agaatttttccaagttacagctacctagattagtgacaagagctggggttaggatccggttggactctgacatcg

SEQ ID NO: 370683 - DNA, 100 bp, Homo sapiens
aaagagaggatttgcttttgtaacttttgatgatcatgatacagttgataaaattgttgaggccatgtggaagtgttacatcaccttttgcttggaaaga

SEQ ID NO: 370684 - DNA, 101 bp, Homo sapiens
ggaactttcccagtccccgaggcggatccggtgttgcatccttggagcgagctgagagctcgagataggtgatcttcagctttgcaaactggatgaactag

SEQ ID NO: 370685 - DNA, 75 bp, Homo sapiens
gcgagttggtcggtcccggggtcacccgctacgggaagcaggcctcgccacagatattgatgatgttaagaagtt

SEQ ID NO: 370686 - DNA, 142 bp, Homo sapiens
cagcaatgaaatcctgctttcttttcctcagaactactatattcagtggctaaatggctccctgattcatggaaagcatccaacggagtggaagcagcatgaaggaagagccgctgggcagcggcatgaacgcggtgcggac

SEQ ID NO: 370687 - DNA, 87 bp, Homo sapiens
agaagggaaggcgcgagtgaggaaaggaggtactgtagcctactcagcaggaagacaatgaggatgaagacctttatgatgatccac

SEQ ID NO: 370688 - DNA, 51 bp, Homo sapiens
tactctggggcttcctgctccagctgtctaaagaaggtgcatttattgtca

SEQ ID NO: 370689 - DNA, 100 bp, Homo sapiens
caggaggctgtgcgggccccgctccgcttcgaatggatgagcctgaggtaaccattgaggggtttgatggcaactggtacctgcagcggatggacgtgaa

SEQ ID NO: 370690 - DNA, 83 bp, Homo sapiens
ggtggactccttcggcagtccacccaccgccgccgcctcccaggtacttttacccatttccagttccacctttactttatcaa

SEQ ID NO: 370691 - DNA, 82 bp, Homo sapiens
ctgaagagggctccaggcatccggtcctggtccctgctggttgggaacggcaggagcagctgatgggatatcggaagagagg

SEQ ID NO: 370692 - DNA, 75 bp, Homo sapiens
ggatgggggaccacaagatcctcatcgacagatgagcagcaccagcagtaagagggctccgaccacggcaaccca

SEQ ID NO: 370693 - DNA, 100 bp, Homo sapiens
cctcccgcctgccccctcagccctgtggctgggggcagagctcaggtgtgtggaggtcattgcaaaggaaggacaaaacctgaaagagctatatttggtg

SEQ ID NO: 370694 - DNA, 120 bp, Homo sapiens
gagtctccgcgtcccgctcgctgggagagaggtacctctccttttccctctccctttccctaagaaatgcactcggtgatggaaagagagccactattctgaagaacacttggccaaagg

SEQ ID NO: 370695 - DNA, 74 bp, Homo sapiens
gcgaattgaacacatcttacctataaacagtgaagtcttaagtgatgcaaatgtcaaaactggaccaatggggc

SEQ ID NO: 370696 - DNA, 99 bp, Homo sapiens
gcctcgtctttgcaccggccttcctcatgttgttcttcctcatcatgaactttctggaggctcccctgcaaactttgctgtgtacactgccctggtgga

SEQ ID NO: 370697 - DNA, 88 bp, Homo sapiens
gaaagaccgatatctgctcctctgccaggcccagctgctggtctatgagaatgagataaaataccatgaggagtttgagaagagccgc

SEQ ID NO: 370698 - DNA, 99 bp, Homo sapiens
cttcacacagctgcttccattggccagtatgaagtggtgaaggagtgtgtgcagcggacagagcgggatgccaccagcttgtccaaagggaagttccag

SEQ ID NO: 370699 - DNA, 96 bp, Homo sapiens
tgctgtcgcctgcagctgctcgcctgtctccgtcggaagggagcccaagctttgcagagaaccgggctgtgggtcggcccaaggggaagctgggcc

SEQ ID NO: 370700 - DNA, 96 bp, Homo sapiens
gcaatgggcggcccgctctgcacgcttgccagcgcggtggaagctgttttaggttatgtgaaagagatgtttcctcatctctaaggcttaccagaa

SEQ ID NO: 370701 - DNA, 100 bp, Homo sapiens
tatcaatgttctgccatgttgagcctgaacaagtgggagtcaatcattttgacaagtctcctgaaaggaacagctagcaggaactgaaacctttttccat

SEQ ID NO: 370702 - DNA, 83 bp, Homo sapiens
gggaccgcctgctgcactttgggttcaaggcgacagtgtttgagaagtcccccctgcgggtgaagaacttcgggatctggctg

SEQ ID NO: 370703 - DNA, 100 bp, Homo sapiens
gccaagaggaggacagttcgctacacagcaatgcatcgagtataacaagaggattgcctgatccagccaagatgcagagcacttctaatcatctgtggct

SEQ ID NO: 370704 - DNA, 50 bp, Homo sapiens
tcgaaccttctagttgcttattgcagtgttatagttttgccgctggactc

SEQ ID NO: 370705 - DNA, 83 bp, Homo sapiens
ccctggagcctcagttggaagcagccgatccagcctgcggagcctgtggggcaggtatcagcagatgttgcacacaaacttgg

SEQ ID NO: 370706 - DNA, 100 bp, Homo sapiens
tgggatgtgaagtagatgataaagatgatgatatccttctcaaccttgtgggatgtgaaaactctgttactgaagacagcagtgaagaggcactggaagg

SEQ ID NO: 370707 - DNA, 100 bp, Homo sapiens
tcccaagtggctgggattacaggacccttcaaagttgtacaagaaagcagatgatgttgcagccattgaatgccagtctgaagaagtcatccgtcttcat

SEQ ID NO: 370708 - DNA, 99 bp, Homo sapiens
tcctgagtagctgggactgcagttcggatggagatggcgagttctgctggctcctggctctctggctgcctcatccctctcgtcttcctccggctgtct

SEQ ID NO: 370709 - DNA, 119 bp, Homo sapiens
gtttggaaagagttgctgttagcaaccatcggggaacagttcacagactgtgccgcagcagtgtcccagaagcttttgttgacaattccagtttccgaacaaaacatttcggcaatggt

SEQ ID NO: 370710 - DNA, 75 bp, Homo sapiens
ggaacatctggaggctgggaaatggtggagctgatcagaataatgttcagcatcaaccccctggagaacctgaag

SEQ ID NO: 370711 - DNA, 75 bp, Homo sapiens
atctccatcacccaccaacaacaccacaataatccacagccaagactaaacttcagtggctctgtgaggaactga

SEQ ID NO: 370712 - DNA, 50 bp, Homo sapiens
gttcaactgatgaaaacactggatggagggtacagagtctgcctacatca

SEQ ID NO: 370713 - DNA, 83 bp, Homo sapiens
ggctaccatggtctacaagactctcttcgctctttgcatcttaactgcagacctgcgtcatgcgggcctgggaccgcagcaag

SEQ ID NO: 370714 - DNA, 96 bp, Homo sapiens
cctaaagagactgattctggagaaccatgcagccaagattccagctaagctgtatgcaggagctattcttgaagtttgtggatgaaaattgggaag

SEQ ID NO: 370715 - DNA, 100 bp, Homo sapiens
taccaatctctctgtctttaaaagatgaggtgacttggtgattttcctggaaaattataggcagaggtggaggagacactgaagcgactgcagagccaga

SEQ ID NO: 370716 - DNA, 90 bp, Homo sapiens
gaagagaaaaagagaagatgaagaaacccagcttgatatgttgctggttttccaagaattgatataaagcgggaagaacagaaaacagca

SEQ ID NO: 370717 - DNA, 75 bp, Homo sapiens
tgggcagcatccagcacctgaagaaccgatatagcctccatcctaatccctctgctgttgctgctgctgctggtt

SEQ ID NO: 370718 - DNA, 96 bp, Homo sapiens
gttgtgagattcccttgcaaatttacatacgagaatggcttgtgaaatcatgcctctgcaaaggccaggtgtggtgtcttacacctgtaatcccag

SEQ ID NO: 370719 - DNA, 90 bp, Homo sapiens
aatacactcgtgaatacaggccatttcctgtacctacagccacccgctttgcccagcaggaggctgaaatgttcaaacgctacaatggaa

SEQ ID NO: 370720 - DNA, 100 bp, Homo sapiens
cgctccgtggccttagctgtgctcgcgctactctctctttctggcctggaggctatccagctcttcccacacaggttgagagaggaggggatccaattgc

SEQ ID NO: 370721 - DNA, 100 bp, Homo sapiens
ggaccacatagtccatcgaagaagagtccttggaacaagcaactggctattgaaaagagagaagaagaaggaggttcctgctgtgccagaaacccttaag

SEQ ID NO: 370722 - DNA, 82 bp, Homo sapiens
gagtatctggtgaaatggagaggctggtcgcccaaattgctgacagaactggaatctcctgcttggtggccctttagctcca

SEQ ID NO: 370723 - DNA, 73 bp, Homo sapiens
aagaccatgcgccggaacaccattcttcgccaggccaggaatgcagctgtgtcaatgttgaaacaagactata

SEQ ID NO: 370724 - DNA, 90 bp, Homo sapiens
catctgatgcacgttccatccggcgctcagctgggcttgaggtgaaggatctaaaacctgaaaagaggccaaatgattcctcaaaaccac

SEQ ID NO: 370725 - DNA, 97 bp, Homo sapiens
atctttgctcttccatccgcctttgatcgtcttcctcttcagccatccagattctacaagggggttgctcctctctggatgagacagataccataca

SEQ ID NO: 370726 - DNA, 83 bp, Homo sapiens
taggccaaccagagattcatctttcatgcagtgacatgttgataaaaaatgatggtctcctctgagcctccggcctccataag

SEQ ID NO: 370727 - DNA, 83 bp, Homo sapiens
cccaggagaagcatttacaataagaagagaagatggacagtttcagtgcattacagggaacttatagaaatgctggcaatttc

SEQ ID NO: 370728 - DNA, 74 bp, Homo sapiens
ttgaaagtacaattctattgcacatcaatgatatcatcccaggaaatttggtgagcggcctccacctaaacgac

SEQ ID NO: 370729 - DNA, 75 bp, Homo sapiens
ctacgcctcctacgtttacctgtccatggagatgttgcagtaaagatcctaaaggttgtcgacccaaccccagag

SEQ ID NO: 370730 - DNA, 51 bp, Homo sapiens
attatgactatgaaaatggctttgcaattgaacctatctacaagacctctt

SEQ ID NO: 370731 - DNA, 100 bp, Homo sapiens
agtaattgagctgaaagctgaggatcggagcaagtttctggacgcacttatttccctcctgtcctagggtgctaagtgtggtggctcacacctgtaatct

SEQ ID NO: 370732 - DNA, 90 bp, Homo sapiens
cgaagtgctatccgtgcgagaacagctattccacgagaggatccgcgagtgtatttgccggtggtggtgtgcacattgagccccggtata

SEQ ID NO: 370733 - DNA, 152 bp, Homo sapiens
aactattaagcacccaaggaaagcacttaaaagtggaaagatgacggatgaaaagaatgaacactgtccttcaaaacgaaattctgcttggtcagaatcgtgatggcattgtgttcagcactgatgactattttcaccatcaagatgggtac

SEQ ID NO: 370734 - DNA, 75 bp, Homo sapiens
atttggacctgtggccagtgttgtcatggacaaggacaaggtatgatcgggtacggcatggccaagggtgctgtt

SEQ ID NO: 370735 - DNA, 82 bp, Homo sapiens
caccgctgccctcagctccgagtccagggcgagctgcagccgctccggcctccttgctgttcctgggatacgccacactcag

SEQ ID NO: 370736 - DNA, 90 bp, Homo sapiens
gttttccaaaaacttgtagaaggttgtgaaaaaactactaggatcacgcggcatgtattgaggcaacaggacctgtaccgaatcctgaag

SEQ ID NO: 370737 - DNA, 96 bp, Homo sapiens
gtgcaggaggaaggcatggactcggagattggctgcctcatccgcttctatgcaggatgttttgaataatttgggatcttgtgaactggatgaaga

SEQ ID NO: 370738 - DNA, 74 bp, Homo sapiens
acaagaaaagttagcaatgatggaaagtggggtgagagactatagcaagcagttccgccatggagtcatagttg

SEQ ID NO: 370739 - DNA, 100 bp, Homo sapiens
accgcagcggctgaactcgggtggccgctgggactcagaggtcatggcgagcacggtggtgaagtacctgagatgtgtcgtggaggccgaatgtttgcac

SEQ ID NO: 370740 - DNA, 100 bp, Homo sapiens
aagagatgcagcgctatgcggaggatgttggggccgtcaagacagtcattttgtttactcattcagccctgttgcaggtcccaataaactcttcataagg

SEQ ID NO: 370741 - DNA, 75 bp, Homo sapiens
aggaatcctaaccaaaccagccagcccactaccagaaggacaagaatccttcaagaaacaggaaaaaactcctaa

SEQ ID NO: 370742 - DNA, 50 bp, Homo sapiens
gccgccccattatgatgatgtcgaggctgcctctaagaatcaaacttcac

SEQ ID NO: 370743 - DNA, 50 bp, Homo sapiens
gtagaattcagctgaagggtgaggatctactccaagtgaccaacagcaaa

SEQ ID NO: 370744 - DNA, 100 bp, Homo sapiens
ctacttgtcagggaacaggaagaattcctaggggttgttatggagttgatggagagagtgactctattatgagttcagcttctgaaaactccactgaacc

SEQ ID NO: 370745 - DNA, 100 bp, Homo sapiens
ggtgtctgagtggatggggacctgcctgctgacgagttatttcctttgaggagggaggaattgagttacttcaggcccggatggatccaccgctgctgac

SEQ ID NO: 370746 - DNA, 75 bp, Homo sapiens
agtggtgaatcccctgtttgagaaaaggcctaagaattttggcattgagattcgtcagcgaactgcagctcaaag

SEQ ID NO: 370747 - DNA, 100 bp, Homo sapiens
gcccggtttccctcggcgtgctactgtgcgctcgatccagcaccatggggaagcgggacaatcgggtgtgccaggcttcccgtatccagcagccaccgcc

SEQ ID NO: 370748 - DNA, 75 bp, Homo sapiens
gccgccccgtcgtcgtctgccttcgcttcacggcgccgagccgcggtccgaggcagcagaagaagcctttgtaaa

SEQ ID NO: 370749 - DNA, 56 bp, Homo sapiens
acttcatctatgtggccccaggcatcgatctcatgttcttgtgtggcttcctgctt

SEQ ID NO: 370750 - DNA, 74 bp, Homo sapiens
acagaatggtccgagcatgcattgccattatctgtgaactaggtggaagccattatctactgatggaccgggtt

SEQ ID NO: 370751 - DNA, 100 bp, Homo sapiens
aaagttgaatgatgtatttgatcctgattctacccaagtacatatgatttcagctgcaatggcagtgtcgacttcttccactacaaaatctccagcgtcc

SEQ ID NO: 370752 - DNA, 90 bp, Homo sapiens
acgtcggggccgagctaacccggcctctggacaagaaaaagggagatttcattgccctggatcttggtgggtcttcctttcgaattctgc

SEQ ID NO: 370753 - DNA, 100 bp, Homo sapiens
agcacacgatcaacatggaggagtgccggctgcgggtgcaggtcctggtgcttgatggtcgaggccatctcctgggccgcctggcggccatcgtggctaa

SEQ ID NO: 370754 - DNA, 85 bp, Homo sapiens
acaaaagaagaagtatttggggagaatgactgaggagccattgatgtgtcttaacagagcgttccaaaaagaggactctccagct

SEQ ID NO: 370755 - DNA, 100 bp, Homo sapiens
tcatggagaagaaggccttgactacggaggggttgccaggttacaccggatgacatcaattgaaagagaagaaaaggagaaagtcaaaaaaaaagagaag

SEQ ID NO: 370756 - DNA, 75 bp, Homo sapiens
tgcaggtccagcccttggagctgcccatggtcaccaccatccaggtgatgttttttacaggctggtggataatga

SEQ ID NO: 370757 - DNA, 51 bp, Homo sapiens
aaggattccaagtaactcttatttgattcgggaacaaaatcgatatgactt

SEQ ID NO: 370758 - DNA, 80 bp, Homo sapiens
gaaaagctgccaagttgaaaatggacgagtaatcgcctgctttgattcattgaaagttattctcgttcaagttaatccag

SEQ ID NO: 370759 - DNA, 83 bp, Homo sapiens
gctttccagagggcagtgtagagaaactaatctggattcactccctctggttgatacccactcaaaaaggacacttctgatta

SEQ ID NO: 370760 - DNA, 50 bp, Homo sapiens
cagcagacttgcagggtttgatggaatactctgaagatagtaactccgag

SEQ ID NO: 370761 - DNA, 97 bp, Homo sapiens
agctgtagcgtatggtgctgctgtccaggctggtgtgctctctggtgatcaagatacaggtgtcctggtcaatgaaatcctcaatcacatgaagaga

SEQ ID NO: 370762 - DNA, 100 bp, Homo sapiens
ggaaaatgagagatatgcatatgaatggcagagatgcctggggagtgccctgaatcattatctcagctacttaaacaacctccgtgtccaagatgttttc

SEQ ID NO: 370763 - DNA, 100 bp, Homo sapiens
tgcattgactggaaacaatggcatttacagaaagagtcaacagcagtggcaacaggaatcatgggtaaagaaggaagacaggctgcaagaaacagtgact

SEQ ID NO: 370764 - DNA, 75 bp, Homo sapiens
gttcagtatgaagaaaaatttcagaaccatcacaaactggataggatttttgggccttggtctcatgggaagtgg

SEQ ID NO: 370765 - DNA, 74 bp, Homo sapiens
cgtgggggaagttttaaagcttaccaaatttatctgaaaaattggaagctccaccacccaccccaggacagctg

SEQ ID NO: 370766 - DNA, 98 bp, Homo sapiens
ggtgcgattcaaggatggtgctttcctggcggggaccttcatctccaccgtaggcattgacttccgggacagtgaggaggaatttggttctgagcgag

SEQ ID NO: 370767 - DNA, 82 bp, Homo sapiens
cggttcgggtccaagatgatgccgtttccccctttctagggtgaggatggttctacacagccacccggagttccttagttga

SEQ ID NO: 370768 - DNA, 101 bp, Homo sapiens
caggcagaaggcctctctcctgatacagcaggcgctcaccatgttccctggaggattatatctgtccaagatgcgagtctggttttatcgaggagcttccg

SEQ ID NO: 370769 - DNA, 75 bp, Homo sapiens
aaggtctcagagctttacgatgtcacttgggaaggtatctcgggggagctttgtgccttgatggatcaagttcat

SEQ ID NO: 370770 - DNA, 83 bp, Homo sapiens
atgaactcttttccagtgtccttcaggagatctgtgatgagggagtggagcaactgctgtagtccaagcagcttattgtgccc

SEQ ID NO: 370771 - DNA, 90 bp, Homo sapiens
gtgacatgcgtttcatacagaagtacctgcttcagagacatgagaagattcatactgtggatgacgtagtagatgaaagtgatgacaacg

SEQ ID NO: 370772 - DNA, 78 bp, Homo sapiens
aacagatgcttcatgcccttaatacggcaaataacttggatgttaaccagcgcagtcctccgtgcgtcccgcccgccg

SEQ ID NO: 370773 - DNA, 100 bp, Homo sapiens
cagagataattgataacaccctgtaacagctgaacacgatgaggcgagtggtacgacagagcaagtttcggcatgtatttgggcaagcggtgaaaaatga

SEQ ID NO: 370774 - DNA, 100 bp, Homo sapiens
aaatagtgatagctttgataagccttcatggtgaaacacctcttggagtatacccaggcaacagagtctaacctgcagtacagcttgttgttagtgctgg

SEQ ID NO: 370775 - DNA, 99 bp, Homo sapiens
gatgctcaaagggtttttcgggaaaaagcacctgacttccttcctcttctgaacaaagaacattctagtatgccagtagaaaaaaatatcactttagaa

SEQ ID NO: 370776 - DNA, 73 bp, Homo sapiens
agaatactacgttcagctaaattaagaatggtagctgagtggaggttgtctcgaggtgttgaagaacagacac

SEQ ID NO: 370777 - DNA, 74 bp, Homo sapiens
tgggacaacattcagacccatttccagtcatgatcctattttgtaacggattatgatccaaccattgaagattc

SEQ ID NO: 370778 - DNA, 100 bp, Homo sapiens
caggactccaaaatggcgtcagttggtgagtgtccggccccagggagttcccattagacttgaagttgggccacgtgatatgaagagctgtcagtttgta

SEQ ID NO: 370779 - DNA, 98 bp, Homo sapiens
ccacaccaaggtcagcgactggcaggttctctacaagctgtccgcaggcttgtccaaaaggaaacatcggaatgaccacttaacatctacaacttcca

SEQ ID NO: 370780 - DNA, 49 bp, Homo sapiens
ggagagcgagagaggggagcagcgatatgccaatttcaaggacgaacct

SEQ ID NO: 370781 - DNA, 75 bp, Homo sapiens
caggtaccaccttatccacagccacagcgggcaagattcttgccaagagaattaatgtgcgtattgagcacatta

SEQ ID NO: 370782 - DNA, 90 bp, Homo sapiens
caacattgacagcgtccatgccaccgctttcatcatcgtccaggatattgatgatgttaagaagttcaaaccgggttacctggaagctac

SEQ ID NO: 370783 - DNA, 101 bp, Homo sapiens
ccggacctttccgagctgcttatggtgtctgccccaactgctggaacccaatgtgaatattggactggcggagccttgggaagtgaaccttccataggaag

SEQ ID NO: 370784 - DNA, 100 bp, Homo sapiens
ctgtcagcctctccaaagcctgcgcgagaggagccgggacacgcctagcgcgggctccagggacaagaatccttcaagaaacaggaaaaaactcctaaaa

SEQ ID NO: 370785 - DNA, 82 bp, Homo sapiens
ctgaagtaatgcaatggtctcaatctctggaaaaacttcttgccaaccaaaagctgacatcgcgctgatcggattggccgtc

SEQ ID NO: 370786 - DNA, 72 bp, Homo sapiens
cagcgcctgtgagggatgtaagggtaagacgtgaccttttgaggtgactataactgaagattgctttacaga

SEQ ID NO: 370787 - DNA, 83 bp, Homo sapiens
aatcattgagctctatgataggttggactaaatgctcttccttcagaggattatccggggcatctactcaatgaaaaaccatg

SEQ ID NO: 370788 - DNA, 50 bp, Homo sapiens
tgtacctgttaccactttcaaaaatccttccgctgaggaattgagaaaac

SEQ ID NO: 370789 - DNA, 99 bp, Homo sapiens
aagggaggatctggaccatggtggccgggggtggcgcctctgtcgtgtacaggcgtggtgaccaagatgaagatgcagaggaccattgtcatccgccga

SEQ ID NO: 370790 - DNA, 90 bp, Homo sapiens
gaaaaattcaagaagttgaaaaacgcttttcacgtcacctggagagatgcacagtttgcagaaaaaacttcagcatgtgccaggaacaca

SEQ ID NO: 370791 - DNA, 100 bp, Homo sapiens
accagatgaaggagcattcctcttgggacggagaggagcaggaggagccgcgtggcaaggaggagcgccaagagcccagcaccacggcacggaaggtggg

SEQ ID NO: 370792 - DNA, 99 bp, Homo sapiens
cccaagcctggaagaactcgtcatgctctttgtagcgtggtgcttctgttgctcacaggatggctgcagctcctccaagttactgttttgttgccttcc

SEQ ID NO: 370793 - DNA, 46 bp, Homo sapiens
gatcttcagaccccaggttctttgatgggccaaggttgctcgggtg

SEQ ID NO: 370794 - DNA, 100 bp, Homo sapiens
cggagggcggtggcggcgggctcctgcgagaagcaagcggaacttcctgagggcgtctctggccgagcctctttttgtggaaaacgacagcagcagcagt

SEQ ID NO: 370795 - DNA, 50 bp, Homo sapiens
tatagacccggctttaccttatatcagggggattcccgaagtcttccgtt

SEQ ID NO: 370796 - DNA, 83 bp, Homo sapiens
ccgccagaccttcctctgaaggcaaagtgacctgtgctgcatcttcctcccgtgaggctggccgagctccacgctgatctgaa

SEQ ID NO: 370797 - DNA, 80 bp, Homo sapiens
ctctgccgaattcctgtgccacctcctcctttagaaaactgatcttaatacagctaactgggactagaaacagctccatc

SEQ ID NO: 370798 - DNA, 102 bp, Homo sapiens
cgcggattcgccgaggcaccgaggcactcagaggagtcaggatggctaaaggtgaccccaagaaaccaaagggcaagatgtccgcttatgccttctttgtgc

SEQ ID NO: 370799 - DNA, 74 bp, Homo sapiens
ataaccagcacccaagaaatgtctaccgaggaattaatgaatgaggcgggattaaggacactgcatgacattgg

SEQ ID NO: 370800 - DNA, 100 bp, Homo sapiens
aagctggcgtactgcgaggggaagctcacgtacctggctgacagagtgcagatggtgtccaggaccgaggaggtcgatgagcagatgcttaacgtgcaga

SEQ ID NO: 370801 - DNA, 97 bp, Homo sapiens
accgagaccgcggccgggaccgagggtctaccccgagccccggagcgagagcgagtgcctgagcaacatccgcgagttcctgcgcggctgcggggct

SEQ ID NO: 370802 - DNA, 50 bp, Homo sapiens
tgatgtgttcccgcgtctactacatgacagcccacctgaggatattgacc

SEQ ID NO: 370803 - DNA, 114 bp, Homo sapiens
cgctgctgctgaggagaggagcgtcaacagcagcaccatggacaccaagctggatggtttccttttaggcaagaaggaggtcatcagcaggctcccaacaataatgccgaagtt

SEQ ID NO: 370804 - DNA, 99 bp, Homo sapiens
cccacggagcctccggggctggccctgcacatacagcggctgcgccccaaacctgaagccaggccccggggtggcctggtcccgttggccgaggtctca

SEQ ID NO: 370805 - DNA, 75 bp, Homo sapiens
tgcaaaatattcaggagaccgtcgttgccttgtatttccagagaacagtacttcctcgcgtattgctaaaggagg

SEQ ID NO: 370806 - DNA, 98 bp, Homo sapiens
cggaggaggttcgaagctgagtatgtgacagagttgctggagaatgtaaccctaatccataaaccagtgtcgttgcaaccccgtgggctgatcaataa

SEQ ID NO: 370807 - DNA, 98 bp, Homo sapiens
ccagcctcaggcgtgcgcggacggtgtgcgggaaaggatttgaagatgatcgaattgaggctttacttcataaaattgaaatacagatgaaacatcag

SEQ ID NO: 370808 - DNA, 76 bp, Homo sapiens
gttcgctctgagaggcccctcttctcctccaacccagaactggacaatctgggagctcgaggagcagcacggcatc

SEQ ID NO: 370809 - DNA, 100 bp, Homo sapiens
ggggaggggttacagactgtggtgcctacccccatcactgcttccctcagccataacaggaactgtggctgcaccatctgtcttcatcttcccgccatct

SEQ ID NO: 370810 - DNA, 75 bp, Homo sapiens
atgcagagcccatttcagaacctgagaaagtagagactgatgtagaagatctttatgaaccggtgtcagtaccct

SEQ ID NO: 370811 - DNA, 50 bp, Homo sapiens
cctcctgcgccggccttgcctcgggacatggatttgattgacatactttg

SEQ ID NO: 370812 - DNA, 98 bp, Homo sapiens
tttgacagataaagatggtgaacaacctcaaatactgctgatgaacaagagaactgggcaacccatgatccacatctacctggacaaggaaacaggaa

SEQ ID NO: 370813 - DNA, 88 bp, Homo sapiens
tccgcccactccgcggcgttcggggaaatggctgcgagaccctagaggcctgcggcctgcggctaccggctctctgaccagttccacg

SEQ ID NO: 370814 - DNA, 76 bp, Homo sapiens
tgcctcaggtttatttgtacaaatagcacaggaggaccctcgagatgcccctcctccaactcgtgctgaaacccga

SEQ ID NO: 370815 - DNA, 50 bp, Homo sapiens
agccgcgggcaaactcagactcgaaggcctcccccagggaagaacttcac

SEQ ID NO: 370816 - DNA, 101 bp, Homo sapiens
agctggacttccaactgcctattagatttaatctcacatatgttaggcccagtgacgagcaccatccggaagtgaaggctgatgggtacgtggacaacctc

SEQ ID NO: 370817 - DNA, 98 bp, Homo sapiens
ggtcatggacactctcgtctctgttgctgctcgagaggtggaagcagggaaaggcctggagatgaggaagctggttctctcggggttcttggccagcg

SEQ ID NO: 370818 - DNA, 111 bp, Homo sapiens
ccgggcgcagccggagccggtgccgcagctgcgatggccgtggccgtggggagaccgtctgaccagtcctgcctctgttgtagaagacatgtggtgtatataaagtttgtg

SEQ ID NO: 370819 - DNA, 100 bp, Homo sapiens
gtaggagcctccgtgcggagaccactgttcaaggccacagagcctgccttctggtacaagatgcctgtggaatgttcggtgaagtgcacttggagttcac

SEQ ID NO: 370820 - DNA, 100 bp, Homo sapiens
cttggctggcgcaaaggctgccctggatgggactcctgtattcctggaagcttgtgcaccccaccgacaagtactccaacaaggactgccccgacagcgc

SEQ ID NO: 370821 - DNA, 90 bp, Homo sapiens
cgcgaccgtctggatccccgcccaggaagcccctctgaagcctcctcgccgccgtttctgagaaggtgctggagaatctggtaaaagcac

SEQ ID NO: 370822 - DNA, 100 bp, Homo sapiens
gaatttatccaaagattaaaacttgaagcaacccttaatgtgcatgatggttgtaaaactacccctgagtgtggtcccacaggatatgtagagaaaatca

SEQ ID NO: 370823 - DNA, 75 bp, Homo sapiens
gaagattgcttctcttctctcctccaaggttggatggcaagcatgtggtgtttggcaaagtgaaagaaggcatga

SEQ ID NO: 370824 - DNA, 50 bp, Homo sapiens
aggagagaatgctgacagtcctgcagagaatagtgacagtggtacaggaa

SEQ ID NO: 370825 - DNA, 51 bp, Homo sapiens
actctggggcttcctgctccagctggtcctgctcaatctggaattttgtca

SEQ ID NO: 370826 - DNA, 75 bp, Homo sapiens
gcttcctgcgcatcgtctgcaagaccgcgaggcgagacctcttcagggtttccaggcctgaggtgcccgccctgg

SEQ ID NO: 370827 - DNA, 82 bp, Homo sapiens
agaaggaggtcctgccgtccatgcggaagatcgtcgccacctggatgctggagcaagagtgagccatggagctacgtgtggg

SEQ ID NO: 370828 - DNA, 98 bp, Homo sapiens
ggaaggcgcgagtgaggaaaggaggtactgtagatgcttgctctgtcaaggcacagcctattgtctcctttgctcagtgtgacatcattcagacgctt

SEQ ID NO: 370829 - DNA, 75 bp, Homo sapiens
tgggacgcacagagaccgtgaagattccaagttcaggagaactcgaccgactgcttttcaggaagccttggacgc

SEQ ID NO: 370830 - DNA, 100 bp, Homo sapiens
gcagaggctcagagcttggagacagacgggaaatcctcattgacgattcaatttgttgaaggccaatttgtggactcctacgatccaaccatagaaaaca

SEQ ID NO: 370831 - DNA, 83 bp, Homo sapiens
gaaccatccttggaaatcctgccgcggacttctctgcacagcatccctgtgacagacgcatcttctctccagactgccgatcc

SEQ ID NO: 370832 - DNA, 87 bp, Homo sapiens
tcacttccccggggtgtaataatgttaactgaggatcgaatcatcaatttagttgttggcagcttaacatccttattgattctagta

SEQ ID NO: 370833 - DNA, 75 bp, Homo sapiens
cagagtgttactggcttacaaattggattgaggttacccatgcagttgttactgtaccagcctattttaatgatg

SEQ ID NO: 370834 - DNA, 90 bp, Homo sapiens
ctggttccagctgcagcacgtggacgctgactcggaagtgcagccctgcagccgcttcccagttgcgccctcctctgccctggcttcgtc

SEQ ID NO: 370835 - DNA, 100 bp, Homo sapiens
gtgattttagctacatcaagtgatgaaaaacacccacctgaaaatatcattgatgggccctggatccaatggaactgaagggtgaaggtcttgtcctttc

SEQ ID NO: 370836 - DNA, 100 bp, Homo sapiens
gagaaagaggtgatagatgccctcagagtgaacaacaaccagcagaatgccgcgataacatccctgaggacctcagagaccctttctacgttgaccagta

SEQ ID NO: 370837 - DNA, 132 bp, Homo sapiens
ctttgaaacgtgtgctgaaaaagaagaatcagcaaatactactgaaagtgcaatatttgagtatcactgcgaggtgctggagaatctggtaaaagcaccattgtgaagcagatgaggatcctgcatgttaat

SEQ ID NO: 370838 - DNA, 82 bp, Homo sapiens
gaccacaatcctgtacaaactgaagttgggggagattgtcaccaccatcccaaccatagaagcaccactaccgggagctgcc

SEQ ID NO: 370839 - DNA, 101 bp, Homo sapiens
cgtgcccccaccggctcagaaccaaaaccaggagctgcatggccgcctgtcagaggagatagaccagctgcgcggcttcattgcctcgcagggcatgggca

SEQ ID NO: 370840 - DNA, 98 bp, Homo sapiens
gcgtgaccgagagcgcgaatatcgtcatcgttagaagatacggatataatgcaggagaagctacccaccatgcggtggattctgcggtcaatgttggc

SEQ ID NO: 370841 - DNA, 97 bp, Homo sapiens
ccctggggcagatcctcttctggaggacttgatagacgacctgaagtcagaactgagtggcaacttcgagcaggtgattgtggggatgatgacgccc

SEQ ID NO: 370842 - DNA, 90 bp, Homo sapiens
gccgtggcgtcccccatggacgacgggtttgtgagcctggactcgccctcctatgtcctgtacagtgagaaagatcagtctaaagaaaag

SEQ ID NO: 370843 - DNA, 83 bp, Homo sapiens
aggaaaacaacttcgagggcagagttattggagtgatgagtaaagaatacataccaaagggcacacgttttggacccctaata

SEQ ID NO: 370844 - DNA, 100 bp, Homo sapiens
gaaagagtgtctcatcttcttcaagataacttgccaaaatctgctcctgctaaggccaagccggctgaagctcctgctgctgcagccccaaaagcagaac

SEQ ID NO: 370845 - DNA, 96 bp, Homo sapiens
actcgctgctgctgaaagcgcgtcaaggccccctcttctctcctggaggtcagccggccccttgtggctctcaggccagctggaccaagtctcaga

SEQ ID NO: 370846 - DNA, 74 bp, Homo sapiens
gtgtgcggggtgcgtgggtgcctggagatgaagctggaaaggcagccgacttggatggagaaattgacttgtcc

SEQ ID NO: 370847 - DNA, 83 bp, Homo sapiens
ccctcttcttgaactggtgctgtctgggcttcatagcattcgcctactccgtgaagatgcaggccctgacttcctgtgagtgc

SEQ ID NO: 370848 - DNA, 75 bp, Homo sapiens
ctctaacatgtttaaccctcaaacgctgagtttgaatgcatccaccctgagaagcagcagaaaaagaaaagctac

SEQ ID NO: 370849 - DNA, 75 bp, Homo sapiens
ctccgagtcagattggagcatttgtgttgatgaagatgaaagagactgcaggtactccaaagattcaggtttact

SEQ ID NO: 370850 - DNA, 100 bp, Homo sapiens
gcggagaattggagatggggaccgccctggacatcaagattaaaagagcgaataaagtttatcacgccgggaaaggcctaaagaatgtatttgacgaagc

SEQ ID NO: 370851 - DNA, 74 bp, Homo sapiens
cagttttcgccaacaatgtcacccaccttgtcttccatcactcagttgagaagctgatgtctcctcgacttcca

SEQ ID NO: 370852 - DNA, 49 bp, Homo sapiens
cttcattaaagtgtctgagaaggaaggagatcctgttggaaagcaactg

SEQ ID NO: 370853 - DNA, 50 bp, Homo sapiens
ctgggagcttgctgcagcttcaggcggccggcgcggggcgcaggcggcgc

SEQ ID NO: 370854 - DNA, 100 bp, Homo sapiens
gagaggaggccgtccagcagatggcggatgccctgcagtacctgcagaaggtctctggagacatcttcagcagtcgcagtctagcagaagcttgttcaga

SEQ ID NO: 370855 - DNA, 74 bp, Homo sapiens
ggcgcgggatccctggctccgcgagatgcttttactgactctgctatcagtgctaaagtgaatggcgaacacaa

SEQ ID NO: 370856 - DNA, 90 bp, Homo sapiens
ctgcgacgttcacagaggaacactgccggggcccaaccacaagacgactcaataggaggaagggatctgaagggagccgagctccttctg

SEQ ID NO: 370857 - DNA, 100 bp, Homo sapiens
agactccgctacacccctgaagtggggaaatggtgttacacataatattgcattacttcgagaggtgataatcaactcacgctttgtaaaaggagacatc

SEQ ID NO: 370858 - DNA, 85 bp, Homo sapiens
ctctttgagaggtctcgcattaaggctctggcagatgtgaagttcatttccaatccgccctccatggtggcagcggggagcgtgg

SEQ ID NO: 370859 - DNA, 100 bp, Homo sapiens
aggggccatcgctgccgtctttcacacactgatagatttggacacctcccacactgagtccccaaccccccatgactcaaattcacaccgccctcaactg

SEQ ID NO: 370860 - DNA, 119 bp, Homo sapiens
cctgtgccacccccaaggaacaagagacactgctgagcaccattaagtgtgggcgtctacagaggttgtgaccgagattcccgacgagagagactgaggggaagagaggaaggaggggc

SEQ ID NO: 370861 - DNA, 73 bp, Homo sapiens
cgctgcgcatccccgcggacgccacagcgctctctggccaggctgccgcacctctacaggaactttgccgcgg

SEQ ID NO: 370862 - DNA, 100 bp, Homo sapiens
gtttttagctatcaagtggcatccacgcttaaacaggtgaaacatgcggcttctacgctccggcactctgagttcatcagcaaacgccctggcgtctgtc

SEQ ID NO: 370863 - DNA, 51 bp, Homo sapiens
gatccaattgatatggatgagggtgttcatacagtggcatttgggacacaa

SEQ ID NO: 370864 - DNA, 98 bp, Homo sapiens
gagcacgtgggcacggaccaattcgggaacaaatactactacatcccgcagtacaagaactggagagaaggagctgagtctccccagaagaggaagtt

SEQ ID NO: 370865 - DNA, 100 bp, Homo sapiens
ctcagtgggaaactctgactgattttactaagtggctgggcagagaagggcatgagccagaaggagagctctaagtctgccatgatgtatattcaggagt

SEQ ID NO: 370866 - DNA, 83 bp, Homo sapiens
cttcgagttcttcgtgctgctcaaggtgcctctgagcctcggaacatgatctacatgagccgcttgggtatctggggcgaggg

SEQ ID NO: 370867 - DNA, 101 bp, Homo sapiens
tgtactacaacgaagcctacgggtttgaatgccggtgtggaaatgtttactgtggtgtacaccgttactcagatgtacacaattgctcttacaattacaaa

SEQ ID NO: 370868 - DNA, 100 bp, Homo sapiens
ccgggaggtcaacgaggtcatccagtactatactggcaattgctggagaagattttgcaattgttgcttctgatactcgattgagtgaagggttttcaat

SEQ ID NO: 370869 - DNA, 75 bp, Homo sapiens
taacctccaaactatgagtaatctggctggaggctcccaggtgattttcacaaatcctttagaaatcgtcaagat

SEQ ID NO: 370870 - DNA, 74 bp, Homo sapiens
aaatgtgcatactcacagagttagagagagggatggtggtactccaaagattcaggtttactcacgtcatccag

SEQ ID NO: 370871 - DNA, 83 bp, Homo sapiens
ctgaaattcagagaggggaagtgatttgcctcagcttgtactgcatttgtaaaggatgttcatgaagattcaataacagttgc

SEQ ID NO: 370872 - DNA, 97 bp, Homo sapiens
cccattaccactgcctcctttattgcagcaggaatttgaacattaaccaggtggtatttgttggaaatttcttgagaattaatacgatcgccatgcg

SEQ ID NO: 370873 - DNA, 50 bp, Homo sapiens
gggagtattatgaaaagatcgctgaggccgcggaaggagcagggcacata

SEQ ID NO: 370874 - DNA, 50 bp, Homo sapiens
cttctcctccgccggtcccatacggaaaccatcttcatcggtactccaag

SEQ ID NO: 370875 - DNA, 100 bp, Homo sapiens
gtttagtcaaaaagccatgtagaatgcctgccttttgaagaccacttttaaggtgtctagtaagacagcagctagaagaaccacacctcttttggaatat

SEQ ID NO: 370876 - DNA, 83 bp, Homo sapiens
tcagactccagcagccaagatggtgaagcagatcgagagcaaggtcagcccaaggccaaccccactgtcactctgttcccgcc

SEQ ID NO: 370877 - DNA, 73 bp, Homo sapiens
aagcagattacttccatcagtattgagccaggagttgaggtggagacggaggacaggttcgagtgggtcggcg

SEQ ID NO: 370878 - DNA, 50 bp, Homo sapiens
gagaccattccgtatggagagccgggaggaaggctgaacaaggacctgcg

SEQ ID NO: 370879 - DNA, 82 bp, Homo sapiens
aacacccccaagcaacttagaatgcagcttcagcagaggctgcagggccagcagtggttaaagaaatggattaaaaagtgtg

SEQ ID NO: 370880 - DNA, 100 bp, Homo sapiens
atgcagcaaggaaataggatttaaccgctctctgcctcccagattgttctctggggccggactgagaaatgcctgaaggagacgacggaggagatccggc

SEQ ID NO: 370881 - DNA, 76 bp, Homo sapiens
atttctgaatgtctgaagaaactgcaaaaggtcatgaatgtccataaaatgctaggcattcctatttccaatattt

SEQ ID NO: 370882 - DNA, 51 bp, Homo sapiens
agtacactgaaattcatcctgagatgagggattgcttggcattttgtacag

SEQ ID NO: 370883 - DNA, 101 bp, Homo sapiens
ttttctacagcttctgataatcaaccaactgttacaatcaaggtctatgaagctgtcggaaaaggtaacagaagatggaactcgaaatcccaatgaaaaac

SEQ ID NO: 370884 - DNA, 87 bp, Homo sapiens
ctcaagtcaccgtggagctccgccgccccgaaactttcaccgcgagcggtggatggaactgaggttcaacactctggcaaaatgccc

SEQ ID NO: 370885 - DNA, 100 bp, Homo sapiens
ctgccagtgtcagcatcaaccagacaggaacaggcctttgagagcagccagaagtacaaagaggggaagtacatcattgaactcaaccacatgatcaaag

SEQ ID NO: 370886 - DNA, 100 bp, Homo sapiens
ctgcgggccggggacctgcatgtgtgtgcgcgcgaaggagcggaagaatggcagtgctcaaactcaccgaccaggttttcctcctccaccaggcgctcca

SEQ ID NO: 370887 - DNA, 88 bp, Homo sapiens
ctgccatcagctgagcaagtccaccaacagtttctgtgtcccacttcatctttaataagccttatttagtgtctctgacaaaaccggc

SEQ ID NO: 370888 - DNA, 100 bp, Homo sapiens
gatccgcaattacggccccgaggtgtgggaagacatcaagctcagtttatgaacctcttaaaagcattaatcttccaagacctgataatgaaactctctg

SEQ ID NO: 370889 - DNA, 100 bp, Homo sapiens
gggaggacgcgaggccccggcccagccatggccccctggcgcaaagctgacaaggagcggcacggcgtgggctgctttgtaccgcctcagtggagactgg

SEQ ID NO: 370890 - DNA, 75 bp, Homo sapiens
gttgtgagtgtgaaggggcggctaatgtggcttcacctggaagtgaacgagataattgggagagacatgtcccag

SEQ ID NO: 370891 - DNA, 50 bp, Homo sapiens
ccaggacggagataacaccatcttcaagagccacctgagctgaagattcc

SEQ ID NO: 370892 - DNA, 88 bp, Homo sapiens
gacagcacagacagaatccctgctaccagtttgacatctacaggaaggtgcccaaggaccttacgcagccaacgtacaccggggccat

SEQ ID NO: 370893 - DNA, 100 bp, Homo sapiens
tagcaggaatgcttactgttgcgtggttcgttattaacaggatggcaatgattcagatgaattcatgtaaaaggagaaaaggagaaaaggacctttgaaa

SEQ ID NO: 370894 - DNA, 128 bp, Homo sapiens
atgggcggggggtgctcatcgcagtcctggacacgggggtcgacccgggggctccgggcatgcaggtatttcgaaaaaagcctggttttggtacagctcttccagaacccacgggaagaacctgttca

SEQ ID NO: 370895 - DNA, 100 bp, Homo sapiens
tgggttacaagcagcaagtgcgcggttggggccactgcgaggccgttttagattgatatcagtaaatgccattatttagtggatttggacaccatgagag

SEQ ID NO: 370896 - DNA, 74 bp, Homo sapiens
tggcctggagaagaaagatgttttgcctactgttgatccgaggatttgacacgataagcctcatctgatggaag

SEQ ID NO: 370897 - DNA, 101 bp, Homo sapiens
aaggaacatctcttcccagcggctcaggcatacccctcacaaaagccattggctgcctggacccgggacttggccatgcgtgtggagcagtttgagctgtg

SEQ ID NO: 370898 - DNA, 100 bp, Homo sapiens
gttcaaggcaagaccgaattcagaaggatatcgacgtcgtgatccagaagtccagagctgaggactgcctgtttgcagggacctcaggatggaaaccagc

SEQ ID NO: 370899 - DNA, 100 bp, Homo sapiens
aagattccagatgttcctgtggaccccagtccaggttatgtctagagaagatatttccacactggtttcccttttcaagagctttatcgggagctgaagc

SEQ ID NO: 370900 - DNA, 96 bp, Homo sapiens
tacttcaagcagtggattaatctgaaaaaggtggcccacaaactctttaacaacttgaaataaatgtgtggacttaattcaccccagtcttcatca

SEQ ID NO: 370901 - DNA, 83 bp, Homo sapiens
gggaaatacaaatgaaccaagcacacgtgtccgagggttcagagccagagatcttcggcccttgttcccctgggcaactgggc

SEQ ID NO: 370902 - DNA, 90 bp, Homo sapiens
cttgaagagcttgaagacacttggctcccttatctgacccccaaagatgatgaattctatcagcagaatgtaattatatctagtgctgca

SEQ ID NO: 370903 - DNA, 90 bp, Homo sapiens
ccgcccgggaccgccagctctgtccgctgcccacagcctagcagtcgggaccgtactgagattgctcgctgtaagcagctcatctgtgac

SEQ ID NO: 370904 - DNA, 75 bp, Homo sapiens
gcagagacatgagatggtagccaacccctcagatattttatgacctggtcagacagataaataggaaaacaccag

SEQ ID NO: 370905 - DNA, 82 bp, Homo sapiens
aacagatctgcgcttccagagcgcagctatcggtgctttgcagattgctctggaagcagccaaagcactggatgacaagaac

SEQ ID NO: 370906 - DNA, 100 bp, Homo sapiens
gtcaaccaatccatttacagcaaaattcagggcttcaaatataatgccatcttcaaggtgaagtggatcctaaagagaggatagcacgccaacgaaaatt

SEQ ID NO: 370907 - DNA, 75 bp, Homo sapiens
gtgctcgcgctactctctctttctggcctggaggctatccagctagagacggggtttcaccacgttggccaggct

SEQ ID NO: 370908 - DNA, 82 bp, Homo sapiens
gcgtcctgagtgcgctcaacgagctgtatttctatgtcaccaagtaccgccaggaggattttttatcaagcagaaatgcatc

SEQ ID NO: 370909 - DNA, 100 bp, Homo sapiens
ccgctgccgggcaccgaggaccagctcaatgacaggttaaagctgaagctcaacaaagatatagtgatctctgtgggcatttataatctggtccagaagg

SEQ ID NO: 370910 - DNA, 100 bp, Homo sapiens
cgtctctccacagagccatccagcgaggggctgcttgctctcggtgactacatgaatgtccagtgccatgcctgcattggaggcaccaatgttggcgagg

SEQ ID NO: 370911 - DNA, 82 bp, Homo sapiens
ctggaaacaattgatttgctcttacgtatttgtgtgacttgactcttcaaacacaaagccatcactggtgcaagctatattt

SEQ ID NO: 370912 - DNA, 75 bp, Homo sapiens
gggctcagttgggtggactacggggagcgcgccgagctggatgactcggacgcccgcggcgccatggctcacgtc

SEQ ID NO: 370913 - DNA, 100 bp, Homo sapiens
tcaatggcaaagggctgggtgagatcagcgcggcctccgagttcaagacgcagccagtccgatttggtgctatggagaaatttttggtagaatataagag

SEQ ID NO: 370914 - DNA, 75 bp, Homo sapiens
ttattagcacaagagcaccatactttgaggaatgccagctgatgaagaccgagaggccgcgacccaacacctttg

SEQ ID NO: 370915 - DNA, 100 bp, Homo sapiens
aaaagagaaacctgggtgaactttcacggacaacctcagaggacaacgaagtgttcgaacacagatatgtagaactcttcttgaattctacagcaggagc

SEQ ID NO: 370916 - DNA, 100 bp, Homo sapiens
accatgattcttacagttggtgggtgttcatttagaagaaagcaacactaatgattcaaacagcttcctgaattttaattttgtgttgtctcacagaaag

SEQ ID NO: 370917 - DNA, 100 bp, Homo sapiens
tcagagatgccaagaagaatctagacagacaggcctttctagattcacttgtcatggattagtgactggtcagagttatattttccgggtcagagcagtc

SEQ ID NO: 370918 - DNA, 119 bp, Homo sapiens
cacggtcctggtaacccccctgggcgcccttggagtaccgttcgggctctcccggctgtgatagaccttcagttacagagagagggagcagagtgggaccaggtctgagaatagtgaag

SEQ ID NO: 370919 - DNA, 76 bp, Homo sapiens
aacgacctagtatttgaatttgctagtaacgtcatggaggatgaacgacagaaaaacacaccttgactttagtcag

SEQ ID NO: 370920 - DNA, 90 bp, Homo sapiens
gtgcaaagcatctccacacagcaggtggcctccatgaaccagcgccgtgtggatttctaccttgcctccatcgaagacatgctggtggcc

SEQ ID NO: 370921 - DNA, 75 bp, Homo sapiens
gaatacattgctgattatctcatgcagtgggcctttggagtgacgctgtgggaactcatgactctgggccagact

SEQ ID NO: 370922 - DNA, 100 bp, Homo sapiens
cgaagagtttgaaagcgtgctccacaaatatttacagtcggaggagtactcggtgaaatcctgtcctgaagactgtaagagctccactggttcaacagcc

SEQ ID NO: 370923 - DNA, 100 bp, Homo sapiens
tgaagaaggaatataatgcattacatcaaagacacactgagaaatttctgaataaattggcagaagaacgcagacagaagaaggaaacttaagatgtgca

SEQ ID NO: 370924 - DNA, 83 bp, Homo sapiens
acaagtgttatgggaccgcaccttcagtcttttccagcagctcattcagagatgaagctactgaatctttacatcaaacgtgc

SEQ ID NO: 370925 - DNA, 101 bp, Homo sapiens
ccggttccgtccccttcccgccgccgccatgaagtggatgttcaaggaggaccactcgctgggcctcagagaaccatggctactgccaagggaatcgccat

SEQ ID NO: 370926 - DNA, 83 bp, Homo sapiens
ggagagaaggcggcgcgggaggtgaagttgctgctgttggggcgaccattgacgaggtggagacggacgtggtggagattgag

SEQ ID NO: 370927 - DNA, 106 bp, Homo sapiens
cagttcatccggtcagtggacccagactccccggctgaggcttcagggctccgggcccaggatcgcattgtggaggaggaggagaacggggctgaggaggaagaag

SEQ ID NO: 370928 - DNA, 48 bp, Homo sapiens
taaagttactgctgttaaaaagagcaatggtggaacaaagcggcaaaa

SEQ ID NO: 370929 - DNA, 76 bp, Homo sapiens
gtctctggagacatcttcagcaggatgggagctacagtttttgtccagcccctggacctggtgaagaaccggatgc

SEQ ID NO: 370930 - DNA, 100 bp, Homo sapiens
cttgaagaagcttcagaagcttttgctagccagaaacaacattggagttttgccggagacttaattcagtgcacaaatgagatgaatgtgaacatcccac

SEQ ID NO: 370931 - DNA, 76 bp, Homo sapiens
ccctcttctgttcttgtttatcagacatccttcgcttcatttattcaggtctatgctccatcagcaagcactgccg

SEQ ID NO: 370932 - DNA, 100 bp, Homo sapiens
caatggcctatccaaggacatgagcagtttacacatctcacccaattcagaccgaagccaggacagcacagccgtagcactctcagactctagctcaacg

SEQ ID NO: 370933 - DNA, 76 bp, Homo sapiens
atgaaccaagggttataaatcaaatgttggaatttgctttccacgtgttggtgtggagcaatgaccgagttattcg

SEQ ID NO: 370934 - DNA, 95 bp, Homo sapiens
gttcagcggacacgggagcaagatggcgattccgggcaggcacatcagcgagagctttctaactgtcaaaggtgctgccctttttctaccacggg

SEQ ID NO: 370935 - DNA, 50 bp, Homo sapiens
tgagagtcctgaggcacaggaagaggcaccctcccccaggagacttcatt

SEQ ID NO: 370936 - DNA, 80 bp, Homo sapiens
gcagaaaatagcacacttttactctacgcaactgttgctttttcatgatggtttagctgcattgtcattttctatcagtt

SEQ ID NO: 370937 - DNA, 83 bp, Homo sapiens
tgtcaggggctaaagaggaggacgaagaaaagcagagcaagggaacccagcgtaactggcggaaacccagaggcattgacaac

SEQ ID NO: 370938 - DNA, 152 bp, Homo sapiens
cagctgggagctgtggtgcatgtacatcagccccccaaaagactggtgggacgccggagacccttctctccccatcagacaatgagttacaaggcactaatagttctggatccttgggtggtcttgatgttcgcagacgaattcctataaag

SEQ ID NO: 370939 - DNA, 98 bp, Homo sapiens
atctacactttctcaagcactgtgatcttcaaatgtgaccttgaggaaccctgggagctcaggaaggaaggagcgcccagaagcagggacagggagct

SEQ ID NO: 370940 - DNA, 98 bp, Homo sapiens
ctcgacctgctaacagaactggaccttttcggtgctggagaatctggtaaaagcaccattgtgaagcagatgaggatcctgcatgttaatgggtttaa

SEQ ID NO: 370941 - DNA, 90 bp, Homo sapiens
ggggagccgtggcctcctctccgccctagcgctgaggaggctactcacagtcgaactacaactccccggggtccggccagaactacagtg

SEQ ID NO: 370942 - DNA, 82 bp, Homo sapiens
ctgctcccttcgccttcgccctttccacctcgcggcagttcgtaagcaagctgtgtgggaagtgcagccccactgacgtgga

SEQ ID NO: 370943 - DNA, 98 bp, Homo sapiens
aaaccagagagtcggagggagtccatctggagcggccaaatgcgtgttttggacaagctgatggttgagcgactttctgcagagaggacggagtgcct

SEQ ID NO: 370944 - DNA, 100 bp, Homo sapiens
cagaagtccacttcagaaggtctgcttggtgacttggatacagaaatttcctgggctaaactttatagcaggccaaatcgactcttgtctggtgtgccac

SEQ ID NO: 370945 - DNA, 99 bp, Homo sapiens
atttacagtcggaggagtactcggtgaaatcctgtcctgaagactgtaaggtggaagttgatgggtcgaaactaaatgtgaccagcacgtggaacctgg

SEQ ID NO: 370946 - DNA, 95 bp, Homo sapiens
agcagaagtacgaccggcagctgagcccacagaacttaattgcccaatctcagtctggtactggtaaaacagctgccttcgtgctggccatgctt

SEQ ID NO: 370947 - DNA, 75 bp, Homo sapiens
tctctctcgttcaaggaagcgcaggctgaggatcttcaagatgaagttcaaagggagaatactaatctgcaaaaa

SEQ ID NO: 370948 - DNA, 100 bp, Homo sapiens
ctttgtgtctctaaggccgatgaggaatttggaaacacatgtgggacatacaagcgttggatatagagatgatccagatcctgatgatggatttaactat

SEQ ID NO: 370949 - DNA, 88 bp, Homo sapiens
aagacgctttacccgactctttgggccgttatctcacagtattgggaaagggtcgttgtggtgcatagacccagagtatagacaaaat

SEQ ID NO: 370950 - DNA, 50 bp, Homo sapiens
ttctggaggagtttaagaagggttaccaacatcaagaagacactcaaagc

SEQ ID NO: 370951 - DNA, 73 bp, Homo sapiens
attgtaccagttgagataaccatcagtttattaaagagggaaaattgcctaagaattatgacccaaaagttac

SEQ ID NO: 370952 - DNA, 80 bp, Homo sapiens
gagccagcctgagttgggagaagagctccagagaggagtacctgacaggcttccacaagcggaaggtcgagcgaaagaag

SEQ ID NO: 370953 - DNA, 75 bp, Homo sapiens
gaaagatctaccttctggaagctactactacgtggtgcttggaaagggggatatgagactttctactcggaatat

SEQ ID NO: 370954 - DNA, 100 bp, Homo sapiens
actttgaagatttggtaaaactcacctctttggaattctgcttggtcagaatcgtgatggcattgtgttcagcactgatgactattttcaccatcaagat

SEQ ID NO: 370955 - DNA, 100 bp, Homo sapiens
aggtgacgaggacctagactgtgacaacgaccacgtctccaaaatgagtcgcatcttcaacccccatctgttgtatctcccacttcacccttctagacca

SEQ ID NO: 370956 - DNA, 75 bp, Homo sapiens
cgacagacttcgctgtgagtgcccaaggtttcaaagcattatatgaaggtgtgaaatctaagaatcccctgccaa

SEQ ID NO: 370957 - DNA, 100 bp, Homo sapiens
gaccatcaccgtcaaccccatggaggaagcgaaatgtggtgattttaaagctgttatagtggaagtatcaggacaagcccattacacgggtacagcaagc

SEQ ID NO: 370958 - DNA, 82 bp, Homo sapiens
attgctactgccctctgcgctcctgcatctgcctccccatacaatgcagatcttcgtgaagactctgactggtaagaccatc

SEQ ID NO: 370959 - DNA, 99 bp, Homo sapiens
aactcagccttcctgcataccctggaccagcagaaacctagagtgggccaagattaacacccctcctgcaggaggaagacagccaccagcggctgctca

SEQ ID NO: 370960 - DNA, 100 bp, Homo sapiens
cgtgccgcccaagtatcgtcacatgcaaaccttctacagtgttggctgcaccaattctagaagtaagctctccaagttcagactccattcttgtgcagtg

SEQ ID NO: 370961 - DNA, 100 bp, Homo sapiens
tcttcgctctttgcatcttaactgcaggtatagtagttgaagattgtttgattttgctccaaaacttattaaaaaacaacaactccaatcaaaatttttt

SEQ ID NO: 370962 - DNA, 98 bp, Homo sapiens
gtccagccagggtcctgggccgcgacctggttctcccggagtctacactcaggtgcgcgggaggaaggcagcggcctgccgcgcagagccctgcgcgc

SEQ ID NO: 370963 - DNA, 74 bp, Homo sapiens
gacagctgggaattgctgaattagaactgcagaggttcctctacagcaagatctcgacatggcaggagctgagg

SEQ ID NO: 370964 - DNA, 90 bp, Homo sapiens
gaaatgcataaaacattgaagttaaagtatgcagaggtcttaaagaaagtgcagaagagatggtcaaaaacaaattggaaggaaaggata

SEQ ID NO: 370965 - DNA, 100 bp, Homo sapiens
gaagaggaaaactctaccggtgcaggttaatttggagtggcccctggagtcagtttcctacaccatccgaggccccacccagcacgagctacagcctcca

SEQ ID NO: 370966 - DNA, 100 bp, Homo sapiens
gtcctctttggcaatgttttcttggacgaccttctcttccaccttctaaacaagctaacaagaatctgattttgaaggctatatctgaagctcaagaatc

SEQ ID NO: 370967 - DNA, 75 bp, Homo sapiens
actgactatcctttaccgggagatgcaccgacgtgaatgaactggtgcaggtagaaacgtacctccgcagtgaag

SEQ ID NO: 370968 - DNA, 100 bp, Homo sapiens
gaatcctgcccgcgtgaaccacatgcccagcacgggacgtcgggctcctggagtaccagcaccactcccgcgactatgcctcccacctgtcgcccggctc

SEQ ID NO: 370969 - DNA, 92 bp, Homo sapiens
cagatccgtagggaggacaccgtgacttcccggacgctgggaaatgctcatgatggagcagtccaagaagtcctccctcatggtggcccgca

SEQ ID NO: 370970 - DNA, 75 bp, Homo sapiens
tttgtggagcaagataatttctgcattatcacggagtactgtgagttgccaccttccagagaagaggtacgagat

SEQ ID NO: 370971 - DNA, 100 bp, Homo sapiens
tactttgtggctgcctttgttgctgctgcacattaggttgcagtatgtggccagttatttgcctcagtaaaagagttgctacaagatcaccacggttttc

SEQ ID NO: 370972 - DNA, 83 bp, Homo sapiens
ggggcaagtgagagccggacgggcactgggcgactctgtgcctcgctgaggatgatatcatcaagttgaatcgaaaggaaggg

SEQ ID NO: 370973 - DNA, 100 bp, Homo sapiens
gtctgatccgacacttggaggagcgaggggtgcaggagtcgttcacgcctactgaggagcatgtgttggtggtgcgcctgctgctgaagcacctgcacgc

SEQ ID NO: 370974 - DNA, 75 bp, Homo sapiens
accacaataatccacagccaagggatttcttgtggctctcctccgcctatcctaaatggccggattagttattat

SEQ ID NO: 370975 - DNA, 83 bp, Homo sapiens
ggcgacagagggttctgtggaggacataagggagatagtgcagagactgaaggggttgtgtccactgtggtccccgactctgc

SEQ ID NO: 370976 - DNA, 82 bp, Homo sapiens
ccgagtccatgttcatggcggggggcagcgactgcctcatcgtcggtgagaagccctaccactgcaactgggacggctgcgg

SEQ ID NO: 370977 - DNA, 90 bp, Homo sapiens
acttgaaagaagctgcagcggaggaaggcgagcccacgacccttcctcagggcaccatcaacatgaaccagtgcacagatgtggtggatg

SEQ ID NO: 370978 - DNA, 75 bp, Homo sapiens
tggaccctgaactgcacctctgtcaaggcccgatgagagaaagggaaagttaaggatgctggagcagaacaatgg

SEQ ID NO: 370979 - DNA, 83 bp, Homo sapiens
cacagggcgacggcggcaggagctcgggaaccgggactgcgagcgggtgagaagccctaccactgcaactgggacggctgcgg

SEQ ID NO: 370980 - DNA, 83 bp, Homo sapiens
ggcgtcctgaccagcggcggcgacgcgcaagggggggccctcagcctcttggccttgaacgggctgttcatcttgattcacaa

SEQ ID NO: 370981 - DNA, 100 bp, Homo sapiens
caatgggattctctccagccttggtggtgacatcaatgattgagctaagagaacgagagatagaacgactgtcagttgctttggatggtggtcggtcccc

SEQ ID NO: 370982 - DNA, 74 bp, Homo sapiens
ggagccgcccgcatcagcggcctcggggaatggaagcggagaacgcgggcagtgctatgaagctggtcacctgg

SEQ ID NO: 370983 - DNA, 100 bp, Homo sapiens
gtctggcaggaacctcggcctcagaggggtgagcccctccagactccgaataggagatcaagagtttgattcattgcctgctttactggaattctacaaa

SEQ ID NO: 370984 - DNA, 95 bp, Homo sapiens
ggtactatgcaggaaagaattaccactaccaagaagggatctatcacctctgtacaggtgatgatgaacagtctacacagatggctgcaagttgg

SEQ ID NO: 370985 - DNA, 145 bp, Homo sapiens
atccgaatggcatccatttactctgaggaaggcaacattgaacatgccttcatcctctataacaagtatatcacgtgtcccatttcccaaaaactttatgtctgtggcaaagactattctaaagcgtctgttcagggtttatgcc

SEQ ID NO: 370986 - DNA, 101 bp, Homo sapiens
caggcccgcgccgccagtggagcccccgcgcgcccggccggcccggagcaccgagctcgcggcacggtaggagtgcactggtgattgctgcggtgtttgac

SEQ ID NO: 370987 - DNA, 100 bp, Homo sapiens
aggtttgctgagctggttggccctgtgatccctcaagactggtccacggagtgtatgaccacaaacagccatcaaggccaactgcaagcaaatgcttatt

SEQ ID NO: 370988 - DNA, 75 bp, Homo sapiens
tccaaatatgcagtggaaggtttcaatgacagcttaaggtggaaaggagactatggaaccaggatccagcagtac

SEQ ID NO: 370989 - DNA, 82 bp, Homo sapiens
tttattcactgagcccactttgtgccaagcattgttctagacacggacaatgcagatcttcgtgaagactctgactggtaag

SEQ ID NO: 370990 - DNA, 100 bp, Homo sapiens
gttcgaagggggctgcagcggagatccgagagcagggggatggggcagaggacgaggagtgggcagctgtgtcaatgttgaaacaagactataaagaagg

SEQ ID NO: 370991 - DNA, 75 bp, Homo sapiens
ggcggagcgggcggcagagcagggcggcggcgactcggtcctcagaatggttggaatgaccctccagctttgaac

SEQ ID NO: 370992 - DNA, 100 bp, Homo sapiens
tagaatgggacaatcccgagagaggaaagcatgatgggagccacgaagggactgtgtattttaaatgcaggaacgacttagctgaatatcagagaacttg

SEQ ID NO: 370993 - DNA, 100 bp, Homo sapiens
atctccgccctggggtcattgtcaggtggtgaagcagtattttccaatttgaagattcatttgaaggtggctcctgccacctgctaatagcagttcaaac

SEQ ID NO: 370994 - DNA, 73 bp, Homo sapiens
ttttccagctcacccactgccagcagaggccagtctgcttccttcagtccctgctctcaaaggggaaatccca

SEQ ID NO: 370995 - DNA, 74 bp, Homo sapiens
ggaagacttgtaacctggagaagagagagcaatgtggtgttaaaaatgatgaaagtagcagctcatccattatc

SEQ ID NO: 370996 - DNA, 51 bp, Homo sapiens
gggacccgcggtccccgctcttgctggatgttgagaaagagaaggaaaccc

SEQ ID NO: 370997 - DNA, 74 bp, Homo sapiens
agctagccatcttctaattttcattccttcaaaggaactttgtgaaggaagccgaggagatcagctccaaccgc

SEQ ID NO: 370998 - DNA, 78 bp, Homo sapiens
cggcgaccaagatcaggaacctgccctggggaggaagttgccttgtactgtgccaaatatcttcctgatatcatcaaa

SEQ ID NO: 370999 - DNA, 82 bp, Homo sapiens
ttatgaggtcctcacagctcccattaccaagagcttcatctttatgacggttgtgtattttggtcccctgacctgctccatc

SEQ ID NO: 371000 - DNA, 90 bp, Homo sapiens
gcaagagggagttaaggacattccaggcagaggcaaggcaagcctgaaatagcatgtgaaaacccacattgtacagtagtacctttgaag

SEQ ID NO: 371001 - DNA, 90 bp, Homo sapiens
acgaggacggccgggagacgctgcagaccatgggccccctccacggcaccatcaccgttctgcaaaattctgtggcatctctggaatact

SEQ ID NO: 371002 - DNA, 99 bp, Homo sapiens
catggactacagccaggagatgcacctgaaaatgagcaagaaaatcgcccagctcaccaaggcacagttggtggatctgaaatctgaactgacagaaac

SEQ ID NO: 371003 - DNA, 75 bp, Homo sapiens
tacctccaggccctgaacgcggactggcacgcagactgcttcaggcggctgagccagaggccaactgcagaggaa

SEQ ID NO: 371004 - DNA, 75 bp, Homo sapiens
gaggaccgtatccttgtgctaggtttgttgataagccggggcccttcgtgggaccctgcggtcactggatcaggc

SEQ ID NO: 371005 - DNA, 80 bp, Homo sapiens
caattgaatgtgaggtcatcaaggaaaacatccatcatattgaccgatttgggatgttgcccctggatgagcctgctatt

SEQ ID NO: 371006 - DNA, 82 bp, Homo sapiens
aaaaacttcttgccaaccaaatttgcccgaccatctgtaagtcacacggctgcaccgccgaaggcctctgttgccacagcga

SEQ ID NO: 371007 - DNA, 100 bp, Homo sapiens
cactaaagactttgtagccatcaacccgagtgcagtttcgatggaaaatgaaggagatacaactcgtcaacgaatcaaattcagtgatgacagagtatgc

SEQ ID NO: 371008 - DNA, 83 bp, Homo sapiens
ctgagcccagcccccagaaaggattgtgacatatcgttggacccagaattgagagtgaagacatagtccagagagggaagtgt

SEQ ID NO: 371009 - DNA, 100 bp, Homo sapiens
gcctccctggccggggcgcagttcggaggttcagcttgccttgcgccatggactggcagccagacgagcagggcctgcagcaggtcctgcagctgctcaa

SEQ ID NO: 371010 - DNA, 83 bp, Homo sapiens
tgacgtcatagctctgcggaggtggaagttggggagctttgaggctttatcctgtggataaacgcagagtgaacgagtttggg

SEQ ID NO: 371011 - DNA, 90 bp, Homo sapiens
ccaagagcagcaccagctctctagcagaagtcttgatgcagaactttattatgtgagaaatgaccttattagtcactacgctctatcctt

SEQ ID NO: 371012 - DNA, 50 bp, Homo sapiens
aagtgcccttggacaaagcctgaaaccagctcaacctgaattcctgaagc

SEQ ID NO: 371013 - DNA, 75 bp, Homo sapiens
tccgggcagagaccagagggaagtgtgaagattgctcctggagcagttgtatgtgtagaaagtgaaatcagagga

SEQ ID NO: 371014 - DNA, 90 bp, Homo sapiens
cggtgacccggcgagaggcggcgccgctcccaagatgtcgcagacggccatgtccgaaacctacgagtttcaagaagtttttaaccgaag

SEQ ID NO: 371015 - DNA, 75 bp, Homo sapiens
ctggtaatagatgtctgacaaactaaagaaagacttgtgttacgacgcaaatcaatttcacagtggctattgatt

SEQ ID NO: 371016 - DNA, 98 bp, Homo sapiens
gtgctaacctgcattctgttagagcacaaggatctcaaagatttcatgagacaagctggggaagtaacgtttgcggatgcacaccgacctaaattaaa

SEQ ID NO: 371017 - DNA, 50 bp, Homo sapiens
cagaaatttgtgctcaaaacccccaagacattttcttgggcatctgtgac

SEQ ID NO: 371018 - DNA, 74 bp, Homo sapiens
gaagaagatgaaactgctgaagagatgaaactgctgggcgaatgcagtagcagtatagactccgtgaagagact

SEQ ID NO: 371019 - DNA, 100 bp, Homo sapiens
ccatggggctggcctgcggcgcctgggcgctctgaggttacgggtaaattccggggaggtgtgaaccccttcaccaatggctgctgtaacaatgtcagcc

SEQ ID NO: 371020 - DNA, 123 bp, Homo sapiens
tactcagacgctggcgggcgcagtttctcacgacgggccgagcctgccactgtgctggagaatctggtaaaagcaccattgtgaagcagatgaggatcctgcatgttaatgggtttaatggag

SEQ ID NO: 371021 - DNA, 102 bp, Homo sapiens
aagagacaggaggcagtagccaaacacccaggtcacggtctagatcacattctcgatccagaggaaggcgatactctcgctcacgcagcaggagcaggggac

SEQ ID NO: 371022 - DNA, 80 bp, Homo sapiens
taaccgtccagataggatagacaagttaagggaagaaagtcggaggctggctttggctgcgaaaagagaaaaaagaaaag

SEQ ID NO: 371023 - DNA, 82 bp, Homo sapiens
gctgtctctagcatcacctctcagcacgattttcccgagagttcacagagacaagaggagcagcagcggcaccgcccctcac

SEQ ID NO: 371024 - DNA, 98 bp, Homo sapiens
aacatgcccataagttttgtaacacagaagatgaggagactatgtatctgcggaggcgttcgtggcattcagggatgtggctgtgtacttcacccagg

SEQ ID NO: 371025 - DNA, 100 bp, Homo sapiens
aatcgacttcggtttcagttggagttggaatttgtgcaatgtttagccaacccaaattaccttaattaaagggttcaaagacaccagtcagtatgtagta

SEQ ID NO: 371026 - DNA, 82 bp, Homo sapiens
ggagcgcggagcccggctcccgcaccatggaggaggacgacagctacggaggcaagtgaggcctatctggttggcctttttg

SEQ ID NO: 371027 - DNA, 97 bp, Homo sapiens
ggcagctcagcttggagcaggaggtccagacagtgaccaacaccttcaggacgaacaatatccagatccagagccgggaccagaggctgctgacact

SEQ ID NO: 371028 - DNA, 83 bp, Homo sapiens
acggcgccatgcggggtccgagcggggctctgtggctgctcctggctctgcgcaccgttactgtggaatacacgatcctgcct

SEQ ID NO: 371029 - DNA, 101 bp, Homo sapiens
aaactgccgccgctctgccacggtctgcccacccaacgcgaagacggtaacccgtgtgactttgactggagagttttcaacgtcctttatcccatgcctgc

SEQ ID NO: 371030 - DNA, 50 bp, Homo sapiens
ggcgaacccgcggcgcaataacgtgagttattctccccacctcagaagta

SEQ ID NO: 371031 - DNA, 97 bp, Homo sapiens
agctgcagctggagcagtggcgtttggaggagactcggaagagaaaatggatgggctataccttcgtgggaaatgagacaagccgtttttaagatga

SEQ ID NO: 371032 - DNA, 100 bp, Homo sapiens
gcacagatttatgtaatgtcaactttactgagaattttccacctcctgacacaacaccactcaaagaatgcagccattattgaagaggaactgaagacca

SEQ ID NO: 371033 - DNA, 73 bp, Homo sapiens
tggaatgaaatacggcaccagattggaaacacactgatccggatttgttaaggattccaagtaactcttattt

SEQ ID NO: 371034 - DNA, 100 bp, Homo sapiens
cagaaaatagcacacttttactctacgcaactgttgctttttcatggtggattttcggaaaagacatatgaatggagctcagaagaggaggagccagtga

SEQ ID NO: 371035 - DNA, 100 bp, Homo sapiens
ccgaggaacgagagcgcgaagctaaggaatttatcatggcatccagcattgaccactacaagtaaaatgcgaattccacattctcatgcatttattgatc

SEQ ID NO: 371036 - DNA, 100 bp, Homo sapiens
gttttatgcatctttatccaatcaagtgcccttggacaaagcctgaaaccaggtggtgacagcaggagcaatcatccctttccccttggctccaggccag

SEQ ID NO: 371037 - DNA, 100 bp, Homo sapiens
tttagaaaatggaatcctcctctgcgagtgcgtgggactcatgaactcaccaatcccgggatcgccgaggtcacgatccggccagatcgcaagatcctgg

SEQ ID NO: 371038 - DNA, 51 bp, Homo sapiens
ggtttcccgaggagcttgggccgccgcagaataataataacctggatgcct

SEQ ID NO: 371039 - DNA, 100 bp, Homo sapiens
acctggagctctacgcctcctacgtttacctgtccatgctcaggcgctcaggactgccaggacccagaggattcacacgccagccccggctgaagcccag

SEQ ID NO: 371040 - DNA, 82 bp, Homo sapiens
ccttgtggagccggagctgggcgcggattcgccgaggcaccgaggcactcagaggagcaaatggagctgctcctggtgaaca

SEQ ID NO: 371041 - DNA, 100 bp, Homo sapiens
ctgaaccagctcgtcctggagcacctgcagctggcgcctctgcagtgggcctgacatttaccccggtaactgctgggcatttaaaggctcccaggggtac

SEQ ID NO: 371042 - DNA, 100 bp, Homo sapiens
ccaaaattcacctggcacagtcacttcacaagttgtctaccgcctgtccaggaaggtgcttgcgctccaggcccgaaagaaaaggaccaaggccaagaag

SEQ ID NO: 371043 - DNA, 75 bp, Homo sapiens
ctgggaatcctcatctccactcagcgggcccagtccagggaccttgacccagcccctctcagcagacgcttcatg

SEQ ID NO: 371044 - DNA, 75 bp, Homo sapiens
gatgaaggtggaggcagcgcggctctcagatgccatggacaatattaccaggcagaaccaattctacgataccca

SEQ ID NO: 371045 - DNA, 80 bp, Homo sapiens
atttgcaattcatcagttaggacctggatataaggaaatctggcattttttaaagtttgcgccccacaaagaggaaatat

SEQ ID NO: 371046 - DNA, 83 bp, Homo sapiens
cagaagtcgcgtgtctaggtgagtcgcggtgggtcctcgcttgcagttcagcgaccacgtgcagtcattggagaaatcgatga

SEQ ID NO: 371047 - DNA, 100 bp, Homo sapiens
ctgaagctcactcagattccctcattgatacctttcctgagtgtagtacggaagacatggaaggtctttaatgtaactttaaatggttcaccaaaggatg

SEQ ID NO: 371048 - DNA, 100 bp, Homo sapiens
atgaggaatgtctttcctaccatctaaaatacgaaggtttctggctggtgtgaccgcaacaagggaaaacatggcttatactgtggaatgcctgcggggt

SEQ ID NO: 371049 - DNA, 98 bp, Homo sapiens
tgaactgtttctcttctgcagaaaaagaggctcttcctcctcctcccgcgacggagggtgtgaagacagagaatgaccacatcaacctgaaggtggcc

SEQ ID NO: 371050 - DNA, 100 bp, Homo sapiens
gttggacaacaaaaaatgaaaacttagattgcaacagtgattcacaggtgtttccctctttgaatgtactctttgagcacatcaaattcttccattgccg

SEQ ID NO: 371051 - DNA, 100 bp, Homo sapiens
gtagaaccaattaccaagcatataggtttggtgtacagtggcatgggccccgattacaggtgtgatccctcacatccacaaatctctgattggaaagaag

SEQ ID NO: 371052 - DNA, 75 bp, Homo sapiens
ggaagtcatttctactggacttcatgcttagatacatgtataacaagccaagtaatatattcttagtagatacaa

SEQ ID NO: 371053 - DNA, 74 bp, Homo sapiens
cctgggcctgagaactgaatcaggtgatgtacagttcattgattatgaatattctggatacaactacctggcat

SEQ ID NO: 371054 - DNA, 75 bp, Homo sapiens
atggtcagaaaaggggacacggcggtgcttagggaattcacaattgaaactgaagggaaaacatttcagttaaca

SEQ ID NO: 371055 - DNA, 87 bp, Homo sapiens
aggtgccgacatggggcttaagatgtcctgcctgaaagggagtgcatccgccccaacccttttccccctcgtctcctgtgagaattc

SEQ ID NO: 371056 - DNA, 87 bp, Homo sapiens
actgacaagcagcacattctcaagagcacacaggttcaatgtatctatgcctgcctacctcaatctgcaagggagtgtcagaaaggc

SEQ ID NO: 371057 - DNA, 100 bp, Homo sapiens
aaggattccaagtaactcttatttgtattggatacaaatgaccgatttctacgaaaaataaccatcgggcagggaaacacagagaagggccattaccggc

SEQ ID NO: 371058 - DNA, 100 bp, Homo sapiens
ctgcttcaccatgtaataataacataaatgcagctacagctgtggctctacaggtttctaagcatgaattgaggaacagaagaagcagagcagatgatcg

SEQ ID NO: 371059 - DNA, 100 bp, Homo sapiens
gacccagagaagaggaaaactctaccggtgcaggaaaacggacgatgtattactaagctggaaaacatggggtttcgagtgggacaaggattgatagaaa

SEQ ID NO: 371060 - DNA, 88 bp, Homo sapiens
ggtgatgagcatgacgcacacaggagagccaggattcatgctctacatccccatagagcagccgagaccgacccgcccgcccgcggcc

SEQ ID NO: 371061 - DNA, 83 bp, Homo sapiens
gggaggtgttcgagaacgaccccgagacgggagcaccccatcggagacaagagcttccagaactacatccggcagcagtccga

SEQ ID NO: 371062 - DNA, 100 bp, Homo sapiens
aagaagcatcctccagggacatgcaaatggaaaatgctgtccagtggggtgtgtacatcaactgttcagcttcctgggaaagtagttgtggtcacaggag

SEQ ID NO: 371063 - DNA, 100 bp, Homo sapiens
catgatctcttccaaagaatgccacagaatcaggggaggcatgcttcagacatcatcactcaagagatgacaacagctgttcaagagccagatgccactt

SEQ ID NO: 371064 - DNA, 100 bp, Homo sapiens
ctggtggttgagcgaaggcggctggagaccgagctagatgggctcagggtgttcctgaaaagccccatagtgattgagtcttcaaaaccaccgattctga

SEQ ID NO: 371065 - DNA, 98 bp, Homo sapiens
accatctcacacctttccaaaggacgcgaccataactctaaaaggtctccagaaatgctttgggttcatctttcattgctgcaaggaacttccatgcc

SEQ ID NO: 371066 - DNA, 100 bp, Homo sapiens
ggttatggcacaacacatgcagtggtgaagtgatgaacctcctgatgttcctgtcgacgtgggatgggaaggtcccacagccggccatcctaaagccccg

SEQ ID NO: 371067 - DNA, 100 bp, Homo sapiens
tgtcagacaaggaaattactcatgatgtcaaaggtgtcatggagaaactccagctgggcccagagattctgcagcgggaaaatccaaggcttatttatgc

SEQ ID NO: 371068 - DNA, 90 bp, Homo sapiens
tctgagtccagccaacagcagaagagaaagccagttatccacggactggaagatcaaaagagggtgtgaaaaagacagcatgaactttac

SEQ ID NO: 371069 - DNA, 100 bp, Homo sapiens
ggagaagaaatagttacctatgatcgcatcccgggcccaaatcctagacaaagccacagaatatatccagtatatgcgaaggaaaaaccacacacaccag

SEQ ID NO: 371070 - DNA, 100 bp, Homo sapiens
cccttatcccggagagctgacaatgatgaatctcaacatgcgtcgggatgtccaggaaatttttcgcatgaccccccacgagaagcaggtcatgatgttc

SEQ ID NO: 371071 - DNA, 75 bp, Homo sapiens
gagacagccaacaaaatattcatggttcttgagctccatttatcttaaagaaattggacagcatatgaagacagg

SEQ ID NO: 371072 - DNA, 51 bp, Homo sapiens
ggaattgttttggcctaggatcatccagaatagctctccagacccccagct

SEQ ID NO: 371073 - DNA, 98 bp, Homo sapiens
gccctggcaatgagagaagaagacaatcgcagtggaaaactgagtagaacattacgtggtagaggtcaagcttccagccagaatgtttgagtcactac

SEQ ID NO: 371074 - DNA, 98 bp, Homo sapiens
agaaagtcctctcgggagaagcagcgcctgttcccggggcagatccaggttcagaaattccgggtagatatgcctggctcaggcagtgcattcatccc

SEQ ID NO: 371075 - DNA, 50 bp, Homo sapiens
agcaaccgaaaaggagagtttcctggttgaaggtttagaacagatgtgga

SEQ ID NO: 371076 - DNA, 100 bp, Homo sapiens
tcctgctgtcacgtcacctggcccctcaccatcaccatcctcatctctcttgggtcatggattgacggcagtcaaggaaaaagcaggagccactctacgg

SEQ ID NO: 371077 - DNA, 82 bp, Homo sapiens
gaagccctacgagtgcaacatctgcaaggtccgcttcaccaggtatcacctcttctgggctcaagatggacaacaagaagcg

SEQ ID NO: 371078 - DNA, 74 bp, Homo sapiens
accagtgtaataccctgaatcccctccatgatgcgttatctgggtctggaaacccaaaccctcaaggatggcct

SEQ ID NO: 371079 - DNA, 100 bp, Homo sapiens
ggccccgatggccccgaccgcgtgctggagctcttcgacccacccaaggtgaaatgacaatggatgctctgttggctcgattgaaacttctgaatccaga

SEQ ID NO: 371080 - DNA, 82 bp, Homo sapiens
gccccatcgagaaatggccgcgtcggcagcccagctcaacattggcaatgtgctccctgtgggcaccatgcctgagggtaca

SEQ ID NO: 371081 - DNA, 100 bp, Homo sapiens
aagcaatatatactccaaatttttattgacgaaaatggaacagcaacaattagagcttagaccatgctcagcctccaagcagccttgtcatcgacaaaga

SEQ ID NO: 371082 - DNA, 74 bp, Homo sapiens
cagaaagttgaacagaacgcggctcccagccacaccaagttcaggtgtgactgcacagaaaagttacaaaacaa

SEQ ID NO: 371083 - DNA, 82 bp, Homo sapiens
gagcgacagtgcccaggggtctgagtctcacagcttgtaaaggacatacagcagctcctccagctccagcagctggtgcttg

SEQ ID NO: 371084 - DNA, 100 bp, Homo sapiens
ttctggcatcagggaggctttcagccggagaagcgagtttcagctggatctgaagaagctgaagaaaaacaggacagtgagaaaccacttttagaactat

SEQ ID NO: 371085 - DNA, 100 bp, Homo sapiens
gctggctgctctgtgcaagaagtatgctgaactgactgtttcaatcttggagcagcgactgactttgacagaggataagctgaaagactgccttgaaaat

SEQ ID NO: 371086 - DNA, 82 bp, Homo sapiens
gaagaccgaagcgttcgtatctggaagattctgaaggaagatttccattaggtaatttgtttaatcagtgcaagcgaaatta

SEQ ID NO: 371087 - DNA, 96 bp, Homo sapiens
ccagaataaagccaagctcatctctgagacccggaggaggttcgaagctgagtatgtgacagaataatccagaatggctactctgatctatgttga

SEQ ID NO: 371088 - DNA, 76 bp, Homo sapiens
agcacctatcacttgttccctccaagacaactgaatgactatcttgctaatcatggccggttaaatgagtctgaag

SEQ ID NO: 371089 - DNA, 74 bp, Homo sapiens
gggaggtgtggaagagccgggtagacctgcctagagctggaacgttacctccagagcgagccctgctatgtttc

SEQ ID NO: 371090 - DNA, 75 bp, Homo sapiens
aaaaatggaagtccagcaggaggagatgctaaagaattaggaaaatctctaacttccaaggtcccaccaacagtt

SEQ ID NO: 371091 - DNA, 59 bp, Homo sapiens
gccagcccgccagcatgccccagtccaaagctgaccatactccctggagccttctcccg

SEQ ID NO: 371092 - DNA, 100 bp, Homo sapiens
gagcaatgttcttccactggcgacgtgcagcggaggagggcaaggactacccctttgccaggttcaataaggcagctgttgtgctgtgtatggacgtggg

SEQ ID NO: 371093 - DNA, 88 bp, Homo sapiens
ttctcttaagaaagattccaacccaatgtaggtacaagtagtcaagtttcttcattaaggagacctgaagaggatgatatggctttct

SEQ ID NO: 371094 - DNA, 100 bp, Homo sapiens
acggacggtgatggtggtcgccgcggcggcgtgtgcgcccctcaggagaaaatgctgagaagcttctgcagttcaagcgttggttctggtcaatagtaga

SEQ ID NO: 371095 - DNA, 100 bp, Homo sapiens
agaagcgcgagggctacgagcgtctcctgaagatgcaaaaccagcgtggcggccgcgctctcttccaggacatcaagctcgcggaggcaaggccgaggat

SEQ ID NO: 371096 - DNA, 100 bp, Homo sapiens
aaaaaactgaaaatagataccaaagaaaagaaagagaaaaagcagaaagtagatgaagatgagattcagaagatgcagtgacctgaaacatatcacgaag

SEQ ID NO: 371097 - DNA, 90 bp, Homo sapiens
actctatacagggacgtgatgctggagaattataggaacctggtctccctggctctacttctgcaggccccatcccttcccagaaagaag

SEQ ID NO: 371098 - DNA, 104 bp, Homo sapiens
tgtttttcctgtcgtacgtgggacaggccacgctgtccgtccgcagtaccgacgcctgcagactgtgccctgtccacggtgcctcctgcatgtcctgctgccct

SEQ ID NO: 371099 - DNA, 90 bp, Homo sapiens
ccgagccagccgctgttttgccggaggagcccctcaggcccagtgtttggccagcgcttggatgagactgtggcctatgaacagaaattc

SEQ ID NO: 371100 - DNA, 75 bp, Homo sapiens
gaatgtacacacctcattgtgcaagaaccaaaagggctgcgaataaaggagaccaaggaagtttatgaaggtgaa

SEQ ID NO: 371101 - DNA, 97 bp, Homo sapiens
ctgctgtgggcgctgctggcgctctggctgtgctgcgcgacccccgcgcatgtgatggaatggggagaagatattaaagcagtttcaaaagatgaag

SEQ ID NO: 371102 - DNA, 100 bp, Homo sapiens
cgtcccccccaacacctgagccaggtgaagggccccgtaaattggaaggatgcacaagttccaaggttacgtttcattacgtaatcaaggtcaagtgagg

SEQ ID NO: 371103 - DNA, 126 bp, Homo sapiens
gaagctgccatcagtaagctatactccaccatccggccctacctagagacttatcaccagaccccaccacccaccttctcctttcgagaaaggatgactcacaagagtcttgtctacctctggttc

SEQ ID NO: 371104 - DNA, 75 bp, Homo sapiens
gaggcaaggagctaaagcagcgtgcgttcagccctgggagttttgcggcctccaggtggtggatccaatttttca

SEQ ID NO: 371105 - DNA, 90 bp, Homo sapiens
ggggactgcacgtagcccggcgctcggcatggctctcctggtgctcggtcccggatgttacaggtcagagccctccagacccccaaggac

SEQ ID NO: 371106 - DNA, 51 bp, Homo sapiens
agttatcctttggaaatgtgctcacactaactgataaatttcaaacggaag

SEQ ID NO: 371107 - DNA, 98 bp, Homo sapiens
aaacagaaagacctccaggagaagatcagtgggaagttgccctcaaattggctgtagccacacggatataagaaagtcagatcttatccaggatgaag

SEQ ID NO: 371108 - DNA, 51 bp, Homo sapiens
cagcagcgaggaaggaaacagcgatggcttaatggtacaaataactccaga

SEQ ID NO: 371109 - DNA, 139 bp, Homo sapiens
agatggcggtgcaggagtcggcggctcagttgtccatgaccctgaaggtccaggagtacccgaccctcaaggtactccaaagattcaggtttactcacgtcatccagcagagaatggaaagtcaaatttcctgaattgc

SEQ ID NO: 371110 - DNA, 88 bp, Homo sapiens
ggaagcccctatcgccgagctcgttggagcttgaacccattgtcacccctccgtgaaaccagcagtgtgtgtagcagcagtgacactg

SEQ ID NO: 371111 - DNA, 110 bp, Homo sapiens
atccccgacgaccggatcctgaggaggcagctgcggtggcagctgctgagttctcggtgaagacaatgcagatcttcgtgaagactctgactggtaagaccatcaccctc

SEQ ID NO: 371112 - DNA, 100 bp, Homo sapiens
ccagcaccatggggaagcgggacaatcgggtggtggcagtagagaagagcatcacagaagttgctcaggagctgacagagctggtggaacatcttgtaga

SEQ ID NO: 371113 - DNA, 96 bp, Homo sapiens
gccggccgggattcgcggcccggagctcgggaccgcgggtccatatggaatatttgctggtagggatgcctccagaggactggccacattttgcct

SEQ ID NO: 371114 - DNA, 75 bp, Homo sapiens
ccctggagcggctctgctcggtcctcaaagaaatgagccgtcagactgctacagcattacctaccggtacctcga

SEQ ID NO: 371115 - DNA, 94 bp, Homo sapiens
ggaagctgaaaccacagacatgactgagtcctccatgaagagtgaaatgacaatggatgctctgttggctcgattgaaacttctgaatccagat

SEQ ID NO: 371116 - DNA, 98 bp, Homo sapiens
ctcggccgccgcagcctcgccgcgctgggagccgcctgcgcccgccgaggcctcgagatcctcaccatggagaaggaagtggcccagagccttctcaa

SEQ ID NO: 371117 - DNA, 96 bp, Homo sapiens
caacctggccctgaagaactacagtgtgattgatatcagtaaatgccattatttagtggatttggacaccatgagagaaacaccccgggagccaaa

SEQ ID NO: 371118 - DNA, 98 bp, Homo sapiens
tccaaagccattcccaaattatagagctaattacaactttcggggcatgtacaatcagagggtgactcagggggccccttgatctgtaaaggtgtctt

SEQ ID NO: 371119 - DNA, 74 bp, Homo sapiens
gaagctttatctgtgatagaattgctgcttaaaaaacttgaagggacccccatcaaccgaatccccatcatggc

SEQ ID NO: 371120 - DNA, 75 bp, Homo sapiens
cctgatcatcctgctgggcttcgtccagatcgggaaggccgaacgaccctgtcaccaacatttgccaagcagccg

SEQ ID NO: 371121 - DNA, 90 bp, Homo sapiens
gctgccatggacctgggacccatgcgcaagagttaccgcggggaccgagaggagtccctgtttctgctgctccagtacctgccccctggg

SEQ ID NO: 371122 - DNA, 141 bp, Homo sapiens
ccggaacaaactcaaccaactccactacagctgttcccagcttggttgcacttgagaaaattaatgtggcagaacgtacctttcaagaacaagtttccgacacagaaaataacctgaaccaaggacccagcttgatggaag

SEQ ID NO: 371123 - DNA, 98 bp, Homo sapiens
gagatggtcaggtctggagctcgaccgggccaggtctcctgattttcatgaagaaatcaaggttaagcttcctgctactttaactgaccatcatcact

SEQ ID NO: 371124 - DNA, 100 bp, Homo sapiens
ggccgaagacactgcgactccggagacagcccaaatatcctcggaagagcgctcccaggagaaacaagatatgtttgccttcatgggcagcctggatacc

SEQ ID NO: 371125 - DNA, 98 bp, Homo sapiens
ggactgcagagaagcaggacctcgggccatgggcaactccccatcagatgagtctgaggagcgggaaagagaccccaaggtgctgacattcccagaat

SEQ ID NO: 371126 - DNA, 75 bp, Homo sapiens
caagtgccaaacggaggaatacctcgtatgcaacctcaggcttcagccagttacacggtgtgggcacacaacctc

SEQ ID NO: 371127 - DNA, 74 bp, Homo sapiens
aaagaccgctttccatggagagtaaaggccggctggaaagtccccaagcgagacggggtctcactatgttgccc

SEQ ID NO: 371128 - DNA, 98 bp, Homo sapiens
cgcagttaggcagcagcagccgcggagcagtagccgccgtgggagggagccatgaagcattacgagatttaatccagagactgacttcactatagaac

SEQ ID NO: 371129 - DNA, 98 bp, Homo sapiens
tatcaagtaatggtgcaaagcctgaagtgaacacacagtgttcatcccctcaggaggacacagcttttgaggtaccatcttggaagcagagaccagac

SEQ ID NO: 371130 - DNA, 90 bp, Homo sapiens
ggcagatacccaggaactaacccaggaatgtcccaaatgccatgtcacaattgagaaggatggtggttgtaatcacatggtctgtcgtaa

SEQ ID NO: 371131 - DNA, 75 bp, Homo sapiens
tgcccaggttgacctttctgcgggaggttggtcaaagaaaaagtgatgtatgaaaaagaggcaaaacaacaagaa

SEQ ID NO: 371132 - DNA, 83 bp, Homo sapiens
aatatctgtcttcggtggactccttcggcagtccacccaccgccgccgcctcccagtcaggactggtggagtcaacacagtca

SEQ ID NO: 371133 - DNA, 114 bp, Homo sapiens
gagctttcacgaaggcaccgacgtcatcatgctgaccaccaatcagatccgtaagagtctctggccagccgcagagtgtgaccgcctcctcggacaaggcttttgaagactggc

SEQ ID NO: 371134 - DNA, 98 bp, Homo sapiens
ggccgcgccatgtggctgctggggccgctgtgcctgctgctgagcagcgccgcgggagtggattagaacaagatgacatgagaattttatacaaatac

SEQ ID NO: 371135 - DNA, 98 bp, Homo sapiens
ccttcagcaattgaactcccagattatttgatgtatgccattgcattggccttaagggaaaagcagcgtgtaatatttaccagcccaattaaggctct

SEQ ID NO: 371136 - DNA, 100 bp, Homo sapiens
cttggaggacatgttaagtgaagtaagtctggacagaaaaatactgcgtgttctcacccacagacgccaaggcgccccgagaggcacttcgcttccatgc

SEQ ID NO: 371137 - DNA, 80 bp, Homo sapiens
acaggacgaaggcgtgctgaagggaaagcaggcaggatgggagagtcgccgatagaaccacctcttccctgcctcctggg

SEQ ID NO: 371138 - DNA, 100 bp, Homo sapiens
caagattctgaatctggtgatgaacttagcagcagctccactgaacagataaggctggtagcagtgtttgatgagcaggatccacatcacggaggtgatg

SEQ ID NO: 371139 - DNA, 90 bp, Homo sapiens
acagcatccaggcctcattggacagcattcgaggagctgacatggacccaaatcctcgggccgccctggagcgccagcagctccgccttc

SEQ ID NO: 371140 - DNA, 100 bp, Homo sapiens
gtttttccgaagcctgcatttttttgtggagtggtttgaatatcgtaagcgcacgtttaaacatctcaagagaccatcatgcagacatcagagactgggt

SEQ ID NO: 371141 - DNA, 74 bp, Homo sapiens
gccatcaccgacctcatcagtgagctgtccctgctggaggagcgcttccggcaacgttggcccagaaaacccca

SEQ ID NO: 371142 - DNA, 74 bp, Homo sapiens
ataaaatgacgacgtccttctggaagaggcgaaactgcttaaagcttttcaagccaggccaagaagctgtgaag

SEQ ID NO: 371143 - DNA, 75 bp, Homo sapiens
gccgcggggactcggagctgagaggagctgctgctcggaccagcgcgtgcttcaccgatatagacacattttggg

SEQ ID NO: 371144 - DNA, 100 bp, Homo sapiens
gtgtcatcgaggtaagaaacggttgtggatcttgaagctttggaaaggaaagaccacagcaagattctttcattcgtctcctcctagcctgggggaccag

SEQ ID NO: 371145 - DNA, 90 bp, Homo sapiens
cccctttaaggatatgcctgccacccagcgacctggcatgtcaccagggaaccggatgcccatggctggcttgcaggtgggaccccctgc

SEQ ID NO: 371146 - DNA, 75 bp, Homo sapiens
ttgaatctaaggaacttgttaaatctgttcgtgccttacttgatatggattgaaagaccacagcaagattctttc

SEQ ID NO: 371147 - DNA, 89 bp, Homo sapiens
ccccggtacatctgaaagccgggaaatggtgaatgaaaactttgccattgatttgatagcagagcagcccgtgagcgaggtggagactc

SEQ ID NO: 371148 - DNA, 83 bp, Homo sapiens
ggttcggcctccccgcgcactagaacggtgatggcatcagctgagaagggaaggaagcccatgtgaggacactgaagaaggag

SEQ ID NO: 371149 - DNA, 100 bp, Homo sapiens
ctccgggcggcgcgaagcgctggtggcgggcccgggctgcggcgtgtgcgcgcccgccagctgctccggagatacggtggctctgtctggagaatgcccc

SEQ ID NO: 371150 - DNA, 89 bp, Homo sapiens
cgcccggagcaagcggagctcccccaagagccggaaaggatttttttcccaggaagccatcccgtcagaggggttcaagtgatgaaagt

SEQ ID NO: 371151 - DNA, 100 bp, Homo sapiens
ttatgagtggaacatggctagcaggaatgcttactgttgcgtggttcgttattaacagggtgcttcaaggatgaccgcatcgtcttctggacttggatgt

SEQ ID NO: 371152 - DNA, 85 bp, Homo sapiens
cacctgtaagaacagaaaatcgtcttatagttgagaatttatcctcaagagtcagctggcagcaagtctggaaaagtttgaaatt

SEQ ID NO: 371153 - DNA, 75 bp, Homo sapiens
gcggggcggtgccccaggacctagcggaacatcatttacagcgagcaatttcagcacagcaagtgtttagagaaa

SEQ ID NO: 371154 - DNA, 51 bp, Homo sapiens
gccagaagcgggcggcgcgggggagatggtgaagccaaaaaccttccctct

SEQ ID NO: 371155 - DNA, 76 bp, Homo sapiens
acagatcacagctacggtgacatttctgccactgttggaagtttcttataatgatctacgtactacttcgacactg

SEQ ID NO: 371156 - DNA, 100 bp, Homo sapiens
tcacggtcgtcactccccaaggccaagtggtcacacagacattgtcgcctgggacaattaggatccagaactcccagctattcctgcaccaactgacctg

SEQ ID NO: 371157 - DNA, 100 bp, Homo sapiens
aaatcattcagtgaatcccaactgttatgccaaagctgtatggtagccttgaaaaccaacaggccacaatcacagtgaaaacctcaggttggcagccact

SEQ ID NO: 371158 - DNA, 75 bp, Homo sapiens
gtacctggatctcatcaaaaaggacaccagcaagctgttcaatgaggagcaattaccagctctggctgggtcgcc

SEQ ID NO: 371159 - DNA, 90 bp, Homo sapiens
gtttgttctgggcgaatggcagcccatcgagatgcttgctctgtcaaggcacagcctattgtctcctttgctcagtgtgacatcattcag

SEQ ID NO: 371160 - DNA, 97 bp, Homo sapiens
ccacgatccgcgtgcccaggtccggcgacagggtctacaagaacgagtgcgccttctcctacgactctcccgaacgagttgaagcagttaatatggc

SEQ ID NO: 371161 - DNA, 75 bp, Homo sapiens
tggaggagcagttgtctgatgaagagaagttttgagtatccgaggagcccaggaggaggaacccacagaccccca

SEQ ID NO: 371162 - DNA, 100 bp, Homo sapiens
cgacgcacaaccaggcgatggtgcactggacgggcgagaacagcagcggtaccgtgagggttttctctggaagcgtggccgggacaacgggcagtttttg

SEQ ID NO: 371163 - DNA, 75 bp, Homo sapiens
cttgtacaaaggagagtttaaacagccaaaacagttcattcatattcagcgtgatgatgaacagtctacacagat

SEQ ID NO: 371164 - DNA, 113 bp, Homo sapiens
gagatcaaaagactggtacaagactatgtttaaacagatccacaaactgaacagaggatgcttttgtacaattcacacatgctttccacattgttctggaacatctgagaaag

SEQ ID NO: 371165 - DNA, 75 bp, Homo sapiens
cttcaatatgcattgcattaactcaccagtatgcatgagcgggtgaaccgaacagaaagacagtttcgatcactt

SEQ ID NO: 371166 - DNA, 75 bp, Homo sapiens
tccttctcccggcgcctcaagcggaagcgagtaaccagctcataaatcacatcgaacagtttttggatactaatg

SEQ ID NO: 371167 - DNA, 100 bp, Homo sapiens
accagcggcagcatgcatctgatgctctctctccagtccttgctgaagagactttccgttacatgaccaagaaggatcaagaaggtggagaagaaaagaa

SEQ ID NO: 371168 - DNA, 75 bp, Homo sapiens
catcaagagaagatctggccttatgcccaggcctgggccctcagaaagaactgtggctgcaccatctgtcttcat

SEQ ID NO: 371169 - DNA, 100 bp, Homo sapiens
cagaaaacccccatcatcctctcaaaacctccagcagagcggataaatactgcaacaactgtagctgacttaaagtcaataataaatgaatgctataact

SEQ ID NO: 371170 - DNA, 74 bp, Homo sapiens
ggagcccgagtggatcggggacggagagaacacgagcccatcagacggaatcagtccccaatgcctggaaattc

SEQ ID NO: 371171 - DNA, 121 bp, Homo sapiens
cagaaaaataacccacgcagggactctcagcccacaagtgaagctttgtgtgacttcattgagacacattacctgaatgagcaggtgaaagccatcaaagaattgggtgaccacgtgacca

SEQ ID NO: 371172 - DNA, 98 bp, Homo sapiens
ggaaatagacaccaaatcttactggaaggcacttggcatctccccattccatgagcatgcagaggtctgcaataatttccctctactcattgattgtt

SEQ ID NO: 371173 - DNA, 89 bp, Homo sapiens
cccgaggggctcagcgccttcacccaagcgctatatttgtagagcaattgaattattggaaaaactacaaaggagtggagaagtaccac

SEQ ID NO: 371174 - DNA, 75 bp, Homo sapiens
gggcctgttggctttcagccttaccgccgacctttaaattttccactcaggaaacagatgcagtcagacccacat

SEQ ID NO: 371175 - DNA, 82 bp, Homo sapiens
aagggtgtccgacggctggagcgcggagctggagtttgttcagatcatcatcatcgtggtggtgatgatggtgatggtggtg

SEQ ID NO: 371176 - DNA, 101 bp, Homo sapiens
ccgtgatctccagcgccggcctcctcagtgcgaagaagctgcagccgcacctggccaaggctgaaccttcacctagccccaggattacaaggaaaagcacc

SEQ ID NO: 371177 - DNA, 75 bp, Homo sapiens
ggctctccaagttctaccagccctacttgctgatcatctgggctgtgatccacaaacccggttctttgtccctcc

SEQ ID NO: 371178 - DNA, 100 bp, Homo sapiens
caaaaggtctgaaggtgtcgggacctcttcatctgagagcactcatccagaaggccctgaggaaggtgggctggatgacactttgcacacaattattgat

SEQ ID NO: 371179 - DNA, 75 bp, Homo sapiens
tggcagttttgccaggtgtttgttaccttggttcgagaacttgtcttggacaattgcaaatcaaatgatggaaaa

SEQ ID NO: 371180 - DNA, 83 bp, Homo sapiens
cttatactcctcccagtgacgggtctggagtgcgtgggggaccggctgttggcggcggaaggagagttttacatggaagtggc

SEQ ID NO: 371181 - DNA, 51 bp, Homo sapiens
aagagggaagacacgcggaaacaggtgacaacatccgggaattcttgctga

SEQ ID NO: 371182 - DNA, 98 bp, Homo sapiens
cccgggaagagatgcagcgctatgcggaggatgttggggccgtcaagttaaacccatccagagtaatggctgcggccttacccaggaccctgggggag

SEQ ID NO: 371183 - DNA, 100 bp, Homo sapiens
gtgacccgggtgccgaggagcgggaagagttgctgggatctcctgggaggcccccgtggagaagaagactgagtgtatccagaaagggaagaacaaccag

SEQ ID NO: 371184 - DNA, 80 bp, Homo sapiens
gcaccagcaagatcggcaggcgagattgcctgacccaggcctgctcggccctcacagggcccctggccccaacatggccc

SEQ ID NO: 371185 - DNA, 98 bp, Homo sapiens
gctctggagtggcccagcctaactgcccagtggcttccagatgtaaccagggttattttggagctgttggagcactccttgagctgttgaagatcccg

SEQ ID NO: 371186 - DNA, 75 bp, Homo sapiens
agctatatactttggttacctatgtacctgttaccactttcaaaagagacgaaaccagacagagggtcaagttta

SEQ ID NO: 371187 - DNA, 75 bp, Homo sapiens
cagtagcgccctgtaggacccccaggacccgatgaaaagcaccaaggattctcttttgttgaatttgagttggca

SEQ ID NO: 371188 - DNA, 88 bp, Homo sapiens
gcggagctgacggtggaggttcgcggctctaacggggctttctacaagatgaagactggcccatttgcagagcactccaaccagctgt

SEQ ID NO: 371189 - DNA, 82 bp, Homo sapiens
ggtagaggcagtggcgcttgagttggtcgggggcagcggcagtgccctctggtggtcagaagatgctgtgctgtctcgttag

SEQ ID NO: 371190 - DNA, 75 bp, Homo sapiens
tctacacttgcttccaatccatacaggcccaaaagagttcagacgccatcatgaccgggtcctataacaacttct

SEQ ID NO: 371191 - DNA, 74 bp, Homo sapiens
ttcgccgaggcaccgaggcactcagaggagggcatgacgtccttgatgaaggccgcgctggacctcacctaccc

SEQ ID NO: 371192 - DNA, 75 bp, Homo sapiens
tggaaacaccatggctgcggcggcccagctctctctgacacaggcatgtggagaccccaaggcaaaaccatccta

SEQ ID NO: 371193 - DNA, 100 bp, Homo sapiens
tggaaccggcaccatgtggagcgggtggagatcatcatgaaagagaccgtggatgctgaagccggccaagagccactgcacaatgaggagctggcaggag

SEQ ID NO: 371194 - DNA, 100 bp, Homo sapiens
agaatctcgtgctcaccggtttctcccacatcgacctggaacatccaatacttgggcaacccttttttgtacttcatccctgcaagacgaatgaattcat

SEQ ID NO: 371195 - DNA, 136 bp, Homo sapiens
caaagccaacagacactgccaccctcaaggagttcacgttcatgggcgagggaacagatgagaaacccggcaatgaaactaaagattccaggcttcaagatcagaggcagaactctcctgcagggaataaagaaaa

SEQ ID NO: 371196 - DNA, 96 bp, Homo sapiens
gacaaagcgtccctcaaggcccccgcgtggttcagacagacgccgcagccaggatggttgaggccaaacttccagatctgcaaccatttccttctc

SEQ ID NO: 371197 - DNA, 100 bp, Homo sapiens
gccacgcacatctacggcgcctcggccggggcgctcacggccacggcgctggtcaccggggtctgcctggatgtaccggctcacgctgcgcacaagtaag

SEQ ID NO: 371198 - DNA, 100 bp, Homo sapiens
cccggggcatctatgccagtgagaggcccaagtccctagctatactgacttctgttgaaaccattcaaagctaaagacatggaccttcagcagtgtaaga

SEQ ID NO: 371199 - DNA, 88 bp, Homo sapiens
cctttagactaatgactgtccgaaacatcgcctccatctgtaatatggttgctgcagcaactggtcacacagtagtgttggtagacca

SEQ ID NO: 371200 - DNA, 92 bp, Homo sapiens
gtgcctgcggtgcctgagctgagtgaggccgaggccgggaggccgtgcccggagatggctgagagctagcaaggaaaactcaggaccatgat

SEQ ID NO: 371201 - DNA, 100 bp, Homo sapiens
cagcccgccgggagctctgaccgaggcgcctcgctggggcggggaccttgccttgcccgggcaactggaacagatccagaaggagctaagtgttttggaa

SEQ ID NO: 371202 - DNA, 76 bp, Homo sapiens
aggccgaagctgacaaaattggactactgcttgctgcaaaggctttggtatcaggatgattctggcctcataaaat

SEQ ID NO: 371203 - DNA, 100 bp, Homo sapiens
ccttgacagtcttctagaagagagaaggaggaaaagaagcagttcctgatgttacaaatgaacaaggatctcccagactaagtcagtgctacactttgag

SEQ ID NO: 371204 - DNA, 100 bp, Homo sapiens
catcaaaatagctacaaaccatactaaattattccatttgcaacttatccccaacagcattccaggatgccttgaagattttctgtaggataaaaggtgg

SEQ ID NO: 371205 - DNA, 100 bp, Homo sapiens
acagttcctgggaaggtggagccaccagcctctccttgtgccggtggtggtgtgcacattgagccccggtatagacagttcccccagctgaccagatccc

SEQ ID NO: 371206 - DNA, 100 bp, Homo sapiens
tcaggagtatgtggatatctgtgactatgctgttggtttatcaaggatgattggaggacctatcttgccttctgaaaactctctccaaattcccgataac

SEQ ID NO: 371207 - DNA, 82 bp, Homo sapiens
cgcagttcttgtttgtggatcgctgtgatcgtcacttgtgtggacgaatgtggaacctcgctctgtggctgtgttcccttgg

SEQ ID NO: 371208 - DNA, 103 bp, Homo sapiens
gtgacggtggcgccgcccggggcgaggcagggccagcagcaggcgggagggaaatcctcattgacgattcaatttgttgaaggccaatttgtggactcctacg

SEQ ID NO: 371209 - DNA, 100 bp, Homo sapiens
ctgagatgtgagatggcttccactggagaggagatgttacagcccagatagctcttcagcctgcactgaagttcaatggtggtggtcatatcaatcatag

SEQ ID NO: 371210 - DNA, 83 bp, Homo sapiens
tacacggccagttttgaaatcgacacacaaagaatagagttgagcctgtgggacacttcggatcgcaccccctccctccctgg

SEQ ID NO: 371211 - DNA, 100 bp, Homo sapiens
gagaaaaagcagaaagtagatgaagatgagattcagaagatgcagagccttcacgtaaatgggtccagtcatgcctcccagtaagaagccagaaagctca

SEQ ID NO: 371212 - DNA, 98 bp, Homo sapiens
acatggagatgaagaagaagattaacctggagttaaggaacagatccccggaggagggagaagaaatgggtgaccgttggtgacacatccctacgaat

SEQ ID NO: 371213 - DNA, 98 bp, Homo sapiens
tgggagttcagcttttagagcaggtgtatgatcttttggaggaggaggatgaatttgatagagagctccttgacctgtttatggtttgggattggtct

SEQ ID NO: 371214 - DNA, 75 bp, Homo sapiens
gcccgggctgcggcgtgtgcgcgcccgccagctgctccggagatacggttctccaaaatacttatcattcaggtt

SEQ ID NO: 371215 - DNA, 90 bp, Homo sapiens
cagatgactttgacttttcaaaaggaagtggcagagctgtcaccactgactaaagaagagaaaactgcggcagagcaattcaaatttcac

SEQ ID NO: 371216 - DNA, 75 bp, Homo sapiens
ccacagaggataaatttcaacctccggggccacaatagcgaggttattggagtgatgagtaaagaatacatacca

SEQ ID NO: 371217 - DNA, 100 bp, Homo sapiens
cacagaattctctacatttgtgaaagtcagtttctgaggaatttcatcaggtctgttgccacagttattgggagttgccccagagaaggccataaaactt

SEQ ID NO: 371218 - DNA, 75 bp, Homo sapiens
tgcccagccaccagcaaccccccagacgcatcttctctccagactgccgatcccagaaagccaggtgatcaccat

SEQ ID NO: 371219 - DNA, 100 bp, Homo sapiens
cagttcctgggaaggtggagccaccagcctctccctgctgaagaaatcaggggagaaacccctgcttggtggaagcctgatggaatatgcaatcttgtct

SEQ ID NO: 371220 - DNA, 82 bp, Homo sapiens
cgaacacgccgcggtcctcgtcgtgagggagacgtggtgggcggtccttcctgtgacacgacccttgagtgacagttctatt

SEQ ID NO: 371221 - DNA, 100 bp, Homo sapiens
agacgggggaagcagcacgggatcccagcctcaggcctgcacggacggtgttggttggggtgattgaagcctccgatgttgtcctagaggtgttggatgc

SEQ ID NO: 371222 - DNA, 75 bp, Homo sapiens
gagagctccccaggggagttctctgtgtctgtgaaggtcgataaagacaggagtggagtgatatcagacaccgag

SEQ ID NO: 371223 - DNA, 91 bp, Homo sapiens
cgcccgaccccgtcccgaccctggccgccccgagcggagcctggaggggagcttttggaagagtcccagatggaagcgaccaggctccggc

SEQ ID NO: 371224 - DNA, 74 bp, Homo sapiens
ctgaggtcatctttggacatgtcttggcagcagctctccggataaagaccaaatcaaggtggtgattgacgaag

SEQ ID NO: 371225 - DNA, 99 bp, Homo sapiens
acagtgctgacaagaaggctcaaggtcccaaaggtggtggcaatgcagtaaaggagctggaagctatcaaagctcgagtcagggagatggaggaagaag

SEQ ID NO: 371226 - DNA, 100 bp, Homo sapiens
catgaaaatgtaaaatatcttcctggacacaagctgccagaaaatgtggttctggggctgctggtatggacgcttattgctggaactgagtacttccggg

SEQ ID NO: 371227 - DNA, 75 bp, Homo sapiens
gagcagccgcagcgacggcggcgacagcagggagctgcagtccatggctgaccaggagcaggtgtcaccagccgc

SEQ ID NO: 371228 - DNA, 83 bp, Homo sapiens
ccaactcagaatgcattgccattttcacataggtgcactggtggaccaaggtgtctttgaggagctagcacgagactacgtcc

SEQ ID NO: 371229 - DNA, 99 bp, Homo sapiens
tgtgcatggatctcagctacatcacagccctgttaaaggatggctttggctttgcagacagcacagtcttacaggtgaccaagaatatggcccaggtga

SEQ ID NO: 371230 - DNA, 98 bp, Homo sapiens
gccacctcgagctgcggtagcagcgactcatgagagcgcggccggaggacagccattatttggaaagcaggtctataaatgagaaagattatcatagt

SEQ ID NO: 371231 - DNA, 75 bp, Homo sapiens
ggagctaaagcagcgtgcgttcagccctggggaatcccttggcaccatgtcctgtgtgcattataaattttcctc

SEQ ID NO: 371232 - DNA, 100 bp, Homo sapiens
ttggaaaatgccaacgccgtgtctgaaggtggtggaggtggatacagcagtcggagaacatctggcagagacaaatacggaccacctgttcgtacagaat

SEQ ID NO: 371233 - DNA, 100 bp, Homo sapiens
acaagtgaccaacagttgaatcaaagtatggacacaggtactaggttttgacaagcttgcatcatgcgtgagtataagctagtcgttcttggctcaggag

SEQ ID NO: 371234 - DNA, 101 bp, Homo sapiens
cgggagcgcaaggtcgccctcaaggccatgatcaaaacaaggccagaaatgctcacatcaggatccgattgagagctctgactcctatggtgacctctcag

SEQ ID NO: 371235 - DNA, 98 bp, Homo sapiens
tctctcatcctgactggggatccagagtaggagggagcctttggtgggattgagggagaagtggacctcattgggatggtgaggctgacagaaaccag

SEQ ID NO: 371236 - DNA, 101 bp, Homo sapiens
cgcaggcttccacctggcggccagtcatcatcagatttgaaatatttaaagtggatacaaaactatttcagcaatgcagacaattaagtgtgttgttgtgg

SEQ ID NO: 371237 - DNA, 74 bp, Homo sapiens
ttcatcggtgtgcacttttaacaggtgaccaagaatatggcccaggtgaccaaagccctggacaaggccctgag

SEQ ID NO: 371238 - DNA, 75 bp, Homo sapiens
cggcgccatcttcgaacttagacttccggaaggactttggcgaggtgcaggcctgagtgttccttccagcatgtc

SEQ ID NO: 371239 - DNA, 90 bp, Homo sapiens
cagcagcatcagacacatgatccgcaagaacaagtaccgccccgacctgcgcatgaacaaactcacgatgttggacattgcatcaaatag

SEQ ID NO: 371240 - DNA, 75 bp, Homo sapiens
ccagagctgcatcattccttggggcaaaatgtggacaaggagggtgtttgtgagatatggttgaccagtgaagac

SEQ ID NO: 371241 - DNA, 49 bp, Homo sapiens
tttgcttgtaatgtcggcgactacagctttcccatggtttggcatggac

SEQ ID NO: 371242 - DNA, 75 bp, Homo sapiens
agcctggaatgatatcaaaaaggagctccccacaccaagtgagaatagcatgccaccaggcctctcaactcccac

SEQ ID NO: 371243 - DNA, 51 bp, Homo sapiens
tcccagagtgctgggattacagcactggacaagacactgtttccaatccta

SEQ ID NO: 371244 - DNA, 100 bp, Homo sapiens
tcatttgatctgaatagtattaaaataaaatacctggatgaggaagatgaagaggtcacagatgtgacattgatgtgtccactgaagccatgtatgctgc

SEQ ID NO: 371245 - DNA, 80 bp, Homo sapiens
cggctctgcatcgcgtcgccatgatgggccatcgtccagtgctcgtgctcagcagcagcagcggaaccgcttaggcagtg

SEQ ID NO: 371246 - DNA, 141 bp, Homo sapiens
ttcctgctgcccacaggggtctacctgaacttccctgtgtcccgcaatgccaacctcagcaccatcaagcagttgtcggccctgggccgggagctggagtcccagactcataggtcccggcccagcccccgaagagccgcc

SEQ ID NO: 371247 - DNA, 51 bp, Homo sapiens
gtgcgtcaatcagagcgtcctgtgcgcctatccctcggccagatcctgtgc

SEQ ID NO: 371248 - DNA, 82 bp, Homo sapiens
cattgaggactctgtagttgaagattataattcagtggataaaactaccacagaaaacaaccctttttgctgcacatgtaag

SEQ ID NO: 371249 - DNA, 100 bp, Homo sapiens
cgagagtcttaaaatcctgctctggccggattccagactcgtgggggaaaggctgttcctattatccttgccgtaaataaatgtgacaaagctgaggctg

SEQ ID NO: 371250 - DNA, 96 bp, Homo sapiens
aagaaggaagattcacactgtaacattattcacactgaggctggagcattggatttgctaaaggagcttaagaatattcctatgaccctggaatta

SEQ ID NO: 371251 - DNA, 80 bp, Homo sapiens
cgcctgggaccttgcggtgaggctgcgcggggccgaggccgcctccgagcgccagagtaacagttacccctcaatgagcg

SEQ ID NO: 371252 - DNA, 97 bp, Homo sapiens
gtgacgcggcctcctccgcgcctcgcggcatggcgtcggaggggccgcgggagcccgaaagcgaggatgtacagttacccagcacgtgtacctcctc

SEQ ID NO: 371253 - DNA, 101 bp, Homo sapiens
ggcaagagtaacagcagcgccgtcccgtccgacagccaggcccgggagaacccctgccgccttgtcatgactccgaggaatccatggaggtgttcaaacag

SEQ ID NO: 371254 - DNA, 83 bp, Homo sapiens
caaacaatcaccgcttgccttcaacttcgggaaggaggagtttgtttacgaggacatggaggccctctgcagtgtcctgcgca

SEQ ID NO: 371255 - DNA, 96 bp, Homo sapiens
acctccggggccacaatagcgaggtttccgcagacatgcagctccagttacaagaaggcagttcccacacggtgcacacaggatggattacctgca

SEQ ID NO: 371256 - DNA, 100 bp, Homo sapiens
ctgtcatctcggagcaaaacagatcttgactgcatttttgggaaaagacagagtaagaagactcccgaggtccagctcttctatgaactaactgatatca

SEQ ID NO: 371257 - DNA, 83 bp, Homo sapiens
acagccgcggcggcagcagcagtgagagctgagcgtgctccgcctctcaccttccatgggccacccgctggaggtggggctgg

SEQ ID NO: 371258 - DNA, 75 bp, Homo sapiens
ctccttcggcagtccacccaccgccgccgcctcccaggagataaatctccccctaaacttgaaccatcagatgca

SEQ ID NO: 371259 - DNA, 83 bp, Homo sapiens
aaggagcggccgggagcccgccgcgctggtagcgtgagaaggcaaccaaagtgcaggacatcaaaaacaacctgaaagaggcg

SEQ ID NO: 371260 - DNA, 100 bp, Homo sapiens
gcgttcaagcgaaaacatgaccgctgagcccatgagacttgtgcaccatggacaattttgctgagggagatttcactgtggcggattatgccttgttaga

SEQ ID NO: 371261 - DNA, 101 bp, Homo sapiens
attcaaacatggaaaagctcctattctgattgctacagatgtggcctccagagggctagagctccgagaggccttcagagaattcgacaaggacaaggatg

SEQ ID NO: 371262 - DNA, 102 bp, Homo sapiens
tccagaggagaagctggcagctctctgtaagaaatatgctgatctttttttgcctgtatacatgcacattcgagttctggttgctgcatatttatttcagac

SEQ ID NO: 371263 - DNA, 80 bp, Homo sapiens
ataaaaagagatgtggggggattctcgacctgctaacagaactggaccttttcggtttaagaattgtttaagctgcatca

SEQ ID NO: 371264 - DNA, 96 bp, Homo sapiens
cgcaggcgctggctggcaggtgtcgctaaccggacggtggtcgccagggcgagaggcgggagccggagagctctggattaatcgaattacagctgc

SEQ ID NO: 371265 - DNA, 50 bp, Homo sapiens
gtccgagcactttcagctctgcaagctgtcaataccagcaaatatgcaga

SEQ ID NO: 371266 - DNA, 99 bp, Homo sapiens
cagcacccgcacccacggcgccgtcttcaacctcgagtactcgcccgacggggtttctccaaggacatcaaggtgcccaagagccgctacctgggctac

SEQ ID NO: 371267 - DNA, 75 bp, Homo sapiens
ctataacgccggtgctctgacctggctgtcctgcgggagcctgtgcctgctgggaggagctctacggtgactttg

SEQ ID NO: 371268 - DNA, 100 bp, Homo sapiens
ccaacctatgttgccctgagttacataaatagatgatgattattctccaccgtctaagagaccaaaggccaatgagctaccgcagccaccagtcccggaa

SEQ ID NO: 371269 - DNA, 83 bp, Homo sapiens
attgataacaccctgtaacagctgaggataagactgcatgaatatgtcgaaacagccagtttccaatgttagagccatccagg

SEQ ID NO: 371270 - DNA, 83 bp, Homo sapiens
ccgcgcgcagggcctgcagcgggagctggacggcgagcgcgagcggcgcgagaaagttaacacagaaatctgcctcctgggcc

SEQ ID NO: 371271 - DNA, 51 bp, Homo sapiens
ttccaggaggccaagcattatggcaggacagagcgggatgccaccagcttg

SEQ ID NO: 371272 - DNA, 100 bp, Homo sapiens
ccaagaagaccattcagatgggatctttccggatcaatccagatggcagccagtcagtggtggagtgccaccaagtggttggtgtagacgtggagtggac

SEQ ID NO: 371273 - DNA, 100 bp, Homo sapiens
agggccgcccgccctagaggtgcccgtccgagaggcagtgagtttatggtcgaggagcacgagctgcggaaggagaggatccaggaggattacaacgaca

SEQ ID NO: 371274 - DNA, 75 bp, Homo sapiens
attgctatcaatgcgaatgatcctgaagcctcaaagtttcatggtgaatctggattgggaaagtcgacattaatc

SEQ ID NO: 371275 - DNA, 75 bp, Homo sapiens
ggcgccggagccgaggcgagcgccgcgcgcaccactgcaacagttgggcaagaatatcaagtttgggcagcggtc

SEQ ID NO: 371276 - DNA, 78 bp, Homo sapiens
tgaaccgtcacattcagttaaagttcacacagttcctaagccagaggattccacagatgttggtgaggaggacagctt

SEQ ID NO: 371277 - DNA, 100 bp, Homo sapiens
ctgtcgtgtacccttaacaggtatctgctcctcatggcgcaggagcatctggagttccgcctgccgggcagcccaatggatccaatggtgatgaagagac

SEQ ID NO: 371278 - DNA, 100 bp, Homo sapiens
atttttcctaatactgggactgacttacctaggaatgagagggacaggagtatctgaggatggagaactcagcattgttgggaaggtcttggaaattact

SEQ ID NO: 371279 - DNA, 82 bp, Homo sapiens
cctggagttaaggaacagatccccggaggaggttttaaaatcaaagatgggaaaatcggagaaaattgcccttccccatggc

SEQ ID NO: 371280 - DNA, 100 bp, Homo sapiens
ctgggattcctacacaatgcgttgcctggctccacgccctgctgggtcctacctgtcagagccccaaggttttaaaatcaaagatgggaaaatcggagaa

SEQ ID NO: 371281 - DNA, 106 bp, Homo sapiens
cacggtggaggagctgctccgcgggtgcatcgaagccttcgctcaccatggatgatgatatcgccgcgctcgtcgtcgacaacggctccggcatgtgcaaggccgg

SEQ ID NO: 371282 - DNA, 90 bp, Homo sapiens
gctggatgacacccaggaggcatttgaagttccacatggagcagatccaactaaaaagaacagagatggaaatacacctttggatttggt

SEQ ID NO: 371283 - DNA, 99 bp, Homo sapiens
caagaactggaggtttgtgcaatttgagaccggtcggcactgtgcagagatcagagtactaagagacagcggaggaggtgaggaagctgaaggcgcgtg

SEQ ID NO: 371284 - DNA, 100 bp, Homo sapiens
tgagggcacgtgtttgcggttcagccctttgatgaccgcagcaggccaacccatggccagcacagacatgatggaataaagactgagcactacaaaacag

SEQ ID NO: 371285 - DNA, 145 bp, Homo sapiens
gttgctttggagctgaccacaggggatgccggcagctgccacatcggtggcatctcagtgttgaacgcctcaggcccctggacatcgagtttatgaaacgcctgagcaaggtggtcaacatcgtccctgtcatcgccaaggcgga

SEQ ID NO: 371286 - DNA, 73 bp, Homo sapiens
agttctcgaatcattctttgtacagaaattgaaaggcttcaaagctagcagcaggtagagcagagccggagcc

SEQ ID NO: 371287 - DNA, 100 bp, Homo sapiens
cgtttctggctggggtctgctggcgaacggcgacatctagactaagagaaagaggctgtgatggttgcctggcaggaattgaagttcaacaactcttttg

SEQ ID NO: 371288 - DNA, 90 bp, Homo sapiens
cgacagacttcgctgtgagtgcccaaggtttcaaagcattatatgaagcgaagctgccgcccatgctgtcgccaccctggctgaggccac

SEQ ID NO: 371289 - DNA, 90 bp, Homo sapiens
gctagaattacctggaacttcatcatcatctacttcacaggaattgccatttgtacctgcacatgttgttctttgtcagtgctgtcaagt

SEQ ID NO: 371290 - DNA, 90 bp, Homo sapiens
catgatttaaacaagagatttccacagaagctccccagttaaagatctcagatgaccggctgactgtggttggagagaagggctactcta

SEQ ID NO: 371291 - DNA, 75 bp, Homo sapiens
aaaatatggtgaactcattgtcttagggtagcagcactgtctggagatgcacgacggtgcctggacatctgcagg

SEQ ID NO: 371292 - DNA, 75 bp, Homo sapiens
tgcctcacccctttctacaaggagggcaagtttgcttccaaggggggcatgtgctctgtgtacctgaaggacagt

SEQ ID NO: 371293 - DNA, 100 bp, Homo sapiens
catcagggactccacggccagagccctggatgtcatttggaaaaacactagagacagacggctggcaggatggtgccatgacaatggtgtgaactacaag

SEQ ID NO: 371294 - DNA, 101 bp, Homo sapiens
ctttgcattcttaaacctactgcctgtagaagcagacattttagcatactatactggcaattgctggagaagattttgcaattgttgcttctgatactcga

SEQ ID NO: 371295 - DNA, 100 bp, Homo sapiens
ggatccccaagcccgccacgccgcccagcccggccccgcccgcgccggaagagccacgccgaacatccagtcatggataaaaatgagctggttcagaagg

SEQ ID NO: 371296 - DNA, 82 bp, Homo sapiens
gagaaggcgtctgcgagaccatggagaacgggtggcacaagaatggctcaactctccaaatagagagaatttctatcagttg

SEQ ID NO: 371297 - DNA, 96 bp, Homo sapiens
gccgccgtcccggctcacctggcggtgcccgaggagtagtcgctggagtccgcgcctccctgggtaaaaattgtgacagtggagaagaaagtaaat

SEQ ID NO: 371298 - DNA, 100 bp, Homo sapiens
gttttgcattcagatgtctcatcccaaaggaatgttggtgtcatggagaaactccagctgggcccagagattctgcagcgggaaaatccaaggcttattt

SEQ ID NO: 371299 - DNA, 100 bp, Homo sapiens
atgtttctggacgcggatttttggcctcatactctgttatagataaacaagtttttttacagaagcgggcttttgccatgttgtccaggctggtctctac

SEQ ID NO: 371300 - DNA, 83 bp, Homo sapiens
cttccacccaacttcctgttagcggagctggagtttgttcagatcatcatcatcgtggtggtgatgatggtgatggtggtggt

SEQ ID NO: 371301 - DNA, 100 bp, Homo sapiens
agaacttcctcgcactgtgacatgtctgatcccttgctcccatccctgcagcatgaacaagggagactcatgcatctgtatgccgtgtgcgtggactgcc

SEQ ID NO: 371302 - DNA, 88 bp, Homo sapiens
tttttaaagtaggagagcctacatattcttgcaggggaaattgagggctttcgccttagcgcccactgctcctgtgacagcagggata

SEQ ID NO: 371303 - DNA, 75 bp, Homo sapiens
ccctgcagtacctgcagaaggtctctggagacatcttcagcagcgtccgtctccaagagagtatgaagagagtgc

SEQ ID NO: 371304 - DNA, 83 bp, Homo sapiens
tctcgagagacctgcgtacattcggggtgccagaaggaaagcatagatgtcctggagcttctcatcggagagttgccctggag

SEQ ID NO: 371305 - DNA, 57 bp, Homo sapiens
cctacttagatcgacttgcaacatatgagattgtgaaacacctttacctaaaagacc

SEQ ID NO: 371306 - DNA, 97 bp, Homo sapiens
acttcctgaaagcttaatgcccaaactgattgatttggaagattcagcagttgtattccctgaatgactataaaccacccatttcgaaagcgaaaat

SEQ ID NO: 371307 - DNA, 101 bp, Homo sapiens
ttctaattaatgaattaattcgagagtatttagaattcaacaaatataagtatacagcatctgtcctcatagcaggccctcgggaccaaggatcacgtcat

SEQ ID NO: 371308 - DNA, 96 bp, Homo sapiens
cctactgcagccacgcgggcgagcggctgtgtggatgtcggcgaagccgcgggcgagggaaatcctcattgacgattcaatttgttgaaggccaat

SEQ ID NO: 371309 - DNA, 83 bp, Homo sapiens
ggcgcttcctctggattggcggtgatgcctggcagcatggaaatgccagttcacgtttggtgcacctcgatttggaggaagta

SEQ ID NO: 371310 - DNA, 88 bp, Homo sapiens
gctccattccctaaggcactgtgactttttgaaaaggcctttagagagttatgtgaaaaaactaaaagtaccagttcatgtaattcga

SEQ ID NO: 371311 - DNA, 90 bp, Homo sapiens
acctggagcaggccggctgccaccttctgggctcctggggccctgcccaccacaaccagaagatcagctgccatgttacttgactcacac

SEQ ID NO: 371312 - DNA, 83 bp, Homo sapiens
acggagctgcagtcggcactgctactgcgaagacagctggcaggctgaaggggatgctaagggagataaagcaaaggtgaagg

SEQ ID NO: 371313 - DNA, 100 bp, Homo sapiens
acgggacctgctccttcctcatcgtgcttgtcaacaaggcgctgctgaccacctacgggccagaagcggactcctagaagaggggagcagcaaggatgga

SEQ ID NO: 371314 - DNA, 100 bp, Homo sapiens
gcttggccagcgacagatcctttgctgctctgtctgccggttcttgaggagcggcctattgccaattcatggacatgctcttccctggctgcattagttt

SEQ ID NO: 371315 - DNA, 76 bp, Homo sapiens
gctgaagcgactgagtccgcgatggagtgcgccaatctgcagaacgccattgcggatgccgagcagcgtggggagc

SEQ ID NO: 371316 - DNA, 88 bp, Homo sapiens
gccgtccagcagatggcggatgccctgcagtacctgcagaaggtctctggagacatcttcagcaggctgagggtaaaaagctgggatt

SEQ ID NO: 371317 - DNA, 87 bp, Homo sapiens
ccaggacgttctccagacgtcccccagcccaggcgagtcggaagaggatgtggagaactttgacgtgaccaacttgtctcaagacat

SEQ ID NO: 371318 - DNA, 74 bp, Homo sapiens
gccaggccccgtgatggggcccctgagccagaaagccatcactgcccaggtagaagagaagcgcaggaagaaac

SEQ ID NO: 371319 - DNA, 83 bp, Homo sapiens
ggcagatgtttgtcgactggaatggatacgacgacatattccacagagcgatccgagcacttcaaaccctgccgagacaagga

SEQ ID NO: 371320 - DNA, 100 bp, Homo sapiens
cagtttttttgccttcaaagaaaatagacttcctctatttgtcaagcttgcattggacacacactactggacttggatcaaccattttgtcatctggggg

SEQ ID NO: 371321 - DNA, 51 bp, Homo sapiens
aaaggatcatgaactagtgacctggaaaggccacggaaaggtatgatatat

SEQ ID NO: 371322 - DNA, 80 bp, Homo sapiens
ccgcctccatctgaagagggctccaggcatccggtcctggtccctgctggttggactttgtatctttgctaaagtcagtg

SEQ ID NO: 371323 - DNA, 90 bp, Homo sapiens
gatggggaggaggttcttcagtgtatgcctggcaatggtggcttgctatccgggaaatggaacaggttatgttcgccacgtggacaaccc

SEQ ID NO: 371324 - DNA, 100 bp, Homo sapiens
cacgaagccaacgactaccggcgccagttgcagtccttgacctgcgacctggagtctctgcgcggcacggcatcacctggagctctctttgttggaagat

SEQ ID NO: 371325 - DNA, 107 bp, Homo sapiens
ccccaagacagagcgctactcctggcagtgcgtcaatcagagcgtcctgtgcggaattccatatttaaatcaggaagaagaaagacagttaagagagcagtatgatg

SEQ ID NO: 371326 - DNA, 76 bp, Homo sapiens
ggaaggtggaattgaagaattcaaacctcctgaggtgtatgtaatgtgtgccattagtaaggtaatttgccagttg

SEQ ID NO: 371327 - DNA, 75 bp, Homo sapiens
tgattctccaatgggaataccaaggggttttttgccctgacatctcttcgtcttgtgtttttacttgcatttggc

SEQ ID NO: 371328 - DNA, 90 bp, Homo sapiens
cggaagtggtgccttcagcacaggtgttggtggaaataacccagatgaagaaaagaatagcacagccaattctggggtctcctctacaga

SEQ ID NO: 371329 - DNA, 100 bp, Homo sapiens
gcctgcaaagcgaggctgaagaaggccaaggctgcagaagccaaagccacggagcgagcccagggcgtggtgctgaaagtgctcacaaacttcaagagca

SEQ ID NO: 371330 - DNA, 100 bp, Homo sapiens
acaagagtggaaatggagaggtgacatttggtgacctgagcatctctgcagaccgcctgagtgagaagcgctctcccaacgactttgccttatggaaggc

SEQ ID NO: 371331 - DNA, 50 bp, Homo sapiens
gattccaagtaactcttatttgcggacctggaaaatatgacaagtgccga

SEQ ID NO: 371332 - DNA, 100 bp, Homo sapiens
ctgggctggcgttaactgtgcggaggcaggcatttggagttcctgttcactctacctggatgcattttaactaatcctgaggacttcatccggtcaccat

SEQ ID NO: 371333 - DNA, 83 bp, Homo sapiens
ccccgagccgcccgcagagcaagcgcggggaaccaaggagacgctcctggcactgcaggttgatgataattagaagcatgctt

SEQ ID NO: 371334 - DNA, 101 bp, Homo sapiens
aactcaatgctgctgtgtgggaagaagatttgtaaagaaaactcttaggtgtcagctgtgatgcatgtttaaaaggaaattttcgaggtcgcagatataag

SEQ ID NO: 371335 - DNA, 87 bp, Homo sapiens
gcggcggctgcggcccaatatagagaccctcctggatgacttccttctcacgtacactgtcttcatgacaactgatgacttgtgcca

SEQ ID NO: 371336 - DNA, 101 bp, Homo sapiens
agctattctgggggcaacagagaatcctgaggttggcttgaagcctgtgtggtatagtcccaaagttttcattgaaggtgctgatgcagagactttttcgg

SEQ ID NO: 371337 - DNA, 75 bp, Homo sapiens
atgtccaaaaacatgcaaaaacttcctttgcttgtgctcaggtgccttatgcccgctcagaggcccacctcacag

SEQ ID NO: 371338 - DNA, 90 bp, Homo sapiens
tttggaagatgcagatgagaaggttcagttggcaaaccagatatatgacttgtcatccgtccttggctcaggatttggagagcttgcacc

SEQ ID NO: 371339 - DNA, 83 bp, Homo sapiens
gccggcgtttgggctacggttgttgttggcgactgtgcttcaagcggctacggagagtgaggtaggagatgtagatttgacac

SEQ ID NO: 371340 - DNA, 75 bp, Homo sapiens
tctgccttctggacaatctttccgcgttgggaattcaagcatcctcagcctttcctacgtactcgtgaatttctt

SEQ ID NO: 371341 - DNA, 100 bp, Homo sapiens
aaaccctgaccggatcccataaacactgtcggtaaaataccatgaagattttgaaaaaacaaaggggagaggctttactcccgtcgtggacgatcctgtg

SEQ ID NO: 371342 - DNA, 90 bp, Homo sapiens
ggaaccgcctgggaactccgccatgtcatccacttcgcccaacctccaggttagcatacgtatcaaggacagtaactaccatggctcccg

SEQ ID NO: 371343 - DNA, 90 bp, Homo sapiens
ccgcagtagtatagagctgaccaagatgctatgtgagatcttgaaagtgggcgagttgcaggatgtactgagtaaagatgctggggaatg

SEQ ID NO: 371344 - DNA, 100 bp, Homo sapiens
cgggaggtgaatttccatgtcaacatagtcctgacactttttcaaaaatggcaatggtatcagaattcctcaagcaggcctggtttattgaaaatgaaga

SEQ ID NO: 371345 - DNA, 100 bp, Homo sapiens
gatgcaaatcttcgtgaagacactcactggcaagaccatcacccttgagatgcagcaaaaggtagttacaagtgaaatcttcaggggaaggaaagacggc

SEQ ID NO: 371346 - DNA, 74 bp, Homo sapiens
caagccacagagccatgagctggcagaggtggaggagacactgaagcgactgcagagccagaagggagtgcagg

SEQ ID NO: 371347 - DNA, 114 bp, Homo sapiens
ccagggaccaggctgagactcggggcgccagtccgggcaggggcagcgggagccggccggtcaccttcaggccattcagaggaggaaagagaggggaatatgaagtcagccaag

SEQ ID NO: 371348 - DNA, 100 bp, Homo sapiens
cggcgtggaggcgcgaggaggagaaaccagcctggacaccaagtctgtgtcagaaggccacctcaagaggaacatcgtggtgaagaccgtggagatgcgg

SEQ ID NO: 371349 - DNA, 122 bp, Homo sapiens
gcctgtgctggccgtggtcttcataatctgcattgtcattgctatcctgctctacaagaagtcagaatggcggcagtggagcatcgtcattcttcaggattgccctactggccctacctcac

SEQ ID NO: 371350 - DNA, 100 bp, Homo sapiens
tttatgttttccttacatctcaatgaagcaagggactatgaaggatttgaatttgttgaaatgagcagtcgtaaatcaaagagtaacagcttaattcaca

SEQ ID NO: 371351 - DNA, 76 bp, Homo sapiens
tccacccctacctcccagtgtctaagccacgaataatggtactgggcctaatcgctacgtgcctctttggctatga

SEQ ID NO: 371352 - DNA, 82 bp, Homo sapiens
aggcgccagcctgcgaaggtggcggcgctgctgctcgggctgctcttggagatgagcagcaccagcagtaagagggctccga

SEQ ID NO: 371353 - DNA, 101 bp, Homo sapiens
aaagtttgggacttgcaagctgctcttgaccctcgagccccagcaagcacattgtgtttgcgcacattggtggagcctaaaaggggatcgagttatgccag

SEQ ID NO: 371354 - DNA, 50 bp, Homo sapiens
gaaggatatcggtttcattaagcgaggaagaaaggacccggtttcaggag

SEQ ID NO: 371355 - DNA, 115 bp, Homo sapiens
caccttcagagcgtcacggcgtacgccctcatggggaaaatctccccggtgactttcagcacattttctgtgacaagtttccaaacctagcagtcggacaggatgagcaagtcaa

SEQ ID NO: 371356 - DNA, 149 bp, Homo sapiens
gttacctgcggcgagttgtttaccctttggaaaagctgttgacatctcataaacggctggttatgaaagacagtgcagcacatgatggctccgctacttacttgagattcattattgtatcagcctttgatcattttgcatctgtgcat

SEQ ID NO: 371357 - DNA, 101 bp, Homo sapiens
aagaggttctgaatatgatgattttttggacgaattcatggaggcagtttcttccaagtgattcgcaaggggtggctcaccatcagcaacattggcatcat

SEQ ID NO: 371358 - DNA, 91 bp, Homo sapiens
aagatggacaagcccatgctgaagcaggccggctctggcgtccacggtgccgtgagcgatgtggagatgcaggaacactatgatgagtttt

SEQ ID NO: 371359 - DNA, 99 bp, Homo sapiens
tctgagggagaagcacaagatcatgcacagaggcatcacccaagagaaaatcaacgagatgcgggtggctcctgagcagcagatgattgcggacatcca

SEQ ID NO: 371360 - DNA, 82 bp, Homo sapiens
cgcgggtctgtcatcatgtcgcgttacgggcggtacggaggaggaaagctccaaccatggccatggggctcttccgcgtgtg

SEQ ID NO: 371361 - DNA, 103 bp, Homo sapiens
gctcatcatacctcaggaaagagattgccacgacgtgtacatctccctgatacgccttgcaaggccagataacgaaggaggcccaacttcattcaataaggag

SEQ ID NO: 371362 - DNA, 75 bp, Homo sapiens
ggggagtctgaggccaatgtcagagaaatctttgacaagttctcctgtgcctcctgttggctctctttgcatctg

SEQ ID NO: 371363 - DNA, 100 bp, Homo sapiens
tccaggcgctgcccagccccttgtcagccagggctgaacccccgcaggagaaccagcagaaatccaccaatgtagtctatcaggcccaccatgtgagcag

SEQ ID NO: 371364 - DNA, 96 bp, Homo sapiens
atataaaaataatgacttttatgtcactggggagaggttgaaggctgcattgactcaccaccctgctgccatgtcaaatgggaacatgaacaccat

SEQ ID NO: 371365 - DNA, 98 bp, Homo sapiens
tgtgtccggaattggtgggttcttggtctcactgacttcaagaatgaagctgcggaccctcgcggtctccaggaaaagttgggctttcaacattcaag

SEQ ID NO: 371366 - DNA, 88 bp, Homo sapiens
gaagctgctttgaagacttagcagaggttgtggacctggcctattagcagatgccaagatgcgggtatttgaacgttcagtgtatttt

SEQ ID NO: 371367 - DNA, 89 bp, Homo sapiens
gaagtctactaatggacagttagtcacccacctacatgttgagggtgtaccagtgatggcaataagaaacaaaatgatatcagaaggac

SEQ ID NO: 371368 - DNA, 82 bp, Homo sapiens
gaagtggaaaggatggcccccaaagtctcctccgggctggggctgagcaagccctcggagtgaccgtgggtgacagcggctc

SEQ ID NO: 371369 - DNA, 88 bp, Homo sapiens
agttgtggttctctttgaaagatgtgtcatatcatgtgccctctatgaggagttttggattaaggccttgatgttaaaagtgaagcat

SEQ ID NO: 371370 - DNA, 100 bp, Homo sapiens
gcggagcgtcctgtcaggcggcggccgagggcgtcgcggactctccccgcgatgatgccgggatcccaacggcttcaatgactggaccttctccactgtg

SEQ ID NO: 371371 - DNA, 91 bp, Homo sapiens
gccacgcgcccccgacgaccgcccgacgtgcattcccggtgctgactgggttacttttttaaacactaggaatggtaatttctactcttct

SEQ ID NO: 371372 - DNA, 100 bp, Homo sapiens
tgtttgagaaaaggcctaagaattttggcattggatgcctttgtggaactgtacggccccagcatgcggcctctgtttgatttctcctggctgtctctga

SEQ ID NO: 371373 - DNA, 97 bp, Homo sapiens
tccgtcggcgcacatccccgtcccagcgcagagtgtactatgaggggctgcaggacaagctggcacagatccgcgatgcccggggggcgctgagtgc

SEQ ID NO: 371374 - DNA, 96 bp, Homo sapiens
aaaaaggcacctaacggcgcaggagatagaggcgggctcgagatttgataatgggctgcattaaaagtaaagaaaacaaaagtccagccattaaat

SEQ ID NO: 371375 - DNA, 143 bp, Homo sapiens
ttttcatttccatttctaccttgtatgcctcaatttgctggatttaagcactgctgcactttatgagggaagaaggaggggccggcgtcagtgacgtcagcgagaccgaggtgagcgtgggcgttgccagtggtgctctgtca

SEQ ID NO: 371376 - DNA, 82 bp, Homo sapiens
ctgtgtgtgaacctccgaaagctcagcacacactcccgcaggatcccgccattgttcaggaaacacaacctatttgtgggag

SEQ ID NO: 371377 - DNA, 83 bp, Homo sapiens
aaaggcaaaggattcggatttattaagcttgctgtgttatatgacatcatcctgaagaacttcgagaagctcaagaagcccag

SEQ ID NO: 371378 - DNA, 100 bp, Homo sapiens
ccagcagagtcacagaggagatgatggactagaggcttttaccagatttcttaaaactgaattcagtgaagaaaatattgaattttggatagcctgtgaa

SEQ ID NO: 371379 - DNA, 100 bp, Homo sapiens
tttagtccatctacaaattcagtgaaagagccttgttagatgacttggataaagaactaaacaactacattatgcgatgtagagaatggtatggctggca

SEQ ID NO: 371380 - DNA, 75 bp, Homo sapiens
ccagataggacaaggccaactggagccaggaggaactctctcccagtccgcctttgttgaatccatccacgccac

SEQ ID NO: 371381 - DNA, 50 bp, Homo sapiens
gggtgatagttggagcggagactgtggctattatcatggaaaactaattt

SEQ ID NO: 371382 - DNA, 100 bp, Homo sapiens
catggaggccgtcggggagacgctgtggtgtgactggggcaggaccatcaggctctgtgtgctccgggatggagcaggtgtgcagagggtgagaacccag

SEQ ID NO: 371383 - DNA, 75 bp, Homo sapiens
agacgagaaagaacacgctttgttgcttctaaacctctggaggaggagaatgacgtggccgcacttctgaaaccc

SEQ ID NO: 371384 - DNA, 100 bp, Homo sapiens
aaaaagtccttcgtaacaataaaaactttagtactgtagatatccagaagaatggtgttaaatttaccaacagttcaaacttctcatggaacatctggac

SEQ ID NO: 371385 - DNA, 80 bp, Homo sapiens
aaacattaagacctactaccagagatgggggtcttgctctgtcactccagctagagcacagtggtgcaatcggagctcac

SEQ ID NO: 371386 - DNA, 115 bp, Homo sapiens
ggaacatgggttatatttggaaccttcgggcaaacaggattccacagtgtcctctggaaaatggagtccaaaactacttacctggaagaccttccaccaccccctgagtatgaat

SEQ ID NO: 371387 - DNA, 83 bp, Homo sapiens
ccagactgtggagcctctcctataccaaatagtgttctgccagttctggataatccactgtccaagaaggttcgaggcctcat

SEQ ID NO: 371388 - DNA, 83 bp, Homo sapiens
caaagagaaaaggcaacatcctgtcacaggccatgctctggcaaaaactttcactgttacatgccttgaagtgatgaggaggt

SEQ ID NO: 371389 - DNA, 100 bp, Homo sapiens
aagacctcagatgtgaagtccattaaagaaccatggccaactgtgagcgtaccttcattgcgatcaaaccagatggggtccagcggggtcttgtgggaga

SEQ ID NO: 371390 - DNA, 95 bp, Homo sapiens
gattggatgcggcggcggcggcggatcccggagagccccggagtgagcggagtagcgagtcggcaacccggagctgacatgggctttgcccgatt

SEQ ID NO: 371391 - DNA, 51 bp, Homo sapiens
ctcctgagtagccgggactacaggctcagagaagcgcatgaatgagctaaa

SEQ ID NO: 371392 - DNA, 100 bp, Homo sapiens
caagctggaacaggagttccgatcgacccggtaccaagaaggggagtgcccgcggcaggcgtcagcttcagactcaagcaaaactggttttagaggaaaa

SEQ ID NO: 371393 - DNA, 50 bp, Homo sapiens
cccaagcacaattccaggaagggttccaaaagcatttgctgcaagtctct

SEQ ID NO: 371394 - DNA, 50 bp, Homo sapiens
gatggtgaaatcatacctcatatcccagggcaaagcccaacaccttcccc

SEQ ID NO: 371395 - DNA, 74 bp, Homo sapiens
cggaccggcacgcgggcggggcacgttaagatccttctattctacgtaatattttatggctgcctggctggcat

SEQ ID NO: 371396 - DNA, 74 bp, Homo sapiens
actacagacatgcgccagcacgcctgagatggaatttcaccgtgttgcctaggctggtctggagctcttgatct

SEQ ID NO: 371397 - DNA, 82 bp, Homo sapiens
tgaagacaaaaatccagaagtacaagcagtctgacctgcctagagctggaacgttacctccagagcgagccctgctatgttt

SEQ ID NO: 371398 - DNA, 74 bp, Homo sapiens
tgcaaggctggcgcgtctccatggaggtttcagcaaccaaggagcacacaccctgatccttgattggtgaaagg

SEQ ID NO: 371399 - DNA, 100 bp, Homo sapiens
ccgcggcggtaactgtggctagggaaacctggagcggtcagagcaggctagaaggtccagcttaaaaaatgtgtccgacctttttgtgatgggaggagct

SEQ ID NO: 371400 - DNA, 98 bp, Homo sapiens
gaggtctgaagcctgggagtggcggtggagttttgagtatccgaggagcccaggaggaggaacccacagacccccagctgatgcggctggacaacatg

SEQ ID NO: 371401 - DNA, 97 bp, Homo sapiens
ccctgtatgcatggtgtggggttggtgtgattagcttcgcagtctggaaagctttaggagttcacagttgggtaattccagaattgattggccatac

SEQ ID NO: 371402 - DNA, 50 bp, Homo sapiens
ccttgtttcagatcctgaatagcgtttactgaagcatttgaaagggaact

SEQ ID NO: 371403 - DNA, 100 bp, Homo sapiens
ggccgcgccgccaccgtctgaactaggatgtcccgacatgaagacagcaaggccatcgtggacgggaacctgaagctgatcctgggcctcatctggaccc

SEQ ID NO: 371404 - DNA, 82 bp, Homo sapiens
cagacggctcacctgtgcgggatggaacaaaaggtgtgtggcagccctgacatcccgctgcaccttctcaagtcggtggcca

SEQ ID NO: 371405 - DNA, 98 bp, Homo sapiens
tgaactttgtccttactcaagttctcagaagactcatctaactagacatatgcgtactcattcagagaatagtgacagtggtacaggaaagaaagaaa

SEQ ID NO: 371406 - DNA, 96 bp, Homo sapiens
ctttactgagaattttccacctcctgacacaacaccactcagaaatcgctgataaagatgggaacaataaagttctgtctttcactatcccctcct

SEQ ID NO: 371407 - DNA, 119 bp, Homo sapiens
ggagacctaagggcggcgactacgacggcgttgatatcggtggtaacgacggcctcagcaggcggggaagatgaaagggagtttgggctttgcaaaactgagaacaaagccaagtcggg

SEQ ID NO: 371408 - DNA, 101 bp, Homo sapiens
gcgaggtcggacgcgtcttctttcaggctgaggctccttgggagaggcgtgggcccaggtgaagaagagcctggcggacgaagcagaagttcacctcaagt

SEQ ID NO: 371409 - DNA, 75 bp, Homo sapiens
atgatccacaggatgctgtagtagcaaatcaggttttgacctgtagcagagaaccaattctggagaacagcctca

SEQ ID NO: 371410 - DNA, 100 bp, Homo sapiens
gtgctgtgctgcaccgtgtgcctggacctgcccaaggcctccgtgtaccaggacctccacaaaaagtactcgtacatccgcaagaccaggcctgacggca

SEQ ID NO: 371411 - DNA, 90 bp, Homo sapiens
tcctcgtcgggaagaatcgtttggtctcctgccgtgcccgcagtctctggtcccagcccaccccatggcccctcccagtcccagcaccac

SEQ ID NO: 371412 - DNA, 74 bp, Homo sapiens
ctggagcacgaggctggaacccaattgcacagccccaccagctactggaagtcccttgcccctgatcggtcaga

SEQ ID NO: 371413 - DNA, 100 bp, Homo sapiens
cctcccaagaagctgggactacaggtcggaagtctatgcgtcagtctacagctgagcatacacgacaaacgttccttcgggtacaggagaggcagggcca

SEQ ID NO: 371414 - DNA, 83 bp, Homo sapiens
cggtcaagatgctgcaaaacgtgactccccacaataacatcgatttcttccctgtgaaaacaagagcaaggccgtggagcagg

SEQ ID NO: 371415 - DNA, 74 bp, Homo sapiens
ccgaagcccaaaaagctgaaggtggaggcgccgcaagcgctgaggctgttgtacagtggcctgattatagctca

SEQ ID NO: 371416 - DNA, 82 bp, Homo sapiens
ttcggtggactccttcggcagtccacccaccgccgccgcctcccagagcagggtctggattactggggaagcgtgaggctgc

SEQ ID NO: 371417 - DNA, 75 bp, Homo sapiens
gattctgatgataataaaacaaagaaactgtgtgtgatccagtaagctcagcccacccttcaagccccaggtcac

SEQ ID NO: 371418 - DNA, 82 bp, Homo sapiens
gtggtcctcctgctgagacggacttcgggggagacgtggtggtgctcaccaacacccccctggaggaccagctgcgagtggg

SEQ ID NO: 371419 - DNA, 100 bp, Homo sapiens
attctctcccaggccacaagacatttcctgctcggaaccttgtttactaattgaggagatgttaaagtaacccatcttgcaggacgacattgaagattgg

SEQ ID NO: 371420 - DNA, 50 bp, Homo sapiens
cttgaacaaaataattgggacttagtggtttgccagaacccaataaagat

SEQ ID NO: 371421 - DNA, 100 bp, Homo sapiens
cgcccatacacagtgcccaacaagaaggggaccaggctgaggcccgcaggtctaagaccaaggaagcacgcaagcgccgtgaagagcgcctccaggccaa

SEQ ID NO: 371422 - DNA, 101 bp, Homo sapiens
gttcttccactggcgacgtgcagcggaggagggcaaggactacccctttgccaggttcaataaggatgccaaagaagagtgaatggcccacaaagagcctg

SEQ ID NO: 371423 - DNA, 99 bp, Homo sapiens
tagaacgggtcacgtgagcgcctcgcctggatgtgagtttcagccagggtggagatctctttgatgcaattacttcgtcgaccaagtacactgagagag

SEQ ID NO: 371424 - DNA, 88 bp, Homo sapiens
gcggccatggcggcgactactgccaaccccgctggatggaggcctgcctgaaggaggagcttccttccccggtggagctggaggagag

SEQ ID NO: 371425 - DNA, 83 bp, Homo sapiens
gcccgggcttgaccgccgcgaaggccaaccccgggaaggggggggagcacctggggaccacggaagcgaccgaggccttcttt

SEQ ID NO: 371426 - DNA, 100 bp, Homo sapiens
atgtcacccaatggatccattcctcccattcatgtgcctccaggttatatctcacagatttgataatgggctgcattaaaagtaaagaaaacaaaagtcc

SEQ ID NO: 371427 - DNA, 100 bp, Homo sapiens
gtgctgatgaattcttcataccccggccaaaatgaagtttaatccctttgtgacttccgaccgaagcaagaatcgcaaaaggcatttcaatgcaccttcc

SEQ ID NO: 371428 - DNA, 75 bp, Homo sapiens
cgaattctacagttactacaagtgcaagctggcgctggagcagcagcagcgtggcaattttggaggtagccccgg

SEQ ID NO: 371429 - DNA, 86 bp, Homo sapiens
ggaagccagagccacacacaccatcatggtcctgacatatctgaagagatggattaagaatgctttggattaaggattgtggagca

SEQ ID NO: 371430 - DNA, 100 bp, Homo sapiens
ctctgcctccggggacaagaaactagagcaaataaccgttttgaaattatgtctttggtggacttgggaaagaggttgctagaagcagcaagaaaaggcc

SEQ ID NO: 371431 - DNA, 100 bp, Homo sapiens
ccacaacacaacctacagcctcaggggcatcaagcatgatggaaccatgtgtgatacctgccgccagcaaccaatcattggcattcgatggaagtgtgca

SEQ ID NO: 371432 - DNA, 93 bp, Homo sapiens
tagcgctatgcctgcggcggagactgcatcaggctctcggcttctcgtcagtgcctcgcaggatggtaaacttatcatctgggacagctacac

SEQ ID NO: 371433 - DNA, 116 bp, Homo sapiens
ggaaacaagacagttctgtctgcagaagcccattatggctgtaactggagatgacacaggttatcaatactctggctgaccatcatcatcgtgggactgactttggtggaagtcct

SEQ ID NO: 371434 - DNA, 83 bp, Homo sapiens
gtaggggtgcacctcagcactatcccaagactgctggcaacagtttgctatgaagattatggaatcagagagagctcttggag

SEQ ID NO: 371435 - DNA, 100 bp, Homo sapiens
ctcgctgtgagacatgtctgagactcctgctcagtgtagcattaagctttgcccgaagtttttacatacaaattctactagtcacacctggccattcagt

SEQ ID NO: 371436 - DNA, 87 bp, Homo sapiens
agtatctgatttaggaaagtcctatcggatgctgagatcattcagacaatgagttacaaggcactaatagttctggatccttgggtg

SEQ ID NO: 371437 - DNA, 100 bp, Homo sapiens
ggcagacagaacgggacctgtgtcagatctcagtctcaggaggaggtttgcccccagtcagcaccttgacgaatatccacagcctctcccaccataatcc

SEQ ID NO: 371438 - DNA, 123 bp, Homo sapiens
agaaagtggaatgaatctgaacccagaagtggaagggacgctaattcgggtacccattccccagcagataaaacgtcactgtgcagagccttttacagaatattggacttgcattgattatac

SEQ ID NO: 371439 - DNA, 83 bp, Homo sapiens
cggagaggtcagcaacagggacatcgtggagacggtgctcaacctgctgatcttgcatctttaatggataaaacatttgagag

SEQ ID NO: 371440 - DNA, 51 bp, Homo sapiens
gagtattttgagattggagaattaagcagcctcccgcgacgatgcccctca

SEQ ID NO: 371441 - DNA, 100 bp, Homo sapiens
tgtaagcccctgtactgcaaactctgcaatgtcaccttgaactctgcacagcaagcccaggctcattatcagaatcttgtggaagaagaatgaagttgct

SEQ ID NO: 371442 - DNA, 90 bp, Homo sapiens
agaacattgaagatcacaaaaatcaggggagaaagctaagaaatggtggagtcaatgaagaaagtagcagggatggatgtggagctgaca

SEQ ID NO: 371443 - DNA, 82 bp, Homo sapiens
cctgagtcaaagaagatgcctcgaactaaacaaattcatcccagaaatctaagagaaacctgtgaaggtcgaaacagctgcg

SEQ ID NO: 371444 - DNA, 96 bp, Homo sapiens
ctttccttgacctgaagaagcctcctgcctccaaatgcccccatcgctatacaaaagactacgcccaagcaaggtttgatgcctatttccaccaga

SEQ ID NO: 371445 - DNA, 100 bp, Homo sapiens
gtgaagaaagcctcctaccttgattgcatcagggccattgcgaggaaacggaaatgcctggcctgcatcaaactgggctctgaggacaaagttctgggcc

SEQ ID NO: 371446 - DNA, 100 bp, Homo sapiens
ggagctagctgaaataacccttgatcctcctcctaattgcaggacatggatttgattgacatactttggaggcaagatatagatcttggagtaagtcgag

SEQ ID NO: 371447 - DNA, 96 bp, Homo sapiens
tcaggttctgttagaggctgttgccattgctgctaaaggttccatagataatgctcggaatatttttcaatgtccattccgctgtgttgattgagg

SEQ ID NO: 371448 - DNA, 83 bp, Homo sapiens
cgacaagccgctggcagccgcggatctcaccgccgctcagggaacttgctactaccagcaccatgccctaccaatatccagca

SEQ ID NO: 371449 - DNA, 82 bp, Homo sapiens
ggttattcgagtgaccgagaccgcggccgggaccgaggcgctgataaagcagtttgtgtccgacgtggcctggggggagctg

SEQ ID NO: 371450 - DNA, 75 bp, Homo sapiens
tcgggagaggctgctgccaaattgaaaagggcagctgttgtgctgtgtatggacgtgggctttaccatgagtaac

SEQ ID NO: 371451 - DNA, 78 bp, Homo sapiens
tcagcacgcagaaggtttgaggagcattgcttctcatacagtaaggtgcaacattagaggaaatcaatcagcactggg

SEQ ID NO: 371452 - DNA, 82 bp, Homo sapiens
agagcactagtgtctagaaggcactaaggggggatatgagactttctactcggaatatcctgagtgttgcgtggatgtaaaa

SEQ ID NO: 371453 - DNA, 75 bp, Homo sapiens
gtttcttgcccttcctggagcagaggagccattatttatgcagggagaggaatcaaatgagtctgcagaatctag

SEQ ID NO: 371454 - DNA, 96 bp, Homo sapiens
accacggtggagatagtgacaatgtctcaccaaggatcccaaaatggctgggcgaaaacttgctctaaaaaccattgactgggtagcttttgcaga

SEQ ID NO: 371455 - DNA, 83 bp, Homo sapiens
gggtcacgaattgacgactatgacattgtggtgaggagccttcacgtaaatgggtccagtcatgcctcccagtaagaagccag

SEQ ID NO: 371456 - DNA, 98 bp, Homo sapiens
aaagccgaagaccccttcaagaccatcagccttagcatattgctatcactgcgcgcaaaaaggccattatggacacattagtgatgatgaaccaggtt

SEQ ID NO: 371457 - DNA, 95 bp, Homo sapiens
tgctcaacttcttgaaacagttcatagatactacactgaatttcctacagttcttgatattacagggaaaacaaagtgcatgatgaagtcttcag

SEQ ID NO: 371458 - DNA, 100 bp, Homo sapiens
ataactttcgtatcacaaaagcagatgctgctgaattctggagaaagttttttggagacaagggctcacaacgaagtaagacagtagatgacaattctgc

SEQ ID NO: 371459 - DNA, 75 bp, Homo sapiens
gtaattgtcacacagaagaaagtacctgttggatggcaagcatgtggtgtttggcaaagtgaaagaaggcatgaa

SEQ ID NO: 371460 - DNA, 82 bp, Homo sapiens
gtggcgcgcccagagccccgcgtttcagccctagggaagggcgaccattgacgaggtggagacggacgtggtggagattgag

SEQ ID NO: 371461 - DNA, 100 bp, Homo sapiens
cctggaggagctgctgctggacgccaaccagctccgcgagctgcccgagagctccacgcaggagatcggtgaggagctgatcaacggagtcatctactcc

SEQ ID NO: 371462 - DNA, 100 bp, Homo sapiens
cagcttcagcagaggctgcagggccagcaggccatcatctgtgcgatctctgcggtggacgaggtggactacaagacggctgaggagaagtacatcaagg

SEQ ID NO: 371463 - DNA, 100 bp, Homo sapiens
gagttcaagtacagatcacacgcccactaaagcccagaagaatgtggctaccagcgaaggaattacagtttgaaaggctgacccgagagctggaggctga

SEQ ID NO: 371464 - DNA, 98 bp, Homo sapiens
ggctagtcaggcgaagtttgcagatcaggatcctcatgaccagccaaagagaagaagaattaggaagcataaatcaaagaaaaaatttaaaaatccca

SEQ ID NO: 371465 - DNA, 100 bp, Homo sapiens
tgcgcggctgcggcaagatcctgcccaacagccccgcgctcaacatgcacctagtcaagagccaccgcctgcagatcacaaaatttgtccaggatagaca

SEQ ID NO: 371466 - DNA, 100 bp, Homo sapiens
tctatgggaatacggcgacttgcatctctttgggcccaaccagcgcccagccccctgctatgacccttgcgagttggatggcaagcatgtggtgtttggc

SEQ ID NO: 371467 - DNA, 74 bp, Homo sapiens
cggggcctgtgtccgcgggcttgggccagccaagtctcgggatggtgaacgtactgtctattgcaacgtacaca

SEQ ID NO: 371468 - DNA, 82 bp, Homo sapiens
ccgagacacaccaggccggcaggctgagaaaagcgagaccgcgtgcgaggaccgccttgccaacattccactaacccccgag

SEQ ID NO: 371469 - DNA, 51 bp, Homo sapiens
cgaagacatggaccagggctacggagggcagcgggtggcatgagacgtggg

SEQ ID NO: 371470 - DNA, 105 bp, Homo sapiens
gaggctacagcatcgtggcgctgggcaatgacatctacgtgacggaaacgcttcgttaagggactcaggcagtacgggaagaacttcttcagaattagaaaggag

SEQ ID NO: 371471 - DNA, 100 bp, Homo sapiens
actgatgcccagtggggcattcgtcttggtaaacttggtctccgccgcatgcaagagatgattgcaaggatgcaggcgcagatgcagatgcagatgcagg

SEQ ID NO: 371472 - DNA, 109 bp, Homo sapiens
gaccagtgccaaccctgagactctgctgggggagatggaggcgaagacaagagagctcattggtgggtcatgataactgggtacgtggagttctgttccattctggggg

SEQ ID NO: 371473 - DNA, 100 bp, Homo sapiens
ggctgcgcactcggcctgagaaactcggcaagcgcgcagtgtcgactccccggtctatgccaggcgcatctcaggtcaaatttgtcaagatgtccacaat

SEQ ID NO: 371474 - DNA, 75 bp, Homo sapiens
cggcgcccggatgggcagctgaggtgaccaagaatatggcccaggtgaccaaagccctggacaaggccctgagca

SEQ ID NO: 371475 - DNA, 76 bp, Homo sapiens
ttgacttgtttgatgttcgtgactttggaaagatggactcaccctgtcacccaggttggactgcactggcctcaac

SEQ ID NO: 371476 - DNA, 100 bp, Homo sapiens
ctgacaatgatagtgaaaattggaaggaagtgcataagatggtggttgaaagtgcctatgattacacaataccacctatggagaaagctgttgtgaaaac

SEQ ID NO: 371477 - DNA, 75 bp, Homo sapiens
cgagaagcctgaaaagtcgcagcgagctggagccgccggagtatcctagaaggaaaacatcaccatggctacaga

SEQ ID NO: 371478 - DNA, 89 bp, Homo sapiens
aggaaacctccctcacacctgctcgcctgctcccagtagcccaccaaagagtttattaaccacttaacctctcagaactgaacaaagac

SEQ ID NO: 371479 - DNA, 98 bp, Homo sapiens
ttacattcgttgaaggacaccagctgcggaatttgcggctttggcagatatatgtaatcgacagtgcagacagaaaaagatttgaagagacgggtcag

SEQ ID NO: 371480 - DNA, 100 bp, Homo sapiens
atgatgtatcagaaaaactctctcagcggctttctgaactagattggctctggattaatcgaattacagctgctagccaggaacatggactgaagtatcc

SEQ ID NO: 371481 - DNA, 80 bp, Homo sapiens
cgcggccctggggcccgggggcgcgggccggggtggttccgaggattctgaagacgacggggagacattgctggaggtag

SEQ ID NO: 371482 - DNA, 75 bp, Homo sapiens
ttctcatttgggatcagcgatatttcctgaatctcactgatgaaaaggcctccaggtttttcacctttccgatca

SEQ ID NO: 371483 - DNA, 96 bp, Homo sapiens
ctgaacaatgaaggcgagattggattttcagtttagagcgctaaagaaggtgagaatctttgactcccctgaggaattgcccaaggaacgctcgag

SEQ ID NO: 371484 - DNA, 118 bp, Homo sapiens
gctacggggacgacgcgtgcttcgtggcccggcaccgttccgcggacgtgctcgggagtgcatccgccccaacccttttccccctcgtctcctgtgagaattccccgtcggatacgag

SEQ ID NO: 371485 - DNA, 134 bp, Homo sapiens
cgaggttctgcttacccgaggccgctgctgtgcggagacccccgggtgaagccaccgtcatcatgtctgaccagtctcaggaggaggtctgcgatttgctccatgccgcacccttccaaaacatcttgcctaga

SEQ ID NO: 371486 - DNA, 96 bp, Homo sapiens
ggaaggggaaagcctggagtcctggctcagagaccagtatgatgtctgtgccatttgcctggatgaatatgaggatggggacaagctgcgggtact

SEQ ID NO: 371487 - DNA, 75 bp, Homo sapiens
ctcggaggggcgctgtgtgtacatcacccccatggaggccctggcagagcaggtcccaaagttgtttctaaagaa

SEQ ID NO: 371488 - DNA, 100 bp, Homo sapiens
gacccaggcgcgcccgctgctcggtggcaggagggccggcggagcgccatggcctgcatcctgaaggaattttggagagtaaaaggctgaaccttgttaa

SEQ ID NO: 371489 - DNA, 100 bp, Homo sapiens
agccaagattatcaaagcagagatgatggggaatatgatatttggatttgacctgcattttggaatttatctacacttaaaatgccaccagcagttggag

SEQ ID NO: 371490 - DNA, 96 bp, Homo sapiens
ctggaatctatgggattttcagctcgatacaatttcacacctgtaacgtgcctagtgttgggagcctagcagatccagactatctgaacacaccac

SEQ ID NO: 371491 - DNA, 82 bp, Homo sapiens
ttggctgcgcgggttcccccgaagttcaggagcacgtgaattgcctctgcttacgttcaggccctgtcctaaacccagccgt

SEQ ID NO: 371492 - DNA, 83 bp, Homo sapiens
gaaggaaatcatgtcaagcgaagccttgaaaaagctgccctgagacggtgtcccgccgaaagctggctgcaataaaacttggc

SEQ ID NO: 371493 - DNA, 89 bp, Homo sapiens
agctgtgcagccgcgaggaggcgcgggaggtgttcgagaacgaccccgagacggcgatcagtgggtgaccgcggctgcgagggactttg

SEQ ID NO: 371494 - DNA, 100 bp, Homo sapiens
taatgtggaacaggaccttaaggagaaggaagatactattaaacagaggacaagtgaggttcagatctttgatggaaaacagattccacagagaatggtt

SEQ ID NO: 371495 - DNA, 100 bp, Homo sapiens
tccagacatgcagaagcagtttgccgaagagcagcactgtcttgtcgacggtctcactgatgcctcttctgcattcaaagttcctcgacccgggccagat

SEQ ID NO: 371496 - DNA, 88 bp, Homo sapiens
agaatcaaacttacagggttgccaccaggcataatgattataaagtggtttctcctgctttgcgagctgtgggaaacattgtcacagg

SEQ ID NO: 371497 - DNA, 90 bp, Homo sapiens
caaaggcttaaaggcagtgaaaatggccagccagagctgaaccttagccggccgatcgaggagcagggccccctggacgtcatcatccac

SEQ ID NO: 371498 - DNA, 97 bp, Homo sapiens
aattttagggtcctttatatagaagggagagtagctgtctgttcagagtctgatgttttcagtaacactcttgatacattaagtgagatagaatgga

SEQ ID NO: 371499 - DNA, 96 bp, Homo sapiens
gtccagagagcagacatgaaccgcctcatcatgaactacctggtcacagatgcgcaggctgatcacccgaggggaatggcagtcggaggcgcagga

SEQ ID NO: 371500 - DNA, 75 bp, Homo sapiens
caaagactccagtaacactcaagcaaagaagagttgagcacaatcagattcgccatgaagtcagcgtaaataatg

SEQ ID NO: 371501 - DNA, 97 bp, Homo sapiens
aggaggaggacgacgacgatggggatatcgagagacaagagagacacctccaacttcgacaaagagttcaccagacagcctgtggaactgaccccca

SEQ ID NO: 371502 - DNA, 75 bp, Homo sapiens
acgagaagcctgaaaagtcgcagcgagctggagccgccggaggggccttggacaagttgttactgactatgttca

SEQ ID NO: 371503 - DNA, 83 bp, Homo sapiens
ccgagctcgatccgctgctcgcacgggagccagctgggtgacctgcctagagctggaacgttacctccagagcgagccctgct

SEQ ID NO: 371504 - DNA, 100 bp, Homo sapiens
gttaagggactcaggcagtacgggaagaacttcttcagaattagaaaggagctgcttcccaataaggaaacagtgatgtttgcagacagaaaaagtaaac

SEQ ID NO: 371505 - DNA, 100 bp, Homo sapiens
cccatcttccaagcgcgggggcaactgttggcccagctccgaaacctggacaacgcggtcctcatcggttaaagaactgaatcattatctggaagctgag

SEQ ID NO: 371506 - DNA, 100 bp, Homo sapiens
ggccgccttcagccaagcggcctaaactctcatctccggccctctcggcgtccgccagcgatggcacagggattaaagcctgtggtttccacagaagcac

SEQ ID NO: 371507 - DNA, 50 bp, Homo sapiens
agacaagtgaccaagatgctgtacgaaggggaggaccaggctggcgatga

SEQ ID NO: 371508 - DNA, 83 bp, Homo sapiens
tttacagaccaccaggaattcagggactttttgctagtgaaatacacccaaggacaatgctgctactctacaaccatctgatg

SEQ ID NO: 371509 - DNA, 76 bp, Homo sapiens
tttgggaacagtaaaatggttcaatgtaaggaacggatatggtttcatcaacaggccactgagaatgcaaaggagg

SEQ ID NO: 371510 - DNA, 50 bp, Homo sapiens
agctggggcagaagcgcgtggtcaagggtggtggttggagccccccaaaa

SEQ ID NO: 371511 - DNA, 74 bp, Homo sapiens
ctcggaggcgttcagctgcttcaagatgaagaggtcatgacgccagtcagatcacactagccttgggcacagct

SEQ ID NO: 371512 - DNA, 75 bp, Homo sapiens
agaaaacaaggcgattccgcagtccccccgttccctggaggtcctgtggaatgtggccggctcacctcattcctg

SEQ ID NO: 371513 - DNA, 97 bp, Homo sapiens
tcaaagtaggattcaagaactggaggaaaaggtcgcctctttgctgcaccaggtgtcctggagacagaggtcggaaaggtctgcttggaagccagac

SEQ ID NO: 371514 - DNA, 49 bp, Homo sapiens
gcgggaatcacacacatacctcaggtccccttcccctgagcccatctac

SEQ ID NO: 371515 - DNA, 95 bp, Homo sapiens
aatgggtctcttgttgaaatccgaaatttcttgggtgaaaaatatatccgcagggttcggatgagaccagaaatgattctggggaccattctgac

SEQ ID NO: 371516 - DNA, 100 bp, Homo sapiens
cacgagaatgtggtcaacttgattgagatttgtcgaaccaaagcgcctacataaacctcaccatatttggaagattcctactccatttgcaagtcatgct

SEQ ID NO: 371517 - DNA, 74 bp, Homo sapiens
cagcctcccaggtagctgggattacagtattgactcggagacaaaaagaggccaagaccaagagtgacagtggg

SEQ ID NO: 371518 - DNA, 100 bp, Homo sapiens
cgaagccttcaaatccatcaagctcatcaaaagagcaaacgccctggaggagcagctgaaggagcaggagctgagagcctgcgagatggtcctggaagag

SEQ ID NO: 371519 - DNA, 100 bp, Homo sapiens
accaggttgcagaagatctggattccacacagcagcggcagcagcaggctgcaacggagaaggggcttcggtggtagatgattggatagaatcatacaag

SEQ ID NO: 371520 - DNA, 100 bp, Homo sapiens
cggccggcagggtggacggtgggctcgtttacccaaggtccagcctagcccctaggcaccatgtcggacagtgatctaggtgaggacgaaggcctcctct

SEQ ID NO: 371521 - DNA, 50 bp, Homo sapiens
cttcaccgaacagcacctcaggagcagacacagcaggatgccaatgcctc

SEQ ID NO: 371522 - DNA, 90 bp, Homo sapiens
gcgcaaaggggatgtcctgcacatgcactacacgagagtaaaacttgtctcggcacagagtcaagtaaagaaagccaacatacagtggag

SEQ ID NO: 371523 - DNA, 100 bp, Homo sapiens
attgctggaggagttgatgacttagatgaagacacacccccaatagtgtcacaatttcccggaaagctgtttagatctgaggacttaactcactttgtac

SEQ ID NO: 371524 - DNA, 80 bp, Homo sapiens
ccaggagacccggggacagcatcgcccaggcccctggaattagaaggtgacgaggagggagaagacgaggatgatgcgga

SEQ ID NO: 371525 - DNA, 80 bp, Homo sapiens
gacctgatgggcacggccgaggacttcgccgaccagcaaacggggattcagcgtccgatcctttggaacagggactcacg

SEQ ID NO: 371526 - DNA, 100 bp, Homo sapiens
aacaaaaggaagaaaaaacaaaacaagaagcttatgcccaaaacagagcaagggcaaaagaattccataagaacagaaactgttcatacttggtgcgctg

SEQ ID NO: 371527 - DNA, 101 bp, Homo sapiens
acctcgtggaaggtgactattttggcctcgagtttcctgatcacaaaaagatcacgatgtccggtctgtgctacgacagcaaaatgttccaggtgcatcag

SEQ ID NO: 371528 - DNA, 100 bp, Homo sapiens
ggagaggcgagctcgcgatgagtggtctcggcaggctcttcgggaaggtgggctcgggatgagtttgaaggcctcttcaagcagccagcagaaaatgtca

SEQ ID NO: 371529 - DNA, 90 bp, Homo sapiens
atttggggctgcttttcattaaaaggaaaaccttgccaaggacttctgtaccctcaatatctgccaagccctggatgaaaacatggacct

SEQ ID NO: 371530 - DNA, 75 bp, Homo sapiens
caaaggcaagaaggcaacgacgttccatctgtggaaggacctaccaaccaggaagaagaaattgtcgagacgaat

SEQ ID NO: 371531 - DNA, 109 bp, Homo sapiens
gaagttccagctctgcgccgatctatgcacgcagatgctggagaagtccccttatgaccaggtatattactcgaggggtttttaaatattgtcaggaaaaagaaggaag

SEQ ID NO: 371532 - DNA, 90 bp, Homo sapiens
gtccctgtcactgtggtgctagatgctgctgtcggtgcgaggacgacgggcagacgttcttcagcctagatgacgggaacaccaaattct

SEQ ID NO: 371533 - DNA, 100 bp, Homo sapiens
ccagagcctgtgggaagtctccatggtgaagtataggctgaggctacctgtgaacagtacgcagtgaatgttgaatttatcatggcatccagcattgacc

SEQ ID NO: 371534 - DNA, 100 bp, Homo sapiens
ctaaaacccagtgcgtacgcattgctacaaaaggcctcccagtagcattggatgcaggaaaaaatacattgacggtgaaaaacaagccgaaccagttgta

SEQ ID NO: 371535 - DNA, 98 bp, Homo sapiens
tcccaccgccccaccgtacttgcaagaaagcagccccagaggaagtgggaaaactcttgcctttgccatcccaatgattcatgcggtgttgcagtggc

SEQ ID NO: 371536 - DNA, 101 bp, Homo sapiens
gcgcctgccgctgccctacggcttctccgccatgcaaggctggcgcgtctccatggagaatgtaattgaccggaaaccataccctgatgatgaaaatttag

SEQ ID NO: 371537 - DNA, 75 bp, Homo sapiens
ctctgccactttttaccttggggacctcaggaagaagtctggaagaagaggaagaggaaagaaaaggagtcaggg

SEQ ID NO: 371538 - DNA, 75 bp, Homo sapiens
tttgattctccatatcacctacagggcgtgttggagagtttcctgggcactgctgtctctggagccatcttttgc

SEQ ID NO: 371539 - DNA, 100 bp, Homo sapiens
ccgcgcgggccgcctatcgggttacagaatgtctgaaggggacagtgtgggagaatccgtccatgggaaaccttcggtggtgtacagatttttcacaaga

SEQ ID NO: 371540 - DNA, 83 bp, Homo sapiens
ttttgtgcaagatgagcctcaagtgcttctgcattacagtgaagctgtacttcacaaaaacagtagaggagccgtcaaatcca

SEQ ID NO: 371541 - DNA, 75 bp, Homo sapiens
cgcctcgactccaaatggttgaaaacagatatacagggggctgaggccatggttctggagagcgttatgtttgcc

SEQ ID NO: 371542 - DNA, 100 bp, Homo sapiens
aggactacagtaaggctgaaatcattgaagtgcttggagtgcagaactgaaagaggctgaaggggatgctaagggagataaagcaaaggtgaaggacgaa

SEQ ID NO: 371543 - DNA, 90 bp, Homo sapiens
ccgacagttggaggtatacacaagcggaggtgctggagaatctggtaaaagcaccattgtgaagcagatgaggatcctgcatgttaatgg

SEQ ID NO: 371544 - DNA, 101 bp, Homo sapiens
gtggccttagctgtgctcgcgctactctctctttctggcctggaggctatccagcgaaactactttgcttcgcactttttcatgggaggagagaaattcga

SEQ ID NO: 371545 - DNA, 122 bp, Homo sapiens
gggcgcggacgcgcagcatggcggtggaggacgaggggctccgggtcttccagagcgtgaagatcaagatcgggggggccctcagcctcttggccttgaacgggctgttcatcttgattcac

SEQ ID NO: 371546 - DNA, 120 bp, Homo sapiens
aaggagggcggcgggactgcactcgagtgtccagacctgctcgatggacacattcagctaacgtattttagcaggtggagtgaggttgaagattcctgtgacagcgatgccatagagaga

SEQ ID NO: 371547 - DNA, 82 bp, Homo sapiens
gaaaaagcttggagataaagttgctttttactgaaactatgttccaacttcctgtcaacaatcttggcagtttaagaaaagc

SEQ ID NO: 371548 - DNA, 100 bp, Homo sapiens
agggaccctgctctgaaacccaagcggtcccaccgcaaggcagaccctgatgctgcccacagcttcagaggatgattccgaagaagacggagaccataac

SEQ ID NO: 371549 - DNA, 100 bp, Homo sapiens
tggaaagttgtcctccttgttagaactgataagcgaagtgattctcttataagaacgcattccctgggatgaaaaaccctgctcaagcctgggtacagtg

SEQ ID NO: 371550 - DNA, 76 bp, Homo sapiens
ctactgtgtggggagttggcaacgcgacacagagccaggccccaatcttcatctccttcttcattgctttgagaga

SEQ ID NO: 371551 - DNA, 100 bp, Homo sapiens
cgatcagcacttcagtcggaaagttggaacctctgacaagaccaagtactaccttcaagggtgataaaagaaaatgtggctgaagttacccgaagttcag

SEQ ID NO: 371552 - DNA, 100 bp, Homo sapiens
gatgacttgactaatgcaggatattctgcagccaattcaaattcaattttcgccaactctagtgctgatgtccaagtgcagttgatcagcaaaggccaac

SEQ ID NO: 371553 - DNA, 83 bp, Homo sapiens
gtccgtccgccgccaccacccactccggacacagcggaaggagagttttacatggaagtggcttacagaaacttggcgctgag

SEQ ID NO: 371554 - DNA, 99 bp, Homo sapiens
taacaatggacacccagaaggacgttcaacctccaaagcagcaaccaatgatatatatctgtggaggtgaccaagaatatggcccaggtgaccaaagcc

SEQ ID NO: 371555 - DNA, 100 bp, Homo sapiens
caggaatgcttttgccacaccaaccatttctctccaggaagctgagaagtacaaagctgaagatgagaagcagagggacaaggtgtcatccaagaattca

SEQ ID NO: 371556 - DNA, 99 bp, Homo sapiens
aaaatcaacaccaggactacagtaaggctgaaatcattgaagtgcttggagtgcagaactgaaagagagctacagagacttctgaagtggagagtctgc

SEQ ID NO: 371557 - DNA, 100 bp, Homo sapiens
aacgaaaacgtagggaccacatcaaagacagctttcacagtttgcgggactcagtcccatcactccaaggagagaagacctggacaaacaccagactcag

SEQ ID NO: 371558 - DNA, 82 bp, Homo sapiens
atgcgggccctgctggaccagctcatgggcacggctcgggacgggttacacatcattttggaatgactgtatatcatctgga

SEQ ID NO: 371559 - DNA, 74 bp, Homo sapiens
accagtacaacagcagcagtggtggtggaggtggaggtctttggtttcataagagcctgagagagatttttcta

SEQ ID NO: 371560 - DNA, 90 bp, Homo sapiens
gtggatgaggctctgcggctggtccaggccttccagtacacagacgagcatggggaaggttatggccacaccgtgcccttgtcagatgga

SEQ ID NO: 371561 - DNA, 80 bp, Homo sapiens
tgtgcctgtgaccttgctgaagagaaaagccccagaccgtataatagacgctggccccaaaggaaactactctcgattta

SEQ ID NO: 371562 - DNA, 100 bp, Homo sapiens
tggcttgcttgagttgacacagggagctccaggactcaccctcaggtccctgagtgccagaggtggtggtgttgcttatcttctggaaccccatgcagcc

SEQ ID NO: 371563 - DNA, 100 bp, Homo sapiens
ggctgtctctggtggagacaataagggcgggacactcactcaatatgaaggcaaactgagactggtggaaattgctcaagtgccaaaagcacatgtagac

SEQ ID NO: 371564 - DNA, 100 bp, Homo sapiens
tggcactgggatgcttccacagatgtacctgaaaagtcgtcactctttcaccaaggtactggtgtggcatactcggacagagaagcccaagatgaagcag

SEQ ID NO: 371565 - DNA, 82 bp, Homo sapiens
cgaccctggccgccccgagcggagcctggaggatattagaaatggctactccccagtcaattttcatctttgcaatctgcat

SEQ ID NO: 371566 - DNA, 78 bp, Homo sapiens
tgggtgctcacagctgcccattgcctaaagaactgtcttgtcgacggtctcactgatgcctcttctgcattcaaagtt

SEQ ID NO: 371567 - DNA, 145 bp, Homo sapiens
tgattatcatacgcattcttcgagacctctgtcagcgagttccaacttggtctgattttccaagctggattgggaaaatgaggtacgttagtgttcgcgattttaaaggcaaagtgctaattgatattagagaatattggatgga

SEQ ID NO: 371568 - DNA, 75 bp, Homo sapiens
cgtgaatttgtccgtctccgacttctggagtctattgcgtctgcagacatggatttcaaccagctggaggcattc

SEQ ID NO: 371569 - DNA, 80 bp, Homo sapiens
tcgtgtggttaaaaactttatgattcagggtggggacttcagtgaagatcctgtttgaccaaactcagagatcaattaag

SEQ ID NO: 371570 - DNA, 74 bp, Homo sapiens
cagacatctacaaccttcgatctcctgacgatgggatgaagctctcttgactatgagtaaaggagaaaaggctc

SEQ ID NO: 371571 - DNA, 86 bp, Homo sapiens
acttcgcattttggcattgacatttaattttagggtcctttatatagaagggagagtagggaactgctcgcagaaagaagaaggtg

SEQ ID NO: 371572 - DNA, 75 bp, Homo sapiens
tgtgtcttttagcaacattaatggtgaggatgaggatgatgaccttcagtatgccgatcatgattatgaagtacc

SEQ ID NO: 371573 - DNA, 99 bp, Homo sapiens
tgctgcgagggcagaacctggcaacaagccctccaagggttgtaacatttgatgaagtgatggctacagcaaggaacttatcaaacttgactcttgctc

SEQ ID NO: 371574 - DNA, 100 bp, Homo sapiens
acaaatcacacgcataatggatgaaaggaaccgacaggtagagtacagagagatggatgaaagcttggccaacctctcagaagatgagtattattcagaa

SEQ ID NO: 371575 - DNA, 83 bp, Homo sapiens
tcggcttctgcctggtgctctgcgtcctcatcgggcttatgttcgaggaacaagatcactcaaggtgaaggataatctactaa

SEQ ID NO: 371576 - DNA, 100 bp, Homo sapiens
tgactaccacccccatgatggggatgagccctggtacctgacagtgtaaagaaggagctcctacaaagaataagaacattccttgctcagcatgccagcc

SEQ ID NO: 371577 - DNA, 76 bp, Homo sapiens
cagttgcaaaatattcaggagaccgtcgttgccttgtatttccagagaacagagtgaagatagtccaagtcctaag

SEQ ID NO: 371578 - DNA, 83 bp, Homo sapiens
cgggaggctgattgagaggcgaagcaattctgtggtgttcttggtcacacatttatggagtttctgaagggcagtggagatta

SEQ ID NO: 371579 - DNA, 115 bp, Homo sapiens
caaccgcaaccattgacgccatgtcgggttattcgagtgaccgagaccgcggccgggaccgaggggcgtctctggccgagcctctttttgtggaaaacgacagcagcagcagtgg

SEQ ID NO: 371580 - DNA, 83 bp, Homo sapiens
cggaggtagtcatgatctatgacgccgagaagcagaggccccgagggggatatgagactttctactcggaatatcctgagtgt

SEQ ID NO: 371581 - DNA, 51 bp, Homo sapiens
ctagcgacgcccaacacctgtccaaacactcaagtcactatagaagaaatc

SEQ ID NO: 371582 - DNA, 98 bp, Homo sapiens
aggattccaagtaactcttatttggtgaatggaggcattgagaacacattagagaaggaggtgatgcagtatgactactattcttcatattttgatat

SEQ ID NO: 371583 - DNA, 95 bp, Homo sapiens
tgtttgatattcatagatctccagcaagaagaagccatattaggctggatcagtgcatgtaagaattcgacgagatgccaatgaacaaatggttc

SEQ ID NO: 371584 - DNA, 118 bp, Homo sapiens
ctgagaatgcttattgttgagaagatgcttgaagtctttcatgctattaaatctgtcaaacaatgcagatcttcgtgaagactctgactggtaagaccatcaccctcgaggttgagcc

SEQ ID NO: 371585 - DNA, 82 bp, Homo sapiens
cggaaccccttcgtgcacgagctgcgcctcagcgccctgcagaaggcccagggttggggtgctggaggactgcttcaccttc

SEQ ID NO: 371586 - DNA, 98 bp, Homo sapiens
agaatcgctatgagagccgagaccgggaatgggctacctacacctgtgtgctgggctttcacgtctacggagtctgctacaccatttttgatttgggc

SEQ ID NO: 371587 - DNA, 98 bp, Homo sapiens
ttttaaatcaagatttaacattccaacacataaaaattatttatccaacagctcctcccagataccccatgtttccccatcactcgaggagtctgggc

SEQ ID NO: 371588 - DNA, 90 bp, Homo sapiens
tgatagaccatataatttgagacagagaaaaacagtggatcgataccaagcacctccaatagctaaggagagagtgttgaaaaaaggaga

SEQ ID NO: 371589 - DNA, 95 bp, Homo sapiens
cttggcaaaatcgagcgggccattgagatcctgaaggagctagacgagtgctacgagcgcttcagtcgcgagacagacggggcgcagaagcggcg

SEQ ID NO: 371590 - DNA, 100 bp, Homo sapiens
accctggatgataaaaaggtttatttggaaaaagaggtggcggagagaggtgcgcatcaagaagggcagccaccgatggcagggggagacctggtattat

SEQ ID NO: 371591 - DNA, 103 bp, Homo sapiens
gagctctcaagcctaggagtgaaaacggagcccccctccatgcgcctgaaggcccgacccagcagccctggcttttccgtgcttacctgcagcgccttctcct

SEQ ID NO: 371592 - DNA, 87 bp, Homo sapiens
cggagcgcggtccctgtattggtctcctgctcctagagggaaagcaggcaggatgggagagtcgccgatagaaccacctcttccctg

SEQ ID NO: 371593 - DNA, 97 bp, Homo sapiens
gcctcccgagtggctgggattacagcgtgtccggagcggtgactggaaggggtacacaggcaagaccatcacggacgtcatcaacattggcattggc

SEQ ID NO: 371594 - DNA, 74 bp, Homo sapiens
gctcgagtgcctgcaggatgtgagggaggagctcgaggccatgagcagatataccagcccagtgaacccagctg

SEQ ID NO: 371595 - DNA, 82 bp, Homo sapiens
cgcatgagtggcaggcccttcagccagctccctgtgctgtcaggaatctacaggacttggctcgtatttacattcgacgcac

SEQ ID NO: 371596 - DNA, 100 bp, Homo sapiens
tgaaaatgctgttgatgcagccagattacatgaaactcactgtcagagcactcccctcaaaaaacaccaaggtgtttcaaaaactcagtcacttccagta

SEQ ID NO: 371597 - DNA, 100 bp, Homo sapiens
ggatgctgctgctcctgtttgccacacagatcaccctgggaatcctcatctccactcagcgggcccagatggtggatgcttccaaaagcatcgaagctgt

SEQ ID NO: 371598 - DNA, 100 bp, Homo sapiens
atgaatgtagagagaaagtacttcaaggggacaactgtgaggtgaaagacccaaggcatggcaacttgtatgacctgaagcccctgggcctcaacgacac

SEQ ID NO: 371599 - DNA, 100 bp, Homo sapiens
gcctagcacgtggaattcgcgaagctgccaaagccttagacaagttatgaagacagtatggagtttccagaccatagtagacatttgctacagtgtctga

SEQ ID NO: 371600 - DNA, 100 bp, Homo sapiens
tatgatctacctaccaatcgtgaaaactatattcacagtgccaggtggagctcaacaggaaagtcctagcggatctggccatctacgagccaaagacttt

SEQ ID NO: 371601 - DNA, 100 bp, Homo sapiens
cactgcacccaggtgttgcagcgctgtgacctcgagcatcactttcaaaccaggtacagcagggaagaactggaaactcagagaaagaaactgcccttcc

SEQ ID NO: 371602 - DNA, 98 bp, Homo sapiens
tggaacgacacaacaagccggaagtggaagtcaggtgtgcctaccgcatgttgccgctgctgtttctgctgggacgtctgactccagttccttctccc

SEQ ID NO: 371603 - DNA, 90 bp, Homo sapiens
ggacgcacggaccaggcccatttccctttcatctggcacctggacgatgacggattaccgcacgggttctgcacagtcacctactcctcc

SEQ ID NO: 371604 - DNA, 82 bp, Homo sapiens
gagatgtgattaatgtattccaccacctccgccagttaagaggaaaaagtttagattttgaagaatgtgctcacaaattgct

SEQ ID NO: 371605 - DNA, 74 bp, Homo sapiens
gccgagaggcgggctcggcggccggagggaaagttctatctggtcatcgaggagctgagccagctgttccgatc

SEQ ID NO: 371606 - DNA, 98 bp, Homo sapiens
caacaggaaaggcaatgttatattaaggtacgtcagcctgtcatatgcatcaacaaccatgtattttgttcgatttgtattgatttgtggttgaagaa

SEQ ID NO: 371607 - DNA, 82 bp, Homo sapiens
tttcctttctccctcgcgttaggtattagaaaactactcggatgctccaatgacaccaaaacagattctgcaggtcatagag

SEQ ID NO: 371608 - DNA, 100 bp, Homo sapiens
gaattagaagaaaaggaaccctggcctgagatctggcaccactctttctacaatgagcttcgtgttgcccctgaagagcatcccaccctgctcacggagg

SEQ ID NO: 371609 - DNA, 89 bp, Homo sapiens
ttggggtgtccgagttgccgccggagaggagtggcctcgcccgcttgatcagaccaaacattgtctggcttgcactgtaaaactagtta

SEQ ID NO: 371610 - DNA, 75 bp, Homo sapiens
cccagaagtcctacttcatccgcctttacggccttcaggccgaggcggagcacaagatcgacctccggctgaagc

SEQ ID NO: 371611 - DNA, 90 bp, Homo sapiens
gatgcaggatgtccatttcaacgaggagttgtggagtgtatggcagctggcacaattatccttgcacacaattcggggggcccaaagctt

SEQ ID NO: 371612 - DNA, 121 bp, Homo sapiens
gagctgagggagcaagaggtgtcggaggtctcatctttgaactactgccggagcttctgccaggaaatcatcgagttccccatcctaaagctaaatggccggaccatggagattgagtcta

SEQ ID NO: 371613 - DNA, 100 bp, Homo sapiens
tttataataaggacgtcaatggaaaagtggttctttgggagatgtcctttgcttctcagatgtaaatgcactttaagtttgttattcaacagtgaaaatg

SEQ ID NO: 371614 - DNA, 75 bp, Homo sapiens
gccagcacggccaaaccccctcctctgcctcgctccaacacagcctgggctctgagcagagcttccggattcact

SEQ ID NO: 371615 - DNA, 100 bp, Homo sapiens
gggaggctgaaggccgggccccgcgagtgccatggcggccgccctgggagcgagcggaggagcaggcgccggagcaacccagtgattccatggaaagcag

SEQ ID NO: 371616 - DNA, 75 bp, Homo sapiens
gcgacggcctggctttctgcgccatcctgcaccgccaccggcccgacctcatctacagagggccggagctggaga

SEQ ID NO: 371617 - DNA, 75 bp, Homo sapiens
ccaatgttggagccgtctgcaaagtgtccccggcaagaaggctggagcattggatttgctaaaggagcttaagaa

SEQ ID NO: 371618 - DNA, 90 bp, Homo sapiens
tacagaaggacatgcaaaacttgcagattttggggtagcaggtcaacttacaatctcgacatggcaggagctgaggcagctgcaggagca

SEQ ID NO: 371619 - DNA, 129 bp, Homo sapiens
tcgagcgctactcgcgcttttcgccgtcgccgctctccatcaaacaattcctggacttcggagcggcctattgccaattcatggacatgctcttccctggctgcattagtttgaagaaagtaaaatttc

SEQ ID NO: 371620 - DNA, 82 bp, Homo sapiens
ccctgcaagccccagcatcatcccccggctgagggccattcgccacctgcctagagctggaacgttacctccagagcgagcc

SEQ ID NO: 371621 - DNA, 97 bp, Homo sapiens
ttgttgcgcagctggcagttccccggtttctccccgacggcgtcgggaggtgtcatggagaaactccagctgggcccagagattctgcagcgggaaa

SEQ ID NO: 371622 - DNA, 75 bp, Homo sapiens
aaggctttgggggcaagtacggagttgagagggacagggcagacaagcacaacattctgaaattttttggttatt

SEQ ID NO: 371623 - DNA, 100 bp, Homo sapiens
caagcccaaagaggagaaagatgcttctaagggaggaagatgaaggctcgtgctcccccacctcctggaaaggctgccactctgcatgtgcacagtgacc

SEQ ID NO: 371624 - DNA, 87 bp, Homo sapiens
ctaaatgaagattttaggcggtatcaaatggaaagtttttccaaatattcatctgtacagtgttctaagaacggaagcatctgggct

SEQ ID NO: 371625 - DNA, 83 bp, Homo sapiens
ctcagcacatggtgggggccacaccatttgccgtggccaggctagaggtcgggaaagaggttaaagaagacacgcaagtatga

SEQ ID NO: 371626 - DNA, 82 bp, Homo sapiens
gcaagagaaaaagaacattactgtcttgcatttaaatcaaacggtattgagatggattgggttatgaaacataatggtccaa

SEQ ID NO: 371627 - DNA, 75 bp, Homo sapiens
agcagcagaaaattaatcagttagtgtatgtcgagagtaccaacgtggcaattgcaaccgaggagaaaatgattg

SEQ ID NO: 371628 - DNA, 83 bp, Homo sapiens
cctggagcctcagttggaagcagccgatccagcctgcggagcctgtggggcagaaaactgtcgctgaaaagcaggagaagaga

SEQ ID NO: 371629 - DNA, 82 bp, Homo sapiens
cccggggacggcgaggccctcatgtaccacacggtgtggacactgccagcggctgcagccgacttggaatgacctgggagac

SEQ ID NO: 371630 - DNA, 74 bp, Homo sapiens
ctccggcctagcctggcggagctccacgacgagctggaaaaggtgaatggctatgtggtgaaccttttctgggc

SEQ ID NO: 371631 - DNA, 100 bp, Homo sapiens
tggagctggagctgacccgctgcaaggagaagctgcacgacgtggacttctacaaggcccgcatggaggttcaaggaaaggacccttccgtggacatcac

SEQ ID NO: 371632 - DNA, 50 bp, Homo sapiens
gaaaaatccactgccttccaaagaaacttccctctgtgtgaggaaaggat

SEQ ID NO: 371633 - DNA, 100 bp, Homo sapiens
tcacacggttcgtcgtctcgggttcgagcccagtgggcttagccactcgccatggactcccagaaagttcatatccagctttcagagtggcaccgtgcaa

SEQ ID NO: 371634 - DNA, 98 bp, Homo sapiens
cacaggacctggaaaaattacatgtagacatagctgacattgagaatgaagagaaccgctactgtctattcatggaactcctggaatctagtcaccac

SEQ ID NO: 371635 - DNA, 100 bp, Homo sapiens
gcagggctggcatagcagcgaaagggccttggagagagtgccaagcatgataacgagtgaggactcgctgtgtgcactcggatacagcagtgaataaaag

SEQ ID NO: 371636 - DNA, 98 bp, Homo sapiens
aaggatgaaatcattaagaatgtgttatttggcaacatctggttatccatggccagcctggtcatctttatgcagctgcgttacctgtttcatgaggt

SEQ ID NO: 371637 - DNA, 92 bp, Homo sapiens
ctcagagagggaagagattcagccagcacactcctcgcgagcaagacaatgcagatcttcgtgaagactctgactggtaagaccatcaccct

SEQ ID NO: 371638 - DNA, 76 bp, Homo sapiens
aaaattggacactgtcccaacctataaaggactccctccccagctcggtcattagtgccatcagtggacagctgca

SEQ ID NO: 371639 - DNA, 50 bp, Homo sapiens
tccagcatgaatcccgaatatcagccataatggcaggtgaagaaattaat

SEQ ID NO: 371640 - DNA, 60 bp, Homo sapiens
gataccgaattcttatcacaaaggcctactctgtgaagagaacattgatgactgtgcccg

SEQ ID NO: 371641 - DNA, 75 bp, Homo sapiens
ggggggccaccgaatcgctgtcacgccggcaggaagggaaaaggccgaggcatcagcgtgtgaagaccgcaaaga

SEQ ID NO: 371642 - DNA, 83 bp, Homo sapiens
cgaggaaatggccgaggagccggagccgcagggaaatcctcattgacgattcaatttgttgaaggccaatttgtggactccta

SEQ ID NO: 371643 - DNA, 102 bp, Homo sapiens
agatctggagaaaccaacagctgtgttgaagaaataatccggaagctccaccatgaggcgaggtggatggaggaagcgagctgaaaatgatggctgggaaac

SEQ ID NO: 371644 - DNA, 74 bp, Homo sapiens
ggcgaaacccatcagaactgctagtgggacccctgacctggagcagctggagccgtctttggaagatgtggaaa

SEQ ID NO: 371645 - DNA, 90 bp, Homo sapiens
gacgccgacgtcgaccagcagagactgtttgcagacaccccagggaacctgcccccgtccatgaacctgtcgcaacttcttggcctgagg

SEQ ID NO: 371646 - DNA, 97 bp, Homo sapiens
gaatccattaaaaggagagctgggaggagaagtgtcattgttgcagcaaaaaagtcagcagtctcaccttccacctttaatacaagcatacctacca

SEQ ID NO: 371647 - DNA, 74 bp, Homo sapiens
cactaacttaacaaaattgaaatttaaggaagatgacacacgaggtgattgcagagagcctgtcggtaattctt

SEQ ID NO: 371648 - DNA, 100 bp, Homo sapiens
caagatctcaccaccacgctctctgcgtagcctctttggcagcggctactcaaagtcaccagattcgtgaccattgtgaggtagatattttgttctaatt

SEQ ID NO: 371649 - DNA, 87 bp, Homo sapiens
agatcttcttttggagcagcagagactgagttcttgaagccagcatagcagagaataaagcatgtttgaagaggacacctacagaag

SEQ ID NO: 371650 - DNA, 98 bp, Homo sapiens
cgccaccatggcggcgcccccgcagcccgtcacccacctcatctttgacatggacggacttcttctggatgcagacagacatgctgaactatctggaa

SEQ ID NO: 371651 - DNA, 83 bp, Homo sapiens
ccgcgcctggcctggccgggaccatgtgcagggctcgcggcctggcaagaatgtacagctgacagagaacgagatccgcggtc

SEQ ID NO: 371652 - DNA, 100 bp, Homo sapiens
ctcagaagaacttgtacagagatgtgatgttggagaactatagcaatctggttttcttgggccccaatatgggaggtaaatcaacatatattcgacaaac

SEQ ID NO: 371653 - DNA, 100 bp, Homo sapiens
ccaggaactccggaaatgcgcaggcggcaggaggaggctatgcgaagactagcctcgcagaaacctccacagctgttgagaaaaaggagaaacctcttcc

SEQ ID NO: 371654 - DNA, 100 bp, Homo sapiens
tggatactcagcgtcgctggcagccgctgtacttgatggcccactgcgtgaccttggttcagctgtccatttcctgtgaccatctcattgacaaggacat

SEQ ID NO: 371655 - DNA, 75 bp, Homo sapiens
agttcctgatgttacaaatgaacaaggatctcccaggcccgtgatagcatcaaagaatgataaactcgagctgca

SEQ ID NO: 371656 - DNA, 82 bp, Homo sapiens
gcccaagcgacagctgtcagaggggcaggagcttctgggagccaccgtctgaagaaacctctgtagaggagcaggatgcaac

SEQ ID NO: 371657 - DNA, 101 bp, Homo sapiens
gaggagtggcggcgcaggaaggagaagctgctcaagctgccaatttgtggtgtctgaagaccaagactacacagctcattttgctgatcctgatacattag

SEQ ID NO: 371658 - DNA, 75 bp, Homo sapiens
gagaaataaaagtggccattagtactgtgagcatgaaccttgaggttggtcaaagaaaaagtgatgtatgaaaaa

SEQ ID NO: 371659 - DNA, 100 bp, Homo sapiens
ctctgaggtccccaggagagcctgcctgcacggaagagacgcctcctcggttgacaggactgaggtgattcgcacctgcataaacccagtgtactcaaaa

SEQ ID NO: 371660 - DNA, 75 bp, Homo sapiens
gactcacataagaggaaaggatcgccatgtgacacactggcatcaaggcattgaatgccccagaggagcccgaaa

SEQ ID NO: 371661 - DNA, 75 bp, Homo sapiens
agtcagtcagaggggcgagcaggagcgattccgtcgccaaacagacaacagtgattgactacgtgaagccctcgg

SEQ ID NO: 371662 - DNA, 100 bp, Homo sapiens
aaaccaaagacaaacgattagaagatggctatttcagaatagatcacttatttgagacatagtcctcaagtggaattatgaaatcaaagagtgactccat

SEQ ID NO: 371663 - DNA, 82 bp, Homo sapiens
tcatcatgaaggacgtgcccgactggaagggatcagtgtccttcagggatgtggctatcgatttcagcagagaggaatggcg

SEQ ID NO: 371664 - DNA, 74 bp, Homo sapiens
gatgatgctgactttgatgaagattactgatctctcattacccaactatctgatggcatcttcggttggactgc

SEQ ID NO: 371665 - DNA, 75 bp, Homo sapiens
ctgaaggctaccaactacaatgcttcagctttagctgcagctgcctctgttcagccacttgcaacacaatgtttc

SEQ ID NO: 371666 - DNA, 100 bp, Homo sapiens
ccgcggcccgcgcgcccgcgcggcggaggagagatgaagccaaggaggagttcctggatctgcttgatgtgttgctgccccatgcccagacatatgtccc

SEQ ID NO: 371667 - DNA, 87 bp, Homo sapiens
tctggaggagcagttgtctgatgaagagaaggaatattaagtgaacttgacgttgatgtaaatgaagggtctctaatggagctacag

SEQ ID NO: 371668 - DNA, 100 bp, Homo sapiens
ggcggagaaggatgacaccggagtttgacgaagaggtggtttttgagaacatcatcaagaaggtgatcgggcagaagtttgtgtacaagtttgtctcttt

SEQ ID NO: 371669 - DNA, 82 bp, Homo sapiens
aaaaaggggtcgtcctggccggcctccaaaggccaatgatgaggccaatcagagtgatacaagtgtctccttgtcagaaccc

SEQ ID NO: 371670 - DNA, 82 bp, Homo sapiens
aattggataataggcagctcaatgacagtcaagtggaaacaactgtctgctgctggcagaggactggccatttggagctgag

SEQ ID NO: 371671 - DNA, 101 bp, Homo sapiens
ccatctcgctgagatacgaagggagggtgtaccattacaggatcaacactgcttctgatggcaaggttatcaatactctggctgaccatcatcatcgtggg

SEQ ID NO: 371672 - DNA, 98 bp, Homo sapiens
tgtatgctcatcagtattatatgcagtatggttggaataaaaacagggttgaatgagttccagaaagcagggttctcaacctcgtggacagcaatctg

SEQ ID NO: 371673 - DNA, 85 bp, Homo sapiens
acatgcaaaaatcacatgtggctatgaccttcctgcaaaatgcactcaaggagttgcccctggtcctgtaattggacttcaggca

SEQ ID NO: 371674 - DNA, 115 bp, Homo sapiens
tcactttcggccctgggaccaaagtggatatcaaacgtcagcccaaggctgccccctcggtcactctgttcccgccctcctctgaggagcttcaagccaacaaggccacactggt

SEQ ID NO: 371675 - DNA, 96 bp, Homo sapiens
aaatcctagatgtagaaataatctttaatgaacgtggctctaaggatgaaaactttcggaagagaaagttgcctgtggtaagttcagttgttaaag

SEQ ID NO: 371676 - DNA, 100 bp, Homo sapiens
gatggttctgccttccagtatgagtatgagccaccctgcacgtccctctgtgctcgggtccaagctgtcaggctgcaggtgcaccaggagctgcgagagg

SEQ ID NO: 371677 - DNA, 116 bp, Homo sapiens
agggagtggagcttggtttcgggatctcggtgctgcagacggcgagacctcctgcacagacaatgcagatcttcgtgaagactctgactggtaagaccatcaccctcgaggttgag

SEQ ID NO: 371678 - DNA, 74 bp, Homo sapiens
ggaggacgcgcccggcgcccctgagccggccgagcggcgacggaccgcgagtggtcccaggctgcacccatggc

SEQ ID NO: 371679 - DNA, 110 bp, Homo sapiens
gtttttccgaagcctgcatttttttgtggagtggtttgaatatcgtaagcgcacgtttaaacatctcaagtttcaccagtgatcattaaagaatgggcagcttacaaagg

SEQ ID NO: 371680 - DNA, 144 bp, Homo sapiens
gaggcgggcgcctaccagccggcagctccggagctgcccgcgccatgtccgcgcacaatcggggcaccgagctcgattcagaatggacagtttagaagaacctcagaaaaaagtctttaaggctcgaaaaacgatgagagtgag

SEQ ID NO: 371681 - DNA, 95 bp, Homo sapiens
cagaaaaacacaagaagattcagccctgtcatcttgtgcaaagattactacagcatcccatttcccacacccactactccgctgactgggaggga

SEQ ID NO: 371682 - DNA, 98 bp, Homo sapiens
gaaactctgaacacatctgaacatcagaagggacagactccagacgcgccaccagctccaaacgagaatggaagccgctggaggaccgtagctgcaca

SEQ ID NO: 371683 - DNA, 90 bp, Homo sapiens
cggagacggaccgagccacgggcccccgcggccgcagcatctcggaggaatttctgcgccaggagatgaggggcggtagagccctggaat

SEQ ID NO: 371684 - DNA, 100 bp, Homo sapiens
aaagaccttctacaggacctgaaaatggagatttacagacagtcatctgggtggaggacacccttttgggatcagcactgaaagtgacgccatatcccac

SEQ ID NO: 371685 - DNA, 98 bp, Homo sapiens
ctcgaatgataactattgatgggaaacagataaaacttcagatatgggatacggctcattggtgggcagtattacttatgggaattgctctgatcatg

SEQ ID NO: 371686 - DNA, 75 bp, Homo sapiens
gacaagatgcgccgcgccagctcctactcctccctcaactccctcatcgtatggtttgaagtggtgaacatggat

SEQ ID NO: 371687 - DNA, 95 bp, Homo sapiens
cagcaatgtggagctgtgcctgtgccccgccagctaccggggggactcatgccaggtggggaagctgaggcaggaagccctttagtcacttgccg

SEQ ID NO: 371688 - DNA, 75 bp, Homo sapiens
aggaatgaaagacattcaggatcaacttgaacgaatatttctggtagacacagcatcatctctacccataaaaga

SEQ ID NO: 371689 - DNA, 87 bp, Homo sapiens
gaaccggcacctgcacacctggatccaggataacggaggctggaacagctttgctgagccatcaaggtctaatggaagcatggttcg

SEQ ID NO: 371690 - DNA, 100 bp, Homo sapiens
tgccctgtggcctcgctcctcggaggaacccctgaacagtgcccaagtgttgtctctttgttgtcagagagttacaaccctcatgtgcgctacggagctg

SEQ ID NO: 371691 - DNA, 100 bp, Homo sapiens
gagcaacatctttcctcaccccaaggtacgaatgtgaagaatcttttacgaccctaaacgtagacattagaaatcaccaaaatcttcttgattctttgga

SEQ ID NO: 371692 - DNA, 75 bp, Homo sapiens
cgagagagcctgcggaacctgcgcggctactacaaccagagcgaggccgtgagaaggacgttgaagagtgggctc

SEQ ID NO: 371693 - DNA, 74 bp, Homo sapiens
ctcgaccccccactgatcgcgctggataaagatgcgcctctgcgatttgcaggacggcccccaagttacatgaa

SEQ ID NO: 371694 - DNA, 83 bp, Homo sapiens
atctttctgacaacaaactcgaagactggcatgagataatatcgtctactgcattatttttggctgcaaaagtggaagaacag

SEQ ID NO: 371695 - DNA, 100 bp, Homo sapiens
tgaagccccagcgagcggctgcagcggggccgtgaggagcagccagcgggaggcggcggcgagtcgacatcgctattgcggttccgaggcagtgggaaga

SEQ ID NO: 371696 - DNA, 73 bp, Homo sapiens
cgatgcaccgagtccagcccaggaaaatggagagaaagttcaggagccctggaaaggagaaggaataagacgg

SEQ ID NO: 371697 - DNA, 76 bp, Homo sapiens
caagacagtgcctggataccttcgaatagggtccacctgcgtgtgcacagtggagagcgtccattccagtgtgcct

SEQ ID NO: 371698 - DNA, 82 bp, Homo sapiens
accagccgaacttcagggtttccaccgttcgttcaagctggtcagtgagaaggtcggaggggccgaggggaccaagctggat

SEQ ID NO: 371699 - DNA, 90 bp, Homo sapiens
ccagaagtccagagctgaggactgcctgtttgcagtcatggctccgatcttcatcttgaagaagagtgacattgggtgactgctgcttgg

SEQ ID NO: 371700 - DNA, 100 bp, Homo sapiens
gaggaaccagatatcttgaaaagctgccagaaagatagagccacgaaccccctgaacaaggagctcgactgggccagcatcaacggcttctgcgagcagc

SEQ ID NO: 371701 - DNA, 51 bp, Homo sapiens
cctcagcggtctgcgcctggcagcagatgtatggtctgctggctgtgtgtt

SEQ ID NO: 371702 - DNA, 80 bp, Homo sapiens
ggatgatgcggaaattaaccccaagcagataatcaccagaatgggagtgaatgacttgtggcaaattttggagcctgtta

SEQ ID NO: 371703 - DNA, 100 bp, Homo sapiens
taagcggactgcagccgcgagctcctggaggcggcgggatggaggcggcggccgagctcccagctcctccagcagccgacaggaggcccgtcaagatgca

SEQ ID NO: 371704 - DNA, 98 bp, Homo sapiens
cataaagctgacttggaagactttgactccaaggtgcaaggtgctggagaatctggtaaaagcaccattgtgaagcagatgaggatcctgcatgttaa

SEQ ID NO: 371705 - DNA, 100 bp, Homo sapiens
agcctttttggcctggcttgtttgcaaagctcagattccaaatgaaaatgtttgagagcgctgactctacagccacaagatctggccaggatctctgggc

SEQ ID NO: 371706 - DNA, 50 bp, Homo sapiens
gggatcttcgcactatcccaagcacctgtggaatcctctcaagaggaaca

SEQ ID NO: 371707 - DNA, 78 bp, Homo sapiens
cttgggcggaggatccactcagatcgccttcctgccacgcgtggaggcgaccatggccttgctgggtaagcgctgtga

SEQ ID NO: 371708 - DNA, 73 bp, Homo sapiens
cgccccttatgctgccagccgcctgctggctgctgcctgcatttgtgacagagctgaatgaacctctctccaa

SEQ ID NO: 371709 - DNA, 50 bp, Homo sapiens
caccaagagctgacacccctatcagagcacgaggtagaactaacattgaa

SEQ ID NO: 371710 - DNA, 100 bp, Homo sapiens
ctgctggacctgccctgcttgacggcggtgctggacctgcagctcagtctgtccagccctgggagcggcggaccttccccctggcgcacagtccccaggc

SEQ ID NO: 371711 - DNA, 100 bp, Homo sapiens
tctatgtcctcgccttggttggagccccactgtgttctccttgcctcaaaagaaaactcggcacctgttaaacttggaggctttggggtagctattcaat

SEQ ID NO: 371712 - DNA, 98 bp, Homo sapiens
cgtacaccaaaaactcaggcttcgccacctgcgtgcaaatgtctcaatttaaaatggtgaattactcctatgatgaagatctggaagagctttgtccc

SEQ ID NO: 371713 - DNA, 83 bp, Homo sapiens
ttctccaaaatggccacttacctgactggggaactgacgggaatagccaggccagaagaaggaaggcctgtggtgagtgggac

SEQ ID NO: 371714 - DNA, 76 bp, Homo sapiens
ccagcaatgaatgagcgttccagcttctcccatgggcaaagcctggccttacaccacttccagcagctctggggct

SEQ ID NO: 371715 - DNA, 83 bp, Homo sapiens
gggggcggggcccaaagtcgctggagttttgctcctgggactggacgtccgagaggaactgtggctgcaccatctgtcttcat

SEQ ID NO: 371716 - DNA, 100 bp, Homo sapiens
gcttccagatggtcaccagcggggtacagagcaaggccgtgagtgactggctgattgccagcgtggagtttgacaagtatgcgcccaagctggacagccc

SEQ ID NO: 371717 - DNA, 75 bp, Homo sapiens
ctcctgccaggcagtgcccttcccggagcgtgccctcgccgctgcttcgagagctgtgcccaggagtgaacaacc

SEQ ID NO: 371718 - DNA, 100 bp, Homo sapiens
caaaaaccaaactcttggagaagctgttaaggaaggaactgcaggagctgcagaatctttacaaacagaacagtacacatacagcccagcaagcagagct

SEQ ID NO: 371719 - DNA, 48 bp, Homo sapiens
gaggacgactttcggctggaagcttcgagagctgtgcccaggagtgaa

SEQ ID NO: 371720 - DNA, 100 bp, Homo sapiens
aaattgtacaatttgggattaaaaggctattacatcagagacagtggcaacaattcagatgggccatcaactgagaaagaccttgacgaaaagaagaaag

SEQ ID NO: 371721 - DNA, 100 bp, Homo sapiens
ggagtgagaagcaagaaggccctggacacagcaatatctctgggctttcacagggatcttctgcatttaaaatagaagaggcatcatgctgaagagggag

SEQ ID NO: 371722 - DNA, 100 bp, Homo sapiens
ataaacaagacagggacatcgcacttctggatttaatcaacttttttatccagtgttcaggatgtcgagcttcgcagaatcaagaacggctatgtgcgtt

SEQ ID NO: 371723 - DNA, 75 bp, Homo sapiens
gcttcaacatggcctcgctgtgatatgtatgacgttggctttttctcctccgtgacagccagagtaatccaaagg

SEQ ID NO: 371724 - DNA, 98 bp, Homo sapiens
ccctgctgctgctactgctgttgctgctgctcgatattctctaagccgctttcatcatgggagaaatagagcagaggccgaccccaggatcacgactg

SEQ ID NO: 371725 - DNA, 74 bp, Homo sapiens
ccgtcgttgccttgtatttccagagaacaggacactcatgaggaccatgatacttccactgagaatacagacga

SEQ ID NO: 371726 - DNA, 75 bp, Homo sapiens
acgtctgcgtgagaatagagaccaccgagggggggccctcagcctcttggccttgaacgggctgttcatcttgat

SEQ ID NO: 371727 - DNA, 50 bp, Homo sapiens
aaactgcaataagccgccttccaagctgctgtaagtaaagatgattccat

SEQ ID NO: 371728 - DNA, 97 bp, Homo sapiens
agaaggatatcgacgtcgtgatccagaagtccagagctgaggactgcctgtttgcaggtgccagcgagatttcagattcctgtaaacctctaaagaa

SEQ ID NO: 371729 - DNA, 90 bp, Homo sapiens
caccgggatcgtgaccgagaccgtgaccgagagcgtgaccgagagcgcgaatatcgtcatcgttagaagaaccagcatatccaagaggag

SEQ ID NO: 371730 - DNA, 100 bp, Homo sapiens
tcattcagatgtggtggaatatgccaaggaaaaactggagagcttcatcaaaaatagtgatagctttgataatcaacagtgggggcaaaatagccctgag

SEQ ID NO: 371731 - DNA, 83 bp, Homo sapiens
ctccactccgtcccccgcgggtctgctctgtgtgccatggacggtaagactttgaccccgacgcaggcttcagtgattgccgc

SEQ ID NO: 371732 - DNA, 101 bp, Homo sapiens
ttaaggaccagatacaggatgtagaagggagatacatgcaggggcttaaagaactaaagcaatactggagtaaccgcttcctaaaccattttgcagaaatg

SEQ ID NO: 371733 - DNA, 74 bp, Homo sapiens
atgaacctttagatgaatttacaagccgtgccctccagaagcagccgcgtgtctgctgggtggctccaagcccg

SEQ ID NO: 371734 - DNA, 98 bp, Homo sapiens
cgccgcaactttaaagtcatgatctaccagggcttcctcagccgccgcctcaagggctccatcaagcgcaccaagagccagcccaagctggaccgcaa

SEQ ID NO: 371735 - DNA, 89 bp, Homo sapiens
acgccgcgcagcgccgggctggggcgggcggcccgggacaccgacagattgttctctggggccggactgagaaatgcctgaaggagacg

SEQ ID NO: 371736 - DNA, 100 bp, Homo sapiens
ctggaatcgccagctcccggcactgctacctctgacccaaagcagccaaaagaatgcaatggtgtaaagattccagttgatgccagtaaacctaatccaa

SEQ ID NO: 371737 - DNA, 75 bp, Homo sapiens
tgctgtattcagctcaggaccaggcaccttctgtggaagtggcttacagaagagacgaaatgtggtctgagggac

SEQ ID NO: 371738 - DNA, 100 bp, Homo sapiens
gggagatcatgtttcacgtttccacaaagctgccatttaccgacggagacgcccagcagctactacccacagatggcatgatccgaaaacactctcatgt

SEQ ID NO: 371739 - DNA, 83 bp, Homo sapiens
cgacatgatggcgagcatgcgagtggtgaaggaagctgaagtcttcagcagaaccctgacctaggtagggagtctcaatggcc

SEQ ID NO: 371740 - DNA, 90 bp, Homo sapiens
cttgcgaccacagccagagcctcagcaggagcctgttctcatcaccatggcaacagactttgtgcccattgacctagacgagtggtgggc

SEQ ID NO: 371741 - DNA, 75 bp, Homo sapiens
tggtgaaacaccactgaagcattgccaaggtcttcaatgaaatttatccagtatggacttactcttacctggtgc

SEQ ID NO: 371742 - DNA, 82 bp, Homo sapiens
acaaaggcaacggtgactttcaaaaccaaacctggaccacccaaaaagccgaagaccccttcaagaccatcagccttagcat

SEQ ID NO: 371743 - DNA, 83 bp, Homo sapiens
gttgatggtgttaagaaactctcagtttgtgtttctgagaaagccgcttacaaacacgcagatggcaagaagattgatggcag

SEQ ID NO: 371744 - DNA, 82 bp, Homo sapiens
actccttcggcagtccacccaccgccgccgcctcccaggatacagacgtccctcaccagtgccagcttggggtctgcagatg

SEQ ID NO: 371745 - DNA, 100 bp, Homo sapiens
caaattgtacatttgcccattctcaggaagagcttgaaaaggcaattgaaggaacagactaaaaatcgtgtcctggaaggaaactacaggtactaccagg

SEQ ID NO: 371746 - DNA, 83 bp, Homo sapiens
cgtggagatatggcgcaactgcggcgcctcttttgaaacagatggtcaccatgtttagatattagcagtcccgtatgtgcatg

SEQ ID NO: 371747 - DNA, 75 bp, Homo sapiens
cgccaggtgctggaggacttcccaacgttctactcagtgaatgtggattacagcaagctgaagaaggaacgtcca

SEQ ID NO: 371748 - DNA, 90 bp, Homo sapiens
aacttatatcgccagtccagcagctaaggatattttgtgcaggtgtttatggagatgtgcagcgtgtgaagattttatacaataagaaag

SEQ ID NO: 371749 - DNA, 90 bp, Homo sapiens
cccgcggagagagccactcccgcccacgtcccatttcgcccctcgcgtccggagtccccgtggccaggaaaggccgagggggacggcaag

SEQ ID NO: 371750 - DNA, 53 bp, Homo sapiens
ttgagacctcccgcgcagtgcctctggtaatttggcccagacaagagctagga

SEQ ID NO: 371751 - DNA, 109 bp, Homo sapiens
ccggacagccgcgcgctgagggtctcggggcgggcgccgcgggacctctccgggccatgggatgatcggctgaatgtaacagaggaactaacgtccaacgacaagacga

SEQ ID NO: 371752 - DNA, 100 bp, Homo sapiens
ggggcctctggcggtggcggcctggggcggcgcgacggctggtgcgcagacttgaattcctatggaacaataaagacacagcagaaaacagggattctcc

SEQ ID NO: 371753 - DNA, 100 bp, Homo sapiens
ctcatgccatgtctgacactcctgcttcaagacctccgatccaagatgctttctaaagaagtctcctgtcaagaactgaaagctgaaatggagagctaca

SEQ ID NO: 371754 - DNA, 75 bp, Homo sapiens
gctactccaacccaaacaacaaccaagccagtttaatgcgcaaatctgtccaaggctgcctggggagcattggag

SEQ ID NO: 371755 - DNA, 50 bp, Homo sapiens
ggatgatgcggaaattaaccccaagggcaccatgccggtggaaaggatgc

SEQ ID NO: 371756 - DNA, 82 bp, Homo sapiens
gcagactacggacctgtctgggtctcagccgccaaagaccccgtccggtaggcgccatgtcagaaccggctggggatgtccg

SEQ ID NO: 371757 - DNA, 95 bp, Homo sapiens
gatcctttctattcaggataacacaagtcccttgccgctctgggttcccttcattatcctgtggaagtagcggtagcagttcatccaacacggct

SEQ ID NO: 371758 - DNA, 85 bp, Homo sapiens
ctggtccatatgaactgaaagctctccacctccagggacaggatatggagcaacaaggtaaaatgtcggttccaggaccttacca

SEQ ID NO: 371759 - DNA, 50 bp, Homo sapiens
agccaagctcgtagcctgccactccgtgctaggtggcaagtgggagaaac

SEQ ID NO: 371760 - DNA, 87 bp, Homo sapiens
ggcttaaactcttggcatttggctttgcctttctggacacagaagtatttgtgacaggagcgtgaggatcatccccggagaggacgg

SEQ ID NO: 371761 - DNA, 95 bp, Homo sapiens
agtgacaataatgctgcctccatgctgcaggttttcgacctccgcaagatcctcatcacctactatgtcaaggttcctggaaagcaactggtttg

SEQ ID NO: 371762 - DNA, 100 bp, Homo sapiens
gctttacgtcatcttcgattagctaataaccaactgcaattcctacctccagctacctcctgccccatctccttccatctaaacctggcctggacaccca

SEQ ID NO: 371763 - DNA, 74 bp, Homo sapiens
gaggacagttcgctacacagcaatgcatcgagaggaagatggatggccgagagtacccagacgcacagggcttt

SEQ ID NO: 371764 - DNA, 82 bp, Homo sapiens
tcggacggaacgttaggaaggccctgacaatgcagatcttcgtgaagactctgactggtaagaccatcaccctcgaggttga

SEQ ID NO: 371765 - DNA, 75 bp, Homo sapiens
cgcaaacgaaaaagaacgacatgatgcaatcttcaggaaagtaagaggcaaagaaatgatgactttattgaatta

SEQ ID NO: 371766 - DNA, 97 bp, Homo sapiens
gccgccgctggcccaacggtttccccagcagtagcctctgcgaccaggtgcggcttcaggtgtccctgttacctgagaatgacagatggaatgaaac

SEQ ID NO: 371767 - DNA, 83 bp, Homo sapiens
tcaagttccagaggaacgggatgagctcctgagatggaagcaaccatgtccaagggacctgcagttggtattgatcttggcac

SEQ ID NO: 371768 - DNA, 50 bp, Homo sapiens
ggacattccaggcagaggcaaggccccttcacagatgtagtcactacaaa

SEQ ID NO: 371769 - DNA, 75 bp, Homo sapiens
aaattatctctggtgctgcagctctaacaccttccaccatgaccacctcagcaagttcccacttaaataaaggca

SEQ ID NO: 371770 - DNA, 90 bp, Homo sapiens
aagatggcagcagtgactctgctggctttggcgtatacacagcttgacaaaagtaagctgaagccaggaacaagagttgctttggatatg

SEQ ID NO: 371771 - DNA, 50 bp, Homo sapiens
aaaggacagaggctgttccctatggcaggatacctacctggtttatattc

SEQ ID NO: 371772 - DNA, 96 bp, Homo sapiens
taacagcatcagagaagacaaagggagcaacttcccctggacagaaggcaaagttggtgtatgaagaagtacgaggatgtcgtccaggaaagattg

SEQ ID NO: 371773 - DNA, 74 bp, Homo sapiens
ggaggacaacgactaccaccgcagcgacgagcaggaagttcatcagcagaggaaatggtcactctcttggttca

SEQ ID NO: 371774 - DNA, 102 bp, Homo sapiens
ccaggactccctttgttggagttttgcccacgcgttgtaattaagcctcgcacaatatgacaatgcagatcttcgtgaagactctgactggtaagaccatca

SEQ ID NO: 371775 - DNA, 98 bp, Homo sapiens
atgccccgctacgccgacgcgtcgggacgcaacacgcttagcggcttctcctcagcccacatgggcagtcacggctttgaagacgacccccaggctgt

SEQ ID NO: 371776 - DNA, 75 bp, Homo sapiens
atgtgtttgttatctgcttctatttggaggctggggacctctcaaaggtattttggcctctccccagtctgctcc

SEQ ID NO: 371777 - DNA, 75 bp, Homo sapiens
ctcgggtcttctgacgtgccgggcgggaaggactgagcagggggaggaacatttaagctgatggaagtggaagtg

SEQ ID NO: 371778 - DNA, 97 bp, Homo sapiens
cttcgaaacgtgataagaagcacctggatgagacatttgctacagcatcccacattaagtcaacgagccataagaaagtgggagccttatggaggga

SEQ ID NO: 371779 - DNA, 50 bp, Homo sapiens
cagtgacatgttgataaaaaatgatgcgggctgacgcacgaggcacacag

SEQ ID NO: 371780 - DNA, 100 bp, Homo sapiens
gagctgcagtcggcactgctactgcgaagacagctggcaggcagttgtgaaaaacttcaggacaaaaatgtttcatttaaggacttgtgctgctaagttg

SEQ ID NO: 371781 - DNA, 90 bp, Homo sapiens
gttccctcctccgtttctgtatccccacgagatgtctggcgataaagggatttctgccttccctgaatcagacaaccttttcaaatgggt

SEQ ID NO: 371782 - DNA, 50 bp, Homo sapiens
gacctcagcctcactcaccatcaggcggagaagaaatgggtgaccgttgg

SEQ ID NO: 371783 - DNA, 100 bp, Homo sapiens
agtatgccaatttgttggcagctcagggcagtattgctgcagccttggcttttcttcctgacaacaccaaccaggttgactttggatttgcgaagaaaat

SEQ ID NO: 371784 - DNA, 95 bp, Homo sapiens
aaaatcacatctcgtcctttcaccaggttccgcacggccgtcagggtggtcattgcaatattaagtggatgtcacactgaattcagtcaacctaa

SEQ ID NO: 371785 - DNA, 50 bp, Homo sapiens
cggcgcgggtgctccgggccgaggccgcgtactatactggcaattgctgg

SEQ ID NO: 371786 - DNA, 100 bp, Homo sapiens
tgggaccactgccacctatgcactccccgcagcagccaggctatcagccccaacaaaatggctggtagctcagggatgtctcgtctgtgagttacagctg

SEQ ID NO: 371787 - DNA, 74 bp, Homo sapiens
gaacatggcggatcggctcacgcagcttcaggacgctgtgaattcggacctttgcaagaatgtggaactgctga

SEQ ID NO: 371788 - DNA, 76 bp, Homo sapiens
gtcggtgctgaccgctgcacgtcgactgcctaccaggagcagggttcccagtttgtcgagtgggcctcggcaggaa

SEQ ID NO: 371789 - DNA, 98 bp, Homo sapiens
gatggccctgggtcctcgctgtggggcaatccgggcttgcagacgaggaatgcgatgttaattctggggcattgatgttttacaatgcctgatcaaga

SEQ ID NO: 371790 - DNA, 98 bp, Homo sapiens
tcatatcttcacttggcaaactcaacaagtgaggtcctttggcactgaagaccgtcccacagataggcctgcgccccccagagaggagatttatgagt

SEQ ID NO: 371791 - DNA, 90 bp, Homo sapiens
cgggcctgaggcgaaggagcggccgggagcccgccgcgctggtagcgccacaatggtgcgcatgaatgtcctggcagatgctctcaagag

SEQ ID NO: 371792 - DNA, 75 bp, Homo sapiens
ctctcaccgcgcatgtttggaggtaaagtcagtgataaatcttttgtttgctgcatatactggagatgtgtctgc

SEQ ID NO: 371793 - DNA, 99 bp, Homo sapiens
acaagggctgtagattggtggggccttggcgtgcttatatatgaaatgcttgttggtgaggtatcctccatgaaatgtgggatccttccaatttctcaa

SEQ ID NO: 371794 - DNA, 75 bp, Homo sapiens
tgcccggagcctgagctctgccgcccgattcgccaccatccagatttcgagaaacctggggtaagcccagttggg

SEQ ID NO: 371795 - DNA, 74 bp, Homo sapiens
taggggcctggccaatccagagcctgccccagagcccaagaggctgggaggcggcagaatgcagccagaggagg

SEQ ID NO: 371796 - DNA, 100 bp, Homo sapiens
cgctgacattaaggaccagccagaaaatgaacgaaaagggtcttggtcagagaggaggaattctagtattgttggcagacgatcacttgaaaggacaaca

SEQ ID NO: 371797 - DNA, 83 bp, Homo sapiens
cctggagccgaggccccccgacggcggaggcgcccgcgggtcccctacagccaagcaaaatgatgcttcaacacccaggccag

SEQ ID NO: 371798 - DNA, 90 bp, Homo sapiens
attgcctttgattttgactatggaaattggtggtcctgccatcatggctgtcctctgcaaaggtctcctcgctcattgagagaatctctg

SEQ ID NO: 371799 - DNA, 88 bp, Homo sapiens
ttaccatgaatagttctactccttctacagtcactattccaggtcctcaggatatagccgtgacctaaacacagaaatctaccctggc

SEQ ID NO: 371800 - DNA, 78 bp, Homo sapiens
ttgaggatgcattcattgtgatatccgatagtgatggagaggatatttggatgtttcgagctcgacttgtgaaaggag

SEQ ID NO: 371801 - DNA, 100 bp, Homo sapiens
cgccagaaggaagatggcggatctggaggagcagttgtctgatgaagagaaggcagaaaatgtgctagattggaggtgaagaccctggagccagagagcc

SEQ ID NO: 371802 - DNA, 100 bp, Homo sapiens
tacccccagtacacttactactatcctcattatctccaaaccaaggttgtggaacttttagcaagtgctcttatggacttggtacaaggagtatatcatg

SEQ ID NO: 371803 - DNA, 82 bp, Homo sapiens
gagagccgcacctttgccgtgtacctcaatagcactggctaccggacaggaggctactcacagtcgaactacaactccccgg

SEQ ID NO: 371804 - DNA, 100 bp, Homo sapiens
tgtaaagtctgccaagcatacaaggcaccacgttcacatcactgcagaaagtgtaacaggcatgttcaccagattgatgcagtgctgttgtctcaccctg

SEQ ID NO: 371805 - DNA, 101 bp, Homo sapiens
ttggttccccctccctcagcttccgccccaaaagtgttggaaaaccttggacagacaattgtccccgatttgggatcactggaaagtcagcatgattttcg

SEQ ID NO: 371806 - DNA, 90 bp, Homo sapiens
gtaatagaggacttgaagcagaaagcaagtgaatacgagtcagaagattatcttagaagacctaggactccaaaaatgtttcccctgaag

SEQ ID NO: 371807 - DNA, 83 bp, Homo sapiens
tctgctccggaaaccaggttcgtggctatcccactcttctctggttccgagatgggaaaaagagatggggtgatgattatgat

SEQ ID NO: 371808 - DNA, 100 bp, Homo sapiens
agaaggtgcattttaccttttgttgttgaagattggaaattcatagcccaggttcttgatcggatgtttctgtggacttttcttttcgtttcaattgttg

SEQ ID NO: 371809 - DNA, 98 bp, Homo sapiens
tctcagatgacttcgtctcccaccgactgcctgtttaagagaccacaccgctgttccagaccctctccatggatgatgtcctgcccctgatgccttgg

SEQ ID NO: 371810 - DNA, 95 bp, Homo sapiens
atcccaagactgctggcaacaggtccacaaggagaatccagaacaggtccaccagggtccacaggttcaagaggtccccctggcccccctggccg

SEQ ID NO: 371811 - DNA, 51 bp, Homo sapiens
ggctacccagcctacatctcggctccttcagtggtagatgtcccctgtatg

SEQ ID NO: 371812 - DNA, 96 bp, Homo sapiens
ggcggcggcaccagcagtaacaacagcgaggaagaagaggacgacgacgacgaggaagaggaggtttctgagagatgtggtcttgctatgttgccc

SEQ ID NO: 371813 - DNA, 89 bp, Homo sapiens
cgggcccgcgcaattctccgccagagggtatcagcagatgttgcacacaaacttggtataccttgctacaatagcagattctaatcaaa

SEQ ID NO: 371814 - DNA, 75 bp, Homo sapiens
ctcattcacttctagacgacaaaatgcaaaaaaggaggccaaagactttatgaaccagaaactcgagatgcatgg

SEQ ID NO: 371815 - DNA, 74 bp, Homo sapiens
ggcttagaagcagatctggaatgcaaacagatctggcaaaatttgggggagcagtatgcagaggggaagatgag

SEQ ID NO: 371816 - DNA, 100 bp, Homo sapiens
ggaggaccagagagtagtgaaagaggaggaagccatagcactcgcagagaaatatggcacccctgcagtggaccatgagtcggtaatgcccactgaggac

SEQ ID NO: 371817 - DNA, 50 bp, Homo sapiens
ggtctctggagacatcttcagcagaaggagctcaaaaagtgggatgagtt

SEQ ID NO: 371818 - DNA, 83 bp, Homo sapiens
ctcacaatgaggctccctgctcagctcctggggctgctaatgctctgggtctctggtcgggaaagaggttaaagaagacacgc

SEQ ID NO: 371819 - DNA, 75 bp, Homo sapiens
tgatcgacttcctcacccgcgcctgcgacctcggtgtccccaggtgtcattgccaacccctttgcggcaggcatc

SEQ ID NO: 371820 - DNA, 75 bp, Homo sapiens
gcagtccccccaaaaaatgtgcccgttcagttaagaatagacccaccagcatttcgtgggatggtcttgattcag

SEQ ID NO: 371821 - DNA, 88 bp, Homo sapiens
cgcaagcacaccctaccgaattacaagatcagttcacctgtggcagatgatatcatccagcccgctgcccccgcagacctggaaagcc

SEQ ID NO: 371822 - DNA, 74 bp, Homo sapiens
tgctcccatcattgatgtggtgcgatcgaggccagtgctgctgaggaagcagatgtgcacgtagctgtggtggt

SEQ ID NO: 371823 - DNA, 82 bp, Homo sapiens
gaatcatccacgcacctgcagctctgctgagagagtgcaagccgtggggatcagaattcaggctataaatgaaattggagct

SEQ ID NO: 371824 - DNA, 75 bp, Homo sapiens
gaaaaagaggctcttcctcctcctcccgcgacggttgtttgcattcgctccacttggaatgctctctctccaaag

SEQ ID NO: 371825 - DNA, 83 bp, Homo sapiens
gtacgaacgccggatactcatcatttgcagcaaactcagcactgacgactgggtttggattcagaagaggattattatacacc

SEQ ID NO: 371826 - DNA, 100 bp, Homo sapiens
catcaggacagctgttccttggccatcccaaagctattctgggggcaacagaggtggccaagactaagcagcagattgaggagcagcgggtgcaggtgca

SEQ ID NO: 371827 - DNA, 101 bp, Homo sapiens
gatttgctggatacgtgacatcaattgctgcaactgaacttgaagatgtatgcccaagaggacagagaacgaatgcacagaaatattgtcagccttgcaca

SEQ ID NO: 371828 - DNA, 88 bp, Homo sapiens
gtcttcaattaaaaaatttattaaaggaagcacacctaaggatctcatctggccaccgcgttctggaagaggcgagagggagagcgtg

SEQ ID NO: 371829 - DNA, 90 bp, Homo sapiens
ttcctccgggccgggcgggacagcgcagggccatggccgaggcggtcgcggctccgcattcgccagtacgagcttgtggtccacaccgac

SEQ ID NO: 371830 - DNA, 75 bp, Homo sapiens
catgcctgtaaagaacttgcagttgaaggagtataacacagagcatgtaacttctaatgccagcgatagtgaaag

SEQ ID NO: 371831 - DNA, 100 bp, Homo sapiens
caaactcgaagaacagctgtggaaagaagttgcaaaacactggatgcacgaaggagagagagtgagaagtctctagaaaatgaaacactcaataaggagg

SEQ ID NO: 371832 - DNA, 88 bp, Homo sapiens
cttgtatgaatgtcattcacaaggagaaatccggttgttgcaatcttacgtggatgctgataacctcatcttcagatacttacaaaat

SEQ ID NO: 371833 - DNA, 51 bp, Homo sapiens
cagtgctcaccacccaccaccactggtgacacccaattgccgggtggctct

SEQ ID NO: 371834 - DNA, 97 bp, Homo sapiens
tccgcccaggcgcagatgcgggccctgctggaccagctcatgggcacggctcgggacgagcaaagccgtcgagatgacctggagagcctgggctacg

SEQ ID NO: 371835 - DNA, 75 bp, Homo sapiens
agaaagcaggcgaacccgcggcgcaataacggtggtgatgatgtccagcaactctgtgaagcaggagaagaggag

SEQ ID NO: 371836 - DNA, 90 bp, Homo sapiens
ggagtccctcaggctggttcaatgcaggctggagatattttatccagaaacaacagatgtctatgatcggaaaaacataccaagaatgat

SEQ ID NO: 371837 - DNA, 117 bp, Homo sapiens
gtatcatgctggccaagaagatcatcattaaggacggaggcacgatataattggtgattacaactttcctctataaattaactcttgacactccttgggatttgaagaaaaaaatgc

SEQ ID NO: 371838 - DNA, 80 bp, Homo sapiens
cagacttgaaaaagccagttctaatcaggatagtggccaaagcctccaagaacctcatgtccacgcaaagcttggggatt

SEQ ID NO: 371839 - DNA, 78 bp, Homo sapiens
aagcacgaagtattggtgctcagaaggctaaacttggacaggatgaaactgtaacaattgaaacagtctttccatttg

SEQ ID NO: 371840 - DNA, 74 bp, Homo sapiens
gacggcgaggccctcatgtaccacacggattatattccatcacaacaagatattctgcttgccagaagacccac

SEQ ID NO: 371841 - DNA, 76 bp, Homo sapiens
attttgaaaaacagtattccaaagaactcggagatgcctggaatacagtaagagatcccagaagacccacttgtgg

SEQ ID NO: 371842 - DNA, 98 bp, Homo sapiens
attattggattttgttacgattatcttcatattttgaaacaggaaccatctctttttgctgttgccaaattgttagaaactggtttagttaatatgca

SEQ ID NO: 371843 - DNA, 100 bp, Homo sapiens
tgcggtcatctgtatgcataatatggaatgttcttaacccagaagtagctgaatgtgttactccattgctgaggagtgggaaatctgcttcgccactgaa

SEQ ID NO: 371844 - DNA, 50 bp, Homo sapiens
tcgaccacttcgaagaagtcagcaagcatcggtgtgtggctatttttaaa

SEQ ID NO: 371845 - DNA, 75 bp, Homo sapiens
cccagagtccgcggccggggcgcgggagattttgcctgcctgagctcctctagtagtggccacaattgccagaga

SEQ ID NO: 371846 - DNA, 74 bp, Homo sapiens
gtggaggggccttcctcgtcatccccctgcaccaggtcatggaaaatggaagatttgcaaaatacaaatatttt

SEQ ID NO: 371847 - DNA, 82 bp, Homo sapiens
tctggttcagctcatacaacagcttcttaggactctgagaaatacgttgagcagttacttacactatttaatagatttagta

SEQ ID NO: 371848 - DNA, 99 bp, Homo sapiens
cagcaactgaggcagcggcaggctcaggtgcagccgctgatacgtaggtaacctttccagagatgtgacagaagtccttatacttcagttgttcagtca

SEQ ID NO: 371849 - DNA, 82 bp, Homo sapiens
tcctcaaggactacagtatgcacttaatgtccctgtaaagcagctgagcagccattttcagatttaccccttctcattgagg

SEQ ID NO: 371850 - DNA, 103 bp, Homo sapiens
cggccggggcgctagcgttcgccttcagccaccatggggaatgggatgaacaagagtcttctgaagaggagtctgatgatgaaatagcagataaggattctga

SEQ ID NO: 371851 - DNA, 90 bp, Homo sapiens
ccaccatcgagcagctgtgcagagagaagatgactgaggaggaggtggagaccgttctggcaggacacgaggacagcaacggctgcatca

SEQ ID NO: 371852 - DNA, 139 bp, Homo sapiens
agactggtattacgctcaacttcagaatctcactaaaagaatagatagtcttcctttaactgaaaatgggggacacagcgattgccacgcgccattggaatgtccctggccaaggagctcatattctctgcgcgagtcc

SEQ ID NO: 371853 - DNA, 95 bp, Homo sapiens
ggtgcgtcagatccgagctcgccatccagtttcctctccactagtccccccagttggagatctatgagaccccgctttctacaccaaccgcaaga

SEQ ID NO: 371854 - DNA, 75 bp, Homo sapiens
gcccggagctggggcgacgaggcgattgcgggggcctgggctagtaagactttgaccccgacgcaggcttcagtg

SEQ ID NO: 371855 - DNA, 82 bp, Homo sapiens
ctcttgataaaaagagatgtggggggattctcgacctgctaacagaactggaccttttcgtccccacagagaccacctatca

SEQ ID NO: 371856 - DNA, 50 bp, Homo sapiens
cgccggagctgaccccggaggaggagcagagccaaggattgtcaccagtg

SEQ ID NO: 371857 - DNA, 75 bp, Homo sapiens
ttgagtctagcaagtgttattatttctgccctttgtacccttacaaggctggatgacaccaaaatcctcccaggc

SEQ ID NO: 371858 - DNA, 100 bp, Homo sapiens
gatggagctgcgccgaggccagatcctctggttccggggcctgaaccgtatccagactcagatcactttgggaagcagtgacatccaacctgtatcaagt

SEQ ID NO: 371859 - DNA, 95 bp, Homo sapiens
gaaccctgctcttggcatcgactgtttgcacaaggggacaaatgattagtgacaagagctggggttaggatccggttggactctgacatcggatg

SEQ ID NO: 371860 - DNA, 75 bp, Homo sapiens
atcggaagcatacctggatggaggatgctgacagtcctgggtctggctttcatctacgaccagactgaggacatc

SEQ ID NO: 371861 - DNA, 90 bp, Homo sapiens
tgtggaagagagcggcggccgctcacaacatgcacagcctggcgacggctgcggtacgcatagctgctaaattcatcactcatgcacccc

SEQ ID NO: 371862 - DNA, 97 bp, Homo sapiens
caaagctctgttactgttgagaatgcgtctaaaccttgggctcgggatgagtttgaaggcctcttcaagcagccagcagaaaatgtcaaccagtacc

SEQ ID NO: 371863 - DNA, 100 bp, Homo sapiens
aggcttcgcgggaagacgcggcggcggcggcggaggatgagcctgcagagcgcgcagtacctccgggatagctgggagtatggccaccctgctccacgat

SEQ ID NO: 371864 - DNA, 141 bp, Homo sapiens
taagcgatgaaatccaaaggtgaatcttttggttggtgattttgatgatagccacaaagcaagcaggcctcccgcgacgatgcccctcaacgttagcttcaccaacaggaactatgacctcgactacgactcggtgcagcc

SEQ ID NO: 371865 - DNA, 75 bp, Homo sapiens
tggaattctgtttcagacacagcaaaggccccatggacgccagcgtggaggaggagggtgtgcggcgtgcactgg

SEQ ID NO: 371866 - DNA, 83 bp, Homo sapiens
tctaggctcaacagaatattccacctgccttgacatgtgttcccagtgggaaaagctacagaaagatgacacagatccggggc

SEQ ID NO: 371867 - DNA, 82 bp, Homo sapiens
ccgattcctcctccttggtcgccgcgtccttggctggcgtatcaggatcctcatgaccagccaaagagaagaagaattagga

SEQ ID NO: 371868 - DNA, 76 bp, Homo sapiens
ctgaagagggaagacacgcggaaacagtctacccatggtgttggaatgaatggaaataatgcagcagcagggaaaa

SEQ ID NO: 371869 - DNA, 100 bp, Homo sapiens
acacataccaaattggatctatccaggctcaacgagaacctttgacaagagcacgaagtgaagaaatggggaggatcgtaccaggactgccttcaggctg

SEQ ID NO: 371870 - DNA, 98 bp, Homo sapiens
gtggtgtctggaggcctgtgtccaggctctcaccacacacttgttcatgggcgcagcaaagaagagggatccacagagctggagccatgagggctgac

SEQ ID NO: 371871 - DNA, 75 bp, Homo sapiens
gaagagattcagccagcacactcctcgcgagcaagcatcccagccatcactcttccacctgctccttagagaagg

SEQ ID NO: 371872 - DNA, 90 bp, Homo sapiens
cctcctgattagctgggattacagctgctccaggtcaaatacggtgggtggcagaatgtgagcatggccaactacttcagagactacgcc

SEQ ID NO: 371873 - DNA, 75 bp, Homo sapiens
cagctttgatgactacccacctagaagaggtgatgatagctttggagacagtgccgtgagcgatgtggagatgca

SEQ ID NO: 371874 - DNA, 100 bp, Homo sapiens
ggcggcggagtgtaggaagaggcactgctgagggggcgcgaggggaacggaggccagagctgcggccatcgaggagggcacgctggaggagatcgaagag

SEQ ID NO: 371875 - DNA, 98 bp, Homo sapiens
ctctgtcgcgccgtgacctgtacaggtcgcgggagtcgtagggaggacgccgggacacctggaagccgagaaatgttgtcgccgtgatcctgaaggcg

SEQ ID NO: 371876 - DNA, 83 bp, Homo sapiens
ggctatggtgggcaaactaagccgattttccggaaaaaggtctacaaggaagtcttcacgaggagcagtgagaactcagcgtc

SEQ ID NO: 371877 - DNA, 74 bp, Homo sapiens
ggagcctggcgggcgtgggaacccaggccccgccgaggcggccagcggctgccggaaacaacatggaggacatc

SEQ ID NO: 371878 - DNA, 82 bp, Homo sapiens
cctccactactgcaaagacaaggctaaggacttcatgcccgccagcaaagatgggtgttcctgataaagaagggttaccaag

SEQ ID NO: 371879 - DNA, 100 bp, Homo sapiens
tggccttcaaccccgagccgctggtgctacagaccgtggctgagcatggagctgtccccccgcagtcctccggagatgctggaggagtcggattgcccgt

SEQ ID NO: 371880 - DNA, 90 bp, Homo sapiens
agtacctgcacttccactcctgtcaaggtgtctcactttgtcgcccaggctggagtacagtggtgcgatcttgactgactgcaacctgca

SEQ ID NO: 371881 - DNA, 100 bp, Homo sapiens
gagctgaagactgattacaagaatcctatagaccagtgtaataccctgaatcccggaagaactgctaaagctttgaggtcattacaatttacgaatccag

SEQ ID NO: 371882 - DNA, 90 bp, Homo sapiens
gttggggactcggaaggccgtatttgggtctatgacgttggagaggtgggccatgcacagacacagctcatgtctcattaatcacaccaa

SEQ ID NO: 371883 - DNA, 98 bp, Homo sapiens
ttcagggaagatgggaggcgaggagaagccgagcagcccgacggccatggaggctgaagagacgatggaatgccttcaggagttccctgaacatcata

SEQ ID NO: 371884 - DNA, 75 bp, Homo sapiens
gctgggagctccgccctggggcttctgctctgctcagcaacatctgaatgaattgatgacgaagaagtggctatt

SEQ ID NO: 371885 - DNA, 100 bp, Homo sapiens
gagtgggaaaaaagcagaggccagggcgccgatctcactgatgaaaaggcctccaggtttttcacctttccgatcatcacgaataggggaaataaaagaa

SEQ ID NO: 371886 - DNA, 75 bp, Homo sapiens
ccgcaccacctcctgctgccttcccgtcgccgctcccgaagcttttccaggaatactctgaagatagtaactccg

SEQ ID NO: 371887 - DNA, 87 bp, Homo sapiens
acaaggccgagtggcgctcgtcctacgaggggtgccagccgggccgccgatgacgccgagcgggagcgcagggaccgagaggagcgg

SEQ ID NO: 371888 - DNA, 102 bp, Homo sapiens
gaggccgggggcgggggggatccgatgcgcgccgctgccgctgcgtgggggtgaggggatcagcttcaaggttactgactttttatgatgtttggtggctat

SEQ ID NO: 371889 - DNA, 75 bp, Homo sapiens
gatttaaggcaaatcttgtttttaaggagattgagaagaaacttgaagaggtgggatgcagatcttcgtgaagac

SEQ ID NO: 371890 - DNA, 82 bp, Homo sapiens
agacatggaccagggctacggagttgatattcactgatggactccaaagaatcattaactcctggtagagaagaaaacccca

SEQ ID NO: 371891 - DNA, 98 bp, Homo sapiens
tgggcccaactgtgaccgatttaaactgcacataccatatgctggagagacattaaagtttttgattacgaagatgcaggctaccagactgcagaact

SEQ ID NO: 371892 - DNA, 74 bp, Homo sapiens
aataatgctacaaagacatttcgagaattttgtggacctgctgatcctgaaggaggagaatcagaaggtcgcca

SEQ ID NO: 371893 - DNA, 100 bp, Homo sapiens
ggggacatggcctccttcttggctgtcgtcggggcgcccgggggagtcaactcctgtgtctttgaggggattctggagggccattggcttgtgaagttga

SEQ ID NO: 371894 - DNA, 89 bp, Homo sapiens
ggctgctggatggaggggattttgtcagcttgtcgtcaaggaggaggcgtctccctattccttacttgatatctgcttgaatttcttga

SEQ ID NO: 371895 - DNA, 83 bp, Homo sapiens
ggactctgaggaaaagctcgcaccagatcttcgtgaagactctgactggtaagaccatcaccctcgaggttgagcccagtgac

SEQ ID NO: 371896 - DNA, 74 bp, Homo sapiens
gattcgcagtggtcgcttcttctccttgctagatcatttgctaaagcagccattgagaaacagaaatcagcatt

SEQ ID NO: 371897 - DNA, 100 bp, Homo sapiens
ggtggatcagaactgtgttcgcaattcttacgatgtcttctctttgctacgtactatactggcaattgctggagaagattttgcaattgttgcttctgat

SEQ ID NO: 371898 - DNA, 101 bp, Homo sapiens
tcaagcttggaatgatcatcaaacagctatggtgatgattagagacatactaatgtacatggatgtacgaagtaggtccaaagttgttgaccgtatttaca

SEQ ID NO: 371899 - DNA, 100 bp, Homo sapiens
acgaaggcaccgacgtcatcatgctgaccaccaatcagatccgtaagggctgtgtggtctttgaggatgtgtttgtatacttctctcgggaagaatggga

SEQ ID NO: 371900 - DNA, 98 bp, Homo sapiens
tcctccttcgccgccgcgcacaaccgcacgtgcagactcattctgatgaaggaaagagcgtccctgtgcagctgcgtgtccttcagttctttggctct

SEQ ID NO: 371901 - DNA, 75 bp, Homo sapiens
ctgaccttgtgggtttcctgtgctaatggacaagaaaggccctgtggacatcctggagatactccttttggtact

SEQ ID NO: 371902 - DNA, 98 bp, Homo sapiens
cccggcctgagaaagaaggaggagtgggggaggcgaacagtctcgttgctgcctctgtgtacgctgaggggggagcaaacttccttgataacatgctt

SEQ ID NO: 371903 - DNA, 50 bp, Homo sapiens
ggctgcagatacgagtggacaaaaatgttcccactgccaggaggcaggcg

SEQ ID NO: 371904 - DNA, 100 bp, Homo sapiens
tttcgggccagcgacccgctgctcagcgtcctcatgtggggggtaaaccactcgatgtattgctgtccttgaatattagcccatttgaaaacgcctggga

SEQ ID NO: 371905 - DNA, 83 bp, Homo sapiens
gctaaagcagcgtgcgttcagccctggggtaagccaagatgggtgcatacaagtacatccaggagctatggagaaagaagcag

SEQ ID NO: 371906 - DNA, 97 bp, Homo sapiens
atcgtggtggtcggatttcaccacaagaagggctgccagtggaagagaaagccaatacccacctcctcttgggcatgtgcttagacgcctgtgctcg

SEQ ID NO: 371907 - DNA, 101 bp, Homo sapiens
gagaatcttcttcgaataactgaaacctggaaagcttacaacagtgactttgaggaatcaggtggtatggtcaggaaaaagactacaatgtactagtcatg

SEQ ID NO: 371908 - DNA, 83 bp, Homo sapiens
aggaagcgagactcatacgcaacctcaatgatgatgtctttctacctaaagatattgacctagacagtgtggatatggatgag

SEQ ID NO: 371909 - DNA, 100 bp, Homo sapiens
tgagaccatctaccagtctgcaagcgtcttcaaaggagccccacatgaggtgtttcccattaaacactaccaggacaaaatcaggccttacatccagctg

SEQ ID NO: 371910 - DNA, 80 bp, Homo sapiens
gaggtcgtggtggaccacgtggtggcaaatcctccatcagttctgtggcccaggcacccctgaaaccaaaaacacctcgg

SEQ ID NO: 371911 - DNA, 100 bp, Homo sapiens
ccctgccccccgggacccggagaagatgtcttcgcggacggtgctggccccgggcaacgatcggaactcggacacgccacaagtatatggttatgatgac

SEQ ID NO: 371912 - DNA, 83 bp, Homo sapiens
cggagctgtgcgagagcctcctcacttgggagccttcacgtaaatgggtccagtcatgcctcccagtaagaagccagaaagct

SEQ ID NO: 371913 - DNA, 101 bp, Homo sapiens
tgaaccaccaactcagcttagaaggaagccaagacttaaagtttcctagatcccagcttaattaaacaaccaccatgtcgagcaaaaaggcaaagaccaag

SEQ ID NO: 371914 - DNA, 100 bp, Homo sapiens
attgatcccaagttgtcgacgaccgacagggtggtgaaagattttaggtgatgggcaagtcagaaagtcagatggatataactgatatcaacactccaaa

SEQ ID NO: 371915 - DNA, 100 bp, Homo sapiens
tggaagatggcgcctgttgtgacaggatctgttacctaaagcaataaaaaatggccagaggatcagtgtccgatgaggaaatgatggagctcagagaagc

SEQ ID NO: 371916 - DNA, 88 bp, Homo sapiens
tgcccaaacttcgtcggcagatctacaaggagctgtgtcactgcaaactcactgtatggggacccagagcctgctcttgggaacagcc

SEQ ID NO: 371917 - DNA, 101 bp, Homo sapiens
ggtgggcaaactaagccgattttccggaaaaaggagccagcaccgctctttgaccttgccatgcttgccttagatagtccagagagtggctggacagagga

SEQ ID NO: 371918 - DNA, 90 bp, Homo sapiens
cagaggtggaggcgctttgaaagttactgtaaaatggggaaaggagaaatttgaaggtgtagaattgaatacagatgaacctccaatggt

SEQ ID NO: 371919 - DNA, 100 bp, Homo sapiens
ggcgctcctggccggctgggtcgccgtagcggaacggaagccgccccttttcaacatgaatgcaatgagtgccttatatcacattgcccagaatgactcc

SEQ ID NO: 371920 - DNA, 95 bp, Homo sapiens
tctttgacagagagcaagtctgctcatgtgcagactcagactggccaaaattcaatccctgctttagctcagagacaggttctcactatgttgcc

SEQ ID NO: 371921 - DNA, 90 bp, Homo sapiens
aacacacagtccaatgaaaacaaacaaccaagaccacaatgggaatatccctaaacccgcttccaaagatgctatattctgtgaaaacac

SEQ ID NO: 371922 - DNA, 76 bp, Homo sapiens
gttgccaaatttgaagcagaacgatcaaaagccaagtggcaaacgtgagaaagatcagtctaaagaaaaggagaag

SEQ ID NO: 371923 - DNA, 75 bp, Homo sapiens
gagaaatcgatgatggggaaatagacgaagagagaagggcacagttacctaagtatcaacgtaatcttcctcggc

SEQ ID NO: 371924 - DNA, 75 bp, Homo sapiens
atactactctgaggggcttagaaattaacaggttatgcaatgccaaccaaaaccatagaagtgttgcagttgcag

SEQ ID NO: 371925 - DNA, 100 bp, Homo sapiens
tgtatgggcccaagaagaggggacccaaacccaaaactttcctcctgaaggaaagaccacagcaagattctttcattcgtctcctcctagcctgggggac

SEQ ID NO: 371926 - DNA, 100 bp, Homo sapiens
tgcagtctcttttaccagcagcagtcatcaagtgcctactatgactttaactaccatgatggaagcatgtgccaaggagaactgttcacccacaattcca

SEQ ID NO: 371927 - DNA, 82 bp, Homo sapiens
gagacagaagcagatggattcgtccttttagagttcctgagttggaggtagaagaagaaacccaagttcaagagatgacttt

SEQ ID NO: 371928 - DNA, 123 bp, Homo sapiens
ctctcctgctgcctgaactggggcaacagcctgcagatcctggaccaggttgagctgcgcgcaggctgtgggaacatccagttgcaggaaaacaagcttaacacgcccactgattctacatta

SEQ ID NO: 371929 - DNA, 118 bp, Homo sapiens
ctcagatgctgccagggtccctgaagagggaagacacgcggaaacagggactatgcagccatcgtcttctttgctaacaaccgctttgagacagggaagaaaaaactgcagtatctga

SEQ ID NO: 371930 - DNA, 78 bp, Homo sapiens
cctagtgccagcaatggacgcatcaaacagctgcgatcagatgaaccaactagccctagcattgatcatgatattgca

SEQ ID NO: 371931 - DNA, 100 bp, Homo sapiens
agggacactcggtgtgcgacgtggagatccgaaggaatgaaatccggacttcccaagtaagaagcggaagaggagccgctggaaccaagacacaatggaa

SEQ ID NO: 371932 - DNA, 50 bp, Homo sapiens
aaatcgagcagaaagaatgtctttcagtgtcgtgtgggagccaatgggag

SEQ ID NO: 371933 - DNA, 90 bp, Homo sapiens
catgctaagaacaacagtcaggccaagccttctgcctgtgatggcagctcactttgctggtggccagtgaggactcaagctacatgccag

SEQ ID NO: 371934 - DNA, 100 bp, Homo sapiens
agaaccaaatcacaataagtctttagctgcaggtgtgtggggtcccgtttccctctgtgcggcggccggcgggaccataagggcttaactcatatattta

SEQ ID NO: 371935 - DNA, 82 bp, Homo sapiens
caccctccaactttgcgacggaaatgtgtcatcgaaagccaggcattgagatgttccacaagagcctggagagggccgaggc

SEQ ID NO: 371936 - DNA, 74 bp, Homo sapiens
gccacagcatcctccagcacctcaggccaaagaggtgctgaaaaaatatttggagtccaaggaggatgtggctg

SEQ ID NO: 371937 - DNA, 75 bp, Homo sapiens
gttgcagtatgtggccagttatttgcctcagtaaaagagttttgctgttactgctcagtgtagtcacaccttgaa

SEQ ID NO: 371938 - DNA, 100 bp, Homo sapiens
cgggaccggctgccagacctgacggcggattccatatggctctcatatcattccattccatctctgccaagatttggataccgcaaaaatttgtgtttgt

SEQ ID NO: 371939 - DNA, 96 bp, Homo sapiens
cactgccgggaggcggcggtgacaacgacggcggtggtgacgggcaccgggctcgcgggtgaccctggcagcaaccccaacaaacgccagaggcag

SEQ ID NO: 371940 - DNA, 75 bp, Homo sapiens
tgaatcaacatgggcaatgagaacagcacctcggacaaccaggagactccatcctctgccaatggcccttcccgg

SEQ ID NO: 371941 - DNA, 75 bp, Homo sapiens
cgggcgagcggctgtgtggatgtcggcgaagccgcgggcgaggttattctggtacaagttaacccaggagaagca

SEQ ID NO: 371942 - DNA, 95 bp, Homo sapiens
ggagtgaggtggaggggccgcaagctgctgaccggcgtgtggaacactggtggtttgcagatcactgaggagacccgtgtacagtatcatctcag

SEQ ID NO: 371943 - DNA, 100 bp, Homo sapiens
cggcggcagtcgggccagacccaggactctgcgactttactctgcgctcctcagaccaccggcaggtgaacagcctgatgcagaccgaggagtgcccacc

SEQ ID NO: 371944 - DNA, 73 bp, Homo sapiens
gaccgggagatgatcctggcggattttcagccccatctgctttgatatgattgaagaagcatacatgacaaaa

SEQ ID NO: 371945 - DNA, 100 bp, Homo sapiens
tgttggggcaggatacctggcccttcttcaagtattggatcacaaggacgagtcataagttttgaggtacgaaaagaccaccatgatctggctaagaaga

SEQ ID NO: 371946 - DNA, 100 bp, Homo sapiens
ccagcgtctgcattgctccggactcagccaagttccccaacggctccccgtcgtcctggtgctgcagcgtctcgcccaagaacttcaaggtgaaaatgat

SEQ ID NO: 371947 - DNA, 76 bp, Homo sapiens
gctgcctttgctttaaaacagtattacttgcgggtgataaaagaaaatgtggctgaagttacccgaagttcagctt

SEQ ID NO: 371948 - DNA, 75 bp, Homo sapiens
aacatggacgccgtcaacgccttcaaccaggaggccaacgtggaacctgttgtgccgtcagaggcttcagagccg

SEQ ID NO: 371949 - DNA, 75 bp, Homo sapiens
aagcctgcccagacggctcacctgtgcgggatggaacaaaagtggaggtgaagccggtgctgccaagagccatgc

SEQ ID NO: 371950 - DNA, 75 bp, Homo sapiens
ttgtattggtttgatgctcctacctggaacagcaagatcaactttatacctgggctgcagttagtcaacccacac

SEQ ID NO: 371951 - DNA, 90 bp, Homo sapiens
catcaatttccttgcaattaaccaaaaagacatggtctgctatacagctcagactctcgtccgaatcctctcacatggtggctttaggaa

SEQ ID NO: 371952 - DNA, 83 bp, Homo sapiens
ctgaaggaggaggacaaagagcccctcatcgagctcttcgtcaagttgtggaagctgatcgaggaagcctaagcaggctctgt

SEQ ID NO: 371953 - DNA, 101 bp, Homo sapiens
gcagccttctacttgtcccatgaggccttctggcggccgcccctggtttctcctggggggtgatgagcgggagcggctctgggccgagctactgcgcacgg

SEQ ID NO: 371954 - DNA, 75 bp, Homo sapiens
taccggaatgtcatccagcgagtgattaggatcttttgccagaaatgagggcatactggcctgacgtaattcact

SEQ ID NO: 371955 - DNA, 76 bp, Homo sapiens
ggagaggagtggcctcgcccgcttggttcagacagtaactttaattccaggagatggtattggcccagaaatttca

SEQ ID NO: 371956 - DNA, 100 bp, Homo sapiens
ccgctcgggaagcagctcttgccaaaaacctttggacagtccaatgtcaacattgcccagcaagtgggcaaagtgcacctggagctgcggctgagcgagg

SEQ ID NO: 371957 - DNA, 90 bp, Homo sapiens
agcgcccatctgaaaatcttggtcaggtactattcggggaaagaattgaaccttcaccatataagcacgtcagctaactgttcagatgat

SEQ ID NO: 371958 - DNA, 50 bp, Homo sapiens
cctcccgcgtgctggccatgaaggtcaaaatgcagatcttcgtgaaaacc

SEQ ID NO: 371959 - DNA, 50 bp, Homo sapiens
gagcaggcttgcaatattaaagaagtaccaccaagaacagggaaggacaa

SEQ ID NO: 371960 - DNA, 115 bp, Homo sapiens
cttcttgctcatttctgagtattgtctttatatcctgacactatgaatgctacttggatgcctcttaagacccgtccaagaagcagggaccatggctggaggaagaagaagaagc

SEQ ID NO: 371961 - DNA, 101 bp, Homo sapiens
aacaactacacgttacgctattcgttgtggtccaaaacagtttacctcttatctaacaggtgtttcagtcacctccagtaacacgggcgtgccagatatct

SEQ ID NO: 371962 - DNA, 100 bp, Homo sapiens
gaaaatatctacatgcgaagtgagcctgttgctcaggtgtttgtccacggagaaagcctgcagcttctacctaagcactgtgccactacaatcagcaaag

SEQ ID NO: 371963 - DNA, 82 bp, Homo sapiens
cccaatcaaaaaagaaactagcaaactttttaatgaggaagctgcgggaacaccatcgggccaccattaaggtcattcgacg

SEQ ID NO: 371964 - DNA, 83 bp, Homo sapiens
cgcgggcccagcccacagcagggtggagccatcgaagcccccacccacaggctgacagaggcaccgttcaccagagggctcaa

SEQ ID NO: 371965 - DNA, 73 bp, Homo sapiens
aagtacccgtccatcatagtcaactgcgtggaagagaaggtgaagttttacaggcggtcaccgaccatgatat

SEQ ID NO: 371966 - DNA, 75 bp, Homo sapiens
tttcccgactgctccatcgaggcagccatggtgaaggagggcatcctggctgtttcacccgtggacttgaacttg

SEQ ID NO: 371967 - DNA, 75 bp, Homo sapiens
gatgcccctcctccaccagaggactgggaggagcatgtcaacagacaaatgctgtgcttcatgaagttaaaagag

SEQ ID NO: 371968 - DNA, 98 bp, Homo sapiens
gagaagtggatttgggagacatttaggagggccccgtggttatgaatgtgcttcagtttcataatgcctcctgctatggcagacatccttgacatctg

SEQ ID NO: 371969 - DNA, 83 bp, Homo sapiens
cttctgccacttctgcgactcggacggggcccaggactactacaggcgtgacacgggcagttgacctgtgtgcagccccaggc

SEQ ID NO: 371970 - DNA, 78 bp, Homo sapiens
caggtatcctcggaaacggtttgtggctggagtaggagcaaacagcaagttcctcatgagagtgctggactcctacgg

SEQ ID NO: 371971 - DNA, 100 bp, Homo sapiens
tactgctggaccatctgctttcaacataacgtctctgatttctcaagctgctcagctctctacacaaggtgttaaaaagtaatcgaagtacgaagaggac

SEQ ID NO: 371972 - DNA, 83 bp, Homo sapiens
cgcaaccacgagacggccttccaagccccaggccagccagcctgcgacccccggccccgagagtacctgatcaagctccctga

SEQ ID NO: 371973 - DNA, 100 bp, Homo sapiens
ggcttcctagtgagtcggcggctgatttagaaggaggttcaggctacggtgagccgaagctacgagagtacaaggtagtgggtcgctgcctgcccacccc

SEQ ID NO: 371974 - DNA, 111 bp, Homo sapiens
tcagaaggaaaatgggtcaagcttgaaaaaacaacgtacatggatcctactggtaaaactagttggcttcctgaggctcaggtagtccaaagagccctgaattctgcggct

SEQ ID NO: 371975 - DNA, 83 bp, Homo sapiens
ttttggggggaaactaggtcgatggtcggcggcgcccggatgggcagctgagaaatgctttgtggtctacagccacaccaccc

SEQ ID NO: 371976 - DNA, 98 bp, Homo sapiens
gtttccgggcaagagaccgactggcggagcaccgccttccggcagaagctggtcagtcaaatgctcccaggccagtgccagtacttgggcttgccagt

SEQ ID NO: 371977 - DNA, 75 bp, Homo sapiens
ggagggggcgttagccccgcgcagccgccggcgtcgccgccatggacctagaaacgggctgtaaaggcagaaaac

SEQ ID NO: 371978 - DNA, 75 bp, Homo sapiens
tctgactgccttggatacaactgggaaagccgtctacactctcacctatgatcgtctggtagaatcaacttcctt

SEQ ID NO: 371979 - DNA, 98 bp, Homo sapiens
aaggagtcacggatcggattcctcagctacgaggaggcgctgaggagagttgcagtaccatgcaggactagcatctggccttttaaatcagcagtcat

SEQ ID NO: 371980 - DNA, 88 bp, Homo sapiens
aaacccggagaccaaatccttggtatcctccatgaaatgtgggatccttccaatttctcaagagtctcttcttctgggagatgttgcc

SEQ ID NO: 371981 - DNA, 96 bp, Homo sapiens
acaaactgcacagcttggtactgagctcttcattgtcaggcattcttcaggtcatctgaaccttctgagaaaacatggtcaacgtcttgaaaggag

SEQ ID NO: 371982 - DNA, 100 bp, Homo sapiens
acgtgaggctcggatatgtcgacttctgaaacatccaaacatcggtggcagtagagaagagcatcacagaagttgctcaggagctgacagagctggtgga

SEQ ID NO: 371983 - DNA, 90 bp, Homo sapiens
gctcaactaagaccaagtcctcgctggactgctcagggtgccagacctcatctcttgccacttgcctagtgaggcttttccgaacctgga

SEQ ID NO: 371984 - DNA, 75 bp, Homo sapiens
aacacagtattgaaatgcatttgccttatacagctaaagccatggaaagtactatactggcaattgctggagaag

SEQ ID NO: 371985 - DNA, 100 bp, Homo sapiens
gcctgcagtcggtgaccgcgcgactcggcgcccgcccgcgcccagaagaatcagtgcggtttctgtggcagagcgagttgcatttgaaagaggagaagag

SEQ ID NO: 371986 - DNA, 50 bp, Homo sapiens
gcaaagaaggtgccatcattgtgggtgctcagcagggagaccccctttcc

SEQ ID NO: 371987 - DNA, 96 bp, Homo sapiens
tatcaggcatggagatgctactgatgtcaggccatgaaccagagaatcagtcagagtgctccagtgaaacagccaccacccctggctccccagagc

SEQ ID NO: 371988 - DNA, 98 bp, Homo sapiens
cagccggagcccgggaggggccgcgccgccaccgtctgaactaggatgtcccgacatgaagtttgcagtgttgatgtgggtatttacctatgttggtg

SEQ ID NO: 371989 - DNA, 137 bp, Homo sapiens
caggcgtctgtgggcaaaacttcaatcctggagcagcttctgtatgggaaccatgtagtgggtcatacagcagatggaacaaaaaaaattacaacaaggaattcctccatcagggccagctggagaattgaagtttg

SEQ ID NO: 371990 - DNA, 100 bp, Homo sapiens
ctggcatgtccttcagcagccgctcctacctgcctgagaagctccagatcgtgaagccgctggaagggatacctggagctgcaggaaatccaggggaaag

SEQ ID NO: 371991 - DNA, 98 bp, Homo sapiens
gaccaccctgacgttgccaccatgctgaacatcctggcactggtctatcggaactgtgtgtgacttccgcctatcctatggccgtgtcctcagccaca

SEQ ID NO: 371992 - DNA, 88 bp, Homo sapiens
atgataacgaaccacaaatacctggctatattgtcgatgattcagtcagaggaactgtggctgcaccatctgtcttcatcttcccgcc

SEQ ID NO: 371993 - DNA, 82 bp, Homo sapiens
gaaaaaggcgctggaaaaagtgaatttcgtaaccagaagccgaagccggagaaccaagggtgcaactggaaactgacttgaa

SEQ ID NO: 371994 - DNA, 75 bp, Homo sapiens
atgagggggaagggcctcaaagccagaaggtgaaatgacaatggatgctctgttggctcgattgaaacttctgaa

SEQ ID NO: 371995 - DNA, 88 bp, Homo sapiens
attccatatatgactcttcaatgaaacttgtgagggaatttgagcccatgctacaagtgaagccccgatgtaaaatgtatatcccact

SEQ ID NO: 371996 - DNA, 100 bp, Homo sapiens
ctagacgccttcaagctaaaatgatgactaatttggttatggccaaggaccgcttacaacttctagatgaacacaatgacgtacagaagaaaacctttac

SEQ ID NO: 371997 - DNA, 75 bp, Homo sapiens
cgcagtcctggacacgggggtcgacccgggggctccgggcatgcagaaactaattctgaagcaagcccttatagt

SEQ ID NO: 371998 - DNA, 90 bp, Homo sapiens
cagggctgtggcagtgccccttctgtcagcaggacaatttccctgaactaagcgagaaagttactgtggcccatgtcctaaaaactggat

SEQ ID NO: 371999 - DNA, 110 bp, Homo sapiens
gaagatgatgagttactgggaaatgatgactctgacaaaactgaggaatccagaaacgttttggaccaccacaggaatgtttccccaggaattcattatttgtttccaca

SEQ ID NO: 372000 - DNA, 98 bp, Homo sapiens
gttgaaacgctgcctggaaaggaagtaccaggacttgcacagtattctaccttgtaaatactgttatttgtatatactgtaaatgatgacatcggtgg

SEQ ID NO: 372001 - DNA, 100 bp, Homo sapiens
gagctggaagaggccgctgcggagcctgctcggcttcgtcgctgccaacctgctgttctggtcagccaagatgggaagtcgctccttgacaagctccagc

SEQ ID NO: 372002 - DNA, 75 bp, Homo sapiens
gcctcctgcgattaaccagttcacccaggccctggaccgccaaacagactcctgaggaagaagagattttaaaca

SEQ ID NO: 372003 - DNA, 75 bp, Homo sapiens
ctgcattaagaatgtgtccatgcaaaatgctgtgaatgagccttgtaaggcaaacattggtgggcaccgatcttc

SEQ ID NO: 372004 - DNA, 105 bp, Homo sapiens
ggaatgttttgctacaaatggaggaggaggaggacgacgacgatggggatatcgacactggcttcatgtcctattgaccgtaaaccttttcaggcagtgtttaaa

SEQ ID NO: 372005 - DNA, 88 bp, Homo sapiens
ccggcctgccagcgctgctctccgccgcagcttcagcacctcggcccagactataatgtaactgcaaactccaagctggtcattatca

SEQ ID NO: 372006 - DNA, 96 bp, Homo sapiens
ctctcatcaacgtggaaggcaagatgcatcagcatgtagtcaaatgtggtgtctgcaatgaagccaccgttctgtttggattctgcaaagcagact

SEQ ID NO: 372007 - DNA, 80 bp, Homo sapiens
cgacgagcaggtggcggcggctgcaggtacatgtcccagagcaagcacacggaggcccgggagctcatgtactcgggagc

SEQ ID NO: 372008 - DNA, 82 bp, Homo sapiens
cccagtcctgaccccaaatttgaaaggcttcgaggcagcgctgacagcagccatggcgagcggcagtggagacagcgtcacc

SEQ ID NO: 372009 - DNA, 100 bp, Homo sapiens
cttctcaagctgcttgagtcaatgagggagtgaatttgctagtgggtacagagagtggcctgatgctgctggacagaagtggccaagggaaggtctatcc

SEQ ID NO: 372010 - DNA, 75 bp, Homo sapiens
gtggacttctacaaggcccgcatggagcttgctcacttccgacagagaaaaacaaaaggtgacagttcgcattcg

SEQ ID NO: 372011 - DNA, 98 bp, Homo sapiens
tggggcacccggtgtaccgcggcgagaagccccagctgcactacgcgcggagctggagtttgttcagatcatcatcatcgtggtggtgatgatggtga

SEQ ID NO: 372012 - DNA, 88 bp, Homo sapiens
ttcagcaggacgatgagatccgcttaaagattgtggggacccgtgtggacaagaatgacattgtttggacttctcccactgagcatga

SEQ ID NO: 372013 - DNA, 75 bp, Homo sapiens
cggctgtgccgaggcgcccaactcagctctcctccccctttctctctaaggatggcccagaaggagaactcctac

SEQ ID NO: 372014 - DNA, 100 bp, Homo sapiens
ggagctacaacttgtccacgacaccggctacttctcagctttaccatccctggaggagacctggcagcaggctgaccaactgactgaagagcagattgca

SEQ ID NO: 372015 - DNA, 90 bp, Homo sapiens
gtaactttctatccgtccgcgtcagcgccttgccaccctcatctccaatatgagagaagaagaaggaggttcctgctgtgccagaaaccc

SEQ ID NO: 372016 - DNA, 100 bp, Homo sapiens
atgtgatcactctgggactcgtggggctgcagcaccgaccaactgccagagttttctctgggtgttaacagcggttggactacagacaattgcttccggg

SEQ ID NO: 372017 - DNA, 82 bp, Homo sapiens
tcctaccattgaacagattgaccagtcttttggcgcaacccatcctggaggtacaagaagtatgtcttcctggaccccctgg

SEQ ID NO: 372018 - DNA, 100 bp, Homo sapiens
ctgactttgtcttctccgcacgactgttacagaggtcaccaaagtccatgagcccccccgggaggacgcagctcccaccaagccagctcccccagcccca

SEQ ID NO: 372019 - DNA, 100 bp, Homo sapiens
cctcccgagcagctgggactacaggtgcccgccaccacacccagatttcgggcagacaacttgaacaagctgaagaacctatgcagcaagacaatcggag

SEQ ID NO: 372020 - DNA, 100 bp, Homo sapiens
ttcccccgagggtcaacgagaaagagatcggttcatctgcagaagccagcggacgcctctgttcaacttgtgggttacctggctcatgagaccttgccgg

SEQ ID NO: 372021 - DNA, 97 bp, Homo sapiens
tccaaatgaattatgtcagcaacgtatccaagttggtagctggcagtgttgtgatggcttttgaagaagtatgcccggacagaatagatctgattca

SEQ ID NO: 372022 - DNA, 100 bp, Homo sapiens
agatccaatgagaaaacctggacagaacttcatgtgtctgtggcagtcttgtaaaaatgccggtggtggtgtgcacattgagccccggtatagacagttc

SEQ ID NO: 372023 - DNA, 51 bp, Homo sapiens
ccagaatcagttgttggagaaaattaaaggcgccttggtgctgaattgggg

SEQ ID NO: 372024 - DNA, 96 bp, Homo sapiens
atccatttacagcaaaattcagggcttcaaatataatgccatcttcaaggcatggaggagtgacggcaggaactttctgtgctctgacaaccctta

SEQ ID NO: 372025 - DNA, 75 bp, Homo sapiens
ccagcttctgctgtccttctttgtggagagcaaggatctttatgtcgctgaagctttatccactctggaatcctg

SEQ ID NO: 372026 - DNA, 105 bp, Homo sapiens
ctgcggcagacggcgacagtggcggcggcgccatggcagggcttgcagggcgtgatggtgggcatgggtcagaaggattcctatgtgggcgacgaggcccagagc

SEQ ID NO: 372027 - DNA, 100 bp, Homo sapiens
tcagctgacacttcaggtgcttgattttgtgcaggatccgtgctttgcccaaggagatggtctcattaaggattttatagctaccttgggaaaactttca

SEQ ID NO: 372028 - DNA, 100 bp, Homo sapiens
ccatgagcgagcgcctccgtcccaggaggaagaacgtgcaaaacgtgaggagctagagcgaatactggaagagaataaccgaaaaattgcagaagcacaa

SEQ ID NO: 372029 - DNA, 82 bp, Homo sapiens
cggcggggaagatggcggatgacaagcttcctgcagatttcacaaaactgcatcttactgacagtctccacccacaggtgac

SEQ ID NO: 372030 - DNA, 75 bp, Homo sapiens
aacgtgactcccatcgccgccctgctctacacacctgtgctcatcaggctttgatgaactaggtggacttctcaa

SEQ ID NO: 372031 - DNA, 51 bp, Homo sapiens
ctacaaccttcgatctcctgacgacaatggtgaactagacccctggtcagg

SEQ ID NO: 372032 - DNA, 113 bp, Homo sapiens
cggggtccgatggttctcgaaggcccgcggcgccccgtgctgcaggggctttgttatgcacctaaagccatattggaagctccagaagaaagagcaccccccggaagtcagca

SEQ ID NO: 372033 - DNA, 90 bp, Homo sapiens
gctgggacatggcggacaatgagcaggtgctgaccacagatataaagatgaagcgcagctgtataaagaagagcacctgaggaatcggca

SEQ ID NO: 372034 - DNA, 85 bp, Homo sapiens
acagctcgatctaggttctgcggcacgggatggcggaggcgcctcctgtctcagacaatgcagatcttcgtgaagactctgactg

SEQ ID NO: 372035 - DNA, 98 bp, Homo sapiens
cccccagcctccggcggcggcccgcagagaccctcggagagacggggtcttactcttgcccagggtggtgtgaagtggtgcaatcatagctcactgtg

SEQ ID NO: 372036 - DNA, 100 bp, Homo sapiens
gacatgacttgctcctccttcctttccaccattattatgaggcctcccagccctgtgtaactgtttgttggcatccaaagctgttggggttgatggtgct

SEQ ID NO: 372037 - DNA, 98 bp, Homo sapiens
aacctgtctcctggatctcttgtggatattaccattcagcttttgtaacaaaatgccggatccagacttcactgtgaatgatgtcaaaatgtgtgtgg

SEQ ID NO: 372038 - DNA, 83 bp, Homo sapiens
ggcctcaatatgtgccgccagtgtttccgtcagtacgcgaaggatatcggtttcattaagagatgcgctggcagctgagcgag

SEQ ID NO: 372039 - DNA, 90 bp, Homo sapiens
gctgaagatcatcgcctttggggtgctgatgagatcgcctctgtcccagtctccttacagacactgaaacctgttaccgacagagcaaac

SEQ ID NO: 372040 - DNA, 115 bp, Homo sapiens
gtcggagcccagagtcagcgcgcgtggaaagtgctagcccgagcgaggatcatgaggcacgacaatgcagatcttcgtgaagactctgactggtaagaccatcaccctcgaggtt

SEQ ID NO: 372041 - DNA, 100 bp, Homo sapiens
gttgctgccgccatacgcgctctccctgtttaggactttccttatcccagttgattgtgcagaatacactgcctgtcgcttgtcttctattcaccatggc

SEQ ID NO: 372042 - DNA, 100 bp, Homo sapiens
ggacgcacgggcgggcggccgggagccatggagcgcggccctggggcccgggggcgcgggccggggtgcagcgtccgtctccaagagagtatgaagagag

SEQ ID NO: 372043 - DNA, 75 bp, Homo sapiens
gggaaggtaccaaggattggagcacagaggctcagaagcaagtccagcattatctgcatatcagagatattacag

SEQ ID NO: 372044 - DNA, 82 bp, Homo sapiens
tgggggaccgcttgcagcggggacgcgaggacccgggctgggctttcctcacccggggactttgaacatgtcggggatcgcc

SEQ ID NO: 372045 - DNA, 89 bp, Homo sapiens
cctggccgcggcgaccggtggtcccacgtccagccgggctcagtgagacagaggaccccagtaagtgcagtcctcggttttgggaggag

SEQ ID NO: 372046 - DNA, 97 bp, Homo sapiens
aaagtcacccggcggccaaaggccagtgactaccaacgtttggaccagaagaacgctgccaagaagagagaccaggagcaagtggagctggaaggcg

SEQ ID NO: 372047 - DNA, 75 bp, Homo sapiens
gctggagatgctgctcagtgtaatatcttccccccagcttcatctgtcctctgacacaagcagcaggagacccag

SEQ ID NO: 372048 - DNA, 98 bp, Homo sapiens
aagaggaagcggaaaccagtggccacagcatctttgtctagccccagtgcagaggtcctcaaagagggcagcgggctgttcccagatctcctggtgag

SEQ ID NO: 372049 - DNA, 75 bp, Homo sapiens
tgttaggtcaactgatccaactatgatcaagacactgaaggttttacagaaggcgacacatgttgttcagagtga

SEQ ID NO: 372050 - DNA, 51 bp, Homo sapiens
aggggagcccgggacccccgggggcgcagatcggtcgcttggttatcggac

SEQ ID NO: 372051 - DNA, 50 bp, Homo sapiens
tgaaatgtacccagttagtaagaggtgccgtgagcgatgtggagatgcag

SEQ ID NO: 372052 - DNA, 78 bp, Homo sapiens
cggctcccctctcaggacaacccagatgtgcaacaaagtgcgatggcgtctacggtgacgtgcagcgcgtgaagatcc

SEQ ID NO: 372053 - DNA, 100 bp, Homo sapiens
tgaagacgttccttgaggaggtttgaaaaaatgccatggctagtccagggaaagataactatagaatgaaaagttataagaataaagccctaaatcctca

SEQ ID NO: 372054 - DNA, 50 bp, Homo sapiens
ggagaagccgcccaaagaactggtctagatgttgatggaatatatcgagt

SEQ ID NO: 372055 - DNA, 101 bp, Homo sapiens
cttccaagaaaccaacattcccaacagccaccaccaccaccagatgacctgcctagagctggaacgttacctccagagcgagccctgctatgtttcagcct

SEQ ID NO: 372056 - DNA, 100 bp, Homo sapiens
ccaccctcaacgccctgctggtggctgctgaacacctgagtgcccgggcaggcttcactgttccatgcctctgcagcggtgcctcatgtttgctgtgtag

SEQ ID NO: 372057 - DNA, 100 bp, Homo sapiens
agtggctggatgccatcatccgcgagcgggagcagcgcgagaaccccccaaagacacacgtgacccaccaccccatctctgaccatgaggccaccctgag

SEQ ID NO: 372058 - DNA, 98 bp, Homo sapiens
gggccctgagcctcctgcaacacctgcggcctcactgggacccccaggaggtgaccctgcagatgaaccagaaactcgagatgcatggtgggcagaaa

SEQ ID NO: 372059 - DNA, 95 bp, Homo sapiens
gtccagcatccgaccaccgaggctggagggggagaacacccaggtgttcattgtactcatggcttcaatcgcactggtttcctcatatgtgcctt

SEQ ID NO: 372060 - DNA, 100 bp, Homo sapiens
atccctgaatgggcccgtgggcatatttagtcattcatttttgatcaggagaaagaagacagccatcatttgaaagatttggagcaagaggtggtggtgg

SEQ ID NO: 372061 - DNA, 75 bp, Homo sapiens
cagtgcggcttttcaccgaggaggagctggcccgctatggcggggaggagttgtgacttctcaccaggagatttg

SEQ ID NO: 372062 - DNA, 100 bp, Homo sapiens
caacccaaccggctccagggcactggtaatttggctagaggaccgcgcggaggcagcggggtgaagatggagctggaaaaacaagcttaataagaaaaat

SEQ ID NO: 372063 - DNA, 75 bp, Homo sapiens
gaactgagacgtttcgaattccaggtgtggatgaggtcaccattgtcaacattttgaccaaccgcagcaatgcac

SEQ ID NO: 372064 - DNA, 75 bp, Homo sapiens
gagaagctgcacgacgtggacttctacaaggcccgcatggagaactgttgggaatcaaagagctttccaaacctg

SEQ ID NO: 372065 - DNA, 50 bp, Homo sapiens
cgacaggcggcgcgggcggcggacttaaccaccaccatgtcgagcaaaag

SEQ ID NO: 372066 - DNA, 100 bp, Homo sapiens
cagcaccctggctttcaacacctacgtccacttccaaggtttgggaagtagctgctccatacattgaaaaatacagaatggagcatattccagaatcaag

SEQ ID NO: 372067 - DNA, 73 bp, Homo sapiens
gccaatttctggttggaatggtgacaacatgctggagccaagtgctaacattgaaatcatggcaggtccagaa

SEQ ID NO: 372068 - DNA, 100 bp, Homo sapiens
cctatatctgctatggacctcttcttcatgggaacacaacagttttatatgagttgtaatcgtaaaatgaaaccaccttaccttaaagaattatatgtaa

SEQ ID NO: 372069 - DNA, 74 bp, Homo sapiens
ctggagaaactgaagcgggacgttgagtacatccagcagtggtcattcgacaacgaaagtcataccgtagaaaa

SEQ ID NO: 372070 - DNA, 75 bp, Homo sapiens
tgcggcccgaggaccgtatccttgtgctagtggaatgcagtagccctctgggcctgggatattgtggttgataac

SEQ ID NO: 372071 - DNA, 88 bp, Homo sapiens
ggagaagaggaatgttccctgacaatttcgttaaggtcatcatcagatttgaaatatttaaagtggatacaaaactatttcagcaatg

SEQ ID NO: 372072 - DNA, 100 bp, Homo sapiens
ttccaagttcaggagaactcgaccgaccgtagctttatgggatctgcgtaacttaaaattaaaactccataccttcgaatctcataaagatgaaattttc

SEQ ID NO: 372073 - DNA, 100 bp, Homo sapiens
tacccagcttaaagagctccacattcaggggaaccgcctcaccgttctgcccccagaactagaaagctgtatacctgcacaagtggtggctgccattgat

SEQ ID NO: 372074 - DNA, 73 bp, Homo sapiens
gcaacggggctccgggccctaagggaactgataaatttcaaacggaagagagtggcagcatttagaaagaatc

SEQ ID NO: 372075 - DNA, 100 bp, Homo sapiens
caggggaggaaaagaatggagatgaggattgccagcgaggcgggcagaagaagaaaggaaaaatttacagccattctttatcgtactttggaacggagga

SEQ ID NO: 372076 - DNA, 99 bp, Homo sapiens
ttgatcgaatgaaggaatcctctccatctggttcgaagtctcagcggtattctggtgcttatggtgcctcaggttggcagcctcgatggttccttctct

SEQ ID NO: 372077 - DNA, 100 bp, Homo sapiens
actcccaggctcaagcaatcctaccatgtcagccttcccagtagctggaactacagtgattacccaaccagctgaaatgaatgttaaaactgagacagag

SEQ ID NO: 372078 - DNA, 100 bp, Homo sapiens
atatttcattatatcatatagagaccatgaagggtcttattaaggtagctacagcaagctgggtagcaggcagatccaaaggatatcatgaagtttccag

SEQ ID NO: 372079 - DNA, 97 bp, Homo sapiens
ggggagacggacgcgtttggcaacagcgagggcaaagagctggtggcctcaggtgaaaaattctcctgagaatgatattcctatggagatcaccacg

SEQ ID NO: 372080 - DNA, 98 bp, Homo sapiens
tggagcacctgctgcgttgcggctactacaacacggctgtcaagctggcgcgccagagcggcatcgaggtccagctgggagctccccgacctccagga

SEQ ID NO: 372081 - DNA, 100 bp, Homo sapiens
ggtccccggcctcgtgcccggccaggtaagactttgaccccgacgcaggcttcagtgattgccgcggatcagaagcctgagcactttggctcgagacaat

SEQ ID NO: 372082 - DNA, 50 bp, Homo sapiens
tgcgtcaatcagagcgtcctgtgcgttgaaggagaagagccaggcgtgcg

SEQ ID NO: 372083 - DNA, 50 bp, Homo sapiens
ggacaagcacagtcttcggaagttgtagtgatgatgaagatgttgcacca

SEQ ID NO: 372084 - DNA, 100 bp, Homo sapiens
tatcttcagcaaatcctaatgataacagaactagctccaatgcagataaaagcttggaaatctgaaatagagtactatgctatgttggctaaaactggtg

SEQ ID NO: 372085 - DNA, 88 bp, Homo sapiens
gctggcgatgcagaggggtgcgcagtccagcgtgaactacagtcagggcagcctgaaggatgcaaacaaaatccagtctcatagcaga

SEQ ID NO: 372086 - DNA, 49 bp, Homo sapiens
ccttgagtgataaaggagtagagataaagaaagccgcccacctcggaaa

SEQ ID NO: 372087 - DNA, 90 bp, Homo sapiens
gccatcttcaaaatttcaggtcttaaatctgatggacacttttgtaaatccacttcgcaattcaatgaggaatgtttcaaatgcagttaa

SEQ ID NO: 372088 - DNA, 80 bp, Homo sapiens
ggctcttccctgaccattttctactgtccctgcgcgagttcacaggaagatgaaagacctctgtcacctttctatttgag

SEQ ID NO: 372089 - DNA, 115 bp, Homo sapiens
cgtgggcccagccagcaaggagaagtctaacaggcaggaggaggggagacacaaggagcccccgcacgacaaggtgctggggcaaccaatggaaaagacaagacatctggtgaaa

SEQ ID NO: 372090 - DNA, 82 bp, Homo sapiens
tttttgaacaaagaaaatcagatggagttcacacgacttcattgacttaactagagagaccagaccaaggacaaaagatcgc

SEQ ID NO: 372091 - DNA, 100 bp, Homo sapiens
tgacggcgtgaccgacccgagccgaatctccggcctgtgaaactgtgaggggattcggccaagacgtcctcttccctctgcctcccacccaggccactct

SEQ ID NO: 372092 - DNA, 74 bp, Homo sapiens
ggccgtaggaacgggcctgtcgaagtgcgcctgacaggatcctaagcacttcaagtcagagaagacaggacggg

SEQ ID NO: 372093 - DNA, 100 bp, Homo sapiens
accacgctctcgtctggtttgatcacaagacgggcaaggtgatcatggaggaagcactttactcccaccaaatgtcacaaatgaatttccagaatatggg

SEQ ID NO: 372094 - DNA, 99 bp, Homo sapiens
catccgcgaggtggcggtgctgaggcacctggagaccttcgagcaccccaacgtggtcagaatcaaagaatcttcaggatggcagcaagtgtttacgag

SEQ ID NO: 372095 - DNA, 100 bp, Homo sapiens
ctgaggctactgcatcttgagactcaggatgaagacccagcttggggctgtcaaagaggaccattcttagtggcactggggaaatcttggcacccagaag

SEQ ID NO: 372096 - DNA, 100 bp, Homo sapiens
gcgccttgcagcactgctggaccaggcctatgaaaggaggttccctacatgtcctttgattccgatgttcgtgggcagtgacactgtgaatgaattcaag

SEQ ID NO: 372097 - DNA, 75 bp, Homo sapiens
gcctgttggaggaagccttgttctatggtactcggaccatggagccatacaggccaccccagcagacatgtttgc

SEQ ID NO: 372098 - DNA, 100 bp, Homo sapiens
caatgacaatgaggacatccccactgagctcagtgactcttccgacacacacgatgaagatgtgggcgccccagccagaagcagagaggggtacagggaa

SEQ ID NO: 372099 - DNA, 100 bp, Homo sapiens
tggcgctcctgctcctccaggcgctgcccagccccttgtcagccagggctgaacccccgcaggttgttcctcaaagtcattcaagctgtactcgccgaag

SEQ ID NO: 372100 - DNA, 158 bp, Homo sapiens
catggatacagcaggaatgatcctgggatggaaattttttgatcatgcggcacatcttgggggagctctttttggaatagataatcattcaggtcttcgtgagctaaggccaaacaaacaaaaaacacttgctttgatggactgaatactgttattag

SEQ ID NO: 372101 - DNA, 82 bp, Homo sapiens
tcctcgagcaaaaatgaaccagcagcgtgggaggcgttttaggtcttcaaagcttcacctttctccaaaggcagatgtgaag

SEQ ID NO: 372102 - DNA, 100 bp, Homo sapiens
gcgtggaccacatagacatttacgcggatgtcggcgaagagttcaaccaggagaatgacatcttcctgggctgggaaaaaggagcttataagaaatgggg

SEQ ID NO: 372103 - DNA, 83 bp, Homo sapiens
gctaaagcagcgtgcgttcagccctggggggtgaatgtgatgctgaggaagattgctgtggctgcagcgtccaagccagcagt

SEQ ID NO: 372104 - DNA, 83 bp, Homo sapiens
ggcgaaaggaacggctgaaggccctacgggagaaaaccgggcgcaagctcaccatggatgatgatatcgccgcgctcgtcgtc

SEQ ID NO: 372105 - DNA, 100 bp, Homo sapiens
aagtccttcgcttcgtcatggagggcggccttctggacaagccagacaactgtcctgacatgctataagatgctcccaagtcccttgcagctctcttcag

SEQ ID NO: 372106 - DNA, 101 bp, Homo sapiens
atcattgctgtcttcgtggcggtcatggaattcatatggtccacacggaggtcagctgagtccgaggaggcttgcagggtggcccccgctccgacttcgac

SEQ ID NO: 372107 - DNA, 75 bp, Homo sapiens
ccgatttaaagctgagctgcgaggaaaatggcggcgggaggttaaagatcgaggtccggaagccactaggagatt

SEQ ID NO: 372108 - DNA, 75 bp, Homo sapiens
cgcacgcggtgcagggtaacatggcggatgcggaagtattcacaggcctccactgggctctcagtaggtgggatt

SEQ ID NO: 372109 - DNA, 88 bp, Homo sapiens
ccgcttgccgcagccgcctcagaacccgaccaacatccagaacttccagctgcccccagctccaggcggacgacgtgggccgaagaga

SEQ ID NO: 372110 - DNA, 83 bp, Homo sapiens
ggttcatcccatcagcctggattggtgaaactgaatcacaggagatatttccaggttcccctccagactctttgcaccaaagc

SEQ ID NO: 372111 - DNA, 73 bp, Homo sapiens
attcagaaggagcaggattaccaaaggtgctcaagtaaagctctttgtgacagggcttttcagcttaaatcaa

SEQ ID NO: 372112 - DNA, 83 bp, Homo sapiens
ctccatgaacaatctcacccaattactctgctcagtggtggctgaatacattttggaagagagtttttcatcttagagattgg

SEQ ID NO: 372113 - DNA, 100 bp, Homo sapiens
gttagcttcagagttctttgtggatggacttgattctgatgagagaatggagatgtatgcatttcgattcttcatccgcctgtagatgacccacagagtg

SEQ ID NO: 372114 - DNA, 88 bp, Homo sapiens
ctgctggaaggagactggatgatagaattgtatgattatcgggaaatgctgcacaatgccactttctgtctggttcctcgtggtcgca

SEQ ID NO: 372115 - DNA, 74 bp, Homo sapiens
ctttggatataacaccaccttcaaaaatttcttgcttttttaggaccaaaggatatatttccttactcagaaaa

SEQ ID NO: 372116 - DNA, 100 bp, Homo sapiens
gcccgccgctgccgcctccgagcagcccgccagaatgttgtaccatctttgggtaggcagacttccctgacgacatcagtgatacccaaagctgagcaga

SEQ ID NO: 372117 - DNA, 100 bp, Homo sapiens
tggatgaaaacgaagatgacgtgtatggaaactcatcaggacggaagcacaggggccactcagagtcgcccgagaatgcaccgtccaggtgaggttagag

SEQ ID NO: 372118 - DNA, 100 bp, Homo sapiens
cagcacttgggagcccgaggagaacatcctggactcgcggctcattgcagccttcgaacaaaaaattggggcttgttgatggacaagaactggcggttgc

SEQ ID NO: 372119 - DNA, 90 bp, Homo sapiens
tgatgattttgagccatacttaagtagccagacaaatcaggcaaggcatctttacatatgtgattatcataaaaacttaattcagagtgt

SEQ ID NO: 372120 - DNA, 75 bp, Homo sapiens
ttgggatctccctgtcctacctcacgggggcggcggtggcaaaagctcggctagaagaaacagaccggaggacgg

SEQ ID NO: 372121 - DNA, 97 bp, Homo sapiens
catgtctgtacctactgatggtgctgtaaccacctcacagattccagcttcggaacaagagaccctgacccagactcttttcaagactacattaagt

SEQ ID NO: 372122 - DNA, 98 bp, Homo sapiens
gtaaaaacaatagctcaaggaaacctttccaacacagatgtccaagctgccaaagacgagttgtactgctgtcacaggaaatggacgctggattacaa

SEQ ID NO: 372123 - DNA, 96 bp, Homo sapiens
cctgaatataaggaaaaacagacacctgaaagtcttcctcaaaataacaatccaggtttatggctacaaatgatttgatgacggaactgcagaaag

SEQ ID NO: 372124 - DNA, 74 bp, Homo sapiens
ggtgaagtccacaatcaagttccaaatgaagaaggccgcaaaagataagtaccgtgaattggctgtggaaggga

SEQ ID NO: 372125 - DNA, 82 bp, Homo sapiens
gtcggtggcggaggctgaggagaaggaggagcgggccgtggaggcttcgccgcctaggcataatttgttggactctaagatc

SEQ ID NO: 372126 - DNA, 88 bp, Homo sapiens
cgcgcgctcgcgcaccacgcgccccgcgcggcccgcccggatcgtggcctctcgagagcaaggctatttttatgattcccacaaatcc

SEQ ID NO: 372127 - DNA, 100 bp, Homo sapiens
gccaggctgatggagagctgaacattactcttccagaagagcccctgccgccttgtcatgactccgaggaatccatggaggtgttcaaacagcactgcca

SEQ ID NO: 372128 - DNA, 88 bp, Homo sapiens
cccagaagaagggaaggcgcgagtgaggaaaggaggtactgtagatttctacctggacaaggactggtactatacccacagataggag

SEQ ID NO: 372129 - DNA, 75 bp, Homo sapiens
tcgctttctcccatcgaaccttctagttgcttattgcaggtctctaattaacagaagatggcaaagcccagccac

SEQ ID NO: 372130 - DNA, 73 bp, Homo sapiens
gagcaggagcgcaagcgccggcagaagcaccagtgcccacttggatcttggtgctctccctgagcctggctgg

SEQ ID NO: 372131 - DNA, 100 bp, Homo sapiens
acccgagaagtcatggacctaatcactgactggaaataccggcatgcaggattgatggccttatctgccattggtgaagggtgccaccagcaaatggaag

SEQ ID NO: 372132 - DNA, 124 bp, Homo sapiens
aatcacagaagccgacaaggcgttcaagcgaaaacatgaccgctgagcccatgagattatatctgggtgttggcacccagccactattctgccaatgaagtacatcctggtcacgggtggggtc

SEQ ID NO: 372133 - DNA, 82 bp, Homo sapiens
cctgcccgtgctgctgctgctggtttggggactggacccgggcacaggtgtccctggccagtgtccttccacctgtccacaa

SEQ ID NO: 372134 - DNA, 100 bp, Homo sapiens
gagctggaggagggaatgatattcagtggtgtttttctcaggtgaaaggagcagtagatgatgatgtagcagaaggtattctgagagaagcctcacaaag

SEQ ID NO: 372135 - DNA, 74 bp, Homo sapiens
tcagcaagatggaccccaccgacctggcaatgcccagacatctgtgtccccctcaaaagtcatcctgccccggg

SEQ ID NO: 372136 - DNA, 75 bp, Homo sapiens
tggagcgctgcgcggcgcggcggccgggccctcgagacggggacggtcctgaacgaggctgtgggggccctgatg

SEQ ID NO: 372137 - DNA, 100 bp, Homo sapiens
caagggtgcacagcccctggctacggcagcaagagcaactcaccaccagccttgggcccagaagcatgccctgtctccctgcccagtcccccggaagcct

SEQ ID NO: 372138 - DNA, 82 bp, Homo sapiens
tcgctcttgtgccctagcaccccgagaaccgtcagtttgagccagatgcaagaagttgagaactttaagaagctaaatctca

SEQ ID NO: 372139 - DNA, 83 bp, Homo sapiens
ggaatttgtggctggctggatctctggtaaccacctgctgttccaacaagtgcccatggttgaaattgacgggatgaagttgg

SEQ ID NO: 372140 - DNA, 90 bp, Homo sapiens
gcgcgggccgggaggggacggccgccggagccgcgaggccaagtgcttcctttcacaactttttccagagggcaggcgtcctagctccag

SEQ ID NO: 372141 - DNA, 101 bp, Homo sapiens
accgggacgacgtgcagggctacgcggccaagactgtgttcgaggccgagtgtactacttcaaccacatcactaacgccagccagtgggagcggcccagcg

SEQ ID NO: 372142 - DNA, 96 bp, Homo sapiens
aggaggggagtctgatattgaagaggaagaactgaccagagctgatcccgagcagcgtcatgtacccctgctgaagtgcaatgttgtgatctcggc

SEQ ID NO: 372143 - DNA, 90 bp, Homo sapiens
gcccttccttccacctgagcagcatcgaggtgctcatcctggacgaggctgacagctcccggagccagtcggcagcggtcaccccgtcat

SEQ ID NO: 372144 - DNA, 74 bp, Homo sapiens
ggcccagggtcccccgggcccggcagcgtcgctggagctgtggctcaaatgctgaccccctgaaggtgtacccg

SEQ ID NO: 372145 - DNA, 90 bp, Homo sapiens
catgtccaaaccaggaaatggacaggtgaccatcttggtgctgcagggccggctggatgaggcccgacagatgctctccaaggaagccga

SEQ ID NO: 372146 - DNA, 75 bp, Homo sapiens
ccggcgccctggggccccggagaggggaaaccctcagtaaaaccagcccaggtcaaagcctcatcagtttctact

SEQ ID NO: 372147 - DNA, 82 bp, Homo sapiens
acagacatgactgagtcctccatgaagagctttgtccagggatctgaaaccactttgcagtcgacatactcggataccagcg

SEQ ID NO: 372148 - DNA, 50 bp, Homo sapiens
gtgggagcgacgccagcgcctcaacaggttcagccgtctgtatatctccc

SEQ ID NO: 372149 - DNA, 82 bp, Homo sapiens
ctgcgctggcgcggcttttggcggcctttctgctcctcgcggcccaggagggccctcctggacccgggagcggaccctggtg

SEQ ID NO: 372150 - DNA, 100 bp, Homo sapiens
cgagaggccgtgcgggacgcgggcgccaggaccggccgaacgcagaggctgttactgaggcggagacacgggtgatgattggctttctggggagagagga

SEQ ID NO: 372151 - DNA, 100 bp, Homo sapiens
ctccgcagcgacatcaccaagctggaggtggacgccatcgtcaacgccggactttccttatcccagttgattgtgcagaatacactgcctgtcgcttgtc

SEQ ID NO: 372152 - DNA, 100 bp, Homo sapiens
aaaccaagaacctctctgatggcgtttctcagacaaatggatcactactcttggaatcaaagataaatccaaatactgcatatcagaaacaacaggcaag

SEQ ID NO: 372153 - DNA, 76 bp, Homo sapiens
cctgcggagctgcttcgccgctgcgataagaccatcatcatgtggaaactgaccagggatgagaccaactatggaa

SEQ ID NO: 372154 - DNA, 100 bp, Homo sapiens
ggcaccaaggcggtcaccaagtacaccagctcgaaaaattccgggtagatatgcctggctcaggcagtgcattcatccccaccatcaacgccatcacgac

SEQ ID NO: 372155 - DNA, 75 bp, Homo sapiens
agatgaaaaagaaaagactaccgcactgaaagattccacagtggtgtgtggagtacatgcgatcattaccaggac

SEQ ID NO: 372156 - DNA, 83 bp, Homo sapiens
gtgcgttgcgtgccctacttcaaggataagggcgacagcaacagctctgccggctggaagggccaccagatgcctccacccag

SEQ ID NO: 372157 - DNA, 98 bp, Homo sapiens
agtgactggaataaaaacagagtccgatgaaaggaatgggtctgggaccttaacagggagccatggtggctctggtaggcgaggaggaaggttttctg

SEQ ID NO: 372158 - DNA, 75 bp, Homo sapiens
ctccagcacccccgccgcccccgacgtttgcactgatgtgttcagagcaacattgttttgttgacacaagcattt

SEQ ID NO: 372159 - DNA, 80 bp, Homo sapiens
gaagaggcctgcagtgggagagcaggggggatatgagactttctactcggaatatcctgagtgttgcgtggatgtaaaac

SEQ ID NO: 372160 - DNA, 88 bp, Homo sapiens
cctgtctcggaccccgcacccaaaccactggagggtgataaaagaaaatgtggctgaagttacccgaagttcagcttgcagtgtaatt

SEQ ID NO: 372161 - DNA, 75 bp, Homo sapiens
caaggtggatgaggcccaggctgatgggaaggagcacccaggagctgaagaccatgacctggtcgtttggatgga

SEQ ID NO: 372162 - DNA, 82 bp, Homo sapiens
agattcgcagtggtcgcttcttctccttgatccaggtgaacttgagagaattagagacagctgcctggttcagtcatgatga

SEQ ID NO: 372163 - DNA, 76 bp, Homo sapiens
caagtaaaactggctaatccttttcgaataggacaggcacatacagtgaggcttcataaacaagcagatatgcaag

SEQ ID NO: 372164 - DNA, 75 bp, Homo sapiens
ggggaaccgcagcgcagtgacagtgcagaaccccggcgcggcccttgaaatcatgaccaccccaggaaaagagaa

SEQ ID NO: 372165 - DNA, 100 bp, Homo sapiens
ctgaagataaaaaggaagttttcagacccctcaagcctgctgggctggcaaggtttaattgcttatggatgtcattcacttgtggtagtgattgattcca

SEQ ID NO: 372166 - DNA, 83 bp, Homo sapiens
cctggatcaccgacagcacagacagaatccctgctaccagagatgagtatgatgtatgtgccatttgtttggatgagtatgaa

SEQ ID NO: 372167 - DNA, 100 bp, Homo sapiens
acctcctgcatcctgcgttcccctccatccttctggatctggccaacaccaccggcacagtgacggcttcagagggaggaagacaatggtcctataatgc

SEQ ID NO: 372168 - DNA, 75 bp, Homo sapiens
tcccgcaagcccagacaatgccggtggaggaatttgtggctggctggatctctgttctggatgagatcaatcccc

SEQ ID NO: 372169 - DNA, 80 bp, Homo sapiens
cggggcctcccagctggaagaggcggtggcggcgggtcggggcgagcttcggaaccaaaaagaagcttcccagagccggg

SEQ ID NO: 372170 - DNA, 100 bp, Homo sapiens
gtgaggggggccttagagggcctccccaggccgcctccgcccgtgaagctgtatgacaaaattaacacaaagtcttcaccacaaatcaggaatcctccaa

SEQ ID NO: 372171 - DNA, 82 bp, Homo sapiens
tggggactacgacgtccctcaaaccttgcttctaggagataaaaaggattttttatcaagcagaaatgcatcgaacaacgag

SEQ ID NO: 372172 - DNA, 51 bp, Homo sapiens
tgcaacaactaccaggccaaggaccaggtacgaattggagcaatgttggct

SEQ ID NO: 372173 - DNA, 100 bp, Homo sapiens
caagggcgagatcctggagagcctgcaggacggcgcggcagagtccccgtacgcctacagtaacgattttgcaagaacgaggctcaaggatgtgagggac

SEQ ID NO: 372174 - DNA, 80 bp, Homo sapiens
attggaagaagaaaatatcacattgcagaaactagtgtccacgttgaagcagaaccagctcgtttgacagcaagtttgtt

SEQ ID NO: 372175 - DNA, 107 bp, Homo sapiens
acaaggacgagttctcgggcagaggcgacctccccgcgttccatgcgcacagggacaggggtatctacgagaccccagcaggcaccatcctttaccatgctcattta

SEQ ID NO: 372176 - DNA, 75 bp, Homo sapiens
aaacaagtggcgtggttgtgaggactatagttcctggaggattagcagatcgaatccagacatttaatgtggatg

SEQ ID NO: 372177 - DNA, 75 bp, Homo sapiens
ctgacaacgaaccatacatttttaaaggcagagactccccctaatgggccagattgtggctatggctcctttcac

SEQ ID NO: 372178 - DNA, 82 bp, Homo sapiens
gtttgcggttcagccctttgatgaccgcagcagccccaactggaccctaggcaaaagtgagtggcactcctctgccaggact

SEQ ID NO: 372179 - DNA, 75 bp, Homo sapiens
tggtgaacagacactcccttctgtaggtaaaataccatgaagattttgaaaaaacaaaggggagaggctttactc

SEQ ID NO: 372180 - DNA, 102 bp, Homo sapiens
tcgcagaaagaaaataataccaaagggaaacaaaatttcaagaaggaataaagaacagtggaagagtaaatatgaagagtctcgctctgtcgcccaggctgg

SEQ ID NO: 372181 - DNA, 100 bp, Homo sapiens
cgagccgtcttccccaggcctgcgtccgagtctccgccgctgcgggcccgctccgacgcggaaggaatgtgttccagaagatctagaactgaagaagaag

SEQ ID NO: 372182 - DNA, 100 bp, Homo sapiens
atttcttgaaaagtttaacattgaagagtgaagaggagaaaacggaattctttaagattaaactgcaaatatctcatgaagctgctgcctgtatcactgg

SEQ ID NO: 372183 - DNA, 75 bp, Homo sapiens
acccgccggggagaggcacccgagacccacggagaccgcaacccagtgacttgattgtaaaaatttacagagcgg

SEQ ID NO: 372184 - DNA, 83 bp, Homo sapiens
ggactccctggaaacctagaaatgcattttgaaagcgaagcagaagccgtagaatcagcggcgagcctgttgaaagaacccac

SEQ ID NO: 372185 - DNA, 80 bp, Homo sapiens
cgggcgtccaaatgaagctggaattcctccagcgcaaattctgggcggcaacgcggcagatgacacacaataatttttgg

SEQ ID NO: 372186 - DNA, 51 bp, Homo sapiens
gaagaagctgaggatgaagaagatggagctctttgttcaatgcctagccac

SEQ ID NO: 372187 - DNA, 75 bp, Homo sapiens
gctctccagcccgcttgaacggtaaagagaaatgtgtatgaccttacaagtatccccgttcgccaccaattatgg

SEQ ID NO: 372188 - DNA, 74 bp, Homo sapiens
cgccaacgcgcaggtgctagcggccccttcgccctgcaggagttcaaagaaggacgcagagccagccacacagc

SEQ ID NO: 372189 - DNA, 85 bp, Homo sapiens
cctgggcaacagaatattggtcaagttgctgaccttgaagtgtctgacttccagcaactgctggcctgtgccagggtgcaagctg

SEQ ID NO: 372190 - DNA, 101 bp, Homo sapiens
gagagggctaccttgtgaagaagggagaagcagaatttgcccgcatcatgagcattgtggaccccaaccgcctgggggtagtgacattccaggccttcatt

SEQ ID NO: 372191 - DNA, 75 bp, Homo sapiens
cgggattaaagaacaacgaccgcagggctgaagaagatgcagagcagcctgaagctggtggactgtatcatcgag

SEQ ID NO: 372192 - DNA, 83 bp, Homo sapiens
ggaacgagtccgagaactggctgaagccgatgaacagcgccgggatccagatgcatcactgtaagcgataccgctcccctgaa

SEQ ID NO: 372193 - DNA, 75 bp, Homo sapiens
gttcttcttcgagtatttgtagaaggaaagatccccagcaggccctcaaggagctggctaagatgtgtatcctgg

SEQ ID NO: 372194 - DNA, 83 bp, Homo sapiens
ctgaagtagcaaaggcaagaaggcaacgacgttccatctgtggaaggacctaccaaccaggcgacctgggagacccagccagt

SEQ ID NO: 372195 - DNA, 82 bp, Homo sapiens
agccattgaagctggaatgtcctgttgctgatcctacgggacaccttctccgagtcctgtatccggatttcccagaatgagc

SEQ ID NO: 372196 - DNA, 100 bp, Homo sapiens
ctgagtgtctgtccccagagcctcagtttgtgcaggacaccgacatggaacagggactcactggggggaaggtggtctatggtgaacccatagcagccag

SEQ ID NO: 372197 - DNA, 98 bp, Homo sapiens
gtctgaagttcacgactactagaaggggaggggagtggaaaggctctcagtgaaaaagacctgagtcagaactccatcacaggggaacacagccaact

SEQ ID NO: 372198 - DNA, 75 bp, Homo sapiens
cgagggcaaagagctggtggcctcaggtgaaaagtggcgagagaagcatgtccggtcactccgggcctggccaca

SEQ ID NO: 372199 - DNA, 100 bp, Homo sapiens
ggacaacaccgggacacccgcgaggccggaaaatgaatgacaggggtcttcagcttgtggctaattcgatggtgtgggttccagaaggggggatgctgca

SEQ ID NO: 372200 - DNA, 90 bp, Homo sapiens
agagggcctccccaggccgcctccgcccgtgaaggcaacagagatgcttatttttggaaagaagttaacagcgggagaggcatgtgctca

SEQ ID NO: 372201 - DNA, 100 bp, Homo sapiens
gctggtgctttgcgtgctggtcagcatccggaacaacaggattctcagcaagttacagaagtatctttgacaactcttgtgaactttgtggacattaccc

SEQ ID NO: 372202 - DNA, 50 bp, Homo sapiens
cgcgatttgaggagctgctgctgcaggcatgtgatgtgaatcagctgaca

SEQ ID NO: 372203 - DNA, 82 bp, Homo sapiens
ccaacctgaggctgccccggccgcctgcgcacccggcagcaccatgacagttatttctcaaactctgaggctgcggagttca

SEQ ID NO: 372204 - DNA, 75 bp, Homo sapiens
agcagtttcagcagttgttaaattctcaacagctcacaccatttcttatctcagtcatcactatggtgcttctga

SEQ ID NO: 372205 - DNA, 101 bp, Homo sapiens
tttttccgaagcctgcatttttttgtggagtggtttgaatatcgtaagcgcacgtttaaacatctcaaggaggcaagtgaggcctatctggttggcctttt

SEQ ID NO: 372206 - DNA, 76 bp, Homo sapiens
ctggggagtctgattcagatgacaactgtacagatgtcactgcaggatgaagttaaaggaagtagatcgtacagcc

SEQ ID NO: 372207 - DNA, 100 bp, Homo sapiens
tgctaaaggagaagtctggtgtaatacaagatgctttaaagaaggcatcccgggcccaaatcctagacaaagccacagaatatatccagtatatgcgaag

SEQ ID NO: 372208 - DNA, 100 bp, Homo sapiens
gtcggtgtccccggctgaggcagcgcggccgcagcagccctatcctggccaacgtcttcctctacctgtgcgccatcgctgtgggcatcatgtcctacta

SEQ ID NO: 372209 - DNA, 75 bp, Homo sapiens
gtgcggagccagcctgagttgggagaagagctccagagaggtttgtaccagttgctggagccccgaatgattgtt

SEQ ID NO: 372210 - DNA, 100 bp, Homo sapiens
gaccatgcagttctattcaataagtctggaattacatgaatgacagtcttcgaaccaatgtgtttgttcgatttcaaccagagactatagcatgtgcttg

SEQ ID NO: 372211 - DNA, 100 bp, Homo sapiens
cacatcgctcggcatttgtttccaagaacaactcctactccttagctttcctggcagggtgtctgcggcgccgagggggcccctacaagaccgagcccgc

SEQ ID NO: 372212 - DNA, 90 bp, Homo sapiens
gttggagcttgaacccattgtcacccctccggggcatatgatattttcctgaatgcaaaagagcaaaacattgtgtttaatgctgaaacc

SEQ ID NO: 372213 - DNA, 110 bp, Homo sapiens
agcagatgctccaggccattaggaaagccaatccaggaagtgacttcgtttatgtcgttgacacccggcctaaaagactgacttgcataccaaatgtgtggtggatgtgg

SEQ ID NO: 372214 - DNA, 80 bp, Homo sapiens
cctttcggcttctgagacggcggcagcagcggcattcagaaaccaaggtgtatgttggtaacctgggaactggcgctggc

SEQ ID NO: 372215 - DNA, 100 bp, Homo sapiens
aggattccaagtaactcttatttggacaaagcccacaaacgctatctgctaatgagcattgaccagaggaaaaagatgctcaaaaacctccgtaacacca

SEQ ID NO: 372216 - DNA, 122 bp, Homo sapiens
aggatgttcatgaagattcaataacagttgcatttgaaaacaagtgagatcggactggaactgttcggctgcgaccagaaatttattttcctgagtaaattgccgagaattaagaatgaaga

SEQ ID NO: 372217 - DNA, 76 bp, Homo sapiens
ccagggaccgctctcttctctcgccgacagcttttcctccgcaaccatgtctgacaaacccgatatggctgagatc

SEQ ID NO: 372218 - DNA, 100 bp, Homo sapiens
tgggtgatgccctctggcacgaggttgtgcagcctgactctgaagaagctggtggtcttcaaggagctggagaaggagctgatctccgtggtgatcgctg

SEQ ID NO: 372219 - DNA, 75 bp, Homo sapiens
tccaggcatggaggaactgcaggcccagctggagaaggagctggagccctcgagcatgttccaaactcggttcgc

SEQ ID NO: 372220 - DNA, 106 bp, Homo sapiens
cctggataacccggtggtgcagctgggcctgaccaacccgaaaacattgctagtcttcccaagggattgttgaagaaacttctgaagagggaaactctgtacctgc

SEQ ID NO: 372221 - DNA, 82 bp, Homo sapiens
ctttgagccgccccgaactaagcagggcggtcggggcggagctggagtttgttcagatcatcatcatcgtggtggtgatgat

SEQ ID NO: 372222 - DNA, 95 bp, Homo sapiens
gaggggtgtttctggccacgtgcttcaacgctctgctgcccgctgtgagggaaaagttttctgaatttccagatcccatgtggggttcagattat

SEQ ID NO: 372223 - DNA, 100 bp, Homo sapiens
atgacgtctccagccaaattcaaaaaggataaggagatcatagcagagtacgatactcaggtcaaagaacccagtgacttgattgtaaaaatttacagag

SEQ ID NO: 372224 - DNA, 76 bp, Homo sapiens
acatcactggctacacatttccagcaggctgcagatacgagtggacaatgctctgccaatggatttatgacccaaa

SEQ ID NO: 372225 - DNA, 100 bp, Homo sapiens
cagcaaatgccagaagaagttccagccccagctcctgctcaggaaccagtgcaagaatgttgaaggtatccacctttcctgggaacctccaacctcacct

SEQ ID NO: 372226 - DNA, 100 bp, Homo sapiens
tggatgctgccggacaccgtggcgcctcaggaactgaaccctcgcggccgcaacgtgtgccgtgctcccggggccaattcctgtccccccagcagcatgg

SEQ ID NO: 372227 - DNA, 75 bp, Homo sapiens
tgtaccatcgccactgcttccggtttgacaactattcagccaatgtgatggtggacagcaagccagtgaacctgg

SEQ ID NO: 372228 - DNA, 75 bp, Homo sapiens
cgcactctcacactggccttgatttggcagctaatgagaagaacagccctcatgcttgctgtgcactatgactca

SEQ ID NO: 372229 - DNA, 82 bp, Homo sapiens
gaagacagagggttttcttttgaggcaggggaaatggaaggtgatgcagtcgaagccattgtggaggagtccgaaactttta

SEQ ID NO: 372230 - DNA, 100 bp, Homo sapiens
caaagtccagggaaaatcctgaggaagatgaagaccagagaaaccctgcaaaggagtccctagagacacctagtaatgtaaattcaagatggaggcgctt

SEQ ID NO: 372231 - DNA, 101 bp, Homo sapiens
tccaaatgattctgatcgcaaatacctgaaagattgggcaagagaagaattcagaagaaacaaaagtgccaccgaagagacggagtcttgctctgtcaccc

SEQ ID NO: 372232 - DNA, 100 bp, Homo sapiens
cttctgcggccggcctgggcaggtgtcttcctcgagaggcaggcaggggatcccggacccaaagtcatacactggctatcagaaaattatgctggaagaa

SEQ ID NO: 372233 - DNA, 101 bp, Homo sapiens
atttatcctgagcaggcagagagcagaagatattcacagacatgcggaatttgaggtgtgtgaatatcctgatggaaccaagtctttgaaactgggagact

SEQ ID NO: 372234 - DNA, 96 bp, Homo sapiens
ccgaactgacctgtatcgcggtggtgggcattgaggaccctgtgcgcccagaggtgcctggctgagaatgctggagacgttgcatttgtgaaagat

SEQ ID NO: 372235 - DNA, 74 bp, Homo sapiens
ttccccttcctggcatgccaattccacttccaggtttctaagcatgaattgaggaacagaagaagcagagcaga

SEQ ID NO: 372236 - DNA, 100 bp, Homo sapiens
acggggaactttgcagcctatggatttgctcccattactctgatcgctccgttaggctgtgtgtctgttacagaatcccgcccattgtcagttcctgtta

SEQ ID NO: 372237 - DNA, 100 bp, Homo sapiens
tttcaacagttgcgtcacagaatacaggtactgcaacgactggagcagaggcggcagcaggcttcagagcgggaggctccaagcatagaacagaggttac

SEQ ID NO: 372238 - DNA, 82 bp, Homo sapiens
tcgcggcggcggtggagatcgcaggtcgctcaggattacttccttaggatagattgccagaagtggagttactgggtcagag

SEQ ID NO: 372239 - DNA, 50 bp, Homo sapiens
gtttgatgcatttgacctctgaagaactgtccaatatcagatggaaatga

SEQ ID NO: 372240 - DNA, 100 bp, Homo sapiens
cagaaaaatctgttctcaattgcatttataaggcgaccgtgctgtgtgacatcatagtcctctactgcatgaagaaaagactctactatcgggagaagaa

SEQ ID NO: 372241 - DNA, 85 bp, Homo sapiens
aaaacaacagtctttatgtccttacaccagatttgccaccaccttcatcatctagtcatgctggttcttttagaactcatcaaat

SEQ ID NO: 372242 - DNA, 82 bp, Homo sapiens
caagccgctggcagccgcggatctcaccgccgctcaggcttcctgatttctcccgattccttccttctccctggagcggccg

SEQ ID NO: 372243 - DNA, 82 bp, Homo sapiens
gggaaccacatggatctgcctgggctctggaacttcatccattctctatgaaacctcttctgaggcgggcgatggcctatga

SEQ ID NO: 372244 - DNA, 83 bp, Homo sapiens
ggagcacgggtcatcttttccccagaggcgtcggaatggacctgtgccacccagtggggatcaggaggcctggcagaaaggag

SEQ ID NO: 372245 - DNA, 83 bp, Homo sapiens
gccatgcccctcaggctggaacttgccctgtctcctcgcagatgaggtgatcccattaagatactaatgccatcactgtctcc

SEQ ID NO: 372246 - DNA, 75 bp, Homo sapiens
agatgcccctgaggagtttatttcggaacttgctgagtacttaataaagaggatagtgaatgatacctacagaac

SEQ ID NO: 372247 - DNA, 100 bp, Homo sapiens
gccccaccgggtctttcaactttactcctgctcccctgaaaaacctacggtggaagccacctcttgtacaggccactcctcaggatagtcaggaaggaac

SEQ ID NO: 372248 - DNA, 74 bp, Homo sapiens
cctggagaatcttcagccagactttaatgaagactatctagtgcaatgcatgaaccattgcaaacttggcaaga

SEQ ID NO: 372249 - DNA, 50 bp, Homo sapiens
tggttccattctctgcaatggaagctccctgtgctgtcaggaatctacag

SEQ ID NO: 372250 - DNA, 100 bp, Homo sapiens
cggcactgtattctttacctgcttcccaatcccactgatgaggatcagcccatgtctttcccagggaactccgatgaagtgttccaacaaaatgagcgag

SEQ ID NO: 372251 - DNA, 50 bp, Homo sapiens
gtttacttgtgtccatgtgccagacacagcaggatgccaatgcctcttcc

SEQ ID NO: 372252 - DNA, 75 bp, Homo sapiens
gtacttcattgaagccagtcccttgcccagcagttatccgggaaaaacagtcctggatgcctcatcccttagttt

SEQ ID NO: 372253 - DNA, 75 bp, Homo sapiens
acgagtattccaaatttgatggcaagagctacagagacttctgaagtggagagtctgcgacctcctcggttcttc

SEQ ID NO: 372254 - DNA, 75 bp, Homo sapiens
ctgaatcaacatgggcaatgagaacagcacctcggacaaccagatacgtaggtaacctttccagagatgtgacag

SEQ ID NO: 372255 - DNA, 83 bp, Homo sapiens
tatgtaccctaaatatgggagataagaagtatgaagacatggaagtttgcagaaaaaacttcagcatgtgccaggaacacaac

SEQ ID NO: 372256 - DNA, 50 bp, Homo sapiens
ggcggtccgttgccaaagccagcatgaacaaggctcagttatgatgtttg

SEQ ID NO: 372257 - DNA, 100 bp, Homo sapiens
cgaagctggccaaagcctgcccagacggctcacctgtgcgggatggaacaaaaggacctgatcccaaccttgaagaaagtcctaaaagaaaaaatattac

SEQ ID NO: 372258 - DNA, 83 bp, Homo sapiens
cgggggagtcgtaaacaaccctgaagagaacagccaggcctgaacacaaacttgaccacccaggagcatgaaaacatcattgt

SEQ ID NO: 372259 - DNA, 100 bp, Homo sapiens
acaagccaggaaaaccccgaaaacgcaagaagcgtatagcctgggctggaagctcttctacgtcacaggctgcctgtttgtggctgtgcagaacttggag

SEQ ID NO: 372260 - DNA, 100 bp, Homo sapiens
aatttaaggagttatatttggctaaagaggagccccccaagatgaacccagtggtggagccactgtcctggatgctgggcacctggctgtcggacccacc

SEQ ID NO: 372261 - DNA, 50 bp, Homo sapiens
acattgagcttgtttcaaattcagctctgttgcttcgaactccagtggtc

SEQ ID NO: 372262 - DNA, 83 bp, Homo sapiens
gggcggcgtgtcaggtggttgcggagctggtaagccaaactggcaagacgcagtcaagaacgggacaatcttggcatgttggt

SEQ ID NO: 372263 - DNA, 97 bp, Homo sapiens
aggagccccccaggcctcccgaggcagagaacagcagcccggattcaggttttactgcaatcacagcaaccaaccccatttggcttataaagactcg

SEQ ID NO: 372264 - DNA, 80 bp, Homo sapiens
acagaagtcatggcgatgtttgagcagatgagagccaacgtgggcaagttgctcaaggggaaggtggagttgcagcaagg

SEQ ID NO: 372265 - DNA, 98 bp, Homo sapiens
ctaacaatgatcgcccgagtggcggacgggctcccgctggccgcctcgatgcaggaggacgaacagaaagctctgggtgtgcggcagtaccatgtggc

SEQ ID NO: 372266 - DNA, 100 bp, Homo sapiens
agaatcccaaggtccaattgtggtctacttatcaagttaggaggcagagacccgtgctgagtttgctgagagatcggtagccaagctggaaaagacaatt

SEQ ID NO: 372267 - DNA, 75 bp, Homo sapiens
gctgctgctggtgttagcgctcagtcaaggtaaagtcagtgataaatcttttgtttgctgcatatactggagatg

SEQ ID NO: 372268 - DNA, 97 bp, Homo sapiens
gcagctgcgatggccgtggccgtggggagaccgtctgaaaccacccctactcctaatcccccgactacagaagaggagaaaacggaatctaatcagg

SEQ ID NO: 372269 - DNA, 73 bp, Homo sapiens
ggcgtccctgagagaaattagagtttccagatgtcttggaatgcactgtatctcatgcagtagaaaagataaa

SEQ ID NO: 372270 - DNA, 75 bp, Homo sapiens
gggcagcaacaacgatgccggatacaggagggacgtgcaccagatgaaggatttgggggcagagcacttggcagg

SEQ ID NO: 372271 - DNA, 82 bp, Homo sapiens
caaaatatggcaaagaaacctattctgagagtctctggtaagaagagtgaaagcaaagaagccaagaagtctgaagaaccaa

SEQ ID NO: 372272 - DNA, 75 bp, Homo sapiens
ctacctctttctgggtgactatgtggacagaggctatttcagtatagagtgattctaccagaaaggaatgaagaa

SEQ ID NO: 372273 - DNA, 97 bp, Homo sapiens
agcgacaagccgctggcagccgcggatctcaccgccgctcagggtggatccataaagaacccagccaacccgcagagggaggggaggggctgagctg

SEQ ID NO: 372274 - DNA, 90 bp, Homo sapiens
ggagaagattgctcccaaagagaaaggcattaacatcgctattgcggttccgaggcagtgggaagagatgcggcccctggacatcgtcga

SEQ ID NO: 372275 - DNA, 75 bp, Homo sapiens
tactctgactccacctttacttttacctacgttggcggccccagaaggttgtgcacagggacctgaagcccagca

SEQ ID NO: 372276 - DNA, 104 bp, Homo sapiens
gggccttttaactttggagaagttgaggaccttgtcgctcatttggcagaaggtaactttcgaccgactttccccaagagaaaattcctagaaattgaacaaaa

SEQ ID NO: 372277 - DNA, 88 bp, Homo sapiens
tccttctctaaacgaccatctgaagcatctgcttacaagcgactatcctattaagtgtaatctcactgcttaatgagcccaacacctt

SEQ ID NO: 372278 - DNA, 90 bp, Homo sapiens
gccagatgtggaaccatatccgtggacctccatatgctcataagaacccacacaatggacaagtgatctggtgctctcatgaaaatctac

SEQ ID NO: 372279 - DNA, 51 bp, Homo sapiens
gacctcctggaagccaaaaatgggagaaaccccgttgcacacagcgtgtcg

SEQ ID NO: 372280 - DNA, 97 bp, Homo sapiens
tccatccaaaaccggcagctgttagccgagcaaattcacaatgacatcctttcaagaagtcccattgcagacttccaactttgcccatgtcatcttt

SEQ ID NO: 372281 - DNA, 100 bp, Homo sapiens
aattcacataatttgaaccagcagcaacgtgagcggacaaggcaaaatctcagcaagttcggacctctagtacaataaggcgaacctcctctttggatac

SEQ ID NO: 372282 - DNA, 88 bp, Homo sapiens
aaaaaaggagagaagctgaagcattgcttcaaagcatggggctaactccagaatcccccattgcttcacctgaacctaaaatggtgag

SEQ ID NO: 372283 - DNA, 136 bp, Homo sapiens
aaccatatgtggatcctttcatttctcagctccctggattccttcccctaaattaggacctattatttacctgtaggggcaagctctgtgtgattgattggaagacatcagagaaaccaaagccttttattcaaag

SEQ ID NO: 372284 - DNA, 111 bp, Homo sapiens
ccctgttcctttttgctgacgtgtcatttctaagtactttctcctactccataaagacttcaaattctgatgctcacagtaccacctcaagtgcctccccagctcaatctc

SEQ ID NO: 372285 - DNA, 75 bp, Homo sapiens
caaatctattcatcaaatcagagtatttataacagcaatgatgtagcagtatcgtttccaaatgtagtatctggc

SEQ ID NO: 372286 - DNA, 74 bp, Homo sapiens
agaagataaagctcaaagattactcaaagcaaagaaacttaccagtgatgagcacctgtggccttgccgaagaa

SEQ ID NO: 372287 - DNA, 75 bp, Homo sapiens
ccgcccagttggcccagaggatctcttctaacatccagaagatcacacagtgttcaggacccagtgctccataaa

SEQ ID NO: 372288 - DNA, 100 bp, Homo sapiens
gaaccagttggtggcctgggcagcctgctggaccctgccaagaagtcgcccatcgcagcagctcgattttactatgagcagcgattactacggaaggtct

SEQ ID NO: 372289 - DNA, 75 bp, Homo sapiens
gttgctggccgagcctggcctgggccgcgtccatcacctggcactcaagggtgcaacaccggaggatttcagcaa

SEQ ID NO: 372290 - DNA, 90 bp, Homo sapiens
ataaaactgaccatagccagagaacagccctccatcttgcagcccagaaggttgcccccaagtttcctggcagtgtgtgatactgaggag

SEQ ID NO: 372291 - DNA, 100 bp, Homo sapiens
taagtggaagccagaagaggaggaaaatgttttgccacgtggatgtgaagatttcctctaaaaggagaatggtgttgaacgcgtgtgtcctgagagcctg

SEQ ID NO: 372292 - DNA, 100 bp, Homo sapiens
ctttgaaacggtcaccatcaaaattgcaccgaacacacctcagctggctgacattattgcaacagggtacctaaaacagatccaggacctgcccccaact

SEQ ID NO: 372293 - DNA, 98 bp, Homo sapiens
gaaaaactggaccaaattagacagagaatgcagagtctggatgagccatggacggaagaggagggagatggctcagaccacccatactacaacagcat

SEQ ID NO: 372294 - DNA, 100 bp, Homo sapiens
accatgtcggctttcgacaccaaccccttcgcggacccagtggatgtaaaccccttccaggttttgtagtgcatccctgagcatgagcacagaatgaagc

SEQ ID NO: 372295 - DNA, 98 bp, Homo sapiens
agacacgctgattagagcgaagagagagaaagcccagatgaagtggctgtaattgatgaaattcaaatgattagagatccagccagaggatgggcctg

SEQ ID NO: 372296 - DNA, 82 bp, Homo sapiens
cggcgaggagaaccaactggtcccgaaagagattagcctgaggcctgctcagtcgttcctaatgaataaaaatcaagtgcca

SEQ ID NO: 372297 - DNA, 90 bp, Homo sapiens
ggagtcgaaggccgtgaggtatttttctaaggacatggacatcttccagcaacagatctcgagaagacagctggctaaaatccttatttg

SEQ ID NO: 372298 - DNA, 100 bp, Homo sapiens
ttcaacagaagagtgagagatggaacccgaagaagaaaggattcgttacagccagagattgaattaatgagtttgaagaagctgtcaatttctttacttg

SEQ ID NO: 372299 - DNA, 100 bp, Homo sapiens
cgtcagctacaatgggatcttggggcccgagtgtggcaccaagtacctgctcaacctcaacctggagcctttctctgcatgggcctcctacatgaccaac

SEQ ID NO: 372300 - DNA, 80 bp, Homo sapiens
agcagcttccaggatcctgagatccggagcagccggggtcggagcggacacatcatctcagagttggagcacctgacgtt

SEQ ID NO: 372301 - DNA, 100 bp, Homo sapiens
tttgcaaaagcacgggagaaagtgcccaaacttcacagcattagggacaggaatggaacacacttggatgcaggtcacagggattatggacccagaacag

SEQ ID NO: 372302 - DNA, 100 bp, Homo sapiens
attggggtgggagagcggccgccgaggggcccgcagtagctgcgctcccggggaaggagccccacagtccccaggtagctacagcaagctgggtagcagg

SEQ ID NO: 372303 - DNA, 73 bp, Homo sapiens
atttgatgatgataatgtaatggctttatacaagaagattatggggctgcgtattgtcagtttatggacatgc

SEQ ID NO: 372304 - DNA, 90 bp, Homo sapiens
gatggattaatgggtagtcccggtttcaaggacttgcaattgtgaccaaatatattacaaagggctggaaagaagttcatgaattgtata

SEQ ID NO: 372305 - DNA, 50 bp, Homo sapiens
ctctgttccaaatgctttgctggaactggagaagatgatgactatgttga

SEQ ID NO: 372306 - DNA, 75 bp, Homo sapiens
tccaaacctcgcacgcccaggaggagcaagtccgatggagaggctaagccaaaagatacagatattgtggatgaa

SEQ ID NO: 372307 - DNA, 100 bp, Homo sapiens
cctgtgggacgccagtcaccagcaggagcagccaaccagcagcagccatcatggaggttttggcacaaataccagtgggaatagtatttttggaagtaaa

SEQ ID NO: 372308 - DNA, 75 bp, Homo sapiens
agatcacagaccatggtctcagattggcacagcaacgaggggacagtgaggacggaagcccaagtggcacaaatg

SEQ ID NO: 372309 - DNA, 74 bp, Homo sapiens
cctgcttactgcttcattatggattatacagtttttcagaagaagtgaagtcaagatgaagaaccatttgcttt

SEQ ID NO: 372310 - DNA, 82 bp, Homo sapiens
gcaagcggaagctgcccttcaccgcgggcgccaatggggagcagaaggactcggacacagttttccaagagataacttcacc

SEQ ID NO: 372311 - DNA, 100 bp, Homo sapiens
gggggtcttcctcctccgccgttgacaggcaggtcttgacgagccctgcccgggccgacgcatgcggaggatggaaacacttgcccggcaatgtctctgg

SEQ ID NO: 372312 - DNA, 100 bp, Homo sapiens
tgacggaggagcttgtaccaccgagagacaagagagacacctccaacttcgacaaagagttcaccagacagcctgtggaactgacccccactgataaact

SEQ ID NO: 372313 - DNA, 100 bp, Homo sapiens
gggggtggcgctgggagcaacgggagtgtcctggacccagctgagcgggcggtcattcgcatcgcaggtttggtgcacctcgatttggaggaagtagggc

SEQ ID NO: 372314 - DNA, 100 bp, Homo sapiens
gacaaaatggcgaagatcgccaagactcacgaaggttgatgataattagaagcatgctttccactgaacttcccgacaacatttgttatgcagaatgtct

SEQ ID NO: 372315 - DNA, 50 bp, Homo sapiens
ccttcttctgcatgtctccccgaccccactgaaaatcggactgttcaact

SEQ ID NO: 372316 - DNA, 124 bp, Homo sapiens
caatgacatcttcacaaacgaggatagaagacaaggtgcggtggtcctccatgtgctctgtaaacgttaatggacaccagaacggctactgcagagctgggctggacggccaatcctgcgtccg

SEQ ID NO: 372317 - DNA, 100 bp, Homo sapiens
gctaaatgggggcctctccagggagtgctctgttcacggctccatcgctgttatcccaggacatcaaagctctgcagaaagaactcgagcaatttgccaa

SEQ ID NO: 372318 - DNA, 71 bp, Homo sapiens
ctgctctgcctgtgatgtcgagaacactggagccatgggaccacaccaccaccaccacaaccaataggcca

SEQ ID NO: 372319 - DNA, 76 bp, Homo sapiens
cgatagcccaagagatgaaggcaaagcaagaaacctattggaattcgagacttaattaatgaagctttgcatcgag

SEQ ID NO: 372320 - DNA, 98 bp, Homo sapiens
cgcgtgcgcggggccgggtccgggagccccagggcagccgccccgccgagtcgcaggaaaggggactaccacaggtatctggcagaatttgccacagg

SEQ ID NO: 372321 - DNA, 100 bp, Homo sapiens
tgtttgaagattccttccaacagcaaactgaaaccgtgtcagttcagtcttcggtattggggaagggtgtaaaacatcgacccccaccaatcaaacttcc

SEQ ID NO: 372322 - DNA, 74 bp, Homo sapiens
atctggacaccacacacatcatcagtctgatgccacttcaaatgaacaacaagagcttttctgtcagaagttgc

SEQ ID NO: 372323 - DNA, 98 bp, Homo sapiens
ccaagaccgctgcagccgctggctgaattatgatgcatcattatcacagaagaaattcgtgtctatagcttttaaggacttgattacatcattttcaa

SEQ ID NO: 372324 - DNA, 83 bp, Homo sapiens
cgcgagtcggcgcgcgggacgaaggcaccatgactcctgtgaggatgcagcactccctggcaggtcagacctatgccgtgccc

SEQ ID NO: 372325 - DNA, 82 bp, Homo sapiens
gacaaccacgaggaggccaccctgggggcgtttctcatctgtgagctctgccagtgtcttcctgggtctgcaggtccagccg

SEQ ID NO: 372326 - DNA, 100 bp, Homo sapiens
agagagaagactgtaataatggcgaaccccctaggaagataataccagagaagaattcacttagacagagtttcgctctgctgcccaggctggagtacag

SEQ ID NO: 372327 - DNA, 88 bp, Homo sapiens
gaggaggaggattcagggaataggagctggggagcccttctgcgccacagtggcctggtttgctttcgaccctggctcggcgcactcg

SEQ ID NO: 372328 - DNA, 82 bp, Homo sapiens
aagaacatttccatcaaaccctgagagctttattaccagacatgatctttcagaacttcaaagatatccgatatcaaaatga

SEQ ID NO: 372329 - DNA, 98 bp, Homo sapiens
tcccaatggcaactatgtttggatgttggatctacactttctcaagcactgtgatcttcaaatgtagctacagcaagctgggtagcaggcagatccaa

SEQ ID NO: 372330 - DNA, 101 bp, Homo sapiens
gagaggagttgagaacatctctgttgacattcattgtggtcagaagagatcaattctacagaaatttccagtggttctgttgaggctttatggaattcagc

SEQ ID NO: 372331 - DNA, 100 bp, Homo sapiens
gagagaagatgtgaagtatggcctcgtcccggtcatctgggcgtgcgggtcccgggttttgatcgcgcgtttgtgtagattgggaatctatatatgtgac

SEQ ID NO: 372332 - DNA, 100 bp, Homo sapiens
tagcgcctggcctgcgcgccgctgcccgcgccacagataaccgtctcctcaggaggaatgttggttcagaaactgaacaccaatgatctccagtccgaaa

SEQ ID NO: 372333 - DNA, 109 bp, Homo sapiens
gctgaagagcgacaagccgctggcagccgcggatctcaccgccgctcaggattggcggcagtaagcacacaatgaatgatcacctgcatgtcggcagccacgctcacgg

SEQ ID NO: 372334 - DNA, 82 bp, Homo sapiens
gggaaatggcggagtatctggcctccatcttcggcaccgagaaagacaattaattggccttggtcctcacagctccaaaaag

SEQ ID NO: 372335 - DNA, 75 bp, Homo sapiens
cctttcagaaaacaaagaatttgccagatgtttgtttgcaatggattttggataaacaagatctgttgaaggagc

SEQ ID NO: 372336 - DNA, 73 bp, Homo sapiens
acagccgcctgcgggagcaggagcagtgcttcgccgtggagctggccatgggcaagatgatggagcaggggcc

SEQ ID NO: 372337 - DNA, 100 bp, Homo sapiens
ggctgcaggggtcagtgatggagctgcttcagctttctgaaacaaaggtcttcactgcctcatctgctccagcagagaatcacatcttacctgggcaaag

SEQ ID NO: 372338 - DNA, 50 bp, Homo sapiens
caccagttggctgcacaccagtgcgtctaatgctagtgttggcacctgtt

SEQ ID NO: 372339 - DNA, 98 bp, Homo sapiens
tgagcgcccagcacttggagcgtgaggaagcctgacctctcgggacacacccagccctgtggacccagacaccgtggaggtgttgatgacctttgaac

SEQ ID NO: 372340 - DNA, 90 bp, Homo sapiens
gagcaccaaaacacactggaaacaaacagtatttctactggaaaaaccattttcagttaaagcaggttgtgctgttggatgagagttcag

SEQ ID NO: 372341 - DNA, 75 bp, Homo sapiens
aaacaaaatgtcaacaaattgatgggttttgcacactagggaccaagaagccctcggggacactgctgagaaaag

SEQ ID NO: 372342 - DNA, 75 bp, Homo sapiens
gagaggacgggactgccaagagacatgttagaaggacaattggaagctgaaggtgttcctgaagtatctgaaaaa

SEQ ID NO: 372343 - DNA, 71 bp, Homo sapiens
cgtggaccacaggccctcgttgcccagatcagcccatgacccatcgagaaactgcacctgtttcccagcct

SEQ ID NO: 372344 - DNA, 73 bp, Homo sapiens
ggcgacatactacctctggccccgagatcagaatgccggtcccttaatatggactttgaaaatcaagataagg

SEQ ID NO: 372345 - DNA, 106 bp, Homo sapiens
ttcaatgatgggaaggtggatcccgccgggaggtactttgctgtggtggtcgtggtgacaggactggccgctatggagccactgaccgctcgcaggatgatggtgg

SEQ ID NO: 372346 - DNA, 75 bp, Homo sapiens
atccagacatgatcaaagccatcaaccagggcaactatggctcctggtaacgtttttatccatggatgacttgct

SEQ ID NO: 372347 - DNA, 100 bp, Homo sapiens
tgggaaccgcctgggaactccgccatgtcatccacttcgcccaacctccaggaaaacctcacagcacgggtagctctgaacggattcagctctcaggaat

SEQ ID NO: 372348 - DNA, 82 bp, Homo sapiens
ccaggactctgcgactttacatatgtgtcacaaagatgtctacacggaactgccagggaatggactcagtgatcaaacccct

SEQ ID NO: 372349 - DNA, 90 bp, Homo sapiens
ggaacccgtgaccaagtggagccccaaacaagtggtggactggactagagcttacagttgaacatgagtcttcttatgattagtgagaat

SEQ ID NO: 372350 - DNA, 49 bp, Homo sapiens
atcgggctgcatggctggcaaaagttagtactccagtagttaagcaagg

SEQ ID NO: 372351 - DNA, 90 bp, Homo sapiens
ggccccacgagtgggaggtgctgagccgctcagtatgtgccaagtgctctctgctgccccagcagagccagtatcctgacaggaaagtac

SEQ ID NO: 372352 - DNA, 100 bp, Homo sapiens
atttgaaaacaagtggaatagtgctgtcttccttgttctttattggtgaaaacatgaatccagatggcatggttgctctattggactaccgtgaggatgg

SEQ ID NO: 372353 - DNA, 139 bp, Homo sapiens
attcgcttctccctggacaacaggagaggcttctacagccaggacctgcccccaggagcctctcagggtggaatgcagtagccctctgggcctgggatattgtggttgataactgtgccatctgcaggaaccacattat

SEQ ID NO: 372354 - DNA, 83 bp, Homo sapiens
ttctgatttataagaacagggtacgaatgaatacctttccatggaatcacatgcagcccaactacagattcttatggaattcc

SEQ ID NO: 372355 - DNA, 83 bp, Homo sapiens
cgggggtcggtgcctggggatcctgtccgcatccactgcaacatcacgtggatgatctcttcagggaagcagatatcgaaccc

SEQ ID NO: 372356 - DNA, 82 bp, Homo sapiens
cacttttggaacttagacgctaattctctgctacttattcaagttgacacgatgcccttcacactccacctgaggtcccgcc

SEQ ID NO: 372357 - DNA, 98 bp, Homo sapiens
ggagttcgtctcttacgtctgcggaagtgcagctgcctcagttcttagcgcaggggctaatttttaggttcaagttcctcatgcttatcaccttggcc

SEQ ID NO: 372358 - DNA, 50 bp, Homo sapiens
cctggtacctggaagctgtgtgcccaggtcctggtgcttgatggtcgagg

SEQ ID NO: 372359 - DNA, 75 bp, Homo sapiens
accacaacaagcaagcatgcagcttactgcttgaaagctcacggacacagacctaattaaacagtgtatagatga

SEQ ID NO: 372360 - DNA, 75 bp, Homo sapiens
gtaactgtcctccacatattgagaatatttcctgcaacttcgccacttaaaactctaccacgaaggtatccagaa

SEQ ID NO: 372361 - DNA, 98 bp, Homo sapiens
actttctggcttttgaaaggctccttcttcaggaacttggcattagaattcctcgaccactaggacagggaccaagcagattcatcccagaaaaggag

SEQ ID NO: 372362 - DNA, 80 bp, Homo sapiens
agtagaaaaagttcttgggacaaacttcatttgatgatgattattccccaccttctaagagacaaagaccaacgagccac

SEQ ID NO: 372363 - DNA, 75 bp, Homo sapiens
gggacacctggttccagctgcagcacgtggacgctgactcggaagtgcagggcaccggcagaagctggaggacca

SEQ ID NO: 372364 - DNA, 60 bp, Homo sapiens
ctcagcgagaacctcaagagagtggtcccattttcagtgcccaagatccccctggtattc

SEQ ID NO: 372365 - DNA, 100 bp, Homo sapiens
tgtccagtgcgggccatcaagtgctgtttgtatgcacgacttgaagacacgcacttatcattcagtggcatttaaatcaaacggtattgagatggattgg

SEQ ID NO: 372366 - DNA, 75 bp, Homo sapiens
tggagcctcagttggaagcagccgatccagcctgcggagcctgtggggcagattctgaggttgggaccaagaagg

SEQ ID NO: 372367 - DNA, 80 bp, Homo sapiens
cgatccagcctgcggagcctgtggggcagtgcgaccaagaccagtgcattcagagcaccaaattcgttttgcaggctgca

SEQ ID NO: 372368 - DNA, 119 bp, Homo sapiens
ggtgcctctcacaccacctctctgatcatcttcttcagctccctttttggaagctcctcttctcattcctcaggaaaggccattgctgctctggagctgtgtgtgtgtgtgatgactaa

SEQ ID NO: 372369 - DNA, 100 bp, Homo sapiens
cgtcaaagtgcacagcttccccacactcaagttctttcctgccagtgccgacaggacggacaatgaagtggccgccttgcagccccccgtggtgcagctg

SEQ ID NO: 372370 - DNA, 101 bp, Homo sapiens
atgacgaagacatgacacttacaagatggacagggatgataattgggcctccaagattgtggaagctgatcgaggaagcctaagcaggctctgtgaagtgg

SEQ ID NO: 372371 - DNA, 102 bp, Homo sapiens
gagggctacagcaacgtgggcttccagcttctcagcagtggaagccgatacctcattcgatcagatgatatgatagaaacagtttacaacgacagaggagag

SEQ ID NO: 372372 - DNA, 50 bp, Homo sapiens
gccccctcttcgcctcctccagtgcgtcagcatttatcccgtttgccaac

SEQ ID NO: 372373 - DNA, 83 bp, Homo sapiens
aggctcatatgacattaacagacaagacacttttcagaaagacaggttacattgattacccacctagtacaacatcttacggg

SEQ ID NO: 372374 - DNA, 50 bp, Homo sapiens
taagcctggctgagaaacgcagcctgcgcattttgaaagcgaagcagaag

SEQ ID NO: 372375 - DNA, 74 bp, Homo sapiens
aggttcttgcagtctggaccctgcaacaaatccgctcagagtccaccctgcacctggtgttgcgcctgcgaggt

SEQ ID NO: 372376 - DNA, 75 bp, Homo sapiens
taaacagaaccattcttatcctggatcttcagcctgttaaacaagaaaacgaaaaaccccttccagaaaacatgg

SEQ ID NO: 372377 - DNA, 50 bp, Homo sapiens
agcggagggagccccagacacgcccccacaggtgccaagaggacccttgc

SEQ ID NO: 372378 - DNA, 100 bp, Homo sapiens
ggattttgatggctgtcccctggagccccactgccctgaggctctggtaggctgtgggcagatagagaatctcaggccctcaggaaagcagagagcttga

SEQ ID NO: 372379 - DNA, 97 bp, Homo sapiens
tgaaggtccggggcttgccctggtcttgctcggccgatgaagtgcagaggtttttttctgggggctgaggccatggttctggagagcgttatgtttg

SEQ ID NO: 372380 - DNA, 100 bp, Homo sapiens
ggacggacaagcacagtcttcggaaggccataggaaaaggatacagagtagagtttcatgaacctgaaacttggtggaaatttgatcctgaagaattaga

SEQ ID NO: 372381 - DNA, 90 bp, Homo sapiens
tggaagctggaaactcctggatcaaggccctggcagattctgtctggtgaccaagaatatggcccaggtgaccaaagccctggacaaggc

SEQ ID NO: 372382 - DNA, 98 bp, Homo sapiens
tggaggaagctgcagatgtactttgtattttacaagcaggaaacatgatgaaagtattgagggggcatcagaattgggtgtacagctgtgcattctct

SEQ ID NO: 372383 - DNA, 83 bp, Homo sapiens
aggggatgtcctgcacatgcactacacgattgccaaaatgctttggagtttttaactgaatctaagaaaagtccaaaatagat

SEQ ID NO: 372384 - DNA, 100 bp, Homo sapiens
gcagatcgggagcgcaaggtcgccctcaaggccatgatcaaaacgtcccaggtgtgacaccttcagcaggtctcagggaagatggcagccctaggggaca

SEQ ID NO: 372385 - DNA, 82 bp, Homo sapiens
ccatgcgacctctccatgcagtcagtggaagtggcggtactccaaagattcaggtttactcacgtcatccagcagagaatgg

SEQ ID NO: 372386 - DNA, 50 bp, Homo sapiens
catgacaaaagggtttacttggggtgtatatcatagcacatgttccagtg

SEQ ID NO: 372387 - DNA, 80 bp, Homo sapiens
ccaccccgctgagctggtcgccacctggcgacccttcccctccagtcacctgggtgctggagaatctggtaaaagcacca

SEQ ID NO: 372388 - DNA, 89 bp, Homo sapiens
tagaaggttgtgaaaaaactactaggatcacgcggcatgtattgagtttgcaatggattttggataaacaagatctgttgaaggagcgc

SEQ ID NO: 372389 - DNA, 75 bp, Homo sapiens
cctgtcgtccgttctctcaggctcccgttcagatcatggaagggaagtggttgctgtgtatgttactggtgcttg

SEQ ID NO: 372390 - DNA, 100 bp, Homo sapiens
tcagcgagtgcgacagtgttggcgtggcccatcgctgtcttctgtgctgaacgagctgcccagtgctgccacccttcggtaccgagaccctggggtgctg

SEQ ID NO: 372391 - DNA, 97 bp, Homo sapiens
ggacaatggggacccgggacgacgagtacgactacctattcaaaggtcaaaatgcagatcttcgtgaaaacccttaccggcaagaccatcacccttg

SEQ ID NO: 372392 - DNA, 87 bp, Homo sapiens
aaagtgcgcagcctgcaagattgtggtgcacacgccctgcatcgagcagctggagaagttaagtgggcagaccaacatccacctcag

SEQ ID NO: 372393 - DNA, 82 bp, Homo sapiens
gtcggattacactcctgcttccagacgacaagtcggtagtgaagcgcgcagtggcgagccagccagactctgtggatgcagc

SEQ ID NO: 372394 - DNA, 76 bp, Homo sapiens
ttaacggaccttttaccatgaatagttctactccttctacaggtgtgtatggagtgggaatagctttgcgaaaaat

SEQ ID NO: 372395 - DNA, 100 bp, Homo sapiens
tcgaccatgtttggatttcttacaagaagtcacaagagtcattgcagttttcagtagaggtgtacttctgagaagtggcttcttgggtcttcatgcagcc

SEQ ID NO: 372396 - DNA, 83 bp, Homo sapiens
ctcagttggaagcagccgatccagcctgcggagcctgtggggcagcctcttcgagcactactgctactcccggggcggcatgc

SEQ ID NO: 372397 - DNA, 50 bp, Homo sapiens
gcgacctatccagaatgatcaaggtctcggccttgaaaaataaactgaag

SEQ ID NO: 372398 - DNA, 75 bp, Homo sapiens
attcatcaaaagcaacaaacatcgtatgatcatgtttttagatgaacttgggatcgccaaactttggcatcagag

SEQ ID NO: 372399 - DNA, 100 bp, Homo sapiens
ctctacctggcctacttcgtgcgtgagcgagccttgcaccagaatagagagatgatagacccagacaagttctgcagcctctgccatgcaactttcaacg

SEQ ID NO: 372400 - DNA, 89 bp, Homo sapiens
tttgcctccccagatcttcaatgaggagcagtactgtgggaaatgcactcggtgatggaaagagagccactattctgaagaacacttgg

SEQ ID NO: 372401 - DNA, 96 bp, Homo sapiens
cgtctacaatggagtcgagtctagaattcacacagagccacctagtgttgatgggaaccattttcagcatcctgctggtgactgtcatccttatgg

SEQ ID NO: 372402 - DNA, 76 bp, Homo sapiens
tgcttctcaccgaaggtgttcaccagcacactgctctgccagtaatctatgccagcaattatgacaatgttagcag

SEQ ID NO: 372403 - DNA, 90 bp, Homo sapiens
gacctgcacaaacccactggacaccttcgtcccctttgatccctgtgtgctgaagaggtcaccacgtacttgaactggctggttcggatg

SEQ ID NO: 372404 - DNA, 100 bp, Homo sapiens
gctctcgccccaacccgcgcgccagatggtcagtaggacagaaggtaacattgatgactcgctcattggtggaaatgcctccgctgaaggccccgagggc

SEQ ID NO: 372405 - DNA, 100 bp, Homo sapiens
gcagcaggaaatgttaatgcagttgataagcttttggaagctggttctagcctggatatccagaatgttaaggacctgatcccaaccttgaagaaagtcc

SEQ ID NO: 372406 - DNA, 51 bp, Homo sapiens
cttctcgacagccttttactgtgaacagggagaatgaagttgaagaggtaa

SEQ ID NO: 372407 - DNA, 100 bp, Homo sapiens
ggataacgacaagaaaaacaatcgcttcaatgatgggaaggtggatcccgccgggaggtactttgctgaggagcccaaggtgggcatcaagaccatcaag

SEQ ID NO: 372408 - DNA, 75 bp, Homo sapiens
cgattataagaagagaaactcagcgctggggaagaagaatcgagagctccagatcatgagaaagctagatcactg

SEQ ID NO: 372409 - DNA, 108 bp, Homo sapiens
gacgggactcacccgtgcctggcggccgccacccaaacgggcaagatgttgatcttgtctcagaatattgcccaactggaggcccaggtggaaaaggttacaaaggaa

SEQ ID NO: 372410 - DNA, 97 bp, Homo sapiens
gtggaggctctttgaagttgggttcaggagtgtagaattggcaaagttattgccagcttcctgggtatttgaagtataccatacaactgttttgaaa

SEQ ID NO: 372411 - DNA, 88 bp, Homo sapiens
ctgatcatcttcacctactacaccgcctgggtgattctcttggcttggcttggactcatcgtcaacagcagcagcatcatcatcatca

SEQ ID NO: 372412 - DNA, 100 bp, Homo sapiens
aaacttttgattttgatgctgagtacattgataggaactttgctgccacaatacctcggcccttctcagttcgctacgacccatacacccaaaggattga

SEQ ID NO: 372413 - DNA, 100 bp, Homo sapiens
tggtgatctctggtgcaggaaaaatgttcactgcaggtgctggagaatctggtaaaagcaccattgtgaagcagatgaggatcctgcatgttaatgggtt

SEQ ID NO: 372414 - DNA, 124 bp, Homo sapiens
tgaaacagctgcaaaggttgcattgatgaaattaaagatgcatgctgatggcgataagtcattaccacagcgtggtcctcagatgcctttgatattcctctatgtggttgatacttgcatggaa

SEQ ID NO: 372415 - DNA, 75 bp, Homo sapiens
ggtgattgaggacaagaccatcgagctcatgaaatggtggagtcaatgaagaaagtagcagggatggatgtggag

SEQ ID NO: 372416 - DNA, 75 bp, Homo sapiens
gcgtaggctacatggcttaccagaggtttatgatagttctcaatctcatgagagcttctcagactggcgaggtga

SEQ ID NO: 372417 - DNA, 78 bp, Homo sapiens
gggcaactacagcgtcaatggcaactgcgagtggctcatcgaggatgttggccgatgatgcagaagcaggtgccgagg

SEQ ID NO: 372418 - DNA, 100 bp, Homo sapiens
gagccgcagtgggtcccggacaaggaggtaactgttcagtcctcacctaattttacacagcatgtgagggagcagagcctggtgacggatcagctcagcc

SEQ ID NO: 372419 - DNA, 83 bp, Homo sapiens
tttcagcaagctgtgaggactagtcatggcagaagacctccagcatgtaaggaggaatcaagaagctgtgacatattctgagg

SEQ ID NO: 372420 - DNA, 100 bp, Homo sapiens
tgcatgcagcggttcattaaaatcgatggcaaggtccgaactgatataacctaccctgctggattcatggatgacatcttctccactggtatccaggcta

SEQ ID NO: 372421 - DNA, 100 bp, Homo sapiens
aaggccataatgggacaatagagtttaccagcttggatgcccacaagggagtaggtcagttggtggtgtgtactttatgctcctgtgtcatgaaaacaaa

SEQ ID NO: 372422 - DNA, 50 bp, Homo sapiens
gcgcgaatatcgtcatcgttagaagccaagtagcttccagcttacagcag

SEQ ID NO: 372423 - DNA, 74 bp, Homo sapiens
agctaatcttgtacttcaagaggaggaatcacgctcggaaacaatggaggctgggaggcggcagaatgcagcca

SEQ ID NO: 372424 - DNA, 85 bp, Homo sapiens
taaagaggctgcccagaaagcagttaacagtgccaccggtgttccaactgtttaaagttaatgttcgtgaagaaattgaagagtt

SEQ ID NO: 372425 - DNA, 82 bp, Homo sapiens
ggagaacaagcgaatggctgacagcctggcctccaaagtcaccaggctcaaatcgacaatgcagatcttcgtgaagactctg

SEQ ID NO: 372426 - DNA, 135 bp, Homo sapiens
attcccagaagaggcagcatgcggaaggcattgctgggagcctgaaaactgtgaatggacccagatgatgtggtaccagttggccaaagaagagcctggtgttggtgcatgtgctttggactagcatttatgctt

SEQ ID NO: 372427 - DNA, 87 bp, Homo sapiens
tggcaaaggccgagtacctctgccggataggtgacaaaacaggtgatttggcttctgcacagttaggaggagcaccaaaccgatggg

SEQ ID NO: 372428 - DNA, 90 bp, Homo sapiens
aatgctaaatttgtgaatgctgtgtatgataccttacttaatactgtctgtctctcctgccagagtgtatacaccagttggacaaggacg

SEQ ID NO: 372429 - DNA, 75 bp, Homo sapiens
gaaggatgtgcatgaaggacagcctcttctcaatggcatcaagcatgatggaaccatgtgtgatacctgccgcca

SEQ ID NO: 372430 - DNA, 100 bp, Homo sapiens
caccaccctcccaccctccttcctccgtgtggacgatagagccacatccagcaccacggacagctcccgggcgactattgcagatatcatccgaacatgt

SEQ ID NO: 372431 - DNA, 100 bp, Homo sapiens
atccggggccaccccgtgaccatgcgcaccatcacctatagcatcaacttcttctccaaggtgaccctggcaaagatgagagtgcacatttcgtcctgcc

SEQ ID NO: 372432 - DNA, 98 bp, Homo sapiens
tcatcatgaccttccagaattacgggcaagcgctgttcaaacccatgaataatctatgccagcaattatgacaatgttagcagaccatgcagctcgtc

SEQ ID NO: 372433 - DNA, 96 bp, Homo sapiens
aagtgctggagttacagatgtgagcctctgtgctcagtccatccttggctgttcaagtgtagagatgatgatgtgcctgcagatatggttgcagaa

SEQ ID NO: 372434 - DNA, 76 bp, Homo sapiens
gatacccaaggcagacattcaacacctttacatttagcagtatcaccttttgccatgatagcatttctttcattgg

SEQ ID NO: 372435 - DNA, 101 bp, Homo sapiens
accagaaactcatcccagagttcattaagaaggctgaccggttccctgatgtgttacctgcttctgctactgatccaaactgcagaacttctcattcatcc

SEQ ID NO: 372436 - DNA, 75 bp, Homo sapiens
gccgtgtagcgtcgccgttactccgaggagataccagtcggtagagggtacaagaactcggataatgataaagtc

SEQ ID NO: 372437 - DNA, 140 bp, Homo sapiens
gaggaccctcaggccggggcgagagcccggcacagcccggaccgaaattttgccgctgccttagagcgttagacaggtacaaaggacctccagaccagagccagccagcagcaaaaagagcatggagctgaggagtacag

SEQ ID NO: 372438 - DNA, 99 bp, Homo sapiens
agttattgatctcattcgactggccattgctttacagacacgctaccaggaaatgcctgaaccaaagttcatgtatgggagtcactactcttccccggg

SEQ ID NO: 372439 - DNA, 98 bp, Homo sapiens
ggcatccaggacgttccctcccccgatccaagttggaattagcatcctctcgggggaatactcccccagttgcaagaggcgcaggaccgtggaagact

SEQ ID NO: 372440 - DNA, 100 bp, Homo sapiens
agctggtgtctggctctgagctcctgcagctcgtcagcccatttctggggattcctggttttcaagcctgagctgatctctcggctggagcagggagaag

SEQ ID NO: 372441 - DNA, 100 bp, Homo sapiens
gcgctggagcaacagctccccacactgcaccatgagctcagttggctgcaggagcagctagcacagatacttggcatatcgaaattttatgattgacacg

SEQ ID NO: 372442 - DNA, 111 bp, Homo sapiens
gaggagccatcagcttcagctccagctccgctctcttcggctgccccaatccccggcagctctctcagtgaggatgaggatgatgaccttcagtatgccgatcatgattat

SEQ ID NO: 372443 - DNA, 51 bp, Homo sapiens
gccgcctggtcgtgggactcggcatcggtatttcagtgtctgtagacaaga

SEQ ID NO: 372444 - DNA, 96 bp, Homo sapiens
aaggtttctcctatcagggtcgggcttccaggaacaggcctttgagagcagccagaagtacaaagaggggaagtacatcattgaactcaaccacat

SEQ ID NO: 372445 - DNA, 75 bp, Homo sapiens
gaacaccaaagattgtctctggcaaaggactggacctacagagacatctgggattttctgcgtcagctgtttgtc

SEQ ID NO: 372446 - DNA, 82 bp, Homo sapiens
cggcgcgcgggagcgctacggccccaacgcggaatcggacatgtccaaaccaccgtgttacgaagaggcggtgctgatggca

SEQ ID NO: 372447 - DNA, 82 bp, Homo sapiens
cataaaatcaaaggaggagctccgtcacctcagactgcctacctaccaagaactggaacagctagtatgttcaacacaccag

SEQ ID NO: 372448 - DNA, 80 bp, Homo sapiens
cgacagagccaaaatcagagctggaacctgaggagagaggagccttcacgtaaatgggtccagtcatgcctcccagtaag

SEQ ID NO: 372449 - DNA, 75 bp, Homo sapiens
tctatgtacctgcagaacccaaattggcgtttgtcatcagaatcagagggcagacaccacccatcctttaaccaa

SEQ ID NO: 372450 - DNA, 51 bp, Homo sapiens
gcctgtagctcgcgggcctcgcaggtagctacagcaagctgggtagcaggc

SEQ ID NO: 372451 - DNA, 83 bp, Homo sapiens
gcagaaccagatccgggagcacgtcatcgccatcgaaggttcttgcatacactgagggacttcacggaaaatggatgttcagc

SEQ ID NO: 372452 - DNA, 100 bp, Homo sapiens
tgcggaacaggacgccctctgatgtgaagctttgttctaagaatatttgtttcatctagtttatgagtccaaatgatatagactgtaaatgtcacagcag

SEQ ID NO: 372453 - DNA, 87 bp, Homo sapiens
cagacggattcatttagagctgcggaacaggacgccctctgatcagcctcccgcgacgatgcccctcaacgttagcttcaccaacag

SEQ ID NO: 372454 - DNA, 82 bp, Homo sapiens
cgcaaccattgacgccatgtcgggttattcgagtgaccgagaccgcggccgggaccgagggctgtgacaaaccctgtgccca

SEQ ID NO: 372455 - DNA, 98 bp, Homo sapiens
tccctttaaggaggctcttcttagggaagctgagctaaggaaacagaggtggtggtgctagagaatgaattgatgtatggggttccttttgaatttcc

SEQ ID NO: 372456 - DNA, 83 bp, Homo sapiens
cacacctccattggatttaaaagacagtcctcgtcagcactgactttcagctatggaatcggaatgcagtttattctactcca

SEQ ID NO: 372457 - DNA, 75 bp, Homo sapiens
gtctataagaagtagcctactgctaggcttcaggagggccatgctatgatagtggaagcttatccaaaataatag

SEQ ID NO: 372458 - DNA, 100 bp, Homo sapiens
cccgcccagttggcccagaggatctcttctaacatccagaagatcacacagtgttgttccaaaacatttctgaaaagctgcacatggaatgcaaagcaga

SEQ ID NO: 372459 - DNA, 100 bp, Homo sapiens
ggatgaccaccaccctcgtgtctgccaccatcttcgacttgagcgaagttttatgcaagagtttatgtggccgaggcagacaagtggaattaggccttgc

SEQ ID NO: 372460 - DNA, 98 bp, Homo sapiens
ggtggcccattcccaggcaggctgctaccgcccctccgcttccagacattctcagctgtcagctggaacagatggtgatcaaaatggacttgatcacc

SEQ ID NO: 372461 - DNA, 82 bp, Homo sapiens
aaggtcaaggaaggaaaaaaataagctggcttccagatctcattcgtcggttcggatccaagccagttctgtggtcagcaag

SEQ ID NO: 372462 - DNA, 83 bp, Homo sapiens
ctggcttcatctggtcctcataatcttacttatcctctaggtcccaggaatgaaggtggaaaggagactatggaaccaggatc

SEQ ID NO: 372463 - DNA, 100 bp, Homo sapiens
gaaccctgggggcaaggaggagaccccagggcagaggccagcgagtttgacctggacattgttgcagtcgtgaatgatacagtggggaccatgatgacct

SEQ ID NO: 372464 - DNA, 75 bp, Homo sapiens
ctcagcaacctgacaattctgtcgtgtcccgagacagaagagatgggtgatgaagaagttttctcctggttgaag

SEQ ID NO: 372465 - DNA, 80 bp, Homo sapiens
ggaagaagagaccactagaatctggaattgagattctagcttggggcttaagaaatatgaaaaacttccagatggcttct

SEQ ID NO: 372466 - DNA, 100 bp, Homo sapiens
catgccccaggtctggaatgcaaagtcaaggagcatggaatcccggcccctcaggagcagatggcccactgcgtgaccttggttcagctgtccatttcct

SEQ ID NO: 372467 - DNA, 90 bp, Homo sapiens
ctaaagacagcactgccaatggtgaaaggtgtagcagtcactcggcctacacccacagcatcgaccttgtgaacccagcgacctgactgc

SEQ ID NO: 372468 - DNA, 98 bp, Homo sapiens
ccgtggtccttctccatattcgagatgcacctgcttcccaaggcctgaaagctgagcatctgtatattctcatcggggtctcagtggtcttcctcttc

SEQ ID NO: 372469 - DNA, 113 bp, Homo sapiens
gatcgtgaccgagaccgtgaccgagagcgtgaccgagagcgcgaatatcgtcatcgttagaagtactgccaaatctgtcgaaagggagataatgaagaactgcttcttctttg

SEQ ID NO: 372470 - DNA, 50 bp, Homo sapiens
aggcacggcagcaaacgcctgaggattaaagcaaggagagccaatcatga

SEQ ID NO: 372471 - DNA, 100 bp, Homo sapiens
gaggggagaatctggtctcaatgacagtagagggacctcctcccaaagatgtggaccaaagaccggcgtgcgatgagagtgatgtctattgaacgtaaga

SEQ ID NO: 372472 - DNA, 144 bp, Homo sapiens
acacccccgtgccccgaagacataaatccctgagtgcccgggaggagccttaacaagcgcacggagccctcaaggaaatcatcgcgcacccagtcaccagcgttcgggagcctgtcgcagcgggaccgacggaatccggagcag

SEQ ID NO: 372473 - DNA, 90 bp, Homo sapiens
agcgacagcgcctcacgcacctgagccccgaggagaaggcgctgaggaggaccacggaggggtgatcgtgaacatcactgccaccctggg

SEQ ID NO: 372474 - DNA, 80 bp, Homo sapiens
cacaggaatgtcgaagcaaatgccatggacatgggatcctaagtgtgaacgtgaagtccccagccctgctgctgagccag

SEQ ID NO: 372475 - DNA, 83 bp, Homo sapiens
cgccgccccctccggcgtgttcatgcccccgggaatagcctaacatggcagaccagagacagcgctcactgtctacctctggg

SEQ ID NO: 372476 - DNA, 83 bp, Homo sapiens
cgcagaagtcgcgtgtctaggtgagtcgcggtgggtcctcgcttgcagttcagcgaccacggagatgagtatgatgtatgtgc

SEQ ID NO: 372477 - DNA, 100 bp, Homo sapiens
ctccttcttcaggagagcgccccagggcaagccccgctccggccaacaaggctctgccagcagacagccttggcacacaggcacaagggctggagcccag

SEQ ID NO: 372478 - DNA, 87 bp, Homo sapiens
cgtggaagcgtggccggcagcgtcccggacgaggaggaaatatgattccctgattcaggatcaggcccgggaactgtcttacctacg

SEQ ID NO: 372479 - DNA, 50 bp, Homo sapiens
gaaccttggcttccccatgcttgcccagggttattcctaattgtcagttc

SEQ ID NO: 372480 - DNA, 112 bp, Homo sapiens
gccgccgccgccgctgccgctgccgctgccgcacctccgtagctgactcgatctttaatctcatgaagtacgacagctacagccgcttcttaaagtctgacttgtttttaaa

SEQ ID NO: 372481 - DNA, 101 bp, Homo sapiens
aggtttgcgctgccatccgcaaaggctttctcgcttgtcaccttgccatgtggaagaaactgggacttatccagagggggctgcaggcgagcactctcgtg

SEQ ID NO: 372482 - DNA, 83 bp, Homo sapiens
gttacaagcagcaagtgcgcggttggggccactgcgaggccgttttaggatttctggtaggtcctactttaggacaagatgtg

SEQ ID NO: 372483 - DNA, 75 bp, Homo sapiens
caaaagatgtttgaaaagctggtgtgattcgtcatcgagatgttcgatcctgtcactatggtgtaatagacaaat

SEQ ID NO: 372484 - DNA, 74 bp, Homo sapiens
atgatctgtgctgggggtgatggcgtgatctccagctgcaaccaaacggggattcagcgtccgatcctttggaa

SEQ ID NO: 372485 - DNA, 99 bp, Homo sapiens
caagatcctcaagaagaagaagttgcgaaggatccccaacggggaggccaacgtgaagaaggtggcacctgtggaaatgaaacggagaaataagatcca

SEQ ID NO: 372486 - DNA, 100 bp, Homo sapiens
gtccatggcaaatgctggacccaacacaaatggttcccagtttttcatctgcactgccaagactgagtgagaagagaaggtgttcttagatcagaagatg

SEQ ID NO: 372487 - DNA, 80 bp, Homo sapiens
tccagctcctctgacagcgaagactccgaaacagtgcttagcgaatgccacagacggcgtgcggctagcagcccgcatcg

SEQ ID NO: 372488 - DNA, 83 bp, Homo sapiens
gtgagggtgtacaaatacccctttgaattaattatggctagttttgcggcctccaggtggtggatccaatttttcattaggtt

SEQ ID NO: 372489 - DNA, 95 bp, Homo sapiens
ggggaatgtttaagaattggagacactgtgacttgcgtctgtcagttcaaggttgacaggactgaggtgattcgcacctgcataaacccagtgta

SEQ ID NO: 372490 - DNA, 80 bp, Homo sapiens
cgtgagagccgcagtggatggctggaggtgcagggccaggaggaacatgagccccaccattgctctctctgtcttcagtt

SEQ ID NO: 372491 - DNA, 75 bp, Homo sapiens
ttggagacaaaactatgccagtttttagaacttcagccataaaaatgggcagaattttccttgatcatatcggtg

SEQ ID NO: 372492 - DNA, 100 bp, Homo sapiens
ttgaaagcgtgctccacaaatatttacagtcggaggagtactcggtgaaatcctgtcctgaagactgtaaggagagattaaacagattctagaaaatgaa

SEQ ID NO: 372493 - DNA, 83 bp, Homo sapiens
actcactccatagtccaggagttccaggttccgtgttctaagaacggaagcatctgggctggatggaatttagcatcaagcag

SEQ ID NO: 372494 - DNA, 96 bp, Homo sapiens
ggatcttgagagtgaagatctcgaaggatttcatagatgcttcctttaaataccaatattcgacttgcgtactcaaatggaaaagatgatgaacag

SEQ ID NO: 372495 - DNA, 149 bp, Homo sapiens
aagagctagagctgacactcggcgatgagctaagacgctgtttcagagcgtttgggtcctctgaggccccttgaccagaccccaagctaagtgaagctttagcctctaagctcaacatgtatgaagctttgccaggccctgctcctgaa

SEQ ID NO: 372496 - DNA, 82 bp, Homo sapiens
acgaccggatcctgaggaggcagctgcggtggcagctgctgagttctcggtgaagcactgtgacttctgccgtgttcaccgt

SEQ ID NO: 372497 - DNA, 101 bp, Homo sapiens
atcaaagtcagccgtgtggggtctgcaatggttaaaactctatgctggtcattcccttcaggatttggcactcaccaacatacccttctttcaagtgaaaa

SEQ ID NO: 372498 - DNA, 73 bp, Homo sapiens
catgatgtgcagaacccactccatttcggtgagatgaagggttatatggaaaagattaaaccaatggtgagag

SEQ ID NO: 372499 - DNA, 50 bp, Homo sapiens
ccgcgctgagggcgcccagctggatgcagaaagtagatgacattccatcc

SEQ ID NO: 372500 - DNA, 75 bp, Homo sapiens
tcccgcggacgccagggctgcctgctggtacctgcgcggaaacctgtttccctccaatcttgtggttgcagcttt

SEQ ID NO: 372501 - DNA, 99 bp, Homo sapiens
aacaaggcatctcctagtattgcatcctacagatgtgctgtaaacatcaaaagaagacggtgggatcaggagatggtggagctgacaggcagcagtgtc

SEQ ID NO: 372502 - DNA, 96 bp, Homo sapiens
tctttgtttcaagatattgacctgttacagaaacatggaattagcctttgtggaattctcacgaaatccaacagagagatttaaaacccttcctgc

SEQ ID NO: 372503 - DNA, 75 bp, Homo sapiens
ggaaaaggaggaacctcctctggaaatgaacactgggaaaaactgcttaaggttgaaaagagaaatttaagaaat

SEQ ID NO: 372504 - DNA, 100 bp, Homo sapiens
tagcagaaaggagctcatctgtttggagtccatttttgatggggatcccactagaggaatcccgttctgcttccagaagtggaagtgctcacggatcggg

SEQ ID NO: 372505 - DNA, 83 bp, Homo sapiens
tcgaagctctagaaatgaatgtttccatctcttcagagatgaaccaggctaaggcagctggataagcacagccaggccacagc

SEQ ID NO: 372506 - DNA, 74 bp, Homo sapiens
gttgcatttctccccctgtgttttgtgaagcataccctcggggaagtctgggtacagaagacatctgaaatgaa

SEQ ID NO: 372507 - DNA, 100 bp, Homo sapiens
gcgcagcgtctggtcactcgctctcctctggggactgcagagaagcaggacctcgggccatggataatcagacagctaaatggagtctgagcagctgttc

SEQ ID NO: 372508 - DNA, 100 bp, Homo sapiens
ccgagttctccagcctgctgcgcaggataaaaggcaaactcttcacctgatggccctgattcgtctcttctagggactcttgaagatggggacccaagtg

SEQ ID NO: 372509 - DNA, 100 bp, Homo sapiens
gcagtagacttctcacatctttttgtcacttcatcgtttgactggacagtaaagctttggacaactaaggcaggcattcaacaacatgttttgctgtacc

SEQ ID NO: 372510 - DNA, 100 bp, Homo sapiens
ttcactgtgaatgatgtcaaaatgtgtgtggaagcggcaccatgtactacagacggctcatccctcccctttgtcagtgtatagagggttctttggatgt

SEQ ID NO: 372511 - DNA, 100 bp, Homo sapiens
acttccagtgagagtgacacaggtcaggaagcagaatattccttatatggcaatgaacaccagggaaagtggcaaagcttcatccagtctaggtcttcag

SEQ ID NO: 372512 - DNA, 88 bp, Homo sapiens
gaatgcaaagatttggaaccacagctgtccctacgtatcaggttggaagggatacccacccaccatcccagggtctacaacatccaca

SEQ ID NO: 372513 - DNA, 75 bp, Homo sapiens
ggcgggcgcagctgctgtgacaggttttaaaatcaaagatgggaaaatcggagaaaattgcccttccccatggcc

SEQ ID NO: 372514 - DNA, 75 bp, Homo sapiens
gctggggctgccgccacggccgcccggaggttggcagtggcaatgacccctggtcagcctggagtgcctccaaat

SEQ ID NO: 372515 - DNA, 50 bp, Homo sapiens
tgcggatcctgctggtgggagaacactgtgtacagtgccctgggcctgag

SEQ ID NO: 372516 - DNA, 101 bp, Homo sapiens
ccgcttttccgcaccctgctccggcctcgactacggcgagcctgagcgcggcggcggcccacgcgcagcgacagggagagtttttggctttcacccccaac

SEQ ID NO: 372517 - DNA, 100 bp, Homo sapiens
cgggctacagctgccatgccgggcactattactgctacgtgaagttgatgtagaacattctcatgttcgatttctgggaaacctggtattgaacctgtgg

SEQ ID NO: 372518 - DNA, 100 bp, Homo sapiens
cttggatgctgcaggaaatgaagggtcttggttttatattcatccgttctggaaactgagaagcgagggtgacaataccggaacatgaacattttgcagt

SEQ ID NO: 372519 - DNA, 90 bp, Homo sapiens
acggccacactcaccactccatggccacacaggctgttcacggaagaccaggatgtagatgagggacttgtctatgacactgtattcaag

SEQ ID NO: 372520 - DNA, 75 bp, Homo sapiens
gggtaacaagatggcgaccgagacggtggagctccataagctaaagtttttcagaagaagtgaagtcaagatgaa

SEQ ID NO: 372521 - DNA, 100 bp, Homo sapiens
tccccgggagacggcaactacccaaccgtgtgggtgtgtttgtaggtcctgctgtactagccaccaaagcagctgctggtactaagaaatatgatcttag

SEQ ID NO: 372522 - DNA, 95 bp, Homo sapiens
aagagtcaaaacaaataagttatgctatgaggatgacaaactctggagtaattggagccaagaaatgagtatagcccagggccttgctgccgcca

SEQ ID NO: 372523 - DNA, 80 bp, Homo sapiens
gaggatctggtgtaccaggcgaagctggccgagcaggctgagcgatacgacgggatttgtcttggctgttactatgacac

SEQ ID NO: 372524 - DNA, 50 bp, Homo sapiens
caacagtcagctcaagaagctgcaggttctccaaggacataaaactttcc

SEQ ID NO: 372525 - DNA, 73 bp, Homo sapiens
agtggtcgcttcttctccttggaggaagacaatgtgtggcaccctggactacctgcccccagagatgattgag

SEQ ID NO: 372526 - DNA, 116 bp, Homo sapiens
agtaccggctgacctcgctgtacgccgagcacccaggcgactgcctcatcttcaagggcgtgatggtgggcatgggtcagaaggattcctatgtgggcgacgaggcccagagcaag

SEQ ID NO: 372527 - DNA, 76 bp, Homo sapiens
aagggataggagaaggatgtggactgcagtgctgcagtgccagattaacgtcttcaaggacccagttgctgatccc

SEQ ID NO: 372528 - DNA, 50 bp, Homo sapiens
gccgagcaggaggcgccatcatggtgctgaaggtcgccatcctggctgag

SEQ ID NO: 372529 - DNA, 100 bp, Homo sapiens
ttcgcttggtgtcctcctggcctcagcaacctgacaattctgtcgtgtcccgtgatgatgatgatgattttgatgatgaggaagctgaagaaaaagcgcc

SEQ ID NO: 372530 - DNA, 101 bp, Homo sapiens
gaaggtgaagccacggaagataagaggtggggctggtgtccgagcacttctcgcaggccccgcagaggctgtccttctacagctggtacggcagtgccagg

SEQ ID NO: 372531 - DNA, 95 bp, Homo sapiens
atttgtttcccttagccagcccgagcaagtaaagattgagagcacagtccctggaggacccattggagggcaaaccagagttactctgaggaacg

SEQ ID NO: 372532 - DNA, 108 bp, Homo sapiens
ctaatctcattgcctggccagaaaaggaagtaatccctagtgtcagcagattcagcggtactggtgtataatagctcctctggtgcaagtgtggtagctattgacaac

SEQ ID NO: 372533 - DNA, 51 bp, Homo sapiens
cggaaggaacagattttagctgtggccagatcactttgggaagcagtgaca

SEQ ID NO: 372534 - DNA, 100 bp, Homo sapiens
attcggccatcttggctcctccctcgtggccacagatgtctttaattccaaaaacctggccgttcaggcacaaaagaagatcttgggtaaaatggtgtcc

SEQ ID NO: 372535 - DNA, 83 bp, Homo sapiens
cgaggacataaggaactagtcacagtgttgctgcaacatagagctgacattaactgtcagcatttgaagacacttcgtcaccc

SEQ ID NO: 372536 - DNA, 100 bp, Homo sapiens
ctcggggacccttcgtgtccggtggttgctgttgcttggcctggtgggcccagtcctcggtgcggcgcggccagctgtccccaatctcttcatgctggaa

SEQ ID NO: 372537 - DNA, 102 bp, Homo sapiens
aagccttgtcactggaggcgagtcaggtacggacattgctgcaggagaagaggttgccatcaagcttgaatgtgtcaaaaccaaacaccctcagctccacat

SEQ ID NO: 372538 - DNA, 82 bp, Homo sapiens
ctcagttggaagcagccgatccagcctgcggagcctgtggggcagttgcctcttgaagtggatttaactaaagcgaagagac

SEQ ID NO: 372539 - DNA, 100 bp, Homo sapiens
agtatactttctgtcagccagaaactgatgatatcatcaagttgaatcgaaaggaagggaagaagcagaattttccaagactaaatagaagactcctcca

SEQ ID NO: 372540 - DNA, 75 bp, Homo sapiens
acctcgctccggaaaggggacacctgagaggaggttcagatgagcccctgctgacttgagagagacagagagacc

SEQ ID NO: 372541 - DNA, 98 bp, Homo sapiens
ctcgctgggctgctcttcctgaggttttcctaagccatcccctggcggaaccgcccccaggtgatgatgaacagtctacacagatggctgcaagttgg

SEQ ID NO: 372542 - DNA, 51 bp, Homo sapiens
cagtgaggagcttaaaagcagtcaggatggcatgcccaagagaatcgtaaa

SEQ ID NO: 372543 - DNA, 97 bp, Homo sapiens
tacaaaccatgcggcctccagcgaagccttccactagcaaagtaatcagttcaagaagttccctcagatgacctcatatcaccggatgctattacac

SEQ ID NO: 372544 - DNA, 74 bp, Homo sapiens
taaccgtccccgccagtcagaagttgagggtgactgtcgttcctacagttacgtgtgtggaatctccagtaaag

SEQ ID NO: 372545 - DNA, 90 bp, Homo sapiens
ctgggatgatacaccttttccacagggaattgagttgaaactggaggaagcagcatctcgtgcagcagaagaggaaaagaaacgccttca

SEQ ID NO: 372546 - DNA, 90 bp, Homo sapiens
gtggacctcacttgtgaatctttagagcctgtggtggttgatctgactcacaatgactctgttgtgcaagtaactggcagaagttttggt

SEQ ID NO: 372547 - DNA, 78 bp, Homo sapiens
ccagagcagctattcttcttatggccagagccagaacaggacgtccagatcggtgacatcgtcacagtgggcgagtgc

SEQ ID NO: 372548 - DNA, 51 bp, Homo sapiens
cgatccactcccggctgttcccccggagtgtagagtgatgcgagacctcaa

SEQ ID NO: 372549 - DNA, 152 bp, Homo sapiens
ccggcagacgggcgtcttctacctgacgctcgtcctcatcctggtcactagcggactcttcttcgccttcgagctcgggttatgtatgattttgctgctgaacctggaaataatgaactgacggttaatgaaggagaaatcatcacaatcac

SEQ ID NO: 372550 - DNA, 82 bp, Homo sapiens
cttcatcagccggcacagccaggggcggaggagagaagatgccctgtcctcagtgagaagccctaccactgcaactgggacg

SEQ ID NO: 372551 - DNA, 100 bp, Homo sapiens
cgattcctcctccttggtcgccgcgtccttggctggcgtgtggtcaaggtgaagccccatgacaaggatgccaaaatgaaataccaggagtgcaacaaga

SEQ ID NO: 372552 - DNA, 100 bp, Homo sapiens
ttgtgtaaaactctgctgctttccccagctccaacctctctggtcttcaacaacactatcatcaggtgcactttacaggtccccgatgaaccaagagaac

SEQ ID NO: 372553 - DNA, 74 bp, Homo sapiens
aagaaaatggaccagtttgttcgttacgagtctccttatatacatttgacaaagccaaacagtgtattggcaca

SEQ ID NO: 372554 - DNA, 75 bp, Homo sapiens
catcctcctggcctacctggcagtgttctaagaacggaagcatctgggctggatggaatttagcatcaagcagag

SEQ ID NO: 372555 - DNA, 100 bp, Homo sapiens
cgagcgacgctatggatcccacaggatgatcacggacgtgcagctcgccatcttcgccaacatgctgggcgtgtcgctcttcttgcttgtcgttctctat

SEQ ID NO: 372556 - DNA, 99 bp, Homo sapiens
cctgagcgccaggaaattgaaggaatttccccgtaccgcagcccccgggcacgacctctcggacacggtgcaggcaggaaagcgtctctagcagctgat

SEQ ID NO: 372557 - DNA, 100 bp, Homo sapiens
gggactgcggcggcgccggcctccggggagaaacgcaatatgttaaggatacctgtaagaaaggccttagtaggcctttctaagtctcctaaaggatgtg

SEQ ID NO: 372558 - DNA, 50 bp, Homo sapiens
gaaaaacctgaaagatgtctcagttttccagggaaattttgacaatgaca

SEQ ID NO: 372559 - DNA, 101 bp, Homo sapiens
gccaacagacactgccaccctcaaggagttcacgttcatgggcgagggaacagatgagaaacccggcaatgaaagctggagtgcagtggcacggtctcggc

SEQ ID NO: 372560 - DNA, 101 bp, Homo sapiens
agatgctgaagctgttcagaagttcttccttgaagaaatacagcttggtgaagagttactagctcaaggactcagacgtctactaagtaaacaggaaactg

SEQ ID NO: 372561 - DNA, 100 bp, Homo sapiens
agatgatgaagccgaggtagaagaagatgaacccacagatttggcttactgtggatttctccgtcctggagtttcttcagagaatctttctgcagtggcc

SEQ ID NO: 372562 - DNA, 83 bp, Homo sapiens
atcgacagtgccttcggccagagcggcaagttcaagatccacatcccaggactgcctccgggcctgccaggagcagatcgaag

SEQ ID NO: 372563 - DNA, 97 bp, Homo sapiens
gttggccaaactagctggaaacccatttccaatcagtcatgggaccagaagtttacactggaactggacagggctgcctctaagaatcaaacttcac

SEQ ID NO: 372564 - DNA, 51 bp, Homo sapiens
ctttccctctcccaacatggcggcctcagattctggaacttttcaaagcct

SEQ ID NO: 372565 - DNA, 100 bp, Homo sapiens
ggaccagcgacccaagcgccgcggttaaccacgtctcgtccacgacctccctagatgagcgtgaagccgtgcagaagaagaccttcaccaagtgggtcaa

SEQ ID NO: 372566 - DNA, 74 bp, Homo sapiens
ggcggaggtggaccggatgctcagactctaaaatagagctcaagcttgagaagagagaaccactaaagggcaga

SEQ ID NO: 372567 - DNA, 75 bp, Homo sapiens
cacccataccttttgggcttcagaatgcagtgttttcgtgtgttttatggaccatgtgctgctatgtatgcctga

SEQ ID NO: 372568 - DNA, 96 bp, Homo sapiens
caaggacagaatcaccagcactggctgaagggtcgcggcgagcgcgcctatgacatctactcgcggctgctgcgggagcgcatcgtgtgcgtcatg

SEQ ID NO: 372569 - DNA, 82 bp, Homo sapiens
gatctggactactgttgaaaaaatttccagtgagacttaattcagtgcacaaatgagatgaatgtgaacatcccacagttgg

SEQ ID NO: 372570 - DNA, 100 bp, Homo sapiens
gcaacggccaacttcggcaagatccagatcgggatttacgtggagatcaagcgcagcgatgatggaaatcctgtatgaatgtggaagccattagcagagt

SEQ ID NO: 372571 - DNA, 75 bp, Homo sapiens
ctcctccaatgccctcatcctcatcgggcagacccagacccgcaacaaggtggcaaatacagtgttcagttcaag

SEQ ID NO: 372572 - DNA, 75 bp, Homo sapiens
ctgctcctgtacgtagtcacggtcttgtgctctaaggagttgtgaacagatgtgtgtacagcacaaccaaggcag

SEQ ID NO: 372573 - DNA, 82 bp, Homo sapiens
ttgcacgaaagctttcctaggccaaaaagagctcggtgctgattatcacaactgtttggtgacctacttcactgacctgtga

SEQ ID NO: 372574 - DNA, 51 bp, Homo sapiens
acagctatagcaccccagcccaaaggtatcctgaagaacttgcctggcaca

SEQ ID NO: 372575 - DNA, 100 bp, Homo sapiens
gagaagataacactttagtacagtcgccaactgatgtctacaggtaatcagatcctgtcccttgggagcctctcaaaagatcagatttatccaatgaaac

SEQ ID NO: 372576 - DNA, 100 bp, Homo sapiens
tggcgcggagcccgggacgcgcgtacgccctgctgcttctcctggcgtctgtagaggcttctggtgaaatcgcattatgcaagactggatttcctgaaga

SEQ ID NO: 372577 - DNA, 75 bp, Homo sapiens
caggaacagaggacagtgagtcgctctcgtccctccaggaacctttaactgaccagagtgctcattaaacgatga

SEQ ID NO: 372578 - DNA, 101 bp, Homo sapiens
ctgcttgtcagggctgagagcgacggaactagaacagtctttggctagctggactcagaacttgaaagaacttcaaactatgaaggcggacttaacccggc

SEQ ID NO: 372579 - DNA, 82 bp, Homo sapiens
gcctgtctccgtcggaagggagcccaagctttgcagagctctattaccaggttttaaacttcgccatgatcgtgtcttctgc

SEQ ID NO: 372580 - DNA, 74 bp, Homo sapiens
atggacatgagccccctgaggccccagaactatcttttcgtgatcccgtaccacattctgatcgtaccaagcaa

SEQ ID NO: 372581 - DNA, 100 bp, Homo sapiens
atgcagttcttggacttggccatgtgagatacaaggctacacagagacagatcaaagcagctccttcccatcgacggtcagtgcgcacgttgtaatcagc

SEQ ID NO: 372582 - DNA, 98 bp, Homo sapiens
cggaatctaaaaagccctcagtaccagagacagaagcagatggattcgtccttttagttctctgtggacattgactcggagctggtggaggagctgcc

SEQ ID NO: 372583 - DNA, 100 bp, Homo sapiens
tgtagatgagtggattgtatttcagtctccagcaagaattgcccatcttgttaagatcacaaaatttgtccaggatagacatagagctagaagaaacaga

SEQ ID NO: 372584 - DNA, 76 bp, Homo sapiens
tctttgatgtggaaagtatgaagaaagccatggtggagtatgaggtcttgccccagaagctgcgggcacatccacg

SEQ ID NO: 372585 - DNA, 100 bp, Homo sapiens
actccgttatcgtcatgttcactgctctccaactgcatagacagtgtgtcgtttgcaagtagcaacacaagtcggaatagaatggaacctgtcccctgtt

SEQ ID NO: 372586 - DNA, 50 bp, Homo sapiens
tgctgcctcagtacaaggagagggaagcaagaatgtgcggcggtccatcc

SEQ ID NO: 372587 - DNA, 82 bp, Homo sapiens
ctttggaagatgcagatgagaaggttcagttggcaaaccagatatatgacttgtactgccaaatctgtcgaaagggagataa

SEQ ID NO: 372588 - DNA, 100 bp, Homo sapiens
ggcggacgggaaggcgggagacgagaagcctgaaaagtcgcagcgagctggagccgccggagccctactgccaataaagggaaaataagagatgctcatc

SEQ ID NO: 372589 - DNA, 91 bp, Homo sapiens
gaaggagctagctgaaataacccttgatcctcctcctaattgcagtacctggagtagaacagaaaaattattatgtctgtgttcccttggg

SEQ ID NO: 372590 - DNA, 82 bp, Homo sapiens
cgccgcggacgcgtcatcgagtgtgacgtggtgaaagaacatccagtcatggataaaaatgagctggttcagaaggccaaac

SEQ ID NO: 372591 - DNA, 100 bp, Homo sapiens
gggatgatgacaatgtagaggatgacttctctaatcagttacgctcaaggatctaaatttacttgatcgctgtataaaagaaacattaagacttagacct

SEQ ID NO: 372592 - DNA, 100 bp, Homo sapiens
aaaatgtactctgacctgaatcctgaattttccttgatggtcaaaagattaaggataacaaagccattgacctttgccgattgtgttggggacgaacttc

SEQ ID NO: 372593 - DNA, 100 bp, Homo sapiens
ggaccctaaacggtgattccccaagtcggccactggagggatgacttgggggaccagagaggaagagcaggatatgctgcaggctgctagtcattatcgc

SEQ ID NO: 372594 - DNA, 73 bp, Homo sapiens
gaaagcatactgcgagccctgctacattgatgtcttccatttggaagcccctttgcttctaagaagttccaga

SEQ ID NO: 372595 - DNA, 100 bp, Homo sapiens
gtgggaggccccagacagaatgtcgacacaaatccattgaactcttttataaattcgttcctttattgccagactttgagaatcactacaagaaaaactc

SEQ ID NO: 372596 - DNA, 101 bp, Homo sapiens
ggaacagcgacgacaaggcttggaaacatacttacagtacctgccatcctggctggacttgaccccagggacattgtggctgtgctgaatgaagagggagg

SEQ ID NO: 372597 - DNA, 100 bp, Homo sapiens
caaagacttagcttttaaattaaaaaggaagctattcaccattgagagcagcccgacggccatggaggctgaagagacgatggaatgccttcaggagttc

SEQ ID NO: 372598 - DNA, 75 bp, Homo sapiens
acaccccctccgtgggtgtgtggaaacaatgtgatgagaaccattcatggggtgggagagatgatgacccagatg

SEQ ID NO: 372599 - DNA, 100 bp, Homo sapiens
ccgaagctaagagcccccttcagtcgcagcctcactctagctcgggttcatgacgctctcgatattcctgtgcagaaacctggaccacgtctacaaccgg

SEQ ID NO: 372600 - DNA, 75 bp, Homo sapiens
attgtcttttccgcccgcttcgatcgcctcgcgccggctgctctttccgggcgcattctacattctaaaggggag

SEQ ID NO: 372601 - DNA, 100 bp, Homo sapiens
gccaggtgcttattaggccgtgctccaaagtcatcgtccggtttctcactgtgatgatgaagcatgattcaaaaacatgccacaggaaagaagtctccag

SEQ ID NO: 372602 - DNA, 111 bp, Homo sapiens
ctaaaggagagaagtttgtcatgcaggaggagttctcgagagaagtttgctgaggaatgccttcaagcacaaagtgatgaatgactgccttcaagtctcaagaaaacactt

SEQ ID NO: 372603 - DNA, 100 bp, Homo sapiens
atgctgcctcgagttgtcctgactcctctgaaggtaaacggggcccacgtggaatctgcatcagatgatccagatcctgatgatggatttaactataaac

SEQ ID NO: 372604 - DNA, 90 bp, Homo sapiens
cagcagcccccgaaggccctatcaggacatggagtatgaaagacgctctggtagctgaagaacatctcacagtggacgccagggtctatt

SEQ ID NO: 372605 - DNA, 97 bp, Homo sapiens
gaaggcggcgcgcgaggtcaagctgctgctgctcggttgggataattcttcactattccacccttgccacagtactatgggtaggagtgacagctcg

SEQ ID NO: 372606 - DNA, 98 bp, Homo sapiens
gccggtcttggggggatggttccatcatggcgtcaatgcaggctgctgagcttcgtgcttatctgaaatctaaaggagctgagatttcagaagagaac

SEQ ID NO: 372607 - DNA, 50 bp, Homo sapiens
ggatgtcatgttcctggcctggtgatctgtgaaaatggttcgctattcac

SEQ ID NO: 372608 - DNA, 100 bp, Homo sapiens
gacactttgcgttcgggctgggagcgtgctttccacgacggtgacacgcttccctggattggcatcaagcttctagctgtgcaagaactgcttgacagag

SEQ ID NO: 372609 - DNA, 50 bp, Homo sapiens
tctccttcaccgccgacttcaagaaggtggcccgggagagtggcccaccc

SEQ ID NO: 372610 - DNA, 75 bp, Homo sapiens
ttcgcgtcctgctccaaggactgcactgtgaagccccgtcagaacctgctgcaagcagctgggaacgtgggccag

SEQ ID NO: 372611 - DNA, 75 bp, Homo sapiens
atgaagaggatttcaacagacagggcttttttccagacttcaagctcccattccaacagtaagagcttcttccac

SEQ ID NO: 372612 - DNA, 82 bp, Homo sapiens
cacaccccctccgtgggtgtgtgacttcccaagtaagaagcggaagaggagccgctggaaccaagacacaatggaacagaag

SEQ ID NO: 372613 - DNA, 75 bp, Homo sapiens
ccccttgagcctgtcccaagccctggtgccaggtgtccatccccgtgctgagatccaacttagaaataatgtttc

SEQ ID NO: 372614 - DNA, 100 bp, Homo sapiens
tgaggacttcccctccgtggtgacagcctctgggtcctcggtcggtacagtctctgcacctcgcgccccagcagatatatgcacactttctgagaaggag

SEQ ID NO: 372615 - DNA, 95 bp, Homo sapiens
cagccttgggggcccttggagccctggcccagtggaagctcgtgcctgaggaacatggaggccacgctaatgtagagatggggtttcaccgtgtt

SEQ ID NO: 372616 - DNA, 90 bp, Homo sapiens
cgagctggcttcgagaggaacaccaagttcatcgccccctggttccatgaaatgcctccacggctgtgtacgcctgttgcaaccccatcc

SEQ ID NO: 372617 - DNA, 50 bp, Homo sapiens
tcctcccacctcagcttcctgagtaggaaatgtaccttctccgaatgcac

SEQ ID NO: 372618 - DNA, 82 bp, Homo sapiens
atccggcccatagccgagcagactggcatctgtaaggtgcggccgccgccggctgaaggtgatgtggccgccctcaaccgac

SEQ ID NO: 372619 - DNA, 91 bp, Homo sapiens
caccggtccccaacgcatcatgccagggagccaagcgtcctgcccggccgttacaggaggttccagtggcatcgggaagtgcattgctatc

SEQ ID NO: 372620 - DNA, 98 bp, Homo sapiens
cggagactcaccccttcagcgtcgctgcccccagctcagctcttactgcgggccgctccgacggcggtccatcctgccccattggatgagaatgacct

SEQ ID NO: 372621 - DNA, 100 bp, Homo sapiens
tctgaaggagctgtatgacctccgccaacgccctgctggcggacttggagtctaccacctcccacatctccaaacggcctgtgttcttgtcggaggagac

SEQ ID NO: 372622 - DNA, 100 bp, Homo sapiens
ggctgaatgaatgtatttcaccagtagcaaatgagatgaaccatcttcctgcacacagccacgatttgcaaagattacctctctagtgacccttcagctg

SEQ ID NO: 372623 - DNA, 74 bp, Homo sapiens
cacgaagccccgggcaccttccgggtggagttcagtgaaagggcagctaaattttcaggagtgaaaagaaaaag

SEQ ID NO: 372624 - DNA, 100 bp, Homo sapiens
gcgggcctcccgtttctggctccgggctgagcttcctggagaagaggaaggtttttcgttggaatatacgttgcacatttatggcgattctgagtgtgag

SEQ ID NO: 372625 - DNA, 105 bp, Homo sapiens
gaggcctccccagccacatggaactagctactccaccccactctggctgtagtgtgacattcctgcctgcctgaggaagaaatggtgagcaggggctgcaattgc

SEQ ID NO: 372626 - DNA, 88 bp, Homo sapiens
ccccctgaagtggaagacagcattggtactaatggccaactcaagatgctttgctgactaatgttgaccagattgtccaggaaacaca

SEQ ID NO: 372627 - DNA, 100 bp, Homo sapiens
aaagatcaacacgttgggtcaaggtagcacatttgccaaggaacagcgtttacattttctaaagcaacaggagcgccgtcagcagcagtctatttctgaa

SEQ ID NO: 372628 - DNA, 120 bp, Homo sapiens
cgacgcagtcagctgcgtgattcccgtgattgcgttacaagctttgtctccttcgacttggagtctttgtccaggacgttttccaagagataacttcaccaagatgtccagtgataggca

SEQ ID NO: 372629 - DNA, 100 bp, Homo sapiens
gaggcggcggacgggccggagggaggatgttaaagccccgcgcttgagaattatatccaggacaacatgaagaaagaaatggtagagatacagcagaatg

SEQ ID NO: 372630 - DNA, 100 bp, Homo sapiens
aacacccgactcggtgattatagattcatctgctccatctggacacaagcatctgacggtagaagagttatttggaacctctttgccaaaggaacaacca

SEQ ID NO: 372631 - DNA, 75 bp, Homo sapiens
cccccaagatgggcatctattacattccagaaacttggctgtaacttcaaaagaagatttgattctttatttctg

SEQ ID NO: 372632 - DNA, 89 bp, Homo sapiens
gtcgactgcccagagtccgcgaatcctccgctccgagcccgtccggactcccccgatcccaggcctatatgaacccaatagcaatggcg

SEQ ID NO: 372633 - DNA, 76 bp, Homo sapiens
gatgagtcatgtggcagtggaaaatgcgctcgggctggaccagcaggtgaggaagatcttctcagtcctccccagg

SEQ ID NO: 372634 - DNA, 86 bp, Homo sapiens
acacaccaggccggcaggctgagaaaagcgagaccgcgtgcgaggaccgtgtccttgaatccgacccctactttgggtttgaagaa

SEQ ID NO: 372635 - DNA, 100 bp, Homo sapiens
agaaaccccgttgacaaggcactgctttttcatgacgcagtgactcttcgagaagacagtgccaagaggttggagaggagggcacgccgcatctccgcat

SEQ ID NO: 372636 - DNA, 90 bp, Homo sapiens
gcacgcccagcccggacctgctgatggcccgcagcttcggtgacaaggtttaccattgcttgttcagagaacaattgcgagaactattgt

SEQ ID NO: 372637 - DNA, 99 bp, Homo sapiens
gaaccagcaggctctgtggttcaggactcccgacttgacacgatattttttgctaagcagatcggtcgcttggttatcggacagaatggaatcctctcc

SEQ ID NO: 372638 - DNA, 98 bp, Homo sapiens
aggagcggcgactcagggtcgcccgcccctcctcaccgaggaaggccgtgaataaccctataccttccaatttgaaatcagaagcaaaaaaggctgcc

SEQ ID NO: 372639 - DNA, 83 bp, Homo sapiens
cgaacagtctcgttgctgcctctgtgtacgctgaggggggagatggagaaggaggagacaacccgggagctgctgctgcccaa

SEQ ID NO: 372640 - DNA, 99 bp, Homo sapiens
acaaataagcattggcctggaaaatccacatcccaacaggctaaacaaggcagtgaaagagtttctagccaaagccaaagaagactttttgaaaaaatg

SEQ ID NO: 372641 - DNA, 75 bp, Homo sapiens
ctgccccctccactgctgctgctccagctgaggcggcacctggagctgaaagagaagggcaggcacgtggtgctg

SEQ ID NO: 372642 - DNA, 90 bp, Homo sapiens
ccctgggaaaccagagagtcggagggagtccatctggagcggccaagtgatcaagcacgtaattttttcctacaatcaggtctgccggcc

SEQ ID NO: 372643 - DNA, 114 bp, Homo sapiens
ctccgccggctactgccgcttcagttctcccggtgtggccacgagtcggcaagagtgagccatggagctacgtgtggggaacaagtaccgcctgggacggaagatcgggagcgg

SEQ ID NO: 372644 - DNA, 75 bp, Homo sapiens
acgcaggcagcatggaccacggttgctgggcggatggggagcgtctatggtcagagcctgtgtggtgcccctatc

SEQ ID NO: 372645 - DNA, 51 bp, Homo sapiens
agcttcggaacaagagaccctgggccgagatggacgaaaaaatgtggttcc

SEQ ID NO: 372646 - DNA, 100 bp, Homo sapiens
ggacctgctggaggacaagatcctgtactcgcacctggtggactacttccccgagttcgatgaattggcagagggggtcgatttgggaggaaaggtgtgg

SEQ ID NO: 372647 - DNA, 53 bp, Homo sapiens
gacaaatgtgtacacatctggaacacgcagccacagtacacgaacctggggct

SEQ ID NO: 372648 - DNA, 83 bp, Homo sapiens
tggagaaacatgcagattatatcgcatcctatggctcaaagaaagatgattatttgctgatcttatctgaagcagcagatcag

SEQ ID NO: 372649 - DNA, 82 bp, Homo sapiens
tgcacttcctggaggtgaaactgggcaagaggccccagcccgtgaaaagtgaggttttaaaatcaaagatgggaaaatcgga

SEQ ID NO: 372650 - DNA, 50 bp, Homo sapiens
cctgaaggctcaccggaggacacatacagctatctttcagatcattcaga

SEQ ID NO: 372651 - DNA, 100 bp, Homo sapiens
agatacccgccctgcgccccgctctgctgtgggcgctgctggcgctctggctgtgctgcgcgacccccgcgcatggcattgaatgccccagaggagcccg

SEQ ID NO: 372652 - DNA, 74 bp, Homo sapiens
atgtgccgcaccctggccgccttccccaccacctgcctggagagtgcaaggatgatgctgaaaggaataacaag

SEQ ID NO: 372653 - DNA, 75 bp, Homo sapiens
ggaagatccggcgcggggcacaggatccggagctggagcccccagagtgcctggtgaagaatgtgatgggatcac

SEQ ID NO: 372654 - DNA, 100 bp, Homo sapiens
cacttcaacagttggaaccaaggcttcatcattcatcattatgctgggaaggtggttcttccagtacttggatacaatattcagtacccgaagaacaaag

SEQ ID NO: 372655 - DNA, 97 bp, Homo sapiens
tctaaacttggcaccaagtatgctccaggccatgcccgcagccggaggtgtgctctaccagccctcgggaccagccagcttccccagcaccttcagc

SEQ ID NO: 372656 - DNA, 100 bp, Homo sapiens
ttgggagatccacagctaagacgccgggactccctggaaacctagaaatgttggtgaagaagctgagtgatttcacaggctgcacccaggttgtagacgt

SEQ ID NO: 372657 - DNA, 88 bp, Homo sapiens
aagaaaagctctgagggtctccaaagttaccagaggaaggctgaattttatgagcaggaaagtccaatccaaccttttatctccagaa

SEQ ID NO: 372658 - DNA, 98 bp, Homo sapiens
ccacatactatccgtttgttcaggaaccaccagtgacagaatccgtgagagatttgtaaaagagccagcatttgaggacataactctagaatctgaaa

SEQ ID NO: 372659 - DNA, 83 bp, Homo sapiens
cgctaaacgtgccctactctgccccgggggagaggctccctggggaagggaatgcagggttgctggggctgggcccagaagca

SEQ ID NO: 372660 - DNA, 75 bp, Homo sapiens
gccagccgctgttttgccggaggagcccctcaggccgatagagactcttaatggaacaatgattctgaaaagaac

SEQ ID NO: 372661 - DNA, 82 bp, Homo sapiens
ctcgggcctggtgctgctcgcctacttcctgccggcgcagggagcatcagatccatgctgctgctgactcggagccccacag

SEQ ID NO: 372662 - DNA, 110 bp, Homo sapiens
tacctgtgaaccaagtgtttgggcaggatgagatgatcgacgtcatcggggtgaccaagggcaaaggctacaaagggaagtacgtggtcctctttttctaccctctggac

SEQ ID NO: 372663 - DNA, 76 bp, Homo sapiens
ccgcgggccaccgcgccgaactgctccggttcccgggccaagaagacgctggagggaggctgttaggagggactct

SEQ ID NO: 372664 - DNA, 100 bp, Homo sapiens
ctggatcatccacccgtacagcgacttcaggaagcaggtcctggggaccaaggtggacgcggagcgtgacggcgtgaaggtgcccaccacgctggccgag

SEQ ID NO: 372665 - DNA, 100 bp, Homo sapiens
ccgcccgcttcaaccccaggggaccagaggaactcagccctgattgcgattactttctatgaagacaaaaattttcaaggccgtcgctatgactgtgatt

SEQ ID NO: 372666 - DNA, 83 bp, Homo sapiens
aaacagctgatcagactcctggtgccactcccaaaaaactatcaagttgggatcaggcagagagttcttggagtctctgcgga

SEQ ID NO: 372667 - DNA, 89 bp, Homo sapiens
agacataaactcaaccccttctcttccaaaagattcgcttcaagctcagcttatcaatatgggtgttattcctaccttagtgaaattac

SEQ ID NO: 372668 - DNA, 98 bp, Homo sapiens
tcagagactccttaaactgtactcggataaatttggttctgaaaatgtcaaaatgatacaggattctggcaagcccttagagatttgtttgattccat

SEQ ID NO: 372669 - DNA, 82 bp, Homo sapiens
gattccaacaacaattccgatggcaaagccgttgccaaggctttatcctgtggataaacgcagagtgaacgagtttggggag

SEQ ID NO: 372670 - DNA, 74 bp, Homo sapiens
gaagcgttagagcgagcagcactcacatctcaaggtggcaccttcattggggagtactgaatttcagccacttg

SEQ ID NO: 372671 - DNA, 82 bp, Homo sapiens
taccaccggacttggatcggagcagccttcaggggacgtggcgcagtcgagatagtaatgatgacactgaagatgtttcact

SEQ ID NO: 372672 - DNA, 101 bp, Homo sapiens
tggtcccagaagatggcggaggcgggggatcagattttattaagacctctactggaaaagaaacagtaaatgccaccttcccggtagctatagtaatgctg

SEQ ID NO: 372673 - DNA, 83 bp, Homo sapiens
ttcatgatattcatgtgctgggtgggggacgtgtaccctgtctaccagcctgtgacttcccaagtaagaagcggaagaggagc

SEQ ID NO: 372674 - DNA, 49 bp, Homo sapiens
ttagattggattctgaatatcagaagtcaatgaaaggattctattttgc

SEQ ID NO: 372675 - DNA, 75 bp, Homo sapiens
ttttgaaagcccttgaaacgtcaaaggtgtatgcaacagcgttattgcaacaggctaacgaaaacagacaaaatt

SEQ ID NO: 372676 - DNA, 120 bp, Homo sapiens
ttcaccctctcgcctcgggtctcgggggccgctctgggatcccggccaccagcaattgtccggattttttatcaagcagaaatgcatcgaacaacgagaatcaagatcactgagctaaat

SEQ ID NO: 372677 - DNA, 100 bp, Homo sapiens
gtccatgggagcaagattagtggctgctaaacttgaaccgaaaaggacagtcattttgtttactcattcagccctgttgcaggtcccaataaactcttca

SEQ ID NO: 372678 - DNA, 100 bp, Homo sapiens
tgactgaactcttcaccccagtctgtggctttcccgttgcagtgagagccacgagccaaggtgggccaggagatagaagtaagacctggtattgtttcca

SEQ ID NO: 372679 - DNA, 100 bp, Homo sapiens
ggatcacaaacactcagagtggaaaaagtaccatcatttgaaacaggccgtgacttggcgagcacgaccctccccgggtaccctccacacgtcccccccg

SEQ ID NO: 372680 - DNA, 100 bp, Homo sapiens
ggacagagcgcctgcgaccccagtcggtgctccggggaggtcacctgacgaggagagttctaaagttcctgttgcttcagacaatggatgagcaatcaca

SEQ ID NO: 372681 - DNA, 100 bp, Homo sapiens
gcggcccagcgacgtgtggatcgtcacctaccccaagtccgattaacgtgacagtgtcaggtggacccacagccatcccacctccccctctggggagtgc

SEQ ID NO: 372682 - DNA, 74 bp, Homo sapiens
gcggctgctgtctgcgcttgaggacttggaggtcctgtctagactcagattgatggacaacttttcttaattaa

SEQ ID NO: 372683 - DNA, 101 bp, Homo sapiens
aggtgttcgagaacgaccccgagacggcgaggccttcttgggcagctttgtggccagcgggatggggccctcggcctcgtcccatgggagcccagtgccac

SEQ ID NO: 372684 - DNA, 75 bp, Homo sapiens
gaagaccacaataaaagagacctctacttagctcagcaattcttaccttgaaagatgaatgggagggctgatttt

SEQ ID NO: 372685 - DNA, 100 bp, Homo sapiens
ggtgaggtcacattcggttatctctaacgttggaaaacggcatgactccacagtttctgcaacaacagagccggggaaaggaggacgcagcaagcgctga

SEQ ID NO: 372686 - DNA, 75 bp, Homo sapiens
tgctgaaaatgttgcttcatatgagtcacggtctagatcacattctcgatccagaggaaggcgatactctcgctc

SEQ ID NO: 372687 - DNA, 82 bp, Homo sapiens
aatgtctgactctgactctcggactgagaaacgcaaggtgacgcggcgcacggcgcggatggtggccgagtggcagtgtgtg

SEQ ID NO: 372688 - DNA, 100 bp, Homo sapiens
atggtgccaaagtgcagctgactcttcccacgacagccctgcccttcccatgaggcaggctcttcaatttattgctaaacatgggtgcatttttggataa

SEQ ID NO: 372689 - DNA, 75 bp, Homo sapiens
atatgcccaagttttccgtgagcatgccaacaaactggtagagatggactctgtgactacatgactaataaaata

SEQ ID NO: 372690 - DNA, 51 bp, Homo sapiens
ctcggagacgtctgacagtgacgatgagttattaccccattcaagttgaca

SEQ ID NO: 372691 - DNA, 100 bp, Homo sapiens
ttagtagcagcggggcacagaacagcgacagtacaaagaagactcttgtcacactaattgccaacaacaatggtttctaagcatgaattgaggaacagaa

SEQ ID NO: 372692 - DNA, 100 bp, Homo sapiens
atccagtgttcaccatcctggccccggaagatcgggtgctaccaaggttttgcttttgcatggaaatgtctactgcacagttgcaccactgagaaggaca

SEQ ID NO: 372693 - DNA, 83 bp, Homo sapiens
ttggacactgaagaagggacggggatttctcctcctaatctgggcctcttgtcatgtagccggatcgagctgggagatgtgac

SEQ ID NO: 372694 - DNA, 100 bp, Homo sapiens
tccggcttcacgcggctcggcaccgaccttcaccaaaggcttcgtgtacagctctttcctaaagccctacaatcctcgccgcagccactccgatgcctcc

SEQ ID NO: 372695 - DNA, 83 bp, Homo sapiens
actcccgcggcgggaggagcctgttcccctgaggagctctttgttcaatgcctagccacctattcctacagacacggcagtgg

SEQ ID NO: 372696 - DNA, 100 bp, Homo sapiens
gttagttggaataactggactcttttacactcaactaattggcatcatcacattggaaaatggatataccttatttgattatgatgttggactgaatgat

SEQ ID NO: 372697 - DNA, 75 bp, Homo sapiens
gaaattcgagaagctgcaaatgccaactctccagaaagagcaacagtaatggagtacatgagcactggaagtgac

SEQ ID NO: 372698 - DNA, 58 bp, Homo sapiens
tgtacctgcattctgccttagtcaaggaccctgatgctcccataagacagaaaatgcc

SEQ ID NO: 372699 - DNA, 83 bp, Homo sapiens
atgtgtagaaagtgaaatcagaggagatgtaactatcgtgggaatgtaagacggacttagatattgcatacaaatttggaaaa

SEQ ID NO: 372700 - DNA, 100 bp, Homo sapiens
tgaatacagcccaacccaaggagtgagatcgtaaaaaggaccttgtaaaactacaggcaggggaatatgtttctcttgggaaagtagaggcagctttgaa

SEQ ID NO: 372701 - DNA, 101 bp, Homo sapiens
ggggagaagacaccagcagcatgcccagccagggcagggtggagagctgcagctgcaggcatagaatgtcaagctaaccaggcgtccgctacttcagaaga

SEQ ID NO: 372702 - DNA, 100 bp, Homo sapiens
ggagtgcagcaggacactatcctggccgagggccttcacttcaggcagcccctggaagagatcatcacctactacccagccatgaaggctgtgaacgagc

SEQ ID NO: 372703 - DNA, 75 bp, Homo sapiens
cggccaatggcacggaggcctgcgtacacatctttgccatcgtggcatcagcctatgacctggctcagaatactg

SEQ ID NO: 372704 - DNA, 98 bp, Homo sapiens
tcagcagtcggatgggggaggactgctttatggacttgcatcaggagtagcaagtgctggagaatctggtaaaagcaccattgtgaagcagatgagga

SEQ ID NO: 372705 - DNA, 88 bp, Homo sapiens
acatccttcccaagaatgtgcttaagaagttcatctgcatatctgaccttcgggcccaacatggtggggagttatatttcagtgacgt

SEQ ID NO: 372706 - DNA, 96 bp, Homo sapiens
cttcaaggatctgggagaggcagaagcatagatatgaatggctgctagttgatcattgaatctggatggttttgcacactagggaccaagaagccc

SEQ ID NO: 372707 - DNA, 73 bp, Homo sapiens
ggaactgactgctgtagttcagaagaggtttgatatcgacagctgcacttactacttcagctgggactcccgg

SEQ ID NO: 372708 - DNA, 83 bp, Homo sapiens
gtcagctcctcgagaagccccagtattaaaggtggaagaaggtccatatctttttctgtgggtgcttcaagtgttgttggaag

SEQ ID NO: 372709 - DNA, 50 bp, Homo sapiens
cacaagacgactcaataggaggaagttgtatatgaacacagatcaagatt

SEQ ID NO: 372710 - DNA, 75 bp, Homo sapiens
accatccgcctgtgggacacctaccaggcccaagtctgttttggtggtctgagaggaaaaaagatgagcttctaa

SEQ ID NO: 372711 - DNA, 95 bp, Homo sapiens
caagaacgagtcgggcagccgctccaatgtcattgaagtcaacaagagagacatagtcttcctggtggatggctcatctgcactgggactggcca

SEQ ID NO: 372712 - DNA, 100 bp, Homo sapiens
gcagaaagaaaggcaaagaaagaaatgcatttgcgatctcaagaagtggtaaaacactggactaatacatatgcaaaatgtgaacataatttgagcaagc

SEQ ID NO: 372713 - DNA, 100 bp, Homo sapiens
gagacattgccgcccagagcgagcgggtggaggctctcaatgccgctgccctgcgcttctcccagctgcagggaaagattctgaagcttggcggagaggg

SEQ ID NO: 372714 - DNA, 76 bp, Homo sapiens
ccaggagcggctccgcgccgcagtccccagtgcatattgggtacttccagaagtatgaattcagtgatgcaaagga

SEQ ID NO: 372715 - DNA, 76 bp, Homo sapiens
ctgtctgttggaatgtcaagagatgttcagccagtgctacccctgaatttgaaggtagaggaggtgatgaccttgg

SEQ ID NO: 372716 - DNA, 101 bp, Homo sapiens
aatgtcatgacctacctcaccagcatccccaggtgtggaagatttccttacaagggccgtgttacatgacactgttaatgattgcatttggcttgctgtgg

SEQ ID NO: 372717 - DNA, 100 bp, Homo sapiens
tgactggatccacagcagtgggggctggggttttggccaaattgggcgagggcacaaaataaccacttaccccttctcaccgaggaagagcgggagaaag

SEQ ID NO: 372718 - DNA, 75 bp, Homo sapiens
aaattatgtgaaacctccaaatgtggattcctataggcaatggaaactgatctcaattcccaggacagaaaggac

SEQ ID NO: 372719 - DNA, 87 bp, Homo sapiens
gttgtggaactgatgtttaaaatcattggaccatttagtaagaagaattccagtcttataaactattgcagatcccaaccccctgct

SEQ ID NO: 372720 - DNA, 82 bp, Homo sapiens
ctgctttccactcggctcctgtcgtccgttctctcaggctcccgttcaggaaatgctagtgagtcggaggaagaccgcagcg

SEQ ID NO: 372721 - DNA, 96 bp, Homo sapiens
tcattcctgatgggcgggtgtctgtctctgctcgaattgacagaaaaggattctgtgaagatacatttgctgcaattccatggaaccaaatacgcg

SEQ ID NO: 372722 - DNA, 90 bp, Homo sapiens
ggaacatcccagaggccagcatcaacatgtgatgatctttgaactggcttaccacgtgcagtcatttctcagcgagcataacaagccccc

SEQ ID NO: 372723 - DNA, 82 bp, Homo sapiens
atctctctcatctcgctcggctgcgggaaatcgggctgaagcgactgagtccgcgatggagttatattccctgctcagagag

SEQ ID NO: 372724 - DNA, 83 bp, Homo sapiens
cctgacctctctgatgagatggatcggtgcacattcaggttcccgagcacaaacatcaagataacgttcactgccctgtccag

SEQ ID NO: 372725 - DNA, 79 bp, Homo sapiens
tcgacaaaagaaccattgaaaaatttgagaaggaggctgctgagccaggcgttgtggggcagatgatcgaggcagctga

SEQ ID NO: 372726 - DNA, 74 bp, Homo sapiens
tccattattgaccttcaagaactaagatcagtgtgcgtgtgaccaccatggatgcagagctggagtttgccatc

SEQ ID NO: 372727 - DNA, 100 bp, Homo sapiens
cgctgacggcgactgcgggaggccagactagacgcttgaagcaaagctgccatcccagaagacgacatgctctcagcaacccccctgtatgggaacgttc

SEQ ID NO: 372728 - DNA, 75 bp, Homo sapiens
tcttgtgtgctccatagtttatcaaaagctgcagaaccttggcctgaaaatgctacattatatcagcaattgaaa

SEQ ID NO: 372729 - DNA, 92 bp, Homo sapiens
tttgcatatatcaactgtggccttaatgagcatgttgacagcatcgatgctagacagacacaggagtcctggcaaaataagcatgcaggtag

SEQ ID NO: 372730 - DNA, 101 bp, Homo sapiens
ggaagggcattggaatttggtgaacctgtgctgctggttggagacactgggccttggacaagattcgctatgagagcctgacagacccttcgaagttggac

SEQ ID NO: 372731 - DNA, 90 bp, Homo sapiens
cacctacatccttcccaagaatgtgcttaagaagttcatctgcatatctgaccttcgggcccaagatttgttaaggattccaagtaactc

SEQ ID NO: 372732 - DNA, 82 bp, Homo sapiens
gaccccgaactccaggacagcatccaggcctcattggacagcattcgaggacagtcattttgtttactcattcagccctgtt

SEQ ID NO: 372733 - DNA, 100 bp, Homo sapiens
catcgtgacctccagttccatccatgttgctgcaaatggacctgatcccaaccttgaagaaagtcctaaaagaaaaaatattacatatgaggaattaagg

SEQ ID NO: 372734 - DNA, 90 bp, Homo sapiens
ctggagttaaggaacagatccccggaggagggtaacaagatgctcaactatagtgctcccagtgcagggggttgcctgctggacagaaag

SEQ ID NO: 372735 - DNA, 100 bp, Homo sapiens
tgaaggtgtattcccttaaaaagacggacagcccatcgtgtgaactatagagtttgtggacagatttatattggtattgttgcagcatctggcagtgaga

SEQ ID NO: 372736 - DNA, 102 bp, Homo sapiens
agtgcaaatcttccaagtctaatagacctaaagccacagtcttcaagagcccacggacaccacctcaacggttttttgcatgtctgacacccatgactccac

SEQ ID NO: 372737 - DNA, 129 bp, Homo sapiens
ctcccgcccgcaactccgccgcccaccatggcttccgaggagctgtacgagctggtgctcaagaccgaatcggctgggcttttggcctaggattagaaaggctagccatgatcctctacgacatccctg

SEQ ID NO: 372738 - DNA, 74 bp, Homo sapiens
agtgcccctcccgtccagatctccaccgtacaggttggtgttcgaggaagagacattgttgttcttggtgtgga

SEQ ID NO: 372739 - DNA, 97 bp, Homo sapiens
aaagaccttgccgatggcgcaggagattttccgcctgtctcgtcaccacatccaggagagaagatgactgaggaggaggtggagaccgttctggcag

SEQ ID NO: 372740 - DNA, 100 bp, Homo sapiens
cggcaagtaccaactgcagagccaggaaaactttgaagccttcatgaaggcaatcgtgtgtaaatatgttgctgtggagctgaagtcagcctttgaggaa

SEQ ID NO: 372741 - DNA, 90 bp, Homo sapiens
cttctgcatggaggaggtcattctgccctttcttgggctgtgttcacgttttctggatatgccgcagaaggatccgtgccagaagcaagc

SEQ ID NO: 372742 - DNA, 116 bp, Homo sapiens
gaggacggtctgcatactcgctgcccgccggctccctcccccgcgtccctgcgaccgccgcggcgaagatgattccacctgctcctacgaagcccgactttgatggtcctcgagag

SEQ ID NO: 372743 - DNA, 82 bp, Homo sapiens
gctgtcctcagtcgcttggtcagatagtctaatctcagtttttcagcatctcagaataattaccgcatcgatgccaaccagg

SEQ ID NO: 372744 - DNA, 88 bp, Homo sapiens
tctaaaattaaacatcggggacctacaggttacaaagaaaactacccctgagtgtggtcccacaggatatgtagagaaaatcacatgc

SEQ ID NO: 372745 - DNA, 75 bp, Homo sapiens
gggagcgcggggcgacgctggctgcagggacccggtgacagcgtgagaggctggagtgcaatggcatgatctcgg

SEQ ID NO: 372746 - DNA, 97 bp, Homo sapiens
cctggtggtgccctgtccttgcaaaagcagatggaacatgctaaccagcagactggcttctccgactcagccattggctgtggtattgtagaaagca

SEQ ID NO: 372747 - DNA, 100 bp, Homo sapiens
gggctccggggtaggtgggtgacggcggtcggaggtgtaggagggagccgtggaggtccaggaaatgtgaaatctcttaggccaagaagaacaacctgag

SEQ ID NO: 372748 - DNA, 75 bp, Homo sapiens
tcagcctcccgagtggctgggattacagacacatgcctggacatacaagtcgagaagtactaatcatctttagca

SEQ ID NO: 372749 - DNA, 100 bp, Homo sapiens
ccagtctgagtgtctgtccccagagcctcagtttgtgcaggacaccgacatggaacagggactcactgggggttaccagccagtcttgtctggtcaacag

SEQ ID NO: 372750 - DNA, 140 bp, Homo sapiens
ggcgcctcagctcacagagacgctgggcttctacgagagcgaccggcggcgggagaggcgccggggccgcacagtcaggatggctaaaggtgaccccaagaaaccaaagggcaagatgtccgcttatgccttctttgtgc

SEQ ID NO: 372751 - DNA, 101 bp, Homo sapiens
tcctggctgtacaattcgtaacacaccttcagaacctatacattgcatcgtttgggcaaagtacttgttcaaaaatcttcccaaggctgcagacaccgacg

SEQ ID NO: 372752 - DNA, 140 bp, Homo sapiens
gaatggctcaggtggttggagaagcaacttttattgctagaatggcccaatatagctttgacaataggcctggaaaatccccagagaggagtcacgtctcttcggagccctacgagcccatctccccaccccaggttccg

SEQ ID NO: 372753 - DNA, 83 bp, Homo sapiens
cttcaatatggctcagaaagtgaagaagatgctgctttagctggagccggtgaaacctgaagaaggcagagatatggcaaaca

SEQ ID NO: 372754 - DNA, 100 bp, Homo sapiens
gaaccatctcagaagccatgcccctcaggctggaacttgccctgtctcctcgcagatgaggactctgtctactagtgacgatgtcgaagacagggaaaat

SEQ ID NO: 372755 - DNA, 100 bp, Homo sapiens
gggatcgtgaccgagaccgtgaccgagagcgtgaccgagagcgcgaatatcgtcatcgttagaagattcctctctttggtgctgacactattggccagag

SEQ ID NO: 372756 - DNA, 75 bp, Homo sapiens
caaggaataaacatgcaatgaacccaaaagggcgcagtaacagtatctccaagtcccctggccccagctccccaa

SEQ ID NO: 372757 - DNA, 98 bp, Homo sapiens
agtggcagaggcagaaggagccccagagctcaatgggggaccacagcatgcacttccttccagcagctacacagtacgctggggaggaggaggaggaa

SEQ ID NO: 372758 - DNA, 100 bp, Homo sapiens
tgagtacaacacggtggcaagcaagtttaatcagacctgctcacacttcagaatagagaagatccaaaatacggagctggcatatacttcaccaagaacc

SEQ ID NO: 372759 - DNA, 99 bp, Homo sapiens
atgaggtagaacctgcaaagggcttagcagagagcctagcacctactgagcgctcagtaaagtggttttatgaagaaacagaaagcagtgatgatgttg

SEQ ID NO: 372760 - DNA, 98 bp, Homo sapiens
aggcatgcaccgacatgggcatcacttgccccatcgtccccgggatctttcccatccaggaggagaatgaagtcactgagttctttgtgaccctggag

SEQ ID NO: 372761 - DNA, 75 bp, Homo sapiens
gctgcctcaaatcgtcgtagtgggaacgcagaggaaccgctgctgctggccgaactcaagcccgggcgcccccac

SEQ ID NO: 372762 - DNA, 128 bp, Homo sapiens
tggcgcccgaactcgcccggccgggagccgccgcgggcaggacgcgcgctgcaggctactgcagcactggggtgtcagttgttggtccgacccagaacgcttcagttctgctctgcaaggatatataa

SEQ ID NO: 372763 - DNA, 83 bp, Homo sapiens
tgagcgacgttaagaatccttgagaaaacctaatggaatgatattaccagtgaccaaaagagttttgcggcctccaggtggtg

SEQ ID NO: 372764 - DNA, 83 bp, Homo sapiens
gcttctcccgcgcggggggcgagtaagccagcggcaggaccagcgggcgggggcccacgaaggctgaggctgcagtggccacc

SEQ ID NO: 372765 - DNA, 75 bp, Homo sapiens
catcgccgcttctagaccctactgcggtctcggatattgccgggctaaagaattacctccaaagccattgtcaag

SEQ ID NO: 372766 - DNA, 75 bp, Homo sapiens
cacacctctgcctttgttgggaaatgttttgtcctatcgtcaggtgtgcctgcacaggagacagcaccagccaag

SEQ ID NO: 372767 - DNA, 75 bp, Homo sapiens
gctgcctcaaatcgtcgtagtgggaacgcagatccacattgtttgaagttattgtgagtgcctcgaggaccaagg

SEQ ID NO: 372768 - DNA, 82 bp, Homo sapiens
cacggcgtccagggcagctagggcctgggccgcggttcggccgcgccggccgatggggctctttatggagtttggccctgag

SEQ ID NO: 372769 - DNA, 96 bp, Homo sapiens
aagtgtttctgcctggacatcataaatggggacttggaccctgaggagagtcaggccacgggcagctggtggaatttttgaagaaaatggaatctc

SEQ ID NO: 372770 - DNA, 90 bp, Homo sapiens
ccttataccagcgttatgagatcaagatgaccaaggatgacagagattgtgagccgtgtgtcgaagcgaaagctgggccgccacgtgcgg

SEQ ID NO: 372771 - DNA, 100 bp, Homo sapiens
tcccaagtggctgggattacaggaggtggccaggtggaagtaaaatctgagaagcttgacttcaaggacagagtccagtcgaagattgggtccctggaca

SEQ ID NO: 372772 - DNA, 87 bp, Homo sapiens
aaaatgagtgctgtagatgacatgatagcaggttatacattggctcttcaaagacgttcacctcatcagagaaatccctgactcctt

SEQ ID NO: 372773 - DNA, 83 bp, Homo sapiens
ggcttgtccttgctggtgcatgcgtcgtcggcctctgggcagcagccgtgctatcaagactaatcaggaccttctcccagaaa

SEQ ID NO: 372774 - DNA, 82 bp, Homo sapiens
agatggacaagattccttatataaaatatgcaagctcatcactgcagtggtgatgaagaactggaaagagattgttgagtct

SEQ ID NO: 372775 - DNA, 96 bp, Homo sapiens
cttgaccttatcaacttttttattcagtgttcaggctgtaaaggagtccaacctataccttctcagggaggcaaactagaaatagctggcactgtg

SEQ ID NO: 372776 - DNA, 75 bp, Homo sapiens
gcgccgcggcctcttcggctgcggaccctgccattccggaggagctcctctggtgcaagtgtggtagctattgac

SEQ ID NO: 372777 - DNA, 90 bp, Homo sapiens
gcggcagcgaggggctcggagaggtgctcggattctcgtagctgtgccggagcttacaagaccctatgaaaaaattagttgagaaagaag

SEQ ID NO: 372778 - DNA, 100 bp, Homo sapiens
cttctatgtgattgatcaaggagagacggatatttttcctgaagaacacatcgtcaataaatcacctgcacccaaatctccatctcaggcgctacttctg

SEQ ID NO: 372779 - DNA, 144 bp, Homo sapiens
cggccatgtgaaccgcttgtaccccggggagagacgagccccgagcccggctggacgccgctgcctcagccctgtgaagccagaggagatggactggtctgagctatacccagagttcttcgctccactcactcaaaatcagag

SEQ ID NO: 372780 - DNA, 100 bp, Homo sapiens
gtctctgccaggggaagattccttggagcttgaggagcagctggaggaggaggagagcgcccggcagaagctgcagctggagaaggtgaccaccgaggcg

SEQ ID NO: 372781 - DNA, 75 bp, Homo sapiens
cgggaaaagtggcactgaggctctggaacttctgcccagctctccttgagttacatccatatgggagaatagtct

SEQ ID NO: 372782 - DNA, 83 bp, Homo sapiens
caacgcaagaacatatgccagttcctcgtagagttaagtgggcagaccaacatccacctcagcaaaaacttcttcctgacgaa

SEQ ID NO: 372783 - DNA, 75 bp, Homo sapiens
agtggacatcacggacatccagaaggtggtctttgggaagaagcttcctgcctttgccaccatccccatccacca

SEQ ID NO: 372784 - DNA, 99 bp, Homo sapiens
ctagctccgacgtggaggagatcaacatcagcttcgtcccggagtctcctgatggccaggaaaagaagaattcagaaggagctggcggacatcacttta

SEQ ID NO: 372785 - DNA, 100 bp, Homo sapiens
gagcggcggcggcgacgtggtgtgcaccggctggctgaggaaatcgcctcccgagaagaagttgaggcgctatggaacgtgctcagtcactttcaatggg

SEQ ID NO: 372786 - DNA, 100 bp, Homo sapiens
gtcataaagaaaattgcccttcgggaaatccgaatgctcaagatgtcctcctcgcactttcttaccagccctttgcaaaatttttcttgatgaaagtgct

SEQ ID NO: 372787 - DNA, 50 bp, Homo sapiens
gaaggtctctggagacatcttcagcagaagactcactccatagttcatgg

SEQ ID NO: 372788 - DNA, 100 bp, Homo sapiens
taaaggccaagatccaggataaggaaggttccatcttagcccacatccagaagcaaaagcacttcaatgagcgagaagccagccgagtggtgcgggacgt

SEQ ID NO: 372789 - DNA, 75 bp, Homo sapiens
tgcgcattttcttattaggactggctgataacgaagcagctattgtccagaattggcagagggggtcgatttggg

SEQ ID NO: 372790 - DNA, 100 bp, Homo sapiens
gaaaagcttgagaaggttgatcaatttaaggagttgcaggagaacccctgccagtggatagtgaaaaagacatctttgattacatccagtggaaataccg

SEQ ID NO: 372791 - DNA, 97 bp, Homo sapiens
cagacacaacccggccatcgaggccctgctgcacgacctcagctcccagaggatcaccagcgtggcaccagtggcagttcgcagcctccaggacttg

SEQ ID NO: 372792 - DNA, 110 bp, Homo sapiens
gcagcgccctgaccggagccttcagcggggggagctcggagccctcccagcctgctgtccagcagggcaaccttcgcccagaagaggcacttcaggctctcaccatatat

SEQ ID NO: 372793 - DNA, 99 bp, Homo sapiens
gataaggagatcatagcagagtacgatactcaggtcaaaggaaggaccattacgacctgttcttgaatacattgatctggtcagcagtgatgatgaaga

SEQ ID NO: 372794 - DNA, 75 bp, Homo sapiens
ccctcggacgtagcccggcttgtattgggcttatatgaaacttgaggactatgagaaggcactggtggattgtga

SEQ ID NO: 372795 - DNA, 101 bp, Homo sapiens
ctgatggaatccaatcctctgcttccaggacaagtcctgcgcttggggatcctctgtacgcccgttcactgagtgatcagcagctggactgtgccttggac

SEQ ID NO: 372796 - DNA, 100 bp, Homo sapiens
gtttattaaatggcacttttgatttccaaaatgacttcctgcggctccttcgaaactaatctggattcactccctctggttgatacccactcaaaaagga

SEQ ID NO: 372797 - DNA, 83 bp, Homo sapiens
cccgggccatggccgccgccgatgccgagggggatatgagactttctactcggaatatcctgagtgttgcgtggatgtaaaac

SEQ ID NO: 372798 - DNA, 96 bp, Homo sapiens
ccagctgggtcacccgcactgagtcaacagactgagcgcgtccaggcctgacagctctgcggctcgggccctgagatctgggacatgagcgatgat

SEQ ID NO: 372799 - DNA, 83 bp, Homo sapiens
ggaaaaacttcaaactggtcaaatgcactgtccagacggagatccgggaagtactcccactaccccaacctcctctcaagccc

SEQ ID NO: 372800 - DNA, 100 bp, Homo sapiens
ggaaggagagaacagggcagttatccattatagggatgatgagaccatattctgaagaatatttctgtgtaaaaagaattttctcagggggagatcaaag

SEQ ID NO: 372801 - DNA, 97 bp, Homo sapiens
tcaagtaatggtgcaaagcctgaagcatgttactaccagattcagcgtgagaagcttaactaggctgcataacagcttgaaaactggattatctact

SEQ ID NO: 372802 - DNA, 90 bp, Homo sapiens
agcgagtgtatgatgaaaccacagtagaccctaatgatgaagaggtatttactaccagggagcacccaattcttcttgagaacaccaacc

SEQ ID NO: 372803 - DNA, 100 bp, Homo sapiens
gctagtctttggattccaggaacagctaagactcagcccgcctgcacccaggtgaaatatacagccttgttgctcacacaaagcctgtttggtggtttct

SEQ ID NO: 372804 - DNA, 99 bp, Homo sapiens
cgtctctctgctgcggcgcggggaccgctgtgctctcgcttcccaagctcttccttcagtcccacgactacagtctgtattccttggatgtggaattca

SEQ ID NO: 372805 - DNA, 98 bp, Homo sapiens
ggcgactgtggcagagttgaaggctggcagcccagctggaggcaccccggcctccccggctccgctacctgctggtagtttctacacgagaaggagaa

SEQ ID NO: 372806 - DNA, 110 bp, Homo sapiens
tactgcctgctgctgctcgggcgccgggcgccgggcgccgcggccgccaggagcggctccgcgccgcagtccccaggagaactatcctatccctgaaccaggcccaaatg

SEQ ID NO: 372807 - DNA, 100 bp, Homo sapiens
ccagacagcgaccccagatgaaggtgcgagtattcgtcaaccagttatatcagccaagtttggagcgagaagtcagtaaaaatccagatttgcaggccat

SEQ ID NO: 372808 - DNA, 74 bp, Homo sapiens
gtaatatatctgtatcatcggaggatgaagcctgctgggagcgtgaatgacatggccctggatgccttcgactt

SEQ ID NO: 372809 - DNA, 90 bp, Homo sapiens
atgtcgggacaccccggaagctgggaaatgaaatgacctccaccttcaacccccgagaatgtaaactgtccaagcaagaagggcaaaact

SEQ ID NO: 372810 - DNA, 51 bp, Homo sapiens
caccatctacagcaacgtgatcaaaggtgaaccactgtctaccagagaaga

SEQ ID NO: 372811 - DNA, 87 bp, Homo sapiens
caaaatggaagtgaatccccctaaacaggagcacctgctggcgctaaaagttggttgaatctggcgatgtggaacccatggatatgg

SEQ ID NO: 372812 - DNA, 119 bp, Homo sapiens
gaactgcgatttccaaatcgatagttttagagcctatctattggaattcctcgaactccaaggaaatcctcattgacgattcaatttgttgaaggccaatttgtggactcctacgatcc

SEQ ID NO: 372813 - DNA, 75 bp, Homo sapiens
gggaggacctcacttccccggggtgtaataatgttaactgagattcatttggattcaaggttggctctcaacagt

SEQ ID NO: 372814 - DNA, 99 bp, Homo sapiens
ctgagccgatagcgtccgctaggctgtctgcctcggtacctgttactgctgctacttcctcgtttgacaccttcctggatctgatcgaccgagccttca

SEQ ID NO: 372815 - DNA, 81 bp, Homo sapiens
gactacaaacctgctggcgctttgatcttggacttcccacccaccagaactgtgacttaagagattaaaattaatttggtt

SEQ ID NO: 372816 - DNA, 73 bp, Homo sapiens
ccaatgaccgtgaatataatgaaaagttccagtatgcggaacactttggtcttagtaacctgactggaatgaa

SEQ ID NO: 372817 - DNA, 82 bp, Homo sapiens
ccgggccggagtggccatcggccggagttcaggaggttcgagaacatcatcgaaaattaagaaaggaggctaaaaagcgggg

SEQ ID NO: 372818 - DNA, 100 bp, Homo sapiens
gttccctcacctgcagcagcccagctttctactgattcagtcgggtccactaaaaatctctagtgtatcagaagtaatgaaagaatctaaacagcctgcc

SEQ ID NO: 372819 - DNA, 75 bp, Homo sapiens
ggctgcgtgtgcagctggagggcagactgaggctgatgtgaatccaaaggcctatccccttgccgatgcccacct

SEQ ID NO: 372820 - DNA, 82 bp, Homo sapiens
ccaggatctcgggctcggaacgagactgcacgttgctgatgtatattcaagatgagtggattaggagaaaacttggatccac

SEQ ID NO: 372821 - DNA, 98 bp, Homo sapiens
gacgatgagacagagttgcgaccgcgcggcagactcaccccacacagaccgcgtttctctccagtgtcgacctacacactcactgctcttaccagatg

SEQ ID NO: 372822 - DNA, 100 bp, Homo sapiens
acccttttcccctccccgggccacccagcccgcccaactcccagcggagagcaagttaatagaagatgaaattgcaaccattcttaaatctacattgaaa

SEQ ID NO: 372823 - DNA, 50 bp, Homo sapiens
caaaaagacacttatactatgaaagaggcatcgttggcttcacagtatga

SEQ ID NO: 372824 - DNA, 82 bp, Homo sapiens
gtagacctttgtcgtccatttgctgctcactgctgtgcctgcacgtgaccctgcctggcttcaggaggacaaagtggaggaa

SEQ ID NO: 372825 - DNA, 78 bp, Homo sapiens
gggtcgctgtaggcgctgaggctgcagggaaccgggggattgggcacctgctctgtaaagatgagctgctgaaggcct

SEQ ID NO: 372826 - DNA, 75 bp, Homo sapiens
ctgtttacctccagtgtcccttcttccacatgaaaaggataaggaatgtgaattggacccttgctgcgaaggaag

SEQ ID NO: 372827 - DNA, 100 bp, Homo sapiens
cgggatcgtgaccgagaccgtgaccgagagcgtgaccgagagcgcgaatatcgtcatcgttagaagggagaagatagcattcttcacaaggccaaggatc

SEQ ID NO: 372828 - DNA, 100 bp, Homo sapiens
aatgaagaagcacttaaatactcatctactaggcaagcatggagttggcaccccaaaagaaagaaatcgagctatagcagattatcttcgttcaaatggc

SEQ ID NO: 372829 - DNA, 99 bp, Homo sapiens
acggacgtgctgcagcgctatctgcagcagctgggccggggctgccatcggtactctgagctctgtagcccctggaattttgccttcacagtcaagttc

SEQ ID NO: 372830 - DNA, 76 bp, Homo sapiens
aagacggaaccgccacagcactcaagtcgcaatggaagaagagatcgccgcgctggtcattgacaatggctccggc

SEQ ID NO: 372831 - DNA, 75 bp, Homo sapiens
tggggccggcgatgtgccaccgaggctgaggatgatggtagattgccagcgggacgaccctgggacagtctccac

SEQ ID NO: 372832 - DNA, 150 bp, Homo sapiens
ttttattgtaaaacgacacgagagctaatgctgcatgcccgttgctgcctgaatcagaagggcaccatcttggggttggctctgactgtaccaccatccactacaactacatgtgtaacagttcctgcatgggcggcatgaaccggaggc

SEQ ID NO: 372833 - DNA, 97 bp, Homo sapiens
aagagaaggtccttttctacaaatatcagagccatggctcaggaattgaatgatctggcacgggaccctccagcacagtgttcagcaggtcctgttg

SEQ ID NO: 372834 - DNA, 87 bp, Homo sapiens
ggtgggacaggtcttccacctgaagactgtagtgtgtcatcgattactaaaggtgaaacaccattcaaagtcgtagtcaaatctctt

SEQ ID NO: 372835 - DNA, 100 bp, Homo sapiens
actgctcctgctggccgcctggacggctcgggcgctggagatggcccactgcgtgaccttggttcagctgtccatttcctgtgaccatctcattgacaag

SEQ ID NO: 372836 - DNA, 90 bp, Homo sapiens
ctccagctcactctaccccatctccttgccggttttaaccatgctgaccaacgaaactggctttgaaatcagttcttctgatgctacagt

SEQ ID NO: 372837 - DNA, 50 bp, Homo sapiens
caggaacttgcttctaaaattaaagagaattgtgatctgtctgggtgtga

SEQ ID NO: 372838 - DNA, 100 bp, Homo sapiens
gctctcatgaagcaaccgcccattcagtctacggctggggccgtcccagttcgcaatgagaaaggaagagagagaaaatccttcaaaacggagtagaatt

SEQ ID NO: 372839 - DNA, 100 bp, Homo sapiens
aagaacttcttcccaaaatggaacttgcaatttattctgatcaacaatttgcccagctaaagtactacatctgccccctcttcctgtggctgtaggggca

SEQ ID NO: 372840 - DNA, 75 bp, Homo sapiens
cctgcgaacctgtatgtgcgagaaggaaaacgacagattcctttaaatgagcaattcctcagcaagtgccctaat

SEQ ID NO: 372841 - DNA, 100 bp, Homo sapiens
ggcctcctgcagccatcatgtccgccagcgccgtctacgtgctggacctgaagggcaaggtgctggcccagcagggggagtacagtgaggccatccccat

SEQ ID NO: 372842 - DNA, 90 bp, Homo sapiens
tagatgtggtgaacaaagatgatataatagagtggatttattccctgcaggtccttcccacagaagacacctaccgtatgtgaacgggag

SEQ ID NO: 372843 - DNA, 100 bp, Homo sapiens
tctgcctgacttggaccctggaaaacctggccctcttcaatttctgacaaaagccaatgttttcagttgcaccaagcttagccaccaatgcatcagcagc

SEQ ID NO: 372844 - DNA, 122 bp, Homo sapiens
gccgggatttgggtcgcagttcttgtttgtggatcgctgtgatcgtcacttggtactccaaagattcaggtttactcacgtcatccagcagagaatggaaagtcaaatttcctgaattgcta

SEQ ID NO: 372845 - DNA, 98 bp, Homo sapiens
agacaggcttcttaaggacatggcgtcgaccagaagattatgatattcataacagcagaaagaaaccaaggattgactatccccctgagtttcaccag

SEQ ID NO: 372846 - DNA, 100 bp, Homo sapiens
gccaggctgatggagagctgaacattactcttccagaagaggtgatggatgtggacacactgtactaggccctgagagtggaacccttacatccataaac

SEQ ID NO: 372847 - DNA, 100 bp, Homo sapiens
ctccctgccgccgtcctcgccgcttccccggcggtagcagcctgcagccacgctggagaatgctggaggagaccttaaggatggccaccaccactatgaa

SEQ ID NO: 372848 - DNA, 100 bp, Homo sapiens
ttggagaccccaatccgcatgagcgtcctttcggtattggtggtaatttggtggccattcaggctagcaggatttctacctacctccatttacatagcat

SEQ ID NO: 372849 - DNA, 101 bp, Homo sapiens
actggatgttgctgaagaagaaatcatagacgatgatgatgatgacatcacccttacaggaactcctcctcccacatctgatggagctaccaatcatcaga

SEQ ID NO: 372850 - DNA, 90 bp, Homo sapiens
tgtcttcggtggactccttcggcagtccacccaccgccgccgcctcccaggctgctctttggcgtaaattgcaatcgattagggatcgtt

SEQ ID NO: 372851 - DNA, 100 bp, Homo sapiens
ttgaacaaaagaaaaaagagttgtatttactcaagaaatcaagtacttcagtaagagatggggaattacatgaatgacagtcttcgaaccaatgtgtttg

SEQ ID NO: 372852 - DNA, 75 bp, Homo sapiens
gcacgatcagttacatctatgactgctctggcccatttagagtctcttgcagtggatgttgaggtggccaatcca

SEQ ID NO: 372853 - DNA, 75 bp, Homo sapiens
ccagatccatttacactttacacttaaagcttttcaagccaggccaagaagctgtgaagtaccagggtcctcggg

SEQ ID NO: 372854 - DNA, 74 bp, Homo sapiens
tggagaaattccaagttcagattctccaggagcgagctggacgccactgtggggctctgagagtcctgaattct

SEQ ID NO: 372855 - DNA, 100 bp, Homo sapiens
cagacacggacctgagccgcgaggacacgggctgcaacctgcagcacatcagcgaccgggagaacatagacgcacgaaagcaagagattatcaaagtcac

SEQ ID NO: 372856 - DNA, 80 bp, Homo sapiens
tggacaagtttgcagatcgggagcgcaaggtcgccctcaaggccatgatcaaaactactcgccagggatgaccatgagcg

SEQ ID NO: 372857 - DNA, 80 bp, Homo sapiens
gcagtccacccaccgccgccgcctcccaggtgacaccggaaactggtactcaagtgatgaggatgagggtggaagcagtg

SEQ ID NO: 372858 - DNA, 75 bp, Homo sapiens
cgtgatccagaagtccagagctgaggactgcctgtttgcagcttttcaggatgtccagcaaagaatcctgtggga

SEQ ID NO: 372859 - DNA, 101 bp, Homo sapiens
aagctggccaagatgaagattccccccagtgagatgttcttgtcagaaaccgacaaatactccaagtttgatgaaaatgggataaaaacattcagatggca

SEQ ID NO: 372860 - DNA, 100 bp, Homo sapiens
tggccaagtatggagaacatgaagccagtcctgacaatgggcagaacgaattcagtgatatcattaagtccagatctggacttcttggaacaaatgtgag

SEQ ID NO: 372861 - DNA, 76 bp, Homo sapiens
cagccaccagttcaggagcacttgggagtgatctaggttgtctgcattcaaaagagcattctattaaagctacctt

SEQ ID NO: 372862 - DNA, 74 bp, Homo sapiens
acagagccatccctgacacccggcatgaccagcacagtaaccttggtgcacgaccgaaagggctgtctactctg

SEQ ID NO: 372863 - DNA, 119 bp, Homo sapiens
tttctcagcaccttggcgaagccttgggtttctttcttaaaggactgatttttagaactccacatttgaggctttcatgagaaggacaagaagccatattgccgaaaggatttcttagc

SEQ ID NO: 372864 - DNA, 100 bp, Homo sapiens
agaggagggggactacgtgctggtcttgaaatttgcagaggtctactttgcacagtcccagcaaaagggtgtgctggagtatctgtctgccttcgatgaa

SEQ ID NO: 372865 - DNA, 83 bp, Homo sapiens
gtttctctgctgcaccgacctcgacgtcttgcctgtgtcccacttgttcgcggcctataggaatcttgtcgattggcctggct

SEQ ID NO: 372866 - DNA, 100 bp, Homo sapiens
acaaagtagccttcacaggatcaacagagggcacctgtgctggttgcacttgctttgattgaatgtggaatgaagtacgaagatgcagttcagtttataa

SEQ ID NO: 372867 - DNA, 75 bp, Homo sapiens
atcgtctctctcatcgaggcccaaaccgccaagaaaaagttacgtcgatcacaacacgctcgcaaagaaacagag

SEQ ID NO: 372868 - DNA, 75 bp, Homo sapiens
ttaaaagagcgaataaagtttatcacgccgggtgttcagcctgcaggacctctgctgccgggccatcgtctcctg

SEQ ID NO: 372869 - DNA, 98 bp, Homo sapiens
tttcataggataggactccctcctaagcataccataaagtctccaaaggatggcacagtaaagaaagtgttctacagagaaggtgctcaggccaacag

SEQ ID NO: 372870 - DNA, 98 bp, Homo sapiens
cttcagccactacagtatcgtgggacagaagctgccagtcagaagtccagaaagaagagatagaaaagcatcagctaatgctcgaaagaggaaacatt

SEQ ID NO: 372871 - DNA, 90 bp, Homo sapiens
cgagctgtcaggccgagtgtcaggccgggcaggaccgaccagctgggcatgttcacgcacaaggagtttgagcagctggcccccgtgctg

SEQ ID NO: 372872 - DNA, 75 bp, Homo sapiens
gttgagaatgggaattcatattcctgaaaaatgagctttgccgtcagatggctggtctgccccctaggagactcc

SEQ ID NO: 372873 - DNA, 98 bp, Homo sapiens
aatgggataaacgcttatccactcactcacccttccgaactcttaacatcaatgggcaaatccccacaggagaaggaattgaagataaaactttccaa

SEQ ID NO: 372874 - DNA, 73 bp, Homo sapiens
catacgctgaggagtttggcaacgagacgtggggcgtaacaaaggcagcttcgaaccagtgcaatgacgatgc

SEQ ID NO: 372875 - DNA, 50 bp, Homo sapiens
gttggaaccaggctccctatgcaattggaaaaccaattctgtgtcctcgg

SEQ ID NO: 372876 - DNA, 83 bp, Homo sapiens
ccgccgcagacacgggacccgcttcgaggccgctttggcgccaaatcctgaggaactgtggctgcaccatctgtcttcatctt

SEQ ID NO: 372877 - DNA, 100 bp, Homo sapiens
tcagtccacccaaggtctcctcggatcgcctggagaggcactcggacctggctatgaccagggccagagcactcagatctcagtcagaggagtctgcttc

SEQ ID NO: 372878 - DNA, 74 bp, Homo sapiens
gaagccgcctctgtattacttaccagtgcagagcagagcgggcggaggaccccgggcgcgggcgcggacggcac

SEQ ID NO: 372879 - DNA, 75 bp, Homo sapiens
taccaggatagctgttgtttcagagaaaggaaatctggcattttttaaagtttgcgccccacaaagaggaaatat

SEQ ID NO: 372880 - DNA, 75 bp, Homo sapiens
tgacaggccaagtgcaggggccagaagacaaagtcaattccatgattctggactctacttataatatccctaact

SEQ ID NO: 372881 - DNA, 100 bp, Homo sapiens
ctttccaaaaggtcaaggttcacaagggcaaaaaagtttatcttctggatgccaatgtgaattgtggtctacaaatacattgtggagaaaatagattgca

SEQ ID NO: 372882 - DNA, 75 bp, Homo sapiens
gaccattccgtatggagagccggaatggcagttcggaaaaccctcattcctcctcagcctcctgatgttgctagt

SEQ ID NO: 372883 - DNA, 134 bp, Homo sapiens
tagaccaaagccattgcttttgaagttattaaagtctgttggtgcacaaaaagacacttatactatgaaagaggtagaaacctgtgggttcttgttgtggggcggtttccaaaggaacacagaattgggattcc

SEQ ID NO: 372884 - DNA, 100 bp, Homo sapiens
gagagagggaagtcgcctctgtgctcgtgagtgcatggggtataaggcccggattgcatttctacaaggcgaaagaaaaggtcaagagaacctgaagaag

SEQ ID NO: 372885 - DNA, 100 bp, Homo sapiens
gaaaaccgaagttggaagtgtctcttagcagcgcgcggagaagaacggggagccagagcccccctccatgcgcctgaaggcccgacccagcagccctggc

SEQ ID NO: 372886 - DNA, 51 bp, Homo sapiens
ggaagatggcgcctgttgtgacagggtggagtctttcattttggatcagga

SEQ ID NO: 372887 - DNA, 100 bp, Homo sapiens
tgggcacagccttggaaagtcaggaccgcgacggcagcagagcagagagtagttatcttgatggaattagaagttttgaagtcagctgaagcagttggag

SEQ ID NO: 372888 - DNA, 123 bp, Homo sapiens
ctatcctcggtgctgtggtgcagagctagttcctctccagctcagccgcgtaggtgaaaggtgtagcagtcactcggcctacacccacagcatcgaccttgtgaacccagcgacctgactgcc

SEQ ID NO: 372889 - DNA, 87 bp, Homo sapiens
agagaggatccacctccgaaacccctcggcggcgttcttctgtgtggcccgcctgcaggtaaagtcagtgataaatcttttgtttgc

SEQ ID NO: 372890 - DNA, 82 bp, Homo sapiens
tgtgcagaaggaggtcctgccgtccatgcggaagatcgtcgccacctggatgctggaggattgtcagtggcttcgccccgag

SEQ ID NO: 372891 - DNA, 93 bp, Homo sapiens
gttcaacaagggcccctcgtacgggctgtcggccgaggtcaagaaccggggctcggagcccagctacctggaccgcacggagcagctgcaggc

SEQ ID NO: 372892 - DNA, 100 bp, Homo sapiens
tgatcatcaccaagcagggacgacatgaagaggagcatcggcggcgtgaggaagaaatgatccgacacagagaacaggaggaactgaggcgacagcaaga

SEQ ID NO: 372893 - DNA, 74 bp, Homo sapiens
aaggggtctagatgtaaatgtcagtggaaaggagagctaccatcactaagagtactattaatcccgtagatgca

SEQ ID NO: 372894 - DNA, 97 bp, Homo sapiens
ttttatattggcctgagaggagagtggactgaggtgtgatccctcacatccacaaatctctgattggaaagaagggacagcagaaaactgcttagag

SEQ ID NO: 372895 - DNA, 100 bp, Homo sapiens
gctacgtgagctgggccctgggccagaggcagaaaacggacggaagaaaaggtctggccgcttcctgcctgacacagctcacttcaagaagtgcacaatg

SEQ ID NO: 372896 - DNA, 100 bp, Homo sapiens
tcgcatcttactagtgaagtattctgccaatgaaggaactttccgctgtactttttgccatacagaggtagaagaggatgaatcagcaatgcccaaaaaa

SEQ ID NO: 372897 - DNA, 90 bp, Homo sapiens
tctctgtcagaggaagatcccttgaccagatgatgtgcttctgcatcgcactcatgatgagattgtcctcctgcattgcttcctctggcc

SEQ ID NO: 372898 - DNA, 100 bp, Homo sapiens
ttccggaagtgtatagggaaacctgggggctccctggacaactccgagcaggcaaaatacatatctcagtgcattgatgagatcaagcaggagctgaagc

SEQ ID NO: 372899 - DNA, 87 bp, Homo sapiens
ttgacccccgacggcggggctgcagcgagagtgcatgagcccgaggaggcagggtctgatgggggtttccaggcctgaggtgcccgc

SEQ ID NO: 372900 - DNA, 96 bp, Homo sapiens
gaaaaacaccaaactctctagcaaaaccactgctaagttatccactagtgctaaaaggcggttcaggaccatcatcctccatagccatagcgggca

SEQ ID NO: 372901 - DNA, 83 bp, Homo sapiens
cctggggctgctaatgctctgggtctctggctatgactttgcagccgtcctggagtggttcgcggagcgtgtggaccgcatca

SEQ ID NO: 372902 - DNA, 100 bp, Homo sapiens
gcgcatcttagcttgccccatccccatttgaggtctgtcggagctgcccttcagtgtgtgggagctggtgaggtggccaacttcgctgcgtatgcgtttg

SEQ ID NO: 372903 - DNA, 75 bp, Homo sapiens
gatgaattggaagcaccttaaagaggatggttttctcacgatgagtcggaggaggatatcgtgtaaagatctggg

SEQ ID NO: 372904 - DNA, 100 bp, Homo sapiens
agaagaaagaagataaaattggaaaagtgttgcccgttatgcatgagagtcaccatgctcaaagtgaatatattaagaacatatgcagtaatgtcacctc

SEQ ID NO: 372905 - DNA, 75 bp, Homo sapiens
caccaaggcccccaagccctccttcgtgtcgtacgtacgccctgaggtcatttatagcaaatacactgacctggt

SEQ ID NO: 372906 - DNA, 96 bp, Homo sapiens
gtcaccaatgccagcctagtccttttcagttgtcaatagggtgactggaaatttcaagcatgcatctcctattctgccaatcactgaattctcaga

SEQ ID NO: 372907 - DNA, 100 bp, Homo sapiens
ccgcgcaagatgttgacgttgcagacttggctagtgcaagccttgtttattttcctcaccactgaatctacaggtgctgacggccacccaccatcatcta

SEQ ID NO: 372908 - DNA, 100 bp, Homo sapiens
gagagactttgctccatattgcttctattaagatgcggaaaacgccatgcggtacataaatgggacgcgtctggatgaccgaatcattcgcacagactgg

SEQ ID NO: 372909 - DNA, 82 bp, Homo sapiens
cgccggctgggctctgcgggctggcacccggcccggggcgggacccacctccgctttcgggacgagcctgtggagtgggaga

SEQ ID NO: 372910 - DNA, 83 bp, Homo sapiens
gcagatcgccgtggccaacgcgcaggagctgctgcagaggctgggaggcggcagaatgcagccagaggagggcacaggctggc

SEQ ID NO: 372911 - DNA, 100 bp, Homo sapiens
cctgggagcatctgcagtaactgcaagtactggtcttttgtggaagaggacttaaccaccaccatgtcgagcaaaagaacaaagaccaagaccaagaagc

SEQ ID NO: 372912 - DNA, 100 bp, Homo sapiens
tccgacgcaagactgtcccggcccgggtaagtggagaaagagttgaagggaaagtgttgggatttggacatggagttcctgaccctggagcctggcctag

SEQ ID NO: 372913 - DNA, 75 bp, Homo sapiens
agatatctcagtgttctccgctctcataggtcagccaacatcccatgcaccatcgtggagactggctggatgccc

SEQ ID NO: 372914 - DNA, 75 bp, Homo sapiens
tgtggatcgctgtgatcgtcacttgaggttctgtctgaacaccctccagcacgagtggttccgcgtgtccagtca

SEQ ID NO: 372915 - DNA, 103 bp, Homo sapiens
tttaatttgatggatcctaaactcttggcttcaggttctgatgatgcaaaaggtatataatgtttacatggcagggaggcagctgtgttctaagcggtaccgg

SEQ ID NO: 372916 - DNA, 75 bp, Homo sapiens
gaggcgtcgctgattccagagagctaaagccgatgggctggttgatatgtgaagagccaacctgtcgcaatcgaa

SEQ ID NO: 372917 - DNA, 75 bp, Homo sapiens
gtcccgagcatggcaggctccctgcctccctgcgtggtggactgtggcaccggggagtactacatcaccatggtg

SEQ ID NO: 372918 - DNA, 82 bp, Homo sapiens
cccgggaccgccaggccaccaccggccgcctcagccatggacgcgtccctggagaagaaataacatctgctttgctgccgag

SEQ ID NO: 372919 - DNA, 83 bp, Homo sapiens
cttgcattttcccgcgtgcgtgtgtgagtggggggatatgagactttctactcggaatatcctgagtgttgcgtggatgtaaa

SEQ ID NO: 372920 - DNA, 95 bp, Homo sapiens
atatccaagaacaagcactgcaggtgcacaaatggagtccagaggaggctgtaagagccatcgccaagatccggtcatacatccacatcaggcct

SEQ ID NO: 372921 - DNA, 110 bp, Homo sapiens
ctgaagagcgacaagccgctggcagccgcggatctcaccgccgctcagggcgccatgtcagaaccggctggggatgtccgtcagaacccatgcggcagcaaggcctgccg

SEQ ID NO: 372922 - DNA, 82 bp, Homo sapiens
ttattcgagtgaccgagaccgcggccgggaccgaggatcctgaagtacatcctcagtcgtgagatcaaggagaagcggctcc

SEQ ID NO: 372923 - DNA, 100 bp, Homo sapiens
gtcagaagtgtggctgccatccaccccagcctggagatccccagaatagccaggccagaagaaggaaggcctgtggtgagtgggacaggaaatgacatca

SEQ ID NO: 372924 - DNA, 108 bp, Homo sapiens
cgaagggctctcctgatactaacagttttacgatttaaaacttcgccagaatttttggcagatatccctgttacaatctgtacatatccatttgtatttgatgcccaa

SEQ ID NO: 372925 - DNA, 100 bp, Homo sapiens
cgggccctgcatgtggagctgccgtctcagcagggaacgggtatggcaatccccgaaactcaccaggtctgctggtctcacctggtaacttgaacaagaa

SEQ ID NO: 372926 - DNA, 82 bp, Homo sapiens
gcactggcagcactttcctgttgaagaaatcttcctggcgtgtggtttcaaagtcgtccgtctccaagagagtatgaagaga

SEQ ID NO: 372927 - DNA, 100 bp, Homo sapiens
taagcacacctggagcaacaacctggcggtgctcgagtgcctgcaggatgtgagggaggtgatgttctgcaccctgaacacccacaaagtggacatggac

SEQ ID NO: 372928 - DNA, 74 bp, Homo sapiens
gccacggctttagcggtgtcttttgcggaagtcagcctcataccaaaccatccgtttttgtcatgaaaaatgga

SEQ ID NO: 372929 - DNA, 98 bp, Homo sapiens
gacaaaactcctctctatagtcaactccttcaagcatataagtggtcaaacaagatgccttcaattaagttgcagagttctgatggagagatatttga

SEQ ID NO: 372930 - DNA, 75 bp, Homo sapiens
acgcgggcgagcggctgtgtggatgtcggcgaagccgcgggcgaggctgaaggggatgctaagggagataaagca

SEQ ID NO: 372931 - DNA, 101 bp, Homo sapiens
tgggggaactgctggggaaggcgattggcatcgatctctccatcccttccgaggcccgacttcggctgaagccgacgtagcttctctgaacagacgcatcc

SEQ ID NO: 372932 - DNA, 88 bp, Homo sapiens
tcggacctttcccgctggcgcgcagcctcagctaggcttgtgagaaggttggcatgcagatccctcgattctgttatcatgaaaggtt

SEQ ID NO: 372933 - DNA, 100 bp, Homo sapiens
ctgagagttcactggatgttgctgaagaagaaatcatagacgatgatgatgatgacatcacccttacaggtgaccattgtgaggtagatattttgttcta

SEQ ID NO: 372934 - DNA, 97 bp, Homo sapiens
catccgccccccgctcaatggcgactccctcaccgagtacgaagcgggcgtttgcgaaggtttgtcctggttgtggtcaagactggatgatgtaact

SEQ ID NO: 372935 - DNA, 100 bp, Homo sapiens
actttctgtctctatgaatgtgactaccctggttacctcatatttttcggctttgtgagaaaccttaccatcaaacacgatggccagcaacgttaccaac

SEQ ID NO: 372936 - DNA, 46 bp, Homo sapiens
agccattcgggttggagtaattgccttcacagttgttgatcacata

SEQ ID NO: 372937 - DNA, 95 bp, Homo sapiens
gagacaaagttgaaaacaaagtgctggactaccgaccagactcccggaaatcatgttggtaggatcccagtctttttcgcctggagggcccaatg

SEQ ID NO: 372938 - DNA, 83 bp, Homo sapiens
ctgcgctgttccacctcattcaacttcagtgtcaacagcatctccaccctggagcctgtgagccggtgccagcgcctgagtga

SEQ ID NO: 372939 - DNA, 80 bp, Homo sapiens
cttagctgtgctcgcgctactctctctttctggcctggaggctatccagcggggtgaatctctacattaagaacttggat

SEQ ID NO: 372940 - DNA, 99 bp, Homo sapiens
caaactacaacatttcttcctgaagacttcacctactttgcaaaccatacctgccctgaaagactcccttccatgacccagcctcagcagaagccccag

SEQ ID NO: 372941 - DNA, 75 bp, Homo sapiens
aatgatgatgctcagtttgatgcgtcacactacgacagtgagaaaggagatagttctgccccagagacaagtatg

SEQ ID NO: 372942 - DNA, 100 bp, Homo sapiens
agtgtcagtttctcaaaaccagcatcgagatgtagttcctgagcatgaggctcccagcagtgagatgtcatctgggtgattctcagtgtggaggtgggtg

SEQ ID NO: 372943 - DNA, 102 bp, Homo sapiens
gctgctcaaaacctcgctccggaaaggggacacctggagcaatttacagcaatgagggatttatacatgaaaaatggacaaggatttgcattagtttattcc

SEQ ID NO: 372944 - DNA, 100 bp, Homo sapiens
tttcctccaacattgatgttcctccagcaaggtctcttgcagctgaatggggtaaatatggaatgcgattcaatgtgattcaaccagggcctataaaaac

SEQ ID NO: 372945 - DNA, 100 bp, Homo sapiens
ggtgactatactggggaccagcctcttaatcggatgtatcttgtattcatgggtgcaggttcgcagccctgtcaaccagctccgagccggcagcgaaacc

SEQ ID NO: 372946 - DNA, 98 bp, Homo sapiens
ggcttcaggatttacacagacgtggggcgatgcttgtgaccctgcagctcctcaaaagagaagaagaaggaggttcctgctgtgccagaaacccttaa

SEQ ID NO: 372947 - DNA, 50 bp, Homo sapiens
ctacaggcgtgtgtcactgcgcccaggttatcaggacaccccatgggaga

SEQ ID NO: 372948 - DNA, 82 bp, Homo sapiens
agaaaaaccaagcgcttgaacaggaaactaaatatattttgccaactttggaaaaagaattattcttggcagagcacagtga

SEQ ID NO: 372949 - DNA, 98 bp, Homo sapiens
ccaaaaggaatgaccctagccagactcagggatcaaagagcaaacagattcagtggcctgcattgaccaaagagaaccctgtacagtaagaaatatgg

SEQ ID NO: 372950 - DNA, 100 bp, Homo sapiens
tctgcaggccatgctgcactaccagaagtatgccagcgaaaggacccgctttcagagcaatggtggaacaaagcggcaaaagatatcccatcaaaattat

SEQ ID NO: 372951 - DNA, 50 bp, Homo sapiens
gagttcaagaaacgagatgcacaggattatattcaactgctacatccctg

SEQ ID NO: 372952 - DNA, 83 bp, Homo sapiens
ctcggactccgcggccggcccggcgcggcccagcgccctcaggattgtcagtggcttcgccccgaggagagctgactgccctg

SEQ ID NO: 372953 - DNA, 100 bp, Homo sapiens
cggctgggcgttcatctaccacgctttcgtgtgcttttgaagatgatgatatcacgcacgttgaaggaagtgtagatcctattcgagatatagaaataat

SEQ ID NO: 372954 - DNA, 98 bp, Homo sapiens
tcgcccggctcatttggctgttttcttacaccatgtagtttcacaatttgaccctgcgactttgagctggctttatgtgctggggcagaagagatccg

SEQ ID NO: 372955 - DNA, 85 bp, Homo sapiens
aatggatggtcagcacaaccaatttgcattaaacctgggccctttcctgggattgtggacatgttcggaactggaggtggcctgc

SEQ ID NO: 372956 - DNA, 83 bp, Homo sapiens
gaagaataaccctgcaaccccttctacagccatggggttctcagaggcactgtgactgacttccctggatttgatgagcgggc

SEQ ID NO: 372957 - DNA, 82 bp, Homo sapiens
ccgcgcctgggctgccggcacttcgcggcagggaacccaccaagaccaacctggtcacattcttccataccgacctcagcgg

SEQ ID NO: 372958 - DNA, 100 bp, Homo sapiens
ctccgcggcgtcctcggcgctgaaggggttaattcaacagttcaccaccattaccggtcaaaatgcagatcttcgtgaaaacccttaccggcaagaccat

SEQ ID NO: 372959 - DNA, 101 bp, Homo sapiens
gacagtccgtatagtgtagtgtgcaagtattttcagcgagggtactgtatttatggagaccgctgcagtgcccaccagaagtatgtccgacaagcctggca

SEQ ID NO: 372960 - DNA, 83 bp, Homo sapiens
ctcagacctgccaatttaccagagataattgataacaccctgtaacagctgagatcagtttgacaacttagaaaaacacacac

SEQ ID NO: 372961 - DNA, 116 bp, Homo sapiens
gcatgactcggtggtcatggtcacccaggagagtgacagcagctttctggtcaaggtgctggggctaaagtgcccagaggtgtccctggaggcccctgtgagcccagccagcgcag

SEQ ID NO: 372962 - DNA, 75 bp, Homo sapiens
gaaatcctaatgacagtctccaaattcgcctccatctgtaccatggtcttgaggaccggcccagctcaggctcct

SEQ ID NO: 372963 - DNA, 75 bp, Homo sapiens
cggccactccggtcccgacacctagcctgcgtagaacgtcatgacatgaataccttaagcctgcccctgaacata

SEQ ID NO: 372964 - DNA, 100 bp, Homo sapiens
tggagtcccatcatgacacgtggcccccagcctgtcccccactggagcctgccaatctgcgctcctcagaccaccggcaggtgaacagcctgatgcagac

SEQ ID NO: 372965 - DNA, 83 bp, Homo sapiens
tgaagaactcagatcaaaacctgttactgaaggaactggtgatattattaagccttgttgtcctcctggtgcgaagagctcgg

SEQ ID NO: 372966 - DNA, 101 bp, Homo sapiens
acgagcagatcctggtcctcgatccgcccacagacctcaaattcaaagatcagggagctgattttggatggatctttacagttgatccaggaaggtctcaa

SEQ ID NO: 372967 - DNA, 75 bp, Homo sapiens
ctgtcttcggtggactccttcggcagtccacccaccgccgccgcctcccagaccctgtattcagtggatcagctg

SEQ ID NO: 372968 - DNA, 50 bp, Homo sapiens
caatgacctgttttcttctgtaaccacagtggaatgcagtagccctctgg

SEQ ID NO: 372969 - DNA, 98 bp, Homo sapiens
cgtcagggctcgttcccaagtctctttccagaggccaggctttatgggagcatgggttaccagcgacgcaccctagatgggagcctcactgtattgcc

SEQ ID NO: 372970 - DNA, 74 bp, Homo sapiens
ggcggtgtagaggcggcggacgggccggagggaggatgttaaagccccgcgcatgtagagcgcatgaagtacag

SEQ ID NO: 372971 - DNA, 100 bp, Homo sapiens
tcttaagtcttttatggagacagaagtgaagcccctgtggcctaagggctggatgcaggcaaggtgtaccttcagttgaatttttagaatctcccattac

SEQ ID NO: 372972 - DNA, 100 bp, Homo sapiens
tagacttgtagcagctgaccgaaggtgtctcctttcctcttgggccgggcactttgggctgccagtcggttcactgttgctatgtcccctgaactgatcc

SEQ ID NO: 372973 - DNA, 50 bp, Homo sapiens
ctatcggatgctgagatcattcaggtctattctggataagcaggttttgt

SEQ ID NO: 372974 - DNA, 75 bp, Homo sapiens
ctggagttacgcttgtacagtggaaaccagcccaagctacaaaagtggtgctttctatgggaggattctcgtaac

SEQ ID NO: 372975 - DNA, 95 bp, Homo sapiens
tttctgaaggtgttcattccatctctcttcctttctcatgttttggctttggggctagggtgcctgcattattgcttactggcgatatggttcat

SEQ ID NO: 372976 - DNA, 100 bp, Homo sapiens
ggatcgatgtttcaatattggaagcgctttgatttacagcagctgcagtttctccacagacactacccaaagcagtccttcactacagtggcagacagac

SEQ ID NO: 372977 - DNA, 100 bp, Homo sapiens
aagaagtcgcccatcgcagcagctcggtctcagcggcggtggcagccgaggtgcaggatgcaagaaggcgccccccggccgggctcccgctccaggcctc

SEQ ID NO: 372978 - DNA, 82 bp, Homo sapiens
ttacagtttataggattgaatatggcagctttacttgaagcaaggtctggataaaattgagttcttacagagtcatgaaaac

SEQ ID NO: 372979 - DNA, 101 bp, Homo sapiens
acagatgatacctttgatccagaacttgcagcaacaataggcctcccagacctgtaaccagcatgaacgacaccctgttctcccactctgttccctcctca

SEQ ID NO: 372980 - DNA, 90 bp, Homo sapiens
gggagggttcctgagttacctgaaaaggggcatgccagaacagtgggctcgattactacagacctccaatatcaccaaactagagcaaaa

SEQ ID NO: 372981 - DNA, 98 bp, Homo sapiens
tatgataccttacttaatactatatgcacccaatgtccagggagcgtgcaaaatttgtcaaaagtggccttttattgtaaaacgacacgagagctaat

SEQ ID NO: 372982 - DNA, 100 bp, Homo sapiens
gtgttctgtcaacattctccagtttatattcattgccttaagactggacaagatcatccactggccctggcttgctggcttgagtcttcgtaaagtaaac

SEQ ID NO: 372983 - DNA, 75 bp, Homo sapiens
gaaccatgacaggcatgttgtataaatgtacagttttgtttggctatgccaccacagtcatccccagggtctata

SEQ ID NO: 372984 - DNA, 100 bp, Homo sapiens
agtgggtctggagtaaacaacagaagaactgagctatttttgaaagaacatgaccaccttcgaaatcacagcaaactgtacaatggcagttgagtgggtt

SEQ ID NO: 372985 - DNA, 95 bp, Homo sapiens
tacgacaccatggtggaggagcagtacggccagatgtacatcaaggcctccggcagctatgcaggggacggcaaaacagaacagaaaggcggaga

SEQ ID NO: 372986 - DNA, 96 bp, Homo sapiens
gaatctgtggatgttcttgctttcgtggtccacgttaatttggagtggcccctggagtcagtttcctacaccatccgaggccccacccagcacgag

SEQ ID NO: 372987 - DNA, 97 bp, Homo sapiens
agtgtgtatctctacatgcgctctttgaaagcgccccggaatgacctgtcgcctgccagctctgaatggagatttacagacagtcatctgggtggag

SEQ ID NO: 372988 - DNA, 50 bp, Homo sapiens
aatcacttgaaaagaggctcgagctttggctagatcagagtctaagagag

SEQ ID NO: 372989 - DNA, 100 bp, Homo sapiens
aagtggaggaggcggctataataatagcaaacatcgatggcctactggggataacattcatgcagaacatcaggctcacaggctttcagctgccagccac

SEQ ID NO: 372990 - DNA, 100 bp, Homo sapiens
caaggagacaggaacatgtggctgctcccagctctactccttctctgcctctcagcccgtgatgctgatgagcgagagaagtggatccatgccttagaag

SEQ ID NO: 372991 - DNA, 51 bp, Homo sapiens
tgcagaagaagccaaaaacattctgggttgtctttgaagcttggtgatgct

SEQ ID NO: 372992 - DNA, 75 bp, Homo sapiens
ccctaccatccgccccagcgcaggatgaacctgaagggcatccaggtttttaccacctcatacccaagcttacag

SEQ ID NO: 372993 - DNA, 100 bp, Homo sapiens
atcagcatttgcatggaacacatgtggctgtcgctgggcgcggactccaacgggagcggcgtctctgtgctgctggagctggcacgcctcttctcccggc

SEQ ID NO: 372994 - DNA, 52 bp, Homo sapiens
gggctctcctgcagtgccccttctcagagcagtcattatggcgaaccttggc

SEQ ID NO: 372995 - DNA, 75 bp, Homo sapiens
tggcgctgaccttcatcacagacaacagcctggtggcagcgacgctgaccggaaaggagattgagattgacattg

SEQ ID NO: 372996 - DNA, 50 bp, Homo sapiens
agacaacagatcttgcaaggctaaaattgacctgatcagaaatttaatga

SEQ ID NO: 372997 - DNA, 90 bp, Homo sapiens
cccaccgctgccctcagctccgagtccagggcgaggttaatttggagtggcccctggagtcagtttcctacaccatccgaggccccaccc

SEQ ID NO: 372998 - DNA, 100 bp, Homo sapiens
tgtctgaatttctcaaggttgcagaggtagttgaactaaaattcggtgggaaagacatccctgtcaccagcgccaaccggattgcgtacatccacttggt

SEQ ID NO: 372999 - DNA, 101 bp, Homo sapiens
ggtagagccagtaagaagacgccgggctcctgaacccagtgacttgattgtaaaaatttacagagcggaatcatatgctggtctccaagagtttaaagcag

SEQ ID NO: 373000 - DNA, 114 bp, Homo sapiens
cgaggggctaacttcagcggtggcaccgggatcggttgccttgagcctgagtcagtggcctttcccccttcatgggagacaacgataacgaaaccttggccaacgttacctcag

SEQ ID NO: 373001 - DNA, 82 bp, Homo sapiens
tgtggcagaagaacaagaagttgagaccgagaatgtggaaacagggaagtgggggtgaagatgaggatgacccagatgaagg

SEQ ID NO: 373002 - DNA, 100 bp, Homo sapiens
ctacacaaccatctgaacaaaaagctgctttccccccacctgaacagaaaactgcatttgacaagtatttgtgtggaagtaatcgaaaagacaacatatt

SEQ ID NO: 373003 - DNA, 75 bp, Homo sapiens
cgccctcttcctcctggccagcctcctgggcgcgggccagaagcggactcctagaagaggggagcagcaaggatg

SEQ ID NO: 373004 - DNA, 101 bp, Homo sapiens
catggttgagggagactgtgatgaggaagttattccaacttttgacatggctgtcaatgaaatcttctttgaccgttaccctgactcaatcttagaacatc

SEQ ID NO: 373005 - DNA, 74 bp, Homo sapiens
ggccccgaaggctctccatcgaaggcaacattggtactccaaagattcaggtttactcacgtcatccagcagag

SEQ ID NO: 373006 - DNA, 98 bp, Homo sapiens
caactagatggtgaaactgactggaagctgaaggtggcagtgagctgcacgcaacagctgccggctctgggggactcacaccacccggcaagaactgc

SEQ ID NO: 373007 - DNA, 75 bp, Homo sapiens
agtggcccagtcttaccgttcagtggcttcctgaagtgactaacacccagtcagcttgaagagtttcaaatggac

SEQ ID NO: 373008 - DNA, 101 bp, Homo sapiens
tactgtcctccttggcttgggcttccagatgctccagttagcctggtacggttttggatcacaggcctggaagagagaagggcacagttacctaagtatca

SEQ ID NO: 373009 - DNA, 132 bp, Homo sapiens
gagcagcaagttcgaggatccgggcgtggagccgagtgaggccgcagcccagcgggcctcgggcgtgaatggtagtgtctagaaagggtatgtcccttcaagagagaggtgccaatgtccaaccggcctaat

SEQ ID NO: 373010 - DNA, 100 bp, Homo sapiens
tcggctcaccaccacctccgcctcccgggttcaagcgattctcccgcctcagcctcagaagttgctggaattacagcggacaaggcaaaatctcagcaag

SEQ ID NO: 373011 - DNA, 74 bp, Homo sapiens
gaacatgaagactaacatttatctagatgaagagggccaccagaaagaccgtgttggggatgtcctttgcactg

SEQ ID NO: 373012 - DNA, 75 bp, Homo sapiens
cgtcaatgacttacgccaagaagacaattaccagctctggctgggtcgccacaacttgtttgacgacgaaaacac

SEQ ID NO: 373013 - DNA, 82 bp, Homo sapiens
gaaggcaactaccgcgagctgcgctggttcaccccgtggtcgaggagtcggttggatggcaagcatgtggtgtttggcaaag

SEQ ID NO: 373014 - DNA, 97 bp, Homo sapiens
gaattctcttccacagcacctgaaagaggactggactcgggccatatccgtggtgccgtcaacatgcctttcatggacttcctgactgaggatggct

SEQ ID NO: 373015 - DNA, 74 bp, Homo sapiens
ccctcagctgcactgtggcaaggcttttgcttccaaatacaagctgtatagttgaatccttggcctgaatatat

SEQ ID NO: 373016 - DNA, 89 bp, Homo sapiens
gcttgaagctttgttcctcaccgtggatccctacatgagtcaagctgtattagtcgacaggaccatttacatttcaggacagataggca

SEQ ID NO: 373017 - DNA, 96 bp, Homo sapiens
aaattatgatctacctaccaatcgtgaaaactatattcacaggtctcgtcagcctatctcggcccctctcttttcatgtcctgacaaaaacaaggt

SEQ ID NO: 373018 - DNA, 101 bp, Homo sapiens
attcgccaggctcttcaggatctgctttcagagtacatgaacaaccttagaccatgctcagcctccaagcagccttgtcatcgacaaagaatctgaagttt

SEQ ID NO: 373019 - DNA, 82 bp, Homo sapiens
attggatttaaaagacagtcctcgtcagcactgactttcagctatggaatcggagaacaaggggtctgtggaaatcatgaga

SEQ ID NO: 373020 - DNA, 100 bp, Homo sapiens
gtcgtttggtttgatcttgttgactatgaggaagttctagcttgcctgggaccagtggcagggaccccggaacctgaaggtgctgacaaagatgacctgc

SEQ ID NO: 373021 - DNA, 76 bp, Homo sapiens
cagaagctgaaattgatatggaactatttcatcagttaaaggcattaggatttcctgaaggacttgtgatacaagc

SEQ ID NO: 373022 - DNA, 96 bp, Homo sapiens
tcaagaacacaagttgaatcactcagacctgaaaaacagtctgaaaccagtatccatcaatacttgggaagcagctcgagagtgtcgtagaaagaa

SEQ ID NO: 373023 - DNA, 75 bp, Homo sapiens
tgctgcttttgatgtctgacaacgtggatcgttgttttgaaacacactttataaaacccaggtaaaggaacttaa

SEQ ID NO: 373024 - DNA, 100 bp, Homo sapiens
ctggactttgggcgtcccattgccatgcattccaaaatatgcccggtgctatccgcccagctgctcctagaccaccatttagtactatgagaccagcttc

SEQ ID NO: 373025 - DNA, 75 bp, Homo sapiens
agtggcaggtgacagtctgcatgtgcagttttcaggtcccgaacccctggtaatagaattgtttacctttatacc

SEQ ID NO: 373026 - DNA, 50 bp, Homo sapiens
ccaaatttgaaaggcttcgaggcagcggttatcaatactctggctgacca

SEQ ID NO: 373027 - DNA, 100 bp, Homo sapiens
aacctgaggagagaatggcatgccaggttaatgttcgtgaagaaattgaagagttttttccaagaatgtggaagataaatcaagataaaagaaggctaat

SEQ ID NO: 373028 - DNA, 100 bp, Homo sapiens
ccgggcggccctccctttcatcagtcttcccgcgtccgccgattcctcctccttggtcgccgcgtccttggctggcgtattttatttggagagaagcaag

SEQ ID NO: 373029 - DNA, 80 bp, Homo sapiens
ttaattttagggtcctttatatagaagggagagtagaggacagaaaaatggttcgtattgttcttacaaagacaaagaga

SEQ ID NO: 373030 - DNA, 100 bp, Homo sapiens
tgaaaagctgagatatgatgattttgaagtcatttcacatcgaagccatgatttaaatatcggcgttaagggctgctcttcacctatcgtggtgaagttt

SEQ ID NO: 373031 - DNA, 90 bp, Homo sapiens
ggaatattggggggctcggctgcagacttggccaaatggacgggactattaaggaatgggtaccacagaccatgtcatcgtcctggcgtc

SEQ ID NO: 373032 - DNA, 136 bp, Homo sapiens
tgagaggtgctaagtggatcctctggccagctgactgcacttcttttttgagaaaggaaggaatatatcctgactgatttatcgatcaggatgggatcctcatagaggggcagataatgtttctactaaatcttcg

SEQ ID NO: 373033 - DNA, 75 bp, Homo sapiens
tcttcagcggggcgctccaggaggcactcacagggtttggaaatcccttgtctccaggttgctgggattgacttc

SEQ ID NO: 373034 - DNA, 82 bp, Homo sapiens
tcgcgacggccaaaaggagcggcgcggtcttcgtggtgttcgtggcagataatatcgtctactgcattatttttggctgcaa

SEQ ID NO: 373035 - DNA, 90 bp, Homo sapiens
ccccttgctggctgcccctcaggacccctgctacgtggagaaaacctcggataagcagtgcctgatcctctactgggtgttcaacactgg

SEQ ID NO: 373036 - DNA, 75 bp, Homo sapiens
cacagctgaaggctgcgagggactaagagcagaattttaggtgatgggcaagtcagaaagtcagatggatataac

SEQ ID NO: 373037 - DNA, 100 bp, Homo sapiens
ctgcagagctcggaggggcgctgtgtgtacatcacccccatggaggccctggcagagcaggagaccagccactaactggggcgtacacagtgaccctgga

SEQ ID NO: 373038 - DNA, 73 bp, Homo sapiens
agtggtcgcttcttctccttggtacatgactcaaggcttggacatgtctggtgtttttatggaaatggtgaag

SEQ ID NO: 373039 - DNA, 75 bp, Homo sapiens
atgggaacgtcatcgttatcaccattaactaccgtctgggaatactagggcaattaaagcatttcaagatgtcct

SEQ ID NO: 373040 - DNA, 82 bp, Homo sapiens
gcgcgcgggggaggagaggagcggccggcccgccttgggagctggtgaggtggccaacttcgctgcgtatgcgtttgcacca

SEQ ID NO: 373041 - DNA, 97 bp, Homo sapiens
ggaacccgagaccacagccaccactattctagcatccgtgaaggagcagatatgggaaaatagtctccacaaaggcaattttggataagacaacgaa

SEQ ID NO: 373042 - DNA, 100 bp, Homo sapiens
cggacgcttgtcgagaatgcagattcctggctctccccaggctccgaggaggatgaggcccacgagggttgcagccgagagaacctgggccggatccagt

SEQ ID NO: 373043 - DNA, 106 bp, Homo sapiens
ctcactgaaaattggtattgttggattgccaaatgttgggtatggcatttcaaatatagatacaaccattgaaggaacgtcagatgacctgactgttgtagatgca

SEQ ID NO: 373044 - DNA, 82 bp, Homo sapiens
ccgggaggagaaggaaggcatggaaagttccagccggttcgagagctaggaggaattttgttgtcagagaataaaaggaggt

SEQ ID NO: 373045 - DNA, 80 bp, Homo sapiens
tgccaattcgttttcaggagcatctccaggaaatttgcgagaatccccgatttatcattgatggagccaacagaactgac

SEQ ID NO: 373046 - DNA, 100 bp, Homo sapiens
caaatcacaataagtctttagctgcaggtgtgtggggtgaatatgcaggttttgatgagacgcagccaacagctgaatctggtggaaaaggaaaagtgat

SEQ ID NO: 373047 - DNA, 100 bp, Homo sapiens
ccagaaatgaacctgcccacggtgtccgcgctcaggtttttcagttatgggacaaaaatattatatcaaaacactgaagctttgcaatctaaattctttt

SEQ ID NO: 373048 - DNA, 100 bp, Homo sapiens
gagcgtcgcagagaacttagaaggcaaaagagggaggagatgcgactcgaagcagaaagtggacagtttcataaagcataacatgagtagaagaatctac

SEQ ID NO: 373049 - DNA, 100 bp, Homo sapiens
gaattttgtctcaacactgctccagattactatgtcggaacagctggatttacctgtgagacaggcagtttggtgaggattcatcaacctccagtatgat

SEQ ID NO: 373050 - DNA, 100 bp, Homo sapiens
aacagtatgaaataaacgccactcctaaaggctggtcctgccactgggacaggaccaagttcctgagcgacaggtggatgctgcagaagggctttctgaa

SEQ ID NO: 373051 - DNA, 100 bp, Homo sapiens
ggaaccattacagcaaatgttgccgggacaaagtttgaaattgcgacttgtttaagtatcactgcaatgctgacactgggaaattgctatttctgacatg

SEQ ID NO: 373052 - DNA, 100 bp, Homo sapiens
taaccatactttgtattacgtgaccagaactgctatttgagattctggaagccagtgatgcagtcttgcttggccttcaaagaaaaacctcggtatccac

SEQ ID NO: 373053 - DNA, 100 bp, Homo sapiens
gagcgtgctccggagttcctgggaccaagtgttcgccgccttctggcagcggtacccgaatccctatagcccctgtctatcaaaagttattagagaggat

SEQ ID NO: 373054 - DNA, 90 bp, Homo sapiens
gttcctgggaaggtggagccaccagcctctccttgtaccttctccaggcaaattccgttcccctgcagcaccatctcctttggctcttcg

SEQ ID NO: 373055 - DNA, 90 bp, Homo sapiens
tcttgcaaacaagcagatatttgtgtgcgccagcagccctgtggtggcgacgacgatggaccaggagccagtgggcggtgtggaacgagg

SEQ ID NO: 373056 - DNA, 100 bp, Homo sapiens
ctcattatagcctcaaactcccaggctcaagcaatcctaccatgtcagccttcccagtagctggaactacagggtgccattattatccatgaagtttatg

SEQ ID NO: 373057 - DNA, 50 bp, Homo sapiens
ggaccacggcctgtcagcacgtctgatgcttttttcaaagccgctataag

SEQ ID NO: 373058 - DNA, 90 bp, Homo sapiens
tcttcacggtggaaaacacagatccagagtgttactggcttacaaattggattgaggaccaagaactatatttctttcatgaactcagcc

SEQ ID NO: 373059 - DNA, 86 bp, Homo sapiens
ggcagtggaaaatgcgctcgggctggaccagcagaacatccagtcatggataaaaatgagctggttcagaaggccaaactggccga

SEQ ID NO: 373060 - DNA, 82 bp, Homo sapiens
gtgaagctcaccgacagtgccctgagggccttcgagagctaccgcgccagacagggcagctggtggaatttttgaagaaaat

SEQ ID NO: 373061 - DNA, 100 bp, Homo sapiens
gcaacaagttcaaccaggtggagagtgataagcttcgaatggacagagccatccctgacacccggcatgaccaaacaccttccaccatgaccacctcagc

SEQ ID NO: 373062 - DNA, 51 bp, Homo sapiens
ggaaaacatatattggagctacatggatggtgaagttgaacaaattgctat

SEQ ID NO: 373063 - DNA, 82 bp, Homo sapiens
cccagaccctggagcctcagttggaagcagccgatccagcctgcggagcctgtggggcagacatatgaagatccatgagaag

SEQ ID NO: 373064 - DNA, 101 bp, Homo sapiens
tctgacagatgccagcgtagctgaatccagtaccaaaaacgtcaacaacagttttacggttatcaatactctggctgaccatcatcatcgtgggactgact

SEQ ID NO: 373065 - DNA, 82 bp, Homo sapiens
aaagatggaaaaccagttattgaatatcaagaggaggagttgttgtcgcccttacacaaacaaagtcattactttgtggtac

SEQ ID NO: 373066 - DNA, 75 bp, Homo sapiens
gtgcatatatcattgaggctttcagaattggcagagggggtcgatttgggaggaaaggtgtggctataaactttg

SEQ ID NO: 373067 - DNA, 100 bp, Homo sapiens
ctgcaggtggatcagaactgtgttcgcaattcttacgatgtcttctctttgctacgaaactatcaatgctgaagacttaaggcctcttaagaataccctt

SEQ ID NO: 373068 - DNA, 75 bp, Homo sapiens
cagtggaggcattttggggcagaatacagagatatggaatcagctggctgcaccttcgaggaggcaagtgaccca

SEQ ID NO: 373069 - DNA, 145 bp, Homo sapiens
gaagactacagatattatgaatacaaccatgatctcttccaaagaatgccacagaatcaggggaggcatgcttcaggggctttgttatgcacctaaagccatattggaagctccagaagaaagagcaccccccggaagtcagcag

SEQ ID NO: 373070 - DNA, 50 bp, Homo sapiens
aaactccttcacactgcagatgtctgatcatcggatatcatggagtctgg

SEQ ID NO: 373071 - DNA, 75 bp, Homo sapiens
cgaggcttcacggaggaggtgggattttttatcaagcagaaatgcatcgaacaacgagaatcaagatcactgagc

SEQ ID NO: 373072 - DNA, 74 bp, Homo sapiens
aggatcctaatgctcccaaaaggccaccatctcagaaaactgatcttcacaatgaaggctacatcttggaatta

SEQ ID NO: 373073 - DNA, 101 bp, Homo sapiens
ggagtcatcatgagcgatgttaccattgtgaaagaaggttgggttcagaagaggggactcacaccacccggcaagaactgctcactacggctccctgcccc

SEQ ID NO: 373074 - DNA, 96 bp, Homo sapiens
agcagacttgcatatatttgactgcaagtgatttgaagatattaaagctagaaattggaactagaaaatcaaaagaattcaaggcatcttaacgtg

SEQ ID NO: 373075 - DNA, 100 bp, Homo sapiens
cggaccggcgtccccggcgcgaagaggctggactcggattcgttgcctgaggtattctctgaaaccaaatgaccaaatcttggctgaagacaaacacaag

SEQ ID NO: 373076 - DNA, 100 bp, Homo sapiens
aaagagccaaactcagctcgcccggtttctcggcgaatgacagcacagaagcgaatgtctgtgacggagggtggcatcaaatacccagagacgactgagg

SEQ ID NO: 373077 - DNA, 80 bp, Homo sapiens
cgacttgcaggagcacctgcagcactcaggccaggagggttgtacatcctggagacctgaagaattctgttgaagtcgca

SEQ ID NO: 373078 - DNA, 75 bp, Homo sapiens
cccaatttgcctccacttagtgagcggaagaatgcttccttcaaaatgtctactgttcacgaaatcctgtgcaag

SEQ ID NO: 373079 - DNA, 75 bp, Homo sapiens
ggggccgccgcagcaccatggcgaccaccgtcagcactcagcgcgggccgtctcgattccttccttgggcttttc

SEQ ID NO: 373080 - DNA, 75 bp, Homo sapiens
aggacgacgtgtacctggacatcaccgctttcttttgctgcaaccacgcctgttctagccgataagaaaaaatac

SEQ ID NO: 373081 - DNA, 80 bp, Homo sapiens
ctttcctaccatctaaaatacgaaggtttctggctgggactccattttctggcaatacggtggaccgtctaaagtgaaaa

SEQ ID NO: 373082 - DNA, 90 bp, Homo sapiens
cctcccagccgcgttctcctccgccgctcctccgggcttgccctggagccctcaggaaataatgcaaaaggtgtcccaaggctcctgacc

SEQ ID NO: 373083 - DNA, 90 bp, Homo sapiens
agagcgagccgcctgccccggtgcgcagacagagctattccagcaccagcagaggaggaatcttcgagtatgcggacggccccaacgccc

SEQ ID NO: 373084 - DNA, 88 bp, Homo sapiens
ccgccgcctcgacccagggcccgcgggccaggagagcgctcggcggggcctacaaatccgcactggactacaccaaacgaagtctggg

SEQ ID NO: 373085 - DNA, 100 bp, Homo sapiens
aggcagtggccacaagagcgaggagaagcgagaaaagatgaaacggaccctgagcacgtgaattgcctctgcttacgttcaggccctgtcctaaacccag

SEQ ID NO: 373086 - DNA, 106 bp, Homo sapiens
cgcgagcacagagcctcgcctttgccgatccgccgcccgtccacacccgccgccagcccacagcccccatcccgtagcccttcctggatctggagagagcagctgc

SEQ ID NO: 373087 - DNA, 90 bp, Homo sapiens
ctaagattcgttctttattcaactatgaacaatcacatatctttggtctaagtactatactggcaattgctggagaagattttgcaattg

SEQ ID NO: 373088 - DNA, 87 bp, Homo sapiens
tccttgaaagaagaagatggagaagaaatagttacctatgatcgttgactatagtcaatggggccaatggagccaagtgtatggaaa

SEQ ID NO: 373089 - DNA, 100 bp, Homo sapiens
tccatcaacaggggcaaatcgaagtagagagcgaaaccatcttcaagttagcagcgtttattttacaggtactccaaagattcaggtttactcacgtcat

SEQ ID NO: 373090 - DNA, 89 bp, Homo sapiens
gtggttaagggacaagtggaatatctactgaagtggaaaggcttttctgagaaactttgaaaagcaccccaaagaactgatcagggggc

SEQ ID NO: 373091 - DNA, 97 bp, Homo sapiens
tttcagaagggccaggtgacccgagacggcttcaaggagctctttgttcaatgcctagccacctattcctacagacacggcagtggaaaggaaaaga

SEQ ID NO: 373092 - DNA, 100 bp, Homo sapiens
tgaaggcaggccagactgttacaatgccttcaattaagttgcagagttctgatggagagatatttgaagttgatgtggaaattgccaaacaatctgtgac

SEQ ID NO: 373093 - DNA, 75 bp, Homo sapiens
gccgtcctgaggagcctcctggcctgcagcttctgtgtgctcctgagagtctgcgggccaggcatcgacatccgc

SEQ ID NO: 373094 - DNA, 100 bp, Homo sapiens
caagatggcggacgagaaggacagggaagcagaagaaggaggaggagtcggcgggcggcaccaagggcagcagcaagaaggcgtcggcggcgcagctgcg

SEQ ID NO: 373095 - DNA, 90 bp, Homo sapiens
cctgccgtgtggacccgtaaaataaaatggctgcggttggatttctcacgatgtccagtgttatctccatgtctgcccctttcttcctgg

SEQ ID NO: 373096 - DNA, 100 bp, Homo sapiens
catcgccctgccggaccgcgcctcaggctcccccagcatccctctctacctgccaacatcctgtattagagaacttgtggccggaggtgtggctgtggag

SEQ ID NO: 373097 - DNA, 74 bp, Homo sapiens
gcaagatcggcaggcgagattgcctgacccaggcctgctcggccctcacagggcacttcaggaagaagttcaac

SEQ ID NO: 373098 - DNA, 75 bp, Homo sapiens
cgcagctggctggcggagcatgagcgccccagcagttccaagagcctctgagttcctgccttttttcatctctga

SEQ ID NO: 373099 - DNA, 82 bp, Homo sapiens
gaagtttggtgctttgctccctgtgtttgcgaaacagctagctgtgttccgccatgtcagaatggagggatgtgtctccggc

SEQ ID NO: 373100 - DNA, 100 bp, Homo sapiens
gaagccctcgagcatccccacaggtcacttgactggtggataacagacaagtgcaatatgattaatggaacagatggagattcttttcacccactaataa

SEQ ID NO: 373101 - DNA, 80 bp, Homo sapiens
gtactcggaaggcgcgggcaggagcctggcgaggatgcaccttcccctgccttggaaagttgatattcactgatggactc

SEQ ID NO: 373102 - DNA, 100 bp, Homo sapiens
ttttagggtcctttatatagaagggagagtaggatgaaatctttgacatggtaaaaccaaaggatcctttgaaaatctctcttcaggatttaatcaacag

SEQ ID NO: 373103 - DNA, 97 bp, Homo sapiens
tcaccctgaagaccctccagcagcagaccttcaagatagacattgaccccgaggagacgatacctgtttccgaagtttacactgtgctggactgagt

SEQ ID NO: 373104 - DNA, 74 bp, Homo sapiens
ggggaaccaaggagacgctcctggcactgcagcttggagagggtctgggagtgaaggagacaccccagcaaaag

SEQ ID NO: 373105 - DNA, 88 bp, Homo sapiens
ctccgcacctcggggacattattgcgcgtggaacggctgcttttggaaggtgacttaagagattaaaattaatttggttgctgttggt

SEQ ID NO: 373106 - DNA, 73 bp, Homo sapiens
agactgtaaacacccaaatattgttgcttattttggaagctatctcagctattgacctgaaaagtggttctgg

SEQ ID NO: 373107 - DNA, 137 bp, Homo sapiens
ccccggtccattctcctcgcgctgcaaggatgctcctgggatttcggagaggccgcaggagtcatttcgctgaaaagtcttccactaagaaggcagtaattgaatgctgccctggctcgtcctagaatcatttctcc

SEQ ID NO: 373108 - DNA, 87 bp, Homo sapiens
atgcaaaagaccttctacaggacctgaatgagaaagatcagtctaaagaaaaggagaagaaagtgaaaaaaacaattccttcctggg

SEQ ID NO: 373109 - DNA, 50 bp, Homo sapiens
ataacaccctgtaacagctgatgatgatgatgatgattttgatgatgagg

SEQ ID NO: 373110 - DNA, 100 bp, Homo sapiens
gaaccagtggtaattaccatcaatactatggaatgcattttgaaacttaaggatgggatacaggcccagcagcaaagaaacctggataacatcgtcttgc

SEQ ID NO: 373111 - DNA, 101 bp, Homo sapiens
cggctcccaggtgcgggagagagccttctcttggagtcaagaagcctaccaaagccctgctctttgtactcttgagcccagtgggaccttatttttcaagt

SEQ ID NO: 373112 - DNA, 100 bp, Homo sapiens
tatttgtcccggcactggctcttcagtcccttcaaggagcctccaccaaggcgctggtgcaacacctgccagctctactacatgggggacctgatccaac

SEQ ID NO: 373113 - DNA, 100 bp, Homo sapiens
ctgttgtttacatgatgatgattatgttgctgtagctaccagatttactggtttactgtggagtttgggctctgcaaacaaggagactccataaaggcat

SEQ ID NO: 373114 - DNA, 75 bp, Homo sapiens
cggtcctcccgccggcgctgggaaattagatcgactggagaagaaaaaaaagaaaaaagatagaaaaaagaaaaa

SEQ ID NO: 373115 - DNA, 101 bp, Homo sapiens
gccgaaagagcactggactccggaaggagtgaaaaggctctcagtgtctgagttaaatgaaatcctggaagaaattgagactgccattaaggagtactctg

SEQ ID NO: 373116 - DNA, 75 bp, Homo sapiens
acggcagggagtgcatcaaaggtgtgaacacaggcctccaccgctatgtctggctggtttacgagcaggacaggc

SEQ ID NO: 373117 - DNA, 98 bp, Homo sapiens
ctcggagcgcgacacggagactaggtggcagcatgcagacattggatattggaatattggacatttttggttttgaagagtttcaaaagaatgaattt

SEQ ID NO: 373118 - DNA, 100 bp, Homo sapiens
tggacatattcctctcctgatctggcctcatctgttccagggaggtgggattgaagagctaaacaaaagggcgtgatccacatccgagttgtggtgaaag

SEQ ID NO: 373119 - DNA, 90 bp, Homo sapiens
ggcaacgtttggattgcaaagtcatcagccggtgccaaagagctgcccctccaagctgaacccagagaccttcgtggccttctgcatcat

SEQ ID NO: 373120 - DNA, 90 bp, Homo sapiens
ggggttcgggcgatgctgcaggcccctgaaaatgcactgcagggactgtgccctggtgaccagctcagggcatctgctgcacagtcggca

SEQ ID NO: 373121 - DNA, 97 bp, Homo sapiens
gaacagctatgcatgctgcttttgatgtctgacaacgtggatcgttgttttgaaacggcgcggatggcgtcggggcgccccgaggagctgtgggagg

SEQ ID NO: 373122 - DNA, 75 bp, Homo sapiens
aactacattggtctctcccagggcaacctccgcgtccactacaaagcttgttggagcgcagggacctgtggcggc

SEQ ID NO: 373123 - DNA, 90 bp, Homo sapiens
atggtcatggcgtatttcgtcgagaatttttgggaaaatggttctcctgaagaacatgcaatctatgtttgggatcatttcatagctcag

SEQ ID NO: 373124 - DNA, 100 bp, Homo sapiens
gccagttgcttgatcaggtggaacagattcagaaggagcaggattaccaaaggtgccggatggagtgctgtgatgtgccagccgagacactctacgacgt

SEQ ID NO: 373125 - DNA, 100 bp, Homo sapiens
gttactgcacggaaagcagcgtcaggagccatagtacctacagcagcactccagagacaaggtctcaccatgttgcccagaatggacccgaactcctgag

SEQ ID NO: 373126 - DNA, 78 bp, Homo sapiens
ctgccgccgcccccagctcccccgcctcggggagggcaccaggctaatctagacgaaatccagatgagttcacctaca

SEQ ID NO: 373127 - DNA, 97 bp, Homo sapiens
aaattcttcaaaccggagtcgggtcggtctcggcgcggaagatggccggcggcgtggacggccccatcgggatcccgttccccgaccacagcagcga

SEQ ID NO: 373128 - DNA, 90 bp, Homo sapiens
acggcccgagacacaccaggccggcaggctgagaaaagcgagaccgcgtgcgaggaccggtggccaaggtggaatacgtcaggaagaagc

SEQ ID NO: 373129 - DNA, 83 bp, Homo sapiens
gcaagagcagcggcgcagaaaggtggaggccgggaggacgaagacctgcctagagctggaacgttacctccagagcgagccct

SEQ ID NO: 373130 - DNA, 74 bp, Homo sapiens
ggaggtctccactctggtcagcaagtatccagacatcagatgcagtggcagaacgtggagcacgttggtgacca

SEQ ID NO: 373131 - DNA, 75 bp, Homo sapiens
ggatagcagacaagttcacccaacataactttcaagagccaaggccacctttgatgccatttctaagacctacag

SEQ ID NO: 373132 - DNA, 51 bp, Homo sapiens
ggcgtcctgctccgcgatccgcgtgtgggccatgtttgaggattgccccag

SEQ ID NO: 373133 - DNA, 100 bp, Homo sapiens
ggcgcctggccagagcctggtcgagccggaggaagccaccaggcccgatgagagaaagggaaagttaaggatgctggagcagaacaatggatttctcttt

SEQ ID NO: 373134 - DNA, 73 bp, Homo sapiens
tcaccttcgacgaggaagcttataaaaatgtgtttgaaattggcacaatggaagaagctggaatttgtgggct

SEQ ID NO: 373135 - DNA, 88 bp, Homo sapiens
cggggtcggcgctgggctggaggcggcggagcgcgagagcttcgagcggactcaggtgttggagagcacaatggctgaacaagtcctt

SEQ ID NO: 373136 - DNA, 83 bp, Homo sapiens
ttcgtggcccggcaccgttccgcggacgtgctcggtctggccgtgggcctgggcttcggggcactggcagaggtcgccaagaa

SEQ ID NO: 373137 - DNA, 100 bp, Homo sapiens
ccatgggatgatcttatcgccttgtgtatcaaccacaagctgagagactggacgcccccccggcttcctgttacatcagagagaaaagtgtccttcagtt

SEQ ID NO: 373138 - DNA, 75 bp, Homo sapiens
catccccttgctggacagtggctgtggtttcaccaaaactcatgccaatgcagcagatcgcaaattgaaatatgg

SEQ ID NO: 373139 - DNA, 75 bp, Homo sapiens
caccagtggggcagtgcctcgcttttacaaagttgatcacagtaaatggacaagaatatcatcttcaacttgtag

SEQ ID NO: 373140 - DNA, 75 bp, Homo sapiens
tactgtccaagtcagttcctgggtacaaggagccagcattcgaacgttcactccattttattttctggtggagcc

SEQ ID NO: 373141 - DNA, 98 bp, Homo sapiens
tgccgtgcgcgccagagatcccagactgcgtggagcagaggttggaaagaaccatgactgtattcaggaaggcacatgaactgaagcttctgtcagaa

SEQ ID NO: 373142 - DNA, 100 bp, Homo sapiens
cctgaaggggagcccaagggtgcacagcccctggctacgagctcaggccccggggcctccagcggcaccagcggagaccacggtgagctcgtcgtccgga

SEQ ID NO: 373143 - DNA, 51 bp, Homo sapiens
agaagatttaactacgtggtccggctgttacagtcttttgaagacctcccc

SEQ ID NO: 373144 - DNA, 97 bp, Homo sapiens
gaaaatgcagatgaacactattcaaaggaccatgatgtgaaaatggaggtgaaagaactcttttcttctttgggagtcgaatgtaatgtcttggaac

SEQ ID NO: 373145 - DNA, 100 bp, Homo sapiens
aggctctgcggctggtccaggccttccagtacacagacgagcatggggaaggtgtcccatttcccaaaaactttatgtctgtggcaaagactattctaaa

SEQ ID NO: 373146 - DNA, 98 bp, Homo sapiens
tgacctgtaaatcatcctttagatatgaaaaacagtagctccgtatcgaatacattgacaaatggatgtgtcatcaatggacatttggacttcccctc

SEQ ID NO: 373147 - DNA, 75 bp, Homo sapiens
gccaactggctgagcgtctccaacatcatccagctggggtcgggccccggctcagtggtcccaggcagctcgggt

SEQ ID NO: 373148 - DNA, 80 bp, Homo sapiens
agcagccgatccagcctgcggagcctgtggggcaggtactgctataaccagaatttggtagaaaaaggatttacttgttg

SEQ ID NO: 373149 - DNA, 82 bp, Homo sapiens
ttccatccagaccaagaggatcagttcttcagcctggaggatacgaagcgttttcggcttcctgcccggagctgtgcagcaa

SEQ ID NO: 373150 - DNA, 90 bp, Homo sapiens
tgcgcaccatccgcgaatggctggtgtcctggggaccgcatgggttgaatcctgttccctgaaaaagacgtattcggatcctaaccccca

SEQ ID NO: 373151 - DNA, 82 bp, Homo sapiens
ggtttagtatcagccaaacttgcagctgttcagaccgcgctccgccgagccgcggcgagtcctttgcacatgttggcaacac

SEQ ID NO: 373152 - DNA, 96 bp, Homo sapiens
caccacgtccagcttcaccacgcggctgcacaactgcaggaacaccgtcacgctgctggaggagggcctaaggatcattttctcggatgcatcacg

SEQ ID NO: 373153 - DNA, 100 bp, Homo sapiens
cgcccggcgccgcctccgggctccttcggccccgccatgggctgctgcagctccgcctcctccgccgcgcaggttgaaggggaccagctgcctccaggac

SEQ ID NO: 373154 - DNA, 90 bp, Homo sapiens
accatgcccttttacttttgggcactgttgctggaatatttccgagaatgaagaaattgatgttgtgacagtagagaagaggcagtctct

SEQ ID NO: 373155 - DNA, 100 bp, Homo sapiens
aaagttgtaaactcagacccggttgaagaagcaatcagatttgctcagagagtttcagctcgagatgctgctgtgcagaagattgagactattatcaaag

SEQ ID NO: 373156 - DNA, 75 bp, Homo sapiens
ggccgcttcttcagctctgagaccaccgcagcccactccctaggctcctgctccagcccagcccccagagagcag

SEQ ID NO: 373157 - DNA, 74 bp, Homo sapiens
tggatcgctgtgatcgtcacttgggacctgtccatgatcctgtgtgaccccttcgccatcaacacgctggcact

SEQ ID NO: 373158 - DNA, 75 bp, Homo sapiens
tcgtcactcctttctttgtggtcttcatttgtgaatacataggcacaaggaaggacagacccagtctctgtcctt

SEQ ID NO: 373159 - DNA, 98 bp, Homo sapiens
tccgccaagcgcggccgccgcccccgcctcagacacgtgaagggaatcgtgttagtagccctggctgacggcacccttgcaatctttcacagaggagt

SEQ ID NO: 373160 - DNA, 100 bp, Homo sapiens
cccgggggccgccgccacccgcctcccaccatggctctgaagagaatccacaagattggctctaccagtgcacctggacagggaggaatcctggctcagc

SEQ ID NO: 373161 - DNA, 100 bp, Homo sapiens
gtcgtggatctggccaacaagaagtctccaaaaaaagttggtgatgacattgccaaggcaacgggtgactggaagggcctgaggattacagtgaaactga

SEQ ID NO: 373162 - DNA, 100 bp, Homo sapiens
aggcgacggagccgctcaagaagtcgagatcgaagatttagaggccgctacagaagtccttaaatttcagaaactgtggaggagtgtcactgtagattcc

SEQ ID NO: 373163 - DNA, 100 bp, Homo sapiens
cttcacttttgagtgcaactgccttccaggaccaccccaggacaattcaggggaagctttaaaggaaccagaaagggcccaggagcactctttgcccaac

SEQ ID NO: 373164 - DNA, 87 bp, Homo sapiens
aaaagtaccaagaagtggaagaagaccaagacccatcatgccccagtatcctgtggagcacccagacaaattcctgaagtttggcat

SEQ ID NO: 373165 - DNA, 100 bp, Homo sapiens
aaaaaaggctagaggtttcttggaatttgtggaggattttattcaggttcctaggaatctcgttggcatcaagcatgatggaaccatgtgtgatacctgc

SEQ ID NO: 373166 - DNA, 120 bp, Homo sapiens
ggctgcgagccgggaagacgcggggaagaggaggcggaaaaggacgcaaagttctccggcgaggttttaaaatcaaagatgggaaaatcggagaaaattgcccttccccatggccagctt

SEQ ID NO: 373167 - DNA, 100 bp, Homo sapiens
ttgataaagtaacacgccctcaagagctggatttgacacatcaagggcagccaattactgagatttttggaagaaggaaatttagaagctgcagcatcag

SEQ ID NO: 373168 - DNA, 74 bp, Homo sapiens
tggcatggcggacgaggggaagtcgtacagcggggacggtattcagaattcgagcgcaggagctccgcttctcc

SEQ ID NO: 373169 - DNA, 51 bp, Homo sapiens
agactaagtgatcctgatagtgataaggctcctcgacctccaaaacaaccc

SEQ ID NO: 373170 - DNA, 90 bp, Homo sapiens
tcctgtcgctgacggcgactgcgggaggccagaagaaggctcaagcttggaggaaactggctttaactggggagaatatttggaagagac

SEQ ID NO: 373171 - DNA, 80 bp, Homo sapiens
cttcaaacaacctccctaccaaggatcttctttcagcccaagaagatgaaaggattgttcttgttgacaacaaatgtaag

SEQ ID NO: 373172 - DNA, 100 bp, Homo sapiens
aacaaattgtacatttgcccattctcaggaagagcttgaaaagatagctggaatggccttagtcatgaggcttttagacttgtttcaaggcgggattatg

SEQ ID NO: 373173 - DNA, 80 bp, Homo sapiens
gacagctccgggaccggccgaaaggcgaggaaccgaggctgggaggcggcagaatgcagccagaggagggcacaggctgg

SEQ ID NO: 373174 - DNA, 80 bp, Homo sapiens
aaaagatgctgttacaagcaaaatggatcaaggatctatagaacgcattttaaaacaggctgaagcagggtggtttagcc

SEQ ID NO: 373175 - DNA, 101 bp, Homo sapiens
tatttcttagacaagaagatggtcacgaagttgacaaaagtgttgaagaactacgtggacggtgctgagaagccgggagtaaatgagcagctgtacaaagc

SEQ ID NO: 373176 - DNA, 75 bp, Homo sapiens
gaagtctcctaagtgtaaactacaagttctaggttgctcaggtacctgaatattggctttgtgtctaaagtttct

SEQ ID NO: 373177 - DNA, 75 bp, Homo sapiens
tgggtgccgtggcatgtcgatttgtccttcactacagctcctactccaatgtggccagatgacctgcaaaaccac

SEQ ID NO: 373178 - DNA, 75 bp, Homo sapiens
ctacaagaaaacttacaaacaaccccatctccagacaaacagcagtgttgtactgctacttctataaacggacag

SEQ ID NO: 373179 - DNA, 97 bp, Homo sapiens
actgtgcttggctggaaaaccccaaaagtgtacataagactacatgaggaaataattgacttttataacttcatgtccccttgtcctgaagaagcag

SEQ ID NO: 373180 - DNA, 75 bp, Homo sapiens
tttgaacaaactcgaagaacagctgtggaaagaagttgcaaaacactgggtgcttttgaagatgatgatatcacg

SEQ ID NO: 373181 - DNA, 90 bp, Homo sapiens
cccagcctgtggacgcctggcccaccctgagtggaagttccagatgcaggtcctaccccagtgtggccatgcagtccatgaggatgcccc

SEQ ID NO: 373182 - DNA, 93 bp, Homo sapiens
ctgtgaagagacatgagatggtgaatgaacccccaggcttttcctccaaatgcgatcattgtatttttctactgcagtgcagtgactatattc

SEQ ID NO: 373183 - DNA, 90 bp, Homo sapiens
acagcagccagctaatctcccacacccacggctgcatacctgcactttcaggttgcctgtggctggagaaaggaatgtgctcatcaccag

SEQ ID NO: 373184 - DNA, 102 bp, Homo sapiens
tgaagaagtgaagaaattattggtacctgcaccacaggtggaattaagaaatctggcaaaaagtaagctgttccttgtgcctgaggagatggtgacccttta

SEQ ID NO: 373185 - DNA, 97 bp, Homo sapiens
gggcttcttggtgctgatgtcggaggggttgtacaaggccctagaggcagcccatgggcctgggcaggccaaccagtctcacaccattttgctggta

SEQ ID NO: 373186 - DNA, 100 bp, Homo sapiens
ttacagatcttataacagtcggtttaaagtcaaaaaggtgtaccagaactagttctaaaagatcagaaggatattgctttagaaataacagtgacaaaca

SEQ ID NO: 373187 - DNA, 74 bp, Homo sapiens
ctttggtcaccagtgagctggagaagttccaggttggatggcaagcatgtggtgtttggcaaagtgaaagaagg

SEQ ID NO: 373188 - DNA, 100 bp, Homo sapiens
cagctgcagagcgcgcttctgatcctggggcgccaagcccatctttgtgtgcttgcatccaactgtgatgagcctatgtatgtcaagttggtggaggccc

SEQ ID NO: 373189 - DNA, 101 bp, Homo sapiens
ggcattctgatgggaacttgtgtgttaaagtaacagatgatttagttgagaagatttacaaatctctgcctggatgctgtttgtggttaccttgttgagct

SEQ ID NO: 373190 - DNA, 90 bp, Homo sapiens
gcccagcaccatgaagatcaagattctacaagggggttgctcctctctggatgagacagataccatacaccatgatgaagttcgcctgct

SEQ ID NO: 373191 - DNA, 95 bp, Homo sapiens
tttgggtccaactgtgaagccagatgataagcccccaaatacatcaagatgtttgtactggatgaagctgacgaaatgttaagccgtggattcaa

SEQ ID NO: 373192 - DNA, 80 bp, Homo sapiens
acagcatgcaatcagtagaagagttgggatctaacccagaaaactgggatggcattcctactgtatttgtggcagtggca

SEQ ID NO: 373193 - DNA, 74 bp, Homo sapiens
aagcattgatggaatgtgctttagaagttaaaaagtattcctgtgcacacaatatttgacagctgccctgaagg

SEQ ID NO: 373194 - DNA, 82 bp, Homo sapiens
gcaggatctgcatcgtcatcgagccggcccagcttctgaagggagatgtcatggctactgcagcactggggtgtcagttgtt

SEQ ID NO: 373195 - DNA, 90 bp, Homo sapiens
atttattttctatgaactactcacacgttatgatctgatcagccgtttcaaggtggcatttttctgaagttgttcattaagacttcccag

SEQ ID NO: 373196 - DNA, 74 bp, Homo sapiens
catttctcttgagtaaatacctaaaagtgggcttgctgggctttctgtgaagaattggaatcaatgatacagga

SEQ ID NO: 373197 - DNA, 126 bp, Homo sapiens
agcggtgcctgagcccgtgcctgtcttcagatcttcacagcacagttcctgggaaggtggagccaccagcctctccctgggtttgaaagtattcttgaagggctgtttggacctgcattattaaaa

SEQ ID NO: 373198 - DNA, 74 bp, Homo sapiens
ttatattatcagtacatggagacatatatgggtcctgctctttttgcatctccttatatacatttgacaaagcc

SEQ ID NO: 373199 - DNA, 75 bp, Homo sapiens
atgtgtacgagctgtgcgaggtgatcggaaaggtttttaagtaccggtgaccaggcagcaaaaggcaactatggg

SEQ ID NO: 373200 - DNA, 77 bp, Homo sapiens
caaagaaacaagccgtggaataggtgtatcaagtaatggtgcaaagcctgaagttccctacttcagcaaagcgtggc

SEQ ID NO: 373201 - DNA, 89 bp, Homo sapiens
ctgttaactacattctgcaggtattggttggaagagaatctgagtacaaacagaagcatcaagtgtacctgatttgtgaacctatcttg

SEQ ID NO: 373202 - DNA, 88 bp, Homo sapiens
tgcacttgttgcagaaacagccaaggggtcaagcaagcacccaggccatcaggtgctgatagaaatgtatcagtggactctacccacc

SEQ ID NO: 373203 - DNA, 75 bp, Homo sapiens
ccttcaagatagacattgaccccgaggagacggttggacgtgataagtatgagcctgcagctgtttcagaacaag

SEQ ID NO: 373204 - DNA, 75 bp, Homo sapiens
ggaactgttttgtcttcctgtatgacacagacaggggtgtgactgcacagaaaagttacaaaacaaatttgactt

SEQ ID NO: 373205 - DNA, 90 bp, Homo sapiens
ctcgcggactacttcgtgctggtggcgttcgggccgcacccgcgcggagatggtaacctgcacctcaatgtgacggcggaggccttcagc

SEQ ID NO: 373206 - DNA, 75 bp, Homo sapiens
cagcaacctagtcagtctgcatttggctctggaacaactcctaattctaaaggccaatgatgaggccaatcagag

SEQ ID NO: 373207 - DNA, 100 bp, Homo sapiens
tccgggctcttctctagctctcagcggctgcgaagtctgtaaacctggtggccaaagttcagatcattcaggatcaacaactccatcatctggtcaagaa

SEQ ID NO: 373208 - DNA, 97 bp, Homo sapiens
gggcgggagaactcactgaggatgagatgggaaagggctccttcaagtatgcctgggtcttggataaactgaaagctgagcgtgaacgtggtatcac

SEQ ID NO: 373209 - DNA, 83 bp, Homo sapiens
agaaaagtgtgaggctgccaaggaagctctggagggttgactggattggtgaggcccgtgtggctacttctgtggaagcagtg

SEQ ID NO: 373210 - DNA, 50 bp, Homo sapiens
gcagaagctgcatatcaaactggagagtcaagccctacccgtcgagaagc

SEQ ID NO: 373211 - DNA, 75 bp, Homo sapiens
gcaaggggtgtttttccgtaagcatactcagaaaaacacaccttgactttagtcagatacatcactgtctgttaa

SEQ ID NO: 373212 - DNA, 50 bp, Homo sapiens
ttgtccacttctcagccttactccatggctacatggaaaacaagcctctg

SEQ ID NO: 373213 - DNA, 73 bp, Homo sapiens
atggacctattcgtcaaatcagagtgaatagccaggccagaagaaggaaggcctgtggtgagtgggacaggaa

SEQ ID NO: 373214 - DNA, 90 bp, Homo sapiens
aaaaacttcccaaagaactcctgttacgatccaaaattaacgggacaggctcttattccaggatcagtaatataccacaaacagtcacaa

SEQ ID NO: 373215 - DNA, 90 bp, Homo sapiens
cttcttcatgctttttcttctcaccatttctggccaaaactacaaacaagacttcgcagaatgtggccccgtcccagagcaccacccgag

SEQ ID NO: 373216 - DNA, 131 bp, Homo sapiens
gttggcttatgagtggaacatggctagcaggaatgcttactgttgcgtggttcgttattaacagtaacttcaaatgagcatttttcaactgcagaagaaagtgagtcctgctttgcccaaccaaagccaca

SEQ ID NO: 373217 - DNA, 74 bp, Homo sapiens
ctgaacttcagaaagccagtgttgatggctggtggaaagttaccgaggctggacagtgtagtgagactgcagtt

SEQ ID NO: 373218 - DNA, 101 bp, Homo sapiens
cctgatgccaacagtgtaccagcagggcgttggctatgtgcccatcacaggtacatccagacactgaaggaccacaggccccggatggtgtgggacagcca

SEQ ID NO: 373219 - DNA, 100 bp, Homo sapiens
cccacgggctggctttggggctcgtgattgccacgctggggaatatcagtggtgtgccctctcccctgcatgaatggcggccagtgctcctcgcgaaacc

SEQ ID NO: 373220 - DNA, 98 bp, Homo sapiens
gcgagaacagagaagggagctctatagtcggagtggagaactgcaagagaatggatcttggagaatgtctgaaagtccatgacctggctttaagagcg

SEQ ID NO: 373221 - DNA, 51 bp, Homo sapiens
gattcttccaaggaaccagtgcgaaggcactgcaacatggtgctggagaac

SEQ ID NO: 373222 - DNA, 76 bp, Homo sapiens
cgcagtggtcgcttcttctccttgagccatcatcaaccactttaaccccaaaattgagtcctacgctgctgtgaat

SEQ ID NO: 373223 - DNA, 100 bp, Homo sapiens
agaaagaggaggagtcattgatatcactgcatgggacaaagatgctgggaaaagggatgatttcattggcaggaaaatgtttataggaggccttagctgg

SEQ ID NO: 373224 - DNA, 75 bp, Homo sapiens
ttgtccttgctggtgcatgcgtcgtcggcctctgggcagcagagcaatggtggaacaaagcggcaaaagatatcc

SEQ ID NO: 373225 - DNA, 87 bp, Homo sapiens
gtgacttcagagacactgccaagcagccttagccctagtgtagagatacgtgcttttcaacatgccttcagcactaatgactgctcc

SEQ ID NO: 373226 - DNA, 102 bp, Homo sapiens
atgggaaccgaggggagcctgatcctatcgttttgacgccaggtgcatggctgcctcctaatcccatagtccagaggaggcatccctaggactgcgggcaag

SEQ ID NO: 373227 - DNA, 76 bp, Homo sapiens
ccgcgtttgaccccaactccgaggaggtacagaactggaacagtgaaattcttgctaagcaaaaacctcttattgc

SEQ ID NO: 373228 - DNA, 90 bp, Homo sapiens
tatacgtggattctagaggggtgacagcgaaaccaacctgataacattgtttatgtgatggatgcctccattgggcaggcttgtgaagcc

SEQ ID NO: 373229 - DNA, 83 bp, Homo sapiens
gccatcttgtcatgtacctgggaaccaacggaatcagtccccaatgcctggaaattcctcattggattactgtgttttaaaca

SEQ ID NO: 373230 - DNA, 80 bp, Homo sapiens
aggattccaagtaactcttatttgatgctattaactgagtacttggatatgaaaaatactcgtacggcctctgaaccatc

SEQ ID NO: 373231 - DNA, 96 bp, Homo sapiens
cgcaccgtttccagaagctgcgttgccaacgtcacatcccaaaatagctggacagcgccaagctgagctctgaccagaacgacaaggcggccagtg

SEQ ID NO: 373232 - DNA, 75 bp, Homo sapiens
tttcatctttccacagttcttagaaaagtcctgagactgagttttactgggtgctggagaatctggtaaaagcac

SEQ ID NO: 373233 - DNA, 100 bp, Homo sapiens
aaacccaaagatccccgttcctggagattctgattgaggacatgaaagatcagatgtcaacttcatctgtgcaggcattagctgaaagaaaaaatagaca

SEQ ID NO: 373234 - DNA, 98 bp, Homo sapiens
tagcaccccgagaaccgtcagtttgagccagatgggtgaagttgaacaaattgctatgatgaaaccaaaaggccagactgaacacgatgagggtatgc

SEQ ID NO: 373235 - DNA, 83 bp, Homo sapiens
gcagcagcgccgggcctgcgccaacgccacctggaacaggcgagaaccactgtctctgatcaacgtgcggaagaggaacgtgg

SEQ ID NO: 373236 - DNA, 100 bp, Homo sapiens
gcctattttcagaggccggaaaatgccctcaaacgcgccaacggccgttaattaaggaaaagttgagccagggcgtgaccctcgtcgtggacagatacgc

SEQ ID NO: 373237 - DNA, 101 bp, Homo sapiens
ttggaaccctggtctttgcagtatttatgggagtatggggctttttctcctccgtgacagccagagtaatccaaaggcatttgtactcacactgtgtcatc

SEQ ID NO: 373238 - DNA, 100 bp, Homo sapiens
ttaaatcctctttacatcatagactttcagctacttgaagatagccatcagccgctacgtgactcttttctccagcttattcagctgattctgaatcatc

SEQ ID NO: 373239 - DNA, 101 bp, Homo sapiens
cactggaaccgcttccgagacactcggtgaaatacctggagtgctcagctctcacccagagaggcctgaaaaccgtgttcgacgaggccatccgggccgtg

SEQ ID NO: 373240 - DNA, 82 bp, Homo sapiens
ctgaagatcctggtgtcgccatgggccgccgccccgcccgttgggacccagacatggagctgcgggaagaagcctggtctcc

SEQ ID NO: 373241 - DNA, 74 bp, Homo sapiens
tatattcatctcaaaaacaaaattctgaactcaggacttggcaagtactccaaagattcaggtttactcacgtc

SEQ ID NO: 373242 - DNA, 74 bp, Homo sapiens
cccatcgggcagctacacatcttgaaagagaagctcttcctgtgaggagtcttttagtcctgctatacagctgc

SEQ ID NO: 373243 - DNA, 82 bp, Homo sapiens
caccatgaaggccccggagaagaagaaagtggacaagctgaacgctagctagagccggtgcaggccacgcagaacaagacag

SEQ ID NO: 373244 - DNA, 90 bp, Homo sapiens
aacacttgcagggaaatgatcagtctgttggatacactgcaggcattggttgcttgcccgccgatgtaccacctgatgaagttcattcct

SEQ ID NO: 373245 - DNA, 75 bp, Homo sapiens
ggaaacaatggcatttacagaaagagtcaacagcagtggcaacaggtcggattgtttgtgctgaacgaactgtcc

SEQ ID NO: 373246 - DNA, 75 bp, Homo sapiens
ctgcctcagcctcccgagtacctgagattagcccagtctgtccatgtgaatgtgctgtgtggaagagttaaaggg

SEQ ID NO: 373247 - DNA, 100 bp, Homo sapiens
ctggaggtgtgtatgttaccctcactgatgatagtgatactcctactttctaccaaactctggctggagtcacacattttgcagaggaaagtggtcgctt

SEQ ID NO: 373248 - DNA, 75 bp, Homo sapiens
cctgggtctcaaaaaagaccgaagctttagtgcagccgtcattatccatgacaccggaaactgtgaaagatgttg

SEQ ID NO: 373249 - DNA, 95 bp, Homo sapiens
ggaaggggcaagacgggttcagttcgtcatggggctgtttggaaagacccaggagaagccgcccaaagaactgcaccccagcagtcagtgactac

SEQ ID NO: 373250 - DNA, 75 bp, Homo sapiens
ctgctcaagatctcagagaaggaggaggtgaccacgcgcgaggattatatctgtccaagatgcgagtctggtttt

SEQ ID NO: 373251 - DNA, 87 bp, Homo sapiens
ttccctgcctcacggtctccgtggagctggcatcttttctgtcagatcagcctgagccctacctgcccttcctctcaagattcctgg

SEQ ID NO: 373252 - DNA, 97 bp, Homo sapiens
aaaagagtctccgcggtggaggtctgcgttgctcttgcttttcctcgctggggtgtacgtttgttgcatattctaaggacccagacataggcttggt

SEQ ID NO: 373253 - DNA, 97 bp, Homo sapiens
agaagcgctcctgggtagcccctgtggcaaaggccagccctgcaggctccaagcaaagggtgaccggaaggctttttttgagagctctcagtggaac

SEQ ID NO: 373254 - DNA, 74 bp, Homo sapiens
gaagaattggtatttcaaatgaccaccatgttgcaaaaggactcatctgatgatgtgagaagagttcagaggag

SEQ ID NO: 373255 - DNA, 83 bp, Homo sapiens
ccctcttcactgacgagttctaccccaacttcgcagagggcatcgtgttcttggggaagatcccgactaagccattttccagt

SEQ ID NO: 373256 - DNA, 83 bp, Homo sapiens
gcacttggcagctggacaggcagagtgctgatgtgaaaaataccacgacaaaaccaccctacatcaccaacttgaagtactgg

SEQ ID NO: 373257 - DNA, 100 bp, Homo sapiens
caccttccagtccatcaacaagcgcctggcgtcgccagtggctcctggggccttgactggagcatttcctgaagacgtagtcatgcagcacgtcagcagc

SEQ ID NO: 373258 - DNA, 100 bp, Homo sapiens
cctcgtggctgcgtcaccgccgcccccccagacaagatggacaccgcggaggaaggttactctggccaggacttcgactgggcagattatcacaagcagc

SEQ ID NO: 373259 - DNA, 100 bp, Homo sapiens
caagcaatccagaggtacgctacgaagtctgtgacattcctcagtgttcagaaggaggatctccttatatagcagccaaaatcaatgaagctaaagattt

SEQ ID NO: 373260 - DNA, 100 bp, Homo sapiens
tgtatctactcaagagtggaagttttcacagatgcatttttgtagaagcattttgaggatgaatgtttgcaaatcattttgaaattgccaagtgccacat

SEQ ID NO: 373261 - DNA, 101 bp, Homo sapiens
gaacaagaccgaaatccagactctttttaagaggcttcgcgcagttccaaccaacaagggtaaagcccacagcttgaagccaagcataaaggagaagctgg

SEQ ID NO: 373262 - DNA, 75 bp, Homo sapiens
gagggttcttgggaatagcaggtgtggcaaaggagcagagaactttgacaagttcttcacacgaggacagcccgt

SEQ ID NO: 373263 - DNA, 100 bp, Homo sapiens
tggtgatggacttcgtcctcatgttgctggacacgctttttggggaactggtgtggagagacgagttgtactgctgtcacaggaaatggacgctggatta

SEQ ID NO: 373264 - DNA, 97 bp, Homo sapiens
cattgctgagccagcggagctgcttgatgtttcaggattcagtggcctttgaggatgtggctgtcagcttcacccaggaggagtgggctttgctgga

SEQ ID NO: 373265 - DNA, 75 bp, Homo sapiens
cgcagtggtcgcttcttctccttggctggtgaatcaaagacttctggaagtacagtcacaagttgaagaattaca

SEQ ID NO: 373266 - DNA, 74 bp, Homo sapiens
gtagattcaggtagcaaagcaactgaagcaggcttgaaacggggggatcagaccttgtatcctacttatggact

SEQ ID NO: 373267 - DNA, 116 bp, Homo sapiens
cttcgtcgctgttgctgccgccatacgcgctctccctgtttagagagaagaagaaggaggttcctgctgtgccagaaacccttaagaaaaagcgaaggaatttcgcagagctgaag

SEQ ID NO: 373268 - DNA, 100 bp, Homo sapiens
tttggaagaaatactttatactcttggactacatctttctcgggctcagtcattaacagctgaagagaagacgattacagaaaagcaccttgaattatgc

SEQ ID NO: 373269 - DNA, 100 bp, Homo sapiens
ggtcgcctgggactacaagtacctgactctgaaagtcaaaggttcatgtgtgcccagctgcccaaccccgtcctggacagcatcagcatcatcgacaccc

SEQ ID NO: 373270 - DNA, 98 bp, Homo sapiens
ggcagcccgtggagtcggctgagggaaaagcgaggcaaggcaggcggtgtgtctgcaggagcattcgagaatgccagcgaggatgcatttcctatcat

SEQ ID NO: 373271 - DNA, 100 bp, Homo sapiens
ccgctcggagtggaggccgcctgggggcaggcgggctagaggagcaggactcagtggcttttgaggatgtgtctgtgagcttcagccaggaggagtgggc

SEQ ID NO: 373272 - DNA, 75 bp, Homo sapiens
aaaccatctgaattggctcaatgatgagggttgaagctttgagagaagcagcaactgctgttgagcaagagaaag

SEQ ID NO: 373273 - DNA, 100 bp, Homo sapiens
tgcattgactggaaacaatggcatttacagaaagagtcaacagcagtggcaacaggtctttgtgggaagaaacagaaagaaatcacaaaagcaattaaga

SEQ ID NO: 373274 - DNA, 97 bp, Homo sapiens
agatggatgagaaactaatggaacctctgaaatatgctgaacaacttcctgtagctcagataatacaccaggccttagaaaatttacgtgtatacct

SEQ ID NO: 373275 - DNA, 74 bp, Homo sapiens
aggctcagagagattacctggacttcctggacgacgagggtgggagtacagcagccaaacgctgaacttagtcc

SEQ ID NO: 373276 - DNA, 75 bp, Homo sapiens
cacgcaggcactttcccggtccccaggtttctctggaaacccccctggtaagtgtggaggaggcgggacactctg

SEQ ID NO: 373277 - DNA, 75 bp, Homo sapiens
taccatcgtcaccatgacaacactagggagtggagtcaacatatcaatggagcaagtcacagtcgtcgatgccag

SEQ ID NO: 373278 - DNA, 100 bp, Homo sapiens
gcttatcatttaatgcataaaaactgcaatcatttttcttcagctttatcagaggacctggcgtattgtagtaccaatgacaaaagatgatgcactaaag

SEQ ID NO: 373279 - DNA, 120 bp, Homo sapiens
gctgttgcaagggaccttctccggcccctccagctgccccctgtgtggcaaacctttcttgagctcagggagtgcatccgccccaacccttttccccctcgtctcctgtgagaattcccc

SEQ ID NO: 373280 - DNA, 90 bp, Homo sapiens
ccaaatgcacagccaagcctagcagctcgggcaaggatggtggaggcgagaacactgaggagctgccactgcagagccccgccatggaag

SEQ ID NO: 373281 - DNA, 87 bp, Homo sapiens
ttatgtaagagaaacagaccagagttcctccgatggccaggaaccttttagtacttccggttacaggaaatacaggaggcagaggaa

SEQ ID NO: 373282 - DNA, 100 bp, Homo sapiens
gacagttctgtggaccatgcctgcggaaccgctatggggaggatgtcagatcggcattgctggacccggtgaaaagagatttgaatgcccggaatgttct

SEQ ID NO: 373283 - DNA, 80 bp, Homo sapiens
gacctgcttgtgaacctggcccgggacctgcagtgccccaagaagatggctcccgcaaagaagggtggcgagaagaaaaa

SEQ ID NO: 373284 - DNA, 75 bp, Homo sapiens
atgatcaagatgatggccgcaggaaaccgggtataggaggaagaggctcatcagattcaagagatgtttccccag

SEQ ID NO: 373285 - DNA, 100 bp, Homo sapiens
tcgaatgaggcacctaaaaattgtataccgcagattcaggagaaagaccatttatctgcgaattatgtggaaattcttacacagatattaaaaatttaaa

SEQ ID NO: 373286 - DNA, 50 bp, Homo sapiens
ctggagacatggaccgcggcgagcaaggttatcaatactctggctgacca

SEQ ID NO: 373287 - DNA, 88 bp, Homo sapiens
ttgcaaattccagtcaaggccctaaaatatagcaatagcgtttatggcagcatttagcggacacagaagcacatctgaaagtggagag

SEQ ID NO: 373288 - DNA, 100 bp, Homo sapiens
gaaactgaaaggccaacgtgggagacaaagaagagcctgaaagagccaaatcttaccttctggaccatgcaaacggggattcagcgtccgatcctttgga

SEQ ID NO: 373289 - DNA, 75 bp, Homo sapiens
cttcgcgtcccctgcaccatgagctggggcaccgagctctggttctccaaggagaagtacatcctggactcatcg

SEQ ID NO: 373290 - DNA, 83 bp, Homo sapiens
cacgcatcgaggctatggaccctgccactgtcgagcagagtgatcagcagctggactgtgccttggacctaatgaggcgcctg

SEQ ID NO: 373291 - DNA, 101 bp, Homo sapiens
cggggacccagaccctggagcctcagttggaagcagccgatccagcctgcggagcctgtggggcaggcgagaaccactgtctctgatcaacgtgcggaaga

SEQ ID NO: 373292 - DNA, 75 bp, Homo sapiens
gcagatgctggagaagtccccttatgaccagggtcaacatatttcactggcacctattcacaagcttgaagaagc

SEQ ID NO: 373293 - DNA, 100 bp, Homo sapiens
ccaaagggaggctggtgaatgtcagcagcatgggagaaatgggacgtcggtcatcagatactgaagaagaaagcagaagcaagagaaaaaagaaacaccg

SEQ ID NO: 373294 - DNA, 83 bp, Homo sapiens
cttccgagaggaacctctatgccgacatcgacgccgcctggcaggccctgcgcaccaggcacttccgttccggcgcccctccg

SEQ ID NO: 373295 - DNA, 75 bp, Homo sapiens
tccccgattctcatctgcccataatcatggacacagccccaggatgtgcaggacaaatttacatgtattggagac

SEQ ID NO: 373296 - DNA, 50 bp, Homo sapiens
tgggcaccaggaagcgaaggctgataaactcatcctgaaagtcgctgttg

SEQ ID NO: 373297 - DNA, 74 bp, Homo sapiens
ggccgacacgctggccctgaggcaacggctcatcaggtcacaccgacaaatctgaagcgggtttgccaggggag

SEQ ID NO: 373298 - DNA, 99 bp, Homo sapiens
cgcgtgagtcgtgagctggcaggacacacagtgttttaactcaaatgggtgatgaaaaggactcttggaaagtgaaaactttagatgaaattcttcagg

SEQ ID NO: 373299 - DNA, 90 bp, Homo sapiens
ggcagcgggagggcgcgcggccgagcggaggcggagtcggcgccgagaacatggacagccacagtgtggaagaccctgtgccccttctgg

SEQ ID NO: 373300 - DNA, 75 bp, Homo sapiens
ggctgctgttgcttctgggccagaggaagagaatgagtttggtgccctggttgtcagatgttggaaagcagtagg

SEQ ID NO: 373301 - DNA, 100 bp, Homo sapiens
gctaagttcaagtgagccaaaacaaactacaaggggtacttcttatattgaagaaggtgtgagttcttgatacgaatgaaaggccaagagtttgttgatg

SEQ ID NO: 373302 - DNA, 82 bp, Homo sapiens
ttacatgttccacaagaagtgcagcttataatccaagctattactcaggttctgcgaaaattttcttgattttaaagaggat

SEQ ID NO: 373303 - DNA, 85 bp, Homo sapiens
gtgcagccgcgaggaggcgcgggaggtgttcgagaacgaccccgagacggttttgggatttgagattgacgcggtgaactctgtc

SEQ ID NO: 373304 - DNA, 82 bp, Homo sapiens
tcggtgagcgcgtttcccgcctgagcgcaactagcggcgggtcgtgggcacctccagcttccccgggcgctgcctggacagg

SEQ ID NO: 373305 - DNA, 75 bp, Homo sapiens
ggcggctgctgctagagctggagcatttgccggacagagtctcgcttcttcacccaggttagagtgcaatggcgc

SEQ ID NO: 373306 - DNA, 117 bp, Homo sapiens
ctttactatggtaaaatacagccatgtaaagcagatgaagaaagtgacagccagatgtctccatcacagtgaacctatgggtcgtggaacaaaagttatcctacacctgaaagaaga

SEQ ID NO: 373307 - DNA, 90 bp, Homo sapiens
atttaaacaagaatccactgttgctactgaaagggaaccattggcactggcaagtggggctctgccagactggtgtgaacaattaaccag

SEQ ID NO: 373308 - DNA, 96 bp, Homo sapiens
acagagagaaaattgagacggagctaagagatatctgcaatgatgtactggaggacattgtgaatgatattacagctgaacacatttctatttggc

SEQ ID NO: 373309 - DNA, 100 bp, Homo sapiens
cggtgagcaaggcctgcggaaacatgttcggcctcatgcacgggacctgcccggagacttcaggtgcttttggatgctctgtagccacccggggcccagg

SEQ ID NO: 373310 - DNA, 100 bp, Homo sapiens
tgaggaggcggcggcggagatctgggtagagtacagagagatggatgaaagcttggccaacctctcagaagatgagtattattcagaagaagagagaaat

SEQ ID NO: 373311 - DNA, 50 bp, Homo sapiens
tgcctacgtcagtaacagccaccaagtaatcctaaattggagagtcagag

SEQ ID NO: 373312 - DNA, 96 bp, Homo sapiens
gacaccgacatggaacagggactcactgggggtcgggagaaaggtcgctgtgtggcctcagaatattttcttgaaccggagatcaatttggtgacg

SEQ ID NO: 373313 - DNA, 101 bp, Homo sapiens
ggcccgggctgtagtgccggcgccgccgcgtcttcccggtctcctttcccggccgcacaggatggatcctgagcttgaaaaaaaactgaaagagaataaaa

SEQ ID NO: 373314 - DNA, 89 bp, Homo sapiens
ggaagtgttatgatgcccttcgaaaaatgatcaactattgaccatatagatggagtgaaggtacctgagcgcaggaaccatggtcttca

SEQ ID NO: 373315 - DNA, 97 bp, Homo sapiens
caaggatgaagaagtcaaggttgcccccaggcggtccttcctggagcggttctggtgaggttggaaggatgcagccacccggttgtcatgaaaggcc

SEQ ID NO: 373316 - DNA, 126 bp, Homo sapiens
ctcgctccgtggccttagctgtgctcgcgctactctctctttctggcctggaggctatccagccaacatggccaacgccctggccagcgccacttgcgagcgctgcaagggcggctttgcgcccgc

SEQ ID NO: 373317 - DNA, 90 bp, Homo sapiens
tggcacgtggctcccttggtgttccccttttactgccaggacactgagatttggagagctgaagtgagtagtgaatatagtatggacaag

SEQ ID NO: 373318 - DNA, 123 bp, Homo sapiens
ggcggctggcgcttcctgcgcatcgtctgcaagaccgcgaggcgagacctcttggccaattcctgtccccccagcagcatggcatcgtgtgctgaaccctctgagccctctgccccactgccc

SEQ ID NO: 373319 - DNA, 100 bp, Homo sapiens
aaataatccagagatttccacagaaggactgggatgatacaccttttccacagggaattgagttgattcctcctgcatggaaaaactactttcaaaagat

SEQ ID NO: 373320 - DNA, 105 bp, Homo sapiens
ctctcatctcgctcggctgcgggaaatcgggctgaagcgactgagtccgcgatggagggtggttctcttcccaaagtggaagccaaattcatcaattatgtgaag

SEQ ID NO: 373321 - DNA, 90 bp, Homo sapiens
tccctgcagatggcccatttggagatcttgacaaagcctcttctgtttccaatgggatggactcaccctgtcacccaggttggactgcac

SEQ ID NO: 373322 - DNA, 90 bp, Homo sapiens
gtggatctggcagtcggtcatccacctgctgcagatggggcaggtgtggagggtttggaaatcccttgtctccaggttgctgggattgac

SEQ ID NO: 373323 - DNA, 74 bp, Homo sapiens
agagttcaaggaggccttccagctgtttgaccgaacagagcccccctccatgcgcctgaaggcccgacccagca

SEQ ID NO: 373324 - DNA, 76 bp, Homo sapiens
gcttcatctggtcctcataatcttacttatcctctaggtcccaggaatgaaggcgcatattaaatttcctattgac

SEQ ID NO: 373325 - DNA, 101 bp, Homo sapiens
gggatttcttaaatcgatgtttggaaatggatgtggaaaaaaggggttcagccaaagaattattacaggccctcgggaccaaggatcacgtcatgactccg

SEQ ID NO: 373326 - DNA, 98 bp, Homo sapiens
ggcccccggagaagccgccgcggccaccccggcccctgcatctgtccgatcgctctttcaggcggaaacagcacttcatcaaccaggcagtgcggaac

SEQ ID NO: 373327 - DNA, 87 bp, Homo sapiens
ccccttcgccgggacctggcacccgaatccggcctgccgggtattgttgcagcatctggcagtgagactgaggatgaggacagcatg

SEQ ID NO: 373328 - DNA, 100 bp, Homo sapiens
ggaaaatggcggacgggaaggcgggagacgagaagcctgaaaagtcgcagcgagctggagccgccggaggcaggtgacaaacattaccaccccagctgtg

SEQ ID NO: 373329 - DNA, 73 bp, Homo sapiens
cagtggtcgcttcttctccttgtggtaagcatccgtggcattcaagacgaagatccccctgacgcccagctcc

SEQ ID NO: 373330 - DNA, 75 bp, Homo sapiens
cggcaccgtcctttcctttctccctcgcgttagccatccagtccaatggatcagatgggcaagatgagacctcag

SEQ ID NO: 373331 - DNA, 100 bp, Homo sapiens
cattcctcagtgctcacttggaatacaggtgctgataagactgtgaaaggcccagatggactgaccgcctttgaagccactgacaaccaggcaatcaaag

SEQ ID NO: 373332 - DNA, 151 bp, Homo sapiens
ccgaggctgaaggaagatggcggacggcgtggaccacatagacatttacgcggatgtcggcgaagagttcaaccagagtttatgtggccgaggcagacaagtggaattaggccttgctgcaggggacttcatttccttctcagtactggac

SEQ ID NO: 373333 - DNA, 94 bp, Homo sapiens
ctcctgtatggcacgaaccccctcaaccggcagaaactggacagtaagaaacttctagacctgcctagagctggaacgttacctccagagcgag

SEQ ID NO: 373334 - DNA, 82 bp, Homo sapiens
ccgcctggacctgcacatttgtgatgatagccagtcccgagagccaggaattttggagagtaaaaggctgaaccttgttaaa

SEQ ID NO: 373335 - DNA, 74 bp, Homo sapiens
cggaggtcgataagctggaactgatgtgctgttccctcgtcacaccaatgccagtgctcgagacaacaccatca

SEQ ID NO: 373336 - DNA, 85 bp, Homo sapiens
gcgcacgttgtaatcagctgaggccatgtcaggagacggagccacggagcaggaaatggctagtgatgagctgaaagagatgcgg

SEQ ID NO: 373337 - DNA, 100 bp, Homo sapiens
accagcagcaaagaagtgctatctggaaagagagcaaattgaaccatctttgtatcctaagttgtttcagaaaaatctggatccagatgtattcaaccag

SEQ ID NO: 373338 - DNA, 51 bp, Homo sapiens
agaatccgaggaatcttctgcacaggggctatctgatgggttagagtgcct

SEQ ID NO: 373339 - DNA, 101 bp, Homo sapiens
tcggaggaaccggcagctctccacgcccctgcccgaagcctgacccgactgcctctctcagtgaggcaaagaaaaatccctttggttccagaaaatctcct

SEQ ID NO: 373340 - DNA, 100 bp, Homo sapiens
ctgggcagggacagattgcagtatccgggatccagttaggaaccttcacccccccaaggatgaaggacccaagggaggaacatatgcagcagaaaaaaga

SEQ ID NO: 373341 - DNA, 100 bp, Homo sapiens
ctgctgctcggcctcggactaggcctggaggccgccgcgagcccgctttccaccccgacctctgcccaggccgcagaaacaagtgttgaaaatgttaaag

SEQ ID NO: 373342 - DNA, 75 bp, Homo sapiens
acatagctgtacaaaagaagatcctgccggcgcttcttgaacaagggaagtcgagacaacatgagtgtgattttg

SEQ ID NO: 373343 - DNA, 75 bp, Homo sapiens
gctgatttagaaggaggttcaggctacggtgagccgaagcttctcaataggtttggcatggacaagatctatgaa

SEQ ID NO: 373344 - DNA, 102 bp, Homo sapiens
tcagcctcctgagtagcttggattacagttggaagctgaaggtgttcctgaagtatctgaaaaatatgaaattagctctgttcccacttttctgtttttcaa

SEQ ID NO: 373345 - DNA, 87 bp, Homo sapiens
gttggcattgaacctgtatttccggagaacacaggtgttggcagagctgaaagagtacgcaacagaagtggatgtggactttgtacg

SEQ ID NO: 373346 - DNA, 126 bp, Homo sapiens
tgaccctggaggtgggcaaggtgatccagcaaggtcggcagagcaaggggcttacgcagaaggacctggccacgtgaagatagtgatccggggagacaggaacacgggcaagacagcgctgtggca

SEQ ID NO: 373347 - DNA, 100 bp, Homo sapiens
ctgtcgtgtacccttaacaggtatctgctcctcatggcgcaggagcatctggagttccgcctgccgaattatgttagagttgtggaggtttggtgggatg

SEQ ID NO: 373348 - DNA, 50 bp, Homo sapiens
ccggaggagcccctcaggcccatcaacaaagagagcattgtggatgtaga

SEQ ID NO: 373349 - DNA, 100 bp, Homo sapiens
attcgaggtgctctgtggccgcgagtgcatcttccacttgagaagctgatgtctcctcgacttccaactggaaccttgaacccccacatttctggacctt

SEQ ID NO: 373350 - DNA, 100 bp, Homo sapiens
tgcgttccagccccagttccccggcagcgggacccggcgaagacgcgaccgcggcgcgagtcaccatgggggacttgatctcatcttcatgccaggcctt

SEQ ID NO: 373351 - DNA, 100 bp, Homo sapiens
ccgtcctccaccgtttcctccaggacagcacctagtcgtggccggaggagtctcagagctgtcagaaaggagtctcaggagcaggggctgcggcagaggc

SEQ ID NO: 373352 - DNA, 74 bp, Homo sapiens
ccaaatcccacagaggcatctgaggtgcatgtttgcctacaagctgggtctgaatgacttgccccagtcagtcg

SEQ ID NO: 373353 - DNA, 103 bp, Homo sapiens
gtcaccgtgtgggagcgggagctgcggaaagtttattgaagtcaaactgtgatggctggctgcttggaacatcatcatctattaaaaagcaccaagacccccc

SEQ ID NO: 373354 - DNA, 98 bp, Homo sapiens
tttgtccagtggaagaccatctacatctcccacaggaagtgtcacacagcagtcaagtatgtcccaaacgtctctgaccctctggtgggcagcatcgc

SEQ ID NO: 373355 - DNA, 100 bp, Homo sapiens
ctcttcccgtctcccagcgtggatgagggcgcctgcagatcccggctagggcacggaccgcctaggccgaggcgccaagcccatctttgtgtgcttgcat

SEQ ID NO: 373356 - DNA, 89 bp, Homo sapiens
cggcacccagacaggtggcgacggcagaggacttgctcacttccgacagagaaaaacaaaaggtgacagttcgcattcggagaaaaaga

SEQ ID NO: 373357 - DNA, 96 bp, Homo sapiens
acctgggcaagctggagctggatgcagtcacgctggcaatcgcgtttgtcccgctggctggaagcctggcagtgacacgattaagcccaacgtgga

SEQ ID NO: 373358 - DNA, 75 bp, Homo sapiens
atattcctgccatcacaaaagctggacaagcgaaggtatttgtaggcaaaataccaagggatttatatgaggatg

SEQ ID NO: 373359 - DNA, 75 bp, Homo sapiens
ggacttcgctttgggccatgaccagttcaaatctgaacatcaatgatgtactagggaactactcattgactcttg

SEQ ID NO: 373360 - DNA, 50 bp, Homo sapiens
cagccatggacgcgtccctggagaaggacaagcagctgcggatctttgac

SEQ ID NO: 373361 - DNA, 82 bp, Homo sapiens
tctggggttgacgtgagtgaatccacatggtacagggctggagaataaagagtgttttaaaatcaaagatgggaaaatcgga

SEQ ID NO: 373362 - DNA, 75 bp, Homo sapiens
ggagctggcctttaggaaagccaagatcagggccatgctatgatagtggaagcttatccaaaataatagatccag

SEQ ID NO: 373363 - DNA, 111 bp, Homo sapiens
tcatcctcattgctactgccctctgcgctcctgcatctgcctccccatgccaggagtggtggctcacacctgtaatcccagctctgggaggccaaggccagtggattgctt

SEQ ID NO: 373364 - DNA, 75 bp, Homo sapiens
tcccgcgcgctgcccacgattcgcttctgaggaaattgagaggctgactgagcgactagaagaaaaagagaggga

SEQ ID NO: 373365 - DNA, 100 bp, Homo sapiens
gtccctcagtcacacatgccagagattgctcaggaagcaatggaggtgtaatctagctcctgtggtggagtttgctgcagatgtgggaactaaatcagat

SEQ ID NO: 373366 - DNA, 100 bp, Homo sapiens
gccttggatcaggagattattgaagtagatcctgacactaaggaaatgctgaagcttttgggagatgcacttatttacatggaaccagagaaacaagtga

SEQ ID NO: 373367 - DNA, 100 bp, Homo sapiens
gacagacggagtcctgttccaccttcagagcgtcacggcgtacgccctcatggggaaaatctccccggtgactttcagatatgcacccaatgtccaggga

SEQ ID NO: 373368 - DNA, 100 bp, Homo sapiens
tgtgtgggaagaagatttgtaaagaaaactcttagatctttaatctcatgaagtacgacagctacagccgcttcttaaagtctgacttgtttttaaaaca

SEQ ID NO: 373369 - DNA, 82 bp, Homo sapiens
accggtcccaggtgcacacacgagaccaggcccagagaaatcctaagtaatgcactgaagagaggagagatcattgcaaagc

SEQ ID NO: 373370 - DNA, 75 bp, Homo sapiens
gacctggagccgtcccaggactgtgcaggggactctgtcacagtaatcaaatgcaaagcagctgtgctatgggag

SEQ ID NO: 373371 - DNA, 51 bp, Homo sapiens
gccgggccgtcctcggcggcagtgtcaggaaactggcgatggaatatgaga

SEQ ID NO: 373372 - DNA, 82 bp, Homo sapiens
ctgcagtgcagacgaggtggatgaggccgagggcggcgacaagaaccgatcttcgtgaagactctgactggtaagaccatca

SEQ ID NO: 373373 - DNA, 75 bp, Homo sapiens
ttctatatggattacaatttgatcgctgggaattctccaccttaaagaagatgccttcaattaagttgcagagtt

SEQ ID NO: 373374 - DNA, 75 bp, Homo sapiens
aagacttaaaagacagcagtgacctgcaccaagcagaagaaggttccagtgggatgggagcttatcacggaaaac

SEQ ID NO: 373375 - DNA, 51 bp, Homo sapiens
ctttctggcctggaggctatccagcgtgaatcagctcccggccgactttag

SEQ ID NO: 373376 - DNA, 82 bp, Homo sapiens
gcgaccaggctttcactgagagagggtggcaaccaactatatctgaggaccagagccattttggggcaccagagcttgtgac

SEQ ID NO: 373377 - DNA, 75 bp, Homo sapiens
aaaagttccctatgggaaaggaccttcatttaatcaggtgcagcggaactgctgcctgacgctctgcaacttcag

SEQ ID NO: 373378 - DNA, 90 bp, Homo sapiens
cgtgaggagtgtgagctcatgctacagggcgccctgcgtccggcagaggaggcgagcatcccgctcaggtgatgaggaacccctcgcgca

SEQ ID NO: 373379 - DNA, 83 bp, Homo sapiens
cccgcgcgtgctgcgggtctgctcgggggtctacttcgagggatgccggaccagatctctgtctcggagttcatcgccgagac

SEQ ID NO: 373380 - DNA, 98 bp, Homo sapiens
gccggtggaggaatttgtggctggctggatctctgagcaaaatatgctgtgaattccatcaagaagaaagtcaacgacaagaacccacacgtcgcctt

SEQ ID NO: 373381 - DNA, 96 bp, Homo sapiens
acaattccagataattaaacaagctagaactgcagttgggaaagacagtgattgttataatcaaagtgacagattccgctctattattgatgatgc

SEQ ID NO: 373382 - DNA, 100 bp, Homo sapiens
cccagacccaagaatcgcccgcctctccaagaccatccctggctgctggtgacttaagagattaaaattaatttggttgctgttggttctgaacaaataa

SEQ ID NO: 373383 - DNA, 106 bp, Homo sapiens
ctcaggccagtcgcctccaggccaagagggatccttcacccgtgtctggttctggcctataggaacaagacattttcagtaatggaagaaggagcttccaggctgg

SEQ ID NO: 373384 - DNA, 90 bp, Homo sapiens
ggcgaggtcagccccaaactaccgatggacttgccagtttcaaaagtttcctgaagtctgaattcagtgaggaaaaccttgagttctgga

SEQ ID NO: 373385 - DNA, 101 bp, Homo sapiens
cccgggaggggggagcggcgttggaggccaccgtttccagttcattatgctgacatatcttttcatgttggcctggctgggagtcacggctttcacctcac

SEQ ID NO: 373386 - DNA, 100 bp, Homo sapiens
ggcaaagcgaaattggtcattctcgctaacaactgcccagctttgaggttcatgtgtgcccagctccctaatcaggtcctggagagcatcagcatcatcg

SEQ ID NO: 373387 - DNA, 90 bp, Homo sapiens
ccggcgtcttcgtttgggacgaggagaggatccaggaggaggagttgcagagggcgtgtaccagactttatcctggaaaagataccagcc

SEQ ID NO: 373388 - DNA, 100 bp, Homo sapiens
ggagcaacttggcgaggttcagactcttggagccagaagctacatgacccctaaacggagttggtgatgttcagagatgtggctatagatgtctctcagg

SEQ ID NO: 373389 - DNA, 90 bp, Homo sapiens
gtgagaagcaagaaggccctggacacagcaatatctctgggctttcacaggcaatgagaagcacgaccttcatgttacctcccagcaggg

SEQ ID NO: 373390 - DNA, 100 bp, Homo sapiens
agaatatgctgccaaaattatcaacaccaaaaagctttctgctaggggtatcattaatgggattggaaattttaagtgcctttgtggacagattatcaac

SEQ ID NO: 373391 - DNA, 83 bp, Homo sapiens
agaagaattcctcactaatgagctctccagaaaattgatgcaggtgtgatgaatgcagactctgctaccattttggctgtttg

SEQ ID NO: 373392 - DNA, 100 bp, Homo sapiens
ctgggaaggattctgagcaagagaatgggctgggcagcctgagtcccagtgatttggagaaggaggagcagatacacagtgtggacattgggaatgatgg

SEQ ID NO: 373393 - DNA, 75 bp, Homo sapiens
ccggcggccaaaggccagtgactaccaacgtttggaccagaagggggcaatggcggcttcctgtgttctactgca

SEQ ID NO: 373394 - DNA, 97 bp, Homo sapiens
gggatgaagggcccccgaccccaagctctgccacgaaggtgccaccgctacgagttccagggagctctgtcctggtgaccgtgcccgggttatgacg

SEQ ID NO: 373395 - DNA, 80 bp, Homo sapiens
tcaaaagcgcactaaatcgtctccaaggacatggatttgattgacatactttggaggcaagatatagatcttggagtaag

SEQ ID NO: 373396 - DNA, 82 bp, Homo sapiens
tgctcaggtgccagatgcaaaggccaagactaaggggctgcagagcggggtggacattggcgtcaagtactcggagaagcag

SEQ ID NO: 373397 - DNA, 82 bp, Homo sapiens
acgccgacaccttcagcgccctggtcaagacgctgcagcgggactgcctggttctgcggggagtgtctccagccctgcctgc

SEQ ID NO: 373398 - DNA, 75 bp, Homo sapiens
gctcgtacttctggccactgggcgagcgtctggcagtgaatgatttgggaggggacttcaaaggagttggtaaag

SEQ ID NO: 373399 - DNA, 83 bp, Homo sapiens
agcggatcgggtggagtgtaggtcatatcgccgcggtcccactctatgaccagtgggaggatgtgatgaaagggatgaaggtg

SEQ ID NO: 373400 - DNA, 82 bp, Homo sapiens
cctgaagtgagtcaggagctgtatgaccttaacgtggagctctccaaggcagcctggcatcctcgctacaacctcattgttg

SEQ ID NO: 373401 - DNA, 98 bp, Homo sapiens
gagggatccttcacccgtgtctgatggactcaccctgtcacccaggttggactgcactggcctcaacctcctgagttcaagtgatcgtcccacctcag

SEQ ID NO: 373402 - DNA, 98 bp, Homo sapiens
cgacatcatgctccagttcctggattcaggagcagttccagaaaaatcccgacagttacaatggtgctgtccgagagaactacacctggtcacaggac

SEQ ID NO: 373403 - DNA, 73 bp, Homo sapiens
ctctacactggactaagagaagttgttaccgaacatctcataaataaggtgctagtgtatgagttgttgttgg

SEQ ID NO: 373404 - DNA, 100 bp, Homo sapiens
cttcaatgtcctggggttctcggccgcactgtccaccaacatcatggactgcaaacggggattcagcgtccgatcctttggaacagggactcacgtgaag

SEQ ID NO: 373405 - DNA, 90 bp, Homo sapiens
cgtgttccgtgtctctggattcaagtcccaggagtcctgaccagagagcagacaatgcagatcttcgtgaagactctgactggtaagacc

SEQ ID NO: 373406 - DNA, 49 bp, Homo sapiens
ataatttgaaccagcagcaacgtgagatggcccactgcgtgaccttggt

SEQ ID NO: 373407 - DNA, 100 bp, Homo sapiens
cgatctgcacttcgcattttggcattgacatttaattttagggtcctttatatagaagggagacctccacctcctggatgccctcccaatgctgctcagc

SEQ ID NO: 373408 - DNA, 100 bp, Homo sapiens
ccgcgctttatcaagattatcgaggttgaaaggattgttgacaaaaggaaaaataaaaaagggaagacagagtatttggttcggtggaaaggctatgaca

SEQ ID NO: 373409 - DNA, 100 bp, Homo sapiens
cagagcggcggctcctccgggggacccgcggtccccaccgtgcagcggggcatcatcaagatggaagtgcacggctgtctataacgtgctgccgggtctc

SEQ ID NO: 373410 - DNA, 75 bp, Homo sapiens
accaacttcgccaccctgcggtggattgactacggcaaagtggccactcaggccacggcgtatgcctccaaggac

SEQ ID NO: 373411 - DNA, 101 bp, Homo sapiens
ggcggagcgcgagagcttcgagcggactcagtgtccagctctgaagggcaaagtgcagaagatcctaatctggaagtggggtcagccaccatctcccacac

SEQ ID NO: 373412 - DNA, 101 bp, Homo sapiens
cggcccatgaggatattgccgtgaaagatttgataatgggctgcattaaaagtaaagaaaacaaaagtccagccattaaatacagacctgaaaatactcca

SEQ ID NO: 373413 - DNA, 75 bp, Homo sapiens
gcaagtttcaagaaatggaaggactgaccaggggcttctttcctgtcgttgttggctttattagaagagtgccag

SEQ ID NO: 373414 - DNA, 90 bp, Homo sapiens
tgacgccatgtcgggttattcgagtgaccgagaccgcggccgggaccgaggcccccaaatacatcaagatgtttgtactggatgaagctg

SEQ ID NO: 373415 - DNA, 100 bp, Homo sapiens
agaaaattcttgctctctttgcacctgaagattcactgacaggtgtgtcacggggtcccagccctgtcagccttggaaatcaggataccttacctgtggc

SEQ ID NO: 373416 - DNA, 75 bp, Homo sapiens
gccagcttcctgcaggcccagagccggcatgaactctcccaacgagtcggggaccacttaatagtgagtcttcca

SEQ ID NO: 373417 - DNA, 82 bp, Homo sapiens
cgccattttagcaacgcagaagcccggcgccgggaagcctcagctcgcctgaaggtgctggagaatctggtaaaagcaccat

SEQ ID NO: 373418 - DNA, 50 bp, Homo sapiens
gcaacgtcatcctccacagctaagctgtcctgagaccatgttatctctac

SEQ ID NO: 373419 - DNA, 100 bp, Homo sapiens
aggagggagcgggatagaggaccggagagaaagcagtgtggctgcggtcctgaggtaatgtgaggctacaggagatgatggcaacaatgtgccaggaacg

SEQ ID NO: 373420 - DNA, 90 bp, Homo sapiens
caggagaaaatactgcaacccaaactggctcctagtttctctgatgcacagaccgatatgctgcaggctgctagtcattatcgccaaaat

SEQ ID NO: 373421 - DNA, 98 bp, Homo sapiens
taaacgctctcggaattatggcggcggtggatatccgagatggatcctgagcttgaaaaaaaactgaaagagaataaaatatctttagagtcggaata

SEQ ID NO: 373422 - DNA, 75 bp, Homo sapiens
accatggagaccatagactggaaggtgccgacttcctggtgacggaggtggaaaatggtggctccttgggcagca

SEQ ID NO: 373423 - DNA, 90 bp, Homo sapiens
ctactctgcttggcaagggtggcagtcacgtgtcctaccgtcaggatgcttcaggccaggctaagtgctatttatggaggtacctatatg

SEQ ID NO: 373424 - DNA, 90 bp, Homo sapiens
gggcacccgcagtgccaacttccccgtgcgtgtgccctttgaggccttcctggccaggctccaggaggccagagctctactgaagcggcg

SEQ ID NO: 373425 - DNA, 90 bp, Homo sapiens
gttcagaagttcatggatgctgtcaacaagaagagcagttcccaggatctgcataaagcaacacagtcactcctggcggcaaaccaaaca

SEQ ID NO: 373426 - DNA, 82 bp, Homo sapiens
cttccactgttcctgccacagcggcttcgagctctcctctgatggcaggacctgccaagagtgaagacatttccacctggac

SEQ ID NO: 373427 - DNA, 95 bp, Homo sapiens
gctactcctggcagtgcgtcaatcagagcgtcctgtgcgcatgtcagtgaaaaaaccagtgaatcgccttccaaaccaggagaaaagaaaggatc

SEQ ID NO: 373428 - DNA, 100 bp, Homo sapiens
tccccagtcctccgccccctcgcgtcgcggccctgggcgggcgccgcgagccgggtgtcatggagaaactccagctgggcccagagattctgcagcggga

SEQ ID NO: 373429 - DNA, 75 bp, Homo sapiens
gcagagatgctgtggttcggggggtgctcgggtggcagagcagaaggaacacagactgccccctggccaggagga

SEQ ID NO: 373430 - DNA, 75 bp, Homo sapiens
aatccgcatcagtgtggaagacaataacggcaacatgtacaagagcatcatgcctcctctcaagtcctcactgcc

SEQ ID NO: 373431 - DNA, 74 bp, Homo sapiens
cgccagcccgtgccgcgagcgcggcctgcaggagatgatgataattccgaagaaggcttccacactattcattc

SEQ ID NO: 373432 - DNA, 51 bp, Homo sapiens
gatccaccttacatggaaatgaagagcacagcaatggaggaaacagctata

SEQ ID NO: 373433 - DNA, 111 bp, Homo sapiens
cagttcgctattttgataactcaagtttaggcctttgtccagttttgtccatcatggaactgtcctggattgtgaggagaaagactgggacttctcgatgaatctcaatgt

SEQ ID NO: 373434 - DNA, 88 bp, Homo sapiens
gtgtttaggaggatgtgagcacatcttctgtaggctcacagaacatttcctgcctgttgctcacactctgttgtccacagcatacccg

SEQ ID NO: 373435 - DNA, 75 bp, Homo sapiens
caagatcaagaccggcgtggtgaagcggttgccaacttggcctgttccatctcaaataatgaagaaggtgtaaag

SEQ ID NO: 373436 - DNA, 74 bp, Homo sapiens
acatcacccccatggaggccctggcagagcagggacttcatctgcagcatcctcaccattaaaaaaagaacagc

SEQ ID NO: 373437 - DNA, 51 bp, Homo sapiens
agccagaagctacatgacccctaaacggtggccagcatcgaaatgttcagc

SEQ ID NO: 373438 - DNA, 100 bp, Homo sapiens
gaaaaagatgttttgatccctaaaataatgagagaaaaggccaaagagaggtgttctgaacaagttcaagatgctggcccgcgagagacattgatgcatt

SEQ ID NO: 373439 - DNA, 100 bp, Homo sapiens
gcggggcatccagaaggtggcgatgttggtccaagggaactgggtggtgaagaggtatggcctcacaagtcttggtctacccaccatatgtttatcaaac

SEQ ID NO: 373440 - DNA, 50 bp, Homo sapiens
gccgagccctacctcctcacggcaactcagcatatctgccaccaaaaatg

SEQ ID NO: 373441 - DNA, 90 bp, Homo sapiens
gttcttgaacagacagaaggatgtaaaggatggaaaatacagccaggtccggaaacagcagaaggagcacactaatctcatggcagaata

SEQ ID NO: 373442 - DNA, 76 bp, Homo sapiens
cagcctgcggagcctgtggggcaggaatggatataaatttctctactgttctgcccgtgccatcgggatggcggac

SEQ ID NO: 373443 - DNA, 50 bp, Homo sapiens
gtttgtggatcgctgtgatcgtcacttgcatttaaatcaaacggtattga

SEQ ID NO: 373444 - DNA, 95 bp, Homo sapiens
caagacctcatcaacaattaaggtcctgaggcacgtgaatggccaggatcagattgtgcccggcctgtacgcctgtggggaggccgcctgtgcct

SEQ ID NO: 373445 - DNA, 74 bp, Homo sapiens
gtctccgccgctgcgggcccgctccgacgcggaaggaatagccaggccagaagaaggaaggcctgtggtgagtg

SEQ ID NO: 373446 - DNA, 75 bp, Homo sapiens
gccacttctaggggctgcatcaccatcataggtggtggagaccccatccttggctgcttgcagggccactgtcca

SEQ ID NO: 373447 - DNA, 82 bp, Homo sapiens
tgaaaagatccgatggcagcaccacttcgaccagcttcatcctcagacagagttgcatgctgagaatttgaaaaatgaagat

SEQ ID NO: 373448 - DNA, 74 bp, Homo sapiens
gcagaggggaagagagtacaactacaaattacttagaacgtgttcaaaaaagtttccctcatccaattgataaa

SEQ ID NO: 373449 - DNA, 83 bp, Homo sapiens
tggaaactggatgcagcaaggaaataggatttaaccgctctctgcctcccagggagtggagcttggtttcgggatctcggtgc

SEQ ID NO: 373450 - DNA, 100 bp, Homo sapiens
ctcggcctccggcgcagcccggaaatgtccggcaagatcgagaaagcaggagcccagtttcctccaattgcagcacaagaccttccttttgttctaaagg

SEQ ID NO: 373451 - DNA, 98 bp, Homo sapiens
cttccatccgccagctgccatgagcgagcgcctccgtcccagattttcagctgaactctcatctctcaacactggcaaatattcataagatctaccac

SEQ ID NO: 373452 - DNA, 75 bp, Homo sapiens
ttggtgaaactgaatcacaggagatatttccagcagatcgccaaactgaggcagcaactacaacgcagtaaacag

SEQ ID NO: 373453 - DNA, 100 bp, Homo sapiens
gccgctcctaagcctgcacagccgcggcggcagcagcagtgagagactagacgcttgaagcaaagctgccatcccagaagacgacatgctctcagcaacc

SEQ ID NO: 373454 - DNA, 100 bp, Homo sapiens
catctacaaccctgaagtgcttgatatcacagaggaaactctgcattctcgcttcctggagggcctgctatggtgtgctgcggttcatcatggagagtgg

SEQ ID NO: 373455 - DNA, 100 bp, Homo sapiens
ccctctctccgcgcggagccgagccggaactgcggcagtctctccctgccaggctcttcatccaagaacgctttaccctgtacagctctaaaaaccttag

SEQ ID NO: 373456 - DNA, 82 bp, Homo sapiens
acattgagagcaaaatctacaagatgatgcagggaggaggttattgcagctgactgcaaaagggtcacagtgctgaagtatt

SEQ ID NO: 373457 - DNA, 74 bp, Homo sapiens
ggctgagctagcagtgagcaccttttggcccaatgaatatcaggcacagttggtggatctgaaatctgaactga

SEQ ID NO: 373458 - DNA, 75 bp, Homo sapiens
atcaccttattcacagacaactccaccaattgtacagcagcgatggattttgggtggggaagtcctccttgcgga

SEQ ID NO: 373459 - DNA, 87 bp, Homo sapiens
ccaagtaaagggtcctttaagacattgactgtgccggaatcctgaaactcagaaactccgacattgaacttcggaaaggagagacgg

SEQ ID NO: 373460 - DNA, 99 bp, Homo sapiens
ctgatattaagccatcaaatgtggaacctatggaaaagggttcccttctggagaagagtcaccgggtttggttctgtttcccctttctgctcgacactt

SEQ ID NO: 373461 - DNA, 100 bp, Homo sapiens
gaagaatgctgaaatagctttaagaacccagaagacaccacctggacttcaacatgaatatgcagctcctgctgaaaatgattctggggaccattctgac

SEQ ID NO: 373462 - DNA, 71 bp, Homo sapiens
tctataacccctaccgccacggtgctgatgtatggacagccgtatcgtgttaccttagagcttgagctgcc

SEQ ID NO: 373463 - DNA, 88 bp, Homo sapiens
ggcatctaacctcctgtggataagggctcagaatagcaccattgctggttgggttcaatatacggagagtgccctgtgccaaagccac

SEQ ID NO: 373464 - DNA, 51 bp, Homo sapiens
agaaaaggaacgggagctgagaggttttgctgttactgctcagtgtagtca

SEQ ID NO: 373465 - DNA, 100 bp, Homo sapiens
atggtaacagatgctgacaggtcaatactatctccaggtggaagaatcggcaaggttggaaaccagaagcgtgttgttggtgtgcttttggggtcatggc

SEQ ID NO: 373466 - DNA, 95 bp, Homo sapiens
gaggcggtggagcgcagagcgggcgagcgcggcagcttcaaaagatggtccatgatattaaaaacaatgaaggtggaataatgaataaaatcaaa

SEQ ID NO: 373467 - DNA, 100 bp, Homo sapiens
gtccctggacggggcctcgggaagaatgcacaagtaaggttcgtgatcctcgggccaattttgatcagtccctacgtgtactgaaacatgccaagaaggt

SEQ ID NO: 373468 - DNA, 100 bp, Homo sapiens
ggttggaaaagagactgttcaaaccactgaggatcagattttgaagagagatatgccaccagcatttattaagtgcagcctttgtgaaggagaaccaccg

SEQ ID NO: 373469 - DNA, 100 bp, Homo sapiens
tgggtgccctggagcgcattgggggggccgccctcagcccccatgcccagcacatctcagtgccggagcggttgcagggcacacattactcggtgcagtc

SEQ ID NO: 373470 - DNA, 100 bp, Homo sapiens
cttcctgccatcaccgatgtgcctaggcgcatttcagcctgtggacatctctacagcaatgagtgaacgggcacttgctcagaaaagactcagtgagaat

SEQ ID NO: 373471 - DNA, 75 bp, Homo sapiens
atcaggagccgccgccgccatatcaggtgaccaagaatatggcccaggtgaccaaagccctggacaaggccctga

SEQ ID NO: 373472 - DNA, 73 bp, Homo sapiens
tggatccaagatggcgacggcgatgataatcacagctggcttatcaatattgctgtttgatgcgatcctgacc

SEQ ID NO: 373473 - DNA, 80 bp, Homo sapiens
gaagcatttacaataagaagagaagatggacagtttcagtgcattacagattttcgacaatgaagccaaagacgtggaga

SEQ ID NO: 373474 - DNA, 96 bp, Homo sapiens
tggagagaccccgcggctgggcgttcatctaccacgctttcgtattgattataccggaacagagccttccagtccctgtaataaatgtttatctcc

SEQ ID NO: 373475 - DNA, 74 bp, Homo sapiens
ctgctgctctctcatttgctggccatcggattgggggttatgatcatagctactacttcattgcaacctttatt

SEQ ID NO: 373476 - DNA, 80 bp, Homo sapiens
ccctacactttgaccatgctgtccggatgggtcattttatgccacctgaaaaagtacataaagaactctttaaagactgg

SEQ ID NO: 373477 - DNA, 82 bp, Homo sapiens
gggggcgccatggcgaccggagcgaacgccacgccgttgggaatcttgtcgattggcctggctgctgcctactacagcggag

SEQ ID NO: 373478 - DNA, 75 bp, Homo sapiens
acggtgacagattctagccgctactttgtaatccggatccaggatggtactggtgaatctggattgggaaagtcg

SEQ ID NO: 373479 - DNA, 100 bp, Homo sapiens
ctactactgcctttcaatttctgcaactgtattattcactccttcaagagaacttgccacttgaaaggttgtgcaccatctccaggtgcttatgatgtta

SEQ ID NO: 373480 - DNA, 98 bp, Homo sapiens
gccttcctcgggtcagactaccggcggcgacgaccacaggaggtggaggcctgaattttgatctatgttctacctacatccagctggctgaaagtact

SEQ ID NO: 373481 - DNA, 75 bp, Homo sapiens
actggcgagggtcagaaactgggcagcccaaggcttattgatatttgcggagttgatttctgcgattaagaggac

SEQ ID NO: 373482 - DNA, 74 bp, Homo sapiens
ggacattccaggcagaggcaagatcctgaggaggatgaaggggctggccctggaggccgagagtgagctggaga

SEQ ID NO: 373483 - DNA, 100 bp, Homo sapiens
aatgttgaaagatctaaaggagctgtcagatggagaaataaaagtggccattagtactgtgagcatgaaccttgagtgtttctacacctgtgggttatga

SEQ ID NO: 373484 - DNA, 100 bp, Homo sapiens
ttctgaattgtgctgccttggccaaaagaggtgaacacacagtgttcatcccctcaggaggacacagcttttgaggtaccatcttggaagcagagaccag

SEQ ID NO: 373485 - DNA, 75 bp, Homo sapiens
ctccaaggaagccacgtgcagacatctacaaccttcgatctcctgacgagaatggtagtgctattggccttccag

SEQ ID NO: 373486 - DNA, 83 bp, Homo sapiens
gtcatcatgtcgcgttacgggcggtacggaggagtgtggacgaatgtggaacctcgctctgtggctgtgttcccttggcactc

SEQ ID NO: 373487 - DNA, 50 bp, Homo sapiens
ctgaagactgtggtcattgtgcttgcttgcccatcggggacatacaaacc

SEQ ID NO: 373488 - DNA, 118 bp, Homo sapiens
aggcaaatgctctctggaggatctgaaacttgcgaaatccctggtgccaaaggctttagaaggttatatcacagcttcacgttacagcatggaagctgttgccaagtttgatttcact

SEQ ID NO: 373489 - DNA, 76 bp, Homo sapiens
cagtgatctacgggctggagttccagttgttgacctcctgtactggagagacattaagaagactggagtggtgttt

SEQ ID NO: 373490 - DNA, 100 bp, Homo sapiens
acgcccttcgcaaggcccctcagcacacagctgtcggcttcaaacagacggaagaaggtagataatgactataatgcccttcgagaaagactcagcacct

SEQ ID NO: 373491 - DNA, 129 bp, Homo sapiens
cgaggctgagactcaccggaggaagcggcgcgagcgccccgccatcgtcccgacttgtgcaccatggacaattttgctgagggagatttcactgtggcggattatgccttgttagaagattgccctcac

SEQ ID NO: 373492 - DNA, 95 bp, Homo sapiens
ggaggtctccggagcagagccgaagctcgccggagaagaggagccccagcgccccggtttgcaaagcaggttatgatgtgattgctcaagcccaa

SEQ ID NO: 373493 - DNA, 75 bp, Homo sapiens
ggctgacagtgggttgaccctgaaaggttaactgagaggggagtgaagttcttccagcggaaagtggagtctttt

SEQ ID NO: 373494 - DNA, 50 bp, Homo sapiens
ccgctgctgaagagtttccaaggagagagctcaggccccggggcctccag

SEQ ID NO: 373495 - DNA, 78 bp, Homo sapiens
gggccgcgtccatcacctggcactcaagtgcctggagaagttccctgtgatccagcacttcaagttcgggagcctgct

SEQ ID NO: 373496 - DNA, 83 bp, Homo sapiens
cctcacatcaacttctaccagctggacttggcagatgaacttgctcttgttgatgtcatcgaagacaaattgaagggagagat

SEQ ID NO: 373497 - DNA, 82 bp, Homo sapiens
cgtagacgcagtggcctccaaggtgcagacagctgtgactatgaagggggtacaactccaaaaggagacattggagaagaac

SEQ ID NO: 373498 - DNA, 99 bp, Homo sapiens
cgacaagccgctggcagccgcggatctcaccgccgctcagggtgaaggtgtggttccagaaccggaggacaaagtacaaacggcagaagctggaggagg

SEQ ID NO: 373499 - DNA, 75 bp, Homo sapiens
gggagttcagaaaacagttccccctgcatgaaaaggttggaagtgtatcctcccttcttattttttctagctgtt

SEQ ID NO: 373500 - DNA, 100 bp, Homo sapiens
atcaagccaagaacagcccaatctcctttctgggcaaacgttccaagtggccacagatgtctttaattccaaaaacctggccgttcaggcacaaaagaag

SEQ ID NO: 373501 - DNA, 90 bp, Homo sapiens
ggtgacctcaccgcctcggttcgccctcagccgccccggtacactgatgctgaagtactatgagccttcggaacttgtggagagactaca

SEQ ID NO: 373502 - DNA, 90 bp, Homo sapiens
ccctctacctggggacaggtcctttggaacaggagctggtcttcgccttgatcgtgttctcctgcatctatggtgagggctacagcaatg

SEQ ID NO: 373503 - DNA, 100 bp, Homo sapiens
acacggtggggcgcagcttcgagggccgggagctcctggtcatcgagctgtccgacaaccctggcgtccatgagcctgacacgatgaggcgagtggtacg

SEQ ID NO: 373504 - DNA, 98 bp, Homo sapiens
cttttctgcaggatgttgtgccacaggagctgtcattgactggcccacagaggagggcaaggaagtatgggattatgtgacggtccgcaaggatgcct

SEQ ID NO: 373505 - DNA, 100 bp, Homo sapiens
cgccgggtcccgcggggaaaattggggaccacaaattcagtgcccaccggattgtcttagcagcctcgatcccgtatttccatgctatgtttacaaatga

SEQ ID NO: 373506 - DNA, 75 bp, Homo sapiens
acagaacagtcgttcccgcctcacaacctgaagactcagcctggatttcaaaactgaacactgaagtggtttgca

SEQ ID NO: 373507 - DNA, 82 bp, Homo sapiens
tggagctgtggtcgctgctgtgatgtggaggaagaagagctcagacattcactactttcactgcctaagaatcctggacctt

SEQ ID NO: 373508 - DNA, 90 bp, Homo sapiens
cccggacagtggcagtgaaacagattggtacacagaacagcttggagcttcttgaggatccaaaagctgaagtggtcgatgaaattgctg

SEQ ID NO: 373509 - DNA, 76 bp, Homo sapiens
tcttctcgcagagtgctccctgctaacggggacaggtgacatttacaaagaggaaatttgggttgatgaagaaggc

SEQ ID NO: 373510 - DNA, 75 bp, Homo sapiens
cctcagagaccagtgacatgccagaggctggtgtgtgacagctctgtgctgctgtgcctcaagaagagatttcac

SEQ ID NO: 373511 - DNA, 100 bp, Homo sapiens
gggagaacaccgactgagacctcaaaccctggctccagtgtcatggaatcagagatcattgatttcttcctgggggcctctctcaaggatgaggttttga

SEQ ID NO: 373512 - DNA, 83 bp, Homo sapiens
ccgggctcgggggagcgtgagttgcagatatagccagtaccaacgtatgctgagcacgctgtctcaatgtgaattttcaatgg

SEQ ID NO: 373513 - DNA, 75 bp, Homo sapiens
ccgccgcccccgggctcgcggcctgcagatcactccaagaactgaggcccctgtcagcagtgtcagtaatagttt

SEQ ID NO: 373514 - DNA, 100 bp, Homo sapiens
atgggtggataccgtcaagctggccaagcacaaagagcttgctccctacgatgagaactggttctacacgcgagctggtatgaaaatgaaagtcttcaga

SEQ ID NO: 373515 - DNA, 75 bp, Homo sapiens
cgcagatgttgtcaaggtggcctaccaggaggccaggggtgtcgccatgccacaagtatatggttatgatgactt

SEQ ID NO: 373516 - DNA, 100 bp, Homo sapiens
ccgagcccgaggccagcgccgcggctttactcatcagtcttaagtatggttgttttatgtggcaattgggagatactgatacttgttttcagatccatag

SEQ ID NO: 373517 - DNA, 51 bp, Homo sapiens
tttgccaccacactccagcttggatatgagatcctgactccaaactccatt

SEQ ID NO: 373518 - DNA, 101 bp, Homo sapiens
agcgtatgtgccacgccgcccaggagacccctctgctgcaccacttcatggtttgggtacccagaccccacctacctgacccgggtgcaagaggagctgag

SEQ ID NO: 373519 - DNA, 100 bp, Homo sapiens
tgcgttccatggatgaactgaatcatgattttcaagcacttgctctggagggaagagcgatgggagagtactatactggcaattgctggagaagattttg

SEQ ID NO: 373520 - DNA, 82 bp, Homo sapiens
cttcctccagaaactttggcgacaatgttggcctgtctgcaagcttgtgcaggcttttgtctggtcctctgagccccagtga

SEQ ID NO: 373521 - DNA, 101 bp, Homo sapiens
ctggtcctcataatcttacttatcctctaggtcccaggaatgaaggtgttacagggtcttgattatttacataccaagtgccgtatcatccacactgacat

SEQ ID NO: 373522 - DNA, 74 bp, Homo sapiens
aaacaggtccctggcgagccccttgcagtaacaaatgtggcaattattttggatctatcacctgtcatcataac

SEQ ID NO: 373523 - DNA, 90 bp, Homo sapiens
ggcttggaaggaagtgcagcttcctgaattagctgatgtttgtcctggtacctgggctagcttggttcctttccaagtgtcaaataggac

SEQ ID NO: 373524 - DNA, 100 bp, Homo sapiens
cctcagcctcccaagaagctgggattacaggaatccatacctgttttgtatgtaagcagagtggggaagatgttaaaaggtgccttctacccttgtgtgg

SEQ ID NO: 373525 - DNA, 75 bp, Homo sapiens
ggaaagccccccaggctgagtgcggcatgatctccatcaccgaatggcagagtgaaatgacaatggatgctctgt

SEQ ID NO: 373526 - DNA, 78 bp, Homo sapiens
accaagtatgtggaagccaaggactgtctgaacgtgctgaacaagagcaacgaggcctcctgacaaggtgatccgggc

SEQ ID NO: 373527 - DNA, 100 bp, Homo sapiens
gggagaaggcagcgcgttgtacccgaggagctgctgctcttcctccagaacctgcccacagcccactgggatgatgaggacatcagcctgttgctggccg

SEQ ID NO: 373528 - DNA, 74 bp, Homo sapiens
gatgcccactttcatcaacttctctgtctgctcaacagtcagcacctgtgcctgtgtggaatactatgggaagg

SEQ ID NO: 373529 - DNA, 101 bp, Homo sapiens
aacacagtagcagctggaaccatgacaggcatgttgtataaatgtacaggacacattcagctaacgtattttagcaggtggagtgaggttgaagattcctg

SEQ ID NO: 373530 - DNA, 100 bp, Homo sapiens
tccaggggtcttgtgcaggacctgaaagtaccaagatcactccatggatgaaatgacagctgtggtgaaaattgaaaaaggagttggtggcaataatggg

SEQ ID NO: 373531 - DNA, 113 bp, Homo sapiens
ggggaatcaagagacccggtttctaatccctgctctgtcactaacaagctgcgtgatcttcgtgatgtaaattggagtcaaccaggtgaaaagaagttaactgggggatctaa

SEQ ID NO: 373532 - DNA, 83 bp, Homo sapiens
ccggccggcccggagcaccgagctcgcggcacggtaggagatgccgacaaaaggatcaaggtggcgaagcccgtggtggagat

SEQ ID NO: 373533 - DNA, 82 bp, Homo sapiens
tgatcatcagtatttgcctcctgtgtcccaaccggcctgagtcaagcaaagcgaaggctggagctaggagaaagcggtcatc

SEQ ID NO: 373534 - DNA, 75 bp, Homo sapiens
acagatgatggcgacagcggagaagggaaggactccctggaggaaaagcggaagcggcagcggtctgaacgcctg

SEQ ID NO: 373535 - DNA, 75 bp, Homo sapiens
aatgccaatagtactaaagaggaggtggaaatgaattgggacatggtacagggttactttgaaagttgcaatata

SEQ ID NO: 373536 - DNA, 100 bp, Homo sapiens
cagctctgctgagagagtgcaagccgtggggacatctgctttacaagaacacagcaaactaagaaagggtatagtggccactgcgggcaggggcactgat

SEQ ID NO: 373537 - DNA, 74 bp, Homo sapiens
ccacctatgtggctggtattgcagatcattaagcagcttcgagtctggaaaatttgttgaatgtactgagcaat

SEQ ID NO: 373538 - DNA, 100 bp, Homo sapiens
ttactgtatgtggcactatcaaatctagatgcagctacttatcagattgatgtacagctatatattttgtcctttctttcacctcatgatctgtgtcagt

SEQ ID NO: 373539 - DNA, 101 bp, Homo sapiens
tcttatactcatggtctttgtcaattatggaggaggaaaatattggtacttcaaacatgcaagttggaatgaattcaaggaagccttctccctatttgata

SEQ ID NO: 373540 - DNA, 75 bp, Homo sapiens
gaattccgggaagtgggagcttcaggctcgctccgtgcgggaaactagcagagttgttcacatcatggattttca

SEQ ID NO: 373541 - DNA, 75 bp, Homo sapiens
gaaaactctacataggaacacgatgtgaatggaagaaacctgtcattgtgatcactgtgttcagtgttgttggaa

SEQ ID NO: 373542 - DNA, 87 bp, Homo sapiens
ttggacctgaaacagaaattctggaacacctatatgttaatatgatcctctgttgaagcaagaagacaaactgtatggtggagaaag

SEQ ID NO: 373543 - DNA, 82 bp, Homo sapiens
ttattggatatttagagtatgtgaagaaattaggagctccaggcccggattcgaacttacaatcagcattacaacaacctgc

SEQ ID NO: 373544 - DNA, 96 bp, Homo sapiens
tgacatttgagggatcacagcgtgtggaagcagaaattcattatgaagagcagattggtaaaattattgtggagacacaggaacttaaatggcaaa

SEQ ID NO: 373545 - DNA, 100 bp, Homo sapiens
gttttggttatgctgaatttgaggacctggattccctgctcagtgccctgagtctcaatgaagagtatttagaggcacatctaaaatttctagcgttttt

SEQ ID NO: 373546 - DNA, 82 bp, Homo sapiens
cggtactggagccaatcagcgcgggcagcgaaccgggggagcgaggcacgcgtgaagcctctgcgggccttcttttcgtctt

SEQ ID NO: 373547 - DNA, 82 bp, Homo sapiens
ccgagcgagcgagcggcgcccagcccagcgcctcggccgaacccctccgcagcagctcaccatggatgatgatatcgccgcg

SEQ ID NO: 373548 - DNA, 83 bp, Homo sapiens
aggcgacctcggagaatgtggcctccagggggagcccagcaaattgtggctactaatttgccccctgaagatcaagatggctc

SEQ ID NO: 373549 - DNA, 75 bp, Homo sapiens
catgaacaggcatctaatgttcttagtgacattagtgaattacatgaacgacagccttcgcaccgacgtcttcgt

SEQ ID NO: 373550 - DNA, 75 bp, Homo sapiens
tcccccgcgtccctgcgaccgccgcggcgaagatggaaactggagcacccatcctaactgatgatgttagcctgc

SEQ ID NO: 373551 - DNA, 75 bp, Homo sapiens
gcattttggcattgacatttaattttagggtcctttatatagaagggagagtagttctccaaggatgtcctagta

SEQ ID NO: 373552 - DNA, 93 bp, Homo sapiens
tggcgtgcaggcacagatggctaaggaaccaataaaatcacgtgctccacagcttcatttagagtacagattttataaacagcttggcagtgc

SEQ ID NO: 373553 - DNA, 100 bp, Homo sapiens
acatctgacgacgtgaaggagcagatttacaaactggccaagaagggccttactccttcacagatcggtcagtttgctgagaacgaaaccaatgaggtca

SEQ ID NO: 373554 - DNA, 100 bp, Homo sapiens
ggcctttgtatggagaagaccccataacgtttgcaccatttaaaatttcttgttgatatgcgctggaacaaaggaaccattctaaaagcatcagtggagt

SEQ ID NO: 373555 - DNA, 100 bp, Homo sapiens
gcggcctcacagtcatggatctggaagctgagggcacgtgtttgcggttcagccctttgatgaccgcagcagagggccaagatcagtcagggaaccaagg

SEQ ID NO: 373556 - DNA, 90 bp, Homo sapiens
caaatgatatacaacttctaagagagaactcgatgccaccgcaacggtattggcgaaccggcaggatgaaagtgagcagtccagaaagcg

SEQ ID NO: 373557 - DNA, 75 bp, Homo sapiens
agggtgaaggaggcgaattttcagttgatagctacatctggtaccttggctggcattatgggaatgaggttctac

SEQ ID NO: 373558 - DNA, 83 bp, Homo sapiens
cattactgcagagaaacacggaaactaggaagaggaaattaactatctgtacttataaggtgggatgcagatcttcgtgaaga

SEQ ID NO: 373559 - DNA, 75 bp, Homo sapiens
ggggcaaagggaccacggtcaccgtctcctcagtcgaccgtgtgtgagaagatcatggagttgctgggacagaac

SEQ ID NO: 373560 - DNA, 75 bp, Homo sapiens
gccaaaattatcaacaccaaaaagctttctgctaggggtatagacacgtgtggccgtttacgctgtaggatcctc

SEQ ID NO: 373561 - DNA, 100 bp, Homo sapiens
cttccagacaaaagaccgtttgtgttttgtgatggaatatgttaatgggggcgagtgcacttggaggctcctcagctcttcatatcccagcttttccagg

SEQ ID NO: 373562 - DNA, 80 bp, Homo sapiens
agtccccagggaatgccacagcatcctccagcacctcaggtggtgaagcagtattttccaatttgaagattcatttgaag

SEQ ID NO: 373563 - DNA, 82 bp, Homo sapiens
tgacactcctcccggacccctggacacacacagccctggagactggagatgccccttggtgtggccactgcaaggctctggc

SEQ ID NO: 373564 - DNA, 134 bp, Homo sapiens
cccgcgctgcggagtgagtgaccaagttccggccagttcgacctcgaggatccagaggtggagacgctgataggaagatgtcttcaggaaatgctaaaattgggcaccctgcccccaacttcaaagccacagct

SEQ ID NO: 373565 - DNA, 100 bp, Homo sapiens
aaagaaatcaagtggattggcctgcctaccaattctgctcaggaatgtcagaatctggagtttgtcccgctggctggaagcctggcagtgacacgattaa

SEQ ID NO: 373566 - DNA, 100 bp, Homo sapiens
gtgagggaagcgtctccgttgggtccggccgctctgcgggactctgaggaaaagctcgcaccaggctgaccccgcactacatctacccaccagccatcgt

SEQ ID NO: 373567 - DNA, 105 bp, Homo sapiens
caggcatgccccgctacgagctggctttaatcctgaaagccatgcagcggggaaaagcttcactctgaccatcactgtcttcacaaacccaccgcaagtcgccac

SEQ ID NO: 373568 - DNA, 76 bp, Homo sapiens
actttgaacagcatagagccaatcacattttgcacaagggcagtcaccatgaaagtttgacggtgagaacatgtat

SEQ ID NO: 373569 - DNA, 88 bp, Homo sapiens
ggcggcgctgtccctgatcgagcggcgggagcgagcgaggatgccatgaggaaagctggtgtggcacacagtaaatccagcaaggata

SEQ ID NO: 373570 - DNA, 82 bp, Homo sapiens
tagtagatagagccaaacaatcttttcaaggtggataatattaatgcagctgtgatggatttgaaaaaaaagaagatccgca

SEQ ID NO: 373571 - DNA, 98 bp, Homo sapiens
gcagcctgggacagcaggagcgggtccagcttcaggagtactggcggaggggctggacgttccacgccaaagttcccagtgacctgacagcagaggag

SEQ ID NO: 373572 - DNA, 100 bp, Homo sapiens
caatgagtcagggacaaccaatgggaaactatggtcccagaccaaatatgagtatgcagccaaaccaagacacagacagcaattctgaggattctgggaa

SEQ ID NO: 373573 - DNA, 100 bp, Homo sapiens
gagcgctctccatgcgcccggcgcgagtggtatgttcaagccacttgtgcaacacaaggaactggtctgtatgaaggacttgactggctgtcaaatgagc

SEQ ID NO: 373574 - DNA, 128 bp, Homo sapiens
cgaggaagagcgttttggggacgggggctggtgaggctcacgttggagggcttcgcgtctgcttcggagaccgtaaggcgcgttccttcacctcgggcagaataactttgcagaagcccacaggttct

SEQ ID NO: 373575 - DNA, 74 bp, Homo sapiens
ggacatcctgcgcttcatggaaacaagatgtatcggcaagcagtgtaaacggaggacttggggaaaaaggacca

SEQ ID NO: 373576 - DNA, 75 bp, Homo sapiens
ttgtgttctgcaaaaaacaaaaaggatagcctccggcattccagggtgactgtcgttcctacagttacgtgtgtg

SEQ ID NO: 373577 - DNA, 82 bp, Homo sapiens
gggagggcgctacggaagaggcggtccgggagaggggggcatgtgctctgtgtacctgaaggacagtgagaaggttgtcagc

SEQ ID NO: 373578 - DNA, 100 bp, Homo sapiens
ggcgctttcggcgcgggcccgggccccgagcgcccgaacagggcagagcggcttgggtaaatccaccttaatcaacaccctcttcaaatccaaaatcagc

SEQ ID NO: 373579 - DNA, 100 bp, Homo sapiens
caaccttgcgctgcatccgctcgacctcgtgaagatccgcttcgccggtttacaggaacagatggacctagtggttttggctttgagttgacctttcgtc

SEQ ID NO: 373580 - DNA, 100 bp, Homo sapiens
cgcggagaaatttcgacctgatatgcgaatgctgtcctctcccaagtattcactctatgaagtgcatgtcagcggagttcgggaccgagtgagatcgaag

SEQ ID NO: 373581 - DNA, 82 bp, Homo sapiens
ggaaccaacccactttctcggcgccgcggctcttttctaaaagtggatctatttgtgatgactatatggcaactctttgctg

SEQ ID NO: 373582 - DNA, 75 bp, Homo sapiens
acaccaaaaagctttctgctagggctgtgaaagttgtgtagatttactgtttgtgagaggagctggaaactgccc

SEQ ID NO: 373583 - DNA, 96 bp, Homo sapiens
attccgtggtgtatctgtacagcagtttcctcatccctgcagctgtgtttgaacaggctggctacagcaaacatcattcaagatgtccagcaaagg

SEQ ID NO: 373584 - DNA, 100 bp, Homo sapiens
tcatgggagggcgcctggtgttcaccacatgtgtacactgttgcacgaccagggatatggttttaagcctaaatatgatggagaagatcttgcttacaca

SEQ ID NO: 373585 - DNA, 100 bp, Homo sapiens
cgccggttccttgcggtcaagatgctgcaaaacgtgactccccacaataagtccagccctgctgggagttttctgccacacagatttgcggaagaacctg

SEQ ID NO: 373586 - DNA, 88 bp, Homo sapiens
gccttgataacacagagtttcaaggttacttcttgctgcagattctgcgcaggatcggagctgtgggccaggctgtgtccaggacggc

SEQ ID NO: 373587 - DNA, 83 bp, Homo sapiens
gcgagtgctttgtgatcgaaaccctgaccggatcccataaacactgtcgtttggtgccctggttgtcagatgttggaaagcag

SEQ ID NO: 373588 - DNA, 100 bp, Homo sapiens
tctcagtggtcctacctggggatattatcaaatctactactgttcatggcagcattcctctgaatattgatttgctgaatagcccagacttattggaagc

SEQ ID NO: 373589 - DNA, 100 bp, Homo sapiens
gcaggcgcgagccgccagaggaagctggaggcgctgatccgagaccctcgctcccccatcaacgtggagagcttgctgtgaatggtagtgtctagaaagg

SEQ ID NO: 373590 - DNA, 75 bp, Homo sapiens
aaagcgacacgcgaggccgtgccaagccctcgcgggactcttcgcgctacctggcctatcgaaactttatgattg

SEQ ID NO: 373591 - DNA, 74 bp, Homo sapiens
gccggacgctgagcggagcagctgcgccacggtgtagagaggagagagagtgaacagggagcggggcttttgtc

SEQ ID NO: 373592 - DNA, 82 bp, Homo sapiens
agcgcgcggagaagaacggggagccagtcctcctgcaaggagaatccttttaaccggaagccatcacctgcagcgtccccag

SEQ ID NO: 373593 - DNA, 100 bp, Homo sapiens
gcgaatatcgtcatcgttagaaggttcaccctgagctttggccacaggcagaactccactggcatcccgtacagccgcatcgagatctctgcggcctcct

SEQ ID NO: 373594 - DNA, 75 bp, Homo sapiens
gaattttcatggatgccatactactttctttgactagaaaggatgtaatccctgttcattactacttaatacctc

SEQ ID NO: 373595 - DNA, 97 bp, Homo sapiens
cttggggggtccgggcccccccaggaaacacggtgtagtcgccgccgccagccgccatgggcaaacagaacagcaagctgcggcccgaggtgctgca

SEQ ID NO: 373596 - DNA, 100 bp, Homo sapiens
ctgaagaggaaggagcggtgtcctcttaagaaaatgactcagtggttctccatccttccggacttcagcctggatctccaagaggggccctctgtagagt

SEQ ID NO: 373597 - DNA, 76 bp, Homo sapiens
agttggttggagatgtggattttgaaggcagcctcagtcagagcaccctgaagtttttgctcctgaatccagctgt

SEQ ID NO: 373598 - DNA, 100 bp, Homo sapiens
agaagaaatggcggacttctacaaggaatttttaagtaaaaattttcagaagcacatgtattataacaggaatggaagttggatacactttgtgacttgt

SEQ ID NO: 373599 - DNA, 100 bp, Homo sapiens
ctcaaggcaaggctccccaaagagcctgccagctcctgggcaacgtgctggtctgtgtgctggcccatcactttggcaaagaattcaccccaccagtgca

SEQ ID NO: 373600 - DNA, 115 bp, Homo sapiens
tgatattcttctcctggttaatcaagaattctctatttctgctccgtcatccatgccactatcacaaaatttgtccaggatagacatagagctagaagaaacagacttcgtaaag

SEQ ID NO: 373601 - DNA, 97 bp, Homo sapiens
gttcgattgagtgaaacagacttcaaagttatggcaagagatgagttaattctaagatgcgacctaaagtcatgtggcacctccttcgaaggtacat

SEQ ID NO: 373602 - DNA, 103 bp, Homo sapiens
atatcaagccaaactttgtgattcaggagaactggtcgccatcaagaaagtattgcaggacaagagatttaaggtgaagcaaaaaatttattgccatatcttg

SEQ ID NO: 373603 - DNA, 90 bp, Homo sapiens
gtaaaatcttggaataattctcttcttatgaaggacctagatgtgaaggctggtggaggctgtgtaatgaccattggagaaatgctacga

SEQ ID NO: 373604 - DNA, 82 bp, Homo sapiens
accatctccatcacccaccaacaacaccacaataatccacagccaagggaagaactgctaaagctttgaggtcattacaatt

SEQ ID NO: 373605 - DNA, 100 bp, Homo sapiens
gccaaggacttccagcagctgttagcagaggttcgctatcctgatcgcatcacactgatccggggcaaccatgagagtcgccagatcacgcaggtctatg

SEQ ID NO: 373606 - DNA, 98 bp, Homo sapiens
ggcttttgaggaagatgtgacaactaccggagattggagtctactgcacgcccatcagagagctcagaagaattcctggaagaagaacctgaacagag

SEQ ID NO: 373607 - DNA, 75 bp, Homo sapiens
ccgatttgacgggcaaccaatcaatgaaacagacacacctgcacaggaccccgagaagggaccagtccccacttt

SEQ ID NO: 373608 - DNA, 90 bp, Homo sapiens
caacgaaagaccctgaactagagtcccaggtcaacctgtaagtcagttgctgataaagaggccattgcaaatttcacaaatcagaagaac

SEQ ID NO: 373609 - DNA, 76 bp, Homo sapiens
ggtcacctacccccagcaccacctccagcccctgcgcctcgaacattctagtatgccagtagaaaaaaatatcact

SEQ ID NO: 373610 - DNA, 82 bp, Homo sapiens
tcgtctgtgttgtgactgctttggacgtgggagtcacctgaaagccaggaaatgcaactacactgcgctgcatcggactcga

SEQ ID NO: 373611 - DNA, 50 bp, Homo sapiens
tctccaacttccctctgctgaaggcttagagaaacctccaggagactgct

SEQ ID NO: 373612 - DNA, 100 bp, Homo sapiens
gcacagagtggggctcagttagagtatgtgggatgttggtttcgccagtaaccgtgtgactggtgtgtacgagctcagcctgtgccacgtggctgacgcg

SEQ ID NO: 373613 - DNA, 75 bp, Homo sapiens
atctccatctgttatttcgagcaggagaatgactgctatcagttgagggatttgcagttgataaaatggctggag

SEQ ID NO: 373614 - DNA, 100 bp, Homo sapiens
ggaaattggactaaattaccagaatgcagggagtccagtgtcgtgctgctgcaggagcacccctgcctggtggagctgctgtcccatgtgctgaaagtcc

SEQ ID NO: 373615 - DNA, 96 bp, Homo sapiens
ggttccccagtaattatgtccgtgaaattaaatccagtgatagtcactgccaatccttggaacacaattgctcttctctgtggcgccttcttggca

SEQ ID NO: 373616 - DNA, 51 bp, Homo sapiens
ttatggtggcccacttttcctcctgccagagatccagagcttcgcgggcgc

SEQ ID NO: 373617 - DNA, 100 bp, Homo sapiens
gacgccactacagttcatcaacatcaactacgtccctctgaaggtgcccctgggcgctgggattgctctagcctgtaagtataatggaaaagatgaggtc

SEQ ID NO: 373618 - DNA, 83 bp, Homo sapiens
gcgagcgcgagcggcgcgagaaatggctagaaagtttgaaatggtggggagaggggatgctgatctcggcagttgtagcttct

SEQ ID NO: 373619 - DNA, 83 bp, Homo sapiens
ccgggctggctgcggccgccctgggccgggccccaccggacggccaacgtggaacctgttgtgccgtcagaggcttcagagcc

SEQ ID NO: 373620 - DNA, 82 bp, Homo sapiens
gcgccagctcctactcctccctcaactccctcatcgaacgtcctgactgccatcctgctgctgctgcgggagctggatgcag

SEQ ID NO: 373621 - DNA, 90 bp, Homo sapiens
ccccgggaattggcatctatgtcacgtggacccaagtggagagattgtggaactggcgaaaggtgcatgtccctggaaggagcatctcta

SEQ ID NO: 373622 - DNA, 83 bp, Homo sapiens
ggccaagggaccaaggtggaaatcaaaccgccaaatcttaaaggcagaccacgcaaaaagaaaccatgcccacaaagaagaga

SEQ ID NO: 373623 - DNA, 97 bp, Homo sapiens
gcttggtggagcaggagcggctgggcatcctcctgagactccggggtcagacgcccactccagatccatagccgggtggatgtcatcagacacgtgg

SEQ ID NO: 373624 - DNA, 100 bp, Homo sapiens
aggacattcacttacgccaccgccatcactttcatcacatggatcctcatccagtttgcatttagatgcagacagacatgctgaactatctggaagtcca

SEQ ID NO: 373625 - DNA, 89 bp, Homo sapiens
gctaaggccgcgttggggtgagaccctcacttcatccggttaagaatagacccaccagcatttcgtgggatggtcttgattcagggaag

SEQ ID NO: 373626 - DNA, 90 bp, Homo sapiens
gccaatattaatgcttttgacaagaaagataggcgtgctatccattgggcagcatatatggaaatgaggtcattatcagaactactaggc

SEQ ID NO: 373627 - DNA, 100 bp, Homo sapiens
gtggattcctcagctatggctccagcttcagcacctcacccactggacagagcccatacacctaccagatgcacgttgaggagctcaagcttgggaaaat

SEQ ID NO: 373628 - DNA, 83 bp, Homo sapiens
ccgggagtcgctgggtgcgtggggctgcctcgccgcgtctcgccacggtgcctcaggaaccctgaagctgggctgagccatga

SEQ ID NO: 373629 - DNA, 98 bp, Homo sapiens
ttcattcagatgtggtggaatatgccaaggaaaaactggagagcttcatcaaaaatagtgatagctttgataagtcatagtaatgggagctaccaatc

SEQ ID NO: 373630 - DNA, 89 bp, Homo sapiens
atcaacattttgttaagattcaggtcaaagacaggtgtggcagttgggctcttcgtcaccaaacttcactttggaaggacatgagaaag

SEQ ID NO: 373631 - DNA, 82 bp, Homo sapiens
tcgacttcctcacccgcgcctgcgacctcggtgcagaggccaagaccgttttgcccaagaaggagaaaatgaagctgaggcg

SEQ ID NO: 373632 - DNA, 100 bp, Homo sapiens
ctgaccagaaaggaactcccaagcgactgcaggcagaagctgagacggctaagggtctttttggagttcctgagctgagtgccccagaaggatttcatat

SEQ ID NO: 373633 - DNA, 82 bp, Homo sapiens
ctaaggacattttctataagaactccttgttccgacatcccaaacagacattccacttcttccatctattacatctctgagt

SEQ ID NO: 373634 - DNA, 90 bp, Homo sapiens
ggaaaggagaggatcccggagccggaagtacatgacctgctcagtgactatgagctcaaatactgttttgtggacaaatacaaagggaca

SEQ ID NO: 373635 - DNA, 98 bp, Homo sapiens
tggaattgatctcgccaaaaaggacatctttggagccaggaaaacctcacagcacgggtagctctgaacggattcagctctcaggaatgtataatgtc

SEQ ID NO: 373636 - DNA, 101 bp, Homo sapiens
cgagaacgccgcgctgcgcatctccaacagcgacctgagcgaagctccaccatgaggcgaggtggatggaggaagcgagctgaaaatgatggctgggaaac

SEQ ID NO: 373637 - DNA, 74 bp, Homo sapiens
tttcaggaaggggatataatcctggtgttatcaaagggtttttgccaatccagaagactgtgtagcatttggca

SEQ ID NO: 373638 - DNA, 100 bp, Homo sapiens
ttaaattctcccaagaggttctcgcttttatttgaaggaggtggctcagctatgtgaaccatgcagaggacctggcctccaagctcctacaatgttcccc

SEQ ID NO: 373639 - DNA, 100 bp, Homo sapiens
tgaaaaagcagagcgactcggttaagggaaagcgccgagatgacgggctttctgctgccgcccgcaagcagaggttttgggatttgagattgacgcggtg

SEQ ID NO: 373640 - DNA, 100 bp, Homo sapiens
agttcccatttctgaagaatctgaagagctggatcagaagacattcagcattagttttccgtctgatgaaggttggccatttgcaaagtatcttggagct

SEQ ID NO: 373641 - DNA, 83 bp, Homo sapiens
gaacgagcgacggcggaacccgtgggcctgtggactgcagcctcggcggtcagcagagatcctgaaggagctagacgagtgct

SEQ ID NO: 373642 - DNA, 100 bp, Homo sapiens
gcccaggcccggaagctggtggaacagctacgcatagaagccgggattgagcgcatcaaggcatctgcaggaaccacaccacactttggaggccatgctg

SEQ ID NO: 373643 - DNA, 83 bp, Homo sapiens
gccgagcgggcggcttcctggcctgggcgctccggtggcggcggaggtgctcttacagcctgttccaagtgtggcttaatccg

SEQ ID NO: 373644 - DNA, 48 bp, Homo sapiens
cagaccccttcaagttctagtcatgaaggatgccctgcagtggtctcg

SEQ ID NO: 373645 - DNA, 75 bp, Homo sapiens
accacggacgagatgatcaaacgcctgaaggtgtctgacttccagcaactgctggcctgtgccagggtgcaagct

SEQ ID NO: 373646 - DNA, 50 bp, Homo sapiens
ccagaacattgcacgatgcctcctggagtgcctgtgaagaaaacggggta

SEQ ID NO: 373647 - DNA, 100 bp, Homo sapiens
gttgaggaaggtgtccttcttaaagttgtcacagctgctaaggaacacgggactgcaagtggcaacgtggaagcaaaagtagtatgcttttatagacgac

SEQ ID NO: 373648 - DNA, 100 bp, Homo sapiens
cgcattttggcattgacatttaattttagggtcctttatatagaagggagagtaggcaccatcatgggagcagcattgctggaggactggtgaagggggc

SEQ ID NO: 373649 - DNA, 98 bp, Homo sapiens
ctggctcccctaaagtgcatcctcctaatgggacccggttttacacttttcaaatctattaatgagatgaagcggttggaagaaatgtcaaatatgtt

SEQ ID NO: 373650 - DNA, 101 bp, Homo sapiens
gccgacatccctcagggctccttggcctacctggagcaggcatctgccaacatccctgcacctctgaagccaacatgtccaacatcacagtcacatacaga

SEQ ID NO: 373651 - DNA, 75 bp, Homo sapiens
ccaaactgtccaaggctttggcagtgagaagccatttacttgtgaaatctgtggcaaatctttcacagcaaagag

SEQ ID NO: 373652 - DNA, 99 bp, Homo sapiens
tggaagccatggatggccgggaacctgaacgtcaaggtcgtgggaaataaaaggcagttctacacagactgcagcaacggttgcatctgcatatcctaa

SEQ ID NO: 373653 - DNA, 75 bp, Homo sapiens
tctttggaattccattcttttccttattcttctgatgtggatccaggatttgaacttctcgaagagctaccaaca

SEQ ID NO: 373654 - DNA, 136 bp, Homo sapiens
gtcttttcaaatcaagccggtatgacccaagcatttctttttctggaatgtcattatcagacacaatggtcacagatgtgacattgatgtgtccactgaagccatgtatgctgcaaccagacgagaagggtttaat

SEQ ID NO: 373655 - DNA, 95 bp, Homo sapiens
ccattcgagggcagccggcgggaggaacgctcactgtcagcgcctggaaacttgctcacgctggtgtgtgacagctctgtgctgctgtgcctcaa

SEQ ID NO: 373656 - DNA, 75 bp, Homo sapiens
tggtgactcctctcctctgattagagccactgttggatttgctcgaatatttgggtacccagtaggtatcgttgg

SEQ ID NO: 373657 - DNA, 75 bp, Homo sapiens
gggacccggtgtctgctcctgtcgccttcgcctcctaatccctagccactatggggtgctggcactgtgggtcct

SEQ ID NO: 373658 - DNA, 75 bp, Homo sapiens
cttggacaagatgaacaacaatatcggcattctgtgctacgaaggaagccagttgagggaagttctccatgaatg

SEQ ID NO: 373659 - DNA, 100 bp, Homo sapiens
actacccttgtactttggtggggacttggaacacgtggtatggcgagcaggaccaagctggaaatggacaggctactagcatggtccaactgcagggtgg

SEQ ID NO: 373660 - DNA, 74 bp, Homo sapiens
ccgttgttcccgagacgttgttgagtcccctgtgtcctcttctggtaattcgccaaaatgacgaacacaaaggg

SEQ ID NO: 373661 - DNA, 83 bp, Homo sapiens
atttgttaaggattccaagtaactcttatttgataagaatgtgccttttgatgaaagaactttatctttctacaatgaagagt

SEQ ID NO: 373662 - DNA, 100 bp, Homo sapiens
aaatatggttccatccctaaacttatacatcctcttgggagagtatattcaataaaagcccggaggtggtgactcctttgcagctccagtgttgccagcg

SEQ ID NO: 373663 - DNA, 90 bp, Homo sapiens
tgagctgcggcgagcggagcttcgcggggatcctgctggactgcacgaaaaagtctgctcaccaggtggccagataccgcccacgtgccc

SEQ ID NO: 373664 - DNA, 108 bp, Homo sapiens
atcgagaggatctggtgtaccaggcgaagctggccgagcaggctgagcgatacgacggtgtgaacccacatccctgcccccagggccacctgcaggacgccgacacct

SEQ ID NO: 373665 - DNA, 87 bp, Homo sapiens
cggccccgccagcagcactgtggaggccgtcctcggttacgggcaggacttgagtggcttcggacagggcttctcagaccccagcca

SEQ ID NO: 373666 - DNA, 82 bp, Homo sapiens
gagaatccaccgccatccgccaccatgctggagaagaagcaggcgctccctccattccagccacagatcacagacgactacg

SEQ ID NO: 373667 - DNA, 100 bp, Homo sapiens
ggattggagattccacccaaacttgctggtcactgggaggcctccggtgtggctgtctctgatggtgtcatcaaggtgttcaacgacatgaaggtgcgta

SEQ ID NO: 373668 - DNA, 74 bp, Homo sapiens
acaagaccaatatttggtatactgggcacaatccatctggtggcagagcagcccgacggccatggaggctgaag

SEQ ID NO: 373669 - DNA, 83 bp, Homo sapiens
ttggacttccagcctccagaactaatgtgaaaacctttgcatcttctgatagtctagccaaggtccaagaagtagcaagctgg

SEQ ID NO: 373670 - DNA, 100 bp, Homo sapiens
agtaattggagccaagaaatgagtatagtgataaatgctgctcattctttctacaatggaacaacaaccctaccaatatcagatgaagatagaaccccac

SEQ ID NO: 373671 - DNA, 83 bp, Homo sapiens
atccctcacgcgggcgcggatcgaccggagcagagagctggcgagcaagccctgggcgctgcctatggcacagccaagagcgg

SEQ ID NO: 373672 - DNA, 98 bp, Homo sapiens
tgcggaggtggcgaaggcttggagagcatacgaggcggaatccggatcgacaaagcaccgcagcttcccagagttaccagcgcagcacttaagacagg

SEQ ID NO: 373673 - DNA, 50 bp, Homo sapiens
tgagtggttccatgatgggaagtgacatgcacccccaaattcagaaggag

SEQ ID NO: 373674 - DNA, 75 bp, Homo sapiens
cgactttggccggacttttgctaactgcggcgggcgagacgttctcagggctctgggtttgcagagagccgaaat

SEQ ID NO: 373675 - DNA, 101 bp, Homo sapiens
caaaactcagtgccctcaaggctcggaagaatgtggagagttttctagaagcctgtcgaaaaatgggggtgcctgaggattttttatcaagcagaaatgca

SEQ ID NO: 373676 - DNA, 100 bp, Homo sapiens
actgccctcctgaggcttctgtgctcctggcttcttacgccgtccaggccaagccaaaggtcattccaaatgctatatgtggaatttgtctgaagggtaa

SEQ ID NO: 373677 - DNA, 75 bp, Homo sapiens
cgctgcgggaccccgggcactgttgctgctgcgggagaggcttcgtgacggagttatcagagacattgagaggca

SEQ ID NO: 373678 - DNA, 100 bp, Homo sapiens
ctgcaccttcagaaacagtgctgaagcctttaaatgcagcatctgcgatgtgaggaaaggcacctccaccagaaactagaaaaactgcttttggaattat

SEQ ID NO: 373679 - DNA, 100 bp, Homo sapiens
ggagtggaggcggaggggagcggagcccggagcgtcgtggaaaggaaggatcagaatgttctctctccagtcaactgctggaatctcctcttaaaccagg

SEQ ID NO: 373680 - DNA, 101 bp, Homo sapiens
tctccgcggtggaggtctgcgttgctcttgcttttcctcgctggggtgtacggtggctacagtttcagaaaagtcacgtataatggaactggagaaagacc

SEQ ID NO: 373681 - DNA, 100 bp, Homo sapiens
gcagtgttctcagtagtccgaactctaatatgagcagcatggtagttacaggtccagtaagaataaatactgctcgtccaggtggtggtcgaccaggctg

SEQ ID NO: 373682 - DNA, 97 bp, Homo sapiens
cagtcggcctattgtcaacctctttgtttcccgggaccttggtggcagttctgcagccacagagataaacattgacgatcttgaggatgaccctgtg

SEQ ID NO: 373683 - DNA, 100 bp, Homo sapiens
gcgcagggtcgcgatgctgcccggtttggcactgctcctgctggccgcctggacggctcgggcgctggagccctgggcgctgcctatggcacagccaaga

SEQ ID NO: 373684 - DNA, 112 bp, Homo sapiens
cagcatatttgagtcatttccttcgtacccacagtgcttcatgagaggttgtttacattcagagctctatcaataagaggaatacatattacagtgaattcgacaaccgcac

SEQ ID NO: 373685 - DNA, 97 bp, Homo sapiens
agggaatggccaagtgacaaagatgaacagtgctttgagacaaatgtcatatggtggaaaatttggttcttcacctctggatcaatcaggattttca

SEQ ID NO: 373686 - DNA, 75 bp, Homo sapiens
aagaaaggaaaatatcccaaggactaatctgatcgggtcttccttcatgtagccaatctgaattctaaggacctc

SEQ ID NO: 373687 - DNA, 99 bp, Homo sapiens
acgggaaggtgactggctcagcaagtgactgtgctctgtgtgcctgtcctcacagccctcctgccagatatgcaggacaggtgggctatctgattgctg

SEQ ID NO: 373688 - DNA, 134 bp, Homo sapiens
aaccgacctcaaggtggccacctccctgctgctgctgctcttcgccatcttcatgggcctgcgggcctccaagatccaggagtgggagacgcggatctttacccacagtaagaatgtcaggtccccgggattca

SEQ ID NO: 373689 - DNA, 130 bp, Homo sapiens
ctgggagcccagggagcgccgcgcgaccaggaggcggcggcgccgccggctttgatgcctgaaaacttcatgcctcctgttcccatcacatcaccaatcatgaacccgttgggtgacccccagtcacaaa

SEQ ID NO: 373690 - DNA, 80 bp, Homo sapiens
tgggcctctgctgcgtcctgctgaccttcggctttccttaaagtttcccatgtctcaatggactcctgaatataacgagc

SEQ ID NO: 373691 - DNA, 100 bp, Homo sapiens
taactttcgacacacctgtagacgttcgccaggtaaaggtgttggagcgggccggagagaagtagagtgggctgcgaggagaaggaaacaggcctttcgg

SEQ ID NO: 373692 - DNA, 74 bp, Homo sapiens
gatacgaccccgaacggcccccaaggggcgggcgctgtgtttgatctaggagaagatggtggcctgaaagtgga

SEQ ID NO: 373693 - DNA, 100 bp, Homo sapiens
cacagagccatggtccatccgagagaagctatgtttagcatcttctgtcatgagaagtggcgatcaaaattgtggaagaagttgttccgaatgtaattga

SEQ ID NO: 373694 - DNA, 87 bp, Homo sapiens
ataatgggcaatcaggggacaatgtagtaaaggtatctgtaatgcgtgatgaggataaattactgaggattaaaattaatgaactgg

SEQ ID NO: 373695 - DNA, 100 bp, Homo sapiens
ggcggacaggcgacagcgacctgcggcagatgacgtccggttgtttgccttcgtgcgcttcaccaccggggatgccatgagcaagaggtccaagtttgcc

SEQ ID NO: 373696 - DNA, 100 bp, Homo sapiens
ctttgatgactttgcacattatgaaaagcgtcaagaagaggaggaagccatgcgtagggctggagcattggatttgctaaaggagcttaagaatattcct

SEQ ID NO: 373697 - DNA, 75 bp, Homo sapiens
ctggaatttctgaaaacatcagaagtgcccacagttcagtttgttcagggaatttttgttgaaaaatatgaccca

SEQ ID NO: 373698 - DNA, 75 bp, Homo sapiens
cagcacctggccttctgcatcaccaacggcatgacccccaaggcaacaaacaggcatttcccacaaactgttaca

SEQ ID NO: 373699 - DNA, 100 bp, Homo sapiens
ctcagcagggagcccagaccagcctgcactgtgccttaacagaaggtcttgagattctaagtgggaatcatttcaggttgacctgacagttcaagaaaag

SEQ ID NO: 373700 - DNA, 100 bp, Homo sapiens
cagtggatgggggtcaccgtccagagccaaggtccagggggcaaggtcgtgcatctgccacctccactgcccagcaaaactccgcctcctccccctccaa

SEQ ID NO: 373701 - DNA, 82 bp, Homo sapiens
cgcacctccgtagctgactcggcctcggcggagccatcggctacgtgctgggtgggctggactggacccagaccttcctggg

SEQ ID NO: 373702 - DNA, 88 bp, Homo sapiens
tctacgttccatcgtgtggttaaaaactttatgattcagggtggggacttcagtgaaggtctaccaggtccagaaggtcctccaggtc

SEQ ID NO: 373703 - DNA, 87 bp, Homo sapiens
gaggtccttgttggctgcttgctggagaggttccagcaacagatagaaatgctttaagttcactctggggaaagctggcctctgaaa

SEQ ID NO: 373704 - DNA, 75 bp, Homo sapiens
aagtatccagcgctcattgggaatttagttaaggaatccagatcttacataagatggaagtctctcacactagat

SEQ ID NO: 373705 - DNA, 97 bp, Homo sapiens
cagcggttccgagcggggcccaacatggcggagagagaggtggagtccggcccccgaaagaggccatccagtccaatggatcagatgggcaagatga

SEQ ID NO: 373706 - DNA, 89 bp, Homo sapiens
ctgcccacggtgtccgcgctcaggtgctcaagtaaagctctttgtgacagggcttttcagcttaaatcaagatattcctgctttcaagg

SEQ ID NO: 373707 - DNA, 100 bp, Homo sapiens
gtgggggctcctgtttctctccgccgcgctctcgctctggccgacgagtggagaaaagctccacgcaggagatcggtgaggagctgatcaacggagtcat

SEQ ID NO: 373708 - DNA, 82 bp, Homo sapiens
gtggtcgcgtctcggaaaccggtagcgcttgcagcatgatttttggaagtaccagcacagtgacgcttcctgaaaccttgtt

SEQ ID NO: 373709 - DNA, 75 bp, Homo sapiens
tgattaacaaagacctcgcggaggaagatacttgccagaactaatacagctgatgaaatacctgaccttttctgc

SEQ ID NO: 373710 - DNA, 90 bp, Homo sapiens
gaaagggtatcatggaaggcaactgtgtttcacttaccagaatactacgttcagctaaattaagcacacacatgccctcttggttctgtt

SEQ ID NO: 373711 - DNA, 90 bp, Homo sapiens
caacagtacctcattgctctttggcgactcttattggttgaatgatcctaaaatgtctgaaacggagcgccagtccatggaaagcgagcg

SEQ ID NO: 373712 - DNA, 110 bp, Homo sapiens
gatgaaatcaacaaagcctttgaactgatgcattctggaaagaggtcgttccaggggtagaggaggcatgaaggatgaccgtcgggacagatactctgcgggcaaaaggg

SEQ ID NO: 373713 - DNA, 101 bp, Homo sapiens
tgaaaaaatggacaacctgctgcgggatcccaaatcggaagtgaattcggattgtttgctgaatctgaatctgaagctgaagaaggtgactgaattttgaa

SEQ ID NO: 373714 - DNA, 51 bp, Homo sapiens
gatgaagaccaaccagtgctgctgaagctccttcatgaccaagtaggggta

SEQ ID NO: 373715 - DNA, 100 bp, Homo sapiens
cggggggctatgggcccatcgactacaaacggaacttgccgcgtcgaggactgtcgggtttttcgttggaatatacgttgcacatttatggcgattctga

SEQ ID NO: 373716 - DNA, 95 bp, Homo sapiens
ggagcacgaggatcgtgggagctaagaagggatatcattttcaatgcccaatacccagaactgcctcccgattttatctttggagaagatgctga

SEQ ID NO: 373717 - DNA, 80 bp, Homo sapiens
caagaatatgctgccaaaattatcaacaccaaaaagctttctgctagggtacaagccagctgccatgttgtgagcacata

SEQ ID NO: 373718 - DNA, 75 bp, Homo sapiens
accttcaatcatcattttgagctcaaaggaaaatgtttataggaggccttagctgggacactacaaagaaagatc

SEQ ID NO: 373719 - DNA, 98 bp, Homo sapiens
gatgagaagtgcttagattctggatacattttgaaggtcctacgggaagtgaaggtgctggcaggtcttcagcaccccaatattgttggctatcacac

SEQ ID NO: 373720 - DNA, 78 bp, Homo sapiens
cttgatcctcctgccttagcctcccaagcagctggtattacagaaacctccacagctgttgagaaaaaggagaaacct

SEQ ID NO: 373721 - DNA, 82 bp, Homo sapiens
aggattccaagtaactcttatttgccagtaatgttaaagtagagactcagagtgatgaagagaatgggcgtgcctgtgaaat

SEQ ID NO: 373722 - DNA, 80 bp, Homo sapiens
gactgcgccgcgtcttcctcaagactgctgcatagatgatgacctgatggagaagagacaggaaaatcaagaccagcatt

SEQ ID NO: 373723 - DNA, 100 bp, Homo sapiens
tggcagccaccctttgctgtggaagtggacaacttcaggtttaccccccgaatccagaggctgaatgagctagaggtgtgatgaatgcagactctgctac

SEQ ID NO: 373724 - DNA, 90 bp, Homo sapiens
cttccgcacactgaagagtacgtcttcgggtctacccctaatcacgtacttggcaaataggtccaaaagacatacactggccatgaccaa

SEQ ID NO: 373725 - DNA, 100 bp, Homo sapiens
tgtctgcggaagtccccgaggcagcctccgcggaggagcagaagccccccgaatccaagcccaacttcacccctctcgccatcttggcccatgttctcgg

SEQ ID NO: 373726 - DNA, 106 bp, Homo sapiens
gccatgtcgggttattcgagtgaccgagaccgcggccgggaccgagggttccactctggtgcaccctttcagagcgcttgggaagaactcggaactgctcgtggtg

SEQ ID NO: 373727 - DNA, 98 bp, Homo sapiens
cctggcacgtggagggaagcctggaggaggggaggagggccactgggctcccagcagcccaggttcaggcctagttccccgagagcgttcagacagtg

SEQ ID NO: 373728 - DNA, 76 bp, Homo sapiens
aagtgaagatcgaggtgaacgagagtggcacggtggcctcctcatccacagctgttcctcctcccactgacctgcg

SEQ ID NO: 373729 - DNA, 90 bp, Homo sapiens
gcgctgggaggggggtgacagcaacagcgacgactatgacctcgagtctgacatggacaatctctatgggaagcagaaggcaaggacccc

SEQ ID NO: 373730 - DNA, 75 bp, Homo sapiens
ctttgggagttccaatatcagtctatcttttattcaacgacatgaagccattattatatcaggaaccgaaatggc

SEQ ID NO: 373731 - DNA, 100 bp, Homo sapiens
tgcagatcccggaatgcctgaaccaactgttttgaggtattggctgggatccaccaaaacttcaatcaattttcctttcttaaggagataattggagccc

SEQ ID NO: 373732 - DNA, 100 bp, Homo sapiens
gggagggagagccgagcagccccggctctgggctacggactatgggcgaatagctctgaccacccggcgaagcttgtgaacaccttcttcagcttccttc

SEQ ID NO: 373733 - DNA, 100 bp, Homo sapiens
tcggtacagtctctgcacctcgcgccccagcagactgcctgaagttacatttagagactgaaatcactgcaccttaaaaacaaaagattgagctgcactg

SEQ ID NO: 373734 - DNA, 82 bp, Homo sapiens
cccgctccgccctcccttttccctgattcccaacttcttctggagcctggggatcggtcacactggtgcgtggtggcatact

SEQ ID NO: 373735 - DNA, 83 bp, Homo sapiens
cgcttgaaaagactgggcttgtccttgctggtgcatgcgtcgtcggcctctgggcagcagattatgatgcatcattatcacag

SEQ ID NO: 373736 - DNA, 83 bp, Homo sapiens
ctctgcgcccaaacggatctgttgtgaccgagattcccgacgagagagactgaggggaagagaggaaggaggggcgggctcct

SEQ ID NO: 373737 - DNA, 96 bp, Homo sapiens
gccgtctgggcggccgccgcgcttctgctctcagtgtcccggacttcagcagccagacccggtccgtttggaatgcctgggatggtgccgccgcat

SEQ ID NO: 373738 - DNA, 50 bp, Homo sapiens
tcctgagtagttgggactacagttggaactgataatgggagagaagcaat

SEQ ID NO: 373739 - DNA, 75 bp, Homo sapiens
gttctgggacttaggagggcaggaagagctgcagtctttgtgggacaagaatgtggccccgtcccagagcaccac

SEQ ID NO: 373740 - DNA, 82 bp, Homo sapiens
gccgagcggccgaggcgccgcggtcggctctgggactcgtctggcgtccctcagggggtgcactatagccatctggagctga

SEQ ID NO: 373741 - DNA, 50 bp, Homo sapiens
caagaacatccagtattatgagaagaccaaacctggaccacccaaaaagc

SEQ ID NO: 373742 - DNA, 89 bp, Homo sapiens
ccaagttgtcgacgaccgacagggtggtgaaaggactttctgcagggcgactgcaccaaagcgaaacagaagctgaactggaagccccg

SEQ ID NO: 373743 - DNA, 100 bp, Homo sapiens
ctttgccaagaagcacaacaaaaagggcctaaagaagatgcaggcctctcctgggttgagcaacgagaagggcatggacgccgtgtcaccttggaagtcc

SEQ ID NO: 373744 - DNA, 83 bp, Homo sapiens
caggttaccactaaaaatgccaaggaagcagaccagcccactacagagccaggcatggtcctggacagtgtggaagcaggaga

SEQ ID NO: 373745 - DNA, 88 bp, Homo sapiens
ggtgggccgcgtcgaagacatggaccagggctacggagagatggctccgaagtcaaaaaagaaggggcaccccgggagggagcagaag

SEQ ID NO: 373746 - DNA, 90 bp, Homo sapiens
cgtcactgaggttgcagttggcgtgaaggtcgcttatgatgaagctacagatgaatttgcttcttacttcaacaaacagacttctcccaa

SEQ ID NO: 373747 - DNA, 113 bp, Homo sapiens
gctgcatgcacgagccaggaactgcgcagcctcttcgagcgccgcggacgcgtcatcgagtgtgacgtggtgaaagactgcaaaattcaaaatggggctcaaggtattcgttt

SEQ ID NO: 373748 - DNA, 105 bp, Homo sapiens
gctgagcacgttcttccaagaaaccaacattcccaacagccaccaccaccaccagatgatagcctgggctggaagctcttctacgtcacaggctgcctgtttgtg

SEQ ID NO: 373749 - DNA, 96 bp, Homo sapiens
ctgcagaagccagacagcttccacagcctgacgccgaccttcgcagaagagaagctgaatttggacgacagccagtgggaggacatccacgttgtc

SEQ ID NO: 373750 - DNA, 75 bp, Homo sapiens
cgtcgtgcgcctgggggtgcgcgcctgcgacctgcccgcctggggaatttgaagtactgccttgtaattcttaat

SEQ ID NO: 373751 - DNA, 50 bp, Homo sapiens
ctgttcacggctccatcgctgttaatggtcagtaggacagaaggtaacat

SEQ ID NO: 373752 - DNA, 75 bp, Homo sapiens
acaggaacagggcagacgttagcgtgagtgatcactctcaatcccggggcctcggcttcacaggatggggctgcc

SEQ ID NO: 373753 - DNA, 98 bp, Homo sapiens
cggccgcagtggcgtcctggagccctcctcagatctgactgcagccatgagcagcaatgagtgcttcaagtgtggacgatctggccactgggcccggg

SEQ ID NO: 373754 - DNA, 73 bp, Homo sapiens
gaacatggccctggagcggctctgctcggtcctcaaaggtgatgtgtccaatctagatcccaacttctcattt

SEQ ID NO: 373755 - DNA, 75 bp, Homo sapiens
acaatatcatgcaagtgtggcaaatggggcttgcttctgacatgtctgatgagcgcattcctgctgttgctcctg

SEQ ID NO: 373756 - DNA, 73 bp, Homo sapiens
ggagggcgactgccgagggtctcagcgggatctggagtcagggactggtcttctgaggacctctgccctctac

SEQ ID NO: 373757 - DNA, 83 bp, Homo sapiens
tcttggcccttgttcccccaaatgtctgactctgactctcggactgagaaacgcaagaaggaagaatcctgctcaaaaatgag

SEQ ID NO: 373758 - DNA, 100 bp, Homo sapiens
ctgtgagacatgtctgagactcctgctcagtgtagcattaaggatgtgatcttcgtggtggaaagctaaattttaaaaccaccccaatggatgcagacag

SEQ ID NO: 373759 - DNA, 100 bp, Homo sapiens
ctctcctacaccaagcccgacgtggccttcctcgtggccgcctccttcttcctcatcgtggcagctctggaattgaccttgctgttctgctggggaagac

SEQ ID NO: 373760 - DNA, 99 bp, Homo sapiens
tgagacggaagatatgccaatgtttgaaatgacccattcatggccgcctcctttgacagcaatacatacgcctagtacagctgagccatccaagtttcc

SEQ ID NO: 373761 - DNA, 51 bp, Homo sapiens
cacagatggaccaaaggttatgcacaggtgttggggatgtcctttgcactg

SEQ ID NO: 373762 - DNA, 83 bp, Homo sapiens
tctacagccccggaggggtggcctgcgacgatgacggggagctgttcgccagcatggtattgaaattgccaaaaacagaggag

SEQ ID NO: 373763 - DNA, 100 bp, Homo sapiens
ggtggtcccggaggagcaggtgcagagcactgcgctgtcagcgatagcccagtggatggccattccagagaggagctctaaattgggaagtaatgcagga

SEQ ID NO: 373764 - DNA, 75 bp, Homo sapiens
aagcataagaacatgagaactgcgactcagcatgcagaaggtggcatctccacagaaagcgactgtgcttttgag

SEQ ID NO: 373765 - DNA, 89 bp, Homo sapiens
ctgactcttaatatgattcggcagatttatccacagctaaaggttaaacccatccagagtaatggctgcggccttacccaggaccctgg

SEQ ID NO: 373766 - DNA, 88 bp, Homo sapiens
ggagaatcaggaaaaagcaccattgtgaagcagatgaagatggccgtataagaaaataaacaacttgctaaaactgctgaaactccct

SEQ ID NO: 373767 - DNA, 75 bp, Homo sapiens
ttgctgctatccttttgctagtgattatcagtttcctgtacgctcagaacagcaccaagcgcagcattaaagagc

SEQ ID NO: 373768 - DNA, 75 bp, Homo sapiens
ggctcatcgtgatcccggcgacatactacctctggccccgagatcagaatgccgatatgcctcttcatgttcgac

SEQ ID NO: 373769 - DNA, 90 bp, Homo sapiens
aaattgcagaagcacaagccaaactggtgaaaagccatacaagtgtacctgggaaggctgcgactggaggttcgcgcgatcggatgagct

SEQ ID NO: 373770 - DNA, 50 bp, Homo sapiens
gaggtcatgactgtcgccacatacagacgaaggggaggaccaggctggcg

SEQ ID NO: 373771 - DNA, 78 bp, Homo sapiens
tcaaccaactgttacaatcaaggtctatgaagattgctgctctctgaacactatagtcgtcgaatctcacaagcgtac

SEQ ID NO: 373772 - DNA, 83 bp, Homo sapiens
ttcgtgtcccgctgtaaggaaacaagatggtccttaaaaccgaagaggaggacgttgaggagctcaagcttgggaaaatggtg

SEQ ID NO: 373773 - DNA, 100 bp, Homo sapiens
ctgtctatgtgctgtattgtgtggccactgggactttgcagacatgatggtgataaggagcctgagagcacctccaatcataggatacctgccttttgaa

SEQ ID NO: 373774 - DNA, 96 bp, Homo sapiens
ccggccgccgccgccgccgcccaggcgcagagaattcgagaagagaagcgagaagaacggaggaggagagagttagaaaagaaacgtttgcgggaa

SEQ ID NO: 373775 - DNA, 100 bp, Homo sapiens
gactactagaaggggaggggagtggaaaggctctcagtgaaaaagtgtatgatatttgtggcagattgcctttgtccttcaaaaaggcgcagaccacagc

SEQ ID NO: 373776 - DNA, 83 bp, Homo sapiens
gttgctccgctgagtcctgccaggctgcaagggccaagcacgctgttccaggtcatagacatgaatgactaccagaggaggag

SEQ ID NO: 373777 - DNA, 100 bp, Homo sapiens
ttcccacccaaggacgccgtcagtcctttcagcttcagcctgctcaagaactgcagcattgcagccgccaagacggtccagctgggagctccccgacctc

SEQ ID NO: 373778 - DNA, 82 bp, Homo sapiens
tgaggtggcagcggcaggagagtccggccgcgacaggacgaaggaagaggcccagcagaagggactcgctgagccacccccc

SEQ ID NO: 373779 - DNA, 83 bp, Homo sapiens
agagaggaggaggagtgcggcgcggcggccccgggaccaaggaggtatcgagaaccttccctgcgaacttcagaggaacttcc

SEQ ID NO: 373780 - DNA, 75 bp, Homo sapiens
gggactacgtgggcaccttgcgcttcttgcagtcgaacagtccacaggaagaggttgaactaaagaagttgaaac

SEQ ID NO: 373781 - DNA, 75 bp, Homo sapiens
acatggataaaaataatgtgaggcgacaagcaacaacaatcatagctgcttatcttaatggccatgcagaaaccc

SEQ ID NO: 373782 - DNA, 106 bp, Homo sapiens
caagacttcgtgatttttaacagagaaaaaataccctctaccatctgctttggtcagggtgccgctcgaggatttaaaagcaacaagaagaaaaccaaacaatgct

SEQ ID NO: 373783 - DNA, 100 bp, Homo sapiens
actaaacagggaggaatccaccatttagaagtctggcaggcaaagaggacaagatctttctctggaatcaaaggactccagctgaaagttaacctccaac

SEQ ID NO: 373784 - DNA, 75 bp, Homo sapiens
cggatggcaacctgctccagcgatcagagcgttaagtttggtgccctggttgtcagatgttggaaagcagtagga

SEQ ID NO: 373785 - DNA, 74 bp, Homo sapiens
agagccccttgcagaagacgccgtacgaggagtccaatgtgctgattgctgctaacagtcagggtacaattaag

SEQ ID NO: 373786 - DNA, 75 bp, Homo sapiens
gacaacaccctgatctggcatggacatgctcccgtcttcgtcaggaagattttccacctcgcattgttgaacacc

SEQ ID NO: 373787 - DNA, 100 bp, Homo sapiens
cttcagctgggacctgcccatcaaggccaaagcacccctacgcagaaaggagtaggcattgctggagctgtgtgtgtttccagcaagttgcgacctcgag

SEQ ID NO: 373788 - DNA, 75 bp, Homo sapiens
tgaggactttccttacctgtttttccagctcacccactgccagcagagacgcaaacatgcagatctttgtgaaga

SEQ ID NO: 373789 - DNA, 106 bp, Homo sapiens
gaacaacaaggaccgcttctgccagctgctgtggcggccccggcctcccacactcctgagccaggaacagatcaagagctgaagaagcaggtggagagtgccgagc

SEQ ID NO: 373790 - DNA, 75 bp, Homo sapiens
gagaagcctgaaaagtcgcagcgagctggagccgccggaggcagcacaacaagattcgcagcgtggaggggagcc

SEQ ID NO: 373791 - DNA, 50 bp, Homo sapiens
ctcttctctggaagatcttgtgaatcaggaaacccaggcccaacggcagg

SEQ ID NO: 373792 - DNA, 100 bp, Homo sapiens
gcactcaccttgtcatggtatcagtgaaagttaccattaaagaaactacagtcgtcgggaaggaacaagaggctccagttggagtgctcagaatactcct

SEQ ID NO: 373793 - DNA, 87 bp, Homo sapiens
ggatcagacacctagtccttccgatggaagcactagacaaagttcacctgagcctccagggtcgtatagacctccccctcctatggg

SEQ ID NO: 373794 - DNA, 100 bp, Homo sapiens
gcgtctgcccggccaagaggcaaaggggaggttacgcagcaaaccatccagaaggtaattggtacgcctcagagaccggcagcgtcaaacaccctggtgg

SEQ ID NO: 373795 - DNA, 88 bp, Homo sapiens
gggccgggaggggacggccgccggagccgcgaggccaaaatcttagtcaacatggacaacaacatcattcagcattacagcaaccacg

SEQ ID NO: 373796 - DNA, 123 bp, Homo sapiens
agatgatgagaaataaggacaaaagccaagaggaggacagttcgctacacagcaatgcatcgagagagacaagagagacacctccaacttcgacaaagagttcaccagacagcctgtggaact

SEQ ID NO: 373797 - DNA, 100 bp, Homo sapiens
ggcaccgcaagccgtccccggccacgcgggacgggcttctgcttcagtttacccaacctcagcaaacatcgtttgctttggagaggaacttaaggactca

SEQ ID NO: 373798 - DNA, 100 bp, Homo sapiens
tgaaaatggaagagggaaacaacaatgaagaggtaattcacttgaacaactttcactgccatcggggacaagatgatgaggagtctgatgaggaagctgt

SEQ ID NO: 373799 - DNA, 83 bp, Homo sapiens
ttcccggttccaggtggccttatttgggagattctatactgaccttattcctggctttccttaaagtttcccatgtctcaatg

SEQ ID NO: 373800 - DNA, 100 bp, Homo sapiens
aagcaagcagaccatataacatctaccctcacggaatcactgatgtccgtcctttgtattcaaggagattaccaaaagctattgcattaatgaccacagc

SEQ ID NO: 373801 - DNA, 98 bp, Homo sapiens
gtgcggaagcttcgggagaagcggcagacggagggcacctaccggcccagtagcgaggagcagagggagcactatgtctgcggaagtccccgaggcag

SEQ ID NO: 373802 - DNA, 100 bp, Homo sapiens
cggatgttcggtgcagctgccagatccgctgatctagtgcttctcgaaaaaaaccttcaggcggcccatggtctaccctgatgggagagtctgcatttcc

SEQ ID NO: 373803 - DNA, 82 bp, Homo sapiens
atgttgttaaagtaccagcttcacaggaccaagacccctggacctggggcccagtcggccctcagagcccttgcccgctcgg

SEQ ID NO: 373804 - DNA, 80 bp, Homo sapiens
gggggcggcggccacgccaaggacggatattgaagcacagattcgagaaattcaaggcaagaaggcagctcttgatgaag

SEQ ID NO: 373805 - DNA, 98 bp, Homo sapiens
actcattattttaacatttgggagaaacacagccagaaggccaaatttgagtccctctttaggacgtatgacaaggacatcacctttcagtattttaa

SEQ ID NO: 373806 - DNA, 83 bp, Homo sapiens
cgcggctctccaagttctaccagccctacgttttaaaatcaaagatgggaaaatcggagaaaattgcccttccccatggccag

SEQ ID NO: 373807 - DNA, 75 bp, Homo sapiens
ctacagacatgcgccagcacgcctgattacctaggaacagtacgatttggggttatcacaaataaacatcttgcg

SEQ ID NO: 373808 - DNA, 100 bp, Homo sapiens
agcaatgatcccaatttccagatgccttgttcaacagttgtattccctgaatgactataaaccacccatttcgaaagcgaaaatgacccaaattactaag

SEQ ID NO: 373809 - DNA, 75 bp, Homo sapiens
ggggaaggcgctggctgtctggagcctggactggcagcaggccctgcagtctggctcttgctgattgaattcctt

SEQ ID NO: 373810 - DNA, 100 bp, Homo sapiens
gaaagtggtgaatcccctgtttgagaaaaggcctaagaattttggcattggtaagaagagttcctgggtcaagtggtcaccttcataaaaccgaagacgg

SEQ ID NO: 373811 - DNA, 91 bp, Homo sapiens
tacagcttctgataatcaaccaactgttacaatcaaggtctatgaagtggatatcaaagtattgcagagtgccttagcagccatccgacat

SEQ ID NO: 373812 - DNA, 100 bp, Homo sapiens
tcagctcccgcagcttccgacgagtggaaacaaggtggccatttcaacaactcccctggagaacacatccattaaagtggggccagctcggaagggcagc

SEQ ID NO: 373813 - DNA, 100 bp, Homo sapiens
ctcccatcaatgccagctgctgaggaaatgcataaaaatgtggagcaagatgagttgcagcaagtcatacgggagaaatagatgacaagagggggcccaa

SEQ ID NO: 373814 - DNA, 75 bp, Homo sapiens
tcggagccctggaagcagcagctcaccgaggacggggactcatgaggcctgcctgtgttaatacacctagtgagg

SEQ ID NO: 373815 - DNA, 100 bp, Homo sapiens
tgaagagcatagacatgcaatgaatgaactagtacagggaagaccatttgaagtaaaagaaatgtttctggaagatattttaagaacaactggatataca

SEQ ID NO: 373816 - DNA, 100 bp, Homo sapiens
gaggatctggactccgtttcctgccttgctctttggaccacattgtcaattcacaccggatatcgacatcttcagctgcgaaaccttcacaatgaagtct

SEQ ID NO: 373817 - DNA, 83 bp, Homo sapiens
caaggaggtcacccgcgtgctaatggtggaaacccacaacgggctgcccctgatggggcctggcaatgactgagcaggcccag

SEQ ID NO: 373818 - DNA, 50 bp, Homo sapiens
ctccacattcctgtgcattgaggggccccttcccagctgcctgcctgccc

SEQ ID NO: 373819 - DNA, 87 bp, Homo sapiens
gttattcgagtgaccgagaccgcggccgggaccgaggaaatgagccgtcagactgctacagcattacctaccggtacctcgaagtgt

SEQ ID NO: 373820 - DNA, 75 bp, Homo sapiens
aatccaggatgatctcatctaaattacatctgcaaaaagaccctttttccaagacctgagctccttcgccatgcc

SEQ ID NO: 373821 - DNA, 100 bp, Homo sapiens
gggggttcgcgcccgccgacccgcgccctgctccctctcagcacctgggcggacgataacagcccgccgtcagtggaaacatatttatgatgaattaggc

SEQ ID NO: 373822 - DNA, 90 bp, Homo sapiens
gtgcagtacctggatctcatcaaaaaggacaccagcaagctgttcaatgaggagcagtctgagtccccgcctcgccgagacagcctggcc

SEQ ID NO: 373823 - DNA, 90 bp, Homo sapiens
agacaagtccccagggaatgccacagcatcctccagcacctcaggttttcctttggaatatggataaatacaccatgatacggaaactag

SEQ ID NO: 373824 - DNA, 86 bp, Homo sapiens
gaaattgatcagcaacaactaactcagcagcaacttaatggaaactaggaattacatgaacgacagccttcgcaccgacgtcttcg

SEQ ID NO: 373825 - DNA, 50 bp, Homo sapiens
cggctctcaacagcatcgactccgatgtgcatcatcgaggagtcgggaga

SEQ ID NO: 373826 - DNA, 97 bp, Homo sapiens
gcggcggctggcgcttcctgcgcatcgtctgcaagaccgcgaggcgagacctcttgttgaaatcacaaagattagacacctttttagataggtgttc

SEQ ID NO: 373827 - DNA, 46 bp, Homo sapiens
aaaggattggattggcatctttagaagcagcccgacggccatggag

SEQ ID NO: 373828 - DNA, 96 bp, Homo sapiens
aagacacacaactcataacagttgatgaaaaattgattcctcagttccttttagatgattgctttaaaaatggtatcccctgccgtatattttgta

SEQ ID NO: 373829 - DNA, 51 bp, Homo sapiens
gaaactcagaaaagcgtaagcttgctcaggagtctctgcattagttggaca

SEQ ID NO: 373830 - DNA, 83 bp, Homo sapiens
cgctggcgcggatggggcacggggacgagatcgaagctggcagggcggagatgctggaccacgccgtcctgcttcaggtgatc

SEQ ID NO: 373831 - DNA, 80 bp, Homo sapiens
gcgttatcttccgactgatccagctggtggtcctggtctacgtcatcgggaggcagtggagaaggtgacacagcacatcc

SEQ ID NO: 373832 - DNA, 50 bp, Homo sapiens
ggggcagcggggcctggcgggatggcaagagcggtgagcggggcgcctat

SEQ ID NO: 373833 - DNA, 90 bp, Homo sapiens
gcacttggaatagtagcaggcggcggcggcggaacgccaggcagatccgatgtccagttttcacaagctgattgctgagaaggttctagg

SEQ ID NO: 373834 - DNA, 90 bp, Homo sapiens
ttttggatgatgatggatccatttctcctattgaggagtcaacgactccattattacagtctttgattggtctttttgagttacccgaag

SEQ ID NO: 373835 - DNA, 83 bp, Homo sapiens
cgccatttgaaattcacacgcaccaacaaaatggggacgccctcctgcaaaacggcccaactacgttaagcttggcactctgg

SEQ ID NO: 373836 - DNA, 98 bp, Homo sapiens
taagtggaaaaactaccattttaaggtctctacaaaaagcttcttggacacttaatgattgttggcaagaaatgtgctgctgatctgggcctgaataa

SEQ ID NO: 373837 - DNA, 98 bp, Homo sapiens
gcgacctacctgggcgctccgcgcccccggatgctgcaggcaaccactgagaaaacggaaccgaatagtcaagaggacaagaatgatggtggaaaatc

SEQ ID NO: 373838 - DNA, 100 bp, Homo sapiens
ggagagactggaccagaccatgggcctgagcatcagctccctcgtgaaagatgcttctgttcctctgattgatgttacaaacctccctactcctcgaaaa

SEQ ID NO: 373839 - DNA, 97 bp, Homo sapiens
aagtctgtggtttatcattgtaatcagcttcttaccaaatacagaagggaagaggaagaacgtctgagaaataaaattcgagctgatcatgagaagg

SEQ ID NO: 373840 - DNA, 105 bp, Homo sapiens
tttcgggatcgaggggtgagggcgctatggcacccggctgcaaaagccggaagctgagaggaaaagccttttattttgtcaacggcaaagtgttttgtgaagaag

SEQ ID NO: 373841 - DNA, 75 bp, Homo sapiens
gctgatgcaggcgctgcccatgggagccctgccccaggggggactcggagatcatgcagcagaagcagaaaaagg

SEQ ID NO: 373842 - DNA, 109 bp, Homo sapiens
gagcccatggcttctcccatgcctgcaggtcaccctgcggtccccaccaagcctgtgggtgaagagaaacggattcgggaattctaccagtcccgaggtttggaccggg

SEQ ID NO: 373843 - DNA, 98 bp, Homo sapiens
tggacttcgcctttcccgagccctggaggtggggagaaaagattatgactgtaccttttaactttgtagctggaacacaagaagtgtttgtttaatga

SEQ ID NO: 373844 - DNA, 90 bp, Homo sapiens
ccaagacaccacagaagccctccgagcccaggagccacctgggcctgggccagacatgaccatcttgtgtgacccagaaacgctatttta

SEQ ID NO: 373845 - DNA, 50 bp, Homo sapiens
cagaggtggaggcgctttgaaagtttcttaaacaattaggtctacatcct

SEQ ID NO: 373846 - DNA, 83 bp, Homo sapiens
caactgcccagcgtgaccagtggccacctctgcagtgtcttccacaacctgggtgaaacctttgtcctggggaatagtctggc

SEQ ID NO: 373847 - DNA, 100 bp, Homo sapiens
catggacgaggcggcgcgggccgaggcctgggacagctaccgcagcatgagcgaaagctacacgctggagcaactccgaagtcaagcccgcactctgatt

SEQ ID NO: 373848 - DNA, 137 bp, Homo sapiens
aaagcggggacccagaccctggagcctcagttggaagcagccgatccagcctgcggagcctgtggggcagtgacccaggaggctctcacgtggagtccccagaacagcatcaactcctcacgatgctcctgacggtg

SEQ ID NO: 373849 - DNA, 88 bp, Homo sapiens
aaggaacgaggcaaggagctaaagcagcgtgcgttcagccctgggaaatgactgctgtccatgcaggcaacataaacttcaagtggga

SEQ ID NO: 373850 - DNA, 90 bp, Homo sapiens
gatccaaaagctgaagtggtcgatgaaattgctgccaaacttggcctgcggaagctatgtgggccggaagcggatgcaggtggagcaccc

SEQ ID NO: 373851 - DNA, 101 bp, Homo sapiens
gggacagagtcttctgggtctctctgcctgaggccctggagggagagaagaacgacaaatcctccacccctgggctcaagtccaacacaccaaccccaagg

SEQ ID NO: 373852 - DNA, 75 bp, Homo sapiens
taaaactcagatagcccttgaaccagaacagtgcgagtctggatccgagggcgatgggacagtgcaccgcaggaa

SEQ ID NO: 373853 - DNA, 75 bp, Homo sapiens
tcagcctcctgagtagctgcgattacagggatcagtttcattcacggatgtgactgtggactttacccaggagga

SEQ ID NO: 373854 - DNA, 98 bp, Homo sapiens
tcctgagtgactgcgtcaggcatctcaatcatgctcagggagccaatggtactctggagaacccagccctggacacaagtctgttggaggaatttctg

SEQ ID NO: 373855 - DNA, 75 bp, Homo sapiens
ctctctgctgcggcgcggggaccgctgtgctctcgctggactgggcagcctttggggtcatgacccttccctcca

SEQ ID NO: 373856 - DNA, 50 bp, Homo sapiens
cttttcaatacatcctaaaacagttttcagcattgcaaataacaatctca

SEQ ID NO: 373857 - DNA, 75 bp, Homo sapiens
gatgggggctgctcagacactgccaggctcctctggacccttcccgctgcccagcgctggggacgccttcctcac

SEQ ID NO: 373858 - DNA, 101 bp, Homo sapiens
ggaagatgatgttgtcaagaagggcgctatttgtacttctaaatactccagtccttttccatgcactggaggagaggaagagctaaggagcaaatccaaga

SEQ ID NO: 373859 - DNA, 100 bp, Homo sapiens
ccgctgctgcccctgctgtcgctcctggtcggcgcgtggctcaagctagtattttaataagcggaaaacctactttgctcacgatgcccttcagcagtgc

SEQ ID NO: 373860 - DNA, 97 bp, Homo sapiens
gtcccaggactaaccggaagcttctgcaacaggaggacattgaaaataagatggaacccatccacataagatccctgcatgtcactgagtccaccat

SEQ ID NO: 373861 - DNA, 102 bp, Homo sapiens
tttccgggaagttcaaattatgaagatgctttgccacccccatatcatcaggctctaccagctatatgttctcctttcagccaagacctttcaccagtgcag

SEQ ID NO: 373862 - DNA, 75 bp, Homo sapiens
ggaaaacaagaggccccagagggaaaagaagcccaaagttttaaagctgcactgggtgttcaacagccatcactc

SEQ ID NO: 373863 - DNA, 98 bp, Homo sapiens
caagatggcactcaacatgaacaactacaaaggctatgaaaagaagccctattgtaatgcgagccagcattcgaacgttcactccattttattttctg

SEQ ID NO: 373864 - DNA, 100 bp, Homo sapiens
acaggaagcagagtggctatggtgggcaaactaagccgattttccggaaaaaggctgggaagaggtgggaggaggggcagaagtgaaggaagaataggaa

SEQ ID NO: 373865 - DNA, 109 bp, Homo sapiens
agctgtgctcgcgctactctctctttctggcctggaggctatccagcggcgaactttctgaccaagtatacaactacccagagggcctaggagaagtgctgtatagaga

SEQ ID NO: 373866 - DNA, 75 bp, Homo sapiens
gtaaggatttcaacatgcctctgacaatctctagtcttttctgcaattagataaaaaaggaccacaaaaacatca

SEQ ID NO: 373867 - DNA, 101 bp, Homo sapiens
cctctggaccctggagtacaccccgcagcacagccgcgacttcaagagtgcctggtgaagaatgtgatgggatcactagcatgtctgcggagagcggccct

SEQ ID NO: 373868 - DNA, 100 bp, Homo sapiens
atcaccattggctgggaaggaaaaacagaatcagctgttccctgcgaaaggtatagtagttgaagattgtttgattttgctccaaaacttattaaaaaac

SEQ ID NO: 373869 - DNA, 75 bp, Homo sapiens
attcgcagtggtcgcttcttctccttgatcttgagccagatgattgtgcatccatttacatctttaatgtagatc

SEQ ID NO: 373870 - DNA, 90 bp, Homo sapiens
tccagccaaattcaaaaaggataaggagatcatagcagagtacgatactcaggtcaaaggctcagctggaagctcagaaagccacgcagg

SEQ ID NO: 373871 - DNA, 100 bp, Homo sapiens
cgctgcgtctacatcctggacccctggttcgccggctcctccaatgtgggcatcaacaggtggcgactgctgagaaggaagaatttgaacatcaacagaa

SEQ ID NO: 373872 - DNA, 100 bp, Homo sapiens
aaacccctcctcccctagcttcactcaatgttagtaagggacaaatatggccctgaaggctccatgagcagacgagaaggctggacttcgcaactgggtc

SEQ ID NO: 373873 - DNA, 73 bp, Homo sapiens
tgttcttggaccgcacctatgtgctgcagaactccacgctgccctccatctgaacagctttgctgagccatca

SEQ ID NO: 373874 - DNA, 75 bp, Homo sapiens
gggattctctccagccttggtggtgacatcaatgttagttgaatccatggacatgaaacccacagatatagaggg

SEQ ID NO: 373875 - DNA, 100 bp, Homo sapiens
aaagcatctactgggggacatcctgttgtgaagtgtaatgtccccgaaggagggctggtccccaagtccctctacatgacagaagaggagcaggagcaca

SEQ ID NO: 373876 - DNA, 80 bp, Homo sapiens
aaacagtccagagactcatccccgccctgtgggagaagcacagtccacagcccggaggaaccacccccgccctcctcagc

SEQ ID NO: 373877 - DNA, 50 bp, Homo sapiens
tcgaagggagttggtaaacgctgggaacaacaccctggacatggctccag

SEQ ID NO: 373878 - DNA, 100 bp, Homo sapiens
acaagaaatgccccttcactggtaatgtgtccattcgagggcggatcctctctggtgcagtagacattgttgcaatcatgatcggcaatctgaaaggcac

SEQ ID NO: 373879 - DNA, 92 bp, Homo sapiens
ccagcggccgagcgggcggcttcctggcctgggcgctccggtggcggcggagatcaggatcctcatgaccagccaaagagaagaagaattag

SEQ ID NO: 373880 - DNA, 98 bp, Homo sapiens
gtttattgcagcactgttgtgccctctgatggtgctggagaatctggtaaaagcaccattgtgaagcagatgaggatcctgcatgttaatgggtttaa

SEQ ID NO: 373881 - DNA, 75 bp, Homo sapiens
accaggtgcttggcaaaatcgagcgggccattgaggcagaagaggcctggaccttggcgcacacagacccaggaa

SEQ ID NO: 373882 - DNA, 99 bp, Homo sapiens
agaggacccaggagaaattcgccctcaaaggcgtctctggccgagcctctttttgtggaaaacgacagcagcagcagtggcctggaagacgccaccgct

SEQ ID NO: 373883 - DNA, 129 bp, Homo sapiens
agtaagaaatcctcagaggaaattacccagtatattcaaagctacaagggatttgttgacataacgtcccaagaggaattacaagagtactgcagacatcatgaaatcacctatgtggcccttgtctcg

SEQ ID NO: 373884 - DNA, 83 bp, Homo sapiens
cggacgggccatacccaataaccaggtgcttggcaaaatcgagcgggccattgggatccaggtccggcacgatcaagacccag

SEQ ID NO: 373885 - DNA, 100 bp, Homo sapiens
ctggatctcatcaaaaaggacaccagcaagctgttcaatgaggagctgtgaactatagtcagcccatcagcgaggccagcaggggctctgaggccatcaa

SEQ ID NO: 373886 - DNA, 87 bp, Homo sapiens
aagatcttgtctcgctggcctgcgacccagccagccagcaacctggaccgttggagagaggcgatttcctctcagaagagtggaggg

SEQ ID NO: 373887 - DNA, 72 bp, Homo sapiens
cgcatcgcccttcctgcccctcgaggctcaggaactgtatttgataggtacaagagttacagcccttatgac

SEQ ID NO: 373888 - DNA, 75 bp, Homo sapiens
ccaggccacaagacatttcctgctcggaaccttgtttactaattgaactgatttcatctgaaattgaagagacaa

SEQ ID NO: 373889 - DNA, 90 bp, Homo sapiens
agggagcggagtaccagcacttcatccagcagtgcacaggggaaagacgcctcagccttcgccgccaagatgagggggggcttctggccg

SEQ ID NO: 373890 - DNA, 75 bp, Homo sapiens
cggccgtaaaacgattttctgtgtcgtttgcaaagcatccgactaacggcctagagtccttacgggacagtgccc

SEQ ID NO: 373891 - DNA, 100 bp, Homo sapiens
ctggatttccagaagacgaaatacgcgaggattttttatcaagcagaaatgcatcgaacaacgagaatcaagatcactgagctaaatccccacctgatgt

SEQ ID NO: 373892 - DNA, 75 bp, Homo sapiens
ctgccctctgcgctcctgcatctgcctccccatctctcgtgctcattcccccatgatcgccgtaggaagtgatga

SEQ ID NO: 373893 - DNA, 100 bp, Homo sapiens
aaaactccaaactcctctccaccagcgccaagagggccccgtggttatgaatgtgcttcagtttcataatgcctcctgctatggcagacatccttgacat

SEQ ID NO: 373894 - DNA, 102 bp, Homo sapiens
ggagcgagctgggagggagccgcgcgcctttgtgcgcgcgccgagggggatatgagactttctactcggaatatcctgagtgttgcgtggatgtaaaaccca

SEQ ID NO: 373895 - DNA, 80 bp, Homo sapiens
tcttgtttgtggatcgctgtgatcgtcacttggtctcctccgggctggggctgagcaagccctcggagtgaccgtgggtg

SEQ ID NO: 373896 - DNA, 90 bp, Homo sapiens
tccacgtctggaataatgggtactctttcctcgtggaatttgaagattctacagataaatcagatcctaagtgtgaacgtgaagtcccca

SEQ ID NO: 373897 - DNA, 75 bp, Homo sapiens
tcgccggcatgtgctgcctaccagaccaggttttggaaaatgacgatgttgtctgggttcatgtctaagcttgtt

SEQ ID NO: 373898 - DNA, 74 bp, Homo sapiens
gtggaataggtgtatcaagtaatggtgcaaagcctgaaaaaatggatattccagctaaattgattgtttgtgga

SEQ ID NO: 373899 - DNA, 75 bp, Homo sapiens
gctggcaagtcaaccattggaggacaaataatgttgcttttaactttgacagaggaagaattttccaagacgccc

SEQ ID NO: 373900 - DNA, 83 bp, Homo sapiens
aatccggatcattctagagctttaagtcagcttttgccaactgttttcaaatcacatgcatgggggatcttacacacactcct

SEQ ID NO: 373901 - DNA, 96 bp, Homo sapiens
cgccatcgttgctgccttcttcgtcaagactgaagttgctgaagatcctcaacaagtttcaactgtccatctccaactgggcttaccactggtttt

SEQ ID NO: 373902 - DNA, 125 bp, Homo sapiens
acctgccaatttaccagagataattgataacaccctgtaacagctgatttaaaaggatgcttaatcgggagctcacccatctctctgaaatgagtcggtctggaaatcaagtgtcagagtttata

SEQ ID NO: 373903 - DNA, 100 bp, Homo sapiens
tgaagaactggaggctgagttcttggctttggtcgggggccagcccccagccctggagaagctcaaaggcaaaggttcgggaagaataccggaagtgggc

SEQ ID NO: 373904 - DNA, 90 bp, Homo sapiens
aagaactcaggacaagcagcagaaatacatgcaacatggtgactgggtcagccagcagccggcccggggtgtcagccaccccacccaagt

SEQ ID NO: 373905 - DNA, 100 bp, Homo sapiens
gccagcgggacctacctgatcagggagcggcctgccgaggctgagcgctttgcaataagcatcaaattcaagaaatccatggtgaaaggtttggattcct

SEQ ID NO: 373906 - DNA, 85 bp, Homo sapiens
agagtgcttcgagatggcagatgttctggctacacaggaaccctggattgcttgttacagatggagtttcactcttgttgcccag

SEQ ID NO: 373907 - DNA, 82 bp, Homo sapiens
gcaacttacccgagaacgtgcgggaagagaagatcatcgagcatttcaaacgatctctgttgaggagctggcgcggaatctg

SEQ ID NO: 373908 - DNA, 82 bp, Homo sapiens
aaagaaaaagaagaagcaaggtgaagataactctactgcacagtaactctgggtggattttaactacaactcttgtcctctc

SEQ ID NO: 373909 - DNA, 100 bp, Homo sapiens
cggcaggcgctggaggcccgaagacgccgaggaggcagagcaccgcggcgccgagcgcagacccgagagacccagcacaccctgcctgcatggcgctgcg

SEQ ID NO: 373910 - DNA, 100 bp, Homo sapiens
ccacaagacgactcaataggaggaagattgccccagtggaaaatgacaatagctacgatgaactgaaaagagatgcaaagttatgtttatcattaatgtc

SEQ ID NO: 373911 - DNA, 100 bp, Homo sapiens
tgtgatgccagaggtcaacaaggttctggacaagatgaagtctttctgccagatctggaatcgatgtgtgaaaccaagttattatctctaaagaaggaag

SEQ ID NO: 373912 - DNA, 74 bp, Homo sapiens
gggccttgataacacagagtttcaagatgagcagcaccagcagtaagagggctccgaccacggcaacccagagg

SEQ ID NO: 373913 - DNA, 98 bp, Homo sapiens
gcaccgggagagcccgggagtgcgttccggggctttcggagcagcggtgtgaggcaagaggaggaacgacgtagaagagaggaagagatgatgattcg

SEQ ID NO: 373914 - DNA, 74 bp, Homo sapiens
gctgaagactgattacaagaatcctatagaccagtgtaataccctgaatcccgggctttgttatgcacctaaag

SEQ ID NO: 373915 - DNA, 88 bp, Homo sapiens
cttcaccacaaaagcgaaatgggcacaccacaggtgctggagaatctggtaaaagcaccattgtgaagcagatgaggatcctgcatgt

SEQ ID NO: 373916 - DNA, 100 bp, Homo sapiens
gcaagatggcactcaacatgaacaactacaaaggctatgaaaagaagccctattgtaatgcagccctaatttgtttagaactgtaatatgcacagttaaa

SEQ ID NO: 373917 - DNA, 100 bp, Homo sapiens
gcagggcccaatgagcctggagtccttggcgcccccagagagtaccgacgagggggccgaaaccgagaggggactcgggcaagggtgccgaagatagaca

SEQ ID NO: 373918 - DNA, 90 bp, Homo sapiens
ttggacttatccagatgatgagaaacgcaaggttgaatctccagtgatctgtaaaatcttagatacagcagatgaaaatggacttctttc

SEQ ID NO: 373919 - DNA, 74 bp, Homo sapiens
tggttctccagttaaggttggaaagatggatgctacttcctattctagaactgtggctgcaccatctgtcttca

SEQ ID NO: 373920 - DNA, 87 bp, Homo sapiens
ggaagagctgatgaagttgctgaaggtcttagaaaaataccccaatacacccatgagtcataaagaaattcttcaagttatccagag

SEQ ID NO: 373921 - DNA, 90 bp, Homo sapiens
cagttctcctgcctgagcctctcggattacagtccaacatgtttaccgtggctgatgtgttgagtcaagatgaactgcgcaaaaagctat

SEQ ID NO: 373922 - DNA, 96 bp, Homo sapiens
attttgaactgcagttctgtgagaggaaacaacagctaaccggagggtcagcctgggccagtgggcccccaggggtacaatgggccaccaggatta

SEQ ID NO: 373923 - DNA, 95 bp, Homo sapiens
atggcaattgacctcacctcaagcacacccaatggacagcatgcctcaccaagtcacatgacaagcacaacagcttgcacaactacagaaagaaa

SEQ ID NO: 373924 - DNA, 74 bp, Homo sapiens
aagtaagatggtcactctccaccgaatgggttggcttcctgaggctcaggtagtccaaagagccctgaattctg

SEQ ID NO: 373925 - DNA, 74 bp, Homo sapiens
aacggcggcggtgtcggcagctgctgtagcgaagagagtttggcgcgatggtggaccaaactacgaattaacat

SEQ ID NO: 373926 - DNA, 75 bp, Homo sapiens
gttcatcttttgccctagagcaattgaagagaattgaaggacttcagatcagcaaatcgttaagtatgtttggac

SEQ ID NO: 373927 - DNA, 100 bp, Homo sapiens
cgcggcgctcgagggaccatggccgatcctcgcgtgagacagatcaagatcaagaccggcgtggtgaagcgagcctggagaaagttcttgtggaattcag

SEQ ID NO: 373928 - DNA, 83 bp, Homo sapiens
gtgccctgagggccttcgagagctaccgcgccagacagggcaaaataacatggcagccagacgaattacacaggagacttttg

SEQ ID NO: 373929 - DNA, 100 bp, Homo sapiens
agcagtcctagaggagcagcattcggccagagcccccttgctggattatatctacaggacagaagcattaaaatgcgtggctcaggctagcaagaacaga

SEQ ID NO: 373930 - DNA, 94 bp, Homo sapiens
agctgtcagagcccggggacggcgaggccctcatgtaccacacgaagaagctcattcacacagaagacccatttaatgatgaacatcaggagag

SEQ ID NO: 373931 - DNA, 99 bp, Homo sapiens
acaaatccctggccgaaggctactttgatgctgccgggaggttgcaggagaaataacaaggcattgaagaatggcagatgaacggaaagatgaagcaaa

SEQ ID NO: 373932 - DNA, 87 bp, Homo sapiens
tttgatgtcaccggagttgtgcggcagtggttgagccgtggaggggctcgttttgatgatggtgctggaggtgacaatgaagtgcag

SEQ ID NO: 373933 - DNA, 100 bp, Homo sapiens
gagcagaggccttctctagaccttgccaagatggcacagttccgccatggagtcatagttgcagctgactccagggctacagcgggtgcttacattgcct

SEQ ID NO: 373934 - DNA, 83 bp, Homo sapiens
caccttcagcaaagtacagcgcttctgggagtccaactcggctgcccacaaggaggtagttgatgtcacttggcgatattcct

SEQ ID NO: 373935 - DNA, 89 bp, Homo sapiens
ccgatgggaagtccttattattggccctccagatacactttactgtttctggcaaagcctgccgtgtcttacatttgtctctctatccg

SEQ ID NO: 373936 - DNA, 87 bp, Homo sapiens
gtcattttactgtcaagacatttcttcggcattctgcaacagataacaacgaacttgatgcaagtgataggtttgccaaggtcagac

SEQ ID NO: 373937 - DNA, 50 bp, Homo sapiens
tgcagctagtaatttgccttctggattgcaaagccaaagctaattgagcc

SEQ ID NO: 373938 - DNA, 74 bp, Homo sapiens
ctgtcgtgtcgtcgctgctggcacttcaggctctgctccagtgatccacaagctcagaaatacatcgcggaaag

SEQ ID NO: 373939 - DNA, 100 bp, Homo sapiens
gtacggaccataataatcaggagtgaagtcccagggatattctgtgctgttcttcctcctcaaccagaaaacatcaagatttccaacattacacactcct

SEQ ID NO: 373940 - DNA, 98 bp, Homo sapiens
ctgctgcagagggtaaacttcacaacatgatagttgatctggataatgtggtcaaaaaggagtctactcttcatcttgtgttgagacttcgtggtggt

SEQ ID NO: 373941 - DNA, 98 bp, Homo sapiens
agcagtccaattttggcactggagaacaaagtaggagcattgcttttcgtggtgaaagaggcaatgatgaatctgccatcgaaatgattaaagtatct

SEQ ID NO: 373942 - DNA, 100 bp, Homo sapiens
tgtcaaacggcccccagcgcccctggtaactgacaaggaggccaggaagaaggttctcaaacaaggtctggagcccccaactcccttgacagtgtacgct

SEQ ID NO: 373943 - DNA, 74 bp, Homo sapiens
ctggaggccaggtggacaacctgtcatcactgacttctgaaaagtatttattacagtatcaggagccaatacct

SEQ ID NO: 373944 - DNA, 100 bp, Homo sapiens
ggctccggggacggcgagatgggcaagcccaggaacgtggcgctcatcaccggtatcacaggccaggatcagttcgacagcttagacaagcatacacaat

SEQ ID NO: 373945 - DNA, 82 bp, Homo sapiens
cccagccatggcagattcctccgggcagcaggccttatgccagcctggaccatcttggaggcagtgtaggatcatggaagaa

SEQ ID NO: 373946 - DNA, 75 bp, Homo sapiens
ggaaggagcagaacgtgagggtgtaacttacaaaaagggtcccctggaagtgacgctgactcagccagtgaggag

SEQ ID NO: 373947 - DNA, 74 bp, Homo sapiens
tcccaaattaccggaaaggactgttcttgaggtattcaggttatcttatgatgaggcttttgctatggctaatg

SEQ ID NO: 373948 - DNA, 75 bp, Homo sapiens
gagacggcctgggtgctggcgaagcggaggccggagattcatgatgttgctatcaaaagttgagaaattgtcaga

SEQ ID NO: 373949 - DNA, 102 bp, Homo sapiens
atccttggtgatattgacagagcacgggcaatctatgaattagccatcagtcagccacgtttagacatgccagagaccatgtctgcaaaggagaagtcgaag

SEQ ID NO: 373950 - DNA, 75 bp, Homo sapiens
agctgtccccacaaaaagtgacgctttacctgcgaccaggatcatccagcagctcgtcaacggcatcatcacgcc

SEQ ID NO: 373951 - DNA, 100 bp, Homo sapiens
acttggacaagatgaacaacaatatcggcattctgtgctacgaagattgtcctaaagcagttggatgggaaaagaaccagaaaggaggcatgggaccaag

SEQ ID NO: 373952 - DNA, 98 bp, Homo sapiens
catctttaaataccctcaagaggagcaacctcgtcagcagcgaggaaggaaacagcgactgctgagaaggaagaatttgaacatcaacagaaagagct

SEQ ID NO: 373953 - DNA, 101 bp, Homo sapiens
ctacacttggcctttcgacgacatcatcgtcttcgcctatgcctgccaggctgctgtcggaccctttcctggggatgattatgggcctcggaggaggcatg

SEQ ID NO: 373954 - DNA, 100 bp, Homo sapiens
gactatgagaaattgcttcagtctgagaattatgttactaagagacagtctttaaaggaacagatgttgttattgtaaagaatggaagaagaatatgtgg

SEQ ID NO: 373955 - DNA, 99 bp, Homo sapiens
ctgaaattcctaatattaagcctgatattcttatcattgccataggaaaaggatacagagtagagtttcatgaacctgaaacttggtggaaatttgatc

SEQ ID NO: 373956 - DNA, 90 bp, Homo sapiens
gtcagttctctgtagtgtttgccaatgttggagccgtctgcaaagtgtccccggcaagaagacggttgatgatgaagcgccggccgtgta

SEQ ID NO: 373957 - DNA, 75 bp, Homo sapiens
tcctcagtgcgaagaagctgcagccgcacctggccaaggcgatgtcaccatttctacctgccacgcatcggcgaa

SEQ ID NO: 373958 - DNA, 75 bp, Homo sapiens
taggattagatgatccaagtcaccaagaaattactgtctcaagtgatacgcttctaaccgaaaatcttcagttgg

SEQ ID NO: 373959 - DNA, 100 bp, Homo sapiens
ttgcactcaagtgaggagacaggccatgcctttcaagtgcatgcagctcactgatttcatcctcaagtttccgcacagcccaataggggcacaaaacgtc

SEQ ID NO: 373960 - DNA, 121 bp, Homo sapiens
ctcggcttcctgcgcgataaccaactctcagaggtggccaataagttcgccaaagcgacaggagctgattacaaggcagaggaagacccagcaaaatttaaatctatcaaaacaggccgag

SEQ ID NO: 373961 - DNA, 90 bp, Homo sapiens
cagtaaacccctcaaggagtttgtggaggcctgtttgaataaggagccgagctttgttcaaaccttgtactactcagctgatcacaagct

SEQ ID NO: 373962 - DNA, 99 bp, Homo sapiens
gacctagatggaacacatgctctgatggaatcagagatcattgatttcttcctgggggcctctctcaaggatgaggttttgaagattatgccagtgcag

SEQ ID NO: 373963 - DNA, 95 bp, Homo sapiens
ctgtgccgtaccgcgggacggtgtttgccatggaccccaggaatggttacatggagccccactaccggtcattgatgcagtcattctcagtctcc

SEQ ID NO: 373964 - DNA, 101 bp, Homo sapiens
ctctctcatcttgggaatctgcgtcagaagtcactcgcagtcccgtcagcccagatctttaatctcatgaagtacgacagctacagccgcttcttaaagtc

SEQ ID NO: 373965 - DNA, 100 bp, Homo sapiens
tctggaaatgacacctctgggcttgagaataagactgttgttgtcaccacaattttgatctgccgagaaagctatggagtgattgaacagaagaagctga

SEQ ID NO: 373966 - DNA, 75 bp, Homo sapiens
gaagatgacgattcagagactgaaaaacctgaggctgatgacccaaagaaatacactttcgggaaatggcctcta

SEQ ID NO: 373967 - DNA, 98 bp, Homo sapiens
ttcttgagagtgtcacatggattgttttaaagcaacctataaacatcagctctcaacaggcatttattaatacagcaaaagaaatttatgaaaaaatt

SEQ ID NO: 373968 - DNA, 97 bp, Homo sapiens
aaaaaaatttgctggatattgatgcgccagtcactggtgtcatggagaaactccagctgggcccagagattctgcagcgggaaaatccaaggcttat

SEQ ID NO: 373969 - DNA, 100 bp, Homo sapiens
gaaagcattccctatgagtgaaagaattcaagaagtgagttgctgtttgctccataggcttacattagaaacctctgtagaggagcaggatgcaaccgac

SEQ ID NO: 373970 - DNA, 51 bp, Homo sapiens
atggtggagagcggcactgaaattactgggagatgtactcaaagatcggcc

SEQ ID NO: 373971 - DNA, 100 bp, Homo sapiens
ctttccatagggtcactcctagatatctccaacacaccagagtctagcattaactatggagccaccagagaaacggcggagaacaattgaggatttcaac

SEQ ID NO: 373972 - DNA, 75 bp, Homo sapiens
ttgtctgataatgttactcgagagaaaatgaaggctgacaaaccaagaggatttgccagaggtcttgatcctgaa

SEQ ID NO: 373973 - DNA, 100 bp, Homo sapiens
gaggcctgttgctgccgtctcgactcgtggatgttggaaaatggatataccttatttgattatgatgttggactgaatgatataattcagctgctagttc

SEQ ID NO: 373974 - DNA, 83 bp, Homo sapiens
gcatcccacagcctcctcttccagaatgcctttgcgcaggacccggtcagcccaaggagcaggggtccagcagctctgcggag

SEQ ID NO: 373975 - DNA, 75 bp, Homo sapiens
ccggaacaccctggaagccgagaaatggtgtttgatcagtatgtaaagaccagggcagaggaagaacgcagggaa

SEQ ID NO: 373976 - DNA, 100 bp, Homo sapiens
tcctccaccagaggactgggaggagcatgtcaacagccgtactctgacagctgtgcacgatgccatccttgaggacttggtcttcccaagcgaaattgtg

SEQ ID NO: 373977 - DNA, 100 bp, Homo sapiens
gtctatcttcggtgtttcaattggcattctggatacagaactccatccggcacaacctgtcactgcatagtcgattcatgcgggtccagaatgagggaac

SEQ ID NO: 373978 - DNA, 51 bp, Homo sapiens
aatcaggaagtggatgcctccatttttaagattcaagtggatgaaaagggg

SEQ ID NO: 373979 - DNA, 100 bp, Homo sapiens
acgtcatcgagtactcgctggccctggtcactgtgctgaacgagggccggatcgtggcacccagaggctgccaggactttggctgggacccctgctttca

SEQ ID NO: 373980 - DNA, 82 bp, Homo sapiens
ggccgcagcgcaggcagcccagcagttggaatcgaagcctcttaaaatggcagatgacttggacttcgagacaggagatgca

SEQ ID NO: 373981 - DNA, 50 bp, Homo sapiens
tgtgttaggagcatgcagaccaatcaggggaaatgctgtctgtagctgag

SEQ ID NO: 373982 - DNA, 100 bp, Homo sapiens
gcccaggggacattcaacagcccctactacccaggccactacccacccaacattgactgcacatggaacattgaggtggggaagctgaggcaggaagccc

SEQ ID NO: 373983 - DNA, 90 bp, Homo sapiens
ttgggacacaagccccggacccgggcagcacggagagcctgcaggagaagcccatggagatcgttctgggaggtgatcagtgatgaacat

SEQ ID NO: 373984 - DNA, 100 bp, Homo sapiens
gctttggaggggaaatggtacaaacgtcatcaaaattgctcctgagacagctgttaaattctgggcatatgaacagaattcagaggtgtctgtgtttgaa

SEQ ID NO: 373985 - DNA, 51 bp, Homo sapiens
gccaatcccaggaggaaaaacggtggcatggaatattcacatgggagagcc

SEQ ID NO: 373986 - DNA, 74 bp, Homo sapiens
tgcaccacagatatatgggttgagttttgagagcaaaatgacaacacccagaaattcagtaaatgggactttcc

SEQ ID NO: 373987 - DNA, 83 bp, Homo sapiens
cagatggtgttacctggagcttaaaaagctgcacgcaagtgttaaacttctggtgccatgtttcagaacagagtaagacccct

SEQ ID NO: 373988 - DNA, 80 bp, Homo sapiens
aagagcgacaagccgctggcagccgcggatctcaccgccgctcaggatggggacccagagcctgctcttgggaacagcca

SEQ ID NO: 373989 - DNA, 100 bp, Homo sapiens
gttccaatgagacagggcacaccaaactccatctgggtcagtgtgctggtgggagcacccaaggctaataccagccagccaggagtgctgcagggtggtg

SEQ ID NO: 373990 - DNA, 82 bp, Homo sapiens
gctaaagagccgagcacgcgggtctgtcatcatgtcgcgttacgggcggtacggaggagcgtgagtgcatctccatccacgt

SEQ ID NO: 373991 - DNA, 82 bp, Homo sapiens
actggggccacgtggagctgctggaggctcaaactggaggattataaggatcgcctgaaaagtggagagcatcttaatccag

SEQ ID NO: 373992 - DNA, 101 bp, Homo sapiens
tcatcatggaggactacctgcagggttgtcgagctgctctgcagctccgccgcatgcaagagatgattgcaaggatgcaggcgcagatgcagatgcagatg

SEQ ID NO: 373993 - DNA, 116 bp, Homo sapiens
ctccaatgtcattgtcctgctattagcacagataatgggtctcactgtcaaccaggccagagtgcagtgaagatcatacctcactacatccgtgaactcccgggctcctcccacct

SEQ ID NO: 373994 - DNA, 100 bp, Homo sapiens
gtttgaacaaactcgaagaacagctgtggaaagaagttgcaaaacactggaatttatccagttggcgaaggactttgaggatttccgtaaaaagtggcag

SEQ ID NO: 373995 - DNA, 100 bp, Homo sapiens
aagaggccaggaagatccttcaggtgctggaaaggaatgaggagttacagagggccgagaaggacaggatcagggttgttatgaggctcaaaggaacggc

SEQ ID NO: 373996 - DNA, 100 bp, Homo sapiens
tggtggaaaagcagaaccttagcaaagaggagctgatagcggagctgcaggctggagccagacatcctgcttcgggccaagcaagatttcctgaagacgg

SEQ ID NO: 373997 - DNA, 75 bp, Homo sapiens
ctgggttcatttaccctttggtcggaacggaaaaacgtggtcttcgagaaatgcgagttcttgaaaatttgaaga

SEQ ID NO: 373998 - DNA, 130 bp, Homo sapiens
ctggagctgtgaggagattcgggccgtcaccctgcctcccctgcgtcccgccaccggccgcttctgtcctcggtttggtgcacctcgatttggaggaagtagggcagggcccttatctggaaagaagttt

SEQ ID NO: 373999 - DNA, 100 bp, Homo sapiens
cttggctccttcatggcaatgcccagaaatggaagcagattaggacttgcatgggtattaggagatgctgaagaactgccctttgatgatgacaagtttg

SEQ ID NO: 374000 - DNA, 97 bp, Homo sapiens
cgaggctgcggtgtctgctgctattctccgagcttcgcaatggccagtgcagtagtgacctgttccagtccacacacaatgtcattgtcaagactga

SEQ ID NO: 374001 - DNA, 90 bp, Homo sapiens
aggacccatttgtgtccattgatctcttggagcagctggggatcatgacagcaccttgtattctggcctagatgaagtggccgaggagca

SEQ ID NO: 374002 - DNA, 119 bp, Homo sapiens
cttcagatcttcacagcacagttcctgggaaggtggagccaccagcctctccttggtagtaaacctattgatggcaattttgctgactgtggaagtgactcatccaaactccatgccag

SEQ ID NO: 374003 - DNA, 83 bp, Homo sapiens
gagctggaggaaggagctaccctcatcgcccataaagtggatgagcaggacatcaaggacgccctgcgcaggtacgaacccag

SEQ ID NO: 374004 - DNA, 108 bp, Homo sapiens
cacacgcaccacttcccgtcgccgctgtccaacaaccaggaggtaggaaaagtaattggaattgctattatgaaacactttggatggaaagcagacttgaggaatcca

SEQ ID NO: 374005 - DNA, 75 bp, Homo sapiens
gggcagcctaagcatttgctactggtggaccctgagggtgtgactcaggatgtgcagaaggcgatggacgagagg

SEQ ID NO: 374006 - DNA, 100 bp, Homo sapiens
tcctatatcatgcagagaaaagagatggaaacttacttgaagaaggtactgaacgacacctgggtctccttcccttcctggtctgaggactccacgttcg

SEQ ID NO: 374007 - DNA, 83 bp, Homo sapiens
ccgctgtgtggttgcaacggagataaattcccggaaccgcgattcggcgtgtcaggaatgtatcctgtcaggtataatgtcag

SEQ ID NO: 374008 - DNA, 100 bp, Homo sapiens
acggccaagaggcagacctaggaaatggggtgctggtgacagctttgtgggagctctggccttctacctggcttactatccaaatctgtccttggaagac

SEQ ID NO: 374009 - DNA, 96 bp, Homo sapiens
gtaatgcgagaggtgcgggcgcggctggcggccacgcagaccacagatgacatccttgtggcctcagcagagtgtcccagcgatgatgaggacatt

SEQ ID NO: 374010 - DNA, 90 bp, Homo sapiens
cggcggcggcggcggccttgggccggtggacgtacccagcgctcgattggtttatcttggaagctaaagggcattgctcatcctgaagat

SEQ ID NO: 374011 - DNA, 51 bp, Homo sapiens
ctcctgacacaacaccactcagtgggaacctaaattattctgcaagacaaa

SEQ ID NO: 374012 - DNA, 100 bp, Homo sapiens
taagcatgagtgaattctggttgtgtttcaactgctgtattgcagaacagcctcagcctgtgatttgatgaaggctgctgcaggagagttcgcagatgat

SEQ ID NO: 374013 - DNA, 50 bp, Homo sapiens
ttgaactactgccggagcttctgccagtgctcctgcgggaagaagtgtcg

SEQ ID NO: 374014 - DNA, 83 bp, Homo sapiens
agaaaacatcaaagaggtctagcaaagtttaatggatcgagaagtggcgttgcttgctgaaatggacaaagtgaaagctgaag

SEQ ID NO: 374015 - DNA, 83 bp, Homo sapiens
cccccttccccacgcaaccccagatccatttacactttacagttttgaacgaagaatgtgatcagaactggtacaaggcagag

SEQ ID NO: 374016 - DNA, 100 bp, Homo sapiens
cagagattcaggccagagttgtgggccgccgtcggcagcaagaacagagagagaggtggacagatctgagagatactgagtattcaagtcaaacaacgtt

SEQ ID NO: 374017 - DNA, 74 bp, Homo sapiens
ccgagagcgcgaatatcgtcatcgttagaagggttcaggataagtttgaggtgctgaattacacaagcattcct

SEQ ID NO: 374018 - DNA, 87 bp, Homo sapiens
ttgtatgcctcaatttgctggatttaagcactgctgcactttatgagagcttttgaggagaaacgaaaagaacaggaagaaaaagaa

SEQ ID NO: 374019 - DNA, 100 bp, Homo sapiens
cactgctgttctagagcagggatcagcaaacttgctgtaaagagccagggtggtgacttcacacgccataatggcactggtggcaagtccatctatgggg

SEQ ID NO: 374020 - DNA, 100 bp, Homo sapiens
ttggccaggcttgcagcagccagaacttcaccttgagcattgctgcttcacctgaacctaaaatggtgagcgagagtcaccatgaggccctggcagcccc

SEQ ID NO: 374021 - DNA, 75 bp, Homo sapiens
ttcaaacattcgtctcggaaaccccgcctcttacagtcacgaggtctcaactcctccaaacgaacagaaaccggt

SEQ ID NO: 374022 - DNA, 75 bp, Homo sapiens
agctgaatctgatgtcaaacatagaaccagaggcgcagatcaggcctctataaccgccaggaatcacattcagct

SEQ ID NO: 374023 - DNA, 82 bp, Homo sapiens
attccgggagcacagttccgccgagtggttattggagatcatgatggggtagttatgtgctttggcatgaagaaaggagaag

SEQ ID NO: 374024 - DNA, 100 bp, Homo sapiens
cgggacccggttccccggcccacagtgggggtgtgcaaacccgagagaactggggcagcacccatgtttttcgtgtaaagtgtctggtaaagatgtgaag

SEQ ID NO: 374025 - DNA, 101 bp, Homo sapiens
atatatgccatttgtttgacaaagataagaagcagtatcactgtgaaaactgtggaatttgtagtaactctcaggagccttctccgcagttggcttcctcg

SEQ ID NO: 374026 - DNA, 89 bp, Homo sapiens
gaatgccggatcctccggggacctgatgggctgagtcgagcttcctgcctgacacagctcacttcaagaagtgcacaatgtcagaacgt

SEQ ID NO: 374027 - DNA, 75 bp, Homo sapiens
gtgaggccgtggatgcaggcattaaggatttaggtcctgaatatgaaggtatatttaacacttcattgcagtgga

SEQ ID NO: 374028 - DNA, 83 bp, Homo sapiens
cgcgcccttctctcgcttcggactgcgcaacgctgcgctctgggctgacagcttcctgcctgacacagctcacttcaagaagt

SEQ ID NO: 374029 - DNA, 98 bp, Homo sapiens
tcagacagatcgccggggaggcagcgcgggatcccagcctcaggcgtgcgcggacggtgtgcgggatcgaagagcagtcataaaaccacaaagtcaac

SEQ ID NO: 374030 - DNA, 100 bp, Homo sapiens
cctggagcagtatgccagcaagctcagcaaagacccaaatatcgtcatagccaagatggatgccacagccaatgatgtgccttctccatatgaagtcaga

SEQ ID NO: 374031 - DNA, 95 bp, Homo sapiens
acggcatcacggacaagaagctgaaggagcgggcagggcagccagataagctggtggtggtatggacccgtcggaaccgacgcatctgctccaag

SEQ ID NO: 374032 - DNA, 82 bp, Homo sapiens
aaggttacctctacccatcacaggaacgaatgcaggaatttgggaactgagctgtgcaagtgctgaagaaggagatttgttt

SEQ ID NO: 374033 - DNA, 75 bp, Homo sapiens
ctgcctcagcctcccaagcagctgggtctacaggcctcattgctacgatttcagagtaccctggtaatagctgag

SEQ ID NO: 374034 - DNA, 90 bp, Homo sapiens
gaagtgccgaaagagcactggactccggaagcaagacactaagggcgactaccagaaagcgctgctgtacctgtgtggtggagatgactg

SEQ ID NO: 374035 - DNA, 101 bp, Homo sapiens
cgcagttgcgtgaggggtttgtactatcctcggtgctgtggtgcagagctagttcctctccagctcagccgcgtaggttctgcggggagtgtctccagccc

SEQ ID NO: 374036 - DNA, 113 bp, Homo sapiens
cccgggccgcacccgccggccccatgaggagggacgtgaacggagtgaccaagagcaggtttgagacttaattcagtgcacaaatgagatgaatgtgaacatcccacagttgg

SEQ ID NO: 374037 - DNA, 74 bp, Homo sapiens
attttccaaacacctgactctgtgtgtttttaccaaccatacaggatgcacaggaacaaacgagggaatatgcc

SEQ ID NO: 374038 - DNA, 75 bp, Homo sapiens
agacttcacagtttctgctctgctgcaggtgaacaccctacgacgttataaacgacactacaagttgcagaccag

SEQ ID NO: 374039 - DNA, 101 bp, Homo sapiens
cggaagtagaagacagcggcgttgccatggcggcgtctctggattccctcccaggctgtccctcgccgccttgctacagcccccaagactgaaaaacctcc

SEQ ID NO: 374040 - DNA, 100 bp, Homo sapiens
caggcctcaggccccctcaccatcctagaggtcaagatcagctctggctagccctgctgctgaggccgcgccctccccgccctgaggtgggggcccacca

SEQ ID NO: 374041 - DNA, 83 bp, Homo sapiens
ggcgctctggctgtgctgcgcggcccccgcgcatgactgaccaaatatggaagtgtgcaagtcttgaacacattagtttatac

SEQ ID NO: 374042 - DNA, 76 bp, Homo sapiens
aaagagacctctacttagctcagcaattcttaccttcacaagctccgggtggataaggcagctgctgcagcagcgg

SEQ ID NO: 374043 - DNA, 88 bp, Homo sapiens
agcatctacaaccctgaagtgcttgatatcacagaggaaactctgcattctcgcttcctggaggagacgcaggtgcccgcgctgctgg

SEQ ID NO: 374044 - DNA, 97 bp, Homo sapiens
gcctttttggcctggcttgtttgcaaagggctggcgctgtgacaactgccgcagacctgggggtgaacccagtcccgaaggcactactggccagtcc

SEQ ID NO: 374045 - DNA, 101 bp, Homo sapiens
cccagtccctgagagagctcatctcagatctggagcatcggctgcaggggtcagtgatggagctgcttcagtcctattttgtaacggattatgatccaacc

SEQ ID NO: 374046 - DNA, 50 bp, Homo sapiens
gttccctccaagacaactgaatggttagcatggcctcattgaaagaacta

SEQ ID NO: 374047 - DNA, 73 bp, Homo sapiens
cggcgcggtcctgtactggctgctgctgccctgcgcgctgctggctgaaatggtggagtcaatgaagaaagta

SEQ ID NO: 374048 - DNA, 51 bp, Homo sapiens
ctactttattccagaacaatcacatctgaagttgacaagcagcagcataga

SEQ ID NO: 374049 - DNA, 97 bp, Homo sapiens
ccgccgcggcattcggggaatctgcagggcagcaaaatgcaggcccgaatagcattctctgcctatctccagcatgttcaaattcgcctgatgaaag

SEQ ID NO: 374050 - DNA, 100 bp, Homo sapiens
gagagctgagcgctcggaagaaccaagcatcctgaggttagcattacacttctcccagtggagcccatgacttctgatcaggacgctaaggttgtggctg

SEQ ID NO: 374051 - DNA, 75 bp, Homo sapiens
tttcgacaccaaccccttcgcggacccagtggatgtaaaccccttccagaaaactacccctgagtgtggtcccac

SEQ ID NO: 374052 - DNA, 98 bp, Homo sapiens
cctgtcctgcctccagaatacattccaccttcttttaggaaacagagcaaatgcagcgttacaatcaaagacttattgaggaattgaaaaacagacag

SEQ ID NO: 374053 - DNA, 75 bp, Homo sapiens
ccctggaagagaagagggtggctaatgattaagggtcaggagacaaacaaccagtcggcctcccccagcaggggg

SEQ ID NO: 374054 - DNA, 100 bp, Homo sapiens
gtgcagatggaaaacaaagttctacagacagcggacattagtattgaagaaatgattgaaaagttacagaagtgagaaagatcagtctaaagaaaaggag

SEQ ID NO: 374055 - DNA, 75 bp, Homo sapiens
gcccgggccgtccatcctcgcattgctgttgaatgaggcggctcagtggtgatcgtgtcttccatagcagccttc

SEQ ID NO: 374056 - DNA, 82 bp, Homo sapiens
tctaaacggactcatgtactttgtcagagttagactggctgagcaacccaagcttttgtgttggatccataacgtccctgag

SEQ ID NO: 374057 - DNA, 74 bp, Homo sapiens
caagtttgggattacctttttggaaaagaaatgtatcagtcctaactcttgtcacacgtgtgggatttatcttt

SEQ ID NO: 374058 - DNA, 90 bp, Homo sapiens
tctacaagatctgcgcctggatgcagctcttggcagggcgtctctggccgagcctctttttgtggaaaacgacagcagcagcagtggcct

SEQ ID NO: 374059 - DNA, 74 bp, Homo sapiens
tgctgctcaaaatcagcctacatgccatctttggtggaattttccttggtaccgttgctgcagcgggaatgcta

SEQ ID NO: 374060 - DNA, 75 bp, Homo sapiens
cccgcacagtctgaccgacttgcgaatcaccaggactatgtcttcagcagtggtgcagttatatgcagcagatcg

SEQ ID NO: 374061 - DNA, 100 bp, Homo sapiens
gagccgctacatactcatcatggggctcctgtacaaggacggggaggtttactgcatcgacgcgcggttctacgggaacgtcagccggttcatcaaccac

SEQ ID NO: 374062 - DNA, 100 bp, Homo sapiens
cagatcggcgcccagcaatcacagaagccgacaaggcgttcaagcgaaaacatgaccgctgagcccatgaggtggccaccgagtactaaattcacttggg

SEQ ID NO: 374063 - DNA, 83 bp, Homo sapiens
gctgacagtgagaagaacaatgctgcctgggaggggtggctgtatccctgtcccacatcagaaactgatcctcaggacttgaa

SEQ ID NO: 374064 - DNA, 75 bp, Homo sapiens
accggctccttgcgtcccgcctccctgggagctccgcacggaaaacaattgctcaagtcttagttcatctacaca

SEQ ID NO: 374065 - DNA, 51 bp, Homo sapiens
cctcactgcagaggtgctggagctggcagttagctaaattacaagatcgag

SEQ ID NO: 374066 - DNA, 96 bp, Homo sapiens
aattgccaaggagaagagtaccaaggctgctagtgaacagcgacgtgcagctgcagtatctcggaagaaaaaacgaagaatgggaacctatagcct

SEQ ID NO: 374067 - DNA, 75 bp, Homo sapiens
ctgagtgagctggccactgcgagccctctggcacaaatggaagaagaaagaagggagcaagtagctaaaattaag

SEQ ID NO: 374068 - DNA, 100 bp, Homo sapiens
cagctccgaaatcaccaccaagggcaccgcgtccgtgctgcagcgccggtcccccaatgaggagtacgtggaggtggggcgcctgggaccctctgactac

SEQ ID NO: 374069 - DNA, 82 bp, Homo sapiens
gaccctcccagaccggccgctctcccctcctctcacggcacctcccaccatgaagattggtttatcttggaagctaaagggc

SEQ ID NO: 374070 - DNA, 75 bp, Homo sapiens
gtggaacacaccatccaggacattgcacccaactatgggcaagattcttgccaagagaattaatgtgcgtattga

SEQ ID NO: 374071 - DNA, 82 bp, Homo sapiens
atgcctggcagccccgctctctgcagtagcccctgaagaagatgaaaggaaaaagaggcgacgagaaagaaataagattgca

SEQ ID NO: 374072 - DNA, 100 bp, Homo sapiens
gtagactcgccgtcaaagaagaaagttactgtaaaatggggaaaggagaaatttgaaggtgtagaattgaatacagatgaacctccaatggtattcaagg

SEQ ID NO: 374073 - DNA, 72 bp, Homo sapiens
cagtctttgctacgtacagcaaaagagatgagaagaatcagtccatcatagtcagtggggagtctggagccg

SEQ ID NO: 374074 - DNA, 100 bp, Homo sapiens
gttcagtttatacatggtacaagatcagcatgagtgcatcctcccttttgtggataaagatggaaagccactcctgccaaaagagtctaaggaacagctt

SEQ ID NO: 374075 - DNA, 82 bp, Homo sapiens
ggaccgcggggttagccactgctggctgcttccagtgttcgccgagagctacgagttccagggagctctgtcctggtgaccg

SEQ ID NO: 374076 - DNA, 96 bp, Homo sapiens
cactgaggagtccaacatcaccatgcaggcatgtactggcattgaaaacattgacgaagctattacattgcttgaacaaaataattgggacttagt

SEQ ID NO: 374077 - DNA, 90 bp, Homo sapiens
ctccttcccagccgcgcggcttcctccagacctctcggcgcgggcagaggtggaggagacactgaagcgactgcagagccagaagggagt

SEQ ID NO: 374078 - DNA, 82 bp, Homo sapiens
tccgggcccccaggcatggctagctcgactcagattgatggacaacttttcttaattaagcaccttttgatacttcgtgaac

SEQ ID NO: 374079 - DNA, 82 bp, Homo sapiens
ggaactggagccgaggcgcaggtggcgctggcttccccgggcgctgcctggacaggcctgcctgcgtgctgggacatgtctg

SEQ ID NO: 374080 - DNA, 98 bp, Homo sapiens
caaattatggatgaacctatgggagaggaggagattaacccacaaactctggaccaagcaacactctccctggccgtgagggaagactaccttgataa

SEQ ID NO: 374081 - DNA, 111 bp, Homo sapiens
gatgctgtactgtcttcctccagggcaggctggcaggttcctggtagagttacacagttgtgccgccagtatagcgacatgcctcctttgacgttagagggcatccaggac

SEQ ID NO: 374082 - DNA, 82 bp, Homo sapiens
tcagcaacctgcacttgaaccggcactgtgagaagagtgtccctggccagtgtccttccacctgtccacaagcatggggaac

SEQ ID NO: 374083 - DNA, 98 bp, Homo sapiens
ttcagtgaagatacaaaaccctcaaattgcatctgatggtctcaagggtcgtgtgtttgaagtgagtcttgctgatttgcagaatgatgaagttgcat

SEQ ID NO: 374084 - DNA, 90 bp, Homo sapiens
cagagatggggaagaggaagaggaagagaaaagtcccatttacgtcatcctggtgggaggctggtctttttctctgtacctcattcaact

SEQ ID NO: 374085 - DNA, 80 bp, Homo sapiens
aagatcgagcagaggcctatttgatagaggaaatgtatgatgaagtttcttaaacaattaggtctacatcctaactggca

SEQ ID NO: 374086 - DNA, 83 bp, Homo sapiens
ggataagggcgacagcaacagctctgccggctggaaggtgacttaagagattaaaattaatttggttgctgttggttctgaac

SEQ ID NO: 374087 - DNA, 88 bp, Homo sapiens
gttaacaggaaggcctccttctgggatacgacccctatcaggaaatattcgagtggcaactgcaaaatgcatcttctgcagacaccgg

SEQ ID NO: 374088 - DNA, 50 bp, Homo sapiens
cgagaccgcggccgggaccgagggaggctctgtcggtggtgagcgacgac

SEQ ID NO: 374089 - DNA, 90 bp, Homo sapiens
caggggttgcaggtgtgtgggaggtttgttgaagaggaccatattccttacataaatgcttttcagcattttccagaacagatgaaatta

SEQ ID NO: 374090 - DNA, 75 bp, Homo sapiens
caatgcaagcagcagctcaaatccaagctctcctggaagaataaaggggaggaggaataaacatggtgtgtctcg

SEQ ID NO: 374091 - DNA, 82 bp, Homo sapiens
ctgtgggaggctgtgaagaggaggaaggccttgtgcaaacgcaagtcgtggatgagtaagggggatatgagactttctactc

SEQ ID NO: 374092 - DNA, 90 bp, Homo sapiens
ggccgtggctctcttggcagccttcctgatttctgcagctctgtgtgaagaatggctggtgctccagacccctcacctggagttccagga

SEQ ID NO: 374093 - DNA, 100 bp, Homo sapiens
ctttcttccaagtgaccctcttcgctgtgaatgagttcattctccttaacctgctaaaggtcacttcatcctggcccaggtactgcagctccaaatcgtg

SEQ ID NO: 374094 - DNA, 121 bp, Homo sapiens
agatgaatctggacaggcactgcttgctgctggtcactatgcctcagatgaagtgagggagaaggtgccagatgtgacatccagatgacccagtctccatcctccctgtctgcatctgtag

SEQ ID NO: 374095 - DNA, 100 bp, Homo sapiens
ctttagtgaaatctagccttgctgatagcgatcatttacaagattggctaaagaaattgactctccttattcctgaggactttgaagaatatcctgaaca

SEQ ID NO: 374096 - DNA, 118 bp, Homo sapiens
acccatcctgccgtccttctccactttcgccagcccgtgccgcgagcgcggcctgcaggagggcagctggtggaatttttgaagaaaatggaatctcgaggccccctttcgtgcgaca

SEQ ID NO: 374097 - DNA, 98 bp, Homo sapiens
agcactgggcccggcgtctggagcaggaggtcgacggcgtgatgcggatttttggaggcgtccagcagctccgtgagaggctgggaggcggcagaatg

SEQ ID NO: 374098 - DNA, 75 bp, Homo sapiens
ctgagactccctgtcccggaccgcaggtgttggagagcacaatggctgaacaagtccttcctcaggctttgtatt

SEQ ID NO: 374099 - DNA, 80 bp, Homo sapiens
atgagaaggttcagttggcaaaccagatatatgacttggtaaaataccatgaagattttgaaaaaacaaaggggagaggc

SEQ ID NO: 374100 - DNA, 82 bp, Homo sapiens
cgccaatggggagcagaaggactcggacacagagatcctgaaggagctagacgagtgctacgagcgcttcagtcgcgagaca

SEQ ID NO: 374101 - DNA, 97 bp, Homo sapiens
aaataccactcgccgctgtttactggaaggctatgataccaaaaatacaagacaggataattccattcttaaagtcaatgtgacggtggactacatt

SEQ ID NO: 374102 - DNA, 96 bp, Homo sapiens
cgggagtgtcctggacccagctgagcgggcggtcattcgcatcgcaggttgggacaaacattcctatggttaccatggtgatgatgggcattcgtt

SEQ ID NO: 374103 - DNA, 75 bp, Homo sapiens
gatgaagataagacactttctcagttacagagagggatgactctgttccagaagacaacatctggagaggcatcc

SEQ ID NO: 374104 - DNA, 131 bp, Homo sapiens
caacaataagcccaagctacctgtggtgatctcgcagtgtggggagatgtagtccagacaaagactgaatcaggacctgggaggaaggcaaggtgctcatctttgatgactcctttgagcacgaggtatgg

SEQ ID NO: 374105 - DNA, 75 bp, Homo sapiens
ggaggccgtggtgaggagcttcgccaagcacacgcagggctatggccgagttgcacactgacaagaaacagatca

SEQ ID NO: 374106 - DNA, 90 bp, Homo sapiens
tcacggggactcggtggcctcgctgggcacccagccggacttgggctctgccctctaccagagaatctggacgaggctagagaacagaaa

SEQ ID NO: 374107 - DNA, 90 bp, Homo sapiens
gcggcagcgactcggaggacggcgagtttgagatccaggcggaagatgacgcccgggcccggaagcaactccgaagtcaagcccgcactc

SEQ ID NO: 374108 - DNA, 73 bp, Homo sapiens
gaagttaaccggtgtaggagaagaaatccgcagaagcttattaaagttaagtatttaggtcagttaacgtcca

SEQ ID NO: 374109 - DNA, 50 bp, Homo sapiens
gttcaagtttcctggccgccagaaggtaaaggcgacacaggaggagaacc

SEQ ID NO: 374110 - DNA, 83 bp, Homo sapiens
tgaaggctttcgtcacgcaggacattccattctaatgtatgtccctgggaagctgcatgatgtggaacacgtgctcatcgatg

SEQ ID NO: 374111 - DNA, 50 bp, Homo sapiens
accttcaatccgctctactggaatgtgctgaaccaataacgtttccatct

SEQ ID NO: 374112 - DNA, 96 bp, Homo sapiens
ccaactgctaacaaccagctggagggatttgcagatttacagaatggctgcacattaatggaaagagaagcataaacctatcttctttcattatgg

SEQ ID NO: 374113 - DNA, 82 bp, Homo sapiens
gcaagctgagcgagctgtcagagcccggggacggcgaggccctcatgtaccacacggagtcagagtattcatcgaaaagaaa

SEQ ID NO: 374114 - DNA, 75 bp, Homo sapiens
gctcatcaatgctgtcgagcttaaggcaagtatatcgcgtcaacacagcgacctgacgggacctggcgcaagcag

SEQ ID NO: 374115 - DNA, 100 bp, Homo sapiens
gacccgcccaccaccccagtaccaagacccgacacaaggcagcttcccacagcaggttggacagttcacagcctacttctccctgcaggtgatctcggcg

SEQ ID NO: 374116 - DNA, 100 bp, Homo sapiens
ccgaacctaccacctggacaggacctgagcaagtacctgtagacaccttcagctgggacctgcccatcaagatgccaattctcggaagcaagaagcagag

SEQ ID NO: 374117 - DNA, 50 bp, Homo sapiens
gcgagttctacatgatcggctccgagatctgaagaagacacttgaatcat

SEQ ID NO: 374118 - DNA, 100 bp, Homo sapiens
tgaaggactcatcatcgccctccctgcgctcctgctgggccctggcacaggcctacaacccgatggccaggcagcccagctggaggcaccccggcctccc

SEQ ID NO: 374119 - DNA, 75 bp, Homo sapiens
aggaaatatgtgtctcagtattatcctaagcttagagtggacatcagtggaatcccccaaagaaggtaaagggag

SEQ ID NO: 374120 - DNA, 113 bp, Homo sapiens
cgcagggcgatggacggccgaaccccgcgcccgcaggacgccccagccagctttgccctttcggatgaagcatacagatccctacgagatcaagataaggaccaatgtattct

SEQ ID NO: 374121 - DNA, 100 bp, Homo sapiens
catagccaatgaagccatcaacaccagagagccagctgccgagatagaagccttgctggggatggatctggtcaggaagatgagaatgtgcctactgctc

SEQ ID NO: 374122 - DNA, 90 bp, Homo sapiens
cgttcacagcaagctcaagctgtgggatgaagctctcttgactatgagtaaaggagaaaaggctcgactggagattgaaccagaatgggc

SEQ ID NO: 374123 - DNA, 100 bp, Homo sapiens
agccaatcggatgctgaagcagatgcttttcagggcatttgatgtagaactactgtacatagcacagttctttaaaattccaatagcagaaattgctgtc

SEQ ID NO: 374124 - DNA, 96 bp, Homo sapiens
aagaggagaaaaggaagaggaggaggaagaggaggaagagatcaacatctatgcagtcaccgaggaggagatctgactgcagccatgagcagcaat

SEQ ID NO: 374125 - DNA, 95 bp, Homo sapiens
ggaactcaggcgcctcttcttagttgatgatttagttgattctctgaaggtgttgacttcaaaatcaaaactgtagagctaagaggaaagaaaat

SEQ ID NO: 374126 - DNA, 83 bp, Homo sapiens
tacgagtgcaacatctgcaaggtccgcttcaccaggagtgtggccatctggggccgtgtggtatttgccactcaggagacatg

SEQ ID NO: 374127 - DNA, 100 bp, Homo sapiens
tgcaaagagagagatgctgctaaaaaggtcattgctagaatcgtggatggaagcagattcactgagttcaaagccttttatggagacacattagttacag

SEQ ID NO: 374128 - DNA, 87 bp, Homo sapiens
gtggaggccacctctaggcttaagaccttcaacttgatcccggctgttgccttcccactgctgtccctgggtccccggctgagcctg

SEQ ID NO: 374129 - DNA, 75 bp, Homo sapiens
cctacttgttaatgtgcctggagtcagctgtacacagaggcacaagcaaacaggacctgacttccttcaacatgg

SEQ ID NO: 374130 - DNA, 82 bp, Homo sapiens
cagcagatgtaccctcagtacgccacctactattacccccagtatctgcaagccaaggtgacagagctgaatgaacctctct

SEQ ID NO: 374131 - DNA, 83 bp, Homo sapiens
gttcagttgtggcggttgctggtcagtaacagccaagatgctgcggaatctgctggtgtcgtgaaaactacccctaaaagcca

SEQ ID NO: 374132 - DNA, 73 bp, Homo sapiens
tgaggaaaatgtccttccagcgctgcgcccggacagacaagctcttcagagaagtaagaataatgaagatttt

SEQ ID NO: 374133 - DNA, 74 bp, Homo sapiens
ccaagtatccgccagtcaataggaagtacgagtggcatacatcacagaaggaagccatggaagtaagccttgat

SEQ ID NO: 374134 - DNA, 76 bp, Homo sapiens
gggcccaaaaggcgagaactgaatgtgcccgaaagtcgagatcagaggagatctggttggagttggagggtgagag

SEQ ID NO: 374135 - DNA, 75 bp, Homo sapiens
caagcctgcagcgggttcagctgcatattgccatgtttcagctcaccagaacaagctagaagaaatgatcaatga

SEQ ID NO: 374136 - DNA, 95 bp, Homo sapiens
ggaaagttccaggacacggaaccgttgggacggaggacctgaaggtggagtgaggagcaggcagccgagcgggagcacgagcgcgaggagttcca

SEQ ID NO: 374137 - DNA, 100 bp, Homo sapiens
ttcaacaaactttccgaaagacacatgcatgtacagcttcaattagataatctcagatgccactgccgccaggagccctgtaacatcagccatcgtcaac

SEQ ID NO: 374138 - DNA, 100 bp, Homo sapiens
gtgggcactgaagggggactacaggttcgagaatgatgctgaataatcccctatttgctggaaatcctcagcttcaagaacaaatgagacaacagctccc

SEQ ID NO: 374139 - DNA, 90 bp, Homo sapiens
ttcgtgcatgggaatcggagaccatggcagtgcagctggtgcccgactcagctctcggcctgctgatgtgcacttacatttcaatcgacc

SEQ ID NO: 374140 - DNA, 96 bp, Homo sapiens
cgaccgggacaactccgggatgatcgataagaacgagctgaagcaggccctctcaggtttcgagttgcatgctgagaatttgaaaaatgaagatga

SEQ ID NO: 374141 - DNA, 82 bp, Homo sapiens
gacagcctcttcgtggaggaggtggccgcctccttggtcagggagttcctcagcagaaagacaatgcagatcttcgtgaaga

SEQ ID NO: 374142 - DNA, 76 bp, Homo sapiens
ggcgacaagggtgttcccgaactagagtggatcactgtgtccactactatgatcttcgtaacactaaacagccaat

SEQ ID NO: 374143 - DNA, 50 bp, Homo sapiens
accgacatcatgctccagttcctgcttcttaatgaagaggataactcaga

SEQ ID NO: 374144 - DNA, 83 bp, Homo sapiens
tcttcaccaaagaattgatcacatcatgaaaggatgagaacaagttgagcagtgccaacggccatgaagaacgtagcaaaaag

SEQ ID NO: 374145 - DNA, 75 bp, Homo sapiens
ccaaggtggagagagggattacagaaaggagaacaccttatttcaggaaaattgcctaagaattatgacccaaaa

SEQ ID NO: 374146 - DNA, 100 bp, Homo sapiens
tgaagaagaagactgttattgaaatagaattttctacagaagtcaaggcagtcaagctgcggcgagatagagacccactgctaaggagttattgaagcac

SEQ ID NO: 374147 - DNA, 108 bp, Homo sapiens
agcgtctggtcactcgctctcctctggggactgcagagaagcaggacctcgggccatgggtgagagttacgtgtgtgcatccaatgaaccatttcgtaaagtcgatta

SEQ ID NO: 374148 - DNA, 98 bp, Homo sapiens
ccgtccaactacgtggagcggaagaacagcctgaagaagggctccctcgtgaagaacctgaaggacacactaggatagtggccaaagcctccaagaac

SEQ ID NO: 374149 - DNA, 75 bp, Homo sapiens
tggtgtttggtgtacccatgtgactaatttgtccaaagagagcacttttccagccattaactccaggctctcgag

SEQ ID NO: 374150 - DNA, 80 bp, Homo sapiens
gagatgccgggggagcggggccttccacaccccctccgtgggtgtgtgcatccagcacgtgtatggtgcccagcaccccc

SEQ ID NO: 374151 - DNA, 96 bp, Homo sapiens
acctagtcatcctgctgcacctcctgaacatcttaaagaacctttggtatacatgaggaaagcacaggtgcgggccagtgctattgcccaggacgc

SEQ ID NO: 374152 - DNA, 100 bp, Homo sapiens
gccgtccagcagatggcggatgccctgcagtacctgcagaaggtctctggagacatcttcagcaggaccagttgctcttctgtgatgactgcgatcgtgg

SEQ ID NO: 374153 - DNA, 100 bp, Homo sapiens
cttaatgctgtcttaactagtgtaggaaaacggctcaacccaccgctgccgaaatgaagtataagtatctagaaatgatggaattagatataggagatgc

SEQ ID NO: 374154 - DNA, 90 bp, Homo sapiens
caagaactggagaggtgaggtggcggcgtgggcagcgattgcgtggtcagtgattgcgagggacttgccatgaggtgttgaagccttgtt

SEQ ID NO: 374155 - DNA, 85 bp, Homo sapiens
gaatgttgccaccaccgcctatgtggcgcaggtctcccccacggatgaggagaaggggttgtggaaaccagaacttcgcctggag

SEQ ID NO: 374156 - DNA, 50 bp, Homo sapiens
ctcacactcatgaggagccggaagtcgtgagatggagaataaagaaactc

SEQ ID NO: 374157 - DNA, 90 bp, Homo sapiens
ttctggactcccacttaggaaagacggtctcctctgagcctccggcctccataagacccaaaacagatgacacctcttcccagtcccccg

SEQ ID NO: 374158 - DNA, 100 bp, Homo sapiens
ccattcacacagcgaggcagcagcagaaacaggaacactcaggctctgaggaggcccagaagccaaacctggaaggtgccgtgagcgatgtggagatgca

SEQ ID NO: 374159 - DNA, 51 bp, Homo sapiens
gggagcccaccgggcgggcctggccaagatgaggagcgggaaggcctcctg

SEQ ID NO: 374160 - DNA, 83 bp, Homo sapiens
ctgctacctgcagcgccgtgtggcacgacacaaaaatcagtgcagagcagagcgggcggaggaccccgggcgcgggcgcggac

SEQ ID NO: 374161 - DNA, 100 bp, Homo sapiens
ctttgagacgcaggaagcagctgaaagagctattgaaaaaatgaatggaatgctcctaaatgatcgcaaagtttccaagaaactatgatcctgctttaca

SEQ ID NO: 374162 - DNA, 100 bp, Homo sapiens
aaaggccacaaagctgcgatcacctccttggacctcagccccaacggcaagcaacttgatccatatcatagattttgacgatgaaaacaacattataaat

SEQ ID NO: 374163 - DNA, 90 bp, Homo sapiens
agttggaagaagtggtaagcccacgaacacaaatgcaggagggagaggtgccaagaagcagcggtacacaccctcaaactgacacaagac

SEQ ID NO: 374164 - DNA, 83 bp, Homo sapiens
ctgagtctttgaggacacagcctcgctggaggcagtttctggaggatacgaagcgttttcggcttcctgcccggagctgtgca

SEQ ID NO: 374165 - DNA, 98 bp, Homo sapiens
cctcttcactgcattggtgacccagtgtcagaaaatggacatccctttccttggggaaatgcccgcagaggtggtgaagcagtattttccaatttgaa

SEQ ID NO: 374166 - DNA, 121 bp, Homo sapiens
agatccctccctggtgccacagcagctgagtgcgcatcaaatctgaagaaaatctacacagtacagacagtacagagaagctgatcgtcgaagggcatctaaccaaagcggtagaagaaac

SEQ ID NO: 374167 - DNA, 100 bp, Homo sapiens
aattaacgggttcattttgactgaaaaagcgaaggacttttttcaggcagaaaacaagtctcgtctggacggaaacccagcgtttgctggcagaaccagt

SEQ ID NO: 374168 - DNA, 75 bp, Homo sapiens
gttccctcagcctctgcccaaagaaagaaggagcttccagaggagattggaaaacttgaagataaagtggaatgt

SEQ ID NO: 374169 - DNA, 100 bp, Homo sapiens
gctgctgcagtcctggtgctgttggtgattgtgatcatctcacttattgtcctggttgtcatttggaaacaggtaatgtgtcagtggatggaaaagttta

SEQ ID NO: 374170 - DNA, 88 bp, Homo sapiens
ggtcaagcgggccacgcacctcgtcaccaaggccaaggtgtgagttcttgatacgaatgaaaggccaagagtttgttgatgagattca

SEQ ID NO: 374171 - DNA, 73 bp, Homo sapiens
ctgtccgaaacatcgcctccatctgtaatatgttgcctttccccatcttcctggttctgctccttcgtggcct

SEQ ID NO: 374172 - DNA, 101 bp, Homo sapiens
atatcctcggaagagcgctcccaggagaaacaagttcctggatgcctatgctgagcacaagttacagttctgggcagtgacagctgaaaatgagccttctg

SEQ ID NO: 374173 - DNA, 75 bp, Homo sapiens
aagatccctgtggtagagagaaaaatcctggatctgtatgctttgagcaagatctttctcctggcctgccctcca

SEQ ID NO: 374174 - DNA, 83 bp, Homo sapiens
cagcagctttgaggaaaagtatagtcgtgagatggagaataaagaaactctcaaagggttgcacaagatggatgatcgtccag

SEQ ID NO: 374175 - DNA, 90 bp, Homo sapiens
tgcgggttagggggccggcgcccgcggttcagaatttcgctaaggagtttgtgatcagtgatcggaaggagctggaggaagatttcatca

SEQ ID NO: 374176 - DNA, 100 bp, Homo sapiens
tttagggagtccatggccagaaaacttttgggggcagaaatttagcatctggagaggttggattttttccaagtgatgcagtcaagccttgcccatgtgt

SEQ ID NO: 374177 - DNA, 97 bp, Homo sapiens
ctgggcgcggattcgccgaggcaccgaggcactcagaggagaagccccatgtgccactcccctgatctgcagcttcggtaggccggtggacctggag

SEQ ID NO: 374178 - DNA, 73 bp, Homo sapiens
tgggatcactgctcagccttttggatgaaatcgagtgaacgttcctcagtggtgtgctgaatattgtctttcc

SEQ ID NO: 374179 - DNA, 100 bp, Homo sapiens
ctcctggctcctggctccctactcttctaaggatcgctgtcctgacagaagagacccgtgcctgtatattccacgctttgcgcacctgctggaattcggg

SEQ ID NO: 374180 - DNA, 100 bp, Homo sapiens
ctctacacgatgagatgcttcattggtttcgtgcagtagaatgttgtgtgagtcacagcccgttggagattgtgattttaatgttcgtctgcagtgtata

SEQ ID NO: 374181 - DNA, 90 bp, Homo sapiens
ccagatcacctcgctcgacgtgttgcagcacatcctcatccgagcctttgatttgagtggatgggcgcagttcttcatccacccactaat

SEQ ID NO: 374182 - DNA, 83 bp, Homo sapiens
cgaagcggctggcggagcagaacggattgcaggaattcagaaggagctggcggacatcactttagaccctccacctaattgca

SEQ ID NO: 374183 - DNA, 100 bp, Homo sapiens
ccaggcgactgcctcatcttcaagctgcatggctacttggagaatgagccgctgatgctgcagcttttcattgggacggcggacgaccgcctgctgcgcc

SEQ ID NO: 374184 - DNA, 132 bp, Homo sapiens
ttaatctgccaggcggagggggctttgctggtctttcttggactattccagagagttaacaagcacaagccctggctggagcccacctaccacggcatagtcacagagaacgacaacaccgtgctcctcgac

SEQ ID NO: 374185 - DNA, 80 bp, Homo sapiens
gacttcggaatgcactacaacaggaaaatcatattatagatggagtaaagaattcagaaggagctggcggacatcacttt

SEQ ID NO: 374186 - DNA, 90 bp, Homo sapiens
gacgtggggccctcagccgatgaagtcaacaacaacacctgttcaggttgggggccgtcccgctcctaaggcaggaagatggtggccgca

SEQ ID NO: 374187 - DNA, 75 bp, Homo sapiens
tgatgcaagcgaagaaccttttccctaatacgtacctcattgtgggagcaaaccagtccagctacgggggcccag

SEQ ID NO: 374188 - DNA, 100 bp, Homo sapiens
ggaaccagtgccgctactgcaggctcaagaaatgcttccgggctggcatgaagaaggaagctgccgcagcgggaaccgcaagagcttggtggtaggaacg

SEQ ID NO: 374189 - DNA, 75 bp, Homo sapiens
gaggccaaggacggcgttctggatctcaaagcgcaattctgtggtgttcttggtcacacatttatggagtttctg

SEQ ID NO: 374190 - DNA, 100 bp, Homo sapiens
tagaaattcaaaccctagtgaataaagccaagagagaccttggagtaattcgtcgacaggtttttcttcccccagtccctcagctgctgctgctgctcag

SEQ ID NO: 374191 - DNA, 100 bp, Homo sapiens
gccagagccagtttattttcactgtgcagctgttacaccagggatggactatttgggttctcggcaatacgttcaccgggacttggcagcaagaaatgtc

SEQ ID NO: 374192 - DNA, 100 bp, Homo sapiens
ggctgcgccggaggcctgactctgggagcacgcatggagacctttggcgacttggcctttggcgacatcttcctccacctgctcacgggcaaccttgcgc

SEQ ID NO: 374193 - DNA, 78 bp, Homo sapiens
gcgccgctgcctcgcctcggtacgccgcgcggcgcggacggcgccatcaagatggtgctcatgtggaccagtggtgac

SEQ ID NO: 374194 - DNA, 100 bp, Homo sapiens
ctgagaaagatatggaattatttcgtgatatccaagaacaagcactgcagttccatgccattgcagtgtcaactaggcctcagttacttttcagtttgcc

SEQ ID NO: 374195 - DNA, 82 bp, Homo sapiens
gttctcgctgaccgcgctagctgcttatgttcctgaggaagaattgaaggcagcagaaatagatgaagagcacgtggaggat

SEQ ID NO: 374196 - DNA, 100 bp, Homo sapiens
ccgggcagagaccatgtttgacaagacgcggctgccgtacgtggccctcgatgtgctctgcgtgttgctgggtggacgacccaccggagcccgtgtacgc

SEQ ID NO: 374197 - DNA, 83 bp, Homo sapiens
cttctttgagactgaaatggcaggctgtgatccaaaatcccttcagcaatggtggcagtccggcggccgaggctgtcagcggg

SEQ ID NO: 374198 - DNA, 76 bp, Homo sapiens
gctctataagctgaattatggcagcccagtcaaggaacttgtaatagctggcatcgttgagaatgaatggaaaaga

SEQ ID NO: 374199 - DNA, 100 bp, Homo sapiens
gccgccgagctggacccggaccggttttggcacccagtcagcttgaagagtttcaaatggaccctaccactgagaaatcaagatggcagtctactatggg

SEQ ID NO: 374200 - DNA, 74 bp, Homo sapiens
aaatcagagagaaggaatccaccttcttacgctatggcagatcccgcccaatgacccccgcatcaagaaccaag

SEQ ID NO: 374201 - DNA, 50 bp, Homo sapiens
ggcttgccaagaatcaccatgagattattcagagctgggagagcttcccc

SEQ ID NO: 374202 - DNA, 78 bp, Homo sapiens
cagtctgcccacctgtggacaccagtgtctgcactgcttggggaggaagatgaagaggcactgcattatttgaccaga

SEQ ID NO: 374203 - DNA, 75 bp, Homo sapiens
tccacctgtggtaccagtttgctctgtccctgatggctgctggaaaagctgaaccattagttgttgatcttaaag

SEQ ID NO: 374204 - DNA, 71 bp, Homo sapiens
catttcgcccctcgcgtccggagtccccgtggccaggagcccaggatgtgcgagttcaagtgctacccgag

SEQ ID NO: 374205 - DNA, 100 bp, Homo sapiens
aattatttcttggatggccgctctacccaggagccttggagtatgatcagcaagaagccaccgcagagcaagagaacaaacggtatgaaaatgaatatga

SEQ ID NO: 374206 - DNA, 100 bp, Homo sapiens
tgagaagctgaagcagtgcctggtggccgaccttgtccacacagtccatgaacaagagttgaatgctcgagcccgggccctccaagctgcatctgcttca

SEQ ID NO: 374207 - DNA, 75 bp, Homo sapiens
gagccgcgcacgctacagtacaaggaaacaattgaagatgttgaagaaatgctcaacaaccttcctggtgtgaca

SEQ ID NO: 374208 - DNA, 74 bp, Homo sapiens
caaaaagaacccaccaggcatggatgaccaactttgggttgggagccacgtgtaccagtgtgtgttgatcttgg

SEQ ID NO: 374209 - DNA, 89 bp, Homo sapiens
tggcgtgctggtcatcgatgtcaccttccccagcgtcgctcccttcgaggtccaggtgcaggtacagcagtctccgcaacaggtctcgg

SEQ ID NO: 374210 - DNA, 100 bp, Homo sapiens
gccgccgcagccatggaggccaactggaccgcgttcctgttccagaaaaagttggtgattcaaggaaagcacattgcaatgcattatagcaatcccagac

SEQ ID NO: 374211 - DNA, 100 bp, Homo sapiens
tgaactgtttctcttctgcagaaaaagaggctcttcctcctcctcccgcgacgaaattggcgtgttagccaaggctttcattgaccaagggaaactcatc

SEQ ID NO: 374212 - DNA, 75 bp, Homo sapiens
cccggagcaagcggagctcccccaagagccggaaaggaacttgaacatcagagaggagcccttatgaatgaaatc

SEQ ID NO: 374213 - DNA, 90 bp, Homo sapiens
cagttaggcagcagcagccgcggagcagtagccgccgtgggagggagccatgaagcattacgagaggccctaacccaagcaaactgattc

SEQ ID NO: 374214 - DNA, 80 bp, Homo sapiens
ttggacagacgggaaaaatagtagcaccagcttcagcgattagccaaagatcttctaaaacaagtacaagttcaagacag

SEQ ID NO: 374215 - DNA, 100 bp, Homo sapiens
gcctcaggagccgatgcgatcaactggaagaaaggcacatacctaactgatgagacccacagagaagtaaaatttacttctctctgagaaggagagatga

SEQ ID NO: 374216 - DNA, 75 bp, Homo sapiens
aaaagtctcagatgagctcatgagtgaaagtagtattattgattccacagaatacagccaacctccaggtttcag

SEQ ID NO: 374217 - DNA, 90 bp, Homo sapiens
atttgagatccttggggttgtaggtgaaggacagtcattttgtttactcattcagccctgttgcaggtcccaataaactcttcataaggt

SEQ ID NO: 374218 - DNA, 100 bp, Homo sapiens
ggttagggggccggcgcccgcggttcagggtgaaagaggcctcccggggttacaaggtgtcattgggtttcctggaatgcaaggacctgaggggccacag

SEQ ID NO: 374219 - DNA, 103 bp, Homo sapiens
aattatcacctccaaggagcaccttgccagcaagatccgagttaaacacagtgggaatatcacttttgatgagattgtcaacattgctcgacagatgcggcac

SEQ ID NO: 374220 - DNA, 74 bp, Homo sapiens
gttggcaaaagtgaagcaagttcacaaagaagtattaaactgtgttgctgaacagaagacttttgagagtcagc

SEQ ID NO: 374221 - DNA, 98 bp, Homo sapiens
cacagatctatggactcattcatggtgacctgagtgacagttcatttagattctttgtattcttcttcgtctatatttgtcagtttgctgtacatgta

SEQ ID NO: 374222 - DNA, 100 bp, Homo sapiens
ggaatatggcaagctatgtaggaccaaccagattggaactgtgaatgacagggttgcaaagacagttgcacagaggctcaacacagatccaatgttgctg

SEQ ID NO: 374223 - DNA, 90 bp, Homo sapiens
aacttaaagtaaaacaaggtgcagagaatatgatacagatgtattcaaatggatcttcaaaggctatttttatgattcccacaaatccac

SEQ ID NO: 374224 - DNA, 83 bp, Homo sapiens
gctaaattgtcaactagtgctaaaaggtgtcagttgtacccgaggcgttctcagcagcagcaagtacctgtggtggatttcca

SEQ ID NO: 374225 - DNA, 75 bp, Homo sapiens
cgccaatggggagcagaaggactcggacacagagacgtctcccacaacctgctccgggcgctggacgttgggctc

SEQ ID NO: 374226 - DNA, 80 bp, Homo sapiens
ggtttacaggaagtatttttattggaagaggatctaggagaaagtaaaaagcgcagactcaccattattgaatgtgggtg

SEQ ID NO: 374227 - DNA, 96 bp, Homo sapiens
aggaaggggaggacctcatccagcagctcaggacccttgaacatctgtgaagaaatgactattctgcatggaggcttcttgctggccgagcagctg

SEQ ID NO: 374228 - DNA, 132 bp, Homo sapiens
cgaggagcctcgcgcggcgctggagagagacaagatgtccgccagagctgcggccgccaagggagttctgggaaatcgttcattcatttacagatgaacagaaaagactcttcttgcagtttacaacgggca

SEQ ID NO: 374229 - DNA, 100 bp, Homo sapiens
tcagtccgccgctcaccccgcggccgcaccttcccgccttctcaggtaatgcatgccaggactgtgcaaagaggaagttagaagagaatggaattgaagt

SEQ ID NO: 374230 - DNA, 75 bp, Homo sapiens
atttgcgccttgcagcactgctggaccaggactaatggctgaaggataaatcaacatggcaactatgattccacc

SEQ ID NO: 374231 - DNA, 98 bp, Homo sapiens
ctagaccctgcccaacagaatttatatagagatgtgatgttggagaactacagaaacctcgtctccctgggttggactccatgaaagaattgcacaaa

SEQ ID NO: 374232 - DNA, 75 bp, Homo sapiens
caagaggcgcaaacaagccaatcccaggaggaaaaacgctgcagaaccttggcctgaaaatgctacattatatca

SEQ ID NO: 374233 - DNA, 74 bp, Homo sapiens
tttcctgaggacggcgtacggagtgtgggaagttgacaaaagtgttgaagaactacgtggacggtgctgagaag

SEQ ID NO: 374234 - DNA, 88 bp, Homo sapiens
atcgaggacagcaaacattatggtgctagctgacggattcctgatgattgggatcgatggctcagaagcagcagacggatctgactgg

SEQ ID NO: 374235 - DNA, 111 bp, Homo sapiens
gcagcccgcgcacagctgctcccttcgccttcgccctttccacctcgcggcagttcggtgagaagccctaccactgcaactgggacggctgcggctggaagtttgcgcgct

SEQ ID NO: 374236 - DNA, 90 bp, Homo sapiens
ttcccctcggcactaggcagcggaggagcccgaccgacccggttactataacaacagtaccaaggtggctgtgaaaaccctgaagccagg

SEQ ID NO: 374237 - DNA, 100 bp, Homo sapiens
tgttcgactggctcctgattacgatgctttggatgttgccaacaaacaggtagttccaatttgccagcagaatgagtacagaaagagactcagaaacgac

SEQ ID NO: 374238 - DNA, 90 bp, Homo sapiens
ccaagtaccaagtgaagactttgaacgcactcctcagagtccgactctcccacctgctaaggtggttattaacttggtgatgcttttggc

SEQ ID NO: 374239 - DNA, 90 bp, Homo sapiens
gtcccccgagagcgttgctttgatctgggagcgcgatgagcctggaacggaagtgaggatcacctacagtagagacgaggtttcaccgtg

SEQ ID NO: 374240 - DNA, 75 bp, Homo sapiens
atcaatctcactgctgcagacacagtagaattgggctatttgctgaagcttcttggtggcccttgctagcccagg

SEQ ID NO: 374241 - DNA, 101 bp, Homo sapiens
agatcatgcagagtattacctttacaagtccaactgggatattagccacctcagagtccaaatccatgccagtgttgggttctgtatccagtgtaacaaaa

SEQ ID NO: 374242 - DNA, 50 bp, Homo sapiens
tgggttacaactcaatctccagaaagtgactatgaagaaatcgggagtgc

SEQ ID NO: 374243 - DNA, 90 bp, Homo sapiens
ggcctggagtacaacgaggtcaacgtcaccctggacctgggccaggacctgaaggagaagaaggagaaggtggaggagaaggcaagccgg

SEQ ID NO: 374244 - DNA, 83 bp, Homo sapiens
gcccaagcagcagctgccggagcccgagtggatcggggacggagagaacacgagcccatcagatattgaagcacagattcgag

SEQ ID NO: 374245 - DNA, 95 bp, Homo sapiens
gctgatatgaattcttcagagtcagttggcagtgatgcaccttgtgttgtaaaagtgattgttaaaggaaatgggctggcaggaagacagtgaaa

SEQ ID NO: 374246 - DNA, 75 bp, Homo sapiens
agtgctcaaactcaccgaccagcactttcttatgcaaggagctaaacagtgattaaaggagcaggatgaaaagat

SEQ ID NO: 374247 - DNA, 82 bp, Homo sapiens
ctgcctgtgtccctgaccatggctccctgcagtaccctttaacgtctgatgacagtaaaacttctgtgagggatcgctttaa

SEQ ID NO: 374248 - DNA, 104 bp, Homo sapiens
aacagaatgaagtaatgaaaaatggctgtgaatctaaagagctggtctacctcgtgcagattgcttgtcaggaacgaatgcaggaatttgggaactgagctgtg

SEQ ID NO: 374249 - DNA, 105 bp, Homo sapiens
gggagcgctgccggagtctgctgcacactgcggctgcctttgacttccccacgagcttccagctcaccgaggaggagacggagtctcgctgtgtcgcccaggctg

SEQ ID NO: 374250 - DNA, 83 bp, Homo sapiens
cggcagggaggatgacggagctgcagtcggcactgctactgcgaagacagctggcagcttcctgcctgacacagctcacttca

SEQ ID NO: 374251 - DNA, 50 bp, Homo sapiens
atccaggagatgggacagcgtctcaatgtatattgatcagttgaagctca

SEQ ID NO: 374252 - DNA, 100 bp, Homo sapiens
cgccagcggacacgcgggcgagacatccacgacagcgatggcagttccagcagcagccaccagagcctcaagagcacagccaaatgggcggcatccctgg

SEQ ID NO: 374253 - DNA, 50 bp, Homo sapiens
tcagtgtatttcagacggcaagctgggatagatgggcagcagaagatcat

SEQ ID NO: 374254 - DNA, 98 bp, Homo sapiens
agcttccacgctgccaccaccgcaggcaaacttgtctccctgcccaagatcaccaggcgggatgtagctcattttgggatacgagtctccatcgtgga

SEQ ID NO: 374255 - DNA, 74 bp, Homo sapiens
tgtgctcaggcctggccggacaggtggccaagcaagaggagttcttcaacctgtcccactgccaactggtgacc

SEQ ID NO: 374256 - DNA, 76 bp, Homo sapiens
tgatgccattccagcactggactcatggaggctgagcatttattcagggattttatattggaagacatggatcttg

SEQ ID NO: 374257 - DNA, 75 bp, Homo sapiens
gacatatcgttggacccagaattgaggggttggccggagacctacgacatgaatacctcggagcccaagacggag

SEQ ID NO: 374258 - DNA, 80 bp, Homo sapiens
cgcacccgctggttgtggaccgtctgccaggcaccacagaacaagatcactcaaggtgaaggataatctactaataccag

SEQ ID NO: 374259 - DNA, 101 bp, Homo sapiens
gttgctggaccctgcccaaaggacactgtacagggatgtgatgctggagaactgcaggaacctggcctcactaggtgaccaagaatatggcccaggtgacc

SEQ ID NO: 374260 - DNA, 90 bp, Homo sapiens
taccatcttcctatgcatggaaactcattatgagaagtaatgccatcggtcccctggtagccttgtggctgatttacaaacaaggcgggg

SEQ ID NO: 374261 - DNA, 85 bp, Homo sapiens
aataaggacaaaagccaagaggaggacagttcgctacacagcaatgcatcgagggacaaactctgcctgggcgagtccttttcct

SEQ ID NO: 374262 - DNA, 100 bp, Homo sapiens
gggacggtgtttgccatggaccccaggaatggttacatggagccccactaccatcctgggtgtttggctgacctacagatacaggaaccagaaagacccc

SEQ ID NO: 374263 - DNA, 51 bp, Homo sapiens
ccacttttcacagtctctaacagttacagtgtacagcatgtatgtttctat

SEQ ID NO: 374264 - DNA, 95 bp, Homo sapiens
ctctcccaggccacaagacatttcctgctcggaaccttgtttactaattgtttttagaacttcagccataaaaatgggcagaattttccttgatc

SEQ ID NO: 374265 - DNA, 74 bp, Homo sapiens
cttcctcatcaaattgtgtgactgatatttcccaccttgtcagaaagaaggtctctctgaagaggctatcatgg

SEQ ID NO: 374266 - DNA, 82 bp, Homo sapiens
gggcctgctccagcaacttgaggctgatattgctgagtcagcgcgacatgcagagggtggagccatccctgctgcagtatgc

SEQ ID NO: 374267 - DNA, 73 bp, Homo sapiens
attgccctcaacgaccactttgtcaagctcatttcctggctgctggcaaaggggacgtcccaacgaagagacc

SEQ ID NO: 374268 - DNA, 96 bp, Homo sapiens
tgaggatcttattcagcgctgcctttcttcagcaacagaccctgctgtaaacaaaatggcaccaagcttggagatgttatccttccaccctgggca

SEQ ID NO: 374269 - DNA, 82 bp, Homo sapiens
ccgagggtttgatgaaggtggaggcagcgcggctctcaggacggggaggtttactgcatcgacgcgcggttctacgggaacg

SEQ ID NO: 374270 - DNA, 90 bp, Homo sapiens
agcagagggagcttgccttgaaggacaagaacagcgccgtcaccagcagatccagacatttaatgtggatgcaccatgccagaccgtgga

SEQ ID NO: 374271 - DNA, 83 bp, Homo sapiens
cttcgaacttttgacacggctttggaaacgacgtcatgtgttaggttgcctgttcactctgatcgtagtattggaagttctgg

SEQ ID NO: 374272 - DNA, 90 bp, Homo sapiens
gacgagcggagtccagaggacggagaagacgaggaagaggaggatgaagcggatcccaaacggcagaagacagaaaatggggcatcggcg

SEQ ID NO: 374273 - DNA, 95 bp, Homo sapiens
cctacaggtttgtctcttccagatcagaactgaggaacaaaaacccccatcctgggaaaaatggggaagctggtcttgggcgtctttggtactgg

SEQ ID NO: 374274 - DNA, 90 bp, Homo sapiens
ccctggtcttgctcggccgatgaagtgcagaggtttttttctgatgacccgttggcttcctgaccacctggccgcccactgctatgcgtg

SEQ ID NO: 374275 - DNA, 98 bp, Homo sapiens
tggtggtgaccccgcccagttggcccagaggatctcttctaacatccagaagatcacacagtgtttagctgctgctggtggtgacaatgtcaaataac

SEQ ID NO: 374276 - DNA, 74 bp, Homo sapiens
ggggctactgcgactgcagacacggctgcctgctgtttcccggggagatcatgaaacgaggtcgccttcccagc

SEQ ID NO: 374277 - DNA, 50 bp, Homo sapiens
ccagccagtaccagcgccgtgctggagcagttcaacatgatggagaacgc

SEQ ID NO: 374278 - DNA, 73 bp, Homo sapiens
actttgtaggctccgccaagaggcgccgcaggagaattctgcttggtcagaatcgtgatggcattgtgttcag

SEQ ID NO: 374279 - DNA, 96 bp, Homo sapiens
ggagtaaatagctctgtggagattgtcactagtgccacaggacttgtgccgacagctccacgcccgtgtggacaaggtggatgaagagagatacga

SEQ ID NO: 374280 - DNA, 75 bp, Homo sapiens
gttttgatcatgttgttaccctcggacgtagcccggcttgtattggaaatcatgttgttgatgtcagtgttgcgg

SEQ ID NO: 374281 - DNA, 73 bp, Homo sapiens
tcccaggggcacaaggactgatgaacagttccctccttcatcagtttccctgaaacctgggctcttgaagacg

SEQ ID NO: 374282 - DNA, 88 bp, Homo sapiens
gacatacttgaaacaaaataggaaaatggcagcaaactcttcaggacaaggtggcagtgctccttttggacttttctctaggtttggc

SEQ ID NO: 374283 - DNA, 80 bp, Homo sapiens
cctgaggcagtccgatggggctactttattccagaacaatcacagttgtctgcattcaaaagagcattctattaaagcta

SEQ ID NO: 374284 - DNA, 100 bp, Homo sapiens
cagtaacaacagcgaggaagaagaggacgacgacgacgaggaagaggaggtttctgaggctcatatgacattaacagacaagacacttttcagaaagaca

SEQ ID NO: 374285 - DNA, 85 bp, Homo sapiens
tagagatgtgatgttggagaactacagaaacctggtctccctagtggcagtatctgtgccaaagaggagacggaaaattaaggag

SEQ ID NO: 374286 - DNA, 75 bp, Homo sapiens
caaaggcagtctgttgaggcatctggacaccacacacatcatcagtctgttccttcttggagggaccactcagta

SEQ ID NO: 374287 - DNA, 75 bp, Homo sapiens
ggtggtgcctatgtgaaactgctttctaaaacaccagaactcaacctggatgaaactgattccaagacagcctcc

SEQ ID NO: 374288 - DNA, 75 bp, Homo sapiens
agcctttctggacagaccaacctgtcagtgctgcaagttccatgcctctgcagcggtgcctcatgtttgctgtgt

SEQ ID NO: 374289 - DNA, 95 bp, Homo sapiens
ctatgtacctgttaccactttcaaaaacagatgcaccatcaggaatggaattacagtcatggtatcctgttataaagcaggaaggtgaccatgtt

SEQ ID NO: 374290 - DNA, 82 bp, Homo sapiens
gacccagtccctgagccgcccctacacccacaggagcacgtgaattgcctctgcttacgttcaggccctgtcctaaacccag

SEQ ID NO: 374291 - DNA, 75 bp, Homo sapiens
tctgggcggcgaggaaggcgtctcccgggtccggaaggtccatttcgacacccaggagcacgggcctcaggccat

SEQ ID NO: 374292 - DNA, 75 bp, Homo sapiens
caatcatcaagcacctcctcggtcatcatcagatttgaaatatttaaagtggatacaaaactatttcagcaatgc

SEQ ID NO: 374293 - DNA, 75 bp, Homo sapiens
ataaggacaaaagccaagaggaggacagttcgctacacagcaatgcatcgagaccattaaaaatctcaagtgacg

SEQ ID NO: 374294 - DNA, 74 bp, Homo sapiens
gctcagcgccgagggcgagatcgtgcagactggtcgaattgacaaatcttaccctacagtatgtggccacacag

SEQ ID NO: 374295 - DNA, 75 bp, Homo sapiens
aagttctcagtacccttctcagcctcctgtgaccactgttgatctcgaatacctgatgcatgcaaaacagcagct

SEQ ID NO: 374296 - DNA, 99 bp, Homo sapiens
caagcggcgcgtgctcggtgtcggcagaggagaccgaaaagtggatggaggaggcgatgcacatggctcaggccacagggtcaccacatacatcgccca

SEQ ID NO: 374297 - DNA, 95 bp, Homo sapiens
agaggatatgatcggggctatgatgatcgggactactatagcagatcatacaggccagaagcctgtcttagatgttcatgcagaactagacagaa

SEQ ID NO: 374298 - DNA, 50 bp, Homo sapiens
cttggagtccggacatctgaaacttgaacaaaatccagtctcatagcaga

SEQ ID NO: 374299 - DNA, 83 bp, Homo sapiens
gacgtggccagcgccttggactttctgcataacaaagtaatagttatgcacgagtgcgagctgtggtgatgacccgagatgac

SEQ ID NO: 374300 - DNA, 82 bp, Homo sapiens
cttgcctgtgtcccacttgttcgcggcctatagctgggattctgtccctgaccgtcttcacagtccaggtgatcttgactac

SEQ ID NO: 374301 - DNA, 90 bp, Homo sapiens
gggactgggattggcatgctttagctatctgaacgaaacttccctttggggagttaagttttccagtgaccttcctgatgcaaaatcgag

SEQ ID NO: 374302 - DNA, 82 bp, Homo sapiens
ctggcatattagcgctagccctgcagacagaggtgtgctgacgacctgctacaacagaaaaacctgtttccctccaatcttg

SEQ ID NO: 374303 - DNA, 75 bp, Homo sapiens
gcacctcatcccctggatgggggaccacaagatcctcatcgacagatgaaggatttgggggcagagcacttggca

SEQ ID NO: 374304 - DNA, 100 bp, Homo sapiens
aagtggctcctcctcctttttctaatgccttgtcgtcagaatttcacaccgtggggccaattttttaactcagatcttgctgagaccaggagcatctgat

SEQ ID NO: 374305 - DNA, 50 bp, Homo sapiens
ctgggtccttcccaaggttgaggtgtctcccagtctgctaaagccctaag

SEQ ID NO: 374306 - DNA, 82 bp, Homo sapiens
gtctgtggagtcggggggaggccacagccacggacgccgaggccagagaagctggttatggaaacaaaggacatgctttaca

SEQ ID NO: 374307 - DNA, 98 bp, Homo sapiens
aacttttcgttcagtgggacttgcttcacgtcccaggtccagcgccagccctatcatgaccaaggagtatcaagaccttcagcatctggacaatgagg

SEQ ID NO: 374308 - DNA, 97 bp, Homo sapiens
cgcgagggggacagggtggatgtcatgcagcagtgtgacgatggctggtttgtgggtggctgtggcgtgggaaacctgacagagccagtggccgttt

SEQ ID NO: 374309 - DNA, 75 bp, Homo sapiens
aacaaggccttttccatggatgagccggttgcagccatcatctgccctccaccatccatacctacgtttgcaaca

SEQ ID NO: 374310 - DNA, 100 bp, Homo sapiens
tgtgttgtttctggcccgttggcatcgctgccttctgtctagcccagaagttccggaaccccaaggcatccttgcgtgtgcggctctgtgacctcctgag

SEQ ID NO: 374311 - DNA, 50 bp, Homo sapiens
cctgatttctgcagctctgtgtgaagggacccccgatgatgccaccttac

SEQ ID NO: 374312 - DNA, 82 bp, Homo sapiens
ggagaaacatgcagattatatcgcatcctatggctcaaagaaagatgattatggggtgagaacatcaaaagcatcaaccagc

SEQ ID NO: 374313 - DNA, 101 bp, Homo sapiens
gtttattcctcgttccttcttcagtcctgctcgtcggaggacccggttgccatggtgaaggaaaaagacgagctcatctgcgcctttgtttagaacgctta

SEQ ID NO: 374314 - DNA, 94 bp, Homo sapiens
cgctgactggaggctggcggacaggcgacagcgacctgcggcagcgtgaagcctctgcgggccttcttttcgtcttatttgaagtcattgccgg

SEQ ID NO: 374315 - DNA, 50 bp, Homo sapiens
cgagctggacaccggcaaccggccccggatcattgagaagcagccaggcc

SEQ ID NO: 374316 - DNA, 76 bp, Homo sapiens
gagaaacaataggacggaaacgccgaggaacccggctgaggcggcagggaagtaccactgcccagtgctgtttacc

SEQ ID NO: 374317 - DNA, 108 bp, Homo sapiens
cagagtgtaatgctgtccgccaggccctgcaggacctgctttcggagtacatgggcaatctctccacacaaggagatgcaagtcaggtgattgggcctcttactgaag

SEQ ID NO: 374318 - DNA, 98 bp, Homo sapiens
aacaagctgaaccccaaacccaaattcttcgttctgtgcggcgacctcatccacgccatgccagaagaagaagaggacagtgctccagtgaaagtgga

SEQ ID NO: 374319 - DNA, 50 bp, Homo sapiens
gccgctggtgcccggccccggactgcgggctcctgcaggagatgggtcac

SEQ ID NO: 374320 - DNA, 80 bp, Homo sapiens
acctcatcccctggatgggggaccacaagatcctcatcgacaggacggggaggtttactgcatcgacgcgcggttctacg

SEQ ID NO: 374321 - DNA, 119 bp, Homo sapiens
ccggagctctgtgcacctccactgaaacgcaaggagcagacagaacctacaccatccgtgagcaaagccttctagacaagctcagtggaatctgaagggcccaccccatggaggaatgc

SEQ ID NO: 374322 - DNA, 82 bp, Homo sapiens
tgggatgcttccacagatgtacctgaaaagtcgtcactctttcaccaaggagcctcctcaacaagcccaagagtgagatgac

SEQ ID NO: 374323 - DNA, 76 bp, Homo sapiens
aatcctcccaaagttcttagattacagtgacagctatattgtgcgtgtcaaggctgtggttatgaccagagatgac

SEQ ID NO: 374324 - DNA, 75 bp, Homo sapiens
gctttagcgatcgggagacagccgggcgctgcaagcagcgatggattttgggtggggaagtcctccttgcggagt

SEQ ID NO: 374325 - DNA, 97 bp, Homo sapiens
gctgcgggtgttcttttggggtagtgtctgggatccagtacgagttgaatcattgttcaaataaggtaagaatgattgatgttggctgatattggag

SEQ ID NO: 374326 - DNA, 75 bp, Homo sapiens
tcctttgggagacttcgacttgttggcgactggattatggacagaacttggaaatattgagaataatttcttaaa

SEQ ID NO: 374327 - DNA, 83 bp, Homo sapiens
gcactgctcagtgtcgagtgcaaatgcaggtggtgcaacagttagaaatacagatgaggtcacccgaagacgaaaagttacca

SEQ ID NO: 374328 - DNA, 50 bp, Homo sapiens
gcccttctctgaggttctcaaaaactgaccaaagacttgaccactcaaag

SEQ ID NO: 374329 - DNA, 90 bp, Homo sapiens
gccgaagaagcatcgttaaagtctctcttcaccctgccgtcatgtctaagtcagagagagaaaaggaacagttccgtaagctctttattg

SEQ ID NO: 374330 - DNA, 82 bp, Homo sapiens
ccaccatcttcgacttgagcgaagttttatgcaagcttcgagagctgtgcccaggagtgaacaaccagccctacctctgtga

SEQ ID NO: 374331 - DNA, 97 bp, Homo sapiens
atgttactcatagagtccgactataccacatacagggtcagtttaggggctggtgcaaaggatgagttgcacattgttgaagcagaggcaatgaatt

SEQ ID NO: 374332 - DNA, 96 bp, Homo sapiens
gggctttaccatctttgtggctgtgcttgccaggcctggctccagtgaatatgagaagggcgtagaccatctgacaaatgcaattgctgtgtgtgg

SEQ ID NO: 374333 - DNA, 82 bp, Homo sapiens
caaagataaatccaaatactgcatatcagaaacaacagctgggaatggtgaggaagaaattctgccccactgtaacttgcag

SEQ ID NO: 374334 - DNA, 50 bp, Homo sapiens
gaagattgtgaagcaatagcctaagtaccaaatatgccccaacagcggca

SEQ ID NO: 374335 - DNA, 90 bp, Homo sapiens
cttcctgacccgcttcaagaagcctgctgagttcaccacaggacacagcattgttggttttgccatgtactattttacctatgacccgtg

SEQ ID NO: 374336 - DNA, 90 bp, Homo sapiens
caggaaacctgccatggcctcctggtgagctgtcctcatccactgctcgctgcctctccaggtgctggagacatgtgtgaagaactgtgg

SEQ ID NO: 374337 - DNA, 87 bp, Homo sapiens
tcctcccgcctgccccctcagccctgtggctgggggcagagctcagtctccacaaaccggaggactacccccagactgcagtaagtg

SEQ ID NO: 374338 - DNA, 100 bp, Homo sapiens
aacagcggcacgatggggcctttcttatccgagagagtgagagcgctcctggggacttctccctctctgtcaatgtaacacagccagcctcgaagacttc

SEQ ID NO: 374339 - DNA, 83 bp, Homo sapiens
gaacattcctattgcacaatgatccgaggaatggtgaaggatccatatcaggaagacaatctgaagagcagagatctccaaaa

SEQ ID NO: 374340 - DNA, 100 bp, Homo sapiens
acttatctactggatttccgtagtattgatggtccttttggaataaatcatgggattgagcttcattcagatgtggtggaatatgccaaggaaaaactgg

SEQ ID NO: 374341 - DNA, 76 bp, Homo sapiens
atgtccaggaggagtctccggaaggtagtaagcattaataatgtctttcatctttgagtggatctacaatggcttc

SEQ ID NO: 374342 - DNA, 75 bp, Homo sapiens
ctttccaagccaatgcccaagacattataaacccaccttttgtggtgacattggatgaggtagagctgatccact

SEQ ID NO: 374343 - DNA, 51 bp, Homo sapiens
ccgaggagctggggccatcaaggttacaggcgtcaccaattatgtaatgca

SEQ ID NO: 374344 - DNA, 74 bp, Homo sapiens
cgcggacgaagatggcgaccgccatgtacttggagcactatctggacagagagaagatgactgaggaggaggtg

SEQ ID NO: 374345 - DNA, 83 bp, Homo sapiens
agggatgtgagatttctattcgccgcggaggcggcgacaattagaacgtctcggacccatgtttggtgccctggttgtcagat

SEQ ID NO: 374346 - DNA, 100 bp, Homo sapiens
gtgctgtctgccatgacagaggaggcagctgttgcaatcaaggccatggcaaaataactggctcccagcaattctgtggtgttcttggtcacacatttat

SEQ ID NO: 374347 - DNA, 73 bp, Homo sapiens
ttgggtcctccgagagcagcagcgtgcacgatctgattttctggagagatgtgaagaagactgggtttgtctt

SEQ ID NO: 374348 - DNA, 131 bp, Homo sapiens
gcacactgtgggggtgtcctggtgcacccccagtgggtgctcacagctgcccattgcctaaagaactgctggagccagttctgcttctcggcaaggagcgatttgctggtgtagacatccgtgtccgtgta

SEQ ID NO: 374349 - DNA, 98 bp, Homo sapiens
gaactgtgtttgggagcctcatcattggttatgccaggtacccgcaagatggagtacaagggcagcagctggcatgagacctgcttcatctgccaccg

SEQ ID NO: 374350 - DNA, 74 bp, Homo sapiens
ggaagagaagatcatcgagcatttcaaacgtcattgaaattatgagactatcattcaaatggaagcattatagt

SEQ ID NO: 374351 - DNA, 90 bp, Homo sapiens
actgcaacctccgcctcccgggttgcagtgagccaggattgtgcgactgcactccagcctgggtgacagggtgaaacgccatctcaaaaa

SEQ ID NO: 374352 - DNA, 75 bp, Homo sapiens
tcgatcgcctcgcgccggctgctctttccgggccatcagcatcagcaaagccatcaacacccaggaggcccccgt

SEQ ID NO: 374353 - DNA, 112 bp, Homo sapiens
tgctcttgctaaagaggtagcaagaaagaaaattagagtgaatgtagttgcaccaggtggtggagacactgccacttgctgtgccaaatggaacacggaggataaagtcagc

SEQ ID NO: 374354 - DNA, 100 bp, Homo sapiens
aattgtatcaattctttgtcaggcaaccggacgattcagtggaaagggtggcatggagaaatcgttgtcaaaacagagatgtccgtcagtatgttcaagg

SEQ ID NO: 374355 - DNA, 101 bp, Homo sapiens
ctcaagacctggtccttggagaccattagtcaagccagctattcctgcaccaactgacctgaagttcactcaggtcacacccacaagcctgagcgcccagt

SEQ ID NO: 374356 - DNA, 50 bp, Homo sapiens
ggctcagcctgtgggtacctgcccagagatggggtcttgctatgttgccc

SEQ ID NO: 374357 - DNA, 100 bp, Homo sapiens
caaggccaaggaccccttcgctcacctgcccaagaggtcagaatggcggcagcggagcatcgtcattcttcaggattgccctgctggccctacctcacag

SEQ ID NO: 374358 - DNA, 75 bp, Homo sapiens
cagaagaagggaaggcgcgagtgaggaaaggaggtactgtagaggaggaacccgttttcactagacaagacagca

SEQ ID NO: 374359 - DNA, 89 bp, Homo sapiens
acctggtccagcttcccttcctcaaataaggaaattgacacctggcgtgtggatatcaaagtattgcagagtgccttagcagccatccg

SEQ ID NO: 374360 - DNA, 88 bp, Homo sapiens
ggatggtgcgttgcgtgccctacttcaaggataagggcgacagcaacagctctgccggctggaaggtccaagggtagccaaggatggc

SEQ ID NO: 374361 - DNA, 100 bp, Homo sapiens
tcagccaggggtgtagccaagtagatttggagcaagaggtggtggtggccttcccccgaagaaatttggtaatcctggggagcgtttgcgtaaaaaaaag

SEQ ID NO: 374362 - DNA, 75 bp, Homo sapiens
gtcacaaaacagcagatttcccaagagcagcggaaaatgatccagtcacaggtcgtctcagatgatgccctgatg

SEQ ID NO: 374363 - DNA, 75 bp, Homo sapiens
tcacgtgcccatcagtgacagcaagtccattcagaagtcgggtcacaaatcttcgaagagtgacatatgttgttt

SEQ ID NO: 374364 - DNA, 82 bp, Homo sapiens
cccagagctttcacgaaggcaccgacgtcatcatgctgaccaccaatcagatccgtaaggccaccagcccctcgggttccaa

SEQ ID NO: 374365 - DNA, 100 bp, Homo sapiens
gatagatatgatgactaccgagactatgacagtccagaggttggatggcaagcatgtggtgtttggcaaagtgaaagaaggcatgaatattgtggaggcc

SEQ ID NO: 374366 - DNA, 74 bp, Homo sapiens
ctgggactcatgtccctgcagctacaggagttctttaggtgctgggaatgtagccgatcgtgttttggctcagc

SEQ ID NO: 374367 - DNA, 100 bp, Homo sapiens
ctgggtctgatctggaccattattttgcatttccaggaagtgctctctggcgtggtggtcatatcgagtaaggattcagtccaacaccagggagtgtctt

SEQ ID NO: 374368 - DNA, 75 bp, Homo sapiens
catgaacatgcaagaaacatatactgcttacctcattgaaacaagctgacaacagctgtttgagacctattgata

SEQ ID NO: 374369 - DNA, 101 bp, Homo sapiens
ctaaaggctatacggaagttttaaaggaagaacagtgattattgagcagagttggggaagtcccaaagtaacaaaagatggtgtgactgttgcaaagtcaa

SEQ ID NO: 374370 - DNA, 88 bp, Homo sapiens
gccgaacttcagggtttccaccgttcgttcaaggcccttagccgacagcgagaaactgcctattcagaaacacagaaacaccgagacc

SEQ ID NO: 374371 - DNA, 82 bp, Homo sapiens
agccgatccagcctgcggagcctgtggggcaggcaggttcataggccacttgacacagtgagtggcctcttaaatctctcgt

SEQ ID NO: 374372 - DNA, 97 bp, Homo sapiens
aagatcattaagagagtgattgctcttgaaggagatattgtcagaggatgttaagcaagtttttggacagaccacaattcatcaacatattccattt

SEQ ID NO: 374373 - DNA, 101 bp, Homo sapiens
acttacttagttgtgtgtatagttgcccatcttatatagcaaaagatttgatgaaagtacttcagggagtcaacggtgagagattccagacattctaaatg

SEQ ID NO: 374374 - DNA, 75 bp, Homo sapiens
ccatggcccagattctgccaattcgttttcaggagcatctccagacattccattattgttccattgacctttccc

SEQ ID NO: 374375 - DNA, 75 bp, Homo sapiens
aacttgtactgggatgtgatgatggagaactacagcaacttactctcactggtagagacagggtttcaccgtgtt

SEQ ID NO: 374376 - DNA, 101 bp, Homo sapiens
actgtcattcacaaccccctgaaagcgtactaggttttgacaagcttgcatcatgcgtgagtataagctagtcgttcttggctcaggaggcgttggaaagt

SEQ ID NO: 374377 - DNA, 75 bp, Homo sapiens
tgggatcacctgatcatttcagatcttatggttggtgatgaggcaagtgaattacgatcaatgttagaagttaac

SEQ ID NO: 374378 - DNA, 100 bp, Homo sapiens
gcacctgcacacctggatccaggataacggaggctgggtatcattgcccagtgcctaagatcttttatgttcagctcactgtaggaaataatgaattttt

SEQ ID NO: 374379 - DNA, 101 bp, Homo sapiens
agccgccatgcgacctctccatgcagtcagtggaagtggcgcaagaaccagttgagtcatctctggggcttagtaatggagtaagtgatctttctcctgag

SEQ ID NO: 374380 - DNA, 83 bp, Homo sapiens
cgaaggtggcggcgctgctgctcgggctgctcttggagaaatttaaaagcctgttgattcaagaactttctaaagtatttccg

SEQ ID NO: 374381 - DNA, 100 bp, Homo sapiens
taagcaccagaaagagataacagtaatagcaagaggaccatgctactctggacctgacatgaaacgcagatctagtggcagagaggaagatgatgaggaa

SEQ ID NO: 374382 - DNA, 100 bp, Homo sapiens
ctttaagtccatggaccaggacttcgggtgccaagtcctgccctgccaacttcttggcagctgccgacgacaaactcagtgggttccagggggacttcct

SEQ ID NO: 374383 - DNA, 97 bp, Homo sapiens
tctcgggagccgcaaggcgagagctgcaaagcgttacatccttactattcaaagtgccatccacagacctgctgatgggcagcatgagcatcacctg

SEQ ID NO: 374384 - DNA, 50 bp, Homo sapiens
aggacatggagtatgaaagacggagccagcaccgctctttgaccttgcca

SEQ ID NO: 374385 - DNA, 82 bp, Homo sapiens
ccgtctgcaaggcaccaccatcagctctactgagatgaagaaagaaaaagaatacctgctcagctccagagacacgtaaagg

SEQ ID NO: 374386 - DNA, 75 bp, Homo sapiens
taccaaacttattaataggaataccactattccaaccaagaagagccaggaatccatcaacagcatcaagtccag

SEQ ID NO: 374387 - DNA, 123 bp, Homo sapiens
aagaaacagtcctggacggcaacctcattatccgctatgatgtggaccgggccatctccgggggctccattcagcaatatggcttttgtaaggcaacactcagtgagaagcttggtggggcag

SEQ ID NO: 374388 - DNA, 50 bp, Homo sapiens
ctccccaggatacctcgttaagcccacataaagaagatccctaatagtca

SEQ ID NO: 374389 - DNA, 82 bp, Homo sapiens
tcggtgttaacgtctgctccagctcgcagcccgctgctggacctgcctagagctggaacgttacctccagagcgagccctgc

SEQ ID NO: 374390 - DNA, 101 bp, Homo sapiens
aagagcttctcctcatcaactggggatgattacagttcttcctaaaaaagataaactcaagccatggagggattactgcattacatcaaccctgcacacgc

SEQ ID NO: 374391 - DNA, 99 bp, Homo sapiens
aagacggaaaaagtcgatctggagcttttcccctccccgggcatgctgcagacagacctttccgtccttcatgaacacacgtgtggtagacagatgact

SEQ ID NO: 374392 - DNA, 82 bp, Homo sapiens
cgcagctattgctggacggccagtgggagagcgaggcctgagcctctgcgtctagtaaggttcgtgatcctcgggccaattt

SEQ ID NO: 374393 - DNA, 100 bp, Homo sapiens
tttaggcatatgtatgtgtttggagacttcaaagatgtattccccaccagcagcagtaggtatggctcctcctgtaatgtgagtcaaggaagctctcagc

SEQ ID NO: 374394 - DNA, 82 bp, Homo sapiens
gagtccacaggatcagagtggactttaagatccccgtcgaggtcaagatcaagatccaggtctatttcacgaccaagaagca

SEQ ID NO: 374395 - DNA, 76 bp, Homo sapiens
tgtcaaggagatcggcctcttgaaggaggaggaagccaagaatctggtgagcgaagccatcgcagctggcatcttc

SEQ ID NO: 374396 - DNA, 75 bp, Homo sapiens
cctggaaggaggtcctgctcacaggaaatgcaacctcaccacaagtacaaagaccatctttcatggactactttg

SEQ ID NO: 374397 - DNA, 74 bp, Homo sapiens
ccggaactggtcgaatgaggcacctaaaaattgtataccgcagattcaggcggtgtccgtgggggacgtgaggc

SEQ ID NO: 374398 - DNA, 100 bp, Homo sapiens
ctcctgagtagctgggattgcagaatgtacctgaaacatgggagcccagttaaaatgatggagagttatattgcagttctcacaaaggggatatgccaga

SEQ ID NO: 374399 - DNA, 75 bp, Homo sapiens
cactgctgggccctgaggctgcaccaagtggcgaaggagccggctccaagaccgagtcttgctctgtcacccagg

SEQ ID NO: 374400 - DNA, 98 bp, Homo sapiens
actgcaagaccgggcaaagtcagacaccaagtccacagctttctctttccgggcatcaaagaaaatgcttggacagaagagatgagtactatttccac

SEQ ID NO: 374401 - DNA, 101 bp, Homo sapiens
gcggccgcgcagggagctctcgaggcaacgccggggcgcccgaggtctggaaggcgcaggtaaccacatggtggatattggggatattatatttactttga

SEQ ID NO: 374402 - DNA, 87 bp, Homo sapiens
tacttggtgcaggaaggcagtctttgctacgtacagcaaaagagagacaagagagacacctccaacttcgacaaagagttcaccaga

SEQ ID NO: 374403 - DNA, 75 bp, Homo sapiens
tccacattgagagcaaaatctacaagatgatgcagggaggaggaggacaccatggaggtggaagagttcttgaaa

SEQ ID NO: 374404 - DNA, 100 bp, Homo sapiens
cgtgggcaagggcgagatcctggagagcctgcaggacggcgcggcagagtccccgtacgcctacagtaacgcattgttggaaactgttactacattttta

SEQ ID NO: 374405 - DNA, 82 bp, Homo sapiens
cgggaaggcgggagacgagaagcctgaaaagtcgcagcgagctggagccgccggagacctgcctagagctggaacgttacct

SEQ ID NO: 374406 - DNA, 74 bp, Homo sapiens
gcgcctctcccaggacccgcctggctgcgagatatataactgcgacctccacttcaaggtggcccgagatcgga

SEQ ID NO: 374407 - DNA, 100 bp, Homo sapiens
caccatgcaaaacagaaccttccaaatttccttttccaactaaggtcaagagcaatctgaatccaaatgcaaaggagtttgttcctggggtgaagtacgg

SEQ ID NO: 374408 - DNA, 82 bp, Homo sapiens
cgggcttggagttcgcctcagacgcggtggagccgccggagtctgagaaggagtgagctgagtcgacagaaacttcataccc

SEQ ID NO: 374409 - DNA, 100 bp, Homo sapiens
accagagttctgtgcataacaggatcccataccaaagccctgtgagttcatcagagtcagctccaggaaccatcatgatttatgtggtccagggcatata

SEQ ID NO: 374410 - DNA, 100 bp, Homo sapiens
aacaaattctggtgggagaacaaagctgaggtccagatgaaagagaagtttctggtcactccccaggattatgcgcggtcccatgatgtgaaaaatggag

SEQ ID NO: 374411 - DNA, 75 bp, Homo sapiens
gaaagacgtcgaggggacgattggaatgacaggtggaggcaatgcccagagctgtggcagccaccttgcagccgt

SEQ ID NO: 374412 - DNA, 103 bp, Homo sapiens
gcgatcaaggccaagtatccgccagtcaataggaagtacgagtgaaatcgctgataaagatgggaacaataaagttctgtctttcactatcccctccttatcc

SEQ ID NO: 374413 - DNA, 75 bp, Homo sapiens
cgcactgtctttctcaaggcacgaactgagctgatccttgccccaggtcatcatcaagaatatgggctggaatct

SEQ ID NO: 374414 - DNA, 75 bp, Homo sapiens
ctcaggcaacccaaacgtatggactacctccttttggaacttgtaatagctggcatcgttgagaatgaatggaaa

SEQ ID NO: 374415 - DNA, 74 bp, Homo sapiens
tgggtctggagacgccgtggcagcctgaacggagtgtgcgacggattgggagttggagagaggcgatttcctct

SEQ ID NO: 374416 - DNA, 100 bp, Homo sapiens
ctgctggccgcctggacggctcgggcgctggaggtacggaatggccacatcaaaagaatcactgataatgacatccagtccctggtgctagagattgaag

SEQ ID NO: 374417 - DNA, 98 bp, Homo sapiens
gaaaattaagcagatgctccagtttgagaaacctggatctgcgatctgtttgtgtttgaaattggcacaatggaagaagctggaatttgtgggctagg

SEQ ID NO: 374418 - DNA, 96 bp, Homo sapiens
gggaagaggcccaccctggagtaaccctcactggagaatccagaggatatacgtggcatttcaagtgatcagttgcatagagtactaaaaagtgtg

SEQ ID NO: 374419 - DNA, 90 bp, Homo sapiens
cagtgtccaaccagggctacatgccttatttaaacaggttcattttggaaaaggtatcactggacaggccatggctccacggtcccggcg

SEQ ID NO: 374420 - DNA, 132 bp, Homo sapiens
gagtggggaagctgctaacccgacccggattggcgctgaggtggcccgtggggcagggtgattctggggggcctgtggtctgcaatggctccctgcagggactcgtgtcctggggagattacccttgtgccc

SEQ ID NO: 374421 - DNA, 90 bp, Homo sapiens
cgcagtggtcgcttcttctccttgtgggcaatgggctggtggctggcagctctgactcatccagctctggctctgcctctgactctgagg

SEQ ID NO: 374422 - DNA, 87 bp, Homo sapiens
gcgcgggagccggcgtgggcggcggcaacggggcactgacctgggtgattttaggtgatgggcaagtcagaaagtcagatggatata

SEQ ID NO: 374423 - DNA, 75 bp, Homo sapiens
tgggacgcacagagaccgtgaagattccaagttcaggagaactcgaccggttttctgtctcaactggtctctgac

SEQ ID NO: 374424 - DNA, 88 bp, Homo sapiens
tagctctagcacaattacttggactagtttatatgaaatttgtggatgaggagcttttctctggaatgtatatagatttcatggggac

SEQ ID NO: 374425 - DNA, 75 bp, Homo sapiens
gtcaaggccctgtgcgctaaggccagggagtgcatccgccccaacccttttccccctcgtctcctgtgagaattc

SEQ ID NO: 374426 - DNA, 101 bp, Homo sapiens
agggtgagaagcacggccgcggaagcagataccaggcctccgcccccgccgcggaccctccgcggtacacctttgcacccagcgtctccctcaacaagacg

SEQ ID NO: 374427 - DNA, 75 bp, Homo sapiens
aaatcctaatgacagtctccaaattcgcctccatctgtaccatggaagttctccagcagctgattgtaatgaatt

SEQ ID NO: 374428 - DNA, 83 bp, Homo sapiens
tagctgtgctcgcgctactctctctttctggcctggaggctatccagctcaggatggctaaaggtgaccccaagaaaccaaag

SEQ ID NO: 374429 - DNA, 100 bp, Homo sapiens
actatggaacaacaacttgcagctcatctctattgatgtttaaaaggatgcttaatcgggagctcacccatctctctgaaatgagtcggtctggaaatca

SEQ ID NO: 374430 - DNA, 75 bp, Homo sapiens
aactccaagccaaaatcacagctttgagtgagaaacaggtgtcagctgtgatgcatgtttaaaaggaaattttcg

SEQ ID NO: 374431 - DNA, 100 bp, Homo sapiens
ggtgctgaagggcaccaccaaagcctttgacactgacctggccataagggacacctttgtgaatgcctctcggaccctgtacagcagcagccccagagtc

SEQ ID NO: 374432 - DNA, 100 bp, Homo sapiens
gatggggacggtttcgtccgcatcgaggacttcatccagtttgctacggtctacggggcagagcagagcttttgtgctgccttgcaccaggaactcagag

SEQ ID NO: 374433 - DNA, 49 bp, Homo sapiens
cttcgccacccactattggaccaggtcttttgccaactcctattactca

SEQ ID NO: 374434 - DNA, 80 bp, Homo sapiens
cggcctcaccatgttggtgctgtttgaaacgtctgtgggttacgccatctttaagaatctgaatctgaagctgaagaagg

SEQ ID NO: 374435 - DNA, 76 bp, Homo sapiens
gtgaaaatgaagccagaccgaggtggcacaagatctctgtaaagtagcaggcatagcaaaagttctggtggctcag

SEQ ID NO: 374436 - DNA, 136 bp, Homo sapiens
ctcatcttcagctgttgggagagtccctaagcctcattggacaccgtctgcaggaaactgagacaattggtgtgacctttgcagccatggttggagctggaatgctggtacgatcaataccatatgaccagagccc

SEQ ID NO: 374437 - DNA, 98 bp, Homo sapiens
ccaaaaacgatacgccatctgttctgccctggctgcctcagccctaccagcactggtcatgtctaaaggtcacgctcccgggatcggcgtcggaggcg

SEQ ID NO: 374438 - DNA, 74 bp, Homo sapiens
gggaccacaagatcctcatcgacaggagggtgaggacaaaatcttcttaatcaacaagcttcactccatctacg

SEQ ID NO: 374439 - DNA, 101 bp, Homo sapiens
cagaaaattacctaaatgcactctttcgaaagaaaggcatgcatatcattctgtttcaactccccctgtttaccctcctaaaaatgttgccgacctgaaac

SEQ ID NO: 374440 - DNA, 50 bp, Homo sapiens
gtcggagcctcatggccttttcggcctaatgggattgtttgaaaaacgtc

SEQ ID NO: 374441 - DNA, 75 bp, Homo sapiens
gataacagccatcctattgaaggagaaaactggttgtcctggatgtttgaaaagttggtcgttgtcatggtgtgt

SEQ ID NO: 374442 - DNA, 83 bp, Homo sapiens
atggataaaaataatgtgaggcgacaagcaacaacaatcatagctgctccaggtgctccttcagctccaaggagagggcgtgg

SEQ ID NO: 374443 - DNA, 100 bp, Homo sapiens
agatatgcttattgtggaaactgcagacatgcttcaggctcctctctttactgctgaagctttacttcgagctcatgacccctgaggagttggatgactc

SEQ ID NO: 374444 - DNA, 74 bp, Homo sapiens
gcctttggttctgcatcaaaaatatcaacgatgaaagagtatttgaggccatgtggaagtgttacatcaccttt

SEQ ID NO: 374445 - DNA, 75 bp, Homo sapiens
caaagacccagtgaacaaatccgggggcaaggccaaaaagaaggatgaagcagcaaaggaatttcaggagaaaca

SEQ ID NO: 374446 - DNA, 89 bp, Homo sapiens
gggtgctggccctgtgctggagctgagatctgtatctgtggacctgaatgttgatccctcgcttcagattgacatacctgatgcgctca

SEQ ID NO: 374447 - DNA, 75 bp, Homo sapiens
gagaatcaagaagacccaggaccagatcagtaacgtaaagggagaagatgaggaagagaacaatttggaagtacg

SEQ ID NO: 374448 - DNA, 100 bp, Homo sapiens
cggaggagcccgaccgacccgaaatagccaggcaagcagcacaaataaagcttttgagaaaacttcaaaagcaggaacaggctcgggttgctaaagaagc

SEQ ID NO: 374449 - DNA, 50 bp, Homo sapiens
tatctacaatctcggtactacaggagtgaaagctggacattgaagaagcc

SEQ ID NO: 374450 - DNA, 90 bp, Homo sapiens
cttaaggattaaggatccccaaagtctcagacttcagtgctggagaatctggtaaaagcaccattgtgaagcagatgaggatcctgcatg

SEQ ID NO: 374451 - DNA, 50 bp, Homo sapiens
atgaacctcgagtggtcccagaagctatggaaagggcaaatggaatggag

SEQ ID NO: 374452 - DNA, 100 bp, Homo sapiens
catgtcgggttattcgagtgaccgagaccgcggccgggaccgaggcaaccaaccagtggttcatcccagccgtgaggggggacattccccctgggtgtgc

SEQ ID NO: 374453 - DNA, 115 bp, Homo sapiens
tgcaaaacagccgtcaattgttcatctgattttgatgcgtgtctcattaccaaagctgtggtgccagtgaagaagaggacacatgaaggcttgctacccccagtggaaaatcatc

SEQ ID NO: 374454 - DNA, 116 bp, Homo sapiens
aaagaaggaaaaagaaaaggaaaaaaaggaggaggagaaaatggaagtgaaagtgactgagaccgaagatgatagtgatagtgacagcgatgatgatgaagatgatgttcatgtca

SEQ ID NO: 374455 - DNA, 75 bp, Homo sapiens
cggcgacatggatcccctgttccagcaaacgcacaaggaactctaatgatccaggacaaagaagttaccctggag

SEQ ID NO: 374456 - DNA, 80 bp, Homo sapiens
attgactggaaacaatggcatttacagaaagagtcaacagcagtggcaacaggggaactgatcacagccgcacatgagct

SEQ ID NO: 374457 - DNA, 74 bp, Homo sapiens
ctgccgccatgcaaggggaggacgccagatacctcaaaagatctgcttggctttgaggaagagtggcagtactg

SEQ ID NO: 374458 - DNA, 100 bp, Homo sapiens
gagcagccccggctctgggctacggactatgggcgaatagctctgaccacccggcgaaggtcattaaatttgacggtggagaggaagtacttatttcagg

SEQ ID NO: 374459 - DNA, 106 bp, Homo sapiens
gatgttgcagctcagccctgaagaaaagggaaaacttgctgcggttgctcaagtgtatcggatctgtcgttctggaaagaagacccttctatttagagtagaaaca

SEQ ID NO: 374460 - DNA, 115 bp, Homo sapiens
aagaagttgaaaaacgcttttcacgtcacctggagagatgcacaggtgtctgatgatttgtgagcctcaagtgactactctgtggaatcatctgtccttgcctttgaattagctt

SEQ ID NO: 374461 - DNA, 101 bp, Homo sapiens
ttggagccccggagtggggtgtcggcgcctcattcgggtggagctgagccggagacagctcaccatggatgatgatatcgccgcgctcgtcgtcgacaacg

SEQ ID NO: 374462 - DNA, 74 bp, Homo sapiens
gaacagttaatcctcaatttaagcctgatctaacccctagaaacagtactatactggcaattgctggagaagat

SEQ ID NO: 374463 - DNA, 100 bp, Homo sapiens
gggcaaactgggagacagctgccatccactgactcgtaaaggttccaacctcacagacatctgcactcagctcctcctgcaagggactttgttaaagatc

SEQ ID NO: 374464 - DNA, 100 bp, Homo sapiens
cgagaggaaaggctgcggcgcgcagagcgaggctgcgggaccccaggatgggggacaggaggctgcggggcctcaggctgaccggttccctgatgtgtta

SEQ ID NO: 374465 - DNA, 100 bp, Homo sapiens
ctacgccgcccggtcgccagggagagtgaatacagctagggacgtgaaaggcaggtcagccaaagaggagcaaagagtcatccacctcaatcatgttcag

SEQ ID NO: 374466 - DNA, 75 bp, Homo sapiens
gccggggcaggggcggaggcggaggcagaggtggaggcgctttgaaagtgcctggatcaaagtggaacagctgaa

SEQ ID NO: 374467 - DNA, 89 bp, Homo sapiens
accttgtgggtttcctgtgctaatggacaagactctcaaagatgaagacttttgtaaacgtgtatctttggctactgtggataaaacag

SEQ ID NO: 374468 - DNA, 100 bp, Homo sapiens
gaagcttcccgaaatgagctacataatcttctagataaaccacagttacaaggaattccaaaaataatgttgagtttccatgaagaacaggaagtactgc

SEQ ID NO: 374469 - DNA, 51 bp, Homo sapiens
gtgacaacattggctacattacctttgtcatccgtccttggctcaggattt

SEQ ID NO: 374470 - DNA, 101 bp, Homo sapiens
tgcccttggacaaagcctgaaaccagtaaaggcatgacttcctggcaccacagggaaaatcgggtgcaagcccagaaactatttccccaccaccacttgtt

SEQ ID NO: 374471 - DNA, 80 bp, Homo sapiens
gcagaggcgattgcagaaggagcccaggttattgacccagtggctccacgatatgttgcattactgaagaaagaagtgat

SEQ ID NO: 374472 - DNA, 102 bp, Homo sapiens
cttaaatatctacccatggaataaagagctgtatttgatcagctgccactgcagagccccgccatggaagacacgccgttggtgatatcgaagcagaagacg

SEQ ID NO: 374473 - DNA, 97 bp, Homo sapiens
cggccctgcggacccggcaggtgactttggttgctccttgagggcaggacagttcttatggctttatccgttgcgtaagcacagagaggtctgcgag

SEQ ID NO: 374474 - DNA, 90 bp, Homo sapiens
caacagtatgcacagagagataagaaacatgaatattggtttgctgtgccacaagaaagggaatacagaagcagatttacaaatgaagag

SEQ ID NO: 374475 - DNA, 87 bp, Homo sapiens
gggaaattattttgggtcttcttcttaatcccatatctggacatctggaacatccatggttgactttggcagaatatcatgaacagg

SEQ ID NO: 374476 - DNA, 143 bp, Homo sapiens
ggggcctgttgcctgggggcacacaggtgctggatggtacctcggggttctctcctgcccccaagctgggaaattctgaaacagccacacctacaaatgtagacttgcctcaggtcatccccaagtctgagaacagcagccag

SEQ ID NO: 374477 - DNA, 101 bp, Homo sapiens
tggcggcgcagaggaggagcttgctgcagagtggcagatgattctggaccagatgaagcctgaggagccttccagctctaagatagcaggataggagactt

SEQ ID NO: 374478 - DNA, 76 bp, Homo sapiens
gcctactcaaatcctttctgagggtggaacggcacatgtgtgatggggacattgttatcttcaaccggcagccaac

SEQ ID NO: 374479 - DNA, 90 bp, Homo sapiens
cagagaaccggcaccagccccccagcacaaactgctttggtggaagatcccgctaaagcagcagcacacccttctgtacaaggtgaatgg

SEQ ID NO: 374480 - DNA, 100 bp, Homo sapiens
tgactgaggaccatggaaaggtgggagaggacgtgcggcttctctgcttcctttgaacagagctctaggtgaacagccatataccaggaataggatacca

SEQ ID NO: 374481 - DNA, 75 bp, Homo sapiens
tctgggttctcactggccattggcttctcatggatgcgatgaagaacgatacagatacagggaatatgcagaaag

SEQ ID NO: 374482 - DNA, 95 bp, Homo sapiens
agagaagcagaaacttattcagcaatacaaggaggcaatgagcaacaaggcctgcaggaacttgtaatagctggcatcgttgagaatgaatggaa

SEQ ID NO: 374483 - DNA, 83 bp, Homo sapiens
ctttgatgaggacgcggagccgcggcggagccggaggaagctgatggtcatcttttccaaggcagcgggtggcatgagacgtg

SEQ ID NO: 374484 - DNA, 99 bp, Homo sapiens
gcaacaggactgtgacctgagctgtcagatcaccattcccaaagacatatctgaagagatggattaagaatgctttggattaaggattgtggagcacat

SEQ ID NO: 374485 - DNA, 100 bp, Homo sapiens
tgaccatagccagagaacagccctccatcttgcagcccagaaggtgatcttattcctgataatgttggttatgcgcaaacgtgttgctcttaccatcgcc

SEQ ID NO: 374486 - DNA, 75 bp, Homo sapiens
gatagttcgtgtgacaaacagagatatcatttgtcagtataaatcaaagccattctgtgaaaaactgctttcctg

SEQ ID NO: 374487 - DNA, 51 bp, Homo sapiens
gaaaaaatggttgacctcacccaggctgaactccagtgcacccagttagac

SEQ ID NO: 374488 - DNA, 100 bp, Homo sapiens
gtttttcgctttcgctggctgtgcttgcggagcactttgggtttcatttgtaaaggagccggagccccaggctcaaactgtccaggttgctgaagttgaa

SEQ ID NO: 374489 - DNA, 100 bp, Homo sapiens
gaacacgagaagatggtggagaaaatactcatccatagggcagagcggcttgggtaaatccaccttaatcaacaccctcttcaaatccaaaatcagccgg

SEQ ID NO: 374490 - DNA, 100 bp, Homo sapiens
agcagagacgtcatacttggaaatggctgcaggttcagatgtggccatgaggtctgccggaagtgacttgttggtgttatctcctgagttaaaatgtgaa

SEQ ID NO: 374491 - DNA, 75 bp, Homo sapiens
cagtgatcagagattgcgccctcagcgaacatgtatcggcaagcagtgtaaacggaggacttggggaaaaaggac

SEQ ID NO: 374492 - DNA, 100 bp, Homo sapiens
aatctacccctgcaggaaaccaagaaatgatttgtgacattatttccaaatgggaacaggcttccaaagaacagcagcctggaaaatgtgaaggtacaag

SEQ ID NO: 374493 - DNA, 100 bp, Homo sapiens
ggagccgatgtcactcatccacctgctggtgatggaaagaagccttctattgctgcttttttccactactcccaagggcaagtgtaccttgggaattatc

SEQ ID NO: 374494 - DNA, 80 bp, Homo sapiens
ctcaagttgtttggctaaattcttcagtgcacttacatttcaatcgaccaagttccaaggacctatgccataatgataag

SEQ ID NO: 374495 - DNA, 100 bp, Homo sapiens
ctgatgacaagggccgcacagctctacactttgcctcatgcaatggcaatgaccagattgaggctggctatgtggctacccccatagctatggttcaggc

SEQ ID NO: 374496 - DNA, 75 bp, Homo sapiens
cggccctgtattttcccaaaaagtcatcttttcttgagtcccttctgcaaccagagtctttaaggttggattggc

SEQ ID NO: 374497 - DNA, 100 bp, Homo sapiens
cggggaggcagcgcgggatcccagcctcaggcgtgcgcggacggtgtgcggctcgagaggagaatgtggccactttccgaggctcagagtatctgtgcta

SEQ ID NO: 374498 - DNA, 75 bp, Homo sapiens
gaaggccagcctgttgtgtccgttttgaagatctccagcaccctgccggtggcactactgagagacgaggtgcca

SEQ ID NO: 374499 - DNA, 100 bp, Homo sapiens
ccgacccgcgccctgctccctctcagcacctgggcggacggaaacccagcgtttgctggcagaaccagttcctggcatcaaagccgaaccagatgagagc

SEQ ID NO: 374500 - DNA, 90 bp, Homo sapiens
atatgcctgctaacatggataagcatgccctgaaaaagtatcgtcgagaagcctatcatcggtagcagtagctgatgtgcagtttggccc

SEQ ID NO: 374501 - DNA, 100 bp, Homo sapiens
ccagcccctctccagctcgaaatctgattcgcctttgccagtctcatctcgtgtctgctttgttaagttccatgatccagactcagcagttgtggcacag

SEQ ID NO: 374502 - DNA, 83 bp, Homo sapiens
cgcaaccccagatccatttacactttacacctgacatttaccccggtaactgctgggcatttaaaggctcccaggggtacctg

SEQ ID NO: 374503 - DNA, 90 bp, Homo sapiens
ccagcctgtcgtgatcgacaacggtgtttgtgaaccgaagtttagcaatggaaaagataaagtgttttggttttgatatggattataccc

SEQ ID NO: 374504 - DNA, 83 bp, Homo sapiens
cccgccgacgcctcagccgcttggggcccgcacggaccctctacttcacaattctgtggtgttcttggtcacacatttatgga

SEQ ID NO: 374505 - DNA, 78 bp, Homo sapiens
tttgttcaggaaccaccagtgacagacaacagccaactcagtttataaatccagaaacacctggctatgttggatttg

SEQ ID NO: 374506 - DNA, 51 bp, Homo sapiens
tgttaaggattccaagtaactcttatttgaacatgagcctttgactgctcc

SEQ ID NO: 374507 - DNA, 99 bp, Homo sapiens
ttagccacattgtcatatgctagtgatctctataatggttccagtatagtctctagcaaatgcagccctgaggatttggctactgcatataacaacagg

SEQ ID NO: 374508 - DNA, 74 bp, Homo sapiens
agagatctacaaccttggagcccagagccacgtcaaagcgaaggaggtgtggtcaaacgccgacctgacggaaa

SEQ ID NO: 374509 - DNA, 90 bp, Homo sapiens
actctggagggattctggcatcagggaggctttcagccggagaagcgagtttcagctgtttggaaattttagcattcaggtgccaggaat

SEQ ID NO: 374510 - DNA, 87 bp, Homo sapiens
gcgctaaccctttactcgcgacctttcgcttcaccttcacagcagccctgcgagaccaagagcagtgatgaccttttagctggaatg

SEQ ID NO: 374511 - DNA, 82 bp, Homo sapiens
agggcgacagcaacagctctgccggctggaagcaaattgtggctactaatttgccccctgaagatcaagatggctctgggga

SEQ ID NO: 374512 - DNA, 101 bp, Homo sapiens
gtcgggacacttctgcaaccccgcagagcgcatccatcaaagctttgcgcaacgccaacctcaggcgagatgggcagcccaatggatccaatggtgatgaa

SEQ ID NO: 374513 - DNA, 95 bp, Homo sapiens
gacagcccccagacctggagaggatccgcacacttctggagctgtataagcgttttcagttgctggaggggccccctgagtcgatgggccgaggc

SEQ ID NO: 374514 - DNA, 100 bp, Homo sapiens
ctcgaagagtggctgctgttacaatggcaggcagcagattctgagtttgggcatggacctgcagttggaatggatgaagttggaagatttccaaaagcac

SEQ ID NO: 374515 - DNA, 90 bp, Homo sapiens
ctccctggaagcctagaaatgggccatgactgctgcccaatgctctttaactacgatgaccgcggctgcctgaccttcgtctccaagtta

SEQ ID NO: 374516 - DNA, 49 bp, Homo sapiens
gccagatagtaccatgatagctgtatcaatcagaatcaagctttgcgac

SEQ ID NO: 374517 - DNA, 98 bp, Homo sapiens
ttgcacatgacctgacatttagacaaattcaacacccaacagcttccttaatagcaaaggtagcaacagcccaggatgatataactggtgatggtacg

SEQ ID NO: 374518 - DNA, 75 bp, Homo sapiens
ctccgcagccgcagaggaggagcgcagcccggcctcgcctgtaccagagattaaagttgtgtcaaatctgccagc

SEQ ID NO: 374519 - DNA, 100 bp, Homo sapiens
ttctcacgacgggccgagcctgccactgtgatggcttggacaacagtgtagcttcccccagcacaggtgacgatgatgaccctgataaggacaaaaagcg

SEQ ID NO: 374520 - DNA, 100 bp, Homo sapiens
tctgatttggggatctctagcctacaggatggcttggccttgcacataagatgtcaatgccaatcgcatcatcccgaggagacgtggagagtgtccgccg

SEQ ID NO: 374521 - DNA, 82 bp, Homo sapiens
agaaaaggcaacatcctgtcacaggccatgctctggcaaaaacatgtgaacgattggaagaacagctaaatgacctaacaga

SEQ ID NO: 374522 - DNA, 90 bp, Homo sapiens
ctgggatatgtttggtgaaaaaagcctgcattcattggtaaagaaaagaatttctgcgtggaaatggcttagctgctgggaaaatgaaca

SEQ ID NO: 374523 - DNA, 100 bp, Homo sapiens
tggcaccttcctgttcaactcccctcaccagcgagtgaagcaaagcacggtgaaatgacaatggatgctctgttggctcgattgaaacttctgaatccag

SEQ ID NO: 374524 - DNA, 50 bp, Homo sapiens
gagtgtatgacaacatcgggatcctggttctgaagaagatctacggaagg

SEQ ID NO: 374525 - DNA, 82 bp, Homo sapiens
ggcacagttattcgcaagtggaatggagagaagatgtcttacctaaattcattcggctcctaaagaagtagcagtgtccaag

SEQ ID NO: 374526 - DNA, 89 bp, Homo sapiens
tgaagtcagttgttgcatcaaatacttcatatttggcttcaatgtcatattttggcatccagagctgctgttggcggattgtacccacg

SEQ ID NO: 374527 - DNA, 98 bp, Homo sapiens
ggctcccgcaccatggaggaggacgacagctacgaacccttaggagaaatcttgagagtggacagcaattgtgaagatcgccagagagttctgtgttt

SEQ ID NO: 374528 - DNA, 101 bp, Homo sapiens
ttgggttatatttgatgaaattcattatatgagagattcaggtcaagagcaatctgaatccaaatgcaaaggagtttgttcctggggtgaagtacggaaat

SEQ ID NO: 374529 - DNA, 82 bp, Homo sapiens
tgcgttgcgtgccctacttcaaggataagggcgacagcaacagctctgccggctggaagatcctgcccggcctgtacatcgg

SEQ ID NO: 374530 - DNA, 98 bp, Homo sapiens
tttgcaaatcattcagtgaatcccaactgttatgccaaagtgcaactgcagatagaagacctgactcgtaaactgcgcacaggagacctgggcatccc

SEQ ID NO: 374531 - DNA, 75 bp, Homo sapiens
ccattcagaaaggaaccagtgtctcccagaagtgtgtactgtaagcacggtcacctgtgtcccatcgacaccggc

SEQ ID NO: 374532 - DNA, 88 bp, Homo sapiens
agcctcccgaatagctgggattacagctcatatgttagatttgatatcattcgaaggatcctaaccaaggtttttggatgcagcatag

SEQ ID NO: 374533 - DNA, 83 bp, Homo sapiens
gggccgtgccccagatgcccaccgggatggagaaggaggaggaatcggttactcactataaacaatatccacccaacacaagc

SEQ ID NO: 374534 - DNA, 96 bp, Homo sapiens
gagaaggatgaagccacacaagggaagatgtgccacctccaaagagccgtacgtccactgccagaagctacatcggcagtaatcattcatccctgg

SEQ ID NO: 374535 - DNA, 100 bp, Homo sapiens
caacctcactccacagcagttaatagatctccggcataagctcaatcttcgggtcctgccgccacccccactggtgcctgtggttccggtccgtcttgtg

SEQ ID NO: 374536 - DNA, 96 bp, Homo sapiens
tgcaatgtttttgtggaacatggtgctggagaatctggtaaaagcaccattgtgaagcagatgaggatcctgcatgttaatgggtttaatggagag

SEQ ID NO: 374537 - DNA, 75 bp, Homo sapiens
aaaaacagctcattctcctaatgttttccttcagcaaggacaaagaatgccagctgatgaagaccgagaggccgc

SEQ ID NO: 374538 - DNA, 90 bp, Homo sapiens
cgtctgcggaagtgcagctgcctcagttcttagcgcagatggaatggggcgagtccttgctcaagatgtatatgcaaaagacaatttacc

SEQ ID NO: 374539 - DNA, 100 bp, Homo sapiens
accacaggcccgagttttcgtcctgcctgcagaaggctcatgagttcctgaggctctcacagttccagatttcggaaggttcacgagtgttgccgacacg

SEQ ID NO: 374540 - DNA, 83 bp, Homo sapiens
ctccgccatgacgaaatcatgtttgggttccgggcgcggatggcgtcggggcgccccgaggagctgtgggaggccgtggtggg

SEQ ID NO: 374541 - DNA, 75 bp, Homo sapiens
tgagagctccccaggggagttctctgtgtctgtgaaacaggggcaagtgtccgagtggtgaatcagctacttaca

SEQ ID NO: 374542 - DNA, 100 bp, Homo sapiens
ctcccttcatgtctgggtcatgacgtccatgaccctgcagtggcacttgtatgagatggcacgcaacctgaaggtgcaggatatgctgcgggcagaggtc

SEQ ID NO: 374543 - DNA, 100 bp, Homo sapiens
cgagagcagtggatccgggccaagtacgagcgacaggagttcatctacccggagaagcaggagccctactcggcaggtgggaccagggagattggatctg

SEQ ID NO: 374544 - DNA, 100 bp, Homo sapiens
atccggcctcggcctcctaaagtgctgggactgcaggtcacgacatttagtgaggtttaagtggaaaccctgcagatttagaaagaagagaagcagtgtt

SEQ ID NO: 374545 - DNA, 83 bp, Homo sapiens
gaacagaacaagaggacaggaggtgtcgttccaggtgctggagaatctggtaaaagcaccattgtgaagcagatgaggatcct

SEQ ID NO: 374546 - DNA, 74 bp, Homo sapiens
gcccggcaagatgaagagacagtgcggaagcttcaggccagtgatgtcttggcattgcccattttcaagcagga

SEQ ID NO: 374547 - DNA, 94 bp, Homo sapiens
cggagagcggcctgcgggcgatcgggccgaggtgctggagaatctggtaaaagcaccattgtgaagcagatgaggatcctgcatgttaatgggt

SEQ ID NO: 374548 - DNA, 75 bp, Homo sapiens
ctctaacgttttagaaaatcataacaagcggttctctaccctgtaaagaatgtcaagctgtcagctgaggtggag

SEQ ID NO: 374549 - DNA, 80 bp, Homo sapiens
ggagaagcagcgcctgttcccggggcagatccaggttcaggtgcagagcattgtagaccaaggagccatggataggagaa

SEQ ID NO: 374550 - DNA, 114 bp, Homo sapiens
cctgtcttcagatcttcacagcacagttcctgggaaggtggagccaccagcctctccttggaacgtcaaggtcgtgggaaataaaaggcagttctacacagactgcagcaacgg

SEQ ID NO: 374551 - DNA, 75 bp, Homo sapiens
aatatatctgttattttacctactgttcatgaggtggatattttcaggcatgtagaagtccaggtgtttggtgat

SEQ ID NO: 374552 - DNA, 75 bp, Homo sapiens
tggtcaaacaagcaactcttcttggatgccattcaccctacagaaggtcagatgtaccaacagtaccagcaacag

SEQ ID NO: 374553 - DNA, 98 bp, Homo sapiens
ctgatggggaagcgagtgggaggtgagcagtaggtcatccagtcccagtgtcagaatgattactacctcaggaccaacctcagaaaagccaactcgaa

SEQ ID NO: 374554 - DNA, 50 bp, Homo sapiens
ggctcaactatctgctcagagaggagcccgtggctggtgcacagacggac

SEQ ID NO: 374555 - DNA, 100 bp, Homo sapiens
gccgtgctggtcatgcaggatcccagcatgaaccttcaggtggccaagactaagcagcagattgaggagcagcgggtgcaggtgcaggtggtggagcggg

SEQ ID NO: 374556 - DNA, 75 bp, Homo sapiens
ccttcgaaagcagctaggccaggaccctttctttgataaggagggttcctgcccccaggtgaacattaactttcc

SEQ ID NO: 374557 - DNA, 100 bp, Homo sapiens
cgcttccggtcttagctggacccgtctgggagaaatatgtgccgtatcacgaatttctaagaaagaaattggtcggtgttttaaacttattttgaaagcg

SEQ ID NO: 374558 - DNA, 74 bp, Homo sapiens
agtcagtcattttactgtcaagacatttcttcggcattctgcaacagacttgtgtatgcggatacctgcttcag

SEQ ID NO: 374559 - DNA, 75 bp, Homo sapiens
cattacagcctgttgactccaattcagaggttcaggatacccagagttatattgacgaatgtcctgggaacggag

SEQ ID NO: 374560 - DNA, 100 bp, Homo sapiens
atggcccacatcaggacagctgttccttggccatcccaaagctattctgggggcaacagaggtgacaatctccaatagacttgtgtcttcaccttgctgc

SEQ ID NO: 374561 - DNA, 99 bp, Homo sapiens
gcaaaagttccttctccaccagacgagcaccaagaagctgagaatgctgtttcctcaggcttctcggccggcactgagtacatggacctgcagaatgac

SEQ ID NO: 374562 - DNA, 82 bp, Homo sapiens
gaggccggattgtactgtatggggactccaattgcttggatgacagtcaccgacagaaggggagcatttcctgaagacgtag

SEQ ID NO: 374563 - DNA, 100 bp, Homo sapiens
ctcagggttcaacttgctacaagtattggcaaccctccagtttctttacttcaacagtgcaccaatattctttcacaggagcagacgcctccgcctagac

SEQ ID NO: 374564 - DNA, 74 bp, Homo sapiens
ccgaggcgcaggtggcgctgggatgataatgaagataattcaaatgatgggacccagccatccaaaaggaggcg

SEQ ID NO: 374565 - DNA, 82 bp, Homo sapiens
gctgttcagaccgcgctccgccgagatttggtgcttccagatgtgagttatcaggtggaatccagtgaggaggatcagtctc

SEQ ID NO: 374566 - DNA, 100 bp, Homo sapiens
ccgccctccgcggccgccccctggggatccagcgagcgcggaagctctacagaggatcatttcaactctggcaaataaaaatgatgaaattcagaacttt

SEQ ID NO: 374567 - DNA, 100 bp, Homo sapiens
ggagacctggagctgcatttgggtgccctccatggccaggaggacacccctggtggcctgcttggtacattacaggaatatcagaagagaatgaaaaaac

SEQ ID NO: 374568 - DNA, 83 bp, Homo sapiens
gttagcagccaaaattggaagtgacctcaaaaaacacgaagtcaagcatttaattgacggtctcgctctgtcacccagactgg

SEQ ID NO: 374569 - DNA, 88 bp, Homo sapiens
ggaatcaaagataaatccaaatactgcatatcagaaacaacagatagaggaaagggtcgccagagacaagccattttgggagaacacc

SEQ ID NO: 374570 - DNA, 80 bp, Homo sapiens
cccggctctgcccgcccttcgaaagtccagggtccctgcccgctaggtgagaagccctaccactgcaactgggacggctg

SEQ ID NO: 374571 - DNA, 75 bp, Homo sapiens
ttgatgatttagttgattctctgaagggaaatgtttcaacgtgcgcaagcgttgcggcggcgggcagaggactac

SEQ ID NO: 374572 - DNA, 115 bp, Homo sapiens
catgttcacgcacgggatccagagcgccgcgcacttcgtcatgttcttcgcgccctgcaaaatgatgcttcaacacccaggccaggtctctgcctcggaagtgagtgcttctgcc

SEQ ID NO: 374573 - DNA, 74 bp, Homo sapiens
ctgctcttggctctcaacttattcccttcaattcaagtaacagctgctctgttaaaagcgaaaatgaaacaatt

SEQ ID NO: 374574 - DNA, 98 bp, Homo sapiens
cagggagtgcatcaaaggtgtgaacacagggaatgaccctgcataaaaaggcagctgaagatagactggcaagcacaggctcagggcagtcatttctg

SEQ ID NO: 374575 - DNA, 75 bp, Homo sapiens
gtccacgcaggagatccatgagaaggtgatctgtgaaaatggttcgctattcacttgacccggagaaccccacga

SEQ ID NO: 374576 - DNA, 73 bp, Homo sapiens
gccagttgggatcaaatgtgagcctatggatcaagcggaagccctgaccaggcatggagtatctcacaaagta

SEQ ID NO: 374577 - DNA, 75 bp, Homo sapiens
ggtctgacttcaagttctacgccaagccatactttctcagttctccgggagatgttgcataaccactccttcgtg

SEQ ID NO: 374578 - DNA, 83 bp, Homo sapiens
ctatcgtgaggttcagctgatgaagcttctgaaccatccacacatcataaagctttaccagtttgcctgagaatacagatcaa

SEQ ID NO: 374579 - DNA, 88 bp, Homo sapiens
cagccgggaggacatctacaagcgggtgactgctggcttctggctgccattgcctccctgaccctgaatgaagagctgctttaccggg

SEQ ID NO: 374580 - DNA, 83 bp, Homo sapiens
tccacaccgacaccatctggaggaggcgttgccgtgaggcatgattatgatatgagggtggatgatttccttcgtcgcacaca

SEQ ID NO: 374581 - DNA, 100 bp, Homo sapiens
tcaggatttacttgaaatgaaaggagattccaacctacttcagctattgacctgaaaagtggttctggaaaagtgtaccaaggccctgcaaaaggtgctg

SEQ ID NO: 374582 - DNA, 101 bp, Homo sapiens
acaaagtattgtctgaaaaagctcaaaatgaggaaattctgtatgttcttcgccattatattcagaaagaatcttcaagagggagacatagggaaaaggaa

SEQ ID NO: 374583 - DNA, 48 bp, Homo sapiens
taggctccgggccccggacctagtttttcccaggtcatgagtctcggg

SEQ ID NO: 374584 - DNA, 50 bp, Homo sapiens
agagatgatcatcaccaagcagggacgttcccagtgacctgacagcagag

SEQ ID NO: 374585 - DNA, 75 bp, Homo sapiens
aacattccaacacataaaaattatttatccaacagctcctcccagaccccagttattaaagcttttggcatcttg

SEQ ID NO: 374586 - DNA, 101 bp, Homo sapiens
gcagagagagtgcgcagaaggattccgggagcacagttccgccgagccagaaatgtacacacaggagagctggctgcagtaaaaatcattaaattggagcc

SEQ ID NO: 374587 - DNA, 100 bp, Homo sapiens
tcgcggcgtctccggggaaagccgtggccccgagggcggatccgaggtgcagaggccaagaccgttttgcccaagaaggagaaaatgaagctgaggcgtg

SEQ ID NO: 374588 - DNA, 83 bp, Homo sapiens
cttgctcctcgccgcggcggggactgcagggcaggattcatcaaattgaatatgcaatggaagctgttaaacaaggttcagcc

SEQ ID NO: 374589 - DNA, 101 bp, Homo sapiens
ctcaggatcaggtgcgggaggttaagcggcacatcaccgtgcgcctggactggggtaatgagagagtgatgggagtgagaacctgtgaatctagatgtctg

SEQ ID NO: 374590 - DNA, 82 bp, Homo sapiens
gtttaaggagctgaaagcgcggaggctgtgcagaaggtatcctgcagaccatgaactgagcactgttcccagaccgttcatg

SEQ ID NO: 374591 - DNA, 100 bp, Homo sapiens
gctctgcggggtcatggtgtgcttccgcctcttcccggttccgggctcagggctcgttctggtctgcctagtcctggggacctaatacctatcattgctg

SEQ ID NO: 374592 - DNA, 100 bp, Homo sapiens
ggcggggaagagaggggaggagagctctgagtgggaagcggagccgggggcctgggacccgtcgcgtcagagccagatatggccgcgtggaaagtgtcaa

SEQ ID NO: 374593 - DNA, 100 bp, Homo sapiens
tgcgtgcagccgcaccacattggcgtggccgtcaaggagctggacctctacctggcctacttcgtgcgtgagcgagagcggttgagcatgaaagaccagc

SEQ ID NO: 374594 - DNA, 100 bp, Homo sapiens
tccagatgctggatgacacccaggaggcatttgaagttccaagcctggagaaagttcttgtggaattcagtcacaaggagttgtttgatttctataacaa

SEQ ID NO: 374595 - DNA, 96 bp, Homo sapiens
attcagttgcacatccccacatcaatgcactgccaatgaagctgttgtgaaggcagagcagcatctgctgaagagacagaaaccagccccagaggt

SEQ ID NO: 374596 - DNA, 100 bp, Homo sapiens
cacaaagaattatggtaaaaccatccttacaaaggttcgtcacaaggcatcgcagaaggtttatgctatgaagcttcttagtaagtttgaaatgataaaa

SEQ ID NO: 374597 - DNA, 78 bp, Homo sapiens
tgacacaaagctgctagcagaaaatcaaaacgctgattaaaagaagcacgagattttattccctcaaagttgccccca

SEQ ID NO: 374598 - DNA, 100 bp, Homo sapiens
ccggcggcgctggaggagcgaggcagctgtactaggactgggaacgggacctgatcccaaccttgaagaaagtcctaaaagaaaaaatattacatatgag

SEQ ID NO: 374599 - DNA, 90 bp, Homo sapiens
cccagctccagcctctctcatcttgggaatctgcgtcagaagtcactcgcagtcccgtcagcccagctgtcgcctggttgggcccggaaa

SEQ ID NO: 374600 - DNA, 74 bp, Homo sapiens
tccagatgcagctcgtggatacgaaggcgggatagccctggtcctttctccagactatggcaaggagtctcagg

SEQ ID NO: 374601 - DNA, 74 bp, Homo sapiens
cgtctttttgccacaaaaccagaacttcttgactataaggccaacagatgttctccagacagtcaagttattag

SEQ ID NO: 374602 - DNA, 75 bp, Homo sapiens
tgggatcgagatcctgccgttgcctgtcatgggagggcaggttgaaccagccaaattttcgagacagctcacggc

SEQ ID NO: 374603 - DNA, 100 bp, Homo sapiens
aaaaaggacacaagtgcgaatgttaaatcagctggagaaggagaagtggagaagaaatcagtcagccgcaggttccttgcattgactccatggagagtat

SEQ ID NO: 374604 - DNA, 90 bp, Homo sapiens
tggatggaaagaaactaattttcaggatcacagtcaccttctatatagcaccatccccaggatgcaggagccggggcagattgtggagac

SEQ ID NO: 374605 - DNA, 100 bp, Homo sapiens
tcagagtgaagatgagttgacaccttttgacatgagcatccaggatgacgtcatgatgccccagcgggtgaggctgcaacacgaggctgccgttcagcac

SEQ ID NO: 374606 - DNA, 100 bp, Homo sapiens
tccactcccttccagcttcagtgccacttggaaaatgttcatagtccctatgaatctactaatggaacagattaaacgtgcaaaccgcctttatactaat

SEQ ID NO: 374607 - DNA, 75 bp, Homo sapiens
gcctcccgggctccgggaaaactacactggccaggtgcaccccctgtggatgtgctccgggccctgaggttcccc

SEQ ID NO: 374608 - DNA, 100 bp, Homo sapiens
cgcacttcgtcatgttcttcgcgccctgacatccacgacagcgatggcagttccagcagcagccaccagagcctcaagagcacagccaaatgggcggcat

SEQ ID NO: 374609 - DNA, 100 bp, Homo sapiens
tgctacccggtgtactggaaccgatgctgatatgctaactggtgatgagcaagtatggaaggaagttcaagaatccctgaaaaaaattgaagaactgaag

SEQ ID NO: 374610 - DNA, 100 bp, Homo sapiens
tatagaaggttctttgttcctgaagatgggtctccgctctttcgacgtgtagcagcagctttgccgggaatggaaagcacacaggacagaagcagagaag

SEQ ID NO: 374611 - DNA, 98 bp, Homo sapiens
aaggaatgggctaaatcaactggatatgatccagttaaactttttaccaagcttctcaataggtttggcatggacaagatctatgaaggccaagtgga

SEQ ID NO: 374612 - DNA, 75 bp, Homo sapiens
ctggataagatgaccttcagtgtgctgctcaaaaacagttgaatgcaatgataacagaaagcaagagaagtgtga

SEQ ID NO: 374613 - DNA, 100 bp, Homo sapiens
ggagttgctgcccttccggagtccgccccgtgaggagaatgcaacacttcttgttgctgtaaatgaacttcgtaggaatgctcgggctaaaggaatgtca

SEQ ID NO: 374614 - DNA, 101 bp, Homo sapiens
cagctgcggatctacgagatcgaggacaggacgcggatgcagatgttggacaaatttcccatggaaggaggacagaaggaccccaagcagcggatcatccc

SEQ ID NO: 374615 - DNA, 100 bp, Homo sapiens
gctgtgtcggaacggggtgaaagagaagcacggctccgactactccaaggctccgtatgtggatgtgatctgtttgaacagctactactcttggtatcac

SEQ ID NO: 374616 - DNA, 101 bp, Homo sapiens
tggaacagtaaccgggcttgtgagagggctctgcagtataaactaggagacaagatccatggattcaccgtaaaccagagttgaagtattgataacaccaa

SEQ ID NO: 374617 - DNA, 90 bp, Homo sapiens
gacggtgcaggccggagcggcacctacgtcctgatcgacatggttctcaacaagatggccaaagggtttgtggatgcacttagatgtttg

SEQ ID NO: 374618 - DNA, 90 bp, Homo sapiens
ggggagggcactctggctctgccctggctgctgaacaaggagctgccctgcatcaacaccgccgctacctgtctgaggaacccgagccct

SEQ ID NO: 374619 - DNA, 75 bp, Homo sapiens
gtttggaaaggtggcaaaggatagcagcagacgaagggaacgtcatcgtttggaaagcgtcgcaataagacgcac

SEQ ID NO: 374620 - DNA, 75 bp, Homo sapiens
caccgacatggaacagggactcactgggggtcctcagaatggttggaatgaccctccagctttgaacagagtacc

SEQ ID NO: 374621 - DNA, 97 bp, Homo sapiens
tgcctgcccccggaggtgcccacgcagctgcctggacaattcatgtacatccttgggatctgcctcatcatggagctcattggtggcgtggtggcct

SEQ ID NO: 374622 - DNA, 98 bp, Homo sapiens
gaaaaagaagcgtatggactactatgactctgaacagtgggatagtaacatctttttgagggaagaattggcttcctttcttgaaagtggtgaaggta

SEQ ID NO: 374623 - DNA, 73 bp, Homo sapiens
gagacagcccaaatatcctcggaagagcgctcccaggagaaacaaaaatgatggaagaattgcatagcctgga

SEQ ID NO: 374624 - DNA, 76 bp, Homo sapiens
cccttcctagccttaaagagctggattttgtcagggagaaaaagtatcggacagaagctgagatgtttggatggag

SEQ ID NO: 374625 - DNA, 100 bp, Homo sapiens
cgtagcatctgggagaatggagacagtctggaagagctgatggaagaggggcttttgaaagcaaccacagtaatacaagatgaagattatatgttacaag

SEQ ID NO: 374626 - DNA, 100 bp, Homo sapiens
agaacattgcacgatgcctcctgcctcccagtgcaacgtcagcttaaagaagcagaggagccgcagcatccttagctccttcttctgctgcttccgtgat

SEQ ID NO: 374627 - DNA, 75 bp, Homo sapiens
gtttaacctttattgtggtggagtccaccccgctgtggatcccaaaatggctgggcgaaaacttgctctaaaaac

SEQ ID NO: 374628 - DNA, 83 bp, Homo sapiens
cgccgagcccgacctcgggcgccccgccggtcacctccgcgcggacaccagatcgacgacatcgcggatggcgccgtgaagcc

SEQ ID NO: 374629 - DNA, 51 bp, Homo sapiens
attcaacatgattgcatttgaaggcgccaatgcttcggcattagagaaaga

SEQ ID NO: 374630 - DNA, 90 bp, Homo sapiens
ggatgagcctgaacctccctgaggccagcttactgaggggaaggtgtggctcattgactttaatccatttggtgaagtcacagattcact

SEQ ID NO: 374631 - DNA, 100 bp, Homo sapiens
ggacacaacgagggacctgggtctacgataacgcgcttttgctcctcctgaagtgtctttggtccaacgttgttccagtggtggacttgctttgtgaaga

SEQ ID NO: 374632 - DNA, 76 bp, Homo sapiens
attcccgtgagttaccagactgttatgtctttcagaatacgcgtgagtgcatctccatccacgttggccaggctgg

SEQ ID NO: 374633 - DNA, 100 bp, Homo sapiens
ccgatctgcccgttgtgtttgtgaaacagagaaagataggcggccatggtccaaccttgaaggataccatggccaagcggaatacagtgataggaacacc

SEQ ID NO: 374634 - DNA, 75 bp, Homo sapiens
ggctgagctagcagtgagcaccttttggcccaatgaatatcaggcggtatatattgcacccctaaaagccctagt

SEQ ID NO: 374635 - DNA, 73 bp, Homo sapiens
tatttggagcatccagcgtggacttctccctcagtgtcccatgaagctgaggtcttgaagcagctggctgaga

SEQ ID NO: 374636 - DNA, 98 bp, Homo sapiens
tcccagtcagtgaacatgctggccaaaacacatccgtataatcctctttgggcacagctgggaacaagatcttgatatttggcctctttgaagagaca

SEQ ID NO: 374637 - DNA, 100 bp, Homo sapiens
gacaaactctcacgctcacaccgggtcatctgattgccataggaaaaggatacagagtagagtttcatgaacctgaaacttggtggaaatttgatcctga

SEQ ID NO: 374638 - DNA, 74 bp, Homo sapiens
ggagaagcacccacaaaactagcatcctcctggaggagctcgggtagttttgcagaagtgcaaagtcaagtctc

SEQ ID NO: 374639 - DNA, 80 bp, Homo sapiens
cggcgacactgcacccatcccggctgcttttgctgcgccctctcagcttcccaagaaagattttaggtgatgggcaagtc

SEQ ID NO: 374640 - DNA, 75 bp, Homo sapiens
cgatcctcgcgtgagacagatcaagatcaagaccggcgtggtgaagcggatgggtgctgcagacaatatatataa

SEQ ID NO: 374641 - DNA, 100 bp, Homo sapiens
ccaggaatctacatgacctgctattttcagatttctgaaatgtcaccttatcaatgaggaaattgaggcacagagattaactaatctgaaccagataatg

SEQ ID NO: 374642 - DNA, 90 bp, Homo sapiens
cgaaaacgtggttgtagagttccgtgactcccagatgccgtggttcaagggctggaaggtggagcgtaaggagggcaacgcaagcggcgt

SEQ ID NO: 374643 - DNA, 82 bp, Homo sapiens
gctcatcactccagcagccctccacccaggagtacgtgctgcatgtctacggaacgatggcactgaatttggaggttctatc

SEQ ID NO: 374644 - DNA, 97 bp, Homo sapiens
catcacccacttctacatgctcactatagacaagaaagggagtttgggcttgaaatcccacaaaaggagatttctaagaaagcttcatttcaaaagg

SEQ ID NO: 374645 - DNA, 75 bp, Homo sapiens
gaggcactcgtgtgacgcgctgaatcgctgggtcagaatggcggcagtggagcatcgtcattcttcaggattgcc

SEQ ID NO: 374646 - DNA, 87 bp, Homo sapiens
gcaggctgccatgacaaccaggcaatgctggatagataccgaattcttatcacaaaggttgttggaagaggagcctttggagttgtt

SEQ ID NO: 374647 - DNA, 87 bp, Homo sapiens
tgtgaaccttcgcattcagaatttgaccatcttggtgagaaacattaagacctactaccaggctgatcagctgaccgaagaacagat

SEQ ID NO: 374648 - DNA, 100 bp, Homo sapiens
atatcggtccccagatacaaacatgtggagcagaatggtgagaagtttgtggacttgaaagaggagattgatattcgactctccagggttcaggatatca

SEQ ID NO: 374649 - DNA, 98 bp, Homo sapiens
caaaacccacttgtctttctggatggaaccgaacattgtggttgacccagaaatagaagtgctgctcagataaagaatttgatgagccagctaggaac

SEQ ID NO: 374650 - DNA, 75 bp, Homo sapiens
ggcatcccaccctactcaagagcctccttgaagctggaacgtggtgggcatccagggatccctgctcagcatttt

SEQ ID NO: 374651 - DNA, 50 bp, Homo sapiens
gcaggccccggggtcgcgtctacaggaattagaaggtgacgaggagggag

SEQ ID NO: 374652 - DNA, 98 bp, Homo sapiens
ctctgtcacagtgggacccgcactggcagcgggaggcagagggaggaccctggaacatcccggaagccgggaaatggtcaaactgagcatcttctgtg

SEQ ID NO: 374653 - DNA, 88 bp, Homo sapiens
taattttagggtcctttatatagaagggagagtagggcgaggagaccatcctgcagttcagctcagggaccttgacacttacccggcg

SEQ ID NO: 374654 - DNA, 77 bp, Homo sapiens
ctgcccgcacgccccgaccttccatcgtagtgccggtggtggtgtgcacattgagccccggtatagacagttccccc

SEQ ID NO: 374655 - DNA, 100 bp, Homo sapiens
gtggaaaatgcgctcgggctggaccagcagctcacggatgattgatatccagaccaggatggctgggcgagcattggagcttctttatctgccagagaat

SEQ ID NO: 374656 - DNA, 99 bp, Homo sapiens
tctgctttcagagtacatgaacaaccttccagataagacaattgcaagccttgtaaaatattactattcttggaaaaaaactcgctctaggacaagttt

SEQ ID NO: 374657 - DNA, 112 bp, Homo sapiens
aaaaatgcaatcatattccgtgaatcatttgctgatgtacttcctgaagcagctgctctagtgaaagttcgaaatttgagcaacccagccaagaagttcaagattgaagcca

SEQ ID NO: 374658 - DNA, 51 bp, Homo sapiens
cttgtgctcctaacaacctgtctcttggctaaactcaaaatgggatctccg

SEQ ID NO: 374659 - DNA, 90 bp, Homo sapiens
cagggatctgaaaccactttgcagtcgacatactcggataccagcgctcagcccacctgtgattatggaactgatttcatctgaaattga

SEQ ID NO: 374660 - DNA, 97 bp, Homo sapiens
tttatatgccagagaaccctgagtgtgcccctgacatgacaaggagccgtcgtcgttagtgtgccgtgcaggtgaagctggagctggggcaccgcgc

SEQ ID NO: 374661 - DNA, 123 bp, Homo sapiens
gaggccgcggagccggactgcggttggggcgggaagagccggggccgtggctgacatggagcagaacccagcgggtgccgcttctccacccgaggcttccacctccaacgagccatgttccag

SEQ ID NO: 374662 - DNA, 100 bp, Homo sapiens
cattcaagctgataggctgcgctaccggaatgtcatccagcgagtgattaggaagcatgagtgggaaaagcatgggacctgcgccgcccaggtggatgcg

SEQ ID NO: 374663 - DNA, 75 bp, Homo sapiens
tcgcgccggctatggccgtgccctggggctgagccctcaggcatccgtgtcattctggaccttactcccaactac

SEQ ID NO: 374664 - DNA, 100 bp, Homo sapiens
agagttcattggccaaggagtgccccctttcacagtatgaatacttcaatgctgtgctgataaatgaaagggacaaagacgggaattttttggagctggg

SEQ ID NO: 374665 - DNA, 87 bp, Homo sapiens
tttgacctcttcgatgtgcgagactttggaaagtggatcgagcgggtggtcggctggctcggcaaggtgttcctgcaggacggcccc

SEQ ID NO: 374666 - DNA, 82 bp, Homo sapiens
tggagcctcagttggaagcagccgatccagcctgcggagcctgtggggcagaatcccaaggactgcagcaaagccaaaaagc

SEQ ID NO: 374667 - DNA, 80 bp, Homo sapiens
gaatttgcctcttctacagatagagctgttaaggaagttggtgaaccatctaaagaagagaaggctgtggccaagtatct

SEQ ID NO: 374668 - DNA, 131 bp, Homo sapiens
tcggtctgggcttctctgaggcggcgagagatggtcaggtctggagctcgaccgggccagatgatcttccaaaacccaagactactgaagtaattaggaaaggctcaattactgaatacacagcagcagag

SEQ ID NO: 374669 - DNA, 99 bp, Homo sapiens
gagggcacgtgtttgcggttcagccctttgatgaccgcagcaggcccctggatcctcctggaatccccgatccctcttgctccctggcagagttttcta

SEQ ID NO: 374670 - DNA, 51 bp, Homo sapiens
ctacaaccttcgatctcctgacgatacgaattggagcaatgttggcttata

SEQ ID NO: 374671 - DNA, 100 bp, Homo sapiens
aaacagaggactaattttggcagttctaaatttgaatttgaggtcatcatcagatttgaaatatttaaagtggatacaaaactatttcagcaatgcagac

SEQ ID NO: 374672 - DNA, 100 bp, Homo sapiens
agctctcgaggctgctaagagactaagggctgccagaagctgccggtttcgtgggaggcattacaagcgggagttcaggctggaaggggagcctgtagcc

SEQ ID NO: 374673 - DNA, 98 bp, Homo sapiens
cactaatgtacaggcagaaaacgagaggctcaccgcagtcgtgcaggatctgaaggaggatgggaaatgcgacttgaaacccagtggtctatacttca

SEQ ID NO: 374674 - DNA, 75 bp, Homo sapiens
gcctggtccgtgtccggtcccccaaatctgtcgtccctgcccccagggttatcaatactctggctgaccatcatc

SEQ ID NO: 374675 - DNA, 76 bp, Homo sapiens
agacagcagcgcagtaccaccttccagagatgcccagattgccttcctgcagggagaaaggaagggccaagaaaat

SEQ ID NO: 374676 - DNA, 100 bp, Homo sapiens
gcttccttttggaccgccgaggaggtgacccttaccctgttcagctgatcccaactaccatggcagctgctgccgcagcaacaccaggcttaggcccact

SEQ ID NO: 374677 - DNA, 90 bp, Homo sapiens
ccttgttatcagtgatggctcttctctggaagatcttgtgaggagaccttgcctattttgatggacttagtgagactattcttgctgtgg

SEQ ID NO: 374678 - DNA, 130 bp, Homo sapiens
cgtcgacgttgggatgcggatcgatgtcgccagcatagacatggtctccgaagtgaatatggttccatcaggcttgttcatccccagcatggccattggagcgatcgcaggaaggattgtggggattgcg

SEQ ID NO: 374679 - DNA, 100 bp, Homo sapiens
ctggtggaagccagcagaaccaggcccagacgagagtgaaactgaactacttggaccagattgccaaattctgggaaatccagggctcctccttaaagat

SEQ ID NO: 374680 - DNA, 98 bp, Homo sapiens
ccgaagagtggggcgtgcagtacgtggagacgtcagcgaagacccgggccaacgtggacaagagtgatcagcagctggactgtgccttggacctaatg

SEQ ID NO: 374681 - DNA, 101 bp, Homo sapiens
agcgcctcgtcgacatgagtgatgtggaggaaaacaacttcgagggcagaatagggccagatttgagtgtgtgaatttttgagtgaaacctggaacccaaa

SEQ ID NO: 374682 - DNA, 96 bp, Homo sapiens
ccgggaagatttacacagatggaaccagaaaagatacgaggctctaggagagtgacgagtagcacagcccctctatggtttagatggcagtgctgc

SEQ ID NO: 374683 - DNA, 100 bp, Homo sapiens
acacagaagaaaaagtgggactgaagtacactgaagcagctctactgagatgaagaaagaaaaagaatacctgctcagctccagagacacgtaaagggac

SEQ ID NO: 374684 - DNA, 50 bp, Homo sapiens
catcctttgactggttagccaggctgaccaactgactgaagagcagattg

SEQ ID NO: 374685 - DNA, 137 bp, Homo sapiens
cttgggtcatcactaattatgaatcagaagaactggatcttaccttgcccaccaacttcagagatttgtccaaggtttctgttatcagtggaacctatcttggtttggattacatgagtaagcaaaatggaggtgaa

SEQ ID NO: 374686 - DNA, 75 bp, Homo sapiens
agctggctaagcaggtgctgcagacggagctggagcgaccgagagagatggcccactgcgtgaccttggttcagc

SEQ ID NO: 374687 - DNA, 104 bp, Homo sapiens
tgtttgcacattatggcaagaagggcgctgttttcgacaggtgtgcaggtttcggcacatggagattgatagcaatggtggaacaaagcggcaaaagatatccc

SEQ ID NO: 374688 - DNA, 100 bp, Homo sapiens
cttgtcgaaacagaagacaaatcattctttgtaagaacaaagtacaatggtcagttccgttcaaggaaacacatatcccagccaggcgccagtatatagt

SEQ ID NO: 374689 - DNA, 75 bp, Homo sapiens
ctccctgccccagcccatcctctctaaccaagttgcatccaagaattgatgcccggagagctgatgaaaaccttg

SEQ ID NO: 374690 - DNA, 101 bp, Homo sapiens
tgacagacccacagcaaggcggtggggatgttggatgacaataaccatcttattcagtgtataatggactctcagaataaaggaaagacctcagagtgttc

SEQ ID NO: 374691 - DNA, 100 bp, Homo sapiens
gatctctatagttggatttggcttgtatggatctattcatggccctacagattatcaagtgaatatacaggttcctgctacagtatcaaaaggcagacac

SEQ ID NO: 374692 - DNA, 75 bp, Homo sapiens
agaaataatctgtttaaaggataacgagaaagatgcgtggaaaaccagatgacgtgtactactgtggaataaagt

SEQ ID NO: 374693 - DNA, 95 bp, Homo sapiens
ttcactaaacactgcaatacaagcttggcaacaggatgaagatgagctggattcccacaccatggtgaagactagtgtggagagtgtgggcacca

SEQ ID NO: 374694 - DNA, 82 bp, Homo sapiens
aggagctcctagatggcatcaaggagagcatggagcagaatgcaggcctgacctctcgggacacacccagccctgtggaccc

SEQ ID NO: 374695 - DNA, 98 bp, Homo sapiens
tttcccacagtcaaatcactcgcctctacagccggttcaccagcctggacaaaggagagaatgggactctcagtaattacaagtagtggctacagccc

SEQ ID NO: 374696 - DNA, 75 bp, Homo sapiens
acagccgcggcggcagcagcagtgagagccatcctggaagacgccggtgccgacgtcctgatggaggccctggag

SEQ ID NO: 374697 - DNA, 100 bp, Homo sapiens
cacaagtctctgaagccgtgcccgttcttcctggagggaaagtgccgctttaaggagaactgcagagagacaagagagacacctccaacttcgacaaaga

SEQ ID NO: 374698 - DNA, 50 bp, Homo sapiens
caccaagatgcggatccgggcctttccggatttaagtcgtggaactgaac

SEQ ID NO: 374699 - DNA, 100 bp, Homo sapiens
cgagggtcgggcattgtaacaagacgacctcttgtgctgcagcttgttacttctaaagcagtgaaacaaagagtcctcttcgtggaaaagaaaaaaatac

SEQ ID NO: 374700 - DNA, 90 bp, Homo sapiens
gctagaccgaggacagcaacaagtgttcaaaggaggactactgagcccagccaggctgtatgccattgctgccaaagaaaaagatattca

SEQ ID NO: 374701 - DNA, 82 bp, Homo sapiens
ttgtcgctgtggagctgttgaaggtgagacatggaatccattaaaattgcattatcagttaagaaatgtacgggaacgatta

SEQ ID NO: 374702 - DNA, 100 bp, Homo sapiens
tgatacaccccctgaagactccattcctttggtctttccagaattagaccagcagctacagaaaaggaagatggcgccatttctaccatagtacttcgag

SEQ ID NO: 374703 - DNA, 74 bp, Homo sapiens
ttccttccagtgtcaaaccgactatcacttggtatatggtttatttcaatctacagaggacccagccacaccta

SEQ ID NO: 374704 - DNA, 96 bp, Homo sapiens
aaagaactgagggtcagattgatatgggcactgtggtcctgggaaagctggaatcaggatctatttgtaaaggccagcagcttgtgatgatgccaa

SEQ ID NO: 374705 - DNA, 90 bp, Homo sapiens
gccgtccatccaccagcacagccagttcccagctgtggaacacacaggaggaggaagccaagaatctggtgagcgaagccatcgcagctg

SEQ ID NO: 374706 - DNA, 100 bp, Homo sapiens
aggacaaggaatatgggctttactaggcagaatcacagggcaggaacttaaaaggagtctagaaaatccagcagaaaggaaaatggaaggtcagaattcc

SEQ ID NO: 374707 - DNA, 100 bp, Homo sapiens
tgaaacaccactgaagcattgccaaggttcgatacaagaggctgttttcctagcgtggcttgctgcctttggtaagaacatgtcgtccatcttgccattc

SEQ ID NO: 374708 - DNA, 83 bp, Homo sapiens
ggagaaggaaattgtcccgaatccctgcaggttaatgttcgtgaagaaattgaagagttttttccaagaatgtggaagataaa

SEQ ID NO: 374709 - DNA, 74 bp, Homo sapiens
cgagctccgggatgctgtcctcctggtgttcgccaacaagcaggtggtgaacatcccgtccttcattgtccgcc

SEQ ID NO: 374710 - DNA, 98 bp, Homo sapiens
gcagcatgtcaccatcagccagctgttcgcgcccggagacttgcctgagcatcaaagatccagctaacaggcgctacgaggtgcccttggagaccccg

SEQ ID NO: 374711 - DNA, 82 bp, Homo sapiens
tgtcttcggtggactccttcggcagtccacccaccgccgccgcctcccagcctcctggaggaaagctatgtcatgaaggatc

SEQ ID NO: 374712 - DNA, 87 bp, Homo sapiens
ccatttgggcattgacacccctacccagaacaacatctttaagggtgagccactgcgcctgatcaaggcatcaccgttgaacctcct

SEQ ID NO: 374713 - DNA, 100 bp, Homo sapiens
cagaagaggaagcatatgcactgaagaaaatatcctatcaacttaaggtactatggatatagaggagagaaatcgccaaatgaaaattaacaaatacaaa

SEQ ID NO: 374714 - DNA, 100 bp, Homo sapiens
ctaatcctgaggacttcatccggtcaccatctacctattcttcaaatgaccattcctcaagaattttgtatccaaggcccaaaagtttgttacccaagat

SEQ ID NO: 374715 - DNA, 100 bp, Homo sapiens
cccagtaaggatggtgtgacagttgctgtcatttctggagaagccctgggaataaagaattcatcccacaggcatttggaatgcccttatcccaagtcat

SEQ ID NO: 374716 - DNA, 54 bp, Homo sapiens
gcaggcgcaggctccgtgaggaggcaaggcctgtgggtcttcattgcccagctc

SEQ ID NO: 374717 - DNA, 51 bp, Homo sapiens
ctttctcctactccataaagacttcaaggagcagctgcagatgacggccga

SEQ ID NO: 374718 - DNA, 75 bp, Homo sapiens
gaaaaatcctggatctgtatgctttgagcaagatgtatgtccatccctgtgacgatgagggctattcggaggaaa

SEQ ID NO: 374719 - DNA, 87 bp, Homo sapiens
tgtttgtccactgagctgatctcctctctggagcaccggggccaccaggagggaggctgaatacgacgccatgttgctggagcacgc

SEQ ID NO: 374720 - DNA, 83 bp, Homo sapiens
ctcggccccgccagcagcactgtggaggccgtcctcggtgtcgtgaaaactacccctaaaagccaaaatgggaaaggaaaaga

SEQ ID NO: 374721 - DNA, 97 bp, Homo sapiens
gcccacggtgtccgcgctcagggagacgaaaccagacagagggtcaagtttacagatgaccgtgtctgcaagagtcaccttctggactgctgccccc

SEQ ID NO: 374722 - DNA, 50 bp, Homo sapiens
ggggtggtgacagcaggtctgagactggtcgaattgacaaatcttaccct

SEQ ID NO: 374723 - DNA, 75 bp, Homo sapiens
aaataagctggaaaaatctgagttgacattttgctaaaggctgtgggagacactcctattatgaaaacaaagaag

SEQ ID NO: 374724 - DNA, 78 bp, Homo sapiens
tgctgcctccactactgcaaagacaaggctaaggacttcatgcccgccagcaaaggggactttcccatgcctttcata

SEQ ID NO: 374725 - DNA, 90 bp, Homo sapiens
ctctgaggcggcgagagatggtcaggtctggagctcgaccgggccaggaggatttgacagctaaggatattgaagaaattattgatgagc

SEQ ID NO: 374726 - DNA, 100 bp, Homo sapiens
gctggaacctgacacttggcatgacagtgtccaaaccaggttgcagagaaggtggcctccagaatcgccgagggcttcagcgacactgcgctcatcatgg

SEQ ID NO: 374727 - DNA, 101 bp, Homo sapiens
aaagtagatggactgaactactcagtaaggcagcagccagctcttagaacaagctctggtgattgaggaacagctgcgccgggctgcttacttgaacatgt

SEQ ID NO: 374728 - DNA, 90 bp, Homo sapiens
gctcttccccagaactacaggggctctggccatcttcgtgggcttaaaagacaaccttcttgcttctgggacatccagcctgacagccac

SEQ ID NO: 374729 - DNA, 90 bp, Homo sapiens
cgtactgcacatcgtggtggtcggatttcaccacaagaagggctgccaggttcaaaccttgtactactcagctgatcacaagctgcttga

SEQ ID NO: 374730 - DNA, 96 bp, Homo sapiens
atttgctataatgggattcattggcttctttgtgaaattgatccatattcctattaataacatcattgtgtggcgctttgccgagtttcagtacct

SEQ ID NO: 374731 - DNA, 83 bp, Homo sapiens
cagcaaacaacactttgaatggcttgtcaaaatcagcatgattcttcagaggctcttcaggttctcctctgtcattcggtcag

SEQ ID NO: 374732 - DNA, 50 bp, Homo sapiens
cttcgagcagcctctcgccatttcccggattaattggcacggcgactgta

SEQ ID NO: 374733 - DNA, 96 bp, Homo sapiens
gaagaagggcaggacctgggcggaggccgccaagacgtttgtgaagtttgccaacatcgaggaggacaccccgtcctatcaccggagctatgactt

SEQ ID NO: 374734 - DNA, 100 bp, Homo sapiens
ggacaacacaggtcgcggaggagcgttgccattcaaggctaggcttggcttatgctggctcaaatcgtgaagatgtcctaacactgctgctgcctgtgat

SEQ ID NO: 374735 - DNA, 75 bp, Homo sapiens
tgagctgtggcttgtcatgaagctgctaagtggagatcctactatgttgacagacatgatgaaagggaatgtaac

SEQ ID NO: 374736 - DNA, 100 bp, Homo sapiens
gcgttccaaggcatctgtgagcccgcggagtatacaccatgagcaaagctcaccctcccgagttgaaaaacgattattggagccggaattggtggcactt

SEQ ID NO: 374737 - DNA, 90 bp, Homo sapiens
acaagggactaatgcaagcgagacccctgccactcggatgtccataattcagacagatctgagaacaattggcaagaaattcctccccag

SEQ ID NO: 374738 - DNA, 75 bp, Homo sapiens
agatgctgagctatctggagacagctgactactccatccgagaagagattgtgcccctgggcgctgggattgctc

SEQ ID NO: 374739 - DNA, 89 bp, Homo sapiens
gaaaccactctagagaagtgctgtgccgctgcagatcctcatgaatgctatgccaaagtggaggagatgttaaagtaacccatcttgca

SEQ ID NO: 374740 - DNA, 75 bp, Homo sapiens
agttgcgcagacagtatcaaatacatatgaaccagatggttacaacccagaagctcctagtattactagttctgg

SEQ ID NO: 374741 - DNA, 80 bp, Homo sapiens
ggcagctgaggagactccggcgctcgccatggccgacgaaaagcccaaggttacgggcaggacttgagtggcttcggaca

SEQ ID NO: 374742 - DNA, 75 bp, Homo sapiens
ggagccaacagcgccccccgcgatttcgcggtctttagatggacagagacgtatgtgcgttggtctcctaagggc

SEQ ID NO: 374743 - DNA, 125 bp, Homo sapiens
agaatcttcaagaacttcctcgcactgtgacatgtctgatcccttgctcccatccctgcagcatgaacaaggtagctacagcaagctgggtagcaggcagatccaaaggatatcatgaagtttcc

SEQ ID NO: 374744 - DNA, 51 bp, Homo sapiens
ggaacaaatggaaaggactagacattgtcagccagagcagcctccccatgc

SEQ ID NO: 374745 - DNA, 80 bp, Homo sapiens
ggtgacaaggtcagcctggtcctcgcacctgccctggcggcatgtggctgcaaggtgcctcaatcaggaaccctgaagct

SEQ ID NO: 374746 - DNA, 88 bp, Homo sapiens
taaagagggccacgagctgcgaaagggcgggaaaggcagttggagaagagtaatagctcttcaagtctgcaataaaaaatggcctcca

SEQ ID NO: 374747 - DNA, 100 bp, Homo sapiens
gcaattgatggataaatcaggaatagattctcttgaccatgtgacatctgatgctgtggaacttgcaaatcgaaggaagtgcccaccgcgtgccccgatt

SEQ ID NO: 374748 - DNA, 100 bp, Homo sapiens
ctgaggtctcctccatcaactccgacctggaggagtcagtggatcggtggggaaaatgctgcttaccctgggccctgggctgtagaaagaagacaccaaa

SEQ ID NO: 374749 - DNA, 83 bp, Homo sapiens
aaatgcgtgctggttcttaaagaggttgatgataattagaagcatgctttccactgaacttcccgacaacatttgttatgcag

SEQ ID NO: 374750 - DNA, 50 bp, Homo sapiens
attccaagtaactcttatttggtacttctcagaacgtggggatgctgtgg

SEQ ID NO: 374751 - DNA, 75 bp, Homo sapiens
acttggattttttccagtctgatccttttgttggcagctgtggaaaatctctgttctcacaaagtctccccaatg

SEQ ID NO: 374752 - DNA, 100 bp, Homo sapiens
gacggtggtggtgactgagcggagcccggtgacaggatggtgtcatggagaaactccagctgggcccagagattctgcagcgggaaaatccaaggcttat

SEQ ID NO: 374753 - DNA, 74 bp, Homo sapiens
cagcagccttcagcttttggcagcatgaaagttagcagttcttgattattacagacctctttctgaaaagcccg

SEQ ID NO: 374754 - DNA, 104 bp, Homo sapiens
aaaatgattttgaagttattggaagataaaaatggagaggtacagaatttagctgtcaaatgcttatggtgctgctatctggagtaatagctttcatggtgaac

SEQ ID NO: 374755 - DNA, 90 bp, Homo sapiens
tgcctccctccgctaacctccgcccaggatggcggcccaggtgactctggaggacgcgctgtccaacgtggacctcctggaggagctgcc

SEQ ID NO: 374756 - DNA, 100 bp, Homo sapiens
cattgtagggcaacagaagttactttgcctaaaagtatacagatagaagaagtcagagatgccatggaaaatgaaatgagaacccagcttcgccgacagg

SEQ ID NO: 374757 - DNA, 100 bp, Homo sapiens
tgaactggaccccgcgagcaccagagtcggcgtaactatcgcctgacagggtatctgaagtaaaaggggggtttgaaagtattcttgaagggctgtttgg

SEQ ID NO: 374758 - DNA, 100 bp, Homo sapiens
catgctgacctccacaggcttaaatcattgctcctcctgagcgcaagtactccgtgtggatcggcggctccatcctggcctcgctgtccaccttccagca

SEQ ID NO: 374759 - DNA, 75 bp, Homo sapiens
cagcaaagatggtacaaaagagtctttggaggatgcggctttgatgggttgtaaacatgttaaaggcatcctgtt

SEQ ID NO: 374760 - DNA, 83 bp, Homo sapiens
tggccaggttgtttcctaatcttcgatccatcagcctccacaagtcagcagtacttctggaatagaaattctaaacattagcc

SEQ ID NO: 374761 - DNA, 101 bp, Homo sapiens
gcgcctcttcttagttgatgatttagttgattctctgaagttgctgattgttggaggttcttttggtcttcgtgagttttctcaaatccgatatgatgctg

SEQ ID NO: 374762 - DNA, 112 bp, Homo sapiens
gccaggtttgagtccaaagtaccctccttctactaccggcccacgccctccgactgccatgacatattcgatgccatgttccctgtcactcacatcgctggggagactgtta

SEQ ID NO: 374763 - DNA, 100 bp, Homo sapiens
ctcccagctggcagaagcctatgagtttgctgacctctctgaggctgccaaccggaacaatgacgccctgcgccaggcaaagcaggagtccactgagtac

SEQ ID NO: 374764 - DNA, 75 bp, Homo sapiens
cacgtcgagcgtgcccgagacccgagatgtcaccgggtgcgcatcaatgtacctccacacagagggcttctctgg

SEQ ID NO: 374765 - DNA, 75 bp, Homo sapiens
agtgcgtttgaaggcttccacaccctctactccaggatttcagagacaactgtctgaaccctgccaccccttccc

SEQ ID NO: 374766 - DNA, 98 bp, Homo sapiens
cgatgatgatgtcccgtgtccgggctacctgtttgaagagattgctaacctacatcggctctgtgctcatctctgtaaaccccttcaagcagatgccc

SEQ ID NO: 374767 - DNA, 80 bp, Homo sapiens
gacaacgcctcctcacttgctcctctacggtacctgcaccagtcaggggccctgaccatggaggccctggaggacccttc

SEQ ID NO: 374768 - DNA, 75 bp, Homo sapiens
tgaaggtgaagaccagtttgatgagccacctgagctgaagattcccttgagaacaagtactgtcctgtggtttca

SEQ ID NO: 374769 - DNA, 82 bp, Homo sapiens
caaaaatccagaagtacaagcagtctggagtgtacctcacagccttctaggatctccagagtggacaggaatctcacttgga

SEQ ID NO: 374770 - DNA, 100 bp, Homo sapiens
gtcctgctcaggttccaatgatgtccccaaatggttctgtgcctcctatctatgtgcctcctggatatgccccacagcttggtgatccagctatttttcc

SEQ ID NO: 374771 - DNA, 80 bp, Homo sapiens
cccacatccctcccggctgtagccaagaactattcggttctctacttccaacagaagggctggaccccaatggagaacag

SEQ ID NO: 374772 - DNA, 50 bp, Homo sapiens
aggacatctgcaatgatgttctgcaattcacagaagctgtgagtccttca

SEQ ID NO: 374773 - DNA, 83 bp, Homo sapiens
gcgggagcccgaggctgagactcaccggaggaagcggcgcgagcgccccgccatcgtcccggaactgccttctgttgaagaac

SEQ ID NO: 374774 - DNA, 80 bp, Homo sapiens
ttggaagcagccgatccagcctgcggagcctgtggggcagaaatcgaaacgagttggctgagactcttgcactcctgaaa

SEQ ID NO: 374775 - DNA, 90 bp, Homo sapiens
tctaccatgtgctagagacagccaacaaaatattcatggttcttgaggtgtgatccctcacatccacaaatctctgattggaaagaaggg

SEQ ID NO: 374776 - DNA, 96 bp, Homo sapiens
agcccagtccaagactctgtgctccctaggtttgcaacagctctctgaagttgttgaaaacctggttacaaatgataattcacctaacataccaga

SEQ ID NO: 374777 - DNA, 100 bp, Homo sapiens
tgctaatgtgtctgatccacatcttcaagtctggaacctagaaagattgtacaatgaatggtgattctcgtgctgcggtggtgacctcaccacccccgac

SEQ ID NO: 374778 - DNA, 82 bp, Homo sapiens
cagccgcagcgacggcggcgacagcaggaacatcatttacagcgagcaatttcagcacagcaagtgtttagagaaaaaaaag

SEQ ID NO: 374779 - DNA, 100 bp, Homo sapiens
cgaagctggccgagcaggctgagcgatacgacggattacaaggcagaggaagacccagcaaaatttaaatctatcaaaacaggccgaggacccttgggcc

SEQ ID NO: 374780 - DNA, 100 bp, Homo sapiens
gcctcaggccagtcgcctccaggccaagagggatccttcacccgtgtctggatcttctgcaggacaactggtccttatcacagccagggtgaccacagaa

SEQ ID NO: 374781 - DNA, 75 bp, Homo sapiens
ggaaccctcgtgggagatattttgaggatggaggagatgtataagaaagctcatgctgctatacgagagaatcca

SEQ ID NO: 374782 - DNA, 75 bp, Homo sapiens
ttcctcccagctacgagctgccccaggctattcaagatctctggcagtggaggaagtctctttaagaaaatagtt

SEQ ID NO: 374783 - DNA, 49 bp, Homo sapiens
cagacctctgctgccgccgcccccacgctcaaccacaggaattatctct

SEQ ID NO: 374784 - DNA, 82 bp, Homo sapiens
ctgagcgacacagccatcgtgcccatcggctaccatgtgccccgcaagttttcggctttgtgagaaaccttaccatcaaaca

SEQ ID NO: 374785 - DNA, 75 bp, Homo sapiens
gacttcagagacactgccaagcagccttagccctagtgtagagggcggcgactggcggcgcgatggacctgaccg

SEQ ID NO: 374786 - DNA, 88 bp, Homo sapiens
gaaacctcatcctcgcactgtggtatactaactgcaaagatcctcctttgtatttggaactggaccctcagcaccatctgccagtcca

SEQ ID NO: 374787 - DNA, 90 bp, Homo sapiens
cttgagtctactctgtcgctcttgtgccctagcaccccgagaaccgtcagtttgagccagatgaccaatgatgcgagctcagagtcaata

SEQ ID NO: 374788 - DNA, 98 bp, Homo sapiens
gagtctccgcgtcccgctcgctgggagagagaaaatgatgcatcctgttgccagcagtaatccagctttctgtgggcctggcaagccttcctgcctca

SEQ ID NO: 374789 - DNA, 100 bp, Homo sapiens
caagaggactcctgactcactaggttagggcggctggctgtcggcaattggattcttccagtacagcccgggcgctgccgtggtcatgctgcttccagcc

SEQ ID NO: 374790 - DNA, 98 bp, Homo sapiens
tggctcggaggaatctcagtagggacaacaggcaggagaattatgggagcgcatttccccaggaaatgcattcgatttaacccggatgccacagtgtg

SEQ ID NO: 374791 - DNA, 90 bp, Homo sapiens
ctttctgaggcagatacccaggaactaacccaggtggttattaacttggtgatgcttttggctgaaatgaaaatacaggaccgcgctgtt

SEQ ID NO: 374792 - DNA, 100 bp, Homo sapiens
ctggaactgtgcggggtgctacataaatatatcaagcccagggaaaagaatttacatagtacatgacgaagttaaggataaagcttttgaactagaactc

SEQ ID NO: 374793 - DNA, 74 bp, Homo sapiens
tccgcggctggccgcgtgagtagatcctctggaccttctccatctacctggagtcagtggccatcttgccgcag

SEQ ID NO: 374794 - DNA, 100 bp, Homo sapiens
ggcgagatcatcaagcgcttcgagcagaagggattccgcctcgtggccatgaagttcctccggattgactggggcgactttggggtagaggcagtgtctg

SEQ ID NO: 374795 - DNA, 83 bp, Homo sapiens
acccatgctctggagtggcccagcctaactgcccagtggcttccagatgtaaccagagaccatggcgagcccagggaaagaca

SEQ ID NO: 374796 - DNA, 100 bp, Homo sapiens
cctccccctgatagcagatttgatgcctactgctttaaacgcaccaggatcatctacgaccgaaagttcctgctggagtgcaagaactcacccattgccc

SEQ ID NO: 374797 - DNA, 75 bp, Homo sapiens
ataactacatgtaaaattaatgcagttcccgatgtcagtattgaatatggtggtgaggcgtgaccctggcaacac

SEQ ID NO: 374798 - DNA, 100 bp, Homo sapiens
tggcagatggggggaccccggtacggacctgtgcagataagccaatggacacgtcagtgttatctgaagaaggaggagagccttttcagaagaaacttca

SEQ ID NO: 374799 - DNA, 100 bp, Homo sapiens
cctgtaccgtgatgtgacgctggagaacctggcacttatgtcctccctggatgaggacgctgaggcccagagagggaaagccacttgcctagggacacac

SEQ ID NO: 374800 - DNA, 100 bp, Homo sapiens
ttgttgttttaatgagtggggaaaattctgccaaaccaacgcagctttgggaagaacatctgctcaaattaatgaccatgggggatatgaagaccccaga

SEQ ID NO: 374801 - DNA, 75 bp, Homo sapiens
cagcctcaggcctgcacggacggtgttggttggggtggacatcgagcagctggatccccgcggccggactcccct

SEQ ID NO: 374802 - DNA, 83 bp, Homo sapiens
ctctgtgcaacggagactccaaggatattagaaatggctactccccagtcaattttcatctttgcaatctgcattttaatgat

SEQ ID NO: 374803 - DNA, 90 bp, Homo sapiens
attcctctcccctattgctggctctgcagggctctgatcaagcggatccaagccatgattcccaaggaaagaccacagcaagattctttc

SEQ ID NO: 374804 - DNA, 100 bp, Homo sapiens
cgagaaccgtcagtttgagccagatggagtccatagaggccactgtattctattgaagaacatgtctaacagtaacactactcaagagaccctggaaata

SEQ ID NO: 374805 - DNA, 98 bp, Homo sapiens
taaaagaggagcagcatggcatttcagtcactggtttgcagagtccagaaacgttcctggatccgaacactgccccctgacgacctagagagatcccg

SEQ ID NO: 374806 - DNA, 101 bp, Homo sapiens
atcggtgcaaatttacagaagcagtacgagaactggcagccaaggatgtgaagttcatttccaatccgccctccatggtggcagcggggagcgtggtggcc

SEQ ID NO: 374807 - DNA, 100 bp, Homo sapiens
caaagtagaaaaacactatctcttctatgacggagaatccgtttcaggaaagagtgacagaaggaagtcaaggcaccattatgactcggatgagaaatca

SEQ ID NO: 374808 - DNA, 100 bp, Homo sapiens
cggccggggcgcaggcgcccgtgcggaatggcagtattggtaaaggttttcaaggtgtcatgaaaagatggggatttaaaggccagcctgctacgcatgg

SEQ ID NO: 374809 - DNA, 50 bp, Homo sapiens
gttataaatgaaggctctcttgattccaagtggtaagaagttcagaagca

SEQ ID NO: 374810 - DNA, 98 bp, Homo sapiens
cccgtctcgtgggcgccgcagcctcccggggccctacggccgcccgccaccaggaatcagagatcattgatttcttcctgggggcctctctcaaggat

SEQ ID NO: 374811 - DNA, 97 bp, Homo sapiens
ctttgatagtcgtaccatatgcagaagagtaccttcaagtttaaatctgagagtgatattcatttggcagaacatcataaacaggtgttatatgatg

SEQ ID NO: 374812 - DNA, 90 bp, Homo sapiens
cgcccctcggcctcggagcaacgagcgcagcgccgatgcctgaggaaacccagacccaagaccaaccgatggaggaggaggaggttgaga

SEQ ID NO: 374813 - DNA, 75 bp, Homo sapiens
cagcgctcgcccacgcccagcgccgcctcctcctcggccagcaacagcgagctatgccctttgccttctgtacga

SEQ ID NO: 374814 - DNA, 100 bp, Homo sapiens
gttggacagcggtttaaccgcatcgggctaccaccaaagtgtctatgtctctccccaacgtatgagctcgccctccaaacaggaaaagtgattgaacaaa

SEQ ID NO: 374815 - DNA, 105 bp, Homo sapiens
ggactctgtgtgagggaaagaaaacaatttctcctgctctgcagcttctgttcaggtatggcctcacaagtcttggtctacccaccatatgtttatcaaactcag

SEQ ID NO: 374816 - DNA, 100 bp, Homo sapiens
gtgctgtcggtggagagcgcggggacgctgccgtgcgcgccagagatcccagactgcgtggagcagttatgaaaaacctcctcctgggcttatcaaggtt

SEQ ID NO: 374817 - DNA, 75 bp, Homo sapiens
ttttggtttccctggcaggggttgaactgtggagtgtgtgggccaacccatggccagcacagacatgatggaata

SEQ ID NO: 374818 - DNA, 50 bp, Homo sapiens
tgcctacgtcagtaacagccaccaaggttgaaaagctgttagaaggttac

SEQ ID NO: 374819 - DNA, 75 bp, Homo sapiens
gtcagccgccaccggcagcagcagcaccaccggacgccatcgacgagtacaagccccaggatgctaccaccaacc

SEQ ID NO: 374820 - DNA, 90 bp, Homo sapiens
cgcggcggccgggccctcgagacggggacgatggcggctcagcggcagcgggcgctggccatcatgtgccgcgtctacgtgggctctatc

SEQ ID NO: 374821 - DNA, 49 bp, Homo sapiens
ccattttctactgtccctgcgcgagcggatactctgttttcaaggaagc

SEQ ID NO: 374822 - DNA, 75 bp, Homo sapiens
ggttcccgagttgctgcagcagcaggaggaggaccgcagcaaggggggacacagcgattgccacgcgccattgga

SEQ ID NO: 374823 - DNA, 96 bp, Homo sapiens
cagtggcggcgcaaccagccttctagggcggcggagcgtctgcttctacgctttgcctgggagaggccctggtggcctcgttcctggcgcccggag

SEQ ID NO: 374824 - DNA, 83 bp, Homo sapiens
tgcaccggcccagctactgcgacgccgccttcgctctggagcagatttccaagataacgaaggaggcccaacttcattcaata

SEQ ID NO: 374825 - DNA, 51 bp, Homo sapiens
gctctgcgtattcaggcgttgaagttgggcagcctgcttctgcaaagtggt

SEQ ID NO: 374826 - DNA, 100 bp, Homo sapiens
ctcggactaggcctggaggccgccgcgagcccgctttccaccccgacctctgcccaggccgcagatgcaaacgacgctcatcaaacagagacctcctcct

SEQ ID NO: 374827 - DNA, 88 bp, Homo sapiens
ccgccggcattctcctccggctgccgcagctgataggaagatgtcttcaggaaatgctaaaattgggcaccctgcccccaacttcaaa

SEQ ID NO: 374828 - DNA, 82 bp, Homo sapiens
ctctttgtatatgtgtaaacccaaaaggagcatgaaacgagacgacaccaagtgtgaatgggaaacgctacttcgaatgcca

SEQ ID NO: 374829 - DNA, 100 bp, Homo sapiens
agctagctgatgggaacgtgaaagccttctatagacgagctctggctcataaaggactcaaggtctgccatcatggatgttctcgcagaagcaaatggca

SEQ ID NO: 374830 - DNA, 98 bp, Homo sapiens
gctggttcatcccatcagcctggattggtgaaactgaatcacaggagatatttccaggttcaagcaattctgagaagaaactggaatcaatacaaaat

SEQ ID NO: 374831 - DNA, 100 bp, Homo sapiens
ataagaaaacacatctttacacactaagcatccagggcattgtggatgcctaccgccaagccctgccccaagttcgcctctatggccctaccaactttgc

SEQ ID NO: 374832 - DNA, 100 bp, Homo sapiens
gcaatgtgaacaacttctgacttcgctgttaaagaaaattggaagcggggagaggtggtgagagatgacccctgttgaggatttcattggtgtctgccac

SEQ ID NO: 374833 - DNA, 100 bp, Homo sapiens
gtgcaactggctcagtattcacagggaaagctgtgagggtcagctggccgccggcacctgtgagattgtgaccttggaccgggacagcagccagcctcgg

SEQ ID NO: 374834 - DNA, 82 bp, Homo sapiens
agtcaccgtggagctccgccgccccgaaactttcaccgcgagcggacgcccactattgcttggttctacttcctttatcccg

SEQ ID NO: 374835 - DNA, 83 bp, Homo sapiens
gggaagtggcgtggccaagattcgcattgaagatgacgggagctacttccaaattaaccaagatgccatgcgctcagtgacta

SEQ ID NO: 374836 - DNA, 74 bp, Homo sapiens
cggaggagtctcagagctgtcagaaagcatcgatttcttccctgtgaaaacaagagcaaggccgtggagcaggt

SEQ ID NO: 374837 - DNA, 96 bp, Homo sapiens
gcacgtgctgcagaactccatagacagcctcactttgtgctcgggggcctgtcccaaggcctcgagcctaagagatggaatctcactctgtgagtc

SEQ ID NO: 374838 - DNA, 83 bp, Homo sapiens
cggcagaagaagacgaagaagcagaagcgtctgctcaggttgcagcaggagagaggccacggcatatgcctccaaggacgggg

SEQ ID NO: 374839 - DNA, 100 bp, Homo sapiens
aaaaggaaattctttattatcggaagacaataggctataagattcacatgcatgggaacaactacaaacaaagcttgcttcagcatttcccagacattct

SEQ ID NO: 374840 - DNA, 74 bp, Homo sapiens
cttctttatcacctgcatcaccctggtgtacaggctgaggagttctatgtctgcatctatgccacccgagaagg

SEQ ID NO: 374841 - DNA, 100 bp, Homo sapiens
gccggtgccctcccgggcggcgaccggggcctgggtccacgccgagggcaggacgaacttcaccaggtccccagtcccaagcggaagttggaagaaccag

SEQ ID NO: 374842 - DNA, 100 bp, Homo sapiens
cctaggatgccgcgtggaagccgaagccgcacctcccgcatggcccctccggccaggtatgcccaagaggacagagaacgaatgcacagaaatattgtca

SEQ ID NO: 374843 - DNA, 100 bp, Homo sapiens
agcagcagtagctatggcagtggcagaagattttaattagggtggttctcttcccaaagtggaagccaaattcatcaattatgtgaagaattgcttccgg

SEQ ID NO: 374844 - DNA, 100 bp, Homo sapiens
ctgctactgcgaagacagctggcagaggctgtggccaggccagctgggctcggggagcgccagcctgagaggagcgcgtgagcgtcgcgggagcctcggg

SEQ ID NO: 374845 - DNA, 101 bp, Homo sapiens
agagaaggaaacgggactaaactggcgggctccgtggaagcgtggccggcagcgtcccggacgaggaggccatgtcaaaggacgccctgaatctggcgcag

SEQ ID NO: 374846 - DNA, 51 bp, Homo sapiens
gccagtggtttctgtcagattttcgccgaaatgcactcggtgatggaaaga

SEQ ID NO: 374847 - DNA, 100 bp, Homo sapiens
gactgtgaattctggttggccaaacgaagacaccattgcaggcaagaagcctgtggtaggtaagaaaggaaagaaggctgctgttggtgttaagaagcag

SEQ ID NO: 374848 - DNA, 76 bp, Homo sapiens
atcttctatttccaaagtatgttgcacccagctttggaggaattttttacatcacttgtgaagcaagaaatggtga

SEQ ID NO: 374849 - DNA, 124 bp, Homo sapiens
tccttctatactgcaagtcttttgatagatgtcataacagtatttggagaactcactgatgaactgccactgcagagccccgccatggaagacacgccgttggtgatatcgaagcagaagacgg

SEQ ID NO: 374850 - DNA, 100 bp, Homo sapiens
ataaggaactagtcacagtgttgctgcaacatagagctgacattaactgtcagatggacaatctaaaatatgtaaatcagttgaagaaggaaaatgaacg

SEQ ID NO: 374851 - DNA, 90 bp, Homo sapiens
gcaacgtgttggaccttccggagcttctcagaagacagagggttttcttttgaggtggtggaggtggatacagcagtcggagaacatctg

SEQ ID NO: 374852 - DNA, 90 bp, Homo sapiens
cccccgcacccacgcggccctgctgaaagtggcgcaaatggttctggggctgctggtatggacgcttattgctggaactgagtacttccg

SEQ ID NO: 374853 - DNA, 97 bp, Homo sapiens
ctctgtgccgtggggatcgtcattgccatcctcgcgattctggatgaaattgaagaacataacatcaaaatctatcacttacctgatgcagaatcag

SEQ ID NO: 374854 - DNA, 100 bp, Homo sapiens
gagggaagatgaacgggacgcggaactggtgtaccctggtggacgtgcacccagaggaccaggcggcggtttgctggttggctcccgagcagacagcagg

SEQ ID NO: 374855 - DNA, 85 bp, Homo sapiens
tgcagaaagaagacaatcaagtcgacgttcgcttctttggccaccaccaccagaggtatcatttaaaggatgtgattgttggaaa

SEQ ID NO: 374856 - DNA, 75 bp, Homo sapiens
agataaagtgattttttgcctttgttgattaactggacaaattcaggaaatgcttccagactgcacacttttact

SEQ ID NO: 374857 - DNA, 76 bp, Homo sapiens
atcagtgattctacatctcaagctcatattttgaagtgtttacggagtgctgcagcagctcccagtccagtgctag

SEQ ID NO: 374858 - DNA, 111 bp, Homo sapiens
ctctgttggctgtgacatctattccatctgtgagtgactctttgacatggagagaatttcactatattcaggtgttccattgcctaaagaggagaacatttctgctccctt

SEQ ID NO: 374859 - DNA, 100 bp, Homo sapiens
ggtcgcggggcccgcgcccggagctggcgccaggttctgtggatggagttataaaggaagtgaatgtgagcccatgccccacccaaccctgccagctgag

SEQ ID NO: 374860 - DNA, 75 bp, Homo sapiens
ttatgtgctacgctcattcaaaaggagccagagtagtacttaaagattattgctcagttgtaactattgtggacc

SEQ ID NO: 374861 - DNA, 100 bp, Homo sapiens
caggatcctgggaagcagagtgtctggatggaacctgagctgggtctctgactcacttctgactttaggtaccagcctggcttatcttacgaccagccca

SEQ ID NO: 374862 - DNA, 98 bp, Homo sapiens
agcctcacatggtgtgggccgacatcaagagctgcgagatccaacagaaccactcacgaattcttgtttggtgcccttgctgaactggttgataatgc

SEQ ID NO: 374863 - DNA, 75 bp, Homo sapiens
gacccaccaggcatcaaggccctggaagatatgcgcaagaacctggagaaggaaaaatatctccctggacggggc

SEQ ID NO: 374864 - DNA, 82 bp, Homo sapiens
ggacgagggccagctgacggagatggtgcagaagatggaggagtgagagggtccaagcctggtaagaatgtccagcttcagg

SEQ ID NO: 374865 - DNA, 90 bp, Homo sapiens
gagatgagtttgtttacagctgttgtcctggtatctgcagtaatatctgcttcttctgacacgacagtaaaagtatggaatgcacacaag

SEQ ID NO: 374866 - DNA, 75 bp, Homo sapiens
agctgtcatcacaaaagagttgattgaaattatctctggtgctgcagctctaatgctgcaagaagatcctgtttt

SEQ ID NO: 374867 - DNA, 82 bp, Homo sapiens
tggcagccctgcatggagcaagtctgtcagcaccatctttctaacataggtcccattagtccaccacagccaccttcagtca

SEQ ID NO: 374868 - DNA, 75 bp, Homo sapiens
ttctgctcaccaacagatgaagacagatgcaccaacgaggtaagaatgattgatgttggctgatattggagtgct

SEQ ID NO: 374869 - DNA, 98 bp, Homo sapiens
gccatggcataaggaactctatcccaggaatacagctttgcattaggcaaggatatcctgaaggatactatagttccaaaagtggatggagcagtcag

SEQ ID NO: 374870 - DNA, 82 bp, Homo sapiens
gtagagtcttttttcactgaggacggtctggaaaatcccgaagcagaagcccgtattcatctaggcattcaagatctcgtag

SEQ ID NO: 374871 - DNA, 98 bp, Homo sapiens
tgggctacttcactgtcaaccacccagataaccaggaactttatattgctgttggaatatctggagccatccaacatttagctgggatgaaagacagc

SEQ ID NO: 374872 - DNA, 80 bp, Homo sapiens
gagcgggcggtcattcgcatcgcagggcgaccattgacgaggtggagacggacgtggtggagattgaggccaaactggac

SEQ ID NO: 374873 - DNA, 76 bp, Homo sapiens
gagcatgcggtgtcctggaagaagctacaagcggattttttatcaagcagaaatgcatcgaacaacgagaatcaag

SEQ ID NO: 374874 - DNA, 78 bp, Homo sapiens
gacaagtggaggcgccgctctagcggccgggactctgaactatggcgtaccaaatatgccccaacagcggcaagacca

SEQ ID NO: 374875 - DNA, 51 bp, Homo sapiens
tctacctcatccttgagtatctcagtgacaaactttctgcctccttggaaa

SEQ ID NO: 374876 - DNA, 98 bp, Homo sapiens
gcttgtaatcgcagctacttcggatcctgaggtctggagaaaatgatgtggaatataacaacatggaattagaagagggagaactcatggaagatgca

SEQ ID NO: 374877 - DNA, 83 bp, Homo sapiens
aaggtggaggctgcatcaggatttacctctgaagaaaaaggtgcgtatagcagcaaaattcatcattcatgcccctcctggag

SEQ ID NO: 374878 - DNA, 100 bp, Homo sapiens
ctcactattgatggtgtagcgctttaggggaagaagaagcgcacgctgaaggggtccattgagctctcccgaatcaaatgtgttgagattgtgaaaagtg

SEQ ID NO: 374879 - DNA, 82 bp, Homo sapiens
gtcagctgcaaatattctcttctgttctacagacctctctcctcttcctgctcatggcgagaaattaggcaacagctagcag

SEQ ID NO: 374880 - DNA, 74 bp, Homo sapiens
gaagttatggcagagttagctaaagaactccctcaagtttcatttgtgaagttacatgagcatgcagcatacct

SEQ ID NO: 374881 - DNA, 103 bp, Homo sapiens
cctgccgtccttctccactttcgccagcccgtgccgcgagcgcggcctgcaggaggagcatcagatccatgctgctgctgactcggagccccacagcttggca

SEQ ID NO: 374882 - DNA, 100 bp, Homo sapiens
acttatgcagaaccagtcttcaacaaatcatcctggagctaggaattgaatgatctggcacgggaccctccagcacagtgttcagcaggtcctgttggag

SEQ ID NO: 374883 - DNA, 90 bp, Homo sapiens
cgactggtggccaatgcagatactaattaagtgccctaatcaaattgtgagacagacttcacagagaatgcagttgtcttgacttcaggt

SEQ ID NO: 374884 - DNA, 75 bp, Homo sapiens
agctttaagtgcaatgtttcaaatacattttcgagtctggcactaaagaaatacaggtatcaggatgaagataca

SEQ ID NO: 374885 - DNA, 75 bp, Homo sapiens
ttccaggacggctacagcctgtgcccgggccgggagctgggcagacggtctggaaaatcccgaagcagaagcccg

SEQ ID NO: 374886 - DNA, 100 bp, Homo sapiens
gggcagctggacctagctcagcggaccctgtaccaggaggtgatgctggaaaactgtgggctcctggtgtctctggggaaacaaaggacccatcgcaaat

SEQ ID NO: 374887 - DNA, 75 bp, Homo sapiens
atgcttaaaaatcaccagttactttaatgaaaatggtggagtcaatgaagaaagtagcagggatggatgtggagc

SEQ ID NO: 374888 - DNA, 98 bp, Homo sapiens
cgtgcctgtcttcagatcttcacagcacagttcctgggaaggtggagccaccagcctctccttggatcatgaattttctaaaactgaggaactaaaac

SEQ ID NO: 374889 - DNA, 82 bp, Homo sapiens
agaacctgagctcgacctccgctcaattaaggaagtcgatgaggtgcctcgagtctttattggtaaagattgtataggcgga

SEQ ID NO: 374890 - DNA, 100 bp, Homo sapiens
atgaagagagggctctgctgtgtgctgctgctgtgtggagcagtcttcgtttcgcccagccagacgccctcctgcaaaacggcccaactacgttaagctt

SEQ ID NO: 374891 - DNA, 100 bp, Homo sapiens
gccggatcctttcccagaagaatgagaatgagataatgtacaacggccagccaattaccaaaatggcctgtggggctgaattcagtatgataatggactg

SEQ ID NO: 374892 - DNA, 82 bp, Homo sapiens
gcgcgtcgtggggcgagcggcagagaggtggagaagagcgagtacttgagaaagaagaggaagaagatgatgatgaagatga

SEQ ID NO: 374893 - DNA, 100 bp, Homo sapiens
aaggcagttctacgtggctgctcagggcatcagttggagctaccgacctgagcccacaaactcaagcaggggaaatgctgtctgtagctgagcacttcct

SEQ ID NO: 374894 - DNA, 83 bp, Homo sapiens
cccagcccgggtccccgcgttcacagccccagcgcaggagcatcagatccatgctgctgctgactcggagccccacagcttgg

SEQ ID NO: 374895 - DNA, 100 bp, Homo sapiens
aaatcgagagagtctggggcttctctctttccctgtgatgattaccatggtctgttgtgcacacaggtcctgggaactccaacaagggagcaaatcagag

SEQ ID NO: 374896 - DNA, 75 bp, Homo sapiens
ctctgcagaactttccagtcgactctcaagggaaaagtatgaattgcacgcagcgactgacaccactcccagcgt

SEQ ID NO: 374897 - DNA, 82 bp, Homo sapiens
ggcaacttacccgagaacgtgcgggaagagaagatcatcgagcatttcaaacggtcgcgtggggcaggcagtggcgctgcgg

SEQ ID NO: 374898 - DNA, 100 bp, Homo sapiens
cttgacgatccagagagggccatccaggatgcaattttagtttggaaattttagcattcaggtgccaggaatgcagatgggacagccagtgccagaaaca

SEQ ID NO: 374899 - DNA, 82 bp, Homo sapiens
agtgtttgcctctggttcagctcatacaacagcttcttaggcagagaacatttataatgatgaagaccctgaaggaagcgtg

SEQ ID NO: 374900 - DNA, 100 bp, Homo sapiens
cagccagggatattgagaaacttctgagcaacagatctaaagccctggtgtctctagtgatccctgaaaagttccagcatattttgcgagtactcaacac

SEQ ID NO: 374901 - DNA, 50 bp, Homo sapiens
gaggccccagaactatcttttcggtttgggccccatggtatccctgtgac

SEQ ID NO: 374902 - DNA, 75 bp, Homo sapiens
gtgagtgatcactctcaatcccggattaaagaagctaattgatcaagaaatcaagtctcaggaggagaaggagca

SEQ ID NO: 374903 - DNA, 83 bp, Homo sapiens
gccaagcagctatggaggaaaatcagacacagaatgttcagcttaacaaagaaatgacacttgccagcaaccggagcctggca

SEQ ID NO: 374904 - DNA, 100 bp, Homo sapiens
cgggtgtctttgtccccccggtgtcgctgccctggcccgcagggtcagtttgaaaaggaggatcgagctcactgtggagtatccatggagatgtggagcc

SEQ ID NO: 374905 - DNA, 101 bp, Homo sapiens
tttgcatctgcctgtccagccagcatggaaccaaagcggatcagagagggctaccttgtgaagaaggatcttatggttggtgatgaggcaagtgaattacg

SEQ ID NO: 374906 - DNA, 83 bp, Homo sapiens
ctggtcaggttgactggagatcttattgtgatgaagtgtcctcttgctagcaccaataaaagatttctaattaacacaattaa

SEQ ID NO: 374907 - DNA, 101 bp, Homo sapiens
gccagacgttcctgtaaaagaggacaccaacagtgtggtggagaaagcaatggatgaaatcaaatcccaaggccataggaaaaggatacagagtagagttt

SEQ ID NO: 374908 - DNA, 98 bp, Homo sapiens
tgctggtttctttgctggagcacttgagccacgtgcatgaaccaaacccacttcgttcaagacaggtgtttaagcgtgctgacctggaggggaagcgg

SEQ ID NO: 374909 - DNA, 135 bp, Homo sapiens
cttgctccaagtcaataagaagatgtaaagaaataaatatttccttcattccacatgaatctcagtcaccttcaggccattcagaggaggaaagagaggggaatatgaagtcagccaagccccaagtgaaccaca

SEQ ID NO: 374910 - DNA, 83 bp, Homo sapiens
ctgccctccgctcagctcgagcttccctcgtggccgacggaacaatgaaggttttaaaatcaaagatgggaaaatcggagaaa

SEQ ID NO: 374911 - DNA, 101 bp, Homo sapiens
taactgcctccattacactgctgagtcacacacaacgcttgttatgttttcatcacttctctccagaaggtagaagatgacggtgaaatgttccacacact

SEQ ID NO: 374912 - DNA, 100 bp, Homo sapiens
cgccattgtgcagctgcaggaactctctttgaggctgaagagctgcttcaccaaggattatgaagagcatgacaagaccatgctcgacagctgaccaagg

SEQ ID NO: 374913 - DNA, 100 bp, Homo sapiens
ggtcccagaccaaatatgagtatgcagccaaaccaaggtccagggatggatgggatcatggtgacctggaaagacaactttgactccttctacagtgaag

SEQ ID NO: 374914 - DNA, 100 bp, Homo sapiens
gccgggggagcggggccttccacaccccctccgtgggtgtgtgagtggagactgctgcacggactctggaaccatgaacatatttgatcgaaagatcaac

SEQ ID NO: 374915 - DNA, 80 bp, Homo sapiens
ccagtcctcatcctggatgaagccaccagcgctttggatgccgagagcgagtatctgtaccaaatatgccccaacagcgg

SEQ ID NO: 374916 - DNA, 98 bp, Homo sapiens
ggagcagaggaaccacacgctgatcatgtccacaggtcctggctaccctgggaagagacaagaagtaaatgaagaaagaggaagattccaggacctag

SEQ ID NO: 374917 - DNA, 98 bp, Homo sapiens
acgttctttcgcttttttacctgccaatcaaactgctacaagacaacaccctgatctggcatggacatgctgctttgaatgctgcatcaagtgtctgg

SEQ ID NO: 374918 - DNA, 82 bp, Homo sapiens
aaatgccctgaggaaaagtggccagttctgtgatgttcgacttcagggacacggccaacacggtgaaggaaaagttcgggag

SEQ ID NO: 374919 - DNA, 100 bp, Homo sapiens
tgacgttgcaaaggcgcttaatcggcctccaacgtactctgaagaagaagctatggagactacaccagccaaaggaaagaaagctgcaaaagttgttcct

SEQ ID NO: 374920 - DNA, 96 bp, Homo sapiens
ttgggaagttgcactggtcaagttcaagtcacacagtactatactggcaattgctggagaagattttgcaattgttgcttctgatactcgattgag

SEQ ID NO: 374921 - DNA, 74 bp, Homo sapiens
cggggagctgaagctgctgcttttgggaccgcagctgaatgcacagctagaaggttggctttcacaagtacagt

SEQ ID NO: 374922 - DNA, 96 bp, Homo sapiens
ccgcagccatgaagaaccaggttgcaagatttaatgacctcaggtttgtcggtcgaagtggaagaggagggatttttgaaacagtggaaaatgagc

SEQ ID NO: 374923 - DNA, 74 bp, Homo sapiens
ccggcagaaactggacagtaagaaacttctaggaatcttgtcgattggcctggctgctgcctactacagcggag

SEQ ID NO: 374924 - DNA, 98 bp, Homo sapiens
tgagtggttgtgtggtcgcgtctcggaaaccggtagcgcttgcagcatggatgagttccacccgttcatcgaggccctgctgcctcacgtccgcgcct

SEQ ID NO: 374925 - DNA, 75 bp, Homo sapiens
ccgcgggcggagactgggctccaccgaggaggctggaggcaggtaggcgaaaaccaagagtacatcggcctcgtt

SEQ ID NO: 374926 - DNA, 100 bp, Homo sapiens
ggcccctgccgtgtggacccgtaaaataaaatgggtgcacgtcggcgacgaggacttcgtacacctgcgagtgttccaatctctccctcatgaaaacaag

SEQ ID NO: 374927 - DNA, 95 bp, Homo sapiens
agacgatcaggacgaaggaaactgtggaggacctcgaagtagggggaaaactgcagtggaagatgaggacagcatggatgggctggagacaacag

SEQ ID NO: 374928 - DNA, 100 bp, Homo sapiens
aaggggcttacgcagaaggacctggccacggtgctgcccaccaaccctgaggagagctggcaggtgtacagctctgcccaggacagcgagggcaggtgta

SEQ ID NO: 374929 - DNA, 100 bp, Homo sapiens
ctcttgccaaacagaccttgaaagacaaaactggcactgattcaaattcaacagaatcctctgaaacttccacaggtgtcagcggtgcccactgtgctgg

SEQ ID NO: 374930 - DNA, 75 bp, Homo sapiens
cgcgagtgaggaaaggaggtactgtagttggcaacaccatcatgacatcacaacctgttcccaatgagaccatca

SEQ ID NO: 374931 - DNA, 75 bp, Homo sapiens
ctcagaggatcaggcgtgtgtccagttctggattaacacagattcctcagatccagaagactgaaatttcctttc

SEQ ID NO: 374932 - DNA, 96 bp, Homo sapiens
actcagggattgtgtgaatatgctatctatgtccaaggttcaagttctttcttcaaagagtcatcagaataacatggattgaagagacttccgaac

SEQ ID NO: 374933 - DNA, 74 bp, Homo sapiens
gatatctgctcctctgccaggcccagctgctggtctatgagaatgaggcagcagaagaggatgaaacacaaaac

SEQ ID NO: 374934 - DNA, 75 bp, Homo sapiens
aaccgggccttcaactccagcatggagagccccaaaggcttcctggagagctacgaggagatgctgagctatgcc

SEQ ID NO: 374935 - DNA, 100 bp, Homo sapiens
ggattatggatcagatccaaatcatttttgaatcagagccgacaggcacttgaattgaaaatggaaaaccctactgctggtggtgctgcggtgatgaggc

SEQ ID NO: 374936 - DNA, 100 bp, Homo sapiens
aaaaattccgccgaaaaagagaagacgctttacccgactctttgggccgttatctcacgtcaactttgtagtgtgccaactctttgccttgctagcagcc

SEQ ID NO: 374937 - DNA, 51 bp, Homo sapiens
cagattcgcagtggtcgcttcttctccttgaaagtggtaaaatagctgtgg

SEQ ID NO: 374938 - DNA, 88 bp, Homo sapiens
ctcggaccaggaccgggatccccaccggctcaactcgcatctcaaggttttcccaaatagtgcaccccttgaaggagggacaaggctg

SEQ ID NO: 374939 - DNA, 100 bp, Homo sapiens
cccggcgcgcacctggcagtcccgggctcgagccccgccctgccgccagccagggaacccgagcgtcatgttagggtgaagcagaggacctcagtgctga

SEQ ID NO: 374940 - DNA, 75 bp, Homo sapiens
gtctggagaaaagtggtgacttattggaaggaaaatcacctcggcagtgtttgaaggaaggatactgcaactctt

SEQ ID NO: 374941 - DNA, 100 bp, Homo sapiens
tgtggtttttgattcaagtcctgttctacctactgccaattggaaaggtgctaagtgtggtggctcacacctgtaatctcagctacttgggaggctgagg

SEQ ID NO: 374942 - DNA, 98 bp, Homo sapiens
gcgaatatcgtcatcgttagaagattctccggtgaagactcccatcaaggtgaaggtgatcgagaaggacatctctgtccaggccatcgcctgccgca

SEQ ID NO: 374943 - DNA, 97 bp, Homo sapiens
gagctctttcaacaagaaaaataagggagagaaggtacccaaagggaaaaagggaaaagctgatgctggcaaggaggggaataaccctgcagaaaat

SEQ ID NO: 374944 - DNA, 100 bp, Homo sapiens
gagatatcatgctctggaattttggcatcaaggacaaacccaccttcatcaaagggggtaaagcccacagcttgaagccaagcataaaggagaagctggc

SEQ ID NO: 374945 - DNA, 100 bp, Homo sapiens
gcggtccctgtgacctgtggagacacggccagatctgccctccattggcatgccatcatcgtggatggacacagcgtggaggagctgtgcaaggcctttg

SEQ ID NO: 374946 - DNA, 100 bp, Homo sapiens
aacttactagtttgttgcaaaataatgtaaacgtcaatgcacaaaatggatttggaaggactgcgctgcagaactgataaatttcaaacggaagagagtg

SEQ ID NO: 374947 - DNA, 100 bp, Homo sapiens
agctgctgctgaccctggccttcaaccccgagccgctggtgctacaggttatcttgacgaatcagattacaacccatctgagtggagccctggcttctca

SEQ ID NO: 374948 - DNA, 98 bp, Homo sapiens
acatgaagaaagacgtgcggatcctgctggtgggagaactttatttacaaatgttggagtaataaagaaggcagaacaaaatgagctgggctttggaa

SEQ ID NO: 374949 - DNA, 90 bp, Homo sapiens
ggaaggggcagtacaagcttacgtctctgctcttcagtacaatcctatttcaccacccaatcctcagtcctttggaaagcagtttccagc

SEQ ID NO: 374950 - DNA, 75 bp, Homo sapiens
ccgtcagcatcccagccgtgctcacgaacatacggtccctaatgagcacagagaagaccaagggcttctgccagc

SEQ ID NO: 374951 - DNA, 83 bp, Homo sapiens
tccaaggtcattttcgtggagaaagccccaggccaccagcccctcgggttccaagatgcagctactggagacagagttctcac

SEQ ID NO: 374952 - DNA, 83 bp, Homo sapiens
ggccggaggacaccccatcgtgcagaattaaacaaccaccatgtcgagcaaaaaggcaaagaccaagaccaccaagaagcgcc

SEQ ID NO: 374953 - DNA, 83 bp, Homo sapiens
cttcgttgcttgcttgcctgtgcgcgcgtgcgcggacatggcctcaaacggaaatctggcattttttaaagtttgcgccccac

SEQ ID NO: 374954 - DNA, 80 bp, Homo sapiens
gaacagtctcgttgctgcctctgtgtacgctgaggggggaggtgaaagttacacaagaactgaaaaacattcaagttgag

SEQ ID NO: 374955 - DNA, 96 bp, Homo sapiens
aagcttcccttaacgccagtctttgaagggcttgccttcaagcagaagatcctgaaggagaaggctgtgcccatgatagaaggctacatgtttgag

SEQ ID NO: 374956 - DNA, 75 bp, Homo sapiens
gaatattctgttttgctgcccgaagcttgttaagctcaaatcttcgtcatgtgagagtatttgaaatggacatag

SEQ ID NO: 374957 - DNA, 75 bp, Homo sapiens
cagctggcgcctctgcagtggggtggcctcagccccgagtccaagaagatcctgacacccgccctcaagaagcgg

SEQ ID NO: 374958 - DNA, 82 bp, Homo sapiens
agacactgatgagctgcaattggaagcagcaaatgagacgtatgctaccaagcagtttctcgaagagattaacaagtggaca

SEQ ID NO: 374959 - DNA, 103 bp, Homo sapiens
ccgaggccttcaagtgcatgatgtgcgatgtgcggaagggcacctccacccgggggatatgagactttctactcggaatatcctgagtgttgcgtggatgtaa

SEQ ID NO: 374960 - DNA, 77 bp, Homo sapiens
ctgcaatatgctgctccaggcggtcttattgaaactgttcaggttccattatcaaaacgagcaaaatttgttggacc

SEQ ID NO: 374961 - DNA, 101 bp, Homo sapiens
aaacttcagcgatgtttaccatttaaacataaggacttcggcagtctgtccaaccttcaggtcactcagcctacagttgggatgaatttcaaaacgcctcg

SEQ ID NO: 374962 - DNA, 82 bp, Homo sapiens
gacagcgcgaggtccgcgcagcccagcgcagccatgcggacctacgtgggcgccatgcccgggaagatcatccagtgtttga

SEQ ID NO: 374963 - DNA, 127 bp, Homo sapiens
cgcagcttcctcggcgcccccggccgctaccgctcaggtgctgcaggcacagcccgagaaaccgcagcactacacgatcccaaaatggctgggcgaaaacttgctctaaaaaccattgactgggtag

SEQ ID NO: 374964 - DNA, 83 bp, Homo sapiens
cttgccttatcaccttcttgcttgcagctatgctaagtttctgcgcagaaccaaggcagcaaccatcattcaaaagtactggc

SEQ ID NO: 374965 - DNA, 51 bp, Homo sapiens
gaaaggagtggcccgtatggatttcatgagtaggtttaacttgccaacatg

SEQ ID NO: 374966 - DNA, 95 bp, Homo sapiens
tcgacgactccgtcgcagactacggacctgtctgggtctcagccgccaaagaccccgtccgtgcctccggagccagcgtggtggccatagacaac

SEQ ID NO: 374967 - DNA, 75 bp, Homo sapiens
acaggaacagggcagacgttagcgtgagtgatcactctcaatcccgggtttctgggtgtctctggggagcccctg

SEQ ID NO: 374968 - DNA, 100 bp, Homo sapiens
tggaatttaacgggaagctgttagccagcatcaatagcacgacattgacgaatgtgtaacctcctcctgcgagggccactgtgtgaacacagaaggtggg

SEQ ID NO: 374969 - DNA, 75 bp, Homo sapiens
acggtgacagattctagccgctactttgtaatccggatccaggatggtactgggaaaagagtgcaaattcggaaa

SEQ ID NO: 374970 - DNA, 100 bp, Homo sapiens
ccgggtcagcagccggccaaccgcagccaggagaaggagttcgtgcaggcgtacgaggatgtgctggagcggtacaaagtggagcgagaccgtgccctgg

SEQ ID NO: 374971 - DNA, 96 bp, Homo sapiens
tacgccatgaaagtggtgaagaaagagctggtgcatgatgacgagatctttgtggagttcacctctgtgtttgactgccagaaagccatgcagggc

SEQ ID NO: 374972 - DNA, 83 bp, Homo sapiens
gggaaggtgaaggtcggagtcaacgggttatgagtgccagtgagccgccttagatagaagcatcgtcagcactttattaatga

SEQ ID NO: 374973 - DNA, 80 bp, Homo sapiens
tccagagacaatggccccgatgggatggagcccgaaggcgtcatcgagctgtcacgaccggaggggggactcgcagcctt

SEQ ID NO: 374974 - DNA, 75 bp, Homo sapiens
tgaaattgaagtccttaacacccttggtgtgactgttctcagtgagaacgagtacaagttcagggacctaactgt

SEQ ID NO: 374975 - DNA, 75 bp, Homo sapiens
cgcagctgccccatgtgccagaaggagttcgcccccagttacagaatgtctgaaggggacagtgtgggagaatcc

SEQ ID NO: 374976 - DNA, 75 bp, Homo sapiens
tgcccagacggctcacctgtgcgggatggaacaaaagcttctaagtgccagatgatggaggagcgtgccaacctg

SEQ ID NO: 374977 - DNA, 83 bp, Homo sapiens
tgctgagcagcttgagcggaagcagctggagtgcgagcaggtgctgcagaaacttgccaagtaactaggatttctacctcaac

SEQ ID NO: 374978 - DNA, 100 bp, Homo sapiens
agcaacggcgacatccagcaagactcaccatcaattaccaaggcccttgcatctccccagatcgtttcccaagtttggcgatttgctgtcggtgcctcag

SEQ ID NO: 374979 - DNA, 132 bp, Homo sapiens
ggagacagtctgcgaccggacgggtctaggtgagacagaagccaaacaggaggaggaagtggagggccagattgattgggctgcattggcccaagcttggattgcccaaagagaagcttcaggacagcaaag

SEQ ID NO: 374980 - DNA, 100 bp, Homo sapiens
agcaggcctcatctcagagctgggtgccaggctgaaggatcactgaggaaggggaagtgggcaaagcagaatggccaaagttttctggtcttggatgagc

SEQ ID NO: 374981 - DNA, 82 bp, Homo sapiens
gaaaacacatctttacacactaacgccggcatcggccgcacaggcaccatcattgtcatcgacatgctcatggagaacatct

SEQ ID NO: 374982 - DNA, 74 bp, Homo sapiens
cgaggagatcttcggcaccatcggcatgcggcccaacgccaagaacaacgtatgccgagcagacagctggagga

SEQ ID NO: 374983 - DNA, 89 bp, Homo sapiens
atgctgctgtcgcttcagggagacacgagcaccatgaattagacctttacgagaagcacagttttgtcttcagtttcctctccccccac

SEQ ID NO: 374984 - DNA, 73 bp, Homo sapiens
aagaggggaagctgacagagatacctacagacggagtgctgtgccacgtgaatatgaccatctcccagaacag

SEQ ID NO: 374985 - DNA, 97 bp, Homo sapiens
ggaccatcccggatgcgccatgagcgagttgtcatcatcaagaatatgtttcatcctatggattttgagctgtcacctgtgtcattcactcacaatg

SEQ ID NO: 374986 - DNA, 99 bp, Homo sapiens
gtaaccgggtcaatgtgtggaatattggggggctcggctgcagacttggccaaatggacgggactattaaggtcctaggcctacttacaagcctccagt

SEQ ID NO: 374987 - DNA, 75 bp, Homo sapiens
aaagacatacagcttcagactacgtgcagctaacaaaatggggaattatatccagatcgagagacagaagattct

SEQ ID NO: 374988 - DNA, 100 bp, Homo sapiens
gtcaatcaagagactatccagcggggaaagtttaaaggaagaggaaatgatcgcagggaaaagctccagtcttttgactctccagaaaggaaacggatta

SEQ ID NO: 374989 - DNA, 86 bp, Homo sapiens
gctgtcggacctcgcagtggcaatgagaagaactgtggctgcaccatctgtcttcatcttcccgccatctgatgagcagttgaaat

SEQ ID NO: 374990 - DNA, 75 bp, Homo sapiens
aaacgatcctcccaccttggcttctcaacgtgctgggattatagggatgccttcaattaagttgcagagttctga

SEQ ID NO: 374991 - DNA, 100 bp, Homo sapiens
gagaagctgatgcaaattaccagtctgcattcactgaatgccttcttgctgccaattaaaactgtaggtgtgcagtgcacagccagagaacaacacatca

SEQ ID NO: 374992 - DNA, 117 bp, Homo sapiens
ttgactggaaacaatggcatttacagaaagagtcaacagcagtggcaacaggtcagatgtaccaacagtaccagcaacaggccggctatggtgcacagcagccgcaggctccacctc

SEQ ID NO: 374993 - DNA, 100 bp, Homo sapiens
acggaatggaggaggtgcctcacgacggatgtcttaaaatgggatctcatcgtctgcgcagtggttgctgtcctctcatttgcagtcagcgccagcactg

SEQ ID NO: 374994 - DNA, 50 bp, Homo sapiens
caggagcaactgggaaatgatgttcgttcccacatgcagggcagcacaag

SEQ ID NO: 374995 - DNA, 76 bp, Homo sapiens
gtcgctgggctgtcggcctggaccttgcagccgcaatgatgatatcatcaagttgaatcgaaaggaagggaagaag

SEQ ID NO: 374996 - DNA, 100 bp, Homo sapiens
ccttgtggagacaacgccttaacccaaggaagtgactcaaactgtgagaacttcagtgctattatgcctgcctgaaatgccttctttcctcttaactctg

SEQ ID NO: 374997 - DNA, 100 bp, Homo sapiens
tcgatctgaagaggcagaaggagcaggctctgcgggaggtggagcacctgaagagatgccagcagaaaactttagaaactgttcctttggagaggaaaaa

SEQ ID NO: 374998 - DNA, 98 bp, Homo sapiens
tcttcattatagaataattgatgtgagcactgttaaagaactgtgcagattaccaaagttccagagaacctgctaccctttgcagtgcagtgcagaaa

SEQ ID NO: 374999 - DNA, 112 bp, Homo sapiens
taagtctgtatatgttcctggaaatcatacccaccagcctctacggcagacacatgcaggccaacccagaaccaccgaagaagaataatgacaaatcgaaaaagatcagccg

SEQ ID NO: 375000 - DNA, 90 bp, Homo sapiens
gccggcccggcagcgcccggcccccggctcagcccccggagtgcggagccgaccagggggatatgagactttctactcggaatatcctga

SEQ ID NO: 375001 - DNA, 100 bp, Homo sapiens
ttacccgctggccctggtccggacccgcatgcaggcacaagattccccacagatgaaaacatcaaaaggaaatgggtattagcaatgaaaagacttgatg

SEQ ID NO: 375002 - DNA, 100 bp, Homo sapiens
ccagacctggcacccagagcacttcttctgctctcactgcggagaggtgtttggtgcagaagctgacatagcccagagatacaggataagcaaataccca

SEQ ID NO: 375003 - DNA, 75 bp, Homo sapiens
ggcggagcagacctactcgtggtgggccatgcacagacacagctcatgtctcattaatcacaccaacaaaaagat

SEQ ID NO: 375004 - DNA, 100 bp, Homo sapiens
aaaggacttccctgaaaaagctaaggatatctttattgaagctcacctttgtctaaataacattccaggatgccttgaagattttctgtaggataaaagg

SEQ ID NO: 375005 - DNA, 49 bp, Homo sapiens
gccgaatcccggctccaagaaaccggctggagcattggatttgctaaag

SEQ ID NO: 375006 - DNA, 153 bp, Homo sapiens
gcccgccaaccgagtgcccgcggggctggagaaacgactctgcgccgccgctgcctccatcctgggcaaacctgcggacattctgcccccgtggagactcccagagggaagcccccactcaacacccgctcccaggctccgcttctccgatgg

SEQ ID NO: 375007 - DNA, 75 bp, Homo sapiens
agcgagcgctggacggagaggaaagcgcatcaagatggtgctcatgtggaccagtggtgacgccttcaagacggc

SEQ ID NO: 375008 - DNA, 97 bp, Homo sapiens
tcagagtcagttggcagtgatgcaccttgtgttgtaaaagtggtattctctactgccgctgatggtcaaacgcaagtggaaattaaagtgtgtcagg

SEQ ID NO: 375009 - DNA, 82 bp, Homo sapiens
ccatgatgaaatcaaaggcagcataactttaaatcttccccaagatgtatgccatattttctgctcttaagaatcttcaaga

SEQ ID NO: 375010 - DNA, 75 bp, Homo sapiens
aatatggaagaagatggaaaaaacttgtttaatggctggaaaggcagctcatcatgcagagtgaaatgagggaaa

SEQ ID NO: 375011 - DNA, 83 bp, Homo sapiens
ggctgcgtcaccgccgcccccccagacaagatggacaccgcggaggaaggctggctttgctacagctgaccactccagtcagg

SEQ ID NO: 375012 - DNA, 142 bp, Homo sapiens
gacactttgttattggagaaacatgcagattatatcgcatcctatggctcaaagaaagatgattatagagtaatgccttctagctttttcctgctgttgcggtttttcttgagaattgatggggtgcttatcagaatgaatg

SEQ ID NO: 375013 - DNA, 100 bp, Homo sapiens
agacagactgctgagcgactatattgagaaggaggtaaaggacgagattgaggagctgcgggccgagatgctggagatgcgggacgtctatatggaggag

SEQ ID NO: 375014 - DNA, 96 bp, Homo sapiens
cagaaagagtgtctcatcttcttcaagataacttgccaaaatgaaagtaatggaccagtgaaggtgtggggaagcattaaaggactgactgaaggc

SEQ ID NO: 375015 - DNA, 98 bp, Homo sapiens
agcccgacgcaaaccaaggatctggggatcttcgcactatcccaaggcatcttgacagcagtagcaatgagcgtccagacatcagttccatccagaga

SEQ ID NO: 375016 - DNA, 100 bp, Homo sapiens
ccaggacccgctgcagcagggctgtgtgagctcagacttaattcagtgcacaaatgagatgaatgtgaacatcccacagttggcagacagtttatttgaa

SEQ ID NO: 375017 - DNA, 75 bp, Homo sapiens
aaggatattttctctaagtttacaattttcctacagagagtgaagcggcaacctttggcactgcatccatgagca

SEQ ID NO: 375018 - DNA, 75 bp, Homo sapiens
gtttgaatctcagagtgaagatgagttgacaccttttgacatgagcatccaggtgcccctgggcgctgggattgc

SEQ ID NO: 375019 - DNA, 51 bp, Homo sapiens
agcaagtctgcatcgcagaggccaggacaatgcagatcttcgtgaagactc

SEQ ID NO: 375020 - DNA, 95 bp, Homo sapiens
cgcgagagatcccgtccgccccagccgcgtctgggccaggagaaaaggtttttcgttggaatatacgttgcacatttatggcgattctgagtgtg

SEQ ID NO: 375021 - DNA, 75 bp, Homo sapiens
gccttagctgtgctcgcgctactctctctttctggcctggaggctatccagcggcgcggatggcgtcggggcgcc

SEQ ID NO: 375022 - DNA, 74 bp, Homo sapiens
gtggcaagacaagctcagaactgagaagctgtcaccacaggctcatcttggcagccaacagggatgaattctac

SEQ ID NO: 375023 - DNA, 87 bp, Homo sapiens
gtcagtttcgctttgattgctaccctggtatatgcacttttcaggtctatgttaacaatgaatgggcaaccagtgttggggaaggag

SEQ ID NO: 375024 - DNA, 82 bp, Homo sapiens
ggagctggacctctacctggcctacttcgtgcgtgagcgaggtttggtgcacctcgatttggaggaagtagggcagggccct

SEQ ID NO: 375025 - DNA, 82 bp, Homo sapiens
gaccatcttggtgagaaacattaagacctactaccagcttccccgggcgctgcctggacaggcctgcctgcgtgctgggaca

SEQ ID NO: 375026 - DNA, 114 bp, Homo sapiens
agaaagtggtgaatcccctgtttgagaaaaggcctaagaattttggcattgcccgagggcaacatccttcgagaccggttcaagagcttccagaggaggaatatgatcgagcct

SEQ ID NO: 375027 - DNA, 100 bp, Homo sapiens
tacttcacaaacaagccttcagaatcagatgaatggaggacctttttatagccagaatccagcgtggggtagagcagcggctgccatgctcttctgtggc

SEQ ID NO: 375028 - DNA, 83 bp, Homo sapiens
agttactagaaagcttcctggagggttttcacgatgaaagcacccaggtgtcgtgaaaactacccctaaaagccaaaatggga

SEQ ID NO: 375029 - DNA, 100 bp, Homo sapiens
ttcaaggaggccttccagctgtttgaccgaacagtttcagtcacgtgccagactttttcttaattacaaactgatagatggtccacatctcaactaacag

SEQ ID NO: 375030 - DNA, 75 bp, Homo sapiens
gtgctgcaggcacagcccgagaaaccgcagcactacactgaggtgctggcggaggagtccatagtatgtctgcag

SEQ ID NO: 375031 - DNA, 101 bp, Homo sapiens
ctcagcctcctgagtagttgggattacagattctgctgaagtgatccagtctcgagtgaacgaccaggagggccgagaggaattctatgtacactacgtgg

SEQ ID NO: 375032 - DNA, 50 bp, Homo sapiens
aagatccgcgaggttgtctgctgttatggatcgccctggaaattatgtag

SEQ ID NO: 375033 - DNA, 83 bp, Homo sapiens
cgcagaaggactgcctcactgagcaaccaagaggtgtgtgaagtggaattcgtcttctctgagggctccgaggcatctggacg

SEQ ID NO: 375034 - DNA, 75 bp, Homo sapiens
tcagagcaatccactactgccagaccagaaggacatttttattccttccccaagtctggaagaacaatcaaatga

SEQ ID NO: 375035 - DNA, 99 bp, Homo sapiens
gcccgctggccgggctggctgcggccgccctgggccgggccccaccggacgggggatatgagactttctactcggaatatcctgagtgttgcgtggatg

SEQ ID NO: 375036 - DNA, 82 bp, Homo sapiens
gaggagtctccaggagacccggggacagcatcgcccaggcccctgggaagaaggagaaagggccaacccctgaagaagcaat

SEQ ID NO: 375037 - DNA, 97 bp, Homo sapiens
ctggtgtaccatctcaccagtggtctgctacacaaagagttaagcatccactcatgtgaagtcaattcacagacattgggaccttcgagacagtgtg

SEQ ID NO: 375038 - DNA, 98 bp, Homo sapiens
tctcttcgctctttgcatcttaactgcagggtatcactgggatacatcagattggatgccaagcgttcctctgccggacatacaagagttccccaact

SEQ ID NO: 375039 - DNA, 90 bp, Homo sapiens
gagggtggcccgccacagctctgtcagcaaggaggagaaggttatcccgcagaaagtctcggagcagccagctgagctcccgacgcctcc

SEQ ID NO: 375040 - DNA, 96 bp, Homo sapiens
ttacaactcaaactttctcggttagaagagcaggttgcaaataaaaatgtggctaaagtaccacctcctgttcctacaaaaccaaaacagattaat

SEQ ID NO: 375041 - DNA, 75 bp, Homo sapiens
gccaccgcccaagggggaaacttctgcagaaaccccaaccgagcttccgtcgttcgccatcggtggtgtgaactc

SEQ ID NO: 375042 - DNA, 100 bp, Homo sapiens
atcatcaaacagctatggtgatgattagagacatactaatgtacatggatcagcggcaaactgaagccatccagttgctacaggcacagctgaccaacat

SEQ ID NO: 375043 - DNA, 75 bp, Homo sapiens
gccccctcagccctgtggctgggggcagagctcaggatttccctggggaaagtcttcactcagagcttcgctgac

SEQ ID NO: 375044 - DNA, 147 bp, Homo sapiens
caggggctgtggcgccggcgacggaccagcgacccaagcgccgcggttaaccacgtctcgtccacgacctccctaggagaagttgccccagtgcaaggcactgcattcgacctgagaaagccagtggagcttggaaaacacctgcag

SEQ ID NO: 375045 - DNA, 100 bp, Homo sapiens
gagcttattgctaaaaacagacaagaatatgaagacatagctgtgaagctgggaactgatctagaatagttaaacactttaagatgagaaaaattgatct

SEQ ID NO: 375046 - DNA, 80 bp, Homo sapiens
agctggaggatgaaggatcggtgcggcatcgtcctgggggcgctgctcttggtcttctgctcatggatgacgcaccagtc

SEQ ID NO: 375047 - DNA, 100 bp, Homo sapiens
aagaacagctgtggaaagaagttgcaaaacactgggttatccagaaaatcagtgctgtggataaagatgagccatccaatggacaccagttttacttcag

SEQ ID NO: 375048 - DNA, 88 bp, Homo sapiens
aggccggtggccgtgaggaggttgggggccctcgcggaggccgagaggcttaaggaggtggtattaaagataatcaaacattatcaag

SEQ ID NO: 375049 - DNA, 90 bp, Homo sapiens
cagcacacaaaatggatctcttacgggccgtgcattgtcccgagcaaaatctcgacgtaatttagatttccaggatgtcttagacaaatt

SEQ ID NO: 375050 - DNA, 99 bp, Homo sapiens
aacagaccctacagagcgacttccttaaagatgtcgaactcagcaaaatggctcctccagagctgtgggtgagcgtggaggatgctcagatgcacaccg

SEQ ID NO: 375051 - DNA, 99 bp, Homo sapiens
tgagcatcttatcccagcacatcaatagcaacatgccacaatcacttaagtggacatttgggagcaataaaaataagaagaaaggaaaagccagaaaaa

SEQ ID NO: 375052 - DNA, 71 bp, Homo sapiens
aagcagtgggaaaatcgcaaggaagccgggtcaatgagctgaaggagaaaggcaacaaggccctgagcgtg

SEQ ID NO: 375053 - DNA, 100 bp, Homo sapiens
tgcctgtgtatggagagcaagaactagaacagtctttggctagctggactcagaacttgaaagaacttcaaactatgaaggcggacttaacccggcacgt

SEQ ID NO: 375054 - DNA, 75 bp, Homo sapiens
tatcagtgatgctgccctgttagacatcatttgtcaagtttacccatgggggaactggttccagccaaaccgcac

SEQ ID NO: 375055 - DNA, 87 bp, Homo sapiens
aaaacagaataagctggagcaagtagaaaaggagttgttgagagtagcaggtgagaaggactggcagaaatacgagactgctcggcg

SEQ ID NO: 375056 - DNA, 50 bp, Homo sapiens
ccgagacgcactgggggccggatgttaatgaaattatcaggaaggagttt

SEQ ID NO: 375057 - DNA, 75 bp, Homo sapiens
gcggtcttcgtggtgttcgtggcaggtatacaaaactaggatatgctggaaatacagaaccacagtttatcatcc

SEQ ID NO: 375058 - DNA, 100 bp, Homo sapiens
tggagtgtaggtcatatcgccgcggacaaccctccatatgataagggagccttcagaatcgaaatcaactttccagcagagtacccattcaaaccaccga

SEQ ID NO: 375059 - DNA, 100 bp, Homo sapiens
tcagttatgcgccattcacttttgaagggaatttctgcccagatagtgtctgcagctgttgaagccatccttgtcaatatatttggtggtatcgtcaact

SEQ ID NO: 375060 - DNA, 131 bp, Homo sapiens
ctgcccagaggtccctcagcaaagatggtacaaaagagtctttggaggatgcggctttgatgggttccacttccaaacatgagttccaggccgagacaaagaagcttttggacattgttgcccggtccctg

SEQ ID NO: 375061 - DNA, 74 bp, Homo sapiens
cggaggcagagaagggaacgcccggcccagccccgtcgtcacgctgtggtacagagcacccgaagtcttgctcc

SEQ ID NO: 375062 - DNA, 101 bp, Homo sapiens
agcagtacatttccaaaatgatagaggacagcgggcctggtatgaaagtacttctcatggataaagagacgccacctaggaacatatggagtttttacaaa

SEQ ID NO: 375063 - DNA, 88 bp, Homo sapiens
aaggaagagagcactgcagccagtgaaaccactgagttggaaagacttcaaatcatgcaatagttcttgcccagctcatcactaaggg

SEQ ID NO: 375064 - DNA, 50 bp, Homo sapiens
agagaactcagcgaggattctgagatcaggatcctcatgaccagccaaag

SEQ ID NO: 375065 - DNA, 51 bp, Homo sapiens
ccggggcgcagttcggaggttcagtatggtttgaagtggtgaacatggatt

SEQ ID NO: 375066 - DNA, 100 bp, Homo sapiens
gctgtgcgcatgcagcacctggttttggctacgggcctccacctccaccgccagatcagtttgcccctccgggggttcctcctccaccagccactcccgg

SEQ ID NO: 375067 - DNA, 75 bp, Homo sapiens
ctttccggattctgcctccctccgctaacctccggtagctaaaattggtgctttctgctgtggccttagtttatg

SEQ ID NO: 375068 - DNA, 75 bp, Homo sapiens
tactaaagcaggctaccaaggacagagtcagtgatttccataaattgaagcaaaacacgatgaggcgagtggtac

SEQ ID NO: 375069 - DNA, 90 bp, Homo sapiens
tactgctagagcttatcatcttcaagacgatggtacccagacagtcaggaatgggatctatcctctgacagcctttgggctgcctcggcc

SEQ ID NO: 375070 - DNA, 90 bp, Homo sapiens
gatggatttttgcatgagacgcttctggacaggactccctggaggaaaagcggaagcggcagcggtctgaacgcctggaacggattttcc

SEQ ID NO: 375071 - DNA, 75 bp, Homo sapiens
ccaaaatcctaggagaaacctaaggactcagtggcctctgaggatgtggctgtgaacttcacacttgaggagtgg

SEQ ID NO: 375072 - DNA, 78 bp, Homo sapiens
tcattttattgcattagttcatgtagatgggcatctctatgaattagattgaccctcttgctggaatgacatctctta

SEQ ID NO: 375073 - DNA, 71 bp, Homo sapiens
cagccgcagcctcaccatcgctgagttcaagagtaactggaatgagattgttgacagctttgatgacatga

SEQ ID NO: 375074 - DNA, 98 bp, Homo sapiens
agaagtgcaagagcagaggccttctctagaccttgccaagatggcacaggtacggagatatgaggagacagattggctttgaaatcagagacatgtgg

SEQ ID NO: 375075 - DNA, 96 bp, Homo sapiens
ggtcagagacactgcccgggcggggagggcatgttccgtggcctcgcccaggccgacgggctttctgtctctggtcgtgatgagaacagtgtggag

SEQ ID NO: 375076 - DNA, 90 bp, Homo sapiens
agcttgaacagggctgacaacatttttccttttccggattgtgcagactggtgcttaaaatggaagtcgatattaatggagagtctagaa

SEQ ID NO: 375077 - DNA, 75 bp, Homo sapiens
aaattcctcacaggctttgaaaccaagtgaaggagtcttcaagtgccctgaggaccagcttcctctggactatgc

SEQ ID NO: 375078 - DNA, 101 bp, Homo sapiens
ccgtcatcgggaggagcagcctgaacccggggctggtgggcctttctgtgtcctactccttgcagaaaccagcctggacaccaagtctgtgtcagaaggcc

SEQ ID NO: 375079 - DNA, 78 bp, Homo sapiens
acacattcgttcctggccagaagtaaaagcacagctgccttgtctggagaagcaggtggagtatggcccctgtgtggt

SEQ ID NO: 375080 - DNA, 100 bp, Homo sapiens
gcctcatctcagagctgggtgccaggctgaaggatcactgaggaaggggaagtgggcaaagcaggggttgtagaaggtgatttagctgccatagaagcat

SEQ ID NO: 375081 - DNA, 117 bp, Homo sapiens
ccgtcctccaccgtttcctccaggacagcacctagtcgtggccggaggagtctcagagctgtcagaaagcgttgtagaatgaatgaagacactggcactgattatataacaccttgg

SEQ ID NO: 375082 - DNA, 50 bp, Homo sapiens
caacgatcggaactcggacacgattcctaagcggctgtacaaggccctct

SEQ ID NO: 375083 - DNA, 75 bp, Homo sapiens
ttgtgggcatgatccataatcggtttcaaggatcagagcggcaccgaacctattagtagtgaggaagatggcagc

SEQ ID NO: 375084 - DNA, 100 bp, Homo sapiens
gagaagcagcgcctgttcccggggcagatccaggttcagattcacagttaatagaaggatctctatagttggatttggcttgtatggatctattcatggc

SEQ ID NO: 375085 - DNA, 83 bp, Homo sapiens
ttatcctgctgcgatccccagggaacaaggcccagggccccggccagtgcccagccccgctgggagacccggccagcaccacg

SEQ ID NO: 375086 - DNA, 123 bp, Homo sapiens
cttatctcttctttaacttatcgtggaaataaaacagctgttttgcagattggactacaagaaaaatatgtcgtaactgcaagtgtggccaagaagagcatgatgtcctcttgagcaatgaag

SEQ ID NO: 375087 - DNA, 75 bp, Homo sapiens
tgatccgggagagtgagagctccccaggggagttctctgtgtctgtgaagtgaagcggaggctggacctggaaac

SEQ ID NO: 375088 - DNA, 83 bp, Homo sapiens
ccatgtccgcccaggcgcagatgcgggccctgctggaccagctcatgggcacggctcgggacgatacctgaaaaaagcggcag

SEQ ID NO: 375089 - DNA, 74 bp, Homo sapiens
gggagatcgtgggcgagctgggcgacggcgccttcggcaaggtttacaaggcagcaatgaatgtggatcacgag

SEQ ID NO: 375090 - DNA, 75 bp, Homo sapiens
cgcgcgtggaaagtgctagcccgagcgaggatcatgaggcacgggaacagaaagaacagcttcaaaagatgaaag

SEQ ID NO: 375091 - DNA, 100 bp, Homo sapiens
agtgaccattccaacagatttgattgcctccagtggagatatcatcaaggtagagttggctttgtgggacacagctgggcaggaagattatgatcgcctg

SEQ ID NO: 375092 - DNA, 82 bp, Homo sapiens
cgcggatctcaccgccgctcagggttctaataactggtccagcggacaccccttatgcaaatggctgctttgagtttgatgt

SEQ ID NO: 375093 - DNA, 74 bp, Homo sapiens
tgcagaaggccctggagcctacaggccagagtgggttcagatggctccaactctattttctaaatttattccaa

SEQ ID NO: 375094 - DNA, 100 bp, Homo sapiens
ctgccgccctgagtcactgcctgcgcagctccggccgcctggctccccatactagtcgccgatgtccggtctgtgctacgacagcaaaatgttccaggtg

SEQ ID NO: 375095 - DNA, 75 bp, Homo sapiens
ggccgcggacatgtgcaggatgtccttcaagtggttagcaggaagaagatgagccttaagtctgaacgccgagga

SEQ ID NO: 375096 - DNA, 99 bp, Homo sapiens
ggcgttcggtcctgctgttgcggccgctgccccagggctgcggggacgaatgttcgtggcatcagagagaaagatgagagctcaccaggtgctcacctt

SEQ ID NO: 375097 - DNA, 114 bp, Homo sapiens
ggggcccggacagaagatggtgcagaagaaaccagccgaacttcagggtttccaccgttcgttcaaggtaactaggatttctacctcaaccgcgagacctatgcaaggacggtg

SEQ ID NO: 375098 - DNA, 50 bp, Homo sapiens
tcaagtacacgcctgtccagcagggtccgcaagcaggtggtgaacatccc

SEQ ID NO: 375099 - DNA, 82 bp, Homo sapiens
catgccatcctgaacgtctctccctgtcctagctctgtaactgtttacagttatcccatcatcaggtagcaagttgaaacga

SEQ ID NO: 375100 - DNA, 100 bp, Homo sapiens
caagcaaaggagttgcagggaccagccacttccggatccggggcctccttcccctccaaggcatgctggccaacatagccgaggtagaggtctccatccc

SEQ ID NO: 375101 - DNA, 76 bp, Homo sapiens
gctaaaatggacccaatgaacatctgggatgacatcatcacaaatcggtttgtgttgctagttaagctagcttgta

SEQ ID NO: 375102 - DNA, 100 bp, Homo sapiens
ggttggagatgggaccacatcagtaattattcttgttgaagactgggatagtttccaagctattttggatcatacctacaaaatgcatgtcaaatcagaa

SEQ ID NO: 375103 - DNA, 74 bp, Homo sapiens
ttgaatctgacaaagatcgaacagttgtgctcagcatgcttttcacttccactgcatctctcgctggctcaaaa

SEQ ID NO: 375104 - DNA, 51 bp, Homo sapiens
ggaccctgtgaaatactgtaaaggtgcagtacagaaggtttctaaaaaatt

SEQ ID NO: 375105 - DNA, 51 bp, Homo sapiens
gcaagaaagacgcctgccccagtcagaatggcggcagtggagcatcgtcat

SEQ ID NO: 375106 - DNA, 50 bp, Homo sapiens
agtgactggattggcatcttcaagagtacaggggctcaggtccaggtggc

SEQ ID NO: 375107 - DNA, 50 bp, Homo sapiens
catgtctgcgagccaggattcccgctgggattctgtccctgaccgtcttc

SEQ ID NO: 375108 - DNA, 83 bp, Homo sapiens
atcccggagagctgacaatgatgaatctcaggagactcatgcatctgtatgccgtgtgcgtggactgcctggaaggggttcac

SEQ ID NO: 375109 - DNA, 100 bp, Homo sapiens
ccatcagaacatggacaagatcaaggttccgacgcagatcatctgggggaaacaagaccagctttgaaaagtccagccgcatttcatgagcagagaagga

SEQ ID NO: 375110 - DNA, 82 bp, Homo sapiens
aggcccacggaggaagagccgggcagtccctggagcgggccaggatgccggctccaggagcagcagtggaggtcgggaacgc

SEQ ID NO: 375111 - DNA, 74 bp, Homo sapiens
aggaccccttccccctgtacccaggggaggtgctggaaaagaggttctgtccggaagcagattctaaaaccatg

SEQ ID NO: 375112 - DNA, 90 bp, Homo sapiens
cagaggacacgaggcggcgggctggagacatggaccgcggcgagcaagacaatgcagatcttcgtgaagactctgactggtaagaccatc

SEQ ID NO: 375113 - DNA, 101 bp, Homo sapiens
gctctgcagagagcagtagagaggggccagttagaacagataactggcaaaggtgcttcggggacattccagactattgcagatatcatccgaacatgttt

SEQ ID NO: 375114 - DNA, 100 bp, Homo sapiens
cgcttttacgagtccctccctcccgaaatgaaggagttcacccctgaatacaaagcatcttcatgatacagttaagaggaatcttgacagcgccacttcc

SEQ ID NO: 375115 - DNA, 100 bp, Homo sapiens
ggacggcccggcagacatgcagaaagtacgaatctgctctgagggcggatgggcaagccgattttttcagttgatattcaccctgacgggaccaagttcg

SEQ ID NO: 375116 - DNA, 88 bp, Homo sapiens
cttccagaacatctgggagaatatttaatggaaaatcgcttggttaaaacctgacacttttaacagtccagttacaacacagggatca

SEQ ID NO: 375117 - DNA, 96 bp, Homo sapiens
tcgcagtggtcgcttcttctccttggtaaaagaaatcattgagtcccccgccttcagaagagggtgcattttcaggaggaagcgatggcttcagac

SEQ ID NO: 375118 - DNA, 90 bp, Homo sapiens
acctcagataccagcaactcccccatcgtatgaatctcaacagccaactcagtttataaatccagaaacacctggctatgttggatttgc

SEQ ID NO: 375119 - DNA, 96 bp, Homo sapiens
agaagctgaagcattgcttcaaagcatggggctaactccagaatcccccattgggtaagaaggtggatggctctgtaaatgcctatgccataaatg

SEQ ID NO: 375120 - DNA, 100 bp, Homo sapiens
tttctgcagactgcctcaacagagtgatagattactcttgtctctgctgctcctgggaaagtgatttgtgaaatgaaagtagaagaagagcataccaatg

SEQ ID NO: 375121 - DNA, 50 bp, Homo sapiens
caaccgcctacgagacactcaagggtccagattttggctatgtaactcga

SEQ ID NO: 375122 - DNA, 100 bp, Homo sapiens
agcccattcggatggtcagctgcaggaaggctcgcctatccaggcctggcaactcttcgtcaatgaggaagctgagtatctatggtgacttggagtttat

SEQ ID NO: 375123 - DNA, 100 bp, Homo sapiens
aactgccgcaacaataagaaactcctgggccgcgtgaaggccttcgataggcagcctggcatcctcgctacaacctcattgttgtgggccgatacccaga

SEQ ID NO: 375124 - DNA, 74 bp, Homo sapiens
cacgagtcgggtcctgagaccagctcattcttggaatcccagaacaggccttaagtcttctccacatggccatc

SEQ ID NO: 375125 - DNA, 74 bp, Homo sapiens
tgtttctggatgattctaagagggtcctgaggacaccgtgagccagccaggcctggccgctgggcctgaccggc

SEQ ID NO: 375126 - DNA, 100 bp, Homo sapiens
aaggtgctaatagtagctggccatcacaactggattgtagctgcatatgcccattttgctgtgtgttacagattagaaatgatatttgccaaatttgatg

SEQ ID NO: 375127 - DNA, 100 bp, Homo sapiens
gcctacgcagagctcatcgtccttgataacaacgaacttgatgcaagtgataggtttgccaaggtcagacctctcatcatccggatgaactgcaatttcc

SEQ ID NO: 375128 - DNA, 100 bp, Homo sapiens
tggaataggttcgccgaagagagagaaaaattcatggagcatatcattacttatcacgaatttgcagaaaaccctggacttatagacaatcctaaccttg

SEQ ID NO: 375129 - DNA, 75 bp, Homo sapiens
cggacctcagtaccagtacaggatcatcttccggacccgcgagggtctattgacattcagggatgtggccataga

SEQ ID NO: 375130 - DNA, 100 bp, Homo sapiens
agcgcagcgctgccatggagcccagcagcaagtattcatgtgattgaacggcgtgctcttcctgagttcttcaatggaaaaaacaaatccaagactccag

SEQ ID NO: 375131 - DNA, 100 bp, Homo sapiens
ccgcggtgcgcaagcgcaaccgtcggtgggtcggggatcggtcgcctgagagaaatggtggagtcaatgaagaaagtagcagggatggatgtggagctga

SEQ ID NO: 375132 - DNA, 97 bp, Homo sapiens
aatgttggagccgtctgcaaagtgtccccggcaagaagaacatccatgatagcagtcttctgtaaatcgaacttttcaagaattctctgaaggaacc

SEQ ID NO: 375133 - DNA, 75 bp, Homo sapiens
taccacgacaaaaccaccctagtgttccagttctgcatctgataccgtctcctttccctgaagtctggcacacca

SEQ ID NO: 375134 - DNA, 116 bp, Homo sapiens
ctccgtgcaggagctggccccgccgcccgccctaccccccaagcagcggcagctggctttatcctgtggataaacgcagagtgaacgagtttggggagtcctacgaggagaaggcc

SEQ ID NO: 375135 - DNA, 90 bp, Homo sapiens
tgatcccaggggatggcatcgggccagagctcatgctgcatgtcaagtccgtcttcagatttggtcgtattgggcgcctggtcaccaggg

SEQ ID NO: 375136 - DNA, 100 bp, Homo sapiens
ccccttcggagacaacaacctgctgggcaccttcatctggaataaggtgaaggtgctaaaggagaagatagaagctgagaagggtcgtgatgccttcccc

SEQ ID NO: 375137 - DNA, 82 bp, Homo sapiens
tgctctcccctcccctagtatggaaggctggctacagcaaacatcattcaagatgtccagcaaagggagcagcacagatggc

SEQ ID NO: 375138 - DNA, 96 bp, Homo sapiens
cggcccatcaccggcagaacacagcagggcggaggaaagtgcagatcatcaatgctgtggtactgttgattttattgagtgccctggctgatccgg

SEQ ID NO: 375139 - DNA, 75 bp, Homo sapiens
cagcatccaaacattatcactctaaaggatacgaatctagaacatgatgtctatgaaagacttactaacctgcag

SEQ ID NO: 375140 - DNA, 76 bp, Homo sapiens
gacgcatgtaaagaggtgtagattcagggatactacatcaacctcgctaacgcctgaggacactgaagacatgccc

SEQ ID NO: 375141 - DNA, 75 bp, Homo sapiens
ccaccatggagacccgctacaacctgaagagtccggatggccctgctgtggcaccagtgaccaacgggaacacaa

SEQ ID NO: 375142 - DNA, 83 bp, Homo sapiens
aacaaaaccaaaggccgaagtacaagatctaaggctcttgtctggtaaaatctgtaaaaactgggtcagttttttggacaatg

SEQ ID NO: 375143 - DNA, 101 bp, Homo sapiens
tccgaaatttcttgggtgaaaaatatatccgcagggttcggatgagaccagtctctgttggatgaacccaatcccaatagtccagcaaacagccaggctgc

SEQ ID NO: 375144 - DNA, 100 bp, Homo sapiens
gaccagcaagataatgacaaagccagctgtgaggactacctaatgatttcgtgttggaaaagagactgttcaaaccactgaggatcagattttgaagaga

SEQ ID NO: 375145 - DNA, 90 bp, Homo sapiens
cttggagaaccaccgcatcaagagcttcaagaacaagggccgcgatgtggaaggaaagaatatggcaaagctgatgcaagatgggtttat

SEQ ID NO: 375146 - DNA, 90 bp, Homo sapiens
gaacaatccgtctggatcacggatgtaggaagtgggccatatatacaattctacatcccgtattagaaacagaaaagaaaaaaagtcttg

SEQ ID NO: 375147 - DNA, 101 bp, Homo sapiens
ctcggcgattatggacccggccgaggcggtgctgcaagagaaggcactcaagtttatgctcttttgtgacagggacggcttgttgcgggcacttctcaccc

SEQ ID NO: 375148 - DNA, 74 bp, Homo sapiens
cttccatcctggttcttccaaagtgcccggacccaaaacaggaagtaaggggcctggataccaagaagtgactg

SEQ ID NO: 375149 - DNA, 90 bp, Homo sapiens
ccgacattgacatgtcatgcctgggtgcagcttctctagctggccttgctgttgagggccaagatgggtcgccgagctcaacaggagtca

SEQ ID NO: 375150 - DNA, 100 bp, Homo sapiens
gggctgaattctgactcagccatttactaactgtgtgaccttaggtgttacacataatattgcattacttcgagaggtgataatcaactcacgctttgta

SEQ ID NO: 375151 - DNA, 80 bp, Homo sapiens
gccaactccaatgggcctttccagcccgtggtccttctccatattcgaggccagctttgctccaatggaggacaaactca

SEQ ID NO: 375152 - DNA, 98 bp, Homo sapiens
tgaaaaccaagacccggacctttaatacaagtacaggcggtttgcttctgcctagcgataccaagaggtctcaggatgaagcctgctgggagcgtgaa

SEQ ID NO: 375153 - DNA, 100 bp, Homo sapiens
tgcactgccaccctgggcaacttcggcattttgttcccaacatcacctttggtcaccctgtggtagaaagccttcgaaagcagctaggccaggacccttt

SEQ ID NO: 375154 - DNA, 73 bp, Homo sapiens
gagaccgcaccacccgcctctgggccccagacaggggccctcctcgccaaagacagcctagagaggacggcaa

SEQ ID NO: 375155 - DNA, 75 bp, Homo sapiens
cagccgcccgctggccgggagcggagcccctgtgggatgtacagttacccagcacgtgtacctcctcctcctcct

SEQ ID NO: 375156 - DNA, 96 bp, Homo sapiens
aaccggcagctctccacgcccctgcccgaagcctgacccgactgcctctctcagtgagatcattataaacctgcaatttcccatcgagatttaaac

SEQ ID NO: 375157 - DNA, 90 bp, Homo sapiens
ctacacgtatcctcctgcctagcgcaggtactgtccaagaagctggaacattattatccagcaagaatgttcgtgtcaactgtttggacg

SEQ ID NO: 375158 - DNA, 75 bp, Homo sapiens
tcaagaaatgaagaacgagattcagacacagaccttaacagtggaagtagaggttgtgatcatctcgaacaggaa

SEQ ID NO: 375159 - DNA, 82 bp, Homo sapiens
gtcgggccgcgccgcgcctcagctctggcaaatgttctgaaaaagactctgcatgggaatggcctgccttacgatgacagaa

SEQ ID NO: 375160 - DNA, 82 bp, Homo sapiens
gcgagcgcggcgcggggccaccatgggggcccagctcagcacggggtgagcccctccagactccgaataggagatcaagagt

SEQ ID NO: 375161 - DNA, 75 bp, Homo sapiens
tgaagtagccattggggcccttggatcaattaaggtgctgctagctgaggaggggatagctcctctttcttctgc

SEQ ID NO: 375162 - DNA, 100 bp, Homo sapiens
tggtcggctggggtccggctcctggagaacatggcccggcctcccgggggctctggtcccctcctcggcgcattgaacagtcctgggcactacatgtaaa

SEQ ID NO: 375163 - DNA, 75 bp, Homo sapiens
cgagctgggcccgtgagccactcggcctcaggaagtgctctctggcgtggtggtcatatcgagtaaggattcagt

SEQ ID NO: 375164 - DNA, 100 bp, Homo sapiens
gggactgacttacctaggaatgagagggacaggagtatctgaggatggagaactcagcactgtctgcgagcctggctgtggtgcacatggaacctgccat

SEQ ID NO: 375165 - DNA, 100 bp, Homo sapiens
cgctgcctgtggagatccgcggaggccgacaggattcgttggctgccgtccccgctgctgtgcattggggtgctggaaatgtaaacaagaatagactgtt

SEQ ID NO: 375166 - DNA, 100 bp, Homo sapiens
aagagttcggcgaggaactccagaatacaagaccctgtgcgcactcattcgaggagtccatcaaaagaataagtctacctctgggtttgacattatcaac

SEQ ID NO: 375167 - DNA, 100 bp, Homo sapiens
cgcttgtccactgtccgccagacctgctgctgcttcaatgtccgcatcgcaaccaccgccctggccatctaccatgtgtttcaccagtgatcattaaaga

SEQ ID NO: 375168 - DNA, 100 bp, Homo sapiens
cttcatccgaaccctcagcctcaagccgctgctcttcggatgatcacggacgtgcagctcgccatcttcgccaacatgctgggcgtgtcgctcttcttgc

SEQ ID NO: 375169 - DNA, 87 bp, Homo sapiens
ttatatagagatgtgatgttggagaactacagaaacctcgtctccctgggtgaagccaaaaaccttccctcttacccggggccgagc

SEQ ID NO: 375170 - DNA, 49 bp, Homo sapiens
tgcctgagagatctccaagaattacagctctattaccaggttttaaact

SEQ ID NO: 375171 - DNA, 100 bp, Homo sapiens
ggccttcctgtccctgcgctctttgacagcctcctgacctgtaggacgagggattccttgttcttctgcctgaaagctctcgatgttctgaagtatgagg

SEQ ID NO: 375172 - DNA, 51 bp, Homo sapiens
ccgccagcatgccccagtccaaaggtacatgatgatgagggactgttggca

SEQ ID NO: 375173 - DNA, 74 bp, Homo sapiens
gaagaacagctcgagagagcattacaagccagcctctgggaccgagatattgatgatgttaagaagttcaaacc

SEQ ID NO: 375174 - DNA, 100 bp, Homo sapiens
tttaaatgcagcatctgcgatgtgaggaaaggcacctccaccaggaagccagttgagggaagttctccatgaatgtacgtcacaatgatgatgaccgacc

SEQ ID NO: 375175 - DNA, 83 bp, Homo sapiens
ggcggtttttattaaggctgttcatgtgaaaggtaactaggatttctacctcaaccgcgagacctatgcaaggacggtgtgga

SEQ ID NO: 375176 - DNA, 100 bp, Homo sapiens
gggacatcagctggcaattgtaaataggtttccaggatcaaaactaacctttcagatgagtaacgaaagaggctttgaaaatgtagaactgggagtcata

SEQ ID NO: 375177 - DNA, 75 bp, Homo sapiens
ggagtacttacaggttatgcactttgacaccctgctagatggtgaccaagaatatggcccaggtgaccaaagccc

SEQ ID NO: 375178 - DNA, 100 bp, Homo sapiens
cagcctctcagtcaacatctccttcgcagccgcgcaaaaaaaacaatgcagatcttcgtgaagactctgactggtaagaccatcaccctcgaggttgagc

SEQ ID NO: 375179 - DNA, 75 bp, Homo sapiens
ttgccttgtatttccagagaacagggagatgcagttaaagacttgatgcttcgctttctgggtgaaaaagctgca

SEQ ID NO: 375180 - DNA, 100 bp, Homo sapiens
cggcttttggcatatgctttggattattggtccaaggggcagttgaaagcacttttttcggaacacgaggttgctgagtcattaggaatcacagaattcc

SEQ ID NO: 375181 - DNA, 100 bp, Homo sapiens
ccagtatctactccatgacggctgtggcctttgataggctgcaaactacttagacatcaaaggtttgcttgatgttacatgcaagactgttgccaatatg

SEQ ID NO: 375182 - DNA, 83 bp, Homo sapiens
gtcacacctggccattcagtgcagttgctgaattaatagaggcaaggtctcgctaagggctggaatgcagtggctattcacag

SEQ ID NO: 375183 - DNA, 75 bp, Homo sapiens
cggagcctgaggacacttctctgtcgtcacagttagtggtgaaagtggtgctggaaaaacagtggctgccaaata

SEQ ID NO: 375184 - DNA, 101 bp, Homo sapiens
ctacgcagttccgacaaaggtcgcctttgctactaccgcgactggctgctgcggcgcgaggaggttgtgcccagacatttccttcttccagagggccactg

SEQ ID NO: 375185 - DNA, 78 bp, Homo sapiens
tccgggccctgtatgactatgaggggcaggagcatgatgagctgagcttcaaggctgcggctggactctattacctgg

SEQ ID NO: 375186 - DNA, 98 bp, Homo sapiens
tgcatcgtcccctggactctctcaaatatcccacagacccagcaccatttattgagaagacaatctctttcccctgcacttcagtcattccattaaaa

SEQ ID NO: 375187 - DNA, 75 bp, Homo sapiens
gctcgcgtgctgatccgccagcgccatatcagtttttccagaaaggaggagtcaaggaagcccttagtgaacgag

SEQ ID NO: 375188 - DNA, 99 bp, Homo sapiens
agaactctgaaaatcaacgcagctggaatgttaaccttagaaagtttccagatgtcaagccctccaacatcctagtcaactcccgtggggagatcaagc

SEQ ID NO: 375189 - DNA, 100 bp, Homo sapiens
cccacgactgcctgggacctggccaagggctccacacaccaagaccaaggtggagttctacttcctttcccagtacgtgtcgccagccgactccccgttc

SEQ ID NO: 375190 - DNA, 98 bp, Homo sapiens
accaaggtcaaagtgggtaaagaagactcatcatccactgagtttgtagaaaaacggagagcagctcttgaaagcctatttgatggctttgcagatgg

SEQ ID NO: 375191 - DNA, 82 bp, Homo sapiens
gcccgtcggacggggaggaggagcaggagctggaggaggagccgccgccgccagatgatatcatcaagttgaatcgaaagga

SEQ ID NO: 375192 - DNA, 75 bp, Homo sapiens
tagagccaaaggatggtgagattgttggcctttcaggaagagtgcttaaggtctaccccgagccccggagcgaga

SEQ ID NO: 375193 - DNA, 100 bp, Homo sapiens
ggtgttcagtaattcgaagcagactgccatatcacagcctgcttcagggaacacattttctcatcacagtatggctgaggctgaggtggcctccttgaac

SEQ ID NO: 375194 - DNA, 100 bp, Homo sapiens
tggactcatggaggctgagcatttattcagtacgttttgccaacctatgaaatggccgtgaaaatgcctgaaaaagaaccaccacctccttacttacctg

SEQ ID NO: 375195 - DNA, 100 bp, Homo sapiens
gccagattggccgaagacaaagcagagttggaaagtgatccaccttacatggaaatgaaggtggtgatctttgtgaagtctgtgcagcggtgcattgcct

SEQ ID NO: 375196 - DNA, 106 bp, Homo sapiens
atatgcatgctagcaaaagcacagaaagaccacttaagcaaacttaatataccagacactgcaactggggccacctacagatgctcctgcagtggacacagcagaa

SEQ ID NO: 375197 - DNA, 73 bp, Homo sapiens
ggagctgtggctcctccattcaaacatcgacgccatcgacaagcgaaacagaagcctatcagttgctgaagaa

SEQ ID NO: 375198 - DNA, 99 bp, Homo sapiens
gcggcctacagcagctcctcgtgcctggcggcgtgggcccgggcgagcagccctgcctccggacgatcatcagaaaagcccttactgaggaaaaacgtg

SEQ ID NO: 375199 - DNA, 100 bp, Homo sapiens
agagaaacccggagggcgccggggcggccgcccgccttggcccgtctctggagtgctgggcagccgggtctgcgggcccctttacagcacatcgccggcc

SEQ ID NO: 375200 - DNA, 89 bp, Homo sapiens
gcggggcccgcgggcccatgaggaggcctggggaccatgggctccaggatcaagagcttgcagagctagaaagtgccctccaagagcag

SEQ ID NO: 375201 - DNA, 98 bp, Homo sapiens
gccgagtcgcgcggaggcggaggcttgggcttcgggctcagaatcaggttctgaaaaaaggtgttgtggatgaacaagcaaattctgcagctttaaag

SEQ ID NO: 375202 - DNA, 100 bp, Homo sapiens
gtcgccgggggtgtggggtgttccacgctatgttgggagtgttcgctttcgaggacttcatagacctcacgttgtcgaagactcaacgaaagactccaac

SEQ ID NO: 375203 - DNA, 75 bp, Homo sapiens
caaagacgtagaaagaaatcttagcaggaacttagtgatttggcccgtgaccctccagcacaatgttctgcaggt

SEQ ID NO: 375204 - DNA, 89 bp, Homo sapiens
acactcaacattcctccctcttcatgcttaatgaagtaaaacgggcccaaagacaggtggtgtcgggtttgacatcaactgtggtgtcc

SEQ ID NO: 375205 - DNA, 74 bp, Homo sapiens
gtctgctccaggggcaggctgcacctggcggctcacctgtggaagcacagcgaggccttggaggccctggagaa

SEQ ID NO: 375206 - DNA, 101 bp, Homo sapiens
ccaccccgaagagttctacaacctggtgcgcttccggatcgggggcaagcggaaggtgatgcccaagatggaccagcggacaaggcaaaatctcagcaagt

SEQ ID NO: 375207 - DNA, 98 bp, Homo sapiens
agcaccaggagacgcaactcatcgggttcacaatggtccgtagtggaaaaaatggtgaccttcatcttaaacagattgcatattacaaacgaactggt

SEQ ID NO: 375208 - DNA, 100 bp, Homo sapiens
tgagaaacttggcttgttcagaagatactgtgcataagacatgaggtgtcatggagaaactccagctgggcccagagattctgcagcgggaaaatccaag

SEQ ID NO: 375209 - DNA, 82 bp, Homo sapiens
gagttaaggaacagatccccggaggaggtcatcatcagatttgaaatatttaaagtggatacaaaactatttcagcaatgca

SEQ ID NO: 375210 - DNA, 98 bp, Homo sapiens
gagggtgacgctcgctccgctcgtcccgctcgtcatggcctacccgggatacggaggaggggtgagaagccttataagtgctcatgggagggatgtga

SEQ ID NO: 375211 - DNA, 76 bp, Homo sapiens
ctaagagacgctaatggagtcagcagaggtgttggctttgccaggtacctcaataataatgagttgacagcggtac

SEQ ID NO: 375212 - DNA, 100 bp, Homo sapiens
cgggcggctgagacaaaggcgacggctggacgtaaagaaagaagtgatgcactcaattctgcaatagataaaatgaccaagaagaccagggacttgcgta

SEQ ID NO: 375213 - DNA, 100 bp, Homo sapiens
caagcataagctgccaaaccaagcatttggccatccagtgtcattggtctcagaggccagcagttattggagatgtccttcaagtctacagtgggtctga

SEQ ID NO: 375214 - DNA, 80 bp, Homo sapiens
cctgcgtcccgccaccggccgcttctgtcctcgatcatgtttgagaccttcaacaccccagccatgtacgttgctatcca

SEQ ID NO: 375215 - DNA, 82 bp, Homo sapiens
gctgagcggcgagtttccgatttaaagctgagctgcgaggaaaatggcggcgggagcacatggattaattgatgtatgttga

SEQ ID NO: 375216 - DNA, 90 bp, Homo sapiens
gtgacagtctgcatgtgcagttttcagacgcaaaatcgaatgaagctaatggccgacaactacgaggatgaccacttcaaatcctcccat

SEQ ID NO: 375217 - DNA, 83 bp, Homo sapiens
gtgtgcaggtttcggcacatggagattgatgtgatgagaagctacaaggcgaccatccagcagaccttggacatcctgttcct

SEQ ID NO: 375218 - DNA, 83 bp, Homo sapiens
aggacattcagtcagaagaaggctgctattgaaagagagtatgcacaggaaaattgggccgatttccacctatgatgcatcat

SEQ ID NO: 375219 - DNA, 51 bp, Homo sapiens
gtctctgcacctcgcgccccagcagtcaagtccatcatctccagaaccagc

SEQ ID NO: 375220 - DNA, 100 bp, Homo sapiens
cctaaacaggagcacctgctggcgctaaaagaacactgatatttgcatttaatggggaacaaaagatgaagaaggaaaaggaatatattcactaaggatt

SEQ ID NO: 375221 - DNA, 100 bp, Homo sapiens
atttgggttgcatccactttttggctgttctgaagagtgttactgtgaacattcatgcacaaatttttatgtggaggactatcctattaagtgtaatctc

SEQ ID NO: 375222 - DNA, 99 bp, Homo sapiens
ctcaatctgctgtttcagaaactccccaaaaacgctcagatgctgtccagaagttgtcgagatgtccacagaaggaggatttggtggtactagcagcag

SEQ ID NO: 375223 - DNA, 106 bp, Homo sapiens
tgtacgagagcaagctctataagattcttcaaggtggggttggcatcccccacatacgaccttcaatattgatgtacggcagttacattgggcagaatatatagag

SEQ ID NO: 375224 - DNA, 75 bp, Homo sapiens
ctgcaacctccgtggcagtaagaaaggtgctggagaatctggtaaaagcaccattgtgaagcagatgaggatcct

SEQ ID NO: 375225 - DNA, 80 bp, Homo sapiens
aaattccgaagcaatcttcctgctaaggccattggacacagaatccgagtggcaactcatgcagcaattccagaaccccg

SEQ ID NO: 375226 - DNA, 98 bp, Homo sapiens
ccagcccagtctgccgggggaacctgtacaaggcatacatgcagctggtccaggtgcctagaggagggttggagcccaggcgtttggtacggggcgtg

SEQ ID NO: 375227 - DNA, 75 bp, Homo sapiens
atgaggggcatggtggcaattctcatcgtgaggactcagaagacaaagatgtgaagaccaagaaggatgattctc

SEQ ID NO: 375228 - DNA, 109 bp, Homo sapiens
cgttgctcttgcttttcctcgctggggtgtacggttgcaaaagcttctcatttcagagagatgccaggatcctaagtgcctgccaaacttaccaattctaaggaataag

SEQ ID NO: 375229 - DNA, 100 bp, Homo sapiens
gtccgcggccaggtgctggcgccgctgcccctccacggagtctttcccagggaactccgatgaagtgttccaacaaaatgagcgagtgaaccaagaagag

SEQ ID NO: 375230 - DNA, 50 bp, Homo sapiens
ctacccgggatacggaggaggggaaggaaaatcacctcggcagtgtttga

SEQ ID NO: 375231 - DNA, 50 bp, Homo sapiens
agaagagtggctggacattctggacgcaaacatgcagatctttgtgaaga

SEQ ID NO: 375232 - DNA, 82 bp, Homo sapiens
ctaaactccactagagtcatctctacagcacttcgtcttagtaacatggccatggggaagacaaccacaggccagatagtca

SEQ ID NO: 375233 - DNA, 100 bp, Homo sapiens
ttcgcaatgtcaccatcctacgaggcgaggaaacgagacctctttcgttccttctagaaggtctggaggacgtagagttattgaaaatgcagatggttct

SEQ ID NO: 375234 - DNA, 98 bp, Homo sapiens
atcttgggcaccgagagggactacgtgggcaccttgcgcttcttgcagtcgagcccgtgttctggtactacgtgaaggaggtcctcaacaagcacgag

SEQ ID NO: 375235 - DNA, 100 bp, Homo sapiens
cagacaccagcccgggcgctgacagacgacttttctcacttgtcagttttctcgcttgtcagcagagctgctgattgaaaaggaagatcaggccaacccc

SEQ ID NO: 375236 - DNA, 97 bp, Homo sapiens
agactgacacgctgctgcacctggtgaaggaggtggtgaagaggccaccccaagtcaaagggggtgatgagtttccgctttgtggccacatggtgtc

SEQ ID NO: 375237 - DNA, 95 bp, Homo sapiens
agatcagtaacttgttcttgattctgctcatgatgggtctcctctgagcctccggcctccataagacccaaaacagatgacacctcttcccagtc

SEQ ID NO: 375238 - DNA, 100 bp, Homo sapiens
acatacggagattgacaatcaatgggccatcttggacgtggtctggggagaatgtaatcattccttccacaactgctgcatgtccctgtgggtgaaacag

SEQ ID NO: 375239 - DNA, 97 bp, Homo sapiens
tttagaaaaagctattggatcactgaaggaagtaatgacatacaggctagttccaaaggtttattttcctgagcaaattcatgatgttgtacgggcc

SEQ ID NO: 375240 - DNA, 83 bp, Homo sapiens
gctgaagcaggacaacatagcggtgaaggcgaacgcggtctgcaagctgacgtatgcgatcagtgggtgaccgcggctgcgag

SEQ ID NO: 375241 - DNA, 74 bp, Homo sapiens
aaatcccatctaccgcaactctcagttcgagagtaaaggaaggcccgaacaagacaggaacgtcctgtgccctg

SEQ ID NO: 375242 - DNA, 82 bp, Homo sapiens
ggcgtccccggcgcgaagaggctggactcggattcgttgcctgagctctctgaacaacggggcccagagctgatggcagaca

SEQ ID NO: 375243 - DNA, 72 bp, Homo sapiens
caaaaattcccaaaccatacttgctaaaaattctgcaagaggcggagtccaacctgcgcaaggccaagcagg

SEQ ID NO: 375244 - DNA, 100 bp, Homo sapiens
cagcctccagaaacggtccagaactggattgaattacttagtgggaacaagctaccctctgagtcagcactggacttgaagataaatcctacaattcatg

SEQ ID NO: 375245 - DNA, 83 bp, Homo sapiens
catctgatggcgaacgttttatgcagctggctagagatatggcaaaaaatgaagctgttgtcatttctggaaggaaactggcc

SEQ ID NO: 375246 - DNA, 75 bp, Homo sapiens
catggctacttcatattttggaaagcagtttttaagacaagtgattgtagagaaggctccaaaagccagggtgcc

SEQ ID NO: 375247 - DNA, 83 bp, Homo sapiens
ggaacacgaagccccgggcaccttccgggtggagttcagtgaaagggcaggatctcgaggacctggaagaagcagaggagcca

SEQ ID NO: 375248 - DNA, 92 bp, Homo sapiens
gcagagcatgcagaagtcctcgctggagtttcataagaaagcaagtgattgctttcctttcctcatttttggaagccctgcctaacacacag

SEQ ID NO: 375249 - DNA, 100 bp, Homo sapiens
aaagctgccagagatattttcaacaaaggatttgagtccgagtggtccccaggaggagcagccaggcttgctttccagggtgggcactgggagggccacg

SEQ ID NO: 375250 - DNA, 77 bp, Homo sapiens
ccgaccggaagttgcacgctgagccgcggacaccatgcagtcggatgatgctgtgctcctgtgtctgctggatttat

SEQ ID NO: 375251 - DNA, 100 bp, Homo sapiens
aaggccgggacccggttccccggcccacagtgggggtgtgcaaacccgagagaactggccgtggtccttcagcatatctctgtgctgcagacaacacacc

SEQ ID NO: 375252 - DNA, 83 bp, Homo sapiens
caacagtttgtggcaagacaagctcagaactgagaagctgtcaccacagattctcagagagagttcaacagcaggccaggtac

SEQ ID NO: 375253 - DNA, 73 bp, Homo sapiens
gaaacatcccaagtcggagcttctcatgtaagatttggcaaaagccttaatgaaggctgtgaaggaggaaggt

SEQ ID NO: 375254 - DNA, 82 bp, Homo sapiens
ggacagcgaagctgctgcggttcctgagccggagactaggactcaatgaaattgctgcccccatgttcctgaggctctgcaa

SEQ ID NO: 375255 - DNA, 74 bp, Homo sapiens
taagaacaacagtcaggccaagccttctgcctgtgatgaggagaaggcagagcccccccaggctatgaatgccc

SEQ ID NO: 375256 - DNA, 82 bp, Homo sapiens
tgccctacttcaaggataagggcgacagcaacagctctgccggctggaagttcaaatctgaacatcaatgatgtactaggga

SEQ ID NO: 375257 - DNA, 98 bp, Homo sapiens
tgtggatctgctgtctgctcaggcatgcctcctcctggctccttcccacccccagtgccacctcctggagccctcccacctgggatacccccagccat

SEQ ID NO: 375258 - DNA, 126 bp, Homo sapiens
cgcccgtggccctgcagcgcctgcgcgtggcgttgcagaagctttccggcacaggaaaagtacccagatgccgtgtacctctcggaggggccctcctcctgctccatggggatccgcagcgccagc

SEQ ID NO: 375259 - DNA, 75 bp, Homo sapiens
tacatggatctggcctcaagactggtgtttgcctgagaatacagatcaacccacagaacaaagcggatttccaag

SEQ ID NO: 375260 - DNA, 110 bp, Homo sapiens
gcctcaggccagtcgcctccaggccaagagggatccttcacccgtgtctgatcatggaagggaagtggttgctgtgtatgttactggtgcttggaactgctattgttgag

SEQ ID NO: 375261 - DNA, 97 bp, Homo sapiens
cggcaaataacacagccagtcagcaagcagcatcacaagctcagcctggacagcaacaggttttgattcccaccatggccatcacccagtttcggtt

SEQ ID NO: 375262 - DNA, 98 bp, Homo sapiens
atgttccttcagctctgccatcactccctgccgggtcaggagctcctgaaattattcttgggttaccattttgtgaagctattgatatgtggtcactg

SEQ ID NO: 375263 - DNA, 75 bp, Homo sapiens
ctcaccgagtacgaagcgggcgtttgcgaaggtgagaattatgaagatgatgacctagtaaattctgatgaggtt

SEQ ID NO: 375264 - DNA, 100 bp, Homo sapiens
aagaattttcaacagttttcttcatactgcattaaaggttttagaaatactacataggccctaccattgaccatgccctgctggacatgcccttcctttg

SEQ ID NO: 375265 - DNA, 109 bp, Homo sapiens
ccgggaggaaggaacgaggcaaggagctaaagcagcgtgcgttcagccctgggggtggcccagttgaaatccttcccttcctctaccttggaagtgcctaccatgcatc

SEQ ID NO: 375266 - DNA, 90 bp, Homo sapiens
accccgcggccggacgacccaagcccgctgagcaggatgaggactaatagggatgccaaaggaaaaatatgatcctccagatcctcgcag

SEQ ID NO: 375267 - DNA, 125 bp, Homo sapiens
ctactgcttgatcgaaatcgtccacagtgacctcttcacacagcatgataaccagttcaggatgtccatcctggaacgactggagcagatggagaggaggatggccgagatgacggggtcccagc

SEQ ID NO: 375268 - DNA, 100 bp, Homo sapiens
gactccaacgaattaggtggtctgactaccagtggctctgcagagcccatctgctggcaaggctaagattagaacagctcataggagagtcatgattttg

SEQ ID NO: 375269 - DNA, 100 bp, Homo sapiens
gttattgcatttcgttttctcaccacaggtgcagttttgccaaggagtgctaaagaacttagatgtcagtgcataaagacatactccaaacctttccacc

SEQ ID NO: 375270 - DNA, 82 bp, Homo sapiens
tgcctgcccgtggaggaaagcggcgttccggatgtttgcacagtttatccagatctgtgcagcagcttcgaaccagtttcca

SEQ ID NO: 375271 - DNA, 100 bp, Homo sapiens
ccagagcctcccccagaaggcagcggtgcgcaagctcaacgacctcatcaagcgagcgaggctggccaaggtgaaattcgatgctactgtgatgctgccc

SEQ ID NO: 375272 - DNA, 99 bp, Homo sapiens
atggttgtggtcatgaagttcttccgatgggttagacgggcttggcaaaggattatttcctgggactctgacttgaagaaaacagtggatgaaagtgca

SEQ ID NO: 375273 - DNA, 50 bp, Homo sapiens
gaaagaagatgctaattaaagtgaagaatgtatgacaacatgtccacaat

SEQ ID NO: 375274 - DNA, 75 bp, Homo sapiens
ggggctgtcctggaggtccacgtcccgcaggtcccgtggctgtcatcagtggtgaggaggactcagccagcccac

SEQ ID NO: 375275 - DNA, 100 bp, Homo sapiens
cgtccccctctccgccccccaggaggggcgagagggagccgcagctgatgtcagactcagcccacctgcacccaggtgaaataaacagctttattgctca

SEQ ID NO: 375276 - DNA, 75 bp, Homo sapiens
gtcagagtcaaaacagagcttttggaatctgaacaaggggacacaactcagatgggaagttcatcgcccgggcac

SEQ ID NO: 375277 - DNA, 98 bp, Homo sapiens
aaaccgacaaaaacagcagctgatgactcactccaacaacgcacagcaccagaagggagccactggtggggaccttttttgggccccctttccttcgt

SEQ ID NO: 375278 - DNA, 100 bp, Homo sapiens
gaagaattgggttttcttcgctacttgaaacaatccaagacagctggaaatgatccctattgttttgtggagtttcatgagcatcgtcatgcagctgcag

SEQ ID NO: 375279 - DNA, 98 bp, Homo sapiens
gtgagttcctgcatgagtatgacatgaccaagatgcccgagtgctacttctactccaagttcgagctgtccgaggttctgtgggccatggtgatgcgc

SEQ ID NO: 375280 - DNA, 88 bp, Homo sapiens
gagaagatggctttaaagaatacacttcaagaatgatcaccttctctcaggattatgtcgcaaatgagctcactcagagcttcttcac

SEQ ID NO: 375281 - DNA, 87 bp, Homo sapiens
gatttaaaagatttcttaatgaaaatgaaagaaagtccacatttccaaaagtccaaggcccactttccttgtggaactgtccagagt

SEQ ID NO: 375282 - DNA, 100 bp, Homo sapiens
ctctgttccaaatgctttgctggttgaaaggattgttgacaaaaggaaaaataaaaaagggaagacagagtatttggttcggtggaaaggctatgacagc

SEQ ID NO: 375283 - DNA, 90 bp, Homo sapiens
tgctgcggctctgcgcggtccccgccagcgccccatcctgagccgagcccacaggcggttttgtgagctgcttccccaggagcagcggag

SEQ ID NO: 375284 - DNA, 73 bp, Homo sapiens
cacttatctcgaaagcctatcagcatagttaagttccagatttcggaaggttcacgagtgttgccgacacgcc

SEQ ID NO: 375285 - DNA, 100 bp, Homo sapiens
cccaaggccaaccgggagaaaatgactcaaatggcagacctgcatgccgtcccaaggggcatgtacgatgggcctgtgtttgacctgaccaccaccccca

SEQ ID NO: 375286 - DNA, 98 bp, Homo sapiens
ataacacagcaccttcaacatcaggctcttcattctatttctgtggccaaggaggaatgcaggctcaggttggaatgccaggaagtggaccagtgtcc

SEQ ID NO: 375287 - DNA, 74 bp, Homo sapiens
atccataaaactgaagatgtgaatactctggtaatctgtaagtcagatgctccaacaggggatgttcttcttga

SEQ ID NO: 375288 - DNA, 110 bp, Homo sapiens
gtggagccggagctgggcgcggattcgccgaggcaccgaggcactcagaggagttccagggtctccctccactgctgtagtaacccgggtccggggcctcggtggtgctc

SEQ ID NO: 375289 - DNA, 100 bp, Homo sapiens
caaggagcaacacctcttcctgcctttctcctacaatcagggagtctgctccaagcagacactggtggtcccgctccactacaacgagtcctacagccaa

SEQ ID NO: 375290 - DNA, 96 bp, Homo sapiens
cctatgtcaactatggaacaacaacttgcagctcatctctattgatgtgtttgggaaatgggaagtaatgacagctggcacctgaactaagtactt

SEQ ID NO: 375291 - DNA, 78 bp, Homo sapiens
atgacctggaggccatcgccaatgactcagaggaagggtgatggattggagttcaagagacacttcctgaagattaaa

SEQ ID NO: 375292 - DNA, 75 bp, Homo sapiens
agcgtttcagttttggtcatcggaagtggtgccttcagcacaggtcttcaaagcttcacctttctccaaaggcag

SEQ ID NO: 375293 - DNA, 51 bp, Homo sapiens
gagtaaccctcactggagaatccagagcaatggctgccatccggaagaaac

SEQ ID NO: 375294 - DNA, 98 bp, Homo sapiens
ttcgcgaagctgccaaagccttagacaagacaagcatgactttcaggactctgtgagaataacgttggactttaatcttaccgatccagaaaatgggc

SEQ ID NO: 375295 - DNA, 132 bp, Homo sapiens
gaaaaaggcaaacccggtcaagatggtattcctggaccagctggacagaagggtgaaccaggtatgtgactggtgtaagcacataagacacacaaaagaatacctggattttggggacggggaaagaaggct

SEQ ID NO: 375296 - DNA, 74 bp, Homo sapiens
gaggccggctgaggagcgccgctgcctcgcctcgtgtggcaaaggagcagagaactttgacaagttcttcacac

SEQ ID NO: 375297 - DNA, 99 bp, Homo sapiens
gcgagatggcggcggcggtgcaggagagcgcgcgaagttcaacagagtttggaaaagatttctaaactggagcaggaaaaagaacattggatgttggaa

SEQ ID NO: 375298 - DNA, 100 bp, Homo sapiens
aaactgcgagccagcattacccccgggaccattctgatcatcctcactggacgccacaggggcaagtgccgatgcaagaccccagagcagctatgcagcg

SEQ ID NO: 375299 - DNA, 122 bp, Homo sapiens
gactacggagacgggcccgactcctccgacgccgatccggacagcggcacagaggagggaggttttaaaatcaaagatgggaaaatcggagaaaattgcccttccccatggccagcttgttc

SEQ ID NO: 375300 - DNA, 100 bp, Homo sapiens
gccgggcccgccccgcggaagccgccggttgccaggccaaggagtggactagggtcgccggggaagcgggctaaggcagctggataagcacagccaggcc

SEQ ID NO: 375301 - DNA, 75 bp, Homo sapiens
ccagcaagttgtggaacttctacaggaacggtcaagagaatccatcccattaaatgacctgaagtcagaagtatc

SEQ ID NO: 375302 - DNA, 100 bp, Homo sapiens
cgaatagctctgaccacccggcgaagtaagactttgaccccgacgcaggcttcagtgattgccgcggatcagaagcctgagcactttggctcgagacaat

SEQ ID NO: 375303 - DNA, 115 bp, Homo sapiens
ggaagaccgcgcgcagggcctgcagcgggagctggacggcgagcgcgagcggcgcgagaaaggagcatcgagtacagctgtccggcctccaacgagtgtgagatcaccaagcgga

SEQ ID NO: 375304 - DNA, 129 bp, Homo sapiens
gtaaatgacttacctgtaaatagtggtgtaacccgaataagctgtcagactttgataggtgggaaatacaccaagagtgatttcaaggagtatgaaaaagaacaggataaaccacctaatttggttctg

SEQ ID NO: 375305 - DNA, 100 bp, Homo sapiens
ggagagagaggtgctagtggctggacttgacctggaaagcatgcttgagagttcaaaccggcttgatgaagaacacaggctaattgccaggtatgcggca

SEQ ID NO: 375306 - DNA, 95 bp, Homo sapiens
cgttctgcaccagcgccttgatcgagtacttgagcgtgagtgcatctccatccacgttggccaggctggtgtccagattggcaatgcctgctggg

SEQ ID NO: 375307 - DNA, 90 bp, Homo sapiens
tccaacaggctgaagattgccctgcagacacaagatggtgaaggagacccagtactatgacatcctgggcgtgaagcccagcgcgtcccc

SEQ ID NO: 375308 - DNA, 75 bp, Homo sapiens
ttttggaccaaaggcctgtgtgctgcagaacccccagaccatcatgatcttttgccagaaatgagggcatactgg

SEQ ID NO: 375309 - DNA, 99 bp, Homo sapiens
aagccgcccgcggcgcagggcagccccgcggccgccgcggccgcagagtcatccttctggaatgctttgtgtcatgagagtgtcacctacatcaccaag

SEQ ID NO: 375310 - DNA, 100 bp, Homo sapiens
atgttcctggagagaaaaaacctcaaaatgggattcctttgcctccccagatcttcaatgaggagcagtactgtgggaaaagatccaagtgctttctttt

SEQ ID NO: 375311 - DNA, 75 bp, Homo sapiens
agcgagggacctgggactgctcacagccagggagtgcagcctgccacaggcgaggttgtgtttgatagtttccag

SEQ ID NO: 375312 - DNA, 100 bp, Homo sapiens
cgggcccgcggctgcgcttccgacggggcggccgggggctcagagatccaagtgcgcgccctggcgggtccggaccaagtgaagtacatgcgagaagcca

SEQ ID NO: 375313 - DNA, 96 bp, Homo sapiens
tattggagcaagggaaagaaccctggctggggaaaagggaagtgaaaagagatctgttttcagtgtctgtagtgggaagtcttcatgagctcagtt

SEQ ID NO: 375314 - DNA, 80 bp, Homo sapiens
gatggtgttcgatacttgctcagcttagaccatgctcagcctccaagcagccttgtcatcgacaaagaatctgaagttta

SEQ ID NO: 375315 - DNA, 100 bp, Homo sapiens
ttccaaggaaccaaggcggccctggctgggggaaccactatgatcagtgggaatggaagtggccccacatctcaaagaaaccctaaataagaactttttt

SEQ ID NO: 375316 - DNA, 75 bp, Homo sapiens
agcggattaaagctaaagacatagttcctggtgatattgtagaaattgctgatccttcctgggcatcagtaaata

SEQ ID NO: 375317 - DNA, 50 bp, Homo sapiens
gccgccagcaccgtcctggccacgatatatgcaagttgccgaaagacgaa

SEQ ID NO: 375318 - DNA, 102 bp, Homo sapiens
ccctgaagatctatgctcctctgtacttgtcttgtgaaaatgccattgtgtgctggaaacctggcaagatggaagatgatatagataaaattaaacccagtg

SEQ ID NO: 375319 - DNA, 75 bp, Homo sapiens
gaactacttcacattttccccaatatatggatttggagtggatcagttacgagatgacaatctagaaacttattg

SEQ ID NO: 375320 - DNA, 100 bp, Homo sapiens
tttgacgaagaggtggtttttgagtttttacagagtcaagaggatcctatgaatttcccactgggttaaaaatatgacacaatccaaggagacagcatac

SEQ ID NO: 375321 - DNA, 85 bp, Homo sapiens
tgatttttaaagcttcaaaatcctaagactcagcactgttgcgggactggcatccttcgaaccaactgtgtggactgtttagatc

SEQ ID NO: 375322 - DNA, 74 bp, Homo sapiens
gctactctctctttctggcctggaggctatccagcgttcattttccagacactgaaagagcagaatggctaaat

SEQ ID NO: 375323 - DNA, 74 bp, Homo sapiens
ggacggatgatgaagtagtacagagggtgaggatccacgacctccgcagtggtaacatcgccctgtcgctctcc

SEQ ID NO: 375324 - DNA, 75 bp, Homo sapiens
tatcaccttctgtggaaaggaagctgcacaggaagccgtgaaactggataacaaagctgatgtaattttaaagta

SEQ ID NO: 375325 - DNA, 83 bp, Homo sapiens
gtgcagcagctgcaccccaccttgatccagcggacttacgggtgtccctggccagtgtccttccacctgtccacaagcatggg

SEQ ID NO: 375326 - DNA, 100 bp, Homo sapiens
catcctgaaggagagggcggagctggcccacagccccctgcctgccaagtacatcgacctagacaaaggtttgatccaaagaaaggattttggtgccaac

SEQ ID NO: 375327 - DNA, 95 bp, Homo sapiens
ggatgagaattttagatctggaagtgtccgcgggacaggatcttgtcaagacctgatggggaagttctagaggaagcttattttcgatacatggc

SEQ ID NO: 375328 - DNA, 75 bp, Homo sapiens
cagagactatataagtagcttaaagatgacaccttgcattccctatttaggagaaccaggtgcatcagcgcattg

SEQ ID NO: 375329 - DNA, 100 bp, Homo sapiens
ttcgtacacatggagcgggcagaggatgcagtggaggccatcaggggccttgataacacagagtttcaaggaagatgatccctatgatcttgaagatgtt

SEQ ID NO: 375330 - DNA, 123 bp, Homo sapiens
ctaccttgcgagccgtcttccccaggcctgcgtccgagtctccgccgctgcgggcccgctccgacgcggaaggatgcctgccatattagatggagaggaggcagtttctaaatggcttgactt

SEQ ID NO: 375331 - DNA, 82 bp, Homo sapiens
ttgccgcagccagcaactatttcagcaggaaaaccgaaagcgccatggctctagtcgaagtgtagtagatatggatttagat

SEQ ID NO: 375332 - DNA, 75 bp, Homo sapiens
gacgaggacgacgaggaggaggaggaggaggaaaaaggagagcacagaatggggattcaacacctcggcaatgcc

SEQ ID NO: 375333 - DNA, 83 bp, Homo sapiens
gggatttctgctcctggctgcaagattgccacttgatgccgccaaacgcaggatgacgcaaaacacggtgattgtgaatggag

SEQ ID NO: 375334 - DNA, 100 bp, Homo sapiens
aggagtccaactcagaggacgaggcctccttcaagtccgagattattttcgaaataccagtatttcgactccagggggatgttcatttctatagtatttt

SEQ ID NO: 375335 - DNA, 96 bp, Homo sapiens
gcacctgtcggcagactggtgacttcacttttgagtgcaactgccttccagtctaataaagttcctgtcgttcagcacccgcatcacatgcatccg

SEQ ID NO: 375336 - DNA, 98 bp, Homo sapiens
gtgcaagcgaaattaagggaaaatggatgtagaaaatgagcagatactgaatgtaaaccctgcagaataatcatgggccagactgggaagaaatctga

SEQ ID NO: 375337 - DNA, 96 bp, Homo sapiens
cttggccactgatcccccgaagagcttctgtcgccgctctagggatgcttatagaattttatgagtcaccagatccagaaagaagaaaaagatttc

SEQ ID NO: 375338 - DNA, 75 bp, Homo sapiens
agccacccccggagcgcagtccccgaaggcttcctggcaacactagaacaaaaattggcttcataacatttgaca

SEQ ID NO: 375339 - DNA, 82 bp, Homo sapiens
ttcggcacaagggcccaactggaattccacttacggatatggctcgtggacagcagaaaattcagtctcagcagaaaaatgc

SEQ ID NO: 375340 - DNA, 96 bp, Homo sapiens
ccaacacagatgtccaagctgccaaattgacatagagatgtcatttgtagaccagactgggatccagagtttaattgagggtttgctccagtattc

SEQ ID NO: 375341 - DNA, 113 bp, Homo sapiens
tcgtggcggccatctcgccctttaacttcactgcaatcggcggcaacctggcgggggcaccggccctgatgatcacctacagcgccatcagcgatgagctgcgagacaaggtg

SEQ ID NO: 375342 - DNA, 100 bp, Homo sapiens
cggctcctacagcctatcagaagcaaccttgtccctctgttaataagaattccccttcaggaaaagcaggcaggaaatggccagtgatgaactgagggag

SEQ ID NO: 375343 - DNA, 75 bp, Homo sapiens
catgcaagattacaggaatttcagaattttgaacaaatctttgagatccccgtcgaggtcaagatcaagatccag

SEQ ID NO: 375344 - DNA, 100 bp, Homo sapiens
tggttcagcgctttagcctcaggaggcagctatccaaggcagttatacttaagcatgaacattgacgacaaactggaaggattgtttcttaaatgtggcg

SEQ ID NO: 375345 - DNA, 100 bp, Homo sapiens
ctggcaaaagcaattcagatggcccaagaacaggctacagatactgaaattttgcttggatttacactgggcaacgtggttggaatgtatctggctcaga

SEQ ID NO: 375346 - DNA, 98 bp, Homo sapiens
gggcgcgctgctgcttggcgccctgctctgcgcacacgacgagggaactgagctgtcaaaactaagtgacttgattgaggccatgcagctggcgaggg

SEQ ID NO: 375347 - DNA, 90 bp, Homo sapiens
ctatgatccacctcaaagggatgaatttttgggaacttgcgtgcaacatcttaattcttacttaggggaaagcaagatagtttcatttgg

SEQ ID NO: 375348 - DNA, 74 bp, Homo sapiens
tggggaacctaccacccttcttcagaggctccgaggtaccatttccctgttcgactggctcctgagagagaatt

SEQ ID NO: 375349 - DNA, 76 bp, Homo sapiens
gcactcgctgccgccgccactcacgctccactgcaacatcacggttttgtagtgcatccctgagcatgagcacaga

SEQ ID NO: 375350 - DNA, 100 bp, Homo sapiens
cagaaaggctgtacctggaggaaggaagtgcggagccagcctgagttgggagaagagctccagagatctcttcaagaaaatgaggaggaggagattggga

SEQ ID NO: 375351 - DNA, 95 bp, Homo sapiens
ggatgggcacactgtgggggtgtcctggtgcacccccagtgggtgctcacagctgcccattgcctaaagaaaccatacccttttgtgttattcta

SEQ ID NO: 375352 - DNA, 75 bp, Homo sapiens
cttcagttgccttacctgtaaggctgaagccgacgtagcttctctgaacagacgcatccagctggttgaggaaga

SEQ ID NO: 375353 - DNA, 75 bp, Homo sapiens
tgcagatgcagtgtggctctggatagcaccttatggacagactgtgccctgtccacggtgcctcctgcatgtcct

SEQ ID NO: 375354 - DNA, 100 bp, Homo sapiens
gcggcaccaaggcccccaagccctccttcgtgtcgtacgtacgccctgagctcatggggcattcagaatgggaccacaaacgagggccaagaggatcaca

SEQ ID NO: 375355 - DNA, 73 bp, Homo sapiens
agtgacaaccatgctggtttgcttcagactggtctccaattgagaaacatggcactgtttttcctgcactcta

SEQ ID NO: 375356 - DNA, 99 bp, Homo sapiens
ctcagctttccctaaggcagccatcaaaaggctgctttattctcccattgaaaacatccaaagagtagctgcaggggtcctctgtgaacttgctcagga

SEQ ID NO: 375357 - DNA, 83 bp, Homo sapiens
caccagaaagaggctgaggaggaggagctggagataccccctcagtaccaaggaacaggaatattacctggtgaaatggcgtg

SEQ ID NO: 375358 - DNA, 78 bp, Homo sapiens
atgactgcaaggtggagcactggggcctggaccagcctcttctgaaacactggggccagctgcgggccgtccagcggc

SEQ ID NO: 375359 - DNA, 95 bp, Homo sapiens
actgtgggacttggtttgcctatgtcaagatcacaggaagaagaagcagacgttgaaggcattcagtataaaacacttcgaacatttcaccatgg

SEQ ID NO: 375360 - DNA, 83 bp, Homo sapiens
aacgctatccacttgatcatgctagagctgctgaacctttgcttactttggaaaggcctccaagactgcagagaatgccacca

SEQ ID NO: 375361 - DNA, 75 bp, Homo sapiens
tgaataacccttttaacgagtattccaaatttgatggcaagtatcaaaggtgcagaatctgggacaagttgcatg

SEQ ID NO: 375362 - DNA, 97 bp, Homo sapiens
attcaaagacccgcagcaaccctgagaacaacgtgggccttatcacactggctaattgaagcatatgtcctgtgagcttaggggtgctacaagttga

SEQ ID NO: 375363 - DNA, 90 bp, Homo sapiens
cgcgggcaggagcctggcgaggatgcaccttcccctgccttggaaagtgagtctgccaaaaaagaggtggttgctgaagtggtaaaagcc

SEQ ID NO: 375364 - DNA, 50 bp, Homo sapiens
ccaggcccagtctgggccgtgactctgggctggtagctcagggatgtctc

SEQ ID NO: 375365 - DNA, 75 bp, Homo sapiens
gagacagattcgcagtggtcgcttcttctccttggtgccctgtgctttgcggagcttggcacaatgatcaccaag

SEQ ID NO: 375366 - DNA, 115 bp, Homo sapiens
cagcaagctgtggacgcttgtggaggaaacccacactaacgagttcatcacctggagccaggccttagcagtaggaggactaggctccattataagagttcttacagcaagaaag

SEQ ID NO: 375367 - DNA, 76 bp, Homo sapiens
agcccccacctcgcaagagcagccgcggcgccactgtactccaaagattcaggtttactcacgtcatccagcagag

SEQ ID NO: 375368 - DNA, 83 bp, Homo sapiens
agcaacctgacaattctgtcgtgtcccggtagtaagcattaataatgtctttcatctttgagtggatctacaatggcttcagc

SEQ ID NO: 375369 - DNA, 75 bp, Homo sapiens
aatgggttaccagaggaagagctaagatgccccttggtgtggccactgcaaggctctggcccctgagtatgccaa

SEQ ID NO: 375370 - DNA, 74 bp, Homo sapiens
catggaatcaggctcctcagccaggacacaggcctgtggccgtgggttctacaagtcttcctctcaagatcttc

SEQ ID NO: 375371 - DNA, 82 bp, Homo sapiens
gacagcgaagctgctgcggttcctgagccggagtatcaaaggtgcagaatctgggacaagttgcatgaagagcatatcaatg

SEQ ID NO: 375372 - DNA, 82 bp, Homo sapiens
cttggactgagtcctgcaggacacaggtctcggcgcggaagatggccggcggcgtggacggccccatcgggatcccgttccc

SEQ ID NO: 375373 - DNA, 75 bp, Homo sapiens
ggcggagcaccgccttccggcagaagctggtcagtcaaatgtgtatggaatgattcggttctcaggcaccacagg

SEQ ID NO: 375374 - DNA, 83 bp, Homo sapiens
aagggttcagcctttcaatgtgacacaaggaaagtattctacagttgaaaacgaggcccactgcgactttgtgaagctgcggg

SEQ ID NO: 375375 - DNA, 83 bp, Homo sapiens
ggatccccaacggggaggccaacgtgaagaagtgacttaagagattaaaattaatttggttgctgttggttctgaacaaataa

SEQ ID NO: 375376 - DNA, 75 bp, Homo sapiens
ggacaccaaacatttcctgccgctcggtcccgagcgcgagcggagacgatgcagcggagactggttcagcagtgg

SEQ ID NO: 375377 - DNA, 100 bp, Homo sapiens
cggagccggagccgggggagggggcagcggctgtctcacggaccacggcggcgcccgcagctcctcaccgtggtcagtatatatccgagccgctgtccga

SEQ ID NO: 375378 - DNA, 101 bp, Homo sapiens
cccggttccccggcccacagtgggggtgtgcaaacccgagagaactgggacgtggtgggtcctctggtgcgaaattccggatttccttgggtcttccggta

SEQ ID NO: 375379 - DNA, 75 bp, Homo sapiens
ttccgggagcctagatcctgtgctttactctgaagactcacagagtctagctctttcacccaggctggagtgaag

SEQ ID NO: 375380 - DNA, 75 bp, Homo sapiens
gtggaaacagccgaaagaaaagcagccaggaatcctcactatggatgggctcattgaggacattaagcatcggcg

SEQ ID NO: 375381 - DNA, 74 bp, Homo sapiens
tggacgcggcgctgctgaccgacatcgaaggtactccaaagattcaggtttactcacgtcatccagcagagaat

SEQ ID NO: 375382 - DNA, 82 bp, Homo sapiens
ttccgagaggaacctctatgccgacatcgacgccgcctggcaggccctgcgcaccaggttgtgcagcctgactctgaagaag

SEQ ID NO: 375383 - DNA, 100 bp, Homo sapiens
cctccatcaggaccccagatgtctgacagccctgtgtgacaccaagataagtaacacgtccttctatggccgcttcaggcacttcttggatatcatcgac

SEQ ID NO: 375384 - DNA, 98 bp, Homo sapiens
ggaaaacgaacaagttagtcgcagccagcaacgaggtaccaggatcatctatgaccggaaattcctgatggagtgtcggaactcacctgtgaccaaaa

SEQ ID NO: 375385 - DNA, 97 bp, Homo sapiens
aaggacttcaccaagggtttcagccctgagataagtcactgtgatgctaagcacatcagagggctggtcgcatcgaagcccaccttagccacgctga

SEQ ID NO: 375386 - DNA, 98 bp, Homo sapiens
gtggatcccattcagagtgtaaaaggaaagacctgtcatttactccatcctttatagtgatgctacaggacgaagaggaatggataaaaacattggcg

SEQ ID NO: 375387 - DNA, 83 bp, Homo sapiens
caaccagtctcgatctggcccaatctctcctgcaagtatcccaggacctaaagtgatccagacttctgcggctaatttttcac

SEQ ID NO: 375388 - DNA, 100 bp, Homo sapiens
ctatgatgccgttgtcttcgatgtcttgaaagtgaccccagaggagtttgctgccttcctgatgcgcttgcctgctccctggtctctctgcatggggaag

SEQ ID NO: 375389 - DNA, 87 bp, Homo sapiens
gggatcagctctattatttcaaagatgaagatgaaaccaagcccttggtcattgagactgcctcttctcaaagggacactgtcctca

SEQ ID NO: 375390 - DNA, 75 bp, Homo sapiens
tgcgagcccggggctatattgggctgacgcgccactatgtagcgggtttcgggcgggccacgcgtgcgggacagg

SEQ ID NO: 375391 - DNA, 50 bp, Homo sapiens
gggagatcaatgaggagatgaaggtgcttgaggaatccaaagccctcgtg

SEQ ID NO: 375392 - DNA, 98 bp, Homo sapiens
aactcttctgaagctgctaactggagaggcagccctgaagcagcttcctaggaacaaggtccccaacatggcggtgatgatcaagtccctgactcgga

SEQ ID NO: 375393 - DNA, 80 bp, Homo sapiens
gtaccacttctccgagcggcagcccccttacccaggaatggaacaacctccacaccatccttactatcagcaccatgctc

SEQ ID NO: 375394 - DNA, 75 bp, Homo sapiens
ctggggcggcgcgacggctggtgcgcaggtccagagccaaacccgtcactgaccccccagcccaggcgcccagcc

SEQ ID NO: 375395 - DNA, 75 bp, Homo sapiens
gtggccagttatttgcctcagtaaaagaacacgttggtcgtcattgcctccgagcccactttagccctcagctct

SEQ ID NO: 375396 - DNA, 100 bp, Homo sapiens
gggaacgggaggagcgtctgagcaggaggtacaggtttgcagattccgccagcagcacagcaagctctacagatgagtggctctttggcatttggtgctg

SEQ ID NO: 375397 - DNA, 88 bp, Homo sapiens
gcatctgaaagacaggtgtgcgtcatgcacttgaagcacctgaggaccctgctgagccctcaggacagtcattttgtttactcattca

SEQ ID NO: 375398 - DNA, 100 bp, Homo sapiens
agatcaccgtgacatccgaggtgcctttctccaaaaggacgttctcctgctctattacgctccgtggtgcggcttctgtccatccctcaatcacatcttc

SEQ ID NO: 375399 - DNA, 90 bp, Homo sapiens
cacttttcttcagaagctggtcgccgccggcagggtacagccaaagaccggagctttggagagatgaagtttaaacagtgtcctacagag

SEQ ID NO: 375400 - DNA, 74 bp, Homo sapiens
ttcacctggaacaagcggagtggcctgcagttgttcttcctaacataaaatcagaagatacaccatgccttctg

SEQ ID NO: 375401 - DNA, 76 bp, Homo sapiens
gttatttcctgaacccgaacacaggtatcatgatattagctggtttgacatcaagtcatttgtgagtcatcagatc

SEQ ID NO: 375402 - DNA, 50 bp, Homo sapiens
ggcagaagctgagacggctaagaccctggaagctgtcctgaatttcaaat

SEQ ID NO: 375403 - DNA, 75 bp, Homo sapiens
gggtgatatttgcctttagtgcactcttctccttcacagtaaagtggctggaattacatgaacgacagccttcgc

SEQ ID NO: 375404 - DNA, 101 bp, Homo sapiens
gcggagctggtggaggccaaataattataaagtggactgtgcctgtcacaagggaaaccggaattgtcctatacaaaaaaggaatcctaatgctacagaac

SEQ ID NO: 375405 - DNA, 100 bp, Homo sapiens
cagagaggtccagatagatgagcttgtggcatccattccccaagttcaggtttggtgcaagtgccaaagttgtgcatttcctgggacgagtcaaaccatg

SEQ ID NO: 375406 - DNA, 90 bp, Homo sapiens
ctgtggtggatgcaggaatcactaccaagcttctgaccgaagatgagaatgtgcctactgctcctgatcctccaagtcaacatttacgtg

SEQ ID NO: 375407 - DNA, 50 bp, Homo sapiens
aatctctgcccctggaggagaaatagaagcaaaagatacagatattgtgg

SEQ ID NO: 375408 - DNA, 100 bp, Homo sapiens
tactattgtacacagattcttaattaaagcaacaatagaagaaagaatgcaggcaatgctgaaaactgctgagagaagaaaataagacctactcatctgt

SEQ ID NO: 375409 - DNA, 82 bp, Homo sapiens
tggaggagaatcaagagctccgaggtctcggcgcggaagatggccggcggcgtggacggccccatcgggatcccgttccccg

SEQ ID NO: 375410 - DNA, 87 bp, Homo sapiens
gagatccatctgcaccacggtgctgcatcctggtggggaagaagttttaagggaacaagctggaggtgacgctactgagaactttga

SEQ ID NO: 375411 - DNA, 100 bp, Homo sapiens
gtggggttggtgtgattagcttcgcagtctggaaagctttaggagttcacagtaatttgccattttcagtggaaaacaagtggtcgttactagctaagat

SEQ ID NO: 375412 - DNA, 100 bp, Homo sapiens
aaggtgtatgagatccaggacatctatgagaacaggtgtgcctaccgcatgttgccgctgctgtttctgctgggacgtctgactccagttccttctcccc

SEQ ID NO: 375413 - DNA, 99 bp, Homo sapiens
gatggatgtgggttacaaatttaagaacagatgaacaaggccttattgttgaagacctagtagaagaggtggccagcgagaccgaggagaatggctccg

SEQ ID NO: 375414 - DNA, 95 bp, Homo sapiens
caggagtcagtgggtccactggtagcccccacccctctccgtccatggccccagatgacacttcaggacctgggctatcccttggagcttggcta

SEQ ID NO: 375415 - DNA, 74 bp, Homo sapiens
aacactctttgacattctggtggctggtggaatgctgggtatggcatttcaaatatagatacaaccattgaagg

SEQ ID NO: 375416 - DNA, 82 bp, Homo sapiens
aaggagctcagtgacctcctggacttcagcatggtactccaaagattcaggtttactcacgtcatccagcagagaatggaaa

SEQ ID NO: 375417 - DNA, 75 bp, Homo sapiens
catcaccgctgtggagcccagcacgcccacggtcctgaggtcccccccaaagacccaaactgaatctaaagcctc

SEQ ID NO: 375418 - DNA, 82 bp, Homo sapiens
tgccaaaagactacctcttgagtgagagtgaagatgaggtgctccatacttgcttgcagtgcctacgtggctctggctttgg

SEQ ID NO: 375419 - DNA, 102 bp, Homo sapiens
ccgatacttagaagggggtcatattagtgcttatctttttaaacaaggactcttcagtctttaaaccagaggagttacgccaggccctcatgccaaccctag

SEQ ID NO: 375420 - DNA, 89 bp, Homo sapiens
ggcatatctgggcgccaagccgcggagcctccagacggataacgaaggaggcccaacttcattcaataaggagcctgacggatttatcc

SEQ ID NO: 375421 - DNA, 127 bp, Homo sapiens
gcgggtgaagatcggccactacattctgggtgacacgctgggggtcggcaccttcggcaaagtgaaggactacatgaggaaataattgacttttataacttcatgtccccttgtcctgaagaagcag

SEQ ID NO: 375422 - DNA, 100 bp, Homo sapiens
gaagatatttagagatggtgaagaagcaggtgcttatgatggacctaggactgctgtgcaccaattccagctggacatcactgtgaaaatgggacgggat

SEQ ID NO: 375423 - DNA, 99 bp, Homo sapiens
aaaagaaagagacttttttctaaagaattgtggcaaaggagcagagaactttgacaagttcttcacacgaggacagcccgtcttaacaccacctgatca

SEQ ID NO: 375424 - DNA, 75 bp, Homo sapiens
cccccggagcccaatgagtatgacattccaccagcctcccatgtgtactcggtactcatctttgcagagaagaag

SEQ ID NO: 375425 - DNA, 75 bp, Homo sapiens
aaggctaaacttgcaatatgggaatcccgttctgcttccagaagtggaagtgctcacggatcggggaaatctgca

SEQ ID NO: 375426 - DNA, 97 bp, Homo sapiens
aagagttggatactcagcgtcgctggcagccgctgtacttgggtgacattccatgggacgacaaggatttcaggatgttcttcctctggactgctct

SEQ ID NO: 375427 - DNA, 75 bp, Homo sapiens
ctgaaaacttccgtgttctagtgaaacagaagaaggccagctttgaggaagggaagcagctcgagagtgtcgtag

SEQ ID NO: 375428 - DNA, 90 bp, Homo sapiens
gaggaatccgagaagagcagagcggagggagccccagacacgccgcggcgagtcctttgcacatgttggcaacacacgcatccgcatcgg

SEQ ID NO: 375429 - DNA, 82 bp, Homo sapiens
cgcgggtctgctctgtgtgccatggacgggtgctcttacagcctgttccaagtgtggcttaatccgtctccaccaccagatc

SEQ ID NO: 375430 - DNA, 75 bp, Homo sapiens
gagaatgcctgaagacttggatgaaaatatggattacaggttgatgtgggagtttgcagctcaccttgtgaagat

SEQ ID NO: 375431 - DNA, 90 bp, Homo sapiens
caaactcaagtggacaagttctattgcccagctgctgtggagacaggcagcccacaacaagggttacaagcctgatgaagggaaacgagg

SEQ ID NO: 375432 - DNA, 83 bp, Homo sapiens
agaagacattagtgagatatggtttgaatatgaaggcacaccactgaaatgcctctggaattgctttggcactcgttagatga

SEQ ID NO: 375433 - DNA, 76 bp, Homo sapiens
agggaagacgatggacaatcggcatcagtcagagcgggagtacatcaggtaagccaagatgggtgcatacaagtac

SEQ ID NO: 375434 - DNA, 98 bp, Homo sapiens
gtccccggcgcgaagaggctggactcggattcgttgcctgagacgcagaagaaacatgtccttcattcaccaggctgagctttcacagtgcagtggtt

SEQ ID NO: 375435 - DNA, 100 bp, Homo sapiens
ccgggtggtactggtggccgtggacaagggcgtgttcgtgctgaataagaagaacaaactgacgcagagtaagctgactccatattttcctacttgtggc

SEQ ID NO: 375436 - DNA, 100 bp, Homo sapiens
ctagagaaacgagttgtggctgaggaccccggcggcagacgcaggttcgggaccatgagctgaagaagcctgtgaggaggagatatgagccgtatgggat

SEQ ID NO: 375437 - DNA, 82 bp, Homo sapiens
agccatggcagattcctccgggcagcagggtgtccctggccagtgtccttccacctgtccacaagcatggggaacatcttcg

SEQ ID NO: 375438 - DNA, 100 bp, Homo sapiens
caagcttcctgaaggaggttcgagatcacatgcaggactctttcttaatgcagcctgaggtgagcaaggcagaggggattctccttctagtaaaggcagc

SEQ ID NO: 375439 - DNA, 101 bp, Homo sapiens
ctgcccggagttccgctcctgcgggcttagcaggaaagggtgcctaagccttacgacagtctgcctacctcacagacctgcttcttccagctgaggctgcc

SEQ ID NO: 375440 - DNA, 80 bp, Homo sapiens
aggagcgctaagctgccggggaggagctgcgggcgtctttggagacacagcgtgctcagagcagtcgactctgcgtggca

SEQ ID NO: 375441 - DNA, 98 bp, Homo sapiens
agatgagtgaatttggctacatcatggaattgatagctaaaggcaagatcgacgacatcgcggatggcgccgtgaagcccccacccaacaagtacccc

SEQ ID NO: 375442 - DNA, 100 bp, Homo sapiens
cagttccccttcctggccagcaactacgaggtgcctttactacatgtgtgatctgaaaaccctgcttggttctgagctgcgtctattgaattggtaaagt

SEQ ID NO: 375443 - DNA, 83 bp, Homo sapiens
gattcgcagtggtcgcttcttctccttggctgaaaagagccctggtcccattgtctctcgaactcggagctgggactcttcca

SEQ ID NO: 375444 - DNA, 75 bp, Homo sapiens
ctgggacttcccgtccgcggcgtggagggcaactgcgatgtctgtggactgtcttgggcagcatgcagtgctttc

SEQ ID NO: 375445 - DNA, 96 bp, Homo sapiens
ctaagcctgcacagccgcggcggcagcagcagtgagagcggctggctgtcggcaattggattcttccagtacagcccgggcgctgccgtggtcatg

SEQ ID NO: 375446 - DNA, 93 bp, Homo sapiens
cggcagagcaaggggcttacgcagaaggacctggccacggtcctgaacgaggctgtgggggccctgatgtaccacaccatcactctcaccagg

SEQ ID NO: 375447 - DNA, 82 bp, Homo sapiens
cgggaacgcgggatcctggggagttgatattcactgatggactccaaagaatcattaactcctggtagagaagaaaacccca

SEQ ID NO: 375448 - DNA, 98 bp, Homo sapiens
agaaagtgaattacatcaaaatcttggacagtcgctctgagcatgagcgtcagtacctgctgtgccccggctcaagcggggtggagaacacggagctc

SEQ ID NO: 375449 - DNA, 100 bp, Homo sapiens
actgaaacctctcttcctgagacagaggtcctatggcagcgtatacaaagctattcataaagagaccggccagattgttgctattaagcaagttcctgtg

SEQ ID NO: 375450 - DNA, 98 bp, Homo sapiens
taacctaaggcctcatgatattgcatatctactaatgggttccagaaactttagcagttgcagtgcagaggactttgagaagttaactttaaataaag

SEQ ID NO: 375451 - DNA, 90 bp, Homo sapiens
accccgtcccagtgccgggagcgcatcaagctccagcggcgccatgagcaaatgaaaaagaatttggaagcacagcacaaagaattggag

SEQ ID NO: 375452 - DNA, 82 bp, Homo sapiens
ctggcgctagtctgaccctccgccaggcaaaaggaagacaaatttacatgtattggagaccagaccagaagcccttctgaat

SEQ ID NO: 375453 - DNA, 100 bp, Homo sapiens
ccctggctctgctcccccagactctgttggatcagaaggtcaaggtgaaccagtgtgttattggtactgctcaggccaacaggaagtgaagacggatcca

SEQ ID NO: 375454 - DNA, 100 bp, Homo sapiens
gttaaattcagcccctcttccagataccatttggctttcggctgtgcagtttctgcagaaaaatgtgggccccctccacctattgacaatggagacatta

SEQ ID NO: 375455 - DNA, 101 bp, Homo sapiens
tatggctaataacacaacaagtttagggagtccatggccagaaaacttttgggaaggaagaatcctgctcaaaaatgaggtgaattaatacttgggcgctc

SEQ ID NO: 375456 - DNA, 100 bp, Homo sapiens
attatcagatgttcttgacagagtgtcagatctcagtggttcaatagcatccccagatgtcaaattaaatcttggtggagattttatcaaagaatctaca

SEQ ID NO: 375457 - DNA, 100 bp, Homo sapiens
caaataatgaagaaggtgtaaagcttgttcgaatgtctgcaagccagttagaagccctctgtcctcagtataaatcaaagccattctgtgaaaaactgct

SEQ ID NO: 375458 - DNA, 88 bp, Homo sapiens
cttcaccacaaaagcgaaatgggcacaccacagtttcctgaggttgttccccttaacatcggaggggctcacttcactacacgcctgt

SEQ ID NO: 375459 - DNA, 82 bp, Homo sapiens
tgagggtccccgctcagctcctggggctcctgctgctctggctcccaggcagagaagaggcgatggcggcgatggcatctct

SEQ ID NO: 375460 - DNA, 87 bp, Homo sapiens
tgactctggacaaagacgcttattatcggcgagtgaagagactgtacagcaattggcgggaaaatatatgcagatgatgaacattct

SEQ ID NO: 375461 - DNA, 100 bp, Homo sapiens
tttggtgcgagagaaacaataggacggaaacgccgaggaacccggctgaggcggcagagttatgcccagccaagtcttcagtatatccaggggcaacaga

SEQ ID NO: 375462 - DNA, 82 bp, Homo sapiens
acggctgcctaatttacagcaaccatgagcacaataaggctttcaaaagccaaagaataacaagaaataagcaccattttag

SEQ ID NO: 375463 - DNA, 75 bp, Homo sapiens
aggcaaaggggaggttacgcagcaaaccatccagaagtaaaatgtttattggaggcttgagctgggatacaagca

SEQ ID NO: 375464 - DNA, 51 bp, Homo sapiens
aatcttcaatcaatcatatttcacaagaaagaccacagcaagattctttca

SEQ ID NO: 375465 - DNA, 100 bp, Homo sapiens
atactcggcctccttggaggatgtgaagacagccgtcctggggcttctggtcatccttcagcaggttcaggagaagtggcacctggtggaggacctgtcg

SEQ ID NO: 375466 - DNA, 100 bp, Homo sapiens
gcagaagtagctaatgaaattgaaaacctgggatccacagaggaaaggttctctccataaatgaagaagggctaaggcgatgcgaagagaatacaaaagt

SEQ ID NO: 375467 - DNA, 75 bp, Homo sapiens
cgtgactggcgtggactgcgtgaagggcatagaaagcctctctggggaggaactgtgcccatcctcagcgcctgg

SEQ ID NO: 375468 - DNA, 83 bp, Homo sapiens
cagattcgcagtggtcgcttcttctccttgtggattgtattacacagagcatgaatatacttctttaggttacacgcatgggg

SEQ ID NO: 375469 - DNA, 100 bp, Homo sapiens
gcaggctgccctctgcctggagaacttctcctcccaggttgtggaacgacacaacaagccggaagtggaagtcagaccgatttgggatgttgcccctgga

SEQ ID NO: 375470 - DNA, 115 bp, Homo sapiens
ggggcccgcacctctgggcagcagcggcagccgagactcacggtcaagctaaggcgaagagtgggtgtcatggagaaactccagctgggcccagagattctgcagcgggaaaatc

SEQ ID NO: 375471 - DNA, 90 bp, Homo sapiens
ggattacaggcacgcgccaccactcccagagactaaggtgtcagtatgttcttcaagctgctctgctcctgggcccaagctattctcctg

SEQ ID NO: 375472 - DNA, 97 bp, Homo sapiens
aacgatgtgcgagaactgcgcagacctggtggaggtgttaaatgaaagagcgaatccagccacagacctgagaggcgcaggcttccttgccctcctg

SEQ ID NO: 375473 - DNA, 74 bp, Homo sapiens
acgcaaacgagagctgaggctaatgaaaaacagctccagtgatccacaagctcagaaatacatcgcggaaagta

SEQ ID NO: 375474 - DNA, 50 bp, Homo sapiens
tacagatctgggaccgaaatttgactgtgaccatccacggcaagatagca

SEQ ID NO: 375475 - DNA, 83 bp, Homo sapiens
tctcactcagatgatgtatagccctcagaattctgattatcttttagctctcagcactgaatgagaaggcaaccaaagtgcag

SEQ ID NO: 375476 - DNA, 82 bp, Homo sapiens
gggtctcgggggccgctctgggatcccggccaccagcaattgtccgggagaagcatgacactggccaacactgcgtccagca

SEQ ID NO: 375477 - DNA, 82 bp, Homo sapiens
ttccggggacagccagccctcgctggaccagaccatggccgcggccttcgcttcgagagctgtgcccaggagtgaacaacca

SEQ ID NO: 375478 - DNA, 100 bp, Homo sapiens
acaccttcatggcccctttatagctgatggaacagatttggagttgaggctggtcaatggagacggtccctgctctgggacagtggaggtgaaattccag

SEQ ID NO: 375479 - DNA, 89 bp, Homo sapiens
gcagaggaagaacaagaagagaaccttgaagcaagtgattagaagcccaggacccaggaaggagacacaggaaatttattcaaagtccc

SEQ ID NO: 375480 - DNA, 100 bp, Homo sapiens
gagatttatacagagatgtgatgttggagaattacagcaacctggtttcaatggcccacacacagcgcctggtccacatccagtcgatgctgaagcgcgc

SEQ ID NO: 375481 - DNA, 90 bp, Homo sapiens
cacatggagcctgcacgcgcacggtttggccaaagaagcccccatactcccggtgaaaaaggaagtgacctcacaatgactcaagctacc

SEQ ID NO: 375482 - DNA, 88 bp, Homo sapiens
tacctgcacgtgagggaagcctttggccagaagatcggccacttccagaatgagagggagaaacttcaaataaagatagatgagatgg

SEQ ID NO: 375483 - DNA, 82 bp, Homo sapiens
agtccacccaccgccgccgcctcccaggaagcttgctgtcttcgatacgtggagctccttggcggtccacattgcaatggac

SEQ ID NO: 375484 - DNA, 90 bp, Homo sapiens
ccatgaccctgaaggtccaggagtacccgaccctcaagggagtgcatccgccccaacccttttccccctcgtctcctgtgagaattcccc

SEQ ID NO: 375485 - DNA, 75 bp, Homo sapiens
gttttagaggataccttggtcccagagtcatcatgaaggaacctagaaagattgtacaatgaatggtgattctcg

SEQ ID NO: 375486 - DNA, 75 bp, Homo sapiens
gcagtttgtttctctgtatggcacagaagaatatttgaagtcagaggagtccagattttcccacctgacctctct

SEQ ID NO: 375487 - DNA, 100 bp, Homo sapiens
agaacttacctgagatttcgtcacagataacgaaggaggcccaacttcattcaataaggagcctgacggatttatcccagacggtagaacaaaaggaaga

SEQ ID NO: 375488 - DNA, 50 bp, Homo sapiens
tacgatttcacatggctgctgaagaaatggggtttcaccatgttgcccag

SEQ ID NO: 375489 - DNA, 89 bp, Homo sapiens
agttgtaaattacagagaacctaagtctgtttgcaaagcacctgaactgctctcaaaggtctatggccctgtgttcactctgtattttg

SEQ ID NO: 375490 - DNA, 100 bp, Homo sapiens
cgcgggagcacactctgtgcggagactgggcggccggccgacccttcctgtcgctgacggcgactgcgggaggccagtttggatttaggtggcgagtaga

SEQ ID NO: 375491 - DNA, 75 bp, Homo sapiens
tggcagtgctgggccttccagttctcagtggcatttctgttaacatccaggacttggccccgtcctgcgccggct

SEQ ID NO: 375492 - DNA, 101 bp, Homo sapiens
gcgaacgttttatgcagctggctagagatatggcaaagactggtaatgaggaacaaacacggattaatctgaattgtactcagaaggctttgatgcaggtg

SEQ ID NO: 375493 - DNA, 100 bp, Homo sapiens
ccgtattctctgaagcctggaaacgaggcactcagttggaagagtccagcaagagtaatcaagtcagaggattatatgacttttatctgcctagagaaga

SEQ ID NO: 375494 - DNA, 75 bp, Homo sapiens
cgttgacaaggcactgctttttcatgacggacaaattgatggccaggagatcactgccaccgccgtgctggcccc

SEQ ID NO: 375495 - DNA, 100 bp, Homo sapiens
ctgacagtctgatcacctcagcgttgcagcctcgattcattcaactctttcaggacatagggcctgattacattccaacagaggaagaaaggagagtctt

SEQ ID NO: 375496 - DNA, 98 bp, Homo sapiens
gcccacttggcaccagtggtcagcagcactgtttcctatgatcctaggaaacccactgtgaagaagataattgacgaccttgccaacctagtggagaa

SEQ ID NO: 375497 - DNA, 100 bp, Homo sapiens
cggatgccctgcagtacctgcagaaggtctctggagacatcttcagcaggaaatgtgagttcttctcccagatcttctgatttagtcaaattagcccaag

SEQ ID NO: 375498 - DNA, 75 bp, Homo sapiens
acaaatgcagtgcacaagtgcagtgtgtgcatggattcaaatgatgacatgaaagctgttttactagcacaggtt

SEQ ID NO: 375499 - DNA, 83 bp, Homo sapiens
gtgatccagaagtccagagctgaggactgcctgtttgcagggactggtgattgcagctggaagtgcccatgaccgagctggcg

SEQ ID NO: 375500 - DNA, 82 bp, Homo sapiens
gtggccctgggctttaccatctttgtggctgtgcttgccaggcctggctccagcgccatgtcagaaccggctggggatgtcc

SEQ ID NO: 375501 - DNA, 50 bp, Homo sapiens
aaaggagtcggggatggctctttctcagggtctattgacattcagggatg

SEQ ID NO: 375502 - DNA, 75 bp, Homo sapiens
atcgctcagctggagaacgcggctaaagttctgatggtctcacgctgttgcatgtgtcaatcagtttatcatcag

SEQ ID NO: 375503 - DNA, 90 bp, Homo sapiens
gaggatctggtgtaccaggcgaagctggccgagcaggctgagcgatacgacgggacgtccagatcggtgacatcgtcacagtgggcgagt

SEQ ID NO: 375504 - DNA, 100 bp, Homo sapiens
caaacagttacagtgaactctatagattctgctggtatacagctacatccaggagagaatgctgacagtcctgcaggcttgaagatgcagtggacgccag

SEQ ID NO: 375505 - DNA, 89 bp, Homo sapiens
caagaatcaatgcgtggaattctcctacacttcctatttatgaggctgttgaagctcaaatccgaagttttggacagactccttctcaa

SEQ ID NO: 375506 - DNA, 89 bp, Homo sapiens
aggatatcgacgtcgtgatccagaagtccagagctgaggactgcctgtttgcaggtatcatgatattagctggtttgacatcaagtcat

SEQ ID NO: 375507 - DNA, 100 bp, Homo sapiens
cagccaggacccgggctccaaggccgtcgccgaccgctacgctgtctactggaacagcagcaaccccaggtccatccacatcgtggcgctggggaacgag

SEQ ID NO: 375508 - DNA, 50 bp, Homo sapiens
ccatcttcggcaccgagaaagacaagagggtgtgaagacagagaatgacc

SEQ ID NO: 375509 - DNA, 100 bp, Homo sapiens
gggatcctcatgagttaagaaacatatttctacagtattcttgccatgagaaaaagaatgtgataagttattcaacttatgaaattcaagttacatgtga

SEQ ID NO: 375510 - DNA, 100 bp, Homo sapiens
attaacacctcttgccactcagctgacatatgaaggactcattgatgaaatttatggcattcagaacattgtggaagatatcaataagcgcagagagccg

SEQ ID NO: 375511 - DNA, 51 bp, Homo sapiens
accaaggacagcttttttcctgcaaggtgacttaagagattaaaattaatt

SEQ ID NO: 375512 - DNA, 82 bp, Homo sapiens
gcccggcagttatgtattctccgctctgtctcacccaggtgacttaagagattaaaattaatttggttgctgttggttctga

SEQ ID NO: 375513 - DNA, 74 bp, Homo sapiens
agggagctgtcgtcgccctggaagacgatcccgagttcaacgcagaacacaccacagccatcagcactggaatg

SEQ ID NO: 375514 - DNA, 90 bp, Homo sapiens
aacaacatacggtggggcagcagctgctgtaagacagtctaaactacgaaatacaccttatcaggcttttggaaatgccaagacagccca

SEQ ID NO: 375515 - DNA, 100 bp, Homo sapiens
aagcacctcaacatggactggagagaaggcacttggaagcaaatcagaatgagtctactcttcatcttgtgttgagacttcgtggtggtgctaagaaaag

SEQ ID NO: 375516 - DNA, 82 bp, Homo sapiens
gcctcaccctcatctatatcctttggcagctcacaggaacaagatcactcaaggtgaaggataatctactaataccagcact

SEQ ID NO: 375517 - DNA, 100 bp, Homo sapiens
cctttatgggatatgtgtaaccacaccaacggcctggtatgagttaatacagaaaggagtgactgaacttagaactgttgggaatgttccagatgtctac

SEQ ID NO: 375518 - DNA, 118 bp, Homo sapiens
tgggagttgagtgatattgaccatgatggaatgcttgacagagatgagtttgcagttggaatgcagtggtgtcttttgaaagaagaggatgtcattcctcgtatcagggcaatggaag

SEQ ID NO: 375519 - DNA, 91 bp, Homo sapiens
gcgaggaggcgcgggaggtgttcgagaacgaccccgagacgaaaaatggctacaaacttcctagcacatgagaagatctggttcgacaagt

SEQ ID NO: 375520 - DNA, 83 bp, Homo sapiens
cctcagcaggattgctgtgtgaaaaccgagctgctgggagaaggaagctcttcgtgggcggtcttgactggagcacgacccaa

SEQ ID NO: 375521 - DNA, 83 bp, Homo sapiens
gaagaggttacattgcacaatatttgaataaggccatctccccggttgttgtgcacagccacgaaacaaaagaacagtggcca

SEQ ID NO: 375522 - DNA, 74 bp, Homo sapiens
ggagagacgaagctttacagaagccgctattcgcctgggattggaggctgaagagattctgcagacatacttga

SEQ ID NO: 375523 - DNA, 99 bp, Homo sapiens
ttgagagctgtcgacagttacgtcaacagtgcatgtccgttccgaggaatgggatttaatgacctttgatgccaacccatatgacagcgtgaaaaaaat

SEQ ID NO: 375524 - DNA, 75 bp, Homo sapiens
cacaaatgctccttctcctggagacgcaactcaagaaaccactcagattgaggatcctcgagtacaatggcggcg

SEQ ID NO: 375525 - DNA, 75 bp, Homo sapiens
gctgcgcatccccgcggacgccacagcgctgaccctgatgcttggtgtgacctgagtaaatttgacctccctgag

SEQ ID NO: 375526 - DNA, 97 bp, Homo sapiens
acaataggagctgactttctgaccaaggaggtgatggtggatgacaggctagtcacaatgcaggcattcatcaaatagcattttgatgggtttaaat

SEQ ID NO: 375527 - DNA, 83 bp, Homo sapiens
cgccattatcgcatctccccgacaaacaccacgagaattccgcagcccacacgagctgcgggtggaagtggagcagccccatc

SEQ ID NO: 375528 - DNA, 100 bp, Homo sapiens
ctcagcgccaaggaggacgccagcaaagaagacgtcatcttcttctaaaagggccgtgactcaagcattctgtgtctggctgactctgccgggagctgaa

SEQ ID NO: 375529 - DNA, 100 bp, Homo sapiens
gcggggcgcgcagctcgcgggtctttggacaccaccggtcctgagtccgcggatattgtacctgtggatgcatcttatgaagtaaaagaactatatgtgc

SEQ ID NO: 375530 - DNA, 100 bp, Homo sapiens
cctgggacggcgtcctgctgggggagcagctgatcaccatgtcctgcacggacaagatcgccaggatgaggaagatggagagaatgcccacccatataga

SEQ ID NO: 375531 - DNA, 75 bp, Homo sapiens
cggagtttgacgaagaggtggtttttgagcgagtgatagacagccaagcagagaaactgaaggagcttgacaagg

SEQ ID NO: 375532 - DNA, 80 bp, Homo sapiens
gcttctcccattccgggtaccagttcgcgtcctgctccaaggactgcactgtgaaggtatcaacttgaactgaaggatga

SEQ ID NO: 375533 - DNA, 100 bp, Homo sapiens
gcaagatgagcctcaagtgcttctgcattacagtgccagcgagatttcagattcctgtaaacctctaaagaaaaggagtcgcgcctcaactgatgtagaa

SEQ ID NO: 375534 - DNA, 90 bp, Homo sapiens
ctgcggaagaagcggttcggccagtggaccaagttgctctgcgtcatcaaagacaccaaactgctgggacccagacatggagctgcggga

SEQ ID NO: 375535 - DNA, 97 bp, Homo sapiens
agagcgagccgcctgccccggtgcgcagacagagctattccagcaccagcagagcggagctggagtttgttcagatcatcatcatcgtggtggtgat

SEQ ID NO: 375536 - DNA, 141 bp, Homo sapiens
ctgaagggagctttgtctataagggtggaaaaatctacaaggttccttccactgaagcagaagccctggcatctacaataagagctaactgccatcaagagccatcagtatgtcttcaagctgcatgcccagaaagctgga

SEQ ID NO: 375537 - DNA, 100 bp, Homo sapiens
cacatctccacctcatcaggaaacagctgagacagggctcacctgaaacttcatgtaccattgcacttcctgagaagctgtccccaatcccaggctccta

SEQ ID NO: 375538 - DNA, 75 bp, Homo sapiens
agcggccgagcgggcggcttcctggcctgggcgctccggtggcggcggaggatgcagcaccgaggcttcctcctc

SEQ ID NO: 375539 - DNA, 101 bp, Homo sapiens
taccagggatggggtgtcagcggccctgggttggagcacagagcatcctggtggggaagaagttttaagggaacaagctggaggtgacgctactgagaact

SEQ ID NO: 375540 - DNA, 124 bp, Homo sapiens
tgaagggctgcttggcaaatcaggctgacctcgacacagagtggaatctgtttatagggatgccagatgatatgaacttcagtgatgtaaagcaaatccatcaaacagacactggcagtacttt

SEQ ID NO: 375541 - DNA, 95 bp, Homo sapiens
tgacatgtctgatcccttgctcccatccctgcagcatgaacaaggtgtacagagccagtgggccggatggagccactggcagaggccagagaatc

SEQ ID NO: 375542 - DNA, 98 bp, Homo sapiens
gggccggccttcacgccgcagagccgctgcagtttcaccagtgatcattaaagaatgggcagcttacaaaggaaagtctcctcaaaccccggaactgg

SEQ ID NO: 375543 - DNA, 99 bp, Homo sapiens
gacttgctcaaaattgtactatctctattcaggattatgaagtttttcgatgcgaaggaataagacgagttggaagaagacctgatcaacaacttcagg

SEQ ID NO: 375544 - DNA, 86 bp, Homo sapiens
gaacattccgagaatgcgagagaaagagcctccgtcaccacatagctgagcacagggttgctccaggtgggcccaaatgctgaaga

SEQ ID NO: 375545 - DNA, 108 bp, Homo sapiens
gccacctcctcctttagaaaactgatcttaatacagacagcaccagttgcccttgaagcagaaaacagaggtgaaatgaaactagctctccagtatgtcccagagcca

SEQ ID NO: 375546 - DNA, 75 bp, Homo sapiens
cctcaatttaagcctgatctaacccctagaaacaggggcataaggaaatggtggcaggcacttcctcctaacaag

SEQ ID NO: 375547 - DNA, 82 bp, Homo sapiens
cggaagtgcagctgcctcagttcttagcgcagatgtggcaccatttattgagtttctgaaggccatacaagatggaacaata

SEQ ID NO: 375548 - DNA, 95 bp, Homo sapiens
gtaaacggggctgctggtgggccgcgtcgaagacatggaccagggctacggaggatgataatgaagataattcaaatgatgggacccagccatcc

SEQ ID NO: 375549 - DNA, 75 bp, Homo sapiens
ggcaaaaaaagggctggaaacttcgctatcatggagatcgtgaggccgcagcgtttgatgacgagtggcggcggg

SEQ ID NO: 375550 - DNA, 100 bp, Homo sapiens
gggtgccaaggagtcacggatcggattcctcagctacgaggaggcgctgaggagagagggagacgtggtgggcggtccttcctgtgacacgacccttgag

SEQ ID NO: 375551 - DNA, 100 bp, Homo sapiens
tggattccctggatttcctggcgccaatggagagaagggcggcaggattatgtttgagaccttcaacaccccggccatgtacgtggccatccaggccgtg

SEQ ID NO: 375552 - DNA, 97 bp, Homo sapiens
gctgccaggggaacgcagactcagagcgtcctctttggagaagctttacaggaagtatggtgctggcatctgcttggcttctagagagtcttacaat

SEQ ID NO: 375553 - DNA, 80 bp, Homo sapiens
gggttgatttttaaagcttcaaaatcctaagactcagcactgttgcgggaccactttacctgcattgtgaaggtactttt

SEQ ID NO: 375554 - DNA, 100 bp, Homo sapiens
tcaccgccagcacgcgcctgcttcccgtctgcgcgagtccacgcagctccccaggtacaggtttgcagattccgccagcagcacagcaagctctacagat

SEQ ID NO: 375555 - DNA, 102 bp, Homo sapiens
agcatggcggtggaggacgaggggctccgggtcttccagagcgtgaagatcaagatcgctcaccatggatgatgatatcgccgcgctcgtcgtcgacaacgg

SEQ ID NO: 375556 - DNA, 100 bp, Homo sapiens
gaagctggaggcgctgatccgagaccctcgctcccccatcaacgtggagagcttgctgacttgtgcaccatggacaattttgctgagggagatttcactg

SEQ ID NO: 375557 - DNA, 100 bp, Homo sapiens
aggcatcttattgatcctccagtcgaggatgtgggctctcttgatgagaagatgaagagcttggatgtgaatcaggactcggagctcaagttcaatgagt

SEQ ID NO: 375558 - DNA, 100 bp, Homo sapiens
actggcgcctctctggggttctgcccagaagattagccttcctccttcgctgcagctcctctgaggaggaaaggcaagctctgactctgaggttggaggc

SEQ ID NO: 375559 - DNA, 101 bp, Homo sapiens
cgcgggcggtgtagaggcggcggacgggccggagggaggatgttaaagccccgcgtacaagccagctgccatgttgtgagcacataccacatagctccatg

SEQ ID NO: 375560 - DNA, 98 bp, Homo sapiens
ctacatacgggctgaatgtggagagggtcttccaggacggtgtggaccactacaacgaggtgaagagcgtcaccatctgcgattacctgcccccccac

SEQ ID NO: 375561 - DNA, 83 bp, Homo sapiens
gtctctaggttattcacatagctctgctgcccaggccaaagacgaagttatacggaagcgtctcctcattgatggagatggtg

SEQ ID NO: 375562 - DNA, 82 bp, Homo sapiens
gagaaggcacggagtcgccgcggagcgcagcaatggctgccatccggaagaaactggtgattgttggtgatggagcctgtgg

SEQ ID NO: 375563 - DNA, 75 bp, Homo sapiens
gaagcactggcacccgagtacacgtcttccagttcacccggccccccagagaccccctcagaattcctggagaac

SEQ ID NO: 375564 - DNA, 75 bp, Homo sapiens
cttccctttggatgtagcaaggaagaaattgttcagttcttctcaggaaagtgggaggtagaggaaatgaaggag

SEQ ID NO: 375565 - DNA, 100 bp, Homo sapiens
atcaggttgtcaaaccgcaggcatttcaatcacattatgatccaaaaagttggcagctcttgcagaagccttaaaggaagtctcccttacaaaggcccag

SEQ ID NO: 375566 - DNA, 101 bp, Homo sapiens
cttcgatgtatctaaacttggcaccaagtatgggccatgaagcccccaggaggagaatcgagcaatctttttggaagtccagaagaagctactccttccag

SEQ ID NO: 375567 - DNA, 128 bp, Homo sapiens
ggtgcgtaataagaaggtgggcgttatcttccgactgatccagctggtggtcctggtctacgtcatcgggaattgcctatctgtttgccaaagcttatctggtttccaagaaaccgcagtacctggac

SEQ ID NO: 375568 - DNA, 75 bp, Homo sapiens
accccagcacacagaagccgagacgagactctccaacatgtgccttctgaccatacaaatgaaacttccaacagt

SEQ ID NO: 375569 - DNA, 92 bp, Homo sapiens
gtctgctcctgtcgccttcgcctcctaatccctagccactatggtttttagaacttcagccataaaaatgggcagaattttccttgatcata

SEQ ID NO: 375570 - DNA, 75 bp, Homo sapiens
accagaacttttggaactagtgccggcggctctccaccccccaggtgctggagaatctggtaaaagcaccattgt

SEQ ID NO: 375571 - DNA, 89 bp, Homo sapiens
gactacataataaggatgatgaattgtactctacaggatcagaggctggggccaactggaaccattggcagctgcacgctcattactac

SEQ ID NO: 375572 - DNA, 90 bp, Homo sapiens
ttgtatttggtctggaggctttgaagtcaacaagaataattccttccatatcaacatgagggcaattgaaggaacagactaaaaatcgtg

SEQ ID NO: 375573 - DNA, 100 bp, Homo sapiens
ggcgtccgtcctgcgcatcgcagtgtacgaagccatcgacagcagagatggagcatcttgtgcagagttggtgtcttttaaacatcctcatgttgcaaac

SEQ ID NO: 375574 - DNA, 82 bp, Homo sapiens
ctcatttccagtatgtattttcaaaggccatgtcatttttgaagttcaaatctgaacatcaatgatgtactagggaactact

SEQ ID NO: 375575 - DNA, 74 bp, Homo sapiens
ccggaaccggagtggggtcacaaatgatactccagccggagagtccagagccccagcagcaagagcaacgacac

SEQ ID NO: 375576 - DNA, 98 bp, Homo sapiens
gcccacctgcgtaagggggcagagacagggagaaactctggaaaccttgacaatggcaacagtgtgtctcttcagcgcacaacctcagctggcagatc

SEQ ID NO: 375577 - DNA, 100 bp, Homo sapiens
caacaccgttcccccagccgggctggtgaaaggtgtagcagtcactcggcctacacccacagcatcgaccttgtgaacccagcgacctgactgccttggg

SEQ ID NO: 375578 - DNA, 75 bp, Homo sapiens
acggaggaccggagcggcctgtccgaggaacccaagccagaccgtctccttgtattgaaagtactatggaatgat

SEQ ID NO: 375579 - DNA, 98 bp, Homo sapiens
tgcggagagaggctgcctcctgcagcccccatagcaggtgtgacgtatgcagccaaaggctactttgacgccctggtgaagatgggggagctggccag

SEQ ID NO: 375580 - DNA, 100 bp, Homo sapiens
actttgaagagatcgactacaaggagatcgaggtggaagagggggcttgtacatgacagctggaatagcctccagttgaggggcttggtggtgctcctta

SEQ ID NO: 375581 - DNA, 75 bp, Homo sapiens
gctgcaggtcagcagtctccactggaaaaaaagatcttggtcgtccttggtggaaggaaccatgaactggcatct

SEQ ID NO: 375582 - DNA, 90 bp, Homo sapiens
tttggccttgatgatttgaaaataagtcctgttgcaccaggcgcctgtgtctggcagagctggtgtgagacgagacaatcctgccccgcc

SEQ ID NO: 375583 - DNA, 83 bp, Homo sapiens
agaagatcttcgagttcaaagagaccctcggaacagagcgcctgctcgctgtgcccccgggttatgacgacccccaataaagg

SEQ ID NO: 375584 - DNA, 100 bp, Homo sapiens
ttcaagttggagcaagaagaggagccctgggtgatggaggaagaaatgtttgggaggcactgtccaggtacatggaaaacttggggatttcacaataatt

SEQ ID NO: 375585 - DNA, 100 bp, Homo sapiens
cgcccccgatccggacaaagaaacgagcgctcgctcccgtggaagtcgctgaccagcatcattgagtactactacatgtggaagaccaccgacagatacg

SEQ ID NO: 375586 - DNA, 75 bp, Homo sapiens
gagacccgggagcaggagctgggcctaggtctgcgccctggctcttcagaggtgttcctgcccccagaccccatc

SEQ ID NO: 375587 - DNA, 100 bp, Homo sapiens
gcctcccaatgcttttgtggaaggaagtcatggaattcatcgtaaacacttgccaattcatcatgggaggctgaccggttccctgatgtgttacctgctt

SEQ ID NO: 375588 - DNA, 83 bp, Homo sapiens
ccccgagggtgtagaccgcgcccctggagggggatatgagactttctactcggaatatcctgagtgttgcgtggatgtaaaac

SEQ ID NO: 375589 - DNA, 75 bp, Homo sapiens
ctggcatactttgaagatcgtcatgggttgtctgttttgatgccaagataaactttgatgacaacgcagaattcc

SEQ ID NO: 375590 - DNA, 114 bp, Homo sapiens
ctagatgtttttaacataattttagcaaggcaacaagcacaagttgagattgaagctggacagtactgcacttttgtcatttctacggatggctctgttagagcttgcgggaaa

SEQ ID NO: 375591 - DNA, 75 bp, Homo sapiens
gcaggccagagagggcctcgggaagagatgcgaggatgacaagggatgctgagaacttgctggagtcacagccac

SEQ ID NO: 375592 - DNA, 95 bp, Homo sapiens
agccagcagaggtcagagagagacagctcacgttccggacaatgcagatcttcgtgaagactctgactggtaagaccatcaccctcgaggttgag

SEQ ID NO: 375593 - DNA, 83 bp, Homo sapiens
agatgacaaaacttcaagccaaacatcaagcagaatgtgatttgcttgaagatatgaggtctcggcgcggaagatggccggcg

SEQ ID NO: 375594 - DNA, 101 bp, Homo sapiens
tgaattttccttgatggtcaaaagattaaggatgttttagaagaatgtatgtctcttcccaagctatcttcttattctggatgggtggtagagcacgtcct

SEQ ID NO: 375595 - DNA, 87 bp, Homo sapiens
tcctgtcgctgacggcgactgcgggaggccagatccataatgagatggcatcaacatcagataaaggtgcccaaggaagaaatgaca

SEQ ID NO: 375596 - DNA, 98 bp, Homo sapiens
ctgaaccctaaaacaattaatccgtaaaacaggcttggtgtcatctacctgggacagacagttttacttcacgcagggtggaaatttaatgagtcagg

SEQ ID NO: 375597 - DNA, 100 bp, Homo sapiens
gtcgtattcaattttctgctaatggcatactttgatcctgacttttatgcctcaggattcactccttctccagttgcacagccacacccttcagctggcc

SEQ ID NO: 375598 - DNA, 100 bp, Homo sapiens
cggaatgtcatccagcgagtgattagtctgaccagtgcacaggacttcagggcttcctggtgttccacagctttggtgggggcactggctctggcttcac

SEQ ID NO: 375599 - DNA, 98 bp, Homo sapiens
ggaatagaatgtggtggtgcctatgtgaaactgctttctaaaacaccagaactcaacctgtataaatcaaagccattctgtgaaaaactgctttcctg

SEQ ID NO: 375600 - DNA, 97 bp, Homo sapiens
ggaaatagtaaccctgccaaatacatcagcttgtaggagacagagccttcaggctctacacacagatgatcctctcacttgggattatgtggcaagg

SEQ ID NO: 375601 - DNA, 75 bp, Homo sapiens
ggggttgttttgatgaaagtgaaagcaatatgttaaggatacctgtaagaaaggccttagtaggcctttctaagt

SEQ ID NO: 375602 - DNA, 100 bp, Homo sapiens
agatgacgacagactcagatccaagtcaacagtataacaacgaacttgatgcaagtgataggtttgccaaggtcagacctctcatcatccggatgaactg

SEQ ID NO: 375603 - DNA, 74 bp, Homo sapiens
ctggaaagctggccagatttgcagatggctctgctgtagtacagaggagaattctgcctaagccaactcgaaaa

SEQ ID NO: 375604 - DNA, 100 bp, Homo sapiens
aagctgcagctgcggcaaataacacagccagtcagcaagcagcatcacaagctcagcctggacagcaacaggaaaattgcctaagaattatgacccaaaa

SEQ ID NO: 375605 - DNA, 98 bp, Homo sapiens
aagggacgtaggaagaagggcaggacctgggcggaggccgccaagacggtccacaaggcgattacaatttccagtcccctaaccacagacctgactgc

SEQ ID NO: 375606 - DNA, 100 bp, Homo sapiens
tccaattcaagaggaggagaggggttgttttataaactgcctggccgaatcagccttttcacgctcaaggaatgaatctgaagtctgctgcagtaaaaca

SEQ ID NO: 375607 - DNA, 100 bp, Homo sapiens
ctgaggcggaagatccaggagctgttccacgtggagccaggcctgcagaggctgttctacaggggcaaacagccagtgagctcctccgacagcgaggccc

SEQ ID NO: 375608 - DNA, 80 bp, Homo sapiens
tccctggcagagaggggcagttttggagccatggtgctttgcaagatatcaccttgtcacagcagaccccctccacttgg

SEQ ID NO: 375609 - DNA, 83 bp, Homo sapiens
actcttcagggatgagtcatgtggcagtggaaaatgcgctcgggctggaccagcaggagaatggggtactaagagaaaagcac

SEQ ID NO: 375610 - DNA, 59 bp, Homo sapiens
agcgagctcctgggcatcccgctggaccagattggtgaaagacaacaagtgttagtaac

SEQ ID NO: 375611 - DNA, 95 bp, Homo sapiens
ggagctcgacgccgacgacgaaccggggcgacccgggcacatcaacgaggagggggggccctcagcctcttggccttgaacgggctgttcatctt

SEQ ID NO: 375612 - DNA, 50 bp, Homo sapiens
cagtttcctgcgtcgggcacaacaggaccgtgtttcttcgcctcgcctcc

SEQ ID NO: 375613 - DNA, 82 bp, Homo sapiens
ctgctcctgtcgccttcgcctcctaatccctagccactatgacctgcctagagctggaacgttacctccagagcgagccctg

SEQ ID NO: 375614 - DNA, 101 bp, Homo sapiens
agaagtaggcattgaccccttgtccagttactctaacaagtctggagtgaacaacgtgggaatgtcgtatgagtatcctgaatactttttggatgttcctg

SEQ ID NO: 375615 - DNA, 87 bp, Homo sapiens
cgaatctgcccacccctcctgtaacccagcctgtttcacttcttgatgcttgctttaaatcgagtaacagcatcgcacccatttatg

SEQ ID NO: 375616 - DNA, 75 bp, Homo sapiens
ctgatacagcaggcgctcaccatgttccctggagctgcctgtggaggaaccgattgtgtccacagatgaggtcat

SEQ ID NO: 375617 - DNA, 96 bp, Homo sapiens
gtgtgattctttactcagctgagtgtgccacacaggtagccctggacggcattcagtgttttgggacctgctgcagctgggaggggagctggcccg

SEQ ID NO: 375618 - DNA, 75 bp, Homo sapiens
gcaaagttttgcagatcttcaacaagaggacccaggagaaattcgccctcaaaacccaacatgagtgaagtttcc

SEQ ID NO: 375619 - DNA, 90 bp, Homo sapiens
tggcaggaaaggagtggacacagtaggcagttatacttaagcatgaacattgacgacaaactggaaggattgtttcttaaatgtggcggc

SEQ ID NO: 375620 - DNA, 87 bp, Homo sapiens
agcacgtggaattcgcgaagctgccaaagccttagacaacatataggttgctgtagatgaatgttcttagctgtcatgtttaaaaat

SEQ ID NO: 375621 - DNA, 100 bp, Homo sapiens
caagtgaaattgaggtcacaccttcagtccttcgagcaagtcctgggaactccaacaagggagcaaatcagagaaatgaacccaaactacacagaattta

SEQ ID NO: 375622 - DNA, 82 bp, Homo sapiens
tctccgcgtcccgctcgctgggagagaggaagagctaaagatggctgaatttctagatgaccaggaaactcgactgtgtgac

SEQ ID NO: 375623 - DNA, 75 bp, Homo sapiens
actcagctgtcctccaggttcaaacctcgagtccctgtgatcaaggtgtgaacataggtgaagtcctagataaac

SEQ ID NO: 375624 - DNA, 100 bp, Homo sapiens
gagcctgtgtgtttaggaggatgtgagcacatcttctgtaggttcctaggagaatgttaacagtccagacctttttcactacatcaaccacggatgattg

SEQ ID NO: 375625 - DNA, 75 bp, Homo sapiens
accagacagatcgctgtcaaaaccctaggtacatctccgttcatggatgcattaacagccaatgggacaaccaac

SEQ ID NO: 375626 - DNA, 87 bp, Homo sapiens
ccctacacggtctcctgggtcaagatgaggacggggacttggttgccttttccagtgacgaggaattgacaatggccatgtcctacg

SEQ ID NO: 375627 - DNA, 74 bp, Homo sapiens
tggagggtcagcctggaagaccacagcagccaaggagaacttgccgggctggaactacaccttctggcagtggt

SEQ ID NO: 375628 - DNA, 98 bp, Homo sapiens
tctcaagcacaaggacaagcaggaaaacggcgagaggactggaggggtgcctctgatcaaagcccccaagagagacaatatgaatgatgattcaagta

SEQ ID NO: 375629 - DNA, 82 bp, Homo sapiens
tcgcggccttcttccgatccgataacgaaggaggcccaacttcattcaataaggagcctgacggatttatcccagacggtag

SEQ ID NO: 375630 - DNA, 100 bp, Homo sapiens
agagaggagatgtgacaatagaccgcagacacagggcccatcaccctaagagctcatgccacccggttcctgcatgccagaggagcccaagccaaagagg

SEQ ID NO: 375631 - DNA, 100 bp, Homo sapiens
cggggacagcggcctggctaactcctgccaggcagtgcccttcccggagcgtgccctcgccgctggtttgtatgcagtgaaaatccgagctgaggccatg

SEQ ID NO: 375632 - DNA, 75 bp, Homo sapiens
gcggctcctgtgatccgcccaattatcgcgaccaacacataccagcaggcacctacaaaggcagcacctaagcaa

SEQ ID NO: 375633 - DNA, 82 bp, Homo sapiens
aaaggcaacatcctgtcacaggccatgctctggcaaaaacatatggctcgtggacagcagaaaattcagtctcagcagaaaa

SEQ ID NO: 375634 - DNA, 100 bp, Homo sapiens
tagcagcctttatgggcattactatgttagttggaataactggactcttttacactcaactaattggcatcatcacaaacttgaaggtgcacattcttga

SEQ ID NO: 375635 - DNA, 96 bp, Homo sapiens
cgggaagacgcggcggcggcggcggaggatgagcctgcagagcgcgcagtacctccgatccgtaatgcctcctgcctgcctctttcaagatggagg

SEQ ID NO: 375636 - DNA, 83 bp, Homo sapiens
gacgttcggccaagggaccaaggtggaaatcaaacggccgcgatgggcctcttggaacattggtgtgttcatctgcattcgat

SEQ ID NO: 375637 - DNA, 74 bp, Homo sapiens
ccacctttgtttcctagtgagaaccgagtcagtgctcttacccagggccagctctcaatgttgcaagaaaaaat

SEQ ID NO: 375638 - DNA, 75 bp, Homo sapiens
cgccgcccgaacatggactccgccggccaagggcctcggcttcacaggatggggctgccagtgtcctgggcccct

SEQ ID NO: 375639 - DNA, 100 bp, Homo sapiens
tttttgctcattaacagaaaagaagaggagaatgctaagcagactgtcccagaaaatacttgacaaattggaggactaccagcaaaaagttgataaggca

SEQ ID NO: 375640 - DNA, 75 bp, Homo sapiens
aagatggggttgtcctctttaagaagatgcggttcatgctattattcagccggcagggaaaactgcggctgcaaa

SEQ ID NO: 375641 - DNA, 102 bp, Homo sapiens
ttcacgccttggctcgacactgccagctggaaccagaccatggaaatcctcattgacgattcaatttgttgaaggccaatttgtggactcctacgatccaac

SEQ ID NO: 375642 - DNA, 100 bp, Homo sapiens
ccaagtccagaatccgcgcgcaccgcgggtatgttagagcccaccaaggaaccactgaaaccactttctgctgcagaaaaaatagcttccatcggtcaga

SEQ ID NO: 375643 - DNA, 100 bp, Homo sapiens
atatcctaaaatttcctgaagaactggaacacgtagaaagtgcaagcaaaggagctgtgactgatgagaattaaaggccatggatgaagatgggcttgaa

SEQ ID NO: 375644 - DNA, 83 bp, Homo sapiens
tctacctgctctttggtttacgaaggactgcagcgaagtgaactagcgatggataagtacagttcacacaaaagatgttggac

SEQ ID NO: 375645 - DNA, 80 bp, Homo sapiens
attaggtcccctcaatggggacacagaatgcttccaggaccactcatgatgtaccagtttcaaagaagtttcatcaaagc

SEQ ID NO: 375646 - DNA, 101 bp, Homo sapiens
tgaacgacaagaagctcatgagcagcctgcccaacttctgcgggatcttcaaccacctcgagcggctgctggacgaagatcatcaatgctgtggtactgtt

SEQ ID NO: 375647 - DNA, 75 bp, Homo sapiens
ccgccgtgccgcatgagcatcgcggagcttgacccgtccatcgctgtggtttggggacgacatccctggaatgga

SEQ ID NO: 375648 - DNA, 100 bp, Homo sapiens
gtgtacggaaagtggaaattacaacagagactattaaattgcaacaggattcagaaatcatggaaagcagatgagctttgatccaaaccttctccacaac

SEQ ID NO: 375649 - DNA, 75 bp, Homo sapiens
aagcacctccattctgctggaattattcacagggctttccttaaagtttcccatgtctcaatggactcctgaata

SEQ ID NO: 375650 - DNA, 89 bp, Homo sapiens
gtcacatgatacagccactgggcttatacagtatgcattggaccagggcgtgaacgtcacccaggtcacgatggccgaggcctcagaag

SEQ ID NO: 375651 - DNA, 50 bp, Homo sapiens
ctatgacttgctaaacaatctgttggtacatgtcccagagcaagcacacg

SEQ ID NO: 375652 - DNA, 101 bp, Homo sapiens
ggatggtaacaaaggatttgacaagactaaaaacacttctctcagaaacagagttccagaaagctgagtctgatctggattacattcaatacaggctggaa

SEQ ID NO: 375653 - DNA, 51 bp, Homo sapiens
cggcgccctgcaccgcgcctcgcaaagaatgttttaaaggaagttgggcta

SEQ ID NO: 375654 - DNA, 98 bp, Homo sapiens
tatattttgtcttctgtgtggattcttcagaaagtgaacttggcattttagatctaattcaaggcattccagttccctcttgcccagcacaaccacat

SEQ ID NO: 375655 - DNA, 100 bp, Homo sapiens
acatcgacgccgcctggcaggccctgcgcaccagatttgcagaccctgcgtgtggtctttgctgtgctgggaaagggatgttttgggataagcctaacct

SEQ ID NO: 375656 - DNA, 87 bp, Homo sapiens
agcctctcagccggccgggatggctaccacggccgagctcttcgagatatgcagcagccacgcacatgctgagtgacatttcttccg

SEQ ID NO: 375657 - DNA, 90 bp, Homo sapiens
tttacatcatggactaaatatttatgctactgaaggaactctattggatgttattcgaggcgtggtgaccaagatgaagatgcagaggac

SEQ ID NO: 375658 - DNA, 100 bp, Homo sapiens
atatgggagctgtggccctcagaatttaaacttaaggaaagagtgggaaagtgaggtgatgatgatgatgattttgatgatgaggaagctgaagaaaaag

SEQ ID NO: 375659 - DNA, 100 bp, Homo sapiens
cgcgagggcgcggagttccaggtcgagcagttaggccgcgagcgactgcggcgccgagccgtgtccacaggatgaaatgtccgagtcaggccagtcctcg

SEQ ID NO: 375660 - DNA, 100 bp, Homo sapiens
ttggatcctgagaattgatctatgttggatcacttaacattggtatcccttccctgacaaagtgttgcaaccaacacgacaggtgctatgagacctgtgg

SEQ ID NO: 375661 - DNA, 80 bp, Homo sapiens
ggccagggaaccctggtcaccgtctcctcaggaccgtataatagacgctggccccaaaggaaactactctcgatttatga

SEQ ID NO: 375662 - DNA, 75 bp, Homo sapiens
gcaccgacgtcatcatgctgaccaccaatcagatccgtaaggcctccggtgtggctgtctctgatggtgtcatca

SEQ ID NO: 375663 - DNA, 100 bp, Homo sapiens
cggcggcggcggcggagtgtaggaagaggcactgctgagggggcgcgaggggaacggaggccagagctgcgctcatgggcctcctgagtgacccagaatt

SEQ ID NO: 375664 - DNA, 100 bp, Homo sapiens
atccccgaggaggaagacgaatcgttaaacatctgaaagggtcaggatgacgcggcatggcaagaactgcaccgcaggggccgtctacacctaccacgag

SEQ ID NO: 375665 - DNA, 82 bp, Homo sapiens
tacgccgagggctccgtcaatggcttcatcagcactttgggctggtgccgacaagaaagccgaggctggggctgggtcagca

SEQ ID NO: 375666 - DNA, 100 bp, Homo sapiens
cggaatgtgatacagcctttcccacgacttggctgaggaactgctgttgtgaaccttttgccctggtgggattattgttaatgttgaagaaggaaaatgc

SEQ ID NO: 375667 - DNA, 98 bp, Homo sapiens
tctgagggagggtccgagccagccgctgttttgccggaggagcccctcaggccgatctaaaatgtccactgaggcacaaagagttgatgacagtccaa

SEQ ID NO: 375668 - DNA, 100 bp, Homo sapiens
caaaatgatgagaggctctcgcagaggatgtgttagactcagagcctctgagcccaagtctgcacgtattcatccagatggcctgaagtaactgaagatt

SEQ ID NO: 375669 - DNA, 51 bp, Homo sapiens
cccggaatgcctgaaccaactgttttgagatgctgtcttcgcagtgccatg

SEQ ID NO: 375670 - DNA, 99 bp, Homo sapiens
cgactttcaaaatgctgaatggtgaagtttctctaacttcaggacatgctatcatcaggactcccatggggtacaatgactcttcttgcttttcaccta

SEQ ID NO: 375671 - DNA, 98 bp, Homo sapiens
tccacagtaatggaacagcaagtaaatggacagttaatagagcctctgcagatatttccaagagatttgattagaactatccgggacccagaaaagcc

SEQ ID NO: 375672 - DNA, 99 bp, Homo sapiens
aaaatgcctgggggttatgtcccggaaatagtggaagcattgacatttcctccttcttctggaaagtcattcatcatgggagcagatgaagcccttgaa

SEQ ID NO: 375673 - DNA, 100 bp, Homo sapiens
aagatgtcaagattgagccttgtgggcatttgatgtgcacctcttgccttacggcatggcagccttacgaaggatgaatccaaaaggccaaagtataaag

SEQ ID NO: 375674 - DNA, 101 bp, Homo sapiens
tgctggctgcttccagtgttcgccgagaggtaccgggggtgacagctccgggaccggccgaaaggcgaggaaccggtacatgtcccagagcaagcacacgg

SEQ ID NO: 375675 - DNA, 100 bp, Homo sapiens
ttgagatggtggaggcatgcatgtctaccaaacatgtgggacattaggaaggacattctgagcatgtgagacctgaggactgcaaacagctataagaggc

SEQ ID NO: 375676 - DNA, 90 bp, Homo sapiens
ggccgagcgcgagcagttcgacaagacccaggacactcatgaggaccatgatacttccactgagaatacagacgagtccaaccatgaccc

SEQ ID NO: 375677 - DNA, 80 bp, Homo sapiens
cttgtttgtggatcgctgtgatcgtcacttgaggctgggaggcggcagaatgcagccagaggagggcacaggctggctgc

SEQ ID NO: 375678 - DNA, 100 bp, Homo sapiens
ccagattctgccaattcgttttcaggagcatctccagagcatgcaagcggcaagatgtcctacagatgaattatctttaaccaattgtgcagttgtgaat

SEQ ID NO: 375679 - DNA, 75 bp, Homo sapiens
ctcttttcaccaacaagctcagtgagacctttctccatatctatcagtgaacttagtgatttggcccgtgaccct

SEQ ID NO: 375680 - DNA, 75 bp, Homo sapiens
gaaaaccagcatgaaattacttgaccaagttgtccctccagctggtgaacatccatgatagcagtcttctgtaaa

SEQ ID NO: 375681 - DNA, 78 bp, Homo sapiens
cagacggaggctccctttggatgccagtgtcagttgtcaggtactccaaagattcaggtttactcacgtcatccagca

SEQ ID NO: 375682 - DNA, 50 bp, Homo sapiens
ctgtgtggagaaggaatatcccaaccgggatttggaaggagtgccaccct

SEQ ID NO: 375683 - DNA, 100 bp, Homo sapiens
ccttgagcatgaccagaccatgttagataaacttgtggatggacttgctacctcttgggtgaactctagcaattacaagcttgcattcacaagagatggg

SEQ ID NO: 375684 - DNA, 100 bp, Homo sapiens
cctggtgaaaggatcctacaagaccctcaggctggtagtgcgcagagttgtgccttttactggggatttacttcttggattgcctactacattaatcatc

SEQ ID NO: 375685 - DNA, 100 bp, Homo sapiens
ggaaccctggtcaccgtctcctcaggtctgctgagaacagacccagtccctgaggaaggagaagatgttgctgccacgatcagtgccacagagaccctct

SEQ ID NO: 375686 - DNA, 83 bp, Homo sapiens
cggaaatgtgtcatcgaaagccagggtgaggtggctttgaccccgggttgcccggccagcacgaccgaggaggtggctggaca

SEQ ID NO: 375687 - DNA, 101 bp, Homo sapiens
gggagaggagctgtggataacgggaggtgaatttccatgtcaacatagtcctggtcattcttaactgttcagccctaccttgccttctccacttgttgagc

SEQ ID NO: 375688 - DNA, 75 bp, Homo sapiens
gggacgtcaccacctttttttcggggaaagcagagggccccttggacagatttggagcaagaggtggtggtggcc

SEQ ID NO: 375689 - DNA, 100 bp, Homo sapiens
gtggcggccgcgctctcttccaggacatcaaggttaatttggagtggcccctggagtcagtttcctacaccatccgaggccccacccagcacgagctaca

SEQ ID NO: 375690 - DNA, 113 bp, Homo sapiens
cagcctcaggaccggccacctccatcactggcgtcaccatgggggctgtgctgggtgtcttctccctcgccagctgggatacttttgtggaactctatgggaacaatgcagca

SEQ ID NO: 375691 - DNA, 90 bp, Homo sapiens
ggccctcaaggccatcgaggcgctttcagggtcttcaagacccctggcctgcgtactccagcagcaggagagcggatttacaacatctca

SEQ ID NO: 375692 - DNA, 100 bp, Homo sapiens
acgcctgtgtcctcattgctccaaactgtgttgtttcagctgtattaggattcgggaactggagcctctcctctgtcacagtgacaatccatctcagctc

SEQ ID NO: 375693 - DNA, 75 bp, Homo sapiens
gtgtctgtgtgaggctggctacgtgggcccgcggtgcgagcagcgatacagacgtccctcaccagtgccagcttg

SEQ ID NO: 375694 - DNA, 50 bp, Homo sapiens
cacactgcaatgtttttgtggaacatgatccccagctcaagggtatagtg

SEQ ID NO: 375695 - DNA, 97 bp, Homo sapiens
acatgctgtcccttccggatttggctttactttaagaggagattcagacatagacaagaatgattacccaggtcatgtacgtagaagggactgcagt

SEQ ID NO: 375696 - DNA, 100 bp, Homo sapiens
gccggagcggctgcggagccgggcgctctccgccttcaagttgcggggcttgctgctccgtggatgggtgagtcaagtgaagacatagaccaaatgttca

SEQ ID NO: 375697 - DNA, 97 bp, Homo sapiens
cccgaggtccggtttggtctggcctggcaggtcccggcccgcttcacagtcgaggagagaaaggttcagcagactgtacaggatctttttggcagag

SEQ ID NO: 375698 - DNA, 73 bp, Homo sapiens
gacttgatggtctggtagaaacaccaacaggatacattgaaagaaatctctaccccaaatttgcgtcaccctg

SEQ ID NO: 375699 - DNA, 114 bp, Homo sapiens
ctagaatcaactgagagagatgcttaaaaatcaccagttactttaatgagctgtgggtgagcgtggaggatgctcagatgcacaccgtcaccatctggctcacagtgcgccctg

SEQ ID NO: 375700 - DNA, 82 bp, Homo sapiens
ccggttgtcctcaggcgctgtcagtttcactgttacatgccttgaagtgatgaggaggtttctgttactatatgctacacag

SEQ ID NO: 375701 - DNA, 50 bp, Homo sapiens
ctttggactatggaattttggagagcagagctgacatctgataaagacat

SEQ ID NO: 375702 - DNA, 71 bp, Homo sapiens
acgtcgagcgtgcccgagacccgagggagagaaggtacccaaagggaaaaagggaaaagctgatgctggca

SEQ ID NO: 375703 - DNA, 98 bp, Homo sapiens
cgagataccggcgccatgtccagcgctcggacccccctacccacgctgaacgagagggacacggagcagatatccaaacacagcctgtgagcttctga

SEQ ID NO: 375704 - DNA, 75 bp, Homo sapiens
tccccgtggcgcggcggcggggaggcgaggtgatttgatgaaggctgctgcaggagagttcgcagatgatccctg

SEQ ID NO: 375705 - DNA, 100 bp, Homo sapiens
ggccctcgaaaacccctgctatgatgagaaagatcagtctaaagaaaaggagaagaaagtgaaaaaaacaattccttcctgggctaccctttctgccagc

SEQ ID NO: 375706 - DNA, 97 bp, Homo sapiens
ctcatgaccagctgaagcttgacaaatggtgggtgtctccgatgatgtcaatgaatacgctatggctctgagggacacagaggacaagctccgccgg

SEQ ID NO: 375707 - DNA, 100 bp, Homo sapiens
gttggctctcctgtaggaagcaaccagtctcgatctggcccaatctctcctgcaagtatcccagtattgactcggagacaaaaagaggccaagaccaaga

SEQ ID NO: 375708 - DNA, 74 bp, Homo sapiens
gacctctcggacacggtgcaggcaggtactccaaagattcaggtttactcacgtcatccagcagagaatggaaa

SEQ ID NO: 375709 - DNA, 74 bp, Homo sapiens
aagattctgatttgatggaagcatttcattgtaatcagacccaagtcaacaggactgactgctgtttcagtcca

SEQ ID NO: 375710 - DNA, 100 bp, Homo sapiens
cttgatcctgtcctcccggcaggacaatacggaggagctgtggctcctccattcaaacatcgacgccatcgacaagcggaaaaagaccacatcagtgtca

SEQ ID NO: 375711 - DNA, 95 bp, Homo sapiens
atgagatcaagcaggagctgaagcaggacaacatagcggtgaaggcgaacgcggtctgcaagctgacgtatgataaacatcacgatgctgctcat

SEQ ID NO: 375712 - DNA, 83 bp, Homo sapiens
gttgtcgtggccggagcggcccgcgcctgggctgccggcacttcgcggcaggtgtcccgacccaggctaagcttgagcatggc

SEQ ID NO: 375713 - DNA, 95 bp, Homo sapiens
aagtgttttaagaaagtggacaaagagaggagtcaggcagcttggatcttaaaagcaagagcgctaacagaaatggtatacatagatgaaattga

SEQ ID NO: 375714 - DNA, 113 bp, Homo sapiens
gccgagaaccccagcttggagaaccaccgcatcaagagcttcaagaacaagggccgcgatgtggaagaattggcagcaatgaaacagattctcgttaagatgcatagtaaaca

SEQ ID NO: 375715 - DNA, 82 bp, Homo sapiens
atcagaaccggtacctggatggcatggggaaaggccatacaaatgtcagacctgcgagcgaaccttcaccttgaagcacagc

SEQ ID NO: 375716 - DNA, 75 bp, Homo sapiens
cccgcagcaccgctactcggagggcgagcggacctccctggagaagaaataccgctaccaagatgaagacacgcc

SEQ ID NO: 375717 - DNA, 100 bp, Homo sapiens
gcacaaagttctctcgatcagggcatacatctttcttcgacaaaggactacacttgctgctttgaaggatgaagttgtatctgttgaaaatgaactctca

SEQ ID NO: 375718 - DNA, 50 bp, Homo sapiens
gaagaacacacagcggtggaaaagtctgatgccaatgcaagttacttaag

SEQ ID NO: 375719 - DNA, 73 bp, Homo sapiens
tggaacacctcgccaaagcagagaaatatgaatgatttgggaggggacttcaaaggagttggtaaaggctcct

SEQ ID NO: 375720 - DNA, 51 bp, Homo sapiens
gccctcttcagtcagcttgtgagcaacctgcaagcaatcaaggccagtcta

SEQ ID NO: 375721 - DNA, 90 bp, Homo sapiens
gacagaaccagtatatctcagcccttcatttgacagtgtactgccccgttacttatttttacaagtgacgagagcagacgtggatgtcca

SEQ ID NO: 375722 - DNA, 100 bp, Homo sapiens
gcaaaattcatcattcatgcccctcctggagaatttaatgaggttttcaatggaatcactagatttgatctacttggcgactttggaaggtttaattggc

SEQ ID NO: 375723 - DNA, 74 bp, Homo sapiens
gaggagtcagctgtgtgtccagaacgtgccatggagacgcttaacgatgagattgtggggaacctgggtgaagg

SEQ ID NO: 375724 - DNA, 74 bp, Homo sapiens
aaggaggacgagccgtggtacgaccaccaggacctccagcaaggtgccgtgagcgatgtggagatgcaggaaca

SEQ ID NO: 375725 - DNA, 115 bp, Homo sapiens
gcaccgcggtgcgcaagcgcaaccgtcggtgggtcggggatcggtcgcctgagaggattttttatcaagcagaaatgcatcgaacaacgagaatcaagatcactgagctaaatcc

SEQ ID NO: 375726 - DNA, 89 bp, Homo sapiens
catggcgctcctgctcctccaggcgctgcccagccccttgtcagccagggctgaacccccgcaggaaattatcagttcattgcctagca

SEQ ID NO: 375727 - DNA, 75 bp, Homo sapiens
tggcgccgccctgaccccaagattccagatgttcctgtggaccccagtccaggaggactcagagagagtaatgat

SEQ ID NO: 375728 - DNA, 100 bp, Homo sapiens
gggcactacaccattggcaaggagatcattgacctcgtgttggaccgaattcgcaagctggtggacccaagtggagagattgtggaactggcgaaaggtg

SEQ ID NO: 375729 - DNA, 73 bp, Homo sapiens
ccgcgtcggctgagagcccacaggcccccacagtcaccacgttctgcgcttttccgagtcggacatatgagca

SEQ ID NO: 375730 - DNA, 75 bp, Homo sapiens
tttgaccacccgactctcatagaaaacgagagtatatgcgatgagtttgactctccagaaagagcaacagtaatg

SEQ ID NO: 375731 - DNA, 75 bp, Homo sapiens
gcttcaggaggcatatcgggtgctgaaggatgtctccccgttcaatgttgtggcctggcacgggaattatacacc

SEQ ID NO: 375732 - DNA, 100 bp, Homo sapiens
ccaccatgttacaagacaatggatgagccagccaacatccttctggacgagcatggccacgtgcggatctcggacctgggcctggcctgtgacttctcca

SEQ ID NO: 375733 - DNA, 83 bp, Homo sapiens
cggagatggtgcagaagatggaggagcgtgagtgcatctccatccacgttggccaggctggtgtccagattggcaatgcctgc

SEQ ID NO: 375734 - DNA, 50 bp, Homo sapiens
gcgctgcgctcgcgcccggatccctcagatgggcaccaacaaatgcgcca

SEQ ID NO: 375735 - DNA, 100 bp, Homo sapiens
cggggacttcatcgggaacctggagggcctcaatgatggcggcgacttccctagggagctgctcaagggggggccctcagcctcttggccttgaacgggc

SEQ ID NO: 375736 - DNA, 75 bp, Homo sapiens
acctcactattgatggtgtagcgctttaggggaagggcgcaaccatgtcgccatttcttcggattggcttgtcca

SEQ ID NO: 375737 - DNA, 96 bp, Homo sapiens
caagaggaccctgcggactactgcaaagatgctctgaacgttcttctcatcatcgtggatgacctgcgcccctccctgggctgttatggggataag

SEQ ID NO: 375738 - DNA, 101 bp, Homo sapiens
tattcaacattcatagagccccccacaatattggatacggaaatgaaggtggcagctgccaacaagaagcattagaacaaaccatgctgggttaataaatt

SEQ ID NO: 375739 - DNA, 90 bp, Homo sapiens
cttgcaacagtggccgcacgcataggagatctattgggaaactgattataaccactcgggcaccatcgatgcccacgagatgaggacagc

SEQ ID NO: 375740 - DNA, 90 bp, Homo sapiens
ggatggagaaggaggaggaatcggtgtgcatcaccttcgaccaggccaacctgaccgtcaagctgccagatggatacgaattcaagttcc

SEQ ID NO: 375741 - DNA, 100 bp, Homo sapiens
caggtcatgtgcacagattaatggctggatccatggcagaataacctgggtatcttgtggtctgaaagagaagaaattgaaactgcacaggcttacctag

SEQ ID NO: 375742 - DNA, 83 bp, Homo sapiens
gaaaaagctgcagatgagagtgagagatactattcgttacttgtccttgcatgacaacaaatacatcagatactttcctggac

SEQ ID NO: 375743 - DNA, 94 bp, Homo sapiens
gcctcggcctccccttggattcagacgccgattcgcccagatgagcgggatcgtgtgcagaagaaaaccttcaccaagtgggtcaacaagcacc

SEQ ID NO: 375744 - DNA, 50 bp, Homo sapiens
ccatgaaacccactctgtcgcacaggtgtaccttgaaagacttttaacat

SEQ ID NO: 375745 - DNA, 100 bp, Homo sapiens
ctgggacacacctccattggatttaaaagacagtcctcgtcagcactgactttcagctatggaatcgggcctattccctggtggattccagtcaagtgtc

SEQ ID NO: 375746 - DNA, 100 bp, Homo sapiens
gagcggggcggtgccccaggacctagcgacccatggacttaactagcctgaagagaaatctctctaagggtcggattcgcaccatggcccaattcctgcg

SEQ ID NO: 375747 - DNA, 125 bp, Homo sapiens
ctgatgctctctctccagtccttgctgaagagactttccgttacatgagggttcaactagatatagcttcacaatctctggatcaagaaattttattaaaagttaaaactgaaattgaagaagag

SEQ ID NO: 375748 - DNA, 101 bp, Homo sapiens
tctgcgaacactctttaatggaccagatcaggatttgagcggaagaacgaatgtaactttaagtgacccagaggcaaaggtcctggactaccagacacaac

SEQ ID NO: 375749 - DNA, 80 bp, Homo sapiens
agtgacagtaaatcacagagccggagacatttgtcagccaaggaaagaagggaagctgacagtggcacaaatcaaggcag

SEQ ID NO: 375750 - DNA, 100 bp, Homo sapiens
cgggatcgtgaccgagaccgtgaccgagagcgtgaccgagagcgcgaatatcgtcatcgttagaaggtgtgtgcagtggcctcagggatccggaaagtct

SEQ ID NO: 375751 - DNA, 100 bp, Homo sapiens
gccatggtaggaaaaggtgccaaagggatgctgcaagaatttcgactgggagtgcgactctactcagaggaacagccacaggaagctgtgccccacctag

SEQ ID NO: 375752 - DNA, 75 bp, Homo sapiens
ttctcaaaatccagcccttgagtggaatatggccagcaggagaatgcagttgaaactaattttgtggatagagaa

SEQ ID NO: 375753 - DNA, 97 bp, Homo sapiens
cggctggcccagccaatcctggagctgctgttgcagcacttgttccccaaacaagtgctcctacattctgggcactatgacgcccgggccagagtcc

SEQ ID NO: 375754 - DNA, 75 bp, Homo sapiens
agacccagcagaacagaggcttcgcatttgtgcagctgtcctctgcaatggtgcagagattcttagaagaggagg

SEQ ID NO: 375755 - DNA, 100 bp, Homo sapiens
gtgtacaaatacccctttgaattaattatggctgaatttgacctggacgtggtggctgtggtcaacgacacagtgggcaccatgatgacctgtgcttatg

SEQ ID NO: 375756 - DNA, 100 bp, Homo sapiens
cgcggccaggcgattcggtgaagcgattcctgcaggcgttggttcccctctttgacctgggtagatatggattcccagtttctccagcggccagtgctcc

SEQ ID NO: 375757 - DNA, 83 bp, Homo sapiens
ggacagcgccttcctcaacgacgcggacatggtcatgagctttgtgaacctggcctcctgacaaggtgatccgggcgggcccc

SEQ ID NO: 375758 - DNA, 82 bp, Homo sapiens
gcctaggccgggccctgccagggagcaagtctgcatcgcagaggccaggagacacctatggctgccgatgaaggctcagcag

SEQ ID NO: 375759 - DNA, 75 bp, Homo sapiens
tatgaacccagaggtcgtggaggtggccgtggaggcagaggtggcatgggagattcagttgtggaaattcttttt

SEQ ID NO: 375760 - DNA, 76 bp, Homo sapiens
tctggctcaagcccaggctttggtcaccagtgagctggagaagttccagatcaactcacaatgaaatggagaagaa

SEQ ID NO: 375761 - DNA, 100 bp, Homo sapiens
tggcttcagtagtttcaaaaggtggcctttccactggagttgcttcacttagctctacaatcaacccatgtggagtctccccaggacagtgctatcaccc

SEQ ID NO: 375762 - DNA, 75 bp, Homo sapiens
agcacccctttcttgaaccgaacagagtcaagtggaatcaaagctaatcttccagtaccaacaattgcagcaata

SEQ ID NO: 375763 - DNA, 99 bp, Homo sapiens
actgctcaggcagctccgtagcatgaggaagagtcaggggcacagagagatggagagagacctagttaggccaaagatgaagaggaagcctttctggat

SEQ ID NO: 375764 - DNA, 89 bp, Homo sapiens
cccgccgggaggtactttgctgaaatacactttcgggaaatggcctctaaatcctggctgaattttttaaccttcctctgtggatcagc

SEQ ID NO: 375765 - DNA, 98 bp, Homo sapiens
ctgaagactgccctcatccacgatggcctagcacgtggaattcgcgaagctgccaaagccttagacaaactaagaaaaatggctttgtcagcccaaca

SEQ ID NO: 375766 - DNA, 73 bp, Homo sapiens
gcgtgtcctcggagcgcggtccctgtattggtctcctgctcctagagaccattaaaaatctcaagtgacgact

SEQ ID NO: 375767 - DNA, 96 bp, Homo sapiens
cgatctgcacttcgcattttggcattgacatttaattttagggtcctttatatagaagggagagtaggcggctgccgagtgatagagcagaaggag

SEQ ID NO: 375768 - DNA, 92 bp, Homo sapiens
gccgacccttcctgtcgctgacggcgactgcgggaggccagtctgcgctcctcagaccaccggcaggtgaacagcctgatgcagaccgagga

SEQ ID NO: 375769 - DNA, 100 bp, Homo sapiens
gaaaatgaggagcgcgctcctgagggcaaaacccagagcagacaccgcagccaccgcggatgcaaagccgccatccagtcacagttggacggggtgcgca

SEQ ID NO: 375770 - DNA, 82 bp, Homo sapiens
agaaattcgactatggcaacaagtacaagcggcgggtgccccgggtgagaagccctaccactgcaactgggacggctgcggc

SEQ ID NO: 375771 - DNA, 96 bp, Homo sapiens
cggacgtgtccgcgaagatggcgggccgggaaaggcagcaacaggtggaagctgttgagttggaggctaaagaagttctcaaaaaattatttccaa

SEQ ID NO: 375772 - DNA, 90 bp, Homo sapiens
ggagttcacccctgaatacaaagaacccagtgacttgattgtaaaaatttacagagcggaatcatatgctggtctccaagagtttaaagc

SEQ ID NO: 375773 - DNA, 109 bp, Homo sapiens
caaccccgggctcggcggcggcggccaggtccctgctgaatcacacgccgccatccgggaggcccagggaagaccatcatcaaagaggggatgctgaccaaacagaaca

SEQ ID NO: 375774 - DNA, 100 bp, Homo sapiens
cgacagttgtgttgtgccaatggtggagaagaaaacttcgggtatctgcgggatggtggccatctcctggtacgccttcaacatcacccgggacttcttc

SEQ ID NO: 375775 - DNA, 74 bp, Homo sapiens
ctgtctagatattacagcaatgctttttcaggtgctatggtctttagaattgggtcactggatttctgaggagc

SEQ ID NO: 375776 - DNA, 101 bp, Homo sapiens
cccagccacccatcaaatcagagagaaggaatccaccttcttacgctatggcagctctggaaaggaagagaaatggaagtgagaaagttgagcatttcctg

SEQ ID NO: 375777 - DNA, 100 bp, Homo sapiens
ccggggttcggtggcctctagtgagatctggaggaagtgcacggctgtctataacgtgctgccgggtctcaggatggaggagtgaagtctcctgtcgccg

SEQ ID NO: 375778 - DNA, 98 bp, Homo sapiens
ctgagctcgcggctcacgctgagagggacacgcagtgacgagcggccgaagcagctttgcggcgtttagagaaaatggcagacgatattgatattgaa

SEQ ID NO: 375779 - DNA, 90 bp, Homo sapiens
gcgctgtgctgggcgctgtcatgatcgtgatggtgccgtcgctcatcaagcagcaggtccttaagtcaccagtgccaactcaaggagccc

SEQ ID NO: 375780 - DNA, 90 bp, Homo sapiens
caggcttgttctggatccctatttattaaagccttgaaaagatcttttgaggtcgaggaggtcgagacacccaactccaccccaccccgg

SEQ ID NO: 375781 - DNA, 82 bp, Homo sapiens
gcgggccacgcacctcgtcaccaaggccaagaatgcggattgtggatgatgatgtgagctggacagctatctccacaaccaa

SEQ ID NO: 375782 - DNA, 90 bp, Homo sapiens
gcagcgcgcgaacgtgggcgtggggatggccaccagtttccggacagcttcgtgctggttccttacaaactcttcacggaccacggcggc

SEQ ID NO: 375783 - DNA, 121 bp, Homo sapiens
ccaacctcctcctcttccaccatcaggaggctgagaatccagagaaagatctctgaccactaaatctgtgtgcagcatcaagatggtgctcatgtggaccagtggtgacgccttcaagacg

SEQ ID NO: 375784 - DNA, 100 bp, Homo sapiens
gttcagttcgtcatggggctgtttggaaagacccaggagaagccgcccaaagaactggaatgtatcctgtcaggtataatgtcagtgaatggcaagaaag

SEQ ID NO: 375785 - DNA, 74 bp, Homo sapiens
gctatgcctgcggcggagactgcatcaggctctcgctctattaccaggttttaaacttcgccatgatcgtgtct

SEQ ID NO: 375786 - DNA, 83 bp, Homo sapiens
gttcgacaagaatctgcaggacttggtccgcggcatccgtaaccacaaggaggacgaggattttttatcaagcagaaatgcat

SEQ ID NO: 375787 - DNA, 50 bp, Homo sapiens
ggctcttctccacaaagacaccctacagggagcccttcgagcagcacctc

SEQ ID NO: 375788 - DNA, 100 bp, Homo sapiens
attgtccgggtcctgcaggaccgtgtggaagtgtatgcacatgcacggtttgactatggagagcgcttctgggacatcaaaggcaagctcttcagctgcc

SEQ ID NO: 375789 - DNA, 93 bp, Homo sapiens
ccaggagaagcatttacaataagaagagaagatggacagtttcagtgcattacaggtgaaagtcaatataataggagaagtggttgaccaggg

SEQ ID NO: 375790 - DNA, 100 bp, Homo sapiens
gcggctaccccaggccatccttgaggccagcagcttcacggaccttgagaccatcgccaacctgggtctggtcgcagacactatgctgcctcccatggcc

SEQ ID NO: 375791 - DNA, 76 bp, Homo sapiens
tagtgttttgagtctccaggaagaaattaatgagcagggacatgaggccatattttcagaagacagaaacaccatg

SEQ ID NO: 375792 - DNA, 80 bp, Homo sapiens
cctatgttgccctgagttacataaataggtcaaaatgcagatcttcgtgaaaacccttaccggcaagaccatcacccttg

SEQ ID NO: 375793 - DNA, 96 bp, Homo sapiens
cggagcgcccgggatgcaggaggagagcctgcaggtaagactttgaccccgacgcaggcttcagtgattgccgcggatcagaagcctgagcacttt

SEQ ID NO: 375794 - DNA, 114 bp, Homo sapiens
cttcgcccggctttgcagcggggacttcggcggcggcgcctcaggcacctcggcccgggagccttcacgtaaatgggtccagtcatgcctcccagtaagaagccagaaagctca

SEQ ID NO: 375795 - DNA, 98 bp, Homo sapiens
ttgctcgcccggcggccgcagccatgtcccgggggcccgaggaggtgaaccggctcacggagagcacctaccgggtctcggacagcccgggagacgag

SEQ ID NO: 375796 - DNA, 75 bp, Homo sapiens
accttcaaaacaactggaatatttagcaaggattcaaggctttcaggtggtattaaagataatcaaacattatca

SEQ ID NO: 375797 - DNA, 82 bp, Homo sapiens
aggctaaggacttcatgcccgccagcaaaggtgaggcggaaccaaccctcctggccatgggaggggccgtggtggacgaggg

SEQ ID NO: 375798 - DNA, 101 bp, Homo sapiens
gaaaaatgtccttaaagcaattgagcaggctgatctactgcaggagggattaaagcctgtggtttccacagaagcaccacctatcatatttgccacaccaa

SEQ ID NO: 375799 - DNA, 90 bp, Homo sapiens
ccgaggcacctttcaagaattctgccggaggtttatgaatgataagcatatggatcagaaactttcgaagttggtagaagagctcacaac

SEQ ID NO: 375800 - DNA, 50 bp, Homo sapiens
cccccgggagcgggcgcccagaggatgaccagtgtcccagtgaaggaacg

SEQ ID NO: 375801 - DNA, 87 bp, Homo sapiens
aaaatgtggtcagtgaacctatcgaaggacatgaagactaccacatgatggctctctatgagaacatgctggtggagctgccctttg

SEQ ID NO: 375802 - DNA, 83 bp, Homo sapiens
cagagccaccagccaatgatcttttcaatgctgcgaaagctgccaaaagtgacatgcagaaacattacccttttgcactatct

SEQ ID NO: 375803 - DNA, 83 bp, Homo sapiens
gagcaaagtgcgtgaggagtttaaggagctgaaagcgcgtttccctgaaacctgggctcttgaagacgcatcactggagcaga

SEQ ID NO: 375804 - DNA, 100 bp, Homo sapiens
ctggaatttgattaactcattcaaggttacccagttgtgctcatcatcactgtaggggacctttgaaagagctgccggagaaggtgaggaagaaagccct

SEQ ID NO: 375805 - DNA, 96 bp, Homo sapiens
catgcattgtgggttactggaggaacccgacatggattccacagggtctccgtctctccaccgggggcttcatccttccagggaggagaagaggga

SEQ ID NO: 375806 - DNA, 51 bp, Homo sapiens
ctcgacgagtacatcgcaaggatggttcaagcatagcggcctgaccacagg

SEQ ID NO: 375807 - DNA, 101 bp, Homo sapiens
gcagtcttcttcgtggctgaacaggtgtggcgatcgatgggaataatcacgaagtcaaagaaagacacattcagctggtcaagaaaagggggaaagtcaag

SEQ ID NO: 375808 - DNA, 100 bp, Homo sapiens
tgccattcacattcatacctgcaacgtacactcatacatgtgtcggatatttgcgaagaagctccctttcccacctagctgagatgccgcggcagtttcc

SEQ ID NO: 375809 - DNA, 98 bp, Homo sapiens
cagattaaacaggctgtgaagaagctgtatgacattgatgtggccaaggtcaacaccctgattcggttggatggcaagcatgtggtgtttggcaaagt

SEQ ID NO: 375810 - DNA, 101 bp, Homo sapiens
ggagaagccgcccaaagaactggtgtttgccacaaaactgacctacccacagccagttaccccatggaatgttcaggaacttaggcaagcggtcatcaacg

SEQ ID NO: 375811 - DNA, 90 bp, Homo sapiens
ttctgtgtcccacttcatctttaataagtttttggctttcacccccaaccagtgaccaaagacttgaccactcaaagtccagctccccag

SEQ ID NO: 375812 - DNA, 51 bp, Homo sapiens
ggcggatctcagaaggccagttcaaagggcacacgtgtttcacgttgacag

SEQ ID NO: 375813 - DNA, 50 bp, Homo sapiens
ctttgggaaagccactcgaaaagattgcttatgggagatgaacgtgtaaa

SEQ ID NO: 375814 - DNA, 50 bp, Homo sapiens
gcagatagcagagccatccttggggcctcatgcattgtgcgtcagcagca

SEQ ID NO: 375815 - DNA, 100 bp, Homo sapiens
gtcggtgctccggggaggtcacctgacgaggagcaccgaacaagatttgtgatgaaatggagcctggaacaaactcttttcgggtagaatttcctgattt

SEQ ID NO: 375816 - DNA, 98 bp, Homo sapiens
cacgcctacaaattcttctttaagtccatggaccaggacttcgggggccggccaggacgtgggccgaagctgcatcctggtctccattgcgggcaaga

SEQ ID NO: 375817 - DNA, 75 bp, Homo sapiens
aacttgtgcctctcattcctgccagaggtggcatctgtgaactggtttgactgccgatgtggaaatttgttttgt

SEQ ID NO: 375818 - DNA, 96 bp, Homo sapiens
gcttgttcttactggccctgagtctttgggggcagcctgcagaggctgcgataagccagctgcagaatatatcctgaggtacctgctttatggaat

SEQ ID NO: 375819 - DNA, 100 bp, Homo sapiens
gagtcgcagttaccaccaaacccaggaggagactctccctggaaaacttcccttccctttcggacctgggtcggtgagaggaataaatggatccatcagt

SEQ ID NO: 375820 - DNA, 96 bp, Homo sapiens
gtgtcgtcttcaacatctgcttactcttccttccctgtagatgttgtggtttatgtacgagttcaggtgtgttctactccctcttctgggaatgaa

SEQ ID NO: 375821 - DNA, 101 bp, Homo sapiens
agcgtgacggctggcatcatcattgttggagatgagatccttaagagagacaagagagacacctccaacttcgacaaagagttcaccagacagcctgtgga

SEQ ID NO: 375822 - DNA, 75 bp, Homo sapiens
gcggccctcagcggccgcgaccgagtcatggctgagacctacggtgtatcctgagtttgaagaccagagagcttg

SEQ ID NO: 375823 - DNA, 87 bp, Homo sapiens
atgatccacctcaaagggatgaatttttgggaacttgcgtgcaacatcttaattcttacttagggacagatatggcttttctaaaga

SEQ ID NO: 375824 - DNA, 100 bp, Homo sapiens
aacttccatggcatggatcttacccgtgacaaaatgtgttccatggtcaaaaaatggcaggagttgatccctgaattttattatctccctgagatgtttg

SEQ ID NO: 375825 - DNA, 100 bp, Homo sapiens
cccatcacggtcaagtacacagagagacggcagccgctgtacagattcatcaccacgcttgaattagagtctgtcaaagcccagtctttggcaataacaa

SEQ ID NO: 375826 - DNA, 75 bp, Homo sapiens
cagtatggaagagactctgatgcaaatagtcttgtgaaaatgccattgtgtgctggaaacctggcaagatggaag

SEQ ID NO: 375827 - DNA, 98 bp, Homo sapiens
tctgaagcgcacgacctccgactactttctccttcaagtgtgaagcctcagtttaggtcatctggtggttcagaacactcaacagagggctctgtatc

SEQ ID NO: 375828 - DNA, 82 bp, Homo sapiens
cctttatctgatgatgatgaaagttacacagatgctgagatgaatcgtcacctgtgtgtttggctttttagacatccatctc

SEQ ID NO: 375829 - DNA, 90 bp, Homo sapiens
ctcgggaagtgaggagagcccccattggaccagtgtttgcttagatccacatctcaaagaagtggggcttcaccaagttcaatgctgatg

SEQ ID NO: 375830 - DNA, 75 bp, Homo sapiens
ctcagtttatatgatgtcgctgggcaggggtaccttcgggaatctattgggaaaatgaggtacgttagtgttcgc

SEQ ID NO: 375831 - DNA, 95 bp, Homo sapiens
tgatgaattcaatcaattctttgtgactcctcgatcttcagttgaggagccatgtctgaccaggacgtttggaagatcatatccatgccagaggc

SEQ ID NO: 375832 - DNA, 74 bp, Homo sapiens
acatccgcgagttcctgcgcggctgcggggcttccctgcggctggagacgtggctggtggctattcatattcca

SEQ ID NO: 375833 - DNA, 82 bp, Homo sapiens
gccgaggcaccgaggcactcagaggagcctcaagctcgaatgtgacaagttggccagtgagaagtcagagatgcagcgtcac

SEQ ID NO: 375834 - DNA, 100 bp, Homo sapiens
cgccaaccccttcgagcaagacgtggattcatgcccaagcacaaaacaacccatttaaagaagatgctcggccttaaaggaaatggcggtgcggttctgt

SEQ ID NO: 375835 - DNA, 75 bp, Homo sapiens
ggtaccggagtagcagtgtcctctctcatgaagagttgattatggaagattcccacaagagtaccacgtcagaga

SEQ ID NO: 375836 - DNA, 83 bp, Homo sapiens
gcgacttcattgatgcacccattccagtggtgtaacgtgtactaatggtcacttgatgtgcgctggctgttttatccacctac

SEQ ID NO: 375837 - DNA, 130 bp, Homo sapiens
gtgcctaattcaacacgcaaaataaaagacacttgtattcagtcaccaagcaaagagatgatttatctggctcgtaatgccaaggatgtttcagtctcatattaccattttgacttaatgaataatttac

SEQ ID NO: 375838 - DNA, 60 bp, Homo sapiens
gaaaggacactcccctaacatatttgggtgcttcaaggatgaccgcatcgtcttctggac

SEQ ID NO: 375839 - DNA, 119 bp, Homo sapiens
agaaattgaaaagtactgcccagagaattttgtagacatcaaggtgtggcggggcaccctggcccgcatgcggtacaaaagaaccaaggcagctctgacaataatcaggtactaccggc

SEQ ID NO: 375840 - DNA, 98 bp, Homo sapiens
tcgagcaaaactttgggcttgcaacttttgttaccaaaggaatcagggtgttaatctttatgtgaaaaatcttgatgatggtattgatgatgaacgtc

SEQ ID NO: 375841 - DNA, 90 bp, Homo sapiens
ctctgccaccctcccatccgtccgcgggtccgtggagctggagcagatcccccagccggctgagacagccacccacacagaatatgccta

SEQ ID NO: 375842 - DNA, 75 bp, Homo sapiens
cgagcagaactacggcgagcgggatccagtttatggaaaaggaaaacttggagaaatccagggacttatcttggg

SEQ ID NO: 375843 - DNA, 75 bp, Homo sapiens
cagccatgtcatcttatctacgaaatgattcaggaagcaagatttccagatgtagcaaatgggtttattgaggaa

SEQ ID NO: 375844 - DNA, 98 bp, Homo sapiens
tcaggatctcactggcatcgaatctatggatcagtgtcgccataccttggaacagcataactggaacatagagagccggtgccatctgtgggggcttt

SEQ ID NO: 375845 - DNA, 100 bp, Homo sapiens
tgggtgttgggcctgacgatcctgacctggtacgagcccggaacattcttcacaagaaagtgcctggtccctgtgaccatgaagacctcctggacggtgt

SEQ ID NO: 375846 - DNA, 80 bp, Homo sapiens
atgcaggaaattttgtggaaaccgcaacagatgaccaaggaagtttgggattatgttttcttcaaggaggctccatttcc

SEQ ID NO: 375847 - DNA, 82 bp, Homo sapiens
gctgccatgctcctggcgtggacacacaagcaccccaataacctcaaggaagcgcaacaggaaaggagagaagaatggcaag

SEQ ID NO: 375848 - DNA, 119 bp, Homo sapiens
agccatggactctaccaagtctgaacccctgaagggatcaccagaggtttttcgttggaatatacgttgcacatttatggcgattctgagtgtgagggcagacttctgccaggctcagc

SEQ ID NO: 375849 - DNA, 75 bp, Homo sapiens
cgccacctcccttccccacagctaggaaccaagggtctctcattcatcacttttatctgctatgtggcgtcctca

SEQ ID NO: 375850 - DNA, 82 bp, Homo sapiens
ccgacatcgcggccttcttccgatccgatcaggatcctcatgaccagccaaagagaagaagaattaggaagcataaatcaaa

SEQ ID NO: 375851 - DNA, 75 bp, Homo sapiens
tcaagagaaatggagcccttctccaaggcagtggagctactgctgtggttcaggcagccctatgcaaacccaggc

SEQ ID NO: 375852 - DNA, 100 bp, Homo sapiens
cgccactcagccggctggatcgctgtctgtggtcactactgtgtggggagttggcaacgcgacacagagccaggttggatggcaagcatgtggtgtttgg

SEQ ID NO: 375853 - DNA, 82 bp, Homo sapiens
cactgaaattcatcctgagatgagttgaagcttcttgtcatgacggggatgaaacaattgaaactattgaggctgctgaggc

SEQ ID NO: 375854 - DNA, 100 bp, Homo sapiens
gccctggacctggcagatccttcagcaaaagctgtccttacaggtcacgcaatatttaaactcacgtatctaagcaatcacgactataaacacctctact

SEQ ID NO: 375855 - DNA, 100 bp, Homo sapiens
ctggttgttccgttgcgagctgcagctgcgatctctgtggtaggcccaggtcactggaaggactgagcgcattcaggagcctggaggaactcatcttgga

SEQ ID NO: 375856 - DNA, 100 bp, Homo sapiens
ttcagggtcacgagatgagcgctatcggtcaggcgcacctatgttggcagcatgcctggtcgcatcatcaacggcttgaagactgtgggagtgaacaacc

SEQ ID NO: 375857 - DNA, 98 bp, Homo sapiens
aattgcccatgggctccataaaaaatgtggtcagtgaacctatcgaaggacatgaagactaccacatgatggctggagtgcagtggcgtgatctcggc

SEQ ID NO: 375858 - DNA, 96 bp, Homo sapiens
ctcgtagcctgccactccgtgcgaccagaggagcgagagcagcaagaaccacacccagcagcaatgtcagcggaagtggaaacctcagagggggta

SEQ ID NO: 375859 - DNA, 83 bp, Homo sapiens
cttcaaccagcctttggtcatcaccagggggaatccgtaccagagtaccagatggcttttcagacagaggttggaaaccatcc

SEQ ID NO: 375860 - DNA, 98 bp, Homo sapiens
cgagaccgtgaccgagagcgtgaccgagagcgcgaatatcgtcatcgttagaagctggcattcctcgttcagtattgaaagattggcgtaaagtcaag

SEQ ID NO: 375861 - DNA, 75 bp, Homo sapiens
gcatactttgaagatcgtcatgggaacacagaccaccagtgcaaaacaagaaaaagcaccaagtaaaaagccagt

SEQ ID NO: 375862 - DNA, 100 bp, Homo sapiens
gagatcagtgagctagcagcagagaagccttcctggaaaaggtcacagaagatgtgaattcaagtatcaagacatttttttgtcccaatgatacctacaa

SEQ ID NO: 375863 - DNA, 75 bp, Homo sapiens
taaacacatcaccttgatttttaatcccacgctctggaagagaaatggccccagttcatcacccttctctagccc

SEQ ID NO: 375864 - DNA, 82 bp, Homo sapiens
cgtcagatcctctaccttttacagaatttgtgcggtacatttctacaacagccttatggtggaaccaaagttttaatcaaag

SEQ ID NO: 375865 - DNA, 98 bp, Homo sapiens
agttagatagtgaccactgggcacccattcattatgcatgctggttatgtctagagaagatatttccacactggtttcccttttcaagagctttatcg

SEQ ID NO: 375866 - DNA, 100 bp, Homo sapiens
accgcaacctcatggtgtacatgtacctgcccgaagcggatttcggcctggcccgggcctatggtgtcccagtaaagccaatgacccccaaggtggtcac

SEQ ID NO: 375867 - DNA, 75 bp, Homo sapiens
gtcatcccacctgagaaccatgctcaccgaccctagaattctgccagatatcaggacagatggggaacagcagaa

SEQ ID NO: 375868 - DNA, 73 bp, Homo sapiens
cttgatatcacagaggaaactctgcattctcgcttcctggagggccacgactgcttcccggtgctgttcacct

SEQ ID NO: 375869 - DNA, 51 bp, Homo sapiens
gccagcactgcgggggccgcttcagagtccttagccaggatggaggctgtt

SEQ ID NO: 375870 - DNA, 100 bp, Homo sapiens
ctccatccaaagcaccttcagcatcaacccagtggaactctctagcctcctggttcggaatgtcaactatgagatcccctcactgaagaagcagattgcc

SEQ ID NO: 375871 - DNA, 100 bp, Homo sapiens
atggccgcagccgctctggggcagcctcacagaatgaggttcctgcggcacccctggaagaactggcctacagacggtcgcttcgcgtggctctggacgt

SEQ ID NO: 375872 - DNA, 100 bp, Homo sapiens
cgcggggcaagtggctcggaacacagagtccccagggagacacttaagggaaattaaactgcagagtgcaagagatgcctcagtcaagtcagccaaaaac

SEQ ID NO: 375873 - DNA, 75 bp, Homo sapiens
ggatcccagacttgccccaggacacctttatccagtttcctggatggaccaagggagatgtgcattgagcaggat

SEQ ID NO: 375874 - DNA, 83 bp, Homo sapiens
gtgctctatgactacgaggcagccgacagcagtgagctggccctgctggctgatgagacaatgcagatcttcgtgaagactct

SEQ ID NO: 375875 - DNA, 74 bp, Homo sapiens
tactattgtactatggacttcatcgctttatagtttgttcggacagtgttaccattttctcaggaatttcaaag

SEQ ID NO: 375876 - DNA, 100 bp, Homo sapiens
acctggcactcctggacaggatggattgccagggcttcctggcccgaaaggagagcctatccccgtcgaggtcaagatcaagatccaggtctatttcacg

SEQ ID NO: 375877 - DNA, 100 bp, Homo sapiens
ggctagggaggacctcacttccccggggtgtaataatgttaactgaggtgtgatacaattcagaaaataatttgtaattaagaaaaatcagacaagatgg

SEQ ID NO: 375878 - DNA, 74 bp, Homo sapiens
tttgttcaggaaccaccagtgacagacacaagctccgggtggataaggcagctgctgcagcagcggcactacaa

SEQ ID NO: 375879 - DNA, 100 bp, Homo sapiens
gcgttggaggccaccgtttccaggagcaaagaatctgcagagtgttgtgcttagtaaaatgaattttgaatcttttgtaaaagatcttcttctggttcgt

SEQ ID NO: 375880 - DNA, 50 bp, Homo sapiens
cttgcacttcggtatgcagggaggcaggagtcttctcaagtctgttgaag

SEQ ID NO: 375881 - DNA, 90 bp, Homo sapiens
atgccatcgtgatggcggatgagagtcatcaggtactcacaggttgactgcagaggagaggaaccaagctatacttgaccttaaagcagc

SEQ ID NO: 375882 - DNA, 100 bp, Homo sapiens
ttccggagtcagtcattttactgtcaagacatttcttcggcattctgcaacaggtgaatctaaagacaggagttcctcctgacaccaataatgagacatg

SEQ ID NO: 375883 - DNA, 100 bp, Homo sapiens
gtaccacctggaaccattcctccagcctttcccccacctactgcttcaaaagcagtggactgtcttttggattcaaagtgggcaaaggccaagaaaggag

SEQ ID NO: 375884 - DNA, 127 bp, Homo sapiens
ttaccgtctgcaacccagagatgtgccagctgttcaccaccgagctatgccgggctgggatcagatgggaagtggaacctcgtcatgaccagaaactgtttccctacgaagagcacttggagatggc

SEQ ID NO: 375885 - DNA, 100 bp, Homo sapiens
cagaacaagcccatggagtccctggacttgaaggacaagaccaagcgaggatctggatgagctgcactaccaggacacagattcagatgtgccggagcag

SEQ ID NO: 375886 - DNA, 100 bp, Homo sapiens
ttcctgtgcagtcctgttggaatttgtatgccattgcattggccttaagggaaaagcagcgtgtaatatttaccagcccaattaaggctctgagtaacca

SEQ ID NO: 375887 - DNA, 82 bp, Homo sapiens
tcagatgctcccttctgctcctggtgatctgcaactctttcaccatctgtaatgcggagatgcaggaagttggtgttggcct

SEQ ID NO: 375888 - DNA, 82 bp, Homo sapiens
gagggccagctgacggagatggtgcagaagatggaggaggtcagcagcaaggacaagatggagtaaaagtccagcaagctac

SEQ ID NO: 375889 - DNA, 100 bp, Homo sapiens
ttgtacaagacatgcgcctcatcttccagaaccacagggcctcttacaagatttgcctgcaatggataacccagtgtttttggaattacttagattggat

SEQ ID NO: 375890 - DNA, 100 bp, Homo sapiens
aggagtgcctggctgttatggaaagctgatgatttcagctctcaggataatcttgatgacccagaagctggtggatgggatgcgaccttgactggggaag

SEQ ID NO: 375891 - DNA, 99 bp, Homo sapiens
cgcaaacccaaagatccccgttcctggagattctgattgaggaattacatgaacgacagccttcgcaccgacgtcttcgtgcggttccagccagagagc

SEQ ID NO: 375892 - DNA, 100 bp, Homo sapiens
aagaagcagcgtaccaagaaaaataaagaagaggctgcagaatatgctaaacttttggccaagagaatgaaggctctttctggcaaaggtaatgacatac

SEQ ID NO: 375893 - DNA, 82 bp, Homo sapiens
cagaggggcgagcaggagcgattccgtcgccaaacaggcggctatgagaggttttcctccgagtacccagaattctgttcta

SEQ ID NO: 375894 - DNA, 95 bp, Homo sapiens
ctgcgttgtgaggggtgtcagctcagggttcccttactttgtgactttgaacctctacaccagcatgtacttgctctacataatttggtaaaagc

SEQ ID NO: 375895 - DNA, 99 bp, Homo sapiens
tccctatgcctgcttttatggagcatctgcaaagaaggttaaatcaggatggctggataaactctctcctcaaggtgctaggaaaagaatgtcagtgat

SEQ ID NO: 375896 - DNA, 103 bp, Homo sapiens
cggccccggacgaaggtactcgcagcacttggagcgcagaaccggccgcgcccggtgagaagccctaccactgcaactgggacggctgcggctggaagtttgc

SEQ ID NO: 375897 - DNA, 83 bp, Homo sapiens
ggggacagctgctggtgtggttcggagccgcgggtgtcgtgaaaactacccctaaaagccaaaatgggaaaggaaaagactca

SEQ ID NO: 375898 - DNA, 89 bp, Homo sapiens
tcaacagactcacaattggagaaggacagcaacaccacctggggggagccaaacaggttaacatcagatcccagaaaacagtgttctaa

SEQ ID NO: 375899 - DNA, 98 bp, Homo sapiens
gtggctaccatgttctctcgcgcgggtgtcgctgggctgtcggcctggaccttgcagccgcaatggttgcgtaggaggctctgtctggtatcttgaaa

SEQ ID NO: 375900 - DNA, 75 bp, Homo sapiens
cctccaaagattccccccaatgccacgcttgtatttgaggcggagtctgaaatggccctggatgctgagttcctg

SEQ ID NO: 375901 - DNA, 98 bp, Homo sapiens
tgcacttccagagcccacgggtcccaaggggcggtggcttcaggatccactatcagggagctgcagcagctgctgtgctgcacgcggcaagaggcgag

SEQ ID NO: 375902 - DNA, 98 bp, Homo sapiens
gccggctctggtgctcccagaagagttccgatgaagttaaattccgtcaagatttaatgaatattgcgggcacaacattatcctcaaaacttcttact

SEQ ID NO: 375903 - DNA, 75 bp, Homo sapiens
gcttcatcctcggcggcggtggccgctagctccaaggaaggacgccaggaaagcatgtgcagatgcaactctctc

SEQ ID NO: 375904 - DNA, 75 bp, Homo sapiens
ccctgatggcagttagcacactggtggaagggtttggattttgaggccaaaaaccagcacaccctgtacgttgaa

SEQ ID NO: 375905 - DNA, 97 bp, Homo sapiens
aaatgtaatttataaacgtgatgttggaggtggacccgaactccccggtgctcttggaggacccagtcctttgtgccttggcaaaaaagcacaagcg

SEQ ID NO: 375906 - DNA, 100 bp, Homo sapiens
cagtgatggatgcagctcttctgttgatagacacagcaggatgccaatgcctcttccctcttagacatctatagcttctggctcaagtaagcctttcctg

SEQ ID NO: 375907 - DNA, 97 bp, Homo sapiens
cctggataagaacccagaaacccgacccagtgccgcgcagctgctggagacaatgcagatcttcgtgaagactctgactggtaagaccatcaccctc

SEQ ID NO: 375908 - DNA, 98 bp, Homo sapiens
agcctcaaactcccaggctcaagcaatcctaccatgtcagccttcccagtagctggaactacagattcatcatggaaggctgcagtacaagtttgact

SEQ ID NO: 375909 - DNA, 136 bp, Homo sapiens
atggtttctaaaatgatcattgaaaacttcgaggcactcaagtcctggctcagcaagactctcgagcccatgttatacattggctcttcaaagacgttcacctcatcagagaaatccctgactcctttgcagtggt

SEQ ID NO: 375910 - DNA, 99 bp, Homo sapiens
gccatgccaaggactatgtggagttgtggaagctgatcgaggaagcctaagcaggctctgtgaagtgggaatagtggtatttgagtcaaggtttgctta

SEQ ID NO: 375911 - DNA, 110 bp, Homo sapiens
ttcaaaaggggggacatcctcaaggaaaagctttcaaaggatattgattaccttattggtaaggaaagccaggtgaagagtcaaatatctgaactaaacttgttaatgaa

SEQ ID NO: 375912 - DNA, 75 bp, Homo sapiens
tactgttactgtggtggccctggggactcggacctcaggcacatgcgaatgacccggagtgtggacaacgtccag

SEQ ID NO: 375913 - DNA, 82 bp, Homo sapiens
ggagccagcgtgggaggccgctgccgtcgcgcgccttgcttggtgctaacagtggtttgcacatcatcatctttgatgaaat

SEQ ID NO: 375914 - DNA, 90 bp, Homo sapiens
ccttacaggggtccctggagtttgatgatgctggaggtgaagaaaaggtgtgagcggtactgggcccaggagcaggagccactgcagact

SEQ ID NO: 375915 - DNA, 100 bp, Homo sapiens
tccagaattacgggcaagcgctgttcaaacccatgaatgcacttacatttcaatcgaccaagttccaaggacctatgccataatgataagcagacccgcc

SEQ ID NO: 375916 - DNA, 100 bp, Homo sapiens
tgacggacgtggaagtgtcgccccaggaaggctgcatcacaaaggccacggcgtatgcctccgaggacggggtcctgaccgaggccatgatggacacccg

SEQ ID NO: 375917 - DNA, 117 bp, Homo sapiens
gaaacatgctagaattacctggaacttcatcatcatctacttcacaggaattgccattttcttcccaagggattgttgaagaaacttctgaagagggaaactctgtacctgcttcac

SEQ ID NO: 375918 - DNA, 82 bp, Homo sapiens
cggagagcacgccatgaaggcctcgggcacggtcttccactttcgccttggtgcctgtcttcgcccacctgagcatcctcca

SEQ ID NO: 375919 - DNA, 143 bp, Homo sapiens
gagaggatggactcgggccctggggccagagcagttgctgagagcctgtgaagccatcactgtggggaaaggatgagacctgcacgcagtggctcacagcagcacgatttgtgacagcccgaggcggagaacaccgaacaccc

SEQ ID NO: 375920 - DNA, 82 bp, Homo sapiens
ccactcattcacttctagacgacaaaatgcaaaaaaggaggccaaagactttcttaaagaaagtggttattgtacaggtcat

SEQ ID NO: 375921 - DNA, 96 bp, Homo sapiens
ccatggcctacctggagagcatcaactgcgtgcacagcttgtatggcagtctcccaccctcatgtgttcaatctgatgatcccaggaggttctgga

SEQ ID NO: 375922 - DNA, 89 bp, Homo sapiens
gagcagatggataccgtatcgacgtggggcctccggagtttgtcttgggatgcaactagcagtgatagagtttgcaagaaactgcctta

SEQ ID NO: 375923 - DNA, 98 bp, Homo sapiens
tatggttggcatggaattgaatttcatctgtctgtgggaattgtaagcaaggatgtatgttgtgttcacagcgaaggtactcccttcagcctgtccca

SEQ ID NO: 375924 - DNA, 74 bp, Homo sapiens
agacccttactgtaaatgtagagggcactaaaacattgccagatgatcagaataaaattgaagggtgtttttct

SEQ ID NO: 375925 - DNA, 78 bp, Homo sapiens
ttaggaaggggagctgaggtccggggcccagttttccggagttgcggttttgattcccaccatggccatcacccagtt

SEQ ID NO: 375926 - DNA, 78 bp, Homo sapiens
tggatctgtgcttgtgaaaggctccatggtcttgcctccttgcagattcatgatgttgctatcaaaagttgagaaatt

SEQ ID NO: 375927 - DNA, 101 bp, Homo sapiens
gagctccaggagttcgtctcttacgtctgcggaagtgcagctgcctcagttcttagcgcagtgctcggccttgttctccccatgtgggccatagccctcat

SEQ ID NO: 375928 - DNA, 75 bp, Homo sapiens
cagggatcttgagagtgaagatctcgaaggatttcatagattcatgatgttgctatcaaaagttgagaaattgtc

SEQ ID NO: 375929 - DNA, 74 bp, Homo sapiens
tccagatctggggtaggaaaattacagttttgcaggtaatttggaactctgggaaacatctccaaacctcttcc

SEQ ID NO: 375930 - DNA, 89 bp, Homo sapiens
ctgggaaagaagttatgcttgttggaattggtgacaaaatcagaggcatactttatagggaggagatatcaccaaacatgatggaacag

SEQ ID NO: 375931 - DNA, 75 bp, Homo sapiens
gctatggccggttccataatcagttcctacaacccacaggacagcctagtatcagaaggccaggcgagactgcaa

SEQ ID NO: 375932 - DNA, 98 bp, Homo sapiens
ccaaccgctccgctgcgcgcaggctgggctgcaggctctcggctgcagcgctgggcctgaaacaaccagagagctacgggaaaggaagggcttggctt

SEQ ID NO: 375933 - DNA, 100 bp, Homo sapiens
ctgaagccatacaaagtaagctggaaagcagatggtactcgatttgagttctgtgaacctgcatttgttgttggtaattgcctccagatagcttctgaca

SEQ ID NO: 375934 - DNA, 100 bp, Homo sapiens
gtacgccttctcccctaggaattctcttccacagcacctgaaagaggaggtgaaacagcagaaatgcctgacatgtatccccctggagagtatgacctag

SEQ ID NO: 375935 - DNA, 98 bp, Homo sapiens
cagtgtcagttacctccgggtgaagagcttcttccaaggtgtttaaaattatccaactgccatagagctaaattcttttttggaaaattgaaccgaac

SEQ ID NO: 375936 - DNA, 123 bp, Homo sapiens
cacgtcgttccgcgacggcctggctttctgcgccatcctgcaccgccaccggcccgacctcatcttcggaaccaaaaagaagcttcccagagccggggccaggagccccaagcgccctctagc

SEQ ID NO: 375937 - DNA, 74 bp, Homo sapiens
ctacgagtaccagcactccaatttgtatgccatatcagagcagccatcagcagggaccctttctacgaaatgct

SEQ ID NO: 375938 - DNA, 75 bp, Homo sapiens
gcttcactcaagtcctgtcaagtcaaggcagccgggatttgtccacatcgcccagattgccttcctgcagggaga

SEQ ID NO: 375939 - DNA, 100 bp, Homo sapiens
agggcagcggcctgggccgcaagaagcagggcattgtaacgcctatcgaggccaagatcaaggctcgagatcttcgcgggaagaagaaggaggagctgct

SEQ ID NO: 375940 - DNA, 74 bp, Homo sapiens
gttaactctaacgtgaacgcggaccaggagaattcagaaggagctggcggacatcactttagaccctccaccta

SEQ ID NO: 375941 - DNA, 82 bp, Homo sapiens
cttcggcagtccacccaccgccgccgcctcccagatttaaggaccatagtacagctatggatactgaaccaaacccgggaac

SEQ ID NO: 375942 - DNA, 90 bp, Homo sapiens
ggatgagtacgataccgaagcgggctgtgtgccccttctccacccagagcatcctgaggttagcattacacttctcccagtggagcccat

SEQ ID NO: 375943 - DNA, 100 bp, Homo sapiens
ttgttaccagagcatcttctcccatcagtcatttcttagtggatacagctgttggggcagaagagacgggaccagctgctggccacatttcctgctttat

SEQ ID NO: 375944 - DNA, 80 bp, Homo sapiens
gcgcggcagggggccgggggcccagcggttcaagctctacgttcgtgacatcaaacctcctgttgggccatttccgagaa

SEQ ID NO: 375945 - DNA, 82 bp, Homo sapiens
tcctgcgtgctacggccctgtgggcctgggagctgcctctgaggaacacgccgcaggtgctggagaatctggtaaaagcacc

SEQ ID NO: 375946 - DNA, 100 bp, Homo sapiens
tgcaatcacggcttactgcagccttgacctcctgggctcaagtgatcctcccacctcagcttccaatggagatcttcgtggatgatgagacgaagttgac

SEQ ID NO: 375947 - DNA, 76 bp, Homo sapiens
catcatttccagaaaggacatcacagtgagaaagatcagtctaaagaaaaggagaagaaagtgaaaaaaacaattc

SEQ ID NO: 375948 - DNA, 75 bp, Homo sapiens
catgtgaaatgtgtaaagatgctcttagaatgctcagcatgtggaagtggagagtattcctttgccagatatgcc

SEQ ID NO: 375949 - DNA, 98 bp, Homo sapiens
aagaagttcaccttcgtctgcatggctctgtcactcacggtgaatgaaaactttgccattgatttgatagcagagcagcccgtgagcgaggtggagac

SEQ ID NO: 375950 - DNA, 102 bp, Homo sapiens
ggtcagtccgccgctcaccccgcggccgcaccttcccgccttctcaggagaatggggtactaagagaaaagcacgaagctgtggatcatagttcccagcatg

SEQ ID NO: 375951 - DNA, 78 bp, Homo sapiens
tccttgctttcagaatttcacccaggttctgacagtacatggactggacctgcctggagcccagcccagagcatctcc

SEQ ID NO: 375952 - DNA, 50 bp, Homo sapiens
ggaccctgaggagagtcaggccacggctgtttcattgaggacattcttca

SEQ ID NO: 375953 - DNA, 49 bp, Homo sapiens
tcgcctcctggccatagtccgcgaacgtcaaggtcgtgggaaataaaag

SEQ ID NO: 375954 - DNA, 98 bp, Homo sapiens
cgtaatcaaaccctggttcaaactgcctggataatagccaaggttctggaggacaacaagctgcctggtgcaatttgttccttgacttgtggtggagc

SEQ ID NO: 375955 - DNA, 100 bp, Homo sapiens
aatgtgagtggaagccatgaggccaaaggcagttgtattggtgatgaaacttatcaggacatatttcgtgatttttcccaaatggcatccaataatccag

SEQ ID NO: 375956 - DNA, 75 bp, Homo sapiens
gaaggggcagtacaagcttacgtctctgctcttcagtacaatcctctgaagtgagtagtgaatatagtatggaca

SEQ ID NO: 375957 - DNA, 100 bp, Homo sapiens
ccatgacaaccaggcaatgctggatagataccgaattcttatcacaaaggataaggatgctaaattccgtctgattctaatagagagccggattcaccgt

SEQ ID NO: 375958 - DNA, 58 bp, Homo sapiens
ggagtccgccccgtgaggagaatgagttttgattcatcatggataatctgtcatcaga

SEQ ID NO: 375959 - DNA, 75 bp, Homo sapiens
gaggtactacagtttacagtctgactactggaaggtgtggttcccaacaaaggtcagtttcccttggctgtggga

SEQ ID NO: 375960 - DNA, 94 bp, Homo sapiens
cggcgatgtgccaccgaggctgaggatgatggtagattgccagctgtcgcctggttgggcccggaaatgggacgtcgcgctttctcagggagcg

SEQ ID NO: 375961 - DNA, 101 bp, Homo sapiens
gtcatgcagggtgtgagcagggctgagatgggcaccgcggatctggggccgtcctcagatggactagaggcttttaccagatttcttaaaactgaattcag

SEQ ID NO: 375962 - DNA, 74 bp, Homo sapiens
agggagcatagctgctacactgaagatgaagcaaggcccaatgacccaggcgtcctcctccgcctcctcctctc

SEQ ID NO: 375963 - DNA, 109 bp, Homo sapiens
taaaggcaaagaattaaacctggtgtttggacttcaacttagcatggctagaattctcttggtgctggacaggcatctttgtttgggaacaaccaacctaagattggag

SEQ ID NO: 375964 - DNA, 82 bp, Homo sapiens
tatttgaagtctgtgtcaaacatccatatcataagtggaattttggagatattcaaaggtgaccgggctggtccacaagtgg

SEQ ID NO: 375965 - DNA, 100 bp, Homo sapiens
cggaataccctagaggaacatccggagacttcactgcccaaacaggaagtctatgatgagtacaagaaattgcaagacctaacatggctgaaagagaaac

SEQ ID NO: 375966 - DNA, 100 bp, Homo sapiens
gcctgctcccatcctccctgaagaggatcgccgtgggcatgttctttgtcatgtgctcggcctttgctgcaggacatggatttgattgacatactttgga

SEQ ID NO: 375967 - DNA, 75 bp, Homo sapiens
catccgcctttgatcgtcttcctcttcagccatccagaacccagcgggtgccgcttctccacccgaggcttccac

SEQ ID NO: 375968 - DNA, 75 bp, Homo sapiens
aggttttcaggaaacttgcagcaaagccattcgggttggagtaattgttcaaaagaatgctgaaccgggagctga

SEQ ID NO: 375969 - DNA, 100 bp, Homo sapiens
cctgggtctcagccccgcgtacggcctttcacgagtcttcaagccttcagttcctgctcattttccacaaggccgcggcaggggagctgcaggaggacag

SEQ ID NO: 375970 - DNA, 141 bp, Homo sapiens
catcagagaagattgtcaaaaccagaagctgtgggatgaagtgctttcacatcttgtggaaggaccagtgagcagaagtggcctatatcgctccccgtcgatgccagagaacttgaacaggccaagactgaagcaggtgga

SEQ ID NO: 375971 - DNA, 75 bp, Homo sapiens
ccaagactgcgactctaaacggactcatgtactttgtcagacccaacatgagtgaagtttcctgcaagaaacggg

SEQ ID NO: 375972 - DNA, 126 bp, Homo sapiens
agcagagaactcggcgccgccaaacagcccagctcgcgcttcagcgtcccggcgccgtcgcgccactcctccgaaaacgtatgtttgtgggatactcttgtagcacctgccaatagtttagtccat

SEQ ID NO: 375973 - DNA, 75 bp, Homo sapiens
gtgacaagccagcaccagtccagaagcctccatccagttgtgcaacttgctttggtgtttgctgttttattgcca

SEQ ID NO: 375974 - DNA, 117 bp, Homo sapiens
cagaaagcagctccataggggaggagagccacgcaggatctcacagctgcagtctaatagtaacacagaggatgtacagttacccagcacgtgtacctcctcctcctcctattgctc

SEQ ID NO: 375975 - DNA, 75 bp, Homo sapiens
ggtccccaccatccagaactccatgaagcccttcaaggccctgccccgctccctgggaaagctgactaagctgac

SEQ ID NO: 375976 - DNA, 82 bp, Homo sapiens
cgtccctctacgcgttttggttcccggttggtgcttcctgttcgcagctgcggcaggaaatttgtgcacagagataacacag

SEQ ID NO: 375977 - DNA, 83 bp, Homo sapiens
aaacttttgcccttatcagtaacacctgaggctctgcattagctgctaatgtatgtaaaaagattactggacgtcttacaagt

SEQ ID NO: 375978 - DNA, 100 bp, Homo sapiens
gctcgccccgtgattgggctctcccgcgatctgcaccgggggaagcgcatggtttcaggctctgtataactatactcccaggaatgaagatgagctggag

SEQ ID NO: 375979 - DNA, 87 bp, Homo sapiens
atggtggcatgagaggcatgaagggattggtctatgaaacatcagttcttgatcctgatgagaccacggtgtgaacacatgaacaga

SEQ ID NO: 375980 - DNA, 80 bp, Homo sapiens
gtctggggctgttaccattgagtgaccagaaagggtccgtaaaagccctgggctcagccagagcagggcagaggatgacg

SEQ ID NO: 375981 - DNA, 100 bp, Homo sapiens
aacactgataagattgaatgccaagcagaaaattacctaaatgcactctttcgaaagaaaggtaaaaagatggcctatcagaaggtccatgcagatcaaa

SEQ ID NO: 375982 - DNA, 98 bp, Homo sapiens
gagacggatgagaatctgctgctgtgtgctcctactgattgtgcacctgtgcctgcgaaaggctgaccagaagctggtgatcatcaagcagattccag

SEQ ID NO: 375983 - DNA, 74 bp, Homo sapiens
attgccttattttttctcatggatgttcttcttcgagtatttgtagaaggcattagtgaccagaaggatcccaa

SEQ ID NO: 375984 - DNA, 75 bp, Homo sapiens
cgggcatgggcggcaactctttgatgtactactataatgggaaagcggcgtctgtagaggcttctggtgaaatcg

SEQ ID NO: 375985 - DNA, 101 bp, Homo sapiens
tacgcaaacttttcagagggagcttgcaagcctggctatgcttcagccttgatgacggccatcttcccccgtaacagcagttttccacagagtgcctccct

SEQ ID NO: 375986 - DNA, 97 bp, Homo sapiens
gtgagaagcccaactaaagccccacatttgcagctcattgaaggaaaggcatggaggagtgacggcaggaactttctgtgctctgacaacccttatg

SEQ ID NO: 375987 - DNA, 82 bp, Homo sapiens
cccccaacaccctctacgaaggcggctacttcaagtggggacgccctactacatgtcaccggagaggatccatgagaacggc

SEQ ID NO: 375988 - DNA, 90 bp, Homo sapiens
tgtgctggcagtgtgggacacctgcttggagacctgcgaccgcatcaagcagtccgccagcggaaccaagcggcgcgtgttcatcatcga

SEQ ID NO: 375989 - DNA, 82 bp, Homo sapiens
tgtcttcggtggactccttcggcagtccacccaccgccgccgcctcccagtgagggagactctgatgtggactcggagctgg

SEQ ID NO: 375990 - DNA, 49 bp, Homo sapiens
gaactatagcaacttggtatcactaggtgctggagaatctggtaaaagc

SEQ ID NO: 375991 - DNA, 100 bp, Homo sapiens
cgggagcgggagcagcagatcgaggagcacaggaggagttggcggggagccttgggcccctctggcctcagccggatttcccagccaaacgcagagagag

SEQ ID NO: 375992 - DNA, 82 bp, Homo sapiens
cgccggccacctggtccagctgcccgcaggggtggtttttctatatgagtggagaagacagctgttaccagggaggtcatac

SEQ ID NO: 375993 - DNA, 100 bp, Homo sapiens
gacgtcatcggggtgaccaagggcaaaggctacaaaggctcaagtgcgatgccatataagcggaatcccatgcgttcagaacgttgctgcagtcttgccc

SEQ ID NO: 375994 - DNA, 98 bp, Homo sapiens
gtcgacatgagtgatgtggaggaaaacaacttcgagggcagaactcggtgaaatacctggagtgctcagctctcacccagagaggcctgaaaaccgtg

SEQ ID NO: 375995 - DNA, 100 bp, Homo sapiens
tcctgtgtccggagtgtgaggagcctgtccccaaggaaaccatggaggagcactgcaagcttgagcaccagcaggtgaatattgaccacttcactaagga

SEQ ID NO: 375996 - DNA, 100 bp, Homo sapiens
ggctgcgtggggctcggccgcgcggactgaaggagactgaagggccgcctgggcagaatgtcacgatggacgagggcggcacgcccctgctccccgacag

SEQ ID NO: 375997 - DNA, 100 bp, Homo sapiens
ggagctgaaaggcgggaaggcttattccaagaatggagaagctgatgccatgagcttggatggagggtttgtctacatagcgggcaagtgtggtctggtg

SEQ ID NO: 375998 - DNA, 100 bp, Homo sapiens
ccaagagattcagtatcactcgctcccttgatgatcttgagattatgattccgatgcgatgagcagctcttatgagtcgtatgatgaagaggaggaggat

SEQ ID NO: 375999 - DNA, 75 bp, Homo sapiens
ggcattgcacagtccaggcgcacagtggccctcatcaagagtccggcagcgtcttctcttgagggagcaatttgg

SEQ ID NO: 376000 - DNA, 100 bp, Homo sapiens
catgatttaaacaagagatttccacagaaggtctgctaccgctgccacggccccccctgctgccccggctggggagggtggtccccctgcaccccctcca

SEQ ID NO: 376001 - DNA, 95 bp, Homo sapiens
tcagttggctacccccacccagactggatatggcgcaagaaggagaacgggatgcccatggatgctgacagacagcaccaagaagtaattgcaat

SEQ ID NO: 376002 - DNA, 96 bp, Homo sapiens
gaattgctgaattagaactgcagaggttcctctacagcaagaaaccagcctggacaccaagtctgtgtcagaaggccacctcaagaggaacatcgt

SEQ ID NO: 376003 - DNA, 75 bp, Homo sapiens
tccccgccagcgccccatcctgagccgtacgctacttcctgaagaataaggtcagccctgatttgtgcaatgagg

SEQ ID NO: 376004 - DNA, 75 bp, Homo sapiens
ctgcgccgcccgaggccgtcggccgccgtcagcgagggcgccgagcaacttcgcatcaacaacagcaacttgtga

SEQ ID NO: 376005 - DNA, 83 bp, Homo sapiens
gtgcagacatctacaaccttcgatctcctgacgagatgagctttctgatgttagccaaggcggatctaaagctaccactccag

SEQ ID NO: 376006 - DNA, 90 bp, Homo sapiens
gtaaacttcatggttcggctttttgtggtgattgtgatgtttgcctggtctatagttgtatgccaagtacatggaaaaccatagcattga

SEQ ID NO: 376007 - DNA, 50 bp, Homo sapiens
gacaaggacctggccccaacaaagcccttcagatatttcaacactcctct

SEQ ID NO: 376008 - DNA, 115 bp, Homo sapiens
acagaatgcagcagatatgcctgctaacatggataagcatgccctgaaaaagtatcgtcgagaagcctatcatcgctgcatatccccaccgtttgaatctcttttaccttgccaa

SEQ ID NO: 376009 - DNA, 75 bp, Homo sapiens
aactgcgaataaaattcgagccaagttaaagggttttgagtgatgaggtgaagaggaagcagtacgatgcctacg

SEQ ID NO: 376010 - DNA, 100 bp, Homo sapiens
attcttaccactcagaatggagagcacaatgcccttgaagatctggtgatgaggtttaatgagagcagttcagagccccagttgcagacgacttgtcctg

SEQ ID NO: 376011 - DNA, 83 bp, Homo sapiens
cgacggctctgcagttaacgggaccagctctgcggattgatattcactgatggactccaaagaatcattaactcctggtagag

SEQ ID NO: 376012 - DNA, 83 bp, Homo sapiens
tgccggctgtaaagtcatcacctcctgggatcagatgtgcattgaggcccagactctcacagtatggaggcaagctgataaac

SEQ ID NO: 376013 - DNA, 90 bp, Homo sapiens
gggcagcctgagtcccagtgatgtatctgatggtataattgccccaggatatgaagaagaagccttgacaatactttccaaaaagaaaaa

SEQ ID NO: 376014 - DNA, 75 bp, Homo sapiens
ggcggcggcgggtgttgtgagcgggaagctgcatatccccaccgtttgaatctcttttaccttgccaatgatgtc

SEQ ID NO: 376015 - DNA, 75 bp, Homo sapiens
gcctcctggcccgcaggccggacccccttctaggctcctacagaagaagggaaaaaagagctgctgttcctaagt

SEQ ID NO: 376016 - DNA, 100 bp, Homo sapiens
cggcggaggacgcgcccggcgcccctgagccggccgagcggcgacggaccgcgagatcttaactgttcaggatcttgttgatttttcccctgtttatcga

SEQ ID NO: 376017 - DNA, 101 bp, Homo sapiens
cccccacatttaccaggatctggagaatcatccatctgttcttaagtatgagaagattaaggagtcagaaataccatcagaggaggggtactgtgacttta

SEQ ID NO: 376018 - DNA, 82 bp, Homo sapiens
gtctcaatatctgtcttcggtggactccttcggcagtccacccaccgccgccgcctcccagaggagaaatgtctgaagtaag

SEQ ID NO: 376019 - DNA, 100 bp, Homo sapiens
ccgccatccccgcggcccgcggaaaggtccatctggttggtattgacatctttactgggaagaaatatgaagatatctgcccgtcaactcataatatgga

SEQ ID NO: 376020 - DNA, 82 bp, Homo sapiens
ttttaggcggtatcaaatggaaagtttttccaaatattcatctgtacaggtctgagcgggaaagttccgaagaataggagtg

SEQ ID NO: 376021 - DNA, 82 bp, Homo sapiens
cccatattgggtttctccagcatattccaagtggcggttgcaaactttgtggctctgtggaacatttaaagaaagattgccc

SEQ ID NO: 376022 - DNA, 80 bp, Homo sapiens
gtggtcgcggcgacctccggcggcgggaggcccggcctgggcaggaccaagaatcgccttcagccctgtctggtgcatcc

SEQ ID NO: 376023 - DNA, 75 bp, Homo sapiens
ttcaaggaggccttccagctgtttgaccgaacagtttctgaacttctggaacaaacaggacacattggagctgga

SEQ ID NO: 376024 - DNA, 75 bp, Homo sapiens
ggctgtctcggaacccgtggtcctccgcttcataatgatgctgaaacattgcagaaatgtcttattttatgctat

SEQ ID NO: 376025 - DNA, 100 bp, Homo sapiens
cgggagcctcgtggctgcgtcaccgccgcccccccagacaagatggacaccgcggaggaagtgaggaggacatgtaccgtgctgcagatgaaatagaaaa

SEQ ID NO: 376026 - DNA, 90 bp, Homo sapiens
gctttcacgaaggcaccgacgtcatcatgctgaccaccaatcagatccgtaaggacactcatgaggaccatgatacttccactgagaata

SEQ ID NO: 376027 - DNA, 100 bp, Homo sapiens
ccaacaactcagatatggcagaagtgaagtcaatgttccgggaagttcttccaaagcaaggcctgatcaaccccgtataaccaaagatgtaatttgtttt

SEQ ID NO: 376028 - DNA, 87 bp, Homo sapiens
gctgccctcaaggtcgtgcgtctgaagcctacaagaaagtttgcctgcaatggtactgtaattgagcatccggaatatggagaagta

SEQ ID NO: 376029 - DNA, 75 bp, Homo sapiens
aaagtcatcacctcctgggatcagatgtgcattgagacaccctgtagaccttgaatctgcagaaagcagctccga

SEQ ID NO: 376030 - DNA, 96 bp, Homo sapiens
catattctgtctgtccacgatagtgccaggcctatgttggaggactaccgaccagactcccggaaatcatgttggtaggatcccagtctttttcgc

SEQ ID NO: 376031 - DNA, 75 bp, Homo sapiens
aaaaaagaggatttctctgaagcaacgctgaaattcaccaaaggtgctggagccacagtaacgaggagtccttca

SEQ ID NO: 376032 - DNA, 85 bp, Homo sapiens
ctgctcggcttccagctcaatcctgccggttgcgccttcttcctggacatgaccaactgctggtgccgacaagaaagccgaggct

SEQ ID NO: 376033 - DNA, 100 bp, Homo sapiens
caaaatatattgaaacttcggagcttgcttagatgagtacgaagatgatgaagcagggcagaaagagcggaaacgagaagatgcaattacacaacagaac

SEQ ID NO: 376034 - DNA, 100 bp, Homo sapiens
ctccggagagccgcccgccgaggatgcgacgcaccgcaggtgtcatggagaaactccagctgggcccagagattctgcagcgggaaaatccaaggcttat

SEQ ID NO: 376035 - DNA, 100 bp, Homo sapiens
caattgttgataccaatggaatcacggtttttggaacaaggattttggatgaagaagtttttgaggtggtcaccatgggccttttccgcactattgcttt

SEQ ID NO: 376036 - DNA, 82 bp, Homo sapiens
tgctgcagcccgcgcacagctgctcccttcgccttcgccctttccacctcgcggcagttcgctgttctccatagtggtgttc

SEQ ID NO: 376037 - DNA, 100 bp, Homo sapiens
cggcggaagcggagaccatgttccgagcggcggctccggggcagctccggcgggcgacacctagctcccctgtttgacaaccctaagttggataaggagc

SEQ ID NO: 376038 - DNA, 73 bp, Homo sapiens
gggggttccatctcccaacttgtccatactttctaagaagatcactaataatattgtttattttcttccaaga

SEQ ID NO: 376039 - DNA, 100 bp, Homo sapiens
acagtggcaataatattgaactgggcacagcatgcggaaaatactacagagtgtgcacactggctatcattgatccagcaggttgtccagagcgttgttc

SEQ ID NO: 376040 - DNA, 113 bp, Homo sapiens
cagggacagtggcggatgtgcactgctacaggactctactatggaggtgctactcgtgagcagtagtcgccatccagacagatggattgtccctggaggaggcatggagcccg

SEQ ID NO: 376041 - DNA, 89 bp, Homo sapiens
cgggtgacttcttctatgtcttccccctctatgcagccaaagaagatgcagatggacgactataatgtaactgcaaactccaagctggt

SEQ ID NO: 376042 - DNA, 82 bp, Homo sapiens
ggacttggcctccatggtgtcagagcaaggagaagctgttgatgactcctcctctgagagtggcagcggcaatggctcctcc

SEQ ID NO: 376043 - DNA, 100 bp, Homo sapiens
cacagccagagccatgcaagcgcagttctcttcggacaggtgccacttcggataaaccctttggactcctaactccaatcaggtgtctgctttgttgagg

SEQ ID NO: 376044 - DNA, 124 bp, Homo sapiens
gtcctcacctttctcacgatcccattttatttgcaaaagtggtgcgcataggcaagtcatttatgaaggagattttaccaaatgttgcaagaactctggagttcttatggtagtaaaatgccgg

SEQ ID NO: 376045 - DNA, 100 bp, Homo sapiens
cgatcctccaggcatgccccgctacgagctggctttaatcctgaaagccatgcagcggagcatcgcaacatgccccaagcagatgccatggtgctggtgg

SEQ ID NO: 376046 - DNA, 82 bp, Homo sapiens
tgaaccatccacacatcataaagctttaccagcccgttttacggagaagacttttactgtgaaattcctcggagctttcgtc

SEQ ID NO: 376047 - DNA, 90 bp, Homo sapiens
ggcaggtctgagctcgggctccccgagcagtttgagtccccttgcccgctccttcaggtgagaagccctaccactgcaactgggacggct

SEQ ID NO: 376048 - DNA, 75 bp, Homo sapiens
catctcgggtaacaaccgagcccctcctcgcagcctttccccagacatggccaacaagggtccttcctatggcat

SEQ ID NO: 376049 - DNA, 75 bp, Homo sapiens
gccagtatcaacaccagtaacagtgtgtggagatatccatggacagatctaattatcatggacctgcgacagttt

SEQ ID NO: 376050 - DNA, 83 bp, Homo sapiens
atacccgtgacctggggatcgctacggaccttaaaatacccgcaacagccccttcgtcccaaatgaaggatttgggggcagag

SEQ ID NO: 376051 - DNA, 76 bp, Homo sapiens
gtttggtgaaacctaccccagagcctcccgcggcccacagagcacagacgttggacctctcgaacaaccagctgag

SEQ ID NO: 376052 - DNA, 101 bp, Homo sapiens
tgaagatgattacacggcattaatctcccaaaatattctagaaggggaaaagctacttcaaggtactccaaagattcaggtttactcacgtcatccagcag

SEQ ID NO: 376053 - DNA, 100 bp, Homo sapiens
atttttgcaacgcgccaaatctaaactgatttgagttctgtgaacctgcatttgttgttggtaattgcctccagatagcttctgacagtcatcagtatga

SEQ ID NO: 376054 - DNA, 100 bp, Homo sapiens
atctaaaatacgaaggtttctggctggatggatagagatctgatggtaggaaagctggaaagagacctgtacactcaacagaaagtggagatactaacag

SEQ ID NO: 376055 - DNA, 107 bp, Homo sapiens
cccaatcccccactctttccgccctaatggaggtctccagtttcgatcatggaagggaagtggttgctgtgtatgttactggtgcttggaactgctattgttgaggc

SEQ ID NO: 376056 - DNA, 96 bp, Homo sapiens
ccagcatccactaagctggtgttgtcctatcgacccagctggatcgtgtaaccagtctatgggaagtgaggatctagtgaaaagccatttgatgta

SEQ ID NO: 376057 - DNA, 76 bp, Homo sapiens
gatgtggggactgctcacgttcatcatggtgcctggctgccaggcaggcatgaatgctttacagttgcagaacctg

SEQ ID NO: 376058 - DNA, 90 bp, Homo sapiens
gattgaatctggtgttatcaacttaaaagatgccacctctaaggatgggaagcacaaaatgcaagaggaaaatgttaaactaaaaaagcc

SEQ ID NO: 376059 - DNA, 100 bp, Homo sapiens
aatgacaagctcatgtacaaaattacaagtggaaatccacaaggattcttttcaatacatcctaaaacagaaagctgatattgcaattgctccattaact

SEQ ID NO: 376060 - DNA, 107 bp, Homo sapiens
cgcagggcctgcagcgggagctggacggcgagcgcgagcggcgcgagaaagtggaagttaaacgagctgagcctcgggacagcaagagccaagcgccgggacagcca

SEQ ID NO: 376061 - DNA, 96 bp, Homo sapiens
ctccattgacattgaaggatttcagctaccagttacttttacgtgtgatgattcatgatgttgctatcaaaagttgagaaattgtcagaagaaatc

SEQ ID NO: 376062 - DNA, 100 bp, Homo sapiens
tcttcagctcactgaccatctgcctacctcccgttaatggaaccgcgactcacagtgcctggagccctgcaaggaatcaggggacctgaggaaacaccag

SEQ ID NO: 376063 - DNA, 100 bp, Homo sapiens
aattacatcagcgcctgggagctccagcggaaggccctgtttgtgctcttcgtcctggcctacatccacatcgtcttctcccgctcgcccatcaactgcc

SEQ ID NO: 376064 - DNA, 90 bp, Homo sapiens
cagctgcatggaagcccagacaccaggaaaccctcagattggaggctggtgtcccggagcagtgcaaggaccgtataatagacgctggcc

SEQ ID NO: 376065 - DNA, 98 bp, Homo sapiens
tgatccatgtggaaaccattcttctgtgtatagtgtaagaggttctgtccggaagcagattctaaaaccatgttgcagtgcttgaagcaaaataaaaa

SEQ ID NO: 376066 - DNA, 98 bp, Homo sapiens
ggagacacggtggaaacgcttatgggtgataaaagaaaatgtggctgaagttacccgaagttcagcttgcagtgtaattcagaagagttaagaccaga

SEQ ID NO: 376067 - DNA, 100 bp, Homo sapiens
tgaactagggtcagaagaagatggatttgatgagattactgcaatgacctgaaaatatcggataataacactgaatttcttttaaatttcaacgagttta

SEQ ID NO: 376068 - DNA, 82 bp, Homo sapiens
gtcctccttgcctgccgtgagcgatgcccgtagcgacctgctttcagccatccgtcaagacctggtgatgactggaaaaaga

SEQ ID NO: 376069 - DNA, 75 bp, Homo sapiens
cctcattgaactgaaggtgaagatccaagattctaaattccccaaaggctcgcctgcctgttcctgaaacgggga

SEQ ID NO: 376070 - DNA, 100 bp, Homo sapiens
atcagaacagtgctagtgaaagaatgttattctgtcttcacaaatcgaaggcaaattatgcgcacagccatgaagtataacctgggattggacctgagaa

SEQ ID NO: 376071 - DNA, 82 bp, Homo sapiens
tggaggtggaggtggaggcgaaagccaacggcgaggactgcctcaaccaggtttggtgcacctcgatttggaggaagtaggg

SEQ ID NO: 376072 - DNA, 96 bp, Homo sapiens
gtcagggtcacatactttaaagccaaagcagcaggagtttggaagcccttttcctccaaatcctgggaaagttctgtggctcctgatggatctgag

SEQ ID NO: 376073 - DNA, 74 bp, Homo sapiens
tgctcctctatgctggacatcaaatttccaggatgatgatgctgaagctatccttgctgcagacttcgaaattg

SEQ ID NO: 376074 - DNA, 98 bp, Homo sapiens
gattgctgcaggtcagcagtctccactggaaaaaaagatcttggactatgatgatggatatggcactgcttatgatgaacagagttatgattcctatg

SEQ ID NO: 376075 - DNA, 74 bp, Homo sapiens
agcgacaacagcctggaccccgcggatgtgatgctggtacaacccagagtagaatttattctgtctttcattga

SEQ ID NO: 376076 - DNA, 75 bp, Homo sapiens
ctaaatctcatcttctttatcttgtgtacctttgtccagaactttgtcagcgagcaagaacaatgccaggaggtc

SEQ ID NO: 376077 - DNA, 74 bp, Homo sapiens
gaaccagatatcttgaaaagctgccagaaagctccctagatctttagcttctactcccactgctcctaccactc

SEQ ID NO: 376078 - DNA, 51 bp, Homo sapiens
catggctgacatgctttataatttgtttatggctacaaatgatttgatgac

SEQ ID NO: 376079 - DNA, 100 bp, Homo sapiens
ggcccagccaggcgtggaggaagaggcattgaggactttccttacctgtttttccagctcacccactgccagcagagggccagggtgacacggaagcatg

SEQ ID NO: 376080 - DNA, 50 bp, Homo sapiens
cacagtgggctttactgtgttgaggacacattcagctaacgtattttagc

SEQ ID NO: 376081 - DNA, 100 bp, Homo sapiens
aggaggctggaagaggaagatgcctagcacagaccttctgatgttgctcctcagagaaattttgaaattgccttcaagatgtttgatttgaatggagatg

SEQ ID NO: 376082 - DNA, 82 bp, Homo sapiens
gatccggagggaggaagctgggacacccgggagtcaggaaatggatgatcggctgaatgtaacagaggaactaacgtccaac

SEQ ID NO: 376083 - DNA, 75 bp, Homo sapiens
tgtggctctggatagcaccttatggacaggtggagattctggacgcaaagacaagggagaagctgtgtttcttgg

SEQ ID NO: 376084 - DNA, 100 bp, Homo sapiens
ctgaaggcagacgggataatgtggttggccaaggcctgttggtccatccagagtgggaaaccatctgccgtgtgactggtgggatgaaggtaaaggcaga

SEQ ID NO: 376085 - DNA, 83 bp, Homo sapiens
gacgagatctagaatcaactgagagagatgcttaaaaatcaccagttactttaatgactcttcagagaagtaagaataatgaa

SEQ ID NO: 376086 - DNA, 82 bp, Homo sapiens
ttcatttaccgtcccattcgacagcgggtctactcactcttactggaggactgtcaagacaggggcaagtgtccgagtggtg

SEQ ID NO: 376087 - DNA, 50 bp, Homo sapiens
attccaagtaactcttatttggattcaagttcgaaatatggcaactttga

SEQ ID NO: 376088 - DNA, 100 bp, Homo sapiens
tgtcagataatgaggacagtgggacctagattagaccatgaacgagccaaggaaatccccatttggaagtacagaaagaaagactcctgttaaaaagctg

SEQ ID NO: 376089 - DNA, 75 bp, Homo sapiens
tgaagagacatgagatggtagctaaacatttagataacaacgaacttgatgcaagtgataggtttgccaaggtca

SEQ ID NO: 376090 - DNA, 82 bp, Homo sapiens
ctgcggctgttgccatgtccgcaccgggacgatcatcctggggacctggtacatggttctccaaatgtcaactgtcaaggag

SEQ ID NO: 376091 - DNA, 74 bp, Homo sapiens
ccgtgctcatctcccgactcaagcaggtacgaaaggactatggataacatgacttcatcagcacagataattca

SEQ ID NO: 376092 - DNA, 98 bp, Homo sapiens
gacttttgaattatctgctttggaagattatccatgacactgttctgccctgctctgctctaacaacatttttattttaccaagaaaatggtttgcac

SEQ ID NO: 376093 - DNA, 74 bp, Homo sapiens
cctcctgtcggggaggcaaggtggttttggaccagacaggcgtgtctaattggtagctggcagtgttgtgatgg

SEQ ID NO: 376094 - DNA, 100 bp, Homo sapiens
acacccattcaagcggcaggacgcacttgtcttagcagttctcgctgaccgcgctagctgattcgcttcaagctcagcttatcaatatgggtgttattcc

SEQ ID NO: 376095 - DNA, 90 bp, Homo sapiens
gaactggaggtttgtgcaatttgagaccggtcggcactgtgcagagatcagagtactaagagacaggtgtggatgaggtcaccattgtca

SEQ ID NO: 376096 - DNA, 101 bp, Homo sapiens
aaggcgattggatgcggcggcggcggcggatcccggagagccccggagtgagcggagtagcgagtcggcaacccggagtggaaggactaaaagtggtggag

SEQ ID NO: 376097 - DNA, 75 bp, Homo sapiens
ccgcctcctgccaaggaaacagtaatatgtacaaggatatccacaacactgttcgcagctacaagctgaggtaca

SEQ ID NO: 376098 - DNA, 90 bp, Homo sapiens
caggacgcggccctggcggtgctagaagaccggttccagccgaacatgacggtttgggccgacacgcggaaggccgggtggagcccatcc

SEQ ID NO: 376099 - DNA, 52 bp, Homo sapiens
gtttctaggaaaggccggacaccaggcttacgccgagtgtaccatttacaac

SEQ ID NO: 376100 - DNA, 101 bp, Homo sapiens
cttgaattcatcaatcaggacaacaatacattaaaggctgataataacacagttattaatggactgcttggaaatatagtgattcgcctttgccagtctca

SEQ ID NO: 376101 - DNA, 112 bp, Homo sapiens
gagcacgttcttccaagaaaccaacattcccaacagccaccaccaccaccagatggtgtttcccattaaacactaccaggacaaaatcaggccttacatccagctgccatcg

SEQ ID NO: 376102 - DNA, 50 bp, Homo sapiens
agccagcagctcgctcagtacaagaggtttctagagaggaaggatctccc

SEQ ID NO: 376103 - DNA, 90 bp, Homo sapiens
ctgacagatgccagcgtagctgaatccagtaccaaaaacgtcaacaacagttttacggtcttcaacggggcctcttccacctcctggtgc

SEQ ID NO: 376104 - DNA, 82 bp, Homo sapiens
ctctgcaccaggcccggctgctggccctcctggtcatcccgcctgccatcacccccgggtctgtgcagacttttgcagacaa

SEQ ID NO: 376105 - DNA, 100 bp, Homo sapiens
atataccttctactgtccaagcacagtctcagccccatggggtatatccaccctcaagtgtggtgggatgtgtgtgggctgaaattccgagctgcggttg

SEQ ID NO: 376106 - DNA, 90 bp, Homo sapiens
tgcaggatgcccacgtcatcctgaacgacatcaccgaggagtgtaggcccccatcgtccctcatagtctcattctgttaccaggctggaa

SEQ ID NO: 376107 - DNA, 75 bp, Homo sapiens
ctcacggagctgggcgacgagctgaccctgggagacatcgacggatctcactggcatcgaatctatggatcagtg

SEQ ID NO: 376108 - DNA, 98 bp, Homo sapiens
ctactaggatcacgcggcatgtattgaggcattattcagtggaagagagggaagaccaaattgatagactggactttattcgaaaccagatgaacctt

SEQ ID NO: 376109 - DNA, 75 bp, Homo sapiens
ggggaccagacggtctcagacaatgagctccaggcccgagcgggaagaagttccgcagcaagccgcagctggcgc

SEQ ID NO: 376110 - DNA, 74 bp, Homo sapiens
gaaaaatctgaggttatcaatgacgaggtcggatcatgctaaaaggagataatattactctgctacaaagtgtc

SEQ ID NO: 376111 - DNA, 80 bp, Homo sapiens
gcgggaggtgttcgagaacgaccccgagacgggagtgcctgcagcaccccggcggggccaccccagtctgcgtgtacacg

SEQ ID NO: 376112 - DNA, 74 bp, Homo sapiens
cccgccttcattgagcccaacgtgcgcttctggatcaccgagcgccaaacatagggcctgattacattccaaca

SEQ ID NO: 376113 - DNA, 75 bp, Homo sapiens
gaggagcgcgcggagccggccatgggcaagtcaggctttcttagaaatggcttctgaggaagctgccgttactat

SEQ ID NO: 376114 - DNA, 100 bp, Homo sapiens
cttcaaagcatggggctaactccagaatcccccattggaatccagacgctctgcagtgtcccatcgtcttatgcggatggcggggaaaggcctccattcg

SEQ ID NO: 376115 - DNA, 101 bp, Homo sapiens
ctggatactattgatgtaagcaacctcaacagacagtttttgtttcaaaagaaacatgttggaagatcaaaggcacaggaaacaattgaagatgttgaaga

SEQ ID NO: 376116 - DNA, 97 bp, Homo sapiens
ggggcttcgcgtgttccaagaactgcctgtgcgccctcaacctgctttacaccgtactgtccaagaagctggaacattattatccagcaagaatgtt

SEQ ID NO: 376117 - DNA, 90 bp, Homo sapiens
gcggtgctcagcacggggtgtcatcctgtgaagggacacagagaacaggattactacagcatcccatttcccacacccactactccgctg

SEQ ID NO: 376118 - DNA, 90 bp, Homo sapiens
aaatgattcttttcaaaatgtgcagccagatgagcccaaggttcttaatgaatgtctaagccctgccaaggtaaccctgctggggtcagt

SEQ ID NO: 376119 - DNA, 100 bp, Homo sapiens
gagacactgccaagcagccttagccctagtgtagagaaacttgaggagaggctggagttctggatggagaaatacgataaggacacagaaatgaaacaga

SEQ ID NO: 376120 - DNA, 87 bp, Homo sapiens
gaaaatgtccactggacctctgtccaggttgagcgcaccatcacatctaagccatcagcaagtttgttggttttaatctccaaaata

SEQ ID NO: 376121 - DNA, 75 bp, Homo sapiens
ggcttattcatgtatgttgctctggttgatatggagccaaaaacctgtatatcatctccgtgaaggggatcaagg

SEQ ID NO: 376122 - DNA, 90 bp, Homo sapiens
ggcggccccgcgcagcccccggccgcagcgcaggcagcccagcaggccagctgcgggccgtccagcggctgtgccacttctacagcgccg

SEQ ID NO: 376123 - DNA, 111 bp, Homo sapiens
cgttgctgccgggattttggaggccggggccgcgctgagggcgcccagctggttatcaatactctggctgaccatcatcatcgtgggactgactttggtggaagtccttgg

SEQ ID NO: 376124 - DNA, 100 bp, Homo sapiens
gtggtcaacgggcgggtgctggagctgttccgggccgcgcagctgccgaacgacgtggtcctacagcgtggggtagagcagcggctgccatgctcttctg

SEQ ID NO: 376125 - DNA, 74 bp, Homo sapiens
caaggatggagatcctaggaaagtgacaagaggttttccgctttggggtttggagcccggatccctcccaagta

SEQ ID NO: 376126 - DNA, 83 bp, Homo sapiens
cgccgtcccgtccgacagccaggcccgggagaatgcgcgtcccgggacgactggcgctgtgcgcgctccatgcacgagttttc

SEQ ID NO: 376127 - DNA, 100 bp, Homo sapiens
agctttgcaacagaattacagagtatgatattaccacccatagtgcgaggaggagccatcgacagatactggcccaccgccgacgggcgcctggttgaat

SEQ ID NO: 376128 - DNA, 88 bp, Homo sapiens
ttaatctgatgcagaattaccgctgttgggttgattgcactgccaacactaacacctgtaataaatatggagtcagtggatatccaac

SEQ ID NO: 376129 - DNA, 100 bp, Homo sapiens
gggaaaccccgtaaagtggttggttgcagttgtgtagtagttaaggatatggctttagttgcccctgaagctccttcagaacaagccagaagagtttttc

SEQ ID NO: 376130 - DNA, 97 bp, Homo sapiens
ttaaaataattgggcagaagagaagcagtgaaggagtgcagaggcatcacctgaaaggttatcaactggcaaacatctcttcacattccaccacaag

SEQ ID NO: 376131 - DNA, 100 bp, Homo sapiens
gggcctgcgagggttgaagattgtgaagcaatagcctaaggctgtacagcagtcatgacgctggcatctgcttggcttctggggagccctcgggaaactt

SEQ ID NO: 376132 - DNA, 100 bp, Homo sapiens
tgctgatgctgaagctgtgcaccgaggtccgtgtggccaacgagctcaacgccaggcgccgctcctttacagaacgtgctggccaaagcgctctatgaca

SEQ ID NO: 376133 - DNA, 100 bp, Homo sapiens
cgcgcggcggcggcgctcggcgatggtaggcgtccctggagcggccgccttccagcgatgacatcattgatgatgttgacagctttcttgctgcagcaga

SEQ ID NO: 376134 - DNA, 74 bp, Homo sapiens
accaagtccagccccagcatggcaaggcgagcaccgtcaggagcgcagagatcggccctactagatgcagagac

SEQ ID NO: 376135 - DNA, 100 bp, Homo sapiens
gagaggattatcttcttagtgtaaggaaatccatagtcaatgatgaatctggtcgagattctgaagtcagtgccagggagcacatgagttccagcagctc

SEQ ID NO: 376136 - DNA, 100 bp, Homo sapiens
gcaggcccacggtagcgcagccgctctgagattacataccggttacggcacctccttcgtgcaaggtgtgatgcatccccagtgaccaacaacaccatcc

SEQ ID NO: 376137 - DNA, 75 bp, Homo sapiens
tttggaaagcagtttttaagacaatggtagtcgctcttctaaaacttttaaaccaaagaagaacattccagaggg

SEQ ID NO: 376138 - DNA, 101 bp, Homo sapiens
ttttgctgcgttgaaagccttgaagtacttgtttagattcatcatccaatcccgagtgctctacttgagggatagctgggagtatggccaccctgctccac

SEQ ID NO: 376139 - DNA, 51 bp, Homo sapiens
cgacgcgctcaaccagatcgcgcgggagaaaggagaacctgactgctgtgc

SEQ ID NO: 376140 - DNA, 75 bp, Homo sapiens
cgcgggaggtgttcgagaacgaccccgagacgatcaggcctttgtgacactaaccacaaacgatgcctacgccaa

SEQ ID NO: 376141 - DNA, 100 bp, Homo sapiens
gtggaaaaagtaccatcatttgaaacagttactgtaaaatggggaaaggagaaatttgaaggtgtagaattgaatacagatgaacctccaatggtattca

SEQ ID NO: 376142 - DNA, 78 bp, Homo sapiens
tgctgctgccccggacccgggcggacgagcacgaacacacggtaaaataccatgaagattttgaaaaaacaaagggga

SEQ ID NO: 376143 - DNA, 100 bp, Homo sapiens
tacaaattcagtgccttctgcagtttccccagagctcctcaagaataacggaagggagggtgcaactggaaactgacttgaagattgagaaggaatggag

SEQ ID NO: 376144 - DNA, 82 bp, Homo sapiens
tgctgccgggttgcgctccgtgcacctcttgcggatgcagacagacatgctgaactatctggaagtccactgaaaagcaaaa

SEQ ID NO: 376145 - DNA, 50 bp, Homo sapiens
taaccagcggagctgacacagccaacaataagagctaactgccatcaaga

SEQ ID NO: 376146 - DNA, 100 bp, Homo sapiens
tgcgaacacagtagtggaagatgtaaagcaatatttcgagcagtttggcaagtggaatgcagtagccctctgggcctgggatattgtggttgataactgt

SEQ ID NO: 376147 - DNA, 82 bp, Homo sapiens
tccacccaccgccgccgcctcccagactctgtgcacatcgaagatgccgaggctgtggagcagctgcgagaagctctgcacg

SEQ ID NO: 376148 - DNA, 101 bp, Homo sapiens
gctgaatgtgttactccattgctgaggagtggagatacaactcgtcaacgaatcaaattcagtgatgacagagtatgcaagagtcaccttctcaactgttg

SEQ ID NO: 376149 - DNA, 74 bp, Homo sapiens
gaggagatctttcagcacctgatggcctatcaccaggttgcagatatcaagaaagtcaacaacttcatcagaga

SEQ ID NO: 376150 - DNA, 98 bp, Homo sapiens
gatgatcgagaggatctggtgtaccaggcgaagctggccgagcaggctgagcgatacgacgaaagtctgcaccaaatgtgggatcgaggcctcccctg

SEQ ID NO: 376151 - DNA, 75 bp, Homo sapiens
ctttgctcctccctgcaactaactccattcttaattgacatatgtagagtgtgtcggtcagaaggaacacctgag

SEQ ID NO: 376152 - DNA, 82 bp, Homo sapiens
gccgcctcgggaccggctgtatgattaggccacaatcttcaatgagtaaacatattcctgtcagttcaccgggacctggagg

SEQ ID NO: 376153 - DNA, 113 bp, Homo sapiens
gaagaagcatcgttaaagtctctcttcaccctgccgtcatgtctaagtcagagcagtctctggtcccagcccaccccatggcccctcccagtcccagcaccaccagcagtaat

SEQ ID NO: 376154 - DNA, 100 bp, Homo sapiens
tccttaaggccaacagagtttggggagcattacgagcagacaagatccaaagtgaggtggagactgttccagaagcaggacgacatgaagagctttactg

SEQ ID NO: 376155 - DNA, 100 bp, Homo sapiens
gagaaagtcctacaacagtttggcgtgcaacatggggcttgagaaagggtgcggccgggaacttcctgtgccccgctggcgccttgtccttcaacgcctt

SEQ ID NO: 376156 - DNA, 82 bp, Homo sapiens
gtggaagcagcagtccaggaatgcagtcagtctgttgatgaaactataaagacctgagctgtcttccttggcactgcctatg

SEQ ID NO: 376157 - DNA, 100 bp, Homo sapiens
aagaaattccacccagtatttcaagagtcacttctttacttggtgcaggaaggcagtctttgctacgtacagcaaaagggtcagtatagaccttctgatt

SEQ ID NO: 376158 - DNA, 100 bp, Homo sapiens
gtgtcgccgacgccaaaggggacagcgagtcggaggaggacgaggacttggaaggctctgtgtgctccgggatggagcaggtgtgcagagggtgagaacc

SEQ ID NO: 376159 - DNA, 51 bp, Homo sapiens
tttacaacttgataaatcagcttcatgagggatgaggagaatttctgtgcc

SEQ ID NO: 376160 - DNA, 75 bp, Homo sapiens
gccgagcggtgactccccgccgctcccgggggccgtgacggactttccttatcccagttgattgtgcagaataca

SEQ ID NO: 376161 - DNA, 98 bp, Homo sapiens
caggctctcagggggcatagacttcaaccagcctttggtcatcaccaggggatggtatgaagaagcattagaacagtttgaagaaatcaaggagaaag

SEQ ID NO: 376162 - DNA, 72 bp, Homo sapiens
cgagtggccaggcttctggggctgactcaactggtattgggagagttgctgctacatctttaggaaatttga

SEQ ID NO: 376163 - DNA, 75 bp, Homo sapiens
gttgcatcatggattaacccaaaagatgatctcagagacatgttctgtaaggtgtttggagaagagggattgacc

SEQ ID NO: 376164 - DNA, 85 bp, Homo sapiens
ccgacatgctggccactgaccttgcctattacctggtccgcaaaggggtctcctactccctccctccagtactgcgagaactgtg

SEQ ID NO: 376165 - DNA, 98 bp, Homo sapiens
tggaagcactcatccagcacttagtacctaatgtggattactatccagatgaaaatgtttataggaggccttagctgggacactacaaagaaagatct

SEQ ID NO: 376166 - DNA, 100 bp, Homo sapiens
acccaggaaggagctgtgtatttcatcaagtgactgctggctgctggcagccattgcctccctcaccttgaatgaagaaatcctggctcgagtcgtcccc

SEQ ID NO: 376167 - DNA, 100 bp, Homo sapiens
cccccgccaactctgacctggccaattctgacgccctcaaggtcgccaaggaggtggacccccaggccatccgggtgacctgcataggttcctgcggggt

SEQ ID NO: 376168 - DNA, 95 bp, Homo sapiens
aaaacttgctgcggttgctcaagagcccgtgggcaaagaggagaaggagctggagcttagtgacttggacgacttcgacccgctggaagcagagc

SEQ ID NO: 376169 - DNA, 100 bp, Homo sapiens
catcagtgctgccaagaaaattgctgaggcaggatccaggatggacaagcttggccgcaccattgcagaccattatgaagtgaaggctcctgttccttct

SEQ ID NO: 376170 - DNA, 100 bp, Homo sapiens
ggccgcgtccgcctcaaggcgcattacgggggatgagcagcaccagcagtaagagggctccgaccacggcaacccagaggctgaagcaggactaccttcg

SEQ ID NO: 376171 - DNA, 100 bp, Homo sapiens
acgcgctcctggctcggcccgacagcctcgcttggccgccagttcttctgcagccgaaggcgttgaaatggatgcagtcagaactgaatgttgaagaagt

SEQ ID NO: 376172 - DNA, 83 bp, Homo sapiens
cctgggcttcccttactacctgaagatcaactactcctgcgaggaaaaggaagagcaagatctggatcaacagggaaatgagg

SEQ ID NO: 376173 - DNA, 100 bp, Homo sapiens
agggaggccctccgcgttgtctggcggaggaggggagtggcaggtgatcctcacagtctcgattccttccttgggcttttcatctgccacggcaagcgcc

SEQ ID NO: 376174 - DNA, 78 bp, Homo sapiens
atgggtcttgctctttacaaagaggtcagatgtcatgtaatccttcctttggtggcatcggaaagggacatttaatga

SEQ ID NO: 376175 - DNA, 88 bp, Homo sapiens
gacaacatgtcccaacattacatcccaggatgtgtttggccaaatgggagagtggttacaacacacgagctacaaactacaatgctgg

SEQ ID NO: 376176 - DNA, 75 bp, Homo sapiens
ctgcccatgctgggccggcgccctggggccccggagagatatggccgcgtggaaagtgtcaaaattcttcccaag

SEQ ID NO: 376177 - DNA, 90 bp, Homo sapiens
ctggcagtcaggacatattcgatgccatcgtgatggcggatgagagatcctggctctgcagagagaacagcccagaaaagaaagttcccc

SEQ ID NO: 376178 - DNA, 75 bp, Homo sapiens
agaaagtggacaaagagaggagtcagagtaatcaagtcagaggattatatgacttttatctgcctagagaagaac

SEQ ID NO: 376179 - DNA, 100 bp, Homo sapiens
ccaaagtgaaaagactgctgtcagatagcacttgccttccccatattattcaggccactgcagaacaaattagacttgcacagatgatttcggaccataa

SEQ ID NO: 376180 - DNA, 100 bp, Homo sapiens
tttgatgataggcagcttaggctagatgaaccatgacagtttgctctcaaggtggcagaacagaactatggaaaatctggttgagctgcacaacaaggcc

SEQ ID NO: 376181 - DNA, 83 bp, Homo sapiens
cgaagcctcccgggtggcttacagacgctgccagcatcgccgccgccagtctctgctttctatccgtcaagatgataaagtcg

SEQ ID NO: 376182 - DNA, 98 bp, Homo sapiens
cccgcgaccactggcacattcttgctgacagatatgaattgagaattcgttatttgccaaaaggatttctaaaccagtttactgaagataagccaact

SEQ ID NO: 376183 - DNA, 87 bp, Homo sapiens
agccaagagactgcttttgagtgacatttatttagcagctagtaacttcacttatttcagggagaatgacatcttcctgggctggga

SEQ ID NO: 376184 - DNA, 50 bp, Homo sapiens
atttccatgtcaacatagtcctgctctttcgacgtgtagcagcagctttg

SEQ ID NO: 376185 - DNA, 74 bp, Homo sapiens
gctgcactgccaccctgggcaacttcgacaacagcagttctgtagagagtttaaatatgaaggaatggcaggac

SEQ ID NO: 376186 - DNA, 98 bp, Homo sapiens
tacagcctcctggccccggcgcaggctgcccgtactgcccgtggcatgagggagccggaagagctgatgcccggacccagatgatgtggtaccagttg

SEQ ID NO: 376187 - DNA, 83 bp, Homo sapiens
cgcagccttgggcctcgcgccggctatggccgtgccctggggctgagccctcagacggagtctcactgtgttgcccaggctgg

SEQ ID NO: 376188 - DNA, 100 bp, Homo sapiens
cagctcacatatttcagatgatccacaagaacattgggaaggacctgccaaaatcctgccttgctaaagtccaggtgacttaagagattaaaattaattt

SEQ ID NO: 376189 - DNA, 98 bp, Homo sapiens
ttttttcagtcagccatgagcataccaaagtggaacaggtgaagttcgatgccacatccatgcatgtcaagcctcaggtggctgcccagcagaagatg

SEQ ID NO: 376190 - DNA, 90 bp, Homo sapiens
ggcaggactcgggccggagcgtggccggacccccacccgccgaggggcccagggaggacgcggaaagaccacagcaagattctttcattc

SEQ ID NO: 376191 - DNA, 100 bp, Homo sapiens
cagtgcccgctttgttcagctgcagcatggagagatagataaacggctcaccatctgctacctggatatgctgatgaccagtgaggagcgccggaagcag

SEQ ID NO: 376192 - DNA, 127 bp, Homo sapiens
tgcaataccaacatgtctgtacctactgatggtgctgtaaccacctcacagattccagcttcggaacaagagaccctgacgctaatgaactgaagacgatccttcgagagctaaagtacagaattgg

SEQ ID NO: 376193 - DNA, 83 bp, Homo sapiens
gaagatgtgcacctagggggcggctaccccgtgggatcttagcaaagcaatgtctcaagatggtgcttctcagttccaagaag

SEQ ID NO: 376194 - DNA, 98 bp, Homo sapiens
gactacacagaggcgtataatcccaaaatagagggaatcctatggctgtggtcagcaaacaagtaaatatggaactggccaagatcaagcaaaaatgc

SEQ ID NO: 376195 - DNA, 76 bp, Homo sapiens
aaatacgtgtctccccaggatgtgacgaccatgcaaacctgacttaattcagtgcacaaatgagatgaatgtgaac

SEQ ID NO: 376196 - DNA, 75 bp, Homo sapiens
ccctactcatgatccggaccctgagactcccctaaaggccagaaaggtacacggctgccccacaccccctgctat

SEQ ID NO: 376197 - DNA, 75 bp, Homo sapiens
gaaccccttcatgcccaaatcccggaaactccagcgtgtctccagccgtggagagaacattgaaagtattctcta

SEQ ID NO: 376198 - DNA, 74 bp, Homo sapiens
ttagtccattgactatgcagcctaatgtctcttcaagaaaatgaggaggaggagattgggaacctagagcttgc

SEQ ID NO: 376199 - DNA, 74 bp, Homo sapiens
gagtcaggactatgtcaatggcaccgatcaggaagaaattcgaaccgcatgctacaagtgaaaactgatgagaa

SEQ ID NO: 376200 - DNA, 80 bp, Homo sapiens
gtcatcgcctgtcggggctaggatatgatggcaaaatgatgcttcaacacccaggccaggtctctgcctcggaagtgagt

SEQ ID NO: 376201 - DNA, 98 bp, Homo sapiens
cattctgggtgacacgctgggggtcggcaccttcggcaaagtgaaggcactgtatcaagaactgcctcctgagataaaggagcgatcccctcctttaa

SEQ ID NO: 376202 - DNA, 75 bp, Homo sapiens
gcgtgcaggagggtcgtggtctggctgtggcggaggagcataagaagcatctggttttgtagcctggatgtgtct

SEQ ID NO: 376203 - DNA, 89 bp, Homo sapiens
tggctgctggtcaaggcttcagtgtggagtaattgacactttcgaggatgaatgctatcaagtaagacaagtgtttgcccagaaacttc

SEQ ID NO: 376204 - DNA, 75 bp, Homo sapiens
tcgtcgtcttcatcgtcgcggttctgctgccggaaagaccacagcaagattctttcattcgtctcctcctagcct

SEQ ID NO: 376205 - DNA, 100 bp, Homo sapiens
agaagccgagttcaacatcctcctggccaccgactcctacaagtgagagatttttcttgaggctgaatagaaacgggcttcccaaagcccctgataaacc

SEQ ID NO: 376206 - DNA, 98 bp, Homo sapiens
gtgaagccagggtggccgccccagcagacagtgctacagagccaactcctgacaggttaagatcaatctacaaggagatatagtagatcgtggaagca

SEQ ID NO: 376207 - DNA, 75 bp, Homo sapiens
gtggagtggacttcctagcagagctccagagtttcctattttggagaagcagaactggttgattcatcttcatta

SEQ ID NO: 376208 - DNA, 75 bp, Homo sapiens
gcttttgtaacttttgatgatcatgatacagttgataaaattgttgaacaatttgaaactagaccttttggaagc

SEQ ID NO: 376209 - DNA, 71 bp, Homo sapiens
cccagcgggctttccttctgatggcctctcagtaccaacaaccccacgagaccatgctcgacagctgacca

SEQ ID NO: 376210 - DNA, 100 bp, Homo sapiens
tggcctcccaccattccaagcggagaggccgggcgtcttctgagagtcagccaagaccgaggataggtgtggccattggcgaccagatcctggacctcag

SEQ ID NO: 376211 - DNA, 96 bp, Homo sapiens
catccgatcacctcatcttcaatatgtgcctcattgaccgctgggactacatgacagcagttgtttttggctttcacccccaaccagtgaccaaag

SEQ ID NO: 376212 - DNA, 99 bp, Homo sapiens
ctcgggcgggacccgatcctccgctcctgaggcccccacaatgaagcagtcggacgcgtctccccaagaaagcaggatacagacgtccctcaccagtgc

SEQ ID NO: 376213 - DNA, 100 bp, Homo sapiens
tcatggtatatttgcagccagtactctatatgaacaatccgtctggatcacggatgtaggaagtggaaagtacataacatttatcctggaccccttccag

SEQ ID NO: 376214 - DNA, 82 bp, Homo sapiens
cacctaaagtcgcacctgcggacgcacacaggttacgggcaggacttgagtggcttcggacagggcttctcagaccccagcc

SEQ ID NO: 376215 - DNA, 83 bp, Homo sapiens
cccccgtggccaccgcctccagcttgccaccaaagacctgcgactttgctcagggaaattcaactactgaggaggttacggca

SEQ ID NO: 376216 - DNA, 74 bp, Homo sapiens
ttaacgagtattccaaatttgatggcaagatggagctaacacccattatggagattaaccacttttcatcaggt

SEQ ID NO: 376217 - DNA, 74 bp, Homo sapiens
cacggttcaatgatgccctcacagtcgtggaaaggttgactatagtcaatggggccaatggagccaagtgtatg

SEQ ID NO: 376218 - DNA, 100 bp, Homo sapiens
cgctagccaagctgtcctgcctgggtacagaaccctggtatttctatttaattaatggatttctgaatttcaatgtagcctttgctttggctctcctagt

SEQ ID NO: 376219 - DNA, 100 bp, Homo sapiens
tcagctagaaccatgcagtcaagtatgcgccaggggaacgaccatggcactcagtaccgctcggccatctacccgacctctgccaagcaaatggaggcag

SEQ ID NO: 376220 - DNA, 60 bp, Homo sapiens
gtggatccagaggaccagagtcagcttggttctacagccattgggatccagacatcagag

SEQ ID NO: 376221 - DNA, 101 bp, Homo sapiens
ctcccactgattctacattacggaaagaacatgaggttcccttggaaatcattcaagaggaagatggaaggggctgtttagaagagcttaaaagctacagg

SEQ ID NO: 376222 - DNA, 82 bp, Homo sapiens
tgaagagcgacaagccgctggcagccgcggatctcaccgccgctcagggtttcaccaaaactcatgccaatgcagcagatcg

SEQ ID NO: 376223 - DNA, 75 bp, Homo sapiens
gctcagtgatggcgaatatatctcagatgttgaagaaggttcgagaacttgtcttggacaattgcaaatcaaatg

SEQ ID NO: 376224 - DNA, 100 bp, Homo sapiens
cgcagtcactgcagcactggtggaacttgagcctaccgtatgtgaacgggagctgtgtgtgtttgcttttcaaaccctgggagtaatgaatgaagctgct

SEQ ID NO: 376225 - DNA, 100 bp, Homo sapiens
aagatcaactactcctgcgaggaaaagcattccttctgcagcacttgatttattggaccacatgctgacactagatcctagtaagcggtgcacagctgaa

SEQ ID NO: 376226 - DNA, 98 bp, Homo sapiens
aaatttttggatgatgatggatccatttctcctattgaggagtcaactatcaccttttgccatgatagcatttctttcattggacagttccttacaag

SEQ ID NO: 376227 - DNA, 83 bp, Homo sapiens
acccgcctggctagccggcgagttgagtggcgagatgtacagttacccagcacgtgtacctcctcctcctcctattgctcggg

SEQ ID NO: 376228 - DNA, 50 bp, Homo sapiens
atgaaggtccaggcgctggccaggaagaaggtagataatgactataatgc

SEQ ID NO: 376229 - DNA, 101 bp, Homo sapiens
cgccaaccagactgttctagataaattctctgctgtgcctgatcccatcccgcagtggaacaacaatgcctgccttcacatagaagaagtcagagatgcca

SEQ ID NO: 376230 - DNA, 82 bp, Homo sapiens
aaaactgttcggacttccccgttagaactcgcgtttccacttcagagatctggtgaggggaagtggcttcgaaacattgact

SEQ ID NO: 376231 - DNA, 97 bp, Homo sapiens
ggccccggagctgttgctggacccctggcaggtttccaggagactgacaaggcgtggcatgggggatgtctggcgctggcagagctgggcaggagag

SEQ ID NO: 376232 - DNA, 75 bp, Homo sapiens
gcggaagcacttggaactcctttataagtgtcagctgtgaggaaggtgcaaggacactctctccacaatcacggg

SEQ ID NO: 376233 - DNA, 100 bp, Homo sapiens
cttgaacagactagaaattgcaccacagatatatgggttgtcgtccttggtggaaggaaccatgaactggcatctccccctcttcctcttggcctctgtg

SEQ ID NO: 376234 - DNA, 75 bp, Homo sapiens
gctacagcttcagaagaccgaagcgttcgtatctggaagatccctcatccacctacatcaggcaactggagagca

SEQ ID NO: 376235 - DNA, 98 bp, Homo sapiens
aaacaaaaactgtttgaaaagagtacaggacttcctcacaaaggaatgggtcgggaagttgagaatcttatattagaaaatacacaactgttggaaac

SEQ ID NO: 376236 - DNA, 101 bp, Homo sapiens
cgcggccaccgccccgggacccgcgccgctgccctccggctccgcgggcggcccacggcgagggaacagattctccgtgtgaaggctgaagaagataaaat

SEQ ID NO: 376237 - DNA, 75 bp, Homo sapiens
gtatattagacttctacttccagcttatctggatgtcctctcaatgcacaagttatcaaaaagggcaaggtttct

SEQ ID NO: 376238 - DNA, 131 bp, Homo sapiens
ggcgagctcctccaggacttccagaagcagggcgtcgccctggcctttgtgggcctgcagactccccatccccaggatgtcaacctcagtccctcaaggccatacctggacccaacgggtgaagaaagacg

SEQ ID NO: 376239 - DNA, 100 bp, Homo sapiens
ggctcagaccgtgcagaatgttacattgtcgctcactctgcccatcacgtgccacatttgcttggggaagggctttgttcgcgggggtcacagctctcat

SEQ ID NO: 376240 - DNA, 101 bp, Homo sapiens
actcgactcggagggtttctgtgagagacaaattgcttgttaaaggtactccacatcagcattctcaagactggagaagttaggcctcagacatcccaagc

SEQ ID NO: 376241 - DNA, 75 bp, Homo sapiens
ccgcgatacccaaggcagacattcaacacctttacatttagcagctttggagtttaacccttctgccaatccaga

SEQ ID NO: 376242 - DNA, 46 bp, Homo sapiens
tcattgattctgaaaaggacatgcactgccagtgaaagatgtagaa

SEQ ID NO: 376243 - DNA, 83 bp, Homo sapiens
tttggaaccttcgggcaaacaggattccacagtgtcctctggaaaatggctctggattactgccacagcaagggaatcatgca

SEQ ID NO: 376244 - DNA, 100 bp, Homo sapiens
ccatggccgagtcacctagccgggacgtcgtgggatccggaacagatggagggagcgaggaaccaccggatcgaagacagtcaagtgtagactctcgcca

SEQ ID NO: 376245 - DNA, 83 bp, Homo sapiens
gagaggattgtgtctgcttggtgtggagccatgaaggccttcctggatgctctgcagaaccaggctgaggccagcagcaagat

SEQ ID NO: 376246 - DNA, 100 bp, Homo sapiens
tggacctctctggctgcacccagaggcgtagaggctccggtgttttttgtgccaattgcctgaccacaaagacctctctctggcgaaagaatgcaaatgg

SEQ ID NO: 376247 - DNA, 142 bp, Homo sapiens
gcacagttcaaatctctggttgacttgacagcagtggacgtcccaactcggcaaaaccgttttgaggtgggcccatctggggcagggaagagcacaattttgcgcctgctgtttcgcttctacgacatcagctctggctgca

SEQ ID NO: 376248 - DNA, 109 bp, Homo sapiens
cgagcggagccggcggagcctctggaatcacccgggtcgctgttcctgagggcggcgactggcggcgcgatggacctgaccgggctcctgctggacgaagaaggcacct

SEQ ID NO: 376249 - DNA, 82 bp, Homo sapiens
cgcgagcacagagcctcgcctttgccgatccgccgcccgtccacacccgccgccaggtgcccgtggttgacacgagctgtgt

SEQ ID NO: 376250 - DNA, 100 bp, Homo sapiens
gaaggagcggaagaatggcagtgctcaaactcaccgaccagatttgaggcttaagcaacttcttccggggaagagtgccagtgcagccactgttacaatt

SEQ ID NO: 376251 - DNA, 100 bp, Homo sapiens
ccgagttgggcagtatgtggtcgacctgacttcttttgagcagttggcactacccgtcttgaggaatgatgaagtaggtgttccaggtagcaattcagct

SEQ ID NO: 376252 - DNA, 101 bp, Homo sapiens
tacactggaacagaatcaacccagaacggatagctccctcctggaaaaggttgcccgaagctcagcagagagtcggaggctgctttttaaacctgatgcca

SEQ ID NO: 376253 - DNA, 82 bp, Homo sapiens
ggaaccctggtcaccgtctcctcaggcagagtcacggtggcagcattgagagttggacacccgggtccttgaagtgatctct

SEQ ID NO: 376254 - DNA, 100 bp, Homo sapiens
tgcacgttctgtgaagcttttggatcgtatccacaatcctgcttgcagatcagttttgtaatgccattggagtattgcagcaatgtggtcctcctgcctc

SEQ ID NO: 376255 - DNA, 100 bp, Homo sapiens
tggggcctctggcggtggcggcctggggcggcgcgacggctggtgcgcagtttgaagaaaacaggtctgaaacaaggtcttacccccagctgcttctgaa

SEQ ID NO: 376256 - DNA, 100 bp, Homo sapiens
agttctgtcactcacttacacagtattgggaaatctgtgaaaggtaaaagcagcgtttaatgaagaaactcattcttacgaaattagaacgacttcacgt

SEQ ID NO: 376257 - DNA, 100 bp, Homo sapiens
aagaatttccaaatgaaaatcaagtagtgtttgccagagttgattgtgatcagcactgcagaatccagagaccacatttgaagtatatgttgaagtggcc

SEQ ID NO: 376258 - DNA, 100 bp, Homo sapiens
cctggggcctggcctccctctgcagcaaccagtgagacaaagatgggcaaggctctgacaatccgggccagaatattgaaggatgtttgttccaagatct

SEQ ID NO: 376259 - DNA, 100 bp, Homo sapiens
gatcaagtggaagagattttaagtgtggcatacaagaaaggtttcattgtttgcggaacttttcaacgaaatgcttcaaagagattttggtgtccgtata

SEQ ID NO: 376260 - DNA, 75 bp, Homo sapiens
acaaggccaaccatggaaatggataaatggtactgaatggacaagacagcagtccttgatggagatgcagagtcg

SEQ ID NO: 376261 - DNA, 75 bp, Homo sapiens
ctctacaggggcctcccgcgccccccgggacccccacgccgccgccagtttggtgccctggttgtcagatgttgg

SEQ ID NO: 376262 - DNA, 75 bp, Homo sapiens
aacgcatcaatcagctcatccgtcagctgaactagacccagagagtgggaccgtggccgtgagcgccgtagtcgg

SEQ ID NO: 376263 - DNA, 100 bp, Homo sapiens
ggcgaaaggagctggtgcctgtgcaagttgttgaggatgttgagaaagaactggagatgcagatcagcatgaggcaggagatggaattggctatgaagat

SEQ ID NO: 376264 - DNA, 75 bp, Homo sapiens
tacacctgccgctgccacctgggccgctcggggttgcggtgtgaggaaggggcctgagttccaggaatttttgct

SEQ ID NO: 376265 - DNA, 101 bp, Homo sapiens
gggaagaatgtggttgtgactgccgactgtattgtgacccagaagcgtgtgcctgcagccaggctgggattaaatgccagtgaacttatgccatgtttacc

SEQ ID NO: 376266 - DNA, 82 bp, Homo sapiens
ttcagactcttggagccagaagctacatgacccctaaacggatgaccgagtgggagacagcagcaccagcggtggcagagac

SEQ ID NO: 376267 - DNA, 78 bp, Homo sapiens
tataataccttgggatgtggacacaatttgtaagccaaatgggcggactgttgaagtggctgagggtgaagctgttcg

SEQ ID NO: 376268 - DNA, 100 bp, Homo sapiens
gtaaccacatttggaaattatttgagaacttcttggtggatatggcaagggcactgtgctaagttctttgcacgtgttactccatttaacactttcaaca

SEQ ID NO: 376269 - DNA, 75 bp, Homo sapiens
cctatctccaagaatatcaaacagagactaaggtgtcagtatgttcttcaagctgctctgctcctgggcccaagc

SEQ ID NO: 376270 - DNA, 50 bp, Homo sapiens
cgggggagccccgggagccgcacggagtctttgttgctggctatgaaagc

SEQ ID NO: 376271 - DNA, 75 bp, Homo sapiens
caggaacctgggcgagcagcggcgggggcccgagggatcctggccatgaggttggatgcctcaccttactgaaag

SEQ ID NO: 376272 - DNA, 100 bp, Homo sapiens
cggccgaaccccgcgcccgcaggacgccccagccagggcctgctttcttccccgggcgatgtgcagagatctttgccaggggtcaaagcgtcgggaagct

SEQ ID NO: 376273 - DNA, 90 bp, Homo sapiens
cctcactgaccccagagtggcagaaaggctgatgcagcaggattacggggcgctgaaagacatcgtgatcaacgcaaacccggcctcccc

SEQ ID NO: 376274 - DNA, 100 bp, Homo sapiens
aagagatcagtttaggaaaaacccatctccgaatattgtgtgtaaaattctggaacaacgattagaacaaggaatggtattcacagaatatgaaagaatt

SEQ ID NO: 376275 - DNA, 100 bp, Homo sapiens
ccgcggagatctctctcatctcgctcggctgcgggaaatcgggctgaagcgactgagtccgcgatggaggcagcaggtatattgtgatgggccacatcta

SEQ ID NO: 376276 - DNA, 75 bp, Homo sapiens
gggagctggctgaagatggctactctggagttgaggatctggaaatagtatattcctatttacatggtatggaag

SEQ ID NO: 376277 - DNA, 83 bp, Homo sapiens
tatgccattaagaacatccatggagtcaggttttaaaatcaaagatgggaaaatcggagaaaattgcccttccccatggccag

SEQ ID NO: 376278 - DNA, 100 bp, Homo sapiens
agccgctgttttgccggaggagcccctcaggccgataatagccaaggttctggaggacaacaagctgcctggtgcaatttgttccttgacttgtggtgga

SEQ ID NO: 376279 - DNA, 100 bp, Homo sapiens
ttctgtacttctcgagcttctcagtcagtcctgcctcatcccagccatgtcatcttatctacgaaatgattcagggtgtgctgatctgcaaaccctggac

SEQ ID NO: 376280 - DNA, 58 bp, Homo sapiens
ttcgtacccacagtgcttcatgagaggaataagacgagttggaagaagacctgatcaa

SEQ ID NO: 376281 - DNA, 80 bp, Homo sapiens
cacgccccgaccttccatcgtagtggacatcctcatcatggatgatgacgacgtccccagctggcctcccaccaagctgt

SEQ ID NO: 376282 - DNA, 75 bp, Homo sapiens
ttgcgctccgtagtggactccgcgggccttcggcaggtatgctggtatcctcctgggcatcacaaatacatttgc

SEQ ID NO: 376283 - DNA, 98 bp, Homo sapiens
aggcctacctggcaggcctggcagggcagtaccacttggagcggtacccggacagttacgagtccatgtgccggatcacctcaacagtcacgtcagac

SEQ ID NO: 376284 - DNA, 118 bp, Homo sapiens
gaaagagcagcagatgcaagggactcagatagacagacaaagatggaaggtgcagaaataaatcagagtctactggcttatgccgagattttgctgtcctggaggaccacaccctggc

SEQ ID NO: 376285 - DNA, 100 bp, Homo sapiens
gaggagctggtggtggaagtgcggggctccaatggcgctttctacaagctgacatgggctttgcccgattatttaattcacctttgaagcctttagcaga

SEQ ID NO: 376286 - DNA, 76 bp, Homo sapiens
cggcctgggtcttgcaggctcggctggggcccgcaggtttctgggtgtctctggggagcccctgggccagattttc

SEQ ID NO: 376287 - DNA, 90 bp, Homo sapiens
gccaaattgctcaactaagaccaagtcctcgctggactgctcagggtgccagacctcatcgatgcaagaagccagtgtctgcctcaggga

SEQ ID NO: 376288 - DNA, 100 bp, Homo sapiens
ccgaacctgcctggctagccggcgacttgagtgacgagcataatcaccagcaacacccgggacaataatacgggggccacctacccccacctgaacttca

SEQ ID NO: 376289 - DNA, 74 bp, Homo sapiens
aaaaaaaccttcaggcggcccatggaacctgtctccagagaagattttccacgtcattgtggccccttgttatg

SEQ ID NO: 376290 - DNA, 75 bp, Homo sapiens
taggtctttcgtggtcagtaaattccgggaaattcaacaggagctttccaggttatggaaacaaaggacatgctt

SEQ ID NO: 376291 - DNA, 98 bp, Homo sapiens
ccacgtcgggatagtagtcaagatggataaaaagtcctttgaaatggtgctggatgaaattagaaaggaccccactgatgactccaggcttcccaggg

SEQ ID NO: 376292 - DNA, 98 bp, Homo sapiens
catcattggcctgctcctcggctcctcgcccgacttcaacagccagtttggcctcgtggacatccctgtggagaaacatatgaggattttgataccag

SEQ ID NO: 376293 - DNA, 88 bp, Homo sapiens
ccccagatccatttacactttacagtgattttacaacgagatgctgctctccatagggatgctcatgctgtcagccacacaagtctac

SEQ ID NO: 376294 - DNA, 90 bp, Homo sapiens
cagaaacaaaatgtcaacaaattgatgggaactccttgcctttgccgattggaagcattaacaatttcatcctttctacgtgactgtaca

SEQ ID NO: 376295 - DNA, 74 bp, Homo sapiens
gaatgaaacactcatcgcatgagcactacaaacaccactggtttcccgaaaagccgtccaagggctccggctac

SEQ ID NO: 376296 - DNA, 82 bp, Homo sapiens
cagcggcccagaagccacagctgctgcggcacatggaacagcatgtctccttcaaggtcagcccaaggccaaccccactgtc

SEQ ID NO: 376297 - DNA, 100 bp, Homo sapiens
gccttagtgtgtccacaaagggactcctgaaactgactgagagccagtggatttgccagcagtctgtatggaacctcaaagtctttgtgacaatggaaac

SEQ ID NO: 376298 - DNA, 96 bp, Homo sapiens
ccacagctccagggaaggcactcaaaagtggggggcaggaaaggctcatgcacaattagttcgagaagttgatgtggagaaggtgtctgcttttga

SEQ ID NO: 376299 - DNA, 100 bp, Homo sapiens
gcggccacccacagccccccagggaccgtctccgccctccaggaaaccaaggggctgaggaagctgccctcgaaaccctccagaagacatctgtcctgca

SEQ ID NO: 376300 - DNA, 100 bp, Homo sapiens
ggagagtttaaacagccaaaacagttcattcatattcagcgattctggactctacttataatatccctaactgctggattctcctgttgcagcttttctt

SEQ ID NO: 376301 - DNA, 101 bp, Homo sapiens
agccgaattttaagtcatcgttctaggataggcaccttggaagttgttttcaaccatatccagcctttgccgaatacatcctatctgccacacatccagcg

SEQ ID NO: 376302 - DNA, 100 bp, Homo sapiens
gccggaaggggcaagacgggttcagttcgtcatggggctgtttggaaagacccaggagaagccgcccaaagaactggaggcaggtggaagtcatcataaa

SEQ ID NO: 376303 - DNA, 82 bp, Homo sapiens
tgggcctcccagaggacccttgcttgggccccagaaatgaagagagagcaggagattcggatgggtcagatggctatgggag

SEQ ID NO: 376304 - DNA, 98 bp, Homo sapiens
ctgctgatgctcatggtccccatggcatgggggcctcagggcagcctgcctggagtgcaactgcagatagaagacctgactcgtaaactgcgcacagg

SEQ ID NO: 376305 - DNA, 83 bp, Homo sapiens
cttgaatgtgctaagagaaatctgaacacagcttaaatcaaaagtctatgaagaagttgcctatgaagaaagggcctgtgaag

SEQ ID NO: 376306 - DNA, 100 bp, Homo sapiens
acgagtgccaggtgccgcgagcgccgagttccgcgcattggaaagaagcgaccgcggcggctggtctgccatcatggatgttctcgcagaagcaaatggc

SEQ ID NO: 376307 - DNA, 100 bp, Homo sapiens
tcagcaacctgacaattctgtcgtgtcccggtgcaaagttccccatcaagtggacggcccccgaggcagccctgtacgggaggttcacaatcaagtctga

SEQ ID NO: 376308 - DNA, 100 bp, Homo sapiens
gatgaaggcttgaggctacatacagtgaatgtgagacaactgggtgctaaaatgatgtattttctggacaagtcaaggcaggagaaagcaattgctatag

SEQ ID NO: 376309 - DNA, 74 bp, Homo sapiens
ccgggccgcacccgccgagccgtgctaactcaggtgagatggagccgctatagtcctgaattcaaggatccctt

SEQ ID NO: 376310 - DNA, 124 bp, Homo sapiens
attggtgtatgaagccctagagtatgcaaaaagagcactagaaaaaaatgaatcaagttttgcatctcataagatgacatcatggattcatcccttacccgccggggacagatctgctggtatc

SEQ ID NO: 376311 - DNA, 83 bp, Homo sapiens
cgatgccggaaccgacccgacgccggagccgtcggctccgtccttaccgttgctctccagagagcgcctgctcgctgtgcccc

SEQ ID NO: 376312 - DNA, 82 bp, Homo sapiens
tggtgatgcaagaagtttctaggaaaggccggacaccagggagcatttcctgaagacgtagtcatgcagcacgtcagcagct

SEQ ID NO: 376313 - DNA, 82 bp, Homo sapiens
gtgaagctcaagttgctactcgggacgctgcacctcccgcgccgcacggtggacgagattgtagaaggcatgaaacaaaaaa

SEQ ID NO: 376314 - DNA, 90 bp, Homo sapiens
caacaagaccctgccctctaccacctgtatctggagtccatctttcaccatcttctcctgagattgtactggaccgtgaccactcttctt

SEQ ID NO: 376315 - DNA, 82 bp, Homo sapiens
gttgaactctcagtggtcctacctggggatattatcaaatctactactgttcatggcagctgagaaagtggaactccagaga

SEQ ID NO: 376316 - DNA, 86 bp, Homo sapiens
gtacgccaaggggggcaagggttcggccgtgccctccgacagccaggcccgcgagaacgtctgaccaaacacaccaagttcgtgcg

SEQ ID NO: 376317 - DNA, 90 bp, Homo sapiens
ggagaaactaacaagaggaacacggtagatctagcaatggtggcttgctatccgggaaatggaacaggttatgttcgccacgtggacaac

SEQ ID NO: 376318 - DNA, 75 bp, Homo sapiens
ataaaatcaagttgctgaaagctgcctttctgcaatactgcaggaagcatagatgacctgcctacggtcctaaag

SEQ ID NO: 376319 - DNA, 100 bp, Homo sapiens
gggcctttgtccgtgttcggtgaccgcagcactggggaaacgatccgctcccaaaacgcccttagagatttgtttgattccatggataaaacttcttcca

SEQ ID NO: 376320 - DNA, 90 bp, Homo sapiens
gattgactatggaaaagttgccaaattgacatttctcttgggaagttgtgcatctgacaggaatatagtactgtacgatatgaggcaagc

SEQ ID NO: 376321 - DNA, 80 bp, Homo sapiens
gatatcttcggggacctgaagaagatgaacaagcgccaggatgaatattctatctttcctcagacatactccatagatat

SEQ ID NO: 376322 - DNA, 100 bp, Homo sapiens
tatcatcaaaatcaccaaccaaaagattcacctttggatttcatcgcttaggttgcgagttataaggactcagcatcatgtagaagcacttgtggagcat

SEQ ID NO: 376323 - DNA, 140 bp, Homo sapiens
agacgatctgcacttcgcattttggcattgacatttaattttagggtcctttatatagaagggagagtagatacaaactggactctcaggacaaaacgacaccagccaaaccagcagcccctcagcatccagcaacataa

SEQ ID NO: 376324 - DNA, 75 bp, Homo sapiens
caatgtcaagaaagaaaactcctccttgtacctagttgctgatatgtgttcaagatgagtgggatgggagaaaat

SEQ ID NO: 376325 - DNA, 103 bp, Homo sapiens
tgcttgaagacagagatttattcgtaatgcgactcaaagctgcacggcagtctgtttatgaggcagactgccagattcacttacagccccagctaattccacc

SEQ ID NO: 376326 - DNA, 96 bp, Homo sapiens
tctcaaagaggaccctgcttactgactggacgccgggcatggcagtgccacgggacattgcagccgcctacctgctccagggaagcttctatggcc

SEQ ID NO: 376327 - DNA, 101 bp, Homo sapiens
tatcaggaggaagccttttcaactggatagtgtcaattattccctgaatatcctatacacggctagtgaaaactttagtggctgacactcctctaactgcg

SEQ ID NO: 376328 - DNA, 74 bp, Homo sapiens
gccccaagcccgggcgccaccgctgccacctccgcgaggtttggtgcacctcgatttggaggaagtagggcagg

SEQ ID NO: 376329 - DNA, 75 bp, Homo sapiens
tccgtggagagcgactcagggacaaaatgatgccttcaattaagttgcagagttctgatggagagatatttgaag

SEQ ID NO: 376330 - DNA, 100 bp, Homo sapiens
tttccctccagctctgtctatcctaccaagcttctccaaacaggctggtgtacagggagcaacaccggagctggtgcacgctggggtttgtgcagagcat

SEQ ID NO: 376331 - DNA, 100 bp, Homo sapiens
tgaagaaacccagcttgatatgttggacatgatccacatcgcggacaccaaggtcgccaggcgttatggggatttcttcatccgtcagatccacaaattt

SEQ ID NO: 376332 - DNA, 75 bp, Homo sapiens
tggcttcagctgcgacggggaaggtggtcctgccgtcctacgaggaagccctgtctttgccatcgaagaccccag

SEQ ID NO: 376333 - DNA, 100 bp, Homo sapiens
ctacctttgtgaatatgactatgtgaagggctgtgcctggctgctcctgagaaaactggaagatggtgtgccatgtcagatcacgaggccacgaagtgca

SEQ ID NO: 376334 - DNA, 100 bp, Homo sapiens
ttgaggatgagatggagagtgatgagaatgaggacctcatcaacaggactctctttagaggccccaaccgtggggaaaggacaagccccaggcatcgagg

SEQ ID NO: 376335 - DNA, 97 bp, Homo sapiens
caatggagtcacatcagcattttctgttgactgtaaaggtgctggtaagatttcttctgagtttgccagatccggcccggtgcctgggttccaggag

SEQ ID NO: 376336 - DNA, 101 bp, Homo sapiens
atgtggtcaacttcggggccgggggggcccagaagacacctgctttgagtttggtgtttttcctgccatcctgagtttcccacttgattacccgttaagtc

SEQ ID NO: 376337 - DNA, 100 bp, Homo sapiens
agaatagacctgaagacaaaaatccagaagtacaagcagtctgtgttgttaataacagtactggtagtggaagggattgccgtggcccaaaaaacccaag

SEQ ID NO: 376338 - DNA, 88 bp, Homo sapiens
gggatgagggactgtggcggcgcggcccgcgcgcagccggccgactgaggctgatgtgaatccaaaggcctatccccttgccgatgcc

SEQ ID NO: 376339 - DNA, 75 bp, Homo sapiens
cccagtcccacttcaaacattcgtctcggaaaccccgcctcttacagtcacgagacccaaacctttattgttcaa

SEQ ID NO: 376340 - DNA, 100 bp, Homo sapiens
cgagagcgtgaccgagagcgcgaatatcgtcatcgttagaagacagtgacaataccctcccctcccttgggctggacccctctctacagctaggagccaa

SEQ ID NO: 376341 - DNA, 89 bp, Homo sapiens
ataatagtggatccttgaatgttgaagatgtccttaccagctttgacaatacaggaaatgtttgtataattgaaatcctcaaaggaatg

SEQ ID NO: 376342 - DNA, 100 bp, Homo sapiens
tgaacactcaagtgaagcaaaagccttccatgattacgtttggtaccatgtatgtagcagccgtggaaaagggtgttataacacaagactcaaggaagat

SEQ ID NO: 376343 - DNA, 75 bp, Homo sapiens
tgcagctgctgtcagcatggcccaggctcctgctgacccgggcagagaaggtgctggagaatctggtaaaagcac

SEQ ID NO: 376344 - DNA, 83 bp, Homo sapiens
gacatgagttattacctatttacaagaaagtgaaaaggtttctgaatatccagcagtgattgtggagccagttccaagtgcca

SEQ ID NO: 376345 - DNA, 100 bp, Homo sapiens
cggtgccggcctagcgtcctggaattacttcaatcaagtagatgggaaattgctgtgctggctgtgcacactttcatacaaacgggtccttcagaagacc

SEQ ID NO: 376346 - DNA, 100 bp, Homo sapiens
gacaacgacttgctccaggcggccactgccatggactcgctgacggatttggacttggagcatctgctcagcggctgataaaggaagcaggaagcgctat

SEQ ID NO: 376347 - DNA, 50 bp, Homo sapiens
cgggcatgcgaagccgtccctccccggagaagtcattcagaattcaaaag

SEQ ID NO: 376348 - DNA, 75 bp, Homo sapiens
aagaaagggcgcccaactactgccggaagcaaaataaaggttcatacgttttatgaagctgtggggtacatgatt

SEQ ID NO: 376349 - DNA, 88 bp, Homo sapiens
gggagctggctgaagatggctactctggagttgaggtctctgcatggattcccccagccctatggacccccacatggcggagcagacg

SEQ ID NO: 376350 - DNA, 101 bp, Homo sapiens
gtccccagaacgcagatcagaggtagtcggacctttcccgctggcgcgcagcctcagctagtaagactttgaccccgacgcaggcttcagtgattgccgcg

SEQ ID NO: 376351 - DNA, 79 bp, Homo sapiens
ggatggtcttgaaacacaaatggtttttgacaagttggatggcttgaggactggtactaaaaggaaacgtgactgggag

SEQ ID NO: 376352 - DNA, 79 bp, Homo sapiens
ggagccgctgccgccgcccccagctcccccgcctcggggagggcaccagatggccgccaagaacgagtcatgtttgaca

SEQ ID NO: 376353 - DNA, 96 bp, Homo sapiens
gctgctgccgctgccgccctgagtcactgcctgcgcagctccggccgcctggctccccatactagtcgccggttcttgattattacagacctcttt

SEQ ID NO: 376354 - DNA, 75 bp, Homo sapiens
cggcgtggaccacatagacatttacgcggatgtcggcgaagagttcaaccaggatttgcagatttacagaatggc

SEQ ID NO: 376355 - DNA, 103 bp, Homo sapiens
gaagacgtgcttgagctggtgtctcgggatgagctgaatgtcaaatctgaggagcagtttgtcctgaagaattatggagagaacccagaagcctacaatgaag

SEQ ID NO: 376356 - DNA, 116 bp, Homo sapiens
ccacgctccggatggaaaacgtggacgtgaaggaggaatggcaggacgaagatcttcccagatcccgactggattaagaggttactgcaaagcccctgccctttctgtgattctcc

SEQ ID NO: 376357 - DNA, 75 bp, Homo sapiens
aaggttgcgactattaccaaataggccttgcttgagagaactggttatactctggatgtaaccacaggacagagg

SEQ ID NO: 376358 - DNA, 98 bp, Homo sapiens
cgtcacctccgctcccccgatcctattcccagtcgtgttggcattgcaaatggtatggtcaccgaacaggctacaaagaatgccctttctttatcaaa

SEQ ID NO: 376359 - DNA, 75 bp, Homo sapiens
gcagtactcggcaggaaattggttgcactgctgtgatccatcctcatctcctaaagatgcatcctgacttatctc

SEQ ID NO: 376360 - DNA, 82 bp, Homo sapiens
gggagccgttggctgggaccgtgcgcgtgcgcctgggggcaccgctgccgttccgaggtccggcctctttggcctacccccg

SEQ ID NO: 376361 - DNA, 71 bp, Homo sapiens
tggatgaggcagacagacttctggacatggggtttgaggcaaggagttggggacttttcccagccagacac

SEQ ID NO: 376362 - DNA, 100 bp, Homo sapiens
acaaaacctacacagcttacgtggacctggaaaaggactttgctgctgaggcaaaatttggtttctctaatattactggaattgattactctccttctgc

SEQ ID NO: 376363 - DNA, 75 bp, Homo sapiens
atctgcccacccctcctgtaacccagcctgtttcacttcttggaactaagcgtcttgtagaaggaactattaatc

SEQ ID NO: 376364 - DNA, 82 bp, Homo sapiens
cgtcagcactgactttcagctatggaatcggagcatcagatccatgctgctgctgactcggagccccacagcttggcacagg

SEQ ID NO: 376365 - DNA, 80 bp, Homo sapiens
ggggccgacccggcccgtagtgtggaagcagcttcagaaggtcagtgcaccagatattctgaaacctctcaatcaagagg

SEQ ID NO: 376366 - DNA, 78 bp, Homo sapiens
agaaggaagcgagactcatacgcaacctcaatgtgcccatgacgcttccggagacaaccctggaaacactgaagcata

SEQ ID NO: 376367 - DNA, 83 bp, Homo sapiens
acatggagatgaagaagaagattaacctggagttaaggaacagatccccggaggaggagctgtggcgcggggccttccaggag

SEQ ID NO: 376368 - DNA, 90 bp, Homo sapiens
ctgaactcttctgctcaggagcgcctaataccacttgttttccaagaaagatgctgggatttatgaagttatcctgaaagatgaccgagg

SEQ ID NO: 376369 - DNA, 90 bp, Homo sapiens
atgtgctgtgtccggacaacggctgcggcgacaatttttgtttctaagacctcagagaaatttggaatctatagacccgcagtttacaat

SEQ ID NO: 376370 - DNA, 100 bp, Homo sapiens
gctctatctgtactgccggcacctcaaccagatgaggaagtacaactttgaggttatctgtgctacaattgcatttggaatggggattgacaaaccggac

SEQ ID NO: 376371 - DNA, 100 bp, Homo sapiens
tgtccacccaccagatgctgtccttcatgtcgccgctgcggagcaggtccaacaggaactggaaagaccacagcaagattctttcattcgtctcctccta

SEQ ID NO: 376372 - DNA, 75 bp, Homo sapiens
tgaccagggccactgcaggcatggtgctagcacaacggcatgaaactgtccatgaagggctctcacggccacacc

SEQ ID NO: 376373 - DNA, 96 bp, Homo sapiens
gtctccgtgggtgtggcggagcgcgcggtgcatggatctatcttgggatcccatggctttctttactgggctctggggccccttcacctgtgtaag

SEQ ID NO: 376374 - DNA, 100 bp, Homo sapiens
caggaaatggctttgggagttccaatatcagtctatcttttattcaacgggatgtgggaaatgaaagcagagtcgtcatgatcttcctaagcatcgtcca

SEQ ID NO: 376375 - DNA, 75 bp, Homo sapiens
aacaagcacattaacatcagcttccacaggattcactccttctccagttgcacagccacacccttcagctggcct

SEQ ID NO: 376376 - DNA, 75 bp, Homo sapiens
tccagcaacatcatcatggacacctccaccttcctgctcagcaaatcgcagtcttctccaggctgacaaggcgaa

SEQ ID NO: 376377 - DNA, 83 bp, Homo sapiens
cagaccctggagcctcagttggaagcagccgatccagcctgcggagcctgtggggcagtcaccacgttctgcgcttttccgag

SEQ ID NO: 376378 - DNA, 90 bp, Homo sapiens
gaaggagggtatctgcttcacggagggcaagagccggagggtctcagaggacagacagtgccagcagatactgggggccatggagtctca

SEQ ID NO: 376379 - DNA, 114 bp, Homo sapiens
tccatggccagcgtgcagctggcaggagccaagcgggatgccctgctcctaagcttcaaggatgccaagatcgtgtctcagaaggacgagcactgctgggtgggggagctcaac

SEQ ID NO: 376380 - DNA, 97 bp, Homo sapiens
ataaaggcggaaagacgagttctcaaagagttgggtttctgcgtccatgtgaagcatcctcataaggtctatgttaacaatgaatgggcaaccagtg

SEQ ID NO: 376381 - DNA, 97 bp, Homo sapiens
cattaaaaggagagctgggaggaggtttatattcgaagcacagacgttgaccggactttgatgagtgctatgacaaacctggcagccctgtttcccc

SEQ ID NO: 376382 - DNA, 98 bp, Homo sapiens
cgacgcggaccccagtaccaaggaagtgtttggattgtgagctatttcagaactgttctcaggactcattattttaacatttgggagaaacacagcca

SEQ ID NO: 376383 - DNA, 100 bp, Homo sapiens
cagcgccgcgcccggggccgtgcgctctcgggccactcggccgcagaccttttctgagcggctactgggaaatttctcattagcagttccgatctttgtt

SEQ ID NO: 376384 - DNA, 101 bp, Homo sapiens
ggaaccaattattacattgaatctctgctctggaaagttcttgtcaataccaaggtatctcagcgtttgagtcagccaggagtagcaataggtttggcttg

SEQ ID NO: 376385 - DNA, 99 bp, Homo sapiens
ttccctggggatggcgcatcacacaccaaagctgtcgatattcaaccagcatgccttggactttattgtgggaagaccctattatttaaaaatggctca

SEQ ID NO: 376386 - DNA, 100 bp, Homo sapiens
gacccggccgaggcggtgctgcaagagaaggcactcaagtttatgctctcgtggcattatccttcagtggggctattggactgacttttcttatgctggg

SEQ ID NO: 376387 - DNA, 83 bp, Homo sapiens
ggctcctgtttcctgtagcgtccatcctgccagagactgtactgcttagggcaaaatgatgcttcaacacccaggccaggtct

SEQ ID NO: 376388 - DNA, 83 bp, Homo sapiens
ttttccttccgccgacccgaagtcatcgctgggagtactggttgccctttcctcagggttttttgattaactcaaaaccagag

SEQ ID NO: 376389 - DNA, 100 bp, Homo sapiens
cggacacccccagaacgtgacctcatcaccccagttgacccactggggcccagtacaggcagcagtagagggagtgggtcggctggccggttgatgcgag

SEQ ID NO: 376390 - DNA, 100 bp, Homo sapiens
ccggtatgagcgtctcacctctgtctccagctccgttgactttgaccaaagggacaatgtgaggtcccagcttgaagagaaagaaaacaagaagttccct

SEQ ID NO: 376391 - DNA, 87 bp, Homo sapiens
aaccccaaaatcagtgattctacatctcaagctcatattttgaagtgtttacgggtggggacccatcgtgaagatggcgtggccctg

SEQ ID NO: 376392 - DNA, 75 bp, Homo sapiens
ccccaaatgcggaggcccctgcaccactaacgcgaggaaacgcagatgaggacggggacttggttgccttttcca

SEQ ID NO: 376393 - DNA, 105 bp, Homo sapiens
gagcgaaaccatcttcaagttagcagcgtttattttacaggtttttcgttggaatatacgttgcacatttatggcgattctgagtgtgagggcagacttctgcca

SEQ ID NO: 376394 - DNA, 82 bp, Homo sapiens
tgacttcccggacgctgggaaatggggccaaaccagtgctcctgccacctctctggctgccccctagagcctgcccatccca

SEQ ID NO: 376395 - DNA, 90 bp, Homo sapiens
agctacctgcgagaccagtggttccattctctgcaatggaagagttgctggagaatgtaaccctaatccataaaccagtgtcgttgcaac

SEQ ID NO: 376396 - DNA, 97 bp, Homo sapiens
gtggttacggcaacagcagaggatttggtggaggttttataggatcacattgacaaaagtaccatggagttttatgagtcagcatattttattgttc

SEQ ID NO: 376397 - DNA, 82 bp, Homo sapiens
cccacttgttcgcggcctatagtttttcagtttccaagatggaatagttatagtgcatatcttcctcatggttgtgaggagt

SEQ ID NO: 376398 - DNA, 83 bp, Homo sapiens
cccctgatcgcctgcggcaagtgctgcctgcaggtccatgccagtgcaggagaacccggggaggaggcccaggctctgctgga

SEQ ID NO: 376399 - DNA, 96 bp, Homo sapiens
cctgtacagcctgcagaaccagcaaatcatggaggaagataaaaaacatggtgcactggtctcccttcgtcatgtccttcaagaagaagtacccct

SEQ ID NO: 376400 - DNA, 100 bp, Homo sapiens
aaagctgcgggatacaaagtcagcccaggcagacctccaggtgtggtggacagtgaggacattcccctgaacctcagccgggagctgctgcaggagagcg

SEQ ID NO: 376401 - DNA, 100 bp, Homo sapiens
ggaaaacaagctcagaacgctcgccgattctaccattatggttatttcacagttgaggattttgggcagatccataacagctggttccaaatttgataga

SEQ ID NO: 376402 - DNA, 100 bp, Homo sapiens
caatcggtgtctcaggccactgggcccttagtggatgtttcagacgctcggccgggaacgatttttcctgagtgactcagaggaaacaatccctccaact

SEQ ID NO: 376403 - DNA, 82 bp, Homo sapiens
tgctgctgcttcaatgtccgcatcgcaaccaccgccctggccatctaccatgtgagcccaaatcttgtgacaaaactcacac

SEQ ID NO: 376404 - DNA, 100 bp, Homo sapiens
gggccgcgggaaggccgaccgactgccgcgctcctgagaaccatgtctatgcccaaaggtagagttctggataaaaacctggatgaggaagggtttgaaa

SEQ ID NO: 376405 - DNA, 75 bp, Homo sapiens
cgtcatcacagtcaactatcgacttggagtactcgtctccatctgctgctgcctcttcatcctcttcctcttcct

SEQ ID NO: 376406 - DNA, 112 bp, Homo sapiens
gtcctgcgcctcgggagtcggcgtccaggctcggagcgcgacacggagactaggtggcagacaatgcagatcttcgtgaagactctgactggtaagaccatcaccctcgagg

SEQ ID NO: 376407 - DNA, 144 bp, Homo sapiens
ctcaacgccatcacccaccccgagattcgcaaggagatgatgaaggagacgttcaagtacttcctccggggcctcatgtggaatgcagcctctgagaaaagcacttctcaccactcaaaacccaccgaagcatgcccagccctg

SEQ ID NO: 376408 - DNA, 100 bp, Homo sapiens
gctatgacgtgctgggggtcatcgacagctgcaaggaggccgtcaccttcaaggccgtcagacaagatgtacattgaagatgtcagtttctacatgtggg

SEQ ID NO: 376409 - DNA, 100 bp, Homo sapiens
tcctgacaaacagtatttacttacaagattcggaggtaacagtgaagggattcaggatatacggtgcaccttgctgggatctagcaattgggaggcagca

SEQ ID NO: 376410 - DNA, 96 bp, Homo sapiens
tattcagtggtgtttttctcaggtgaaaggagcagtagatgatgatgtagcagaagacttaattcagtgcacaaatgagatgaatgtgaacatccc

SEQ ID NO: 376411 - DNA, 82 bp, Homo sapiens
agggggttcaaggcagcagatctatggttcaggtgactattatatggttaaaaagattttggaggaaaacagttcaggtgac

SEQ ID NO: 376412 - DNA, 96 bp, Homo sapiens
ccgaggggcttactgccacagccgctgcctgagactgtgccctgtccacggtgcctcctgcatgtcctgctgccctgagctgtcccgagctaggtg

SEQ ID NO: 376413 - DNA, 100 bp, Homo sapiens
cggggaggccaacgtgaagaagcggagttcgccatgttcagcgggacccacgtggagcgggactttgtggaggcgccgtcgcagatgctggagaactggg

SEQ ID NO: 376414 - DNA, 78 bp, Homo sapiens
ttggcgggggactctgagggaggagctggggacggcgaccctaggagaggtgatgtgtccaatctagatcccaacttc

SEQ ID NO: 376415 - DNA, 100 bp, Homo sapiens
ggcccctccaccccgggggtgctcagcaactgcacctcgcccctgagaggagaaggaacgctggatacgggccaagtatgaacagaagctcttcctggcc

SEQ ID NO: 376416 - DNA, 76 bp, Homo sapiens
ccttcaatccaggacgagacttaaattcagtttcttatctcagtcatcactatggtgcttctgacgttgatgactg

SEQ ID NO: 376417 - DNA, 50 bp, Homo sapiens
ggcgaacacgccgcggtcctcgtcgtggcatctccttggaaacaatgcca

SEQ ID NO: 376418 - DNA, 100 bp, Homo sapiens
catcagaagattattgaagaagcacctgctactattgctactccagcagtatttgaacacatggaacagtacatccagcagtggtcattcgacaacgaaa

SEQ ID NO: 376419 - DNA, 50 bp, Homo sapiens
atcaacaccaaaaagctttctgctaggggaatgttttaaaggaagttggg

SEQ ID NO: 376420 - DNA, 83 bp, Homo sapiens
ggccagaccacgagcgccttcctcttcctcggcgccattgagacccagagcagcagttctgaagagatagtgcccagccctcc

SEQ ID NO: 376421 - DNA, 75 bp, Homo sapiens
ccctggagacacacaggcagacccatactgctgtctgtgatcctggaaacatacgtgtgactgaagctcccaaac

SEQ ID NO: 376422 - DNA, 97 bp, Homo sapiens
caaacctgacaaatgtgcaatcttaaaagaaactgtgaagcaaattcgtcagatcaaagaacaaggaggaacatatgcagcagaaaaaagaggagga

SEQ ID NO: 376423 - DNA, 95 bp, Homo sapiens
cagcctgcgagccttcttcccggggcgccataaacgcccccaatttcccagctgctaaaggaagaggaagcggacaaggcaaaatctcagcaagt

SEQ ID NO: 376424 - DNA, 78 bp, Homo sapiens
aactttccgtgactaaacctgtcctacaaagtaccatgagaaatgtcggttcagatatcccagatgcagtgactggtt

SEQ ID NO: 376425 - DNA, 75 bp, Homo sapiens
gcttatgccaggccgatcccgacctggactcagacaaggatgaccaactcttggatgatggcaagacactgggcg

SEQ ID NO: 376426 - DNA, 75 bp, Homo sapiens
gggtgcgcgcctgcgacctgcccgcctggggccctccagaatttccacagcatacacctggacctgttcccaaca

SEQ ID NO: 376427 - DNA, 75 bp, Homo sapiens
agactctgacattcctggctgtcatgctcattgttctgaactccacgaccccaccaacaactgaacgctttggtc

SEQ ID NO: 376428 - DNA, 142 bp, Homo sapiens
tgggatgtgaagtagatgataaagatgatgatatccttctcaaccttgtgggatgtgaaaactctgttactgaagcctgtcaagttggctgttgtttgcagagatggtcaagtccatctttttgaacacatattaaatgggt

SEQ ID NO: 376429 - DNA, 80 bp, Homo sapiens
gtactcggcggcggcggagcgggcggcagagcagggcggcggcgactcggtatctctgcattagccagattggacatatg

SEQ ID NO: 376430 - DNA, 100 bp, Homo sapiens
cgcactgagggtgaagtggcaggaggaggaggaggggctccggctggtctgtggtgaggtcatgtccaaagtaatggagatgttccagcctagtgcggtg

SEQ ID NO: 376431 - DNA, 100 bp, Homo sapiens
gctgcaggtcacctgggaggacagcaccaccggcaaggaggacacgggcacctttgacaccgtcctgtgggccataggatgaatttcatcctttcatcga

SEQ ID NO: 376432 - DNA, 76 bp, Homo sapiens
gagcagcgtggagagtatcatctcaccaaaggtacttcacatgactggaggttacggtgtggtgctgtggacttgt

SEQ ID NO: 376433 - DNA, 51 bp, Homo sapiens
aagaaagaccatcaagtttaccagacttggcctttaccctggaagagagac

SEQ ID NO: 376434 - DNA, 98 bp, Homo sapiens
tgggggccggccccggcctggtcctggccccggagctgttgctggacccctggcaggggactgctgagatgtcctctattcttgaagagcgtattctt

SEQ ID NO: 376435 - DNA, 90 bp, Homo sapiens
ggctcatcaactcctacgaggacaaaagcaacgacttcgtatgtgatcctggtggagggattgaaatgtctgagttcatccgagaggcca

SEQ ID NO: 376436 - DNA, 128 bp, Homo sapiens
aaaacaagataaaggtggctttggattcagaaaaggtggaccagatgacagaggcctgattgttggcaaaggcatcataagaagctggcatttatttctgttctaacctattactgtataactgtgaa

SEQ ID NO: 376437 - DNA, 88 bp, Homo sapiens
agccaaggaagccctcatctgcccaagcctggagctgctgaagactgctattgggaaagctggctacactgataaggtggtcatcggc

SEQ ID NO: 376438 - DNA, 83 bp, Homo sapiens
cccacctgcccggtgcccgaggaggcagccaagctcgtagcctgccactccgtgcggctgtgtggtctttgaggatgtgtttg

SEQ ID NO: 376439 - DNA, 95 bp, Homo sapiens
gcgcttcatgtgcaacacagtatttaagaagattccctgtaatatttctaaagcatgtctaatattgagaagcatagaggagttaaagcataaac

SEQ ID NO: 376440 - DNA, 100 bp, Homo sapiens
attatacctagaagtctactaatggacagttagtcacccacctacatgttgaggatatgaacgagactgccaaacaagaagatattttggaatccacaac

SEQ ID NO: 376441 - DNA, 80 bp, Homo sapiens
gatccgggcgctcgagacttaccagagccacaagaaggagctcaaaaagtgggatgagtttgaagatattttagaagaga

SEQ ID NO: 376442 - DNA, 83 bp, Homo sapiens
agcacttccaccccctcctctcctcaatcctggcaggatggcctaccctctgaagaggtccaagcaacggaagtactactacg

SEQ ID NO: 376443 - DNA, 75 bp, Homo sapiens
aaatggcggtgtctacagtgttctcgacttcgtcgctgctattggtgtcagcaaccagagggaaaccactgtagt

SEQ ID NO: 376444 - DNA, 82 bp, Homo sapiens
cagcactgcgcagccgtggtgtccagcctcctgggcagccccttgcccttggacaggagccaagccgccatggcctaccaca

SEQ ID NO: 376445 - DNA, 98 bp, Homo sapiens
ggagggctccctgactgtgtacgtgatatctgaacactcctcacttcttccccagagacccactgctaaggagttattgaagcacaagtttatactac

SEQ ID NO: 376446 - DNA, 74 bp, Homo sapiens
taggctgccagcaaacagtcttccgcaggaaggagatgtgaatgccagctgatgaagaccgagaggccgcgacc

SEQ ID NO: 376447 - DNA, 90 bp, Homo sapiens
cggtcacgccatcgttgctgccttcttcgtcaagattacgatgaggacctggtgcaggaagcttcatctgaagatgtcctgggcgttcat

SEQ ID NO: 376448 - DNA, 90 bp, Homo sapiens
gtttgggaaacagggttatcagtgccaagccccacaccagtgagaagcatcagcaccgtgaacttgtctgagaatagcagtgttgtcatc

SEQ ID NO: 376449 - DNA, 108 bp, Homo sapiens
aggaaacatggcggcggcgggtgttgtgagcgggaaggtgctggagaatctggtaaaagcaccattgtgaagcagatgaggatcctgcatgttaatgggtttaatgga

SEQ ID NO: 376450 - DNA, 98 bp, Homo sapiens
gagcagcgctctggggctcgccttgtatctcaacaccctgagtgcggatttctgctatgatgacagatcttgagccagatgattgtgcatccatttac

SEQ ID NO: 376451 - DNA, 100 bp, Homo sapiens
cagtcttccaaagacagactgcggcgaaggctaaaggaaaagataaatgagatgtcgaaggaagtcaccaaattgaaggaggccttgaacagcctctccc

SEQ ID NO: 376452 - DNA, 99 bp, Homo sapiens
cgtctgggaagagagcagccaggggcggacgaaaccatcggtagactccacaaggtggagccgccaccaaaatgcagattttcgtgaaaacccttacgg

SEQ ID NO: 376453 - DNA, 100 bp, Homo sapiens
atcagctctcgcagtcggagaggcggctaaggaaaggtgccacagcagagacgcgaaggagaggccctagaaccatggcgtgatcaacatgagcatcccc

SEQ ID NO: 376454 - DNA, 51 bp, Homo sapiens
ctcataaatgccacctcaacaattcagaggagggtgcatctgcccggaaga

SEQ ID NO: 376455 - DNA, 78 bp, Homo sapiens
agaaaaggcctaagaattttggcattgttgtatcacggactgattcaccgagcccaaccgtactcaactcacatattt

SEQ ID NO: 376456 - DNA, 75 bp, Homo sapiens
ggcggcggctgcggcccaatataggcatggattccgtgaaggaacaacacctaaacccaagagggcagctgttgc

SEQ ID NO: 376457 - DNA, 82 bp, Homo sapiens
tgacagaggatattattcagttgaaacagttacactgcttgtagctcttaaggtgctgatgttgctaatgtctgtaatgaag

SEQ ID NO: 376458 - DNA, 75 bp, Homo sapiens
gtgacttgtttctggatgattctaagaggatggagccagcaccctcagaggttcgactcgccgtccgggaagcca

SEQ ID NO: 376459 - DNA, 80 bp, Homo sapiens
atgatggcctactgcgaccagatcttccaggacgagacgggcaagaaccgcgccactggcttcaccacgcggtcagacat

SEQ ID NO: 376460 - DNA, 90 bp, Homo sapiens
tagaagtggtgatgcaagaagtttctaggaaaggccggacaccagaaatgcccggcgaagccacagaaaccgtccctgctacagagcagg

SEQ ID NO: 376461 - DNA, 75 bp, Homo sapiens
ggacaacaatgagatcgtggacaagatcatgggcaaaggacagatccagtggtttccagtgacagtgacagtgac

SEQ ID NO: 376462 - DNA, 100 bp, Homo sapiens
ccggagtggggaagacctgcgtcctttttcgtttttcggatgatgccttcaatactacctttatttccaccataggtggctttctagaagatgaccatag

SEQ ID NO: 376463 - DNA, 119 bp, Homo sapiens
gatagtccaaaaactgaagaagatggtggataagcccacccaggaatggcatcaccagctgccggatgcggactgagagtgagccatcttgtggctccccagtggtcagcggagacccc

SEQ ID NO: 376464 - DNA, 100 bp, Homo sapiens
ccagacagaacctttgacttggtgttgaaagtgaaatgtcatgcctctgaaaatgaagtaccttctccaggcaaattccgttcccctgcagcaccatctc

SEQ ID NO: 376465 - DNA, 75 bp, Homo sapiens
actagttcaactgaaattgtcttcataacagatcaaggaatcgaattttaccagaccctcaatatagtaacctgg

SEQ ID NO: 376466 - DNA, 75 bp, Homo sapiens
gaaggatttagaaatcttcaagaatttctgaggacaggagctcacatctggaagttcacacaaaagatgttggac

SEQ ID NO: 376467 - DNA, 100 bp, Homo sapiens
ggatgcccaggataccgggcatttgccactgcaagatgaaccatcactgttgctggaggcacctgacaaatcctagcgaatttttggagcatctccaccc

SEQ ID NO: 376468 - DNA, 101 bp, Homo sapiens
gtatctttaagaaattttatcttttgaaacacgttctgattaaccaagggtcagaagagatcaattctacagaaatttccagtggttctgttgaggcttta

SEQ ID NO: 376469 - DNA, 100 bp, Homo sapiens
ctcatagattgtgtaggcgttggtcttctgatagcaactttaatgtgctttttggagaccacggcatatttcttcatgaaaccaaaacttggagagaagg

SEQ ID NO: 376470 - DNA, 89 bp, Homo sapiens
gcagttggagtgaagattggcaatccagtgccctataatgaagagtcacctaaggtcctgcgagtacaagggtcgacccccaaaggcag

SEQ ID NO: 376471 - DNA, 82 bp, Homo sapiens
cgagaccgtgaccgagagcgtgaccgagagcgcgaatatcgtcatcgttagaagatcgaaagctgctttgcgtcgcagttgg

SEQ ID NO: 376472 - DNA, 74 bp, Homo sapiens
cctcaactctctatgtttgccagtggtttattttacaggaaagaagagatccctcccaaatcccaaccagtttc

SEQ ID NO: 376473 - DNA, 100 bp, Homo sapiens
catatacaacacgattcttctaatggatgggaacatgggcaaagtgtgggatgctgtctcaggagatgaattgatgaccctggctcataaacacattgtc

SEQ ID NO: 376474 - DNA, 100 bp, Homo sapiens
cctgagttcaccaccttggccagaagttgttctgccagacccagttgaggagaccagacaccatgcaggtactctctgaagatggcagaagctcaccaag

SEQ ID NO: 376475 - DNA, 82 bp, Homo sapiens
cgctgcgcggcgcggcggccgggccctcgagacggggacgggggatatgagactttctactcggaatatcctgagtgttgcg

SEQ ID NO: 376476 - DNA, 74 bp, Homo sapiens
ggttgttttataaactgcctggccgaatcagccttttcacgctcaagcttgataactatggacagcaagaactt

SEQ ID NO: 376477 - DNA, 83 bp, Homo sapiens
aaccatcgcagttggaagcccatggggcaggtgaggaaaatagcagctgaatactatgacaacctccctcactacaattcctg

SEQ ID NO: 376478 - DNA, 100 bp, Homo sapiens
cgagacggagccggacccgccgcctcccgggatgaaataattctgctgctgggaaaagaggtcagccgtctctcagattatgaaattgaatccaaataca

SEQ ID NO: 376479 - DNA, 74 bp, Homo sapiens
aaatggggtgaggaagattttgaagacaatcgtcacttatacaggtgactctgacatcattagaagcatgccag

SEQ ID NO: 376480 - DNA, 50 bp, Homo sapiens
aacattcatgcacaaatttttatgtggagcatcctggccactgcaggaac

SEQ ID NO: 376481 - DNA, 134 bp, Homo sapiens
cagaagctcctcaatggccagcgccagctgcagccccggctgcccactcgcctcacctgagcctggaattgttggtgaggatgatggagggaaactttttactcctgaagaatatgaagaatacaaaagaaaag

SEQ ID NO: 376482 - DNA, 100 bp, Homo sapiens
gagcctctgattctcctgtgccagctccgccgcatgcaagagatgattgcaaggatgcaggcgcagatgcagatgcagatgcagggcggggatggcgatg

SEQ ID NO: 376483 - DNA, 82 bp, Homo sapiens
tttcaatgtgacacaaggaaagtattctacaggggacggcaaaacagaacagaaaggcggagataaaaagaggggtgttaaa

SEQ ID NO: 376484 - DNA, 85 bp, Homo sapiens
gtgtcctggtctggatgaggtttggggagaggaatttgagaaactatatgcaaggtggccagcatcgaaatgttcagccttttag

SEQ ID NO: 376485 - DNA, 75 bp, Homo sapiens
gtattgaggaggtggaaataacagctaacagagaccctgatgctggaattgatgaagctcaagttgaacaagatg

SEQ ID NO: 376486 - DNA, 121 bp, Homo sapiens
gaaaacgtagggaccacatcaaagacagctttcacagtttgcgggactcagtcccatcactccaaggagagaaggtccgtggcactcaggtagttggttctgacatgactgtgacagttga

SEQ ID NO: 376487 - DNA, 87 bp, Homo sapiens
aagatgggcatctattacattccacctagagccagagtgggctgccgcagcttcagaagtaaaagagcagacgaaaggaaaagtgaa

SEQ ID NO: 376488 - DNA, 97 bp, Homo sapiens
cggggacattattgcgcgtggaacggctgcttttggaagctgtggaaagtgaagaaggcattgaagatgactattttttggagaggcctgatgcccg

SEQ ID NO: 376489 - DNA, 100 bp, Homo sapiens
tcaactaagaccaagtcctcgctggactgctcagggtgccagacctcatcgccaggtgtggtgtcttacacctgtaatcccagcactgtgggaagccagg

SEQ ID NO: 376490 - DNA, 75 bp, Homo sapiens
ctccgcaccccggggtcccaggaagggcggcccagtacctggagtagaacagaaaaattattatgtctgtgttcc

SEQ ID NO: 376491 - DNA, 100 bp, Homo sapiens
atgggcgcgaacaatggcaaacagtacggcagtgagggctgtggaatgggagtgtgatgaagctaccaaaaaggcctgttacagcaaaggcaaatcaaag

SEQ ID NO: 376492 - DNA, 99 bp, Homo sapiens
cgccaagaccgctgcagccgctggctgaacatacattggaagtgtggttatatctgttaacccataccggtctttacccatttattcaccagagaaagt

SEQ ID NO: 376493 - DNA, 100 bp, Homo sapiens
cgcactttttggatcggcatctagtctttccgcttcttgaatttctctctgtaaaggaggattgcacccaaaattatagagacaactggagttcattttc

SEQ ID NO: 376494 - DNA, 86 bp, Homo sapiens
ccagggtccctgaagagggaagacacgcggaaacaggtgaaaggtgtagcagtcactcggcctacacccacagcatcgaccttgtg

SEQ ID NO: 376495 - DNA, 100 bp, Homo sapiens
aggagagcccggagacagccgcccaccccgggcctatcgtagtccactgcagtctctggcatctctatcccctatgaggcaccacgtaagacctcctgcc

SEQ ID NO: 376496 - DNA, 83 bp, Homo sapiens
ggcgaccggagcgaacgccacgccgttgggtgatcccattaagatactaatgccatcactgtctcctacaatggaagaaggaa

SEQ ID NO: 376497 - DNA, 101 bp, Homo sapiens
cagtttgaagatggagagaaaattgtggtccagggagagcctggggacgacttttacatcatcacggaggcagctatttttgctatgataatcctgctgcc

SEQ ID NO: 376498 - DNA, 100 bp, Homo sapiens
ccggcaagaagttttggagatgaggagaggagagccagagaagtgacagggaagctacaggttacaacagatttgtgaactcagccaagcacagtggtgg

SEQ ID NO: 376499 - DNA, 83 bp, Homo sapiens
tggtcggaatcagatttgaaaatgaaagttaagcgatacgaatcccagcttcgggatcttgagcggcagtcagagcaacagag

SEQ ID NO: 376500 - DNA, 100 bp, Homo sapiens
cgactctcaccatcatcaagacggaaaaagtcgatctggagcttttcccctccccggtttctgtagaaaatgtttcctgactgcaatgagggaaagcgga

SEQ ID NO: 376501 - DNA, 90 bp, Homo sapiens
ggccccgggccccgatggccccgaccgcgtgctggagctcttcgacccacccaagtctgttctctggggaggcagtaaggggccgtggag

SEQ ID NO: 376502 - DNA, 100 bp, Homo sapiens
gcaagaacggcgtcttcgtggacggggccttccagagacgcggcgcgcccgccctgcagctgcccaagcaagctgtaggtaaaacttgcctactgatcag

SEQ ID NO: 376503 - DNA, 115 bp, Homo sapiens
cagaccctggagcctcagttggaagcagccgatccagcctgcggagcctgtggggcagggagtgcatccgccccaacccttttccccctcgtctcctgtgagaattccccgtcgg

SEQ ID NO: 376504 - DNA, 74 bp, Homo sapiens
ctgggcaaggagttcaaagaaggacacagctactactacatctgtccaggttcacactagaaggccaaaacttc

SEQ ID NO: 376505 - DNA, 99 bp, Homo sapiens
tgaagagacaggaggcagtagccaaacacccagccgaatctgtgacctctctgccatcccaaaacaatggaactaccagccctgacccctttgagtctc

SEQ ID NO: 376506 - DNA, 73 bp, Homo sapiens
caagcagaaagcgtttgtggagccgtattttaaaggtgatgaaagatttcaacactacacttgcacaatgtct

SEQ ID NO: 376507 - DNA, 100 bp, Homo sapiens
tgggcgtggagccggcagccgacggcaaaggtgtcgtggtggtcattaagcggagatccggtcttttatcagaaatcaccgatccagagagcttcctgaa

SEQ ID NO: 376508 - DNA, 75 bp, Homo sapiens
ggagctaaagcagcgtgcgttcagccctgggaccagattatcaaaaattctcatgattaaaaaggaacatatcaa

SEQ ID NO: 376509 - DNA, 83 bp, Homo sapiens
caaggattctcgctgtgacagagacaacaccgagtatgagaagtactccaaagattcaggtttactcacgtcatccagcagag

SEQ ID NO: 376510 - DNA, 75 bp, Homo sapiens
cgcgctgacaggggggcctggccgcgcagccgtggaatgcagtagccctctgggcctgggatattgtggttgata

SEQ ID NO: 376511 - DNA, 100 bp, Homo sapiens
caaaaggtgatctggacaaaggaacaggtatctcagcttcagtatcagacacagcacagcagccatctgaagagcaaagcaagtctcttgaaaaaccgaa

SEQ ID NO: 376512 - DNA, 75 bp, Homo sapiens
cgccccgccggtcacctccgcgcggacaccaggagagctcaaaggatggctactgacatgcagaggaagagaagc

SEQ ID NO: 376513 - DNA, 98 bp, Homo sapiens
gagacatgcctcacccgaggatattaaaaaggcaagaagctcattcacacagaagacccatttaatgatgaacatcaggagaggcaagaggtggaaat

SEQ ID NO: 376514 - DNA, 100 bp, Homo sapiens
tgaaacaccagcagttacttggcgaggtcctcactcagctgtcctccaggttcaaacctcgagtccctgtgatcaagcatgacacatgtcctgtatgtag

SEQ ID NO: 376515 - DNA, 74 bp, Homo sapiens
aaaagactcaggacggacaagcacagtcttcggaaggacaatgtgttgaacatcattaaccagatcatggatga

SEQ ID NO: 376516 - DNA, 100 bp, Homo sapiens
gacactctggacttcagccaacagaaaccagcctggacaccaagtctgtgtcagaaggccacctcaagaggaacatcgtggtgaagaccgtggagatgcg

SEQ ID NO: 376517 - DNA, 100 bp, Homo sapiens
ccgcgccgcccgcccgccggggccccgctgtccgccgcccgccgccgctggagctagagaaagctctgggtgtgcggcagtaccatgtggcctcagtcct

SEQ ID NO: 376518 - DNA, 100 bp, Homo sapiens
gcgggcccgcggacccagctgtcaggcaaggtggaatatgtgatcaagtgtgacatgtcagctctgcagaagattctgtatcgccatatgcaagccaagg

SEQ ID NO: 376519 - DNA, 75 bp, Homo sapiens
tgagactccctcagatccagtgataattgacagtttccaacatggctagatccatcagaaactgaagccgtggag

SEQ ID NO: 376520 - DNA, 51 bp, Homo sapiens
gcttactgtacagcctgcagaactctgccccagagcacatcagctatgtgc

SEQ ID NO: 376521 - DNA, 75 bp, Homo sapiens
aaactctgtgcctcaacaaccatttctaagtggtccagtggcattgcagagcacggatggttgcaggagccaact

SEQ ID NO: 376522 - DNA, 74 bp, Homo sapiens
tcctgctgggcttcgtccagatcgggaagggctccctggggaagggaatgcagggttgctggggctgggcccag

SEQ ID NO: 376523 - DNA, 98 bp, Homo sapiens
cggggaccgagcctgggaggccggccggtgccagcacctttcggcttctgagacggcggcagcagcggcattcagcactattcctgatcagagaactc

SEQ ID NO: 376524 - DNA, 98 bp, Homo sapiens
ctttacacaggatatgaataatattcttctggagttggactagtactacaatagatggatatttttatttctagaactctgacatcatcatttgttaa

SEQ ID NO: 376525 - DNA, 104 bp, Homo sapiens
ctgcagtacctgcagaaggtctctggagacatcttcagcagctccaccgggggacggctacgtgcaggcggacgcccggggccccccggaccacgaggagcacc

SEQ ID NO: 376526 - DNA, 100 bp, Homo sapiens
ggataaacgcttatccactcactcacccttccgaactcttaacatcaatgggcaaatccccacaggagaaggaggttttggccaaattgggcgagggcac

SEQ ID NO: 376527 - DNA, 100 bp, Homo sapiens
cacgtgtctcctggttgggaaaggtgactctcctattccatctgtttcttcgggatcatcttcacctctttcagccacttctgccccaccaacgttgggc

SEQ ID NO: 376528 - DNA, 74 bp, Homo sapiens
acctggtctacatgctagagggcttgggcattcacacgatggcagttgaattcctgcatgaactgaatgttcca

SEQ ID NO: 376529 - DNA, 125 bp, Homo sapiens
ggtggggaagaagatcgtgtttgtaacggggaacgccaagaagctggaggagggacaagaatccttcaagaaacaggaaaaaactcctaaaacaccaaaaggacctagttctgtagaagacatta

SEQ ID NO: 376530 - DNA, 95 bp, Homo sapiens
gaatgtgtctcttgccaaagcgaaggaggatcagctgatttattcggaggatttgctgactttggctcagctgctgcatcaggcagtttcccttc

SEQ ID NO: 376531 - DNA, 82 bp, Homo sapiens
cgcggagatgtggcccctggtagcggcgctgttgctgggctcggcgtgctgcgtgttggctctggaattaagggatggggag

SEQ ID NO: 376532 - DNA, 133 bp, Homo sapiens
cagggagtcagaccccagcctccaattcttcctccttttagctccccagctctgatccccggacttcactgaggatgtcaactgtgcttttgagttcctgctgaagctcacccccttgttggacaaagctgac

SEQ ID NO: 376533 - DNA, 100 bp, Homo sapiens
gccccggcaaactccccatccagctccagagcactgcagtttcctcctgaaggctggctccggctctccctcaataatggcagcatcacccacctggtga

SEQ ID NO: 376534 - DNA, 83 bp, Homo sapiens
cggggaccacagctcccgaaagcgacgttcggccaccggaggagcgggagccaagcaggtcgcaatggaagaagagatcgccg

SEQ ID NO: 376535 - DNA, 75 bp, Homo sapiens
gaccgagggactgggagtcgttagtgagcaatggctgccatccggaagaaactggtgattgttggtgatggagcc

SEQ ID NO: 376536 - DNA, 74 bp, Homo sapiens
acatcgtattgcacctggctacaactgtacctgtgtgacaaggtcgtccctgggaacagggttaccatcatggg

SEQ ID NO: 376537 - DNA, 51 bp, Homo sapiens
ggggctgctgtttctcttcgccgacgggacttgccatgaggtgttgaagcc

SEQ ID NO: 376538 - DNA, 75 bp, Homo sapiens
tgataattctcaaggattctacgtggccaggtctggattaatggctttaaccttggccgctattggccagcccgg

SEQ ID NO: 376539 - DNA, 75 bp, Homo sapiens
aatgaatgtttccatctcttcagagatgaaccagcccatcacctcttcatgaccactgcctgccaggaggctaac

SEQ ID NO: 376540 - DNA, 60 bp, Homo sapiens
aagctgccctgagacggtgtcccgccgaaaggaatagaaggacagtctgtggaagtttcc

SEQ ID NO: 376541 - DNA, 100 bp, Homo sapiens
caaacagttaaaatgttcaaggaccgcttgaagcctgaatgcagtactgaagaactgctttcaattctaagtacaacatctggggaagatgtacgagact

SEQ ID NO: 376542 - DNA, 82 bp, Homo sapiens
aaacagggccagaagctggagatgatgctggagcagaagttagcgcttctctctcgtgcttctgttttgaagaacaaaggct

SEQ ID NO: 376543 - DNA, 98 bp, Homo sapiens
ccgattgaagacagtgaagtttaatgccaaacctggagtgattgattcgaaagggctccctgtgctgtcaggaatctacaggacttggctcgtattta

SEQ ID NO: 376544 - DNA, 100 bp, Homo sapiens
tgccatttcaaagaatatagatggttttgaaaagttcatgctgtcccttcattgaattttagggggcatcccggggcccatcgccttcggctgggtgatc

SEQ ID NO: 376545 - DNA, 80 bp, Homo sapiens
caacatagaacctattatgctctatcaggattattcaagatcaggttgtagccattttcaacaaggatcactgatcaaaa

SEQ ID NO: 376546 - DNA, 100 bp, Homo sapiens
ccactggttctccaggaaccgaaaaggcgaggagtatagtacggcaaaaaactgtcgctatccccttttccagggcacagtgaggccagcagatattgag

SEQ ID NO: 376547 - DNA, 82 bp, Homo sapiens
ctagctaaacttcgccaactccgctgcctttgccgccaccatgcccaaaacggctcgtggtcccaagaagcatctgaagcgg

SEQ ID NO: 376548 - DNA, 82 bp, Homo sapiens
atgctaagaaagaatcttgtcactttagccactgctactacaggtcaccctcgtcgactgaaagtgaaacctgattctgaaa

SEQ ID NO: 376549 - DNA, 100 bp, Homo sapiens
ctcccttgtaagacagccaagaaaacaggaagagggttggaggcaaagttccgaatagggatgaggcatacgtggtctcctctgagcctccggcctccat

SEQ ID NO: 376550 - DNA, 100 bp, Homo sapiens
aggaaacggcttcttcctcacttcgccgcctggctgctgacagtgatgatgaagatttggatgacttatttgtgggacctgttgggaactctgacctctc

SEQ ID NO: 376551 - DNA, 100 bp, Homo sapiens
ccaaacggctgtgtgctggcagtgtgggacacctgcttggaggtggtctatgttgcccgaaacccaaaggacgtggcggtctcctactaccatttccacc

SEQ ID NO: 376552 - DNA, 101 bp, Homo sapiens
ggccaccgcggcggagcccgagcgatctagggcagccctgcagaggtacctgttctactgtaatcgctatatgaaccacatgcagagcctgcgctttgagc

SEQ ID NO: 376553 - DNA, 88 bp, Homo sapiens
actgacttcaagaatgaagccgcggacccttgcggtatcattaatgggattggaaattttaagtgcctttgtggacagattatcaaca

SEQ ID NO: 376554 - DNA, 90 bp, Homo sapiens
tccagccgccgcctgccctcagccgcccgctggccgggagcggagcccctgtggagcttacaagaccctatgaaaaaattagttgagaaa

SEQ ID NO: 376555 - DNA, 98 bp, Homo sapiens
tgaggactttccttacctgtttttccagctcacccactgccagcagagtgctcctgcgggaagaagtgtcgcggctccaggaggaagttcaccttctc

SEQ ID NO: 376556 - DNA, 100 bp, Homo sapiens
atccagctgatcctccgggcggagcccactgtcacaaacatcctcaaggtacttcaaaggctcatcaagtcccgaggaaagtctcagtccaaacacctca

SEQ ID NO: 376557 - DNA, 88 bp, Homo sapiens
agaagcacgttaagaagcccgaagggcttttcagaaatcggtttgaagttagaaatggtctcaccaacggctttgggggtgcgaggag

SEQ ID NO: 376558 - DNA, 51 bp, Homo sapiens
gctggtcctgctcacgagagaaaaaggagtgaagtttagcaactgcaatgg

SEQ ID NO: 376559 - DNA, 97 bp, Homo sapiens
ttttggggcagaatacagagatatggaatcaggtgccagcgagatttcagattcctgtaaacctctaaagaaaaggagtcgcgcctcaactgatgta

SEQ ID NO: 376560 - DNA, 96 bp, Homo sapiens
tgcggagacacgggtgctgggccggttccttgtggagaagcactggtataagcagtgggaggcatacgtgcagggaggggaccaggactccagcac

SEQ ID NO: 376561 - DNA, 100 bp, Homo sapiens
acctcttctgcctcttcatgggagtgattggggcagatgtgagagggcacggcctcatctgtgaggggcagccagtgacgtcacggctggctgtcatctg

SEQ ID NO: 376562 - DNA, 83 bp, Homo sapiens
gagccgggcacactgggctctgcagcctcatcctacagccccctaggttatcaatactctggctgaccatcatcatcgtggga

SEQ ID NO: 376563 - DNA, 100 bp, Homo sapiens
ttcaagacaaagggccccttacacaccagacaggtgaaactgatggtaaatccatttgcttatgaagaatataggaaagataaaatacgacagaaaatag

SEQ ID NO: 376564 - DNA, 100 bp, Homo sapiens
gaatctgggacaagttgcatgaagagcatatcaatgcaggacgtacagttcaggtttctaagcatgaattgaggaacagaagaagcagagcagatgatcg

SEQ ID NO: 376565 - DNA, 109 bp, Homo sapiens
agattaaagatgcagtacgccacggggccgctgctcaagttccagatttgggttttttgattaactcaaaaccagagaatgcctgtgaacccatagtgcctccaccagt

SEQ ID NO: 376566 - DNA, 98 bp, Homo sapiens
aagacccaagaatgccagtcaagaagacagtattgctgacagacagaacgccttggaggctgagtggaggacggtgcaggcctctcgcagagatctgg

SEQ ID NO: 376567 - DNA, 100 bp, Homo sapiens
gacctgcggcgcttcctgacgcagccgcaggtggtggcgcgcgccgtgtgcttggcattgcttcaccggcagctacccggtcattgagcccctgctgaag

SEQ ID NO: 376568 - DNA, 95 bp, Homo sapiens
cgcttcagcaacatttccgccgccaaagcattttgaaagcgaagcagaagccgtagaatcagcggcgagcctgttgaaagaacccacaggtgcat

SEQ ID NO: 376569 - DNA, 51 bp, Homo sapiens
ctctgaagaggtcaaagaaacgtggcaacaattgagtcacttcaaaaggag

SEQ ID NO: 376570 - DNA, 74 bp, Homo sapiens
accaggacatggagcagctggcccctgagatccgcaggaatccagacgctctgcagtgtcccatcgtcttatgc

SEQ ID NO: 376571 - DNA, 74 bp, Homo sapiens
ccgggatgctgtactccttgtctttgcaaacaaacaggggcaagattcttgccaagagaattaatgtgcgtatt

SEQ ID NO: 376572 - DNA, 90 bp, Homo sapiens
caaccgcacaggtcccatgacaaagcgccgtctacaaacaatcaccgcttgccttcaacttcgggaagttgggccatatggtgctcttcc

SEQ ID NO: 376573 - DNA, 73 bp, Homo sapiens
gccatctttgctcctccctgcaactaactccattcttaattgtgttttccaagcagtgaagcacttgccgtgt

SEQ ID NO: 376574 - DNA, 101 bp, Homo sapiens
cataggggacatcgtgtccctgtacgcggagggctcggtcaacggcttcatcagcaccttggggacctctttgtttttagacatgaattggccataatgag

SEQ ID NO: 376575 - DNA, 101 bp, Homo sapiens
atgatagctattggatgggcccgaggtccaactgggatattagccacctcagagtccaaatccatgccagtgttgggttctgtatccagtgtaacaaaaac

SEQ ID NO: 376576 - DNA, 74 bp, Homo sapiens
ttggaaccaacatcttccaaactcctggcctcgaaaaagcccaagacagcagaagcagacacctccagtgaact

SEQ ID NO: 376577 - DNA, 130 bp, Homo sapiens
gcaaagcctgagagatggaaactactatgcatgtaaacaaatgaagcagcgctttgaaaggaagccttggaagatcgtttggaaaggattaatcgagaactgggttcagttcgcatgacgctaaagaaat

SEQ ID NO: 376578 - DNA, 75 bp, Homo sapiens
cgaaagcttccagcgagtcctcttatctaagtatcctaccaaagttgaaatggatgcagtcagaactgaatgttg

SEQ ID NO: 376579 - DNA, 98 bp, Homo sapiens
ccgagtctgacggcgccggttcgctgcccggtccgcccgcggtgagaggtatttcaggacagccaggagggggcgcacatccgccgcgaaactgtgag

SEQ ID NO: 376580 - DNA, 75 bp, Homo sapiens
ctttttgcttcaccgacatagtcattatgccgaagagaaaggatctggaaatagtatattcctatttacatggta

SEQ ID NO: 376581 - DNA, 87 bp, Homo sapiens
agggatattgagaaacttctgagcaacagatctaaagccctggtggtcttaaagaaagtgcagaagagatggtcaaaaacaaattgg

SEQ ID NO: 376582 - DNA, 50 bp, Homo sapiens
ggcagatattatcatagttgctgcagatatgattctataacagactcttc

SEQ ID NO: 376583 - DNA, 83 bp, Homo sapiens
ctccatcctgctcttcttccacaggtgaaagcccagcctccgtggttcttaatgcctcaggaggactattttcactaaagatg

SEQ ID NO: 376584 - DNA, 82 bp, Homo sapiens
gccgcccgccccccaccgccgccccctccggcgtgttcatgcccccggggtctcggcgcggaagatggccggcggcgtggac

SEQ ID NO: 376585 - DNA, 50 bp, Homo sapiens
atggggttgtcctctttaagaaggaggaacatatgcagcagaaaaaagag

SEQ ID NO: 376586 - DNA, 98 bp, Homo sapiens
atgcaaatgccaaaggaattggttatccagcttcgggctcagaatcaggttctgaaaaaaggtgttgtggatgaacaagcaaattctgcagctttaaa

SEQ ID NO: 376587 - DNA, 82 bp, Homo sapiens
tcagatggagaatacagactgctacctccccgatgccttcaaaattatgactcaaagcaggaacgaatgcaggaatttggga

SEQ ID NO: 376588 - DNA, 116 bp, Homo sapiens
tttgaaccactggaaagtgaggaattttgaagtacaccgtggtgacattgtatcattggtctatttgaactgctgggacctgaaggacttgaacttattgagaaactcctccagaa

SEQ ID NO: 376589 - DNA, 100 bp, Homo sapiens
ggaaatactaatcgagcactttggcaaggaattctgaagtgtaaaaaggacaaagcttatgaaggcggtcagttgtgtgcaatgtgcttcagtccaaaga

SEQ ID NO: 376590 - DNA, 80 bp, Homo sapiens
gggccagggaaccctggtcaccgtctcctcagatgctgtgtgctgtggacccacctggggttcatggagtgggccacggg

SEQ ID NO: 376591 - DNA, 83 bp, Homo sapiens
cagcgcctcagctctgtggaggagcagcagtagtcggagggtgcaggtgagaagccctaccactgcaactgggacggctgcgg

SEQ ID NO: 376592 - DNA, 100 bp, Homo sapiens
catcggtgccaaggaccacgcatccatccagatgaacgtggccgaggttgacaagggtgtggtgcctctagctgggactgatggagaaaccaccactcaa

SEQ ID NO: 376593 - DNA, 100 bp, Homo sapiens
aggaaggtcctggaggaggaagagcagaggaggaagcaggaggaagccgatcgaaaactcagagaggagtcgtccctcatggaccttgctgacgtcttca

SEQ ID NO: 376594 - DNA, 75 bp, Homo sapiens
cggaggcacgtgtggagccccggcagcaggagcgtcgcagcccaagctgacgcctcaggagaagctgaaactgag

SEQ ID NO: 376595 - DNA, 97 bp, Homo sapiens
gaacgcaagaacagaatgaagaaagtcagggggactgcaaaggccaatgttggtgctggcaaaaagaagccagctgaagatgagtggggtaaaaccc

SEQ ID NO: 376596 - DNA, 100 bp, Homo sapiens
cagcctcctgagtagcagagattacagaggtccttctgtagtgccatggtagaagaattgaggatgtccctgaagtgccagcgtcggttaaaacataagc

SEQ ID NO: 376597 - DNA, 100 bp, Homo sapiens
gtactgcctgaatgaaagcagcaagaatattcccctggcaaacctgcagatacccaattgtggcaggagtagggctgattggagccattgtacagtgtcg

SEQ ID NO: 376598 - DNA, 108 bp, Homo sapiens
cgttccccagaccctacccctatccccagtggagccggagtgcgggcgcgccccaccaccgccctcaccatggtgctggagaatctggtaaaagcaccattgtgaagc

SEQ ID NO: 376599 - DNA, 75 bp, Homo sapiens
gcagccgtccggagccagccaacgagcggccaagcccagcattcggtgcttcattaaacccaccgagacactcga

SEQ ID NO: 376600 - DNA, 82 bp, Homo sapiens
ctcgttgatgagagcattcgaagtgacctcagcagggcatccagccgtggtccttcagcatatctctgtgctgcagacaaca

SEQ ID NO: 376601 - DNA, 92 bp, Homo sapiens
attttagggtcctttatatagaagggagagtaggcggggagacaaccccttccccaagaatgctgatgggactatatgctacgactccaccc

SEQ ID NO: 376602 - DNA, 100 bp, Homo sapiens
caacaagaaattgaaagttcaagggtagaactaagaagtttggaaaagattatatcccagttgccagttcaaaccttgtactactcagctgatcacaagc

SEQ ID NO: 376603 - DNA, 101 bp, Homo sapiens
gaggaccagtgggaggatggagcagaggacattctagagaaagatgtggacgagtgccaccgcgtgccgccgccgtgtgacctcgggcgctgcgagaacac

SEQ ID NO: 376604 - DNA, 99 bp, Homo sapiens
cttgacgaggctgcggtgtctgctgctattctccgagcttcgcaatggaggaagagcaagcaggccctgagggactataagaaggttcagatccagctg

SEQ ID NO: 376605 - DNA, 97 bp, Homo sapiens
ggctgagctagcagtgagcaccttttggcccaatgaatatcagaacattaaccaggtggtatttgttggaaatttcttgagaattaatacgatcgcc

SEQ ID NO: 376606 - DNA, 100 bp, Homo sapiens
gctgaatagctggggctacaggcgtgtgtcactgcgcccagtttgccaaggcacgagtaacaagctcacgcagttgggcacttttgaagatcattttctc

SEQ ID NO: 376607 - DNA, 100 bp, Homo sapiens
ctggacattgattcaccacccatcacagcccggaacactggcatcatctgtaccattggacaccatgtaaaattgaacctagtataaaccacatcctaag

SEQ ID NO: 376608 - DNA, 90 bp, Homo sapiens
aaagacttgaaggcgtatacaggaacaatattgatgatgtagtaaggaatgtcgttgtctgctgggtcttcccctcttcattcccccaag

SEQ ID NO: 376609 - DNA, 51 bp, Homo sapiens
atggcggaggcgcctcctgtctcaggcccgccaagctgccccctgtgtgct

SEQ ID NO: 376610 - DNA, 100 bp, Homo sapiens
gtactgggggattcgcagggaggatgtcgggacaccccggaagctgggaaatggctgatttggagcaatataaaaaagctttaactgatgcaggatgcaa

SEQ ID NO: 376611 - DNA, 100 bp, Homo sapiens
aaatgtaaaggccaagatccaggataaggaaggccacgtggagtgtgtcaactctcttatagcttatgggggcaacattgaccataagatcagccacctg

SEQ ID NO: 376612 - DNA, 75 bp, Homo sapiens
ggacagacagctcattcgactggtagaacctctgctagccagacaactatattattttgctcaacaaaacagtgg

SEQ ID NO: 376613 - DNA, 50 bp, Homo sapiens
gccacagggatgtcttttactataggtggccatggtggaggtgcagctgg

SEQ ID NO: 376614 - DNA, 75 bp, Homo sapiens
ccaggccccggaggctaaggacggcagatggtgatggaatttcctgataatgtgttaaatctcgatggacatcag

SEQ ID NO: 376615 - DNA, 88 bp, Homo sapiens
agcaccagaatacgtttagcttcaaaaatgacaagttcgataaaagtgtgcagaccaaggtggcacaagatctctgtaaagtagcagg

SEQ ID NO: 376616 - DNA, 100 bp, Homo sapiens
cccaggcccagtctgggccgtgactctggtgacattgtgaggaagattgatcagtctgaatttgaaggttttgagtatatcaatcctcttttgatgtctg

SEQ ID NO: 376617 - DNA, 75 bp, Homo sapiens
aagaagcggaagtatgagttggggcgcccagctgccaacaccaagggcattgagcaagtgcagcaaagtagaggc

SEQ ID NO: 376618 - DNA, 100 bp, Homo sapiens
gggcgccccgggagcagccagcccgtgggcgagccgcccgcccgccgagcagccatgaggccgagcaggagctccgcgtggcccagacagagtttgaccg

SEQ ID NO: 376619 - DNA, 100 bp, Homo sapiens
gaggaatccgagaagagcagagcggagggagccccagacacggctcctggaccccgccaatacccagcaatttgatgactttaagaaatgctatggggaa

SEQ ID NO: 376620 - DNA, 98 bp, Homo sapiens
aaacaacacaaggacccatcagcagacgaatggatgatcaaaacgtggtatatacaatcaatttggaatctcagtacttattaatacaaggagttcct

SEQ ID NO: 376621 - DNA, 100 bp, Homo sapiens
gttcgtctcttacgtctgcggaagtgcagctgcctcagttcttagcgcagtatacaattggaccgtggatgaggtggtacagtggctgatcacatatgtg

SEQ ID NO: 376622 - DNA, 100 bp, Homo sapiens
tcagtatttacgacgctcaccattaatggacgcctgtttgcttgcccgcgagagcaattcgattcactggtggatgaaactcagtttaagaagatcctcg

SEQ ID NO: 376623 - DNA, 75 bp, Homo sapiens
aacgaccacgtctccaaaatgagtcgcatcttcaacccccatctacagcaccagttgcccttgaagcagaaaaca

SEQ ID NO: 376624 - DNA, 88 bp, Homo sapiens
cgcgagtgaggaaaggaggtactgtagacgcaaacatgcagatctttgtgaagaccctcactggcaaaaccatcacccttgaggtcga

SEQ ID NO: 376625 - DNA, 83 bp, Homo sapiens
cacttattcaagaatcactatggaaccaaatcctcacaacgacaccgtaactatccgcactagaaagttcatgaccaaccgac

SEQ ID NO: 376626 - DNA, 75 bp, Homo sapiens
gagcagcccgtacctctccaacggacccctgtctcccggaggagcgcgcaccgcaggaatagagttggagcggtg

SEQ ID NO: 376627 - DNA, 82 bp, Homo sapiens
gctaccctgctttttctggtgtcctgaacctggaagttgtgctttttaagattttcagctgaactctcatctctcaacactg

SEQ ID NO: 376628 - DNA, 82 bp, Homo sapiens
caagccgctcagcaagctccacatccccgtgacctgcctagagctggaacgttacctccagagcgagccctgctatgtttca

SEQ ID NO: 376629 - DNA, 90 bp, Homo sapiens
ccctgcctggacccctactattgcaacaaggtattgtcttctaagaactctgaagcaatgtcagacattgagggaagctctcattgctgc

SEQ ID NO: 376630 - DNA, 87 bp, Homo sapiens
tcagacgcagccgtagacaccagctccgaaatcaccaccaagggggatatgagactttctactcggaatatcctgagtgttgcgtgg

SEQ ID NO: 376631 - DNA, 75 bp, Homo sapiens
gtaggaggctgtcctgtctgcaggtggttctttagatcacagggtcggaaggaggctgagaggcagcttcttgct

SEQ ID NO: 376632 - DNA, 51 bp, Homo sapiens
cgcaggccttaaggagaaagtttcaggtttttgccaatccagaagactgtg

SEQ ID NO: 376633 - DNA, 80 bp, Homo sapiens
tctgcaatcctggacatgaaatgggcactgcacttggctgtgattcatcagcatgaacccttcctggattttcttctagg

SEQ ID NO: 376634 - DNA, 98 bp, Homo sapiens
gaatgaacactgtccttcaaaacgagctcatcagattcaagagatgtttccccaggttccataccatctggtactgcaggacctccagctgacacgct

SEQ ID NO: 376635 - DNA, 74 bp, Homo sapiens
cgattacccacttcgagtcctttattgtggaggtctatgaaggcctagacatcatcaccaacaaggtttctgcc

SEQ ID NO: 376636 - DNA, 75 bp, Homo sapiens
aacctcagggggaacaaaagcatctccatgagtgtggctgggtcacgacaagccgcttacaaacacgcagatggc

SEQ ID NO: 376637 - DNA, 75 bp, Homo sapiens
gccagcgagccagcgagccgccgacccgccgagcaaaatgtgacagctatattgtgcgtgtcaaggctgtggtta

SEQ ID NO: 376638 - DNA, 100 bp, Homo sapiens
ccctatgatgtttacgaccaggttgagtttgatgttcctgttggttctcgaggggactgctatgatagaccagtgtgcttttcttggagaaagaagaaaa

SEQ ID NO: 376639 - DNA, 98 bp, Homo sapiens
gcgatgcgtcaagtacactgaaattcatcctgagatgagtttaattggttggggtcagataagaagaggagtgacaatcaagccaacagtagatgatg

SEQ ID NO: 376640 - DNA, 50 bp, Homo sapiens
ggctcacctgtgcgggatggaacaaaagtattatgatgacacattcccct

SEQ ID NO: 376641 - DNA, 50 bp, Homo sapiens
gaggaactcagccctgattgcgttcagagaagccgaactgggattaccat

SEQ ID NO: 376642 - DNA, 96 bp, Homo sapiens
tccacataatggagacattctgatggaatttggttgaggagctcaagcttgggaaaatggtgtgcattccttgtatcgtcattccagttctgctct

SEQ ID NO: 376643 - DNA, 83 bp, Homo sapiens
cagggaaccaggtgtctgaatacatttcaaatactttcttaggagaactgcgacacatcaccaagctgaagccctggagcctc

SEQ ID NO: 376644 - DNA, 100 bp, Homo sapiens
aaacaactccgcaaacgaaaaagaacgacatgatgcaatcttcaggaaagtaagagggaaatccaaatctcctcccaaagtgcccattgtgattcaggac

SEQ ID NO: 376645 - DNA, 103 bp, Homo sapiens
taaacgctaccacagccagacctatggcaatgggtccaagtgcgaccttaatgggaggccccgggaggccgaggttcggagtttcgctcttgttgcccaggct

SEQ ID NO: 376646 - DNA, 101 bp, Homo sapiens
aaaaggaagtttgtcctgtcctggatcagtttctttgtcatgtagccaagactggagaaacaatgtactaggttttgacaagcttgcatcatgcgtgagta

SEQ ID NO: 376647 - DNA, 99 bp, Homo sapiens
gagcctggccaatgaggactctgtccctggagcggatgactttgttcctgtgttggtgtttgtgttgataaaggtcccaccacatcaaccgggtccacc

SEQ ID NO: 376648 - DNA, 50 bp, Homo sapiens
cggcgggtttcccaggacctggaagtgacaacatctggggaagatgtacg

SEQ ID NO: 376649 - DNA, 90 bp, Homo sapiens
gttgaaacgctgcctggaaaggaagtaccaggacttgcacagttaattggccttggtcctcacagctccaaaaagaaacaggatctcgat

SEQ ID NO: 376650 - DNA, 82 bp, Homo sapiens
agaagatggagctgctggaccagaagcacgcaagagtgagccatggagctacgtgtggggaacaagtaccgcctgggacgga

SEQ ID NO: 376651 - DNA, 83 bp, Homo sapiens
cccggggcaggcgggcagctgtgcccgggcggcacggccaggaagggaaaaggccgaggcatcagcgtgtgaagaccgcaaag

SEQ ID NO: 376652 - DNA, 75 bp, Homo sapiens
ctagagcagagtacgagtctgaggcggagggagtaatgagaccttgtacacagacagacggctagtgcagtggta

SEQ ID NO: 376653 - DNA, 89 bp, Homo sapiens
ctggtcacttgcctggagaggatcctgcatgctgatagtgctgaggcacctgccagctaagacttgcacacctacccctgtggagcgtg

SEQ ID NO: 376654 - DNA, 75 bp, Homo sapiens
agcagggtttgaccctcagattggtgtctactacatcgatcacatcaacatgtgccatgcggagctgaatgccat

SEQ ID NO: 376655 - DNA, 105 bp, Homo sapiens
acgaggagaagccgtcgcagcctcgggagctgcggccgccgcggcattcggggaatctgcagggcaggacaaattattggattccagcacagtgactcacttatt

SEQ ID NO: 376656 - DNA, 75 bp, Homo sapiens
cgcatgagtgggctgtaatcgggtgtctgggggcagaaaacgaggatggggcccaggagaacaccttctccatgg

SEQ ID NO: 376657 - DNA, 82 bp, Homo sapiens
gcggggcgacgctggctgcagggacccggtgacagcgtgagagggaaagcaggcaggatgggagagtcgccgatagaaccac

SEQ ID NO: 376658 - DNA, 83 bp, Homo sapiens
gagcctgattgaaccagtcaaccagtctattgttgtcagtggagagagtggtgctggaaagaaaaggcgacggcggattgaca

SEQ ID NO: 376659 - DNA, 97 bp, Homo sapiens
aggcggtgccctcgctgggccatgcgccctggatcctgcggaccctgatgaggagcagccagggcttcctgcatctgaagttcgcgcggacccgtga

SEQ ID NO: 376660 - DNA, 129 bp, Homo sapiens
acctgatcaagaacacaaaaggtaacacgttgaaagaggagtggattgcatacatctgcagggaaatcttacgggagcaggctggcacagagaagaggacatgcggaaggagctccagctctccctgtc

SEQ ID NO: 376661 - DNA, 75 bp, Homo sapiens
atctgcccatcttgttactccctagcagtgtggtaaggggaggaaagaggccctgttctagaggtcattgtatct

SEQ ID NO: 376662 - DNA, 98 bp, Homo sapiens
gctcacatggtgtctgggcccttggcactctgggttgtgagtcccggcccagcccctccacccccctgcccccccgatgcgaccatgggctctggcag

SEQ ID NO: 376663 - DNA, 75 bp, Homo sapiens
cccctcgggaatcaggagtgacctggagcactgtggacctcagcagccatgtcgaagccccatagtgaagccggg

SEQ ID NO: 376664 - DNA, 97 bp, Homo sapiens
agtgttggacacactggcagtaatacggactcttgtagataaattttctggcatccttaaatcttgtgtcaaggattggttataatataaccagaaa

SEQ ID NO: 376665 - DNA, 85 bp, Homo sapiens
atcctgtgtgtctaacatagaaaggaatctgcagaaagaagctggacatgaacaagctgagtggaggcggcgggcgcaggactcg

SEQ ID NO: 376666 - DNA, 98 bp, Homo sapiens
gcgtatcaaaatatgggatgtatatacaggcatccgtgtcattctggaccttactcccaactaccggggtgagaactcgtggttctccactcaggttg

SEQ ID NO: 376667 - DNA, 100 bp, Homo sapiens
aaggaccccaatgctcctaaaaggccaccgcaagccaaattagagctgagagttgctgtagcaaaagtggaagagttaactaatgtgactgaagatctgc

SEQ ID NO: 376668 - DNA, 94 bp, Homo sapiens
atggcatctaagaaatttgctgttaaattccacttacttacatgatcatttcgagagatgtaatgttgattgctgctgttttttatgtcagata

SEQ ID NO: 376669 - DNA, 51 bp, Homo sapiens
aatgctgattcagactttagacaaagggtatgcccaagaggacagagaacg

SEQ ID NO: 376670 - DNA, 100 bp, Homo sapiens
aggacatctgggggccacaaatgctccttctcctggagacgcaactcaagcgaagctgccgcccatgctgtcgccaccctggctgaggccaccttacaag

SEQ ID NO: 376671 - DNA, 75 bp, Homo sapiens
atccatcacgaccacatttgtcatgatgacagtgacaaggaagaggagttgtacgcatgtcagagaggttgcagg

SEQ ID NO: 376672 - DNA, 75 bp, Homo sapiens
ccaagcttccagcagtctgagcacaacagatcaacctctccacttctcctacacctgcacagttaataagccgtt

SEQ ID NO: 376673 - DNA, 75 bp, Homo sapiens
agcagcccaatttttgcattccaggaggcctttgcccagtttgatgctgagggtgatgggacagttgatgccgag

SEQ ID NO: 376674 - DNA, 82 bp, Homo sapiens
cagaggaactggaacagaggaacattttgaaacgtgtgctatgatttgggcgcagcatacttccagcaaggctccacaaatt

SEQ ID NO: 376675 - DNA, 89 bp, Homo sapiens
cttgtcacagcttaagctgggcatggatttaacaagagtgaccaagaatatggcccaggtgaccaaagccctggacaaggccctgagca

SEQ ID NO: 376676 - DNA, 100 bp, Homo sapiens
ctccaaccacaccctcggctacttgtatgggaagactctctatgataactaccagcgggctgtggcaaaggctggacttgcctctcggtggacaaacttg

SEQ ID NO: 376677 - DNA, 90 bp, Homo sapiens
tctagcttgggttaagggatttggaattgcacttgtttcagagtcaaaccggcacgatgtccaggcaccagaaccagaacaccatccagg

SEQ ID NO: 376678 - DNA, 51 bp, Homo sapiens
gttctccccgggatgcagttagtccaagacctaagtcagtgttagtctacc

SEQ ID NO: 376679 - DNA, 75 bp, Homo sapiens
ggacaagagacgatcattctgcaagcaggcaacctgaatacaggaactggatgcatttcagccataccccattga

SEQ ID NO: 376680 - DNA, 75 bp, Homo sapiens
atctgaagagctatggtgaaacaccactgaagcattgccaaggaagaggatcacctagcccgggtagaagaggca

SEQ ID NO: 376681 - DNA, 101 bp, Homo sapiens
ttaggtgcttttatattcatctcaaaaacaaaattctgaactcaggacttggcaagcgcagttgtgtagcagttgagtaatgctggttagctgttaaggtg

SEQ ID NO: 376682 - DNA, 82 bp, Homo sapiens
cgacaagccgctggcagccgcggatctcaccgccgctcagggtacaatgactcttcttgcttttcacctaagttgaataagc

SEQ ID NO: 376683 - DNA, 75 bp, Homo sapiens
catcagaaattccctcctcggcctggaaaagacagccagcatttccatcgcaggccataaaattttgagtagaaa

SEQ ID NO: 376684 - DNA, 87 bp, Homo sapiens
aacagccagctcagccagctgcctccgcactccatcgaccaggattctttcagtgacctgtatagttcctatgtaatcttttacttc

SEQ ID NO: 376685 - DNA, 49 bp, Homo sapiens
cgtatgtccattaaacttcatcaggtaaagagtgtgtacaacagttagc

SEQ ID NO: 376686 - DNA, 83 bp, Homo sapiens
cttcctcatccttcatacgactgaccctggagctgaaggccaggttttgcagtggtctgaggaaccacgtgaatgttgagggg

SEQ ID NO: 376687 - DNA, 99 bp, Homo sapiens
cgggaaccgtgtccagccagggtcctgggccgcgacctggttctcccggagtctacataaaagcagtctgggcgcaggctggggacccagatggaattc

SEQ ID NO: 376688 - DNA, 100 bp, Homo sapiens
cctctgtcttttctgtgacgggagcaatgctgacctcggtttcctggacccattccgactcagatattcctatcattccggatctggaggaagtacagga

SEQ ID NO: 376689 - DNA, 100 bp, Homo sapiens
ggcagaggagctggcggagagcggcctgcgggcgatcgggccgaggacagctttcctgcccgctttggaggagtccactttgtcaaccagccctggtaca

SEQ ID NO: 376690 - DNA, 75 bp, Homo sapiens
ctgcccaggaaatttatgattgtgtttctcagactgagtatagaaaacccatatagacagctgccttgtaactgt

SEQ ID NO: 376691 - DNA, 90 bp, Homo sapiens
agttggagcctccgccgagtcgcagacaacgcctccgggaggacccgtaatcgacaaaactttgaacgaggctgactgtgccaccgtccc

SEQ ID NO: 376692 - DNA, 100 bp, Homo sapiens
aaatctgttcgtgccttacttgatatggattgattatattccatcacaacaagatattctgcttgccagaagacccaccaaaggcatccatgaatacgac

SEQ ID NO: 376693 - DNA, 101 bp, Homo sapiens
gagaactacaggaacctggcctctgtggacactctgacctggtcacagccagagacacttggaaatcctccatctccccggcatggtcatgtgatggtggc

SEQ ID NO: 376694 - DNA, 75 bp, Homo sapiens
ctgactcttaatatgattcggcagatttatccacagctaaagctgtgctccattgaagtgacttgtgaatcagcc

SEQ ID NO: 376695 - DNA, 100 bp, Homo sapiens
aacatttactgagcatctacttcgtgccatcgccagcctgcgattcgtcttccttatcaaccaggacctcattgccctcatcagggctgaggctgccaag

SEQ ID NO: 376696 - DNA, 50 bp, Homo sapiens
cgaggtcaagctgctgctgctcgctctggcagaattcacagaggcagatg

SEQ ID NO: 376697 - DNA, 109 bp, Homo sapiens
cacgccaccaccctcccagccacctctgaagttgccaggcttcccaacattcttgtctgtgtttttggtgttgagccagacttgaccagggaaggcggcagtattcccg

SEQ ID NO: 376698 - DNA, 100 bp, Homo sapiens
gtttttgaagagaattttctttctactcttacgtcttttattttcttcaacaaagttgagatagtcagcatgttgcagatggaggtttgctcttgttgcc

SEQ ID NO: 376699 - DNA, 100 bp, Homo sapiens
ccagcgcagccgggagacagatgcgaggcggcggtcagtgcttccaggggatccacgttcagaagctgactctgcaggcaagaccgacgttattttcctg

SEQ ID NO: 376700 - DNA, 107 bp, Homo sapiens
caacaggaaagtctaagggatatggctttgtctcctttttcaacaaatggaccattaaaaatctcaagtgacgactttgggaaactctggttatccttcgcaaatga

SEQ ID NO: 376701 - DNA, 82 bp, Homo sapiens
ggttcaacgaggccattgacttcataggtgagggttcagagtatggtgccagtggagaagatgcgctcagcaggatccagag

SEQ ID NO: 376702 - DNA, 119 bp, Homo sapiens
gtctggtccctgttcaacaccctcttcttgaactggtgctgtctgggcttcatagcattcgcctactccgtgaaggtcatagagctgcccaacatccagaaggtcgaagtgtacccagt

SEQ ID NO: 376703 - DNA, 100 bp, Homo sapiens
cggcacagtggtgggcacttcacagctgccgtgcaggccatggactgcgagacacacagtccccagaatgcagtaatagtggccttgtcttcaaaatcat

SEQ ID NO: 376704 - DNA, 76 bp, Homo sapiens
ttcactctggaagatatgctctatgctgcttcatccataaagtgtgtagcccacaatgccctggagtgtgcacgag

SEQ ID NO: 376705 - DNA, 76 bp, Homo sapiens
agagcatagcccctatcactgactttgaatattcccagtttcattcattggctcccatgtactatcgaggctcagc

SEQ ID NO: 376706 - DNA, 100 bp, Homo sapiens
gcggcgctgctcccgggggcgacgggtgaaaggtgtagcagtcactcggcctacacccacagcatcgaccttgtgaacccagcgacctgactgccttggg

SEQ ID NO: 376707 - DNA, 74 bp, Homo sapiens
cacaaatacgctctgttcaggttattggtggcatgccttattccactgctggggattgatgtgtgggagcacgc

SEQ ID NO: 376708 - DNA, 100 bp, Homo sapiens
gccccagctgggggctccttgccaccagtgctgtgtcttaagagctgccatcccggctggagccgacagttagaatcagaaactgggaccacagaggagc

SEQ ID NO: 376709 - DNA, 82 bp, Homo sapiens
gagtcataccttctatctttgattctccatatcacctacaggttgagcaatgtttaaagcgtttgaaaaacatgaatttgga

SEQ ID NO: 376710 - DNA, 82 bp, Homo sapiens
gggagcggcgttggaggccaccgtttccaggtgtcgtgaaaactacccctaaaagccaaaatgggaaaggaaaagactcata

SEQ ID NO: 376711 - DNA, 90 bp, Homo sapiens
gtcgccagaaggaagatggcggatctggaggagcagttgtctgatgaagagaagcattggcatcaacaaaagtcagaattcccgggaact

SEQ ID NO: 376712 - DNA, 128 bp, Homo sapiens
gaatatagacagacctgccgacattgacatgtcatgcctgggtgcagcttctctagctggccttgctgttggtgaccaagaatatggcccaggtgaccaaagccctggacaaggccctgagcaccatg

SEQ ID NO: 376713 - DNA, 51 bp, Homo sapiens
ccacactgcaatgatataggaatgaggtccaccttctccaatccctgcctg

SEQ ID NO: 376714 - DNA, 90 bp, Homo sapiens
cagccctacgggcggatgctgtggccctattttatggatggagaaaccaaggctcagagacatgttgctagttttgctcttgttgcccag

SEQ ID NO: 376715 - DNA, 82 bp, Homo sapiens
tggcacaaagttctctcgatcagggcatacatctttcttcgacaaaggactagacgcttgaagcaaagctgccatcccagaa

SEQ ID NO: 376716 - DNA, 78 bp, Homo sapiens
cacatcaactcggcgccttgggaaccgctcgagcctaccagttgcagcatgagaaagccgaactagaacagcatcttg

SEQ ID NO: 376717 - DNA, 82 bp, Homo sapiens
ccgtgtctcagtccacccaaggtctcctcggatcgcctggagaggcactcggacctgggggatatgagactttctactcgga

SEQ ID NO: 376718 - DNA, 100 bp, Homo sapiens
ccctcctgctccttgcagccatgctcctgggcaacccagtcttctcaagtcttaggattgcagcaacacgctcggctgcccaaacccaaggcgaagacct

SEQ ID NO: 376719 - DNA, 100 bp, Homo sapiens
tagacctcgtaattacattctctcggccagcgcctccgcggaaatcaaagagcaggaggttgtggacaaagtcatggaaacactggacaatgatggagac

SEQ ID NO: 376720 - DNA, 100 bp, Homo sapiens
aggaattcaagtccctgacttcctgcctggactccaaagccttcttattgactcctaggaatcaaggcaaactgtccttggaagaattcatcagaggtgc

SEQ ID NO: 376721 - DNA, 75 bp, Homo sapiens
gctggtgctgtggtcgagtgaccgtgccatctccctcttctacgagctctcggagaatgacttgaacttcatcaa

SEQ ID NO: 376722 - DNA, 101 bp, Homo sapiens
tgttgcatcaaatacttcatatttggcttcaatgtcatattttggtttcattcattggctcccatgtactatcgaggctcagctgcagctgttatcgtgta

SEQ ID NO: 376723 - DNA, 98 bp, Homo sapiens
atgacaaactctggagtaattggagccaagaaatgagtataggtggttatcactaggctaaaactggacaaagaccgcaaaaagatcctcgaacggaa

SEQ ID NO: 376724 - DNA, 100 bp, Homo sapiens
ccaaaattgtggaaaagtcactctgatctgcagcctcatgagagggggcattgctgagcgagggggcgtccgtgtgggccaccgcatcatcgagatcaac

SEQ ID NO: 376725 - DNA, 82 bp, Homo sapiens
ggcctgcagcgggagctggacggcgagcgcgagcggcgcgagaaaccggctcagttcggggaagctgcaggagttcggcgtg

SEQ ID NO: 376726 - DNA, 75 bp, Homo sapiens
aaatgctgtcccaaccttactggagctgtaactgaagttcgtgaagtcaccagaaaatcagtccctcgtaattcc

SEQ ID NO: 376727 - DNA, 90 bp, Homo sapiens
gctgccgggattttggaggccggggccgcgctgagggcgcccagctggtggtcaaggtgaagccccatgacaaggatgccaaaatgaaat

SEQ ID NO: 376728 - DNA, 83 bp, Homo sapiens
tgggccggaccagctggtgctgcgcggcgcaggtgtccctggccagtgtccttccacctgtccacaagcatggggaacatctt

SEQ ID NO: 376729 - DNA, 75 bp, Homo sapiens
ctgcctgtgccccagctggtggagcagtttttgcaagaaaggatcaaagtgaacggaaaagctgggaaccttggt

SEQ ID NO: 376730 - DNA, 108 bp, Homo sapiens
cccaccatgtcagacgcagccgtagacaccagctccgaaatcaccaccaaggtgaaatgacaatggatgctctgttggctcgattgaaacttctgaatccagatgacc

SEQ ID NO: 376731 - DNA, 74 bp, Homo sapiens
gtgcaatgccccgggctgtggacagggccatgctatgatagtggaagcttatccaaaataatagatccagaaga

SEQ ID NO: 376732 - DNA, 100 bp, Homo sapiens
tcatgatacgaggcgaatgggtgacggccgggcaggagcaggcatgataacccaacattcaagccgcccgtctcctcatcagcccggcagccgaggtggt

SEQ ID NO: 376733 - DNA, 83 bp, Homo sapiens
catgcctcccccaggacaagtgtaaagtgaagatcggtcgtcgcttcagtgaagaaaggtagctgtagccatacctaatagac

SEQ ID NO: 376734 - DNA, 74 bp, Homo sapiens
tctcgctcggctgcgggaaatcgggctgaagcgactgagtccgcgatggagagacggagtttcaccacattggc

SEQ ID NO: 376735 - DNA, 51 bp, Homo sapiens
agcaagaaagaccatcaagtttaccaattgtgattgctagcattatgtgca

SEQ ID NO: 376736 - DNA, 100 bp, Homo sapiens
ccttctctagaccttgccaagatggcacagggtgaagttgaacaaattgctatgatgaaaccaaaaggccagactgaacacgatgagggtatgcttgaat

SEQ ID NO: 376737 - DNA, 90 bp, Homo sapiens
ctcaagatggagactttgactttgtccagctcttctatgaactaactgatatcatgaataaggtctggaacaagattcagaagagaggca

SEQ ID NO: 376738 - DNA, 95 bp, Homo sapiens
atgatccacctgcctcagcctctcaaagtgctgggactacaggtgtgagccaccgtacccagcctcgaaggcgagaaccactgtctctgatcaac

SEQ ID NO: 376739 - DNA, 83 bp, Homo sapiens
tggcgctgagcctgcagccggccctgccgcagcctcccgcgacgatgcccctcaacgttagcttcaccaacaggaactatgac

SEQ ID NO: 376740 - DNA, 75 bp, Homo sapiens
gaaagagctctctatacactttgttcccgggagctgtcggctggtggagggcaaactctttgattctacaatagc

SEQ ID NO: 376741 - DNA, 82 bp, Homo sapiens
ccgacatctacaagatccgggagatcgcggacgggttgtgcctggaggtggaggggaaggaccctgacctggaggccaagcg

SEQ ID NO: 376742 - DNA, 100 bp, Homo sapiens
gattgcactgctgcagtccaggctgaagacagagggctctgatctgtgcgacagagttagtggttacttggatgattgtacctgtgatgttgaaaccatt

SEQ ID NO: 376743 - DNA, 75 bp, Homo sapiens
agaagagcagagcggagggagccccagacacgggtgcagcccggaatcccgaggatgtggaccgggagcggcgag

SEQ ID NO: 376744 - DNA, 100 bp, Homo sapiens
gtaatatgtgcgtggtccagaaaccggaggagcagtacaaagtgatgctgcagggcagcgggtggcatgagacgtgggaacatgggccacctcacacgga

SEQ ID NO: 376745 - DNA, 50 bp, Homo sapiens
ttttcctgcatggattgggagatactggacaatgcagatcttcgtgaaga

SEQ ID NO: 376746 - DNA, 50 bp, Homo sapiens
cgcagtggtcgcttcttctccttgggggctgaggccatggttctggagag

SEQ ID NO: 376747 - DNA, 100 bp, Homo sapiens
gcggcccagcctcataacagggatcatgaaagacagtggtgtaaaaggaagagaatgtctcctggacctaattgccacaatgctggtactacagtttatt

SEQ ID NO: 376748 - DNA, 98 bp, Homo sapiens
cgggacggagcggccggggcctggggctgcctgccgggcggccgggcgcggcgagcccaggtaaaaagatggcctatcagaaggtccatgcagatcaa

SEQ ID NO: 376749 - DNA, 76 bp, Homo sapiens
gttttttctaatggctattcaaggcaccgaccgtcacgagctaacttcctggaagagctttccgtctattttcaaa

SEQ ID NO: 376750 - DNA, 85 bp, Homo sapiens
tgaacaaccctcaggactttattgattgcttcctgatgaaaatggagaagggcacaaccatattaacttccctcacttctgtgct

SEQ ID NO: 376751 - DNA, 83 bp, Homo sapiens
cgtccggattggcagtggttttgacaacatcgacatcaagtcggccggggatttagggggatatgagactttctactcggaat

SEQ ID NO: 376752 - DNA, 50 bp, Homo sapiens
tcgtgaaagtgaaccccaaggcggaggtgctgcgacaagagactttggac

SEQ ID NO: 376753 - DNA, 75 bp, Homo sapiens
tcactgtgtcttcagaaagatccttccaaaaggagcggcctattgccaattcatggacatgctcttccctggctg

SEQ ID NO: 376754 - DNA, 100 bp, Homo sapiens
ctgcagatgtctttttccggcagattttggctctgactggatggggttaccgggttatcgctgggtcttcacggcttctctgcccaggggccagaaccga

SEQ ID NO: 376755 - DNA, 50 bp, Homo sapiens
caatgagtaaacatattcctatggtcagtaggacagaaggtaacattgat

SEQ ID NO: 376756 - DNA, 75 bp, Homo sapiens
tgcaacacggccactgtgtacaagatatgtgcctggatgcagctcacctccgaacttcatggaggaacacggagt

SEQ ID NO: 376757 - DNA, 98 bp, Homo sapiens
ctacatcctgcgggtgcctttgaaaatcaacgacaacttgagcacaggtaggtgatgctctgatgctgctgcctcttatgaattgacgacaggtgcag

SEQ ID NO: 376758 - DNA, 100 bp, Homo sapiens
tgagcctcctgcaacacctgcggcctcactgggacccccaggaggtgaccctgcaggaggcaggtggaagtcatcataaagtttctgtttcacccgtcgt

SEQ ID NO: 376759 - DNA, 95 bp, Homo sapiens
cggaggccgcccccgcggcggccgcgctcttcgcctggactaatagggatgccaaaggaaaaatatgatcctccagatcctcgcagaatttatac

SEQ ID NO: 376760 - DNA, 101 bp, Homo sapiens
tttcatcagattttaccctgaaaatcacaaggacatccatgtgcacgagacttccagtgtcctactattgaagcctgcacctgctgcattgctgttttcct

SEQ ID NO: 376761 - DNA, 100 bp, Homo sapiens
aatgggacatcaccccagagattccctgccctgattccaggagaacctggcagatcttttgaggatgctccaggatgaaacgccataggcctgtcagcag

SEQ ID NO: 376762 - DNA, 83 bp, Homo sapiens
tcagcgtgctgtccaccatcgagcagtatgccgccctggccacggggactctcttctggatgaataccgtagcagtaggcagg

SEQ ID NO: 376763 - DNA, 75 bp, Homo sapiens
ctgtggataacgggaggtgaatttccatgtcaacatagtcctgtgcgtcagcatttatcccgtttgccaaccatt

SEQ ID NO: 376764 - DNA, 90 bp, Homo sapiens
atgtggttggaatccttgctgtgctgaatcctggctgtgtgaccccaaaattaaacaaccaccatgtcgagcaaaaaggcaaagaccaag

SEQ ID NO: 376765 - DNA, 88 bp, Homo sapiens
aagtgaagtggttgcggtaacctggcctgggcctgaagtgagtgagaggcacatgaaggctgctgagcttcgtgcttatctgaaatct

SEQ ID NO: 376766 - DNA, 100 bp, Homo sapiens
cccagtgcccacacctggctttggcaatgtggaagagattcctgagaatgacaggtgagggcttccacaactaccaccactcctttccctatgactactc

SEQ ID NO: 376767 - DNA, 90 bp, Homo sapiens
ttcagaagctggtcgccgccggcagagctcatcagtcaatcagtcagcttctcagagtagcaatccatgtgtccagagaaaatcatcaca

SEQ ID NO: 376768 - DNA, 99 bp, Homo sapiens
aaacttctttccattgtcctgcccgtttctgcggacttgttctgaggccgagctgtcacctgtgtcattcactcacaatggaagaaatgaagaagactg

SEQ ID NO: 376769 - DNA, 75 bp, Homo sapiens
gtggtattgtggaaattcccagaggactttggagaccagcatcggtgtgtggctatttttaaagacaaacagaac

SEQ ID NO: 376770 - DNA, 83 bp, Homo sapiens
cgcaggcagtggccacaagagcgaggagaagcgagaaaagatgaaacggaccctaaaagtagcagctctgaatccttaagtga

SEQ ID NO: 376771 - DNA, 100 bp, Homo sapiens
caaggaagtagcacaagttgggaagaggatcacctagcccgggtagaagaggcaatcacccgtatgcttgtgtgtgccctgaaaactgcagagaatccac

SEQ ID NO: 376772 - DNA, 75 bp, Homo sapiens
gggccacgcacctcgtcaccaaggccaagctcctggatctcccaggtatcattgaaggtgccaaggatgggaaag

SEQ ID NO: 376773 - DNA, 99 bp, Homo sapiens
ttcaacttgggcttctcgggcaagttctatcatactgccatctatcacacctgtgaggcctccaacttccagtgccgaaacgggcactgcatcccccag

SEQ ID NO: 376774 - DNA, 82 bp, Homo sapiens
cgggggcgtctttcagagcattacgccaatgttttcagttgcaccaagcttagccaccaatgcatcagcagccgcctttaat

SEQ ID NO: 376775 - DNA, 100 bp, Homo sapiens
cagatggcagccagtcagtggtggagtctctggcatctctatcccctatgaggcaccacgtaagacctcctgcccttagctctcttgctcaccacccaag

SEQ ID NO: 376776 - DNA, 98 bp, Homo sapiens
cggggtctcccggagggccagagtcgttgaatccttggcctgaatatatttacacacgtcttgagatgtataatatactaaaagcagaacatgattcc

SEQ ID NO: 376777 - DNA, 50 bp, Homo sapiens
gggcagcaggcccctcctgcgcacagaacccttaggagaaatcttgagag

SEQ ID NO: 376778 - DNA, 100 bp, Homo sapiens
gatcgaatcttcactcccgctgtctcagcagtctacagcacggggccgttgacatttagggatgtggtcatagaattctctcaggaggagtggcaatgcc

SEQ ID NO: 376779 - DNA, 82 bp, Homo sapiens
tccggaagaacggtgaatttcccccgcaggtgtccctggccagtgtccttccacctgtccacaagcatggggaacatcttcg

SEQ ID NO: 376780 - DNA, 90 bp, Homo sapiens
gcggcggccggcgggaccataagggcttaactcatatatttaacccccctccaaaaagatgtacagttacccagcacgtgtacctcctcc

SEQ ID NO: 376781 - DNA, 71 bp, Homo sapiens
gcgtcgagaggaccatcctgggtgctggccctgtgctggagcttccaggccgagcggcccgcgttaaacgt

SEQ ID NO: 376782 - DNA, 101 bp, Homo sapiens
gcagaacgcacggctcaactcatagccactgacaagactttaagcaagagacggagagttaacatctaatctggaggaagaccctggaaggagccagcccc

SEQ ID NO: 376783 - DNA, 75 bp, Homo sapiens
catgagtcgcttcaagtttatcgttgaagtggtcacctcctcccttcctgaactgtatgtggagaaagtgctgga

SEQ ID NO: 376784 - DNA, 104 bp, Homo sapiens
gctgaccaggggcttgagagctgggttctattttccctcctcaaactgactttgcagccacggagagtttcagtcattcagtcagtaccgctgtaagactgcca

SEQ ID NO: 376785 - DNA, 98 bp, Homo sapiens
tcaggtgtggagaagggtttcagaacacttctgggaatccgggcccaagggatgcagacagtgatgaaaacgacaaaggtgaaaagaagaacaagggt

SEQ ID NO: 376786 - DNA, 100 bp, Homo sapiens
cttgggggtcgagcacataacggggttcgggtgtctcgtgtgtgaacatcacagtgccggtggtggtgtgcacattgagccccggtatagacagttcccc

SEQ ID NO: 376787 - DNA, 75 bp, Homo sapiens
cataagtggaattttggagatattcaaagagttttccgtctgatgaaggttggccatttgcaaagtatcttggag

SEQ ID NO: 376788 - DNA, 90 bp, Homo sapiens
agcaagttagtggattaaaatctcccaagaggaatgacaaacaaccagctcttcagcactttcatttggacccgtggatacccattgaac

SEQ ID NO: 376789 - DNA, 101 bp, Homo sapiens
agccgccatggcctaccacagcttcctggtggagcccatcagctgccacgcctggaacaaggaccgcacccgatgtttcgtctgaactcactttctgcttt

SEQ ID NO: 376790 - DNA, 98 bp, Homo sapiens
gagagcgagctgagtggttgtgtggtcgcgtctcggaaaccggtagcgcttgcagcatgctcttggagtttgacaaggagttgtctgtctttaaggac

SEQ ID NO: 376791 - DNA, 75 bp, Homo sapiens
tcggacccacggagccggcagcccagcactccgcaactacagtttctcaacagatggtttcagtggctcaggagg

SEQ ID NO: 376792 - DNA, 100 bp, Homo sapiens
gggaaagggtgtcccccaacgatctctcaaaggccttggttctgacagaaattggccccaaacgtgaccctgcgaccctgaagctgttcctgagtaacat

SEQ ID NO: 376793 - DNA, 82 bp, Homo sapiens
gagctggacgtgtcccggaacgcccgcggcgccatggctcacgtcggctcccgcaagcgctcgaggagtcgcagccggtccc

SEQ ID NO: 376794 - DNA, 75 bp, Homo sapiens
ctgtgctccaggactccctcaataattgagggccccaaggctgttgcagctcctcgacctgatcggttggtcaat

SEQ ID NO: 376795 - DNA, 100 bp, Homo sapiens
catcacaagtcgcctgcagccgcccgaagagccaagagtcagtattccggccagcttcacgaagtcagagaggactctgcagacagtgggcccatcccat

SEQ ID NO: 376796 - DNA, 83 bp, Homo sapiens
cctgcgcaaggagggactccccgtgaacaacatcttccagcagatctcccccgtgggggaacgcccttttgcttgtgactggc

SEQ ID NO: 376797 - DNA, 73 bp, Homo sapiens
gtgaggcccccgaagacatcaccagggctcagagtttgtgcctgcagatgggaacgcagcctgcgtgaaggtg

SEQ ID NO: 376798 - DNA, 83 bp, Homo sapiens
tggagggatgcttgtatggtctccatatcacagtatcccagatgccaaatgcccttcgctggtactgggaagacaaagataat

SEQ ID NO: 376799 - DNA, 75 bp, Homo sapiens
ccgtcctctgaggcgacggccgcggctgcacagagtcatcctttttgaacttccatgactcagactgcgaaccca

SEQ ID NO: 376800 - DNA, 82 bp, Homo sapiens
ctctggctgtgcgcgctggcgctgagcctgcagccggccctgccgggtggtgaaggaggagatctttgatgacaatgccaag

SEQ ID NO: 376801 - DNA, 88 bp, Homo sapiens
gaaaatgatatgctggctgttaaccttcttggacacttaatgattgttggcaagaaatgtgctgctgatctgggcctgaataagggtt

SEQ ID NO: 376802 - DNA, 100 bp, Homo sapiens
caggccgggaagcttctgcgagccctagcgctgcggccccgcttcctggcggccgggtcccagaggaagtatcattctgcaaaggaggcatatgaacaac

SEQ ID NO: 376803 - DNA, 82 bp, Homo sapiens
ggacagcacctcatcccctggatgggggaccacaagatcctcatcgacaggcagcctgcttctgcaaagtggtacgatcgaa

SEQ ID NO: 376804 - DNA, 74 bp, Homo sapiens
tgcaacctgcagcacatcagcgaccgggagaacatagacgatttcaacactacacttgcacaatgtctttgaaa

SEQ ID NO: 376805 - DNA, 90 bp, Homo sapiens
aaagaaatctgagtgatttattagagaaagttaaatgggctaagggtaaaatccagtacaaggaatatatcattgaaggatttgaaaaca

SEQ ID NO: 376806 - DNA, 75 bp, Homo sapiens
tcatgagagcgcggccggaggacagatttttgatgaaattgagtcatgaaactgtaaccattgaattgaagaacg

SEQ ID NO: 376807 - DNA, 102 bp, Homo sapiens
cggaggaggttcgaagctgagtatgtgacaggtgactattatatggttaaaaagattttggaggaaaacagttcaggtgacttgaacataaattgcgtagat

SEQ ID NO: 376808 - DNA, 100 bp, Homo sapiens
cacggagcaaccccaagtcaccacaaaaacctatcgttagagtcttcctgcccaacaaacagaggacagtggatagagtggtgacttccaagcttcatgc

SEQ ID NO: 376809 - DNA, 153 bp, Homo sapiens
ggcccagggctcacttggcgctgagaacgcgggtccacgcgtgtgatcgtccgtgcgtctagcctttgcccacgcaggtgcaggaactgcagggccagcggcaggaggaggccatgaaggccgagaaatggctatttgaatgccgcaacctgg

SEQ ID NO: 376810 - DNA, 75 bp, Homo sapiens
ggatagtggagctgcccactctagaggagctgaaagtagatgagtgaaaaatgtactctgacctgaatcctgaat

SEQ ID NO: 376811 - DNA, 100 bp, Homo sapiens
tgtcaaggacctcgtatgtcaacaggccctgatatccatcacttcatcatgggatctgaaggcagccaacatccctctggtgtcagaacttgccatcgat

SEQ ID NO: 376812 - DNA, 100 bp, Homo sapiens
tggacatcggcattggcatgttgtacaggactatgatttaatctccaaagaaccaaagccttttgtatttgagggaaaagtacgtggtcctattgttgtt

SEQ ID NO: 376813 - DNA, 75 bp, Homo sapiens
ggaaggagactggatgatagaattgtcccgcggcagtgctggtggccatggttcccgtagccagaaggagttgcc

SEQ ID NO: 376814 - DNA, 95 bp, Homo sapiens
tcaaccaggacgaccctaatgtgctggagatctggaaccttgtgttcatccagtataacagggtgtacaactatgagcctttgacacagctcaag

SEQ ID NO: 376815 - DNA, 51 bp, Homo sapiens
ggtcctggagtacaatgccattggaggtgctggagaatctggtaaaagcac

SEQ ID NO: 376816 - DNA, 90 bp, Homo sapiens
gcagatgcagtacagtattatcagttcctgcttgctggccgtggagccgccaccaaaatgcagattttcgtgaaaacccttacggggaag

SEQ ID NO: 376817 - DNA, 51 bp, Homo sapiens
atctacttgcccaggatcacacatgtgcccagctggctggaaacctggcag

SEQ ID NO: 376818 - DNA, 112 bp, Homo sapiens
gagccggggccgctgtgagccgagaccgcgggccgcggagctcgggcggccggcgcggagctaccaagtcaggattgttacccccaccacctgcgctccctccaagaccttg

SEQ ID NO: 376819 - DNA, 100 bp, Homo sapiens
cggcttctctggcgttggccagtcagccacagaaaccaatagagccatggcgactccctctgctgccttcgaggcccttatgaatggtgtgacaagctgg

SEQ ID NO: 376820 - DNA, 100 bp, Homo sapiens
cagccttcccagtagctgggaccacagaattcagattttggccgtttttggtgatcatcgtgattctaagcgcactgttccttggcacccttgcctgctt

SEQ ID NO: 376821 - DNA, 75 bp, Homo sapiens
cgccgaggctgggctgaggcgccgcggtaccatgaggcgccggggcaagattcttgccaagagaattaatgtgcg

SEQ ID NO: 376822 - DNA, 100 bp, Homo sapiens
cgaaggtctcagagctttacgatgtcacttgggaagagccagtcttggtgctctgtgttcacctggttcatctgaggagctgcatctaccctgcccatgc

SEQ ID NO: 376823 - DNA, 75 bp, Homo sapiens
aggcctccccagccatgtggaactatatctccacaggaccttcttggttaaatcagggactacttctgaactcta

SEQ ID NO: 376824 - DNA, 76 bp, Homo sapiens
gtcctctgaaaactcgggaatttgtcactgaaatggtgacaggagatgtgagccctctggccaacctacctaaccc

SEQ ID NO: 376825 - DNA, 100 bp, Homo sapiens
tgaaccccaaggccagacagtattcttgatataccactgtatgctgcacagactcagattgatggacaacttttcttaattaagcaccttttgatacttc

SEQ ID NO: 376826 - DNA, 88 bp, Homo sapiens
cagcgcccgcgccccgccgctgagccgtcgcggagccgcgcagccctcggagcacggatgaggagaacaatccccttgagacagaata

SEQ ID NO: 376827 - DNA, 75 bp, Homo sapiens
acgttttgaaggatgagcttcaactctatggaggctacatccagaagatcaagtcgggagaggaggactttgagt

SEQ ID NO: 376828 - DNA, 83 bp, Homo sapiens
agcgcggggaaccaaggagacgctcctggcactgcagaaatcgagctatagcagattatcttcgttcaaatggctatgaagag

SEQ ID NO: 376829 - DNA, 50 bp, Homo sapiens
ctgggcattagtgataatggagattggtgctgaagacatggacggcttcc

SEQ ID NO: 376830 - DNA, 75 bp, Homo sapiens
taccattgtgaaagaaggttgggttcagaagaggggtgaagctttgttctaagaatatttgtttcatctagttta

SEQ ID NO: 376831 - DNA, 100 bp, Homo sapiens
tagccctccttgcgcctccgattcccaggtttttcgttggaatatacgttgcacatttatggcgattctgagtgtgagggcagacttctgccaggctcag

SEQ ID NO: 376832 - DNA, 98 bp, Homo sapiens
ttcagatggccaagtacatcaccaagcggatactctgttttcaaggaagctgaatgggaaatacagacttgagcgacttgttccaactgcagtgtatc

SEQ ID NO: 376833 - DNA, 76 bp, Homo sapiens
acaagaagttgagaccgagaatgtggaaacagagatgtggtcttgctatgttgcccaagctgatcttcaactcctg

SEQ ID NO: 376834 - DNA, 75 bp, Homo sapiens
ttgacaaggtccagcctggggacagagtgaatgttacagctccagggcccacaacggcagtgtcctacatgtcgg

SEQ ID NO: 376835 - DNA, 100 bp, Homo sapiens
caggaactggatgccaactctgcccttatggaattggacaaaggaatgccaagaagaattggcaacgcattcaggagcatttcttttttgcaacatttca

SEQ ID NO: 376836 - DNA, 75 bp, Homo sapiens
cggggatagtggagctgcccactctagaggagctgaaagtagatgaggatgagagggccttaccaaaaggagatt

SEQ ID NO: 376837 - DNA, 50 bp, Homo sapiens
ctgggctttcgggtcccgcgcccagccacggagcatcgcctgaagccgtg

SEQ ID NO: 376838 - DNA, 82 bp, Homo sapiens
cgactccttgcagctgctgtcagcatggcccaggctcctgctgacccgggcagagaagcccatcatcttcgtttcggacaga

SEQ ID NO: 376839 - DNA, 82 bp, Homo sapiens
ctttgggcggggcggagccgagagccacactttcaagtaaaccagaaatggaagcaactgtcgagattgcagcggaatatga

SEQ ID NO: 376840 - DNA, 117 bp, Homo sapiens
gccgccgcctgccctcagccgcccgctggccgggagcggagcccctgtggacttacagattccagtctgctgttagatgattattcatccaagttgagccccaaaccaaagagagcc

SEQ ID NO: 376841 - DNA, 83 bp, Homo sapiens
ccgggagcagggagggctccgctagcccggggggccctccccgcggggcagatgatcctgtttgaccaaactcagagatcaat

SEQ ID NO: 376842 - DNA, 100 bp, Homo sapiens
gcgcctgctgccgggttgcgctccgtgcacctcttgcggagaaccatggagtctggcagtaccgccgccagtgaggaggcacgcagccttcgagaatgtg

SEQ ID NO: 376843 - DNA, 73 bp, Homo sapiens
caagaggcgtttctataagaattgaaatacccgcagcccaaagggcagaagaagaagaagatcgtcaagtacg

SEQ ID NO: 376844 - DNA, 82 bp, Homo sapiens
gccgatccagcctgcggagcctgtggggcaggtggtgatggcacttctcaaatactggccaaagactcacagtccaaaagaa

SEQ ID NO: 376845 - DNA, 50 bp, Homo sapiens
cggcccgccgggcccgcagtgtgttccagggtctccctccactgctgtag

SEQ ID NO: 376846 - DNA, 83 bp, Homo sapiens
cccaaattggaatctaagccatctaatggagatagcatgttggcagataaattgaacatgactccagaagaagctgaaaggtg

SEQ ID NO: 376847 - DNA, 100 bp, Homo sapiens
tgtgtatcagcagagaccaccgaagactgcatcgccaagatcatgcatcctggtggggaagaagttttaagggaacaagctggaggtgacgctactgaga

SEQ ID NO: 376848 - DNA, 95 bp, Homo sapiens
ctagtcaagaagaaagccagaggaagccattgcccactgctgccgcccagtgttgcagatgtttggagcatgggcatactgttatatgttcttat

SEQ ID NO: 376849 - DNA, 75 bp, Homo sapiens
agacaatgaatctagaagtgcaggcgatggaacagactggggtgggatgtgtgtgggctgaaattccgagctgcg

SEQ ID NO: 376850 - DNA, 74 bp, Homo sapiens
ggatagcgtggagtgacggtgccaccgcggcgcttatgccccgtggtgccctgcttgtcaaaatcttcaaccgg

SEQ ID NO: 376851 - DNA, 90 bp, Homo sapiens
cggaacctcagtgactcgccgataatcgaggacctgccaataacgcgatgaggctattgagggcacctacattgacaagaaatgcccctt

SEQ ID NO: 376852 - DNA, 100 bp, Homo sapiens
cagattcagtggcctgcattgacatatctgaagagatggattaagaatgctttggattaaggattgtggagcacatttcaatcattttaggattgtcaaa

SEQ ID NO: 376853 - DNA, 75 bp, Homo sapiens
ccaaggtcctagaactcaggaagagtgatgtggttttggataaggtgaccaagaatatggcccaggtgaccaaag

SEQ ID NO: 376854 - DNA, 97 bp, Homo sapiens
gtctctccctgaagcccaccggtccccaacgcatcatgccagggagccaagcgtcctgcccggccgaagtttactggatttcttaaaagatggagaa

SEQ ID NO: 376855 - DNA, 75 bp, Homo sapiens
ccttcttcctcatcatcgtcttcaggaagccagacagattcaagtattgaaggcactttgtgagtgtgccctcca

SEQ ID NO: 376856 - DNA, 100 bp, Homo sapiens
caagaactggctcaagaaatttgcctcgaaaaccaaacaatgcagatcttcgtgaagactctgactggtaagaccatcaccctcgaggttgagcccagtg

SEQ ID NO: 376857 - DNA, 50 bp, Homo sapiens
ggtttgttacagttttcaacagggtggatattccatctattataaccaag

SEQ ID NO: 376858 - DNA, 90 bp, Homo sapiens
ctgtcagttgcgctgtgttcctctctagtcacaagagccttggggaagacagttggaagctcagacatgactactgccagaacttcgccc

SEQ ID NO: 376859 - DNA, 96 bp, Homo sapiens
ctttctcttcctctgggtcacaggcagttgcatttgctggtctggcctttgcgtccttctacctggcagggaagttacactgcttcacaccacaag

SEQ ID NO: 376860 - DNA, 73 bp, Homo sapiens
gccgccttgctgctgctcaaagctgctgccgccccttgggctaaaaggtgaatccagtctggaaaaagtgttt

SEQ ID NO: 376861 - DNA, 90 bp, Homo sapiens
cattcaaggaaacaaatcaactaaaaacaaaattgccagaaaatctttcctctaaagtcaaactggctgctttgtaccgcctcagtggag

SEQ ID NO: 376862 - DNA, 75 bp, Homo sapiens
aaggtctccaagtcccagctcaagggagtggagcttggtttcgggatctcggtgctgcagacggcgagacctcct

SEQ ID NO: 376863 - DNA, 100 bp, Homo sapiens
ttgagccctaccttactggacagtcaaatcagcaaaccagtccagctacgggggcccagccagccagcagctgagtgggggttacggaggcggctacggt

SEQ ID NO: 376864 - DNA, 100 bp, Homo sapiens
tggagtcggacctctatgccatgaacttcaatcccatcatttccagaaaggacatcacaggagtctgtccttgcagtggctggagatgaagaagttataa

SEQ ID NO: 376865 - DNA, 100 bp, Homo sapiens
ggaaacgccgaggaacccggctgaggcggcagagttgtggaaagtaaaaatgtagccctaccaaaaggaactattgtactggcttctccaggctggacaa

SEQ ID NO: 376866 - DNA, 75 bp, Homo sapiens
tttcggcggagggaccaaggtggagatcaaacgtctgctttggagactttccaacaatgcccaagctgattcccc

SEQ ID NO: 376867 - DNA, 97 bp, Homo sapiens
agcaatgtttgaacaaactcgaagaacagctgtggaaagaagttgcaaaacactggctgattcattggaaagtaacatctcggaccaagatagtgat

SEQ ID NO: 376868 - DNA, 75 bp, Homo sapiens
acgcttcttctggaagaccagccaacaggcatcatggccgccctcagaccccttgtgaagcccaagatcgtcaaa

SEQ ID NO: 376869 - DNA, 112 bp, Homo sapiens
cggctggagagccgggagtcgctgggtgcgtggggctgcctcgccgcgtctcgccacggtttacccaaggtccagcctagcccctaggcaccatgtcggacagtgatctagg

SEQ ID NO: 376870 - DNA, 88 bp, Homo sapiens
gcgacgttattctgatctcaccaccctggtggcctttccctccagctctgtctatcctaccaagaccctgctctcagcggcccacgag

SEQ ID NO: 376871 - DNA, 80 bp, Homo sapiens
gccgcgagcgcggcctgcaggaggtccagccctgctgggagttttctgccacacagatttgcggaagaacctgaccgtgg

SEQ ID NO: 376872 - DNA, 101 bp, Homo sapiens
gcgacatgcctttgtgcctttcccaggccgaatacatcaagcaatggtaacatctttaaatgaagataatgaaagtgtaactgttgaatggatagaaaatg

SEQ ID NO: 376873 - DNA, 90 bp, Homo sapiens
gacttttcttatgctgggatgtgccttagaggattatggtgccctgcaggagtcattaaatcaaaacttcatgctgatcatcacccaccg

SEQ ID NO: 376874 - DNA, 101 bp, Homo sapiens
cagacgagtggccaggcttctggggctgactcaactgatgtattcggaaggaagtgacattgtacctcagagtaatgagacagctctccactactttaaga

SEQ ID NO: 376875 - DNA, 83 bp, Homo sapiens
atataactcctgagaatagtggttcttaactctaattgtaatggctccccatttgccaatagcgatgcctgcttttccctggc

SEQ ID NO: 376876 - DNA, 97 bp, Homo sapiens
gccagcacattgtgaatgacatgaaccccggcaacctgcacctgttcatcaatgcctacaacagatttagtacctcaagacaaactcttatgtggat

SEQ ID NO: 376877 - DNA, 82 bp, Homo sapiens
gaaacctttccaacacagatgtccaagctgccaagtattgcacatctattacaaatttcctggttatgggaggattccagct

SEQ ID NO: 376878 - DNA, 100 bp, Homo sapiens
ttccacttgatgtcatcacgcagaaggggtgaaagagactcggtgacagatacaggaagtcaacttcaagcagattgacttgaaacgggatctcatttag

SEQ ID NO: 376879 - DNA, 74 bp, Homo sapiens
aaaccttcgactatgcagagacatgagatggtagccaacccctcagctccaaagacaacaggccctccctctgc

SEQ ID NO: 376880 - DNA, 59 bp, Homo sapiens
aattttgtcagtcctgttcgaaaccaaggtgcatgtgagggaaccctggcttgttcaac

SEQ ID NO: 376881 - DNA, 100 bp, Homo sapiens
gaagaaaggaagacggactcgtatcggtaccccaggacagaaccccttgttcgtggaggctgaggagaaagtctcctacaactgctgccgccagggcact

SEQ ID NO: 376882 - DNA, 100 bp, Homo sapiens
tcgagagagcattacaagccagcctctgggaccgagatggaattactctgatcaccaaagaggaagcctctggaagttctgtcacagctgaggaagccaa

SEQ ID NO: 376883 - DNA, 75 bp, Homo sapiens
tggctggctttgataagtacaagaattactaatttcagctggattcaatttgttgtcagttgattctgtagtaag

SEQ ID NO: 376884 - DNA, 75 bp, Homo sapiens
gggacttggtttgcctatgtcaagatcacaggttgtaaagctctctgaaatagtgaccttagcgaagcaagcaca

SEQ ID NO: 376885 - DNA, 101 bp, Homo sapiens
gtgcgacaaggagttcatgtgggccctgaaaaacggagacttggatgaggtgaaagactatgtggccaagggaggaaataatgctggccatacagttgttg

SEQ ID NO: 376886 - DNA, 78 bp, Homo sapiens
tttctacgcattgattccatgtttgctcacagaggcggggtttcaccatgttgcccagactggtcttgaactcctgag

SEQ ID NO: 376887 - DNA, 149 bp, Homo sapiens
agccggaaggggcaagacgggttcagttcgtcatggggctgtttggaaagacccaggagaagccgcccaaagaactggtgctggagaatctggtaaaagcaccattgtgaagcagatgaggatcctgcatgttaatgggtttaatggag

SEQ ID NO: 376888 - DNA, 82 bp, Homo sapiens
tcgcacgcatgattgtcggcatctcacagatccagacatttaatgtggatgcaccatgccagaccgtggaagatttaacgaa

SEQ ID NO: 376889 - DNA, 75 bp, Homo sapiens
gtcatcactacgacagcggcgcatgctactgattcagcacttaggcggccttctgatctgtttaccacgtgagca

SEQ ID NO: 376890 - DNA, 100 bp, Homo sapiens
cccaacccccacccatcgcccacccgaggacgtccccccagccggagtcgggcatcaagcgactgagaaataaagtgtagtccttctgaaagccccttaa

SEQ ID NO: 376891 - DNA, 90 bp, Homo sapiens
tcgcaactgggcccgcgcgcagagaagctcgcagaggctcagcgcaggtttgctacacttcagaatgagcttcagtcatcactggatgca

SEQ ID NO: 376892 - DNA, 50 bp, Homo sapiens
aagtttccagacaatccagagaaaatattgtgggtaatgctaggcctaaa

SEQ ID NO: 376893 - DNA, 49 bp, Homo sapiens
ttcctcacccgcgcctgcgacctcgaacccagcgggtgccgcttctcca

SEQ ID NO: 376894 - DNA, 96 bp, Homo sapiens
aaacagtacatttctgcaattgagaaacaggcacacaagtgtgaggagttgctaaatgctcaggtgcagacacacaagccttacttggtgaccttc

SEQ ID NO: 376895 - DNA, 100 bp, Homo sapiens
tgtggtgcataagaacttcgacctccggccgggcgtcattgtcagttttgaggcagctgtgccatcaaatagccacattgtttcggaacctggaaagaat

SEQ ID NO: 376896 - DNA, 100 bp, Homo sapiens
aatggattggagtgaaccggagaccccgaaaacggaagcgcagggagaaggaagaggtgtttgaaaaggtcgttgaggacttccacatggagattggcac

SEQ ID NO: 376897 - DNA, 100 bp, Homo sapiens
gaggggtgaatcagtatgttgtgcaagaggtactgtccatcaaacatcttccaccacagcttagagacgtgtactcatatgatgaggatgacatggtcct

SEQ ID NO: 376898 - DNA, 100 bp, Homo sapiens
tgcagaaagaaatagcgtctgagatcataggattactgatgctggaggcgcagttgtgtagcagttgagtaatgctggttagctgttaaggtggcgtgtt

SEQ ID NO: 376899 - DNA, 96 bp, Homo sapiens
atcaatgagtctctgcagttgaatctgacaaagatcgaacagttgtgctcaggagtattttatacagaaatcttgtgaaaccactgcccaaccaga

SEQ ID NO: 376900 - DNA, 90 bp, Homo sapiens
acgccatgtcgggttattcgagtgaccgagaccgcggccgggaccgagggtgttgggatggccaccaactgggggagcctcttgcaggat

SEQ ID NO: 376901 - DNA, 100 bp, Homo sapiens
ggtgcgccggcagaggatccagtgttcaccatcctggccccggaagacgcaaacatgcagatctttgtgaagaccctcactggcaaaaccatcacccttg

SEQ ID NO: 376902 - DNA, 100 bp, Homo sapiens
cttcattcagatgtggtggaatatgccaaggaaaaactggagagcttcatcaaaaatagtgatagctttgataagtgaaggtaggcaatgaagttgctac

SEQ ID NO: 376903 - DNA, 100 bp, Homo sapiens
aatttttggactgtgctctcaaactttactttgcctcatttgaggagtgggaacaggcttcggcgaacacaaagattgctagtgcaactactgctccatc

SEQ ID NO: 376904 - DNA, 90 bp, Homo sapiens
cacgggaagaacaaagacttagactcgaggtgctgatactcaaagaaggtttaagttgtctgatctctctataaattccactgaatgtct

SEQ ID NO: 376905 - DNA, 114 bp, Homo sapiens
gagagcgagctgagtggttgtgtggtcgcgtctcggaaaccggtagcgcttgcagcatgcaaaatgatgcttcaacacccaggccaggtctctgcctcggaagtgagtgcttct

SEQ ID NO: 376906 - DNA, 100 bp, Homo sapiens
aacgagaaccaagtgcggacgctgtgcgagaagggcttaccacccaaaagatgggaggcagaagatacccacctgagttgcccagagcccacagtgtttg

SEQ ID NO: 376907 - DNA, 100 bp, Homo sapiens
tgcagctctgcctggagcactcactggcggactgcaatgacatccacctgctggagtcggaggccaacagtgctggtccacgctgcttttatgagctgta

SEQ ID NO: 376908 - DNA, 85 bp, Homo sapiens
gacattcattgcggaataacatcggaggagaaggcatctcgtccccggtgaagaagacagagatggacaagtcaccattcaacag

SEQ ID NO: 376909 - DNA, 75 bp, Homo sapiens
gggaagttgctgcgctctgctcggtgtcgtggcctcgcagatggtgtgtgtctggggaagagacttacagaagtg

SEQ ID NO: 376910 - DNA, 50 bp, Homo sapiens
cgacggaggaacgcaggtctgctgccaggactatgatttaatctccaaag

SEQ ID NO: 376911 - DNA, 98 bp, Homo sapiens
taaaacctggaacagcagcatcattgtcaaagggccatgaagcccccaggaggagaatcgagcaatctttttggaagtccagaagaagctactccttc

SEQ ID NO: 376912 - DNA, 100 bp, Homo sapiens
cttggatggttgggagcagatcgattttaccttggataccctgctttggatatgattctataacagactcttccagaaatgatatgaagaggaaatttgc

SEQ ID NO: 376913 - DNA, 96 bp, Homo sapiens
attaatcgctcaccaagacacatgatagaagaaattgttctagtagatgatgccagtgaaagagatgattctgctgcagagagctttaatggcaat

SEQ ID NO: 376914 - DNA, 97 bp, Homo sapiens
ggagacccatctggactaccaaggagaagctatagactacttctactccaccaggaaggcaggtgacagcagggacatgtctcgggagatgcaggat

SEQ ID NO: 376915 - DNA, 89 bp, Homo sapiens
aacagcctatgggtgaaatttggctttcattcatgaatgaggcggttttggtgaataacatcaccacaggtgagaggctcatccgagtg

SEQ ID NO: 376916 - DNA, 101 bp, Homo sapiens
cgagaatccgacgcaagggttggcaagcccaccaacgacctgtatgagtttaaagccaagaacatcaagaagaagaaagtgagcattatggtttcagtgga

SEQ ID NO: 376917 - DNA, 98 bp, Homo sapiens
gactccagtgttaagagaagaaatgaggacatatcagtatcgggtgtgtttgaccatcgaatgaagtgctggcagaaatgggaagatgctcaaattac

SEQ ID NO: 376918 - DNA, 90 bp, Homo sapiens
ggaaagaatgaagaggccctgcaaggtattatacctgaagaaccttagccctcgggtgactgaaagagatcttgtgtcattgttcgctcg

SEQ ID NO: 376919 - DNA, 83 bp, Homo sapiens
ggcggcgccatcttcgaacttagacttccggaaggactttggcgaggatgtgaagttcatttccaatccgccctccatggtgg

SEQ ID NO: 376920 - DNA, 74 bp, Homo sapiens
tgggttttaactacagacccagtctctgccaaatgagtactggcagaatcacccagaactacatgacattccaa

SEQ ID NO: 376921 - DNA, 50 bp, Homo sapiens
ccgtggacatgcgcacctcacacagagatgcgggccttggcagaactcct

SEQ ID NO: 376922 - DNA, 100 bp, Homo sapiens
agttgaaactccagcagcgccggacccgggaagaactggtgagccaagggatcatgccgcgcacttcctggacctcactactacacatggggagaccacg

SEQ ID NO: 376923 - DNA, 76 bp, Homo sapiens
cgggaggcccatcagcggcactgccgtggcccacaagacgccccggtgcccggtcactgcttcaaccacctgtgag

SEQ ID NO: 376924 - DNA, 90 bp, Homo sapiens
gtactgccgctaccagaagtgcctggccatgggcatgaagcgggaagacagccctcagcgcctttttccaggagaccaacatcccctaca

SEQ ID NO: 376925 - DNA, 100 bp, Homo sapiens
gcacattgtgaaggagttcaagagagagggtaagatgatcatgcaggataaactggagaaggagcggaatgatgctaagaacgcagtggaggaatatgtg

SEQ ID NO: 376926 - DNA, 102 bp, Homo sapiens
gccaatcctgctgcagccttcattcttgcagaaaatgggattgtcaccaggtctttagacaaactcaaccaattgtcaaccagaaaatgttggaagttccct

SEQ ID NO: 376927 - DNA, 90 bp, Homo sapiens
ctctcccgcccctgtctcccgctccgcagccccgggcacggcggaggcagcggagccctgggccatcgggaccctccattttccatatcc

SEQ ID NO: 376928 - DNA, 97 bp, Homo sapiens
cgccgaggaggctttcctgctggtggcaaccgcctacgagacactcaagacattgcctaagatactgagccatatcgccccagcattttgcatgagc

SEQ ID NO: 376929 - DNA, 50 bp, Homo sapiens
aaaaaatgtggcagcgcctgaaaggaattttctcaactcattggatgcta

SEQ ID NO: 376930 - DNA, 75 bp, Homo sapiens
gaagcgcgagcgcgacgagtataagcggagtatccggctgctttgatgaacctgggagccattctgcacctcaat

SEQ ID NO: 376931 - DNA, 114 bp, Homo sapiens
aaatactttgcacttttgattgtgtattatggataccaaggaagagaagaaggaacggaaacaaagttattttgctcgatggactagaggcttttaccagatttcttaaaactg

SEQ ID NO: 376932 - DNA, 88 bp, Homo sapiens
tggcggactgccttctggtcaacctggcctacgagtcctccgtagttggcgtcgaggagccctccgaagaggaccagaatgaacacca

SEQ ID NO: 376933 - DNA, 97 bp, Homo sapiens
cgggagttcaaggaggtgctgaagagcgaggaggctggttgtggtgactcatgcccataatcccaacactttgcgaggctgaggcaggacgagtgct

SEQ ID NO: 376934 - DNA, 75 bp, Homo sapiens
cgtccatcatagtcaactgcgtggaagagaagagctgacatcgcgctgatcggattggccgtcatgggccagaac

SEQ ID NO: 376935 - DNA, 154 bp, Homo sapiens
cgaagatggcgacggccttgagcgaggaggagctggacaatgaagactattactcgttgctgaacgtgcgcagggagggctgcgaataaaggagaccaaggaagtttatgaaggtgaagtcacagagctaactccgtgtgagacagagaatccc

SEQ ID NO: 376936 - DNA, 100 bp, Homo sapiens
cagacaaggcaaagcgaaattggtcattctcgctaacaactgcccagctttgagccttatgtttgatcatcggccaaggtcctggcgagaactgcctctg

SEQ ID NO: 376937 - DNA, 100 bp, Homo sapiens
aaaagagaagaaccagaatttcctgagccttccaaacactgttcaacggttttgtgtatagcatttgaggttcttcagggcttgcagtatatgaacaaac

SEQ ID NO: 376938 - DNA, 100 bp, Homo sapiens
acacgcgaacacccgagatctcaggggatttggctgacgcctcacaaacctccacattggagctgaccagtgctttggtgcatctaaaactgcatctttt

SEQ ID NO: 376939 - DNA, 75 bp, Homo sapiens
aaacctttccaacacagatgtccaagctgccaaccttcccctaggtcttcagaagcatcaagttttaactgtgga

SEQ ID NO: 376940 - DNA, 75 bp, Homo sapiens
ctacagcgatggcgagatcagtatctgcatggagcacatgatttttcggaattaacactaaacggtagcctggaa

SEQ ID NO: 376941 - DNA, 100 bp, Homo sapiens
cttctgttacgctaggaatatggcaaacttatggctgcagcttcgattgccaatattgtaaaaagttctcttggtccagttggcttggataaaatgttgg

SEQ ID NO: 376942 - DNA, 75 bp, Homo sapiens
taaacaagagatttccacagaagaggatgaagtttttgctgctgcagcagaagtacctagaatacctggaggatg

SEQ ID NO: 376943 - DNA, 51 bp, Homo sapiens
tcggaagcaattgaaagttattaccagagctttaaggaagcctcctatttc

SEQ ID NO: 376944 - DNA, 87 bp, Homo sapiens
tggttccctgcagactggcaggagcagattccaaaggcacaggaagaagcttgcagatgcctttgaagatgagaaacccccaaagaa

SEQ ID NO: 376945 - DNA, 109 bp, Homo sapiens
cggccaagcccaacaacctttccctggtggtgcacggaccgggggacttgcgcctggtactccaaagattcaggtttactcacgtcatccagcagagaatggaaagtca

SEQ ID NO: 376946 - DNA, 100 bp, Homo sapiens
ccgtcctccatcagtgccatggaggccaccatcaccgaacggggcatcaccagccgacacctgctgaagcacgaacttccaggagccggtgcagccgctg

SEQ ID NO: 376947 - DNA, 73 bp, Homo sapiens
aatgaaacagattctaactccaatggcccaaaacccagacttggagctgaagaagctggaaacatggaaacac

SEQ ID NO: 376948 - DNA, 75 bp, Homo sapiens
cattgaactcatccggcagaataagagactggacgctgtgaggtcaccgacgatgagggcgcacctgctgtcctg

SEQ ID NO: 376949 - DNA, 78 bp, Homo sapiens
atgatggacatcggctccacccgggggcataaggaaatggtggcaggcacttcctcctaacaagaaggaagtagttaa

SEQ ID NO: 376950 - DNA, 82 bp, Homo sapiens
gtgatatctgaacactcctcacttcttccccagtgagatggaagattttcgaggtatagcagaagaatcatttccaagcttt

SEQ ID NO: 376951 - DNA, 90 bp, Homo sapiens
ctttgaaagaacttgccagacttaaacagtcaagtccatcatctccagaaccagctagtcttcctgcagaagatattagtgcaaactcca

SEQ ID NO: 376952 - DNA, 100 bp, Homo sapiens
cctggagtctgcgaaggccgggacccggttccccggcccacagtgggggtgtgcaaacccgagagaactggctatgacagagactccactttcaatgtgt

SEQ ID NO: 376953 - DNA, 75 bp, Homo sapiens
agcaaatctacttttgggttacaaaaatccagaccagggaaatcctcattgacgattcaatttgttgaaggccaa

SEQ ID NO: 376954 - DNA, 100 bp, Homo sapiens
tacctgcagacatacggcgagtggaatcgggctgcatggctggcaaaaggatagctgggagtatggccaccctgctccacgatgcggtaatgaatccagc

SEQ ID NO: 376955 - DNA, 75 bp, Homo sapiens
cagctggcagcatcacccccggacagcaagatggactttctggccgagaccagccagtggagctgctgaatcctg

SEQ ID NO: 376956 - DNA, 75 bp, Homo sapiens
gaaggcctggacgacggcccggacttcctctcagaagaggaccgcggattttcggctttgtgagaaaccttacca

SEQ ID NO: 376957 - DNA, 75 bp, Homo sapiens
ctgtgacacagtcatagcccgaaaaagtgatttgggaattgactttaaaattaggaccatagagctcgatggcaa

SEQ ID NO: 376958 - DNA, 75 bp, Homo sapiens
gggaggtcaacgaggtcatccaggaaagaaattgagccttttctgccacctctgaagcctgattactgtgtgaag

SEQ ID NO: 376959 - DNA, 98 bp, Homo sapiens
ctagaaggagactctgaattcttacaacctctctacgccaaagaaatccagtcccgaccagacattggctccctggattatcaagagtttgtagttga

SEQ ID NO: 376960 - DNA, 82 bp, Homo sapiens
attaacctggagttaaggaacagatccccggaggagagacaagaggagcagcagcggcaccgcccctcaccctggagggtcc

SEQ ID NO: 376961 - DNA, 60 bp, Homo sapiens
ggaggagcagttgtctgatgaagagaaggtaagaatgattgatgttggctgatattggag

SEQ ID NO: 376962 - DNA, 78 bp, Homo sapiens
gcagtccatcgaggggaccaaactctccatcacccagggcagaagaagagttcaacatagagaaaggtcggcttgtgc

SEQ ID NO: 376963 - DNA, 90 bp, Homo sapiens
gatttctaaaccagtttactgaagataagccaactttgaatttcttctatcaacaggttgcaccattactcagacttctaaagagactat

SEQ ID NO: 376964 - DNA, 74 bp, Homo sapiens
ccggcccacagtgggggtgtgcaaacccgagagaactgggtcgtcaaagtcctacattttagctttcagtgctg

SEQ ID NO: 376965 - DNA, 100 bp, Homo sapiens
aggaatcttgcagaagaccgcagtgggataaatctcaaagatctcgtacaagatccttctttcctccagggtcgtatagacctccccctcctatgggcaa

SEQ ID NO: 376966 - DNA, 90 bp, Homo sapiens
ggagaatcctattgtaaaatcacttgctaagaattaaatatgggtgatgttgagaaaggcaagaagatttttattatgaagtgttcccag

SEQ ID NO: 376967 - DNA, 100 bp, Homo sapiens
ctctctccgctcgattttgtcaccgttatgtgggaagcgaatccagactcacaccacccggcaagaactgctcactacggctccctgccccagaagtcac

SEQ ID NO: 376968 - DNA, 83 bp, Homo sapiens
ctggaatgggagtcctgttttaacaagaaccaaaaacttttgctagaaaatcagcttttacgagagaaaactcatggccttgt

SEQ ID NO: 376969 - DNA, 100 bp, Homo sapiens
cacctgccaagtctctccgactccttgcagctgctgtcagcatggcccaggctcctgctgacccgggcagagaagatcttcagtgtctattggatttttc

SEQ ID NO: 376970 - DNA, 100 bp, Homo sapiens
gggacggcaggagggaagtgagaagcccaactaaagccccacatttgcagctcattgaaggaaagggaacagatggaatcccagttggaaaaggaggccc

SEQ ID NO: 376971 - DNA, 74 bp, Homo sapiens
cggcagccggctgtacgcacacaccatcgcaggcatgttatttgaaagcaattgagacgcaaccgaactttgca

SEQ ID NO: 376972 - DNA, 100 bp, Homo sapiens
aatttctgtctttgaagtaaatatacgctttgttggtggactactctcagcctactatctgtctggagaagaggaggcaaaaccttcaactgaggacttg

SEQ ID NO: 376973 - DNA, 75 bp, Homo sapiens
acgtgtactaccgcaactgaaagtcacgattaggactgacaataagcacttttccagccattaactccaggctct

SEQ ID NO: 376974 - DNA, 75 bp, Homo sapiens
atgcccaccgggatggagaaggaggaggaatcggattttttatcaagcagaaatgcatcgaacaacgagaatcaa

SEQ ID NO: 376975 - DNA, 98 bp, Homo sapiens
ccaccctgtggacatcagcgccatccccgagcagcggtggaagctggttaaaaataagaagttggttgagctgctgagaaggaaagttcgtctcgccc

SEQ ID NO: 376976 - DNA, 76 bp, Homo sapiens
gagaagcccaactaaagccccacatttgcagctcattgaaggaaagttaagggaagaaagtcggaggctggctttg

SEQ ID NO: 376977 - DNA, 99 bp, Homo sapiens
cgggcgcggcactgcgggtcccgattgctgcagccgcttgtcagtgtgatgaagattggcacccagctcaccatggatgatgatatcgccgcgctcgtc

SEQ ID NO: 376978 - DNA, 51 bp, Homo sapiens
caagaacctgaccgagagggaggtgggactcttccctggacactgtgttga

SEQ ID NO: 376979 - DNA, 90 bp, Homo sapiens
cgataattaaagagtaaagttgtgctcaacgcaccatccagtagaaaaccaggagaccccctcgtcatttcagatatcaagaaagggagt

SEQ ID NO: 376980 - DNA, 100 bp, Homo sapiens
gttagagatcattcccttttagaagactctaaaatagagctcaagcttgagaagagagaaccactaaagggcagagcaaagactccagtaacactcaagc

SEQ ID NO: 376981 - DNA, 100 bp, Homo sapiens
caggctaggggcggctcggagtccgctggccacccagctgagaggagaggcgcccccggggacgctgccactgcagagccccgccatggaagacacgccg

SEQ ID NO: 376982 - DNA, 75 bp, Homo sapiens
attctggaataaatttttggagaataaatccccttggaggaaaatgggcactttccctcatggtattgatatttt

SEQ ID NO: 376983 - DNA, 88 bp, Homo sapiens
gattcagacgtcctctcagaaataatgcattcttttgcaaagtgccggtggtggtgtgcacattgagccccggtatagacagttcccc

SEQ ID NO: 376984 - DNA, 80 bp, Homo sapiens
accgcgaggccctgatggcctctgggagtgggcgagctgaggatcagtgtcctgcctgcctacctgtcctatgatgcccc

SEQ ID NO: 376985 - DNA, 99 bp, Homo sapiens
catggctcattatagcctcaaactcccaggctcaagcaatcctaccatgtcagccttcccagtagctggaactacaggattcttctctaatacttgatg

SEQ ID NO: 376986 - DNA, 100 bp, Homo sapiens
tgatctataaatgcggtggcatcgacaaaagaaccattgaaaaatttgagaaggaggctgctgagactttgagaatcactacaagaaaaactccttgtgg

SEQ ID NO: 376987 - DNA, 83 bp, Homo sapiens
cccctacattgtgaagctcctgggagcctactatcacgacgggaagctgtggataaacagtgtaccatgttttatagcacttc

SEQ ID NO: 376988 - DNA, 75 bp, Homo sapiens
atcgcctcgcgccggctgctctttccggttgtatcacggactgattcaccgagcccaaccgtactcaactcacat

SEQ ID NO: 376989 - DNA, 82 bp, Homo sapiens
ctgccgtccttctccactttcgccagcccgtgccgcgagcgcggcctgcaggagggccgagaactactggtggcgtggccag

SEQ ID NO: 376990 - DNA, 100 bp, Homo sapiens
agacatctgcgtgtgcggggtgcgtgggtgcctggagatgaagctggaaagtgatatggagaatgcagaaaacattctcacagtgatgagagatgccgga

SEQ ID NO: 376991 - DNA, 87 bp, Homo sapiens
gtcgtggaagcaggactgcgccgcgtcttcctcaagtcctattttgtaacggattatgatccaaccattgaagattcttacacaaag

SEQ ID NO: 376992 - DNA, 76 bp, Homo sapiens
cttccctgcactctcatcgctctcggcctcggcctcggcctccgacacgaatatgcttttaaggctattaaccagg

SEQ ID NO: 376993 - DNA, 98 bp, Homo sapiens
ggacatcgacatccaggcgaactcggcctatcgctaccctccgaagtccgagagaagaagaaggaggttcctgctgtgccagaaacccttaagaaaaa

SEQ ID NO: 376994 - DNA, 75 bp, Homo sapiens
agagtccgcggccggggcgcgggagtggcctgattccaccaagagaaggcccaggaggaagaagagaaaaagatg

SEQ ID NO: 376995 - DNA, 96 bp, Homo sapiens
cgcgccactcctcccggaggcgacatggggcacccggtgtaccgcggcgagaagccccagctgcactacgcgcgtggagattggtgaaagcgtgag

SEQ ID NO: 376996 - DNA, 100 bp, Homo sapiens
ctggcaaagtggaaaaatgtgcggaaaaatccaagctggagagtgagctagccaactttgggcctcgcattaatgatatcaagaggatcattcagagccg

SEQ ID NO: 376997 - DNA, 75 bp, Homo sapiens
cacagaggataaatttcaacctccggggccacaatagcgagaaatgtgcggagattattgtggctcaccttggct

SEQ ID NO: 376998 - DNA, 90 bp, Homo sapiens
gaaacattcctccttgcatctttcttctgtgattgcatctatttgttagtagcatagagaccaataacactcgtgaaactgctcaggcca

SEQ ID NO: 376999 - DNA, 82 bp, Homo sapiens
cccgcgaccgtccgccagtcgtcccgaggacgcgggaggacacagtgcggcagattgtggctgggctgacgggggactcgga

SEQ ID NO: 377000 - DNA, 75 bp, Homo sapiens
tggccaggcattggaagttgtcattcaatccaaaaggtaattctggcacttggagactatatgggagccacttgt

SEQ ID NO: 377001 - DNA, 74 bp, Homo sapiens
tttcttgctggccacttgcggaggattcacctacgctcttaccagctggagggagtaaactggctcgcccagcg

SEQ ID NO: 377002 - DNA, 100 bp, Homo sapiens
ttgtgaggaaaaatatcgagatatcctaaaatttcctgaagaactggaacacgtagaaagtgcaagcaaagggtttcaaaggactgtggctattgcggac

SEQ ID NO: 377003 - DNA, 83 bp, Homo sapiens
agtctggtggacatcgacctctcctccctgcgggaggagagacttcagcatgcaaaccttcatctgttcggcttgcaccgtca

SEQ ID NO: 377004 - DNA, 89 bp, Homo sapiens
ggcgccggtacgcctggtccccgcgtggagtctttactcaaaacaggaatttttgagagatatcttcaatctcctgtttttgttgccaa

SEQ ID NO: 377005 - DNA, 96 bp, Homo sapiens
tggcgtccctcttcagttctctggagccccagattcaacccgtgtacgtgcctgtgcctaaagttcgagaacttgtcttggacaattgcaaatcaa

SEQ ID NO: 377006 - DNA, 88 bp, Homo sapiens
ggactacaactcctttcaagcagttactatcagtgtgatccctcacatccacaaatctctgattggaaagaagggacagcagaaaact

SEQ ID NO: 377007 - DNA, 100 bp, Homo sapiens
tccgggacagggatgtctacctggtaatagaggacttgaagcagaaagcaagtgaatacgagtcagaaggaaagggggctgtatacagctttgatccagt

SEQ ID NO: 377008 - DNA, 100 bp, Homo sapiens
aaggatcatggcagtgtgcccattattgtacctttaattccaccacctttcataaagccaccagcaggtgactctgacatcattagaagcatgccagaac

SEQ ID NO: 377009 - DNA, 98 bp, Homo sapiens
cccggggtcacccgctacgggaagcaggcctcgccacagatgctgagatgaatcgtcacctgtgtgtttggctttttagacatccatctcttaatggt

SEQ ID NO: 377010 - DNA, 100 bp, Homo sapiens
gtagagtgaagtcctacagagttatcaggttccagaccctgccttctcttctgaaagaatcttatcttggctttggatcttagaagagaatcactaacca

SEQ ID NO: 377011 - DNA, 75 bp, Homo sapiens
ggaagcaagcagttcagaagagccaaggaataaacatgcaatgaacccaaaaggagactttagaagacagctttc

SEQ ID NO: 377012 - DNA, 99 bp, Homo sapiens
cctccctgaaccactccactgcctttaaccctcagcctcagagtcagatgcaggatcggcgcctacttcggggcctccctctgctccgtggacgtggac

SEQ ID NO: 377013 - DNA, 83 bp, Homo sapiens
tggaggcgaaagccaacggcgaggactgcctcaaccaggtgctttgcaagatatcaccttgtcacagcagaccccctccactt

SEQ ID NO: 377014 - DNA, 100 bp, Homo sapiens
cgcgagtgtccgcggccgagcagcagatccttgccagcacattacagaatatttttgttgaaccttcttgagaattcagagaaactgctgagtgaccact

SEQ ID NO: 377015 - DNA, 90 bp, Homo sapiens
ggcacccgatatatgttctctaggccttttagaaaacatggcatctaataggattcaggaatcaaagaatcagtgtactcaggtggtaca

SEQ ID NO: 377016 - DNA, 100 bp, Homo sapiens
ataatatgctttctgatgatgcccgtctcttcacagaggtatccatcacgaattgaaaaaattgactatgaggagggcaagatgttggtccattttgagc

SEQ ID NO: 377017 - DNA, 80 bp, Homo sapiens
tgataacaccctgtaacagctgaggaacactgaaaggttttgaccagaccattaatttgattttggatgaaagccatgaa

SEQ ID NO: 377018 - DNA, 50 bp, Homo sapiens
caaggcagcgagtttggatgaggtggatgaaccgcatcaaagacttccag

SEQ ID NO: 377019 - DNA, 80 bp, Homo sapiens
ccaagagggtgttcgactgctagagccgagcgaagcctggagcagttcaacatgatggagaacgccatcagctccagcag

SEQ ID NO: 377020 - DNA, 100 bp, Homo sapiens
cgtgatcttcacagtgctcctgcagtctctctgtgtggctgtaacttacgtgtactttaccaacgagctgaagcagggcagcagccgctactcaaagaaa

SEQ ID NO: 377021 - DNA, 75 bp, Homo sapiens
ctggggtcccttttgcctcagatactattttgaaggtttactcctggcttgggggcattaggaagcactggaggc

SEQ ID NO: 377022 - DNA, 82 bp, Homo sapiens
gcagaagaagacgaagaagcagaagcgtctgctcaggttgcagcaggagagagctggtgtcgaggacaagagaaccacaagc

SEQ ID NO: 377023 - DNA, 74 bp, Homo sapiens
cgagtgggagcaccaggatctcgggctcggaacgagactgcacggaatgatgcaaaaactgtcaatgttatcac

SEQ ID NO: 377024 - DNA, 74 bp, Homo sapiens
cgggcgccatcgagccttggcggcggacgtgcagagctccacgcaggagatcggtgaggagctgatcaacggag

SEQ ID NO: 377025 - DNA, 90 bp, Homo sapiens
gcaagggtgccctgcgtgtgggcgacggcccccgtgtgttgggggagtccccgggcatggcctatctgcacgcgcagcactacatccacc

SEQ ID NO: 377026 - DNA, 100 bp, Homo sapiens
agggttgtatatagccatgaatggagaaggttacctctacccatcaggggatagttcctatgtgaaagatcgctggtgtgtttttgatggatttatggtc

SEQ ID NO: 377027 - DNA, 101 bp, Homo sapiens
gaccattcatgctaaacctgggtttgtcatccaactaagcctcacagccaccctggcaagcgtcggcgcggccagtatccccagtgccgggctggtcacca

SEQ ID NO: 377028 - DNA, 98 bp, Homo sapiens
gaagacgttcatatcattgtcttccacagatgtgtcaccaaaccagccgtttccctggggagatggtaaccatactctattccataaccctcatgtga

SEQ ID NO: 377029 - DNA, 95 bp, Homo sapiens
attgagtcctacgctgctgtgaatcacatatcccaactgtcagaggagcagcggaaggtcctgggaaatcagatgatgtcagaaaagaaaaagaa

SEQ ID NO: 377030 - DNA, 82 bp, Homo sapiens
caaagataaatccaaatactgcatatcagaaacaacagaatcactgagcttcagctcaaacttgagagtgcccttactgaac

SEQ ID NO: 377031 - DNA, 100 bp, Homo sapiens
tttatcacttccttccttactttgtcttggtatactacatggcaaaatgggaaagccaaaactggacaagccaaggcatctgtagccaaagtaaacaaat

SEQ ID NO: 377032 - DNA, 80 bp, Homo sapiens
ttcggcagtccacccaccgccgccgcctcccagcggagcgtgctttggacaccatgaattttgatgttataaagggcaag

SEQ ID NO: 377033 - DNA, 100 bp, Homo sapiens
gaagaacatgaagtgcagtgtgaagaacgaccactcagcgtacaagagtcatagcacacatcggacatttggaaaacagcagtggcaacaactgtatgac

SEQ ID NO: 377034 - DNA, 83 bp, Homo sapiens
cttatcacaaccaagtagaactggctcttcaaattgaagcctgagacctgggaggaagctggagaaaagatgccctctgaatc

SEQ ID NO: 377035 - DNA, 100 bp, Homo sapiens
ctcccctgaagaggcagtgaaatggggtgaatcatttgacaaactgctttcccatagagcaacatggccaacgccctggccagcgccacttgcgagcgct

SEQ ID NO: 377036 - DNA, 85 bp, Homo sapiens
tgtgagacatgcacttgctacgaaacagaaatttcatgttgcaccctgacaatctctatgggaagcagaaggcaaggaccccggt

SEQ ID NO: 377037 - DNA, 75 bp, Homo sapiens
gataacccagcatcaggggaaaagtttgcctatgtgccatttggagctggttcaactactcaatttcatgctggc

SEQ ID NO: 377038 - DNA, 83 bp, Homo sapiens
gttgtctcctggaagacgggcgtcttccgaaaccagatttccagaagctgttctgtcaataacaaagtctcaaagaaaaccac

SEQ ID NO: 377039 - DNA, 100 bp, Homo sapiens
ttttcttaaatggcccacatcaggacagctgttccttggccatcccaaagctattctgggggcaacagaggactccctggaggaaaagcggaagcggcag

SEQ ID NO: 377040 - DNA, 83 bp, Homo sapiens
cttctagagtcttccactcgggttaaaccgagcaaggcttggtctcattaccaggacatggatttgattgacatactttggag

SEQ ID NO: 377041 - DNA, 90 bp, Homo sapiens
cggagccccggagtcccgctgggcgtgagatgcagagagcggccgcagaaagatttgatcaccaggagatttttcgggacattaccaaac

SEQ ID NO: 377042 - DNA, 100 bp, Homo sapiens
aaccatttaaaacaggtctaaaggtcagcccttcataaacccagatgggagtccagttgtgtataatcctcctatgactcaacaaccagttagatcccaa

SEQ ID NO: 377043 - DNA, 100 bp, Homo sapiens
ttacaggaagttagagactaaaggatatggacaaggcccagggaagttaaagaagacgcgacatgtcaacatcttgctgtttatgggcttcatgacccgg

SEQ ID NO: 377044 - DNA, 87 bp, Homo sapiens
ggaacgtgtactaccgcaactgaaagtcacgattaggactgacaataaggttcttatttgaaaaccagacaccagcccatgtttact

SEQ ID NO: 377045 - DNA, 96 bp, Homo sapiens
agcccaggtggtggccgaaatgttattttaacgaggtgtcgcatcagccggatcttacgaacccctcagggctgtgctctcttggttggagttggg

SEQ ID NO: 377046 - DNA, 75 bp, Homo sapiens
gagacaaagttgaaaacaaagtgctgcatgacgacagagatgatggtgtggattattgggccaaaagaggaagag

SEQ ID NO: 377047 - DNA, 75 bp, Homo sapiens
aggaaaagaacagagccatcattcaagaagtttgcttcatgcatcgagagtaaacatgaggttacgatcctggga

SEQ ID NO: 377048 - DNA, 99 bp, Homo sapiens
ccggcggccgcagcgaggagaagatctcggactcggagtttactgtaaacacaccacctactccagaagacctgatgttaagtcaatatgtttaccgac

SEQ ID NO: 377049 - DNA, 75 bp, Homo sapiens
cccaaagctattctgggggcaacagaggcaatggatcacttggagtcctttattgctgaatgtgatcggagaact

SEQ ID NO: 377050 - DNA, 96 bp, Homo sapiens
aaggggcctccagggtctgcagacaaggcagggtgaatgaaaactttgccattgatttgatagcagagcagcccgtgagcgaggtggagactcggg

SEQ ID NO: 377051 - DNA, 100 bp, Homo sapiens
cgaaggccgggacccggttccccggcccacagtgggggtgtgcaaacccgagagaactggagcctaatgggaggtgactggatcatgggagcagagttct

SEQ ID NO: 377052 - DNA, 50 bp, Homo sapiens
gcctacaggagtatgatgcaaggtactccaaagattcaggtttactcacg

SEQ ID NO: 377053 - DNA, 75 bp, Homo sapiens
aggtctcacctgaggtgaaccttcgaccttggacttctcagcctccagaatgactgctgagaaggaagaatttga

SEQ ID NO: 377054 - DNA, 75 bp, Homo sapiens
ggcccctgtcgattccgcggcttcgaggacagtcattttgtttactcattcagccctgttgcaggtcccaataaa

SEQ ID NO: 377055 - DNA, 100 bp, Homo sapiens
cagaactgcttcaagccccgcgagtcgcatctgctcaacgacgaggacctgacgcaggtacaagtgcctgctcctggtggattcggtggcatccctgggc

SEQ ID NO: 377056 - DNA, 95 bp, Homo sapiens
gtttgtactatcctcggtgctgtggtgcagagctagttcctctccagctcagccgcgtaggtattttgaaggtggcgtctcatctgtctacctct

SEQ ID NO: 377057 - DNA, 139 bp, Homo sapiens
tgcactttaccctttttaatattggccaatcatcaagacaagccagcagctcgctcagtacaagaggatggagctatgacattgaagagaggaaggttccaaaacccaagtccaagtcttatggtgcaaacttttcttg

SEQ ID NO: 377058 - DNA, 98 bp, Homo sapiens
agttacatactgattctttaagaaaatcagataacttgtactggagagaaatcctacaagtgtggttatcttatgatgaggcttttgctatggctaat

SEQ ID NO: 377059 - DNA, 75 bp, Homo sapiens
gcagcaccgcatgatggtacccaaagtcaggtaagaatgattgatgttggctgatattggagtgctcattcacat

SEQ ID NO: 377060 - DNA, 80 bp, Homo sapiens
ggcggactgagcgctcccaattggggccctgggaggagcggggacactgaggacctctctccaaattggcctctcaactc

SEQ ID NO: 377061 - DNA, 90 bp, Homo sapiens
taaagaactcttcagaattcctggtgtttcatcatatatacgactaagatatcagtgtgactgaagaaatatcaaatgtttcctagtaag

SEQ ID NO: 377062 - DNA, 80 bp, Homo sapiens
atgaaagccttttaccctttgctactggagaacatggatctatggaggtgtgatgaatgcagactctgctaccattttgg

SEQ ID NO: 377063 - DNA, 133 bp, Homo sapiens
cagaaattaccacattgaagacaatctcaaggaccaaaaaagaacttcgtgtgaaaattttcctggggtgtttccacaccggtagccagctgtgccctgaggtggaagaggaccggccacccaggaattttcc

SEQ ID NO: 377064 - DNA, 100 bp, Homo sapiens
tgcagatgtgctgcctgctgagcgtgatgacttcatcctgggggactgcctccgggcctgccaggagcagatcgaagccctgctggagtcaagcctgcgc

SEQ ID NO: 377065 - DNA, 83 bp, Homo sapiens
cgaacgggttgcttcccccgctgcgagatcgaagacctgcaggtgaagctgcagcacgcggaggcggaccgggagcagctgcg

SEQ ID NO: 377066 - DNA, 83 bp, Homo sapiens
ccgagaagagcagagcggagggagccccagacacgtgaattttgaagattgcaccggtcgacaaaggacagcctatttttccc

SEQ ID NO: 377067 - DNA, 96 bp, Homo sapiens
gcgccccgcagccccccaacatcctgctcctgctcatggacgacgtggagtgcagcaacaaagacctccattctggggtgtacgggggctcggtgc

SEQ ID NO: 377068 - DNA, 75 bp, Homo sapiens
ttagagcagatcctcagccaccgcttcaaaggccaaagcacccctacgcagaaaggagtaggcattgctggagct

SEQ ID NO: 377069 - DNA, 105 bp, Homo sapiens
ccagagcctggagtctgcgaaggccgggacccggttccccggcccacagtgggggtgtgcaaacccgagagaactggacctctgtgagtgaaagccttcagaggg

SEQ ID NO: 377070 - DNA, 75 bp, Homo sapiens
ggggctccggctggtctgtggtgagctgcgccagggccccgcggggctggggcccaaaaagcgtgcggagcctca

SEQ ID NO: 377071 - DNA, 75 bp, Homo sapiens
ccaacatggaccgcctgggggactcggaactgcagtggtggatgccggataccggaggagctaacatcccagctc

SEQ ID NO: 377072 - DNA, 90 bp, Homo sapiens
taccatgtccgcccaggcgcagatgcgggccctgctggaccagctcatgggcacggctcgggacggggggccttctcggaggtgatcctg

SEQ ID NO: 377073 - DNA, 128 bp, Homo sapiens
ggagttcaacaaataccttgcatacatggagtctaaaggagcccatcgtgcgggtcttgcaaagaatattccccaaagcactgagatactaaagaaattgatgacaacaaatgagattcagagtaaca

SEQ ID NO: 377074 - DNA, 100 bp, Homo sapiens
tgtctcgctggcctgcgacccagccagccagcaacctggaccggctaaccttgccgcgggccgagccctgcctcgccatggaccaggactatgagcggcg

SEQ ID NO: 377075 - DNA, 100 bp, Homo sapiens
ttaatgaacttcctgtacctgctgggagaagttctgaacaactatatctgggatacacagaaaacatgttccaccttccctcttcacggaacctaatgaa

SEQ ID NO: 377076 - DNA, 75 bp, Homo sapiens
caagcgggagaccaggagctcctccaccaggccaaagacttcggcacaaaatgatgcttcaacacccaggccagg

SEQ ID NO: 377077 - DNA, 83 bp, Homo sapiens
ccggctcagcccccggagtgcggagccgaccaggtgcctcaggaaccctgaagctgggctgagccatgatgctgctgccagaa

SEQ ID NO: 377078 - DNA, 98 bp, Homo sapiens
catgcaatggcaatgaccagattgatctggtacctggcactgagtatggagttggaatatctgccgtcatgaactcacagcaaagcgtgccagccacc

SEQ ID NO: 377079 - DNA, 137 bp, Homo sapiens
cggatctttgaggggacaaatgacattcttcggctgtttgtggctctgcagggctgtatgacttgggcctcttctccaccaagaccctggtggaagcgagtggcgaacacaccgtggaagttcgcacccaggtgcag

SEQ ID NO: 377080 - DNA, 75 bp, Homo sapiens
tggtacatccagggcgaccgtggtgacatgattaccatcagatcagtacctgggaagtacgcctgtgggctctgg

SEQ ID NO: 377081 - DNA, 101 bp, Homo sapiens
cactctgaatcccattctcgatcaagatcaaaatccagcatttaaatcaaacggtattgagatggattgggttatgaaacataatggtccaaatgacgcta

SEQ ID NO: 377082 - DNA, 110 bp, Homo sapiens
ggcggcgggacccaggcggttgaggctggtcagctgacatcatctctaccgttgagttcaaccacacgggagagctgctggccacaggtgacaagggcggccgggtcgtc

SEQ ID NO: 377083 - DNA, 88 bp, Homo sapiens
atgtttctggacgcggatttttggcctcatactctgttatagataaacaagccatgaagctcatgactgctctggtgaatgttgcctt

SEQ ID NO: 377084 - DNA, 83 bp, Homo sapiens
aataaatccaaagaggagccagttaccatgactcatccagctcaaagcttggattctgccgtgccactcacgaatggcgacac

SEQ ID NO: 377085 - DNA, 101 bp, Homo sapiens
acctctgagaaagtgagccagaaacatgctgagcctttgacagaatttcgctaaggagtttgtgatcagtgatcggaaggagctggaggaagatttcatca

SEQ ID NO: 377086 - DNA, 100 bp, Homo sapiens
ggaagccagcagccaagccggggcagtttcagtctccaccccaaatgcaggagagaagtggatgggccctatacctccagccgtgaatgccagactttaa

SEQ ID NO: 377087 - DNA, 100 bp, Homo sapiens
gctcaaagctgctgccgccccttgggctaaaagatcagtgtactgttacccggacatacctattccttcacaagttctggttcttcagtgctgcttacta

SEQ ID NO: 377088 - DNA, 100 bp, Homo sapiens
tcgaggggaaaccgctgcttcagagacacagctcggcctatgaccacgtgcgcaagactcgcgtggccatcaagaagatcagccccttcgaacatcagac

SEQ ID NO: 377089 - DNA, 75 bp, Homo sapiens
agcccagcccccagaaaggattgtgacatatcgttggacccagaattgagacagaccccgtgcggctgacacagc

SEQ ID NO: 377090 - DNA, 75 bp, Homo sapiens
catggccgtcatgccgactctcatacaggcgggcgccagtgcatcttctaggaatgtctgaatctgaacaggctc

SEQ ID NO: 377091 - DNA, 50 bp, Homo sapiens
tgctgcgtcctgctgaccttcgcccgcagggccccggaccccggcttcca

SEQ ID NO: 377092 - DNA, 100 bp, Homo sapiens
cttgctctttggcccgtggctccttaggaaggggtgctgtgcctaccagacagcctgaatcttcacagagacccacagcggtcaaacaagccaggggaac

SEQ ID NO: 377093 - DNA, 90 bp, Homo sapiens
gaccaaacaaacgcaaggactggactccatgccgaaggtatctggaagtcgtgacacgaccttgtatcctacttatggactcactccgag

SEQ ID NO: 377094 - DNA, 98 bp, Homo sapiens
gcaaaagaaaagaatctcaaagtgaaaggaccagttcgaatgcctaccaagggaactgtccaggtttattgctgccgggagactacactgcaaaatag

SEQ ID NO: 377095 - DNA, 83 bp, Homo sapiens
ctctaccaatggtgcttcagaagtttcatactttcagggccagcaccttctctctaaagcccaagaggagtttgaggtaaatg

SEQ ID NO: 377096 - DNA, 83 bp, Homo sapiens
cctcagggatacacagtggagaagcgagagggctacccacttcggccaggactgcctccgggcctgccaggagcagatcgaag

SEQ ID NO: 377097 - DNA, 75 bp, Homo sapiens
atactatccgtttgttcaggaaccaccagtgacagaggaattcttcgtactccagacactatccgtcggttccag

SEQ ID NO: 377098 - DNA, 100 bp, Homo sapiens
taccagtccccagtgagggtgtacaaatacccctttgaattaattatggctggccggaagcagctggaaaagactcagaaatcttcacagtgaatgggat

SEQ ID NO: 377099 - DNA, 75 bp, Homo sapiens
gccacggctgggacaggaagccacatgattacagtggcgagatcttgaacaactgctgcgtcatggagtaccacc

SEQ ID NO: 377100 - DNA, 96 bp, Homo sapiens
ttttaggaatggtagcttcctggggatggtatgctggatatacaggtaattaataatgcttgtgctactcaagccatagtgagtgtgttactgaac

SEQ ID NO: 377101 - DNA, 75 bp, Homo sapiens
ctggaagtacgggcagttgcagtgttggagctaaaccatcatcgtctacagactgccgtggacctggaaatgcag

SEQ ID NO: 377102 - DNA, 75 bp, Homo sapiens
gccccctccccctcgccatgaagccctgggcgctgcctatggcacagccaagagcggtaccggcattgcggccat

SEQ ID NO: 377103 - DNA, 75 bp, Homo sapiens
tggaggagattctggggcagtatcaacggagtctccgggcatttgacattgtgcagcaaagaaatggttatggag

SEQ ID NO: 377104 - DNA, 100 bp, Homo sapiens
ttaaaggactgatttttagaactccacatttgagcaaaatgatgcttcaacacccaggccaggtctctgcctcggaagtgagtgcttctgccatcgtccc

SEQ ID NO: 377105 - DNA, 90 bp, Homo sapiens
tcttcaccttaaaatcaaagccacaagacactgctgataaggatggctatgtcttgcccagccacgtgactgaggagatgctatgggagt

SEQ ID NO: 377106 - DNA, 75 bp, Homo sapiens
cgaaagcctatcagcatagttaaggcatggaagaggagatggttcgtgttacgcagtggccgtttaactggagat

SEQ ID NO: 377107 - DNA, 100 bp, Homo sapiens
gcaccctttttattgcctggatttgcagtacctcagcctgcaggcaaagattgtcctgtgaagtgaagtatgatcggacagcctcttttcagcttttatg

SEQ ID NO: 377108 - DNA, 100 bp, Homo sapiens
aaggattttttacgaacattttatactcaccaagaactgtggtgtaaagcgcctgtaaaaccagatggccagttcttcacctggggaaagaacagccatg

SEQ ID NO: 377109 - DNA, 89 bp, Homo sapiens
ggaacatgtacacctcatccctgtacgggtgcctggcctcgcttctgtcccaggagtggttttcagagacatttcagaaagtgaaggag

SEQ ID NO: 377110 - DNA, 75 bp, Homo sapiens
ctagagaagtcttaagagatgactgctcagatcagaacactgaggctcagagaagttaactactccaaagtcata

SEQ ID NO: 377111 - DNA, 102 bp, Homo sapiens
ccagaggaaaagaaaacagcaacacagttacatagtaaaaggaggcctaagtgtgatgaatgcagactctgctaccattttggctgtttggatcctcctttg

SEQ ID NO: 377112 - DNA, 75 bp, Homo sapiens
atccttgatgataaaccagtaaatctgccactgcagagccccgccatggaagacacgccgttggtgatatcgaag

SEQ ID NO: 377113 - DNA, 89 bp, Homo sapiens
ggagaacagcaacgatattgccctggtccacctctccagtcccctgcccctcacaggaaggatttgatgccctggatccctttattccc

SEQ ID NO: 377114 - DNA, 75 bp, Homo sapiens
accttcgttgccctctgtgccacagcttcatggcggctgaagagatgcattggcctgtccctatgaaggccattg

SEQ ID NO: 377115 - DNA, 82 bp, Homo sapiens
aagaaatgatgatggaaatgaagtataataccaagaaagccccacttggttacccatgcagttgttactgtaccagcctatt

SEQ ID NO: 377116 - DNA, 116 bp, Homo sapiens
atcctgtatgtggggtccatgcctcttaagaactcttttcgaggaactatccgtgatgagccctcctcttcagctaggaaaatgacggtgttcagaaagttaaaacttcttcgctg

SEQ ID NO: 377117 - DNA, 75 bp, Homo sapiens
gcaaaagctctcagggatgctggtctggcagtcaggactattagaagacacattagtgcagaagcttccaggctg

SEQ ID NO: 377118 - DNA, 82 bp, Homo sapiens
gaggagcctggctaagcaaaaccctgcagaacggctgcctaatttacagcaaccatgagagagctcagaaatatgctcagca

SEQ ID NO: 377119 - DNA, 98 bp, Homo sapiens
ccggattgtactgtatggggactccaattgcttggatgacagtcaccgacagaaggatgtcctcctcgcactttcttaccagccctttgcaaaatttt

SEQ ID NO: 377120 - DNA, 100 bp, Homo sapiens
gcggaagtcattgccagaagaagatgtagccggtggagagattcaaccagttagcgtgaaagttggagataaagttcttctcccagaatatggaggcacc

SEQ ID NO: 377121 - DNA, 75 bp, Homo sapiens
ctcagcacctgcttgtttggaagggtttcatcaccttaaatggttttgaaccaatgaaggtgtattcccttaaaa

SEQ ID NO: 377122 - DNA, 101 bp, Homo sapiens
cctcgcacactctttgtcactgagcttgcattcacaagagatgggctctgtggtctgtggaatgaaatggttaaagatggagaaattgtatacactggaac

SEQ ID NO: 377123 - DNA, 100 bp, Homo sapiens
gtcatggagatggaaaaggagttcgagcagatcgacaagtccgggagctgggcggccatttaccagccgtggggccaattttttaactcagatcttgctg

SEQ ID NO: 377124 - DNA, 90 bp, Homo sapiens
cacccctggagaagcgcgttaaggagctggctcaggcacaggagacgatggactcactggccatggtggagggtgtcagcagctgccagg

SEQ ID NO: 377125 - DNA, 74 bp, Homo sapiens
actgtgggcagcaatattcaggttcagaagctgctgaatgccttttttgcccggaagctgaagaaacttggtaa

SEQ ID NO: 377126 - DNA, 83 bp, Homo sapiens
caatgaggctccctgctcagctcctggggctgctaatgctctgggtctctgttgttgacctcctgtactggagagacattaag

SEQ ID NO: 377127 - DNA, 74 bp, Homo sapiens
gagaagtagttactgtgcacatgtgtagatttgcaggaaccctaaggactctgcaatatgaataattccctaga

SEQ ID NO: 377128 - DNA, 98 bp, Homo sapiens
tcctgtacctgtgtgccacctgacccagcctagaacattccatattctgcttcacacacggtgactcactcactactgctttgtaccagtgtgcccac

SEQ ID NO: 377129 - DNA, 98 bp, Homo sapiens
gagagcgcgcctagccggctcgcgaactgcctctttaagctatgtcccatgaaccgctactctgcccaaaagcagttctggaaagccgctaagcctgg

SEQ ID NO: 377130 - DNA, 100 bp, Homo sapiens
gaagtgggtaaatatacaatggtcttccacactagagacaaaggcaatgaggtgaacgcagaacgacaagttggatggcttgaggactggtactaaaagg

SEQ ID NO: 377131 - DNA, 75 bp, Homo sapiens
atcaacctggagctctacgcctcctacgtttacctgtccatgatgctgcctcgaactctgtcactgagaccccac

SEQ ID NO: 377132 - DNA, 83 bp, Homo sapiens
cgctcatgtgtcggaactagatctttctgacaacaaactcgaagactggcatgaggtacgaaaggactatggataacatgact

SEQ ID NO: 377133 - DNA, 133 bp, Homo sapiens
ctggctcaccctttgggtctttgggacgtcctttttgcccttcctcctctgtgcggtgctgctcagtgcagttcaggttggatggcaagcatgtggtgtttggcaaagtgaaagaaggcatgaatattgtgga

SEQ ID NO: 377134 - DNA, 100 bp, Homo sapiens
aagaaaagcacccttattaagaattgcagcaagtaagccaacaaggtcttttcaggacagagcgggatgccaccagcttgtccaaagggaagttccagga

SEQ ID NO: 377135 - DNA, 100 bp, Homo sapiens
gcatgtggctcctggtcagtgtaattctaatctcacggatatcctctgttgggggagaagatttcagccttccaagttctgatgtaacaaacaacttaaa

SEQ ID NO: 377136 - DNA, 98 bp, Homo sapiens
gcgacatcccagagagcttccagatccaagtggtaagaagttcagaagcaagcctcagttggcaaggtacctgggaaatactgttgatctcagcagtt

SEQ ID NO: 377137 - DNA, 95 bp, Homo sapiens
gtggccaccggagactgaagtacaggtacagagccagatggactccttcggacaaactacagttctgtgttaacaaatgttggtgctgctctgca

SEQ ID NO: 377138 - DNA, 51 bp, Homo sapiens
tggaaaccagatgaagaagatgagatttcgagcttaatgattaagagagag

SEQ ID NO: 377139 - DNA, 50 bp, Homo sapiens
gggagggagccatgaagcattacgagagtaatcaagtcagaggattatat

SEQ ID NO: 377140 - DNA, 74 bp, Homo sapiens
agacacccctgatgccatcattttctgcaccttcaggaacagctttgtctgttcaccagttggctgctcaggga

SEQ ID NO: 377141 - DNA, 50 bp, Homo sapiens
cccatggtcatcagcagcatcgtgcagggatccggtgtgattaaagctgg

SEQ ID NO: 377142 - DNA, 100 bp, Homo sapiens
aacggacactttcgcaacatcaagggagttttccggggccctctcagcaagaacgggaacaaaactctggatcaatgtgactctaagaacaaatggatga

SEQ ID NO: 377143 - DNA, 75 bp, Homo sapiens
ctttggtgccctcaacatctctcagagacgaaagtttccaaccacagctacaaaaatttctcccaaagaagaaga

SEQ ID NO: 377144 - DNA, 135 bp, Homo sapiens
cggccatggacctggcggatccggcctgccctggcccagctcaacacctgatttcgcctcctgacaaggtgatccgggcgggccccgcaggaattttatcccctcaccggcctcacactagtatcgcatgtccac

SEQ ID NO: 377145 - DNA, 78 bp, Homo sapiens
gttctccaatgcaatgctgtttgccctgaacatcatgaattcccaagaaggaggtttctaaggtaaacggagtcactc

SEQ ID NO: 377146 - DNA, 100 bp, Homo sapiens
gaaataaaggagcaagaaatgttcaaaggaacaacatctttaccatctcatctcaagaatggagggtgaacggaagagtccttatgttgcagtatgctgt

SEQ ID NO: 377147 - DNA, 75 bp, Homo sapiens
gaggaccccggtacatctgaaagccgggaaatgtgtaaggcaaacattggtgggcaccgatcttcctgttcattc

SEQ ID NO: 377148 - DNA, 71 bp, Homo sapiens
ctcattatctaccacccgagatgccccaagtccaaaccaggttgcagagaaggtggcctccagaatcgccg

SEQ ID NO: 377149 - DNA, 75 bp, Homo sapiens
cttcgtccttccagaagagatcattcaggaggtccgagaaggggcagtagtaggtgctcaaaacatcacagcccg

SEQ ID NO: 377150 - DNA, 74 bp, Homo sapiens
aatcagtggtgcaatgtggtgaatggtgtgctcttgcttgcacagcttttgaatgaggacccagtacttcaact

SEQ ID NO: 377151 - DNA, 95 bp, Homo sapiens
tttgttgttgatgaagtgagcaacattgtaaaagaggctgaatcttctccatttgttgagcgacttctgaaaaagggctatgaagttatttacct

SEQ ID NO: 377152 - DNA, 102 bp, Homo sapiens
cccgcgtccagctcgcccagctcgcccagcgtccgccgcgcctcggccaagatcaatgtccgagttaccaccatggatgcagagctggagtttgcaatccag

SEQ ID NO: 377153 - DNA, 83 bp, Homo sapiens
gtgcagaagaaaccagccgaacttcagggtttccaccgttcgttcaaggtggcctgtgagtacggcatggtgcacgtggtctc

SEQ ID NO: 377154 - DNA, 100 bp, Homo sapiens
agccacaacaagacctcccggcccaagatgtccctggtgatgcctgccatggcccccaatgggcgaactttgcgttgcaaggctttctacagtgtcaatg

SEQ ID NO: 377155 - DNA, 100 bp, Homo sapiens
gctgcttcctccatcctggtattttttggagcttccatcctggttcttccaaagtgcccggacccaaaacaggaaactgggctggcttagatgaagatga

SEQ ID NO: 377156 - DNA, 100 bp, Homo sapiens
cgggacttcagtcctagtggcattttcggagcgtttcaaagagctctctgatgtaaaggatggagtaaatcaagcagcacctgcatttggatttggcagc

SEQ ID NO: 377157 - DNA, 75 bp, Homo sapiens
ttccatcctcaacaagtacgacgctcctggggatggtcctgtccatctgcttgtgccggcacgtccattccgaag

SEQ ID NO: 377158 - DNA, 74 bp, Homo sapiens
cacaggagacattggtcgctggctcccgcctgatcctgcctgaagatggtgccactggtggctgtggtatcagg

SEQ ID NO: 377159 - DNA, 74 bp, Homo sapiens
cccaagcagagccgccttcctcacgggcagataccctgtgcgatcaggcttaacagcattgcgcagtgatgaag

SEQ ID NO: 377160 - DNA, 50 bp, Homo sapiens
agcggggcgctccaggaggcactcacaggactcagaattcatgattgaag

SEQ ID NO: 377161 - DNA, 96 bp, Homo sapiens
gcggctgtctcacggaccacggcggcgcccgcagctcctcaccgaccatcgggaaggtgctgatgcagtatgcagacatcttgtcaaaggacttcc

SEQ ID NO: 377162 - DNA, 74 bp, Homo sapiens
gaggcctacgcagagctcatcgtccttggtggacccaagtggagagattgtggaactggcgaaaggtgcatgtc

SEQ ID NO: 377163 - DNA, 75 bp, Homo sapiens
cagcttctaccatgccttttcaggagcgcagaagggtatttctcaagctgccagatacgtttaccaacgactcat

SEQ ID NO: 377164 - DNA, 100 bp, Homo sapiens
ggggtaacaagatggcgaccgagacggtggagctccataagctaaagaggttgacggatatattcagacgttacgacacggatcaggacggctggattca

SEQ ID NO: 377165 - DNA, 83 bp, Homo sapiens
tgaggagccagacgacaagcacacactatggcgctgaaacggattaataagtgatatcagtatcaagataaaagtttggaatg

SEQ ID NO: 377166 - DNA, 97 bp, Homo sapiens
ataccatgatgagtcttctgaagactgtggtcattgtgcttggaacattcttccagaagaaatttgcaatgctgaagaggatgatgactcaaatctg

SEQ ID NO: 377167 - DNA, 74 bp, Homo sapiens
tttccctccagctctgtctatcctaccaaggtgccttatgcccgctcagaggcccacctcacagagctgctgga

SEQ ID NO: 377168 - DNA, 97 bp, Homo sapiens
tgcatttttgcttcagagtaatccatatgtaaaggtgcggtcttgctctgttgcctaggctggagtacagtggtatgagtatggctcaatgcagcct

SEQ ID NO: 377169 - DNA, 75 bp, Homo sapiens
cagaagcttcaccacaaaagcgaaatgggcacaccacagattgagaggatccagaatccagatctctggaatagc

SEQ ID NO: 377170 - DNA, 75 bp, Homo sapiens
gccatggcaaaataactggctcccaggctacattggagtggtgaaccggagccagaaggacattgatggcaagaa

SEQ ID NO: 377171 - DNA, 74 bp, Homo sapiens
taggatggtgaagacctacgaggaacctgaagggccgagaagtcctgctgtgtttggtgccatcatctcttact

SEQ ID NO: 377172 - DNA, 75 bp, Homo sapiens
tcaaggaggagtgtgaccgcctgggccctggcatggccgacataaaatggcttccttctttgactgtaaccatgc

SEQ ID NO: 377173 - DNA, 83 bp, Homo sapiens
agacagagcgctactcctggcagtgcgtcaatcagagcgtcctgtgcggaacttgctactaccagcaccatgccctaccaata

SEQ ID NO: 377174 - DNA, 75 bp, Homo sapiens
caaacactggtcaacagcacatcattgtataagtggtgctcctgtacatcctgcttggcaccatcgggaccctgg

SEQ ID NO: 377175 - DNA, 82 bp, Homo sapiens
acagacctctgtttggggagacgtccgccaaggtatctcgggggagctttgtgccttgatggatcaagttcatcatatgcag

SEQ ID NO: 377176 - DNA, 75 bp, Homo sapiens
agactgactgggcaacatgttattcagatcatccagcccctcttagaacttgaccaaaatagaagtaaattaaag

SEQ ID NO: 377177 - DNA, 82 bp, Homo sapiens
cttgcagctgctgtcagcatggcccaggctcctgctgacccgggcagagaagattacccagcagttagagaatatctgtcta

SEQ ID NO: 377178 - DNA, 75 bp, Homo sapiens
accgcacactggatgaatggaagcgcccgctacaacttcatccgaagcatggccgcctacagcctcctgctgttc

SEQ ID NO: 377179 - DNA, 100 bp, Homo sapiens
gccagtacctccaggccctgaacgcggactggcacgcagactgcttcagatatcagttttagagaatgtggcgtggagaaattctcaaggaaagagtaaa

SEQ ID NO: 377180 - DNA, 100 bp, Homo sapiens
ccgctatgaagagctggctcggatgctgatggggctggacctgctggtgttcgcccacgaccatggtggcatttttctgaagttgttcattaagacttcc

SEQ ID NO: 377181 - DNA, 100 bp, Homo sapiens
cagaggtggaagtccaagtcaaacgcagaaggactgcctcactgagcaaccaagagacagagcgggatgccaccagcttgtccaaagggaagttccagga

SEQ ID NO: 377182 - DNA, 100 bp, Homo sapiens
ctggaagacgcgctcctgcgccggttggtaacaaggaagatgctgagaaggaagtagctatttctaccttctcatccagtaaccaggtatcctgcccgct

SEQ ID NO: 377183 - DNA, 127 bp, Homo sapiens
ttttggaggactgccctatacagcccctcattcctttatatttgctagtgggtggcatcgtcggtaccttaaagatggaacttgctaaggaagaaaagtgtgaatttctgccattcctgtccccacg

SEQ ID NO: 377184 - DNA, 83 bp, Homo sapiens
ctcaccttcaacaaccccaccacggagttccggtacaagctcctgcgggccggcgggggagtgcatccgccccaacccttttc

SEQ ID NO: 377185 - DNA, 100 bp, Homo sapiens
gttcaaacaaatttgcaaatgatatacaacttctaaggcacaccttgggcccaccccacctccacatagccttaattacaaatcagaggacaggcttagt

SEQ ID NO: 377186 - DNA, 101 bp, Homo sapiens
agaagatcattatggagcagagatcaggccaagtttggaatcactggggcctctgaaaaatggaaccaaattctctgaggactaaagtcccagctttctta

SEQ ID NO: 377187 - DNA, 88 bp, Homo sapiens
aagaagtcagctgttgcagataaacatgaattgctcagccttgccagcagattggtccagaaaagggcgtggtgcacctggcgacagc

SEQ ID NO: 377188 - DNA, 82 bp, Homo sapiens
ttctactacgtggaccaccagggccagcgtccagcctgcatgccgtgcggactgcacccaccagcaaggtgatcaagacccg

SEQ ID NO: 377189 - DNA, 100 bp, Homo sapiens
ccaccttcatctccaccatcggaatggatcgtgattatggccctggatcttatggaggtctgacattcaaggatatttatctaaaaattcttcttttgag

SEQ ID NO: 377190 - DNA, 100 bp, Homo sapiens
attataattctcaaacaaaagaatctcgctgggccaaacctaaagaacttgaggatcttgaaggaaaccgtacccttcggagatgcggtgctggtgacat

SEQ ID NO: 377191 - DNA, 99 bp, Homo sapiens
ggaaaaggagttccctggatttttggaagcagtttgaagagaacacatgaagaagaggatgattttggaaccatgcaagtggcgactgcacagaatggc

SEQ ID NO: 377192 - DNA, 50 bp, Homo sapiens
ggacggttgctccgagcgtcggccaagatcaaggctcgagatcttcgcgg

SEQ ID NO: 377193 - DNA, 100 bp, Homo sapiens
ccaaataagctatatactttggttacctatgtacctgttaccactttcaaaagtttcagaaaagggatccctaacatcagaagagtttgctaagcttgtg

SEQ ID NO: 377194 - DNA, 75 bp, Homo sapiens
gggacttcacctccgcgctcttcttcgccagcaccgtgctctccaccacagacaagttggatggcttgaggactg

SEQ ID NO: 377195 - DNA, 51 bp, Homo sapiens
cttgaaccaggtcatgctccaaataataacaagcctttgtattcatttgaa

SEQ ID NO: 377196 - DNA, 100 bp, Homo sapiens
actggacatgtcagtgtcctttcacacccatgtgaaagaggacaatgaaaagcgaaccccattgcacgccgcagcttaccttggagatgcagaaatcatt

SEQ ID NO: 377197 - DNA, 82 bp, Homo sapiens
tgggatccccgccgctctgtctacaacccgaggtagcagtagctgatgtgcagtttggccccatgagatttcatcaagatca

SEQ ID NO: 377198 - DNA, 59 bp, Homo sapiens
tctgcagcttcaagatcaatgactcggtcacactcagtctcttcgagccaggggacatg

SEQ ID NO: 377199 - DNA, 50 bp, Homo sapiens
tccaaatcatcaatgaagcaagtaagttaagtgggcagaccaacatccac

SEQ ID NO: 377200 - DNA, 75 bp, Homo sapiens
gaccaccgcaggcgctgtcacccagtgctgcgtggtgaccaagatgaagatgcagaggaccattgtcatccgccg

SEQ ID NO: 377201 - DNA, 100 bp, Homo sapiens
aagtcccccgtggtcacatctgggttgaaggtgatcatcatggacacagttttgacagtaattcttttgggccgtatcaaatcatgggtggataagatgc

SEQ ID NO: 377202 - DNA, 100 bp, Homo sapiens
aaagggaaaactacagccaccacacacaaggtcttgtccaataagcatgtggctcctgatcatcttttgcaaatctgccagcgcatcggtcctatgttgg

SEQ ID NO: 377203 - DNA, 73 bp, Homo sapiens
gaatccgaggaatcttctgcacagctgataccccaatgtccttctttgactttgtggttgatcctcattcttt

SEQ ID NO: 377204 - DNA, 50 bp, Homo sapiens
gtcggcgtgggcgtttgaggaagctgggtagctacagcaagctgggtagc

SEQ ID NO: 377205 - DNA, 75 bp, Homo sapiens
acagcaaatgctgaggactcagaccagtctctgcaagagtgtggacactgccagcggctgcagccgacttggaat

SEQ ID NO: 377206 - DNA, 100 bp, Homo sapiens
gaagccggctggccgtgatgctgcccactggtggtcccccgctcccggggtccccggccggccaagcaggctgctctttggcgtaaattgcaatcgatta

SEQ ID NO: 377207 - DNA, 98 bp, Homo sapiens
atcctgtttttcctgagcaaccagagaaaccacttgaccttgcacatatagtgatttgaccctaaagcatggctggaggactggtgcaatcatcccag

SEQ ID NO: 377208 - DNA, 75 bp, Homo sapiens
gaatctgggcgtcgctctagaggattcaggtccgttcctctgaagaatgggtacagcgaggacatagagctggct

SEQ ID NO: 377209 - DNA, 137 bp, Homo sapiens
tgaactcctaatatcaccaattcttctaagttcctggacattgatccggaggaggattcgcagttcaacatcaaggtgctggagaatctggtaaaagcaccattgtgaagcagatgaggatcctgcatgttaatggg

SEQ ID NO: 377210 - DNA, 98 bp, Homo sapiens
agcccctaagggcccttcgcgggagagcgtcgtgcacgcgggccagaggcggatatgacagcgcgtgatctgctacagcagagatacacccttccaaa

SEQ ID NO: 377211 - DNA, 89 bp, Homo sapiens
ggactggtgatctacgtgtgctttttcaagggagctgataaagaacttcttcccaaaatgggaccctaaagtaaattggttgaagaaat

SEQ ID NO: 377212 - DNA, 98 bp, Homo sapiens
ggataccttgtttcaaggtttacaggaagtatttttattggaagaggatctaggagaaagcagcaggtatattgtgatgggccacatctaccataaga

SEQ ID NO: 377213 - DNA, 98 bp, Homo sapiens
cgctgcactaacgcaggatccggctgccgaaggtcctcgccagatgtcatctgggtgattctcagtgtggaggtgggtggacttttaggagtaacgca

SEQ ID NO: 377214 - DNA, 75 bp, Homo sapiens
gttcagtgactgctattgaaccaccaaaagtccattatgaaactgtgtgaagattgctcctggagcagttgtatg

SEQ ID NO: 377215 - DNA, 83 bp, Homo sapiens
cggccagttttgaaatcgacacacaaagaatagagttgagcctgtgggacacttcgggcgtcacaatgtagcagggaccccag

SEQ ID NO: 377216 - DNA, 100 bp, Homo sapiens
cacttactgcaggattttcagcttcagcaagcagctaaagctccatggaatagagattcctgaaaggacagattatgaaatggacaggcaattcctcata

SEQ ID NO: 377217 - DNA, 50 bp, Homo sapiens
gcagtaccctgaaggacaacttgggcggcctcccccagggaagaacttca

SEQ ID NO: 377218 - DNA, 100 bp, Homo sapiens
gccactgttcggttaaaggagcctcctgtggatatctgtctaagtaagggaaaattttttctggaagatcctactggaacagtccaactagaccttagta

SEQ ID NO: 377219 - DNA, 74 bp, Homo sapiens
acacatcaagttaaatttggtcaacaaaatccacgtcagattaaagagtctattgttggggaaatcagacggga

SEQ ID NO: 377220 - DNA, 116 bp, Homo sapiens
ccgggagaagcatgggaaggaggccgagccgggatctcaggtcctcgggggcggcggccacgccaaggacggagtgatcagcagctggactgtgccttggacctaatgaggcgcct

SEQ ID NO: 377221 - DNA, 100 bp, Homo sapiens
cctgccgtctgctcttctgcctcttgatctccgccaccgtcttcaggccaggtattaataggggaccctattaccacatgtctttctccctcagtgtatg

SEQ ID NO: 377222 - DNA, 100 bp, Homo sapiens
tgatcaagaacttcttctgaggacagacaggatggagaagagttcctgggaaatacatgagaggagaatgaaggaacagtaccttatggctatctcagat

SEQ ID NO: 377223 - DNA, 50 bp, Homo sapiens
gaaactttgggacattcaaagcattgcaagatgtggtactggatcttcct

SEQ ID NO: 377224 - DNA, 100 bp, Homo sapiens
aaagtcaatcgtaggaagaacacagtacaggtatatatgagagatcgagaaattgctgccacagccagagacctagaaatgagacagctggaactcgaat

SEQ ID NO: 377225 - DNA, 100 bp, Homo sapiens
gacatggacgccacgctggaggagctgtcggtgcagcaggagacggaggaccagaactacggcatctctgggcctcagaactgtgctgcctgtgttcacg

SEQ ID NO: 377226 - DNA, 95 bp, Homo sapiens
ttccaccatacgccaatatcaagcatgtcatcagatttgccagccttgcagtctcatcctactcaagtgtggctctgtatccaacaacagtcttg

SEQ ID NO: 377227 - DNA, 90 bp, Homo sapiens
gggtttctccatgttggtcaggctggtctcgaactcccgacctcagagatgggaactttgtccccataaggatggagctttaaaaagaac

SEQ ID NO: 377228 - DNA, 75 bp, Homo sapiens
gcaagaacgggaacaaaactctgcaggaacgaatgcaggaatttgggaactgagctgtgcaagtgctgaagaagg

SEQ ID NO: 377229 - DNA, 99 bp, Homo sapiens
caccagtttccggacagcttcgtgctggtttgcattgagactccttgcattccgccagatacacaaagttctaggcatggatccattaccgcaaatgag

SEQ ID NO: 377230 - DNA, 83 bp, Homo sapiens
cggcgcgggcactgctttccactcggctcctgtcgtccgttctctcaggctcccgttcaggaggctgaaccgtctgagcccag

SEQ ID NO: 377231 - DNA, 106 bp, Homo sapiens
cagcagatggcggatgccctgcagtacctgcagaaggtctctggagacatcttcagcagtgccggtggtggtgtgcacattgagccccggtatagacagttccccc

SEQ ID NO: 377232 - DNA, 83 bp, Homo sapiens
ccaagagtcagtattccggccagcttcacgaagtcagagaggaaggatcgagatcgagaccgggatcgtgaagatcggtctaa

SEQ ID NO: 377233 - DNA, 98 bp, Homo sapiens
cccacttccaccagagacacattgagaaggaggaaactatggcctccaggcttccgacggcctggtcctgtgatggatagaatgacagaagatgctct

SEQ ID NO: 377234 - DNA, 90 bp, Homo sapiens
ccggagatgagccgaggcttggaattcctggggaagtcggagcctgagcaccagcactgagcctggccgtgggaaggaagcatgaagacc

SEQ ID NO: 377235 - DNA, 121 bp, Homo sapiens
atctagtgctgggcctcagcgccgtcctgggcctgctgctgctgaggtggcagtttcctgcacactacaggtgttgaaattccgtaaacttaacttcaatggggagggtgaacccgaagaa

SEQ ID NO: 377236 - DNA, 96 bp, Homo sapiens
actccgatgagctgctcatcgacctggagcggccccagagcaacagcagcgctgtcacagggacctcggcttttgttaggagtgataaacccaaac

SEQ ID NO: 377237 - DNA, 100 bp, Homo sapiens
agatggctacgagggtaacatgttcgctgaggaagtggagaggctggcggcgatgcgttctgactccctcgtcccaggcacccacaccccacccatccgc

SEQ ID NO: 377238 - DNA, 74 bp, Homo sapiens
ctttcttgtgccccttctgagccatcaggaagtcaaagttcaagcggcttcaatgatccatcctaaagaggtgc

SEQ ID NO: 377239 - DNA, 100 bp, Homo sapiens
gaaaagcgtttccgcagacagaagtggggagaagcggaggtttggtgcacctcgatttggaggaagtagggcagggcccttatctggaaagaagtttgga

SEQ ID NO: 377240 - DNA, 100 bp, Homo sapiens
aaagaagtcattccttttttgaaggtgtatcaaaccgaatgataaaaaagcagcacacatcttcaacgaggctctagtgtgtcatcagatcaggtacctg

SEQ ID NO: 377241 - DNA, 80 bp, Homo sapiens
agggcctcaagcgcagcgccctcagcagctccctgcgggacctctcggaagccggtaccccctgtaccggctgggtggcc

SEQ ID NO: 377242 - DNA, 97 bp, Homo sapiens
agtccagcacagaccctcgggcctcatcatggccaggaaggttaaaaataagaagttggttgagctgctgagaaggaaagttcgtctcgcccagcct

SEQ ID NO: 377243 - DNA, 74 bp, Homo sapiens
tttctggctccgggctgagcttcctggagaagaggaaggcccctggccccaacatggcccgtcgctctcagagc

SEQ ID NO: 377244 - DNA, 83 bp, Homo sapiens
tcccaatcccccactctttccgccctaatggaggtctccagtttcggtttaactatagatcaacacatcatcttgcatctcat

SEQ ID NO: 377245 - DNA, 75 bp, Homo sapiens
tggagttcgaatttcggccggacggaaacctttgcccgagcaaagacatgggtgaaggaactacagcgacaggcc

SEQ ID NO: 377246 - DNA, 76 bp, Homo sapiens
gtcattgcctgaatcctcactgaccgacctgctcagtgacaaaggtctgcggggtttccgagaggctcgccgggat

SEQ ID NO: 377247 - DNA, 75 bp, Homo sapiens
cttccgtcccggacagagcccgtggtcgcgcaggctcctggcgacctccctgctgcagggggccctcccagcggg

SEQ ID NO: 377248 - DNA, 50 bp, Homo sapiens
cgattggacagaatttgtgaagtacacacaaaagtattttctggaagcag

SEQ ID NO: 377249 - DNA, 87 bp, Homo sapiens
ccggcagcgccgagatccgagcccatgccacagccaaggtccctagctgttggtagtaagtccggttataaatttttctccctttct

SEQ ID NO: 377250 - DNA, 94 bp, Homo sapiens
gtcactgcctgcgcagctccggccgcctggctccccatactagtcgccggtcaaaatgcagatcttcgtgaaaacccttaccggcaagaccatc

SEQ ID NO: 377251 - DNA, 125 bp, Homo sapiens
gccagtattacactggagttttaggtttcccaatattctgaaagaaattaaacattttgatgcagacatctgggacataggaggacaaccccgatttcgaagcatgtgggagcggtattgcagag

SEQ ID NO: 377252 - DNA, 100 bp, Homo sapiens
ccaaaaaagactcttttccctgttttacctcaatcatatatccacacaagtgcttctcttgacatttctcgaaaatgggagaagaagaataaaattgttt

SEQ ID NO: 377253 - DNA, 50 bp, Homo sapiens
accaaccaaattgtcgccattaagaaagacgccaggaaagcatgtgcaga

SEQ ID NO: 377254 - DNA, 100 bp, Homo sapiens
cagcctcctgagtagctaggattacagctttgtcagtggaaatgcctgccccagagggatattgcttcagttgacctcattttttaaggaccctggctct

SEQ ID NO: 377255 - DNA, 75 bp, Homo sapiens
atttacctgttttctgggagcttcgaaggagcagcagccaagctggacagatgacctgcctctctgccacctctc

SEQ ID NO: 377256 - DNA, 100 bp, Homo sapiens
cggaaaatagcctttgccatcactgccattaagatttcagcaacgtccctgatatcacaacaggtctgaaaaggagtcagacagatggcactctggatca

SEQ ID NO: 377257 - DNA, 100 bp, Homo sapiens
atgaagctaccggccagggttttctttactctggggtcccggctgccctgtggcctcgctcctcggagggtcctatctgactcctgtacgggatgaggaa

SEQ ID NO: 377258 - DNA, 100 bp, Homo sapiens
tagtaagttcttctacaaattctttcaggagtttacccaagaaccattggtggagatagaagcttttcgctgtggcctgcagtttttaggcaacattgcc

SEQ ID NO: 377259 - DNA, 88 bp, Homo sapiens
tttcttctcacactcaatacaggacagcttttgaaaccataatactgcttacaaaactcttttggtacaccagaaggccagaatggaa

SEQ ID NO: 377260 - DNA, 83 bp, Homo sapiens
gcggagcccggctcccgcaccatggaggaggacgacagctacggaagcgttgttgacgaccatggacatcatccacgatggat

SEQ ID NO: 377261 - DNA, 100 bp, Homo sapiens
gtgggcgaagctctatgagtttgttcacagttttcaggatgagaagcgtcagctggcttaccagagtttcttcttcaaggtctcaaggtctgaagcatcc

SEQ ID NO: 377262 - DNA, 83 bp, Homo sapiens
agggctgtatgagctctcagcaagcaactttgagctgcacgttgcacaagagatctcggctcaccaaattccacaacctgaag

SEQ ID NO: 377263 - DNA, 80 bp, Homo sapiens
gggggcgccccgatgagccccgagtgcgaggagccgccgccccccctcgcagtggagacctttggcgacttggcctttgg

SEQ ID NO: 377264 - DNA, 96 bp, Homo sapiens
tttgacaagactaaaaacacttctctcagaaacagaggtctatgttaacaatgaatgggcaaccagtgttggggaaggagggagctttggagaact

SEQ ID NO: 377265 - DNA, 100 bp, Homo sapiens
cggcgcagcgggggtggcgctgggagcaacgggagtgtcctggacccagctgagcgggcggtcattcgcatcgcagcgcgagcttcggcctcggctctgt

SEQ ID NO: 377266 - DNA, 83 bp, Homo sapiens
gctggactacaatgcaggactgctctcctactacacggattttttatcaagcagaaatgcatcgaacaacgagaatcaagatc

SEQ ID NO: 377267 - DNA, 50 bp, Homo sapiens
ctggaacaacattcgtaactttgacaatgacacaccagttactctgggag

SEQ ID NO: 377268 - DNA, 85 bp, Homo sapiens
cgaccatcaaatccgtgtcggagtccttacaggtacaccaggggttggaaaaaccacactaggcaaagaacttgcgtcaaaatca

SEQ ID NO: 377269 - DNA, 97 bp, Homo sapiens
ccggtggcagcatctcctggacctcattgcagccagttggacacgagcctgaacattggtctgtctatagaagatatcttgaattctatgtacttga

SEQ ID NO: 377270 - DNA, 82 bp, Homo sapiens
ttttagctacatcaagtgatgaaaaacacccacctgaaaatatcattgatgggatcttagaaatgaagttgaaaaattacgc

SEQ ID NO: 377271 - DNA, 101 bp, Homo sapiens
cacagagctgcttgcctgaaaaaacaaaagattaccattgttcacaatgaagactgcttctttaaaggggacttacttctcacgcctaccagaatctacag

SEQ ID NO: 377272 - DNA, 85 bp, Homo sapiens
catggtcccagaaacgtcactatcaagaaggaaaaaagcagcaagccttcaggtgttccagtgatgcctgacacaattgagctgg

SEQ ID NO: 377273 - DNA, 75 bp, Homo sapiens
tctgatgaagagcagcgagaatggcgcggttgtctgcattcaaaagagcattctattaaagctaccttaatttgg

SEQ ID NO: 377274 - DNA, 90 bp, Homo sapiens
ggacgaggagagacagaagaagctggaggccggcaaagccaaggctcagctatgtgaaccatgcagaggacctggcctccaagctcctac

SEQ ID NO: 377275 - DNA, 142 bp, Homo sapiens
gaaaagtcttcagaccgtggacaatgtgctctttgcccctattatggagaaaggtgttccctagacggtactgcagggacaccagcaatatcaacgacgacaactgtggaaatccgcaaaagcagtgttatgacaactgaga

SEQ ID NO: 377276 - DNA, 90 bp, Homo sapiens
ccatacctcccctgtccagaaaagctgccttatatgcccaaaccaaacaggaagcttacttttctctacctagccaatgatgtcatacag

SEQ ID NO: 377277 - DNA, 75 bp, Homo sapiens
cgcagtggtcgcttcttctccttggaatgtgcggcaagaggagaagactatgagaaagtgaagttgctggagatc

SEQ ID NO: 377278 - DNA, 100 bp, Homo sapiens
gaggcgttggtgctcacggccaaggccacgctcaaggagttatgaccactcagaaaattctgatttggtctttggtggccgcacaggaaatgaggatatt

SEQ ID NO: 377279 - DNA, 60 bp, Homo sapiens
aggcggtggtggtggcggccgctggccagtacccgaaaaatcctgtctgcctgtgagaag

SEQ ID NO: 377280 - DNA, 75 bp, Homo sapiens
cgcgagtgggagcaccaggatctcgggctcggaacgagactgcacggctctgtgtgctccgggatggagcaggtg

SEQ ID NO: 377281 - DNA, 74 bp, Homo sapiens
ttcaaccagattcttcttctcccagacatcgacagttgcctgctgtcagtaagctggtacagaaggttgacgaa

SEQ ID NO: 377282 - DNA, 97 bp, Homo sapiens
gcagcgggttgtgaaggacatcactaacgccttcaggaggaacccacacatgcccgatgagagaaagggaaagttaaggatgctggagcagaacaat

SEQ ID NO: 377283 - DNA, 100 bp, Homo sapiens
cccggatgctgcggcgcccgctggccgggctggctgcggccgccctgggccgggccccaccggacgtgttctaagaacggaagcatctgggctggatgga

SEQ ID NO: 377284 - DNA, 87 bp, Homo sapiens
aaggcactggatgatgcaatcaaagctcgacttctcaatcccaagtggccaaagagcagcccgacggccatggaggctgaagagacg

SEQ ID NO: 377285 - DNA, 75 bp, Homo sapiens
gacaaggcactgctttttcatgacgccagcgtcccatgctcggtggccccagaaaagtcagtgtgtaggcctcag

SEQ ID NO: 377286 - DNA, 82 bp, Homo sapiens
aagatcgtcgccacctggatgctggaggtgcaggagaacccggggaggaggcccaggctctgctggagggcttcgagggtga

SEQ ID NO: 377287 - DNA, 88 bp, Homo sapiens
aagggccggctgcacctgactttggccaacgtggaatctatctaccgccggggagccagaagatggaggaagctgtaccgtgccaacg

SEQ ID NO: 377288 - DNA, 101 bp, Homo sapiens
ccggcgccccccgctccccgccgggacgccccgcgccgagccggaggccgcgtggacccgaaagccgctgggaaaaatggagttttaacattgaatgcgga

SEQ ID NO: 377289 - DNA, 100 bp, Homo sapiens
tggggagggaggactggaccacctgtggcggcttgggagcccgcacgccctaggaagtttgcccgctactacctggccaataaatcatcccaggcccaag

SEQ ID NO: 377290 - DNA, 100 bp, Homo sapiens
cagcaggctccgggctgaagattgcttctcttctctcctccaaggtcacagaagatgtgaattcaagtatcaagacatttttttgtcccaatgataccta

SEQ ID NO: 377291 - DNA, 98 bp, Homo sapiens
gcgctgccatccgcaaaggctttctcgcttgtcaccttgccatgtggaagaaactggcacaagcccaccgtactgttgtgtggatctgtattcacttc

SEQ ID NO: 377292 - DNA, 74 bp, Homo sapiens
tgaaaagtactgcccagagaattttgtagacatcaaggttggtggccctgatgccttggaatatgtgccaggtc

SEQ ID NO: 377293 - DNA, 75 bp, Homo sapiens
ttaagggctacgggaagatcctggaggtggatctgaagaacgggtgaatctggattgggaaagtcgacattaatc

SEQ ID NO: 377294 - DNA, 82 bp, Homo sapiens
cgtgattgcgttacaagctttgtctccttcgacttggagtctttgtccaggacgtaagactttgaccccgacgcaggcttca

SEQ ID NO: 377295 - DNA, 75 bp, Homo sapiens
gctcaaagaaagatgattatcacttattttagaggagattgcaattgattgtcataataaggaaactgaacagag

SEQ ID NO: 377296 - DNA, 100 bp, Homo sapiens
gtctccggggaaagccgtggccccgagggcggatccgagaatgctacagctttccatgtaactgtccaagatgataataacatcgttgtctcattagaag

SEQ ID NO: 377297 - DNA, 74 bp, Homo sapiens
ctgatggtgaacatgccaggagagcaatgcaaaaggcaagcgcctccaggagtggtgctctgtgatcctgtgct

SEQ ID NO: 377298 - DNA, 96 bp, Homo sapiens
cagctgatcaccaccgaggcctggaacatcaactccactgacctgaaagaaatttcagagcttccaagaccacaaacttaaaataagtaaagaaga

SEQ ID NO: 377299 - DNA, 124 bp, Homo sapiens
ccgcctggggatgaggcctggtcttgtggaactgaacttagctcgacggggctgaccgctctggcccagggtgcaaaagctggcaggctgacagaggcggcctcaggacggaccttctggctac

SEQ ID NO: 377300 - DNA, 100 bp, Homo sapiens
catgacagtaacaatgtggagaaagacattacaccatctgaattgcctgcaaacccaggcagcctcagtgagagcaccctgaagtttttgctcctgaatc

SEQ ID NO: 377301 - DNA, 109 bp, Homo sapiens
ctaaattcatcttcaataagaagggccaaattgaattgactgggaaaagatattgtagcccagaatacacctttccatctcagcaagaggttatccggtttgccatcaa

SEQ ID NO: 377302 - DNA, 100 bp, Homo sapiens
caaaaattagcaaaagagaagttacctaccagcgaaaaagttagtaactctcccccattaggaagatgatgagtctccggggctctatgggtttctgaat

SEQ ID NO: 377303 - DNA, 99 bp, Homo sapiens
gcttgcctgtgcgcgcgtgcgcggacatggcctcaaacgacctcgcgacctgtgtcagcagagccgccctgcaccaccatgtgcatcatcttctttaag

SEQ ID NO: 377304 - DNA, 90 bp, Homo sapiens
ccgagagcgtgaccgagagcgcgaatatcgtcatcgttagaaggaatctttggcagctgagattgaggggactatgcgtaaaaagctgag

SEQ ID NO: 377305 - DNA, 116 bp, Homo sapiens
gaagtcgcgtgtctaggtgagtcgcggtgggtcctcgcttgcagttcagcgaccacgtttcactgttacatgccttgaagtgatgaggaggtttctgttactatatgctacacagc

SEQ ID NO: 377306 - DNA, 97 bp, Homo sapiens
agattcgcagtggtcgcttcttctccttggacttgagaccaggagacgtatccagcaagcggaacctctgggaaaagcaatctgtggataaggtcac

SEQ ID NO: 377307 - DNA, 101 bp, Homo sapiens
aagtcacggggcctcctccaccgaggaggtgaatacacctctgattttaatcagttctgcgtttgaaaggaaacccgatgaaacctgatgcgtccttttta

SEQ ID NO: 377308 - DNA, 50 bp, Homo sapiens
tgggggaccacaagatcctcatcgacagagtccggcagcgtcttctcttg

SEQ ID NO: 377309 - DNA, 89 bp, Homo sapiens
ctgaccatggacgacattcgaaggatggaagaagagacgaagagacagctggatgaaagctccaagagtcaggatcgcaagtcagaaag

SEQ ID NO: 377310 - DNA, 51 bp, Homo sapiens
caaggaccctgagtgcaagacagagtttggaaattttagcattcaggtgcc

SEQ ID NO: 377311 - DNA, 75 bp, Homo sapiens
gagttttggagcaaactaatgaccaagatcactccatggatgaaatgacagctgtggtgaaaattgaaaaaggag

SEQ ID NO: 377312 - DNA, 102 bp, Homo sapiens
tattgcccgcgtacatgggctgaggaatgttcaagcagaagaaatggtagagttttcttcaggcttaaagaacactcgtgaaactgctcaggccatcaaggg

SEQ ID NO: 377313 - DNA, 143 bp, Homo sapiens
tggctggagtcgctttcatggtcttgctgattccactcaacggagctgtggccgtgaagatgcgcgccttccaggtgacagagctgaatgaacctctctccaatgaagatcgaaatctcctctctgtggcctacaagaatgtg

SEQ ID NO: 377314 - DNA, 99 bp, Homo sapiens
ggaacgcctggagcgcctcccactgcagacgtctgtccgcctccagccgctctcctctgacgtgataagacagaggcaaccacaaagcttcatgacatg

SEQ ID NO: 377315 - DNA, 82 bp, Homo sapiens
ccaaggtgtcccttggcggcgcgagcaggaaggtactccaaagattcaggtttactcacgtcatccagcagagaatggaaag

SEQ ID NO: 377316 - DNA, 90 bp, Homo sapiens
ctgacgacgtgaaggagcagatttacaaactggccaagaagggccttactccttcacagatcgattgatgcctgggctcagctgaactct

SEQ ID NO: 377317 - DNA, 98 bp, Homo sapiens
ggtgaacttggtcaaattcaatagctgttacctcgacgagtacatcgcaaggatggttcattctcctgtgcctcctgttggctctctttgcatctggc

SEQ ID NO: 377318 - DNA, 75 bp, Homo sapiens
cggggacctttgcggggaggcctcaggattttatggaagaccttgggttatggaacagagaaaagaactctttag

SEQ ID NO: 377319 - DNA, 90 bp, Homo sapiens
tcaggcttactgtggatctggattctaaggcaacacttccttgaagaaacaagcttacagggtaccatgatcctgaccaatttgacggcg

SEQ ID NO: 377320 - DNA, 80 bp, Homo sapiens
cggacagtgtacccactgaggcggccaaagcttaactggatcagggcaggtcaaacatgtgttgacatcaaggacaacgt

SEQ ID NO: 377321 - DNA, 100 bp, Homo sapiens
ctaaccggctggctgcagacccgaacgtgctggccaaagcgctctatgacaatgtggccgagtccccggatgagctctccttccgcaagggtgacatcat

SEQ ID NO: 377322 - DNA, 98 bp, Homo sapiens
tggggcgagggcacacccttccggaactttgaggagttcctgcacgccatcgagaagagggccctcctccccagttcagaatgcagcccacagccacc

SEQ ID NO: 377323 - DNA, 73 bp, Homo sapiens
tttgaagaagctattaaaaatgtgaacacagcactaaatacaactcaggtgcccctgggcgctgggattgctc

SEQ ID NO: 377324 - DNA, 50 bp, Homo sapiens
ggccgaagcccacccagggagttgatggaaggatgataaagactatgctt

SEQ ID NO: 377325 - DNA, 50 bp, Homo sapiens
agctgcctcagttcttagcgcaggtggagtctcgctctgtcgcccaggct

SEQ ID NO: 377326 - DNA, 100 bp, Homo sapiens
cacaggtcacagtaaggccaaaaatgtgcatactcacagagttagagagagggatggtgagttactggaggtgaactgtttgaagacatagtggcaagag

SEQ ID NO: 377327 - DNA, 96 bp, Homo sapiens
gcaggcgctcaccatgttccctggagttgaagaggtcagaaacccaggatgatccacctgtcaggggtcagcacctggaccctcaactgccactgt

SEQ ID NO: 377328 - DNA, 90 bp, Homo sapiens
ccaagctcatggcccagcagggccagcaggggcagatggcaagtggagacagcaatctcaacttcagattcatgatgttgctatcaaaag

SEQ ID NO: 377329 - DNA, 97 bp, Homo sapiens
agggaagaaacacagttcacagcaggacattccgtatctaagccagatttaatcaccttattggagcaaggaaaagagccatggatgattgtgaggg

SEQ ID NO: 377330 - DNA, 76 bp, Homo sapiens
ttgagtggacatctcctaagtgcatctgatgaccatctggaaggggtctgtgtacatcagcaactttcaaacccat

SEQ ID NO: 377331 - DNA, 100 bp, Homo sapiens
ggacaacggagaccagacctactgcagccacgcgggcgagcggctgtgtggatgtcggcgaagccgcgggcgagacaccaatgggaatcccaatggggaa

SEQ ID NO: 377332 - DNA, 75 bp, Homo sapiens
tgccctgaagggagctgtggatggaggcttgtctatccctcacaggactcagaattcatgattgaagaaatgcag

SEQ ID NO: 377333 - DNA, 83 bp, Homo sapiens
cttcaacccgtggctgatagctgaaagatgagtgccaaaccaaatatggaaatgctaatgcctggagatactgtaccaaagtt

SEQ ID NO: 377334 - DNA, 100 bp, Homo sapiens
tgagctttgacatggctagcttgataaataatccagccttcattagtatggatgtcacatgtacttcagtttgaggataaaagcagaaaagtgaaagatg

SEQ ID NO: 377335 - DNA, 90 bp, Homo sapiens
ctgtgttaaattcagcccctcttccagataccatttggctttcggctgtgcagatctgcttggctttgaggaagagtggcagtactgcct

SEQ ID NO: 377336 - DNA, 82 bp, Homo sapiens
ctgaatcgccgaagagaattggctgcgcttccttgtttgtgagctagaattagagtgcctggtgaagaatgtgatgggatca

SEQ ID NO: 377337 - DNA, 97 bp, Homo sapiens
cgtcagcatcagctggcccaacggcatctcagtggactaccagcctctgctgcgagaagttctggagaagcagccagtgctaagccagaccgaggcc

SEQ ID NO: 377338 - DNA, 101 bp, Homo sapiens
ggaggagatgactataagattaaggcagacaagtttcagatgtatgtcacatattgcaaaaataagcctgattctactcagctgatattggaacatgcagg

SEQ ID NO: 377339 - DNA, 74 bp, Homo sapiens
gggtgaggtcgccactccttcctttcaggcttttatagttgtaatacagaaattatgcccggtataaataattg

SEQ ID NO: 377340 - DNA, 100 bp, Homo sapiens
gctgtaaaacacaaaataagcagagaagaatgtgacaaatatgccctgcagtcacagcagagatggaaagctgtgggaggctggatcttttccaatccag

SEQ ID NO: 377341 - DNA, 90 bp, Homo sapiens
gcctgctgctggtgcgcgtgggggtgatcagcttcgcccagaaggaaccagtgttatccaaggagcagcctgcgttccagtatagcagcc

SEQ ID NO: 377342 - DNA, 97 bp, Homo sapiens
tgccaatcctgctctgccaagcgtattagctaagcatagccacgcatctgaccgatttcttaagcagaaactgctggagcgaacccgtgccaggcga

SEQ ID NO: 377343 - DNA, 96 bp, Homo sapiens
gggagtcatcatgagcgatgttaccattgtgaaagaaggttgggttcagaagagggatgtatcggaacagtacaacatctaaagagtaaatttgga

SEQ ID NO: 377344 - DNA, 75 bp, Homo sapiens
gcttgaggaaatgactcggactgaacaagagggttacctacctgggcaaagtctccaccactggcatgcagtttt

SEQ ID NO: 377345 - DNA, 83 bp, Homo sapiens
tagacattgaccccgaggagacgataacgaaggaggcccaacttcattcaataaggagcctgacggatttatcccagacggta

SEQ ID NO: 377346 - DNA, 98 bp, Homo sapiens
ccacgccaactcttagtcccagccagcagccgcttccgacagaactgaatgtaacttcaccgagtaaagaggagtagccccacagtcttcgttacaac

SEQ ID NO: 377347 - DNA, 82 bp, Homo sapiens
ctttatttcctcccagaagacactccccagggcagaaatagcgaccatggcgaggtgagaagccctaccactgcaactggga

SEQ ID NO: 377348 - DNA, 73 bp, Homo sapiens
ctgcggcggcccagctctctctgacacagttgtcggacaagtaaccgcaagagcttgattgtgacctctagca

SEQ ID NO: 377349 - DNA, 74 bp, Homo sapiens
tagaagaggtgatgatagctttggagacaaagctgagctgtctctcttgctgcacaacgtggtcctgctctcca

SEQ ID NO: 377350 - DNA, 83 bp, Homo sapiens
cagtggacaaaagaggggaaactatgggagttcccaattaacaatgaagcagacggcaaatggatacatcttgttttttcata

SEQ ID NO: 377351 - DNA, 100 bp, Homo sapiens
ggaggagctgcagcaagcgggagaccaggagctcctccaccaggccaaagacttcggcaattatatctgggtgttggcacccagccactattctgccaat

SEQ ID NO: 377352 - DNA, 74 bp, Homo sapiens
gggccggaggagtcagctgtgtgtccagaacgtgccatggagacgcttaacgatgttcctcctgctgatcaaga

SEQ ID NO: 377353 - DNA, 82 bp, Homo sapiens
attccacctctgcgtttttccctccaggtcagggaagtcaaagatgcatccctgagttcttcctagcaggcaagcagccgtg

SEQ ID NO: 377354 - DNA, 100 bp, Homo sapiens
gtccaatccacgttgacatttgagggatcacagcgtgtgaaatggactcagaactcaaggaagaaattcctgtgcatgaggaattcattttgtgtggtgg

SEQ ID NO: 377355 - DNA, 100 bp, Homo sapiens
aacaacgtacatggatcctactggtaaaactagcacccagtcagcttgaagagtttcaaatggaccctaccactgagaaatcaagatggcagtctactat

SEQ ID NO: 377356 - DNA, 100 bp, Homo sapiens
gcgctgggggccggggcgcgtcgcagttctctaaaccagtgctgtccagttctctaaaccaaagtctgccaccagcgtttctgtgatgacggacacgttc

SEQ ID NO: 377357 - DNA, 100 bp, Homo sapiens
ccaacaaaatattcatggttcttgagcatggcctgtatgagaagaaaaagacctcaagaaagcaacgaaaggaacgcaagaacagaatgaagaaagtcag

SEQ ID NO: 377358 - DNA, 98 bp, Homo sapiens
caggatggcttggccttgcacataagacacaagatggtgaaggagacccagtactatgacatcctgggcgtgaagcccagcgcgtccccggaggagat

SEQ ID NO: 377359 - DNA, 74 bp, Homo sapiens
ttgtgtctgtgtacttaaacagaagttggcttgggattaatgaaaatcaagttccatcctcagacaagaggtaa

SEQ ID NO: 377360 - DNA, 75 bp, Homo sapiens
tcacatctgccaccacctccaaagttgcttgcacagcagggtttttaatgaccacaacaagcaagcatgcagctt

SEQ ID NO: 377361 - DNA, 83 bp, Homo sapiens
agtgataaacccaaactgttcagaggactgcaaatcaaggccatcatctctcagcaaggtgacatatttgtttttgacctgga

SEQ ID NO: 377362 - DNA, 82 bp, Homo sapiens
ttgggacccaccgctgccctcagctccgagtccagggcgaggaggccccgtgtgggccgcggcccggccctcaccatggagt

SEQ ID NO: 377363 - DNA, 100 bp, Homo sapiens
aggtaaagtccatggttccctggcccgtgctggaaaagtgagaggtcagactcctaagggtgtgaacaaagactcctatctgatcctggagacgctgccc

SEQ ID NO: 377364 - DNA, 82 bp, Homo sapiens
ctggagcctcagttggaagcagccgatccagcctgcggagcctgtggggcaggtgtctcgtgcctctgctggaccctgactc

SEQ ID NO: 377365 - DNA, 75 bp, Homo sapiens
ccagctcacagccaccggtaccttcttccagatttggagcaagaggtggtggtggccttcccccgaagaaatttg

SEQ ID NO: 377366 - DNA, 101 bp, Homo sapiens
ccgcaacctggccatgggcgtgaacctcaccaggtgtgatgaatgcagactctgctaccattttggctgtttggatcctcctttgaaaaagtctcctaaac

SEQ ID NO: 377367 - DNA, 90 bp, Homo sapiens
ggcccagcgggcactccagcagctcaagcagaaaatggtcaactacatccagatgattgacgagatgcctgaggctgccgtgaaatcaac

SEQ ID NO: 377368 - DNA, 100 bp, Homo sapiens
accactgaagtgaccgaatgaggtgtctgcttttggggcagagttttcatcggaggcatgcagagagttaggcttttctagcaacttgctttgcagctct

SEQ ID NO: 377369 - DNA, 97 bp, Homo sapiens
cagtgcagacgaggtggatgaggccgagggcggcgacaagaaccggacccttgaacatctgtgaagaaatgactattctgcatggaggcttcttgct

SEQ ID NO: 377370 - DNA, 100 bp, Homo sapiens
gagtgtatgaccacaaacagccatcaaggccataggaaaaggatacagagtagagtttcatgaacctgaaacttggtggaaatttgatcctgaagaatta

SEQ ID NO: 377371 - DNA, 100 bp, Homo sapiens
aactaaagctgcgggatacaaagtcagcccaggcagacctccaggcctaatgggattgtttgaaaaacgtcgcttcaggaaattcctagtgtatgttgcc

SEQ ID NO: 377372 - DNA, 74 bp, Homo sapiens
gtcaagtatgtcccaaacgtctggatatcatgataacacattttgaaccttccatctcctttgagggcctttgc

SEQ ID NO: 377373 - DNA, 74 bp, Homo sapiens
gaaaattggcagaggctaaaaataaaggagaagtatttccaacaactgaagaaatgagccgtcagactgctaca

SEQ ID NO: 377374 - DNA, 75 bp, Homo sapiens
gaagggtccccgggacccgcctgctgagtggacccgggtgtgcataaggcaaatccaatacgcaagtaccagggt

SEQ ID NO: 377375 - DNA, 98 bp, Homo sapiens
cgctctgcgacgtgggcaccgccatcagctgttcgcgcgtcttctcctccaggtagctttggatatgttaaatcctcatgttactttgcctgtttttt

SEQ ID NO: 377376 - DNA, 75 bp, Homo sapiens
cgtgagaatagagaccaccgagactagacgcttgaagcaaagctgccatcccagaagacgacatgctctcagcaa

SEQ ID NO: 377377 - DNA, 100 bp, Homo sapiens
tgccaaagtcttagaatctagcattcgtagtgtggctcaggcagctgtccaaggacctgttggtacagatttcaaacccttaaatagtacccctgcaaca

SEQ ID NO: 377378 - DNA, 98 bp, Homo sapiens
gcaaagcgaaattggtcattctcgctaacaactgcccagctttgagtttgcagaaaaaacttcagcatgtgccaggaacacaacctcaccttgatcag

SEQ ID NO: 377379 - DNA, 75 bp, Homo sapiens
ccagagcgacccttcctggccatcctgggcgggttcttcacgtacggtaattttccattagaacagcatctgaaa

SEQ ID NO: 377380 - DNA, 99 bp, Homo sapiens
agagaagaaccagaatttcctgagccttccaaacacctgtgaacttatgaatcaaggcatcttggccctggtcagctccattggctgcacgtcagcagg

SEQ ID NO: 377381 - DNA, 83 bp, Homo sapiens
ggcccagagatgaccccttatgaagccactgaggcggctcccagctgcgttggcgacatggccgacacccccagagatgccgg

SEQ ID NO: 377382 - DNA, 97 bp, Homo sapiens
ccaacaaattcatcaaagacgtaatcaaagacggcaacgcgcttatcagcgctatgagaagacctgagagtcagtatactaagactgcccaggagat

SEQ ID NO: 377383 - DNA, 82 bp, Homo sapiens
caaggattggagcacagaggctcagaagcaagtccaggattcaggagcagttccagaaaaatcccgacagttacaatggtgc

SEQ ID NO: 377384 - DNA, 51 bp, Homo sapiens
catttcctcgtcgagcgcaacccaaggccaggctaccaacgtctttgtgaa

SEQ ID NO: 377385 - DNA, 89 bp, Homo sapiens
ggacgatatgaatatgaaagaattccgagagaacgagcacctcctcgaagtcatcccagtgcactgttatagaagaatggaagaagata

SEQ ID NO: 377386 - DNA, 89 bp, Homo sapiens
ctgctggccgaagcgaagggcgacgccaagccggaggatatcaacagtgatggtgtcctggatgagcaggagctggaggcactcttcac

SEQ ID NO: 377387 - DNA, 100 bp, Homo sapiens
agaaacctcaggacttgagtaacagcaacatgatgccttcaattaagttgcagagttctgatggagagatatttgaagttgatgtggaaattgccaaaca

SEQ ID NO: 377388 - DNA, 97 bp, Homo sapiens
aggcggcggcggaagatggtgccgggggtcgctggctctgctgctgccgccggcgaaggaggaggcgttgccggatactgttcctaagagcatctgc

SEQ ID NO: 377389 - DNA, 106 bp, Homo sapiens
cgaacacaaagggaaagaggagaggcacccgatatatgttctctaggccttttagaaaacatggtgcgttgtagaagacaagaactcaaaggtggcctggttgaac

SEQ ID NO: 377390 - DNA, 82 bp, Homo sapiens
tggcgaccggagcgaacgccacgccgttggcacatgattaagtaccggtacatcccgttcacacatgggaagagaaggtaca

SEQ ID NO: 377391 - DNA, 50 bp, Homo sapiens
aaagaaggttgggttcagaagaggggttgcactgctgtgatccatcctca

SEQ ID NO: 377392 - DNA, 100 bp, Homo sapiens
tgctttttcaatgagaagaatgaacagacctagtgggcgttgcctttagacccaggagctttcaagttgtggatggaataaaaaagaaaaatatagttct

SEQ ID NO: 377393 - DNA, 83 bp, Homo sapiens
gagtatctggtgaagtggaaaggatggcccccaaaccttatgccagcctggaccatcttggaggcagtgtaggatcatggaag

SEQ ID NO: 377394 - DNA, 98 bp, Homo sapiens
caacaacatctctctgatgaccctgggagttccttgcactgcactgctcatcgcagagctaaagagattctgaaaagaaatcatctctcctgtcagag

SEQ ID NO: 377395 - DNA, 98 bp, Homo sapiens
tggacctccgctggcacccctgagtgcctccctgccagattgcttccaagtatgatcatcaggcagaagaagatcttcgcaattggatagaagaggtg

SEQ ID NO: 377396 - DNA, 100 bp, Homo sapiens
gctatgcatgctgcttttgatgtctgacaacgtggatcgttgttttgaaacaaccttcatcaccctggtgttgtaaatttggagtgtatgtttgagacgc

SEQ ID NO: 377397 - DNA, 75 bp, Homo sapiens
ccatcacatctcattttgcaaaggggaacagcatatgccatatatgagctggctgtggcttcatttcccaagaag

SEQ ID NO: 377398 - DNA, 101 bp, Homo sapiens
ccagcaccatggggaagcgggacaatcgggtggaatttgctgattcccttggaattccgtttttggaaaccagtgctaagaatgcaacgaatgtagaacag

SEQ ID NO: 377399 - DNA, 83 bp, Homo sapiens
gggaagcccaaaaccggcaaaaaaagcaaacagcaagctttcatcaagtagaagaagtatgtcttcctggaccccctggctgg

SEQ ID NO: 377400 - DNA, 75 bp, Homo sapiens
gaaacgtccacatgtgggtactgcattcctaccggtgtgacaggccggtctaattgaagccaacggagaactcaa

SEQ ID NO: 377401 - DNA, 100 bp, Homo sapiens
gtactgcacatcgtggtggtcggatttcaccacaagaagggctgccaggaagaattttaaatcgtttctccaaagacattggacacttggatgatttgct

SEQ ID NO: 377402 - DNA, 75 bp, Homo sapiens
cttgttggagaccccaatccgcatgagcgtcctttcggggatttttgacatcttgtgaagcagaactacaggagc

SEQ ID NO: 377403 - DNA, 75 bp, Homo sapiens
ctcagtaccagagacagaagcagatggattcgtccttttaggattcctacaggaagcaagtagtaattgatggag

SEQ ID NO: 377404 - DNA, 82 bp, Homo sapiens
gtgacgggtctggagtgcgtgggggaccggctgttggcggcgtgagtgcatctccatccacgttggccaggctggtgtccag

SEQ ID NO: 377405 - DNA, 74 bp, Homo sapiens
aaaggatgggttttaactacagacccagtctctgccaaggcagcagaatcaactgaggaagtatctagcctccg

SEQ ID NO: 377406 - DNA, 100 bp, Homo sapiens
caacgagggtgctgcccgagttatcgggaccctgttgggttctgatggtcctttggctaccagcaaaccagtccctgcagaaaagtcaggtcttccagtg

SEQ ID NO: 377407 - DNA, 83 bp, Homo sapiens
agacggctcacctgtgcgggatggaacaaaagatctgactgcagccatgagcagcaatgagtgcttcaagtgtggacgatctg

SEQ ID NO: 377408 - DNA, 100 bp, Homo sapiens
gcaccatgctcatagaggatgtggatgccctcaagtcctggctggccaagttactggagccgatgagccaagggagaacccaagacagagaatagtggcc

SEQ ID NO: 377409 - DNA, 90 bp, Homo sapiens
gtaacctgaatggctgtgatactggacatgcaaaaatcacatgtggctatgaccttcctgcaaaatgtattacacaatggcctcgttatg

SEQ ID NO: 377410 - DNA, 74 bp, Homo sapiens
tgttcaggccagaccctctgggagcttctcagccattttccacagatcagggcgaccattgacgaggtggagac

SEQ ID NO: 377411 - DNA, 107 bp, Homo sapiens
agggcctgcagcgggagctggacggcgagcgcgagcggcgcgagaaactgcatcttcctcccgtgaggctggccgagctccacgctgatctgaagatacaggagagg

SEQ ID NO: 377412 - DNA, 101 bp, Homo sapiens
gatttgcagaaaaactggtgtcctgaaatttaaaactaaggcatcggtgcttcttcacgttacagcatggaagctgttgccaagtttgatttcactgcttc

SEQ ID NO: 377413 - DNA, 100 bp, Homo sapiens
cggagtccggcggcgacctgcctctgaaacatggcaggctcggatgctgtcggcagaaccaattgaaagaccaacagcaacagcaagtggtatcgttatg

SEQ ID NO: 377414 - DNA, 85 bp, Homo sapiens
tgtgtgcaccgcgcgctgcccgaggcgcgcctggtctccaagtcctctcctaagaagcctcgtggacgtaacatcttcaaggccc

SEQ ID NO: 377415 - DNA, 97 bp, Homo sapiens
cctggctcagcgggagtttgacaggcgattctcccctcattttgggtatactctagttgaatatgaaacatacaaggaagcccaggctgctatggag

SEQ ID NO: 377416 - DNA, 87 bp, Homo sapiens
accccaaccaccgcacccctacgctgaccagagcagcccgacggccatggaggctgaagagacgatggaatgccttcaggagttccc

SEQ ID NO: 377417 - DNA, 100 bp, Homo sapiens
tttgcatttatgtcggatcctcagtgaaaataaaagccatgatagttcaacatacagaggtgaatgaaaactttgccattgatttgatagcagagcagcc

SEQ ID NO: 377418 - DNA, 100 bp, Homo sapiens
cttgactgtatacagaatcttgaatcagaaattgagaagctgctcggtcaaggagtgtgatgactggcgagcagatggctgccttccatccatcgtccac

SEQ ID NO: 377419 - DNA, 82 bp, Homo sapiens
cagcactggactcatggaggctgagcatttattcagaacactcctatgccaccttcaccagctgtacaagtgcagggccagc

SEQ ID NO: 377420 - DNA, 100 bp, Homo sapiens
tggagcaaggcgacgaaccttggagagaggagaacgaacatcttctggacctttgtccaggccccttcacagatgtagtcactacaaatcttaaattgcg

SEQ ID NO: 377421 - DNA, 74 bp, Homo sapiens
agggaagtcgcctctgtgctcgttggtgttcgaggaagagacattgttgttcttggtgtggagaagaagtcagt

SEQ ID NO: 377422 - DNA, 100 bp, Homo sapiens
tgggcccaccgatgctgcaagagatcagtaacttgttcttgattctgctcatgatggtttgaacaaaaaagtggtgcagtttttgatgaaattgtagaga

SEQ ID NO: 377423 - DNA, 100 bp, Homo sapiens
gctatgacaccggctctcatccagcttctgccatttacaggctggcgcccatgcggctctacacgctctccaagcgccactttgtcctcgtgtttgtcgt

SEQ ID NO: 377424 - DNA, 80 bp, Homo sapiens
cgtcaacaccaagtgcatcaccatccccagtgtaaacaggaacatcgataagtagtgtaaaaacttgcacaatgaaatcc

SEQ ID NO: 377425 - DNA, 75 bp, Homo sapiens
gagctcccgggtcgtctttcgtgtggccgcgaggatacttttgtggaactctatgggaacaatgcagcagccgag

SEQ ID NO: 377426 - DNA, 73 bp, Homo sapiens
ccagtatgttggatttttccaatccttcagcaagtttatttctgatcgtgaaagtagaagaagtctcacaaac

SEQ ID NO: 377427 - DNA, 98 bp, Homo sapiens
ggattcgattcaacggggttccggaccgcgctgcgctatggagcagggtgaccaaggcgagaggggtccagtggggcaaccaggccctcagggaaggc

SEQ ID NO: 377428 - DNA, 119 bp, Homo sapiens
ctcaatgctgctgtgtgggaagaagatttgtaaagaaaactcttagatctggccagccaggagaaggagcggctggaggagaagcagagagaagcacggagggagcgggccaaggagga

SEQ ID NO: 377429 - DNA, 80 bp, Homo sapiens
ctcattaacagcaactctgatgtggagttcttgaagcaactaagcttcagaatggcagaagatgatccatatttgggaag

SEQ ID NO: 377430 - DNA, 75 bp, Homo sapiens
cccgcttggttgaacacattggcctcaggaagattgagtttgtgacgggcaccaaaaaaggcaccacgaccaacg

SEQ ID NO: 377431 - DNA, 74 bp, Homo sapiens
ggcgcggggaccgctgtgctctcgtgtactaatggtcacttgatgtgcgctggctgttttatccacctactagc

SEQ ID NO: 377432 - DNA, 82 bp, Homo sapiens
tttagagaagttaagagaagaattagctatcaaatccggccaggatgtagctgagctgattcgggccagagcctgccagagg

SEQ ID NO: 377433 - DNA, 100 bp, Homo sapiens
tcatcgctgacagctgaggaagtctgcatccacattgcacataaagttgatgaccgacaacaagacaggagaggtgctgatctccgagaatgtggtggca

SEQ ID NO: 377434 - DNA, 90 bp, Homo sapiens
cccggagcgggagcgagcggcgcggcccgtcaggatggctaaaggtgaccccaagaaaccaaagggcaagatgtccgcttatgccttctt

SEQ ID NO: 377435 - DNA, 77 bp, Homo sapiens
ctgaccgaggaactggcagcagcggcttgctatgggtgttctccaggatcaaagtgtgactgcagtggcataaaagg

SEQ ID NO: 377436 - DNA, 100 bp, Homo sapiens
agaagtcttgaatgactggaaactgattggaaactctttgggaaagccactcgaaaagacctcgaagtagggggaaaactgcagtggaagatgaggacag

SEQ ID NO: 377437 - DNA, 106 bp, Homo sapiens
gaatgggacgtgaagcgcttgcagacgcactgctacaaggtccatgaccgctttgaagacaagattcccaaaaggagattctctgagatgcaaaatgaaagacgag

SEQ ID NO: 377438 - DNA, 100 bp, Homo sapiens
tttcacagcatcagcagtcatctcactagttatgttcaaaaaattccctgtattgaacactgatatacaaggaatgaatagaagtcaagaaaaacagacc

SEQ ID NO: 377439 - DNA, 76 bp, Homo sapiens
ccggctgacctcgctgtacgccgagcacccaggcgactgcctcatcttcaaggtgtaagcagtgctcctgcacgct

SEQ ID NO: 377440 - DNA, 75 bp, Homo sapiens
cacatatttacctgaatcacatcgagccactgaaaattcaggatctgaacgtctatgacactctttcgagctgac

SEQ ID NO: 377441 - DNA, 85 bp, Homo sapiens
tcctcctcggcgggagccctcgcgacgcgcccggcccggagcccccagcgcagcggccgcgggccctcatctttgtgtcccatgg

SEQ ID NO: 377442 - DNA, 75 bp, Homo sapiens
caagtttgcagatcgggagcgcaaggtcgccctcaaggccatgatcaaaacttgctggatttgtgcgactcggtg

SEQ ID NO: 377443 - DNA, 82 bp, Homo sapiens
cgagtcactgtcctggtacaaggatgaggagatcttcagtttagatcttggaggcatatcaactgtggttctaaatggctat

SEQ ID NO: 377444 - DNA, 83 bp, Homo sapiens
gaaaaggcaacatcctgtcacaggccatgctctggcaaaaacgttgatgataattagaagcatgctttccactgaacttcccg

SEQ ID NO: 377445 - DNA, 100 bp, Homo sapiens
gtttgcagtgggatgttactatctcatggtcggtcataaaaatgaacatgccagaagatatctcagcggcgtcttcgacatcttcggaacattgctgccc

SEQ ID NO: 377446 - DNA, 98 bp, Homo sapiens
gaggatggattcgacttagacttgacctacatcgtggacatcaagcctgctaacatggaggagctgaccgaagtcatcactgcagccgagttccaccc

SEQ ID NO: 377447 - DNA, 100 bp, Homo sapiens
taagaatgtcaacgattagtcatgcaataaatgttctggttttaaaaaatacatatctggttttgacttctgcgctgacccaggggctggagcgaatccc

SEQ ID NO: 377448 - DNA, 95 bp, Homo sapiens
cagtggaggcattttggggcagaatacagagatatggaatcaggcaaagcagagagcagaggttcttcagtccacgcaacggttcttctctgaac

SEQ ID NO: 377449 - DNA, 100 bp, Homo sapiens
ctcgaggttgcaggactctttctgttcaggccagaccctctgggagcttctcagccattttccacagatcagcttgctgagcgagagcgagaagcggccc

SEQ ID NO: 377450 - DNA, 100 bp, Homo sapiens
aaatcgagggtctcggggatgcggatccaagaccctgggaaggaggagcaccgaacagccagttccctgagcagtggtgcccttacgtggacaaagaaat

SEQ ID NO: 377451 - DNA, 74 bp, Homo sapiens
aggaatccatgtttcttccaagaagcaggagtcttccagagcctctcatgacctatgagttacatggagatttc

SEQ ID NO: 377452 - DNA, 100 bp, Homo sapiens
gatcagagatcggcggagaccctcgaagtgcgcaaacttgacactcaccctgaccgcaccagtggcagttcgcagcctccaggacttggctcgcatcgcc

SEQ ID NO: 377453 - DNA, 101 bp, Homo sapiens
agtggatggggacctgcctgctgtgtaatgaacaagtctggggtgaatcgtgtagtttggaaacgacctcgactcactcacaatggacctgttagaaggag

SEQ ID NO: 377454 - DNA, 83 bp, Homo sapiens
gaacccgggagtaggagactcagaatcgaatctcttctccctccccttcttggcttgcacagaaatctggaggcagtatcacc

SEQ ID NO: 377455 - DNA, 100 bp, Homo sapiens
ctggaaacaacaggcgagacctggagatggacctgtgatctggatcctcagacagattctaagcctcctgagggattgttaggattccacacagactggc

SEQ ID NO: 377456 - DNA, 78 bp, Homo sapiens
gggctgccctggaagaggactgaagaagcagctgcaggagctcgcccgtcagcgaggagtcctggagcgcacagagaa

SEQ ID NO: 377457 - DNA, 82 bp, Homo sapiens
ttggcatttggtgctgtggcagattatgctgctgcccagttacgccagtatcatcggttgaccaagcagatcaaacctgaca

SEQ ID NO: 377458 - DNA, 100 bp, Homo sapiens
tccttttaccccgagatccaggctgctcatgccagcgacagcgtgcagagaaatgctgccttcttccgggagggcccagaatgtgttcagtatcttcaac

SEQ ID NO: 377459 - DNA, 75 bp, Homo sapiens
ctccaggcatgccccgctacgagctggctttaatcctgaaagccatgcagcgggcggccggcgcggggcgcaggc

SEQ ID NO: 377460 - DNA, 76 bp, Homo sapiens
aaactcttggaggaagcaaccatttcagtctgcaggtcattaggccaactacacagacccccagagcaaactgcgg

SEQ ID NO: 377461 - DNA, 89 bp, Homo sapiens
cgaagagcagcattggaaactctgtttacgttattatcaacacaggaccagcttagaccatgctcagcctccaagcagccttgtcatcg

SEQ ID NO: 377462 - DNA, 90 bp, Homo sapiens
ttgcgagtactcaacaccaacatcgatgggcggcggaaaatagcctttgccatcactgccattaaggtctggagggtgagcgacctgcga

SEQ ID NO: 377463 - DNA, 90 bp, Homo sapiens
agagctccacattcaggggaaccgcctcaccgttctgcccccagaactagatctgcaaagcccctgagcccaaaacagtctcctactgca

SEQ ID NO: 377464 - DNA, 50 bp, Homo sapiens
gaaccgaagagagctctgttgttgcagtttcagtgttgactggtgggctc

SEQ ID NO: 377465 - DNA, 85 bp, Homo sapiens
ccatcttcggcatgtccttcgcctgccagtcaccatcatggagcagttcaaccctagcctccggaacttcatcgccatggggaag

SEQ ID NO: 377466 - DNA, 90 bp, Homo sapiens
gaaaaagtgtgacttggcagctgattgagggatactccccctttccaccatgggcaagaagggcaaagttggcaagagccgacgagacaa

SEQ ID NO: 377467 - DNA, 76 bp, Homo sapiens
ctggccttcccgcccgacacgcacatctccccgtacaaggacaaccctccatatgataagggagccttcagaatcg

SEQ ID NO: 377468 - DNA, 50 bp, Homo sapiens
tcaaggatgggatgaacgtcttaggtgtgggcagaagaaaaagctagtga

SEQ ID NO: 377469 - DNA, 101 bp, Homo sapiens
ctagcatggtgctcaccaaggtgtctgccagcacagtccccactgacgggagcagcagaaatgaggatgaccaactcttggatgatggcaagacactgggc

SEQ ID NO: 377470 - DNA, 89 bp, Homo sapiens
ccaaaaggagcggcgcggtcttcgtggtgttcgtggcaggtgaaagaactcttttcttctttgggagtcgaatgtaatgtcttggaact

SEQ ID NO: 377471 - DNA, 83 bp, Homo sapiens
gcgggactctgaggaaaagctcgcaccaggaaacaagctcacatcttcctgtgggaaaccttctagcaacaggatgagtctgc

SEQ ID NO: 377472 - DNA, 75 bp, Homo sapiens
cagggctggaaactgctgtcgtctttcaagaaaagttcacagtgtgcctgcgtcgggaagggcagactgtgtacc

SEQ ID NO: 377473 - DNA, 100 bp, Homo sapiens
cttcaacctctgctctccgggctcaagcaattctcccacctcagcctggtacgagtggctgctttacagaatctggtgaagataatgtccttatattatc

SEQ ID NO: 377474 - DNA, 100 bp, Homo sapiens
ctcggatcccatgcaacagccacgatgtgaagcggggcagagccgggggagcccagcccagccagcctccagggtaatcaggaagcagccgctgcccctg

SEQ ID NO: 377475 - DNA, 74 bp, Homo sapiens
ggagaatgccgaagactgcatttcaacttcaagaatggagacatttgctcagaagagaatcaaatagtttcctc

SEQ ID NO: 377476 - DNA, 82 bp, Homo sapiens
tccagacggttactcgcccaactgcctcagaggacagtcactcaagactgcttgcaactgattgcagacagtgaaacaccaa

SEQ ID NO: 377477 - DNA, 100 bp, Homo sapiens
ttgcatttacctcggatcatgcatttgttcagtgctcagcacaggagtttgaccagacagagtagacgtcaaatatgtaccagtagtttgatggaacgtt

SEQ ID NO: 377478 - DNA, 100 bp, Homo sapiens
agcggattccaggtgagggcgtggagcccccgcgtcatcaggtggcccatcccctgcacccctgcaccccaaacgcagcccgacgagcacgggggaggcg

SEQ ID NO: 377479 - DNA, 98 bp, Homo sapiens
ttatcgctgccacggtctgcgtagctccagaggtttaaccataggatagagaaaccagataatcagcaactgctgtgatgagatgctgcctttaatgc

SEQ ID NO: 377480 - DNA, 82 bp, Homo sapiens
tgggacctgcagcagctgagaaaggagctcggggactcccccaaagacaagttctttctacaacttcaacaggctgcactgg

SEQ ID NO: 377481 - DNA, 75 bp, Homo sapiens
cgccgacgccaaaggggacagcgagtcggaggaggacgaggacttggaagactctaaaatagagctcaagcttga

SEQ ID NO: 377482 - DNA, 75 bp, Homo sapiens
cgagagcgtggagcgggctgggccagactgtgccctgtccacggtgcctcctgcatgtcctgctgccctgagctg

SEQ ID NO: 377483 - DNA, 75 bp, Homo sapiens
gagaccgagctctcttggggtttgtactcaaagtgacaaccatgagtggaaaaaactaattatggttcagcactg

SEQ ID NO: 377484 - DNA, 82 bp, Homo sapiens
gggacccccctgcggggacccggaactgaagcagctgtgcccccatgggttgacactaacgatgaagaaacaattcaacaac

SEQ ID NO: 377485 - DNA, 100 bp, Homo sapiens
gccgagcaagcaaggataagtactactccagtggttttggcggcaagtatggcgtgcaggccgaccgagtagacaagagcgcggtgggcttcgactacca

SEQ ID NO: 377486 - DNA, 98 bp, Homo sapiens
gaagaatatgaatggaaagaaactgctaggttagctccattcagaaccaaatgcagtccaagggaggttatggaggtggaatgcctgccaatgtccag

SEQ ID NO: 377487 - DNA, 75 bp, Homo sapiens
ggatcccaggaccctcttcgcgggcgattcgcgtagcctcagaccgagacatgggtgcccggcaccgcgcccgag

SEQ ID NO: 377488 - DNA, 82 bp, Homo sapiens
ccagcttccactgacacgagcctcggcgcggcttccgcttccggagcaggaactcaaagcagccgctgatggcgtactatct

SEQ ID NO: 377489 - DNA, 75 bp, Homo sapiens
ttctccttaaagaagttaggggtaaacaatatctctggtattgaagaggaggagatgttaaagtaacccatcttg

SEQ ID NO: 377490 - DNA, 100 bp, Homo sapiens
gaagaacaaatcagcctggtcaccagcttttcggaacagcagagacacagagggcagtcatgaggagtatacggaggagatagaacgtttaaaacgagat

SEQ ID NO: 377491 - DNA, 100 bp, Homo sapiens
gtttttcggatgatgccttcaatactacctttatttccaccataggaaaaacatccaggcaagtggacagcatttgcaacagcccagcaataagaaggac

SEQ ID NO: 377492 - DNA, 75 bp, Homo sapiens
gggaggtggacgtggcggcccagctgggcgagtatctggaggagtggtgaaagtggtgctggaaaaacagtggct

SEQ ID NO: 377493 - DNA, 75 bp, Homo sapiens
gattcaaacttcaacagaatgtggcaaccagttttagaaagagcgttttcgctacgtaaagcacattcgataaag

SEQ ID NO: 377494 - DNA, 90 bp, Homo sapiens
ccgtacgcggtgctgcgagggcagaacctgggcagaagtcaattcatctggaaagactatctctgagtcagacttaaaccactctttttc

SEQ ID NO: 377495 - DNA, 83 bp, Homo sapiens
ttcaaagagaccctcggaaccaaacggggattcagcgtccgatcctttggaacagggactcacgtgaagcttccaggaccagc

SEQ ID NO: 377496 - DNA, 100 bp, Homo sapiens
aagaggaatgcacatctgtgaagatgctgtaaaaagattgaaagctttaattggccttggtcctcacagctccaaaaagaaacaggatctcgataagctc

SEQ ID NO: 377497 - DNA, 74 bp, Homo sapiens
tgaagaggcacggcattcccatgagccacgttgcccggcaggctggacgtaaagaaagaagtgatgcactcaat

SEQ ID NO: 377498 - DNA, 78 bp, Homo sapiens
cggaagtgcagctgcctcagttcttagcgcaggacatacagtgggagaagttattaaattaggtcctaatggatctcc

SEQ ID NO: 377499 - DNA, 87 bp, Homo sapiens
ttaatgaccctaaaaatggcgattctgcaaccaagcacctgaaacagcagcaattaccagctctggctgggtcgccacaacttgttt

SEQ ID NO: 377500 - DNA, 107 bp, Homo sapiens
tgaagagcgacaagccgctggcagccgcggatctcaccgccgctcagggcccagctgagagccagcctggaggttacccagcagcaggccacccaggccgaaggcca

SEQ ID NO: 377501 - DNA, 50 bp, Homo sapiens
aagttcctttttgaagtagttccagaattcaattcgtcataatctgtccc

SEQ ID NO: 377502 - DNA, 50 bp, Homo sapiens
acggggtttcaccgtgttacccaggatggtcttgatttcctgacctcgtg

SEQ ID NO: 377503 - DNA, 74 bp, Homo sapiens
tctccatgtcctgttgtggggcttttacagcctttggcatttaaatcaaacggtattgagatggattgggttat

SEQ ID NO: 377504 - DNA, 96 bp, Homo sapiens
gcggccggggcctggggctgcctgccgggcggccgggcgcggcgagcccaggtctcctctgagcctccggcctccataagacccaaaacagatgac

SEQ ID NO: 377505 - DNA, 75 bp, Homo sapiens
gataaaatttcatggagaagaaggccttgactacggaggggttgccaggattctgaaaccttccttgtatccctc

SEQ ID NO: 377506 - DNA, 99 bp, Homo sapiens
gtggaaactctctaaacaacaggatgaaacccataaattggaattgacagaagaaggactgccttttctcatactctttcacatgaaagaagatacaga

SEQ ID NO: 377507 - DNA, 75 bp, Homo sapiens
aaagttgcgccggggaacttgtgagcctgcggtgaaaggatgacagtgatgggattccgtggtcagaagaacggg

SEQ ID NO: 377508 - DNA, 84 bp, Homo sapiens
gcgtccagcacctacgtcccgctgccgtcgccgccgccaccatgcccaagagaaaggaccaagaatcgccttcagccctgtctg

SEQ ID NO: 377509 - DNA, 100 bp, Homo sapiens
ccgtcaaaggatttgaaactgctccacttaccaagaattattatactgtgaataacatagctgatccagaagaactgttcacaaaattagagcgcattgg

SEQ ID NO: 377510 - DNA, 75 bp, Homo sapiens
acagatgaagacagcaccaggttccaaatcatcaatgaagcaagtaaggttttttgcatgtctgacacccatgac

SEQ ID NO: 377511 - DNA, 75 bp, Homo sapiens
cagattcgcagtggtcgcttcttctccttgtgcctggctctctggctatgaaaatcctgtggtgtctcgaattaa

SEQ ID NO: 377512 - DNA, 51 bp, Homo sapiens
cgggcatcgccaactcagagagagcagaggttgctgaaacctcagcaggcc

SEQ ID NO: 377513 - DNA, 90 bp, Homo sapiens
aaaacagacccatctttggatcttcattcattaagcagtgcagaaacacagccagaagatcagctgccatgttacttgactcacaccaac

SEQ ID NO: 377514 - DNA, 131 bp, Homo sapiens
gcagtgttaagttatgctgtggaggaagaacatgcatatttgggtccaactgtgaagccagatgataagatgtcagtattgaatatggtggtgaggcgtgaccctggcaacactgaacctgtgaaagccaa

SEQ ID NO: 377515 - DNA, 100 bp, Homo sapiens
catgctgaccgctcaagagattctacatcagtttggtttcactcagaccggtcccctcttgctgttggctgcacatcaggaaggctgtgatgggaatgaa

SEQ ID NO: 377516 - DNA, 75 bp, Homo sapiens
cacatcctctgattggcaacatgttagctttgaagtggatcctaccagggaactctaatgatccaggacaaagaa

SEQ ID NO: 377517 - DNA, 101 bp, Homo sapiens
ctggacgccagcaggccagccggcctctcgcccacactgaccccgggggagcggcagcagcacacggaccctgactactcggctgcctatgtcgtcataga

SEQ ID NO: 377518 - DNA, 98 bp, Homo sapiens
aatgtgggttatcataatgaacatcatgatttccccaacattcctggaaaaagtcttccactgaaccacatgccctgggaagaaccagcaggtgagaa

SEQ ID NO: 377519 - DNA, 49 bp, Homo sapiens
ctgacatcatcaagtttttcaatgtgttgctgtggatgtatggtcgacg

SEQ ID NO: 377520 - DNA, 100 bp, Homo sapiens
tggaagatgtgatgcaaccattttgtatagctgtagtagggaggcattgcaaaagctcattgacgatcaagatatcagtgtggatgaggtcaccattgtc

SEQ ID NO: 377521 - DNA, 83 bp, Homo sapiens
ggtttatcaaaatcacgttataatcagattttgaccaagcattttgtaagaggacactggaggtgaagaaggaagctcttgac

SEQ ID NO: 377522 - DNA, 51 bp, Homo sapiens
ggcacggctgaggcccgcaagcgcaagattttcgacaatgaagccaaagac

SEQ ID NO: 377523 - DNA, 83 bp, Homo sapiens
acccgtgacctggggatcgctacggaccttaaaatacccgcaacagccccttcgtcccaatgacaacactgcagctgaaggag

SEQ ID NO: 377524 - DNA, 98 bp, Homo sapiens
agctcaacgagctgctggaggacgagggccagctgacggagatggtgcagaagatggaggaggtgctcttgagagtttgaggggaaatgcagatttgg

SEQ ID NO: 377525 - DNA, 106 bp, Homo sapiens
ctggctcctggctcctggctccctactcttctaaggatcgctgtcctgacagaagaggaattgaagccattttttatgaaggaagttggcagtcactttgatgatt

SEQ ID NO: 377526 - DNA, 97 bp, Homo sapiens
cgcagatcggcgcccagcaatcacagaagccgacaaggcgttcaagcgaaaacatgaccgctgagcccatgagctactgaagtggtgactgtgtttg

SEQ ID NO: 377527 - DNA, 100 bp, Homo sapiens
caaagcggggacccagaccctggagcctcagttggaagcagccgatccagcctgcggagcctgtggggcagctggtaggtgagtgctgtcctcggctcac

SEQ ID NO: 377528 - DNA, 83 bp, Homo sapiens
cgacgagtacgactacctctttaaaggtcaaaatgcagatcttcgtgaaaacccttaccggcaagaccatcacccttgaggtg

SEQ ID NO: 377529 - DNA, 100 bp, Homo sapiens
gccaaaccattactgatgatgtggaggttaacagctatctttctgacaagcaggaggacatgaagactattttggagggcatagatccggccaagcatca

SEQ ID NO: 377530 - DNA, 100 bp, Homo sapiens
gggcactcctaaaacacctggaaggcgatatgagtctcatccagtctgtgctgatctgcaggccaaaattcttcagtgttaccgtgagaacacccaccag

SEQ ID NO: 377531 - DNA, 98 bp, Homo sapiens
tgccctctccagaaaaacagtagcagtttcctggtcctgttcctcatcaacaccaaggatctgcaacgaaggggaggaccaggctggcgatgaagatg

SEQ ID NO: 377532 - DNA, 98 bp, Homo sapiens
ccatgctctggagtggcccagcctaactgcccagtggcttccagatgtaaccaggtgaaagtgatcctgggcgaggatcgggaagccacgggcgtcct

SEQ ID NO: 377533 - DNA, 100 bp, Homo sapiens
ttcgcccggctttgcagcggggacttcggcggcggcgcctcaggcacctcggcccggtgccgcagaatggaattcggcattgttcctacacagcttctcg

SEQ ID NO: 377534 - DNA, 100 bp, Homo sapiens
cggcgcagccaccccgcgggatacgcctcagcgcgaaagtttcctacactactgaggtttaggggcactgtgaagcaaaagccacgcctcagaatcccag

SEQ ID NO: 377535 - DNA, 75 bp, Homo sapiens
tgctgcggcgcggggaccgctgtgctctcggctcttgtcaggatggtgaagctgttcatcggaaacctgccccgg

SEQ ID NO: 377536 - DNA, 75 bp, Homo sapiens
gggagctggccagcgagagccagggctccaaagaactcgatcctctgtcgatgggtcctcagaaagctctggaaa

SEQ ID NO: 377537 - DNA, 91 bp, Homo sapiens
cttaagtggaaataaactgaaagatatcagcaccttggaacctttggtattactcagcacagaaattcaggagacacagacaagttcttcc

SEQ ID NO: 377538 - DNA, 80 bp, Homo sapiens
tccagatggagaaggcgcaacggggagttcttgaacaatgcagatcttcgtgaagactctgactggtaagaccatcaccc

SEQ ID NO: 377539 - DNA, 82 bp, Homo sapiens
cacgttaagaagcccgaagggcttttcagaaatcggtttgaagttagaaatgtgtcaacagcatctccaccctggagcctgt

SEQ ID NO: 377540 - DNA, 100 bp, Homo sapiens
gtgccagcgttacatcagggttttctagcagcaagggcgggctccacatggctgaagcaggcaaccaggagaatgtggccccgtcccagagcaccacccg

SEQ ID NO: 377541 - DNA, 80 bp, Homo sapiens
aatcatcaggaatccattatggtgtcattacatgtgaaggctgcaagcttccttcaaaatgtctactgttcacgaaatcc

SEQ ID NO: 377542 - DNA, 97 bp, Homo sapiens
aaatgtactctctggatgcctgttagaagtcgggattaatgaaaattgtactcagctcagctcttttgtgacagggacggcttgttgcgggcacttc

SEQ ID NO: 377543 - DNA, 90 bp, Homo sapiens
tcccttaatagtcatctacatagacctcttaagtcatgaaaatgcagcaacgctgaatgatgtaaagacattggtccagcaactatacac

SEQ ID NO: 377544 - DNA, 50 bp, Homo sapiens
gtgaagatatatgtctacaaaatatgcctcgccggagggtcagcgttgct

SEQ ID NO: 377545 - DNA, 100 bp, Homo sapiens
cgaatccaaagaattttaatgaaacttttctgaaaaggaattctgattcattgccacacagattatcagcttactgcagagtgggtctgggcatctgcta

SEQ ID NO: 377546 - DNA, 101 bp, Homo sapiens
tttgggtgaggcggttcagccatgaggctggctgtgcttttctcgggggccctgctggggctactggcaggtgccggagagctggatggaggcagatcggg

SEQ ID NO: 377547 - DNA, 90 bp, Homo sapiens
tttaaagcaacaatgagttacctccttggagggggcatgaagcaggacaaacgtgctgtggagaggctagaagtagaaaaggcattccac

SEQ ID NO: 377548 - DNA, 82 bp, Homo sapiens
agctaaatggaaaagagaaatatatggtcgaggtcttccagaaagatagagctttggagccaaacccttctgatgatccaag

SEQ ID NO: 377549 - DNA, 82 bp, Homo sapiens
aggcgatccgctggcgctagtctgaccctccgccaggcaaaaggaagaacaagttgaaatcatcgcagaaggataaagttcg

SEQ ID NO: 377550 - DNA, 110 bp, Homo sapiens
gccctgtggcctcgctcctcggaggcccacacatcttgctgacttcactcaagtgcaaaccattcagtattcaaacagtgaagacaaggacagaaaaggaatgctacaac

SEQ ID NO: 377551 - DNA, 100 bp, Homo sapiens
gactgcgccgagctgcacgtcctcgaacgcgaggccaacagccccgatggcttggttgggcgagattcctgcattaccagtttttggcgatggaacaaat

SEQ ID NO: 377552 - DNA, 100 bp, Homo sapiens
cggagtcgtcttcgggacgcgcctgctcttcgcctttcgctgcagtccgtcggtgacgcatccaaagaagacattgacactgctatgaaattaggagccg

SEQ ID NO: 377553 - DNA, 75 bp, Homo sapiens
cagcaggaactgatcatcaaaggtgctggtacagggctgcctcttggacccttcccagcgggaggtgttcctgca

SEQ ID NO: 377554 - DNA, 98 bp, Homo sapiens
gctgtatcacttgtgagggctgcaaggatgcctggtgtgcaggagtatatacaacagcctattctcaatggtctgcgggataaggcttcatatgtcag

SEQ ID NO: 377555 - DNA, 80 bp, Homo sapiens
aaatctggggaggtgaaaatatagaaatgtctttcagattttttggaccatatacaaacaacactctttttgaaactgat

SEQ ID NO: 377556 - DNA, 90 bp, Homo sapiens
ctgcaggacggcgcggcagagtccccgtacgcctacagtaacgctgataggaagatgtcttcaggaaatgctaaaattgggcaccctgcc

SEQ ID NO: 377557 - DNA, 80 bp, Homo sapiens
ctcctcgccatggctcagctccaaacacgcttctacactgataacaagaaaactcctctttcctaaaatggagtcgagta

SEQ ID NO: 377558 - DNA, 149 bp, Homo sapiens
tggccgcggagcccagacctacccgggcgaagcgggcgagcggtggtttggacgccggcggagacgcgggcgaggaccccagccatgataggctgctcgttcgtggtcaacaggaagttcttcggtgaaattggtcttctggatcctgg

SEQ ID NO: 377559 - DNA, 90 bp, Homo sapiens
catctccatcacccaccaacaacaccacaataatccacagccaaggaattgaatgatctggcacgggaccctccagcacagtgttcagca

SEQ ID NO: 377560 - DNA, 75 bp, Homo sapiens
ctgctcagcgtcctcatgtggggggtaaaccactcggtttcatatacactggagaagtcgtacatcgaatgctaa

SEQ ID NO: 377561 - DNA, 100 bp, Homo sapiens
aagagaaagccctaccacaagaagcggaagtatgagttggggcgcccagctgccaacaccaagagtatgctcaggtaatcaaaatgttgggaaatggacg

SEQ ID NO: 377562 - DNA, 100 bp, Homo sapiens
ggaaagtctgttactactacgacggcttcacaggctgctcaagaagccgagatcaatgccagaaaagccaaaaactctgttactagcctcctcagcatta

SEQ ID NO: 377563 - DNA, 74 bp, Homo sapiens
gccgccgcagcttgggaggtgctgccaccacagtgatgtcttggcattgcccattttcaagcaggaagattcca

SEQ ID NO: 377564 - DNA, 90 bp, Homo sapiens
cgagctttcagggcccacctgagggctccactaaaggtgaactgtcacccctacaactcagcttgcaaccagccctggccaccagtttcc

SEQ ID NO: 377565 - DNA, 95 bp, Homo sapiens
ggctgaggcggcgcggcagcggagggacggcagtctcgcgcgctgtgctgactccttagttgctgagatgagcttgtaaaaagcagctctgttga

SEQ ID NO: 377566 - DNA, 83 bp, Homo sapiens
ctcggtcgtgctgcacagccacggggcgaaccgatggtcagcccaaggccaaccccactgtcactctgttcccgccctcctct

SEQ ID NO: 377567 - DNA, 98 bp, Homo sapiens
tcctcctccatcgccgccatattgtctgtgtgagcagaggggagagcggccgccgccgctgccgcttccaccacaggagccaagccgccatggcctac

SEQ ID NO: 377568 - DNA, 99 bp, Homo sapiens
cgagaatgaggctaccatgtgccagatgggcttccccaaggatttattgacattgctacttgagtgtgaacagttacctggaaatactgatgataacat

SEQ ID NO: 377569 - DNA, 89 bp, Homo sapiens
gccctcagggaagagaccctgcaaagatcctgggagaccaaggtcctggtccagtggcgggaagctgtgtcagtgcagatgtattaccg

SEQ ID NO: 377570 - DNA, 91 bp, Homo sapiens
ggggccagggaaccctggtcaccgtctcctcagggggggccctcagcctcttggccttgaacgggctgttcatcttgattcacaaacacaa

SEQ ID NO: 377571 - DNA, 96 bp, Homo sapiens
cgccgaggacgacgactatgaatcggagccggaccaggctgttcggctcttgaatcccagcgatgaaaccaggaactcactttcccgggatgccga

SEQ ID NO: 377572 - DNA, 75 bp, Homo sapiens
caatggaggctttacttcagacaagggtggatccatgctgtgctcacttctcaggactgtatggcttttgggggg

SEQ ID NO: 377573 - DNA, 97 bp, Homo sapiens
aatttaccctttagctttacaaagctacagcaattgacagctatgtggctctcagataatcaggtcaaaatgcagatcttcgtgaaaacccttaccg

SEQ ID NO: 377574 - DNA, 100 bp, Homo sapiens
agttgagatatcaagtgcctgggtctgtccatgctaacgtacagaatggtagataacgcagatcatctctggaaaggatattgatccgcctcatgtaaag

SEQ ID NO: 377575 - DNA, 100 bp, Homo sapiens
gcgccgccagtggagcccccgcgcgcccggccggcccggagcaccgagctcgcggcacggtaggaggtgtcatggagaaactccagctgggcccagagat

SEQ ID NO: 377576 - DNA, 100 bp, Homo sapiens
aaaatagactatggtgaatacatggataaaaataatgtgaggcgacaagcaacaacaatcatagctgtaacgcatccccaattaatagaattgtacaaat

SEQ ID NO: 377577 - DNA, 82 bp, Homo sapiens
aacaacaccacaataatccacagccaagcaatcccacagagtattgatgaggaaactgaagtttggagcgatcacatcattt

SEQ ID NO: 377578 - DNA, 90 bp, Homo sapiens
ttcaccatcctggccccggaagaacagtcccatgacactacccccaggatgctccatgatgaccctacactcaaacgtgctcattccatg

SEQ ID NO: 377579 - DNA, 100 bp, Homo sapiens
gaagcaagggaccttgttatagaagccttaaaggtttaccgacaagactgtgaaactttcgggatggtggtgaaaatgctgattgaaaaagatccttcat

SEQ ID NO: 377580 - DNA, 84 bp, Homo sapiens
gcgtctctctgctgcggcgcggggaccgctgtgctctcggtttggtgcacctcgatttggaggaagtagggcagggcccttatc

SEQ ID NO: 377581 - DNA, 50 bp, Homo sapiens
aagaggctcggagaaccagcttgggtggggaagaaaacatgacagaaaca

SEQ ID NO: 377582 - DNA, 75 bp, Homo sapiens
tgcgtcccagggcaggcgggacagcacagaggcagcgccacctcgcttgatccccagctcaagggtatagtgacc

SEQ ID NO: 377583 - DNA, 90 bp, Homo sapiens
ccatctggttcgaagtctcagcggtattctggtgcttatggtgcctcagatacagaagtttacggtgagttttatcccgtgccacctccc

SEQ ID NO: 377584 - DNA, 50 bp, Homo sapiens
cggagattgctttctggggaaggctgaccaactgactgaagagcagattg

SEQ ID NO: 377585 - DNA, 96 bp, Homo sapiens
cgtgtctccaatgacaaacgagatgtaaaagtgtcactgtggcagctgcaatgactctccgcacggtattattgtcattgcaagcactattggcag

SEQ ID NO: 377586 - DNA, 95 bp, Homo sapiens
cagaagtccagagctgaggactgcctgtttgcagctccagggcccacaacggcagtgtcctacatgtcggtgaaatgtgtggatgcccgtaagaa

SEQ ID NO: 377587 - DNA, 98 bp, Homo sapiens
cagggcccatctccttctctaagagatgcctgcagcctgccatgggacgtggggtccaccggtacagggccaattcctgtccccccagcagcatggca

SEQ ID NO: 377588 - DNA, 100 bp, Homo sapiens
cagcgctggggtttcggcctggaggagttgtacggcctggcactgcgcttcttcaaaggaaacttggctgtaacttcaaaagaagatttgattctttatt

SEQ ID NO: 377589 - DNA, 100 bp, Homo sapiens
aagtcaagaatccttttggcttagagatcactaatccatcttcagcttcaattacaagatgctgaaaacgccattcaacagatgggtggccagtggcttg

SEQ ID NO: 377590 - DNA, 76 bp, Homo sapiens
cccctctcaggacaacccagatgtgcaacaaagtgcgatggagcttctacctggccctctacaagcagatgagctt

SEQ ID NO: 377591 - DNA, 100 bp, Homo sapiens
tcaggcaccagacttgggatcagttataaactctagagtgaaacaccatctgattcagatcacaagaagaagaaaaagaaaaaagaagaggatcctgaac

SEQ ID NO: 377592 - DNA, 100 bp, Homo sapiens
aaaagagaaacctgggtgaactttcacggacaacctcagaggacaacgaagtgttcgccgagaccgacccgcccgcccgcggccccgcagcagctccaag

SEQ ID NO: 377593 - DNA, 75 bp, Homo sapiens
cttcacttgaaataccggatgattttggagagtaacctgatccactacctgggactgagccatcacctgctggca

SEQ ID NO: 377594 - DNA, 75 bp, Homo sapiens
cttgccaaccctcccaagaagttcagaggaacctctttcaggagctataaaagaaagggaggaatcatgtccaca

SEQ ID NO: 377595 - DNA, 51 bp, Homo sapiens
aaggaataaacatgcaatgaacccaaaaggaagacgccaaaagactcatgt

SEQ ID NO: 377596 - DNA, 97 bp, Homo sapiens
gtgacagtagcccagcccgccggccagtcaaggcctggccgacaacaccgttattgctaaagtaaataatgttgtgtgggacctggaccgccctctg

SEQ ID NO: 377597 - DNA, 114 bp, Homo sapiens
gggagatccacagctaagacaccgggacctcctggaagccaaaaatgattgtaaaccatggctgtgtggatacaagctcagcagctccaaggagaagcccttcatcagatgcaa

SEQ ID NO: 377598 - DNA, 89 bp, Homo sapiens
cggacgttttataccagagagctctctaacttttatttcagtataatcaaagatagttggataacagggcaagattcagaggaagaaaa

SEQ ID NO: 377599 - DNA, 100 bp, Homo sapiens
cccgagtatgcttcgtttttcgccgtcatgggcgcctcggccgccatggtcttcagcgttgcattaaaatcctcccctactgaaagaaacggaggccagg

SEQ ID NO: 377600 - DNA, 75 bp, Homo sapiens
ttcaagagcacagtcttatgtaaggtacatgtactgggcagattggggtgagacgccctggatcgagcaggtggg

SEQ ID NO: 377601 - DNA, 100 bp, Homo sapiens
ccacaagtcctcctcttccgggtccgtgggcgagtcttcatctaagggaccaagcacccacatgcaggatctccaggaggtgacccaggaccttcattat

SEQ ID NO: 377602 - DNA, 97 bp, Homo sapiens
ccttttccgttgccggtgccggcctagcgtcctggaattacttcaatcaagtgtcatggagaaactccagctgggcccagagattctgcagcgggaa

SEQ ID NO: 377603 - DNA, 83 bp, Homo sapiens
tggggattgacagccacgggaagggagtgcatccgccccaacccttttccccctcgtctcctgtgagaattccccgtcggata

SEQ ID NO: 377604 - DNA, 74 bp, Homo sapiens
cttcgccacttactttaatgagaagatctccattcctgaggaggagtacctgttggatcagactgatgtgttgg

SEQ ID NO: 377605 - DNA, 100 bp, Homo sapiens
ccaggctgttgccaaggcaactcagcagccatttgattgaggaacttcaagatgcactaggtgtgacagacaagagtcttccaccttttatctatcggat

SEQ ID NO: 377606 - DNA, 101 bp, Homo sapiens
gtcggactggtctgtctgagggagatggtgacaagctcaaggcctgcgagaatgaccagtccatgggtgagatgcagataatcggaggcgatgatctttca

SEQ ID NO: 377607 - DNA, 74 bp, Homo sapiens
tgggacttggtgcaaaccctgggagaaggtgcctatggagaaattatatccagatcgagagacagaagattctg

SEQ ID NO: 377608 - DNA, 75 bp, Homo sapiens
gcggcccggagctcgggaccggtctgtgctgccaacatagtctcacaagatggtgaacagaatggtctcatgggg

SEQ ID NO: 377609 - DNA, 90 bp, Homo sapiens
gtgccggcgtttgggctacggttgttgttggcgactgtgcttcaagcggattggagaatccatgttgaccaaatgcaccagcacagaagt

SEQ ID NO: 377610 - DNA, 100 bp, Homo sapiens
gagttacacctccagagccaaaagtagaatgacactgtgcgctttgctttggatgtcctggctattcttactgtggtgccaaaaatccagctccagttgg

SEQ ID NO: 377611 - DNA, 90 bp, Homo sapiens
ttcctaaaagactgaaatgggggcgaccattcttagaagcatcagatggtgaaggagaaggagacacagaagtgatgcagcaggagacag

SEQ ID NO: 377612 - DNA, 51 bp, Homo sapiens
tcctgaatggtttaacgtgtacaacaaggagtttgggctttgcaaaactga

SEQ ID NO: 377613 - DNA, 83 bp, Homo sapiens
cctcggctgcgccgcgtgtcctcggagcgcggtccctgtattggtctcctgctcctagagcatttgacattgtgcagcaaaga

SEQ ID NO: 377614 - DNA, 96 bp, Homo sapiens
aagctccaagaagccacaaactttccccttcgtccttttgtgattccatttctcaaggtggacagtagagcagaatccattgacaagaagatttct

SEQ ID NO: 377615 - DNA, 98 bp, Homo sapiens
cttgaagaaaagggtgaaggaggcgaattttcagttgatagcccaattttgcccatggcctggcttctctccagataccccatggagcaactgtaaaa

SEQ ID NO: 377616 - DNA, 82 bp, Homo sapiens
agatcgaagcggatttccgattgaatggtcagcccaaggccaaccccactgtcactctgttcccgccctcctctgaggagct

SEQ ID NO: 377617 - DNA, 75 bp, Homo sapiens
catcatcacccaggcgcggagggaagacgccctggtgctcaccaagcaaggtcgcaatggaagaagagatcgccg

SEQ ID NO: 377618 - DNA, 75 bp, Homo sapiens
agtgaaggaaacttcactaagttcagggtgacaagggaggaagtacagagttttgagtatccgaggagcccagga

SEQ ID NO: 377619 - DNA, 75 bp, Homo sapiens
cagaacttaattctgaacatgaatgaccacggctttgtgacctatgaggaccagcacagcagtgaggaggaggag

SEQ ID NO: 377620 - DNA, 90 bp, Homo sapiens
gcgctgcccacgattcgcttctgaggctgtcacccttgacccaaactttctggatgcttatatcaatttaggaaatgtcttgaaagaggc

SEQ ID NO: 377621 - DNA, 100 bp, Homo sapiens
attcaacctcaaatttctaatttcaccaacaactatttattgagggctagagggaatctggaaaaattgcaatcaaaacatcatttctctaagaaaattt

SEQ ID NO: 377622 - DNA, 100 bp, Homo sapiens
gaaccatggaccaggccctcaagtccctgatggcctcagaggaggaggccatgaagtacttgtcatacctgctgtaccctctctgtgtcgggggtgctgt

SEQ ID NO: 377623 - DNA, 85 bp, Homo sapiens
agcaggccctgcacaccttccaaaacgacatccacgctctcaaaattagagagatgtgtaattgtccaccactgtctaatccaga

SEQ ID NO: 377624 - DNA, 51 bp, Homo sapiens
gaaatcatgggaacaccagaatatttaggagagaagatgactgaggaggag

SEQ ID NO: 377625 - DNA, 94 bp, Homo sapiens
cgaccccacctcgaggagcttcctgagcaggtggcagaagatgcggtacctaaaacagatccaggacctgcccccaactggcctccctgagatg

SEQ ID NO: 377626 - DNA, 100 bp, Homo sapiens
gacaacatgactcatttaatggtggatttctcacaggaaagacagatgctgcaaactttgaagtttttgccagatattttctaaatttggcacagtcttg

SEQ ID NO: 377627 - DNA, 142 bp, Homo sapiens
cccagctgccgtctgcaccagccatggactgctacacggcgaactggaacccactcggggactctgccttttaccgcactgccccccaggtgttgagtaccagctctccagcccaacaggcagaaaatgaagccaaagccag

SEQ ID NO: 377628 - DNA, 100 bp, Homo sapiens
cagaatcatcttgtcagcaaagtgagccagcttatccaccatttacttaacagattacaggcaccacactgtaactcgaggcatcaccaaaggcgtgaag

SEQ ID NO: 377629 - DNA, 82 bp, Homo sapiens
acaggacaagtagggaccaaactgtatatgagcccagagcaggtacgcaggccccatggagcgggcaggggcagagagcatc

SEQ ID NO: 377630 - DNA, 135 bp, Homo sapiens
tgagcgccctctactcagcatggatatccaggtgctgagccaggagcagcagcctttctactctcagcgttctcatctctcttccttcaccatgaagctgatggacaaattccactcacccaaaatcaagagaac

SEQ ID NO: 377631 - DNA, 89 bp, Homo sapiens
catctccggccctctcggcgtccgccagcgatggcacagggagttaaatacctgtgcatcccagcagcggattcaccatctcaaaacct

SEQ ID NO: 377632 - DNA, 98 bp, Homo sapiens
ggcgttggtcttctgatagcaactttaatgtgggttcgatgaccttcaagtgtgtgctgaccccggcattcccgagaatggcttcaggacccccagcg

SEQ ID NO: 377633 - DNA, 83 bp, Homo sapiens
cggcttcccgtctcgtcaccctctgacaatgcagatcttcgtgaagactctgactggtaagaccatcaccctcgaggttgagc

SEQ ID NO: 377634 - DNA, 74 bp, Homo sapiens
agaaagacaccctctccaaacaaacgcagcatttatatacagtccattggacagtcattttgtttactcattca

SEQ ID NO: 377635 - DNA, 100 bp, Homo sapiens
gtcccctgtgtttctccattctgttggttttatgcatctttatccaatcaagtgcccttggacaaagcctgaaaccagaaagggctattgcaagacacga

SEQ ID NO: 377636 - DNA, 83 bp, Homo sapiens
ctgactgtcctgtccctgctgggccgtgtttggactcctgcctcgggatgtttcagcagcccctgagaaggaagaggaggaag

SEQ ID NO: 377637 - DNA, 80 bp, Homo sapiens
cctgaaccggcacctgcacacctggatccaggataacggaggctgggactaccgaccagactcccggaaatcatgttggt

SEQ ID NO: 377638 - DNA, 76 bp, Homo sapiens
cgaacatcttctggacctttgtccaggaaatctgaaatagagtactatgctatgttggctaaaactggtgtccatc

SEQ ID NO: 377639 - DNA, 75 bp, Homo sapiens
aggacgacgacgacgaggaagaggaggtttctgaggtcctgcaaccctggttccagtctggcaagcattgtagac

SEQ ID NO: 377640 - DNA, 100 bp, Homo sapiens
cagctgaaggaaagcggaatcgatctgacaccgagcaggtgaccttgaggaaccctgggagctcaggaaggaaggagcgcccagaagcagggacagggag

SEQ ID NO: 377641 - DNA, 89 bp, Homo sapiens
agggagttgtcggcgccgcggccgctgcggacggacgctcgcctgccggctgaggatgtgtgaacctattgggtactgtacaacttcaa

SEQ ID NO: 377642 - DNA, 100 bp, Homo sapiens
gtttggtagagtgacttctattcactaaaaccatgtgtctgaactgaagaagcttgggctcacttccacaaatacagtaaggattgtatcctggagccgc

SEQ ID NO: 377643 - DNA, 83 bp, Homo sapiens
cgctgagtggtttttcggatcatgtctggtggctccgcggattataacagatcaatgtccgagttaccaccatggatgcagag

SEQ ID NO: 377644 - DNA, 88 bp, Homo sapiens
gccgagcccgacctcgggcgccccgccggtcacctccgcgcggacaccagccggcacagtcttcactaccgtagaagaccttggctcc

SEQ ID NO: 377645 - DNA, 88 bp, Homo sapiens
ggccgctgagcccgagcctgaggccgagactgccagaggcctggagctgctgaagactgctattgggaaagctggctacactgataag

SEQ ID NO: 377646 - DNA, 98 bp, Homo sapiens
gaagtaggggtgcacctcagcactatcccaagactgctggcaacagtcaccaggagactaaagtccatcaaaaacatccagaaaattaccaagtctat

SEQ ID NO: 377647 - DNA, 87 bp, Homo sapiens
ccccatctgtgctctatatgtgatttgccagttcattctaataagctctgtccgatctggagctcgtggcccaatcaattatcttta

SEQ ID NO: 377648 - DNA, 77 bp, Homo sapiens
cgatggaggcggcggcggcggactggcgggtatgggcggagctgccattgccccacccacttctctggtagagaaag

SEQ ID NO: 377649 - DNA, 98 bp, Homo sapiens
gagccaagatggggctctgcaggacacttcctgccaagtccatgcctggccggacagacgctcgggttcatgacgctctcgatattcctgtgcagaaa

SEQ ID NO: 377650 - DNA, 100 bp, Homo sapiens
tcgactatatgatttggataaagatgaaaagatctcccgtgatgagctgttacagaccaccgctgaaacttcacttctacacagaggctttctttcccag

SEQ ID NO: 377651 - DNA, 75 bp, Homo sapiens
gaccatggcaagaactggcgtcacgtttacaaggttggtgttcgaggaagagacattgttgttcttggtgtggag

SEQ ID NO: 377652 - DNA, 74 bp, Homo sapiens
tctgatcctgattgcagaaccttccctgattacagaatcttgggccttatgatgggaaatggagtaaaacaatg

SEQ ID NO: 377653 - DNA, 49 bp, Homo sapiens
gtggagaccaaattttgaacctcctcagttttcggctttgtgagaaacc

SEQ ID NO: 377654 - DNA, 73 bp, Homo sapiens
ggatccagtacgagttgaatcattgttcaaataaggtgtacatcgaggactccctgggggagcggatctgggt

SEQ ID NO: 377655 - DNA, 100 bp, Homo sapiens
ggatcttggaggtgctgatcttcattgcaggaaagaccacagcaagattctttcattcgtctcctcctagcctgggggaccaggctcgaactgaccctgg

SEQ ID NO: 377656 - DNA, 84 bp, Homo sapiens
gctggagctgggtcagtccgccgctcaccccgcggccgcaccttcccgccttctcaggccagctgcgggccgtccagcggctgt

SEQ ID NO: 377657 - DNA, 88 bp, Homo sapiens
cgctaatggaactgaagacagctgggcctaacaagtgcccaggtgactcagacaatgcagatcttcgtgaagactctgactggtaaga

SEQ ID NO: 377658 - DNA, 83 bp, Homo sapiens
gggaggaaggaacgaggcaaggagctaaagcagcgtgcgttcagccctgggactccgtgggaaggaggcttgtttaaactacg

SEQ ID NO: 377659 - DNA, 75 bp, Homo sapiens
cctcccgagtatctgggattacaggatgtctcaattgattgaaaaagaaactgaagagtatcgtaaaggggatcc

SEQ ID NO: 377660 - DNA, 83 bp, Homo sapiens
ctgctgctgaggaggccaccgaagctcggggacgcgaggagccggcgtggccctggaacctgcaaccatggtcgtgccactag

SEQ ID NO: 377661 - DNA, 75 bp, Homo sapiens
aagaagtcttaccctcaggtcaaacatttgacattgtgcagcaaagaaatggttatggagaagcccagtccgctg

SEQ ID NO: 377662 - DNA, 74 bp, Homo sapiens
gaatttgtggctggctggatctctggttgcccccaagtttcctggcagtgtgtgatactgaggaggtgagcttg

SEQ ID NO: 377663 - DNA, 50 bp, Homo sapiens
tcctacgccgcctgtcgtcaaggcggaaggtgctctaccagcgtgcaccc

SEQ ID NO: 377664 - DNA, 100 bp, Homo sapiens
cctggaggtggatctgaagaacggaattgaccttgctgttctgctggggaagacaccatctacaatggagaatgattcatctaatctggatccgtctcag

SEQ ID NO: 377665 - DNA, 100 bp, Homo sapiens
cttgagacagtgaatatgtgcgagcccttttacatctctcctgcgtcggtgactaagtcaccaggagactaaagtccatcaaaaacatccagaaaattac

SEQ ID NO: 377666 - DNA, 76 bp, Homo sapiens
ctcaggatggaggagagtgtgtcttaatcaaaacccacagggagaaaactggttgtcctggatgtttgaaaagttg

SEQ ID NO: 377667 - DNA, 80 bp, Homo sapiens
ggacagcgagcccttcaccctggtggagcgagacggtttttagaacttcagccataaaaatgggcagaattttccttgat

SEQ ID NO: 377668 - DNA, 104 bp, Homo sapiens
cacgctggactggtgcgaggagaactactccgtgacctggtacatcgccgagttctatctttaatctcatgaagtacgacagctacagccgcttcttaaagtct

SEQ ID NO: 377669 - DNA, 90 bp, Homo sapiens
gctggaaccatcatatgcaccagcacgcctggctaaatgctgagggttggaaaagcaaaagcagatgtgtggcccaaaactgctccaaag

SEQ ID NO: 377670 - DNA, 75 bp, Homo sapiens
ggccatcgtcatcctgctgctgaagatctggaagacgcgctcctgcgccgtgcctgaagacctctcattagaaga

SEQ ID NO: 377671 - DNA, 101 bp, Homo sapiens
ggcagcgatggatgtggataccccgagcggcaccaacagcggcgcgggcaagaagcgctttgaagtgaaaaagcctccggcacccacaggccctgaggctc

SEQ ID NO: 377672 - DNA, 73 bp, Homo sapiens
gaattaaatgccgagaaggccagtacggtgaccattgtgaggtagatattttgttctaattttccagatgagg

SEQ ID NO: 377673 - DNA, 90 bp, Homo sapiens
aagtccttgcggggaactggcaacacatccactgatggctcctataagccgtctttcctcactgatcagatggagtcttgctctgtcacc

SEQ ID NO: 377674 - DNA, 82 bp, Homo sapiens
catttctaagtactttctcctactccataaagacttcaagaagtttgtggtatatgaagtattgcgagaagatgagttttcc

SEQ ID NO: 377675 - DNA, 50 bp, Homo sapiens
actgcagaggtgctggagctggcaggtatttctggtggtcgcattcatat

SEQ ID NO: 377676 - DNA, 90 bp, Homo sapiens
tctgcaatagatacatggagcccatcagaatggcagatggcttatgaaccacagggagagagaaacccctcctcgttttgcccagcatgg

SEQ ID NO: 377677 - DNA, 83 bp, Homo sapiens
gcacagcccaaactcgctgtcatccaggaagcccggtttgcccagagcgccccagggtcaactgctatgatgtgtttggagcc

SEQ ID NO: 377678 - DNA, 76 bp, Homo sapiens
gtcggagcgaagcggctggcggagcagaacggattgcaggccctgggcgctgcctatggcacagccaagagcggta

SEQ ID NO: 377679 - DNA, 100 bp, Homo sapiens
acacgtttagcttaaaaacagctcattctcctaatgttttccttcagcaaggacaaaggataagtctacttttcttccacgtaacaaccacaggatagat

SEQ ID NO: 377680 - DNA, 97 bp, Homo sapiens
aagttcgtgaatctcaacttgttcgagaacttgtcttggacaattgcaaatcaaatgatggaaaaattgagggcttaacagctgaatttgtgaactt

SEQ ID NO: 377681 - DNA, 90 bp, Homo sapiens
gacatcgtcccacagctcaaaggttaccacggcagcagctacagccccgaaggggtggagcccgtcagccctgtgagctcacccagtctg

SEQ ID NO: 377682 - DNA, 82 bp, Homo sapiens
tcaagaaaatggatttaaacatatttccctgtggaggacatggatttgattgacatactttggaggcaagatatagatcttg

SEQ ID NO: 377683 - DNA, 96 bp, Homo sapiens
gtgtctttggttataaattatgatctacctaccaatcgtgaaaactatattcacagtgatgtcttggcattgcccattttcaagcaggaagattcc

SEQ ID NO: 377684 - DNA, 75 bp, Homo sapiens
ttcagcgcagtatattactgcagtgagaaagatcagtctaaagaaaaggagaagaaagtgaaaaaaacaattcct

SEQ ID NO: 377685 - DNA, 100 bp, Homo sapiens
tgggcctccagtcttgtccctggaggcctctgaggaagtggagcttgaatccctcaccagagtccaactgtcaccggatctcctggcgaccctgcctgag

SEQ ID NO: 377686 - DNA, 108 bp, Homo sapiens
atctttgccaggactgatgcagatgcccctcctccaccagaggactgggaggagcatgtcaacaggatgtttcgtctgaactcactttctgctttggcagaactggct

SEQ ID NO: 377687 - DNA, 74 bp, Homo sapiens
ctacctacatcctgagctacatggccccctggtttagggagggaacttgcttgctagaaaacaaagtgcaaggc

SEQ ID NO: 377688 - DNA, 74 bp, Homo sapiens
ttcggcctagtgcgccagggcctcaagtgcgatggtgcccgtggggcaggaggtggaggggatgaacatcctgg

SEQ ID NO: 377689 - DNA, 100 bp, Homo sapiens
ggttaaggaacaggaggaaaccattcagaggtactacgacgtccccatcgccaccctggacttctcctcgctgtacccgtccatcatgatggcccacaac

SEQ ID NO: 377690 - DNA, 75 bp, Homo sapiens
ccgagccgtggatgtcgctgaattgcccgtgcccccagccatgaagaactgtactcaagtcgcccttatggagcc

SEQ ID NO: 377691 - DNA, 100 bp, Homo sapiens
cggcagccgccgcgcgaggaaatggccgaggggccggagccacagatgtggaagatgtcaagtttgtgatcaactatgactatccaaacagctcagagga

SEQ ID NO: 377692 - DNA, 80 bp, Homo sapiens
attcgcgctgctgggcacccacggagcctccggggctggaggatttgatgaagatgttaaagcgaaagtggagaaccttc

SEQ ID NO: 377693 - DNA, 83 bp, Homo sapiens
attgtcttttccgcccgcttcgatcgcctcgcgccggctgctctttccggttctccaaggagaagtacatcctggactcatcg

SEQ ID NO: 377694 - DNA, 50 bp, Homo sapiens
cctacccgggatacggaggagggtcaagagaatccatcccattaaatgac

SEQ ID NO: 377695 - DNA, 100 bp, Homo sapiens
ggacagaaacatcagtcaaggagaacaaaaatattaatgaggctatgagactgtgccctgtccacggtgcctcctgcatgtcctgctgccctgagctgtc

SEQ ID NO: 377696 - DNA, 75 bp, Homo sapiens
gatgctgctgacctccggggccgcactgccctccaccgcgggagtactcctgattgtgacatcacattcatcccc

SEQ ID NO: 377697 - DNA, 87 bp, Homo sapiens
caggggttccccaggaatatcgatacaacaccaacagggctggtgaattaccatatctccgtcaagtgcagtaaccagttcaagttg

SEQ ID NO: 377698 - DNA, 75 bp, Homo sapiens
ttattttgcaccactggatgttgtttactggtaagaatgattgatgttggctgatattggagtgctcattcacat

SEQ ID NO: 377699 - DNA, 96 bp, Homo sapiens
ataaataaccatacactgacctcatacttgcccagatcatcgcagcacaggaagaaatgcttcggaaggaacgagagctggaagaggcgcggaaga

SEQ ID NO: 377700 - DNA, 51 bp, Homo sapiens
cctcccaaagcattgggattacagttagggcctagtcaaaattttgaagct

SEQ ID NO: 377701 - DNA, 95 bp, Homo sapiens
tgacaaagtacgtgtgataaccctggtgaagaatcgtggaaaaggtggagcgattagaatgcaaactgaaaccgtgtcagttcagtcttcggtat

SEQ ID NO: 377702 - DNA, 74 bp, Homo sapiens
gcgacgccggagagaacgaagcctcggctgggagcggtagtggaggacatgctagaggacgaggaagaagaaga

SEQ ID NO: 377703 - DNA, 98 bp, Homo sapiens
tgccatccgggagcagacggtcaagggcaattgaaggaacagactaaaaatcgtgtcctggaaggaaactacaggtactaccagggattttcagtctg

SEQ ID NO: 377704 - DNA, 97 bp, Homo sapiens
gcggctccccaaccgggagcggctcacggcggaggacgacgcgctcaaccagatcgcgcgggaggcccctggaggaattgctacacccccagtgtat

SEQ ID NO: 377705 - DNA, 98 bp, Homo sapiens
gctggacaaggaccctgacctgcctgtcgtcgtggtggccaacaagcagaatttctagaaggaggagttggccatgttgaaatgttatttcgctgcaa

SEQ ID NO: 377706 - DNA, 50 bp, Homo sapiens
agcccttgggccgcgtctcctttgaggtttgaggagttcctacagcggaa

SEQ ID NO: 377707 - DNA, 100 bp, Homo sapiens
gccagattcccatggaagcgccgcgatgttcgccccccggctgctggatttccagaagacgaaatacgcgaggatgaaaactttgacctgtcaaaaagac

SEQ ID NO: 377708 - DNA, 98 bp, Homo sapiens
cctctgtttctctgctgcaccgacctcgacgtcttgcctgtgtcccacttgttcgcggcctatagcagcagcagttgcaagctcagcatctttctcat

SEQ ID NO: 377709 - DNA, 75 bp, Homo sapiens
ctcagatgctgccagggtccctgaagagggaagacacgcggaaacagattccaaagtcatgtgttgaaatagcgg

SEQ ID NO: 377710 - DNA, 90 bp, Homo sapiens
tgatcgccacaccgtcttctggaacagttcaaatcccaaatcctctccggcccctggagttcctgaggacttccctggggggcaggttcc

SEQ ID NO: 377711 - DNA, 75 bp, Homo sapiens
cgcagtatcatgctggccaagaagatcatcattaaggacggaggcacgtttgaacaaaaaagtggtgcagttttt

SEQ ID NO: 377712 - DNA, 100 bp, Homo sapiens
gccatgatttaaatatcggcgttaaggaaacttggatttaactggccagaagcaggtattcaaagcagagaacaatccctgggtgacccccattgcagac

SEQ ID NO: 377713 - DNA, 100 bp, Homo sapiens
catgcttttggctgccctgagctggcagtacctgaccactctctcccagtgctctataaaaagctgcatcactgccttccacgtcacctgtgcctttgag

SEQ ID NO: 377714 - DNA, 82 bp, Homo sapiens
gcgccggctatggccgtgccctggggctgagccctcaggcagccagataagctggtggtggtatggacccgtcggaaccgac

SEQ ID NO: 377715 - DNA, 51 bp, Homo sapiens
agtctaccttgaactgcagaatgcatatagcactttctacattgtgggttt

SEQ ID NO: 377716 - DNA, 82 bp, Homo sapiens
ttatcagtagtgacttacagtaagaatatatacagccctgctctgggacacacctccattggatttaaaagacagtcctcgt

SEQ ID NO: 377717 - DNA, 100 bp, Homo sapiens
aggaggcgttgcaggacagcccccagggccggtgcataaacttctcccgagttccatctcagtaaaagggaagcaggaagaccaagaaggtacgaagatg

SEQ ID NO: 377718 - DNA, 82 bp, Homo sapiens
cgctagtctgaccctccgccaggcaaaaggaagagtaatcaagtcagaggattatatgacttttatctgcctagagaagaac

SEQ ID NO: 377719 - DNA, 100 bp, Homo sapiens
aaacaaaatgtcaacaaattgatgggacctgatcccaaccttgaagaaagtcctaaaagaaaaaatattacatatgaggaattaaggaataagaacagag

SEQ ID NO: 377720 - DNA, 87 bp, Homo sapiens
gtgaaggaatgggacaagacccatctttatgcaaagccagcgttacagtaatgttccaggttgcacactgggccacagaggatccag

SEQ ID NO: 377721 - DNA, 99 bp, Homo sapiens
ccgagacggcagtgcggcggaagcgaggttggaaagaaccatgactgtattcaggaaggcacatgaactgaagcttctgtcagaatgccaatacaagca

SEQ ID NO: 377722 - DNA, 88 bp, Homo sapiens
tgaagcttgagagaaaagcccccaaaagcagctattcaggccgaatacatcaagcaatggtaacatctttaaatgaagataatgaaag

SEQ ID NO: 377723 - DNA, 97 bp, Homo sapiens
cgtgaccgagagcgtgaccgagagcgcgaatatcgtcatcgttagaagggtctgcgcttcgcagccgggatgaagctggtttccgtcgccctgatgt

SEQ ID NO: 377724 - DNA, 75 bp, Homo sapiens
ggggagaggctctgagaggcgaggccgggtattgttgcagcatctggcagtgagactgaggatgaggacagcatg

SEQ ID NO: 377725 - DNA, 76 bp, Homo sapiens
gctgcagctacgctaccaggagatctccaagcggtggacattgcatctgggatggccattgaagggatgtgctatg

SEQ ID NO: 377726 - DNA, 82 bp, Homo sapiens
gcttcagcactggcagcccccaggggccaaaccagtgctcctgccacctctctggctgccccctagagcctgcccatcccag

SEQ ID NO: 377727 - DNA, 82 bp, Homo sapiens
agccttcccagtagctgggaccacagacatgcaagaaagcacttcagccaagcagaagggagccagctggacgaggtgcgcc

SEQ ID NO: 377728 - DNA, 75 bp, Homo sapiens
cctggaggaggagctggagaggaaggcgagcccctttgatgccaagaatccgttcctggctgcagtcaccaccaa

SEQ ID NO: 377729 - DNA, 98 bp, Homo sapiens
tagagttgttcagaatcctccaaaaccagtcatgaccactagacccacagctgttaaagcaacagcgcacgtaccgggtgccgaaggaggtccgcgtg

SEQ ID NO: 377730 - DNA, 83 bp, Homo sapiens
tggtgttgaaagtgaaatgtcatgcctctgaaaatgaagatttgtcccatcagatgaaaagaagaaacaaggttgtcaacgag

SEQ ID NO: 377731 - DNA, 83 bp, Homo sapiens
cagcactaaacatcgtgggggatctcttacggaaagtaggggggttgtagaaggtgatttagctgccatagaagcatacaagt

SEQ ID NO: 377732 - DNA, 50 bp, Homo sapiens
ttgtggaacttctacaggaacgggcctcattgctacgatttcagagtacc

SEQ ID NO: 377733 - DNA, 75 bp, Homo sapiens
gattccaagtaactcttatttgagtatgggctcacaagaagatgattcaggaaacaaaccatccagttattcttg

SEQ ID NO: 377734 - DNA, 105 bp, Homo sapiens
cgatgaagtgcagaggtttttttctgttccagggtcacccccgagaggacaacaggcatctggaagtgctctctcgccactctgggtgctttactgtctctggct

SEQ ID NO: 377735 - DNA, 85 bp, Homo sapiens
acaacctttaagcagcagaggagcacgaggatcgtgggagctaagaaaaaccgaaacttcattgccccttcaatgtgggaatcca

SEQ ID NO: 377736 - DNA, 51 bp, Homo sapiens
ccatcagcaactgtgatggtctggatagattcccagaagtgggataactgg

SEQ ID NO: 377737 - DNA, 75 bp, Homo sapiens
ggaaaatgatgcttaatatcgatgcatgtattccactgatgagaacctgatcctttccccactcctgggtaacgt

SEQ ID NO: 377738 - DNA, 88 bp, Homo sapiens
ctactatgtccagcctatttgcacaccatccaggagtcagtttattactggaaagattttctgccgtctcttggcaaaaatggcaaat

SEQ ID NO: 377739 - DNA, 100 bp, Homo sapiens
atttttagatacttttaaacacccgagcgctgagggttgtctcctcacagactatgagctccttgaaagagggaatcgtgtcttactcatctttgtatcc

SEQ ID NO: 377740 - DNA, 100 bp, Homo sapiens
tcttaagaaaatccagtttgcttaaaaagggccgttgctccagggagaactgcaaatatcttcatccacccccacatttaaaaacgcagttggagataaa

SEQ ID NO: 377741 - DNA, 87 bp, Homo sapiens
tgaccgtcttggggacctggccttgttactagagaccctgaatggcagccaggcccgccaagctgccccctgtgtgctattctttga

SEQ ID NO: 377742 - DNA, 74 bp, Homo sapiens
ggaagcatacagatctgggaccgaaatttgactcctacaacacagcagtcccctcaggatgagcaggaaaagct

SEQ ID NO: 377743 - DNA, 74 bp, Homo sapiens
ctcctacctccaaagtttatactatcagaccttattttcctaaggatgagactgcttttcaggaagccttggac

SEQ ID NO: 377744 - DNA, 100 bp, Homo sapiens
attgaaggaaggtgatacaatgatggggcagcaagtggccaatctctgctggatgaaccgaatcctaacagtccagccaatagccaggcagcacagcttt

SEQ ID NO: 377745 - DNA, 100 bp, Homo sapiens
ctcagggccccagcgccgacggcgacgtcggggccgagctaacccggcctctggacaagagggagtcctcagcactgcctcttctatttccctgtggaaa

SEQ ID NO: 377746 - DNA, 100 bp, Homo sapiens
aggtgcggagtccataccggagcgcaatggcgtccaaccccgaacggggggagattctgctcacggaactgcagctgttccaggagctctgagtcctttg

SEQ ID NO: 377747 - DNA, 100 bp, Homo sapiens
ggagtttgatgttgttgaaggagaaaagctttgtcactccaagagatggccctgggactgagaagtggatggcagctgtgacagcaggagaggactgcct

SEQ ID NO: 377748 - DNA, 74 bp, Homo sapiens
cctggagaacgcagtgctcttcgaagtggcctgggaggtggctaacaaggcccgcgggaggactcagactccag

SEQ ID NO: 377749 - DNA, 80 bp, Homo sapiens
ccattacccctgccatcgtcaggctttccagagtgttgaatcttccaccagaaaacttgatcacatcaatatctgcagtt

SEQ ID NO: 377750 - DNA, 99 bp, Homo sapiens
gtcacctgtactggaaatcagtttgctgaaattaatcaacgattcttgaagttgaagaaaagccatattttctgctcttaagaatcttcaagataagat

SEQ ID NO: 377751 - DNA, 100 bp, Homo sapiens
gacgagcgggccctggctcaggaacagggacagcacctcatcccctggatgggggaccacaagatcctcatcgacaggtgagcacctgcggatctgtccc

SEQ ID NO: 377752 - DNA, 75 bp, Homo sapiens
cctcctctcccgcgggcaccgaggactccgctcctgcccagaagaagctcattcacacagaagacccatttaatg

SEQ ID NO: 377753 - DNA, 100 bp, Homo sapiens
cccatcgtgctgcagtacgtgcctcatgatcgcttcaacaagagtctgataaggaggagaaaccacaacattctgtgatacccaaggaagtgacaccagc

SEQ ID NO: 377754 - DNA, 98 bp, Homo sapiens
ttgagtgcccgcctccttcgccgccgcctctgcagtcctcagcgcaggtagagcaggtctctctgcagccatgtcggccaaggcaatttcagagcaga

SEQ ID NO: 377755 - DNA, 73 bp, Homo sapiens
cgagatcttccgccactacgaaactgaaaagctccatcattggcaagaagaagccagcagcagctaagaaagg

SEQ ID NO: 377756 - DNA, 98 bp, Homo sapiens
tgaaacagcattagtgaattcatctagagaactctttcatttattcagccgcccccgaagcccaccatgcctagccgtcccattgctcctgctccacc

SEQ ID NO: 377757 - DNA, 100 bp, Homo sapiens
agagccggagtcggggacccaggagtttcctgtgtccagcgctgccggagccgcctgagctaaaactgacaaagccttcaaggcttttctggacgcccgg

SEQ ID NO: 377758 - DNA, 100 bp, Homo sapiens
gagctgcggaagcaaaaggcagactttttgatattcagagccttggaagtcaacactgtcagtcttatcgaatgttacttagcctccaacagtattcgag

SEQ ID NO: 377759 - DNA, 90 bp, Homo sapiens
cagctctgcgcggctttttgagcggtcccgcatcaaggctctggcaggaccatgttgtagaactctgcttgggcaaagcaccattggcgt

SEQ ID NO: 377760 - DNA, 51 bp, Homo sapiens
ggccgaatcttccttcaggatatcaagcaaaacttagagagtaacctcacc

SEQ ID NO: 377761 - DNA, 100 bp, Homo sapiens
ctcggtcgcgatgggggcgcaggaccggccgcagtgccacttcgacatcgagatcaaccgggagccggattgaaaaggaagatcaggccaaccccaaaga

SEQ ID NO: 377762 - DNA, 82 bp, Homo sapiens
gatgagacaagatgtggtgatgacagaatcagcttttttcacctttcttggatcacatgcaaaggatgtttaggtctgtgaa

SEQ ID NO: 377763 - DNA, 100 bp, Homo sapiens
ttcagttgtggcggttgctggtcagtaacagccaagatgctgcggaatctgctgagaagatggcgaattagaagatggtgaaatagacgatgcaggattt

SEQ ID NO: 377764 - DNA, 78 bp, Homo sapiens
gctgctcaaggacacggtctacaccgacttcgacggagcgcctggaccatgctgctgagcgcctactggcacggcctc

SEQ ID NO: 377765 - DNA, 98 bp, Homo sapiens
ttcgacctgcgctccgcgctctggcgctacggtctggccgtcggctgcggcgccatcgatcacctgaaagaaccattcttagaagccactgacaattc

SEQ ID NO: 377766 - DNA, 82 bp, Homo sapiens
gtgagtcttctggcaaacagtgtttgcctctggttcagctcatacaacagcttcttaggaaacccagaagttctgtgaacaa

SEQ ID NO: 377767 - DNA, 100 bp, Homo sapiens
cgtgcgtgcgggcggaggccggcccccgagagccgccgacatgaagaaagacgtgcggatcctgctggtgggagaacgtcctgaattctataacagaaga

SEQ ID NO: 377768 - DNA, 75 bp, Homo sapiens
ggggatggcgtgcagcgcaaccacgagacggccttccaaggaggaagctgtaacgaagttcctgagctctagccc

SEQ ID NO: 377769 - DNA, 100 bp, Homo sapiens
attgatcctggctttggaatatataagagagatcgatgtcttattgtgatgagtctcgactgtcatatcttcttcggaggatcacccgggaaaacgaccg

SEQ ID NO: 377770 - DNA, 99 bp, Homo sapiens
agaatttcaacaatctctatggcaccaaagatgcggaaaacgccatgcggtacataaatgggacgcgtctggatgaccgaatcattcgcacagactggg

SEQ ID NO: 377771 - DNA, 82 bp, Homo sapiens
ggggcaccggaggtgacaacaataacaagactgtccttcggacaagttttagcatgtgtttgatgatctcagaggctcagta

SEQ ID NO: 377772 - DNA, 100 bp, Homo sapiens
gcgggtgttccgggagcaccggggctccgtcatctgtctggaggtgtccctggccagtgtccttccacctgtccacaagcatggggaacatcttcgccaa

SEQ ID NO: 377773 - DNA, 82 bp, Homo sapiens
tgccgtcgccgccgccaccatgcccaagagaaagacctcctgccccccgaggtctgcagtctcctgaacccagcagccatct

SEQ ID NO: 377774 - DNA, 100 bp, Homo sapiens
tcgtgttcctgaatgaaagaagtcagaactattactttggcttatgtaaatattggcctcatacatctgctacacctggataactacacggaagctattt

SEQ ID NO: 377775 - DNA, 75 bp, Homo sapiens
agcgggcactaccaccctcaccccgtcctcacaagacatccggctccgggttcgagcagagtactgcgagcatgg

SEQ ID NO: 377776 - DNA, 50 bp, Homo sapiens
ctcaatgaatgggttgcagttaacagacttgggaccctggaggactgacg

SEQ ID NO: 377777 - DNA, 75 bp, Homo sapiens
ttgctggtctctggctccctcctcccagggccaggcgccgctcagaacggaatcctatccatcttcttcaccgat

SEQ ID NO: 377778 - DNA, 155 bp, Homo sapiens
cctttgaaacctcgtcattaattggacacagtgccagagtgtatgcactttactacaaagatggacttctctgtacaggagcctggctcaacccgtcagtgattcaagtaagactcaaggtcctgtagccacagagccagacaaggatcaaggtt

SEQ ID NO: 377779 - DNA, 87 bp, Homo sapiens
ctgctgttctcgggagccgtggccctgatccagacctgggcagagagcggaacaggcgaggaaaagtagtcccttctcggcgattct

SEQ ID NO: 377780 - DNA, 76 bp, Homo sapiens
ggattccaagtaactcttatttgtgtctgagcagcaggagagagccttcacgctggggctagcaggacttctcggc

SEQ ID NO: 377781 - DNA, 96 bp, Homo sapiens
gccaaccagagattcatctttcatgcagtgacatgttgataaaaaatgatggtgcccgtggttgacacgagctgtgtccccagctgttcccgtcta

SEQ ID NO: 377782 - DNA, 110 bp, Homo sapiens
attacagcaaatgttgccgggacaaagtttgaaattggatccaaggagctggttctgctggttggaccaaacctcgtgagccagccacccctgacccaaatgaggagagc

SEQ ID NO: 377783 - DNA, 100 bp, Homo sapiens
atcagctctcctgggcctctagcttgccaactacggacactgtgacttttcagccatcacaattgtgtacatcgaggaggccattgagaaactaagcaag

SEQ ID NO: 377784 - DNA, 100 bp, Homo sapiens
gacttggatttccaactccaggaccctttccttctctacagaaatgccagatgtggatgctctccgattgcgtttggaagagaaggaaaccatgttgaat

SEQ ID NO: 377785 - DNA, 75 bp, Homo sapiens
catgaaatgattgaatctggtgttatcaacttaaaagatgccacctctaagacctgcgaccgcatcaagcagtcc

SEQ ID NO: 377786 - DNA, 50 bp, Homo sapiens
gtcacacactgttgcagcgcaggtgaaaagtagtgatgaggcagtgatcc

SEQ ID NO: 377787 - DNA, 49 bp, Homo sapiens
ctgtggaaccctccattctgtggatcagttcacacaaaagatgttggac

SEQ ID NO: 377788 - DNA, 82 bp, Homo sapiens
gagcttatactcctcccagtgacgggtctggagtgcgtgggggaccggctgttggcgggaatagctattcagtcagacagaa

SEQ ID NO: 377789 - DNA, 78 bp, Homo sapiens
tcgactccaaatggttgaaaacagatatacagagaacagcccatcttcaccacccgagcgcatgtcttccagattgac

SEQ ID NO: 377790 - DNA, 98 bp, Homo sapiens
acaaccttcgatctcctgacgaaggagttttcttagacaccatccttccccgtcaagatgacaatggcgtcaggccaaccattggccagcgcgtgcgg

SEQ ID NO: 377791 - DNA, 83 bp, Homo sapiens
agtttgtggcaagacaagctcagaactgagaagctgtcaccacaggctatgactttgcagccgtcctggagtggttcgcggag

SEQ ID NO: 377792 - DNA, 85 bp, Homo sapiens
gacgacgcgctcaaccagatcgcgcgggagggttcaggataagtttgaggtgctgaattacacaagcattcctatctttctcccg

SEQ ID NO: 377793 - DNA, 74 bp, Homo sapiens
ctgacgggaaagccaaagagcaggaccatctgaatctgataatttttctcataacctgagaggagtaatcccac

SEQ ID NO: 377794 - DNA, 106 bp, Homo sapiens
ggcagtgaaacaaggcttcttgtatcttcagcagcagcagacgtttggaaagtcgttccccatcaggaagtcctcgcagaagtgcaagtcctgaaagaatggactg

SEQ ID NO: 377795 - DNA, 105 bp, Homo sapiens
gctagaattacctggaacttcatcatcatctacttcacaggaattgccatttgatctcactggcatcgaatctatggatcagtgtcgccataccttggaacagca

SEQ ID NO: 377796 - DNA, 82 bp, Homo sapiens
acttaaataagattttaattgaagctggaaagcttggacttgacactgcccatctctaagataagaacctggaaaggggact

SEQ ID NO: 377797 - DNA, 90 bp, Homo sapiens
gcaccatggaggaggacgacagctacggttcgtgctggccgtgggcagcgccgtctttgatgccatgttcaacgggggaatggccacaac

SEQ ID NO: 377798 - DNA, 131 bp, Homo sapiens
ggcggcggaggcagcggggccgggatggaggacgttaactctaacgtgaacgcggaccaggagggccaagaccagcttcaagtctccatggtaccagaaaacaacaacctcacagcacctgaacctcaaga

SEQ ID NO: 377799 - DNA, 51 bp, Homo sapiens
cgcaggccttaaggagaaagtttcagtttattaaccttgcaagaactcttc

SEQ ID NO: 377800 - DNA, 100 bp, Homo sapiens
ctgcaacaggaccacagtcaagacgatcatagtcactgtgagcaagaagaacccatcaggtgattgtcaggcctctgagcccaagctaagccatcatatg

SEQ ID NO: 377801 - DNA, 101 bp, Homo sapiens
acaaccaaatgatggaatgcctaccgggttataagcgggttaacaacaccttttgccaagctcctctggtgcaagtgtggtagctattgacaacaaaatcg

SEQ ID NO: 377802 - DNA, 100 bp, Homo sapiens
aaacttgggccaaaggacagttagaagacagtagggtcttactacggagcacatttgcagtgaattgaggaatttgaatattttgaagaatgtttccgct

SEQ ID NO: 377803 - DNA, 75 bp, Homo sapiens
ctcgcatcaaaccagctgtcattaagtacctcataagccatagcttcagatggtgttctacattgaagcctgtga

SEQ ID NO: 377804 - DNA, 80 bp, Homo sapiens
aagagcaagcctaactcaagccattggcacacaggtgtctgatgatttgtgagcctcaagtgactactctgtggaatcat

SEQ ID NO: 377805 - DNA, 98 bp, Homo sapiens
aagaacgagtcgggcagccgctccaatgagctagagccggtgcaggccacgcagaacaagacagggaagtatgtgccgccgagcctgcgcgacggggc

SEQ ID NO: 377806 - DNA, 82 bp, Homo sapiens
gcggagcccggctcccgcaccatggaggaggacgacagctacggtctcctctgagcctccggcctccataagacccaaaaca

SEQ ID NO: 377807 - DNA, 98 bp, Homo sapiens
gagtgtaggtcatatcgccgcgctattactataacaagcgcattctgcacaagaccaaggggaaacggttcacctacaagttcaatttcaacaaactg

SEQ ID NO: 377808 - DNA, 83 bp, Homo sapiens
aagaaggtgggcgttatcttccgactgatccagctggtggtcctggtctacgtcatcggattctgaaaaagagttccacgtcc

SEQ ID NO: 377809 - DNA, 74 bp, Homo sapiens
gactggcgaaggcttcctgttggtcttttcagtcacagatagaggcaggaaacaagtttcagccactaaggccg

SEQ ID NO: 377810 - DNA, 75 bp, Homo sapiens
ccagaacgccaaaagttacttggactcaaagttaaaggttaccccacagcctatccagcagctgcccctgcctac

SEQ ID NO: 377811 - DNA, 100 bp, Homo sapiens
atggcctatggacccccatcctagaaccagagaggacaatgaattcaaggaagccttctccctatttgataaagatggcgatggcaccatcacaacaaag

SEQ ID NO: 377812 - DNA, 50 bp, Homo sapiens
attttggaaagcagtttttaagacaagccatttatgccagtgttcttcct

SEQ ID NO: 377813 - DNA, 87 bp, Homo sapiens
ccagcaggagtgctgccagaaatttgaacaactttccgaatctgcaaaagaagactctgagatttgcccacctgatgaccttgccag

SEQ ID NO: 377814 - DNA, 101 bp, Homo sapiens
gccgaaatgttcaagtttaccaaaagagaggcaccgctggaacactaatgagggccgcgtgctccacccagagcagcaccgtgtggtgagcgtgcgggagt

SEQ ID NO: 377815 - DNA, 102 bp, Homo sapiens
aaaacaggtcatcactaagaaatcaggtgtagttctgctgaatcctattcctaaggagcgtgaggatcatccccggagaggacgggaggatcggcagcacag

SEQ ID NO: 377816 - DNA, 100 bp, Homo sapiens
cccgtccatcatagtcaactgcgtggaagagaagctcctttagcggcagagttttccgagtgaccttcttgatgctggctgtttctctcaccgttcccct

SEQ ID NO: 377817 - DNA, 96 bp, Homo sapiens
cctgaaggcctcgctggagatcgagtaccaagttcacaatattcttgcagaaatggtgatggggggaatggtattggagacaaatatgaatgagat

SEQ ID NO: 377818 - DNA, 83 bp, Homo sapiens
gaaggcaacgacgttccatctgtggaaggacctaccaaccagagctccaaacgagaatggaagccgctggaggaccgtagctg

SEQ ID NO: 377819 - DNA, 82 bp, Homo sapiens
ccgcgggtctgctctgtgtgccatggacggattttgcaagaacgaggctcaaggatgtgagggacacagtattgacagctga

SEQ ID NO: 377820 - DNA, 82 bp, Homo sapiens
ctgacgaagaatttgatgaactatgttttgaatttggtctggagcttgatgaaatttgagtatcttcccagtcttgttattc

SEQ ID NO: 377821 - DNA, 80 bp, Homo sapiens
cctctgaaggcaaagtgacctgtgctccggagttgggctgctcacaaaccaagctgtctgtttatatggagtgcctggag

SEQ ID NO: 377822 - DNA, 83 bp, Homo sapiens
aataagagatgtgattaatgtattccaccacctccgccagttaagaggaaaaagcaattttccagattattcaaagtatcagg

SEQ ID NO: 377823 - DNA, 98 bp, Homo sapiens
tgcggcagaatttggaggaaaccatgtccagtttaaggggaactcaggttacacacagtaacctgaagctttcaccgtagacgtgctgtattgcccag

SEQ ID NO: 377824 - DNA, 91 bp, Homo sapiens
cccagaccctggagcctcagttggaagcagccgatccagcctgcggagcctgtggggcagcaaagggttaccttccagttcaacatttacc

SEQ ID NO: 377825 - DNA, 82 bp, Homo sapiens
ggaacggctgaaggccctacgggagaaaaccgggcgcaaggtttccaatacttatctacaggaatcgccatgaccccagctc

SEQ ID NO: 377826 - DNA, 50 bp, Homo sapiens
cctgcgcctgggggaccgcgtgctgaaacttgaagggtcaaagtgcaaag

SEQ ID NO: 377827 - DNA, 97 bp, Homo sapiens
tgacggcactgttagaatctgggactttcttcgttgccatgaggaaagaattctccgaggtgatgagacaaaccatgcttctgccacatcaacacag

SEQ ID NO: 377828 - DNA, 75 bp, Homo sapiens
ctctgtgtgcccaggatgcgccggcctccaggtggttcagaatctggggagccttatattccaggtgtctttttc

SEQ ID NO: 377829 - DNA, 100 bp, Homo sapiens
acccagctgctggccaaatttgaagagaatgcgcccgcacagtccatcggcatacggagacagggtgagaaggactggcagaaatacgagactgctcggc

SEQ ID NO: 377830 - DNA, 100 bp, Homo sapiens
gcgtcctactacaaagatgctctgcggtttttgggctgtgttgacatcaaggatctaccagggccctgcatactcacatctgacggagtttgcaccaccc

SEQ ID NO: 377831 - DNA, 100 bp, Homo sapiens
cccttgtccagttactctaacaagtctggaggcaagacatctgtatagattctgcttcatccgtgagagagaataagcaacctgaaggtttggaattaaa

SEQ ID NO: 377832 - DNA, 75 bp, Homo sapiens
ggacaccaaccttcgagccggcctcatcccctccaaggggttccaggagaggtactctgtggatatccccttgga

SEQ ID NO: 377833 - DNA, 100 bp, Homo sapiens
gcatctttatgataattggatcaaagatgctggtgtggaatatcaaacaaatgattaagttgacacaggaacatatagaggccctattggacaaatttgg

SEQ ID NO: 377834 - DNA, 100 bp, Homo sapiens
gtgaagaaggttctggagaaaaagttccatactgtcagtggaagcaaggagcagctgatgagccagatccgggagacgcagcagctctgccaccagaccc

SEQ ID NO: 377835 - DNA, 100 bp, Homo sapiens
ccctgctacaccagcctcccaagcctcccagtgcaccttctaggagacaagcaaggtgctggagaatctggtaaaagcaccattgtgaagcagatgagga

SEQ ID NO: 377836 - DNA, 95 bp, Homo sapiens
tcagcctgttagagaccgatcctgatgtcgtggactatttactcagaagaaaggcttcccaatcatccatttatgagaccagtacaaactactca

SEQ ID NO: 377837 - DNA, 75 bp, Homo sapiens
cgcgaccacagctatgcgaccgaagatcggcttcagctccccaggaatatgattgaaaacagcatgtttgaggaa

SEQ ID NO: 377838 - DNA, 75 bp, Homo sapiens
tttatatcctgacactatgaatgctacttggatgcctcttaaggactttccttatcccagttgattgtgcagaat

SEQ ID NO: 377839 - DNA, 82 bp, Homo sapiens
tcgcccatgatctgatccggaagatgtcacctataacgaaggaggcccaacttcattcaataaggagcctgacggatttatc

SEQ ID NO: 377840 - DNA, 50 bp, Homo sapiens
cttcgacatcgagatcaaccgggagccggaattcaaagaagctttttcac

SEQ ID NO: 377841 - DNA, 100 bp, Homo sapiens
cttttttctatttccttttcttcggagtttcctgtttgtgacggaaaaagtgcaagtaactccatttccaaatactggatttataaatgggtttacgtct

SEQ ID NO: 377842 - DNA, 90 bp, Homo sapiens
agcggctgcaggactgggcacagcatgagatccaaaggcagggcaaggaaactggccacaaaatcttgtggaagaagaatgaagttgctg

SEQ ID NO: 377843 - DNA, 100 bp, Homo sapiens
gggaacgcagctgaaagcgtgaactgtaaaatgtgatgttctgaatcgtggattttcaggttacaataccaggtgggccaaaattatccttccaagatta

SEQ ID NO: 377844 - DNA, 96 bp, Homo sapiens
agttacaggacatgattaatgaagtagatgctgatggcaggccagaaagcagacccagggaggatagcacatgtcttcggctacactggtgaaggc

SEQ ID NO: 377845 - DNA, 100 bp, Homo sapiens
caaactgtggctgggcccaggaagagaggcagagctcttctcacctggctaaaggagaccagcctaagagaagtctggaacgttttttcttagagttcca

SEQ ID NO: 377846 - DNA, 75 bp, Homo sapiens
cgacaagctgcccatcgaggagacgctggaggacagcccgcagattgagaggatccagaatccagatctctggaa

SEQ ID NO: 377847 - DNA, 75 bp, Homo sapiens
tcctgctaaggccattggacacagaatccgagtggaccatagaattttttggctgattacaggaattatgttcat

SEQ ID NO: 377848 - DNA, 95 bp, Homo sapiens
aagatccaatggagcctccaaggttcaagtatcagtattatctgcaactgaagaaagatatcttggaaggaagtattccttgtaccttagaacaa

SEQ ID NO: 377849 - DNA, 100 bp, Homo sapiens
caggcccgcgaccgtccgccagtcgtcccgaggtttggtgcacctcgatttggaggaagtagggcagggcccttatctggaaagaagtttggaaaccctg

SEQ ID NO: 377850 - DNA, 82 bp, Homo sapiens
cgtccgtggggcaccgatgtctgggattactgcacggggtcgcgccgtggcggagcagattcagagcattcttcactccaga

SEQ ID NO: 377851 - DNA, 98 bp, Homo sapiens
cactgttgcctatcagaagtcaattcaaaggacctgcccccagagagagtatttcaggacagccaggagggggcgcacatccgccgcgaaactgtgag

SEQ ID NO: 377852 - DNA, 100 bp, Homo sapiens
ttttgaagctaaagttaagcagttactaaaagatgtaactgaactgcagatccttggtgaaatatctttcaacaaatctctatatgagggactgaatgca

SEQ ID NO: 377853 - DNA, 100 bp, Homo sapiens
gcggatgtgggcagtagaacactctctccccagaaatccaacttctcaaggttctaagctggtctatgtccatcaccttcttggagaaggagcctttgcc

SEQ ID NO: 377854 - DNA, 100 bp, Homo sapiens
gaagacctcctcggattccctgtattctgaagggcaagctgcctgtcctgctgcttggccgctcctcagagctgcggccgggagagttcgtggtcgccat

SEQ ID NO: 377855 - DNA, 100 bp, Homo sapiens
tggagcgagaggaggaagtcacaggccctgtcattgcgcctctcttcccgcagctgtgttgctgggcctggtgctgctggtggtgctgctgctgcttctg

SEQ ID NO: 377856 - DNA, 91 bp, Homo sapiens
gggcgagcggggctttggacgccggtggagacgcaggcgaggactggcattgcggactgacctccagggagaggcccagatctgatctgca

SEQ ID NO: 377857 - DNA, 80 bp, Homo sapiens
cttatcaacattcttcactacattctgaagatgaatttctacaagggaaattgtttatggttcgggggtgattaaagctg

SEQ ID NO: 377858 - DNA, 80 bp, Homo sapiens
ctcttacagaaatgtgtcttgttgcatttggtaatttagcagaacttgaattcagaaggagctggcggacatcactttag

SEQ ID NO: 377859 - DNA, 75 bp, Homo sapiens
cgtctgagaagtgaggagcctctccgcccggcagccaccccatctgggaagctggagtgcaatggcaagatctcg

SEQ ID NO: 377860 - DNA, 97 bp, Homo sapiens
tcgctgggggaaatgacagcttggaccatgggcgcccgcggtctggacaagcgaggaagtttctttaagaacaccaatcagggtcttcaggcctgga

SEQ ID NO: 377861 - DNA, 50 bp, Homo sapiens
acttcagattggagataaacttttagcaggcttattaaaactactagaag

SEQ ID NO: 377862 - DNA, 100 bp, Homo sapiens
ccgcctcccgggagtgccgtgcgccgcagcccgggcccaggccccggcagcgcctgggacaaggttcttgattattacagacctctttctgaaaagcccg

SEQ ID NO: 377863 - DNA, 100 bp, Homo sapiens
ccatggtgctgggacatgaagcttcgggaacagtcgaaaaagtgggatcatcggtaaagcacctaaaaccaggttaccttttcgacaaaatgattcatct

SEQ ID NO: 377864 - DNA, 90 bp, Homo sapiens
gacactgatgactggctgtgcgtggattttggtcactctgtgagactgctgggtcagaaaaaggataatggaaggcggcttgggggagca

SEQ ID NO: 377865 - DNA, 100 bp, Homo sapiens
ttttcctgtgccgtgtccaccctgtgctgggcttatgttccggccagccaaaagtgtcttccatcacttccagaatgacagggtccagaaactggcgagc

SEQ ID NO: 377866 - DNA, 50 bp, Homo sapiens
gccgcgggcgcccgaggggccgagcgaggacccagatgatgtggtaccag

SEQ ID NO: 377867 - DNA, 82 bp, Homo sapiens
gtcccctgctttaaccatcgaaaatgagccggagcggttgcagggcacacattactcggtgcagtcggacatctggagcatg

SEQ ID NO: 377868 - DNA, 100 bp, Homo sapiens
acgtggctgagccgtgttccatcaaagtccttgacaaggctacgagagaaaaggaacagttccgtaagctctttattggtggcttaagctttgaaaccac

SEQ ID NO: 377869 - DNA, 50 bp, Homo sapiens
ttcctgtacagcctgcagaactgtttggtgcacctcgatttggaggaagt

SEQ ID NO: 377870 - DNA, 80 bp, Homo sapiens
caggactccaaaatggcgtcagttggtgagtgtccggccccaggttcagcagctggacatggagaaccaacgctcatcac

SEQ ID NO: 377871 - DNA, 96 bp, Homo sapiens
tagctgagaaaatcattgccaagtacaaagccaaagaggaggaggcaccccttctgttcttcgtagccggggagggctacttctacaagtccgaac

SEQ ID NO: 377872 - DNA, 89 bp, Homo sapiens
aaaaaacttgatcctcgaagagaaggtggtgatcaaagggttcctaaaagtaaagctctagaggccgtcaaattggcaatagaagccgg

SEQ ID NO: 377873 - DNA, 75 bp, Homo sapiens
ggagaccagaaacgtggtcctttctcttgcctgtgagctggtgcagaggtatggcgttgacggtggatgtggccg

SEQ ID NO: 377874 - DNA, 73 bp, Homo sapiens
gccggaacaccctggaagccgagaaatgactctctattcaacgctgcctgctctcctggatagtaaccctttc

SEQ ID NO: 377875 - DNA, 100 bp, Homo sapiens
gagcgcatccatcaaagctttgcgcaacgccaacctcaggcgagatgaccaccgctgaaacttcacttctacacagaggctttctttcccagaaacccag

SEQ ID NO: 377876 - DNA, 97 bp, Homo sapiens
aaattacagagacaattatgacaactgaaatgagacatgcacataatataggtggcttgtggtccggttggccaccaagtggtgtcagcggaagctg

SEQ ID NO: 377877 - DNA, 100 bp, Homo sapiens
gcgtggaggagccggtgctgcagaaccagatccgggagcacgtcatcgccatcgaagggaagcacttggagaatatttagatgggaagaaggagagtgag

SEQ ID NO: 377878 - DNA, 82 bp, Homo sapiens
gaaacaatggcatttacagaaagagtcaacagcagtggcaacagacaggggcaagtgtccgagtggtgaatcagctacttac

SEQ ID NO: 377879 - DNA, 75 bp, Homo sapiens
aaacaagccgtggaataggtgtatcaagtaatggtgcaaagcctgaagaggaacccctctcccagatcactgcct

SEQ ID NO: 377880 - DNA, 100 bp, Homo sapiens
gagcaagctctataagattcttcaaggtggggttggcatcccccacatacgacaatttgctcaggattttgtgatgcacacagatgtcagaacctgctcg

SEQ ID NO: 377881 - DNA, 82 bp, Homo sapiens
tggcctgggcgctccggtggcggcggagaagcacctctctccctcgctccgcccttcacccagacgctcgccaatccgtgtg

SEQ ID NO: 377882 - DNA, 90 bp, Homo sapiens
tgatgtgcagatcaatgacatttccctgcagactctgcacttgatggatcagctggccccacccagatccataaaatggctcatctgatc

SEQ ID NO: 377883 - DNA, 75 bp, Homo sapiens
tgtcccttggaacaggaggagtaagattgagcaagatccatatatagcatctatggaacaccatactgattgggt

SEQ ID NO: 377884 - DNA, 98 bp, Homo sapiens
aagaggagaggcacccgatatatgttctctaggccttttagaaaacatggaccgtataatagacgctggccccaaaggaaactactctcgatttatga

SEQ ID NO: 377885 - DNA, 80 bp, Homo sapiens
tccagtttgagccatcggatctaagatccaaaagggacagagcagaatgggctgatatagatccggtgccgcagaatgat

SEQ ID NO: 377886 - DNA, 95 bp, Homo sapiens
gatctggacaaaggaacaggtatctcaggttccagcaacagatagaaatgctttaagttcactctggggaaagctggcctctgaaatcttaatgc

SEQ ID NO: 377887 - DNA, 75 bp, Homo sapiens
cccaggtacgctaggccgcggccttcgttcctcccagaaaggtgcaggagaacccggggaggaggcccaggctct

SEQ ID NO: 377888 - DNA, 100 bp, Homo sapiens
ctgaccagctgtgatggtgtggatgccaaccagaaaagtgtgctggggcggaatttcaagatggatcggaacccagcttagactagaaagtctagaagac

SEQ ID NO: 377889 - DNA, 83 bp, Homo sapiens
ctttgtacatcatcaccaaatggaaagttaatcgaagagactggatgttgaatttgttctctcagcacctatttctgaatgga

SEQ ID NO: 377890 - DNA, 100 bp, Homo sapiens
cgcggggtaatggggggtcagagtgccggaccccagcacacagaagccgagacgcattagtgccagcagtagttcccaagggctgtctcagccatccacc

SEQ ID NO: 377891 - DNA, 100 bp, Homo sapiens
cagctgccctatcacctgccagctcatcacaaaagacaaagcatggaggacacaagaatgggaggaaaggcggactctcaggaacttcattcttcacgtg

SEQ ID NO: 377892 - DNA, 100 bp, Homo sapiens
tcttggagaaaacccatatatccgaatgggaagctgacagtggcacaaatcaaggcaggttaccagtctcttaagaagattgaggattgtattcgggctg

SEQ ID NO: 377893 - DNA, 51 bp, Homo sapiens
ctccccagtagctgggactacaggggttggccggagacctacgacatgaat

SEQ ID NO: 377894 - DNA, 75 bp, Homo sapiens
ggggcttcgtgcccgggagacccgccgggctggcggcattgaggtatggcgtgagtcccgagaacattatcctct

SEQ ID NO: 377895 - DNA, 126 bp, Homo sapiens
caacgccgaacccagtcgcgcagcgctgcagtgaattttccccccaaactgcaataagccgccttccaagtctttcccagggaactccgatgaagtgttccaacaaaatgagcgagtgaaccaaga

SEQ ID NO: 377896 - DNA, 75 bp, Homo sapiens
ccgcatcgcaaccaccgccctggccatctaccatgtgactgaggctgatgtgaatccaaaggcctatccccttgc

SEQ ID NO: 377897 - DNA, 51 bp, Homo sapiens
tcttcagaagctggtcgccgccggcaggttcaatgttggatatcataaaat

SEQ ID NO: 377898 - DNA, 100 bp, Homo sapiens
ggtggctatgaacccagaggtcgtggaggtggccgtggaggcagaggtggcatgggcccatggcgaattgtggatgattgcggtggagccttcactatgg

SEQ ID NO: 377899 - DNA, 75 bp, Homo sapiens
aaggattccaagtaactcttatttgtttggaccctctgattgtgaatactgctaaccctggaatcaagttcacaa

SEQ ID NO: 377900 - DNA, 97 bp, Homo sapiens
ctggaaatcacgccaagctgccggccagaccgcaatgagccccaccgaatccaacaaatcctcaactacatcaaagacagagtctcacactgtcacc

SEQ ID NO: 377901 - DNA, 100 bp, Homo sapiens
gtacttgtacctgtctggattattcattattacatgaagtatcatgtttctgaaacttttgagaagaactttgaaagagaaacccataaaataagtgagc

SEQ ID NO: 377902 - DNA, 98 bp, Homo sapiens
ggtactcttcagggatgagtcatgtggcagtggaaaatgcgctcgggctggaccagcagtgtgttgttggtggctgcaatgccagctttgcttctcag

SEQ ID NO: 377903 - DNA, 75 bp, Homo sapiens
tttggattctcaaaacttaaattcaagaaggagccctgtcccagatgatttgtcattaattcggaagaacagaat

SEQ ID NO: 377904 - DNA, 83 bp, Homo sapiens
acgagatctagaatcaactgagagagatgcttaaaaatcaccagttactttaatgagaaatctggcattttttaaagtttgcg

SEQ ID NO: 377905 - DNA, 51 bp, Homo sapiens
ggactgaccgctgccgcccagcacgtccagtatctctcagaagatagaagt

SEQ ID NO: 377906 - DNA, 98 bp, Homo sapiens
cctcattgactgtggagacaccgaggcctgcctggcaggtgcggccgggaacttcctgtgccccgctggcgccttgtccttcaacgccttcaagaccg

SEQ ID NO: 377907 - DNA, 83 bp, Homo sapiens
gcaactagcggcgggtcgtgggcacctccagaagtccattggaatattaagcccaggagttgctttggggatggctggaagtg

SEQ ID NO: 377908 - DNA, 98 bp, Homo sapiens
tgcgaataatcgagaatttatcacaatggttgtatacaagactgatgggaaaaaagtttattacccaggaacttataatcaaaactgtattaagctcg

SEQ ID NO: 377909 - DNA, 51 bp, Homo sapiens
gttccatcatggcgtcaatgcagctttgtgctgatgaacatggtcaccttg

SEQ ID NO: 377910 - DNA, 114 bp, Homo sapiens
cgctccgtggccttagctgtgctcgcgctactctctctttctggcctggaggctatccagcgcctccaggcccaaggtcagcatcccactgtcagccatcattgaggtccgcac

SEQ ID NO: 377911 - DNA, 100 bp, Homo sapiens
tgaaagctttgtcaggaagctctggatataagtttggtgttcttgctaagattgtgaattacatgaagatcacgcgctgccccatgatcccgtgctacat

SEQ ID NO: 377912 - DNA, 106 bp, Homo sapiens
cgaaggcaaagggaaggtggtggacctgctggcgcaggacgccgacatcgtgtgccgctgccaggatgctgatatgctaactggtgatgagcaagtatggaaggaa

SEQ ID NO: 377913 - DNA, 100 bp, Homo sapiens
ttattgcgcgtggaacggctgcttttggaaggtcctggagttgttaattcaccgagatggggaatttcaagaactaatgaaattggcacttaatcaggga

SEQ ID NO: 377914 - DNA, 75 bp, Homo sapiens
aaaaaggataaggagatcatagcagagtacgatactcaggtcaaaggtttgtctacagattttgagcgttcgaag

SEQ ID NO: 377915 - DNA, 90 bp, Homo sapiens
agcaccgcagagcggagagcggagcccggagcccgccgccccagtgccggtggtggtgtgcacattgagccccggtatagacagttcccc

SEQ ID NO: 377916 - DNA, 100 bp, Homo sapiens
caaaaccgggacggacaagaccctggtgaaggaggtcgtacagtgttccttgcctgtatctccccttggttcaatagctaccagatttttggaagaggag

SEQ ID NO: 377917 - DNA, 100 bp, Homo sapiens
ctgtcaagccgcataacagaccaatttttattccacgaggaggagtacctggaaattaggcccagcagcaaagaaacctggataacatcgtcttgcaaca

SEQ ID NO: 377918 - DNA, 51 bp, Homo sapiens
cggtgtggggcggtcccggccccgcaggcaccggcatggcctttggcttgc

SEQ ID NO: 377919 - DNA, 100 bp, Homo sapiens
gacttgaaaaaaactttgctgccaatactctgggaaaggccgagggggacggcaagatgcacatcaccctctgtgacttcatcgtgccctgggacaccct

SEQ ID NO: 377920 - DNA, 83 bp, Homo sapiens
cagcagatggcggatgccctgcagtacctgcagaaggtctctggagacatcttcagcagagccatccaaaactctgtttgtca

SEQ ID NO: 377921 - DNA, 74 bp, Homo sapiens
aagcagcccaccgacatggcccggaggcagcagaagattgttgtgtccactgtatcctggcttgcttgttctgc

SEQ ID NO: 377922 - DNA, 90 bp, Homo sapiens
tgccggcagccctgcggctacggagacagaaaaatggctacaaacttcctagcacatgagaagatctggttcgacaagttcaaatatgac

SEQ ID NO: 377923 - DNA, 88 bp, Homo sapiens
tggaggcacagctgggcgagtttcatctccgaatgaaagacaagttcaccgattcagccattgccatgaactcgaaagtgaatgggga

SEQ ID NO: 377924 - DNA, 109 bp, Homo sapiens
aataagtgggttcgttgtatttgtgacatctgtgggtttaatccaacagaagaaggaaatatttgatgatgcgtcacctggaaagcaaaaggaaatccaagaaccagat

SEQ ID NO: 377925 - DNA, 76 bp, Homo sapiens
tttgtcttgaccatctgtgtaagggttgtccgcttaatgacgcagggacagagctcatcgggaaatcaaggatatt

SEQ ID NO: 377926 - DNA, 100 bp, Homo sapiens
gttccagaacactcccaaccgcacctgggactgcgtcctggtcaaccccaggaactcacagagtggattccgcaagagtgagccatggagctacgtgtgg

SEQ ID NO: 377927 - DNA, 82 bp, Homo sapiens
ctggactgtcctctacagaaggaagcacaaaaagggacagtcgcaggataacctagggtctcagtttagccacatgagtctt

SEQ ID NO: 377928 - DNA, 74 bp, Homo sapiens
ctggagatgatccatgggtagaacatgccaagtggtttccaaggtgcgtctaatgctagtgttggcacctgtta

SEQ ID NO: 377929 - DNA, 75 bp, Homo sapiens
ccgagattcgcaaggagatgatgaaggagacgttcaagtacttcctccgggttgaggagctcaagcttgggaaaa

SEQ ID NO: 377930 - DNA, 74 bp, Homo sapiens
tcctggccaccgactcctacaagcctcacttctaaacttctggaacccgcccaccactgccaagctcactattg

SEQ ID NO: 377931 - DNA, 82 bp, Homo sapiens
atgtccaggcggaaacagagcaacccccggcagatcaagcgatgccggctccaggagcagcagtggaggtcgggaacgcctc

SEQ ID NO: 377932 - DNA, 98 bp, Homo sapiens
ctctgtttcaccggcttctgcttttgcaatagccacagctgcagcaggacatgggagtccaccaggggcagaggcctggcctccaggggtttgtctta

SEQ ID NO: 377933 - DNA, 100 bp, Homo sapiens
tggatctgcttcatctaaaaaggcaaaaaaacctgtaggtggtaatgctcctttatattatgagtgggtgcctgatagacatcctaggactatacagaag

SEQ ID NO: 377934 - DNA, 100 bp, Homo sapiens
tgctctgttgattcacagtttacccatttggcctggaattaaaccatttcagtgtgaccgctgtgggaaaaagttcaccagggcttactcgctaaagatg

SEQ ID NO: 377935 - DNA, 100 bp, Homo sapiens
gggttcatttaccctttggtcggaacgggacactccggacgcaggcccggccaggagagttcgtctgcatcgagtgcggaaagagcttccaccagcccgg

SEQ ID NO: 377936 - DNA, 127 bp, Homo sapiens
ccagtgttcctattagatgaggttgacaaactgggaaaaagtctacagggtgatccagcagcagctctgcttgagaaatgagccgtcagactgctacagcattacctaccggtacctcgaagtgtcc

SEQ ID NO: 377937 - DNA, 75 bp, Homo sapiens
ggccggcgccctggggccccggagaggtgaatatgaccatctcccagaacaggccttctatatggtgggacccat

SEQ ID NO: 377938 - DNA, 127 bp, Homo sapiens
ctatgaccaggcccgccactacctcctggctgccgtgaataggcagcctaaaggagctgaagaagaagctgttcaaacgccggcgggtgttgaatcgggagcggcgtctgaggcaccgggtggtcgg

SEQ ID NO: 377939 - DNA, 98 bp, Homo sapiens
taatgactttcctccaagagcacattgcctggtaagatggaaacctggacaagcatgaagaactagaggagcttgtagcaaggttcttaggagtagaa

SEQ ID NO: 377940 - DNA, 100 bp, Homo sapiens
tctctgctgtagtggacaaagatttccttgataacctacaacacagcagtcccctcaggatgagcaggaaaagctcttggatgaagccatacaggctgtg

SEQ ID NO: 377941 - DNA, 98 bp, Homo sapiens
gccgtcctcggcggcagtgtcagggcatgttggagacttgggcaatgtgactgctgacaaagatggtgtggccgatgtgtctattgaagattctgtga

SEQ ID NO: 377942 - DNA, 101 bp, Homo sapiens
cggtcatctcgcagaacgccatcaaccagctggttcgtgggcccccaagaaggagccgtacgcccgggagatgctggcgatctccttcatctcggccgtca

SEQ ID NO: 377943 - DNA, 84 bp, Homo sapiens
caggagccatagtacctacagcagcactccaggtgctggagaatctggtaaaagcaccattgtgaagcagatgaggatcctgca

SEQ ID NO: 377944 - DNA, 83 bp, Homo sapiens
gaaacactctccttctgccacatttgttttgagctaaatattgaggacaatgcagatcttcgtgaagactctgactggtaaga

SEQ ID NO: 377945 - DNA, 100 bp, Homo sapiens
cagagtcttgctgcaccacgccaaagctggcaccatcattgcccgccagggagaccagaagttaaagtctgacacggctgctgcagctgtgcgccaaatg

SEQ ID NO: 377946 - DNA, 80 bp, Homo sapiens
caagaagaagaagttgcgaaggatccccaacggggaggccaacgtgaagaagtctctaattaacagaagatggcaaagcc

SEQ ID NO: 377947 - DNA, 51 bp, Homo sapiens
caaatacttgtgcactgggagaggttatcaatactctggctgaccatcatc

SEQ ID NO: 377948 - DNA, 75 bp, Homo sapiens
tgcaggctcggctggggcccgcagagagcacgttttcaatatcataggagcatttgatattccacgctttgtgta

SEQ ID NO: 377949 - DNA, 100 bp, Homo sapiens
agatgatgtgcccatcatcctcgtgggcaacaagagcgacctggtgcgctctcgtgaggtctcggtggatggaatgggtaccacagaccatgtcatcgtc

SEQ ID NO: 377950 - DNA, 75 bp, Homo sapiens
tttttgagggtgacatcagacttgatagggtgcgagtattcgtcaaccagttatatcagccaagtttggagcgag

SEQ ID NO: 377951 - DNA, 100 bp, Homo sapiens
ctctcgatgaggataacatccctccagaagatgggttcaactacacgaatggaccatgaaacagccagtgttttgagttctagtagcacacactctgcac

SEQ ID NO: 377952 - DNA, 100 bp, Homo sapiens
ggaaaacctggccctcttcaatttctgacaaaaggctagagaactggcagtttgaagaatggggaagccaagtgaccgtagtctcatcagacatgaggga

SEQ ID NO: 377953 - DNA, 75 bp, Homo sapiens
gcggcggcggctccagcgtcctaagaggtatgtgatagtggaatgtgaagatcaagatactcagcagagagatcc

SEQ ID NO: 377954 - DNA, 90 bp, Homo sapiens
gtgatggagagtgatgacacccccgtgacagagtccgacctcagtcgcgcacccataaaaatggtggaaccgtcccaaaatgtcccttgc

SEQ ID NO: 377955 - DNA, 83 bp, Homo sapiens
aaacaagtgtgtgcatctggctgttagaagaattcatgctcatccgggggtgagcccctccagactccgaataggagatcaag

SEQ ID NO: 377956 - DNA, 90 bp, Homo sapiens
ttagtggttcttactgctttcgtgggggtggaccaagtaagctagtgcaaaaacacttagctggtttgtttaacagcatcacatcttttt

SEQ ID NO: 377957 - DNA, 100 bp, Homo sapiens
gcttcgctctcgccttacgacagcccggtcggatcatggggttgcccagggggccggagggccagggtctcccggagcctgggttactaggtgtctttca

SEQ ID NO: 377958 - DNA, 90 bp, Homo sapiens
atccccgcggacgccacagcgctggagtaccctgacttctaccggaagctctacggcctcttggacccctctgtctttcacgtcaagtac

SEQ ID NO: 377959 - DNA, 82 bp, Homo sapiens
agtactgatgcccagtggggcattcgtcttggtaaacttggtgtgttggagagcacaatggctgaacaagtccttcctcagg

SEQ ID NO: 377960 - DNA, 75 bp, Homo sapiens
accatttataaccgcgacttcaagatcaggcgccatgtcagaaccggctggggatgtccgtcagaacccatgcgg

SEQ ID NO: 377961 - DNA, 98 bp, Homo sapiens
tgaaaaaattcaaaactagtccttattttccaaccacagagtcagtggatcggtggggaaaatgctgcttaccctgggccctgggctgtagaaagaag

SEQ ID NO: 377962 - DNA, 100 bp, Homo sapiens
caggtcgtccccgaccttctatgaggattgcccagctcaaggtgctggcccagcagggggagtacagtgaggccatccccatcctgagggcagccctgaa

SEQ ID NO: 377963 - DNA, 90 bp, Homo sapiens
tagatgccagtcataatagatttcgagacaacagtggccttctgatgaatactttaagtgttaatgttgactttgcaaaatgatccaccc

SEQ ID NO: 377964 - DNA, 100 bp, Homo sapiens
aagtctcagatcttttctacagcttctgataatcaaccaactgttacaatcaaggtctatgaaggtgcccaccagctgacctctcctccttctcagtcag

SEQ ID NO: 377965 - DNA, 50 bp, Homo sapiens
ttgccctgtctcctcgcagatgagttccactcttgtcctggggacccagc

SEQ ID NO: 377966 - DNA, 82 bp, Homo sapiens
ctccttgcagctgcttagacgctggatttttttcgggtagtggaaaaccagaaaatgtggtgacctggaagaagaactcaag

SEQ ID NO: 377967 - DNA, 89 bp, Homo sapiens
cttcgaggaagccaggaagaaggcactgaagcttggggccaaaaagctctcaaaggtctatggccctgtgttcactctgtattttggcc

SEQ ID NO: 377968 - DNA, 100 bp, Homo sapiens
gggctccgttctccctcgaagcactccccccagctccatgaatggaaatcggctccgcagagctcctccaagttccccctgatgacgctgcagctgctgg

SEQ ID NO: 377969 - DNA, 76 bp, Homo sapiens
ctgctggattgaactcagagaagccgggatccctgcatgtcactgagtccaccatgctttacagaagaagacagat

SEQ ID NO: 377970 - DNA, 97 bp, Homo sapiens
tgcttactgaccctgatttacctcaggagtttgaaagattcctgacattcagacaactgacttgtaactgacttataactgacttgtaatacactgc

SEQ ID NO: 377971 - DNA, 90 bp, Homo sapiens
aagacttactgaatgtcctggcccggatgatgaggccagtgagtgatcaagtggcagctgagcctgaggtggaggtggaggtgtaccggc

SEQ ID NO: 377972 - DNA, 75 bp, Homo sapiens
agtggggaacaaaaacaggcagaaattcatgtgtgagagataatttggaatggttagccagagccactaactggg

SEQ ID NO: 377973 - DNA, 98 bp, Homo sapiens
ccgccatcaaccgccagatcaacctggagctctacgcctcctacgtttacctgtccatgaagctgcgccaggacatcctgctcatgaagccgtacttc

SEQ ID NO: 377974 - DNA, 97 bp, Homo sapiens
aacatcaatgggcaaatccccacaggagaaggattaagtgggcagaccaacatccacctcagcaaaaacttcttcctgacgaatcgcgccagggagc

SEQ ID NO: 377975 - DNA, 100 bp, Homo sapiens
atggtgctgagctccccactggctttggctggggacacccgacgcttaagcaggtaaagcagtcactgtgaagaaaataacattttaagaaacttttctg

SEQ ID NO: 377976 - DNA, 100 bp, Homo sapiens
agatgaagctccccaaggagctgcagatgcggaaaacgccatgcggtacataaatgggacgcgtctggatgaccgaatcattcgcacagactgggacgca

SEQ ID NO: 377977 - DNA, 100 bp, Homo sapiens
aacgcaagaacagaatgaagaaagtcagggggactgcaaaggccaatgttggtgctggcaaaaagggtcgactgatagatcatgtgaaaaagaaagctac

SEQ ID NO: 377978 - DNA, 102 bp, Homo sapiens
gccgagttcatttccgagcgggtggaggtggtgtccccactgagctcttggaagagaggcattcccatcaagagcaccatggacaaccccaccaccacccag

SEQ ID NO: 377979 - DNA, 118 bp, Homo sapiens
cgaagcggggacgccgccgccaacaagctcttccactacatcccgggcacgatgttccagcaggtcgacttcaacaggaagccagggcgcatgagctccaagcccatcaacttctccg

SEQ ID NO: 377980 - DNA, 100 bp, Homo sapiens
gccatgcccggtgaccacttttggaccaaaggcctgtgtgctgcagaacccccagaccatcatgctgcgtcatcaccatctcgggacgcatgaccttcac

SEQ ID NO: 377981 - DNA, 96 bp, Homo sapiens
tcagtttcgcagatttattccggctcattgctttctactgcatcagcaggtgtcatggagaaactccagctgggcccagagattctgcagcgggaa

SEQ ID NO: 377982 - DNA, 50 bp, Homo sapiens
ggcataaagcaattgagaattcaggtgtgaccatgaagctcatggatgag

SEQ ID NO: 377983 - DNA, 101 bp, Homo sapiens
ggcccctgcgggcgccagtcagagcaacttgctgagcttcgtcaggaatttcttcgacaagaagaccagcttcaggactataggaagaacaatacttacct

SEQ ID NO: 377984 - DNA, 101 bp, Homo sapiens
ggatcatgtctgcgagccaggattcccgggtttccaggcctgaggtgcccgccctggccccaggagaatgaaccagccgcagaggatggcgcctgtgggca

SEQ ID NO: 377985 - DNA, 89 bp, Homo sapiens
cgcgctgctggacgaagagctctcctccttcttcctcaactatctcgctgacacgcaggttgtggcagcactgcctgaaggtatgagac

SEQ ID NO: 377986 - DNA, 83 bp, Homo sapiens
gaatttgcactgcgagaccaagataaatatcgctaccgctatcccaagggagagataatcagcaactgctgtgatgagatgct

SEQ ID NO: 377987 - DNA, 51 bp, Homo sapiens
cagcgagccattctaccttgtatcaaggagaccccaggcatggaggagagc

SEQ ID NO: 377988 - DNA, 147 bp, Homo sapiens
cgtccgcggagatctctctcatctcgctcggctgcgggaaatcgggctgaagcgactgagtccgcgatggaggtgaatgattccaattgtgaccaagaacttctttccctgctcctggatgccaagctgctggtgaagtgtgtctcc

SEQ ID NO: 377989 - DNA, 98 bp, Homo sapiens
tcgtgccgttacggccatcacggcggccgcagtggcgtcctggagccctcctcaggagcttactccacgggaacagcctctagataatctgagttgtt

SEQ ID NO: 377990 - DNA, 85 bp, Homo sapiens
cgagctgagtggttgtgtggtcgcgtctcggaaaccggtagcgcttgcagcatgtttgaaagatgatgacagtggggaccatgat

SEQ ID NO: 377991 - DNA, 90 bp, Homo sapiens
ccctgcagcccgagcccatcaaggtgtacggacagataaatactgcaacaactgtagctgacttaaagtcaataataaatgaatgctata

SEQ ID NO: 377992 - DNA, 103 bp, Homo sapiens
ctcgttctgcgacttataaaggaccagacaaatcaaattagtggttttgctcctgtatcacgtggaagagatagttatggaggtccacctcgaagggaaccgc

SEQ ID NO: 377993 - DNA, 75 bp, Homo sapiens
ccgtggaagcggccaccgactactgtcagcagctgtgccaggtcgccatgggctactcacactccttggtgatag

SEQ ID NO: 377994 - DNA, 100 bp, Homo sapiens
catggaccgtgacccctggaagctctcccagtctggacggaggaagcagttctgggaggtgatcagtgatgaacatggcatcgaccccaccggcacctac

SEQ ID NO: 377995 - DNA, 98 bp, Homo sapiens
cgggacccaggaccatgtctctgtctcgctcagaggagatgcaccggctcacggaaaatgtctataagcattggggacatcatagatcactatcgaaa

SEQ ID NO: 377996 - DNA, 76 bp, Homo sapiens
ctgctagtgaacagcgacgtgagtatcctgagctccagctggaccctaaattggatcctcttcctgctgagagtcc

SEQ ID NO: 377997 - DNA, 50 bp, Homo sapiens
caacaattgaggatgaagatgtgaaaggtgtttcatcagtacagacgcct

SEQ ID NO: 377998 - DNA, 83 bp, Homo sapiens
tgaaaagattggatcaggaccatgtgaggctaacagagaccctgatgctggaattgatgaagctcaagttgaacaagatgctc

SEQ ID NO: 377999 - DNA, 100 bp, Homo sapiens
tccaacgccaaccaaagatttgcatcagccatctcttagtccagcaagtcctcatagccagggagttccatctggaatatgacaaattagaagaacggcc

SEQ ID NO: 378000 - DNA, 100 bp, Homo sapiens
ctgaccctctccccaagaagatgaaagattcagtgaaatggctgagcaggagcgctttctactgcatcaggagaccctacctgaacagctgctggcggag

SEQ ID NO: 378001 - DNA, 82 bp, Homo sapiens
ggagatccaggtcaccagcatccactggagctacaagagccattctgcccttccactgcagtgccatcctggctacagccct

SEQ ID NO: 378002 - DNA, 82 bp, Homo sapiens
caaaagggaactctaaagatttagttggaaaagtagtgagtttcctgcgcagcggcactaagctcatcttccgccggaggcc

SEQ ID NO: 378003 - DNA, 75 bp, Homo sapiens
aacgaatcatccacgcacctgcagctctgctgagagagtgcaagccgtgggaaatgcactcggtgatggaaagag

SEQ ID NO: 378004 - DNA, 125 bp, Homo sapiens
ctaaatcaagcttggaatgatcatcaaacagctatggtgatgattagagacatactaatgtacatgatgcttgggatttgctttacattctaagtggatttggagaagagacaataaagaataag

SEQ ID NO: 378005 - DNA, 100 bp, Homo sapiens
ttacagtcaaaaccccagcgtttgcagaatctgtcacagagggagatgtcaggtgggagaaaggtatcacctcttctgggctcaagatggacaacaagaa

SEQ ID NO: 378006 - DNA, 98 bp, Homo sapiens
ctggagattcctgaccagaacattgatgtagaagttgtcgagatgtccacagaaggaggatttggtggtactagcagcagtgatgcccagcaaagcct

SEQ ID NO: 378007 - DNA, 88 bp, Homo sapiens
agaatgcgagagaaagagcctccgtcaccacatagacagtcattttgtttactcattcagccctgttgcaggtcccaataaactcttc

SEQ ID NO: 378008 - DNA, 100 bp, Homo sapiens
catgactgagaaagatatggaattatttcgtgatatccaagaacaagcactgcagctggatctaccatgaaagacttgtgaatccaggaagagagactga

SEQ ID NO: 378009 - DNA, 75 bp, Homo sapiens
tggtcactgtacacttggaaaatacgagctcaactggaggcagtcctgtgcggaaatctgaagaaaaaacagata

SEQ ID NO: 378010 - DNA, 80 bp, Homo sapiens
cgggaggtgttcgagaacgaccccgagacggcggtgcgtctttctacgtgaataggattttgtggctggccagatacact

SEQ ID NO: 378011 - DNA, 100 bp, Homo sapiens
tcctctattatgtactgcattgcatattatggggaacgaatgtctattggtggttcctggagaaacaatagatcccattccccaccagctattgagaaag

SEQ ID NO: 378012 - DNA, 100 bp, Homo sapiens
gcgatggtgcactggacgggcgagaacagcagcgatatccgacatgaagccagtgacttcccatgtagagtggccaagcttcctaagaacaaaaaccgaa

SEQ ID NO: 378013 - DNA, 98 bp, Homo sapiens
gtccgagtctccgccgctgcgggcccgctccgacgcggaaggtcttgtgataatggtcactgtatgctgaatggaacacatggtccatcttcagagaa

SEQ ID NO: 378014 - DNA, 100 bp, Homo sapiens
atacgaggagtccttgcaatctggcccatcatcttgataaactgcttgatgctggtctctatactggagaagtgactgaaattgtaggaggcccaggtag

SEQ ID NO: 378015 - DNA, 110 bp, Homo sapiens
ggcggcggcgcccgcgggtggtataaaatggcggatttcgaagagttgagggactcacaccacccggcaagaactgctcactacggctccctgccccagaagtcacacgg

SEQ ID NO: 378016 - DNA, 96 bp, Homo sapiens
tattgatattattacagcttcatatgcaccagaaggagatgaagaatgtccctcttccagtggaaagcccaaccatgcagacatcttgctcataaa

SEQ ID NO: 378017 - DNA, 82 bp, Homo sapiens
cgcaggagggcagcaccagaggccagtggcactcccagctcgactgtatctgggaaaccccatggacccccccgacctcctg

SEQ ID NO: 378018 - DNA, 98 bp, Homo sapiens
gcaactccgccgcccaccatggcttccgaggagctgtacgaggaaaacgggccttactatacatcatatcccccatcaccagatttgtgacctgccat

SEQ ID NO: 378019 - DNA, 74 bp, Homo sapiens
ctgaagctcagcatgctagtggagaagttgaagaaccggtttggcagttctctaccagtggaccaatcttttca

SEQ ID NO: 378020 - DNA, 74 bp, Homo sapiens
cttagaggagtatttcctgaactgtgtggctcagcaaaacccagcagctcagattcctgccaggcagcgggaga

SEQ ID NO: 378021 - DNA, 125 bp, Homo sapiens
gaagcaaacagcctggcttcatctggtcctcataatcttacttatcctctaggtcccaggaatgaagacacctagctgttgggcagaagagggtgcagaaaagaggtcacatcagcgttctgcgt

SEQ ID NO: 378022 - DNA, 75 bp, Homo sapiens
caccaaccggggacttaccccgggcgggagaagtccacaccgggtgacaaccatgagtggaaaaaactaattatg

SEQ ID NO: 378023 - DNA, 82 bp, Homo sapiens
tcgccgaggcaccgaggcactcagaggagtgctgctcacggccgtgaactgctacagcgtgaaggccgccacccgggtccag

SEQ ID NO: 378024 - DNA, 90 bp, Homo sapiens
cggcgtcggaccccccgagaaaatggtactacgacgtccccatcgccaccctggacttctcctcgctgtacccgtccatcatgatggccc

SEQ ID NO: 378025 - DNA, 96 bp, Homo sapiens
gaggacggaagccaaggagacaggaacatgtggctgctcccagctctactccttctctgcctctcagggcagctcagttctggcaccaaaccaaat

SEQ ID NO: 378026 - DNA, 100 bp, Homo sapiens
aaaagcttggagtgtcttgtgaagtcattgatctgaggactataataccttgggatgtggacacaatttgtaagacaaaaagtaaccttcctgaagagga

SEQ ID NO: 378027 - DNA, 51 bp, Homo sapiens
agggaagagacaggaagatggtgcccagggatcagtgtctttcaatgatgt

SEQ ID NO: 378028 - DNA, 82 bp, Homo sapiens
ccgtcccagccgaccttgaggctgccgccgcgagtctgccatcgtccaaggaggtggcagattattttcgaaataccagtat

SEQ ID NO: 378029 - DNA, 82 bp, Homo sapiens
tatacacagccatgccccttccgattgggagggacaagtggtcccaggctgcacccatggcagaaggaggagggcagaatca

SEQ ID NO: 378030 - DNA, 90 bp, Homo sapiens
tgtctgtctacagaaaacccaagtggaaccaccttgtccacaaattcgtcattggccacttaaaggagatctattgggaaactgattata

SEQ ID NO: 378031 - DNA, 98 bp, Homo sapiens
ctggatcgaggagcactgtaagcctcaggctgcaataggatctgtggctttggacacagcaaggtcacatggagagaaacaattagaagactatggaa

SEQ ID NO: 378032 - DNA, 100 bp, Homo sapiens
caatgagaacagcacctcggacaaccagaagtctggaacgttttttcttagagttccagaattgagactgaagtgtacccagagacacaaagaaatacag

SEQ ID NO: 378033 - DNA, 86 bp, Homo sapiens
atataatgcattacatcaaagacacactgaggtggaacaggaggattttgtaatggaagggcatggcaagactccacctcctggtg

SEQ ID NO: 378034 - DNA, 82 bp, Homo sapiens
caaccgcctacgagacactcaaggtgtcgtgaaaactacccctaaaagccaaaatgggaaaggaaaagactcatatcaacat

SEQ ID NO: 378035 - DNA, 74 bp, Homo sapiens
agtggccttccttatccaagaattctgaaaaagagttccacgtcctcccttatcgagtctttgttccccttcct

SEQ ID NO: 378036 - DNA, 87 bp, Homo sapiens
ggctgccggtcgacgaccgccccgcgtcatgcggctcctcggctggtgccctgggcgctgcctatggcacagccaagagcggtaccg

SEQ ID NO: 378037 - DNA, 88 bp, Homo sapiens
acaagaaaatcaaaagaaacttttgcccttatcagtaacacctgagaattaaacaaccaccatgtcgagcaaaaaggcaaagaccaag

SEQ ID NO: 378038 - DNA, 75 bp, Homo sapiens
cttcgttattggagccaggcctacaccccagggttaatgcgagatgatacaatatacgaggatgaagatgtaaaa

SEQ ID NO: 378039 - DNA, 89 bp, Homo sapiens
ggcaaagcagctacacaaagagggtcatctcttctattgtacctgcaggaatatattattcgagtgcaaagaggaatttctgtggaaaa

SEQ ID NO: 378040 - DNA, 75 bp, Homo sapiens
gacctccaaggaagccacgtgcagacatctacaaccttcgatctcctgacgatgatttcctaaataaaaaccaag

SEQ ID NO: 378041 - DNA, 100 bp, Homo sapiens
gggtctgctgcgtctgccagcaagcgaggtgtcatggagaaactccagctgggcccagagattctgcagcgggaaaatccaaggcttatttatgccaggc

SEQ ID NO: 378042 - DNA, 83 bp, Homo sapiens
gactacggacctgtctgggtctcagccgccaaagaccccgtccggtaggaactgtggctgcaccatctgtcttcatcttcccg

SEQ ID NO: 378043 - DNA, 100 bp, Homo sapiens
tgatgaagatccacacctcactgcagtcgaagattcactcgggctctgtcacagccctccatgtgctacctgagttgctggtgacagcttcgaaggacag

SEQ ID NO: 378044 - DNA, 49 bp, Homo sapiens
tttaaaaaatacatatctggttttgaaggtcagtgcaccagatattctg

SEQ ID NO: 378045 - DNA, 100 bp, Homo sapiens
caaccgccctgtgagcttctacaaatgaagatgtgtgtgtctttaagtgctcagtgtcccgagagacagagtgcagccgtgtgggcaagcagtccttcat

SEQ ID NO: 378046 - DNA, 83 bp, Homo sapiens
ggggacaaaggcgcaagtcgagaggaaactgttgtgcctcttcatattggcgatcctgttgtatgattttaaaccagcatcta

SEQ ID NO: 378047 - DNA, 97 bp, Homo sapiens
agatggagcaagagtacttatgaaacttatgccgccaggtttagaaacatcaactggaatcaatttgcatttgaaaattagatcagcacaaagactt

SEQ ID NO: 378048 - DNA, 73 bp, Homo sapiens
ggccctcctgagggtctgggaacccccattgctccagtggaggccatagtggagtttgactaccaggcccagc

SEQ ID NO: 378049 - DNA, 89 bp, Homo sapiens
ggcctccgccaccgtgcacatccgaatggcacactgatttatgtcagtacatggacaagcaccctggggggctgcatccagataatgtg

SEQ ID NO: 378050 - DNA, 78 bp, Homo sapiens
cgaacaccgggtggctggtgcagccgaggtcttcgggaattccagcgagggtttaagttactgagccaggaggaaggc

SEQ ID NO: 378051 - DNA, 82 bp, Homo sapiens
ttctactccatctcattcattgtacagcgattattggagccggaattggtggcacttcagcagcctattacctgcggcagaa

SEQ ID NO: 378052 - DNA, 90 bp, Homo sapiens
cgcacctggctcaggtgagctgccccgcccccgcccggcgcgagccccaggtcctggcagcagcttcggaaccaaaaagaagcttcccag

SEQ ID NO: 378053 - DNA, 102 bp, Homo sapiens
agagaccgactggcggagcaccgccttccggcagaagctggtcagtcaaatagctggtggagttgagatctataatggagatcgtaaaataaaggtttccaa

SEQ ID NO: 378054 - DNA, 75 bp, Homo sapiens
agacggggaataaagcggagcgaggacagcaaggcccccgaggtcatcatgtcccagcactacgacgggaaggcg

SEQ ID NO: 378055 - DNA, 100 bp, Homo sapiens
ctgatcctgcaccacaaggtgtacgatttgaccaaatttctggaagagagatgagaagaatcagtccatcatagtcagtggggagtctggagccgggaag

SEQ ID NO: 378056 - DNA, 90 bp, Homo sapiens
caacacagctggctgccagcccgggccttggtggaagaggcccttgcccagcgattccaggtattctctactgccgctgatggtcaaacg

SEQ ID NO: 378057 - DNA, 97 bp, Homo sapiens
atccgctgagccaagaaaaatatatgagctggctgggaaaatgaaaggcaagaaactatattcagtctttgactcagatgccgaagatgaactttgc

SEQ ID NO: 378058 - DNA, 80 bp, Homo sapiens
aaagtaaaattggcaagacatatccttacaggcagagagaatcccgcccattgtcagttcctgttaaagccatgttgaat

SEQ ID NO: 378059 - DNA, 50 bp, Homo sapiens
cccaaccaggtccacaacgttcggccctgcagagcccagggagatggaag

SEQ ID NO: 378060 - DNA, 100 bp, Homo sapiens
gggcgatgtgtgattaccatggcgaggagtctctgtccgggggcctggctaaggaaaccctattacctccaggttgaaggtttagaacagatgtggaaaa

SEQ ID NO: 378061 - DNA, 100 bp, Homo sapiens
ccggagtcggggacccaggagtttcctgtgtccagcgctgccggagccgcctgagaatttgccattttcagtggaaaacaagtggtcgttactagctaag

SEQ ID NO: 378062 - DNA, 74 bp, Homo sapiens
aaagagccctacaatgtgaagatacataagatcgtagccagacccccagcatgctacaagtgaaaactgatgag

SEQ ID NO: 378063 - DNA, 101 bp, Homo sapiens
atacgcggactttgttgctgcttgcagtaaccttatgcctagcaacatgccaatttgaggagctcaagcttgggaaaatggtgtgcattccttgtatcgtc

SEQ ID NO: 378064 - DNA, 82 bp, Homo sapiens
agacacagagaaccttgctcttcatatcagcatggctcctgctccagcccagcccccagagagcagaccccaggtgctggcc

SEQ ID NO: 378065 - DNA, 102 bp, Homo sapiens
aggcgctgaagggcaaggaaagcagcatagagaatgagatagccgtcctgagaaattacagatgtagagctaaaacgactgaaggatgctttcaagaggacc

SEQ ID NO: 378066 - DNA, 82 bp, Homo sapiens
ggcctccccagccacgctttctgtacagcctgcagaactggaagtcccacctggccatcgtgcagaaggtaaacaacgaggg

SEQ ID NO: 378067 - DNA, 102 bp, Homo sapiens
atggataactgtgaggagctaatccctgaatatctgagtaactatggtggtggtgggaactataatgattttggaaattatagtggacaacagcaatcaaat

SEQ ID NO: 378068 - DNA, 98 bp, Homo sapiens
ttggagacgctgcaccagaatagcatcacctccaaagacaacaggccctccctctgccctcccgtctgtgagctccctgcccagcaccacctcctgca

SEQ ID NO: 378069 - DNA, 82 bp, Homo sapiens
ggtgatgcagaggggcctgggcctcctgcgccaggtcacggagactcaccagttggcagaattaaatgagaagaagaatgaa

SEQ ID NO: 378070 - DNA, 75 bp, Homo sapiens
cgtgtcctccggcaatacatgtgaagaactgataaatttcaaacggaagagagtggcagcatttagaaagaatct

SEQ ID NO: 378071 - DNA, 100 bp, Homo sapiens
gggccctctggaccctggagtacaccccgcagcacagccgcgacttcaagaagacttgcactatctgccagatgctgcttcctaaccagtgcagttatgc

SEQ ID NO: 378072 - DNA, 50 bp, Homo sapiens
ggagaggcctggaggacaccaacatgggatttatcaaagatgttcatgaa

SEQ ID NO: 378073 - DNA, 100 bp, Homo sapiens
gtgggcgcatatcctgggtagcctctaggaagcgctagacacatgggccctcctcgccaaagacagcctagagaggacggcaatgaagaagataaagaaa

SEQ ID NO: 378074 - DNA, 98 bp, Homo sapiens
aaatttggaaggaaacagttccctgtcttgggaaaaggagaactcctgactgattagcattcacaccagaacttcttggtatacatgaacaagcagca

SEQ ID NO: 378075 - DNA, 98 bp, Homo sapiens
gtgagacagaagccaaacaggaggaggaagtggagggactcagtggcctctgaggatgtggctgtgaacttcacacttgaggagtgggctttgctgga

SEQ ID NO: 378076 - DNA, 75 bp, Homo sapiens
taggaggaaaattcatcatctgtctctcatcacttttgtgaacaagcacctgaacaagctgaatttggaggtgac

SEQ ID NO: 378077 - DNA, 85 bp, Homo sapiens
gacggagcagcgcgtcgtggggcgagcggcagctcaccatggatgatgatatcgccgcgctcgtcgtcgacaacggctccggcat

SEQ ID NO: 378078 - DNA, 82 bp, Homo sapiens
cggggaccatgcagcggaggtgggtcttcgtgctgctcgacgtgctgtgcttactggtcgcaagagtgagccatggagctac

SEQ ID NO: 378079 - DNA, 100 bp, Homo sapiens
atatgaactgtgaagatattgccatgaacttcctggtggccaacgtcacgggaaaagcagttatcaagttctcaaaagtctatggccctgtgttcactgt

SEQ ID NO: 378080 - DNA, 100 bp, Homo sapiens
aaagatgaagcttccaaaatcaccatttggaaggaacagtacagagttgtacaggaggaaaaccagaggtcaaccagaatcaagatgtctgggactgagg

SEQ ID NO: 378081 - DNA, 55 bp, Homo sapiens
gcccgcgaggcgggcagccggggcgtccagtgatgtccttgcattgcccattttt

SEQ ID NO: 378082 - DNA, 83 bp, Homo sapiens
ctgaagcgcacgacctccgactactttctccttcaagttactaaaccaaggagatttaactgaaagacggacatgagcgtggg

SEQ ID NO: 378083 - DNA, 100 bp, Homo sapiens
ctgactgcaaaacagccgtcaattgttcatctgattttgatgcgtgtctcattaccaaagctgctgtgaagtcgatcaagaagcagcacctggtggaggt

SEQ ID NO: 378084 - DNA, 100 bp, Homo sapiens
gtgctgttaccgctgccccatggcgcaatgtccctgctcttctctcgatgcaactctatcgtcacagtcaagaaaaataagagacacatggctgaggtga

SEQ ID NO: 378085 - DNA, 75 bp, Homo sapiens
tgaccatgcttctgcagcaccaccttcaggtatatgatgatggaaagtatgtgtatgtagtaacagaacttatga

SEQ ID NO: 378086 - DNA, 101 bp, Homo sapiens
tctctacgcagaacccgggagtaggagactcagaatcgaatctcttctccctccccttcttgttttttaggtggtggcggcagtcggatagacaataccac

SEQ ID NO: 378087 - DNA, 51 bp, Homo sapiens
tccctctgggccaggacgccgaggaggctaggcagctggaagagaaagacc

SEQ ID NO: 378088 - DNA, 75 bp, Homo sapiens
gtgccttttgcctcccaccgtgattctgaggcctccccaaccatgtgcaattgactttccttatcccagttgatt

SEQ ID NO: 378089 - DNA, 100 bp, Homo sapiens
gcatcctggaactgggatctctcctggcaaagactggacaagctgcagaagccaagtacaagaagctggagaagcgatgagaaacttatttctatgggac

SEQ ID NO: 378090 - DNA, 98 bp, Homo sapiens
aaaaagtccttattaatttgtttgttggcactgatgataagaattctgtgaatcatgtaattcatgtatcctccatgaaatgtgggatccttccaatt

SEQ ID NO: 378091 - DNA, 100 bp, Homo sapiens
gagtccaagttcaaccaagccattgatacacacctgctaaaactgcttaaaacattagaaggacatgcttatggcgtttcttatattgcatggagtccag

SEQ ID NO: 378092 - DNA, 82 bp, Homo sapiens
gaactggccatgaggctggacttgaccgaggcccgagtccaggtgtggacactgccagcggctgcagccgacttggaatgac

SEQ ID NO: 378093 - DNA, 100 bp, Homo sapiens
ctgggcttggcacagtcatgaggacagggctgaaggcatcgaaggggagattcttctgatgtagagcgactggaaagattcttcgactcagaagatgaag

SEQ ID NO: 378094 - DNA, 83 bp, Homo sapiens
ttaataaaccttccagaggattacagcagcctcattaatcaagcatccaatttctcggagtgcatccgccccaacccttttcc

SEQ ID NO: 378095 - DNA, 101 bp, Homo sapiens
gtccgaaatgccggtgcgaggagaccgcgggtttccaccccggcgggagctgtcaggttggctccgcacagaagcattaaaatgcgtggctcaggctagca

SEQ ID NO: 378096 - DNA, 74 bp, Homo sapiens
cgacgcggacatggtcatgagctttgtgaacctgggtcatggcaaaaccccaaaagatgccgcgtcagttcgag

SEQ ID NO: 378097 - DNA, 75 bp, Homo sapiens
aggaaaaggagatccagcggctcaacaagctcccgttctctgtcatcggttccctcaatggagtccacatgtttg

SEQ ID NO: 378098 - DNA, 96 bp, Homo sapiens
ggatgaatggaaagcaaagaagaaagcttctaatgggctcctggtacagtttgttcagaatacgtccatcccattgggacaggggcttgtagaatc

SEQ ID NO: 378099 - DNA, 87 bp, Homo sapiens
attgttgacatgcatgcagctgcagacatcttcaaacactacatgaagaggaatgttacggcatccggagtcatccctcagatttct

SEQ ID NO: 378100 - DNA, 50 bp, Homo sapiens
ggggccactcagagtcgcccgagaaccccatcttcccgggaagccagccg

SEQ ID NO: 378101 - DNA, 90 bp, Homo sapiens
tctctcattggcttctttgagactgaaatggcaggatcactactcttggaatcaaagataaatccaaatactgcatatcagaaacaacag

SEQ ID NO: 378102 - DNA, 75 bp, Homo sapiens
ggacccctactattgcaacaagacagcccacctgaggatattgaccataaggactcatatctcattacaagaagc

SEQ ID NO: 378103 - DNA, 75 bp, Homo sapiens
ggcgccgggagcgagctgggagggagccgcgcgcctttgtgcgcgcgccgagttattttaccaagaaaatggttt

SEQ ID NO: 378104 - DNA, 100 bp, Homo sapiens
ttgccaccaagacaccccttgaccagcacacactgcaaggagatcagtttttactggatatcgcaaggcagaaaaatcaaacccctttgccactgattaa

SEQ ID NO: 378105 - DNA, 90 bp, Homo sapiens
gcggcggcccacgcgcagcgacagggagagggagctgcctcagccgccccccttgctgtcgccgcagaatgcccctcacgtcgccctggg

SEQ ID NO: 378106 - DNA, 98 bp, Homo sapiens
cagagcgcctgcgaccccagtcggtgctccggggaggtcacctgacgaggagtggatcaatcttcctgtcctacaactgacaaaggatcccctaaaga

SEQ ID NO: 378107 - DNA, 82 bp, Homo sapiens
ggtggatcaaaaggaactgtccttcagcccatccttattgaagatcttctgccaatgtcactgcaaggaatcaacacccgaa

SEQ ID NO: 378108 - DNA, 75 bp, Homo sapiens
cttttttgagaaaggaaggaatatatcctgactgattgtcataatgattacggttatcagcaaccgtcgtatcct

SEQ ID NO: 378109 - DNA, 75 bp, Homo sapiens
gtttcatcattactaacaggatattcctcatgacattgctgtctggataaaagaatcagagtgtctcaacccttg

SEQ ID NO: 378110 - DNA, 82 bp, Homo sapiens
tgcggccaattcggtggaacgaggacgcggactgcgaaggcaggtcaaaatgcagatcttcgtgaaaacccttaccggcaag

SEQ ID NO: 378111 - DNA, 88 bp, Homo sapiens
tttttcagtcagccatgagcataggaagctgtgattaagcactcattggtgcataaagtattcttggacttttttacctatgcacccc

SEQ ID NO: 378112 - DNA, 83 bp, Homo sapiens
cctcgtacgggctgtcggccgaggtcaagaaccgggttgaagaagcctcagcggaggcgatacggcctcctcgccaacactga

SEQ ID NO: 378113 - DNA, 100 bp, Homo sapiens
acgtttaatttttctaaagagtcttgttatttcttctttgagaaaaacctgaaagatgtctcagaaaatggttctcctgaagaacatgcaatctatgttt

SEQ ID NO: 378114 - DNA, 100 bp, Homo sapiens
ctagccgctactttgtaatccggatccaggatggtactgggtaccagataagcaaatcctatataattttgcagctggagcaaggaaaagagctgtggcg

SEQ ID NO: 378115 - DNA, 100 bp, Homo sapiens
ctgcgaccagcgcggccccacctacgttaacatgacggtcggctccttcgtgtgtacctcctgctccggcagcctggatcacatgcagtggtctaaggaa

SEQ ID NO: 378116 - DNA, 100 bp, Homo sapiens
gccccgaggaggagcggggcggcgcaggcggtggggtggaagacaacccgtgagtattacaccttcatgtgggttactttgcccattgacctaaacaaca

SEQ ID NO: 378117 - DNA, 74 bp, Homo sapiens
tcggaaacgcggcgcggccggctgccggaaaatggagtttcactcttgtctcccaggctggagtacaatggcat

SEQ ID NO: 378118 - DNA, 74 bp, Homo sapiens
agatgatgatgacattgacctctttggatctgatgatgaggaggacgagcagctgagggccctggtgaggcagt

SEQ ID NO: 378119 - DNA, 100 bp, Homo sapiens
ctgtggagtatattagtgctcatcctcatatcctgtttatgctcctcaaaggatataaagatgaagcgcagctgtataaagaagagcacctgaggaatcg

SEQ ID NO: 378120 - DNA, 75 bp, Homo sapiens
tgaacatcatgatttccccaacattcctggaaaaagtcttccactggctattttggcattctgctggatatatgt

SEQ ID NO: 378121 - DNA, 101 bp, Homo sapiens
gctatgtccttttggcttcgaggtttaccccttccaggtccctttcaatgcagtcgcactccggattacccactctgatgtcgcccctacccatatactat

SEQ ID NO: 378122 - DNA, 100 bp, Homo sapiens
gtttgtggtccggttcagagagctactgcagaggtcgcaatgatgatgtcaaatgcttttgttgtgatggtggcttgaggtgttgggaatctggagatga

SEQ ID NO: 378123 - DNA, 80 bp, Homo sapiens
tggtcaacaaaatccacgtcaggttaagaaggcttttttgctctgtagcctggacgtactttgaagcccctccccacgat

SEQ ID NO: 378124 - DNA, 82 bp, Homo sapiens
aagaatagagttgagcctgtgggacacttcgggacttcaaacaagtgtgaagaggctgtgtggcgagattgtggaactgaag

SEQ ID NO: 378125 - DNA, 82 bp, Homo sapiens
gtgaagatggcggcagccgaggccgcgaactgcatcatggagtattctaccttgtaaatactgttatttgtatatactgtaa

SEQ ID NO: 378126 - DNA, 50 bp, Homo sapiens
ccatcgatgtgcggcgtccgctgtataagtaatgcaagaagtgtttgtgg

SEQ ID NO: 378127 - DNA, 73 bp, Homo sapiens
gacacaccaggccggcaggctgagaaaagcgagaccgcgtgcgaggaccggaatcaagagagacccggccaag

SEQ ID NO: 378128 - DNA, 83 bp, Homo sapiens
tctgtggaaggacctaccaaccagcgccaaatcttaaaggcagaccacgcaaaaagaaaccatgcccacaaagaagagattca

SEQ ID NO: 378129 - DNA, 100 bp, Homo sapiens
ccgagtgccaggcgccggccggctgcgaagacgcggtgggccgcccctccggtgcagtagacattgttgcaatcatgatcggcaatctgaaaggcacaaa

SEQ ID NO: 378130 - DNA, 71 bp, Homo sapiens
gtcacagagcaggaggtggctcaggtggccagtgccatcctctccctcagcggaagtgaccgtggtggctt

SEQ ID NO: 378131 - DNA, 90 bp, Homo sapiens
agtttgcgactcgcggaccggcgtccccggcgcgaagaggctggactcggattcgttgcctgagataaagcccccaccctctgctgtcac

SEQ ID NO: 378132 - DNA, 90 bp, Homo sapiens
tggagagtctctcccctttggtgacaactcattcaagttaaagtccctgatggtggtcggtattgatgtctgtaaagatgcactcagcaa

SEQ ID NO: 378133 - DNA, 99 bp, Homo sapiens
aagaagatccagagaagctcttcacagatctcagagaaattggccatggaagctttggagcagtgtattttgtgcctgtcctgagacccatggacctga

SEQ ID NO: 378134 - DNA, 100 bp, Homo sapiens
ggggtcagcatgctgaggatcctcttcctcctggccttgttgtcctcctggtgcgaagagctcggccgcctgctgctgctccgacatcagaagagccgcc

SEQ ID NO: 378135 - DNA, 100 bp, Homo sapiens
caatataatattaggggtgttacgtataggctcactcaagaaatacactttcgggaaatggcctctaaatcctggctgaattttttaaccttcctctgtg

SEQ ID NO: 378136 - DNA, 100 bp, Homo sapiens
tggagccgtctgcaaagtgtccccggcaagaagatggagaggagaaaacctatggtggctgtgaaggacctgatgccatgtatgtcaaattgatatcatc

SEQ ID NO: 378137 - DNA, 80 bp, Homo sapiens
ctgggccgggccccaccggacgattcttcgctgctgctgccttaccgccgagaaccaccacccgccaggcgtcttgcggc

SEQ ID NO: 378138 - DNA, 100 bp, Homo sapiens
agcagttctctgatttttatattttattcctcttcctatccaatccctgccttttgagtccaggtgtttcagagactcctccactctctgggaatgacac

SEQ ID NO: 378139 - DNA, 128 bp, Homo sapiens
agcgacaaatgaaggaactccaggccgccaacgaaagcaagcagcaggagctggaggccgtgcggaagtgtgaagcctcagtttaggtcatctggtggttcagaacactcaacagagggctctgtatc

SEQ ID NO: 378140 - DNA, 74 bp, Homo sapiens
aaaaggcaaactcttcacctggtgacgggggaagtgacagatccatcaggaaaagtccactttgctcttctggg

SEQ ID NO: 378141 - DNA, 75 bp, Homo sapiens
gaactcagagtactgggaaaagattggccacagatgtctttaattccaaaaacctggccgttcaggcacaaaaga

SEQ ID NO: 378142 - DNA, 82 bp, Homo sapiens
gactattctccgggagccgtccgtgtcaccgccggaacctggcgcagagtccgaaattgaagttcagaggaagaattgcctt

SEQ ID NO: 378143 - DNA, 50 bp, Homo sapiens
gccatagtacctacagcagcactccaggtggtggagattgtgaagaagct

SEQ ID NO: 378144 - DNA, 100 bp, Homo sapiens
cccaaagtgctgggattacggagatgatttacacaatgaagaaagtacatgcactttgggcttctgtatgcctgctgcttaatcttgcccctgcccctct

SEQ ID NO: 378145 - DNA, 75 bp, Homo sapiens
agccctcccaaaggatttgatacgactgccataaacaaaagctattacaatgtgctcaaagcttggattctgccg

SEQ ID NO: 378146 - DNA, 73 bp, Homo sapiens
tagatggacaagagacgatcattctgcaagcaggcaacctgaatacaggggctcttccctgctattcactcgg

SEQ ID NO: 378147 - DNA, 74 bp, Homo sapiens
gcaaagcagcaaatgcattccacgtgtatcagggagaagacatttttttggacatgtttgaagatgagtatagg

SEQ ID NO: 378148 - DNA, 82 bp, Homo sapiens
gccggcatcgtctttccgtcctctgaggcgacggccgcggctgcacaggttatcaatactctggctgaccatcatcatcgtg

SEQ ID NO: 378149 - DNA, 80 bp, Homo sapiens
tggcaagacatatccttacaggcagagaggctgacttcaaaatttctgaggagtgcatcgcacagtggaagcaaaccaac

SEQ ID NO: 378150 - DNA, 74 bp, Homo sapiens
agcacattaggctttcttccctggcacatcagattgactgagattgtatgccatggctagtccagggaaagata

SEQ ID NO: 378151 - DNA, 90 bp, Homo sapiens
gtcgacggcgagcccttgggccgcgtctcctttgaggagaagagcatctttctcgtggcccacaggaaagatcctacaggaatggatcct

SEQ ID NO: 378152 - DNA, 98 bp, Homo sapiens
aacagatgagaaacccggcaatgaaagaaaggtattccctgggaagatttcagtgacagtatcagaaacatttgacccagaagagaaacattccatgg

SEQ ID NO: 378153 - DNA, 99 bp, Homo sapiens
tggaggggcctttgtccgtgttcggtgaccgcagcactggggaaacgatccgctcccaaaacgatgttgatgttagtgaagattcacctcctcccctac

SEQ ID NO: 378154 - DNA, 88 bp, Homo sapiens
gatacctgtaagaaaggccttagtaggcctttctaagtctcctaaaggatgtggacaatctctatgggaagcagaaggcaaggacccc

SEQ ID NO: 378155 - DNA, 100 bp, Homo sapiens
ttggggcttgatgaaggcgtggatagcctgaaggcagccattcaggtatctcttgggtcacagattgatttacagaagaagaagcggcgagcgccagctc

SEQ ID NO: 378156 - DNA, 83 bp, Homo sapiens
ggacaagcttttgtccccaaaccagagatagggccagatttgagtgtgtgaatttttgagtgaaacctggaacccaaatgaga

SEQ ID NO: 378157 - DNA, 75 bp, Homo sapiens
ggaagggagcctgtgccagccacgtcagcaccatggccagcttcctgaagctctggtagctgaagaacatctcac

SEQ ID NO: 378158 - DNA, 100 bp, Homo sapiens
ttattctgtgggctctgattctccaatgggaataccaaggggcagaggagatatggaacagaatgactctgacaaccgtagaataattcgctatccagat

SEQ ID NO: 378159 - DNA, 82 bp, Homo sapiens
tgtgctcgctggcaccccgaacgggttgcttcccccgctgcgaggtgtgaacccacatccctgcccccagggccacctgcag

SEQ ID NO: 378160 - DNA, 74 bp, Homo sapiens
cacgctgccagtgtaaatcctatagacgttaatatgagaacactggccccctcaccttttcctttccagctgtt

SEQ ID NO: 378161 - DNA, 80 bp, Homo sapiens
attacccaagattttgaagaagcttgtcgagctaccgcctgtgtgatccttctgagagggaattgtacaagttgtctcca

SEQ ID NO: 378162 - DNA, 87 bp, Homo sapiens
gcgtggagcctccgaggccgaggacagagcgggatgccaccagcttgtccaaagggaagttccaggagctcctggtgggcatcgttg

SEQ ID NO: 378163 - DNA, 83 bp, Homo sapiens
cacgcattctagactcccgaagagatcactactggttacaacctggaagatgaccgctgtgagtgtgtggctctgcaggattt

SEQ ID NO: 378164 - DNA, 51 bp, Homo sapiens
gctctagagaccacgtgaagtctcctcgtagagacggagtttcaccctgtt

SEQ ID NO: 378165 - DNA, 96 bp, Homo sapiens
gacggtgtgtggggtcctgtcactatttggtgctccatacttgcttgcagtgcctacgtggctctggctttgggtgataacctcatggctttgaat

SEQ ID NO: 378166 - DNA, 87 bp, Homo sapiens
atcggacatgagaacttcgagttgattaaccacgacgtggtggagcccctctacatcgagggtgggaagaagagcgctatcctgaag

SEQ ID NO: 378167 - DNA, 82 bp, Homo sapiens
caccggcggctaccggcggcggcgcgcagcgtgtcaggcggagagacccgccgccaggtgaaagaaaatggcccgaaccaag

SEQ ID NO: 378168 - DNA, 100 bp, Homo sapiens
acctttggattaataatgaaaacaactactctctgagcagctgttcgaatcatctgatatttatactgaatgagttacttcaggatggctaaaggtgacc

SEQ ID NO: 378169 - DNA, 100 bp, Homo sapiens
ctggaattatgggcgtgagccactgtgcccaggatttaggtcctgaatatgaaggtatatttaacacttcattgcagtggatcttagaaaatggaaaaga

SEQ ID NO: 378170 - DNA, 75 bp, Homo sapiens
ggagatgatgctggagcagaagttagcgcttctctctcgttcagggcgacagctcagtgaagtcttcattcagtt

SEQ ID NO: 378171 - DNA, 75 bp, Homo sapiens
cgccgagtcgaacggggagccgagctggagctgccgcggcgcagccaggttttgtagtgcatccctgagcatgag

SEQ ID NO: 378172 - DNA, 90 bp, Homo sapiens
cctgatggcagttagcacactggtggaagagggccctggtggagacgcacctgcgtcagatctgtggtttggagcagcagctgcggcaac

SEQ ID NO: 378173 - DNA, 75 bp, Homo sapiens
agggagataaattcaacccagtggtgacaaaggtgacacttgcttcaactgcattggaactggtatttcagggcc

SEQ ID NO: 378174 - DNA, 75 bp, Homo sapiens
cggagatcctttctattcaggataacacaagtcccttgccggcttatgccaaattttctggtgcacccttgaaag

SEQ ID NO: 378175 - DNA, 51 bp, Homo sapiens
gcctggttctgggaaaacaacattgtctcgatgcctttgaagatgagaaac

SEQ ID NO: 378176 - DNA, 82 bp, Homo sapiens
ggagtgaccccttgcactatagacaagccaaatttgagtttcatcatggtgactatgaaaaacagtttctgcatgtactgag

SEQ ID NO: 378177 - DNA, 100 bp, Homo sapiens
tgatcccctggccgttggaggagcagttatgatcatacaagccaccatagtgaaggtgggcggaagacaagacaccatagtgaaggtgggaggaagacaa

SEQ ID NO: 378178 - DNA, 100 bp, Homo sapiens
gccaagagactgcttttgagtgacatttatttagcagctagtaacttcacttatttcaggctaaaccatttacacagctggtgaaagaaatgcagcttca

SEQ ID NO: 378179 - DNA, 76 bp, Homo sapiens
ttggccagcgaagagatctacattaaccagctggaagccctgttgctgaaatcccttccctgcgacatatgcaaag

SEQ ID NO: 378180 - DNA, 71 bp, Homo sapiens
cttcgggagccgcggcttatgctgctgacatggcctccagaaacatctttgggagcctttggtcttctgtg

SEQ ID NO: 378181 - DNA, 100 bp, Homo sapiens
gcgacagccgcgggcagcagcctcaggagccggagctggaacggccgggggcggcggcagcggcggcgctgaggataacagtcttcactcctatgctgat

SEQ ID NO: 378182 - DNA, 88 bp, Homo sapiens
aaattgggtgtataccagtggctgtccctagtaattttgatgacaggagttgcttttgtacagtacttctgaaattcctcagttccgg

SEQ ID NO: 378183 - DNA, 74 bp, Homo sapiens
cctgagtatatcaagtacttcaatgataaaaccattgattttgagctgctgaagcatcagaaactcaaggacca

SEQ ID NO: 378184 - DNA, 90 bp, Homo sapiens
gagctgatcccatgttctcctgccctgaagcaggtttcttcaggagaagcattaccaaaaacgctgtgtacaagtgtaaaaacgggggca

SEQ ID NO: 378185 - DNA, 87 bp, Homo sapiens
aaaacaaacgtcacacatgaagaacacacagcggtggaaaagggcgtctctggccgagcctctttttgtggaaaacgacagcagcag

SEQ ID NO: 378186 - DNA, 80 bp, Homo sapiens
atcatcctgaatgaatttagagccaaactgtccaaggctttggcaaaacgatggaaagaactttctaaggaagacttatc

SEQ ID NO: 378187 - DNA, 100 bp, Homo sapiens
ccggggcgagtacgagcgctccttcctgcgtgagttccacaaggaagtgcttcgggagatccaggatgcagtggccagggcggggcaggtggtgcgggaa

SEQ ID NO: 378188 - DNA, 96 bp, Homo sapiens
gaggaggagctggcctttaggaaagccaagatcaggtgtatggaatgattcggttctcaggcaccacaggccagatgtctgacctgaacaaaatga

SEQ ID NO: 378189 - DNA, 75 bp, Homo sapiens
ggatccttctgtcatagaaactcacatgagacaaatgcgctcagcttcaattgttagttgaatccatggacatga

SEQ ID NO: 378190 - DNA, 87 bp, Homo sapiens
agagcggagcagtggtcggagatgtggcgaccgcttcgagagctgtgcccaggagtgaacaaccagccctacctctgtgagagtggt

SEQ ID NO: 378191 - DNA, 90 bp, Homo sapiens
cagaccaagacacgacatctagccctgaatctgcagctgcaagctttcttcctggtggcagatgacatcatggattcatcccttacccgc

SEQ ID NO: 378192 - DNA, 97 bp, Homo sapiens
gggcgctcatgcccgagtgcagacctgcatcaacctgatcaccagccaggagtacgccgtcaagcctggcctgggacctgctgctgctccagccatg

SEQ ID NO: 378193 - DNA, 50 bp, Homo sapiens
cctcattgctctttggcgactcttattgaaagccttgagccgggccatgc

SEQ ID NO: 378194 - DNA, 100 bp, Homo sapiens
ggccgtgatcaaacactgcaaggaccccctccggctcaagtgtgtcaagcaaggcttctccagggaaagtgaccgaggcagtgaaagaggccattgacgc

SEQ ID NO: 378195 - DNA, 82 bp, Homo sapiens
gcggccgcggggcccgagcgcaggtaaaagtacacctgtaagccagcttggttccgcagactttcccgaggcccccgatcca

SEQ ID NO: 378196 - DNA, 75 bp, Homo sapiens
tccgcagcagatcagggaccggctgctgcaggccatcgacccccagagcaacgggatcctgctaaagcggagcgg

SEQ ID NO: 378197 - DNA, 75 bp, Homo sapiens
aagaagggaaggcgcgagtgaggaaaggaggtactgtagacactttttcaaaaatggcaatggtatcagaattcc

SEQ ID NO: 378198 - DNA, 60 bp, Homo sapiens
catccttgggcccccgatgtatgaaatggagggaattgatgttgatgctgaaaattgtgc

SEQ ID NO: 378199 - DNA, 82 bp, Homo sapiens
ctgggacttcccgtccgcggcgtggagggtgccaggaccattgacaccagaaatggaggcacggcaggctacacggaaaagg

SEQ ID NO: 378200 - DNA, 101 bp, Homo sapiens
cagagattcaggccagagttgtgggccgccgtcggcagcaagaacagagagagaggtggacagatctgagagatactgagctttcctgctctgggacccta

SEQ ID NO: 378201 - DNA, 98 bp, Homo sapiens
ggaagctacgtttgtgttgcgaggaactatcttggtgaagcagtgagtcgaaatgcgtctctggaagtggcatgggatcctgtcgttcaaaaattcct

SEQ ID NO: 378202 - DNA, 100 bp, Homo sapiens
gccatcttcaaaatctacctctcttgtttggaagaactgatgaaggagaattcgcacaaccacggggacggtgcagaggacttcaagcagcaggtgccgt

SEQ ID NO: 378203 - DNA, 75 bp, Homo sapiens
gagagttacagcctgtactacctgaaggagcttcagctgcccctgaagaagctcctcaagagttactgatctatg

SEQ ID NO: 378204 - DNA, 74 bp, Homo sapiens
gacaatatcatgcaagtgtggcaaatgctatgaagacggccaagtgggagatgcaaatattaatacacaagaag

SEQ ID NO: 378205 - DNA, 100 bp, Homo sapiens
catggaaatcagtgcttacaggaaactcttagaaggcgaagaagagagcccttctgcagaggccgggctggaggagaagatggcggccaagcagcccccg

SEQ ID NO: 378206 - DNA, 51 bp, Homo sapiens
tgttgaggaggagctgaataggggccattatgctgtgatgaacaaccccac

SEQ ID NO: 378207 - DNA, 96 bp, Homo sapiens
ggagcataggaggaaaattcatcatctgttccagctattcttcagatgctctggattttgagacggagcacaaattggaccctgtatttgattctc

SEQ ID NO: 378208 - DNA, 49 bp, Homo sapiens
gccgccgtcagagccgccctatcagagacaaagcatggaggacacaaga

SEQ ID NO: 378209 - DNA, 90 bp, Homo sapiens
ccagcccggcccggcagcgacatggaaggtgaaaggtgtagcagtcactcggcctacacccacagcatcgaccttgtgaacccagcgacc

SEQ ID NO: 378210 - DNA, 75 bp, Homo sapiens
tttaagtgtggcatacaagaaaggcattggcagttctgtttggaactatctcttagagctttgtgtctgcttaaa

SEQ ID NO: 378211 - DNA, 100 bp, Homo sapiens
gtctaccacttctgattatcagtgggatgttagccgtaatcaaccctatatcgatgatgaatggtctgggttaaatggtcagtaggacagaaggtaacat

SEQ ID NO: 378212 - DNA, 50 bp, Homo sapiens
ctttcgagagtgtatacaaatgacaggctttacttactgcagtaacatca

SEQ ID NO: 378213 - DNA, 100 bp, Homo sapiens
tatggcagcgcccagcaacaagacagagctggcctggagtccgcggctggccgcgtgagtagacaccatgccacaaggagagtgatctcttcccctgttt

SEQ ID NO: 378214 - DNA, 75 bp, Homo sapiens
gctgcctctgtcactcctggtgaccagcattcaagattggaaagagtcaacctaaagcccagaaccctgctcgat

SEQ ID NO: 378215 - DNA, 83 bp, Homo sapiens
cagtccctctgccccacatcctggggttacacatcattttggaatgactgtatatcatctggattacgtggctgtatgttaat

SEQ ID NO: 378216 - DNA, 98 bp, Homo sapiens
cgcccggccgaacccgcgatggaataatgcccagcggcccgccaggtcccgcttgtgagtgccatctgcaaggatctgtcaatgccttctgcaatccc

SEQ ID NO: 378217 - DNA, 90 bp, Homo sapiens
gaggcagggagtccgagatggggggaggtcgtgtcgcggcgtctgaaaggggccactggcgggcctccccttcctcatcatcgagacaag

SEQ ID NO: 378218 - DNA, 82 bp, Homo sapiens
cgtaccggctctggaaaatccgcaagaccatcatgcaggggtggccgtgactggggagagcacaaccagcggctagaggagc

SEQ ID NO: 378219 - DNA, 75 bp, Homo sapiens
ccacacattgatcacggggctagaagagtatgtgcgggagagttttgcctccagccagctgtcccggggttcggc

SEQ ID NO: 378220 - DNA, 100 bp, Homo sapiens
cagaattaaaacagacggtgctggaaacctcgacctgtctcccagttggttgcacagcaggttactcagcagtttgtgcctcctacacagtcaaagaaag

SEQ ID NO: 378221 - DNA, 100 bp, Homo sapiens
ggaggtctccggagcagagccgaagctcgccggagaagaggagccccagcgccccggtttgcaaagcaggttaaacccatccagagtaatggctgcggcc

SEQ ID NO: 378222 - DNA, 50 bp, Homo sapiens
caaccgagccccgcgcgggctccagcagcaaatgaagaaacacccctgcc

SEQ ID NO: 378223 - DNA, 100 bp, Homo sapiens
tgcattgcctgcaagctctgcgaggccatctgccccgcccagcagtgttgtactgctacttctataaacggacagccgtaagactaggcgatcctcactt

SEQ ID NO: 378224 - DNA, 50 bp, Homo sapiens
cccccttcagtcgcagcctcactctaggctgtacaggaggcatggctggg

SEQ ID NO: 378225 - DNA, 100 bp, Homo sapiens
aggcataatagtggatccttgaatgttgaagatgtccttaccagctttgacaatacaggaaatgtttgggatgccaacagacagatcagcgacctcaaat

SEQ ID NO: 378226 - DNA, 75 bp, Homo sapiens
tgagattgtggaggaatttgagaagctgatggtccaacaggcaccagaagtcatcagaatgcaagataaaaatcc

SEQ ID NO: 378227 - DNA, 100 bp, Homo sapiens
ctaaagcctcctcagccttctgagtcagcctgaaaggaacaggccgaactgctgtatgggctctgcccagcagcttccacacaagaaaagaatccccggg

SEQ ID NO: 378228 - DNA, 100 bp, Homo sapiens
gcagtggtgctgtcagcgcggccgtcggagacatgggagacccggggtcggaagtcactctgtgagactgctgggtcagaaaaaggataatggaaggcgg

SEQ ID NO: 378229 - DNA, 82 bp, Homo sapiens
gcggatctcaccgccgctcagggcaatagccctctggaacaagacaattcatgtgagataagaaagaagagcccacaagacc

SEQ ID NO: 378230 - DNA, 100 bp, Homo sapiens
agtagtattcgatgtatgagaagagctgtcctgagtgaaacttttagggaaggtggtttctttggattttacagaggtctgatgcctactattttaggaa

SEQ ID NO: 378231 - DNA, 82 bp, Homo sapiens
tgaacacacacattccagagaactgtgacctgcctagagctggaacgttacctccagagcgagccctgctatgtttcagcct

SEQ ID NO: 378232 - DNA, 50 bp, Homo sapiens
ccattcaagttcaagttcacaattggcaccctgtattcagtggatcagct

SEQ ID NO: 378233 - DNA, 98 bp, Homo sapiens
atccaagtgatggagcagcattttcaggttgatccaaggattagttttggatcatggtgcccgtcatccagatatgaagaagcgagtagaagatgcat

SEQ ID NO: 378234 - DNA, 75 bp, Homo sapiens
agattgccttcttgggtgatgatgaatctgcattggataatgatataatcagcaactgctgtgatgagatgctgc

SEQ ID NO: 378235 - DNA, 90 bp, Homo sapiens
gcacatctgtggaggatctgccagggagcaaacctgagcctgatgccatttctggtggtctttgggaagaagcttcctgcctttgccacc

SEQ ID NO: 378236 - DNA, 106 bp, Homo sapiens
tcttccctgaccattttctactgtccctgcgcgagttccaaaagctgagacaagatcttgaaatggtactgtccactaaggagtcaaagaatgaaaagttaaagga

SEQ ID NO: 378237 - DNA, 96 bp, Homo sapiens
caaccaaattgtcgccattaagaaaggcttgcgtttcaagaaagcccatgtaacacatcctgaactgaaagccaccttttgcctaccaatacttgg

SEQ ID NO: 378238 - DNA, 82 bp, Homo sapiens
tgaccggcgtcgagaatttcaactggtttactcctggcttgggggcattaggaagcactggaggctcttcgggaactaatgg

SEQ ID NO: 378239 - DNA, 90 bp, Homo sapiens
atgaaaatgaagacgacattcagtttgtcagtgttctctacttaaaagacaatgactactgatgaaggtgccaagaacaatgaagaaagc

SEQ ID NO: 378240 - DNA, 113 bp, Homo sapiens
ggtgcgggctctgcagcgagcgctcgatggaacctcatcccaggtggccagcatcgaaatgttcagccttttagtgatgaagatgcatcaattgaaacaatgagccattgcag

SEQ ID NO: 378241 - DNA, 98 bp, Homo sapiens
tggacccccagacagagcccctcatcttccaacagttggagattgaccattatgtggttattgccttgtctgtcaagatccgcagttatgaagaacac

SEQ ID NO: 378242 - DNA, 95 bp, Homo sapiens
cccgacgtacagcgggccgggaaaagtggcactgaggctctggaacttctgcccagctctccttggatgtggagagcatcttgtgcgcaccatac

SEQ ID NO: 378243 - DNA, 98 bp, Homo sapiens
atagcagcagaagagaagaagaagcaggatgaactgaaacggattgccagagaattggcagaaggtggagctggaacgagccaagacgcagctgacat

SEQ ID NO: 378244 - DNA, 90 bp, Homo sapiens
accggctccaagtttgactgtgcccttcatggaaaccactgggaggacctgggctttcagggcacgtgtggttctcaaatataggcattc

SEQ ID NO: 378245 - DNA, 74 bp, Homo sapiens
cccctcagcaacgccgtgcagctgcccatcgaccaggttgtttttcaccattcagaacattgcctgaagcaggt

SEQ ID NO: 378246 - DNA, 83 bp, Homo sapiens
caatggcacaaagttctctcgatcagggcatacatctttcttcgacaaagggtcccgcaggctcccgatggcgagattacggc

SEQ ID NO: 378247 - DNA, 100 bp, Homo sapiens
ccgagaacctcggcatcaccagtggcttcgtgaagcccaagctggacctacattgccccaccagctgccattttttacccatcgggtgctcatgacacgt

SEQ ID NO: 378248 - DNA, 75 bp, Homo sapiens
ctaaaatctccgcagctctggttcctgttgcggccggatgtaagagcacacctaaaatgacaaagtcaactcaaa

SEQ ID NO: 378249 - DNA, 100 bp, Homo sapiens
tccctcccgcgcgtgctgcgggtctgctcgggggtctacttcgaggctgctcagataaagaatttgatgagccagctaggaactaagcaggactcaagca

SEQ ID NO: 378250 - DNA, 74 bp, Homo sapiens
caaggatccacctctgttctgtatcatgtttgaaaccttcaatgtccctgccatgtacgtcgccattcaagctg

SEQ ID NO: 378251 - DNA, 75 bp, Homo sapiens
ttcatttttgagataactgttcccaatgcagacactgcccatctctaagataagaacctggaaaggggactctgt

SEQ ID NO: 378252 - DNA, 129 bp, Homo sapiens
cgccctgagtcactgcctgcgcagctccggccgcctggctccccatactagtcgccgcaacatggccaacgccctggccagcgccacttgcgagcgctgcaagggcggctttgcgcccgctgagaagat

SEQ ID NO: 378253 - DNA, 100 bp, Homo sapiens
cgggatcccagcctcaggcctgcacggacggtgttggttgggagctcttcagtatccccatcagccagtttccgaggtgctgagaagcacagaaactccg

SEQ ID NO: 378254 - DNA, 76 bp, Homo sapiens
attgtcgtcatcctagaaggcattgtggaaacaactgccttcacagttgttgatcacatagcatggtcatccactc

SEQ ID NO: 378255 - DNA, 96 bp, Homo sapiens
ggcagtctttgctacgtacagcaaaagggttctccaaaaaatgtggaatcctttgcatctatgctgagacattctcctcttacacagatgggacct

SEQ ID NO: 378256 - DNA, 100 bp, Homo sapiens
ccgtgcttgccctgtcatcccacctgagaaccatgctcaccgacccttctccacaaaccggaggactacccccagactgcagtaagtgttgtcatggaga

SEQ ID NO: 378257 - DNA, 114 bp, Homo sapiens
agtgcccctgtggctggcgattaacctgaaacaaagacagaaatgtcgcctgctccctccagagtggatggatgtagacgcatcttctctccagactgccgatcccagaaagcc

SEQ ID NO: 378258 - DNA, 100 bp, Homo sapiens
tcgccccaacggcatgtgggatggagaaacagctgtgtgtgataatgggggcctagttccccgagagcgttcagacagtgggggctcaagctcagagcca

SEQ ID NO: 378259 - DNA, 82 bp, Homo sapiens
aaacgcacaagccagaccctggcacgccccagcacacgagaattcccatttgcagaaaccctatgagattaacctgatggag

SEQ ID NO: 378260 - DNA, 98 bp, Homo sapiens
cgtcgggaacagccatgcaaaggcaggggaggaagccacctcgaggatcaactcactatcctgaaggtccattctcccaagaagaggggacagaaaga

SEQ ID NO: 378261 - DNA, 75 bp, Homo sapiens
agtgttaagaattgcctttgggactctgaaggctgaagggtgagcagggcagcatttccttctcccactgctgct

SEQ ID NO: 378262 - DNA, 88 bp, Homo sapiens
agaaaaactggatgttggtagaaaaagcaagagtttgttatatagcatatgactatgaatatgatgaaaatggtgacagagtcgtttt

SEQ ID NO: 378263 - DNA, 75 bp, Homo sapiens
cctacataaaggaatggtttgaagagagcttgaatgttggctaccagggtatttagcctagttggcaagcgagca

SEQ ID NO: 378264 - DNA, 100 bp, Homo sapiens
ccctttagccatgtggatacctacggagcacgagaaatacggcgtggctctagaggacaaaatcccagtccttggcacaaactcaggaaatggaagccgg

SEQ ID NO: 378265 - DNA, 74 bp, Homo sapiens
gtcctaggaatggatttctcctctaatgacaggtgttggggatgtcctttgcactgaccctgaactgccagatt

SEQ ID NO: 378266 - DNA, 100 bp, Homo sapiens
cgagctcgcctgcatctactcggccctcattctgcacgacgatgaggtgacagtcacggaggagatggacctgaaggtactacagttcaagaacaagaaa

SEQ ID NO: 378267 - DNA, 76 bp, Homo sapiens
gcaatgtttagccaacccaaattaccttaattgatgaatgctatcaagtaagacaagtgtttgcccagaaacttca

SEQ ID NO: 378268 - DNA, 90 bp, Homo sapiens
tgcactgggtggggatgatcggcgggctaggttgcaaagttgctttaatgtgaagtattttcctggagtcacttcctttgggacgttgcc

SEQ ID NO: 378269 - DNA, 90 bp, Homo sapiens
gcttgaaatgctacatttccaagatgctgctgcagattgctgatgattttatcgagagtgtggtgacagcagcctgtcagcttgcgcggc

SEQ ID NO: 378270 - DNA, 83 bp, Homo sapiens
cgcgcgcagggcctgcagcgggagctggacggcgagcgcgagcggcgcgagaaaagtccgaaattgaagttcagaggaagaat

SEQ ID NO: 378271 - DNA, 101 bp, Homo sapiens
cgaggagaagcgcagcgacggcgtcgggagagcgcgcctagccggctcgcgagtgtcagcttcctctggtgcaaccagcaagtcttccagtatgaatccca

SEQ ID NO: 378272 - DNA, 90 bp, Homo sapiens
tatgtagtattgatgaaaagagggactgccataacattcccaaaggtaatgcgatggagataagggtttccagaaaggaagcaaagccac

SEQ ID NO: 378273 - DNA, 100 bp, Homo sapiens
agaatacaccttgcttctgtagaccagctccaacaggattccatggtagctgggatgttagggctcaggtctgggacctcagtgacattgacaaggatgg

SEQ ID NO: 378274 - DNA, 75 bp, Homo sapiens
aattgtttcgtagcagagaacagctctttgcatccggagagtggacaagaaagcgtgcagtatggtgaatatgtt

SEQ ID NO: 378275 - DNA, 92 bp, Homo sapiens
gctgactgcgccttcctggagggccgtgtcaacgtgtctgaggaccatgaatggcacctacaacacctgtggctccagcgacctcacctggc

SEQ ID NO: 378276 - DNA, 120 bp, Homo sapiens
ggggatgccatttattactgtgccacctgctctgaggaccccggcagcacctatgctgtgaaagttcaatgtatctatgcctgcctacctcaatctgcaagggagtgtcagaaaggcccc

SEQ ID NO: 378277 - DNA, 100 bp, Homo sapiens
ctgagtcctgcccttctgtatcctgtgaaagacctgtcttgagaaaaggccagtgttgtccctactgcatagttgctgatcccacaccctttcatattca

SEQ ID NO: 378278 - DNA, 75 bp, Homo sapiens
aaggggaagataaaatgactaagaggaagaagctgcggacctcaggaacgtcaaggtcgtgggaaataaaaggca

SEQ ID NO: 378279 - DNA, 100 bp, Homo sapiens
gaaagcaattaccaccctttcttctttagaacccgaggagttcatgatcaagtgttgcccacaccaaatgcttcatccagagtcatagtacatgtggatc

SEQ ID NO: 378280 - DNA, 87 bp, Homo sapiens
agaagtttctaggaaaggccggacaccagaaatgcttcggttacccacagtctttcgccagatgagaccggtgtccagggtactggc

SEQ ID NO: 378281 - DNA, 100 bp, Homo sapiens
gccaagtggggtcagaagaagaaccttcctcccagctgacttctgtgtttaggaacattttagtggacaaaccaaatgaccaatcttcaagatggtcttc

SEQ ID NO: 378282 - DNA, 100 bp, Homo sapiens
cggagaagatggggacaaggcgtcgggcgggggagccagcgctcaggtctctgagcggcccctgatgttcctgttggacactcctggcgtgctggctcct

SEQ ID NO: 378283 - DNA, 97 bp, Homo sapiens
gcccagcgtgaccagtggccacctctgcagtgtcttccacaacctggcactggccccctcaccttttcctttccagctgtttggggctcagctaagt

SEQ ID NO: 378284 - DNA, 100 bp, Homo sapiens
gctcacctggagaagggatggaaatacttcaacaagatcgggcccgggacacccagacagatgagattgtcgcactgaagaaggtgcggatggacaagga

SEQ ID NO: 378285 - DNA, 90 bp, Homo sapiens
agtacctgcagaaggtctctggagacatcttcagcaggttgaaatcacaaagattagacacctttttagataggtgttcttcagcaccac

SEQ ID NO: 378286 - DNA, 83 bp, Homo sapiens
gctatgcccccgtggccaccgcctccagcttgccaccaaagacctgcgactttgctcagctgtgagccgtgagctttgaggcg

SEQ ID NO: 378287 - DNA, 125 bp, Homo sapiens
ggatggggaagatgcagaagaaggctgttgccatctccttgcccaagggtgtggtggaggtgacccatgacctgcagacagcacccaagaaaacctcatttggctcgctgaaggatgaagaccgg

SEQ ID NO: 378288 - DNA, 100 bp, Homo sapiens
gctcgctgcccgtgcacacttccccacagaacatgctgatgttccagcagccaggagacgttgacatttagggatgtggccatagaattctctctggagg

SEQ ID NO: 378289 - DNA, 75 bp, Homo sapiens
ctgcaaacctggagccagaaacattaccgtcatattccacccattactaagatgcctgaaatgtgcagatgcccc

SEQ ID NO: 378290 - DNA, 83 bp, Homo sapiens
cttgcgccagagaaacacaaattaagtactgcttacaatatacactctgtgcagttttagagagagacacactcagtattcga

SEQ ID NO: 378291 - DNA, 75 bp, Homo sapiens
ttctgtatcagaagacaatatcatgcaagtgtggcaaatggagcttcagagagacatagagaagcacagtacagg

SEQ ID NO: 378292 - DNA, 50 bp, Homo sapiens
tgtgtcccacttgttcgcggcctatagttcacagccatgaatgaaccaca

SEQ ID NO: 378293 - DNA, 88 bp, Homo sapiens
gcggctctaacggggctttctacaagaccctacagcttggggcctgggctcctctgaccatcctcattgagaaaggaaagtgagtcca

SEQ ID NO: 378294 - DNA, 105 bp, Homo sapiens
agactgcgggggtgctgcggccgtcctgggggccttcagagccgcaatcaagcagggggggccctcagcctcttggccttgaacgggctgttcatcttgattcac

SEQ ID NO: 378295 - DNA, 101 bp, Homo sapiens
aggaagatggcggccggcaagagcggcggtagcgcaggggagattacttttctggaagtggagtacgacaaggagttctcccctcgtcagcgacaccacaa

SEQ ID NO: 378296 - DNA, 97 bp, Homo sapiens
ctgtactcttattcagttccttggtgatgctattgttttgccagcgggagcacttcatcaggttgtgggctgcacactgcagaaagatacagctgaa

SEQ ID NO: 378297 - DNA, 76 bp, Homo sapiens
tgaaagaagctacctgcaagctctatttttaccagatgctcttggctgtgcagatgctcccataatactctcagat

SEQ ID NO: 378298 - DNA, 75 bp, Homo sapiens
cagactgagcgcgtccaggcctgacagctctgcggctcgggccctgaggatgacgtagctttgccaaagacttag

SEQ ID NO: 378299 - DNA, 100 bp, Homo sapiens
gacgccgacggctacgagtcggacgactgcacacagcgactcggactccgaccccgagtactccacgctgccgccatccatccccagtgcggtgcccgtg

SEQ ID NO: 378300 - DNA, 75 bp, Homo sapiens
cgcagctgccgaacgacgtggtcctacagttttagaactccagttgtaaagaatgactttccacctgcttgtcag

SEQ ID NO: 378301 - DNA, 83 bp, Homo sapiens
cctggacgcgtcggcggaggtggcttcgtcccgcggagtccaggcttcagttcaacttcctcaattgctttgcctcactcttc

SEQ ID NO: 378302 - DNA, 75 bp, Homo sapiens
ttgctggatttaagcactgctgcactttatgagttctggtgttgtttgggaggtgaaaccaaagcagaaatggaa

SEQ ID NO: 378303 - DNA, 75 bp, Homo sapiens
gcgtggaccacatagacatttacgcggatgtcggcgaagagttcaaccagggagtacgagagcctgtacacgagc

SEQ ID NO: 378304 - DNA, 50 bp, Homo sapiens
ccgattcaccaacgagccctaccccatctgctttgatatgattgaagaag

SEQ ID NO: 378305 - DNA, 73 bp, Homo sapiens
gccgatattcaccaagcgcttcgctacaagtgattcgcctttgccagtctcatctcgtgtctgctttgttaag

SEQ ID NO: 378306 - DNA, 51 bp, Homo sapiens
aacttcattacttgaacatttaccagtacagcagggaagaactggaaactc

SEQ ID NO: 378307 - DNA, 50 bp, Homo sapiens
gcctcagtcagctgctcaccaagcaacacgaagtagacaagctatacaag

SEQ ID NO: 378308 - DNA, 82 bp, Homo sapiens
gaagagggcggcgacggtggtggtgactgagcggagcccggtgacaggatgggcgtctctggccgagcctctttttgtggaa

SEQ ID NO: 378309 - DNA, 74 bp, Homo sapiens
gcccagaagaatgtggctaccagcgaaggcctgtctacaagtcattttgcttgggcatttcactcagtagcaga

SEQ ID NO: 378310 - DNA, 98 bp, Homo sapiens
gctttagcatttatcacttccttccttactttgtcttggtatactacatggcaaaatgggaaagctgacattatctctacggtagaattcaaccacac

SEQ ID NO: 378311 - DNA, 75 bp, Homo sapiens
cagctcgcagcccgctgctggaggttgacggatatattcagacgttacgacacggatcaggacggctggattcag

SEQ ID NO: 378312 - DNA, 50 bp, Homo sapiens
ccgaagcccacccagggagttgatgatctgactgcagccatgagcagcaa

SEQ ID NO: 378313 - DNA, 99 bp, Homo sapiens
atggaatcttggccaaaatcgtgttggtagctggcagtgttgtgatggcttttgaagaagtatgcccggacagaatagatctgattcataaaaattacc

SEQ ID NO: 378314 - DNA, 82 bp, Homo sapiens
tcgcagtggtcgcttcttctccttgggagtggagcttggtttcgggatctcggtgctgcagacggcgagacctcctgcacag

SEQ ID NO: 378315 - DNA, 100 bp, Homo sapiens
ctcctgaagaaatttctgccatggttctcactaaaatgaaagaaaccgctgaggcttatttgggaaagaagcttccaaactacaaaaactttaaaggcac

SEQ ID NO: 378316 - DNA, 82 bp, Homo sapiens
actgattgtcatgctcagggaccctgtggagaggtgtcaaggagcagaagcttttgaaatccagcattctggattggcaaat

SEQ ID NO: 378317 - DNA, 83 bp, Homo sapiens
agcgtgcgacgacttactggcttcatggctactgcagcactggggtgtcagttgttggtccgacccagaacgcttcagttctg

SEQ ID NO: 378318 - DNA, 100 bp, Homo sapiens
acaccatagccccctggttccatggtgaaatgacaatggatgctctgttggctcgattgaaacttctgaatccagatgaccttagagaagaaatcgtcaa

SEQ ID NO: 378319 - DNA, 83 bp, Homo sapiens
atcttcttcctctcggtcgccatgcatcagatcatgcccaaaggtcagcccaaggccaaccccactgtcactctgttcccgcc

SEQ ID NO: 378320 - DNA, 90 bp, Homo sapiens
aagagaggttttgaattcacgcttatggtagtgggccagtcagttggaggagctttttccagtgcaaagacagctatgtcttcatggctt

SEQ ID NO: 378321 - DNA, 75 bp, Homo sapiens
gcaaagaaagggaagctattgctgggattttgaggaggatttacttaaatccattgtttcaagaatgaaaaaggc

SEQ ID NO: 378322 - DNA, 100 bp, Homo sapiens
ggtgtctagcccagtggaccttctgaagtgccttgctttccatgacatttcccctcaagcaccaacacattttctggtgatacccaagaaacatatatcc

SEQ ID NO: 378323 - DNA, 83 bp, Homo sapiens
tgaagacgtctgcgtgagaatagagaccaccgaggtgaaagaacttgtcctggacaacagtcggtcgaatgaaggcaaactcg

SEQ ID NO: 378324 - DNA, 103 bp, Homo sapiens
gttcagcgtagagtcgctggagcgggcggagctgtgcgagagcctcctcacttgggtgagaagccctaccactgcaactgggacggctgcggctggaagtttg

SEQ ID NO: 378325 - DNA, 96 bp, Homo sapiens
tatatagtatcgtggacagcagagttgctccaacagcaaatattttttcccagacaagttggatggcttgaggactggtactaaaaggaaacgtga

SEQ ID NO: 378326 - DNA, 100 bp, Homo sapiens
tgggacgcgcttatcgtgcggccagtccggcgctggcgccgcgtggcagtggggtttgaattttgggaagattttgaagaagaccatgggaaggggagag

SEQ ID NO: 378327 - DNA, 82 bp, Homo sapiens
gagaattgaagacatgtaggtgactcacaaacttcttggaaagagaccctgtgtgaatacacccatcatactgactccaagc

SEQ ID NO: 378328 - DNA, 102 bp, Homo sapiens
aaagcaggaaaataaaactcttttgaaagttgtgggtcagctgaccaggcgaacagctgcttggagaactacaagtgaagaaaagaaagcattagatcaggc

SEQ ID NO: 378329 - DNA, 75 bp, Homo sapiens
cgacgccgcctggcaggccctgcgcaccagatgtccgtgtcctggaggagcaggcccagaatctgggcctggagg

SEQ ID NO: 378330 - DNA, 93 bp, Homo sapiens
ccgcgcgcagggcctgcagcgggagctggacggcgagcgcgagcggcgcgagaaaaacccttaggagaaatcttgagagtggacagcaattgt

SEQ ID NO: 378331 - DNA, 98 bp, Homo sapiens
ttccaggaggagtaatgcgtggagcagaatggcatagtcacctgggcagcatgaaggattatacacatgaattccataaaaccaaagcaaactttatg

SEQ ID NO: 378332 - DNA, 78 bp, Homo sapiens
ggcggcgccatggcagggcttgcagtaatctatgccagcaattatgacaatgttagcagaccatgcagctcgtcagct

SEQ ID NO: 378333 - DNA, 144 bp, Homo sapiens
cgcgactcgagggtgacgctcgctccgctcgtcccgctcgtcatggcctacccgggatacggaggaggggaaatgaatggggtgctgaaaggaatgctctcagaatggttttcctccgggttcctgaacctagaacgggttacc

SEQ ID NO: 378334 - DNA, 100 bp, Homo sapiens
aacttcagtctataataaagagatgtgataaggaggtagaatttggaggacctgcacccagagttctaagcctggatgattacttcatcactgaagtgga

SEQ ID NO: 378335 - DNA, 100 bp, Homo sapiens
tctgggcttatgggatacagctggacaagaagattatgacagattacgccccctatcctatccgcaaacagtgcacttacagagtgctacgatgaactgg

SEQ ID NO: 378336 - DNA, 75 bp, Homo sapiens
cggagatggccggcagagccgccgagacgccgaagagcccgccgcccgcgcgagcctgccacagtgactcaggtc

SEQ ID NO: 378337 - DNA, 74 bp, Homo sapiens
tgaagacgtctgcgtgagaatagagaccaccgagacggatgtaatgcaccagaacatttatgactacatccacg

SEQ ID NO: 378338 - DNA, 100 bp, Homo sapiens
gcctccgccggctaccatgtccgcccaggcgcagatgcgggccctgctggaccagctcatgggcacggctcgggacgatgatggatgcaataaaaggaac

SEQ ID NO: 378339 - DNA, 100 bp, Homo sapiens
tgggatccggctcctccagctaccggcccaaggccatctacctggacatcgatggacgcattcagaagagcgcatcagcgaggaggtggggctgctgcag

SEQ ID NO: 378340 - DNA, 82 bp, Homo sapiens
tctggctgtgctgcgcgacccccgcgcatggtactggctgtgatcgaacttctcaaccctcagagacttagatcttccacct

SEQ ID NO: 378341 - DNA, 90 bp, Homo sapiens
caaagcagctcattcacatacagccctctgcgagggaaaggccctatagacctcattacagttggttccttaatagaacttcaggattcc

SEQ ID NO: 378342 - DNA, 100 bp, Homo sapiens
agccttctctgtggcacgcgctgggcagaaaggctaccatcaccgcactgagatcaacaagaagatgggaaagggctccttcaagtatgcctgggtcttg

SEQ ID NO: 378343 - DNA, 100 bp, Homo sapiens
gcttgtttgtgtccctgtgggtggacgtggttggtgattggcaggatcctggtatccgctaacaggtcagtttgctgagaacgaaaccaatgaggtcaat

SEQ ID NO: 378344 - DNA, 101 bp, Homo sapiens
cagcgacagatcctttgctgctctgtctgccggttcttgagctgttgacagtgtcttgaagaggatgacaataattggtgtaattttatccttccgatcat

SEQ ID NO: 378345 - DNA, 100 bp, Homo sapiens
tgcggcccacgctgttccggttggcgagtgacaccactgatgacgatgatgcactcggttcctcatgccatgcacctgctgtcacccagcatgcacccta

SEQ ID NO: 378346 - DNA, 83 bp, Homo sapiens
tggaaccaaagcggatcagagagggctaccttgtgaagaagaactcccccactggaaaggattctgaaagaaatgaagtcagc

SEQ ID NO: 378347 - DNA, 90 bp, Homo sapiens
ttagaagacatttgctaagtcaaatcacttcaggttggtcaaagaaaaagtgatgtatgaaaaagaggcaaaacaacaagaagaaaagat

SEQ ID NO: 378348 - DNA, 75 bp, Homo sapiens
tttctccagcttctccaaagatctccctggcccccacagatggaaattcagttcatgaagataagaagtttcttg

SEQ ID NO: 378349 - DNA, 83 bp, Homo sapiens
catctgtacccctggaaacaagacagtgggagtagctcaccgttacccaagtatgcttcatctcccaaaccaaacaacagcta

SEQ ID NO: 378350 - DNA, 100 bp, Homo sapiens
ttctctaaaaaaactggctgtgaataatatagctggtattgaagagaaagacttccgagtgcaggaactcccactggctcgtattaagaagattatgaaa

SEQ ID NO: 378351 - DNA, 100 bp, Homo sapiens
gttcgctgcccagaagaagggaaggcgcgagtgaggaaaggaggtactgtaggctgcgggcctctcgggtgcttcttgtcggcttgaaaggacttggggc

SEQ ID NO: 378352 - DNA, 75 bp, Homo sapiens
gaccacactccaggaatgccagtgcatcttttgcacagctgtgggttggctatgagttccccggctaccgtgggc

SEQ ID NO: 378353 - DNA, 75 bp, Homo sapiens
ctcggacccatcgccgcttctagaccctactgcggtctcggatattgccggattccacctgctcctacgaagccc

SEQ ID NO: 378354 - DNA, 100 bp, Homo sapiens
cgaataattccaggtggaattgctgatagacatgggggcctcaaacgtggagatcaactcctctctgttaatggagtgcaccttctagccaccatggcaa

SEQ ID NO: 378355 - DNA, 90 bp, Homo sapiens
gccgattcctcctccttggtcgccgcgtccttggctggcgtgcagaggtggaggagacactgaagcgactgcagagccagaagggagtgc

SEQ ID NO: 378356 - DNA, 75 bp, Homo sapiens
ccgccgcctccgccgctgcctcaggagcggaacaacgtcggcgagcgggattgaatttagtggaagcttttgtag

SEQ ID NO: 378357 - DNA, 75 bp, Homo sapiens
ctaacttcacacgccgaaacctggctgactgtcttcggagtcggatttggtacacacagaggggcagcttcaaaa

SEQ ID NO: 378358 - DNA, 50 bp, Homo sapiens
cttgactacggaggggttgccaggatcctgatggtgaacatgccaggaga

SEQ ID NO: 378359 - DNA, 100 bp, Homo sapiens
agcggccagcacgcctgcacaccaagccgtcccagtccccatgtgagagcagcagaggcggtcttcaacatcctgccagccccacacagctacagctttc

SEQ ID NO: 378360 - DNA, 100 bp, Homo sapiens
gggaagtctataagctttgcaacagaattacagagtatgatgggagatcttcgagctgaaggcagagctcaacagtgacaagaaggagaagaagaaggag

SEQ ID NO: 378361 - DNA, 75 bp, Homo sapiens
tggaccatcatccttcgctttgctattcaggatatttcggttgaagatcatcgtctggggagattatggccgcat

SEQ ID NO: 378362 - DNA, 110 bp, Homo sapiens
acgagctgctggagcgcgtggaggagccggtgctgcagaaccagatccgggagcacgtcatcgccatcgaaggtgctggagaatctggtaaaagcaccattgtgaagcag

SEQ ID NO: 378363 - DNA, 89 bp, Homo sapiens
cgggggctccgcggcgtcctcggcgctgaaggggttaattcaacagttcaccaccattaccggtactccaaagattcaggtttactcac

SEQ ID NO: 378364 - DNA, 74 bp, Homo sapiens
gattgcgagggtcccacgactcccgcctggtttcttcctgaacgcgcctcagcgattttaaatcgtatgcagaa

SEQ ID NO: 378365 - DNA, 75 bp, Homo sapiens
cagtggccttccaggttgttatctgcaggtgtggcaggttgcagaggacagtggggtggcctggaggccaagcag

SEQ ID NO: 378366 - DNA, 98 bp, Homo sapiens
ccctggagactggatggccatgagcatggttcaaaacaggtaagaaataagacttgcatttgtgatatcaaaaatcacctgagaaatgaaaagcaacc

SEQ ID NO: 378367 - DNA, 96 bp, Homo sapiens
gcaatttccagaagcatgcacccttggaagagttctacagctttggcgagtctatgtacgtaaaattcatcctgatcagaaaaatattaatgccta

SEQ ID NO: 378368 - DNA, 90 bp, Homo sapiens
ggcccagatctttttcaacgggtgatctttagacagtgactgagtatggatcatttgaacgaggcaactcaggggaaagaacattcagaa

SEQ ID NO: 378369 - DNA, 75 bp, Homo sapiens
cgcgctgcaggcgagcgggcgagcgggcgcgccctgcagggaatcatcctgatgttgcaagcaaattggctactt

SEQ ID NO: 378370 - DNA, 100 bp, Homo sapiens
gtgaggaagggaaagcagcaatttcacaactcaggaacatatgctgtcaggaggataagagatgccttcagagaaaataaaaatgtaaaggatcctgtag

SEQ ID NO: 378371 - DNA, 83 bp, Homo sapiens
gggaaatggtcgtgctttcggtccccgccgaagtcaccgtgatcctgttagatatcgaaggctgaccccgcactacatctacc

SEQ ID NO: 378372 - DNA, 88 bp, Homo sapiens
cctggtctacatcctgcgggtgcctttgaaaatcaacgacaacttgagcacaggcaacgcggtaaaaatattgcttcggtgggtgacg

SEQ ID NO: 378373 - DNA, 100 bp, Homo sapiens
aacggaccttttaccatgaatagttctactccttctacaggtgtgtatggtgtgttccagagaacaagccttcagacatttgctatattgacgctgagct

SEQ ID NO: 378374 - DNA, 88 bp, Homo sapiens
cagggcctgcagcgggagctggacggcgagcgcgagcggcgcgagaaaatgcttcaggactgccccaaggcccgcagggaggtggagc

SEQ ID NO: 378375 - DNA, 83 bp, Homo sapiens
cgacaaaacaccagatgatgaccctgagcaaggaaaatctgaggccaatggagatcttcgtggatgatgagacgaagttgacg

SEQ ID NO: 378376 - DNA, 99 bp, Homo sapiens
gtgagaaggagcaaagatggggtgccaagacggtgcagggctccgggcaccaggagcatatcaagtctatgttaacaatgaatgggcaaccagtgttgg

SEQ ID NO: 378377 - DNA, 82 bp, Homo sapiens
agccaagctcgtggcctgcctctgcgtgcgtgaccctggcaaagatgagagtgcacatttcgtcctgcctgaaggtccagga

SEQ ID NO: 378378 - DNA, 82 bp, Homo sapiens
agaagaccgtgtctaccttgcaccacgttctgcagaggaccatccagtgtgcaaaagatgtgaagttcatttccaatccgcc

SEQ ID NO: 378379 - DNA, 100 bp, Homo sapiens
ggactgctaaagatgcagctatttacagtggacagaaactgaaggggtgaaagaaaacccaaggaaattgcaagacctaacatggctgaaagagaaacag

SEQ ID NO: 378380 - DNA, 100 bp, Homo sapiens
gctttgcacagtttgaaaatctactggaatccagccatcatctgaggaagcagttcatgtcgcagcaaaggaagttctgttctcaccacagcccctatct

SEQ ID NO: 378381 - DNA, 50 bp, Homo sapiens
acctgcaagacttaaaagtaggagtggtggtgctagagaatgaattgatg

SEQ ID NO: 378382 - DNA, 75 bp, Homo sapiens
cggggacctttgcggggaggcctcagagttcaccgaacagcagaaagaatttcaagctactgctcgtaaatttgc

SEQ ID NO: 378383 - DNA, 100 bp, Homo sapiens
gccccatcgcctggcattgacccatagcctggtcctgcattacggtctctataagaagatgatcggggggccctcagcctcttggccttgaacgggctgt

SEQ ID NO: 378384 - DNA, 100 bp, Homo sapiens
tcttgtgtctggagattctgaggtggattacaggaggtggcagaacagttagagctggaacggataggaccacaacatcaggcaggatctgattcattgc

SEQ ID NO: 378385 - DNA, 75 bp, Homo sapiens
tcaaacttctccagccaggaagaggatcacgcatgccaaagtccagggtgcagctgttgattttccagagcacta

SEQ ID NO: 378386 - DNA, 88 bp, Homo sapiens
aacaggatattcctcatgacattgctgtctggatctgacggcattagccaaagaactaagagaactccggattgaagaaacaaaccgc

SEQ ID NO: 378387 - DNA, 100 bp, Homo sapiens
ggaaagctttaggagttcacagtaaacaaatcattgtggaccccttgagcttcagcgaggagcgctttaggccttccctggaggagcgtctggaaagcat

SEQ ID NO: 378388 - DNA, 101 bp, Homo sapiens
cgctccagaagcttcactttgcagcagcaggcgctctttagtcatttctcccccagttcgaacagctacagtctccagtcctcttacctcacctactagtc

SEQ ID NO: 378389 - DNA, 75 bp, Homo sapiens
gcctcccgagtggctgggactacagtcctcgcagtccgcctgagagagtagagaagaccccctcccagaaccttc

SEQ ID NO: 378390 - DNA, 100 bp, Homo sapiens
tgagaaccatctgtccttcctatagtagttcttctcagaatgccgactctatgctaatgcttacctgttgattcggtggtaattacagaatctgatgcac

SEQ ID NO: 378391 - DNA, 90 bp, Homo sapiens
agaaccatgctcaccgaccctactgacatcaatttgccctatcttacaatggattcttctggacccaagcatttgaatatgaagttgacc

SEQ ID NO: 378392 - DNA, 90 bp, Homo sapiens
gaactttgggacagactgtatcactcttggtttgtaaaggattatgaagaagctgtgctcttgctgttagaaggagctgcctgggaagaa

SEQ ID NO: 378393 - DNA, 100 bp, Homo sapiens
gcttgacccagcagggactccaaggggtggagctgggaacattcctcataaagcgagtcgtcaaggagttgcagacctgctcccctcaaaagcttcgtgc

SEQ ID NO: 378394 - DNA, 132 bp, Homo sapiens
ggcaggatcttcaaaccctggaaatggaggaaaaagaaaaacgaaaaactgaagcagacaacgtcaggtgctggagaatctggtaaaagcaccattgtgaagcagatgaggatcctgcatgttaatgggttt

SEQ ID NO: 378395 - DNA, 100 bp, Homo sapiens
gggacaaaaccagccgctccgactccagggctcctgtctacgaccaggcggctatgagaggttttcctccgagtacccagaattctgttctaaaaccaag

SEQ ID NO: 378396 - DNA, 56 bp, Homo sapiens
caagcagtgatagtgctaatgtgtcagatcaaatcatgtatgaacgtttgcaggag

SEQ ID NO: 378397 - DNA, 82 bp, Homo sapiens
ggcacccacagctgaagcttccactgagctgacagggttaaaagataaaactttagaaactgttcctttggagaggaaaaag

SEQ ID NO: 378398 - DNA, 98 bp, Homo sapiens
gactggctctccttgatcctcagcttgcagaaagcctattgtggaaccttgtgatcatgctgtatcgcatccattgaatactgtgaccgaggacatgt

SEQ ID NO: 378399 - DNA, 75 bp, Homo sapiens
cagttattgaatatcaagaggaggagttgttggtccaggggcaagttcatcctactctcgagtctaatgatgatg

SEQ ID NO: 378400 - DNA, 115 bp, Homo sapiens
gcaagtggataccctggggctgagaggaatcttctggagtactcttattttgaaaagggtaaaccagacttgaatacaacattgccaattagacaaacagcatcaattttcaaac

SEQ ID NO: 378401 - DNA, 98 bp, Homo sapiens
ttgaatcatgaagctactaaccagagccggctctttctcggtaccgagttttggcaattggggatgaaaaagatcaaaccaggaaagaggatgaactt

SEQ ID NO: 378402 - DNA, 75 bp, Homo sapiens
gttggatcttgctcagtctctgtcagaggaagatcccttgatatgagatcctgactccaaactccattcccaagg

SEQ ID NO: 378403 - DNA, 100 bp, Homo sapiens
aggctaataggacagcacttgaatggcttagggctcaattggatcgactggttgtggatgcagcaaaggagaaaagagaaatggagcaaaaacattccac

SEQ ID NO: 378404 - DNA, 99 bp, Homo sapiens
ggccaataccagccggcgcggcctccctgcccttcgctatcctgacgctggtgaacgccccgtacaagcgaggattttactgcggggatgactccatcc

SEQ ID NO: 378405 - DNA, 73 bp, Homo sapiens
ctgaccccattcttctcaccaatagccatgatggactggatggtgaacgagttgaagcagttaatatggctga

SEQ ID NO: 378406 - DNA, 50 bp, Homo sapiens
ggaaacaacgttctcccgcaaaagacccagatgatgtggtaccagttggc

SEQ ID NO: 378407 - DNA, 96 bp, Homo sapiens
ttcgagcgctgttctcgctccggagccgctgcacatttcggttgaccccctgtttacagtgccagcgccaccaccgccgatttccagcagtctcac

SEQ ID NO: 378408 - DNA, 82 bp, Homo sapiens
cttcaggtgcctcattcacatacgtcaaggaaattgagggcagctggtggaatttttgaagaaaatggaatctcgaggcccc

SEQ ID NO: 378409 - DNA, 101 bp, Homo sapiens
cccagtgacgccgcagccatggagagcggcccgcgtgcggagctgggggcgggcgcacccccagggatcatagacggtatttctatgtaaacgaacagtcg

SEQ ID NO: 378410 - DNA, 82 bp, Homo sapiens
cttgactggtcttacattgctgcatcaagaaacccaagctgctgagatgacttcaaacctgcttctattgacacttcttctg

SEQ ID NO: 378411 - DNA, 50 bp, Homo sapiens
aacagaatggggactatggtaggggcaggccctcgggaccaaggatcacg

SEQ ID NO: 378412 - DNA, 83 bp, Homo sapiens
agccagcacactcctcgcgagcaagcacacttccaccctgggcagcgtgtttggggacgcgtactatgagcagcagatggcgg

SEQ ID NO: 378413 - DNA, 75 bp, Homo sapiens
agacagaacagttaatcctcaatttaagcctgatctaacccctagaaacaggagagcacagacatagatgacgag

SEQ ID NO: 378414 - DNA, 83 bp, Homo sapiens
ctcgtttgttgggaacctactgatgaaccttggttcaaaatcaaaggaagcccagaagggaggtcatttttacagtgcaaagc

SEQ ID NO: 378415 - DNA, 100 bp, Homo sapiens
cggcgggtccgggccccggggggtccagggaaagcgtctctagcagctgatatccccagacttggatatagttcctcatcccatcacaagtacatccccc

SEQ ID NO: 378416 - DNA, 80 bp, Homo sapiens
cccaaatgtctgactctgactctcggactgagaaacgcaagcagcgtccgtctccaagagagtatgaagagagtgcgtct

SEQ ID NO: 378417 - DNA, 101 bp, Homo sapiens
tgtatttgcaactatggatttgtagggaacgggaggactcagtgtgttgcaatggctgccatccggaagaaactggtgattgttggtgatggagcctgtgg

SEQ ID NO: 378418 - DNA, 83 bp, Homo sapiens
ctcgcccgcagccccgagaccgcaggcttgggcactgtttaaaggaaagttccgagaaggcatcgacaagccggaccctccca

SEQ ID NO: 378419 - DNA, 51 bp, Homo sapiens
attcacccagctgatgttggagatacgaccctatattttaaaatgcttaaa

SEQ ID NO: 378420 - DNA, 82 bp, Homo sapiens
gggctgaggcggccgcggggcccgagcgcaggtccgcgggagagctgtggggcttggtgagtgtttcgtggcctctcgggtt

SEQ ID NO: 378421 - DNA, 75 bp, Homo sapiens
tgaagccgcctctgtattacttaccaggtctggccgtgggcctgggcttcggggcactggcagaggtcgccaaga

SEQ ID NO: 378422 - DNA, 98 bp, Homo sapiens
ctgatcctgcaacacgagcatggcatggccccgcaggtcttcacccaggccctggagtgcatgcgcaggaattcatgatttgttcctgtagctgaaac

SEQ ID NO: 378423 - DNA, 100 bp, Homo sapiens
cagaacagcacgtaccagaggtggaagtccaagtcaaacgcagaaggactgcctcactgagcaaccaagaattttggaaccagtactagcagtggaggac

SEQ ID NO: 378424 - DNA, 98 bp, Homo sapiens
gtggatgtgaatattcatccctgtggaggaaaatagtggggtctctgagatttaatattcagaaaaggttctgcttcctaacctgtgatgcagccagt

SEQ ID NO: 378425 - DNA, 86 bp, Homo sapiens
tggcggcgctgctgctcgggctgctcttggagacctgcctagagctggaacgttacctccagagcgagccctgctatgtttcagcc

SEQ ID NO: 378426 - DNA, 75 bp, Homo sapiens
tatgaggtcaaatccgagaacctgggccaaggcgacaagcttccagtggtgtctgtagtgagagaaacagagtcc

SEQ ID NO: 378427 - DNA, 76 bp, Homo sapiens
gtgaagaagaacagctcgagagagcattacaagccagcctctgggaccgagggagaccaaattttgaggaaggtgg

SEQ ID NO: 378428 - DNA, 90 bp, Homo sapiens
tcaaggttgaagcagaagaataaggagaaggataagtcgaaggggaaggcgcctgaagaggacgaagaaaaatggctacaaacttcctag

SEQ ID NO: 378429 - DNA, 109 bp, Homo sapiens
cgggtttcatgggcgtcatgaataacatgcggaaacagaatgtgaaagatgttgcagaagtgttccagaagtggctgaagatagaaggaaaaaagtgccactgcctatc

SEQ ID NO: 378430 - DNA, 100 bp, Homo sapiens
ctcagtatcaacaatgattgctcaagacttctttgtggctttgctaaaggacaggaaaaacacttttttcacaaggtgaatgagcggctttccaagccta

SEQ ID NO: 378431 - DNA, 51 bp, Homo sapiens
ggagccccggctcgcccgtgtgcagagaacctgctaaggctgcctcagacc

SEQ ID NO: 378432 - DNA, 74 bp, Homo sapiens
tggggtagcaggtcaacttacaagcactctgctatttggtcctgaagcagtacacagaagcagtgaaggactgc

SEQ ID NO: 378433 - DNA, 82 bp, Homo sapiens
ttcgccttcgccctttccacctcgcggcagttcggtatcatgatattagctggtttgacatcaagtcatttgtgagtcatca

SEQ ID NO: 378434 - DNA, 99 bp, Homo sapiens
ctcaaatacacacacctgttgccattatagagctggaattaggcaaatatggacagagctccttaataagcatttatagtcagtttttggcagcaatag

SEQ ID NO: 378435 - DNA, 100 bp, Homo sapiens
gtcagaagcgcatcgaggagcagaaagagcagaggcggcggctggaggaggctgaccggttccctgatgtgttacctgcttctgctactgatccaaactg

SEQ ID NO: 378436 - DNA, 80 bp, Homo sapiens
agcgccccgcagggcgatggacggccgaaccccgcgcccgcaggacgccccagccagatcctggtgtatagcctggaagc

SEQ ID NO: 378437 - DNA, 50 bp, Homo sapiens
caagatttggagtccggctctgattaattggaattcttcaaaatgtcagg

SEQ ID NO: 378438 - DNA, 109 bp, Homo sapiens
aggaagtgatgttatcatcatgctagtaggaaataaaacagatcttgctgacaagagagacgttggcaatgtggttgaagccatgtatggggaccttcctcctccaatt

SEQ ID NO: 378439 - DNA, 110 bp, Homo sapiens
aggaagtagccgctccgagtggaggcgactgggggctgaagagcgcgccgccctctcgtcccactttccaggaagaaggtagataatgactataatgcccttcgagaaag

SEQ ID NO: 378440 - DNA, 90 bp, Homo sapiens
aaaacctcgcagcagaaacctgttttttttctggagctgatcttagaaacctctgcacagaagtggtgactctcaaaaggaaataggatc

SEQ ID NO: 378441 - DNA, 136 bp, Homo sapiens
cagtgattcacattgtggaccaacgggtgcgcttctacccagtggccttcttttgctgctggggcccagagattgggtctctccacattgccccggctgctctccaacccctgagttcaagtgattcacctccctt

SEQ ID NO: 378442 - DNA, 101 bp, Homo sapiens
gccatggaggacgagcggaaaaacggagcctacggtactccaaagattcaggtttactcacgtcatccagcagagaatggaaagtcaaatttcctgaattg

SEQ ID NO: 378443 - DNA, 101 bp, Homo sapiens
aagaggaagacggggcggaagaccaagatcatcgagatgtttttacagagtcaagaggatcctatgaatttcccactgggttaaaaatatgacacaatcca

SEQ ID NO: 378444 - DNA, 101 bp, Homo sapiens
tgaacatgagcctcctcctctccttctacctgctggggttgcttgtcagtagcgggcaagattgttttacaaggacatgctacaagagtaactgctaaatc

SEQ ID NO: 378445 - DNA, 50 bp, Homo sapiens
aacccacgagcaaaaagggatttctactacaggggttgatttgactaaag

SEQ ID NO: 378446 - DNA, 50 bp, Homo sapiens
gtctgatccttttgttggcatatccatatattcctgcacatattacaaag

SEQ ID NO: 378447 - DNA, 76 bp, Homo sapiens
ccgagtcactgtcctggtacaaggatgaggaggccctgtctcagcgggaccctcctcacaacaacttcttcttctt

SEQ ID NO: 378448 - DNA, 100 bp, Homo sapiens
aacggggcccaaagaaggtacccctgggagcccatcggagaccccaggccccagcctccaggcccccaactccgcccagcctctccccgctctggatcct

SEQ ID NO: 378449 - DNA, 96 bp, Homo sapiens
aaaaccagctgaggtgtccgtaaagattccagagaagcctgtgaacaaatctcggccacctgtgaccacctccaatgccatccctcctgctgtggt

SEQ ID NO: 378450 - DNA, 100 bp, Homo sapiens
tccgcgcccggccggacccgggcccgagggagtaccctgacttctaccggaagctctacggcctcttggacccctctgtctttcacgtcaagtaccgcgc

SEQ ID NO: 378451 - DNA, 100 bp, Homo sapiens
gaacaccatgtctgcaggaggtggccgggcctttgcttgctggcaggctgggaaccacagcgccttctggggcatgaccctggatgagggcattcgctac

SEQ ID NO: 378452 - DNA, 100 bp, Homo sapiens
atagatgacatcaataccagtgataagtcataccctaatgatcccagcaagataatgtcctgtcttctaagatgtgcatcaagcctggtacatactgaaa

SEQ ID NO: 378453 - DNA, 83 bp, Homo sapiens
agacctgaagacaaaaatccagaagtacaagcagtctgatgtatcctccactcctcgctggccaccatcctgctgcccaacag

SEQ ID NO: 378454 - DNA, 100 bp, Homo sapiens
tttctattcatgattggacatgtcctagacatcacttagagacaggccgacggtcgcaaggtcctacggtcaagcatccgggagtttctatgcagcgaag

SEQ ID NO: 378455 - DNA, 100 bp, Homo sapiens
gaggaacgagatcttgagcgccctctactcagcatggatatccaggtgctgagccaggagcagcagcctttctgcgctgagcaacagtgtgtacaagggc

SEQ ID NO: 378456 - DNA, 83 bp, Homo sapiens
cggacagcgggctggagcctgacgagctggcggacctcctgccccccgaggtctgcagtctcctgaacccagcagccatctac

SEQ ID NO: 378457 - DNA, 100 bp, Homo sapiens
ggaacatggacatgaagaggaggatccacctggagctgaggaaccggaccccggcagctaaggaagaggcccagcagaagggactcgctgagccaccccc

SEQ ID NO: 378458 - DNA, 101 bp, Homo sapiens
tccaggcttgcaagcgattaccagaccatcattgaatgtctaaaatatatttgtactggagatttccctcctggaaccaaaggaaatacatttgtacacga

SEQ ID NO: 378459 - DNA, 75 bp, Homo sapiens
tgttgagtgagcaagtgaagaccaatattcaacaggcagatcaagtcttccataccagggaccaggccaaaacca

SEQ ID NO: 378460 - DNA, 51 bp, Homo sapiens
ctgctggcaacagggctcaaatacaggtggctaaagcagtgacccaggctc

SEQ ID NO: 378461 - DNA, 123 bp, Homo sapiens
ctggaaccctggggactacgacgtccctcaaaccttgcttctaggagataaaaagaataccctctaccatctgctttggtcagggtgccgctcgaggatttaaaagcaacaagaagaaaacca

SEQ ID NO: 378462 - DNA, 100 bp, Homo sapiens
tcggcggtgagatcgtcagcgctgactccatgcagagtcccctttacttggtaaatcacggcgagagtggaccagtcagatgcaacaggtgcaaggccta

SEQ ID NO: 378463 - DNA, 75 bp, Homo sapiens
ttaaatcagctggagaaggagaagtggagaagaaatcagtcagccgcagtactaaggctcgtacgtctgcatcga

SEQ ID NO: 378464 - DNA, 60 bp, Homo sapiens
agcgctgacagccatcatcacctaccatgacaggtaccgagcccctgaactgctgttggg

SEQ ID NO: 378465 - DNA, 82 bp, Homo sapiens
gcccgacaagaacttcacgcgggagcagggcgtgatggtgggcatgggtcagaaggattcctatgtgggcgacgaggcccag

SEQ ID NO: 378466 - DNA, 100 bp, Homo sapiens
attgtctaagaggcagcctcctgacaccacaccattgcgaacatcggaggatctggaaagtgactattttaccccacagggagaattccgtgtagacaaa

SEQ ID NO: 378467 - DNA, 97 bp, Homo sapiens
gctgaccagctactgagtactcgcacagaagcattagaagccttacagagtgaaaaatcacgcaagaaggctcactttgtgctcaacattgcctgaa

SEQ ID NO: 378468 - DNA, 75 bp, Homo sapiens
ctcgagtgcctgcaggatgtgagggaggatgccttccgtgccttccatcaagatctcaattttgtgcgcaagttc

SEQ ID NO: 378469 - DNA, 100 bp, Homo sapiens
tccatatgggcgacctccaccatatgataggggtgactatggcccccctggaagggttatgtggtccgaatcagtggtgggaacgacaaacaaggtttcc

SEQ ID NO: 378470 - DNA, 100 bp, Homo sapiens
gaccgagcgggactatgtgggcacgctggagttcctggtgtcggttcagggagcaagtttccgaggttggaaagaagtgacttcactgtttaacaaagat

SEQ ID NO: 378471 - DNA, 90 bp, Homo sapiens
gccatgaaggccttgtgctgaccaagctgctcacctcgatcactgagacccagaggctgggcctggctatggccctagaacctaacacca

SEQ ID NO: 378472 - DNA, 88 bp, Homo sapiens
atactcgaagggctctcctgatactaacagttttacgatttaaaacttcgccagaatttgacttgatagacgacctgaagtcagaact

SEQ ID NO: 378473 - DNA, 74 bp, Homo sapiens
aacaacaaggtgttgatgccgccggacgtgttggaaaaccttggacagacaattgtccccgatttgggatcact

SEQ ID NO: 378474 - DNA, 50 bp, Homo sapiens
cttttagtgttcatcctaaaacagatcctgtgttgccataagcccttggc

SEQ ID NO: 378475 - DNA, 75 bp, Homo sapiens
aagcagcagagttactgatgagctgtttccgggtctgtgccagcgacacgggcctttatcatctgctggactcct

SEQ ID NO: 378476 - DNA, 100 bp, Homo sapiens
tttattgcaaaacaaaagatttaaagaagaaatggctagaacagtttgaaatggctttgataaacgtcttgtacccggaggtggagcaacagaaattgaa

SEQ ID NO: 378477 - DNA, 82 bp, Homo sapiens
cgaaggaaaaggaggaattcgccgtgcccgagaatagctccgtccagcagtttggtgccctggttgtcagatgttggaaagc

SEQ ID NO: 378478 - DNA, 83 bp, Homo sapiens
gccagcggccgagcgggcggcttcctggcctgggcgctccggtggcggcggagcattttgaaagcgaagcagaagccgtagaa

SEQ ID NO: 378479 - DNA, 88 bp, Homo sapiens
atgtgtgtgatcttgaagggaacagatacagtttatgtaacttgatggaagaaaatggaattactccaaaaagacaagtgctcaagca

SEQ ID NO: 378480 - DNA, 96 bp, Homo sapiens
ccacgaccattatatgctggaatggttccttccggagcggttgcagggcacacattactcggtgcagtcggacatctggagcatgggcctgtccct

SEQ ID NO: 378481 - DNA, 100 bp, Homo sapiens
gaaacaaaatgtcaacaaattgatgggcatccgtgtcattctggaccttactcccaactaccggggtgagaactcgtggttctccactcaggttgacact

SEQ ID NO: 378482 - DNA, 83 bp, Homo sapiens
tcggcaacccgaagccacaggatggaggagggggatcccagcaaagggtgagaactctgtctcagtcgacgggaagtgcagtg

SEQ ID NO: 378483 - DNA, 75 bp, Homo sapiens
cccgatagtttgagagtaaatgggttaccagaggaagagctaaggtcagcccaaggccaaccccactgtcactct

SEQ ID NO: 378484 - DNA, 74 bp, Homo sapiens
ttggtcacggccgcaggtgaccccttagcccagctccagtgggcgggtggcagattagcctgaggcctgctcag

SEQ ID NO: 378485 - DNA, 100 bp, Homo sapiens
tttactgtgcagctcctgaaaggagagacacttgtgaacattcaagtgaagcaaaagcctttcatgattatgctacgcagatataaagtcctagggagta

SEQ ID NO: 378486 - DNA, 75 bp, Homo sapiens
cggatgagtacgataccgaagcgggctgtgtgccccttctccacccagagggtgctgaaaagtcacccaccactt

SEQ ID NO: 378487 - DNA, 98 bp, Homo sapiens
ctcagatgagggcgagctctgcgccatgcagtttggtcagctcctgacacacttggataccacccagcagatgattgctaattccttgaaggacaata

SEQ ID NO: 378488 - DNA, 80 bp, Homo sapiens
ggaccatggagacacccagagtatccagatgatcacggaagccttggcccaaggtgggatgcacataagagcccggttcc

SEQ ID NO: 378489 - DNA, 90 bp, Homo sapiens
gacaaacacctatgacgcccagtatgagaggtatcgaaggatgatcgcagtgatgtggagagcagctcagaggaagaagatgtgaccacc

SEQ ID NO: 378490 - DNA, 90 bp, Homo sapiens
ttcaagaaacctagcgacctggtgaggttacaagtgaacctgaaatgattggagctgaagttatttcagagttcttaattaatggcgaag

SEQ ID NO: 378491 - DNA, 100 bp, Homo sapiens
gagtttggctggccaggaacttgagtgacattgacctcatggcacctcagccaggggtgtagccaagtagggaaaagagcatgacatttggcatcagaag

SEQ ID NO: 378492 - DNA, 80 bp, Homo sapiens
cttcagaattagaaaggagctgcttcccaataaggaaacagatccaaactactggatacaggtgcatcgcttggaacatg

SEQ ID NO: 378493 - DNA, 96 bp, Homo sapiens
ctgagtcaaataaacatttgtgctatgtatttgacagcgaaaagtgtggtgtcaaattgagaaccaggtagatccccaccacctacagtaaaaagg

SEQ ID NO: 378494 - DNA, 100 bp, Homo sapiens
gcaaagcagctaccaaatgcttattttctgcttccaaaggtccagagcattcagctgtctcaaatgcaggttgctgctggagccaaggaagtagtcatct

SEQ ID NO: 378495 - DNA, 74 bp, Homo sapiens
caagggagttttccggggccctctcagcaagaacgggaacaaaactctgaccatatactccttgacgacaggga

SEQ ID NO: 378496 - DNA, 75 bp, Homo sapiens
tcccgggtcatctccagatgctagggttatggaaagaaatgaccgcccggatgtgccactgagagccccgcgggt

SEQ ID NO: 378497 - DNA, 100 bp, Homo sapiens
ctgtgcagccgcgaggaggcgcgggaggtgttcgagaacgaccccgagacgatctggtggctggacccagagctgacctatggctgcgccaagcccttcg

SEQ ID NO: 378498 - DNA, 73 bp, Homo sapiens
ggccttgtggaccagttatgacataaggtaccgcttgttcagacttcttgagctatgctaagaaggaatctga

SEQ ID NO: 378499 - DNA, 90 bp, Homo sapiens
cctctcggtgttcccgctggcggcgggcatcttcttcgtgaggctgctcttcgagcggccaagtcctgtatctgccatgtctgtggcgtc

SEQ ID NO: 378500 - DNA, 75 bp, Homo sapiens
ggaggcagaggtggaggcgctttgaaaggctctcggctcctggagtcctcactgtccagctcagagggagaggag

SEQ ID NO: 378501 - DNA, 83 bp, Homo sapiens
tagaactcgcgtttccacttcagagatctgcattgcagtgtcgagatggctatgaaccctgtgtaaatgaaggaatgtgtgtt

SEQ ID NO: 378502 - DNA, 75 bp, Homo sapiens
cgaaaggattggattggcatctttagacctcctagcccagaagacctgagcgtcatctgcttcaccagtgggacc

SEQ ID NO: 378503 - DNA, 82 bp, Homo sapiens
ctgagatctgatgatatttacaaccaggtgtttcccattaaacactaccaggacaaaatcaggccttacatccagctgccat

SEQ ID NO: 378504 - DNA, 100 bp, Homo sapiens
cagctggaaccatgacaggcatgttgtataaatgtacaggacaagtgttggacagccggagtcagtctccatggagattatctttgataacagatttctt

SEQ ID NO: 378505 - DNA, 82 bp, Homo sapiens
cggagggtatggttggcatggaattgaatttcatctgtctgtgggaattgtaagcaagcaacaacctttaaggcccaatcta

SEQ ID NO: 378506 - DNA, 96 bp, Homo sapiens
caagtctgccctgcaagcgataggagtggaagcccaccagacatgttttgagcgcctgctgtgtctcaagccctgtcctaggcactggagatgaga

SEQ ID NO: 378507 - DNA, 98 bp, Homo sapiens
tcccgggcgggccgtcgcgggagaggactcgggacctggttcgggccggggtgctgaaggagaagcccctgtggtttgacgtatatgacgcctttccc

SEQ ID NO: 378508 - DNA, 100 bp, Homo sapiens
cgggcggcagcatgtcggtggcggggctgaagaagcagttctacaaggcgagccaggtagtaagcattaataatgtctttcatctttgagtggatctaca

SEQ ID NO: 378509 - DNA, 73 bp, Homo sapiens
aaggcctcccaccccattccggaggacaaaggaaagtgtgctaataagatgttgatgcctaagaagaaccgga

SEQ ID NO: 378510 - DNA, 75 bp, Homo sapiens
ttggagcccagaatgaagagatgttacccagtatcttggtgttgctgaagagtagactctttgtgaagaaacgag

SEQ ID NO: 378511 - DNA, 73 bp, Homo sapiens
tttggacgatgtgcggcggatgaacaagcggcaggagcaccttctgctccatcattgctcagctcacagagga

SEQ ID NO: 378512 - DNA, 101 bp, Homo sapiens
actgcaataagccgccttccaagatctcacgccacctgggcaagatgtatagtgagatgatcttcgtcaatggcttcgtgcactgcgatccccaccccggc

SEQ ID NO: 378513 - DNA, 82 bp, Homo sapiens
tggtcccctgctttaaccatcgaaaatgaggttgaaggggcccggccaggactcggggaagggtggcctgagagcagcgatg

SEQ ID NO: 378514 - DNA, 100 bp, Homo sapiens
gccatcaccactcaaaactgtaatactaaatgtgttaccataccaaggtgtgggccatgtttgaggattgccccagcattcagttctatgagtaataaat

SEQ ID NO: 378515 - DNA, 75 bp, Homo sapiens
cgacatcaggaagaacagggtcgaggatcgagctgttaggcaattttcttcagtggtatggcattttctcaaata

SEQ ID NO: 378516 - DNA, 75 bp, Homo sapiens
ggatcccccagttccaaagtgtcttaaagggcaagaggattatgacagattacgaccgctgagttatccacaaac

SEQ ID NO: 378517 - DNA, 82 bp, Homo sapiens
cctcctgctcctgcaggccctgcagaccctgtggtccacgcgggagcggaagcagtgcctccggagccagcgtggtggccat

SEQ ID NO: 378518 - DNA, 100 bp, Homo sapiens
gctgcctataatcaagtaaaaacaatagctcaaggaaacctttccaacacagatgtccaagctgccaagaaattgctttggagatgaggaaacaaactct

SEQ ID NO: 378519 - DNA, 100 bp, Homo sapiens
ctgggaagtcagatgggattgaaaggtgcctggtggtgctagctcctcccacctcagcacctgctgcatctggagcagcccaagcctcaggatggacaag

SEQ ID NO: 378520 - DNA, 83 bp, Homo sapiens
taactgaagatagtgcctttcagccctaccagacagagtttcactcctgttacccaggctggaggacaatgatgtgatctcgg

SEQ ID NO: 378521 - DNA, 90 bp, Homo sapiens
aagcagccaacactgtggacatcacccaggttggctcaaaaacagaagttgctgagtgcaaggagaaattcgccgcctccaaggacccca

SEQ ID NO: 378522 - DNA, 95 bp, Homo sapiens
agctgttcagaagttcttccttgaagaaatacagcttggtgaagagttactagctcaaggaacttgtaatagctggcatcgttgagaatgaatgg

SEQ ID NO: 378523 - DNA, 100 bp, Homo sapiens
tgcagcagatcatgagtgacccagccatgcgccttatcctggaacagatgcagaaggacccccaggcactcagcgaaccggcccccctctgggaaaaccc

SEQ ID NO: 378524 - DNA, 98 bp, Homo sapiens
agcttcaaatccagaagatgaaacacagcatctgcttttccacaaccagtttataagtgctgttaaatatgtgtggacaagatatggtgagcatcctc

SEQ ID NO: 378525 - DNA, 82 bp, Homo sapiens
ccgctttgacgtgatggtgaacggcaagcgtccgtctccaagagagtatgaagagagtgcgtctgtagggcagggaagatgg

SEQ ID NO: 378526 - DNA, 100 bp, Homo sapiens
caggaagcgagggatggaggttgtgcagcttctcacctggggcgggtgggttctgcaccaccctcccaccctccttcctccgtgtggacgatagagccac

SEQ ID NO: 378527 - DNA, 82 bp, Homo sapiens
ctgcccgcgtgaaccacatgcccagcacggagaggaggttcagatgagcccctgctgacttgagagagacagagagaccacg

SEQ ID NO: 378528 - DNA, 100 bp, Homo sapiens
ctgccagatgactttaaggccagctccaagatcaaggtcaacaatcaccttttccacagaaatggaggcaaacgaccattttaactttactggccttccc

SEQ ID NO: 378529 - DNA, 75 bp, Homo sapiens
gcagaaaccccgttgacaaggcactgctttttcatgacgcagcagcaacaacagcagcagcagcagcagcagcag

SEQ ID NO: 378530 - DNA, 85 bp, Homo sapiens
tcgcccgccgtgagcgcccggagcggtccgcgagccaccgaggcccagggatgatcatggtgattttactgctgcttgtggctat

SEQ ID NO: 378531 - DNA, 76 bp, Homo sapiens
agcggccgtctcccctcgcacaccaggccggaccagaatatggccaagggatgaaccctattagccgcctggcgca

SEQ ID NO: 378532 - DNA, 100 bp, Homo sapiens
ctcctttcctggcagcaggggtttcaatgggaggacgaaatctcacaaaactgtcccttatcttcagtcacatgctggcagaaatcaaagcaatctttcc

SEQ ID NO: 378533 - DNA, 100 bp, Homo sapiens
actcaggttgacactgtggccaccaaggtgaaggatggagttctggtggatgaatttggattgccacagatccctgcttcatagatttgcatcattcaag

SEQ ID NO: 378534 - DNA, 100 bp, Homo sapiens
attcttatcatttctaagcaggttcatgccagcccagaacagagaatcagattttcagctgaactctcatctctcaacactggcaaatattcataagatc

SEQ ID NO: 378535 - DNA, 75 bp, Homo sapiens
aagagcagtaagggactgagctgctgatgcttgtttgctactgatgggtgtgagcaagttagatattctataccg

SEQ ID NO: 378536 - DNA, 90 bp, Homo sapiens
ccgcccacggcacggcagccaccatggcgctcctgctgtgcttcgtgctcctgtgcggagtagtggattttccgcagatttccagtggcc

SEQ ID NO: 378537 - DNA, 100 bp, Homo sapiens
tggtgtatctcaggagctcttctctgctggcttggtggatggtcacgatgtagttataggatatactgcggggacaccatacaaggtcccaccgacccag

SEQ ID NO: 378538 - DNA, 100 bp, Homo sapiens
tgtgacgcgcatgggcatttatgtgggtgccaaagtcttcctcatctacgaggccagcaggaagaccaagaagaaggaagggggtgccctccgggcccag

SEQ ID NO: 378539 - DNA, 100 bp, Homo sapiens
tggggttctgagactccctgtcccggaccgcagctggtggagctgtctaaggctcaagatatagaagcaggagatggcaccacatcagtagtcatcattg

SEQ ID NO: 378540 - DNA, 96 bp, Homo sapiens
gatttaagcactgctgcactttatgagttctaatacccgatttacaattacattgaactacaaggatcccctcactggagatgaagagaccttggc

SEQ ID NO: 378541 - DNA, 100 bp, Homo sapiens
cgcttcttgaatttctctctgtaaaggagctctattatcaagtcctaaattttggaatgattgtctcatcggcactaatgatctggaaggggttaatggt

SEQ ID NO: 378542 - DNA, 100 bp, Homo sapiens
ttgccttcctgggctgcatgggctctatcaaggaaaacaagtgtctgcttatgtcggattctagtataattgacttctatcctgaagattttgctattga

SEQ ID NO: 378543 - DNA, 100 bp, Homo sapiens
gattgacgtggatgagctcctggacatggagagtgacgatgcccgggctgccagggtcaaggagaaagccatgttcagttcgagcgccaagatcgtgaag

SEQ ID NO: 378544 - DNA, 100 bp, Homo sapiens
tccctgtgggtggacgtggttggtgattggcaggatcctggtatccgctaacagttgccaccttccagagaagaggtacgagatgacaagacaaccataa

SEQ ID NO: 378545 - DNA, 100 bp, Homo sapiens
gctgaagagagagacaaaagactggcggccaaacagagcagtgtcattccacacatccacaaatctctgattgggaagaaaggacaacagaagactgtct

SEQ ID NO: 378546 - DNA, 74 bp, Homo sapiens
caggacatcttgaccatcttcaagcgcctccgctcggtgcccactaacaagataaaccgagaaaactggtgtac

SEQ ID NO: 378547 - DNA, 80 bp, Homo sapiens
ggatttgagccgccgcattttttaaccctagatctcgattgaaaatggaagccctgactgacagggaacatggaatgata

SEQ ID NO: 378548 - DNA, 75 bp, Homo sapiens
agagacaggagccagatgctgaatgacgaacctgctgacatggccaagcatggagccgacgagccatcctccagg

SEQ ID NO: 378549 - DNA, 74 bp, Homo sapiens
acgatgtgattggctgctttgcggtgatggaggcctttgagcaggccgagcggaagcccaaacccaaccccaac

SEQ ID NO: 378550 - DNA, 100 bp, Homo sapiens
ccgagagcgcgaatatcgtcatcgttagaaggtggagtggctgaaacttctcagcaggcgcatctacactagtgacctgaggagagaaaccctaacccca

SEQ ID NO: 378551 - DNA, 100 bp, Homo sapiens
aagcagatcctgcacagtttgagttgctcaaggttcttggtcaggggtcatttggaaagacttggattgggaatcgaagaaggaaatatcgtttaatggg

SEQ ID NO: 378552 - DNA, 100 bp, Homo sapiens
caattttgtcagtcctgttcgaaaccaaggcctgagacctgggaggaagctggagaaaagatgccctctgaatctttgtgtttggctgcccaggctcgcc

SEQ ID NO: 378553 - DNA, 97 bp, Homo sapiens
agtcctaccatgtcagccttcccagtagctgggaccacagtggtgtttccccaggatctgctggagaaaggcctcgaagcaaacaactttgccatgc

SEQ ID NO: 378554 - DNA, 117 bp, Homo sapiens
gctggagctgggtcagtccgccgctcaccccgcggccgcaccttcccgccttctcagatgaaggatttgggggcagagcacttggcaggtcatgaaggggtccaacttctcgggttg

SEQ ID NO: 378555 - DNA, 100 bp, Homo sapiens
ggagcagtttcctcatggatgtgctttcccctctgagcttcatcaagtgagaaagatcagtctaaagaaaaggagaagaaagtgaaaaaaacaattcctt

SEQ ID NO: 378556 - DNA, 73 bp, Homo sapiens
cctacggaggtggcagccatctccttctcgatgaggacggggacttggttgccttttccagtgacgaggaatt

SEQ ID NO: 378557 - DNA, 100 bp, Homo sapiens
gaaatgccgaccaattgcgctgcggcgggctgtgccactacctacaacaagcacattaacatcagcttccacaggacaaggagcatccaagatacctgat

SEQ ID NO: 378558 - DNA, 97 bp, Homo sapiens
caagatagcggcgcgggagcgtaccgtgtcatggagaaactccagctgggcccagagattctgcagcgggaaaatccaaggcttatttatgccaggc

SEQ ID NO: 378559 - DNA, 83 bp, Homo sapiens
accgagaagttattcagagtgatagtttgtggcttgtagaattctatgctccatgatatttagcttcctgtggtatactgatg

SEQ ID NO: 378560 - DNA, 100 bp, Homo sapiens
ctcaattacacttcgactctcaaagcaataccaggatagctgttgtttcagagaaagctgtgagtacccaggaagctgcaccgtgtggcctggagctgtc

SEQ ID NO: 378561 - DNA, 49 bp, Homo sapiens
gaaagttctgagacatcttgtagaggagatgcagaaactaccagaggcc

SEQ ID NO: 378562 - DNA, 75 bp, Homo sapiens
cccggctgcagcgagcgctggacggagaggaaagcggctgaccggttccctgatgtgttacctgcttctgctact

SEQ ID NO: 378563 - DNA, 75 bp, Homo sapiens
aatcccagactagctgctaccccaagcccgggagcttctcagggagaagtagaagccaaggttgaagaattaaaa

SEQ ID NO: 378564 - DNA, 83 bp, Homo sapiens
cgatggcgcagaaaccccgttgacaaggcactgctttttcatgacgggagatgtcctttgcttctcagatgtaaatgcacttt

SEQ ID NO: 378565 - DNA, 75 bp, Homo sapiens
tcaccatcatcaagacggaaaaagtcgatctggagcttttcccctccccgggcatgttatttgaaagcaattgag

SEQ ID NO: 378566 - DNA, 75 bp, Homo sapiens
ccaagtgccaatggatggcaggaatggctgaacttcctgtactgatgctgggaagatcatctgaccttcgggctg

SEQ ID NO: 378567 - DNA, 101 bp, Homo sapiens
cttgatctatatccatagattggaatattggtgggccagcaatcctcagacgcctcacttaggacaaatttgagttctgtgaacctgcatttgttgttggt

SEQ ID NO: 378568 - DNA, 83 bp, Homo sapiens
agggacccatttctcctcctttgacagggacatcagtggagccttctcagacccacagattggagctggagtgagccttccag

SEQ ID NO: 378569 - DNA, 100 bp, Homo sapiens
gcagctgcgagacagtggcgagaaggtgctaagtgtggtggctcacacctgtaatctcagctacttgggaggctgaggcagaagaatcacttgaggatag

SEQ ID NO: 378570 - DNA, 50 bp, Homo sapiens
gcctcgcctcctcgcagcagcgccatgggcttgtcaatgaggcagatcag

SEQ ID NO: 378571 - DNA, 75 bp, Homo sapiens
ccctacagatctgtgggactggtttgaatccttccttgatgatgaagaggttataagcaatgccttgaaagtttg

SEQ ID NO: 378572 - DNA, 98 bp, Homo sapiens
ccggagactgtgcctttgtccactgtcaatagacagtgttcgtcggggctacaggcagtggccagcatagcaggtgaaaggtgtagcagtcactcggc

SEQ ID NO: 378573 - DNA, 83 bp, Homo sapiens
gtcgtgatccagaagtccagagctgaggactgcctgtttgcagggggacagccgcgccgctgctgcttttccgaagaggtgac

SEQ ID NO: 378574 - DNA, 75 bp, Homo sapiens
gagaacacgggctacacgtatgcgctcagggctcaagggttcttgttgatgcacgagataagcttggcattcctt

SEQ ID NO: 378575 - DNA, 83 bp, Homo sapiens
gcgggcgccgcgggacctctccgggccatggccaggcccagacatgtccgtccttgtaagttaaaagcttccatgggagcctt

SEQ ID NO: 378576 - DNA, 75 bp, Homo sapiens
agatcatcagtgcagaactccaaaaagcagctgccaatccagacttacagaatttcctgttgagatataaaggcc

SEQ ID NO: 378577 - DNA, 100 bp, Homo sapiens
cagagccttggtacttggacctgaaccttgctccgagagggagtcctcgcggacgtcagccaaggaaaatatatgcagatgatgaacattcttaagccaa

SEQ ID NO: 378578 - DNA, 100 bp, Homo sapiens
ggacatagaggccaaccaacctttggagcctttctgagaaaagtctacagcattctttctctgcaggttctcttaactacagtgacttcaacagtttttt

SEQ ID NO: 378579 - DNA, 100 bp, Homo sapiens
cgcgaccgagtcatggctgagacctacgcgagacggtcatctgttccagccgggccactgtgatgctttatgatgatggcaacaagcgatggctccctgc

SEQ ID NO: 378580 - DNA, 51 bp, Homo sapiens
aaggcttggaaacatacttacagacagtggtgcactccatagagctccaag

SEQ ID NO: 378581 - DNA, 75 bp, Homo sapiens
ggcaaagtgcaagaaggagagaccatcgaggatggggctaggagaagtgtcccatttgaagagaggatttctaca

SEQ ID NO: 378582 - DNA, 98 bp, Homo sapiens
ggggcgcgcgcctgcccagctttgcagcccccgaacgcggcctcgcacaggtgattgcccacagtgagtatcaaaagtccaaaagaatttccatcttt

SEQ ID NO: 378583 - DNA, 100 bp, Homo sapiens
ccgaggccagagagaaaagactgcgaggtggccgcagctgtggccggagaggtatctgaaaactgaagagtggagaatatgttcagcagggaacaagagg

SEQ ID NO: 378584 - DNA, 75 bp, Homo sapiens
ttagactcaaaaattggagtccttataggaaaaggcttatgcaagcaaagatctggaggagcagttacggtctgt

SEQ ID NO: 378585 - DNA, 118 bp, Homo sapiens
caggcgtggaggaagaggcattgaggactttccttacctgtttttccagctcacccactgccagcagaggggcaagattcttgccaagagaattaatgtgcgtattgagcacattaag

SEQ ID NO: 378586 - DNA, 74 bp, Homo sapiens
ccgcctccgcccagcacgccgcggtcaacttcggccaggcgacgttccgctgtcccctggagctcccttggagc

SEQ ID NO: 378587 - DNA, 89 bp, Homo sapiens
agaagaataaagacattgttgaacttagactttgacaagttgacgaaggatcagagattggtgtattcgggcagactgcttcccgatca

SEQ ID NO: 378588 - DNA, 51 bp, Homo sapiens
tccagttccaaggactccacgggacgagcgctgacctgcacaatgactgca

SEQ ID NO: 378589 - DNA, 100 bp, Homo sapiens
ctgcgtggagaagagtgacttggagacagagctgagggagatgatgacaaacagatgaccttgatgttgctggtcagcacattacaagcatttattgaag

SEQ ID NO: 378590 - DNA, 100 bp, Homo sapiens
cacagtctgaccgacttgcgaatcaccagggaggaagatgaaggctcgtgctcccccacctcctggaaaggctgccactctgcatgtgcacagtgaccag

SEQ ID NO: 378591 - DNA, 51 bp, Homo sapiens
gaggcagggccagcagcaggcgggaggtctctcaggcagctgcagagcttc

SEQ ID NO: 378592 - DNA, 100 bp, Homo sapiens
tgccaaggagatcatccagcactttaagggctgccctgcggacctagtggtgtgtgacggggctcctgatgccctggcctcccacgactacatcctgaag

SEQ ID NO: 378593 - DNA, 50 bp, Homo sapiens
tcctgcaccgccaccggcccgacctcataattcggttccctcaaaattat

SEQ ID NO: 378594 - DNA, 82 bp, Homo sapiens
cgtcggcagcaagaacagagagagaggtggacagatctgagagatactgaggccactcttcacctccaccatgagcctggac

SEQ ID NO: 378595 - DNA, 74 bp, Homo sapiens
cagattcgcagtggtcgcttcttctccttgatggccgccctgctcccccaatgaaaggccagcttcgaagaaaa

SEQ ID NO: 378596 - DNA, 100 bp, Homo sapiens
atgataggggggttccatctcccaacttgtccatgctcgcgggattgatgtgcaacaagtgtctttggttataaattatgatctacctaccaatcgtgaa

SEQ ID NO: 378597 - DNA, 98 bp, Homo sapiens
gacactccaggaagagcggccccgcggggggcgatgaccgtgcgctgaccctgactcactccagttttcaccatggagcagctgagctcagcaaacac

SEQ ID NO: 378598 - DNA, 75 bp, Homo sapiens
gtccggagccagccaacgagcggtgccgacttcctggtgacggaggtggaaaatggtggctccttgggcagcaag

SEQ ID NO: 378599 - DNA, 90 bp, Homo sapiens
tatgaatctctgttccaaatgctttgctgcaactctgctgatgaaacaggcctggccacagaactcgtcttcctgtggcactgaaggcac

SEQ ID NO: 378600 - DNA, 75 bp, Homo sapiens
gcgtcgccggcccagctctgtcgctgacgggaggatctgaagccggccgcagacaatgcagatcttcgtgaagac

SEQ ID NO: 378601 - DNA, 100 bp, Homo sapiens
tcttcagacgtccttctatggccgcttcaggcacttcttggatatcatcgaccctcgcacactctttgtcactgaggtgcagttacctttagcagccaag

SEQ ID NO: 378602 - DNA, 80 bp, Homo sapiens
aaagatgccaggcaatggtttgctgagctttctgtggatatggaaaagggcatacataatcttgctgctatgcttcgaag

SEQ ID NO: 378603 - DNA, 51 bp, Homo sapiens
ctatgccttcagacatcaccagccagctgaactgtcccaagcaataaacag

SEQ ID NO: 378604 - DNA, 101 bp, Homo sapiens
gcctttccttccccctcggaaaatggttcccactgccgggcgagttggcaaacatgaattgactgggcataaagtagctgtgaagatactcaatcgacaga

SEQ ID NO: 378605 - DNA, 100 bp, Homo sapiens
gtggtgctggctcagtacatattcaccttgaagaggaagacggggcggaagaccaagatcatcgagatgtgattcgcctttgccagtctcatctcgtgtc

SEQ ID NO: 378606 - DNA, 100 bp, Homo sapiens
ccttcaaccatctggggaaaaggcaaaaatcccatctaccgcaactctcagttcgagagtaaaggtgtcacaacataatgaaagttgctcaagccaaact

SEQ ID NO: 378607 - DNA, 90 bp, Homo sapiens
atctgcacttcgcattttggcattgacatttaattttagggtcctttatatagaagggagagtaggtcacggagctgctggacgtctcca

SEQ ID NO: 378608 - DNA, 75 bp, Homo sapiens
tcacgctccactgcaacatcacgggatttatcaaagatgttcatgaagactcccttacagttgtttttgaaaata

SEQ ID NO: 378609 - DNA, 75 bp, Homo sapiens
ccaagggcagagaagatgtgaagaggcttctgaaactacacaaggaccgtttgggatatgagattgaaaatgacg

SEQ ID NO: 378610 - DNA, 90 bp, Homo sapiens
ctgccatgtgagacgtgcctttgaccttctgccatgattgtgaggcctccccagccacgtgaaactatcaccgaagtggccttggagtac

SEQ ID NO: 378611 - DNA, 75 bp, Homo sapiens
ctgccagtttgcacagcagcaggtcttgatgcagaactttattatgtgagaaatgaccttattagtcactacgct

SEQ ID NO: 378612 - DNA, 82 bp, Homo sapiens
cgagggaaatcatcaccctacagttgggccagtgcggcaatcagacctggtatcgccagccttaaggtgtctggagccccca

SEQ ID NO: 378613 - DNA, 98 bp, Homo sapiens
cacgaggcggcgggctggagacatggaccgcggcgagcaaggtgatctgcaactctttcaccatctgtaatgcggagatgcaggaagttggtgttggc

SEQ ID NO: 378614 - DNA, 83 bp, Homo sapiens
gtggggcctctacatgtccctggttaatgtgggccatgtctgcgagggcggcactgctcacaggacggctacccatccgcaat

SEQ ID NO: 378615 - DNA, 73 bp, Homo sapiens
aattccatgctgccttcagcttcctttgccgctctgcatcatgttggtttaatacaacatggaagccaccaag

SEQ ID NO: 378616 - DNA, 100 bp, Homo sapiens
ctatagattcagcaacaaagcaaacctctgaattggcagagggggtcgatttgggaggaaaggtgtggctataaactttgttactgaagaagacaagagg

SEQ ID NO: 378617 - DNA, 75 bp, Homo sapiens
acagcgcgagagagcgcggccctcaggagcaaggcggacacatttgacatccggatcctgatggccaagtctgtc

SEQ ID NO: 378618 - DNA, 82 bp, Homo sapiens
ccgaggggcggcccaggactcgagctgtgagccgtgagctttgaggcggtgggatgtgtcagcagaatgtctcctgcccccg

SEQ ID NO: 378619 - DNA, 82 bp, Homo sapiens
catgatctgatccggaagatgtcacctgtactccaaagattcaggtttactcacgtcatccagcagagaatggaaagtcaaa

SEQ ID NO: 378620 - DNA, 48 bp, Homo sapiens
aaatcttggatactgcaggaacgatggagtttcactcttgtctcccag

SEQ ID NO: 378621 - DNA, 100 bp, Homo sapiens
tccgaaatttcttgggtgaaaaatatatccgcagggttcggatgagaccagaattccttttgatgtagaaactcagagttgacaggaccttaaaagtcac

SEQ ID NO: 378622 - DNA, 100 bp, Homo sapiens
gtgaagatgaagatgaggagggagctacagcgttgaacaaccacagctctattcccatggacccaggctttgccacaaatgtcagtgcagaactctggct

SEQ ID NO: 378623 - DNA, 100 bp, Homo sapiens
gcggtgaccgaggcctgggccccgggagaaatacgaatgtgctttaaagcgagcaagtattaaaattgtgactcctgactgggttctggattgcgtatca

SEQ ID NO: 378624 - DNA, 51 bp, Homo sapiens
gaactacaggaacatggtcttgctggttcgatcctttggtacagaagacag

SEQ ID NO: 378625 - DNA, 104 bp, Homo sapiens
gcagccgggatttgggtcgcagttcttgtttgtggatcgctgtgatcgtcacttgataacgaaggaggcccaacttcattcaataaggagcctgacggatttat

SEQ ID NO: 378626 - DNA, 98 bp, Homo sapiens
cctggtgcgcaaggccccgaacaacaggaactggtgctcctatgtggtgacccgcaccatctcatgccatgtgcagaatggcacctaccttcagcgag

SEQ ID NO: 378627 - DNA, 100 bp, Homo sapiens
cttaaactcttggcatttggctttgcctttctggacacagaagtatttgtgacagatatccttggaacagaagatcttattgtggaagtgacttccaatg

SEQ ID NO: 378628 - DNA, 89 bp, Homo sapiens
gacatgtctgatcccttgctcccatccctgcagcatgaacaagcactgctgatggttcttcagaactcaggaatcgtgttgcatgcatt

SEQ ID NO: 378629 - DNA, 83 bp, Homo sapiens
cagagcgccgcgcacttcgtcatgttcttcgcgccctgactagacgcttgaagcaaagctgccatcccagaagacgacatgct

SEQ ID NO: 378630 - DNA, 75 bp, Homo sapiens
gcacctcgtcaccaaggccaaggttcctggtagagttacacagttgtgccgccagtatagcgacatgcctccttt

SEQ ID NO: 378631 - DNA, 98 bp, Homo sapiens
cgagcggcggcggagggagcagcgccggggcgcacgagggcaccatggcccagacgcccgccttcgacaagcccaaaacggagtttcgctcttgttgc

SEQ ID NO: 378632 - DNA, 100 bp, Homo sapiens
gacggcagcggcggcggctggactaaacaggtcacctgcagaaaggcctaaagaatgtatttgacgaagcaatattggctgccctggagcctccagaacc

SEQ ID NO: 378633 - DNA, 75 bp, Homo sapiens
cagcattttgagcacgatttttgtaagaaaaaggagaagcgggctctagggaactggaagttgctggccaaaggt

SEQ ID NO: 378634 - DNA, 100 bp, Homo sapiens
cactgattagcaatttaaagatcctctccaagtcaaggatgctatctaaatgggccttttaattcaaatctactgactatcccgaagcaaaggtcatctt

SEQ ID NO: 378635 - DNA, 83 bp, Homo sapiens
ctgcagccctcactcttcatggtcactggttatggaaacaaaggacatgctttacatcgtcactgaatttgctaaaaatggag

SEQ ID NO: 378636 - DNA, 82 bp, Homo sapiens
cgggggattgtgggagtctccgcgtcccgctcgctgggagagaggttcttctgtgtggcagttcagaatgatggatcaagct

SEQ ID NO: 378637 - DNA, 101 bp, Homo sapiens
gtagtgtttgccaatgttggagccgtctgcaaagtgtccccggcaagaaggtccgagacttatttgcccttgctcggaagaatgccccttgcatcctcttc

SEQ ID NO: 378638 - DNA, 50 bp, Homo sapiens
gggacaccgcagtatgaggcagagcatgcttttcacttccactgcatctc

SEQ ID NO: 378639 - DNA, 100 bp, Homo sapiens
tgaaggcccattggtatatattcaggaaattattcctggaggagactgttataagaggccagtaatagtagccatgagtctcgtattggtctagctgagg

SEQ ID NO: 378640 - DNA, 74 bp, Homo sapiens
tgcccgaggaggcagccaagctcgtggcctgcctctgcgtgcgtgaactgcgccaggccactgtggccatgatg

SEQ ID NO: 378641 - DNA, 98 bp, Homo sapiens
taaccttgtggagaagaccccggcgctggtgaacgattttgttctaaacactgaggacattctctgctacatttgggtcgtacccccaggtctgagta

SEQ ID NO: 378642 - DNA, 75 bp, Homo sapiens
cgccatcctgcagctgggcaacatctgcttctcctcctcagaggatgagaaggctgagggcctcatcaatgtctc

SEQ ID NO: 378643 - DNA, 80 bp, Homo sapiens
gccgccgacccgccgagcaaaatgcaggacccagtgctccataaaggataatagtttccagtacactatccctcatgatg

SEQ ID NO: 378644 - DNA, 115 bp, Homo sapiens
gcagcccccgcgctggtgcagccaccctcgctccctctgctcttcctcccttcgctcgcaccatgtaagactttgaccccgacgcaggcttcagtgattgccgcggatcagaagc

SEQ ID NO: 378645 - DNA, 98 bp, Homo sapiens
agccgcatgagagccggacaaactcagacatcgtggagatctgtggctgctgcattttgggctttgggatctacctgctgatccacaacaacttcgga

SEQ ID NO: 378646 - DNA, 100 bp, Homo sapiens
ttccgtttgttggtggaggaggtggcaggcctcggcggaaagttgcagacgttggcagtgctgttgcggcagctcaaggcagagggccaccgagtgctca

SEQ ID NO: 378647 - DNA, 83 bp, Homo sapiens
ctgctggggaaggcgattggcatcgatctctccatcccttccgaggcccgacttcgggcaacaggtttgtctatgctggctct

SEQ ID NO: 378648 - DNA, 83 bp, Homo sapiens
ctcgctgggagagaggtacctctccttttccctctccctttccctaagtgtgctggaattgatgttcgtctgtgtgatgttgg

SEQ ID NO: 378649 - DNA, 82 bp, Homo sapiens
gagcctcaagaaccttctaataagatgaggcctgcctgtgttaatacacctagtgaggagtggagctgaatttgaatgcaag

SEQ ID NO: 378650 - DNA, 51 bp, Homo sapiens
cattctcgctaacaactgcccagctttgagctctcttacattgctgaggac

SEQ ID NO: 378651 - DNA, 100 bp, Homo sapiens
ctctccaattctgttgttgcctccatgcgccaatccaaaccgaaagccagaaggagccaagggagaacccaagacagagaatagtggcccaataatgaag

SEQ ID NO: 378652 - DNA, 90 bp, Homo sapiens
tacgagtcctagatgtcaataaccagtccttcagagaacaagaggctaagtgctatttatggaggtacctatatgctgaataaacccatt

SEQ ID NO: 378653 - DNA, 90 bp, Homo sapiens
aggatctcctacccgaacatctcaaacttacacacttctaccctagccgggcccagcccccgagcagtgcagcctcccgagtgcagagtg

SEQ ID NO: 378654 - DNA, 100 bp, Homo sapiens
ccaaaccgaggagcgcttccgccctcagtggagccacatccatcctgaagcggcagaagcagctgcggaggaagaatgtacgctttgaccaggtgactgt

SEQ ID NO: 378655 - DNA, 104 bp, Homo sapiens
aggtggcggcgctgctgctcgggctgctcttggagctttgctgcaagataacatcgctgatgctgtagcttgtgcaaagagggttgtccgtgatccacaaggca

SEQ ID NO: 378656 - DNA, 83 bp, Homo sapiens
gccagtgggacgtctgagactttctccttcaagtacttggcagatcactctcttagcagacctgcctagagctggaacgttac

SEQ ID NO: 378657 - DNA, 104 bp, Homo sapiens
ctctcctgggatcggcccaaggccagttctccgcaggtttattccctgctgtcctgaatcttgcttctaatgctcttatcacgaccaatgcaacatgtggagaa

SEQ ID NO: 378658 - DNA, 74 bp, Homo sapiens
ctatcccaggacaggtggcactctttcagatgttggggatcagccaggtgaggtaggttattcaggctctcctg

SEQ ID NO: 378659 - DNA, 98 bp, Homo sapiens
aaggaggtgctgaagagcgaggagtctgcgctcctcagaccaccggcaggtgaacagcctgatgcagaccgaggagtgcccacctatgctagacgcca

SEQ ID NO: 378660 - DNA, 100 bp, Homo sapiens
gaggagaaggaaattgtcccgaatccctgcagtgcgatgtatgatgtatggctttggggatgaccagaatccttatactgagtcagtggatattcttgaa

SEQ ID NO: 378661 - DNA, 83 bp, Homo sapiens
gtggaggtggctgacgagctgctgggatgatcggctgaatgtaacagaggaactaacgtccaacgacaagacgaggattctca

SEQ ID NO: 378662 - DNA, 80 bp, Homo sapiens
aagatgctgtaaatgatgatgattttgagccatacttaagtagccagacaaatcagaatcctgcaaaaatgtctctctat

SEQ ID NO: 378663 - DNA, 83 bp, Homo sapiens
cacgccgagggcaggacgaacttcaccagagtgaagacatttccacctggacacctgaccatgtgcctgccctgagcagcgag

SEQ ID NO: 378664 - DNA, 51 bp, Homo sapiens
ggaacaggaggagtaagattgagatacactctgtgcagttttagagagaga

SEQ ID NO: 378665 - DNA, 75 bp, Homo sapiens
gaggaagcccatcgagagaagagcaaaggagactgcaccatccgtattgggaaaatgaggtacgttagtgttcgc

SEQ ID NO: 378666 - DNA, 80 bp, Homo sapiens
gtgtcctcggagcgcggtccctgtattggtctcctgctcctagagatgtggacgagtgctcactagcagaaaaaacctgt

SEQ ID NO: 378667 - DNA, 74 bp, Homo sapiens
agcaatggcttcttgggaacaagcaggatctcaaccaacgaattctgcttggtcagaatcgtgatggcattgtg

SEQ ID NO: 378668 - DNA, 89 bp, Homo sapiens
agcatgtcgtctttatcgctcagcatgcagccagtaaagatcccagagaagttcgagaagctagagatcataaggaaccaaaagaggag

SEQ ID NO: 378669 - DNA, 100 bp, Homo sapiens
cccagagcctcagtttgtgcaggacaccgacatggaacagggactcactggggtgccccgactcggcttgcaagcaggacctgctggcctacctgcaacg

SEQ ID NO: 378670 - DNA, 100 bp, Homo sapiens
agcccccctttaaacctctgttgttttaacttctagtcatggcgaatgatcgcaggagagcacagactggaccctgctacgatctctcttggagtggatc

SEQ ID NO: 378671 - DNA, 80 bp, Homo sapiens
tcattagcgtgaaaaccacaagcaggtccaaagagagagtccttatgtcgtcagaagatcgagaagctcaggaggatgaa

SEQ ID NO: 378672 - DNA, 101 bp, Homo sapiens
gccttggtgaccttgctgcaacagatcctgtatggcaggaactacattaagagttcaaagcagtattcagcgatttcaagagaagttttttatttttgctt

SEQ ID NO: 378673 - DNA, 76 bp, Homo sapiens
ttaagaaggaaaggcaaaaacttcgaaactcatgcaaggctgaatcatgtcagggagatttaagtacattggccaa

SEQ ID NO: 378674 - DNA, 102 bp, Homo sapiens
gaaaaaggtagcagtgcttctctggtcctcaagagacttggatttaaagtaaggacagtcctgtgtgaaggtggagtaccacagaggccagttgtttttgtc

SEQ ID NO: 378675 - DNA, 83 bp, Homo sapiens
ggaaaactggatgctgcagacactgaacgaggagccagtggggattacagtgacgcaattgagacgctgctcacagccattgc

SEQ ID NO: 378676 - DNA, 101 bp, Homo sapiens
aaggatgtgcaggatcttgatggtggcaaggagcatagaatgtcaagctaaccaggcgtccgctacttcagaagagtgtactgtcgcatggggagtctgta

SEQ ID NO: 378677 - DNA, 83 bp, Homo sapiens
acccaaggcccccgagtgagcgcgggcgccgaggtgagaagccctaccactgcaactgggacggctgcggctggaagtttgcg

SEQ ID NO: 378678 - DNA, 97 bp, Homo sapiens
ggaacgattgggctgagcagaggacgacatgttgcttttcgtggaggtatgaggatgagatcaataagcgtacagagatggagaacgaatttgtcct

SEQ ID NO: 378679 - DNA, 74 bp, Homo sapiens
ggaagatggcggatctggaggagcagttgtctgatgaagagaagccatattgaaggtggtatcatcggtcctgc

SEQ ID NO: 378680 - DNA, 75 bp, Homo sapiens
ggaacgaatctctcaggctgcatcaggatgaatgatgacccaagtatggaatctccatctgctgctgcctcttca

SEQ ID NO: 378681 - DNA, 100 bp, Homo sapiens
gacagtctggacgagaatgaggctaccatgtgccaggctgttttggagtcagcggaagatcaccaaggccagggagtggttccaccgcactgtgaagatt

SEQ ID NO: 378682 - DNA, 82 bp, Homo sapiens
cgcagggacatggccggggacacccagtggtccaggtggaagttaaacgagctgagcctcgggacagcaagagccaagcgcc

SEQ ID NO: 378683 - DNA, 100 bp, Homo sapiens
ccctgagtctttgggggcagcctgcagaggctgcggtctgaatgccattcatctagccatgatgagcaatagcctgccatgtttgctgctgctggtggcc

SEQ ID NO: 378684 - DNA, 75 bp, Homo sapiens
tgaacacagcatcaatggcaggaggtttcctgttgaggtggagcaccagtattcccacaagtttacggtagtggt

SEQ ID NO: 378685 - DNA, 100 bp, Homo sapiens
accgccagatcaacctggagctctacgcctcctacgtttacctgtccatgatgcaaatgaaactgatggaaatgaaagatttggaaaatcataatagtca

SEQ ID NO: 378686 - DNA, 97 bp, Homo sapiens
caacaagtatgggtctccgtacaccaaaaactcaggcttcgccacctgcgtgcaaaggggggccctcagcctcttggccttgaacgggctgttcatc

SEQ ID NO: 378687 - DNA, 100 bp, Homo sapiens
tgaaaacatcctggaatcaaatagtgttacggcaacaagatacgtaggtaacctttccagagatgtgacagaagtccttatacttcagttgttcagtcag

SEQ ID NO: 378688 - DNA, 74 bp, Homo sapiens
gccgaagcttatatcccaccattgccacgggcattctccatctccttgcagaactgataaatttcaaacggaag

SEQ ID NO: 378689 - DNA, 100 bp, Homo sapiens
tgtaagttgggtggtaatcatgccaaccaccgtgtaaccactatgagcagtgcctacaaaaccttaaagggtgtgtttgaccatcgaatgaagtgctggc

SEQ ID NO: 378690 - DNA, 97 bp, Homo sapiens
agtagcgcagaggcggcggtggcgagaggtgcggcgaaggaggcagaggcacttatgcttgtcaggtggatctccttacgtagcagccaaaataaat

SEQ ID NO: 378691 - DNA, 100 bp, Homo sapiens
gtgatctccagcgccggcctcctcagtgcgaagaagctgcagccgcacctggccaaggctgccccagagcacatcagctatgtgccccagctctcaaacg

SEQ ID NO: 378692 - DNA, 50 bp, Homo sapiens
tggagaagaacattcttacatgctgatttcaagagatggacgcttgagga

SEQ ID NO: 378693 - DNA, 77 bp, Homo sapiens
cgcgctactctctctttctggcctggaggctatccagcgtctggccgtgggcctgggcttcggggcactggcagagg

SEQ ID NO: 378694 - DNA, 98 bp, Homo sapiens
gagtgatatttgggtccccactgacggaggaaggcattgcccagatataccaactgattgagtatctacacaaaaggtggcatggagaaatcgttgtc

SEQ ID NO: 378695 - DNA, 50 bp, Homo sapiens
cgagcagccctgcctccggacggtattgttgcagcatctggcagtgagac

SEQ ID NO: 378696 - DNA, 50 bp, Homo sapiens
aaagatttcagcatctgaatgaatggaggagatgtataagaaagctcatg

SEQ ID NO: 378697 - DNA, 83 bp, Homo sapiens
cggactgggagtttgaccgcgttgacgacggctcgcagaggtgtccgcaatgttgccagtgtctgtctgcagattggctaccc

SEQ ID NO: 378698 - DNA, 100 bp, Homo sapiens
ctcaagcaattcctcaaaaagaccaagaagaaccacaaggccatgaacgcccggggagtgtgtggggaagacggtgacattgcagggcaacctggacccc

SEQ ID NO: 378699 - DNA, 50 bp, Homo sapiens
tctcaactacaacatcgtttcaggaacattcagaagattctcggccttgc

SEQ ID NO: 378700 - DNA, 50 bp, Homo sapiens
agccctccggttcctgggcagagagaaagaagttctgagggtacccctca

SEQ ID NO: 378701 - DNA, 80 bp, Homo sapiens
cttcccacggacgcgcgagacaatgaggaggtggatagatacttctcaagacatcacacagcgtgagtcaatcaaggagg

SEQ ID NO: 378702 - DNA, 120 bp, Homo sapiens
tggctgctcgataaatcagacagaacagttaatcctcaatttaagcctgatctaacccctagaaacaggtgttccttgatgatctccctgaggattttagtgatgctttagatgaatata

SEQ ID NO: 378703 - DNA, 83 bp, Homo sapiens
cttcagaccccaggttctttgactccatcaagaatgctggaggaagggtgtttgtccactgccaggcaggcatttcccggtca

SEQ ID NO: 378704 - DNA, 90 bp, Homo sapiens
aacagatctgcgcttccagagcgcagctatcggtgctttgcaggatcacagaagaactgcagcttcctggggagcagtttcacctccaca

SEQ ID NO: 378705 - DNA, 100 bp, Homo sapiens
caggcaatcttcagcggtgatccagaggagatccggatgctcatccataaaactgaagatgtgaatactctgattcccagaagttgtgcatgagttcctg

SEQ ID NO: 378706 - DNA, 98 bp, Homo sapiens
accaacagcctggagaagctgcggctgcacacggtcaactccaggcacgaggccagcctgaagttgtacaagacaatgcagatcttcgtgaagactct

SEQ ID NO: 378707 - DNA, 100 bp, Homo sapiens
acagagaaagataggcggccatggtccaaccttgaagggtaatcactttgatcagtatgaggaaggacacttggaaattgaacaagcgtcacttgacaag

SEQ ID NO: 378708 - DNA, 100 bp, Homo sapiens
gtgagaaaaatgattctttgttaacatccgtagattttcatgaatataagaatgaagctgatcatggtcagcttactactttgtatgagaacttaagtat

SEQ ID NO: 378709 - DNA, 105 bp, Homo sapiens
cagaccctggagcctcagttggaagcagccgatccagcctgcggagcctgtggggcaggttggtcaaagaaaaagtgatgtatgaaaaagaggcaaaacaacaag

SEQ ID NO: 378710 - DNA, 75 bp, Homo sapiens
aggaatgggtctgggaccttaacagggagccatgactcagatatcagtgatcttattagctttttcacaagccag

SEQ ID NO: 378711 - DNA, 76 bp, Homo sapiens
tccctcctggccagaaatgttcagcctggactcattcagaaaaggtgtgcaactgaggaacatggctcaagaaact

SEQ ID NO: 378712 - DNA, 50 bp, Homo sapiens
aaaacggcccttggatgatggagaaccaagcgcctccaggtctctacacg

SEQ ID NO: 378713 - DNA, 83 bp, Homo sapiens
ctgaaagcgagaagtccgtgagtagaagacaatgcagatcttcgtgaagactctgactggtaagaccatcaccctcgaggttg

SEQ ID NO: 378714 - DNA, 100 bp, Homo sapiens
tgggcgtcttcccaggctgtcatataactcctgagaatagtggttcttaactctaatgcagaggctgtgcattttttctgcaattacgaagagagccgag

SEQ ID NO: 378715 - DNA, 100 bp, Homo sapiens
tcttatagaacaacaatttacatatggcaagattgacctgggatttggaacaaaggttgcagattctgaattatgaattggcagagggggtcgatttggg

SEQ ID NO: 378716 - DNA, 111 bp, Homo sapiens
gtgagattctctcccaggccacaagacatttcctgctcggaaccttgtttactaattgaaaatgtttataggaggccttagctgggacactacaaagaaagatctgaagga

SEQ ID NO: 378717 - DNA, 49 bp, Homo sapiens
aactccaaggagaaaggcggcggattctggactctacttataatatccc

SEQ ID NO: 378718 - DNA, 75 bp, Homo sapiens
ggatttttggcctaccctccaaagaaaagagccaaatctcctcagccacctgttgaagaagaagatgaacacttc

SEQ ID NO: 378719 - DNA, 100 bp, Homo sapiens
ggtattccgaaacaagtctcgatttcgttctgcaaacaatgtcaaagatgatgtctaccgtagaaaagcctcagaaagacagtatcagagaaggctggaa

SEQ ID NO: 378720 - DNA, 98 bp, Homo sapiens
ttcaagtccctgcatcaggtggaggactggtataattcaggaaaaccttgtgtgttttggctgtcaggtttctttttcactcaggcctttttaactgg

SEQ ID NO: 378721 - DNA, 82 bp, Homo sapiens
gccggacgtcggcaacggagaaggctcctgctccagcccagcccccagagagcagaccccaggtgctggccccgggggtttt

SEQ ID NO: 378722 - DNA, 82 bp, Homo sapiens
aaaagggggaaaatgcccaggaggaagcaggagcagcccaagcgccttccctcacacttaattcagtgcacaaatgagatga

SEQ ID NO: 378723 - DNA, 100 bp, Homo sapiens
tgccgctcctaagcctgcacagccgcggcggcagcagcagtgagagagtgaagacatttccacctggacacctgaccatgtgcctgccctgagcagcgag

SEQ ID NO: 378724 - DNA, 75 bp, Homo sapiens
gccgcgagcgcggcctgcaggaggccaccagcccctcgggttccaagatgcagctactggagacagagttctcac

SEQ ID NO: 378725 - DNA, 83 bp, Homo sapiens
ggtgctgaggcacctggagaccttcgagcaccccaacgtggtcaggtttggtgcacctcgatttggaggaagtagggcagggc

SEQ ID NO: 378726 - DNA, 94 bp, Homo sapiens
aaaccgacacgcgtggtatcctcgcggtgtccggcaagagactaccaagacagacgctatggataagccagagacatgggaaaaccaatggaag

SEQ ID NO: 378727 - DNA, 95 bp, Homo sapiens
agcagttagacggctgccgggcggcggctgccgcgcggcacacaatggcagctgcaatgactctccgcacggtattattgtcattgcaagcacta

SEQ ID NO: 378728 - DNA, 88 bp, Homo sapiens
cttggtggtcctggtagcttttattggcaagctgcagcttatcttctggtgtcccttataccaagcaattcattccgtcagatgttcc

SEQ ID NO: 378729 - DNA, 100 bp, Homo sapiens
ggaaatttataatgaaaaagttcgagaccttcttgatcccaaaggagcctgccttctggtacaagatgcctgtggaatgttcggtgaagtgcacttggag

SEQ ID NO: 378730 - DNA, 75 bp, Homo sapiens
ccggtgtgaggcggcccgtcctggctcccttgtccgggaagcccgcccagaaactatgttccaacttcctgtcaa

SEQ ID NO: 378731 - DNA, 96 bp, Homo sapiens
ccgaagtgcttcagatgtagagggttctccaaaaaatgtggaatcctttgcatctatgctgagacattctcctcttacacagatgggacctgcaaa

SEQ ID NO: 378732 - DNA, 98 bp, Homo sapiens
ccactttgtgatcagagccgtgttcggggagtctttcagctggaggcagacatgctagagcagaagccccaactccaagtggacctggacctggaccc

SEQ ID NO: 378733 - DNA, 97 bp, Homo sapiens
gaacggagaggtagccatgatgccccacttggtgaatggagatgcagctcagcagtttggaaattttagcattcaggtgccaggaatgcagatggga

SEQ ID NO: 378734 - DNA, 83 bp, Homo sapiens
gggaagtggaaccggatatttaagtacaatggtgggcttaattttagatattggtatcaacttgactgaccctatgttcagag

SEQ ID NO: 378735 - DNA, 100 bp, Homo sapiens
atcggtggtaacgacggcctcagcaggcggggaagatgaaagggttcaaaccttgtactactcagctgatcacaagctgcttgatgggaacctactagat

SEQ ID NO: 378736 - DNA, 141 bp, Homo sapiens
gccattgcttttgaagttattaaagtctgttggtgcacaaaaagacacttatactatgaaagaggatgccaaagaagaccatgaaagaacacatcaaatggtcttactgagaaagctttgtctgccaatgttgtgttttct

SEQ ID NO: 378737 - DNA, 100 bp, Homo sapiens
tagagggccagtcggctggggctgcgagccatgccatgatagaaaagatcctcagcgaggagcctcggtggcaagattatgtttgagaccttcaacaccc

SEQ ID NO: 378738 - DNA, 75 bp, Homo sapiens
gcgggccctcccttaggtgcgccccccgccagtcaccacgttctgcgcttttccgagtcggacatatgagcagcg

SEQ ID NO: 378739 - DNA, 90 bp, Homo sapiens
gttccagtggcaaacagctgtataaactcttgtaaacagttccctactgaaggaacagatgctaaggaaacaggccgagttagaatcagc

SEQ ID NO: 378740 - DNA, 74 bp, Homo sapiens
tggagaaccacagttgctttgagcacatgcaccacatacctgcgatgttcatgagagcgcagtttgactatgat

SEQ ID NO: 378741 - DNA, 152 bp, Homo sapiens
cagaaatgaaaactgaagatggcaaagtagaaaaacactatctcttctatgacggagaatccgtttcaggaaagatgatgagagtaatgttgcagttaccagacccgattcagaaagttcctgtgtgctgagtgaactacatcctttggtgt

SEQ ID NO: 378742 - DNA, 100 bp, Homo sapiens
cccgggagcgccgagcgtcgccgccgccgccgccatgaacaactcgggcgccgacgagatcggctggacccacaaaccgtggagaccaagaactggcaca

SEQ ID NO: 378743 - DNA, 100 bp, Homo sapiens
agtcagcctcctgtctccagagtcaacccacaagctccagggttccttgaaaagaaaacaggtagttaacctatctcctgccaacagcaagcgacccaat

SEQ ID NO: 378744 - DNA, 98 bp, Homo sapiens
agattttttagtctaaatgatgggcagtcatggtcccagaaacgtcactatcaagaagggtcagttaaatgaaagcatggaccatgggggagttggac

SEQ ID NO: 378745 - DNA, 100 bp, Homo sapiens
agccggagaagcgagtttcagctgagagaaaaggaacagttccgtaagctctttattggtggcttaagctttgaaaccacagaagaaagtttgaggaact

SEQ ID NO: 378746 - DNA, 106 bp, Homo sapiens
agatattcagaagaaggatgctgttaaaaggaatcttctgcggcttgtccatagtgtgaataaaaactaaatcacatctataattctactgaactggtcacacaga

SEQ ID NO: 378747 - DNA, 75 bp, Homo sapiens
gtctgtgaagccacacagtgtccagatacgagggttctgccgatgatgagaggatcttgaggttcttggaattgg

SEQ ID NO: 378748 - DNA, 83 bp, Homo sapiens
ccggcctgcagcacccgccaccgtcgccggccgcccgcacgtccgtccgacctgcctagagctggaacgttacctccagagcg

SEQ ID NO: 378749 - DNA, 50 bp, Homo sapiens
atgacatcctcgtctttgatgccttgctggttatattctgggcactaaat

SEQ ID NO: 378750 - DNA, 88 bp, Homo sapiens
cggcggccgcagctgccacaaaccagaacacacgaggagatgccacagagcatcgtggaggccacctctaggcttaagaccttcaact

SEQ ID NO: 378751 - DNA, 50 bp, Homo sapiens
acctggtggaggtgttaaatgaaacagcagccgctcttctaaaacattca

SEQ ID NO: 378752 - DNA, 100 bp, Homo sapiens
tggcctctcttttatctccagttctgtcatcatcaccaccacacactgtctaaagaagcagttgggtgataatgaagctattactcaagaaatagtgggc

SEQ ID NO: 378753 - DNA, 82 bp, Homo sapiens
caggtggaacagattcagaaggagcaggattaccaaaggcagaaggtgatttactacctctgcatcttattgaaagatccag

SEQ ID NO: 378754 - DNA, 74 bp, Homo sapiens
ggaccgggaccgggatcgtgaccgtggaggttttgatggcgacgactttgatgatgtggaggaggatgaagggc

SEQ ID NO: 378755 - DNA, 75 bp, Homo sapiens
cggaagcgcggagggagccgcgggatggaccgcaggggttggccggagacctacgacatgaatacctcggagccc

SEQ ID NO: 378756 - DNA, 96 bp, Homo sapiens
tgtttggtcccgattccggaaaaggtgccaagagcttagttgaactccttaccaaagcccagcagggctggctcgtggccggcacggtgggctgcc

SEQ ID NO: 378757 - DNA, 82 bp, Homo sapiens
aggcccagggaccaggcggaggcgtcgcgggagcctttggggcaccacagagatgcgggattgaaagaaggtggcaagagga

SEQ ID NO: 378758 - DNA, 49 bp, Homo sapiens
ccttgggccaggcctggcagggctggatttcagtcataatcggttgtct

SEQ ID NO: 378759 - DNA, 105 bp, Homo sapiens
ctctgagggccccggcccctggatgcacagccccggcgctggaatgggtaccacagaccatgtcatcgtcctggcgtccacgaaccgagctgacattttggacgg

SEQ ID NO: 378760 - DNA, 96 bp, Homo sapiens
tagcgcttgaccttcgagtgtttgccaataatgtatgcttcagaagtgtccttctgttgatgacttcgtaagtgccctcgtttccgacttggatct

SEQ ID NO: 378761 - DNA, 82 bp, Homo sapiens
gtgggagccgtgctctacctctatccgccgctgccatggcccagacactgcagatggagatcccgaacttcggcaacagcat

SEQ ID NO: 378762 - DNA, 83 bp, Homo sapiens
ccatcattggacccaatggctctggcccagacgagagtgaaactgaactacttggaccagattgccaaattctgggaaatcca

SEQ ID NO: 378763 - DNA, 96 bp, Homo sapiens
gtgatttgactcccttcctggttttgaaagcaagaaagaaacaaaagttcacctctgcgaaggtggaaccaagctcacaaatcctcaggaaccaac

SEQ ID NO: 378764 - DNA, 75 bp, Homo sapiens
tctggaagggggtcaagtccacaggcaagggaaatgcaataccttatttccagatgactcctatcagcacttctc

SEQ ID NO: 378765 - DNA, 75 bp, Homo sapiens
agacacaaggaaacctactgttgcactgtctgctgttgggaaactgaacagccaagactcctataacaattttac

SEQ ID NO: 378766 - DNA, 100 bp, Homo sapiens
ctattgctcttgggagccgctggcttgcttatgcagaaaacaaggtgaatacttgtaatgaagtttatgaattaaagaagaaagtcatagaaaggctgga

SEQ ID NO: 378767 - DNA, 83 bp, Homo sapiens
taagtatctccgctacttcactcgcactatccttgatgctaggtgagaagccctaccactgcaactgggacggctgcggctgg

SEQ ID NO: 378768 - DNA, 97 bp, Homo sapiens
ccgggagaaggtgctggagctggaggacgagcatggcggacaccgacctgttcatggaatgtgaggaggaggagttggagccatggcagaaaatcag

SEQ ID NO: 378769 - DNA, 100 bp, Homo sapiens
gaagaagctgaaagactctctgaaagccttaaattaagatttgggccaggcttagtcatctattggtatggatttatccaggagctggactgcaaccggg

SEQ ID NO: 378770 - DNA, 74 bp, Homo sapiens
tgatcatgatacagttgataaaattgttgcactattcctgatcagagaactccagttgcttcaacacacagtat

SEQ ID NO: 378771 - DNA, 75 bp, Homo sapiens
ggggaaaatctccccggtgactttcaggggatgtggagacgctggtagcggggccaggaaggctccggacggagc

SEQ ID NO: 378772 - DNA, 100 bp, Homo sapiens
agaggtggaggcgctttgaaagaacctatgagaaccccaaagacattaaagattgctgaaatacaggcaagacggattgctgtggactgggaatccttgg

SEQ ID NO: 378773 - DNA, 74 bp, Homo sapiens
ccgctctggccagggtgcttttggaaacatcttcttggaaacagaattgttctacaaaggtatccgccctgcaa

SEQ ID NO: 378774 - DNA, 83 bp, Homo sapiens
tttaaagatgcagaggatgctttgcagaaacttcataaatatatgcaggttgattgtacacagcactatgaactctgctccgg

SEQ ID NO: 378775 - DNA, 101 bp, Homo sapiens
ggcagctacttaatcctactcagaagaacttgtacagagatgtgatgttggagaactatagcaatctggttttcttgggagttcatgatcaagtgttgccc

SEQ ID NO: 378776 - DNA, 100 bp, Homo sapiens
gtgtgattagcttcgcagtctggaaagctttaggagttcacagtgtggagccgccaccaaaatgcagattttcgtgaaaacccttacggggaagaccatc

SEQ ID NO: 378777 - DNA, 96 bp, Homo sapiens
gccagagtttgtagcctattggaggaaaacacaccaagctagctgaaagcagagaacccagcagaggattctgggaaggtcctgggggatggcaga

SEQ ID NO: 378778 - DNA, 75 bp, Homo sapiens
cccagggccaggcgccgctcagaacgaatccagcaactatcacaagaatactccttagccacttcaattgggata

SEQ ID NO: 378779 - DNA, 82 bp, Homo sapiens
gacccgggcagagaaggtacagtacttcttccttccaaggaccagcggtagctcccggggaccctcactacgtccagcaggc

SEQ ID NO: 378780 - DNA, 100 bp, Homo sapiens
gccggtgctcgggccgggggatacgaggttctcccatgggcaggtggtctctctggatgagctgcgccccttccaggacccagacctgagctccctgcag

SEQ ID NO: 378781 - DNA, 100 bp, Homo sapiens
gaactccgagaggaggtggaccagaacttttggaactagtgccggcggctctccaccccccagtgtctgtagtgggaagtcttcatgagctcagttggcc

SEQ ID NO: 378782 - DNA, 98 bp, Homo sapiens
aaaatgaagggaaataaagtgaatgaggtgctgaatagactgcacctggctatcccaaccaggagggacgataaggaacaggagtacagctgtgtagt

SEQ ID NO: 378783 - DNA, 100 bp, Homo sapiens
aggagaggaaagggaaggagtcagagcgcgagaagctgccgcccatcgtatcggcgggcgccggcgcgaccgcgtggaagcatcagttcacagcagtaat

SEQ ID NO: 378784 - DNA, 101 bp, Homo sapiens
gctactgccctctgcgctcctgcatctgcctccccataagacatctgttaaagacatggctgaccttcctgtccctaaccaggatgtaactagtgatgaca

SEQ ID NO: 378785 - DNA, 82 bp, Homo sapiens
caaaggccctagtgctcagataccatcctctcagctcctgccttacagcccgggtttctctggaaacccccctggtaagtgt

SEQ ID NO: 378786 - DNA, 74 bp, Homo sapiens
ggcagaagcagcacacagaacacctgcgtttagataatgaccagagggaggaccagttacagaagtggatccgc

SEQ ID NO: 378787 - DNA, 96 bp, Homo sapiens
tggagatgatccatttcaaggacttgctgctgcacgagtcagggatgttggaagctggagtagacaggattatttctcaggtggtggatccaaaac

SEQ ID NO: 378788 - DNA, 95 bp, Homo sapiens
caaagccgcgcgagcagtgggaggagcaatgagaggcaatcctataattggccttttgaatgttttcacaccacagaaatccctagaagaatttc

SEQ ID NO: 378789 - DNA, 90 bp, Homo sapiens
ctcgcctgtgcgtcagtgtcgccccaacggcatgtgggatggagaaacagctgtgtgtgataatggggggccaggaaggaatactgggag

SEQ ID NO: 378790 - DNA, 85 bp, Homo sapiens
aggaaagcaaagaagcagcccagctttcagaagcagccccagtgcccacagagccccagtcatgatgctatggactcctactacg

SEQ ID NO: 378791 - DNA, 75 bp, Homo sapiens
gaagcaaaatgaggccttccctggccccaaggtgaccctggcagcaaccccaacaaacgccagaggcagccccct

SEQ ID NO: 378792 - DNA, 98 bp, Homo sapiens
agacgagaagcctgaaaagtcgcagcgagctggagccgccggagaacacagatatgtagaactcttcttgaattctacagcaggagcaagcggtggtg

SEQ ID NO: 378793 - DNA, 80 bp, Homo sapiens
cagattcgcagtggtcgcttcttctccttgtgtgccgtgcaggtgaagctggagctggggcaccgcgcccaggtgaggaa

SEQ ID NO: 378794 - DNA, 97 bp, Homo sapiens
cacagttcaacctgacacaggtcacctgtcactcagccctgctggacctggagaagctcccagaattcaacagcacatggattaattgatgtatgtt

SEQ ID NO: 378795 - DNA, 98 bp, Homo sapiens
cacagaccaagtcctccacagagggcgagccagggtggagaagagccagcccagggaacccaccaagaccaacctggtcacattcttccataccgacc

SEQ ID NO: 378796 - DNA, 97 bp, Homo sapiens
ctcgcgcgctcccgaggaagagtgagggcgcgacgcgcaccaacggtggaggcaccgtctgcgtcctgctgtccttccccttcatcttcagcccctg

SEQ ID NO: 378797 - DNA, 90 bp, Homo sapiens
acaaggtcaccgacttgctggccgtcctgggccgccggacacccccgctggggccgatgcccaacagtgacatcgacttgagcaacctgg

SEQ ID NO: 378798 - DNA, 73 bp, Homo sapiens
aactttttcacttactgcaggattttcagcttcagcaagcagaacgtgttacgagtcagtttttagtgaaaaa

SEQ ID NO: 378799 - DNA, 82 bp, Homo sapiens
cggggcctggcggtcttcatctcggatatccgcaactacaatgcagatcttcgtgaagactctgactggtaagaccatcacc

SEQ ID NO: 378800 - DNA, 82 bp, Homo sapiens
gctgagcttggcgcacgggccgaccaggcttgggcactgtttaaaggaaagttccgagaaggcatcgacaagccggaccctc

SEQ ID NO: 378801 - DNA, 98 bp, Homo sapiens
aaaagccaagaggaggacagttcgctacacagcaatgcatcgaggtggtgtttcataagatgtcacccaacgagaccctctttttggaaagtaccaac

SEQ ID NO: 378802 - DNA, 100 bp, Homo sapiens
gatgtattagtgaatggagacaataaatggattacaaccttgcactatgctttccaggatgacaataacttatacaaccagcccttcgaggacaccccgg

SEQ ID NO: 378803 - DNA, 100 bp, Homo sapiens
gtccggaacaccctgcggactgacctgcgggcttgcttgctgactcctctcaaaggtccagatggctgtggaggccaagtttgtccaggacaccctgaaa

SEQ ID NO: 378804 - DNA, 99 bp, Homo sapiens
ttcaaaacatctatcgtaatccccaaaacagtgcacagacggctgacggctcacactatattgatgatgttaagaagttcaaaccgggttacctggaag

SEQ ID NO: 378805 - DNA, 50 bp, Homo sapiens
gtgccatcagtatcttaatgaagggtggagagattcaaccagttagcgtg

SEQ ID NO: 378806 - DNA, 50 bp, Homo sapiens
ggcttcaatatccagatttgccccagggcttgcagccctgagtgatcgag

SEQ ID NO: 378807 - DNA, 100 bp, Homo sapiens
gaggcgaaaggaagcaagcagttcagaagagccaaggaataaacatgcaatgaacccaaaaggagctaacacatgagtttctacaaatattggagaaaac

SEQ ID NO: 378808 - DNA, 85 bp, Homo sapiens
cgggcgcaccgcggcccccaggacacgcgctgtctggccgtgggcctgggcttcggggcactggcagaggtcgccaagaagagcc

SEQ ID NO: 378809 - DNA, 90 bp, Homo sapiens
ctgctgcaccgacctcgacgtcttgcctgtgtcccacttgttcgcggcctataggacccgtgcatctcttccgactctcgggcaagtgct

SEQ ID NO: 378810 - DNA, 75 bp, Homo sapiens
gcaattgatcccaagttgtcgacgaccgacagggtggtgaaagaacatacggtccctaatgagcacagagaagac

SEQ ID NO: 378811 - DNA, 96 bp, Homo sapiens
acgtgggaactgagtctgtatgagctgcaccggaccccgcagggcccaagttgtttgcttcgctgggcagccccagaggtcattgcacatggaaag

SEQ ID NO: 378812 - DNA, 100 bp, Homo sapiens
cctattgtttctataggattttattgcacaaaggcaacggtgactttcaaagctggagcattggatttgctaaaggagcttaagaatattcctatgaccc

SEQ ID NO: 378813 - DNA, 99 bp, Homo sapiens
ccggctgatggagctctgaagcgggcagaggagctcaagactcaggccaatgactacttcaaaggagtttgagaatgcggagggggacgagtacgcagc

SEQ ID NO: 378814 - DNA, 75 bp, Homo sapiens
ccacacaggtagccctggacggcattcagtgttttggtgggcacaggcttcagttttactgatgatacccacgga

SEQ ID NO: 378815 - DNA, 100 bp, Homo sapiens
caattatcgtacaagatctgcattggaagagactcctagaccctcagaagagatagaaaatggcagtagttcttcagattctccagagaatacagagggc

SEQ ID NO: 378816 - DNA, 87 bp, Homo sapiens
actacatggacgtctggggcaaagggaccacggtcaccgtctcctcagcggagcgtgctttggacaccatgaattttgatgttataa

SEQ ID NO: 378817 - DNA, 75 bp, Homo sapiens
ctgaggctgaggagaggggagcttggggggcgcctgctgccaaggaattaaacaaccaccatgtcgagcaaaaag

SEQ ID NO: 378818 - DNA, 75 bp, Homo sapiens
gaaggagagtgaagagacaattattcaaactgatgaagatgagaaaatacggtacatgtccccatggaggatatg

SEQ ID NO: 378819 - DNA, 134 bp, Homo sapiens
gccatggcgaagcacgagcagatcctggtcctcgatccgcccacagacctcaaattcaaagacaagttggatggcttgaggactggtactaaaaggaaacgtgactgggaggccattgccagcagaatggagga

SEQ ID NO: 378820 - DNA, 82 bp, Homo sapiens
cgcggagggcgacgacgacgaagcgcagatgtctttggtggacttgggaaagaggttgctagaagcagcaagaaaaggccaa

SEQ ID NO: 378821 - DNA, 100 bp, Homo sapiens
gagagcaggaggctcctgggacccaatggcctctggatgaaacgtcaggaatttactacacagatccgagtgaagcctgacaggaccggtgtggtcacgg

SEQ ID NO: 378822 - DNA, 100 bp, Homo sapiens
accttggtcccagagtcatcatgaagagctttgaaggtacaatcgtgtgggagagccaagacctccacggccttgtgtcaagaaatctccacaaagtgac

SEQ ID NO: 378823 - DNA, 82 bp, Homo sapiens
accgctgccctcagctccgagtccagggcgagtaaggtacctgccgtgggcagatctgagctttcttcttggacaccccata

SEQ ID NO: 378824 - DNA, 75 bp, Homo sapiens
ccttagaggaagaagcactccagagacgactaaatgtttaaaattggtggtgaatggtggacatggatcgattat

SEQ ID NO: 378825 - DNA, 99 bp, Homo sapiens
ctggattcacaggaagccactgcgagaaaggtacaaagacaggagactggcccagcacaagtcggaaatagagtgtttcacccccaaagggagtatggg

SEQ ID NO: 378826 - DNA, 100 bp, Homo sapiens
cggagcccggtgagcccgaggagaggaagggcctgggatacaacagtgatgagataaggcctcggactttactgatcgaacatctaatggaaggtggaag

SEQ ID NO: 378827 - DNA, 75 bp, Homo sapiens
cccagctgaaggaaagcggaatcgatctgacaccgagcaggaacaggagtacagctgtgtagtaaagatgccttc

SEQ ID NO: 378828 - DNA, 82 bp, Homo sapiens
ttaataaaacctaccccagggtaggacggactgttcgatctgacaggatggcatctgatgactttgacatagtgattgaggc

SEQ ID NO: 378829 - DNA, 87 bp, Homo sapiens
aggaagcgctggaaatagccagagagatgtttgctgatggccgccaaagttggagttcgtatgttgatgacatctgattagcagaag

SEQ ID NO: 378830 - DNA, 75 bp, Homo sapiens
aggctcccccttgactaaagctggaaacagtgcttcttagtcctacgtcagcagcagtttaatgtccaggctctt

SEQ ID NO: 378831 - DNA, 100 bp, Homo sapiens
gcaaactttccgagaatatggagatacaggtgaaatctggacctgatcccaaccttgaagaaagtcctaaaagaaaaaatattacatatgaggaattaag

SEQ ID NO: 378832 - DNA, 100 bp, Homo sapiens
cacagtgtctctagacttcatcagagctattgcaagagagaagacacggttcaatgtgtagaccttctccctctccagtgtctccagcctccaatcccag

SEQ ID NO: 378833 - DNA, 88 bp, Homo sapiens
caagagatgctggaggagcaactggtgaggatgttaacccgagaagtcatggacctaatcaatgccaattctcggaagcaagaagcag

SEQ ID NO: 378834 - DNA, 98 bp, Homo sapiens
tgaacatgtaataatgcagaatgaagctcttgttgctttggcattaatagcagctttagaattggcatctcagaataattaccgcatcgatgccaacc

SEQ ID NO: 378835 - DNA, 75 bp, Homo sapiens
ccgagagctctgcttctctgaaaagcgtgtggctttctggacttggtctcagcatcagaggagcccaggaggagg

SEQ ID NO: 378836 - DNA, 83 bp, Homo sapiens
cggaggcaactcggcgacagcaggctacagctgaaggtgatgtggccgccctcaaccgacgcatccagctcgttgaggaggag

SEQ ID NO: 378837 - DNA, 75 bp, Homo sapiens
ctggctctggaggacgccaaagaaggctacagccgattccacgactcttctttgcgggagaacatacgatccgta

SEQ ID NO: 378838 - DNA, 82 bp, Homo sapiens
ctgaaacatgaaaacatcgtggccctgtacgacttccaggattatatctgtccaagatgcgagtctggttttatcgaggagc

SEQ ID NO: 378839 - DNA, 100 bp, Homo sapiens
aggaagaggaatgggatccagaatataccccaaagagcaagaagtacttcttggattgctgtcacgtctaatgtggctgctgcctcgtgtcacatctgaa

SEQ ID NO: 378840 - DNA, 100 bp, Homo sapiens
gtttttgaggatcctgctccacagagaatgctctgcacccgttgatattggagcatatgatcaacaaatatgggaaaaatctgttgaacagagagaaatc

SEQ ID NO: 378841 - DNA, 100 bp, Homo sapiens
gagcagagaactcggcgccgccaaacagcccagctcgcgcttcagcgtcccggcgccgtcgcgccactcctccgagattttttatcaagcagaaatgcat

SEQ ID NO: 378842 - DNA, 75 bp, Homo sapiens
ttgtatcacttcatctgcaaatatttcaataagtacccaaaagctgtcaccactgactaaagaagagaaaactgc

SEQ ID NO: 378843 - DNA, 99 bp, Homo sapiens
tatgaaaagtgaagaaagtgatcataggagaaaaccatttcaggttgggataattcttcactattccacccttgccacagtactatgggtaggagtgac

SEQ ID NO: 378844 - DNA, 111 bp, Homo sapiens
ccggctcctggaacggagccctctgccggctgctcctgctgaccctcgcgggctaccacccgatgccccatgaagtggagatcgcacacaccaagaagctgttccgcagga

SEQ ID NO: 378845 - DNA, 100 bp, Homo sapiens
tgacactgaagctgaggttctagaaagagccaatgataccacttttggactagcagctggcgtctttaccagacgcaagatggctgtcctctctaaggaa

SEQ ID NO: 378846 - DNA, 75 bp, Homo sapiens
atgggcagcccccaccacccgcccaggccagccccagcagcaacagcagcacagcagagtctccttggaggtgac

SEQ ID NO: 378847 - DNA, 98 bp, Homo sapiens
agatcaagatcaagaccggcgtggtgaagcgggaatgaaagctactggttgattttaaagtgcctgggcctcacaggtttggagatgtcccagaataa

SEQ ID NO: 378848 - DNA, 100 bp, Homo sapiens
caccgggacccgcaggagccagaaccactcggcgccgcctggtgcatgggaggggagccgggccaggagtcaacgtggaggtaccaggccaccatgctca

SEQ ID NO: 378849 - DNA, 111 bp, Homo sapiens
aaggagacactgcctctgctgctgcagcatctctggcaagtgaacagagatgctggctatgagtttgacatctgcttcacctcagtgcagaagagagcgatccggaccctc

SEQ ID NO: 378850 - DNA, 83 bp, Homo sapiens
ggaaagcccaggggtacaggaggcctctgggtgaaggcagaggctaacatgggaaagttcaggagccctggaaaggagaagga

SEQ ID NO: 378851 - DNA, 95 bp, Homo sapiens
cttcatcatggaggactacctgcagggttgtcgagctgctctgcaggctacggaaaaacctgcgagccctggtggttgtccatgctacatggtat

SEQ ID NO: 378852 - DNA, 83 bp, Homo sapiens
ccagggccggcttcaggaggcccaagacaccacagaagccctccgagcccaggaggataagatcaatgccctcattaaagcag

SEQ ID NO: 378853 - DNA, 100 bp, Homo sapiens
aattttcgtatacgtggattctagaggggtgacagcgaaaccagaagaatcccagacttcttagagaacccagtgactttttgcaccttaaatctgtgaa

SEQ ID NO: 378854 - DNA, 75 bp, Homo sapiens
tggggtcgacgacgaagacagcggagaggagagcggtgcggaggactgaggctactgcagcactggggtgtcagt

SEQ ID NO: 378855 - DNA, 50 bp, Homo sapiens
ccttcagtgtgctgctcaaaaacagctgggatagatgggcagcagaagat

SEQ ID NO: 378856 - DNA, 75 bp, Homo sapiens
gtagacaccagctccgaaatcaccaccaagatggagtcatcagaacccactgtgaggaagtgacttctccttgag

SEQ ID NO: 378857 - DNA, 101 bp, Homo sapiens
gggacgttattaaaccaatgtttgtcatcaatgagatgcggcagctgtaggtaaaacttgcctactgatcagttacacaaccaatgcatttcctggagaat

SEQ ID NO: 378858 - DNA, 100 bp, Homo sapiens
ttctgaggacagacaggtgctgtctctagcatcacctctcagcacgattttcccgagagttcacaggtactccaaagattcaggtttactcacgtcatcc

SEQ ID NO: 378859 - DNA, 51 bp, Homo sapiens
aggggctccggctggtctgtggtgagcgctgtgtgccacaggacaccggct

SEQ ID NO: 378860 - DNA, 82 bp, Homo sapiens
gggctcttgggcgctgctctgagcttctcaataggtttggcatggacaagatctatgaaggccaagtggaggtgactggtga

SEQ ID NO: 378861 - DNA, 100 bp, Homo sapiens
atggcaatttgcagtattacctgtacaattggaggtgtccaggtacagattctgaaaaggtgtgatccctcacatccacaaatctctgattggaaagaag

SEQ ID NO: 378862 - DNA, 96 bp, Homo sapiens
gcggcgtctggctgctgcggaccccgccgagtcctagcgcctggcctgcgcgccgctgcccgcgccacagtactgcctcctgtgctcgtgccaaga

SEQ ID NO: 378863 - DNA, 89 bp, Homo sapiens
ggaagttatcatgaaaaccctgaatagtaatgaccctgtattcagtggatcagctggcaccacccaaatagataaattggcccatctgg

SEQ ID NO: 378864 - DNA, 98 bp, Homo sapiens
tacgagctgtttctcatctttatactcttccagccccaggatgggtgagttcaacgagaagaagacaacatgtggcaccgtttgcctcaagtacctgc

SEQ ID NO: 378865 - DNA, 89 bp, Homo sapiens
ctgcgcacgctcctctgggtgggggccaagcctgcacgctctgggagggtctcacggaactagtgacggcgacaggcaactatggcaac

SEQ ID NO: 378866 - DNA, 71 bp, Homo sapiens
agaagtgaccccagcaaaagaaaaatattgctgtacctaaattcaagagtcggatggtcagggctgccctt

SEQ ID NO: 378867 - DNA, 87 bp, Homo sapiens
aagaagacctgcacgacgttcatagttgactccacagatccgggtcacagttgcagattatatttctagagctgagtctcagagcag

SEQ ID NO: 378868 - DNA, 100 bp, Homo sapiens
gttgtgaccggagttagatgccagcgcagaagggacgtgagcccagccgaggtaccgctgaagaggaatcaattttggactgaaatgcaactgcagaagc

SEQ ID NO: 378869 - DNA, 51 bp, Homo sapiens
cgctaccccacagcttctgctcatggcaggcagtggttaaaggttcccttc

SEQ ID NO: 378870 - DNA, 75 bp, Homo sapiens
atttgttaaggattccaagtaactcttatttggttaacgtccctaaaacccgccggactttctgtaagaagtgtg

SEQ ID NO: 378871 - DNA, 75 bp, Homo sapiens
acagaaacctcgtctccctgggtcagaaagcaacattgaatgcagaagaaatggcggacttctacaaggaatttt

SEQ ID NO: 378872 - DNA, 100 bp, Homo sapiens
gaatgaagccgcggaccctcacgtgttctaagaacggaagcatctgggctggatggaatttagcatcaagcagagtcccctttctgttcagagtgttgta

SEQ ID NO: 378873 - DNA, 80 bp, Homo sapiens
cctggagaggcactcggacctggccaaagaactgccaactctgaaagataatgatttcattaatgagggccaaaagattt

SEQ ID NO: 378874 - DNA, 76 bp, Homo sapiens
cgcttcctggagttcacgactctgagtgctgatcaatggtggagagaagcggcctgcctctgatatggggaaaaaa

SEQ ID NO: 378875 - DNA, 80 bp, Homo sapiens
aggggccgggctacgagcggctgaggtgcagtagacattgttgcaatcatgatcggcaatctgaaaggcacaaaaattct

SEQ ID NO: 378876 - DNA, 98 bp, Homo sapiens
ccacctggagctgaggaaccggaccccggcagctacccaacatgagtgaagtttcctgcaagaaacgggacgactatttggaatggccagagtatttt

SEQ ID NO: 378877 - DNA, 100 bp, Homo sapiens
agcctcatcacccggctgctggagggcaaaaactgattattccaagtggaagttgccctgttattctgaatacttacttttgtgagaaagttgttgccaa

SEQ ID NO: 378878 - DNA, 76 bp, Homo sapiens
aaaatcaaaagaaacttttgcccttatcagtaacacctgaggactccattattacagtctttgattggtctttttg

SEQ ID NO: 378879 - DNA, 101 bp, Homo sapiens
tggggagcttgctcactatgtgctcctctgacgtgccgttactcagagagggtccttcctggtgctgctcctgagggaatgcttccgagacctgagctggc

SEQ ID NO: 378880 - DNA, 102 bp, Homo sapiens
ctttgggcggggcggagccgagagccacactttcaagtaaaccagcgccgtgccgtccctgcagtgacaccgaggtgctcctagccgtctgcaccagcgact

SEQ ID NO: 378881 - DNA, 98 bp, Homo sapiens
ataaacgaggggctggaacacctcgccaaagcagagaaatagagtgcctgtgaagaaaacggggtattgccctgaggcttatattctgcctcagttgt

SEQ ID NO: 378882 - DNA, 98 bp, Homo sapiens
tcgaggcggacgcgcggctgcgtcagatccatccttttacaatccctgctattattcgtccattcagcgtattgaactatgatccacctcaaagggat

SEQ ID NO: 378883 - DNA, 73 bp, Homo sapiens
acaacaccctcattgctttcttcattttgactacgataaaagtgaacacctacctcttcatgatgcaagccca

SEQ ID NO: 378884 - DNA, 95 bp, Homo sapiens
ttcaccacagtacttcacatcgtcgttcacatgggaatccagactccaaaatgatgcaaatcaacctgactggatttttgaatggaaaaaatgct

SEQ ID NO: 378885 - DNA, 100 bp, Homo sapiens
ctactgtgaccattgaggagctcggtcggattgtttgtgctgaacgaactgtcctcttgcttcagaagccccttttgagtgtggtctctggtgcaagttc

SEQ ID NO: 378886 - DNA, 96 bp, Homo sapiens
ctggtcttcaccaagaacttcgcagctgggagtgtccactcgccttccaccagcatggcaacgtcttcacagtaccgccagctgctcagtgactac

SEQ ID NO: 378887 - DNA, 74 bp, Homo sapiens
atcctggtcatcttctatttccaaagaggccccgtgtgggccgcggcccggccctcaccatggagtccatgttc

SEQ ID NO: 378888 - DNA, 90 bp, Homo sapiens
gcgcaaccgtcggtgggtcggggatcggtcgcctgagagctgtgagccgtgagctttgaggcggtgggatgtgtcagcagaatgtctcct

SEQ ID NO: 378889 - DNA, 100 bp, Homo sapiens
gttgaagagttcaactttcccagaagttgttctaacgctgcctttgctttaaaacagtattacttgcggcactactgcagtcttcagttaagcaacaagt

SEQ ID NO: 378890 - DNA, 75 bp, Homo sapiens
ttttgttggggcgacagctgctcctggctacatagctccagaaagcggcagcccagaatctcgtgttaatgcgat

SEQ ID NO: 378891 - DNA, 51 bp, Homo sapiens
aatggagataatggcagcacccactgcttgaagcctgccctggactgctca

SEQ ID NO: 378892 - DNA, 101 bp, Homo sapiens
aatggaccagaaattaccaaagaagaagaagcctgtcaggagctattgcggtccaaacttttacaaaggtcttcaaagcttcacctttctccaaaggcaga

SEQ ID NO: 378893 - DNA, 90 bp, Homo sapiens
catggggcagaagcttgaaatcctcattaaagatactctcggtcggtgagctggtaaaggttacgaagattaatgtgagtggtcagtggg

SEQ ID NO: 378894 - DNA, 75 bp, Homo sapiens
gtcaagtcgtgttctgatcactactgacttgttgcattcttgttatttaacacgggaaggaggtgacttcgcctg

SEQ ID NO: 378895 - DNA, 101 bp, Homo sapiens
gtaaaacggtagctgctaaaaaggatgaccttgaatgatgccatgaggaacaaggcaaggctgtcaattacaggaagtactggagaaaatggacgtgttat

SEQ ID NO: 378896 - DNA, 83 bp, Homo sapiens
tcgtgcacatccaggctggtcagtgtggcaaccagatcggtgccaagaaacctaaaagctacactgctgctgatgctactctg

SEQ ID NO: 378897 - DNA, 83 bp, Homo sapiens
cctccacctccggcttttgggggatcactgtcctctctcggcagcaggagaaaagccttacagatgctcatgggaagggtgtg

SEQ ID NO: 378898 - DNA, 80 bp, Homo sapiens
tagaaggggaggggagtggaaaggctctcagtgaaaaagtaagactttgaccccgacgcaggcttcagtgattgccgcgg

SEQ ID NO: 378899 - DNA, 51 bp, Homo sapiens
ccggcttccgcatccaagatgaagaggcacctgttaactggtaccaagaaa

SEQ ID NO: 378900 - DNA, 75 bp, Homo sapiens
gaaatgcgcagagcaaacatctttcaaagagtgttctgccagttctggataatccactgtccaagaaggttcgag

SEQ ID NO: 378901 - DNA, 75 bp, Homo sapiens
ggatgaggcacagaatgagggcccggctacagagtcagaggccccgctgtggtcatggtgaatggagaccatcgg

SEQ ID NO: 378902 - DNA, 95 bp, Homo sapiens
atcttgaaaagctgccagaaagtctatccagaagttaaaggagagattgctcgtaaagatgaaaagctgctgtcgtttctaaaagatgtgtatgt

SEQ ID NO: 378903 - DNA, 75 bp, Homo sapiens
ccaaataagctatatactttggttacctatgtacctgttaccactttcaaaaatgatggtggtgctaccccagta

SEQ ID NO: 378904 - DNA, 90 bp, Homo sapiens
caatgatggtgccactattctaaaaaacattggtgttgacaatccagcagctaaagttttagttggaggagatgttaaagtaacccatct

SEQ ID NO: 378905 - DNA, 100 bp, Homo sapiens
gtgtggatcaggagaagtgggcccagcgttcattcagaataatccagaatggctactctgatctatgttgataaggaaaatggagaaccaggcacccgtg

SEQ ID NO: 378906 - DNA, 75 bp, Homo sapiens
attcaactagccaaggaaaaaaagcagagaggagcggggagcaatgcaggggatgttcgtctaaccccagaagac

SEQ ID NO: 378907 - DNA, 75 bp, Homo sapiens
cgagtgtccagtgctgtgaaggcggaacttcgacacctgatgtgtgagaagcggatattggcggcagtgaccagt

SEQ ID NO: 378908 - DNA, 83 bp, Homo sapiens
ggtacttctgccactgctgctccgtggagatcgtcccgcgcctgccgagggtcaccatgaagttcaatcccttcgttacctcg

SEQ ID NO: 378909 - DNA, 100 bp, Homo sapiens
atattttctactaaatgcagaagattaccggtggtcgttccaggggtagaggaggcatgaaggatgaccgtcgggacagatactctgcgggcaaaagggg

SEQ ID NO: 378910 - DNA, 98 bp, Homo sapiens
tggaacccactcggggactctgccttttaccggttttagctaaagaagatactgaggcagctattcaatcaatattatacaaagaaaattctgtaatt

SEQ ID NO: 378911 - DNA, 103 bp, Homo sapiens
aatacatcagcttgtaggagacagagtgattctaccagaaaggaatgaagaacagaaccttcaggaattgagtcacaatgcagacaaatatcaaatgggagat

SEQ ID NO: 378912 - DNA, 90 bp, Homo sapiens
gctgaacgtcattttcacccgcatggaaaaccaagtggactgggctaatgctaatgtcagcagacagattgaggacactgtattatacgg

SEQ ID NO: 378913 - DNA, 83 bp, Homo sapiens
tgagaccctccagcgctgcctggaggagaatcaagagctccgaggtgatgtgtccaatctagatcccaacttctcatttgaag

SEQ ID NO: 378914 - DNA, 82 bp, Homo sapiens
ttggaggggatgtggtttccgttaagctggacaacaggtgtggacactgccagcggctgcagccgacttggaatgacctggg

SEQ ID NO: 378915 - DNA, 73 bp, Homo sapiens
gatcaacttcctcaggcagctatatgaagaggatggagatgaagatgaggaagctgagtcagctacgggcaag

SEQ ID NO: 378916 - DNA, 75 bp, Homo sapiens
gctacatgttgttcaaaaagaatgtcaagtctctatttatgaggtggacaagcaagattgtcgcaaattttgcac

SEQ ID NO: 378917 - DNA, 90 bp, Homo sapiens
ccagaccatcatgaagcacgtgcacccgaccactgccccggatgtgaccagctctcccggggctgaagctgagtgcagatcaggtggccc

SEQ ID NO: 378918 - DNA, 80 bp, Homo sapiens
tgtcataaaataccagtggaggccgacttcttgtatgcatactccacagcacctggagtggagtcggttcttatacaact

SEQ ID NO: 378919 - DNA, 58 bp, Homo sapiens
cctgattgggggacgtcgcgaggatcgggatgctgatgtaccagcaccagagggtgtc

SEQ ID NO: 378920 - DNA, 100 bp, Homo sapiens
aaatccaagaaggggctgtcctcgtcctccagctgttatctggaaggctctgacgcccgctctgcggcttcggtgtttgaacaggccacagtccaggagc

SEQ ID NO: 378921 - DNA, 104 bp, Homo sapiens
caaaagagtctccgcggtggaggtctgcgttgctcttgcttttcctcgctggggtgtacggagtcctaagcagacttaaagccaagaaaataagaagaggaaag

SEQ ID NO: 378922 - DNA, 100 bp, Homo sapiens
ggcaggacaataacactcagatcgaggaatgtatcctgtcaggtataatgtcagtgaatggcaagaaagttcttcatatggatcgaaacccttactacgg

SEQ ID NO: 378923 - DNA, 80 bp, Homo sapiens
ttcaaggccagtacccagcatcaggtcaaaaacctggtgggcaaacgcagaggcgggaacaaactagccctcaagacggg

SEQ ID NO: 378924 - DNA, 100 bp, Homo sapiens
gccgagggtgttcttgacgattaatcaacagttgtgattccaaagaatccctatcctgcctccgatgtgaatactgagaagcccagcatccacagcagca

SEQ ID NO: 378925 - DNA, 100 bp, Homo sapiens
ttgtccagcactggtttgggagctctcatctctatcaagttgtcttctattaattcctcagccgattacacctcaacaagaaggcaactgacaaacagcc

SEQ ID NO: 378926 - DNA, 107 bp, Homo sapiens
ggaaaatgcaagaagactgatggagcaggcttgcaatattaaatgaacacttgtcctgctccttcacctttttcttgcatggagacagcaatgtttgtaccagtgtg

SEQ ID NO: 378927 - DNA, 100 bp, Homo sapiens
atttggagtgtgcgtgcgcgccgagcgacccaacatgagtgaagtttcctgcaagaaacgggacgactatttggaatggccagagtattttatggctgtg

SEQ ID NO: 378928 - DNA, 51 bp, Homo sapiens
ttcgcagtggtcgcttcttctccttggagtggattagaacaagatgacatg

SEQ ID NO: 378929 - DNA, 110 bp, Homo sapiens
ctgatctactccgtaggcttgctcctggcctctgtttttgtcacgatggagacgagagatctggacttctgaacatctaccggaaaagataaaatgtgcaagcccttcag

SEQ ID NO: 378930 - DNA, 100 bp, Homo sapiens
gcatagcagtttttgttggcattaaccacgccagtgctccaaaagttttggaaggtctccatcaagaaaacaaaattattcatcaaaaaatgaaaactgt

SEQ ID NO: 378931 - DNA, 115 bp, Homo sapiens
ggaactagtacatctggaatggctgaatttggcaggaaataatcttaagagtgcctttcaggtggcagtggctgccaatcagcatctcattgtgcaggatctggtgaacatcggg

SEQ ID NO: 378932 - DNA, 83 bp, Homo sapiens
aggcgttcgaggagatcatcctgcagttttaattggttggggtcagataagaagaggagtgacaatcaagccaacagtagatg

SEQ ID NO: 378933 - DNA, 101 bp, Homo sapiens
ctgaacttcctcctggccccgaggacccagggaagcacctctttgagatcagcccagggatgatcatggtgattttactgctgcttgtggctatcgtggtt

SEQ ID NO: 378934 - DNA, 98 bp, Homo sapiens
gtgactattttggcctcgagtttcctgatcacaaaaagatcacggtgggaacctaaattattctgcaagacaaagggaagaaataaaattttcccata

SEQ ID NO: 378935 - DNA, 100 bp, Homo sapiens
ctttgctgtgaggctcgtcttccaggacttcgacctggagccgtcccaggactgtgcaggggactctgtcacagttgataacactgatgctgaggggagg

SEQ ID NO: 378936 - DNA, 50 bp, Homo sapiens
tgaacaccttctccgacagcagcacaccctggtgctgattactatgatta

SEQ ID NO: 378937 - DNA, 82 bp, Homo sapiens
ccggtgtgcctcggcagccttgcgctgctctaatggtccggacttccgtgtaacactctgctccagccaaggtggtgagggc

SEQ ID NO: 378938 - DNA, 100 bp, Homo sapiens
cagagatcgcagcatatcaaaccctgaatcgtgtgcacttacttgggcgagtgggtcaggaccctgtcttgagacaggtggaaggaaaaaatccagtcac

SEQ ID NO: 378939 - DNA, 83 bp, Homo sapiens
accgcaacacgtgcgctggataaacgcttgttaactgggtgagaagccatttaaatgtgatcagtgcagttatgtggcctcta

SEQ ID NO: 378940 - DNA, 50 bp, Homo sapiens
aggaaaacaacttcgagggcagacagaaaaatatggctcaggagactaac

SEQ ID NO: 378941 - DNA, 75 bp, Homo sapiens
ggccctggctgcgctgctggcctttgtgagcctcagcctgcagttctgccacggcatatgcctccaaggacgggg

SEQ ID NO: 378942 - DNA, 75 bp, Homo sapiens
gaggacaggccgactgcagacaggcgctgcccctgctggcctctgcctgcccagcaggaaggagcgccccacctc

SEQ ID NO: 378943 - DNA, 100 bp, Homo sapiens
caaagacacttggttaccaagaagccatacatgaaatgtctttcctccaggacccaagtttcttcaccatggggatgtggtccattggtgcaggagccct

SEQ ID NO: 378944 - DNA, 83 bp, Homo sapiens
gggaggctgattgagaggcgaagtttcactgttacatgccttgaagtgatgaggaggtttctgttactatatgctacacagca

SEQ ID NO: 378945 - DNA, 83 bp, Homo sapiens
acaagaagaagagaaccctgcggaggagaccggcgaggagaagcagatgtcatgtggcctgtgttttggaccgtggttcgtac

SEQ ID NO: 378946 - DNA, 90 bp, Homo sapiens
gctgcttcaggaggacctgcaggaggacgcagacggatgtgtaatggataggtaacagagaagacctcgtcccttcctagtcagggcatc

SEQ ID NO: 378947 - DNA, 76 bp, Homo sapiens
atcccaacgaagcagcccatgcggtgactgaacagcagcacagtcagcagcctccattcaagagttgattcattag

SEQ ID NO: 378948 - DNA, 100 bp, Homo sapiens
tccaaacacagttctctctactccattcagcagcagtggacgtcagctcagcgaggtcttcatccagctgccctcgcgaaaggagctgcccgagtactac

SEQ ID NO: 378949 - DNA, 98 bp, Homo sapiens
tggtttatgcaatgactttggtgaacaaggtctgaatttcctgctgctgttcacaaagatgctttttatctttaactttttgttttccccacttccga

SEQ ID NO: 378950 - DNA, 98 bp, Homo sapiens
gcactagtgtctagaaggcactaaggtattctaccttgtaaatactgttatttgtatatactgtaaatgatgacatcggtgggcactaaccgagcccg

SEQ ID NO: 378951 - DNA, 80 bp, Homo sapiens
cgccgcgtcgccagaccgccggctgcgccggagctgggggccttagaaactaattctgaagcaagcccttatagttgtgc

SEQ ID NO: 378952 - DNA, 83 bp, Homo sapiens
agagggcttggtggatgacaaggaggcctgagtagaccgcaggtacttttaggttgaaatacgcccctccagcagaaagtctg

SEQ ID NO: 378953 - DNA, 82 bp, Homo sapiens
ggatgagtctcaagatggacaaccgggatgttgcagcaatgcatgagagctggaagtggaagagcttacaagatcatcatcg

SEQ ID NO: 378954 - DNA, 80 bp, Homo sapiens
ttatcatgcaccaattgtaaaattctggtttaacacggattgcatgtcgtggcaaaaacatggaagtgagacttattttt

SEQ ID NO: 378955 - DNA, 50 bp, Homo sapiens
cagggtcacagctctcacccaggatgatggcttggaaaaaagtccaatga

SEQ ID NO: 378956 - DNA, 100 bp, Homo sapiens
catgcctattgtttatactcccactgtgggtctggcttgccaacaatatagtttggtgtttcggaagccaaggtatgtttaccacagttcgaaatggatg

SEQ ID NO: 378957 - DNA, 74 bp, Homo sapiens
cgaaaaatgatcaactattgaccatataggttgggggccgtcccgctcctaaggcaggaagatggtggccgcaa

SEQ ID NO: 378958 - DNA, 75 bp, Homo sapiens
tgccaatctatgggccgctgtcagggctcgaggatgccagtttttagggccagaaaaaaccgggaagatcctgac

SEQ ID NO: 378959 - DNA, 75 bp, Homo sapiens
ccagttccaaagtgtcttaaagatatgaagcaacagcatgtcatagaaaccttgattggcaaaaagcaacagata

SEQ ID NO: 378960 - DNA, 97 bp, Homo sapiens
aaagtggcgctttctccgccccagggtccctgatgggcctgggtgacattatctcacagcagctggtggagaggcggggtctgcaggaacaccagag

SEQ ID NO: 378961 - DNA, 75 bp, Homo sapiens
gcagagtgctgatgtgaaaaataccacgacaaaaccaccctagtggagccgccaccaaaatgcagattttcgtga

SEQ ID NO: 378962 - DNA, 88 bp, Homo sapiens
cagctgcctcagttcttagcgcagggaagatggagagttggaagaaggtgaattggaagatgatggggcagaggagacccaggatacc

SEQ ID NO: 378963 - DNA, 75 bp, Homo sapiens
cacccgcttaacatcctacctccagtcccagttaaaaagaagctggcagggcggagatgctggaccacgccgtcc

SEQ ID NO: 378964 - DNA, 100 bp, Homo sapiens
ttctcttcattttgcacaagtccgtactgaacggatgctgttagaccttctacttgaagcaaatatactgccatcagtgagaattatcagacaatgtcgg

SEQ ID NO: 378965 - DNA, 75 bp, Homo sapiens
cccggccccgcccgcgccggaagagccacgccgatggtgggcagtggtggtgctggctgcgttcccctccctagg

SEQ ID NO: 378966 - DNA, 75 bp, Homo sapiens
ttggatgaaggagcttcaaacccaaagaggacacatgacggaagtgtgtatttttgggccactccacggcaggtc

SEQ ID NO: 378967 - DNA, 82 bp, Homo sapiens
agagcctaactgaaaggaagagggagcagagcaagaaaaaaaggaagacgatgacttcagattgacttgatgcacaacatca

SEQ ID NO: 378968 - DNA, 75 bp, Homo sapiens
cggaccggctggttccccagcaactacgtgcgcgaggtcaaggccagcggtgtacgaagccatcgacagcagaga

SEQ ID NO: 378969 - DNA, 90 bp, Homo sapiens
cccaggaactggggacctacggggccagctcttccgaggctccagcctgcttttccgccgggtgtcatcaggatcatgctttgccctgga

SEQ ID NO: 378970 - DNA, 83 bp, Homo sapiens
cgctgcctacggaggtggcagccatctccttctcgggacggaagaagtctatagtggctgtggagcccaggagtcttattcaa

SEQ ID NO: 378971 - DNA, 90 bp, Homo sapiens
cccgcctccccggccacgcgagcgggaacagtctcctccactcggagcggaatccatgtcagtgaacgcctcacatggaaaaggattttc

SEQ ID NO: 378972 - DNA, 100 bp, Homo sapiens
tttgcctactggctgggaagaagcatatacttttgaaggtgcaagatactatataaaaacttggtcctgatgtctgaccatggagatgtgagcctcccgc

SEQ ID NO: 378973 - DNA, 75 bp, Homo sapiens
catgagcgaaagctacacgctggaggacagtcattttgtttactcattcagccctgttgcaggtcccaataaact

SEQ ID NO: 378974 - DNA, 82 bp, Homo sapiens
cggaggtagtcaccgccacatccaggactccttccacagagaacccagcttagactagaaagtctagaagacacacacataa

SEQ ID NO: 378975 - DNA, 100 bp, Homo sapiens
gacagttagtcacccacctacatgttgaggattaagcatgaaaatattgttgccctggaagacatttatgaaagcccaaatcacctgtacttggtcatgc

SEQ ID NO: 378976 - DNA, 100 bp, Homo sapiens
ggcaccgtcaccgaggcgccgcgcacagtcaagaagatctcccttgagtttagaaatctggctgagaaataccaaacagtgattgccgacatttgccgga

SEQ ID NO: 378977 - DNA, 101 bp, Homo sapiens
aggaaatcaccctgcttgagcaaaggaaaactcctctccatgcagccgccttcacagaccatgtagagtgtttacagctgctgctcagccataatgctcaa

SEQ ID NO: 378978 - DNA, 98 bp, Homo sapiens
aaaaacggccaagaggcagacctaggaaatggaggtccagttccggccgtaccgcacagacgacttcatcacgcgcctgtactatgagacgcccaggt

SEQ ID NO: 378979 - DNA, 51 bp, Homo sapiens
gagcgccccagcgcgggtccggggtcgagagggtgtctggctgttttgggg

SEQ ID NO: 378980 - DNA, 74 bp, Homo sapiens
gcaaggagaaggcggaagcacagcaggtggtccattatggctgacatgcaaaatctggtagaaagattggagag

SEQ ID NO: 378981 - DNA, 100 bp, Homo sapiens
ctgctcgcggccaccgcaccacaggccccaggttgctgattgttggaggttcttttggtcttcgtgagttttctcaaatccgatatgatgctgtgaagag

SEQ ID NO: 378982 - DNA, 83 bp, Homo sapiens
ctcgcggcgacggcggcggtggcggcttggacgactcggagagccggttttaaaatcaaagatgggaaaatcggagaaaattg

SEQ ID NO: 378983 - DNA, 100 bp, Homo sapiens
ccttccagcacggcatctgctttgaggccaagctgggacgacatatatctttagcaaaggtggtggacaaatcacgtataagtggcctcctaatgaccga

SEQ ID NO: 378984 - DNA, 78 bp, Homo sapiens
cctgtccctcacatccgatgcaccctttttgtcagattatcaggatgaggactggtataggggatacctcataaagca

SEQ ID NO: 378985 - DNA, 90 bp, Homo sapiens
tccgggacatcaggaaagcagtgctgatgataaggtgctgtgctgtggctttcattgagaagctagacgcccagtctttgaatctaagtc

SEQ ID NO: 378986 - DNA, 90 bp, Homo sapiens
aatgggaagctatttcctttgcctaagctgctaacctgtgccaaacctccacggctgctacgacacctgtgactctcactactccattca

SEQ ID NO: 378987 - DNA, 83 bp, Homo sapiens
tgggaacccaggccccgccgaggcggccaggccctgggctgcatcttgtacctgctgtgcttccggcagcacccttttgagga

SEQ ID NO: 378988 - DNA, 50 bp, Homo sapiens
gtggagtgtaggtcatatcgccgcgtactatactggcaattgctggagaa

SEQ ID NO: 378989 - DNA, 100 bp, Homo sapiens
tttgttctctgcctcttgtattctagtaatccagtccctcatagcactggtgaatgacccccagcctgagcacccgcttcgggctgacctagctgaagaa

SEQ ID NO: 378990 - DNA, 75 bp, Homo sapiens
agacagcatatttgagtcatttccttcgtacccacagtgcttcatgagagaacccttaggagaaatcttgagagt

SEQ ID NO: 378991 - DNA, 83 bp, Homo sapiens
atcggcttctgcctggtgctctgcgtcctcatcgggcttatgttcgagggatgtttcagcagcccctgagaaggaagaggagg

SEQ ID NO: 378992 - DNA, 51 bp, Homo sapiens
tcagagttctgagacctgctctggaagatcctgaactttcaactgtttgcc

SEQ ID NO: 378993 - DNA, 90 bp, Homo sapiens
gcacctcagccgcctcctagcggcgcggcgctcgctcctacggcatcaacttctaactcatctcgccaggagaggcctccagtgaaaccc

SEQ ID NO: 378994 - DNA, 50 bp, Homo sapiens
gcaccttcaaggccaaactatgcagctccagaaactaaaacgatcacttt

SEQ ID NO: 378995 - DNA, 76 bp, Homo sapiens
ccggaagttgccatcctcagcctccaccttcctctccccagaaatgggacgtcggtcatcagatactgaagaagaa

SEQ ID NO: 378996 - DNA, 100 bp, Homo sapiens
ccataagccattgagatccacatggagccaactctctgcgcatgaagaggaaccacctcagaatatgaaaccacaatcaggaaacgataagccattatca

SEQ ID NO: 378997 - DNA, 96 bp, Homo sapiens
cctgcatgctaactgggtgttgcacagagatttggctgttttgacagaatacaaattaaaagcaattgaatatgtgcatggatacttttctagtga

SEQ ID NO: 378998 - DNA, 75 bp, Homo sapiens
cccgcgtgggcgtcccggagcctggccagctgcacttcaaccaggtagctacagcaagctgggtagcaggcagat

SEQ ID NO: 378999 - DNA, 100 bp, Homo sapiens
tgctagacaccggaccaaaatgaggcgtaagaaacgctttgcaaagcaagagactaaggtgtcagtatgttcttcaagctgctctgctcctgggcccaag

SEQ ID NO: 379000 - DNA, 82 bp, Homo sapiens
gtctctggccggccttggtgcggcgagccgagcgaggcagctctgagccgcgcgttggaatcgaagcctcttaaaatggcag

SEQ ID NO: 379001 - DNA, 75 bp, Homo sapiens
ctgagatgaggaggcgtcgcgcgcgcctgtagctcgcgggcctcgcagatttctcactatgtgcaatagacactt

SEQ ID NO: 379002 - DNA, 50 bp, Homo sapiens
caggcgtgtactgcctatgtgtgctgtaaaagtcttgcagtgaaaaaccc

SEQ ID NO: 379003 - DNA, 50 bp, Homo sapiens
ggccgtggccgtggggagaccgtctgtgccatggataacagaggctttca

SEQ ID NO: 379004 - DNA, 83 bp, Homo sapiens
gctccctgcagtaccctttaacggggatgttcgtctaaccccagaagactttgctagagctcagaagtactgcaaatatgctg

SEQ ID NO: 379005 - DNA, 89 bp, Homo sapiens
gaagtacgaggcggacatgtgcgtgagaaaagcagcatctgttatagcaaaatacccacacaaaataaagagtggagctgaagctaaga

SEQ ID NO: 379006 - DNA, 90 bp, Homo sapiens
gttgagcactacagacctcacagtgccaaatggagctggaagcagtccagtggatatgagggaaggcaccattggagatatggctatcct

SEQ ID NO: 379007 - DNA, 75 bp, Homo sapiens
gtcggatttcaccacaagaagggctgccagcatgtattccactgatgagaacctgatcctttccccactcctggg

SEQ ID NO: 379008 - DNA, 97 bp, Homo sapiens
tgatcttcgacaacgtttccctgaaattccagagggcgtggtgtctcagtgcatgttacagtcttatgatgtaatcagcgcgatttcacttcctgaa

SEQ ID NO: 379009 - DNA, 88 bp, Homo sapiens
ataagctgagcagagccctgcgatactattatgacaagactaactttgaataattggacctgcagattgactatccaccatttgaaaa

SEQ ID NO: 379010 - DNA, 83 bp, Homo sapiens
caccgtggagctccgccgccccgaaactttcaccgcgagcggcaaccatgtccaagggacctgcagttggtattgatcttggc

SEQ ID NO: 379011 - DNA, 78 bp, Homo sapiens
gggaccacatcagtaattattcttgttccagggtcacccccgagaggacaacaggcatctggaagtgctctctcgcca

SEQ ID NO: 379012 - DNA, 99 bp, Homo sapiens
gaaaagatgaagcttccaaaatcaccatttggaaggaacagtacagagttgtacaggaggaaaaccaggtatttcaggacagccaggagggggcgcaca

SEQ ID NO: 379013 - DNA, 100 bp, Homo sapiens
gccgtacgcggtgctgcgagggcagaacctgggtatttcagtgtctgtagacaagatggaatcatctccatttaatagacggcaatggacctcactatca

SEQ ID NO: 379014 - DNA, 121 bp, Homo sapiens
cacgtattcccggcagtggtggcggcggcggcggcggcgcccgcgggcaggagaagagatcaactttgggaaacttatcacaaagccttcagaaggaacaactttaagggtagaagatctt

SEQ ID NO: 379015 - DNA, 100 bp, Homo sapiens
ctggttaccagaaggacttctttgcagggccagtggtttctgtcagattttcgccgagacaaagcatggaggacacaagaatgggaggaaaggcggactc

SEQ ID NO: 379016 - DNA, 75 bp, Homo sapiens
tgtgcatagcagtagctgttgtttgggctgtgtttcgaaatgaagacagtccttcagctgtggaagaggatgaag

SEQ ID NO: 379017 - DNA, 75 bp, Homo sapiens
gcccgggagggccggggccgcgctcagaaactggcgatggaatatgagaggagccctctggaaagaaaaggacag

SEQ ID NO: 379018 - DNA, 87 bp, Homo sapiens
gaaatattggttcagcccctgaaagtttccaacaggaaatcatacggtctggaaaatcccgaagcagaagcccgtattcatctaggc

SEQ ID NO: 379019 - DNA, 101 bp, Homo sapiens
ctcttctgatagtagcagtgacagtggtatccgttacagcactgatgtgagtgtagatgaagtaaaagctttggcttctctgatgacatacaagtgtgcag

SEQ ID NO: 379020 - DNA, 49 bp, Homo sapiens
ggatgctatagcattgtcagtgtgtggcagagaagacacagcttctgaa

SEQ ID NO: 379021 - DNA, 100 bp, Homo sapiens
cgactcgagggtgacgctcgctccgctcgtcccgctcgtcatggcctacccgggatacggaggagggatctagaaatggccattgcctactggaacttag

SEQ ID NO: 379022 - DNA, 75 bp, Homo sapiens
ctgtcttcggtggactccttcggcagtccacccaccgccgccgcctcccagtccttgctggtgcagacgaagcgg

SEQ ID NO: 379023 - DNA, 100 bp, Homo sapiens
aggaggttttcaggaccaaaattgtggaaaagtcactctggacggggaggtttactgcatcgacgcgcggttctacgggaacgtcagccggttcatcaac

SEQ ID NO: 379024 - DNA, 101 bp, Homo sapiens
cacatatacaacacgattcttctaatggatgggaacatgggcaatatggtgaaattgaagattgtcagattgatgattcctcacttcatgcagtaattaca

SEQ ID NO: 379025 - DNA, 75 bp, Homo sapiens
tccggagggggaaaaaatcccaaggtctgcaaagatgagtgaccgaggaggtggcgttcctttgaggaaaattga

SEQ ID NO: 379026 - DNA, 90 bp, Homo sapiens
gcagatgcatgagtgagcccagctgagagcagggcagagcggcttgggtaaatccaccttaatcaacaccctcttcaaatccaaaatcag

SEQ ID NO: 379027 - DNA, 90 bp, Homo sapiens
cttcctgtctcaacgatacctattttctagtgctgagatcctgagacaatgtctgagggaaaaggccataccaatgctggagatgcaata

SEQ ID NO: 379028 - DNA, 100 bp, Homo sapiens
cctgtcttcagatcttcacagcacagttcctgggaaggtggagccaccagcctctccttgatacggagttgccaccactgaaacttatgcattcattttg

SEQ ID NO: 379029 - DNA, 105 bp, Homo sapiens
gaagacgcggggaagaggaggcggaaaaggacgcaaagttctccggcgagcaattctgtggtgttcttggtcacacatttatggagtttctgaagggcagtggag

SEQ ID NO: 379030 - DNA, 51 bp, Homo sapiens
ggaaaatgagggagttcaactctggcatctccactgaatttacctcaagct

SEQ ID NO: 379031 - DNA, 99 bp, Homo sapiens
tgaagatgcgcgccgtcttccccgaaggggacggcaaaacagaacagaaaggcggagataaaaagaggggtgttaaaagaccacgagaagatcatggcc

SEQ ID NO: 379032 - DNA, 76 bp, Homo sapiens
catccacgcacctgcagctctgctgagagagtgcaagccgtggggaacaagatcttgatatttggcctctttgaag

SEQ ID NO: 379033 - DNA, 75 bp, Homo sapiens
agaaaaggcctaagaattttggcattggaccgtataatagacgctggccccaaaggaaactactctcgatttatg

SEQ ID NO: 379034 - DNA, 85 bp, Homo sapiens
ggcatggggctgtccatgggcaccatgatctgtggctgggataagagaggccctgaactgataaatttcaaacggaagagagtgg

SEQ ID NO: 379035 - DNA, 87 bp, Homo sapiens
tcacacaaaaagaaatccggaccctggaggttatgaagacagtatggagtttccagaccatagtagacatttgctacagtgtctgag

SEQ ID NO: 379036 - DNA, 100 bp, Homo sapiens
ggacgccactacagttcatcaacatcaactacgtccctctgaagtctctggcatctctatcccctatgaggcaccacgtaagacctcctgcccttagctc

SEQ ID NO: 379037 - DNA, 83 bp, Homo sapiens
ctttatttctcgtcggcggcgccctgcaccgcgcctcgcaaagcttcaacggaccacaccaaaatgccatctcaaatggaaca

SEQ ID NO: 379038 - DNA, 82 bp, Homo sapiens
tgcggtcaagatgctgcaaaacgtgactccccacaataagtgtggacactgccagcggctgcagccgacttggaatgacctg

SEQ ID NO: 379039 - DNA, 97 bp, Homo sapiens
gaaatccaaaggtgaatcttttggttggtgattttgatgatagccacaaagcaagcagggtcccctcttgctgttggctgcacatcaggaaggctgt

SEQ ID NO: 379040 - DNA, 80 bp, Homo sapiens
gcgtagagtcgctggagcgggcggagctgtgcgagagcctcctcacttgggctgacccaccccaatgtggtggctgcccg

SEQ ID NO: 379041 - DNA, 50 bp, Homo sapiens
caggaatgggacctcgagtcactgtggacttgtcttacaaggaccggcac

SEQ ID NO: 379042 - DNA, 90 bp, Homo sapiens
ctttaatcactgaccatcccaatatacagagtggcagaatttagtgacatttggaagcttttcaaacatggttccctgtagtcatccata

SEQ ID NO: 379043 - DNA, 50 bp, Homo sapiens
cttcacctgtcggcttggagagatccagagtccggcagcgtcttctcttg

SEQ ID NO: 379044 - DNA, 100 bp, Homo sapiens
gggtggagtgtaggtcatatcgccgcgggaagaaacccttttttcttggagccagcaataattatcacaattactgatgggagcaagttgactaccacca

SEQ ID NO: 379045 - DNA, 75 bp, Homo sapiens
tcacatgtggcaaatgtaaaaagaagaattgcacttacacacagggatgagtgccacctctcgtaaacggaaaga

SEQ ID NO: 379046 - DNA, 75 bp, Homo sapiens
ttcgtgtgagaaaactgcttgatcttcaggccaaaatggagttatggtacagcacctgtaaatcttaacatcaag

SEQ ID NO: 379047 - DNA, 100 bp, Homo sapiens
gctgcttgatgttgctggaggcacaggtgaaatgacaatggatgctctgttggctcgattgaaacttctgaatccagatgaccttagagaagaaatcgtc

SEQ ID NO: 379048 - DNA, 100 bp, Homo sapiens
ctctgcctagcaagcaagttgcgactggccacaaggcaggcctcttccgaccaagatcggcttcaccaccgaccctcggatggcccgctcctccccctac

SEQ ID NO: 379049 - DNA, 90 bp, Homo sapiens
gtgaacctgcatggccgctctgctctctttggggtcttcaccacccagaccaatagacatctgcatctcctgtgggagcctcaatgttac

SEQ ID NO: 379050 - DNA, 100 bp, Homo sapiens
aaccataaagacatcttaattgggcacgaaagagggcatggactggaactcccaatacccctgacatgggctgagtcaacgtggtcatgaacatgtgaca

SEQ ID NO: 379051 - DNA, 82 bp, Homo sapiens
ctcctctccgcgcgttcttggggattttttatcaagcagaaatgcatcgaacaacgagaatcaagatcactgagctaaatcc

SEQ ID NO: 379052 - DNA, 51 bp, Homo sapiens
ggcagctcccggggcgtctggaggcgtagaggctccggtgttttttgtgcc

SEQ ID NO: 379053 - DNA, 75 bp, Homo sapiens
aacttctctgtctgctcaacagtcaggctctgtgtgctccgggatggagcaggtgtgcagagggtgagaacccag

SEQ ID NO: 379054 - DNA, 100 bp, Homo sapiens
gacgccagtaagaacgaggaggatgaaggcttccgggaggatttccattataatgacacagctgggtacttcattattggagggagcaggtatgtggctg

SEQ ID NO: 379055 - DNA, 90 bp, Homo sapiens
agagtcggagagctccagtgagtccagctcctctgacagcgaagactccgaaacaggtccagtggttcttcagcccatgacagatgagaa

SEQ ID NO: 379056 - DNA, 100 bp, Homo sapiens
gacaaaggaaactgaaaacatgaggaaaaagaggagaagaatcaaacttcctgaatctgatagcagtgaagatgaagccatcaggaaatatggccgagat

SEQ ID NO: 379057 - DNA, 100 bp, Homo sapiens
aaacaacatatctaaacaaatatacttaagtgaaaatccagagctgtcggaaaaggtaacagaagatggaactcgaaatcccaatgaaaaacctacccag

SEQ ID NO: 379058 - DNA, 75 bp, Homo sapiens
agcctcccgccgcgctccctccgccgccgcgcaacgtggggacgccctactacatgtcaccggagaggatccatg

SEQ ID NO: 379059 - DNA, 100 bp, Homo sapiens
tgcaactcttccttccacggtagcagtaacctctgcaaatgtcatggatgttattgcaagacagaatttcactgaacccactgctattcaagctcaggga

SEQ ID NO: 379060 - DNA, 49 bp, Homo sapiens
cgagaacctgggccaaggcgacaaggttctgcggcatgaggaatttgaa

SEQ ID NO: 379061 - DNA, 100 bp, Homo sapiens
tagctaattaaaacatttttcagggacgtagccatccagaggattttttatcaagcagaaatgcatcgaacaacgagaatcaagatcactgagctaaatc

SEQ ID NO: 379062 - DNA, 100 bp, Homo sapiens
atggtgcccactctggtctcgaactcctgagctcaagcaatcctccctccttggccttccaaagtgcaggaaaatgtttataggaggccttagctgggac

SEQ ID NO: 379063 - DNA, 100 bp, Homo sapiens
ccctctaagatacccaagatatggaactctagccaagaaccacggcctacactctccaacacaatccagaggccacaactaggtcccacagctaatttac

SEQ ID NO: 379064 - DNA, 75 bp, Homo sapiens
tggcattttcggagcgtttcaaagaggatctataagtaccaggcccacggctatgccttctcgggtgtggaggag

SEQ ID NO: 379065 - DNA, 100 bp, Homo sapiens
agcgtttatgttatctgatgatgagatctacagtctaagaattattgacctgattgatagagaacaggtggattctgagacccattgtcatgcagaaagg

SEQ ID NO: 379066 - DNA, 100 bp, Homo sapiens
atatgaagcaacatgagatggtggatgaacccacagatcctgctcacactaaaatatgaaccacaaacacacagagaaacaacctgttcaccactcctgg

SEQ ID NO: 379067 - DNA, 75 bp, Homo sapiens
ctccttcacagctataccaaacttaaagggtggcgctccaaccccctttgaccggaactatgggaccaagctggg

SEQ ID NO: 379068 - DNA, 75 bp, Homo sapiens
gtcgccgcgggatttggagctgcctagcctcgcggtcgcaagacactaagggcgactaccagaaagcgctgctgt

SEQ ID NO: 379069 - DNA, 83 bp, Homo sapiens
ctcctactccataaagacttcaaggtcaaagaattgactgtagatccaactgctgctggtgatgttcgtccaataatgcacca

SEQ ID NO: 379070 - DNA, 74 bp, Homo sapiens
tgagttggagaatctggtccttaaggatatgtcagatgatcctgataacttaagtgactctctcttttccggtg

SEQ ID NO: 379071 - DNA, 50 bp, Homo sapiens
ggggccgagggagcccgcactggaggtcatcaagagagagggcacaggta

SEQ ID NO: 379072 - DNA, 100 bp, Homo sapiens
gggaggcgcggcgagggcgccagtctattgcgtctgcagacatggatttcaaccagctggaggcattcttgactgctcaaaccaaaaagcaaggtgggat

SEQ ID NO: 379073 - DNA, 89 bp, Homo sapiens
atcggattcctcagctacgaggaggcgctgaggagaggtagctacagcaagctgggtagcaggcagatccaaaggatatcatgaagttt

SEQ ID NO: 379074 - DNA, 100 bp, Homo sapiens
tggcaatctgaagagatacctgaagtctgaacctatcccagagagcaatgatgggcctgtgaaggtagaggaaaaggcagggggcgaataagatctgaag

SEQ ID NO: 379075 - DNA, 82 bp, Homo sapiens
ctggattctgaggaccagcagatggccagtcacgagaacccaggcataatggttatgaaagcttctgtagatgatgacgatt

SEQ ID NO: 379076 - DNA, 121 bp, Homo sapiens
gccagctgccgaggcgttcggtcctgctgttgcggccgctgccccagggctgcggggacgacaatgcagatcttcgtgaagactctgactggtaagaccatcaccctcgaggttgagccca

SEQ ID NO: 379077 - DNA, 51 bp, Homo sapiens
tgatccagaacttgcagcaacaatagctattgacctgaaaagtggttctgg

SEQ ID NO: 379078 - DNA, 98 bp, Homo sapiens
attgataacaccctgtaacagctgagggtaaccttaaggccggatgtttacggggagaaaggcctggaaattgtctacaacgtctctgataacagaac

SEQ ID NO: 379079 - DNA, 76 bp, Homo sapiens
cgggcaacgcatccatgtggctcgctggacacccctacgggtatcaaaaagccattcacagaggtcatccgagcca

SEQ ID NO: 379080 - DNA, 74 bp, Homo sapiens
cggcggcggcgccgggcccgggggtggtgacagcaggtctgagatcttcagtttagatcttggaggcatatcaa

SEQ ID NO: 379081 - DNA, 105 bp, Homo sapiens
gccacagcggcttcgagctctcctctgatggcaggacctgccaagggggatatgagactttctactcggaatatcctgagtgttgcgtggatgtaaaacccattt

SEQ ID NO: 379082 - DNA, 74 bp, Homo sapiens
ggaagagtcaggggcacagagagatggagagagacctagttaggactctagtatgggattcctttctacctaca

SEQ ID NO: 379083 - DNA, 75 bp, Homo sapiens
gctgctgaagatctggaagacgcgctcctgcgccgacccctttgctgatgcaagtaagggtgatgacctgcttcc

SEQ ID NO: 379084 - DNA, 82 bp, Homo sapiens
cgacaagccgctggcagccgcggatctcaccgccgctcaggagctccacgcaggagatcggtgaggagctgatcaacggagt

SEQ ID NO: 379085 - DNA, 100 bp, Homo sapiens
cgccgagtggggctggaaacagacccggcgcccagcggtagccctccttgcgcctccgattcccagatctaattatcatggacctgcgacagtttcttat

SEQ ID NO: 379086 - DNA, 75 bp, Homo sapiens
tgagcttctaactcattgtattcctcctgagataataatgaaggtggaagtgggctaactggagctaaacttcag

SEQ ID NO: 379087 - DNA, 80 bp, Homo sapiens
ccgtatctcctcagaggatcaggcgtgtgtccagttctgaagactcagcctggatttcaaaactgaacactgaagtggtt

SEQ ID NO: 379088 - DNA, 74 bp, Homo sapiens
cagcgctcattgggaatttagttaaggtcatcatcagatttgaaatatttaaagtggatacaaaactatttcag

SEQ ID NO: 379089 - DNA, 100 bp, Homo sapiens
catagacctaatgcatgataagaataatgaaatccgaaaggtctgtgataatacattagatattatagcgctcgcaaaggatctccttcatccctctcca

SEQ ID NO: 379090 - DNA, 128 bp, Homo sapiens
cagggtctggagagtcaccgcggcggcgccgggtggtggttaaaccatgttaaggaggattttacagagggaaacccagcgtttgctggcagaaccagttcctggcatcaaagccgaaccagatgaga

SEQ ID NO: 379091 - DNA, 83 bp, Homo sapiens
cgtccagacgccccaaacaaacaagtgcctggtgaagaatgtgatgggatcactagcatgtctgcggagagcggccctgggac

SEQ ID NO: 379092 - DNA, 74 bp, Homo sapiens
ggacgaacgtgttgtgcctgctgaggatggccggaggctcgccgacgaccttgcccaagaagatgaaaggattg

SEQ ID NO: 379093 - DNA, 104 bp, Homo sapiens
atcttggacttctcagcctccagaactattaaaactttggaacagactaaagccattgaagatctaaacaaatccagagaccaactggagaagatgaaggagaa

SEQ ID NO: 379094 - DNA, 75 bp, Homo sapiens
tgttgatggtggtggtgctggtcatcaatgttactcaggtagagctcaaagttatgaagtttcaggatgaattgg

SEQ ID NO: 379095 - DNA, 100 bp, Homo sapiens
tcgccttggcgctttcttcctggagcggagcgcaggcgccgagactgacaacgcggtcccacagctgtatgcaggagctattcttgaagtttgtggatga

SEQ ID NO: 379096 - DNA, 75 bp, Homo sapiens
gagctccagccgaaggagaaggggggtcttccccagggaggtcctgaactacacagctgagaacatctgtaagtg

SEQ ID NO: 379097 - DNA, 74 bp, Homo sapiens
ccagaggagggtaaaaggctgagaagcttaagggaggagtctgctactagtcttatcagctcttaaaaacagaa

SEQ ID NO: 379098 - DNA, 100 bp, Homo sapiens
ggctgtgacgcgcgcgccggagcggggtccgatggttctcgaaggcccgcggcgccccgtgctgcaggtaaagtgaacagagttatctgtgacattccat

SEQ ID NO: 379099 - DNA, 78 bp, Homo sapiens
cggcggccgcagctgccacaaaccagtatgagcccagaggacctggtcggcccttgtaccaaagaagaatctcatcta

SEQ ID NO: 379100 - DNA, 51 bp, Homo sapiens
agtggaatatgccattgaggctatcaagcccattccagatgatgggattta

SEQ ID NO: 379101 - DNA, 83 bp, Homo sapiens
cggagcgccccttcgcgtcccctgcaccatgagctggggcaccgagctctggatgatatcatcaagttgaatcgaaaggaagg

SEQ ID NO: 379102 - DNA, 100 bp, Homo sapiens
ctaaatgcaggaaccggcggagggagctgaccgaccgactccaggcggtgaggtgataaagcacggggacctgagatgcgtgcgcgatgaaggaatgccc

SEQ ID NO: 379103 - DNA, 100 bp, Homo sapiens
ctgctcaactccccacaccccctggtgtggcatctgaagacagagagacttgccactggggtctccagactgtttttgtgcgcgtcccgggacgactggc

SEQ ID NO: 379104 - DNA, 80 bp, Homo sapiens
tttcgccctgggttacaaggctgcggacttccagctgcacacacatgttttggtgccctggttgtcagatgttggaaagc

SEQ ID NO: 379105 - DNA, 87 bp, Homo sapiens
gatggtgaaattcctcaatgattccattgtggaccctgtagattcggaggtagttcgaggacactacaaaggtcagcaaattggcaa

SEQ ID NO: 379106 - DNA, 98 bp, Homo sapiens
ggaggcagagcggctgccatgccgtgcttcctcaaagactgggaaatgcacgtccacttcaaagtccacggcacagggaagaagaacctccatggaga

SEQ ID NO: 379107 - DNA, 75 bp, Homo sapiens
ctaccccttgcacacctaccctaaggcttattgtgtaacagaacctggagcaggctctgatgtagctggtataaa

SEQ ID NO: 379108 - DNA, 85 bp, Homo sapiens
cgctgagcttggcgcacgggccgaccaggtgacttaagagattaaaattaatttggttgctgttggttctgaacaaataatgagt

SEQ ID NO: 379109 - DNA, 85 bp, Homo sapiens
agccgggacagacctctgctgccgccgcccccacatggttgaaaaagaaggttatctgcaaaaagctaaaattgcagatggagga

SEQ ID NO: 379110 - DNA, 82 bp, Homo sapiens
tgccagcagtgcctgtctaatgttaatactccagtgaaagaacagtgtttcctgaggttataggcgggtgtttgaggagtac

SEQ ID NO: 379111 - DNA, 51 bp, Homo sapiens
atccagtgactgtcaggtcgatcatatatttctacctggacaaggactggt

SEQ ID NO: 379112 - DNA, 101 bp, Homo sapiens
ctcggccgaccagggacctgcccgcctgcggctgctccggacctaatctgggagcctgcaagtgacaacagcctttgcggtccttagacagcttggcctgg

SEQ ID NO: 379113 - DNA, 82 bp, Homo sapiens
cgcgaagcgagcgagaaggcacggagtcgccgcggagcgcaggtcctaggcctacttacaagcctccagtctcaaattatcc

SEQ ID NO: 379114 - DNA, 97 bp, Homo sapiens
ggagaaaatattattccttatgttgctgatggagctaaggctgcaattctgggttttacatcaccggtctgggcatatttgactacagtcattcctt

SEQ ID NO: 379115 - DNA, 75 bp, Homo sapiens
ggataaacgccctggaagcgtatcagaaaacaggccagggtgtccgcaatgttgccagtgtctgtctgcagattg

SEQ ID NO: 379116 - DNA, 100 bp, Homo sapiens
taccctgtgcgttagtcaccagctgctcctccgtcttctcaggagaccagctggtccaacgacctatatccagactttgcctgacactgcagggtccaag

SEQ ID NO: 379117 - DNA, 93 bp, Homo sapiens
gttgctgttgccgggtgatagttggagcggagactggggatatgagactttctactcggaatatcctgagtgttgcgtggatgtaaaacccat

SEQ ID NO: 379118 - DNA, 100 bp, Homo sapiens
cagcagcagcctccgccaccccctccgcccagcagcagtatggcttccagtacccccttgccatggcagcaaaatggagaaggaggagacaacccgggag

SEQ ID NO: 379119 - DNA, 90 bp, Homo sapiens
cctgcgtaaactggatgacaccaaattccgctctcatgaggtgatctgtgaaaatggttcgctattcacttgacccggagaaccccacga

SEQ ID NO: 379120 - DNA, 90 bp, Homo sapiens
gccgacttcagggaggatccggacccccgcaaggtcaacctgggagtgggagccttgataaatttgctgaagttccttatgtcaaatgag

SEQ ID NO: 379121 - DNA, 83 bp, Homo sapiens
tccgacagcgctccggagggaccgggggagctcccaggcgcccggcagaaaaatatggctcaggagactaaccagaccccggg

SEQ ID NO: 379122 - DNA, 98 bp, Homo sapiens
aaaattttcagaagcacatgtattataacaggtatgtgtaatcctcgaaattatagtgacacacctccaacttcaaagagcacagtggaggagctgca

SEQ ID NO: 379123 - DNA, 124 bp, Homo sapiens
ctgctccatatgctgttgaagaagggagccaacaaaaattgttttttctacctgttgacgtgtcaagcactaactaccggagtacactgggaagcatcaaagaaggaatcttgaaaatcaaaga

SEQ ID NO: 379124 - DNA, 75 bp, Homo sapiens
ccaacatcaaccgacagttggaggtatacacaagcggaggtgggaagaggagtacacggtgcggatccagctgca

SEQ ID NO: 379125 - DNA, 51 bp, Homo sapiens
gtcagagtcccaaagacatgggtatctccctgggataaaaaagaagaagct

SEQ ID NO: 379126 - DNA, 98 bp, Homo sapiens
agctttacgtcatcttcgattagctaataaccaactgcaattcctacctccagggttgaaaaataccggccacagaccctgaatgatctcatttctca

SEQ ID NO: 379127 - DNA, 97 bp, Homo sapiens
gcccctgggcatcaccaacatagccatcgacttcggggagcaggatgtagagtcctacattcatcgatccgggcggacaggcagagctggaaggacg

SEQ ID NO: 379128 - DNA, 98 bp, Homo sapiens
cacgggcttctccgacaggcacctgctgcggctgcctgcggcattcaggaaagcagcttcccagaactcgagctgtctttagccaaagcctgtgcaaa

SEQ ID NO: 379129 - DNA, 100 bp, Homo sapiens
gacgagagcaaggagaggctaggaatgccgaactggggaggaggcaagaaatgtggggtgtgtcagaagacggtttactttgccgaagaggttcagtgcg

SEQ ID NO: 379130 - DNA, 80 bp, Homo sapiens
cagaagctgtgggatgaagtgctttcacatcttgtggaaggaccaagcatgaataatctttcatttagtgagctatgttg

SEQ ID NO: 379131 - DNA, 83 bp, Homo sapiens
ccatgacggaggatgatgacatcactaccgggagccgggtgtgggctgagccctgcctgattgatgctgccaaggaggagtac

SEQ ID NO: 379132 - DNA, 130 bp, Homo sapiens
gttttatgatggagtaattcgttgtttaaaaagaatgcacattaaagccatgcccgaggatgctaaggggcaggtgaccaagaatatggcccaggtgaccaaagccctggacaaggccctgagcaccatg

SEQ ID NO: 379133 - DNA, 75 bp, Homo sapiens
attccaagagaagatgcatttggaggaagataggcatcttggaatcctggtccttgctggtgcagacgaagcggc

SEQ ID NO: 379134 - DNA, 75 bp, Homo sapiens
ctcctcccgggctggcgtgcgccagaggatccgcaaagtgctgaacaggacatccaggcagaaattgatgcccac

SEQ ID NO: 379135 - DNA, 83 bp, Homo sapiens
cacagccttcctgtgtggttttaccgcccagagagcgtcatggacctggtgggcgacagatgcgaaagaaacgagttccagtg

SEQ ID NO: 379136 - DNA, 75 bp, Homo sapiens
ccaacggctccccgtcgtcctggtgctgcagcggtgacttaagagattaaaattaatttggttgctgttggttct

SEQ ID NO: 379137 - DNA, 75 bp, Homo sapiens
cgagggaatgataaacataaactcacatctgcaggcttttttgtggaggctggagtgcaatggtgcggtctcggc

SEQ ID NO: 379138 - DNA, 82 bp, Homo sapiens
gcagcgccagcggccgagcgggcggcttcctggcctgggcgctccggtggcggcggagcatctgtccgatctttcctgtttc

SEQ ID NO: 379139 - DNA, 100 bp, Homo sapiens
ggaagtctataagctttgcaacagaattacagagtatgatggaggagtgagatgtggatgttgcttttgcacctacgggggcatctgagtccagctcccc

SEQ ID NO: 379140 - DNA, 98 bp, Homo sapiens
agtttgctggcctagacctgaactcttcagataatcagagtggaggaagtacagccagcatccgtccactctctcatcagtgactttaaggacccgcc

SEQ ID NO: 379141 - DNA, 75 bp, Homo sapiens
atgaggaatgtctttcctaccatctaaaatacgaaggtttctggctggactggcatcagtactatgacatagttt

SEQ ID NO: 379142 - DNA, 97 bp, Homo sapiens
ggatgcctgtaccatgatgtgatgctggagaccttgacacttatatcctccctggcatctttccatctcctgaccagcctgccaatgtgcctgtcct

SEQ ID NO: 379143 - DNA, 100 bp, Homo sapiens
tatgacactactcttgtggagaaagaaggtatccatgttcttttggatccttatgactatgaaatgattgaagttgtcttgaaagttatagaacgagctg

SEQ ID NO: 379144 - DNA, 82 bp, Homo sapiens
ccaagggcgccaaaggagaagtgggcccccccggaccaccaggcggtgcgtctttctacgtgaataggattttgtggctggc

SEQ ID NO: 379145 - DNA, 76 bp, Homo sapiens
tcctggtcatcttctatttccaaaattccctataaggagcccctgctggtgcaccagaactaccgggggccatctg

SEQ ID NO: 379146 - DNA, 100 bp, Homo sapiens
ggcggggaggcgggagcaggagcccgcggccggccagccgaagatggtggcggctactcctcctggaccaagaatcgccttcagccctgtctggtgcatc

SEQ ID NO: 379147 - DNA, 100 bp, Homo sapiens
tactacgttcagctaaattaaggtgttcgaaatccgcaccactgatgacctcactgaggcctggctccaagaaaagttgtctttctttcgttgatctctg

SEQ ID NO: 379148 - DNA, 100 bp, Homo sapiens
gccaagtgcgagcccagcgggagaaaatcaaggagaacccagtgacttgattgtaaaaatttacagagcggaatcatatgctggtctccaagagtttaaa

SEQ ID NO: 379149 - DNA, 82 bp, Homo sapiens
tgcctatgtattccctggggatggcgcatcacacaccaaagcaatggctgccatccggaagaaactggtgattgttggtgat

SEQ ID NO: 379150 - DNA, 100 bp, Homo sapiens
caatgatggggcagcaagtggccaacatccatgagtatgttttctgatttcctgcagtcttttctgaagcactcttcgagtacagtttttgatcttgtgg

SEQ ID NO: 379151 - DNA, 74 bp, Homo sapiens
atcaacagacatttaataacaatggctcaaattgatcaagcagatatgccaggctctctattcatatggatgat

SEQ ID NO: 379152 - DNA, 88 bp, Homo sapiens
gggaatatatgaacatatcactcttgcttattctgagaacaagaaactcctttacgagaagatgaagggaggagagagacgaaagcgg

SEQ ID NO: 379153 - DNA, 100 bp, Homo sapiens
ggggccgtggcccctgcagcggaaccggacccagtccctgagccgcccctacacccacagggtttcgtgcacctgaagttgccagaggaaatgtcattta

SEQ ID NO: 379154 - DNA, 82 bp, Homo sapiens
ggaccttccggagcttctcagaagacagagggttttcttttgaggtttgcctgcaatgagatttcattctctacatttaaag

SEQ ID NO: 379155 - DNA, 100 bp, Homo sapiens
aaaatggggcggaagaaaatacaaatcacacgcataatggatgaaaggaaccgacagcaatctgcagagcgctgtgtaagcacattgcttgatctaatcc

SEQ ID NO: 379156 - DNA, 100 bp, Homo sapiens
acagcaagttcctgcttctgggacagctctactgacgggacatcttcatcaccagcgtggacgccgccacgaccttcgaggagctctgtgaggaagtgag

SEQ ID NO: 379157 - DNA, 122 bp, Homo sapiens
cctggcttacatgaaccacatcatggtctctgtctccccgcctgaagagcacgccatgcccattgggagaatagcaggttctccagcatttggctcaaggccccaagggcacatgtgacaag

SEQ ID NO: 379158 - DNA, 100 bp, Homo sapiens
tggaggccatcaggggccttgataacacagagtttcaagtcatatttgatcagaaattggatgaaccttcgggatgctgagacagggaagatactctggc

SEQ ID NO: 379159 - DNA, 104 bp, Homo sapiens
cgatgaacctattctgaagcacttgaaagatattaaagtgaagttctcagatgctggccagcctatgttccagacaaagttgcaaacctggaggcaaacaataa

SEQ ID NO: 379160 - DNA, 100 bp, Homo sapiens
cgcccattcagtctacggctggggccgtcccagttcgcaatgagaaagacttaattcagtgcacaaatgagatgaatgtgaacatcccacagttggcaga

SEQ ID NO: 379161 - DNA, 100 bp, Homo sapiens
cggggccctctcagcaagaacgggaacaaaactctgtgtatatggttgtcccttggcgaaaaaaagaaaaacacaagataaacagccccaggaacctgct

SEQ ID NO: 379162 - DNA, 83 bp, Homo sapiens
gatcaagatctcattctagaaagaagcgatacaggccttcctcatcaggctgctaagggacctcattgataagcagacatgga

SEQ ID NO: 379163 - DNA, 98 bp, Homo sapiens
tgacctacactagtcgcgggagccacgcagaggacgccggaacaccctggaagccgagaaatgggaacatttacggatgagaagtcaaaagcttccca

SEQ ID NO: 379164 - DNA, 100 bp, Homo sapiens
gtatattctgattgcaaaaaattaattgacacttttgggatccgatggcctgaggagcttgaatgtgacaggtacttcacatgatttcaagtatggtttg

SEQ ID NO: 379165 - DNA, 74 bp, Homo sapiens
tcgctgggagagaggtacctctccttttccctctccctttccctaagacctctcaagctggatccaaggataaa

SEQ ID NO: 379166 - DNA, 95 bp, Homo sapiens
ttgtggcagacagacttatgctggaactgggttttagcaaggaatttgcaggtgaagacacttctgatttgtttttggaagagagagaaatagcc

SEQ ID NO: 379167 - DNA, 83 bp, Homo sapiens
cccgccgctgctaaatatatccgtaggaatggagagggaccggatctcaggccgaatacatcaagcaatggtaacatctttaa

SEQ ID NO: 379168 - DNA, 75 bp, Homo sapiens
cgggcctcccgtttctggctccgggctgagcttcctggagaagaggaagatcctggtgaagaccatgatacgtaa

SEQ ID NO: 379169 - DNA, 98 bp, Homo sapiens
agaccgtctagtataagacagagcacgaaaggcatttttactgctgctgccatgtccacgcagagacttcggaatgaagactaccacgactacagctc

SEQ ID NO: 379170 - DNA, 75 bp, Homo sapiens
gccgagtcgcgcggaggcggaggcttggggattctcagctggtagctggtgttgcattcaagaagactttctctt

SEQ ID NO: 379171 - DNA, 95 bp, Homo sapiens
ccggactcgtgcgagccttcctgtggtgaggtcaaccaaccagacgaaagaaagatctctgggttgtggttcaccttgaaactattctaggagcc

SEQ ID NO: 379172 - DNA, 98 bp, Homo sapiens
gagatgatcacagctcctgaacgtcagcagctagagaccctgaaacgtaatgtcaacaagcgcttaaattcctagcgaagtgccgtaagaaaaagaaa

SEQ ID NO: 379173 - DNA, 90 bp, Homo sapiens
agaccatcctatactgtgacttcttctacttgtacattacaaaagtattcatccacaatgcgatacctttcatagggtttggctttttgg

SEQ ID NO: 379174 - DNA, 83 bp, Homo sapiens
ccgggattggaccgacgcagccatgaaattggcgtgttagccaaggctttcattgaccaagggaaactcatcccagatgatgt

SEQ ID NO: 379175 - DNA, 90 bp, Homo sapiens
tctcaccatcgttggcctgattctccccaccagagagttcctatcagactgagattgggcagaccctggacctcctcacagccccccagg

SEQ ID NO: 379176 - DNA, 51 bp, Homo sapiens
cttcacggcgccgagccgcggtccgaatttgcatctgctggtgatgatgga

SEQ ID NO: 379177 - DNA, 73 bp, Homo sapiens
aagttttccgtgaacatgccaacaaattgattgaggtcctggttccacaaggataaaacacatctgcagtgca

SEQ ID NO: 379178 - DNA, 100 bp, Homo sapiens
gccccagccccctgtggctgaggctacaccccggagccaggagggatagtgacaacctctggtgggacgcctttgccactgaattttttgaagatgacgc

SEQ ID NO: 379179 - DNA, 99 bp, Homo sapiens
cctccctgcagaccaatggacaccttctaagagtttggcgagtcagtgactgaagcgcccgtccattccaaggatattgaggcaacaatgaactcggcc

SEQ ID NO: 379180 - DNA, 97 bp, Homo sapiens
tttcaatgcacaaggggaaatttggcttgcaattcatcactttgaaaagagaatcacattttggaagatgtgaacaaatgtgtcattgctctccaag

SEQ ID NO: 379181 - DNA, 73 bp, Homo sapiens
gaggtttgcccggagcgcgcacgaggaaggatgataaagactatgctttaaaacaaatagaaggaactgggat

SEQ ID NO: 379182 - DNA, 97 bp, Homo sapiens
ctatcgagattggaaccacagaagcactcctgtaggaggcctgctgatggcatttcagaagtactctggtgagactgttcaggaaagaaaacagaag

SEQ ID NO: 379183 - DNA, 90 bp, Homo sapiens
cgctatcgtgacctgcttttcggttccgggtcttggccccgtccttacctcacaggggagttaggatcaggcctccaggtgggagcccca

SEQ ID NO: 379184 - DNA, 101 bp, Homo sapiens
ttgaatctggtgttatcaacttaaaagatgccacctctaaggagaaaatgctgagaagcttctgcagttcaagcgttggttctggtcaatagtagagaaga

SEQ ID NO: 379185 - DNA, 100 bp, Homo sapiens
ggagacagctggtgtctgaagccgctcgcgcccaggttgtggcagcactgcctgaaggtatgagaccagattctaatctttatggttttccatgggaatt

SEQ ID NO: 379186 - DNA, 100 bp, Homo sapiens
agcgagtggagcccggaggccatgggcacgccttggacaggcatgtgggcacattccatgacagtacaggattatcaggatctcatagaccgaggatggc

SEQ ID NO: 379187 - DNA, 98 bp, Homo sapiens
ctgcaagctcttctcaagcatctgctcaggcattgaacctggccacatcccaggtaccgtgaacatccccttcacagacttcctgagccaggaggggc

SEQ ID NO: 379188 - DNA, 98 bp, Homo sapiens
acgagatagcccagtgcctagtgtctgtgccgcctaccaggcagagcctgaggaagctgaagcagaggtttcccagcatccgtacccttccgaagagc

SEQ ID NO: 379189 - DNA, 87 bp, Homo sapiens
ctgagtcggagctcggcaggaagtgggaccggtgtctggcggatgcggtcgtgaagatagaagctccaccatgaggcgaggtggatg

SEQ ID NO: 379190 - DNA, 82 bp, Homo sapiens
atctcattgggcatgaaggtcctggaagtctgttatcagaacttaagtcaaaggtgctattatctaggagccacaaaagacg

SEQ ID NO: 379191 - DNA, 98 bp, Homo sapiens
cagcacctcctcgccagcagccgtccggagccagccaacgagcgaatgctatgaacctacctcctgacaaagccaggttactgcggcagtatgataat

SEQ ID NO: 379192 - DNA, 96 bp, Homo sapiens
tccagttctgtcatcatcaccaccacacactgtggaaaggtggcccagacagcgtgtatgtcagcttgcaagcatttagccacatccttgatgcaa

SEQ ID NO: 379193 - DNA, 89 bp, Homo sapiens
gcagaaactgagctggaccactggagcctcggtgaggggaccatggccaacctggagcgcaccttcatcgccatcaagccggacggcgt

SEQ ID NO: 379194 - DNA, 83 bp, Homo sapiens
ccgcagcaccagcaccctgtacagccagttccagacagcagagagtgagaacagaacggtgggatttacttgctggccaacca

SEQ ID NO: 379195 - DNA, 80 bp, Homo sapiens
accttaacacagtagcagctggaaccatgacaggcatgttgtataaatgtacaggtgtgaacgagtccccgatgatgacc

SEQ ID NO: 379196 - DNA, 83 bp, Homo sapiens
gacccagcaagtgtagataaagtattaggtcagccccaccatgagttagattccaagacgatggcaggattttcataatatat

SEQ ID NO: 379197 - DNA, 100 bp, Homo sapiens
gacggagtcctgttccaccttcagagcgtcacggcgtacgccctcatggggaaaatctccccggtgactttcaggtccaccgggcatacttagtatcttt

SEQ ID NO: 379198 - DNA, 100 bp, Homo sapiens
aggtgccgaacttcttgtgaggaagttagggacgacttggaactggggaaacttgtttgcagttgcctttccccatcttcctggttctgctccttcgtgg

SEQ ID NO: 379199 - DNA, 75 bp, Homo sapiens
ttcgcagggaggatgtcgggacaccccggaagctgggaaatgttcctctgtgacgagggtgcaggtatctctggg

SEQ ID NO: 379200 - DNA, 97 bp, Homo sapiens
gcctgagcgcgtcgagccagacagactgctgagcgactatattgagaaggaggtaaaggacaacttgcctttgatgattttcaagagagttgtgcta

SEQ ID NO: 379201 - DNA, 75 bp, Homo sapiens
cagcggcagctccagcccggcccggcagcgacatggaagggccgttgctccagggagaactgcaaatatcttcat

SEQ ID NO: 379202 - DNA, 50 bp, Homo sapiens
accacgccattccgagtatgaggaactctccggagtcctttctgtattgt

SEQ ID NO: 379203 - DNA, 82 bp, Homo sapiens
gcacatgatagaaaaggtcgagaggcacattcagcgccaggtacaatgactcttcttgcttttcacctaagttgaataagca

SEQ ID NO: 379204 - DNA, 87 bp, Homo sapiens
ggaggaacgcatccacgaggaattcaaggaagtgcttcgggagatccaggatgcagtggccagggcggggcaggtggtgcgggaagc

SEQ ID NO: 379205 - DNA, 90 bp, Homo sapiens
gccgggggagcggggccttccacaccccctccgtgggtgtgtgacatgtcatgctgcccaaggacatagccaagctggtccctaaaaccc

SEQ ID NO: 379206 - DNA, 73 bp, Homo sapiens
tggggttcttttgacctgagggctgctattgtatatcacactaaaggcacgagatgtgcgtaccaatgaagtg

SEQ ID NO: 379207 - DNA, 75 bp, Homo sapiens
ccgccggcctcttggacctgcggcagaattcaaccagacagtccagagttctggaaatatgacagacaaaagcag

SEQ ID NO: 379208 - DNA, 74 bp, Homo sapiens
aattgtttcgtagcagagaacagctctttgcatccggagagtggacaagaaactagatgctggtgtgccagaaa

SEQ ID NO: 379209 - DNA, 99 bp, Homo sapiens
gggcgagcgaggaggatggcggagtcggggctcctgacgggggatatgagactttctactcggaatatcctgagtgttgcgtggatgtaaaacccattt

SEQ ID NO: 379210 - DNA, 75 bp, Homo sapiens
tggaaaaaggctgtctctagacagcagtcttgtgaggctagtattactagcttgaaacaagctgccctggttaaa

SEQ ID NO: 379211 - DNA, 100 bp, Homo sapiens
gaggtcgagtgtcattacgctcaaacaaggtcattgctagaatcgtggatggaagcagattcactgagttcaaagccttttatggagacacattagttac

SEQ ID NO: 379212 - DNA, 59 bp, Homo sapiens
gcagcaaccgcagcagcagccttcaggtgagagaacgccgagccgtcgccgcagcctcc

SEQ ID NO: 379213 - DNA, 90 bp, Homo sapiens
agttctggtgtctcctctctagtgacctgtgtaattatgcagaagaatggagctggattacacacagcaagttcctgcttctgggacagc

SEQ ID NO: 379214 - DNA, 50 bp, Homo sapiens
ctcaagcacctgcgcatcgtcatcggtgatgatgaacagtctacacagat

SEQ ID NO: 379215 - DNA, 82 bp, Homo sapiens
cgagcgcgagcggcgcgagaaataacagtgtatcatgtatgccactgattccaggggacactcccctgctttcctccaacct

SEQ ID NO: 379216 - DNA, 75 bp, Homo sapiens
tccagcttcggaacaagagaccctgggtgtgctgatctgcaaaccctggacacaatgcagccaattgagaggaaa

SEQ ID NO: 379217 - DNA, 82 bp, Homo sapiens
ggtggaatatgccaaggaaaaactggagagcttcatcaaaaatagtgatagctttgataagccttgtctggttttagacaga

SEQ ID NO: 379218 - DNA, 80 bp, Homo sapiens
gagtgaatatgatcagatttctccaccaaattctcagcctgataagggtacttgtcttgggccttagacacaaatcagga

SEQ ID NO: 379219 - DNA, 99 bp, Homo sapiens
ctggcggaggacgagctccgggatgctgtactccttgtctttgcaaacaaacagtctgcgggccaggcatcgacatccgcaacgactatcagcagctga

SEQ ID NO: 379220 - DNA, 100 bp, Homo sapiens
ttctccggggacccttccgtatctgcctaggcattttgctgtctcctcctaatacgctttttcctgaaaccaagtacctctggtgacagtttacaaagtg

SEQ ID NO: 379221 - DNA, 50 bp, Homo sapiens
gccagatagtaccatgatagctgtatcagacttgtcttacaaggaccggc

SEQ ID NO: 379222 - DNA, 49 bp, Homo sapiens
cggacaagagctacatcgagggggactcctttgccagctcgaagacaac

SEQ ID NO: 379223 - DNA, 98 bp, Homo sapiens
gaccctcttccaggttacatacagcttacatcttgcatcctcaagcgatgatttaagccagaagttaaaacccttgggtgaagcagaacgagagttta

SEQ ID NO: 379224 - DNA, 50 bp, Homo sapiens
caccatggaaatatttgacattgagaaatgcttcggttacccacagtctt

SEQ ID NO: 379225 - DNA, 50 bp, Homo sapiens
acaaattcatcccagaaatctaagagggaaggccgctcaaatgcccaaat

SEQ ID NO: 379226 - DNA, 88 bp, Homo sapiens
tcgcagggaggatgtcgggacaccccggaagctgggaaatgagtcgggtttctccattcaaggacatgattttatgcttctctgaaga

SEQ ID NO: 379227 - DNA, 100 bp, Homo sapiens
aaaatgaatatgttcatggtgatataaaagcagcaaatctacttttgggttacaaaaatccagaccaggtggtggctaatgccgtagcggcattatctga

SEQ ID NO: 379228 - DNA, 75 bp, Homo sapiens
ctgcgcgcgggagttcgaggccctgcggagctgcttcgccgctgcgatgaaggatttgggggcagagcacttggc

SEQ ID NO: 379229 - DNA, 83 bp, Homo sapiens
cgcatctgctcaacgacgaggacctgacgcagcagcccctgtcaaagggaacaggaagcagtccacggagggtgacgccctag

SEQ ID NO: 379230 - DNA, 124 bp, Homo sapiens
ctggcaggggccgcgctctgctgcttcctcgtcctagtgatccacgcgcagttcctcaaagaagacatggctgggctccctgctgttgttggtctgtctcctggcgagcaggagtatcaccgag

SEQ ID NO: 379231 - DNA, 98 bp, Homo sapiens
ttgccttgctgctctacctccaccatgccaagaaacgcttcgttaagggactcaggcagtacgggaagaacttcttcagaattagaaaggagctgctt

SEQ ID NO: 379232 - DNA, 129 bp, Homo sapiens
atgcaccgacaatgagtggctgttttccagtttctggcctccgctgcctatctaggcacccagtttggccttctctgaggtcagatcggaacaactcacttgaaaaaaagtcaggtgggggaatgccaa

SEQ ID NO: 379233 - DNA, 97 bp, Homo sapiens
tttgatcgctgggaattctccaccttaaagaaggaaaacatttaaagttgatgatatgttatcaaaagtagagaaaatgaaaggagagcaagaatct

SEQ ID NO: 379234 - DNA, 90 bp, Homo sapiens
gcccccaagccctccttcgtgtcgtacgtacgccctgaggtccaggagcacaacgggcacgtgttcgccagctaccaggttagcatcccg

SEQ ID NO: 379235 - DNA, 73 bp, Homo sapiens
cctggaatatggagagacatgagatggtggccaaacccccaggcagggactggctgccaacccctccggctac

SEQ ID NO: 379236 - DNA, 82 bp, Homo sapiens
ctttgacaagtttgagtgttgctggaacggttcggataggattattgcatcgagcttttagtgtcttcttattcaacaccga

SEQ ID NO: 379237 - DNA, 51 bp, Homo sapiens
gctcgtcgggcccccttcgggagccatcactggtgcaagctatatttaacg

SEQ ID NO: 379238 - DNA, 100 bp, Homo sapiens
ggtcccaccatccgcaaacccagcccttcctagtcagcagactcaggccgcttacccaaaggtttgtgtttagtgaatcagagggatctgcattagaaca

SEQ ID NO: 379239 - DNA, 82 bp, Homo sapiens
gtgtctgggagaaacctcgtggcctggtctccattatttgagatgagttacatcttggaggggtcctgtcccaggtgcagct

SEQ ID NO: 379240 - DNA, 83 bp, Homo sapiens
acttgtgaacattcaagtgaagcaaaagcctttcatgattatgcaaacctgtcttcattaaagtccctgaggaccagactggg

SEQ ID NO: 379241 - DNA, 100 bp, Homo sapiens
cgtacaagagctgctgcctcagtacaaggagagggaaattgactggggcgactttggggtagaggcagtgtctgaggggactgactctggcatctctgcc

SEQ ID NO: 379242 - DNA, 88 bp, Homo sapiens
atggctacaggggaatcagcctagcaaactgcgttgacccggacgacacctataatgagaccccctacgagaaaggtttctgctttgt

SEQ ID NO: 379243 - DNA, 100 bp, Homo sapiens
cctgccaacaaacccctgtcccaggtgctcctggagggacagaaggacggcttctctggtagctgaagaacatctcacagtggacgccagggtctattcc

SEQ ID NO: 379244 - DNA, 98 bp, Homo sapiens
aggaaagcagcatagagaatgagatagccgtcctgagaaacgctcctttaccctcatcgtggaggcctgggactgggacaacgataccaccccgaatg

SEQ ID NO: 379245 - DNA, 80 bp, Homo sapiens
caagctctttgactgggccaataccagccggcgcgggtcagcccaaggccaaccccactgtcactctgttcccgccctcc

SEQ ID NO: 379246 - DNA, 83 bp, Homo sapiens
ctcgccagcagccgtccggagccagccaacgagcggatgaccgagtgggagacagcagcaccagcggtggcagagaccccaga

SEQ ID NO: 379247 - DNA, 87 bp, Homo sapiens
tcttcaagagaaatggagcccttctccaagttttgaagaatggaatgtattgcagcctttatgaagttgtggaaaagacaagaattg

SEQ ID NO: 379248 - DNA, 83 bp, Homo sapiens
cccggaaccgcgattcggcgtgtcaggagacagggcagaaggggcagagaataaaacaagtgacaaagccaacaacaaccggg

SEQ ID NO: 379249 - DNA, 96 bp, Homo sapiens
cagtacggtagtcaaacccccaggccataggaaaaggatacagagtagagtttcatgaacctgaaacttggtggaaatttgatcctgaagaattag

SEQ ID NO: 379250 - DNA, 83 bp, Homo sapiens
tccgcctcccgggttcaagcaattctcctgcctcagcctcctaagtagctgggactacagcccactttccttgtggaactgtc

SEQ ID NO: 379251 - DNA, 138 bp, Homo sapiens
attctgttggttttatgcatctttatccaatcaagtgcccttggacaaagcctgaaaccaggatctagtgaaaagccatttgatgtatgcggtcagagaagaagtggaggtcctcaaagagcaaatcaaagaactaat

SEQ ID NO: 379252 - DNA, 107 bp, Homo sapiens
cggcggcgtcttatccaaccttgcgctgcatccgctcgacctcgtgaagatccgcttcgccgggttttgcaatcccaagaagagtcagcgtttgaattttgaattta

SEQ ID NO: 379253 - DNA, 75 bp, Homo sapiens
cgggacccggttccccggcccacagtgggggtgtgcaaacccgagagaactggacaccattcgcttttcacccaa

SEQ ID NO: 379254 - DNA, 51 bp, Homo sapiens
ggaaaatcatattatagatggagtaaaggaacagcatatgccatatatgag

SEQ ID NO: 379255 - DNA, 76 bp, Homo sapiens
tctcggctatggagtccccatgttgcaattctgtggtgttcttggtcacacatttatggagtttctgaagggcagt

SEQ ID NO: 379256 - DNA, 75 bp, Homo sapiens
gcctgggggagagtggatccaggtgaagggggcagaggtgctggagaatctggtaaaagcaccattgtgaagcag

SEQ ID NO: 379257 - DNA, 101 bp, Homo sapiens
aagagaagaaggaacggaaacaaagttattttgctcggcctatggcatgtctgcgttacctttaaatctgataaaaggcactagaagcgctgcttatgaac

SEQ ID NO: 379258 - DNA, 83 bp, Homo sapiens
atgcacttacggatttactggaccccagtgtgaaagaggatggagagcaatacatcatcatctttggagaatttagcgacggc

SEQ ID NO: 379259 - DNA, 100 bp, Homo sapiens
gacgaacacaaagggaaagaggagaggcacccgatatatgttctctaggccttttagaaaacatgaaactaatctggattcactccctctggttgatacc

SEQ ID NO: 379260 - DNA, 80 bp, Homo sapiens
gggtgttcgactgctagagccgagcgaagcgatagtggccaaagcctccaagaacctcatgtccacgcaaagcttgggga

SEQ ID NO: 379261 - DNA, 100 bp, Homo sapiens
gtgcccagccgggaactccccatcgcgttttgccagcgataatacgcctcagttgccctcaaattggctgtagccacacggatataagaaagtcagatct

SEQ ID NO: 379262 - DNA, 100 bp, Homo sapiens
ggctttcgccgcgctattgcttgccaggagctactgctttctggcatgccagaaattgatgtgagtgattggataaaaaatacagaatacacaagtggct

SEQ ID NO: 379263 - DNA, 100 bp, Homo sapiens
gaaggcactttggatgggaatactgtaaacccaatttacaaatatattttgaatgatttaccaagagcctatgagattgagaagcggctgagcacagcag

SEQ ID NO: 379264 - DNA, 75 bp, Homo sapiens
gcgccgcccctgacgttacccggatcggagagttataaaccggtggaccataagcttatttggctacccttacgg

SEQ ID NO: 379265 - DNA, 97 bp, Homo sapiens
ctgcacttcttggtctcaaagggaacttggaaatgacattggcatccagattatccactgcactccagtgatccacaagctcagaaatacatcgcgg

SEQ ID NO: 379266 - DNA, 98 bp, Homo sapiens
taaatcctagtggtggactgatttcaaagggacacccactaggcgctacaggatacacacagttgtgtgattggtggagtgttggtgttattcttttt

SEQ ID NO: 379267 - DNA, 101 bp, Homo sapiens
tctctagcctacaggatggcttggccttgcacataagtgtgtttcctgtaacaaatcgttcaagaaactctggtcccttcatgaacatatcaagatcgtcc

SEQ ID NO: 379268 - DNA, 100 bp, Homo sapiens
gctacatcaagtgatgaaaaacacccacctgaaaatatcattgatggaacatacatatgatagttgagaaagacacatattctgatcatgaagaaataaa

SEQ ID NO: 379269 - DNA, 74 bp, Homo sapiens
gaaggcgagatgcgggtcatggacgaggacatcatggtagaatcagatgatggatttggacatgcttctatgaa

SEQ ID NO: 379270 - DNA, 75 bp, Homo sapiens
caacgtagtgttgccaatccagcatttttgaagtctgagaaagaaccccagtttaagtttatctacttcaaccac

SEQ ID NO: 379271 - DNA, 74 bp, Homo sapiens
cctgagaatagtggttcttaactctgttattgaagcaaacctagatggagaattgaatttgaaaatagaaactg

SEQ ID NO: 379272 - DNA, 75 bp, Homo sapiens
gttctgctgcttcgaaagctgatacgtaggtaacctttccagagatgtgacagaagtccttatacttcagttgtt

SEQ ID NO: 379273 - DNA, 75 bp, Homo sapiens
aggaggacagttcgctacacagcaatgcatcgagaattggagcgttattcagtatattaatgtcttattgataat

SEQ ID NO: 379274 - DNA, 111 bp, Homo sapiens
gtggctgtgaagctggggaagacgcagaaggtgaaggtgctcacgggcacgggtctggcccacgccctgcgactgagggaaggacagagccgctgtgacggccgcgtggag

SEQ ID NO: 379275 - DNA, 100 bp, Homo sapiens
acaaattaaagaatattttggagcctttggagaggagtctactcttcatcttgtgttgagacttcgtggtggtgctaagaaaaggaagaagaagtcttac

SEQ ID NO: 379276 - DNA, 76 bp, Homo sapiens
gttctacgcagcaatagaagagctgaaactggtctctgtgacctgcctgctgcctccctcaacgaccagttgcccc

SEQ ID NO: 379277 - DNA, 96 bp, Homo sapiens
gaactgctaaaggagagaagtttgtcatgcaggaggagttctcactatgtatagccaggacaggcatgttgatgtcctcaatctctgctttgccca

SEQ ID NO: 379278 - DNA, 83 bp, Homo sapiens
ctgggagaaagatttggccctcatgcaggaaccaagagcggcggcgcgcgtggcaggcctcccgggagagcaagctgcagccc

SEQ ID NO: 379279 - DNA, 90 bp, Homo sapiens
agggagtcaccactggacctccaaggaagccacgtgcagacatctacaaccttcgatctcctgacgagactacttccagcaacccagtct

SEQ ID NO: 379280 - DNA, 100 bp, Homo sapiens
aagagtcagcggtatattagttcagttaccactaccagggattcgataaacaagtggatgtgtcatatattgccaaacattacaacatgagcaaaagcaa

SEQ ID NO: 379281 - DNA, 83 bp, Homo sapiens
ctcagagagggaagagattcagccagcacactcctcgcgagcaagggaaatttggatatgtgcagtgcatctcctcgaagatg

SEQ ID NO: 379282 - DNA, 87 bp, Homo sapiens
tggcagatatcgaggtggatggaaagcaggtgccttatgcctctggcatgcccatcaagaaaataggccatagaagtgttgattcct

SEQ ID NO: 379283 - DNA, 75 bp, Homo sapiens
ctgctcttcctcccttcgctcgcaccatggcaaggggagagccagttgcgcagagccctgcaaccagcagtccag

SEQ ID NO: 379284 - DNA, 110 bp, Homo sapiens
ccgagtggagagagcgagctgagtggttgtgtggtcgcgtctcggaaaccggtagcgcttgcagcatgtgcctccggagccagcgtggtggccatagacaacaagatcga

SEQ ID NO: 379285 - DNA, 100 bp, Homo sapiens
ctccagaatttcaagcacaaccccaaaattaacaccatcttcatatccaaggaaagacaaagatatgcttgaagataagtttaaaagcaataatttagag

SEQ ID NO: 379286 - DNA, 75 bp, Homo sapiens
ttcagttcgccgatgggaaacccggagaccaaatccttgggtcgacaagaagatgctgaggaatacttaggcttc

SEQ ID NO: 379287 - DNA, 100 bp, Homo sapiens
ctgggggtggggctgtaggggaaagtgctaaagccgctgagttttgtcaaagcaacaggcttcacaagtcctggttaggaagcgtcgtgcaaattcttta

SEQ ID NO: 379288 - DNA, 98 bp, Homo sapiens
aagcgcaaaggaaattactgaaggtgtcccgggacaagagaatggcattgtgcccatcgtggagcctgagatcctccctgatggggaccatgacttga

SEQ ID NO: 379289 - DNA, 75 bp, Homo sapiens
tggtaaaatttcacggcaggatcctgttacatacatttcagaaacagattcaaggcctcttccagatgtagccct

SEQ ID NO: 379290 - DNA, 100 bp, Homo sapiens
gctggcggacaggcgacagcgacctgcggcaggtctgaatttcctgctgctgttcacaaagatgctttttatctttaactttttgttttccccacttccg

SEQ ID NO: 379291 - DNA, 101 bp, Homo sapiens
catcatgggtagcctttgataaacagtcagatatgtacagcttgggtgtggtcctgctagagctctttcagccgtttggaacagaaatggagcgagcagaa

SEQ ID NO: 379292 - DNA, 100 bp, Homo sapiens
cggggtcctcatggatctgtccaaaaggtcttcaaagcttcacctttctccaaaggcagatgtgaagaacttgatgtcttatgtggtaaccaagacaaaa

SEQ ID NO: 379293 - DNA, 82 bp, Homo sapiens
gcctgggccgggagccgggtgagggcgccgagaggctcggtgggcgcgggcggcgaggttcaaaatcaaaggaagcccagaa

SEQ ID NO: 379294 - DNA, 100 bp, Homo sapiens
cttcgagaagattagcaaaggtgctaatccagtggaaatcaggagaggtatgagttaatacagaaaggagtgactgaacttagaactgttgggaatgttc

SEQ ID NO: 379295 - DNA, 85 bp, Homo sapiens
ggacctggacctggaaggggagactctgctgacacccatcacccacatctcacaatcatcaaattgttggatggaaaacgatctc

SEQ ID NO: 379296 - DNA, 75 bp, Homo sapiens
ccgatccagcctgcggagcctgtggggcagtcttccaggatctcaaccagttctctcactgcagagtctggagaa

SEQ ID NO: 379297 - DNA, 98 bp, Homo sapiens
tcctaatacggttgaccagtgaggttcgcactgccccttggaacaccacaagggccttcattgctgccatgaagggcaagtgtctgctagaggtgact

SEQ ID NO: 379298 - DNA, 102 bp, Homo sapiens
ttgtgagacagtattacacactgctgaaccaggccccagacatgctgcataggttttgttagagcacgaggtggtggtgacattcgggacgttaacacaaac

SEQ ID NO: 379299 - DNA, 78 bp, Homo sapiens
aggagagccggcggcgggaggccaagatgtacggagcgcaagaggacggcagcgtcggcgaaggtgacctgtcctgca

SEQ ID NO: 379300 - DNA, 82 bp, Homo sapiens
cagattcgcagtggtcgcttcttctccttgattcatgttacatgtaaagctgtcctcatttgtgactatggacctatggagt

SEQ ID NO: 379301 - DNA, 100 bp, Homo sapiens
gcaaaggtgctaatccagtggaaatcaggagaggatttttacctcctataactccaccagaaaagttttttctttcccagctgatgctggcacccccacg

SEQ ID NO: 379302 - DNA, 75 bp, Homo sapiens
cgggaagatggcggctgggttcaaaatcaaatggctatagcatgtggatctcgagctcatttagaaaaagaatca

SEQ ID NO: 379303 - DNA, 100 bp, Homo sapiens
ccgaagccctgcagagagagaagatcttctttgagaaccacccatatttcaggtgcaccccagacatggatgtcatcctcaacattcctgtggaagagcc

SEQ ID NO: 379304 - DNA, 100 bp, Homo sapiens
agggctcccactgattctacattatgcttcgagcaaatgctctcatcaaaagaggcagcatgtacatgcaacagcagcagcctttgctgtccactcaaga

SEQ ID NO: 379305 - DNA, 100 bp, Homo sapiens
ggccgagatgtctcgctccgtggccttagctgtgctcgcgctactctctctttctggcctggaggctatccagcatcaggagaacctcagtctgacgaca

SEQ ID NO: 379306 - DNA, 101 bp, Homo sapiens
ttactggagcaaatctcaaagagcagtcggatttctgtccttggtacatgtgtgaccaattcagtgaaaggaacgaatgcgattctctggacctgtttggg

SEQ ID NO: 379307 - DNA, 75 bp, Homo sapiens
ctaccattaagatttttggatccaacaaaaacagaccagaagattaccaaggctggagtgcagcagcacgatctc

SEQ ID NO: 379308 - DNA, 100 bp, Homo sapiens
cgctaacaacatgcgtaagaagggcaagcccaacccggaccagagggggccgaaggccagagaccaggatttggctacggaggcagagcgtccgactata

SEQ ID NO: 379309 - DNA, 100 bp, Homo sapiens
tggactccctggagaagcagatggaaaaggtcataatgctgagctccgtaccagacttacacggttacatcgataagtcgcagctgaccgaggacctggg

SEQ ID NO: 379310 - DNA, 100 bp, Homo sapiens
acagccttctcaattttctttctcagaaagcagaggctcagagcttggagacagacgggaaatgtttcaacgtgcgcaagcgttgcggcggcgggcagag

SEQ ID NO: 379311 - DNA, 76 bp, Homo sapiens
gatgctcgccttggggaataatcactttattgctgctctgttaaaagcgaaaatgaaacaattgcctgcggcaaca

SEQ ID NO: 379312 - DNA, 94 bp, Homo sapiens
ggccgcagtgccacttcgacatcgagatcaaccgggagccggggaagtgttcgccagttactacatgaaaagataagagatgcttatactcacc

SEQ ID NO: 379313 - DNA, 74 bp, Homo sapiens
agcagataaggaacgccctggaaaacatcagggctaatttcatataccgagtatcttttcttgcttacaatcct

SEQ ID NO: 379314 - DNA, 74 bp, Homo sapiens
cgggggtggaggtggtgcctctggcagtgacgaggacgaagtgtccgagcatttggccaagagacgaatgtccc

SEQ ID NO: 379315 - DNA, 83 bp, Homo sapiens
ctaaagacggaaccgccacagcactcaagtgtttcccattaaacactaccaggacaaaatcaggccttacatccagctgccat

SEQ ID NO: 379316 - DNA, 51 bp, Homo sapiens
gaaagaagaaacaagggacctgtatagtgtttccctaatgtgggaaagtcc

SEQ ID NO: 379317 - DNA, 98 bp, Homo sapiens
ggggcccgtggtcctcctggtgctgtgggtagtcctggagtcaacggtgctcctggtgaagctggtcgtgatagctgtccgtggcacagtgcacgcag

SEQ ID NO: 379318 - DNA, 75 bp, Homo sapiens
gagcaaaagatgcttaccgaatccggagatcctgaggaggatcactactcttggaatcaaagataaatccaaata

SEQ ID NO: 379319 - DNA, 50 bp, Homo sapiens
ctggcgccgggtcccgcggggaaaaaatgaagctgttgtcatttctggaa

SEQ ID NO: 379320 - DNA, 75 bp, Homo sapiens
cagatggatggactgagacgcagagtgtaccaggggatgctggactgcatgacagtgtttaagaatgaaagcctc

SEQ ID NO: 379321 - DNA, 100 bp, Homo sapiens
gggcagtgggatgaaactgaacaactcctgtacccccataaccacaccagagctgaccaccccagcttatgtacataaaagcgtgatggaggaactgaag

SEQ ID NO: 379322 - DNA, 82 bp, Homo sapiens
attaacatgatgattgatctggctgaagtagcagatctggttacccatgcagttgttactgtaccagcctattttaatgatg

SEQ ID NO: 379323 - DNA, 90 bp, Homo sapiens
aggcagaagatacaggcagaacatgctagtcatggagatcgagaggaaataatgaggacatggatttgattgacatactttggaggcaag

SEQ ID NO: 379324 - DNA, 50 bp, Homo sapiens
caaagaacactgttgttgccacaggcaaatctccttggaccggctgttgg

SEQ ID NO: 379325 - DNA, 90 bp, Homo sapiens
ggacctcttgcgccaggagctccggcagttgctccagggtctccgccacaaagccatctgtgagggcagttctcctgtgcctcctgttgg

SEQ ID NO: 379326 - DNA, 91 bp, Homo sapiens
tccttggggacggagcagcgcgtcgtggggcgagcggcagggggatatgagactttctactcggaatatcctgagtgttgcgtggatgtaa

SEQ ID NO: 379327 - DNA, 75 bp, Homo sapiens
cagaaacaaaatgtcaacaaattgatggggatgagtgccacctctcgtaaacggaaagaagaattagctgaagca

SEQ ID NO: 379328 - DNA, 100 bp, Homo sapiens
ctatggtgaaacaccactgaagcattgccaaggggccgttgcatcctccattgccccctccgcatcagcctcagcctcagcaacctcagcaacagccccc

SEQ ID NO: 379329 - DNA, 98 bp, Homo sapiens
aggactaattttggcagttctaaatttgaatttgagattctgaaaaagagttccacgtcctcccttatcgagtctttgttccccttcctggatccact

SEQ ID NO: 379330 - DNA, 50 bp, Homo sapiens
ggacacggtgctttcaacaacagagaacaaaatccagtctcatagcagag

SEQ ID NO: 379331 - DNA, 100 bp, Homo sapiens
ggctgcggcgggagctggacgcgggaggaggcggcggcggcggaccccaggagcaagcacaagttcaaaatccacacttacggaagccccaccttctgcg

SEQ ID NO: 379332 - DNA, 96 bp, Homo sapiens
cccatgctctggagtggcccagcctaactgcccagtggcttccagatgtaaccaggtatctcgggggagctttgtgccttgatggatcaagttcat

SEQ ID NO: 379333 - DNA, 100 bp, Homo sapiens
ttttcctatgcgactgctgcacaaaacaatacaggtaatctgtaagtcagatgctccaacaggggatgttcttcttgatgaagctctgaagcatgttaag

SEQ ID NO: 379334 - DNA, 100 bp, Homo sapiens
tgaagatgagtggggtaaaaccccagacgccatgaaagctgccatggccctggagaaaaagctgaaccagaccctggccatcgagggcggcgccgaggac

SEQ ID NO: 379335 - DNA, 100 bp, Homo sapiens
gttgaagatgatgatcctgaagataacaagccactcttgataatgctgactacagattatttcagaaaacactcaaattgtgtcgtttttttgccaactc

SEQ ID NO: 379336 - DNA, 101 bp, Homo sapiens
tgggatttgccaatctcccaaatcaagtatacagaaaatcggtgaagagaggttttgaattcacgcttatggtagtggcctctacggcagacacatgcagg

SEQ ID NO: 379337 - DNA, 83 bp, Homo sapiens
gggtgaaagaaggatatgtgccccaggaggaggtcccagtcctgatcgacagaagagggtacatccagcccgacacgccgcag

SEQ ID NO: 379338 - DNA, 100 bp, Homo sapiens
cccgcaggctccggcttccgtcccggacagagcccgtggtcgcgcagacaatgcagatcttcgtgaagactctgactggtaagaccatcaccctcgaggt

SEQ ID NO: 379339 - DNA, 98 bp, Homo sapiens
atacagacagttcctgctctaagaggccatctgtgaggctcagtctcccaacacctctgatcctcctggccaacttcttggcccagacagaggccctg

SEQ ID NO: 379340 - DNA, 90 bp, Homo sapiens
caggactccaaaatggcgtcagttggtgagtgtccggccccaggtattgttgcagcatctggcagtgagactgaggatgaggacagcatg

SEQ ID NO: 379341 - DNA, 82 bp, Homo sapiens
cttcatcatcatctacttcacaggaattgccatttgatgtgatggtggcaggtgggatggagagcatgtccaatgttccata

SEQ ID NO: 379342 - DNA, 98 bp, Homo sapiens
gggctcctgccgtggtggacctgggagaagtgtctggtgttatgagtgccagtgagccgccttagatagaagcatcgtcagcactttattaatgatgg

SEQ ID NO: 379343 - DNA, 75 bp, Homo sapiens
ttttccggtgtatatgtagccatccaggcagttctgactttgtacgctcaagtggctgacaagattttgaaaaag

SEQ ID NO: 379344 - DNA, 100 bp, Homo sapiens
gagccatggctctcgccgtccgagtcgtttattgggttattatattatgcaggacatggttatgaaaattttgggaacagcttcatggtccccgttgatg

SEQ ID NO: 379345 - DNA, 100 bp, Homo sapiens
agttggattctcttatcaaggctaccatagctgggggtgcactgccctgggaagaactaggatgaggtattgacttgctgttgccacataacaaaccctg

SEQ ID NO: 379346 - DNA, 83 bp, Homo sapiens
tcccggccctctcgcgctgcactgtctctccgacgcaagactgtcccggcccgggtgcgcgcggagccatggttatcatgtcg

SEQ ID NO: 379347 - DNA, 75 bp, Homo sapiens
accactgcctgtgtctcgtcttgtatctctaattggaagcactaatttgggcataggaatccctctcctggccag

SEQ ID NO: 379348 - DNA, 74 bp, Homo sapiens
agagcttcacctgtcggcttggagagatccagcattccacgcctacgggaaggcaggcaagatgctggtggaga

SEQ ID NO: 379349 - DNA, 75 bp, Homo sapiens
caaaacgtgggaaaactagagctgaaacaatgggacccatgggttgctgacatgggctttgcccgattatttaat

SEQ ID NO: 379350 - DNA, 89 bp, Homo sapiens
atagacctaaagccacagtcttcaagagcccacggacaccacctcaacgtcccttccagctggctttattcagccccacgtgtccaagc

SEQ ID NO: 379351 - DNA, 102 bp, Homo sapiens
aacccgcgctgcagggaacagcggggcaaacaatacacaatcatcatcttactagttctctgtgttgctcgctaaccagtcccccagttcagtagactggag

SEQ ID NO: 379352 - DNA, 100 bp, Homo sapiens
gtcgggagcggagcctcctcgggaccagctgggcgccgtgtacacagaaggtgggttcgtggaaggcgtcaataagaagctcggcctcctgggtgactct

SEQ ID NO: 379353 - DNA, 119 bp, Homo sapiens
tggaagccctggcggcggcggcccatggggcccttggcgctgcccgcctggctgcagcccaggttgcagagcctgaggcctgtgatcagatgtacgagagcttagcgcgactccattca

SEQ ID NO: 379354 - DNA, 130 bp, Homo sapiens
gccacaactgccatcctcaagtctagattccaactctctgtaccaggtggcaggaacacctgtccattgaagatttcactcaggcctttgggatgactccagctgccttctctgctctgcctcgatggaa

SEQ ID NO: 379355 - DNA, 89 bp, Homo sapiens
gagatgcaagaccagtccatttggggaaatccttcggatggtgaactcattagaagaaataatgaagatgtttcattttcaagaccagc

SEQ ID NO: 379356 - DNA, 100 bp, Homo sapiens
aatgcagaaagcctggagagagagaaacccccaagctaggatttctgcagctcatgaagccttggagataaatgaaacgctgtctctggcttccaaagcc

SEQ ID NO: 379357 - DNA, 100 bp, Homo sapiens
ggaagtcgggatgctccgaagggtttctgctctgggagtgcctctaatttaccggtattgtaagaacaagccgtacccaaagtctcgcttctgccgaggt

SEQ ID NO: 379358 - DNA, 99 bp, Homo sapiens
ggtgcctgagcccgtgcctgtcttcagatcttcacagcacagttcctgggaaggtggagccaccagcctctccttgcagcaagatgaagagcgacgtcg

SEQ ID NO: 379359 - DNA, 75 bp, Homo sapiens
gccgtgtgctccctgcctctcacggatcaggagcgtctgggcaagcagctcaagttacgtgcagaaagggaagaa

SEQ ID NO: 379360 - DNA, 50 bp, Homo sapiens
ccagttggtgaagagacttacagatgcagccatcaggaaatatggccgag

SEQ ID NO: 379361 - DNA, 100 bp, Homo sapiens
ccgagaggaggcctatgagaatcaggctccgtatgtggatgtgatctgtttgaacagctactactcttggtatcacgactacgggcacctggagttgatt

SEQ ID NO: 379362 - DNA, 90 bp, Homo sapiens
ggcgtacgccctcatggggaaaatctccccggtgactttcagttaagtgggcagaccaacatccacctcagcaaaaacttcttcctgacg

SEQ ID NO: 379363 - DNA, 51 bp, Homo sapiens
tgaagaagctaccaagcacctagaggacctgaaggagaagaaggagaaggt

SEQ ID NO: 379364 - DNA, 100 bp, Homo sapiens
ctgctcctggcatgccctgccacagccactggaaactgagcccaattaccaagtcctgattcgcatccttatctctcgatgtgagactgaccttctgagt

SEQ ID NO: 379365 - DNA, 75 bp, Homo sapiens
catgctggcaagtctgaaggtcaatgccggtggtggtgtgcacattgagccccggtatagacagttcccccagct

SEQ ID NO: 379366 - DNA, 51 bp, Homo sapiens
gtaaaggctgctctcttcaatacaaggcatcctgacatcgaggcccaggag

SEQ ID NO: 379367 - DNA, 50 bp, Homo sapiens
ctggtcccccctcatttgctgtcgtaggctcaggggagagagaaagccca

SEQ ID NO: 379368 - DNA, 100 bp, Homo sapiens
cccaaacctggcaaggatggtgcagattttggcagattatggctttgtccccacccagcactgatgatattataaaagcacaaagttatcattgttgggc

SEQ ID NO: 379369 - DNA, 82 bp, Homo sapiens
cttgacaaccaagggcctccgtctggatttccaaggaagaatttcctctgaagcaccgtgcctccggagccagcgtggtggc

SEQ ID NO: 379370 - DNA, 50 bp, Homo sapiens
gtcggacagagttttgccaatgctcatgccttcaaaccaacagcataaaa

SEQ ID NO: 379371 - DNA, 100 bp, Homo sapiens
ctggcctcaagtacagggtcatcaagggcaggcttggcaactcttgtgaaatttcatagatctcgtcgcttactgggagtctgctatattgttgttaagg

SEQ ID NO: 379372 - DNA, 50 bp, Homo sapiens
gttctaaccaacaaggaagagtttgttatccaggcataagaccaagaaat

SEQ ID NO: 379373 - DNA, 95 bp, Homo sapiens
aagcaagaatttatcaaaggaaagatggatccagacaaggatatttggccttgacattaaaggcagagactgtggcaatgaggcagctaagtggt

SEQ ID NO: 379374 - DNA, 74 bp, Homo sapiens
cattatgaccagagtattgccgcggtggaaatggagattttcatcaccgtgaattgcttgagcacagatttctc

SEQ ID NO: 379375 - DNA, 75 bp, Homo sapiens
gctgagcgagctgtcagagcccggggacggcgaggccctcatgtaccacacgttccaaaagctgagacaagatct

SEQ ID NO: 379376 - DNA, 100 bp, Homo sapiens
cagcaagcggcgtggacgaccgttgctgagctggtgtggaacgtctgtgatcaggacacattcagctaacgtattttagcaggtggagtgaggttgaaga

SEQ ID NO: 379377 - DNA, 100 bp, Homo sapiens
tgagaacctttccgttcctgtcattggagaccaggatggagcagagcccagcgccaattccgtgtcagcccacaacctgctccggctgcatggcttcacg

SEQ ID NO: 379378 - DNA, 90 bp, Homo sapiens
atggctgcgttgacacgtcttatttaatccacatcatagattagaagcccaggacccaggaaggagacacaggaaatttattcaaagtcc

SEQ ID NO: 379379 - DNA, 138 bp, Homo sapiens
aggaagaggcgttgcggcgaaaggaacggctgaaggccctacgggagaaaaccgggcgcaagggaaatcgtggaacacatggtccagcactttaaaacacagatctttggggatcggaagcccgtgtttgacggcagg

SEQ ID NO: 379380 - DNA, 76 bp, Homo sapiens
gcgcagtgttgggactgtctgggtatcggaaagcaaagaacagagcagttcaccatttgcattatatagaacgata

SEQ ID NO: 379381 - DNA, 82 bp, Homo sapiens
ctgaagaggcagaaggagcaggctctgcgggaggtggagcacctgaagagatgccagcaggatttttagactctgaggagca

SEQ ID NO: 379382 - DNA, 82 bp, Homo sapiens
attggctgttttcctcacattcctcaagcagtgtagagactgaagttggtgattacatgttctgctttgacaatacattcag

SEQ ID NO: 379383 - DNA, 83 bp, Homo sapiens
ccgcgcgcagggcctgcagcgggagctggacggcgagcgcgagcggcgcgagaaagctgagaagaaagccaaggtcattgcag

SEQ ID NO: 379384 - DNA, 100 bp, Homo sapiens
cctagcatgtcgtctaaccccggacatggagactaaactcctcttcatgacatcccgggctgaggctgaggtggcctccttgaaccgtaggatccagctg

SEQ ID NO: 379385 - DNA, 82 bp, Homo sapiens
ccaggagtacccgaccctcaaggatccctgctgccttggtgatcccgggctgacagccagagagcacagcggctcagctcct

SEQ ID NO: 379386 - DNA, 90 bp, Homo sapiens
ggagcacgtcatctccatcgaggtgtggacgaatgtggaacctcgctctgtggctgtgttcccttggcactccttagtccccttcctggc

SEQ ID NO: 379387 - DNA, 75 bp, Homo sapiens
gactactgtcagcagctgtgccagaatggccaaagttttctggtcttggatgagcaacgatttgcaaaagaaatt

SEQ ID NO: 379388 - DNA, 88 bp, Homo sapiens
cgcgagtgaggaaaggaggtactgtagatgatgaaggagcaactcccattaaaaggcggcgtgttagcagtgatgaggagcacactgt

SEQ ID NO: 379389 - DNA, 60 bp, Homo sapiens
caagccaagaaagaatccgaagatcagaaacgtgagggagataaatctgcaggacatcaa

SEQ ID NO: 379390 - DNA, 104 bp, Homo sapiens
ggatcttcacggtctctacaccagagtcactactttaggcggattcgcgaagattggcggcagtaagcacacaatgaatgatcacctgcatgtcggcagccacg

SEQ ID NO: 379391 - DNA, 100 bp, Homo sapiens
caggtcctcaagaagacaggcaaggaggtggtgctggagggatcctggtgggcaatccatttacatgctcctgtgacattatgtggatcaagactctcca

SEQ ID NO: 379392 - DNA, 95 bp, Homo sapiens
aggaagggagttgatttactcctagaaggtgttcaaggtagttacttttggtgacgctgtccagttcccacaatgtatcattccttatctgaaac

SEQ ID NO: 379393 - DNA, 80 bp, Homo sapiens
taaggatcagatcaagaagatgagagagggtcctgcaaagatcgagaacggctactttgtacactactttgcccccgagg

SEQ ID NO: 379394 - DNA, 100 bp, Homo sapiens
gccgtgtattcatcacagacgacttccatgatatgatgcctaaatacctcaattttgtcaagggtgtggtgaccccagactctgagaatgattttgggaa

SEQ ID NO: 379395 - DNA, 96 bp, Homo sapiens
gatggctgaagagcaactttctgagctacaggagtacgtggaccagcacctgggcagctgcagaaccttggcctgaaaatgctacattatatcagc

SEQ ID NO: 379396 - DNA, 75 bp, Homo sapiens
gactttccttacctgtttttccagctcacccactgccagcagaggtgctggagaatctggtaaaagcaccattgt

SEQ ID NO: 379397 - DNA, 154 bp, Homo sapiens
atgttatctacattgaacgggtgcagcgggaaaaggctaatggcacaactgtccacgtaggcattcaccccagcaagctgctggagccagttctgcttctcggcaaggagcgatttgctggtgtagacatccgtgtccgtgtaaagggtggtgg

SEQ ID NO: 379398 - DNA, 113 bp, Homo sapiens
cggaagtcagactgagaagagaacttgaaaaaactattaatcagcaaagaattcatgctattgccagtagtcatcagagtaccaaaactgatctatttctcagtaatgagtgt

SEQ ID NO: 379399 - DNA, 90 bp, Homo sapiens
ggcttctgaaaccagacatctttgaaaacccacccatctacctgcaggaaaagacctgtgaccgcatcaagcagtcagcagctggcacca

SEQ ID NO: 379400 - DNA, 83 bp, Homo sapiens
gagcgcgcgcgcgaaaactccgggcagaaaaatggctacaaacttcctagcacatgagaagatctggttcgacaagttcaaat

SEQ ID NO: 379401 - DNA, 100 bp, Homo sapiens
caacaaggagggaaaaaagagcaggtggaaaaggaaaggcaggaagagtgaggaagagaacctttttgagatcatcacagcagatgaagtgcactatttc

SEQ ID NO: 379402 - DNA, 100 bp, Homo sapiens
ccaggcatcagggctgcagcccaggagcctcaaggcggcccggcgggcgactggacggccggacagaaactaatctggattcactccctctggttgatac

SEQ ID NO: 379403 - DNA, 89 bp, Homo sapiens
cgaacgctctctggggaacgagcaatgggaattcacgctgggcatgagccatgagcccaagtccccttcgctagggatgctttccaccg

SEQ ID NO: 379404 - DNA, 100 bp, Homo sapiens
cttggaggctgtagtggggacctgctgtgtgttggacctttatacgtattgtaaagagagagtctacagggagattgaacaggtgattggcccacatcgc

SEQ ID NO: 379405 - DNA, 75 bp, Homo sapiens
gtgccggcctagcgtcctggaattacttcaatcaaaacccttaggagaaatcttgagagtggacagcaattgtga

SEQ ID NO: 379406 - DNA, 100 bp, Homo sapiens
aggtgctagaagcctgcgccctcaatgatgacctcagtaaaatgatgcatcctgttgccagcagtaatccagctttctgtgggcctggcaagccttcctg

SEQ ID NO: 379407 - DNA, 96 bp, Homo sapiens
ggcccgcccaccagttcgcccgtccccctgccccgttcacaatcttcatctgccgtgaattggatgccatttccactaatgaagaggaaaaagagg

SEQ ID NO: 379408 - DNA, 75 bp, Homo sapiens
agggaacaggcatcatggactgtgcgcccaagattgtagaaggcatgaaacaaaaaatgtggagtattgaaaata

SEQ ID NO: 379409 - DNA, 75 bp, Homo sapiens
ctgcagccaaggaaggaggcctgcaaattcatgacaggattattgaggccagttggacaaatgcgagtaaaaagc

SEQ ID NO: 379410 - DNA, 83 bp, Homo sapiens
ctcagttgggtggactacggggagcgcgccgagctggatgactcggacggccgactcgcgggccgctgcacccaccgccaagg

SEQ ID NO: 379411 - DNA, 75 bp, Homo sapiens
cgtggaattcgcgaagctgccaaagccttagacaaacaggggcaagtgtccgagtggtgaatcagctacttacag

SEQ ID NO: 379412 - DNA, 100 bp, Homo sapiens
cgtctccgccatcgagcgcccctccgagctggggttggacgctgccagtttgcacagcagcagtttttcagaagaagtgaagtcaagatgaagaaccatt

SEQ ID NO: 379413 - DNA, 90 bp, Homo sapiens
tagccatgaaggctctaacctgccggcaatgtcccctgatggggaggccatcgtcactggtgctggagacgagaccctgaggttctggaa

SEQ ID NO: 379414 - DNA, 90 bp, Homo sapiens
tacgtttagcttcaaaaatgacaagttcgataaaagtgtgcagaccaagatcttcataaacaatgaatggcatgattcagtgagtggcaa

SEQ ID NO: 379415 - DNA, 82 bp, Homo sapiens
gatcccaggcggtgacagagtggagccatggctagagagacaagaggagcagcagcggcaccgcccctcaccctggagggtc

SEQ ID NO: 379416 - DNA, 100 bp, Homo sapiens
ggataacgggaggtgaatttccatgtcaacatagtcctggagagctcaaaggatggctactgacatgcagaggaagagaagcagcgaatgccttgatggc

SEQ ID NO: 379417 - DNA, 88 bp, Homo sapiens
gggaggatgtcgggacaccccggaagctgggaaatggaataggatgagtgataatccacccagaatggaagtgtgtccttactgtaag

SEQ ID NO: 379418 - DNA, 75 bp, Homo sapiens
gttctcggcaggagcggagagtttgctccaccaggccaggtctcagtggcccttagcagcagctccattcgtgtg

SEQ ID NO: 379419 - DNA, 90 bp, Homo sapiens
gaaaaagagggagcacggggaccacgcagacggaaacagagcaaatgcagcgttacaatcaaagacttattgaggaattgaaaaacagac

SEQ ID NO: 379420 - DNA, 90 bp, Homo sapiens
ggggagtacgccctggtcataaatggtcacagcctgaaggccggggtcagaaagaaaaaagagggtcccggggccgaggcaggaggacat

SEQ ID NO: 379421 - DNA, 98 bp, Homo sapiens
ctgcagagcatgccaagcagggaactggcatccatgaaccttgatatagttgacctgcttaaaaaggccaaggtgtctggccagaaggatctgatggg

SEQ ID NO: 379422 - DNA, 82 bp, Homo sapiens
cccggacatgagcaagcccccgacagctcagccagacttcccctatggtcagtatgtgtggacgaatgtggaacctcgctct

SEQ ID NO: 379423 - DNA, 73 bp, Homo sapiens
accatgagtggttccatgatgggaagtgacatgacttggaatccagttgtgtgaccaaaaagttatctccaga

SEQ ID NO: 379424 - DNA, 99 bp, Homo sapiens
gtggggcttccgcctcgtgggcggcaaggacttcgagcagcctctcgccatttcccggaacccttaggagaaatcttgagagtggacagcaattgtgaa

SEQ ID NO: 379425 - DNA, 100 bp, Homo sapiens
gggaaaacattacacctgccaatcatgggggtggtaatgaaggtggtagaggacattgaatacctgaagttcgataaagggccgtggctcaagcaggaca

SEQ ID NO: 379426 - DNA, 83 bp, Homo sapiens
tggaaacaattgatttgctcttacgtatttgtgtgacttgactcttcaaacacaaaggactgcctccaagtggaagttggcag

SEQ ID NO: 379427 - DNA, 100 bp, Homo sapiens
gattgtttgttggaagagtcatcacctaaattacccagacagtcacctggatcccagagtaaagatctactgagatgtcctcctcgcactttcttaccag

SEQ ID NO: 379428 - DNA, 75 bp, Homo sapiens
tgggacgcacagagaccgtgaagattccaagttcaggagaactcgaccgaaagcatccctggagggcaacctggc

SEQ ID NO: 379429 - DNA, 100 bp, Homo sapiens
atgacatatttttggacctgaaacagaaattctggaacacctatatggtgtaattacttcaagcctccaggatggcaatccagttccgttcgctcttccc

SEQ ID NO: 379430 - DNA, 87 bp, Homo sapiens
cagacggactcggtattggagctgaaggcggcggcagagaacttgccggtgccagctgaggaagacagagatgtcaatgaccccatg

SEQ ID NO: 379431 - DNA, 100 bp, Homo sapiens
tatgaccatgtatttgtggcttaaactcttggcatttggctttgcctttctggacacagaagtatttgtgacaggttgcaaaagcttctcatttcagaga

SEQ ID NO: 379432 - DNA, 75 bp, Homo sapiens
agcaactctgatgtggagttcttgaagcaactaaggtggagaaaatcagaattcttttgcgtaatgttgatctga

SEQ ID NO: 379433 - DNA, 131 bp, Homo sapiens
ggaatgaaacccttccagctcgatctgctcttcgtctgcttcttcctcttcagtcaaggctctgaaagtgttccagctgaaatttcagatcggacagactcgctgcggctccggaggcagtgattccaagc

SEQ ID NO: 379434 - DNA, 82 bp, Homo sapiens
acccgacgcatgagtggcaggcccttcagccagattctggggagcaggtcctggtggatgtggagaccaagagcaataagga

SEQ ID NO: 379435 - DNA, 82 bp, Homo sapiens
ggcccgacgactgtgacgaggacgaggaggcagccacggggcccctgggacttgaaagaggagattgatattcgactctcca

SEQ ID NO: 379436 - DNA, 100 bp, Homo sapiens
cttctatagaagggtgcacccttacagatggagcaatgagatacaggtttgctctggagcagcagcagctggcggagcaatggagatgcaatcctattat

SEQ ID NO: 379437 - DNA, 100 bp, Homo sapiens
aggcagccgcggatcgccgcgctcagcgacaaacaagtcagccatgtcatctgagcctcccccaccaccacagccccccacccatcaagcttcagtcggg

SEQ ID NO: 379438 - DNA, 74 bp, Homo sapiens
ccggaactggtcgaatgaggcacctaaaaattgtataccgcagattcagctgatgatgggagaaccagttacta

SEQ ID NO: 379439 - DNA, 80 bp, Homo sapiens
gggacgtctgagactttctccttcaagtacttggcagatcactctcttagcagatggcccactgcgtgaccttggttcag

SEQ ID NO: 379440 - DNA, 100 bp, Homo sapiens
ttctctagaggaggaagcctgcagccttaagaactggagaaccaggagtctcgggtctctgaaatccacagccttgttcatcggctcccagagaaaaatc

SEQ ID NO: 379441 - DNA, 50 bp, Homo sapiens
gatgaaacggatgacctggaaggagatgattatggattggatatgtctac

SEQ ID NO: 379442 - DNA, 100 bp, Homo sapiens
tgatctactcgtcgcgggattgccagcccctgcaggggggctccatgtcctacccgctgcagaagaaatcgacgttgacgtggagagcacggactatctc

SEQ ID NO: 379443 - DNA, 75 bp, Homo sapiens
agaggattccggcgggaactcgactcttggcgccaccgcctcatgcactgtggccggagttaagatgagtccagc

SEQ ID NO: 379444 - DNA, 100 bp, Homo sapiens
cagaattttacgggatcactccattagatctttggcgttgccagttccttttaccttttgtgagtttaggtttgatgtgctttggggctttgatcggact

SEQ ID NO: 379445 - DNA, 100 bp, Homo sapiens
aaagctgcttgagaagaggagccaaaacatcatagttgaaccgtcctggaatagaaattctggacaatcaggaagtccaagccacaatgatcctgccaag

SEQ ID NO: 379446 - DNA, 100 bp, Homo sapiens
cccatccgaaaggatgatgaagttcaggaggatggaaaacccaagcagcagctgcaccaggaccgaggcaaagggaccgcagtttaacagaaaacccaaa

SEQ ID NO: 379447 - DNA, 100 bp, Homo sapiens
cagacacttctggatgttggttctctttgtcattttcaacagtctgcaggccaatggaagcactgttgtgaagaacttatgaaaattgagattatgtcac

SEQ ID NO: 379448 - DNA, 97 bp, Homo sapiens
ttggctttgcagacagcacagtcttacagatcatcaatctgtttgtggctgtcatcatggataatttcgactatctgacccgggactggtctatttt

SEQ ID NO: 379449 - DNA, 51 bp, Homo sapiens
cctgaacggagtgtgcgacggattgggagccgattacacctcaacaagaag

SEQ ID NO: 379450 - DNA, 76 bp, Homo sapiens
ccgacatcgcggccttcttccgatccgctttgactctcccggatcttgcagagcagtttgcccctcctgacattgc

SEQ ID NO: 379451 - DNA, 80 bp, Homo sapiens
tggtctccggggccgctggattctgaggaccagcagatggccagtcacgagaacccagggtggcccagttgaaatccttc

SEQ ID NO: 379452 - DNA, 75 bp, Homo sapiens
tacctgcagaaggtctctggagacatcttcagcaggtctggaagctccgagtttatcttgggaactcaagaggag

SEQ ID NO: 379453 - DNA, 75 bp, Homo sapiens
tgaattggatgaaagataaagcccttaaggacaaggtgacaaacagcatgtttggtgcttcaagaaagaagtttg

SEQ ID NO: 379454 - DNA, 100 bp, Homo sapiens
ctggtccttaaggatatgtcagatgctcgagatgctgctgtgcagaagattgagactattatcaaagaacagtttgctcttgaaatgaagaataaggaac

SEQ ID NO: 379455 - DNA, 83 bp, Homo sapiens
ggctgtcggaggacttgcttctgcactagacaatcgaaaacagagttcagaagggatccagagacaatggccccgatgggatg

SEQ ID NO: 379456 - DNA, 74 bp, Homo sapiens
caacttcaaagccgacggcctgtccggcactgctgaagcatgacgtatcccagactttactcaaggcaacactg

SEQ ID NO: 379457 - DNA, 88 bp, Homo sapiens
tttgatttaatggatgccaaagcacgtgctgattgcatcaaagaaatagatcttcttaagacatatctgaagagatggattaagaatg

SEQ ID NO: 379458 - DNA, 107 bp, Homo sapiens
gcgatccgctggcgctagtctgaccctccgccaggcaaaaggaagatttttgatgaaattgagtcatgaaactgtaaccattgaattgaagaacggaacacaggtcc

SEQ ID NO: 379459 - DNA, 96 bp, Homo sapiens
atgcttcaaacgcggtgtcagaggccctgatccgagaggtggccaacaaagtcaaggtccccctgcaggtactactaaccaataacctgcttggct

SEQ ID NO: 379460 - DNA, 73 bp, Homo sapiens
ccgcggcgaccacagccaaagcgggcctacccaggtggatttagacaagtaacagctgctcagcttcacctga

SEQ ID NO: 379461 - DNA, 100 bp, Homo sapiens
tgtgatccctcaagactggtccacggagtgtatgaccacaaacagccatcaagataattcatcaccttcgactgagcattcacaaggccttgagaagcaa

SEQ ID NO: 379462 - DNA, 145 bp, Homo sapiens
gtgcggatgagctcgatgcagctggccccccaggagctggcccgctggcgggaccaggaggagaaaagggtgaggagccggaagaggaaccgaaagtgaaaacccagtggccgaggtctgcagatgagcctgggctatacatggc

SEQ ID NO: 379463 - DNA, 75 bp, Homo sapiens
acatggaccgggagatgatcctggcggattttcaggttttacctcacaaaaactactacaagcaccaagctccct

SEQ ID NO: 379464 - DNA, 50 bp, Homo sapiens
cggggaggtcacctgacgaggagctctgcggccgtcacgatgttctggaa

SEQ ID NO: 379465 - DNA, 76 bp, Homo sapiens
agaagggctacaatgtcaagtccgacgtctggagcctgggcatcaccatgtgtaaacaggaacatcgataagtagt

SEQ ID NO: 379466 - DNA, 90 bp, Homo sapiens
gcgtctgccggcgtggacaccaatgtcagggtggctttcttcctccagaagaaataaaagaaagatttgacagcaactgtattacaccag

SEQ ID NO: 379467 - DNA, 100 bp, Homo sapiens
tcagcgggggaacagctagcggcaaggacaactgtcatctgggaagtaacaacgcaggatgccccctggggtggactgccccatggaattctggaccaag

SEQ ID NO: 379468 - DNA, 82 bp, Homo sapiens
aaaggatgcctccacacctaccactacccgtgtgccagcgatgcagcaaattgtggctactaatttgccccctgaagatcaa

SEQ ID NO: 379469 - DNA, 100 bp, Homo sapiens
tgccaagaagcgaaatgtgctcattggccattcctacgggactgacaagaagatggatgggggctctggcagggaactggcctcagcccccgaagtgccc

SEQ ID NO: 379470 - DNA, 75 bp, Homo sapiens
gcttcttgaatttctctctgtaaaggaggcttctgcttcagtttacccaacctcagcaaacatcgtttgctttgg

SEQ ID NO: 379471 - DNA, 74 bp, Homo sapiens
cggtggcaagcaagtttaatcagacctgctcacacttcagaatagagaagaccatggcaaaagttataaccacc

SEQ ID NO: 379472 - DNA, 100 bp, Homo sapiens
tgcggtggctccctgggccgaggtccaagacaactttgacaagattgaattcaataggatgtgttggaccctctgtgtcaaaaaaaacctcacaaagaat

SEQ ID NO: 379473 - DNA, 90 bp, Homo sapiens
acaaaataaccacttaccccttctcaccgaggaagagcgggagaaagggtaaaacttccttttcctgtagatcaaatcacagatcttcca

SEQ ID NO: 379474 - DNA, 76 bp, Homo sapiens
ttcaacgaggatgtggaggaggtcacttaccgagccctgagtctattatcctcccagtccacaacgctgaaccgtg

SEQ ID NO: 379475 - DNA, 100 bp, Homo sapiens
cacgggtgaatgctgctaaaaacaagactggggctgctcccatcattgatgtggtgcgatcggtacatcaggaacgtctctatcaagaatacaatttcag

SEQ ID NO: 379476 - DNA, 114 bp, Homo sapiens
cagcaaagacagccgcccagaacctgtacgagaagacatacctgcccgctgtagatgagaaactcagggcggctgtgagtgtggaccccttctatgagatgctggcagcgagaa

SEQ ID NO: 379477 - DNA, 74 bp, Homo sapiens
gccaccgcgtgtggcctctgggcaccttttgaagatatggctgagaaggacaccacctttgaggcgccacccct

SEQ ID NO: 379478 - DNA, 123 bp, Homo sapiens
cggatggctgagggagccccgcggatcgtttaggaaagccggccaggcctagtgatgaccactttgtacagatcatgtgtatccgaaaagggaagagaatggttgcccgtattcttcctttcc

SEQ ID NO: 379479 - DNA, 49 bp, Homo sapiens
ctggattccatgtagagacccctggagtcaagttcatccgagaagtaac

SEQ ID NO: 379480 - DNA, 100 bp, Homo sapiens
ggtgaaacaccactgaagcattgccaagctttgcccgaagtttttacatacaaattctactagtcacacctggccattcagtgcagttgctgaattaata

SEQ ID NO: 379481 - DNA, 85 bp, Homo sapiens
tccttcggcagtccacccaccgccgccgcctcccaggaactctgcgaccttcaagtcgtttgaggaccgagttgggaccataaag

SEQ ID NO: 379482 - DNA, 101 bp, Homo sapiens
caaagaatctccttgacaaggactggaatattttcagcaagaactgcaacaacagctttgctgaatgctccagccaagaactggactcagaggatgccccg

SEQ ID NO: 379483 - DNA, 82 bp, Homo sapiens
ccacgtcccgcggcttccgcagcgaggtggacatgttcgtggcccaggccgtgctacaggcgtgatggtgggcatgggtcag

SEQ ID NO: 379484 - DNA, 100 bp, Homo sapiens
atgcatttcacggtggccttgtggagacaacgccttaacccaaggaagtgactcaaactgtgagaacttcaggtgttcaagcagccctggccagggatca

SEQ ID NO: 379485 - DNA, 96 bp, Homo sapiens
gctattacttggatatcagcctatacaaggaagtgactgactccaggacagcacaggtaccaatgatggaagcaccgaagctgcaataactttact

SEQ ID NO: 379486 - DNA, 75 bp, Homo sapiens
tgatggttacaatgaaggaggaaattttggcggtggtacagaactggaacagtgaaattcttgctaagcaaaaac

SEQ ID NO: 379487 - DNA, 90 bp, Homo sapiens
agcgaatcaagcgggagttcaaggaggtgctgaagagcgaggagtgaagtacatgcgagaagccacgccctatgtgaagaaaggatcccc

SEQ ID NO: 379488 - DNA, 75 bp, Homo sapiens
ttttccaaatgaatttgcaaaacttactgtagatgatgaactggattctttccatgatttgaagaaacaggaaac

SEQ ID NO: 379489 - DNA, 97 bp, Homo sapiens
acattccagattgagtgtctgaaggatgggacgtggagtaacaagattcccacctgtaaaacctgatctagttgaatctgaagatgtggacctgctg

SEQ ID NO: 379490 - DNA, 88 bp, Homo sapiens
tggtgtgattagcttcgcagtctggaaagctttaggagttcacagtattgggatttggaattccaacagtgggcttaacatgacggac

SEQ ID NO: 379491 - DNA, 100 bp, Homo sapiens
tcactgagaagtattttgctctgcgaaacatcatccagaaggcacagaaaactgaatctgtagataacgagggagaatgaattgtcatgaaaaattgggg

SEQ ID NO: 379492 - DNA, 100 bp, Homo sapiens
tgctgagcgaagactgtaaggagaaccctgaagatcccagtgtctgagtgaactaacagtcctgctttcagccaccatttgcacaagacacccagcactg

SEQ ID NO: 379493 - DNA, 98 bp, Homo sapiens
gctgcggagccgcgggccggcgagcgcgtcgccaccatgcttcggaaccaaaaagaagcttcccagagccggggccaggagccccaagcgccctctag

SEQ ID NO: 379494 - DNA, 50 bp, Homo sapiens
ggagcttccgggagggcggctcgcaggttgattgtacacagcactatgaa

SEQ ID NO: 379495 - DNA, 74 bp, Homo sapiens
gaacagattgttcctaaaccagaagaggaggttgcccagaagaaaaagtctcttcaagaaaatgaggaggagga

SEQ ID NO: 379496 - DNA, 49 bp, Homo sapiens
ctcagaagaatttaatggatatctagtactgatgaaatctccatctcca

SEQ ID NO: 379497 - DNA, 98 bp, Homo sapiens
gtggaaggctgtatgagcttctaactcattgtattcctcctgagataataatgaaggtttattttcttgaaaaggctccaggcttcggcttggaaaat

SEQ ID NO: 379498 - DNA, 75 bp, Homo sapiens
tttaacccacaacctgttgatacctcaaagcaatcttgtgtcgttataatgaggagagtcaaaaacatgcagcct

SEQ ID NO: 379499 - DNA, 101 bp, Homo sapiens
tggaggaggaccacgcctgcatccccatcaagttggtagctggcagtgttgtgatggcttttgaagaagtatgcccggacagaatagatctgattcataaa

SEQ ID NO: 379500 - DNA, 100 bp, Homo sapiens
tttatgccgtaacaccgttacttgaagatgctttaatggataggaagcagtacaggttttgattaagcactcagctgatgtcaatgcaagggacaagaac

SEQ ID NO: 379501 - DNA, 96 bp, Homo sapiens
aaactcagcatgcttagcattcgagagaacaaaattaaacaactacctgctgaaattgattctgaaggaagatttccattaggtaatttgtttaat

SEQ ID NO: 379502 - DNA, 75 bp, Homo sapiens
ccaaaaacgtcaacaacagttttacggttgctatcaagatcatagataagacccagctggatgaagaaaacttga

SEQ ID NO: 379503 - DNA, 83 bp, Homo sapiens
agcatttatcaagtcttacaggagcatcagcacaggttgaagatgacagcgatgcagagacctatggagaagagaatgatgaa

SEQ ID NO: 379504 - DNA, 100 bp, Homo sapiens
ctctagtagccacggtgtggcagctgctctgaaccaggacctggacccggacccaaagtgccatgtctttaattgatggaatggggagaagatattaaag

SEQ ID NO: 379505 - DNA, 100 bp, Homo sapiens
gctgcatccaaatcttctccctggacctcgtgcatacggtcccaggtgtgacaccttcagcaggtctcagggaagatggcagccctaggggacattcagg

SEQ ID NO: 379506 - DNA, 75 bp, Homo sapiens
cagacgttagcgtgagtgatcactctcaatcccgggggtttgccaacttgttaataagatggaggagaatactgg

SEQ ID NO: 379507 - DNA, 74 bp, Homo sapiens
actgtgaaaaggctggtgaaagttaagatgaaagaaatgacctgccgtgatatcgttaaagaagttgcaaaaat

SEQ ID NO: 379508 - DNA, 85 bp, Homo sapiens
aaaagaagtctaactatgaagtattagacactgctgatggttcttcagaactcaggaatcgtgttgcatgcattgtttctaccca

SEQ ID NO: 379509 - DNA, 98 bp, Homo sapiens
tgagggacccactgacagattgtccggttgttattgatgccttcagattgatcaatgctaatatgatggtcttaggacatgaaccaagacaaacaact

SEQ ID NO: 379510 - DNA, 100 bp, Homo sapiens
caccgcaacctccatctcccaggcttgagaactcctgtgtgaattaaatcacgaccttctgatgaagccactccgatgagcctgtgaggcacattgtctt

SEQ ID NO: 379511 - DNA, 100 bp, Homo sapiens
gcaggcaccatggaccgagcccccacggagcaggaatactctgaagatagtaactccgagccaaatgtggatttggaaaatcagtactataattccaaag

SEQ ID NO: 379512 - DNA, 89 bp, Homo sapiens
attgccatgaaggaactcaacctggcttgctcctcaggctcccaggaacctgcctcaaaacacaggtctccacgaccaggagacaggtg

SEQ ID NO: 379513 - DNA, 50 bp, Homo sapiens
aactcaagagcaatcagtaccatctgttccatgccattgcagtgtcaact

SEQ ID NO: 379514 - DNA, 82 bp, Homo sapiens
gtattacaggctcttctcgttttactgaaaaaggcacctcctcaggtttgtatacagagttcttcagggatccctgtttcca

SEQ ID NO: 379515 - DNA, 82 bp, Homo sapiens
gtgcctgggccgctgggagccgttattggctgccgttaaggaccgttacgtttcccggaacatccagtcatggataaaaatg

SEQ ID NO: 379516 - DNA, 100 bp, Homo sapiens
gaaaaactcagtgagacacaatttatcattgaataagtgttttaagaaagtggacaaagagaggagtcaggcttgtttacaaattgatcctgctgacagg

SEQ ID NO: 379517 - DNA, 100 bp, Homo sapiens
tcaccctgcttgctttgtggctatcatcaaaatcaccaaccaaaagattcacctttggatttcatcgcttagtttcccaggcggcaagtgcgacccggct

SEQ ID NO: 379518 - DNA, 101 bp, Homo sapiens
aaacgactctgcgccgccgctgcctccatcctgggcaaacctgcggaccgagaaccctctgcccacagtggagattgccatccggaacacgggcgatgcgg

SEQ ID NO: 379519 - DNA, 50 bp, Homo sapiens
gcctacccgggatacggaggagggtctatccttcactggagtctgatgat

SEQ ID NO: 379520 - DNA, 97 bp, Homo sapiens
atggaggcagaggtaaacttggagagcgccagcagagacttcagaaggaacgcctcatgaatgacttctctgcagccttaaacaatttccaggctgt

SEQ ID NO: 379521 - DNA, 82 bp, Homo sapiens
atcctggacctatgaatatccagtttgagccatcggatctaagatccaaaagggattaatgaaaatcaagttccatcctcag

SEQ ID NO: 379522 - DNA, 100 bp, Homo sapiens
gataggggggaaacctcaagatataatcttcacttccgggggcactgagtttgcagctcaccttgtgaagatgaaatatccaagaatctgtattctagat

SEQ ID NO: 379523 - DNA, 87 bp, Homo sapiens
ttatttaaacaggttcattttggaaaagattttacacccagatttggaagtagcagatcatgcttttcctcctccacgaacagcttt

SEQ ID NO: 379524 - DNA, 100 bp, Homo sapiens
ccaaaccaaactggagctggtgcagcaggaattgggatcgtgtcgctgcggtggtataagttgaaatccaaaccaggaaagaaggacaaggagcgaggag

SEQ ID NO: 379525 - DNA, 121 bp, Homo sapiens
cacgcggttcctttttgcgagctttccgagtgccaggcgccggccggctgcgaagacgcggtgggccgcccctccgatctttctcctggcctgccctccatgtcggggagctatcgtcgtc

SEQ ID NO: 379526 - DNA, 73 bp, Homo sapiens
tgtcctgagaggtcagattgctgtcaggtgaaaggtgtagcagtcactcggcctacacccacagcatcgacct

SEQ ID NO: 379527 - DNA, 96 bp, Homo sapiens
taagaacagaaaatcgtcttatagttgagaatttatcctcaagagtcagctggcaggtggatagatacttctcaagacatcacacagcgtgagtca

SEQ ID NO: 379528 - DNA, 82 bp, Homo sapiens
ttgctgcgggggattgtgggagtctccgcgtcccgctcgctgggagagagatgtggacgagtgctcactagcagaaaaaacc

SEQ ID NO: 379529 - DNA, 75 bp, Homo sapiens
cagcaggtggagagtcgctggggctacagcgggaccagtgaccgcatcagacaggctctaaggggcagacggcgg

SEQ ID NO: 379530 - DNA, 90 bp, Homo sapiens
ccagcaagaggagcagtccagcggcatgaccattttcttcagcctccttgtcctaggttgtggcagcactgcctgaaggtatgagaccag

SEQ ID NO: 379531 - DNA, 100 bp, Homo sapiens
aggaggcgatatctctgtgtgcgaatggtaccagcgtgtgtaccagtccctctgccccacatcctggggctgcttcgaacacatcggccacgccatcgac

SEQ ID NO: 379532 - DNA, 75 bp, Homo sapiens
cggccatggcgtacgcctatctcttcaagtacatcataatcggcgacacagacaacactaagcagttgagatttg

SEQ ID NO: 379533 - DNA, 74 bp, Homo sapiens
ggcggacgacagaggatgccgaaccactccaatacttgccagaactaatacagctgatgaaatacctgaccttt

SEQ ID NO: 379534 - DNA, 74 bp, Homo sapiens
agccaggagcagcagcctttctagatgccctgtatccaagcccaatatgggacaccagcaccgagtccgggacc

SEQ ID NO: 379535 - DNA, 100 bp, Homo sapiens
ggcataccagcgggccctggccgctcacccgtggaaagtacaggtcctgacagctgcccccaaatacatcaagatgtttgtactggatgaagctgacgaa

SEQ ID NO: 379536 - DNA, 100 bp, Homo sapiens
cctggatccaggataacggaggctggagtgatcagcagctggactgtgccttggacctaatgaggcgcctgcctccccagcaaatcgagaaaaacctcag

SEQ ID NO: 379537 - DNA, 100 bp, Homo sapiens
ggctgctgagaaatctttgcctacagtgagggaagacgtattttagcagatgaagcactcaagctgggcattctagataaagttgtaaactcagacccgg

SEQ ID NO: 379538 - DNA, 100 bp, Homo sapiens
ttttaactggaatacctttcttcaacgctctggtcctcgatgggcttcctggaatattggtgtgtttatttgcatcagatgtgctggaattcatagaaat

SEQ ID NO: 379539 - DNA, 74 bp, Homo sapiens
ttttggggcaagctacggaacagatcgccatggatcggatgaagaagatcaaacggcagctgtcaatgacactc

SEQ ID NO: 379540 - DNA, 98 bp, Homo sapiens
agcggaggcgcgcggaacagtcgccgaggcgattcccgcccaggacttcctcgttctgcccatcttcctaacaaggctatggctgataacagcagtga

SEQ ID NO: 379541 - DNA, 74 bp, Homo sapiens
gtctccaaaatgagtcgcatcttcaacccccatcttgcacttgccggcggtcccaacccagcaggagaagtgga

SEQ ID NO: 379542 - DNA, 105 bp, Homo sapiens
aaaagatcagcgaggagcagcagcagctccagcaggcgctggctcctgctcaggacacattcagctaacgtattttagcaggtggagtgaggttgaagattcctg

SEQ ID NO: 379543 - DNA, 121 bp, Homo sapiens
ctcaagcccccaaggcccttcggcgggcccctgctgaaagaccggcatgccctattctgtgggcttccgcgaaatccagacatttaatgtggatgcaccatgccagaccgtggaagattta

SEQ ID NO: 379544 - DNA, 95 bp, Homo sapiens
cgggaactgctgacgcttgatgagaaggacccacggcgtctgttcgaagcgtctcgcccttttgcccaggctagagtgcagtggtgcggtcatgg

SEQ ID NO: 379545 - DNA, 90 bp, Homo sapiens
caagaggaacacggtagatctagcatcgttggcttcacagtatgactgatgatcctccaacaacaaaaccacttactgctcgtaaattca

SEQ ID NO: 379546 - DNA, 100 bp, Homo sapiens
cgcgagcagagggacgtggagcgagcgggtggaaaccaggcggccagccagctggaggagatgccctgtatccaagcccaatatgggacaccagcaccga

SEQ ID NO: 379547 - DNA, 141 bp, Homo sapiens
cgtattctcagagtaaaagttgtttctggaattgatctcgccaaaaaggacatctttggagccaggtgtcatggagaaactccagctgggcccagagattctgcagcgggaaaatccaaggcttatttatgccaggctgag

SEQ ID NO: 379548 - DNA, 82 bp, Homo sapiens
aagctctttgacacacagcagttcttgtcaggtacatggccacctctggcctagaccaccagctgaagatctttgacttgcg

SEQ ID NO: 379549 - DNA, 100 bp, Homo sapiens
gacgagccgtggtacgaccaccaggacctccagcaagttctttggggtgactttcaagatggactctactctaacagcaagtgaaatccggcagcgattt

SEQ ID NO: 379550 - DNA, 75 bp, Homo sapiens
agcaccattagacggattggacttttcaacaaccgcacagatagagtcaagttccatgccattgcagtgtcaact

SEQ ID NO: 379551 - DNA, 98 bp, Homo sapiens
ttgcatctagaggaattgaaaatttgccacttgacactgacctggaaaatgaaaaaacatctactgtcccattggctgagatgcttggagacatgatc

SEQ ID NO: 379552 - DNA, 75 bp, Homo sapiens
cctggagaaccgggcccagcagcactgggttgctgagacaaaggaaaacccactcccttggaggagcatgacctt

SEQ ID NO: 379553 - DNA, 98 bp, Homo sapiens
ggctctccgccgtccccagccctgcctctccctgggctctgtgtaaggcaaacattggtgggcaccgatcttcctgttcattctgcaagaacccaaga

SEQ ID NO: 379554 - DNA, 99 bp, Homo sapiens
atgttacagaccagggaggatccatgacttgcccagccagaagatgcctgaggaaacccagacccaagaccaaccgatggaggaggaggaggttgagac

SEQ ID NO: 379555 - DNA, 100 bp, Homo sapiens
ccggccggtccctcgcctcccggccgagctgacggtgagtgtttctatggttggctagaacctctgttggccagaatagctgagaactacacggctgtcg

SEQ ID NO: 379556 - DNA, 100 bp, Homo sapiens
ccccccacccaccgcgccggcgctcccttgtcacgcctcgggaagcgcgcacctgccaagcagtgttgaagggctccatgccattgttgtgtcagataga

SEQ ID NO: 379557 - DNA, 101 bp, Homo sapiens
ccttccaggttgttatctgcaggtgtggcaggttgcagaggacagtggtgtgagcgacgtctcctcaccacagtgctgtgtggtctatacctcagccaggg

SEQ ID NO: 379558 - DNA, 90 bp, Homo sapiens
cagaatcactgagctgtaacaaagcactctgtgctagtgatgtgagcaaatgcctcattcagcttggtgatccagctatttttcctgccg

SEQ ID NO: 379559 - DNA, 50 bp, Homo sapiens
tattgatgtcaccattaacgaaaggtcatttaccatgcggtcctccaggt

SEQ ID NO: 379560 - DNA, 100 bp, Homo sapiens
tttctactggaaaaaccattttcagttaaagcaggtgcaggccctagcaggtgcaggtggagtagacaatctccatgtactggactttcagaagtataaa

SEQ ID NO: 379561 - DNA, 98 bp, Homo sapiens
cggcgaatacgccaggtgtgactggctggaagtggcgtggctggaccatggccaacctggagcgcaccttcatcgccatcaagccggacggcgtgcag

SEQ ID NO: 379562 - DNA, 75 bp, Homo sapiens
cagatggtggagagcggcactgaagcttggaggactcctgaagtatgtacgacccttcttgaattccatcagcaa

SEQ ID NO: 379563 - DNA, 100 bp, Homo sapiens
ggtcttgctcggccgatgaagtgcagaggtttttttctggcaaggcccgaggcttcttcaagaagggagatgtggtcattgtgctgaccggatggcgccc

SEQ ID NO: 379564 - DNA, 83 bp, Homo sapiens
tgccgctgagcctggcgcagatcggctgtctgtccccagaccccagagcacgtccggcaccaccatgactgggctgttgaaga

SEQ ID NO: 379565 - DNA, 95 bp, Homo sapiens
gcggctggaccacctggagaatgtcatcaagcagcacattcaaggtgtcatggagaaactccagctgggcccagagattctgcagcgggaaaatc

SEQ ID NO: 379566 - DNA, 128 bp, Homo sapiens
gcaaaagcttccaggaacaagccatggagggtcaaagaaactcctggttgagctcaaagttattttacattgtctctaattaacagaagatggcaaagcccagccacagcagctatgtccttcagcag

SEQ ID NO: 379567 - DNA, 96 bp, Homo sapiens
tgatgaaacttgggactctgcaatagatacatggagcccatcagaatggcagatggcttatgaaccacagctgtctgcgagcctggctgtggtgca

SEQ ID NO: 379568 - DNA, 100 bp, Homo sapiens
accagctccgcgagctgcccgagaattaactcctgaggagagagcccaaaagattgccaaagccatgcgcaaacagtcttctgaagtcaaagaaaaatgg

SEQ ID NO: 379569 - DNA, 75 bp, Homo sapiens
taaaaatcacagaccaggatggagataaaggaactcaaagaatttggcacttttcaggattagaagaggctgtgt

SEQ ID NO: 379570 - DNA, 82 bp, Homo sapiens
caccgctgccctcagctccgagtccagggcgaggccagaagcggactcctagaagaggggagcagcaaggatggaatgacag

SEQ ID NO: 379571 - DNA, 97 bp, Homo sapiens
ggccaccggcgccatgggccagtgcggcatcacctcctccaagaccgtgctggtctttctcaacctcatcttctggtggtatgtgtgcaacagagag

SEQ ID NO: 379572 - DNA, 101 bp, Homo sapiens
caccactggcatggatggcggcatgagtatctgggatgtgaaggtcagcccaaggccaaccccactgtcactctgttcccgccctcctctgaggagctcca

SEQ ID NO: 379573 - DNA, 100 bp, Homo sapiens
gccccctatcctatccgcaaacaccaaaagaatgcaatggtgtaaagattccagttgatgccagtaaacctaatccaaatgatgtggagtttgataatct

SEQ ID NO: 379574 - DNA, 100 bp, Homo sapiens
agactggctgcaggattgcgggcaacagatcccctaatttgtggctgaaagatgttctcaaggaagaaggtgtctcttttctcatcaacacctttgaggg

SEQ ID NO: 379575 - DNA, 75 bp, Homo sapiens
gtgagggggccggctctgtggcagatggcccactgcgtgaccttggttcagctgtccatttcctgtgaccatctc

SEQ ID NO: 379576 - DNA, 100 bp, Homo sapiens
gtcttcatagaccagaaccttagtcccgggaaagagacacgctgtgaacaagacaggccttccccaaccacagcgccccctgcgccacccagcccctcgc

SEQ ID NO: 379577 - DNA, 90 bp, Homo sapiens
acatggacgtctggggcaaagggaccacggtcaccgtctcctcaggtactccaaagattcaggtttactcacgtcatccagcagagaatg

SEQ ID NO: 379578 - DNA, 74 bp, Homo sapiens
gccgagatcgtgggtcgccaggctgccactgcagagccccgccatggaagacacgccgttggtgatatcgaagc

SEQ ID NO: 379579 - DNA, 90 bp, Homo sapiens
ttgcaattggcactaagctaccagagaatcaagctatccaaatgcgattagttgatgtggcctgcaaggagtacttgattcttcagaaaa

SEQ ID NO: 379580 - DNA, 75 bp, Homo sapiens
aaacgggcagccatggccctccacagcccgcagtcctcctcgccctctgactaatatgaatgacaccatggttag

SEQ ID NO: 379581 - DNA, 88 bp, Homo sapiens
cagggaggatgtcgggacaccccggaagctgggaaatgtaacaattgctcgagcaattgaactaaaacatgctcctggactaattgct

SEQ ID NO: 379582 - DNA, 75 bp, Homo sapiens
aaaggacaccagcaagctgttcaatgaggagacctgtgaccgcatcaagcagtcagcagctggcaccaagcgtcg

SEQ ID NO: 379583 - DNA, 83 bp, Homo sapiens
ttttgagagtccagtatatttggaggaagctgcagatgtactttgtattttacaagcagatatggtttggagtgcctttttcg

SEQ ID NO: 379584 - DNA, 90 bp, Homo sapiens
gagagcagcgcagaagccgagccgcgaggagcgcactccgtggccccgatggagcggtacaaagaaggaagaatcctgctcaaaaatgag

SEQ ID NO: 379585 - DNA, 98 bp, Homo sapiens
ggcggtggacccacgagcgcacccaacatgagtgaagtttcctgcaagaaacgggacgactatttggaatggccagagtattttatggctgtggcctt

SEQ ID NO: 379586 - DNA, 75 bp, Homo sapiens
tgcagtggcgaagcactttgttgccctgtctactaacacagtcaaaatgcagatcttcgtgaaaacccttaccgg

SEQ ID NO: 379587 - DNA, 90 bp, Homo sapiens
tccactgactctctcttttcctgataacatggccagcaagaaagtaattacagtgtttggagcaacagagccatggagaagctaagcggg

SEQ ID NO: 379588 - DNA, 100 bp, Homo sapiens
cttcaggagcgaagagctgcttctgtatcttaagaccatgccgtccatcagcagtgaccgcgccgcgctgtgcgccggctgcgggggcaagatctcggac

SEQ ID NO: 379589 - DNA, 96 bp, Homo sapiens
aagatggaaaaccagttattgaatatcaagaggaggagttgttggtgtggacactgcaagaaacttgcccccgagtatgagaaggccgccaaggag

SEQ ID NO: 379590 - DNA, 97 bp, Homo sapiens
cagtttaggtctcaaggcaagcctattgagttaacacctctgccgctgctaaaagcaacatggccaatctttcctaagctgctcagcttacaagaaa

SEQ ID NO: 379591 - DNA, 97 bp, Homo sapiens
gtctccgccatcagctcggcagtcgcgaagcagcaaccatggaaccacgtgaatgttgagggggcgacacacaagcaggtggtggacctgattcgag

SEQ ID NO: 379592 - DNA, 97 bp, Homo sapiens
tggaagccaggaatcaaaagtgaagaaactctgcaagcccttaggagagacagcgtctggagaccatcctcagtctctgtgctgaatacacaaagcc

SEQ ID NO: 379593 - DNA, 75 bp, Homo sapiens
tattacatgatattagaaactcactgcagaatctttcacagacatatctgaagagatggattaagaatgctttgg

SEQ ID NO: 379594 - DNA, 75 bp, Homo sapiens
caacaaccccaccacggagttccggtacaagctcctgcgggccggcggggtactccaaagattcaggtttactca

SEQ ID NO: 379595 - DNA, 75 bp, Homo sapiens
tggaagagacgcccctgctaacgggaatgctagggggacctacctgccgcagacgtacatcatccaggaggagat

SEQ ID NO: 379596 - DNA, 100 bp, Homo sapiens
atttaattttagggtcctttatatagaagggagagtagacccagaacgctggacaaacattcctttgctggtcaagatcctaaagctgatcatcaacgag

SEQ ID NO: 379597 - DNA, 101 bp, Homo sapiens
aacgtgcctttgaagctgccgatgccagagccaggtgaactggaggagcgatttgccatcgtgctgtgcggaaacaggaaattataaaagtgacagagcag

SEQ ID NO: 379598 - DNA, 75 bp, Homo sapiens
aggcgcgggaggtgttcgagaacgaccccgagacgggatccaggtccggcacgatcaagacccaggctacatgca

SEQ ID NO: 379599 - DNA, 87 bp, Homo sapiens
gcggcgccgagaggccgtgcgggacgcgggcgccaggaccggccgaacgcagagcgtccgtctccaagagagtatgaagagagtgcg

SEQ ID NO: 379600 - DNA, 51 bp, Homo sapiens
ggcctcctcagccacgtggaactaattgctcctgcgttgctaagacaagca

SEQ ID NO: 379601 - DNA, 73 bp, Homo sapiens
gatgtcatctccactctgcagtacctcaatctcatcaactactacaaggtagacagcgccaggctcacttgat

SEQ ID NO: 379602 - DNA, 89 bp, Homo sapiens
ttggcttatattaggctacctcttcttgcaccacaggagctcgaggccatgagcagatataccagcccagtgaacccagctgtcttccc

SEQ ID NO: 379603 - DNA, 90 bp, Homo sapiens
ccgacgctaccgtccgctccctggatcggcatagtggagccagtgctgaggttcagaaggaggaggagaagaagttcaaggaagttggag

SEQ ID NO: 379604 - DNA, 100 bp, Homo sapiens
gggttcagcttcaaagaagacactttgctgttgatagctgagctggctttagcaatagcagatcttgccctacagatgccttcctggaagggatgtgtgc

SEQ ID NO: 379605 - DNA, 100 bp, Homo sapiens
gaccgggtttctttgatgcgacctcaggaaggagatgagttactccacaggatccgctgaacataggatgttgccacaaaatctacctcgtgtatttttc

SEQ ID NO: 379606 - DNA, 90 bp, Homo sapiens
ctcgctcgccgtttccaggagcacagttggaggagagcagattagtgccattggaaggggcatatgtgtgttgctgggtatttccctgga

SEQ ID NO: 379607 - DNA, 89 bp, Homo sapiens
gctgcaaagctgggagagactggaccagaccatgggcctgagcatcaggaattgcattttgtgaaaaaagaacaagaattttctgcaag

SEQ ID NO: 379608 - DNA, 75 bp, Homo sapiens
tgcagacacaactacgaggtggcgttccgcgggatcttgcagaggagaggggtgtcacacctgctgccctacttc

SEQ ID NO: 379609 - DNA, 100 bp, Homo sapiens
gcagatcctcttggtgttttgataaacagtgattctgaatgaacttcatgagcttgaaaaagaaatagcagctatctctgcagaaactaaagaaacagaa

SEQ ID NO: 379610 - DNA, 95 bp, Homo sapiens
cggagtgggtgtcctcaagaaaggtgaaattgccctcttggaaggcctgacagtggtatacaaaagcagtatagatctctatttctatgtgattg

SEQ ID NO: 379611 - DNA, 98 bp, Homo sapiens
ccaagtatggagaacatgaagccagtcctgacaatgggcagaacgaattcagtgatatcattaagtccagatctgttgctgatatgtgttcaagatga

SEQ ID NO: 379612 - DNA, 100 bp, Homo sapiens
aatcttttggaatttagaagattagttctgaattacaagcctccatcaaatgctcaagatttaccccgaaaccaaaaggctgaccccgcactacatctac

SEQ ID NO: 379613 - DNA, 74 bp, Homo sapiens
ctcggcttcgtcgctgccaacctgctgttctgcacaacattctgaaattttttggttattgtaatgatgttgat

SEQ ID NO: 379614 - DNA, 82 bp, Homo sapiens
aagaagcaagtgggatcacctatgaagatactcaaatagctataactgtaccaaagacatggaagaaaccaaaagatcggac

SEQ ID NO: 379615 - DNA, 75 bp, Homo sapiens
tggcgactttgacttcctgccaaaatcctgttaccctagcaacagaaatgggatttgaccgatacaaaatggtgg

SEQ ID NO: 379616 - DNA, 100 bp, Homo sapiens
caaaaacaaaattctgaactcaggacttggcaagaaaaccaattctgtgtcctcggaggaccacagcccagttgggccccaggcgaaacccagcctggag

SEQ ID NO: 379617 - DNA, 89 bp, Homo sapiens
aacgtatagtccgttctttagaaacaactcggagaaaatgagtatggaggtacaggtttgcagattccgccagcagcacagcaagctct

SEQ ID NO: 379618 - DNA, 95 bp, Homo sapiens
atggccccatggtgacggtggccctgtcagtggctctcttggccctcctgaaatgaattcacagatggattcagtggaaaagacaacaaatagaa

SEQ ID NO: 379619 - DNA, 100 bp, Homo sapiens
agggcctgactgctgcggaggcctcggcaatattgattttagacaggcatcacgtgccctccccccatgtccgtggaacacgcagacatctgggtcaaga

SEQ ID NO: 379620 - DNA, 85 bp, Homo sapiens
cccaggaggcggagcggacaaggctccggcctgcgaggagacaatgcagatcttcgtgaagactctgactggtaagaccatcacc

SEQ ID NO: 379621 - DNA, 90 bp, Homo sapiens
cgcgccccccgggacccccacgccgccgccagggaacccaccaagaccaacctggtcacattcttccataccgacctcagcggttacctc

SEQ ID NO: 379622 - DNA, 90 bp, Homo sapiens
gatatggcgcaactgcggcgcgtcgcctgcgaggccgctggccaggcctgagcctctgccaccatggccattgtgcagactctgccagtg

SEQ ID NO: 379623 - DNA, 90 bp, Homo sapiens
accccttccacgtcatccgcatcaacaagatgttgtcctgtgctggggctgacaggtctgctcaccaggtggccagataccgcccacgtg

SEQ ID NO: 379624 - DNA, 75 bp, Homo sapiens
aaggacctggccgacatcgcggccttcttccgatccgggttacacatcattttggaatgactgtatatcatctgg

SEQ ID NO: 379625 - DNA, 75 bp, Homo sapiens
cgggatctaacccaggagcagacagagaagctgctgcagtttcaggaggccaacggtcctgctgatggctacgca

SEQ ID NO: 379626 - DNA, 100 bp, Homo sapiens
tggagtcatcgcgggcatcttgctgttcgtgattatatttcttggagttgtgttggtaatgaagaaaagttgcacgtgcattatttaatcacatagacaa

SEQ ID NO: 379627 - DNA, 100 bp, Homo sapiens
agttaggattcaggccaaactggtaaatgacgaaggggcttcttccagagccaaggaggaagggttgtccgggatatggctttagttgcccctgaagctc

SEQ ID NO: 379628 - DNA, 75 bp, Homo sapiens
cagccctgtggctgggggcagagctcaggtgaatgaaaactttgccattgatttgatagcagagcagcccgtgag

SEQ ID NO: 379629 - DNA, 90 bp, Homo sapiens
cttgcctaaatgaggaatgtctttcctaccatctaaaatacgaaggtttctggctgggccacttggatgttgtagcattgctcattaacc

SEQ ID NO: 379630 - DNA, 90 bp, Homo sapiens
ctgcagtccctcgtccagccacccccaggtatcttggagatggccgcttccatctggagtctgtcatgattgccaaccccaatgtccccg

SEQ ID NO: 379631 - DNA, 90 bp, Homo sapiens
gcagcaagggcggcggtggcggcggcggcagctgcagtgacatgtccagcatgaatcccgaataacattttgctgtcagctggaagagct

SEQ ID NO: 379632 - DNA, 82 bp, Homo sapiens
gccgcctgaggaggcgagctagccgggagttacaccgccaccgccagatatggctcgtggacagcagaaaattcagtctcag

SEQ ID NO: 379633 - DNA, 88 bp, Homo sapiens
gggaaagatggcgacggctccgcgacgttgaggccgcgttgggcggttcagactcagggtggtcatttcttcagatagctccccagct

SEQ ID NO: 379634 - DNA, 90 bp, Homo sapiens
tctagaccctactgcggtctcggatattgccggctctcgtgctcattcccccatgatcgccgtaggaagtgatgacagtagccccaacgc

SEQ ID NO: 379635 - DNA, 83 bp, Homo sapiens
acaacaccatggaaatatttgacattgaggtcttcaatgaaatttatccagtatggacttactcttacctggtgctactgttt

SEQ ID NO: 379636 - DNA, 100 bp, Homo sapiens
cggccactgcgccgtggtggacggaaacttcctctacgtgtgggggggctacgtgtttttccagaaaggaggagtcaaggaagcccttagtgaacgagaa

SEQ ID NO: 379637 - DNA, 75 bp, Homo sapiens
cccctttgacctcttcgatgtgcgagactttggaaagatagaagcagatttgggatatcctggaggtaaagcaag

SEQ ID NO: 379638 - DNA, 75 bp, Homo sapiens
tttgtcttccatgacaccaagttggatgccatgctggaggagttcaagaagggccctgagcctgtgcaattattt

SEQ ID NO: 379639 - DNA, 100 bp, Homo sapiens
ctctgctggaattctgcctagctgtgctcactgctgtgctgcggtggaaacaggcttactctgacttccctggggcttccagttgtgcagctctggaaat

SEQ ID NO: 379640 - DNA, 74 bp, Homo sapiens
gtagacctgggccagaatggtgaggagggtgagcccatcactttctgtgaggagagttttgtaaagcaccgctc

SEQ ID NO: 379641 - DNA, 100 bp, Homo sapiens
gatgctggagaagtccccttatgaccagccgggggccatcaagtataagaccacaggaccacgtgattcataaagaactactgtcaaaactagggccgcc

SEQ ID NO: 379642 - DNA, 100 bp, Homo sapiens
cttcgtgggcggtcttgactggagcacgacccaagcggctggctgtcggcaattggattcttccagtacagcccgggcgctgccgtggtcatgctgcttc

SEQ ID NO: 379643 - DNA, 80 bp, Homo sapiens
atctcagtaaaaaaggattgccacagtcccggcaagaaactatattcagtctttgactcagatgccgaagatgaactttg

SEQ ID NO: 379644 - DNA, 74 bp, Homo sapiens
actgtttgtatgattcagacccacctactctgctggaaacaagcagggccttgatacaaagcatgcttgaaaaa

SEQ ID NO: 379645 - DNA, 90 bp, Homo sapiens
ccagccccagttccgggctgtcttgggcgaagtgaaactgtgtgagaagatggcccagtttgatgattggtttatcttggaagctaaagg

SEQ ID NO: 379646 - DNA, 100 bp, Homo sapiens
agacccggtatgtggagctgttcattgtcgtagacaaggaaagggaacttacaatgtctcagaaaaatggtgggaatgttcttcagatgatgtatgagaa

SEQ ID NO: 379647 - DNA, 90 bp, Homo sapiens
atcagcactgattctgaggttctgacacactacaacatcactgggaacaccatctgcctctttcgcctgttcaacttcctcaattgcttt

SEQ ID NO: 379648 - DNA, 83 bp, Homo sapiens
tgaagctcaagatgtggggagtggcagagagtatgcattaaagatctctgttgaggagctggcgcggaatctggtcatcaagg

SEQ ID NO: 379649 - DNA, 75 bp, Homo sapiens
tgcgcggcgcggcggccgggccctcgagacggggacggactccctggaggaaaagcggaagcggcagcggtctga

SEQ ID NO: 379650 - DNA, 88 bp, Homo sapiens
gggacagcggccccctggagggggcagtcccgggagaacctgcggcggccggagcggttttgacacaagggcgcatatcttcaaagca

SEQ ID NO: 379651 - DNA, 96 bp, Homo sapiens
gcaaagcgaaattggtcattctcgctaacaactgcccagctttgagatccaaaattaacgggacaggctcttattccaggatcagtaatataccac

SEQ ID NO: 379652 - DNA, 101 bp, Homo sapiens
cacactcattcgggttggacttgccggcgtcaccgccgcggacttcgctttgggccatgaccaggttggtgttcgaggaagagacattgttgttcttggtg

SEQ ID NO: 379653 - DNA, 75 bp, Homo sapiens
gcatgtcgatttgtccttcactacaggagcgcctggaccatgctgctgagcgcctactggcacggcctccacccg

SEQ ID NO: 379654 - DNA, 50 bp, Homo sapiens
ccagagccaaggaggaagggttgtccggtcctccatgaatgccatgggct

SEQ ID NO: 379655 - DNA, 100 bp, Homo sapiens
gctgtgctcgcgctactctctctttctggcctggaggctatccagcgaaggatttgatgccctggatccctttattcccatcctggtttccaactataac

SEQ ID NO: 379656 - DNA, 100 bp, Homo sapiens
ggtaatcctgacgaaattgaaattacctccgagggaaacaagaaaacatcaaagaggtctagcaaagaggaccagctgccctctggcttccccaacatcg

SEQ ID NO: 379657 - DNA, 90 bp, Homo sapiens
ctccttcctgctgcggttcctgcgcgcccgggatttcgatctggacctggcctggcgggatataagtatccagtatatggtgtccagtgg

SEQ ID NO: 379658 - DNA, 100 bp, Homo sapiens
acaagactttcatattctctgacctggactacatgggaatttacatagtacatgacgaagttaaggataaagcttttgaactagaactcagctgggttgg

SEQ ID NO: 379659 - DNA, 60 bp, Homo sapiens
attaactgaagtggagcttctggcatttacatcactaaaccaggtggacaggtgaaatgt

SEQ ID NO: 379660 - DNA, 74 bp, Homo sapiens
gcatcggctacgcgcccacttggcgggccctggctggggatgtgcgagacaatgcagatcttcgtgaagactct

SEQ ID NO: 379661 - DNA, 75 bp, Homo sapiens
cctttatatagaagggagagtagcgcgttccttcacctcgggcagaataactttgcagaagcccacaggttcttc

SEQ ID NO: 379662 - DNA, 75 bp, Homo sapiens
ccacagtccttctgcagtccctcgtccagccacccccaggtcacagagatgcggcggaccctgacgcctgccagc

SEQ ID NO: 379663 - DNA, 100 bp, Homo sapiens
cggcaggacagcaagagcgcactcttcctgctggagcaccaggcagatataaatgtcaggtatctactgtgcgtttcagtcaacaatacagcttgtgttc

SEQ ID NO: 379664 - DNA, 82 bp, Homo sapiens
cgttctcgtaaggacaaaacgggactggctagttaaacaaagaggctgggaatctggaaaaccaggggctcatgtaactgtg

SEQ ID NO: 379665 - DNA, 116 bp, Homo sapiens
ccggaggcgacatggggcacccggtgtaccgcggcgagaagccccagctgcactacgcgagagacaagagagacacctccaacttcgacaaagagttcaccagacagcctgtggaa

SEQ ID NO: 379666 - DNA, 74 bp, Homo sapiens
gaaatggaagtgttcagcggcggcggcgcgagcagcggcgagggcctgagccaagattctgccaaaagactgcg

SEQ ID NO: 379667 - DNA, 100 bp, Homo sapiens
gcgtccgcccagccgacccctctgggccgcggccgacggctcccggaactgggcagccgcggagccagcatctccctatgttgcccaggctggactcgaa

SEQ ID NO: 379668 - DNA, 100 bp, Homo sapiens
attaatattggtggattgcagcaatttgctactgaggtaaagagaaatgtgtatgaccttacaagtatccccgttcgccaccaattatgggagggctggc

SEQ ID NO: 379669 - DNA, 100 bp, Homo sapiens
ctggatgatgcaatcaaagctcgacttctcaatcccaagtggccaaaggttgaggaacaggttagcaccactgagagagtgtttcaggatagacaatatc

SEQ ID NO: 379670 - DNA, 100 bp, Homo sapiens
actatccgtttgttcaggaaccaccagtgacagaatgatttgtcattaattcggaagaacagaatggctctctttcaacaattgacatgtgtgcttccta

SEQ ID NO: 379671 - DNA, 100 bp, Homo sapiens
aaggataaggtgtcggtggagttctgctcggcgtgcgcccggaaggcgtcgtcttctcttaaaatatgaatgaaccaaatgcctatggaaatacacctct

SEQ ID NO: 379672 - DNA, 99 bp, Homo sapiens
ttcctgatgagttcgacaatgagagatggttgtggtcatgaagttcttccgatgggttagacgggcttggcaaaggattatttcctgggtgagtttctg

SEQ ID NO: 379673 - DNA, 98 bp, Homo sapiens
tcaatttggaggacagaagaatccgccatgggctactcagtttacagccactgcagtatcacagccagcatcagaagagctaacaattgctggaatga

SEQ ID NO: 379674 - DNA, 100 bp, Homo sapiens
aaaactcctctctatagtcaactccttcaagcatataagtggtcaaacaagcggccctccaggcactgaagcgtaagaagaggtatgagaagcagctggc

SEQ ID NO: 379675 - DNA, 85 bp, Homo sapiens
agcctggcgactttgggtactgcgacctcaactattgtggtgggggttcagctctgctgcctgcccccatcccacctgtcacact

SEQ ID NO: 379676 - DNA, 100 bp, Homo sapiens
ccgcgtcatgcggctcctcggctggtggcaagtattgctgtgggtgctgggacttcccgtccgcggcgtggaggggctcattgtcatccccaagccaggc

SEQ ID NO: 379677 - DNA, 139 bp, Homo sapiens
gacggcgtactttgggcttcatcatggaggactacctgcagggttgtcgagctgctctgcaggtttttcgttggaatatacgttgcacatttatggcgattctgagtgtgagggcagacttctgccaggctcagcacag

SEQ ID NO: 379678 - DNA, 50 bp, Homo sapiens
gctgtgaaaaaagccatttccgaagatcaatgaactgagccatgttcaaa

SEQ ID NO: 379679 - DNA, 75 bp, Homo sapiens
gcaatctcttggcctcctgttctgacgacatgactttaaaggtggtggaggtggatacagcagtcggagaacatc

SEQ ID NO: 379680 - DNA, 50 bp, Homo sapiens
cgactttggggcccgtcaccctcagctcagtgcacctgtgcaacaactcc

SEQ ID NO: 379681 - DNA, 95 bp, Homo sapiens
cgcctgctggcctgccctgtggaattcggagtcaagaagaccatcatcaaagaggggatgctgaccaaacagaacaattcattccagcgatcaaa

SEQ ID NO: 379682 - DNA, 100 bp, Homo sapiens
atgtcattaatgctatgcagaaaatcttagagtgtcccatctgggtcaaggtggaaggtccaaggactgagaaagaccctcgaaggcatccactttagtc

SEQ ID NO: 379683 - DNA, 50 bp, Homo sapiens
gccgctgcccttccccggcatggacactcttcctgctgcccacattcctg

SEQ ID NO: 379684 - DNA, 90 bp, Homo sapiens
gggcgctgtgtccccaagctccccgtcctcggaatatgacagatacctagcatctagcaaaataatggcagctgcttaccttgaccccaa

SEQ ID NO: 379685 - DNA, 89 bp, Homo sapiens
ctgggggagccgcccccgacacggcccacggttgcaaaggagtttggcttccaaaataatggcttctcggtttacatcaatagaaacaa

SEQ ID NO: 379686 - DNA, 51 bp, Homo sapiens
gcctattgtgggacttcaccttgtgatcatagacaaggtcttgctctgtca

SEQ ID NO: 379687 - DNA, 100 bp, Homo sapiens
cgacggcggcgaaggaacccgataaggacctgttaccctccaaatcttctgtgaccaagatttgcagagacccacagactcctgtactgcaaaccaaaca

SEQ ID NO: 379688 - DNA, 90 bp, Homo sapiens
ggttgatgaagctaatttattgacttggcaagggcttattgttcctgtggaaccgtcccaaaatgtcccttgctcagaagaaggatcggg

SEQ ID NO: 379689 - DNA, 96 bp, Homo sapiens
gtacgtggccctcgatgtgctctgcgtgttgctggacctgatggccaaaagaaaggaagaaaatttttcctctcctaaaaatgccaaaaggccaag

SEQ ID NO: 379690 - DNA, 98 bp, Homo sapiens
gcttcacttccctcggtctgggcttctctgaggcggcgagagatggtcaggtctggagctcgaccgggccaggtttgatgagaagagggcagtgcagc

SEQ ID NO: 379691 - DNA, 89 bp, Homo sapiens
gggacctgaagtgcagacccctaaggccaagaagcttgagagaagaaaaatttcagaaaaattgtctcaatttgactagaatatcaatg

SEQ ID NO: 379692 - DNA, 89 bp, Homo sapiens
ggtctgagctcgggctccccgagcagtttgagtccccttgcccgctccttcaggtgtcgtgaaaactacccctaaaagccaaaatggga

SEQ ID NO: 379693 - DNA, 100 bp, Homo sapiens
tttcttcctgcccctcgttgatgagagcattcgaagtgacctcagcagggcatccagaggaggggataccaactggagcctgacctatcagaagaagtgt

SEQ ID NO: 379694 - DNA, 90 bp, Homo sapiens
tgcgggggcacctggccaagatctacgccatgcactggggcacagactccaggccacgtgctgtacgccgacatcaagatggagaatggg

SEQ ID NO: 379695 - DNA, 136 bp, Homo sapiens
agcagaagcaggtgcagatcaagaccctggagggcgagttctcggtcaccatgtggtcctcagatgttcctcctgctgatcaagagaagctttttatccagaagttacgtcagtgttgcgtcctctttgactttgt

SEQ ID NO: 379696 - DNA, 75 bp, Homo sapiens
caccaacatagccatcgacttcggggagcaggacattgagatctgctggttggagatcttagtgcccaaggaaga

SEQ ID NO: 379697 - DNA, 51 bp, Homo sapiens
ccggaggatcagaatcaagtcctatagcagatgccttcaattaagttgcag

SEQ ID NO: 379698 - DNA, 51 bp, Homo sapiens
cggagccgtgtggaccaggaggagcgctgacataagcagctctatgaccaa

SEQ ID NO: 379699 - DNA, 90 bp, Homo sapiens
gtgcccgctgccgggcgcgggcctcagtactatactggcaattgctggagaagattttgcaattgttgcttctgatactcgattgagtga

SEQ ID NO: 379700 - DNA, 74 bp, Homo sapiens
ggaaaagaagcccaaagttttaaaggccaagatcaaggctcgagatcttcgcgggaagaagaaggaggagctgc

SEQ ID NO: 379701 - DNA, 75 bp, Homo sapiens
ctgacagattcagcaacactagccagttcctgtgcttggccgtgcaagaaggcagcctcgtgctgttgtatgact

SEQ ID NO: 379702 - DNA, 75 bp, Homo sapiens
ttacatacagcttacatcttgcatcctcaagcggcttttgcagaaatgctgaaagtgaacaaaactttgaagagc

SEQ ID NO: 379703 - DNA, 80 bp, Homo sapiens
ggcggtggaaggcggaagtaggagaggagttcggcgccgcttctgtggccacggcaggtcagcccaaggccaaccccact

SEQ ID NO: 379704 - DNA, 98 bp, Homo sapiens
tccaccagaggactgggaggagcatgtcaacaggtggtatcacggcaacctcacacgccatgctgctgaagctcttctcctctcaaatggatgtgacg

SEQ ID NO: 379705 - DNA, 100 bp, Homo sapiens
aacctggagacttgccggcttatggtttcaatgctggatatgtgtcgtggaggccgaatgtttgcaccaaccaaaacctggcgccgttggcatcgtagag

SEQ ID NO: 379706 - DNA, 74 bp, Homo sapiens
gacattctctggcaagctgctgagtaagactttgaccccgacgcaggcttcagtgattgccgcggatcagaagc

SEQ ID NO: 379707 - DNA, 51 bp, Homo sapiens
cttgggtcctccgagagcagcagcggagaagatggtataaactggtccatc

SEQ ID NO: 379708 - DNA, 99 bp, Homo sapiens
cgggcttccacggcagcatcttcagctcttgggtttagcaaaagttcatctccttctgcatccttaactgagaatgagatgccactgctactccttcac

SEQ ID NO: 379709 - DNA, 90 bp, Homo sapiens
ttagagaaaatggcagacgatattgatattgaagcaatgcttgaggctccttacaagaagctgcagctgataaattctaatgaacccgga

SEQ ID NO: 379710 - DNA, 98 bp, Homo sapiens
aagccccggaaagcctatctgccccaggagttgctgggaaaggacttgaaagaggagattgatattcgactctccagggttcaggatatcaagtatga

SEQ ID NO: 379711 - DNA, 75 bp, Homo sapiens
aacggatctgtgtgcccacagctcctggagccccacaggccctgggaggagcggggacactgaggacctctctcc

SEQ ID NO: 379712 - DNA, 100 bp, Homo sapiens
cctggagcggcgcagccggagtggggccgtgaggtgtgctgggcatcaaggtgaagatcatgctgccctgggacccaactggtaagattggccctaagaa

SEQ ID NO: 379713 - DNA, 122 bp, Homo sapiens
cagaaagcggcttatcgaacagagccgggagttcaagaagaacactccagaggtgtatgcaacagcgttattgcaacaggctaacgaaaacagacaaaattcaactggaaaagcatgttttg

SEQ ID NO: 379714 - DNA, 83 bp, Homo sapiens
ggcgctgggagccgcaccacctaacgctggccgacaacagcctggcgtccgccacggacgtgatgcctgggccacggcaggag

SEQ ID NO: 379715 - DNA, 87 bp, Homo sapiens
gcagtgtgcgaagatttccaatcatttctaaaatgtggtggtacagtgggagctattctgacatgtccactggaagttgtaaaaaca

SEQ ID NO: 379716 - DNA, 98 bp, Homo sapiens
cacagaaatcaatgttagcagatagccagcccatacaagatcgtgtagctacagcaagctgggtagcaggcagatccaaaggatatcatgaagtttcc

SEQ ID NO: 379717 - DNA, 76 bp, Homo sapiens
ttggaaacgacgtcatgtgttaggacaagtaaatttttgtgaaacattgcagatgttagatggatttgggagaatt

SEQ ID NO: 379718 - DNA, 96 bp, Homo sapiens
gcgccgaccgcgttcctatggacagacgcacagacacctgcagacgaagttatacggaagcgtctcctcattgatggagatggtgctggagatgat

SEQ ID NO: 379719 - DNA, 98 bp, Homo sapiens
agcagcttgtgcgccgggtggagattctcagtgaaggaaatgaagtcctacagagcaactgattttgttgttcctgggcctggaaaagtagagataac

SEQ ID NO: 379720 - DNA, 90 bp, Homo sapiens
atggatgatcgagaggatctggtgtaccaggcgaagctggccgagcaggctgagcgatacgacgaccctacagcttggggcctgggctcc

SEQ ID NO: 379721 - DNA, 74 bp, Homo sapiens
attgacagagctctgatagttgttccttgtgcagaagggatgaagcacattcctaacctgcttcctaatgggga

SEQ ID NO: 379722 - DNA, 74 bp, Homo sapiens
agacgagcagccttcagggagcgtggagacaggtcgaatgagtgatttgagtgtaattggtcatccaatagatt

SEQ ID NO: 379723 - DNA, 100 bp, Homo sapiens
ttacctcaccttggcatcgacagatgatgcctttatcaacccccacctggctaagatcttcgagcgggtgcggcagagcgcggacttcatgccactgaag

SEQ ID NO: 379724 - DNA, 97 bp, Homo sapiens
ggactttgggcgtcccattgccatggaatggaagttggatacactttgtgacttgtacgagacactgaccattacacaggctgttatttttctcaat

SEQ ID NO: 379725 - DNA, 98 bp, Homo sapiens
tgggaggagttcagccgcgctgccgagaagctttacctcgctgaccctatgaagatgacctgagaattaatttatggcacttagaaatcacagataga

SEQ ID NO: 379726 - DNA, 74 bp, Homo sapiens
tcacatgtaattcagaaattagggacaggcgaacagctgcttggagaactacaagtgaagaaaagaaagcatta

SEQ ID NO: 379727 - DNA, 82 bp, Homo sapiens
cgagccgcaggagagacacgctgggccgaccccagagcggcgctggacaggacccttgaacatctgtgaagaaatgactatt

SEQ ID NO: 379728 - DNA, 82 bp, Homo sapiens
tgacatggaggatgatttcatgtgcgatgatgaggaggactacgacctgacctgcctagagctggaacgttacctccagagc

SEQ ID NO: 379729 - DNA, 50 bp, Homo sapiens
atggagcaggcttgcaatattaaaaaacgggtatgcaggagattagaagc

SEQ ID NO: 379730 - DNA, 100 bp, Homo sapiens
gtggatggcgtggagatatggcgcaactgcggcgctttgtttcgacgccggaccgcgtaagagacgatgatgttgggcacggaaggtggagagggattcg

SEQ ID NO: 379731 - DNA, 90 bp, Homo sapiens
gaggaggagatcctgggatcagatgatgaggagcaagaggaccctgcggactactgcaaagggcggtgtccgtgtcctccatgtctgagt

SEQ ID NO: 379732 - DNA, 100 bp, Homo sapiens
tggaatagcctctcttcagtgttcacagagatgcaaccaatgaccttgaatgatgccatgaggaacaaggcaaggctgtcaattacaggaagtactggag

SEQ ID NO: 379733 - DNA, 100 bp, Homo sapiens
tggaggagcagttgtctgatgaagagaagggtgagcagggcagcatttccttctcccactgctgctgagatggcagaaattagtcgaattcagtacgaaa

SEQ ID NO: 379734 - DNA, 75 bp, Homo sapiens
gctgacgggaggatctgaagccggccgcaggtgctgactgggttacttttttaaacactaggaatggtaatttct

SEQ ID NO: 379735 - DNA, 83 bp, Homo sapiens
ctcgcagtccccgcgcgtggtcatccaggttgtgaccgagattcccgacgagagagactgaggggaagagaggaaggaggggc

SEQ ID NO: 379736 - DNA, 76 bp, Homo sapiens
gtgacctcaagccttccaacctgctgctcaacaccacctgtgatctcaaggagcttgaagaaatccgcaaatgtgg

SEQ ID NO: 379737 - DNA, 98 bp, Homo sapiens
tggcgcctaaagtctgagagagggaagtcgcctctgtgctcgtgagtgcatggggtataagaccagcatctcagacatgtcgaaaaagatgttttgat

SEQ ID NO: 379738 - DNA, 74 bp, Homo sapiens
atgggaaacccggagaccaaatccttggtggtgtgtgccaggtgctccgactaccgggccgaactgaaatacga

SEQ ID NO: 379739 - DNA, 119 bp, Homo sapiens
ctgattccttcaacactgtagcagagatcactgggagcaaatatccagaacaggaaaatttctaccttgaaccgtatctgaaagaggttattcgggaaagaaaagaaagagaagaatgg

SEQ ID NO: 379740 - DNA, 75 bp, Homo sapiens
tcaagatagacattgaccccgaggagacggtgacaagtcagcagcaggagatggctgtcttggacaggcagttag

SEQ ID NO: 379741 - DNA, 98 bp, Homo sapiens
ccgaggccggcgccggcgccggcgccgcggcctcttcggctgcggaccctgccattccggaggagtgagttattctccccacctcagaagtaccagct

SEQ ID NO: 379742 - DNA, 50 bp, Homo sapiens
ctttattgtggacaggagaaggaggcatgccaggtggaagtgaggctgct

SEQ ID NO: 379743 - DNA, 90 bp, Homo sapiens
cttagaagtgaattagaagattttccagtacttggaattgactgtgagtggtctcacaccattttgctggtacagcctaccaagaggcca

SEQ ID NO: 379744 - DNA, 98 bp, Homo sapiens
ggacaagtcgcggggagataaactgaagatcaacatcgatgtactttttccgcacatgccttgtgcctgtatgccgagcagacagctggaggatcccg

SEQ ID NO: 379745 - DNA, 96 bp, Homo sapiens
ttgcctcctccctaaactccaatgatgtctttctgctgcgaactcaggcagagcactacctgtggtatggcaagggtctgtccccttacgcaagag

SEQ ID NO: 379746 - DNA, 100 bp, Homo sapiens
tcgcccggcccggccgcgcccgcggaaccagaccagctgtcgcctggttgggcccggaaatgggacgtcgcgctttctcagggagcgtagaagcagccag

SEQ ID NO: 379747 - DNA, 100 bp, Homo sapiens
agtttacagcccttccagatacagctaccagaggcttcgtgacggagttatcagagacattgagaggcaaattcggaaaaaagaaaacattcgtcttttg

SEQ ID NO: 379748 - DNA, 110 bp, Homo sapiens
ctgcgctgttcgtgctgctgggattcgcgctgctgggcacccacggagcctccggggctgagcttgggaaagtcgaggtgacggtgtttgaccctgactccctggaccct

SEQ ID NO: 379749 - DNA, 100 bp, Homo sapiens
ggaggccaaggcgtgagaattcctcaatgactgccctctaaaggaagaggacatgtctcaggaaggctatggaactagatctcaacctcctctggccccc

SEQ ID NO: 379750 - DNA, 100 bp, Homo sapiens
ttccctacagcgaaccaatgccactcagctttgaggaaaagccagtttatatccaagacttagatgaggccttggaaaaccattgcagagtgaatggagg

SEQ ID NO: 379751 - DNA, 100 bp, Homo sapiens
cgccaggatcttataaaacaaatgctgctgctatgaatatgggtcgaccattccaaaaaaatcggttggaaagggcaaagaaattacaagaacagcgaga

SEQ ID NO: 379752 - DNA, 83 bp, Homo sapiens
aaccccctcctctgcctcgctccaacacagtccctgagattctgcagctcagcgatgccctgcgggacaacatcctgcccgag

SEQ ID NO: 379753 - DNA, 102 bp, Homo sapiens
cattgaagactctgatatgttacaggaggaacgtcaaggtcgtgggaaataaaaggcagttctacacagactgcagcaacggttgcatctgcatatcctaag

SEQ ID NO: 379754 - DNA, 90 bp, Homo sapiens
atatggaacactaaggatccttctcatcagaattggcttggaaacgaaattgaggttatggtcagtactgaggaagccaaacgccatctg

SEQ ID NO: 379755 - DNA, 88 bp, Homo sapiens
aaccagctggagattgagagactggaggagcaggaggagcaccgaacagccagttccctgagcagtggtgcccttacgtggacaaaga

SEQ ID NO: 379756 - DNA, 75 bp, Homo sapiens
ttcagaggaatgagattagattggtttaggttacagggaattggctcgggaaaaggtaatgcgagaagttaaagc

SEQ ID NO: 379757 - DNA, 99 bp, Homo sapiens
ctcaagctagtgggccagaagtacctgcaggacgccctagccaggcccagacatgtccgtccttgtaagttaaaagcttccatgggagccttccttcct

SEQ ID NO: 379758 - DNA, 88 bp, Homo sapiens
catggacttccaggttgggaaggagtttgaggaggatctgacaggcatagatgaccgcaagtgcatgctatgaagacggccaagtggg

SEQ ID NO: 379759 - DNA, 82 bp, Homo sapiens
gaaccgtcagtttgagccagatggctctgtatgtggatgtgatccgtgtgaacagctactactcttggtatcgcaactacgg

SEQ ID NO: 379760 - DNA, 100 bp, Homo sapiens
catcgatttatgcagtcagccaaatatttcaattatactgtgaaggaccctgatgctcccataagacagaaaatgccccttgatgatctggatagagaag

SEQ ID NO: 379761 - DNA, 100 bp, Homo sapiens
gctaaagaaattacaggaagagtcagacctcgaattagcaaaggaaacttttggtacaggtgaacaaaggcagagtaaactgtcaccccagatgcaggta

SEQ ID NO: 379762 - DNA, 50 bp, Homo sapiens
ctgcaggacatcactttagatgatgatttggagcaagaggtggtggtggc

SEQ ID NO: 379763 - DNA, 90 bp, Homo sapiens
gcggacacgcgcggacacacacgtgcgggacacgccctcccccgacggcggcgctaacctctcgaatgccagcagttactctgcagagat

SEQ ID NO: 379764 - DNA, 98 bp, Homo sapiens
ggcccccggtgcaagaggcgcaaacaagccaatcccaggaggaaaaacggaaggatcagaatgttctctctccagtcaactgctggaatctcctctta

SEQ ID NO: 379765 - DNA, 100 bp, Homo sapiens
tttccttcttcctcatcatcgtcttcaggaagccagacagattcaagtattgaagaatcatgaggaaaacttgtgtcctgaatacccagtattttgtccc

SEQ ID NO: 379766 - DNA, 123 bp, Homo sapiens
cctcggcctccagctattacgggtgtagaatcctttatgaccaagcaagatactacaggctgcacacatgtattctggggctaaaactgggttggtgttaactgacatacagcgagaacagca

SEQ ID NO: 379767 - DNA, 100 bp, Homo sapiens
ttcaaaatatcaatcggtatcattactggataagaaatcagcttcgtgctctgtctgatgatggagtatctgatcttgaagacccaaccttgactcccct

SEQ ID NO: 379768 - DNA, 75 bp, Homo sapiens
aaaaataataattacatctgcaaagaccttatttccagattggagctggagtgagccttccaggaattttggctg

SEQ ID NO: 379769 - DNA, 90 bp, Homo sapiens
ttctcctccttctttgttcaagactgggcttccaccgagcagctgtaaaggtgcctcccactacggcctgaccaaagataggaagaggcg

SEQ ID NO: 379770 - DNA, 90 bp, Homo sapiens
ctggtcgatgaagaggatgatgtttttggtgaaggggagttgctgagtcagcccagaccggaaggagtggcagagatcatttgccccaag

SEQ ID NO: 379771 - DNA, 100 bp, Homo sapiens
gttcatgacaactgaggaaaaagccaaagtgggaccagggaatgactgtgataaatatgtttttcgtatgcaaaaatatcataaaagtaatggtggtatt

SEQ ID NO: 379772 - DNA, 100 bp, Homo sapiens
aagaagcataatatggtgaacggccgcctggcagactcggtgaaatacctggagtgctcagctctcacccagagaggcctgaaaaccgtgttcgacgagg

SEQ ID NO: 379773 - DNA, 75 bp, Homo sapiens
ctggagcccaaaccagacctcacttcatccacagctacaagccagcccccttcttcgtcctggatgagattgatg

SEQ ID NO: 379774 - DNA, 82 bp, Homo sapiens
caggagcagcgaggcactcatcctgcacgccggcgagtgccagcggccttccggagcagtactacagcctcacctggttcct

SEQ ID NO: 379775 - DNA, 75 bp, Homo sapiens
gttggctgccgtccccgctgctgtgcattgggatcgccccaggacattcgacatgcactcactggagagttcact

SEQ ID NO: 379776 - DNA, 90 bp, Homo sapiens
tctggatgggaagttacggtttacagcgaagtccacccagcgtttccgagcttaacagagcgttccaaaaagaggactctccagctactt

SEQ ID NO: 379777 - DNA, 100 bp, Homo sapiens
gagcttgctccctacgatgagaactggttctacacgcgagctggtgaggaagaggatggagatgaagatgaggaagctgagtcagctacgggcaagcggg

SEQ ID NO: 379778 - DNA, 83 bp, Homo sapiens
cgtcgcggagccgcgcagccctcggagcacgaaaattgtacaagctggagataaggaccttgatgggcagctagactttgaag

SEQ ID NO: 379779 - DNA, 98 bp, Homo sapiens
tcggcagctccagagcgacgggaaacgaaagcccactttccttgtggaactgtccagagtgctggcaaatccaggaaacagtcaggttgccagagttg

SEQ ID NO: 379780 - DNA, 101 bp, Homo sapiens
ttccgactgcacaaacgtcaccttcagcaaagtacagcgcttctgggagtccaactcggctgcccacaaggaggacttgttctttaagtacacctggaata

SEQ ID NO: 379781 - DNA, 100 bp, Homo sapiens
ccagacagccggcgctggctgtggtcggtgctggcggcggcgcttgggctctattacatgaagcagatgacatttgaagcccaagcctttttagaagctg

SEQ ID NO: 379782 - DNA, 83 bp, Homo sapiens
cacatagacatttacgcggatgtcggcgaagagttcaaccagatgtgcactcccagcaacacccctgccacgccgcccaactt

SEQ ID NO: 379783 - DNA, 90 bp, Homo sapiens
attcgcagtggtcgcttcttctccttggtatgatctcgtgaaaccttgagagaaactgaatgacgaatgaaactattgttcctgtttcac

SEQ ID NO: 379784 - DNA, 136 bp, Homo sapiens
atgggtctgtgatgtcacatctaggagcatctacccatggacagacatgtcttcccatggaggaggactcagagagagtaatgataattaccggaccaaacatgggtggaaagagctcctacataaaacaagttgc

SEQ ID NO: 379785 - DNA, 83 bp, Homo sapiens
caaagaatagagttgagcctgtgggacacttcggtctattgaagacaatgaagtatatttgcctaatgatgaaatttggacct

SEQ ID NO: 379786 - DNA, 75 bp, Homo sapiens
attttaagtcatcgttctaggatagaaatgcactcggtgatggaaagagagccactattctgaagaacacttggc

SEQ ID NO: 379787 - DNA, 50 bp, Homo sapiens
ctgctggagatggtggagtccgtcaacaccattcgcttttcacccaagat

SEQ ID NO: 379788 - DNA, 98 bp, Homo sapiens
tgagctgggcatccgacacgtactgctggctcaacgtggacgggctcctggtctacttcccgtacgactacatctaccccgagcagttctcctacatg

SEQ ID NO: 379789 - DNA, 75 bp, Homo sapiens
ctggattccatgaacagcaagggctgcaaggatctagtttgaagcactaagaagaataagacatcagtttgaaaa

SEQ ID NO: 379790 - DNA, 83 bp, Homo sapiens
ctgacaaatcctagcgaatttttggagcatctccacccaggaacctcgccatccagaacaaattgtggctactaatttgcccc

SEQ ID NO: 379791 - DNA, 100 bp, Homo sapiens
tgaagggtattgccgctgttactgatatacctttagctggtggccatgactggctttcgtggatgtgtatgttcctgaggaaagatgatttgctgtgcgt

SEQ ID NO: 379792 - DNA, 83 bp, Homo sapiens
gttggaagcagccgatccagcctgcggagcctgtggggcagacaagttggatggcttgaggactggtactaaaaggaaacgtg

SEQ ID NO: 379793 - DNA, 100 bp, Homo sapiens
ctgctcataagggccagagcctagatgagcctattgacctgctcctggctgcagaggacaacaatgaatgtgccataccgaatccgtgtgcggctgtcca

SEQ ID NO: 379794 - DNA, 75 bp, Homo sapiens
ggcgcggcccctagctttctccttctggtgtggggcccgagtggatgtggccacggcgctgcctctgcaagtggc

SEQ ID NO: 379795 - DNA, 101 bp, Homo sapiens
tcttatcgccttgtgtatcaaccacaagctgagagactggacgcccccccggcttcctgttacatcaggcacagaaaactgaatctgtagataacgaggga

SEQ ID NO: 379796 - DNA, 86 bp, Homo sapiens
agaagaagtgttatatgtcctaaagtaaggtttcagatttgcctgcaatggataacccagtgtttttggaattacttagattggat

SEQ ID NO: 379797 - DNA, 112 bp, Homo sapiens
acagcctcaagggcttcagcaccgcgcccatggcagagccagaccgcgggatgtagctcattttgggatacgagtctccatcgtggagcctggcttcttccgaacccctgtg

SEQ ID NO: 379798 - DNA, 83 bp, Homo sapiens
ctgactctgactctcggactgagaaacgcaaggaaggcaacagcccccaggggagcaaccagggagtcaaaatcacaccggac

SEQ ID NO: 379799 - DNA, 83 bp, Homo sapiens
ggccccggcccctcctgcccatggcggtggccgagctgtacacgcaggttgaggaacaggttagcaccactgagagagtgttt

SEQ ID NO: 379800 - DNA, 100 bp, Homo sapiens
agcgaggtcatcacagacactggggtcgtctgccacaagctcgccacacgtgttgaacttgaccctcatcgacctcccgggtatcaccaaggtgcctgtg

SEQ ID NO: 379801 - DNA, 100 bp, Homo sapiens
cagcctcagtgatgtccatgaggagcccagtttcctccaattgcagcacaagaccttccttttgttctaaaggctggctaccttgaaaaacgcagaaaag

SEQ ID NO: 379802 - DNA, 83 bp, Homo sapiens
ccgcgttcccagcccgggtccccgcgttcacagccccagcgcagacatgggaaagcggaaccaccaaaaggagtgatgatcaa

SEQ ID NO: 379803 - DNA, 100 bp, Homo sapiens
aggacaagaacaaagtgtgctgaatcatttgctgtttcaaatagagaactgtgcgatgatgagaaagagttcatacattttccagtatgtgaggggacct

SEQ ID NO: 379804 - DNA, 82 bp, Homo sapiens
ctcgcctcccggccgagctgacggctactatgtgggcatgtgccttgcggcttcagaaaagcggctccacgccctcagccag

SEQ ID NO: 379805 - DNA, 51 bp, Homo sapiens
aaaaccagggctccacagttaggagaactggacggggctggaggagaagag

SEQ ID NO: 379806 - DNA, 100 bp, Homo sapiens
atctgaagagctatggtgaaacaccactgaagcattgccaaggtctcagccaatttcttctccagtcatcctccagtttggtcatgcagagactcttctt

SEQ ID NO: 379807 - DNA, 75 bp, Homo sapiens
ttggaccaaaggcctgtgtgctgcagaacccccagaccatcataagctccaccatgaggcgaggtggatggagga

SEQ ID NO: 379808 - DNA, 110 bp, Homo sapiens
agccgccgccagagaggcccgcccaccagttcgcccgtccccctgccccgttcacaatgtcaaaatgcagatcttcgtgaaaacccttaccggcaagaccatcacccttg

SEQ ID NO: 379809 - DNA, 59 bp, Homo sapiens
tgggactggattggactgtacaaggtacggttcctggagcagcagaacaagatgctgga

SEQ ID NO: 379810 - DNA, 75 bp, Homo sapiens
ctaacatgtcagcgttattgtaatgcaacactttttatgaagactggtcttttgtgatggatgaagaaaggtcca

SEQ ID NO: 379811 - DNA, 82 bp, Homo sapiens
aaaagcacaaggattctcgctgtgacagagacaacaccgagtatgagaataagactttgaccccgacgcaggcttcagtgat

SEQ ID NO: 379812 - DNA, 75 bp, Homo sapiens
atccagtttgatgtttactacaaggaatacttggacctcagccaacctctcgaacagtattcacctagttaccct

SEQ ID NO: 379813 - DNA, 74 bp, Homo sapiens
ttactaagagaaaattttctcctggtagacctcggtccaaacaggcttgcacccttgctcggaggaatgcagac

SEQ ID NO: 379814 - DNA, 75 bp, Homo sapiens
ggcaccctgcaggtggtcagacatgtcatcaactcagctgaccaagatacttggtagtgaccgggtgaagctgat

SEQ ID NO: 379815 - DNA, 82 bp, Homo sapiens
aacagcagagacacagagggcagtcatgagcattttgaaagcgaagcagaagccgtagaatcagcggcgagcctgttgaaag

SEQ ID NO: 379816 - DNA, 116 bp, Homo sapiens
cgaaggtgaagagttgtcccagctcggcccgcgggggagccccgggagccgcacggtgagaagccctaccactgcaactgggacggctgcggctggaagtttgcgcgctcagacga

SEQ ID NO: 379817 - DNA, 80 bp, Homo sapiens
atcttctccctcccttgcctcagacacagggtctcactctgttgcccaggctggagtgcagtggtgatcataactcagtg

SEQ ID NO: 379818 - DNA, 83 bp, Homo sapiens
atgggaaagatctaccttctggaagctactactacgtggtgcttggaaaggtagcccctgaagaagatgaaaggaaaaagagg

SEQ ID NO: 379819 - DNA, 98 bp, Homo sapiens
atcaactgaaggcactaactgagaaaaacaaagaacttgaaattgctcaggatcgcaatattgccattcagcaggaaaaccgaaagcgccatggctct

SEQ ID NO: 379820 - DNA, 100 bp, Homo sapiens
aaaaggcggcgccctgaagaagtgcaagagcagaggccttctctagaccttgccaagatggcacaggtgaggctccaggttgggctctatgctgtgtacc

SEQ ID NO: 379821 - DNA, 83 bp, Homo sapiens
aaatcgcttggttaaaacctgacacttttaacaggcactactgcagtcttcagttaagcaacaagtagaagctattgaaaaac

SEQ ID NO: 379822 - DNA, 100 bp, Homo sapiens
cgcacatgactgtgaggcgctgggctggggctccgaggcagccggcttccaggagtcccgaggcaccgtcaaacaggtggggctggtgtccgagcacttc

SEQ ID NO: 379823 - DNA, 75 bp, Homo sapiens
aggagcacatggtgtccggcgcggacgatgggtggaccccaagttcctgaggaacatgcgctttgccaagaagca

SEQ ID NO: 379824 - DNA, 75 bp, Homo sapiens
cttgtcactggagtgcaagaagaaattcccacctgtcaaagagaattggttccttccattatgagcaacttgttg

SEQ ID NO: 379825 - DNA, 80 bp, Homo sapiens
agaccattcagatgggatctttccggatcaatccagatggcagccagtcagtggtggagtctgatgaccgggattccaag

SEQ ID NO: 379826 - DNA, 82 bp, Homo sapiens
cccctccaaagatttactttcccatccgtgactcctggaatgcaggccagaagcctgtcttagatgttcatgcagaactaga

SEQ ID NO: 379827 - DNA, 80 bp, Homo sapiens
ccgaccctgagaacttacctgagatttcgtcacagtctccaaaaaaagttggtgatgacattgccaaggcaacgggtgac

SEQ ID NO: 379828 - DNA, 97 bp, Homo sapiens
gtccaaagcagtcgtaagaagaggtcccaatcccccactctttccgccctaatggaggtctccagtttcggtagatttcgggcagacaacttgaaca

SEQ ID NO: 379829 - DNA, 75 bp, Homo sapiens
gctgcggatccagggggtcggctgccaggtacagacaaagaaacagccttggtataatagcacgttagcatcaag

SEQ ID NO: 379830 - DNA, 80 bp, Homo sapiens
gaaaggtgtgctgtgcctgaggccagaggctgacccgcggctgattgagtccctctcccagatgctgtccatgggcttct

SEQ ID NO: 379831 - DNA, 75 bp, Homo sapiens
ggcggcggcaagacctctccccctcggaggcggcgggcggaggcggcgggtgtccctacctgcaccggacgacgg

SEQ ID NO: 379832 - DNA, 98 bp, Homo sapiens
ggaatggagacacggcttcccccaaggaatatacagtgctctggtctggggtctctctgtgaaacacaatcctcagaaagtgggtaaagaccatacgt

SEQ ID NO: 379833 - DNA, 53 bp, Homo sapiens
cggcgcggaggcggctgaggtgcgagccgatatggaaaacgatccagcccaga

SEQ ID NO: 379834 - DNA, 75 bp, Homo sapiens
tggagtgaagttctacacagaccctggaggaaccaccccatctgttcctatatgatagtggactcttcagatcac

SEQ ID NO: 379835 - DNA, 75 bp, Homo sapiens
ggagactcctgaccctcagaatgttgccctcaaattggctgtagccacacggatataagaaagtcagatcttatc

SEQ ID NO: 379836 - DNA, 98 bp, Homo sapiens
tgacattcctggctgtcatgctcattgttctgaactccacgcgtttggcaacatattgactgcatggggattgataggcagcatattcctgatacata

SEQ ID NO: 379837 - DNA, 82 bp, Homo sapiens
atcgagaggatctggtgtaccaggcgaagctggccgagcaggctgagcgatacgacgattatacccaacaagcaacccaaag

SEQ ID NO: 379838 - DNA, 98 bp, Homo sapiens
tgcaaccctgcagcatgttttaatgagtgactggttaaatgagggacatactgtgtacttggaacgccacatttgcggacgattgtttggtgaaaagt

SEQ ID NO: 379839 - DNA, 82 bp, Homo sapiens
gccggctccctacggtgccgtgtgtgcgtgagagaagaccagtctttcctctagggagtgcatccgccccaacccttttccc

SEQ ID NO: 379840 - DNA, 73 bp, Homo sapiens
aacttcctcaagtcgcccaaaggtgagaccgtggagccgcccccgccggcgcagctgcacttcatgtacgtgg

SEQ ID NO: 379841 - DNA, 96 bp, Homo sapiens
acatttaattttagggtcctttatatagaagggagagtaggtagcaatgaagtgatgaggatactgatctctagaagcctgcttcaggagtagaac

SEQ ID NO: 379842 - DNA, 100 bp, Homo sapiens
actattgaggcatgcattgctaataatgcagtaatagtggccttgtcttcaaaatcatgggatgtagagactgcaacagaattgcttctgagtaactgag

SEQ ID NO: 379843 - DNA, 100 bp, Homo sapiens
aaaccagctgaggtgtccgtaaagattccagagaagcctgtgaacaaacctcacagttagccaagttggccagaacttcacattcgtgctcactgacatt

SEQ ID NO: 379844 - DNA, 75 bp, Homo sapiens
ggaagtgcggggctccaatggcgctttctacaagtcaggatggctaaaggtgaccccaagaaaccaaagggcaag

SEQ ID NO: 379845 - DNA, 101 bp, Homo sapiens
tcgtttttcggatgatgccttcaatactacctttatttccaccatagaaaatgtcttctgaggctgatctggtgtctcacatctgtaatcccagcacttgg

SEQ ID NO: 379846 - DNA, 82 bp, Homo sapiens
tgaagaagtgtgagcatgacccccatgtgctcctggccgtggccaaattcctggtcgggtggcttccagtggtcttcagtct

SEQ ID NO: 379847 - DNA, 75 bp, Homo sapiens
tgggcggtgccggcgccggagacgatgccgttatgctgaagagtttctggcagaaggtttgcggaatgagaacct

SEQ ID NO: 379848 - DNA, 74 bp, Homo sapiens
agaccagatgtactacaatctgctaaaactgtatattggatcacaaggacgagtcataagttttgaggtacgaa

SEQ ID NO: 379849 - DNA, 100 bp, Homo sapiens
tcgaccctctcccggcccctccccttctttgtcttttgcagatgatcgccgggtgtcgatccttttccctccagtcagttttgagtatccgaggagccca

SEQ ID NO: 379850 - DNA, 75 bp, Homo sapiens
ccggcgtctgcctcgagactgaagaccggtgccgtgagcgatgtggagatgcaggaacactatgatgagtttttt

SEQ ID NO: 379851 - DNA, 73 bp, Homo sapiens
agttcaccatcctccaaacaagtgaagttcaaaccttgtactactcagctgatcacaagctgcttgatgggaa

SEQ ID NO: 379852 - DNA, 87 bp, Homo sapiens
gctctgggaccggaggagacatcggcctctgcaggcttgccgaagaagggagaaggaagaggcccagcagaagggactcgctgagcc

SEQ ID NO: 379853 - DNA, 74 bp, Homo sapiens
atttctatgtgcagatgaaatgggaattcaccagctgggatatggctcgtggacagcagaaaattcagtctcag

SEQ ID NO: 379854 - DNA, 100 bp, Homo sapiens
cggagcaccatggcggagctaggagctggcggcgacggccacaggggcggcgacggcgcagtgcgaagcgaaacagaaaaattgtatggcgacttcttga

SEQ ID NO: 379855 - DNA, 75 bp, Homo sapiens
gctgatgtttgcaaccacacttggagtgatgggcatagaatgtcaagctaaccaggcgtccgctacttcagaaga

SEQ ID NO: 379856 - DNA, 134 bp, Homo sapiens
gggacttctcccgcagcgacgcggctggcaagactgtttgtgttgcgggggccggacttcaagtctctcctgctgcagaacgcatccgattcatcttgggagaggaggatgacagcccagctccccctcagctc

SEQ ID NO: 379857 - DNA, 75 bp, Homo sapiens
aaggaacctgagctacgagccgcggcggcagcggggcggcggggaagcggtggctacggaccacaacatggataa

SEQ ID NO: 379858 - DNA, 75 bp, Homo sapiens
gcagatggagaatagaccctctgtccaggcagcattaaaacttaagcagatcaagaatgctgcagccaatgtcct

SEQ ID NO: 379859 - DNA, 75 bp, Homo sapiens
aaggagattccaacctacttcagacaggggcaagtgtccgagtggtgaatcagctacttacagagatggatggtc

SEQ ID NO: 379860 - DNA, 100 bp, Homo sapiens
acatcgatttttgggccctagaaatgctcaaagggtgctcctaggattatcagagcctatctttcaggaaaattgcctaagaattatgacccaaaagtta

SEQ ID NO: 379861 - DNA, 90 bp, Homo sapiens
gccccggtttgacgcacacggcaccaaactgtcgggtcggcagcggttctggtcggaacctgtgggtcagcgggctgtcctccacaacac

SEQ ID NO: 379862 - DNA, 92 bp, Homo sapiens
caagtgaagacatgcttacttccccttcaccttccttcatgatggtagaatgtcatccttacctcaaccagagcaaactgctggatttctgc

SEQ ID NO: 379863 - DNA, 101 bp, Homo sapiens
acgtctagtgccagccaagtgattgctcctactcaagtgacaggtacaggtttgcagattccgccagcagcacagcaagctctacagatgagtggctcttt

SEQ ID NO: 379864 - DNA, 100 bp, Homo sapiens
gataacctgcagactacattggaaaggagatttgctatttactctgctcgagatgatgaggaattggtccatttacttcgagagcttaagcatccaaacg

SEQ ID NO: 379865 - DNA, 85 bp, Homo sapiens
cagggacaagatggtgccaccggtgcaggtctctccgctcatcaaggacaggcgacactaacaggtgaagatctcgggagaccat

SEQ ID NO: 379866 - DNA, 82 bp, Homo sapiens
gacaaactggacatccttggggctgctgagacaggttactataacaacagtaccaaggtggctgtgaaaaccctgaagccag

SEQ ID NO: 379867 - DNA, 83 bp, Homo sapiens
aatgtagacaatggttagagaagaattttccaaatgaatttgcaaaacttactgtagcatccgcacttccactaatagccaag

SEQ ID NO: 379868 - DNA, 100 bp, Homo sapiens
gtggtgaatgagagcacaggagaagccttcaggctgcaccacgtggaggccaacaggatagtcgtgcaagcactgcagtgttcccattattcgattcttt

SEQ ID NO: 379869 - DNA, 100 bp, Homo sapiens
gagaaaaagagaagatgaagaaacccagcttgatatgttggagagtgggcaaatgacctgcggcacggccatggcgtatactactacatcaataatgaca

SEQ ID NO: 379870 - DNA, 75 bp, Homo sapiens
atagcaaggctcgtgcctggattaacaccaaaagagattcaagatggaaaaggtgatgtaaccattacaaatgat

SEQ ID NO: 379871 - DNA, 100 bp, Homo sapiens
gctgagggcagcgccggttccttgcggtcaagatgctgcaaaacgtgactccccacaataagtgtgatgaatgcagactctgctaccattttggctgttt

SEQ ID NO: 379872 - DNA, 74 bp, Homo sapiens
cgccagctgccatgagcgagcgcctccgtcccaggtgtgcaactgaggaacatggctcaagaaactaatcacag

SEQ ID NO: 379873 - DNA, 82 bp, Homo sapiens
gattaggccacaatcttcaatgagtaaacatattcctgtgacagagctgaatgaacctctctccaatgaagatcgaaatctc

SEQ ID NO: 379874 - DNA, 74 bp, Homo sapiens
ggacttgccagccccacaatcatcttgacctcagagatgatgtggtgaaaattacaatcgattggaacaagctc

SEQ ID NO: 379875 - DNA, 100 bp, Homo sapiens
cgttctccacccacaagctactgagagccgcagggcacctgcccgtggaccgggagcccgtggaccgggagccggtggtgtgccaccccgacctggagga

SEQ ID NO: 379876 - DNA, 83 bp, Homo sapiens
tggtaatgttcagctagtgagtcataaagatatacaagattccctaacagtgtctcctcttcgatgctgtatactccttgatc

SEQ ID NO: 379877 - DNA, 112 bp, Homo sapiens
gccgtccagcagatggcggatgccctgcagtacctgcagaaggtctctggagacatcttcagcagggtgtcaaattgagaaccaggtagatccccaccacctacagtaaaaa

SEQ ID NO: 379878 - DNA, 100 bp, Homo sapiens
tctggtgattgggggcagtccctgcaatgacctctccatcgtcaaccctgctcgcaagggcctctacggttatcaatactctggctgaccatcatcatcg

SEQ ID NO: 379879 - DNA, 130 bp, Homo sapiens
aggtgctgctgatcatctgaggttgcctgcatggcagtgaagaacatggacctttggcaaagtgcctgcattcgtgaggatgattgctcccgagggctccttggtgtttcatgagaaagcctggaatgcg

SEQ ID NO: 379880 - DNA, 100 bp, Homo sapiens
ggaagatggcgaaggtctcagagctttacgatgtcacttgggaaggtgttgacttcaaaatcaaaactgtagagctaagaggaaagaaaattagattaca

SEQ ID NO: 379881 - DNA, 88 bp, Homo sapiens
tacatgtcggaggagaagctgcaggagaaagggtcatcacactgaaacggtgttcaaccgggttttgccagggcctattgcaccagag

SEQ ID NO: 379882 - DNA, 101 bp, Homo sapiens
aaggcaagaccgaattcagaaggatatcgacgtcgtgatccagaagtccagagctgaggactgcctgtttgcaggaaatcatcgagttccccatcctaaag

SEQ ID NO: 379883 - DNA, 75 bp, Homo sapiens
aggcctccccagccatgtgaaactactctgctaacaccagatagtggaaagaaaccatgtgctgaaatgtttgac

SEQ ID NO: 379884 - DNA, 75 bp, Homo sapiens
acaagatgctgatcttgctcaggttgaaagcttccaggaactggcgcagcccagcctcgaaatgcagaacgacgc

SEQ ID NO: 379885 - DNA, 74 bp, Homo sapiens
gaggctagcatctctcgggagccgcaaggcgagagctgcaaagacaatgcagatcttcgtgaagactctgactg

SEQ ID NO: 379886 - DNA, 100 bp, Homo sapiens
gtgaggttcccacctgaagaagcagttccatcttccacaaggagcacaggaccaagagtccaggacccagggaagatcagttttcctgccatccaggctg

SEQ ID NO: 379887 - DNA, 100 bp, Homo sapiens
gagacggcgggggaaagggagacggcgagacgcgcagcgccggcgcccgggagacccaggaggagcccgcagatgcaacgccaggagcagcatcagccac

SEQ ID NO: 379888 - DNA, 100 bp, Homo sapiens
gggagtctccgcgtcccgctcgctgggagagaggtacctctccttttccctctccctttccctaagtttgttgcatattctaaggacccagacataggct

SEQ ID NO: 379889 - DNA, 73 bp, Homo sapiens
cagctccccagaaatgaacctgcccacggtgtccgcgctcaggtggtcgtttttcaatgagctagagaagtta

SEQ ID NO: 379890 - DNA, 98 bp, Homo sapiens
gggagcctgccggactcgcagcaactgggatacgccagccacagtggcatccccaacatcatcctcacaggttgggcccgaaggcatcctgcagaacg

SEQ ID NO: 379891 - DNA, 75 bp, Homo sapiens
cagcaccacagtccttctgcagtccctcgtccagccacccccagattgatcagggaccatgaaaagaaacttgtg

SEQ ID NO: 379892 - DNA, 100 bp, Homo sapiens
aaagttatagttcttgtcaataagattgctagtgcaactactgctccatcgatcccttcacatttgtctcctggtttacgagatgtggctcttcgttgtt

SEQ ID NO: 379893 - DNA, 75 bp, Homo sapiens
gaaccttctggactaatgatgatccagctgtgattgggttattatacccctgcattgacagacatctaggagaac

SEQ ID NO: 379894 - DNA, 99 bp, Homo sapiens
gctgccatttccactgcagaccacaggataaaaggaccgcttcaccgtggcccaggatacccttttaagtaggaggagtagatcccataatagatcacg

SEQ ID NO: 379895 - DNA, 101 bp, Homo sapiens
taagcgatgatgaatcttttcttcttgaaattaggcagactcttcaaaacgcactcattcagtttgctactagatttggagcaagaggtggtggtggcctt

SEQ ID NO: 379896 - DNA, 100 bp, Homo sapiens
tccttcatgcagtctctcattggcttctttgagactgaaatggcaggtggttatcaccaggctaaaactggacaaggatcggaaaaaaattcttgaacgc

SEQ ID NO: 379897 - DNA, 75 bp, Homo sapiens
cggcgcgggtgcaggagcaggacttacggcagtgggggctgacagtgacagctggagtatcagccttggaagtat

SEQ ID NO: 379898 - DNA, 75 bp, Homo sapiens
gaagatgaggagactatgtatctgcggaggctgctactttgtcctggattggctccagaagacctattggtgccg

SEQ ID NO: 379899 - DNA, 100 bp, Homo sapiens
tcacagtcatggatctggaagctgagggcacgtgtttgcggttcagccctttgatgaccgcagcagggcactccacagaaggatgttattatcaagtcag

SEQ ID NO: 379900 - DNA, 74 bp, Homo sapiens
ttgaaagtgcgattgtggaagctgctcgggatccacctctgatgttcagtgaagactaccagaaaagtctgcta

SEQ ID NO: 379901 - DNA, 82 bp, Homo sapiens
aggagtttccagaccctcagaggcaaagaaagctcatcacagctcacgtcaaaatgcagatcttcgtgaaaacccttaccgg

SEQ ID NO: 379902 - DNA, 75 bp, Homo sapiens
ggcagctgacttgatttctcgaactgctgttgtcatgaagacttgtcaagagatacttatcttcagcaaatccta

SEQ ID NO: 379903 - DNA, 100 bp, Homo sapiens
aacgtcggggacggctgcgcgggacggctctgtaggaaggaacttggttccccctccctcagcttccgccccaaaaggcttctccagtgacagtgatctg

SEQ ID NO: 379904 - DNA, 75 bp, Homo sapiens
cacaaaccccaatctcagtggacaagacaatgcagatcttcgtgaagactctgactggtaagaccatcaccctcg

SEQ ID NO: 379905 - DNA, 100 bp, Homo sapiens
ccaaatccaagcgcgacaagaaagaaacttgaagggtcaaagtgcaaagggcagcttttgatttttggggcaaccaactgggacttgattggtcgaaaag

SEQ ID NO: 379906 - DNA, 99 bp, Homo sapiens
caataatcctgctatggaagctgaaatactgaaagaaattcgagaagctgcaaatgccaccttacgaaggatgaatccaaaaggccaaagtataaagag

SEQ ID NO: 379907 - DNA, 97 bp, Homo sapiens
acagaaggaactgaaggacttcctccccagcctttgggcttctatccgcagagaggtgcccattcctgcacagaaccacaggggacactgagcgcag

SEQ ID NO: 379908 - DNA, 100 bp, Homo sapiens
agatcattgtgtttagtgcctgtcgaatgccccccagccaccagctcgaccacagcaagctcctggggtactctctgaagatggcagaagctcaccaagc

SEQ ID NO: 379909 - DNA, 100 bp, Homo sapiens
ggccccccacccgccccatcccccggactcccacagtctgaaggaatggctcccgtgtcttcatctacggtcagttctgtaacgaaaacttctgggcagc

SEQ ID NO: 379910 - DNA, 83 bp, Homo sapiens
cgggacgcgacgcgccccgcctcccccgtccggtccctctctccacgacaaatttacatgtattggagaccagaccagaagcc

SEQ ID NO: 379911 - DNA, 100 bp, Homo sapiens
cttgttttccaacatcatccccattagctcttcaccaccaggagtgttccttgagaaggactatgagatttaccgggattacagtgcggacggccagctt

SEQ ID NO: 379912 - DNA, 90 bp, Homo sapiens
aagaaacgggccgcgaaccgcagtatcatgctggccaagaagatcatcattaaggacggaggcacgaacgtgcgcatcgaccccagtagc

SEQ ID NO: 379913 - DNA, 82 bp, Homo sapiens
gtctcactgacttcaagaatgaagccgcggaccctcctgtgtcatcagcaaggtggtccctgcccccgaggccaagccggcg

SEQ ID NO: 379914 - DNA, 83 bp, Homo sapiens
cgagcccagcgtcaacttcctcaagtcgcccaaagatggagaaggaggagacaacccgggagctgctgctgcccaactggcag

SEQ ID NO: 379915 - DNA, 74 bp, Homo sapiens
actccttgtagctgatacttggcaaagatgtcactgagagcactggccccacatcctccgagtcggggagccca

SEQ ID NO: 379916 - DNA, 90 bp, Homo sapiens
actggatcctcaaaccagaagaaaacctgaatctctgagaccctgcacttgatggaccagctggcaccacccagatcaataaactggctt

SEQ ID NO: 379917 - DNA, 90 bp, Homo sapiens
tgatcaacctcgtcatgtcctacgcggcacattcaggaccccgcgagccagcggctgacgtggaacaagtccccaaagagcgtccttgtc

SEQ ID NO: 379918 - DNA, 74 bp, Homo sapiens
tggttacacctgctcctttgctgtcagtgaagtggtgcccaccagaagtatgtccgacaagcctggcagaaggc

SEQ ID NO: 379919 - DNA, 90 bp, Homo sapiens
ggagtctgatcatcaacattcgaggaggcaaggttcagatgtatgtgtgcaacaaggaggagtacggattcttgccagtgccattgcgcg

SEQ ID NO: 379920 - DNA, 75 bp, Homo sapiens
gctcgcgctactctctctttctggcctggaggctatccagcataaccgtctcctcaggaggaatgttggttcaga

SEQ ID NO: 379921 - DNA, 83 bp, Homo sapiens
ctggtgaaattgccggcaagagggagttaaggacattccaggcagaggcaaggggttcatgtgtcacacaagtaggccttctg

SEQ ID NO: 379922 - DNA, 80 bp, Homo sapiens
gggcagaacctggtctggccagagacctgctggaagcaatgtctcaggctgtgcagacaaacggaactcaaccattaagc

SEQ ID NO: 379923 - DNA, 100 bp, Homo sapiens
aaaattccttttcagaaaatcagccatttccttctcttaagatgctttatggttccataatgtaatttctgaagagtttggagtgggagtgaatatcttt

SEQ ID NO: 379924 - DNA, 98 bp, Homo sapiens
tccctggaggaggcatggagcccgaggaggagccaagtgtggcagcagttcgtgaagtctgtgaggagcacaaacatttcactgaagatattcaaaca

SEQ ID NO: 379925 - DNA, 100 bp, Homo sapiens
ctccatgagtgtggctgggtcacgacaagattcctggtcgggtggcttccagtggtcttcagtctgtcgtgcaccgatgagaactctccttattgctgtg

SEQ ID NO: 379926 - DNA, 98 bp, Homo sapiens
taaaaagtaatgggatgaataaaattggactcagagtttccattgacactgatatgagacgagatttcaccgtgttggccagactggtctcgaactcc

SEQ ID NO: 379927 - DNA, 85 bp, Homo sapiens
caggactgaccgctgccgcccagcacgtccaggcagtaccaagaagcaagagagacctatcttgatctggatagtaaagtgagga

SEQ ID NO: 379928 - DNA, 100 bp, Homo sapiens
tccagctccagctcagactccagctcagactcagacttcgagccatcccagaaccacagccaagttacagaatgtctgaaggggacagtgtgggagaatc

SEQ ID NO: 379929 - DNA, 80 bp, Homo sapiens
ataggaatttcactctgcatcacaagctcaattgactggggcgactttggggtagaggcagtgtctgaggggactgactc

SEQ ID NO: 379930 - DNA, 80 bp, Homo sapiens
cgactgtgacgaggacgaggaggcagccacggggcccctggactacgtctactttgagaactcctccagcaacccatacc

SEQ ID NO: 379931 - DNA, 74 bp, Homo sapiens
gatttcttctgacttgagcctgcagtgtgctgtgagagatctaccactaggagtcctaagcagacttaaagcca

SEQ ID NO: 379932 - DNA, 88 bp, Homo sapiens
gggcttttcagaaatcggtttgaagttagaaatgagcactccgctggtccaggcggcaacatgtccatgcttttagtgatgtccctgc

SEQ ID NO: 379933 - DNA, 83 bp, Homo sapiens
ctgggaaatagtaaccctgccaaatacatcagcttgtaggagacagagaatcgcctaccatttggtgcaagcaaaaagcaatc

SEQ ID NO: 379934 - DNA, 75 bp, Homo sapiens
cgcgaaatgatgggatagcgttgcaaatccttaaaagagtcttaacggcagataccaacagtgaccggctcttca

SEQ ID NO: 379935 - DNA, 74 bp, Homo sapiens
accacttcgaccagcttcatcctcagacagggcaactccaacaacattgccaccgtggacatctccgcaggctt

SEQ ID NO: 379936 - DNA, 75 bp, Homo sapiens
agattaagattagagtcaagttgtgtgattaagacaggatgttaccaagttgacgccactttcacacgaagttat

SEQ ID NO: 379937 - DNA, 82 bp, Homo sapiens
aaaaagttcttgggacaaacttcatttggttgctatggtgacagactatggggcctttatcaaaatcccaggctgtcggaag

SEQ ID NO: 379938 - DNA, 75 bp, Homo sapiens
ttttgcaggtgtggaacgcctagctcttgtcacaggtggcaattttggaggtagccccggttatggaggaggaag

SEQ ID NO: 379939 - DNA, 75 bp, Homo sapiens
agtgcggagagaggctgcctcctgcagcccccatagcagggttgtgagtcccggcccagcccctccacccccctg

SEQ ID NO: 379940 - DNA, 83 bp, Homo sapiens
ccgagcaggaggcgccatcatggccaatgagaacagcctgctgagtgcgcagctcaagggcttccccctgttcctgcactcaa

SEQ ID NO: 379941 - DNA, 82 bp, Homo sapiens
gcctggtggctttccgggcacgataccacctggtggacaaggagcatgacagagagctcagaaatatgctcagcaagtcttg

SEQ ID NO: 379942 - DNA, 100 bp, Homo sapiens
aagactgctgcaaacttcaatttgtcaaccacaacttgacaaggttgctataaaacaagattgctacaacttctaggtctcacgctgttgcatgtgtcaa

SEQ ID NO: 379943 - DNA, 75 bp, Homo sapiens
atactgctctgtatgacagcaaccgtatcacacatccttgaccaacgagaaaagcacagtggagaatttacagtc

SEQ ID NO: 379944 - DNA, 90 bp, Homo sapiens
caagcactttaaagtcacaacaacgtctattgaaagcccattcaagttatcttatgatgaggcttttgctatggctaatgatcccttgga

SEQ ID NO: 379945 - DNA, 88 bp, Homo sapiens
aggttttgagaacagagtgctgttttagagctggcagcagcatctcagcccaagagaaggtgatgctgtggagtcttcaaaaagcccg

SEQ ID NO: 379946 - DNA, 50 bp, Homo sapiens
gctaaactcatccttcaaagaaacagtgcaaatatatacagagcttcata

SEQ ID NO: 379947 - DNA, 155 bp, Homo sapiens
gatagatggctacaggccgcggaggaggaggaggtggagttgctgcccttccggagtccgccccgtgaggagaatgagtcactgctagttggattgaagcacacctgccagatgattctaaagacacatggaagaagagggggaatgtggagtat

SEQ ID NO: 379948 - DNA, 98 bp, Homo sapiens
ttttttaactgaagatagtgcctttcagccctaccagaacattaaccaggtggtatttgttggaaatttcttgagaattaatacgatcgccatgcggc

SEQ ID NO: 379949 - DNA, 74 bp, Homo sapiens
ccgtgatgttggagaactacaggaacctggagtctgtggcctcccgtcctcacggaagtcatctgtagctttgc

SEQ ID NO: 379950 - DNA, 51 bp, Homo sapiens
agtagacattggtggaaacatttaggatttgtcttggctgttactatgaca

SEQ ID NO: 379951 - DNA, 90 bp, Homo sapiens
gatcccagaaggtcgcgaaggcagtaccgtttcctcagcggcggggaagtcgagacaacatgagtgtgattttgatctgttttccaaatg

SEQ ID NO: 379952 - DNA, 98 bp, Homo sapiens
caacaaaggatgccacggttatactctgcaaggtggtgttccagtggcaaacagctgtataaactcttgtaaacaggagtgtgaggaagaggctgtct

SEQ ID NO: 379953 - DNA, 82 bp, Homo sapiens
tgagacggagctatcggcgccgcggcaagagccagcaaattgtggctactaatttgccccctgaagatcaagatggctctgg

SEQ ID NO: 379954 - DNA, 100 bp, Homo sapiens
aatcttccttcaaaaggtggtaaactatacctactgtccctcaagagaacacaagaagtgctttaagaggtgtcatggagaaactccagctgggcccaga

SEQ ID NO: 379955 - DNA, 100 bp, Homo sapiens
ggccatcgacccccagagcaacgtaaaagtacacctgtaagccagcttggttccgcagactttcccgaggcccccgatccattccagccactcggggctg

SEQ ID NO: 379956 - DNA, 100 bp, Homo sapiens
gaaacattggaaaagaaatcctgataagaactgctttgcatccaaagcctctgggatgtgttctgactgtaaaaactctgatgttgtgaaaaaagcttac

SEQ ID NO: 379957 - DNA, 102 bp, Homo sapiens
gttcgctgacaggtccagttgcagatacaaacttggattttttccagtctgatccttttgttggcaacagccagctaaaggtgtggatgagcaaatacggct

SEQ ID NO: 379958 - DNA, 102 bp, Homo sapiens
gctctttccccgtcagcatcccagccgtgctcacgacctgcgaccgcatcaagcagtccgccagcggaaccaagcggcgcgtgttcatcatcgagaccatgg

SEQ ID NO: 379959 - DNA, 88 bp, Homo sapiens
ccagtatttgcggatagctccaaactgggatatcgggacgaccctgggacagtctccactggggcagatccagctgaccatccggcac

SEQ ID NO: 379960 - DNA, 100 bp, Homo sapiens
aaggagagctccaacctcaatctgcctcgaaccttcctggtgtcaggaaagcagcgctccctcgagctccaggccagagatggggtctcactatgttgcc

SEQ ID NO: 379961 - DNA, 75 bp, Homo sapiens
gagaagccccaacagcacggcgtggcctctcagcctcggcctcggcaagacgcgcaggaagaccagcgcgcggga

SEQ ID NO: 379962 - DNA, 98 bp, Homo sapiens
ctgaccgtagggatggccaccagggtccggacagcttctatttggggtgttttgaatgctgtatcaaatgcctggggggcattccctatgcctctctg

SEQ ID NO: 379963 - DNA, 82 bp, Homo sapiens
tgcagatgcccctcctccaccagaggactgggaggagcatgtcaacaggcaagaaaattggatgtatattttgaatatgaag

SEQ ID NO: 379964 - DNA, 97 bp, Homo sapiens
cgcatgtccactatccagaacctccaatctttcgtggtattattcagcacgacttgattttctcccttcaacaaacagaatgtgtccttaaaccggt

SEQ ID NO: 379965 - DNA, 51 bp, Homo sapiens
aggatttctacctttccatagcagttggagtcattcgttgcccagtttgca

SEQ ID NO: 379966 - DNA, 100 bp, Homo sapiens
aaccctgccatcagcatcactgaaaacgtgctgcatttcaaagcactgctcagcacgcaggcatgtgaggaagctgggcttaaaggagactccagcaaat

SEQ ID NO: 379967 - DNA, 90 bp, Homo sapiens
catcttcagcttctgctgggagaatcttgctaagaccaactgaggaggaaggacagatctattcagaaatgatccacaacttgcttcgac

SEQ ID NO: 379968 - DNA, 80 bp, Homo sapiens
gactgaagaggaggtgcagatggcactttccaaagtggatgcctccggggaggtgaccatggaggaagaagatgagtctc

SEQ ID NO: 379969 - DNA, 100 bp, Homo sapiens
cttatcatcagtcttacatagcattccatcagggaggaaacagaaaaaaatcccagctgctctcaaagaatagagaaatggtcagaaggaacgacaccac

SEQ ID NO: 379970 - DNA, 100 bp, Homo sapiens
ctgtcggagaaggtggtctaccggcgcttcaccgagatctacgagttccatctccctcccatgccccagagctgcatctaaagcacattggcaagacctg

SEQ ID NO: 379971 - DNA, 80 bp, Homo sapiens
caaagacttagcttttaaattaaaaaggaagctattcaccattgaggctttatcctgtggataaacgcagagtgaacgag

SEQ ID NO: 379972 - DNA, 100 bp, Homo sapiens
ctttggtgtggacatctgctgccggaaggggtcccgaagccccctgcaggaactctacaacccaatccaggaagatattttcgattcagataaagaagtt

SEQ ID NO: 379973 - DNA, 82 bp, Homo sapiens
gtgagccctggctgcgcgcgcggcccctcctccccggcgcctcccagcaaacggggattcagcgtccgatcctttggaacag

SEQ ID NO: 379974 - DNA, 96 bp, Homo sapiens
tagctaagacgccaggtcccccggaaacctagaaatggcagccaatcctttctttaagttgttgactatgctaatggagtttgctggtggacctcc

SEQ ID NO: 379975 - DNA, 94 bp, Homo sapiens
gggagatcgcgcaggatttcaaaaccgacctgaggtttcagagcgcagccatcggtgcgctgcaggctctggagctcatgacggtgctggtggg

SEQ ID NO: 379976 - DNA, 96 bp, Homo sapiens
gtaaccctgcttctggtgaacttgtctggccggcattcatttaaggcctaaggatgaaggcgactgcagctgaatatgtaaaatctcgactcccag

SEQ ID NO: 379977 - DNA, 74 bp, Homo sapiens
gcgcctcggaaaccaggagatcatgagagggtgtttgtgagatatggttgaccagtgaagacacgggggcttat

SEQ ID NO: 379978 - DNA, 90 bp, Homo sapiens
ccggctgtggctcagcatggtcagtgccgtttaacctttattgtggtggagtccaccccgctgtggagactgaagagccaattgtagagt

SEQ ID NO: 379979 - DNA, 82 bp, Homo sapiens
caaaagaatatttagaatgcaggatggagagcaaattgtggctactaatttgccccctgaagatcaagatggctctggggat

SEQ ID NO: 379980 - DNA, 74 bp, Homo sapiens
aaaacagctgttttgcagattggactacaaggtggatatcatccagtgaaaattggagacctcttcaatggccg

SEQ ID NO: 379981 - DNA, 75 bp, Homo sapiens
ttcatattcctaaggaattgatttcccttcacattaaagaagatttgtgcaggctgaccggttccctgatgtgtt

SEQ ID NO: 379982 - DNA, 90 bp, Homo sapiens
ctaaaaacaagactggggctgctcccatcattgatgtggtgcgatcggccaaatttgagtttcatcatggtgactatgaaaaacagtttc

SEQ ID NO: 379983 - DNA, 100 bp, Homo sapiens
gcggggcctgaggagggcggagagctggggcgggtctcaggagattgaccccagcctgggcgtggcggagctgcctgacgagttcttcgaggaggacaac

SEQ ID NO: 379984 - DNA, 87 bp, Homo sapiens
agcagcagtgaggacaccaaaggaaatttgcgagaatccccgatttatcattgatggagccaacagaactgacatctgtcaaggaga

SEQ ID NO: 379985 - DNA, 100 bp, Homo sapiens
ggggaatttccttgtgcctccattcccgggaggggggagcggcgttggaggccaccgtttccaggctgtatcacctgctctgcgctcatcaaaaatgcct

SEQ ID NO: 379986 - DNA, 83 bp, Homo sapiens
cgcgggagagcggactcccctcgccaccgcccgagcccaggtcaaaatgcagatcttcgtgaaaacccttaccggcaagacca

SEQ ID NO: 379987 - DNA, 90 bp, Homo sapiens
gattgcactcaacagatctttaccagatgttaggttagaaggagatgctgcctatggaagttgcaatttctacattacacttcttgactg

SEQ ID NO: 379988 - DNA, 100 bp, Homo sapiens
ggtacctgttactgctgctacttcctcgtttgacaccttcctggaaggacagaataacgggctcccagattcacaagccccaccaagaggatcaccccag

SEQ ID NO: 379989 - DNA, 82 bp, Homo sapiens
gaaaggctttgtctagacaagaaatgcaggaagttcagagttctaggagtggaagaggagattgatcgtgtcctgtgctgaa

SEQ ID NO: 379990 - DNA, 100 bp, Homo sapiens
ctgtcccctctgaaactggagcacttggctcttatctactttggaggcctgtctggctcctttctctacacaggaggcagttgcagtggtgcagaatggc

SEQ ID NO: 379991 - DNA, 100 bp, Homo sapiens
tgtggacgtgcacgggatccacttccgcaaggaccctttggaaggccgggtgggccgaggttccagagagattcctggaagttgctcagatcacattacg

SEQ ID NO: 379992 - DNA, 100 bp, Homo sapiens
ctggacggcgagcgcgagcggcgcgagaaagacctcagcagccatgtcgaagccccatagtgaagccgggactgccttcattcagacccagcagctgcac

SEQ ID NO: 379993 - DNA, 87 bp, Homo sapiens
ggtgttcccggctccgtggggccgtcttcccggcgagtccgcgacggtcgccgcccacggcgagcccatgcagaatgccaccaagta

SEQ ID NO: 379994 - DNA, 100 bp, Homo sapiens
tgaaaagcccagaacttttcctctgttataagagagggagagataaaccaccgcttacagatattgggtgttccattgcctaaagaggagaacatttctg

SEQ ID NO: 379995 - DNA, 75 bp, Homo sapiens
gatttcttctggaaaactggaaacaaggtggagagacttatccaagaacgtggctgggagttcatgtggaatgag

SEQ ID NO: 379996 - DNA, 100 bp, Homo sapiens
gaaagaaggcgacagcctggattataaggatgtcatccccatggctgatgcagcaggcatcatccgctatgcaattgggttactggggcttccggatgca

SEQ ID NO: 379997 - DNA, 100 bp, Homo sapiens
ttgtctcttatttagttctggggagcgcctcgtcgacatgagtgatgtggaggaaaacaacttcgagggcagagttttcacctcaaatggccccacggtg

SEQ ID NO: 379998 - DNA, 98 bp, Homo sapiens
aagaatcctatagaccagtgtaataccctgaatccctgattacccaaccagctgaaatgaatgttaaaactgagacagagagtgaagaggaggaagaa

SEQ ID NO: 379999 - DNA, 100 bp, Homo sapiens
tggaaccgggatggcgacgtctacactgagtcggaggcgaagaggaaaggagcagtggcttccggttgaagccaccaacgctgatccacggccaagcccc

SEQ ID NO: 380000 - DNA, 98 bp, Homo sapiens
cctgagcctggtgagccacgcgcctggggaggctctggcccgggctccgcgtacttcctgttcaggaacttaaaaggagtctagaaaatccagcagaa

SEQ ID NO: 380001 - DNA, 101 bp, Homo sapiens
ccaggatccctcagatctgtggagcagatccgatggagaggctgagctgctccaggacttgggagcattggggagtcagcaatgtccgttgtgttaaatca

SEQ ID NO: 380002 - DNA, 100 bp, Homo sapiens
ccgccgggactgcctggccgacgtggacaccaaggaagtaccaccaagaacagggaaggacaagccagaggctggaggaagatacctgcagaacacagac

SEQ ID NO: 380003 - DNA, 97 bp, Homo sapiens
acaggtgcatttcacagcactctgggcgaaaattggatgtgaaaatgaagccagaccgagttgatgcgatgaagagagttgaagaaatcaaacagaa

SEQ ID NO: 380004 - DNA, 100 bp, Homo sapiens
gcgcggggagccagcgagcgcgccttcggcattggccgccgcgatgtcagctcagtgctgtgcgggccaggtgcactttacaggtccccgatgaaccaag

SEQ ID NO: 380005 - DNA, 100 bp, Homo sapiens
gagaaggcaatgagccgacccatcttgtacagcaactggctgtcaaagaggagaggagacgccgtgagcgggacgaccagatgtaccgagagcggctgcg

SEQ ID NO: 380006 - DNA, 75 bp, Homo sapiens
ttcaagagaaatggagcccttctccaaggttttcaaatggaacattttgatgcatcacttagtacctatttcaag

SEQ ID NO: 380007 - DNA, 101 bp, Homo sapiens
gtccgccagcaggctgtgcagcttaacatatttactgctgttcttagtgcactaaaggtccaggggcaagttcatcctactctcgagtctaatgatgatgc

SEQ ID NO: 380008 - DNA, 101 bp, Homo sapiens
ctacctggaggacttcggcggagggcggttcatgttcatggaggagggtgccaacaagacggtggagccgagagctgaaaactgattgggaggtagctatt

SEQ ID NO: 380009 - DNA, 98 bp, Homo sapiens
gacttattcagtgagctgaacatttcagaaatacagaagttgaagcagcagcttatgcaggagtattttctgcattgcgtgctgttcctcaaaaagaa

SEQ ID NO: 380010 - DNA, 75 bp, Homo sapiens
gggtggcagcctgccacatcgggggcaccaccctccatgcctttgcagggggcagtacccaaaggaaacgctacg

SEQ ID NO: 380011 - DNA, 100 bp, Homo sapiens
gcggatcctgctggtgggagaacgccatcatctgtgcgatctctgcggtggacgaggtggactacaagacggctgaggagaagtacatcaaggggccttc

SEQ ID NO: 380012 - DNA, 90 bp, Homo sapiens
gaaaaaaacctctgaccgtgaagagacatgagatgattgccaaacccccagctcttttggtacaccagaaggccagaatggaacgacttc

SEQ ID NO: 380013 - DNA, 74 bp, Homo sapiens
catgagccggtgaccaagctcggggccgagcgggaggcagccgtggccgaggaccatggccaacctggagcgca

SEQ ID NO: 380014 - DNA, 136 bp, Homo sapiens
aaatggctcgactccccgctggcattcgcttcatcatctcattctccagggatcagtggatgtgatcttcgtggtggaaagctaaattttaaaaccaccccaatggatgcagacagtgatgttgcattggacattc

SEQ ID NO: 380015 - DNA, 75 bp, Homo sapiens
tgccacccgaggagttccgcccctttctggcaaagatgagggggattcttaagcttgtcagctcatttgcagctt

SEQ ID NO: 380016 - DNA, 100 bp, Homo sapiens
gctggctttaatcctgaaagccatgcagcggagtgcctggtgaagaatgtgatgggatcactagcatgtctgcggagagcggccctgggacgagattgag

SEQ ID NO: 380017 - DNA, 126 bp, Homo sapiens
tggggccaaacgcatcatgaagtgagcaaattggggtttcctggggacaaggcccgacgccgctctgacgccactgaggtgcgccacgacgtgacgtcaacgttcgcgccggaagtggaagaccag

SEQ ID NO: 380018 - DNA, 50 bp, Homo sapiens
tacaggagttcaaaacccacacatgtcaaaatgcagatcttcgtgaaaac

SEQ ID NO: 380019 - DNA, 100 bp, Homo sapiens
ggcgtcccccgggggcccgtactgcacatcgtggtggtcggatttcaccacaagaagggctgccagccttctttgaatcctggggggagccagtcatctg

SEQ ID NO: 380020 - DNA, 75 bp, Homo sapiens
cgtcgttgccttgtatttccagagaacaggttaatccagcacgtatggggccaagtgtaggctcccagcaggaac

SEQ ID NO: 380021 - DNA, 75 bp, Homo sapiens
cagaagttctgtcgcattgacaaatcccgaaagactcctgaggaagaagagattttaaacaaaaaacgatctaaa

SEQ ID NO: 380022 - DNA, 80 bp, Homo sapiens
ctgcgccaccacgtcacgcacacgctcggcgctgcgatccgcgcatataacggtcaaaatgcagatcttcgtgaaaaccc

SEQ ID NO: 380023 - DNA, 82 bp, Homo sapiens
gtgtggagatgcgacgaggacgatgactgcttagaccacagcgacgaggacgactgcccaaattgtggctactaatttgccc

SEQ ID NO: 380024 - DNA, 100 bp, Homo sapiens
cagagtcaggtgaaggctgatggatttcagaaactgttggagtttatatacacaggaactttaaatcttgacagaaaccgtcacaggaacggggaaaaag

SEQ ID NO: 380025 - DNA, 51 bp, Homo sapiens
tcaccactggaacaagcacaagacacatagtggatctgtatggcgtgtgac

SEQ ID NO: 380026 - DNA, 75 bp, Homo sapiens
accgccccagcgatggaagaggatcaggagctggagagggcgccaatgcttcggcattagagaaagagattggtc

SEQ ID NO: 380027 - DNA, 109 bp, Homo sapiens
ctgggtgtatatcaaacggcaagatgtccagtaatgtcccggcggatatggttacaactgatggaaaaccaaaaatcgttgatatcattgatacaacaggaagtggcga

SEQ ID NO: 380028 - DNA, 73 bp, Homo sapiens
tttaaccaagttccaacaaaagaatgctgccgcagaaagctgacttcatgagaccgaggatctcgttcgttga

SEQ ID NO: 380029 - DNA, 75 bp, Homo sapiens
gcaaaaccaacgcctggctcggagcagcagcctctgagacgcaaacatgcagatctttgtgaagaccctcactgg

SEQ ID NO: 380030 - DNA, 80 bp, Homo sapiens
gttcgactgctagagccgagcgaagcgttttggctacgggcctccacctccaccgccagatcagtttgcccctccggggg

SEQ ID NO: 380031 - DNA, 75 bp, Homo sapiens
cattcctcataaagcgagtcgtcaaggagttgcagacctgatggccaaaagaaaggaagaaaatttttcctctcc

SEQ ID NO: 380032 - DNA, 74 bp, Homo sapiens
cttctacaatgcagacgagctcaaggggatgagctgaccaagatggaggacgaggatgagcagggctggtgcaa

SEQ ID NO: 380033 - DNA, 98 bp, Homo sapiens
atggacagatggacttcaaatgctgtttgtattccagagactagctcaaaagccaaaagtctctgagaacgactttgaagatctgttgtccaatcaag

SEQ ID NO: 380034 - DNA, 100 bp, Homo sapiens
caaaggggaggttacgcagcaaaccatccagaaggagcttactccacgggaacagcctctagataatctgagttgttgaaaatacgaagcctgttactcg

SEQ ID NO: 380035 - DNA, 83 bp, Homo sapiens
gtgaagagttgtcccagctcggcccgcgggggagccccgggagccgcacgagatagagtttcaccatgttgtccagggtggtc

SEQ ID NO: 380036 - DNA, 90 bp, Homo sapiens
gcctggactcgcgggcggcggcgagcgcctttacaatggccctgaccctgtttgaaacttgtggtggagaatgttgatgtgttaacacaa

SEQ ID NO: 380037 - DNA, 98 bp, Homo sapiens
gtcaggagccatagtacctacagcagcactccaggttgtttttcaccattcagaacattgcctgaagcaggtccaccatgccgttagtaacgaggaac

SEQ ID NO: 380038 - DNA, 121 bp, Homo sapiens
gcaaggtgaataaagaagtggagcgtgtcctgaaggagttccaccaggccgggaagcccatcgggtgtccctggccagtgtccttccacctgtccacaagcatggggaacatcttcgccaa

SEQ ID NO: 380039 - DNA, 100 bp, Homo sapiens
ggaggtgttggtgaagaccttggactctcaaactcgtacctttattgtgggggcccaggtgaacaactttgtgatctttgaaggcttctttgcccatcaa

SEQ ID NO: 380040 - DNA, 75 bp, Homo sapiens
agtgcaacattcatttcaatcttttggatcctttgaaaaatcacatgaagatcgagctgggagcattagtaccct

SEQ ID NO: 380041 - DNA, 100 bp, Homo sapiens
cgccgccagggtctgcagggcctgggccgccgctgctacctgcagcgccgtgtggcacgacacaaaaatcaggacctgaaggagaagaaggagaaggtgg

SEQ ID NO: 380042 - DNA, 99 bp, Homo sapiens
cctagacctggaatcgcccaagtccctctactcgcgaggtgtccttcttcacatcattatggaatcacccatttttcaccattagctgtatcactctaa

SEQ ID NO: 380043 - DNA, 75 bp, Homo sapiens
atgcaacgttgtgatctggaggcacatctcaaaaacagagatgctgttcagttaaatgtgattgcaacgcgacag

SEQ ID NO: 380044 - DNA, 82 bp, Homo sapiens
ggcggagtagagcggagcctggcgggcgtgggaacccaggccccgccgaggcggccagttgcagagtgggcaggatcttaag

SEQ ID NO: 380045 - DNA, 100 bp, Homo sapiens
ttggcatttcccaggatgagcagctatccaagtcaagttgaaaatgtccgcttggtagatcgagtgtctcctaaaaaagcagctctaggtactttgtatt

SEQ ID NO: 380046 - DNA, 75 bp, Homo sapiens
aactgttgattttattacctcctgagacctatgaagacctcagaatatattattcaagcttacaaatatggtgca

SEQ ID NO: 380047 - DNA, 100 bp, Homo sapiens
aacgcgtacgagttcaacctcagcgctctgaagcaagaaacctattggaattcgagacttaattaatgaagctttgcatcgagaaacgatgggtctgaag

SEQ ID NO: 380048 - DNA, 75 bp, Homo sapiens
ccagcatcaagatccgtctgacaggcattgaatgccccagaggagcccgaaacctcccaggcttggtgcaggaag

SEQ ID NO: 380049 - DNA, 83 bp, Homo sapiens
ggttggaaaggctcctggatccaaactcgctgaggcttcctgcttttccgaagccttccccgacataccttcggactagtgca

SEQ ID NO: 380050 - DNA, 100 bp, Homo sapiens
tgggggttgctgacccagaggagagttctccaaacatgatcgtttactgcaaactgtccatcccacatggcttccagaacaaggaggctgctagctcccc

SEQ ID NO: 380051 - DNA, 51 bp, Homo sapiens
cagattcgcagtggtcgcttcttctccttgaattcagtactgtacacagga

SEQ ID NO: 380052 - DNA, 83 bp, Homo sapiens
ctgcatttctgaagatctcaagatctggactactgttgaaaaaatttccagtgagatcactttgggaagcagtgacatccaac

SEQ ID NO: 380053 - DNA, 96 bp, Homo sapiens
cagctgcctgctatgctgaaaacccctggaaacttgctaaagagctgtggtgtcatggagaaactccagctgggcccagagattctgcagcgggaa

SEQ ID NO: 380054 - DNA, 100 bp, Homo sapiens
cggagccagcgctctcacggaggacctgcgctgtcgcgcgaggggtctgggagatgggaatagctctccagacccccagctggccatgtggtgagttcag

SEQ ID NO: 380055 - DNA, 96 bp, Homo sapiens
ctttaagcccccatatctaagcaaaggaactggtctcctaaaaacccagaacagaagatcattaagagagtgattgctcttgaaggagatattgtc

SEQ ID NO: 380056 - DNA, 75 bp, Homo sapiens
gaaggtgtgtccggaggtttgcaggggtgcagtgtgtctggtcttatgagtgattcgcctttgccagtctcatct

SEQ ID NO: 380057 - DNA, 82 bp, Homo sapiens
tgccaagattcttcatttagtcatggcagatggagcctaccaagaaggtcaaaatgcagatcttcgtgaaaacccttaccgg

SEQ ID NO: 380058 - DNA, 80 bp, Homo sapiens
gggccccaaggaccccggcctggagccaggagctgtgccgcatggagtcaaaaactggtcatagaaacagtgagcaccag

SEQ ID NO: 380059 - DNA, 100 bp, Homo sapiens
taaataggctgcttggagaaaatgatggggaaacaagagctttgtctgaggacccagaagaagatgccaggttaaagcagttgcaggctgcagcagcaca

SEQ ID NO: 380060 - DNA, 100 bp, Homo sapiens
aaaccgtgacaactgccatgtcacaagaaaatacctgccagtcaacagagattatggagaagtctggcgaggaaggaatgcctgatcttgcccatgtcat

SEQ ID NO: 380061 - DNA, 74 bp, Homo sapiens
gctgcggagcgggaggaggaccgaaagataattcgtgtccagtccccggatggagtgaagcggatcacagcaac

SEQ ID NO: 380062 - DNA, 82 bp, Homo sapiens
gcctccactgccttctcttcttgacgcccttgcacttggcagtgatcactaagcaggaagatgtggtggaggatttgctgag

SEQ ID NO: 380063 - DNA, 100 bp, Homo sapiens
cagaagtagctgaatgtgttactccattgctgaggagtgatgcctttgagtaatggacagatgggccagcctctcaggcctcaggcaaattatagtcaaa

SEQ ID NO: 380064 - DNA, 82 bp, Homo sapiens
tgtacaaagcaataagatggacctttctggagcctccttctgaagaaataaaaacaggtgaggatgaagatgaggaagataa

SEQ ID NO: 380065 - DNA, 90 bp, Homo sapiens
caccaactacgtgtggtattttgaaggaatctgtttctcaggcatcatggtccaggtgcaggtacagcagtctccgcaacaggtctcggc

SEQ ID NO: 380066 - DNA, 50 bp, Homo sapiens
cgactggagcaggcagcagcccagattcttcacggaaaaatccagcaaag

SEQ ID NO: 380067 - DNA, 100 bp, Homo sapiens
ggaactgtgtgcagtaccgcaggcattttctggtggacaacagtgtgtttcatgactcacagatgaatgcttctcacccggaaacaaacttgccagttgg

SEQ ID NO: 380068 - DNA, 75 bp, Homo sapiens
tgtgcacctggagtcaggagcgcgcttgtgcgtacagttcggttcagctccaattaaggaacagctatatcctgc

SEQ ID NO: 380069 - DNA, 100 bp, Homo sapiens
tgaaatccgagccactgacctgcctgagaggttccagccccaggtacccagtttgttaagccgacagttggagttccacaagtgttctcccagatgaccc

SEQ ID NO: 380070 - DNA, 89 bp, Homo sapiens
gtggattaaaatctcccaagaggaatgacaaacaaccagctcttcaggtgacattgcattccggttccttaattatgttcagtcccagc

SEQ ID NO: 380071 - DNA, 100 bp, Homo sapiens
cttcttcgggatcactggattgctgacggcagccctctcaggtgcccaggccccacaagtggccccagcccaggaacgaatctctcaggctgcatcagga

SEQ ID NO: 380072 - DNA, 98 bp, Homo sapiens
gggcccgagggcggggaccggcggcgctggaggagcgaggcagctgtactaggactgggaacggtgagccagagcgaggaaggctaactccctcacca

SEQ ID NO: 380073 - DNA, 100 bp, Homo sapiens
acgtggaggagctcaaggggatgtcgctgctggttcgggcagagtccgacgcatgtttgtgtcattagtgaaactggaaaagcaaaatacaaagcctaag

SEQ ID NO: 380074 - DNA, 87 bp, Homo sapiens
tataaacacagtggacgtcaataatgaaagctcttcagaggtagaacgtcatgacatgaataccttaagcctgcccctgaacatacg

SEQ ID NO: 380075 - DNA, 101 bp, Homo sapiens
cgcgcggagaagaacggggagccaggcctgacctctcgggacacacccagccctgtggacccagacaccgtggaggtgttgatgacctttgaacccgaccc

SEQ ID NO: 380076 - DNA, 99 bp, Homo sapiens
cgcagctctacgtgtaccgcctcaaccgcgacgccgaggtaggtgcacgtctcatcgcacatgctggcagcctcaccaacctggccaagtatccagcat

SEQ ID NO: 380077 - DNA, 75 bp, Homo sapiens
aagcatacagatctgggaccgaaatttgactgtcaaagagttagtggaagcagagttatttgcccgttatgaccg

SEQ ID NO: 380078 - DNA, 75 bp, Homo sapiens
ttcaagttctgaactgggaggtgactttgagttcatggatgatgccagaagcagtcaattatagatttcttcaaa

SEQ ID NO: 380079 - DNA, 98 bp, Homo sapiens
tttgatcatggctgtgattcactatcaacaggctcaggcccgatgtcaccgcataggccagagcaaagctgtgaaggtgtatcgcctcatcactcgaa

SEQ ID NO: 380080 - DNA, 97 bp, Homo sapiens
ggagaatatttaatggaaaatcgcttggttaaaacctgacacttttaacagtaatgggggcctagcagacatcttcacggtctttgccaagacacca

SEQ ID NO: 380081 - DNA, 82 bp, Homo sapiens
cagaaaattacctaaatgcactctttcgaaagaaaggggaagacaggaagacccccagcgaatcaaatagcccctcttcatc

SEQ ID NO: 380082 - DNA, 50 bp, Homo sapiens
tttattacagaagaagattatcaggactttgcctcccgggccaaactggc

SEQ ID NO: 380083 - DNA, 108 bp, Homo sapiens
tctatgtgctttactttgacttttggttcgaaatatttgacatgaagaagtgggatcagttttatagtgaagttctaggaagacccactacgttatctgagacaatgg

SEQ ID NO: 380084 - DNA, 100 bp, Homo sapiens
ctggatctgagcaatggaaatttcaggaattaagtcaaccacgttctcataccagcctgaaggggcctttacaacaactaaacggacaggcattccagcc

SEQ ID NO: 380085 - DNA, 50 bp, Homo sapiens
gaagaaacctctcacttctagcagtgcagatcctgaggaattcttgaata

SEQ ID NO: 380086 - DNA, 83 bp, Homo sapiens
gaaaatttcaaaaatgtttcaaattcctgtggaaaatcttgacaacatcagaaagcatcaagatggtgctcatgtggaccagt

SEQ ID NO: 380087 - DNA, 85 bp, Homo sapiens
ttgaagacaaagagtggacatttgtcatagaaaatagaaccatggagtctggcagtaccgccgccagtgaggaggcacgcagcct

SEQ ID NO: 380088 - DNA, 50 bp, Homo sapiens
atgatctgcttccacttaattaatactctcctgccacagctcctcacccc

SEQ ID NO: 380089 - DNA, 75 bp, Homo sapiens
gagcccagctcacagccaccggtaccttcttccagggcgccatgttttggaagtttgacctgcacacaagctcgc

SEQ ID NO: 380090 - DNA, 122 bp, Homo sapiens
ggccgagcctagctgcggctggacacggagcgcccgagatgatggtgctggacaaggaggacggaaaattgggccgatttccacctatgatgcatcatcaccaggcaccctcagatggccag

SEQ ID NO: 380091 - DNA, 100 bp, Homo sapiens
acgacatcgtgactgacctgcgcgcccgcctcggcccgcacgccaagcacgtggtgggctatggccaccttgatgccttcaattaagttgcagagttctg

SEQ ID NO: 380092 - DNA, 51 bp, Homo sapiens
ctttgaccgcttttgtggcctcatggctgggagtgtccactcgccttccac

SEQ ID NO: 380093 - DNA, 49 bp, Homo sapiens
aagaatgcagtctttctatacctgaaagaagattggcccatgcacaagc

SEQ ID NO: 380094 - DNA, 125 bp, Homo sapiens
cgttacctgcaggtattgggagatccacagctaagacgccaggacccactggaagcctagaaatgggcacacgtgtttcacgttgacaggtttgcttgggacgctagtaaccatgggcttgctga

SEQ ID NO: 380095 - DNA, 85 bp, Homo sapiens
ggacaacgaccacaggaatctggaattttattaaacatgaccttgccaccatggaagaaagagtacaaagacgatattatgaaaa

SEQ ID NO: 380096 - DNA, 75 bp, Homo sapiens
tttatgtgggaggatgttcagcagcgcggcagagtcatggggccgatcaaagtccagatctccatctccaaaaag

SEQ ID NO: 380097 - DNA, 51 bp, Homo sapiens
gggtcttcctcctccgccgttgacagcagttggaattgatcacaccttttc

SEQ ID NO: 380098 - DNA, 74 bp, Homo sapiens
aagataactaatcacttagagagagtctcaaaggagctgcagtcataccctatggtactgcagtatcgaccaag

SEQ ID NO: 380099 - DNA, 96 bp, Homo sapiens
agtgggccccaaacggctgtgtgctggcagtgtgggacacctgcttggagctgctgaatgccatggtggcaaaactggggaaccgggaggacccac

SEQ ID NO: 380100 - DNA, 100 bp, Homo sapiens
gtggggaacagttggctaaattaaagaggaattatgccaaagcagtggaactactggtggaactagcttctctgcaggtcctggacccaagccagaagcc

SEQ ID NO: 380101 - DNA, 98 bp, Homo sapiens
gctttaaatttccatggcaatttacaacccccatactgtaccaggcaaggggacaagggcctgtccgacacgccctacgacagcagcgccagctacga

SEQ ID NO: 380102 - DNA, 75 bp, Homo sapiens
gaaaaccaccacttacacccagggggtgccccccagccaagggctgctgaaaaggggaatttcgaagctgctgtg

SEQ ID NO: 380103 - DNA, 75 bp, Homo sapiens
cctctctggggtcctggcggccgaccgagaacgcagcatccacggtgagaagccctaccactgcaactgggacgg

SEQ ID NO: 380104 - DNA, 82 bp, Homo sapiens
tgaaggaggggcttctggttagcccagggcatgaaaatcaacatggacaagaatcggaggcgaaagccagcaagcgactccg

SEQ ID NO: 380105 - DNA, 75 bp, Homo sapiens
tcctgtacagcctgcagaactcattagtgaccagaaggatcccaaggatcgaatggttcaggttgtgaaatggta

SEQ ID NO: 380106 - DNA, 100 bp, Homo sapiens
gggcaccgtcatccacgaagtccacgtccagatgcaggagctgtccctgggcatgaaagccctggccccagagatatgtcagatcaacctggaaggaaag

SEQ ID NO: 380107 - DNA, 100 bp, Homo sapiens
ttcaatgcagacaagacggatgtgatgctgagcgatgaatgacatcggcgactacgtgggctccaacctggagatctcctggctccccaacctggacggg

SEQ ID NO: 380108 - DNA, 75 bp, Homo sapiens
ggagagcccgtccgacagcgctgaggcatggagggatttttgaaatcagatgagaggcagagattggccaaagaa

SEQ ID NO: 380109 - DNA, 91 bp, Homo sapiens
ttcccaggagccagggatgtagccgggaaacaagtccaaaccgaataggattagctgcagaaccttggcctgaaaatgctacattatatca

SEQ ID NO: 380110 - DNA, 100 bp, Homo sapiens
ccatctcagatgttgttgatgaagtaatacagaactgccccatcgatgtgcggcgtccgctgtataagagtcctgtgtatggaaactcacatgagtcagc

SEQ ID NO: 380111 - DNA, 75 bp, Homo sapiens
cgagtgaagagactgtacagcaattggcgggttgcccccaagtttcctggcagtgtgtgatactgaggaggtgag

SEQ ID NO: 380112 - DNA, 75 bp, Homo sapiens
aaaaagaggctcttcctcctcctcccgcgacgccaattgcatgatttctggcgtttggattactgggaagatgat

SEQ ID NO: 380113 - DNA, 74 bp, Homo sapiens
gataaggcaaaacggaggctggaatagcctaacatggcagaccagagacagcgctcactgtctacctctgggga

SEQ ID NO: 380114 - DNA, 75 bp, Homo sapiens
cgagcttgagtccagcagctttgtggactcggacgaggatggcagcacgagcagccccgaaactctggattccgg

SEQ ID NO: 380115 - DNA, 75 bp, Homo sapiens
caacaagattgcttgcaacaattgttatgcttgcaggaccagatgctgtgttggggaggacaatctggggagttt

SEQ ID NO: 380116 - DNA, 101 bp, Homo sapiens
cagagctgcacccgctgccccagctcaaaggcctaagatctggcaaacttggtgaacagtgtgaagcagttgttcgctttcccagactttttcagaagtat

SEQ ID NO: 380117 - DNA, 100 bp, Homo sapiens
ccccgtcatcgagtatgagcagttcatcgcaggtgcagaggccaagaccgttttgcccaagaaggagaaaatgaagctgaggcgtgagcaatggttgcag

SEQ ID NO: 380118 - DNA, 96 bp, Homo sapiens
ccacaaggcaggatgctgaggtgttgtctaggtgtgatgaatgcagactctgctaccattttggctgtttggatcctcctttgaaaaagtctccta

SEQ ID NO: 380119 - DNA, 107 bp, Homo sapiens
cagaggagagttctccaaacatgatcgtttactgcaaagcctggtactgtggcgctccgtgaaattagacgttatcagaagtccactgaacttctgattcgcaaact

SEQ ID NO: 380120 - DNA, 100 bp, Homo sapiens
tgagaacttcgagttgattaaccacgacgtggtggagcccctctacatcgagggtgctggagaatctggtaaaagcaccattgtgaagcagatgaggatc

SEQ ID NO: 380121 - DNA, 75 bp, Homo sapiens
gcattacaggaaagaagaagggaggtcatgttcaacgtgaaaaagatttgcctcaaagggcactgcaaaaattga

SEQ ID NO: 380122 - DNA, 75 bp, Homo sapiens
ctctctccagtccttgctgaagagactttccgttacatgaatcagctgtttcatgtattagccttgcacatgcgg

SEQ ID NO: 380123 - DNA, 98 bp, Homo sapiens
tcgcagataccgacctactaagaactacctgagctacctgacagccccggattattctgcctttgaagaggagatgttaaagtaacccatcttgcagg

SEQ ID NO: 380124 - DNA, 82 bp, Homo sapiens
cggaggtggcagccatctccttctcggtctgagcgggaaagttccgaagaataggagtggctgagttagctacggagttcat

SEQ ID NO: 380125 - DNA, 100 bp, Homo sapiens
caatccagatggcagccagtcagtggtggaggtggaaaatagctattcaatttctgttccgatcttcaaacagtttcacaagaatatcattgggaaagga

SEQ ID NO: 380126 - DNA, 119 bp, Homo sapiens
tggaggagctgtgcagccgcgaggaggcgcgggaggtgttcgagaacgaccccgagacggtttggtgcacctcgatttggaggaagtagggcagggcccttatctggaaagaagtttgg

SEQ ID NO: 380127 - DNA, 98 bp, Homo sapiens
ggatgcagtggaggccatcaggggccttgataacacagagtttcaagtgcacgatctgattttctggagagatgtgaagaagactgggtttgtctttg

SEQ ID NO: 380128 - DNA, 82 bp, Homo sapiens
ggaatcgaaatgcttcatggaacaaccaccctggccttcaagagagaagagagacccccaacccttagtgcttccttcagaa

SEQ ID NO: 380129 - DNA, 88 bp, Homo sapiens
acctcttgaaaagaagcattagtgcttcaattaatccagaagatagtactttccctggctaggtcctttcacaaaactgttcctgtga

SEQ ID NO: 380130 - DNA, 74 bp, Homo sapiens
gtgaggagagcccccattggaccagtgtttgcttagactgtcaagaacaagtatgccacatcgaagcatgctaa

SEQ ID NO: 380131 - DNA, 99 bp, Homo sapiens
tagggaacaaatgtgatctgaccacaaagaaagtagtagactacacaacagcgaaggagcaataccgtttctgctatgatgtagctttggagtacctgg

SEQ ID NO: 380132 - DNA, 75 bp, Homo sapiens
atgatgtcatcaccgtcatcgagggaagaacaccttccaccatgaccacctcagcaagttcccacttaaataaag

SEQ ID NO: 380133 - DNA, 89 bp, Homo sapiens
gtgacatgtctgatcccttgctcccatccctgcagcatgaacaagcatcagacaacagtcagcgctttcgagaaacctgttttgcattt

SEQ ID NO: 380134 - DNA, 100 bp, Homo sapiens
ggccaacttcggcaagatccagatcgggatttacgtggagatcaagcgcagcgatgactatctgttatagtccctgggtcaagacaacaatttttatacc

SEQ ID NO: 380135 - DNA, 83 bp, Homo sapiens
ggcgaacccgcggcgcaataacgctctaagcgaaagacatgaggcctcagcctgaaatgaggttgttttgaggtcatctgatt

SEQ ID NO: 380136 - DNA, 82 bp, Homo sapiens
gagattcagccagcacactcctcgcgagcaaggagggtgtgaagacagagaatgaccacatcaacctgaaggtggccgggca

SEQ ID NO: 380137 - DNA, 126 bp, Homo sapiens
agcgacgaccgacccagccgagccgccgccgccgccgcgcccccatggcggccgccaagaacatccagtcatggataaaaatgagctggttcagaaggccaaactggccgagcaggctgagcgata

SEQ ID NO: 380138 - DNA, 101 bp, Homo sapiens
gtgcccaagagggtgcaggtgatcctgcccaaggcatttttggtcgaagagagctgaagtaatgagaagacatcatggaggcccagtcccacagctccacg

SEQ ID NO: 380139 - DNA, 97 bp, Homo sapiens
gagtcagagcccggggctctgatgtcaccgcgcggctgcgacggcccaggagcgcgtctcggcgggagcctcaggctggagtgcagcggcgcgatct

SEQ ID NO: 380140 - DNA, 75 bp, Homo sapiens
ttgtctttcaagaaaggagagaagatgaaagtcctggaggagctggagcattggatttgctaaaggagcttaaga

SEQ ID NO: 380141 - DNA, 100 bp, Homo sapiens
caatttgaagatacatgagacagcagccaaacccccaggaaaaccagtggctgttacaagtaacagaggcacaggaagggcacctttacgtcctggcgct

SEQ ID NO: 380142 - DNA, 100 bp, Homo sapiens
cgcgtccgaggctcgcgggcggcgggcccgggcgcatattaaatttcctattgactacccctattcaccacctaccttcagattcttgaccaaaatgtgg

SEQ ID NO: 380143 - DNA, 82 bp, Homo sapiens
tcgtcaccaatgaaatagccatggtccaggctctgacagattaccgggcagagctccgggatgacccaatcatcagcacaca

SEQ ID NO: 380144 - DNA, 83 bp, Homo sapiens
accaaggataacaatgcccacacagtgaagagcaggctagaagagctcgatgagaggatctgctgtatatccttccaactcac

SEQ ID NO: 380145 - DNA, 90 bp, Homo sapiens
atccttgtttaatgactttggtgccctcaacatctctcagagacgaaagtttttcacagcatatggtcctgattatgtgctggaaatcac

SEQ ID NO: 380146 - DNA, 75 bp, Homo sapiens
cgctggagtccgcgcctccctggagatcctgcatattttgatgaaaattggctaaacagaatcaaaactgaagta

SEQ ID NO: 380147 - DNA, 100 bp, Homo sapiens
ggggaccctgtctgcaatgcctgtgggctctactacaagcttcacaatgcagctgaaaaagttggatgaagatagtttaaccaaacaaccagaagaagta

SEQ ID NO: 380148 - DNA, 145 bp, Homo sapiens
gagagaggcaccgggatcgtgaccgagaccgtgaccgagagcgtgaccgagagcgcgaatatcgtcatcgttagaagccatgcctgatggagctctggacacagctgtctgcgctgacgaagtggggagcgaggaggacctgtat

SEQ ID NO: 380149 - DNA, 74 bp, Homo sapiens
gcctgctcatcgcctactgcagccctgggaggagcggggacactgaggacctctctccaaattggcctctcaac

SEQ ID NO: 380150 - DNA, 100 bp, Homo sapiens
ttgtgggatttgtctgacagaacgcaatggaaacagagcgtggcattcgctccatctcccccaggtgggactcttccctggacactgtgttgagttaatt

SEQ ID NO: 380151 - DNA, 138 bp, Homo sapiens
caatagggaaagtgaggcagctgcaaggagggcggcgggactgcactcgagtgtccagacctgctcgatggacatcgctgccggctcccatgttcagcagaagcgacttcagcgtgtggaccatcctgaagaagtgtg

SEQ ID NO: 380152 - DNA, 100 bp, Homo sapiens
aagaaaatggacatctgcccattgcaatttgaggagatgattgaccgcctagaaaaaggcagtggtcagcaggatttctctgcctcttccaaacttttcc

SEQ ID NO: 380153 - DNA, 100 bp, Homo sapiens
gatgctgttcacaggaggctacgggctggagaaggacccgcagagatcagataatggagacatcaaatttctgactaaaggagataataatgaagttgat

SEQ ID NO: 380154 - DNA, 100 bp, Homo sapiens
agaacctggcacttatgtcctccctggatgcagagagaacttgtttatgcaagaggagatggccctggggcccctcgccccggatctactgctcatccac

SEQ ID NO: 380155 - DNA, 100 bp, Homo sapiens
gggcggtttcccgaggagcttgggccgccgcagatgagcaccatgccaggactgcccacccggccctgcttttatgacatagatcttgataccgaaacag

SEQ ID NO: 380156 - DNA, 100 bp, Homo sapiens
gggatcatcacttctcggatgctctgtgcaggcataatgtcaggcaagagagatgcctgcaaaacatatctgaagagatggattaagaatgctttggatt

SEQ ID NO: 380157 - DNA, 98 bp, Homo sapiens
taccatttccacttgatgtcatcacgcagaaggggtgaaagagactcggtgacagatacagtgcggaaacatggctcgcgaaggactgcggaccctcg

SEQ ID NO: 380158 - DNA, 80 bp, Homo sapiens
aagatgcttccctgtgcaagaggtaaaatgtcggttccaggaccttaccaggcggccactgggccttcctcagcaccatc

SEQ ID NO: 380159 - DNA, 51 bp, Homo sapiens
aaacgaccaccgaaaacaacaccgatttatcgaggtgtgagagtcggaggg

SEQ ID NO: 380160 - DNA, 90 bp, Homo sapiens
gccactcaacaactctttatgtgacaggagaacatttcaggataggaataggccaagtgctgagaagatgagtcttaggattgatgtgga

SEQ ID NO: 380161 - DNA, 101 bp, Homo sapiens
ctcagggaactggatgtcagcaagaatggaattggagctctgccgaagattatacaaattgcattttcaattgctgcttctgttccaggcctactgtaaac

SEQ ID NO: 380162 - DNA, 100 bp, Homo sapiens
acttcgtgttcttcctagcttccctgtatgtgatgatgaccgtcaccaactggttcaagctaaagaattacctccaaagccattgtcaagaccacagcag

SEQ ID NO: 380163 - DNA, 75 bp, Homo sapiens
aaggtgattcagattgcaacgtcatcctccacagctaagattcccaggactccggctctctctgcttctgtttcc

SEQ ID NO: 380164 - DNA, 76 bp, Homo sapiens
aggaggggctccggctggtctgtggtgagacacacctgccagggtttgtggagcaggctgaggctctgaaggccaa

SEQ ID NO: 380165 - DNA, 131 bp, Homo sapiens
gctgcggtaggaacatggcggatcggctcacgcagcttcaggacgctgtgaattcgaatgattacggacctgaagccaaagaacaagatgcgctagtggacagattgctgaccaggggcttgagagctggg

SEQ ID NO: 380166 - DNA, 75 bp, Homo sapiens
tttctcagaagtgaagaggagaaacagcatagggttaagctgggccacagacctccaccagcacgaagtggacat

SEQ ID NO: 380167 - DNA, 90 bp, Homo sapiens
tgccgtctgccacgtggacgcccctggccagcaggacggcgcagcctccttccccgcagggtaccgagcccctgaactgctgttgggaac

SEQ ID NO: 380168 - DNA, 82 bp, Homo sapiens
tggcagccgcggatctcaccgccgctcagggtgggatgctatggaatatgatgagaagctggcccgtttccggcaggcccac

SEQ ID NO: 380169 - DNA, 100 bp, Homo sapiens
cccgggatgcccaatgtatctaacgacctctcacagaaactatatgccaccatggagaagcataaagagaattccttcgacaatcctgagtggttttatc

SEQ ID NO: 380170 - DNA, 49 bp, Homo sapiens
aagaacttcttcccaaaatgggggcaacaccctccactaaagagtcaag

SEQ ID NO: 380171 - DNA, 51 bp, Homo sapiens
atggagagtggctggcaagttcattttgtagacttggtggctcctgcctcc

SEQ ID NO: 380172 - DNA, 100 bp, Homo sapiens
cgaggcctccatgacccccgatgccaaacacctgtggctgataaacattgacgatcttgaggatgaccctgtggtgaacggggagaggtctggctgtgcg

SEQ ID NO: 380173 - DNA, 83 bp, Homo sapiens
aggcaaaccccagcacttaagcaaacgggaattctcgcgatgaccagtgtcccagtgaaggaacgagtgaaggtgtctcagaa

SEQ ID NO: 380174 - DNA, 75 bp, Homo sapiens
ctgggaatcagaccctgagaccctgagcaagtgactgaatgtctgaccaccgtgaagtcagtcaacaaaacggac

SEQ ID NO: 380175 - DNA, 75 bp, Homo sapiens
tgttccgtgttgaatatgcatctaaagttgatgagaactttgactgtgtagagtatgccagtactgaggttgatg

SEQ ID NO: 380176 - DNA, 50 bp, Homo sapiens
gcaagcagtgtgcagcaggaacgggagcttcactattcagaatgtttttc

SEQ ID NO: 380177 - DNA, 75 bp, Homo sapiens
ccagcctgcggagcctgtggggcagctattgtggacgatgaaaggctctctgcagaggagatggatgagaggagg

SEQ ID NO: 380178 - DNA, 100 bp, Homo sapiens
ggcggatctggaggagcagttgtctgatgaagagaagataacaggaggcgcagggttcgtgggctcccatctaactgacaaactcatgatggacggccac

SEQ ID NO: 380179 - DNA, 75 bp, Homo sapiens
caaggacctcccagatgcaagagctgcacaagtctctccgggaatggaagttggatacactttgtgacttgtacg

SEQ ID NO: 380180 - DNA, 100 bp, Homo sapiens
ctttgtgtcccgacactctgccaccttctccagcattgtgaaaggcagattttttgaaaggactgcctgtctacaacaaaagcaattttagtcgatttca

SEQ ID NO: 380181 - DNA, 138 bp, Homo sapiens
ggagcggtaggagcagcaatttatccgtgtgcagccccaaactggaaagaagatgctaattaaagtgaagggtctccgtctctccaccgggggcttcatccttccagggaggagaagagggactccagaatggctgag

SEQ ID NO: 380182 - DNA, 73 bp, Homo sapiens
tatatttgcccatgttattcaaggaatttttgagagatatcttcaatctcctgtttttgttgccaagtctaaa

SEQ ID NO: 380183 - DNA, 75 bp, Homo sapiens
gctggccgcacgcggggctgctgcccaaggtaacagtcctttggacagcccccggaatttctctccaaatgcacc

SEQ ID NO: 380184 - DNA, 93 bp, Homo sapiens
ggcaaccgctgctggcagttttgccaggtgtttgttaccttgggcaagttggaagaccggaagcccttgatggtcttatttggagatgttgcc

SEQ ID NO: 380185 - DNA, 51 bp, Homo sapiens
agaagatcgaaaattaaacctcagatacaggtatccccgtttttacaacag

SEQ ID NO: 380186 - DNA, 102 bp, Homo sapiens
ccggcgctaagccgggagacaagatccgatctactgagagctgcgagatcgaaggtgccttggaatatggaatcacaagtgatgacatcttctggctgaagg

SEQ ID NO: 380187 - DNA, 98 bp, Homo sapiens
ctgatggagctcaagaccagggccctgcagctggaagaggagctgttccaggtgccccgcaccgtcctctggctgaccatcgagctagccattgtggg

SEQ ID NO: 380188 - DNA, 75 bp, Homo sapiens
gtcggcgagcccccgcggcgacaggtttggtgcacctcgatttggaggaagtagggcagggcccttatctggaaa

SEQ ID NO: 380189 - DNA, 75 bp, Homo sapiens
ctcccacaactgcctggtccgcgaggtgacgatgcctggggagcctgtggacgtggcatgtggcgtggaccacat

SEQ ID NO: 380190 - DNA, 98 bp, Homo sapiens
ctttaaagaaggcaaggagagaatgtatgaagaacagtcacaggacagagcactggaattaagttgccttcatcagtgtttgcttcagagtttgagga

SEQ ID NO: 380191 - DNA, 83 bp, Homo sapiens
cgcggattcgccgaggcaccgaggcactcagaggagtgtcaacagcatctccaccctggagcctgtgagccggtgccagcgcc

SEQ ID NO: 380192 - DNA, 100 bp, Homo sapiens
tgatggaaaaagaagtctttacaccgccaatccacttcctgtggcaactacagggcaggaagatgatttgaagtgggtagaagagaatgttccttcttct

SEQ ID NO: 380193 - DNA, 50 bp, Homo sapiens
gacgtgctgggaggatggtgccgaggccagcgatctgtacatgagaccca

SEQ ID NO: 380194 - DNA, 75 bp, Homo sapiens
aatctgctggaagacccagaaggcgtgaaaagatttagggtgaccattgtgaggtagatattttgttctaatttt

SEQ ID NO: 380195 - DNA, 78 bp, Homo sapiens
tcaatatgttggaggcatgctaagaagatgctcatgaagcagcaggaccggctggaggagcgagagcaggacattgag

SEQ ID NO: 380196 - DNA, 82 bp, Homo sapiens
acaaaaggtcccggaccccccggatctgacggggcgggacctggcgccaccttgcagatgagttttgatcatcctgagaaaa

SEQ ID NO: 380197 - DNA, 82 bp, Homo sapiens
gagaagcgcagcgacggcgtcgggagagcgcgcctagccggctcgcgagctccccttccctgcgggcatatccgctcctctc

SEQ ID NO: 380198 - DNA, 75 bp, Homo sapiens
ggtttttcggatcatgtctggtggctccgcggattataacaggttgaaatcacaaagattagacacctttttaga

SEQ ID NO: 380199 - DNA, 74 bp, Homo sapiens
caacgtcaggcccgatggctcggcttccccaggatgctgtatgattatgttgaaaggaaacgaaaagaaaattc

SEQ ID NO: 380200 - DNA, 90 bp, Homo sapiens
ggagtatgaaatcccatccaacctgactcctgcagatgtctttttcagggaggatccatgctgcagaatggtgtctctgattttgagacc

SEQ ID NO: 380201 - DNA, 100 bp, Homo sapiens
cgaaattgaaattacctccgagggaaacaagaaaacatcaaagaggtctagcaaaggacctctggtcctcaatcgagttcctctacgaagaacacaccag

SEQ ID NO: 380202 - DNA, 51 bp, Homo sapiens
agggagcccaccgggcgggcctggccaagatgtgaatttcttcggagtaag

SEQ ID NO: 380203 - DNA, 80 bp, Homo sapiens
gccgcaggacccacgagaagcggaaaccggcgcaaggacccggtccccccggcgccgtcgcgtggggcaggcagtggcgc

SEQ ID NO: 380204 - DNA, 83 bp, Homo sapiens
gggtgaatgaatctcatcagaaaagcaggaattacatgaatgacagtcttcgaaccaatgtgtttgttcgatttcaaccagag

SEQ ID NO: 380205 - DNA, 100 bp, Homo sapiens
caccagtcccagcaacaacggggaagtcacccagcccccaaggattctgggggaggcctcagggatttatttaatggggatgtgttcaaggcaagagcga

SEQ ID NO: 380206 - DNA, 98 bp, Homo sapiens
tggacgtgctggtgtctgagtggatggggacctgcctgctggaccctgctgggatctttgagcttgtggaggtggtcggcaatggaacctacggacag

SEQ ID NO: 380207 - DNA, 100 bp, Homo sapiens
agaagcagatcgcccagttctcccagaaggatgcccagagatggccaaggagaagcagtgctacctgcagcaagtcaagcagttctgtatccgggtggag

SEQ ID NO: 380208 - DNA, 76 bp, Homo sapiens
catgatgttggagactatttccccacccttgcggaaaaactgggtgggaggacgctactcgctgtggtcggccatc

SEQ ID NO: 380209 - DNA, 82 bp, Homo sapiens
cggctacttctcagctttaccatccctggaggagacctggcagcagatgtaaagacgaccgtggtttaccctgccacagaga

SEQ ID NO: 380210 - DNA, 98 bp, Homo sapiens
ttcatctatgtggccccaggcatcggcatcaagcatgatggaaccatgtgtgatacctgccgccagcaaccaatcattggcattcgatggaagtgtgc

SEQ ID NO: 380211 - DNA, 75 bp, Homo sapiens
ttcgacatcgagatcaaccgggagccgggccatgtcaaaggacgccctgaatctggcgcagatgcaggagcagac

SEQ ID NO: 380212 - DNA, 80 bp, Homo sapiens
ccagtggtggccagtagaggaggaggtgaacaaggaggaggatgtcagtgggcccctgagggagctgcgccctcggctct

SEQ ID NO: 380213 - DNA, 100 bp, Homo sapiens
agagagccatgtaatcatgccaacatcctgaccaagcccgatccaagaaccttctggactaatgatgatccagaacccttaggagaaatcttgagagtgg

SEQ ID NO: 380214 - DNA, 82 bp, Homo sapiens
agagacgcggctttcggcaagaactggattcgtggcgccacaagctcattcactgtgtagatgtgcacccccgccaataccc

SEQ ID NO: 380215 - DNA, 50 bp, Homo sapiens
ggaagaacaaatatgtctgtcagacactcttgcactcctgtaatgagcct

SEQ ID NO: 380216 - DNA, 75 bp, Homo sapiens
gaattgtagtggatgaaaaatcaggtcaggtgacactggaagataccagtgccggtggtggtgtgcacattgagc

SEQ ID NO: 380217 - DNA, 75 bp, Homo sapiens
gacagactgctgagcgactatattgagaaggaggtaaagggtttggaatcacttgctaggagtcttgtctctctg

SEQ ID NO: 380218 - DNA, 75 bp, Homo sapiens
ttgtttgtggatcgctgtgatcgtcacttggtctcaccaacggctttgggggtgcgaggagcgagcaggagccgg

SEQ ID NO: 380219 - DNA, 98 bp, Homo sapiens
gattgcggtcatggacaaggaaggcaatgtcctgggtcattccagaattgctgggacaaaggggtcttgctcctcagaacaaaccagaattgcagaag

SEQ ID NO: 380220 - DNA, 99 bp, Homo sapiens
caggagaagtgggcccagcgttcattcagggagtctgaagatacagtattgctcgtcctcaaagagatctaccaaacccagggtatcttccttgatcag

SEQ ID NO: 380221 - DNA, 75 bp, Homo sapiens
ttgtcattactgtgacggctatcaaacagcaaagtggattccataactctggcacaaggaaatcaagatgaaaag

SEQ ID NO: 380222 - DNA, 50 bp, Homo sapiens
ccgggctgccccgcaggatcatcaagctcaccatggatgatgatatcgcc

SEQ ID NO: 380223 - DNA, 101 bp, Homo sapiens
tccctctccatgaaggttgtcaatcaagggactgggaaagaccttgatcccaacaatgttatcattgaaacccgagcaacttcccgagaagagaagaacct

SEQ ID NO: 380224 - DNA, 100 bp, Homo sapiens
aaatcccaattttcttcagctatctacgggttcagttgataaaaataagaacaaagtgacaccactgcagagggaggtggggaagacagggctccagcta

SEQ ID NO: 380225 - DNA, 85 bp, Homo sapiens
acaacctttccctggtggtgcacggaccgggggacttgcgcctggacccatccattttcacagtattgactgctaagtctgtccg

SEQ ID NO: 380226 - DNA, 101 bp, Homo sapiens
catcacgccctttctcttgctcaagtctgaaatggttgtgacaaataatctcttggatctgccgcccccctctcctcccaaaccaaaaaccattgtcttac

SEQ ID NO: 380227 - DNA, 75 bp, Homo sapiens
agctcaaagtgtgccttctcggggttggatttggtctagggagtcccagaaagaagtagaaaaagagagagaagc

SEQ ID NO: 380228 - DNA, 90 bp, Homo sapiens
gtcaaggcagtcaagctgcggcgagataggtatcactggacaggccatggctccacggtcccggcgacgaaggcacaagaaacctccctc

SEQ ID NO: 380229 - DNA, 100 bp, Homo sapiens
attctgacgtacaacttgaggaagagggtggctgcagtccgagaagggatgtcctggattgttcctgtgccgctgctgtccctcctcacagcaaaacaac

SEQ ID NO: 380230 - DNA, 88 bp, Homo sapiens
ttactggtcatgggaaatgaggagacactgggagggtttcctgtcaagagtgttgttccagctttgactgacttccttttggtagtac

SEQ ID NO: 380231 - DNA, 90 bp, Homo sapiens
gtcacgggaatttgttatacagattatttcatctcccaggtgcaccttcgctctgccaggcgtctctgtgagctctgctgtgccaaccgg

SEQ ID NO: 380232 - DNA, 97 bp, Homo sapiens
ggagaacaaagctgaggtccagatgaaagagaagtttctggtcactccccaggattatgcgcggaccagctagaatctgtgctggaggtgttgcaca

SEQ ID NO: 380233 - DNA, 101 bp, Homo sapiens
gttgaagtcaaatgagccgtcttcagcagagattttcaggcaaatagcagaggcctacgacgtgctgagtgaccccctggaagaaagcgggacttttcccc

SEQ ID NO: 380234 - DNA, 102 bp, Homo sapiens
cgacggagccgctcaagaagtcgagatcgaagatttagaggccgctacagaagtccttacttttctgggagaagaggctacaaggacttagtgcatcagatg

SEQ ID NO: 380235 - DNA, 87 bp, Homo sapiens
aatgaacttctctggaccaacttgaccgtctactggaaatctgaatgctgttatcacttgcaggaagaggcagaggaagaggaagag

SEQ ID NO: 380236 - DNA, 82 bp, Homo sapiens
ggcatcagggaggctttcagccggagaagcgagtttcagctggtttttagaacttcagccataaaaatgggcagaattttcc

SEQ ID NO: 380237 - DNA, 112 bp, Homo sapiens
gacctccttcttcaggagagcgccccagggcaagccccgctccggccaacaattcctctgtgacgagggtgcaggtatctctggggactacatcgatcgcgtggacgagccc

SEQ ID NO: 380238 - DNA, 82 bp, Homo sapiens
tcatgtctgcgagccaggattcccgccgcggcgagtcctttgcacatgttggcaacacacgcatccgcatcggcctccctgc

SEQ ID NO: 380239 - DNA, 75 bp, Homo sapiens
caaacttattaataggaataccactattccaaccaagaagagccaggccaaatttgagtttcatcatggtgacta

SEQ ID NO: 380240 - DNA, 98 bp, Homo sapiens
gccgagcgcggcccgggcgccatcgagccttggcggcggacgtgcagttcctggcacagagtgaggagaagccacatgtggttgctcacttccatgag

SEQ ID NO: 380241 - DNA, 100 bp, Homo sapiens
cccgcccctgccggtcgcagtcgcgatgtcggtggccgggctgaagaagcagttccacaaagccagccagtttctaataagtgaccgtgacccacagtgc

SEQ ID NO: 380242 - DNA, 96 bp, Homo sapiens
ctgcgattcacaaccgacgtacagctaggcttcaacggaccacaccaaaatgccatctcaaatggaacacgccatggaaaccatgatgtttacatt

SEQ ID NO: 380243 - DNA, 80 bp, Homo sapiens
tctatagtttccagatggctctaacctcagtgcaattctgtggtgttcttggtcacacatttatggagtttctgaagggc

SEQ ID NO: 380244 - DNA, 83 bp, Homo sapiens
gccgctctgagggcgcctgctcagtcaccttcaggccattcagaggaggaaagagaggggaatatgaagtcagccaagcccca

SEQ ID NO: 380245 - DNA, 98 bp, Homo sapiens
cctggagcgcgccgccaaggcggcgcgcgagctggagcactcgcggaactgtctgggacctttgctcatctgtgtcagcaagttgacgtcacccggga

SEQ ID NO: 380246 - DNA, 99 bp, Homo sapiens
gtgatgggaaacgcgtgagccaggccgagaggagtatgcatcaacaattgtgtcaggaacttcaaagggacaatgtggacctatttgtacagtcttcat

SEQ ID NO: 380247 - DNA, 100 bp, Homo sapiens
aggaatgaattcagatatttccagagaatgaccacaacctcttcagtagaaggacaggacatccagcccaaaagagacctcacccgctttgtgaaatggc

SEQ ID NO: 380248 - DNA, 100 bp, Homo sapiens
cgaggcgagcaggagcagggaacaggctgctctttggcgtaaattgcaatcgattagggatcgtttctcagaatcaagttagaagtgagagttcagataa

SEQ ID NO: 380249 - DNA, 75 bp, Homo sapiens
gacctgcgctgcttcctacacagcctcctgtcgtggaagctttctttggaaaagatcttctagatacaagtagac

SEQ ID NO: 380250 - DNA, 92 bp, Homo sapiens
atttgactgagagaaacccactgaagacgtctgcgtgagaatagagaccaccgagctcaccatggatgatgatatcgccgcgctcgtcgtcg

SEQ ID NO: 380251 - DNA, 100 bp, Homo sapiens
tcctggaggtggatctgaagaacggcatgcttttcacttccactgcatctctcgctggctcaaaacacgacaggtgtgtccattggacaacagagagtgg

SEQ ID NO: 380252 - DNA, 75 bp, Homo sapiens
caaggagcggaaagactagatgccgatccaaaagactaagtcagtgctacactttgaggattttgaaagcagagg

SEQ ID NO: 380253 - DNA, 100 bp, Homo sapiens
ctctgggggcgctgtacaccgcggccgtcgcggcttttgtgctgtacaagtgtttgcagagcccagcagtgattgactccccattgaagctggagctgcg

SEQ ID NO: 380254 - DNA, 100 bp, Homo sapiens
gaggcccagagcgcagccctggaggagggccacgcctggaggattttgaacaaagtagaggaaagaatgaaagaattgagtcaggacagtactgggcggg

SEQ ID NO: 380255 - DNA, 80 bp, Homo sapiens
cagcggcggaaaccgaaggggagccatggcggctgacagtcgggaggagaaagggtgtccggtggagagctgtttgaccg

SEQ ID NO: 380256 - DNA, 76 bp, Homo sapiens
caacagtgggaacactaaagtgttctctggagatctcatggtggatgttcctggacatggaaaggtgatggtggac

SEQ ID NO: 380257 - DNA, 87 bp, Homo sapiens
acaaggggcatccaaatcttgcggcaacgcccccgggacatgcatcgtcccctggactctctcaatggaatctaatcagaaaagctc

SEQ ID NO: 380258 - DNA, 75 bp, Homo sapiens
atgatacaccaggatccacatataacctccagcctgcagtggtttctggtgtgcataagaaaatgaacattagcc

SEQ ID NO: 380259 - DNA, 56 bp, Homo sapiens
tcggtgaccatctcgcaggatgccggcagaattgcctgaggttctgtccattgagg

SEQ ID NO: 380260 - DNA, 83 bp, Homo sapiens
gtggctaccacttggccccctctgatctgcgccgggtcgccacatactgggggatatgagactttctactcggaatatcctga

SEQ ID NO: 380261 - DNA, 75 bp, Homo sapiens
acctctgaacaggagtgggacaaggtgtggggatattcagctttgccaggtatggcagtgatttttatagcatgc

SEQ ID NO: 380262 - DNA, 75 bp, Homo sapiens
ggagcaccaggatctcgggctcggaacgagactgcacggtaatggggccacctgcttgacacattgtgacggaac

SEQ ID NO: 380263 - DNA, 75 bp, Homo sapiens
actactctcagcctactatctgtctggagaagagggtatgagtattatagaacaattagaccctgtatcttttag

SEQ ID NO: 380264 - DNA, 100 bp, Homo sapiens
actccgtaggagcgcgggggcggctcctgctcttcctggactcctgagcagagatggagaaggatgaaactgtgagtgactgctccccacacatagccaa

SEQ ID NO: 380265 - DNA, 75 bp, Homo sapiens
gcacagaggcagcgccacctcgcttggatgaccagtgtcccagtgaaggaacgagtgaaggtgtctcagaactgg

SEQ ID NO: 380266 - DNA, 76 bp, Homo sapiens
tccgtcaatggcttcatcagcactttggggtgctcctgacctctgataaagctgcagccaatttctcagatcgttc

SEQ ID NO: 380267 - DNA, 90 bp, Homo sapiens
agagcgccgggacctgtgacagggctggtagcagcgcagaggaaaggcggcttttagccaggtaagaatgattgatgttggctgatattg

SEQ ID NO: 380268 - DNA, 75 bp, Homo sapiens
gatgctgccagggtccctgaagagggaagacacgcggaaacagatgtcatgtggcctgtgttttggaccgtggtt

SEQ ID NO: 380269 - DNA, 98 bp, Homo sapiens
ataaagctgagtgtgatgaagatgcagaaaatgttgggttagtaggagggctgctttccctcagcctggattactgctttgtcctagaagatgaagat

SEQ ID NO: 380270 - DNA, 98 bp, Homo sapiens
aagttgggcagaaagtgactccagtggtggaacccggagccaaccatttttagttacgtttggtgcacctcgatttggaggaagtagggcagggccct

SEQ ID NO: 380271 - DNA, 80 bp, Homo sapiens
gctgcctggaccgtccgtgtctgtgaaaggttggctcaaaaacagaagttgctgagtgcaaggagaaattcgccgcctcc

SEQ ID NO: 380272 - DNA, 75 bp, Homo sapiens
ctacctcctctgctgggaccagtcacaaaatgaggacggggacttggttgccttttccagtgacgaggaattgac

SEQ ID NO: 380273 - DNA, 100 bp, Homo sapiens
aagaagcctggtctccggggccgctggattctgaggaccagcagatggccagtcacgagaacccaggtgctggagaatctggtaaaagcaccattgtgaa

SEQ ID NO: 380274 - DNA, 73 bp, Homo sapiens
tttgcatatggacaaacatcctctgggaagacacacacaatggagagacgagttgtactgctgtcacaggaaa

SEQ ID NO: 380275 - DNA, 75 bp, Homo sapiens
ctgctgagtgtccagatcctccaaagacagatctgattctttcttgtggagaagttattcatgtgaagatccttg

SEQ ID NO: 380276 - DNA, 100 bp, Homo sapiens
aggcacagcggctgtatccgacgccgcgagttcgcgatgatgaccactggatcgtcgacacagactacgacacgtatgccgtgcagtactcctgccgcct

SEQ ID NO: 380277 - DNA, 100 bp, Homo sapiens
attacagcggcctcagggttcaggcaatgcaaataagtgttccttgcctgtatctccccttggttcaatagctaccagatttttggaagaggaggaactg

SEQ ID NO: 380278 - DNA, 75 bp, Homo sapiens
ggtgcgtctgccgcagagtcggcacctgaaggacatggagggtcactcagctgccgcaaggagcaaggcaagttc

SEQ ID NO: 380279 - DNA, 97 bp, Homo sapiens
ctgattctttaagaaaatcagataacttgtactggagagaaatcctacaagtgtgccacatgaaatgaagatcacctctgcctatctacaggacatt

SEQ ID NO: 380280 - DNA, 100 bp, Homo sapiens
taataggaataccactattccaaccaagaagagccaggcagcctggcatcctcgctacaacctcattgttgtgggccgatacccagatcctaatttcaaa

SEQ ID NO: 380281 - DNA, 100 bp, Homo sapiens
ggttcgccccgggcggcgtcggcgactcgggccccggagaggattctctttggacagcgtccatactggtgggttttggatactgactactacagcaaca

SEQ ID NO: 380282 - DNA, 80 bp, Homo sapiens
aataacatttcttggaattggactgtgggcatggaatgaaaaatgccatacaaattatattcctgtctgtggatcaaatg

SEQ ID NO: 380283 - DNA, 75 bp, Homo sapiens
ccggtttctcccacatcgacctgaggatgtcacccccatcccctctgacagcactcgcaggaaggggggtcgccg

SEQ ID NO: 380284 - DNA, 100 bp, Homo sapiens
tcttcataaggttgtagtagcaggagccctctatcttttgttctctggcatggaaggggtcctcagagttactgggcctcacagcccaaggagcgtcctc

SEQ ID NO: 380285 - DNA, 83 bp, Homo sapiens
tggagaactacagaaacctcgtctccctggtgccaccgtgggccttaattgcaatagccatagtcgcagtccttttagtcctg

SEQ ID NO: 380286 - DNA, 88 bp, Homo sapiens
ccgcggcgttggtggccagacgggctggtgcagcgactgcagccgacgccgttcaaaggaacgaggctggagtgcaatggtgcgatct

SEQ ID NO: 380287 - DNA, 73 bp, Homo sapiens
ctgcacctggctatcccaaccaggagggacgataaggccagagatcctcagcaggagcctatggaagagatag

SEQ ID NO: 380288 - DNA, 103 bp, Homo sapiens
atcaaaacacaaatcgcctaagaaaaagactggaaaggattctgtgctttgtaacagagccagactggtttcctatctcccaggattttgctctttagttaaa

SEQ ID NO: 380289 - DNA, 100 bp, Homo sapiens
aaaggatttccatgggatgagtacaagttactgagcacctttcctaggagagactgttcctttctgccgaaattctccattcatatagaaaccaagtatg

SEQ ID NO: 380290 - DNA, 75 bp, Homo sapiens
gacatctccaactgtgggaactctttccagcttgtgtctggtgtagtgtcttttcccatgaccgggagttcatag

SEQ ID NO: 380291 - DNA, 82 bp, Homo sapiens
agatggtgacactgaaagttgcaggagcgtgaggatcatccccggagaggacgggaggatcggcagcacagggaaccatcag

SEQ ID NO: 380292 - DNA, 50 bp, Homo sapiens
aagcaggcccgttggaagtggttgtgtgtcatggagaaactccagctggg

SEQ ID NO: 380293 - DNA, 78 bp, Homo sapiens
gtatggtgctgctgtccaggctggtgtgctctctggtgatcaagatacagttggctggatctattattggcaaaggtg

SEQ ID NO: 380294 - DNA, 83 bp, Homo sapiens
ccggagcagagagctggcgagcaagtcctacaccacatatggcctggagctgacgcgcgtcacggtggtcgacacggacgtgc

SEQ ID NO: 380295 - DNA, 98 bp, Homo sapiens
ttcctggttgccggctgaaataacctggaggagcaactgaagtcacatgaaagtaagctgaagcagatcaccaccgagctggccgagcaccgctcata

SEQ ID NO: 380296 - DNA, 100 bp, Homo sapiens
ggtaatgctcctttatattatgaggttaatttggagtggcccctggagtcagtttcctacaccatccgaggccccacccagcacgagctacagcctccac

SEQ ID NO: 380297 - DNA, 83 bp, Homo sapiens
gaggagacagaggccgtcgtgcagcaactggttgctgacattgatagctctcccagtaaggaggaggaggaagaagatgatga

SEQ ID NO: 380298 - DNA, 100 bp, Homo sapiens
cccaaagagtgctgcaagttcatgtgtctggacccaggactggactcgggccatatccgtggtgccgtcaacatgcctttcatggacttcctgactgagg

SEQ ID NO: 380299 - DNA, 100 bp, Homo sapiens
gagagacccaagtgatttcaatcctgcagctcctgaaaggcaagctggtggtgggtcatgacctgaagcacgacttccaggcactgaaagaggacatgag

SEQ ID NO: 380300 - DNA, 83 bp, Homo sapiens
gtgagagaagaccagtctttcctctagcaattctgtggtgttcttggtcacacatttatggagtttctgaagggcagtggaga

SEQ ID NO: 380301 - DNA, 100 bp, Homo sapiens
ggaaaagatccctggaatatgaagggacacagtacggtagtcaaacccccaggaggagatgttaaagtaacccatcttgcaggacgacattgaagattgg

SEQ ID NO: 380302 - DNA, 100 bp, Homo sapiens
cttccatctggtgggcagctcccggagcatctgtagtcagggccagtggagcacccccaagccccactgccaggctctggcattgcccgtgacccctcag

SEQ ID NO: 380303 - DNA, 113 bp, Homo sapiens
ctcaggagtcgtcaagaggctctgcaccctggatggaaagcagtcactgtgtgcccagtattctgcagacaaacgagaagatgagaagatgtgtgatcatttgataagagcag

SEQ ID NO: 380304 - DNA, 100 bp, Homo sapiens
gacacagcatcggccctcatcagtttaaggagttcatgagtaaacatgttcacttaatgtgttaccggatctgcgtgcgagcgctgacagccatcatcac

SEQ ID NO: 380305 - DNA, 96 bp, Homo sapiens
cagtatatggatacggagtacaaaaacggcccttggatgatggaggcactgcaacatggtgctggagaacgtgaaggagatgtggactgaggtacc

SEQ ID NO: 380306 - DNA, 50 bp, Homo sapiens
ctttcctctaaagtcaaactgctggagctctcaaacactgctgtcctgca

SEQ ID NO: 380307 - DNA, 75 bp, Homo sapiens
aaaacaagtgtgtgcatctggctgttagaagaattcatgctcatccggagctgtaggtaaaacttgcctactgat

SEQ ID NO: 380308 - DNA, 100 bp, Homo sapiens
gcaggtgaccccaaaaaggagaagaaatctctagactcagatgagagtgaggatgaagaagatgactaccaggctgaagaactgaaactggccacccagc

SEQ ID NO: 380309 - DNA, 104 bp, Homo sapiens
cccgagccgccgccgctgtccggagccccacagaaaatgcttggacagaagagatgagtactatttccactaaggcctagaattgcctactgtacaaatagtcc

SEQ ID NO: 380310 - DNA, 75 bp, Homo sapiens
ttcccttatatactgcttacaagcataatactcaccctactattgagatgcttcctttaaataccaatattcgac

SEQ ID NO: 380311 - DNA, 100 bp, Homo sapiens
ggtgattctgtccgacggcgacggcaccgtggagaaaggtttttcgttggaatatacgttgcacatttatggcgattctgagtgtgagggcagacttctg

SEQ ID NO: 380312 - DNA, 83 bp, Homo sapiens
cttctttgggaatacctgggcagagatgtacaggaatcgacaacacaggcagttctacataccggccaccccctcggacccgg

SEQ ID NO: 380313 - DNA, 82 bp, Homo sapiens
ctgggacactggactgtgtgcccagaacatttttctgccatgagaggttttaaaatcaaagatgggaaaatcggagaaaatt

SEQ ID NO: 380314 - DNA, 91 bp, Homo sapiens
cgcgaggaggcgcgggaggtgttcgagaacgaccccgagacgtctgcgctcctcagaccaccggcaggtgaacagcctgatgcagaccgag

SEQ ID NO: 380315 - DNA, 100 bp, Homo sapiens
gcttaatgaggaaatatcaagaacatgaagatgttcctatttgtattcattgcaggatggtgaagaagacgaagtaagtgctggagaaaaggagcaagat

SEQ ID NO: 380316 - DNA, 75 bp, Homo sapiens
tctcttttgaatatagcactattaaatgtagagatctcatctaccctgacatttgcactatcagccttgtagcag

SEQ ID NO: 380317 - DNA, 80 bp, Homo sapiens
ttgatggaattacactgtgatacgactgactgggctttgttatgcacctaaagccatattggaagctccagaagaaagag

SEQ ID NO: 380318 - DNA, 98 bp, Homo sapiens
tctagcctgacaaatgcttgctgacctgggccagagctcttcccttacgcaatggaatgcagtagccctctgggcctgggatattgtggttgataact

SEQ ID NO: 380319 - DNA, 100 bp, Homo sapiens
tggaagtgcggggctccaatggcgctttctacaaggtaatatttgaagctgaagtctcaggagggagaagtggttatattgccattgatgacatccaagt

SEQ ID NO: 380320 - DNA, 100 bp, Homo sapiens
tgctacctgcagcgccgtgtggcacgacacaaaaatcagacggggtctggctctgtcacccaggctggagtgcagtggcacgattatggctcattgcagc

SEQ ID NO: 380321 - DNA, 83 bp, Homo sapiens
ggccattcgaagcgacacatcagggcacttccagcggctcctcatctctctctctcaggtgccagatgtgacatccagatgac

SEQ ID NO: 380322 - DNA, 75 bp, Homo sapiens
gccctcagctccgagtccagggcgagcacatggattaattgatgtatgttgagtttatggagctgccttttggtg

SEQ ID NO: 380323 - DNA, 83 bp, Homo sapiens
cgcctgctgcctgagcccgccagcgacgtgcgcctcgggagtcggcctgtgagcaaaagctgatgaagcattgaaagccaaag

SEQ ID NO: 380324 - DNA, 82 bp, Homo sapiens
gaccacggtcaccgtctcctcaggctgaccctgggcaagccccttggggagggctgcttcggccaggtggtcatggcggagg

SEQ ID NO: 380325 - DNA, 100 bp, Homo sapiens
ttggaagcccctgtttgccaggcgtgaaaaaatacctcactgtgacctacgcatgtgtgggtcggaagcagttcatgaggtttgagtgggcaaactacgc

SEQ ID NO: 380326 - DNA, 74 bp, Homo sapiens
cctgctgctgccactcgtcattctgatgcccgccaagaaattcattgtacaacacacgaaccccttcaatacct

SEQ ID NO: 380327 - DNA, 138 bp, Homo sapiens
tcatcttcgccgcccctgcgcgtccagctcttctaagacgagatgccgtcgggcttccaacagataggctccgaattggaatcgaagcctcttaaaatggcagatgacttggacttcgagacaggagatgcaggggcc

SEQ ID NO: 380328 - DNA, 75 bp, Homo sapiens
gcaaagggcacgtatagcattggtaaagaacgatcgtccagtggaggcagatgatgttgagggcaaaattagaca

SEQ ID NO: 380329 - DNA, 75 bp, Homo sapiens
caaacgcggccgcttccgactcagcctcttcagcgacctgcccgaggagaggagaggcagcagcatggcgagtgt

SEQ ID NO: 380330 - DNA, 89 bp, Homo sapiens
tgggccaaaggacagttagaagacagtaggagccatccgcaagcagttggcggctttcttagaaggcttctatgagatcattccaaagc

SEQ ID NO: 380331 - DNA, 48 bp, Homo sapiens
aatatttcacctgatgataagtgtacaaagataatcaatgctgattcg

SEQ ID NO: 380332 - DNA, 75 bp, Homo sapiens
taaccgttggtgacataacctgcacagcttgaagaagtcatggaaaaagaaacttacaagacggctaaattaatt

SEQ ID NO: 380333 - DNA, 75 bp, Homo sapiens
caaagccacccaggcaaagcaggcacttttggcaaagaaggagccatctgtgagaaagacacactgcagtggaag

SEQ ID NO: 380334 - DNA, 71 bp, Homo sapiens
ttctgctgcctgggcttcatcgccttggcctactccctcaaaggctgcgctggcctcggcacaccagtgcc

SEQ ID NO: 380335 - DNA, 98 bp, Homo sapiens
tttacgcgcacgttggaaccgaagagagctctgttgttgcagtgctggagaatctggtaaaagcaccattgtgaagcagatgaggatcctgcatgtta

SEQ ID NO: 380336 - DNA, 97 bp, Homo sapiens
ggcttttaaggaggacacccggacacctggaagctgggaaatgtgaaggagaacgacctgctcagaatgagaagaggaaggagaaaaacataaaaag

SEQ ID NO: 380337 - DNA, 74 bp, Homo sapiens
atggccaccgtcaccaaggcgcccaagaaggtgaccttggagaaggtgctgggaattacagtgtctggaggcag

SEQ ID NO: 380338 - DNA, 50 bp, Homo sapiens
tggctcaagggagaatttgtcacggtatcagtgcttcaaatcggcctgga

SEQ ID NO: 380339 - DNA, 100 bp, Homo sapiens
aaagaaacggacaaagggaaaaactgttccaatcgatgattcctctgaaactttagaagtgatgagagcctatttacaacagctaaggcaagagactgga

SEQ ID NO: 380340 - DNA, 77 bp, Homo sapiens
aacaatgaactacttgacttcctttccagagtcccttcagatgtacaagtggtcatactccctgtcacaaactccag

SEQ ID NO: 380341 - DNA, 75 bp, Homo sapiens
gcttcaatatcttcacccagcatggtatgtgacgcattcccagactcttcagccaactgagcatcagcttcttca

SEQ ID NO: 380342 - DNA, 100 bp, Homo sapiens
gatgtcctcatcatcccgtcagagctgaggtacttcgtgaaggaattgaatgatctggcacgggaccctccagcacagtgttcagcaggtcctgttggag

SEQ ID NO: 380343 - DNA, 103 bp, Homo sapiens
ctccagtgaagctacgacagtaagacttctgtttcagctgaaaaaggaagtcaggaccgtagctcatgaaaaggcttgggcactgtttaaaggaaagttccga

SEQ ID NO: 380344 - DNA, 75 bp, Homo sapiens
agttgtcgacgaccgacagggtggtgaaagtaagactttgaccccgacgcaggcttcagtgattgccgcggatca

SEQ ID NO: 380345 - DNA, 76 bp, Homo sapiens
acagacagaatccctgctaccagttcttcacacacccccattcggcgtagtacccagagagctcaagatgtgtggc

SEQ ID NO: 380346 - DNA, 101 bp, Homo sapiens
tgacctacactagtcgcgggagccacgcagaggacgccggaacaccctggaagccgagaaatggacctgcaagcgcaggaccgagcccaccgcatcgggca

SEQ ID NO: 380347 - DNA, 82 bp, Homo sapiens
caggactgtggccgtgggggacatcgtctgggaactgtcagaccttcagcagcctcagctgcctgagcgcagggacagagga

SEQ ID NO: 380348 - DNA, 90 bp, Homo sapiens
cggcagtcgggccagacccaggactctgcgactttactcaggatggctaaaggtgaccccaagaaaccaaagggcaagatgtccgcttat

SEQ ID NO: 380349 - DNA, 75 bp, Homo sapiens
aggagcactggaggaagcacaccctgtcctatgtggacgtcagcactgggaagggcttccagtttccaaacctga

SEQ ID NO: 380350 - DNA, 95 bp, Homo sapiens
gctcacagtgctgggaaggaatctatccaaggaatactctgaagatagtaactccgagccaaatgtggatttggaaaatcagtactataattcca

SEQ ID NO: 380351 - DNA, 82 bp, Homo sapiens
agaacttcagtggaccttcataatgctgacctacctgaataacacactggtagaagattggaagagagaagggcacagttac

SEQ ID NO: 380352 - DNA, 100 bp, Homo sapiens
gtttaagatgatgcctaacaggagaaatatgtatacagtacagaataattcagtttgctggagatccttcacgaacagcttcctgagagtaccaagagat

SEQ ID NO: 380353 - DNA, 142 bp, Homo sapiens
agttctgatgaagatgatgtcagctctgagtcaagtaaaggagagcctgacccactggaagataaacagagttgtggaaagtaaaaatgtagccctaccaaaaggaactattgtactggcttctccaggctggacaacgcac

SEQ ID NO: 380354 - DNA, 83 bp, Homo sapiens
ctggaagctactactacgtggtgcttggaaagtgtgagtgcatctccatccatgtgggccaggccggagtgcagatgggcaat

SEQ ID NO: 380355 - DNA, 125 bp, Homo sapiens
cttcaggctgcaacaaggagaagagccatggaaacaggaggaagaattcccaagccaaagctttccagacagtccctgggtctccgaccccaatattcccctagtggcccgtgagatcatgcagc

SEQ ID NO: 380356 - DNA, 151 bp, Homo sapiens
ccaaggtgctgagccggcgcggggtcggcgctgggctggaggcggcggagcgcgagagcttcgagcggactcaggtgggagtgacatatccaagacctgctgcttccaatacagccacaagccccttccctggacctgggtgcgaagctat

SEQ ID NO: 380357 - DNA, 100 bp, Homo sapiens
gatggtccttcagggaggacccaggtgtgatgaatgcagactctgctaccattttggctgtttggatcctcctttgaaaaagtctcctaaacagacaggc

SEQ ID NO: 380358 - DNA, 100 bp, Homo sapiens
tattggagtagcgaggaatctgattccaagcaaaaaccaggcggcttacagggagaacacagttggcctccaccgtttctgccccacagaaaacgtagca

SEQ ID NO: 380359 - DNA, 46 bp, Homo sapiens
cttttccctctccctttccctaaggctcttgcagccaatgccggaa

SEQ ID NO: 380360 - DNA, 75 bp, Homo sapiens
agagcagcaagtctctgagatatttggggctgatgagatgtgataaatgcttttttaggaccaaaggatatattt

SEQ ID NO: 380361 - DNA, 75 bp, Homo sapiens
taaacaattcatatctcatggtgattcaagacattactgctatgcaactggatgatgctcgcaacaaagctgaca

SEQ ID NO: 380362 - DNA, 85 bp, Homo sapiens
cgctgccaacactgtcgattacagaaatgccttgccgtagggatgtctcgagatgattgtagaaggcatgaaacaaaaaatgtgg

SEQ ID NO: 380363 - DNA, 100 bp, Homo sapiens
gggataacattcatgcagaacatcaggacacagcattgttggttttgccatgtactattttacctatgacccgtggattggcaagttattgtatcttgag

SEQ ID NO: 380364 - DNA, 80 bp, Homo sapiens
ctggggcaaagggaccacggtcaccgtctcctcaggtctcggcgcggaagatggccggcggcgtggacggccccatcggg

SEQ ID NO: 380365 - DNA, 90 bp, Homo sapiens
acgcggtgctgcgagggcagaacctggcaatggccaatgtacatggtggactatgccggcctgaacgtgcagctcccgggacctcttaat

SEQ ID NO: 380366 - DNA, 83 bp, Homo sapiens
gagcgagcagaggcttaaggtcttcagcggggcgctccaggaggcactcacagagacctgtctgggccgcagagaggagtctg

SEQ ID NO: 380367 - DNA, 100 bp, Homo sapiens
gagggactcctgcagacatggctgttggagatgaaccttgttcatgcaccccaggttgcatctggaggtggtggggttggagatggtgttcaagaaccaa

SEQ ID NO: 380368 - DNA, 100 bp, Homo sapiens
tgaagaaacgcaagggcaagttcaggaagagccggctgaagctcaaggatggcaaccgcatcagcctcccttctgaaccccagctcaaagggattgtgac

SEQ ID NO: 380369 - DNA, 100 bp, Homo sapiens
aatgcgattagttgatgtggcctgcaaggttacaggaggttccagtggcatcgggaagtgcattgctatcgagtgctataaacaaggagcttttataact

SEQ ID NO: 380370 - DNA, 100 bp, Homo sapiens
ggatgtggaggggaatagactccatctatccatatgagggatttgtcttggctgttactatgacacgggaagcaattgatgaatttcggcgttttcagcg

SEQ ID NO: 380371 - DNA, 98 bp, Homo sapiens
cggaacatggccttggacgtcagaaataaggagctcatcggtggataatattaatgcagctgtgatggatttgaaaaaaaagaagatccgcagtctaa

SEQ ID NO: 380372 - DNA, 75 bp, Homo sapiens
cctggctcttgccctcatcctggttctggaatcctcagttcaagaaaagggagatttcattgccctggatcttgg

SEQ ID NO: 380373 - DNA, 74 bp, Homo sapiens
cggcggcggagactgcgggcccgtagctgggctctgcgagggctgaagaagatgcagagcagcctgaagctggt

SEQ ID NO: 380374 - DNA, 100 bp, Homo sapiens
aaagaacttcgtgtgaaaattttcctggggtaccagctggaggatgagtctgcgcatttggatgaaatgccactaatgatgtctgaagaaggctttgaga

SEQ ID NO: 380375 - DNA, 75 bp, Homo sapiens
catcacccaccaacaacaccacaataatccacagccaagattttgaagccagcttcataaggctattggacaaaa

SEQ ID NO: 380376 - DNA, 74 bp, Homo sapiens
gggggggtcagccccccgcccggccagccgccccgtccgggagatctgaagaggaatgattatacgcctgataa

SEQ ID NO: 380377 - DNA, 74 bp, Homo sapiens
ccctaatggaggtctccagtttcgctgcatcttcctcccgtgaggctggccgagctccacgctgatctgaagat

SEQ ID NO: 380378 - DNA, 82 bp, Homo sapiens
cccaacctagtgggtgtaatacatcatgaactgcagggtgggaaagtctgtgtctcatgagaacaaagaacaagattcttat

SEQ ID NO: 380379 - DNA, 89 bp, Homo sapiens
gtctgactctgactctcggactgagaaacgcaagactgtgccctgtccacggtgcctcctgcatgtcctgctgccctgagctgtcccga

SEQ ID NO: 380380 - DNA, 76 bp, Homo sapiens
gacaagctgagcttgccgcacaaaaagctagagagcccatgcagaatgccaccaagtatggcaacatgacagagga

SEQ ID NO: 380381 - DNA, 82 bp, Homo sapiens
cgagtgggagcaccaggatctcgggctcggaacgagactgcacggtcagcccaaggccaaccccactgtcactctgttcccg

SEQ ID NO: 380382 - DNA, 82 bp, Homo sapiens
ccacatgcccgctcacctgcgctgtgatgcctgcagagctgtggcttaccagggagtgcatccgccccaacccttttccccc

SEQ ID NO: 380383 - DNA, 100 bp, Homo sapiens
agtgctatcaaggaaccacgctctcgtctggtttgatcacaagacgggcaaggcctagccgcccgtgactctcacactgtctcctgcatgacgggtggcg

SEQ ID NO: 380384 - DNA, 96 bp, Homo sapiens
agggaagtatggtattggatttaccaacatggtggaaaggaccacgcccggcagcaaagatctctccaggagctgctgctcaagaggtcatcaaaa

SEQ ID NO: 380385 - DNA, 89 bp, Homo sapiens
ccttaagaaaaaacaaaaatattgacaactttttaagcagatcttctacagatgacagtgcagctgagaagaaagggggaaccctccac

SEQ ID NO: 380386 - DNA, 100 bp, Homo sapiens
agcggagcccccgcgtccgcccgccgcagccgccgctccatccccagccccggccccgcatccaggctgccagcgggaccaggatggctattactggatc

SEQ ID NO: 380387 - DNA, 83 bp, Homo sapiens
ctggagagcttcatcaaaaatagtgatagctttgataagtacagcctgactatttggactggaaaaaatgataactattccgt

SEQ ID NO: 380388 - DNA, 80 bp, Homo sapiens
ccgctctttgccgtgacaacaccgttcccccagccgggctggttaatttggagtggcccctggagtcagtttcctacacc

SEQ ID NO: 380389 - DNA, 100 bp, Homo sapiens
ctcagacagatcgccggggaggcagcgcgggatcccagcctcaggcgtgcgcggacggtgtgcggcctgcctagggtagttaaaagacgagtgaatgctc

SEQ ID NO: 380390 - DNA, 75 bp, Homo sapiens
taggcattctgatgggaacttgtgtgttaaagtaacagatgatttagttctatttgcatgcaaagaacatcatcc

SEQ ID NO: 380391 - DNA, 90 bp, Homo sapiens
ctggaagctgagggcacgtgtttgcggttcagccctttgatgaccgcagcaggtgcgcttctccgagaaggtcactgtccatttcctggc

SEQ ID NO: 380392 - DNA, 50 bp, Homo sapiens
attgccagagaattggcagaaggaaaatatgttgtgttcttcttttaccc

SEQ ID NO: 380393 - DNA, 87 bp, Homo sapiens
tggaaaaccagatccagaaactggaggagtcccgctcgaagctaggagaggcagatgcgaaccagaacaatgggacctcctctcagg

SEQ ID NO: 380394 - DNA, 100 bp, Homo sapiens
cgtcgagccagacagactgctgagcgactatattgagaaggaggtaaagtgcacttacatttcaatcgaccaagttccaaggacctatgccataatgata

SEQ ID NO: 380395 - DNA, 96 bp, Homo sapiens
cgaacacaaagcagacttcatttccacagttgtttcaggatcactttttctggggctgaggaaacatgacgatgaccggaggtttacctgccctgt

SEQ ID NO: 380396 - DNA, 100 bp, Homo sapiens
atttttgtggaatgaaaaggaagtattagaaatgagctgaagaccattcacagggtaagatgatcatgcaggataaactggagaaggagcggaatgatgc

SEQ ID NO: 380397 - DNA, 98 bp, Homo sapiens
aaattcgagaggagtttgagcggctgcagagagagagagaagagaggagattgcagcagcgaaccaatcccaaggaaatcatcgagttccccatccta

SEQ ID NO: 380398 - DNA, 82 bp, Homo sapiens
cgacgacgaggaagaggaggtttctgagcatcctgaggttagcattacacttctcccagtggagcccatgacttctgatcag

SEQ ID NO: 380399 - DNA, 82 bp, Homo sapiens
gaatttcatagctgactactttgagacgagcagccagtgctccaagcccggtgtcattgggctcagaccctcccaccgcctg

SEQ ID NO: 380400 - DNA, 75 bp, Homo sapiens
aaagttcagtgggaagcatgtcgtctttatcgctcaggacctgaagacccttccagcatgccagaggaaagttcc

SEQ ID NO: 380401 - DNA, 125 bp, Homo sapiens
ccaaccccagccgaccttgagctccaggagttcgtctcttacgtctgcggaagtgcagctgcctcagttcttagcgcagataagctgtcattggaaggaatagtggtacaaagagctgaatgccg

SEQ ID NO: 380402 - DNA, 83 bp, Homo sapiens
cagatattgaagagttctgcaatcgaatgggaagcatgcccaatctgtccattcctcagccattgcctccagctgcacctata

SEQ ID NO: 380403 - DNA, 50 bp, Homo sapiens
gctggccattttgctgctgtgtgtggagctcgaatatgagactcaaatta

SEQ ID NO: 380404 - DNA, 98 bp, Homo sapiens
ggcaaatctttatcagccactgccttctgctgccaggaagccagctagagtggtgtaaaatgtcggttccaggaccttaccaggcggccactgggcct

SEQ ID NO: 380405 - DNA, 99 bp, Homo sapiens
ccggagccgaaacaccggtaggagcggggaggtaccgggtgtctggtccgagccgtggagatggccgcccagcgccaggccgacatcatcgggaagccc

SEQ ID NO: 380406 - DNA, 97 bp, Homo sapiens
gctggtgaaggcagacagcgagtggcgacgatgttttataggatcacattgacaaaagtaccatggagttttatgagtcagcatattttattgttct

SEQ ID NO: 380407 - DNA, 75 bp, Homo sapiens
agtacctgatccgcctcttccaggagtgggaggcttgccgctgttccgtaacccagtgattccagtcttggctgt

SEQ ID NO: 380408 - DNA, 75 bp, Homo sapiens
tcgggtggcgacttcctccccgcgccccctccccctcgccatgaagagatgccctgtatccaagcccaatatggg

SEQ ID NO: 380409 - DNA, 100 bp, Homo sapiens
ccaccttcagaatggacatgattcagggagctagaagacactttaagttatactggaaaattcaggtggcgacgtctgaaagcccagatgattgagaaaa

SEQ ID NO: 380410 - DNA, 100 bp, Homo sapiens
ctcgggaagagggagagcaaacttggctcagcccatattgactcggagacaaaaagaggccaagaccaagagtgacagtgggacagctgcccagacttct

SEQ ID NO: 380411 - DNA, 75 bp, Homo sapiens
cacctatcacagcagcatccgctctctggaggtgttcacgctgcccaaggtgagtgccaagctgaagttgaagct

SEQ ID NO: 380412 - DNA, 51 bp, Homo sapiens
cagagaccttctacttgtccaagcctcttcgagcactactgctactcccgg

SEQ ID NO: 380413 - DNA, 75 bp, Homo sapiens
gcggcgagaagccccagctgcactacgcggaatgtatcctgtcaggtataatgtcagtgaatggcaagaaagttc

SEQ ID NO: 380414 - DNA, 98 bp, Homo sapiens
ctctcagtgggcagagctccatgagctttctcctgtttctcagaggatttatcaattatgcaaaagttcggaagatgccagaaactttctcaaatctc

SEQ ID NO: 380415 - DNA, 105 bp, Homo sapiens
ccgtctgctcttctgcctcttgatctccgccaccgtcttcaggccagatgaatgaaccaaatgcctatggaaatacacctcttcatgtagcctgctataatggac

SEQ ID NO: 380416 - DNA, 100 bp, Homo sapiens
cctgaaggtccaggagtacccgaccctcaaggtgatcttgatcctgacgaagtactaccacgcagacatggggaaggttctggaaagttctctgtggcgg

SEQ ID NO: 380417 - DNA, 141 bp, Homo sapiens
gcacggaagacttatgaacgccttgttgcccagttccccagttctggcagattctggaaactgtacattgaagcagaggactcaccgcttaaggctgtgcagatgctgtgggtaaacctcataatggatacactcgcttcc

SEQ ID NO: 380418 - DNA, 100 bp, Homo sapiens
tgggcatccctgaatctttgcgagggagactctggcttctcttctcagccttggaatggatggctttggccaaccagttggcattcttggacgccctgcc

SEQ ID NO: 380419 - DNA, 80 bp, Homo sapiens
atgtccatccacttatccagacccaatggaacatcagcaatgcttctggatcttcagcctgttaaacaagaaaacgaaaa

SEQ ID NO: 380420 - DNA, 90 bp, Homo sapiens
cgaggatgaccacttcaaatcctcccattccaatcaaacaaatcacaagccctccccagaccaggttttcttccacccctgagatggcaa

SEQ ID NO: 380421 - DNA, 100 bp, Homo sapiens
aagaggacgggctttaggctggaagcgccttagaggagccatttttccaggaatagccaggccagaagaaggaaggcctgtggtgagtgggacaggaaat

SEQ ID NO: 380422 - DNA, 90 bp, Homo sapiens
tcgccgctgtccccaccactgcagccatgatctccttaacggacacgcagagaattgtcttagaagaaagaaggcaagccaccattttac

SEQ ID NO: 380423 - DNA, 76 bp, Homo sapiens
cccgatggctctgtgcaacggagactccaagaaggacagaataacgggctcccagattcacaagccccaccaagag

SEQ ID NO: 380424 - DNA, 75 bp, Homo sapiens
tgagaatgtccatggatttgtttctcattctcatatttcaccaataaagaaacttgaggagaggctggagttctg

SEQ ID NO: 380425 - DNA, 100 bp, Homo sapiens
aaaatataagaactctgaaaatcaacgcagctggaatgttaaccttagaaagtttccagttggaggagagcagattagtgccattggaaggggcatatgt

SEQ ID NO: 380426 - DNA, 100 bp, Homo sapiens
ctcatgtctcacctcagcgactgtgagcacaacccgaagcggcctgtgacctgtgaacagggctgtggcggccttcctcacccagtccgtttgtctagat

SEQ ID NO: 380427 - DNA, 100 bp, Homo sapiens
gccagtggcaggcgccctggattttgcatcagaaacagcccaggcggtgagagacacagccacactcagcggccccagctggggggtcccgttggtcatc

SEQ ID NO: 380428 - DNA, 100 bp, Homo sapiens
tgagccatttcgaatcacttaaaggagtggacattgctagcaatgagctcccaaagccatccaggccaccagcccctcgggttccaagatgcagctactg

SEQ ID NO: 380429 - DNA, 85 bp, Homo sapiens
gctggagcggcggcgggcaggcgtgcggaggacactcctgcgaccagttggaatcgaagcctcttaaaatggcagatgacttgga

SEQ ID NO: 380430 - DNA, 75 bp, Homo sapiens
ctgagactcctgctcagtgtagcattaagggttatataacaaactcatcacgagttgtgtctaataagtcatcag

SEQ ID NO: 380431 - DNA, 90 bp, Homo sapiens
cgaagaagaaaggattcgttacagccagagattggttatcaatactctggctgaccatcatcatcgtgggactgactttggtggaagtcc

SEQ ID NO: 380432 - DNA, 98 bp, Homo sapiens
gagaaaggcacctggagagaaagtactttaacatgcacagaaacagattgtctcagtttacctagctttgaaaatgccatacccatgggagagaagaa

SEQ ID NO: 380433 - DNA, 100 bp, Homo sapiens
gttacatgtatggagaatggctggtctcctactcccagatgcatccgtgtcagtgcatgtgagggaaccctggcttgttcaacctgtcacctcatctttg

SEQ ID NO: 380434 - DNA, 46 bp, Homo sapiens
gagcaggctgagcgatacgacggtaactaggatttctacctcaacc

SEQ ID NO: 380435 - DNA, 100 bp, Homo sapiens
ctacaccatcgacaccgaaaactccaccgtagcccttgccaaagcactattcctgatcagagaactccagttgcttcaacacacagtatcagtagtgcag

SEQ ID NO: 380436 - DNA, 98 bp, Homo sapiens
cttggtgaattttattcaagcaaattttaagaaacgagaatgtgtcttctttaccaaagattccaaggccacggcatcgttataacacccctgctcct

SEQ ID NO: 380437 - DNA, 90 bp, Homo sapiens
aggtgtttgccctctgggagtctggagacatgagtgatcagatcttcaacttgctgctgagcttgggaagacattactggatcggaacac

SEQ ID NO: 380438 - DNA, 80 bp, Homo sapiens
ttgtgctgtttggcccctgcctactcggaatggaacaaaggtcttgctatcacagatgaaattttgctgagtaaggcaga

SEQ ID NO: 380439 - DNA, 99 bp, Homo sapiens
caggaggaagcgatggcttcagacagcatatttgagtcatttccttcgtacccacagtgcttcatgagaggttaccatgccagcaatgattccttttga

SEQ ID NO: 380440 - DNA, 97 bp, Homo sapiens
tctgaccttgattggaatgttggcagctataacttacacacctcttagcaaatatccggctgtgatcaatgatatttcattctggttgccctctgag

SEQ ID NO: 380441 - DNA, 97 bp, Homo sapiens
tctgagatatgccgtttacggagtctgccccaaattctccaagaattggaagcccattgagcccaaagaaaaacagtgaaacaagtattcttcaagc

SEQ ID NO: 380442 - DNA, 75 bp, Homo sapiens
gggggacctgccggcacgcgactccccccgggcccaaaatctggtggctggacccagagctgacctatggctgcg

SEQ ID NO: 380443 - DNA, 99 bp, Homo sapiens
cggtggaggcgatggggccaacagcggcctctagtgtctggaggaggaagtgtcagcgctactgccgcagtctgcagatctccaggggagcccaccagc

SEQ ID NO: 380444 - DNA, 85 bp, Homo sapiens
ttctggggcctctggcggtggcggcctggggcggcgcgacggctggtgcgcagtattaattttaaagacccacagtttgctgaag

SEQ ID NO: 380445 - DNA, 82 bp, Homo sapiens
gggaccctcgcgcgcgaccgccgaatcgctcctgcagcagaggagccttcacgtaaatgggtccagtcatgcctcccagtaa

SEQ ID NO: 380446 - DNA, 75 bp, Homo sapiens
ggcattttagatctaattcaaactgctgagaaggaagaatttgaacatcaacagaaagagctggagaaagtttgc

SEQ ID NO: 380447 - DNA, 74 bp, Homo sapiens
gaaattctgtttcagatgaacagcctcggaatgctgctcgaataagtgaaaagagaaaagagtatatggatgcc

SEQ ID NO: 380448 - DNA, 100 bp, Homo sapiens
ctgggagcgtgctttccacgacggtgacacgcttccctggattggtacaaaactttttaccaacaaaaaaaagcaagtagttatactcaggaagaacttc

SEQ ID NO: 380449 - DNA, 76 bp, Homo sapiens
tgacaatgagaagaaatgggatctgatctgtgaccagttggaaaatggatataccttatttgattatgatgttgga

SEQ ID NO: 380450 - DNA, 75 bp, Homo sapiens
caaagacacatcgttgctgaaagagattaggaacaggaattacatgaatgacagtcttcgaaccaatgtgtttgt

SEQ ID NO: 380451 - DNA, 90 bp, Homo sapiens
cggggcaggggcggaggcggaggcagaggtggaggcgctttgaaagttcacttcttcaactgagatggacatgatataatctccattgag

SEQ ID NO: 380452 - DNA, 75 bp, Homo sapiens
agagtgacctgaagctctgttacgaagttcctaaggacggtctgaagagccaagagctatttgatgaaattagaa

SEQ ID NO: 380453 - DNA, 50 bp, Homo sapiens
gccaggacgaaggccctactgggcaagtcaggatggctaaaggtgacccc

SEQ ID NO: 380454 - DNA, 100 bp, Homo sapiens
aaatcgtgcacttgcaggccgggcagtgcggcaaccaaatcggcgccaagcctgatgctgcccagcccccaaaaccagcctggaggccactcacttcaca

SEQ ID NO: 380455 - DNA, 100 bp, Homo sapiens
ggagtcaccactggacctccaaggaagccacgtgcagacatctacaaccttcgatctcctgacgagaaagcagatggtggagctgaatatgccacttacc

SEQ ID NO: 380456 - DNA, 100 bp, Homo sapiens
ccgggacccggttccccggcccacagtgggggtgtgcaaacccgagagaactggatcaatgaactgagccatgttcaaatccctgttatgttgatgccag

SEQ ID NO: 380457 - DNA, 75 bp, Homo sapiens
cccggccccggcgcaggcagttcagcctttatcttctacaaccacactcatggccgggaaatgctggacatcttt

SEQ ID NO: 380458 - DNA, 80 bp, Homo sapiens
cgagctgatggcttcgctgtcggatttcaagggtgagaactctgtctcagtcgacgggaagtgcagtgactccacgctac

SEQ ID NO: 380459 - DNA, 100 bp, Homo sapiens
gaggatggacgagggatgcggagagaccatatatgtcattgggcagggatcaggacaatctctatgggaagcagaaggcaaggaccccggtcattttagg

SEQ ID NO: 380460 - DNA, 75 bp, Homo sapiens
gctttgaggaaaagccagtttatatccaagacttagatgagaatggccaaagttttctggtcttggatgagcaac

SEQ ID NO: 380461 - DNA, 97 bp, Homo sapiens
agggcagaagaagtctaaaaatggaagcgaaaaacacaccttgactttagtcagatacatcactgtctgttaaaggaaaccaagcgtgaagtggaag

SEQ ID NO: 380462 - DNA, 75 bp, Homo sapiens
atgatgtatagccctcagaattctgattatcttttagctctcagcactgaaaaaatttttactactggagatgtc

SEQ ID NO: 380463 - DNA, 73 bp, Homo sapiens
ggccatcacggcggccgcagtggcgtcctggagccctcctcaggttgtggaacttttagcaagtgctcttatg

SEQ ID NO: 380464 - DNA, 100 bp, Homo sapiens
cctaggatgacttcagtgactagatcagagatcatagatgcagcctgaaaaggtgatggcaaagcagatggagttcctttgcaaccaagctggctatgag

SEQ ID NO: 380465 - DNA, 100 bp, Homo sapiens
acaagagcttcatctgcgatggacagaataactgtcaagacaacagtgatgaggaaagctgtgaaagttctcaaggtttcagtgtagctcagaagccatt

SEQ ID NO: 380466 - DNA, 100 bp, Homo sapiens
agccgcagtgcagcctaattttgacttcaggatcacctgctgttaccagctaccacccataacaagaccacaagaccaaaaatgtcaattgtgttaccag

SEQ ID NO: 380467 - DNA, 50 bp, Homo sapiens
gcaggcgctcaccatgttccctggagggagtgcatccgccccaacccttt

SEQ ID NO: 380468 - DNA, 82 bp, Homo sapiens
tggcggagaagactcaaaagagtgggaatgtaagacggacttagatattgcatacaaatttggaaaaactgtggtgagctgt

SEQ ID NO: 380469 - DNA, 71 bp, Homo sapiens
agattgtgaagaacagctccaacgatgagaccatcgctgccaagcagctctttgacctcatctaccgcgag

SEQ ID NO: 380470 - DNA, 90 bp, Homo sapiens
aaagtctgagcgaggagtgactgccaaaaaggagtatgtgtgccaggtcagaatggcggcagtggagcatcgtcattcttcaggattgcc

SEQ ID NO: 380471 - DNA, 75 bp, Homo sapiens
agagttctccaaacatgatcgtttactgcaaaagagacaagagagacacctccaacttcgacaaagagttcacca

SEQ ID NO: 380472 - DNA, 83 bp, Homo sapiens
gccgcttgtcagtgtgatgaagattggcacccagactcggagccgtgggtcccgactgaacatcatcatcatcgctgagggtg

SEQ ID NO: 380473 - DNA, 96 bp, Homo sapiens
cagaatttgtatagagatgtgatgttggagaactacagaaacctggtctccctagctatcggcaggaccctcatcccccgttactttagcactgtg

SEQ ID NO: 380474 - DNA, 83 bp, Homo sapiens
aaggtggaggcagcgcggctctcagctggagcagttcaacatgatggagaacgccatcagctccagcagcctgtacagcccgg

SEQ ID NO: 380475 - DNA, 83 bp, Homo sapiens
cagtgctccaagcccggtgtcatataagtttataccatggatagcacaaaggagaagtgtgacagttacaaagatgatcttct

SEQ ID NO: 380476 - DNA, 100 bp, Homo sapiens
ctcccaagccaccagccccatccggtctccccaggaatcagctcttctgttcattccagtccacagcccctcaacagagagacgggatttcgccatgttg

SEQ ID NO: 380477 - DNA, 100 bp, Homo sapiens
tacatgtgtcgtatcatagttcattttatgtgggaggatgttcagcagcgcggcagagtcatggggtttcaggcgacctccaagaagggtatcagtcgac

SEQ ID NO: 380478 - DNA, 50 bp, Homo sapiens
gtggagatcaagcgcagcgatggaggaagacaatggtcctataatgccct

SEQ ID NO: 380479 - DNA, 78 bp, Homo sapiens
agcgcaggaggcaagattttgaaatctatgtgagcaagaagaacccatcaggtgattgtcaggcctctgagcccaagc

SEQ ID NO: 380480 - DNA, 50 bp, Homo sapiens
ggaagcccgggaccgtttaaaaaactggaatacaaacagaagcttgcacg

SEQ ID NO: 380481 - DNA, 100 bp, Homo sapiens
cggcccggtttccctcggcgtgctactgtgcgctcgatccagcaccatggggaagcgggacaatcgggtgattttaccaaatgttgcaagaactctggag

SEQ ID NO: 380482 - DNA, 75 bp, Homo sapiens
acatttttcagggacgtagccatccagagatactagctcagtcatgtactgaaatcctagaattgcagccctcaa

SEQ ID NO: 380483 - DNA, 100 bp, Homo sapiens
tgagctgtaccatgcaggagctaattggcttatatgttaccatggaggagtacttcatgagggagactgtcaataagtgggtcccacattgagaactggc

SEQ ID NO: 380484 - DNA, 101 bp, Homo sapiens
cacgagtgggcccgcttcgaggtggagagagcccagtgggaggtggagcgggcggagctgcagttcttcgtgccatgaaggaggacagtgaaaaagttccg

SEQ ID NO: 380485 - DNA, 100 bp, Homo sapiens
caaacactgcaaggaccccctccggctcaagtgtgtcaagcaagtattatcagaaaatccacccagcttcaccattactgtgacgtctgaggctggagaa

SEQ ID NO: 380486 - DNA, 101 bp, Homo sapiens
gaggcagagaagggaacgcccggcccagccccgtatggcatttcaaatatagatacaaccattgaaggaacgtcagatgacctgactgttgtagatgcagc

SEQ ID NO: 380487 - DNA, 75 bp, Homo sapiens
gcatctgtgaggtccaggaggaaaatgacttcatgattcagggggtggcccgattctacaggtcacggaaaaagc

SEQ ID NO: 380488 - DNA, 82 bp, Homo sapiens
caccgacatggaacagggactcactggggtgctgaagagacctgtcacctctgaggaactccttactcccggggctccgtat

SEQ ID NO: 380489 - DNA, 100 bp, Homo sapiens
cggacgcagtgatttgctccccctcgtgcagcaacccccacacccagcaccagggggtgtcacgggcggctgggacaacctccttgctgtgatccctggc

SEQ ID NO: 380490 - DNA, 104 bp, Homo sapiens
aaggcttcaacaagaacgatgcccccctccacgagatcaacgaggcctttgaaattgttgttcgccatgccaagaactacaccaatgccatgttcaagaacaac

SEQ ID NO: 380491 - DNA, 50 bp, Homo sapiens
cgacagccttttactgtgaacagtatcttaaatagtgaagatggagaaat

SEQ ID NO: 380492 - DNA, 75 bp, Homo sapiens
acactgatgagatggttgaattacgcattctgcttcagagcaagactctgtttgctggctacacggacaacctgg

SEQ ID NO: 380493 - DNA, 99 bp, Homo sapiens
gcctgggttacaagcagcaagtgcgcggttggggccactgcgaggccgttttaggtatggcccatctcctgtacgcttggagcgacctttggctacgtg

SEQ ID NO: 380494 - DNA, 100 bp, Homo sapiens
gacatagtattcatagtggaaaaagtgcaatggccaatgtacatggtggactatgccggcctgaacgtgcagctcccgggacctcttaattactagacct

SEQ ID NO: 380495 - DNA, 90 bp, Homo sapiens
cagattcgcagtggtcgcttcttctccttggcgatatgaaaggtgaggtctatccatttggcatcgttgggatggccaacaaaggggatt

SEQ ID NO: 380496 - DNA, 83 bp, Homo sapiens
tccgtgctggacagctccttcctcacgttctcaggcctccacgctgaggtggtctttgggaagaagcttcctgcctttgccac

SEQ ID NO: 380497 - DNA, 96 bp, Homo sapiens
cctatcaggacatggagtatgaaagacggtgcaagaattgtttatccgtgattatggagagatttttaatgtccagttaccggataaagaagaacg

SEQ ID NO: 380498 - DNA, 100 bp, Homo sapiens
tgggttctggtggagatggtacaggcgctttacgagatcagacactcctctaatttacaaagcagtgcccagctggtttgtgcgagtggagaacatggtg

SEQ ID NO: 380499 - DNA, 76 bp, Homo sapiens
ccggaatctgggaagatcatcagccgcaaattttggtatgacgcgagatatctatgagacagactattaccggaaa

SEQ ID NO: 380500 - DNA, 75 bp, Homo sapiens
cgcccactccagaagtagcatggaaatggagggcatcttcaaccacaaagatgcctgtgaggagccaccaacatt

SEQ ID NO: 380501 - DNA, 75 bp, Homo sapiens
ctttccctgcaccaactagcagatgttcagcctcagaacgtagccaccttgctgtgagaaagcccaaccatcttg

SEQ ID NO: 380502 - DNA, 98 bp, Homo sapiens
tcatggcctacccgggatacggaggagggatgacgtccggttgtttgccttcgtgcgcttcaccaccggggatgccatgagcaagaggtccaagtttg

SEQ ID NO: 380503 - DNA, 100 bp, Homo sapiens
cccaggttcaagcgattctcccgcctcagcctcctgagtagcaattacagccgacatcggcctggctgcctggggacgcaaggccctggacattgctgag

SEQ ID NO: 380504 - DNA, 99 bp, Homo sapiens
atctatctgaacaatgtgattatgcggttcatgcagataagtgaggattctaccaggatgtttaaaaagggtcgtgtagggataaaaagaactgtaagg

SEQ ID NO: 380505 - DNA, 100 bp, Homo sapiens
agaaagaattgcttatacatgaaagaggggcatcagaagctcctcctggggtagagacagatcttattgatgttggattcacagatgatgtgaagaaagg

SEQ ID NO: 380506 - DNA, 100 bp, Homo sapiens
ctcaaaatgaagatggcacatggcccaggcagaccttgcagtcaaagtcagggaagtcaaagatgcatccctgagttcttcctagcaggcaagcagccgt

SEQ ID NO: 380507 - DNA, 82 bp, Homo sapiens
ttcagacatagacaagaatgattacccaggagcagtgaggagaatgaataccttccaagaccagagtggcagctccagtaat

SEQ ID NO: 380508 - DNA, 76 bp, Homo sapiens
ggaatcacggtttttggaacaaggattttggatgaagaagtttttgaggactgttctgatggctacatgtgcaaaa

SEQ ID NO: 380509 - DNA, 73 bp, Homo sapiens
aaatgcaagtccaagaggaggaggaggcggaggtccaagcggaaagctgtcacaagatgaaggtagaggcaca

SEQ ID NO: 380510 - DNA, 75 bp, Homo sapiens
ggtttgagtccgcatcgccacagctgaaggctgcgagggactaagagcagaggacctcaggatggaaaccagcag

SEQ ID NO: 380511 - DNA, 100 bp, Homo sapiens
tcagaagcctcatagacagaacgattgatgaagtagttgagccagatcgataaggaggccgtgcagaagtacgcctacctcaacgtggtgggcatggtgg

SEQ ID NO: 380512 - DNA, 80 bp, Homo sapiens
ttaccaaggcatcacatgagcatgaagataaaagtcctgaaacagttttgcagtcggtctctaattaacagaagatggca

SEQ ID NO: 380513 - DNA, 109 bp, Homo sapiens
gcccccactcgcgctgcgatgacgcgctcactgttcaagggaaacttttgggtttttcgttggaatatacgttgcacatttatggcgattctgagtgtgagggcagact

SEQ ID NO: 380514 - DNA, 50 bp, Homo sapiens
gaatatgtcatctacagaggagaacagtcctgacacagctctccctgagg

SEQ ID NO: 380515 - DNA, 98 bp, Homo sapiens
aaaatcatattatagatggagtaaagggcaagtgtccagagaatggctgggatgaaagtacacttgaactctttttacatgaacttgcaatcatggac

SEQ ID NO: 380516 - DNA, 100 bp, Homo sapiens
actgtggagaccagaagtgctggccagggagaggtgctggtgtacgtggaggacccggccggacaccaggaggaggagccagatgaccaagatgctccag

SEQ ID NO: 380517 - DNA, 100 bp, Homo sapiens
tatcacagagcaattaaagttacagtagatggacctcgggaacccagaagtattctttaggtgatgctagaaggcctcttcatgaaacagcagttttggt

SEQ ID NO: 380518 - DNA, 90 bp, Homo sapiens
acgccccggaccttccgcggccagaggaattactcaaggtgatgaggacaattgatgacagaatagtacatgaattaaacactacggttc

SEQ ID NO: 380519 - DNA, 82 bp, Homo sapiens
ggtcctggagatggagcgcaaggaggagcaggccgaggccatatccgagcgtaatctatgccagcaattatgacaatgttag

SEQ ID NO: 380520 - DNA, 75 bp, Homo sapiens
cttgagttggtcgggggcagcggcagcgggagatacagatgacccaccaagaattactcagaaccctgtgatcaa

SEQ ID NO: 380521 - DNA, 100 bp, Homo sapiens
cgagcgatgtcccaggagctactggttatggctgcagcttcgattgccaatattgtaaaaagttctcttggtccagttggcttggataaaatgttggtgg

SEQ ID NO: 380522 - DNA, 75 bp, Homo sapiens
gcaattgatcccaagttgtcgacgaccgacagggtggtgaaagttggatatgtcaagtgaccagatagctgccaa

SEQ ID NO: 380523 - DNA, 75 bp, Homo sapiens
acagagcccagaagagggtgggcttcgcagcgagcccctgtgcaggcatctccttggaaacaatgccatctttga

SEQ ID NO: 380524 - DNA, 76 bp, Homo sapiens
ggacaccttcgtcccctttgatccctgtgtgctgaagagatcaacaggcggtccttcgggtcggagtggacatcgg

SEQ ID NO: 380525 - DNA, 75 bp, Homo sapiens
ctgaggatgtggagaaggccacagggcatggactggaactcccaatacccctgacatgggctgagtcaacgtggt

SEQ ID NO: 380526 - DNA, 83 bp, Homo sapiens
ctggagcggcagctcagcttggagcaggaggtccagcggagctggagtttgttcagatcatcatcatcgtggtggtgatgatg

SEQ ID NO: 380527 - DNA, 97 bp, Homo sapiens
cctcccaagtagctggggctacagctggttttcccatgggctatgcagcagcagctcctgcctattctcctaacatgtatcctggagcgaatcctac

SEQ ID NO: 380528 - DNA, 93 bp, Homo sapiens
cgggccctgcccctacatttggagcctggacacgcagtacagcaaggtgagaagccctaccactgcaactgggacggctgcggctggaagttt

SEQ ID NO: 380529 - DNA, 90 bp, Homo sapiens
ctttccctctcccaacatggcggcctcaggatcatgcggccagatgatgccaacgtggccggcaatgtccacggggggaccatcctgaag

SEQ ID NO: 380530 - DNA, 83 bp, Homo sapiens
tggaattttggagatattcaaaggaactctagccaagaaccacggcctacactctccaacacaatccagaggccacaactagg

SEQ ID NO: 380531 - DNA, 75 bp, Homo sapiens
cgagaatcaaggcgttgagcctcaaggggctttgaccacgacctttgaagagcttcattttgagatcaagcccca

SEQ ID NO: 380532 - DNA, 100 bp, Homo sapiens
gtgatccggagggacgctccgaccgcggccgggaggctcctgggggccggggctccgaggtctggccgtgggcctgggcttcggggcactggcagaggtc

SEQ ID NO: 380533 - DNA, 50 bp, Homo sapiens
gcagctacaaaatcaatggccggacgaaacaactggaacagatccagaag

SEQ ID NO: 380534 - DNA, 101 bp, Homo sapiens
gcggcctcagggttcaggcaatgcaaataagtgctgatgagcgctttgacgccacattccacactaacgtgttggtgaattcttctgggcattgccagtac

SEQ ID NO: 380535 - DNA, 100 bp, Homo sapiens
caaagaaagaaacaagttcttggcaagagaggcatcctccttgaagtatttggctgaggagttttcaatcccagcattagtatcatttgaagacgtggtt

SEQ ID NO: 380536 - DNA, 74 bp, Homo sapiens
gaatcagcaaagaggaggccatgcgctggttccagcagaagtggatcaatcttcctgtcctacaactgacaaag

SEQ ID NO: 380537 - DNA, 100 bp, Homo sapiens
agctggtcgcagatcctgagacccggacagtggcagtgaaacagattgatcagggaccatgaaaagaaacttgtgcttcaccgaagaaaaatatctaaac

SEQ ID NO: 380538 - DNA, 51 bp, Homo sapiens
actcgcgcggggcagccaagagacgagcttccttcaaaatgtctactgttc

SEQ ID NO: 380539 - DNA, 89 bp, Homo sapiens
cagatccgggagcacgtcatctccatcgagggtacctgcaaggtgtggagttacagtccgagacagtctaaagaaagcactgatgatga

SEQ ID NO: 380540 - DNA, 83 bp, Homo sapiens
aacgtgccgctgatgacacctggcagaaggcagccatggagggcgatggctcagattcgccgacaatgcagatcttcgtgaag

SEQ ID NO: 380541 - DNA, 75 bp, Homo sapiens
gtatatcaaacggcaagatgtccagtaatgtcccggcggatatggtatctgcccaaactggaacttatgctgtag

SEQ ID NO: 380542 - DNA, 74 bp, Homo sapiens
aagatgaggccggagaaaactattccaaaagacttgcactatctgccagatgctgcttcctaaccagtgcagtt

SEQ ID NO: 380543 - DNA, 82 bp, Homo sapiens
ccccgattaaagactgtgttgcattatcaggactctccttcagcaactccagaagcttcagactttggtgatgggcaaggtt

SEQ ID NO: 380544 - DNA, 100 bp, Homo sapiens
cagcgtagccagccacagcggggtcgtgaggattaagtgaggggacagcagtgtctggcacgtttttggctttcacccccaaccagtgaccaaagacttg

SEQ ID NO: 380545 - DNA, 100 bp, Homo sapiens
ctgccgcgactgggaggagcgccggaacgccgaggcccagacctaatctgggagcctgcaagtgacaacagcctttgcggtccttagacagcttggcctg

SEQ ID NO: 380546 - DNA, 50 bp, Homo sapiens
gaaaagtgaaacaattcaggacactctttccccagacatggccaacaagg

SEQ ID NO: 380547 - DNA, 83 bp, Homo sapiens
aaaatggatcccactaaacagtacaaggtgatgaagactatccctctatacaatatgttaactcattccagcaaactacaaag

SEQ ID NO: 380548 - DNA, 74 bp, Homo sapiens
acagccacagcagcctcccaaggagtctgcaagttgatctgactgcagccatgagcagcaatgagtgcttcaag

SEQ ID NO: 380549 - DNA, 90 bp, Homo sapiens
gtttactcatgctttctccagtgatctcatgaggacaaagcagaggctactacttgagaagaggcaaaggaaaaagcgccttgagccatt

SEQ ID NO: 380550 - DNA, 90 bp, Homo sapiens
ggtggaagaagtggggccatacacctacagcacttgctctgaaatttggggactgagtacaccaaatacgatagatcagtgggatacaac

SEQ ID NO: 380551 - DNA, 74 bp, Homo sapiens
tcatcccctggatgggggaccacaagatcctcatcgacagcattaacacccttgtgaagatcagcaaaagtgca

SEQ ID NO: 380552 - DNA, 75 bp, Homo sapiens
gaaatggagaggaagagggccgtggagagacaagaagtttgtgtttttcaacatacctcagattcaatacaaaaa

SEQ ID NO: 380553 - DNA, 115 bp, Homo sapiens
ctgcagtggcgcctaaagtctgagagagggaagtcgcctctgtgctcgtgagtgcatggggtataagttgatattcactgatggactccaaagaatcattaactcctggtagaga

SEQ ID NO: 380554 - DNA, 75 bp, Homo sapiens
ctagcaccttcgccctctccagccaggtacctctctcctgccacagctcctcaccccctgaaaatgttcgcctgc

SEQ ID NO: 380555 - DNA, 90 bp, Homo sapiens
catatcgagcctgtgtggaaagaagtcattcaagaactggaagaattggagcagaaagaccatgggtttgaggtggcctccacttcccct

SEQ ID NO: 380556 - DNA, 100 bp, Homo sapiens
cattcagcatgttatgctctacgtggtacccatctacctgctttggaaaggagggtctaccttctgcttccctggaaaggatgaatttacatcatttgac

SEQ ID NO: 380557 - DNA, 82 bp, Homo sapiens
gattttcctgcatggattgggagatactgggggacagatgatttctgctgaagattgtgagtttattcagaggtttgaaatg

SEQ ID NO: 380558 - DNA, 50 bp, Homo sapiens
ccagggcgcttacatcaaaagaaaccattgtgctgatgagtgacctggct

SEQ ID NO: 380559 - DNA, 100 bp, Homo sapiens
aaaaattcatcagagagcattttactactgagctgcaaaggcgacatctagactaagagaaagaggctgtgatggttgcctggcaggaattgaagttcaa

SEQ ID NO: 380560 - DNA, 100 bp, Homo sapiens
aggagctgcgcgagcgggtgtgggcgctgttcgacgtgcggcccgaatgccagcgcctcttctaccggggcaagcagaggccagcagaaatagtagacga

SEQ ID NO: 380561 - DNA, 83 bp, Homo sapiens
tgaagggctaccagcgccgctggttcgtgctgggcaatggtttgctctcttactacaggtcaaaatgcagatcttcgtgaaaa

SEQ ID NO: 380562 - DNA, 82 bp, Homo sapiens
tgggcgccgtccctcaccgcggcatcaagcaggtggtcaagtaccccctgcacgccatcatggagatcaaggagtacctgat

SEQ ID NO: 380563 - DNA, 82 bp, Homo sapiens
ttaaatttggtcaacaaaatccacgtcaggacatggatttgattgacatactttggaggcaagatatagatcttggagtaag

SEQ ID NO: 380564 - DNA, 75 bp, Homo sapiens
ctcggacccatcgccgcttctagaccctactgcggtctcggatattgccggttttcggctttgtgagaaacctta

SEQ ID NO: 380565 - DNA, 48 bp, Homo sapiens
ggcaactcagaaacatcaggtccaagctgttcgggggtcttgtctgga

SEQ ID NO: 380566 - DNA, 90 bp, Homo sapiens
gtatcctaatggtgtatttcccaaaggacaagaatgcgaatacccacccacacaagatggtgagttattctccccacctcagaagtacca

SEQ ID NO: 380567 - DNA, 98 bp, Homo sapiens
gggagagggctgggctccacagagaggagcagcctgtaacttgggtttttactcctgtaacaactgaaataacaagtcttgatacagagaatatagat

SEQ ID NO: 380568 - DNA, 74 bp, Homo sapiens
tgtcgacctaaagcctgactggggcaagagacgagttgtactgctgtcacaggaaatggacgctggattacaag

SEQ ID NO: 380569 - DNA, 82 bp, Homo sapiens
aaggaaaaggaggaattcgccgtgcccgagaatagctccgtccagcaggcataatggttatgaaagcttctgtagatgatga

SEQ ID NO: 380570 - DNA, 75 bp, Homo sapiens
tctgggggccatgtggaaactacataagccggttgctgaaccaatccccatctgtagtttctgtcttggtacaaa

SEQ ID NO: 380571 - DNA, 75 bp, Homo sapiens
gtccctctctccacggtaaggggctaaggcagctggataagcacagccaggccacagcccagcagctggtgcagc

SEQ ID NO: 380572 - DNA, 83 bp, Homo sapiens
gtcaacaactctgtgtacaccaacgtcctggtccagaacagtctctggatggtcgtcagatccgtgtggatcatgcaggcaag

SEQ ID NO: 380573 - DNA, 74 bp, Homo sapiens
gtgttgctgagagtgttaattctgctcctctcctgggcggcggggatgggagcttgtagtgaacaggactctga

SEQ ID NO: 380574 - DNA, 100 bp, Homo sapiens
ccgggacctcctggaagccaaaaatgaccctacagcttggggcctgggctcctctgaccatcctcattgagaaaggaaagtgagtccagagaagttgatg

SEQ ID NO: 380575 - DNA, 82 bp, Homo sapiens
ctcaggtttgtcggtcgaagtggaagagctggccactgccccaacccaggcatttcactgggcgcagtgcggacaggcttcc

SEQ ID NO: 380576 - DNA, 75 bp, Homo sapiens
caaattgttacatctacaacaagatgtcatcggtgggctccaagggggacttcctgctggtcagcgagcatgtga

SEQ ID NO: 380577 - DNA, 74 bp, Homo sapiens
ttgtattttcctatgtatttcttcatcagagatgattactttctatgaagacaaaaattttcaaggccgtcgct

SEQ ID NO: 380578 - DNA, 83 bp, Homo sapiens
atttgctctatgatcgtgataaagggaaaagagtgcaaattcggaaagcacctcaagctgtttcagatacagttcctgagagg

SEQ ID NO: 380579 - DNA, 98 bp, Homo sapiens
atcctctgagatcccagatcatgaggggcactatgaacgaagaggagcagtttgtaaacattgatttgaatgatgacaacatttgcagtgtttgtaaa

SEQ ID NO: 380580 - DNA, 75 bp, Homo sapiens
ctgtgatgcctgcagagctgtggcttaccaggagaggcagcttccccccttgggtccaacaaacccgcgtgtgac

SEQ ID NO: 380581 - DNA, 75 bp, Homo sapiens
ttccaaatgaatttgcaaaacttactgtagcctcgatgacttacgagccctcaaggggaagcattttctcctgga

SEQ ID NO: 380582 - DNA, 83 bp, Homo sapiens
gagggcccacaacccgcagagacttctactggctgcgctcctttctggccggaggaacgtgttgtgggctttcacgtactggg

SEQ ID NO: 380583 - DNA, 100 bp, Homo sapiens
cgccacctactgaagacatcatttgggaccaagctgatgagcccttgaagcacagcaggtaaaagttttgtttgtgagaaacttggctactacggtgaca

SEQ ID NO: 380584 - DNA, 100 bp, Homo sapiens
catcatggttaccattagatctcacatgcttactccttttgtggaggagaacttagtttcaaaagctcctcctgagcttggataaactgcaggagcgaag

SEQ ID NO: 380585 - DNA, 100 bp, Homo sapiens
gtggaaacctggtgctatacacaggagtggttcgggaataagtttgtggagtttgacatgaagccagtctgtaagaagtgctatgagaaatttccattgg

SEQ ID NO: 380586 - DNA, 100 bp, Homo sapiens
gagagcgcagaccctgcagaatggtgtcatggagaaactccagctgggcccagagattctgcagcgggaaaatccaaggcttatttatgccaggctgagt

SEQ ID NO: 380587 - DNA, 75 bp, Homo sapiens
tctcctggagctaagctttaccctgctgcagtagataccattgttgtttgtttggcagctgtgggcttagtggga

SEQ ID NO: 380588 - DNA, 96 bp, Homo sapiens
cagaggcggcggtggcgagaggtgcggcgaaggaggcagaggcacttatgcttgtcagacaagttggatggcttgaggactggtactaaaaggaaa

SEQ ID NO: 380589 - DNA, 76 bp, Homo sapiens
gccagggtccctgaagagggaagacacgcggaaacagtgagcgtcaccctggacccacagtcggccagtgggtacc

SEQ ID NO: 380590 - DNA, 82 bp, Homo sapiens
ttcgagtgacccgggtgccgaggagcgggaagagttgctggggttaatttggagtggcccctggagtcagtttcctacacca

SEQ ID NO: 380591 - DNA, 75 bp, Homo sapiens
agcaatgaccttccctcgggaattccacctctgcgtttttccctccaggaacgtcaaggtcgtgggaaataaaag

SEQ ID NO: 380592 - DNA, 88 bp, Homo sapiens
gtaaactcaagatgctggagaagcttgggaagccgtgtccgccttttaagattgtgattctggatgaagcagattctatgacctcagc

SEQ ID NO: 380593 - DNA, 75 bp, Homo sapiens
tgtgtctcgtcttgtatctctaattggaagcagagtgggaatagctttgcgaaaaatgggcgcaatggccaagcc

SEQ ID NO: 380594 - DNA, 100 bp, Homo sapiens
cgacagcgggtctactcactcttactggaggactgtcaagagatcctgcatattttgatgaaaattggctaaacagaatcaaaactgaagtaggagataa

SEQ ID NO: 380595 - DNA, 50 bp, Homo sapiens
cagcctcccatcgcggcttccgtctacagataacgaaggaggcccaactt

SEQ ID NO: 380596 - DNA, 100 bp, Homo sapiens
cccaagattgtggcatttgaaactgtccattcaatggatggcgcgggtttaagtggacgccaggtgcaccggacacaggctgtgtttaaccacaccgagg

SEQ ID NO: 380597 - DNA, 88 bp, Homo sapiens
atgacatcagaacggaactgcctcctgagaagctcaaactggagtgggctaatagctcttcaagtctgcaataaaaaatggcctccaa

SEQ ID NO: 380598 - DNA, 51 bp, Homo sapiens
gcaggcccaagtctgcacatcccagccgctacatctgttacttttgttggt

SEQ ID NO: 380599 - DNA, 75 bp, Homo sapiens
ggacccggttccccggcccacagtgggggtgtgcaaacccgagagaactgggggtcagctgctgtgctacaacgt

SEQ ID NO: 380600 - DNA, 99 bp, Homo sapiens
tggctaccacttggccccctctgatctgcgccgggtcgccacatactggagcatcagatccatgctgctgctgactcggagccccacagcttggcacag

SEQ ID NO: 380601 - DNA, 51 bp, Homo sapiens
ggatcctatgcctgaatctaagatgatgaggctgagacaccaaaaggttca

SEQ ID NO: 380602 - DNA, 90 bp, Homo sapiens
gaagtgggaacccttcggccgctgagattctgtcgtgtcgtcgctgctggcacttcaggctctggagtctggttggaagcaaatgttttt

SEQ ID NO: 380603 - DNA, 74 bp, Homo sapiens
tccgaaactgtcaagattggcaagcaattctgtggtgttcttggtcacacatttatggagtttctgaagggcag

SEQ ID NO: 380604 - DNA, 96 bp, Homo sapiens
gaggagcccgaataccaccccgacgcctcagcccaaggctggcagtgatggtgaaagcataggaaactgccccttttcccagaggctcttcatgat

SEQ ID NO: 380605 - DNA, 96 bp, Homo sapiens
cgagcgacggcggaacccgtgggcctgtggactgcagcctcggcggtcagcaggagaacatattgtgatgttcgtgcctcagagctaaaactatga

SEQ ID NO: 380606 - DNA, 75 bp, Homo sapiens
gagcaggtgccatcaggcacatgaacggtggagtcttcaaaggtggagcagctgcgccaggccattgaagaactg

SEQ ID NO: 380607 - DNA, 100 bp, Homo sapiens
gtccagctgctgcggacagtgaaccggacagtcatcaccatgggccgggatcacattctgatttcttcccaagggattgttgaagaaacttctgaagagg

SEQ ID NO: 380608 - DNA, 83 bp, Homo sapiens
cgacaagccgctggcagccgcggatctcaccgccgctcagggggaggtcatcaaggcttgggacattgccatagccaccatga

SEQ ID NO: 380609 - DNA, 80 bp, Homo sapiens
ggctcaagcaatcctaccatgtcagccttcccagtagctggaactacagccactcccatggttcaagctttgactacaac

SEQ ID NO: 380610 - DNA, 100 bp, Homo sapiens
accgctctcccaacacagaggagatcttcaatatgttaaccaaagaaacaccagagaccttctacattgatatataagggatatgttgatgatcctcgaa

SEQ ID NO: 380611 - DNA, 100 bp, Homo sapiens
gtcggagacacggtggaaacgcttatggttcagattcagaacaagaaagtggacatctctaaggtctcctccaagtgtgggtctaaggctaacatcaagc

SEQ ID NO: 380612 - DNA, 96 bp, Homo sapiens
cggagatctctctcatctcgctcggctgcgggaaatcgggctgaagcgactgagtccgcgatggagctctgctggccgtccgctctgactaccact

SEQ ID NO: 380613 - DNA, 83 bp, Homo sapiens
ggaccgtagggcccgtgggggcttcacgcctggcaggcggccggccaggtgagaagccctaccactgcaactgggacggctgc

SEQ ID NO: 380614 - DNA, 76 bp, Homo sapiens
tattgaaacaaccaccatttcaaattttcacactcaggtccacaactcccaggcctgttgcagatctccaactcct

SEQ ID NO: 380615 - DNA, 76 bp, Homo sapiens
agcagggacgtcggtttgctatcgggactcggcgaggacggaaaaaagaaggggcatggctggagcagaatgggaa

SEQ ID NO: 380616 - DNA, 83 bp, Homo sapiens
gccgcccggctgccgggagccgacagcttcgcgccggaatatatacagccctgctctgggacacacctccattggatttaaaa

SEQ ID NO: 380617 - DNA, 98 bp, Homo sapiens
atggatgggcacactgtgggggtgtcctggtgcacccccagtgggtgctcacagctgcccattgcctaaagaactggaaggatggtcttgccttcaat

SEQ ID NO: 380618 - DNA, 100 bp, Homo sapiens
tacttcattctggtcgtcgtcctctgctgcatcatgatgtcaacaaccgtggctcacaagatgaaagagcacctgtttgcagacaaggtcccaaagacag

SEQ ID NO: 380619 - DNA, 107 bp, Homo sapiens
cgggaacctcttccagttggaattgaagaatattcccaagtccttcacccggatgaaggatttgggggcagagcacttggcaggtcatgaaggggtccaacttctcg

SEQ ID NO: 380620 - DNA, 80 bp, Homo sapiens
tgtgtggggccggaggagtcagctgtgtgtccagaacgtgccatggagacgcttaacgcaccgacagtaaatggttcacg

SEQ ID NO: 380621 - DNA, 122 bp, Homo sapiens
ctctaacaccacagttcttggtggtgaagtggaacaccttattgagaaatgggagttacagagattctgggaagtcatcagtgatgagcatggcatcgaccccagcggcaactacgtgggcg

SEQ ID NO: 380622 - DNA, 97 bp, Homo sapiens
gtcagtgctggacgtcaatgacaatgcccccgaattcccctttaagaccaaggagataagggtggaggaggtgtctcgaaataatgatgtgtggcag

SEQ ID NO: 380623 - DNA, 101 bp, Homo sapiens
atgtgatccctctgaacacttccattgttatgccacccagaaacctactggagttacttattaacatcaagttttgcacagtaataagttgactcacacag

SEQ ID NO: 380624 - DNA, 75 bp, Homo sapiens
gcatgctggaggaccacagctacctgcccgtgggcagtgtcagcttccagtttctggagcagcagagctgaagga

SEQ ID NO: 380625 - DNA, 102 bp, Homo sapiens
tcacaccagacctacggagggagctggaaattcctgacgttcattgatctggtgaatgaaaactttgccattgatttgatagcagagcagcccgtgagcgag

SEQ ID NO: 380626 - DNA, 75 bp, Homo sapiens
cctcaccaagaagatgaagaagattgtggatgccgtgatcaagtacaaggacagtgaaggagaacgacctgctca

SEQ ID NO: 380627 - DNA, 82 bp, Homo sapiens
gaattgagagtcacagaggaaggacagtggagtctggcatcttattgttttctggatatgccgcagaaggatccgtgccaga

SEQ ID NO: 380628 - DNA, 84 bp, Homo sapiens
gaaatcgggctgaagcgactgagtccgcgatggaggaatcaaagatcaactcccactgaggacaaatggacctgtaattccggg

SEQ ID NO: 380629 - DNA, 98 bp, Homo sapiens
agcaccagccagctctcccagaaactgaagaccacttacaaggcttccaccagcaagactatgtcttcagcagtggtgcagttatatgcagcagatcg

SEQ ID NO: 380630 - DNA, 100 bp, Homo sapiens
aaaggcctgtgtgctgcagaacccccagaccatcatcatccgcagtgtcatgcagaagtacctggaggaccggggcgaggtgacctttgagaagatcttt

SEQ ID NO: 380631 - DNA, 122 bp, Homo sapiens
atgaaagctcctttggtttgtctaccagtttttgtctccagagacccaaatcctcagacgttgcaattgatatctaaaaagaagtcacttgctggagcagcacaaatcttattgaagggggc

SEQ ID NO: 380632 - DNA, 98 bp, Homo sapiens
cgcaacaaactgctgagacgcacagtctccgtgccggtggaggggcggccccacggcgagcatgactgcctcttcaaggtgtgccccatgaaccgcta

SEQ ID NO: 380633 - DNA, 104 bp, Homo sapiens
ttgcactgctgcagtccaggctgaagacagagggctctgatctgtgcgacagaactaatagggatgccaaaggaaaaatatgatcctccagatcctcgcagaat

SEQ ID NO: 380634 - DNA, 90 bp, Homo sapiens
agctggaggtggacgccatcgtcaacgccggtacggacattgctgcaggagaagaggttgccatcaagcttgaatgtgtcaaaaccaaac

SEQ ID NO: 380635 - DNA, 90 bp, Homo sapiens
tcagacctctcatctgccagaatcagaaagaattcatcacactgttgccggtggtggtgtgcacattgagccccggtatagacagttccc

SEQ ID NO: 380636 - DNA, 83 bp, Homo sapiens
ccttcggcagtccacccaccgccgccgcctcccaggttttagctaaagaagatactgaggcagctattcaatcaatattatac

SEQ ID NO: 380637 - DNA, 85 bp, Homo sapiens
ggcgcacaagtcaggtccggcacatgtttccgcggagcggacccagcaatgacgggccgagtagtggagaatatttcaaaacgat

SEQ ID NO: 380638 - DNA, 51 bp, Homo sapiens
gaggtttgttccctgacaactttgtaagaatcctgataacttaagtgactc

SEQ ID NO: 380639 - DNA, 80 bp, Homo sapiens
ggacaccgtgggctgcgtgtgggacgggtttagcggcagcctcttcgattcctggtcgggtggcttccagtggtcttcag

SEQ ID NO: 380640 - DNA, 100 bp, Homo sapiens
agtctgcactacacctataaaccgaggaattcatgatcatttgccagcaggggaacaggaacctgataaagaatcaggagcctcagtggatgaagtagca

SEQ ID NO: 380641 - DNA, 98 bp, Homo sapiens
ttagtggagctggaatggtgagaccaacatccgtgacacctggactctttcaggttctgaaatgtcctgccacccggagctgaatcagtatatccagg

SEQ ID NO: 380642 - DNA, 76 bp, Homo sapiens
ctggcatcagggaggctttcagccggagaagcgagtttcagctggattcagaatccatggctggaagaggtagtaa

SEQ ID NO: 380643 - DNA, 51 bp, Homo sapiens
ctgcctaattaccttcaaacctggaaaatgtttataggaggccttagctgg

SEQ ID NO: 380644 - DNA, 80 bp, Homo sapiens
ccaaagaccaagtagatggagttctcagaactcttgatgtttcagtgagctttaatggaggaaaatctgtcatttcagga

SEQ ID NO: 380645 - DNA, 102 bp, Homo sapiens
aagctgagcagagccctgcgatactattatgacaagtctgttcgagaagtcacaggctacgtgttagtggctcttaatcagtttcgttacctgcctctggag

SEQ ID NO: 380646 - DNA, 75 bp, Homo sapiens
aagagagacggcgaggcgcgctccctgcccggcagcgactcggagagcagcccgacggccatggaggctgaagag

SEQ ID NO: 380647 - DNA, 101 bp, Homo sapiens
ctactgtagaggatgagactgaaacaaatgaagttcaaggatttctctttgggaaactaaatacaaaacgtttaattgtggatgtcatccggttccagcca

SEQ ID NO: 380648 - DNA, 88 bp, Homo sapiens
ggacgcatttttatacatagggtcctgggaactccaacaagggagcaaatcagagaaatgaacccaaactacacagaatttaaattcc

SEQ ID NO: 380649 - DNA, 83 bp, Homo sapiens
aagcatctgaagaccatggatcacaaccggaaccgcaggtgtaaacaggaacatcgataagtagtgtaaaaacttgcacaatg

SEQ ID NO: 380650 - DNA, 75 bp, Homo sapiens
aaacctcctagtagaaaaagttcttgggacaaacttcatttgagagaagtccccagaagagacagcacacttagc

SEQ ID NO: 380651 - DNA, 74 bp, Homo sapiens
gaaacaaagttattttgctcggttgtctgcattcaaaagagcattctattaaagctaccttaatttggcgctta

SEQ ID NO: 380652 - DNA, 80 bp, Homo sapiens
gccggctcccctctcaggacaacccagatgtgcaacaaagtgcgatgaaacgcttcgttaagggactcaggcagtacggg

SEQ ID NO: 380653 - DNA, 74 bp, Homo sapiens
ctgaggccctggagggagagaagcagtccagagcgtgagtccattcacatcctgagtgttgatgagaagaacaa

SEQ ID NO: 380654 - DNA, 100 bp, Homo sapiens
gatcaggaaactgcaaagactgggaagttcttaaaaagggatctggatctgaagaagccaatttatcagaggactgcagcctatggccactttggtaggg

SEQ ID NO: 380655 - DNA, 75 bp, Homo sapiens
accacgcactgggtcgtcacggaggacgggaaaatccagcagcaggaatacaaacagaagcttgcacgagtaacc

SEQ ID NO: 380656 - DNA, 96 bp, Homo sapiens
attcagtaccaccttcagatggaggataagaatggacggatgtacagttacccagcacgtgtacctcctcctcctcctattgctcgggctgtagtg

SEQ ID NO: 380657 - DNA, 100 bp, Homo sapiens
tgacggtagcccaaagggctcttcacccgaatcttacattcatggaattgccgaatctcagttacgctacatacaacagctgctcaagaagccagaaaaa

SEQ ID NO: 380658 - DNA, 74 bp, Homo sapiens
caagaagatggacaagatggtgcagaagaagaacgcggtccagctgggagctccccgacctccaggagggcaag

SEQ ID NO: 380659 - DNA, 100 bp, Homo sapiens
gcccaggaaaaagaggaaagtggactgtccggggccgggctcaggagcagagtattctaccttgtaaatactgttatttgtatatactgtaaatgatgac

SEQ ID NO: 380660 - DNA, 101 bp, Homo sapiens
gggaagcagggattccagtgccaaggggaagacggaatctatcactgtggtgaagctgctgagctgctttgatgacctggtggcagcaggcacagcctctg

SEQ ID NO: 380661 - DNA, 73 bp, Homo sapiens
tcgacatccccaagatgctggatgcagaggatccagaatataagaagtttttagaaacctactgtgtggagga

SEQ ID NO: 380662 - DNA, 75 bp, Homo sapiens
aaagtttcattgtgtatgtagaagaccagaagtggatggagagttgtgttcctgactggctttggctatgtgtat

SEQ ID NO: 380663 - DNA, 100 bp, Homo sapiens
gagcatctcatctgacgtgagttcaagtacagatcacacgcccactaaagcccagaagaatgtggctaccagcgaaggaatgctgtctctgcaatttgag

SEQ ID NO: 380664 - DNA, 119 bp, Homo sapiens
ggaggagctgtgcagccgcgaggaggcgcgggaggtgttcgagaacgaccccgagacggcttgggcactgtttaaaggaaagttccgagaaggcatcgacaagccggaccctcccacct

SEQ ID NO: 380665 - DNA, 100 bp, Homo sapiens
ccccgtctttgacgagatcatcctctccactgcccgcatgaaccgggtcctcagcttccacagcgtgtctggagcgcctggaccatgctgctgagcgcct

SEQ ID NO: 380666 - DNA, 82 bp, Homo sapiens
accgacgacgacctgtttgtggacttggggagcggcccccagtatggcacactggagaaggcctggcatgcctttttcacgg

SEQ ID NO: 380667 - DNA, 90 bp, Homo sapiens
gtttatggactagaacttaataaagatgaaagagtttctgcgcttgaagtcctccctgatagagttgggaaatcctcattgacgattcaa

SEQ ID NO: 380668 - DNA, 82 bp, Homo sapiens
ctattctcaggatatgacaggggtaacacccttccagatgatttttgagaacccagcttagactagaaagtctagaagacac

SEQ ID NO: 380669 - DNA, 99 bp, Homo sapiens
aggtggaggccactccggagccacccggaccgtgttttcctttctagaggggaagaaacctgtcgacaagcacaagaagctgctttggtactatgtggc

SEQ ID NO: 380670 - DNA, 80 bp, Homo sapiens
gggacccattaaggaggagccccccatgaagaaatctcaagcagcaaacaagcaggttctcaatctgttacccaagctgc

SEQ ID NO: 380671 - DNA, 100 bp, Homo sapiens
atgaaacttataacatcgtatggggtcatcgcagaggctttgctcaggttgcaattgatgcaaaagtgagttcgcagtatgtgcagtgcgtggccgggtg

SEQ ID NO: 380672 - DNA, 100 bp, Homo sapiens
agcgcaaggtcgccctcaaggccatgatcaaaacggctcgctggtactccatggagatggctggcatcgtctgcttcacaggggccaacatcatcaccca

SEQ ID NO: 380673 - DNA, 75 bp, Homo sapiens
cgaaaagcggaaggtggcagcgctggagatcgagaagcaagacatctgtatagattctgcttcatccgtgagaga

SEQ ID NO: 380674 - DNA, 75 bp, Homo sapiens
ggccaaggaccgcttacaacttctagtgatgaaactacagaatctgtttgtagatgattcaggtcgatatttggc

SEQ ID NO: 380675 - DNA, 73 bp, Homo sapiens
cctggtctccattatttgagatgagttacatcttggagtgaaaagaagagattggacctggaaaagaaacttt

SEQ ID NO: 380676 - DNA, 88 bp, Homo sapiens
tactttgaacagcatagagccaatcacattttgcacaagggcagtcaccatgaaaggcaaacatgctgaagacatatttggtgagttg

SEQ ID NO: 380677 - DNA, 83 bp, Homo sapiens
cacagtacttcacatcgtcgttcacatgggccaaggtggtgccccagcagatcacgcacacttctcctcggatccagccagac

SEQ ID NO: 380678 - DNA, 95 bp, Homo sapiens
gacaagaccaacaaattcatcaaggagctcatcaaggacgggaagtcactcataagcgcgctcaagagtgactctcctattccatctgtttcttc

SEQ ID NO: 380679 - DNA, 100 bp, Homo sapiens
ggaaaaatggaccaacttctttggcaagtggacattttactggctcaagaggagatgttaaagtaacccatcttgcaggacgacattgaagattggtctt

SEQ ID NO: 380680 - DNA, 98 bp, Homo sapiens
gctgacatcacagttgtctgcaccctgttgtggctctataagcaggatgaaaactttcggaagagaaagttgcctgtggtaagttcagttgttaaagt

SEQ ID NO: 380681 - DNA, 100 bp, Homo sapiens
catctcttgctgatataatggccaagaggaatcagaaacctgaagttagaaaggctcaacgagaacaagctatcagggctacgtgaagcatgactgcgtc

SEQ ID NO: 380682 - DNA, 101 bp, Homo sapiens
gccgccgccagagcaggacgaaccgccaatcgcaaggcacctctgagaacttcagataaagtgaaatctttccgtgcagctctacaagaggaggaacaagc

SEQ ID NO: 380683 - DNA, 49 bp, Homo sapiens
gcgttgcggccagtcgccactgctaccttcacggcatggtgcaactccc

SEQ ID NO: 380684 - DNA, 100 bp, Homo sapiens
gttgggcagcattcatttcctggcaggttgaagaggaagaaaggcatatgcctaaaagaaaaagaaagcagcattatctctcttcagaagatgaaccagg

SEQ ID NO: 380685 - DNA, 75 bp, Homo sapiens
gtggtttttcggatcatgtctggtggctccgcggattataacaggcgcagcccagcctcgaaatgcagaacgacg

SEQ ID NO: 380686 - DNA, 83 bp, Homo sapiens
tgccatcaagtggaacttcaccaaggttatcaatactctggctgaccatcatcatcgtgggactgactttggtggaagtcctt

SEQ ID NO: 380687 - DNA, 90 bp, Homo sapiens
aaatggaccaacttctttggcaagtggacattttactggctcaagaatatattattcgagtgcaaagaggaatttctgtggaaaacagct

SEQ ID NO: 380688 - DNA, 97 bp, Homo sapiens
tctgagagagggaagtcgcctctgtgctcgtgagtgcatggggtataagtcattttttgagaccagtactgttataatccctatttacagatgaaga

SEQ ID NO: 380689 - DNA, 50 bp, Homo sapiens
gggatgtgaaaactctgttactgaaggaggcaagtgaggcctatctggtt

SEQ ID NO: 380690 - DNA, 96 bp, Homo sapiens
cgcgaggctcctcactgcagcgaagggtgctggagaatctggtaaaagcaccattgtgaagcagatgaggatcctgcatgttaatgggtttaatgg

SEQ ID NO: 380691 - DNA, 82 bp, Homo sapiens
aactggagagcttcatcaaaaatagtgatagctttgataagccaggtgtggtgtcttacacctgtaatcccagcactgtggg

SEQ ID NO: 380692 - DNA, 100 bp, Homo sapiens
tctggctgggcaagcactacaagaagcagctcttctctagttgtgagaaaagaacctgatgtacctgtgttctttccaagtggccagctggcagaaagtg

SEQ ID NO: 380693 - DNA, 75 bp, Homo sapiens
tacagatactttgaagtagaagaagctgatgattcagaatctgataattcagataacaacacaatctttgtgcaa

SEQ ID NO: 380694 - DNA, 75 bp, Homo sapiens
tacttacagatgtaaatgttggcattatattgtacttctagcaagtgcaccaacagaaaaacaacgcctggaatg

SEQ ID NO: 380695 - DNA, 96 bp, Homo sapiens
gctacgtctccagtgaatggttattttggaggaagtctgtatgctagacaaggagagatcgagatggtgatcatggagcgtagcaagctctcagag

SEQ ID NO: 380696 - DNA, 75 bp, Homo sapiens
gccgcaccgccctccgcggccgccccctggggatccagcgagcgcggaaataatgaagatgtttcattttcaaga

SEQ ID NO: 380697 - DNA, 75 bp, Homo sapiens
aacattgttcctggaacgccctctttttaaaaaagtgccggtggtggtgtgcacattgagccccggtatagacag

SEQ ID NO: 380698 - DNA, 80 bp, Homo sapiens
aacctgtgatccattctcattaaataaatctctgggttgatgaaaagcccagaaccttgatgacagattgtctggttata

SEQ ID NO: 380699 - DNA, 83 bp, Homo sapiens
ggagcagctggctctgggccttgaacattccgaaactgtcaagattggcaagttggagttactggaagtgcgcagacagcaag

SEQ ID NO: 380700 - DNA, 75 bp, Homo sapiens
gtgaggactaccttatgatttcctgttaagacatcagaattttatagatactcccgacagctccgttacgaagtt

SEQ ID NO: 380701 - DNA, 50 bp, Homo sapiens
ggaatatatcctgactgattgagcggtggtgccccccccgggcacggggc

SEQ ID NO: 380702 - DNA, 95 bp, Homo sapiens
cagtggggatgtctcataatgataagaaaggaggtattcgaacttctggaaatgggagtgctcagtctgtgcaagtcagaatccttgaaactggg

SEQ ID NO: 380703 - DNA, 90 bp, Homo sapiens
gaaggagcaaattcgaataacagcaagtattggctcgtcaaaaacagcttgcttggctcaggaacaacagaagagaataaagaaaatgac

SEQ ID NO: 380704 - DNA, 100 bp, Homo sapiens
tatatcagtttcccactgatgaagaaacggtggcagagattaacgcaacaatgagttttaattggttggggtcagataagaagaggagtgacaatcaagc

SEQ ID NO: 380705 - DNA, 97 bp, Homo sapiens
aaacaccatggctgcggcggcccagctctctctgacacagaccccatatcatgtgaacctcctcctggctggctatgatgagcatgaagggccagcg

SEQ ID NO: 380706 - DNA, 98 bp, Homo sapiens
tcatcagctaatgtctacctcgaatcaaagtccattgctgatggttttaaagaggcagttcgttatgtccttccacgtcttatgctggtgccagtgta

SEQ ID NO: 380707 - DNA, 83 bp, Homo sapiens
gggtcccttttgcctcagatactattttgaagggtgaagaacctgatgaagatgatgcatatcaggtattgtcaacattgaag

SEQ ID NO: 380708 - DNA, 90 bp, Homo sapiens
gtcgtgatccagaagtccagagctgaggactgcctgtttgcaggttttcctcctccaccaggcgctccacctccatctcttataccaaca

SEQ ID NO: 380709 - DNA, 100 bp, Homo sapiens
ccaggaagcagcaggatgcgccgctccactgtcggtagcaacaaggtctctagacaaactttataactttgctgattgctctggactccacctgatattt

SEQ ID NO: 380710 - DNA, 60 bp, Homo sapiens
catctttgaactactgccggagcttctgccagtttgtatctacttgaacaagaatggcag

SEQ ID NO: 380711 - DNA, 87 bp, Homo sapiens
acctggtccagcttcccttcctcaaataaggaaattgacacctggcgtgtgggcatccccaccatcagatggtgcggggcagagggg

SEQ ID NO: 380712 - DNA, 75 bp, Homo sapiens
gttgtactccacattgcagaagttacaatcacagtgcacagtcactattgtggggatcatcagacatgcagagaa

SEQ ID NO: 380713 - DNA, 93 bp, Homo sapiens
gaagaaaccagccgaacttcagggtttccaccgttcgttcaaggtgagaagccctaccactgcaactgggacggctgcggctggaagtttgcg

SEQ ID NO: 380714 - DNA, 83 bp, Homo sapiens
atcttttgttctctggcatggaaggggtcctcagagttactgggtatgttttagctgttgggagctctgtgttccatgcgatg

SEQ ID NO: 380715 - DNA, 75 bp, Homo sapiens
gctgtggccctcagaatttaaacttaaggaaagagtgggaaagtgagggattttgcctaccattttacagtattt

SEQ ID NO: 380716 - DNA, 88 bp, Homo sapiens
caaggaggccaacgccaacggttccagcccaggtgaatatgtttacaaaccaaggaacagtgatccactttaacaaccctaaagttca

SEQ ID NO: 380717 - DNA, 100 bp, Homo sapiens
actcgtgcccgaagccccttaccccgccccgggctgtggtctgtgggctgtgggacgagctgcggcgcggatgttttagaagaatgtatgtctcttccca

SEQ ID NO: 380718 - DNA, 100 bp, Homo sapiens
ctcggaggcgttcagctgcttcaagatgaaggccaaatacctcaccaagaaaacccaggcagccagcgtggaggctgttaagatgctggatgagatcctc

SEQ ID NO: 380719 - DNA, 90 bp, Homo sapiens
tgccctggccctgctcagcgccagcggcactggctccgccgcccaagtttgccgggaggactcatatcactctgtcgtctcatgtgccgc

SEQ ID NO: 380720 - DNA, 90 bp, Homo sapiens
agggaaaaatttactgcagctgagggtttagatgtagattctctggtcattgagcatatccaagtgaacaaagcacctaagatgcgccgc

SEQ ID NO: 380721 - DNA, 75 bp, Homo sapiens
ctcgacaagttcaagcagctgcttgccggccccaacacggaccttggtaaaagtacacctgtaagccagcttggt

SEQ ID NO: 380722 - DNA, 80 bp, Homo sapiens
cgggaggaaggaacgaggcaaggagctaaagcagcgtgcgttcagccctggggcatctgcatctgggaccgacctcctgg

SEQ ID NO: 380723 - DNA, 82 bp, Homo sapiens
ggctcttcccgcccgccttccgccgtctcttcgagttcttcgtgctgctcaagtgcagagcagagcgggcggaggaccccgg

SEQ ID NO: 380724 - DNA, 50 bp, Homo sapiens
cgaaacgctctgaaaatcgagccgtttggaaattttagcattcaggtgcc

SEQ ID NO: 380725 - DNA, 98 bp, Homo sapiens
aatttcatggagaagaaggccttgactacggaggggttgccagtgacaacactgcagctgaaggaggagttgctggatggagaggattataatttcct

SEQ ID NO: 380726 - DNA, 106 bp, Homo sapiens
catgccgctcctaagcctgcacagccgcggcggcagcagcagtgagaggtgatgtgtccaatctagatcccaacttctcatttgaaggcaccaaactggatgtggg

SEQ ID NO: 380727 - DNA, 86 bp, Homo sapiens
gcaaggagctaaagcagcgtgcgttcagccctggggagaactgcgacacatcaccaagctgaagccctggagcctctttgatgtac

SEQ ID NO: 380728 - DNA, 83 bp, Homo sapiens
tccagcgctgcgcccggacagacaagttcaaaagaatgctgaaccgggagctgacacacctctcagagatgagccgatcaggg

SEQ ID NO: 380729 - DNA, 107 bp, Homo sapiens
gaagtttgagaggtcatgtggttggactacgctattacacgggagtaatcacaaaatttgtccaggatagacatagagctagaagaaacagacttcgtaaagatcaa

SEQ ID NO: 380730 - DNA, 100 bp, Homo sapiens
cggcggcggggggagccggagccgcctgggatgttcaagtcaagaaattggagcatggctatgagcaatggaaacaatgattttgtggttctgagcaaca

SEQ ID NO: 380731 - DNA, 82 bp, Homo sapiens
aaactcttctttgacaagagagacaactctgactttggtggcctgccatgggtatccatggtgacaagagtcaacaagagcg

SEQ ID NO: 380732 - DNA, 80 bp, Homo sapiens
cgcgaggagacagctgaggcccgcggagaccaggggtgtatggaatgattcggttctcaggcaccacaggccagatgtct

SEQ ID NO: 380733 - DNA, 73 bp, Homo sapiens
gctctaatcgaccaggacccccaggcggcgttagagattctggaacttttcaaagcctgactctcttcttgaa

SEQ ID NO: 380734 - DNA, 75 bp, Homo sapiens
gcatctccccgacaaacaccacgagaattccgcagcccacacggaatagcacatttcaaacctacaagaaagaag

SEQ ID NO: 380735 - DNA, 80 bp, Homo sapiens
accgctgctggaccacaaaccgctgccagaaaatactgtaagattgatgttaaaggcatggtgttcaccccacttcatca

SEQ ID NO: 380736 - DNA, 89 bp, Homo sapiens
ggcggggccgccggggccgccatggagcccgactcggtgattgaggacaagaccatcgagctcatgctcctgccctccactgactccag

SEQ ID NO: 380737 - DNA, 50 bp, Homo sapiens
ccgcctacaggagtatgatgcaagcttttcgctgtggcctgcagttttta

SEQ ID NO: 380738 - DNA, 100 bp, Homo sapiens
actgctcacgttcatcatggtgcctggctgccaggcagttaagtgatgcaattagcattattggcagagaagattttccacagaaatggcctgacttgct

SEQ ID NO: 380739 - DNA, 83 bp, Homo sapiens
aacagaacaagaggacaggaggtgtcgttccagtgggcgacagatgcgaaagaaacgagttccagtgccaagacgggaaatgc

SEQ ID NO: 380740 - DNA, 125 bp, Homo sapiens
gaaggaagatatttctcaaaataaagatgaatcttcactttctatgtcaaagagcaagcctgcctagggtagttaaaagacgagtgaatgctctcaaaaacctgcaagttaaatgtgcacagata

SEQ ID NO: 380741 - DNA, 100 bp, Homo sapiens
cttggactcattactggtcactgaaaaccagaaacaggtgctctagttcacagctataggggaacaggtggaatatttgaagtttgctggaatgcagcag

SEQ ID NO: 380742 - DNA, 100 bp, Homo sapiens
tgttggaccttccggagcttctcagaagacagagggttttcttttgaggcgtgtgctcgcccactgatatcggtgtactccgaaaagggggagtcatctg

SEQ ID NO: 380743 - DNA, 82 bp, Homo sapiens
cggcctcctgcaagagtttgatgtccaggtgtttcccattaaacactaccaggacaaaatcaggccttacatccagctgcca

SEQ ID NO: 380744 - DNA, 50 bp, Homo sapiens
caaaactacaaacaagacttcgcaggtgaggcaggcgactaatcagattg

SEQ ID NO: 380745 - DNA, 90 bp, Homo sapiens
tacctccctgaatggactgcgtggctcatcttggctgtgatttcagtatatggtctctaattaacagaagatggcaaagcccagccacag

SEQ ID NO: 380746 - DNA, 83 bp, Homo sapiens
gcgcgccaagaccgctgcagccgctggctgaactaatagggatgccaaaggaaaaatatgatcctccagatcctcgcagaatt

SEQ ID NO: 380747 - DNA, 80 bp, Homo sapiens
cattgaaagaggctcccgagactggggaagaacgaggtctgaatgactgggatgatgatgagatcctagcttcggtgctg

SEQ ID NO: 380748 - DNA, 100 bp, Homo sapiens
ctgtggaactgctctggcagtcatcgtgcctgaaggagtacatgccctttatgaagatattcttgagggtggaagtccaagaatccgagtggaggctcac

SEQ ID NO: 380749 - DNA, 75 bp, Homo sapiens
ctgagcgggacatggactcaacagatctgtctgcctgcaatctacaagtatttccctggccggcccttagtccag

SEQ ID NO: 380750 - DNA, 75 bp, Homo sapiens
acagtacctcttctgcaggtactggaaacccacaggcacacccaagtattaatctctggagaagacacatccaca

SEQ ID NO: 380751 - DNA, 100 bp, Homo sapiens
tctgctgggctgccagctcgcttaacattggagttcagtgcttttgacatctgcttctaaacaaaagtccagcagccatttgccagcaaacagccaggat

SEQ ID NO: 380752 - DNA, 100 bp, Homo sapiens
acctatgtacctgttaccactttcaaaaattcagaaattcctttctgggataatttctggcactgctttggagatggagcccctgaaaattggctatgga

SEQ ID NO: 380753 - DNA, 75 bp, Homo sapiens
caaatccaagatggcggccagcaggaggctgatgaaggtactccaaagattcaggtttactcacgtcatccagca

SEQ ID NO: 380754 - DNA, 100 bp, Homo sapiens
tgccactcagctgacatatgaaggactcattgatgaaatttatggcattcagaacagtgatgttcgaaatgatatctatgtaacattagttcaaggagat

SEQ ID NO: 380755 - DNA, 82 bp, Homo sapiens
caagaaaatactcgaagacatcaaaagctggattcgagggtgaaattcgatgctactgtgatgctgcccactgtgtagccac

SEQ ID NO: 380756 - DNA, 75 bp, Homo sapiens
atttcaggtcatgtgcacagattaatggctggatccatggcaggcaatcctttatcacaggatattctcaactta

SEQ ID NO: 380757 - DNA, 100 bp, Homo sapiens
tgggcgccttcacccccgtggtgcggcagcgcacgctgcagtccagatctgtgccagttcagaagcaggcgagcctcttccctgatgaaaaagaagataa

SEQ ID NO: 380758 - DNA, 101 bp, Homo sapiens
gaagctgcttttcaagaggccttctatgtgaaagcccgagatgaaaagaccagtgccctcagtctgagcaacgttgctggagtattctacatccttgtcgg

SEQ ID NO: 380759 - DNA, 50 bp, Homo sapiens
cagccaccgcggctaccacctgatggcacatttcctagaggcagaatcct

SEQ ID NO: 380760 - DNA, 76 bp, Homo sapiens
agtctgggcagtggaggcagaggattaagcctgatcaagatgacaacctcccaaaagcaccgagacttcgtggcag

SEQ ID NO: 380761 - DNA, 90 bp, Homo sapiens
gcagcaagaacagagagagaggtggacagatctgagagatactgagagacacctatggctgccgatgaaggctcagcagagaaacaggca

SEQ ID NO: 380762 - DNA, 90 bp, Homo sapiens
ctcagcaagactggagtccctgatggaattatgcagtttattaagatgtctggcgataaagggatttctgccttccctgaatcagacaac

SEQ ID NO: 380763 - DNA, 87 bp, Homo sapiens
agccggtgctgcagaaccagatccgggagcacgtcatcgccatcgaaggaatgaccatacctgaagaagacgctgatgtgggacaag

SEQ ID NO: 380764 - DNA, 100 bp, Homo sapiens
taaagtttttggtgccctgaagggagctgtggatggaggcttgtctatccctcacagccaggtgattggtgaaaacactaaacaaccctgagcccagggc

SEQ ID NO: 380765 - DNA, 80 bp, Homo sapiens
gtttctagacaaagccaaagccaaaaagttttcagcagtcaggtgctggagaatctggtaaaagcaccattgtgaagcag

SEQ ID NO: 380766 - DNA, 101 bp, Homo sapiens
tttctaagtctcctaaaggatgtgggtcgacaagtgcccccaatgatttatggtacaacttcattgaactgccctaccacggggaaagcatcagcatgctg

SEQ ID NO: 380767 - DNA, 100 bp, Homo sapiens
gcgctttcctgggttgcttctggcggccatggtgttgctgctgtactccttctccgaaacagattgtctcagtttacctagctttgaaaatgccataccc

SEQ ID NO: 380768 - DNA, 75 bp, Homo sapiens
gaccaagatcgagcccagcgtcaacttcctcaagtcgcccaaagctgaataccactagaaacatacctgtaacca

SEQ ID NO: 380769 - DNA, 101 bp, Homo sapiens
ggagaaggcacccgcggaaccgacggctcaggtgccggacgctggcggatgtgcgagcgaggttaaatgggccagggaaaactatcaccataacattggct

SEQ ID NO: 380770 - DNA, 96 bp, Homo sapiens
tccatgttcatagtggctttccagttgtttgacaagagtggaaatggagaggtgacatttgttgctcacccaatccggcccaagcctccctcagcc

SEQ ID NO: 380771 - DNA, 100 bp, Homo sapiens
ttcgagtgggtctacaccgaccagccgcacacgcagcggcgcaaggagatactggacaggggcaagtgtccgagtggtgaatcagctacttacagagatg

SEQ ID NO: 380772 - DNA, 90 bp, Homo sapiens
ctaccccagccccccagcatccccaacagacatggccccctgtgaacgaagtggcggacctgctgtactggaaggacacgaggacgtcag

SEQ ID NO: 380773 - DNA, 48 bp, Homo sapiens
agagcttgtgaaactgagggaataggaaccgttttgattaaaagtaac

SEQ ID NO: 380774 - DNA, 73 bp, Homo sapiens
ttatcccagctgtcggggatattgatgcattcttaaaggtcccagcatttgagggtgatgatggattctgtgt

SEQ ID NO: 380775 - DNA, 98 bp, Homo sapiens
tgaccaatgaggagcaggtggttgtcatacaagccaggacagtcctgaccttggccgaaaagactggggcagcacctactccgtgtcagtggtggaga

SEQ ID NO: 380776 - DNA, 80 bp, Homo sapiens
cgcagccccggcctctcggcctctgccggagaaacagatgaaggatttgggggcagagcacttggcaggtcatgaagggg

SEQ ID NO: 380777 - DNA, 75 bp, Homo sapiens
aagagtgagagatggaacccgaagaagaaaggattcgttacagccagagattggaatgccaagcaagatgtcgat

SEQ ID NO: 380778 - DNA, 99 bp, Homo sapiens
cagagttctaggagtggaagaggagaatgccgggtctaagttgtagattttatcaacacaaatttcctgaggtggaagatgtagtgatggtgaatgtca

SEQ ID NO: 380779 - DNA, 75 bp, Homo sapiens
agagatgccagggctggaccctaatttgagaagtgcaggtaaagggagaagatgaggaagagaacaatttggaag

SEQ ID NO: 380780 - DNA, 100 bp, Homo sapiens
atgccctcacaccagacctacggagggagctggaaattcctgacgttcattgatctggaaacaaaccatcaggcctcccagaaagtatccgggatctgaa

SEQ ID NO: 380781 - DNA, 83 bp, Homo sapiens
gaaaaacttcttgccaaccaaaggtctgctcttgataaaataacagcaagtttatgtgatcttaaatcaaggcttgattcaag

SEQ ID NO: 380782 - DNA, 50 bp, Homo sapiens
aggagcccatctgactcaccaggacataagcagctctatgaccaatagca

SEQ ID NO: 380783 - DNA, 82 bp, Homo sapiens
tgcagctcaacagcagcaatatgcattagcagcagctcagcagccacatataggtcttcggataaactcaaccaactgtcaa

SEQ ID NO: 380784 - DNA, 100 bp, Homo sapiens
gccgggcagcggggcctgggacgcgccccgaggaggagcggggcggcgcaggcgccctgaaggatggctgccatattgggagacaccatcatggtggcta

SEQ ID NO: 380785 - DNA, 83 bp, Homo sapiens
tggtgaagcagatcgagagcaaggacgtagacaagtttggcaacgagatcacccagctggcccggcccctgcctgtggagtat

SEQ ID NO: 380786 - DNA, 53 bp, Homo sapiens
cagcccgagaaaccgcagcactacacctccttcgagaactcatagaacggaag

SEQ ID NO: 380787 - DNA, 75 bp, Homo sapiens
aaaggcaaggccatttaaatgtttaaaagcatattggcagaggaagagccctggcattccagcaggagctaacag

SEQ ID NO: 380788 - DNA, 100 bp, Homo sapiens
gtgaaattgagactgacaaagctgtggttaccttagatgcaagtgatgatggaatcttggccaaaatcgtgtccaggcaactcctagtagtacaacggaa

SEQ ID NO: 380789 - DNA, 98 bp, Homo sapiens
tcagtgaagagtctggagtttatctggagtgaggtggccggttcttggtgggatctgagcagagagctggcggtcaccatggcaatgcgggagctggt

SEQ ID NO: 380790 - DNA, 75 bp, Homo sapiens
tggacagtgagacagccatgttttctgtctacgatggacatggaggacaatctctatgggaagcagaaggcaagg

SEQ ID NO: 380791 - DNA, 75 bp, Homo sapiens
gagcacgctatgagagatacagtggcaatcaggttctcttttggtcaagagcaatctgaatccaaatgcaaagga

SEQ ID NO: 380792 - DNA, 75 bp, Homo sapiens
tggggcatcgacgatctccatatttcattgcaaggatgccgttttgatgcaattttgtgcgaacaaattggacaa

SEQ ID NO: 380793 - DNA, 75 bp, Homo sapiens
ctctgcgggaggtggagcacctgaagagatgccagcaggacacctgctccacttcaccttttgccatgagtaaaa

SEQ ID NO: 380794 - DNA, 115 bp, Homo sapiens
gaagaccgcgcgcagggcctgcagcgggagctggacggcgagcgcgagcggcgcgagaaactccttccgcttccagccgttcgagtcctatgactccaggccctgcctgccggag

SEQ ID NO: 380795 - DNA, 74 bp, Homo sapiens
gacagcaatggatagatgccattgaacagcacaagtttgacggtgagaacatgtatatgagcatgacagagccg

SEQ ID NO: 380796 - DNA, 98 bp, Homo sapiens
tacgtgaaactgaaggacaacgagaagaaccggaagctctttgaccttctggatgtccttgagttcaaccagttggaagtccattattgaccatcttt

SEQ ID NO: 380797 - DNA, 100 bp, Homo sapiens
cttatgtgcggcggcgtgatgttgggcggccacagagagattggtgtttttgtgaggcagtgagacctaaggcgttggagaccagggccagccctggcca

SEQ ID NO: 380798 - DNA, 80 bp, Homo sapiens
gccgctaccgctcaggtgctgcaggcacagcccgagaaaccgcagcactacaccatgttcagctcttgacacaaatccac

SEQ ID NO: 380799 - DNA, 100 bp, Homo sapiens
cccgttcttgcctcaggccagtcgcctccaggccaagagggatccttcacccgtgtctgggggtataacgtgtattctttcactaatctgtgccttggct

SEQ ID NO: 380800 - DNA, 100 bp, Homo sapiens
gaaacgggccggccagtcagtcaccattgtggcccagtacagacctgaaggtacaccaggggttggaaaaaccacactaggcaaagaacttgcgtcaaaa

SEQ ID NO: 380801 - DNA, 132 bp, Homo sapiens
attcgtgtcatgtagctacatctccaggtttaaatcctatgactcctgtacacaaagccatgctggctggagccacagcagtttactcccagttcattactcagctaacagacgaaaaccagtcatgttgcc

SEQ ID NO: 380802 - DNA, 100 bp, Homo sapiens
tcaccgcagcttggatctcctgggctcaagcgattctcccgtctcagcctcccgaatagctgggactacagaatgttcccacaggccccaacaataagcc

SEQ ID NO: 380803 - DNA, 100 bp, Homo sapiens
gtcggagactgacaccaggtattttgatgaggagttcacggcccagatgatcaccatcacaccacctgaccaagtgtacgaccttctaagtggccacatt

SEQ ID NO: 380804 - DNA, 83 bp, Homo sapiens
cgagcacccgcctccgggcatcttcaactgacctatatccagactttgcctgacactgcagggtccaagagaattaaagaaat

SEQ ID NO: 380805 - DNA, 100 bp, Homo sapiens
ttggaagaggaaccacaagaaaatcaaaagaaacttttgcccttatcagtaacacctgagattttaacctttgagaccaagaacccgtcggaattagcag

SEQ ID NO: 380806 - DNA, 90 bp, Homo sapiens
aagcaatgacagaagatggatttttggctgtatgttcagaagctaaagagtgttttctgcctacattaaagaagtggatgaaaagccagc

SEQ ID NO: 380807 - DNA, 75 bp, Homo sapiens
ctcccatgtagctgggactacagagattgccctcagtcccaataatcacgaagtgcacatctataagaagaacgg

SEQ ID NO: 380808 - DNA, 95 bp, Homo sapiens
gccaatccctacagcccttacggaagctgccttttagagcctttcgcacaggtgcagagcattgtagaccaaggagccatggataggagaagtat

SEQ ID NO: 380809 - DNA, 100 bp, Homo sapiens
gggctggctctgtgcggctcatcaaggttgtgattgaggacgagctgctgcccaaagggagcaaggaggaacagcgggattacgtcttctacctggccgt

SEQ ID NO: 380810 - DNA, 50 bp, Homo sapiens
caggacaataacactcagatcgaggagcagacaagatggagacaaattcc

SEQ ID NO: 380811 - DNA, 98 bp, Homo sapiens
gctacaagggatttgttgacataacgctgaaccttagccggccgatcgaggagcagggccccctggacgtcatcatccacaagctgactgacgtcatc

SEQ ID NO: 380812 - DNA, 51 bp, Homo sapiens
gggcgttcatctaccacgctttcgtgcatgaacaaccgggaggtgctggag

SEQ ID NO: 380813 - DNA, 100 bp, Homo sapiens
atccttttcagactacattttcctcacaactgttctttccaatatatggcagtgtatgggagaaattacatcgagcctttgccatttggagtggctttgg

SEQ ID NO: 380814 - DNA, 75 bp, Homo sapiens
atcgcgaccaacacataccagcagaacatctaaatatattgctgtttgggttagcacaaaacctgcagaaagctc

SEQ ID NO: 380815 - DNA, 90 bp, Homo sapiens
gcgttttccggccagaggacatggggcaagattcttgccaagagaattaatgtgcgtattgagcacattaagcactctaagagccgagat

SEQ ID NO: 380816 - DNA, 49 bp, Homo sapiens
aagttcaaggagtctcttgttaatccaaaagaatgcaatggtgtaaaga

SEQ ID NO: 380817 - DNA, 98 bp, Homo sapiens
gcgtcgagagcgagcgggcccgggaacggcgcgggtggtagaggaggagccgcgggctcgtccagttacaacacagggatcacaacaaacacaaccgc

SEQ ID NO: 380818 - DNA, 50 bp, Homo sapiens
ctgtagaaacattttgggagattagggtcctggactctactacgtggatg

SEQ ID NO: 380819 - DNA, 110 bp, Homo sapiens
ctccttagagccagttgctgtagaactcaaatctctgctgggcaagattttgcaggttaattcctcacacacgttcaccaggtacttggacaatatattttgaaggtgca

SEQ ID NO: 380820 - DNA, 144 bp, Homo sapiens
atccaggttcccatggttgccggctcccctctcaggacaacccagatgtgcaacaaagtgcgatggttaaacccatccagagtaatggctgcggccttacccaggaccctgggggagttgcagctgtatagaatattacaaaaa

SEQ ID NO: 380821 - DNA, 100 bp, Homo sapiens
gaggtgtcagtgttaaaggaacctctacaacgaaggtgaagccacggaagataaggtgcaaatatatacagagcttcataatcagcccaagaccacatag

SEQ ID NO: 380822 - DNA, 100 bp, Homo sapiens
ggaaaatgaggcccataggaaacaagtgacttgctgagtccagataacactgactgtcagacaggtgcagttaataaccaaagcaggccacaaagccaca

SEQ ID NO: 380823 - DNA, 100 bp, Homo sapiens
gtgggtgtcagtggcgcaccatctgaaaacaacatcatgcagtggaatgcagttatatttgggttcacaatctatacagttgcataaaagtagcagaaga

SEQ ID NO: 380824 - DNA, 83 bp, Homo sapiens
ccgccgggcgcctgaggagctgcgtctccgctggagggcagcggagacagccgaattttcggctttgtgagaaaccttaccat

SEQ ID NO: 380825 - DNA, 98 bp, Homo sapiens
tgcagcccccgaacgcggcctcgcacagacgcccactattgcttggttctacttcctttatcccgattggccgtcggacttatgccagtgcggcggag

SEQ ID NO: 380826 - DNA, 100 bp, Homo sapiens
ttgaaaactcttggaccaatcctaaagaaaatcatttgtgatgggtcagctagtatgcaggctaggcaaactgaggagatgttaaagtaacccatcttgc

SEQ ID NO: 380827 - DNA, 90 bp, Homo sapiens
cacattgaatgggccaaggaaaaatcgagcagaaagaatgtctttcaggtattagaaaactactcggatgctccaatgacaccaaaacag

SEQ ID NO: 380828 - DNA, 100 bp, Homo sapiens
gagaaggagttgtttcccattgcagcccaggtggataaggaacatctcttcccagcggctcaggtctagcacataccgctccaagggctttgacgtcaca

SEQ ID NO: 380829 - DNA, 96 bp, Homo sapiens
atttgacaacttacggttttcgtggagaagccttggggtcaatttgttgtatagctgagagctggggtggaaaggagaatggctttggacttgcag

SEQ ID NO: 380830 - DNA, 97 bp, Homo sapiens
aggcatctcaaatcggctgattctgcatctggaaactgccttcatcttgaaagaaaagaaatgggatttgaccgatacaaaatggtggtgcaagtag

SEQ ID NO: 380831 - DNA, 82 bp, Homo sapiens
cagacactgaactttgggcctgaatggaccataattatggtgctcgtcctcctccgacacctccggcttcccctcctccatc

SEQ ID NO: 380832 - DNA, 100 bp, Homo sapiens
aggacctcttcgacatcgaggatgacatcatctacactcaggacttcacggtgcccgggatcatggcacaagttgcagtttccaccctgcccatggaaga

SEQ ID NO: 380833 - DNA, 75 bp, Homo sapiens
ccaaatgaattatgtcagcaacgtatccaagttaatagaagatgaaattgcaaccattcttaaatctacattgaa

SEQ ID NO: 380834 - DNA, 82 bp, Homo sapiens
cgtgcacgcagcccggcgggaggataaagaccaccacgctggtaggtgagtgctgtcctcggctcactttcctcaagctctc

SEQ ID NO: 380835 - DNA, 141 bp, Homo sapiens
ctggggccgcggagcggcggggctcaaacgagccctacggccttgcggccgcccgggactccccggcaaagaaggccctgtttgtgctcttcgtcctggcctacatccacatcgtcttctcccgctcgcccatcaactgcc

SEQ ID NO: 380836 - DNA, 98 bp, Homo sapiens
aggagtagtcgctggagtccgcgcctccctgggtgctggagaatctggtaaaagcaccattgtgaagcagatgaggatcctgcatgttaatgggttta

SEQ ID NO: 380837 - DNA, 82 bp, Homo sapiens
gttggccttcgtacccgtcttgattgagagtgaagacatttccacctggacacctgaccatgtgcctgccctgagcagcgag

SEQ ID NO: 380838 - DNA, 75 bp, Homo sapiens
gccgaggagaccccgcgcagtgctgccaacgccccggtggagaagctgaggtcattacacctactctgagaatcg

SEQ ID NO: 380839 - DNA, 82 bp, Homo sapiens
agcctgcctttccttccccctcggaaaatggttcccactgccgggcgaggatgaaacaggcgcctatttaatcgacagagac

SEQ ID NO: 380840 - DNA, 100 bp, Homo sapiens
gagcactcaggagaccaggaaaatggccacagggctcctgagagccaaaaaagagaaggagctggcaaacagccctgactgtccccagatgtgtgcctat

SEQ ID NO: 380841 - DNA, 90 bp, Homo sapiens
tgatttcctatcagggcagaattccatatcctcgccctggaactgccaaagaactgccaactctgaaagataatgatttcattaatgagg

SEQ ID NO: 380842 - DNA, 100 bp, Homo sapiens
tacacctcagtcctaactgtagggaaggaagccttgaggagaaggcagagcccccccaggctatgaatgccctgatgcggttgaaccagctgaagccagg

SEQ ID NO: 380843 - DNA, 98 bp, Homo sapiens
caaaagttgatgatcttccccctgcaatccctctgtgagagcgagcgggcacgagtccgggctgcacggaagcacatcctggtgtgggccccgaggca

SEQ ID NO: 380844 - DNA, 101 bp, Homo sapiens
catgggaccatttcaacaacccttagaagctgactcagctgtctcctggccctgacttttctaagatgagaggagctgagacaaggtctcactatgttgcc

SEQ ID NO: 380845 - DNA, 75 bp, Homo sapiens
gcgtgagccaccacgcctggcctcactcaaacagtaaacgaggtccccagtctatgtgaggatctcctgtcttct

SEQ ID NO: 380846 - DNA, 90 bp, Homo sapiens
tggagaactacagaaacctggtctccctagggcagctggtggaatttttgaagaaaatggaatctcgaggccccctttcgtgcgacacgg

SEQ ID NO: 380847 - DNA, 83 bp, Homo sapiens
agacggctcacctgtgcgggatggaacaaaagatgagaaacctggatgagtgtgaggtgtgccgggacggaggggagctgttc

SEQ ID NO: 380848 - DNA, 82 bp, Homo sapiens
ccctacttcaaggataagggcgacagcaacagctctgccggctggaagttggaatcgaagcctcttaaaatggcagatgact

SEQ ID NO: 380849 - DNA, 100 bp, Homo sapiens
attggcaggagctcacctgtgacgatgagccagagacctacgtggcagctgtgaaaaaagccatttccgaaggaacgcctttttacccaagtcagccggt

SEQ ID NO: 380850 - DNA, 100 bp, Homo sapiens
ggccctgaggcaacggctcatcaggcatgagccatgagcccaagtccccttcgctagggatgctttccaccgcgaccaggaccaccgccaccgtcaaccc

SEQ ID NO: 380851 - DNA, 98 bp, Homo sapiens
agttcttcatggggaagaaataggaggcggtcagacagccttaaagaacaatacctgaaattccaccaaagcgtggagaactcaaaacggagcttttg

SEQ ID NO: 380852 - DNA, 107 bp, Homo sapiens
agcaaaggcaagaaggcaacgacgttccatctgtggaaggacctaccaaccagtgctggctgaagatgcaatcaaggccgccctggctgattacaaattgaaacaag

SEQ ID NO: 380853 - DNA, 75 bp, Homo sapiens
ctgccgcctatgggcacaggcagtgtctggaattggattactacagcatcccatttcccacacccactactccgc

SEQ ID NO: 380854 - DNA, 95 bp, Homo sapiens
acttataaaggaccagacaaatcaaattagtggttttggtgctggagaatctggtaaaagcaccattgtgaagcagatgaggatcctgcatgtta

SEQ ID NO: 380855 - DNA, 75 bp, Homo sapiens
cgagcagttccctcctgactatgaccagcaggtgtttgaaagcattgatatgaaccatggacaagtatattctgc

SEQ ID NO: 380856 - DNA, 100 bp, Homo sapiens
gctccgttgtgtactatcaagtcaaacagccacgctggatggaaacagtcaaggcgcattgaacagtcctgggcactacatgtaaattaagcccaaagat

SEQ ID NO: 380857 - DNA, 50 bp, Homo sapiens
ctcgcctcccggccgagctgacggtggatccataaagaacccagccaacc

SEQ ID NO: 380858 - DNA, 76 bp, Homo sapiens
aatatggaaaacaggcctgtggaaacataccagggtgtgggccgaagatatgctcatgtggtgttgaggaaagcag

SEQ ID NO: 380859 - DNA, 90 bp, Homo sapiens
gtggcctaccaggaggccaggggtgtcgccatgttggcccagtcccgcggtgaaaggaaggttcaagtctcagctgccagatctcagtgg

SEQ ID NO: 380860 - DNA, 83 bp, Homo sapiens
gtgtcagtttacgcctctgagatcacacagctgcctgggggccgtgtgatgcccaaggctgtggaaaatctctgttctcacaa

SEQ ID NO: 380861 - DNA, 82 bp, Homo sapiens
aaatagtaattcctccaccaacacatcacagccaccagagaaagagggtggattacctcgtcacgttggtaataaaactgaa

SEQ ID NO: 380862 - DNA, 75 bp, Homo sapiens
tgttcagcagccctgcaggagtggacggcaatgcttcacaggctgctcaagaagccgagatcaatgccagaaaag

SEQ ID NO: 380863 - DNA, 80 bp, Homo sapiens
caggaggagagcccacaggtgctaaagagagcagtaccctgatggagtcccttgcagtggtctggagccgaaccggcaat

SEQ ID NO: 380864 - DNA, 101 bp, Homo sapiens
ggcggatgccctgcagtacctgcagaaggtctctggagacatcttcagcagggagaaacaaaggcagcgctgccctcgggggagcattggccctggcggaa

SEQ ID NO: 380865 - DNA, 50 bp, Homo sapiens
ttcttgggcacgttcatcttgattggacagtatgatttggtgaaatgcct

SEQ ID NO: 380866 - DNA, 74 bp, Homo sapiens
gagcgccctgagagaacagggtggccgcttggtccaggtgttgacttcaaaatcaaaactgtagagctaagagg

SEQ ID NO: 380867 - DNA, 83 bp, Homo sapiens
ttgagcgccaccctgtggacatcagcgccatccccgagcagcggtggaagctggaacgccacagaagtatgatcccactttca

SEQ ID NO: 380868 - DNA, 98 bp, Homo sapiens
tcttggataaacatggacatctaaaattagcagattttggcacgtgtatgaagatggatgaaaatggttgttgagccgaatctccaagatgaaagtga

SEQ ID NO: 380869 - DNA, 80 bp, Homo sapiens
ctgctgtttggtgactggaagaggcaccagagactctcactctggggaggtaattgctctagcagatgcagtggaggaaa

SEQ ID NO: 380870 - DNA, 114 bp, Homo sapiens
tggggaaaaagaagaagaaaacaaagggaccagatgctgccagcaaactgccactggaattcaaggaagccttctccctatttgataaagatggcgatggcaccatcacaacaa

SEQ ID NO: 380871 - DNA, 82 bp, Homo sapiens
gtgagaacgaggcacagggacccaccgagacaccaatgggctgtgggctgaggaagagtgcctggccctgcggggagcggag

SEQ ID NO: 380872 - DNA, 90 bp, Homo sapiens
tcaacaccagcaccgcagatgttgtcaaggtggcctaccaggaggccaggggtgtcgccatgggtcttgctacgtacgttgcccaggttg

SEQ ID NO: 380873 - DNA, 83 bp, Homo sapiens
aagctttggaagatgcagatgagaaggttcagttggcaaaccagatatatgacttgtagagacggggcttcatcaggttggcc

SEQ ID NO: 380874 - DNA, 100 bp, Homo sapiens
aggagagcgaagtcaaggccctgtgcgctaaggccagctggagcagctaaggagagatcacagatgaattctcaaactgaagatcatgccttggcacctg

SEQ ID NO: 380875 - DNA, 97 bp, Homo sapiens
acaacaagtgcttcaggaggcatatcgggtgctgaaggtccggcaggttcggctattccaggacgaggagatctacagcgacctgtacctgaccgta

SEQ ID NO: 380876 - DNA, 82 bp, Homo sapiens
gaactaagcagggcggtcgggggtgaaagaacttgtcctggacaacagtcggtcgaatgaaggcaaactcgaaggcctcaca

SEQ ID NO: 380877 - DNA, 90 bp, Homo sapiens
agagagcaagtctgctcatgtgcagactcagactggccaaaattcaatccctgctttagctcaggataaaagaatcagagtgtctcaacc

SEQ ID NO: 380878 - DNA, 100 bp, Homo sapiens
agagatcagtcattacaatagcaacttctgttgataagttggccggttgttatgacaatggaaaacactatcagataaatcaacagtgggagcggaccta

SEQ ID NO: 380879 - DNA, 98 bp, Homo sapiens
gataaaagcggaagtttgccacacggagggagctctgacagcctttcgcaagacatatgacaaaactgtggccctgggtcaccgattggatattgtat

SEQ ID NO: 380880 - DNA, 90 bp, Homo sapiens
cttcgatgatcgtgtgtcggatgaggagaaggaggccactgtctgcagctcccgtgaagatgtccactccagacccacccctgggcggaa

SEQ ID NO: 380881 - DNA, 117 bp, Homo sapiens
atgaccttccagaattacgggcaagcgctgttcaaacccatgaagccaccagcccctcgggttccaagatgcagctactggagacagagttctcacacaccgtgggcgagctcatcg

SEQ ID NO: 380882 - DNA, 96 bp, Homo sapiens
ttcttgccaatcctgaatctgcaacaactttcaaggacaacactcgcatctcctcagccgggtgcctaggggaactgtgtgcctttttgactgaag

SEQ ID NO: 380883 - DNA, 96 bp, Homo sapiens
ggcgaactggaaggccacgcctcctcccgcctgccccctcagccctgtggctgggggcagagctcagctctacattaatcatactcctccaccact

SEQ ID NO: 380884 - DNA, 111 bp, Homo sapiens
gggctcagagcaaggatgcgtgaaattgtccatattcagattggccagtgtggcaaccagatcggagccaaggttcaattcccatgaaagtgcagcacatgcaattgtttc

SEQ ID NO: 380885 - DNA, 98 bp, Homo sapiens
cgcagaggcggcggtggcgagaggtgcggcgaaggaggcagaggcacttatgcttgtcaggtgaaaggtgtagcagtcactcggcctacacccacagc

SEQ ID NO: 380886 - DNA, 100 bp, Homo sapiens
ttcctgaggcctccccagccacgctttctgtacagcctgcagaactgaatatgctgaatttcagtatcggaggaggcacagacaacgtcgtcgaggagat

SEQ ID NO: 380887 - DNA, 83 bp, Homo sapiens
ttcaagccaagctgaccaagaagccaaagaactggctaggcaaataagctttaagcttacaggacaaattgcagaaaatcttg

SEQ ID NO: 380888 - DNA, 75 bp, Homo sapiens
gccggaggtcaccaagctcatgaagttcatgtattttcagatgtgtcaccagcagttggtcatctcttggttttc

SEQ ID NO: 380889 - DNA, 100 bp, Homo sapiens
cggagcggagcacagtccgccgagcacaagctccagcatcccgtcaggggttgcaggtgtgtgggaggttgcagtattttacagagctagcccaaggcac

SEQ ID NO: 380890 - DNA, 83 bp, Homo sapiens
cgaagcggatttccgattgaatgggtgagaactctgtctcagtcgacgggaagtgcagtgactccacgctactgagcaacttg

SEQ ID NO: 380891 - DNA, 75 bp, Homo sapiens
tttgagagagtatttcgggcacaattgccacggcagtgaagtttctacagaattcccgggtccgccagagcccac

SEQ ID NO: 380892 - DNA, 98 bp, Homo sapiens
acacacttcacctgagccacctgaacagatttcctgcccggggccctcatggacggttggatcagggccgaaggtcgaaacttcagagaaatgaaaat

SEQ ID NO: 380893 - DNA, 83 bp, Homo sapiens
ctgataggctgcgctaccggaatgtcatccagcgagtgattaggacagtactgcttttaaagagacagtgttagggatcttgg

SEQ ID NO: 380894 - DNA, 100 bp, Homo sapiens
tgtcgccgagtggggctggaaacagacccggcgcccagcggtagccctccttgcgcctccgattcccagtgtttgatgaatacaaaaggatatcacagaa

SEQ ID NO: 380895 - DNA, 100 bp, Homo sapiens
gcgaagatctgttttcaccaccatttttccggttggatttggtctagggagtcccagaaagaagtagaaaaagagagagaagcctaccgtcggagaactg

SEQ ID NO: 380896 - DNA, 51 bp, Homo sapiens
atccagcctgcggagcctgtggggcagggggtccactggacggggcctgag

SEQ ID NO: 380897 - DNA, 100 bp, Homo sapiens
ggctgccgctcctctgcgccgtgctcgccctcgtcctcgccccggccggcgcttttcgcaacggaattgaatgatctggcacgggaccctccagcacagt

SEQ ID NO: 380898 - DNA, 90 bp, Homo sapiens
gacagatgcgaggcggcggtcaggaatggtggttccttctaagaccaaaattgtgtgccacttttctactcttgtattgacctgtgggca

SEQ ID NO: 380899 - DNA, 95 bp, Homo sapiens
tcttcgacctcagttacttcatcgtctccatcctctacctcaagtatgagccagagacggggtctgactgtgttacccaggctggtcttcaactc

SEQ ID NO: 380900 - DNA, 50 bp, Homo sapiens
catcacataccgcggctccatcacccacgatggcgtcgtgcgggcagggc

SEQ ID NO: 380901 - DNA, 83 bp, Homo sapiens
cggcttgaggctccagtcaaaaaccattaaggctttatcctgtggataaacgcagagtgaacgagtttggggagtcctacgag

SEQ ID NO: 380902 - DNA, 75 bp, Homo sapiens
gcgctgcctgctctacgccctcaatctgctcttttggaatgtgaaagatgttgcagaagtgttccagaagtggct

SEQ ID NO: 380903 - DNA, 101 bp, Homo sapiens
tgctccgttgagagacgcggctttcggcaagaactggattcgtggcgccacaagctcattcactgtgtagaattaaggaagttcactggagtaaaatggag

SEQ ID NO: 380904 - DNA, 100 bp, Homo sapiens
ccttgagctccaggagttcgtctcttacgtctgcggaagtgcagctgcctcagttcttagcgcagttatacatgggaagctgttgataccaaaaataatg

SEQ ID NO: 380905 - DNA, 97 bp, Homo sapiens
cccggccgaggcggtgctgcaagagaaggcactcaagtttatgagtattgggaaagggtcgttgtggtgcatagacccagagtatagacaaaatcta

SEQ ID NO: 380906 - DNA, 100 bp, Homo sapiens
gtaaagtcccagatacactcaggaagtgtttctcagagcactattcctgatcagagaactccagttgcttcaacacacagtatcagtagtgcagccaccc

SEQ ID NO: 380907 - DNA, 74 bp, Homo sapiens
gctgctgtgcacaggaatatgggcaatgatagtaagaaatgctaaagatacagctcatacaaaagcagaacgga

SEQ ID NO: 380908 - DNA, 80 bp, Homo sapiens
accttatcagtgcaggagaggattgtgtctgcttggtgtggagccatgaagcagcctcccgcgacgatgcccctcaacgt

SEQ ID NO: 380909 - DNA, 50 bp, Homo sapiens
ctcctctatgctggacatcaaatttccagaccaaactgcagctggaatac

SEQ ID NO: 380910 - DNA, 100 bp, Homo sapiens
gagtattttagtacctttggagaagttcttatggtgcagaatctctttggcagtaacagtcttgatggaggaagcagccctatgatcaagcccaaaggag

SEQ ID NO: 380911 - DNA, 97 bp, Homo sapiens
ggaacttgcagaaatcacattggaccctcctcccaactgtagccattgctgtgaattacgtgagggaaagatattgaagaggagttggacactccga

SEQ ID NO: 380912 - DNA, 114 bp, Homo sapiens
ctggtaatgtgtccattcgagggcggatcctctctggagccgtgccgctcttggccaccgaaagcgtcaagcaagaagaagctggagtacggccttctgcaggaaacgtctcca

SEQ ID NO: 380913 - DNA, 82 bp, Homo sapiens
gctagctacacacacgccctcacgcccggcgagcccgcgagaggctgaggggatctggcggtggagcgctaggatcagacgc

SEQ ID NO: 380914 - DNA, 75 bp, Homo sapiens
ccttgtggagaagaccccggcgctggtgaacggtgctggagaatctggtaaaagcaccattgtgaagcagatgag

SEQ ID NO: 380915 - DNA, 75 bp, Homo sapiens
aaagaatttgagcctctgctgaattggatgaaagataaagcccttaaggacaagttttctggatatgccgcagaa

SEQ ID NO: 380916 - DNA, 75 bp, Homo sapiens
tccgccccccaggaggggcgagagggagccgcagctgatgtcagactaaatgtgttaaatgggcttgccaacaat

SEQ ID NO: 380917 - DNA, 75 bp, Homo sapiens
aactcgctgctgctgaaagcgcgtcaagtgttctaagaacggaagcatctgggctggatggaatttagcatcaag

SEQ ID NO: 380918 - DNA, 74 bp, Homo sapiens
ggcagaggcacttatgcttgtcagctttctaaaaccaatttttccaacaacaacgatttccgtgctcttctgca

SEQ ID NO: 380919 - DNA, 83 bp, Homo sapiens
ggaggagctgtgcagccgcgaggaggcgcgggaggtgttcgagaacgaccccgagacgcactccttgctcaagacccctcccc

SEQ ID NO: 380920 - DNA, 100 bp, Homo sapiens
aagaatggcccttgtggataagcacaaagtcaagagacagcgattggacagaatttgtgaagtgccgtggaggtcccagcccccgctgcggttctcggag

SEQ ID NO: 380921 - DNA, 83 bp, Homo sapiens
aaaaagaagaaaatgaaggaaagcgaggctgacagcgagaaagtgactgagaccgaagatgatagtgatagtgacagcgatga

SEQ ID NO: 380922 - DNA, 75 bp, Homo sapiens
gagctaattggagatggtttcacagcacgcagtggcttcgggagggtgctcgagaggaagacctcgatgctgtgg

SEQ ID NO: 380923 - DNA, 51 bp, Homo sapiens
caagtagacgcctgccgcaagggtggcaccttgacgaggtctttttagagc

SEQ ID NO: 380924 - DNA, 76 bp, Homo sapiens
agctgccctttccgtttccagggttccgaccagtctgaagatgatgagaaactgaaaaagaggaaggagcgatttg

SEQ ID NO: 380925 - DNA, 96 bp, Homo sapiens
aagaaggtctggttagaccccaatgagaccaatgaaatcgccaatgccaactcccgggctgcttgctctcggtgactacatgaatgtccagtgcca

SEQ ID NO: 380926 - DNA, 82 bp, Homo sapiens
cctgagacaaccacttctggtggttgccactcacctgaggatctgcctgtggaggaaccgattgtgtccacagatgaggtca

SEQ ID NO: 380927 - DNA, 112 bp, Homo sapiens
ccgcgcgcagggcctgcagcgggagctggacggcgagcgcgagcggcgcgagaaagttattcagcttctcaaggctggaaaagcgaaggaagtttcctacaatgcactagcc

SEQ ID NO: 380928 - DNA, 97 bp, Homo sapiens
gatgtcttcagccagtataaaaacacagctcgacagtacgcctacttctataaagtcatccaggagttattcctgatgaagctaaagctttgtctct

SEQ ID NO: 380929 - DNA, 98 bp, Homo sapiens
ctgcgcccacaatcccacgggagtggacccgcgtccggaacagtggaaggaaatagcaacagtggtgaaggacatggatttgattgacatactttgga

SEQ ID NO: 380930 - DNA, 97 bp, Homo sapiens
cagcgaagtggtgaaagagcatcagaatgttgtaccatctttgggtaggcagacttccctgacgacatcagtgatacccaaagctgagcagagcgtg

SEQ ID NO: 380931 - DNA, 82 bp, Homo sapiens
gcctcgttgcggccatcgccctgccggaccgcgcctcaggctcccccaggatttttagactctgaggagcagttggagctaa

SEQ ID NO: 380932 - DNA, 82 bp, Homo sapiens
tccgcgagccccgcactctctcgatgagtcggagaagtcccgtgtggatgaggtcaccattgtcaacattttgaccaaccgc

SEQ ID NO: 380933 - DNA, 100 bp, Homo sapiens
ttccagagaagagaagctttactggtgttccagccctaagggtacccagtgtgttgaacaaattcaagagttggttctacgcttctgtgagaagaactgt

SEQ ID NO: 380934 - DNA, 100 bp, Homo sapiens
ggttttggcgtggcggacagtatgagaatttcagggtgcagtatacagaaacagagccgtatcataattaccgagcatccgtgtacaagatttgcagaga

SEQ ID NO: 380935 - DNA, 82 bp, Homo sapiens
cgccggcccgcgggtctacttcctcaaaggtttacccaaggtccagcctagcccctaggcaccatgtcggacagtgatctag

SEQ ID NO: 380936 - DNA, 98 bp, Homo sapiens
ggaagttttatttgcagctcggagcctgtggcggatggtgggactctccggccctgtgcagtgcacaacggtgtgtcctccctgtgacaacgagttga

SEQ ID NO: 380937 - DNA, 100 bp, Homo sapiens
ctcctcctgttcctatgtggaactccccaggctgcagataagtatgctgtgcgcttcatccctcgggagaatggcgtttacctgattgacgtcaagttca

SEQ ID NO: 380938 - DNA, 98 bp, Homo sapiens
aacacccacggagcagggtcgaccaagaactgtgaagagaggagttgagaacatctctgttgacattcattgtgattttccgcagatttccagtggcc

SEQ ID NO: 380939 - DNA, 98 bp, Homo sapiens
tcacactgccctgccaccaaaagattcaggttgcagttacttaactgtcctttttgaagaaggtctcatacagagtctaaactatcctgaaaactaca

SEQ ID NO: 380940 - DNA, 98 bp, Homo sapiens
ctgcaggaggagaaccgcgacctgcgcaaagccagcgtgaccatcatgggatacacaccactgcatgtgggctgccactatggaaatatcaagattgt

SEQ ID NO: 380941 - DNA, 130 bp, Homo sapiens
ggaatctgagacaagctgttatgttgcctgagggagaggatctcaatgaatggattgctgtgaacaaaatgaagctgttgtcatttctggaaggaaactggcccagcagatcaagcaggaagtgcggcag

SEQ ID NO: 380942 - DNA, 83 bp, Homo sapiens
cttttttccttcctaggagaaatcgaggagctgcggctctaccccccggactttaatgaagcaccagttgagattcccagtcc

SEQ ID NO: 380943 - DNA, 75 bp, Homo sapiens
agactatgtagtattgatgaaaagagggactgccataacattcccaaaggtaacagcatcagagaagacaaaggg

SEQ ID NO: 380944 - DNA, 110 bp, Homo sapiens
cccagcccccagaaaggattgtgacatatcgttggacccagaattgagggcccagacagaagagaagagtcacatcatctagatgatgaatgaaaagatatgtcattatt

SEQ ID NO: 380945 - DNA, 83 bp, Homo sapiens
cgaaagctttcctaggccaaaaagaggtgctcctgatccaacagcaggtgctagtatagatgatgaaaactgctggcacttag

SEQ ID NO: 380946 - DNA, 87 bp, Homo sapiens
agtgggaaaaatggaccaacttctttggcaagtggacattttactggctcaaagatttacaaacgaggaccacctggcagttcataa

SEQ ID NO: 380947 - DNA, 75 bp, Homo sapiens
caggaaggaggtggaggggctgcggagacagagccctccggccagcggggagacaatgcagatcttcgtgaagac

SEQ ID NO: 380948 - DNA, 90 bp, Homo sapiens
acggagtggaacacaccatccaggacattgcacccaactatgaacagaagtgtgtcccggccagtggagaactctccccggagctccagg

SEQ ID NO: 380949 - DNA, 75 bp, Homo sapiens
cctggccattgcgagcggcatctacctactggccctgtctctgcccctggtggtcatcgtccatggcaaccaaga

SEQ ID NO: 380950 - DNA, 73 bp, Homo sapiens
agaaacctgtcaggaatacgagcttctggagcgggcagagaagatgggccagaatctcaaccgtattccatac

SEQ ID NO: 380951 - DNA, 95 bp, Homo sapiens
attttcctgtaatatatctgtatcatcggagattgctcatttagaaagtggatgtgtgggataacatgtccaatgtgtccgaggagagaagaaaa

SEQ ID NO: 380952 - DNA, 100 bp, Homo sapiens
cagaggcgagccctggtggaggaagaggtgtcctgtcagaagaacagatccgcctgaagaaactgaagcggcaagaggaggaacaggctcatgccacatc

SEQ ID NO: 380953 - DNA, 97 bp, Homo sapiens
ctgaagcgcaggctgcggggcgcggagtcgggaggaactgtggaaggtgcatcagtgaagaaatggaccaatgtgtataatcatggaatctccttgc

SEQ ID NO: 380954 - DNA, 82 bp, Homo sapiens
cgagcttgagagaattctgaacaggatgatggtggtgctaccccagtacaggatgaacgggattcagggtcagacggtgagg

SEQ ID NO: 380955 - DNA, 75 bp, Homo sapiens
aggagaagttagcttcagagttctttgtggatggacttgattctgatgagaggtgtttttcatgcaccatctcac

SEQ ID NO: 380956 - DNA, 115 bp, Homo sapiens
cagcctgaaagaagaaaactttcagctttggctttgctctctcttctgccatctgataatagggacttgccatgaggtgttgaagccttgtttcactgagttggagagactggac

SEQ ID NO: 380957 - DNA, 90 bp, Homo sapiens
gatgaaggagccagtttggctgaaaataaaaggctccagcaggaggaaatggtgcagaaaatgttgctgctgatcagcctgctaacccac

SEQ ID NO: 380958 - DNA, 50 bp, Homo sapiens
gagcgactaactcctgcgcccctgaggccaccagctgaacaggccaaagc

SEQ ID NO: 380959 - DNA, 50 bp, Homo sapiens
gtcggcggcgcccggatgggcagctgaggcaagaaattatagagcagctt

SEQ ID NO: 380960 - DNA, 90 bp, Homo sapiens
ggggcaccagcaggatgtactattctcggcgcggcgtgatcaccgaccagaactcggacggctactgttccagtctcatcagattttcca

SEQ ID NO: 380961 - DNA, 98 bp, Homo sapiens
gatctggaccccgctgagaggaactgcttttgagtgagatggtcccagaggcctggaggagcggactggcgcggatcaagaagatcatgcagacggac

SEQ ID NO: 380962 - DNA, 100 bp, Homo sapiens
ctgccctgatgattcagacgagtctttagatacctgccaaccgagcgataagtaccgttgagtttgtgacagctgctgttggtgtcttctcattcctggg

SEQ ID NO: 380963 - DNA, 75 bp, Homo sapiens
ttggatatcttcggggacctgaagaagatgaacaagcgccagtgcccatgacgcttccggagacaaccctggaaa

SEQ ID NO: 380964 - DNA, 100 bp, Homo sapiens
aaaaatgtctgtcacatatgatgattccgttggagtagaagtgtccagcgacagcttctgggaggttgatggacggatggctacatggatgtgatggaga

SEQ ID NO: 380965 - DNA, 88 bp, Homo sapiens
ggagccaccaagagtccttttataccacggacggggaggtttactgcatcgacgcgcggttctacgggaacgtcagccggttcatcaa

SEQ ID NO: 380966 - DNA, 90 bp, Homo sapiens
ccaattccggacacataacaagcagcagtgaggacaccaaaggaaaatatatgcagatgatgaacattcttaagccaattgcctttgatg

SEQ ID NO: 380967 - DNA, 100 bp, Homo sapiens
caatacatgctgatctctgccagctatatgttctcctttcagccaagacctttcaccagtgcaggggatagaagattcattccacaaacttatactgaaa

SEQ ID NO: 380968 - DNA, 98 bp, Homo sapiens
cctccactggcccaggcatggaacccgagaccacagccaccactattctagcatccgtgaaggagcagaataacaagcctttgtattcatttgaagat

SEQ ID NO: 380969 - DNA, 75 bp, Homo sapiens
ttggttaaaacctgacacttttaacaggtgttggagcgggccggagagaagtagagtgggctgcgaggagaagga

SEQ ID NO: 380970 - DNA, 75 bp, Homo sapiens
gcggcaccggatcaccaagacggagctgaacatccatgtgggaaacatttccctggtggaccagtttgagtggga

SEQ ID NO: 380971 - DNA, 140 bp, Homo sapiens
cgaggcggtgcgggccgtgcagagcagcacctccatcaggtacaacctcgaggagctctaccaggtcacggagctgctggacgtctccatggagctgggctgtttcctggctggagcgctcgtctcctctcagggccccg

SEQ ID NO: 380972 - DNA, 108 bp, Homo sapiens
cttccttggtggcttggaataagctataagggaattggccaatatgatatacaagacaaggtgaagcctcggaaggatgacaatctaatggatgtcctacagctgctt

SEQ ID NO: 380973 - DNA, 106 bp, Homo sapiens
gtgggctctggaacaacacggtgttcatcttttctacaggcagagatcctacaagaatccaggatgatgatcccagattgccagcgcaggttggaagccgcatatt

SEQ ID NO: 380974 - DNA, 93 bp, Homo sapiens
ccggagaagcgcgcgggcgcgcaggccgcggggagcacctggtttaaggaagaaatctctaaacgttttaaatcacatactgaccaacttgtg

SEQ ID NO: 380975 - DNA, 51 bp, Homo sapiens
ctgagctgcgaggaaaatggcggcgggagcttcaccagcctccaccaagac

SEQ ID NO: 380976 - DNA, 101 bp, Homo sapiens
gtggaggcgtgcacatctgctcttcttgcccattacctgctgggtttaccatggcaatggggatttatactgggaaatgcactcggtgatggaaagagagc

SEQ ID NO: 380977 - DNA, 50 bp, Homo sapiens
cgacctgctaacagaactggaccttttcgctctggaaaggaagagaaatg

SEQ ID NO: 380978 - DNA, 75 bp, Homo sapiens
gcacctggccaagatctacgccatgcactggggcacagactccaggaggaagaacgtgcaaaacgtgaggagcta

SEQ ID NO: 380979 - DNA, 98 bp, Homo sapiens
gggcgttcatctaccacgcctacgtggcgtctctggccgagcctctttttgtggaaaacgacagcagcagcagtggcctggaagacgccaccgctaac

SEQ ID NO: 380980 - DNA, 74 bp, Homo sapiens
gttcctacagagattcatatgagagttatgagccaatggccaaaggccctgccaagaattcagaaccagaggag

SEQ ID NO: 380981 - DNA, 83 bp, Homo sapiens
cggtggtgctggtggcggcggcgctttcggcgcgggcccgggccccgagcgcccgaacagatgcagagaggtgttcataaaga

SEQ ID NO: 380982 - DNA, 90 bp, Homo sapiens
gtgccccgctttgttccaaaggaaaggaagaaaaccaaatgcatgagtgcgctgtcaatgccgtattattccacagtaatggaacagcaa

SEQ ID NO: 380983 - DNA, 82 bp, Homo sapiens
cagacggattcatttagagctgcggaacaggacgccctctgatgaatgtatcctgtcaggtataatgtcagtgaatggcaag

SEQ ID NO: 380984 - DNA, 96 bp, Homo sapiens
cagctctctgggttctgccgttcccttttggggccccctttcccatggaaaagtacccagatgccgtgtacctctcggaggggccctcctcctgct

SEQ ID NO: 380985 - DNA, 75 bp, Homo sapiens
ccaagatgtcggagacacggtggaaacgcttatgaacaagttgaaatcatcgcagaaggataaagttcgtcagtt

SEQ ID NO: 380986 - DNA, 100 bp, Homo sapiens
gttctcatcaagggttctcgggaatcttaaaagaaagatttggagtctctctacctttggtcttctccatacttttgtcagtgaacatgctcggcagtcc

SEQ ID NO: 380987 - DNA, 51 bp, Homo sapiens
gacagcggaagctggaggagtgacagtctccatctgctgctgcctcttcat

SEQ ID NO: 380988 - DNA, 75 bp, Homo sapiens
gagcgaaatatcccgacagggttccggtggctgtgaaaaacaatatcgatgtcttctacttcagctgcctcatcc

SEQ ID NO: 380989 - DNA, 100 bp, Homo sapiens
ctgaaatccactattgatctgacctgcaatgattatatttcggtttttgaatttgacatctttacccgactctttcaggagtctgagactctatccatgt

SEQ ID NO: 380990 - DNA, 83 bp, Homo sapiens
tcgttttcgagatcaggcctgaccgggataagctccagccccttcatgaataagttttttccagccagctttccaaatcgaca

SEQ ID NO: 380991 - DNA, 100 bp, Homo sapiens
cggcaggaaccgggaccgccagcgcaggaggtctgccatcatggatgttctcgcagaagcaaatggcacctttgccttaaaccttttgaaaacgctgggt

SEQ ID NO: 380992 - DNA, 97 bp, Homo sapiens
ccggaaggaggaaaaggaacgggagggaggaagagtgcggcggcagcacatggagcgttgtaccagcttcctggtggatgagctgggcgtggtggat

SEQ ID NO: 380993 - DNA, 90 bp, Homo sapiens
tgataaactggatcctgatatggctctttgccgaaatgctagagaaatgccgtgttgaaatccttgtctcctgtagacccagtggaaccc

SEQ ID NO: 380994 - DNA, 120 bp, Homo sapiens
gacagcgacggctacgccgaagcactcgttccgggggtgaagcctcctgcgccggccttgcctcggattgctatgctatgccttgtatgactaagacctcttaccaagaatacgtgtcag

SEQ ID NO: 380995 - DNA, 75 bp, Homo sapiens
ctcacttttacctgtttggattaatatgtctctgttcagtttgaaggatgacctctaggaagaaagtgttgctga

SEQ ID NO: 380996 - DNA, 74 bp, Homo sapiens
atttgctcccattactctgatcgctccgttaggctgtgtgtctgttacaggtctgctgagaacagacccagtcc

SEQ ID NO: 380997 - DNA, 50 bp, Homo sapiens
gtgaggcttccccagccacgtggaactctatccaacttgataaagtcaat

SEQ ID NO: 380998 - DNA, 100 bp, Homo sapiens
ggacaagctcagatacctcaacagcagccgtgccagcaccgatgagccccccgcagacacccaggccccgagcattcctctgattcagaatacactctct

SEQ ID NO: 380999 - DNA, 100 bp, Homo sapiens
gcagagcccgcctgcccggctctgttctaaagaaatccaaatggcagttctgctgaaatttgtttcagaaggggacaacatcccagatgcattaggtctt

SEQ ID NO: 381000 - DNA, 101 bp, Homo sapiens
cctcctcctcctccccaccaccaccatctccatcacccaccaacaacaccacaataatccacagccaagcctacagacctggtacctggatttttgcccga

SEQ ID NO: 381001 - DNA, 96 bp, Homo sapiens
gtgacctggaggacgaacgtgttgtgcctgctgaggatggccggaggctcgccgacgaccttggccagtacacaacaggccggggctcctcaggag

SEQ ID NO: 381002 - DNA, 82 bp, Homo sapiens
aaaagaacagtagctcttctcacagaaaagaaagctgacgtggagaagattgatcagggaccatgaaaagaaacttgtgctt

SEQ ID NO: 381003 - DNA, 74 bp, Homo sapiens
ttgtgttcgtggccacgctgctgatcgtcctgctgctgatggtgtgcgaaaatccatcctctcagtattggaag

SEQ ID NO: 381004 - DNA, 100 bp, Homo sapiens
gacaagcacacactatggcgctgaaacggattaataaggtgaggaattttaaattggaacaagagcaagaaaaaaacaaaatcttgtcagaagcactgga

SEQ ID NO: 381005 - DNA, 80 bp, Homo sapiens
tggcgaaacgaggaggagataacgcggccttgggctctgagactaatagacaagtcacgagttacctgtgtcaaatgggt

SEQ ID NO: 381006 - DNA, 83 bp, Homo sapiens
caaccaggagattccctgggcctgcaggaagcccttccgcggaccgaaaggaacagcagcagtattggtatcgacagcacttg

SEQ ID NO: 381007 - DNA, 75 bp, Homo sapiens
cctggtctggccagagacctgctggaagattggccatctgcaagcttcccttctccgtggagagcaggaagacag

SEQ ID NO: 381008 - DNA, 100 bp, Homo sapiens
aatatcaagaggaggagttgttgctttttacctgcacctactcagctatctcaggaccagcttgaggctgaagaaaaggcaagatcccagagatcacggc

SEQ ID NO: 381009 - DNA, 82 bp, Homo sapiens
ctgggggattcgcagggaggatgtcgggacaccccggaagctgggaaatgcagttggaattgatcacaccttttcagttgta

SEQ ID NO: 381010 - DNA, 100 bp, Homo sapiens
cactgttggtgcggaagcttcgggagaagcggcagacggagggcacctaccggcccagtagcgaggagcagaaatcctaagtaatgcactgaagagagga

SEQ ID NO: 381011 - DNA, 87 bp, Homo sapiens
cccgaggaggtcttccgggaattctttgggagtggagacccttttgcagagctctttggccaatagcttcaccgtctcctctgtcgc

SEQ ID NO: 381012 - DNA, 103 bp, Homo sapiens
acgccgaagcactcgttccgggggtgaagcctcctgcgccggccttgcctcgggtatgtgtaatcctcgaaattatagtgacacacctccaacttcaaagagc

SEQ ID NO: 381013 - DNA, 100 bp, Homo sapiens
cgaggcccctatggcagatttgaaaattcacccttgtagagtcattcctgcctttgagcggactcccttttaaggagccgtgtaaagccagtggaatata

SEQ ID NO: 381014 - DNA, 100 bp, Homo sapiens
ccctgagcctcctgcaacacctgcggcctcactgggacccccaggaggtgaccctgcagctttaatgaagcaccagttgagattcccagtccttctgaaa

SEQ ID NO: 381015 - DNA, 98 bp, Homo sapiens
tgattggtggtcgcttggggtgatcatgtatgagatgctcatcgactatggaaatgatgttagacaaaaagcaaattcaagcgattttcttattcgag

SEQ ID NO: 381016 - DNA, 100 bp, Homo sapiens
cgccactgtgacttgcagtcatcatccattaccacaaaattaggtaatgagggatcctgcaagcaaaagatcaagaggatttggttttgtaactttttca

SEQ ID NO: 381017 - DNA, 100 bp, Homo sapiens
gttcattcagaggaagtttccataccctttgcagtggagcctcctagtggccgtggggaattcctgggagccccgagccggaacacggttctgtccagga

SEQ ID NO: 381018 - DNA, 80 bp, Homo sapiens
acacactggaaacaaacagtatttctactggaaaaaccattttcagttaaagcagatgaacatgctgatgaggctgcagg

SEQ ID NO: 381019 - DNA, 100 bp, Homo sapiens
actcagctcaaatacacacacctgttgccattatagagctggaattaggcaaatatggacagaaacaccgtgctggacagccagcgtcaacaaaagcatt

SEQ ID NO: 381020 - DNA, 100 bp, Homo sapiens
ctccggaagcctcttggcgtcactcgcattgctcctctgctgactcccgaagataaccagttcaggatgtccatcctggaacgactggagcagatggaga

SEQ ID NO: 381021 - DNA, 100 bp, Homo sapiens
ctggtcaaggggaatcaagacgacaagaacccggggactttgtgaagcaggacattggcgggtcttccccaggcaacaaagacaaggaggccccctgctc

SEQ ID NO: 381022 - DNA, 100 bp, Homo sapiens
ggaggaggtggcaggcctcggcgataaagtggagaattttcatgaagaacatgaaaagaatagtcaccatattcacaaaaatgctgatgacagtactaag

SEQ ID NO: 381023 - DNA, 82 bp, Homo sapiens
ccgagtcaacaaccgcttcgagctggcttgggcactgtttaaaggaaagttccgagaaggcatcgacaagccggaccctccc

SEQ ID NO: 381024 - DNA, 83 bp, Homo sapiens
gcgcagctccggccgcctggctccccatactagtcgccggagaatggtgttgaacgcgtgtgtcctgagagcctgctgcagtc

SEQ ID NO: 381025 - DNA, 101 bp, Homo sapiens
ctccagatgccaacattgacctcacaaccgagcaaattgaagagacgttaaaatacttccgtttcctatgttattcgagatgaagtggagaagtacaaccg

SEQ ID NO: 381026 - DNA, 122 bp, Homo sapiens
tggcagaagttgactgagatcagaggccctgtgatgatcgtgtcagtgggttgtcttctggcctcagagtatcccttatcagaaccttgggcccctgggccccttcactcagtacttggtgg

SEQ ID NO: 381027 - DNA, 90 bp, Homo sapiens
cggccgggactctgaactatggcggctgtaacagaagacaagtacgaaatactgcaatctgtcgacgatgctgcgattgtgataaaaaac

SEQ ID NO: 381028 - DNA, 90 bp, Homo sapiens
gacaggagtatctgaggatggagaactcagcactagaaaccagtgcctgaaagaaactccaattaaaataccagtaaattcaacaggaac

SEQ ID NO: 381029 - DNA, 75 bp, Homo sapiens
aattatccattgtacaccttcaacagacttaattcagtgcacaaatgagatgaatgtgaacatcccacagttggc

SEQ ID NO: 381030 - DNA, 75 bp, Homo sapiens
ccagtatgcatctcaagatgtgaataactgaagtgaagtgatggactccgatttggagagtagtaagacgtgaaa

SEQ ID NO: 381031 - DNA, 98 bp, Homo sapiens
cagccttcccagtagctgggaccacagtattcccacgagcattctgctgagatgaacaatcagatgacctcgtgtgagatttggaggagagaaggaaa

SEQ ID NO: 381032 - DNA, 90 bp, Homo sapiens
cgggagaaggagcgggagaaggagaaggggaagcccaagccccgctccccgcagccgccaaggaacaggcctttgagagcagccagaagt

SEQ ID NO: 381033 - DNA, 96 bp, Homo sapiens
aggctgtcctctggtgagaaggtggtgaggcttcccgtcatattccagcaacagggagctgccaccaccgtgtactgtgctgctgtcccagaactg

SEQ ID NO: 381034 - DNA, 100 bp, Homo sapiens
ctcggcctctgcctctggctgtggctgggcgccaccctgggaagagagcaagttcaaggtgctggcgggcgcagaggcctcccaggaggagagcaaggac

SEQ ID NO: 381035 - DNA, 82 bp, Homo sapiens
catgagtgatgtggaggaaaacaacttcgagggcagagagcggtggtgccccccccgggcacggggccatgtacaacgggat

SEQ ID NO: 381036 - DNA, 75 bp, Homo sapiens
ctccagcactggccacacattattcgaataggagaccttaaacctacaggtcacagggattatggacccagaaca

SEQ ID NO: 381037 - DNA, 83 bp, Homo sapiens
cttgctgaaaatcaacttcacggaggaagaatacaagcgattgagtgaagcactagcagaggatgggagctacaatgccgtgg

SEQ ID NO: 381038 - DNA, 100 bp, Homo sapiens
agaagcacaagatcatgcacagaggccagacggttttgctgtctcagcctactgtggtacaacttcaagcacctggagttctgccctctgctcagccagt

SEQ ID NO: 381039 - DNA, 100 bp, Homo sapiens
agtgtgaagattgctcctggagcagttgtatgtgtagaaagtgaaatcagaggagatgtaactatcgagcagcccgacggccatggaggctgaagagacg

SEQ ID NO: 381040 - DNA, 116 bp, Homo sapiens
cgccggggcccaggcccagggaccaggcggaggcgtcgcgggagcctttggggcaccacagagatgcggggaaatcctcattgacgattcaatttgttgaaggccaatttgtggac

SEQ ID NO: 381041 - DNA, 99 bp, Homo sapiens
ggggtccagccgtccccagaacgcagatcagaggtagtcggacctttcccgctggcgcgcagcctcagctaggcctgccgaggaggaactgaagacgaa

SEQ ID NO: 381042 - DNA, 100 bp, Homo sapiens
accagggaaccggccaggcggctcttcctttttggggtggagagattcaaccagttagcgtgaaagttggagataaagttcttctcccagaatatggagg

SEQ ID NO: 381043 - DNA, 102 bp, Homo sapiens
tagtggaactgaaaagatctcaaaatctggacttgaaaagaaactggcaagatgtttacctggggccgagcagactatggtcagctagggaggaagttggag

SEQ ID NO: 381044 - DNA, 100 bp, Homo sapiens
agaaaatggaacactgaagcggcagctggatgaagttgtgtcagaggctgggtggagaaggagacatactactgaccccattggaagaagaaccaggcat

SEQ ID NO: 381045 - DNA, 83 bp, Homo sapiens
atctacaccgacaactccatccggcccgaggagctgctgtgtccccatgaactcccttgtccccagttgaccaacctggcctg

SEQ ID NO: 381046 - DNA, 99 bp, Homo sapiens
tactgtgcttggctggaaaaccccaaaagtgtacataaggctccgagctctgtccagtggtgggagtattacatcccctcctctttctccagcattgcc

SEQ ID NO: 381047 - DNA, 75 bp, Homo sapiens
gtttattttcctcaccactgaatctacagcacatccgggcaacgtttgatcctgacacagggctgttgatggaga

SEQ ID NO: 381048 - DNA, 90 bp, Homo sapiens
cgtgtccagcgagcaaacgggcgccccggagccttgctgagaggcagatattctctaagccgctttcatcatgggagaaatagagcagag

SEQ ID NO: 381049 - DNA, 100 bp, Homo sapiens
gccgcctagcaaagactattaccagttactggtcacccggtctcagatttataagattggccagggctaccttatcaaggacggcaagctgatcaagaac

SEQ ID NO: 381050 - DNA, 87 bp, Homo sapiens
ttgaatatcgtaagcgcacgtttaaacatctcaaggccgtgacttggcgagcacgaccctccccgggtaccctccacacgtcccccc

SEQ ID NO: 381051 - DNA, 90 bp, Homo sapiens
cgaacttagacttccggaaggactttggcgaggaattcggttccctcaaaattataaaggcaggaaagctcaagacaaagaaatccaaca

SEQ ID NO: 381052 - DNA, 50 bp, Homo sapiens
caccggggagccggccttggacacggggccagtgtcattcaaagatgtgg

SEQ ID NO: 381053 - DNA, 76 bp, Homo sapiens
ttctaccatttgatgatgataatgtaatggctttatacaagaagattatggtacactgcatcagcacagaatttac

SEQ ID NO: 381054 - DNA, 101 bp, Homo sapiens
catggcgaggagtctctgtccgggggcctggctaaggaaaccctattacctccagctgtatgcaggagctattcttgaagtttgtggatgaaaattgggaa

SEQ ID NO: 381055 - DNA, 82 bp, Homo sapiens
tccggcgtgttcatgcccccgggttgcagagtgggcaggatcttaagacccgataggtgcagaacccatctggacacggaga

SEQ ID NO: 381056 - DNA, 75 bp, Homo sapiens
actggtggtcccccgctcccggggtccccggccggccaagcaggatcttttgccagaaatgagggcatactggcc

SEQ ID NO: 381057 - DNA, 88 bp, Homo sapiens
tagatacatggagcccatcagaatggcagatggcttatgaaccacagttgaagtatcagagaatcttggaacgattagaaaaggagaa

SEQ ID NO: 381058 - DNA, 100 bp, Homo sapiens
ttattgacacgtttgtagtggaggtcttatatccagatggccaggctcagatgattcaccccaagcctgcagacttccggaatcctggcccagggcggca

SEQ ID NO: 381059 - DNA, 90 bp, Homo sapiens
ctggaaaagccatggaagatacctctggggaacccgctgcagaggacgagggagacacacccagaaccagcttgtctacttcattcgcca

SEQ ID NO: 381060 - DNA, 74 bp, Homo sapiens
ccagatgttcctgtggaccccagtccagatgccgctcctacgaggactgctgtggctccaggtgctgtgtgcgg

SEQ ID NO: 381061 - DNA, 75 bp, Homo sapiens
agtagccgaaggggacgccgggaacaggtgcttttgaagatgatgatatcacgcacgttgaaggaagtgtagatc

SEQ ID NO: 381062 - DNA, 92 bp, Homo sapiens
gaggccttcccagccatgcagaactatgcggcattccaaaagaactcactgtcctgattgggatagcagagaaagctggggacatgaaagct

SEQ ID NO: 381063 - DNA, 100 bp, Homo sapiens
gcttcctcatgtatacttacttatctggccaagaattgttacctgtggatcagaaggcagtcctggtgacagatactgaacggctgtattcagtggtgtt

SEQ ID NO: 381064 - DNA, 97 bp, Homo sapiens
ctggaacgtgcccgtgggctacctggtggagagcggccgcctctcggtgatgggctgcgatgtactcaaaggaagtgtggaactggtctcaatcggt

SEQ ID NO: 381065 - DNA, 80 bp, Homo sapiens
aagcaggtgcttatgatggacctaggactgctgacgatcgtcaccggattgaggagaaacgtaaaaggacatatgagacc

SEQ ID NO: 381066 - DNA, 75 bp, Homo sapiens
acctgaaaggtctcctaaccgctgcagagagtgctttcttccagaggaaaaccaattctgtgtcctcggaggacc

SEQ ID NO: 381067 - DNA, 75 bp, Homo sapiens
caaagggaccacggtcaccgtctcctcagacccaacatgagtgaagtttcctgcaagaaacgggacgactatttg

SEQ ID NO: 381068 - DNA, 100 bp, Homo sapiens
ccgcccgctgcctgcctgcctggcatctctctctcccgggggccgaaggccagagaccaggatttggctacggaggcagagcgtccgactataaatcggc

SEQ ID NO: 381069 - DNA, 96 bp, Homo sapiens
tgctggacaacggcctgcgtgtggcctccgagcagtcctctcagcccacttgcacggaaggcagcctggaggaggtggccatggaggatagccttc

SEQ ID NO: 381070 - DNA, 98 bp, Homo sapiens
aggcggcgggatggaggcggcggccggagatctataaggacaggcagaaattctcagaacaggttttcaaagtggcctcctcagacctggtcaacatg

SEQ ID NO: 381071 - DNA, 126 bp, Homo sapiens
tgtaagaccaccaaatatcggaacccctccttgaagctgatggtgaatgtgtgcggacacactctgagagcacagaatggggattcaacacctcggcaatgcccttttagtgtgcgagcaaccacg

SEQ ID NO: 381072 - DNA, 99 bp, Homo sapiens
tttgtaaattgagctctgcacgctggggagtttgttgggagcccaatgacgaaagtggagctaacgtggatgcgtccaaaatgtggcgcgatgaccggg

SEQ ID NO: 381073 - DNA, 95 bp, Homo sapiens
gatggtgccgggggtcgctggctctgctgctgccgccggcgaaggaggaggcgttgccggtactgtaagattgatgttaaaggcatggtgttcac

SEQ ID NO: 381074 - DNA, 83 bp, Homo sapiens
agctgctcaaaaactgggaggatatgaaacaacaacgactgaaagacctttcattcagaagctgtttcgtcctgtggctgcag

SEQ ID NO: 381075 - DNA, 74 bp, Homo sapiens
cttgctgaagagactttccgttacatgaaccatacccttttgtgttattctactctaaatttcatgggctagaa

SEQ ID NO: 381076 - DNA, 100 bp, Homo sapiens
cagagttggtgagcagcgctctggggctcgccttgtatctcaacaccctgagtgcggatttctgctatgatgacagctgaaactagaggaccgttctgtg

SEQ ID NO: 381077 - DNA, 83 bp, Homo sapiens
gtgaacttcgggaaatcatgggaacaccagaatatttagggttcaactacacgaatggaccatgaaacagccagtgttttgag

SEQ ID NO: 381078 - DNA, 100 bp, Homo sapiens
acagcggggcggcggcggcggcggctgcggcccaatataggtttggaattcacccagttgcaggccgaatgcctggtcagcttaatgtgctgctggctga

SEQ ID NO: 381079 - DNA, 99 bp, Homo sapiens
gaccattgctctttgccagagaaattcacataatttgaaccagcagcaacgtgagcctgggcagaggagcagaataagttggtgcatggcggaccctgc

SEQ ID NO: 381080 - DNA, 101 bp, Homo sapiens
cttctgtgtggagctcagcggctacgacctgaaactctacgaggataaccagacacacgtatctcccatgcgccaagtggagcccccagccaagaagccag

SEQ ID NO: 381081 - DNA, 100 bp, Homo sapiens
ccccaggccgcctccgcccgtgaaggttatggtggagaattcagactttaccccctcacaagtaggatgtctctttaccttccttgctcggcagcttgca

SEQ ID NO: 381082 - DNA, 80 bp, Homo sapiens
tagaggcgttttttggccaagggaaactgaggcttcttgaagagcttgaagacacttggctcccttatctgacccccaaa

SEQ ID NO: 381083 - DNA, 96 bp, Homo sapiens
gaatggacagcaaattatggatgaacctatgggagaggaggagattaacccacaaactgacgccaggaaagcatgtgcagatgcaactctctctca

SEQ ID NO: 381084 - DNA, 120 bp, Homo sapiens
acctaccagaccgtgcctgattttcagagagtgcagattactggtgactatgcctctggggattcttacagaaaacaagtggttatagatggtgaaacctgtttgttggacatactggat

SEQ ID NO: 381085 - DNA, 100 bp, Homo sapiens
ctgggacgccgactttcgcgcaggcggcggcggcggcggcggcgggtccctgagctggaagccggagccagcaccgctctttgaccttgccatgcttgcc

SEQ ID NO: 381086 - DNA, 100 bp, Homo sapiens
gccaactttgtgacaactcatcagaacccacaatacattatatgcaccagaaatgctagccaaaatggcagagcctttcaccaaggctctggatatgctt

SEQ ID NO: 381087 - DNA, 100 bp, Homo sapiens
atgcaattactgagagacaacttgacaatttagatggtgctctactctcggggccagatggtgataggaatgtgaatgcaaatttattggctgaagctgg

SEQ ID NO: 381088 - DNA, 87 bp, Homo sapiens
gactatcagctgggattcactttaatttggaagaatgaaagggataaacagcacttccagggggagaaaaaaaatcatgttatcaga

SEQ ID NO: 381089 - DNA, 50 bp, Homo sapiens
gtgggcctctgagatatgccgtttacggggctgacgcgccactatgtagc

SEQ ID NO: 381090 - DNA, 99 bp, Homo sapiens
cagcatggatgggctggagacaacagaaacagaaacgattgtggaaacaggtgaaaattgatttgcaagtgaccatgcctcacagctacccctatgtag

SEQ ID NO: 381091 - DNA, 50 bp, Homo sapiens
tggaaagcagtttttaagacaagtggtctcggctgctcgtatcttactta

SEQ ID NO: 381092 - DNA, 74 bp, Homo sapiens
ggcggcgagagatggtcaggtctggagctcgaccgggccagctgcagaaccttggcctgaaaatgctacattat

SEQ ID NO: 381093 - DNA, 100 bp, Homo sapiens
tggagtatcgttctatttctctagctattgccttattttttctcatggatgttcttcttcgagtatttgtagaagggacgactgggtttggattcagaag

SEQ ID NO: 381094 - DNA, 99 bp, Homo sapiens
gtttgaatctcagagtgaagatgagttgacaccttttgacatgagcatccagaatcagatgggtgactcaaatatctccagccctgggttacagccaag

SEQ ID NO: 381095 - DNA, 100 bp, Homo sapiens
tgaattttttggcagcagaagggcgactgagtactcaacatattgactgtatttgggctgcagcacaggaccctgatgctcccataagacagaaaatgcc

SEQ ID NO: 381096 - DNA, 83 bp, Homo sapiens
ctgctgaccgcgggccctgccctgggctggaacgaccctgattcccactggaaattcgttgtatgaatcttattacaagcagg

SEQ ID NO: 381097 - DNA, 98 bp, Homo sapiens
cccttcggaccagtcatggagaggtcatctcagttccacacaagatcatcacccaccttcgaaaagaggtctggctacctgcagtaaaggctaaaggc

SEQ ID NO: 381098 - DNA, 100 bp, Homo sapiens
tgagagtgacctttgcatctgcctgtccagccagcatggaaccaaagcggatcagagagggctaccttgtgaagaagatggcaccgaaagcgaaggaagc

SEQ ID NO: 381099 - DNA, 100 bp, Homo sapiens
atcatcagacccaagtgccaagttatttactttcccatcaggtttcctgatgtgagcaggtagcacaggcggagtgcagcggaggcccctgccgctgccg

SEQ ID NO: 381100 - DNA, 100 bp, Homo sapiens
gaagatgaagaagattgtggatgccgtgatcaagtacaaggacagagctgctgcaaccattgacagcttagcaagccgaattgaggatcctcagatacag

SEQ ID NO: 381101 - DNA, 83 bp, Homo sapiens
gggacacgcggttcttctccagcgccctggcctccctcaccttggacacctcgcttggtgtactaatggtcacttgatgtgcg

SEQ ID NO: 381102 - DNA, 83 bp, Homo sapiens
ctgtcttcatctttacagaggaatagtctacaaaggaagacttgtaacctggagaagagaattagactttcttgtacctaagg

SEQ ID NO: 381103 - DNA, 100 bp, Homo sapiens
cgcgttgctatacagaatctttggatatgtgcatcagtggtttatgccaattgcctgctaataaagatgcctttcgaaagacatggaatcccaagtatac

SEQ ID NO: 381104 - DNA, 90 bp, Homo sapiens
tccaagttaacccttaccacccagcagcagggcatcaaggccagattacctgtccctaatactgagcagaagctggtgaatgaaacagga

SEQ ID NO: 381105 - DNA, 142 bp, Homo sapiens
ccgcggccgggatccggcccctcccctcgcctcctctcctaggtgccggccgggagggcggccgcagcaggtccttccaaccctcctgctaccatgaagattgcagtgattggacagagcctgtttggccaggaagtttact

SEQ ID NO: 381106 - DNA, 99 bp, Homo sapiens
gacgagaagcctgaaaagtcgcagcgagctggagccgccggaggtatccagctcacatagaagacattgactacgaggaaggaaaagtactcatccatt

SEQ ID NO: 381107 - DNA, 100 bp, Homo sapiens
ccggcagcggacagctcggacagcgcccagggccggagcccgagcccttggaggccatctggacccgcttctttcctgcctccgaggctctgaggtctgt

SEQ ID NO: 381108 - DNA, 80 bp, Homo sapiens
aagactaccaggctgcggaggagatgatgattattctccaccgtctaagagaccaaaggccaatgagctaccgcagccac

SEQ ID NO: 381109 - DNA, 75 bp, Homo sapiens
cagagtcatcgccggccaaccacttgagaatggaggtgttgtccaagttggagaattgttaccttgcaagatttg

SEQ ID NO: 381110 - DNA, 50 bp, Homo sapiens
tgctgaagggaaaagacaccatagagacggagtttcaccgtgttagccag

SEQ ID NO: 381111 - DNA, 99 bp, Homo sapiens
cccattcaccggcggctaccggcggcggcgcgcagcgtgtcaggcggagagacccgccgccaggaatgaccatacctgaagaagacgctgatgtgggac

SEQ ID NO: 381112 - DNA, 100 bp, Homo sapiens
ggcgatgatgccacattacctttggcagatatccctgttacaatctgtacatatccatttgtatttgatgcccaagcaaaaactactctgttacagaccg

SEQ ID NO: 381113 - DNA, 74 bp, Homo sapiens
tcttcaccgagctcattaaaggattcggagaatggtgttgaacgcgtgtgtcctgagagcctgctgcagtccag

SEQ ID NO: 381114 - DNA, 75 bp, Homo sapiens
ggaaaaattacctatgacgctttctaggcaagagggattaatgaaaatcaagttccatcctcagacaagaggtaa

SEQ ID NO: 381115 - DNA, 90 bp, Homo sapiens
ggttaagattcggagagagaggtgctagtggctggacttgacctggaaagaccgagacatgggtgcccggcaccgcgcccgagcccactc

SEQ ID NO: 381116 - DNA, 87 bp, Homo sapiens
gcgtcccgctcgctgggagagaggtacctctccttttccctctccctttccctaagatctctgacatctacattagtggagaatcag

SEQ ID NO: 381117 - DNA, 100 bp, Homo sapiens
agggtgtcaaattgagaaccaggtagatccccaccacctacagtaaaaaggcaggcgggagtcatggatgtagatgctgaaagagagaagataacacagg

SEQ ID NO: 381118 - DNA, 82 bp, Homo sapiens
tgacatggaggatgatttcatgtgcgatgatgaggaggactacgacctggtcagcagcacagtggccatggaaaaagaaaaa

SEQ ID NO: 381119 - DNA, 90 bp, Homo sapiens
aaatggaaagtttttccaaatattcatctgtacagaaaccacaccttcattgtcctgcacctggtcttgcaagggatggtttatactgag

SEQ ID NO: 381120 - DNA, 98 bp, Homo sapiens
caaggagaagacaagaacatgctctaaagcccttcacagcaagacccaggaagccgcgggcaaactcagactcgaagatcaaatgtttcctagatttc

SEQ ID NO: 381121 - DNA, 100 bp, Homo sapiens
cggagccagggccgagtcctcgccatgccggcccggcggctgctgctgctgctgacgctgctgctgcccggcctcgggggagcatttcctgaagacgtag

SEQ ID NO: 381122 - DNA, 100 bp, Homo sapiens
agagcagatggaaacacatgaaagacttcctcaaggactacagtatgcacttaatgtcccttttttccagaggcctcaaatacagcctcctagagctacc

SEQ ID NO: 381123 - DNA, 100 bp, Homo sapiens
ggccgtgttccgtgtctctggattcaagtcccaggagtcctgaccagagagcagagccacccagagttccctcactgaagatctgagcatgacccgggac

SEQ ID NO: 381124 - DNA, 100 bp, Homo sapiens
gaatgactggaaactgattggaaactctttgggaaagccactcgaaaaggtcaatgagctgaaggagaaaggcaacaaggccctgagcgtgggtaacatc

SEQ ID NO: 381125 - DNA, 100 bp, Homo sapiens
aacaagcccaggccccgcggccgaggcctggaggatgaggagaaggcagagcccccccaggctatgaatgccctgatgcggttgaaccagctgaagccag

SEQ ID NO: 381126 - DNA, 100 bp, Homo sapiens
cgacgctgctgggtccgctgagcggggcgacccgagaggtaccaatcttgggaaaaagaagcaacacatttgtcatataccaggatgtggtaaagtctat

SEQ ID NO: 381127 - DNA, 75 bp, Homo sapiens
cgggaggaaggaacgaggcaaggagctaaagcagcgtgcgttcagccctgggttctgggaagtcatcagtgatga

SEQ ID NO: 381128 - DNA, 100 bp, Homo sapiens
cacgcggcgccagttctccggcgggaaggaaaaccgcgcagagaggtcatcatcagatttgaaatatttaaagtggatacaaaactatttcagcaatgca

SEQ ID NO: 381129 - DNA, 82 bp, Homo sapiens
gccgcctcagccatggacgcgtccctggagaaggagcaggccgggctctcgccatgggtcactgtcgcctctgccacgggaa

SEQ ID NO: 381130 - DNA, 98 bp, Homo sapiens
cagactgtccgcctggagcgttacaaggccttctacattaccgaaatctccaaattggacatccagagcagcattcttgttctgtctacgtcttgaat

SEQ ID NO: 381131 - DNA, 100 bp, Homo sapiens
ctgttccaccttcagagcgtcacggcgtacgccctcatggggaaaatctccccggtgactttcaggcattgcttcaccggcagctacccggtcattgagc

SEQ ID NO: 381132 - DNA, 100 bp, Homo sapiens
gaaggaggtggccggcttcgttctgaaccgcctgcaatatgcaatcatcagcgaggcctggcggctagtggagccctactgccaataaagggaaaataag

SEQ ID NO: 381133 - DNA, 75 bp, Homo sapiens
catctacttctgtctgcaggagatggctcaagagaaagaaagttgtacaagggattgatttaaaccaaattcgag

SEQ ID NO: 381134 - DNA, 100 bp, Homo sapiens
acggaagaggccggatggagtccgtgagatgggttttagctgccgccggagtcgagcatttgctcttgcggaattaattgacaattcattgtctgctact

SEQ ID NO: 381135 - DNA, 98 bp, Homo sapiens
gcaggagatcgagagcaccgacaccgcctgtgtggggcccaccctccgtgagaaagatcagtctaaagaaaaggagaagaaagtgaaaaaaacaattc

SEQ ID NO: 381136 - DNA, 74 bp, Homo sapiens
gcttccatctgccgccccgaatccatcgagcctccgacccaggtttgccagcctttggctatgggctgctttgt

SEQ ID NO: 381137 - DNA, 100 bp, Homo sapiens
cgaaggcgcgctgatggaagcttaatacaggaagtgtgggagcaggctttctggaggggatgttttagggtagtggtagcagagaattttgatgaaatag

SEQ ID NO: 381138 - DNA, 85 bp, Homo sapiens
ggcttgggccgccgagctggacccggaccggttttggagcccccctccatgcgcctgaaggcccgacccagcagccctggctttt

SEQ ID NO: 381139 - DNA, 100 bp, Homo sapiens
ggttcagcgcgaccacgaaggccgctactccgaggcggtgttttattacaaggtatgatctcgtgaaatcttgagagaaactgaatgacgaatgaaacta

SEQ ID NO: 381140 - DNA, 98 bp, Homo sapiens
tggccttcagcccaagccttcagctgtctcgagaagattgtttaaatcctcccagtgaagacactctgattgtgtggtctgaagcagaaaattatgac

SEQ ID NO: 381141 - DNA, 75 bp, Homo sapiens
cccgctcttctccctgcttaacgagaaccatagtacagaacctgctaaggccatcaaacctattgatcggaagtc

SEQ ID NO: 381142 - DNA, 101 bp, Homo sapiens
tggagcccgaggccggcgccggcgccggcgccgcggcctcttcggctgcggaccctgccattccggaggagggtcactttccgtatcctgatccttcccag

SEQ ID NO: 381143 - DNA, 82 bp, Homo sapiens
ctttgggaagcagtgacatccaacctgtatcaagtcttctaatctgtgaacatggttttaaaatcaaagatgggaaaatcgg

SEQ ID NO: 381144 - DNA, 90 bp, Homo sapiens
gtgaaagagactcggtgacagatacaggttgaacgtaattaggaagctgatagcagatgaagtggactttctacagcatgttactcagct

SEQ ID NO: 381145 - DNA, 74 bp, Homo sapiens
ggaaagttacgactctactgcaaaggagctatttctcacattggcaaactgagagattttcttctggaacacag

SEQ ID NO: 381146 - DNA, 75 bp, Homo sapiens
cccccgattcaccaacgagccctatgtactaatggtcacttgatgtgcgctggctgttttatccacctactagca

SEQ ID NO: 381147 - DNA, 101 bp, Homo sapiens
gcctggaatatgaaggcttccccgtcccggcctatgaaaggaggttccctacatgtcctttgattccgatgttcgtgggcagtgacactgtgaatgaattc

SEQ ID NO: 381148 - DNA, 74 bp, Homo sapiens
tagttgactccacagatccggggagccttctgatggagcgtgatgccttgaagcccaactcgcccctgaccgag

SEQ ID NO: 381149 - DNA, 100 bp, Homo sapiens
ggcgcggcagagtccccgtacgcctacagtaacgacgagccaaactcaggctgtaccttgagcagctcaagcaactggtgcccctgggccccgacagcac

SEQ ID NO: 381150 - DNA, 80 bp, Homo sapiens
gatggcagccagtcagtggtggagagaatggatcttggagaatgtctgaaagtccatgacctggctttaagagcggatta

SEQ ID NO: 381151 - DNA, 82 bp, Homo sapiens
tgtcggagatccgctcgcgcgccgaagaaactggcgatggaatatgagaggagccctctggaaagaaaaggacagaccctgt

SEQ ID NO: 381152 - DNA, 80 bp, Homo sapiens
gtcccgtggaggctgaggccaggcagctgaagagctgcatgaagccggtgaggcgcagttgtgttggtgttgaagaggag

SEQ ID NO: 381153 - DNA, 51 bp, Homo sapiens
cgaggattgattctaatgacagaggagtgtagcttttgtgaagaccctcgc

SEQ ID NO: 381154 - DNA, 98 bp, Homo sapiens
ccgcttcctccagggcaagccccggctgagcctcaagttacaggtcggttcacccagaagccagggggcatctcagtgaagcgctcactgaagacaca

SEQ ID NO: 381155 - DNA, 100 bp, Homo sapiens
cagaagaagccctttgaggagcactggaggaagcacaccctgtcctatgtggacgttggcactgggaaggttttgtagtgcatccctgagcatgagcaca

SEQ ID NO: 381156 - DNA, 90 bp, Homo sapiens
attccaagtaactcttatttggaaggatatggagtaatagtactaaatcccaatgaaaactatattgaagtagaaaagccgaagatacac

SEQ ID NO: 381157 - DNA, 50 bp, Homo sapiens
caggaaccaccagtgacagagtatataagaatgtgattctacaagttcca

SEQ ID NO: 381158 - DNA, 100 bp, Homo sapiens
gcaggtgttcgacgtggggccgcgctacaccaacctctcgtacatcggcgagggcgcctacggcatggtgtgagcatgaataatctttcatttagtgagc

SEQ ID NO: 381159 - DNA, 100 bp, Homo sapiens
gtcggaccccgcggtcaacgcgcagctggatgggatcatttcggacttcgaagtgtctgtagtgggaagtcttcatgagctcagttggccatatttctgt

SEQ ID NO: 381160 - DNA, 76 bp, Homo sapiens
aatttatcctcaagagtcagctggcaggctttatcctgtggataaacgcagagtgaacgagtttggggagtcctac

SEQ ID NO: 381161 - DNA, 75 bp, Homo sapiens
gggagttgcttttggaatgaatttggaatcttcccttgaagagtcatgtaacacagactacatcctggatccatc

SEQ ID NO: 381162 - DNA, 82 bp, Homo sapiens
aggactcagaccagtctctgcaagagacctggtgtgaattattcagggtgtcagatcacatgggctaaattttgcaaagtaa

SEQ ID NO: 381163 - DNA, 100 bp, Homo sapiens
tggcggtgagcgcgagggaggctactgagaagcccggcgacggaggaacgcaggtctgctgccaggatggaagatgctaattctgaaaagagtataaatg

SEQ ID NO: 381164 - DNA, 101 bp, Homo sapiens
tgacatccaacctgtatcaagtcttctaatctgtgaacatggtactaggttttgacaagcttgcatcatgcgtgagtataagctagtcgttcttggctcag

SEQ ID NO: 381165 - DNA, 90 bp, Homo sapiens
catttgtgtccattgatctcttggagcagctggggatcatgtcatccgtccttggctcaggatttggagagcttgcaccaccaaaaatgg

SEQ ID NO: 381166 - DNA, 82 bp, Homo sapiens
cgaggttcagactcttggagccagaagctacatgacccctaaacgtggtgggggaaaagtagctccagctcaaccatctgag

SEQ ID NO: 381167 - DNA, 95 bp, Homo sapiens
atccctgccccggcgccgtccgtgcccgcgggacctgacagccgggtcagaggtattaataggggaccctattaccacatgtctttctccctcag

SEQ ID NO: 381168 - DNA, 100 bp, Homo sapiens
tgaaaattgagctgtccatgcagccatggaacccgggttacagcagtgagggggccacggctcaaggcatctggccatctgaagaggttttggcttacta

SEQ ID NO: 381169 - DNA, 75 bp, Homo sapiens
caagcttcatggagccgcggcgcatcaccaggccacgcccagatttcttctaccgctgcttccctgatgggctag

SEQ ID NO: 381170 - DNA, 100 bp, Homo sapiens
ctccggtctacagctcccagcgtgagcgacgcagaagacgggtgatttctgcatttccatctgaggtatgatctcgtgaaaccttgagagaaactgaatg

SEQ ID NO: 381171 - DNA, 87 bp, Homo sapiens
atttataattggagatcctgaacaccaaagttggactccatgaaagaattgcacaaaacaaatcgacagcagcatgagaaacatctg

SEQ ID NO: 381172 - DNA, 100 bp, Homo sapiens
ctcaggtatcattacaatggcacgcttctggatggcaccctctttgattccagagtatgttggataaaggacattgttgtggcagtaactggagagaaca

SEQ ID NO: 381173 - DNA, 83 bp, Homo sapiens
ctcccgctgccgctgccgctccaggagacagggctacttctacaagtccgaacagccagtccagcaaaatgaacagcattgtc

SEQ ID NO: 381174 - DNA, 74 bp, Homo sapiens
gtatccacagaaggagcaaatacttcttcatgtgtggatgaggtcaccattgtcaacattttgaccaaccgcag

SEQ ID NO: 381175 - DNA, 75 bp, Homo sapiens
gaaaaatgctgaagtgctgtactcgatcgagtcagctacaaaagaccccacagctgtagagagagcaaacttgtt

SEQ ID NO: 381176 - DNA, 100 bp, Homo sapiens
tgagaatagtagctcttctagtatctgcaaagacaatgcaggacagtactgcttttaaagagacagtgttagggatcttggaagcacagccaacatgtgt

SEQ ID NO: 381177 - DNA, 90 bp, Homo sapiens
cagcggtccggccaaggacgctgaggtgaccatagccgatgactactcagatccctttgatgccaagaatgatctcaagagcaaagcagg

SEQ ID NO: 381178 - DNA, 100 bp, Homo sapiens
cttaaatgaatctttagaacttggcaagtctcactagataccttcaatcatcattttgagctcaaagttttgtttggctatgccaccacagtcatcccca

SEQ ID NO: 381179 - DNA, 98 bp, Homo sapiens
aagaatggggtaaatttcttcacaccaaaaataaggaagctgtagagaaatatgaagaagtgctacataatttggaatttgccaaggagcttcaaaaa

SEQ ID NO: 381180 - DNA, 75 bp, Homo sapiens
ggaagaatggaatcaacagctcccgggagactcgaaatgccaccacaggtcacagggattatggacccagaacag

SEQ ID NO: 381181 - DNA, 101 bp, Homo sapiens
gtctggaggagccttctcaagaacagaggttgctggtaaaattcctcctagtgtccaagtggaggcagcttgtcttctgtcccagcattttggtgctcctc

SEQ ID NO: 381182 - DNA, 98 bp, Homo sapiens
agggaggctttcagccggagaagcgagtttcagctgacaacagcagttctgtagagagtttaaatatgaaggaatggcaggacgggctaagggcactt

SEQ ID NO: 381183 - DNA, 50 bp, Homo sapiens
aggacaccactggaactcacaaagggcacaggtgcccgaccatacactgg

SEQ ID NO: 381184 - DNA, 101 bp, Homo sapiens
aacccgcccatgaagccagatttctcccagattgactggggcgactttggggtagaggcagtgtctgaggggactgactctggcatctctgccgaggctgc

SEQ ID NO: 381185 - DNA, 82 bp, Homo sapiens
ggccgatccgctccgctcacggtcagcccaaggccaaccccactgtcactctgttcccgccctcctctgaggagctccaagc

SEQ ID NO: 381186 - DNA, 100 bp, Homo sapiens
ggattggagtgaaccggagaccccgaaaacggaagcgcagggagaaggaagaggtgtttgaaaagaccaagatcactccatggatgaaatgacagctgtg

SEQ ID NO: 381187 - DNA, 100 bp, Homo sapiens
ttgtcaggtgtgtgttccttacaggtaaaacaagtttgccgggaggactcatatcactctgtcgtctcatgtgccgcagtagttcttactcctatggaac

SEQ ID NO: 381188 - DNA, 129 bp, Homo sapiens
atggagagaagaaggcatatgttcgactggctcctgattacgatgctttggatgttgccaacaaagatgggagtcccagcttctggagacggggttcctggggatcttcctgtgccctctgtggacgct

SEQ ID NO: 381189 - DNA, 59 bp, Homo sapiens
ggcgacatgtcgacctgacgctctacacggtggaaaaggattattcatacctgaaggag

SEQ ID NO: 381190 - DNA, 75 bp, Homo sapiens
atcctgcggcagaagccgagttcaacatcctcctggccaccgactcctacaagagctgagaatgaagcggagagc

SEQ ID NO: 381191 - DNA, 58 bp, Homo sapiens
ttacaaccacttctgcagtcctggccaagggaatttcaaaggtctgtgcaagcaaatt

SEQ ID NO: 381192 - DNA, 97 bp, Homo sapiens
gaagtggagcctgggagccttgacgttaggaacgaagtctaacctggatctggagccggggagagatgacatgctggacgtggagaccgatgcctac

SEQ ID NO: 381193 - DNA, 87 bp, Homo sapiens
ttccccgttagaactcgcgtttccacttcagagatctgggacttgccatgaggtgttgaagccttgtttcactgagttggagagact

SEQ ID NO: 381194 - DNA, 50 bp, Homo sapiens
cccggatctggtaacatggcaaaagatgtgtacgaagccatcgacagcag

SEQ ID NO: 381195 - DNA, 88 bp, Homo sapiens
gactcagcctcttcagcgacctgcccgagaacccttaggagaaatcttgagagtggacagcaattgtgaagatcgccagagagttctg

SEQ ID NO: 381196 - DNA, 100 bp, Homo sapiens
gttggatcattttgaaaaacagtattccaaagaactcggagatgcctggaatacagtaagatattaaacaccgtcgaattccaatcttattctttgcaaa

SEQ ID NO: 381197 - DNA, 90 bp, Homo sapiens
gtcagttgcgctgtgttcctctctagtcacaagagccttggggaagacagttggaagctcagacatgacactgccctctcggtgccacca

SEQ ID NO: 381198 - DNA, 119 bp, Homo sapiens
aaatattaaacttttagacctgaagccatacaaagtaagctggaaagcagatggtactcgtttggctttggttgaaataagaatttagcctgtatgtactgctttaactcctggaagaa

SEQ ID NO: 381199 - DNA, 114 bp, Homo sapiens
gtgctatgcctgtaacaagagcatcacagccaaggaagccctcatctgcccaagtcagcccaaggctgccccctcggtcactctgttcccgccctcctctgaggagcttcaagc

SEQ ID NO: 381200 - DNA, 100 bp, Homo sapiens
atatattgaaacttcggagctgataagccagagacatgggaaaaccaatggaagtgtttcaaagttcttctctttaatcacttctgtatccagctgcctt

SEQ ID NO: 381201 - DNA, 74 bp, Homo sapiens
gagacccggacagtggcagtgaaacaggtacagtgaaggtgaaattcgatttaatttaatggccattgtgtctg

SEQ ID NO: 381202 - DNA, 100 bp, Homo sapiens
ccggccggtgctggctgcattggaatcgctgaaccgtgcagtgctcgctgccatggatgccaccaagctgcaggttacgggcaggacttgagtggcttcg

SEQ ID NO: 381203 - DNA, 100 bp, Homo sapiens
ttgacgattacatgaaagctctggattcccgacagttaagcaatggggagacatttggctttgctcctgcttctgctccttctcttccaacattttggag

SEQ ID NO: 381204 - DNA, 101 bp, Homo sapiens
acccttagctacccacgatgtttcagacagtccccgacacgtcgtcttacatcaagttactggggcttccggatgcagatgacgatgcgtttgaagagtac

SEQ ID NO: 381205 - DNA, 82 bp, Homo sapiens
agacaagcctgccagccctttctgaggcagatacccaggaactaacccagttacagaatgtctgaaggggacagtgtgggag

SEQ ID NO: 381206 - DNA, 90 bp, Homo sapiens
gcgtgcggtctgggccttttgggcagcttttccggcctgacaacttcatctttggctgagtatgagtttatcagctctggtctctaccta

SEQ ID NO: 381207 - DNA, 50 bp, Homo sapiens
ttcatgtgcctccaggttatatctcacagagatggtgaattgtctttgag

SEQ ID NO: 381208 - DNA, 83 bp, Homo sapiens
gctgtgggagaaggcccagcgagatgaaacaggcgcctatttaatcgacagagaccccacctactttgggcctgtgctgaact

SEQ ID NO: 381209 - DNA, 75 bp, Homo sapiens
caaactggaaagaagatgctaattaaagtgaagcaacagctgcgaatgcggatcaagcttacatataatcacaag

SEQ ID NO: 381210 - DNA, 96 bp, Homo sapiens
gcagaagtgatttacagagtccaattttcggctttgtgagaaaccttaccatcaaacacgatggccagcaacgttaccaacaagacagatcctcgc

SEQ ID NO: 381211 - DNA, 86 bp, Homo sapiens
agacattgacctcaccaagagggcgggagaactcactgaggatgaggtggagcccagtgacaccatcgaaaatgtgaaggccaaga

SEQ ID NO: 381212 - DNA, 83 bp, Homo sapiens
attgtagagaagctaaaaggagaacttgaaagttcggaccaggggaaggagttcgagacacgactgaaggagaagaagccagg

SEQ ID NO: 381213 - DNA, 100 bp, Homo sapiens
ctggactcatggaggctgagcatttattcagcaatggctgccatccggaagaaactggtgattgttggtgatggagcctgtggaaagacatgcttgctca

SEQ ID NO: 381214 - DNA, 75 bp, Homo sapiens
gaatatgatacagatgtattcaaatggatcttcaaagaacattaaccaggtggtatttgttggaaatttcttgag

SEQ ID NO: 381215 - DNA, 100 bp, Homo sapiens
atatttttatcacgttcagtgtgctgggatgaggttacgagtagccatgtgccatatgatttatcggaagcatcctgaggttagcattacacttctccca

SEQ ID NO: 381216 - DNA, 50 bp, Homo sapiens
cggagcataggaggaaaattcatcatctgaacccttaggagaaatcttga

SEQ ID NO: 381217 - DNA, 99 bp, Homo sapiens
gcggcggtggcatctgcggccatggcggcgactactgccaaccccggatggatagaatgacagaagatgctcttcgcttgaatctgttgaagcggagct

SEQ ID NO: 381218 - DNA, 82 bp, Homo sapiens
aggtctgtctagttcttgccctccacagtcttccctgttccatccttcggaaagaccgagtctcagtctgtcacccaggcta

SEQ ID NO: 381219 - DNA, 75 bp, Homo sapiens
caaaatgtttcctaaagttcgtgaatctcaacttggcaagtgtccagagaatggctgggatgaaagtacacttga

SEQ ID NO: 381220 - DNA, 83 bp, Homo sapiens
tgcgttacaagctttgtctccttcgacttggagtctttgtccaggacggcagaagctcctcctggggtagagacagatcttat

SEQ ID NO: 381221 - DNA, 100 bp, Homo sapiens
ccggcggctccgcaagaagtaccgagaaggtgtgatgaatgcagactctgctaccattttggctgtttggatcctcctttgaaaaagtctcctaaacaga

SEQ ID NO: 381222 - DNA, 75 bp, Homo sapiens
gcggacgcaggagcgatggcagcgaccgatatagctcgccaggtgtgctccctaccctcacctcaagacgaccat

SEQ ID NO: 381223 - DNA, 74 bp, Homo sapiens
aaagagaggcaccgctggaacactaatgagaagtctggaacgttttttcttagagttccagaattgagactgaa

SEQ ID NO: 381224 - DNA, 100 bp, Homo sapiens
cctggtctcagaggtgaaattggtaaccctggcagagatggtgctcgtggctctcctggtgaacaaggtccctctggagcctctggtcctgctggtcccc

SEQ ID NO: 381225 - DNA, 83 bp, Homo sapiens
aaaagtctggcctcggcgccaagatcccagtcacaattatcaccgggtatttagaatgcagagagctggaattccttgtccaa

SEQ ID NO: 381226 - DNA, 75 bp, Homo sapiens
aagggccagagtatcactacctccaccagatgttggggactccctgagaaatgtttcctcagccggtcatggccc

SEQ ID NO: 381227 - DNA, 142 bp, Homo sapiens
ccagatgaatatcaacggcttcctgaagagagaccgggacaataacatccaattcactgtgggagaggagggagaacctcaatactcaagtcattccagcagcaacaccctctccagcaacgcatccagcagccacagcgac

SEQ ID NO: 381228 - DNA, 74 bp, Homo sapiens
cggatctcagaaggccagttcaaagggaaatcctcattgacgattcaatttgttgaaggccaatttgtggactc

SEQ ID NO: 381229 - DNA, 100 bp, Homo sapiens
agcattggtgcacgatgtactgctcttcacagatggaatcacaaataaacttattggctgttacgtgggaaacaccatggaggatgtagtcctggtgaga

SEQ ID NO: 381230 - DNA, 60 bp, Homo sapiens
gcctacttgcaacagggttgcaaactgtcttccagaaaaagcttgtggtgaaggggggca

SEQ ID NO: 381231 - DNA, 99 bp, Homo sapiens
cgacctgcgagactcacaagaggggaagctgacagagatacctacagacggagtgctgtgccaccggctgcatttcaacaaggaaagatacctcctact

SEQ ID NO: 381232 - DNA, 102 bp, Homo sapiens
ctcaagcagcacgtgggtgaaagaaacttccacgccttctaccaagtgaccctggcaaagatgagagtgcacatttcgtcctgcctgaaggtccaggagcag

SEQ ID NO: 381233 - DNA, 83 bp, Homo sapiens
ggaggaaggaacgaggcaaggagctaaagcagcgtgcgttcagccctggggcctgccgaggaggaactgaagacgaagaacat

SEQ ID NO: 381234 - DNA, 90 bp, Homo sapiens
cgcagtggcctccaaggtgcagacagctgtgactatgaagggggctgagttggctgtcattcttaaatttgtgctggaccatgaggacgg

SEQ ID NO: 381235 - DNA, 50 bp, Homo sapiens
tgatcagggtgcagctgagattcaagtgcctgacctggaagctgatctcc

SEQ ID NO: 381236 - DNA, 100 bp, Homo sapiens
gtatcaaatatgacccaagcattggtatctacggcctggacttctatgtggtttgaagatgccgcatttggattggatgaattccaaattctgcttgctt

SEQ ID NO: 381237 - DNA, 83 bp, Homo sapiens
agaagaggtcccaatcccccactctttccgccctaatggaggtctccagtttcgacttgtgcaccatggacaattttgctgag

SEQ ID NO: 381238 - DNA, 100 bp, Homo sapiens
cttttcttcttctgcaacacggctacggtctacaagatctgcgcctggatgcagctcttggcaggaggaatgttattgaagccgtttacaatagactgaa

SEQ ID NO: 381239 - DNA, 74 bp, Homo sapiens
tgaagacaaggggggatatgtgatcaaagcatcagaagagctatcagcttcccagtttgcacaattcatcaaga

SEQ ID NO: 381240 - DNA, 50 bp, Homo sapiens
ccaccttcccgcaccctgggaccgaaccaaaaacttttgctagaaaatca

SEQ ID NO: 381241 - DNA, 100 bp, Homo sapiens
caggagaccgctaacagcctgccagcccctcctcagatgcccctgccggagatccctcagccctggctgaaccgggctgtgggtcggcccaaggggaagc

SEQ ID NO: 381242 - DNA, 100 bp, Homo sapiens
cagggtggttgatcttctggtcattaagggaatgggtactgttcaaaaaggaatgccccacaagtgttaccatggcaaaactggaagagtctacaatgtt

SEQ ID NO: 381243 - DNA, 75 bp, Homo sapiens
acctccgggcccccaggcatggctagctcgtgtactaatggtcacttgatgtgcgctggctgttttatccaccta

SEQ ID NO: 381244 - DNA, 100 bp, Homo sapiens
aaaatggcggtgtctacagtgttctcgacttcgtcgctgttgccaccttccagagaagaggtacgagatgacaagacaaccataaagtgtgaaacctccc

SEQ ID NO: 381245 - DNA, 80 bp, Homo sapiens
tacctcttttaaactcattctactggagcaaatggaggagacatcacagctttcccagatcgggaggaaaaatatggaat

SEQ ID NO: 381246 - DNA, 100 bp, Homo sapiens
atggatttctcatggaagtttgtgttgattcagtggaatcagctgtgaatgcagaaagaggaggttaatgctctggataatcttggtcagacttctctac

SEQ ID NO: 381247 - DNA, 50 bp, Homo sapiens
agtttagctgctcgagatcgaggagagatgtggtctcactgtgttgccca

SEQ ID NO: 381248 - DNA, 100 bp, Homo sapiens
tcccacgtgaggaaggagcacgggaagacaagttggatggcttgaggactggtactaaaaggaaacgtgactgggaggccattgccagcagaatggagga

SEQ ID NO: 381249 - DNA, 90 bp, Homo sapiens
aggcaggtggtggggttccggcggctggtcagcgaggtgaagatgttcactgagaggaataacggccttatattctggactgaaacctac

SEQ ID NO: 381250 - DNA, 51 bp, Homo sapiens
gaatacactattcaggaaagaccccaatgatgaggaaactgaggctcagag

SEQ ID NO: 381251 - DNA, 88 bp, Homo sapiens
ccagtcccggatcaccaagaccttcaccaaggtactgggcctaatcgctacgtgcctctttggctatgatgcctatgtcaccttcccc

SEQ ID NO: 381252 - DNA, 75 bp, Homo sapiens
aaagaaccattgaaaaatttgagaaggaggctgctgaggttaccagcacaactttgacacctatgatgatagctt

SEQ ID NO: 381253 - DNA, 83 bp, Homo sapiens
tcctaagctgcccaacggtgtgttcacccccgacttccaggagtttgtcaataaatgggaagatcagttttcctgccatccag

SEQ ID NO: 381254 - DNA, 100 bp, Homo sapiens
tgtgctcagattccctgaagctctgctgccccgcaggcaccttcgggccctcctgccttccttgtctttaaccgaactgtcacactgaaggaagacccag

SEQ ID NO: 381255 - DNA, 139 bp, Homo sapiens
cagagttccattttggaacgcccgtgccgcgtctccgcgttcccagcccgggtccccgcgttcacagccccagcgcagacaatgcagatcttcgtgaagactctgactggtaagaccatcaccctcgaggttgagccca

SEQ ID NO: 381256 - DNA, 74 bp, Homo sapiens
cgactgtgtaaacaactagagaagattggacagcaggtcgacagtctatcagccacagtctctgcaagtttcca

SEQ ID NO: 381257 - DNA, 76 bp, Homo sapiens
ctaccaataaagaggctgatccaagcaattttgccaacttcagtgctgccaaatttgagtttcatcatggtgacta

SEQ ID NO: 381258 - DNA, 75 bp, Homo sapiens
ggaacatggggggaccatatggtggaggcagaatttctcagattatctttgggatttaagtgtgactggtttacc

SEQ ID NO: 381259 - DNA, 51 bp, Homo sapiens
tctggtaccgctgcgaagcttgggcctgccttaagtgtgaaagtaatgact

SEQ ID NO: 381260 - DNA, 100 bp, Homo sapiens
gcagactggagggaggtgatgatgccctattcgacagaactgatattttatattgaaatggatcctccagctctagccggcccggtccttggactgaaag

SEQ ID NO: 381261 - DNA, 82 bp, Homo sapiens
atagatcatgcagagtattacctttacaaataagaatgtgccttttgatgaaagaactttatctttctacaatgaagagtgg

SEQ ID NO: 381262 - DNA, 100 bp, Homo sapiens
gtcttgccagaattaccccgaccccctccccgaagctgccggagccctctgtcctaaccaacatcccgggtaaccgggtggctgaaggacaggtgacgtg

SEQ ID NO: 381263 - DNA, 75 bp, Homo sapiens
tggttcttatagccctggagtgacctactcgcccgtcagtggttataataagccaccacaagggcccgggccacc

SEQ ID NO: 381264 - DNA, 90 bp, Homo sapiens
aagaccgcgcgcagggcctgcagcgggagctggacggcgagcgcgagcggcgcgagaaagtatcgagaaccttccctgcgaacttcagag

SEQ ID NO: 381265 - DNA, 76 bp, Homo sapiens
gctgctattgaaagagagtatgcacaggatgtacgaagtaggtccaaagttgttgaccgtatttacagtctctaca

SEQ ID NO: 381266 - DNA, 100 bp, Homo sapiens
cttgccatcatgaacatcctctttcttcagtggaagaactcttccctcctgggtcacccttttcctcctagtgttcctcctgttctcagccccctccaga

SEQ ID NO: 381267 - DNA, 100 bp, Homo sapiens
caaagacaaaagacacagaagaaaaagtgggactgaagtacactgaagcagtatgagccgcacagcctacacggtgggagccctgcttctcctcttgggg

SEQ ID NO: 381268 - DNA, 80 bp, Homo sapiens
ctgctggagggtgacaagctcctcgcacaggttttaaaatcaaagatgggaaaatcggagaaaattgcccttccccatgg

SEQ ID NO: 381269 - DNA, 101 bp, Homo sapiens
gaagaacatgacctcaaggagcttcctgtcaatgagaagaccaagctgacgcctggcaaaggtgtggatgaggtcaccattgtcaacattttgaccaaccg

SEQ ID NO: 381270 - DNA, 98 bp, Homo sapiens
gagatcaaatggcacttcattggccacctacagaaacaaaatgtcaacaaattgatgggttacaatgcaccatatctctcggtgtacagtgaaaatgc

SEQ ID NO: 381271 - DNA, 112 bp, Homo sapiens
cgtggccttagctgtgctcgcgctactctctctttctggcctggaggctatccagcgaacccaagacagaccaggatgaggagcattgccggaaagtcaacgagtatctgaa

SEQ ID NO: 381272 - DNA, 49 bp, Homo sapiens
ccggaagctgagtttttatccgggataaaaacattcagatggcagatca

SEQ ID NO: 381273 - DNA, 100 bp, Homo sapiens
tggagcaaagaaaagagccctacaatgtgaagatacataagatcgtagccagacccccaggccacaccatgaggccccagccccaccagaggccccgcgc

SEQ ID NO: 381274 - DNA, 100 bp, Homo sapiens
gggaagcagcacgggatcccagcctcaggcctgcacggacggtgttggttggggaatactcccccagttgcaagaggcgcaggaccgtggaagacttcaa

SEQ ID NO: 381275 - DNA, 75 bp, Homo sapiens
gccacaccagactacatccagaatgcacctggcttgcctaaaacccgctcagagcccacccacctttgggttcct

SEQ ID NO: 381276 - DNA, 75 bp, Homo sapiens
gcttattagtcatcaccgttattcctactaacgtcctgtgtcactgagcatgattatgatatgagggtggatgat

SEQ ID NO: 381277 - DNA, 82 bp, Homo sapiens
ctcccagcctgtgacctttgtgaccaactccacctacgcagcagacaaggggtaaggtacctgccgtgggcagatctgagct

SEQ ID NO: 381278 - DNA, 105 bp, Homo sapiens
tcctttaccttgtggaaatgatttcctcaggactccagattatctacaacactgatgaggatttcttacaatctccagctacaacctgcttagcttgctactcag

SEQ ID NO: 381279 - DNA, 98 bp, Homo sapiens
ggagaacaggtgtccttctaaaatacagcacaagctacagcctgcgtccagccataacccaggagtaacatcaggtgctggagaatctggtaaaagca

SEQ ID NO: 381280 - DNA, 100 bp, Homo sapiens
aaactctactgcttgatcgaaatcgtccacagtgacctcttcacacagcatgataaagtggagaattttcatgaagaacatgaaaagaatagtcaccata

SEQ ID NO: 381281 - DNA, 100 bp, Homo sapiens
cagagatgaggacagcattgctgctccttgcagccctggctgtggctacagggccaggtttgttgaatgtacagagtgcggaagaaagatgcatcagatc

SEQ ID NO: 381282 - DNA, 101 bp, Homo sapiens
tggctaagctcatccagtgtattgtgtttggccctcttcgagtgagtgagagacagatatgattctataacagactcttccagaaatgatatgaagaggaa

SEQ ID NO: 381283 - DNA, 75 bp, Homo sapiens
cacagctggaatgcaagtcaaattatgacaacgaggagatcttaacctatgaggaaatgtcactttatcatcagc

SEQ ID NO: 381284 - DNA, 100 bp, Homo sapiens
gtgatggatgcacctggaaggggaccctgaaagaatacgagagctccacgcaggagatcggtgaggagctgatcaacggagtcatctactccatctccct

SEQ ID NO: 381285 - DNA, 100 bp, Homo sapiens
ctacgtgggcttcaccatggacaagctggtgcagaacattgcgcggcaggctccccacaggtgcaggaagccgccgcccagccatggacggggaggagca

SEQ ID NO: 381286 - DNA, 90 bp, Homo sapiens
gttgtgtggtcgcgtctcggaaaccggtagcgcttgcagcatggacatgctgggcctgcgccccccactgctcgccctggtggggctgct

SEQ ID NO: 381287 - DNA, 96 bp, Homo sapiens
cgacggacgcacgggcgggcggccgggagccatggagcgcggccctggggcccgggggcgcgggccggggtggactatggtgcagccctgcggggc

SEQ ID NO: 381288 - DNA, 95 bp, Homo sapiens
ctctgacggggagggctcccggcatctcctggcgtccgggtagaggacgcggaggcggtggagacacagagcaccagctcagaggagatggtgcc

SEQ ID NO: 381289 - DNA, 89 bp, Homo sapiens
aggtttactggagtaggtgttagtaaggatctagtttgaagcactaagaagaataagacatcagtttgaaaagaggctctatcagaaca

SEQ ID NO: 381290 - DNA, 100 bp, Homo sapiens
tgcagctcaacgagctgctggaggacgagggccagctgacggagatggtgcagaagatggaggaggattggaggctgttgtcattggagaagttcatgag

SEQ ID NO: 381291 - DNA, 100 bp, Homo sapiens
cggaacccgtgggcctgtggactgcagcctcggcggtcagcagacaccttcagcagtaaacaagataaaacaacttcttaaagataagcctgagcatgta

SEQ ID NO: 381292 - DNA, 98 bp, Homo sapiens
tccctcagcctggtgagggtgatgttcgggaggaggccttgtccacaggaggaaaaggcttctcttttacatcgtactcaggaagaaagaagaaagag

SEQ ID NO: 381293 - DNA, 100 bp, Homo sapiens
gacttgtctcttatttagttctggggagcgcctcgtcgacatgagtgatgtggaggaaaacaacttcgagggcagaaacaagttgaaatcatcgcagaag

SEQ ID NO: 381294 - DNA, 95 bp, Homo sapiens
tccctccgtatgcacatgtgggtagaggacgtgttagacaagttcatgagagccccccaagatgaacccagtggtggagccactgtcctggatgc

SEQ ID NO: 381295 - DNA, 100 bp, Homo sapiens
cacgcgaggctgcccggagtccggataagccgggcgggagcccctcggccagggggccgtggagcccatgcagatcgacgtggacccccaggaagacccg

SEQ ID NO: 381296 - DNA, 88 bp, Homo sapiens
acgcagcccggcgggaggataaagaccaccacggagccaagccgccatggcctaccacagcttcctggtggagcccatcagctgccac

SEQ ID NO: 381297 - DNA, 100 bp, Homo sapiens
ctgcttcgccacctacaccttctgctcaggctcctggtagctcatatccccctcacatgcaggaccaaactcttacccaggatctactggagcagctgtt

SEQ ID NO: 381298 - DNA, 90 bp, Homo sapiens
gacggcggaaacccgttcgccgagcccagcgagcttgacaacccctttcaggattccttttaagattgggcagcccaagaaacagattgt

SEQ ID NO: 381299 - DNA, 75 bp, Homo sapiens
gcccagtactaccggcccctgcatgaagccagttgagggaagttctccatgaatgtacgtcacaatgatgatgac

SEQ ID NO: 381300 - DNA, 100 bp, Homo sapiens
ctttggtccctcggggcgtctgggcagcctacgctttccggaggaatttggctacaatgcagagacacagaaactactatgcaagaatggggaaacgctg

SEQ ID NO: 381301 - DNA, 74 bp, Homo sapiens
agatctgcgcttccagagcgcagctatcggtgctttgcagagggaagtggaatcccgattgcttgatgattgat

SEQ ID NO: 381302 - DNA, 83 bp, Homo sapiens
tccaggctcggagcgcggcacggagacggcggcagcgctggactaggtggcagctagacttcgggctccttgaggatattcag

SEQ ID NO: 381303 - DNA, 83 bp, Homo sapiens
cgacgaggaagttttctactgtaaagtcaccaacgagatcttccgccactacgaggtgctttcttctgcgacctggtactcat

SEQ ID NO: 381304 - DNA, 100 bp, Homo sapiens
ccctcttggggtcgtcgccctcgagatgattatcgtaggaggagtcctccacctcgtcgcaggatgcttggttaccaagtaaaggattccaaagtggagc

SEQ ID NO: 381305 - DNA, 83 bp, Homo sapiens
ggggctgcggccgcgggcgatgccaaaaacgagtacagaatgcaggctattctgtgagccggccagagggtgacacaggaaag

SEQ ID NO: 381306 - DNA, 75 bp, Homo sapiens
tccaatgcaatgctgtttgccctgaacatcatgaattcccaagaaggagatacagaagtttacggtgagttttat

SEQ ID NO: 381307 - DNA, 75 bp, Homo sapiens
caaaaacaaaattctgaactcaggacttggcaatgagatggaagattttcgaggtatagcagaagaatcatttcc

SEQ ID NO: 381308 - DNA, 90 bp, Homo sapiens
aatttcccttatctccttcgcagctactctcctctgcaaggcctaccgtgggggccacttaaccatccgccttgccctgggtggctgcac

SEQ ID NO: 381309 - DNA, 75 bp, Homo sapiens
ttagactgcgccttaaacagtgtcacagcagattcagaggaacagcgtgccattgatctatataagcagttaaaa

SEQ ID NO: 381310 - DNA, 90 bp, Homo sapiens
gtggagcctcatctcatcttacaggagcagactagcaattctgtggtgttcttggtcacacatttatggagtttctgaagggcagtggag

SEQ ID NO: 381311 - DNA, 75 bp, Homo sapiens
gagagcgcgccaagaccgctgcagccgctggctgagctctttattgagaaactaccaaaacatcgagattacaaa

SEQ ID NO: 381312 - DNA, 100 bp, Homo sapiens
gagaatttgtgatgatgagctgatcttaatcaaaaagagcttgcaagtttttgaagaaacaggaatctctcatagtgaatttctccatcgtcaacatacg

SEQ ID NO: 381313 - DNA, 73 bp, Homo sapiens
accaggaagcgagcactcagcagtttgtcccgctggctggaagcctggcagtgacacgattaagcccaacgtg

SEQ ID NO: 381314 - DNA, 82 bp, Homo sapiens
cacagacaaggagctcagtgacctcctggacttcagcatgcgtccgtctccaagagagtatgaagagagtgcgtctgtaggg

SEQ ID NO: 381315 - DNA, 74 bp, Homo sapiens
caggccccactctgtgggcctcctattccctggagtacgggaaggctgaggcaggagaatcacttgaacccggg

SEQ ID NO: 381316 - DNA, 73 bp, Homo sapiens
gatgaagtgcagaggtttttttctggccacgtgctgtacgccgacatcaagatggagaatgggaagtccaagg

SEQ ID NO: 381317 - DNA, 100 bp, Homo sapiens
cgagaggatcatggcggatggccccaggtgtaagcgcagaaagcaggcgaacccgcggcgcaataacggccggagcctcaacagaaagctcctttagttc

SEQ ID NO: 381318 - DNA, 83 bp, Homo sapiens
tttgactacaattctcaacaacagcatttaaatcaaacggtattgagatggattgggttatgaaacataatggtccaaatgac

SEQ ID NO: 381319 - DNA, 101 bp, Homo sapiens
ctaaacagtggactcaacttcaaagacgttctcaaggagaaggcagacctggccaaaattgcctggaaaagagcagtgagaggagtccgggagatgtgtga

SEQ ID NO: 381320 - DNA, 74 bp, Homo sapiens
agacagaacagttaatcctcaatttaagcctgatctaacccctagaaacagggtgatcagcccatgacctaaac

SEQ ID NO: 381321 - DNA, 101 bp, Homo sapiens
ctggaaaggaccgtccacccctccgcgctggcggtgtggacgcggaactcagcggagaaacgcgattgagccgaggcctgcctggagccccagatcacccc

SEQ ID NO: 381322 - DNA, 99 bp, Homo sapiens
agctgcagaagttgctggagagggtgcctatccctgtaaaggagagcattgaggaacccagtgctaaggatttagagggaaagatcattgtagatgaac

SEQ ID NO: 381323 - DNA, 82 bp, Homo sapiens
cttcgtgtggagcggcacggctgaggcccgcaagcgcaagagctccaaacgagaatggaagccgctggaggaccgtagctgc

SEQ ID NO: 381324 - DNA, 83 bp, Homo sapiens
tcaacgtgtgcaactgggcggtcatgacctcctgccccccgaggtctgcagtctcctgaacccagcagccatctacgccaaca

SEQ ID NO: 381325 - DNA, 74 bp, Homo sapiens
atcaaaacagaataagctggagcaagtagaaaaggagttgttgagagtagcaagttggtcaaacgccatgctgg

SEQ ID NO: 381326 - DNA, 82 bp, Homo sapiens
tggcctcaagttgcctcttgatcctggtcctcgatgggcttcctggaatattggtgtgtttatttgcatcagatgtgctgga

SEQ ID NO: 381327 - DNA, 75 bp, Homo sapiens
tgacttctgggggaacaacaacgagatcctcagtggtctcctctgagcctccggcctccataagacccaaaacag

SEQ ID NO: 381328 - DNA, 74 bp, Homo sapiens
ccagcgggcctggactgtgggctggtgtgtggaactgattgtctacaacctgttgtctctgcgcttcaactcac

SEQ ID NO: 381329 - DNA, 50 bp, Homo sapiens
tgaagaaatggaggcatggaagataacagacgagtacctttggaaaggtc

SEQ ID NO: 381330 - DNA, 98 bp, Homo sapiens
cagagagcattttaagaaaggacagcattcctgtgacctctgcctaccatccataaaatactcattcccctctcagggactggtgattgcagctggaa

SEQ ID NO: 381331 - DNA, 98 bp, Homo sapiens
tgagagagagcgagaagagttctatagcaaattcaacacccaacagcttccttaatagcaaaggtagcaacagcccaggatgatataactggtgatgg

SEQ ID NO: 381332 - DNA, 100 bp, Homo sapiens
gatgcctgcagagctgtggcttaccaggcattgaagttgatatcgatgtggagcacggagggaaaagaagccgcctgacccccgtctctccagagagttc

SEQ ID NO: 381333 - DNA, 114 bp, Homo sapiens
ttgtcaagcaagctgggatctatgagtggaaaggtgaccaagcccaaagaggagaaagatgcttctaaggtgtgctggagaagagaaacgagttggcacacgcacagtgtttgt

SEQ ID NO: 381334 - DNA, 82 bp, Homo sapiens
tgggaagccgcacttacctatgaggccagcaagcggaggtgctgggagcgagttggctgcccgtggaccgggagcccgtgga

SEQ ID NO: 381335 - DNA, 75 bp, Homo sapiens
ggagatctcctgtgctgcgaccactgcccggctgccttccacctccagtgctgtcagagcaccataacatggtgt

SEQ ID NO: 381336 - DNA, 75 bp, Homo sapiens
caagagatggaaaattgttgcctgaagaataccaaggaggatcttttagggtggttctcttcccaaagtggaagc

SEQ ID NO: 381337 - DNA, 83 bp, Homo sapiens
ctcagatcaaaacctgttactgaaggaactggtgatattattaaggtgccacgggtcggagacagcacggaaggagagacaag

SEQ ID NO: 381338 - DNA, 75 bp, Homo sapiens
gggaacatgacgcaggtgcaggtgtctcttctcgccctggcggggaaggagaagaaggaagttgtggaagaggca

SEQ ID NO: 381339 - DNA, 100 bp, Homo sapiens
gccaggggcagccggctctggtgctcccagaagagtactatactggcaattgctggagaagattttgcaattgttgcttctgatactcgattgagtgaag

SEQ ID NO: 381340 - DNA, 100 bp, Homo sapiens
acaagggaaatgccctttaaaataaaccagggaagccccacccaccagaagccaagatgtccagcaagcgggccaaagccaagaccaccaagaagcggcc

SEQ ID NO: 381341 - DNA, 82 bp, Homo sapiens
ctggaaagaagttcttcgtcggcgcctagcgacgcccaacacctgtccaaacagaaaaccagtagattcccagacatcgcga

SEQ ID NO: 381342 - DNA, 100 bp, Homo sapiens
cctggaggaggtggaagcagcagcagtgaggccaaattgtccccaagagaggaggaagaactggatcctagaatacagtccttttcagtggagagggaac

SEQ ID NO: 381343 - DNA, 100 bp, Homo sapiens
gggatgagagctttgccctgggcagccagaacgaggtgtactgcctggacgacttctacagatgcttcctgaaacttggagagtggcagctgaatctaca

SEQ ID NO: 381344 - DNA, 83 bp, Homo sapiens
gcagcagctcctgcctattctcctaacatgtatcctggagcgaatcctaccttccaaacagatccacacaacttaaagatctg

SEQ ID NO: 381345 - DNA, 74 bp, Homo sapiens
ctgctcccatcattgatgtggtgcgatcggctcatcagattcaagagatgtttccccaggttccataccatctg

SEQ ID NO: 381346 - DNA, 88 bp, Homo sapiens
actgtgacatgtctgatcccttgctcccatccctgcagcatgaacaagagactctccaacatgtgccttctgaccatacaaatgaaac

SEQ ID NO: 381347 - DNA, 75 bp, Homo sapiens
tggggatttgacagtataagtagtgttaaatttaacccaattgagtatgttccagtaaaaggagaccatgtgatt

SEQ ID NO: 381348 - DNA, 100 bp, Homo sapiens
ccattcccgccgggcctttggccgactcacccatggtgtgttgaggctcctggaacacggggaggagtacgtattcaccctgcctagtgcctacgcccgg

SEQ ID NO: 381349 - DNA, 75 bp, Homo sapiens
gaagtttcttctgggtccatcaccaaagagcagatgccaaatctgatgaggaaactgaggcttggtgaagttacg

SEQ ID NO: 381350 - DNA, 75 bp, Homo sapiens
ggaaaatgtgagaagaaatgaattcaaccaacagtgagccccaggcaggatgacgcaaaacacggtgattgtgaa

SEQ ID NO: 381351 - DNA, 50 bp, Homo sapiens
ccggagagttctgcatgttgattcgggtcccttcagtgttgtacgacgat

SEQ ID NO: 381352 - DNA, 50 bp, Homo sapiens
ccccgaccacttgcggcctgagtatggttctgcggggagtgtctccagcc

SEQ ID NO: 381353 - DNA, 100 bp, Homo sapiens
ggtgctgcaagagaaggcactcaagtttatgtttggctttggttgaaataagaatttagcctgtatgtactgctttaactcctggaagaatgacagatga

SEQ ID NO: 381354 - DNA, 103 bp, Homo sapiens
cgtctgtctggtgataccaggggcagagggaccactctgacagctccagagaagccttgggacaccaagagaagctaaaagctgagcaccgtcacagagcaaa

SEQ ID NO: 381355 - DNA, 98 bp, Homo sapiens
tcgagacattttacgagtacaactggtacgaatatttgaactgctggcagatgctggtgtcattagtcacagcatgagatactttgatagagcagcct

SEQ ID NO: 381356 - DNA, 100 bp, Homo sapiens
aggccagatcctctggttccggggcctgaaccgtatccagactcagggttctccaaaaaatgtggaatcctttgcatctatgctgagacattctcctctt

SEQ ID NO: 381357 - DNA, 100 bp, Homo sapiens
tccaacagaacgacctagtatttgaatttgctagtaacgtcatggaggatgaacgacaggtgcggagctctggactgggattaagaaggggcccccacgc

SEQ ID NO: 381358 - DNA, 100 bp, Homo sapiens
gcactatgagctttacaggcgctgcaaactggaggaaatgggctttacagatgtgggcccagaaaacaagccagtcagttttaacggtgactccctgatg

SEQ ID NO: 381359 - DNA, 82 bp, Homo sapiens
cggcatctcgtgctgctccacggcgtgtgcatggctggagacagtacaacagaatagctcgggaatggactcagaagtatgc

SEQ ID NO: 381360 - DNA, 101 bp, Homo sapiens
tggtcttctcgtcggattgcccatgcacttgttgcagaaacagccaagtgacaaccatgagtggaaaaaactaattatggttcagcactggcctgagacag

SEQ ID NO: 381361 - DNA, 100 bp, Homo sapiens
gctcggcagcatggcgtccgtgacgctgagcgaggcggagaaggtgtacatcgtgcatggcgtccaggttcagattcagaacaagaaagtggacatctct

SEQ ID NO: 381362 - DNA, 50 bp, Homo sapiens
caatgttctgccatgttgagcctgaacaacaaaacaagctatcgatcagg

SEQ ID NO: 381363 - DNA, 75 bp, Homo sapiens
atgctccaaacctcacgtgatacagcctatcgaagtctgcattatcacgaggagcttggaaaggaggtaacacac

SEQ ID NO: 381364 - DNA, 74 bp, Homo sapiens
cgggaggaccaggatgctgccttcttcaaggaatcagagatcattgatttcttcctgggggcctctctcaagga

SEQ ID NO: 381365 - DNA, 74 bp, Homo sapiens
agaacttcaggaacctgctgtcagtggtgcgtcagcatttatcccgtttgccaaccattgatccgaataccagg

SEQ ID NO: 381366 - DNA, 102 bp, Homo sapiens
gggagcagtacacctgacgagtttcctacggacattccagggaccaaagggaacttcaaattagtcagaggtctcttcattattgatgacaaaggaatccta

SEQ ID NO: 381367 - DNA, 98 bp, Homo sapiens
gtttgtaactacctggcattgccttttgttgagagaaatggtcaatgcatggtttgctgagagagttcacaccatccctgtgtgcaaggaaggtatca

SEQ ID NO: 381368 - DNA, 82 bp, Homo sapiens
gaagtccagagctgaggactgcctgtttgcagaggcagaagaggcctggaccttggcgcacacagacccaggaacagatgag

SEQ ID NO: 381369 - DNA, 129 bp, Homo sapiens
aatcgcgatgttggtgagcgtggggaatctggaagaggctggggagtctgtgtccttccagctgcagatacggagagtgtcccaagggccctgacatcctggtggtcctgctctcagtgatgggggcca

SEQ ID NO: 381370 - DNA, 100 bp, Homo sapiens
gggactttgtggaccgtggcttctatagcgtcgaaacgttcctcctgctgctggcacttaagaaaaggttgaaagctgctgaagcagacagcaaactgaa

SEQ ID NO: 381371 - DNA, 75 bp, Homo sapiens
aggaagacgaatcgttaaacatcttaggtcagccggccaagagccactgcacaatgaggagctggcaggagcagg

SEQ ID NO: 381372 - DNA, 124 bp, Homo sapiens
tggtcctcagctgtttacaatagagcaatggggcagtcctgagaaactgcccagagctcacacatggaactagtttcagaaggaccagttccctgggtttccaaaaacagtgtaacatttgtgg

SEQ ID NO: 381373 - DNA, 119 bp, Homo sapiens
tcagattcttgcagcccttcaagaaagacttgatggtctggtagaaacaccaacaggatacattgaaagtctgttcggcacttgaagtactccttgtttaagaaatcactactgggcag

SEQ ID NO: 381374 - DNA, 74 bp, Homo sapiens
agcccggccccgcccgcgccggaagagccacgccggtgctgaaggtcgccatcctggctgagaagtacgcggtg

SEQ ID NO: 381375 - DNA, 80 bp, Homo sapiens
agcgccgctgcctcgcctcggtacgccgcgcggcgcggacggcgcgtgacagagttagtccttgataattgcctgtgtgt

SEQ ID NO: 381376 - DNA, 100 bp, Homo sapiens
ggctggggtgtcccagaagagccaggaatcgaaatgcttcatggaacaaccaccctggccttcaagcaacatctgaatgaattgatgacgaagaagtggc

SEQ ID NO: 381377 - DNA, 90 bp, Homo sapiens
tgaaaagctgggaatattcgtcaagacagtaacagaaggtggtgctgctcaacgggatggcaggggcccatcctgatggagctgcagact

SEQ ID NO: 381378 - DNA, 82 bp, Homo sapiens
atatctttgctctcaaggatacccgcctcaaccgccgctccgctaagactttgaccccgacgcaggcttcagtgattgccgc

SEQ ID NO: 381379 - DNA, 74 bp, Homo sapiens
tgagattgttggcctttcaggaagagtgcttaagagcctgtcatagggaactgcatggatagaagttctccagg

SEQ ID NO: 381380 - DNA, 98 bp, Homo sapiens
atgatttaaacaagagatttccacagaagcatgcaatgatgctacctgttctgacccatcatatccgctaccaccaatgcctaatgcatttggacaag

SEQ ID NO: 381381 - DNA, 100 bp, Homo sapiens
attgactacatctatactgctgaaatcgaggtgactgaagagaatgtccagatggagtccgcctgcgtgaccatccatgaggctctgaaaacggtgattg

SEQ ID NO: 381382 - DNA, 83 bp, Homo sapiens
cctcggtcagtggactcttattcttcaactcagcatgttccttgttcagaatcaagtggatgaagttattgatgtcatgcaag

SEQ ID NO: 381383 - DNA, 51 bp, Homo sapiens
tcctggccaccgactcctacaagggcttatttcaaaacctttgtccctcag

SEQ ID NO: 381384 - DNA, 75 bp, Homo sapiens
ctgggaggcaaaggctacaagctgtccccagaggactacacgctcaagcttcctgcctgacacagctcacttcaa

SEQ ID NO: 381385 - DNA, 75 bp, Homo sapiens
ccccggtacggacctgtgcaggtgaggacaggccagtatggatggagcagatctgtgttttgaaatcgtaaagcg

SEQ ID NO: 381386 - DNA, 87 bp, Homo sapiens
ccaaacacagaatcagcaaagaggaggccatgcgctggttccagcagaaggttcagaaaagagaccctcgtgactggactgcacagt

SEQ ID NO: 381387 - DNA, 100 bp, Homo sapiens
ctacatcctgttcttcaccgttatcatctatgttcggctggacttctccatcaccaagggccaagaccagcttcaagtctccatggtaccagaaaacaac

SEQ ID NO: 381388 - DNA, 82 bp, Homo sapiens
catggagttcattgaattatggcatagatcttgggaaaattgcggagccatattggattgttcttcatgatcgaattgtgag

SEQ ID NO: 381389 - DNA, 51 bp, Homo sapiens
ccaccacgataatgcagttcttattactagtttcagaagaggagccccgcc

SEQ ID NO: 381390 - DNA, 100 bp, Homo sapiens
aaggagtgcttctaccagcccatgcccctgaaggcctcgctggagatcgagtaccaaatggaacttgctaaggaagaaaagtgtgaatttctgccattcc

SEQ ID NO: 381391 - DNA, 83 bp, Homo sapiens
ctggcctggaggctatccagcgacttcgcaggtgagcagtaacggaaatcagccccgtttattcctcccagcacctgccttat

SEQ ID NO: 381392 - DNA, 100 bp, Homo sapiens
gggaaagacctgctcgccttggatgccttttccagtgactccattccactctttgaaggtcacaagaggaccagattaaaaatgctattgataaactttt

SEQ ID NO: 381393 - DNA, 98 bp, Homo sapiens
gcggtagcagcggtggtgctggtggcggcggcgctttcggcgcgggcccgggccccgagcgcccgaacagagctaaagttgcagacaagatccagctc

SEQ ID NO: 381394 - DNA, 51 bp, Homo sapiens
agaccgatgcagtcttacagatgcagcgggctacattgagagacctcagct

SEQ ID NO: 381395 - DNA, 90 bp, Homo sapiens
ggatcattgtgaagcagctggaggaagacctgtatgacggccaggtgctgcagaagctcttggattcgttgggcttttgccagctctttt

SEQ ID NO: 381396 - DNA, 75 bp, Homo sapiens
gtcaattaccatcctttaccaggattatctttctcaaggaatagatctttctggaatagaagtgatagaaaatga

SEQ ID NO: 381397 - DNA, 75 bp, Homo sapiens
gtggccatggggagcctcagcggtctgcgcctggcagcaggaaccctaaggactctgcaatatgaataattccct

SEQ ID NO: 381398 - DNA, 100 bp, Homo sapiens
tctgggtgagccttctcgtggcggcggggaccgtccagcccagcgattctcagtcagattacaggagcttattaatcataagaaggctgaggacacagag

SEQ ID NO: 381399 - DNA, 75 bp, Homo sapiens
tgtacaacccgacgaggaacgaatgggacaagatcccgtccatgaatcagataaaataccatgaggagtttgaga

SEQ ID NO: 381400 - DNA, 90 bp, Homo sapiens
cgacgagtttgaagagttccctgccgaagtatcaaatcatgggtggataagatgcaagaagaccttgtcacactggcaaaaacagcaagt

SEQ ID NO: 381401 - DNA, 75 bp, Homo sapiens
ccccgccgctctgtctacaacccgagaactggtcatgctgctggagtggtggtcctgcacggagtgtacactgtt

SEQ ID NO: 381402 - DNA, 97 bp, Homo sapiens
tgctggcctcagtgattctgccagagatgaagtgcagcagaagtggattaatcaggatggctgtcagctatgtttccagtgtcctctgggtgtttcc

SEQ ID NO: 381403 - DNA, 75 bp, Homo sapiens
gctcaagatctcagagaaggaggaggtgaccacgcgcgagattgctacaaaggaccctttaaaccctattaaaca

SEQ ID NO: 381404 - DNA, 51 bp, Homo sapiens
ggacaagcgcgggacccgctatgaggtatggcccatctcctgtacgcttgg

SEQ ID NO: 381405 - DNA, 90 bp, Homo sapiens
gattttctaaccaagcagatggagaaaatccaaccagctcttcaggagaagcacgccatgaaacagggaggtgcagaggggactccaaga

SEQ ID NO: 381406 - DNA, 100 bp, Homo sapiens
aaaatcctccgggctgtggtcaaaatcgtggaagaatgggtcaagaataactccccaatggcagccaatcagctgtctgtgagatgtgtggtatcgtggg

SEQ ID NO: 381407 - DNA, 75 bp, Homo sapiens
agctgatctccctgctaaatgaaaaagggcaagatactggggtctatgttaacaatgaatgggcaaccagtgttg

SEQ ID NO: 381408 - DNA, 90 bp, Homo sapiens
agaaatttctacacctacccattggtctaaacttgatccaaagacaatgaagaactttatgaaatcttcctctcaagagcaaaagaacgg

SEQ ID NO: 381409 - DNA, 100 bp, Homo sapiens
ttcattccttcaagcaattcccaagatatgctttacaggaagtatggtgctggcatctgcttggcttctagagagtcttacaatcgtggaggaaggtgaa

SEQ ID NO: 381410 - DNA, 88 bp, Homo sapiens
ttcctgttcggccatcttggctcctccctgccagatagctcttattttgaggttgatgataattagaagcatgctttccactgaactt

SEQ ID NO: 381411 - DNA, 75 bp, Homo sapiens
catgttcctggtgtttgacctattttctcaactgaagggcctgaacttgtcccataataaacttgggttgtttcc

SEQ ID NO: 381412 - DNA, 90 bp, Homo sapiens
gctgcacctcagtcatctgctccgacaagacgggcacgctcaccaccaatcagatgtctgtctgccggcatggaggagcaggacttggag

SEQ ID NO: 381413 - DNA, 100 bp, Homo sapiens
tttgacctcttcgatgtgcgagactttggaaaggtggaggcaatgcccagagctgtggcagccaccttgcagccgtgaagcaccagtgggaatgacagtc

SEQ ID NO: 381414 - DNA, 75 bp, Homo sapiens
atgtctgaaggtggaaggaaatccagcctgctccagaaaagcaaaggactcagaattcatgattgaagaaatgca

SEQ ID NO: 381415 - DNA, 100 bp, Homo sapiens
agaaaaggggtgaaagagaagattgcaactttgagtcagacctgtaggcctgatagactgattaaaccacagattttggggaatgtctcagaattccaaa

SEQ ID NO: 381416 - DNA, 75 bp, Homo sapiens
ccaccaacgagagtccacctgaaggagctccctgatggctcggagatcccgctccctcctattctgctcggcagg

SEQ ID NO: 381417 - DNA, 80 bp, Homo sapiens
gtatccggccaattgagattcggagttaaaacaggactgcctggacagatcctttcgggcacaggtgttcagctgccctg

SEQ ID NO: 381418 - DNA, 100 bp, Homo sapiens
aacgactgcccacggaggaagagtgggagtttgccgcccgagggggcttgaagggtaacctggatgaggacatcattgcagaagagaacatcgtttcccg

SEQ ID NO: 381419 - DNA, 100 bp, Homo sapiens
cgccagtagccgcagcaccgcagccttgggcctcgcgccggctatggccgtgccctggggctgagccctcagcttcggaaccaaaaagaagcttcccaga

SEQ ID NO: 381420 - DNA, 90 bp, Homo sapiens
aaggctaggccgcgagcttagtcctgggagccgcctccgtcgccgccgtcagagccgccctatcagcagtccagagcgtgagtccattca

SEQ ID NO: 381421 - DNA, 75 bp, Homo sapiens
tggatgatgcagttcaaataactaagattgccaacactcctgatagctgaatgtgtgctggtttacatgactcca

SEQ ID NO: 381422 - DNA, 102 bp, Homo sapiens
ggatcaacacatgttttacagtggtgtaatagatgtaatcacaaagacatggagagagaagaagaaggaggttcctgctgtgccagaaacccttaagaaaaa

SEQ ID NO: 381423 - DNA, 100 bp, Homo sapiens
tgtccttctttgtggagagcaaggcctcaagaaaggagaactagttatgaaccgtttcatccaggcccatccccagtggatcatgattcactggaatcga

SEQ ID NO: 381424 - DNA, 73 bp, Homo sapiens
gatgccaacccaatttggtggggaaagcaagcattaaaggaatctcagatttggaacttggccacaaatcgcc

SEQ ID NO: 381425 - DNA, 90 bp, Homo sapiens
ctggatcagtttctttgtcatgtagccaagactggagaaacaatcctcctgacaaggtgatccgggcgggccccgcaggaattttatccc

SEQ ID NO: 381426 - DNA, 98 bp, Homo sapiens
ggagagcttcatcaaaaatagtgatagctttgataaggattgcttggcattttgtacagaaccagtttttgccagtttagccaatgttcttggtaact

SEQ ID NO: 381427 - DNA, 100 bp, Homo sapiens
ctggactgccgccatggaactcagcgccgaatacctccgcgagaagctgcagcgggacctggaggcggagcatgtgttggctgattgcaattctggccca

SEQ ID NO: 381428 - DNA, 75 bp, Homo sapiens
gagttggaggagcatgtgtcccatgtgtccttaagtttgctcgcttggtcaagtcctacgaagcccaggatcctg

SEQ ID NO: 381429 - DNA, 75 bp, Homo sapiens
gaaagaatccgaagatcagaaacgcattgatatgaaccatggacaagtatattctgctgccacaaagactgtaaa

SEQ ID NO: 381430 - DNA, 77 bp, Homo sapiens
gccaaggtggatgaggcccaggctgatgggaaggagcacccaggagctgaaggaggcaccgacatcatctcctgctt

SEQ ID NO: 381431 - DNA, 100 bp, Homo sapiens
actaccatgacgaaaacatgtactacagccagtcttctatgtttccacatcggtcagaaaaagataatcgcctaccatttggtgcaagcaaaaagcaatc

SEQ ID NO: 381432 - DNA, 83 bp, Homo sapiens
cccaaagatccccgttcctggagattctgattgaggcattgaagttgatatcgatgtggagcacggagggaaaagaagccgcc

SEQ ID NO: 381433 - DNA, 74 bp, Homo sapiens
ctgactatgaagaggtgaagaaagagctgaaggcaattgaaggaacagactaaaaatcgtgtcctggaaggaaa

SEQ ID NO: 381434 - DNA, 82 bp, Homo sapiens
gggggcagcgcgatgaggcgggtgaccctgttcctgaacggcagccccaagaacggaaaggcaacatgagtgagaatgagga

SEQ ID NO: 381435 - DNA, 97 bp, Homo sapiens
gcgctctgggcacagccttggaaagtcaggaccgcgacggcagcagagcagaaaaccagtagattcccagacatcgcgaagtgaatctgaaattgtg

SEQ ID NO: 381436 - DNA, 88 bp, Homo sapiens
gggacgctctcagctctcggcgcacggcccagccgccgccgcgccgccgtcgctctccaacgccagcgccgcctctcgctcgccgagc

SEQ ID NO: 381437 - DNA, 87 bp, Homo sapiens
agcttggtgtccccaagacccacctggagatgaagaagatgatctcagaggtgacaggagggggcggcgactggcggcgcgatggac

SEQ ID NO: 381438 - DNA, 75 bp, Homo sapiens
cagatccgtagggaggacaccgtgacttcccggacgctgggaaatgtgacatgggctcgagggttggctaccccg

SEQ ID NO: 381439 - DNA, 75 bp, Homo sapiens
acaagccacggcggactctcccgaggcggaacctccacgccgagcgaggttatgaagacagtatggagtttccag

SEQ ID NO: 381440 - DNA, 71 bp, Homo sapiens
agacaaagatgggcaaggctctgacaatccgggccaggttgtttttcaccattcagaacattgcctgaagc

SEQ ID NO: 381441 - DNA, 51 bp, Homo sapiens
atcatcggtcaggccaagaagcatccgagctacgctggggaggaggaggag

SEQ ID NO: 381442 - DNA, 75 bp, Homo sapiens
cccacatttgcagctcattgaaggaaaggctcttgatggaaatgtgtatgatcatctcaaggattatttaatagc

SEQ ID NO: 381443 - DNA, 98 bp, Homo sapiens
ccgacggctgctcaaacatcaggctgagcttcagtcattgtctattcctggaacttaccaagagaagatcacccacctgggacattctctgatgagtt

SEQ ID NO: 381444 - DNA, 95 bp, Homo sapiens
tagcaaccgggcattatattatctcttggaaaagtagaacttcatggaggaacacggagtgacccaaaccgaacatatggctaccatagaagcac

SEQ ID NO: 381445 - DNA, 100 bp, Homo sapiens
tgaattttctaaggtgtcattagacttgttgagcccattaaagaaatggaagtctcgctatctgatggagcagaatgtcaccaagttacttcggcctctg

SEQ ID NO: 381446 - DNA, 74 bp, Homo sapiens
gctccgggacaacatgctgcggggcacaggtcacgagaagagaatgccttctagatgcaaaatcacctccaaac

SEQ ID NO: 381447 - DNA, 89 bp, Homo sapiens
ggagattttccgcctgtctcgtcaccacatccagattatttactggcaagatgagcaggattaccatgaaagaaaagtccagatggact

SEQ ID NO: 381448 - DNA, 100 bp, Homo sapiens
atggacccaccttttccagcacaccttaccgctaccaggcctgcagttccaggaaggatgttacctttgacgatgacagtgttaatcctgctgctgctcc

SEQ ID NO: 381449 - DNA, 100 bp, Homo sapiens
aaataaaatttatttttccgccattgccaaaacacagaagatttggactgcgtatctcgaggctataatgaaggatgaaatctgtaagtacagacctgag

SEQ ID NO: 381450 - DNA, 76 bp, Homo sapiens
tctcaccccacgagacctacttctgcatcaccacaggtttcagcagtagtgacttttcagacctgagtaatggaga

SEQ ID NO: 381451 - DNA, 82 bp, Homo sapiens
ctaaagcagcgtgcgttcagccctgggatgcttcaggactgccccaaggcccgcagggaggtggagctgcactggcgggcct

SEQ ID NO: 381452 - DNA, 75 bp, Homo sapiens
agaagaagaagttgcgaaggatccccaacggggaggccaacgtgaagaagtacatgtactggacagactggggtg

SEQ ID NO: 381453 - DNA, 51 bp, Homo sapiens
tgcttgttgatcccagagataaagggactatgttcggagtgaactggagtt

SEQ ID NO: 381454 - DNA, 90 bp, Homo sapiens
gctgctgtggcggccccggcctcccacactcctgagccaggaacagatcaagctggtcagtgagaaggtcggaggggccgaggggaccaa

SEQ ID NO: 381455 - DNA, 96 bp, Homo sapiens
ccacccgcccaggccagccccagcagcaacagcagcacagggcttgctctcaattttgcgcaagttgaaaagtgcaccagaccaggaggtgagaat

SEQ ID NO: 381456 - DNA, 75 bp, Homo sapiens
tgtcttcttccttactgtaatgggactatttctactccacataatctggtgaccaagaatatggcccaggtgacc

SEQ ID NO: 381457 - DNA, 96 bp, Homo sapiens
agatgatggatctccaacatggcagccttttccttagaacaccaaagattgtctctggcaaagcttcttggacacttaatgattgttggcaagaaa

SEQ ID NO: 381458 - DNA, 74 bp, Homo sapiens
agaccgagtcagaacccgagtgctgcttggcggcgagtattggtaaaggttttcaaggtgtcatgaaaagatgg

SEQ ID NO: 381459 - DNA, 100 bp, Homo sapiens
acacgtgggaaccggaggagaacatcctggaccccaggctgctgatcgccttccagaacagattgcagggtatgtgagccagcccatggtggacgtgtca

SEQ ID NO: 381460 - DNA, 100 bp, Homo sapiens
ttggcctctcctgggatcggcccaaggccagttctccgcagggatctacaagggcttctgtctggatgtgatcaggaataagtacgaatgtgagctgcag

SEQ ID NO: 381461 - DNA, 82 bp, Homo sapiens
cggagttctacgtgtcccccgaggatctggaggcacagctgcagtctgacgagagggagcggttctggtgaggttggaagga

SEQ ID NO: 381462 - DNA, 75 bp, Homo sapiens
cctgcctgcgctcctcctggctgcagagtaccccaccagcgcaatcctgcaatgataaggcgaagttgagaggcc

SEQ ID NO: 381463 - DNA, 121 bp, Homo sapiens
atgaagcagaaaggagtgatgaatcagcccatggcttacgctgcacttccatcccacggtcaggtttgtccacccccgttttgggcccatcaaatgcatccgcaccctgagagcagtggag

SEQ ID NO: 381464 - DNA, 80 bp, Homo sapiens
tgatccgggagtctttccactgggagcccagcagccggggccgccctattacaccgacccaggaggaccggggatgaacc

SEQ ID NO: 381465 - DNA, 100 bp, Homo sapiens
cagaatttgtatagagatgtgatgttggagaactacagaaacctggtctccctagccaaaactggacaagccaaggcatctgtagccaaagtaaacaaat

SEQ ID NO: 381466 - DNA, 83 bp, Homo sapiens
ccaagcacattatttgatttcttggaatctaaaatgggaactttgaatgtggaagcttacgaggaaatatttcagtaaaagca

SEQ ID NO: 381467 - DNA, 101 bp, Homo sapiens
ttcggatggtgaactcattagaagtagtcgggaatctgcctttgtttatgccatctcctcagctggagttgtatttgccatcaccagggcctgtagccaag

SEQ ID NO: 381468 - DNA, 105 bp, Homo sapiens
ggcaatttctgaacccagccggctccatctcagcttctggtttctaagtccatgtgccaaaggctgccaggaaggagagagaagaagaaggaggttcctgctgtg

SEQ ID NO: 381469 - DNA, 75 bp, Homo sapiens
agaccctgcaaagatcctgggagaccaagaggtcggaaaggtctgcttggaagccagacgaaacggctccacaga

SEQ ID NO: 381470 - DNA, 48 bp, Homo sapiens
ctggcaggaggcaagagcaccagagacgaagtttcatcatgttgtcca

SEQ ID NO: 381471 - DNA, 75 bp, Homo sapiens
actgtctttatctgctgtcaaggatcttgtgtgctccatagtttatcaaaagttttacagctcccagcacagtag

SEQ ID NO: 381472 - DNA, 80 bp, Homo sapiens
attcccttcaattcaagtaacagcttcaaaagcagtggactgtcttttggattcaaagtgggcaaaggccaagaaaggag

SEQ ID NO: 381473 - DNA, 101 bp, Homo sapiens
tgcttttcctcgctggggtgtacggaagaggagttgtacgcatgtcagagaggttgcaggctgttttcaatttgtcagtttgtggatgatggaattgactt

SEQ ID NO: 381474 - DNA, 75 bp, Homo sapiens
atggcaagtgggacaggccccaaattgtctgcaccaaaccgcaccttttgacaagacagccaacatcaccttctc

SEQ ID NO: 381475 - DNA, 50 bp, Homo sapiens
atgcagttggatggcggtgactgcgtgtactatactggcaattgctggag

SEQ ID NO: 381476 - DNA, 50 bp, Homo sapiens
atgccatcgtgatggcggatgagagacagtcttgcactgtttcctaggct

SEQ ID NO: 381477 - DNA, 82 bp, Homo sapiens
agaaatttgtgctcaaaacccccaagatgttgacgatgagtatgaggacgaggaccagtgggaggatggagcagaggacatt

SEQ ID NO: 381478 - DNA, 75 bp, Homo sapiens
agaattcctacttcagagctatccagccgttggacataccagatggtcgaagagctccacttcctgctcattacc

SEQ ID NO: 381479 - DNA, 143 bp, Homo sapiens
ttcatccctctctggccactatggaattctaatttgaaccatgtttggattgaagccgcctctgtattacttaccaggtgacttaagagattaaaattaatttggttgctgttggttctgaacaaataatgagttcttttatt

SEQ ID NO: 381480 - DNA, 82 bp, Homo sapiens
agtgttcttcagcatcaagcctacaggaacatagaaagatatgaagatcaatgatgcagactgatggttttgatgaagctgg

SEQ ID NO: 381481 - DNA, 100 bp, Homo sapiens
ataatacctcagtgttcacataactggtggttgagtttgcctcttatggtgacttaaagaatgctattgaaaaactttctggaaaggaaataaatgggag

SEQ ID NO: 381482 - DNA, 90 bp, Homo sapiens
cggaggaccaggcgcggcgcggctgcggctgagggcgccctgcgtccggcagaggaggcgagcatcccgctcaggtgatgaggaacccct

SEQ ID NO: 381483 - DNA, 102 bp, Homo sapiens
cagtgacaagaaaagaagagatgaaggatgaggaccgtgggagtggggcctttagcctggagagaagtggatgggccctatacctccagccgtgaatgccag

SEQ ID NO: 381484 - DNA, 100 bp, Homo sapiens
ggcaggattgggagagaggtagctacccggatgcagtcctttgggatgaagaccaccctcaaagaagaagtgaatgaactacaatacagacaagaacagc

SEQ ID NO: 381485 - DNA, 73 bp, Homo sapiens
cagtgggccctacacactcatcaccaccgccgtctccgccgacctggtgactcctgcacctgcgccggctcct

SEQ ID NO: 381486 - DNA, 90 bp, Homo sapiens
cacaaagggacctgatgaagcgaagatcaagacttttggaacagcgatcgtaatcaatcctgagaaagacaaagacatggtccaagacct

SEQ ID NO: 381487 - DNA, 100 bp, Homo sapiens
gttcttggtgagaagggccggcggattcgggaactgactgctgtagttcagaagaggtaaagaagttaaaagcgtttagtggcgacgtgtcgaagctgtc

SEQ ID NO: 381488 - DNA, 87 bp, Homo sapiens
gagggctcctccggcgccgccgagctgcgcccgctgccttcacaccccggacatccgcgccacactaatctatgccagcaattatga

SEQ ID NO: 381489 - DNA, 80 bp, Homo sapiens
gcctatggtcggcctccgacagcgctccggagggaccgggggagctcccaggcgcccggtaagactttgaccccgacgca

SEQ ID NO: 381490 - DNA, 100 bp, Homo sapiens
cgaaggccgggacccggttccccggcccacagtgggggtgtgcaaacccgagagaactggaagctccaccatgaggcgaggtggatggaggaagcgagct

SEQ ID NO: 381491 - DNA, 75 bp, Homo sapiens
cggcgaggatcaaaatcttcgaaggaggatgccatggacaatattaccaggcagaaccaattctacgatacccaa

SEQ ID NO: 381492 - DNA, 83 bp, Homo sapiens
ctccattggatttaaaagacagtcctcgtcagcactgactttcagctatggaatcggaaaacgaagccccctcctgtattgac

SEQ ID NO: 381493 - DNA, 100 bp, Homo sapiens
ttaatctcccaaaatattctagaaggggaaaagctacttcaagatggagacgagagatctggacttctgaacatctaccggaaaagataaaatgtgcaag

SEQ ID NO: 381494 - DNA, 100 bp, Homo sapiens
cctgaagtcctcgcccagaaaccttacagcaaagccgttgactgctggtccatcggagtgattgcctacatcttgctacagatgcacatgttgaatggag

SEQ ID NO: 381495 - DNA, 75 bp, Homo sapiens
ctggagtaaccctcactggagaatccagaggtcgccactgggacactgtgaaccaggagtgagtcggagctgccg

SEQ ID NO: 381496 - DNA, 101 bp, Homo sapiens
tggtgcgaggagaactactccgtgacctggtacatcgccgagttctaatgtggatatactgaaagatcctgaaacagtcaagcagcttggtagcattttga

SEQ ID NO: 381497 - DNA, 82 bp, Homo sapiens
tcacctcatgctgagtctcagcccagcgtccgcacctcgacagagacgactgacttcccaagtaagaagcggaagaggagcc

SEQ ID NO: 381498 - DNA, 100 bp, Homo sapiens
ctgagtgatctctatggtgacaacagagtccatgaggaactctaatgatccaggacaaagaagttaccctggagtatgtatcaagcctggatttttggta

SEQ ID NO: 381499 - DNA, 88 bp, Homo sapiens
atggagattttgatgtggatgatgccaaagttttattaggaagtattgatgaagatgttgtggtgatagaagcttcctccactcccca

SEQ ID NO: 381500 - DNA, 51 bp, Homo sapiens
cgctgtccctgcggcttctgggggctttcatgagaaggacaagaagccata

SEQ ID NO: 381501 - DNA, 80 bp, Homo sapiens
cacctgagcccccgctgagcagcccagccagtcagcacaaaggaggacgtgaaagaagatgctgatatgctacaacacgg

SEQ ID NO: 381502 - DNA, 90 bp, Homo sapiens
gcctcccaagtagctggaattacagatatcccagaggcatccttcctggaggaagaggatgaagaccccatcccacccagcaccacgacc

SEQ ID NO: 381503 - DNA, 98 bp, Homo sapiens
tggagcagaaattggaggctcagcatagtgatgctgcttcaaaagtcatggtggaattgctcggaagttacacagaggacaatgcttcccaggctcga

SEQ ID NO: 381504 - DNA, 82 bp, Homo sapiens
gccatgttgaacttattcagaatggatccttcaaaccaaaaatgtggtggaagaaagaaaaccgtgtctttcagcagcatgc

SEQ ID NO: 381505 - DNA, 50 bp, Homo sapiens
gccgtctcctgcctcctgcttgcaagtttgggccccatggtatccctgtg

SEQ ID NO: 381506 - DNA, 101 bp, Homo sapiens
tttcggctcagtggggaggccttcgactggctgcttggggagattgagtccaagttcaaccaagccattgatgcagaaaatgcgattgtgcatatgggcgg

SEQ ID NO: 381507 - DNA, 75 bp, Homo sapiens
aatacccaggtacagctccacctatctaccagttgaaattactgacagccctgtcctaggagcacaacgtccgag

SEQ ID NO: 381508 - DNA, 100 bp, Homo sapiens
ctgctcttccaagcaaggaagtcgacagggtgaagttgaacaaattgctatgatgaaaccaaaaggccagactgaacacgatgagggtatgcttgaatat

SEQ ID NO: 381509 - DNA, 82 bp, Homo sapiens
gtccatcttctttgaatctatgccctacaaggatgcaaagccggaatacgagcagtaatcgctacgcctgacaaacctgctg

SEQ ID NO: 381510 - DNA, 82 bp, Homo sapiens
ttgttcccttgttggaatgccacaacctgatttctcctttcttaggatgccacagaaacagatatgcagtatgcagcaaaag

SEQ ID NO: 381511 - DNA, 73 bp, Homo sapiens
aaaatttgagaaggaggctgctgagatggctgcattacaaagtcctttctatggtgacaaaatgaatttatac

SEQ ID NO: 381512 - DNA, 99 bp, Homo sapiens
taaagattttgtccgacacttacactgttgagaaagtggaagttcatcgtctgattagagacgagttgtactgctgtcacaggaaatggacgctggatt

SEQ ID NO: 381513 - DNA, 74 bp, Homo sapiens
ccttctccgaggacaacttgcctcctccaccagcagaattcagaggatgtggatccctcagttggtcgattcag

SEQ ID NO: 381514 - DNA, 73 bp, Homo sapiens
ttcgatatatacagagacagtagggaatgtatcctgtcaggtataatgtcagtgaatggcaagaaagttcttc

SEQ ID NO: 381515 - DNA, 100 bp, Homo sapiens
atctgtacgttgcaatctgtggatcagctacgaggtcacgagaagagaatgccttctagatgcaaaatcacctccaaaccagaccacttttcttgacttg

SEQ ID NO: 381516 - DNA, 75 bp, Homo sapiens
agtgtgcgaagatttccaatcatttctaaacatgggtggtaaagtaccacctgctactcagaaagctaaatcaga

SEQ ID NO: 381517 - DNA, 82 bp, Homo sapiens
cgacgctgggctttcgggtcccgcgcccagatagcctgggctggaagctcttctacgtcacaggctgcctgtttgtggctgt

SEQ ID NO: 381518 - DNA, 85 bp, Homo sapiens
ccagaggaactcagccctgattgcgatcaatgtccgagttaccaccatggatgcagagctggagtttgcaatccagccaaataca

SEQ ID NO: 381519 - DNA, 96 bp, Homo sapiens
ccccatctggaaagctcggacgcaagaggctggaccgcacagcatccccgtccacgagcagcatcgactccgccaccgacactcgggagcgtggcg

SEQ ID NO: 381520 - DNA, 101 bp, Homo sapiens
ccagttctacaacaacctgttggagcacatgcagtcccatgcagatgtggacatcctccagcggctgggcctcagctggacgaaggccgggagccctgcac

SEQ ID NO: 381521 - DNA, 74 bp, Homo sapiens
agtgcccttgtggcgaatggggctcacgtcgagaaatcctaccttgagtataaggggtcctcacctcctcctcg

SEQ ID NO: 381522 - DNA, 100 bp, Homo sapiens
gtggtcccctcctgctgggacccagccatgcagactccacctttacaacagcctcaccaggaacaaggttcctccccgggcagaagaaatcaccattcca

SEQ ID NO: 381523 - DNA, 85 bp, Homo sapiens
gccctggcgggtccggaccaagatttaggtcgatctcgagaactacagtatgtatacgtggataacaacattcacctgaaaggct

SEQ ID NO: 381524 - DNA, 75 bp, Homo sapiens
ggacaccgtgggctgcgtgtgggacgggtttagcggcagcctcttcgcctcttcagaagaaacttgactccttcc

SEQ ID NO: 381525 - DNA, 73 bp, Homo sapiens
accccccatttcatccgcatccagagtatcctgagctccagctggaccctaaattggatcctcttcctgctga

SEQ ID NO: 381526 - DNA, 89 bp, Homo sapiens
acaatctgagggacctgaatcgctgcaccccagaggccctggcctcccacgactacatcctgaagattgtgcccacggtttatgaggac

SEQ ID NO: 381527 - DNA, 96 bp, Homo sapiens
gcagaggacgacatgttgcttttcgtggagaaaccgaaacttcattgccccttcaatgtgggaatccagccagaccctattcttggacagcatcag

SEQ ID NO: 381528 - DNA, 90 bp, Homo sapiens
gagccgggccgcggcgccgagtcgaacggggagccgagctggagctgccgcggcgcagccagatgtgaagttcatttccaatccgccctc

SEQ ID NO: 381529 - DNA, 75 bp, Homo sapiens
gcaagcgcggggaaccaaggagacgctcctggcactgcagcttccttcaaaatgtctactgttcacgaaatcctg

SEQ ID NO: 381530 - DNA, 100 bp, Homo sapiens
cgaggagatccagctgggcgaggacgaggacgaggacgagatggacctggagcccaacggccacgtgctgtacgccgacatcaagatggagaatgggaag

SEQ ID NO: 381531 - DNA, 82 bp, Homo sapiens
atgttccacacgcgcttcaagcaggagggtgtcctgaacagcaaggtgagaagccctaccactgcaactgggacggctgcgg

SEQ ID NO: 381532 - DNA, 111 bp, Homo sapiens
aagaggattggaggtgtcagtgttaaaggaacctctacaacgaaggtgaagccacggaagataaggacccagatgatgtggtaccagttggccaaagaagagcctggtgtt

SEQ ID NO: 381533 - DNA, 90 bp, Homo sapiens
gaggtgttaccggaacggcggcgacaagggtgttcccgaactagagtgggccctgccctgggagaagccctgccacacgtcgtgcccacg

SEQ ID NO: 381534 - DNA, 100 bp, Homo sapiens
agcctgcgtgctggtgatcgcgctgatgttcctggcctggggggaagggagaagatgtcaaccggacactagaaggtggaaggaaacctcttcattatgc

SEQ ID NO: 381535 - DNA, 100 bp, Homo sapiens
atttgccaccctcagaagctgctggtcctgtgtcacaccaccttagcctcttgatcgaggaagtggctgacaagattttgaaaaagaaagaataccctct

SEQ ID NO: 381536 - DNA, 75 bp, Homo sapiens
accacacctgtgtggccttcgcctggatcaatgagctgagcaatgttcctgttcctgtcatgctaatgccagatg

SEQ ID NO: 381537 - DNA, 82 bp, Homo sapiens
acctaccaagaagccagtcaagcggccagccaggtgctgcccacctacgacagcctggatgagccgtcagtgaaaaccatga

SEQ ID NO: 381538 - DNA, 90 bp, Homo sapiens
acataataagacacaatctattctgctgattcacaattatggagactgtgaagtttatctcgacaatgctagttgcagtctgtgtgaccc

SEQ ID NO: 381539 - DNA, 96 bp, Homo sapiens
gcaaaggcggctcgggagattcagccgtgaagcaagtgcagatagatggccttaacaacatagacgtttgtcctgaatgtggtcacctgaaacaga

SEQ ID NO: 381540 - DNA, 100 bp, Homo sapiens
ttggtcacttgaaccttgggaatattgagtgtaaacaggaacatcgataagtagtgtaaaaacttgcacaatgaaatccgaagccaaggatggagaggag

SEQ ID NO: 381541 - DNA, 74 bp, Homo sapiens
tatacacctctgcatgaagctgctattaaagggaagatcgatgtgtgcattgaccacctggtggcccatggtag

SEQ ID NO: 381542 - DNA, 75 bp, Homo sapiens
tccagcatgtggtgacgtaatgaaattacagggtgacagcagtattcgctattttgagatcacggatgaatcccc

SEQ ID NO: 381543 - DNA, 75 bp, Homo sapiens
ccggcagctggagaggtctccaacaagcttccaaaatggcctgtggataagtggttccatcaccagaaaaactaa

SEQ ID NO: 381544 - DNA, 97 bp, Homo sapiens
gaggagaggacctctgccactctcaccgtgaaggccctgggcgctgcctatggcacagccaagagcggtaccggcattgcggccatgtctgtcatgc

SEQ ID NO: 381545 - DNA, 75 bp, Homo sapiens
tgaatgccagccaccagccatggacctttccagctcacccccagggccttatggtcaagaaatgtatgcgtttcg

SEQ ID NO: 381546 - DNA, 82 bp, Homo sapiens
cccgaaggaaaaggaggaattcgccgtgcccgagaatagctccgtccagcagtgtcaacagcatctccaccctggagcctgt

SEQ ID NO: 381547 - DNA, 75 bp, Homo sapiens
atgtttacggcgaagtctactcaacgtttccaagatatcagttttagagaatgtggcgtggagaaattctcaagg

SEQ ID NO: 381548 - DNA, 102 bp, Homo sapiens
tcaacaacctcaatgagaagatcaagaaggatgaaccagcagatagacacccaaatcgtaaagcaagaggacagctacggaccaaaatagagtctggtgagg

SEQ ID NO: 381549 - DNA, 75 bp, Homo sapiens
cgaaagcagtgacggaggagcttgtaccaccgatgtctttggtggacttgggaaagaggttgctagaagcagcaa

SEQ ID NO: 381550 - DNA, 97 bp, Homo sapiens
gacgcacagctaagatgccaggacatcctggaagctgggaaaaggccaggagtggtggctcacacctgtaatcccagctctgggaggccaaggccag

SEQ ID NO: 381551 - DNA, 97 bp, Homo sapiens
gggccacgccgcacctgcgcaacctcgccgtggccatgtgcagccgctacaggttggagcaatcactgaagaaactgaagcctgtgattggtggagt

SEQ ID NO: 381552 - DNA, 83 bp, Homo sapiens
ttcagaatttgaccatcttggtgagaaacattaagacctactaccaggtgtctgcaattgaactccaaggtgcagaatggttt

SEQ ID NO: 381553 - DNA, 90 bp, Homo sapiens
atcagagattgagaatgtccatggatttgtttctcattctcatatttcaccaataaaggtgtctgctttttcaacgtgggagaaggagtt

SEQ ID NO: 381554 - DNA, 75 bp, Homo sapiens
ctttggtgccctcaacatctctcagagacgaaagattcgccatgaagtcagcgtaaataatgtaacacataaact

SEQ ID NO: 381555 - DNA, 90 bp, Homo sapiens
cggccggtcaggctcgccgccgagctggactttccttatcccagttgattgtgcagaatacactgcctgtcgcttgtcttctattcacca

SEQ ID NO: 381556 - DNA, 100 bp, Homo sapiens
ccattgcgggaaaaggacttcagtatcaaaaaagaaatggtgatgcagtacattaatactgcttctaagacagttcaggaagatttgactgaagagaaaa

SEQ ID NO: 381557 - DNA, 100 bp, Homo sapiens
taaaggcagacgaaccatcaagtgaggaaagtgatctaggacatacagccctgccgagcaaataatgaacgtaactcacaaacttcctgcttatcatcaa

SEQ ID NO: 381558 - DNA, 153 bp, Homo sapiens
cttcgttccccgccaaccgcaaccattgacgccatgtcgggttattcgagtgaccgagaccgcggccgggaccgagggtacatggtgcgggtccgagctgtggtgatggcccgagatgactccagtgggggctggctgcctgtggggggcggg

SEQ ID NO: 381559 - DNA, 78 bp, Homo sapiens
atatgagtacaagttcggctttgagcttcctcaggggcctctgaagaacacctgaagcagcactacattgacctgaaa

SEQ ID NO: 381560 - DNA, 75 bp, Homo sapiens
gaggagccagacgacaagcacacactatggcgctgaaacggattaataagaattcagcttagagaactatcaaca

SEQ ID NO: 381561 - DNA, 82 bp, Homo sapiens
aacatgtggttcaagaaccttgacaagctcatccggctggtaaatgcgcagtctattatcctcccagtccacaacgctgaac

SEQ ID NO: 381562 - DNA, 113 bp, Homo sapiens
tgaaatgaagcacacaacagacttctattttaatattgcaggccaccaagccatgcattattcaagtattgctgacagacagaacgccttggaggctgagtggaggacggtgc

SEQ ID NO: 381563 - DNA, 83 bp, Homo sapiens
ggttctattttccctcctcaaactgactttgcagccacggagaggagacagatcagttggaggaagaaaaagcagagctggag

SEQ ID NO: 381564 - DNA, 75 bp, Homo sapiens
gcggtccgtgcggaggctgagccggccgcgggcgcgaccggaggcaggtgatgtacagttcattgattatgaata

SEQ ID NO: 381565 - DNA, 75 bp, Homo sapiens
ctgcccccccttccccacgcaaccccagatccatttacactttacattgtgttggtgttgaagaggagaaggctg

SEQ ID NO: 381566 - DNA, 75 bp, Homo sapiens
caggctgcaacggagaaggggcttgatttcctgaaggaaatataatgatctgttcatcgaagtagaagatattgt

SEQ ID NO: 381567 - DNA, 100 bp, Homo sapiens
atctcaagaattttcccatggatgtacaaacatgtataatgcaactggaaagctgtgaccaagaatatggcccaggtgaccaaagccctggacaaggccc

SEQ ID NO: 381568 - DNA, 90 bp, Homo sapiens
cctggggaacttcgttctgcacggggcccactcagctctgcaccaggtatcagtctccctgaaggtgtggacccctcttttctggctgcc

SEQ ID NO: 381569 - DNA, 100 bp, Homo sapiens
gtgacatccaacctgtatcaagtcttctaatctgtgaacatgaacaggccgcccgcctgaagaaactacaagagcaagagaaacaacagaaagtggagtt

SEQ ID NO: 381570 - DNA, 97 bp, Homo sapiens
cgtgccctggggctgagccctcaggtgctggagaatctggtaaaagcaccattgtgaagcagatgaggatcctgcatgttaatgggtttaatggaga

SEQ ID NO: 381571 - DNA, 82 bp, Homo sapiens
gctcgctgctcatcatgctcaagtcagagggcttttactcctacctgtgtaccgagccagatgctgtccatgggcttctctg

SEQ ID NO: 381572 - DNA, 90 bp, Homo sapiens
ccaccatcccaccaaagggggctgctgaccgagagagctcactcagccagttggaaatggaggatgaagatacaattgatgtgttccaac

SEQ ID NO: 381573 - DNA, 75 bp, Homo sapiens
gcccggcagccacaccgtctgagaataatggcaatgcagatgcagcttgaagcaaatgcagatacttcagtggaa

SEQ ID NO: 381574 - DNA, 100 bp, Homo sapiens
ctcaaggttgaagcagaagaataaggagaaggataagtcgaaggggaaggcgcctgaagaggacgaagtgggcgacagatgcgaaagaaacgagttccag

SEQ ID NO: 381575 - DNA, 50 bp, Homo sapiens
tagctcctatgactggaaccattgaaaagttacagaatgtctgaagggga

SEQ ID NO: 381576 - DNA, 50 bp, Homo sapiens
ggaccacaaaccgctgccagaaaagcccctccagccagcgtcaggtgcag

SEQ ID NO: 381577 - DNA, 90 bp, Homo sapiens
tcacaacatgcacagcctggcgacggctgcggtctctagcatcaattcacgctttgccaaagtacacatcctgtatgtggggtccatgcc

SEQ ID NO: 381578 - DNA, 100 bp, Homo sapiens
gaacgcattgccgccggtcctgaccaccgtgaacggacagtcccccccagtttagaaacctgctgaagtggtatgctaaggagttcaaagacccactgct

SEQ ID NO: 381579 - DNA, 90 bp, Homo sapiens
tgtttgtggagacagagcctctggataccactataatgcactgacctgtgaggggtgtaaagttccatctcccaacctctatagccagct

SEQ ID NO: 381580 - DNA, 98 bp, Homo sapiens
ggagaagaagcaagtctcctcgcagtaagagaaaccgaagtcctcaccactcaacagtcaaagtgaagcagttaattggccttggtcctcacagctcc

SEQ ID NO: 381581 - DNA, 87 bp, Homo sapiens
cagcatttcatccctcgtcgaaaggattggattggcatctttagacccccattcactggggagaatagaaagaaaacaattgacaaa

SEQ ID NO: 381582 - DNA, 100 bp, Homo sapiens
ttttttctcatggatgttcttcttcgagtatttgtagaagggatgctcacgaattattccatgtcattacctcgtcattggaagatgagcgagaccgcca

SEQ ID NO: 381583 - DNA, 82 bp, Homo sapiens
ctaatttgaaccatgtttggattgaagccgcctctgtattacttaccaggttagctttatacgtctacgaatatttactgca

SEQ ID NO: 381584 - DNA, 100 bp, Homo sapiens
agtggggcgctccgcttctacgacagatccgacatcgacgcagtctacaggttggagcaatcactgaagaaactgaagcctgtgattggtggagtttggg

SEQ ID NO: 381585 - DNA, 50 bp, Homo sapiens
cccagagggaacacagatggctgtatttgatggtgtcttgctctgttgcc

SEQ ID NO: 381586 - DNA, 75 bp, Homo sapiens
ggcggcggctggactaaacaggtcacctgcaggcactgccgccctgcactgtagcagatgcctaaataaagtgtg

SEQ ID NO: 381587 - DNA, 118 bp, Homo sapiens
cctagaccggtttttagtccattgactatgcagcctaatggggcttcataaaagtcagagttcatgtttgtcaggacctaatgaagaacaacctctgttttccactgggtcagcccag

SEQ ID NO: 381588 - DNA, 100 bp, Homo sapiens
ggcgtctgcggctctccgccgtccccagccctgcctctccctgggctctgggtcctgacttgtcctgggcaagccaagtccattgcttctgctcctggga

SEQ ID NO: 381589 - DNA, 100 bp, Homo sapiens
caccccctggtcctctgccctcgcgccccgctagggccagagttgtggaaagtaaaaatgtagccctaccaaaaggaactattgtactggcttctccagg

SEQ ID NO: 381590 - DNA, 74 bp, Homo sapiens
cctgcaatttgccatttatttgtaataagcaggaacgaatgcaggaatttgggaactgagctgtgcaagtgctg

SEQ ID NO: 381591 - DNA, 82 bp, Homo sapiens
ctccagcagaagaaagggaaggaacacgctgcattactgcgtgcgtccagaggaccagaggttaatttattctgggaagctg

SEQ ID NO: 381592 - DNA, 101 bp, Homo sapiens
cagattttgaagagagatatgccaccagcatttattaagtccccaggatcggctgagagccctggtggtgatccccatcatcttcgggatcctgtttgcca

SEQ ID NO: 381593 - DNA, 80 bp, Homo sapiens
gagaagacgaggatgatgcggaaattaaccccaagataccccatgtttccccatcactcgaggagtctgggcagagactg

SEQ ID NO: 381594 - DNA, 100 bp, Homo sapiens
ctgggacccgcagaagcctgtggataatgcacgagaagccatgcagcaggcagatgactggctgggtgtcccacaggcccctacaaaggcttcagagtag

SEQ ID NO: 381595 - DNA, 97 bp, Homo sapiens
tcctggtgcggaacatccccttccaggcccacagccgggagatccgagagctcttcagggcggcgactggcggcgcgatggacctgaccgggctcct

SEQ ID NO: 381596 - DNA, 100 bp, Homo sapiens
ttgagatccatctgactgctgccatggggctcaagacccggtgtggaggcaagctgggcttcctggccaatggcttcagttctgtgcaggccacgcagtt

SEQ ID NO: 381597 - DNA, 100 bp, Homo sapiens
gctgagccagtccctagggctcagggagcaggagcttcaggttgtccgagcatctgggaatacgtttcaggagacggcagcgaggctaccttgcatggtg

SEQ ID NO: 381598 - DNA, 100 bp, Homo sapiens
agagagcgccctgagagaacagggtggccgcttggtccaggatcagttcgacagcttagacaagcatacacaatggggaattgacttcttggaaagatat

SEQ ID NO: 381599 - DNA, 100 bp, Homo sapiens
agccagcggcagtggatcgaccccgttctgcggccatgccggtggccgtgggtccctacggacagtcccagccaagctgcttcgaccgtgtcaaaatggg

SEQ ID NO: 381600 - DNA, 90 bp, Homo sapiens
ctcttacttcaatttgaacccatttgaggttgagagcaccattggatgcttactttcaggtgagcaggacccagcctgacttgccagcta

SEQ ID NO: 381601 - DNA, 100 bp, Homo sapiens
acagccaacagttttgctgtaacaaacgcctgttttttgcatgtctgacacccatgactccacctggaccttatggctccacccagaagcaattcagccc

SEQ ID NO: 381602 - DNA, 98 bp, Homo sapiens
tttcataaaatatgcatgctagcaaaagcacagaaagaccacttaagcaaacttaatataccagacactgcaactgttcctctttagagagcaaagac

SEQ ID NO: 381603 - DNA, 83 bp, Homo sapiens
cgtcatcatgctgaccaccaatcagatccgtaaggaagcttgctgtcttcgatacgtggagctccttggcggtccacattgca

SEQ ID NO: 381604 - DNA, 100 bp, Homo sapiens
acagccgtgaggaactcttcaggctccagaagtgatttgatgaaggctgctgcaggagagttcgcagatgatccctgctcttctgtgaagcgaggcaaca

SEQ ID NO: 381605 - DNA, 75 bp, Homo sapiens
attccagcctccacatgtacatatgttccttcctaccatcctccctgaagagcaacctcaagttagtgagcacac

SEQ ID NO: 381606 - DNA, 101 bp, Homo sapiens
gaatacatggtttcaatcaagtccccagagaacacatttgtcttctgagctgctggcagttttgaggtgcaaagtgatctaacattacagagtaacgggag

SEQ ID NO: 381607 - DNA, 98 bp, Homo sapiens
gctgccttcactaggatattgtgtagaaatcatttctaccagttcggagagatccggacgatcactgttgtgcagagacagcagtgtgctttcatcca

SEQ ID NO: 381608 - DNA, 75 bp, Homo sapiens
ctcatctccaggaaggacttcgagaccctctacaatgactgcaccaacgcaaggaccaggaatcaccttcaagcc

SEQ ID NO: 381609 - DNA, 100 bp, Homo sapiens
ggaaggaggagcagcagactcggacgtggacgcctttttccggacagcagggaacagtacactgggaagctccgagtgagatcacactccttgagtccaa

SEQ ID NO: 381610 - DNA, 99 bp, Homo sapiens
tcctaccagggaggagctggccctgacttcaacgaccacgtcctgcataagggaatacagtgagtaacctgatcatgattatacctccaatgttcggtg

SEQ ID NO: 381611 - DNA, 82 bp, Homo sapiens
cttggcctccatggtgtcagagcaaggagaagctgttggtacactgaggaggggacggctccgtcttcacattgtgcacaga

SEQ ID NO: 381612 - DNA, 126 bp, Homo sapiens
ggggcgtgccagtggctgaatttaacacggagaccaccccagctacgaacagattcagaatgaagaacaaattttggtattttgagtttggcacatctgaaactttctcagccacctgcaagaagc

SEQ ID NO: 381613 - DNA, 90 bp, Homo sapiens
cagttggagctcgccatggttcagtggccctgtacgacatccggactggaaaatgtcaggaaccttttgaggatggctttgcaaatgggg

SEQ ID NO: 381614 - DNA, 75 bp, Homo sapiens
aatcaccgacgagcggaaccgacagttatctccagaagaagaagagaaaaggagaatccgaagggaaaggaataa

SEQ ID NO: 381615 - DNA, 100 bp, Homo sapiens
tgaccgagagcgtgaccgagagcgcgaatatcgtcatcgttagaagctccggctcccaccttgtctttgtcccgtcattgagagatgtgcaccatgagcc

SEQ ID NO: 381616 - DNA, 75 bp, Homo sapiens
gagcctcactcctgtcaatatattcttgggattaatgctgaactgttgtttcggccaactgctctttcaactcca

SEQ ID NO: 381617 - DNA, 100 bp, Homo sapiens
cagatgccgcgcaactgtctgatctcagttcatggtgaaatggttacaaagcaaccattgattagaagtatgcgaactgtaaaaagggaaactttaaagt

SEQ ID NO: 381618 - DNA, 50 bp, Homo sapiens
attccagcttcggaacaagagaccctgctgacctgatctccagcttcctg

SEQ ID NO: 381619 - DNA, 100 bp, Homo sapiens
tgtctgatggagctttcctaccagaccctgaaattcacgcatcaggcgcgggaagcgtttggaaattttagcattcaggtgccaggaatgcagatgggac

SEQ ID NO: 381620 - DNA, 100 bp, Homo sapiens
caggtaatgtggaggaaagagagcttgtcatgctggacaggtagtgaatcaaatgaataagaagctacagacgggttttacagaaccagaagtgttacag

SEQ ID NO: 381621 - DNA, 75 bp, Homo sapiens
tccttgctggtcctcctggctgtgggaagactctgctggcgaaggtttgtaaaagaatggacttggtctgccaga

SEQ ID NO: 381622 - DNA, 90 bp, Homo sapiens
cacagaaagagagacagagaaagagattcaggattagaggatggaagggagtcaccttcttttggacatttattcagaacagctggggat

SEQ ID NO: 381623 - DNA, 74 bp, Homo sapiens
gcctgagagatctccaagaattacagctgcaagctttcttcctggtggcagatgacatcatggattcatccctt

SEQ ID NO: 381624 - DNA, 90 bp, Homo sapiens
tccttgacctttaggtgcttttatattcatctcaaaaacaaaattctgaactcaggacttggcaaagaacacgtagcgactccgaagatc

SEQ ID NO: 381625 - DNA, 89 bp, Homo sapiens
catcaaccaggaggcgttggtgctcacggccaaggccacgcacttgcacctcctgcgccgccgccccccatccaaggatatgccttcaa

SEQ ID NO: 381626 - DNA, 126 bp, Homo sapiens
tctaaccccttcttaacaaggaatcagattccccgtactccagaaaacttgagcggcatcactgtccacatctccctaccaagatttatgataaaacagagaaaccatgtcttctctccgaatata

SEQ ID NO: 381627 - DNA, 82 bp, Homo sapiens
gcattcgtcttggtaaacttggtatcatggaagggaagtggttgctgtgtatgttactggtgcttggaactgctattgttga

SEQ ID NO: 381628 - DNA, 74 bp, Homo sapiens
agatctgcatggtgggaaggacctgatgatacagaggttttggcttggtttgaagaaggtgaagaaacaattac

SEQ ID NO: 381629 - DNA, 80 bp, Homo sapiens
agccgagcgaggcagctctgagccgcgcgacatgggaaagcggaaccaccaaaaggagtgatgatcaacgatctcatgat

SEQ ID NO: 381630 - DNA, 90 bp, Homo sapiens
cctgcacctgcctcttcccccattctcagtgctggagaatctggtaaaagcaccattgtgaagcagatgaggatcctgcatgttaatggg

SEQ ID NO: 381631 - DNA, 100 bp, Homo sapiens
caggacgccaccaaacacaagctcatagagatcgccaactatgttgataagcttacgaggaaatatttcagtaaaagcagttaaaaaagaagtagaaaag

SEQ ID NO: 381632 - DNA, 51 bp, Homo sapiens
ctgacacgtattgtctcaagattaaagacgaatctagaacatgatgtctat

SEQ ID NO: 381633 - DNA, 100 bp, Homo sapiens
tggaatgtatccgggaggtcaacgaggtcatccagcacgacttcagcctggagaggacggcactcttctgggtggaggccgccggccagggacccagccc

SEQ ID NO: 381634 - DNA, 82 bp, Homo sapiens
tttgatttactagttgatgccaatgatgtaattctggagagagtggacttgaaagaggagattgatattcgactctccaggg

SEQ ID NO: 381635 - DNA, 100 bp, Homo sapiens
cgagggccagctgacggagatggtgcagaagatggaggagacctgcctagagctggaacgttacctccagagcgagccctgctatgtttcagcctcagaa

SEQ ID NO: 381636 - DNA, 100 bp, Homo sapiens
ccagtacctgcccaggaaactgtcgtgcattgaggcccatgagaaggacatggagctctcatttgccgtgcagcgcagcaaggacatggtgtgtgggatc

SEQ ID NO: 381637 - DNA, 50 bp, Homo sapiens
gcgacggcgaccatagctctcgaggcatacacggaatacctgaggagcat

SEQ ID NO: 381638 - DNA, 75 bp, Homo sapiens
ggctgctgctgctgctgacgctgctgctgcccggcctcggggaaggtgctcgggtcttcggggcactgggtccca

SEQ ID NO: 381639 - DNA, 98 bp, Homo sapiens
cacaggaagtcagctagagagccgtctcccctctctggagccgagagaggccggtttcccccaccatctgaagacagcatgtacacagccattcccca

SEQ ID NO: 381640 - DNA, 100 bp, Homo sapiens
aagaaagatgattccttcttggggaaactcggagggaccctggcccggaggaagaaagccaaggagggtactccaaagattcaggtttactcacgtcatc

SEQ ID NO: 381641 - DNA, 51 bp, Homo sapiens
cctccaagagcacattgcctggtaagatggattggaacgagttactatgct

SEQ ID NO: 381642 - DNA, 83 bp, Homo sapiens
agaagaattcatgctcatccgggctgcccccaagtgtaactccagcactgtgaggtttcagggattggcagaggggaccaagg

SEQ ID NO: 381643 - DNA, 101 bp, Homo sapiens
cctccgctcacgagcgcagcacgtggaaaccgtcagtgatttgtgtctgcaacgtgtgtgagagaatggaggtaactgttcagtcctcacctaattttaca

SEQ ID NO: 381644 - DNA, 82 bp, Homo sapiens
gacgttctcaaggagaaggcagacctgggctcacgaggcccagggaatcctctggaccatcagattaccaatgaaagaggag

SEQ ID NO: 381645 - DNA, 80 bp, Homo sapiens
gatcacccagggaggacaaatgcatttctagtggctacaaatgcccctcagtgaacagctctgcgctttttgttactgtg

SEQ ID NO: 381646 - DNA, 100 bp, Homo sapiens
ttccagacccatgtaaaggagaattgcctgcactatgcccgcaaggtgggctacaggcgaggattaaatccaccacacagggtgaaatctatctccatga

SEQ ID NO: 381647 - DNA, 90 bp, Homo sapiens
cagttagcagccctgtgctggaggtggctgctgaggccttgaaggccacttctgcttttctgagctgctcagatggaagataaaaagccc

SEQ ID NO: 381648 - DNA, 98 bp, Homo sapiens
cctcatcatcaaggatcaggaccgcaagtcccgtcttatgggacttgaggccctcaagggccagatattcgaagcttacaacatggcagctttgtgga

SEQ ID NO: 381649 - DNA, 90 bp, Homo sapiens
taagagcaaagctacttccattccagaaagatggcatcatttttgccctcaaaagaaatggcagagccctaatttgtttagaactgtaat

SEQ ID NO: 381650 - DNA, 100 bp, Homo sapiens
tggcatttattactttgaagtgaagattgtcagcaaaggaagagatggtaataaaagactagtggccttagtgcccatgcccagtgaccctccattcaat

SEQ ID NO: 381651 - DNA, 87 bp, Homo sapiens
gagcggctgtgtggatgtcggcgaagccgcgggcgagggggggccctcagcctcttggccttgaacgggctgttcatcttgattcac

SEQ ID NO: 381652 - DNA, 139 bp, Homo sapiens
caagaaaatgatgggaaagagccacctccagtagtaaattatgaagaagatgcacgatcagttacatctatgcatccagagctgctgttggcggattgtacccacggggagatgattcctcatgaagagcctggatccc

SEQ ID NO: 381653 - DNA, 100 bp, Homo sapiens
ctggctcccttctgccccagctccgtctcggcggcggcggggatctatttgtgatgactatatggcaactctttgctgtcctcattgtactctttgccaa

SEQ ID NO: 381654 - DNA, 83 bp, Homo sapiens
cgtacgcctatctcttcaagtacatcataatcggcgacacaggagcggaaagaatgtcggagcgggccgcggatgacgtcagg

SEQ ID NO: 381655 - DNA, 100 bp, Homo sapiens
tgggaatccggaatgctgcccgatggccctgggtcctcgctgtggggcaatccgggcttgcagacgagggtttgccttcccggattgggcctacaagcca

SEQ ID NO: 381656 - DNA, 97 bp, Homo sapiens
tgcttctaaaggggcacaccttttatagaagtacgtccaggaatagaagtgacctgctttttcgcaagttgatgaaaagcccagaaccttgatgaca

SEQ ID NO: 381657 - DNA, 90 bp, Homo sapiens
gagctgagtggttgtgtggtcgcgtctcggaaaccggtagcgcttgcagcatgtctattcttattctgagaaggaacttatatgccacaa

SEQ ID NO: 381658 - DNA, 80 bp, Homo sapiens
tggcggcagccgaggccgcgaactgcatcatggagggctgggttacgacccctacaaccctgagctgcccaagccccccg

SEQ ID NO: 381659 - DNA, 100 bp, Homo sapiens
agggaaccctggtcaccgtctcctcaggtgaatgaaaactttgccattgatttgatagcagagcagcccgtgagcgaggtggagactcgggtgatagcgt

SEQ ID NO: 381660 - DNA, 51 bp, Homo sapiens
cagattcgcagtggtcgcttcttctccttgagttgtaaagatgtggcacct

SEQ ID NO: 381661 - DNA, 76 bp, Homo sapiens
ccacaaccatgtttggccggaagcgcagtgtctcctttgggggcttcggatgccctgggcgctgcctatggcacag

SEQ ID NO: 381662 - DNA, 100 bp, Homo sapiens
ggcggggtccgcagtttcagcagagccgctgcagccatggccccaatcaaggcccagtactacggggagattggcatcgggacgcccccccagtgcttca

SEQ ID NO: 381663 - DNA, 49 bp, Homo sapiens
ctttgcagctgacctacatctcgaaggaagatctcagtgagcacgtagt

SEQ ID NO: 381664 - DNA, 76 bp, Homo sapiens
ttagattctatggaaagttctgagacatcttgtagagtatcaccttttgccatgatagcatttctttcattggaca

SEQ ID NO: 381665 - DNA, 96 bp, Homo sapiens
caggacccacctgagaagtccatccccatctgtaccctgaagaacttccctaatgccatcgagcacaccctgcagtcttgccacttgcctagtgag

SEQ ID NO: 381666 - DNA, 90 bp, Homo sapiens
gtaacagcagcgccgtcccgtccgacagccaggcccgggagaagccaggtcagagcagcccaccatgggatggggagggggtggaggctg

SEQ ID NO: 381667 - DNA, 99 bp, Homo sapiens
tttcattttagcatgtcaagatgaagaaacggggggatttgcagacaggccaggagatatgaacgatatgtggtaccccaaattatctctctcctgaag

SEQ ID NO: 381668 - DNA, 110 bp, Homo sapiens
tcccacctcctgtaggttataataaagatataaatgaaagtgatgaagttgagctggttatattctgggcactaaatgaaggcgtttctaggcaatttgattcgttcaga

SEQ ID NO: 381669 - DNA, 74 bp, Homo sapiens
aaatatcctcggaagagcgctcccaggagaaacaagagcaggggagagaagacagaagaggttggagaggtcag

SEQ ID NO: 381670 - DNA, 75 bp, Homo sapiens
tgatgaaggggataacttctatgtgattgatcaaggagagacggattattctagagtgaagcccatagtgacacc

SEQ ID NO: 381671 - DNA, 75 bp, Homo sapiens
gtgatgctggagaattataggaacctggtctccctgggtggcgacatgtctaagaatgtgagccagtcacagatg

SEQ ID NO: 381672 - DNA, 100 bp, Homo sapiens
gtccgcgaatcctccgctccgagcccgtccggactcccccgatcccagggctctctaaatacgtacagattctgcgataatgtgtggacttttgtactga

SEQ ID NO: 381673 - DNA, 90 bp, Homo sapiens
ctttgacctcttcgatgtgcgagactttggaaagccagaaggtcagtttgaaagatcgtgtcttctccagcccccgaggcgtggctgcca

SEQ ID NO: 381674 - DNA, 75 bp, Homo sapiens
tttgtggtcgtcatggtgaccaagtcctggttcctctgataagatcgacaaaagaaacaacaaaatgagaagaag

SEQ ID NO: 381675 - DNA, 100 bp, Homo sapiens
aggggcagaagaacaaggaagcggagaggcaagagatggtttccacggtgatgtgtacctaacagtgaagctgctgctgccaggagtcattaagactgtt

SEQ ID NO: 381676 - DNA, 100 bp, Homo sapiens
caatcagtttcatgaaggagctcatgcagtggtacaaggaccagaagaaactgcaccggaaatgtgcctaccagggtttggtaaaggctccagtgtggtg

SEQ ID NO: 381677 - DNA, 75 bp, Homo sapiens
cctcagcagctccctgcgggacctctcggaagccgatttaggtcgatctcgagaactacagtatgtatacgtgga

SEQ ID NO: 381678 - DNA, 75 bp, Homo sapiens
ccggatgacccgggcttcggcccccaccagagactcgcagtgcctgatttgagatggggtcccaggtctcggtgg

SEQ ID NO: 381679 - DNA, 110 bp, Homo sapiens
attgtgaacaggtagagtacctgttgttgcagagttattttctgagtcagtttcaggttatcaatactctggctgaccatcatcatcgtgggactgactttggtggaagt

SEQ ID NO: 381680 - DNA, 50 bp, Homo sapiens
caggggcagcgggagccggccgggtgtggaccactacaacgaggtgaaga

SEQ ID NO: 381681 - DNA, 100 bp, Homo sapiens
ggccaggagccaggggcccagaaggcgtccgacctccgatcatgaacgggcccctgcacccgcggcccctggtggcattgctggatggccgggactgcac

SEQ ID NO: 381682 - DNA, 75 bp, Homo sapiens
aaggcggcggacggctgcgtcgcccgaggcgaggaggagcgctggcgcatcaacaaagagagcattgtggatgta

SEQ ID NO: 381683 - DNA, 83 bp, Homo sapiens
agagattcagccagcacactcctcgcgagcaaggtggacgcggatctgtcaacatgggtaaaggagaccccaacaagccgcgg

SEQ ID NO: 381684 - DNA, 100 bp, Homo sapiens
tacgagtgggaatatgacgaagaggaggagaaaaaccagctggagattgagagactggaggagcaggtctcagtggcccttagcagcagctccattcgtg

SEQ ID NO: 381685 - DNA, 90 bp, Homo sapiens
tggtcctgctcggggctctgttcccaggatcccaagtatcctgtagagaacttgctaaacccagatagtccaaggagaccttggctcggc

SEQ ID NO: 381686 - DNA, 50 bp, Homo sapiens
aatcctattgtaaaatcacttgctaagatatggaaaacgatccagcccag

SEQ ID NO: 381687 - DNA, 75 bp, Homo sapiens
tggaacagggactcactgggggttaatgaaagactgttacatgagtaattgtgtgatgctgaggcttggagtccc

SEQ ID NO: 381688 - DNA, 51 bp, Homo sapiens
atgcacagtatttgctgcagaacaggaacgagttgaagcagttaatatggc

SEQ ID NO: 381689 - DNA, 50 bp, Homo sapiens
ggagaggcctggaggacaccaacatgcttattctaccagattccatgaaa

SEQ ID NO: 381690 - DNA, 75 bp, Homo sapiens
agaagaataaggagaaggataagtcgaaggggaaggcgcctgaagaggacgaagttggctggggaacagaccagg

SEQ ID NO: 381691 - DNA, 98 bp, Homo sapiens
ctgcaggtgttcaagtgcagggagttcccgttacaatcactagtgttgcaggaataatcaagctgggaaggtggaaccctctccccctcagttatgtg

SEQ ID NO: 381692 - DNA, 90 bp, Homo sapiens
atggaactggcggacgtgggggcggcagccagctcgcaggcaatggccaatgtacatggtggactatgccggcctgaacgtgcagctccc

SEQ ID NO: 381693 - DNA, 90 bp, Homo sapiens
caagtgtctttggttataaattatgatctacctaccaatcgtgaaaactatattcacaggtacatatttcccgggataagatcaccaggc

SEQ ID NO: 381694 - DNA, 100 bp, Homo sapiens
cgagcgcgcggccccggaagcacccgggcacttgcccgcctcccgccagcggtgggtggctgcgtctgaaggctgtcgtcggttacagcgggaatgggcg

SEQ ID NO: 381695 - DNA, 51 bp, Homo sapiens
caaatacttcatcctgctctggaaaccactgggattttatattggaagaca

SEQ ID NO: 381696 - DNA, 83 bp, Homo sapiens
catgtcgatttgtccttcactacaggtgaaatgacaatggatgctctgttggctcgattgaaacttctgaatccagatgacct

SEQ ID NO: 381697 - DNA, 101 bp, Homo sapiens
caggaaaatgacccagcgtacatactgaatgatctctacatctcagactactgtgtgtggattcagaaagtcaagcagcacaacaagattcgcagcgtgga

SEQ ID NO: 381698 - DNA, 90 bp, Homo sapiens
cgacgacatggcctccgctatgaaggcggtaaacagattcaagtgttatcgggccacctgcagtgggtttactgctgttccatctcccca

SEQ ID NO: 381699 - DNA, 50 bp, Homo sapiens
aactcagaaaagcgtaagcttgctcagggagactcatgcatctgtatgcc

SEQ ID NO: 381700 - DNA, 82 bp, Homo sapiens
tcacggtgacgcttttccccagcttttccgattggtgacaaagttcctgctgatataaggttaacttccatcaaatctacca

SEQ ID NO: 381701 - DNA, 50 bp, Homo sapiens
ctatagatgagaaaccatacaagctgtgattccattggccgtgacatccc

SEQ ID NO: 381702 - DNA, 80 bp, Homo sapiens
tgggtggcgaacggggcgagcctggaggattgtcactccaacctcttttcgctgaggactgattacggtgagcagcaacc

SEQ ID NO: 381703 - DNA, 75 bp, Homo sapiens
catccctcgtcgaaaggattggattggcatctttagagttcatcttccttcctgtacagtattttcaaacttccc

SEQ ID NO: 381704 - DNA, 100 bp, Homo sapiens
gtggagggtgccgcggccctgcgcagctgccccatgtgccagaaggagttcgcccccaggtcccgagcagccccgcccaacatggacccagacccccagg

SEQ ID NO: 381705 - DNA, 74 bp, Homo sapiens
cggcgatttcaactctcgaatgggaggaggcagtatagaggctgaagacttgaagatgctaatcagacacatgg

SEQ ID NO: 381706 - DNA, 100 bp, Homo sapiens
gagtgttcagactggaagccagaagcaggcctttctccaccaaggaaaaaacgagaagaccccaaaaccaggtgctggagaatctggtaaaagcaccatt

SEQ ID NO: 381707 - DNA, 100 bp, Homo sapiens
gacgccatgtcgggttattcgagtgaccgagaccgcggccgggaccgagggcccactgctcagtggagcgtggaggacgaggaggaggccgtccacgagc

SEQ ID NO: 381708 - DNA, 73 bp, Homo sapiens
ctgaatctcctcccagctgaaggtgggctgtgatcggctgctgagtgaggcccagaggatcacggggctgcga

SEQ ID NO: 381709 - DNA, 85 bp, Homo sapiens
agattgtgattcagcctctactaaagttgtcatccgtggagcaggaaaccagaaaactttagaaactgttcctttggagaggaaa

SEQ ID NO: 381710 - DNA, 75 bp, Homo sapiens
tgcggccgcaccgccctccgcggccgccccctggggatccagcgagcgcggaataatcaagctgggaaggtggaa

SEQ ID NO: 381711 - DNA, 50 bp, Homo sapiens
tcgcggaaagcatgctgcttttatggtatacctcaagtttactatttcgg

SEQ ID NO: 381712 - DNA, 100 bp, Homo sapiens
tagtgactgcggcctgcatcccggattatattccatcacaacaagatattctgcttgccagaagacccaccaaaggcatccatgaatacgactttgaaat

SEQ ID NO: 381713 - DNA, 50 bp, Homo sapiens
gctcactgcaagctctgcctcccaggagaattacttgaacttgggaggca

SEQ ID NO: 381714 - DNA, 100 bp, Homo sapiens
gctgatggtgatggagattttgatgtggatgatgccaaagttttattagagaatggaggtgttgtccaagttggagaattgttaccttgcaagatttgtg

SEQ ID NO: 381715 - DNA, 100 bp, Homo sapiens
tgaaccagctgtgttttattatgcacagggtcttactacatattgcaacagaagataatattggaggtgaagagggtaacatgaagtttggcactaccct

SEQ ID NO: 381716 - DNA, 83 bp, Homo sapiens
cgataaacactcgctggagagggagacgcaggaagcgatgaaagagatgtctgcctccccaggtgtgtcctggtagacaactg

SEQ ID NO: 381717 - DNA, 90 bp, Homo sapiens
cgacaagaagacgggcaacttccaggaaatggtgttcacactggccctgaatcaagggaacaccagttttcacatgctggcagaagcaat

SEQ ID NO: 381718 - DNA, 75 bp, Homo sapiens
agctccacgaaaggcagccgcggatcgccgcgctcagcgacaaacaaaaaagcaaactcaagttcctgcctcctc

SEQ ID NO: 381719 - DNA, 100 bp, Homo sapiens
caattttcaaaaacagttattggaaaggcacgcttaaacaacataaccattattggtccacttgatatgaaacaagtaaatgacctccgaaaagaattag

SEQ ID NO: 381720 - DNA, 90 bp, Homo sapiens
aggactttgggtctgggtgagccttctcgtggcggcggggaccgtccagcccagcgattctcagtcaggggataaaaacattcagatggc

SEQ ID NO: 381721 - DNA, 100 bp, Homo sapiens
actggcctggcgtgcactccgcacctcggggacattattgcgcgtggaacggctgcttttggaagacatatgtagagtgtgtcggtcagaaggaacacct

SEQ ID NO: 381722 - DNA, 75 bp, Homo sapiens
caccatcctagaggtcaagatcagctctggctagagagtgataatcttcaaaatgaagactttggaaaattttag

SEQ ID NO: 381723 - DNA, 75 bp, Homo sapiens
gacgccgggagattgagattgcagagcaagaccgaggcacagtgtggcaagtttagaaagcattgtgaatgaagc

SEQ ID NO: 381724 - DNA, 98 bp, Homo sapiens
tggagccaatggagtccatgctgaggcccttcaacctggtcatccccttcgcggtgcagaaaggggagctcacaggtgatctctgccttggatgggcc

SEQ ID NO: 381725 - DNA, 75 bp, Homo sapiens
aaggatgaacggagaggaagaattctttgatgccgtcacaggtgagaagccctaccactgcaactgggacggctg

SEQ ID NO: 381726 - DNA, 100 bp, Homo sapiens
tgaaaactgaagatggcaaagtagaaaaacactatctcttctatgacggagaatccgtttcaggaaagaataacctgggtatcttgtggtctgaaagaga

SEQ ID NO: 381727 - DNA, 101 bp, Homo sapiens
catctcctaggagctgatgacatgtccagaccaggtctcatgcttggtgcctggtgccaggtgaatatgaccatctcccagaacaggccttctatatggtg

SEQ ID NO: 381728 - DNA, 50 bp, Homo sapiens
agaccatgtgctatgcctacatgaagcagcttaagagttggacagtggag

SEQ ID NO: 381729 - DNA, 80 bp, Homo sapiens
caagtacccgtccatcatagtcaactgcgtggaagagaaggtggacgtctgatttatgaagctccccatccacctatctg

SEQ ID NO: 381730 - DNA, 82 bp, Homo sapiens
gggaggtgcccctgcgttgtaccatccgcctgtgggacacctaccagaagtccattggaatattaagcccaggagttgcttt

SEQ ID NO: 381731 - DNA, 101 bp, Homo sapiens
gaggggtgcacggcggccacctgagtggcgcggcggtgtcaggtaagtaaggaggtctctgtaccatggctcgtacaaagcagactgcccgcaaatcgacc

SEQ ID NO: 381732 - DNA, 100 bp, Homo sapiens
ggagaggcgagctcgcgatgagtggtctcggcaggctcttcgggaagggcttcagggatgacttcttagggggcaggggaggtagtcgcccaggcgaccg

SEQ ID NO: 381733 - DNA, 83 bp, Homo sapiens
ggaaaatgagcagtctctgcccccgccggccggcctcaacagtccgcgggagagctgtggggcttggtgagtgtttcgtggcc

SEQ ID NO: 381734 - DNA, 75 bp, Homo sapiens
cgatggtcatggcgtatttcgtcgagaatttttggaatctacctgttactcgtattttggacaatcttatggaga

SEQ ID NO: 381735 - DNA, 90 bp, Homo sapiens
ctgcttaaaaccacgtggttcgatggctgccgcggctacgctgaggctctccgctcaggtgcagtagacattgttgcaatcatgatcggc

SEQ ID NO: 381736 - DNA, 100 bp, Homo sapiens
ccaagccaacgatggtctttcctctgcattgctgatcttgtacttggattcagcaaggaaccttccgaaataagcgggttttgaaaacaaaaaaaagaag

SEQ ID NO: 381737 - DNA, 74 bp, Homo sapiens
agcaaaggctgtgtctacggcagcctggggatatagttctctttgttcccagacactggtggcattacgtagaa

SEQ ID NO: 381738 - DNA, 96 bp, Homo sapiens
aggagcgggagaattctgcggagcctgcgggacggcggcggtggcgccgtaggcagccgggacagtgacaacgcgcctgcaaaagggaacaagagc

SEQ ID NO: 381739 - DNA, 100 bp, Homo sapiens
gagaaggaactgttggagatgagacccttccggtcttcttttcaggtggcagtgctccttttggacttttctctaggtttggcgctaaactcttcttgtg

SEQ ID NO: 381740 - DNA, 75 bp, Homo sapiens
agtccccagggaatgccacagcatcctccagcacctcagggtgccttcaccagggatggaagaggcaggctgcag

SEQ ID NO: 381741 - DNA, 85 bp, Homo sapiens
tcacttgaaataccggatgattttggagaaacagacatcgtggtcttcagcatctcatccacagcaccaatggaattctcaaacg

SEQ ID NO: 381742 - DNA, 88 bp, Homo sapiens
tacacgaccttcagcaagaggaagacgggcatcatgaagaagatcccaggaaagctgcttttctccttggtgaagcgctacctttgtg

SEQ ID NO: 381743 - DNA, 49 bp, Homo sapiens
gatggggttgtcctctttaagaagattcttggtgccaccattgagaact

SEQ ID NO: 381744 - DNA, 74 bp, Homo sapiens
tccgacaaaggtcgcctttgctactaccgcgactggctgctgcggcgcgagctctcagatctggctcgagacca

SEQ ID NO: 381745 - DNA, 83 bp, Homo sapiens
aaaaaagtttctccaaatgagctcatcctgggctgaatttacatagtacatgacgaagttaaggataaagcttttgaactaga

SEQ ID NO: 381746 - DNA, 90 bp, Homo sapiens
gcaggacgccgacatcgtgtgccgctgccaggttcaaaccttgtactactcagctgatcacaagctgcttgatgggaacctactagatgg

SEQ ID NO: 381747 - DNA, 87 bp, Homo sapiens
gaagtaggcattgaccccttgtccagttactctaacaagtctggagaatacttcagagagtcagagttgtgccagaagtctcttaat

SEQ ID NO: 381748 - DNA, 89 bp, Homo sapiens
tgacgtccatccatttcgtggttcacccgctgccgggcaccgaggaccagctcaatgacagtgcagaatacagaaactgcagccatgac

SEQ ID NO: 381749 - DNA, 100 bp, Homo sapiens
ttcgcctgcacctggccaggctgcggctggaggaggtgctcccctcatctggaggccctgctggaccggaggccacccagttcccaggaagcactatcaa

SEQ ID NO: 381750 - DNA, 75 bp, Homo sapiens
agcttctcagaagacagagggttttcttttgagacagttcagtttgttcagggaatttttgttgaaaaatatgac

SEQ ID NO: 381751 - DNA, 100 bp, Homo sapiens
tagtcgcggctacggcgtcatggaggagatccggcggcagggcaagctgtgcgacgtgaccctcaaggaacaagcacatcatgattgacttggggactgg

SEQ ID NO: 381752 - DNA, 100 bp, Homo sapiens
accgtgaccgagagcgtgaccgagagcgcgaatatcgtcatcgttagaaggaaacattggcaaatttggagcgacagatctatgcttttgagggaagcta

SEQ ID NO: 381753 - DNA, 83 bp, Homo sapiens
cctggactgtgcagtatttccagtctgtctcagcggatgtcaatttggatatatcaaagcctttgaaagcaaacctgagtttc

SEQ ID NO: 381754 - DNA, 98 bp, Homo sapiens
atgatttaaacaagagatttccacagaaggagaataaaggcagccccgttgatgactgaaaatgacaaagcatccacctaacagacgaggaatcagct

SEQ ID NO: 381755 - DNA, 95 bp, Homo sapiens
cgcagaccgcgctgggttgccgctgccgctgccgccatcgtgccagcccctcggctgtctctcaggagatgatagctccacctgcattgggattt

SEQ ID NO: 381756 - DNA, 75 bp, Homo sapiens
gcgctggaaccccgtcacaggctacaccagcaggttaacctcaccctacagatgaagataatagagcaagaaaaa

SEQ ID NO: 381757 - DNA, 75 bp, Homo sapiens
ggagattccatttgttatcccacgacccatccttgaagaagcacaggttggagctgaaggagtgcccaggctgcg

SEQ ID NO: 381758 - DNA, 50 bp, Homo sapiens
ccgcatcaagcagctgcgttcagtggaggtgaagccggtgctgccaagag

SEQ ID NO: 381759 - DNA, 82 bp, Homo sapiens
ggcgcggcagagtgcggcgcagcgcagctcctgagcatggcacattacacttctgtggatttaaagtccttgcccctcagat

SEQ ID NO: 381760 - DNA, 75 bp, Homo sapiens
atagagaatgagatagccgtcctgagaaatttccccctttctagggtgaggatggttctacacagccacccggag

SEQ ID NO: 381761 - DNA, 101 bp, Homo sapiens
aaaaggaaatcaccctgcttgagcaaaggaagtaatagcctgcagctggtgttttgagaagccctactgctgaaaacttaacaattttgtgtaataaaaat

SEQ ID NO: 381762 - DNA, 75 bp, Homo sapiens
tacgataccgaagcgggctgtgtgccccttctccacccagagataagctgttgccaggtgatgcaggagcccttt

SEQ ID NO: 381763 - DNA, 49 bp, Homo sapiens
ggggacgctgctgcagcacctgcgccagtcctcctccatcaaagaaaat

SEQ ID NO: 381764 - DNA, 90 bp, Homo sapiens
agattgcttgcaacaattgttatgcttggctccaacaaaagaatcctctgaagaggagtatgactctggagttgaagaagaaggatggcc

SEQ ID NO: 381765 - DNA, 90 bp, Homo sapiens
ggggcggcggcagcgacggcagcggcggcggctggactaaacaggtcacctgcagatccagacatttaatgtggatgcaccatgccagac

SEQ ID NO: 381766 - DNA, 76 bp, Homo sapiens
caagaagtttctaggaaaggccggacaccagcattggggctttccagctctcacagaaccttcagcatccccagct

SEQ ID NO: 381767 - DNA, 83 bp, Homo sapiens
acctctctgcgcccaaacggatctatgtccagctcgccgctgtccaagaaacgtcgcgtgtccgggcctgatccaaagccggg

SEQ ID NO: 381768 - DNA, 96 bp, Homo sapiens
gcatctgcaagagatcaacatcgccaccaggaccaccttcctcctgccagttgcccccaaaggacccaaaattgtgatgacgcccagcagagcccg

SEQ ID NO: 381769 - DNA, 50 bp, Homo sapiens
cagcgccggtgcatgtcgatgaattttggagagtaaaaggctgaaccttg

SEQ ID NO: 381770 - DNA, 101 bp, Homo sapiens
actgctaagaggaactaagatctagagtatctcctcgaggaagtacaactgaccccgaaggaggacctgtgctccaagtttgggatggacctgaagcgagg

SEQ ID NO: 381771 - DNA, 95 bp, Homo sapiens
tgaccgagaccgtgaccgagagcgtgaccgagagcgcgaatatcgtcatcgttagaagaaaacattcagaactctcagaacttaatgtgaaagtg

SEQ ID NO: 381772 - DNA, 50 bp, Homo sapiens
agacggcggcagcagcggcattcaggtgtgatcccctgggcccgtttgtt

SEQ ID NO: 381773 - DNA, 50 bp, Homo sapiens
aatcccttgcatggctctcagaaattatgatgtgatgaccccaatggttg

SEQ ID NO: 381774 - DNA, 99 bp, Homo sapiens
tgtaagtgaaaaaggggaagaaagagaatattgttcagttgattatgccagccagatgcagatcctccaggtcctattgacaatactaagattgcagtc

SEQ ID NO: 381775 - DNA, 100 bp, Homo sapiens
ccacgggctgggcctccgcgcggttcctcggggcatcccccgcaacgctgagcgcctgttttgtgatgaaggaacctgtacagataaagccaatattctg

SEQ ID NO: 381776 - DNA, 87 bp, Homo sapiens
ggcgaaggcgggcggcagaggcgatcaggtgaaatgacaatggatgctctgttggctcgattgaaacttctgaatccagatgacctt

SEQ ID NO: 381777 - DNA, 73 bp, Homo sapiens
tccatttcaaaggatgcccttttcatcgaagttggatggcaagcatgtggtgtttggcaaagtgaaagaaggc

SEQ ID NO: 381778 - DNA, 73 bp, Homo sapiens
tgaaatcgcgtggactgcaacacccagcagcgcgatcttgtagaaaatttcagctgtagcccttggactagaa

SEQ ID NO: 381779 - DNA, 100 bp, Homo sapiens
gtggatttgaagaatcagattctggtgctactaagagtccactccacttagctgggtaccaaagtctgatctcttgcacaccaaatcattaaggggccat

SEQ ID NO: 381780 - DNA, 100 bp, Homo sapiens
gcctgggtacaagcattcctcgtcagcaacatgctcctagcagaagcctatggatctggagttccagaaacgccgctggactgcgaggtctccctgtggt

SEQ ID NO: 381781 - DNA, 50 bp, Homo sapiens
cagaaacagaaacgattgtggaaacagaagacccttttgaggacttcttt

SEQ ID NO: 381782 - DNA, 50 bp, Homo sapiens
caacgatcggaactcggacacgacccctttgctgatgcaagtaagggtga

SEQ ID NO: 381783 - DNA, 100 bp, Homo sapiens
agacggcaacgcgcttatcagcgctatgagaattcccagtgacctgacagcagaggagcgtcaagaactggagaacatccgacggagaaaacaggagctg

SEQ ID NO: 381784 - DNA, 50 bp, Homo sapiens
tggatcgacaccctctacagcacccatcacctcttcatgaccactgcctg

SEQ ID NO: 381785 - DNA, 83 bp, Homo sapiens
aaatacccctttgaattaattatggctactgtgccctgtccacggtgcctcctgcatgtcctgctgccctgagctgtcccgag

SEQ ID NO: 381786 - DNA, 98 bp, Homo sapiens
cgccgaggcacaggctgctcgcggaccaccctgctccgaaaactaagacaatgcagatcttcgtgaagactctgactggtaagaccatcaccctcgag

SEQ ID NO: 381787 - DNA, 88 bp, Homo sapiens
accgagtttgtaatgtgactagacggccagccagtcatcaaacagttaaacatgaagtttctggagagacagtggtatttcaaggggg

SEQ ID NO: 381788 - DNA, 83 bp, Homo sapiens
cccgcccagagtcatggcggcagcagccgctctgagggcgcctgctcaggatggatagaatgacagaagatgctcttcgcttg

SEQ ID NO: 381789 - DNA, 100 bp, Homo sapiens
gagtctctgccactgcacaagaaatgtgtccccacagggatagaagatgaagatgctctcattgctgatgtaaagacccgtttgatggagctgcaccgcc

SEQ ID NO: 381790 - DNA, 75 bp, Homo sapiens
tacgaagcctatgtcaagtgtcaagataaagtgagtcagctgtacatggatgaaaactttcggaagagaaagttg

SEQ ID NO: 381791 - DNA, 50 bp, Homo sapiens
gatctcaatgaatgggttgcagttaacaatgagaccctttttgctcttcc

SEQ ID NO: 381792 - DNA, 98 bp, Homo sapiens
gcagcagaaagcatttaaccagcatggctacttcatattttggaaagcagtttttaagacaatcaagtccatcatctccagaaccagctagtcttcct

SEQ ID NO: 381793 - DNA, 97 bp, Homo sapiens
tttaaacaagagatttccacagaagggccaattcctgtccccccagcagcatggcatcgtgtgctgaaccctctgagccctctgccccactgcccgc

SEQ ID NO: 381794 - DNA, 74 bp, Homo sapiens
ggtctatttcgagatggatcctataacagcatacaggttttccccccccaccccgtcatgtacagctgaatcat

SEQ ID NO: 381795 - DNA, 82 bp, Homo sapiens
ggctgatggagagctgaacattactcttccagaagaggtgaaaggaaagcaagccaggatggatatttacgacactcaaacc

SEQ ID NO: 381796 - DNA, 90 bp, Homo sapiens
catcggcggctactgggccgggagtcgggacgtgaagaaatccccgtcgaggtcaagatcaagatccaggtctatttcacgaccaagaag

SEQ ID NO: 381797 - DNA, 98 bp, Homo sapiens
caggagctgtagagaggaccccggtacatctgaaagccgggaaatgtatggtttgaagtggtgaacatggatttttctcggcttcacatgtacagtcc

SEQ ID NO: 381798 - DNA, 74 bp, Homo sapiens
ttatgcagctggctagagatatggcaaaggtgaagagtctttgcaggttggtggtcaacagggtcagagatgcc

SEQ ID NO: 381799 - DNA, 75 bp, Homo sapiens
ttggccgtgcttgccctgtcatcccacctgagaaccatgctcaccgaccctgtccttgaatgggcaagagggcac

SEQ ID NO: 381800 - DNA, 100 bp, Homo sapiens
cgcaaagttcctcacagtttaggtctcaaggcaagcctattgagttaacacctctgccgctgctaaaagatgccttcaattaagttgcagagttctgatg

SEQ ID NO: 381801 - DNA, 83 bp, Homo sapiens
gccactgctgctccgtggagatcgtcccgcgcctgccgggactttgaacatgtcggggatcgccctcagcagactcgcccagg

SEQ ID NO: 381802 - DNA, 100 bp, Homo sapiens
ccagaagtcatcttcagcttggaacaagaagagccatgtatgttggatggtgagatccccagtcagagccgtccaggtctccctctgatgccgagccgaa

SEQ ID NO: 381803 - DNA, 90 bp, Homo sapiens
gggaacttgtgagcctgcggtgaaagccatattttctgctcttaagaatcttcaagataagattcgacgcttggaacttgagaggattca

SEQ ID NO: 381804 - DNA, 83 bp, Homo sapiens
tctgggaccgggccataacaacgctgcctcgagttaatcagttctgggaagtctgttagaactgctgtgctgatcaacgggac

SEQ ID NO: 381805 - DNA, 100 bp, Homo sapiens
atggcgtggagatatggcgcaactgcggcgcgtgtctgtgacctttgaggatgtggctgtgacattcacccaggaggagtggggacagttggatgcagcc

SEQ ID NO: 381806 - DNA, 83 bp, Homo sapiens
catggcccaatttgtccgtaaccttgtggagaagaccccggcgctggtgaacggatattgatctgggggctgggcgtgaggtt

SEQ ID NO: 381807 - DNA, 100 bp, Homo sapiens
gtgccagtattatgatgctcaatgtcaagtcatctttggctcaattactgtaaaatggggaaaggagaaatttgaaggtgtagaattgaatacagatgaa

SEQ ID NO: 381808 - DNA, 76 bp, Homo sapiens
ttctaccatgagacctcttgctacagcatacaaagcctctactagtgattatcagtcaagcaccacataccgacag

SEQ ID NO: 381809 - DNA, 90 bp, Homo sapiens
atttccagtatctatgcacgagaggccctcattgagattgactacggtgatctgtgtgaggatctgaagacactgtcacatgaacccaaa

SEQ ID NO: 381810 - DNA, 51 bp, Homo sapiens
ttgtcaacgggatctgggagtgacactggaacggaaaacagttcttccttc

SEQ ID NO: 381811 - DNA, 75 bp, Homo sapiens
gcggtcgctgggggccacggagcctgaggtcgttgaggacttccacatggagattggcacaggaccagactcaag

SEQ ID NO: 381812 - DNA, 75 bp, Homo sapiens
ctcaagcaatcctaccatgtcagccttcccagtagctggaactacagggggtcaaaccaaccttcgcatacctca

SEQ ID NO: 381813 - DNA, 50 bp, Homo sapiens
cggaggtgcccacgcagctgcctggacaacacggggtcactctggtgccc

SEQ ID NO: 381814 - DNA, 83 bp, Homo sapiens
cactggaagtggctgagtacctgaccccggtcctcaagggggatatgagactttctactcggaatatcctgagtgttgcgtgg

SEQ ID NO: 381815 - DNA, 102 bp, Homo sapiens
atctttgctaagttttgaaaaacttgaccgtgcctcaccagatctttggccagaacaatcttgaggagttcctgaaccagagctcgcccttctacttctgga

SEQ ID NO: 381816 - DNA, 127 bp, Homo sapiens
cagagtggaaaaaagagaggatttgcttttgtaacttttgatgatcatgatacagttgataaaattgttgacaggtgatttggcttctgcacagttaggaggagcaccaaaccgatgggaggttttg

SEQ ID NO: 381817 - DNA, 98 bp, Homo sapiens
ttagacaaatgttttgaaaatgtctgtgagctggatttgattttccatgtagacaaggtggagcgaatcaaggagcgtgtggaggagaaagagggaat

SEQ ID NO: 381818 - DNA, 75 bp, Homo sapiens
ttcacactgcagaactgggttctggactttgggcgtcccattgccatgtatgaccagtataagactccaatggag

SEQ ID NO: 381819 - DNA, 75 bp, Homo sapiens
ggaaggaacttgaaaccttcaaagaaggtgacaaagtacaatttgaagaatttgcaaaagtagtaaggaatatgc

SEQ ID NO: 381820 - DNA, 50 bp, Homo sapiens
cccaggacccgcctggctgcgagatataattcccttcttcaagttctgct

SEQ ID NO: 381821 - DNA, 74 bp, Homo sapiens
ttgatcctcttgataaagcactggcatcaacagtctctgctttctatccgtcaagatgataaagtcgtgtgccc

SEQ ID NO: 381822 - DNA, 75 bp, Homo sapiens
ctgatcactactgacttgttgtttccacgggctcccttgctcagcagtatgcgcaccctaacgctaccctgcacc

SEQ ID NO: 381823 - DNA, 75 bp, Homo sapiens
ttccaccacctccgccagttaagaggaaaaagccaacaaatggaattttcttgagcatgtttctaatcgttttgc

SEQ ID NO: 381824 - DNA, 87 bp, Homo sapiens
aagatccacttgctggagggagacttggacaaggccattgaagtctacaagaaagcagtggagttaaaaagatcaagtggcatgagc

SEQ ID NO: 381825 - DNA, 90 bp, Homo sapiens
ccctgcagtacctgcagaaggtctctggagacatcttcagcagattgtgttcaattagaccttcaggacctctccaagaagcctccggac

SEQ ID NO: 381826 - DNA, 100 bp, Homo sapiens
gcttctgtctcgactgcactttgagaagatattttccagcagatgccaccgctgagatgctagaagaatggcgacctttaatgtgcccttttgatgtaac

SEQ ID NO: 381827 - DNA, 82 bp, Homo sapiens
cctgcacagccgcggcggcagcagcagtgagagcccaggatccggttgtggccgtggctgaggatggccgggagaagccgaa

SEQ ID NO: 381828 - DNA, 73 bp, Homo sapiens
acgcgaatttgaagatagagacaggtctcatcgggaggaaatggagggacctgttgcaatgagagtggcaaaa

SEQ ID NO: 381829 - DNA, 100 bp, Homo sapiens
ggtctcccttctcggtgaacgttcagctgctgcaggaccacggggaaattgccaagaccctgggcgctgcctatggcacagccaagagcggtaccggcat

SEQ ID NO: 381830 - DNA, 100 bp, Homo sapiens
ttgcagtcagcgccagcactgtattcctgtcattgcgaggctgcccgtcttgggatcacaatgaaggccaagcttgctcgcctagaggcccaggagcagg

SEQ ID NO: 381831 - DNA, 75 bp, Homo sapiens
ccaaccccttcgagcaagacgtgggtttacccaaggtccagcctagcccctaggcaccatgtcggacagtgatct

SEQ ID NO: 381832 - DNA, 100 bp, Homo sapiens
acgtcatcttcttctaaaagggccgtgactcaagattttgcaagaacgaggctcaaggatgtgagggacacagtattgacagctgaagaaatgatttacg

SEQ ID NO: 381833 - DNA, 100 bp, Homo sapiens
cgggaagacgcggcggcggcggcggaggatgagcctgcagagcgcgcagtacctccggatcttagtaagagccctaagaccatgaaaaagctgctgccca

SEQ ID NO: 381834 - DNA, 101 bp, Homo sapiens
gaagaggaaattaactatctgtacttataagtcagaatctggagatgtgagtagaaacacggaactgaagaaacttcagatttttggggctgggcccaagg

SEQ ID NO: 381835 - DNA, 115 bp, Homo sapiens
aagtggagtccatattcctgaacgtggctgctgtgaacacgcaccgggacaggcctcaggtcattgattacaacggggaacgcacgctggatggttttaagaaattcctggagag

SEQ ID NO: 381836 - DNA, 96 bp, Homo sapiens
acgaggaggaccagaaggagatcggtgacctccgtgcccagcagcagcaggagtctccccaggacagtgctatcacccgggatattaaccgaacat

SEQ ID NO: 381837 - DNA, 75 bp, Homo sapiens
accaacatagccatcgacttcggggagcaggacccagatgatgtggtaccagttggccaaagaagagcctggtgt

SEQ ID NO: 381838 - DNA, 100 bp, Homo sapiens
gctactcggagggcgagcggacctccctggagaaggaatcaacagtgagacaattatgaaaccagcttcaatttcagaggaagaattgttgaatttaatc

SEQ ID NO: 381839 - DNA, 100 bp, Homo sapiens
agtggaggcgccgctctagcggccgggactctgaactatggcggtgctggagaatctggtaaaagcaccattgtgaagcagatgaggatcctgcatgtta

SEQ ID NO: 381840 - DNA, 51 bp, Homo sapiens
cggaggtcgataagctggaactgatgcagccagacccggtccgtttggaat

SEQ ID NO: 381841 - DNA, 101 bp, Homo sapiens
gcaagggattgctggctacagcttcagaagaccgaagcgttcgtatctggaaggttcagcagctggacatggagaaccaacgctcatcacctctgtcgttc

SEQ ID NO: 381842 - DNA, 82 bp, Homo sapiens
gtttgctgcgcccgcactgcggtggtggagacactgccacttgctgtgccaaatggaacacggaggataaagtcagccatgt

SEQ ID NO: 381843 - DNA, 89 bp, Homo sapiens
tatgatttcagctgcaatggcagatattgatgatgttaagaagttcaaaccgggttacctggaagctactcttaattggtttagattat

SEQ ID NO: 381844 - DNA, 82 bp, Homo sapiens
tggacggggagaccctgatcaagaacaggagcgcagagcttcgtgtcctatggccagctctcaatgttgcaagaaaaaatag

SEQ ID NO: 381845 - DNA, 100 bp, Homo sapiens
aaaaaacaaaacaaatatgaactatgataagctgagcagagccctgcgatactattatgacaagccagctgaggtgggtgtcctggttggcaaagaccgg

SEQ ID NO: 381846 - DNA, 75 bp, Homo sapiens
ctttgggaaaaccatcagagacctgcctcttcaccgagacttggagccagaatctgagcctcagctggagtcaga

SEQ ID NO: 381847 - DNA, 51 bp, Homo sapiens
agggccggaggattaccatcaccggaaaacacaccacagccatcagcactg

SEQ ID NO: 381848 - DNA, 75 bp, Homo sapiens
agccttcctgtgcaacctgaggtggcactgaagaggtggcagctatgcaggcaggtctgctgaaggtggtaccac

SEQ ID NO: 381849 - DNA, 83 bp, Homo sapiens
agaaaatacaaatcacacgcataatggatgaaaggaaccgacagtagtggccacagaagaagtagttactgcagaatctgtgg

SEQ ID NO: 381850 - DNA, 97 bp, Homo sapiens
ggctcagagatccaagtgcgcgccctggcgggtccggaccaaggaacagcttcagctgcggggctcctttacctgcacacatgggcagctgctgtgt

SEQ ID NO: 381851 - DNA, 100 bp, Homo sapiens
tgggcggccgtggacaacatgatggtcagaaaaggggacacggcggtgcttagtattggtaaaggttttcaaggtgtcatgaaaagatggggatttaaag

SEQ ID NO: 381852 - DNA, 75 bp, Homo sapiens
ttttgaagaggaaatgaagggtattgccgctgttactgatatacctttaggtgacctggtactgcttgatgtatg

SEQ ID NO: 381853 - DNA, 100 bp, Homo sapiens
ccaggaattctccatctgcaactactggcatgatgtcaaggttcgcttcatcgttcgaggctgtggacagtacatttcctaccgctgccaagaaaaacgc

SEQ ID NO: 381854 - DNA, 75 bp, Homo sapiens
ccactcctaaaggctggtcctgccactgggacaggaatattggtataatagcatatatgttgttaactcacacat

SEQ ID NO: 381855 - DNA, 100 bp, Homo sapiens
gccgttcggctgcaccatctgcggccgggccttcaccactaagggcaacctcaagtctacaaataagaaacctcgaaaatctccaggtgagaagagcaga

SEQ ID NO: 381856 - DNA, 75 bp, Homo sapiens
ccaagtacaccagcgctaagtaaacaatatttagcttcctgtggtatactgatgagcagaactcttccactacat

SEQ ID NO: 381857 - DNA, 75 bp, Homo sapiens
gccatgaccgtggagttcgaggagtgcgtcaaggactccccgcgcttcaggttaatttggagtggcccctggagt

SEQ ID NO: 381858 - DNA, 96 bp, Homo sapiens
gaaaaaccaagtagcaaggttcaacgatctgagatttgtgggccggagtggacgagaaacctgtgaaggtcgaaacagctgcgtttcctgttttaa

SEQ ID NO: 381859 - DNA, 78 bp, Homo sapiens
aagagacatgaagaattggtatttcaaatgaccaccatgttgcaaaagtgttctagaacagatcagacattttgtaat

SEQ ID NO: 381860 - DNA, 126 bp, Homo sapiens
ggctgcgtcaccgccgcccccccagacaagatggacaccgcggaggaaggcaatgaatcgctccctggctaatgtgattcttggaggctatggcaccacttcaacagctggtggaaaacccatgga

SEQ ID NO: 381861 - DNA, 82 bp, Homo sapiens
gactgagtcctgcaggacacaggaaattgacaatggcccttcagctatgctaggtctataatgggaagtgtcacagttcggt

SEQ ID NO: 381862 - DNA, 100 bp, Homo sapiens
ttttattaattgttttgattccttggaaaaagtcctgcacaccgggaagaggtggttcatcatctgtccggtggctgagcaccccgcccccgaggcccct

SEQ ID NO: 381863 - DNA, 75 bp, Homo sapiens
ggaaggtggagccaccagcctctccctggcagccgtgtctgtgtttttgtctcgcagaattagagcccattggga

SEQ ID NO: 381864 - DNA, 97 bp, Homo sapiens
tcctggaagatctccgcactctggagcataatgtgtggataatattaatgcagctgtgatggatttgaaaaaaaagaagatccgcagtctaagtgaa

SEQ ID NO: 381865 - DNA, 82 bp, Homo sapiens
gaaataccagccaaaatcatttttgaggatgaccggcaaacggggattcagcgtccgatcctttggaacagggactcacgtg

SEQ ID NO: 381866 - DNA, 100 bp, Homo sapiens
tttttcagtccttcccccaagaccaggcgccagggcgaggtggtggaagctacaatgattttgggaattacaacaatcagtcttcaaattttggacccat

SEQ ID NO: 381867 - DNA, 95 bp, Homo sapiens
aagaggccaagcacattgcggaagaggctgaccgcaaatacgaggaggaaggcaacagcccccaggggagcaaccagggagtcaaaatcacaccg

SEQ ID NO: 381868 - DNA, 50 bp, Homo sapiens
cttcgtacccacagtgcttcatgagagggaattcctcaagctgtacttcc

SEQ ID NO: 381869 - DNA, 100 bp, Homo sapiens
actaaatgggagaagaggaatgttccctgacaatttcgttaaggtgtctcaatgcttgtacctactgcaaaactaaacacgccagaggaaatttggccag

SEQ ID NO: 381870 - DNA, 96 bp, Homo sapiens
cggagcccggccccggggaactagggagcgtctccggctgcacagcgctcagatcatcaatgctgtggtactgttgattttattgagtgccctggc

SEQ ID NO: 381871 - DNA, 82 bp, Homo sapiens
ggatggagttgctgcaggcagagggagccacaggtgcattttagtggttaccaggttgccacgtatttgaagtggtgtgaga

SEQ ID NO: 381872 - DNA, 88 bp, Homo sapiens
cgtgtcgcggggccggagaagctagggccagagtgaagttcccagaccctacgccccgctgtcaggcagcccgccgatcagatggagg

SEQ ID NO: 381873 - DNA, 100 bp, Homo sapiens
ccagagcctcagtttgtgcaggacaccgacatggaacagggactcactggggttgtacaatggtagatggagtgatgattcttcctgtgcttatcatgat

SEQ ID NO: 381874 - DNA, 100 bp, Homo sapiens
cctggcagccgccttggtagcagcgggtgacatggaaggggcagtacaagcttacgtctctgctcttcagtacaatcctttggtagctggcagtgttgtg

SEQ ID NO: 381875 - DNA, 97 bp, Homo sapiens
tgttattggagaaacatgcagattatatcgcatcctatggctcaaagaaagatgattatgcctcaggagtgcaagtagctgatgaagtatgtcgcat

SEQ ID NO: 381876 - DNA, 75 bp, Homo sapiens
aacctggccctcttcaatttctgacaaaagctgcagaaccttggcctgaaaatgctacattatatcagcaattga

SEQ ID NO: 381877 - DNA, 100 bp, Homo sapiens
actgagtttcactcccgacggatctttgcttctcacgccagagtgcccaagacaggagcaggacattgtgttcctgatcgatggctcaggcagcatctcc

SEQ ID NO: 381878 - DNA, 75 bp, Homo sapiens
gcctaccacacacgtgaagtccaggttggacgtgataagtatgagcctgcagctgtttcagaacaaggtgataaa

SEQ ID NO: 381879 - DNA, 83 bp, Homo sapiens
ccagagtgcagagccgcctttccagcatgcaggggctgctcagatctctgttgaggagctggcgcggaatctggtcatcaagg

SEQ ID NO: 381880 - DNA, 82 bp, Homo sapiens
tttcagggtgcagtatacagaaacagagccgtatcataattaccgagttccgtggggaccccactgcctggagtacaggtgc

SEQ ID NO: 381881 - DNA, 100 bp, Homo sapiens
gaatctgtgtcattactgtggaaggtggacttgaaggtcgaagacatgaacttgtttaccctttctgccttggttgcctgataggcaaactctaatgtgg

SEQ ID NO: 381882 - DNA, 90 bp, Homo sapiens
agccgggaactccccatcgcgttttgccagcgataatacgcctcaggtagtgggcagcagtcagtgacaggtgtaacctctgtggatgac

SEQ ID NO: 381883 - DNA, 100 bp, Homo sapiens
gataagcacaaagtcaagagacagcgattggacagaatttgtgaagactgcaaaattcaaaatggggctcaaggtattcgtttcatctacaccagagaag

SEQ ID NO: 381884 - DNA, 90 bp, Homo sapiens
ccgggctgcgctgggcgctgccgctgctgctgctgctgctgcgcctgggccagggatgccaagtccccacttaaaagtggaccagacagc

SEQ ID NO: 381885 - DNA, 100 bp, Homo sapiens
cccagagccagtgccaatcggatcaccaatggaaccctcccctggcggtttgcagatcccaatgtcaaaactggaccaatggggccaggctgaagtattg

SEQ ID NO: 381886 - DNA, 90 bp, Homo sapiens
acggggaggaggagcaggagctggaggaggagccgccgccgccagggttatgtaccgaaggactctaccgtgtcagcgggaataaaactg

SEQ ID NO: 381887 - DNA, 75 bp, Homo sapiens
agcaacctgctcttcgacgagcccattcccaggaaaagaaagttgctgaacctgtttgcatgagttgctcctgac

SEQ ID NO: 381888 - DNA, 98 bp, Homo sapiens
tcgcctcctcagggttccctgtgctgccacttttcagccatggccacaagattttatcatgtgggcaacctgctgcaactggttctgcctggatggac

SEQ ID NO: 381889 - DNA, 75 bp, Homo sapiens
caagaagacactctggacaccactatggacaggtaatgctggaggatggaagaagcaaagggtttggcttcgtct

SEQ ID NO: 381890 - DNA, 82 bp, Homo sapiens
caccaagtggaatgtagaagacgtctacgaattcatccgctctctgccagagaatttctctgctcctcctgatgtcactaca

SEQ ID NO: 381891 - DNA, 95 bp, Homo sapiens
gagcaggctgagcgatacgacgaatatgatgctgtggctgagaaagctggtaaagtagaagctgaggttaaacgcttacacaataccatcgtaga

SEQ ID NO: 381892 - DNA, 75 bp, Homo sapiens
tagctgtgctcgcgctactctctctttctggcctggaggctatccagcgcttgcagccaatttactggagcaggg

SEQ ID NO: 381893 - DNA, 100 bp, Homo sapiens
cgacaaagaccgaaaagaagatgatacaaatgaatttgttagtgctgtgtgctggagggcactaccagatgggcccaataggggcacaaaacgtccccgg

SEQ ID NO: 381894 - DNA, 90 bp, Homo sapiens
atcaaagaattccatcggacatggtgtttcttaggacttcagaaaaagcaggctggctacagcaaacatcattcaagatgtccagcaaag

SEQ ID NO: 381895 - DNA, 100 bp, Homo sapiens
cctctccgcctccatgtgccggatagcgggagcgctgcggaccctgctgccgctgctggcggccctgcttcaggtttgccgggcaccgctccagacctgg

SEQ ID NO: 381896 - DNA, 88 bp, Homo sapiens
acgtttggacccaagcttaacttttccaatgtggaatcctgggccttcattggactcacaccacccggcaagaactgctcactacggc

SEQ ID NO: 381897 - DNA, 82 bp, Homo sapiens
tccgcgggatgcaccgtggtagccgagggcggaggcgacactctcaggttcgagaacttgtcttggacaattgcaaatcaaa

SEQ ID NO: 381898 - DNA, 90 bp, Homo sapiens
aaggcattagtcctatcttgtaaggcttctcaataataatcagatcaagaggatacctagtggagcatttgaagacttggaaaatttaaa

SEQ ID NO: 381899 - DNA, 97 bp, Homo sapiens
ggcggatctggaggagcagttgtctgatgaagagaaggcagagaagaggcgatggcggcgatggcatctctcggcgccctggcgctgctcctgctgt

SEQ ID NO: 381900 - DNA, 98 bp, Homo sapiens
gatgaatggtttattgtttatgtaataaagcagatcacaaaggaatttccagagttagtagcaagctgctgtattaaagtatgaaaataatgtgatga

SEQ ID NO: 381901 - DNA, 87 bp, Homo sapiens
cgaactggaatctggatgagcagctcaagcaggagctcttgtccctggcaaagcgaaagcgcagtgactctgaggagaaggagccgc

SEQ ID NO: 381902 - DNA, 83 bp, Homo sapiens
tctgggcagccagagccgcaaaggtgttacacataatattgcattacttcgagaggtgataatcaactcacgctttgtaaaag

SEQ ID NO: 381903 - DNA, 74 bp, Homo sapiens
cgagatgccgggggagcggggccttccacaccccctccgtgggtgtgtgaaatcttcccaaggctgcagacacc

SEQ ID NO: 381904 - DNA, 100 bp, Homo sapiens
gcggcggcggcggcggcgcgcgggggcgacgcgcgggaacaacgcgagtcggcgcgcgggacgaaggaggagatgttaaagtaacccatcttgcaggacg

SEQ ID NO: 381905 - DNA, 118 bp, Homo sapiens
atggcacttcattggccacctacagaaacaaaatgtcaacaaattgatgggtacaccaggggttggaaaaaccacactaggcaaagaacttgcgtcaaaatcaggactgaaatacatt

SEQ ID NO: 381906 - DNA, 100 bp, Homo sapiens
gcgttttacggggtttgctgcatactatgttgccacaggtggttatcactaggctaaaactggacaaagaccgcaaaaagatcctcgaacggaaagccaa

SEQ ID NO: 381907 - DNA, 100 bp, Homo sapiens
aggcctcagaggaggagaaaggccggagccagccgaggtcagcttttgccaactgttttcaaatcacatgcatgggggatcttacacacactccttgaga

SEQ ID NO: 381908 - DNA, 73 bp, Homo sapiens
gacaaatatttcaacaagttaaaaggaggcctgctgtccacagatgacaaggcgggagacctttgactttgac

SEQ ID NO: 381909 - DNA, 60 bp, Homo sapiens
cgaagagctgcagctcctcctgtgcggcagcctcccgcgacgatgcccctcaacgttagc

SEQ ID NO: 381910 - DNA, 108 bp, Homo sapiens
tttgatgctgaggagctcctggtcgatgaagaggatgatgtttttggtgaaggtgaagtattacagacacttagcacctgatcacttgctgcaaatatgtcatcgact

SEQ ID NO: 381911 - DNA, 90 bp, Homo sapiens
attaatccagcatacataaaagccagaattagttttggctataatttgcaggttcaaaccttgtactactcagctgatcacaagctgctt

SEQ ID NO: 381912 - DNA, 50 bp, Homo sapiens
cgccctggccatctaccatgtgggactggtgattgcagctggaagtgccc

SEQ ID NO: 381913 - DNA, 82 bp, Homo sapiens
ccgccatccgctgtgcgcaggcccagactggcattgatttgagcggctgtaccaagtgccatggtggagctggatggcgacg

SEQ ID NO: 381914 - DNA, 74 bp, Homo sapiens
cggcttccaggcgcactaccgcgacctcctgccccccgaggtctgcagtctcctgaacccagcagccatctacg

SEQ ID NO: 381915 - DNA, 98 bp, Homo sapiens
tggtcttccctgaccccgcggccggacgacccaagcccgctgagcaggatgagggttatgaagacagtatggagtttccagaccatagtagacatttg

SEQ ID NO: 381916 - DNA, 90 bp, Homo sapiens
ggctgtgagacacgttaaaatttcaggatcctaatgctttggctggccagaatggccctgaccatgctctcataggaggaatagtggctg

SEQ ID NO: 381917 - DNA, 100 bp, Homo sapiens
agaggagggtggacgaagctctctccagaaagacatcctgagaggacttggcaggttcccgtgtcagtggctatgatgacacctcaagttatcactcccc

SEQ ID NO: 381918 - DNA, 75 bp, Homo sapiens
gacatatctgagggagaagcacaagatcatgcacagagttggatcacaaggacgagtcataagttttgaggtacg

SEQ ID NO: 381919 - DNA, 82 bp, Homo sapiens
aatgctccttctcctggagacgcaactcaagaacatacatatgatagttgagaaagacacatattctgatcatgaagaaata

SEQ ID NO: 381920 - DNA, 103 bp, Homo sapiens
gaagagggtctggaggagccttctcaagaacagaggaggcaagtgaggcctatctggttggcctttttgaagacaccaacctgtgtgctatccatgccaaacg

SEQ ID NO: 381921 - DNA, 100 bp, Homo sapiens
atccaggttacatggcatttctcacatatgatgaagttaaagcacgactacagaaatatagcaccaaacccggaagccttgccttacacccagacaaaac

SEQ ID NO: 381922 - DNA, 100 bp, Homo sapiens
ccgggtagcccgctaggcgcgccgtccccagccccgccgccggccctcggtgcgcccggccgcctgcacccccagttggaatcgaagcctcttaaaatgg

SEQ ID NO: 381923 - DNA, 100 bp, Homo sapiens
tcaaagaagtagcgtcagaaatctggaaaattgtacgctcccatggagttcaaacgctcctggttgcagccagaatgcatgacttcaggaggactgtgaa

SEQ ID NO: 381924 - DNA, 75 bp, Homo sapiens
acagaaatcctcgacagctggatgcagaggcactgtgcaggatcccattgaagataccacgctgcatgtgtcctt

SEQ ID NO: 381925 - DNA, 95 bp, Homo sapiens
ctgggtcattgacgattgcattggtaactggtggagaccaaattttgaacctcctcagaccagcattctcgaaattggaggactcctttgaggcc

SEQ ID NO: 381926 - DNA, 96 bp, Homo sapiens
agcccggctggacgccgctgcctcagtgaagatagtgatccggggagacaggaacacgggcaagacagcgctgtggcaccgcctgcagggccggcc

SEQ ID NO: 381927 - DNA, 74 bp, Homo sapiens
acaaatccttgaaagaagaagatggagaagaaatagttacctatgatcctcctgaattcagaccacagatccac

SEQ ID NO: 381928 - DNA, 83 bp, Homo sapiens
cccagaatgaagagatgttacccagtatcttggtgttgctgaagagctcaccctggacagtatcactccgtggaggaagactg

SEQ ID NO: 381929 - DNA, 75 bp, Homo sapiens
accgtcgccttgctcctcgccgcggcggggactgcagatgagcgggatcgtgtgcagaagaaaaccttcaccaag

SEQ ID NO: 381930 - DNA, 75 bp, Homo sapiens
ctcggcggcgccaccatgtactcgggagccggccccggctctgacgcccgctctgcggcttcggtgtttgaacag

SEQ ID NO: 381931 - DNA, 49 bp, Homo sapiens
tgcagtgcgagacgctagagggtactccaaagattcaggtttactcacg

SEQ ID NO: 381932 - DNA, 82 bp, Homo sapiens
gttgcttgcttgcctgtgcgcgcgtgcgcggacatggcctcaaacggaatcaaagatcaactcccactgaggacaaatggac

SEQ ID NO: 381933 - DNA, 100 bp, Homo sapiens
gaagaccactccagcgatatgttcaactatgaaggtggtcttcgagggatagcacgaggtggtctgacaggactaacacttaccagcctctatgcactat

SEQ ID NO: 381934 - DNA, 100 bp, Homo sapiens
gaggaacttgcccagagccctgcatgcatcagacctacagcagacattgcaggcctgaagaaaggtaaactcgggggccaggactcttttgaaagcatag

SEQ ID NO: 381935 - DNA, 82 bp, Homo sapiens
tgcaaaggcaggggaggaagccacctcgaggtcaaaatgcagatcttcgtgaaaacccttaccggcaagaccatcacccttg

SEQ ID NO: 381936 - DNA, 50 bp, Homo sapiens
cccaaatcctcttctccaagaaggctgagggtaaaaagctgggattggta

SEQ ID NO: 381937 - DNA, 51 bp, Homo sapiens
actgcggagaggtgtttggtgcagaaggtgtccaggactaagcctgtatgt

SEQ ID NO: 381938 - DNA, 75 bp, Homo sapiens
caccatcaaggaggaaggcctggttcttcaaggttagcgatgctactaagctaaggccaaaggcggagttctgtt

SEQ ID NO: 381939 - DNA, 82 bp, Homo sapiens
ttttccgaaagctgggactgaggcagtgccttgtaactcacaatggtgatcagcctttgagcctttcccacattgaagatgg

SEQ ID NO: 381940 - DNA, 98 bp, Homo sapiens
tgaactcagacctattgcaaggaaaggacactcccctaacatatttgctgagatcagaaaggacatgagtggccactatcagaatgccctatacctgg

SEQ ID NO: 381941 - DNA, 100 bp, Homo sapiens
aatccactaacaagcagtcaaccaatagatgatgaaatttatgaagaacttccaggttgaaggtttagaacagatgtggaaaaatgtttacttcagagaa

SEQ ID NO: 381942 - DNA, 51 bp, Homo sapiens
ctacagaaacctggtctccctagagtatgctcaggtaatcaaaatgttggg

SEQ ID NO: 381943 - DNA, 82 bp, Homo sapiens
ggagagaagccgcaaccagagccgccgccacgcctgtgggccaaagctgaccaactcccccaccgtcatcgtcatggtgggc

SEQ ID NO: 381944 - DNA, 82 bp, Homo sapiens
tcctggccaccgactcctacaagcttcctgcctgacacagctcacttcaagaagtgcacaatgtcagaacgtggaattaagt

SEQ ID NO: 381945 - DNA, 100 bp, Homo sapiens
ctgagctaaaatggctgaggagagagtcgcgacgtgcatattgggtacttccagaagtatgaattcagtgatgcaaaggacaggcgggctgcagcagcaa

SEQ ID NO: 381946 - DNA, 75 bp, Homo sapiens
ggagatacaagaaaaattaaacgaagccgttctcaccttgcaggaactgatttcatctgaaattgaagagacaat

SEQ ID NO: 381947 - DNA, 97 bp, Homo sapiens
caggaatgccagtgcatcttttgcacagctgaatagccaggccagaagaaggaaggcctgtggtgagtgggacaggaaatgacatcaccaccccacc

SEQ ID NO: 381948 - DNA, 89 bp, Homo sapiens
catcatagtcaactgcgtggaagagaaggagaatgaagtttctagattagaagacataatgcagcatttaaaatcaaagaagcgggaag

SEQ ID NO: 381949 - DNA, 100 bp, Homo sapiens
cgagccgacggagaaatggactcctcttctcgctcctgtggagtttcgtcttctggactgctgcagtaagaatgtcttttccacctcatttgaatcgccc

SEQ ID NO: 381950 - DNA, 75 bp, Homo sapiens
aacagcacacaatatttcctggagaaatcttactgtttctgagaccaagacacattccaccccagtggggggtcc

SEQ ID NO: 381951 - DNA, 100 bp, Homo sapiens
acgcgatttcagacctatccatgtacaattacatagaggtggatccataaagaacccagccaacccgcagagggaggggaggggctgagctgtgaggaga

SEQ ID NO: 381952 - DNA, 100 bp, Homo sapiens
tatggctgcagaagcagaagcgtcccgcgaggcccgcgccaagctgccatgtccacgcagagacttcggaatgaagactaccacgactacagctccacgg

SEQ ID NO: 381953 - DNA, 100 bp, Homo sapiens
aaaaggaccacaggatattggtcccattctattcaggttgtaggaagtgtcctgtattttactaatttttgccttgataaattggggcaaccgcttctaa

SEQ ID NO: 381954 - DNA, 76 bp, Homo sapiens
agaactcctaaacaggtggatccagaaatgttgctgaagtgctgctgaaagggccagagatgcaaggatttgggat

SEQ ID NO: 381955 - DNA, 75 bp, Homo sapiens
ggcgaatagctctgaccacccggcgaaggtgaggcggaaccaaccctcctggccatgggaggggccgtggtggac

SEQ ID NO: 381956 - DNA, 100 bp, Homo sapiens
gccatcgttgctgccttcttcgtcaagatgtagcgctggctgcagttcttgtccctgtgctggtcatggtcctcactactctcattctcatattagtgtg

SEQ ID NO: 381957 - DNA, 100 bp, Homo sapiens
tccgggtgaggccggccacgccccgcacgttacacaacagccaatgcggagtctgacaatgagcgggactctgacaaagaaagtgaggacggggaagatg

SEQ ID NO: 381958 - DNA, 96 bp, Homo sapiens
gcttaattcaaggtcacacaatgtcggggatggacctccagatttccttactgatgatgaagaacgagagcttcaaatggatcctgcagactatgg

SEQ ID NO: 381959 - DNA, 90 bp, Homo sapiens
ctagtgagcacaatgaaggcaagtgggactttgccttctcagcccaaagtcagcgtcatccagggctgcgggaaccccaaggtcaacccc

SEQ ID NO: 381960 - DNA, 98 bp, Homo sapiens
ccgagttcaacatcctcctggccaccgactcctacaagggccaattcctgtccccccagcagcatggcatcgtgtgctgaaccctctgagccctctgc

SEQ ID NO: 381961 - DNA, 75 bp, Homo sapiens
acagctggacgtttgccgtccactctgaggtctccaccgggaaccttctggtcatcctgagtcgacactaccagg

SEQ ID NO: 381962 - DNA, 98 bp, Homo sapiens
aacagactcgatcgttagggaatgtaattaatggtgaaaaagccactttggaaaccccaacatttgcccagaaacgtcggcgtaccctggatatgttg

SEQ ID NO: 381963 - DNA, 99 bp, Homo sapiens
gcagccggtaacgttgctggaccgggacgcacgctcagctgaggaggacccccaaaggtatctgcccaaactggaacttatgctgtagacatttctttg

SEQ ID NO: 381964 - DNA, 90 bp, Homo sapiens
tccggatcgcatggaagacgcagcctggccgcgctctcccagcagaggcaaggctggcagcaaaacgggctgcccgggcagaagcaagag

SEQ ID NO: 381965 - DNA, 90 bp, Homo sapiens
agcccttgggccgcgtctcctttgagccacttccggctcctgcgtcgctccggaagcctgcgagttccggaagccttggtaatccagatt

SEQ ID NO: 381966 - DNA, 88 bp, Homo sapiens
ggtccttcacccgccggctccaggacggaaccactgcactccaggttccttgctgggtgctgagcgtggcctgagggacaggccctgg

SEQ ID NO: 381967 - DNA, 50 bp, Homo sapiens
gcgacctcaggaaggagatgaggttcaaaccttgtactactcagctgatc

SEQ ID NO: 381968 - DNA, 101 bp, Homo sapiens
cgaccgggcgctccgcttcctggagaaggcacagcggctgtatccgacgccgcgagttcgcgcccaagctgacgcctcaggagaagctgaaactgaggatg

SEQ ID NO: 381969 - DNA, 75 bp, Homo sapiens
gcacgcggcgatatggaagaggagggcaagaagggcaagaaggagctcgaggccatgagcagatataccagccca

SEQ ID NO: 381970 - DNA, 75 bp, Homo sapiens
agcaagaaagaccatcaagtttaccagtgggcagtgtcaaaccgggaaatgcttatagctcaaaacagctccttg

SEQ ID NO: 381971 - DNA, 82 bp, Homo sapiens
cagtgtttgcctctggttcagctcatacaacagcttcttagacagagattactgcagtttatgtgacaagcagccaatcggg

SEQ ID NO: 381972 - DNA, 100 bp, Homo sapiens
acagagaacatggttcaaaaacaagtgcaaaggccctttatggtgccctacgagacgctgaacaaacgctttcgcgccgctcagaagaacattgaccggg

SEQ ID NO: 381973 - DNA, 98 bp, Homo sapiens
ttgctgaagttgcgtgtggtgatgatcgaaaacgactcccaaattcgtcagagcacagcttatagcttacatcagcctcagggaaacaaggaacatgg

SEQ ID NO: 381974 - DNA, 74 bp, Homo sapiens
aggatgccctgaaaagacaccaggaaaatgtccacactgatgtgaagttcatttccaatccgccctccatggtg

SEQ ID NO: 381975 - DNA, 83 bp, Homo sapiens
gtcaaccatctcacacctttccaaaggacgcgaccataactctaaaagcaaattgtggctactaatttgccccctgaagatca

SEQ ID NO: 381976 - DNA, 97 bp, Homo sapiens
attctcttcactcgagagatgaggacactgaaattcagagaggggaagtgatttgcctcagcttgtactatcagcttgaacgggtctttttacgact

SEQ ID NO: 381977 - DNA, 74 bp, Homo sapiens
gcacctttcggcttctgagacggcggcagcagcggcattcagacatcaacgagtgtgcaacaccgtcgaaagtg

SEQ ID NO: 381978 - DNA, 75 bp, Homo sapiens
gcgccacctggagagaggccgcgtcctgggcagagagccctatgagtttgtctctctggaatggctgcaaaagtg

SEQ ID NO: 381979 - DNA, 74 bp, Homo sapiens
agaattacatttgcttgaaactcctcttgtagttaagattcgggaactggagcctctcctctgtcacagtgaca

SEQ ID NO: 381980 - DNA, 101 bp, Homo sapiens
gaaaaagcactgtgatgactcattcaccccccaggagaagctgtggcagcagctcagaagaggacggaggatgcagcattcaaggttctatcttggaagca

SEQ ID NO: 381981 - DNA, 100 bp, Homo sapiens
aaaattggagcatgtcgtcatggagacaggtgctctcggttgcacaataaaccgacgtttagccagaataatccagaatggctactctgatctatgttga

SEQ ID NO: 381982 - DNA, 99 bp, Homo sapiens
cagtgacgggtctggagtgcgtgggggaccggctgttggcggggtttccaggcctgaggtgcccgccctggccccaggagaatgaaccagccgcagagg

SEQ ID NO: 381983 - DNA, 75 bp, Homo sapiens
ggtttcccgggagatcccaggcggtgacagagtggagccatggctagaggtacaatgccagggagtactacgacc

SEQ ID NO: 381984 - DNA, 100 bp, Homo sapiens
atgcctatgccttcgaagagacgttctgtccttgtgcattcgtctgtggaaacctacacccctccagggctttttggtggtgctggagttggcaagactg

SEQ ID NO: 381985 - DNA, 100 bp, Homo sapiens
cttggacgggacagggtcgggggacacgcaggatgagccccgcgaccactggcacattcttgctgacagaacacgacttaatgctctccgagaggtacaa

SEQ ID NO: 381986 - DNA, 90 bp, Homo sapiens
agctctggaaggacctaaaggcaaccctgggccccaaggtcctcctgggagaccaggacacaactcagatgggaagttcatcgcccgggc

SEQ ID NO: 381987 - DNA, 100 bp, Homo sapiens
atgaagttgtcaaaatcaccgtggctccgtaagaatagatcttgatgacaagctacttatgaggcctgggtccagtaccatcctttcaactcgaaattgg

SEQ ID NO: 381988 - DNA, 90 bp, Homo sapiens
tggtttcaagggacgtaccaggaggatggtgcccagtaacgaatccagaaaactctggagagcccttcagagcatacacaccacgtctac

SEQ ID NO: 381989 - DNA, 100 bp, Homo sapiens
ggaattggaggagcttctggaaaattgtcactgctgttccaagggcacacgcagagggatttggaattcctggagagttgcctttgtgagaagctggaaa

SEQ ID NO: 381990 - DNA, 99 bp, Homo sapiens
gtgcctttatctgatgatgatgaaagttacacagcacaagtggaagtgctgtccgctgcactacgtgcttccagcctggatgcacatgaagagaccatc

SEQ ID NO: 381991 - DNA, 75 bp, Homo sapiens
cccccagctacatccgaggaggttctaggacctgctacgagggggggccctcagcctcttggccttgaacgggct

SEQ ID NO: 381992 - DNA, 126 bp, Homo sapiens
ggagcttcttctccggagtgcgccggcggtggcgcctgcggacctaactagctccagcccgcagggccccggaccccggcttccaggagcgcttcttccagcagcgtctggaccacttcaacttcg

SEQ ID NO: 381993 - DNA, 97 bp, Homo sapiens
agaggttagacttgtttcttatatgtgatgccattccagcactggactcatggaggctgagcatttattcagtgaaagagtttctagccaaagccaa

SEQ ID NO: 381994 - DNA, 82 bp, Homo sapiens
tgccgtctgctcttctgcctcttgatctccgccaccgtcttcaggccaggacggcatcagaattaatgtaactacactgaaa

SEQ ID NO: 381995 - DNA, 83 bp, Homo sapiens
ccggcctgggtgcttaccagctgtatcaggatccaaggaacgtttggggtttcctagacacgatgaggcgagtggtacgacag

SEQ ID NO: 381996 - DNA, 90 bp, Homo sapiens
tccggagcaagcgggcgagggcagcgccctaagcaggaaggaaaatcacctcggcagtgtttgaaggaaggatactgcaactctttgaag

SEQ ID NO: 381997 - DNA, 75 bp, Homo sapiens
cttgtgcgggagcccggagtcctcggaataacacttggacagagcgggatgccaccagcttgtccaaagggaagt

SEQ ID NO: 381998 - DNA, 75 bp, Homo sapiens
tacaaaggaactgtccacactgctgaaaaatctgagtgcttgtgatttcacgtatttttgctgaactcgtaaaag

SEQ ID NO: 381999 - DNA, 98 bp, Homo sapiens
gagtccctccggaactcacactccagtacgagtacagcttccgcacagagcagagcgcagccgccaggctcccgcccagccccaccaggtgtcagcag

SEQ ID NO: 382000 - DNA, 97 bp, Homo sapiens
cagcattgcagattccagtccagatcacccatgtttcacatcaggtccacccatctggccgggcagtaccttcttcaagagaaatggagcccttctc

SEQ ID NO: 382001 - DNA, 100 bp, Homo sapiens
ggtgtactctttttatgaaaaggccataggaaaaggatacagagtagagtttcatgaacctgaaacttggtggaaatttgatcctgaagaattagaaaag

SEQ ID NO: 382002 - DNA, 75 bp, Homo sapiens
gaaagctattttgcgaactatcttctccagcggagatggccaatgtggtgatctttgtgaagtctgtgcagcggt

SEQ ID NO: 382003 - DNA, 100 bp, Homo sapiens
ggatcttaccagtgcgttccctgcacagaaggattccgaggctggaatggacagtgccttgtgtggcccagagttgctcagaattggagcagagcctgag

SEQ ID NO: 382004 - DNA, 75 bp, Homo sapiens
aggtctggagctcgaccgggccaggcatcctgctatttgaaacaaggaaagttcaagcaagcagaaacactgtac

SEQ ID NO: 382005 - DNA, 95 bp, Homo sapiens
gctgggcctgcaggtctctgtcgagcagcggacgccggtctctgttccgcaggatgagtaagttgtttaagaaaggcctgaatatatcagaacat

SEQ ID NO: 382006 - DNA, 50 bp, Homo sapiens
gcggtggccgctagctccaaggaaggcatagaatgtcaagctaaccaggc

SEQ ID NO: 382007 - DNA, 50 bp, Homo sapiens
acgtacccgccgccgccgttggctggagttggatatgtcaagtgaccaga

SEQ ID NO: 382008 - DNA, 82 bp, Homo sapiens
gcggccgccgcgcttctgctctcagtgtcccggacttcaggtactccaaagattcaggtttactcacgtcatccagcagaga

SEQ ID NO: 382009 - DNA, 50 bp, Homo sapiens
ggccagcatcctcctgctgcagttgcctttccccatcttcctggttctgc

SEQ ID NO: 382010 - DNA, 96 bp, Homo sapiens
ccccaccccacaggatctgccccagagaaagtcctcgctcgtcaccagcaagcttgcgggtggttcagcactgagtcatgcttgcttctgctacgc

SEQ ID NO: 382011 - DNA, 74 bp, Homo sapiens
ggtcccttgtggggactggaaagaggacgaggttccggttctgtggtgatctggactgtcccgactgggtcctg

SEQ ID NO: 382012 - DNA, 80 bp, Homo sapiens
accgtctgaactaggatgtcccgacatgaaggttttgaaagagggaaggaagatatttctcaaaataaagatgaatcttc

SEQ ID NO: 382013 - DNA, 83 bp, Homo sapiens
tgtccccctcctggcagcccagacgtttattcagaggttttaaaatcaaagatgggaaaatcggagaaaattgcccttcccca

SEQ ID NO: 382014 - DNA, 82 bp, Homo sapiens
ggatgtgcggggtgcgccggcagaggatccagtgttcaccatcctggccccggaagataacgaaggaggcccaacttcattc

SEQ ID NO: 382015 - DNA, 100 bp, Homo sapiens
ctggactctgctcagagagatttgtatagagatgtgatgttggagaactatagcaacttggtatcactagtcctggaatcaagatgtgagaccaagaaat

SEQ ID NO: 382016 - DNA, 83 bp, Homo sapiens
ctccctttgttggagttttgcccacgcgttgtaattaagcctcgcacaatatgtatctggcaccaattctgacccagtcattt

SEQ ID NO: 382017 - DNA, 100 bp, Homo sapiens
tttcttatgctgggatgtgccttagaggattatgggtttggtgcacctcgatttggaggaagtagggcagggcccttatctggaaagaagtttggaaacc

SEQ ID NO: 382018 - DNA, 75 bp, Homo sapiens
ggcagctaagaatagactgcatatatattgggattttaaaccggtgcctgattattacaaaataattaaaaatcc

SEQ ID NO: 382019 - DNA, 88 bp, Homo sapiens
gactcagaatcgaatctcttctccctccccttcttgtgacctgaaaaaaatgtctggatttctagagggcttgagatgctcagaatgc

SEQ ID NO: 382020 - DNA, 75 bp, Homo sapiens
cagggtccctgaagagggaagacacgcggaaacagaaatgcgtgtactgccggaagcggatgaagaaggtgtcag

SEQ ID NO: 382021 - DNA, 75 bp, Homo sapiens
tcatatccttttcagactacattttcctcacaactgttctttccagtgagactgctgctcctcgggccattttga

SEQ ID NO: 382022 - DNA, 100 bp, Homo sapiens
gccaaaaggaaatgcatctttatgtcagaaacacaaagcagcccaaccaaaggataaataggatttaccaatccttggatgaagtgcttgggaagtcttt

SEQ ID NO: 382023 - DNA, 75 bp, Homo sapiens
aggtcacttcaacctcttgttggaagattattcaaaagctctggatgagggggatattgccttgttgaaaactta

SEQ ID NO: 382024 - DNA, 75 bp, Homo sapiens
ccaaggaagaatttcctctgaagcaccggggatcctcttggtgtatgacatcaccaaccgctggtcctttgacgg

SEQ ID NO: 382025 - DNA, 83 bp, Homo sapiens
cttggccactgatcccccgaagagcttctgtcgccgctctagggtttgcagtcctgggaagacattgataaactaaattcatt

SEQ ID NO: 382026 - DNA, 51 bp, Homo sapiens
ggtcagagatacttcttaaaaggcggccttagcaacatgctgttccagtgc

SEQ ID NO: 382027 - DNA, 75 bp, Homo sapiens
tcccgcttgggaagaatagaggcagtcacgccgatgatggagctgaagcccaacgcaggtagcgaccgtgcctgg

SEQ ID NO: 382028 - DNA, 98 bp, Homo sapiens
gtctgaaatacaaggaacggttgagttttcggtagagctacataaattttataatgtggatctctttcagagaggtctgttcccagtattctagagga

SEQ ID NO: 382029 - DNA, 100 bp, Homo sapiens
ggccacagcggcgcctcctgccctttagccgccgctggcccaacggtttccccagcagtagcctctgcgaccaggatgatgatgctgaagctatccttgc

SEQ ID NO: 382030 - DNA, 100 bp, Homo sapiens
cgacgtcgtgatccagaagtccagagctgaggactgcctgtttgcagatccctgcatgtcactgagtccaccatgctttacagaagaagacagatttagt

SEQ ID NO: 382031 - DNA, 51 bp, Homo sapiens
cagatggtaaatctggcatggattctcagaggattaaacagcaagcaacat

SEQ ID NO: 382032 - DNA, 50 bp, Homo sapiens
taacaccagacctctgtcatatacagcggttgtggaacaggaaatgaaaa

SEQ ID NO: 382033 - DNA, 88 bp, Homo sapiens
gcggcgcagaaaggtggaggccgggaggacgaaggccctgtttgtgctcttcgtcctggcctacatccacatcgtcttctcccgctcg

SEQ ID NO: 382034 - DNA, 108 bp, Homo sapiens
gcaaagccttcttcaagaggaccatccagggtgggagatgccatcccagcagtggaggtgtttgaaggggagccagggaacaaggtgaacctggcagagctgttcaag

SEQ ID NO: 382035 - DNA, 82 bp, Homo sapiens
ctctacctcctgcgaggcctcccgggctccgggaaaactacactggccaggtaagtaaggaggtctctgtaccatggctcgt

SEQ ID NO: 382036 - DNA, 101 bp, Homo sapiens
gacgcaggagaagcgcttcaaggacccgggactagtggaccagctggtgaaggcagacagcgagtggcgacgatgtcgccttcgtcagacgtcagaatgat

SEQ ID NO: 382037 - DNA, 73 bp, Homo sapiens
ttggatgtagcaaggaagaaattgttcagttcttctcagctcccattgctatcacatgttttaccagaggctt

SEQ ID NO: 382038 - DNA, 75 bp, Homo sapiens
ttctgctgaccgcgggccctgccctgggctggaacgaccctgaaacctctgtagaggagcaggatgcaaccgaca

SEQ ID NO: 382039 - DNA, 50 bp, Homo sapiens
agggcctgggagcttgctgcagcttcagggtaagcaggaagagaacgacg

SEQ ID NO: 382040 - DNA, 75 bp, Homo sapiens
gccggacgcacctctgtttgggggtcctcagtcttaggaaaagtcctcagtgctgtgggcagtgcccagctactg

SEQ ID NO: 382041 - DNA, 75 bp, Homo sapiens
ggcattgcatccacaggaggggcaggaaattctttgaaggtagttacttttggtgacgctgtccagttcccacaa

SEQ ID NO: 382042 - DNA, 100 bp, Homo sapiens
ggctctggaattgctactgctgcctctgtcactcctggtgaccagcattcaagagaaaatattctctttggaatgggaaatcctctgcttgacatctctg

SEQ ID NO: 382043 - DNA, 75 bp, Homo sapiens
gcggaggagcccgaccgacccgaataccctctaccatctgctttggtcagggtgccgctcgaggatttaaaagca

SEQ ID NO: 382044 - DNA, 78 bp, Homo sapiens
gaactggcccggaaacaggaggacatgtccagctcgccgctgtccaagaaacgtcgcgtgtccgggcctgatccaaag

SEQ ID NO: 382045 - DNA, 73 bp, Homo sapiens
ccatgctgccttcagcttcctttgccgctctgcatcatgttggttgcaagaaagctcaagtagcctatggaga

SEQ ID NO: 382046 - DNA, 75 bp, Homo sapiens
aggtacgccgaggaggttgggatcttcttcactgcctctggcatggatgaggggcgacgtcgtaaaccaggacga

SEQ ID NO: 382047 - DNA, 75 bp, Homo sapiens
cggggccgctgctcaagttccagatttgaagtccattggaatattaagcccaggagttgctttggggatggctgg

SEQ ID NO: 382048 - DNA, 59 bp, Homo sapiens
caggatggcttggccttgcacataaggaagatgacatttggaagagtcagtgacttggg

SEQ ID NO: 382049 - DNA, 75 bp, Homo sapiens
gccagggaaccctggtcaccgtctcctcaggcttggtccagcatagtttatcagctgattcccaatgttcagcag

SEQ ID NO: 382050 - DNA, 82 bp, Homo sapiens
tcgtgatgttgacaaccttttcttcctgcaggcaacctacagctggagtcgagagtctggggcaatggggcaggaaaagtgt

SEQ ID NO: 382051 - DNA, 101 bp, Homo sapiens
agacgcggagccatggccgaggtgttgcggacgctggccggtggtatcacggcaacctcacacgccatgctgctgaagctcttctcctctcaaatggatgt

SEQ ID NO: 382052 - DNA, 100 bp, Homo sapiens
agtagaagatcctcataaagccaagattgtttgatggtgggtctccacacttgtggtgatctggctccaaatactttgcgaatatttacctccaactctg

SEQ ID NO: 382053 - DNA, 100 bp, Homo sapiens
cagaaggaagcacaaaaagggacagtcgaagcctaaagaaactgttccaactcttgctccaaaaactctttcagtagcagcagcttttaatgaagatgaa

SEQ ID NO: 382054 - DNA, 80 bp, Homo sapiens
tggctaggcaaataagctttaagcaagtacagatgaagctcaggttccccaaggaaatattgaccaggttgctgttgtgg

SEQ ID NO: 382055 - DNA, 75 bp, Homo sapiens
gctgctgcctctgctgtacctcctggtccggaagcacatcaacagagcgaaaaggggccttgctgttcaacaaca

SEQ ID NO: 382056 - DNA, 99 bp, Homo sapiens
agatgatccaagtcaccaagaaattactgtctcaagtgatacgatggaatcagtgtgagtggctttcccctgtccagtccttttcggcaggtcgttcgg

SEQ ID NO: 382057 - DNA, 100 bp, Homo sapiens
ccctgcccctgccgaggcaggcgcccaccgccggcggtgatgcggctgtgaagccctagtcggaaatcatcgagttccccatcctaaagctaaatggccg

SEQ ID NO: 382058 - DNA, 100 bp, Homo sapiens
ggagcactcggtcatgtacccggtggactcggtgaagagagaggatgcaagccatggagaaacagattgccagtttaactggccttgttcagtctgcgct

SEQ ID NO: 382059 - DNA, 75 bp, Homo sapiens
aaaaaagaaaaagacaaggatagtaagcttgaaaaagccctaaagtcgtctgtctgtgaaatatggacgaatcag

SEQ ID NO: 382060 - DNA, 96 bp, Homo sapiens
aagctggcggagcaggaggatgggcgtgagaaagatcagtctaaagaaaaggagaagaaagtgaaaaaaacaattccttcctgggctaccctttct

SEQ ID NO: 382061 - DNA, 90 bp, Homo sapiens
gtcgggaacctgatgtcctcatcttgggtgccagccgggccgccgatgacgccgagcgggagcgcagggaccgagaggagcggctgagac

SEQ ID NO: 382062 - DNA, 100 bp, Homo sapiens
atagctcaggctgctgctgagaatgtgtttttcgttgctcacagctatggaggacttgcttttgttgaactgttatttcttccactgacatcttgaaccc

SEQ ID NO: 382063 - DNA, 100 bp, Homo sapiens
aggctggaaaggtcatctcggagactagaggctggataccaaatagcagtggaaaccgacaagttggatggcttgaggactggtactaaaaggaaacgtg

SEQ ID NO: 382064 - DNA, 80 bp, Homo sapiens
caggaactctacaacccaatccaggcagcggaggaggagaaagagatggacctcccggactcggcctcgagggtcttctg

SEQ ID NO: 382065 - DNA, 82 bp, Homo sapiens
gaagatcaagactagtgtgagcaacaaaggtcctgagaacattatctgtagctgtatctccccatgtggaagttggatagcc

SEQ ID NO: 382066 - DNA, 90 bp, Homo sapiens
gccatcgccccagacatggggaacgcggcgaccgccaagaaaggcagcgaggtggagagcggatttttagactctgaggagcagttggag

SEQ ID NO: 382067 - DNA, 100 bp, Homo sapiens
gttgaaagcgacaagtggaggcgccgctctagcggccgggactctgaactatggcgctagtggcggttggcaggaacctgaaaatcctcacacacaacgg

SEQ ID NO: 382068 - DNA, 75 bp, Homo sapiens
aagcctggaggctccgacttcctcatgaagagactccagaaagggaaaaggcgacggcggattgacagaagtatg

SEQ ID NO: 382069 - DNA, 50 bp, Homo sapiens
gtcagcttggcatcgcggctgtgtgtgacttctttaagcggacccgctat

SEQ ID NO: 382070 - DNA, 96 bp, Homo sapiens
aaaatcgtctgtctcctgttttctaggtggaaagaatctgatgagccttttaggcctgttcagatttcttcgcaagactatggaaaggaagtggac

SEQ ID NO: 382071 - DNA, 100 bp, Homo sapiens
tgcaggtgaggggcgcgcgcctgcccagctttgcagcccccgaacgcggcctcgcacaggcccctagcagtcttcttgatgctttggaacaacatttagc

SEQ ID NO: 382072 - DNA, 98 bp, Homo sapiens
acagatcgctaaggagagtcaagatctcaaagaagagttggtggctgctgtagaggatgtgcgcaaacaagggtagtcagcagagtgcacacagcagc

SEQ ID NO: 382073 - DNA, 97 bp, Homo sapiens
aaaccacaaatgtttttctgttttgcctgaatacatgatttaaacaagagatttccacagaagatgccgacatcagtggctcagacagttgtccaga

SEQ ID NO: 382074 - DNA, 100 bp, Homo sapiens
tcatttccatttctaccttgtatgcctcaatttgctggatttaagcactgctgcactttatgaggagcagatgtctcaagtattagatgccatgtttgaa

SEQ ID NO: 382075 - DNA, 90 bp, Homo sapiens
caggcctgacagctctgcggctcgggccctgaggtccttttggaataaatcatgggattgagcttcattcagatgtggtggaatatgcca

SEQ ID NO: 382076 - DNA, 75 bp, Homo sapiens
gcggcgctggagagggggcgctgagctgttggggtctgggagtgtggcaaataactggattgaaatttataattt

SEQ ID NO: 382077 - DNA, 83 bp, Homo sapiens
aaaagttcagtgggaagcatgtcgtctttatcgctcaggttttgggatttgagattgacgcggtgaactctgtccagttttca

SEQ ID NO: 382078 - DNA, 82 bp, Homo sapiens
gccggttcttggtgggatctgagcaggacatggatttgattgacatactttggaggcaagatatagatcttggagtaagtcg

SEQ ID NO: 382079 - DNA, 100 bp, Homo sapiens
gtgctctccgcggtgctttccggcatggggaccgcctacccacagtgtaaactggagttgctggtgggcagccctgcttcctgcatggaactggagctgt

SEQ ID NO: 382080 - DNA, 75 bp, Homo sapiens
ctaccccatgccatcaacctgcgtgaggtcaacctgcgcccccagatgtcccagacttcccaagtaagaagcgga

SEQ ID NO: 382081 - DNA, 101 bp, Homo sapiens
caagtacttggcagatcactctcttagcagaaaccaactttgatccagcagaatgggggagtaaggtagaagaccgcttctataacaatcatgcattcgag

SEQ ID NO: 382082 - DNA, 50 bp, Homo sapiens
acagcaccggcaagaccaccttcatcagattgacgtgagtgaattcagat

SEQ ID NO: 382083 - DNA, 100 bp, Homo sapiens
cgagcactgggtgaaggacctgggcagcctcaatgggatggtttgtgcttgtcggaatcagaaacagtcaacaaagagcgagcgaacagttacaaaaatc

SEQ ID NO: 382084 - DNA, 100 bp, Homo sapiens
ggagtgtcgattccattgatgcatgaagcaatgcagaagtggtattacaaagatcctcagggagaaattcaagattattaagtgactctccatcttgtag

SEQ ID NO: 382085 - DNA, 51 bp, Homo sapiens
cttcgcccaggtggccggcgcttcagcctctggttgaacggtttgagacat

SEQ ID NO: 382086 - DNA, 120 bp, Homo sapiens
tcctttcccactcctaatgaaccgccagcgtgtgcccaaagttttggtggaaaatgcaagaaagattcgaagaatctcggggatcagtggcacaagggaatccccatcgaggtcatccca

SEQ ID NO: 382087 - DNA, 100 bp, Homo sapiens
ggtgtcatcgacaaggatgcgctggggcctatgatgcttgagctctggatggacaaggaaaaagaggaaagcatgaaagaaaccctgcggataagaaggt

SEQ ID NO: 382088 - DNA, 90 bp, Homo sapiens
gcagtttgcattgcagtcaacagtcgaagaaggtgtgtgcagtggcctcagggatccggaaagtctaggactgaacttctcctaacatcc

SEQ ID NO: 382089 - DNA, 100 bp, Homo sapiens
tgacttggaagcaatgtttgaacaaactcgaagaacagctgtggaaagaagttgcaaaacactgggagaagacagactgctgctttggacctgttggtaa

SEQ ID NO: 382090 - DNA, 111 bp, Homo sapiens
gcgggcagaggtgatgtctgggagcccttccttgacagcccgggccgagaagatgtccagctcgccgctgtccaagaaacgtcgcgtgtccgggcctgatccaaagccggg

SEQ ID NO: 382091 - DNA, 83 bp, Homo sapiens
caaatctttcgtcaaacacagtttcgaggagcggcattgcccccgaatgtccagattatccctgtttttgtgaccaaagagga

SEQ ID NO: 382092 - DNA, 82 bp, Homo sapiens
ggccgagcaggctgagcgatacgacggaacagattatcagtctggtcaatcagatctgcggcaaagtgtctggtaaaaacgg

SEQ ID NO: 382093 - DNA, 100 bp, Homo sapiens
ctagagtggctgtttatttcccaagagcagccaaaaatcaccaagtcctggtggtggacttgctttgtgaagagacagttcatgaacaagagtctttcag

SEQ ID NO: 382094 - DNA, 75 bp, Homo sapiens
ggagaaagaggagatgttgggattcgaggggacccgttctttattggtgaaaacatgaatccagatggcatggtt

SEQ ID NO: 382095 - DNA, 100 bp, Homo sapiens
caaaatcccaggctgtcggaagcaagttaattggccttggtcctcacagctccaaaaagaaacaggatctcgataagctctatgagctgaagtccaaagc

SEQ ID NO: 382096 - DNA, 100 bp, Homo sapiens
aaagccctcgtcagaaggaattatgggaaacgcagaggcagaaaccaggtaaatcgatttagtaaggtggaagacagagcaatttttgtcactgaccgtc

SEQ ID NO: 382097 - DNA, 82 bp, Homo sapiens
gaagcaccagtacagggataagagatgaagagacaggccaggtcaggctcaccaagcagtcgggaacatgccctgtgtgccg

SEQ ID NO: 382098 - DNA, 83 bp, Homo sapiens
tctggacatccaggaagaggagccgagcatctgggccgagaccattccgtatggagagccggatgccgctcctacgaggactg

SEQ ID NO: 382099 - DNA, 100 bp, Homo sapiens
agtttgctacggtctacggggcagagcagcgtacacagactttactaaaagagtacaaagaaagggataaatccaatgtattcagagataaacgcttcgg

SEQ ID NO: 382100 - DNA, 82 bp, Homo sapiens
gacagccccaggatgccgtgggccgcagccactcaggactgtcaaagcacatggattaattgatgtatgttgagtttatgga

SEQ ID NO: 382101 - DNA, 90 bp, Homo sapiens
agaacccccaggagcagaagtccttcttcgccaaatacgtttgcctgcaatgagatttcattctctacatttaaaggacatcctttctga

SEQ ID NO: 382102 - DNA, 100 bp, Homo sapiens
aaagaccctttgcacaaatcaagacactcctagaatatgcagagaaatggaaaacttcagaagatcctttacctttattggaggtatacacagtggctat

SEQ ID NO: 382103 - DNA, 100 bp, Homo sapiens
ctccgcattgcccttctgggtgggccagacttctgggagttcccgggcagacggcgtttcggtccggacctattcctgctagtgcaggcctccaggtgag

SEQ ID NO: 382104 - DNA, 50 bp, Homo sapiens
atctgaattgcctgcaaacccaggagagtagttatcttgatggaattaga

SEQ ID NO: 382105 - DNA, 83 bp, Homo sapiens
cgagcgcgagcggcgcgagaaacggaatcggacatgtccaaaccaccgtgttacgaagaggcggtgctgatggcagagccgcc

SEQ ID NO: 382106 - DNA, 100 bp, Homo sapiens
agctcaagctgctgctgctcgatatctaacagtgatacgccttcaccaccacctggtttgtcaaaatccaatccagtcatccccatcagttcatccaatc

SEQ ID NO: 382107 - DNA, 98 bp, Homo sapiens
tgttgaaaatgagcagctgtcctcatgtctctccagcagaatagcctaacatggcagaccagagacagcgctcactgtctacctctggggagtcattg

SEQ ID NO: 382108 - DNA, 58 bp, Homo sapiens
cgaagacgagggcctggaggaaacagggaaatgaggcaagttatcctttggaaatgtg

SEQ ID NO: 382109 - DNA, 74 bp, Homo sapiens
gtccgagtctccgccgctgcgggcccgctccgacgcggaagggtatttctcaagctgccagatacgtttaccaa

SEQ ID NO: 382110 - DNA, 119 bp, Homo sapiens
cgccagcccgggccctcggcagggaggatgacggagctgcagtcggcactgctactgcgaagacagctggcaggttgcacactgggccacagaggatccagcaaggatgaagaaatgga

SEQ ID NO: 382111 - DNA, 78 bp, Homo sapiens
agggtcctgggccgcgacctggttctcccggagtctacaattattcagagctgggagagcttcccccacgatctcctt

SEQ ID NO: 382112 - DNA, 94 bp, Homo sapiens
aggaagcagtttctgctggacacggctgatgtggcgctggctgagttaagtagcctgtcttctctgggagattctgcaccagagcgcaagtccc

SEQ ID NO: 382113 - DNA, 100 bp, Homo sapiens
ttttgaagattttctctttactaaaaggaaacctcgacctgtctcccagttggttgcacagcaggttactcagcagtttgtgcctcctacacagtcaaag

SEQ ID NO: 382114 - DNA, 75 bp, Homo sapiens
tgccccatctacacctgcctcagggaggaagatgatccctatgatcttgaagatgtttctgcacagaaatgaggg

SEQ ID NO: 382115 - DNA, 98 bp, Homo sapiens
gcaaagaggcggtgcagactgcggctaaggaactcctcaagttcgtgaaccggagtccctctcctttccatggagggaggaaacatgtcccggctgtc

SEQ ID NO: 382116 - DNA, 95 bp, Homo sapiens
acctccagataatctctctattcaagagtttcaaagaaatgaaaatattgatgtcgaggccctaaaggacagcaaggtggtggagatcgttgatg

SEQ ID NO: 382117 - DNA, 51 bp, Homo sapiens
aaggatgaaatcattaagaatgtggtttggacatatttgactcttttcccc

SEQ ID NO: 382118 - DNA, 83 bp, Homo sapiens
cgcacgggatccagagcgccgcgcacttcgtcatgttcttcgcgccctgggatgtttcagcagcccctgagaaggaagaggag

SEQ ID NO: 382119 - DNA, 96 bp, Homo sapiens
aagagctctttcaaggaatcagatgaaggtttaaggctcagaaaggtagcacattcggataaacctggatcaacctcaactgcatccttcagagat

SEQ ID NO: 382120 - DNA, 95 bp, Homo sapiens
gccgcagttgccggtacatcggggatttctggctctttcctcttcgccttaaattcggttgaaccatgattccggtgacagagctccgctacttt

SEQ ID NO: 382121 - DNA, 74 bp, Homo sapiens
cttactaaccacgaccatcaaatccgtgtcggagtccttacaggctgaagtttctctttggctcatcagccacc

SEQ ID NO: 382122 - DNA, 100 bp, Homo sapiens
cggtacgctctcagaaacgcacgcctttccccactgttacatcgtgcgccgtggaccaggagaaccaagatccaaggattgcagcgagaacattgggaga

SEQ ID NO: 382123 - DNA, 75 bp, Homo sapiens
tacaggctcagtctgcggccaagactccgtcctgcaaggactttccttatcccagttgattgtgcagaatacact

SEQ ID NO: 382124 - DNA, 83 bp, Homo sapiens
atttgatttccggagtcagtcattttactgtcaagacatttcttcggcattctgcaacagctgcagtacagcaatggcgatca

SEQ ID NO: 382125 - DNA, 75 bp, Homo sapiens
agccgaacagttttactgtggcgacactgaagggaaaaaggacagtcattttgtttactcattcagccctgttgc

SEQ ID NO: 382126 - DNA, 98 bp, Homo sapiens
ggccgcgggcgggtggaggcgcgtctccggcacgagtccggcagcgtcttctcttgagggagcaatttggagaagagctggaacccagactcgcgccc

SEQ ID NO: 382127 - DNA, 82 bp, Homo sapiens
cgacaagccgctggcagccgcggatctcaccgccgctcagggaatatatgcagaacatgtcctgcggcccaagaatcttgga

SEQ ID NO: 382128 - DNA, 89 bp, Homo sapiens
tccgacggggcggccgggggctcagagatccaagtgcgcgccctggcgggtccggaccaagaggatgttaagcaagtttttggacagac

SEQ ID NO: 382129 - DNA, 101 bp, Homo sapiens
gtggacgccgccgaagaagcatcgttaaagtctctcttcaccctgccgtcatgtctaagtcagaggacctgagggcactcgctttgctcctgtcagtacac

SEQ ID NO: 382130 - DNA, 100 bp, Homo sapiens
acagagaggagccggggcctgaggaccaggaagtagagcagcaggtgcagaaagagctggaacaggattacttccttaggatagattgccagaagtggag

SEQ ID NO: 382131 - DNA, 74 bp, Homo sapiens
tctggaaacccttgcagagattgacttcagcttgatcagttactggcagtcgcagactttggaccccgggatga

SEQ ID NO: 382132 - DNA, 75 bp, Homo sapiens
gaattcctggggcgcaccgccaagagctgggatgagcaatgtgaagagactacggccacggctcagtgctattct

SEQ ID NO: 382133 - DNA, 78 bp, Homo sapiens
ggccacactgcaggacattgggaagctcctgggctataacgaaaagccaataaatctacaaatgtttattgggacagc

SEQ ID NO: 382134 - DNA, 96 bp, Homo sapiens
gatcgagaggatctggtgtaccaggcgaagctggccgagcaggctgagcgatacgacgctggagatggagctgaagatgctgaagtctcagtccag

SEQ ID NO: 382135 - DNA, 100 bp, Homo sapiens
tggttgccggggcaggggcggaggcggaggcagaggtggaggcgctttgaaagtgcctatgattacacaataccacctatggagaaagctgttgtgaaaa

SEQ ID NO: 382136 - DNA, 100 bp, Homo sapiens
cggacaccggatggccactcatcagaaggactgctcgctgccatatgctacggaatccaaagaatgcaggcgaacctcttcccggccgctctggtgcact

SEQ ID NO: 382137 - DNA, 90 bp, Homo sapiens
gcgggaggcgcggcgagggcgccagacatttcggtggccggtggccagcagcatcgacagaaatgagatgctggagattcaggttttcaa

SEQ ID NO: 382138 - DNA, 100 bp, Homo sapiens
ggaaaggagagtggatgggactcagcaagtgcagccgcggagccctgtacacaggcttttccatcctggtgactctgctcctcgctggccaggccaccac

SEQ ID NO: 382139 - DNA, 100 bp, Homo sapiens
cagcaggtcaaccccgaggagatccagctgggcgaggacgaggacgaggacgagatggacctggagcccaacgagcacgtgcccccggagctgtgggagc

SEQ ID NO: 382140 - DNA, 75 bp, Homo sapiens
ctgtggacatgtggagtgttggctgtatctttgcagagatgtttcgtcgaaagttaacctcaccctacagatgaa

SEQ ID NO: 382141 - DNA, 74 bp, Homo sapiens
tgctgccctcaaggtcgtgcgtctgaagcctacaagaaagagaaaggagttcatgaaggcagaaatgcctgggg

SEQ ID NO: 382142 - DNA, 90 bp, Homo sapiens
gctttttcctcttggatgagatctcattggccgatgactctgtcttggaaagactcaacaggcagttatacttaagcatgaacattgacg

SEQ ID NO: 382143 - DNA, 96 bp, Homo sapiens
gccggtgcgccgcggcccgcggcttctgaatgcttatgatgaacatcaaacactcctgaaagaacaggattctttaaaaaggaaagcagaaaatgg

SEQ ID NO: 382144 - DNA, 100 bp, Homo sapiens
tttggaaaaatatttgtacgcattcatgtccatgtgtcggagggtttgtcgtcttccttccaaagaaggaaaattgcctaagaattatgacccaaaagtt

SEQ ID NO: 382145 - DNA, 75 bp, Homo sapiens
gtctgcgttgctcttgcttttcctcgctggggtgtacggtctaccctgaactgcagatcaccaatgtggtagaag

SEQ ID NO: 382146 - DNA, 97 bp, Homo sapiens
gggcgagggtcttcagctgatgaatctcatgctcaggacaatacatggcttgatatacaacgccctgaagctcttcatggagatgaaccaaaagcta

SEQ ID NO: 382147 - DNA, 85 bp, Homo sapiens
catggttatcaactcagtggcctttgaccatgcaaagaatggtttattattgccagttttggcctcctcagtgccctcacactct

SEQ ID NO: 382148 - DNA, 95 bp, Homo sapiens
atggcacctatggacaagtctataagtttaaggaagaaatctctaaacgttttaaatcacatactgaccaacttgtgttgatatttgctggaaaa

SEQ ID NO: 382149 - DNA, 100 bp, Homo sapiens
atgcctgaaccctgcacagagggctttatacagggccgtgatgttggagaactacaggaacctggagtctgtggaaactgttcaggttccattatcaaaa

SEQ ID NO: 382150 - DNA, 75 bp, Homo sapiens
tctatagtcattcaggatggaggattcttacagaagcagagattgatgctcaccttgttgctctagcagagagag

SEQ ID NO: 382151 - DNA, 51 bp, Homo sapiens
gagcggctgacagaggggatgcgaggtgttgacttcaaaatcaaaactgta

SEQ ID NO: 382152 - DNA, 98 bp, Homo sapiens
ataactgctgcagagggtaaacttcacaacatgatagttgatctggataatgtggtcaaaaagggtataatagactacattttctattctaaacctca

SEQ ID NO: 382153 - DNA, 98 bp, Homo sapiens
gataatataatcaactcctctgcctggaacagatggagtcggataactgttcaggaggagatgatgactggacccatctgtcttcaaaagaagtggac

SEQ ID NO: 382154 - DNA, 75 bp, Homo sapiens
ggatcctagtaatctctttgtggtttcttctgatttctgccattggggtgatgctactaggaggtggagcctttg

SEQ ID NO: 382155 - DNA, 76 bp, Homo sapiens
gagcgcccatatgggggttctggagagcggggtgtggggtgagcacctgcggatctgtccccagggctacacctgc

SEQ ID NO: 382156 - DNA, 88 bp, Homo sapiens
ggttcatttaaccccaaaatcagtgattctacatctcaagctcatattttgaagtgtttacggcctcctgacaaggtgatccgggcgg

SEQ ID NO: 382157 - DNA, 100 bp, Homo sapiens
ttcagctgatgcatttgcacctgtggcttatctacgctttttagaattgcacttggaggacaaggttaatttggagtggcccctggagtcagtttcctac

SEQ ID NO: 382158 - DNA, 83 bp, Homo sapiens
gccagcagcactgtggaggccgtcctcgaacatccagtcatggataaaaatgagctggttcagaaggccaaactggccgagca

SEQ ID NO: 382159 - DNA, 100 bp, Homo sapiens
tacaggctcagtctgcggccaagactccatcctgcaagacagcttatctcctgtgctgcacccttctgatttgatcctgactcgaggaaccttggatgaa

SEQ ID NO: 382160 - DNA, 98 bp, Homo sapiens
aaacagagtccgatgaaaggaatgggtctgggaccttaacagggagccatgccaacagagacatggcatccatcgtgtctgagatcatgatgtatgtg

SEQ ID NO: 382161 - DNA, 90 bp, Homo sapiens
caaggagagctgcacctgggccctggcgtggggtagagcagcggctgccatgctcttctgtggcttcatcatcctggtgatctgtttcat

SEQ ID NO: 382162 - DNA, 82 bp, Homo sapiens
gagggccaccaggccgccgggggcctgctgcgcccgggagccgaggaggtgctgctgctggcccggcggacggacctacgga

SEQ ID NO: 382163 - DNA, 90 bp, Homo sapiens
attctgtgaagaaggcagtacattttgggttaccgccaagggaagagatggtgttgagtggaaaatacaaatctggggaacaaattcttc

SEQ ID NO: 382164 - DNA, 100 bp, Homo sapiens
gatgatccaagtcaccaagaaattactgtctcaagtgatacgctttgtttttgggaggctgaggaaggaggatcatttgagcctgggaggttaaggctgc

SEQ ID NO: 382165 - DNA, 82 bp, Homo sapiens
gtgcagctcaacttctaccagttcctcggggtgcagcagggtgtaccccagttgtcagtctgcttgtcagaagaaccggaag

SEQ ID NO: 382166 - DNA, 75 bp, Homo sapiens
acagtcgcgaggttcgagtgttgcagagcctgcggggcaagatctgtctttactcacctggagacctgtggccca

SEQ ID NO: 382167 - DNA, 95 bp, Homo sapiens
ttctaagttcctggacattgatccggaggaggattcgcagttcaacatcaagaaagggctattgcaagacacgaagtccgagaaattgagcagcg

SEQ ID NO: 382168 - DNA, 96 bp, Homo sapiens
gcgtcaagtacactgaaattcatcctgagatgaggggtcaggagagtgctggtattgtgactagtgatgggagttcggtgccaacattcaaatcac

SEQ ID NO: 382169 - DNA, 88 bp, Homo sapiens
gggttcctggtcatacaccagtactaccaaggacagcttttttcctgcaaggttgtttacattcagagctctatcaataagaggaata

SEQ ID NO: 382170 - DNA, 75 bp, Homo sapiens
agagaagctttactggtgttccagccctaaggtcacggtctagatcacattctcgatccagaggaaggcgatact

SEQ ID NO: 382171 - DNA, 102 bp, Homo sapiens
agagaccgaggacttgacagagaatgggcaagacctcaggaggaccctgactcatatcaaggaccagaaaggagatgccaagattcgcatttttgacctggg

SEQ ID NO: 382172 - DNA, 78 bp, Homo sapiens
acctggataaccttttgctaacaaaaacagaaataggaaggttgttgattactcacagtttcaggaatctgatgatgc

SEQ ID NO: 382173 - DNA, 75 bp, Homo sapiens
cctacggagcacgagaaatacggcgtgggtgtatgcaacagcgttattgcaacaggctaacgaaaacagacaaaa

SEQ ID NO: 382174 - DNA, 75 bp, Homo sapiens
gcactgagcaccgccaccatggggaaggggtcgtgagatggagaataaagaaactctcaaagggttgcacaagat

SEQ ID NO: 382175 - DNA, 99 bp, Homo sapiens
aggaccctgtgcgctggccctcaaccatcagtccctgctttaaggactgcctccgggcctgccaggagcagatcgaagccctgctggagtcaagcctgc

SEQ ID NO: 382176 - DNA, 75 bp, Homo sapiens
caaagatcgggataaatatgtaagtggagaattcagatacacctatgaagattataagaacactgcagaatggct

SEQ ID NO: 382177 - DNA, 104 bp, Homo sapiens
tgtttctctgctgcaccgacctcgacgtcttgcctgtgtcccacttgttcgcggcctataggagcccagcagccggggccgccctattacaccgacccaggagg

SEQ ID NO: 382178 - DNA, 83 bp, Homo sapiens
gatctggtgtaccaggcgaagctggccgagcaggctgagcgatacgacggcttttgatattatgagagtgacacatggcagag

SEQ ID NO: 382179 - DNA, 90 bp, Homo sapiens
gaaattggaggaggtgcagaaggtggacagggtaaaagaaagagacttttttctaaagaatccaagtatcttcaagaccttctcatggag

SEQ ID NO: 382180 - DNA, 100 bp, Homo sapiens
ccaccccggacatgctcagggctgcggccgcccgaagaggagagagcgcgggcctctaggaaggtggagccgccaccaaaatgcagattttcgtgaaaac

SEQ ID NO: 382181 - DNA, 88 bp, Homo sapiens
tgcagcgatatgcagtttggtttggaggatcaatgctggcttccacgggaaaatgggaagtccctctgcctaaagtacgtgcccaggg

SEQ ID NO: 382182 - DNA, 88 bp, Homo sapiens
tgaggcttaattaactcatgtctctctctcttttctttcagtctgcaactgtgtctgatggcggagaagtacagcatcggggagccca

SEQ ID NO: 382183 - DNA, 83 bp, Homo sapiens
cagcgagcggccctgatgcaggccatcaagtgtgtggtggtgggagacggtggccacagatgtctttaattccaaaaacctgg

SEQ ID NO: 382184 - DNA, 124 bp, Homo sapiens
cttgaaaagactgggcttgtccttgctggtgcatgcgtcgtcggcctctgggcagcaggtttttcacgactgaaaacaacatagcaaaataagccaagatgtctgtggatccaatgacctacga

SEQ ID NO: 382185 - DNA, 100 bp, Homo sapiens
agtcttcatttggaaccctgaggaagcaggaggtggatttgcagcagctcatcagagactctgccgagagaattaaatatgggtgatgttgagaaaggca

SEQ ID NO: 382186 - DNA, 51 bp, Homo sapiens
ggggacgaagccaagttcattcccaggtatgcaaccactcatgtattcggt

SEQ ID NO: 382187 - DNA, 76 bp, Homo sapiens
cctgtaacccagcctgtttcacttcttgacccaacatgagtgaagtttcctgcaagaaacgggacgactatttgga

SEQ ID NO: 382188 - DNA, 75 bp, Homo sapiens
taaatgggaaggacaggcagagctaaacaagctacaaaagaccccacagctgtagagagagcaaacttgttaaac

SEQ ID NO: 382189 - DNA, 75 bp, Homo sapiens
acgatggatgatggaaacataagagtgacttagtagaagaatattttgaagctcacagcagttcaaaagttttaa

SEQ ID NO: 382190 - DNA, 100 bp, Homo sapiens
ctaaagtctgagagagggaagtcgcctctgtgctcaaatggtggagtcaatgaagaaagtagcagggatggatgtggagctgacagttgaagaaagaaac

SEQ ID NO: 382191 - DNA, 73 bp, Homo sapiens
caagactggggctgctcccatcattgatgtggtgcgatcggatcatcatgcctagggttcataacataaaaaa

SEQ ID NO: 382192 - DNA, 90 bp, Homo sapiens
cttccacagatgtacctgaaaagtcgtcactctttcaccaagagacgagttgtactgctgtcacaggaaatggacgctggattacaagca

SEQ ID NO: 382193 - DNA, 75 bp, Homo sapiens
ttgatcctgattctacccaagtacatatgatttcagctgcaatggcaggaaactttgagggaaattttgagtcac

SEQ ID NO: 382194 - DNA, 75 bp, Homo sapiens
gctctgcgcggctttttgagcggtcccgcatcaaggctctggcagatgagaccctttttgctcttcctgctgcat

SEQ ID NO: 382195 - DNA, 75 bp, Homo sapiens
gcgtagcttccatccgccagctgccatgagcgagcgcctccgtcccaggtcaaaatgcagatcttcgtgaaaacc

SEQ ID NO: 382196 - DNA, 98 bp, Homo sapiens
atgcctgaagtgtagactgctgctagctgaataccatctgggagcataaaggtgacctgaagggatgaggagaatttctgtgccactgtgcccaagga

SEQ ID NO: 382197 - DNA, 98 bp, Homo sapiens
cctcccgagtagctgggaccacaggatccaccttgatgttcagtgaagagtaccagaaaagtctgctagagcagtaccatctgggtctcaatcaaaaa

SEQ ID NO: 382198 - DNA, 122 bp, Homo sapiens
cccagcatctgaccctaaaccaaacttcacagactgtaataggcatacacaagtgtgcattaatggggatgcaatgcagtatgcttctgaatctaaagatactgaattggctgaagaactcc

SEQ ID NO: 382199 - DNA, 96 bp, Homo sapiens
ctttgaatcagagtgtacgcctcaaagtcagttttcaattcatgcatcttcaaatgtcaacaagcaaggaatcaagtactggaaatgtttgatcat

SEQ ID NO: 382200 - DNA, 100 bp, Homo sapiens
agagacctcatttaaggagattagtgcgagggtcagtctgtgaacctatgagaaccccaaagacattaaagattgctgaaatacaggcaagacggattgc

SEQ ID NO: 382201 - DNA, 121 bp, Homo sapiens
atagcagaagaataccatgaggtcaaaaaggaaatcaccctgcttgagcaaaggaagtttttcgttggaatatacgttgcacatttatggcgattctgagtgtgagggcagacttctgcca

SEQ ID NO: 382202 - DNA, 74 bp, Homo sapiens
tcgcttcagtcagtcgggccgcgccgcgcctcagctctgtctatgcagatggtagtatatgtctggacatactt

SEQ ID NO: 382203 - DNA, 82 bp, Homo sapiens
tcctcttcgtgaatatattaacttcaaaattcagccactgagatatcaccttccaggacagaactgtaccgctctctttttg

SEQ ID NO: 382204 - DNA, 75 bp, Homo sapiens
gacctgtctcgccgagcgcacgccttgccgccgccccgcagcatatgggtgattttggaagcattcatagacccg

SEQ ID NO: 382205 - DNA, 97 bp, Homo sapiens
gccgcggggccaggaagtcggagtttgagccccggaggcagagcggctgccatggatgaagccccacccgcccttcaggatgccagccttggcaaca

SEQ ID NO: 382206 - DNA, 75 bp, Homo sapiens
cccgccagcatgccccagtccaaaggcagaaaatctatttcaggaacttcaggaacattttcaagctctgacggc

SEQ ID NO: 382207 - DNA, 100 bp, Homo sapiens
actcaactgtgtggtgggatcccagggccttattccactgctggggattgatgtgtgggagcacgcttactaccttcagtataaaaatgtcaggcctgat

SEQ ID NO: 382208 - DNA, 90 bp, Homo sapiens
caacaatattagagtaattggaggaaattgagaggctgactgagcgactagaagaaaaagagagggagatgcagcagctgctgagccagc

SEQ ID NO: 382209 - DNA, 97 bp, Homo sapiens
gtgctaccgccacatgctggacttgcagaagcagctgggcagatttcccggccgtgaattgggttcttcagtttgattgtcctgaggatgccaacac

SEQ ID NO: 382210 - DNA, 50 bp, Homo sapiens
ggctgtggcgcggcggccgcgagattgcaaatagaagagtcttccaaacc

SEQ ID NO: 382211 - DNA, 100 bp, Homo sapiens
ctcttcggctgccccaatccccggcagctctctcagaaataagcgggttttgaaaacaaaaaaaagaaggagtggaagagggggccaggatccaggcctc

SEQ ID NO: 382212 - DNA, 100 bp, Homo sapiens
tctcagggcaacccagatctggatgaattgtaaaagcaacatcagcttgaccagtataaaattacagtggattgctcatctcagtcctcaaagctttttg

SEQ ID NO: 382213 - DNA, 75 bp, Homo sapiens
atctcagcctcccaaggagctgggacctcagctgactccactggaacccattctctgtacacaacatacaaagat

SEQ ID NO: 382214 - DNA, 140 bp, Homo sapiens
ggacggcagggctccctctggatgtggaattctccgtccctttccagggagggaacaaagcccacagcaccggcatcagtgtcattcaaggacgtgactatagaattcacccaggaggagtggcagcaaatggcccctgt

SEQ ID NO: 382215 - DNA, 85 bp, Homo sapiens
ctcattcaagaattcgtcatcacgcatcacaggccgcgtctttgacggtgtgcaactgaggaacatggctcaagaaactaatcac

SEQ ID NO: 382216 - DNA, 82 bp, Homo sapiens
gacagctgggaattgctgaattagaactgcagaggttcctctacagcaaggacataagcagctctatgaccaatagcacagc

SEQ ID NO: 382217 - DNA, 83 bp, Homo sapiens
gcgggcggccgggagccatggagcgcggccctggggcccgggggcgcgggccggggtgacaccatccggaagatgaagaacga

SEQ ID NO: 382218 - DNA, 83 bp, Homo sapiens
catcttcatcatgcacatcttcaagcatgctcaggtattagaaaactactcggatgctccaatgacaccaaaacagattctgc

SEQ ID NO: 382219 - DNA, 82 bp, Homo sapiens
cccgactgcagctccgtggatttcagtgtcttttctgcctgctcagttccagttgtcacgcacagtttgaacttcgggcatt

SEQ ID NO: 382220 - DNA, 100 bp, Homo sapiens
agtgccgtgcgccgcagcccgggcccaggccccggcagcgcctgggacaaggcaaaggaaggatgaactggagcagaggatgtcggccctgcaggagagc

SEQ ID NO: 382221 - DNA, 90 bp, Homo sapiens
tttcagtgaatgaaatgactcttagcactttgaaagaaaaaggctacaaagctgctttcattggaatagtgattccagcagtctcagcag

SEQ ID NO: 382222 - DNA, 98 bp, Homo sapiens
gagtacatctccattgccctgcgcatcgatgaggatgagaaagaaatggtggagtcaatgaagaaagtagcagggatggatgtggagctgacagttga

SEQ ID NO: 382223 - DNA, 100 bp, Homo sapiens
tgaatcgctttcagagtggagatttccatgttattaatggagtcctccgtacagcacattcattatttaaaagctggagtcttttgtgcaattgtttctc

SEQ ID NO: 382224 - DNA, 83 bp, Homo sapiens
tggccatccacctgtgcctcttcaccatgttcggaatgctgctgttcgctggtgggaaggcctccggtgtggctgtctctgat

SEQ ID NO: 382225 - DNA, 101 bp, Homo sapiens
ggggattgtgggagtctccgcgtcccgctcgctgggagagagagtgaagacatttccacctggacacctgaccatgtgcctgccctgagcagcgaggccca

SEQ ID NO: 382226 - DNA, 100 bp, Homo sapiens
catgccctgaaaaagtatcgtcgagaagcctatcatcgcacttttccagccattaactccaggctctcgagaatttgaagatgttgtaaatattctccat

SEQ ID NO: 382227 - DNA, 100 bp, Homo sapiens
gcctagagtcctggggagcttctgtccacctgtcctgcagaggagtcgtttccagcccggctggcgttggagaccagggccagccctggccacaccccag

SEQ ID NO: 382228 - DNA, 88 bp, Homo sapiens
ccaaaaatgcacaattctatctcttgggcaatcttcacggggctggctgctctgtgtctcttccaagccaagagtttactcaacaaga

SEQ ID NO: 382229 - DNA, 82 bp, Homo sapiens
tgcgggactctgaggaaaagctcgcaccagatataattggtgattacaactttcctctataaattaactcttgacactcctt

SEQ ID NO: 382230 - DNA, 75 bp, Homo sapiens
tgccctgagacggtgtcccgccgaaagattgaccaggatgttgtcattactaactcttatgaaacagctatgcga

SEQ ID NO: 382231 - DNA, 100 bp, Homo sapiens
ctccttgccaggccttcaaccactatctcagtgcaatggacattccacttcttccatctattacatctctgagtctaaatgaaaatgaagagaagaccgg

SEQ ID NO: 382232 - DNA, 50 bp, Homo sapiens
aaccttgcttctaggagataaaaagtgggtgcctgatagacatcctagga

SEQ ID NO: 382233 - DNA, 82 bp, Homo sapiens
ctgctaacagaactggaccttttcgggttggggtctgctaggtccccggaatgagttgtttgacgcagccaaataccgagtg

SEQ ID NO: 382234 - DNA, 100 bp, Homo sapiens
ggcaggagcgcttccgcaccatcacctccacggaatgcagctggaagatctcaaacagcagctccagcaggccgaggaggccctggtggccaaacaggag

SEQ ID NO: 382235 - DNA, 75 bp, Homo sapiens
gttgggaatcaggtctggaatactcctaaccaagaagttgcccaggccgtgcctggctgtacctggccctcaacg

SEQ ID NO: 382236 - DNA, 100 bp, Homo sapiens
ccgcaaacagggcaacccgcagcacttgtcccagagggagctcatcaccctgtctcaatgagatcttggagtcagcagatgcacccttagaagtcactga

SEQ ID NO: 382237 - DNA, 104 bp, Homo sapiens
tgctctctttacacttacccacagggaacttggcagaaggtgatacaggtggttcagtcagatccagacatttaatgtggatgcaccatgccagaccgtggaag

SEQ ID NO: 382238 - DNA, 114 bp, Homo sapiens
gccgggatttgggtcgcagttcttgtttgtggatcgctgtgatcgtcacttgttacagaatgtctgaaggggacagtgtgggagaatccgtccatgggaaaccttcggtggtgt

SEQ ID NO: 382239 - DNA, 49 bp, Homo sapiens
atggctcttccagcatctcacagtgttcaaatctcgaacgccgccagag

SEQ ID NO: 382240 - DNA, 50 bp, Homo sapiens
tgcagccgcacctggccaaggtccaaacccctgatacctcttcaaaaaga

SEQ ID NO: 382241 - DNA, 98 bp, Homo sapiens
gagagtcccgtattctcagagtaaaagttgtttctggaattgatctcgccaaaaaggacatctttggagccaggaaggtgctcgggtcttcggggcac

SEQ ID NO: 382242 - DNA, 51 bp, Homo sapiens
gggaagtgaagtcagtgcctcagttgctgtattggtaaaggttttcaaggt

SEQ ID NO: 382243 - DNA, 75 bp, Homo sapiens
tggtgtctgcaacggagaggactgaatggtatcctgctttggtgtttggagaagagggattgaccctgaatcttg

SEQ ID NO: 382244 - DNA, 83 bp, Homo sapiens
ctgaaattggcagatacccatttaagaattaaacaaccaccatgtcgagcaaaaaggcaaagaccaagaccaccaagaagcgc

SEQ ID NO: 382245 - DNA, 95 bp, Homo sapiens
aatgcagtgcgcatggacgaggctcgggataacgcctgcaacgacatggattgagaggatccagaatccagatctctggaatagctaccaggcaa

SEQ ID NO: 382246 - DNA, 100 bp, Homo sapiens
ttttcctgtcgtacgtgggacaggccacgctgtccgtccgcagtaccgacgcctgcagatgccgacaaaaggatcaaggtggcgaagcccgtggtggaga

SEQ ID NO: 382247 - DNA, 87 bp, Homo sapiens
gttcagtcagattggaccctgtaaaagctgtaaaatgataacagaggtctccagtccccagatttctgtgcatcctctctcatgcaa

SEQ ID NO: 382248 - DNA, 74 bp, Homo sapiens
gggatgcaccagaagagccagagacagccgctcaggaagcaatcttgcatgcgtctggaaatggcacaaccaag

SEQ ID NO: 382249 - DNA, 83 bp, Homo sapiens
agtttgatgtccagaggaagtacttcaaggaagctcttgataggtcagctccatcttcaccagaaatttcacctcagtcatcc

SEQ ID NO: 382250 - DNA, 100 bp, Homo sapiens
cagcgccgccgtcgccaccgccaccgccaccgccactaccaccgtctgagtctgcagtcccgagagagtttgaggagacaatggatgcactccaggctga

SEQ ID NO: 382251 - DNA, 83 bp, Homo sapiens
gcgacccggtgtgtggcgcgcccagagccccgcgtttcagccctagggaaggtgcgcgcggagccatggttatcatgtcggag

SEQ ID NO: 382252 - DNA, 82 bp, Homo sapiens
gaaagcttgcagcatctggatcaattacaatgcagaacattggaggtgattacatggatccaacacctgatccccaagattg

SEQ ID NO: 382253 - DNA, 100 bp, Homo sapiens
caaacattattgctatgggatttcctgcagaaagacttgaaggcgtatacaggaacaatattgatgatgtagtaagggctggtgaattaccatatctccg

SEQ ID NO: 382254 - DNA, 90 bp, Homo sapiens
ctcagcggtgttggaacttcgttgcttgcttgcctgtgcgcgcgtgcgcggacatggcctcaaacggccccacggaggagtcacccccca

SEQ ID NO: 382255 - DNA, 74 bp, Homo sapiens
caagggaaggaaatgtgcccaacatcatcattgcgggcatagtcagtgtcccagcaccatgtcagtatgctcac

SEQ ID NO: 382256 - DNA, 98 bp, Homo sapiens
gagtacgagaagcacagtccctaatttctgctgctatagaaccaggtttaagaattgtttaagctgcatcaatggagcacatacagggagcttggaag

SEQ ID NO: 382257 - DNA, 75 bp, Homo sapiens
catcagggaggctttcagccggagaagcgagtttcagctgaggctttctcagaaatggcaagttatcaaccaaag

SEQ ID NO: 382258 - DNA, 127 bp, Homo sapiens
gaaaagatgaaaatagagctgaaaaagactcatgctgctgagacagagatgacactggaaaagcggaatggccaaagactatgacgggtcttcctagcacatcagggacaactgccagtgtggtcat

SEQ ID NO: 382259 - DNA, 100 bp, Homo sapiens
ctacatggcccagctcaaatgctactactttgattacaaggtcctggatatgcccacccaagaactgggcctccccgcctaccgcaagtttgacattgag

SEQ ID NO: 382260 - DNA, 100 bp, Homo sapiens
caagaagggcgcgtgctacggggacgacgcgtgcttcgtggcccggcaccgttccgcggacgtgctcggtaccacaagagccaggccatctatctggagt

SEQ ID NO: 382261 - DNA, 50 bp, Homo sapiens
cacgctcccagatcctcatccagaatggctgccgagtccggatccctgcc

SEQ ID NO: 382262 - DNA, 100 bp, Homo sapiens
caactatggaacaacaacttgcagctcatctctattgatgtacaaggcgagtggataattccaacacaagactggcagtccaaattgaaagagatccagg

SEQ ID NO: 382263 - DNA, 90 bp, Homo sapiens
ggaaatattaggaagctgtgattttcaaagctaattatgaaaacatttatcattggaatcagtggatggtggttgctatttcaggcccag

SEQ ID NO: 382264 - DNA, 87 bp, Homo sapiens
gcgagatgtcgaagccgccacccaaaccagtcaaaccagctccctcgtgaaagatgcttctgttcctctgattgatgttacaaacct

SEQ ID NO: 382265 - DNA, 90 bp, Homo sapiens
ctgctggaaggagactggatgatagaattggaagtaagcaatggcatagaaaaaaaaggaaagaaaaaatctgtaggtcgtccacctggc

SEQ ID NO: 382266 - DNA, 100 bp, Homo sapiens
cttcattctccaattactttaagatgttgtttgtccatcagaccagacgcaaacatgcagatctttgtgaagaccctcactggcaaaaccatcacccttg

SEQ ID NO: 382267 - DNA, 50 bp, Homo sapiens
ccattttcttatggagaactgtccttgttttaagtgggcagaccaacatc

SEQ ID NO: 382268 - DNA, 73 bp, Homo sapiens
ttcctgctgccctcaaggtcgtgcgtctgaagcctacaagaaagatccagcacacggaagacatggagaacga

SEQ ID NO: 382269 - DNA, 90 bp, Homo sapiens
aagaaagacttgatggtctggtagaaacaccaacaggatacattgaaaggcatcgttggcttcacagtatgactgatgatcctccaacaa

SEQ ID NO: 382270 - DNA, 100 bp, Homo sapiens
atattccgtgaatcatttgctgatgtacttcctgaagcagctgctctagtgaagtcaacactggacgtatgagggtgagcagatctcaaggcctcccgac

SEQ ID NO: 382271 - DNA, 75 bp, Homo sapiens
aaagcgagaccgcgtgcgaggaccgataaagccaccaatccttccaaccgccaggaggactgggaatacataatt

SEQ ID NO: 382272 - DNA, 101 bp, Homo sapiens
tcccgggtgcagactctgcgtgtccccccgtggcgcacaagcatgtaggtgccagaactcaccgccagagcctggtggagattctggacgcaaagacaagg

SEQ ID NO: 382273 - DNA, 82 bp, Homo sapiens
ggagctcccccaagagccggaaagatcaccgaagtggccttggagtacaacaactgtcatggggaccaggtggtggagcgtc

SEQ ID NO: 382274 - DNA, 49 bp, Homo sapiens
cgaaggtgcacactatcccatgggacggccctcgggaccaaggatcacg

SEQ ID NO: 382275 - DNA, 51 bp, Homo sapiens
cgggaagcgtcgggattaggtgaaagtcagtttaggggctggtgcaaagga

SEQ ID NO: 382276 - DNA, 101 bp, Homo sapiens
ctgatcatcttggcatccctcttggccttggctttgattcttgcagtttgcattgcagtcaacagtcgaagaaggtggataggcatgtagacctgctagaa

SEQ ID NO: 382277 - DNA, 100 bp, Homo sapiens
ctgggccgaccccagagcggcgctggacagaggacggagaggctgtgagcagctcctacgagtcctacgatgaagaggacggcagcaagggcaagtcggc

SEQ ID NO: 382278 - DNA, 101 bp, Homo sapiens
gcgaagcctgcgcctccaccctcaccaccacctacagcagcggcgtggccaccgacccccagatcatgacagatttgaagatctggaagaggcaaatccat

SEQ ID NO: 382279 - DNA, 74 bp, Homo sapiens
gacgacgacgatggggatatcggtagagcgggaaaaggccattcttttggccaacctacaggagtcacagacac

SEQ ID NO: 382280 - DNA, 83 bp, Homo sapiens
ctgaagacgtctgcgtgagaatagagaccaccgaggactccatccccgtgtctacctccctccttggagacacttccgacacg

SEQ ID NO: 382281 - DNA, 75 bp, Homo sapiens
gtcacctttgtggatggccggtctctacctgcaggttatgatgtgattgctcaagcccaatctgggactgggaaa

SEQ ID NO: 382282 - DNA, 100 bp, Homo sapiens
ctccagtcggtgttgagcacggcgagcagtctcaggcctttagtgatgatgaggagaggagacgccgtgagcgggacgaccagatgtaccgagagcggct

SEQ ID NO: 382283 - DNA, 100 bp, Homo sapiens
cccatgcgggaccagatcatccgcgtgaagcgttctttaaggaaaaacagtagtgctctgcatagtttactgaaacgagtggtcagcacatttagtaagg

SEQ ID NO: 382284 - DNA, 100 bp, Homo sapiens
tggttacctatgtacctgttaccactttcaaaagctcccagccaacctctgataaaccctcccagcggccatcagagagcacaaattgtagccctacccg

SEQ ID NO: 382285 - DNA, 76 bp, Homo sapiens
gagcagtctcaggcctttagtgatgatgcctcctgctcttcatggatgaagcagacgccttccttcggaagcgagc

SEQ ID NO: 382286 - DNA, 100 bp, Homo sapiens
ccaagtctcctcaggagccgccggcaagggggcaacgaggaagctcttaagagcgcggccggaaagcaggattggccatttgatgatggagctccacccc

SEQ ID NO: 382287 - DNA, 100 bp, Homo sapiens
cccagattccaaaacttatgtcaactcctttagcggcagagttttccgagtgaccttcttgatgctggctgtttctctcaccgttcccctgcttggagcc

SEQ ID NO: 382288 - DNA, 75 bp, Homo sapiens
gcccagcgcgcccgtggccgctgccgcctccgccccaggtatgacctggacgcgtgtgacattcaagaaaaatac

SEQ ID NO: 382289 - DNA, 100 bp, Homo sapiens
ctgcagattggggtgatgcccatgctcaatgggcggcgactggcggcgcgatggacctgaccgggctcctgctggacgaagaaggcaccttctccctcgc

SEQ ID NO: 382290 - DNA, 101 bp, Homo sapiens
atagacagagagatgctcaacttgtacattgaaaatgagggttatgatcatagctactacttcattgcaacctttattactgaccacatcagacatcatgc

SEQ ID NO: 382291 - DNA, 75 bp, Homo sapiens
cctggagcggcgcagccggagtggggccgtgaggtgccttatgcccgctcagaggcccacctcacagagctgctg

SEQ ID NO: 382292 - DNA, 75 bp, Homo sapiens
agcacatccatttcattggcaaggcaccaccaggaccagctgatcattccagcccacagcaatggagccacatga

SEQ ID NO: 382293 - DNA, 50 bp, Homo sapiens
cgtccagccagtcctcaacccagaacctgcacttgttgccaagtcttcca

SEQ ID NO: 382294 - DNA, 101 bp, Homo sapiens
acatggactgcccagtgcccacacctggctttggcaatgtggaagagattcctgagaatgacagaatcagcatgattcttcagaggctcttcaggttctcc

SEQ ID NO: 382295 - DNA, 96 bp, Homo sapiens
aagatgtggcagaagaacaagaagttgagaccgagaatgtggaaacagttcctgctcattttccacaaggccgcggcaggggagctgcaggaggac

SEQ ID NO: 382296 - DNA, 98 bp, Homo sapiens
atcaacacagatattgatgtacttcctgtcaacttcgcacttctccagttagttggagcccagaaggcagagtgcttattcactttggaagcgcactc

SEQ ID NO: 382297 - DNA, 58 bp, Homo sapiens
gttggtggaggaggtggcaggcctcggcgcagagagtgaggaagaagatgaaatggaa

SEQ ID NO: 382298 - DNA, 83 bp, Homo sapiens
gtggttgtgtggtcgcgtctcggaaaccggtagcgcttgcagcatgtaacctttggaaacatcagaagctactctccattgac

SEQ ID NO: 382299 - DNA, 75 bp, Homo sapiens
ctcatctggaattttgccgatttcatgactaaccagtatgccttcaattaagttgcagagttctgatggagagat

SEQ ID NO: 382300 - DNA, 82 bp, Homo sapiens
ctcagttggaagcagccgatccagcctgcggagcctgtggggcagtgttcaaagcttctttcagacaccagtgttattcagt

SEQ ID NO: 382301 - DNA, 100 bp, Homo sapiens
cagaacagatagctgaagaaggtgacgataatttggctagggccctcctcgccaaagacagcctagagaggacggcaatgaagaagataaagaaaatcaa

SEQ ID NO: 382302 - DNA, 82 bp, Homo sapiens
ctcaagcctggagactcgcaacaagatcccctatgagagtcccatcttcagcagaggtgctggagaatctggtaaaagcacc

SEQ ID NO: 382303 - DNA, 75 bp, Homo sapiens
ccaagggacaatggtcaccgtctcttcaggttatgatgtgattgctcaagcccaatctgggactgggaaaacggc

SEQ ID NO: 382304 - DNA, 82 bp, Homo sapiens
cactagtcgcgggagccacgcagaggacgccggaacaccctggaagccgagaaatgaagctggattatatcacatacctgtc

SEQ ID NO: 382305 - DNA, 100 bp, Homo sapiens
gcggttggaggcttcgcccggctttgcagcggggacttcggcggcggcgcctcaggcacctcggcccgggtgtggaaacaggaagagaactagaactgga

SEQ ID NO: 382306 - DNA, 75 bp, Homo sapiens
gactttttatcaaaaactatgtacttggaggatcgaacagttttatgacttacctagtggagcctttatttacag

SEQ ID NO: 382307 - DNA, 75 bp, Homo sapiens
gtcgaagtggttctggaaactttggtggtgatcgtggcagaggtggccctggtggcatgcggggaggaagaggtg

SEQ ID NO: 382308 - DNA, 100 bp, Homo sapiens
actagctcatctgtagagactgatttgcaacccttccgggaagccatagctctgcatggttaccatggcctctactgtgaggaggaatataatgagtgcc

SEQ ID NO: 382309 - DNA, 82 bp, Homo sapiens
ggaacttgcagaaatcacattggaccctcctcccaactgtaggtattatagctgcaaatgtccttgtattctgtttatggag

SEQ ID NO: 382310 - DNA, 75 bp, Homo sapiens
aactatcttggtgaagcagtgagtcgaaatgcgtctctggaagtggcatgattgccccctgtgggtcactttctc

SEQ ID NO: 382311 - DNA, 108 bp, Homo sapiens
gaaacaccctgatatcagtggattatgaaatttttgggaaggtgcaaggggtgtttttccgtaagcatactcaggattttctgccgtctcttggcaaaaatggcaaat

SEQ ID NO: 382312 - DNA, 101 bp, Homo sapiens
cacaaagtcaagagacagcgattggacagaatttgtgaagggccgttgctccagggagaactgcaaatatcttcatccacccccacatttaaaaacgcagt

SEQ ID NO: 382313 - DNA, 80 bp, Homo sapiens
cccaccgctgccctcagctccgagtccagggcgaggtacctgcacatgttgttctttgtcagtgctgtcaagtgtgtgcc

SEQ ID NO: 382314 - DNA, 97 bp, Homo sapiens
agcaatgaggaaggcgcttccgcggcgactggtgggcttggcgtccctccgggctgataggatttttgggccttggtctcatgggaagtggaatcgt

SEQ ID NO: 382315 - DNA, 74 bp, Homo sapiens
tccataccaaggagacgctgacacttgtgtttgaatatgtggtcagaagagatcaattctacagaaatttccag

SEQ ID NO: 382316 - DNA, 128 bp, Homo sapiens
caacgtgttggaccttccggagcttctcagaagacagagggttttcttttgagacttatgaaaatatgcatcagtttaatactgtcttggaattcatgagatggaagcataggtcaaagctgtttgga

SEQ ID NO: 382317 - DNA, 99 bp, Homo sapiens
tccgtgctcaactccgccgagggcggcctgctgggctcctgcgcgccctggctcctggctcctttagcggcagagttttccgagtgaccttcttgatgc

SEQ ID NO: 382318 - DNA, 87 bp, Homo sapiens
ctcagagagggaagagattcagccagcacactcctcgcgagcaagcagaaaaatatggctcaggagactaaccagaccccggggccc

SEQ ID NO: 382319 - DNA, 100 bp, Homo sapiens
agcaacagcaagctcccgggcagatgcacaagtctggcgttctgaggaaggccattgattacatcaaatacttgcagcaggtcaatcataaactgcgcca

SEQ ID NO: 382320 - DNA, 91 bp, Homo sapiens
gagaaaacgaggacccaagaagcagaaggagaacaagccaggaaaaccccgaaaacgcaagaagcgtgctggagtgcagtggtgcaatctc

SEQ ID NO: 382321 - DNA, 74 bp, Homo sapiens
gcgggggatgtgagcgctgagcccttggcaggggttctgaaggaacattaaatgactgcaagataatatctgta

SEQ ID NO: 382322 - DNA, 75 bp, Homo sapiens
agaaaaggcctaagaattttggcattgatcagttggccttatttcctcagtggaaatctactcactatgatgtgg

SEQ ID NO: 382323 - DNA, 88 bp, Homo sapiens
tcaggcctgcacggacggtgttggttgggattttcatgttccagctgctccggggcctcgcctactgtcaccaccgcaagatcctgca

SEQ ID NO: 382324 - DNA, 75 bp, Homo sapiens
gcgctctcctggctcccttctgccccagctccgtctcggcggcggcggagctggggttctcttcttcctgacgac

SEQ ID NO: 382325 - DNA, 98 bp, Homo sapiens
tgggggctccttgccaccagtgctgtgtcttaagagctgccatcccggctggtttcatcaagaccaacttctcctgaaaaattttcagtgcctcatgt

SEQ ID NO: 382326 - DNA, 75 bp, Homo sapiens
gggatccttcacccgtgtctgatggtagtgaaaacctttatggatatggatcaggactcagaagatgaaaaacag

SEQ ID NO: 382327 - DNA, 82 bp, Homo sapiens
tctcagcaagcaactttgagctgcacgttgcacaaggtattccaaagttgattacgtctgatatggttaaagaaggtgctgc

SEQ ID NO: 382328 - DNA, 75 bp, Homo sapiens
ggatcgctgtgatcgtcacttgccgttgccgagagatggatgagcagattagactgatggaccagaacctgaagt

SEQ ID NO: 382329 - DNA, 83 bp, Homo sapiens
ggccagaacgacctgatgggcacggccgaggacttcgccgaccaggcgggcgctaatattgacacctgctcagaagaccagag

SEQ ID NO: 382330 - DNA, 82 bp, Homo sapiens
atttgaagtctgtgtcaaacatccatatcataagtggaattttggagatattcaaaggtcctcgaggccacacgggttaatc

SEQ ID NO: 382331 - DNA, 100 bp, Homo sapiens
tcagctggcatggtactggatatagtacagtggaagccccttcaaagccagccaggactagtgaaccacagctcaaaaggcaaaagaagacaaaagcccc

SEQ ID NO: 382332 - DNA, 90 bp, Homo sapiens
taaacaaccagctcctgagcctcccaaaccttacagggaacagagttcagaggcagcagaaactggagttagtgaaaatgaagagaaccc

SEQ ID NO: 382333 - DNA, 74 bp, Homo sapiens
agagagctgtgaaatatctttggcttgcagccaacaatgggactgaaggagcattaggttatgcgtattgggtc

SEQ ID NO: 382334 - DNA, 80 bp, Homo sapiens
aagtatccaggatgcagatcaagaggattacagtttaaagacaatttctgtgatcaagttgtcatttggaagattaaacc

SEQ ID NO: 382335 - DNA, 51 bp, Homo sapiens
ggaatccaccttcttacgctatggcagacctgttacatctgcgaggagcag

SEQ ID NO: 382336 - DNA, 100 bp, Homo sapiens
ctcctctacagcttcaacttgtccagcctttccacgagcacctttaagggtgattctgggggtccacttgtctgtaatggtgtgcttcaaggtatcacat

SEQ ID NO: 382337 - DNA, 75 bp, Homo sapiens
ttcttagttgatgatttagttgattctctgaaggaacagcatatgccatatatgagctggctgtggcttcatttc

SEQ ID NO: 382338 - DNA, 90 bp, Homo sapiens
atatgactttcatgaaatatgtggattccaatctctgttgcttcatcccaggaaaggtattggcatactccacacatctgtaccattctt

SEQ ID NO: 382339 - DNA, 75 bp, Homo sapiens
ccgtggcatgtcgatttgtccttcactacagctctgtgggcaccttcgcacgggccctggactgcagcagctccg

SEQ ID NO: 382340 - DNA, 75 bp, Homo sapiens
ccgagctggggttggacgctgccagtttgcacagcagcaggtgctgggcgtcctcttctttgccatagcctgctt

SEQ ID NO: 382341 - DNA, 89 bp, Homo sapiens
gcacgatgccctttgacttcaggaggtgctggagaatctggtaaaagcaccattgtgaagcagatgaggatcctgcatgttaatgggtt

SEQ ID NO: 382342 - DNA, 90 bp, Homo sapiens
ctgcccaaagaaggaaacaaagctctgctcacgtttcccttcctccatatttactggacagagtgctgttgtatgtggtagaagaccaaa

SEQ ID NO: 382343 - DNA, 98 bp, Homo sapiens
ccggcggtgtagacgccccttcgccgggacctggcacccgaatccggcctgccgggcgtgctggtcaccatgacaacagagacaggccccgactctga

SEQ ID NO: 382344 - DNA, 82 bp, Homo sapiens
atggggaagtgagtgcttggcaactgatgttccacttgacacactatgttttaggtagaagtagaaagaggaaagtgttaga

SEQ ID NO: 382345 - DNA, 50 bp, Homo sapiens
ccgcggagctggtttctgccgacaagaacaagatcactcaaggtgaagga

SEQ ID NO: 382346 - DNA, 60 bp, Homo sapiens
acgggatctcatagcagattcaaatccaatgtcattaacagctgaagagaagacgattac

SEQ ID NO: 382347 - DNA, 100 bp, Homo sapiens
tgggccgccgctgctacctgcagcgccgtgtggcacgacacaaaaatcaggatcccccagaagaggcagaactgctgctacagaacctgcaaagtagagg

SEQ ID NO: 382348 - DNA, 90 bp, Homo sapiens
cttacactccaagttcctgcatttttgcttcagagtaatccatatgtaaaggaaatctgaaatagagtactatgctatgttggctaaaac

SEQ ID NO: 382349 - DNA, 90 bp, Homo sapiens
aaatccaaggcgaggcagtgccacccacgatttgaaaaggcagttctttcagaacttggtgagaacttgcccattgaagatagagagacc

SEQ ID NO: 382350 - DNA, 100 bp, Homo sapiens
tcgaccccagccagcgcagcgacggggcgctgcctggcccaggcgcacacggaagtgcatgccagagagtattggtggatcttttggtatctttgatgag

SEQ ID NO: 382351 - DNA, 98 bp, Homo sapiens
ttgtacccattggcaagtgttcctgcaatgctggctatgaagaaagaggttttatgtgccaagaccaagcggagcagccagctggcagtagcgccctg

SEQ ID NO: 382352 - DNA, 90 bp, Homo sapiens
cgccagcaagaggatcgtcctgccggagcccagagatcctgaactttcaactgtttgccggaagtctggtacattaatattatatccagg

SEQ ID NO: 382353 - DNA, 117 bp, Homo sapiens
acagctcaaagactcaagccagacatcacggttttacccagtggtgaaagaaggacggacactggatgccaagacctgcgaccgcatcaagcagtccgccagcggaaccaagcggcg

SEQ ID NO: 382354 - DNA, 82 bp, Homo sapiens
gtccgtgtggccaacgagctcaacgccaggcgccgctcctttacagctggagaatgctggaggagaccttaaggatggccac

SEQ ID NO: 382355 - DNA, 129 bp, Homo sapiens
ccaccagcacccgccgggtcaccttcgaggcggacgagaatgagaacatcaccgtggtgaagggcatccggatgctattaactgagtacttggatatgaaaaatactcgtacggcctctgaaccatcag

SEQ ID NO: 382356 - DNA, 90 bp, Homo sapiens
tgtacagtttccacctgtctggatggacaggtcattggctctgccaagcttggcttgtggagatgttgaaggaaagtttgatattttatt

SEQ ID NO: 382357 - DNA, 98 bp, Homo sapiens
agaggtgcggtcagctcgctgcagcttcaacggagacttcgtgtgcggacagtgtgtgtgcagcgagggctggttgcccccaagtttcctggcagtgt

SEQ ID NO: 382358 - DNA, 90 bp, Homo sapiens
cgagaccaggatcgaggagctcagggccaaacctctaatggagttgattgagagggtggacccaagtggagagattgtggaactggcgaa

SEQ ID NO: 382359 - DNA, 75 bp, Homo sapiens
aagcgaaattggtcattctcgctaacaactgcccagctttgaggacgtagacaagtttggcaacgagatcaccca

SEQ ID NO: 382360 - DNA, 75 bp, Homo sapiens
gacgcctccattgtttgaccacaacaagggccggattctcacccaggataacgtcattagcagaatctcaacttc

SEQ ID NO: 382361 - DNA, 100 bp, Homo sapiens
tgctttttcttctcaccatttctggccaaaactacaaacaagacttcgcaggtgctggtgattgggtgtggcaactcagaactgagtgagcaactgtatg

SEQ ID NO: 382362 - DNA, 83 bp, Homo sapiens
aggcggccggcggcgaccacgaaaccgagagcaccagcgacaaaaacattctagtatgccagtagaaaaaaatatcactttag

SEQ ID NO: 382363 - DNA, 83 bp, Homo sapiens
agtgcagaagatctgggtgcccgtggaccacaggccctcgttgcccagatgtgtctcgtgcctctgctggaccctgactctgg

SEQ ID NO: 382364 - DNA, 74 bp, Homo sapiens
ggagcgcgagagcttcgagcggactcagattagaagcccaggacccaggaaggagacacaggaaatttattcaa

SEQ ID NO: 382365 - DNA, 50 bp, Homo sapiens
cagctgtcctaatcctcactgccgaaagtttggaaattttagcattcagg

SEQ ID NO: 382366 - DNA, 89 bp, Homo sapiens
aaattaaaaaggaagctattcaccattgaggtttattttcttgaaaaggctccaggcttcggcttggaaaatcccaccgccaaaattga

SEQ ID NO: 382367 - DNA, 90 bp, Homo sapiens
aagagtgtgtctgcgggagaaagaggagaatcgcccaagcggcctcggaagtcccagggagtggaggcaggaattgatggcgagaaggag

SEQ ID NO: 382368 - DNA, 75 bp, Homo sapiens
ctgaatcggatgatggcaactttcactgggcagtgaaaggtcagcttggttctacagccattgggatccagacat

SEQ ID NO: 382369 - DNA, 100 bp, Homo sapiens
ggaccatcccccaatcctctcatcttgtcctacctgaagtatgccattagttcccaggaagatgagaatgtgcctactgctcctgatcctccaagtcaac

SEQ ID NO: 382370 - DNA, 48 bp, Homo sapiens
ggagaatatatcctctaaatctgatgcaagacatctgtatagattctg

SEQ ID NO: 382371 - DNA, 100 bp, Homo sapiens
gtggagatcaacatcgaccacaagttccacaggcacctcattgggaagagcggtgccaacagtgtgcctgcacaggagacagcaccagccaagctgattg

SEQ ID NO: 382372 - DNA, 75 bp, Homo sapiens
gaaattccaagttcagattctccaggaacttgtaatagctggcatcgttgagaatgaatggaaaagaacgtgctc

SEQ ID NO: 382373 - DNA, 100 bp, Homo sapiens
ttctcttccttcgctaacgcctcccggctctcgtcagcctcccgccggccgtctccttaacaccgaacaccgggatggtttagacaacagtgtagcttca

SEQ ID NO: 382374 - DNA, 100 bp, Homo sapiens
ggaactggctgaactgggacccctgctagaagagaagggcaaacgggtaatcgccaacccacccaaagtcggtgagctggtaaaggttacgaagattaat

SEQ ID NO: 382375 - DNA, 82 bp, Homo sapiens
ggccctatcaggacatggagtatgaaagacggttttgggatttgagattgacgcggtgaactctgtccagttttcaaaccac

SEQ ID NO: 382376 - DNA, 100 bp, Homo sapiens
ggcgacttccgccacaccatgcacgttggccgggccggagacgcctttggggacacctccttcctcaatagcaaggcctgcctggcacttctcccgtgct

SEQ ID NO: 382377 - DNA, 100 bp, Homo sapiens
cccagcctggggactatgtgctggtgaaggatgagacttctgtgagcagcgaggattttgatatgagcgactccacatggatgtcagctgacccgcacct

SEQ ID NO: 382378 - DNA, 74 bp, Homo sapiens
catcgcaaccaccgccctggccatctaccatgtggggacggcaaaacagaacagaaaggcggagataaaaagag

SEQ ID NO: 382379 - DNA, 75 bp, Homo sapiens
caaaggctgtgaaatggcccgtcaggcacaccaaaaattggctgccatctcaggctggccctgaaggaccctgtt

SEQ ID NO: 382380 - DNA, 75 bp, Homo sapiens
acatgcgcttgggcctggccacagttatcaatactctggctgaccatcatcatcgtgggactgactttggtggaa

SEQ ID NO: 382381 - DNA, 98 bp, Homo sapiens
cccgcggcgtcgggtttgggctggaggtcgccatggggcgaggcagcggcaccttcgagcgtctcctaggtacaggtttgcagattccgccagcagca

SEQ ID NO: 382382 - DNA, 83 bp, Homo sapiens
gggatctgagcgagcgccggggccagcggagccggagccgccgggacatgggtctcctctgagcctccggcctccataagacc

SEQ ID NO: 382383 - DNA, 75 bp, Homo sapiens
acttcagatggtctgcatgctgagacatttctcttgggaagttgtgcatctgacaggaatatagtactgtacgat

SEQ ID NO: 382384 - DNA, 90 bp, Homo sapiens
ttaacacatcatgaaggctagtttggatgtggaggggaatagactccatctatccatatgagggatcatagacggtatttctatgtaaac

SEQ ID NO: 382385 - DNA, 101 bp, Homo sapiens
cttgtggagacaacgccttaacccaaggaagtgactcaaactgtgagaacttcaggctattgagggcacctacattgacaagaaatgccccttcactggta

SEQ ID NO: 382386 - DNA, 82 bp, Homo sapiens
gtggacagcctcatcacccggctgctggaggcggagctggagtttgttcagatcatcatcatcgtggtggtgatgatggtga

SEQ ID NO: 382387 - DNA, 51 bp, Homo sapiens
cacaaagacaccaaagtttctattaaagatatgggccctcacattttccaa

SEQ ID NO: 382388 - DNA, 75 bp, Homo sapiens
ttgcggttcagccctttgatgaccgcagcagaggagcccaaggtgggcatcaagaccatcaaggtgtactgccag

SEQ ID NO: 382389 - DNA, 73 bp, Homo sapiens
aaaactacaaatcccaggagcacttcacgctggagagacagccactctgcgctgcactgcgacctctctgatc

SEQ ID NO: 382390 - DNA, 83 bp, Homo sapiens
gtcggcgggagccagcgagccacgggagcgagccaggtcaaaatgcagatcttcgtgaaaacccttaccggcaagaccatcac

SEQ ID NO: 382391 - DNA, 83 bp, Homo sapiens
atggtgtgctttaagagccctgcagaaaaagaactggcatttgatccatatgaatcgtatgctcgagatattttgcgacctgg

SEQ ID NO: 382392 - DNA, 75 bp, Homo sapiens
acccgatggattttctcaaaccaactgacggtatcagatattgagcgtgggtggatcttggtcaccaaggaacag

SEQ ID NO: 382393 - DNA, 75 bp, Homo sapiens
ggcagagtcagcagctgcagtgtggaaggcttgggcactgtttaaaggaaagttccgagaaggcatcgacaagcc

SEQ ID NO: 382394 - DNA, 96 bp, Homo sapiens
ggttgcagaaaatcctcactctgagtacggtctcacagacaacgttgaggtgaccaagaatatggcccaggtgaccaaagccctggacaaggccct

SEQ ID NO: 382395 - DNA, 100 bp, Homo sapiens
gatgtggaggaaaacaacttcgagggcagaagttgtctgctggttctcagcttgaagaagattctgcagtccttattgatcctttttcttggcgttacca

SEQ ID NO: 382396 - DNA, 96 bp, Homo sapiens
gggcgctgtgtcgagggcgatccccccaaagcagcgtcccgtgctaaagagttccacaaacatgtggagtttgatttccttattaagggccagttt

SEQ ID NO: 382397 - DNA, 97 bp, Homo sapiens
tgaggcgaatccgaggaccactgcttgctcaggtattatacctgaagaaccttagccctcgggtgactgaaagagatcttgtgtcattgttcgctcg

SEQ ID NO: 382398 - DNA, 114 bp, Homo sapiens
ctgcgccggcacacgggtgagaagcccttcgcctgcacctggccaggctgcggctggaggttattgaagagagggaaaaactaaagaatgaccgggaagcccgccagaagaaga

SEQ ID NO: 382399 - DNA, 100 bp, Homo sapiens
gattcgtggtgaaggtccggggcttgccctggtcttgctcggccgatgaagtgcagaggtttttttctggtgttgagatctgcatagccactcctggacg

SEQ ID NO: 382400 - DNA, 122 bp, Homo sapiens
ctgcaggccggtgctcttgcaactgacgcagtcactgcagcactggtggaacttgaggcctcaggagtgcaagtagctgatgaagtatgtcgcattttttatgacatgaaagttcgtaaatg

SEQ ID NO: 382401 - DNA, 88 bp, Homo sapiens
ttttggtctccgcgtcacgggataagactcttcgcatctgggacctgaataaacacgtgagagggtccaagcctggtaagaatgtcca

SEQ ID NO: 382402 - DNA, 89 bp, Homo sapiens
gctgctgcaccgcggcgccgacatcaattacgccaatgtggacggactcactgccctgcaccagattgtcctgggtcacataatgccag

SEQ ID NO: 382403 - DNA, 50 bp, Homo sapiens
ccggaatctgtctcctgatcatcattcagcctcagactatggcatgaaac

SEQ ID NO: 382404 - DNA, 100 bp, Homo sapiens
gggtggtgccgcgctcctggccccgcgcgggcggacggcggaggcgcctcccaggttggggtgactcagtgggaacgccatctgagcggggcatgaccta

SEQ ID NO: 382405 - DNA, 51 bp, Homo sapiens
caactttttgagtccggaaaaacagttttttgctccactcaagcctgttag

SEQ ID NO: 382406 - DNA, 100 bp, Homo sapiens
tgaagaaagaccacagagaaaggcacagcaatgaatgagagctcttctggaaaagctgggaagcctccgtgtggagccacaaagaggtccatcgctgaca

SEQ ID NO: 382407 - DNA, 100 bp, Homo sapiens
aggaagcctctatcagtgccagtcgggcacaggacactgcctgccagtcaccctgagaggatcataaaaggattcctctgtactagcacactcccctaaa

SEQ ID NO: 382408 - DNA, 74 bp, Homo sapiens
gcgattcgtgttcgtgagggccttttctgggtttggaaatcccttgtctccaggttgctgggattgacttcttg

SEQ ID NO: 382409 - DNA, 100 bp, Homo sapiens
agacagggatatgagtgaagaaaacacagagccaccctggaaagtgccgggaaccaaaccagcacttcaaaccttacctgaaacatttcttacctaagcg

SEQ ID NO: 382410 - DNA, 117 bp, Homo sapiens
catggacagcttcgacttagccctgctccaggaatgggacctcgagtcactgtggaagggaaaaggccgaggcatcagcgtgtgaagaccgcaaagacgatcccgagtacagttgtg

SEQ ID NO: 382411 - DNA, 87 bp, Homo sapiens
gcagcagccccggggcccggagaggtgtagagttcggtgctcgaatgataactattgatgggaaacagataaaacttcagatatggg

SEQ ID NO: 382412 - DNA, 100 bp, Homo sapiens
gtactcaacatattgactgtatttgggctgcagcacaggtgctggagaatctggtaaaagcaccattgtgaagcagatgaggatcctgcatgttaatggg

SEQ ID NO: 382413 - DNA, 96 bp, Homo sapiens
cggcagtgctgcaaccgctacagcagccgcaggaagcagctcaccttccaccggatgcttctggctggcacacctggcttcccctccatgctcaga

SEQ ID NO: 382414 - DNA, 80 bp, Homo sapiens
ctcaggccagtcgcctccaggccaagagggatccttcacccgtgtctgagccctgaggatgatgacaggaaggtccgaag

SEQ ID NO: 382415 - DNA, 100 bp, Homo sapiens
cgtgtgattgatgctgccaaacatgcccataagttttgtaacacagaagatgaggagactatgtatctgcggagctgacatcatgtacacaggcacgctt

SEQ ID NO: 382416 - DNA, 75 bp, Homo sapiens
attgccttattttttctcatggatgttcttcttcgagtatttgtagaagggtgaaaaggggaccgggaaatcaac

SEQ ID NO: 382417 - DNA, 100 bp, Homo sapiens
gggtctgaagttcacgactactagaaggggaggggagtggaaaggctctcagtgaaaaagataggtgaaaatggtgatcccaaagccttcttaatagaga

SEQ ID NO: 382418 - DNA, 60 bp, Homo sapiens
ggggaaccccgagctgtcattttacctgtgtgaggcggaaccaaccctcctggccatggg

SEQ ID NO: 382419 - DNA, 75 bp, Homo sapiens
ttcacaaagaatttccttaagagctggactgggtatgggctacgtgagttcgtggtgattgcccctgctgcacac

SEQ ID NO: 382420 - DNA, 75 bp, Homo sapiens
cctcctctgactccgagcccgaggccgagctggagagagagacgcatcttctctccagactgccgatcccagaaa

SEQ ID NO: 382421 - DNA, 50 bp, Homo sapiens
atgcaaactagcactcttaaagtggactgcatggaccccacatgttcagg

SEQ ID NO: 382422 - DNA, 51 bp, Homo sapiens
gtttctaggaaaggccggacaccagggtctggatggtattattgaatatga

SEQ ID NO: 382423 - DNA, 82 bp, Homo sapiens
cgtcgcccaggagtcatcggacgccagaatctgactagacgcttgaagcaaagctgccatcccagaagacgacatgctctca

SEQ ID NO: 382424 - DNA, 90 bp, Homo sapiens
ctcggagagggtgagttgaaacgctgcctggaaaggaagtaccaggacttgcacaggaattgaatgatctggcacgggaccctccagcac

SEQ ID NO: 382425 - DNA, 100 bp, Homo sapiens
ggactggcctggcgtgcactccgcacctcggggacattattgcgcgtggaacggctgcttttggaagttactgtaaaatggggaaaggagaaatttgaag

SEQ ID NO: 382426 - DNA, 74 bp, Homo sapiens
tgagagtgattgagagtggaccacactgcgccaacacagaaattatgacgcgtgaccaaaaccaaagacggcca

SEQ ID NO: 382427 - DNA, 75 bp, Homo sapiens
ggctccgttgcctgctcccggagggagacgcgctgccgaggagaacccagcggatctgtcttctaaggcagcagg

SEQ ID NO: 382428 - DNA, 83 bp, Homo sapiens
atctccatcacccaccaacaacaccacaataatccacagccaagattgacgtgagtgaattcagatataactcaagcttgtta

SEQ ID NO: 382429 - DNA, 100 bp, Homo sapiens
aaggaattcctcatttgcaagagagacagttactggaacatagagattttatagggtggggacccatcgtgaagatggcgtggccctgagaggcagccat

SEQ ID NO: 382430 - DNA, 78 bp, Homo sapiens
tggactccctggctgctggagagttgaatgccagccaccagccatgggtccccaggtgcatccaatttttcaacttta

SEQ ID NO: 382431 - DNA, 101 bp, Homo sapiens
caatttctttccagccacaacctaccccatgggtcgacctatcagatgcgccggccgggcggagagctgccactggatcaagattataggaccggcccaag

SEQ ID NO: 382432 - DNA, 100 bp, Homo sapiens
aaatcctctgccggaagcagaagctgggaaaattgaggagagtcctttcagtgtcgaggcaacatcagatgctgacctgaaagaacatatggttggaatc

SEQ ID NO: 382433 - DNA, 118 bp, Homo sapiens
gcagtcgctccgagcggccgcgagcagagccgcccagccctgccagctgcgccgggacggtgctggagaatctggtaaaagcaccattgtgaagcagatgaggatcctgcatgttaat

SEQ ID NO: 382434 - DNA, 117 bp, Homo sapiens
catcaacaccgagttcaagaacacccgcaccaacgagaaggtggagctgaagaagggagccactctcaaaatcacgctggataacgcctacatggaaaagtgtgacgagaacatcct

SEQ ID NO: 382435 - DNA, 83 bp, Homo sapiens
ccacaatcttcaatgagtaaacatattcctatgtccagctcgccgctgtccaagaaacgtcgcgtgtccgggcctgatccaaa

SEQ ID NO: 382436 - DNA, 49 bp, Homo sapiens
tggctaatggcatttacaggagtattgaaatggctgatggcaagtgcag

SEQ ID NO: 382437 - DNA, 50 bp, Homo sapiens
gtgacgagcggccgaagcagctttgcggctgaccccgcactacatctacc

SEQ ID NO: 382438 - DNA, 83 bp, Homo sapiens
tcctcggccggcgggcgtgcatcatccacggggtgctgcagatcctgttccaggctgctcccggcagatcggcttctcctttg

SEQ ID NO: 382439 - DNA, 76 bp, Homo sapiens
aaacaagaggctctcccagaaaagaggtatttgaagaattattgcttgatgcagattggagcataaatgctggaag

SEQ ID NO: 382440 - DNA, 83 bp, Homo sapiens
ataacactttagtacagtcgccaactgatgtctacagagcctctgttgagttcccttctgaggaggatgccagaattagagac

SEQ ID NO: 382441 - DNA, 74 bp, Homo sapiens
aagagggtgttcgactgctagagccgagcgaagcgacactcatgaggaccatgatacttccactgagaatacag

SEQ ID NO: 382442 - DNA, 48 bp, Homo sapiens
gaaaacaccctgcaatctttcagacagaacggccggtttgtgggcgat

SEQ ID NO: 382443 - DNA, 75 bp, Homo sapiens
tcaaaggagttgtatttagtgtgacgactgttgacctgaaaagttagatagattcaaagagccacctgcatttgg

SEQ ID NO: 382444 - DNA, 83 bp, Homo sapiens
agagggaggtgaccaaggaggagtacaaggacatcctgcgcaaggccgtgcagaaggtgaccctggcaaagatgagagtgcac

SEQ ID NO: 382445 - DNA, 76 bp, Homo sapiens
agctgggagcagagattaaaagagttcggcgaggaactccagaatacaagtttgtgatggacgcctctgaccccac

SEQ ID NO: 382446 - DNA, 100 bp, Homo sapiens
ggctccaatggcgctttctacaagatggagttttaacattgaatgcggagaacactaattatgcctatcaagttccaaacttccataaatgtgaaatctg

SEQ ID NO: 382447 - DNA, 100 bp, Homo sapiens
gtgtaccatttccacttgatgtcatcacgcagaaggggtgaaagagactcggtgacagatacaggtagctacagcaagctgggtagcaggcagatccaaa

SEQ ID NO: 382448 - DNA, 110 bp, Homo sapiens
aacatgatatggcaaacattgcagaaaacaaaggattatgaggaagatgtacgaatccaaaatgcaatcaatatagctcagaggccatgtggaagtgttacatcaccttt

SEQ ID NO: 382449 - DNA, 98 bp, Homo sapiens
aagcatcgtcctaggaatggatttctcctctaatgacagtctcttgcatggcaccaagaatgttaccaattcaagcagtttaagattgccaagacaaa

SEQ ID NO: 382450 - DNA, 101 bp, Homo sapiens
gcgagagaaacaataggacggaaacgccgaggaacccggctgaggcggcagtcaaggcctggccgacaacaccgttattgctaaagtaaataatgttgtgt

SEQ ID NO: 382451 - DNA, 75 bp, Homo sapiens
caaaggccagtgactaccaacgtttggaccagaagcatcctggtggggaagaagttttaagggaacaagctggag

SEQ ID NO: 382452 - DNA, 90 bp, Homo sapiens
ctcccacctgctgaactggtgcagagggacgtggatgcctctccctcgcctctgtcagaaaatgtggacacagacttgccaggcagcctg

SEQ ID NO: 382453 - DNA, 90 bp, Homo sapiens
ttcagaggcagaaacacagcaatggatgcacaggaagctttagctagaaggaaactaaatatattttgccaactttggaaaaagaattat

SEQ ID NO: 382454 - DNA, 100 bp, Homo sapiens
aagagtctttaaagcacggacttacacctattggtaagtaaggaggtctctgtaccatggctcgtacaaagcagactgcccgcaaatcgaccggtggtaa

SEQ ID NO: 382455 - DNA, 100 bp, Homo sapiens
aagagttcaataaggcttttgagctgtatgatcaggtgaccaagaatatggcccaggtgaccaaagccctggacaaggccctgagcaccatggacctgca

SEQ ID NO: 382456 - DNA, 100 bp, Homo sapiens
tacaactcccccgccgtcatactacccatatccgaaccttaggacccagccgccgcctccatctctgacggagactgtgacgcccgggagggtgagtcag

SEQ ID NO: 382457 - DNA, 82 bp, Homo sapiens
gctttacctcgtggctgattatttagaggaatggaagttggatacactttgtgacttgtacgagacactgaccattacacag

SEQ ID NO: 382458 - DNA, 83 bp, Homo sapiens
cacacagctgtcggcttcaaacagacggccaagaagacgctggagggaggctgttaggagggactctgagcttcacacctgtc

SEQ ID NO: 382459 - DNA, 50 bp, Homo sapiens
ggacaccaaacatttcctgccgctcggtcaaaatgcagatcttcgtgaaa

SEQ ID NO: 382460 - DNA, 100 bp, Homo sapiens
aattttgtgctcatatatgagctgctggatgagttaatgttctcctcagaggtggaagaatatcctgataaagagaaagaaatcaaagcctcttcataat

SEQ ID NO: 382461 - DNA, 100 bp, Homo sapiens
cagcagggcccggtcctgcgcctcgggagtcggcgtccaggctcggagcgcgacacggagactaggtggcagcacttgcacctcctgcgccgccgccccc

SEQ ID NO: 382462 - DNA, 75 bp, Homo sapiens
tacatctggttctgctactagcaacccttttggtttaggctactgcagcactggggtgtcagttgttggtccgac

SEQ ID NO: 382463 - DNA, 100 bp, Homo sapiens
ttaaagcaattgagcaggctgatctactgcaggagatgattcacctccagcagaaagggaaccaggagaagttgtggacagcctggtaggcaaacaagtg

SEQ ID NO: 382464 - DNA, 75 bp, Homo sapiens
caggggcggaggcggaggcagaggtggaggcgctttgaaaggtactctctgaagatggcagaagctcaccaagct

SEQ ID NO: 382465 - DNA, 95 bp, Homo sapiens
gcaggcagcctcccggagcccctcctttggtgacccacagctatcccctgaggcccgacccagtaatctatgccagcaattatgacaatgttagc

SEQ ID NO: 382466 - DNA, 75 bp, Homo sapiens
atgatctacctaccaatcgtgaaaactatattcacagataacagacgagtacctttggaaaggtcacgctctcgc

SEQ ID NO: 382467 - DNA, 83 bp, Homo sapiens
gttcaagcagctggctctggaggacgccaaagaaggctacagaatatccaagggactgagtgaaaagatatttgcaaaacctg

SEQ ID NO: 382468 - DNA, 75 bp, Homo sapiens
acacagtctgcataaatggaagatgggatccagaagtgaactgctcaatttctgcagaaaaatgtgggccccctc

SEQ ID NO: 382469 - DNA, 116 bp, Homo sapiens
tcccggtgctaggggtgcaggaggaggacggcagcaaccgcagcagcagccttcagggcggcgactggcggcgcgatggacctgaccgggctcctgctggacgaagaaggcacctt

SEQ ID NO: 382470 - DNA, 90 bp, Homo sapiens
ctggaacatggacaggaactgtggacagtgaagagaggcctctcccaaagcacctgcgcaggtgcagaatttcacgtgtcactgctttcg

SEQ ID NO: 382471 - DNA, 100 bp, Homo sapiens
ggaatattacgcggctgatataaatgttcgtggtagccgaggccgatgcgggctcctgccttttgcacgagttcaccatctcgggtaccacgtatacccc

SEQ ID NO: 382472 - DNA, 82 bp, Homo sapiens
aggaatatcagtcccttatccgggtctgggatctcctggctgttgctgtcttctgctctcatcctgcaggtgggactctcag

SEQ ID NO: 382473 - DNA, 110 bp, Homo sapiens
agctccgtagcatgaggaagagtcaggggcacagagagatggagagagacctagttagaacctggagctggttgaaaaaggcttcagtaacttgaagaaacaaattgaaa

SEQ ID NO: 382474 - DNA, 139 bp, Homo sapiens
tctttctcaacaaaaccgacatcctggaggagaaaatccccacctcccacctggctacctatttccccagtttccagggcacacggaatgcagtgctgaacacggaggcgcgcacgatggcggcggaggtgctgagccg

SEQ ID NO: 382475 - DNA, 76 bp, Homo sapiens
ctcacacggtgtgggctgaatgaagagctgccagatcccacagtacaaaattggacagctgtacatgatcagcaaa

SEQ ID NO: 382476 - DNA, 100 bp, Homo sapiens
tcacccgaaggctgattactttgggatactacatcaacctcgctaacgcctgaggacactgaagacatgcccgtggggcaggattcggaaatctgcctgc

SEQ ID NO: 382477 - DNA, 90 bp, Homo sapiens
gccgtcgcccaggagtcatcggacgccagaatctggatgccattggaggagaatctatgcctattccaactattgatacatcacgcaaaa

SEQ ID NO: 382478 - DNA, 100 bp, Homo sapiens
tgtatgaacaccttttccctgagcttgttgatgattttcaggtgatctttgcagagctgtttcaacttccagcaccccctcacattgatgtgatgtacac

SEQ ID NO: 382479 - DNA, 89 bp, Homo sapiens
gtccttgcttgctggtctgattgtcgtttttacccggccaaagtcactgctgttaacaaggatggtgtgtgtggtttcagcgcagcatg

SEQ ID NO: 382480 - DNA, 50 bp, Homo sapiens
catcgagccttggcggcggacgtgcagctatcatggtgaacttacttcag

SEQ ID NO: 382481 - DNA, 100 bp, Homo sapiens
tgggaccgcaagctgagcgagctgtcagagcccggggacggcgaggccctcatgtaccacacggtgtttggcaatcaactcattcctcccaatgcacaag

SEQ ID NO: 382482 - DNA, 82 bp, Homo sapiens
cgcggttgctacgcgcaccatggctggagtaatctcaggggcgatataatcaatgaggtggtcctaaagttgctcaaggctg

SEQ ID NO: 382483 - DNA, 75 bp, Homo sapiens
acctctacttagctcagcaattcttaccttctgatgaacttattagtcctaaagacattgatcctgtccagcgct

SEQ ID NO: 382484 - DNA, 51 bp, Homo sapiens
tttgagtcacataaggatgaaatattccagtctctagtgatccctgaaaag

SEQ ID NO: 382485 - DNA, 83 bp, Homo sapiens
agcctgcagagcgcgcagtacctccggaagcggtttgacagggctgaagcagagtacattgcagcaaagctagatatacagcg

SEQ ID NO: 382486 - DNA, 88 bp, Homo sapiens
ttcaatcccatcatttccagaaaggacatcacaggtctgaaggggcgtctcgattacctgagctctctgaaggtgaagggccttgtgc

SEQ ID NO: 382487 - DNA, 89 bp, Homo sapiens
actcttggcatttggctttgcctttctggacacagaagtatttgtgacaggtaaaaagaacgtattctcatggtacttacagagctggc

SEQ ID NO: 382488 - DNA, 100 bp, Homo sapiens
gtcggtgggcctctgagatatgccgtttacggcaagatggaaagttgccttttgttcctccggaggaagaatttattatgggagtttccaagtatggcat

SEQ ID NO: 382489 - DNA, 100 bp, Homo sapiens
tctctgaagcctggaaacgaggcactcagttggaagagtccagcaaggacctgaaggagaagaaggagaaggtggaggagaaggcaagccggaaagagcg

SEQ ID NO: 382490 - DNA, 75 bp, Homo sapiens
ggtgtatctgggggatttgtggcaacgggcatgaggaggtagttgcatgcgcctgggatggacagacatatatca

SEQ ID NO: 382491 - DNA, 51 bp, Homo sapiens
gtgaaccacatgcccagcacggatgccttcaattaagttgcagagttctga

SEQ ID NO: 382492 - DNA, 107 bp, Homo sapiens
gctgctgcacattaggttgcagtatgtggccagttatttgcctcagtaaaagatcctattttgtaacggattatgatccaaccattgaagattcttacacaaagcag

SEQ ID NO: 382493 - DNA, 87 bp, Homo sapiens
agcagtgggaaaaatggaccaacttctttggcaagtggacattttactggctcaatccgtggtggatgactggattgaatcatataa

SEQ ID NO: 382494 - DNA, 83 bp, Homo sapiens
ctgaagtagcaaaggcaagaaggcaacgacgttccatctgtggaaggacctaccaaccaggtcggcacagacgcaacccagtc

SEQ ID NO: 382495 - DNA, 87 bp, Homo sapiens
ccgattcctcctccttggtcgccgcgtccttggctggcgtgtcacaaggcacttaaagcattgttgaggtcattggtaggtcttcag

SEQ ID NO: 382496 - DNA, 88 bp, Homo sapiens
gcgccagacaccaccgcggaccccgccatcgctgcctcggaccccgccaccaaggaggactggaatgaaattgaccccattaaaaaga

SEQ ID NO: 382497 - DNA, 90 bp, Homo sapiens
ttctgataatcaaccaactgttacaatcaaggtctatgaagtggtggacttgctttgtgaagagacagttcatgaacaagagtctttcag

SEQ ID NO: 382498 - DNA, 100 bp, Homo sapiens
ggagccgctcaagaagtcgagatcgaagatttagaggccgctacagaagtccttagtgtgtgtggtttcagcgcagcatggctgtggtcatccgtttgca

SEQ ID NO: 382499 - DNA, 83 bp, Homo sapiens
gcttctaccggaggcgggacatctccagcaccctcatcgccctggccgacaagcacgcaagccgggctctcgccatgggtcac

SEQ ID NO: 382500 - DNA, 83 bp, Homo sapiens
ctcgaccagctgctggacatgtcctagggaggtcatcaaggcttgggacattgccatagccaccatgaaggtgggggaggtgt

SEQ ID NO: 382501 - DNA, 98 bp, Homo sapiens
gcccacttctttgagtttctcaccaaggagctagccctgggccaggaccgctgccaatttgtggtgtctgaagaccaagactacacagctcattttgc

SEQ ID NO: 382502 - DNA, 87 bp, Homo sapiens
cggagccggcgctgagaggggctgcggccggagcgggcggctgagacaaaggcgacggtctctaattaacagaagatggcaaagccc

SEQ ID NO: 382503 - DNA, 74 bp, Homo sapiens
cctggctcttgccctcatcctggttctggaatcctcagttcaaggttgctacgatttctgcaaacggagacaaa

SEQ ID NO: 382504 - DNA, 96 bp, Homo sapiens
caaagccctgggtcgcttggaagaagccaaggttcttggtgagattcaggaaattgtgaaaacagggctttgggtaggcgattgcttcatttacac

SEQ ID NO: 382505 - DNA, 50 bp, Homo sapiens
cctgaacctctacgacacggccggattttttatcaagcagaaatgcatcg

SEQ ID NO: 382506 - DNA, 50 bp, Homo sapiens
gcgaatatcgtcatcgttagaagatgtctttggtggacttgggaaagagg

SEQ ID NO: 382507 - DNA, 99 bp, Homo sapiens
cacgccctctccaccgtgacggccatcattgacgggacgggctctgtagaatatggctcaagcctggaagatgacgtggtgggggacacttcagggtac

SEQ ID NO: 382508 - DNA, 100 bp, Homo sapiens
caatcgttgctgaatcctttcatatcctaataggaattaacctccaaataaaacatgactggagtatgtaaactttactcagaacagagagccatccgag

SEQ ID NO: 382509 - DNA, 100 bp, Homo sapiens
atcatgcattaatgaaacatccacaatttttaaagattttaacctttgagaccaagaacccgtcggaattagcagaacgtttgcgctctgtttgtgggaa

SEQ ID NO: 382510 - DNA, 121 bp, Homo sapiens
cgtcaacccgctcgggaagcagctcttgccaaaaacctttggacagtccaatgtcaacattgcccagcaagtggtcacggagctgctggacgtctccatggagctgggctgtttcctggct

SEQ ID NO: 382511 - DNA, 98 bp, Homo sapiens
taaccttcgtgaggagctaacccggcagtctgggctcttggcaacattgctggagatagtaccatgtgcagggactatgtcttagactgcaatatcct

SEQ ID NO: 382512 - DNA, 100 bp, Homo sapiens
tttgttggcaaacagttctgggggtcgtccgatcctgcagattcccaaatgctggaaaatcctctttgctaagttgtgtttctcatgcaaaacctgcaat

SEQ ID NO: 382513 - DNA, 121 bp, Homo sapiens
gagagagagagggggactctgtgtgagggaaagaaaacaatttctcctgctctgcagcttctgttcaggatcccaagtgatggtggtttcctcggagggcgagctgagtcctgcgcgactg

SEQ ID NO: 382514 - DNA, 113 bp, Homo sapiens
ggactgtccctgctcatccattctcctgccacccccagacctcctcagctccagctccagcagatgtgacatagactggaagtgatggacccagacaacaatcagaaccaaag

SEQ ID NO: 382515 - DNA, 82 bp, Homo sapiens
ctactacgaggcgcaccagatgtaccggaccctgttcttcagcggggatctgacgagcttttctctacttgtgtcactaacg

SEQ ID NO: 382516 - DNA, 98 bp, Homo sapiens
gctcttgggtttagcaaaagttcatctccttctgcatccttaactgagaatgaggaggactcagagagagtaatgataattaccggaccaaacatggg

SEQ ID NO: 382517 - DNA, 82 bp, Homo sapiens
gttcttgtttgtggatcgctgtgatcgtcacttgctccgacagttagttaatatgtgcatcaacccagatccagagaagcga

SEQ ID NO: 382518 - DNA, 100 bp, Homo sapiens
ggggcgtaggggccgttgcccgcgatggaccgcaccggagacgctccggactcgtcgccgcagatgcacccactgggcctatgtaataacaatgacgaag

SEQ ID NO: 382519 - DNA, 101 bp, Homo sapiens
ctacaaggaatctgagggtgccctcaatgagcacatgaccagcttagcttctgtcctaaagtgctgggcctaaaggagataacatttatgaatggagatca

SEQ ID NO: 382520 - DNA, 76 bp, Homo sapiens
atgcagccttgaagataagcagtgccttgaaagattcagacctcccatagccctctcaccctggtactgcatgcac

SEQ ID NO: 382521 - DNA, 101 bp, Homo sapiens
cattgacgtggcagccgcccagacaggtgtgtctcggtttctccaagtcaacagcgcctggagcatgcagccaagcaggctgcagcctcagccacacagac

SEQ ID NO: 382522 - DNA, 50 bp, Homo sapiens
gaatccacaaaatgacctgcaggcccaggaagtacacgagaagctccgag

SEQ ID NO: 382523 - DNA, 82 bp, Homo sapiens
agagagacaagatgtccgccagagctgcggccgccaagccatggcaatgacaggctcaacaccttgctcatccatgagtaac

SEQ ID NO: 382524 - DNA, 75 bp, Homo sapiens
gtatggaaatagcagtgcttcaggaatagaaatcttggcaatcgaaaggaagttaaatgaagttcgaaagagatt

SEQ ID NO: 382525 - DNA, 82 bp, Homo sapiens
tggtgggcagttcagctggaggcgctggggagcaagactatgagctttcaccaacaatcaccagtggtttacacaacattgc

SEQ ID NO: 382526 - DNA, 75 bp, Homo sapiens
ggcctctccaccgtgcctgacctgctgctgccactggctgaagccgacgtagcttctctgaacagacgcatccag

SEQ ID NO: 382527 - DNA, 90 bp, Homo sapiens
gtacaagagactagaagagtgtctacccacaggaatggtcagtctgtagacgttgaagagacattgccatctgaaccagaaaatggagct

SEQ ID NO: 382528 - DNA, 98 bp, Homo sapiens
cttgacaaaagtgttcagctgtcatggaccccaggcgatgacaacaatagccccattacaaagattcgtcagcgaactgcagctcaaagaaacctttc

SEQ ID NO: 382529 - DNA, 74 bp, Homo sapiens
tggtactcagcaagctcgagttaaagttggatgtgctggaacaggttgaattctcttacccgcccctgattcca

SEQ ID NO: 382530 - DNA, 83 bp, Homo sapiens
tttgactactggggccagggaaccctggtcaccgtctcctcagggatagctgggagtatggccaccctgctccacgatgcggt

SEQ ID NO: 382531 - DNA, 74 bp, Homo sapiens
aagcctaccttttgagttactttcagaagataacacaggtccagttacaacacagggatcacaacaaacacaac

SEQ ID NO: 382532 - DNA, 95 bp, Homo sapiens
aaaagaaacctagcaacaaaaagaaagctgcgttaatgtttgcaaatgcagaggaagaatttttctatgaggaatcactagatttgatctacttg

SEQ ID NO: 382533 - DNA, 98 bp, Homo sapiens
ctccttctcctggagacgcaactcaagccaaaacaacttcccgacaagtggcagcacgatcttttcgacagtggcttcggcggtggtgccggcgtgga

SEQ ID NO: 382534 - DNA, 100 bp, Homo sapiens
gcgcggcgctggccgagagccgcggctccgtgtttctggaaagtgacagcaggtcaccatggctgttattggctcccttgctgtccccagctgttcccca

SEQ ID NO: 382535 - DNA, 100 bp, Homo sapiens
cctgagctctgaccagatgatgtgtgaagcagtatgcagatgttgaaggattctaatgcaagatattttttcttttttatagtgtgaagcagtattctgg

SEQ ID NO: 382536 - DNA, 75 bp, Homo sapiens
agaccaagagatggcagctgggttctttactgctggatcgcagctattccctcgaaggtgtacatggttgtatgt

SEQ ID NO: 382537 - DNA, 75 bp, Homo sapiens
actgcaggaacctggcctcactaggtgaatggtgatattccccctcggttaaaaaagagtgctcatgaaatcatc

SEQ ID NO: 382538 - DNA, 83 bp, Homo sapiens
gtgggagcggatccctgagctcgtcaagcagctgtcggccaagctcatcgccaacggccctgggcagtgacggggttcgggtg

SEQ ID NO: 382539 - DNA, 75 bp, Homo sapiens
acattacagtggttggaataaaaactccatcaagtatgatggtgaaggatgaatatgtgcatgactttgagggac

SEQ ID NO: 382540 - DNA, 100 bp, Homo sapiens
atggcttttctagcctgctgatgtgacaactgtgatgtgcctgcaacaacaggaaaggcaatgttatattaagatcttgattccacccaaaggtttattt

SEQ ID NO: 382541 - DNA, 50 bp, Homo sapiens
gagaacttcaaccaggcactcaaggtcatgttggccccccttatttccat

SEQ ID NO: 382542 - DNA, 98 bp, Homo sapiens
ccatccccatctgtaccctgaagaacttccctaatgccatcgagcacaccctgcagggctttcaccgctactccacagaccgccagtggcacgtccct

SEQ ID NO: 382543 - DNA, 98 bp, Homo sapiens
cttccaagctacttggagtagggacaaaatatcttggctcacgtatttaagagcctgaatattccaggtgttaaaaagtaatcgaagtacgaagagga

SEQ ID NO: 382544 - DNA, 114 bp, Homo sapiens
ggagcacctggatccgggtcattcagcagagcgtgcgcactgagaaagatcagtctaaagaaaaggagaagaaagtgaaaaaaacaattccttcctgggctaccctttctgcca

SEQ ID NO: 382545 - DNA, 90 bp, Homo sapiens
tcttactgccttcttaatgatgggaaatctttcaccacttgcctctgccctcgatctgccccttcttcgtattaatcaggcaaatagccc

SEQ ID NO: 382546 - DNA, 88 bp, Homo sapiens
gagactggataagatgaccttcagtgtgctgctcaaaaacaggtactggtatcttgggcctctaaaaatcaaagcagcccactttttc

SEQ ID NO: 382547 - DNA, 98 bp, Homo sapiens
gctaatcttcagggggagctgagccacatcatcagacaactacaggcctgctctctggttccaggccgagacgcatccagagctttcgtgaccgggga

SEQ ID NO: 382548 - DNA, 90 bp, Homo sapiens
gcctcggaagaggagctgggcctggtgcacaggaacgtggaggaactctgccgcttccctgagctgcctgcccgcaagcccctcacctac

SEQ ID NO: 382549 - DNA, 98 bp, Homo sapiens
cacaagctatacatgatgtcttcagccagtataaaaacacagctcgacagtacgcctacttctataaagtcatccagaggacgtcggtgatgaaggag

SEQ ID NO: 382550 - DNA, 100 bp, Homo sapiens
aattacgaaaaacagttacaaggaattcagattcaggaggctgaaacgagagaccagtgcattgaagtaatgggagatggatgccttaataatgaacact

SEQ ID NO: 382551 - DNA, 75 bp, Homo sapiens
gtgacagacagcggcaggacagtcatcctctataaggtccggtgtctaaaagactatggagaatttgaagttgat

SEQ ID NO: 382552 - DNA, 75 bp, Homo sapiens
ccaagtcaccaagaaattactgtctcaagtgatacgggcaattcatgatgttaaagccacagatctgggattagg

SEQ ID NO: 382553 - DNA, 129 bp, Homo sapiens
gatcttggaaatcagcccagatgtgcatgcaccagtccacgtgtggcaggaccaagggaagtgtcttcacaaagatgagcattagtgccagcagtagttcccaagggctgtctcagccatccacccaga

SEQ ID NO: 382554 - DNA, 100 bp, Homo sapiens
gtgtctttgcacaagaagcaggccggggctgcctacgtgccagaactcacccaacagttccctctgaagaaactggcagacctttcacttcgtatccaac

SEQ ID NO: 382555 - DNA, 90 bp, Homo sapiens
tgctgactggccagatggttcttacccaacgtttgatggctcatcaaactgcaatgatatcaatgagtgtattcttgaaaactatcccga

SEQ ID NO: 382556 - DNA, 100 bp, Homo sapiens
gagctcacgtttattcaacactttgtgtccctggtgatgttggaacattaatgatggaacatggccaaacttcagtcatgatcctgaagccatggtttct

SEQ ID NO: 382557 - DNA, 100 bp, Homo sapiens
acaacatcacacccctgcgcagggccacagtggaatgtgtgaaagatcaggtggccctatgcacccaggtagccctgggcatggagcacctgtccaacaa

SEQ ID NO: 382558 - DNA, 75 bp, Homo sapiens
gtacaagtggaccaactatctcacaggaactgtggctgcaccatctgtcttcatcttcccgccatctgatgagca

SEQ ID NO: 382559 - DNA, 146 bp, Homo sapiens
ctctgaccgagagggaagcgatgccacgggagatggaaccaaggagaaaccatttaaaacaggtctaaaggtagttcaacttatcagcaatgagatactaccttatgccaattttattcctaaggaatttgttggtcaaataatga

SEQ ID NO: 382560 - DNA, 74 bp, Homo sapiens
agaccgcggccgggaccgaggaaatgcactcggtgatggaaagagagccactattctgaagaacacttggccaa

SEQ ID NO: 382561 - DNA, 82 bp, Homo sapiens
gggacaccgcggaagccgggaaatgatgatgctggagggtcttgaaatctttacagtaaaacctgcaacttgaaaactagcc

SEQ ID NO: 382562 - DNA, 74 bp, Homo sapiens
ttgccttgaaggacaagaacagcgccgtcaccagcagttgggggcatggcaggcgtgaagagggcctcggagga

SEQ ID NO: 382563 - DNA, 100 bp, Homo sapiens
gtccctacttcaagaccatcgaggatctgaggaacaaggtcacgagaagagaatgccttctagatgcaaaatcacctccaaaccagaccacttttcttga

SEQ ID NO: 382564 - DNA, 83 bp, Homo sapiens
tccagttcattcctagctcagaaagcaacgttttgagccacaactgtcacaactccagcagcatctggaatcaagagacccat

SEQ ID NO: 382565 - DNA, 87 bp, Homo sapiens
gtgattagcttcgcagtctggaaagctttaggagttcacagttttgtgaagtgtggatatgcaggctctaactttccagaacacatc

SEQ ID NO: 382566 - DNA, 100 bp, Homo sapiens
aacattccctattcctaaagctttcgttggcaatcaactaccttttgtaggatttacatattatagcaatcgtagtcctgacacagctctccctgaggag

SEQ ID NO: 382567 - DNA, 80 bp, Homo sapiens
aagcagggattccagtgccaagactgaacccggtgcctggctcctaccccacacagagctgccaccctcacctgtcccca

SEQ ID NO: 382568 - DNA, 80 bp, Homo sapiens
gtcttccccaaccagcctggaggcaagaggctcctgcagacccctggcttcctgtcagcccaaggccaaccccactgtca

SEQ ID NO: 382569 - DNA, 76 bp, Homo sapiens
gaaaagactcaggacggacaagcacagtcttcggaaggctccacctgttctcccaggtgccctgcttccgggtgct

SEQ ID NO: 382570 - DNA, 75 bp, Homo sapiens
ctgctcaaaacctcgctccggaaaggggacacctggccgtcaccgatgggttgtatatactactgaaatgaatgg

SEQ ID NO: 382571 - DNA, 96 bp, Homo sapiens
ggagaatacagactgctacctccccgatgccttcaaaattatgactcaaagggaaagggtgccacactgggaatgcaagctgtccttgcttctgaa

SEQ ID NO: 382572 - DNA, 97 bp, Homo sapiens
tcctctgaagagtgaagtgagcaaatacaacccagcagtaggttattgaagacagcagccccaggtgtcatggagaaactccagctgggcccagaga

SEQ ID NO: 382573 - DNA, 101 bp, Homo sapiens
ccagatggcagccagtcagtggtggaggtttttgccaatccagaagactgtgtagcatttggcaaaggagaaaatgccaagaagtatcttcgaacagatga

SEQ ID NO: 382574 - DNA, 75 bp, Homo sapiens
gggcgctagcgttcgccttcagccaccatggggaatgggatgaacaagtgctgaggaatgtaaacaagtttgctg

SEQ ID NO: 382575 - DNA, 100 bp, Homo sapiens
gcgggctccagactcgccgtggtcaagttcaccatgagagggcaaggcactgacgtttcttctgctacagcctccaagccccaaacttcctccacacagc

SEQ ID NO: 382576 - DNA, 100 bp, Homo sapiens
cacaaacggcgcacattggtatgatgtggaaggtgaccaagaatatggcccaggtgaccaaagccctggacaaggccctgagcaccatggacctgcagaa

SEQ ID NO: 382577 - DNA, 75 bp, Homo sapiens
aaaatcaagtagtgtttgccagagttgattgtgatcagcactgatcttcaagttagatttaaaattcagccaggc

SEQ ID NO: 382578 - DNA, 83 bp, Homo sapiens
gctaccttccagacaacgcccagggccgcaaggctggctttgctacagctgaccactccagtcaggagagagagactgagaag

SEQ ID NO: 382579 - DNA, 100 bp, Homo sapiens
gactgctgcaactacatcacagagctgcggcggcagcacgcgcgggccagccacctgggcctggccaggaggacttgtacagcaaaagcacagcagccat

SEQ ID NO: 382580 - DNA, 100 bp, Homo sapiens
agaacagttaatcctcaatttaagcctgatctaacccctagaaacagtgttctaagaacggaagcatctgggctggatggaatttagcatcaagcagagt

SEQ ID NO: 382581 - DNA, 100 bp, Homo sapiens
aaaagtttgtcattaaacccatcgacaagaaggcacctgagtgtggccatctggggccgtgtggtatttgccactcaggagacatgtccctatgacatag

SEQ ID NO: 382582 - DNA, 100 bp, Homo sapiens
gcctggcggctgtgtgcctggccctgtctttggcagggggctcggagctccagacaggtgctggagaatctggtaaaagcaccattgtgaagcagatgag

SEQ ID NO: 382583 - DNA, 87 bp, Homo sapiens
aaagttgagcacattgccaaccggagttccccaagcatcagaagagctaacaattgctggaatgacctttacaacttttgatcttgg

SEQ ID NO: 382584 - DNA, 133 bp, Homo sapiens
tgcgagattccatacactactaccctggtaatgatctccaccctgacctggaggagccatcctctctaggggtgtaagggttgaagctttgagagaagcagcaactgctgttgagcaagagaaagaaatcctt

SEQ ID NO: 382585 - DNA, 100 bp, Homo sapiens
gtgctctatgactgccaggagggcaagcatgagtacagtaccagaagttatcgttgcacggcactgtggacttcgagtctttggcttctcactcatcact

SEQ ID NO: 382586 - DNA, 100 bp, Homo sapiens
aaaggagtcaggaatgcctcttaggattaaactgcaaatatctcatgaagctgctgcctgtatcactggtctccgggcagccatggaggctttggttgtt

SEQ ID NO: 382587 - DNA, 83 bp, Homo sapiens
gtccggcttggatatcttcggggacctgaagaagatgaacaagcgccaggagtgacagttcatttagattctttgtattcttc

SEQ ID NO: 382588 - DNA, 50 bp, Homo sapiens
gctgactactccatccgagaagagattgcatccgtgtcattctggacctt

SEQ ID NO: 382589 - DNA, 75 bp, Homo sapiens
gactggttcttgaacagacagaaggatgtaaaggatggaaaatacagccaggagaaagccatgttcagttcgagc

SEQ ID NO: 382590 - DNA, 74 bp, Homo sapiens
gggaggtgaatttccatgtcaacatagtcctgacttcccaagtaagaagcggaagaggagccgctggaaccaag

SEQ ID NO: 382591 - DNA, 83 bp, Homo sapiens
cctggacccgtgaagtcttcagctcctgcagctctgaagtggttctgggctgtcacatggtgactgaagaacttcattccata

SEQ ID NO: 382592 - DNA, 103 bp, Homo sapiens
gctcttcttggaaaaccagatccagaaactggaggagtcccgctcgaagctaggaaggatcagaatgttctctctccagtcaactgctggaatctcctcttaa

SEQ ID NO: 382593 - DNA, 97 bp, Homo sapiens
catttggctttcggctgtgcagatcgtctggtagaatcaacttccttgagaaaagccatagaaacagtgtatgcagcctatttgcccaaaaacacac

SEQ ID NO: 382594 - DNA, 100 bp, Homo sapiens
cctgaacttgggctgcccacagatgatagccaagagagaccggccagaatttagcttcacttgagagagatctggaatggtcgccatgattgaaaccacg

SEQ ID NO: 382595 - DNA, 75 bp, Homo sapiens
tggtgaagctggggcggcaccggatcaccaagacggagattttaccaaatgttgcaagaactctggagttcttat

SEQ ID NO: 382596 - DNA, 101 bp, Homo sapiens
aaagagaaccaagaagttcatccggcaccagtcagaccgatatgtcaaaattaagactgcaaaattcaaaatggggctcaaggtattcgtttcatctacac

SEQ ID NO: 382597 - DNA, 107 bp, Homo sapiens
gaaaaatggaccaacttctttggcaagtggacattttactggctcaagtgctggagaatctggtaaaagcaccattgtgaagcagatgaggatcctgcatgttaatg

SEQ ID NO: 382598 - DNA, 100 bp, Homo sapiens
tgtgccttttcttgttcctactgtaaaggagatgggttagatgttctgaagaaatcaggggagaaacccctgcttggtggaagcctgatggaatatgcaa

SEQ ID NO: 382599 - DNA, 101 bp, Homo sapiens
cgcggggtgaagaggcgtcctgctcgctcttccgcaccgtccttcccggttaataaaatgccctcctgcggcgagagggctacaccgtgcaggtgaacgtg

SEQ ID NO: 382600 - DNA, 83 bp, Homo sapiens
gtgggcaaactaagccgattttccggaaaaaggtggtttgtgatgaaaatggttccaagggctatggatttgtacactttgag

SEQ ID NO: 382601 - DNA, 100 bp, Homo sapiens
cccagcgagttggtcggtcccggggtcacccgctacgggaagcaggcctcgccacagctatccgtggtcctgaaccagttatgtgtgttgcatgagaaaa

SEQ ID NO: 382602 - DNA, 75 bp, Homo sapiens
caagaaatgactaatcaagagtctgccgtacatgtgaaaatggttgaagaaatatggagatcaacacaaaactgc

SEQ ID NO: 382603 - DNA, 83 bp, Homo sapiens
cccaggcacagccgacgccgcggggtggaggagaagatcaagcagacccaccgtaagtacctgctgcaggagcagctaaagat

SEQ ID NO: 382604 - DNA, 82 bp, Homo sapiens
ttaccaaggaatctgcttttcaagtatgccaccaacagtgaagagatgaggtggaaagtgagaaatggtacctgtctacaga

SEQ ID NO: 382605 - DNA, 100 bp, Homo sapiens
caagctcatggcccagcagggccagcaggggcagatggcaagtggagacagcaatctcaacttcagggactttcagttaccttgatgatgtcccatttaa

SEQ ID NO: 382606 - DNA, 83 bp, Homo sapiens
cggagcgggagtgttcgttgtgccagcgactaaaaagaggtgtttcccattaaacactaccaggacaaaatcaggccttacat

SEQ ID NO: 382607 - DNA, 75 bp, Homo sapiens
tctgcgtctgtgaggccaatgcaaataaaatgtttctgacctgccgggcacgatggctcacacctgtaaactcag

SEQ ID NO: 382608 - DNA, 75 bp, Homo sapiens
gactatggggcctttatcaaaatcccaggctgtcggaagcaagacttaattcagtgcacaaatgagatgaatgtg

SEQ ID NO: 382609 - DNA, 100 bp, Homo sapiens
cctgttccccgcgctgcggcctggcggcttccaggcgcactaccgcgggggcccaggcagtgccacttctgatctggggatggcatgtgaccgtgccagg

SEQ ID NO: 382610 - DNA, 82 bp, Homo sapiens
aattgatacagattctacaagccaaggtagttgatgtcacttggcgatattcctgcaaacatgaagaggtgattgccagaag

SEQ ID NO: 382611 - DNA, 100 bp, Homo sapiens
gctggagatgttcgactggaacctggagcaggccggctgccaccttctgggctcctggggccctgcccaccacaatgcacagccagagaacaacacatca

SEQ ID NO: 382612 - DNA, 92 bp, Homo sapiens
cagctttgccgccgcgctgcgcaagctcgccaaacaggcggaggagcccagagtgatgaacggcagcagccactcaccaacagccatcaatg

SEQ ID NO: 382613 - DNA, 98 bp, Homo sapiens
ggcatgtttgggatgcaaggggacgtgttcgggcttcgagccacattcatggagttttctggatatgccgcagaaggatccgtgccagaagcaagcct

SEQ ID NO: 382614 - DNA, 75 bp, Homo sapiens
aacacatgaaattgtggcgatcaagaaattcaaggacagtgaaggactgcatcgacgtaggctggtgggaaggag

SEQ ID NO: 382615 - DNA, 75 bp, Homo sapiens
caggaggccgaacgcggactcgccacccggccaccaccaaagatccctgacaagcagttagatgaaagggaacac

SEQ ID NO: 382616 - DNA, 75 bp, Homo sapiens
ggaaaggagaggatcccggagccggttgttcggaatcctataattgaaaaacagtaaagatggaaaaccagttat

SEQ ID NO: 382617 - DNA, 100 bp, Homo sapiens
cctaggggacataaaattagtgattactttgaggcaatttctaaaccgggatgacattggcatcatcctcatcaaccagtacatcgcagagatggtgcgg

SEQ ID NO: 382618 - DNA, 98 bp, Homo sapiens
aaaagcatccccgaggaggaagacgaatcgttaaacatctgaaagggtcagtacctggagtagaacagaaaaattattatgtctgtgttcccttggga

SEQ ID NO: 382619 - DNA, 83 bp, Homo sapiens
aaacagcccgcccgaccccgtcccgaccctggccgccccgagcggagcctggaggtcgaccatggtggccgggacccgctgtc

SEQ ID NO: 382620 - DNA, 100 bp, Homo sapiens
ctcataccccacagaccactatcacctcgatcagtttttcccctacatcctgctgctctttgcgatcctcctgtacctgcccccgctgttctggcgtttc

SEQ ID NO: 382621 - DNA, 98 bp, Homo sapiens
aaaagtataacacagggattcttttcctgccatggggatatgacattagccaggtggtgaagcgagaaatcttggtggaggttctgaccaaaagaaaa

SEQ ID NO: 382622 - DNA, 80 bp, Homo sapiens
cgtgcctcgtggtctaaagcttcggcacaagggcccaactggaattccacttacggatcatggaagggaagtggttgctg

SEQ ID NO: 382623 - DNA, 76 bp, Homo sapiens
gcgtcggtgctggaagacgaggccacagacacttctgatagtgaagtgatggaatggggagaagatattaaagcag

SEQ ID NO: 382624 - DNA, 75 bp, Homo sapiens
tctgcctgagcattctgtcaactttggaacttgtatgaggttgtgtggcacctaccctccctcctacaacctgac

SEQ ID NO: 382625 - DNA, 90 bp, Homo sapiens
cttcaggattgagacccggaaggcttcaaaggctgtcgcaaggaggaagatacagaaggtggtcatggcactaggagactacatgggcgc

SEQ ID NO: 382626 - DNA, 111 bp, Homo sapiens
catctctcaagtacccatcttggagggtacggaccccacatgagggaaagaccacagcaagattctttcattcgtctcctcctagcctgggggaccaggctcgaactgacc

SEQ ID NO: 382627 - DNA, 73 bp, Homo sapiens
aggggcagtacaagcttacgtctctgctcttcagtacaatcctggctggttgatatgtgaagagccaacctgt

SEQ ID NO: 382628 - DNA, 74 bp, Homo sapiens
catccacggattccgatacacagatgtgaatgaatgtgagactcctggaatctgtggtccagggacatgttaca

SEQ ID NO: 382629 - DNA, 83 bp, Homo sapiens
ccaaagaactggctaggcaaataagctttaaggcacagatagatcattatctaggacttgcaaataagaatgttaaagatgct

SEQ ID NO: 382630 - DNA, 83 bp, Homo sapiens
cagctaccatgccagagccagtttattttcactgtgcagctgttacaccaggaaatcctcattgacgattcaatttgttgaag

SEQ ID NO: 382631 - DNA, 90 bp, Homo sapiens
cactgctatagtatacatgcatcgattctacatgattcagtccttcacacagttccctggaaataatttcgtcctggtgagccatggaaa

SEQ ID NO: 382632 - DNA, 100 bp, Homo sapiens
cccacaagtggccccagcccaggaacgaatctctcaggctgcatcaggatgaatgatgacccaagtatggaaggccagctctcaatgttgcaagaaaaaa

SEQ ID NO: 382633 - DNA, 75 bp, Homo sapiens
gcagccctcatcgggagcacatcctggccacgggaaggtgaccacactccccaacacccttgtggagaacactgc

SEQ ID NO: 382634 - DNA, 100 bp, Homo sapiens
ctaccatgtcagccttcccagtagctgggaccacaggcgaggaaacgagacctctttcgttccttctagaaggtctggaggacgtagagttattgaaaat

SEQ ID NO: 382635 - DNA, 83 bp, Homo sapiens
gaggagccatgaggcgccagcctgcgaaggtggcggcgctgctgctcgggctgctcttggagaagtccattggaatattaagc

SEQ ID NO: 382636 - DNA, 76 bp, Homo sapiens
ctgggccggaagatcggcagcggctccttcggagacatctatctcggggacggcaaaacagaacagaaaggcggag

SEQ ID NO: 382637 - DNA, 83 bp, Homo sapiens
cagaaatgcgcagagcaaacatctttcaaagagttttgctgctaatgggattcaagcgcatccagaaagtagtactggatctg

SEQ ID NO: 382638 - DNA, 101 bp, Homo sapiens
gtaaaaacgaagaaatcaacgaaaactattaatccctctaaatatcagaccatcaggaaagctggaaaagtggaagagagaagggcacagttacctaagta

SEQ ID NO: 382639 - DNA, 100 bp, Homo sapiens
gtcggcatcctcctggcctacctggcagctgcggttggatttctcacgatgtccagtgttatctccatgtctgcccctttcttcctggggaagatcattg

SEQ ID NO: 382640 - DNA, 114 bp, Homo sapiens
ctcctctgttgtagctgttcctctggcaatacaaactttctgctttcaaatggcagttcggaaaaccctcattcctcctcagcctcctgatgttgctagtcctcgagtggaaag

SEQ ID NO: 382641 - DNA, 83 bp, Homo sapiens
cgagtgacccgggtgccgaggagcgggaagagttgctgggctcaccatggatgatgatatcgccgcgctcgtcgtcgacaacg

SEQ ID NO: 382642 - DNA, 75 bp, Homo sapiens
gtgaatggagtgcatgctaacagatatgattctataacagactcttccagaaatgatatgaagaggaaatttgcc

SEQ ID NO: 382643 - DNA, 100 bp, Homo sapiens
ccgagaagaagctgaaggatgtgctgctgcaggtggatgacgagcggaggaacgccgagcagtacaaggaccaggccatgacttgcttctggcagtcaaa

SEQ ID NO: 382644 - DNA, 96 bp, Homo sapiens
gaaagttcatgttgctgaaagctgtttggaagaaacaggtggcctgggagtagatattgtcctagatgctggagattcttctaacagagaaaatgc

SEQ ID NO: 382645 - DNA, 97 bp, Homo sapiens
acaggagttcatctacccggagaagcaggagccctactcggcagcaattaccagctctggctgggtcgccacaacttgtttgacgacgaaaacacag

SEQ ID NO: 382646 - DNA, 100 bp, Homo sapiens
ttgagttcttcgtcactgaagaaatcattcccctcgggaatcaggagtgacctggagcactgtggaggctactcacagtcgaactacaactccccggggt

SEQ ID NO: 382647 - DNA, 75 bp, Homo sapiens
ggtcaccgcaagtacagagagtacagccccccatatgcgccgaaaaagcttgtggtgaaggggggcaaaaaaaag

SEQ ID NO: 382648 - DNA, 100 bp, Homo sapiens
cagcagcggcaagagggagaatggggggaagcagcactagagaagggttcatcaccagcagccagtcggcagcttatgctatcagcaagtttgtcagtgg

SEQ ID NO: 382649 - DNA, 50 bp, Homo sapiens
ccaagaaccattggtggagatagaagagacagggtctcttgagaggccga

SEQ ID NO: 382650 - DNA, 116 bp, Homo sapiens
ctcctccataaaaacaagtgtgtgcatctggctgttagaagaattcatgctcatccggacaatgcagatcttcgtgaagactctgactggtaagaccatcaccctcgaggttgagc

SEQ ID NO: 382651 - DNA, 100 bp, Homo sapiens
gttccctgcggagctggagaaccggcttcttggacacttaatgattgttggcaagaaatgtgctgctgatctgggcctgaataagggttatcgaatggtg

SEQ ID NO: 382652 - DNA, 98 bp, Homo sapiens
tctgccacaagcaccatctttctgcaccagtctgctgtcaagtgttcagtggcacacgtcgcgaggggctgccatcacggacggtgcagatgtcccat

SEQ ID NO: 382653 - DNA, 98 bp, Homo sapiens
ctgtagccgcccaccggtttttctgccacttttgcaagggcgaggtcagccccaaactaccggctgtctacctggtctccagaatggacggccctgtg

SEQ ID NO: 382654 - DNA, 94 bp, Homo sapiens
cggagagaaggcggcgcgggaggtgaagttgctgctgttgggttgtgaccgagattcccgacgagagagactgaggggaagagaggaaggaggg

SEQ ID NO: 382655 - DNA, 75 bp, Homo sapiens
cctttccagcccgtggtccttctccatattcgagtgctacagctagaatgaagcacatcaacctatcatttgcag

SEQ ID NO: 382656 - DNA, 99 bp, Homo sapiens
gcgggcgcgactcggcggcggcgtcttttggaactctaatgatccaggacaaagaagttaccctggagtatgtatcaagcctggatttttggtactgca

SEQ ID NO: 382657 - DNA, 75 bp, Homo sapiens
gagtgctgatgtgaaaaataccacgacaaaaccaccctactcatgcggatgatttattcccatttttcttgagac

SEQ ID NO: 382658 - DNA, 75 bp, Homo sapiens
aaaggtgatctggacaaaggaacaggtatctcagggtgcccgggaaacatttgagaattactaccgaaaacagag

SEQ ID NO: 382659 - DNA, 98 bp, Homo sapiens
atatttactaagaggtaaatgacgcaaggatggatagaatgacagaagatgctcttcgcttgaatctgttgaagcggagcttggacccagcagatgag

SEQ ID NO: 382660 - DNA, 100 bp, Homo sapiens
atgacggtgaaaactgaggctgctaagggcaccctcacttactccaggatgaggggcatggtggcaattctcatcgcactgccagtgaaagatgtagaag

SEQ ID NO: 382661 - DNA, 83 bp, Homo sapiens
gagaaaagatgaaacggaccctgctggatccagacccctttgtgcggcacaccttctggaccttggccttcgggggtgtcttc

SEQ ID NO: 382662 - DNA, 50 bp, Homo sapiens
tttagagagcatcagcaatagtactccaaagattcaggtttactcacgtc

SEQ ID NO: 382663 - DNA, 100 bp, Homo sapiens
aacaaaaacttggcagtggaagttttggaactgtctatctggtttcagacaagaaagccaaacgaggagaggaattgtttgagcacaaaatgaacataat

SEQ ID NO: 382664 - DNA, 100 bp, Homo sapiens
agctggttggccctgtgatccctcaagactggtccacggagtgtatgaccacaaacagccatcaagagtaccatcctcgaggactgtccacgagggcctg

SEQ ID NO: 382665 - DNA, 90 bp, Homo sapiens
agatggtcaggtctggagctcgaccgggccaggaatgtttacccttgcggaagttgcatcacttaatgacattcagccaacttaccgaat

SEQ ID NO: 382666 - DNA, 75 bp, Homo sapiens
tccaggaaattcagcctcaaaaccgtcctgctgcttgctgaccaaatggtgaaatgacaatggatgctctgttgg

SEQ ID NO: 382667 - DNA, 90 bp, Homo sapiens
agaccagtgtggatcttcaagaatcattgaagagagaatggattctgcaagaccatgtctacacagacaacaccatcttctgaatgacag

SEQ ID NO: 382668 - DNA, 80 bp, Homo sapiens
ctactgctcaaaatctggaagtcccgctcgtgcgccgccccgagcctggagatgagggggagccggggcggtcgggactg

SEQ ID NO: 382669 - DNA, 74 bp, Homo sapiens
gatttctgcatttccaactgagatgtaaaaaaagattggtctgaccatgctctctggtgggaaaagaagagaac

SEQ ID NO: 382670 - DNA, 90 bp, Homo sapiens
gtcgctgggtgcgtggggctgcctcgccgcgtctcgccacgatgaatttcctgaaataaaccgagcctcaattcgacaggatcacaaggg

SEQ ID NO: 382671 - DNA, 51 bp, Homo sapiens
cgggtgtctcgtgtgtgaacatcacagattctgaagggagtggtaatggaa

SEQ ID NO: 382672 - DNA, 100 bp, Homo sapiens
gaggccatcgccaatgactcagaggaagataactgttcccaggaaaaaaaggaggaaatcctggaaaatgaaaagcccagtggacacagttctaagcaag

SEQ ID NO: 382673 - DNA, 83 bp, Homo sapiens
aaggatttcagctaccagttacttttacgtgtgatggtgcacttacagagtgctacgatgaactggggaacagatatcagctt

SEQ ID NO: 382674 - DNA, 78 bp, Homo sapiens
gctttggatgctcttcggcctgcacgggaccatcacgcagatccgcatcctcggcgctttgacttccgtccaaaacct

SEQ ID NO: 382675 - DNA, 100 bp, Homo sapiens
tgccactccagatagacgtatccgggtcacacacacctgatttaacaacatctcattatctcaggatcaccacgatgaatgacacggtaactatctggac

SEQ ID NO: 382676 - DNA, 74 bp, Homo sapiens
gaattcgccgtgcccgagaatagctccgtccagcagattggagaaatgaaggcagaggtcaccaaactacataa

SEQ ID NO: 382677 - DNA, 100 bp, Homo sapiens
ttaccgtttgttggagaaaaagaacatgaacgattggatgcccatcgccaaggagtatgatccactcaaagcgggcagcattgatggcaccgatgaagac

SEQ ID NO: 382678 - DNA, 82 bp, Homo sapiens
cctgaatgtggcttggttgtaggtactaggttttgacaagcttgcatcatgcgtgagtataagctagtcgttcttggctcag

SEQ ID NO: 382679 - DNA, 148 bp, Homo sapiens
tgttggggagaagaggattggaggtgtcagtgttaaaggaacctctacaacgaaggtgaagccacggaagataaggtaagtaaggaggtctctgtaccatggctcgtacaaagcagactgcccgcaaatcgaccggtggtaaagcacc

SEQ ID NO: 382680 - DNA, 100 bp, Homo sapiens
aggcggccgtcagcaacctcgtccggggccacgcctggctgaaagatgacgaagcgacacactgtaggcagtgtgagaaggagttctccatttcccggag

SEQ ID NO: 382681 - DNA, 90 bp, Homo sapiens
cagatttccatccctgtcaagaaggaacacatacccgggacactacgattcctgggaacaccaccatggagggcctggcctttggcggtg

SEQ ID NO: 382682 - DNA, 73 bp, Homo sapiens
gcttctatggagtggcgtttactaccaaaatgcacagcggtattgatgagtagatccttggattcagaggttg

SEQ ID NO: 382683 - DNA, 100 bp, Homo sapiens
ctagaggcagctgcagggtctcgctgggggccgctcgggaccaattttgaagaggttgggggccgtcccgctcctaaggcaggaagatggtggccgcaaa

SEQ ID NO: 382684 - DNA, 89 bp, Homo sapiens
aaggaagccacgtgcagacatctacaaccttcgatctcctgacgagtgtctgatgatttgtgagcctcaagtgactactctgtggaatc

SEQ ID NO: 382685 - DNA, 82 bp, Homo sapiens
cagcgtgctcaggtcggcggaggagaaggaagatgagaatgtgcctactgctcctgatcctccaagtcaacatttacgtggg

SEQ ID NO: 382686 - DNA, 51 bp, Homo sapiens
cgaattgttctcattagggaacgaaaagctcctctggtgcaagtgtggtag

SEQ ID NO: 382687 - DNA, 99 bp, Homo sapiens
tggttccccaacatgcctcaccctcatctatatcctttggcagctcacaggaactgtggctgcaccatctgtcttcatcttcccgccatctgatgagca

SEQ ID NO: 382688 - DNA, 99 bp, Homo sapiens
tcctgaagatgtgtgggaacgtgaaacatctgatacaaggttccccaaggactctagcacctggactgtggaccaccagctcctgtggggggaggccct

SEQ ID NO: 382689 - DNA, 98 bp, Homo sapiens
tccgccgccgcctgaggaggcgagctagccgggagttacaccgccaccgccaggtggatccataaagaacccagccaacccgcagagggaggggaggg

SEQ ID NO: 382690 - DNA, 71 bp, Homo sapiens
cgcaagaggcactaccgcatcggcctgaacctcttcaacaactacctgaacgacctggagcgtattgcaca

SEQ ID NO: 382691 - DNA, 90 bp, Homo sapiens
acctattgttcagttacaagagaaactttatgtgcctgtaaaagaatacccagatgtgagaggccctccagctgcaggggcatttaaaga

SEQ ID NO: 382692 - DNA, 100 bp, Homo sapiens
cctagacggtgctgggagcgcgtctccttgaacgttgtcccgcctgggattgcgagagtcctgtgaagataaatcagattagcttggatgaaagtggaga

SEQ ID NO: 382693 - DNA, 74 bp, Homo sapiens
ctgaaggcaactatggatgctgggaaactgatgagccccgctagggccgccccgcgctgagagcccagccccgc

SEQ ID NO: 382694 - DNA, 98 bp, Homo sapiens
aataaccagtccttcagagaacaagaggatgaggagaacaatccccttgagacagaatatggcctttctgtctacaaggatcaccagaccatcaccat

SEQ ID NO: 382695 - DNA, 75 bp, Homo sapiens
gcggcagctggctctctggaatccgtttggggggaaagagctcagagatgaggaacagacagctgagagcattaa

SEQ ID NO: 382696 - DNA, 74 bp, Homo sapiens
ggagctgagaggagctgctgctcggaccagcgcgggtttggattcaggatttgttcctagtgtccaagattttg

SEQ ID NO: 382697 - DNA, 87 bp, Homo sapiens
tcagaggacgccttcaacaccaccttcatctccaccatcggttctcccatgggcaggtggtctctctggatgagctgcgccccttcc

SEQ ID NO: 382698 - DNA, 100 bp, Homo sapiens
gctgcggctactgcaagaacgagtcgggcagccgctccaatgtctcaaaccatgaattatgtgggacagctggctgggcaggtgattgtcactgtgaagg

SEQ ID NO: 382699 - DNA, 75 bp, Homo sapiens
actcggtcgtgctgcacagccacggggcgaaccgatgatgccagcctgttattgcgctccaggccactatcactc

SEQ ID NO: 382700 - DNA, 100 bp, Homo sapiens
accaccagcacccgccgggtcaccttcgaggcggacgagaatgagaacatcaccgtggtgaagggcatccggttggccagtcagtgctgaaagatgtaag

SEQ ID NO: 382701 - DNA, 98 bp, Homo sapiens
aagctgctcaggtactttgtgagcgaggactccatcttcctgcacctggagcatgtgcaaggcttgcagggtggcccccgctccgacttcgacatggc

SEQ ID NO: 382702 - DNA, 102 bp, Homo sapiens
gttagagaagaattttccaaatgaatttgcaaaacttactgtaggaattcctcctgatcagcagagactgatctttgctggcaagcagctggaagatggacg

SEQ ID NO: 382703 - DNA, 100 bp, Homo sapiens
tacctaggtaatgtgtagttctcaatgcatcatgtcaggcagcttatgatgccaatttgtcccatggaccattgtagcactggtatacaatgtgctgaaa

SEQ ID NO: 382704 - DNA, 83 bp, Homo sapiens
aaacccggggcaggcgggcagctgtgcccgggcggcacggccagatcatggaagggaagtggttgctgtgtatgttactggtg

SEQ ID NO: 382705 - DNA, 83 bp, Homo sapiens
cgcccagcggattctacattgcctccggagaaaaccgtgaggacatactgaatgccggtgacaaattaacagaggtccttgaa

SEQ ID NO: 382706 - DNA, 89 bp, Homo sapiens
gaatatatcacatcagctttggaaagtactgaggagaaacttcatgatgctgccagcaaggatccacctcagaaaaagatggaatgcac

SEQ ID NO: 382707 - DNA, 90 bp, Homo sapiens
caaaaactcagaaaatacgtggttggagagctcatctggaattttgccgatttcatgactaaccagtggtctcgctctgtcgcccaggct

SEQ ID NO: 382708 - DNA, 100 bp, Homo sapiens
tgccaatgggatgaaaattctgtataatacttcgcaagttacccatgcagttgttactgtaccagcctattttaatgatgcccaacgccaagcaaccaaa

SEQ ID NO: 382709 - DNA, 74 bp, Homo sapiens
atacttcattgctccttcaggacatgggaaggagctcattgccaagttagatcaggcagaaaaggagaaggtgg

SEQ ID NO: 382710 - DNA, 73 bp, Homo sapiens
cgggatccaaataggaatgttgaaatggcacctcgaaaggggaaggaaaagaaggaagaacaggtcatcagcc

SEQ ID NO: 382711 - DNA, 80 bp, Homo sapiens
cacacggagcactgcaggcgccggaaatctcccaagcctaagaagaagaagcacaggaaggagaaggaggagcggaccaa

SEQ ID NO: 382712 - DNA, 100 bp, Homo sapiens
gccttctcaccaagggtacccacaccggaatttccaggaagaaatagagtttcttaatgcaattttcccaactgatacagaaggcaataataaaacagtg

SEQ ID NO: 382713 - DNA, 83 bp, Homo sapiens
gtgccctgtgtgctcatctcgggcctggtgctgctcgcctacttcctgccggcgcaggtatgtcgggcagtctaggctctggg

SEQ ID NO: 382714 - DNA, 100 bp, Homo sapiens
acagcgactcactgacggagaagcagtggctcaagatttttacataccgttgctcaaaagagggctgcaagaagaaagagatgctgcagatggtatgtgc

SEQ ID NO: 382715 - DNA, 100 bp, Homo sapiens
gggataattatccaaataaattgcaagcattctatccaaatggaggaattctaaggaaaggtgcaaagctgttcttccgccggcggcatcaacagaaaga

SEQ ID NO: 382716 - DNA, 100 bp, Homo sapiens
acaaagtcaagagacagcgattggacagaatttgtgaagtcaggatggctaaaggtgaccccaagaaaccaaagggcaagatgtccgcttatgccttctt

SEQ ID NO: 382717 - DNA, 82 bp, Homo sapiens
cctggtgtcacctatcagtaaaagatgacaacaatggaagcagtggagtccccggagtccctggccgccgttgcttacctgc

SEQ ID NO: 382718 - DNA, 100 bp, Homo sapiens
ctgaggatgtaaagatgaatacgttgcactttacctcaagaagttcccagtctgaggatatgctgcaggctgctagtcattatcgccaaaatagaaactc

SEQ ID NO: 382719 - DNA, 48 bp, Homo sapiens
ggctctccatcgaaggcaacattgaactggattctttaaactaactga

SEQ ID NO: 382720 - DNA, 90 bp, Homo sapiens
gatctttgggaagatcatccgcaaggaaataccagccaaaatcatttttgaggatgaccggactatctgttatagtccctgggtcaagac

SEQ ID NO: 382721 - DNA, 100 bp, Homo sapiens
cgtcatgctctttgtagcgtggtgcttctgttgctcacaggaattgaaagatgttggccatcgtgatcagatggctgcagctagaggaatcctgcagaag

SEQ ID NO: 382722 - DNA, 75 bp, Homo sapiens
ctcctgaaccagctcgtcctggagcacctgcagctggcgcctctgcagtgggcaattctgtggtgttcttggtca

SEQ ID NO: 382723 - DNA, 100 bp, Homo sapiens
ggccgatatggaacccaagcagtggcgaagggaatcgcaaggctcttccctgaccattttctactgtccctgcgcgaggggcggcgaagaggacccgcag

SEQ ID NO: 382724 - DNA, 60 bp, Homo sapiens
gctgcaggagctgctactgtgcaacaaccacacttccccaagctgctggggctccttttt

SEQ ID NO: 382725 - DNA, 82 bp, Homo sapiens
cactgggaaggaactggtacttggagtctggacatctgaaacttggtctctccaagtttgtgcctaagaagatgataatcac

SEQ ID NO: 382726 - DNA, 82 bp, Homo sapiens
gcaaagtgccgaaacaagaagaaggagaagacggagtgcctgcagaaagatctcaaagatttcatgagacaagctggggaag

SEQ ID NO: 382727 - DNA, 75 bp, Homo sapiens
gccagtggctgaatttaacacggagaccaccccagctacgaacagattcagagacggaacctcactatgttgccc

SEQ ID NO: 382728 - DNA, 75 bp, Homo sapiens
caggagattatagctctgtatgagaaggacaacacctacttaggagaagtggaggcctctcagttaagaagactg

SEQ ID NO: 382729 - DNA, 83 bp, Homo sapiens
gagcagtttcgggatatgccctaccagccgttcagcaaaggagatcggctaggaaagatgcgcctgcttcctctgcgccagaa

SEQ ID NO: 382730 - DNA, 100 bp, Homo sapiens
atgatccagtctcggttgactcaagagtgtggagaagatctcagtaaacaggaggtggataaagtactaaaggtgcagcttttagcagcctggcaagagc

SEQ ID NO: 382731 - DNA, 90 bp, Homo sapiens
caaagaatgtacaacagacagtgagtgctaaaggcccccctgaaaaacggatgagacttcaatataagagttcggaccgcccagcacaca

SEQ ID NO: 382732 - DNA, 82 bp, Homo sapiens
cgggtctgctctgtgtgccatggacggtccattgacctcaacaagccaattgacaagcggatctacaagggcacccagccca

SEQ ID NO: 382733 - DNA, 75 bp, Homo sapiens
ccagctaagggaggcaagaagaagaaggatcctaatgctcccaaaaggccacccaatggccaatgtacatggtgg

SEQ ID NO: 382734 - DNA, 73 bp, Homo sapiens
ggaggtggaggttggaggtggtgctgctggggaacgggagctggatgaggtatggcgttgacggtggatgtgg

SEQ ID NO: 382735 - DNA, 51 bp, Homo sapiens
gccgatggctccgacccgctctggcaaatctccttggaccggctgttgggg

SEQ ID NO: 382736 - DNA, 98 bp, Homo sapiens
agaggctctgcaccctggatggaaagcagatgcctcaggagcagtacactcaccaccggagcaccatgcctggctctgtggggccacaggtatacaag

SEQ ID NO: 382737 - DNA, 75 bp, Homo sapiens
tcttcttcttaatcccatatctggacatctggaacatccatggaatagaaggacagtctgtggaagtttccaata

SEQ ID NO: 382738 - DNA, 50 bp, Homo sapiens
acattaaattcttccgttcagagtattagatctttgaccatcagtctgtg

SEQ ID NO: 382739 - DNA, 83 bp, Homo sapiens
aggggattcacttgtgtgcggaactcctcggaaccatggcgccctctatcgccctggggttccgtgatgcggctgatctgctc

SEQ ID NO: 382740 - DNA, 83 bp, Homo sapiens
actgcgctttctggctgaggagtcgtgagatggagaataaagaaactctcaaagggttgcacaagatggatgatcgtccagag

SEQ ID NO: 382741 - DNA, 100 bp, Homo sapiens
agaacagcagtgtttcaggaattttcacattccagaagaggcgtccttctttgcacggttggacgtgataagtatgagcctgcagctgtttcagaacaag

SEQ ID NO: 382742 - DNA, 100 bp, Homo sapiens
agagaagatctattaagtgcaaaagtttgtgacttgaagtggatacataatacgatgaatggattaaagcagataaaatagtaagacctgctgataaaaa

SEQ ID NO: 382743 - DNA, 98 bp, Homo sapiens
agaggtattctagaagaagaaattatgtgtcgtggaggccgaatgtttgcaccaaccaaaacctggcgccgttggcatcgtagagtgaacacaaccca

SEQ ID NO: 382744 - DNA, 121 bp, Homo sapiens
gaacttaagagtcttaggagtcagttggatgtgacacataaggaggagacaaggacggcagcaaggtgacaacagtggtggcaactcctgggcagggtccagacaggccacaagaagtcag

SEQ ID NO: 382745 - DNA, 100 bp, Homo sapiens
atagccagtgtgcagctccctaatgatgatgctcagtttgatgcgtcacactacgacagtgagaaaggagatgccaacgtccggcggtacctccagctga

SEQ ID NO: 382746 - DNA, 100 bp, Homo sapiens
ggcaatggtctcatcaaggtgaacgggcggcccctggagatgattgagccgcgcacgctacagtacaaggtggccaagactaagcagcagattgaggagc

SEQ ID NO: 382747 - DNA, 100 bp, Homo sapiens
ctcgacctgctaacagaactggaccttttcgaccattaaaaatctcaagtgacgactttgggaaactctggttatccttcgcaaatgatgtgaaacaaaa

SEQ ID NO: 382748 - DNA, 75 bp, Homo sapiens
agttctttgtggatggacttgattctgatgagagttttctggatatgccgcagaaggatccgtgccagaagcaag

SEQ ID NO: 382749 - DNA, 83 bp, Homo sapiens
cagatcgggagcgcaaggtcgccctcaaggccatgatcaaaacatgtggaagttcacgcagagccgctgggtggttaggaaag

SEQ ID NO: 382750 - DNA, 75 bp, Homo sapiens
ccacatttccaatttgctggaaaaaatgacatccagcgacaaggactttagctgttgtagcaaacagtgacgaat

SEQ ID NO: 382751 - DNA, 82 bp, Homo sapiens
cccgcgcagctggctggcggagcatgagcgccccaggttaatacaatctgttggaatgacactggagaatatattttatctg

SEQ ID NO: 382752 - DNA, 90 bp, Homo sapiens
gtagagcccgggaccgccaggccaccaccggccgcctcagccatggacgcgtccctggagaaggagttagccctgcgtagccagttacca

SEQ ID NO: 382753 - DNA, 100 bp, Homo sapiens
agcagtctacgagcttgagagaattctgaacaggggtccaaattccaagcctgtagtgtccttcattgctggtttaactgctcctcctgggagaagaatg

SEQ ID NO: 382754 - DNA, 100 bp, Homo sapiens
gacgacggagtagcagattgagggcaatgaggccaaaatacccagatccatccttttacaatccctgctattattcgtccattcagcgtattgaactatg

SEQ ID NO: 382755 - DNA, 51 bp, Homo sapiens
gtgaaggagtgcagaggcatcacctgaaagatggcttgctggggatgttcc

SEQ ID NO: 382756 - DNA, 100 bp, Homo sapiens
cctcatgtggagggcaaagttgcgccggggaacttgtgagcctgcggtgaaaggagaaaatgcagaagtctccatggacgtttccctggcttaccgtgat

SEQ ID NO: 382757 - DNA, 100 bp, Homo sapiens
gaacttaccaatgttttgcaacaaattcacttggaacaattgtcagcagagaagccaaacttcagtttgcctattttaccaaatgttgcaagaactctgg

SEQ ID NO: 382758 - DNA, 101 bp, Homo sapiens
gtcagttgttgcatcaaatacttcatatttggcttcaatgtcatattttggaaccttctgataacttaagagagattctccaaaatgtggccagattgcag

SEQ ID NO: 382759 - DNA, 83 bp, Homo sapiens
cttctccttattatagtcgatatagatcacgatcaagatctcgttcctacagcccaaacaagagatgggaatgaggtgggagg

SEQ ID NO: 382760 - DNA, 100 bp, Homo sapiens
gccatccgagttactcatgagaccagtgcccatgaaggtcagactgaggcctatggcatgtctgcgttacctttaaatctgataaaaggcactagaagcg

SEQ ID NO: 382761 - DNA, 100 bp, Homo sapiens
ctgaagcagaagtacccccaccacgcctctgcaatcatgggtcaccaagagaggctgagagaccaggattcaagatgaccaacgaagaacctcttcccaa

SEQ ID NO: 382762 - DNA, 100 bp, Homo sapiens
tcgccgtggccaacgcgcaggagctgctgcagtttggtaactctcattcgacatccatctgaactaatgaatgttcctcttcagcaacaaaacaaatgta

SEQ ID NO: 382763 - DNA, 100 bp, Homo sapiens
cagaaaatatgccttccctacagtcccacaaaaactctttctgtgaagtccatcttaaggaatctatcttctggatttaatctacattgattctgcatat

SEQ ID NO: 382764 - DNA, 75 bp, Homo sapiens
caggagtctcgcgcgcctgcgacgcggatcgtcagtatttaaacagatcacatcatgcgtgagtacaagctagtg

SEQ ID NO: 382765 - DNA, 78 bp, Homo sapiens
tgggtcagatgcagtacaatccagtactgccaggccaacaggcatttttaaacaagaccacctggtggcccatggtag

SEQ ID NO: 382766 - DNA, 90 bp, Homo sapiens
gggggattctcgacctgctaacagaactggaccttttcggactgttgggaaagatcctgatggctatccgagatgcaggttttgaaatct

SEQ ID NO: 382767 - DNA, 51 bp, Homo sapiens
ggaacatctcaccaattttaaatcagggctctggaggccacgggcatgatg

SEQ ID NO: 382768 - DNA, 100 bp, Homo sapiens
tcgtcgccacctggatgctggagtgggcggtgagatccccctagacatgcggctcgggggcgggcagctggtgtcagaggagctgatgaacctgggcgag

SEQ ID NO: 382769 - DNA, 74 bp, Homo sapiens
tttcagtgtcctccttagctctgcagggttattttggagctgttggagcactccttgagctgttgaagatcccg

SEQ ID NO: 382770 - DNA, 98 bp, Homo sapiens
tgagcccagcccccagaaaggattgtgacatatcgttggacccagaattgaggacctgaaggagaagaaggagaaggtggaggagaaggcaagccgga

SEQ ID NO: 382771 - DNA, 80 bp, Homo sapiens
aaatcagcctggtcaccagcttttcggaacagcagagacacagagggcagtcatgaggtttccaatacttatctacagga

SEQ ID NO: 382772 - DNA, 80 bp, Homo sapiens
gagtttcttcacagtaaaggactgatgcacagggacctcaagaaacccaaggacttggacttcgcccagcagaagctgac

SEQ ID NO: 382773 - DNA, 100 bp, Homo sapiens
agcagcggcgcagaaaggtggaggccgggaggacgaaggtgtcgtgaaaactacccctaaaagccaaaatgggaaaggaaaagactcatatcaacattgt

SEQ ID NO: 382774 - DNA, 100 bp, Homo sapiens
agcctttccgcgcgggactccggggcgccacgggggccatgtaagcaggattacgcccatacgttgacctgtgttactgaaagagaaaagtttattgtac

SEQ ID NO: 382775 - DNA, 90 bp, Homo sapiens
gtgcaaggcaccaacttgggcaaaatatatgccatgaaagtcctaaggaagatgcaagtgctgctggaccaggcgggctgctgtatcgtg

SEQ ID NO: 382776 - DNA, 82 bp, Homo sapiens
ccgcgcggaaggagctggagacggtcgtagctgcggtcgcgccgagaaaggttttaaaatcaaagatgggaaaatcggagaa

SEQ ID NO: 382777 - DNA, 50 bp, Homo sapiens
ctgcagccgcacctggccaaggatgtacaggtggatcatctgaatctcct

SEQ ID NO: 382778 - DNA, 99 bp, Homo sapiens
caacacaaaggttaccatgaaggaaatcttactgaaggcagtgaagcgaagaaaaggatcccagaaagtttcagccattcagcttggttcaacctttta

SEQ ID NO: 382779 - DNA, 149 bp, Homo sapiens
cagaactaaaacacttctcttcatttccaatgacaaaaaagtagttggctgcctaattgcggaacatatccaatgggtattaccagagaaacggagtctgaaactcttgaagagccacaatctcaatgtgaattggtacatgtactgcc

SEQ ID NO: 382780 - DNA, 101 bp, Homo sapiens
ggtgactatgaaaggcttatatttccaacagagttccacagatgaagaaataacatttgtatttcaagaaaaggtgtctgacttccagcaactgctggcct

SEQ ID NO: 382781 - DNA, 98 bp, Homo sapiens
tcggcatccaggacgttccctcccccgatccaagttggaattagcatcctctcgggggttatgaagacagtatggagtttccagaccatagtagacat

SEQ ID NO: 382782 - DNA, 83 bp, Homo sapiens
agtggataattttgtggccttagctacaggagagtgtgtagcccacaatgccctggagtgtgcacgagccatctacgcctacg

SEQ ID NO: 382783 - DNA, 100 bp, Homo sapiens
cggttccggggagctcggctccaagttctggatcaatgagctgagcaatgttcctgttcctgtcatgctaatgccagatgacttcaaagcctacagcaag

SEQ ID NO: 382784 - DNA, 75 bp, Homo sapiens
tgaagagggaagacacgcggaaacagctttgatgaccatgacccagctgtgatccatgagaacgcatctcagccc

SEQ ID NO: 382785 - DNA, 100 bp, Homo sapiens
agagactccaagaaaatactcgaagacatcaaaagctggattcgagggctggtgagattggagagatgaaggatggagtcccagagggagcacaacttca

SEQ ID NO: 382786 - DNA, 100 bp, Homo sapiens
gaagagaaactagaagccagtgaactcttcaaagacaagaaggctttatacccatctagaggtcatgacgccagtcagatcacactagccttgggcacag

SEQ ID NO: 382787 - DNA, 85 bp, Homo sapiens
aatgaatttgttagtgctgtgtgctggagggcactaccagatgggtactaaggctcgtacgtctgcatcgattatcttacgtggg

SEQ ID NO: 382788 - DNA, 82 bp, Homo sapiens
caggagaagcccatggagatcgccctgccaggagcccggaagtgggtccgcacgagacagaatagactacactcaaactcca

SEQ ID NO: 382789 - DNA, 98 bp, Homo sapiens
tggagacatgaccaacaggaagttccgccatgacaaaagggtttacttgggtccctcaacaccttacactaagtcaaagcgtggccacagagaagagg

SEQ ID NO: 382790 - DNA, 74 bp, Homo sapiens
ctggagccatccaacatttagctgggatgaaagacagcaagtctgaagatgatgagaaactgaaaaagaggaag

SEQ ID NO: 382791 - DNA, 88 bp, Homo sapiens
agaatggcagtgctcaaactcaccgaccaggtgcagcctgatcttcctcttctcccttgccagccagcactctgccttctgtatccac

SEQ ID NO: 382792 - DNA, 97 bp, Homo sapiens
aagaggactccaaaggaaggactggtcatctctttcatatctcaaaaccatggctcaggtctcctctgagcctccggcctccataagacccaaaaca

SEQ ID NO: 382793 - DNA, 75 bp, Homo sapiens
acaacagacagccctatgctgtcagtgaattagcaggtagcaggtaccatgaagctggaattggctcagtatcgt

SEQ ID NO: 382794 - DNA, 100 bp, Homo sapiens
aggcttccaggtgaaactctatgacattgagcaacagcagataaggaacgccctggaaaacatcaggccaccaggaaaccctccccgaagaatgggtaga

SEQ ID NO: 382795 - DNA, 89 bp, Homo sapiens
ccttggcctcctagggtgctgggattacagctacttgaaggaaattttgccaaagaagtgagccatgaaatggatggacttatttttca

SEQ ID NO: 382796 - DNA, 97 bp, Homo sapiens
gccgcactgggaccccggaatcccgcgcgctgcccacgattcgcttctgagaactgtgtcatgagtctctgcagcagcagctacagtgagttaggac

SEQ ID NO: 382797 - DNA, 76 bp, Homo sapiens
ccgagcagtcatcatcctcaggaactctgccctcgcgatcgctggagccccctgaggaactcacgcagacgcggct

SEQ ID NO: 382798 - DNA, 83 bp, Homo sapiens
gtgaccaagaacgtgagcaagcccaggcacagccgacgccgcgggataacgaaggaggcccaacttcattcaataaggagcct

SEQ ID NO: 382799 - DNA, 98 bp, Homo sapiens
gcagcgggcctcagagcgcgcccctcgaggtcaacctggccatcctggggcgccgcggggctggcaagtctggaacgaatgatcacacactttgaaag

SEQ ID NO: 382800 - DNA, 95 bp, Homo sapiens
ccaaggtcatccggtccctccacgggcggctgcagggtggagatgagggttactaccagggtggaaaatttcagtttgaaactgaagttcccgat

SEQ ID NO: 382801 - DNA, 112 bp, Homo sapiens
attagcgctagccctgcagacagaggtgtgctgacgacctgctacaacagaagtcagcccaaggccaaccccactgtcactctgttcccgccctcctctgaggagctccaag

SEQ ID NO: 382802 - DNA, 94 bp, Homo sapiens
ctgccggggcccaaccacaagacgactcaataggaggaaggcgaggattaaatccaccacacagggtgaaatctatctccatgacaacattcac

SEQ ID NO: 382803 - DNA, 75 bp, Homo sapiens
tcaagaatgaagccacggacccttgcgggcccggtcggactaggacccgcggcctgagagacgctggaggatgcg

SEQ ID NO: 382804 - DNA, 88 bp, Homo sapiens
ggaaaaccgaagttggaagtgtctcttagcagcgcgcggagaagaacggggagccagcattttgaaagcgaagcagaagccgtagaat

SEQ ID NO: 382805 - DNA, 100 bp, Homo sapiens
gggcaggatggctgcgttgacacgtcttatttaatccacatcatagggaaaatggagctgatagtatcctggatcttggattagtagactcctcagaaaa

SEQ ID NO: 382806 - DNA, 95 bp, Homo sapiens
ccaggccctttgagaggttactgtcaacagtgagatggatggtcatcatgggccagtgctactacaacgagaccatcggcttcttctataacaac

SEQ ID NO: 382807 - DNA, 75 bp, Homo sapiens
ctgcctgggtgacaatgccttggtttcaacactatcggaatgtgttatagttttgccgctggactcttccctccc

SEQ ID NO: 382808 - DNA, 83 bp, Homo sapiens
cccccatcctctgggatgcttggttttgaacgaagaatgtgatcagaactggtacaaggcagagcttaatggaaaagacggct

SEQ ID NO: 382809 - DNA, 75 bp, Homo sapiens
tcttcctatcacgggcactagtgtggctctcctgttccagcaattgggcgtgaattacccttcactaagtcggct

SEQ ID NO: 382810 - DNA, 90 bp, Homo sapiens
gtctcggaaaccggtagcgcttgcagcatgactggacttgaacactaagtcttcaatagctgagattctccatcttaatctacttggagg

SEQ ID NO: 382811 - DNA, 83 bp, Homo sapiens
acaagacacgtcggatgttgcagcagagccagcagctagcgcagcacccaggaaggcagggggctccctttatccaaggaggt

SEQ ID NO: 382812 - DNA, 96 bp, Homo sapiens
tgaggaggagaggacagaggtgcctggggcaacctccaccttgacggttccaggtggttggttctagctattgccatggtacgtttttatatggaa

SEQ ID NO: 382813 - DNA, 125 bp, Homo sapiens
caccccccaagcggatactggtcttctcgtcggattgcccatgcacttgttgcagaaacagccaagagctccacctggaggggaacttcctacaccgcctccccagcgaggtcagtgccctgcag

SEQ ID NO: 382814 - DNA, 97 bp, Homo sapiens
taatgtgctgactgaggagggcacgactcctttgcacctctgcacgatccccgagtccttgcagagacgcaggtcagaatggaaatgggctgcagac

SEQ ID NO: 382815 - DNA, 100 bp, Homo sapiens
cttagaagctaccgagttaccctaagaaaggattccagtcctctactaaatgaagtttcttcttcccttattggaactgattcccaagcctttccatcag

SEQ ID NO: 382816 - DNA, 134 bp, Homo sapiens
tgttgagcctcacaggaaatccctgcaaggaagactacttggcggtttgtgggctaaagagtacaggggctcaggtccaggtggcaggggatatgctacccaactcaactgagcgggccatcactattgctggc

SEQ ID NO: 382817 - DNA, 98 bp, Homo sapiens
aatattaagcatgtccctggaggtggtaattggtggacttgctttgtgaagagacagttcatgaacaagagtctttcaggacctggacagtgaaggga

SEQ ID NO: 382818 - DNA, 100 bp, Homo sapiens
ctcttcgccttcggagagcagagtcaacacggagcactctcgagtggaccctgaggagctcttcaccaagctcgaccgcattggcaagggctcgtttggg

SEQ ID NO: 382819 - DNA, 100 bp, Homo sapiens
gatccatttgtaaggaaagaaaaggaagcaacaacataatgcccagagttggagccaattaaaccaggtaaaaatgttgtacatcagctctcagtaaccc

SEQ ID NO: 382820 - DNA, 74 bp, Homo sapiens
cagaacgccatcaaccagctgaccagtcctgcctctgttgtagaagacatgtggtgtatataaagtttgtgatc

SEQ ID NO: 382821 - DNA, 100 bp, Homo sapiens
catgaaggctcatggtgtggacaaggtcgtggcctgcacctcggataacgaaggaggcccaacttcattcaataaggagcctgacggatttatcccagac

SEQ ID NO: 382822 - DNA, 106 bp, Homo sapiens
ccctttcctgtatgccatctgttttctgtggggccctgagtgatgaggagaggaacaaggattcatggaagtgaggctagaaaatattaaccctgaagaaaatgac

SEQ ID NO: 382823 - DNA, 82 bp, Homo sapiens
agaaaagcagagcaagggaacccagggctcagaaacacttatgggattttctaagcacggagggttcacttccttaacatca

SEQ ID NO: 382824 - DNA, 99 bp, Homo sapiens
aacgtttaccctagcaaaccagtggttctggaatggagccgagatcaataccatgttttgtttgattcctatagagacaatattgctggaaagtccttt

SEQ ID NO: 382825 - DNA, 74 bp, Homo sapiens
actccctcaatggattggtttacataggtcaagtttactgctagaccactagtggaaactatatttgaaagggg

SEQ ID NO: 382826 - DNA, 50 bp, Homo sapiens
ctgggacgtccggttgaccgcggttttggcacaaataccagtgggaatag

SEQ ID NO: 382827 - DNA, 82 bp, Homo sapiens
gaatgtgatgttagagaactacagaaacctggtcttccttgattacagagtcacgggagacaccgttctgtgttactgctgt

SEQ ID NO: 382828 - DNA, 75 bp, Homo sapiens
aagcaacggactcgatcctggtgttcgaggtggaggttaggcgggcattgggatcccgtggcagttgcagcactg

SEQ ID NO: 382829 - DNA, 100 bp, Homo sapiens
gagagcagcctgccggggcggaggtgcccattcctgcacagaaccacaggggacactgagcgcaggtaccaccttcgttactacaaaactggaatctgca

SEQ ID NO: 382830 - DNA, 100 bp, Homo sapiens
ccccacgtcgcttgggggccacggcgcggacgccatgggataaagtaattcctaataaagtggggacatattgtatccagtttggttttatgatggataa

SEQ ID NO: 382831 - DNA, 100 bp, Homo sapiens
aaaaattacttggagcaaagggcagtcggcggagcttcgccaaggctggcgcagtcgagagaaaaggaacagttccgtaagctctttattggtggcttaa

SEQ ID NO: 382832 - DNA, 83 bp, Homo sapiens
ttctgcagactgcctcaacagagtgataggtcccgttcaagaagttcttccagttcgcagtcaagatctcgttccagttccag

SEQ ID NO: 382833 - DNA, 100 bp, Homo sapiens
gcgcgctgctgctagtcctggggctctgccgggcgcgtccccggaacgcactgctgctcctcggtggcaactacgacagtcacttcgatgtggacaaggg

SEQ ID NO: 382834 - DNA, 98 bp, Homo sapiens
aaaatgtcaacaaattgatgggtatcgaaggatgatcgcagtgatgtggagagcagctcagaggaagaagatgtgaccacctgcacaaaaagtccctg

SEQ ID NO: 382835 - DNA, 100 bp, Homo sapiens
ataagactgcatctgttcatatgaggcagtttggtggttatgccaaggaagcagactacgtagcacaagccacccgtctgcgtgctgccctggagggcac

SEQ ID NO: 382836 - DNA, 90 bp, Homo sapiens
aacaaagatgcctatacttgtgcaagtaatttcatctgtgccaaagcctccagaggacaagccagaagatgtacatacaagtcatccatt

SEQ ID NO: 382837 - DNA, 98 bp, Homo sapiens
gcactggatccaaagcatgtctgcaacccagccattttcagtagccggatcgagctgggagatgtgacaccacacaatattaaacagttgaaaagatt

SEQ ID NO: 382838 - DNA, 76 bp, Homo sapiens
aggaagggctggagttgttttgaatgggcgcccgtaagagaggttatgaagacagtatggagtttccagaccatag

SEQ ID NO: 382839 - DNA, 75 bp, Homo sapiens
atgctgatggggctggacctgctggtgttcgcccacgaccatggtttgtcctggttgtggtcaagactggatgat

SEQ ID NO: 382840 - DNA, 87 bp, Homo sapiens
ttcgaaggattttgcaacaaattcgagctgtccgactctgagaatgtgaaaatgcctcgtgtaaaagcagctcaagctggaagacag

SEQ ID NO: 382841 - DNA, 101 bp, Homo sapiens
gtagggcttgtcaccattggaagcaaggcacgtggactccctttaatccagtgactgtcaggtcgatcatatgtaagtatcggcagacggaccaacctggg

SEQ ID NO: 382842 - DNA, 100 bp, Homo sapiens
tacgattgcagcgcagtggaagtcaagagcaaggttgttgatcattatgaaaatcctagaaacgtggggtcccttgacaagacatctaaaaatgttggaa

SEQ ID NO: 382843 - DNA, 87 bp, Homo sapiens
gctcctctccatggggttccccagagcccgcgcaatgtgaaagatgttgcagaagtgttccagaagtggctgaagatagaaggaaaa

SEQ ID NO: 382844 - DNA, 101 bp, Homo sapiens
atctccgcaggcctggcggaggccggccacctggaggggcattgcttggttcgcgtggtagcagaggagcttgagggggcagctggcattttatgctatgt

SEQ ID NO: 382845 - DNA, 90 bp, Homo sapiens
ggagactttcatttcactgactgtttattttttggttcactgatgtctgctacagatccagggtctgtttcacccagcccggaaagtcag

SEQ ID NO: 382846 - DNA, 76 bp, Homo sapiens
tcggctggtctgtgcatgcgccctccctgaggtggcaggatcccattttctcactggcgactcccctgcgtgctgg

SEQ ID NO: 382847 - DNA, 90 bp, Homo sapiens
ccaagccccacgctggccggacagggccgcctgtcgccgggttatgaagacagtatggagtttccagaccatagtagacatttgctacag

SEQ ID NO: 382848 - DNA, 82 bp, Homo sapiens
acctccccttctattgttctgtggcccaggttatggaaacaaaggacatgctttacatcgtcactgaatttgctaaaaatgg

SEQ ID NO: 382849 - DNA, 96 bp, Homo sapiens
acaatttctagctttgtaggagcatggcttggagcacttcctattccactggattgggaaagaccatggcagggccggctgacagatggaaaaggg

SEQ ID NO: 382850 - DNA, 82 bp, Homo sapiens
gagcagcgccagcggccgagcgggcggcttcctggcctgggcgctccggtggcggcggagaatctccggcctgtgaaactgt

SEQ ID NO: 382851 - DNA, 76 bp, Homo sapiens
gagaaagagatgctttctacagttatggaggtagtgggcagcagtcagtgacaggtgtaacctctgtggatgacag

SEQ ID NO: 382852 - DNA, 50 bp, Homo sapiens
atcagaccaagtcaattgttgaaaaatggagtctcgctgtcgcccaggct

SEQ ID NO: 382853 - DNA, 100 bp, Homo sapiens
gggatctgcagaacctgaactcgacttgtgcaccatggacaattttgctgagggagatttcactgtggcggattatgccttgttagaagattgccctcac

SEQ ID NO: 382854 - DNA, 74 bp, Homo sapiens
gaacttctcagcctccagaacgacaccatcatccgagcagtattgatttttgcagaaggaatttttacaggtga

SEQ ID NO: 382855 - DNA, 88 bp, Homo sapiens
gcagatgctccagttccctcacatcagccagtgcgaagagctgcggctcagcctcgaacacagatatgtagaactcttcttgaattct

SEQ ID NO: 382856 - DNA, 102 bp, Homo sapiens
gtgccctacttcaaggataagggcgacagcaacagctctgccggctggaagatcaatgtccgagttaccaccatggatgcagagctggagtttgcaatccag

SEQ ID NO: 382857 - DNA, 82 bp, Homo sapiens
tggacgtcactggccctggtggggattgacagccacgggaaggatcatccagcagctcgtcaacggcatcatcacgcccgcc

SEQ ID NO: 382858 - DNA, 75 bp, Homo sapiens
tgcacagccgcaagagcatgctgctggctgccaaagtactgctggctggagcggatgtgaacctggcatggggcc

SEQ ID NO: 382859 - DNA, 100 bp, Homo sapiens
ctggaacttatgctgtagacatttctttgtggtttatctaaaaaccaaaggtcctgctcaatctggaattttgtcagatcgtgaagtggtaaacctcttt

SEQ ID NO: 382860 - DNA, 83 bp, Homo sapiens
cggcgccgctctccgagctcgatccgctgctcgcacgggagccagctgggtgatttggaggccaatcactgccaccttttatt

SEQ ID NO: 382861 - DNA, 82 bp, Homo sapiens
caatctctgtctgaactggatcataaatgacagttggcctttaccagagtttgatccaagccagattcgactgattgtatat

SEQ ID NO: 382862 - DNA, 95 bp, Homo sapiens
cgcgttcccagcccgggtccccgcgttcacagccccagcgcagccctgggcgctgcctatggcacagccaagagcggtaccggcattgcggccat

SEQ ID NO: 382863 - DNA, 75 bp, Homo sapiens
gctgaaggcacagctggaaatgatggtgcaagagttttgcacactagggaccaagaagccctcggggacactgct

SEQ ID NO: 382864 - DNA, 82 bp, Homo sapiens
aggaacgaggcaaggagctaaagcagcgtgcgttcagccctggggccttccggagcagtactacagcctcacctggttcctg

SEQ ID NO: 382865 - DNA, 100 bp, Homo sapiens
tcacccaaaccaggttgcagaagatctggattccacacagcagcggcagcagcaggctgcaacggagaaggggcttgggaaatatgagtgagcatgtgag

SEQ ID NO: 382866 - DNA, 80 bp, Homo sapiens
aaattatgattgacagacttgaaaaagccagttctaatcagcgccaaatcttaaaggcagaccacgcaaaaagaaaccat

SEQ ID NO: 382867 - DNA, 101 bp, Homo sapiens
aatagatgggtactgccggctggtgaatggaacctcgcagtcatttatcatcagacctcagaaagaaaaattgtatggcgacttcttgagctggaagctag

SEQ ID NO: 382868 - DNA, 100 bp, Homo sapiens
ctgagcaacatccgcgagttcctgcgcggctgcggggcttccctgcggctggagaacctaaaggcagacccagaagagctttttacaaaactagagaaaa

SEQ ID NO: 382869 - DNA, 75 bp, Homo sapiens
ggagatacatgcaggggcttaaagaactaaagtatgcagaccctgtggctgacctcctagaccgctggggtgtgt

SEQ ID NO: 382870 - DNA, 98 bp, Homo sapiens
cggggaggcagcggaaggcggcagactattgcccagaagaaaagatgtttggttttcacaagccaaagatgtaccgaagtatagagggctgctgtatt

SEQ ID NO: 382871 - DNA, 76 bp, Homo sapiens
aacgtgttcaataccatccttaccaccagaagctatccacaacttcgcagaggaatttgctgattcccttggaatt

SEQ ID NO: 382872 - DNA, 100 bp, Homo sapiens
ccctccttgcagcctcccccagaaagcaatgataattcccaggacagtcagtctggtactaacaatgcagattctgctgaagtgatccagtctcgagtga

SEQ ID NO: 382873 - DNA, 75 bp, Homo sapiens
gttctgctgcttctgggccctacgcgcggcttgcgcgacagaataacgggctcccagattcacaagccccaccaa

SEQ ID NO: 382874 - DNA, 113 bp, Homo sapiens
tcaggttctaaatggcttctaagaagttgggtgcagattttcatgattattataagtataggcctcatgttttatgtagttcatcgagctcaagtggaattgaatgcagctat

SEQ ID NO: 382875 - DNA, 101 bp, Homo sapiens
cggggacaggcccaagatcctgatggacagccccgaagacgccgacctcttccactccgaggaaatcaagggtgagcatggacaatcttgtgccaaaatgc

SEQ ID NO: 382876 - DNA, 75 bp, Homo sapiens
ccaaattcgcctccatctgtaccatgttccaggaatggatggaggtgctttaactgatacaagtctcacagattc

SEQ ID NO: 382877 - DNA, 98 bp, Homo sapiens
caagacattgtttctctccctctgcccccccttccccacgcaaccccagatccatttacactttacatttgtagaagactatgaacctaccaaagctg

SEQ ID NO: 382878 - DNA, 74 bp, Homo sapiens
cactcgttgctgacagtcagaaagtgctggagaatctggtaaaagcaccattgtgaagcagatgaggatcctgc

SEQ ID NO: 382879 - DNA, 82 bp, Homo sapiens
gaaggaacgaggcaaggagctaaagcagcgtgcgttcagccctggggcctccggtgtggctgtctctgatggtgtcatcaag

SEQ ID NO: 382880 - DNA, 75 bp, Homo sapiens
tcatggaattacaatgggtggggcgaggattaaatccaccacacagggtgaaatctatctccatgacaacattca

SEQ ID NO: 382881 - DNA, 121 bp, Homo sapiens
gggaggaggtggcaagtggagaggagccagccctgccagggacccctatgaatgcaggtgcggaggaggaacggggaagataaccgaagggtggtttgagaaacccaccaggccaactggg

SEQ ID NO: 382882 - DNA, 98 bp, Homo sapiens
aattctgggcttccacacaactccagtgctaactcaacaggaagatacttggaaaattctactcatggactcctggctttggtgccgctctgccagca

SEQ ID NO: 382883 - DNA, 96 bp, Homo sapiens
cggatggtcttgaaacacaaatggtttttgaatatggtgcacctgaagattgggaactcaaaacacagcaaccacttatgctgaaaaaccagctac

SEQ ID NO: 382884 - DNA, 82 bp, Homo sapiens
ccatctggcagatgcagaaacaggcccagagaggtgagaagccctaccactgcaactgggacggctgcggctggaagtttgc

SEQ ID NO: 382885 - DNA, 100 bp, Homo sapiens
gggtgttgcgcctggcctacagcgaggctgcgatgaagaacgatacagatacagggaatatgcagaaagaggttatgagcgtcacagagcaagtcgagaa

SEQ ID NO: 382886 - DNA, 106 bp, Homo sapiens
taaccctcaagccgaagccttcagtgggactcccccagcagatacattctcatgatgatttactggaggattcagacagtgaagagcattccagatcagattctgt

SEQ ID NO: 382887 - DNA, 82 bp, Homo sapiens
agatgaatgatgtcatcaccgtcatcgagggaagctggagcagatccgcagggacatccgagacttccggtctagcgcgggg

SEQ ID NO: 382888 - DNA, 75 bp, Homo sapiens
cactgccagcaacaccttcagagtcgttggagtcaagttgcaggatcagcagcttgatcatgatttaaaacatgc

SEQ ID NO: 382889 - DNA, 76 bp, Homo sapiens
aaaatgccatagctattacaaatatcgatgggctagaggagaagctgtcccagtgtcggagagacctggaggccgt

SEQ ID NO: 382890 - DNA, 101 bp, Homo sapiens
gcggagcccgcgcagtccgcgcagccctcatcgcaactgggcccgcgcgcagtggctgccttttctctatcctctttcctttattcattatcagcgccaat

SEQ ID NO: 382891 - DNA, 75 bp, Homo sapiens
cggagacatgggagacccggggtcggaagatgaggagaacaatccccttgagacagaatatggcctttctgtcta

SEQ ID NO: 382892 - DNA, 90 bp, Homo sapiens
caccgccgcccccccagacaagatggacaccgcggaggaagggaagatttaggattcagatttatatcggaacaggtcagtcaccacccc

SEQ ID NO: 382893 - DNA, 82 bp, Homo sapiens
gagtggacaaaatggcgaagatcgccaagactcacgaagtacttggaccatgagactgtttcagccactttcatcgacagca

SEQ ID NO: 382894 - DNA, 100 bp, Homo sapiens
ctccgggaagggcgagactggagcagagccgctgggcgccggagccgaggcgagcgccgcgcgcaccactggagcctcacagtctactcagagaaaaata

SEQ ID NO: 382895 - DNA, 83 bp, Homo sapiens
gttgtgaacagactcgatcgttagggaatgggaacgggtatggcaatccccgaaactcaccaggtctgctggtctcacctggt

SEQ ID NO: 382896 - DNA, 83 bp, Homo sapiens
ctgtctgtcgtctgccggccggcccggaccctggacaccatccagctggctttcaaggctttatcctgtggataaacgcagag

SEQ ID NO: 382897 - DNA, 100 bp, Homo sapiens
ggagataatgatgaagaagatccttcaaaattaaaagaggagcagcatggcatttcagtcactggtttgcagagtccagtttggaggagctcttcctgtg

SEQ ID NO: 382898 - DNA, 90 bp, Homo sapiens
tgccttctgatgagagctgtctttctcttgatgatcttgccaaaaggatagagattgcagaggcatgtgataacttgagcttgagtgacc

SEQ ID NO: 382899 - DNA, 83 bp, Homo sapiens
attccgccgaaaaagagaagacgctttacccgactctttgggccgttatctcacagctccacgcaggagatcggtgaggagct

SEQ ID NO: 382900 - DNA, 74 bp, Homo sapiens
gcgcccacccgctccgcgccgagggctggaggatgcgttccctggggtccggtttgcctgagaatacagatcaa

SEQ ID NO: 382901 - DNA, 100 bp, Homo sapiens
agggaaaaaagagcaggtggaaaaggaaagctttaaggaagcctcctatttcagtttctcaacatgaaagtcatcaagcaatctcccatcttccaactgg

SEQ ID NO: 382902 - DNA, 100 bp, Homo sapiens
tcggaaacggtttgtggctggagtaggagcaaacagcaatattttaataagcggaaaacctactttgctcacgatgcccttcagcagtgcacagttgggg

SEQ ID NO: 382903 - DNA, 100 bp, Homo sapiens
gaaagcagagaccatggagcttcttgtgcatccactctgggagagcgtggacctggttcctgggggcgatcgccagtcacccatcaacattcggtggagg

SEQ ID NO: 382904 - DNA, 100 bp, Homo sapiens
ttcttatggccagagccagaacaggtgttgaaagcagcaggggcctagaagacattaaaccgataccacagaaatacaaaggatcattagagactattat

SEQ ID NO: 382905 - DNA, 74 bp, Homo sapiens
tattcatcaataatgaaatgctgactaaggaacaagttcaaggagcagggacaagttacaggaatgttctccaa

SEQ ID NO: 382906 - DNA, 100 bp, Homo sapiens
tctactccctgcactgtcctgaccgcacctggagtctgctggccccttctcagggggcaaagattttgggaaccagtaggacattgacatacatccgaga

SEQ ID NO: 382907 - DNA, 78 bp, Homo sapiens
tcctggtgcgcatcctgctgctggctgcccttgtctcctttgactggtaccatcagtcctatgactgcgtctgtgtca

SEQ ID NO: 382908 - DNA, 75 bp, Homo sapiens
acgaagttatggcagagttagctaaagaactccctcaagtttcatttgtgaagatgccttcaattaagttgcaga

SEQ ID NO: 382909 - DNA, 50 bp, Homo sapiens
tctgggcggtatctggaacttgacatgtctgaggcatcctaactgcgaat

SEQ ID NO: 382910 - DNA, 95 bp, Homo sapiens
taaaaatgcattaaattcatgcgacccatggaccatggtagcatttgacatggacggcaaagtacgtaaaccgaagtttgagcttgatagtgaac

SEQ ID NO: 382911 - DNA, 98 bp, Homo sapiens
gcaacctggccatgggcgtgaacctcaccaggctctggcacgttttgggggaggtgcctgcaggacccaacatactcaatgagcttccagcgcaatgt

SEQ ID NO: 382912 - DNA, 51 bp, Homo sapiens
gtgcagaaataaatcagagtctactggctctcctctccaccaaactgccat

SEQ ID NO: 382913 - DNA, 75 bp, Homo sapiens
cgcacctggagaagctgaccctgggcatcacgcgcatcctaggctctgctgccatgaaggtgaagattaagtgct

SEQ ID NO: 382914 - DNA, 74 bp, Homo sapiens
ctggcagggccactgtttagtgagaacaccctgcagttctacaatgagaggaagccaaattggcagagaatgct

SEQ ID NO: 382915 - DNA, 95 bp, Homo sapiens
acagaacactggccaaccattgtgtcatctctaccctcttcccaaggagaacggcccttccagtgcaatcagtgcggggcctcattcacccagaa

SEQ ID NO: 382916 - DNA, 76 bp, Homo sapiens
gctagggagtgatggagcccagatccgaatccagaaagaaggggatcaacctgaaagagtccaaccaatcgcatca

SEQ ID NO: 382917 - DNA, 88 bp, Homo sapiens
catggccttctacgttgtgaaaatgatcttcagtgtctattggatttttccaagagaaagtttgtaaaattccttacactgtagatgt

SEQ ID NO: 382918 - DNA, 112 bp, Homo sapiens
cagaaattctgcttggtgatgagtatgatgcacctgcagtagaccatggcaaaagttataaccaccgtactgaagttccctgatgatcagactcagaaaattttggaaagag

SEQ ID NO: 382919 - DNA, 100 bp, Homo sapiens
cgagcggtgactccccgccgctcccgggggccgtgacggcgctaatgtgcatgctacaacagcaacaggagacacagccttaacctatgcttgtgaaaat

SEQ ID NO: 382920 - DNA, 75 bp, Homo sapiens
tccagtcgatgtatttgtacaccaagtcacgagaagagaatgccttctagatgcaaaatcacctccaaaccagac

SEQ ID NO: 382921 - DNA, 75 bp, Homo sapiens
atgttacggacactgcacaaagatattgctagatataatcagatggactctacgactctcaaagatgaagacttt

SEQ ID NO: 382922 - DNA, 82 bp, Homo sapiens
cccggaaccgcgattcggcgtgtcaggtaaaagtacacctgtaagccagcttggttccgcagactttcccgaggcccccgat

SEQ ID NO: 382923 - DNA, 83 bp, Homo sapiens
ctgctcaagatctcagagaaggaggaggtgaccacgcgcgagagacaagaggagcagcagcggcaccgcccctcaccctggag

SEQ ID NO: 382924 - DNA, 51 bp, Homo sapiens
ccagagaaaagtgaaacaattcaggacactacgaagggaacgtcatcgttt

SEQ ID NO: 382925 - DNA, 101 bp, Homo sapiens
gacgacgcgctcaaccagatcgcgcgggaggttcgatacaagaggctgttttcctagcgtggcttgctgcctttggtaagaacatgtcgtccatcttgcca

SEQ ID NO: 382926 - DNA, 75 bp, Homo sapiens
cgaatatcgtcatcgttagaagaaatggaccaattttgacaagatatagtgctgcagcgtgcctgatgggatata

SEQ ID NO: 382927 - DNA, 100 bp, Homo sapiens
ctgtatgatgactttgaatgggtgcatgttagtgctcaagagcctcattatctaccacccgagatgccccaaggccctcgggaccaaggatcacgtcatg

SEQ ID NO: 382928 - DNA, 98 bp, Homo sapiens
agccagatctttattacgagtactacccgcacgtgtaccctgggcgcaggggtaaatgaaactattctaagacccttaaatgtagaaccgcctttaac

SEQ ID NO: 382929 - DNA, 136 bp, Homo sapiens
tccagcgagcggcgcggagctggacgccgcgatcgtggggcccgcgaggcgggcagccggggcgtccaggatggatagaatgacagaagatgctcttcgcttgaatctgttgaagcggagcttggacccagcagat

SEQ ID NO: 382930 - DNA, 99 bp, Homo sapiens
aaagggacagggactgctgcaacctacggggtgtacttgggaacgaggggtgaagcggcccaggtgaggaaaatggacccaagtggggtcaaagtgctg

SEQ ID NO: 382931 - DNA, 100 bp, Homo sapiens
tctgtttggggagacgtccgccaagcccaatagaatcctgccagaatttctacaaagatttcacattacagatcgacatggctttcaacgtgttcttcct

SEQ ID NO: 382932 - DNA, 75 bp, Homo sapiens
ctgcaccgcaccgagggcgagctccaggacttggatgttgtgggtgatggtatgcagtgtcctccttcacctttg

SEQ ID NO: 382933 - DNA, 98 bp, Homo sapiens
agaagaagggaaggcgcgagtgaggaaaggaggtactgtagcacctggctgcagtggaagaaagaaagatcaagtccctggtagctctcttggttgag

SEQ ID NO: 382934 - DNA, 96 bp, Homo sapiens
aatatgttgatggcattccagaatatctcagatgagcagtgtgtgattaataaagtttcacaaacagaagaaatagacacagatgttgttgtgaag

SEQ ID NO: 382935 - DNA, 104 bp, Homo sapiens
ctaatcttgtacttcaagaggaggaatcacgctcggaaacaatggacatgcaagaaagcacttcagccaagcagaagggagccagctggacgaggtgcgccagg

SEQ ID NO: 382936 - DNA, 75 bp, Homo sapiens
tacagagggccgagaaggacaggatcaggtgccaagtcctgccctgccaacttcttggcagctgccgacgacaaa

SEQ ID NO: 382937 - DNA, 52 bp, Homo sapiens
acatgagatggtagccaacccctcagatggagtctcactctgttgcccaggc

SEQ ID NO: 382938 - DNA, 140 bp, Homo sapiens
caagccgccatggcctaccacagcttcctggtggagcccatcagctgccacgcctggaacaaggaccgcacccgtggcagtgctccttttggacttttctctaggtttggcgctaaactcttcttgtgagctcactccac

SEQ ID NO: 382939 - DNA, 98 bp, Homo sapiens
caatggcaccacagcagggactactagacaaaataaaagatgaacctgacaatgctcaacctactcgacacccagcacctcccccgcaaaccgattcg

SEQ ID NO: 382940 - DNA, 46 bp, Homo sapiens
agggaagaacatggcacttttcgagtcacctttctctccagtgcca

SEQ ID NO: 382941 - DNA, 100 bp, Homo sapiens
gagcgagcagaggcttaaggtcttcagcggggcgctccaggaggcactcacagactagacgcttgaagcaaagctgccatcccagaagacgacatgctct

SEQ ID NO: 382942 - DNA, 101 bp, Homo sapiens
ttattgaatatcaagaggaggagttgttgggactacatggaaggttgtcttggcactgaacggagaaaggtcaaaaggaagataaaaagtttgttccagag

SEQ ID NO: 382943 - DNA, 99 bp, Homo sapiens
gagcagtcaggacccggctcccgtccgtgagtgccacgatcccaggagttgtgcagcatttgcagaacggtcagctgctgagggatatctatctaaaga

SEQ ID NO: 382944 - DNA, 100 bp, Homo sapiens
cagcgtgtcaggcggagagacccgccgccagcaaattgtggctactaatttgccccctgaagatcaagatggctctggggatgactctgacaacttctcc

SEQ ID NO: 382945 - DNA, 75 bp, Homo sapiens
gtggtgtctggcctgaccccagaagaatttacactacaacaacaggagtgcaaacttctctacagccgaaaagag

SEQ ID NO: 382946 - DNA, 100 bp, Homo sapiens
cggcgctctcctggctcccttctgccccagctccgtctcggcggcggcgggtatgagcacattcttttagaacctgacccagtaccagcatatgctctga

SEQ ID NO: 382947 - DNA, 99 bp, Homo sapiens
cctagaacgttgagggcacgagtcgggtcctgagaccaggttccccctactgagacagttcctcaggtcaaaaaagaaaaacatagcacacaagctaaa

SEQ ID NO: 382948 - DNA, 100 bp, Homo sapiens
tccaagactagtctcttccaaggaagatcttgcagtgacaatgtcagtgcctactgcctgcatattgctgaggatgatggggaggtggacaccgatttcc

SEQ ID NO: 382949 - DNA, 100 bp, Homo sapiens
gagaagcgagaaactatacactcagttttaaagaagcaaaaatggtgaaaaagttcaaagactccaaaagtgtattggtgtttttcatgcaccatctcac

SEQ ID NO: 382950 - DNA, 99 bp, Homo sapiens
tgggccctgcacgagctcaaaggacactatgcaatcacccgaaagaatggtgaacacagaaatcgaggtgcaagctcaaaaagagatgggaccagcagc

SEQ ID NO: 382951 - DNA, 98 bp, Homo sapiens
aaacctttccaacacagatgtccaagctgccaaagctgtgacttgtggtccctaggggtgattatctatgtgatgctgtgcggataccctccttttta

SEQ ID NO: 382952 - DNA, 50 bp, Homo sapiens
cacctagacagcgacgatgatagccttgttgtcctcctggtgcgaagagc

SEQ ID NO: 382953 - DNA, 83 bp, Homo sapiens
ggggctgacatcagcggctctttgtatgatgacaaacgcttcgttaagggactcaggcagtacgggaagaacttcttcagaat

SEQ ID NO: 382954 - DNA, 100 bp, Homo sapiens
agctggagatgtccgagcccaaggcaattgatcccaagttgtcgacgaccgacagggtggtgaaagcatccagagctgctgttggcggattgtacccacg

SEQ ID NO: 382955 - DNA, 96 bp, Homo sapiens
ctcaatttgctggatttaagcactgctgcactttatgagattgtaaaccatggctgtgtggatacaagctcagcagctccaaggagaagcccttca

SEQ ID NO: 382956 - DNA, 98 bp, Homo sapiens
ctgagcctcctgcaacacctgcggcctcactgggacccccaggaggtgaccctgcaggaatatacagatgttgccacaggaatctaatctgaaatcgt

SEQ ID NO: 382957 - DNA, 51 bp, Homo sapiens
cctcggaagagcgctcccaggagaaacaaatgtgtcttgctgaatcagggc

SEQ ID NO: 382958 - DNA, 110 bp, Homo sapiens
ctcgtggtctaaagcttcggcacaagggcccaactggaattccacttacggattacaacagcagtgaattgaaaacagcctgcaggaagcatgagctgtatgtgagtttc

SEQ ID NO: 382959 - DNA, 97 bp, Homo sapiens
atccactattgatctgacctgcaatgattatatttcggtttttgaatttgacatctttacccgactctttcagaagtggtccaaaggcaaagttcgg

SEQ ID NO: 382960 - DNA, 50 bp, Homo sapiens
ttttcttctgggctccaattatgaaatggaagcgatccaagcagcggaag

SEQ ID NO: 382961 - DNA, 90 bp, Homo sapiens
cgcgaggctcctcactgcagcgaaggatcaggatcctcatgaccagccaaagagaagaagaattaggaagcataaatcaaagaaaaaatt

SEQ ID NO: 382962 - DNA, 100 bp, Homo sapiens
ctagcacaagaggaatcagccaggaccaatgctgaaaaacagataacgaggaaatattctgaaatggatcccaaatatttcatcttaattttgttttgtg

SEQ ID NO: 382963 - DNA, 50 bp, Homo sapiens
cctcccaatgcattgggattacaggttttgagcaaaattttggactgtga

SEQ ID NO: 382964 - DNA, 100 bp, Homo sapiens
atggcagtggccacatactttctcagaaaccttcacatcttggtcaaggatgttggttcctgcaaacaagaactgaccctatcacctctgcctcacagtg

SEQ ID NO: 382965 - DNA, 75 bp, Homo sapiens
agcacctacactggcaacattagatccacctcatacagatataagcttaccaaagtcagcaacaatatgctacac

SEQ ID NO: 382966 - DNA, 100 bp, Homo sapiens
cgcgacgcgcccggcccggagcccccagcgcagcggccgcgcaggatacagacgtccctcaccagtgccagcttggggtctgcagatgagaactccgtgg

SEQ ID NO: 382967 - DNA, 82 bp, Homo sapiens
ccagcgccacaccgacatgcccaagacccagaaggtcaatgtgacggtggactacattagaccagccagcccagccacagag

SEQ ID NO: 382968 - DNA, 82 bp, Homo sapiens
aatgtccaaagtggaccaagatctcattatgactcagaaaaagagataaaagcaacagtgtttgatgactgcaagaaagaag

SEQ ID NO: 382969 - DNA, 80 bp, Homo sapiens
agcaactggagcagcttcatcttccaggccccggccagcgccgcctggaggagcgtcctcagggtctccccgcgcccagg

SEQ ID NO: 382970 - DNA, 50 bp, Homo sapiens
cagcctcctgagtagctgtgattacagatatcggaaactggcactgaagt

SEQ ID NO: 382971 - DNA, 100 bp, Homo sapiens
ctctagcctgacaaatgcttgctgacctgggccagagctcttcccttacgcaagaaccaccagctgctgcatcccatggccaggggtggcgtccaggtgg

SEQ ID NO: 382972 - DNA, 75 bp, Homo sapiens
gtttctggccacgtgcttcaacgctctgctgcccgctgtgagggaaaaggggctatctgatgggttagagtgcct

SEQ ID NO: 382973 - DNA, 75 bp, Homo sapiens
tctgatgctgaggaggacctgtatgtctctgctggatgaaccgaatcctaacagtccagccaatagccaggcagc

SEQ ID NO: 382974 - DNA, 98 bp, Homo sapiens
tagagatgtgatgttggagaactacagaaacctggtctccctaggtagcctggtagactcgtctggtcatatcctggtccctggaatctatgatgaag

SEQ ID NO: 382975 - DNA, 88 bp, Homo sapiens
gtggatctgtgcaaagaacccggcgagagtgattgccatttggctgaagtgtggtgtggctctggcaaaccaggacagtggtgaagtg

SEQ ID NO: 382976 - DNA, 100 bp, Homo sapiens
agtggaattgcatgggaaaatcatggaagttgattactcagtctctaaaaagctaagcaattgtgggcacacttgaagctgaaaaagaaagaagaaaatc

SEQ ID NO: 382977 - DNA, 75 bp, Homo sapiens
gaggctccaagacctcatcaacaattaaggatctcacttgcttatctgaagaagattgtccaggctcatattggg

SEQ ID NO: 382978 - DNA, 100 bp, Homo sapiens
aataacagagggtgcatcaattcttcgacaggaaaaaaatttgctggatattgatgcgccagtcactggaggctactcacagtcgaactacaactccccg

SEQ ID NO: 382979 - DNA, 83 bp, Homo sapiens
ggctgatatgcaatgtcacttacaacattaatcagatactgcatttaagcttgcttggctcaggaacaacagaagagaataaa

SEQ ID NO: 382980 - DNA, 75 bp, Homo sapiens
cagactttgtatttatgttcctttttggtggattcttaatgaccatgtgtcgtggaggccgaatgtttgcaccaa

SEQ ID NO: 382981 - DNA, 90 bp, Homo sapiens
ttcgcagtggtcgcttcttctccttgactctggccatctatgaccggtttggccggttgatgtatggacaggaagatgtacccaaggatg

SEQ ID NO: 382982 - DNA, 98 bp, Homo sapiens
gggaagctgaaaccaactcagaatgcttctgagaagctggactgggcagcctttggggtcatgacccttccctccatcggcatccccctgctattgtg

SEQ ID NO: 382983 - DNA, 90 bp, Homo sapiens
ctgtatcttccctgacaagacgacctacccgatagatgagaccatgctccaggattgggaggaccaggtccgctgcgacatccgccagtt

SEQ ID NO: 382984 - DNA, 90 bp, Homo sapiens
ctcggcggttcctctgcggtgtggtggaagccgggtgggcttggactgggcgtgctccatggcagagatcctgcggtcactcaacagtgc

SEQ ID NO: 382985 - DNA, 100 bp, Homo sapiens
aaatcatgatgatgggaactcgtgaggagagcttgatgactgagaagactgttaaagcaaaaagctctgttcctgcctcagatgatgcctatccagaaat

SEQ ID NO: 382986 - DNA, 82 bp, Homo sapiens
aaggagccattatttatgtcatcaagaagaatgacgatgcggacaaggcaaaatctcagcaagttcggacctctagtacaat

SEQ ID NO: 382987 - DNA, 100 bp, Homo sapiens
ccctagcaccccgagaaccgtcagtttgagccagatggtgggcttatctaaatcagatcccaaatagtatttaaaaagcctctaccaaaagaagaggagg

SEQ ID NO: 382988 - DNA, 75 bp, Homo sapiens
cccatctcttggacagatgatgccagttaattactttgaatgtatctccatacagccaagaataaagaaagaaag

SEQ ID NO: 382989 - DNA, 90 bp, Homo sapiens
ggtgaacatggacaactggatggactttctagcagtccccccaaaaaatgtgcccgttcaacaacaaaggaggctttgaaaatgttttag

SEQ ID NO: 382990 - DNA, 82 bp, Homo sapiens
cggagtacaacgagccgcatgagagccggacaaactcagacatcgtggagttggttgaatctggcgatgtggaacccatgga

SEQ ID NO: 382991 - DNA, 101 bp, Homo sapiens
gaaaaaaaagacctgctttgccctgggaaatagtaaccctgccaaatacatcagcttgtaggagacagagttgtggacatcggatacccaaggagacgaag

SEQ ID NO: 382992 - DNA, 100 bp, Homo sapiens
ttttatcatcatattgataatctcaggagaactctatgcagaagggaagatgaagggcttctccctgctggccgagccccaggagttctgggtggacaac

SEQ ID NO: 382993 - DNA, 74 bp, Homo sapiens
ctccaggccaagagggatccttcacccgtgtctgtaaaatgtttattggaggcttgagctgggatacaagcaaa

SEQ ID NO: 382994 - DNA, 119 bp, Homo sapiens
caatatcctctgtggagaacacccccccatggaggcgaggtagagttggggtcgcagacacagaaactgatgaccagcaacttgaggaagtaccattatataatgatgtaatgctcccc

SEQ ID NO: 382995 - DNA, 85 bp, Homo sapiens
caatcaagatgaatatgaccctatggaagcagaagaagctgaggatgaagaagatggcatcctctggtatcacgattccaaaacc

SEQ ID NO: 382996 - DNA, 101 bp, Homo sapiens
atttatacttcgcaaaactcagcaattttttgatgagtattctgaaaaggaggacaaatatgaagaagaaattaaacttctgtctgacaaactgaaagagg

SEQ ID NO: 382997 - DNA, 75 bp, Homo sapiens
ccagaaaacagaaatcgaaacagatacagagatgtaagcccatgtattgttgcagcatctggcagtgagactgag

SEQ ID NO: 382998 - DNA, 100 bp, Homo sapiens
gagaaaagaaaactacttatgcagaaccagtcttcaacaaatcatcctggagctagcaggagcgagaacccgagcagcgccatgagcaacactaccgtcg

SEQ ID NO: 382999 - DNA, 87 bp, Homo sapiens
ataaaaatgccatagctattacaaatgtgaccaagaatatggcccaggtgaccaaagccctggacaaggccctgagcaccatggacc

SEQ ID NO: 383000 - DNA, 90 bp, Homo sapiens
gtcattcaaacagcatgacataactgctgctgtgacttactcgaagcctcgattggccacattttggtactacgccaaggttgagctggt

SEQ ID NO: 383001 - DNA, 82 bp, Homo sapiens
atccaggctgtactgctccccaagaagactgagagtcaccacaaggccaaggcgccagcagccctgtggtggcgacgacgat

SEQ ID NO: 383002 - DNA, 74 bp, Homo sapiens
aagaggcccaccctggagtaaccctcactggagaatccagaggccaaaaagcaaatggatttccacctgacaaa

SEQ ID NO: 383003 - DNA, 97 bp, Homo sapiens
gactgagctgttgagttagagccaacatgagtgagaaattgcaggtgctgcagtgtctgaaatttccgggcctttctcaacagaggatgtagccagc

SEQ ID NO: 383004 - DNA, 83 bp, Homo sapiens
gaaccctggtcaccgtctcctcaggcaccatgactcctgtgaggatgcagcactccctggcaggtcagacctatgccgtgccc

SEQ ID NO: 383005 - DNA, 100 bp, Homo sapiens
tacacttttggccaggggaccaagctggagatcaaacgacctatatccagactttgcctgacactgcagggtccaagagaattaaagaaatatggaatga

SEQ ID NO: 383006 - DNA, 100 bp, Homo sapiens
gtgattctgtccgacggcgacggcaccgtggagaaaggtgccatttggattgtactttagtggcacgatgtactctgagtggaggtcactgcatttggtg

SEQ ID NO: 383007 - DNA, 83 bp, Homo sapiens
tggctaatcaccaagcttaagggacaagtgagccaagaaaccttatcagccctgtatcaaatcagtcacttttatcagaatct

SEQ ID NO: 383008 - DNA, 80 bp, Homo sapiens
atattttcccaacaagttgggagctctcagagagatatctctttgttgtggtcgttccaggggtagaggaggcatgaagg

SEQ ID NO: 383009 - DNA, 90 bp, Homo sapiens
tgtatgagaaggacaacacctacttaggcatctctgggaaaggacctggggctggtgaggggcccggaggagcctttgcccgcgtgtcag

SEQ ID NO: 383010 - DNA, 75 bp, Homo sapiens
gactgtctctccagatggatccctctgtgcttctggaggcaagacttcacagagaatgcagttgtcttgacttca

SEQ ID NO: 383011 - DNA, 98 bp, Homo sapiens
ttcatgctggaatccaacaagggcaaatcaatgttggagttccagcccatcatcttcgtttcggacagagcaaacagcaacaaggagctgggtgtgga

SEQ ID NO: 383012 - DNA, 89 bp, Homo sapiens
cgacggtccccactttcccctgagcctcagcacctgcttgtttggaaggtatgttgagtctaaaaaggacagagtcacagtagtcttca

SEQ ID NO: 383013 - DNA, 100 bp, Homo sapiens
cattcagatgggatctttccggatcaatccagatggcagccagtcagtggtggagggcagcccaatggatccaatggtgatgaagagacctcagttgtat

SEQ ID NO: 383014 - DNA, 80 bp, Homo sapiens
tttcctgccaggcgccatcatcggcatagcccgggagatgcagccagtttacagacaatgcagatcttcgtgaagactct

SEQ ID NO: 383015 - DNA, 100 bp, Homo sapiens
aggatcgtgggagctaagaagatttaagtgccctgtatgctcaaaatttgtatcctcagatgaaatggatttgcatcttgtaatgtgtttaacaaagcca

SEQ ID NO: 383016 - DNA, 100 bp, Homo sapiens
caaagaaccaaaaggatcaatatttctggattcctgtatgggtgtcgttcaggccattgaacacccagttcgaaccaatcagattccacgtcagattcct

SEQ ID NO: 383017 - DNA, 83 bp, Homo sapiens
gttcacgcacgggatccagagcgccgcgcacttcgtcatgttcttcgcgccctggtggctatggaccgccccctgcaggaaga

SEQ ID NO: 383018 - DNA, 50 bp, Homo sapiens
aatcacactgcctgaggccaaagataagcaatacgagaattggagaccca

SEQ ID NO: 383019 - DNA, 98 bp, Homo sapiens
caggcgaaatgtggaaaatttcctagaagcttgcagaaaaattggtgtacctcaggagcgagctggacgccactgtggggctctgagagtcctgaatt

SEQ ID NO: 383020 - DNA, 75 bp, Homo sapiens
acagaagccgacaaggcgttcaagcgaaaacatgaccgctgagcccatgaggtgagcatgggtttatgcgtctta

SEQ ID NO: 383021 - DNA, 80 bp, Homo sapiens
caagaatgaagccgcggaccctcgcggtggattcaccaatgaacttgaagcatcctcatgacctagtcatattaatgaga

SEQ ID NO: 383022 - DNA, 97 bp, Homo sapiens
caagatctgtgctgaccacaggaattggatctactagtgcaggccttgtttgtatgaagtccagcacatctgtggttgagcttgttatgctgctttg

SEQ ID NO: 383023 - DNA, 100 bp, Homo sapiens
gatgacttctctaatcagttacgatgaacctctagtcttgctttgaaaaaatcattctgtgtaactcttgactgtgactaagttcctaatacacctgttg

SEQ ID NO: 383024 - DNA, 75 bp, Homo sapiens
cattcaacaagcttctccgccgggtgaccctggcagcaaccccaacaaacgccagaggcagccccctctcctggg

SEQ ID NO: 383025 - DNA, 100 bp, Homo sapiens
agaccgtggaagatttaacgaatggggttgtgatggcccaggttcttcaaaagatagggctctgaactcctacttcgagcctccggtggaggagagcgcc

SEQ ID NO: 383026 - DNA, 101 bp, Homo sapiens
gcgtttcctcctccagaggcctgcacgcggggcgcgggccccgaaggctctccatcgaaggcaacattggctctttattgagaaactaccaaaacatcgag

SEQ ID NO: 383027 - DNA, 96 bp, Homo sapiens
tcgtggatgaacgttctattgtcaaactctgtggttatcctttatgtcagaagaagctgggaattacacatcatctcagagttggagcacctgacg

SEQ ID NO: 383028 - DNA, 88 bp, Homo sapiens
ggatgacagcccagcactcaaggagaagcgggttctgactaataagaagacgaccttctttggtggcaattctatctctatgattgat

SEQ ID NO: 383029 - DNA, 100 bp, Homo sapiens
ccagctctcaggacaagaacaaagtgtgctgtactggagaaaatgaaactgggattgacccatcaagatgcttggctcaataagaaaaccacgttaggag

SEQ ID NO: 383030 - DNA, 82 bp, Homo sapiens
aggacgtggccactgtggccttctgcgacgcgcagtccacgcaggagatccatgagaaggattatatctgtccaagatgcga

SEQ ID NO: 383031 - DNA, 100 bp, Homo sapiens
aggtggacaccttgaaaaggaaggtggctgaacaggaggagcggcagggcatgaaggtccaggcgctggccagaggttgacggatatattcagacgttac

SEQ ID NO: 383032 - DNA, 83 bp, Homo sapiens
agggaccaaggtggaaatcaaacttttctggatatgccgcagaaggatccgtgccagaagcaagcctgtgagatacagaaatg

SEQ ID NO: 383033 - DNA, 75 bp, Homo sapiens
tgtaggctccttcaacccgtggctgatagctgaaaggtcctgcagacattcgctttgtctgggagaagaatgggc

SEQ ID NO: 383034 - DNA, 75 bp, Homo sapiens
gtctgtgtgagcagaggggagagcggccgccgccgctgccgcttccaccacagcccaataggggcacaaaacgtc

SEQ ID NO: 383035 - DNA, 74 bp, Homo sapiens
ccaatgggaatgaagacaccacagctggaccctgatgctcccataagacagaaaatgccccttgatgatctgga

SEQ ID NO: 383036 - DNA, 100 bp, Homo sapiens
tgactatcaacactgctatagtatacatgcatcgattctacatgattcagtccttcacacagttccctggaaatggctggacagactgccgctgcccgtc

SEQ ID NO: 383037 - DNA, 75 bp, Homo sapiens
ggagacacaagaagcggatccaggtgattttcttccacccccacctccacctctagatgattccagtgcccttcc

SEQ ID NO: 383038 - DNA, 80 bp, Homo sapiens
ggggacgcaggcgggtcgtagagagctttggtgccctggttgtcagatgttggaaagcagtaggacggaacatactcttc

SEQ ID NO: 383039 - DNA, 100 bp, Homo sapiens
acaatatcgaccagatgtgaaaggctcagaagtgacaaaagagaattatcaggatggcagtccttataaccagatgcttatcaacattcttcactacatt

SEQ ID NO: 383040 - DNA, 106 bp, Homo sapiens
cggagcggccaacatggcggaacgcaggagacacaagaagcggatccagggggggccctcagcctcttggccttgaacgggctgttcatcttgattcacaaacaca

SEQ ID NO: 383041 - DNA, 76 bp, Homo sapiens
ctgaacttaaaaagcagtctaaacctgtgaccacccctgaagaaattgcacagtctgaacaggaattaagaataac

SEQ ID NO: 383042 - DNA, 100 bp, Homo sapiens
cgacgtcgtgatccagaagtccagagctgaggactgcctgtttgcaggacccccgcagcaaacacaagtttaagatccacacgtactccagccccacgtt

SEQ ID NO: 383043 - DNA, 87 bp, Homo sapiens
tgctgcaatcgcttgggagagctcctgggccacccctcctttcaggtcaaggtattgttgcagcatctggcagtgagactgaggatg

SEQ ID NO: 383044 - DNA, 144 bp, Homo sapiens
ccgagcaagcactcaatcagaaagagagctccaaggagaaaatccagaagagcaaaggcgatgatgccacattacctgatgctgaaaacgccattcaacagatgggtggccagtggcttggtggaagacaaatcagaactaact

SEQ ID NO: 383045 - DNA, 74 bp, Homo sapiens
ttgagggagaaaggcgggcccgggaacagaaactggcgatggaatatgagaggagccctctggaaagaaaagga

SEQ ID NO: 383046 - DNA, 101 bp, Homo sapiens
agcggccccagcactcccagctgcgcagggcctgccaggtggcgctcggtggacccccaaaagtacaagggcatatttaacggattctcagttacacttaa

SEQ ID NO: 383047 - DNA, 99 bp, Homo sapiens
aaggccgaagccgagcagaggatctaaatacaagagtggcctattgactgtcttctgaagattgatgtctatttccttgagctctttaattttgttgcc

SEQ ID NO: 383048 - DNA, 98 bp, Homo sapiens
agtgaggctgctggagggtgacaagctcctcgcacagggccagctcttccgaggctccagcctgcttttccgccgggtgtcatcaggatcatgctttg

SEQ ID NO: 383049 - DNA, 82 bp, Homo sapiens
ctacgacaccggcgaggaacttggcaggttaaatcttcgtgaacttggacccctggcatctcatatgcgttggtttatctgg

SEQ ID NO: 383050 - DNA, 96 bp, Homo sapiens
gaaggccgagggcttcgtggatgccctgcaccgggtccggcaggtgcaccgggtataatttcttcaccatatgcaggggctgctggatttgcccca

SEQ ID NO: 383051 - DNA, 98 bp, Homo sapiens
cgtgctttccacttacctgccccaggataccctcaaactgctccctctgctcactggtctctttgccgtctcccgaccagtgtgcttttcttggagaa

SEQ ID NO: 383052 - DNA, 82 bp, Homo sapiens
gacatttgtggtacatgcagggacagatacaaacggagatatctttttcatggaggaagatgagaatgtgcctactgctcct

SEQ ID NO: 383053 - DNA, 98 bp, Homo sapiens
gagcaggaaagccagtgttgtggaccctagcacagaggaccgccgggagagcctgcccacctccccaccctggacgccgggcgcgtcccggcccccca

SEQ ID NO: 383054 - DNA, 74 bp, Homo sapiens
gtgtcggagctcaaccctgcgggctcctcgcacctaccccagcaactcaaattcaccacctcggactcctgcga

SEQ ID NO: 383055 - DNA, 101 bp, Homo sapiens
ccacttgaagaaaagggtgaaggaggcgaattttcagttgataggagctgctgctcaagaggtcatcaaaataatcaccaaacaatttgtaatttttaata

SEQ ID NO: 383056 - DNA, 82 bp, Homo sapiens
cccgggcatggtggtctggggcaacgcggaaggtttggtgcacctcgatttggaggaagtagggcagggcccttatctggaa

SEQ ID NO: 383057 - DNA, 82 bp, Homo sapiens
ttcgaagtggctgtgggtattgctgcggctggtgcgtcgtcgctctaggatccctggagttgcagctaccagacatggtgcg

SEQ ID NO: 383058 - DNA, 75 bp, Homo sapiens
ccaggctgaccccttgagcagcagtcagcacagattcttggtgccaccattgagaactccaggattgtcctgcag

SEQ ID NO: 383059 - DNA, 117 bp, Homo sapiens
agctgtgcaaacactccagatggaactccagcagatcatgaaggatcagagtctgtagaaggcttcttatctccaagtcgttgtggcagtcgaaatggagaaaaagactgggagaat

SEQ ID NO: 383060 - DNA, 98 bp, Homo sapiens
gtttgtagaagaggagcatctgctccaggtgctggagaatctggtaaaagcaccattgtgaagcagatgaggatcctgcatgttaatgggtttaatgg

SEQ ID NO: 383061 - DNA, 75 bp, Homo sapiens
tttaatcaaaggacaatttcttttacctgtcatttactccatcctttatagtgatgctacaggacgaagaggaat

SEQ ID NO: 383062 - DNA, 98 bp, Homo sapiens
agcccgccgctgcgcccgacgctccctgtctgggaccttctccctgcctggacccctactattgcaacaagattattataagtataggcctcatgttt

SEQ ID NO: 383063 - DNA, 116 bp, Homo sapiens
ttcagaaggatatcgacgtcgtgatccagaagtccagagctgaggactgcctgtttgcagcctcaagtactacagccttccagcagccttcccagacccacagatcacacccaggg

SEQ ID NO: 383064 - DNA, 75 bp, Homo sapiens
attttatgttgtgtcatttcgaaggcaaacggggattcagcgtccgatcctttggaacagggactcacgtgaagc

SEQ ID NO: 383065 - DNA, 75 bp, Homo sapiens
tattttgatgaaaatgctgctgaggaaaatgtttataggaggccttagctgggacactacaaagaaagatctgaa

SEQ ID NO: 383066 - DNA, 50 bp, Homo sapiens
gtgggggtgtgcaaacccgagagaactggctgtgcctgagctgaagcttc

SEQ ID NO: 383067 - DNA, 100 bp, Homo sapiens
gcagctggagacagagctgagggagcaagaggtgtcggaggtctcatctttgaactactgccggagcttctgccaggcacagtgtggatacaagtccagg

SEQ ID NO: 383068 - DNA, 90 bp, Homo sapiens
aagctgaataaagctgttttggaactgtcaggtacctcaaagcgtgttggagcgggccggagagaagtagagtgggctgcgaggagaagg

SEQ ID NO: 383069 - DNA, 49 bp, Homo sapiens
ggaaaatggagcccttcaccaatggtgtctgaacacacacaattaagtt

SEQ ID NO: 383070 - DNA, 86 bp, Homo sapiens
aagggaccacggtcaccgtctcctcagacggcgggcgctaacaccaccgacaaggagctagaggttctctccttgcacaacgtcac

SEQ ID NO: 383071 - DNA, 75 bp, Homo sapiens
ttcctggagttcacgactctgagtgctgggatcaaaggaagcagttccaggtactggtagagaacaagttttatg

SEQ ID NO: 383072 - DNA, 83 bp, Homo sapiens
gacggcggcagcgctggactaggtggcagactctcagcgttctcatctctcttccttcaccatgaagctgatggacaaattcc

SEQ ID NO: 383073 - DNA, 100 bp, Homo sapiens
gaattatttgctgttggatcgtttcatactttacgcttgtgtgataaaactgggggccgttgctccagggagaactgcaaatatcttcatccacccccac

SEQ ID NO: 383074 - DNA, 100 bp, Homo sapiens
ctcagcgccgcggggatgggggcctcgggcgccccgcagccccccaacatcctgctcctgctcatggacgacgccacggcatatgcctccaaggacgggg

SEQ ID NO: 383075 - DNA, 90 bp, Homo sapiens
ggcgctgacaagggtccagcctccgatctggaacgtggtgggcatccagggatccctgctcagcattttcgtggagcccatttacttctc

SEQ ID NO: 383076 - DNA, 100 bp, Homo sapiens
acggccacgaccccgcgagcggcggcatcttctcctccgactacaagcggacctgaaggagaagaaggagaaggtggaggagaaggcaagccggaaagag

SEQ ID NO: 383077 - DNA, 100 bp, Homo sapiens
ggtccagaacccggccctcaccgccctcaccacccctatccagacggctgcccttcaagtaccacaactgaccaaccacatccgggagtcgctgccggcc

SEQ ID NO: 383078 - DNA, 50 bp, Homo sapiens
ggcctaaaacttcggcgttggcacgtttcctgtggcagcctaagagggag

SEQ ID NO: 383079 - DNA, 100 bp, Homo sapiens
cataaaaatcactaaggaaagaactccagaaagtgaagaagaaaatgtagaatgggaaactaatagagatgatctgttacctaaagcaataaaaaatggc

SEQ ID NO: 383080 - DNA, 120 bp, Homo sapiens
aggcggaagaccgcgcgcagggcctgcagcgggagctggacggcgagcgcgagcggcgcgagaaattgcagagtgggcaggatcttaagacccgataggtgcagaacccatctggacacg

SEQ ID NO: 383081 - DNA, 100 bp, Homo sapiens
ctgtgacctgctggcattgaatgatttatagctaagactccaggacacccctgaagccgagaaatgcaggtaaataaaggcagctaaagctgactgctgg

SEQ ID NO: 383082 - DNA, 80 bp, Homo sapiens
ctcaaccccatccactgccgcggccgtgggcccgaccgcggggacccgagaccttaatggacagaatcaagaaacagcta

SEQ ID NO: 383083 - DNA, 75 bp, Homo sapiens
catctccagatgctagggttatgggaaatgctgaatgttcatgatcattatcagaacatgaaacatgtaatttca

SEQ ID NO: 383084 - DNA, 82 bp, Homo sapiens
agaagttgggctctggtgaaccgtcacattcagttaaagttcacacagttcctaagccagaattaaagctatagagagtccc

SEQ ID NO: 383085 - DNA, 82 bp, Homo sapiens
gagccaccagcgcagcgctgccatggagcccagcagcaaggccactgcagaacaaattagacttgcacagatgatttcggac

SEQ ID NO: 383086 - DNA, 101 bp, Homo sapiens
gctggacagatgaagagtgacttgtttctggatgattctaagagattctgctgaagtgatccagtctcgagtgaacgaccaggagggccgagaggaattct

SEQ ID NO: 383087 - DNA, 83 bp, Homo sapiens
tgatccgtctggccgccggccacctggtccagctgcccgcaggggtggttttaaaatcaaagatgggaaaatcggagaaaatt

SEQ ID NO: 383088 - DNA, 100 bp, Homo sapiens
aggaagtagaagtgctgagtaagccgaggatttgattgccttatgtgacaagcccaagatctgtgacagttggagctcaaactaggcagtcttgattcca

SEQ ID NO: 383089 - DNA, 90 bp, Homo sapiens
ggcagccgacggcaaaggtgtcgtggtggtcattaagcggagatccgactgattcttgctattccaaatcctcttccacgttgacagccc

SEQ ID NO: 383090 - DNA, 82 bp, Homo sapiens
ggccaagcatgggcaaccactcaggacggcccgaggatccggaaccagacaatgcagatcttcgtgaagactctgactggta

SEQ ID NO: 383091 - DNA, 75 bp, Homo sapiens
gcggtctgccaggagctgcggccccgtccggcccgggctggtttctgagtcccttcaacatgatcctgggaggaa

SEQ ID NO: 383092 - DNA, 76 bp, Homo sapiens
gctcttctcacagaaggaagataaactccacatatttctaaagcatccctggagaacagcctggaggagaccaaag

SEQ ID NO: 383093 - DNA, 75 bp, Homo sapiens
ggcagcggggttcgggcgatgctgcagggtggttgtgtcaaaccgattggtgacatctccatgctgtattgtcac

SEQ ID NO: 383094 - DNA, 141 bp, Homo sapiens
ttggaggagtactactttgaacagcatagagccaatcacattttgcacaagggcagtcaccatgaaaggcatctccttggaaacaatgccatctttgaatgtgagagataaacctagtttcagcatgtctgcagcagagac

SEQ ID NO: 383095 - DNA, 83 bp, Homo sapiens
tgatgcctgcagagctgtggcttaccagaaatctgacccggtcgtctcgtaccgcgagacggtcagtgaagagtcgaacgtgc

SEQ ID NO: 383096 - DNA, 90 bp, Homo sapiens
gagagagatggccagagtagcccccagcccagccccaggacattttcacaggaagattcccagcctgtagttcatgtaattgcttcccgg

SEQ ID NO: 383097 - DNA, 100 bp, Homo sapiens
gaggctgtaagaagaaataatatttatgaactgaaccctaataaggagccatggagaaaaatggatcttaggtgatcctgcagcatatcctgacatggag

SEQ ID NO: 383098 - DNA, 83 bp, Homo sapiens
caaggactacctgcggttcgccccgggcggcgtcggcgactcgggccccggagagtgcctccggagccagcgtggtggccata

SEQ ID NO: 383099 - DNA, 74 bp, Homo sapiens
aaagcaggcgaacccgcggcgcaataacgccactcatctctgcccagctgctgccctccccaggaggcctccat

SEQ ID NO: 383100 - DNA, 100 bp, Homo sapiens
tagatgcactgttggcttgcgagacaaatatgtgtgccccctaccaccggagccagagaatggtggctacatctgccacccccggccctgcagagacccc

SEQ ID NO: 383101 - DNA, 137 bp, Homo sapiens
ggggacccagaccctggagcctcagttggaagcagccgatccagcctgcggagcctgtggggcaggtctctgagcggcccctgatgttcctgttggacactcctggcgtgctggctcctcggattgaaagtgtggag

SEQ ID NO: 383102 - DNA, 75 bp, Homo sapiens
ctgtgacgggagcaatgctgacctcggtttcctggacccattccgactcagtcgagcaaaagatgtgataatacc

SEQ ID NO: 383103 - DNA, 100 bp, Homo sapiens
gtgaagcagccgagaccgacccgcccgcccgcggccccgcagcagctccaagaaggaaccaagagaccgagatgtctctgcccacccacgcaacccagac

SEQ ID NO: 383104 - DNA, 101 bp, Homo sapiens
accaccgtgaacggacagtcccccccagactcagcccacctgcacccaggtgaaataaacagctttattgctcacacgaagcctgtttggtggtctcttca

SEQ ID NO: 383105 - DNA, 100 bp, Homo sapiens
cccaaggaccctgtggaaatgagacgcattaacttccagactccagagatgcccgagtggtaaaagacatggcaacaggaaagtctaagggatatggctt

SEQ ID NO: 383106 - DNA, 82 bp, Homo sapiens
acatcttgctggatgaccacggcggggactgtgaaccgaggcagtgaggtgattgctgctgggatggtggtgaatgactggt

SEQ ID NO: 383107 - DNA, 112 bp, Homo sapiens
cggctctgccgtatccaagacagtatgcaaggccacgacccacgagatcatggggcccaagaaaaagcacctggactgacattcagtcagaagaaggctgctattgaaagag

SEQ ID NO: 383108 - DNA, 80 bp, Homo sapiens
agtttgagccccggaggcagagcggctgccatgagtaccaagttcgatccatagcaagtcatgttcgtcctgacaggcag

SEQ ID NO: 383109 - DNA, 78 bp, Homo sapiens
tgaaactgaaggctgaagattttatagtggatgaaaatttctaccttgaaccgtatctgaaagaggttattcgggaaa

SEQ ID NO: 383110 - DNA, 100 bp, Homo sapiens
aaacaaggcttccagtgccaaggcttcattccagcgctccaatagtcatgacaaagtaaggagaatagttgcagaggagggtcgtacagcaagaaaccta

SEQ ID NO: 383111 - DNA, 90 bp, Homo sapiens
gaaattttcatcaaagatgcaaatttgacaggcctctctggttgacaccaaaggagtggtaaaacgttcttctccaaaacattgtcaggc

SEQ ID NO: 383112 - DNA, 100 bp, Homo sapiens
caagggggatcagctctattatttcaaagatgaagatgaaaccaagcccttgtcactgtgtgcccagtattctgcagacaaacgagaagatgagaagatg

SEQ ID NO: 383113 - DNA, 98 bp, Homo sapiens
tacgcgctctggaagacattgaacgggaaatcggcgccatccttcagaatgcagacaccattcgcttttcacccaagatgatttgatgtcttataaaa

SEQ ID NO: 383114 - DNA, 90 bp, Homo sapiens
gcgacagggacttggactgcagcgatggcagcgatgaggaggagtgcaatcctcgctgctgacgataaggagctgaaccggtggtgctcc

SEQ ID NO: 383115 - DNA, 80 bp, Homo sapiens
caacagcattgacccagctctacggcgatttgaatctggtggaattgctccagcttcctggtttagaggaagacaaagcc

SEQ ID NO: 383116 - DNA, 100 bp, Homo sapiens
aaccgacgtcaccggatgcctggatatgagaccatgaagaacaaagacacaggtcactcaaataggcaggccaactgtgatttgagacggcagattgatg

SEQ ID NO: 383117 - DNA, 75 bp, Homo sapiens
ggaggcgggacatctccagcaccctcatcgccctggccgacaagcacgcaaaacgggctcatgtcggggctgatg

SEQ ID NO: 383118 - DNA, 100 bp, Homo sapiens
cagcctcggtggccccgacatgattccttacttctccgccaacgcggtcatctcgcagaacgccatcaaccagcttaaccctccactgagtgaagaaatg

SEQ ID NO: 383119 - DNA, 100 bp, Homo sapiens
ggaaaatggcggacgggaaggcgggagacgagaagcctgaaaagtcgcagcgagctggagccgccggaggtgccgtgagcgatgtggagatgcaggaaca

SEQ ID NO: 383120 - DNA, 100 bp, Homo sapiens
agcttccatcctggttcttccaaagtgcccggacccaaaacaggaagcggcatcctcatgtatggggccctggtgctcttcgagtctgagttcgtccacg

SEQ ID NO: 383121 - DNA, 98 bp, Homo sapiens
tggtgatgcttttttacaccttcttccacatgccaacagagcacttatggcaaggcatctcgagggggtggcaatcaccaaaacaattaccagccata

SEQ ID NO: 383122 - DNA, 50 bp, Homo sapiens
tcagactcctcttttttatccatggcaggcttcttctcatatcggtaatt

SEQ ID NO: 383123 - DNA, 98 bp, Homo sapiens
ccactgtgtacatgaaggtggacggagagtattatgcagatatgccagcagaagaaagagaaaagaaattggcttcctgctcaagacaccgattccgc

SEQ ID NO: 383124 - DNA, 100 bp, Homo sapiens
ggcacctacattgacaagaaatgccccttcactggtaatgtgtccattcgagggcggatcctctctgggcccaccagctctgagcagatcatgaagacag

SEQ ID NO: 383125 - DNA, 100 bp, Homo sapiens
ctggcgccaggcgcggaggactcccggtatcttttgacaggctggcgcctcggctctggggacccgcagggagatgtcctttgcttctcagatgtaaatg

SEQ ID NO: 383126 - DNA, 50 bp, Homo sapiens
cgtcatcctgatcttggaactgccctgttaaacctggcagagcgactggg

SEQ ID NO: 383127 - DNA, 89 bp, Homo sapiens
gacggcggcagcagcggcattcagatggcagttgaattcctgcatgaactgaatgttccatttttcaaagttggatctggagacactaa

SEQ ID NO: 383128 - DNA, 75 bp, Homo sapiens
cgtcattggttacaactgagtcccaccgatgcttcaaatttaacagtgctgaagatgctgcaagcaccaaatcat

SEQ ID NO: 383129 - DNA, 100 bp, Homo sapiens
ggcgcggcccggggtgtcagtgtggaggagactgagggcgtctctggccgagcctctttttgtggaaaacgacagcagcagcagtggcctggaagacgcc

SEQ ID NO: 383130 - DNA, 74 bp, Homo sapiens
gggctcatcaactcctacgaggacaaaagcaacgacttcgtatggtgttggggatgtcctttgcactgaccctg

SEQ ID NO: 383131 - DNA, 75 bp, Homo sapiens
gaagaaacttgtgaacgaagataagtggagaggcaaggtcatccctgagctgaacgggaagctcactggcatggc

SEQ ID NO: 383132 - DNA, 80 bp, Homo sapiens
gcaggcgcctacatcctaactcgatttgctgttatacattggctcttcaaagacgttcacctcatcagagaaatccctga

SEQ ID NO: 383133 - DNA, 100 bp, Homo sapiens
gcggcttcctagtgagtcggcggctgatttagaaggaggttcaggctacggtgagccgaaggccaaagcacccctacgcagaaaggagtaggcattgctg

SEQ ID NO: 383134 - DNA, 75 bp, Homo sapiens
acagcctctgccttcgtggagtgggcattttcaggaaaatgttggggcttttcaggaagcataataagattccta

SEQ ID NO: 383135 - DNA, 71 bp, Homo sapiens
tgttgactcacaatgatccaaaagcaatggctgccatccggaagaaactggtgattgttggtgatggagcc

SEQ ID NO: 383136 - DNA, 80 bp, Homo sapiens
cgctcagctcctggggctcctgctgctctggctcccagtggatcaggcagatccatttgcacatgtggctgcccttcact

SEQ ID NO: 383137 - DNA, 82 bp, Homo sapiens
gtccacccaccgccgccgcctcccagtaaaggcatgacttcctggcaccacagggaaaatcgggtgcaagcccagaaactat

SEQ ID NO: 383138 - DNA, 100 bp, Homo sapiens
agtcactgaagatttttagaagaccaaggaaactgttcatgcaaacaggttgtttacattcagagctctatcaataagaggaatacatattacagtgaat

SEQ ID NO: 383139 - DNA, 97 bp, Homo sapiens
cccaagctctgggcaagacctgctgggaggccctggtcagccccgtggtgcagaacatcacctcccctggcagcctttcgtccagcaaggcatccca

SEQ ID NO: 383140 - DNA, 147 bp, Homo sapiens
cggctgcaggaagtggctttttatcagttgcaacaggactgtgacctgagctgtcagatcaccattcccaaaggtgaatcaattccaataaggctatttttagcaggatatgacccaactccaacaatgagagatgtgaacaaaaaa

SEQ ID NO: 383141 - DNA, 101 bp, Homo sapiens
tggaccctcccgatgtggtgaagaccacgccctgtgcacgcttggaatgctggatcggcccccagagagaagccctacccatggacacagaggtgtacgag

SEQ ID NO: 383142 - DNA, 98 bp, Homo sapiens
cggagttcatcgtgcagacgagctcctacatgttcgtggacgagaacacgttctccaacgacgccctgaaggaactagaacagtctttggctagctgg

SEQ ID NO: 383143 - DNA, 75 bp, Homo sapiens
ttataggcgtgagccaccgtgcctggctgaaggtcctttcccataacctgtgcacggtgctgaaggttcctcatg

SEQ ID NO: 383144 - DNA, 75 bp, Homo sapiens
gtgctgcacactttcaagaccaggttcacacagccgctgctgcctgctttcacgccttcatctcctcgtcctcca

SEQ ID NO: 383145 - DNA, 83 bp, Homo sapiens
tccaggcagcattaaaacttaagcagagagagccaggtagagctccgggaacaaattgacaacctagccacaggtgagtgagc

SEQ ID NO: 383146 - DNA, 50 bp, Homo sapiens
tgccaacgggacagacagtataatggacagagctcggatagagagtccag

SEQ ID NO: 383147 - DNA, 102 bp, Homo sapiens
ttgaagatgatcaggaagtcattcgcttccagaagaatcatggcacaattacaacagcagtgaattgaaaacagcctgcaggaagcatgagctgtatgtgag

SEQ ID NO: 383148 - DNA, 82 bp, Homo sapiens
catcattacaagacagacagtctccagggaggacgcgtggtgcactgcctcgtgtctgtggtctttcaaatgaccatcctga

SEQ ID NO: 383149 - DNA, 101 bp, Homo sapiens
tgatattgctgccaatccaaaggtattaaaatggatgacagagcttacaaaactgcggaagcaaattaaaggcctccccatggccacccatggaccagtcg

SEQ ID NO: 383150 - DNA, 101 bp, Homo sapiens
gtctgtgccgacaagatggcggacggggagctgaacgtggacagcctcatcacccggctgctggagggctgctctttggcgtaaattgcaatcgattaggg

SEQ ID NO: 383151 - DNA, 100 bp, Homo sapiens
gattcgttggctgccgtccccgctgctgtgcattgggagtccaggcatgataaagaaaagatagaaaagaaagagaaacgggacagttcaggaggaaagg

SEQ ID NO: 383152 - DNA, 83 bp, Homo sapiens
tggaagcagccgatccagcctgcggagcctgtggggcagtcccacaggatcacatgttgaatggtgtaaacagcttatagctg

SEQ ID NO: 383153 - DNA, 100 bp, Homo sapiens
agtgggatgcagatgaagatgttgatcggaaacactggcttatcacacagactttcagccaccacaatcagctggcacagaagacccggcgggagaagag

SEQ ID NO: 383154 - DNA, 100 bp, Homo sapiens
cccctatggcagatttgaaaattcacccttgtagagtcattcctgcctttgagcggactcccttttaaggaggcctactgcgcgtatgccatcatcctca

SEQ ID NO: 383155 - DNA, 90 bp, Homo sapiens
tccccagtagcattgtccgagaggaccagaccctgaaacctggcaaagtcgatgtgaagacagacgtttggtgcacctcgatttggagga

SEQ ID NO: 383156 - DNA, 100 bp, Homo sapiens
cggcttcttctacacactgttcctgcactgcctggtcttcctgatgaaggatttgggggcagagcacttggcaggtcatgaaggggtccaacttctcggg

SEQ ID NO: 383157 - DNA, 83 bp, Homo sapiens
tgataagctccgatatttcatcattgaaggagggtatcatgaactgatcactaaatatgggaagttggagcctttggcagaag

SEQ ID NO: 383158 - DNA, 100 bp, Homo sapiens
aaccttcaaccatctggggaaaaggcaaaaatcccatctaccgcaactctcagttcgagagtaaagatatattcgactttatgggagaaaatttagcaaa

SEQ ID NO: 383159 - DNA, 100 bp, Homo sapiens
gatcatatttgatgacttccgagaagcatattattggcttcgtcataatactccagagggagcgaagaatggtcaagaaagtggactcgaaattggaact

SEQ ID NO: 383160 - DNA, 100 bp, Homo sapiens
cagcagctgcagctcggaggaaggaaggtaaatactacagtgaggaggccgaggtggatctgcgggaccctggcagagactatgagttatacaagtacac

SEQ ID NO: 383161 - DNA, 100 bp, Homo sapiens
gggattctcgacctgctaacagaactggaccttttcgatatgtcttgtcgttcaagacttgcaacactaaacgagaaattgacagcccttgaacggagaa

SEQ ID NO: 383162 - DNA, 100 bp, Homo sapiens
ctacttgcatgaccaaagccaagatggcagctggtggatgattacgtggcctctgagggtgcagtacagcgagttctggtccctgcttatgccaagcaac

SEQ ID NO: 383163 - DNA, 97 bp, Homo sapiens
aggccctaggccattaaatcctgtaactcaagctcccttgccacctggggccgcctttttgcctatcctgacactcaccgccatcgcctgggaccca

SEQ ID NO: 383164 - DNA, 87 bp, Homo sapiens
gggccactggagtcaaggcttgaagatttctatgcaggaccccaaaatgcaggcgcatattaaatttcctattgactacccctattc

SEQ ID NO: 383165 - DNA, 74 bp, Homo sapiens
cttattgcctccaaaatatttttaactgcagaggtttgaagatcagcttcagcaatggttgtctgaagactcag

SEQ ID NO: 383166 - DNA, 75 bp, Homo sapiens
cacaaacttgaagatggatatcagctacagactttcctgagtcaggagttttgagagcaaaatgacaacacccag

SEQ ID NO: 383167 - DNA, 122 bp, Homo sapiens
ctcatattctacttcattcagaagatcaggtacacaaatgcacgcgacaggaaccagatgacagaaggcaggcactgccaggtgcacctcctggatgataggagactggagctgctggttca

SEQ ID NO: 383168 - DNA, 97 bp, Homo sapiens
gccaccaccagcaccacgggctccaccctgctgcagcccctcagcaacgccgtgcagctgcccatcgaccagacgccttcctgagtcctggatcttt

SEQ ID NO: 383169 - DNA, 78 bp, Homo sapiens
cacatttgtgatgatagccagtcccgagagccagatgctgaagagtttctggcagaaggtttgcggaatgagaacctc

SEQ ID NO: 383170 - DNA, 100 bp, Homo sapiens
gccatctcttagtccagcaagtcctcatagccaggacggaagtgaaaatgtgacaggattggacctttcagatttcccagcattagcagaccgaaacagg

SEQ ID NO: 383171 - DNA, 100 bp, Homo sapiens
ccaggcatggaacccgagaccacagccaccactattctagcatccgtgaaggagcaggtgtcatggagaaactccagctgggcccagagattctgcagcg

SEQ ID NO: 383172 - DNA, 82 bp, Homo sapiens
gatggaggggattttgtcagcttgtcgtcaaggcaccatgactcctgtgaggatgcagcactccctggcaggtcagacctat

SEQ ID NO: 383173 - DNA, 75 bp, Homo sapiens
ccttggggggcaagataattagcagtaatatagtttctggctcttgatggaaatgtgtatgatcatctcaaggat

SEQ ID NO: 383174 - DNA, 100 bp, Homo sapiens
atagcgtccgctaggctgtctgcctcggtacctgttactgctgctacttcctcgtttgacaccttcctgggtaagaatgattgatgttggctgatattgg

SEQ ID NO: 383175 - DNA, 75 bp, Homo sapiens
ccggccgcccgacaccccaatctcgggcgatgccagtccctccactccagaggagaacgaaaccacgacaaccag

SEQ ID NO: 383176 - DNA, 98 bp, Homo sapiens
gggaaagatgccagaatctggtttcaagcgattatccagtacacattgataagactcctgaaacagactactctttgcctttttgctgcagttggaga

SEQ ID NO: 383177 - DNA, 100 bp, Homo sapiens
gcaaagctgtggaagactccaagccctactgggaggcacggagggtggcgaggcaggtgctctggggccaggtgccaccggccattgtccaggcagctgt

SEQ ID NO: 383178 - DNA, 75 bp, Homo sapiens
ttaacactactcttcgttataagctctcgtctggggcaactcagaagaacaccctcaaactgacacaagacctac

SEQ ID NO: 383179 - DNA, 100 bp, Homo sapiens
ccggttcgtcgcctccttgcccgtgaccgtcgctagaactcagttgtgcgttgcggccagtcgccactgctggaaggtgaagaaggagctggaccctgac

SEQ ID NO: 383180 - DNA, 95 bp, Homo sapiens
tcagtaaagaaaacaaggaagttattcaagagctgaataattgccagcatgctgatcccattttcaatgaagaattgcttccagttactttgtaa

SEQ ID NO: 383181 - DNA, 95 bp, Homo sapiens
gggagtcgaagcgagggtctgaagttcacgactactagaaggggaggggagtggaaaggctctcagtgaaaaagagtctgccccaaattctccaa

SEQ ID NO: 383182 - DNA, 88 bp, Homo sapiens
gacatgctgaccaaggtgatggccctagagctcgggccccacaaggaaacagcaaacgccattcgctcactcgagttagataaacact

SEQ ID NO: 383183 - DNA, 101 bp, Homo sapiens
tgaaggaaaagacagtgtagtcctgcaaaacattttgaggcatctgggtcacaggccccagttccaccccctgaagcacggatttgatgagtggtttggat

SEQ ID NO: 383184 - DNA, 90 bp, Homo sapiens
ccgggcctggaatccctacgcgtccctttgggtttagcacgatgagctcaatcggcactggggctctgtgtgctccgggatggagcaggt

SEQ ID NO: 383185 - DNA, 100 bp, Homo sapiens
acttgatatggtggaggacacagaaggttacagaactcaataatgtgaagaacgtagctcgattgccaaaaagcaccaagaaacatgccatagggattta

SEQ ID NO: 383186 - DNA, 74 bp, Homo sapiens
ccagtgggaaggggtaccggcaagagagaaaaaactcaggctgtggaactctggcagactgtttctcaggagtt

SEQ ID NO: 383187 - DNA, 75 bp, Homo sapiens
ctgggtcctgctgcgtttataaaccatgtttcagaatggcttcggttattgcctttccttggtgtactcgcactt

SEQ ID NO: 383188 - DNA, 50 bp, Homo sapiens
tttttgagaaggataacattgccaggtggtgacagcaggagcaatcatcc

SEQ ID NO: 383189 - DNA, 75 bp, Homo sapiens
gataaagtgattttttgcctttgttgattaactggacaaattcagctctaagcgaaagacatgaggcctcagcct

SEQ ID NO: 383190 - DNA, 98 bp, Homo sapiens
cactgccagatgtgtgtcccaaggaacccacagggaaacactactatgaagtatcctgtcatgaccaagggttatgcagggtcgggtggtctaccatg

SEQ ID NO: 383191 - DNA, 119 bp, Homo sapiens
ggcgtgactataaatattcatactggagattgggtacgaaaaggtggtggaggtggatacagcagtcggagaacatctggcagagacaaatacggaccacctgttcgtacagaatacag

SEQ ID NO: 383192 - DNA, 71 bp, Homo sapiens
ctcgacctgcggcagtacttgggcaatggacctcatcatgaccgttgctgtacttacaatgaaaacaactt

SEQ ID NO: 383193 - DNA, 80 bp, Homo sapiens
ggaactcaacctgactggctccttctggaatgactcctttgccagggcagccccgagaaccacaggtgtacaccctgccc

SEQ ID NO: 383194 - DNA, 83 bp, Homo sapiens
gtagccaccagtccaactcgggtcgcccccaccattatttcggaagctcttcgtgggcggtcttgactggagcacgacccaag

SEQ ID NO: 383195 - DNA, 115 bp, Homo sapiens
gcaggacgaggtgtcggcgcgggagcagcacttccacagccaagtgcgggagtccacgatgatgactttgaccagtttgataagcctggcgcggaacggtcgtggagaagaagag

SEQ ID NO: 383196 - DNA, 75 bp, Homo sapiens
caagtccacaacctgcttctcacctacctgatagtgaataaccctataccttccaatttgaaatcagaagcaaaa

SEQ ID NO: 383197 - DNA, 100 bp, Homo sapiens
cttatgaacgccttgttgcccagttccccagttctggcagattctggaaactgtacattgaagcagaggagtatgctgctgctgttccgctttgcgtcct

SEQ ID NO: 383198 - DNA, 75 bp, Homo sapiens
catggagacattcttgcgctgcatcgaagcctcagattgtgttcagtgtggacccctccgagggcagccctggtt

SEQ ID NO: 383199 - DNA, 76 bp, Homo sapiens
aacaagtgctcctacattctgcaaaatgatgcttcaacacccaggccaggtctctgcctcggaagtgagtgcttct

SEQ ID NO: 383200 - DNA, 104 bp, Homo sapiens
gagcgacaagccgctggcagccgcggatctcaccgccgctcagggtctcggcgcggaagatggccggcggcgtggacggccccatcgggatcccgttccccgac

SEQ ID NO: 383201 - DNA, 100 bp, Homo sapiens
ggatgatgtaaaccttattctggccaacagtgttaagtataatgtgagcagtgaagattcagaagattctgattttcaggaatcaggagttagtgaagaa

SEQ ID NO: 383202 - DNA, 90 bp, Homo sapiens
tgagcgccgggtggctgctgctggaagatgggtgcgagatgaggagcgggaaggcctcctgcaccctggagaccgtgtgggaagacaagc

SEQ ID NO: 383203 - DNA, 75 bp, Homo sapiens
aaatggctgaaggaaaacctccttatgctgatatacatccaatgagggtgagtacccagaacatgaagatgggtg

SEQ ID NO: 383204 - DNA, 98 bp, Homo sapiens
ttcaagaacttcctcgcactgtgacatgtctgatcccttgctcccatccctgcagcatgaacaagtgcatacattcccttgaataattacttggtgtt

SEQ ID NO: 383205 - DNA, 74 bp, Homo sapiens
catttctatggtcctcctcacctatggccgctggcaggatgaccatgaaagctgtggttctaattctaccaacc

SEQ ID NO: 383206 - DNA, 80 bp, Homo sapiens
gacgttcggccaagggaccaaggtggaaatcaaacgttatgatgtgattgctcaagcccaatctgggactgggaaaacgg

SEQ ID NO: 383207 - DNA, 100 bp, Homo sapiens
atcttcaaagcctttgctatgatcattgacaaactggaagaggaccctgatgctcccataagacagaaaatgccccttgatgatctggatagagaagatg

SEQ ID NO: 383208 - DNA, 50 bp, Homo sapiens
caagaatctcaataacagtatggctgacaaacgggctcatcataatgcac

SEQ ID NO: 383209 - DNA, 100 bp, Homo sapiens
cgactccggagacagcccaaatatcctcggaagagcgctcccaggagaaacaaggatcgaaaattgtacaatttgggattaaaaggctattacatcagag

SEQ ID NO: 383210 - DNA, 100 bp, Homo sapiens
cggcactgttagaatctgggactttcttcgttgccatgaggaaagaattctccgagcctgccctcaagtatgtgttgtatacattggttggctttgtggg

SEQ ID NO: 383211 - DNA, 100 bp, Homo sapiens
taaatttctcagtcttttactatgagattctaaactctcctgaaaaggcctgtagcctggcaaaaacgaaacccaagtctgatatggtgaggacttccct

SEQ ID NO: 383212 - DNA, 100 bp, Homo sapiens
gggatgtctggcgctggcagagctgggcaggagaggcctgttgctgccgtctcgactcgtggatgactgggccagtgccattcgcgtcgcagctctggac

SEQ ID NO: 383213 - DNA, 75 bp, Homo sapiens
gtgaccctcagcgccggtgcatgtcgatgacttgaaagaggagattgatattcgactctccagggttcaggatat

SEQ ID NO: 383214 - DNA, 78 bp, Homo sapiens
aaaatcataacaagcggttctctaccctgtaaagagaatgaagacctttcgaatccgtcaaaacctatacagaatcaa

SEQ ID NO: 383215 - DNA, 124 bp, Homo sapiens
cggggaacgactgcggcgcgctgctggacgaagagctctcctccttcttcctcaactatctcgctgacacgcaggtgagaagccctaccactgcaactgggacggctgcggctggaagtttgcg

SEQ ID NO: 383216 - DNA, 97 bp, Homo sapiens
cttgcagactgtggcgcaactggtcttggtagcggaggcacccgaatgctgcccgggtgagacaatgcagatcttcgtgaagactctgactggtaag

SEQ ID NO: 383217 - DNA, 82 bp, Homo sapiens
cctcggccttccgacgtgggcggtgggccccagccccacagaccagcccagcattcagagatcctgaaggagctagacgagt

SEQ ID NO: 383218 - DNA, 75 bp, Homo sapiens
aatcaagaagctgaatttccaggccttcgccgagctgtgcaggggatcctcttggtgtatgacatcaccaaccgc

SEQ ID NO: 383219 - DNA, 75 bp, Homo sapiens
cgaacgaccaagagggtgttcgactgctagagccgagcgaagcgaatactcccccagttgcaagaggcgcaggac

SEQ ID NO: 383220 - DNA, 100 bp, Homo sapiens
gaaggttttgtggtgatgcagtcaaatgatgttgacatctactactacatggatgagccaggttgttgcttagaatatgctaccatgttggataaagaag

SEQ ID NO: 383221 - DNA, 88 bp, Homo sapiens
gcttttctgatatgatgggaaatacaaatgaaccaagcacacgtgtccgagactggagtgtcatatctcagcttctcgccccttgatc

SEQ ID NO: 383222 - DNA, 100 bp, Homo sapiens
gggctgaagcgactgagtccgcgatggagctcggggtgtggttttctctcggttgtgcctatttggccttggaagactatcaaggttcagcaaaggcatt

SEQ ID NO: 383223 - DNA, 87 bp, Homo sapiens
gcccctgaagcccctcagcgactcagaccctgacagtgacaaagggcttcgtgggacacatatgcaacatgcctatgatttttacaa

SEQ ID NO: 383224 - DNA, 100 bp, Homo sapiens
atggtttgctcagaattctcggggcggcacagttccaggaacacagatatgtagaactcttcttgaattctacagcaggagcaagcggtggtgcttatgg

SEQ ID NO: 383225 - DNA, 98 bp, Homo sapiens
tgaacccaacctagtgggtgtaatacatcatgaactgcaggatatcagttttagagaatgtggcgtggagaaattctcaaggaaagagtaaaatgctg

SEQ ID NO: 383226 - DNA, 100 bp, Homo sapiens
cttcaaactacgttaagatgacgacagactcagatccaagtcaacagtgcagtaagctcctacaggacattttaaaactacataaatgtgccatccccag

SEQ ID NO: 383227 - DNA, 100 bp, Homo sapiens
gctgcactaacgcaggatccggctgccgaaggtcctcgccaggatttgcctcaaagggcactgcaaaaattgaacagaggaatcccaaggaagctgcctg

SEQ ID NO: 383228 - DNA, 83 bp, Homo sapiens
cagcgccgctcccagccacagcctcccgcgcctcgctcagctccaacatgactatctgttatagtccctgggtcaagacaaca

SEQ ID NO: 383229 - DNA, 100 bp, Homo sapiens
tctgatgatggcagcttaaagagttccagaggtcctcaaagagggcagcgggctgttcccagatctcctggtgagggagacggaggccgtcatccacaag

SEQ ID NO: 383230 - DNA, 98 bp, Homo sapiens
gttacagcactgggcagccctgtgtcttcatcaagatgaaccggtttaagtgctgtggggctgctaactacacagattgggagaaaatcccttccatg

SEQ ID NO: 383231 - DNA, 99 bp, Homo sapiens
tgatttcctcataatagaagatgatccttactattttctccagtttaacaaggtaatcctcccacttcttaaaagtgatctttatgaagtgattcagtc

SEQ ID NO: 383232 - DNA, 100 bp, Homo sapiens
tcaagtgggcgatgagcctcccattctcccagacatggggaacagggtcacagctctcacccagccaagaccgaggataggtgtggccattggcgaccag

SEQ ID NO: 383233 - DNA, 83 bp, Homo sapiens
gacaaagttgaaaacaaagtgctgaaaatgcttggacagaagagatgagtactatttccactaaggcctagaattgcctactg

SEQ ID NO: 383234 - DNA, 85 bp, Homo sapiens
ccaagagggtgttcgactgctagagccgagcgaagcgtttggtgcacctcgatttggaggaagtagggcagggcccttatctgga

SEQ ID NO: 383235 - DNA, 98 bp, Homo sapiens
ggagggagggcgggcggcgcgagtgggcgcgggcccggtgggccaggtgatgttctgcaccctgaacacccacaaagtggacatggacaagctcctgg

SEQ ID NO: 383236 - DNA, 83 bp, Homo sapiens
caagcacaaagagcttgctccctacgatgagaactggttctacacgcgagctggtggctattatcatggaaaactaatttttc

SEQ ID NO: 383237 - DNA, 100 bp, Homo sapiens
gggagctgtggccacctgagaaggttaagaatagacccaccagcatttcgtgggatggtcttgattcagggaagctctacaccttggtcctgacagaccc

SEQ ID NO: 383238 - DNA, 71 bp, Homo sapiens
gccagccccaagaaggagaccctcatccagctgatgcccttcttcgtcaacgcacctcttgctttttcctc

SEQ ID NO: 383239 - DNA, 49 bp, Homo sapiens
ggtcaaagacattcacaacatggatgttcctgagactggcccagacgct

SEQ ID NO: 383240 - DNA, 50 bp, Homo sapiens
gaagaactagtccagcttcgagcacaagcttttagtttggatgctgaaca

SEQ ID NO: 383241 - DNA, 100 bp, Homo sapiens
gtcgaagcgagggtctgaagttcacgactactagaaggggaggggagtggaaaggctctcagtgaaaaaggttgtgggactggaaaatatcttaaagtga

SEQ ID NO: 383242 - DNA, 75 bp, Homo sapiens
gttgtttgggctgtgtttcgaaatgaagacaggaatcttcctgatgcagcagagcccgatattatttccactatc

SEQ ID NO: 383243 - DNA, 90 bp, Homo sapiens
gcctgagctgagtgaggccgaggccgggaggccgtgcccggaggctggcctgccactcctcctgctatgatgcctgggcagatcccggac

SEQ ID NO: 383244 - DNA, 83 bp, Homo sapiens
aacgaggcaaggagctaaagcagcgtgcgttcagccctgggggtttggaaatcccttgtctccaggttgctgggattgacttc

SEQ ID NO: 383245 - DNA, 82 bp, Homo sapiens
atggccttcctctcctgcgtgagaccagaaagctgggagccctgcgtggaggttggggaccagattctagaagtgaatgggc

SEQ ID NO: 383246 - DNA, 112 bp, Homo sapiens
gttcagtttaactggcacagtaaagaaggagatccattagtgtttgcaactgtaggaagcaacagagtgcaaacagctgcacagcaagtggcagaggataaatttgtttttg

SEQ ID NO: 383247 - DNA, 90 bp, Homo sapiens
catggcaggaccggcacggcgaaaccttcaccttcaggatagcagtgagattcacttcaaagtgaaaatgacaacacatctcaagaaact

SEQ ID NO: 383248 - DNA, 90 bp, Homo sapiens
ccggattggggatgagtatgcggaggacagctctgatgaggaggacggggacaagttctggcggatgcccgagtgctacatccgcggcag

SEQ ID NO: 383249 - DNA, 83 bp, Homo sapiens
aatcaaccaactgttacaatcaaggtctatgaagataatccaggaaaggaagttaataaactgagtgagcatgaacgatccat

SEQ ID NO: 383250 - DNA, 99 bp, Homo sapiens
gacatgggggcctcaaacgtggagatcaactcctctctgttaatggagtggctttctgtgaagaattggaatcaatgatacaggagcaatttaagaagg

SEQ ID NO: 383251 - DNA, 100 bp, Homo sapiens
caagaagcactgagtcgcagttatggcaccccagaactggatgaagatgatttagaagcagataagtatgctgtgcgcttcatccctcgggagaatggcg

SEQ ID NO: 383252 - DNA, 75 bp, Homo sapiens
gttaaccttagccacaaagtcaaaggctcctgtgacgtttgatgacatcactgtgtacttactccaggaggaatg

SEQ ID NO: 383253 - DNA, 100 bp, Homo sapiens
caatgacctctggcagatttttgaaaatcctgtggaactggaagaggaggcaacagtatttggggcaagaagtttgaggatgaatacagtgaatatctta

SEQ ID NO: 383254 - DNA, 74 bp, Homo sapiens
tcgaacagcatcttcgactccttcccgacctactcgccgaccttcatccgcgtaagactttgaccccgacgcag

SEQ ID NO: 383255 - DNA, 96 bp, Homo sapiens
gttgagtgaagggaccaggtggagatggcactttccacacatgaggagaagaagagcttctgtttagaagacacgtgcccagagtcagaggcccct

SEQ ID NO: 383256 - DNA, 97 bp, Homo sapiens
gctgtgcgacctgcagggactggcagacccgtagctaagacgccaggatttcctggaagcagagaaatgcgggcctccccttcctcatcatcgagac

SEQ ID NO: 383257 - DNA, 82 bp, Homo sapiens
gcagaactgggttctggactttgggcgtcccattgccatggatactggtatcgggatgacacaggaagagctggtgtccaac

SEQ ID NO: 383258 - DNA, 100 bp, Homo sapiens
tcaaatcgcgcaaaggggatgtcctgcacatgcactacacgtacttccaggcgcgactggccggggccggcaacagcacagccaggatcctgagcaccaa

SEQ ID NO: 383259 - DNA, 98 bp, Homo sapiens
gagttcccgctgacgctgaggccttaagtgaaagaagtggaaacacccctaactctcccaggtgaccaagaatatggcccaggtgaccaaagccctgg

SEQ ID NO: 383260 - DNA, 74 bp, Homo sapiens
cttttgaagaggaaatgaagggtattgccgctgttactgatatacctttaggagctcagtctgaatattcttgg

SEQ ID NO: 383261 - DNA, 100 bp, Homo sapiens
ttcgctaacgcctcccggctctcgtcagcctcccgccggccgtctccttaacaccgaacacctacaaaatggatctgtacatcaaaaggatggattaaac

SEQ ID NO: 383262 - DNA, 82 bp, Homo sapiens
ggatgggggaccacaagatcctcatcgacaggagtcgttcacgcctactgaggagcatgtgttggtggtgcgcctgctgctg

SEQ ID NO: 383263 - DNA, 123 bp, Homo sapiens
gtgcatcgcccactccagaagtagcatggaaatggagggcatcttcaaccacaaaggtgtcatggagaaactccagctgggcccagagattctgcagcgggaaaatccaaggcttatttatgc

SEQ ID NO: 383264 - DNA, 75 bp, Homo sapiens
aaaacccgacgccgagaccttgcacaggctctggaatgggcactctccttatcagcaagatccgagaagaatacc

SEQ ID NO: 383265 - DNA, 82 bp, Homo sapiens
gagccggagcgcggagcccggctcccgcaccatggaggaggacgacagctacggttattggagtgatgagtaaagaatacat

SEQ ID NO: 383266 - DNA, 97 bp, Homo sapiens
taaagagccatctgtggtgccaattgaagggaaccttctgaccagcctcatgggctcctcagagcaggaggatggggaggagagccccagcgacggc

SEQ ID NO: 383267 - DNA, 100 bp, Homo sapiens
gccaggcagaaatttatcataaccggtttgatgctgtggtgaatactggattgatcctaaccaaggatctgttgaagatgcaatcaaagtttactgcaac

SEQ ID NO: 383268 - DNA, 75 bp, Homo sapiens
atcctgctgctgaagatctggaagacgcgctcctgcgccggttgccaagctgttctgcctttctggaatggtgca

SEQ ID NO: 383269 - DNA, 100 bp, Homo sapiens
tgataagccacccaagcttttgtatcctatggaaagtaaactgacaattcaggagacccagctgggtgctggtgaatctggtaaaagtacaattgtgaag

SEQ ID NO: 383270 - DNA, 100 bp, Homo sapiens
cccagctgtgcaatggtgtcttggactgcccagatgggtatgacgaaggagtacattgtcagggtttccaatacttatctacaggaatcgccatgacccc

SEQ ID NO: 383271 - DNA, 75 bp, Homo sapiens
attcggaaagacacctggccagcggtccagagctgatgcaggtgcagctattgctggagtttaccgagcagcagg

SEQ ID NO: 383272 - DNA, 75 bp, Homo sapiens
ctacttcatggctgggtccagcagaaaagagtgcagtgctggagttcgtgggtgacgggatctataacaacacca

SEQ ID NO: 383273 - DNA, 97 bp, Homo sapiens
aaggcctggcggccagcgattgctgatctgtgcatgagattcagaggagcttattggaaggaggtggacaagatggtcgactatatgcagccaggcg

SEQ ID NO: 383274 - DNA, 100 bp, Homo sapiens
tgtttttcctgtcgtacgtgggacaggccacgctgtccgtccgcagtaccgacgcctgcaggagggtgtgaagacagagaatgaccacatcaacctgaag

SEQ ID NO: 383275 - DNA, 75 bp, Homo sapiens
acagttggatcttgctcagtctctgtcagaggaagatcccttgctatggggtgctactttgggagttgctgactg

SEQ ID NO: 383276 - DNA, 123 bp, Homo sapiens
cgcgctcgctccggcgccggcctcgcctcctcgcagcagcgccatgcctgacatttaccccggtaactgctgggcatttaaaggctcccaggggtacctggtggtgaggctctccatgatgat

SEQ ID NO: 383277 - DNA, 95 bp, Homo sapiens
agattcgcagtggtcgcttcttctccttggcctgggccgaggccactggtgcatatgttcccgggagggataagccagacctgccaacctggaag

SEQ ID NO: 383278 - DNA, 73 bp, Homo sapiens
tcagcacttctttcagcgatatgaagttaaatccagcatctacttgtttccaaagttatttgggtcagcattt

SEQ ID NO: 383279 - DNA, 100 bp, Homo sapiens
gaatttcaagaacaaaggccgcgacttggaggtttttagaacttcagccataaaaatgggcagaattttccttgatcatatcggtggtacccgtctgttt

SEQ ID NO: 383280 - DNA, 100 bp, Homo sapiens
cgaatatcgtcatcgttagaagaacctgttggtggcagtgagtgctgaaggctggtttcatttgtttgacctgacacctgccaaggtgttggatgcttct

SEQ ID NO: 383281 - DNA, 74 bp, Homo sapiens
gaaatgcatatccacactggcagcagcaggctcctcctgatccagatgttggagtccggggtgacctggtctca

SEQ ID NO: 383282 - DNA, 78 bp, Homo sapiens
tggatgtagatacgttagccagtttacttaagtcaccatcatgtctcttctcaccaccctctgaatctgcattagcca

SEQ ID NO: 383283 - DNA, 98 bp, Homo sapiens
cagcacccgccgctgtcgccgaccgcccgcacatccgtcggctgttccatttcctccaagtcaccggcttacagcaaaagaagtgtttgataatgatg

SEQ ID NO: 383284 - DNA, 100 bp, Homo sapiens
ccgaatcttccttcaggatatcaagcctgtcctgggagctggagaggatgtcagcgagcctgacattgccctccctgaatgcatcaaatactcttctcca

SEQ ID NO: 383285 - DNA, 100 bp, Homo sapiens
cgtgcccgaaacgccgaatataatcccaagaccagagttggagccacccaggggaatgatctctgatgacctaacctaagcaaaaccactgagcttctgg

SEQ ID NO: 383286 - DNA, 83 bp, Homo sapiens
cgaacgaccaagagggtgttcgactgctagagccgagcgaagcgaattcatgatttgttcctgtagctgaaacatacattgaa

SEQ ID NO: 383287 - DNA, 100 bp, Homo sapiens
cgccgcgcacaaccgcacgtgcagattgaccgactcatcagtcacggggccgacatcctgaagcctgtaatgctcaggcagggagaaaaggaggcagtgg

SEQ ID NO: 383288 - DNA, 82 bp, Homo sapiens
ggcggcttggacgactcggagagccgacaccattcgcttttcacccaagatgatttgatgtcttataaaactctgatgaacc

SEQ ID NO: 383289 - DNA, 50 bp, Homo sapiens
gtgacagagtggagccatggctagagggatcgtgggactttaccagatcg

SEQ ID NO: 383290 - DNA, 74 bp, Homo sapiens
tgaggatatttaagtgggttcctgtgacagacagcaaggagtgaaactggaacgccaagctgaagaagaacgaa

SEQ ID NO: 383291 - DNA, 74 bp, Homo sapiens
tgccgccggcgaaggaggaggcgttgccggacattgctacaagtggttggtgtggtctctgtggctgtggccgt

SEQ ID NO: 383292 - DNA, 100 bp, Homo sapiens
gagttatacataagccattttccgaatatacagttccaagattatcccctaaaactcatagacccaggtctcccagacagaacagtattggaaatacccc

SEQ ID NO: 383293 - DNA, 83 bp, Homo sapiens
tactctctcagatgacttcgtctcccaccgactgcctgtttaaggttgatgccggcccaggatggatcagacctgtgaactac

SEQ ID NO: 383294 - DNA, 83 bp, Homo sapiens
cttgggacccaccgctgccctcagctccgagtccagggcgagggcaacaggtttgtctatgctggctctaactcgggcgtggt

SEQ ID NO: 383295 - DNA, 100 bp, Homo sapiens
ctccttcctgcgggcacccagctggtttgacactggactctcagagatttaatccagagactgacttcactatagaacccacagttgtatcaatggttgg

SEQ ID NO: 383296 - DNA, 74 bp, Homo sapiens
tagaccacaggcaaatgctttgataccatacttgcagagctccttcagatacataaagaacacattgtaggata

SEQ ID NO: 383297 - DNA, 75 bp, Homo sapiens
ccagatggcgtcttccgtgggcaacgtggccgacagcacaggttgggacaaacattcctatggttaccatggtga

SEQ ID NO: 383298 - DNA, 100 bp, Homo sapiens
taacaaatggttttgacactccagaagagaggtatcagaagcttaaaaaggatgctgaaaacgccattcaacagatgggtggccagtggcttggtggaag

SEQ ID NO: 383299 - DNA, 100 bp, Homo sapiens
ctggggctgaacgcggctttctgaggtacttggaaggctccatcgcccctgaagacaaaggaagctgctcattgctgcctgggcctccatttgccagaga

SEQ ID NO: 383300 - DNA, 100 bp, Homo sapiens
ataattgggatgatgacaatgtagaggatgacttctctaatcagttacggattcaggagcagttccagaaaaatcccgacagttacaatggtgctgtccg

SEQ ID NO: 383301 - DNA, 125 bp, Homo sapiens
ctgctaaatagcaaagaccaggaagtgctgcttcaaacgggcagggctctaggaaacatatgttacgatagccgtgctggagaatctggtaaaagcaccattgtgaagcagatgaggatcctgca

SEQ ID NO: 383302 - DNA, 75 bp, Homo sapiens
cacctgctgacatctacctgccagcaggttacgggcaggacttgagtggcttcggacagggcttctcagacccca

SEQ ID NO: 383303 - DNA, 98 bp, Homo sapiens
ccgggaggaaggaacgaggcaaggagctaaagcagcgtgcgttcagccctggggagtccaaaactacttacctggaagaccttccaccaccccctgag

SEQ ID NO: 383304 - DNA, 83 bp, Homo sapiens
ccgcaacatcgaccagaccatgctctccatcctgctcttcttccacagaacacaccacagccatcagcactggaatgcaaaga

SEQ ID NO: 383305 - DNA, 90 bp, Homo sapiens
aagatggcgacggcgaccatagctctcatgctgtgtgctgtggacccacctggggttcatggagtgggccacggggcccagccctaagca

SEQ ID NO: 383306 - DNA, 98 bp, Homo sapiens
tggagttgatctctctaaaacgtcaggtcagcctagcaacaaagaagatgtggatgatcttgtgagtcagctaagacagacagaagagcaggtgaatg

SEQ ID NO: 383307 - DNA, 98 bp, Homo sapiens
ggtgtgaggagaggagccgctgtttttcactgagctgccataccccgaaagacctccgtgctgcacatgtgctccctcttccacgcgttcatctttgc

SEQ ID NO: 383308 - DNA, 82 bp, Homo sapiens
atctgatccacatgcgtgtggcagcccaaggctttgttgtaggagcaatgactgttggtaacttacgacctatttctccgtg

SEQ ID NO: 383309 - DNA, 102 bp, Homo sapiens
ctttgactactggggccagggaaccctggtcaccgtctcctcaggtgagaagccctaccactgcaactgggacggctgcggctggaagtttgcgcgctcaga

SEQ ID NO: 383310 - DNA, 75 bp, Homo sapiens
ctccgcagcgacatcaccaagctggaggtggacgccatcgtcaacgccgtgctggcctacatgcagttgctggag

SEQ ID NO: 383311 - DNA, 99 bp, Homo sapiens
gaggctgcaccaagtggcgaaggagccggctccaagggctcctcgcacctaccccagcaactcaaattcaccacctcggactcctgcgaccgcatcaaa

SEQ ID NO: 383312 - DNA, 100 bp, Homo sapiens
ctcagatcttaagtagtgatatttctcttttgtctgcccctattgtaagtgcagatggaacacaacagatcagccactcttgatctggttttcatgtggg

SEQ ID NO: 383313 - DNA, 100 bp, Homo sapiens
ggcagtccgatgatgtccctgcagggaaggtggccctggtacagtggacggaaagtgtgggcttaaccctggtgggccgagaccagtcttccatgcagct

SEQ ID NO: 383314 - DNA, 100 bp, Homo sapiens
gcttccttcttcatattgaagaacttcaaccccacagtgtatccttttcaaggagtgacagtgttccctattggaattggagatcgctacgatgcagccc

SEQ ID NO: 383315 - DNA, 74 bp, Homo sapiens
gttgtgtggtcgcgtctcggaaaccggtagcgcttgcagcatggtgatggctggaccggcggaggaggcgggag

SEQ ID NO: 383316 - DNA, 75 bp, Homo sapiens
gggagatcccaggcggtgacagagtggagccatggctagaggctccccacaggtgcaggaagccgccgcccagcc

SEQ ID NO: 383317 - DNA, 82 bp, Homo sapiens
tcgggtgcgctgctcaaggacacggtctacaccgacttcgacggtgaacagtggtatagcagccactccagcctctgctgca

SEQ ID NO: 383318 - DNA, 101 bp, Homo sapiens
gacattagttcaagtagcaactatatcagtgaagctgtggtctaccaatctagacaactcagtggcaagcattgaggcaaaggctaatgtgtgctgtgtta

SEQ ID NO: 383319 - DNA, 75 bp, Homo sapiens
caacagtgtaccagcagggcgttggctatgtgcccatcacaggtgctggagaatctggtaaaagcaccattgtga

SEQ ID NO: 383320 - DNA, 82 bp, Homo sapiens
cctggagcccagctatgtggaggccctacacagttgcctgcagatcctgatcgcgactccatcaagaatgctggaggaaggg

SEQ ID NO: 383321 - DNA, 100 bp, Homo sapiens
gaagaacttgtacagagatgtgatgttggagaactatagcaatctggttttcttgggatcttctggatgacctgaaatcagaactaactggaaaatttga

SEQ ID NO: 383322 - DNA, 74 bp, Homo sapiens
ctgcagtcggcactgctactgcgaagacagctggcagggaactctaatgatccaggacaaagaagttaccctgg

SEQ ID NO: 383323 - DNA, 90 bp, Homo sapiens
ctagcgtcctggaattacttcaatcaagtggttccgagttgagacaaattacgaccactggaagccagcacccaaggaagatgaccggag

SEQ ID NO: 383324 - DNA, 100 bp, Homo sapiens
gggcctgcaggtctctgtcgagcagcggacgccggtctctgttccgcaggatgggagaaactctggaaaccttgacaatggcaacagtgtgtctcttcag

SEQ ID NO: 383325 - DNA, 96 bp, Homo sapiens
gcagagccgagtgcagaagatctgggtgcccgtggaccacaggccctcgttgcccagatactctccagaaagagcaacagtaatggagtacatgag

SEQ ID NO: 383326 - DNA, 75 bp, Homo sapiens
gttaccgctgaggagctgcagtctctgtcaagaattactggaagaatttagtccagttgttgagagacttggatt

SEQ ID NO: 383327 - DNA, 100 bp, Homo sapiens
ttttctgaagttgttcattaagacttcccagcattcctacagatataaatagtctccatctgctgctgcctcttcatcctcttcctcttcctctcggagc

SEQ ID NO: 383328 - DNA, 100 bp, Homo sapiens
cctgacctcgtgatctgcctgcctaagcctcccgaagtgctgggattacaggcgtgagccaccacacctagctggtatttaccttgctgtggattgctga

SEQ ID NO: 383329 - DNA, 90 bp, Homo sapiens
cttgcagggaaatgatcagtctgttggatgccttcaataatctggagaatcttgtctttggcaaaggattccaagcaaagatcttccctg

SEQ ID NO: 383330 - DNA, 82 bp, Homo sapiens
ggagacacggtggaaacgcttatgcaacccaaggagatctgtgcgctggttgggttctgtgatgaggtgaaagagatgccca

SEQ ID NO: 383331 - DNA, 154 bp, Homo sapiens
gttggtcctcagaatccccgcgtagccgctgcctcctcctaccctcgccatgtttcttacccggtctgagtacgacaggacacatgctaaccaagagtgagaagaaccagttattggcaatagcatcatcattgtttgtggcattccagttaag

SEQ ID NO: 383332 - DNA, 75 bp, Homo sapiens
ccggccgaggcggtgctgcaagagaaggcactcaagtttatgcaccctggaggagaagaggttctgctggaacaa

SEQ ID NO: 383333 - DNA, 75 bp, Homo sapiens
ctgcacgcaagtgttaaacttctgatctccagcaccctgccggtggcactactgagagacgaggtgccagggtgg

SEQ ID NO: 383334 - DNA, 80 bp, Homo sapiens
caagaaccagctggagattcagaatctacaggaagactgggatcactttggctggagtgcaatggcacgatctcggctca

SEQ ID NO: 383335 - DNA, 87 bp, Homo sapiens
ggaactaaaagcacttcggttactcaatttccagcgtcaggctattttggcattctgctggatatatgttcgtaaataccaaagtcg

SEQ ID NO: 383336 - DNA, 82 bp, Homo sapiens
attggccctgaaaaaagacagagaaactatgggacacagatatgttgaaggtttgtatccctatacagaggaccatgtcata

SEQ ID NO: 383337 - DNA, 50 bp, Homo sapiens
tgctgaagagactttccgttacatgagcgtccgagctgggccacagcctg

SEQ ID NO: 383338 - DNA, 100 bp, Homo sapiens
gcagaaatctgaaaatgcccctggggagacacatgcacaagacagtgaggctccaggttgggctctatgctgtgtaccttctggactggctcagcgtttt

SEQ ID NO: 383339 - DNA, 100 bp, Homo sapiens
ggagatcatgagcatgatctggaagcggctcaatgaccatggcaagaactggcgtcacgtttacaaggctggcatgactcacatcgtgcgggaagtcgac

SEQ ID NO: 383340 - DNA, 75 bp, Homo sapiens
ggatgagactgaccgagaggtggagtactttaagagacactcctagaatatgcagagaaatggaaaacttcagaa

SEQ ID NO: 383341 - DNA, 82 bp, Homo sapiens
aaacatcattttccttgtaaagaagtaaaagaaagtggacacatgtttcccagatatgttccatttaaggctctgaagatgg

SEQ ID NO: 383342 - DNA, 75 bp, Homo sapiens
ctttcagaaacttattcacagttaccaaagctggatgcctgccatattagatggagaggaggcagtttctaaatg

SEQ ID NO: 383343 - DNA, 82 bp, Homo sapiens
gttgcccgcctggcccctacggggcgtgatggtgggcatgggtcagaaggattcctatgtgggcgacgaggcccagagcaag

SEQ ID NO: 383344 - DNA, 97 bp, Homo sapiens
caataaaagagacctctacttagctcagcaattcttaccttgaatcagtgtctgtccctgaagggtcattaaatcagctatgttcttcagaagaacc

SEQ ID NO: 383345 - DNA, 100 bp, Homo sapiens
cttgctccctacgatgagaactggttctacacgcgagctgagccagtcttggtgctctgtgttcacctggttcatctgaggagctgcatctaccctgccc

SEQ ID NO: 383346 - DNA, 83 bp, Homo sapiens
ctgacttttcttatgctgggatgtgccttagaggattatgggacttggcagatgaacttgctcttgttgatgtcatcgaagac

SEQ ID NO: 383347 - DNA, 82 bp, Homo sapiens
cgcccccgcctagcccttccggatcctgcgcgcagaaaactaatctggattcactccctctggttgatacccactcaaaaag

SEQ ID NO: 383348 - DNA, 83 bp, Homo sapiens
cattcccgacggcccgcccctcaaggacaacctcggcctgagacaccggaggaccggtgtactaatggtcacttgatgtgcgc

SEQ ID NO: 383349 - DNA, 96 bp, Homo sapiens
cgacaagcacacactatggcgctgaaacggattaataaggattcaggacaagctataccgcttgtagtcgagagctgcatccgttacatcaattta

SEQ ID NO: 383350 - DNA, 101 bp, Homo sapiens
ctggccctgagtagggtgtgacctccgcagccgcagaggaggagcgcagcccggcctcgcagtgagtcgcagccatgttcctggttaactcgttcttgaag

SEQ ID NO: 383351 - DNA, 83 bp, Homo sapiens
ccagggaaccctggtcaccgtctcctcagtataggcagatctctccctcatataacggatgtttcttggcgcttggaatatca

SEQ ID NO: 383352 - DNA, 80 bp, Homo sapiens
agtcgccttctgcctggtcgggatcccgccccgcccggagccccggcccccacaggtcttatcgaatgttacttagcctc

SEQ ID NO: 383353 - DNA, 80 bp, Homo sapiens
atcttggcaaagcttctccctcagtatttagaccaggttttttattggcacctcagtctcaacattttcttttcggattc

SEQ ID NO: 383354 - DNA, 85 bp, Homo sapiens
ggcggtgctgcaagagaaggcactcaagtttatggtacaatggacccaacctggttctgaagtatgaccgggcccagaagcggct

SEQ ID NO: 383355 - DNA, 100 bp, Homo sapiens
ctgctggagaacctccgctttcatgtggaggaagaagggaagggaaaagatgcttctgggaacaaggttctgtttacagaggaagatgtgaaattctacc

SEQ ID NO: 383356 - DNA, 98 bp, Homo sapiens
cttgaacagacagcagagaataaacctttaggaaaagaattccatggcaacatcattaaagtgtcctttgccactagaagacctgaattcatgagagg

SEQ ID NO: 383357 - DNA, 82 bp, Homo sapiens
ctggggtcccttttgcctcagatactattttgaagccgttggacataccagatggtcgaagagctccacttcctgctcatta

SEQ ID NO: 383358 - DNA, 100 bp, Homo sapiens
gaagcagtcaatgccttgaggcctttctattttgcagtacatccagatttctttggacagcaccccgtagaaagggataccaagggttcgagttttggag

SEQ ID NO: 383359 - DNA, 80 bp, Homo sapiens
ttttttgtaagactctgtggtattgttggaggaatcttttcaacaacagtgctgtgctgtggctttcattgagaagctag

SEQ ID NO: 383360 - DNA, 75 bp, Homo sapiens
ttatagatggacaagagacgatcattctgcaagcaggcaacctgaatacagcagcaggtggggaatcagctctgg

SEQ ID NO: 383361 - DNA, 88 bp, Homo sapiens
ccagggaaccctggtcaccgtctcctcagggaaagcaggcaggatgggagagtcgccgatagaaccacctcttccctgcctcctgggc

SEQ ID NO: 383362 - DNA, 111 bp, Homo sapiens
gaaagttttcagcctcatccagcaggcggtgacccgctaccggaaggccatcgccaagggggatatgagactttctactcggaatatcctgagtgttgcgtggatgtaaaa

SEQ ID NO: 383363 - DNA, 100 bp, Homo sapiens
tgaaacgtgtgctgaaaaagaagaatcagcaaatactactgaaagtgcaatatttgagtatcactgcgagggtgataaaagaaaatgtggctgaagttac

SEQ ID NO: 383364 - DNA, 100 bp, Homo sapiens
tgtttggcagcttgatcattggctatgccagggatccccaggaaaggatggagtgcctggtatccgaggagaaaaaggagatgttggcttcatgggtccc

SEQ ID NO: 383365 - DNA, 75 bp, Homo sapiens
tggaaataataccatccatgtgcaccgagaaattcacaagaaatacccgcagcccaaagggcagaagaagaagaa

SEQ ID NO: 383366 - DNA, 74 bp, Homo sapiens
gattccaagtaactcttatttgttccaagatgagatgggattctccaacatggaagatgatggcccagaagagg

SEQ ID NO: 383367 - DNA, 82 bp, Homo sapiens
ctcgacaaagatggggttgtcctctttaagaaggctatggtgaactaaacggtaatgctggagaaagagaaatatctttaaa

SEQ ID NO: 383368 - DNA, 83 bp, Homo sapiens
aactccagcgagatccgggccgtgaacgaaagcagtgacggaggagcttgtaccaccggtatgtgacaatcagctctctagtg

SEQ ID NO: 383369 - DNA, 100 bp, Homo sapiens
aaactattgttatcgttgtggtaaccaagctgcaatcatggaacttgacgatactctaaaatactctttatttgggaatggatgatgaaggagatgatga

SEQ ID NO: 383370 - DNA, 75 bp, Homo sapiens
ctgatgtcaatcttgagggctagttgcccctcgccatggcctgcagagtctcgggaaagttgccattgcccggcg

SEQ ID NO: 383371 - DNA, 100 bp, Homo sapiens
ggaggtcattgaaggaggccctggcttaggcatgtcctctggaaaaatgccagctgtgggacaaggagtgcaggccgcacaacctcggcaggcaccgggg

SEQ ID NO: 383372 - DNA, 50 bp, Homo sapiens
gctgaacattactcttccagaagaggctcaggccacagggtcaccacata

SEQ ID NO: 383373 - DNA, 83 bp, Homo sapiens
ctttgctcctccctgcaactaactccattcttaattggaactgtggctgcaccatctgtcttcatcttcccgccatctgatga

SEQ ID NO: 383374 - DNA, 95 bp, Homo sapiens
ttcgatacagcagaagtctacgcagccggcaaaggactaccccaatggcacctggctgggcgacgagaacaaccccgagatgcgggtacgctgcg

SEQ ID NO: 383375 - DNA, 97 bp, Homo sapiens
tcccaagtagctgggactgcagaatgcatggatctcaaaggaaacaaacacccaataaactcggagtggcagactgacaactgtgagacatgcactt

SEQ ID NO: 383376 - DNA, 83 bp, Homo sapiens
cgctggtgcagccaccctcgctccctctgctcttcctcccttcgctcgcaccatgctcataatgaagtaccaaatgaaaggct

SEQ ID NO: 383377 - DNA, 100 bp, Homo sapiens
ctgatagtctccagcgggcctggactgtgggctggtgtgtggaactggacttgaaagaggagattgatattcgactctccagggttcaggatatcaagta

SEQ ID NO: 383378 - DNA, 100 bp, Homo sapiens
cattgaaggttcactcaaaggcagatttcaacactacacttgcacaatgtctttgaaaccaagagtagtagattttgatgaaacatggaacaaacttttg

SEQ ID NO: 383379 - DNA, 75 bp, Homo sapiens
gttggagagagtgccccacaacacccctgtgggtattaagcatcgatgtgactgacagaaacatcagcctacata

SEQ ID NO: 383380 - DNA, 75 bp, Homo sapiens
caccagacctgggccagatactttgtgaaattttcatgttccagctgctccggggcctcgcctactgtcaccacc

SEQ ID NO: 383381 - DNA, 82 bp, Homo sapiens
tcggacccatcgccgcttctagaccctactgcggtctcggatattgccggggtcggcactcttcaccctcccgagccctgcc

SEQ ID NO: 383382 - DNA, 75 bp, Homo sapiens
aaggaatgaagcgtgtcctgacttctgtcagcttggggaaggaagtcagtgaggcatacacggaatacctgagga

SEQ ID NO: 383383 - DNA, 88 bp, Homo sapiens
tcagaagacaaacttgccaaagctacaagagacaggtgttgaaattccgtaaacttaacttcaatggggagggtgaacccgaagaact

SEQ ID NO: 383384 - DNA, 80 bp, Homo sapiens
atcgctgacagctgaggaagtctgcatccacattgcacataaagttggtacaggtttgcagattccgccagcagcacagc

SEQ ID NO: 383385 - DNA, 83 bp, Homo sapiens
cgttctgctcctactgcttcgcgtccagacaggtctcggacagcccgggagacgagccctcggagtccccatacgaaagtgca

SEQ ID NO: 383386 - DNA, 82 bp, Homo sapiens
gcggtgcggatacgacccatgaaccggcgagccctgggcgctgcctatggcacagccaagagcggtaccggcattgcggcca

SEQ ID NO: 383387 - DNA, 100 bp, Homo sapiens
cgtcgccgccacacccatcagcgcggctacctgctgacacggaaccctcacctcaacaaggctattttcaaaatgatcactcccgaggacgtgaagctcc

SEQ ID NO: 383388 - DNA, 96 bp, Homo sapiens
cgcaacctgcagaagcaagtggagaagctgaacggcacggaccccgaggatgtgattcgcaacgcctttgcctgcttcgacgaggaagcctcaggt

SEQ ID NO: 383389 - DNA, 90 bp, Homo sapiens
cgagcctgagcgcggcggcggcccacgcgcagcgacagggagagctgccgcagcgggaaccgcaagagcttggtggtaggaacgccctcc

SEQ ID NO: 383390 - DNA, 76 bp, Homo sapiens
acaagatggacaccgcggaggaagcttcagtatcagacacagcacagcagccatctgaagagcaaagcaagtctct

SEQ ID NO: 383391 - DNA, 74 bp, Homo sapiens
cgggccggggcgcactctgtcttcttgcgcggagcgtcggaggcctgaggcgcagcccagcctcgaaatgcaga

SEQ ID NO: 383392 - DNA, 73 bp, Homo sapiens
ttggagagagtgtccaggaccttaggatcctggatgtccggaactttattgtacagtctcgtcctgaatttgc

SEQ ID NO: 383393 - DNA, 76 bp, Homo sapiens
cgttgcctgctcccggagggagacgcgctgccgaggagaacccagcggcaatctgcagagcgctgtgtaagcacat

SEQ ID NO: 383394 - DNA, 80 bp, Homo sapiens
tctcgggggccgctctgggatcccggccaccagcaattgtccggtggtgtgggcatggaaggaaggccagtggagacaat

SEQ ID NO: 383395 - DNA, 101 bp, Homo sapiens
tgcctctgctgccgggcaacagcttcaaccgcaacatcacagaactgtgtggtgcaaagcgggttggttattttggtccaacacagttttacattgccctg

SEQ ID NO: 383396 - DNA, 100 bp, Homo sapiens
ataaaatgaatttgcccacaccttttggaccaattactgcgcgacctcccatggcattaagcagtcacactgcttttaccaaacacagcgaggaacttgg

SEQ ID NO: 383397 - DNA, 82 bp, Homo sapiens
cttccactcagcctgtgggagtctctatgctgcagtctggttggtggagaatttgaactggagatgaactctattatccagg

SEQ ID NO: 383398 - DNA, 100 bp, Homo sapiens
ctcctttgaggtggagaaggagctgtttgccctgaaacccatgaactgcccaggacactggtcaagagcaatctgaatccaaatgcaaaggagtttgttc

SEQ ID NO: 383399 - DNA, 96 bp, Homo sapiens
ggaaactggaggcatcactcagcacattggtgcctttcttggtgttttggggaacgagtttagtatattaaaatcaccagggtctgttgttttccg

SEQ ID NO: 383400 - DNA, 75 bp, Homo sapiens
ttctcgctaacaactgcccagctttgagggaggcacattgttcgaagctgacttctccctgctggatgggatcaa

SEQ ID NO: 383401 - DNA, 95 bp, Homo sapiens
tggcccaggaggagcaggggggctccgctgtgcgcaggatcgcccaggaagtgcagcgctttgcccaggagaactcagcgatgcctgccgctttc

SEQ ID NO: 383402 - DNA, 75 bp, Homo sapiens
ttggtcctgtgcggtcacttagccaagagctgttgcgcagccattggtacctgtattggggaaacatagcataca

SEQ ID NO: 383403 - DNA, 100 bp, Homo sapiens
ccatgctgggccggagcctccgagaaacaaatcttcctattttcaagctgaaagaatctactgttagaagaagatacagtgactttgaatggctgcgaag

SEQ ID NO: 383404 - DNA, 75 bp, Homo sapiens
cgaaccatgaggacttcatcgggtttgccaagaaaaatgaggaagctgtgagtaccagtggaaggaacgagccag

SEQ ID NO: 383405 - DNA, 75 bp, Homo sapiens
aagacacttatcttgcccaagagctgggtgccacacctccctggatgatccaagatgaagaatacattgctggga

SEQ ID NO: 383406 - DNA, 82 bp, Homo sapiens
gtcatcaagttgcaagagattccaaccttccagccccttttgaaaggtgaaaacttttggcccgtttggaagcggcagccag

SEQ ID NO: 383407 - DNA, 100 bp, Homo sapiens
gaggcaccgggatcgtgaccgagaccgtgaccgagagcgtgaccgagagcgcgaatatcgtcatcgttagaagccacaggtgtcaagctctcataaccct

SEQ ID NO: 383408 - DNA, 50 bp, Homo sapiens
tgcaccgggacctcaagtccagcaacacttcatcgcagtaggaatggcag

SEQ ID NO: 383409 - DNA, 75 bp, Homo sapiens
catggaggccgtgaagaccttcaatagcgaggtgctggaaacatgcatgaagagctgcggcaagcggttccacga

SEQ ID NO: 383410 - DNA, 74 bp, Homo sapiens
cagcaatgcctccatgaacaatctcacccaattactctgctcagtgattacagtggcgagatcttgaacaactg

SEQ ID NO: 383411 - DNA, 98 bp, Homo sapiens
attccgggaagtgggagcttcaggctcgctccgtgcgggtttcattgtttgcggaacttttcaacgaaatgcttcaaagagattttggtgtccgtata

SEQ ID NO: 383412 - DNA, 100 bp, Homo sapiens
ctgctggtggggctcacggcgcctgccttggcgctggccggctacatcgagaggctgacccgcggctgattgagtccctctcccagatgctgtccatggg

SEQ ID NO: 383413 - DNA, 105 bp, Homo sapiens
agagaagcttgatcttggaggcctcaccgtgagaccttacaaagccgggaatgcttcacatatgtcctcaagggccacatagctgtgagtgcagccgttttcccg

SEQ ID NO: 383414 - DNA, 90 bp, Homo sapiens
ctgtggttcactgtgcatcgcccactccagaagtagcatggaaatggagggcatcttcaaccacaaagattttaacagcttctctgtgga

SEQ ID NO: 383415 - DNA, 50 bp, Homo sapiens
gatgcggatccgggcctttccgagaaccatggagtctggcagtaccgccg

SEQ ID NO: 383416 - DNA, 100 bp, Homo sapiens
ccttaagaaacttaaagcctggaatgatatcaaaaaggcctgtggactttctcctcgagacattaccactattaaacttctcaatgaaactagagacatg

SEQ ID NO: 383417 - DNA, 83 bp, Homo sapiens
cttggcccttgttcccccaaatgtctgactctgactctcggactgagaaacgcaaggtttaactatagatcaacacatcatct

SEQ ID NO: 383418 - DNA, 78 bp, Homo sapiens
ggaaccatcaagatcttcacagagaacttcttatgaatcaaaaaagatcaatgaactgagccatgttcaaatccctgt

SEQ ID NO: 383419 - DNA, 74 bp, Homo sapiens
atccgctctccgctctggcgaggaggggctgaggaagctgccctcgaaaccctccagaagacatctgtcctgca

SEQ ID NO: 383420 - DNA, 83 bp, Homo sapiens
gtgaagcccgcggcgcgcgcctctcccggaccctgcagggtgtcgtgaaaactacccctaaaagccaaaatgggaaaggaaaa

SEQ ID NO: 383421 - DNA, 74 bp, Homo sapiens
ctaatgtgctggagatctggaaccttgtgttcatccagtataacagatactgggtcgtcaggatggagttttgc

SEQ ID NO: 383422 - DNA, 75 bp, Homo sapiens
ttcaagatgtaaagactaatcctgacatgttgttagcagtttttgaaggaagctgaatatggtgggcatgatcag

SEQ ID NO: 383423 - DNA, 76 bp, Homo sapiens
taacctgaaaacgctcctgtttttctcatctgtgcagtggcccgtgatgctgatgagcgagagaagtggatccatg

SEQ ID NO: 383424 - DNA, 82 bp, Homo sapiens
cgcggatctcaccgccgctcaggcgccatcatgaccgggtcctataacaacttcttcaggatgtttgatagagacacgcgga

SEQ ID NO: 383425 - DNA, 97 bp, Homo sapiens
ccgagagcgtgaccgagagcgcgaatatcgtcatcgttagaagaccagaatccgtagaagctagccctgtggtagttgagaaatccaacagttatcc

SEQ ID NO: 383426 - DNA, 50 bp, Homo sapiens
gttgatacctataccaaccgtttaagaatcaggaaacccaggcccaacgg

SEQ ID NO: 383427 - DNA, 75 bp, Homo sapiens
cgcggcgcccaggcctcccagcagcagtcccgagcagagctcagccagacgtccaggatcccaccccttgcaaaa

SEQ ID NO: 383428 - DNA, 83 bp, Homo sapiens
gagctgggaacattcctcataaagcgagtcgtcaaggagttgcaggtcagcccaaggccaaccccactgtcactctgttcccg

SEQ ID NO: 383429 - DNA, 82 bp, Homo sapiens
gaaacacctctacctcctgcgaggcctcccgggctccgggaaaactacactggccaggttttgggatttgagattgacgcgg

SEQ ID NO: 383430 - DNA, 75 bp, Homo sapiens
cgcagccttgggcctcgcgccggctatggccgtgccctggggctgagccctcagaacccttaggagaaatcttga

SEQ ID NO: 383431 - DNA, 75 bp, Homo sapiens
gttctattcagacccccatgctgtagcagatgctttttcacggatgcctctcatgaatggccttattggatccag

SEQ ID NO: 383432 - DNA, 100 bp, Homo sapiens
cattcagttcttctatgaatgaatctgctcccactggtattactgatcatattgtccaagaggtgaagttccagcagcgatttgtgtttccagtacagtt

SEQ ID NO: 383433 - DNA, 74 bp, Homo sapiens
agcttaggaccacccaccatgcctatccagaggtgctcagcacagtggactttgtcgcccctgatgatcgagtt

SEQ ID NO: 383434 - DNA, 100 bp, Homo sapiens
ctattgccttattttttctcatggatgttcttcttcgagtatttgtagaaggtgtgtagcccacaatgccctggagtgtgcacgagccatctacgcctac

SEQ ID NO: 383435 - DNA, 100 bp, Homo sapiens
cgaattcagaaggatatcgacgtcgtgatccagaagtccagagctgaggactgcctgtttgcagggggctagagagctgaaggagagccagtttccccaa

SEQ ID NO: 383436 - DNA, 101 bp, Homo sapiens
ttagagattgtgaagaagaatttcgatctccgccctggggtcattgtcagagcactagaatgctgcagggttggcctttggcctaaaccatttctagctat

SEQ ID NO: 383437 - DNA, 100 bp, Homo sapiens
gtttcattaccaaacaaaagaagaccaggagatcctgcatagccttcacagagagtccagttgccaagtcacggacaagttcactgagagcgtctacgtc

SEQ ID NO: 383438 - DNA, 50 bp, Homo sapiens
gtattacaacccccaggaactagtggcgttgacccggacgacacctataa

SEQ ID NO: 383439 - DNA, 73 bp, Homo sapiens
cttcattggccacctacagaaacaaaatgtcaacaaattgatggtatcaaaggtgcagaatctgggacaagtt

SEQ ID NO: 383440 - DNA, 75 bp, Homo sapiens
agtttaacaagccttaggaagttagctgaacagttcccacggcaaggacaagacttaaaacctgtcttggataga

SEQ ID NO: 383441 - DNA, 132 bp, Homo sapiens
gctggaatggacatctttgccaaattctctgcatatatcaagaattcaaggccagaggctaatgaagctccttccaactcctcagaacctccactctatggatctggacctctggattcggctttctccctg

SEQ ID NO: 383442 - DNA, 74 bp, Homo sapiens
tgacagtgattttaaagttggagatgcctcaggttttgcacactagggaccaagaagccctcggggacactgct

SEQ ID NO: 383443 - DNA, 100 bp, Homo sapiens
ggactatgctatgaatttatacaaggagaagcactggatccaaagcatgtctgcaacccagccattttcaggtatcattgcccagtgcctaagatctttt

SEQ ID NO: 383444 - DNA, 82 bp, Homo sapiens
cggcaggagagtccggccgcgacaggacggttcgagaacttgtcttggacaattgcaaatcaaatgatggaaaaattgaggg

SEQ ID NO: 383445 - DNA, 75 bp, Homo sapiens
tacaaggtcccagatggccacgtctctgggtcgagggacctcagactgaatcaaagaatgaagcctcttcccgtg

SEQ ID NO: 383446 - DNA, 75 bp, Homo sapiens
gagccggccgcgggcgcgaccggaggcagaaatgagtggtggattggctccaagtaagagcacagtgtatgtatc

SEQ ID NO: 383447 - DNA, 75 bp, Homo sapiens
ggatggagtccaagactgagaaatggatggaacgaatacacctcaatgtctctgcaactagaagccatttgtgtc

SEQ ID NO: 383448 - DNA, 97 bp, Homo sapiens
cctagaaggaccaagatggcagcagtgactctgctggctttggcgtatacacaggtgaccaagaatatggcccaggtgaccaaagccctggacaagg

SEQ ID NO: 383449 - DNA, 100 bp, Homo sapiens
ctggagctggctgggagtcaaggtcgaagttttttcatccaaagccagttccgtaagactttgaccccgacgcaggcttcagtgattgccgcggatcaga

SEQ ID NO: 383450 - DNA, 100 bp, Homo sapiens
gactcggtattggagctgaaggcggcggcagagaacttgccggtgccagctgaggaatatgatgaagaatgggctaagaaaattcagagtgaaaagtttc

SEQ ID NO: 383451 - DNA, 131 bp, Homo sapiens
gccccccgctcaatggcgactccctcaccgagtacgaagcgggcgtttgcgaaggcccagattgccttcctgcagggagaaaggaagggccaagaaaatttgaagaaggatcttgtgaggaggatcaaaat

SEQ ID NO: 383452 - DNA, 100 bp, Homo sapiens
ttttagggtcctttatatagaagggagagtaggagggctggagacagaggatgactacagctaccagggtcacatgcagtcctgcaacttctcagcagag

SEQ ID NO: 383453 - DNA, 83 bp, Homo sapiens
cagcagctcaccgaggacggggactcgtggaagaagactacctgtttgaaaaagcagaagtcaacttttgggccgagaccctg

SEQ ID NO: 383454 - DNA, 100 bp, Homo sapiens
gggaagatgctcgcctactgcgtgcaggatgccaccgtggtggacgtggagaagcggaggaacccctccaagcactacaaaccaatagagccatggcgac

SEQ ID NO: 383455 - DNA, 75 bp, Homo sapiens
atcctccacagctccagggaaggcactcaaaagtggggggcaggaaaggtgaatggaagagaatccgaagaagaa

SEQ ID NO: 383456 - DNA, 80 bp, Homo sapiens
tgaaggctacaaaggcttcgtgggctggacattggagctccccacaccactcattgctgcccaccagctatacaactacg

SEQ ID NO: 383457 - DNA, 83 bp, Homo sapiens
acaccaaccccttcgcggacccagtggatgtaaaccccttccaggtcaaaatgcagatcttcgtgaaaacccttaccggcaag

SEQ ID NO: 383458 - DNA, 74 bp, Homo sapiens
caaggacagtgtcagagcaggctgtaaaaaatgtggctaccgagtcttttagtcctgctatacagctgcacctt

SEQ ID NO: 383459 - DNA, 83 bp, Homo sapiens
atgatggacgccaaggcgaggcaggactgtgtcaaggagatcggcctcttgaaggcttggcttggactcatcgtcaacagcag

SEQ ID NO: 383460 - DNA, 88 bp, Homo sapiens
cggagggggcgaagattgacgccagtaagaacgaggaggatgaaggcctccacctcagatatatgacaagcagttggatgaaagagaa

SEQ ID NO: 383461 - DNA, 100 bp, Homo sapiens
gccgccgacccgccgagcaaaatggaagctgaagtcttcagcagaaccctgacctaggtagggagtctcaatggccctgggtgaagaaaaggcagaagcg

SEQ ID NO: 383462 - DNA, 90 bp, Homo sapiens
acatgtctcgggagatgcaggatgtagacctcgctgaggtgaagcctttggtggagaaaggggagactgtttatgaccagtggttcatca

SEQ ID NO: 383463 - DNA, 74 bp, Homo sapiens
tctttgtgcacatttacatcaagcttggccatccacccagatatggtcaccatcgccacgggacaggtggcggg

SEQ ID NO: 383464 - DNA, 100 bp, Homo sapiens
cctgaactcatggacctcagatctcggacaacccccattgcaatgagctttgcacagtttgaaaatctactggtctcagccggtcgtcgcgacgttcgcc

SEQ ID NO: 383465 - DNA, 75 bp, Homo sapiens
gcctttgcggctcagtaccgctccagcagcctgggccccgtcacggccctcgggaccaaggatcacgtcatgact

SEQ ID NO: 383466 - DNA, 100 bp, Homo sapiens
cttctggatgtgcagcaatcagatttatcattcgggtggtgcttcctacatttatcctagagaagcgttccttgctggaaatgtatgcagactttatgtc

SEQ ID NO: 383467 - DNA, 100 bp, Homo sapiens
gcactgccttgtcagtggagaagaccagcaagcgtggcggcaagatcatcgtgggcgacgccacagagaaaggctgatggagcacgaagacgaccccgat

SEQ ID NO: 383468 - DNA, 101 bp, Homo sapiens
gcagcagcgaggacgaccagaggtcactctcgtcgccatcttggttttgatccctacctgtttcaaggacctgccagtctgagaagcttcttgtcataagg

SEQ ID NO: 383469 - DNA, 90 bp, Homo sapiens
aagacatttttaggagaagcattttgaatcagaaggcttaagaagaattctgcttttctcacttggattctcacttgcatttatcttcag

SEQ ID NO: 383470 - DNA, 71 bp, Homo sapiens
gcactccgtagcaggctcctccgcaagcaggattgaaagaaggtggcaagaggaagaagcagaagcagaga

SEQ ID NO: 383471 - DNA, 100 bp, Homo sapiens
ccgtgctgaacaaattccgcatttatctaactcttttgagattcttggaatatagcatatctgatgaaataaccaagaccgttggtcccaggaagacatg

SEQ ID NO: 383472 - DNA, 100 bp, Homo sapiens
ggcggcagtcggatagacaataccacaacaacacattttgcagaggaaactgttaaggcagcaataatagaagagcagaaacgaagtgaaaaggctgtgg

SEQ ID NO: 383473 - DNA, 82 bp, Homo sapiens
ataatgaactcagacctattgcaaggaaaggacactcccctaacatatttgctgtcccctttcctccaacccaacggcttac

SEQ ID NO: 383474 - DNA, 75 bp, Homo sapiens
aacatcaatgacttcctgaaaggatgtgcaaccctccaagtggaagaacttccagagagtcaatgcaaagcagcc

SEQ ID NO: 383475 - DNA, 83 bp, Homo sapiens
gaaccaaccctgccagcacctggaccttggacattcagacttcagaatgctgtctgcttttctgtggagactgcgggttgcag

SEQ ID NO: 383476 - DNA, 75 bp, Homo sapiens
gaagccaaagaactggctaggcaaataagctttaagatcctcctggccaacttcttggcccagacagaggccctg

SEQ ID NO: 383477 - DNA, 83 bp, Homo sapiens
cgggttacagcagtgagggggccacggctcaagtcgccctggcagcatacaagtggctggtttgctacctgctccgagagact

SEQ ID NO: 383478 - DNA, 74 bp, Homo sapiens
ttgtacgagacgtggcctgtggcgctaaccacacggcgctgatcccgctggccctggaaggcacggacgtgggg

SEQ ID NO: 383479 - DNA, 100 bp, Homo sapiens
ctgaagaagataacaatcaagatgaatatgaccctatggaagcagaagaagctgaggatgaagaagatgaatcatattctaagaactcagccactcaggt

SEQ ID NO: 383480 - DNA, 152 bp, Homo sapiens
tctttttatcaaatttgtctctgactacgaaacacatggtgcaggattttccatacgttatgaaattttcaagagaggtttctgcccacttggctatagggaatgtcataatggaaaatgctataggctggaacaaagctgtaacttcgtag

SEQ ID NO: 383481 - DNA, 100 bp, Homo sapiens
ctgttttcagatgatatgcttttcctgaggagcattccggaagagtttttcgactacagtttgatgaattccagattgtcagtagttcacatgatgacac

SEQ ID NO: 383482 - DNA, 83 bp, Homo sapiens
caaggagctaaagcagcgtgcgttcagccctggggtaactgcatcctgcccagcatgacggccccctgcccgccgccacctcc

SEQ ID NO: 383483 - DNA, 98 bp, Homo sapiens
agtttggaagatgaaggcttttctgtctattacaatggctaccatggagacacctctgaaacatttttggtgggcaatgtggacgaatgtggtaaaaa

SEQ ID NO: 383484 - DNA, 83 bp, Homo sapiens
gcgatggggcgagaaaggtcccactgcagccctccaagcaggagcatcagatccatgctgctgctgactcggagccccacagc

SEQ ID NO: 383485 - DNA, 88 bp, Homo sapiens
ctgagaggaaagacatcacttgatacttccaatgatctagggcctttacctgcaggggaaggccgctggggcactgatgagcttgcgt

SEQ ID NO: 383486 - DNA, 100 bp, Homo sapiens
cctcatcctggacgtcttctgcgggagccagatgcacttcgtgcgcagtgcacttgccggcggtcccaacccagcaggagaagtggacatgaggttggca

SEQ ID NO: 383487 - DNA, 100 bp, Homo sapiens
ggcttccttcaaatgtcctgtctgtagtagtactttcacagacttagaagctaatcagctctttgatcctatgacagaatcgagagctccagatcatgag

SEQ ID NO: 383488 - DNA, 100 bp, Homo sapiens
caggcagagagagaaacaggggagcaaggtgcaagagtccacaaagggacctgatgaagcgaagatcaaggccttagattttagtgatgatgaaaaagag

SEQ ID NO: 383489 - DNA, 82 bp, Homo sapiens
gacaaaatagatatgtctttgggattttttatcaagcagaaatgcatcgaacaacgagaatcaagatcactgagctaaatcc

SEQ ID NO: 383490 - DNA, 100 bp, Homo sapiens
agggcatcgactcagacgcttcctatccctacaaagccatggtgccttatgcctctggcatgcccatcaagaaaataggccatagaagtgttgattcctc

SEQ ID NO: 383491 - DNA, 82 bp, Homo sapiens
tggccgccgccgccgcgagcgctcccgatgccgacaaaaggatcaaggtggcgaagcccgtggtggagatggatggtgatga

SEQ ID NO: 383492 - DNA, 73 bp, Homo sapiens
gcctcgggacccgcggtccccgctcttgctgggattattgtcattcaaggatatatctatggagttcacctgg

SEQ ID NO: 383493 - DNA, 100 bp, Homo sapiens
cttcccgtctgcgcgagtccacgcagctccccagctatcatggtgaacttacttcagattgtgcgggaccactgggttcatgttcttgtccctatgggat

SEQ ID NO: 383494 - DNA, 100 bp, Homo sapiens
cgaggcttccgcccggcacaggggaccagagtgaactccgagcaggaacacttcctcattgtcccttttgggcttctttacagtgaagtgactgcatcca

SEQ ID NO: 383495 - DNA, 82 bp, Homo sapiens
attgacatccctatcaatgtctacaagaagtctgggccaacggtcacaaaagttgtcactgttgtgacaaccaaaaaagcag

SEQ ID NO: 383496 - DNA, 100 bp, Homo sapiens
cccgcaccacagaccttcgcctcgccccgccggttcctcaccctcggggagcaacatggtgcctacaccaactaatgttacaattgaatcctataacatg

SEQ ID NO: 383497 - DNA, 75 bp, Homo sapiens
cgggaccccagggcagcgaagcaggcgccatgtcagaaccggctggggatgtccgtcagaacccatgcggcagca

SEQ ID NO: 383498 - DNA, 82 bp, Homo sapiens
gcccaaatcttgtgacaaaactcacacatgcccaccgtgcccagcacgtatctcccatgcgccaagtggagcccccagccaa

SEQ ID NO: 383499 - DNA, 75 bp, Homo sapiens
cggccgtctctggagagcagcagggtaagcttgatgattaccaggaacgaatgaacaaaggggaaaggcttaatc

SEQ ID NO: 383500 - DNA, 100 bp, Homo sapiens
tggagccgcacgtgctcggcgcggtcctgtactggctgctgctgccctgcgcgctgctggctgacggttgatgatgaagcgccggccgtgtaaatgaaga

SEQ ID NO: 383501 - DNA, 82 bp, Homo sapiens
tgagagtccactctggggagaagcccaacaagtgtacgcttgacaaaagtaagctgaagccaggaacaagagttgctttgga

SEQ ID NO: 383502 - DNA, 100 bp, Homo sapiens
cgggccccccagcatgaagaccccggcggacacaggggttcagtcggctgccgtcaatgtcatctgcgagctggccagacgcaaccctaagaactacctg

SEQ ID NO: 383503 - DNA, 100 bp, Homo sapiens
caaaaagccgtttagaaagctcagtcgctttggaaacgctttcctgaatcggatgcttatagaattttatgagtcaccagatccagaaagaagaaaaaga

SEQ ID NO: 383504 - DNA, 97 bp, Homo sapiens
ttacttcttcctcaacaccagcaccgcagatgttgtcaaggtggcctaccaggaggccaggggtgtcgccatggttgcctgcggacacgctgggcct

SEQ ID NO: 383505 - DNA, 100 bp, Homo sapiens
cccatcaaatactctcagtaccagcaggcactcagaatggtccagcgtttgacataccgacgtaggctttcctacaatacagcctctaacaaaactaggc

SEQ ID NO: 383506 - DNA, 75 bp, Homo sapiens
gtgggatcgatgtttcaatattggaagcgctttgatttacagcagctgcagacaaagatcattccactcagcctg

SEQ ID NO: 383507 - DNA, 51 bp, Homo sapiens
cttttgcttccaaatacaagctgtataggctatctgggagaatcagttcta

SEQ ID NO: 383508 - DNA, 75 bp, Homo sapiens
aatgtgtgtgtgtcccgggcccagacgaattggtgttgacagctcttctaccacaagcagtgcttctccaatgcc

SEQ ID NO: 383509 - DNA, 98 bp, Homo sapiens
attgcacaaaagttccaaaaaagactcttttcccctgtcaaagctcgaaaaacagcagcagaggaaagaaaagaccagagctaagggaccttctgaat

SEQ ID NO: 383510 - DNA, 114 bp, Homo sapiens
tccatccttctggatctggccaacaccaccggcacagtgacggcttcagagggtttaccgacaagactgtgaaactttcgggatggtggtgaaaatgctgattgaaaaagatcc

SEQ ID NO: 383511 - DNA, 100 bp, Homo sapiens
ggctgcactgtcctgcacgtcgtcgctgcccactccccaggatacctcgttaagcgaagaggatcacctagcccgggtagaagaggcaatcacccgtatg

SEQ ID NO: 383512 - DNA, 90 bp, Homo sapiens
tattcaagttacttctgattggcgactcaggggttggaaagtcttgccttcttcttaggtttgcagatggcactggatctttaaaacgca

SEQ ID NO: 383513 - DNA, 100 bp, Homo sapiens
ctgttctccacatccttactggttgcctaattttatggatgtcttcacgtggtctttaccgtttgttggagaaaaagctgttctctcggattatgaaagt

SEQ ID NO: 383514 - DNA, 100 bp, Homo sapiens
cccgaataccaccccgacgcctcagcccaagaatgcaggctcaacagtaccagcagcagcgtcgaaaatttgcagctgccttcttggcattcattttcat

SEQ ID NO: 383515 - DNA, 76 bp, Homo sapiens
ggggattctcgacctgctaacagaactggaccttttcgattctgtgctgaacgcctccggtccctgctgcatactc

SEQ ID NO: 383516 - DNA, 100 bp, Homo sapiens
cgaggagtggactggcagtgggaagatcaagatggaggaaatggacgtaggggaaaggttcctagaaggtgagcgcggacggtatgcaaagttgtgaatc

SEQ ID NO: 383517 - DNA, 82 bp, Homo sapiens
tttgctgtctattcttcgctatggtgccttatgcaatgatgcttgaagcccacatgcagagctacaagggcaatgaccctct

SEQ ID NO: 383518 - DNA, 98 bp, Homo sapiens
cgaagccaagcgccgtatgggactttgggcgctgtgagcggcggcgagcaggagtacgagagggcctccaaagtggaccagtttgtgacgcgcttcct

SEQ ID NO: 383519 - DNA, 100 bp, Homo sapiens
agatgtctcgctccgtggccttagctgtgctcgcgctactctctctttctggcctggaggctatccagcggttcatagtggcgtcatgcacgcagactcc

SEQ ID NO: 383520 - DNA, 75 bp, Homo sapiens
aggtcgcagcagcgtgtcgcctccggggggcgtagcaaggagtatgcatcaacaattgtgtcaggaacttcaaag

SEQ ID NO: 383521 - DNA, 48 bp, Homo sapiens
tggacggcttgacagccctgcaccagcagtagaagactcagaaagtgg

SEQ ID NO: 383522 - DNA, 101 bp, Homo sapiens
atctaccgtcatcgtaaagattatgacaaatcacaacttgtagaggaatgtcgttgtctgctgggtcttcccctcttcattcccccaagattactccacat

SEQ ID NO: 383523 - DNA, 98 bp, Homo sapiens
tggctgtagctgcagtaaaatgggtgatgtcaaagagaactatcttgaaacatttatttccagtccaaactttgggatgcgacatcagcaaatgagag

SEQ ID NO: 383524 - DNA, 80 bp, Homo sapiens
ctccatcacccaccaacaacaccacaataatccacagccaaggtggataatattaatgcagctgtgatggatttgaaaaa

SEQ ID NO: 383525 - DNA, 96 bp, Homo sapiens
gctgccgctgccgctgccgcacctccgtagctgactcggcgaactgtgatgaagagccttatacttaggaagacacaactacctttgaacagtcct

SEQ ID NO: 383526 - DNA, 50 bp, Homo sapiens
tggaggagatggactggctcatagtttgtgtttcaggagctggctgccag

SEQ ID NO: 383527 - DNA, 82 bp, Homo sapiens
tgccagtcccctgccccgggcaaagcccatctggtccgccgagcaggttttaaaatcaaagatgggaaaatcggagaaaatt

SEQ ID NO: 383528 - DNA, 75 bp, Homo sapiens
tgttcaagactgggcttccaccgagcaggctctttcaagtgagtcatttgagagacttccagtttttaataagtc

SEQ ID NO: 383529 - DNA, 82 bp, Homo sapiens
acccagtggtgaaagaaggacggacactggatgccaaggactgcctccgggcctgccaggagcagatcgaagccctgctgga

SEQ ID NO: 383530 - DNA, 51 bp, Homo sapiens
gaagagggcagcagagtcacagctgcaggaatgctgtctctgcaatttgag

SEQ ID NO: 383531 - DNA, 99 bp, Homo sapiens
cgctcgctccggcgccggcctcgcctcctcgcagcagcgccatggatgataatgaagataattcaaatgatgggacccagccatccaaaaggaggcgaa

SEQ ID NO: 383532 - DNA, 74 bp, Homo sapiens
agatcattgacaagactcaactgaactcctccagcctccagaaaactctgtccctacctgtggttgtcatcgtc

SEQ ID NO: 383533 - DNA, 83 bp, Homo sapiens
ttagtatcagccaaacttgcagctgttcagaccgcgctccgccgagatctggtggctggacccagagctgacctatggctgcg

SEQ ID NO: 383534 - DNA, 85 bp, Homo sapiens
aagaaatgatggaaggagaaacaaacttcagctctgaaatagaagatcttgcaaggtgtaatgttcaagctcagaaatgccttat

SEQ ID NO: 383535 - DNA, 82 bp, Homo sapiens
cgacaacatggaggccgtgaagaccttcaatagcgaggacctgaaggagaagaaggagaaggtggaggagaaggcaagccgg

SEQ ID NO: 383536 - DNA, 100 bp, Homo sapiens
gtttgctttgcttctgtcaggatctccagggcactattatcaaaagtcaaaatatgactcaagtgtgagtggtcaatcatcttttgtgacatccccagca

SEQ ID NO: 383537 - DNA, 100 bp, Homo sapiens
caagaagaaagacgtggcagcaagcgggagtcggggatagtgtcatcggttcggtaaagtttctgttctctgggtttaatgaagaaattcattcgatgtt

SEQ ID NO: 383538 - DNA, 75 bp, Homo sapiens
ggccgtcaggcagttggttgggacccgctccaaccctcggtggacccaagtggagagattgtggaactggcgaaa

SEQ ID NO: 383539 - DNA, 100 bp, Homo sapiens
acaatagctcaaggaaacctttccaacacagatgtccaagctgccaaaactgctggtgaggacactggagtaatatacccgtctgtagaagactctcaag

SEQ ID NO: 383540 - DNA, 88 bp, Homo sapiens
ggggcgcggggtctgcaggacgtgctgaggaccaacctggggcccaaagggaccataaagatatcactttgggaagcagtgacatcca

SEQ ID NO: 383541 - DNA, 74 bp, Homo sapiens
gcagccgcgggcgcccgaggggccgagcgagttcgactattacaactcggtcctgatcaacgagagggacgaga

SEQ ID NO: 383542 - DNA, 85 bp, Homo sapiens
agcagcaggtttgatcaaccattcttctcagagcaagaaacctaccatactggaaccctgcctacgccatgaggacaggcccagg

SEQ ID NO: 383543 - DNA, 100 bp, Homo sapiens
acttcatgcagctggtggaactagatgtgtctcgaaatgggtgtccttctgtgctgaacatgtccgtaggaatgccctggcacttcatgctcaaatgaag

SEQ ID NO: 383544 - DNA, 152 bp, Homo sapiens
tccctctctggccactatggaattctaatttgaaccatgtttggattgaagccgcctctgtattacttaccaggtaagtaaggaggtctctgtaccatggctcgtacaaagcagactgcccgcaaatcgaccggtggtaaagcacccaggaa

SEQ ID NO: 383545 - DNA, 101 bp, Homo sapiens
agtgtgattgccaacttcatccctttctctgatcacaaccagagtccacggaacatgtaccaatgccagatggagactcaccgcactgtgttaaaccagat

SEQ ID NO: 383546 - DNA, 82 bp, Homo sapiens
gcccgtgccgcgagcgcggcctgcaggaggggcctagaagacagttcccaggaggccgaggacgaggcatcggggctggggc

SEQ ID NO: 383547 - DNA, 100 bp, Homo sapiens
ctggtcgtcgtctaccgtctcgctatagccgtttgagggaagaaggaggaaaattacccggtatcgttagagtgaccaaagacttgaccactcaaagtcc

SEQ ID NO: 383548 - DNA, 100 bp, Homo sapiens
ttccagatgaagattgatgatgaagacctgggctatcccttggagcttggctatcagaacttcctctaccccagtgagcctgacctccgagacctgcttc

SEQ ID NO: 383549 - DNA, 98 bp, Homo sapiens
tgttgctcccgcctgagcccagcccccagaaaggattgtgacatatcgttggacccagaattgaggtggtatggtcaggaaaaagactacaatgtact

SEQ ID NO: 383550 - DNA, 74 bp, Homo sapiens
attaaaacgagatgacagaagccaaagtaattatggtgatggcatcagctgagaagggaaggaagcccatgtga

SEQ ID NO: 383551 - DNA, 82 bp, Homo sapiens
cgaggaagttttctactgtaaagtcaccaacgagatcttccgccactacgaggcagctggtggaatttttgaagaaaatgga

SEQ ID NO: 383552 - DNA, 74 bp, Homo sapiens
agaaatgaggacatatcagtatcggtgcaagcggtcttctctgtcttctttatggccagtaaaattctccagaa

SEQ ID NO: 383553 - DNA, 100 bp, Homo sapiens
accgaaaagaagatgatacaaatgaatttgttagtgctgtgtgctggagggcactaccagatgggggaactctaatgatccaggacaaagaagttaccct

SEQ ID NO: 383554 - DNA, 75 bp, Homo sapiens
ggaatatttagcaaggattcaaggctttcagaggatcccagaccccagccacctccccttggtggccccttggaa

SEQ ID NO: 383555 - DNA, 100 bp, Homo sapiens
aaacgatctcaaagaaaactgtcaggagcatacaagaggctccaggtttctgacaaagcgggagcaaaaattaatgcaacggcgacaacatgcagaggag

SEQ ID NO: 383556 - DNA, 98 bp, Homo sapiens
gcgtttgaagaggtggaactcctagggcttttttgagagtgatgcctgaaaacttcatgcctcctgttcccatcacatcaccaatcatgaacccgttg

SEQ ID NO: 383557 - DNA, 75 bp, Homo sapiens
acctctgcgatcccgggtcatctccagatgctagggttatggactgtattggtgatcacgtaccgagaaccccca

SEQ ID NO: 383558 - DNA, 82 bp, Homo sapiens
cagtcttaaatatctacccatggaataaagagctgtatttgatcaggcttcacaggctgctcaagaagccgagatcaatgcc

SEQ ID NO: 383559 - DNA, 74 bp, Homo sapiens
ggacgacgagcgcagctgtcggggccgcgagtcggacgaagaccgagacatgggtgcccggcaccgcgcccgag

SEQ ID NO: 383560 - DNA, 75 bp, Homo sapiens
aagaaagggaagctattgctgggattttgaggaggacagaccagagatttgttttatgaaaggtgcttacgaaca

SEQ ID NO: 383561 - DNA, 98 bp, Homo sapiens
tggagtacaccttcagcctcaccgtgtggaaggccggccgcaaggaggaggccaccaaccagacggcaagttgctccctgagctgctccaaccttata

SEQ ID NO: 383562 - DNA, 100 bp, Homo sapiens
gttgtgatgagttctggagggcatcaacatttggtcagctgtttggagacattgcagaaggctctcaaaggggtcgctgtgatgaaattcaagaaccccc

SEQ ID NO: 383563 - DNA, 97 bp, Homo sapiens
ccgggataaggacaagagatgggaagcttaccacagtgcggagactcctttctgaaaaggccactcacgtgaacactagggatgaagatgagtatac

SEQ ID NO: 383564 - DNA, 83 bp, Homo sapiens
ctgccctctcgctttccctctcgcgtctctggctgcagtacctggagtagaacagaaaaattattatgtctgtgttcccttgg

SEQ ID NO: 383565 - DNA, 74 bp, Homo sapiens
catgatacagttgataaaattgttgatatgattctataacagactcttccagaaatgatatgaagaggaaattt

SEQ ID NO: 383566 - DNA, 101 bp, Homo sapiens
gccgcctgaccacggcgactggacttacgaggagcagtttaagcagttggaagatgctggctcaagtagtttagataatctactaagtagatacatctcag

SEQ ID NO: 383567 - DNA, 100 bp, Homo sapiens
tggtgctcctggagccaaaggtgctcgcggcagcgctggtccccctggtatgactggtttccctggtgctgctggacggactggtcccccaggaccctct

SEQ ID NO: 383568 - DNA, 101 bp, Homo sapiens
agaaacccactgaagacgtctgcgtgagaatagagaccaccgaggtactccaaagattcaggtttactcacgtcatccagcagagaatggaaagtcaaatt

SEQ ID NO: 383569 - DNA, 80 bp, Homo sapiens
gggcaaggggacgtctgcagctgagtggagctgatcagaataatgttcagcatcaaccccctggagaacctgaaggtgta

SEQ ID NO: 383570 - DNA, 100 bp, Homo sapiens
gattccttacttctccgccaacgcggtcatctcgcagaacgccatcaaccagctctctgcttatgataatgtcaacaaagttcgagtagctatcaagaaa

SEQ ID NO: 383571 - DNA, 83 bp, Homo sapiens
gaataaccttcatcaagttttatgctccatgggagactgcattgcttattgatccaaaaaattcctgttcttcatcccgccag

SEQ ID NO: 383572 - DNA, 100 bp, Homo sapiens
agagcagcagcagcagagatgataacatgtttcaggactcagcccaaaaccatgtttgcccaagttgaatctgatgatgaggaagcaaagaatgagccag

SEQ ID NO: 383573 - DNA, 75 bp, Homo sapiens
gcggctgcgctccataaaggcagacgacaaggacagagcgggatgccaccagcttgtccaaagggaagttccagg

SEQ ID NO: 383574 - DNA, 100 bp, Homo sapiens
tgaacgtcaccgaggagaagtaccaggaggcgttggccaaggtacgctggggaggaggaggaggaagggagcggcagcagtgaaggatttgacccccctg

SEQ ID NO: 383575 - DNA, 75 bp, Homo sapiens
tttgtggctcactacctaagggcccagcaggaggatgcattagcacaacaggcctttgaagaggctcggagaagg

SEQ ID NO: 383576 - DNA, 100 bp, Homo sapiens
tggtcactattcccacccttgcctcgaccacttgtctcaatgtcaccacctcacgccctgttccagcaccaccacctccaccaccatcaaggggagggcc

SEQ ID NO: 383577 - DNA, 95 bp, Homo sapiens
ttcgcagtggtcgcttcttctccttggatttatgagcagcttccagaagtacagaaaaagagagaagaagagaagagaaaatcagaatataagtc

SEQ ID NO: 383578 - DNA, 100 bp, Homo sapiens
ccgcccagcccaaaccaggagattgcgagggagcgatgcggtgcagcgcggtggcctgtgagtacggcatggtgcacgtggtctcccaggccgggggccc

SEQ ID NO: 383579 - DNA, 107 bp, Homo sapiens
caaacataaagatgaagtgcttaattcaaggtcacacaatgtcggggatggacctccagatttccttactggcctgcactgcccaaagtcttggaaacttgctggat

SEQ ID NO: 383580 - DNA, 75 bp, Homo sapiens
aggtggaagatgcaatgctgatgtttgataaaactaccaacaggcacagaggttcattggcatggaaaaatgttc

SEQ ID NO: 383581 - DNA, 50 bp, Homo sapiens
ccatgcccttctgcttcaaacaggataaaagaatcagagtgtctcaaccc

SEQ ID NO: 383582 - DNA, 75 bp, Homo sapiens
ctggatgagacatttgctacagcatcccacattaagtcaacggaatggcggcgctagatagtaaggcatcaggga

SEQ ID NO: 383583 - DNA, 83 bp, Homo sapiens
aaaaatattatggtctttgtgcacatttacatcaaggtgccttagctggaccaattattgtggagccacatgtcacagcagta

SEQ ID NO: 383584 - DNA, 75 bp, Homo sapiens
tggaaggttcacacggtcacagaccctcattcagaatggtattattaacccaaagaatccaaaggaagctccaaa

SEQ ID NO: 383585 - DNA, 100 bp, Homo sapiens
ctggacttcaaatctctgcactcccggccgggtggtgggcgcatatcctgggtagcctctaggaagcgctagacacattttcttatctcagtcatcacta

SEQ ID NO: 383586 - DNA, 100 bp, Homo sapiens
cagcacagttcctgggaaggtggagccaccagcctctccttgatatagcccttggcgaggtgcctggctccatagtaagtgttcaacaaatgtttgaata

SEQ ID NO: 383587 - DNA, 83 bp, Homo sapiens
cccaaaagggagagccctctcccacatgggagagtaacatcacagagaaagactcagttatctccagaagaagaagagaaaag

SEQ ID NO: 383588 - DNA, 100 bp, Homo sapiens
aagatgattttacatccattattgggaaatgtcaaggtcctcatgctgataccgccagtggatgccagaatttgcagtgtggttttcgagcctgctgccg

SEQ ID NO: 383589 - DNA, 83 bp, Homo sapiens
cctcacggcaacgggctgctctacgccggcttcaaccaggaccacgcgggctgacgcacgaggcacacaggaaggaggtggag

SEQ ID NO: 383590 - DNA, 50 bp, Homo sapiens
ggaatattacgtgttttagaaaaggttcgagaacttgtcttggacaattg

SEQ ID NO: 383591 - DNA, 75 bp, Homo sapiens
gcgctgttggaaagcggctgcgtagacaacgtcctgcaagtcgttaacccagtatccactccagttgcacttccc

SEQ ID NO: 383592 - DNA, 100 bp, Homo sapiens
tggcttatgagtggaacatggctagcaggaatgcttactgttgcgtggttcgttattaacagaatgtcatacccaggctatcccccaacaggctacccac

SEQ ID NO: 383593 - DNA, 100 bp, Homo sapiens
gccgctctagcggccgggactctgaactatggcgatcgtcagtatttaaacagatcacatcatgcgtgagtacaagctagtggtccttggttcaggaggc

SEQ ID NO: 383594 - DNA, 99 bp, Homo sapiens
cattattatccagcaagaatgttcgtgtcaactgtttggacgagcctactttggggataaaggattatttggtcttctggatttggaggcaatcagcgg

SEQ ID NO: 383595 - DNA, 82 bp, Homo sapiens
gatgcctgcagagctgtggcttaccaggaggcaggtggaagtcatcataaagtttctgtttcacccgtcgtccatgttcgag

SEQ ID NO: 383596 - DNA, 88 bp, Homo sapiens
tttgggtgctgttgagtgttttgaagaagaagacagtaatagcagggaatcattatccttggctgagctaaagaatccctgaaacagg

SEQ ID NO: 383597 - DNA, 83 bp, Homo sapiens
cagggccagcagcaggcgggaggttgattcttcaccacactgaaaccattaggaaaaatccttgtggttaacagcagaggctt

SEQ ID NO: 383598 - DNA, 73 bp, Homo sapiens
aaaaggagcattctacagcagtagacaacgtgagtctcagagaggtttagtaatctctccaaggtcccacagt

SEQ ID NO: 383599 - DNA, 75 bp, Homo sapiens
ggtcatcgatgcgggagtatgtaggagacttgtggaactgctgatttgaaatggatgcagtcagaactgaatgtt

SEQ ID NO: 383600 - DNA, 75 bp, Homo sapiens
gactgcctccccacaccaccgaccaggacctggtgaagctctgtcaaccacacgttggtcgtcattgcctccgag

SEQ ID NO: 383601 - DNA, 83 bp, Homo sapiens
ctcggggtgtccatcacaaaagccgagcaattctgtggtgttcttggtcacacatttatggagtttctgaagggcagtggaga

SEQ ID NO: 383602 - DNA, 83 bp, Homo sapiens
ggccagcctgctcatcgcctactgcattgagaagctgatgtctcctcgacttccaactggaaccttgaacccccacatttctg

SEQ ID NO: 383603 - DNA, 101 bp, Homo sapiens
ctgccgtcaagatggaggggcctttgtccgtgttcggtgaccgcagcactggggaaacgatccgctcccaaaacggtacatcaggaacgtctctatcaaga

SEQ ID NO: 383604 - DNA, 74 bp, Homo sapiens
ggcgggaagaggagtgcggaacccgcgggaggaaatcatccacaaagggcacgtggtcacagaggagaccttca

SEQ ID NO: 383605 - DNA, 83 bp, Homo sapiens
cggtggactccttcggcagtccacccaccgccgccgcctcccaggtcagcccaaggctgccccctcggtcactctgttcccgc

SEQ ID NO: 383606 - DNA, 75 bp, Homo sapiens
cgaataaagtttatcacgccgggttctccagagagattgtaccttcagcaaacaatatatgaggataccttctgc

SEQ ID NO: 383607 - DNA, 75 bp, Homo sapiens
ccggtcccaccggggtatcttcagccgcctccttgacagtcttcggcaggaagctcttttgtgacagggacggct

SEQ ID NO: 383608 - DNA, 100 bp, Homo sapiens
gaaaataaattgcctctaactttaacaaatgtggcaattattttggatctatcacctgtcatcataactggcttctgcttgtcatccacacaacaccagg

SEQ ID NO: 383609 - DNA, 100 bp, Homo sapiens
cctgaagctgcaggatacctgccgtactcagccaacacatatctctttatggtacaagctcgaggtataatgttgagagaaaatgtgaaaacaataggtc

SEQ ID NO: 383610 - DNA, 75 bp, Homo sapiens
ccctcatggggaaaatctccccggtgactttcagatggcgtcccatgtagagtgccgtcctctgggagtgtttga

SEQ ID NO: 383611 - DNA, 100 bp, Homo sapiens
ccagccgctgttttgccggaggagcccctcaggccgaagctctatgcagaactgtgccaaggcatcgtggacatagccatttccagtgtcttcccacccc

SEQ ID NO: 383612 - DNA, 100 bp, Homo sapiens
caaaagcgcactaaatcgtctccaagggactatgttcggagtgaactggagtttgcctatgagggaccaatgtatttagaacctctctctatgaatcggt

SEQ ID NO: 383613 - DNA, 51 bp, Homo sapiens
acaaggcttatctctaggatccataagggcttcgtgggacacatatgcaac

SEQ ID NO: 383614 - DNA, 76 bp, Homo sapiens
cacccgccttttctctctctcctctggcaggatgaggcgtgcaggcctggggtcttactgaagtaacacaaagctt

SEQ ID NO: 383615 - DNA, 100 bp, Homo sapiens
cctaacttctactgacgaagcttggaagttgcagaaggagagtagttatcttgatggaattagaagttttgaagtcagctgaagcagttggagtgaagat

SEQ ID NO: 383616 - DNA, 100 bp, Homo sapiens
tgttgttttgggtatttcatctcgggaaggagaggaggagcgctatagttatgtctgcccagatttagtaaaagaatttaacaagtatgatacagatggg

SEQ ID NO: 383617 - DNA, 75 bp, Homo sapiens
aacaagactggggctgctcccatcattgatgtggtgcgatcggagtctactcttcatcttgtgttgagacttcgt

SEQ ID NO: 383618 - DNA, 100 bp, Homo sapiens
cttttcaagaaagcaggatggactatcattactcctccaacaccaatcatcccagacgctttatttgaaggtagacgcatcgaatttgcagaacaaataa

SEQ ID NO: 383619 - DNA, 95 bp, Homo sapiens
cgggcgacctgggcaccagcaggacccgaggccaggagccaggggcccagaagcatcaagatggtgctcatgtggaccagtggtgacgccttcaa

SEQ ID NO: 383620 - DNA, 74 bp, Homo sapiens
tacgtctctgctcttcagtacaatcctgcaagaaaattggatgtatattttgaatatgaagaaaaaataatgag

SEQ ID NO: 383621 - DNA, 100 bp, Homo sapiens
ctggccactatggaattctaatttgaaccatgtttggattgaagccgcctctgtattacttaccaggtacatgtcccagagcaagcacacggaggcccgg

SEQ ID NO: 383622 - DNA, 83 bp, Homo sapiens
ctcaagtcaccgtggagctccgccgccccgaaactttcaccgcgagcgggtagctaaaattggtgctttctgctgtggcctta

SEQ ID NO: 383623 - DNA, 98 bp, Homo sapiens
cccggacagtggcagtgaaacaggaccttcgtggggatccaggcctctgaggcctccaggatggaggatgccaccaacgtcgtgcgtggcctcatcgt

SEQ ID NO: 383624 - DNA, 97 bp, Homo sapiens
tggggctaaaaaaatatggagacattccagagtatgtcctggcctatattgactatctttctcacctcaatggggatggcattcctactgtatttgt

SEQ ID NO: 383625 - DNA, 75 bp, Homo sapiens
ttggatgctcttcggcctgcacgggaccatcacgcagatccgcatcctcggtaaatctcacctggctatcgtgca

SEQ ID NO: 383626 - DNA, 97 bp, Homo sapiens
tcagaaactagaaagagaagctagaatctgccgtcttttgaagcaccctaatattggcatgcatatcattctgtttcaactccccctgtttaccctc

SEQ ID NO: 383627 - DNA, 74 bp, Homo sapiens
cagaaactggaggagtcccgctcgaagctagtttgcttgcctaaactggacttgaagcaatttaaactactgga

SEQ ID NO: 383628 - DNA, 88 bp, Homo sapiens
gctgagcttgccgcacaaaaagctagagaggatctctatgacgctggagtgaagaggaaaggaactgatgttcccaagtggatcagca

SEQ ID NO: 383629 - DNA, 80 bp, Homo sapiens
agagggaagagattcagccagcacactcctcgcgagcaagctgcagaaccttggcctgaaaatgctacattatatcagca

SEQ ID NO: 383630 - DNA, 96 bp, Homo sapiens
gaagttaatgaagtaggagtcttgaatcctaatgagcagccaactcataaattccacttctgccccaccaacgttgggccaaccaaaaggagtcag

SEQ ID NO: 383631 - DNA, 75 bp, Homo sapiens
tcccgcagtacaagaactggagagggatgtcaagaaagcagagttgcatctgtctacagaaagggccaaagttga

SEQ ID NO: 383632 - DNA, 75 bp, Homo sapiens
aggctgaagcccaagcacacgtaaaagtgcagttttaaagtgtctcctggatattcacaaaatttttcaggaaaa

SEQ ID NO: 383633 - DNA, 97 bp, Homo sapiens
gcccgagacacaccaggccggcaggctgagaaaagcgagaccgcgtgcgaggaccggtttggtgcacctcgatttggaggaagtagggcagggccct

SEQ ID NO: 383634 - DNA, 90 bp, Homo sapiens
tggccggcagcgtcccggacgaggagtagagacgggatttcaccatgttggtcaggccagtcccgaactcctgacctcaaatgatccgcc

SEQ ID NO: 383635 - DNA, 100 bp, Homo sapiens
gggactggggggaccagtactctgccgagtgcggcgtatgaagtgaaggctcctgttccttctgcctgtttcaggaatatttgtaagcaaatgacaaaaa

SEQ ID NO: 383636 - DNA, 90 bp, Homo sapiens
caacattcttggcattacgcaggccagcaactcccagctcaatgcaatggtgtcttcaaaaacaaacatatttaaaagattttacttctc

SEQ ID NO: 383637 - DNA, 100 bp, Homo sapiens
ttcataattggagaaacaccaaaaggaatccgcagtactatactggcaattgctggagaagattttgcaattgttgcttctgatactcgattgagtgaag

SEQ ID NO: 383638 - DNA, 75 bp, Homo sapiens
tgctcataaggattgtcctctttctacaaaagcctccacctcagatatatgacaagcagttggatgaaagagaac

SEQ ID NO: 383639 - DNA, 98 bp, Homo sapiens
tcagagggacttgtacagggatgtgatgttggagaactacagcaacctgatctcattgggagaaattgacacaagattctctttttgtgcggtggcaa

SEQ ID NO: 383640 - DNA, 100 bp, Homo sapiens
acgcagctccacagacagccccagctcggtgttcctcagcattcctctgaatattgatttgctgaatagcccagacttattggaagcaacgattggtgat

SEQ ID NO: 383641 - DNA, 75 bp, Homo sapiens
atgatggcagcgaaaacttatcacggttttggtgtgatgaatgcagactctgctaccattttggctgtttggatc

SEQ ID NO: 383642 - DNA, 101 bp, Homo sapiens
gagccaccgcaaggagatgcagctgtacaacagcatcttcagcctgctcagcttcgagaagattggctacacaggccagttatccaggcagtgactttctg

SEQ ID NO: 383643 - DNA, 50 bp, Homo sapiens
atccttcagcaaaagctgtccttacaggggagttgctgagtcagcccaga

SEQ ID NO: 383644 - DNA, 82 bp, Homo sapiens
atgaagcagctggtggggctctactgcgacaagctaagaagaaatttcctgacttgtttgtcttcttggaagattcctcctc

SEQ ID NO: 383645 - DNA, 112 bp, Homo sapiens
aggtagatcatgaaagagatcctggacctatgaatatccagtttgagccatcggatctaagatccaaaaggtcgttgaggacttccacatggagattggcacaggaccagac

SEQ ID NO: 383646 - DNA, 90 bp, Homo sapiens
gcaggatatacgtactgtgggtcttgtgctgcccatgcttataaacaagtggatccgtctattacgagcttgtggaaacacttccgtgct

SEQ ID NO: 383647 - DNA, 51 bp, Homo sapiens
gtttgggttcgccagttggaattgaagcaattctggggtcagaagccatgg

SEQ ID NO: 383648 - DNA, 82 bp, Homo sapiens
atttccggagtcagtcattttactgtcaagacatttcttcggcattctgcaacagagtactgtggacaaactcattaagaag

SEQ ID NO: 383649 - DNA, 50 bp, Homo sapiens
aggcgactgcctcatcttcaagagagccttgggattttaaaagactaccc

SEQ ID NO: 383650 - DNA, 100 bp, Homo sapiens
aaaactaccattcgcctgatgaactctcagcccatgactgaagagttgctgaaacaacaaaagctgaattcacatgagaccactataactcagcagtctg

SEQ ID NO: 383651 - DNA, 75 bp, Homo sapiens
aaagtttcattgtgtatgtagaagaccagaagtggatggagagatgagaacaagttgagcagtgccaacggccat

SEQ ID NO: 383652 - DNA, 75 bp, Homo sapiens
gtttcttctgtttgatactgaaaagcagtatctggagtccatctttcaccatcttctcctgagattgtactggac

SEQ ID NO: 383653 - DNA, 100 bp, Homo sapiens
cgccggctcgggggccgacacagagaatgcaagatggagattgaagacaaaaagcaggagctccttgaaatggatcaggcacttaaagagagaaattggg

SEQ ID NO: 383654 - DNA, 74 bp, Homo sapiens
gaactcgtcctacgtaacacagccagttagacccgggaaaaggagaagatgaaggaagccaaggatgcccgcta

SEQ ID NO: 383655 - DNA, 99 bp, Homo sapiens
gcggcgcgcaccaggcggatgccccagccggggcccagcgaacgccagctttaatcgccttgacttacctccatatgaaacctttgaagatttacgaga

SEQ ID NO: 383656 - DNA, 83 bp, Homo sapiens
gactgaaccattgcttctgctttcggggatgcagctggccaagctgatccgacagagaaaggatccaaactactggatacagg

SEQ ID NO: 383657 - DNA, 106 bp, Homo sapiens
cggtcattgtctcccctccagctctactcacaggctccgatggcggcggccgccctgagggaccccgctcaggtgccgacgccaccgccgagcccatgatcctgga

SEQ ID NO: 383658 - DNA, 75 bp, Homo sapiens
aaaagcgcactaaatcgtctccaagactctccagaaagagcaacagtaatggagtacatgagcactggaagtgac

SEQ ID NO: 383659 - DNA, 100 bp, Homo sapiens
tcaacgagggcatctgcaaccgcaacatcgaccagaccatgctctccatcctgctcttcttccacagatttggagcaagaggtggtggtggccttccccc

SEQ ID NO: 383660 - DNA, 96 bp, Homo sapiens
atttgcacagtcggctgggcggtgcaatggcggtatgaaagtatcatcgccactctgtgtgagaacttagactcgctggatgagccagatgctcga

SEQ ID NO: 383661 - DNA, 74 bp, Homo sapiens
aagagccatggaaacaggaggaagaattcccaagccaaagctttccagaggaattacggaggttgagctggtcc

SEQ ID NO: 383662 - DNA, 74 bp, Homo sapiens
aaagtgtgctggggcggaatttcaagatggatcgggtgtatgcaacagcgttattgcaacaggctaacgaaaac

SEQ ID NO: 383663 - DNA, 96 bp, Homo sapiens
tgtgtgtacattcgaaactccactgaaccttgattgaagacctacagtgtggcagtccatggcctggggactggtgtgatgaatgcagactctgct

SEQ ID NO: 383664 - DNA, 74 bp, Homo sapiens
aaccgacagcctcctccgagaagggctccccatcaacccgggcagccgggatttaaattcacggtggctgagtc

SEQ ID NO: 383665 - DNA, 74 bp, Homo sapiens
ctcgctcacgcagcaggagcaggggacgaaggaatagtgctgagcctgctgctgtaattgtggagaagccactg

SEQ ID NO: 383666 - DNA, 100 bp, Homo sapiens
ccgtctgcaaagtgtccccggcaagaaggtcaaactgtgctgaaaatatccgcaaacacattctgcatactggcaaacatgaaggagtcaagatgtacaa

SEQ ID NO: 383667 - DNA, 75 bp, Homo sapiens
aaggaatggtaactagtcttgatcagcttaaggacaggaagatgtcacccaagcgcatagctaaaagaaggtccc

SEQ ID NO: 383668 - DNA, 74 bp, Homo sapiens
ccagatctccatctccaaaaagaaggatcccatggtccattattgcctttaccaagtcgttacagaatgggctc

SEQ ID NO: 383669 - DNA, 100 bp, Homo sapiens
attccaagtaactcttatttggcatttcacatcaccaatgatgagcccatccctttctggacattcctgtctcgcatcctgacaggcctcaattatgagg

SEQ ID NO: 383670 - DNA, 83 bp, Homo sapiens
atttgatttccggagtcagtcattttactgtcaagacatttcttcggcattctgcaacagataatgtacaacggccagccaat

SEQ ID NO: 383671 - DNA, 50 bp, Homo sapiens
gccattcggagctacatccagtgaataagatttagtggttgaaggactgc

SEQ ID NO: 383672 - DNA, 82 bp, Homo sapiens
tgaagctgcagatctgggacacagcggggcaggagcgcttccgcaccatcacctccacgattttttatcaagcagaaatgca

SEQ ID NO: 383673 - DNA, 75 bp, Homo sapiens
ttgttaaggattccaagtaactcttatttgccacccctgaatgctcaaatgttggcacaacgtcagcgggaactg

SEQ ID NO: 383674 - DNA, 75 bp, Homo sapiens
tgggggaccctttgtcatgaagcagccctccggagagctgtttgagattgaaatagacaccctggaaaccacctg

SEQ ID NO: 383675 - DNA, 87 bp, Homo sapiens
gaaccctggtcaccgtctcctcagagatcctgaaggagctagacgagtgctacgagcgcttcagtcgcgagacagacggggcgcaga

SEQ ID NO: 383676 - DNA, 98 bp, Homo sapiens
caatggtcccaagggaggttatgttgccctggatgatatttcattctctcctgttcactgccagaatcagacaggcgcatattaaatttcctattgac

SEQ ID NO: 383677 - DNA, 97 bp, Homo sapiens
aaatcagacagaacagttaatcctcaatttaagcctgatctaacccctagaaacagtgtttgaaagatgtatggtgatcttgaaacctccagacaca

SEQ ID NO: 383678 - DNA, 75 bp, Homo sapiens
acagtggaaaggaaccgttctggatcaggtttccaggagtggccagaacaactccgtctttaccctgtatgaact

SEQ ID NO: 383679 - DNA, 83 bp, Homo sapiens
tctcgttgctgcctctgtgtacgctgaggggggagtcaggatggctaaaggtgaccccaagaaaccaaagggcaagatgtccg

SEQ ID NO: 383680 - DNA, 90 bp, Homo sapiens
ggacggcgcggcagagtccccgtacgcctacagtaacgagcaccccaagatctggctacctcgggccctgaggcagacctacatccggaa

SEQ ID NO: 383681 - DNA, 100 bp, Homo sapiens
ccttcctaggagaaatcgaggagctgcggctctaccccccggagttcgttgaagaatataacaacgcttaaaatagatgaaaaccagttaatgtatctgc

SEQ ID NO: 383682 - DNA, 74 bp, Homo sapiens
gtttctcctatcagggtcgggcttccagattttggctatggaaaggggaaatgttctaagcagagcccgtcagg

SEQ ID NO: 383683 - DNA, 97 bp, Homo sapiens
cattgatccggaggaggattcgcagttcaacatcaagggacaaaagtggctctcaatccagcacatgcacattgaagcaagttaaaggatttaatat

SEQ ID NO: 383684 - DNA, 100 bp, Homo sapiens
cttctatatccatggactcagtattatcaaggttgctccttgagggcaggacagttcttatggctttatccgttgcgtaagcacagagaggtctgcgagg

SEQ ID NO: 383685 - DNA, 128 bp, Homo sapiens
aagaaagaacttttgcagagctgtgatgttttggggattccactctccagtgtaatgattattgacaacagggcaattgaaggaacagactaaaaatcgtgtcctggaaggaaactacaggtactacc

SEQ ID NO: 383686 - DNA, 100 bp, Homo sapiens
aggcaaaccaccatcacatctcattttgcaaagggggagccatttgtgcaggccaagctgcggcccgaggacggcctgtacctcattcactggagcacca

SEQ ID NO: 383687 - DNA, 100 bp, Homo sapiens
tgcgagctcctcaagaatctcgtgctcaccggtttctcccacatcgacctgaacccagtgacttgattgtaaaaatttacagagcggaatcatatgctgg

SEQ ID NO: 383688 - DNA, 100 bp, Homo sapiens
gtgttggaccttccggagcttctcagaagacagagggttttcttttgagaagtctgtcaagttgatgaacagattgagaggcaacatcaggatgaccaag

SEQ ID NO: 383689 - DNA, 100 bp, Homo sapiens
tgcaccccaggctatctctcagagaagctggagctcatggaacagcacagccaagacttcatcaaggttgggtcttgaggcaaaaaaagaagaaaatctt

SEQ ID NO: 383690 - DNA, 100 bp, Homo sapiens
ctcacctcacccacgcgaaaaccttcctcaggtcctggtgcttgatggtcgaggccatctcctgggccgcctggcggccatcgtggctaaacaggtactg

SEQ ID NO: 383691 - DNA, 74 bp, Homo sapiens
taatgtggaacctggatgaatgtagagagaaagtacttcaaggtgctggagaatctggtaaaagcaccattgtg

SEQ ID NO: 383692 - DNA, 51 bp, Homo sapiens
gcaaggctgagggacgagaacgaggtgttgacttcaaaatcaaaactgtag

SEQ ID NO: 383693 - DNA, 82 bp, Homo sapiens
tcagccaagacaggagactctgaaaaatgccagctgtgggacaaggagtgcaggccgcacaacctcggcaggcaccgggggg

SEQ ID NO: 383694 - DNA, 101 bp, Homo sapiens
gaacgaggcaaggagctaaagcagcgtgcgttcagccctgggcttcctgcctgacacagctcacttcaagaagtgcacaatgtcagaacgtggaattaagt

SEQ ID NO: 383695 - DNA, 51 bp, Homo sapiens
ctcccatcattgatgtggtgcgatcgagagaactcgatgccaccgcaacgg

SEQ ID NO: 383696 - DNA, 75 bp, Homo sapiens
tgcaagatgaaaggagaaggggttgaaattgttgatagaggatggccccagaagtaattttagccatggatgaag

SEQ ID NO: 383697 - DNA, 97 bp, Homo sapiens
tacggaaaaggaacagattgttcctaaaccagaagaggaggttgcccagaagaaaaagattcatgcccaagcacaaaacaacccatttaaagaagat

SEQ ID NO: 383698 - DNA, 75 bp, Homo sapiens
ttccttgtcgagcacggtgcaaccccaggaactgtggctgcaccatctgtcttcatcttcccgccatctgatgag

SEQ ID NO: 383699 - DNA, 78 bp, Homo sapiens
cggaggtgtaggtaggaaccggaatacctcggaagccgggaaatgtcactattccaggtcctcaggatatagccgtga

SEQ ID NO: 383700 - DNA, 87 bp, Homo sapiens
cacctgcagggaagaacccgagtcgaagcgggaagatggctgcagacaagcctgcagctgtgctccattgaagtgacttgtgaatca

SEQ ID NO: 383701 - DNA, 100 bp, Homo sapiens
acctccagaatcaggtgtctgaaaagtggagctcatgaaggacttcagcatttgggtccttttggcaacatccccaacatcgtggcagagttgactggag

SEQ ID NO: 383702 - DNA, 98 bp, Homo sapiens
ttccccggcccacagtgggggtgtgcaaacccgagagaactgggcccgatgagagaaagggaaagttaaggatgctggagcagaacaatggatttctc

SEQ ID NO: 383703 - DNA, 51 bp, Homo sapiens
ggcagagccaacagcctcttcacgggcctcccagagtgaaggctgtgaagt

SEQ ID NO: 383704 - DNA, 82 bp, Homo sapiens
ctggaggcagccggtccaaccaaaatgatgcttcaacacccaggccaggtctctgcctcggaagtgagtgcttctgccatcg

SEQ ID NO: 383705 - DNA, 100 bp, Homo sapiens
ggaccacagaaattctgcattgaaaaagttgggaaagaaaattggctacccagaagtcatacctgcagaagaagatctttacaatccaaggctgctaccc

SEQ ID NO: 383706 - DNA, 83 bp, Homo sapiens
cggcgcctcaggcacctcggcccgggttgtgaccgagattcccgacgagagagactgaggggaagagaggaaggaggggcggg

SEQ ID NO: 383707 - DNA, 75 bp, Homo sapiens
cacccctgcagaggacacacctcctccacttccccccaagctgtgttcaattacaaaaaaagatggaaaagactg

SEQ ID NO: 383708 - DNA, 100 bp, Homo sapiens
atggatccatttctcctattgaggagtcaaccccagggccttgctgccgccatgactgaggaatcagaggagacagtcctgtacattgagcaccgctatg

SEQ ID NO: 383709 - DNA, 89 bp, Homo sapiens
gtggcacctgcgcgaagctggccaaagcctgcccagacggctcacctgtgcgggatggaacaaaagcacgagaagccctgccaacgtgg

SEQ ID NO: 383710 - DNA, 100 bp, Homo sapiens
ggacgagatgggaaggcacagggagaagggataaccctacacccagaccccaggtgaagtcagcactgtgcttaagctggataacacagtggtggggcag

SEQ ID NO: 383711 - DNA, 82 bp, Homo sapiens
acaccgccagcgcccaccctggctcaccgtgcggatctgcctccgcagaaggcctccggtgtggctgtctctgatggtgtca

SEQ ID NO: 383712 - DNA, 100 bp, Homo sapiens
ccgggctgagagcaagtacacatttgaaaggaaccctaaggactctgcaatatgaataattccctagagaacaccatctcctttgaagagtacatccgag

SEQ ID NO: 383713 - DNA, 74 bp, Homo sapiens
gctggagagcctgttggagaaacacaaagagtcatccgtccttggctcaggatttggagagcttgcaccaccaa

SEQ ID NO: 383714 - DNA, 100 bp, Homo sapiens
agaacagttaatcctcaatttaagcctgatctaacccctagaaacagtttagatgcaaaatccacaagtattcaagtgattgttaaagagggaggcctga

SEQ ID NO: 383715 - DNA, 87 bp, Homo sapiens
ctttgaaattctttcaaactggagccttattggaggattttgatgtagattcccaaatccgtgctgagatgcacagaaaaacagctt

SEQ ID NO: 383716 - DNA, 100 bp, Homo sapiens
gtggcctcaagatggatgaagacggcggcggcgagggtggtggcgatggtgacaaatatcccatggaaagtgataattcatttgatctgtttgattcctc

SEQ ID NO: 383717 - DNA, 90 bp, Homo sapiens
gcaccatgagctggggcaccgagctctggataaggagtcaggccagggcgggatgacactcattgattctaaagcatctttaatctgcca

SEQ ID NO: 383718 - DNA, 90 bp, Homo sapiens
ggagtcatttctgttccgcacaggcctgctgaactgggtgctttatataggcatgattatgatatgagggtggatgatttccttcgtcgc

SEQ ID NO: 383719 - DNA, 101 bp, Homo sapiens
gccaaagaagcagaaatgagcagaaaggagttggggcttgatgaaggcgtggatagcctgaaggcagccattcagattcagaatggacagtttagaagaac

SEQ ID NO: 383720 - DNA, 49 bp, Homo sapiens
cttcaccacttacgaaatcagggtcaagtagagacggggtttcgccgtg

SEQ ID NO: 383721 - DNA, 75 bp, Homo sapiens
gcattgacatttaattttagggtcctttatatagaagggagagtagatttgggtattcggattcccgttggacat

SEQ ID NO: 383722 - DNA, 124 bp, Homo sapiens
cagctatgcatgctgcttttgatgtctgacaacgtggatcgttgttttgaaacttcacacaaaagatgttggacaatttctacaattttgcttcatcatttgctgtctctcaggcccagatgac

SEQ ID NO: 383723 - DNA, 80 bp, Homo sapiens
caagtatatggcctccgggccggtggtggccatgctccaggccatgcccgcagccggaggtgtgctctaccagccctcgg

SEQ ID NO: 383724 - DNA, 100 bp, Homo sapiens
gaccgcctccgggagctgtttggcaaagattttactcccaaaaaagaagaggaggagagccaaccagcaaagaaaacatacacttggaatacaaaggaag

SEQ ID NO: 383725 - DNA, 100 bp, Homo sapiens
tgggccagcactgcttcatccgggaagtgcttggggatggagtgcctccaaaggttgctgagacaatgcagatcttcgtgaagactctgactggtaagac

SEQ ID NO: 383726 - DNA, 100 bp, Homo sapiens
ccggcctagaggccatgagaaggcagtgggggtctgccatgagggcggccgagcaggcgggctgcatgcgggctgacgcacgaggcacacaggaaggagg

SEQ ID NO: 383727 - DNA, 100 bp, Homo sapiens
cagtttgtttctctgtatggcacagaagaatatttggattccggagtttgaatccacctttgacaattgtccgaaagacgtttgaatcaacagaaaaccc

SEQ ID NO: 383728 - DNA, 98 bp, Homo sapiens
tcctgtggtaataagttggtggacgctggggaagagtgtgactgtggtactccaaaggctgaacttcctgtactgatgctgggaagatcatctgacct

SEQ ID NO: 383729 - DNA, 100 bp, Homo sapiens
tgctcttgaggttcacagatgatacctttgatccagaacttgcagcaacaatagcctgagaaatgccagtggcctgacagcagcagacattgcacaaacc

SEQ ID NO: 383730 - DNA, 75 bp, Homo sapiens
tgtggaacaacatcaaaaggtggcaggctgtgagatttactctgattctgggaaccatgcctccatgatccaagg

SEQ ID NO: 383731 - DNA, 74 bp, Homo sapiens
cgccgctgctacctgcagcgccgtgtggcacgacacaaaaatcagctgctacaggagctgagagaccctaccct

SEQ ID NO: 383732 - DNA, 101 bp, Homo sapiens
ggttcactcaccggccaaaggccttgcagccgccatgcaacctcctgatgcagtcagaagaagtagagtggtcagtatatatccgagccgctgtccgaaaa

SEQ ID NO: 383733 - DNA, 50 bp, Homo sapiens
ctacaggcggggacggcttctcgtggagacctttggcgacttggcctttg

SEQ ID NO: 383734 - DNA, 75 bp, Homo sapiens
cgccgagctggaccggagccgccccgcggtttcaggcattgcttcaccggcagctacccggtcattgagcccctg

SEQ ID NO: 383735 - DNA, 90 bp, Homo sapiens
aagaaactgcaaaggatgaagaggaagagcctcccagcatgactcagctacttcgagaagagagaagggcacagttacctaagtatcaac

SEQ ID NO: 383736 - DNA, 75 bp, Homo sapiens
gttgacattacttttatttgaaggaacgtatattagaggtgctggagaatctggtaaaagcaccattgtgaagca

SEQ ID NO: 383737 - DNA, 99 bp, Homo sapiens
ctcctgcagaccttcccaggaagccagagccacacacaccatcatggtcctgctgttcgggggtcttgtctggattttggttgcctcctccaatgttcc

SEQ ID NO: 383738 - DNA, 83 bp, Homo sapiens
gttatgaggcgcttccccagcacaaactgacctgcttcaggacagagcgggatgccaccagcttgtccaaagggaagttccag

SEQ ID NO: 383739 - DNA, 100 bp, Homo sapiens
tacatgccccgggaattggcatctatgtcacggactgctgagatgtcctctattcttgaagagcgtattcttggagctgatacctctgttgatcttgaag

SEQ ID NO: 383740 - DNA, 101 bp, Homo sapiens
atctggatgacttggtggtggagtgtagagatatagttggcaacctcactgagttagaatcagagattctggatgaaattgaagaacataacatcaaaatc

SEQ ID NO: 383741 - DNA, 50 bp, Homo sapiens
cgttcactgagcaggctgaccaggtggtgttcccactgatgaagagcagg

SEQ ID NO: 383742 - DNA, 80 bp, Homo sapiens
caatttctcctgctctgcagcttctgttcaggatgaaacgaggaggaagagatagtgaccgtaattcatcagaagaagga

SEQ ID NO: 383743 - DNA, 100 bp, Homo sapiens
gcatggaaatggagggcatcttcaaccacaaaggactgactgcattgcacagatgatggatatttacgtatgtttgaaacgaccatcctggatggtggac

SEQ ID NO: 383744 - DNA, 87 bp, Homo sapiens
aaaattcctgaagacaatttcttcttccaaaatcctcggattctctacttctgctgaagtgcacggctgtctataacgtgctgccgg

SEQ ID NO: 383745 - DNA, 82 bp, Homo sapiens
tctgctcctactgcttcgcgtccagacaggcttatgcaagcaaagatctggaggagcagttacggtctgtgtccagtgtaga

SEQ ID NO: 383746 - DNA, 100 bp, Homo sapiens
cggacagacaggagagggatttgtcatcagcgtgtctcatggagaaccactctggctaccctgtcatgatcaaggcctcagcaggtggtggtgggaaagg

SEQ ID NO: 383747 - DNA, 82 bp, Homo sapiens
ggtcgcccgcgattctcagggattgatcgcctcttcaggtgacttaagagattaaaattaatttggttgctgttggttctga

SEQ ID NO: 383748 - DNA, 100 bp, Homo sapiens
gagcgcgagagcttcgagcggactcagcatggccgaaacagaagccctgtcgaagcttcgggaagacttcaggatgcagaataaatccgtctttattttg

SEQ ID NO: 383749 - DNA, 50 bp, Homo sapiens
tctccaccaaattctcagcctgataaggcccagcgacttctccgtgtccc

SEQ ID NO: 383750 - DNA, 99 bp, Homo sapiens
ctgctcgcgcctccccaactcgggtaaagctcctcggcctcggcgtgctgcgcctccgcggctgccctgcgccaggccccttcccagctgcctgcctgc

SEQ ID NO: 383751 - DNA, 100 bp, Homo sapiens
tttcttatatgtgatgccattccagcactggactcatggaggctgagcatttattcaggagcaggggagagaagacagaagaggttggagaggtcaggga

SEQ ID NO: 383752 - DNA, 80 bp, Homo sapiens
gccattagcgggggcctttcctgaggacggcgtacggagtgtgggttcgatacaagaggctgttttcctagcgtggcttg

SEQ ID NO: 383753 - DNA, 100 bp, Homo sapiens
gaagtgacctgctttttcgcaagatttgacgggatctgaactatacacccaggcggccagcctcctgcatcctgtggtttatactaccgctatcattctc

SEQ ID NO: 383754 - DNA, 100 bp, Homo sapiens
cagacaggagatggtcctgtgaaaagaagggaaagactactgatgagagatgcttccaaattaaaagtggcaaaggactcaggatatttaaggatgagat

SEQ ID NO: 383755 - DNA, 83 bp, Homo sapiens
cacggtctctacaccagagtcactactttaggcggattcgcgaaggcaatactgaacactgcgcagcttgcagaggtctcctg

SEQ ID NO: 383756 - DNA, 100 bp, Homo sapiens
actccgtgggtgtaggaccctccgagccagttgtatatgaacacagatcaagattagagaaatccttgcaaaaagaaagacttgaacataaaaaagcaaa

SEQ ID NO: 383757 - DNA, 100 bp, Homo sapiens
ggcgatttcctctcagaagagtggagggagcgaatcgccaacacgaggtgaaattcgatgctactgtgatgctgcccactgtgtagccactggttatatg

SEQ ID NO: 383758 - DNA, 100 bp, Homo sapiens
ttcgcagtggtcgcttcttctccttgctaccagagattcactgactgctataagtgcttctaccagttgcagcctgcgatgacacagcaaatctatgaca

SEQ ID NO: 383759 - DNA, 100 bp, Homo sapiens
atcaagaggatcttaaagtgtggtctttagtggaaaaaaaggacactgtcttcagccttttcttcaagtttttgaccgtggattgtgttgtgtcaaactg

SEQ ID NO: 383760 - DNA, 100 bp, Homo sapiens
atctcaccaccctggtggcctttccctccagctctgtctatcctaccaagcctcatgatgatcctgagacttgtcttgttgctgctctgagcatctggag

SEQ ID NO: 383761 - DNA, 98 bp, Homo sapiens
ttccatgtcaacatagtcctggattactacagcatcccatttcccacacccactactccgctgactgggagggatggtagcctggccagcaaccctta

SEQ ID NO: 383762 - DNA, 87 bp, Homo sapiens
tgcaggagcaccctgaggcccatgaaaagatcgagaagctcaaggacctgattgcttggcaggtatgtgacgcattcccagactctt

SEQ ID NO: 383763 - DNA, 98 bp, Homo sapiens
tttcctctcctcccctctggatttctcagaggaagcagtacaggttttgattaagcactcagctgatgtcaatgcaagggacaagaactggcagaccc

SEQ ID NO: 383764 - DNA, 101 bp, Homo sapiens
aagacgatctttaacaattcaacctcaaatttctaatttcaccaacaactatttattgagggctagatgagaccctttttgctcttcctgctgcatctgag

SEQ ID NO: 383765 - DNA, 82 bp, Homo sapiens
ttacaactacaaccagctggaaggcagattcaagcagctgcaaggagtggcaaggaatttactatgccaaaaagaaaaacgg

SEQ ID NO: 383766 - DNA, 74 bp, Homo sapiens
agacatggaccgcggcgagcaaggtatttaacatgaagtcgctccagattgtgttacctgcccgagcagacccc

SEQ ID NO: 383767 - DNA, 98 bp, Homo sapiens
ccatttcacatccagcagaggaggcgggggcagccgctgagacggtttttcacaaggtgaactgtcacccctacaactcagcttgcaaccagccctgg

SEQ ID NO: 383768 - DNA, 100 bp, Homo sapiens
gtatgcacagacagagttgggacatgcttctagggacctattaaaagagttcccacagcccaaaaatcttctcaacagtgtgattggaagagccctcggc

SEQ ID NO: 383769 - DNA, 90 bp, Homo sapiens
aggaaatcaagcatcctaatctggtacaacttttagcaccccagatgcttgaaatgttgctgctggagctgatgcccacttccagtcatt

SEQ ID NO: 383770 - DNA, 74 bp, Homo sapiens
ttgaaaaacgcttttcacgtcacctggagagatgcacagttcctacaacagcagccagtacccctgatgccgtt

SEQ ID NO: 383771 - DNA, 81 bp, Homo sapiens
ggatttgttaaggattccaagtaactcttatttgattacaccaccaccttcactgtcagatccacttaaagagctttttcg

SEQ ID NO: 383772 - DNA, 74 bp, Homo sapiens
ctaaactccaaatattagagcttagagaaaaccagttaaaaatgttgcctaacctatttgatggctttgcagat

SEQ ID NO: 383773 - DNA, 120 bp, Homo sapiens
aagaagccagtgtccaggccggccaccgctgccgctgccgctgccggctccagggagccccgtgtcaagcaagggctgatcccttatccaacatggttctaaccttcagtactaaagaag

SEQ ID NO: 383774 - DNA, 98 bp, Homo sapiens
cgacgggggaacaatccccaagaggcatgaactggtgaaggggccgaagaaggttgagaaggattttgaagcaagagcaccccgagttggcagtcctc

SEQ ID NO: 383775 - DNA, 51 bp, Homo sapiens
gtgtaaggcattcccccaccatgaagtggtggcggtggcggcccgcgatct

SEQ ID NO: 383776 - DNA, 96 bp, Homo sapiens
aggagatactgaaggagcaggaaaaccggaagggcctgatagccgccatctgtgcagccagagtcctggtggaggacgatgagatcatgcagggat

SEQ ID NO: 383777 - DNA, 82 bp, Homo sapiens
aaagagcaactgaagattcatacgcagctggcagatattatcatagttgctgcagttacatcatgctgatgacagcttcctg

SEQ ID NO: 383778 - DNA, 74 bp, Homo sapiens
cgaggaggatggcggagtcggggctcctgacgagatcctgcagatcattcagctggacctagacctgaagttta

SEQ ID NO: 383779 - DNA, 83 bp, Homo sapiens
cacgtccctcctgcagcccagctccgcccgcagccgccgcggaccaggcagcgtatctggtgcaggccgtgagagcagcgggc

SEQ ID NO: 383780 - DNA, 74 bp, Homo sapiens
gaagcctgcaaagtaaaccctttccccaaggacagggtatatttacttctggcacatgggaagagaaatcagat

SEQ ID NO: 383781 - DNA, 88 bp, Homo sapiens
atcttggtacccgttgcagtttctatgccacggtgatttaccaaaaaccacagctccaaaaggaattcttcatttgtctcctgatgtt

SEQ ID NO: 383782 - DNA, 82 bp, Homo sapiens
aggactggactgttatgcgcttggttgctaacaaaatgtgacagtgatgataacatgggtgccaaaaatacttcaataggag

SEQ ID NO: 383783 - DNA, 120 bp, Homo sapiens
gaaaggacaagatgaagtggaaggcgcttttcaccgcggccatcctgcaggcacagttgccgattacagtgttctggacagtcctagccgactggatgaggaacaccgtcttatagctcg

SEQ ID NO: 383784 - DNA, 100 bp, Homo sapiens
tcaaacttacagggttgccaccaggaatggtctgccgaaaaccgaccgacccggttgattggccaccacttgtcctgggactgctcactctgctgaagca

SEQ ID NO: 383785 - DNA, 75 bp, Homo sapiens
cgggtccttgaccgcttcgcacaggtgctggagaatctggtaaaagcaccattgtgaagcagatgaggatcctgc

SEQ ID NO: 383786 - DNA, 90 bp, Homo sapiens
gagggactgcaccttctccatcaggtgcagaagatgtgttcagagcaacattgttttgttgacacaagcatttagaagaaagtttgtgat

SEQ ID NO: 383787 - DNA, 100 bp, Homo sapiens
ctcctgcctcagcccccaagtagctgggacctacaggtcatgcttcaccccttcctccatctgctgcacctaccactgattctacagattccataacagg

SEQ ID NO: 383788 - DNA, 50 bp, Homo sapiens
ctcaaggtgcagcgcctctgctcagccagatgacgtgtactactgtggaa

SEQ ID NO: 383789 - DNA, 99 bp, Homo sapiens
ccatgcccacggccgccgcccccatcatcagctcggtccagaagctggttctgtatgagactagagctcataagctgtggccatgactactgaagtagg

SEQ ID NO: 383790 - DNA, 100 bp, Homo sapiens
cttgggtccgaaggggacggacgtcctcccacgtaccatttagaagaaaatgcatccgatgcagatttatggctcctgaacagttgcactgtaaaaaacc

SEQ ID NO: 383791 - DNA, 100 bp, Homo sapiens
ttgatggaccagcaatacaagagttcaaagaaggacgcagagccagccacacagccccacaggtcctctttagccacagggaacctcctctggagctgaa

SEQ ID NO: 383792 - DNA, 100 bp, Homo sapiens
tctacactgagtcggaggcgaagggtgttttgaatgctgtatcaaatgcctggggggcattccctatgcctctctgattgccaccatcctgctctatgcg

SEQ ID NO: 383793 - DNA, 100 bp, Homo sapiens
ctgctgcgagcccacacgcccctccacatggctgccctcctcctgcttccctggctcatgttgctcacagaattctgcttggtcagaatcgtgatggcat

SEQ ID NO: 383794 - DNA, 75 bp, Homo sapiens
tcagctgctcggacagatgaagctccccaaggagctgcaggtggacttgtgaaaaaaattttggagacgaagaaa

SEQ ID NO: 383795 - DNA, 82 bp, Homo sapiens
attaaaaccagggctccacagttaggagagtcattttctgaggatgaatggaatttactgtatgttgcagtaactcgagcca

SEQ ID NO: 383796 - DNA, 98 bp, Homo sapiens
ggccctggcggtgctagaagaccggttccagccgaacatgacggtctgtgcagacttttgcagacaaatcaaaacaagaagctctgaagaatgacctg

SEQ ID NO: 383797 - DNA, 75 bp, Homo sapiens
ccagcggccagatcggcttcatgctgtgcagcaagaacccgggtttgtaccagttgctggagccccgaatgattg

SEQ ID NO: 383798 - DNA, 75 bp, Homo sapiens
cgggtggcttacagacgctgccagcatcgccgccgccagacagggtcagatgtgttactgggctggagtgtggtg

SEQ ID NO: 383799 - DNA, 74 bp, Homo sapiens
cgcgcggcccctcctccccggcgcctcccaggtacagcgtggagaatgccttcttcgatgagaaggaagacacc

SEQ ID NO: 383800 - DNA, 75 bp, Homo sapiens
tggcactgggcaagttccgggccgcgctgcgagactacgagacgattgttgatccatttcagatacttgtggcag

SEQ ID NO: 383801 - DNA, 93 bp, Homo sapiens
aggggtctgcgcagtgcaggcagataccgtttgacaccaccagtgaccaagaatatggcccaggtgaccaaagccctggacaaggccctgagc

SEQ ID NO: 383802 - DNA, 75 bp, Homo sapiens
gcgaggagtgcctcaaagtctacctgagcgcccaggtcgtagttcccccgctccctgggaaagcgtttttgcgtc

SEQ ID NO: 383803 - DNA, 96 bp, Homo sapiens
cttcctccagacctctcggcgcggttttaacttctagtcatggcgaatgatcgcaggagagcacagactggaccctgctacgatctctcttggagt

SEQ ID NO: 383804 - DNA, 97 bp, Homo sapiens
tactcctgggctggggctccctgttgatcattctgaagaacgagggcttctattccagcacgtgcccagtacgctggggaggaggaggaggaaggga

SEQ ID NO: 383805 - DNA, 74 bp, Homo sapiens
tgttttatacttgcttttgcttcagcgttctgtggttgtcaacagctagccaaagtcaccatcgtggaccacca

SEQ ID NO: 383806 - DNA, 100 bp, Homo sapiens
gcggcctgcgggcgatcgggccgaggcctccggtgtggctgtctctgatggtgtcatcaaggtgttcaacgacatgaaggtgcgtaagtcttcaacgcca

SEQ ID NO: 383807 - DNA, 98 bp, Homo sapiens
tcagtgcagagaagcattgggggaaccagtgggccccacgtgggtaaaaagatccccgtcgaggtcaagatcaagatccaggtctatttcacgaccaa

SEQ ID NO: 383808 - DNA, 50 bp, Homo sapiens
cgtgagggccaccagctgctgctgatcaacaacccctccccgtcgtaaac

SEQ ID NO: 383809 - DNA, 100 bp, Homo sapiens
cattgctgctaagtacatgctggattgtagaacttctctctctgtcaaaatgtgggtacagctcctgattcccaggatagaagatggaaacaactttggg

SEQ ID NO: 383810 - DNA, 75 bp, Homo sapiens
tctttgactccttgctgaatctgagcagatgacacttctgtggtgtgtagtgagtctctacttttatggaatcct

SEQ ID NO: 383811 - DNA, 100 bp, Homo sapiens
agaaagtggttgcgtttcatgagtcgggccacgccttggtgggctggatgctggagcacacggaggccgtgatgaagatgcgtctgttactagagtggag

SEQ ID NO: 383812 - DNA, 99 bp, Homo sapiens
gacaaggagacggtcagagtccaaggtccgggtatcttaccagttgaaaccaagactgaagactgaacctgaagaagtttccatagaagacagtgccca

SEQ ID NO: 383813 - DNA, 51 bp, Homo sapiens
cgtggtgggaagagcaagagggtttaagaggctgactgatgcgcagaataa

SEQ ID NO: 383814 - DNA, 76 bp, Homo sapiens
cactgaccctttccttacacggctgggctggcacaggaagagaggatggtgatgcaccggttacaaaagatgagac

SEQ ID NO: 383815 - DNA, 74 bp, Homo sapiens
tcacgcacgggatccagagcgccgcgcacttcgtcatgttcttcgcgccctggatcgctgctcaagaggcgtcc

SEQ ID NO: 383816 - DNA, 100 bp, Homo sapiens
ttgcagaagcaggcagcggcagagagggaatggtgcaggcaggcgctgagaaggacgcgcagtccatctctctcagaaggagctggcaaacagccctgac

SEQ ID NO: 383817 - DNA, 75 bp, Homo sapiens
cgagcgtgtggcccaggcacaggcgcagcacgagctggggcagaaccccttcgagctggccttctccctagacca

SEQ ID NO: 383818 - DNA, 100 bp, Homo sapiens
aaagctggtctgttctaactgagacctgcactggttaaacatcataatcatgtgtgttggccgaatgggaatcaccattgcaatacaaatgatctgcctg

SEQ ID NO: 383819 - DNA, 75 bp, Homo sapiens
ttgactactttttatggagcatttggaccagaaaaattcagattttgaagatgtaactgagtttctggaagaggt

SEQ ID NO: 383820 - DNA, 100 bp, Homo sapiens
tcggagcccgggggcccccctgctcctcggcgtcggaccccccgagaaaatgtacgtagagaaatcgacactcttaatgaacgtttagctgctgaaggac

SEQ ID NO: 383821 - DNA, 100 bp, Homo sapiens
ggccctcttcctgcagatccgagaaggactggacacctttctgggactgcagcaccagggtggctacgcctcccggctgccaatggagatcttcgtggat

SEQ ID NO: 383822 - DNA, 100 bp, Homo sapiens
ggagtatacgcttttccgccttcagcaaaatgatgcttcaacacccaggccaggtctctgcctcggaagtgagtgcttctgccatcgtcccctgcctgtc

SEQ ID NO: 383823 - DNA, 50 bp, Homo sapiens
gcctattggaggaaaacacaccaagaaccacctctgtgcagaaaagcaac

SEQ ID NO: 383824 - DNA, 100 bp, Homo sapiens
cacacaggtagccctggacggcattcagtgttttgagcccacaggcggttttgtgagctgcttccccaggagcagcggagcgtggagtcgtcacttcggg

SEQ ID NO: 383825 - DNA, 95 bp, Homo sapiens
tgattgagagtggaccacactgcgccaacacagaaattatctcacttcaagaaatctccatgtatgcacaagtaactcatcagaaggctgaggag

SEQ ID NO: 383826 - DNA, 74 bp, Homo sapiens
tgaagaatatgtctgccagtgagggcatacatcacagaaggaagccatggaagtaagccttgatataacagcac

SEQ ID NO: 383827 - DNA, 96 bp, Homo sapiens
cgaacacaaagcagacttcatttccacagttgtttcaggatcactttttctggggctgaggttcttgctggtgtgaaatgactgagtacaaactgg

SEQ ID NO: 383828 - DNA, 90 bp, Homo sapiens
tacctctccactgtgggcgtgagcttctttatcacctgcatcaccctggtgtacagcttcgagagctgtgcccaggagtgaacaaccagc

SEQ ID NO: 383829 - DNA, 83 bp, Homo sapiens
ctggtgtggtattactgcaccctgaccattcgggagagcattctcatcagcaacggctcaagagatggggtttcatcatgttg

SEQ ID NO: 383830 - DNA, 88 bp, Homo sapiens
gtcacctctgtgaacatcactgactgcaagcctccctcaatttctggagtctgctacaccatttttgatttgggcttccgctttgatg

SEQ ID NO: 383831 - DNA, 51 bp, Homo sapiens
cagacctcccacagtgtcacccagtgctactggtgcggaatctgaactcgg

SEQ ID NO: 383832 - DNA, 100 bp, Homo sapiens
cttctgtggatcgccagcgccttgtccacggggcagatccgattgtagtgggcagcagtcagtgacaggtgtaacctctgtggatgacagcaacagttac

SEQ ID NO: 383833 - DNA, 74 bp, Homo sapiens
tcctgatacagcaggcgctcaccatgttccctggaggagtgaaacacaaatcttttctaacggctgaggactgc

SEQ ID NO: 383834 - DNA, 75 bp, Homo sapiens
gagtcctcttatctaagtatcctaccaaagagcaaacatgaacgttggagttgcccacagtgaagtgaatccaaa

SEQ ID NO: 383835 - DNA, 82 bp, Homo sapiens
ctcacatgagacaaatgcgctcagcttcaattggatttacaaaaggtgcaggtatgagcaggtctgaagactaacattttgt

SEQ ID NO: 383836 - DNA, 83 bp, Homo sapiens
ggaacggctgaaggccctacgggagaaaaccgggcgcaaggtgggaggaggagctcgccaagcgcatgaaccttcagaccatg

SEQ ID NO: 383837 - DNA, 98 bp, Homo sapiens
ctggtcaccgacagggatcacttcatccgaaccctcagcctcaagccgctgctcttcgaaatgttcccactgccaggaggcaggcgccaccttgggct

SEQ ID NO: 383838 - DNA, 75 bp, Homo sapiens
cgtcaccgccgcccccccagacaagatggacaccgcggaggaaggatgagacttctgtgagcagcgaggattttg

SEQ ID NO: 383839 - DNA, 51 bp, Homo sapiens
ggatgttcttcttcgagtatttgtagaaggccactgaggcggctcccagct

SEQ ID NO: 383840 - DNA, 87 bp, Homo sapiens
acaaccttgaggaaccttgacgagtgtccggagtttagaaaacttagggatggtcaggatggctaaaggtgaccccaagaaaccaaa

SEQ ID NO: 383841 - DNA, 75 bp, Homo sapiens
gaactaccctcccaacacggaggtcaacctcactctgatctgggtacagaagtgcaggtggatgacatcaagcgg

SEQ ID NO: 383842 - DNA, 75 bp, Homo sapiens
tcaacatcctcctggccaccgactcctacaaggtgctgactgggttacttttttaaacactaggaatggtaattt

SEQ ID NO: 383843 - DNA, 76 bp, Homo sapiens
ggagggccggcggagcgccatggcctgcatcctgaagtatgaagtgtaacagaacagactttaccacctgaaactg

SEQ ID NO: 383844 - DNA, 75 bp, Homo sapiens
gatgcctggcagccccgctctctgcagggctcttggctttgggcctcagtgcaagtccattggaaaaggcagctg

SEQ ID NO: 383845 - DNA, 82 bp, Homo sapiens
ctctgcgctggccgggggcgcgggcggcggcgccggcaggaaggttaatttggagtggcccctggagtcagtttcctacacc

SEQ ID NO: 383846 - DNA, 100 bp, Homo sapiens
ccgggacgcgcggcggcaccgggaggccgggccgagcgaggtctggccgaaatacctccagcagcactcctcagttgcgaaagagtcatgaatcttttgg

SEQ ID NO: 383847 - DNA, 100 bp, Homo sapiens
tctcagcaagcaactttgagctgcacgttgcacaagacattcactactttcactgcctaagaatcctggaccttctcaaaggcacagaggcctccacgaa

SEQ ID NO: 383848 - DNA, 75 bp, Homo sapiens
ttgggcgcgcagatacccgcggtgcaccgcctgctgggagcgccgctcaaggtagatgacattaatgctgataag

SEQ ID NO: 383849 - DNA, 82 bp, Homo sapiens
cggccgccctatccccaccgcttcgactacccccagggggacttccctgccggcttgggcactgtttaaaggaaagttccga

SEQ ID NO: 383850 - DNA, 50 bp, Homo sapiens
ggaccaggcaccttctgtggaagcaatgtctcaggctgtgcagacaaacg

SEQ ID NO: 383851 - DNA, 97 bp, Homo sapiens
gagctagcagtggcgatgacagctgtaaagcacgaacaggaatacatggaagtccgggagagaatacacagagccaatggaggctcgctctgttgcc

SEQ ID NO: 383852 - DNA, 100 bp, Homo sapiens
aacattcagacccatttccagtcatgagtgagtgttgtgcaagattctgtcaacatttctggccagaataccatgaacatggtaaaggttcctgagtgcc

SEQ ID NO: 383853 - DNA, 90 bp, Homo sapiens
tccagctgccctctaagaggcagatgcaggtatccgggtactggatggacctctcacagacagcatggaggcagtggcgttcaacaagca

SEQ ID NO: 383854 - DNA, 100 bp, Homo sapiens
ctctgatgtcaatcttgagggctagagtgcagacatcctcagcaccatcggctatgacaacattatccaacatctgaacaatggccgcaagaactgcaaa

SEQ ID NO: 383855 - DNA, 50 bp, Homo sapiens
gttggagcccctgctttccactgatgggcttaggtcacgagcaaggattt

SEQ ID NO: 383856 - DNA, 50 bp, Homo sapiens
gtcaagttcaccctcttcaagaaggagtcactgctgggctgaggtggcca

SEQ ID NO: 383857 - DNA, 75 bp, Homo sapiens
ggcagcgccgagatccgagcccatgccacagccaagacagccgatcgccagtacatggagggcttcaacgacgag

SEQ ID NO: 383858 - DNA, 102 bp, Homo sapiens
gtttactataaactggcaagaggatggcctgaagtttgggctggaagtgttgaaaggattgttgacaaaaggaaaaataaaaaagggaagacagagtatttg

SEQ ID NO: 383859 - DNA, 98 bp, Homo sapiens
aggctcaagcagtcctaccatgtcagccttcccagtagctgggaccacagacagagcttgagaataaactacagcagcagttaacacaggcagcccag

SEQ ID NO: 383860 - DNA, 96 bp, Homo sapiens
tgtcattcaagtggctaatcttacaacagcacaaattcatctaaccagggtggctgaggtcctggaaggcaaaggagcagggaagaaaggccgttt

SEQ ID NO: 383861 - DNA, 98 bp, Homo sapiens
agatcgagaccgggcccttcctcgaggcggtgtcccacctgccgcccttcttcggaatgtatcctgtcaggtataatgtcagtgaatggcaagaaagt

SEQ ID NO: 383862 - DNA, 82 bp, Homo sapiens
cctggagtacctggatctaaagcccagcgatctgctcacgagctgcccatggttgaaagacaagacacagacagctgcctgg

SEQ ID NO: 383863 - DNA, 101 bp, Homo sapiens
tattcgagtgaccgagaccgcggccgggaccgaggatctttaatctcatgaagtacgacagctacagccgcttcttaaagtctgacttgtttttaaaacac

SEQ ID NO: 383864 - DNA, 75 bp, Homo sapiens
agcgtttactgggcagctgttacggaaatctggcattttttaaagtttgcgccccacaaagaggaaatattccaa

SEQ ID NO: 383865 - DNA, 83 bp, Homo sapiens
tccctgcacagcatcgcgcagaacaaagggatcagtgcctccggagccagcgtggtggccatagacaacaagatcgaacaggc

SEQ ID NO: 383866 - DNA, 75 bp, Homo sapiens
ccttacctgtttttccagctcacccactgccagcagaggtgtaccaacagtaccgttattgccaccacaagtaaa

SEQ ID NO: 383867 - DNA, 118 bp, Homo sapiens
cctcagccagtaccaagaaagcagaagggaagctgagtaactccaacagcaaagatggtgaggatgcagtgtccaaggcaccatcttgaactcatcatcgccaaatatgtgagcacct

SEQ ID NO: 383868 - DNA, 74 bp, Homo sapiens
agagtaacagcagcgccgtcccgtccgacagccaggcccgggagaagaaacagtgacattcaaggatgtggcca

SEQ ID NO: 383869 - DNA, 100 bp, Homo sapiens
cactccttcacagctataccaaacttaaagttgggatgagactcactttggaaaaatgggaagttactatatcaaccgtacatttttctttgatgtgcac

SEQ ID NO: 383870 - DNA, 73 bp, Homo sapiens
aactgctgacgcggctaaagcagattggagctctgcagtaaccacagcattttatttaatgggagaatgaaac

SEQ ID NO: 383871 - DNA, 90 bp, Homo sapiens
ggactttaagaaaggaatgaacatgtatttaaccaagttccaacaaaagaatgctgccgcaggtttttctattgggaaagctactgatcg

SEQ ID NO: 383872 - DNA, 90 bp, Homo sapiens
cgggcatagtggttggagtttctgtagatggaaaagaagtctggtcagaaggtgtattttgacctacgaattggagatgaagatgtaggc

SEQ ID NO: 383873 - DNA, 75 bp, Homo sapiens
gcaaactccgcttccgattgggctaccacgccattccgagtatgagatggagcagcatattgtatgggacgtatg

SEQ ID NO: 383874 - DNA, 100 bp, Homo sapiens
atcactcaagagactcttcatttagattggattctgaatatcaggtgctgtcctggagccgagagctgccttgcgcttggcgcgccctgcacacctcccc

SEQ ID NO: 383875 - DNA, 99 bp, Homo sapiens
tggggatcttcgcactatcccaaggttttggcacaaataccagtgggaatagtatttttggaagtaaaccagcacctgggactcttggaactgggcttg

SEQ ID NO: 383876 - DNA, 100 bp, Homo sapiens
acatcgtggtggtcggatttcaccacaagaagggctgccagattatcccgaaggcaataattcaagtgattatcttgttcaaacaacaacgtatctcccg

SEQ ID NO: 383877 - DNA, 100 bp, Homo sapiens
aaaagagaaaaggagaaggataaagggaaggacaaggaattacataacatcaaacgtggagtagcacagaagagggaggatgctgtttccaaagaagtga

SEQ ID NO: 383878 - DNA, 100 bp, Homo sapiens
ctggctagtggcttattacttgtgactgatccgagctggatccagagttgcatacagaccaatttctgcatcagtgttatctcgaccagaggctagtagg

SEQ ID NO: 383879 - DNA, 75 bp, Homo sapiens
ctatgctaaggaaactccaaggcttgccttcaagaataactgcgaactacttgaccagtcctgcctctgttgtag

SEQ ID NO: 383880 - DNA, 101 bp, Homo sapiens
atgtcctcctccttcaagaagctctacttctccctcactaccgaggccctcagcttcgcgaagacgcccagctccaaggctggtctcgaactcccgacctc

SEQ ID NO: 383881 - DNA, 50 bp, Homo sapiens
tgcctgagaaggagcccctcgtcagacgtaaaattcatcctgatcagaaa

SEQ ID NO: 383882 - DNA, 111 bp, Homo sapiens
cagaccttcatgaatgccacgtgcgtggacgacttctaccatgggaccaagtggtgatttacaagtcaagttaaaatgtccccagaagtggccttgaaccgaatatctcca

SEQ ID NO: 383883 - DNA, 51 bp, Homo sapiens
gccccttgcagaagacgccgtacgagatgacagtcgtctagaggagctcaa

SEQ ID NO: 383884 - DNA, 74 bp, Homo sapiens
agagatgtgatgttggagaactatagcaatctggttttcttgggtcatgctcttaaacctcaggtttcctctat

SEQ ID NO: 383885 - DNA, 100 bp, Homo sapiens
actccctcagatccagtgataattgacagcagaaaaagtcctacctggagcgaagcgttaaggaagctgaggacaacatccgggagatgctgatggcacg

SEQ ID NO: 383886 - DNA, 100 bp, Homo sapiens
accacctggaagcctagaaatggctcctgtgacgtttgatgacatcactgtgtacttactccaggaggaatgggtgctgctgagccagcaacagaaggag

SEQ ID NO: 383887 - DNA, 83 bp, Homo sapiens
caaacagtgtttgcctctggttcagctcatacaacagcttcttaggtggcacaagaatggctcaactctccaaatagagagaa

SEQ ID NO: 383888 - DNA, 75 bp, Homo sapiens
ctggtggccgtggagtctatggagccgaacaacatcgtggtgaacagtggtatagcagccactccagcctctgct

SEQ ID NO: 383889 - DNA, 75 bp, Homo sapiens
acacttcctataaatctcgcccaaacaggaaagagtcaattttgtgtactgaaaacaaatgcagttcaaaaatgt

SEQ ID NO: 383890 - DNA, 100 bp, Homo sapiens
cagaaaagcttgcagaatatatttgttccacaccagaaagtttgatgcaggcattggaagacttagattatctggcagcactggataatgatggaaatct

SEQ ID NO: 383891 - DNA, 82 bp, Homo sapiens
cccctccggcgtgttcatgcccccggggataaggaagcctgtgtgggtaccaacaatcaaagctacatctgtgacacaggac

SEQ ID NO: 383892 - DNA, 100 bp, Homo sapiens
agatgggcctactcgcccgccaccctgcgctgccgccgctctgaggagttaaagcgaactctagttggcctagtaagagacctgagagggatcgctttcg

SEQ ID NO: 383893 - DNA, 90 bp, Homo sapiens
gttttcaatgacaccaagttggacgctatgctggaagaatttaagaaagggaaatcctcattgacgattcaatttgttgaaggccaattt

SEQ ID NO: 383894 - DNA, 78 bp, Homo sapiens
tggcatccagctggggatccacttgtacgcccatggcgtgtttctgatgccatggacaatattaccaggcagaaccaa

SEQ ID NO: 383895 - DNA, 75 bp, Homo sapiens
aaaaatcccatctaccgcaactctcagttcgagagtaaaggggcagggtggacaggaagcagctcagcccagcct

SEQ ID NO: 383896 - DNA, 83 bp, Homo sapiens
acgaggggctccgggtcttccagagcgtgaagatcaagatcggcagttgtgaaaaacttcaggacaaaaatgtttcatttaag

SEQ ID NO: 383897 - DNA, 100 bp, Homo sapiens
gtgaaaagcagccttacatcactaaggcggcaaagctgaaggagaagtatgagaaggaccctgtacccctgttcaagatctatgtggcggagctgatcca

SEQ ID NO: 383898 - DNA, 100 bp, Homo sapiens
acctggccgatgaggaagtactgagcctgttggaggaactggcccggaaacaggaggacaattttgtagccaccttggctaatgggatgagcctccagcc

SEQ ID NO: 383899 - DNA, 80 bp, Homo sapiens
gcagctacacaaagagggtcatctcttctattgtacctgcagtgtactaaaggaagtataccaagcctttaatcccaaag

SEQ ID NO: 383900 - DNA, 100 bp, Homo sapiens
ctgaattccaggccaatgaagttcggaaagtgaaggaatcttcctcttcagtgaatacatccaacaagatgaattttaaaactttttcttcatcacctcc

SEQ ID NO: 383901 - DNA, 74 bp, Homo sapiens
gtttggttcttccttcatcctagctataaaccaaatgaccttgtggaagttagaacaagttgaaatcatcgcag

SEQ ID NO: 383902 - DNA, 75 bp, Homo sapiens
agatggcagccagtcagtggtggagatttgggtgaacagtccccatacagccagcggctactacaccatctatga

SEQ ID NO: 383903 - DNA, 75 bp, Homo sapiens
gtcactcataagcgcgctcaagaccatcatcgtctacagactgccgtggacctggaaatgcagcaagctcctgat

SEQ ID NO: 383904 - DNA, 119 bp, Homo sapiens
gtaagcggactgcagccgcgagctcctggaggcggcgggatggaggcggcggccggtccagccctgctgggagttttctgccacacagatttgcggaagaacctgaccgtggacgaggg

SEQ ID NO: 383905 - DNA, 75 bp, Homo sapiens
gacgaactacgaacccctggacgggagagtctgccggcggagaatataaggtggcttcctgtttgaagggctctc

SEQ ID NO: 383906 - DNA, 88 bp, Homo sapiens
atgtctgtgattggagacagaaggtcccgggagcagaaagccaaacaggagcgggaggagtgagatgtggatgttgcttttgcaccta

SEQ ID NO: 383907 - DNA, 113 bp, Homo sapiens
cgccgtctcgcagaacagcaagcggtgacctctcgaaggcagggaacgtggtgacaggagaaatggtagaagagcttattctttccggagcagatatcatcaaagtgggagtt

SEQ ID NO: 383908 - DNA, 99 bp, Homo sapiens
gagaacttatagcccttgaagtcaaccatctcacacctttccaaaggacgcgaccataactctaaaagtctggatgtggatagtgaagctaagaaacta

SEQ ID NO: 383909 - DNA, 50 bp, Homo sapiens
gattctaactccaatggcccaaaacgattgaacaggagaagcaagcaggc

SEQ ID NO: 383910 - DNA, 100 bp, Homo sapiens
cggaaggcttcaaaggctgtcgcaaggaggaagatgctgctggtggagttctacaagggttcccctgacctcgtgaggctccaggaaccctggagccagg

SEQ ID NO: 383911 - DNA, 79 bp, Homo sapiens
aagcaagtgctgaaggactcctcagccgccaagctttttaacttgagagaagatttctgcaaatgagaatagcctggca

SEQ ID NO: 383912 - DNA, 83 bp, Homo sapiens
gcagttcctgcagtaccccactctacgatcagcagtacttctggaatagaaattctaaacattagcctgccgaacaactggat

SEQ ID NO: 383913 - DNA, 90 bp, Homo sapiens
gcgagttacaccaaccaggacagaaatcattatcttagccaccagttgaccactgaaaaacacacatactatctgactgcagattctccc

SEQ ID NO: 383914 - DNA, 99 bp, Homo sapiens
ccccgccggccgccgcgccgcccggcagcctcggcagagttgacgggcgccgacctgaaggactgcgtcagcaacaacagcctgagcagcaatgccagc

SEQ ID NO: 383915 - DNA, 96 bp, Homo sapiens
gggcgcatatcttcaaagcacctagtacctcctaccattgtcaactggttgccgaggagcccaagtagaagaaatatggagtttagagcctgagaa

SEQ ID NO: 383916 - DNA, 82 bp, Homo sapiens
cagctgcagtgacatgtccagcatgaatcccgaatagaactgtggctgcaccatctgtcttcatcttcccgccatctgatga

SEQ ID NO: 383917 - DNA, 100 bp, Homo sapiens
ttcagaagaccgaagcgttcgtatctggaagcccttcagatatttcaacactcctctcagcatcctccacttcccccatctctccaagctgaacttggtt

SEQ ID NO: 383918 - DNA, 82 bp, Homo sapiens
cgagaagtccagcgggagtacaacctgaacttctcaggaagcagtactattcaagagcatgctacaagtgaaaactgatgag

SEQ ID NO: 383919 - DNA, 100 bp, Homo sapiens
ttgggaggtgctgccaccacaggtccctgtgcgttttattgcgacctgccggtgggaactttgtctccgagtcggagcagcatggagcggcggagcgaga

SEQ ID NO: 383920 - DNA, 90 bp, Homo sapiens
caggagcgggactgagagcgcctggaggctcgagcggagggaggctctgtcggtggtgagcgacgaccagtccctctttgactcagcgta

SEQ ID NO: 383921 - DNA, 95 bp, Homo sapiens
aagggagcccaagctttgcagaggtctaattggtagctgcaccaattcaagctatgaagatatggggcgctcagcagctgtggccaagcaggcac

SEQ ID NO: 383922 - DNA, 83 bp, Homo sapiens
accgcgactggctgctgcggcgcgaggcatacccagatggaagtagcaaagaaaagagaagagcagcaattgcccaggcctta

SEQ ID NO: 383923 - DNA, 100 bp, Homo sapiens
atattcttgagaaatatatcaagtttgtgaaagaaaggacagagattgaactcagctatgcaaagcaactcagttaaaggcattaggatttcctgaagga

SEQ ID NO: 383924 - DNA, 82 bp, Homo sapiens
ggtaacaagaaataccgtgccctgaggttggacgtggggaatttctcctggggctcagagtatgatggtgtgagcatccccg

SEQ ID NO: 383925 - DNA, 75 bp, Homo sapiens
gctccaggactccctcaataattgagaaagatcagtctaaagaaaaggagaagaaagtgaaaaaaacaattcctt

SEQ ID NO: 383926 - DNA, 82 bp, Homo sapiens
gaccccctgaactacttcctcggtggctgcgccggaggcctgactctgggagcacgcagcaccgtctgcgtcctgctgtcct

SEQ ID NO: 383927 - DNA, 75 bp, Homo sapiens
cgctggtggctgtggactccccagcttggagcagtccctctttggactcagcgaatgctctctacaccaaatgcc

SEQ ID NO: 383928 - DNA, 49 bp, Homo sapiens
gtttgctgcatactatgttgccacagcttatcttaatggccatgcagaa

SEQ ID NO: 383929 - DNA, 95 bp, Homo sapiens
tctccgaacagagccacacgactcccgctggctcaatgaaaccccaatgatgggaatctgccctgctggccacgctacaacaaggatgaaaagta

SEQ ID NO: 383930 - DNA, 98 bp, Homo sapiens
ttgggaggctccgttgcctgctcccggagggagacgcgctgccgaggagaacccagcgggacacggcgagccatgggcggggcagtgcctttcaaagc

SEQ ID NO: 383931 - DNA, 100 bp, Homo sapiens
ggctggaaggagaactaaatgggagaagaggaatgttccctgacaatttcgttaaggatattggtgctggaaaaggcaaatactatgctgtcaattttcc

SEQ ID NO: 383932 - DNA, 74 bp, Homo sapiens
actggctaattatttatactgaataagacctggaagtttgttgaaggtctccctattaatgatttctcacgtga

SEQ ID NO: 383933 - DNA, 90 bp, Homo sapiens
agatggacaaggagaccaaagagaacaacctctctgaagaagccaaggccacctttgatgccatttctaagacctacagctacctgaccc

SEQ ID NO: 383934 - DNA, 75 bp, Homo sapiens
cagcctctgccgcctcctcctcctcctcgtcttcggccggtccagcaagactatgaatctctgttccaaatgctt

SEQ ID NO: 383935 - DNA, 100 bp, Homo sapiens
aaagcggggacccagaccctggagcctcagttggaagcagccgatccagcctgcggagcctgtggggcaggtggaacaggaggattttgtaatggaaggg

SEQ ID NO: 383936 - DNA, 100 bp, Homo sapiens
ccaaagtgcagcgctgtgcagtgtttggtggagaaccattgtcatatacccggttcagcctggctcggcaagtagatggcgataacagtcatgtggagat

SEQ ID NO: 383937 - DNA, 100 bp, Homo sapiens
ctgtgttatagtagtcttcataggagaggttattcagcttctcaaggctggaaaagcgaaggaagtttcctacaatgcactagcctcacacataatctca

SEQ ID NO: 383938 - DNA, 97 bp, Homo sapiens
tggacgccacaaagacaccaggaggaattccaggctggtctcagccgtcgaaggaactcagcccacaccctgaaccaggcctccagccgaagccatg

SEQ ID NO: 383939 - DNA, 100 bp, Homo sapiens
ggattttgcaacaaattcgagctgtccgactctgagaatgttgccaaaacaaaggggatttggtgatggaggctttgttagaaggaatacaaaatcgagg

SEQ ID NO: 383940 - DNA, 75 bp, Homo sapiens
ggaggccaaggcgccagtgagaggcgctccccaattcaggatgtccccaagaagatatgcaaaggccccaggaag

SEQ ID NO: 383941 - DNA, 74 bp, Homo sapiens
cgctggtggcggagcccggggcccggagccggcgcccccggcgcggcttggagctcggcggcacaaccagcacc

SEQ ID NO: 383942 - DNA, 80 bp, Homo sapiens
cgaggcctttgccgctgacatcccccgcatcctggtggccggaaatccctgcttggagctgcagaagggttgccttctgt

SEQ ID NO: 383943 - DNA, 90 bp, Homo sapiens
cctgaggcttggataagtgggtctaacaaagtgccagtggtgcagcaccctcaccatgtccaccccctcacgcctcttatcacgtacagc

SEQ ID NO: 383944 - DNA, 100 bp, Homo sapiens
tccagcctgggcagatcatcatcgcacagcctcagcagggccagctggtcctggactcccagaagcgagtcttctcctggggctttggtggctatggccg

SEQ ID NO: 383945 - DNA, 100 bp, Homo sapiens
cgtagcgcgttccggaggcccggccacctctgagaagggagacgacgctgctgggtccgctgagcggggcgacccgagatggagtctggctctgtcgccc

SEQ ID NO: 383946 - DNA, 90 bp, Homo sapiens
atagatatggacacaagcctcattttggaatattgcagctgaaacattaacaaacgtgctggatttcaaaagggatgctggtctgtggca

SEQ ID NO: 383947 - DNA, 99 bp, Homo sapiens
cctgttccaaagcctcctggaccgtccaagaatccctcaacaccttacactaagtcaaagcgtggccacagagaagaggagcaagaagacctgacaaag

SEQ ID NO: 383948 - DNA, 100 bp, Homo sapiens
tccgcgcgctggagctggagaacgaccggctcctgctcaagatctcagagaaggaggaggtgaccacgcgcgagtgaggagttttgtgaaatcttccggg

SEQ ID NO: 383949 - DNA, 75 bp, Homo sapiens
gacggttctggaagcgggctgagggccgtttgggatggtgattgctcacaccaaagccttggacccctcccagcc

SEQ ID NO: 383950 - DNA, 100 bp, Homo sapiens
aactacctcatcttcagtcaaaagcctgaatttcaggatctttcaggtgtcatggagaaactccagctgggcccagagattctgcagcgggaaaatccaa

SEQ ID NO: 383951 - DNA, 82 bp, Homo sapiens
caagctcgtggcctgcctctgcgtgcgagtccaaaactacttacctggaagaccttccaccaccccctgagtatgaattggc

SEQ ID NO: 383952 - DNA, 51 bp, Homo sapiens
gaaatattcaggcatctcaacaggtggagtctcgctctgtcacccaggctg

SEQ ID NO: 383953 - DNA, 95 bp, Homo sapiens
cagcagttctgtgaggcagcctagtttgcatatgagtgctgctgcagcttcccgagacatcaccttgtgggacacagcaggccaggaaagatttc

SEQ ID NO: 383954 - DNA, 97 bp, Homo sapiens
caaacctcgacaaaatggctgatgatttgctggcagctgctgacaaggtcacgagaagagaatgccttctagatgcaaaatcacctccaaaccagac

SEQ ID NO: 383955 - DNA, 76 bp, Homo sapiens
acgcccgagcagtggaagtcccacagaagctacagctgccaggtggaggagcatgtcagccgcatccgggaggagc

SEQ ID NO: 383956 - DNA, 80 bp, Homo sapiens
aaacttgatcacatcaatatctgcagttccaatttcccaaaaagagaatggaagttggatacactttgtgacttgtacga

SEQ ID NO: 383957 - DNA, 100 bp, Homo sapiens
cagcagcccagacgcggcacagagagggcctgggagcttgctgcagcttcaggaatgggcaaagaagtggggaatctgctactggaaaactcacagcttc

SEQ ID NO: 383958 - DNA, 99 bp, Homo sapiens
aactacacctcgctcatcgcgtttcactgtaagagaggtgtgagcatggattggtcttgatttgagcaatggtaaacctcgagacaacaaacaagcagg

SEQ ID NO: 383959 - DNA, 75 bp, Homo sapiens
gagagattctgggagccaaacactccattgggatcctagctgatggcggctcagcggcagcgggcgctggccatc

SEQ ID NO: 383960 - DNA, 99 bp, Homo sapiens
cgacggactctccattccagaaccatggcccaatttgtccgtaaccttgtggagaagaccccggcgctggtgaacgggttgtgagtcccggcccagccc

SEQ ID NO: 383961 - DNA, 121 bp, Homo sapiens
gcgagtgcagccggtgacccggcgagaggcggcgccgctcccaagatgtcgcagacggccatgtccgaaacctacggtgctggagaatctggtaaaagcaccattgtgaagcagatgagga

SEQ ID NO: 383962 - DNA, 100 bp, Homo sapiens
agaccaagaattagcagaagcccttcaaaaatcagcagaggatgcagaacactctgctccagccaaggtggtgagggcagctgttcctaaacagcgcaaa

SEQ ID NO: 383963 - DNA, 73 bp, Homo sapiens
tgcagaaggtctctggagacatcttcagcaggtctccaccgggaaccttctggtcatcctgagtcgacactac

SEQ ID NO: 383964 - DNA, 100 bp, Homo sapiens
ctcggcgccgccaaacagcccagctcgcgcttcagcgtcccggcgccgtcgcgccactcctccgaatattaacctggctgcagagccaaaagtgaaccga

SEQ ID NO: 383965 - DNA, 74 bp, Homo sapiens
cttcctggagaagctggaggatactgtcaagcaccatccacacttcctgactccagaatgacagggtccagaaa

SEQ ID NO: 383966 - DNA, 82 bp, Homo sapiens
cagattcgcagtggtcgcttcttctccttgtgtgtcccggcatggatatccggaacaacctcactaggttgcatgagctgga

SEQ ID NO: 383967 - DNA, 74 bp, Homo sapiens
ggttggctaaagttcggatgatgaaaggagaagcctccacggtgtgcacctggagtcaggagcgcgcttgtgcg

SEQ ID NO: 383968 - DNA, 100 bp, Homo sapiens
ctgcagcccgcgcacagctgctcccttcgccttcgccctttccacctcgcggcagttcggggggtacatggtatggagtagacatcaacaacgaggacat

SEQ ID NO: 383969 - DNA, 97 bp, Homo sapiens
ctgaggcttttcctccgaccctgatgctcttcaattcggtgctccgccagccccagcttggcgtcctgagaaatgtgcaaggatgatgctgaaagga

SEQ ID NO: 383970 - DNA, 100 bp, Homo sapiens
aagaagctcaaggacgagggctgccgggcgttctacctggaagctactgcttcttgggatacctttctcatgctatggaatttcaagccacatgctagag

SEQ ID NO: 383971 - DNA, 51 bp, Homo sapiens
ggccatcagcgcctgcgacggcctgatgttcctcctgctgatcaagagaag

SEQ ID NO: 383972 - DNA, 100 bp, Homo sapiens
gactttgaatgggtgcatgttagtgctcaagagcctcattatctaccacccgagatgccccaagttctttctacaacttcaacaggctgcactggaggtg

SEQ ID NO: 383973 - DNA, 100 bp, Homo sapiens
ggcacctgcgcgaagctggccaaagcctgcccagacggctcacctgtgcgggatggaacaaaaggaggttgtgcccagacatttccttcttccagagggc

SEQ ID NO: 383974 - DNA, 90 bp, Homo sapiens
ggggctggaacacctcgccaaagcagagaaatagcgggtgccccggtgatgactggtgcgggagagagcaccaatcccgagaacagcgag

SEQ ID NO: 383975 - DNA, 96 bp, Homo sapiens
tgtaatccagacagcctgcaaacatataagatctggagacccaatcttgttaaaaggccgagcttctgatggctttccagtgtatcaagaaaagat

SEQ ID NO: 383976 - DNA, 100 bp, Homo sapiens
gctgcgcatgagtgggctgtaatcgggtgtctgggggctgcatgcagggcatggtgccctacctgcctgagctgatcccgcacctgatccagtgcctgtc

SEQ ID NO: 383977 - DNA, 100 bp, Homo sapiens
ttcaaaatcagacctctgtggcagcattttttccagaacacaaaagatgtgtgcaacagcaccgatcttccggaagtcgagatcattagcctgctggagg

SEQ ID NO: 383978 - DNA, 100 bp, Homo sapiens
agatgtggtggaatatgccaaggaaaaactggagagcttcatcaaaaatagtgatagctttgataagtactctgttccacctgagcatggaaagcggttg

SEQ ID NO: 383979 - DNA, 82 bp, Homo sapiens
gttcggctggaaggaaccgctctcgcttcgtcctacacttgcgcaaatgtctccggtacaatgactcttcttgcttttcacc

SEQ ID NO: 383980 - DNA, 96 bp, Homo sapiens
gatgtgactgctcaatggagagaaggaaagtcaatcgtaggaagaacacagtacagtggtaagcatccgtggcattcaagacgaagatccccctga

SEQ ID NO: 383981 - DNA, 75 bp, Homo sapiens
gagcagcggcggcagctgcagaagcaggagcgcccggggggtccactggacggggcctgagctacaacttcaccc

SEQ ID NO: 383982 - DNA, 75 bp, Homo sapiens
catcaccagggccgagaacgacaggagtacgaccccagcaaagcgacctttgtgaaggtggtgccaacccccaac

SEQ ID NO: 383983 - DNA, 89 bp, Homo sapiens
tttggtgtctggaccctgctggccttgatcctttgcccaggtcgaggcttgaagagtggagagaactttaagttgttatatgacttggc

SEQ ID NO: 383984 - DNA, 83 bp, Homo sapiens
aggttctgcggcacgggatggcggaggcgcctcctgtctcagccaagaaggatcaagaaggtggagaagaaaagaaatctgtg

SEQ ID NO: 383985 - DNA, 100 bp, Homo sapiens
ctgttttcccctgccttccttgcagaggccatggaggacgaggagagacagaagaagctggaggccggcaaagccaagagaagatggcgaattagaagat

SEQ ID NO: 383986 - DNA, 76 bp, Homo sapiens
gggagttttccggggccctctcagcaagaacgggaacaaaactctggcataatcaccagcaacacccgggacaata

SEQ ID NO: 383987 - DNA, 82 bp, Homo sapiens
ctggggatcgctacggaccttaaaatacccgcaacagccccttcgtcccaagtatgtctgattgacccgggctgcttccgag

SEQ ID NO: 383988 - DNA, 98 bp, Homo sapiens
cgaggtggacctgcgggatctgcaccgcgaccagggccgcaggaagacgcagaggcaggtggaagtcatcataaagtttctgtttcacccgtcgtcca

SEQ ID NO: 383989 - DNA, 100 bp, Homo sapiens
gccgcgcggcgctggactggagcagaaccccaggactgcgcccccgggagcgggcgcccagagagagatcgatgtcttattgtgatgagtctcgactgtc

SEQ ID NO: 383990 - DNA, 98 bp, Homo sapiens
gtcgcggttgccaagcgctcggcgcttggcgctggcgctggccaaggcggtcatattgaacattccagatacctatcattactcgatgctgttgataa

SEQ ID NO: 383991 - DNA, 78 bp, Homo sapiens
tggagtcgcgataccactgccaggcgtcaggaaaggtgcataaggcaaatccaatacgcaagtaccagggtctggaga

SEQ ID NO: 383992 - DNA, 51 bp, Homo sapiens
aacatcttttatcacataagggagaactctcttcagaggtcgaagacgacg

SEQ ID NO: 383993 - DNA, 100 bp, Homo sapiens
cccatccccacagtataaaaaggaagctgcagtaaaggaagatgaagaagaagtttcagataagggcagtgattctgaagaagaagaaaccaatagagat

SEQ ID NO: 383994 - DNA, 95 bp, Homo sapiens
ccgaggctgagcgctttgcaataagcatcaagtacctactgtcaacaacgggaagtggaggccattactgaaggtgtagaggaagatgaaggatt

SEQ ID NO: 383995 - DNA, 95 bp, Homo sapiens
gacatggatgttctcctgacccatcccagcttcacttcagaatcaaccaaacaggccaacgcagagagccaacagcagagagaacaactggaacg

SEQ ID NO: 383996 - DNA, 75 bp, Homo sapiens
ctctatatgaacaatccgtctggatcacggatgtaggaagtgggaaatcctcattgacgattcaatttgttgaag

SEQ ID NO: 383997 - DNA, 91 bp, Homo sapiens
gctcggagaggtgctcggattctcgtagctgtgccggacactgccctaaccatcatggaggtggccgaggtggaaagtcctctgaacccca

SEQ ID NO: 383998 - DNA, 83 bp, Homo sapiens
aactaagcagggcggtcggggttccagtgtctcgccccatcctcaccctcagggttcccagggcccaggctgtggtgggggac

SEQ ID NO: 383999 - DNA, 96 bp, Homo sapiens
ggtctcggccacggcgtggagagcggcaagaaaatgtttataggaggccttagctgggacactacaaagaaagatctgaaggactacttttccaaa

SEQ ID NO: 384000 - DNA, 50 bp, Homo sapiens
gatccattctcattaaataaatctctggatgctgaagaaggaagaagcaa

SEQ ID NO: 384001 - DNA, 81 bp, Homo sapiens
ttacttgttacccatttgtgcaggaaaaccagtccaataggttttggaacttgaaggtgaaaaaggagaatggggatttaa

SEQ ID NO: 384002 - DNA, 101 bp, Homo sapiens
tgcccccggaggtgcccacgcagctgcctggacaaattgtagaaggcatgaaacaaaaaatgtggagtattgaaaatattgccttcggttctggtggaggt

SEQ ID NO: 384003 - DNA, 83 bp, Homo sapiens
ggacaggcttctccggaaggaacagattttagctgtggccaggaatactcccccagttgcaagaggcgcaggaccgtggaaga

SEQ ID NO: 384004 - DNA, 73 bp, Homo sapiens
tttgttaaggattccaagtaactcttatttgatcaggcctttgtgacactaaccacaaacgatgcctacgcca

SEQ ID NO: 384005 - DNA, 97 bp, Homo sapiens
caccagtggcaagtgctccaacccagcagtcgtttaagtgatgcaattagcattattggcagagaagattttccacagaaatggcctgacttgctga

SEQ ID NO: 384006 - DNA, 100 bp, Homo sapiens
ttcgaccctgcccagcacgaccagctcatgcaggtatctgctcgctcgtgggaccacaatgaattctttgcccagtttgctggtgaccacactctgctaa

SEQ ID NO: 384007 - DNA, 97 bp, Homo sapiens
tcagaatccaagcggagagagtcagcctctggttcagactgcagtaaccaaaagtttttgtcatgccaaacatggatgatgtttatatcactataat

SEQ ID NO: 384008 - DNA, 145 bp, Homo sapiens
tcacctgtccgctcactggggccaccctgaggaaggaccagcgggacgcctgcatcaaggaggccattctcttgattggtgctgaagacatggacggcttccaggcagacacggaggaggaggaagaggaggagggcgactgtat

SEQ ID NO: 384009 - DNA, 82 bp, Homo sapiens
tccccggtctatgccaggcgcatctcagatctctggaaacatggctacagaacatgttaatggaaatggtactgaagagccc

SEQ ID NO: 384010 - DNA, 49 bp, Homo sapiens
cagaggccacctcagagagagtgttggatggcacatttcctagaggcag

SEQ ID NO: 384011 - DNA, 75 bp, Homo sapiens
gccaactccaatgggcctttccagcccgtggtccttctccatattcgagcatggaaataaccagcctgcaagaac

SEQ ID NO: 384012 - DNA, 100 bp, Homo sapiens
tgatacatctgaggggccagatggccaccatatcagggaaagccaatgtgttttgaaaaatatgcaaatgttcaataagcttcaaggttactgacttttt

SEQ ID NO: 384013 - DNA, 97 bp, Homo sapiens
gccattcttgattatcataatcaagttcggggcaaagtgttcccaccggcagcaaatatggaatatatggcaaaaactgattattccaagtggaagt

SEQ ID NO: 384014 - DNA, 100 bp, Homo sapiens
tcagcgccgccgtcgccaccgccaccgccaccgccactaccaccgtctgagtctgcagtcccgaggtccccagcctgggtaaagatggccccatggcccc

SEQ ID NO: 384015 - DNA, 146 bp, Homo sapiens
caatgctcggtgcaacatcatgggccccaacggctaccccatccactcggccatgaagttctctcagaagggacttttgcaggcgggaaccatgtctcaggctgcaaaggcctcggcctcggccacagtggcggtgaacccagggc

SEQ ID NO: 384016 - DNA, 82 bp, Homo sapiens
gtttctggaagaagaagaagagcatgatcggcatgtccaccaaggcagaccgagtgtgtcagcagccaggactttctctctg

SEQ ID NO: 384017 - DNA, 100 bp, Homo sapiens
gaagtgtttcagggggtcgaggtcgtggtggaccacgtggtggcaaatcctccatcagttctggtgttgcggtatacactggaatggaaactaagatggc

SEQ ID NO: 384018 - DNA, 83 bp, Homo sapiens
gtggaccacaggccctcgttgcccagatcctcgtggtggaacatcggacccattcaagaggaaggatgaaagctctatatagg

SEQ ID NO: 384019 - DNA, 100 bp, Homo sapiens
atgtaccagcccagccggggtgcggcccggcgtctcggcccttgcctgcgcgcctaccaggctcgaccccaggtctctcaggcagctgcagagcttcaac

SEQ ID NO: 384020 - DNA, 82 bp, Homo sapiens
ccgtgcccgaagagggctcggaggatgagctaccccctcaggtgcacaagaaaaccggccattcccgccgggcctttggccg

SEQ ID NO: 384021 - DNA, 90 bp, Homo sapiens
gccggcgccgagggcttggaatctcgagcgggaaaagggtgtcagatgcctgatacattcaattcatggtttcttataaccctactccac

SEQ ID NO: 384022 - DNA, 84 bp, Homo sapiens
gcgtctctctgctgcggcgcggggaccgctgtgctctcggtgtggacactgccagcggctgcagccgacttggaatgacctggg

SEQ ID NO: 384023 - DNA, 75 bp, Homo sapiens
tgacaaatatcttgatccgtccttttttcaacatcggatctttgggggatagcaagaaacatttgagtgaatgtt

SEQ ID NO: 384024 - DNA, 90 bp, Homo sapiens
gttcttttgacaacgaacagctcttcaccatgaaatggatagatgaggaagactaatagggatgccaaaggaaaaatatgatcctccaga

SEQ ID NO: 384025 - DNA, 131 bp, Homo sapiens
agaaaaggatcctgtctctggcccgcaatcaccccttcctcactcagttgttctgctgctttcagacccccttatatcaacatgccccctttcctgttgctggaagccgtctgtgttttcctgttttccag

SEQ ID NO: 384026 - DNA, 75 bp, Homo sapiens
cccgtgcgctacgggcaatgctgggtctttgctgccgtcatgtgcacaggtcttcatgtacgtttaagcaggctg

SEQ ID NO: 384027 - DNA, 100 bp, Homo sapiens
atgactgtgaaggagttcaggcagctggccaacagtggcaacattgtcttcagtgttaagaaatgtggactcctgtgaggtgctggaggtttgaatcatc

SEQ ID NO: 384028 - DNA, 148 bp, Homo sapiens
gggaggcggcgagtgtgaggtccgccaggatcccaggagcccatcccgcttcctggtgttcttctacccggaggacggaggcagtgtcgcattgccctgaagaaggccaactggcccgaatccaaaatgttatccaggagcttcctcc

SEQ ID NO: 384029 - DNA, 75 bp, Homo sapiens
aggcgctgctggagttccgcgacaccatcttcgacaacatcctcaaggtaagaatgattgatgttggctgatatt

SEQ ID NO: 384030 - DNA, 100 bp, Homo sapiens
gaaagatcaacaagatgacggataagctcaaaacccatggtgctggagaatctggtaaaagcaccattgtgaagcagatgaggatcctgcatgttaatgg

SEQ ID NO: 384031 - DNA, 75 bp, Homo sapiens
cagttaatcctcaatttaagcctgatctaacccctagaaacagttatatcagagatggacataaagcaacagaag

SEQ ID NO: 384032 - DNA, 100 bp, Homo sapiens
aacacggtgactgtctctccagatggatccctctgtgcttctggaggcaagcgagggtgggtcctgggccccaacaactactacagttttgccagccagc

SEQ ID NO: 384033 - DNA, 100 bp, Homo sapiens
tggacaactacatccgctcccgccgagacatccgctccttgcccgagaacatccagtttgatgtttactacaagacttgccttcaaggtgtgcaagtaag

SEQ ID NO: 384034 - DNA, 51 bp, Homo sapiens
gataaaaccatccatcaattactaccaactcttgaatgtcgtctctcaact

SEQ ID NO: 384035 - DNA, 75 bp, Homo sapiens
cttgtgctcacccaccaacaatttagtagtttattaaccttgcaagaactcttcaggcacatatggaagatctcg

SEQ ID NO: 384036 - DNA, 75 bp, Homo sapiens
gtgactgtctctccagatggatccctctgtgcttctggaggcaaggatttgatcaaagatctgaaatctgaactg

SEQ ID NO: 384037 - DNA, 96 bp, Homo sapiens
aagagacgatcattctgcaagcaggcaacctgaatacaggtgtcatggagaaactccagctgggcccagagattctgcagcgggaaaatccaaggc

SEQ ID NO: 384038 - DNA, 75 bp, Homo sapiens
tcgaaagaatatgatcaactcctgaaagaacactctgaacttcagtaatctatgccagcaattatgacaatgtta

SEQ ID NO: 384039 - DNA, 80 bp, Homo sapiens
ttcgtggctcactccctttcctctgctgccgctcggtcacgcttgttttaaccgtgattggagataccacaaagaagaac

SEQ ID NO: 384040 - DNA, 100 bp, Homo sapiens
cgtgcaggcagcggcggatcatattccttcatctaccatggctcagccgggaactctgaacctcaataacgagtgagcctgttcatgcgaagaaacggaa

SEQ ID NO: 384041 - DNA, 121 bp, Homo sapiens
cctcctgtgacctgcatgtactgggggattcgcagggaggatgtcgggacaccccggaagctgggaaatggtgaaatgacaatggatgctctgttggctcgattgaaacttctgaatccag

SEQ ID NO: 384042 - DNA, 83 bp, Homo sapiens
tctccctcagtatttagaccagccttatgccagcctggaccatcttggaggcagtgtaggatcatggaagaactttgaattag

SEQ ID NO: 384043 - DNA, 76 bp, Homo sapiens
cccacgtgacatgcggagattccagaaactggcagacctttcacttcgtatccaacaaattgaaacaactctcaat

SEQ ID NO: 384044 - DNA, 75 bp, Homo sapiens
gtggttggagaaaagggtgttctcctctcagcaccctggaggagaagaggttctgctggaacaagctggtgtaga

SEQ ID NO: 384045 - DNA, 75 bp, Homo sapiens
gcggccttcacacatcccagccggtgactgcagtgaggactctacatcaacagatgatatgtggtaaaactgctc

SEQ ID NO: 384046 - DNA, 100 bp, Homo sapiens
gagcgctcaggatggaggaagactcgatccgcctgcctgcgcacctgcgtacttctcccagcagctggtctcttacagttacaggatgtgaagaagactt

SEQ ID NO: 384047 - DNA, 50 bp, Homo sapiens
gtggagcgggacacgaacgtgtggtctcacgtgtgaaacatggctacaga

SEQ ID NO: 384048 - DNA, 100 bp, Homo sapiens
cgggggaggaattgctccgaccggagaccccaccacccacgttacctacttcaggtgcctgaagacctctcattagaagagagagaagaacttctagaca

SEQ ID NO: 384049 - DNA, 75 bp, Homo sapiens
tctcttaccaaaatgtacagcattcctaaggataagcagattctagcctaaaagaccaaacaaaccagcaagttg

SEQ ID NO: 384050 - DNA, 100 bp, Homo sapiens
aactacaaatacagatggcaagattgagtttatttcaacaatggaagggattgtcaatgaggcagatcagattccgatttgacgggcaaccaatcaatga

SEQ ID NO: 384051 - DNA, 100 bp, Homo sapiens
gtgtacctcctggccacccagcactgcgcagccgtggtgtccagcctcctgggcagccccttgcccttggacagcttcatcacgtttcgctcctgtgcct

SEQ ID NO: 384052 - DNA, 100 bp, Homo sapiens
cttctgggacgcacagagaccgtgaagattccaagttcaggagaactcgaccggtactgggcctaatcgctacgtgcctctttggctatgatgcctatgt

SEQ ID NO: 384053 - DNA, 90 bp, Homo sapiens
tgaatcaagccaaggtgccggtggatggtaataaggaagagccccaaatatgcgttattgagacaattataggagattttcagaaggaac

SEQ ID NO: 384054 - DNA, 90 bp, Homo sapiens
gaagcggcaactcgggcgactgctgctgctcctgagggtgctggaccccctgctctgcgacttcctggggctgtgggacagatgatgtct

SEQ ID NO: 384055 - DNA, 101 bp, Homo sapiens
caaattttactttctgacaatgcagcttctcttgcagtgcaggtcagcccttcataaacccagatgggagtccagttgtgtataatcctcctatgactcaa

SEQ ID NO: 384056 - DNA, 100 bp, Homo sapiens
attgaatgccaagcagaaaattacctaaatgcactctttcgaaagaaagacggaagtgaaaatgtgacaggattggacctttcagatttcccagcattag

SEQ ID NO: 384057 - DNA, 83 bp, Homo sapiens
aggagcacggatgccccccggagccgcgggctggcagacatttgaagacagtgatttgttccatttgattggtgttatctgtg

SEQ ID NO: 384058 - DNA, 96 bp, Homo sapiens
tcaacttcttgtcctcaagtgatcctcccaccttagcctcctaagtagctgggaccacaggtactggaggccacagctgccctgtacaaccaggac

SEQ ID NO: 384059 - DNA, 98 bp, Homo sapiens
cgaagaaccttttccctaatacgtacctcattgtgggagaatatgatgctttggcaaaagtgattcagcaccatccagacaggcatgagacattaaag

SEQ ID NO: 384060 - DNA, 75 bp, Homo sapiens
gaaccccgggcagcccgggaaatctccaagtcagaaagaacatggctctctatgctgacgtcggtggaaaacaat

SEQ ID NO: 384061 - DNA, 90 bp, Homo sapiens
gaggcctggaggacaccaacatggatcttaagattgaaagtgatgttcaagaaccaactgaaccagaggatgaccttgacattatgcttg

SEQ ID NO: 384062 - DNA, 74 bp, Homo sapiens
gagttcaaagagaccctcggaacccactgaggcggctcccagctgcgttggcgacatggccgacacccccagag

SEQ ID NO: 384063 - DNA, 75 bp, Homo sapiens
gaaagactcaactgagcaggtgatgcagctagctgtgtattcttattacaaccaaggcattttaccagagcaagg

SEQ ID NO: 384064 - DNA, 75 bp, Homo sapiens
cacatcatcaccatggacctgcatgcttctcagatacaggtgtgtgcagtggcctcagggatccggaaagtctag

SEQ ID NO: 384065 - DNA, 89 bp, Homo sapiens
cagctgcacatgctaaccaacaggcacgacaagtttctggacactctccgagaggtgaaggacggagaacgtgaccttgaagaagccag

SEQ ID NO: 384066 - DNA, 100 bp, Homo sapiens
gccgcagcagtgatgcaggctgctgcgaactcagcacaaagcaggttgtaaagaagaaagttctaccctttctgtcaaaatgaagtgtgattttaattgt

SEQ ID NO: 384067 - DNA, 100 bp, Homo sapiens
tttctacagaagtcaaggcagtcaagctgcggcgagataggactccctggaggaaaagcggaagcggcagcggtctgaacgcctggaacggattttccaa

SEQ ID NO: 384068 - DNA, 98 bp, Homo sapiens
gagctctcggtcctggccgcgattttctgcaggccccacgagtgggaggtgctgagccgctcaggagaacggcccttccagtgcaatcagtgcggggc

SEQ ID NO: 384069 - DNA, 90 bp, Homo sapiens
cagcaatattcagtttccagaatcagcagctccggcagcagtgtcctgtgctgatggtgttggcagaaactggcaagatgtttacctggg

SEQ ID NO: 384070 - DNA, 100 bp, Homo sapiens
gcagcatctcctggaaagatgtaaatctcccaagtccaaaggattgaagatggatacgtgacaatcccagggaccgctgcactgacttcatttccttaga

SEQ ID NO: 384071 - DNA, 50 bp, Homo sapiens
gccctggaggtggggagaaaagtacctccctgcacttggctattcaaaac

SEQ ID NO: 384072 - DNA, 100 bp, Homo sapiens
gaatagaagaggcttgtgaaatgtataccagagctgcaaatatgttcaagatggctaaaaattggagtggtgcttttgaagatgatgatatcacgcacgt

SEQ ID NO: 384073 - DNA, 75 bp, Homo sapiens
aacagtggcaactctgtgggatggacatgcagccgtttggcatgatccagaggaacaaggagacattgtggtagc

SEQ ID NO: 384074 - DNA, 101 bp, Homo sapiens
gtattttggttttcttatgttttggagtcacacaagctaaagacgggccattttccagacctcatccagggcagcaggatgggtgtggaagcagtgatggc

SEQ ID NO: 384075 - DNA, 75 bp, Homo sapiens
ctgggacttcccgtccgcggcgtggagggttgtccttctattcaggccactcttcgttttccatgtactgcatgc

SEQ ID NO: 384076 - DNA, 75 bp, Homo sapiens
cgccagcctgcgaaggtggcggcgctgctgctcgggctgctcttggagattgagaggatccagaatccagatctc

SEQ ID NO: 384077 - DNA, 100 bp, Homo sapiens
gaaacgtgataagaagcacctggatgagacatttgctacagcatcccacattaagtcaacggagaagatggtataaactggtccatcagtgacaaagaca

SEQ ID NO: 384078 - DNA, 75 bp, Homo sapiens
ctctgtcagaggaagatcccttggtgcagagattcttagaagaggaggtgtatcccctgttaaaaccatatgaaa

SEQ ID NO: 384079 - DNA, 75 bp, Homo sapiens
cagagattttttttgaggatgaactggtgtgtatcctaaatatggaaggaaggttctcagtttttggcctcggct

SEQ ID NO: 384080 - DNA, 100 bp, Homo sapiens
tctcctaagagacccaggggaagacccaaaggcagcaaaaacaagagtccctctaaagcagctcaaaagaatataaccttgaaccttgtgaagatcctgg

SEQ ID NO: 384081 - DNA, 100 bp, Homo sapiens
catctctataggggaggcaggcttttgcaaggaattttggagagtaaaaggctgaaccttgttaaagagaaaaccattaatcagaccatcggcaacgtcg

SEQ ID NO: 384082 - DNA, 90 bp, Homo sapiens
cagacatccaaaagactgctgagatagtttatgcagccaccaccagtttgcggcaagcaaatcaggtgtttggtgtataaaacagaccaa

SEQ ID NO: 384083 - DNA, 111 bp, Homo sapiens
cggacagccgcgcgctgagggtctcggggcgggcgccgcgggacctctccgggccatgggtgctggagaatctggtaaaagcaccattgtgaagcagatgaggatcctgca

SEQ ID NO: 384084 - DNA, 82 bp, Homo sapiens
tttttcgtttatgtaggtggagaatcacctttgaaagttattgataaggaaactatagatttattggcgttcacctctgttg

SEQ ID NO: 384085 - DNA, 90 bp, Homo sapiens
aggccgtcaccttaccttaaaccttttaagcaaggaaattgaactaagaaatggagaggtgaaaattagttctgctgtgcttaaagctgc

SEQ ID NO: 384086 - DNA, 100 bp, Homo sapiens
gtggactctgaccgcaaacaaggagagcctactgagcagcctgagtgggtgtccctggccagtgtccttccacctgtccacaagcatggggaacatcttc

SEQ ID NO: 384087 - DNA, 96 bp, Homo sapiens
agcaaaaccatacagggctatgatgctattgtggttgaacaatggacagtcctggaattagtgtgactctggatccagatacagctcatcacgaac

SEQ ID NO: 384088 - DNA, 83 bp, Homo sapiens
aaggattcaaatgctagcagacacggtggctactctgcctcggggacgaaagcagtgggcaggcttggctgaaatgagaactg

SEQ ID NO: 384089 - DNA, 100 bp, Homo sapiens
caggtgggggccggcggggtccgtggccaggttatcaatactctggctgaccatcatcatcgtgggactgactttggtggaagtccttggttacatgtca

SEQ ID NO: 384090 - DNA, 82 bp, Homo sapiens
tacggggcgggggcggggcggcagtgagctcggccggcaaccgagggacccgcgtccagctgagctgactgctgcccacttt

SEQ ID NO: 384091 - DNA, 83 bp, Homo sapiens
cgcgtcggggcgccctctccactgcgcgcgcagcccctgtcaaagggaacaggaagcagtccacggagggtgacgccctagac

SEQ ID NO: 384092 - DNA, 80 bp, Homo sapiens
aaggaggagctggaagtggtaaagggaagtgccagacacagcttcagaatgtgactccttaaattcttccattggaagga

SEQ ID NO: 384093 - DNA, 73 bp, Homo sapiens
cggttccccggcccacagtgggggtgtgcaaacccgagagaactgggtcatgcaagacaagataatctgcctt

SEQ ID NO: 384094 - DNA, 96 bp, Homo sapiens
catgaacttgcctttaagctgcaggcctcagatgagggcactctgggaggatcccccaccaagaaggcagtaaccttcgacctcagtgacatggac

SEQ ID NO: 384095 - DNA, 50 bp, Homo sapiens
aacctgctcatgtccccacaagccctttctaaggcacaaaatgatgtgat

SEQ ID NO: 384096 - DNA, 129 bp, Homo sapiens
tccttgctcctgactgtcagtcagtacaaagccgtgaagtcagaggcgaacgccactcagcttttgcggcacttggaggacactcatgaggaccatgatacttccactgagaatacagacgagtccaac

SEQ ID NO: 384097 - DNA, 50 bp, Homo sapiens
ctgcgggcccgctccgacgcggaagctcatgatggagcagtccaagaagt

SEQ ID NO: 384098 - DNA, 80 bp, Homo sapiens
agaccaacgagatcctgcacatgtctttgggaccctcacaatgatcccaatgctcagggggatgccttcaagactctctt

SEQ ID NO: 384099 - DNA, 121 bp, Homo sapiens
gaaacctcagacagatcgccggggaggcagcgcgggatcccagcctcaggcgtgcgcggacggtgtgcgggccttagcagtaggaggactaggctccattataagagttcttacagcaaga

SEQ ID NO: 384100 - DNA, 82 bp, Homo sapiens
cgtgcccgagaatagctccgtccagcagacaacagtgattgactacgtgaagccctcggatctcaagaaggacatgaacgag

SEQ ID NO: 384101 - DNA, 100 bp, Homo sapiens
agtttctggagaaacacaagcagcagttccagcagcagcaactgcagatgaacaaggttgacatcatggacatatgtgagtccatcctggagaggaagcg

SEQ ID NO: 384102 - DNA, 74 bp, Homo sapiens
aacgcaagtccatgtacacgcgagattataagaagcttgggttcattctgctactgtttgaacggtcttggatg

SEQ ID NO: 384103 - DNA, 127 bp, Homo sapiens
acagcgccttcctcaacgacgcggacatggtcatgagctttgtgaacctgggatgaacacgcagggttccggaccaatacctgggccattgtgactctcagaatgccaggcaataagagatcagaaa

SEQ ID NO: 384104 - DNA, 74 bp, Homo sapiens
ttggatttaaaagacagtcctcgtcagcactgactttcagctatggaatcggagggtgcatctgcccggaagac

SEQ ID NO: 384105 - DNA, 97 bp, Homo sapiens
ccgccatggagacctcagcactcaagcagcaggagcagcccgcggcgaccaagatcaggaacctgccctggataggatttttgggccttggtctcat

SEQ ID NO: 384106 - DNA, 73 bp, Homo sapiens
gagcgaactgtcaaagaggtgctgcccgctttggagaacaacaaggagcaggaggtcccagatcccacaaagt

SEQ ID NO: 384107 - DNA, 100 bp, Homo sapiens
tctgggttttacagcacttggccaagctagatgtcaagcttcttccagaccagctggtcttgcttctggagcatctcttggagcagaagactctgagccc

SEQ ID NO: 384108 - DNA, 100 bp, Homo sapiens
ttggaggagcaacaatgtgggactatacggaagagctaaggagcaaatccaagatctgtgccaatgtgttttgtggagccggccgggaatgtgcagtcac

SEQ ID NO: 384109 - DNA, 82 bp, Homo sapiens
cggacctctggagtgcccccagcccagagcccgggggtccactggacggggcctgagctacaacttcacccacctggacggg

SEQ ID NO: 384110 - DNA, 101 bp, Homo sapiens
tgttcctatgtggaactccccaggctgcagataatttctgaccctagacttcgcttcgagttagcacttcgagaagctggacttcatagaacactttatgc

SEQ ID NO: 384111 - DNA, 73 bp, Homo sapiens
tgaatctataatgctggagatgaaagccaacttctcccagtttgccttcgagtccgtggtggccatcgccaac

SEQ ID NO: 384112 - DNA, 82 bp, Homo sapiens
gcagccttctacttgtcccatgagtttcttgcagaacataaattattaggaaacattaaaaatgtggccaagacagctaaca

SEQ ID NO: 384113 - DNA, 75 bp, Homo sapiens
ttcacatacgtcaaggaaattgaggtcaacgctgctcttctgagccgctgtcgagtgattgttcttgagaagctt

SEQ ID NO: 384114 - DNA, 74 bp, Homo sapiens
cctgcaggaactctacaacccaatccagctggagttgatcaaggatgatgaaaaagaggctgaggaaggagagg

SEQ ID NO: 384115 - DNA, 98 bp, Homo sapiens
ttgacagaattgactataacgttgaacagtcctgtatcaaaactgaagatggtttgaaacagcttcacaaggcaatctgaaggcaaatcctgtttaga

SEQ ID NO: 384116 - DNA, 88 bp, Homo sapiens
cgggtgccaagcagagagtgagccgcggagcctgattccccacgtgtcacattggtccgtgacgtttccccactaagggtgagaccca

SEQ ID NO: 384117 - DNA, 88 bp, Homo sapiens
ggaaaggaaacaaaattcgatttgcaaatcattcagtgaatcccaactgttatgccaaagagcttttctggaaaaagaagaaaagttc

SEQ ID NO: 384118 - DNA, 100 bp, Homo sapiens
acgaaactcctgcacctgtatatagggccaagtcaattctggagacctgggtgtgggtcaagcaaccagcggacggaatagacctcagcagcggcgtggt

SEQ ID NO: 384119 - DNA, 60 bp, Homo sapiens
gggacgtgctgggaggatggtgccgagactatggaaatgatgttagacaaaaagcaaatt

SEQ ID NO: 384120 - DNA, 101 bp, Homo sapiens
ctcgtgggcggcaaggacttcgagcagcctctcgccatttcccggttcagggcgacagctcagtgaagtcttcattcagttaccttcaaggaaagaattac

SEQ ID NO: 384121 - DNA, 110 bp, Homo sapiens
gccccagagggcggaggcgcgcgctcgattccccccacgcggcggcgccgcctgtttacgactctgatgccagtatggactggagatgatgggagccagttggatagccc

SEQ ID NO: 384122 - DNA, 100 bp, Homo sapiens
caggaaccatgaaatttgctttgcaactgtttgcaacctttaaggaagactgaaaaggcattcctgaagcatgaacaagatcctgatttttgggctcctg

SEQ ID NO: 384123 - DNA, 75 bp, Homo sapiens
cagaatctcagaatcgggcgttgggctttgccgggtgcttcagatcaatggagagcactgtgaggtggatgcccg

SEQ ID NO: 384124 - DNA, 83 bp, Homo sapiens
acatgggacaattgaaaatgaatgaatgtacacacctcattgtgcaagaaccaaaaggatgtacgaagtaggtccaaagttgt

SEQ ID NO: 384125 - DNA, 83 bp, Homo sapiens
aaggagctcagtgacctcctggacttcagcatgcttgctatggcatcgttcaggtgccaacgggaccctggttctgccggaaa

SEQ ID NO: 384126 - DNA, 90 bp, Homo sapiens
gctcgccaaaagatgttattggagctattttgtaagggtgaatcgaaacgcatcaccctggtcctccagcagccacagtctggaggtccc

SEQ ID NO: 384127 - DNA, 98 bp, Homo sapiens
gcggagtagcgagtcggcaacccggagggaaccagatgccatctttattgagatctcaaagaacagcatcctatgggaagacagaagaaaatgccaag

SEQ ID NO: 384128 - DNA, 100 bp, Homo sapiens
acaaaggaaaacgaggaaagtcccaggatgactactgtgtcaacaggcgcgtcgggacgccccgaggcatcctcccccgcccgcgggcccggtagctggg

SEQ ID NO: 384129 - DNA, 80 bp, Homo sapiens
ctgaaacagaaattctggaacacctatatgctgagcgggctttggacaccatgaactttgatgtgattaagggaaagcca

SEQ ID NO: 384130 - DNA, 83 bp, Homo sapiens
ctggagccctgcattcgcggcgtgtgcaggcatcataggcgagtattagtggaatggctaagagatccatctcaggagcttga

SEQ ID NO: 384131 - DNA, 95 bp, Homo sapiens
actaaccgctacttgagatgtgtgttgttccataaggttacaggaggttccagtggcatcgggaagtgcattgctatcgagtgctataaacaagg

SEQ ID NO: 384132 - DNA, 100 bp, Homo sapiens
gcctggcctgcgcgccgctgcccgcgccacaggcaacagatcccctaatttgtggctgaaagatgttctcaaggaagaaggtgtctcttttctcatcaac

SEQ ID NO: 384133 - DNA, 80 bp, Homo sapiens
gagattggacctggaaaagaaactttatgaatataatcagtctgatacatgcaggtattgcaggcaatgggatatccaac

SEQ ID NO: 384134 - DNA, 100 bp, Homo sapiens
accggtcccccagcggcagccgagcccgcccgcgcgccgggacttcaaaatgagcgtccctgactacatgcagtgtgctgaggaccaccagacgctgctc

SEQ ID NO: 384135 - DNA, 100 bp, Homo sapiens
gtggactggctcttattgctgaaagactacccatgctatatccagaagtaattcaacagtgtgtgcaggaacggagaataaactgagctctctctctgac

SEQ ID NO: 384136 - DNA, 100 bp, Homo sapiens
ccagccttctgccgctcgccctctgcctgctggctgcacccgcctccgcgctcgtcagcatgtcggtgcctcaggccatggagtggctaattgaacacgc

SEQ ID NO: 384137 - DNA, 82 bp, Homo sapiens
agccgaacttcagggtttccaccgttcgttcaaggtggcagaatcgtgtcctcgaaaccctttgcacctctgaacttcagaa

SEQ ID NO: 384138 - DNA, 100 bp, Homo sapiens
atgatgggcgttttaaagacatctttcaggagatatatgacaaagttaatgttctcctcagaggtggaagaatatcctgataaagagaaagaaatcaaag

SEQ ID NO: 384139 - DNA, 80 bp, Homo sapiens
gggaagaggagtgcggaacccgcgggagcccagctcaacattggcaatgtgctccctgtgggcaccatgcctgagggtac

SEQ ID NO: 384140 - DNA, 99 bp, Homo sapiens
tgtcattcttctctacagaagagcttctcctcatcaactggggatgattacagttcttcctaaaaaaggtcctcagaatggttggaatgaccctccagc

SEQ ID NO: 384141 - DNA, 100 bp, Homo sapiens
cgtgtgtaggggagcggaaaaggaagtcaccaccgtggcctgcgacggtggttatggagctacagctttaaatatgaagcgtgatcctttacacgtgaaa

SEQ ID NO: 384142 - DNA, 101 bp, Homo sapiens
gggggcagttggacgtgacccagagggccttgtacgtggaggtgatgctggagacctgtgggcttctggtcgcactgggtgtggacgggacagtgagtggc

SEQ ID NO: 384143 - DNA, 48 bp, Homo sapiens
agcacgcctcttcaaagacgagcgaggatctggatgagctgcactacc

SEQ ID NO: 384144 - DNA, 131 bp, Homo sapiens
cagatcagagtataagcggatgtacggcaagtcgctgtaccacgacatctcggagagaagtttgctgaggaatgccttcaagcacaaagtgatgaatgactgccttcaagtctcaagaaaacacttttccc

SEQ ID NO: 384145 - DNA, 50 bp, Homo sapiens
tggcacttatgtcctccctgggtcaccctcgagtcctggctgattctttt

SEQ ID NO: 384146 - DNA, 100 bp, Homo sapiens
acctacagaagcagccagtgaaagcctggcgacaggatatgggccctcacattttccaaacctgtccatctgctaactattttgactgcagagccatgtc

SEQ ID NO: 384147 - DNA, 53 bp, Homo sapiens
tgagctccaccttactggctaacggacggaaccgctggactccaggttccttg

SEQ ID NO: 384148 - DNA, 50 bp, Homo sapiens
catgccaccgctttcatcatcgtccaggccggttgttatgacaatggaaa

SEQ ID NO: 384149 - DNA, 101 bp, Homo sapiens
agcgacccagctataagttcttcttcaagtctatggacgacgatttcggtaacaaatgtggcaattattttggatctatcacctgtcatcataactggctt

SEQ ID NO: 384150 - DNA, 75 bp, Homo sapiens
gagctggcgggtcccgcgggccaggccgtggaggtaacaaacctgaatttggcaactggcatcataaacagaagc

SEQ ID NO: 384151 - DNA, 100 bp, Homo sapiens
gcaaagacatcaccatgaacactagcaatagggccagatttgagtgtgtgaatttttgagtgaaacctggaacccaaatgagaagaaatctgcaaggaat

SEQ ID NO: 384152 - DNA, 75 bp, Homo sapiens
gtcgaggaggcgcaggagactgaccgcaacggcaggatgctgcagttggagaagaaacttgaacgtgaacttgag

SEQ ID NO: 384153 - DNA, 83 bp, Homo sapiens
agaatttggcccttttgtcctcactaggatagaatatgtaacggtgactccagagggattccggtaccggggccagatcttcc

SEQ ID NO: 384154 - DNA, 95 bp, Homo sapiens
ccagcccccttataagccaaaagctggttcaggataagtttgaggtgctgaattacacaagcattcctatctttctcccggaagtcaccattgga

SEQ ID NO: 384155 - DNA, 75 bp, Homo sapiens
gcgtgcatcatccacggggtgctgcagatcctgttccaggtgggcccctccggctccccgagaacccgtccttag

SEQ ID NO: 384156 - DNA, 78 bp, Homo sapiens
gttgttaccgaacatctcataaataagaaaaggcgacggcggattgacagaagtatgattggagagcccacaaacttt

SEQ ID NO: 384157 - DNA, 100 bp, Homo sapiens
tctacctcatccttgagtgcctcagtgtggagacctttggcgacttggcctttggcgacatcttcctccacctgctcacgggcaaccttgcgctgctggc

SEQ ID NO: 384158 - DNA, 82 bp, Homo sapiens
cagagtaccgcttggagatcctagagtggatgtgtacccgatgtgaagttcatttccaatccgccctccatggtggcagcgg

SEQ ID NO: 384159 - DNA, 92 bp, Homo sapiens
gcggtgggccccagccccacagaccagcccagcattcaggtgtggacactgccagcggctgcagccgacttggaatgacctgggagacaaat

SEQ ID NO: 384160 - DNA, 102 bp, Homo sapiens
gtactgttgaaagcgacaagtggaggcgccgctctagcggccgggactctgaactatggcggttactaccggtactacaacaagtacatcaatgtgaagaag

SEQ ID NO: 384161 - DNA, 100 bp, Homo sapiens
ctgcaagatggagccaggaggagagcccacaggtgctaaagagagcagtaccctgatggagtcccttgcaggatcctagaatttgagaacccgcatgtta

SEQ ID NO: 384162 - DNA, 88 bp, Homo sapiens
tggattacaactgttcatcctcacctatgcaaagaaagggaagctattgctgggattttgaggagttgcagagctattttgctgcatg

SEQ ID NO: 384163 - DNA, 90 bp, Homo sapiens
ctggaagaggatcttgggcgccgccagtgattcgcctttgccagtctcatctcgtgtctgctttgttaagttccatgatccagactcagc

SEQ ID NO: 384164 - DNA, 75 bp, Homo sapiens
aagtctctccaccaagccattgaggcgggcaccacggcaggggctgagctaccctcatggaagggagaggaccgt

SEQ ID NO: 384165 - DNA, 75 bp, Homo sapiens
cagctcccggcactgctacctctgacccaaagcagctaggtcttgactccactaacggggacttctcatacggct

SEQ ID NO: 384166 - DNA, 50 bp, Homo sapiens
ctgggcgactctgtgcctcgctgaggaagccccatgtgccactcccctga

SEQ ID NO: 384167 - DNA, 100 bp, Homo sapiens
cccagtccagggggaacgcagtgcgccccgcttcggtgttacttccctcagatctctacaatatggaaatcagttcatatatcagtcaatgccacgaatg

SEQ ID NO: 384168 - DNA, 50 bp, Homo sapiens
gtggtgcctcaaaacacctacccagatggagtctagctctgtcgcccagg

SEQ ID NO: 384169 - DNA, 137 bp, Homo sapiens
ggaaaagcagttgctcgaagaactcgagcgacagagacaagctgagcttgccgcacaaaaagctagagagacctcacattccaatcagcaaattagttgtttcagaatcctatgatacttatatcagtagaagtttc

SEQ ID NO: 384170 - DNA, 100 bp, Homo sapiens
tagggacgagatctagaatcaactgagagagatgcttaaaaatcaccagttactttaatgaattcttctaacagagaaaatgccattgaggatgaagagg

SEQ ID NO: 384171 - DNA, 75 bp, Homo sapiens
aggaagaatgccggtcacagcccaggagatatggctcgtggacagcagaaaattcagtctcagcagaaaaatgcc

SEQ ID NO: 384172 - DNA, 96 bp, Homo sapiens
accctgcgctgccgccgctctgaggagttaaaggtggtgatggcacttctcaaatactggccaaagactcacagtccaaaagaagtaatgttctta

SEQ ID NO: 384173 - DNA, 100 bp, Homo sapiens
gggagcatgaacgcccctccagccttcgagtcgttcttgctcttcgagggcgagaaggaatggatttgtaaactcaagagcttctccaaatttgattgga

SEQ ID NO: 384174 - DNA, 75 bp, Homo sapiens
tggaaaacaactttgtggatttgacagaagcacaggggagtttatagttctgatgtctttgacattttccctgga

SEQ ID NO: 384175 - DNA, 75 bp, Homo sapiens
cttctagataaaccacagttacaaggaattccatgcccaccagaagtatgtccgacaagcctggcagaaggcaga

SEQ ID NO: 384176 - DNA, 83 bp, Homo sapiens
cctgaaccgcgcggccgaaccctccgatgcagtgcaagctgtttgtctttgacaagacctcacagtcctgggtggagagaggc

SEQ ID NO: 384177 - DNA, 74 bp, Homo sapiens
cacatcgaattaagagagcagaaggatgggaggaaggtcctcctacaggaacttagtgatttggcccgtgaccc

SEQ ID NO: 384178 - DNA, 100 bp, Homo sapiens
tggcgctgtcgtgtacccttaacaggtatctgctcctcatggcgcaggagcatctggagttccgcctgccggtaagaagagttcctgggtcaagtggtca

SEQ ID NO: 384179 - DNA, 98 bp, Homo sapiens
ggagcttcggttattgtcatccattgtggaagagaggcatttcatccttcatgaagccattcaggattttgaattgcatatgagtgcttggctcttcc

SEQ ID NO: 384180 - DNA, 75 bp, Homo sapiens
ctggtatggacacagcttctagtgttgctttggatcttgtggaaagtcagagtggagccgccaccaaaatgcaga

SEQ ID NO: 384181 - DNA, 100 bp, Homo sapiens
ccggtgtaggagaagaaatccgcagaagcttattaaagttaagctgctactgtttgaacggtcttggatgaacagatggaagtctgctgttctgcatgaa

SEQ ID NO: 384182 - DNA, 73 bp, Homo sapiens
cggagagaggatcaggtgttttcaggttaaccgtcagagtcataaaactggaagggaccttagagactcacta

SEQ ID NO: 384183 - DNA, 82 bp, Homo sapiens
ggactccttcggcagtccacccaccgccgccgcctcccagggatcatagacggtatttctatgtaaacgaacagtcgggcga

SEQ ID NO: 384184 - DNA, 113 bp, Homo sapiens
ggacactttgttattggagaaacatgcagattatatcgcatcctatggctcaaagaaagatgattattgatgatgatgatgattttgatgatgaggaagctgaagaaaaagcg

SEQ ID NO: 384185 - DNA, 98 bp, Homo sapiens
tggagtctgcgaaggccgggacccggttccccggcccacagtgggggtgtgcaaacccgagagaactgggggtcaggcccagccccaggcccagtggt

SEQ ID NO: 384186 - DNA, 75 bp, Homo sapiens
ccatcacactgaccttcaacgttgggcaggttttataggatcacattgacaaaagtaccatggagttttatgagt

SEQ ID NO: 384187 - DNA, 100 bp, Homo sapiens
ctggagtccggctttaactatttctaaagttctcctctccatctgctcacttcttacagattgcaaccctgctcagcaaaacccagcagctcagattcct

SEQ ID NO: 384188 - DNA, 75 bp, Homo sapiens
attggtaactggtggagaccaaattttgaacctcctcagaactttcacgatggccgtaaagcacagcagcacatc

SEQ ID NO: 384189 - DNA, 83 bp, Homo sapiens
gaagatcgtcgccacctggatgctggagggagcatcgagtacagctgtccggcctccaacgagtgtgagatcaccaagcggag

SEQ ID NO: 384190 - DNA, 50 bp, Homo sapiens
ccctgttgttcagcagtgatgaggaggccctagactggagctggttacag

SEQ ID NO: 384191 - DNA, 100 bp, Homo sapiens
caagcggatactggtcttctcgtcggattgcccatgcacttgttgcagaaacagccaagccacctcgtacatctcatcctgtagtgaagttttcctgtac

SEQ ID NO: 384192 - DNA, 88 bp, Homo sapiens
tctctgccgtgaatcattcctgcagatgaaaaagtgtgacttggcagctggtctgctcaccaggtggccagataccgcccacgtgccc

SEQ ID NO: 384193 - DNA, 75 bp, Homo sapiens
ggagcgaatatgacaaagcccgaaagtgtctccaccagcaatggctgccatccggaagaaactggtgattgttgg

SEQ ID NO: 384194 - DNA, 100 bp, Homo sapiens
tgcactgtatggcttagtggttcctggatgttcctggatgcctgacatcacattgatacatgctggaggtctggctcagagttttgctcttgttgcccag

SEQ ID NO: 384195 - DNA, 98 bp, Homo sapiens
gttttacaaagagatctccgtatagtcaataagcacaagccatggatcgagacttcatatcatggagtcataactgagaacaatgacacagtcatttt

SEQ ID NO: 384196 - DNA, 80 bp, Homo sapiens
aaaacccacagaagttgtattagatgatgacagagaagatctttttgcaggtgatgatgaacagtctacacagatggctg

SEQ ID NO: 384197 - DNA, 83 bp, Homo sapiens
ggccaattacttctcccgcttctttcctgtctcggttctggcagagaagagacagctgggtggcaaggatggccctcctcatc

SEQ ID NO: 384198 - DNA, 88 bp, Homo sapiens
ggacaggcgacagcgacctgcggcagcttgccaagaagtatcaccctgacacaaataaggatgatcccaaagccaaggagaagttctc

SEQ ID NO: 384199 - DNA, 100 bp, Homo sapiens
attatcaggtcattaggatgctgtcctacggaaggagagctgcatgatctgattgcagaggttcgagaacttgtcttggacaattgcaaatcaaatgatg

SEQ ID NO: 384200 - DNA, 75 bp, Homo sapiens
agagctggagttctgctgtgcctggtggtctcatggattataaccatttggatatttggttcactaacaattttc

SEQ ID NO: 384201 - DNA, 98 bp, Homo sapiens
ggagccgctggggctgccgccacggccgcccggagagtcaagggtccagagaaggaggagaagttgagacaggcggtcaagcaggtgctgaagtgtga

SEQ ID NO: 384202 - DNA, 75 bp, Homo sapiens
gtcgccgctcccgaagcttttccaggctgatttacttctcctatcaagtagtgagccacatggtctctgttatgt

SEQ ID NO: 384203 - DNA, 75 bp, Homo sapiens
tgcatgagacgcttctggacaggatgaaagtatacctccagtttccttttggaggattatgaagctaaatttaac

SEQ ID NO: 384204 - DNA, 74 bp, Homo sapiens
cgcctcgggtctcgggggccgctctgggatcccggccaccagcaattgtccgatgagcgtgaagccgtgcagaa

SEQ ID NO: 384205 - DNA, 90 bp, Homo sapiens
ggaaggcctggacgacggcccggacttcctctcagaagaggaccgcggatttcagaagaggagccccgccgaggcatgagggccgtgctc

SEQ ID NO: 384206 - DNA, 83 bp, Homo sapiens
cgatcgaagagtccccccaagtctcctgaagaggaaggagcggtgtcctcttaagaaaatgtgagaaagatcagtctaaagaa

SEQ ID NO: 384207 - DNA, 50 bp, Homo sapiens
tgcaggttgaagaactgagctctatctgattccaactccacagagtgacc

SEQ ID NO: 384208 - DNA, 100 bp, Homo sapiens
ggacctcttccagtggctgtgctcagattccctgaagctctgctgccccgcaggcaccttcgggccctcctgccttcggtggattacgtggactctttgg

SEQ ID NO: 384209 - DNA, 105 bp, Homo sapiens
ctctgggattaatgctaaatttgtgaatgctgtgtatgataccttacttaatactaagtcacagcttggaggaaaccagtttgcactatttgatgaggaatttgg

SEQ ID NO: 384210 - DNA, 50 bp, Homo sapiens
aacaccagtggaagatgatcacatcccagcactttcatttggacccgtgg

SEQ ID NO: 384211 - DNA, 100 bp, Homo sapiens
ccagaaccagaaccacagcccttctgaggagctcccaaaccattagtgccagcagtagttcccaagggctgtctcagccatccacccagacgactcagta

SEQ ID NO: 384212 - DNA, 97 bp, Homo sapiens
cgggaagccgttcgggctggggctgtcggccgcggggcggaggcactcgcgcgggggctgagatctgtatctgtggacctgaatgttgatccctcgc

SEQ ID NO: 384213 - DNA, 75 bp, Homo sapiens
cggaggcgttgcgattattgaccagtggatctgcgcacacgccaggagggtgtgaagacagagaatgaccacatc

SEQ ID NO: 384214 - DNA, 112 bp, Homo sapiens
tgtctgatgtggcatctagactttggtttacatacaggaaaaactttccagccattggccaacatagccgaggtagaggtctccatccctgccaagctgcacaactccctca

SEQ ID NO: 384215 - DNA, 82 bp, Homo sapiens
cgggcattctccatctccttgcagggggatatgagactttctactcggaatatcctgagtgttgcgtggatgtaaaacccat

SEQ ID NO: 384216 - DNA, 100 bp, Homo sapiens
gcaactggcaccacccccatgtctggaggagggacgtttctaggatgacccccagagtggagaaatagccgaggacctgggtctaccaaggagttgatca

SEQ ID NO: 384217 - DNA, 109 bp, Homo sapiens
cccgggaggaaggaacgaggcaaggagctaaagcagcgtgcgttcagccctggggttattcagcttctcaaggctggaaaagcgaaggaagtttcctacaatgcactag

SEQ ID NO: 384218 - DNA, 100 bp, Homo sapiens
aaaaaacaggatgtaatgtccttctcatacagaaatctattctaagagatgcagaggatgctatttatggaagaaatggttatgattatggccagtgtcg

SEQ ID NO: 384219 - DNA, 75 bp, Homo sapiens
gcagcagccagtattcgggaaaggcagacagttccagcgcacttttccaacacatcactgcattatttgaatgca

SEQ ID NO: 384220 - DNA, 100 bp, Homo sapiens
aagaacctgaaggacacactagatacgacgacatattccacagagcgatccgagcacttcaaaccctgccgagacaaggaccttgcatactgtctcaatg

SEQ ID NO: 384221 - DNA, 75 bp, Homo sapiens
gccacgtcatccgcggctacgtgggcaaccgggcggccacgttcccgctgcaggcatgaacgctgctgtccgggc

SEQ ID NO: 384222 - DNA, 89 bp, Homo sapiens
ctccaggacacccctgaagccgagaaatgggaatgaaggatggcagcatgccgtgcattaaaagctgttttggtagatctcagtggcac

SEQ ID NO: 384223 - DNA, 74 bp, Homo sapiens
actgctacatctgttggaggagccaactagcatggaagtgcaggtattctctactgccgctgatggtcaaacgc

SEQ ID NO: 384224 - DNA, 101 bp, Homo sapiens
ccttgatcctcctcctaattgcaggaacatcatttacagcgagcaatttcagcacagcaagtgtttagagaaaaaaaagagagtatggtcattcctgttcc

SEQ ID NO: 384225 - DNA, 82 bp, Homo sapiens
cctaaccccgccgcagctcctcggacgcaggcatttggctttatgtcccgagttgccctacaagcagagaagatgaatcatc

SEQ ID NO: 384226 - DNA, 90 bp, Homo sapiens
tcaacacctccacctccaagttctgaacggaaaacagttcttccttcaaagcatgcagtacctgaagtaatagaagactttctctgcaat

SEQ ID NO: 384227 - DNA, 95 bp, Homo sapiens
ggcgttctggatctcaaagcggaaattatgatgtgatgaccccaatggttgatatacttatgaaactttttcgaaatatggtgaatgtgaagatg

SEQ ID NO: 384228 - DNA, 83 bp, Homo sapiens
gcgcggattcgccgaggcaccgaggcactcagaggaggaagcgccgcggagccatcaacagcaagcagctcacctacctggag

SEQ ID NO: 384229 - DNA, 100 bp, Homo sapiens
cctacctatagaagggccgagcacagcaatgcaagcaatgaagggctattggcctgtcagctgctcccatccatcccctgcttactgcattgccgagttc

SEQ ID NO: 384230 - DNA, 83 bp, Homo sapiens
aacacgagcagtgtcaagtgccagccctcccgcgtccaccaccgcagcgtcaagggcttctttcgccgaagcatccagaagaa

SEQ ID NO: 384231 - DNA, 98 bp, Homo sapiens
cactaattcagttgtgtgtttctgagagcaaatgttacttgttccacgtttcttccatgtcaggtcccctcttgctgttggctgcacatcaggaaggc

SEQ ID NO: 384232 - DNA, 116 bp, Homo sapiens
caggagggaagtgagaagcccaactaaagccccacatttgcagctcattgaaggaaaggaacattttagtggacaaaccaaatgaccaatcttcaagatggtcttcagagagcaac

SEQ ID NO: 384233 - DNA, 100 bp, Homo sapiens
gagtttccattgacactgatatggttctcttattcaagtaccttccgttgagagggggaaacttagtaaagttcgcctgggttcgttgtctttgaaaaag

SEQ ID NO: 384234 - DNA, 100 bp, Homo sapiens
aggagaactggtcgccatcaagaaagtattgcaggacaagagatttaagcctcttcagaagaaacttgactccttcccagctcaggacccttgcaccacc

SEQ ID NO: 384235 - DNA, 100 bp, Homo sapiens
ctcgcccacgagtagcagccgcaactggacggaggacatggaaggagccttttccgaaacagagcagacaaagttggcgatgctgtcggggattctgctg

SEQ ID NO: 384236 - DNA, 101 bp, Homo sapiens
ggagtcgccttctgcctggtcgggatcccgccccgcccggagccccggcccccacaggccagaagaatgtttgaaggtgagatggcaagtttaactgccat

SEQ ID NO: 384237 - DNA, 80 bp, Homo sapiens
cgttgtaccatccgcctgtgggacacctaccaggagacgttgatccagcagcacgtgtcatttcattaggtcctgtatct

SEQ ID NO: 384238 - DNA, 75 bp, Homo sapiens
cgagggggccaaggcttcctccggggaaggagtcaagactgagaacaacgatcatattaatttgaaggtggcggg

SEQ ID NO: 384239 - DNA, 74 bp, Homo sapiens
ccggaccctggaagagaagagggtggctaatgattaagctcttccaccaaagccacctaagccaatgacttcag

SEQ ID NO: 384240 - DNA, 121 bp, Homo sapiens
cgctgaagaaaggatgctcgaggatgctgtccaggtgggcggccgcgggcgcgatgcggcactgcaggataacaaagccattgacctttgccgattgtgttggggacgaacttcctttagg

SEQ ID NO: 384241 - DNA, 98 bp, Homo sapiens
atgaaggtgaagaatttttagagcagattttgccagagcctgtagtatatgcagactatttattgaggctgctctttggcgtaaattgcaatcgatta

SEQ ID NO: 384242 - DNA, 75 bp, Homo sapiens
cccggagcccggcgctttccccgcaagatggacggtttcgccggcagtctcgaaaatcctgagcgagcagctctg

SEQ ID NO: 384243 - DNA, 101 bp, Homo sapiens
agctgcaaggagggcggcgggactgcactcgagtgtccagacctgctcgatgccagctgaggtgggtgtcctggttggcaaagaccggtcaagtttttacg

SEQ ID NO: 384244 - DNA, 50 bp, Homo sapiens
gtgtgactggggcaggaccatcagtgtcttgggacaaggtgcgcattcct

SEQ ID NO: 384245 - DNA, 105 bp, Homo sapiens
cttgtggagccggagctgggcgcggattcgccgaggcaccgaggcactcagaggagtgcctccggagccagcgtggtggccatagacaacaagatcgaacaggcc

SEQ ID NO: 384246 - DNA, 98 bp, Homo sapiens
taccgctgagggaaaggagcgggactccggacctccaggagtactatactggcaattgctggagaagattttgcaattgttgcttctgatactcgatt

SEQ ID NO: 384247 - DNA, 80 bp, Homo sapiens
ggacgtgcctgctttgccttcgccttccaccatgatccttataggctttatactgtggtgcctcgcctggtcaagtttgt

SEQ ID NO: 384248 - DNA, 84 bp, Homo sapiens
cccggtgaccacttttggaccaaaggcctgtgtgctgcagaacccccagaccatcataacaccttccaccatgaccacctcagc

SEQ ID NO: 384249 - DNA, 90 bp, Homo sapiens
cttggagttgtgttggtaatgaagaaaagcactgccctgggaagaactaggatgaggtattgacttgctgttgccacataacaaaccctg

SEQ ID NO: 384250 - DNA, 98 bp, Homo sapiens
gggttttggggacttcagctcctggtagcagcagcaagccacccgaggggactgcctggccttccagatgcgagctgggttgcttccctgagggcccc

SEQ ID NO: 384251 - DNA, 129 bp, Homo sapiens
gtctcttccagatcagaactgaggaacaaaaacccccatcctgggaaaaatggggaagctgatattgatgatgttaagaagttcaaaccgggttacctggaagctactcttaattggtttagattatat

SEQ ID NO: 384252 - DNA, 75 bp, Homo sapiens
agcaccctggggttgaggaactgcctgagccttcacgtaaatgggtccagtcatgcctcccagtaagaagccaga

SEQ ID NO: 384253 - DNA, 83 bp, Homo sapiens
cttggactgagtcctgcaggacacaggctggctcacagttggaccaacgcttacaaatagcaactacaatgcagaaacatatg

SEQ ID NO: 384254 - DNA, 83 bp, Homo sapiens
tttcaatattggaagcgctttgatttacagcagctgcagatagcctgggctggaagctcttctacgtcacaggctgcctgttt

SEQ ID NO: 384255 - DNA, 75 bp, Homo sapiens
ctcgacaacatgtcacccgcgctccaagacctgtcgcaacccgactgttgatcccacacaagagtgtttcatccc

SEQ ID NO: 384256 - DNA, 100 bp, Homo sapiens
cgctgccgctgccgctgccgcacctccgtagctgactcggctactgcagcactggggtgtcagttgttggtccgacccagaacgcttcagttctgctctg

SEQ ID NO: 384257 - DNA, 88 bp, Homo sapiens
ctgggaatgccaacacagaaaccttgccatcaggcattccccgtcggagccctttctagagaaaccagtgccggatatgactcaggtt

SEQ ID NO: 384258 - DNA, 97 bp, Homo sapiens
gcgagctgagtggttgtgtggtcgcgtctcggaaaccggtagcgcttgcagcatgaaggacagaataacgggctcccagattcacaagccccaccaa

SEQ ID NO: 384259 - DNA, 98 bp, Homo sapiens
tggacagtaaattatcaggaagatatcggcgacattgtggacttggcttcagtgaggttaacctcaccctacagatgaagataatagagcaagaaaaa

SEQ ID NO: 384260 - DNA, 76 bp, Homo sapiens
ggagaagctggaggatactgtcaagcaccatccacacttcctgaccatacacgtcgtgacttggaacgtggcttcg

SEQ ID NO: 384261 - DNA, 100 bp, Homo sapiens
ctcttggcatttggctttgcctttctggacacagaagtatttgtgacaggtttttcgttggaatatacgttgcacatttatggcgattctgagtgtgagg

SEQ ID NO: 384262 - DNA, 95 bp, Homo sapiens
gagagagcaagcagggaaagagagcgccaggtgcttagcaggcgtcctgcctctgcggctctgccccctgcatcctgtgcagctgctgccccgcc

SEQ ID NO: 384263 - DNA, 100 bp, Homo sapiens
gtgagaaaagcgagcctcttctgataactcaggatttacttgaaacaaaaggagaccctaatcttcaggaaatttggtgagcggcctccacctaaacgac

SEQ ID NO: 384264 - DNA, 98 bp, Homo sapiens
taagttttctcatttattttatatctgcactctttgggtacctcactttttatggataagttctgaacgtcgaaaagaaaagtctcgagatgcagcca

SEQ ID NO: 384265 - DNA, 100 bp, Homo sapiens
cagaagagtaaaacgccggaattgtcctttccaacatccagagctgcatcattccttggggcaaaatgtggacaagggtattctttaggtgatgctagaa

SEQ ID NO: 384266 - DNA, 100 bp, Homo sapiens
gggaatcgcaaggctcttccctgaccattttctactgtccctgcgcgagaaccaaaaacttttgctagaaaatcagcttttacgagagaaaactcatggc

SEQ ID NO: 384267 - DNA, 100 bp, Homo sapiens
atagagacatatggaccacatgttcctgagcttgagatgctaggaagacttggctgcagatctgggacacggccggccaggagcggttccgcaccatcac

SEQ ID NO: 384268 - DNA, 96 bp, Homo sapiens
tgtgacaccaagataagtaacgaccctgatgctcccataagacagaaaatgccccttgatgatctggatagagaagatgaagttagattactcaaa

SEQ ID NO: 384269 - DNA, 83 bp, Homo sapiens
gacaacagcacccgtaacatcttcatctaccatgaggacgggaagagccttcacgaagtcagtaaaagtgatctcggccggaa

SEQ ID NO: 384270 - DNA, 83 bp, Homo sapiens
cttggatgaaaatatggattacaggttgatgtgggagtgaaattcgtaaggacaccttgaaggccattctgttggagttagaa

SEQ ID NO: 384271 - DNA, 100 bp, Homo sapiens
cagattcgcagtggtcgcttcttctccttgtaacaaatgtggcaattattttggatctatcacctgtcatcataactggcttctgcttgtcatccacaca

SEQ ID NO: 384272 - DNA, 100 bp, Homo sapiens
ggtcgccttcccagcagcagtgaggattctgacgacaatggcaccatccaacatattctttacaatggatgatgtggtcaaggttggagactttgggtta

SEQ ID NO: 384273 - DNA, 90 bp, Homo sapiens
cttaacagcagggccaccaggcagagcgggacagccaggaggaagggcagcttggcagagcctcaggctgtgggtgagcgtggaggatgc

SEQ ID NO: 384274 - DNA, 75 bp, Homo sapiens
acagctgggaattgctgaattagaactgcagaggttcctctacagcaagatcgtctatgcggaaagacctctcac

SEQ ID NO: 384275 - DNA, 101 bp, Homo sapiens
gttttccggagggattccatcatagtacctggagtagaacagaaaaattattatgtctgtgttcccttgggactcattggaaattgtacagtgacatcttc

SEQ ID NO: 384276 - DNA, 99 bp, Homo sapiens
atttaagaattaaaagatgatgagaaataaggacaaaagccaagaggaggacagttcgctacacagcaatgcatcgagagccagagcccagaggtggag

SEQ ID NO: 384277 - DNA, 89 bp, Homo sapiens
gggaccggaaagtccgtgacttgcaagaggcagatctggaccttttgagaggtgctggagaatctggtaaaagcaccattgtgaagcag

SEQ ID NO: 384278 - DNA, 100 bp, Homo sapiens
cattaaggacgggaagaacctcatcgctgcgacgaaaagttgcttagccagacaatgaaggatcatctagtaagagtagcaaatgaagctgaatttatcc

SEQ ID NO: 384279 - DNA, 98 bp, Homo sapiens
ggctgcagcaagccgcacctggagaagctgaccctgggcatcacgcgcatcctagtgtattcattgccttcaagaaagctggtggctctacagttaag

SEQ ID NO: 384280 - DNA, 101 bp, Homo sapiens
tttttgatggccatggcataaggaactctatcccaggaatacagctttgcattaggcctccccatggccacccatggaccagtcggcattcacttcctccc

SEQ ID NO: 384281 - DNA, 74 bp, Homo sapiens
ttatctactggatttccgtagtattgatgatcactttttaattcgggcctctgcagcattagaaaaattgaaac

SEQ ID NO: 384282 - DNA, 82 bp, Homo sapiens
gggcccgggcatggtggtctggggcaacgcggaagatgatggatttggacatgcttctatgaagaaatgccacatggtccga

SEQ ID NO: 384283 - DNA, 99 bp, Homo sapiens
atatccaacaactcagatatggcagaagtgaagtcaatgttccgggaagttcttccaaagcaagatttctcataggcatcagaaagaaaaggatctctt

SEQ ID NO: 384284 - DNA, 97 bp, Homo sapiens
gagccggtgctgcagaaccagatccgggagcacgtcatcgccatcgaagtcctgcagctcattaagtcacagaaatttctgaataagttggtgatct

SEQ ID NO: 384285 - DNA, 74 bp, Homo sapiens
aggaccgcaagtcccgtcttatgggacttgaggccctcaaggatcttttgccagaaatgagggcatactggcct

SEQ ID NO: 384286 - DNA, 95 bp, Homo sapiens
caagcactatctcagtgccactgacatgttgctttcggaaaatgtgattgatcgaatgaaggaatcctctccatctggttcgaagtctcagcggt

SEQ ID NO: 384287 - DNA, 86 bp, Homo sapiens
ttgtggagaagctgcaggcgcgcctggccgcgaacccggaccctaagaagaattcagatcaggaaggaggtggaaagaaaaagaag

SEQ ID NO: 384288 - DNA, 100 bp, Homo sapiens
ccacgactcccgatagtgagagacctgctcaagctctcttaagagattatgtgaaagtaatttttctcccaagtttaacgaaaaggatgggcatgttgag

SEQ ID NO: 384289 - DNA, 75 bp, Homo sapiens
aaattgaggttcttgactcacttcagagcaaagcaaagctgctcagaccccaccaacaactgaacgctttggtca

SEQ ID NO: 384290 - DNA, 98 bp, Homo sapiens
cgcaggacgaagctcgcggcgcgggacccggaggacggtatcccgagcccaccgtgctacgcaggcaatactgaacactgcgcagcttgcagaggtct

SEQ ID NO: 384291 - DNA, 82 bp, Homo sapiens
ttggactgagtcctgcaggacacagcattggggctttccagctctcacagaaccttcagcatccccagctgccggtcttggc

SEQ ID NO: 384292 - DNA, 50 bp, Homo sapiens
cccaagcccgctgagcaggatgagggcttatgcaagcaaagatctggagg

SEQ ID NO: 384293 - DNA, 131 bp, Homo sapiens
ctcggagagacgcaataaaccaagcactctagatgccctcaactatgctctccgctgtgtccacagcgttcaaggccatggatcatctgcagtcattcattgcagattgtgatcgtagaacagaagtggcc

SEQ ID NO: 384294 - DNA, 100 bp, Homo sapiens
tctgcagagatcaaaacaagccctccaggaactcactgccggtggtggtgtgcacattgagccccggtatagacagttcccccagctgaccagatcccag

SEQ ID NO: 384295 - DNA, 74 bp, Homo sapiens
gacggcgacccaggcatctggggagccacagaagtcgtactcccttaaacccggagctggagtttgttcagatc

SEQ ID NO: 384296 - DNA, 50 bp, Homo sapiens
gcgtgttgggggcccccggagaggtgccagaaccctgtggagcatcatga

SEQ ID NO: 384297 - DNA, 82 bp, Homo sapiens
cagaagtttatcaaggctgtcacacatcaagttaaatttggtcaacaaaatccacgtcagataccttacttgtaaaagctct

SEQ ID NO: 384298 - DNA, 87 bp, Homo sapiens
gacctaagtttgaagattggctttgtaacaaggagcatgcaagttgtccccttggacaaacagatcacaatcatagatagtccgagc

SEQ ID NO: 384299 - DNA, 50 bp, Homo sapiens
cggggggaaaatggagcccttcaccaatgtgatcagggccaaagcggtca

SEQ ID NO: 384300 - DNA, 100 bp, Homo sapiens
catgaaagttttcagcctcatccagcaggcggtgacccgctaccggaaggccatcgccaagcattggccaggactactagaactgtgtcaaaacagctgc

SEQ ID NO: 384301 - DNA, 96 bp, Homo sapiens
agatgttgatggaatatatcgagttagtggcaatctggcaacaatacagaagttaagatttattgtcaaccaagatgtgaatttcttcggagtaag

SEQ ID NO: 384302 - DNA, 75 bp, Homo sapiens
cctgaccgaggcttccgcttcatcagtgagcagcccgtggaccgggagcccgtggaccgggagccggtggtgtgc

SEQ ID NO: 384303 - DNA, 100 bp, Homo sapiens
atcagaaaacagctctggaaaatgacagccttcatttctctgaacatactgccttatgggacagatcaacaccagcagacgtttttgaatcaactgagag

SEQ ID NO: 384304 - DNA, 90 bp, Homo sapiens
caccacaggaatcatgactcctggagaacggatcaagtgcttattacaggagttgcgggagcttcaggacgagaaggcagagctgcagaa

SEQ ID NO: 384305 - DNA, 100 bp, Homo sapiens
gtgtctgtggagataaagcttctggatttcactatggagttcatgcttgtgaaggatgcaaggcctactctgtgaagagaacattgatgactgtgcccgg

SEQ ID NO: 384306 - DNA, 75 bp, Homo sapiens
ggcagcaagcgtgggaacgcgggcggcgagacggcggcaggacggcggcaggtatcatgatattagctggtttga

SEQ ID NO: 384307 - DNA, 100 bp, Homo sapiens
aggaacatctctttcaatgacaaaaagtttgtcattaaacccatcgacaagaaggcacctgccaagtcctgtatctgccatgtctgtggcgtccacctca

SEQ ID NO: 384308 - DNA, 100 bp, Homo sapiens
ggaacggagacaaaggaggattcatgtccaaaggcaaaatttggtttctctaatattactggaattgattactctccttctgcaattcagctttctggaa

SEQ ID NO: 384309 - DNA, 100 bp, Homo sapiens
cggcgcccctgaaagtgtgcatcgtgggctcggggaactggtttacccagggttgatgataaccgctggccttattcattggattttaaatacattgaac

SEQ ID NO: 384310 - DNA, 101 bp, Homo sapiens
ccgactttcctccggactcctgcacgacctgctcctacagccggcgatccactcccggctgttcccccggaggttccatcaggcttgttcatccccagcat

SEQ ID NO: 384311 - DNA, 75 bp, Homo sapiens
gtccagtctggctgcagcaaaaagcagcaaatggaacggttcaaagttgtggaacgagagaccaaaaccaaagct

SEQ ID NO: 384312 - DNA, 75 bp, Homo sapiens
accagtcagaccagcgcgtcatcatcaagatcagccggcagtccattgatgcactcaaagactggttcagagatg

SEQ ID NO: 384313 - DNA, 100 bp, Homo sapiens
accttggacaagcttctcgcttcattcataccacagtttgttcggctattaggtggaggtatcctggatacagccatcgttgatcgggggaggaatgtgg

SEQ ID NO: 384314 - DNA, 100 bp, Homo sapiens
ccatctttagttcgtctttcctagagagggagagaagtcttttttcctccagccaggagagcagctggaacaaggcatccaggatgtgtatgtgctgtcg

SEQ ID NO: 384315 - DNA, 75 bp, Homo sapiens
ctaccaggaggccaggggtgtcgccatgttctgttgagttggaagaattggcaaaatatctggaccattaagaaa

SEQ ID NO: 384316 - DNA, 74 bp, Homo sapiens
ccgaactggaatctggatgagcagctcaagcaggttcattttccagacactgaaagagcagaatggctaaataa

SEQ ID NO: 384317 - DNA, 100 bp, Homo sapiens
cattcattaagcagtgcagaaacacaggccgcatctacaagtgcttgtttactggctccgtgagctcactactgacgctgccattagatatgctgtcaac

SEQ ID NO: 384318 - DNA, 51 bp, Homo sapiens
tgctggcaagtctgaaggtcaagtgaaatgacaatggatgctctgttggct

SEQ ID NO: 384319 - DNA, 100 bp, Homo sapiens
ctcatgtctcacctcagcgactgtgagcacaacccgaagcggcctgtgacctgtgaacagggctgtgggaactgattcatttggaagaaagattaggcaa

SEQ ID NO: 384320 - DNA, 98 bp, Homo sapiens
gagcttctttcttctggcatcattaacggaccttttaccatgaatagttctactccttctacagcaataccaagtttccaggcccgaagagcatccca

SEQ ID NO: 384321 - DNA, 100 bp, Homo sapiens
aaaacaatagttatggcaaaagtctatcaaacagcaagcactgacaagcagcacattctcaagagcacacaggtaaaaagaacgtattctcatggtactt

SEQ ID NO: 384322 - DNA, 98 bp, Homo sapiens
tgcggaggttctgccttcagtctatgaagagcgagctctgtatctcgaagcaataattcagaaccaccgcgaagtaatgacattcgaggatttcgcag

SEQ ID NO: 384323 - DNA, 83 bp, Homo sapiens
gggcctgcagcgggagctggacggcgagcgcgagcggcgcgagaaagacggctgtcctcagcgaggggccgtgcacccgctcc

SEQ ID NO: 384324 - DNA, 75 bp, Homo sapiens
ccacagacagccccagctcggtgttcctcagtttgtgaagaaatatgggaacctttttagcttggagcttggtga

SEQ ID NO: 384325 - DNA, 101 bp, Homo sapiens
cttccagtgtcaaaccgactatcacttggtatatgggatgacttgtcaagctcgaacatcatatactgaagatgaagttctttggggtcatcgtttttttc

SEQ ID NO: 384326 - DNA, 50 bp, Homo sapiens
cacagcatttatcctggagaagaggttaatgttgaagaaggaaaatgcgg

SEQ ID NO: 384327 - DNA, 50 bp, Homo sapiens
agtcaactgcgtggaagagaagatggcccactgcgtgaccttggttcagc

SEQ ID NO: 384328 - DNA, 101 bp, Homo sapiens
ggtgatctggacaaaggaacaggtatctcagggtgcttcaaggatgaccgcatcgtcttctggacttggatgttctccacctacttcatggagaaatgggc

SEQ ID NO: 384329 - DNA, 100 bp, Homo sapiens
aaaaacgtcaacaacagttttacgcttggggctgaactgggagcgcaggcaatcagccacctggaagaagtgagtgatgaaggcatcgttgccatggcaa

SEQ ID NO: 384330 - DNA, 100 bp, Homo sapiens
tgatgaggcccaggccgacctggcgctgcggaggtattctttaggtgatgctagaaggcctcttcatgaaacagcagttttggtagaagatgtggtacac

SEQ ID NO: 384331 - DNA, 82 bp, Homo sapiens
cgccgagtcctagcgcctggcctgcgcgccgctgcccgcgccacaggtttggtgcacctcgatttggaggaagtagggcagg

SEQ ID NO: 384332 - DNA, 76 bp, Homo sapiens
ctaaagtcaaatctctcaagcccattgactatgatgagctttggaggatccaggagaagctggaatgttactttgg

SEQ ID NO: 384333 - DNA, 101 bp, Homo sapiens
ctgggattaaccagcgaggatcaggcggagtacgtccagcttgttactgaacttcgaatgacaagagccattcagcctcagatcaatgcttttttacaggg

SEQ ID NO: 384334 - DNA, 100 bp, Homo sapiens
ttcagtaataaaagttccccaactcagagttttcactcttccaaagaaagggttttgagctcatcttcatcattcatatgaggaaataagtggtaaaatc

SEQ ID NO: 384335 - DNA, 98 bp, Homo sapiens
atcaattgctcagatgagagaagccaccactttggcaaatgggaagcagttcaggtacttttgaagcattctgcagatgttaatgctcgagacaaaaa

SEQ ID NO: 384336 - DNA, 82 bp, Homo sapiens
cccccctccaccccggccgcgcccaagcgcaggggctcctcgggctcagtgggtaaagcagctgagcagccattttcagatt

SEQ ID NO: 384337 - DNA, 83 bp, Homo sapiens
cgcaaccccagatccatttacactttacactgtcctggataatgaaagacttactgcagaggagatggatgaaaggagacgtc

SEQ ID NO: 384338 - DNA, 100 bp, Homo sapiens
ctttgttattggagaaacatgcagattatatcgcatcctatggctcaaagaaagatgattatactcctgaggaagaagagattttaaacaaaaaacgatc

SEQ ID NO: 384339 - DNA, 101 bp, Homo sapiens
agaagaccagccttccagactcgcttggtgccctgacagaacccagcaagcgtagtcgaggagccctggggtccatcgccctcctgggcttggtgggcaca

SEQ ID NO: 384340 - DNA, 90 bp, Homo sapiens
tccgcctgtgtcttctgcagtgattttaaccaaggcagttggtggaaatgaggatctaagcctttcccacgttatggttataaaccctcc

SEQ ID NO: 384341 - DNA, 75 bp, Homo sapiens
aggtggtgtgcatgacactcctggaaaacagtgattcgcctttgccagtctcatctcgtgtctgctttgttaagt

SEQ ID NO: 384342 - DNA, 100 bp, Homo sapiens
gtctcaatgatggcgagtgctttgtgatcgaaaccctgaccggatcccataaacactgtcgaaatctccgagaagcaagggataatgctgtggctgaaaa

SEQ ID NO: 384343 - DNA, 100 bp, Homo sapiens
gtttgttttttatgatttgtatttgactgagagaaacccactgaagacgtctgcgtgagaatagagaccaccgagccgcggcgagtcctttgcacatgtt

SEQ ID NO: 384344 - DNA, 89 bp, Homo sapiens
gactcacgggagaggaagtcaacagctgtgtggagtacgtagagaaatcgacactcttaatgaacgtttagctgctgaaggacaagcga

SEQ ID NO: 384345 - DNA, 102 bp, Homo sapiens
cctaaatgcagcatgccatcctgaacgtctctccctgtcctagctctgtaactgtttacaagaaccatggagtctggcagtaccgccgccagtgaggaggca

SEQ ID NO: 384346 - DNA, 82 bp, Homo sapiens
aaataatttagatttggaagacatcaatgtccaactggcccaccttcaacactccctctaagcacccagacctctagtggca

SEQ ID NO: 384347 - DNA, 100 bp, Homo sapiens
acttccttgagggcaggcctgtcttgcatctgtttctccaccacctagcctggaatataaacattaaccaggtggtatttgttggaaatttcttgagaat

SEQ ID NO: 384348 - DNA, 100 bp, Homo sapiens
cgctccagcctgggtgacagattggggattatatatcgtgatattaagcttgagaatattctacttgattctaatggccatgtggtgctgacagattttg

SEQ ID NO: 384349 - DNA, 75 bp, Homo sapiens
aggttcagactcttggagccagaagctacatgacccctaaacgctcaggagcatctatcggctgcacgccaacat

SEQ ID NO: 384350 - DNA, 100 bp, Homo sapiens
gcatcatctgaggacggctcaggagcatgacaagcgagaccctgtggtggcttattactggcatgctgttgaagcgaagtggcaaatcgttgaataaaga

SEQ ID NO: 384351 - DNA, 75 bp, Homo sapiens
gggaagtgagaagcccaactaaagccccacatttgcagctcattgaaggaaagggatcatagacggtatttctat

SEQ ID NO: 384352 - DNA, 100 bp, Homo sapiens
aaagccgaggcggtggcgctcaagtaccagcagcaccaggagtccctctccgcccagttacaagtgcctggaagcagcgagccctttatgacgcaaggac

SEQ ID NO: 384353 - DNA, 57 bp, Homo sapiens
gtgaacggagagcgtagtgaccatcattagagatggggtttcgccatgttggccagg

SEQ ID NO: 384354 - DNA, 49 bp, Homo sapiens
caggagaagccgcccaaagaactggtgtgatgaatgcagactctgctac

SEQ ID NO: 384355 - DNA, 100 bp, Homo sapiens
cagtgacgagcggccgaagcagctttgcgcctttctgaagggcctgagtgacaagcagcgggaggaacattacttctgcaaggactttgtcaggctgaag

SEQ ID NO: 384356 - DNA, 105 bp, Homo sapiens
cctcagagcaggagaagctgagcctttctggacagaccaacctgtcagtgctgcaagacgagattgaggagctgcgggccgagatgctggagatgcgggacgtct

SEQ ID NO: 384357 - DNA, 80 bp, Homo sapiens
acgagattgaaggaggtggcttattggatttgggaatggatgatgaaggagatgatgacccagttcctctaccaaatgtg

SEQ ID NO: 384358 - DNA, 75 bp, Homo sapiens
catccggaggcaggaccagctgcagctgctgacaatctctatgggaagcagaaggcaaggaccccggtcatttta

SEQ ID NO: 384359 - DNA, 75 bp, Homo sapiens
agaacctgaacaagtcccagctgaagctgggcatctggggcgacaagttggatggcttgaggactggtactaaaa

SEQ ID NO: 384360 - DNA, 83 bp, Homo sapiens
cgcacctcgtcaccaaggccaaggtctcgtcagcctatctcggcccctctcttttcatgtcctgacaaaaacaaggttaattt

SEQ ID NO: 384361 - DNA, 75 bp, Homo sapiens
ggaagcagtgacatccaacctgtatcaagtcttctaatctgtgaacatgatggggtcgaggatttggtcttttgg

SEQ ID NO: 384362 - DNA, 100 bp, Homo sapiens
ggttttccaaagacatggatgaaggaaatgtgactggaaacagtaactccacgttcatctccagcgggcaggtgatgaacttcaagggcgacatcatcgt

SEQ ID NO: 384363 - DNA, 151 bp, Homo sapiens
gtccgcgctgcgctgctgaggccgggccggccgcccagacgctgcccgcgggcccggccacggcggagccaaggtactccaaagattcaggtttactcacgtcatccagcagagaatggaaagtcaaatttcctgaattgctatgtgtctg

SEQ ID NO: 384364 - DNA, 50 bp, Homo sapiens
gccggtcacagcctgggcacaggggatagctgggagtatggccaccctgc

SEQ ID NO: 384365 - DNA, 100 bp, Homo sapiens
cacctcgacgcattgctgtgccttcccgcagctcagcttctgtccccaagccaggtggtgttatcaaggagaagaaattcctgccttgaccagatgtgtg

SEQ ID NO: 384366 - DNA, 100 bp, Homo sapiens
ccaaacaaccgcagccgctgttcccaggatggtgatccgtgtatatattgcatcttcctctggctctacagcggaattgtcttagaagaaagaaggcaag

SEQ ID NO: 384367 - DNA, 87 bp, Homo sapiens
ggaacagaaccaaaggctattggatcagctcagcaggcaaatgcagccctgaggatttggctactgcatataacaacagggggcaaa

SEQ ID NO: 384368 - DNA, 89 bp, Homo sapiens
aaaaggcaaaaatcccatctaccgcaactctcagttcgagagtaaaggtgtcgtgaaaactacccctaaaagccaaaatgggaaaggaa

SEQ ID NO: 384369 - DNA, 100 bp, Homo sapiens
cgcggtggcggcggcgacggcggccctggcaggccacgacatcaacggtgccctggagccctccaacatagacaccagcatcctggaggagtacatcagc

SEQ ID NO: 384370 - DNA, 100 bp, Homo sapiens
gggaggacccactcccccaggactcctttgaaggcgtggacgaggacgagtggactgtccaggacggccggcagtttctaaagtatgttgaccccaagct

SEQ ID NO: 384371 - DNA, 100 bp, Homo sapiens
gcatttgcacctgtggcttatctacgctttttagaattgcacttggaggacaagagagatggaaaacttgatgactagctccaccctaccgccccttttt

SEQ ID NO: 384372 - DNA, 75 bp, Homo sapiens
ggactcttcttcgccttcgattacagaatgtctgaaggggacagtgtgggagaatccgtccatgggaaaccttcg

SEQ ID NO: 384373 - DNA, 75 bp, Homo sapiens
aagagaaagaaggttaagctggctgtcctgaaatattataaggtggattacctggagcagtttggaacttcctcg

SEQ ID NO: 384374 - DNA, 100 bp, Homo sapiens
tgtgttttcaatgcacaaggggaaatttggcttgcaattcatcactttgaaaaggttatgtgaaattacctccagagaaatttgcacctaagaaacaggg

SEQ ID NO: 384375 - DNA, 100 bp, Homo sapiens
tgtatggagtaaacctaattctgcccttgatgtcacaggatctcttgaagggtgataaaagaaaatgtggctgaagttacccgaagttcagcttgcagtg

SEQ ID NO: 384376 - DNA, 51 bp, Homo sapiens
tggacgcccatcccggtgctcacgacctgatcccaaccttgaagaaagtcc

SEQ ID NO: 384377 - DNA, 100 bp, Homo sapiens
ccagaattgcttttggcgtggccatgccggcggccctcacagcaaccagcaccagatgaaggagcattcctcttggaatgcagcagtccggcgcctggcc

SEQ ID NO: 384378 - DNA, 82 bp, Homo sapiens
aggaatcccgcaaccgaagcacaaaagttatcaaacccggtggaccatatgtaggtaatctgtaagtcagatgctccaacag

SEQ ID NO: 384379 - DNA, 51 bp, Homo sapiens
agcagaggctcagagcttggagacagacgaggaggctgcggaggaggagga

SEQ ID NO: 384380 - DNA, 90 bp, Homo sapiens
cgcgttcctatggacagacgcacagacacctgcagtaaaggcatgacttcctggcaccacagggaaaatcgggtgcaagcccagaaacta

SEQ ID NO: 384381 - DNA, 74 bp, Homo sapiens
tggggcccccagaagtgatcgctcagctggagaacgcggctaaagttctgatgacattgctacaagtggttggt

SEQ ID NO: 384382 - DNA, 100 bp, Homo sapiens
ctgaagcattgcttcaaagcatggggctaactccagaatcccccattggaatgtgttccagaagatctagaactgaagaagaagatttttgctcagttag

SEQ ID NO: 384383 - DNA, 80 bp, Homo sapiens
tgccgtccatgcggaagatcgtcgccacctggatgctggaggtattgttgcagcatctggcagtgagactgaggatgagg

SEQ ID NO: 384384 - DNA, 83 bp, Homo sapiens
ctgggacaactacgagtttgacatcaatgaagcaattctgtggtgttcttggtcacacatttatggagtttctgaagggcagt

SEQ ID NO: 384385 - DNA, 75 bp, Homo sapiens
ctcagaactgcccctggtcatgtggcttcaggaccagatggcctttgaggatgtggctgtgtacttctcccagga

SEQ ID NO: 384386 - DNA, 100 bp, Homo sapiens
gaaaatgctactatgactcttcctggaatacacccacctaccttgaaccagactgctgagaagtcaggccagattgaaagatcaaagaatgtaaggcaaa

SEQ ID NO: 384387 - DNA, 100 bp, Homo sapiens
atccccaaactgaagctgactgcatcaacaacatcaatgacttcctgaaaggatgtgcaaccctccaagtggaagaaatttggtgagcggcctccaccta

SEQ ID NO: 384388 - DNA, 90 bp, Homo sapiens
gggaactgccctctagggagacgttccctgcctggctgaggctgaggtggcctccttgaaccgtaggatccagctggttgaagaagagct

SEQ ID NO: 384389 - DNA, 51 bp, Homo sapiens
agaatttcctctgaagcaccgcacctggccacattcatcatggacaagagc

SEQ ID NO: 384390 - DNA, 75 bp, Homo sapiens
aaggaattcctggatgacttgttcagcttcatgcagaagcgagatgtgcactcccagcaacacccctgccacgcc

SEQ ID NO: 384391 - DNA, 75 bp, Homo sapiens
cagcgcgggcggcggcggctgggcgggagccccagagggattccagcagaagttcaccttccacagcaaggagat

SEQ ID NO: 384392 - DNA, 138 bp, Homo sapiens
gtcgctcacgctgggagctgtagaccggagctgttcctattgggccatcttggctccaccaccctgtgtttcatcattacgattagcctataaggatcttgaaattcaaatgaagaaagacgaaaagatgaacattag

SEQ ID NO: 384393 - DNA, 99 bp, Homo sapiens
cctcccagggtctgagctcatctgctgttttggagaaacttaaggagtacagctctatggtggaattcggtgcgatctgtaagtcgttgtcgaagcagg

SEQ ID NO: 384394 - DNA, 90 bp, Homo sapiens
gcaggaattggctctgctgacaggaattataagtaaagcagcacttcctgagtggtggacatgacaacagagtcaactgcatacagtggc

SEQ ID NO: 384395 - DNA, 75 bp, Homo sapiens
ctttatatagaagggagagtagaaaggccttttccacctcatatccagctccctccagaaattcaagagtcccag

SEQ ID NO: 384396 - DNA, 96 bp, Homo sapiens
cgcagatcgcgcaggcactgctgggcgccgaggagcgcaaagtggaaatcgccttctaccggaaagatgactcgtttgtgaacagccaggagtgga

SEQ ID NO: 384397 - DNA, 75 bp, Homo sapiens
aggcgccagcctgcgaaggtggcggcgctgctgctcgggctgctcttggagaacatccagtcatggataaaaatg

SEQ ID NO: 384398 - DNA, 75 bp, Homo sapiens
cagccctctaagaagaatcagaaggtgccagaagcccaggaagcacacatcaaggctcacttgccagcggggtgc

SEQ ID NO: 384399 - DNA, 101 bp, Homo sapiens
gcgctcgccgagccgggccgcggcgccgagtcgaacggggagccgagctggagctgccgcggcgcagccagcatggcggacaccgacctgttcatggaatg

SEQ ID NO: 384400 - DNA, 98 bp, Homo sapiens
cgacaccagcacggatctcacggaggtcatggagcagattcacagcacgtttccatcttgctgccccaaaactggacaagccaaggcatctgtagcca

SEQ ID NO: 384401 - DNA, 80 bp, Homo sapiens
agcgggcagctgaagatgatgaggatgaaaactttcggaagagaaagttgcctgtggtaagttcagttgttaaagtaaaa

SEQ ID NO: 384402 - DNA, 75 bp, Homo sapiens
ttcccgcgttgccaagactgcagatcagcacctctctgcccagaatacaaatggagagatttgcatgggatgcag

SEQ ID NO: 384403 - DNA, 50 bp, Homo sapiens
cctgcagctggcgcctctgcagtggggccggctgcgtgcacttttcctac

SEQ ID NO: 384404 - DNA, 100 bp, Homo sapiens
gtttcccttggtcaaaagcgcactaaatcgtctccaaggtattatccatgcagcagaagagaaggactggaaaactgcgtactcatacttctatgaggca

SEQ ID NO: 384405 - DNA, 101 bp, Homo sapiens
gtgcccggccccgcgtcgtctggcgccgccgccgccagcgcggagtagatcccataatagatcacgttcaagacagaaagacagacgtagatctaagagcc

SEQ ID NO: 384406 - DNA, 75 bp, Homo sapiens
gcacacgcctgtggaggagcaggcccagcacagcgacctggccctggcacctcggaactgaacccattctccgac

SEQ ID NO: 384407 - DNA, 75 bp, Homo sapiens
acagaaggaaattgaaggaacttggagttaatggtctaatttatgatagggagaggagcggaagaccttctggtg

SEQ ID NO: 384408 - DNA, 100 bp, Homo sapiens
cgcctggaatatgaaggcttccccgtcccgttactccacaggatccgctgaacataggatgttgccacaaaatctacctcgtgtatttttctctttcact

SEQ ID NO: 384409 - DNA, 100 bp, Homo sapiens
atacttcatatttggcttcaatgtcatattttggggtgataaaagaaaatgtggctgaagttacccgaagttcagcttgcagtgtaattcagaagagtta

SEQ ID NO: 384410 - DNA, 75 bp, Homo sapiens
agaacatacacttacatctctagataacagtctgcactttcacccgtttcaggcacccaggcatgtggaatatgc

SEQ ID NO: 384411 - DNA, 100 bp, Homo sapiens
tgtcagtgttaaaggaacctctacaacgaaggtgaagccacggaagataagggcagcgggtggcatgagacgtgggaacatgggccacctcacacggatc

SEQ ID NO: 384412 - DNA, 75 bp, Homo sapiens
taagcacacgagctggaggactgggtatcaatctcactgctgcagacacagtgatctgtgaaaatggttcgctat

SEQ ID NO: 384413 - DNA, 83 bp, Homo sapiens
cagaggatggcgcctgtgggcacagacaaggagctcagtgacctcctggacttcagcatggtccgcgggagagctgtggggct

SEQ ID NO: 384414 - DNA, 101 bp, Homo sapiens
agctctgctacttcaagtaccaggtcctggcgatcagcaccaagaacccactgcaggtcccaggtgtgacaccttcagcaggtctcagggaagatggcagc

SEQ ID NO: 384415 - DNA, 50 bp, Homo sapiens
ggtaaacactgatccagaacggactcagcccaaaaccatgtttgcccaag

SEQ ID NO: 384416 - DNA, 82 bp, Homo sapiens
ccgacctcgacgtcttgcctgtgtcccacttgttcgcggcctataggagcgcagctcagctgggctggaactgccctcctgg

SEQ ID NO: 384417 - DNA, 100 bp, Homo sapiens
ctatctgaagaaaagtagaaggaaaaacagaacgttgcaaactctggaaaaaaacttgggatccagacacattagtcaagctgcagccaaagtcgacgtt

SEQ ID NO: 384418 - DNA, 111 bp, Homo sapiens
cttggcccttgttcccccaaatgtctgactctgactctcggactgagaaacgcaaggtgagaagccctaccactgcaactgggacggctgcggctggaagtttgcgcgctc

SEQ ID NO: 384419 - DNA, 100 bp, Homo sapiens
ccaagatggagttcctcctggggaacccgttcagcacaccagtggggcagtgcctcgaatcctcactatggatgggctcattgaggacattaagcatcgg

SEQ ID NO: 384420 - DNA, 75 bp, Homo sapiens
tgtggcaaccgaaatgagactccctcagatccagtgataattgacaggatgtgtgaccggaatggtggtcggcgg

SEQ ID NO: 384421 - DNA, 75 bp, Homo sapiens
tttttggatgatgatggatccatttctcctattgaggagtcaacgctttatcctgtggataaacgcagagtgaac

SEQ ID NO: 384422 - DNA, 75 bp, Homo sapiens
cgcagtggtcgcttcttctccttgggactgttgacatttagggatgtggccatagaattctctctggaggagtgg

SEQ ID NO: 384423 - DNA, 74 bp, Homo sapiens
agaacttggaatactctactggacaaacatttcctccaagtgtggagccccctggagctgagatcaggatgttc

SEQ ID NO: 384424 - DNA, 74 bp, Homo sapiens
gggcaattgccacacggtggggcccaacgaggcgctggtggtttcaggttaatttggagtggcccctggagtca

SEQ ID NO: 384425 - DNA, 100 bp, Homo sapiens
ggcgtcatctacgtcattgactccaccgacgaggagaggctggctgagtccaagcaggcgtttggtcagaagttgagtagcaggggcctaggagggctcg

SEQ ID NO: 384426 - DNA, 89 bp, Homo sapiens
gcccagccgccgtgccgccgccgccgccgccgcaggacagccccagcgaggtgctggggagtcagggaagagcaccatcgtcaagcaga

SEQ ID NO: 384427 - DNA, 100 bp, Homo sapiens
cagaaacaaaatgtcaacaaattgatgggcacatccatctggaaggcctttttcttcacccccaacttcaaccccgtgggttccaacggatgctttgcca

SEQ ID NO: 384428 - DNA, 100 bp, Homo sapiens
ggagatcgcggacgggttgtgcctggaggtggaggggaaggactcattctgaccagtttctggtggcattcaaagaagtgggaagaaagccccccacttt

SEQ ID NO: 384429 - DNA, 82 bp, Homo sapiens
cggggacttggtgttcgctaagatgaagggctaccctcactggcctgccagggtgaacttcacggtagaccagatccgcgcc

SEQ ID NO: 384430 - DNA, 82 bp, Homo sapiens
gaaggcgaacgcggtctgcaagctgacgtatggcgtgatggtgggcatgggtcagaaggattcctatgtgggcgacgaggcc

SEQ ID NO: 384431 - DNA, 75 bp, Homo sapiens
actctttccgccctaatggaggtctccagtttcgatcgctgccgttttgcccttgggagtaggatgtggtgaaag

SEQ ID NO: 384432 - DNA, 75 bp, Homo sapiens
cctcctgagtaactgggattacagtttttgaaatcatgaatcctgtttatagtcctggatcttctggggttccct

SEQ ID NO: 384433 - DNA, 98 bp, Homo sapiens
gagaacccagaagcctacaatgaagaactgaagaagctggagttgctcagacaggtacctgcacatgttgttctttgtcagtgctgtcaagtgtgtgc

SEQ ID NO: 384434 - DNA, 48 bp, Homo sapiens
tgcagccaccgcggcccccgcgggttctgagatgcagtaaaatcgctg

SEQ ID NO: 384435 - DNA, 78 bp, Homo sapiens
gcctcgccccacgacatcagcaacgtcctcaagctctacctgcgtcaggagcatcagatccatgctgctgctgactcg

SEQ ID NO: 384436 - DNA, 75 bp, Homo sapiens
cagagaccatggagcttcttggagctccagaaagctgtggaccaccgcaaagccatcatcctctccatcaatctc

SEQ ID NO: 384437 - DNA, 50 bp, Homo sapiens
gaaactcggagtgtactccgcctgcaagttcaacttcctcaattgctttg

SEQ ID NO: 384438 - DNA, 100 bp, Homo sapiens
agttacagagtgcctatgagagtggcctgatgccttacacgaattacacatttgatttcaaggattcagtggtctttgaggatgtagatgtgaacttcac

SEQ ID NO: 384439 - DNA, 121 bp, Homo sapiens
agagtgagagatggaacccgaagaagaaaggattcgttacagccagagattgatgcgtctgttactagagtggagagtctaccttcgtctcacatgtgccacaaaggatggcatggcccgg

SEQ ID NO: 384440 - DNA, 82 bp, Homo sapiens
ctgaaattagtaaaacagaattctctttccatattttctgctcttaagaatcttcaagataagattcgacgcttggaacttg

SEQ ID NO: 384441 - DNA, 100 bp, Homo sapiens
cagccatcaaagttatggatgtcactgaggtggttctgctgggcatggacatcctgtccgccctggtgacccggctgcaggatcggttcaaggcgcagat

SEQ ID NO: 384442 - DNA, 100 bp, Homo sapiens
atggctctcatcccagacttggccatggaaacctggcttctcctggctgtcagcctggtgctcctctatctgatgacgcaaaacacggtgattgtgaatg

SEQ ID NO: 384443 - DNA, 51 bp, Homo sapiens
ctcgaggctgctaagagactaagtcaccctgctgattgccttcatctgtgt

SEQ ID NO: 384444 - DNA, 82 bp, Homo sapiens
gggttcagcttggcaggaggagcagatctagaaaacaaggtgattacggatgaccagtgtcccagtgaaggaacgagtgaag

SEQ ID NO: 384445 - DNA, 100 bp, Homo sapiens
ggctcgccagtcttggggacagtgtcagcgttcactaccttatggttctgtctgccaactgggcctatgtgaaagacgcctgccggatgcagaagtatga

SEQ ID NO: 384446 - DNA, 83 bp, Homo sapiens
catgcccatcacaaataaccctatcgcagccgggaggactccctggaggaaaagcggaagcggcagcggtctgaacgcctgga

SEQ ID NO: 384447 - DNA, 82 bp, Homo sapiens
cggcgggaacgattgggctgagcagaggacgacatgttgcttttcgtggagtgtgtgctgtatttatggagtttaaagatta

SEQ ID NO: 384448 - DNA, 83 bp, Homo sapiens
gaacaggttccgaaagtggctctacaaacccaaggattttttatcaagcagaaatgcatcgaacaacgagaatcaagatcact

SEQ ID NO: 384449 - DNA, 126 bp, Homo sapiens
atgaagtcaaattggccctgaaaaaagacagagaaactatgggacacagatatgttgaaggaaccagctgctactcccgaaacctggaatatgcccggctacggaagattgcagatgagaacgggg

SEQ ID NO: 384450 - DNA, 88 bp, Homo sapiens
ggaagatggcgaaggtctcagagctttacgatgtcacttgggaagatgtattcggaaggaagtgacattgtacctcagagtaatgaga

SEQ ID NO: 384451 - DNA, 111 bp, Homo sapiens
cgtacccactgcagagtgctgaagacggggtagccacgaggtgatttgaagatattaaagctagaaattggaactagaaaatcaaaagaattcaaggcatcttaacgtgac

SEQ ID NO: 384452 - DNA, 88 bp, Homo sapiens
ggctcagctctcgccgccagcgggccgcaggcctcttctgaagagctgaaagctgcctaccggaggctctgtatgctctaccatccag

SEQ ID NO: 384453 - DNA, 51 bp, Homo sapiens
gtggagaggttccttcaggaggatcagggactgttgacatttagggatgtg

SEQ ID NO: 384454 - DNA, 75 bp, Homo sapiens
atttttggtcgcaccaccactccacagcagaccaagtagatcatggcaaccatagaagaaattgcacatcaaatt

SEQ ID NO: 384455 - DNA, 95 bp, Homo sapiens
atagcaaacatcgatggcctactggggataacattcatgcagaacatcaggacttggatgttgtgggtgatggtatgcagtgtcctccttcacct

SEQ ID NO: 384456 - DNA, 75 bp, Homo sapiens
ggcattgacatttaattttagggtcctttatatagaagggagagtaggaggatttgacagctaaggatattgaag

SEQ ID NO: 384457 - DNA, 75 bp, Homo sapiens
ggagctgggtcagtccgccgctcaccccgcggccgcaccttcccgccttctcagcgctgtgcttcgccgtgagcc

SEQ ID NO: 384458 - DNA, 83 bp, Homo sapiens
cgaatatcgtcatcgttagaagaggaatgtcgggtcctcacaattcaaaacaattgaagatgacttggtgtccgccctcgtcc

SEQ ID NO: 384459 - DNA, 75 bp, Homo sapiens
cagaaacagaaaggatgtgaaggtgtttaatgaaccgtggagcatgcaacacatcccggcactgttttcggcctt

SEQ ID NO: 384460 - DNA, 97 bp, Homo sapiens
tggtgggaaggacctgatgatacagaggcacttcaggtggcaagacagctccttcttcagcagcaacagcagcagcaagttagtggattaaaatctc

SEQ ID NO: 384461 - DNA, 98 bp, Homo sapiens
gcgccgcggactgtcctttcgtggctcactccctttcctctgctgccgctcggtcacgcttggttaaataggattgcgaatcaggtggccattcagcg

SEQ ID NO: 384462 - DNA, 100 bp, Homo sapiens
tcggcgatggtaggcgtccctggagcggccgccttccagctttcaccagtgatcattaaagaatgggcagcttacaaaggaaagtctcctcaaaccccgg

SEQ ID NO: 384463 - DNA, 98 bp, Homo sapiens
gccatcaaggagagctgcacctgggccctgggtgtcatggagaaactccagctgggcccagagattctgcagcgggaaaatccaaggcttatttatgc

SEQ ID NO: 384464 - DNA, 100 bp, Homo sapiens
gtgggaagaagatttgtaaagaaaactcttagcttagaccatgctcagcctccaagcagccttgtcatcgacaaagaatctgaagtttacaagatgcttc

SEQ ID NO: 384465 - DNA, 100 bp, Homo sapiens
tagccaacatcgggcgcctggtagagatggtcatcatgggccagtgctactacaacgagaccatcggcttcttctataacaacagtggcaaagagctcag

SEQ ID NO: 384466 - DNA, 96 bp, Homo sapiens
ggggaggcgcggagcgcgcgtgtggtccttgcgccgctgacttctccactggttcctgggcaccgaaagcccaagtcagaaccatggctccaaaac

SEQ ID NO: 384467 - DNA, 82 bp, Homo sapiens
cgaaaaagagaagacgctttacccgactctttgggccgttatctcacatgatatcatcaagttgaatcgaaaggaagggaag

SEQ ID NO: 384468 - DNA, 75 bp, Homo sapiens
ctgcggccgccctgggccgggccccaccggacggccatgaagtacttgtcatacctgctgtaccctctctgtgtc

SEQ ID NO: 384469 - DNA, 100 bp, Homo sapiens
accatagagaatgtgacacggacaaggatagttttggctgatgtactccccatccccaggatgtcaacctcagtccctcaaggccatacctggacccaac

SEQ ID NO: 384470 - DNA, 100 bp, Homo sapiens
gtgtggccccgtgtcctgcaggtattgggagatccacagctaagacaccgggacctcctggaagccaaaaatggaactttatattgctgttggaatatct

SEQ ID NO: 384471 - DNA, 90 bp, Homo sapiens
ctccctagaagctggaattacaggtggatggaagcatgcctaggggaagatctgcctcccaccacagaactggaggaggggcttaggaat

SEQ ID NO: 384472 - DNA, 97 bp, Homo sapiens
gtggccctgctggaggagctctggcttcggaaccaaaaagaagcttcccagagccggggccaggagccccaagcgccctctagcagcaaacacagaa

SEQ ID NO: 384473 - DNA, 100 bp, Homo sapiens
gacatgagcaagaaaagcctctgggagcagaagggaggctccaagacctcatcaacaattaagcctacaccgatttcttcctcccgctgctaagccgctg

SEQ ID NO: 384474 - DNA, 75 bp, Homo sapiens
gaaggcagaactggaggctcgtctgcagtacctgaagatatctatcatcatcaactcttctgctccaccccacac

SEQ ID NO: 384475 - DNA, 98 bp, Homo sapiens
cctcggcctcggcgtgctgcgcctccgcggctgccctgcgccagttacagaatgtctgaaggggacagtgtgggagaatccgtccatgggaaaccttc

SEQ ID NO: 384476 - DNA, 99 bp, Homo sapiens
agccctatgagcagtggaacctagggccaataacggaaaactgcctgacaacaaagtcattgctagtgaactaggcagtatgccagaactgaagaaata

SEQ ID NO: 384477 - DNA, 51 bp, Homo sapiens
ctgatgttcgccacagtgatcactgaagatggagtttcgctcctgttgccc

SEQ ID NO: 384478 - DNA, 97 bp, Homo sapiens
gagaactacagaaacctcgtctccctgggttatgatgtgattgctcaagcccaatctgggactgggaaaacggccacatttgccatatcgattctgc

SEQ ID NO: 384479 - DNA, 83 bp, Homo sapiens
ggtcggagaagtggcctaaaacttcggcgttggaccggcagatgttcctggccacatggaaggatattcccaatgagaatgag

SEQ ID NO: 384480 - DNA, 100 bp, Homo sapiens
cttcgaaacctgctataaccccaaaggtacggacattgctgcaggagaagaggttgccatcaagcttgaatgtgtcaaaaccaaacaccctcagctccac

SEQ ID NO: 384481 - DNA, 100 bp, Homo sapiens
aagacaagtttgggaaggtgaagtttgctgtgctgcagacggactgcagtgtgctagcttttgttctggaccacctgctcccacatacccagaatgcaga

SEQ ID NO: 384482 - DNA, 96 bp, Homo sapiens
gctgccgctcctgctcatctgcttctgctatgccaaggctttgatgacagtagggaaagaaccatttcctaccatttacgtagattcacaaaaaga

SEQ ID NO: 384483 - DNA, 100 bp, Homo sapiens
cagagacagctcaacacggcacttccacaggagtccaaaactacttacctggaagaccttccaccaccccctgagtatgaattggccccgtccaagttag

SEQ ID NO: 384484 - DNA, 134 bp, Homo sapiens
gacaacatcaccgtactgcatgtgaagctcaccgagacggcgatccgggcgctcgagacttaccagagccacaagacaatgcagatcttcgtgaagactctgactggtaagaccatcaccctcgaggttgagcc

SEQ ID NO: 384485 - DNA, 82 bp, Homo sapiens
ttgcttctgagaacaaacgcaaaaggacagtaaactgtggaccttgaagttagcagatgccgtgcgcgaaattcggaagtat

SEQ ID NO: 384486 - DNA, 71 bp, Homo sapiens
tggctatgtgtttagagataaggtgattgatgagatttatcgtgtgttgagatatgtcaattctaccagag

SEQ ID NO: 384487 - DNA, 100 bp, Homo sapiens
gtcctctccaaactttgacctgagccgggcccctcagatgagagctgcacccaggccagcaccagtcgctcagccaccagcagcggcacccccatctgca

SEQ ID NO: 384488 - DNA, 101 bp, Homo sapiens
agcctcctcatcaccacggaagggaagctgtggagctggggttttaaaatcaaagatgggaaaatcggagaaaattgcccttccccatggccagcttgttc

SEQ ID NO: 384489 - DNA, 75 bp, Homo sapiens
agcctcccaagtagctggggttacagctactacagagccaatgaagtgcagcagttcagatactcccggccgttc

SEQ ID NO: 384490 - DNA, 100 bp, Homo sapiens
tacgccagccgcaactccagccagctcactgtccacctgcgatcccacacggacatatctgaagagatggattaagaatgctttggattaaggattgtgg

SEQ ID NO: 384491 - DNA, 100 bp, Homo sapiens
tcctccagaaagagccgccaacatccctcgaagcatctccagtgacgggcgcccactagagaggcggaaagtgacagaccatgtgaaatttcagaaattg

SEQ ID NO: 384492 - DNA, 97 bp, Homo sapiens
gaacttccctggtcgaacagttttttctaatggctattcaagattttggagtttgacttgaggggtataccactggacttttcatcttcccttggga

SEQ ID NO: 384493 - DNA, 90 bp, Homo sapiens
ggatttcaccgcgcggcggctctcagacatttatgcagtgtgtgattctttctaaaacaactccctggaagagaggacatttaattcaac

SEQ ID NO: 384494 - DNA, 82 bp, Homo sapiens
ttgggagcaggaagatgtcgaatgaacttgaagtgatagattcgtgtggcctttcaaatgattgtgaagtggtggaaatgga

SEQ ID NO: 384495 - DNA, 75 bp, Homo sapiens
ctgtgcgcgcctccatctgggccatggatggtgcaggtcgtaatctgaaggagtggctgagggagcaattttgtg

SEQ ID NO: 384496 - DNA, 83 bp, Homo sapiens
cgcctctccgccccgcgtccagctcgcccagctcgcccagcgtccgccgcgcctcggccaagtttttgaaatcatgaatcctg

SEQ ID NO: 384497 - DNA, 75 bp, Homo sapiens
ccgatactgagcttcttcctatttgccatgggcgcagttgtgtagcagttgagtaatgctggttagctgttaagg

SEQ ID NO: 384498 - DNA, 100 bp, Homo sapiens
ggggaccatggcggagccgcctcgggtgcctgtggcatttgatgatgtctccatctacttttccactccagagtgggaaaaattagaagaatggcaaaag

SEQ ID NO: 384499 - DNA, 95 bp, Homo sapiens
gtcgtggaggtggcgaaacgaggaggagataacgcggccttgggctctgagtacaggggctcaggtccaggtggcaggggatatgctacccaact

SEQ ID NO: 384500 - DNA, 112 bp, Homo sapiens
gtggacaagtttgcagatcgggagcgcaaggtcgccctcaaggccatgatcaaaacgagtgcgccggtctcggggaaatgcccggttccttcgtgcccacggtcaccgcgat

SEQ ID NO: 384501 - DNA, 118 bp, Homo sapiens
cccgagccgacccaagggccgacccccgcaaggagccgaaggcggcgggagccagagtcgccgccggcgtcggcgccgatgactttgaagaagccaaggaaattttgacaaagatgag

SEQ ID NO: 384502 - DNA, 79 bp, Homo sapiens
gctgtacaagtggaccaactatctgagcggaggctactcacagtcgaactacaactccccggggtccggccagaactac

SEQ ID NO: 384503 - DNA, 80 bp, Homo sapiens
acaaagccggctacgcgctgcgaggtctacaaggaagtcttcacgaggagcagtgagaactcagcgtcgtcgacgttcta

SEQ ID NO: 384504 - DNA, 75 bp, Homo sapiens
ctcagccaaacaggacaagcagagacatagtcttgctctgttacccatgctggagtacggtggcgagatcacgac

SEQ ID NO: 384505 - DNA, 90 bp, Homo sapiens
cagcgacttcagcgtcctgagtgcgctcaacgagctgtatttctatgtcaccaagtaccgccaggaggcccccccggcctgccacttcag

SEQ ID NO: 384506 - DNA, 75 bp, Homo sapiens
gtggtagatcatacaataacaagctgtgagtggtcattaagaaggcaaatgataccttaaatggaatcagtagta

SEQ ID NO: 384507 - DNA, 90 bp, Homo sapiens
ctcctcagccatgctgaactgttggacaagaagacgaggctgagagtgacatcttctctatcagggaagttagctttcagtccactggcg

SEQ ID NO: 384508 - DNA, 100 bp, Homo sapiens
ggaggctggttctagtgggacgagctcagccgcctcctcagtgccaggagcctgctggaaagaagatggcagtgaacgtatactcaacgtcagtgaccag

SEQ ID NO: 384509 - DNA, 87 bp, Homo sapiens
agactatgaatctctgttccaaatgctttgctggtcagctggaactgggtccgcctggaaacccgggggccgggcccccagagggct

SEQ ID NO: 384510 - DNA, 100 bp, Homo sapiens
tggaaaatggaggctgaattttacatggtgattcttacctgcttgatcttcaggaactcagatggtaaacctatgctacgccagggagatacaggagact

SEQ ID NO: 384511 - DNA, 50 bp, Homo sapiens
gagaaccaactggtcccgaaagagaaatgcatcttctgcagacaccgggt

SEQ ID NO: 384512 - DNA, 90 bp, Homo sapiens
tgggtttcttactaaggacgagctgatcaagtatatgactgaagaagagtgtgaacatggctacgcctcttcattcccgtccatgccgag

SEQ ID NO: 384513 - DNA, 75 bp, Homo sapiens
atgcctcaccctcatctatatcctttggcagctcacaggttaaacccatccagagtaatggctgcggccttaccc

SEQ ID NO: 384514 - DNA, 100 bp, Homo sapiens
gcgctccttcctggtcaagaagcatttcaacgcctccaaaaagccaaactacagcgaactggacacacatacagatgacacccccaaccatggttgtgaa

SEQ ID NO: 384515 - DNA, 90 bp, Homo sapiens
tgccggcctagcgtcctggaattacttcaatcaatttctggaactaatgcaactgaagtatcatgagaaagctgcagacaaaggggttta

SEQ ID NO: 384516 - DNA, 95 bp, Homo sapiens
atctggtgtaccaggcgaagctggccgagcaggctgagcgatacgacgattttgcaagaacgaggctcaaggatgtgagggacacagtattgaca

SEQ ID NO: 384517 - DNA, 100 bp, Homo sapiens
aaaaactcagaaaatacgtggttggagagctcatctggaattttgccgatttcatgactaaccagtacaacaagggaggtgtcacagttttccatttaga

SEQ ID NO: 384518 - DNA, 82 bp, Homo sapiens
ccactgttcctggaggaatccgagaagagcagagcggagggagccccagacacgcaagagtgagccatggagctacgtgtgg

SEQ ID NO: 384519 - DNA, 100 bp, Homo sapiens
agggagacgacgctgctgggtccgctgagcggggcgacccgagatggagtggatgttgaagatgatccgacttgctcttggccagcttcctcaccttcta

SEQ ID NO: 384520 - DNA, 100 bp, Homo sapiens
ttttgcagtagtattattgattccacagaatacagccaacctccaggtttcagtggcagttctcagtgaatcagacgtcccaatagatgtggagacggtc

SEQ ID NO: 384521 - DNA, 100 bp, Homo sapiens
ccagcagcccccgaaggccctatcaggacatggagtatgaaagacggagaaggaaggcatccagtgggaagctaaagaggacaattcggagggtgaggag

SEQ ID NO: 384522 - DNA, 83 bp, Homo sapiens
aggacaatggggacccgggacgacgagtacgactacctattcaaaggcgccatgtcagaaccggctggggatgtccgtcagaa

SEQ ID NO: 384523 - DNA, 100 bp, Homo sapiens
aaattttcttataaacttgagtatctcctgcaagtatttatgagcctccatttcttatactactgcagtgaaccaacattggatgtgaaaattgcctttt

SEQ ID NO: 384524 - DNA, 107 bp, Homo sapiens
cttgatgatgatcttgatggagtgccttgtttgcatcactggttgctgtttatgttgttggggggttcctataccagcgactggtagtgggagccaaaggaatggag

SEQ ID NO: 384525 - DNA, 87 bp, Homo sapiens
aagtttgcagatcgggagcgcaaggtcgccctcaaggccatgatcaaaacgtggaaatgagttctcaacagtttcctcggttaggag

SEQ ID NO: 384526 - DNA, 75 bp, Homo sapiens
aaccgcgaagtcatggggctctgtcgggaaggactttctgcagggcgactgcaccaaagcgaaacagaagctgaa

SEQ ID NO: 384527 - DNA, 90 bp, Homo sapiens
agcgccgctgggcctgcaggtctctgtcgagcagcggacgccggtctctgttccgcaggatgatgccgaaagttcagtataaatcgaact

SEQ ID NO: 384528 - DNA, 75 bp, Homo sapiens
gcaagatcgccagccttacaggttttacgtgaaatgaaagccattggaatagctgacaagctctctactgatgat

SEQ ID NO: 384529 - DNA, 120 bp, Homo sapiens
gggagacatgaaaaagatgagcaggaatgttttgctacaaatggaggaggaggaggacgacgacgatggggatatcgactcgctctttactgagcgtgtttgaagaagatgctggcaccc

SEQ ID NO: 384530 - DNA, 83 bp, Homo sapiens
ctactgaagccggcgctgctctgtggggctctggccgcgcctggcctggccgggaccatgctcaccatggatgatgatatcgc

SEQ ID NO: 384531 - DNA, 95 bp, Homo sapiens
caagcagcttccaagccctcaaagtttgaaaggcaaaattctagtgaagatgagcaggagactaaagatgcagcagaagaatgtaaagaacccta

SEQ ID NO: 384532 - DNA, 98 bp, Homo sapiens
tcagtgcccctggacgaccaggagaagctgcccttcaccgttgtgcatgaaagagagattcctctgaaatgcttgaccactatgctatcatcaagttt

SEQ ID NO: 384533 - DNA, 76 bp, Homo sapiens
ttggagaaagtattctcaacgatgcagtctccattgttctgaccaagtttgtccgatatgtgcctcgatgccctgg

SEQ ID NO: 384534 - DNA, 49 bp, Homo sapiens
tttggatccatttggcttttccagagatacaatcttgcttgaccgtttg

SEQ ID NO: 384535 - DNA, 101 bp, Homo sapiens
ccgggcgccacctcccccctgcctccctctccgctgtgagactttagaagacagctttccatcgacactaggccctttagaccagcctctgaagggaatcc

SEQ ID NO: 384536 - DNA, 50 bp, Homo sapiens
catggcctacccgggatacggaggagggacttatcagatgtagacttcct

SEQ ID NO: 384537 - DNA, 100 bp, Homo sapiens
cggggctggggctgtggctgcgccgccggccatcgactttcccgccgagggcccggaccccgaatatgacggcaacagctgtttaccaagcgaaggagaa

SEQ ID NO: 384538 - DNA, 90 bp, Homo sapiens
aggtgacactgcaaatgaaattggacagagacggggttttgccacattggccaagctgatctcgaactcctggcttcaagtgatccaccc

SEQ ID NO: 384539 - DNA, 133 bp, Homo sapiens
cctgacccggcctcaccatgttggtgctgtttgaaacgtctgtgggttacgccatctttaagacaatgcagatcttcgtgaagactctgactggtaagaccatcaccctcgaggttgagcccagtgacaccat

SEQ ID NO: 384540 - DNA, 74 bp, Homo sapiens
tttgtatgttatggtgaatgccaaatttgaaggaattagcttaccgaaaggagatggtgagagctgacctaatt

SEQ ID NO: 384541 - DNA, 83 bp, Homo sapiens
ggaaaggctttgaagcaaaagtttgatgagattttttcagcaacaaggtatgagatgcaagatgctggaattacttcagactc

SEQ ID NO: 384542 - DNA, 109 bp, Homo sapiens
aacagcccgcccgaccccgtcccgaccctggccgccccgagcggagcctggagggtttccaggcctgaggtgcccgccctggccccaggagaatgaaccagccgcagag

SEQ ID NO: 384543 - DNA, 101 bp, Homo sapiens
tgaggatgctgtgatgcatcatctgctctgcggaggcctctacaagccgcgccgtagggtgaggagggtgaggctcaaagagcagagttcctggagcgccc

SEQ ID NO: 384544 - DNA, 97 bp, Homo sapiens
aggaatcctggatccagatgatgtcttggcagatgttgttgaagataaagacaagaatcattgaaaaatggctctgctacaggtggtggaaataaag

SEQ ID NO: 384545 - DNA, 90 bp, Homo sapiens
ccaggcctaccccagtcacggacggtgcaaatgtcaattgtcaagccttggacaaagctacacccttgttcattgctgctcaagagggac

SEQ ID NO: 384546 - DNA, 74 bp, Homo sapiens
ccgccgacccgccgagcaaaatggtgggcagtgtcaaaccgggaaatgcttatagctcaaaacagctccttgga

SEQ ID NO: 384547 - DNA, 101 bp, Homo sapiens
cgacctgtttgagagtgggaacatgacgcaggtgcaggtgtctcttctcgccctggcggggaagtgcctccggagccagcgtggtggccatagacaacaag

SEQ ID NO: 384548 - DNA, 95 bp, Homo sapiens
gggggcttcaagcccactgggatcgagggcctcaaacccaacaacacgcaaccaggcatccgtgtcattctggaccttactcccaactaccgggg

SEQ ID NO: 384549 - DNA, 75 bp, Homo sapiens
agtgggaagcatgtcgtctttatcgctcaggaattcctcctgatcagcagagactgatctttgctggcaagcagc

SEQ ID NO: 384550 - DNA, 94 bp, Homo sapiens
cagctgaagagcgacaagccgctggcagccgcggatctcaccgccgctcaggttcaaatctgaacatcaatgatgtactagggaactactcatt

SEQ ID NO: 384551 - DNA, 74 bp, Homo sapiens
cggatggacacccacaggtcggccctgcggacccggcaggtgactttggctcttgattgcggggactaactcct

SEQ ID NO: 384552 - DNA, 100 bp, Homo sapiens
ccaagccaatgcccaagacattataaacgttacttacaaagctccagttccaacaggggaagtatattttgctgattcttttgacagaggaactctgtca

SEQ ID NO: 384553 - DNA, 87 bp, Homo sapiens
ggtgctggagcggtccatggacttcggccgcacctaccagccctggcagttctttgcctgcacccccagccagaacacgcagtgcca

SEQ ID NO: 384554 - DNA, 50 bp, Homo sapiens
cacaagggcagtcaccatgaaagcatcaacaacagcaacttgtgattggc

SEQ ID NO: 384555 - DNA, 49 bp, Homo sapiens
ctcgagatgatgaggaattggtccatgttgttaaaaaagcagacatgat

SEQ ID NO: 384556 - DNA, 100 bp, Homo sapiens
gtaagcggcgcggtagcgaaggccgccgaacctgcctggctagccggcgacttgagtgacgagtctcggcgcggaagatggccggcggcgtggacggccc

SEQ ID NO: 384557 - DNA, 51 bp, Homo sapiens
aaaaaccttcaggcggcccatggattactcttgtctctgctgctcctggga

SEQ ID NO: 384558 - DNA, 75 bp, Homo sapiens
tcaccatcgccgaccagatcaccctcctcaaggctgcctgcctggacatcctgggaaatgtttcaacgtgcgcaa

SEQ ID NO: 384559 - DNA, 99 bp, Homo sapiens
cgtaggacgatgcttctcttctgtcagcctgcaactgagccaggattgaatacttggaccccaggtcaaaatgcagatcttcgtgaaaacccttaccgg

SEQ ID NO: 384560 - DNA, 100 bp, Homo sapiens
gccgccagtaccaggcgctggagaaggacgaagaggaagccttgatccgatcacataggacagtatgcaccttaagatcctgaagaaacggcacaaaatg

SEQ ID NO: 384561 - DNA, 100 bp, Homo sapiens
cctggccctggagaactacatcaccgctctgcaggctgttcctcctcgggtcttgtccaataagcatgtggctcctgatcatcttttgcaaatctgccag

SEQ ID NO: 384562 - DNA, 88 bp, Homo sapiens
tccgagctgaaacagaagatccactcgattacaggtggtgttcccactgatgaagagcaggcgactgggttggagagggagatcatgc

SEQ ID NO: 384563 - DNA, 73 bp, Homo sapiens
ccagctcttcaggagaagcacgccatgaaacaggggttttcagagaaagatgctgatgaggtgaaaggaattt

SEQ ID NO: 384564 - DNA, 101 bp, Homo sapiens
gaataagctcattttaattgccagaaacaaagagggaatctggaaaaattgcaatcaaaacatcatttctctaagaaaattttgggtaaccgaagttctgg

SEQ ID NO: 384565 - DNA, 50 bp, Homo sapiens
ctgacagcgcgcacttcacccgcagttgagagcgcctgctcgctgtgccc

SEQ ID NO: 384566 - DNA, 100 bp, Homo sapiens
ttctatcctggaggaagacgaggaagacgaggagccaccaagagtccttttataccacggctgcccacctacggccgaggccctgctctacggcatcctg

SEQ ID NO: 384567 - DNA, 101 bp, Homo sapiens
agtacctgcagaaggtctctggagacatcttcagcagtatgaatccaagagtcgcatgtcagcagaggctgccctgagtcactcctacttccggtctctgg

SEQ ID NO: 384568 - DNA, 100 bp, Homo sapiens
gcatgatcagctcaagcaaaactgatgatctcacctgccagcaagaggagtcattacgggccaatagtcgactgctggaacaacttcaagaaatagggca

SEQ ID NO: 384569 - DNA, 100 bp, Homo sapiens
aggaagtcggagtttgagccccggaggcagagcggctgccatgatcatgaaaatggaactgggactaacacctatgcggccttaaacagtgtctatctca

SEQ ID NO: 384570 - DNA, 82 bp, Homo sapiens
aggacagttgcatcatcaaagaaggagacgtggggtcactggtgtatgtcatggaaggaactgtggctgcaccatctgtctt

SEQ ID NO: 384571 - DNA, 83 bp, Homo sapiens
ctcgacgccagaggatggattacccagtactttgagaatcactacaagaaaaactccttgtggtgaaggttctaagacgtggg

SEQ ID NO: 384572 - DNA, 82 bp, Homo sapiens
cttttgatcaccattggctgggaaggaaaaacagaatcagctgttccctgcgaaagctggagtcttttgtgcaattgtttct

SEQ ID NO: 384573 - DNA, 111 bp, Homo sapiens
cagaaggacatccaaccctacatgcgcagaatggtggccacctggatgctggagacaatgcagatcttcgtgaagactctgactggtaagaccatcaccctcgaggttgag

SEQ ID NO: 384574 - DNA, 100 bp, Homo sapiens
aagtcaagaagccgcggaattccaaaccctcacctgtagacaggaaggagctgactgccgatgcacgggagctgaaaggggagctatactgcctcccatg

SEQ ID NO: 384575 - DNA, 97 bp, Homo sapiens
agaacccggccctcaccgccctcaccacccctatccagacggctgcccttcaagtaccatctaaagcatcacaaggtagtgaccttgaacaaaatga

SEQ ID NO: 384576 - DNA, 50 bp, Homo sapiens
gcagccagcatcaacccagccacaggctggaggacgtgtgccagtgttag

SEQ ID NO: 384577 - DNA, 75 bp, Homo sapiens
ctaccgagatgtgatgttggagaactacaggaacatggtcttgctgggctgtaccagtgcaggtcctcactttaa

SEQ ID NO: 384578 - DNA, 96 bp, Homo sapiens
gagtcacaatctgaacagattctcgggcgctccttctctccttccatcactacaacatatctgaagagatggattaagaatgctttggattaagga

SEQ ID NO: 384579 - DNA, 75 bp, Homo sapiens
catgtctgtacacctgtccccctgcttcagagacgagttgtactgctgtcacaggaaatggacgctggattacaa

SEQ ID NO: 384580 - DNA, 82 bp, Homo sapiens
gtgatatattcatgtggaactatgaggatggggctacttctacaagtccgaacagccagtccagcaaaatgaacagcattgt

SEQ ID NO: 384581 - DNA, 100 bp, Homo sapiens
gataaagaacttcttcccaaaatggagtccagcaagctaaaagtacagaaggtggagccctggaacagcgtgcgtgtgacattcaacatcccccgggaag

SEQ ID NO: 384582 - DNA, 102 bp, Homo sapiens
gcagagataaagagaaaagagaaaaggagaaggataaagggaaggacaaggaattacataacatcaaacgtggttgtatatgaacacagatcaagattagag

SEQ ID NO: 384583 - DNA, 97 bp, Homo sapiens
aaaagtgttcgaagggggctgcagcggagatccgagagcagggggatggggcagaggacgaggagtgggggctgacgtttaccctacgtcctggtga

SEQ ID NO: 384584 - DNA, 100 bp, Homo sapiens
tttcttggaattggactgtgggcatggaatgaaaaaagcctgtgtggtgcccctatctccttgttccaagggcctctcttgccttgaaagccttcttatt

SEQ ID NO: 384585 - DNA, 83 bp, Homo sapiens
gggagcttccgggagggcggctcgcaggagatcatgaatcagacagataaaaatcaacaagaaatcccatcataccttaatga

SEQ ID NO: 384586 - DNA, 100 bp, Homo sapiens
tttccaccaacattcaaggaaacaaatcaactaaaaacaaaattgccagaaaatctttcctctaaagtcaaactgtgatcctgagcagctgaagaaggaa

SEQ ID NO: 384587 - DNA, 100 bp, Homo sapiens
tgtgctcttgctgaggacccacaagaacttcgagatggattccaacatcctgctagacttgttaagatggacttcagcagaaatctttatgatattgggg

SEQ ID NO: 384588 - DNA, 75 bp, Homo sapiens
ctaagtgctgctgttgcttcccgtgtagaggtccttccaaccctcctgctaccatgaagattgcagtgattggac

SEQ ID NO: 384589 - DNA, 51 bp, Homo sapiens
ggggtaacacccttccagatgatttttgagacaaatttacatgtattggag

SEQ ID NO: 384590 - DNA, 75 bp, Homo sapiens
caggacggccaagaccagcgcgagggccctgggcaaggcccgacaggaagccgagatcccccgcgaggtgatcga

SEQ ID NO: 384591 - DNA, 75 bp, Homo sapiens
cccatgttctggctttctttgcagcaagcgatggcatagtaaatgaaaacttgctgcaagctttcttcctggtgg

SEQ ID NO: 384592 - DNA, 99 bp, Homo sapiens
tcgggtcgttgtggtgcgctgtcttcccgcttgcgtcagggacctgcccgactcagtggatcaataagccgagagctgaggattcaggcgaataccact

SEQ ID NO: 384593 - DNA, 100 bp, Homo sapiens
cttgggaacctagctgatgataggggggttccatctcccaacttgtccatctctaagcgaaagacatgaggcctcagcctgaaatgaggttgttttgagg

SEQ ID NO: 384594 - DNA, 99 bp, Homo sapiens
atcccaagttgtcgacgaccgacagggtggtgaaagattcgaaatcagagcaaagcctctgggtctgggctctgtgagggagatgaagtggtttccatc

SEQ ID NO: 384595 - DNA, 98 bp, Homo sapiens
ttggtttcatggatactgattcagcacttagtgaagttcctcaattgaagcaagagatttctgaatgttttacatgtggcacccataaaagatgaggc

SEQ ID NO: 384596 - DNA, 83 bp, Homo sapiens
cgcgtgcgcggacatggcctcaaacgggcgtgatggtgggcatgggtcagaaggattcctatgtgggcgacgaggcccagagc

SEQ ID NO: 384597 - DNA, 75 bp, Homo sapiens
cttccagagccaaggaggaagggttgtccgggtcaaggtcagcatctcctcgacgatcaagatctatctctcttc

SEQ ID NO: 384598 - DNA, 98 bp, Homo sapiens
aatggctgcaggccaagcgcctcacgccggacctggtgcaggtctctaattaacagaagatggcaaagcccagccacagcagctatgtccttcagcag

SEQ ID NO: 384599 - DNA, 109 bp, Homo sapiens
cgtggaggagctgtgcagccgcgaggaggcgcgggaggtgttcgagaacgaccccgagacgatgaaggatttgggggcagagcacttggcaggtcatgaaggggtccaa

SEQ ID NO: 384600 - DNA, 100 bp, Homo sapiens
ttattacaaccccagtgattgcacaaaagttccaaaaaagactcttttcccattgttattcacgcactgcagtgtactcactatgtaatcctttggcaac

SEQ ID NO: 384601 - DNA, 51 bp, Homo sapiens
cagcccccagcggcccaggcccagtttggtgcacctcgatttggaggaagt

SEQ ID NO: 384602 - DNA, 100 bp, Homo sapiens
tcctacgtgaaatcactgtggcaaccgggggtgctggagaatctggtaaaagcaccattgtgaagcagatgaggatcctgcatgttaatgggtttaatgg

SEQ ID NO: 384603 - DNA, 74 bp, Homo sapiens
ttttccccccaaactgcaataagccgccttccaagcgtgcttctgttcttcaaggttgaaaactaagcatgggg

SEQ ID NO: 384604 - DNA, 90 bp, Homo sapiens
gaacatgctttcttcaagatggaacaaagactgttgagtatgctccatgtagatcacattttgatgcatacgaaagagatggtacaaaag

SEQ ID NO: 384605 - DNA, 75 bp, Homo sapiens
ggcctgtatcaccagaggagattagacgtagcagattaggtgaaaggtgtagcagtcactcggcctacacccaca

SEQ ID NO: 384606 - DNA, 74 bp, Homo sapiens
tttcatgggatcccagccacgccgggcataggaggtgtgtgcagtggcctcagggatccggaaagtctaggact

SEQ ID NO: 384607 - DNA, 73 bp, Homo sapiens
cggcttctggttctcacttgtcgcatcctgaggttagcattacacttctcccagtggagcccatgacttctga

SEQ ID NO: 384608 - DNA, 75 bp, Homo sapiens
gcggaagatcgtcgccacctggatgctggagggctgaagaagatgcagagcagcctgaagctggtggactgtatc

SEQ ID NO: 384609 - DNA, 90 bp, Homo sapiens
ccgaggaggctttcctgctggtggcaaccgcctacgagacactcaagcatgattttgaagtcagaggagatgtggtcaatggaagaaacc

SEQ ID NO: 384610 - DNA, 101 bp, Homo sapiens
acccccatgtgaggcttatgctcttatggcccatgccatggaggaagtcaagaaatttctagtaccggtgctacagctcgagagggcagagccacagtccc

SEQ ID NO: 384611 - DNA, 82 bp, Homo sapiens
aacgggcagtttgtcgaacgatgttggactcatagtcactgccagaaaggcaatcttgctgccaatgatctctccccgtccc

SEQ ID NO: 384612 - DNA, 76 bp, Homo sapiens
tgacaagaaggctcaaggtcccaaaggtggtggcaatgcagtaaaggttaaaaagatcaagtggcatgagcagcct

SEQ ID NO: 384613 - DNA, 98 bp, Homo sapiens
tgatgtggtgcttttgaaccactggaaagtgaggaattttgaagtacaccgtggtgacattgtatcattggtgcagacctgttatcctaaactaggtg

SEQ ID NO: 384614 - DNA, 74 bp, Homo sapiens
aactacaggcggggacggcttctcgattggctgcaatgccgtcagctgggcccctgctgttgtacctggaagcc

SEQ ID NO: 384615 - DNA, 50 bp, Homo sapiens
actctggtgaatgtattcattggagcagcatggacctgtcagcaactaag

SEQ ID NO: 384616 - DNA, 82 bp, Homo sapiens
tctccagaaaaaactacactgtctactgccaagagctggactggccattatggaggaggagctgcagcattcccattgtgtg

SEQ ID NO: 384617 - DNA, 97 bp, Homo sapiens
gcacatcgctgaggattcagaccgcaaatatgaagaggtggcccccgtgctcaaggagcgcatggtgaaggagggctccatgatgattggctaccag

SEQ ID NO: 384618 - DNA, 82 bp, Homo sapiens
gcagccttgggcctcgcgccggctatggccgtgccctggggctgagccctcaggaacccaagacagaccaggatgaggagca

SEQ ID NO: 384619 - DNA, 75 bp, Homo sapiens
gccaattctgcgcttctcagtaactacgagggattcgcaacagttcttgctgaagcagttacatccctggatctg

SEQ ID NO: 384620 - DNA, 100 bp, Homo sapiens
gtacctgcagaaggtctctggagacatcttcagcagtgaaagctggtggaatgcgaattgtgcagaaacacccacatacaggagacaccaaagaagagaa

SEQ ID NO: 384621 - DNA, 100 bp, Homo sapiens
ttcagtattgtgagcaagcaaaatcagtaattgtgggtcgctggtcatcctctggcacagaacgaacgttgtcttcacatgtttttacaagatgaaataa

SEQ ID NO: 384622 - DNA, 99 bp, Homo sapiens
cattcaaattgcactgctaccagacactgacaggattgtcaccagacctgcaatctatggagcagattcggagaattatgagacctactgatgtccctg

SEQ ID NO: 384623 - DNA, 75 bp, Homo sapiens
ggagaggacctgttcaccagcactgtctccaccctagagggtcgagctgtgcagttttagcgggtacaagatcta

SEQ ID NO: 384624 - DNA, 100 bp, Homo sapiens
tgtcttccccctggggctcgatggttaccacattgggaggaaccagtttcctttcgtctgccagattaaagagactggtgctaacctagcaatttgtcag

SEQ ID NO: 384625 - DNA, 75 bp, Homo sapiens
gactttgtttttcctgggaactgcagtctcaaaccatgaattatgtgggacagctggctgggcaggtgattgtca

SEQ ID NO: 384626 - DNA, 52 bp, Homo sapiens
tgtccaagagaaatggggcttggaggtgtggtggacagtgaggacattcccc

SEQ ID NO: 384627 - DNA, 104 bp, Homo sapiens
atctgcagatggggctgctctcggccctgcctctggctgtggaaacaggcctccaagtacccaaggttgcacgttttcaaaaaatacctaatggtgaaaatgag

SEQ ID NO: 384628 - DNA, 82 bp, Homo sapiens
gtgggctcggggcctcccaagggcacagtactacgacatttctgccaaaagtaactacaactttgaaaagcccttcctctgg

SEQ ID NO: 384629 - DNA, 75 bp, Homo sapiens
ggtccgccactgcgtggcctgcgggctcctgcgcacgccgcggccgaaaccggcctcccgcgacgatgcccctca

SEQ ID NO: 384630 - DNA, 83 bp, Homo sapiens
ctccggccagggccgggagccgggccggcctagccagacaaatttacatgtattggagaccagaccagaagcccttctgaatt

SEQ ID NO: 384631 - DNA, 74 bp, Homo sapiens
cgcgggacgtggtataccgcgacatcaaggagtcagggctaaaggtcaaccagccagcctcttttgcagtcagc

SEQ ID NO: 384632 - DNA, 98 bp, Homo sapiens
ggattactatgaagttctaggcgtgcagagacatgcctcacccgaggatattaaaaaggctgaagaaaaaatgactgctgcccgcattagaaaatgcc

SEQ ID NO: 384633 - DNA, 74 bp, Homo sapiens
cagacatctacaaccttcgatctcctgacgagtacgcagagatgcctaaggcggagaagaacgctgtctcccat

SEQ ID NO: 384634 - DNA, 100 bp, Homo sapiens
agagactccttgggggtcgagcacataacggggttcgggtgtctcgtgtgtgaacatcacagggagttctgggaaatcgttcattcatttacagatgaac

SEQ ID NO: 384635 - DNA, 101 bp, Homo sapiens
gagagataacaaaagctgctcagagtctcaatgaacttgtcagagcaccataacatggtgtgggaagtgaagacaaatcagatgcctaatgcagtacagaa

SEQ ID NO: 384636 - DNA, 95 bp, Homo sapiens
cctggatctgcgatctgtttgtgttttcggctttgtgagaaaccttaccatcaaacacgatggccagcaacgttaccaacaagacagatcctcgc

SEQ ID NO: 384637 - DNA, 82 bp, Homo sapiens
atcatctgaggctgaatttgataagaccactgcactatctatgctcctagaaggaaaggacagctgtctgcagacatctgta

SEQ ID NO: 384638 - DNA, 100 bp, Homo sapiens
gcagccgcgcctctcgcttgcttccctcggccgggccgtcctcggcggcagtgtcagggcatcatggccatccttttctcaggcatcgtgatgtcccact

SEQ ID NO: 384639 - DNA, 101 bp, Homo sapiens
gagacagaagcggacccagaaatgatcaagaatgagtccctggaacgccagatgcgtgaaatggaagagaactttgccgttgaagctgctaactaccaaga

SEQ ID NO: 384640 - DNA, 75 bp, Homo sapiens
tcagcctccctagtagctgggactacaggtcagccatgtcatctgagcctcccccaccaccacagccccccaccc

SEQ ID NO: 384641 - DNA, 116 bp, Homo sapiens
ggagttggaatttgtgcaatgtttagccaacccaaattaccttaattgagtgaaacacaaatcttttctaacggctgaggactgctttgagttgggcaaagtggcctatacagaag

SEQ ID NO: 384642 - DNA, 83 bp, Homo sapiens
gcagattggcttttgtagatcaggttacccatgcagttgttactgtaccagcctattttaatgatgcccaacgccaagcaacc

SEQ ID NO: 384643 - DNA, 83 bp, Homo sapiens
gcctccgggcatcttcaacttttgcctgagaatacagatcaacccacagaacaaagcggatttccaaggcatctccccagagc

SEQ ID NO: 384644 - DNA, 100 bp, Homo sapiens
gacagccaggcccgggagaagggggacacagcgattgccacgcgccattggaatgtccctggccaaggagctcatattctctgcgcgagtcctcgatggc

SEQ ID NO: 384645 - DNA, 50 bp, Homo sapiens
ccgtgcccgagaatagctccgtccagcagcgatctagggcagccctgcag

SEQ ID NO: 384646 - DNA, 82 bp, Homo sapiens
caagaacaatagcttgccctcataaagaatacggggtgctttgcattcaggaatacagaaaaaacagcaaagtggagtcaag

SEQ ID NO: 384647 - DNA, 100 bp, Homo sapiens
tctggaagagtacactgggaccgaccctttgtatgtcggcaagaggtcaggttcttgaaggtttcctgcatcacatccctgtagagattcttctgggaag

SEQ ID NO: 384648 - DNA, 88 bp, Homo sapiens
agctgacagagtgatgggaaacgcgtgagccaggccgagagaccctacagcttggggcctgggctcctctgaccatcctcattgagaa

SEQ ID NO: 384649 - DNA, 74 bp, Homo sapiens
tgaagtatccagcgctcattgggaatttagttaaggaaccaccaaactgttttccacagaggctgcatcaattg

SEQ ID NO: 384650 - DNA, 101 bp, Homo sapiens
gaccaacttgctgcggtttttgttcctggggctgagtgccctcggatccctttgtggccttccacatcaacaagggccttgtgaagaagtatatgaactct

SEQ ID NO: 384651 - DNA, 100 bp, Homo sapiens
gggcatgtcccctctcttacaagcccatcatgctatggaaaaaatggaagaatttgtttgtaagagtggagactgctgcacggactctggaaccatgaac

SEQ ID NO: 384652 - DNA, 75 bp, Homo sapiens
tcggagcgcggccgggcgcgcggcgccgccacaagttgcgctgctcgcgacgagacaatgcagatcttcgtgaag

SEQ ID NO: 384653 - DNA, 82 bp, Homo sapiens
aagatgatgacgatgatgatgaagaggatgatgatgaagaatgtgaagttcatttccaatccgccctccatggtggcagcgg

SEQ ID NO: 384654 - DNA, 96 bp, Homo sapiens
tcccacagtcaggagagacttgtgaatgaaacccgagagtgtcaaagcttgcggcttgagctagagaaactcacaagattaccttatgctggctac

SEQ ID NO: 384655 - DNA, 50 bp, Homo sapiens
gccaaagccaaggaagcagatggaagggcaagtgtccagagaatggctgg

SEQ ID NO: 384656 - DNA, 82 bp, Homo sapiens
ctgccgggaagcaagaggcaaagagaatcggttgtattcagaggatatgaagcacaagaccactcttctggagcttcagaaa

SEQ ID NO: 384657 - DNA, 90 bp, Homo sapiens
gccacagacggaacctcagatttgcccctcaaactggaggctctctccgtgaaggaaggtaatagcctgcagctggtgttttgagaagcc

SEQ ID NO: 384658 - DNA, 82 bp, Homo sapiens
caagcgatggcatagtaaatgaaaacttgttgaaccaagactctgaggctgatatgcaatgtcacttacaacattaatcaga

SEQ ID NO: 384659 - DNA, 90 bp, Homo sapiens
ttggagatcctaggacagtgctccaagttccaatatcagatggaaatgatgcggagccttcgccatgtaaacattgatcatcttcacgtg

SEQ ID NO: 384660 - DNA, 89 bp, Homo sapiens
atctcattccaaactttgccatggaaacatgggttcttgtggctaccagcctggtactcctctatatgcaccacctacctatgatgccg

SEQ ID NO: 384661 - DNA, 100 bp, Homo sapiens
gctggagcccgcctggagagacagacacgtgtgtgtagctgggacggtgctggtctgagctggaccttgtctgatggcttcctccaaccctcctccacag

SEQ ID NO: 384662 - DNA, 98 bp, Homo sapiens
aggaagtaccaggacttgcacaggaaaatctcacctggccattgtccagcgggtgaataatgagggagaaggggaccctttctatgaggtgatgggca

SEQ ID NO: 384663 - DNA, 82 bp, Homo sapiens
caggaaaggaggggtgccagtccagccctagccaccaggaacctggaaccctgcagaaccgaggagcagatggctcagcagc

SEQ ID NO: 384664 - DNA, 100 bp, Homo sapiens
gtgcgcactgcgggcgcatccctgccccggcgccgtccgtgcccgcgggacctgacagccgggtcagagctgacatgggctcattgctccttctccaagc

SEQ ID NO: 384665 - DNA, 100 bp, Homo sapiens
gcgcgtacgccctgctgcttctcctgggtcgcggagcctcgccggccgccatgtggagctgcagctggttcaacggcacagggctggtggaggagctgcc

SEQ ID NO: 384666 - DNA, 74 bp, Homo sapiens
agacaccgagtactcctgtggcttgcagcactcctgctaagagctctgtctcacattttacaaacaccaataga

SEQ ID NO: 384667 - DNA, 90 bp, Homo sapiens
agggcctagaaagtttgcccccgctgcggccccagcagaatccagtccgtttccctggggagatggtaaccatactctattccataaccc

SEQ ID NO: 384668 - DNA, 90 bp, Homo sapiens
ttcggggacaatctggtcacccgctcctacctcctgggcaactccagcccccgaacccagtgtggtgtggatgtcgacttcctcatctcc

SEQ ID NO: 384669 - DNA, 50 bp, Homo sapiens
ggagctgggcctaggtctgcgccctggatcagctcagctactatttaata

SEQ ID NO: 384670 - DNA, 99 bp, Homo sapiens
acggcgacagtggcggcggcgccatggcagggcttgcagactgtgccctgtccacggtgcctcctgcatgtcctgctgccctgagctgtcccgagctag

SEQ ID NO: 384671 - DNA, 100 bp, Homo sapiens
aatgtctactgcaacttcaagtagtggaaggagtacagggaagtctataagctttgcaacagaattacagagtatgatgaccagtttggacaacatataa

SEQ ID NO: 384672 - DNA, 83 bp, Homo sapiens
agaggtcccaatcccccactctttccgccctaatggaggtctccagtttcgggggatatgagactttctactcggaatatcct

SEQ ID NO: 384673 - DNA, 75 bp, Homo sapiens
gatgtggaggaaaacaacttcgagggcagagagaaatacgaatgtgctttaaagcgagcaagtattaaaattgtg

SEQ ID NO: 384674 - DNA, 100 bp, Homo sapiens
gggaggcaacggagctaccagccgagtttatgtggccgaggcagacaagtggaattaggccttgctgcaggggacttcatttccttctcagtactggacc

SEQ ID NO: 384675 - DNA, 98 bp, Homo sapiens
gtgcgcgtcctcctccccaggcccgccgcctccctgccaagctgggagtgtccactcgccttccaccagcatggcaacgtcttcacagtaccgccagc

SEQ ID NO: 384676 - DNA, 100 bp, Homo sapiens
gagagcattttggaagaggaaccacaagaaaatcaaaagaaacttttgcccttatcagtaacacctgaggaaacccagcgtttgctggcagaaccagttc

SEQ ID NO: 384677 - DNA, 100 bp, Homo sapiens
tacggaccataataatcaggagtgaagtcccagggatattctgtgctgtttgtttcagtgttggaaggcgtgttgtctaagctgtcaaggtatgatgaag

SEQ ID NO: 384678 - DNA, 100 bp, Homo sapiens
attggctggggagacccatctggactaccaaggagaagctatagactacttctactccaccaggaagggtacagctctgccggggggggaaaaagtggta

SEQ ID NO: 384679 - DNA, 101 bp, Homo sapiens
aggaaccatgtctccatccccgaccgccctcttctgtcttggaacttagtgatttggcccgtgaccctccagcacaatgttctgcaggtccagttggggat

SEQ ID NO: 384680 - DNA, 98 bp, Homo sapiens
ttatctgccctatttgcagtggagtcttggaggagccagtacaggacagtcattttgtttactcattcagccctgttgcaggtcccaataaactcttc

SEQ ID NO: 384681 - DNA, 100 bp, Homo sapiens
caaggtcattttcgtggagaaagccccagtaagactttgaccccgacgcaggcttcagtgattgccgcggatcagaagcctgagcactttggctcgagac

SEQ ID NO: 384682 - DNA, 75 bp, Homo sapiens
ctgagggtgccctcaatgagcacatgaccagcttagcttctgtcctaaaggaactaagcgtcttgtagaaggaac

SEQ ID NO: 384683 - DNA, 50 bp, Homo sapiens
atttccatgtcaacatagtcctgtaaaggcatgacttcctggcaccacag

SEQ ID NO: 384684 - DNA, 88 bp, Homo sapiens
cacgcagcagcactactacgagcgcgaccccaaggtagacttcgcttgaaaagatcgagaatggaggaggggatcggcactcacttgc

SEQ ID NO: 384685 - DNA, 50 bp, Homo sapiens
gagcggtgtcctcttaagaaaatggtactatggcagaaatggccagggaa

SEQ ID NO: 384686 - DNA, 75 bp, Homo sapiens
ttaccaacaatcaaatggaaacccttaattcgcacctgtgtctgctaaaaaagaaaagaaagtttcctgcatgtt

SEQ ID NO: 384687 - DNA, 80 bp, Homo sapiens
ctgcggccaattcggtggaacgaggacgcggactgcgaaggcagggaaggatggagacgctgaaggataagaccctgcag

SEQ ID NO: 384688 - DNA, 108 bp, Homo sapiens
tacggctccgacaagaggctgagtgaaggccgggggctgccccctccccccaggtctgtgcagacttttgcagacaaatcaaaacaagaagctctgaagaatgacctg

SEQ ID NO: 384689 - DNA, 98 bp, Homo sapiens
agcacttcaatgagcgagaagccagccgagtggtgcgggacgttgctgctgcccttgacttcctgcataccaaaggtagatttcgggcagacaacttg

SEQ ID NO: 384690 - DNA, 117 bp, Homo sapiens
ggagacgccaccgaccccaacggcaccagccctttgcacctcgcagctaaaaacggccacatcgacatcatcagggactatgcagccatcgtcttctttgctaacaaccgctttgag

SEQ ID NO: 384691 - DNA, 100 bp, Homo sapiens
ttctgtctttgtgtcctgagatcaaatggcacttcattggccacctacagaaacaaaatgtcaacaaattgatgggaaatgggtcctgatgaatatgaag

SEQ ID NO: 384692 - DNA, 83 bp, Homo sapiens
ctctgggatcccggccaccagcaattgtccgggaaatcctcattgacgattcaatttgttgaaggccaatttgtggactccta

SEQ ID NO: 384693 - DNA, 90 bp, Homo sapiens
cccccctgtctccacaccgaagagccaagtcactggacaggaggtccacggagccctccgtgacggctgaaggggatgctaagggagata

SEQ ID NO: 384694 - DNA, 82 bp, Homo sapiens
ctttggaagatgcagatgagaaggttcagttggcaaaccagatatatgacttgacatctttccaggaacagcgtgaggagga

SEQ ID NO: 384695 - DNA, 100 bp, Homo sapiens
tttcaagagtcacttctttacttggtgcaggaaggcagtctttgctacgtacagcaaaaggagtggcaaggaatttactatgccaaaaagaaaaacggag

SEQ ID NO: 384696 - DNA, 75 bp, Homo sapiens
gtttagtattaccaccccgtgtagcatgtgttcaggaaactcgaactatctaccagtttcattacaagaattggc

SEQ ID NO: 384697 - DNA, 100 bp, Homo sapiens
cccctgtttgagaaaaggcctaagaattttggcattgggccatgaagcccccaggaggagaatcgagcaatctttttggaagtccagaagaagctactcc

SEQ ID NO: 384698 - DNA, 100 bp, Homo sapiens
aaagcctgtgtgatgtgctatctatggatttcccttttgagtacgtagagaaatcgacactcttaatgaacgtttagctgctgaaggacaagcgattgat

SEQ ID NO: 384699 - DNA, 74 bp, Homo sapiens
aactgggtactatgtagagaagcctgctgagggatgcccaagaagttccagggtgagaacaccaagtcggcagc

SEQ ID NO: 384700 - DNA, 100 bp, Homo sapiens
gagagcgcgagagatggagatgggcagacggattcatttagagctgcggaacaggacgccctctgatactatgtcttcagcagtggtgcagttatatgca

SEQ ID NO: 384701 - DNA, 83 bp, Homo sapiens
cagaaaacccagacactgatgtgccacacctccctggatgatccaagatgaagaatacattgctgggaaccaagaaataggac

SEQ ID NO: 384702 - DNA, 100 bp, Homo sapiens
tgagagtgaccctaatctcttcgttgcactttatgattttgtagcaagtggtgataacacactcagcatcactaaaggactcagaattcatgattgaaga

SEQ ID NO: 384703 - DNA, 98 bp, Homo sapiens
ccagtttggccaaggagatgtacagaatgggccaagctccactgttcagatgcaaaggacagtcattttgtttactcattcagccctgttgcaggtcc

SEQ ID NO: 384704 - DNA, 75 bp, Homo sapiens
ctgcttatggcggcgctggagagggggcgctgagctgttggggttgggcccgaaggcatcctgcagaacggggct

SEQ ID NO: 384705 - DNA, 90 bp, Homo sapiens
ggaaggattgtctaatgatggagaaacaatggtaaatgtgccacatattcatgcaagctcatcatgtcactacagtgaacagtacaaatt

SEQ ID NO: 384706 - DNA, 82 bp, Homo sapiens
gtctttccgtcctctgaggcgacggccgcggctgcacaggtacatgtcccagagcaagcacacggaggcccgggagctcatg

SEQ ID NO: 384707 - DNA, 100 bp, Homo sapiens
ttatggtgcagagattgtctcggctcttgagtacttgcactcgcgggacgtggtataccgcgacatcaaggctgggacgcagagaccggcagcgattcgg

SEQ ID NO: 384708 - DNA, 83 bp, Homo sapiens
cagttctgctggtagatatgttaggagacgctgcaaaccgttgaaggaggagacatcacagctttcccagatcgggaggaaaa

SEQ ID NO: 384709 - DNA, 76 bp, Homo sapiens
agtgcgtcaatcagagcgtcctgtgcggccgccatggcatcagatgaaggcaaactttttgttggagggctgagtt

SEQ ID NO: 384710 - DNA, 75 bp, Homo sapiens
agtttggaaaatggcatcatcccaagaaggtggagccgccaccaaaatgcagattttcgtgaaaacccttacggg

SEQ ID NO: 384711 - DNA, 100 bp, Homo sapiens
taaagaaaggcgagctgacccaggaggagaaggagctactggaagtcatcgggaaaggtgctggagaatctggtaaaagcaccattgtgaagcagatgag

SEQ ID NO: 384712 - DNA, 82 bp, Homo sapiens
gagcgggctcgcggcgctgggttcctgaaagaagtggccctggagagacccccttcagatgtgaggaacgctgtgctgcctt

SEQ ID NO: 384713 - DNA, 75 bp, Homo sapiens
gcggaccatgggcgacaaagggacccgataaagaaatgggggctcagagcagtcaagaacatgccccaagttatt

SEQ ID NO: 384714 - DNA, 100 bp, Homo sapiens
ttgggatcccccagttccaaagtgtcttaaagatcagagaaacctgggcatgtctatgcgtgtggaacgttccaccctggatcaggtgaagaaacgtttt

SEQ ID NO: 384715 - DNA, 82 bp, Homo sapiens
ctgtcttcggtggactccttcggcagtccacccaccgccgccgcctcccagatgcagtgagtgaggggggggccatggcgga

SEQ ID NO: 384716 - DNA, 96 bp, Homo sapiens
ggacgactgggaccgggacctgctgctggacccggcctgggagaagcagcagcgcaagggctgcccaggagctgcaggacaagcaccaggagcccc

SEQ ID NO: 384717 - DNA, 87 bp, Homo sapiens
ccctcgtcgcgcctgccgcgcggagagataagaaggccaatgatgaggccaatcagagtgatacaagtgtctccttgtcagaaccca

SEQ ID NO: 384718 - DNA, 100 bp, Homo sapiens
cctcatggtatatttgcagccagtactctatatgaacaatccgtctggatcacggatgtaggaagtgacaccaactctacaacattacctgtcatatact

SEQ ID NO: 384719 - DNA, 74 bp, Homo sapiens
cagtcccagcgctgtcgtgctcctctactcgtacgaattggagcaatgttggcttatacacctctggatgagaa

SEQ ID NO: 384720 - DNA, 75 bp, Homo sapiens
ctgccatgatgatttccattgtgggagactaaggtgtcagtatgttcttcaagctgctctgctcctgggcccaag

SEQ ID NO: 384721 - DNA, 82 bp, Homo sapiens
gcaggaggtgcaggcgagggtgcagagcctggagagcatgccccggccccctgagcaggtttggtgcacctcgatttggagg

SEQ ID NO: 384722 - DNA, 50 bp, Homo sapiens
tggcaggaggcaaattgtgcaagatctagtttgaagcactaagaagaata

SEQ ID NO: 384723 - DNA, 100 bp, Homo sapiens
gcgccaaggacatcaagaagatcttggacagcgtgggtatcgaggcggacgacgaccggctcaacaagcttgagatcttcttagcccagagagcagtgga

SEQ ID NO: 384724 - DNA, 100 bp, Homo sapiens
tgggactgaagagggacgggtcccgcggcgagcgagctcctgaggtacggcgtcgggatacgtaggtaacctttccagagatgtgacagaagtccttata

SEQ ID NO: 384725 - DNA, 75 bp, Homo sapiens
caactttccaagtctggggatggccaggcattgatggccttccgggatgtggctgtggccttcacccagaaggag

SEQ ID NO: 384726 - DNA, 101 bp, Homo sapiens
gtttgatgtaaagtacttaggagaagcacatgaatggaaccagaatcgtgaatgcagtaatagtggccttgtcttcaaaatcatgggatgtagagactgca

SEQ ID NO: 384727 - DNA, 83 bp, Homo sapiens
tctggagcggttgtgcgatcagatcgatctaagatggcgactgtcgaaccggaactgtggctgcaccatctgtcttcatcttc

SEQ ID NO: 384728 - DNA, 100 bp, Homo sapiens
aagttctaattgagttttctctcctgcgtctggagaatccagatgaggcttgtgctgtgtcccagattatttgcatgggtgcaaaagaaaatggtttgcc

SEQ ID NO: 384729 - DNA, 99 bp, Homo sapiens
aaatgcagaaaaaagatcacaagcaactctggatgggattgcaaaatgaaatctcctgcaaagaagctgagccatgcaattagtaaatctttggggtgt

SEQ ID NO: 384730 - DNA, 100 bp, Homo sapiens
gatcaggtggaacagattcagaaggagcaggattaccaaaggctggatgccctggagttcctccatgagaatgagtatgttcatggaaatgtgacagctg

SEQ ID NO: 384731 - DNA, 75 bp, Homo sapiens
cgaagagagtcaccgaccatgacgggtggtccacaattagtgaaaatctgtttgcaaccactggttatcctggca

SEQ ID NO: 384732 - DNA, 100 bp, Homo sapiens
ctgcccggcgcttcggcccgggccgctcaggtgcagccgacatcggcctggctgcctggggacgcaaggccctggacattgctgagaacgagatgccggg

SEQ ID NO: 384733 - DNA, 96 bp, Homo sapiens
ttaccatggcgaggagtctctgtccgggggcctggctaaggaaaccctattacctccagagcaaatcatggaggaagataaaaaacatggtgcact

SEQ ID NO: 384734 - DNA, 100 bp, Homo sapiens
agattgaaggaaggtgatacaatgatggggcagcaagtggccaagtgtttgagaagctgcagctgctcaaccctgaaatagaagcagaacaaatattaat

SEQ ID NO: 384735 - DNA, 80 bp, Homo sapiens
aagtcccacgcgttcttccgcagcatagactgggacttggtgggctttgggctggagcatgtgtcccgcgagcagatccg

SEQ ID NO: 384736 - DNA, 75 bp, Homo sapiens
ctcccccagactcgggctccgaggcctactccccccagcaggtgaatggcacagagtaccaagacattgagactg

SEQ ID NO: 384737 - DNA, 97 bp, Homo sapiens
cctgctcctgtcttccattgaggcagaaggaatataaatagtttctggaaaggacactgacaacttcaaagcaaaatgaagttctttctgttgcttt

SEQ ID NO: 384738 - DNA, 100 bp, Homo sapiens
cagggggtcggctgccaggtacaggtatatgtattttaccaatcttcaggaaaggtctcctaaaattgaacgggctgctttggatgggacagaacgggag

SEQ ID NO: 384739 - DNA, 90 bp, Homo sapiens
tagaatctgggactttcttcgttgccatgaggaaagaattctccgagctagtgagacctgcaacgacttccacccgatgttcttcaccca

SEQ ID NO: 384740 - DNA, 96 bp, Homo sapiens
gcagccgccctccatcctctacgggggcaggccaagacaatgcaaactccagtgaacattcccgtgcctgtgctccggctgccccggggccctgat

SEQ ID NO: 384741 - DNA, 97 bp, Homo sapiens
tgaaacagctgctgatccagaggagcttgctaaggaccaagagggcggagcgccagcagccctgtggtggcgacgacgatggaccaggagccagtgg

SEQ ID NO: 384742 - DNA, 75 bp, Homo sapiens
gttaacccttaccacccagcagcagggcatcaagtgagcatttgtcctgtgctttcacattctttctgcatggag

SEQ ID NO: 384743 - DNA, 123 bp, Homo sapiens
ctgcatttgacaaaggtgatgatcgaagacttggcaaaaagcctatattcagtagctcgcagcctgttcccagaacattgacgtctatactagaatgcctgattattgctcattcagttggag

SEQ ID NO: 384744 - DNA, 75 bp, Homo sapiens
cttctcagctctactgaaagtcgagaaggccttgcacagcaattggttgaatctggcgatgtggaacccatggat

SEQ ID NO: 384745 - DNA, 75 bp, Homo sapiens
cgagatttcgttcacccgggctccacaggcgttatgtttggtggaagaaaagtttggaggtttggacaaaagacc

SEQ ID NO: 384746 - DNA, 121 bp, Homo sapiens
ggccgctcggcccccatgcctgcccgaccgcgctgccggagccccagacttcccaagtaagaagcggaagaggagccgctggaaccaagacacaatggaacagaagacagtgattccagga

SEQ ID NO: 384747 - DNA, 97 bp, Homo sapiens
tagctttccggctctgttggacagtgatgtgaagaggttcagctgtcctaatcctcactgccgaaagttcctgagggaagacctcaattaccatgac

SEQ ID NO: 384748 - DNA, 75 bp, Homo sapiens
tggactctgccgacaccggagagaggtaacacgtacacagacctctcggccggaatctccagggatgaccagccc

SEQ ID NO: 384749 - DNA, 100 bp, Homo sapiens
gaggaaatagtggcaggtgacagtctgcatgtgcagttttcaggttagctcccagcgatgccagatgggatcagcacagccctgcctctgctgctaattg

SEQ ID NO: 384750 - DNA, 139 bp, Homo sapiens
gcaccatggacagcgtgcggtctgggccttttgggcagcttttccggcctgacaacttcatctttggtatgggtgagagtaactgtgcttggaatagaaaagccctgctgcatcgagacacaatgctggcagctgcggc

SEQ ID NO: 384751 - DNA, 100 bp, Homo sapiens
ctgctgaagatggtgaaggagctggagaagcacggagttcgggggatggcacagaatggggcattgaacctggccacatcccaggtaccgtgaacatccc

SEQ ID NO: 384752 - DNA, 73 bp, Homo sapiens
gttcttccataaagaaaatgattggggattttccaattttatggcctggagtatggattttaactaggaatta

SEQ ID NO: 384753 - DNA, 101 bp, Homo sapiens
acagaaagagtcaacagcagtggcaacagatcttatgccttcattcatccggcatggtccaacaattccaagacgaactgatatctgtcttccagattcaa

SEQ ID NO: 384754 - DNA, 114 bp, Homo sapiens
tggagggctgagcagtcaactcaaatgcaagtccaagaggaggaggaggcggaggtccaagcggaaagagttgcatgctgagaatttgaaaaatgaagatgatgtagacactgg

SEQ ID NO: 384755 - DNA, 80 bp, Homo sapiens
gggacttccagacactggaaaactggatgctgcagacactgaacgaggagccagtggaacgtggctgaagagcggtctgg

SEQ ID NO: 384756 - DNA, 100 bp, Homo sapiens
ccatcggggaacagttcacagactgtgccgcagcaggttcatgcatccaggagcatatgcaagatactgaacagttccgtcactacaaagatctcttgtg

SEQ ID NO: 384757 - DNA, 105 bp, Homo sapiens
caagaagaactctgaagatgattcagccttctgcatctggatctcttgttggaagagaaaatgagtggtttgatgataagaacccaatttgggccgggcgcggtt

SEQ ID NO: 384758 - DNA, 75 bp, Homo sapiens
tgctaaacagagaatacaagaggattatcttagaattttaagatacttcagacttctaggccactgggaagaagc

SEQ ID NO: 384759 - DNA, 100 bp, Homo sapiens
gagagggattcgtggtgaaggtccggggcttgccctggtcttgctcggccgatgaagtgcagaggtttttttctgccactgaagatcctggtgtcgccat

SEQ ID NO: 384760 - DNA, 99 bp, Homo sapiens
ccacctctgcgtttttccctccaggattacggggcgctgaaagacatcgtgatcaacgcaaacccggcctcccctcccctctccctgcttgtgctgcac

SEQ ID NO: 384761 - DNA, 98 bp, Homo sapiens
tcagggatcggtctggaaactgtgttccctgcaaccagtgtgggccaggcatggagttgtctaaggttgacaggactgaggtgattcgcacctgcata

SEQ ID NO: 384762 - DNA, 100 bp, Homo sapiens
cacattggcttccaggccctgcaccagttctgtgctcagcatggccggccacctcggccccgcaatgaggtgggatgcagatcttcgtgaagaccctgac

SEQ ID NO: 384763 - DNA, 100 bp, Homo sapiens
cggtcgctttcggtctctcagcggccggtttctgcgtccgctgccgcaggttccaccgcgctccaggtgaatgaaaactttgccattgatttgatagcag

SEQ ID NO: 384764 - DNA, 75 bp, Homo sapiens
atgcagcagtggatacacgggggacagctgtgatcgaggagtgaaagggaagcaatgcagaaatcagagggctct

SEQ ID NO: 384765 - DNA, 75 bp, Homo sapiens
aactccaagccaaaatcacagctttgagtgagaaacagtgttctcaggcgctgtggtctcaccttccactggggc

SEQ ID NO: 384766 - DNA, 75 bp, Homo sapiens
cgtggagtgacggtcccacggcagcgcgagagcgaagaggaactttactcctcctgtcgccagctgaggaggcgg

SEQ ID NO: 384767 - DNA, 71 bp, Homo sapiens
tgcagattccacgccatcggctgcctcgagacgggatcgactacaagaccaccaccatcctgctggacggc

SEQ ID NO: 384768 - DNA, 80 bp, Homo sapiens
cagaaggttgtgactttagtatacaccttcacagttgttgatcacatagcatggtcatccactcacagcttaaaaaaata

SEQ ID NO: 384769 - DNA, 75 bp, Homo sapiens
gggaatttcaggtcatgtgcacagattaatggctggatccatggcagggactggtttggctgaaagacaaagaag

SEQ ID NO: 384770 - DNA, 90 bp, Homo sapiens
gaagcctgcatttctgcattctgcttaattccctttccttaggtatcagcatagtgttgagtgggcagcagagctgatgcgtagacaggg

SEQ ID NO: 384771 - DNA, 83 bp, Homo sapiens
gccggaaggctccctcggtcgcgagtatctccgtttcctggatgtgaacattgcagccaaaattggaggcgatgctgccacga

SEQ ID NO: 384772 - DNA, 83 bp, Homo sapiens
aagagagctcagccacaatctactgctccatacggaaacctcagattggaaccaaccagatggctgtgtgtgccaaagcacag

SEQ ID NO: 384773 - DNA, 100 bp, Homo sapiens
tggacagctctcagtccacactcccaaaagggaaagggaactctaatgatccaggacaaagaagttaccctggagtatgtatcaagcctggatttttggt

SEQ ID NO: 384774 - DNA, 101 bp, Homo sapiens
gaaggtcctgggagagaagggaaagaacatcaagattatcagcaaaatcgagaatcatgagggggttcggaggttgatgttgaacagcacactttagccaa

SEQ ID NO: 384775 - DNA, 135 bp, Homo sapiens
cctggtctggcgggggtcaagatcgccgaagtagactgcactgctgaacggaatatctgcagcaagtattcggacttgttctttaagtacacctggaataactttttgcacttccaagtggaactatgcatagcc

SEQ ID NO: 384776 - DNA, 100 bp, Homo sapiens
cgtctgtgttgctggtagtttctgagttcaggtcctgggtgctgggaggagacagctgcctgcagagtgacggagtctcgctttgtcgcccaggctggag

SEQ ID NO: 384777 - DNA, 74 bp, Homo sapiens
gaggacgccaggtggacacgcccatccttggacttcctgaaaatgacccagaccgttggtcccaggaagacatg

SEQ ID NO: 384778 - DNA, 75 bp, Homo sapiens
gcctccgcgggcccaccccgcacccagcatggggagcctgagaatgaacagagtatctgtcaggcaagagctgct

SEQ ID NO: 384779 - DNA, 75 bp, Homo sapiens
gattgccctgtaaccgccatgcagaagaaatctggctatcatatggttccccctggaagtcctgggcccattact

SEQ ID NO: 384780 - DNA, 75 bp, Homo sapiens
gtggagccgccggagtctgagaagaatctacctgttactcgtattttggacaatcttatggagatgaagtcaaac

SEQ ID NO: 384781 - DNA, 75 bp, Homo sapiens
tgcacagtcacctcgagaagatgaagaaagcagcattcagattctccgggcccaaagccgaagtgcaagtggaag

SEQ ID NO: 384782 - DNA, 74 bp, Homo sapiens
tgacaacttcggtcgtggaggaaacttcagtggtcgtgggtttttaatgaccacaacaagcaagcatgcagctt

SEQ ID NO: 384783 - DNA, 98 bp, Homo sapiens
tgtgatgccattccagcactggactcatggaggctgagcatttattcagatgagggttactaccagggtggaaaatttcagtttgaaactgaagttcc

SEQ ID NO: 384784 - DNA, 75 bp, Homo sapiens
acgtcagaagaggcctgccatactacattcgcttaaattttgcagagaaagggaaaagagtgcaaattcggaaag

SEQ ID NO: 384785 - DNA, 83 bp, Homo sapiens
gcatttcaagaagaacaacctaactccagatatctacctaattgattgcttccccgggcgctgcctggacaggcctgcctgcg

SEQ ID NO: 384786 - DNA, 100 bp, Homo sapiens
cgcccctccagccttcgagtcgttcttgctcttcgagggcgagaacaggggacctcctcgcccacgacctgccccagcagttggagaggctgaagataaa

SEQ ID NO: 384787 - DNA, 75 bp, Homo sapiens
cagatctttagaccagacaactttgtatttgactatacttgtagcaagcagaaacatcgatctaatacaagacag

SEQ ID NO: 384788 - DNA, 83 bp, Homo sapiens
acatgcctcaccctcatctatatcctttggcagctcacaggagctctgtctgatccgcttccaccccgccacagaggaagagg

SEQ ID NO: 384789 - DNA, 100 bp, Homo sapiens
agaaaggtccccctggagaggatggagccaaagggagcgtgtgtccccagttgtcctcatccagggtgctattcgagtccagcctgaagggccggctccc

SEQ ID NO: 384790 - DNA, 74 bp, Homo sapiens
caggagcttttcgccttcaacaaggaggctgtgcagaaggtatcctgcagaccatgaactgagcactgttccca

SEQ ID NO: 384791 - DNA, 82 bp, Homo sapiens
gctgcaccgacctcgacgtcttgcctgtgtcccacttgttcgcggcctatagccgcggcgagtcctttgcacatgttggcaa

SEQ ID NO: 384792 - DNA, 98 bp, Homo sapiens
cgggagaaagtggagtccgagctgagatccatctgcaccacggtgctggctgaggccgcggaaggagcagggcacatacgccctgtccctcatctatg

SEQ ID NO: 384793 - DNA, 75 bp, Homo sapiens
ccatcctgagatccaaaattatgacagccttaaaagagggttcaggataagtttgaggtgctgaattacacaagc

SEQ ID NO: 384794 - DNA, 100 bp, Homo sapiens
cctacgagtgcaacatctgcaaggtccgcttcaccagtttttgaaatcatgaatcctgtttatagtcctggatcttctggggttccctatgcaaatgcca

SEQ ID NO: 384795 - DNA, 75 bp, Homo sapiens
ggactactctcagcctactatctgtctggagaagaggaggtcccagatcccacaaagtattttgtcactcggtgg

SEQ ID NO: 384796 - DNA, 88 bp, Homo sapiens
agcagctgcttgccggccccaacacggaccttgatggcatccacagcgtcacggccttctgcaccctgcgtgtcaccatcatcacgga

SEQ ID NO: 384797 - DNA, 82 bp, Homo sapiens
ccccaagatggaagggagcggcggccgcgtccgcctcaaggcgcattacggggggttgtgaccgagattcccgacgagagag

SEQ ID NO: 384798 - DNA, 100 bp, Homo sapiens
ttcttccaaagtcgcccaggcaccttctccatgcattgcaagaacgaaaagggtcttggtcagagaggaggaattctagtattgttggcagacgatcact

SEQ ID NO: 384799 - DNA, 101 bp, Homo sapiens
cctggcctgccttgggccggggatttaacacaggtgaactccagtttgcttttgtgtgcttcctgctggggaatgtgtacgaggcatttgagcattggaag

SEQ ID NO: 384800 - DNA, 100 bp, Homo sapiens
tgctgagctacccgagcggcggcggcggcagcagcggcagcggcaagcaccttggctggggaacagaccagggaattggtggatttggagaagagccggg

SEQ ID NO: 384801 - DNA, 75 bp, Homo sapiens
gcggcggcggcgcggcgcaggcaccggcccggggagaggcaccatgagcggtactccaaagattcaggtttactc

SEQ ID NO: 384802 - DNA, 89 bp, Homo sapiens
ccacccgcgtacccggcgcagccagagccaccagcgcagcgctgccatggagcccagcagcaagaaacgcttcgttaagggactcaggc

SEQ ID NO: 384803 - DNA, 100 bp, Homo sapiens
tggatcaacccagagctattgccttagatccttcaagtggcggccctccaggcactgaagcgtaagaagaggtatgagaagcagctggcgcagatcgacg

SEQ ID NO: 384804 - DNA, 101 bp, Homo sapiens
acctcctagtagaaaaagttcttgggacaaacttcatttggtgatgtacctgctcccccttcaccttctgccataattggaagcttcctgaggccctcacc

SEQ ID NO: 384805 - DNA, 75 bp, Homo sapiens
cggcgagcccttccttataggcgtcagcgggggaacagctagcggcaagactcaagaatgaacaatccgtcagaa

SEQ ID NO: 384806 - DNA, 96 bp, Homo sapiens
gaaagtttgcagaagtggaaggagcagaacgtgagggtgtaacttacaaaaagatgtgaagttcatttccaatccgccctccatggtggcagcggg

SEQ ID NO: 384807 - DNA, 82 bp, Homo sapiens
ggtcgccctcaaggccatgatcaaaacggcagctgtgcggagggtagtggcagccatgaaccggatggaccagaagaagcac

SEQ ID NO: 384808 - DNA, 49 bp, Homo sapiens
gacgacgaggaagaggaggtttctgagaatgaagaaggagccccacagg

SEQ ID NO: 384809 - DNA, 96 bp, Homo sapiens
gctagactagcgggggcagcctcagagcgggtgagcttggggacgcacggagaggtgcagctggctgctggagccagttctgcttctcggcaagga

SEQ ID NO: 384810 - DNA, 75 bp, Homo sapiens
tggcccgcagccgccacctacccagtgaccatgataggtgctggcattgacggagtggaggaaattaagcgccat

SEQ ID NO: 384811 - DNA, 50 bp, Homo sapiens
gtggatgtcggcgaagccgcgggcgagggtctactgacattcagggatgt

SEQ ID NO: 384812 - DNA, 100 bp, Homo sapiens
tcttgccaaacagaccttgaaagacaaaactggcactgattcaaattcaacagaatcctctgaaacttccacagatatgggacccgtacacatggacttt

SEQ ID NO: 384813 - DNA, 102 bp, Homo sapiens
acaaagaaactctacttgtgcatgagaagaaagaagcagttgacctcactcaatatattctgcaggtaatttatcctcagcattccaaacttactgacagag

SEQ ID NO: 384814 - DNA, 83 bp, Homo sapiens
tgttcattcatctggatcttcagatgcacatgcttgaagtagaaaatgccatgatgagaaaaactattaaaaaacaggatgac

SEQ ID NO: 384815 - DNA, 100 bp, Homo sapiens
tgtggacatctgctgccggaaggggtcccgaagccccctgcaggaactctacaacccaatccagaacccttaggagaaatcttgagagtggacagcaatt

SEQ ID NO: 384816 - DNA, 74 bp, Homo sapiens
cggctatggccgtgccctggggctgagccctcaggtggaattctactaagtatcagtcggccctacaagacaaa

SEQ ID NO: 384817 - DNA, 90 bp, Homo sapiens
ctgcgttggggtctgcgccctaggatgcactgagatggtacatcaggataactgctcgtatcaggttgacaggactgaggtgattcgcac

SEQ ID NO: 384818 - DNA, 75 bp, Homo sapiens
agctgggtcaccggcttgaggggctgcgtgaggcgcggaggcaggtagctgcaatcaacccaaatcaccctcttg

SEQ ID NO: 384819 - DNA, 51 bp, Homo sapiens
atgcaggtctggagcatccctgtggctgctacaccccatgtaaaaagcgga

SEQ ID NO: 384820 - DNA, 100 bp, Homo sapiens
ctgtagaatcttgaggggtctccatccagatcagctgaatcagagtttgcattgttaacaaggttgggggccgtcccgctcctaaggcaggaagatggtg

SEQ ID NO: 384821 - DNA, 80 bp, Homo sapiens
ccatattgtgtcttccccggccggtccctcgcctcccggccgagctgacgcttcaggatgagttagagaaaggtgaacgg

SEQ ID NO: 384822 - DNA, 82 bp, Homo sapiens
ggaagagcaaccatttgaaccatcatgatcgggagggtttactgagcatggcaaatgcaggccgcaacacaaacggttctca

SEQ ID NO: 384823 - DNA, 75 bp, Homo sapiens
gagctttgaaagaacttgccagacttaaacaggtactgaacgacacctgggtctccttcccttcctggtctgagg

SEQ ID NO: 384824 - DNA, 98 bp, Homo sapiens
ccagttccgcgcttgctcggcagtcacgttccggtcgcaatggaagaagagatcgccgcgctggtcattgacaatggctccggcatgtgcaaagctgg

SEQ ID NO: 384825 - DNA, 80 bp, Homo sapiens
tgcagatggactgggatggccgcgggaggctgctggtgaaggatcaactcactatcctgaaggtccattctcccaagaag

SEQ ID NO: 384826 - DNA, 100 bp, Homo sapiens
gctgcggacggcgctgcggtacatccagaagtgctggatgaagaagacgacgtcgaagacgatggagaagaccccgagtccaaacttggttgggtctccg

SEQ ID NO: 384827 - DNA, 97 bp, Homo sapiens
ttcagacagaatcttttccaggaggttggggacaccctaggagacagcagcagctctgttctggagttcatgtcgatgaagtcctatcccgacgttt

SEQ ID NO: 384828 - DNA, 90 bp, Homo sapiens
aaggattccttaggaccatgggagctgagccagatgaccaagatgctccagatgaacatgagtcgcctccacctgaagatgccccattgt

SEQ ID NO: 384829 - DNA, 111 bp, Homo sapiens
ggaggagctgtgcagccgcgaggaggcgcgggaggtgttcgagaacgaccccgagacggtcttgaggaccggcccagctcaggctcctggggcagcggcgaccagagcagc

SEQ ID NO: 384830 - DNA, 100 bp, Homo sapiens
ctttggaagcagagtgaagaacacaatatgttgagatgtgctattttgacaacacttattcatcttgttcagcttctttgtgatattggccacagtgaag

SEQ ID NO: 384831 - DNA, 100 bp, Homo sapiens
cttcgacttagccctgctccaggaatgggacctcgagtcactgtgatctgcttggctttgaggaagagtggcagtactgcctcactgcataagggatggg

SEQ ID NO: 384832 - DNA, 98 bp, Homo sapiens
tttatctcaaggcctgagtagccggtaacaaacgagggttcccgggattggaccgacgcagccatgcccctcacaatctcctcaactgtttcatgatg

SEQ ID NO: 384833 - DNA, 100 bp, Homo sapiens
ggaagctgctaacccgacccggattggcgctgaggtggcccgtggggcaggacatagctcgccttttgcaagaaaaggagttacaggaagagaaaaagag

SEQ ID NO: 384834 - DNA, 75 bp, Homo sapiens
gacagacaggaatctgagggctctgacttacttgagccgggccagcacatggctcccagcccccatctgaccgtg

SEQ ID NO: 384835 - DNA, 96 bp, Homo sapiens
ccagcaagcggaagctgcccttcaccgcgggcgccaatggggagcagaaggactcggacacagggggaaatttgcagtggtgagaaaatgtataaa

SEQ ID NO: 384836 - DNA, 97 bp, Homo sapiens
aacgctttgcgtcccgacgcccgcaggtcctcgcggtgcgcaccgtttgcgacttgggtttgtgtttagtgaatcagagggatctgcattagaacag

SEQ ID NO: 384837 - DNA, 50 bp, Homo sapiens
tgtctcagcagtctacagcacggaacgtcaaggtcgtgggaaataaaagg

SEQ ID NO: 384838 - DNA, 102 bp, Homo sapiens
gctgcacccatggacgttcgccagtgggttgacacagatgattacattgcagtgaaggagaagtatgccaagtacctgcctcacagtgcagggcggtatgcc

SEQ ID NO: 384839 - DNA, 80 bp, Homo sapiens
agcgacggcggcagcggccggagccgggccgggcagctagcagggcgcttcggctctccactgtggtttgaatccacggg

SEQ ID NO: 384840 - DNA, 74 bp, Homo sapiens
tgtctcctggaaatgttatgcagctcagcaaggtgaagctggggccacaactttggtgaagaaggatatattcg

SEQ ID NO: 384841 - DNA, 100 bp, Homo sapiens
tcagcctgagccttctgtcacccaaagggctccagctggtttttcactcaggcctcactttatcttccaagatttggtgcttccagatgtgagttatcag

SEQ ID NO: 384842 - DNA, 98 bp, Homo sapiens
ggggaccgagcctgggaggccggccggtgccagcacctttcggcttctgagacggcggcagcagcggcattcagcaagagcctcctgatctagcagcc

SEQ ID NO: 384843 - DNA, 73 bp, Homo sapiens
atctgattcagaagcggatagtgacactgaggtgccaaaagaatgcccttctgcctgcagggttccggcagaa

SEQ ID NO: 384844 - DNA, 73 bp, Homo sapiens
gcaagatcaccgtgacatccgaggtgcctttctccaaaagattgctcatttagaaagtggatgtgtgggataa

SEQ ID NO: 384845 - DNA, 75 bp, Homo sapiens
ccatttcgcctttatcgtggtggagtccaccctggctgtggtgaatgagtggcaggatgactggccgaccttttt

SEQ ID NO: 384846 - DNA, 97 bp, Homo sapiens
tggccagatgtggaaccatatccgtggacctccatatgctcataagaacccacacaatggacaagtgcactctacacccccaagtgcatatgggtct

SEQ ID NO: 384847 - DNA, 98 bp, Homo sapiens
acgtgaagaagctggcggccgacgcaggcaccttcctcagtcgcgccgtgcagcaccagatactgctacaccatctcatcggcatggacctatatgtg

SEQ ID NO: 384848 - DNA, 100 bp, Homo sapiens
tgtttggatgttggatctacactttctcaagcactgtgatcttcaaatgtgtcatggagaaactccagctgggcccagagattctgcagcgggaaaatcc

SEQ ID NO: 384849 - DNA, 100 bp, Homo sapiens
ccggtgccggcctagcgtcctggaattacttcaatcaagaatatgatgaagaatgggctaagaaaattcagagtgaaaagtttcgctggcataactctca

SEQ ID NO: 384850 - DNA, 94 bp, Homo sapiens
tgccgcgtctccgcgttcccagcccgggtccccgcgttcacagccccagcgcagagccagtcttggtgctctgtgttcacctggttcatctgag

SEQ ID NO: 384851 - DNA, 83 bp, Homo sapiens
ctctgactctcggactgagaaacgcaagcaaacggggattcagcgtccgatcctttggaacagggactcacgtgaagcttcca

SEQ ID NO: 384852 - DNA, 50 bp, Homo sapiens
ccgggaccggagaggaagcggagcttcggaaccaaaaagaagcttcccag

SEQ ID NO: 384853 - DNA, 88 bp, Homo sapiens
tgtacagacaactcatctcttacccacaggagaaagccaaagctgaaggactttggaaccttttcctacccttagaggctgatcccga

SEQ ID NO: 384854 - DNA, 100 bp, Homo sapiens
tcgacgtgcggcccgaatgccagcgcctcttctaccggggcaagcaggctccggtagattgcaaatgacctgctttctttctgttcccgggcgtttggac

SEQ ID NO: 384855 - DNA, 101 bp, Homo sapiens
cacaaattacattacccaatggtggaatattgtatacctgggcttgcagtcatgtctacagatcttgaagaagtggttagcagcattttgaatgtcaaaat

SEQ ID NO: 384856 - DNA, 100 bp, Homo sapiens
cttaaatactcatctactaggcaagcatggagttggcaccccaaaagaaaggagtccttcaataatgttaaacagtggctgcaggaaatagatcgttatg

SEQ ID NO: 384857 - DNA, 75 bp, Homo sapiens
gtggctctcacctgcttcctcctgggcgtgggctgccgatgctgacctgacctttgaccagacggcgtgggggga

SEQ ID NO: 384858 - DNA, 102 bp, Homo sapiens
agctgggagacaagcccgcgcccaacaccttctatgtaggctttatcctgtggataaacgcagagtgaacgagtttggggagtcctacgaggagaaggccac

SEQ ID NO: 384859 - DNA, 75 bp, Homo sapiens
agctgtggttgctgctgtgatatggaggaagaagagctcaggttctacaaactgcatgagcgcaagtgtgagccc

SEQ ID NO: 384860 - DNA, 100 bp, Homo sapiens
tctatggttgtatgtgccagtaatgaagatcacaaaatcgcttatgacccttctttgtcttcgcactctctgctggatgaaccgaatcctaacagtccag

SEQ ID NO: 384861 - DNA, 78 bp, Homo sapiens
gagaagctgcatcccagaggagcgcgtccaggagcggacccgcttcggaaccaaaaagaagcttcccagagccggggc

SEQ ID NO: 384862 - DNA, 75 bp, Homo sapiens
gcgagcggacggctgcatttacggggtctcccggagggccagagtcggcattcccatcaagagcaccatggacaa

SEQ ID NO: 384863 - DNA, 82 bp, Homo sapiens
ggtgctgtttgaaacgtctgtgggttacgccatctttaagcttcgcagaatcaagaacggctatgtgcgtttaaagatccgt

SEQ ID NO: 384864 - DNA, 99 bp, Homo sapiens
gggcctttccagcccgtggtccttctccatattcgaggatcagttcttaagagcagccccggtaactggaggaatgggagccgttttgatgagaaaaat

SEQ ID NO: 384865 - DNA, 100 bp, Homo sapiens
tccggggcttgccctggtcttgctcggccgatgaagtgcagaggtttttttctgatttccaaatctgaagtctgtccgagaactcattttgaaacgtgga

SEQ ID NO: 384866 - DNA, 90 bp, Homo sapiens
cccgggtcatctccagatgctagggttatgggtgatcatttgaagatctgtccccagggttctacctgctgctctcaagagatggaggag

SEQ ID NO: 384867 - DNA, 82 bp, Homo sapiens
tatcaggtcattaggatgctgtcctacggaaggagagctgcatgatctgattgcagagaacatgccagcagaagcattcacc

SEQ ID NO: 384868 - DNA, 100 bp, Homo sapiens
ctttatttctgttatcttactgtgactgtaaaatctttaaaatttgcttagttgtcaccaaagagtttttcagaagaagtgaagtcaagatgaagaacca

SEQ ID NO: 384869 - DNA, 75 bp, Homo sapiens
gagagaggagaacgaacatcttctggacctttgtccaggtgcagctgaatgccggccagctgcagtatatccgct

SEQ ID NO: 384870 - DNA, 100 bp, Homo sapiens
agtagtggaagatgtaaagcaatatttcgagcagtttggcaagggagagacaaaggcagcgctgccctcgggggagtattggccctggcggaacgcagca

SEQ ID NO: 384871 - DNA, 101 bp, Homo sapiens
actttggtgccctcaacatctctcagagacgaaaggtctggagctgggcccccagccacagggtgtgctgcgggctgacattttctcaaggatgaggaccc

SEQ ID NO: 384872 - DNA, 100 bp, Homo sapiens
gggggcgctcaagctgcgaggatccgggctgcccgcgagacgaggagcgggcgcccagggtagctctccagctggaagccttgctgatgccatgtcccag

SEQ ID NO: 384873 - DNA, 82 bp, Homo sapiens
caagaaagacaaagacccagtgaacaaatccgggggcaaggccaaaaagaaggtgaaaggtgtagcagtcactcggcctaca

SEQ ID NO: 384874 - DNA, 82 bp, Homo sapiens
aggattttattactggcagcatgtatatctttttggtggacttgctttgtgaagagacagttcatgaacaagagtctttcag

SEQ ID NO: 384875 - DNA, 100 bp, Homo sapiens
gcttgtccccgttaggtgacaataagcagacagaagagccaagcagctatggaggaaaatcaggagcttactccacgggaacagcctctagataatctga

SEQ ID NO: 384876 - DNA, 100 bp, Homo sapiens
ctgctgttgatgctggctttgttcccaatgacatgcaagttggacagacgggaaaaatagtagcaccagtgtgcaactgaggaacatggctcaagaaact

SEQ ID NO: 384877 - DNA, 75 bp, Homo sapiens
actggaaactgattggaaactctttgggaaagccactcgaaaaggtggatctccttacgtagcagccaaaataaa

SEQ ID NO: 384878 - DNA, 90 bp, Homo sapiens
gtcgaagtcagcagacactagacaccctttggaagatcattaagtttcacggccttggaagtgagaaatttttccaaaatacggaattaa

SEQ ID NO: 384879 - DNA, 98 bp, Homo sapiens
aaaacgccacctatgtccccagcttgtgaggacacagcagccccatttcgctgcaaactcctgcccctccagcccccggggagcggggtcttcagggt

SEQ ID NO: 384880 - DNA, 100 bp, Homo sapiens
ccccaaggtctaccaagagacatcagagatgcgctcggcaccaggcgggtaaaggcatgacttcctggcaccacagggaaaatcgggtgcaagcccagaa

SEQ ID NO: 384881 - DNA, 75 bp, Homo sapiens
aacaatccagaatttgtggaggatctctctcaaggtattggcatactccacacatctgtaccattcttgagtgat

SEQ ID NO: 384882 - DNA, 74 bp, Homo sapiens
gaaatgggaatgtacacgataattaaagagtaaagttgtgctcaacgatatggtgtaagatacttcttcaagat

SEQ ID NO: 384883 - DNA, 90 bp, Homo sapiens
aaccagcatttagagctgtttatgaagcactgagaaatgtccttgaatgggcaagagggcacatgaagtacggcgtcctccacattcacg

SEQ ID NO: 384884 - DNA, 98 bp, Homo sapiens
tctttggtcatcaggagtcccagcctgcttcagagtggggccaagaagaaagcacaggtcagaagagatcaattctacagaaatttccagtggttctg

SEQ ID NO: 384885 - DNA, 80 bp, Homo sapiens
gttttctactgtaaagtcaccaacgagatcttccgccactacgagctgctctttggcgtaaattgcaatcgattagggat

SEQ ID NO: 384886 - DNA, 74 bp, Homo sapiens
gatgatgaagagcctagcacctcttatactgattgattctaccagaaaggaatgaagaacagaaccttcaggaa

SEQ ID NO: 384887 - DNA, 80 bp, Homo sapiens
ggcgtgcagcgcaaccacgagacggccttccaaggtcttgttgcagtaggagaaagagcacaaaagaggtctgggaactt

SEQ ID NO: 384888 - DNA, 92 bp, Homo sapiens
cgagtcccagaaggcggcgatcctgggctgcgggcaaggcggactgcctcaacttcagtggaacaagtcagagaaaggagttatcagagagc

SEQ ID NO: 384889 - DNA, 50 bp, Homo sapiens
gtttgtggatcgctgtgatcgtcacttggacatggaggagtgaatcagct

SEQ ID NO: 384890 - DNA, 80 bp, Homo sapiens
ctcattcaaggttacccagttgttaatagaagatgaaattgcaaccattcttaaatctacattgaaaggactagaatatt

SEQ ID NO: 384891 - DNA, 100 bp, Homo sapiens
agtggacagattgctgaccaggggcttgagagctgggttctattttccctcctcaaactgactttgcagccacggagagcaaacggggattcagcgtccg

SEQ ID NO: 384892 - DNA, 83 bp, Homo sapiens
tcccaggtgcccccggcctgcgctcccatccacacgctcgtttctgtgtttgaagaacatacgcaccttcctgaaagtctgcc

SEQ ID NO: 384893 - DNA, 80 bp, Homo sapiens
tccttttccctctccctttccctaagaaatcgagctatagcagattatcttcgttcaaatggctatgaagaggcatattc

SEQ ID NO: 384894 - DNA, 75 bp, Homo sapiens
gatgccctgcagtacctgcagaaggtctctggagacatcttcagcagtgctgacttgctcatcagttttgcacag

SEQ ID NO: 384895 - DNA, 100 bp, Homo sapiens
gtcccctttgtgttcacataatgctgtcaggaactgtgaccaaggtcaagctgaactagcagaaattccagaaggctatgtcccagaacactgggaatat

SEQ ID NO: 384896 - DNA, 101 bp, Homo sapiens
aaggaacctctacaacgaaggtgaagccacggaagataagctgtgccacgaccgtggctatctggtgacccaggacgagcttgaccagaccctggaggagt

SEQ ID NO: 384897 - DNA, 83 bp, Homo sapiens
aatcgtgatggatccttgatagtttcaagtagctatgatggtctctgatcatggaagggaagtggttgctgtgtatgttactg

SEQ ID NO: 384898 - DNA, 75 bp, Homo sapiens
tacaatcactacggacacaggattcatgcgcaagtgcagccgcggagccctgtacacaggcttttccatcctggt

SEQ ID NO: 384899 - DNA, 132 bp, Homo sapiens
tctcgaaaggaagggctctgctctacacactggtgtctcctgcggaagggcagctgggcacgccttccagaccgaggagcccagtttcctccaattgcagcacaagaccttccttttgttctaaaggctggc

SEQ ID NO: 384900 - DNA, 98 bp, Homo sapiens
ccggatcgggggaggggccgggcccaggagcctcagccccgccggcagccctaagggcaagggagtggagcttggtttcgggatctcggtgctgcaga

SEQ ID NO: 384901 - DNA, 76 bp, Homo sapiens
gaccagccgcacgccgaccggcgccgggagatcctgggtgtggatgaggtcaccattgtcaacattttgaccaacc

SEQ ID NO: 384902 - DNA, 100 bp, Homo sapiens
tttcaatgctgcgaaagctgccaaaagtgacatgcaggcacctaattacaacaagcatgcacattttggtgcattcaagaatggaaaatcagaatagcag

SEQ ID NO: 384903 - DNA, 82 bp, Homo sapiens
gtctctgccctcctggcgggcccggcggctctcactatccaggagaactacgatgacccgcacaaaacccctgcctccccag

SEQ ID NO: 384904 - DNA, 98 bp, Homo sapiens
atgacatcaacattctgaaatgtggcagtattcggcttggagaaaaggctgagggtaaaaagctgggattggtaggctgggtccagaacactgaccgg

SEQ ID NO: 384905 - DNA, 100 bp, Homo sapiens
tcagtttgtgcaggacaccgacatggaacagggactcactgggggtgggcacagggcccggcgtgggtttcaacgtcaacatggctttcaccggcggcct

SEQ ID NO: 384906 - DNA, 75 bp, Homo sapiens
gggagacccctcgggtggaagaagtggggccatacacctacagttccaagaagacgtctgtgtcaaacgcaggcc

SEQ ID NO: 384907 - DNA, 75 bp, Homo sapiens
ccgcagcgacatcaccaagctggaggtggacgccatcgtcaacgccggtcttgagtcaccacgtccgaatataat

SEQ ID NO: 384908 - DNA, 51 bp, Homo sapiens
cggaaaatgtagcttcccggttaagatgagcccattattgaagagccaagc

SEQ ID NO: 384909 - DNA, 51 bp, Homo sapiens
agtgcgtgggggaccggctgttggcgggtcctggagatgtggctgagctac

SEQ ID NO: 384910 - DNA, 75 bp, Homo sapiens
cacccagagcaacttccagtcctgcaagctccattcatggccttgctattttggaagctacaagaaaaaaataga

SEQ ID NO: 384911 - DNA, 101 bp, Homo sapiens
gggcgccgccgcggccgccccagaacccagcgggtgccgcttctccacccgaggcttccacctccaacgagccatgttccaggctgcaggagccgcccagg

SEQ ID NO: 384912 - DNA, 75 bp, Homo sapiens
agcgaagctgctgcggttcctgagccggagagcccgcagcttcatctcccagctcaaacaacacagcggccacaa

SEQ ID NO: 384913 - DNA, 75 bp, Homo sapiens
tgttggagaactacagaaacctggtctccctagctcctctggtgcaagtgtggtagctattgacaacaaaatcga

SEQ ID NO: 384914 - DNA, 90 bp, Homo sapiens
gaaaatgccaacgccgtgtctgaagatctgtggctgctgcattttgggctttgggatctacctgctgatccacaacaacttcggagtgct

SEQ ID NO: 384915 - DNA, 100 bp, Homo sapiens
gcgccccggccgaggtggcggcggctcctcagatgaggacggggacttggttgccttttccagtgacgaggaattgacaatggccatgtcctacgtgaag

SEQ ID NO: 384916 - DNA, 90 bp, Homo sapiens
gtctactctgtcgctcttgtgccctagcaccccgagaaccgtcagtttgagccagatggtgacacgtgcaccatggccggctacgcccgc

SEQ ID NO: 384917 - DNA, 51 bp, Homo sapiens
ccgcctacaggagtatgatgcaaggttggtgacatcgtgaaagtcacaagg

SEQ ID NO: 384918 - DNA, 90 bp, Homo sapiens
gctcctaaactgcttaaacgattatttctgttttcctatgcgactgctgcacaaaacaatacaggttttgctgttactgctcagtgtagt

SEQ ID NO: 384919 - DNA, 101 bp, Homo sapiens
ggagctaagagatatctgcaatgatgtactggacccagatgatgtggtaccagttggccaaagaagagcctggtgttggtgcatgtgctttggactagcat

SEQ ID NO: 384920 - DNA, 82 bp, Homo sapiens
tgatccagcaaggtcggcagagcaaggggcttacgcagaaggacctggccacggaaaaatgccagctgtgggacaaggagtg

SEQ ID NO: 384921 - DNA, 96 bp, Homo sapiens
tgagccaacgttcccagaagaaatctatacagctagtgttcccgaaatgtctgttgtaggttcgagaacttgtcttggacaattgcaaatcaaatg

SEQ ID NO: 384922 - DNA, 98 bp, Homo sapiens
ccggcggcgcgggcccggcggcggcggcagcggggtccgggtccggagcgccacagtgagtgaggactggaagtacgtcgccatggtgatcgaccgcc

SEQ ID NO: 384923 - DNA, 82 bp, Homo sapiens
gttaaaggcaagatcgacaccatgaaggaattctcaagaaatttgaggaagaagatttggatgacattttaaggaaaagatt

SEQ ID NO: 384924 - DNA, 96 bp, Homo sapiens
gcgccgtgtggcacgacacaaaaatcagacctacattgccccaccagctgccattttttacccatcgggtgctcatgacacgtcgaatgccacttt

SEQ ID NO: 384925 - DNA, 90 bp, Homo sapiens
ggaggagctgtgcagccgcgaggaggcgcgggaggtgttcgagaacgaccccgagacggacactcatgaggaccatgatacttccactga

SEQ ID NO: 384926 - DNA, 100 bp, Homo sapiens
ctgggattgtcgccgtgcacatggctggaggagcgtctctccgccactgcgcacattttgcagcctgcaccggccaacgagctgaagaagcaggtggaga

SEQ ID NO: 384927 - DNA, 96 bp, Homo sapiens
ctttgatccagaacttgcagcaacaatagggcgccctgcgtccggcagaggaggcgagcatcccgctcaggtgatgaggaacccctcgcgcaccca

SEQ ID NO: 384928 - DNA, 87 bp, Homo sapiens
aacaggcagaacagcagaaaacacctttaataaaacccatacattccactttctgtgaggaaaatagcagctgaatactatgacaac

SEQ ID NO: 384929 - DNA, 98 bp, Homo sapiens
gaacaatatctccagaagaaggtgtttcctaccttgatggaacagattaaaagggccaataaactgtttaccaatgattgtatatttctgaagaaaac

SEQ ID NO: 384930 - DNA, 90 bp, Homo sapiens
ccaacttcaaagccacagctgttatgccagatggtcagtttaaagatatcagcctgtctgactacaaagacggggtcttgctctgttgcc

SEQ ID NO: 384931 - DNA, 74 bp, Homo sapiens
tactcaagaagcatcagctattggagagagagatgttggctcgagagctcgatgctgccaatgtcaccaacagc

SEQ ID NO: 384932 - DNA, 90 bp, Homo sapiens
cagaaacataactgccatagtgaagcaacttaatcgggatatcgaggagtttcctttaacagtgtttacactcagatttggagagtcctg

SEQ ID NO: 384933 - DNA, 75 bp, Homo sapiens
gtcgcagggagcccaccgggcgggcctggccaagataaggagtcaggccagggcgggatgacactcattgattct

SEQ ID NO: 384934 - DNA, 89 bp, Homo sapiens
ttccaattcctgtgtttcatcataagaccaaggatgaatacttgatcaacaggtttatatatgaaacagaacatttcaatggtgttgct

SEQ ID NO: 384935 - DNA, 100 bp, Homo sapiens
gctgggcttgaacttcgtgagtttcgctctaaactgcccttgaaatgaagctggacttggagaggctgggaggcggcagaatgcagccagaggagggcac

SEQ ID NO: 384936 - DNA, 100 bp, Homo sapiens
ctcgttgcggccatcgccctgccggaccgcgcctcaggctcccccagagttgcatgctgagaatttgaaaaatgaagatgatgtagacactggactatta

SEQ ID NO: 384937 - DNA, 100 bp, Homo sapiens
tctttggtccccaggggccctcggcctactccgcaactgttttggggactaccatgtggccttctactttgccggtgtgccccccatcatcggggctgta

SEQ ID NO: 384938 - DNA, 100 bp, Homo sapiens
ggagtgctccgggcggcaggtcagccccgaagcgctggaagggaagatcctggctgttgctacgacgaggacttcaaccatgagccgtgtcagaggaagg

SEQ ID NO: 384939 - DNA, 98 bp, Homo sapiens
gggctatgtgcacccagatgagttcttccagtcccctgaggtgatggcagaagtcctccagctctgcatcttccgaggcctcggaaacctgccagtcc

SEQ ID NO: 384940 - DNA, 100 bp, Homo sapiens
aggcgatgccctccacaggtatggcagggagcaatggaccacagaaattctgcattgaaaaagttgggaaagaaaattggctacccagaagtcatacctg

SEQ ID NO: 384941 - DNA, 75 bp, Homo sapiens
cgtatggcggctcagcgatggggagctgctctttgagtgtgcaggccaacgtgcagcggctgaaggagtaccgct

SEQ ID NO: 384942 - DNA, 98 bp, Homo sapiens
gttcaagatgccccgggactgaggccgccctgcaccttcagcggatttggggattaggctcttttagccttcacagttgttgatcacatagcatggtc

SEQ ID NO: 384943 - DNA, 98 bp, Homo sapiens
tccggatactcagtttgtaaaaacatggcggatccagaattctggagatgcatttagaagatactaccagattctgtcccaaagaagaaagagaaagt

SEQ ID NO: 384944 - DNA, 82 bp, Homo sapiens
acctgcagcagctgagaaaggagctcggggactcccccaaagacaagcaaacggggattcagcgtccgatcctttggaacag

SEQ ID NO: 384945 - DNA, 75 bp, Homo sapiens
caatcagctgttgcatcttgcttctgagcaaggtgctggagaatctggtaaaagcaccattgtgaagcagatgag

SEQ ID NO: 384946 - DNA, 95 bp, Homo sapiens
ctatgacttgaggaggcgcttatatgtaatatttagaggagaagaaggacttgattatggtggcctagcgagagatgcccgagtggtaaaagaca

SEQ ID NO: 384947 - DNA, 80 bp, Homo sapiens
gtgttgctggaacggttcggataggtagctacagcaagctgggtagcaggcagatccaaaggatatcatgaagtttccag

SEQ ID NO: 384948 - DNA, 82 bp, Homo sapiens
catcatcacccaggcgcggagggaagacgccctggtgctcaccaagcaagacatgaagagtatttctggagaagaatcatcc

SEQ ID NO: 384949 - DNA, 87 bp, Homo sapiens
ttgtggttggcttctgttacgctaggaatatggcaaacggctcaccagcatttcagcttcaggatggttgtgagtacgtgtttatct

SEQ ID NO: 384950 - DNA, 100 bp, Homo sapiens
attgatttcccggatctggtaacatggcaaaagattgttcatccgcagggagcaggccaacaacatcctggcgagggtcacgagggccaattcctttctt

SEQ ID NO: 384951 - DNA, 76 bp, Homo sapiens
acaatagaattaaagcgcttccttctgggattggagctcaccatgagaaagatcagtctaaagaaaaggagaagaa

SEQ ID NO: 384952 - DNA, 90 bp, Homo sapiens
agctcggcccgcgggggagccccgggagccgcacggagtacttcttgcaagcagagctgacaagcaacgtcttaaaaacaggcgtggtgc

SEQ ID NO: 384953 - DNA, 100 bp, Homo sapiens
ggagcttttactgaagaataagagtctggttgataccattaagtgcctaattcaaatgggagcagcggtggaagcgaagtgactgcagcgccaagcggca

SEQ ID NO: 384954 - DNA, 75 bp, Homo sapiens
ccaggactccaaaatggcgtcagttggttgggggccgtcccgctcctaaggcaggaagatggtggccgcaaagaa

SEQ ID NO: 384955 - DNA, 51 bp, Homo sapiens
gccaagtccgccagcctcgctccaaggacctccacaaaaagtactcgtaca

SEQ ID NO: 384956 - DNA, 87 bp, Homo sapiens
cgaagctggccgagcaggctgagcgatacgacgcagcctcccgcgacgatgcccctcaacgttagcttcaccaacaggaactatgac

SEQ ID NO: 384957 - DNA, 100 bp, Homo sapiens
gttcagttgcaaaaagaaactggagccaccatcaagctgtctaagtccaaagatttttacccaggaaccagcagcacaaacactgttggggcaacagtga

SEQ ID NO: 384958 - DNA, 98 bp, Homo sapiens
tgccatctggagtggatggacacacctggttgctcagacaggccaatggtggcagagtctacatagaactatgcttcgtggtgttctggggaaaacct

SEQ ID NO: 384959 - DNA, 51 bp, Homo sapiens
gccttctaccccatgagaaagaccagttggaagatgctggctcaagtagtt

SEQ ID NO: 384960 - DNA, 100 bp, Homo sapiens
ttggcgcctttctcattattataggctccctcctgctgtcaggctacatcagcaaagggccaggcccagacatgtccgtccttgtaagttaaaagcttcc

SEQ ID NO: 384961 - DNA, 100 bp, Homo sapiens
tcagtgcgtgaggttggcgcggcgcagtcttcctgctttggcgttgtctctcagatctggaatcgatgtgtgaaaccaagttattatctctaaagaagga

SEQ ID NO: 384962 - DNA, 106 bp, Homo sapiens
cgctcgcgcctctcgatgggcagctcgcacttgctcaacaagggcctgccgcttgggggatatgagactttctactcggaatatcctgagtgttgcgtggatgtaa

SEQ ID NO: 384963 - DNA, 100 bp, Homo sapiens
cagtcaccgtgggtggtgtggcagctggaattgggggcctcgaggccaaggaggagcagcaggatgacacagtctacatgggcaaagtgaccttctcatg

SEQ ID NO: 384964 - DNA, 75 bp, Homo sapiens
aggttccagttgaccagcattcataggctctaagcgaaagacatgaggcctcagcctgaaatgaggttgttttga

SEQ ID NO: 384965 - DNA, 80 bp, Homo sapiens
gaaatcccaggctgccgcggctcctgtgtgctttgaagtgtactaatggtcacttgatgtgcgctggctgttttatccac

SEQ ID NO: 384966 - DNA, 100 bp, Homo sapiens
cgatgccatcactaaaccagacatggcctgagctgaatcagagcagtgagtccatgaaccagttcgaattgcctatgacaggcctcggggtcgtcccatg

SEQ ID NO: 384967 - DNA, 75 bp, Homo sapiens
gtcctgggaaaagcggtgctgcgggatagcaatggaaagaggtggaaccgtcccaaaatgtcccttgctcagaag

SEQ ID NO: 384968 - DNA, 86 bp, Homo sapiens
tccccggcagcgggacccggcgaagacgcgaccgcggcgcgagtcaccatgacaatgcagatcttcgtgaagactctgactggtaa

SEQ ID NO: 384969 - DNA, 82 bp, Homo sapiens
ttggactttccaaaaataaaagtatcatctgttactataacacctaccaggaggaagatgaagattttgaagaagaaagtga

SEQ ID NO: 384970 - DNA, 60 bp, Homo sapiens
aatccatgtttcttccaagaagcaggtgcaggtcttctgaacaaatgcctcctgaggatt

SEQ ID NO: 384971 - DNA, 98 bp, Homo sapiens
accagcctgagctcctgctttgcacagctttgccacaaagcccagtctgtgtctcaaatcaaccacaagctggagggggtgaagccagccagttttga

SEQ ID NO: 384972 - DNA, 82 bp, Homo sapiens
gtcatgagacctccaaacccctttggccctgtatcaggagcacaggtgcagagagagaataaactgtgtctaagactggacc

SEQ ID NO: 384973 - DNA, 75 bp, Homo sapiens
ctgagactccctgtcccggaccgcaggaactgtggctgcaccatctgtcttcatcttcccgccatctgatgagca

SEQ ID NO: 384974 - DNA, 100 bp, Homo sapiens
ttttgcaactcttttctagcacattggtgaacaattgtttgaccagacccaacatctacctcattccagacattgatctgaagttggctaacaaattgaa

SEQ ID NO: 384975 - DNA, 78 bp, Homo sapiens
gaacaactggtctcctcagccccaaccctctcagcacctgagaaagagtccacgctccatactcagagtgctcccttt

SEQ ID NO: 384976 - DNA, 131 bp, Homo sapiens
cgggcagcaggatggtggtggatgcggccaactccaatgggcctttccagcccgtggtccttctccatattcgagaggacgtcggtgatgaaggagaagaagaaaaagaattcatttcctataacatcaac

SEQ ID NO: 384977 - DNA, 113 bp, Homo sapiens
tgctcacgacagaaggcgtctcatggcgttggaataccggctctcagcggcttgggacacagcaggccaggaaagatttcgaacaatcacctccagttattacagaggagccc

SEQ ID NO: 384978 - DNA, 82 bp, Homo sapiens
ctgatcaagccaacaacagtgacggaatgcctccatacatgaaattcacagtatggccaacagcaagatgcataccagggac

SEQ ID NO: 384979 - DNA, 80 bp, Homo sapiens
tgctcttccatccgcctttgatcgtcttcctcttcagccatccagtttttcagaagaagtgaagtcaagatgaagaacca

SEQ ID NO: 384980 - DNA, 100 bp, Homo sapiens
cttcggactgcttcgcaaggaagcggggcggctgcagcgagtaggcggcggcggaggtttggggatatggattcctgtcagtgacgattattaatctggc

SEQ ID NO: 384981 - DNA, 82 bp, Homo sapiens
cgcggagcccggctcccgcaccatggaggaggacgacagctacgacccaacatgagtgaagtttcctgcaagaaacgggacg

SEQ ID NO: 384982 - DNA, 100 bp, Homo sapiens
ccagcgtggatgagggcgcctgcagatcccggctagggcacggaccgcctaggccgaggcattatattgtacttctagcaagtgcaccaacagaaaaaca

SEQ ID NO: 384983 - DNA, 83 bp, Homo sapiens
ccaagaaccaaccctgccagcacctggaccttggacattcagacttcagaatggtttggacttctcccactgagcatgacaag

SEQ ID NO: 384984 - DNA, 82 bp, Homo sapiens
tctggtggcagtgacgggcatcctggtgcagctcctggtgcgtggcccagcctcagagctttatcctgtggataaacgcaga

SEQ ID NO: 384985 - DNA, 112 bp, Homo sapiens
cggcgagaggaggccgtccagcagatggcggatgccctgcagtacctgcagaaggtctctggagacatcttcagcaggaaggaagcagccaccctcgccatggcctccccgc

SEQ ID NO: 384986 - DNA, 83 bp, Homo sapiens
ctcagcacagccaaggaacagaattagaagaaaaggaaccctggcctgagttgggacagaaataacccagagccctggaacaa

SEQ ID NO: 384987 - DNA, 100 bp, Homo sapiens
ggccctcctgctgccttggggtgacaatctcagctccaggctacagggagaccgggaggatcacagagccagcatgcctcttagcaatgcataccacgag

SEQ ID NO: 384988 - DNA, 98 bp, Homo sapiens
atttcaagatgatatttattcaccaaacaagatattaacctggctgcagagccaaaagtgaaccgaggaaaagcaggtgtgaaacgatctgcagcgga

SEQ ID NO: 384989 - DNA, 100 bp, Homo sapiens
ggcgttaggagtccgggggttcgcccgcggaggccggggagcagccgaccatggagccccagagatgctcgacatgcagcagaaggagaaatatatacca

SEQ ID NO: 384990 - DNA, 74 bp, Homo sapiens
gcctcggtggcgctgctgctctggtcgctgtcgagcctgcgagagcagaaggatgcgtctgttactagagtgga

SEQ ID NO: 384991 - DNA, 100 bp, Homo sapiens
gcggcagtgggagtcgtggagcacagaggacaagaacaccttcttcgaggggctgtacgaggttttgtcctggtcatcgggctcgtgactttctacagaa

SEQ ID NO: 384992 - DNA, 98 bp, Homo sapiens
aagagaaacaattctgggtgactcagcttcgagcttgtgccaaataccacatggaaatgaattctaaggagtgaagtgcaaccagtggtctgaggagg

SEQ ID NO: 384993 - DNA, 75 bp, Homo sapiens
ctgcatcctgctcctcttctacttggcctacatccatgaagacaggcgaagcatgaagcggaaggcactattcac

SEQ ID NO: 384994 - DNA, 101 bp, Homo sapiens
gccctgctggaccagctcatgggcacggctcgggacgaactaaagatgactcagagccatctggagaagaaacagtagaaaggacaaggaagccaagtctt

SEQ ID NO: 384995 - DNA, 100 bp, Homo sapiens
gaagaggagccgagcatctgggccgagaccattccgtatggagagccgggttgctccttgagggcaggacagttcttatggctttatccgttgcgtaagc

SEQ ID NO: 384996 - DNA, 82 bp, Homo sapiens
ggaaagacccaggagaagccgcccaaagaactgcagcccctgtcaaagggaacaggaagcagtccacggagggtgacgccct

SEQ ID NO: 384997 - DNA, 100 bp, Homo sapiens
ctttagctgaaatacttctgaagggttatgtggtccgaatcagtggtgggaacgacaaacaaggtttccccatgaagcagggtgtcttgacccatggccg

SEQ ID NO: 384998 - DNA, 100 bp, Homo sapiens
ccggcaaccattgcctgcggaaagatcgtgtcgcacacgcacctcggagtctttttcctgaaaccaagtacctctggtgacagtttacaaagtggaagca

SEQ ID NO: 384999 - DNA, 101 bp, Homo sapiens
tttagaaccccaacaataagaagcatcacacctttatctggaactccaggagcagtgaggagaatgaataccttccaagaccagagtggcagctccagtaa

SEQ ID NO: 385000 - DNA, 100 bp, Homo sapiens
attagcgtgaaaaccacaagcaggtccaaagagagaaggttggaaagaaccatgactgtattcaggaaggcacatgaactgaagcttctgtcagaatgcc

SEQ ID NO: 385001 - DNA, 76 bp, Homo sapiens
cctcagcaacctgacaattctgtcgtgtcccgagctaaagttgcagacaagatccagctcatcaataatatgctgg

SEQ ID NO: 385002 - DNA, 83 bp, Homo sapiens
gaatccctcacgcgggcgcggatcgaccggagcagagagctggcgagcaagatcgggagcggtgccgagaaaaatttccttac

SEQ ID NO: 385003 - DNA, 100 bp, Homo sapiens
gcagggacaggttgaggctgcaccaagagatccgtgctcagctcacagagcagatgaaatgcctggaccagcagtgtgagcttcgggtgcaactgttgca

SEQ ID NO: 385004 - DNA, 50 bp, Homo sapiens
aaagctaatattgctttatctgcaggcttctaagggaagaattccataca

SEQ ID NO: 385005 - DNA, 74 bp, Homo sapiens
ggaatatatcgcagtagttaaaaaactagatccaggttggaatcctcaggtcaaaatgcagatcttcgtgaaaa

SEQ ID NO: 385006 - DNA, 100 bp, Homo sapiens
tcgtgggtgcactcataggctcgtctggtgctatcctgtcatacatcatgtgtgtggaatctgaacctgtgatgttaagaaatcagtaaatattaaaaag

SEQ ID NO: 385007 - DNA, 98 bp, Homo sapiens
gtcggtgaccgcgcgactcggcgcccgcccgcgaactctactacgatcgcgggaaccaccatgagtttgtgtccctggtgaaggacctggcccggcct

SEQ ID NO: 385008 - DNA, 96 bp, Homo sapiens
ggacagcgcgaggtccgcgcagcccagcgcagccataatgattacggacctgaagccaaagaacaagatgcgctagtggacagattgctgaccagg

SEQ ID NO: 385009 - DNA, 75 bp, Homo sapiens
ttacagaggagcccatggcatcatagttgtgtatgatgtgacagatcaggcttcgaacctaatgaacaatcccca

SEQ ID NO: 385010 - DNA, 102 bp, Homo sapiens
tatgctatttttttgtggagacttgctgagcagatttatccaataatggacaagtcaagccgcacacgtcttgctctcattatctgcaatgaagaatttgac

SEQ ID NO: 385011 - DNA, 112 bp, Homo sapiens
agcgacttctaggagcctggggttcggcgctatggaggagctcgatggcgagccaacagtcactccagatccaggctcctggaagaaccatgtccggcagctactggtcatg

SEQ ID NO: 385012 - DNA, 48 bp, Homo sapiens
gacgaccgacagggtggtgaaaggcatgtactggcattgaaaacattg

SEQ ID NO: 385013 - DNA, 50 bp, Homo sapiens
tgacgcccaccctcaatggcggtgaaacccagggccccaggaaacctgac

SEQ ID NO: 385014 - DNA, 82 bp, Homo sapiens
tcagctgatcctcctcctgcaatttgggttgcaacaactaagtctacagtaaataaatggacattgttgaatagtcagttag

SEQ ID NO: 385015 - DNA, 82 bp, Homo sapiens
agaaagtgttgcagcgtttatagcagtccttggcattctttccattattgcacaggagttcatgatcaagtgttgcccacac

SEQ ID NO: 385016 - DNA, 98 bp, Homo sapiens
ttggactgaagaacgctggaataggttacaagaaatcaatatattgtggcaggaattattggaagaacaggataaaagaatcagagtgtctcaaccct

SEQ ID NO: 385017 - DNA, 75 bp, Homo sapiens
ggggcttggcggcttttctcctcagttttctggagtgctttggaggagagcagcgtcaccctttacaccagaaag

SEQ ID NO: 385018 - DNA, 100 bp, Homo sapiens
tacagaataagtcagatgactttctgtgtatcgatatcctgaagcttgtagcagcccaagtgggaagccagtggaaagatatctatcagtttctttgcaa

SEQ ID NO: 385019 - DNA, 75 bp, Homo sapiens
ctgagggccttcgagagctaccgcgccagacagaacgtgcgcatcgaccccagtagcctgtccttcaacatgtgg

SEQ ID NO: 385020 - DNA, 99 bp, Homo sapiens
gtcaagtggctggcaagcaactcggggaggttaaagacctatcaggaacttgctactaccagcaccatgccctaccaatatccagcactgaccccggag

SEQ ID NO: 385021 - DNA, 83 bp, Homo sapiens
ctgaccccaagattccagatgttcctgtggaccccagtccagttcaagaacaagcagggaaggcagagcaagatggctgaata

SEQ ID NO: 385022 - DNA, 75 bp, Homo sapiens
ccaccagctcgaccacagcaagctcctggggaatccctttgcccacgtccagctgaagccgacagtgaccaacga

SEQ ID NO: 385023 - DNA, 82 bp, Homo sapiens
gttgacacgtcttatttaatccacatcatagggaacccaccaagaccaacctggtcacattcttccataccgacctcagcgg

SEQ ID NO: 385024 - DNA, 90 bp, Homo sapiens
gctgtatcggcgttcacatgctacgcgtgctggagaatctggtaaaagcaccattgtgaagcagatgaggatcctgcatgttaatgggtt

SEQ ID NO: 385025 - DNA, 75 bp, Homo sapiens
acagaagctttatctgtgatagaattgctgcttaaaaaacttgaaggtaaaactgccattcaatgcacaacggat

SEQ ID NO: 385026 - DNA, 75 bp, Homo sapiens
ggatatatcttccttgacagcaaaggcatttgacattatcacagactgacatggcagcattaacaggaggaaagg

SEQ ID NO: 385027 - DNA, 82 bp, Homo sapiens
atttttggatgatgatggatccatttctcctattgaggagtcaacgagttcatgatcaagtgttgcccacaccaaatgcttc

SEQ ID NO: 385028 - DNA, 88 bp, Homo sapiens
gtgacaacaccgttcccccagccgggctggtcaaaatgcagatcttcgtgaaaacccttaccggcaagaccatcacccttgaggtgga

SEQ ID NO: 385029 - DNA, 78 bp, Homo sapiens
gaccgtccgccagtcgtcccgaggtgccaagtcctgccctgccaacttcttggcagctgccgacgacaaactcagtgg

SEQ ID NO: 385030 - DNA, 113 bp, Homo sapiens
cctgagcatagagaacacgctgtgggctggcactgtggtcgcatcagtttaagctatgaagaaggacatccctcacactctgaaacagatctccttcagagacagagttttgc

SEQ ID NO: 385031 - DNA, 120 bp, Homo sapiens
caaggagttgtctgtctttaaggacagactgtatgaactggacatctcgttccctcccagggggatatgagactttctactcggaatatcctgagtgttgcgtggatgtaaaacccattt

SEQ ID NO: 385032 - DNA, 71 bp, Homo sapiens
gccctgtgtgacaccaagataagtaacatatttcacattttcaggaacaaaatgatttaaaagcattgcta

SEQ ID NO: 385033 - DNA, 82 bp, Homo sapiens
gaagacaccaaagatgggggaggggaagggtgtgacacttggcaccacactgttccctgtcccttcatggatgtggcccaca

SEQ ID NO: 385034 - DNA, 82 bp, Homo sapiens
aagatgcccgaagaggaagacgagtgaaagccctgtgtaaggaatgtgtagtagaacgttgtcgcatattgcgtctgaagaa

SEQ ID NO: 385035 - DNA, 82 bp, Homo sapiens
agtggatatagcacaccatccccagccagccaagtcctgtatctgccatgtctgtggcgtccacctcaacaggctgcattcc

SEQ ID NO: 385036 - DNA, 100 bp, Homo sapiens
gagcagagattaaaagagttcggcgaggaactccagaatacaagttctgggaggtgatcagtgatgaacatggcatcgaccccaccggcacctaccacgg

SEQ ID NO: 385037 - DNA, 76 bp, Homo sapiens
gcatccgagagcccggactggaggtgcaatggatgagcttcatagtctggatccaagaaggcaagagttattggaa

SEQ ID NO: 385038 - DNA, 75 bp, Homo sapiens
tattaattagcccaacctgttcttgcaaacaagcagatatttgtgtgggggccgtggagcccatgcagatcgacg

SEQ ID NO: 385039 - DNA, 80 bp, Homo sapiens
gtgattttgatagaagactttcgagagtgtatacaaatgacagggtttcccaggtgcccagggtgacccaggacttaaag

SEQ ID NO: 385040 - DNA, 82 bp, Homo sapiens
ctcaatgcactgactcttaatatgattcggcagatttatccacagctaaaggaaagttcacatccttggctccttccaaaat

SEQ ID NO: 385041 - DNA, 83 bp, Homo sapiens
ctggaggagttgtacggcctggcactgcgcttcttcaaaggtccccagtctatgtgaggatctcctgtcttctgttgaccagc

SEQ ID NO: 385042 - DNA, 99 bp, Homo sapiens
ccggcgccatgtccagcgctcggacccccctacccacgctgaacgagagggacacggagcaggatgaagccccacccgcccttcaggatgccagccttg

SEQ ID NO: 385043 - DNA, 75 bp, Homo sapiens
gatggcctagcacgtggaattcgcgaagctgccaaagccttagacaaaagttcagttctgcaagcaagtatgctg

SEQ ID NO: 385044 - DNA, 101 bp, Homo sapiens
agaacatccgcgtggttcgttgtggcggcagcgagttgaactttaggagagctgtgttctctgcagattctaaacatgtatggaggtattggaagccttgt

SEQ ID NO: 385045 - DNA, 50 bp, Homo sapiens
ctgcttcttcctcttcagtcaagctcgatgacttgtacttgatcgccatc

SEQ ID NO: 385046 - DNA, 98 bp, Homo sapiens
ctgcctcagcctcccgagtggctgggattacaggacgtagacaagtttggcaacgagatcacccagctggcccggcccctgcctgtggagtatctcat

SEQ ID NO: 385047 - DNA, 98 bp, Homo sapiens
gtgccaatggctacctggaactgctggaccatgtactgctggtgtccaacacgctctcttgggctctgtatgagctctcccggcaccccgaagtccag

SEQ ID NO: 385048 - DNA, 105 bp, Homo sapiens
tggaacccgaagaagaaaggattcgttacagccagagattgacgtagctgggtgcgaagaatcaaattggaaattatggaatttgtgaatttcctgaagaatccc

SEQ ID NO: 385049 - DNA, 100 bp, Homo sapiens
gttggcccagctccttggggtttccggctgcagggcggtaaggatttcaacatgcctctgacaatctctagtacctatgagcagaggaaaatcgtggagt

SEQ ID NO: 385050 - DNA, 75 bp, Homo sapiens
gttcctggggcatcgacgatctccatatttcattgcaaggggaaaagattaccttgaggttgtgttcaacagagg

SEQ ID NO: 385051 - DNA, 51 bp, Homo sapiens
ctggcaaacactggaatcctactttttctaaaagcagcatctgttatagca

SEQ ID NO: 385052 - DNA, 90 bp, Homo sapiens
ctctttggattctctgactgttgtcgtaagcttctttcctcagtgggccggatgtatcccccgcgttctcccaagtctgctgcccctgcc

SEQ ID NO: 385053 - DNA, 80 bp, Homo sapiens
aacatgtacatcaataccatgaggcctgggaaagactggaaaaagcggaacacgaaagagaactggctttgcggaatgag

SEQ ID NO: 385054 - DNA, 82 bp, Homo sapiens
ctgctcgacgaccaagaggcgaagaggtcagaagttgagtagcaggggcctaggagggctcgaagccttcacagcgatggca

SEQ ID NO: 385055 - DNA, 100 bp, Homo sapiens
attatttatgtcatcaagaagaatgacgatggtctcagcatcagaggagcccaggaggaggaccctcccgatccccagctaatgagactggacaatatgc

SEQ ID NO: 385056 - DNA, 90 bp, Homo sapiens
ctgtgaatggcgtcctgtacctgcagttcaggcttcagagagcccctgacgcctgcaggaacatggcagaggagacaccgtctgtcttca

SEQ ID NO: 385057 - DNA, 75 bp, Homo sapiens
cagagatctacaggatcccccgccccaaatggccccggagctagttcttctggagctcaacttcttgccaaccac

SEQ ID NO: 385058 - DNA, 82 bp, Homo sapiens
gctcaggctgctcttggctctcaacttattcccttcaattcaagtaacagttctaaatggagcccctggatttataaacttg

SEQ ID NO: 385059 - DNA, 75 bp, Homo sapiens
cagcgcgaacatggacgccgtcaacgccttcaaccaggaggattttcagtcaatgcatcatcggagcgactcaac

SEQ ID NO: 385060 - DNA, 82 bp, Homo sapiens
aaagttatctcaattttgctcgaaagagaataaaggcttgaagtagaaaatgccatgatgagaaaaactattaaaaaacagg

SEQ ID NO: 385061 - DNA, 132 bp, Homo sapiens
tgggactcaatgttctcgatgccaatctctgcttgaaaggagaagacttggattctcaggatatacacatgacaccatccactgacttctataagaaattagccttggactgttctggtcagcaagttgctg

SEQ ID NO: 385062 - DNA, 89 bp, Homo sapiens
gggaaagggccggaaaacacacgttcctccgaaaccggtttgcaagtccttgtagagatttagctttggagtcaaacccttctgaccat

SEQ ID NO: 385063 - DNA, 100 bp, Homo sapiens
tcctgggggactatgtggagaacctgaacaagtcccagctgaagctgggcatctggggcgagcatatcatgtcccgagtgggaaaatattagctgtaaag

SEQ ID NO: 385064 - DNA, 100 bp, Homo sapiens
tatatccgtttccagtccaggtcaggggatgccatggggatgaacatgatttcaaaggccgctttgtagttcagaatgtttctgcacagaaagatggaga

SEQ ID NO: 385065 - DNA, 99 bp, Homo sapiens
caacacctccctgttcatcaggaacgtcgcggacgccaccagtttagatgcaaaatccacaagtattcaagtgattgttaaagagggaggcctgaagtt

SEQ ID NO: 385066 - DNA, 88 bp, Homo sapiens
atctaaggatgaccctggaaagctgcagacattcaatactgcctcaccttgtcaagatgtcaaacagctgactagtggagttgccatg

SEQ ID NO: 385067 - DNA, 100 bp, Homo sapiens
cgccatcaaccgccagatcaacctggagctctacgcctcctacgtttacctgtccatggttttggcacaaataccagtgggaatagtatttttggaagta

SEQ ID NO: 385068 - DNA, 75 bp, Homo sapiens
caacattaaaccatcagatgaggtatgtgcactgcgcgtgaccagccgggcccgcagccgcatcctcagggcagg

SEQ ID NO: 385069 - DNA, 120 bp, Homo sapiens
cgacggcctggctttctgcgccatcctgcaccgccaccggcccgacctcatgactccagaagacctttccagattcgtggttgagctgcagcagagggagcttgccttgaaggacaagaa

SEQ ID NO: 385070 - DNA, 103 bp, Homo sapiens
ccgcaccatgccgctcctaagcctgcacagccgcggcggcagcagcagtgagagatccagagacaatggccccgatgggatggagcccgaaggcgtcatcgag

SEQ ID NO: 385071 - DNA, 100 bp, Homo sapiens
tacctcactgcagaggtgctggagctggcagctcctgcccctcctaaagctgaagccaaagcgaaggctttaaaggccaagaaggcagtgttgaaaggtg

SEQ ID NO: 385072 - DNA, 100 bp, Homo sapiens
agaattcagaaggagctggcggacatcactttagaccctccacctaattgcaggttgggggccgtcccgctcctaaggcaggaagatggtggccgcaaag

SEQ ID NO: 385073 - DNA, 100 bp, Homo sapiens
agcttgtcccatggcgaggtctcctatgacccactctatgctgggaaacagtactgggagtaccagttccagcaccagcccagtcaggaggagtgtgaag

SEQ ID NO: 385074 - DNA, 75 bp, Homo sapiens
ccgcgggggagccccgggagccgcacggtttgaaagagaagatagtgaggagctttgaagtctccccagatgggt

SEQ ID NO: 385075 - DNA, 103 bp, Homo sapiens
cgcccccgccgctgccgccgcgacccttggcgcctgcccctgcaacgggaggttcgagaacttgtcttggacaattgcaaatcaaatgatggaaaaattgagg

SEQ ID NO: 385076 - DNA, 90 bp, Homo sapiens
tggagtttgtgatgaagcaggctctaggaggtgccctacgagacgctgaacaaacgctttcgcgccgctcagaagaacattgaccgggag

SEQ ID NO: 385077 - DNA, 75 bp, Homo sapiens
cgacgttcggccaccggaggagcgggagccaagcagaaaaatggctacaaacttcctagcacatgagaagatctg

SEQ ID NO: 385078 - DNA, 50 bp, Homo sapiens
attttgctgaacaaatagcaaaggtgttcattgaggatgtcagcagggag

SEQ ID NO: 385079 - DNA, 100 bp, Homo sapiens
ccaccctggagtaaccctcactggagaatccagaggtcatactccctgtcacaaactccagctgaactaacttggaggaggatcttccctgacagctctg

SEQ ID NO: 385080 - DNA, 74 bp, Homo sapiens
aggacatcgacatccaggcgaactcggcctatcgctaccctccgaagtccgggccgcgatgggcctcttggaac

SEQ ID NO: 385081 - DNA, 100 bp, Homo sapiens
tctggctgcgttgcactgtggaagaccacctgagtcaccagttaactatggtagcccacccagcattgtgatgagttggaacaattcatggaaaatcaag

SEQ ID NO: 385082 - DNA, 101 bp, Homo sapiens
cgagtctcggagaagatgtggtggcttccgtttgttggtggaggaggtggcaggcctcggcgattccatgcaatggaaaagcagctgatcgcatccatcag

SEQ ID NO: 385083 - DNA, 75 bp, Homo sapiens
tgcgcggctgcgctttcctgtccccaagccgttctagacgcggaaccaaaaacttttgctagaaaatcagctttt

SEQ ID NO: 385084 - DNA, 97 bp, Homo sapiens
tgatcccattgggggttgatacagcagagacgtcatacttggaaatggctgcaggttcagacacttctcagaacttctggatgagttttcccagaac

SEQ ID NO: 385085 - DNA, 100 bp, Homo sapiens
ctgtgatgtcacatctaggagcatctacccatggacagacatgtcttcccatggaggcgaatttccttttgcaaaatgttttgtttgtggagaaatgggg

SEQ ID NO: 385086 - DNA, 73 bp, Homo sapiens
tttgagaaaaggcctaagaattttggcattggccctgggaggagcggggacactgaggacctctctccaaatt

SEQ ID NO: 385087 - DNA, 50 bp, Homo sapiens
caggagtgaagctacagaccttcgcggaaacaaaccatcaggcctcccag

SEQ ID NO: 385088 - DNA, 100 bp, Homo sapiens
ccctggaagagaagagggtggctaatgattaagactattgtgtcaaagaatgcactgcagtaccggggaaattcccaacatgatgcccaggagtttctgc

SEQ ID NO: 385089 - DNA, 90 bp, Homo sapiens
atcgccgctcagctttccctaaggcagccatcaaaaggggtgtgtccgcagccggccaggtggtatccctgaaggtgtggctgattgacg

SEQ ID NO: 385090 - DNA, 100 bp, Homo sapiens
ggcgactagcggcggcgggagcggcgccgagaggccgtgcgggacgcgggcgccaggaccggccgaacgcagagatattctctaagccgctttcatcatg

SEQ ID NO: 385091 - DNA, 98 bp, Homo sapiens
aacagcaacaggtctcaattaaaaggactggacggaggaggaccgggcccgggagaaggtgctgatgcaggagcttgtgaccctcattgagcagcgca

SEQ ID NO: 385092 - DNA, 98 bp, Homo sapiens
ggccacctggggctgccactgtcctccagcccgcccccagcctgtggacgcctggcccaccctgagtagctgggggacctccctctggtccgcctgga

SEQ ID NO: 385093 - DNA, 87 bp, Homo sapiens
tgtctgtggccctttgtctacacttcctaactggatggctgaattcaaaagatttacaccagatggatgaaggtggctggagaagag

SEQ ID NO: 385094 - DNA, 80 bp, Homo sapiens
ccatgaaatgaaagaatactcaggctttgcaggagttagccgaccacgaggaacctttggagtgcatccgccccaaccct

SEQ ID NO: 385095 - DNA, 100 bp, Homo sapiens
acaatggcctcgttatggagatggagcatccaactgtggggaagatttccgtcccagccttttaggtgtccctattgcatatgataacatcaaagttgtg

SEQ ID NO: 385096 - DNA, 74 bp, Homo sapiens
ttccaacacagctgtatagtcatcattttcagagagttcacccagggcatgatcttacctacaatgaatggaga

SEQ ID NO: 385097 - DNA, 95 bp, Homo sapiens
gagcgagtctcggagaagatgtggtggcttccgtttgttggtggaggaggtggcaggcctcggcggagcatctttccttgaagaagtacattatt

SEQ ID NO: 385098 - DNA, 75 bp, Homo sapiens
acatgcagcagcttcctgtggatatcttgatattgcagagcctgtaatgcaccgaaacgtccgctacaactgcag

SEQ ID NO: 385099 - DNA, 100 bp, Homo sapiens
gcactttgaggagctggagactatcatggaccgggagcgagaagcaatgggacaccaggtccaataccacctccaagccgagtcacttggtggatgcgca

SEQ ID NO: 385100 - DNA, 75 bp, Homo sapiens
agcaggctgatctactgcaggagttgcaggaagaggcagaggaagaggaagaggaagaggacgtggccgtggcag

SEQ ID NO: 385101 - DNA, 102 bp, Homo sapiens
gaagaaaagagaactcgcatgatggaaatattttctgaaacagacgtgttcctcatgatccggcgccacaagaccaccatcttcacggacgccaaggagtcc

SEQ ID NO: 385102 - DNA, 74 bp, Homo sapiens
gttgcgcctggcctacagcgaggctggaccttatggattttctgaacccaaacggtagtgactgtactctagtc

SEQ ID NO: 385103 - DNA, 90 bp, Homo sapiens
aggatttgcttttgtaacttttgatgatcatgatacagttgataaaattgttggagtttcagcagcttttgctgtgaagctctttaaatc

SEQ ID NO: 385104 - DNA, 100 bp, Homo sapiens
gatcatccacagcaacgtcaagagatagaagacatgcagtggggtaaaggagtccgagagatacccgcctcagtgtgcacactaccatgtaagccaggac

SEQ ID NO: 385105 - DNA, 98 bp, Homo sapiens
tcccaggaatcttctgtggccatgttcactccggttttacagcggagctggagtttgttcagatcatcatcatcgtggtggtgatgatggtgatggtg

SEQ ID NO: 385106 - DNA, 74 bp, Homo sapiens
aagaagtggagcgtgtcctgaaggagttccaccaggccgggaagcccatcggggtggctttgcaaaatgttacg

SEQ ID NO: 385107 - DNA, 83 bp, Homo sapiens
gtggaagattgcgtcacgacgcacataaagacgtacgaagccgtcgccaatacctggagtagaacagaaaaattattatgtct

SEQ ID NO: 385108 - DNA, 108 bp, Homo sapiens
gaacaatatttgcatatggacaaacatcctctgggaagacacacacaatggagatcttgcttctgaaatatctacctgggatggagtgatagtaacaccttcagaaaa

SEQ ID NO: 385109 - DNA, 75 bp, Homo sapiens
gggagcccccagaaggctgtgagaaagtgcgtgtgtttgaagaagccacggtcccaggccataaaacaacggaga

SEQ ID NO: 385110 - DNA, 90 bp, Homo sapiens
ctgcaacacggccactgtgtacaagatatgtgcctggatgcagctcacctccggaatgaccatacctgaagaagacgctgatgtgggaca

SEQ ID NO: 385111 - DNA, 75 bp, Homo sapiens
cgaagattgacgccagtaagaacgaggaggatgaaggccttgatgacttacaagccctcaaggggaagcattttc

SEQ ID NO: 385112 - DNA, 78 bp, Homo sapiens
ctactggctgagggcagagactctcccgccaagtacatcgtgcaagtggatggtaagatagggctgttccgaggcctg

SEQ ID NO: 385113 - DNA, 83 bp, Homo sapiens
ctcccctctcaggacaacccagatgtgcaacaaagtgcgatgacctcctgccccccgaggtctgcagtctcctgaacccagca

SEQ ID NO: 385114 - DNA, 101 bp, Homo sapiens
aagaacatggcgacgtctaatctgttaaagccatgaaccagagaatcagtcagagtgctccagtgaaacagccaccacccctggctccccagagcccacag

SEQ ID NO: 385115 - DNA, 90 bp, Homo sapiens
caagtttccagaaaacagaaatcgaaacagatacagagatgtaagcccatacatatgtagagtgtgtcggtcagaaggaacacctgagaa

SEQ ID NO: 385116 - DNA, 100 bp, Homo sapiens
cggaaggcgagtgccaggagggagagatcctggccacaggcagtacggcatggtgctcggtatcctccatgaaatgtgggatccttccaatttctcaaga

SEQ ID NO: 385117 - DNA, 90 bp, Homo sapiens
actccttcagaatcgcctcgtgctcaggctacatctcgcctctctacagcttcctgcccaacaccaaaataatagctcttcaagtctgca

SEQ ID NO: 385118 - DNA, 96 bp, Homo sapiens
cccagttcctctccggaaaagcagtggctctcgcttcagagatgcgctcagctttcgcctgcatcacactgcactcaggtacctgacaatgatgag

SEQ ID NO: 385119 - DNA, 90 bp, Homo sapiens
cggaggattaccatcaccggaagtatggacctgtctgccaatcaggacgaggagaccgaccaggagaccttccagctggagatcgaccgc

SEQ ID NO: 385120 - DNA, 100 bp, Homo sapiens
caggactggaggagcccccagtgcagcatagctcccacaggtctctagaagaaactgtcagtgccagtgaagaagaaaacgtgggacaccagcaggctgg

SEQ ID NO: 385121 - DNA, 83 bp, Homo sapiens
acaaaacataccaattcttgaatgacatccgagcgaaagagaaagagctccaaatgagaagatgaagcaagtgttaaagaaga

SEQ ID NO: 385122 - DNA, 75 bp, Homo sapiens
cgacagacacacactctctcttttatacagcttgattcaggtaaagctttccagtttgaatttagatgatcacgc

SEQ ID NO: 385123 - DNA, 75 bp, Homo sapiens
gaggaactaaggcggaggaactgagacgtttcgaattccagtgagaaggcaaccaaagtgcaggacatcaaaaac

SEQ ID NO: 385124 - DNA, 100 bp, Homo sapiens
ctggacctgctggtgttcgcccacgaccatgggtgccaagaagagtgctattggtcagcgcattgtggcaactctaccatatatcaagcaagaagttccc

SEQ ID NO: 385125 - DNA, 75 bp, Homo sapiens
atgtccgggaggcgcttccacctctccaccaccgaccgcgtcatcaaagtggacagaggactgcagaaaatcaac

SEQ ID NO: 385126 - DNA, 75 bp, Homo sapiens
ggaaaacatgttaaagggtaccactacatcattgcaaatctgactgagcctgaaatcatagaggaaaccaacatt

SEQ ID NO: 385127 - DNA, 111 bp, Homo sapiens
cccggttcacctgtgatgtagagaccctaaagaagagcattgattcatttggacaagacagtaacttcgtgctgggcaacgcccaggtggcggggctcttccccgtggtct

SEQ ID NO: 385128 - DNA, 100 bp, Homo sapiens
cttgaatgttgaagatgtccttaccagctttgacaatacaggaaatgtttcttccttggaaatcattgactagcatcattgaatattattacatgtggaa

SEQ ID NO: 385129 - DNA, 74 bp, Homo sapiens
gtcggctctgggctccagtgcgggaatcacacacatacctcaggctgggagcctatatgtgagactgaagaatt

SEQ ID NO: 385130 - DNA, 100 bp, Homo sapiens
ttcccagcctaccactggaccctctgctgcctctccaggtgaaatgacaatggatgctctgttggctcgattgaaacttctgaatccagatgaccttaga

SEQ ID NO: 385131 - DNA, 82 bp, Homo sapiens
gggagcgctcggactacgcgggatttcgcgcgtgtgtgtgtcagatctgactgcagccatgagcagcaatgagtgcttcaag

SEQ ID NO: 385132 - DNA, 82 bp, Homo sapiens
catcgtggtggaggcggcctctctggcagcagacatcagccacgcatctgaccttgttggagggccctcctggacccgggag

SEQ ID NO: 385133 - DNA, 100 bp, Homo sapiens
gcagacccacccgccatgaagccccccgcaggcattgaatgccccagaggagcccgaaacctcccaggcttggtgcaggaaggagagcccttcagcgagg

SEQ ID NO: 385134 - DNA, 100 bp, Homo sapiens
ggaagctggttttcaggccacaaatgctttcacagatgcctttgaagatgagaaacccccaaagaagagccttctctccaaagtttcacaaggaaagagg

SEQ ID NO: 385135 - DNA, 82 bp, Homo sapiens
acgaagtgctataactactttatgtaacattacagaacagctagaggtcctgggatcgagacatgtaagcagcatcatggag

SEQ ID NO: 385136 - DNA, 101 bp, Homo sapiens
cgtgaatgtacggtgtactgtcctactgatgctggattaccagctgggcttcgctgacttgaacctggccgagtttgcgggctcgggctccacggtgcgct

SEQ ID NO: 385137 - DNA, 83 bp, Homo sapiens
agcgcagaaagcaggcgaacccgcggcgcaataacggtgaaatgacaatggatgctctgttggctcgattgaaacttctgaat

SEQ ID NO: 385138 - DNA, 96 bp, Homo sapiens
tggagaatgacccagatgtcccaggtgcaggagctcttccatgaggcagcccagcaggaacagcatctctgccttcctgttcacggtgaccttcgc

SEQ ID NO: 385139 - DNA, 95 bp, Homo sapiens
ccgtgggcgtaggaccctccgagccagatcatccaattatgatgggttttgaaccccttgtgaaccagaggctacttccacctaccttccctcga

SEQ ID NO: 385140 - DNA, 75 bp, Homo sapiens
aagcggaccccggcccaggcggccttcgagaaaatgcaggagaagcggtgaaatcccattctctggctggagaca

SEQ ID NO: 385141 - DNA, 75 bp, Homo sapiens
cgcagaaaccccgttgacaaggcactgctttttcatgacggaagctcttcgtgggcggtcttgactggagcacga

SEQ ID NO: 385142 - DNA, 100 bp, Homo sapiens
cgataattcaaaaacactatcccagggagtgcaagcttagagcgtctggccaagaatcagaggaagtggagacgagttgtactgctgtcacaggaaatgg

SEQ ID NO: 385143 - DNA, 98 bp, Homo sapiens
tcatgttcgccttcaacctgctcttctgggaagttgctgcctgtcctggacccatctggggattactactactggtggctgaacacaatggtcttccc

SEQ ID NO: 385144 - DNA, 100 bp, Homo sapiens
ctcgggcgccccgcagccccccaacatcctgctcctgctcatggacgacgtgcaactgacatgggtgaaccccagggatccatgcggattctagtgacag

SEQ ID NO: 385145 - DNA, 75 bp, Homo sapiens
ggcggcccctggagatgattgagccgcgcacgctacagtacaaggtactgggcctaatcgctacgtgcctctttg

SEQ ID NO: 385146 - DNA, 75 bp, Homo sapiens
aatcatagaggcaagtgggggaggagcgttccttgtcctccctctgcacaagctctaagcgaaagacatgaggcc

SEQ ID NO: 385147 - DNA, 102 bp, Homo sapiens
cggaggcttcgagtgacccgggtgccgaggagcgggaagagttgctggggtgagaagccctaccactgcaactgggacggctgcggctggaagtttgcgcgc

SEQ ID NO: 385148 - DNA, 100 bp, Homo sapiens
ataaagcaggactctaaaagctttggaattcaaagaagctttttcactatttgacaaagatggtgatggaactataacaacaaaggaattgggaactgta

SEQ ID NO: 385149 - DNA, 75 bp, Homo sapiens
caacagcttccataaatcctgcttcctgtgcactttctcctctaaatcttggtctcttgtttggaagtgactaac

SEQ ID NO: 385150 - DNA, 100 bp, Homo sapiens
gacgtgaaagtcgagatggagagcagctttttgaacatgttctcaggcacttgacagaatcccggttacctgtcctgctgccgattcctggatgacaatc

SEQ ID NO: 385151 - DNA, 75 bp, Homo sapiens
ttccagtacacagacgagcatggggaaggactgatcctttgaaatactccagccatgactaaaagagaagcagag

SEQ ID NO: 385152 - DNA, 100 bp, Homo sapiens
tgataagaatgttttacaaagagatctccgtatagaagttttcatgggctgagctgctgagttcagcctgggaactgaggccaacaagggagtctcctcg

SEQ ID NO: 385153 - DNA, 50 bp, Homo sapiens
ccggaatggagaaggaagaggagtcgcctgaaagaatagacccaagcgca

SEQ ID NO: 385154 - DNA, 90 bp, Homo sapiens
ttaaagtttcctagatcccagcttggcttcactccggacagactgtcttctagctgttgtcatacagttccagatttccacttatcaagc

SEQ ID NO: 385155 - DNA, 98 bp, Homo sapiens
aaaaataggctgccagcaaacagtcttccgcaggaaggagatgtggttaattatagaaaatgccaagtaggaaatttgccgatggtgaagtggtaaga

SEQ ID NO: 385156 - DNA, 75 bp, Homo sapiens
aagctggtggaacagctacgcatagaagccgggattgagcgcatcaaggtgagtggcatcaaggcgctgtacgag

SEQ ID NO: 385157 - DNA, 100 bp, Homo sapiens
cacagaaatctggaggcagtatcacctaacggagtcgatagcagcagttggtgacgagatggcactcagaaacggcgttgacgtaatttaggacgtggaa

SEQ ID NO: 385158 - DNA, 96 bp, Homo sapiens
ggaggacagggggttcatcatgggtgtcatggagaaactccagctgggcccagagattctgcagcgggaaaatccaaggcttatttatgccaggct

SEQ ID NO: 385159 - DNA, 78 bp, Homo sapiens
atcagacagaacagttaatcctcaatttaagcctgatctaacccctagaaacagattgagaggatccagaatccagat

SEQ ID NO: 385160 - DNA, 74 bp, Homo sapiens
ctttcgctttataggcagattcatcgccatggttctgtacagagtaatgagatgtgtgacggctgcaaaccagg

SEQ ID NO: 385161 - DNA, 100 bp, Homo sapiens
aaagtccagcacagaccctcgggcctcatcatggccaggaagcggctggtggctgtctctcctgctcagaggtgctctgctcctttaaggcacatctaaa

SEQ ID NO: 385162 - DNA, 82 bp, Homo sapiens
gaattccttttggggaagaaagagctgtggaaagaaataacttgatgaggttatcacagagcattccatttacacctgtgcc

SEQ ID NO: 385163 - DNA, 82 bp, Homo sapiens
tgctggcctacgaaggcgtgcgggcagcgcttgaggccctgctgccctacactgtgtactaatggtcacttgatgtgcgctg

SEQ ID NO: 385164 - DNA, 75 bp, Homo sapiens
catggcggctggccgggcccaggtcccttcctccgccgccatggcatcagatgaaggcaaactttttgttggagg

SEQ ID NO: 385165 - DNA, 78 bp, Homo sapiens
acgcgacgcgccccgcctcccccgtccggtccctctctccacgcgccgtgccgtccctgcagtgacaccgaggtgctc

SEQ ID NO: 385166 - DNA, 80 bp, Homo sapiens
ggaagtctttgggacaaaactgtatttaccttgtgttctaagaacggaagcatctgggctggatggaatttagcatcaag

SEQ ID NO: 385167 - DNA, 51 bp, Homo sapiens
ctgctgtcggaggcttttgtcatcaaaggtgggaccagggagattggatct

SEQ ID NO: 385168 - DNA, 80 bp, Homo sapiens
cacacaagctaaagacgggccattttccagacctcatccagatgtgaagttcatttccaatccgccctccatggtggcag

SEQ ID NO: 385169 - DNA, 100 bp, Homo sapiens
caagttcaactcttacatcagttaatagtagcaaatatgactggactggaaccatcaaacaaggctgcagaggctatttttatgattcccacaaatccac

SEQ ID NO: 385170 - DNA, 75 bp, Homo sapiens
ggaacggaaaatgagggagttcaactctgatctgtggctgctgcattttgggctttgggatctacctgctgatcc

SEQ ID NO: 385171 - DNA, 97 bp, Homo sapiens
ggcgagccggagcgcggagcccggctcccgcaccatggaggaggacgacagctacggtgagaagccctaccactgcaactgggacggctgcggctgg

SEQ ID NO: 385172 - DNA, 100 bp, Homo sapiens
ggctaacttcagcggtggcaccgggatcggttgccttgagcctgttcaaatctgaacatcaatgatgtactagggaactactcattgactcttgttgatg

SEQ ID NO: 385173 - DNA, 74 bp, Homo sapiens
cacggagctgggcgacgagctgaccctgggagacatcgacggtactccaaagattcaggtttactcacgtcatc

SEQ ID NO: 385174 - DNA, 100 bp, Homo sapiens
ggacagcacaattggaatccaccctgtctgtgcagaggtgttcagtgtgaggtggagctgatagagtccatagaggacctgagacaacctgggaagttcc

SEQ ID NO: 385175 - DNA, 101 bp, Homo sapiens
cgtcgggctcttctgttctacccctggggttgccttggcaagagcagtgcctagaaaggcctgcactgcccaaagtcttggaaacttgctggatatgatgt

SEQ ID NO: 385176 - DNA, 115 bp, Homo sapiens
ctcaagctggctgttctggatgggggcagcaggataccgcctggcacccacttagccaaacaggatttacattaaaaaggtacagaagtttcctgaatatagagttcctacagac

SEQ ID NO: 385177 - DNA, 90 bp, Homo sapiens
gagctgtgcctcccagcaccacagtccttctgcagtccctcgtccagccacccccaggattcgctaaatattgtaatggatcaaggagat

SEQ ID NO: 385178 - DNA, 90 bp, Homo sapiens
cttgcggaaaggatgttggcggtccctgtgacctgtggagacacggccagatctgccctccacaaatgccagatgttaatgtaagctggg

SEQ ID NO: 385179 - DNA, 100 bp, Homo sapiens
accgccctggacatcaagattaaaagagcgaataaagtttatcacgccggggttttgggatttgagattgacgcggtgaactctgtccagttttcaaacc

SEQ ID NO: 385180 - DNA, 100 bp, Homo sapiens
cttttatctccaagcggaaagaaagattggccatctgcaagcttcccttctccgtggagagcaggaagacagtcatgggacctcagggagccaggagaca

SEQ ID NO: 385181 - DNA, 75 bp, Homo sapiens
gctaaaatgaatctgagcaatatggaatattttgtgccacacacaaaaaggacagaactgtaccgctctcttttt

SEQ ID NO: 385182 - DNA, 96 bp, Homo sapiens
cagcctcaagggcttcagcaccgcgcccatggcagagccagacctgggctcgggatgagtttgaaggcctcttcaagcagccagcagaaaatgtca

SEQ ID NO: 385183 - DNA, 96 bp, Homo sapiens
gcttcttccccactcccgagacaggtgctggagaatctggtaaaagcaccattgtgaagcagatgaggatcctgcatgttaatgggtttaatggag

SEQ ID NO: 385184 - DNA, 98 bp, Homo sapiens
ccgccctcagccccggcgcagacatggacccctcgcgagccatccagaacgagatcagctccctcaaagaaccgcatgcacgagtctctcatgctctt

SEQ ID NO: 385185 - DNA, 100 bp, Homo sapiens
gccgattcctcctccttggtcgccgcgtccttggctggcgtttttagaaagagcgttttcgctacgtaaagcacattcgataaaggatatggaaaatact

SEQ ID NO: 385186 - DNA, 75 bp, Homo sapiens
atgcaaacctatcctcaaggtggaattcaaaacgactagatctggtaacaacatgctgtaccccaaggaagacaa

SEQ ID NO: 385187 - DNA, 100 bp, Homo sapiens
gcacacaggaggcaccttggataagctggagtctattcctggattcaatgtcatccagagcccagagcaggctcgagaactcttcctaaaagcagtagaa

SEQ ID NO: 385188 - DNA, 97 bp, Homo sapiens
tgaaggcccagatgatggttagcagtttttggcaatcacgtattttcaaagaaggaatgcagctcatttcagaaaagcctgagacggaagctgtggt

SEQ ID NO: 385189 - DNA, 82 bp, Homo sapiens
cacagccgcggcggcagcagcagtgagagatcctgtgccttcaaaccctacgagtccatactttaaaacaaaatgaagaaag

SEQ ID NO: 385190 - DNA, 98 bp, Homo sapiens
caactagccaaggaaaaaaagcagagaggagcggggagcaatgcagattttaccaaatgttgcaagaactctggagttcttatggtagtaaaatgccg

SEQ ID NO: 385191 - DNA, 97 bp, Homo sapiens
tcttgtcctcaagtgatcctcccaccttagcctcctaagtagctgggaccacaggtacttcttgcaagggatatgcattagcacatactcaagaagg

SEQ ID NO: 385192 - DNA, 102 bp, Homo sapiens
tccccaccaccaccatctccatcacccaccaacaacaccacaataatccacagccaagtctgcgctcctcagaccaccggcaggtgaacagcctgatgcaga

SEQ ID NO: 385193 - DNA, 82 bp, Homo sapiens
gtggactcctgcccggcgaagtgcctcacttccttctcccggaggaaacaccaattggaagcctccgctcaactgtaagatt

SEQ ID NO: 385194 - DNA, 75 bp, Homo sapiens
atcaaagaacagcctctgagctgcgtggagaaagccatggagacagccagctgaagagtctgctgcttctggagc

SEQ ID NO: 385195 - DNA, 82 bp, Homo sapiens
tctgccaggcagaaggcctctctcctgatacagcaggcgctcaccatgttccctggaggttggatttggtctagggagtccc

SEQ ID NO: 385196 - DNA, 100 bp, Homo sapiens
tggctccaagacttccctcagctttcagggtccattcaaaagcttggtgaattaaatattggaatggatggccttggtaatgaggtatcagcactcaacc

SEQ ID NO: 385197 - DNA, 80 bp, Homo sapiens
gagtgcctggaagtttacgcctgataggccattcctgtatcacgagactgggagctgcttcccagtgctgctgcctctgc

SEQ ID NO: 385198 - DNA, 100 bp, Homo sapiens
ggctccaagacctcatcaacaattaaggtctttaagtggacaggagataatatgttttttatcaaaggagacatggattcactagctttcggtggtggag

SEQ ID NO: 385199 - DNA, 98 bp, Homo sapiens
tggaatatgaagagacacagtatggtagccacacccccaggttacatccactaccagcctgcccaggaccggctgcaaccccacctcctggagatgct

SEQ ID NO: 385200 - DNA, 100 bp, Homo sapiens
ctttgatcaacccaatctcccataggcactcagtcaaggaattacatgaacgacagccttcgcaccgacgtcttcgtgcggttccagccagagagcatcg

SEQ ID NO: 385201 - DNA, 100 bp, Homo sapiens
aaaaaataaaaaaaaagccaaaaagataaaagcccggatgaacttcagctgaactgtcccaagcaataaacagtggtacattgttatcaaaaccgtcccc

SEQ ID NO: 385202 - DNA, 96 bp, Homo sapiens
agcccgggcggcgctcgtacttctggccactgggcgagcgtctggcaggtatacccgaaatcttgtggatcaaggaaatggaaaatttaatctgat

SEQ ID NO: 385203 - DNA, 51 bp, Homo sapiens
cgcgagtgaggaaaggaggtactgtaggtgctggagaatctggtaaaagca

SEQ ID NO: 385204 - DNA, 90 bp, Homo sapiens
gcggattaaagctaaagacatagttcctggtgatattgtagaaattgctgggatatggagaaggtggagcggcaggctgtcccccaggcc

SEQ ID NO: 385205 - DNA, 100 bp, Homo sapiens
cctgcccagcgtggtggggcagcagaagctccagagcccagacttgcaggcttctcccacctgcccagtgggctgtacccatcctacctccacctgaacc

SEQ ID NO: 385206 - DNA, 100 bp, Homo sapiens
caagaaagcaggatggactatcattactcctccaacaccaatcatcccagacggtgactctcctattccatctgtttcttcgggatcatcttcacctctt

SEQ ID NO: 385207 - DNA, 80 bp, Homo sapiens
atgaccatgatgtcctttcttttctgactttccagttgactgaacctggaaaagagccgagaaaatacggtacatgtccc

SEQ ID NO: 385208 - DNA, 75 bp, Homo sapiens
gaggaggcgagctagccgggagttacaccgccaccgccaggattcttaaatactccgaagcagaatatgctcccc

SEQ ID NO: 385209 - DNA, 99 bp, Homo sapiens
ctgggcgctccgcgcccccggatgctgcagttggaaaatggatataccttatttgattatgatgttggactgaatgatataattcagctgctagttcgc

SEQ ID NO: 385210 - DNA, 83 bp, Homo sapiens
ctggagcctcagttggaagcagccgatccagcctgcggagcctgtggggcaggttatggaaacaaaggacatgctttacatcg

SEQ ID NO: 385211 - DNA, 100 bp, Homo sapiens
aagccaagacttaaagtttcctagatcccagcttcagggagaagataatatcttcaagctttcacaaagaaaatctccacattgaactcaagccaaataa

SEQ ID NO: 385212 - DNA, 100 bp, Homo sapiens
ggacgctttgagccgccccgaactaagcagggcggtcgggggtgctggagaatctggtaaaagcaccattgtgaagcagatgaggatcctgcatgttaat

SEQ ID NO: 385213 - DNA, 100 bp, Homo sapiens
gggctcctgctgcagcccccgacgccacctccgctgctgctgctgctcttcccgctgctgctcttctccaggctctgtgattggatttgtcctgtatccc

SEQ ID NO: 385214 - DNA, 75 bp, Homo sapiens
ccgatcaaagtccagatctccatctccaaaaagaaggtgagaattatgaagatgatgacctagtaaattctgatg

SEQ ID NO: 385215 - DNA, 90 bp, Homo sapiens
ggctttcatgctatagaaagtctcctgcagaactctcttgatagagcccaagcagccaagaataaaggcaataaatattttaaagcagga

SEQ ID NO: 385216 - DNA, 98 bp, Homo sapiens
atgatgaagaggatgatgatgaagaggttttctagtcttgaactactggctacgtggctaccaaatgcctaagggagttcgttcacagctgagttatg

SEQ ID NO: 385217 - DNA, 75 bp, Homo sapiens
cccgtcgcaggtcgcaggcctctttgtcagctggagttgcgcggagcctacaagaaagtacgagatttagtcaac

SEQ ID NO: 385218 - DNA, 100 bp, Homo sapiens
acaacttgtgcgggagcccggagtcctcggaataacacttggtacatcgaggaggccattgagaaactaagcaagcggcaccagtaccacatccgtgcct

SEQ ID NO: 385219 - DNA, 100 bp, Homo sapiens
cgccgtcccgtccgacagccaggcccgggagaaatatgtgctgattagaaggctcacttgtgcagtgtggaggataaccagtgccttacaaaatggggtt

SEQ ID NO: 385220 - DNA, 100 bp, Homo sapiens
cagccagaccatggagctcgcccccaacttccagggaccttttaccaatttgaggctgcgtgggacagctccatgcacaactctctcctgctgaaccggg

SEQ ID NO: 385221 - DNA, 123 bp, Homo sapiens
tgggatttggatgtgggatccggttccttggtgtcatccagccttagcaaaccagagtgtaaacaggaacatcgataagtagtgtaaaaacttgcacaatgaaatccgaagccaaggatggag

SEQ ID NO: 385222 - DNA, 80 bp, Homo sapiens
tcttaaggagcgattaggcatgtcagctgatccagataatgaggatgcaacagtatcctagaaggaaaacatcaccatgg

SEQ ID NO: 385223 - DNA, 100 bp, Homo sapiens
tcagaatataaaaaggaagcagcaggacacgcccggaagccctgaccacagagacgcgtccagatttaaggaccatagtacagctatggatactgaacca

SEQ ID NO: 385224 - DNA, 83 bp, Homo sapiens
cgcccagatgatgcggtggtgggggacctgccggcacgcgactccccccgggcccaaattacagaatgtctgaaggggacagt

SEQ ID NO: 385225 - DNA, 98 bp, Homo sapiens
aggagctctcggggctccacgtcctcgtgaaccagctcagcgagaacctcaagagagtgagaaagtggctcatgccaaagaagaaaaccttagtatgc

SEQ ID NO: 385226 - DNA, 80 bp, Homo sapiens
cttctaaatcaggaatggattgaaatctaatgaaccgaaactttggacatgccaccactgctctttgaggtgtcatccct

SEQ ID NO: 385227 - DNA, 75 bp, Homo sapiens
caaagagaactatcttgaaacatttatttccagtccaaaggaagaaatgatttcccttggggatggagacatcag

SEQ ID NO: 385228 - DNA, 95 bp, Homo sapiens
ggagtcaaatacaccaagtcaaagatagaccttcctccgagggccgtctctcccagccgaacacagcccacccgcccagctccgccgcggtggca

SEQ ID NO: 385229 - DNA, 51 bp, Homo sapiens
gatggacaatttggaatccacattccacttacttacatgatcatttcgaga

SEQ ID NO: 385230 - DNA, 96 bp, Homo sapiens
aggccatgattggaccatcccccaatcctctcatcttgtcctacctgaagtatgccattagttcccaggtgtctgacttccagcaactgctggcct

SEQ ID NO: 385231 - DNA, 83 bp, Homo sapiens
cccggctgaaattaagtgaggaattgagtggtggtagattgaaggccttagaaaatttacgtgtatacctgtgtgagaaaatc

SEQ ID NO: 385232 - DNA, 98 bp, Homo sapiens
gcgctctccgacctctacctggagcatttgctgcagaagcgtagtcggccagaggctaaaaggtcagattcctgaaattaaacagactttggaaattc

SEQ ID NO: 385233 - DNA, 75 bp, Homo sapiens
cttggagtgcctcaccgagccaggacatgtattcctctgagaaaccttggacagcagattttggtttaatatctg

SEQ ID NO: 385234 - DNA, 75 bp, Homo sapiens
cagtggccacaagagcgaggagaagcgagaaaagatgaaacggaccctactgtagtcagcttttaacctctggac

SEQ ID NO: 385235 - DNA, 116 bp, Homo sapiens
cggggcctggggctgacccgtctgacttcccgtccgtgccgagcccactcgagccgcagccatgtctggggacgagcggccctccaggcactgaagcgtaagaagaggtatgagaa

SEQ ID NO: 385236 - DNA, 51 bp, Homo sapiens
tcccagcactttgggagtccaaggtatatgttgtcggtggctatgatgggc

SEQ ID NO: 385237 - DNA, 82 bp, Homo sapiens
aacgaaaataccgagtttgtaatgtgactagacggccagccagtcatcaaacacgcaaacatgcagatctttgtgaagaccc

SEQ ID NO: 385238 - DNA, 98 bp, Homo sapiens
ggagattccacccaaatcctcttctccaagaagatgtaaaggataactcctttagccgatcacggagttcaagtgtaacaagcattgacaaagaatcc

SEQ ID NO: 385239 - DNA, 82 bp, Homo sapiens
attcgagtgaccgagaccgcggccgggaccgaggaagaggactgtcagaaggacgtagaaggcacggttttactgtgaggag

SEQ ID NO: 385240 - DNA, 83 bp, Homo sapiens
tcccagggcagttcggcgtgcctcagccctggtacttcttcatcatgagactcgctgtatcccccaggctggagtgtagtggc

SEQ ID NO: 385241 - DNA, 80 bp, Homo sapiens
gccagtagaggaggaggtgaacaaggaggagattgctggactcgctgaagagagactacgcaggaaagccccagccaccc

SEQ ID NO: 385242 - DNA, 98 bp, Homo sapiens
aagcccacggtgttcactcgagtctccgccttcatcgactggattgaggaggtgacccatgggctgagggcatacgatggcttgtctctgcctgagga

SEQ ID NO: 385243 - DNA, 98 bp, Homo sapiens
ccgcctcagcgtccgccctcaggcccgtggccgctgtccaggagctctgctctcccctccaggtgctggtcgttatgtaccaggttctgcaagtatgg

SEQ ID NO: 385244 - DNA, 74 bp, Homo sapiens
ctgggcgttcatctaccacgctttcgtagctctcgatgttctgaagtatgaggaagttgacatggattcattag

SEQ ID NO: 385245 - DNA, 82 bp, Homo sapiens
gcccgaggaggcagccaagctcgtggcctgcctctgcgtgcgaagcaggtcctggggaccaaggtggacgcggagcgtgacg

SEQ ID NO: 385246 - DNA, 73 bp, Homo sapiens
aatacacacacctgttgccattatagagctggaattaggcaaatatggacagataacaacgaacttgatgcaa

SEQ ID NO: 385247 - DNA, 95 bp, Homo sapiens
accttctgaattcaggaggatagaatctccactgaaacatcaggggtgatccattcatgttgcagcagtctacaaatccagcaccaggaattctg

SEQ ID NO: 385248 - DNA, 78 bp, Homo sapiens
ccgaaagtgttaagcacatggtggagaggcaagcacggattccaggtgctgttggcagcagcggtctgcacaaaagca

SEQ ID NO: 385249 - DNA, 100 bp, Homo sapiens
ccggattccagactcgtgggggaaaggctggctgaagccgacgtagcttctctgaacagacgcatccagctggttgaggaagagttggatcgtgcccagg

SEQ ID NO: 385250 - DNA, 75 bp, Homo sapiens
cgacttggagtctttgtccaggacgggaacaagctgccaataatgtctgcaaaaagtgaattcttccaacaacta

SEQ ID NO: 385251 - DNA, 131 bp, Homo sapiens
gaggaattcttttagaagacatagaagaagcactgcccaattcccagaaagctgtcaaggaattctcacactcaagaaagcaaatgaacttcttctgagcacaggcatgcccggcagttttctcatccgag

SEQ ID NO: 385252 - DNA, 82 bp, Homo sapiens
aaaaactggcctcatattttgtgtacacagtccctgtacagggtttctgacctgtgtgaggatgaggatgatgaccttcagt

SEQ ID NO: 385253 - DNA, 100 bp, Homo sapiens
cggggactctgccttttaccgaatgcttcagacatgcctgaaacaatcaccagccgggatgccgcccgcttccccatcatcgccagctgcacactcttgg

SEQ ID NO: 385254 - DNA, 100 bp, Homo sapiens
attgattgaaagcattccaaaacctgaaccagtaactgaagtatctgcccctgtcaaatcattccagatcatctctgttaatgcccatgttagaatggag

SEQ ID NO: 385255 - DNA, 50 bp, Homo sapiens
agaatgcgctcttcaagcggatcttgtgaccgaagctggctttggtgctg

SEQ ID NO: 385256 - DNA, 101 bp, Homo sapiens
ggcggtccgtgcgagaggaccaacggagcgctgaggcgggcgttttcttggatgaattgcttgctttggagggctttgttcgcgggggtcacagctctcat

SEQ ID NO: 385257 - DNA, 80 bp, Homo sapiens
gatggatgagtccagcattctaagacgaagagggctccagtgttttagagcactttgctgcaagggaccaccacctgcac

SEQ ID NO: 385258 - DNA, 98 bp, Homo sapiens
agctggacatacagaaattgttgaatttttgttgcaacttggagtgccagtgaatgataaagacgatgtgtgtaaagttgtgaacacaaccaccctca

SEQ ID NO: 385259 - DNA, 100 bp, Homo sapiens
aagaggccactaagcatttagaacataccataaagtctccaaaggatggcacagtaaagaaagtgttctacagagaaggtgctcaggccaacagacacac

SEQ ID NO: 385260 - DNA, 90 bp, Homo sapiens
tctatactggaagaggcatgccagaggtagagcaggtgaccaagaatatggcccaggtgaccaaagccctggacaaggccctgagcacca

SEQ ID NO: 385261 - DNA, 98 bp, Homo sapiens
aactgaaggacttcctccccagcctttgggcttctatccgcagagagcttccagtggtgtctgtagtgagagaaacagagtcccagttactgccagat

SEQ ID NO: 385262 - DNA, 109 bp, Homo sapiens
gagagaatgaagcaagtttacctaacacgtctttgcaagggaaaaggctctagggcggcagataaggctgttgccatggtgatgaaggagataccgagggaggagtctg

SEQ ID NO: 385263 - DNA, 75 bp, Homo sapiens
aaaaaattacggaggtccagtatgcgggagtatagcatcgtgatccagcagctctcaaatggcaaatgggtcccc

SEQ ID NO: 385264 - DNA, 98 bp, Homo sapiens
ctccctgctgagatgcgcaaattcactccccagtacaaaggaatagccaggccagaagaaggaaggcctgtggtgagtgggacaggaaatgacatcac

SEQ ID NO: 385265 - DNA, 100 bp, Homo sapiens
gggggcagcccggcagctgccggcggcgcggcgagagagcggctgacagaggggatgcgagaaaacccgcctagtgccaagcaaccctccaagatgctag

SEQ ID NO: 385266 - DNA, 106 bp, Homo sapiens
gagtcgcagggagcccaccgggcgggcctggccaagtgcaccgtccaggtgaggttagagctggggcatcgcgcccaactgcgcaagaagcccaccacggaggggt

SEQ ID NO: 385267 - DNA, 90 bp, Homo sapiens
gaaagagtggatttcagcctgcacggatggtcttgaaacacaaatggtttttggaccatcagcacgtgcccatcgacatccagaccagca

SEQ ID NO: 385268 - DNA, 100 bp, Homo sapiens
cacctttcagcctcatagtggaaactaggcataaggaagaatgtctcatgttcgagtctggggctgtcgctgtgctctatggagtcttgctctgtcgccc

SEQ ID NO: 385269 - DNA, 82 bp, Homo sapiens
tttcgactagcctctgctgaaaggtgtggatgaggtcaccattgtcaacattttgaccaaccgcagcaatgcacagagacag

SEQ ID NO: 385270 - DNA, 100 bp, Homo sapiens
gtggtcatggagtagaagggagcgatactacagagaccgtgtaattggtttgatgatgactgcctgtgacctttgttctgtgacaaaactgtggcccgtt

SEQ ID NO: 385271 - DNA, 124 bp, Homo sapiens
cggacacgccaactcttcgttcgattattagctttagtgaaatgggctaataatgctggcaaagtggaaaaatgtgcgaaaatggtgtgaatggaacattaacttcaaatgtagcagactctcc

SEQ ID NO: 385272 - DNA, 74 bp, Homo sapiens
atacagaatcttgaatcagaaattgagaagctggatcacctgctgttaccagctaccacccataacaagaccac

SEQ ID NO: 385273 - DNA, 101 bp, Homo sapiens
ggagcagttgtctgatgaagagaagggaggttcccctgaaggatgctaaggaatacgctgaatccataggtgccatcgtggttgagacaagtgcaaaaaat

SEQ ID NO: 385274 - DNA, 100 bp, Homo sapiens
gcatatcctgtccttcgagaccatcgacaagatgcgccgcgccagctcctactcctccctcaactccctcatcggaactcgaatcatttatgacagaaag

SEQ ID NO: 385275 - DNA, 100 bp, Homo sapiens
agtaggttgcatgcctccgcctgtgtcttctgcagtgattttaaccaaggcagttggtggaaatgagaggtgttatgaacataaacagtatagaaatgga

SEQ ID NO: 385276 - DNA, 75 bp, Homo sapiens
tgcccagccgggaactccccatcgcgttttgccagcgataatacgcctcaggttttgcactgattgcaaaaataa

SEQ ID NO: 385277 - DNA, 83 bp, Homo sapiens
cccgggaggaaggaacgaggcaaggagctaaagcagcgtgcgttcagccctgggagggtcaccatgaagttcaatcccttcgt

SEQ ID NO: 385278 - DNA, 100 bp, Homo sapiens
gagcttcattcagatgtggtggaatatgccaaggaaaaactggagagcttcatcaaaaatagtgatagctttgataagggagtatatctctgaaagaact

SEQ ID NO: 385279 - DNA, 113 bp, Homo sapiens
atctagtggaagcggcaagcagagaaaacctgccaatcaagatgagtatggggttctgatgactgtcttgtgaaaatatgggcaacagatgatgggaggttgttagctacctt

SEQ ID NO: 385280 - DNA, 96 bp, Homo sapiens
ccggccagcacccagggccctgcatgccaggtcgttggaggtggcacaggaggcatggcaaaaccacaaacggcggaacgattctgtgatcgtgga

SEQ ID NO: 385281 - DNA, 90 bp, Homo sapiens
ccctcgtcgcagtttccagcccgacgagcttgttttgtcccggactcggtgtgcctagattgatcggtataaggctcactctcccgcccc

SEQ ID NO: 385282 - DNA, 75 bp, Homo sapiens
cttcgtttttcgccgtcatgggcgcctcggccgccatggtcttcagcgcttcggaaccaaaaagaagcttcccag

SEQ ID NO: 385283 - DNA, 105 bp, Homo sapiens
gtgacatgcagttggatggcggtgactgcgtggagaaatggcttccctgaggcaagtgtaacctacattcccagcccaccagcctgacgcccagccagggagaga

SEQ ID NO: 385284 - DNA, 83 bp, Homo sapiens
ccggaggggaatccggaagggacacgctgaacagaataccctctaccatctgctttggtcagggtgccgctcgaggatttaaa

SEQ ID NO: 385285 - DNA, 100 bp, Homo sapiens
agccctcaaggccagcggagtcttcagcacccccacaagcatgcagggcacaaccataatggcattactgacttccgtgctacatgatgacaaagaattt

SEQ ID NO: 385286 - DNA, 75 bp, Homo sapiens
cggcgaggagaaccaactggtcccgaaagagatggccgccaagaacgagtcatgtttgacaaaattacatctcga

SEQ ID NO: 385287 - DNA, 75 bp, Homo sapiens
cctgaacctgcggcctgacccagagccacttctcaccgagatgattcatgaagccacatccacgtcctccgagcc

SEQ ID NO: 385288 - DNA, 75 bp, Homo sapiens
accaaataagctatatactttggttacctatgtacctgttaccactttcaaaaccgaggcctgcctggagcccca

SEQ ID NO: 385289 - DNA, 100 bp, Homo sapiens
atgaccaactgcttgttctcaccgatcttcttgtgtcaccatgctattatgcatagaaaggttacacggtgtgggcacacaacctcattgccattgctcg

SEQ ID NO: 385290 - DNA, 82 bp, Homo sapiens
ctcaatctctggaaaaacttcttgccaaccaaaaatgtctgtaaacctgtggaggagacacagcgcccgcccacactgcagg

SEQ ID NO: 385291 - DNA, 100 bp, Homo sapiens
ctcctgagtagctgggactgcaggtgtctactatgaaccatcctgtactcagaatgtgaatcatggtgtacttgtggttggctatggtgatcttaatggg

SEQ ID NO: 385292 - DNA, 75 bp, Homo sapiens
gggaaagcctggagtcctggctcaagtctctccgaggcaaagatggagctgagaagaaaagatcaatctctgcgt

SEQ ID NO: 385293 - DNA, 100 bp, Homo sapiens
ctatttttcatgacctttctcatctgactcgtgatctgcccatcttgttactccctagcagtgtggtaaggaacaagtgtcattcaaggatgtatgtgtg

SEQ ID NO: 385294 - DNA, 100 bp, Homo sapiens
tcgtaagcgcacgtttaaacatctcaaggcatctgcatctgggaccgacctcctgggctggctgatcaaagaggaagcagcagcaatgtctgctgtgggg

SEQ ID NO: 385295 - DNA, 75 bp, Homo sapiens
gcgacggcgggctgtcgtcacgacgacgtgcggacgcagcggcgggggcgttgaaggggaccagctgcctccagg

SEQ ID NO: 385296 - DNA, 90 bp, Homo sapiens
acatcaacttccggccgcagatgtcccagcactgctcagcacgcaggcatgtgaggaagctgggcttaaaggagactccagcaaatggag

SEQ ID NO: 385297 - DNA, 75 bp, Homo sapiens
gttggaagttaagggagacaaagttgaaaacaaagtgctggcacagttggtggatctgaaatctgaactgacaga

SEQ ID NO: 385298 - DNA, 74 bp, Homo sapiens
gcctcgggccctgcccctacatttggagcctggacacgcagtacagcaagcttatgtttattcagagccaaggc

SEQ ID NO: 385299 - DNA, 100 bp, Homo sapiens
ttctgcagaagctggagatgctggtgttcatttggtatcaggataacaacgaacttgatgcaagtgataggtttgccaaggtcagacctctcatcatccg

SEQ ID NO: 385300 - DNA, 100 bp, Homo sapiens
gggccatagcccatcaagctcctgccctggctgggcccctagactagagggcagagtgtctccagaacgctatagctatggcacctccagctcttcaaag

SEQ ID NO: 385301 - DNA, 75 bp, Homo sapiens
gtttcaagcgattatccagtacacattgataagttacggcagtcccagtcctactgcacagacacagagtgtctt

SEQ ID NO: 385302 - DNA, 88 bp, Homo sapiens
aaaatgtcactgtcccattggccatattttagaagaaagcagcgtgggcagcagtggggactctggggacgacagtgacagcgagcat

SEQ ID NO: 385303 - DNA, 83 bp, Homo sapiens
ctcgggagaagcagcgcctgttcccggggcagatccaggttcaggaagcggggagaggtggtgagagatgacccctgttgagg

SEQ ID NO: 385304 - DNA, 75 bp, Homo sapiens
ctgtctgagggagatggtgacaagctcaaggcctgcgagacctgcctagagctggaacgttacctccagagcgag

SEQ ID NO: 385305 - DNA, 95 bp, Homo sapiens
aacattggtctaaagtctttccaaaaggtcaaggttcacaaggtttggtgcacctcgatttggaggaagtagggcagggcccttatctggaaaga

SEQ ID NO: 385306 - DNA, 75 bp, Homo sapiens
tccagaggacataccacctccaggatcaggatgcagaggttgcagatatcaagaaagtcaacaacttcatcagag

SEQ ID NO: 385307 - DNA, 50 bp, Homo sapiens
tttccaaatattcatctgtacagagaaccatggtgtggtgttggtaaaag

SEQ ID NO: 385308 - DNA, 100 bp, Homo sapiens
gaggcctggtcaccacagtcaccttcactgggatgatgcgctgcagccagctggcccccagggccctgcagcgctcccagatcagctacaaatgccacct

SEQ ID NO: 385309 - DNA, 90 bp, Homo sapiens
tgactgcaaaacagccgtcaattgttcatctgattttgatgcgtgtctcattaccaaagctggtgaatttccaatcatcagcccaggtcg

SEQ ID NO: 385310 - DNA, 101 bp, Homo sapiens
aaagaaacaaatgagagtattttgtcagatatgtcaacattacctgaccaacgtgaatactactgttaaggaacagtcttactactttgaccgcgatgatg

SEQ ID NO: 385311 - DNA, 100 bp, Homo sapiens
tggaagagcccgatttcctcaggaggtgctttacaaggccaagtacggtccaatgtggatgtcctacttagggcctcagatgcacgtgaacctggccagt

SEQ ID NO: 385312 - DNA, 83 bp, Homo sapiens
gattggcacaggaccagactcaagacacacaactcataacagttgatgaaaaattggacttcctcgttctgcccatcttccta

SEQ ID NO: 385313 - DNA, 96 bp, Homo sapiens
cggcagcccgggtacgcgccgcccggcgcgcacaggctgtagcaggttccggcggacggcgttgcgaagcacctctccgagccatgtgagccccct

SEQ ID NO: 385314 - DNA, 50 bp, Homo sapiens
cggggaggtcacctgacgaggagtgtcaaaccagaagagaagtaaaattc

SEQ ID NO: 385315 - DNA, 82 bp, Homo sapiens
acacctccattggatttaaaagacagtcctcgtcagcactgactttcagctatggaatcggctccataaaaatacagactca

SEQ ID NO: 385316 - DNA, 50 bp, Homo sapiens
ctttgatttacagcagctgcaggtggtctttgggaagaagcttcctgcct

SEQ ID NO: 385317 - DNA, 75 bp, Homo sapiens
ccggagactttggggcctaactaggaagggaaaaggccgaggcatcagcgtgtgaagaccgcaaagacgatcccg

SEQ ID NO: 385318 - DNA, 143 bp, Homo sapiens
taaaaagcccccaaatcgccctggaatcacttttgagattggtgctcgtttggaggcactggactacttacaaaaatgtttcacctgtgattccctggatggttaccattcttttgaatgcggctccatagatcccctgacag

SEQ ID NO: 385319 - DNA, 98 bp, Homo sapiens
ggcataccaccctgcactgtgaggcaatttttcacagcaaaagtctttgctaaactccttcatacagattcatatggaagaatttccatcatgcagtt

SEQ ID NO: 385320 - DNA, 95 bp, Homo sapiens
attggaacatgacatgagattaagcattcctctgaatattgatttgctgaatagcccagacttattggaagcaacgattggtgatgtaattgggg

SEQ ID NO: 385321 - DNA, 100 bp, Homo sapiens
ggcgccctgacccggcctcaccatgttggtgctgtttgaaacgtctgtgggttacgccatctttaagtactatactggcaattgctggagaagattttgc

SEQ ID NO: 385322 - DNA, 89 bp, Homo sapiens
ctgtatgagctctcagcaagcaactttgagctgcacgttgcacaagcccaagaagatgaaaggattgttcttgttgacaacaaatgtaa

SEQ ID NO: 385323 - DNA, 82 bp, Homo sapiens
cgcggagccgcgcagccctcggagcacggtgaaagaaaatggcccgaaccaagcagactgctcgtaagtccaccggtgggaa

SEQ ID NO: 385324 - DNA, 82 bp, Homo sapiens
ctttagattttggcagcaacggtggctctggagttatagaaactgatctctctaaaatctatgagatgcaaaaaactattca

SEQ ID NO: 385325 - DNA, 50 bp, Homo sapiens
accacagtcacgatgatcacagtctctgatgagtcagtacaagcaagttc

SEQ ID NO: 385326 - DNA, 75 bp, Homo sapiens
acaagaccctggtgaaggaggtcgtacagggggagtcggtgaagtacttcctggacaacttggaccggatcggcc

SEQ ID NO: 385327 - DNA, 89 bp, Homo sapiens
ggcgggagacgagaagcctgaaaagtcgcagcgagctggagccgccggagtttcccagagctatggggacttcccatccggcgttcctg

SEQ ID NO: 385328 - DNA, 83 bp, Homo sapiens
aaggcattgtgcaggcttgttgaacttctcaagaaaaatctggtccttcatcagaactaggaaagcactgatttaaacatttg

SEQ ID NO: 385329 - DNA, 127 bp, Homo sapiens
tgttggttatgagagatttttgggacctgaaatcttttttcatccagagcttttgcctctaatgacagagcagctacagtggatgccatttgtgaatatcaaacttcacgagccttttgtaaaattt

SEQ ID NO: 385330 - DNA, 96 bp, Homo sapiens
gacagtgaaaccctttgccatcgacatatttcctgtcaccaacaaagatttcagggaatatccccggctcggctgtgctggtgtttgacatccatg

SEQ ID NO: 385331 - DNA, 88 bp, Homo sapiens
tatgataagctgagcagagccctgcgatactattatgacaagctggattttcctctacgtgcttcagtcttctctacacaaagagctg

SEQ ID NO: 385332 - DNA, 73 bp, Homo sapiens
ctgaaatcattgaagtgcttggagtgcagaactgaaagaggtttgcaggccattttggttcacgaggcatcag

SEQ ID NO: 385333 - DNA, 82 bp, Homo sapiens
tttcaggcctggcacggaatgcagtttttacataagttagcatgcaagcggcaagatgtcctacagatgaattatctttaac

SEQ ID NO: 385334 - DNA, 100 bp, Homo sapiens
tctgatgctctctctccagtccttgctgaagagactttccgttacatgagtgcatgtgagggaaccctggcttgttcaacctgtcacctcatctttgaag

SEQ ID NO: 385335 - DNA, 100 bp, Homo sapiens
cgccatgtcccgctacctgcgtccccccaacacgtctctgttcgtcaggaacgtggccgacgacaccagacccatcctcatgccaacaaactacccttga

SEQ ID NO: 385336 - DNA, 100 bp, Homo sapiens
gttcttgctcttgttttgccctcaattgtaattctggcctctactcaatagtccccccagctttgtgtgctggtctcggggcttcatggagatgaatggg

SEQ ID NO: 385337 - DNA, 100 bp, Homo sapiens
agtgcctgtgtgatccagaagccaatgacctgggactctctctctggaccacctgttcagagcatgcatgcaggtctgctggagtttgctggaggtccac

SEQ ID NO: 385338 - DNA, 98 bp, Homo sapiens
ctccgggaggcagaagagaagtccctgctggtgttcgaaatccgcaccactgatgacctcactgaggcctggctccaagaaaagttgtctttctttcg

SEQ ID NO: 385339 - DNA, 90 bp, Homo sapiens
tgcctggaaagaagggcaattcaaagatatcattaccaaggctgccccctcggtcactctgttcccgccctcctctgaggagcttcaagc

SEQ ID NO: 385340 - DNA, 95 bp, Homo sapiens
cagtacaaagaagactcttgtcacactaattgccaacaacaatgggtgaatctgtaaaatatttcctggataacttggataaacttggagaacca

SEQ ID NO: 385341 - DNA, 100 bp, Homo sapiens
cagagtccaagaagcaataatccactttcgggaggccatacggctcgcaccttgtcgcttagattgttatgaagtgagacggtttaagcggaagcatctt

SEQ ID NO: 385342 - DNA, 76 bp, Homo sapiens
gtgagctcatcaagataattagatgtcaagccctccaacatcctagtcaactcccgtggggagatcaagctctgtg

SEQ ID NO: 385343 - DNA, 75 bp, Homo sapiens
taaataccctttcaaatctccatctatagggcaatgtgtatgtgaagtgcccatcaattgctgcagctattgctg

SEQ ID NO: 385344 - DNA, 100 bp, Homo sapiens
aaatcattcagtgaatcccaactgttatgccaaaggtcgctttgctgttcgtgatatgagacagacagttgcggtgggtgtcatcaaagcagtggacaag

SEQ ID NO: 385345 - DNA, 100 bp, Homo sapiens
gaggactgggtttttctgtaagaatggcaagtcatccagctggaaggcgatgaaaggctgtaccagtgcaggtcctcactttaatcctctatccagaaaa

SEQ ID NO: 385346 - DNA, 100 bp, Homo sapiens
tatcgggccaaacaagtgcaagtgtcatcctggttatgctggaaaaacctgtaatcaaggaagagatgatctagagagcttccagcttgagataagtggc

SEQ ID NO: 385347 - DNA, 100 bp, Homo sapiens
catcgccttgctggcctacgtcgcctctatgtgatgatgatgccatttaaacgacaggctctagtggaatttgaaaacatagatagtgccaaagaatgtg

SEQ ID NO: 385348 - DNA, 74 bp, Homo sapiens
tttttcggatcatgtctggtggctccgcggattataacaggttggtcaaagaaaaagtgatgtatgaaaaagag

SEQ ID NO: 385349 - DNA, 101 bp, Homo sapiens
gggcacgatgttgaacatgtggaaggtgcgcgagctggtggacaaagcgtactaggttttgacaagcttgcatcatgcgtgagtataagctagtcgttctt

SEQ ID NO: 385350 - DNA, 75 bp, Homo sapiens
ccaaggctgtgcaacgcggagcgtgagaggaaggttctttgcagatgtagttccagcagtcaggaagtggagaga

SEQ ID NO: 385351 - DNA, 80 bp, Homo sapiens
ctgagacacttatatgccaaagatgactatgagcttattgacgaagaggatcacctagcccgggtagaagaggcaatcac

SEQ ID NO: 385352 - DNA, 101 bp, Homo sapiens
ggaaccccaggcccttccagcggtggccacacgtcacacagtggggacaacagcagtgagcaagcccctgccgccttgtcatgactccgaggaatccatgg

SEQ ID NO: 385353 - DNA, 100 bp, Homo sapiens
ccagacctcttctgggatgactcagctctcaccatcattgtgaaccccatggagtctactctggatgatgccactgatgcctggggaataaaggtggagc

SEQ ID NO: 385354 - DNA, 99 bp, Homo sapiens
taagcgaggctgtggaagatgctcccagctacagagggtaccgggatgcctgcaccattactggttggtactaagaagtgcctttcctgacgtctctgc

SEQ ID NO: 385355 - DNA, 97 bp, Homo sapiens
gccgtccagcagatggcggatgccctgcagtacctgcagaaggtctctggagacatcttcagcagacaaatttacatgtattggagaccagaccaga

SEQ ID NO: 385356 - DNA, 114 bp, Homo sapiens
agattttgacagtcgtagatacaaatttttggatgatgatggatccatttctcctattgaggagtcaactgaccgcttagattcatctgctgtccttgacaccggcaagtatgt

SEQ ID NO: 385357 - DNA, 100 bp, Homo sapiens
tggagagtattttgttcaaatgttcagactttgttgtggtacagtttaaagatatggactccagttatgcaaaaagagggagaagtctgttggaacttgg

SEQ ID NO: 385358 - DNA, 87 bp, Homo sapiens
tcctgatcgggacagtgtctttccacctttggatccgcagaaatcgaggtgctggagaatctggtaaaagcaccattgtgaagcaga

SEQ ID NO: 385359 - DNA, 77 bp, Homo sapiens
agattcgcagtggtcgcttcttctccttgtggtattcatgggtagtttgaaatatccagatgagaatggatttgatg

SEQ ID NO: 385360 - DNA, 83 bp, Homo sapiens
cccgaggccaggagccaggggcccagaaggttgatgccggcccaggatggatcagacctgtgaactacccagaagaaattgtc

SEQ ID NO: 385361 - DNA, 101 bp, Homo sapiens
taaggtctggtcggatggggcaggatggctgcgttgacacgtcttatttaatccacatcatagctgcccagccaggtccccgagcacagccctgtggttta

SEQ ID NO: 385362 - DNA, 82 bp, Homo sapiens
cacaatttctacagcagagaccttgagggatatctttcttcactcctcttcacttcttcagattttttatcaagcagaaatg

SEQ ID NO: 385363 - DNA, 82 bp, Homo sapiens
gtaaatatacgctttgttggtggactactctcagcctactatctgtctggagaagagggagaccagtgtaaatttgatcatg

SEQ ID NO: 385364 - DNA, 98 bp, Homo sapiens
atgtcggacagcgaggacagcaacttttccgaggaggaggacagcgagcgcagcagtgacggcgaggaggccgaggaaccgaatattgtatctgacgc

SEQ ID NO: 385365 - DNA, 102 bp, Homo sapiens
acttccacttcgtgttcttcctagcttccctgtatgtgatgatgaccgtcaccaactggttcaagttgggggccgtcccgctcctaaggcaggaagatggtg

SEQ ID NO: 385366 - DNA, 83 bp, Homo sapiens
cagcctgggggatgagatgttggcggctgcgctcctaaaggccaagtcccagattcgccaaagtgaggacaaaaggaaccatg

SEQ ID NO: 385367 - DNA, 98 bp, Homo sapiens
ggccacctctgagaagggagacgacgctgctgggtccgctgagcggggcgacccgaggagtgcctgtgaagaaaacggggtattgccctgaggcttat

SEQ ID NO: 385368 - DNA, 76 bp, Homo sapiens
ctgaacctcccaagtagcgggactgcagtgctacctgggcgatgccttccgctgtgccagctgcccctaccttggg

SEQ ID NO: 385369 - DNA, 98 bp, Homo sapiens
tactcctacttccacttcgtgttcttcctagcttccctgtatgtgatgatgaccgtcaccaactggttcaagtggtatcacggaaaacttgacagaac

SEQ ID NO: 385370 - DNA, 87 bp, Homo sapiens
cggtgaaatcctgtcctgaagactgtaaggcaatctttggcagccagacactacctaactccaatttatggacaatgaataatggtg

SEQ ID NO: 385371 - DNA, 88 bp, Homo sapiens
atctctgtaccgggcgatgctgagagagagcaagcgtttcagcgcctacaattacagttggcttcctgaggctcaggtagtccaaaga

SEQ ID NO: 385372 - DNA, 100 bp, Homo sapiens
aacgtctacactgtacatgctttttattacaagactacggagcataggaggaaaattcatcatctggttgaaatcacaaagattagacacctttttagat

SEQ ID NO: 385373 - DNA, 98 bp, Homo sapiens
ttacatccaagaactacaggctttacttttgtggtagaccgtctaagagaagatttggggatattccctgcccaaaaaattcctggaaaattgactag

SEQ ID NO: 385374 - DNA, 87 bp, Homo sapiens
tcctttcttgttttctcaacattcacaatgtccatatatagaatttgaatcatttgacaaggagttcatgatcaagtgttgcccaca

SEQ ID NO: 385375 - DNA, 76 bp, Homo sapiens
tgatgtgggtttccagaggaacatcactgtcaaactttatcaggcagaacaagagaccccatatcatgtgaacctc

SEQ ID NO: 385376 - DNA, 75 bp, Homo sapiens
agactagaggctggataccaaatagcagtggaaaccggcatctccttggaaacaatgccatctttgaatgtgaga

SEQ ID NO: 385377 - DNA, 101 bp, Homo sapiens
caagttcaaccaggtggagagtgataagcttcgaatggacagagccatccctgacacccggcatgaccaggatgtctcagatgcagcttgcacaccatggc

SEQ ID NO: 385378 - DNA, 82 bp, Homo sapiens
gctcagcgcagccctgcaggccaagcgcagcctccaccaggccactcttcacctccaccatgagcctggacatccagagcct

SEQ ID NO: 385379 - DNA, 75 bp, Homo sapiens
atttctgataaaccggagaaggaccaggatggacaaccggaaattttctacacattttggaattcagttactcag

SEQ ID NO: 385380 - DNA, 100 bp, Homo sapiens
gacatgagcagcttcaacgcctttgagagcaaacagcagagtgcagaccaggacgcagaaaggatggtgattgctcacaccaaagccttggacccctccc

SEQ ID NO: 385381 - DNA, 90 bp, Homo sapiens
cgcttttcccctggccttctgtatcttcatggtgcggctcatcttcgagagcactttcttatgcaaggagctaaacagtgattaaaggag

SEQ ID NO: 385382 - DNA, 132 bp, Homo sapiens
ttattgtgaacaggtagagtacctgttgttgcagagttattttctgagtcagtttcagcactattcctgatcagagaactccagttgcttcaacacacagtatcagtagtgcagccaccccagatcgaatcc

SEQ ID NO: 385383 - DNA, 82 bp, Homo sapiens
cgctgctgctgcccggcctcggggctcagatccggaacctgaccgtgctgacccccgaaggggaggcagggctgagctggcc

SEQ ID NO: 385384 - DNA, 75 bp, Homo sapiens
cttccagactcggtgctgtacccgccagatgaggatgacatcaatgatgtgacttctatggcaggggtcaacctt

SEQ ID NO: 385385 - DNA, 117 bp, Homo sapiens
gtggatttccttgcggaaaggatgttggcggtccctgtgacctgtggagacacggccagatctgccctccatgccggtggtggtgtgcacattgagccccggtatagacagttcccc

SEQ ID NO: 385386 - DNA, 100 bp, Homo sapiens
ggcttgccctggtcttgctcggccgatgaagtgcagaggtttttttctgactctgtttgctggctacacggacaacctggtgcgagtgtggcaggtgacc

SEQ ID NO: 385387 - DNA, 100 bp, Homo sapiens
gtagtcgctggagtccgcgcctccctgggcgagaaccgaagtttggaggtagacgagcaggcgagcggtttgcccgggcgcagagcatgaaggccgggcg

SEQ ID NO: 385388 - DNA, 83 bp, Homo sapiens
gggaaatcgggctgaagcgactgagtccgcgatggagcactcggacatgccagaggagatgcgcgtggagaccatggagctat

SEQ ID NO: 385389 - DNA, 100 bp, Homo sapiens
cagttgtgcgttgcggccagtcgccactgctacatgccaatatttggtttctgtccagcccatgatgatttctacttggtggtgtgtaacgactgtaatc

SEQ ID NO: 385390 - DNA, 100 bp, Homo sapiens
attccaagtaactcttatttggacgatgtatctcctaggctacattcctaaagacaacaggctttatctgggggataaagaattgaacatcattagctat

SEQ ID NO: 385391 - DNA, 137 bp, Homo sapiens
gggaagcactacaagggtcctgaagtcagttgttgcatcaaatacttcatatttggcttcaatgtcatattttggaatgaagaaggagccccacaggaaggaattctggaagatatgcctgtggatcctgacaatga

SEQ ID NO: 385392 - DNA, 83 bp, Homo sapiens
cattaatcctgtgggccgacagaagtgcaggcccttatctccagaggccagagcttccatccacccaggcagcctggtgatct

SEQ ID NO: 385393 - DNA, 75 bp, Homo sapiens
cgcgagagcatcaaactggtgtccatcgagtgctgatggcagagattggtgaggatttggataaatctgatgtgt

SEQ ID NO: 385394 - DNA, 75 bp, Homo sapiens
gtcggggatagtgtcatcggttcggtaaagtttctgttctctgtatcctagaaggaaaacatcaccatggctaca

SEQ ID NO: 385395 - DNA, 90 bp, Homo sapiens
agtttgagaggaacttcattgctcagggtcacctcatcatctcaaggaggagcattcccctgggctaaggcactggggccgaactctagg

SEQ ID NO: 385396 - DNA, 100 bp, Homo sapiens
cccgcgccgccagtggagcccccgcgcgcccggccggcccggagcaccgagctcgcggcacggtaggaggtcacaccgacaaatctgaagcgggtttgcc

SEQ ID NO: 385397 - DNA, 50 bp, Homo sapiens
ggggcactcaggtgtttgttactgggagtgttggtggtcttcaatggtgt

SEQ ID NO: 385398 - DNA, 75 bp, Homo sapiens
ttgtttgtggatcgctgtgatcgtcacttggagaatggggtactaagagaaaagcacgaagctgtggatcatagt

SEQ ID NO: 385399 - DNA, 100 bp, Homo sapiens
ccgctttggcgccaaatcctgagacaagttttggtattgtcggctttcgccaaatcacaaagtcctgcattacggagacttagaagagagtcctcaggga

SEQ ID NO: 385400 - DNA, 100 bp, Homo sapiens
ttttggctcctgactttgatcgttggctggatgaatctgatgcggaaatggagctcagagctaaggaattagcttaccgaaaggagatggtgagagctga

SEQ ID NO: 385401 - DNA, 50 bp, Homo sapiens
catgagatgattgccaaacccccagctgaactgctcattttcagtgtccc

SEQ ID NO: 385402 - DNA, 128 bp, Homo sapiens
tcggctctcagaagaagtttagccgcccacttctgcctgccactacaacaaaactgtctcagtgcatctatcctttgggctctaaatcacttaataacctaatttctcctgatttggaagaatgtcac

SEQ ID NO: 385403 - DNA, 98 bp, Homo sapiens
cgcaacctgttccccaaagacactttaatgcccctgcagatcaagtcagtagtggcaccagagcatgtgaagggctacatctacgtggaggcctacaa

SEQ ID NO: 385404 - DNA, 75 bp, Homo sapiens
ttaagtacaatggtgggcttaattttagaaatgcactcggtgatggaaagagagccactattctgaagaacactt

SEQ ID NO: 385405 - DNA, 98 bp, Homo sapiens
atctcagtggcacacttcacattgaagatgcagctgtgccaggcgcacaggaagctcttaaaaggttaccatggcctctactgtgaggaggaatataa

SEQ ID NO: 385406 - DNA, 75 bp, Homo sapiens
gggttggtggcctgaatgtattagcttcgctgcgtctgcccaagagttcgtgccctcgtgaggctggcatgcagg

SEQ ID NO: 385407 - DNA, 100 bp, Homo sapiens
tttactggattgtcatatcagcatctgttctcctcagcttcgtcagaccatggctaagttccttcaggagcacctggcccccaaggcccaggagatcgat

SEQ ID NO: 385408 - DNA, 87 bp, Homo sapiens
cgcgcccaactgcatcctcctggccatgttcctcgtccactacgggcatcggtgctttggagcttgctgatgtgtctaatgaactgc

SEQ ID NO: 385409 - DNA, 50 bp, Homo sapiens
aggacccaggagaaattcgccctcaaaggtaacaagatgctcaactatag

SEQ ID NO: 385410 - DNA, 98 bp, Homo sapiens
agaagcatcgttaaagtctctcttcaccctgccgtcatgtctaagtcagagaatagcctaacatggcagaccagagacagcgctcactgtctacctct

SEQ ID NO: 385411 - DNA, 82 bp, Homo sapiens
agaactgtccagcgtcacgctcagcacttgccgaggaattagggaagaggaagaacgtctgagaaataaaattcgagctgat

SEQ ID NO: 385412 - DNA, 87 bp, Homo sapiens
aggaattccgggactcagatgagcatctgttaagaacatcttcagccagccggcctgcttccctgccaagagtgcctgcgatggaaa

SEQ ID NO: 385413 - DNA, 75 bp, Homo sapiens
gcgccgcgcacggacttcggcagagggatgccgttctgagtgcctgactgcctcgccccgaaggatggcctcgga

SEQ ID NO: 385414 - DNA, 100 bp, Homo sapiens
gttgacatctgacgacgtgaaggagcagatttacaaactggccaagaagggccttactccttcacagatcgccatggacctggctcaggcaggcagcaca

SEQ ID NO: 385415 - DNA, 85 bp, Homo sapiens
cccaggcggtgacagagtggagccatggctagagccctgggcgctgcctatggcacagccaagagcggtaccggcattgcggcca

SEQ ID NO: 385416 - DNA, 90 bp, Homo sapiens
gggcggcgagccgggtgtgagctgcctgaaaatgcactcggatgccgccgctgtcagccaagtcctgtatctgccatgtctgtggcgtcc

SEQ ID NO: 385417 - DNA, 100 bp, Homo sapiens
ctggatgggggaccacaagatcctcatcgacagtactgccaaatctgtcgaaagggagataatgaagaactgcttcttctttgtgatggctgtgacaaag

SEQ ID NO: 385418 - DNA, 90 bp, Homo sapiens
tgagtttccaagtcaggatatgtgcctttcagctttaaagagaattgaaggaccgcagctgaatgcacagctagaaggttggctttcaca

SEQ ID NO: 385419 - DNA, 100 bp, Homo sapiens
gtggccgattactgcgagaacaactacatacaggtattttcttacactgctgacaaagaaatccgaaccgatgacttgtgcttggatgtttctagactca

SEQ ID NO: 385420 - DNA, 133 bp, Homo sapiens
gcgactagcggcggcgggagcggcgccgagaggccgtgcgggacgcgggcgccaggaccggccgaacgcagaggatggccgagcctcgatttaacaacccctacttctggccccctcctcccaccatgcccag

SEQ ID NO: 385421 - DNA, 107 bp, Homo sapiens
agcacccctttcttgaaccgaacagagtcaagtggaatcaaaggatttctctctgatcaaacggacagttcaggactcagaatctaaggatgaatgttcaccgtggc

SEQ ID NO: 385422 - DNA, 75 bp, Homo sapiens
aatttaccagagataattgataacaccctgtaacagctgaaaatacactttcgggaaatggcctctaaatcctgg

SEQ ID NO: 385423 - DNA, 82 bp, Homo sapiens
gtttttcggatcatgtctggtggctccgcggattataacagctcccgttctctgtcatcggttccctcaatggagtccacat

SEQ ID NO: 385424 - DNA, 82 bp, Homo sapiens
cctgcgagccgacaacgccttcatgctgctcacgcaggcagagaaaatcctgaaggagcaagagcggctggcctacataaac

SEQ ID NO: 385425 - DNA, 82 bp, Homo sapiens
gaaattcgacttcagtaatttgagtagtagggggtgaatctctacattaagaacttggatgacactattgatgatgagaaat

SEQ ID NO: 385426 - DNA, 91 bp, Homo sapiens
tccaaggaagccacgtgcagacatctacaaccttcgatctcctgacgagtggatccataaagaacccagccaacccgcagagggaggggag

SEQ ID NO: 385427 - DNA, 100 bp, Homo sapiens
cacaaaccagggctcgccatgaagccaggtcccacgacagtgatgtccgagggcgcccggaacattgtggcagccatgaaggctcatggtgtggacaagg

SEQ ID NO: 385428 - DNA, 80 bp, Homo sapiens
cctaggcattttgctgtctcctcctaatacggagttaaagaggattgcactgcctccatggaaccttcagcaattgaact

SEQ ID NO: 385429 - DNA, 74 bp, Homo sapiens
acgtttagcttcaaaaatgacaagttcgataaaagtgtgcagaccaagacaaatgctgtgcttcatgaagttaa

SEQ ID NO: 385430 - DNA, 82 bp, Homo sapiens
gagaggccgtgcgggacgcgggcgccaggaccggccgaacgcagaggatgacgtcatgatgccccagcgggtgaggctgcaa

SEQ ID NO: 385431 - DNA, 100 bp, Homo sapiens
gtcccagatatagccgttggtacaaaggccaagactaaggggctgcagagcggggtggacattggcgtcaagtactcggagaagcaggagcggaatttcg

SEQ ID NO: 385432 - DNA, 75 bp, Homo sapiens
caatggacctgcctgggcatagacttccttaaggagccactggaagtggggaaatggtctgtacaatatgtcaag

SEQ ID NO: 385433 - DNA, 87 bp, Homo sapiens
aaagtgtgtgggaggcgttgacctgccccttgtcctggccccgatgatctatctggtggtgaaagcagccgtcggactggtgctgcc

SEQ ID NO: 385434 - DNA, 75 bp, Homo sapiens
tccactttcgccagcccgtgccgcgagcgcggcctgcaggaggtggcggtggaaatcgcaaaggcaaaagcaaga

SEQ ID NO: 385435 - DNA, 110 bp, Homo sapiens
cctgttgaaagaacccacaggtgcatttcacagcactctgggcgaaaattggatgtgaaaatgaagccagaccgaggaactgcaagcacatgttgaccagataactgaaa

SEQ ID NO: 385436 - DNA, 98 bp, Homo sapiens
cggggagcaggagaccaagttggacctcattagcaaagtacaagttgtgcaaagtgaggaagattactgtgggagtgaagggaatccctcacctggtg

SEQ ID NO: 385437 - DNA, 100 bp, Homo sapiens
ccgacttcgatgatcgtgtgtcggatgaggagaagaaatatcctccagtcagaaactgagaaattaacttcacattgcttcgagtgggacaggaaacttg

SEQ ID NO: 385438 - DNA, 101 bp, Homo sapiens
tggacctccagagagcagccatcatcttgggttaccgaattcaaggtgtcattgcccagcgcagttgtgaaaaacttcaggacaaaaatgtttcatttaag

SEQ ID NO: 385439 - DNA, 75 bp, Homo sapiens
cttgggacagggggatttggaaatgtcatccgatggcacaatcaggtagagtacagagagatggatgaaagcttg

SEQ ID NO: 385440 - DNA, 75 bp, Homo sapiens
aattagaagtgcttttagaagctgctattgatcttagtaaaaagggcgcctgtgtctggcagagctggtgtgaga

SEQ ID NO: 385441 - DNA, 100 bp, Homo sapiens
tatcaaggacatcaggacaccgggagtgggagagattggactgggagactcagcagcccaatagaatcctgccagaatttctacaaagatttcacattac

SEQ ID NO: 385442 - DNA, 75 bp, Homo sapiens
gcctgcggagcctgtggggcagacaaagatcattccactcagcctgggacgatggggaggaaaaaaatccagatc

SEQ ID NO: 385443 - DNA, 50 bp, Homo sapiens
agaacacacatactctgataaaggggagttgctgagtcagcccagaccgg

SEQ ID NO: 385444 - DNA, 75 bp, Homo sapiens
ggcgagtttccgatttaaagctgagctgcgaggaaaatggcggcgggaggtgcacatgaacttgaacagatgcag

SEQ ID NO: 385445 - DNA, 101 bp, Homo sapiens
gcggctcggcaggcgggttcaggcttcgggggccaggcaagcacgaggagcggcaggacgagcatggctacatctcccggtgcttcacgcggaaatacacg

SEQ ID NO: 385446 - DNA, 100 bp, Homo sapiens
ctgatttcaccatgcccatattccctttcctcagatgctctctacgatgtcatcactgtgggagccccagctgcccattttcagggatttaagaatggtg

SEQ ID NO: 385447 - DNA, 85 bp, Homo sapiens
aactggaccagccagcagcctctaagagctcctagacggagctcttgtccctggcaaagcgaaagcgcagtgactctgaggagaa

SEQ ID NO: 385448 - DNA, 75 bp, Homo sapiens
tgccaggttccagactctatgacatctgctgcctgcctagtgtaagcggaatggatccgcctttcggggatgcct

SEQ ID NO: 385449 - DNA, 98 bp, Homo sapiens
ttagaaccgcagcagggacgtcggtttgctatcgggactcggcgaggacgtgagagggtccaagcctggtaagaatgtccagcttcaggagaatgaaa

SEQ ID NO: 385450 - DNA, 100 bp, Homo sapiens
ttggagaactgctaacctagggctactgttgattttgactatcttcttagtggccggaaatgatttgcagctgagtgaatcaggaagtgacagtgatgac

SEQ ID NO: 385451 - DNA, 101 bp, Homo sapiens
taaatggaagcagggtaccgccaaccgcctccacgtttgataaactttcagaatcacagccccaaacccaatggaccagttcttcctcctcatcctcaaca

SEQ ID NO: 385452 - DNA, 82 bp, Homo sapiens
ccaagactctgaggctgatatgcaatgtcacttacaacattaatcagatactgcatttaagttttctggatatgccgcagaa

SEQ ID NO: 385453 - DNA, 100 bp, Homo sapiens
ctgacagatccgtagggaggacaccgtgacttcccggacgctgggaaatggactcgctcagcagcagcctgaaaacttgctacaagtatctcaatcagac

SEQ ID NO: 385454 - DNA, 100 bp, Homo sapiens
cctggggctgagaggagtcttctggtgcagtcttattttgaaaagcacatttgcaggtcggccacactggctggatggggagagctgtatggacgctcag

SEQ ID NO: 385455 - DNA, 75 bp, Homo sapiens
atttgcttggaaaaacgtgtgggtacgaccttggtgcggccgggtgtgtggcaacattacttcatgatgcagcca

SEQ ID NO: 385456 - DNA, 98 bp, Homo sapiens
tctttgtttccccggtgtctgttgcagcttgcgtttggggctttcgacatgacaggtcactagaggtatccagctcacatagaagacattgactacga

SEQ ID NO: 385457 - DNA, 83 bp, Homo sapiens
tttttgaaccaaattatgctgcaaatgtgggtttggaggatttgggacaacatctacaactgcaggttctgcattcagctttt

SEQ ID NO: 385458 - DNA, 95 bp, Homo sapiens
atggaggaacatgatcaggcatctccatcaggatttcaaccagagatgggtgaactccaggatgttataccagattcacaggcagcggaaaaaag

SEQ ID NO: 385459 - DNA, 100 bp, Homo sapiens
aagccatcgtgaaggagctcctggagctggaaaaattctgtaggccgttggaaggaagctaccataccaggccacttaaactcctacaccatcaaaggcc

SEQ ID NO: 385460 - DNA, 75 bp, Homo sapiens
accatggacgtgggcgaacttctgagctaccagcacaggttggagctgaaggagtgcccaggctgcggatggagg

SEQ ID NO: 385461 - DNA, 100 bp, Homo sapiens
agacgtgttccagagcctgagggaagtgggcaatgccatcctcttctgcctcctcatagagcaagctctggattctcagtaagttaagtcaggaaatcaa

SEQ ID NO: 385462 - DNA, 100 bp, Homo sapiens
cgctgcccgagaatgggaattctcttcactagaatatggagactgttcaatcaccaggcctggagcattggtaagcgtcacactgccaaagtgagagctg

SEQ ID NO: 385463 - DNA, 71 bp, Homo sapiens
atgacctgtccaaggaccctgccacctggtttccatcgggcctatagttccccactctacagcaaccagca

SEQ ID NO: 385464 - DNA, 74 bp, Homo sapiens
ggaagatcaagaagctcattaagagcttggaggcggcccgcggggtagaactgttaccattaagttgaagaatg

SEQ ID NO: 385465 - DNA, 100 bp, Homo sapiens
gccgccgccgccgccatcatgagggaaatcgtgcacttgcaggccgggcagtgcggcaaccaaatcggcgccaaggcgcagacggggaagcggagccaac

SEQ ID NO: 385466 - DNA, 75 bp, Homo sapiens
tgctgagcccgtccgtccgccgccaccacccactccggacacaggaacttgctactaccagcaccatgccctacc

SEQ ID NO: 385467 - DNA, 98 bp, Homo sapiens
taacaacagcgaggaagaagaggacgacgacgacgaggaagaggaggtttctgagacatgaagccattattatatcaggaaccgaaatggccaagcat

SEQ ID NO: 385468 - DNA, 90 bp, Homo sapiens
gcctgccacatcgggggcaccaccctccatgcctttgcagattgcagccaaaattggaggcgatgctgccacgacagtgaataacagcac

SEQ ID NO: 385469 - DNA, 100 bp, Homo sapiens
ggcggtgcctatcactgtcctggctgtgctggccttagtgccccaggatcagggaggactggagcagctcctgaagcagcagcagcagcaccagtggcag

SEQ ID NO: 385470 - DNA, 75 bp, Homo sapiens
cgggaagctgggcagctacaaaatcaatggccggacgaaagtaaagagaaatgtgtatgaccttacaagtatccc

SEQ ID NO: 385471 - DNA, 83 bp, Homo sapiens
caaaaagaaaagagatgagagaccactctttccccaaatggcagttgaattcctgcatgaactgaatgttccatttttcaaag

SEQ ID NO: 385472 - DNA, 100 bp, Homo sapiens
cgggaggttcggttgtcgcccgttggccgcgcggcgccgcgctcggcggccgccattgcaggcaaaacccatttatggcggttggctgctcctggctcca

SEQ ID NO: 385473 - DNA, 100 bp, Homo sapiens
gcaagcaccacgcggcctacgtgaacaacctgaacgtcaccgaggagaagtaccaggaggcgttggccaaggatattcctatcattccggatctggagga

SEQ ID NO: 385474 - DNA, 98 bp, Homo sapiens
ttcgcctcgcctcgggacccgcggtccccgctcttgctgccttgctatacatcctgacaaaattaggattgcaactggacagatagctggcgtggata

SEQ ID NO: 385475 - DNA, 75 bp, Homo sapiens
ctcctggctgccgccgtcagctgtgccgtcgcgcagcacgcgccgccgctctaagcgaaagacatgaggcctcag

SEQ ID NO: 385476 - DNA, 50 bp, Homo sapiens
tgcgcaaccctaggaactctcgggttttaaaatcaaagatgggaaaatcg

SEQ ID NO: 385477 - DNA, 100 bp, Homo sapiens
cggactttgggaaaaccatcagagacctgcctctgcaaggtgcccggcgacgactgcccgctggtgtggggccagtgctcccactgcttccacatgcatt

SEQ ID NO: 385478 - DNA, 75 bp, Homo sapiens
aaaaaatgtggcagcgcctgaaaggaatgtaaagtaccttttattcatgtgggaaatcaagtagtatcagaactt

SEQ ID NO: 385479 - DNA, 74 bp, Homo sapiens
gatccattctgaattcctacatcccattggacaaaattggttccttccattatgagcaacttgttgaatccaga

SEQ ID NO: 385480 - DNA, 100 bp, Homo sapiens
gcgatctatacaactgggaggtggccatcttcgggccccccaacacctactacgagggcggctacttcaagaatcttgcctcctggaatccttcaaatcc

SEQ ID NO: 385481 - DNA, 82 bp, Homo sapiens
gcgtgggcgacccggtgtgtggcgcgcccagagccccgcgtttcagccctagggaaggagcaccgggggctgctgaccatcc

SEQ ID NO: 385482 - DNA, 100 bp, Homo sapiens
gaagccgaggtagaagaagatgaacccacagatttgaaacccaagtctgatatggtgaggacttcccttcgtttactgacgtccagtgcctaccgactgc

SEQ ID NO: 385483 - DNA, 117 bp, Homo sapiens
tcacttacgccaccgccatcactttcatcacatggatcctcatccagtttgcatttagaccctatcagatttggatatgtccttcatatttgattggatttacagtggtttcagcag

SEQ ID NO: 385484 - DNA, 49 bp, Homo sapiens
aatctagccaaagccaatccccagatgcaagagacaggctggctgtcct

SEQ ID NO: 385485 - DNA, 100 bp, Homo sapiens
ggctgactgcaaaggagacccaaggaacagtgccaagttagatgccgattacccacttcgagtcctttattgtggagattctacttcaaagaaatcctgc

SEQ ID NO: 385486 - DNA, 98 bp, Homo sapiens
ctgcatgcaagaatataagacttctgtcttggtgcagcaggctgggctggcgtaccacctgtactctgagcctcagtttaatgtccctgaaaagccgg

SEQ ID NO: 385487 - DNA, 110 bp, Homo sapiens
gctgaaccaagaaaaccttatcagcactatttgaaacttttatctcatctggcttggcgcctgaggttctcccattagatatttggagttcttacaacatggcagacatt

SEQ ID NO: 385488 - DNA, 100 bp, Homo sapiens
tgcagatggtgctgaggatggagaacccaccaagccccgctaggagccacctagactggatgcagagcatggtcatcttccacgatgttgctgtgctgac

SEQ ID NO: 385489 - DNA, 104 bp, Homo sapiens
cgcaggcgcctggcgattaccggtctcaccatggagcggaaagaaatatggctacacacacctttctgcaggagagctgcttcgtgatgaaaggaagaacccag

SEQ ID NO: 385490 - DNA, 75 bp, Homo sapiens
ttaccagagataattgataacaccctgtaacagctgagtttgaagaaaaggcccaagtggatccccttagtgctc

SEQ ID NO: 385491 - DNA, 100 bp, Homo sapiens
ccatcatcaccaagagctttgccaggatccacggtgtttcagtcacctccagtaacacgggcgtgccagatatctcgggttctgtgtactccaaaaccca

SEQ ID NO: 385492 - DNA, 75 bp, Homo sapiens
ctgctggtcaccctgagcttcctgcggagcgtcgtcgaggcgcaggaattttactggcctgtggttggatctgaa

SEQ ID NO: 385493 - DNA, 100 bp, Homo sapiens
cagacacgggtgaatgctgctaaaaacaagactggggctgctcccatcattgatgtggtgcgatcgttctctcagctactggaagagaaaaacacccttt

SEQ ID NO: 385494 - DNA, 100 bp, Homo sapiens
agatggcagccagtcagtggtggaggcacaccttgggcccaccccacctccacatagccttaattacaaatcagaggacaggcttagtgagcaagactgg

SEQ ID NO: 385495 - DNA, 82 bp, Homo sapiens
ccgggaacccttgccgctgctgtcctgcgaccccaagcagaccctacagcttggggcctgggctcctctgaccatcctcatt

SEQ ID NO: 385496 - DNA, 75 bp, Homo sapiens
ggaacacgatagacagcatattctggcagtaacaaatgtggcaattattttggatctatcacctgtcatcataac

SEQ ID NO: 385497 - DNA, 101 bp, Homo sapiens
cagaaagtaatattgcttactatgagtctatatatcctggggaatttaagatgccaaagcagctcattcacatacagctccaagccttatgcatttgatcg

SEQ ID NO: 385498 - DNA, 100 bp, Homo sapiens
gccgctatgcttcctggacagcttgcagaaccgttgatgggaatatgagcaaaatttattgccaaaacctttgcttgttagccaagctcttcctggacca

SEQ ID NO: 385499 - DNA, 102 bp, Homo sapiens
attcgcttgcagatactgcttctgctgccaatggagatcttcgtggatgatgagacgaagttgacgctgcatgggttgcagcagtactacgtgaaactgaag

SEQ ID NO: 385500 - DNA, 75 bp, Homo sapiens
ttttggagtgggaacccaaacccgtcaatcaagtctacactgttcaaataagtatcgtcgtcctccccgcagtca

SEQ ID NO: 385501 - DNA, 100 bp, Homo sapiens
tttcttatttagccggagtgagaagcaagaaggccctggacacagcaatatctctgggctttcacaggaagaaatgttggctatttggcgatgagaggtg

SEQ ID NO: 385502 - DNA, 75 bp, Homo sapiens
tattttcagaggccggaaaatgccctcaaacgcgccaacggttgacatcatggacatatgtgagtccatcctgga

SEQ ID NO: 385503 - DNA, 75 bp, Homo sapiens
ggtgaccatgtttgacaagctctccagattggagctggagggagcatcactgggctgaagtttaaccctctcaat

SEQ ID NO: 385504 - DNA, 75 bp, Homo sapiens
cttccggagcttctcagaagacagagggttttcttttgaggttttacacacgctggaaagattgggaatcatggt

SEQ ID NO: 385505 - DNA, 75 bp, Homo sapiens
agcaaatctacttttgggttacaaaaatccagaccaggcttgcattgatgacaatgttgatatggtgaagtttct

SEQ ID NO: 385506 - DNA, 100 bp, Homo sapiens
ttgaagaataacttcataagccagggagagatacgtttggatcaggagttagtgataacaggtacggagatatgaggagacagattggctttgaaatcag

SEQ ID NO: 385507 - DNA, 80 bp, Homo sapiens
atgatgaagaagaccttgaaatgcatccgctggtcgctgccggaaatggccagacaatgcagatcttcgtgaagactctg

SEQ ID NO: 385508 - DNA, 83 bp, Homo sapiens
gctcacttgcatgtatttggaacaaaaaaaggagatgcctggcagccccgctctctgcaaatccacattcatctcaatggaag

SEQ ID NO: 385509 - DNA, 100 bp, Homo sapiens
cgacagccgcgggtgcgtggtcgtgcggcaagtgagcgatttggtgaacagacactcccttctgtagaggtgctgatactcaaagaaggtttaagttgtc

SEQ ID NO: 385510 - DNA, 82 bp, Homo sapiens
ccgacctcgacgtcttgcctgtgtcccacttgttcgcggcctataggttccctctcccagcctgtgctgactcagccatctt

SEQ ID NO: 385511 - DNA, 98 bp, Homo sapiens
cccgaaagaggaaattccatgtcattgtagcagagtgtgctcctttctgccagctttggagtttaacccttctgccaatccagaggcaagcacaatat

SEQ ID NO: 385512 - DNA, 100 bp, Homo sapiens
ggttgatacagcagagacgtcatacttggaaatggctgcaggttcagaagccataagtgtgatccttggtgacaggtggaagaaaatgaagaatgaagag

SEQ ID NO: 385513 - DNA, 75 bp, Homo sapiens
ggggtctgcagcctggctgaggagctgcgccacatccactccagccacggacagcatttagtgcttttactttct

SEQ ID NO: 385514 - DNA, 100 bp, Homo sapiens
cgccgcccgcaggctccggcttccgtcccggacagagcccgtggtcgcgcaggtgacccggccctgtagctacagcaagaagtcccactttgactttgag

SEQ ID NO: 385515 - DNA, 100 bp, Homo sapiens
ctctaacacagtacctgttaacaacatgttgatatatcactacttgtgtcttttaacaaaatgaaaaaattgactactgatgggaagttaattgccagag

SEQ ID NO: 385516 - DNA, 82 bp, Homo sapiens
gtcagtgcgccgctctccagcccgcttgaacgagtgaagacatttccacctggacacctgaccatgtgcctgccctgagcag

SEQ ID NO: 385517 - DNA, 100 bp, Homo sapiens
caagtttaccaaaagagaggcaccgctggaacactaatgagtgtttgatgatggtgatgagcgaacattgagacgtacctcactttgtctgaaaggagag

SEQ ID NO: 385518 - DNA, 75 bp, Homo sapiens
cagagaccttacctgtcaccttggctctcccacccaatggagatggctctaatgttttcggctttgtgagaaacc

SEQ ID NO: 385519 - DNA, 90 bp, Homo sapiens
atcttcctcctgtgcaccctcttcatcagggtgatctctgcagttgtactgagtgcaacagctcttggaagagccttctcttacacccca

SEQ ID NO: 385520 - DNA, 83 bp, Homo sapiens
actgtgggtgatatttgcctttagtgcactcttctccttcacagtaaagtggctggtttgtgaatcttatctcagagaggaag

SEQ ID NO: 385521 - DNA, 82 bp, Homo sapiens
cgtggccgctgccggtctacgattttttatcaagcagaaatgcatcgaacaacgagaatcaagatcactgagctaaatcccc

SEQ ID NO: 385522 - DNA, 100 bp, Homo sapiens
cggcaccacccatcttgagtatctggatgtgggggctcaaggttctgctgctacctgtggtgagctttgctctgtaccctgaggagatactggacaccca

SEQ ID NO: 385523 - DNA, 100 bp, Homo sapiens
gcagctcaacttctaccagttcctcggggtgcagcaggataacctttttgaatggcacttcacggttagagggcccccagactccgattttgatggagga

SEQ ID NO: 385524 - DNA, 74 bp, Homo sapiens
ggtcctgtttcgacagcgaacatgtcgcggcctgtcaggccgactgcagcagtggcccagggcaaagagtgtgc

SEQ ID NO: 385525 - DNA, 83 bp, Homo sapiens
gagagagcgagctgagtggttgtgtggtcgcgtctcggaaaccggtagcgcttgcagcatggcgccttggtgctgaattgggg

SEQ ID NO: 385526 - DNA, 100 bp, Homo sapiens
agggaaccctggtcaccgtctcctcagctggtggatgattacgtggcctctgagggtgcagtacagcgagttctggtccctgcttatgccaagcaactct

SEQ ID NO: 385527 - DNA, 75 bp, Homo sapiens
ggactccttcggcagtccacccaccgccgccgcctcccaggaattacatgaatgacagtcttcgaaccaatgtgt

SEQ ID NO: 385528 - DNA, 99 bp, Homo sapiens
ccagtttaatgaccttgttatcagtgatggctcttctctggaagatcttgtggaattgaaagatgttggccatcgtgatcagatggctgcagctagagg

SEQ ID NO: 385529 - DNA, 100 bp, Homo sapiens
ttcctgccaaaatcctgttaccctagcaacagcttttaccctacgaaaggaaaacctggaaatgtttgaagcgattggttttttagctatcaaacttggt

SEQ ID NO: 385530 - DNA, 74 bp, Homo sapiens
ggcgacgagctgaccctgggagacatcgacgcgtttagtgggctacagatggcatggcatctaaaaccttacaa

SEQ ID NO: 385531 - DNA, 83 bp, Homo sapiens
gagaaacctcgtggcctggtctccattatttgagatgagttacatcttggagattcagagactgcatttgaaatcaaatcatc

SEQ ID NO: 385532 - DNA, 100 bp, Homo sapiens
cttgcggcggccgtggaaggcgacccggcggctgtggaggccacgctcagctcgccaggcggcgcaggggttcaggataagtttgaggtgctgaattaca

SEQ ID NO: 385533 - DNA, 100 bp, Homo sapiens
tgggtcagatgtgtttcctgatccatgtcctggaacatacaaataccttgaagtccaatatgaatgtgtcccttacaaccgtagctttatgggatctgcg

SEQ ID NO: 385534 - DNA, 100 bp, Homo sapiens
gtctctacagttaactggcaaagaagtgaagctgtggtctaccaatctagacaactcagtggcaagcattgaggcaaaggctaatgtgtgctgtgttaaa

SEQ ID NO: 385535 - DNA, 100 bp, Homo sapiens
aggagaggttcaaattgcaatgattcttcttgatgaactatcttctactaaacattgggcatctatgcacgtttcagaccacagtggatttcactaccgc

SEQ ID NO: 385536 - DNA, 83 bp, Homo sapiens
gccgcctcttggtttgcgtcctgcactgaaaggaaatgacggatttttgtttacgaaaatggggttacagaagatgtgaagat

SEQ ID NO: 385537 - DNA, 100 bp, Homo sapiens
gcaaaaggaagccaaggagagggagctgcagaaggagctggcagagcagaagtctgtggagaccgcaaaaagaagggccaaggcgttatcgtcggccacg

SEQ ID NO: 385538 - DNA, 82 bp, Homo sapiens
ctggctttaatcctgaaagccatgcagcggacctgcctagagctggaacgttacctccagagcgagccctgctatgtttcag

SEQ ID NO: 385539 - DNA, 76 bp, Homo sapiens
accggacctatagtggacctgctccagtacagccagaaggacctggatgcagtgacgttggacctctcgaacaacc

SEQ ID NO: 385540 - DNA, 50 bp, Homo sapiens
gccgacgtcaacctgtcccacagcgaaagtaagactttgaccccgacgca

SEQ ID NO: 385541 - DNA, 75 bp, Homo sapiens
cgccgcgatcgtggggcccgcgaggcgggcagccggggcgtccagtattctaccttgtaaatactgttatttgta

SEQ ID NO: 385542 - DNA, 49 bp, Homo sapiens
ccacagctggtgaacagtccagctcatgccttcaaaccaacagcataaa

SEQ ID NO: 385543 - DNA, 50 bp, Homo sapiens
gtgcgtcaatcagagcgtcctgtgcgcactgtgacttctgccgtgttcac

SEQ ID NO: 385544 - DNA, 75 bp, Homo sapiens
caacatgtacaagagcatcctgccgtggtccttcagcatatctctgtgctgcagacaacacaccttcctgatgga

SEQ ID NO: 385545 - DNA, 83 bp, Homo sapiens
tgaaaccctttgccatcgacatatttcctgtcaccaacaaagatttcagattaaaaggagcccaagccccatctcatcctagc

SEQ ID NO: 385546 - DNA, 75 bp, Homo sapiens
tgagcagtgggccaccatcgagcagctgtgcagacatggacatcttccagcaacagatctcgagaagacagctgg

SEQ ID NO: 385547 - DNA, 75 bp, Homo sapiens
agaaagagagaatcttcgttttgacttgtatgaaattgaaggctgtgaagtgatttgggccattaaagataaagc

SEQ ID NO: 385548 - DNA, 75 bp, Homo sapiens
ctcggctgcgcgctgctcctcgccctcaagttcacctgcagttatttcttccactgacatcttgaacccctcagt

SEQ ID NO: 385549 - DNA, 82 bp, Homo sapiens
aaagcccccaacaccacgacaatccagtttcctgctaatttgcagcttcctccagattttcagctgaactctcatctctcaa

SEQ ID NO: 385550 - DNA, 75 bp, Homo sapiens
atcgaagacttggcaaaaagcctatattcagtagctcgcagatttgggatgatgaaattgttgcagacttttacg

SEQ ID NO: 385551 - DNA, 97 bp, Homo sapiens
actgggttctggactttgggcgtcccattgccatgtgtgactgtgggaagatggaggagtatgagaagttctgtgaaaaaagtcttgccagaataca

SEQ ID NO: 385552 - DNA, 98 bp, Homo sapiens
ggcgcggagcccctcacagtgcaggtggtacaagctgcactccaagccaggcaagaaggagaaggaacgcggcgagattgaagtcaccatccagttca

SEQ ID NO: 385553 - DNA, 100 bp, Homo sapiens
gaagattccactcgtggtatgagagtggataatataatcaactcctctgcctggatttccagatgtgacttgcactcagaagatcagtggtcaacttcag

SEQ ID NO: 385554 - DNA, 75 bp, Homo sapiens
ctgggcttctctgaggcggcgagagatggtcaggtctggagctcgaccgggccagagtattgttacaatcacatt

SEQ ID NO: 385555 - DNA, 87 bp, Homo sapiens
agcggccggagcggcgccatggaggagggggcgccgcggcaggtctcggcgcggaagatggccggcggcgtggacggccccatcggg

SEQ ID NO: 385556 - DNA, 100 bp, Homo sapiens
cagagttctagggttctaagtgatgtccaggaaggaggaggaataatatttatggagcatatattatggaacacaccagatgacgtgtactactgtggaa

SEQ ID NO: 385557 - DNA, 90 bp, Homo sapiens
ttccatgctcacaaggcagtcctagcagcatgcagtgactatttccgggcacagttggtggatctgaaatctgaactgacagaaacccaa

SEQ ID NO: 385558 - DNA, 75 bp, Homo sapiens
cgtgtggagcggcacggctgaggcccgcaagcgcaagggtgagaaggactggcagaaatacgagactgctcggcg

SEQ ID NO: 385559 - DNA, 115 bp, Homo sapiens
gcagatggcggatgccctgcagtacctgcagaaggtctctggagacatcttcagcaggggtctaatgtgatggaagagcaggacctgcgggacatcggcatcagcgacccacagc

SEQ ID NO: 385560 - DNA, 95 bp, Homo sapiens
ggccaagaaacttctgcaggtggatgggctggagaacaacgccctgcacaaggagaagctcctagtctcgtccgtgactttccggttgccctgga

SEQ ID NO: 385561 - DNA, 73 bp, Homo sapiens
tttggttacctatgtacctgttaccactttcaaaagcaaccccagctttccagacagtcacttttcccagtgg

SEQ ID NO: 385562 - DNA, 75 bp, Homo sapiens
tagacccggcgtctggcgtccccggtgcccagcattctgcggggcaggcgctcagaggctgagaatggtgtggag

SEQ ID NO: 385563 - DNA, 99 bp, Homo sapiens
gacgacatctttatcatcacctaccccaagtcaggagaccagccactaactggggcgtacacagtgaccctggatggacgagggccctcaagggtcatc

SEQ ID NO: 385564 - DNA, 75 bp, Homo sapiens
tgtaggcagaatacctttacagaggttaaaattggagcggaaagaatgtcggagcgggccgcggatgacgtcagg

SEQ ID NO: 385565 - DNA, 83 bp, Homo sapiens
catccgcaaacacgcgcagaccttcgttgccctctgtgccacagcttgcgcgatctctggcctcttcaactgcatcaccatcc

SEQ ID NO: 385566 - DNA, 74 bp, Homo sapiens
cagatagtagttcctcttctacagagtcctcccagagttcccaagtccctacagatgaagaagatgaaatggag

SEQ ID NO: 385567 - DNA, 75 bp, Homo sapiens
ggtccctgaagagggaagacacgcggaaacaggtctgcccaagatggaggtgtttcaggaatactacgggcttcc

SEQ ID NO: 385568 - DNA, 50 bp, Homo sapiens
cccggggcctgtaaggggtgcctgcgcctaaatgcgatggccaggtatta

SEQ ID NO: 385569 - DNA, 100 bp, Homo sapiens
catcggtagtggggacggacgcattgaatgtatcctgtcaggtataatgtcagtgaatggcaagaaagttcttcatatggatcgaaacccttactacgga

SEQ ID NO: 385570 - DNA, 100 bp, Homo sapiens
tttatacctatagatattttatccacaactggccacagctgtgcttcttgggcaccatgccggtggaaaggatgcgcatgcgcccgtggctggaggagca

SEQ ID NO: 385571 - DNA, 97 bp, Homo sapiens
gaagcacggagcccacgactcccgatagtgagagacctgctcaagctctcttaagagattatgcttttatgacaagaagacagcaattcacaaagcc

SEQ ID NO: 385572 - DNA, 100 bp, Homo sapiens
ttagctgcctcttcctaccacggtgatgttgttggccaggtctctacggatctgatagcccagagcttgatcctctcccagaaaaggttttacagcaaag

SEQ ID NO: 385573 - DNA, 100 bp, Homo sapiens
atttaggccatcctccaaaagagctggctggagagatgctctgagacagtgcttcgatgactttgcagacttggtgccctttgactcctgggagccgctc

SEQ ID NO: 385574 - DNA, 95 bp, Homo sapiens
aactttccagacgcagaactggtgaagttgaacaaattgctatgatgaaaccaaaaggccagactgaacacgatgagggtatgcttgaatattta

SEQ ID NO: 385575 - DNA, 96 bp, Homo sapiens
cctccggccggagccacgcagccgcggcttccggagccctcggggcggcggactggctcgcggtgcagatgccttcaattaagttgcagagttctg

SEQ ID NO: 385576 - DNA, 76 bp, Homo sapiens
cttcagcctgcgctggttggtgaaacagagatgtcaggaaccttagtcatttctgctttatattttgagctatcag

SEQ ID NO: 385577 - DNA, 75 bp, Homo sapiens
ctgattttgaaacacctgggtctgggcttcccgggcgagcggtggctgaactagatgcagagcacgcccagaagg

SEQ ID NO: 385578 - DNA, 75 bp, Homo sapiens
cctgaggcgaaggagcggccgggagcccgccgcgctggtagcgatctattaatgagatgaagcggttggaagaaa

SEQ ID NO: 385579 - DNA, 100 bp, Homo sapiens
taaccggcatcatcgtcttcatcctgacgggaatctctgtcttcctggctcccatcctaaagaaatgaagctgttgtcatttctggaaggaaactggccc

SEQ ID NO: 385580 - DNA, 74 bp, Homo sapiens
ggaagttcggaaaactagcatcaaaattcccagcaacagatacaatgagtcttggacagtaaagcaccaaaacc

SEQ ID NO: 385581 - DNA, 98 bp, Homo sapiens
gggaaatcgtgcacttgcaggccgggcagtgcggcaaccaaatcggcgccaagctgatccaccttgagatcaagccggccatccggaaccagatcatc

SEQ ID NO: 385582 - DNA, 76 bp, Homo sapiens
ggcgcagccaccccgcgggatacgcctcagcgcgacccaacatgagtgaagtttcctgcaagaaacgggacgacta

SEQ ID NO: 385583 - DNA, 100 bp, Homo sapiens
tggcattggcgaggcccaagagcagtgatggcttggactgtggtcctgaaagcagcaagaagtatgctgaggctgtcactcgggctaagcagattgtgtg

SEQ ID NO: 385584 - DNA, 75 bp, Homo sapiens
gagagcgcagggggcggctccttcctcgtcatccccctggagcaggagtctactcttcatcttgtgttgagactt

SEQ ID NO: 385585 - DNA, 98 bp, Homo sapiens
gttcacaccaaccctgaccggagatgcaccgaactggacatggctcgaggtattaaacatgagtggcaagtaaatggcttggatgatattaaggaccg

SEQ ID NO: 385586 - DNA, 83 bp, Homo sapiens
ccggagcctggcgcagcctccctctattaccaggatttttagactctgaggagcagttggagctaatccacattatggaaatg

SEQ ID NO: 385587 - DNA, 98 bp, Homo sapiens
ggagcgctgcggagcgaacctcacctttccagggcgcaaggcttccgaagatcttctcaaggaacactacgttgacctgaaggaccgtccattctttg

SEQ ID NO: 385588 - DNA, 100 bp, Homo sapiens
caaggaccaagtgtggaaggtcttaatgtaccaacaaaggctactttaggtcataaataaagttcatcttaaggcaaatcatgtggtcaagagagatgtt

SEQ ID NO: 385589 - DNA, 98 bp, Homo sapiens
caaagagcaactgaagattcatacgcagctggcagatattatcatagttgctgcagtggttagcaggaagaagatgagccttaagtctgaacgccgag

SEQ ID NO: 385590 - DNA, 75 bp, Homo sapiens
gcacaagatggcggcggtagcggcagtggcggcgcgtaggaggcggttgcagttgttctgatggatacccagggg

SEQ ID NO: 385591 - DNA, 51 bp, Homo sapiens
actgccaggctgggctgtggcttcaaggagtccttcaataatgttaaacag

SEQ ID NO: 385592 - DNA, 100 bp, Homo sapiens
cgaaggggacctcatgtccctgtgggacacaatgcccccaagaatgcctcggctggggtggagcgcctcttgctggggaacaaatgtgacatggaggcca

SEQ ID NO: 385593 - DNA, 100 bp, Homo sapiens
aggaagcccctggcggccggcttggagaggccgagggtttgatgaaggtggaggcagcgcggctctcagatgaaggatttgggggcagagcacttggcag

SEQ ID NO: 385594 - DNA, 75 bp, Homo sapiens
gcagaagtttgagaggaacttcattgctcagggcaccacactgtaactcgaggcatcaccaaaggcgtgaaggag

SEQ ID NO: 385595 - DNA, 83 bp, Homo sapiens
cagcggccgcggcgccgcagggaccagcgggcccaggtgctacaaagtacacagataaagacaatggagggatgcttgtatgg

SEQ ID NO: 385596 - DNA, 75 bp, Homo sapiens
gaaagtagatgaagatgagattcagaagatgcagacttgccggagcagccttacttgcagcctccactcagcatc

SEQ ID NO: 385597 - DNA, 51 bp, Homo sapiens
ccgtcatggggggcggagacctgaaagaagttttcccatttccagaagtta

SEQ ID NO: 385598 - DNA, 74 bp, Homo sapiens
gcaactactcccaaagcaacagaagagcctgaggatgtaagtgttgaagcatcacacagacatgagcagttcga

SEQ ID NO: 385599 - DNA, 99 bp, Homo sapiens
gaaaaaaaccacaaatgtttttctgttttgcctgaatacatgatttaaacaagagatttccacagaaggatgtttcgtctgaactcactttctgctttg

SEQ ID NO: 385600 - DNA, 50 bp, Homo sapiens
gcaatttcttgaaaagagattacagggtgctgtggaatctattgccatga

SEQ ID NO: 385601 - DNA, 90 bp, Homo sapiens
gcagggaagtcaactcttctgaagctgctaactggagagtttaattggttggggtcagataagaagaggagtgacaatcaagccaacagt

SEQ ID NO: 385602 - DNA, 95 bp, Homo sapiens
gaaggcgcgagtgaggaaaggaggtactgtaggtgtcgtgaaaactacccctaaaagccaaaatgggaaaggaaaagactcatatcaacattgtc

SEQ ID NO: 385603 - DNA, 100 bp, Homo sapiens
aacagctcgagagagcattacaagccagcctctgggaccgaggttttttgcatgtctgacacccatgactccacctggaccttatggctccacccagaag

SEQ ID NO: 385604 - DNA, 84 bp, Homo sapiens
ccccggacgagaagcgcagcaacgtgcggtgggaccacgagagcgcgccctgggtggtggaaggcagccgccctcccgaaggtt

SEQ ID NO: 385605 - DNA, 109 bp, Homo sapiens
gcggcggcggccaagcccaacaacctttccctggtggtgcacggaccgggggacttgcgcctgaatatatcagagccttgattacatagaagataatgctacagttttt

SEQ ID NO: 385606 - DNA, 101 bp, Homo sapiens
tgccctctggttgagtgctgaccgtcttggggacctggccttgttactagagaccctgaatggcagccagcatcagaagagctaacaattgctggaatgac

SEQ ID NO: 385607 - DNA, 75 bp, Homo sapiens
ttttaagaaagtggacaaagagaggagtcagacctgcgaccgcatcaagcagtccgccagcggaaccaagcggcg

SEQ ID NO: 385608 - DNA, 80 bp, Homo sapiens
agctaagactccaggacacccctgaagccgagaaatggtactccaaagattcaggtttactcacgtcatccagcagagaa

SEQ ID NO: 385609 - DNA, 101 bp, Homo sapiens
attaaagatcactggttgaaacacccgaatagaaatgtactgtcgagagctgacagaaaggtttgaagatgtttgggtggtatctgggcctttgaccttac

SEQ ID NO: 385610 - DNA, 82 bp, Homo sapiens
aggatccccaacggggaggccaacgtgaagaaacctgcaatgcttcttttgccacccgagaccgtctgcgctcccacctggc

SEQ ID NO: 385611 - DNA, 80 bp, Homo sapiens
gcgactcgggagccggagctttggaacgaggagtggcgcccattaagcgtcagttgcgaggggcggtgttgaagaatgtg

SEQ ID NO: 385612 - DNA, 105 bp, Homo sapiens
aaaccactgggaaaactgaagagagctagaacagttcaccgagactcaggaaacttggatttaactggccagaagcaggtattcaaagcagagaacaatccctgg

SEQ ID NO: 385613 - DNA, 50 bp, Homo sapiens
cgacgaggaagaggaggtttctgaggaagctgccacttttgctagagagc

SEQ ID NO: 385614 - DNA, 73 bp, Homo sapiens
atggtgtaattaaatctcatatgacatactggagattagagaacataggtctgtctctcctgccagagtgtat

SEQ ID NO: 385615 - DNA, 75 bp, Homo sapiens
gaagaaagtcagggggactgcaaaggccaatgttggtgctggcaaaaagaatttcttgaggttggcaaaaagcag

SEQ ID NO: 385616 - DNA, 102 bp, Homo sapiens
cttacatctgatcctgggcttccccatctggtgcttttcccatggagaacacacaaccagacagagcgggatgccaccagcttgtccaaagggaagttccag

SEQ ID NO: 385617 - DNA, 101 bp, Homo sapiens
aggacttctcctggcggcgctgcggatccagggggtcggctgccaggtacaggtgaactggcacaaaggttaatctcaagatgccgctagtgaaaagaaac

SEQ ID NO: 385618 - DNA, 51 bp, Homo sapiens
ggaagatggcggcgggggcgaggctcccacatcaggacgagaaggagccct

SEQ ID NO: 385619 - DNA, 82 bp, Homo sapiens
tggagctgcccactctagaggagctgaaagtagatgagaaactgtatgagctgaataaccttcatgcacttatggcagtggt

SEQ ID NO: 385620 - DNA, 90 bp, Homo sapiens
atttcaagtattggtcttaaaacagtaattggagaacttcctccagcttccagtgatatgagggaaggcaccattggagatatggctatc

SEQ ID NO: 385621 - DNA, 73 bp, Homo sapiens
ctcagcccgccacatcaccctgacctgcttacgcccagtggatgacagcactggagttataaactgcatctgc

SEQ ID NO: 385622 - DNA, 90 bp, Homo sapiens
aaggctgtccgcgtgatgaacactcattcaggagaggctcgggctgtgctgaagtgggcagatggcaaaatgatcaagaatgaagtggac

SEQ ID NO: 385623 - DNA, 95 bp, Homo sapiens
cagctgcccggtgcccgaggaggcagccaagctcatggcctgccactgcgtgcatcaccgaagtggccttggagtacaacaactgtcatggggac

SEQ ID NO: 385624 - DNA, 83 bp, Homo sapiens
cgcgaggagccgggcgcttagaacagaggcttgcacaggtggagagcctcagcagcttggcagtctcatgtccccttacctca

SEQ ID NO: 385625 - DNA, 77 bp, Homo sapiens
aagcttgagagaaaagcccccaaaagcagctattcaggacgtctgctcactggagatgacacgtgcgtggggtgttg

SEQ ID NO: 385626 - DNA, 89 bp, Homo sapiens
aggaaccacgctctcgtctggtttgatcacaagacgggcaagagttttccgtctgatgaaggttggccatttgcaaagtatcttggagc

SEQ ID NO: 385627 - DNA, 51 bp, Homo sapiens
ctctgaggagtccactgcagcaggctaaagaacgtgccaatggaatggagc

SEQ ID NO: 385628 - DNA, 87 bp, Homo sapiens
tgaacaatctcacccaattactctgctcaggtgacgcatccaaagaagacattgacactgctatgaaattaggagccggttacccca

SEQ ID NO: 385629 - DNA, 75 bp, Homo sapiens
caggaccgccggccgggggacgagctcggagcagcagccagacggcggagactggctgagtggaaagcaactaaa

SEQ ID NO: 385630 - DNA, 51 bp, Homo sapiens
attcgcagtggtcgcttcttctccttggtagtagatgatgactccccagag

SEQ ID NO: 385631 - DNA, 98 bp, Homo sapiens
agctctgcagccacatactatccgtttgttcaggaaccaccagtgacagatgttcctaaacccaaaggaaagaaaaccaaagatatgaaaaaacctgt

SEQ ID NO: 385632 - DNA, 82 bp, Homo sapiens
ctctcctgcgtcggtgactaaggagtacttcttgcaagcagagctgacaagcaacgtcttaaaaacaggcgtggtgcgctgc

SEQ ID NO: 385633 - DNA, 82 bp, Homo sapiens
ctgcatgtactgggggattcgcagggaggatgtcgggacaccccggaagctgggaaatgctctgcagtccttcatccaagcc

SEQ ID NO: 385634 - DNA, 100 bp, Homo sapiens
ctcactacaacctctgcctcccagggctcagcctgttgctgcttcccttgctcctggttcaagctggtgtctggggattcccaaggcccccagggaggcc

SEQ ID NO: 385635 - DNA, 98 bp, Homo sapiens
caactgtcctcaccagccctcgcctcccgagtcactgcagccaacccttcagcaaggttcattttccagacactgaaagagcagaatggctaaataag

SEQ ID NO: 385636 - DNA, 101 bp, Homo sapiens
gtatcctcctcagtatccaccgacagcattccaaggccttataatgggactaattttacgatatgctacagcaccaactgatattgaaagtggaactgtct

SEQ ID NO: 385637 - DNA, 75 bp, Homo sapiens
gttcccactgcagtgtctgtgacaactgtgtggaggagctggaggatcttcagaagaagcctcccccatacctgc

SEQ ID NO: 385638 - DNA, 82 bp, Homo sapiens
cagccttctgccgctcgccctctgcctgctggctgcacccgcctccgcgctcgtcagtgcctccggagccagcgtggtggcc

SEQ ID NO: 385639 - DNA, 90 bp, Homo sapiens
ttttgtggtagaccgtctaagagaaggatcagttcagtgatatgagaatcagcataaaccagacgcctgggaagagtcttgactttgggt

SEQ ID NO: 385640 - DNA, 51 bp, Homo sapiens
caaggaagcggagaggcaagaggacatagctcgccttttgcaagaaaagga

SEQ ID NO: 385641 - DNA, 75 bp, Homo sapiens
gtgagaccagcaagaatgacttctccctctccctcaagatcaagcgcatggcaggcatgaaggaatcgcagatca

SEQ ID NO: 385642 - DNA, 75 bp, Homo sapiens
ctgggacagccatggtttcagacggggagacaatccagggtctgagggcgaatctcaccagtgccatagaaaccc

SEQ ID NO: 385643 - DNA, 80 bp, Homo sapiens
tggatgggaagttaatgtttacggcgaagtctactcaacgtttccaagattatttatgtaaacccgaagacaacatctac

SEQ ID NO: 385644 - DNA, 75 bp, Homo sapiens
aaggcactgctttttcatgacggcgtcgatccgactcccgtcacagtacaactttgccatgaacgtgctcggccg

SEQ ID NO: 385645 - DNA, 75 bp, Homo sapiens
cgatgggacccactgccctgcattcggaaatgaagatttgctcagcaattataaacctttttcatctgatcccgg

SEQ ID NO: 385646 - DNA, 99 bp, Homo sapiens
ctgagctggttggccctgtgatccctcaagactggtccacggagtgtatgaccacaaacagccatcaagaaactagaaaaactgcttttggaattatct

SEQ ID NO: 385647 - DNA, 50 bp, Homo sapiens
catcgagtgtgacgtggtgaaaggtgaacttcacggtagaccagatccgc

SEQ ID NO: 385648 - DNA, 101 bp, Homo sapiens
agaagctggaggtcaacgaggccgagctgctgcggcgccgcaactttaaagtcatgatctaccaggaacacagtggttccactgtaccttccattttgaac

SEQ ID NO: 385649 - DNA, 98 bp, Homo sapiens
ggtactacagtttacagtctgactactggaaggttatgcaatggtctctgcaagatggtttattcttgaattggacctttttaagactgacaaatgct

SEQ ID NO: 385650 - DNA, 75 bp, Homo sapiens
atttcatcaaggtgcagctgagggatggagacagcaactgtggccatgaccttgcctcctttcctggagttcggt

SEQ ID NO: 385651 - DNA, 100 bp, Homo sapiens
gtgttaagccagcagtatatggatttagaaaatgaattccgtattgctttaactgttgaagccagaagatttcaagatgatcagttccatgacaagaccc

SEQ ID NO: 385652 - DNA, 74 bp, Homo sapiens
tgccatcctcatgcaggtggtcccgctggaggagtggctaagcaggttcggttacctgcccccggctgacccca

SEQ ID NO: 385653 - DNA, 100 bp, Homo sapiens
tttgacagctattaaaaccagggctccacagttaggagggcgtctctggccgagcctctttttgtggaaaacgacagcagcagcagtggcctggaagacg

SEQ ID NO: 385654 - DNA, 75 bp, Homo sapiens
ctcttctaagctgaataaagctgttttggaactgtcaggtacctcaaagccttccagaaatgttgcatggtgatg

SEQ ID NO: 385655 - DNA, 74 bp, Homo sapiens
ctcatacgacttcagctcctcacttggactcctcttgagattcctgtctgactaaagggacctcaaaaaggagg

SEQ ID NO: 385656 - DNA, 75 bp, Homo sapiens
ctctcccaacatggcggcctcaggcctctggctgtacctggcagggagcagcctgccctgtctcacgctgattgg

SEQ ID NO: 385657 - DNA, 74 bp, Homo sapiens
tttgatacgactgccataaacaaaagctattacaatgtgtactgtaagattgatgttaaaggcatggtgttcac

SEQ ID NO: 385658 - DNA, 74 bp, Homo sapiens
ctttgcgaagcgggtcctggtgaccggcggtgctggtttcatacatctttccaggaacagcgtgaggaggacag

SEQ ID NO: 385659 - DNA, 96 bp, Homo sapiens
gaccaggggatggcagccatgcacctgacagcctggccccaggagctgtaaaattgacaagcttggcatgtggaaatcagcacatctgggcctgtg

SEQ ID NO: 385660 - DNA, 76 bp, Homo sapiens
aagagtggaattgagatcttatccctatatgatgctgagatgcagtcatcatttacatcttcagaacaagagctag

SEQ ID NO: 385661 - DNA, 99 bp, Homo sapiens
gcggatgccctgcagtacctgcagaaggtctctggagacatcttcagcagaattcagtttgcctgttctgtatgcaagttccgtagctttgatgacgaa

SEQ ID NO: 385662 - DNA, 100 bp, Homo sapiens
ttgctgtcccgcaagatgcggatgctgctggcgctcctggccctctccgcggcgcggccatcggccagtgcaggtgtgtgcagtggcctcagggatccgg

SEQ ID NO: 385663 - DNA, 95 bp, Homo sapiens
tgcttcccgaggagcattggaaggtctctaattaacagaagatggcaaagcccagccacagcagctatgtccttcagcagctaaacaaccaaaga

SEQ ID NO: 385664 - DNA, 76 bp, Homo sapiens
gcgggtgcttcgagctaaaaaagggacttccaaggaagatgccatgaaagcttacatcaacaaagtagaagagcta

SEQ ID NO: 385665 - DNA, 100 bp, Homo sapiens
tgggagcaggccaacgtcctgcggcctggttgagctcgcactgacaatcgcaggtgctgggccccaagccggctctgcctgcaggtaccgaggacaccgc

SEQ ID NO: 385666 - DNA, 75 bp, Homo sapiens
agaagattcacgtgtacggctattccatgggctggtctacaacgcctcgggctccgagcactgctacgacatcta

SEQ ID NO: 385667 - DNA, 82 bp, Homo sapiens
gcggcttccaggcgcactaccgcgagcctggcagagagcaggtgtgtgatacacgtcgtcaggtgactgaccgaggaattca

SEQ ID NO: 385668 - DNA, 110 bp, Homo sapiens
agagagcgagctgagtggttgtgtggtcgcgtctcggaaaccggtagcgcttgcagcatgatcaggatcctcatgaccagccaaagagaagaagaattaggaagcataaa

SEQ ID NO: 385669 - DNA, 100 bp, Homo sapiens
agacgaagaagaggaagaaggtggggaggaagaggaggaggaagaagaaggtgatggcctgtgtggactgtgggagcagcacccaagatcctggtcaccc

SEQ ID NO: 385670 - DNA, 50 bp, Homo sapiens
ctcatcacccaattttggtgaaaaaaaatatggctacacacacctttctg

SEQ ID NO: 385671 - DNA, 100 bp, Homo sapiens
ctttggacagcccccggaatttctctccaaatgcacctgctcacttttcttttgttcctgcccgtaggtcaccagaaagacctacaggggatcttagaga

SEQ ID NO: 385672 - DNA, 100 bp, Homo sapiens
cggcagagcaaggggcttacgcagaaggacctggccacgcttcctggagatgatggaggctcgcagccgtggccatgcgtccccactggcggccaacggg

SEQ ID NO: 385673 - DNA, 101 bp, Homo sapiens
tagcatcttctgtcatgagaagtggcgatcaaaattgggcccctttgtaacgtggagatcaatgagtgtgcttccagcccatgcggcgagggaggttcctg

SEQ ID NO: 385674 - DNA, 80 bp, Homo sapiens
ctcttccattactgcaacgcctacttaaatgctgtgcgctggcaccctcagaacaatatgaggccccaggattcctggcg

SEQ ID NO: 385675 - DNA, 74 bp, Homo sapiens
tccatggttccggaggccgtgagacctgccggggctgacaggctccaaacaggcatgcgaggtgcctttggaaa

SEQ ID NO: 385676 - DNA, 73 bp, Homo sapiens
aatgcccaagacattataaacgagatgctgaagaagtgtcatctttgtatggagtcaatagtacaagccaaag

SEQ ID NO: 385677 - DNA, 50 bp, Homo sapiens
aactccacgaagccaacgcccaggtggtataagttgaaatccaaaccagg

SEQ ID NO: 385678 - DNA, 51 bp, Homo sapiens
ggacgaatagcaagcacctcattttctagagttgagaagaggaggaagaat

SEQ ID NO: 385679 - DNA, 75 bp, Homo sapiens
cacctaggcacaaagccgttcgagtgtcctgtggaaggtatcatgatattagctggtttgacatcaagtcatttg

SEQ ID NO: 385680 - DNA, 75 bp, Homo sapiens
ctctacctgaagccaatccagaggatatccaggaggtgcagggctacgtgctcatcgctcacaaccaagtgaggc

SEQ ID NO: 385681 - DNA, 96 bp, Homo sapiens
tcctcctgctcttacttgtcctgctcctgctgctcgaggacgctggagcccagcaaggggatgttcgtctaaccccagaagactttgctagagctc

SEQ ID NO: 385682 - DNA, 75 bp, Homo sapiens
tcccaatatccaagaagcagtagagggtgccatgcacattcagggtcctgtattaataggaagttcacatggtgg

SEQ ID NO: 385683 - DNA, 100 bp, Homo sapiens
cagtctacaaaggactcttctaaaaggatatgtgttgctaatacccatctttactggcatcctaaagctgaagagaaggcgcgggaggcagagagcaaag

SEQ ID NO: 385684 - DNA, 100 bp, Homo sapiens
tacttgctggatggtggactcagagaccaataaaaataaactgcttgaacatcctttgactggttagccagttccaaaagctgagacaagatcttgaaat

SEQ ID NO: 385685 - DNA, 100 bp, Homo sapiens
agcgagctgagtggttgtgtggtcgcgtctcggaaaccggtagcgcttgcagcatgatgtccagggtgctgcagaaggacgcggagcaggagtcacagat

SEQ ID NO: 385686 - DNA, 100 bp, Homo sapiens
tcttacatgaatttttggagagtgattatgagcaaatctccttggaccggctgttgggggaaaaaagtgttagccgtctctcccggatctgcaaggggga

SEQ ID NO: 385687 - DNA, 100 bp, Homo sapiens
cgggagcccctgcctccctcggtgcgcgctgctgctcgcagccgccgcggccgccgaagaggagcccggggccaggaagctcttcgtgggcggtcttgac

SEQ ID NO: 385688 - DNA, 75 bp, Homo sapiens
agctgccggtggagccggccgagcggaggcctgagtgcacccgctgcagtttggtgccctggttgtcagatgttg

SEQ ID NO: 385689 - DNA, 87 bp, Homo sapiens
gaggtagcatccgttggatatccacaccatccttctcgctgcaggcaaactgaaaccgtgtcagttcagtcttcggtattggggaag

SEQ ID NO: 385690 - DNA, 82 bp, Homo sapiens
ccacgggagatggaaccaaggagaaaccatttaaaacaggtctaaagaatccgtctcttgctcaagtgaaaattgaagaagc

SEQ ID NO: 385691 - DNA, 100 bp, Homo sapiens
tccggcttgccgcggcctgccgcaatggaaacatctatattctgagaagtacttccaggcgcgactggccggggccggcaacagcacagccaggatcctg

SEQ ID NO: 385692 - DNA, 83 bp, Homo sapiens
cgccacccgtccctgcccccggctcgccggtcagcggctcgtcgccgttcgccacccaagacaatgcagatcttcgtgaagac

SEQ ID NO: 385693 - DNA, 75 bp, Homo sapiens
ccttttccctctccctttccctaaggtcagtactcctgcatttgtaccaacgaaaactcacgtgctgcttcatcg

SEQ ID NO: 385694 - DNA, 74 bp, Homo sapiens
attgccttaatctcttcaccaaacaagaaggggaattttctacttctggtcatgcttacactgatacagggaaa

SEQ ID NO: 385695 - DNA, 100 bp, Homo sapiens
ataagaagatgcaggctggagaagaagtcactgaacttaggagaaagtatacagaattacagctggaagtttggaaggtttgcagttgctgctcttcagt

SEQ ID NO: 385696 - DNA, 82 bp, Homo sapiens
cccgccgtgagcgcccggagcggtccgcgagccaccgaggcccagcatcagtgaccacagaagacgtctgtgaccaaatgtt

SEQ ID NO: 385697 - DNA, 82 bp, Homo sapiens
ccctgcgctgccgccgctctgaggagttaaaggtgcactttacaggtccccgatgaaccaagagaaccctccaccatatcca

SEQ ID NO: 385698 - DNA, 100 bp, Homo sapiens
gctgtgcaacgaccggcccaacaaactggagagagaccagacctgcaagctctttgacacacagcagttcttgtcagatcaatgtccgagttaccaccat

SEQ ID NO: 385699 - DNA, 97 bp, Homo sapiens
gccgcattactacaggagaaagaacatttccatcaaaccctgagagctttattaccagacatgatctttcaggcaagtcgctgttcttccggaagtt

SEQ ID NO: 385700 - DNA, 87 bp, Homo sapiens
gaccctggtggccagcgaagattatggcgacactcttgccgccatccagggttggggtctgctaggtccccggaatgagttgtttga

SEQ ID NO: 385701 - DNA, 83 bp, Homo sapiens
gggacctgccggcacgcgactccccccgggcccaaaagtgaagacatttccacctggacacctgaccatgtgcctgccctgag

SEQ ID NO: 385702 - DNA, 100 bp, Homo sapiens
tagtcattcatttttgatcaggagaaagaagacagccatcatttgaaaggagtttcataatagaagagcagagtttcttactatgtgaagatcttctcta

SEQ ID NO: 385703 - DNA, 75 bp, Homo sapiens
gctgagtccattcacactggtttggaagttgcaatcaaaatggtcaaggtcagcatctcctcgacgatcaagatc

SEQ ID NO: 385704 - DNA, 98 bp, Homo sapiens
gcagggtcgaccaagaactgtgaagagaggagttgagaacatctctgttgacattcattgtggctgcagctatgactccaccagaggaggaattgaag

SEQ ID NO: 385705 - DNA, 75 bp, Homo sapiens
cacggccagatctgccctccagcactgccctgctgtgctactcctgcaaagcccaggtgagcaacgaggactgcc

SEQ ID NO: 385706 - DNA, 100 bp, Homo sapiens
agcagcctcagattcgcttggagagcactgtggacgctctcttgacggatgctagggagacccgccaagttttcaaaggctcgtggtcccaagaagcatc

SEQ ID NO: 385707 - DNA, 87 bp, Homo sapiens
agaataaggagaaggataagtcgaaggggaaggcgcctgaagaggacgaaggcctccatgaagaagtggactattctgagaaactga

SEQ ID NO: 385708 - DNA, 75 bp, Homo sapiens
agttactctaacaagtctggagacattccactgcccttctcccaaaaagatgtcttttcgaaaaatggatcccag

SEQ ID NO: 385709 - DNA, 99 bp, Homo sapiens
tctccgacagcagatgattgaagtggaaatatccaaacaggccctccagaatgagctggagagactgaaagagtatccatatattcctgcacatattac

SEQ ID NO: 385710 - DNA, 75 bp, Homo sapiens
gaatcatctagaaggacaaatgaacttcaatgcagattctagccaacataaagactcagcccgcctgcacccagg

SEQ ID NO: 385711 - DNA, 75 bp, Homo sapiens
tggacgtggagatcgccacctaccgcaagctgctggagggtgaggagtgcaggtcccgcagcccccggaagccaa

SEQ ID NO: 385712 - DNA, 50 bp, Homo sapiens
aaaagacagtgctcggattccaccagatcactgccagtgaaagatgtaga

SEQ ID NO: 385713 - DNA, 100 bp, Homo sapiens
ctaaagcccaaatttgcagaatctacggaaatttcagaactctcccataattttgttatggtaaatcttgagatggcttcagtgacagatggtaaaactg

SEQ ID NO: 385714 - DNA, 75 bp, Homo sapiens
ctggttcagttaaacctactcaaactattgatagggatgaggaagaaatgaccaaacgagatgacaaaagagata

SEQ ID NO: 385715 - DNA, 100 bp, Homo sapiens
ctggccgcctgcacttgcgcctggagcgtctcaccccccgtcccactgctgctgagttagaggaggagaacgaagtgaaactcctggtagaacggatgat

SEQ ID NO: 385716 - DNA, 100 bp, Homo sapiens
ggtggagctggaggccaaggtggatgccctgaatgatgagatcaacttcctcaggaccctcaatgagacgtcctattttgtaacggattatgatccaacc

SEQ ID NO: 385717 - DNA, 115 bp, Homo sapiens
tgtctccttgagcaaaaaagaaaagttgtttcctccaacattgatgttcctccagcaagggttctccaaaaaatgtggaatcctttgcatctatgctgagacattctcctcttac

SEQ ID NO: 385718 - DNA, 82 bp, Homo sapiens
caggacgaagtgctcggcggcatggagttgataccaagttgaaattcactcttgagccatctttaggtcaaaatggttttca

SEQ ID NO: 385719 - DNA, 100 bp, Homo sapiens
gaaatggtgcacagtgctttccaggcccagcgggctttccttctgatggcctctcagtaccaacaaccccacgagggcccgatgatgcacaacaaaaaat

SEQ ID NO: 385720 - DNA, 101 bp, Homo sapiens
cttaagttgaacggcagatatatttcactgatcctcgcggtgcaaataggtccctgtgcgttttattgcgacctgccggtgggaactttgtctccgagtcg

SEQ ID NO: 385721 - DNA, 100 bp, Homo sapiens
tacaagcggacacgggaatatatccgaagcctgaagatggttccaagtattccctatctagctcttgttcagcttctggaatttctgagcagccctcgtc

SEQ ID NO: 385722 - DNA, 100 bp, Homo sapiens
gcctggaaaagtttccccgccagggctccccaggaataccctctaccatctgctttggtcagggtgccgctcgaggatttaaaagcaacaagaagaaaac

SEQ ID NO: 385723 - DNA, 100 bp, Homo sapiens
caggctcgcctcgactccaaatggttgaaaacagatatacagccaaaatgctacaccaaccttatgggactccttagaagaacctgacattcgggacccc

SEQ ID NO: 385724 - DNA, 100 bp, Homo sapiens
tcccgggtcatctccagatgctagggttatgggtgtgatgaatgcagactctgctaccattttggctgtttggatcctcctttgaaaaagtctcctaaac

SEQ ID NO: 385725 - DNA, 82 bp, Homo sapiens
gcgcccacagcagcaaccttggagcaggcaggtgagaagccctaccactgcaactgggacggctgcggctggaagtttgcgc

SEQ ID NO: 385726 - DNA, 83 bp, Homo sapiens
ctgctgccccttctgctggcctctctgctcgcgtcctgctcctgtaacaaaggtgcgcgcggagccatggttatcatgtcgga

SEQ ID NO: 385727 - DNA, 100 bp, Homo sapiens
ttcattggccacctacagaaacaaaatgtcaacaaattgatgggagtggtgaaaggacataggaaggagtctggggaactgtactacagcattgaaaaag

SEQ ID NO: 385728 - DNA, 98 bp, Homo sapiens
aaaatgtcaacaaattgatggaccgagtgacggttctctacaggagcaaagccattcgctatacctggccttgtccatttcctatggccgactccagc

SEQ ID NO: 385729 - DNA, 49 bp, Homo sapiens
atcactgagaaatctggattttcaaggacacatgctaaccaagagtgag

SEQ ID NO: 385730 - DNA, 97 bp, Homo sapiens
tcgactgctctggaggtagcggccgcggtgaggagagccatgggacgggcagtcaagccccctctcccaacaactccgacacctgttccaagggaac

SEQ ID NO: 385731 - DNA, 73 bp, Homo sapiens
tttagagatggtgaagaagcaggtgcttatgatggacctaggactgctggatagcattgaagctgaacttaca

SEQ ID NO: 385732 - DNA, 103 bp, Homo sapiens
tgagcattctccagggaaaggatgacatatttttggacctgaaacagaaattctggaacacctatatgggtctcattctgtcgcccaggctggagtgcagtgg

SEQ ID NO: 385733 - DNA, 75 bp, Homo sapiens
gaggaggcgtcgcgcgcgcctgtagctcgcgggcctcgcaggtggaggaactgcaatgtctggtggagaacagaa

SEQ ID NO: 385734 - DNA, 80 bp, Homo sapiens
cgcggcacagagagggcctgggagcttgctgcagcttcaggcccagctgagagccagcctggaggttacccagcagcagg

SEQ ID NO: 385735 - DNA, 98 bp, Homo sapiens
ccgggatggagaaggaggaggaatcgactttgtgtggacagtaatgacctcacgtttccgattgcctgctggcagaacctacaatgtacgagcatcag

SEQ ID NO: 385736 - DNA, 90 bp, Homo sapiens
ctacagcttcggcggcgaaggtcagcgccgacggcagccggcacctgacggcgtgaccgacccgagccgacaatgcagatcttcgtgaag

SEQ ID NO: 385737 - DNA, 74 bp, Homo sapiens
cggaggcggcggcggcgagcggttccttgtgggctagaagccaagtacaagaagctggagaagcgatgagaaac

SEQ ID NO: 385738 - DNA, 97 bp, Homo sapiens
tgggtttcgtggatgatcagcagactttcttctgtggcaacgtggctcatcagcagcttatccagtaaagcactgcctccctagaccaattctctgg

SEQ ID NO: 385739 - DNA, 74 bp, Homo sapiens
cttcactgcactgaatgggaagatttactttcgaagctataacagacacacatgtagtgcctaccctgtgctag

SEQ ID NO: 385740 - DNA, 100 bp, Homo sapiens
gcgcttccgcaccatcacctccacctgctgatgcaaggaatcccctgggctcccgtccactccactgctgaccagcccattcgcctgtgctgagtcttcc

SEQ ID NO: 385741 - DNA, 98 bp, Homo sapiens
tgtgggaagagcacacagattcctcagacttcagattttcctgtccttgatcccagctggactgctcaagaagaaatggcccttttagaagctgtgat

SEQ ID NO: 385742 - DNA, 75 bp, Homo sapiens
gtcaatcatggatggtgtgaaacacatagaggcggggtttcaccatgttgcccagactggtcttgaactcctgag

SEQ ID NO: 385743 - DNA, 75 bp, Homo sapiens
ggcgcaggcagcaactgaggcagcggcaggctcaggtgcagccgctggtgaagaaagctttttttgctttggtga

SEQ ID NO: 385744 - DNA, 105 bp, Homo sapiens
aggaaagacaagagccgccctgcccagaaacgtccacatgtgggtactgcattcctaccggtgtgacaggctgttttggagtcagcggaagatcaccaaggccag

SEQ ID NO: 385745 - DNA, 97 bp, Homo sapiens
ccaaggtgtcccttggcggcgcgagcaggaagcagggaggagagagcgatggcttttttcacccagaaggccagccccagcggcttccccagcctcc

SEQ ID NO: 385746 - DNA, 75 bp, Homo sapiens
cccaacctcatggtcagtggcaacatggacgggaggtatcatgaactgatcactaaatatgggaagttggagcct

SEQ ID NO: 385747 - DNA, 100 bp, Homo sapiens
ctgaagaagaagaaagagaaaagagggctgctgcactggaagtctttaaaccagaggagttacgccaggccctcatgccaaccctagaagcactgtatcg

SEQ ID NO: 385748 - DNA, 74 bp, Homo sapiens
gcggaggcagagaagggaacgcccggcccagccccatgatgtgatgccagccacttactgtgaaattgatttag

SEQ ID NO: 385749 - DNA, 100 bp, Homo sapiens
gctcgccgtccccgccatgctgtctctagactttttggacgatgtgcggcggatgaacaagcggcagatcgtcagtatttaaacagatcacatcatgcgt

SEQ ID NO: 385750 - DNA, 95 bp, Homo sapiens
tccttactaaccacgaccatcaaatccgtgtcggagtccttacaggtgtcatggagaaactccagctgggcccagagattctgcagcgggaaaat

SEQ ID NO: 385751 - DNA, 100 bp, Homo sapiens
ccgggcgccatcgagccttggcggcggacgtgcagagggatggacaagctgtgctggagaatgtgtcagagggtggcaaggaacttcctggctgcctggg

SEQ ID NO: 385752 - DNA, 100 bp, Homo sapiens
ggagagggtgctggctgccgcgcggccgagggacatggacctgtgcagagacaggcagcttctcctttgccgtctgtctccttccggccaccaggagaca

SEQ ID NO: 385753 - DNA, 82 bp, Homo sapiens
caacgcctggctcggagcagcagcctctgagatcgcaccccctccctccctggcggagcccctgaaggagctgttcaggcag

SEQ ID NO: 385754 - DNA, 75 bp, Homo sapiens
gcacaatggatgcaataagtgcagaagggtttactgatattgatataggtactccaaagattcaggtttactcac

SEQ ID NO: 385755 - DNA, 101 bp, Homo sapiens
cgggcgccccgcagccccccaacatcctgctcctgctcatggacgacgttaacacagaaatctgcctcctgggccatgccgcttctaaggcctgtttcttc

SEQ ID NO: 385756 - DNA, 51 bp, Homo sapiens
caaagagtggatccgacctttggcttcagagtcattcttatagaagagcat

SEQ ID NO: 385757 - DNA, 100 bp, Homo sapiens
atacgtggattccagaggggtgacagcgaaatgtttatgctaaaactatcgatgggcaacagactattattgcatgtattgaaagccaccagtttcagcc

SEQ ID NO: 385758 - DNA, 82 bp, Homo sapiens
ctgactttcagctatggaatcgttcaaatctgaacatcaatgatgtactagggaactactcattgactcttgttgatgcatt

SEQ ID NO: 385759 - DNA, 75 bp, Homo sapiens
tgacactatgggaacctaccatggtatgacactgaaatctgtaacgggtacaagttgaattctatatgaatgaaa

SEQ ID NO: 385760 - DNA, 83 bp, Homo sapiens
atatattagaaccattctgccttggtgtcagctgtgatgcatgtttaaaaggaaattttcgaggtcgcagatataagtgttta

SEQ ID NO: 385761 - DNA, 87 bp, Homo sapiens
cggggagaccttgggcatcatcggacttgagttattgagaaaatccgcagagcacactctcgtagacatggtgcagctgctcttcac

SEQ ID NO: 385762 - DNA, 75 bp, Homo sapiens
ccagggggtgaaagggacaggggtctcgcagccagtattgcctgtcagggcacccaaccttaccatgcaatgtgc

SEQ ID NO: 385763 - DNA, 75 bp, Homo sapiens
tgaaaagagaaggtcaaacagctgaagatgagattgtggggaacctgggtgaaggcacctttggcaaggtggtgg

SEQ ID NO: 385764 - DNA, 82 bp, Homo sapiens
cgtcaagtacactgaaattcatcctgagatgaggagaggagaggcagcagcatggcgagtgtcctgtcccgacgccttggaa

SEQ ID NO: 385765 - DNA, 85 bp, Homo sapiens
aactcagttgtgcgttgcggccagtcgccactgctgggtcggcaccaggaattattatagaaagatcggctacagattacaaggc

SEQ ID NO: 385766 - DNA, 82 bp, Homo sapiens
tggatttaaaagacagtcctcgtcagcactgactttcagctatggaatcgtgccctctggtggtcagaagatgctgtgctgt

SEQ ID NO: 385767 - DNA, 80 bp, Homo sapiens
ctgctctgctgtctcctgcaagaactggctcaagaaatttgcctcgaaaaccaagttactataacaacagtaccaaggtg

SEQ ID NO: 385768 - DNA, 100 bp, Homo sapiens
agttcctggatatatctcccgatctgtggctggctcctatgataatgaaggttgttttggaaaccgaaataacaaataagtccgctttgaaactttatga

SEQ ID NO: 385769 - DNA, 95 bp, Homo sapiens
tcccgttgatgtaacagagcagaggaccagcagatgaatggacaccttgaagcagaggagcagcaggaccagagacgtctcccacaacctgctcc

SEQ ID NO: 385770 - DNA, 51 bp, Homo sapiens
agcctccggagtagctgggactacagacgctgaccggaaaggagattgaga

SEQ ID NO: 385771 - DNA, 98 bp, Homo sapiens
tctgagtgtcgatccagctgccttgtgaccaggacacttagaagaagcatggaccctgcaagaggtattctaccttgtaaatactgttatttgtatat

SEQ ID NO: 385772 - DNA, 75 bp, Homo sapiens
ccgcgaagcgccagtccgggccgaggagggaggttttcctttggaatatggataaatacaccatgatacggaaac

SEQ ID NO: 385773 - DNA, 74 bp, Homo sapiens
ctaagactcccgaatacttcagaagtggggaaatgcagaagatggctgtgccacccacgtatgccgatcttggc

SEQ ID NO: 385774 - DNA, 83 bp, Homo sapiens
gacaacaccgggacacccgcgaggccggaaaatgatgatatcatcaagttgaatcgaaaggaagggaagaagcagaattttcc

SEQ ID NO: 385775 - DNA, 100 bp, Homo sapiens
agagaggcaccgggatcgtgaccgagaccgtgaccgagagcgtgaccgagagcgcgaatatcgtcatcgttagaagatgcctgaaatgtgcagatgcccc

SEQ ID NO: 385776 - DNA, 100 bp, Homo sapiens
ctttgctgtgaggctcgtcttccaggacttcgacctggagccgtcccaggactgtgcaggggactctgtcacagtgaaggcagagtatgtgcatctcaac

SEQ ID NO: 385777 - DNA, 100 bp, Homo sapiens
aggcctttggcgacagtgaggaggacggagaggatgtgttcgaggtggagaagatcctggacatgaagaccgagggggtcagggatgttggaagctggag

SEQ ID NO: 385778 - DNA, 87 bp, Homo sapiens
atgcattttaactaatcctgaggacttcatccggtcaccatctacctattcttcaaatgggaaacagtgcttcttagtcctacgtca

SEQ ID NO: 385779 - DNA, 75 bp, Homo sapiens
ctaccagatgtacttgtgcttcctgctggccgtgctgctgcaggatgttgcagctcggggcttagatctccctca

SEQ ID NO: 385780 - DNA, 114 bp, Homo sapiens
cgcgcgctacgacgcgacctcggggcccaggatgcccccgccatcgccttcggtggaagggcgagctgaggatcagtgtcctgcctgcctacctgtcctatgatgccccatggc

SEQ ID NO: 385781 - DNA, 83 bp, Homo sapiens
cctgcgtcccgccaccggccgcttctgtcctcgcaacgaaggttttgggaacagtaaaatggttcaatgtaaggaacggatat

SEQ ID NO: 385782 - DNA, 75 bp, Homo sapiens
ggaaattcctgacgttcattgatctgatcatggagctttgtggtgcaacaagacttggttattttggaagaagtc

SEQ ID NO: 385783 - DNA, 100 bp, Homo sapiens
ggagatgtggttacacagcttgaataataatccagaatggctactctgatctatgttgataaggaaaatggagaaccaggcacccgtgtggttgctaagg

SEQ ID NO: 385784 - DNA, 100 bp, Homo sapiens
cactgcccccgccgccgccggagctctgcagcacggtgtcaagctagggatgcggtccattcccattgccactgcttgcaccatttaccataagttcttt

SEQ ID NO: 385785 - DNA, 98 bp, Homo sapiens
gagctggcacaaagtggcagaggccgtgtcttccccagctggtgtgggtgtgacctggctaggtcgtttggactgggagactcttgtgcacgaaaatc

SEQ ID NO: 385786 - DNA, 83 bp, Homo sapiens
cggattaaacgccggagagagcgtgaatttgcctcggggacgcctctccaggcctccaggcccaaggtcagcatcccactgtc

SEQ ID NO: 385787 - DNA, 75 bp, Homo sapiens
cccgacttgacacgatattttttgctaagcaggtttacaggtacatacattacacccctatttctacaaagcttg

SEQ ID NO: 385788 - DNA, 83 bp, Homo sapiens
acccacgggaacccaggagacaggccacacagatgctaaaactgcagaatctggaggtacagccccgtggtggaggccggctc

SEQ ID NO: 385789 - DNA, 87 bp, Homo sapiens
caagccgctggcagccgcggatctcaccgccgctcaggctgagcgggctttggacaccatgaactttgatgtgattaagggaaagcc

SEQ ID NO: 385790 - DNA, 94 bp, Homo sapiens
atgccctgcagtacctgcagaaggtctctggagacatcttcagcaggttctccccatgacaccacctgaacgtctcttcctcccaagggtgtgt

SEQ ID NO: 385791 - DNA, 100 bp, Homo sapiens
gcattctccttagcaactgcgggactgcggcggcgccggcctccggggagaaacgctttggacatcagacagtgcaggagaagaatgtgatgcggcagaa

SEQ ID NO: 385792 - DNA, 74 bp, Homo sapiens
gcggcggtggcagccatgttgttgagggtgcatctgcccggaagactcagactcctgcagcccagccagtacca

SEQ ID NO: 385793 - DNA, 50 bp, Homo sapiens
gcccaagactaagattctcaaaatggctgctttgtaccgcctcagtggag

SEQ ID NO: 385794 - DNA, 106 bp, Homo sapiens
ccagatcatgtcagagagagagcttggttaacttgggagaaagtttcatctgtggatggagtattggaaacctggacaagcatgaagaactagaggagcttgtagc

SEQ ID NO: 385795 - DNA, 101 bp, Homo sapiens
gggacgagctgttccgccggagcccccggcccaagggcgacttctccagccgggcccgcgaagtgtgtatgtggtagaagaccaaagaagagatgagctag

SEQ ID NO: 385796 - DNA, 98 bp, Homo sapiens
tggctgacagagcagagagctcaatgtcctcattgccggtttggagacttgaaggaggacaaagtgacgcgtcatgatggagccagctcagacgggca

SEQ ID NO: 385797 - DNA, 87 bp, Homo sapiens
aagttgaaaatgatgcaagaagttagtgaaaattttgagaaactcccatcaagactgaagcagacgttttggcagaaaaccaggttc

SEQ ID NO: 385798 - DNA, 76 bp, Homo sapiens
atgccccctatgggagggccaccaatgggacaaacctgtcatttactccatcctttatagtgatgctacaggacga

SEQ ID NO: 385799 - DNA, 75 bp, Homo sapiens
ttgtgttcatctttttccagtgccatcaaccacctcaaagacactggttattaacttcatctaccttgccaagag

SEQ ID NO: 385800 - DNA, 100 bp, Homo sapiens
agacggtcacgaagtaggagtcgcaggagcagccgcagtagatctcgaagtatctcaaaaagtcgctcccgctgtgctgtacctgcttctctgcctctcc

SEQ ID NO: 385801 - DNA, 100 bp, Homo sapiens
ggcctggaggccgccgcgagcccgctttccaccccgacctctgcccaggccgcaggccacgtgctgtacgccgacatcaagatggagaatgggaagtcca

SEQ ID NO: 385802 - DNA, 74 bp, Homo sapiens
gggcctgcgagggttgaagattgtgaagcaatagcctaagtttctgatgaagaattgaaaagaagagtagctga

SEQ ID NO: 385803 - DNA, 75 bp, Homo sapiens
aggcaaggagctaaagcagcgtgcgttcagccctgggaatgttggctaccagggtatttagcctagttggcaagc

SEQ ID NO: 385804 - DNA, 51 bp, Homo sapiens
ggcggagtcggggctcctgacggctggggtgtagtggtgcgatcttggctc

SEQ ID NO: 385805 - DNA, 51 bp, Homo sapiens
cgaggagggttgctagtggagaagaagaaggacccagcccagttcctgcag

SEQ ID NO: 385806 - DNA, 75 bp, Homo sapiens
cgagaatactggaacaatagagctcgaccttatctcttctgcagatctccaggggagcccaccagcctagtcaac

SEQ ID NO: 385807 - DNA, 75 bp, Homo sapiens
caaccctcccaagaagttcagaggggcggagaaactcatcatccacctgcggaaacatggcatcccctttgcact

SEQ ID NO: 385808 - DNA, 135 bp, Homo sapiens
ccaacggggccctcaaagtctccgtctggagtaaggtgctgcggagcgacgcggcctgggaggataaggtgcaatggatgagcttcatagtctggatccaagaaggcaagagttattggaagctagatttactgg

SEQ ID NO: 385809 - DNA, 100 bp, Homo sapiens
agcctcagtttgtgcaggacaccgacatggaacagggactcactggggaatgagtccctggaacgccagatgcgtgaaatggaagagaactttgccgttg

SEQ ID NO: 385810 - DNA, 100 bp, Homo sapiens
gtgctttgtaaacacggctgtgctcagggctcgcgggtgaccgaaaggatcatgaactagtgacctggaaaggatggtgaagtggatgctgaagaacttc

SEQ ID NO: 385811 - DNA, 83 bp, Homo sapiens
tgtttagcaagattgcagtcaccggtactggtgcccatcctgccttcaagtacctggcccaaacctctgtagaggagcaggat

SEQ ID NO: 385812 - DNA, 83 bp, Homo sapiens
cgacccggtgtgtggcgcgcccagagccccgcgtttcagccctagggaagcaaccatgtccaagggacctgcagttggtattg

SEQ ID NO: 385813 - DNA, 80 bp, Homo sapiens
ccggcgctgccaggatccgcggggagaccttgggcatcatcggacttggatttttagactctgaggagcagttggagcta

SEQ ID NO: 385814 - DNA, 100 bp, Homo sapiens
gctggagaactacagcaaccttgtctcagtgggtaggtagccatccaagcttcctgaaggaggttcgagatcacatgcaggactctttcttaatgcagcc

SEQ ID NO: 385815 - DNA, 90 bp, Homo sapiens
cgctatcacagctgctgcaatcgcttgggagagctcctgggccacccctcctttcaggtcaaggatgatgtgaggcataaagttcatctg

SEQ ID NO: 385816 - DNA, 85 bp, Homo sapiens
ctctctttctggcctggaggctatccagcaagctggcagggcggagatgctggaccacgccgtcctgcttcaggtgatcaaagaa

SEQ ID NO: 385817 - DNA, 99 bp, Homo sapiens
tgagcgttctcaacttggttattgtaaaaaaaggtgcgggagtatgagttaagaaaaaacaacttctcagatactggaaactttggttttgggatccag

SEQ ID NO: 385818 - DNA, 75 bp, Homo sapiens
cacaggaagatattcattttaaggtctccaccagctcctggccgggttcgaggacaagtcagcctatgcgctctg

SEQ ID NO: 385819 - DNA, 100 bp, Homo sapiens
ggcgttggagcgcggaaatctggaaccgggatggcgacgtctacactgagtcggaggcgaagagtgtgaacatggctacgcctcttcattcccgtccatg

SEQ ID NO: 385820 - DNA, 105 bp, Homo sapiens
cagaagtcgcgtgtctaggtgagtcgcggtgggtcctcgcttgcagttcagcgaccacggcctccggtgtggctgtctctgatggtgtcatcaaggtgttcaacg

SEQ ID NO: 385821 - DNA, 74 bp, Homo sapiens
cacggccagatctgccctccacctcctgacaaggtgatccgggcgggccccgcaggaattttatcccctcaccg

SEQ ID NO: 385822 - DNA, 137 bp, Homo sapiens
aagattgcggccctgcgcatgtatactagctgtgtggagaaaactgacttcgaggaattctttctaaagtataacaaagccatccggaactacacccgcttcgatgactggtacctgtgggttcagatgtacaaggg

SEQ ID NO: 385823 - DNA, 75 bp, Homo sapiens
gccgtcttaaagttacgttgttagaatgtagcaggagactccatcctctgccaatggcccttcccgggagggctc

SEQ ID NO: 385824 - DNA, 100 bp, Homo sapiens
gcagatgcttcgggagaacctggaggaggaggccatcatcatgaaggacgtgcccgactggaagggtcgcggcgagcgcgcctatgacatctactcgcgg

SEQ ID NO: 385825 - DNA, 97 bp, Homo sapiens
gaaatatagcagcaatttgggcaactttaattatgacttaattcagtgcacaaatgagatgaatgtgaacatcccacagttggcagacagtttattt

SEQ ID NO: 385826 - DNA, 133 bp, Homo sapiens
gagggtctgaagttcacgactactagaaggggaggggagtggaaaggctctcagtgaaaaagcctggtgtgtccgtttctctggtgaatccccagccatccaatggccacttctcaaccaaaattgaaatcag

SEQ ID NO: 385827 - DNA, 83 bp, Homo sapiens
aagtttggtcagcagtcacaggcaaaacagcccacctgaggatattgaccataaggactcatatctcattacaagaagcatca

SEQ ID NO: 385828 - DNA, 82 bp, Homo sapiens
gcggagcttcgccaaggctggcgcagtcgtcccacagaacaacgagaagcttcaggagagcccgtgcatcttcgcattgacg

SEQ ID NO: 385829 - DNA, 96 bp, Homo sapiens
agattctacaagtgacttaagaagcaaaaaattcaagaaactgactaaagctatatgtggactggaattgaaagatgttggccatcgtgatcagat

SEQ ID NO: 385830 - DNA, 100 bp, Homo sapiens
taccgtgtctccaatgacaaacgagatgtaaaagtgtcactgtgtatatgaatgacctaaaggtacaaataaagacggagagagaacagtgccaactggg

SEQ ID NO: 385831 - DNA, 82 bp, Homo sapiens
aaccagctggaaggcagattcaagcagctgcaaggctgctgagcttcgtgcttatctgaaatctaaaggagctgagatttca

SEQ ID NO: 385832 - DNA, 95 bp, Homo sapiens
gtcaggttccgatgatcgcgctgcaggcctgtttaaagaagaaaacccgtatgctagatttgaaaacaactaaagcgctccagcacatcagtccc

SEQ ID NO: 385833 - DNA, 90 bp, Homo sapiens
gccatgctgaactcgtatggagagggtccccagccccaccccagccccaaaggaggctgttcgagagggacgtcctccggagccaacccc

SEQ ID NO: 385834 - DNA, 75 bp, Homo sapiens
gatctgtacttctacagagatcctgaagaggctgaagaagaggaggaggaggaggattccgaggtgcagggggag

SEQ ID NO: 385835 - DNA, 100 bp, Homo sapiens
gcctccacctcggccgccctgcccagctgcctgcccccggaggtgcccacgcagctgcctggacaagaatgggacgcgagagataaagattctatccgac

SEQ ID NO: 385836 - DNA, 100 bp, Homo sapiens
cggtgtctgcagcaccctccgcttcctctcctaggcgacgagacccagtggctaggttatgatgtgattgctcaagcccaatctgggactgggaaaacgg

SEQ ID NO: 385837 - DNA, 75 bp, Homo sapiens
gtcccttttgcctcagatactattttgaagaccaagatcactccatggatgaaatgacagctgtggtgaaaattg

SEQ ID NO: 385838 - DNA, 87 bp, Homo sapiens
gagatcgatctgtaccgcggggatccgaagtatgcttatccagactgcagagtcccagacccccaccccttcagccacatccttctt

SEQ ID NO: 385839 - DNA, 75 bp, Homo sapiens
aagccagcctctaagaaggaacggatagctgatgtgaagaaggcctgaattattggaacaactttggaaagccag

SEQ ID NO: 385840 - DNA, 98 bp, Homo sapiens
ccgtggattccaaatacaggagaaatggcattggagccctccctaaggcatatcctgataatcatctcagtcaggtggatgtaaatgaattgttttca

SEQ ID NO: 385841 - DNA, 101 bp, Homo sapiens
tggaaaaagatttagttctgagattacccataaggaaaaccgtcttcagatacagtccctaagcccaagagagccccaaaacagaagaaagtagtagaggc

SEQ ID NO: 385842 - DNA, 78 bp, Homo sapiens
actgggggcaccattaacatgatggagtacctgttgcagggtggaacggcacatgtgtgatggggacattgttatctt

SEQ ID NO: 385843 - DNA, 50 bp, Homo sapiens
gagaatcgaggagctcaacaaggtcttttatcagaaatcaccgatccaga

SEQ ID NO: 385844 - DNA, 100 bp, Homo sapiens
gtctcggtttctccaagtcaacagcgcctggagggccaattcctgtccccccagcagcatggcatcgtgtgctgaaccctctgagccctctgccccactg

SEQ ID NO: 385845 - DNA, 76 bp, Homo sapiens
tacaagcttacgtctctgctcttcagtacaatcctgacttcctcgttctgcccatcttcctaacaaggctatggct

SEQ ID NO: 385846 - DNA, 83 bp, Homo sapiens
ggaaactgtctctatggatctaggtgtcgtgaaaactacccctaaaagccaaaatgggaaaggaaaagactcatatcaacatt

SEQ ID NO: 385847 - DNA, 98 bp, Homo sapiens
gaccgtgctgatcttcgatgagctctcggattccttatgcagagtggccgacttggtggaagcagggaaaggcctggagatgaggaagctggttctct

SEQ ID NO: 385848 - DNA, 80 bp, Homo sapiens
cagcaattctgtgagcagcaagaatggcacggtctgcctcagtccaccctgtaccctggaaaacctttccaacctatgag

SEQ ID NO: 385849 - DNA, 83 bp, Homo sapiens
ctctctgctgcggcgcggggaccgctgtgctctcgaacatgaaaggctcccggagcagcgctgactcctccaggaaacactga

SEQ ID NO: 385850 - DNA, 101 bp, Homo sapiens
cacggtgtggcagctgctctgaaccaggacctggacccggacccaaagtgccatgtctttaatgagtggaagctggacacactatgtgacttgtatgaaac

SEQ ID NO: 385851 - DNA, 151 bp, Homo sapiens
ccagccttgtctcggccacctcaaggataatcactaaattctgccgaaaggactgaggaacggtgcctggaaaagatcgtcagtatttaaacagatcacatcatgcgtgagtacaagctagtggtccttggttcaggaggcgttgggaagt

SEQ ID NO: 385852 - DNA, 97 bp, Homo sapiens
cgcctgtggggactggaggcccagaaacgggagccatttgtgcaggccaagctgcggcccgaggacggcctgtacctcattcactggagcaccagcc

SEQ ID NO: 385853 - DNA, 98 bp, Homo sapiens
cgccgggcgccgcgcctttgggctggcagtgatggtgaaagcataggaaactgccccttttcccagaggctcttcatgattctttggctcaaaggagt

SEQ ID NO: 385854 - DNA, 100 bp, Homo sapiens
ctggcgtgcgggacctaccagctgcggcggccggaggaccggcctgccggcccccagaacaagagagctgacgccactggaggaggcctccctgcagaat

SEQ ID NO: 385855 - DNA, 51 bp, Homo sapiens
gtgttaacaatgcatccacagagaatttatccagttggcgaaggactttga

SEQ ID NO: 385856 - DNA, 83 bp, Homo sapiens
gtccaggttcaccagctgctcgccgggagcggcggcgcccggacgccgagctgtattcatcaccaaagaaaaaacttacacca

SEQ ID NO: 385857 - DNA, 83 bp, Homo sapiens
aaacttggattttttccagtctgatccttttgttggcagactcctgagagcagcctccatgaggccctggaccagtgcatgac

SEQ ID NO: 385858 - DNA, 50 bp, Homo sapiens
ggtgcctggcttgcaagacagggaccacttctataagagaaacaagaacc

SEQ ID NO: 385859 - DNA, 82 bp, Homo sapiens
aaacaactggcagaatttgctagagagaactcgatgccaccgcaacggtattggcgaaccggcaggatgaaagtgagcagtc

SEQ ID NO: 385860 - DNA, 90 bp, Homo sapiens
gcggaacctgcggggcagaggcggcggccgcagcggcgcagctgatagcaggaacagttcctctgtgacgagggtgcaggtatctctggg

SEQ ID NO: 385861 - DNA, 83 bp, Homo sapiens
tgtgcttagaggtgtacgagaagccggtacaggtgccctgcggacacgtctgctgatgcaaggaatcccctgggctcccgtcc

SEQ ID NO: 385862 - DNA, 82 bp, Homo sapiens
tcaaaaccgacctgaggtttcagagcgcagccatcggtgcgctgcagacctgcctagagctggaacgttacctccagagcga

SEQ ID NO: 385863 - DNA, 100 bp, Homo sapiens
tttggagttcttacaacatggcagacattgacaatatttgactacagtcattccttatgagaaaaaaaacggaccaccgtctgttgaagatcttcaaata

SEQ ID NO: 385864 - DNA, 100 bp, Homo sapiens
gacgctctgcggggctgagctggtggatgctcttcagttcgtgtgtggagacaggggcttttatttcagctcaggggagagagaaagcccagaaagaaag

SEQ ID NO: 385865 - DNA, 100 bp, Homo sapiens
cctcttctgcaaggtccggctgctggatggaggggattttgtcagcttgtcgtcaagaaaatggacccaagtggggtcaaagtgctggaaacagcagagg

SEQ ID NO: 385866 - DNA, 144 bp, Homo sapiens
gaacagagaacagaagctcagagaagtgaagcaacttgcccagctatgagagacagagccaggatttgaaaccagagtggttaagaaagtagctcaatacatggctgatgtattggaagatagcaaagacaaagttcaagagaa

SEQ ID NO: 385867 - DNA, 80 bp, Homo sapiens
ggctacaccccggagccaggagggtcagcccaaggccaaccccactgtcactctgttcccgccctcctctgaggagctcc

SEQ ID NO: 385868 - DNA, 100 bp, Homo sapiens
cttcgtttgcccacgactgccgctgtgtgagccgaatcagaactctctttatctctcctacagggatcaaaggaagcagttccaggtactggtagagaac

SEQ ID NO: 385869 - DNA, 50 bp, Homo sapiens
aggagaagccgcccaaagaactggagctgctgctcttcctccagaacctg

SEQ ID NO: 385870 - DNA, 90 bp, Homo sapiens
attttctcaaacgagagtcagcctttaacggtgtgctgggcatcaaggtgaagatcatgctgccctgggacccaactggtaagattggcc

SEQ ID NO: 385871 - DNA, 101 bp, Homo sapiens
tggtccaaacaatcatgggaatttccaaggggattcaaacttcaacagaatgtggcaaccagggtcgacaagtgcccccaatgatttatggtacaacttca

SEQ ID NO: 385872 - DNA, 83 bp, Homo sapiens
taaccgggacccggtgtctgctcctgtcgccttcgcctcctaatccctagccactatgccgctgccatggcccagacactgca

SEQ ID NO: 385873 - DNA, 75 bp, Homo sapiens
cgagagtgttgggaagaggagcgcgtccccggggaaatgaggggtcttgctcctcagaacaaaccagaattgcag

SEQ ID NO: 385874 - DNA, 152 bp, Homo sapiens
cggcggatctggacacccagcggtctgacatcgcgacgctgctcaaaacctcgctccggaaaggggacacctggaaccaaccggtgagccctctcctaagagacccaggggaagacccaaaggcagcaaaaacaagagtccctctaaagcag

SEQ ID NO: 385875 - DNA, 96 bp, Homo sapiens
gatattcaggaaccaatgctgagtgctgcacaagagcagctcaggaatcttgcttttaagaaaattccccagaaatcctcccatgctgtttgtaac

SEQ ID NO: 385876 - DNA, 76 bp, Homo sapiens
agcacctactgagcgctcagtaaagggatacagcaggactcaagtctcgtggcgatgacagccttcaatcaaacat

SEQ ID NO: 385877 - DNA, 83 bp, Homo sapiens
gtcccagtccccagacaccaccatccagagaaccgtgcaacaagaggcttattaagttcaaaagcaaaacgggctaaatgttc

SEQ ID NO: 385878 - DNA, 75 bp, Homo sapiens
ctgggaaggaaaaacagaatcagctgttccctgcgaaagggagaaccttgctagtgacatgtatcttatatcaca

SEQ ID NO: 385879 - DNA, 90 bp, Homo sapiens
gcctccgaagtagctgggattacagctctcccagtgaagtgatatcactgcctctgtggacaagacacctccaggagcccagctcacagc

SEQ ID NO: 385880 - DNA, 100 bp, Homo sapiens
ggcggaggcaggagcagcctgggcgggtcgcagggtctccgcgggcgcaggaaggcgagcagagaaaaccagaactgatggctctatttgcagtctttca

SEQ ID NO: 385881 - DNA, 50 bp, Homo sapiens
agctcggcagtcgcgaagcagcaaccatgctgtccccgccctactccgga

SEQ ID NO: 385882 - DNA, 82 bp, Homo sapiens
ctcccattccacccccggccccgtcccagagcagcccaccagagcagccgcagagcatggggtacccgtgctccatctcatc

SEQ ID NO: 385883 - DNA, 80 bp, Homo sapiens
ccttgccaaccctcccaagaagttcagagggtggcccagttgaaatccttcccttcctctaccttggaagtgcctaccat

SEQ ID NO: 385884 - DNA, 82 bp, Homo sapiens
ggactttgctctggaatctggtggtttggtgcacctcgatttggaggaagtagggcagggcccttatctggaaagaagtttg

SEQ ID NO: 385885 - DNA, 88 bp, Homo sapiens
gctccgccccctgcatgtctttgttggcaaacagttctgggggtcgtccgatcctgcaggattactacagcatcccatttcccacacc

SEQ ID NO: 385886 - DNA, 74 bp, Homo sapiens
ggctctggacgtggcccgcatcctactgaccccacctgagcacctggagtttcagcggcctcaagatcagtacc

SEQ ID NO: 385887 - DNA, 75 bp, Homo sapiens
gcccatggccaggaccaccagccagctgaaagtttcctacactactgaggtttaggggcactgtgaagcaaaagc

SEQ ID NO: 385888 - DNA, 101 bp, Homo sapiens
ctcgagcgctcaggatggaggaagactcgatccgcctgcctgcgcacctgcgttgtctgcattcaaaagagcattctattaaagctaccttaatttggcgc

SEQ ID NO: 385889 - DNA, 75 bp, Homo sapiens
ggcggtgctgccgcgcgagctctacccagtcgaggtcagcccaaggccaaccccactgtcactctgttcccgccc

SEQ ID NO: 385890 - DNA, 83 bp, Homo sapiens
gggtgtccaagttccggcacaccgaggctcggccgccccgccgcgagcaaattgtggctactaatttgccccctgaagatcaa

SEQ ID NO: 385891 - DNA, 75 bp, Homo sapiens
cttaaggaaggacaaggtggggaaaagaatattcagagtatatataccattagcaccatcctgctgtatcacatc

SEQ ID NO: 385892 - DNA, 75 bp, Homo sapiens
gctcgaagaaccatcatcatcaagggctatgtgcctcccacaggcaagagggtgccgccagctgccgcaccagcc

SEQ ID NO: 385893 - DNA, 100 bp, Homo sapiens
ccggaaccgcgattcggcgtgtcagaacctatgagaaccccaaagacattaaagattgctgaaatacaggcaagacggattgctgtggactgggaatcct

SEQ ID NO: 385894 - DNA, 97 bp, Homo sapiens
gactgtctgacaaattgttatcagcgagattttcccctaccttgtggtggttattgggttagagaatgtgttggtgctcaccaagtctgtggtctca

SEQ ID NO: 385895 - DNA, 100 bp, Homo sapiens
aaacagccaactaccttatctccattgatccagttgatttatctcgtgaaggagaaagttatgtcggcaagcttagggtgtccgcaatgttgccagtgtc

SEQ ID NO: 385896 - DNA, 76 bp, Homo sapiens
aagagaacaatgggaaccagtctttcaaaatgcaagatgatgatgaatgaagtcctggcagcttcctgtgtcccag

SEQ ID NO: 385897 - DNA, 100 bp, Homo sapiens
cctctcttccctggctggacttgcggagtccccgccgaagaacccgagaaatctcccagcaaaaccagctgaagaagctcagaagcacagacagcagtat

SEQ ID NO: 385898 - DNA, 100 bp, Homo sapiens
aagaggctgtggattcactgtctccagcgcctcttctttgagaaccaccctgcctccatccctgccaagataccccagaatcttccatgctccgtcacac

SEQ ID NO: 385899 - DNA, 100 bp, Homo sapiens
cagcatggaaccaaagcggatcagagagggctaccttgtgaagaaggttccttttgaggatggccacacagacaaccacttacctcttttagaaaataat

SEQ ID NO: 385900 - DNA, 75 bp, Homo sapiens
cggcgaacgcggagagcacgccatgaaggcctcgggcacgctctgctgtgtgcgtgcaccagctgcctccaggcc

SEQ ID NO: 385901 - DNA, 100 bp, Homo sapiens
acactgataagattgaatgccaagcagaaaattacctaaatgcactctttcgaaagaaaggttaaggctacctttccagataatccaacagctaaatcac

SEQ ID NO: 385902 - DNA, 90 bp, Homo sapiens
gtttagaagcaacgtgtatcagccaactgagatggccgtcgtgctcaacggtgggaccgattactacagcatcccatttcccacacccac

SEQ ID NO: 385903 - DNA, 100 bp, Homo sapiens
tccccggcccacagtgggggtgtgcaaacccgagagaactggatgatgatgtgcctgcagatatggttgcagaagaatcaggtcctggtgcacaaaatag

SEQ ID NO: 385904 - DNA, 75 bp, Homo sapiens
ttcccttctgtgagctatgtctcagagaggagccatcaaaactcgatcaggatgttttggccgctcttgaatgtg

SEQ ID NO: 385905 - DNA, 74 bp, Homo sapiens
aggtgacagtctgcatgtgcagttttcagacgctatgtccagcaaaggctccgtggttctggcctacagtggcg

SEQ ID NO: 385906 - DNA, 98 bp, Homo sapiens
atggatctggaagctgagggcacgtgtttgcggttcagccctttgatgaccgcagcagtggccctcatggagcacagcaactgctcgtcggagcccgg

SEQ ID NO: 385907 - DNA, 74 bp, Homo sapiens
attgagaactgcttcataatcctcagaaggtgggagtcaatcattttgacaagtctcctgaaaggaacagctag

SEQ ID NO: 385908 - DNA, 75 bp, Homo sapiens
gatggatccatttctcctattgaggagtcaacttccacttacttacatgatcatttcgagagatgtaatgttgat

SEQ ID NO: 385909 - DNA, 90 bp, Homo sapiens
gtgagaaacattttggagacccaaaggaaggggccattgtaaagaagttccaccagagtagagatggagtttcactcttgctgccaaggc

SEQ ID NO: 385910 - DNA, 101 bp, Homo sapiens
aggaaggatataagttttacccacctaaagtggagttgtttttcaaggttcagattgcacttaatgaagctaagcttagtgaagagaaggtgaagtctgaa

SEQ ID NO: 385911 - DNA, 75 bp, Homo sapiens
gcccaagtccttggctgctgagtggtgacagtagcccagcccgccggccaggaattctcacactcaagaaagcaa

SEQ ID NO: 385912 - DNA, 75 bp, Homo sapiens
ttggatgatgatggatccatttctcctattgaggagtcaaccatccagatggtccaccactgcaccatccacggg

SEQ ID NO: 385913 - DNA, 82 bp, Homo sapiens
ccttggtgtcatccagccttagcaaaccagaggtggataatattaatgcagctgtgatggatttgaaaaaaaagaagatccg

SEQ ID NO: 385914 - DNA, 75 bp, Homo sapiens
atgaatggaatgctcctaaatgatcgcaaagtggtacagccaaagaccggagctttggagagatgaagtttaaac

SEQ ID NO: 385915 - DNA, 82 bp, Homo sapiens
gaccggcccctcgtcatcaagaccggcgtccagttcactactaaagtcaggtgccaagtcctgccctgccaacttcttggca

SEQ ID NO: 385916 - DNA, 89 bp, Homo sapiens
cgcgtccagcacctacgtcccgctgccgtcgccgccgccaccatgcccaagagaaagccgagccacatcgctcagacaccatggggaag

SEQ ID NO: 385917 - DNA, 75 bp, Homo sapiens
tgcaaggagaagctgcacgacgtggacttctacaaggcccgcatggagtactatactggcaattgctggagaaga

SEQ ID NO: 385918 - DNA, 83 bp, Homo sapiens
cttggactgagtcctgcaggacacagaaggggcaggatggggctgggaagtccaaccccacgcatttgggctcagccttggac

SEQ ID NO: 385919 - DNA, 90 bp, Homo sapiens
tgtttgacaagagtggaaatggagaggtgacatttggtgatgcagaagatggggaagaatatgatgacccttttgctgggcctccagaca

SEQ ID NO: 385920 - DNA, 51 bp, Homo sapiens
cggcgaccaagatcaggaacctgccctgttacagatttatggtaatggaaa

SEQ ID NO: 385921 - DNA, 82 bp, Homo sapiens
gggggtcagagtgccggaccccagcacacagaagccgagacgaattaaacaaccaccatgtcgagcaaaaaggcaaagacca

SEQ ID NO: 385922 - DNA, 90 bp, Homo sapiens
atcagttacacaaccaatgcatttcctggagaatatatccctactgtgttggatggcaagcatgtggtgtttggcaaagtgaaagaaggc

SEQ ID NO: 385923 - DNA, 89 bp, Homo sapiens
cattgggtggaggagcagaatttactacagcatgtgatttcaggttgactatagtcaatggggccaatggagccaagtgtatggaaacc

SEQ ID NO: 385924 - DNA, 97 bp, Homo sapiens
ttgggaaagctgggggagtgtctctgtcaaagtgtgtcaaggatgccacaatgccatcgacccagaagtgcagcgggtgacctataacaatttcagc

SEQ ID NO: 385925 - DNA, 75 bp, Homo sapiens
ggggtgcaggagaggagaactgccagaaacccctttctaaggcacaaaatgatgtgatggaaatgaagatgcagt

SEQ ID NO: 385926 - DNA, 88 bp, Homo sapiens
gaggacattcgcaatgccatcatggccatccgccggaaccgcgtggccctgaaggggtcacggcgctgtgggaggacagcagcaacgg

SEQ ID NO: 385927 - DNA, 50 bp, Homo sapiens
caattgcaacaagtgggagcagaggagccactccatccccaaattcaaga

SEQ ID NO: 385928 - DNA, 95 bp, Homo sapiens
taccggccgtggaagcggccaccgactactgtcagcagctgtgccaggtacatcaggaacgtctctatcaagaatacaatttcagcaaggctgag

SEQ ID NO: 385929 - DNA, 100 bp, Homo sapiens
ctctcgtggcattatccttcagtggggctattggactgacttttcttatgctgggatgtgccttagaggattatgggcttcagggatgacttcttagggg

SEQ ID NO: 385930 - DNA, 100 bp, Homo sapiens
gggcccggccgacccgcggcccgaattccgttgatgcagcaaagccgctgctgcggaaggcgatccagatctcacagcagaccccatattggcactgccg

SEQ ID NO: 385931 - DNA, 82 bp, Homo sapiens
aaggagatcgctcggacacagaagaacaagggtcatcatcagatttgaaatatttaaagtggatacaaaactatttcagcaa

SEQ ID NO: 385932 - DNA, 74 bp, Homo sapiens
ctacctggcattgccttttgttgaggtatcctggtcagatataggaggactggaaagtatcaaactgaagttgg

SEQ ID NO: 385933 - DNA, 83 bp, Homo sapiens
tgttaacagaaatggtccctggacaggaggattcatctgatctggagttgctgcaggattacttccttaggatagattgccag

SEQ ID NO: 385934 - DNA, 135 bp, Homo sapiens
gtggtctcagcccaggacctccaggggaacaatgaggcctacgcagagctcatcgtccttgaccaagatcactccatggatgaaatgacagctgtggtgaaaattgaaaaaggagttggtggcaataatgggggc

SEQ ID NO: 385935 - DNA, 75 bp, Homo sapiens
ggagaactacagaaacctggtctccctaggcatctccagaatatcagaaactgcaggattccagttcttgttatg

SEQ ID NO: 385936 - DNA, 100 bp, Homo sapiens
tctcctgggcccccaaagacaaatccagtaggaagaatgtgctggaggagccaaggcaaagagggaccactgtgctcatggacccatcgctgccttccaa

SEQ ID NO: 385937 - DNA, 82 bp, Homo sapiens
ctctcagcttcggagaatggagtcttccatcaatcatatctcacagcatgtttcgccaagggatgcatgacttgaaagtctg

SEQ ID NO: 385938 - DNA, 100 bp, Homo sapiens
agcacgagagacccgagttcatcgcctacccccatctccgcatcaggaccaaggatcttcagaggcagactggaaaactggacacccaagccatgttcaa

SEQ ID NO: 385939 - DNA, 100 bp, Homo sapiens
aacatcactgtaattcttgctgtagaaagcttaaacttccagacagccgctcaggaagcaatcttgcatgcgtctggaaatggcacaaccaaggactact

SEQ ID NO: 385940 - DNA, 80 bp, Homo sapiens
agtgtgacagtccatatgtaaccaaatattatggatcctatctgaagtatgtctggatttggaatgaacaggaatcaggc

SEQ ID NO: 385941 - DNA, 101 bp, Homo sapiens
ctgcggaacaggacgccctctgatgctgtattcatcaccaaagaaaaaacttacaccaatgcagaaatcggttagtccattagtttggtgcaggcaagttt

SEQ ID NO: 385942 - DNA, 110 bp, Homo sapiens
cttatggccacattcctgcatcagctcagccatcgcggtcctggctataagtcaccatggcacagcaagctgccgataagtatctctatgtggataaaaacttcatcaac

SEQ ID NO: 385943 - DNA, 82 bp, Homo sapiens
cccttggagcggcttttgtctacttggctgacctcctgatgcctcacttgataaactgccagggagaagaatgagaagacag

SEQ ID NO: 385944 - DNA, 100 bp, Homo sapiens
catgaatgtggtggaataagtgctagtatcggacatgatcctcatcttttatacactcttagtgctgtccaggagttgatccctgaattttattatctcc

SEQ ID NO: 385945 - DNA, 75 bp, Homo sapiens
tttgaaattgtaacaacgtctcgaactttctatgtgcagtataaatcaaagccattctgtgaaaaactgctttcc

SEQ ID NO: 385946 - DNA, 51 bp, Homo sapiens
cagaggaggaggcagcagaaccccattctcgaagatatgactccaggacca

SEQ ID NO: 385947 - DNA, 82 bp, Homo sapiens
ccaccgcgtggtgcttgccgcagccagcaactatttcaggaagtttgtggtatatgaagtattgcgagaagatgagttttcc

SEQ ID NO: 385948 - DNA, 50 bp, Homo sapiens
tcgttggaggctgtgcagcagaaggcaaaatacatatctcagtgcattga

SEQ ID NO: 385949 - DNA, 50 bp, Homo sapiens
gaattgatctatgttggatcagagtctccaagagcttttagattaccccg

SEQ ID NO: 385950 - DNA, 132 bp, Homo sapiens
aaccgaaagggaagaaggcgcggtggcaggagctgacagagtgatgggaaacgcgtgagccaggccgagagaacctaatccaccaatagatcaagttatacagaaaccaggagttgtacagagatttgtgaa

SEQ ID NO: 385951 - DNA, 118 bp, Homo sapiens
agctagtgttttcttatttagccggagtgagaagcaagaaggccctggacacagcaatatctctgggctttcacagggttttggccaaattgggcgagggcacaaaataaccacttac

SEQ ID NO: 385952 - DNA, 82 bp, Homo sapiens
cacacgggggagtcgggggagtcgtaaacaaccctgaagagaacagccaggcctggatctcgaggacctggaagaagcagag

SEQ ID NO: 385953 - DNA, 75 bp, Homo sapiens
ctcctgctcgatctcagagctcagacacagagcagcagtcccctacaaggtacaagaatattccacagatgtcct

SEQ ID NO: 385954 - DNA, 100 bp, Homo sapiens
cagctctccaagaccagccgggccctggtggccgacagccatcctgaaagcttcctgcctgacacagctcacttcaagaagtgcacaatgtcagaacgtg

SEQ ID NO: 385955 - DNA, 101 bp, Homo sapiens
aaggacttttaccagcgggagtttgatttctttaacaagatcaccaacgtgtcggctgtcatcaagccctaccctaaaggcgacgagagaaagaaggcttg

SEQ ID NO: 385956 - DNA, 75 bp, Homo sapiens
agagaattagagcgcactaaaacatcctgggcttcagaatggcagaagatgatccatatttgggaaggcctgaac

SEQ ID NO: 385957 - DNA, 82 bp, Homo sapiens
gccaagcaagaagaaagacgtggcagcaagcgggagtcggggatagtgtcatcggttcggaggatcccttttcccccagaaa

SEQ ID NO: 385958 - DNA, 75 bp, Homo sapiens
ctaagaagactcttcccggttgatcgtggattatttgagggtcagaaaggggctccaggacccaaaggtttcaag

SEQ ID NO: 385959 - DNA, 100 bp, Homo sapiens
gcggcgcgagcgccccgccatcgtcccggtgtgcaactgaggaacatggctcaagaaactaatcacagccaagtgcctatgctttgttccactggctgtg

SEQ ID NO: 385960 - DNA, 60 bp, Homo sapiens
tcctacgacgaaattagccagctccgcctgttgaaaccaagactgaagactgaacctgaa

SEQ ID NO: 385961 - DNA, 75 bp, Homo sapiens
ccctggacatggaggagaaggtccgcttcaagatttggtcaacactggactcagcgctttccttttctttattgc

SEQ ID NO: 385962 - DNA, 100 bp, Homo sapiens
ttgatgaaagaggctgcacacccctgcactatgcagctacatcagacacagatggcaagtatgatctcgtgaaatcttgagagaaactgaatgacgaatg

SEQ ID NO: 385963 - DNA, 98 bp, Homo sapiens
ttgggcccagtttatggcttccagtggaggcattttggggcagaatacagagatatggaatcagaacctgcacttgttgccaagtcttccatcttact

SEQ ID NO: 385964 - DNA, 100 bp, Homo sapiens
cccgtcggccggccgagcctggagcatcatggcagaacaggatgtggaaaacgatcttttggattacgatgaagaggaagagccccaggctcctcaagag

SEQ ID NO: 385965 - DNA, 82 bp, Homo sapiens
acggagctgggcgacgagctgaccctgggagacatcgacggagcccagcagccggggccgccctattacaccgacccaggag

SEQ ID NO: 385966 - DNA, 100 bp, Homo sapiens
acctgtgctaccgaagtcatctgttgctgtagggaggccagggactcagccgatgcctcaatggccaactgcagctgtcccagaaaatacttgacaaatt

SEQ ID NO: 385967 - DNA, 100 bp, Homo sapiens
cggacagatcgcgtttcggaggcggcgcagggaactactggagaccacgtgccgcctggccaacacgctgaagaggcatggagtccaccgtggggaccgt

SEQ ID NO: 385968 - DNA, 100 bp, Homo sapiens
ttccgtatctgcctaggcattttgctgtctcctcctaatacgttacacaacagccaatgcggagtctgacaatgagcgggactctgacaaagaaagtgag

SEQ ID NO: 385969 - DNA, 89 bp, Homo sapiens
ctgagctgcgaggaaaatggcggcgggagccttatgccagcctggaccatcttggaggcagtgtaggatcatggaagaactttgaatta

SEQ ID NO: 385970 - DNA, 100 bp, Homo sapiens
tgtagccgcccaccggtttttctgccacttttgcaagggcgaggtcagccccaaactaccgcagtcccagctatctgacttcatgtgaaagatggctaat

SEQ ID NO: 385971 - DNA, 100 bp, Homo sapiens
gctgggggcccacacgccatggagcccgactcccttctggaccaagacgactcctacgaaagttcaggagccctggaaaggagaaggaataagacggcag

SEQ ID NO: 385972 - DNA, 75 bp, Homo sapiens
tgggaacaacctcaaaaccaaaaccagacacagcacaagcagcggccacagggattaatgaaaatcaagttccat

SEQ ID NO: 385973 - DNA, 90 bp, Homo sapiens
tgctgctaaaaacaagactggggctgctcccatcattgatgtggtgcgatcggactccccctttggcttgagttttgtacggtttcatag

SEQ ID NO: 385974 - DNA, 100 bp, Homo sapiens
gggacaaatgacattcttcggctgtttgtggctctgcagggctgtatggcctcagcaatctggcccctcgaaccctagccctgagggagcgcctcaaatc

SEQ ID NO: 385975 - DNA, 90 bp, Homo sapiens
cgggccgtgaacgaaagcagtgacggaggagcttgtaccaccgctagtgtcagcagtgggatacctgcgcttgaaggacatcatccaccg

SEQ ID NO: 385976 - DNA, 100 bp, Homo sapiens
gagaactttgcacttgtggctacactagttgatcatggccttgccaggttggtgacagtatattgtgagcatggtcataaagctgccaaaatcaaccccc

SEQ ID NO: 385977 - DNA, 75 bp, Homo sapiens
cccaagccctggtgccaggtgtccatccccgtgctgagtgagggagataaatctgcaggacatcaaggaagattt

SEQ ID NO: 385978 - DNA, 98 bp, Homo sapiens
caaaattacagttagaacttcaaaaaattgaatgggagaaagagctgtacgatttgagtctcctgggctacctgaccaagtacgactgctccagtgcg

SEQ ID NO: 385979 - DNA, 101 bp, Homo sapiens
aggtggccagcagggagcagctcttgtacctgtatgccaggtacaaacaggtggtccagtgcttgctggggatggagaaggaacatgaagtagaagtcaat

SEQ ID NO: 385980 - DNA, 50 bp, Homo sapiens
tgggaccttcagccgtgaactgctcttggagtttgacaaggagttgtctg

SEQ ID NO: 385981 - DNA, 82 bp, Homo sapiens
gagagcgccgaggacgacgagcgcagctgtcggggccgcgagtcggacgaaggagactgagtgccctttgcggcttgctgtc

SEQ ID NO: 385982 - DNA, 94 bp, Homo sapiens
ctctctagaaactcgctctaaagacggaaccgccacagcactcaaaccgcgctgagcacgttcttccaagaaaccaacattcccaacagccacc

SEQ ID NO: 385983 - DNA, 100 bp, Homo sapiens
cagcaatggagccaactggcccaacccaagagcgctacaaggatggggtggtgaccatcggctgtgtggtgagacggtttaagcggaagcatcttactgc

SEQ ID NO: 385984 - DNA, 98 bp, Homo sapiens
atgtcgacctgacgctctacacgcccttgaaggtagtggacccagatcatcccctcgcagcacttgttcgtaaggcacaggctgacagttccactccc

SEQ ID NO: 385985 - DNA, 83 bp, Homo sapiens
attcagccagcacactcctcgcgagcaagcaaaatgatgcttcaacacccaggccaggtctctgcctcggaagtgagtgcttc

SEQ ID NO: 385986 - DNA, 75 bp, Homo sapiens
gactccttcggcagtccacccaccgccgccgcctcccagatgagatccgaaatggcccataccgacagctcttcc

SEQ ID NO: 385987 - DNA, 98 bp, Homo sapiens
acacgtattgtctcaagattaaaggggacattctggagaaggtcagcgtgcattgccctgtgtttgactacgttcccccagagctcattaccctcttt

SEQ ID NO: 385988 - DNA, 99 bp, Homo sapiens
cctctgctgctaccatggggatcttagagaagatctcggagatcgagaaggagatcgctcggacacagaagaacaaggcttggttctacagccattggg

SEQ ID NO: 385989 - DNA, 149 bp, Homo sapiens
ttgttggggagaagaggattggaggtgtcagtgttaaaggaacctctacaacgaaggtgaagccacggaagataaggccgagacgcatccagagctttcgtgaccggggactgttctgaagcaggcctcgtggatgacgtatccgacct

SEQ ID NO: 385990 - DNA, 101 bp, Homo sapiens
gaatgagaagactttgggacatttcatgagtcattcaagcaacatttctaagcctctacggcagacacatgcaggccaacccagaaccaccgaagaagaat

SEQ ID NO: 385991 - DNA, 100 bp, Homo sapiens
caggttcctagatagaacagaagagcttgcgattccttatggcagaaagtatgacaaggcatggctcctgagcatgattcagagcaagtgcagtgtgccc

SEQ ID NO: 385992 - DNA, 97 bp, Homo sapiens
gaacaccccgagcgaggccaaccttcaggaggaggagccttgcctccccgattgaaagagatgaaaagccaggaatcggctgcaggttccaaactag

SEQ ID NO: 385993 - DNA, 90 bp, Homo sapiens
ctgtggcctcggttccctggagaagccacagcttctgcaaagacaggaggagtgggccctttgtggagttgtaagacgttcatcgccgtg

SEQ ID NO: 385994 - DNA, 101 bp, Homo sapiens
gagctgagatcctacaggagtccagggctggagagaaaacctctgcgaggaaagggaaggagcaagccgtggtttaaacttacacgaatcgctttctggag

SEQ ID NO: 385995 - DNA, 95 bp, Homo sapiens
accattgctgaacggagaggtagccatgatgccccacttggtgaatggagatgcagctcagcaggacacattcagctaacgtattttagcaggtg

SEQ ID NO: 385996 - DNA, 82 bp, Homo sapiens
caaaggctgaggcagctggaaaaattgatcagggaccatgaaaagaaacttgtgcttcaccgaagaaaaatatctaaacatc

SEQ ID NO: 385997 - DNA, 98 bp, Homo sapiens
ggcatcggctgacactgctgcctccagctagttatttcgtcctcttccgttcttcacccctacaccttggaataacgaaggaggcccaacttcattca

SEQ ID NO: 385998 - DNA, 50 bp, Homo sapiens
tggcccaggaccaggaggagatgaagctgcagcatatcgtgagtgatgag

SEQ ID NO: 385999 - DNA, 101 bp, Homo sapiens
ccaacatgaagcttcttcatgttttcctgttatttctgtgcttccacttaaggttttgcaaggaacttagtgatttggcccgtgaccctccagcacaatgt

SEQ ID NO: 386000 - DNA, 75 bp, Homo sapiens
cgtggtgggaagggcgcgtcgcctcggacgtccactgcaccctgcgcgagaagggacaagaatccttcaagaaac

SEQ ID NO: 386001 - DNA, 100 bp, Homo sapiens
caaccacctgctgacagaggaggaggactatcaggtatcgaaggatgatcgcagtgatgtggagagcagctcagaggaagaagatgtgaccacctgcaca

SEQ ID NO: 386002 - DNA, 100 bp, Homo sapiens
ctattggaaagatctggcgatgacctacaaacagaggaggaattcatggatgctgtttgtgatggtgtaggcttaggaatgaagattttattagattctg

SEQ ID NO: 386003 - DNA, 75 bp, Homo sapiens
tgaagatggcacatggcccaggcagaccttgcagtcaaacatggcacattacacttctgtggatttaaagtcctt

SEQ ID NO: 386004 - DNA, 50 bp, Homo sapiens
tggagatgaagcctaagaatatgatcagctgaagttcatgcccttgaggc

SEQ ID NO: 386005 - DNA, 100 bp, Homo sapiens
atttgtttcacagtatgggatgttggtggtcaagatagaattaggcctctctggaagcattacttccagaatacccagccaccaccaaagatccctgaca

SEQ ID NO: 386006 - DNA, 100 bp, Homo sapiens
gggaaggcgggagacgagaagcctgaaaagtcgcagcgagctggagccgccggagaacatggtttcattggatattcacccgaactgctacagaacaaca

SEQ ID NO: 386007 - DNA, 75 bp, Homo sapiens
aggtgctatgctgtgggccccgctcagatgtccagctcgccgctgtccaagaaacgtcgcgtgtccgggcctgat

SEQ ID NO: 386008 - DNA, 77 bp, Homo sapiens
caagtatactttgggatttgttgtgatttgtgcactgcttcttttagttggtgttctagaacagatcagacattttg

SEQ ID NO: 386009 - DNA, 100 bp, Homo sapiens
ctgagctggtggatgctcttcagttcgtgtgtggagacaggggcttttatttcaatagaatgagtccatttaagtcccaggacggtggaaactagctagt

SEQ ID NO: 386010 - DNA, 100 bp, Homo sapiens
tgtactgaataccgcagaccattgtaattcatggaaattgacaatggcccttcagctatgctaggtctataatgggaagtgtcacagttcggtatttctg

SEQ ID NO: 386011 - DNA, 127 bp, Homo sapiens
cagaaaaggaagtaatccctagtgtcagcagattcagcggtactggtgtataatagattctgacaatggagatattaattatgattatgttcatgaattgtcattggaaatgaagcgtcagaagata

SEQ ID NO: 386012 - DNA, 82 bp, Homo sapiens
acagaagagtgagagatggaacccgaagaagaaaggattcgttacagccagagattgatttctagactactgaaaagaagtt

SEQ ID NO: 386013 - DNA, 83 bp, Homo sapiens
gagtcagtcattttactgtcaagacatttcttcggcattctgcaacaggctactgcagcactggggtgtcagttgttggtccg

SEQ ID NO: 386014 - DNA, 83 bp, Homo sapiens
ctcaacagcagctgtgaggcccagatgttcacagttgactcacaggtcagcccaaggctgccccctcggtcactctgttcccg

SEQ ID NO: 386015 - DNA, 100 bp, Homo sapiens
gtccgtatagtgtagtgtgcaagtattttcagcgagggtactgtatttatggagaccgctgcagagaatagtgacagtggtacaggaaagaaagaaaaag

SEQ ID NO: 386016 - DNA, 75 bp, Homo sapiens
ctcagtcccatcactccaaggagagaagatatatctacataatgggaatacaagaaagaaatgagaaattgtttt

SEQ ID NO: 386017 - DNA, 73 bp, Homo sapiens
tccgagccagccgctgttttgccggaggagcccctcaggccgtttgatgtgtgaataattacattgactgaga

SEQ ID NO: 386018 - DNA, 122 bp, Homo sapiens
cttcataccagctgaagagcgacaagccgctggcagccgcggatctcaccgccgctcagggctgtctgtccccagaccccagagcacgtccggcaccaccatgactgggctgttgaagagga

SEQ ID NO: 386019 - DNA, 75 bp, Homo sapiens
cagccctcggccaaacggccagacgccgacgtcgaccagcagagactgggatcagagaaggctgaagaaggtgga

SEQ ID NO: 386020 - DNA, 100 bp, Homo sapiens
tccgaaggcatcaagtatcggaagaatgaggtgttcttggacgtcatcgagtctgtcaacctcttggttgggcccgaaggcatcctgcagaacggggctg

SEQ ID NO: 386021 - DNA, 97 bp, Homo sapiens
tgtgagcctagggacccatttctcctcctttgacagggacatcagtggagccttctcagacccacaggacagtactgcttttaaagagacagtgtta

SEQ ID NO: 386022 - DNA, 82 bp, Homo sapiens
cagacctgccaatttaccagagataattgataacaccctgtaacagctgatgcttttgcatctcttccaaagcacaaacctg

SEQ ID NO: 386023 - DNA, 100 bp, Homo sapiens
cgtggaccctggaggagacctggccactgtcaacagtcagctcaagaagctgcagccatcgacgagtacaagccccaggatgctaccaccaacccgtccc

SEQ ID NO: 386024 - DNA, 100 bp, Homo sapiens
tgccaccaaagatcggaactccaacaagaccctgccctctaccacctgagtgcctggaagagctgggatgtctggttgagtcctatggcatgaatgtttg

SEQ ID NO: 386025 - DNA, 51 bp, Homo sapiens
gcgggggaacagctagcggcaagacatgaagagtatttctggagaagaatc

SEQ ID NO: 386026 - DNA, 98 bp, Homo sapiens
ggctacccagcctacatctcgaatacaggagtttccagaaaatataaaaaattgtaaagttttgacaattgtggaggccagtgtaaaccctatttcca

SEQ ID NO: 386027 - DNA, 100 bp, Homo sapiens
ccagagctgaggactgcctgtttgcaggttttaatataactgcaggagttgatgaagaaacaggatttgtttatggaggaaatcgtttcaattgtggcac

SEQ ID NO: 386028 - DNA, 49 bp, Homo sapiens
tttgtgcagattgccagtctaaagatcatgagcgtcttgttgttcatcg

SEQ ID NO: 386029 - DNA, 90 bp, Homo sapiens
aagaagaaccacaaggccatgaacgcccgggtggggaacgccaagcacaacgtgcatgtcatgaacatctccacaggcaagaaagtgaag

SEQ ID NO: 386030 - DNA, 75 bp, Homo sapiens
ctgaagtggagcttctggcatttacatcagttctccaaaatacttatcattcaggttgaataaaccagttctaca

SEQ ID NO: 386031 - DNA, 90 bp, Homo sapiens
tgaaggaaagagctcaaagatttggtttgaatgtctcttcaatctccagaaagacaaaactgtgtggagttttatcctatattcataatt

SEQ ID NO: 386032 - DNA, 82 bp, Homo sapiens
cgcaaccaccgccctggccatctaccatgtgatgacggtccttcgctacccaccaaacagaacgaggaattccgccccttca

SEQ ID NO: 386033 - DNA, 75 bp, Homo sapiens
caatgctccctctccttatatggcgcatattaaatttcctattgactacccctattcaccacctaccttcagatt

SEQ ID NO: 386034 - DNA, 108 bp, Homo sapiens
tggggactggcggctgcaactgcctgccgcgccgagggaccgccgggcggcggaaagcaggtcatattgaacattccagatacctatcattactcgatgctgttgata

SEQ ID NO: 386035 - DNA, 100 bp, Homo sapiens
gctgcccgcacaaaatgtcggcccggacgccattgccgacggtgaacgagcgggacacggaaaatgtaacacaagtggcaagacagccgggaacccctac

SEQ ID NO: 386036 - DNA, 74 bp, Homo sapiens
catcgttacagccggcgaagaagaagcagggaacagagttcagaggcagcagaaactggagttagtgaaaatga

SEQ ID NO: 386037 - DNA, 100 bp, Homo sapiens
cagaaaatcaacctatcctccttcaggaccaacgagtgaaagctggacattgaagaagccaaaatctgtttccaagaaactaaagagtgtattccgagta

SEQ ID NO: 386038 - DNA, 98 bp, Homo sapiens
ttgccaaatacgcacaataccaggcttcctccttccaggaatcattgagacaatgcatgagagctggaagtggaagagcttacaagatcatcatcgct

SEQ ID NO: 386039 - DNA, 100 bp, Homo sapiens
tgtggagcacggatgccattagcaaggatgtttttaataagtgaaggagaacgacctgctcagaatgagaagaggaaggagaaaaacataaaaagaggag

SEQ ID NO: 386040 - DNA, 100 bp, Homo sapiens
gccagaggaggagcagctttacactgatgaagtgttagacatcgagatcaatgaacctttagatgaatttacagctttggaatcaggatgatgctggcct

SEQ ID NO: 386041 - DNA, 80 bp, Homo sapiens
ctcagttggaagcagccgatccagcctgcggagcctgtggggcaggttcaaattcagctgttagcatggaactttcagaa

SEQ ID NO: 386042 - DNA, 87 bp, Homo sapiens
caaagaaacactctccttctgccacatttgttttgagctaaatattgaggtatcaccttttgccatgatagcatttctttcattgga

SEQ ID NO: 386043 - DNA, 82 bp, Homo sapiens
tgcagtttgcaatatgactttggaggaattctcggctggagagcagaagaccgaaaggatccctccccgcggcggcgatggc

SEQ ID NO: 386044 - DNA, 100 bp, Homo sapiens
tgactggtgacatctccagcaacatccagatatattgggttgggcccatcataggagctgtcctcgctggtggcctttatgagtatgtcttctgtccaga

SEQ ID NO: 386045 - DNA, 100 bp, Homo sapiens
agagtcaacagcagtggcaacagcttgctgcccttgaatttcctccaaagaaactatttggaaataaggatgaacgtgtgattgctgagagacgaagtca

SEQ ID NO: 386046 - DNA, 113 bp, Homo sapiens
gcaccatgccgctcctaagcctgcacagccgcggcggcagcagcagtgagaggagcaggccgggctctcgccatgggtcactgtcgcctctgccacgggaagttttcctcgag

SEQ ID NO: 386047 - DNA, 74 bp, Homo sapiens
gctgaaggaggaggacaaagagcccctcatcgagctcttcgtcaagagacctgtcggccatggagcctaatgat

SEQ ID NO: 386048 - DNA, 100 bp, Homo sapiens
ggcggcgggaacgattgggctgagcagaggacgacatgttgcttttcgtggaggcgtgcaatggaattgagttttgccctggtaaatgggaataatatcc

SEQ ID NO: 386049 - DNA, 75 bp, Homo sapiens
cgccatccccatttctatggtcctcctcacctatggccgctggcaggaacagattatggcctttgcaagcaaatg

SEQ ID NO: 386050 - DNA, 60 bp, Homo sapiens
ctgggagacaaacacctgacaggaaggcctgagatgtgtcagaagaattggatacaaaac

SEQ ID NO: 386051 - DNA, 98 bp, Homo sapiens
ctcggactgtggcggcttcggcggctcaggttgtggtagaggcggaggctcaggcagcttgagtttcatgatcaacatgggagactcccacgtggaca

SEQ ID NO: 386052 - DNA, 101 bp, Homo sapiens
aaatctaaagcatgaacaggcatctaatgttcttagtgacattagtattcgaatgcaggctcaaggaagcttgttccaagggagcatgattggaagcttta

SEQ ID NO: 386053 - DNA, 75 bp, Homo sapiens
cactgctacaggactctactatggagaaaaggcgacggcggattgacagaagtatgattggagagcccacaaact

SEQ ID NO: 386054 - DNA, 100 bp, Homo sapiens
ggacagttagtcacccacctacatgttgaggtaattgaggtgaaagccaaaagaagaactggaccacttaactttgtgacttgtatgagagagaccctgg

SEQ ID NO: 386055 - DNA, 100 bp, Homo sapiens
gacagatgaggagtttgatgctcgctgggtaacatacttcaacaagccagatatagatgcctgggaattgcgtaaaggctggagtgcaatggcgcgatct

SEQ ID NO: 386056 - DNA, 90 bp, Homo sapiens
gatctcttcctgctgactgactctgagaaaggtgtggttcctcagagtgcaccaccagtgccaacagcctcttcccggttccatttccca

SEQ ID NO: 386057 - DNA, 75 bp, Homo sapiens
ctggaaacaatggcatttacagaaagagtcaacagcagtggcaacagggagtgcatccgccccaacccttttccc

SEQ ID NO: 386058 - DNA, 87 bp, Homo sapiens
gtgacaagaaaagctgtggcaaccgaaatgagactccctcagatccagtgataattgacaggtgggagacctccacagaacccttcc

SEQ ID NO: 386059 - DNA, 138 bp, Homo sapiens
gctgcgagcatggggccctggggctggaaattgcgctggaccgtcgccttgctcctcgccgcggcggggactgcagatctctttcccagggccatggcgaacccgaagctgctgggaatggggctaagcgaggcggag

SEQ ID NO: 386060 - DNA, 83 bp, Homo sapiens
cggagcgcggcacggagacggcggcagcgctggactaggtggcaggtctcggcgcggaagatggccggcggcgtggacggccc

SEQ ID NO: 386061 - DNA, 117 bp, Homo sapiens
gtccaagcggcaccggttggacctaggggaggattacccctctggcaagaagcgtgcggggaccgatggaatgttgtaccatctttgggtaggcagacttccctgacgacatcagtg

SEQ ID NO: 386062 - DNA, 100 bp, Homo sapiens
gcgaggcctttcaccaagtccatggtcgagtttgagtggctgaggcagttttggtttcaaggcaatcgatacagaaagtgcactgactggtggtgtcaac

SEQ ID NO: 386063 - DNA, 74 bp, Homo sapiens
cagcaagcggaaatgggagcagcaatggatgcgcttgaaaaatgtctccatcatcaccagttccagtagtgaaa

SEQ ID NO: 386064 - DNA, 90 bp, Homo sapiens
ggcagggccggttcgtgcggaaccgccatggccgagccggcttcggatatcccagaagctcctgagagactgatgacagacaccattaat

SEQ ID NO: 386065 - DNA, 100 bp, Homo sapiens
caaactgccactgggaaggctgcgcgagggagttcgacacccaagagcagcttgtgcacagtggttcagatttactttcccggagtagtcacaggactgg

SEQ ID NO: 386066 - DNA, 98 bp, Homo sapiens
gtgtcacggggagtgtcgcagccctgaagttgcctcttctggtgtcaaagcttttggacattcctgggtggtctcacgtgtgaaacatggctacagat

SEQ ID NO: 386067 - DNA, 95 bp, Homo sapiens
caggctcctcggcctcttctgtgtcttcactttctgggagtgacgttgcgtggtgaccaagatgaagatgcagaggaccattgtcatccgccgag

SEQ ID NO: 386068 - DNA, 82 bp, Homo sapiens
tcgtggtgtggtgtatggccgtgggcatctcctacattagcgtctacgaccaccaagagacaaggtcttgctgtgttgccca

SEQ ID NO: 386069 - DNA, 74 bp, Homo sapiens
gttactgggataccacctcatgttgttaaagtaccagcttcacaggaaatctaccactgtcgaagacaaataaa

SEQ ID NO: 386070 - DNA, 100 bp, Homo sapiens
cgtggctattgtgaaggagggttggctgcacaaacgaggtggagccgccaccaaaatgcagattttcgtgaaaacccttacggggaagaccatcaccctc

SEQ ID NO: 386071 - DNA, 75 bp, Homo sapiens
tttcttggcctgatgctgaactctcgaggcatctactgccgaggatgttccaagccgctgtgctgctcgtgcgcg

SEQ ID NO: 386072 - DNA, 98 bp, Homo sapiens
attgatgaattgcaagtttgtgccccatagctgcacagaaatgctgagccgattatcaggattagcaaatgttgttttgcatgaattatcaggagatg

SEQ ID NO: 386073 - DNA, 74 bp, Homo sapiens
cgctgcccagggaccgatgttgcgcgaggaaaatgcgggacgcccaggcctttgccctttttgtcaaaaccaaa

SEQ ID NO: 386074 - DNA, 135 bp, Homo sapiens
gagagctctaatattactgatgggagaatcacacctgagccagcagtcagtaatacagaagtgcctgaaacagtacatgcagctggcaatccgagaaggatgtgggtctcccatcacttgccctgacatggtgtg

SEQ ID NO: 386075 - DNA, 74 bp, Homo sapiens
agaccccgcggctgggcgttcatctaccacgctttcgtgatgtacagttacccagcacgtgtacctcctcctcc

SEQ ID NO: 386076 - DNA, 74 bp, Homo sapiens
tctctcttcatcttcacttgaaataccggatgattttggagataccatgctgtgaagtccaggccacatggagg

SEQ ID NO: 386077 - DNA, 88 bp, Homo sapiens
gaaacctatcgattacacagttctggatgatgtgggccatggtgtcaaggttccaatcgttgcacttactgctactgcaagttcttca

SEQ ID NO: 386078 - DNA, 75 bp, Homo sapiens
tgaaaaattacagcaatattatatttttattccctctaaattcaaggttgctgctaaatgggaaaaacttagctt

SEQ ID NO: 386079 - DNA, 100 bp, Homo sapiens
ccaggggagagcttcatcaccccctacctcctggggcccgacaagaacttcacgcgggagcagacagccctcagcgcctttttccaggagaccaacatcc

SEQ ID NO: 386080 - DNA, 97 bp, Homo sapiens
gagccgccccgaagagagcaggatgagactccagcccttccccgcgcacgtgagagaacgccgagccgtcgccgcagcctccgccgccgagaagccc

SEQ ID NO: 386081 - DNA, 100 bp, Homo sapiens
gttgtcggctccgtgttgtgatgacaggagaatgtgtgtgtgtcccgggcccagacgaattggtggagattctggacgcaaagacaagggagaagctgtg

SEQ ID NO: 386082 - DNA, 100 bp, Homo sapiens
cttcacactgcagaactgggttctggactttgggcgtcccattgccatggaaagaccacagcaagattctttcattcgtctcctcctagcctgggggacc

SEQ ID NO: 386083 - DNA, 98 bp, Homo sapiens
cggaatttatataggaatgtgatgttagagaactacagaaacctggtcttccttggtcctggacccaagccagaagcctctgcaaagcttccttccag

SEQ ID NO: 386084 - DNA, 50 bp, Homo sapiens
ccgagaccgcggccgggaccgaggcggagcgtgctttggacaccatgaat

SEQ ID NO: 386085 - DNA, 100 bp, Homo sapiens
atgtccggctgagtgggaagaccaagacagtgcctggataccttcgaatagggatgacccatctgcaatggattttgtcacctctgctgcaaacctcagg

SEQ ID NO: 386086 - DNA, 100 bp, Homo sapiens
cactggctccctgcactgtgtgtgctgcacagaggatgacctgtggaacacccccaggggcctcctgttccgagactgaatgtggcgggccaaactgcag

SEQ ID NO: 386087 - DNA, 104 bp, Homo sapiens
ccactgggttcttcaaaggataaactacctacatagaggacatacctttggttaaaggagctgccgtcaggaattaaggataacctagacgacataaagaggat

SEQ ID NO: 386088 - DNA, 49 bp, Homo sapiens
atgacaaaatgtggccacagcttttggccaagctataacatcagaaatg

SEQ ID NO: 386089 - DNA, 51 bp, Homo sapiens
ctcaagagtgaaatccagaaggagattggctctaccagtgcacctggacag

SEQ ID NO: 386090 - DNA, 78 bp, Homo sapiens
acgcggcggcggcgttgacaatgacttaattcagtgcacaaatgagatgaatgtgaacatcccacagttggcagacag

SEQ ID NO: 386091 - DNA, 90 bp, Homo sapiens
gagcacgtcatcgccatcgaagggtaaaaggacaaacttgcgtaaaactggctcagagcgtatcgctcatggaatgagggtgaaattcaa

SEQ ID NO: 386092 - DNA, 100 bp, Homo sapiens
ggagaaactggaaaagaccctcttcagacttgaacaagaaaaggtgtgagcggtactgggcccaggagcaggagccactgcagactgggcttttctgcat

SEQ ID NO: 386093 - DNA, 87 bp, Homo sapiens
tgatttgattcttctgtttcgtgaactgcgagtggaacaggaatctctgttgacagaagcatcaagtgtacctgatttgtgaaccta

SEQ ID NO: 386094 - DNA, 100 bp, Homo sapiens
cttgggtccagtctaatgcacgcctgctttataaaaatggaagaccagattatatcattgtaactcagagaccactaacattacatgcagcaaactggag

SEQ ID NO: 386095 - DNA, 83 bp, Homo sapiens
accgagacggcgatccgggcgctcgagacttaccagagccacaaggagtggagtcaacatatcaatggagcaagtcacagtcg

SEQ ID NO: 386096 - DNA, 75 bp, Homo sapiens
tgttaaggattccaagtaactcttatttggacagcaaggcctatgtgaccattctctaaaatatttaagctcgag

SEQ ID NO: 386097 - DNA, 100 bp, Homo sapiens
cttttatcaccatcatggtttcgtagccatgtttaaatttttgtcttttcgtgttcgctctatacaggtgctggagaatctggtaaaagcaccattgtga

SEQ ID NO: 386098 - DNA, 58 bp, Homo sapiens
actggcaagattactgatttcatcaagttcgacactgatttcttccagggcaagcact

SEQ ID NO: 386099 - DNA, 82 bp, Homo sapiens
gggtgtccaagttccggcacaccgaggctcggccgccccgccgcgaggcttgggcactgtttaaaggaaagttccgagaagg

SEQ ID NO: 386100 - DNA, 90 bp, Homo sapiens
ggaacccgtgggcctgtggactgcagcctcggcggtcagcaggattatgaagaagctgtgctcttgctgttagaaggagctgcctgggaa

SEQ ID NO: 386101 - DNA, 96 bp, Homo sapiens
gtgagccgccccgcgcccccgccgcgccctcaggtgatcgaggagttctacaaccagacatgggtccaccgctatggggagagcatcctgcccacc

SEQ ID NO: 386102 - DNA, 86 bp, Homo sapiens
ggaacatgttttacgcctctactcagaaaatgaccgactgagaatcaggtcgggcccctcggggccgcgtggccaatcagatcccc

SEQ ID NO: 386103 - DNA, 98 bp, Homo sapiens
tagcggattccagggaagttatacgtaatgatttccatgccattgcagtgtcaactaggcctcagttacttttcagtttgcccaaattgagcccatct

SEQ ID NO: 386104 - DNA, 75 bp, Homo sapiens
caaaatcagaggcatactttataggtaccaaaaactgtggaagagttatgtgaaacttcgccacctcctagcaaa

SEQ ID NO: 386105 - DNA, 83 bp, Homo sapiens
cagaagccatgcccctcaggctggaacttgccctgtctcctcgcagatgagtggtcatatgcattagaaaaacccaacactgg

SEQ ID NO: 386106 - DNA, 97 bp, Homo sapiens
taaatgccatgcgtatctttaagaaattttatcttttgaaacacgttctgattaaccaagggagaggttcacctgccccagcctcgccttgcacccg

SEQ ID NO: 386107 - DNA, 80 bp, Homo sapiens
gggaaatggactgctatctccgtcgcctcaaacaggagctgctactgtgtgaagacattcacaggacacagagaatgggt

SEQ ID NO: 386108 - DNA, 100 bp, Homo sapiens
accaaactagaaaaggaggaagaggaagatgatggagatttgcctgtggcagccttaagtgccttgaaacaattttctgaacaaggactggatccaatcg

SEQ ID NO: 386109 - DNA, 88 bp, Homo sapiens
cctgggtgtcatttggggagttttgccattacgagggttcttgggaatagcaggctcagtaaacgctctgccactgacctgtgtggca

SEQ ID NO: 386110 - DNA, 101 bp, Homo sapiens
cggagatcggagtcagctaccagtacgcccttgacctccagacgcagcacaatcactttgccatgaactccatgctcattgctatggacagtgctatcacc

SEQ ID NO: 386111 - DNA, 100 bp, Homo sapiens
gccctgcgccccgctctgctgtgggcgctgctggcgctctggctgtgctgcgcgacccccgcgcatgataagccaatggacacgtcagtgttatctgaag

SEQ ID NO: 386112 - DNA, 75 bp, Homo sapiens
caactgtccacgtaggcattcaccccagcaagttgacatgaagacaatggagactgcagagaaactggctagatt

SEQ ID NO: 386113 - DNA, 98 bp, Homo sapiens
gggtgtttgtccagcgactccggggcctgatgaatgacatcgtggactgtggccaggctcccctggaccctgtctacctgccggcagccctggagctc

SEQ ID NO: 386114 - DNA, 83 bp, Homo sapiens
gtgcagaagatctgggtgcccgtggaccacaggccctcgttgcccagatgtgctggttgccgaggagaacgtggacttccgca

SEQ ID NO: 386115 - DNA, 100 bp, Homo sapiens
ttgaagaaatgaaaggtgacaaaaggcagaaggagggagaccccaaaaagaggtgccgtgagcgatgtggagatgcaggaacactatgatgagttttttg

SEQ ID NO: 386116 - DNA, 90 bp, Homo sapiens
gtcatcctagaaggcattgtggaaacaactgataagccaatggacacgtcagtgttatctgaagaaggaggagagccttttcagaagaaa

SEQ ID NO: 386117 - DNA, 90 bp, Homo sapiens
atcactgaaaatacttctcagtaccagggcgtggtggtgtactccatggcagacatccctttggggcctttatcatctgctggactcctg

SEQ ID NO: 386118 - DNA, 98 bp, Homo sapiens
acaaggaatgcaagggccacctgttcctcagttccaaccacagctcctgggcaacgtgctggtctgtgtgctggcccatcactttggcaaagaattca

SEQ ID NO: 386119 - DNA, 51 bp, Homo sapiens
ctccctccggaggcagcacctcaggaaaggcttcagggatgacttcttagg

SEQ ID NO: 386120 - DNA, 100 bp, Homo sapiens
gcatgaccagctccggcacgggggcctctcgtccgatgctcaggagagcttggaagttccacagaggacgtcccccacaggcccaaaaaacatgcagacc

SEQ ID NO: 386121 - DNA, 100 bp, Homo sapiens
tgtgtcttgatctttggcgtccccagcagagttcccaagctggaaaacctcatgctggacaaagatggccacatcaagatcactgactttggcctctgca

SEQ ID NO: 386122 - DNA, 83 bp, Homo sapiens
aggacagacaggtgctgtctctagcatcacctctcagcacgattttcccgagagttcacagcctggtggagttgacagaagag

SEQ ID NO: 386123 - DNA, 100 bp, Homo sapiens
tggaactgctccacactcgactccttgcccgtcttcggcaaggtggtgacgcaaggacaaccgcatccagggtggctacgagaacgtgccgactattgac

SEQ ID NO: 386124 - DNA, 100 bp, Homo sapiens
gagaaggaagaggtgtttgaaaaggaaaaccagtagattcccagacatcgcgaagtgaatctgaaattgtgccaaaagttgctaaaatgactgtatctgg

SEQ ID NO: 386125 - DNA, 50 bp, Homo sapiens
cagggtttccaccgttcgttcaagaactgtagtgaaatgtagtattgcca

SEQ ID NO: 386126 - DNA, 88 bp, Homo sapiens
cgcgtgcggaggaccaggcgcggcgcggctgcggctgagtccaagtggtaagaagttcagaagcaagcctcagttggcaaggtacctg

SEQ ID NO: 386127 - DNA, 51 bp, Homo sapiens
cggaggtctgttttgatgattctgggagctatgaaacccacgtagtcgaac

SEQ ID NO: 386128 - DNA, 90 bp, Homo sapiens
ggaagagtcaggggcacagagagatggagagagacctagttagaggcgttggggctgaacctctgctcccatggaaccggatgctgcaaa

SEQ ID NO: 386129 - DNA, 100 bp, Homo sapiens
cgcgggatgcaccgtggtagccgagggcggaggcgacactctcagggacttgtacagcaaaagcacagcagccatgagcacttacacaggcatttttact

SEQ ID NO: 386130 - DNA, 76 bp, Homo sapiens
ctccgcaccgcggcttaaatgatgtattttgtgatcgcagcgatgaaagaaatgcactcggtgatggaaagagagc

SEQ ID NO: 386131 - DNA, 100 bp, Homo sapiens
attttaaagttatgggactacaacagcagccacaggaaccttgagaacctgtgaaatttgtagatttgcttggtgaccatgggaaacatgtcagtcctct

SEQ ID NO: 386132 - DNA, 85 bp, Homo sapiens
tgttgtctcagggagcacagaaggctcattgtcatccccaagccaggccagttctccaggtggaactgtagtgtagcgacctcac

SEQ ID NO: 386133 - DNA, 83 bp, Homo sapiens
caccagctccgaaatcaccaccaagcgccgtgccgtccctgcagtgacaccgaggtgctcctagccgtctgcaccagcgactt

SEQ ID NO: 386134 - DNA, 100 bp, Homo sapiens
cgcggcggccactgggcgcagcacccagtaaaatgtttattggaggcttgagctgggatacaagcaaaaaagatctgacagagtacttgtctcgatttgg

SEQ ID NO: 386135 - DNA, 75 bp, Homo sapiens
caccgaccctgagaacttacctgagatttcgtcacaggcaaggatatcctgaaggatactatagttccaaaagtg

SEQ ID NO: 386136 - DNA, 100 bp, Homo sapiens
gacggagtcggcgagcccccgcggcgacaggagatacaactcgtcaacgaatcaaattcagtgatgacagagtatgcaagagtcaccttctcaactgttg

SEQ ID NO: 386137 - DNA, 127 bp, Homo sapiens
gaagatcggcttgaaattaccaactgctttcctttccctcagcacacagaggatgatgctgactttgatgaagaattcctggaaaactcaagcaattcgtatttgacttacattctggaaaactgca

SEQ ID NO: 386138 - DNA, 75 bp, Homo sapiens
aactgttctagtgttgtggaggttggccttctccacagtaggcactcctgactacattgctcctgaggtgttcat

SEQ ID NO: 386139 - DNA, 50 bp, Homo sapiens
cttctgcctgcggagcagctaccgctcagttaccggtattgtaagaacaa

SEQ ID NO: 386140 - DNA, 98 bp, Homo sapiens
acgggacagagcggtcggtgacagcctcaagggcttcagcaccgcgcccatggcagagccagacccattccaaaatatgcccggtgctatccgcccag

SEQ ID NO: 386141 - DNA, 75 bp, Homo sapiens
tctctttgacagtggtctccacccagctgttaaactaggtggaaaatttgcagccagaaataaaaactattgcca

SEQ ID NO: 386142 - DNA, 100 bp, Homo sapiens
ctatttgtaaaggccagcagcttgtgatgatgccaaacaagagcccagaacgcttcctccagcttggcgccaaggtcccaaagggcgcactgctgctcgg

SEQ ID NO: 386143 - DNA, 100 bp, Homo sapiens
gctgtctacaatcctgtattcaaggcgcttctttccatactatgtttacaacatcatcggtggacttgatgaagaagaattgttcaggagacaacttttg

SEQ ID NO: 386144 - DNA, 75 bp, Homo sapiens
ccaacgtgatattccttgaagtagatgtggatgactgtcagaggcgacaggaagaagggtattacagccgcctgg

SEQ ID NO: 386145 - DNA, 90 bp, Homo sapiens
cagatatcttgaaaagctgccagaaagaaatggtggagtcaatgaagaaagtagcagggatggatgtggagctgacagttgaagaaagaa

SEQ ID NO: 386146 - DNA, 100 bp, Homo sapiens
taactcagaagatctcaacaggacagttgaccttttggcaggtttgggagctgagcgaccagaaacaggtggagtattgctcctggaaaatccaaaaggt

SEQ ID NO: 386147 - DNA, 118 bp, Homo sapiens
agcggggacccagaccctggagcctcagttggaagcagccgatccagcctgcggagcctgtggggcagcgggacgaccctgggacagtctccactggggcagatccagctgaccatcc

SEQ ID NO: 386148 - DNA, 95 bp, Homo sapiens
gcgactacgacggcgttgatatcggtggtaacgacggcctcagcaggcggggaagatgaaaggagaacctgtggagtacgtacgcgcacgcgggg

SEQ ID NO: 386149 - DNA, 107 bp, Homo sapiens
ctgggcacagcatgcggaaaatactacagagtgtgcacactggctatcattgatccaggtgaaatgacaatggatgctctgttggctcgattgaaacttctgaatcc

SEQ ID NO: 386150 - DNA, 75 bp, Homo sapiens
aaaagaattcctggagttctttggaggactatttcaaacagcttggattcactccttctccagttgcacagccac

SEQ ID NO: 386151 - DNA, 90 bp, Homo sapiens
cgggatggtgccacaggaggctgtgcgggccccgctccgcttcgaatgggtccccttcccctgagcccatctacaatagcgaggggaagc

SEQ ID NO: 386152 - DNA, 100 bp, Homo sapiens
gcctaggttccaggtgccttttcagttgctgacttctcttatggacatagattcactgatgaccaaatggagatattgggatcatctaaactgagtccag

SEQ ID NO: 386153 - DNA, 75 bp, Homo sapiens
gcaatattcatcataacaactcccgaaactggcgatggaatatgagaggagccctctggaaagaaaaggacagac

SEQ ID NO: 386154 - DNA, 76 bp, Homo sapiens
gtatattcagtctctgtgtaatcatctgaagaaattggtcccaaggccacgcccagatttcttctaccgctgcttc

SEQ ID NO: 386155 - DNA, 51 bp, Homo sapiens
aagaagcctgctgagttcaccacagggggatagtttcatagtaagttctga

SEQ ID NO: 386156 - DNA, 100 bp, Homo sapiens
attactgcttgcagaaaatacctcaggaaaggccaacatcagcagaactattaagggtcataactccatgcaggaagctcatcttgtgtgctgataacag

SEQ ID NO: 386157 - DNA, 100 bp, Homo sapiens
atattctttaccagcttggaacaactcaggatcctggtacaaaagacagctcgagccgtcatgctgtttgctctcatccccgtcacaaccatccgatcag

SEQ ID NO: 386158 - DNA, 100 bp, Homo sapiens
ccttcctcccggcgtggcagatgctccagtgtgctcactgatccgcctccagggccaccgccatgtcgagccgcggtgggaagaagaagtccaccaagac

SEQ ID NO: 386159 - DNA, 75 bp, Homo sapiens
cgaagccttcagtgggactcccccagcagatacattctcagctcttgcagaccaatttgaagataaaactacatc

SEQ ID NO: 386160 - DNA, 83 bp, Homo sapiens
caaggtctccccgattctcatctgcccataatcatggacacagccccaggatgtgcaggaaacgcttcgttaagggactcagg

SEQ ID NO: 386161 - DNA, 51 bp, Homo sapiens
acctacgttggcggccccagaagatcatcacgaagtatgtatatgagctcc

SEQ ID NO: 386162 - DNA, 100 bp, Homo sapiens
gttggaagcagccgatccagcctgcggagcctgtggggcagggccaccactgtacgttacaaagggcggaacctgcggatcaaagcgcccatgtgccggg

SEQ ID NO: 386163 - DNA, 100 bp, Homo sapiens
tacgaactgaagaaggccgcctatgacatcgaggtcaacacccgccgagcacaggctgacctggcctatcagcttcagaaacaaacagtcgttgctgtca

SEQ ID NO: 386164 - DNA, 99 bp, Homo sapiens
tctcccgtacctggcgagtccagctcgtcgcgaacaactggaacgcattgaggaagggatggaccaaatcaataaggacatgaaagaagcagaaaagaa

SEQ ID NO: 386165 - DNA, 98 bp, Homo sapiens
cggccccccaatggacagtctcccattgcccttgcttcaggacagaggaacctacaagcagcaattggcgcctattatgactttgagagcccaaacat

SEQ ID NO: 386166 - DNA, 50 bp, Homo sapiens
aacagtttatagtcacttcagggtcagccaatgttttcagttgcaccaag

SEQ ID NO: 386167 - DNA, 51 bp, Homo sapiens
cgcgaagtccacccagcgtttctgaggtccctgactatggctccccagagc

SEQ ID NO: 386168 - DNA, 83 bp, Homo sapiens
cagagagagcttgggagactgagacaacagaatatactgatgataatgctctgattcctaagaattcttctgtaattgttaga

SEQ ID NO: 386169 - DNA, 75 bp, Homo sapiens
tattacaaatattccaatgaaggcgtttactgaagcatttgaaagggaactaagaagacataaagttcaagagaa

SEQ ID NO: 386170 - DNA, 90 bp, Homo sapiens
tgtgaaactgctttctaaaacaccagaactcaacctgtctattatcctcccagtccacaacgctgaaccgtggctggacgaatgtttgag

SEQ ID NO: 386171 - DNA, 100 bp, Homo sapiens
cagcaggaacaagagaggtcaggtggtggggaccagaggtggctttcgtggttgcacagtttggctaacaggctatgattaaaagtttcatggatgtcta

SEQ ID NO: 386172 - DNA, 73 bp, Homo sapiens
atcgcggccctggacgtgctccaccgacactgcaaaggtacaggtttgcagattccgccagcagcacagcaag

SEQ ID NO: 386173 - DNA, 83 bp, Homo sapiens
atgacagcggcgaggagaacgtcccgctggatctgacccgagggggagctgatcaccttctattactattggaagaagacccc

SEQ ID NO: 386174 - DNA, 83 bp, Homo sapiens
gccaagcagccaaccatgctcaacttcggtgcctctctccagcagactgcggatgatcggctgaatgtaacagaggaactaac

SEQ ID NO: 386175 - DNA, 83 bp, Homo sapiens
agagaaacacccagggatcccggtgacgtcgggaagcagcacccagaccatgcatggaagaggagatggttcgtgttacgcag

SEQ ID NO: 386176 - DNA, 90 bp, Homo sapiens
agaatccccggcgtccagctctgccccgacagagacggaggagccggggtccagtgcagccgcttgatggcattgaaacgaatgggaatt

SEQ ID NO: 386177 - DNA, 75 bp, Homo sapiens
ctggtcttaccacttatcatctccagtcttgtcacaggtggtatcacggaaaacttgacagaacgatagcagaag

SEQ ID NO: 386178 - DNA, 129 bp, Homo sapiens
ccgagcctgggaggccggccggtgccagcacctttcggcttctgagacggcggcagcagcggcattcagctgaaggaatgtatccgagcactggatcaggaacacacccatactcccttcaggcaaagc

SEQ ID NO: 386179 - DNA, 100 bp, Homo sapiens
gcctttgaccttctgccatgattgtgaggcctccccagccacgtgaaacttggatcaatcttcctgtcctacaactgacaaaggatcccctaaagacccc

SEQ ID NO: 386180 - DNA, 80 bp, Homo sapiens
cacccgcagactccttctccagcatgggctcgcctgtcaacgcgcagagtgttctgccagttctggataatccactgtcc

SEQ ID NO: 386181 - DNA, 100 bp, Homo sapiens
ggaattcgctttcctgaaaaaagaagtggtggggaaagacctgctgaaagggtcgctcctcttcacaggatctgggattggcacaagactctgctaccag

SEQ ID NO: 386182 - DNA, 75 bp, Homo sapiens
aagctgctgctgggcatcgccttgctggcctacgtcgccttttttggctttcacccccaaccagtgaccaaagac

SEQ ID NO: 386183 - DNA, 50 bp, Homo sapiens
ctctggagggaagagcgatgggagaggatgtagtaactggagttagtccc

SEQ ID NO: 386184 - DNA, 83 bp, Homo sapiens
ccgtgcttatgcagatagttactattatgaagatggaggatcttaagattgaaagtgatgttcaagaaccaactgaaccagag

SEQ ID NO: 386185 - DNA, 75 bp, Homo sapiens
tcgaacagagccgggagttcaagaagaacactccagaggctcatgctgaagattcggttatggaccatcatttcc

SEQ ID NO: 386186 - DNA, 100 bp, Homo sapiens
tacaaccaggaaagaaattcttcaatttgaataaattggaggattcaagatatgtgtcaacctaagaaaaagtctacgccactgaagtatgaagttggag

SEQ ID NO: 386187 - DNA, 100 bp, Homo sapiens
aacttcaagtgggatcctaaaagtctagagatcaggactctggcagttgagagactgttggagcctcttgttacacagaaaaagcttgtggtgaaggggg

SEQ ID NO: 386188 - DNA, 74 bp, Homo sapiens
gaaggagaatgcagaccctcgacctccagtgcagttcccaaagagttgtggttgtagaagacataaaaagatgg

SEQ ID NO: 386189 - DNA, 127 bp, Homo sapiens
cggcagctacatggaggagaagcacatgccacccccaaacatgaccacgaacgagcgcagagttatcgtgccagcagctcttgtctgctggataacagtcttcctcctccagtgttcaaaaggaact

SEQ ID NO: 386190 - DNA, 75 bp, Homo sapiens
ggccttccagtacacagacgagcatggggaaggttggtgttcgaggaagagacattgttgttcttggtgtggaga

SEQ ID NO: 386191 - DNA, 82 bp, Homo sapiens
ctgttggctgctgaccctgggggcagcccagctcaacgtcgtcgcaccagcaaaatgatgcttcaacacccaggccaggtct

SEQ ID NO: 386192 - DNA, 90 bp, Homo sapiens
ctcgacttagaagctaccgagttaccctaagaaagctggacaggtagtgaatcaaatgaataagaagctacagacgggttttacagaacc

SEQ ID NO: 386193 - DNA, 98 bp, Homo sapiens
ccacacctccggaccgagggacgcgggaaaaggaccagcgcagcctagacataaacactgccaagtgcatgttgggactgttattaggaaaaatctgg

SEQ ID NO: 386194 - DNA, 96 bp, Homo sapiens
ggagcgtcccagctgcgaggagacttgccttcaaggtgtgcaagtaaggacttatctccagaaaagaacacttatgaaacagaattatcccaatgg

SEQ ID NO: 386195 - DNA, 75 bp, Homo sapiens
cggagccgtggtggcagccccgggaggagcactggcgtctgtttccttcggtggtgatctttgtgaagtctgtgc

SEQ ID NO: 386196 - DNA, 73 bp, Homo sapiens
ccccgcacccacgcggccctgctgaaagtggcgcaaatggttgccatgtcaaatcttagcgaggctgtgcagg

SEQ ID NO: 386197 - DNA, 75 bp, Homo sapiens
gaaaatcatccatctaaagcaccagtaaaatatggtgaactcattgtcttaggcctccaccaggcggtgtgaaga

SEQ ID NO: 386198 - DNA, 82 bp, Homo sapiens
ggccatggccgccgccgatgccgagggatcgcttacacctgagacgaactacagaacagcacgtaccagaggtggaagtcca

SEQ ID NO: 386199 - DNA, 118 bp, Homo sapiens
tgccccaccatgtcagacgcagccgtagacaccagctccgaaatcaccaccaaggccatcagcatcagcaaagccatcaacacccaggaggcccccgtgaaggagaagcacgcccggc

SEQ ID NO: 386200 - DNA, 74 bp, Homo sapiens
gctaatcttgtacttcaagaggaggaatcacgctcggaaacaatggtatacgctcaacggcaagaaagtggaag

SEQ ID NO: 386201 - DNA, 90 bp, Homo sapiens
tatcagcaccccaaagtaccaatatgccattgatgaatattatcggatgaagaaggaggaagacagcgccgcccgcgcaccgccagcgac

SEQ ID NO: 386202 - DNA, 83 bp, Homo sapiens
ctggacgatcactgggactttaccttctcatactttgttagaaaagccaccaggttctcagaggcactgtgactgacttccct

SEQ ID NO: 386203 - DNA, 83 bp, Homo sapiens
cgacaagccgctggcagccgcggatctcaccgccgctcagggtatctgaaaaggtttaaagtgatgaagatcaaagttctaag

SEQ ID NO: 386204 - DNA, 98 bp, Homo sapiens
gacggagcctttgggaaagtgtacaaggaggatctcctgatgcagtccagcaaagaactttcacatgtggacctccctgaagattttctaaggagcaa

SEQ ID NO: 386205 - DNA, 83 bp, Homo sapiens
ggagcttccgggagggcggctcgcaggcttgggcactgtttaaaggaaagttccgagaaggcatcgacaagccggaccctccc

SEQ ID NO: 386206 - DNA, 75 bp, Homo sapiens
gacgcaatcctgaaggcagcgcagtcagccaatatttctgtgcggggtatgcttttctcagcatccacagataaa

SEQ ID NO: 386207 - DNA, 98 bp, Homo sapiens
atgactttaaaacaacttaaagacaggtatcctcggaaacggtttgtggctggagtaggagcaaacagcaaaatttatccagttggcgaaggactttg

SEQ ID NO: 386208 - DNA, 51 bp, Homo sapiens
ttgtctgcctctactttgaaaataaaaggagctgctaagacacatggttgc

SEQ ID NO: 386209 - DNA, 97 bp, Homo sapiens
gaaagaagacaagagagaacgcaaacagtttgaagctgaggattttggcaccagtgtcttgtcacctggactccacataggactaattattatactg

SEQ ID NO: 386210 - DNA, 50 bp, Homo sapiens
cgacaagtgagagcaggccagagccgtgtgaaaggtgtagcagtcactcg

SEQ ID NO: 386211 - DNA, 90 bp, Homo sapiens
caagaactggcgtcacgtttacaaggtttgtccagaggggttgcgtttatccggtttgacaaacggtcggaggcagaagaggcaattacc

SEQ ID NO: 386212 - DNA, 74 bp, Homo sapiens
caaggctaaaattgcaaatgcatatatcatcaaggagcattttgaggaaaatttctaccttgaaccgtatctga

SEQ ID NO: 386213 - DNA, 82 bp, Homo sapiens
caggctgcccagatggtggctcccggagtccagcagtgcctgatttgagatggggtcccaggtctcggtggaatcgggagct

SEQ ID NO: 386214 - DNA, 75 bp, Homo sapiens
taagagagtgattgctcttgaaggagatattgtcaggaatgtatcctgtcaggtataatgtcagtgaatggcaag

SEQ ID NO: 386215 - DNA, 80 bp, Homo sapiens
ggtttcgtccgcatcgaggacttcatccagtttgctacggtctacggggcagagcaggacatggatttgattgacatact

SEQ ID NO: 386216 - DNA, 101 bp, Homo sapiens
taaacctgaaagtggtagcaagaaaatgcttggacagaagagatgagtactatttccactaaggcctagaattgcctactgtacaaatagtcctgatcagg

SEQ ID NO: 386217 - DNA, 83 bp, Homo sapiens
agcgggagctggacggcgagcgcgagcggcgcgagaaagactcaaagccacccgtcatctcgttacaaaagctcatcgtgagg

SEQ ID NO: 386218 - DNA, 82 bp, Homo sapiens
ggcgagtttccgatttaaagctgagctgcgaggaaaatggcggcgggagggtgagcttgtcggccacagactgctacattgt

SEQ ID NO: 386219 - DNA, 82 bp, Homo sapiens
ttgaaggaggaggagaacacagtggtctagtgagatgcccaaattaacagaacaattagcaggaccacttcgtcaaatgcag

SEQ ID NO: 386220 - DNA, 101 bp, Homo sapiens
agtccatcctttgtggaaggcgaatgctgcccttcctgcctccactctcaaaagccaaaagtctctgagaacgactttgaagatctgttgtccaatcaagg

SEQ ID NO: 386221 - DNA, 85 bp, Homo sapiens
ccctcggttcctttgtactggaggagtgagtccctatgctgaccccaatacttgcagaggtggtattcacagccaacgactccgg

SEQ ID NO: 386222 - DNA, 80 bp, Homo sapiens
tccgaggctcgcgggcggcgggcccggatttggagcaagaggtggtggtggccttcccccgaagaaatttggtaatcctg

SEQ ID NO: 386223 - DNA, 126 bp, Homo sapiens
ggaaaagagactgttcaaaccactgaggatcagattttgaagagagatatgccaccagcatttattaaagaaaatattctctttggaatgggaaatcctctgcttgacatctctgctgtagtggac

SEQ ID NO: 386224 - DNA, 75 bp, Homo sapiens
tccaagtagctgggactacagacatgcgccagcacgcctggaagatgcaatcacacccaatgataagaccctttt

SEQ ID NO: 386225 - DNA, 100 bp, Homo sapiens
ctaccaggagcgcacctaccagcgcctgctcggagcccatcgtggtgaggcttaaggaggtccgactgcagagggacgacttcgagattctgaaggtgat

SEQ ID NO: 386226 - DNA, 100 bp, Homo sapiens
ctgtcaagaaggtgccggtggtgcgagtcttcggagcgaccccggcagtgctgctgggggtgaaatctttgaccagtgtgttgcagacagagaagaagcc

SEQ ID NO: 386227 - DNA, 75 bp, Homo sapiens
gaatatgctgccaaaattatcaacaccaaaaagctttctgctagggaccaagatcactccatggatgaaatgaca

SEQ ID NO: 386228 - DNA, 100 bp, Homo sapiens
ctcgtctcagcaaggaggagactgtgctggccccctgttccagtttctgacttccgagtgacagtggtcagcacgacggagatcggcttagcatggagca

SEQ ID NO: 386229 - DNA, 87 bp, Homo sapiens
cctcctgccaaaaggaaatgcatctttatgtcagaaacacaaagcagcccaaccaaagggtactccaaagattcaggtttactcacg

SEQ ID NO: 386230 - DNA, 98 bp, Homo sapiens
atgaaatcaaaaggcagaaccagtcccttgtgtatggcaaagtggatagcttctggaaggaaagaccacagcaagattctttcattcgtctcctccta

SEQ ID NO: 386231 - DNA, 88 bp, Homo sapiens
ctggcaccccgaacgggttgcttcccccgctgcgagggactttgaacatgtcggggatcgccctcagcagactcgcccaggagaggaa

SEQ ID NO: 386232 - DNA, 100 bp, Homo sapiens
tgcttttgaagaagtaggacctgccctgctccgctacagaactactggacaggtgtcatggagaaactccagctgggcccagagattctgcagcgggaaa

SEQ ID NO: 386233 - DNA, 83 bp, Homo sapiens
ctgtcttcggtggactccttcggcagtccacccaccgccgccgcctcccagacggagtctggctctgtcaccctgtctggagt

SEQ ID NO: 386234 - DNA, 74 bp, Homo sapiens
agttcaaggagttcaccacacgcacgcaggccccgataaacgtcttgtacccggaggtggagcaacagaaattg

SEQ ID NO: 386235 - DNA, 116 bp, Homo sapiens
ccagaacgcagatcagaggtagtcggacctttcccgctggcgcgcagcctcagctagagtccgatgggtggtccttttattcctgctgctcctgtcaaaactgccttgcctgctgg

SEQ ID NO: 386236 - DNA, 75 bp, Homo sapiens
ccctgagccgcccctacacccacagatcaggacctgggggcctacagttctgccaggaagtgcctggccaaacag

SEQ ID NO: 386237 - DNA, 75 bp, Homo sapiens
cgaccccagcgtgttcagcctccctgactccaagttgtcagcagaagtatataggatactttcagtgcaagggac

SEQ ID NO: 386238 - DNA, 97 bp, Homo sapiens
tcaggctcagctgctgatacccaggcagtagctgatgctgtcacctaccagctcggtttccacaggatcatcgacagcgtgagaggcgagctgcaga

SEQ ID NO: 386239 - DNA, 102 bp, Homo sapiens
gttctatttctctagctattgccttattttttctcatggatgttcttcttcgagtatttgtagaaggaaataggaaggttgttgattactcacagtttcagg

SEQ ID NO: 386240 - DNA, 100 bp, Homo sapiens
cagaagtcgccgaacgttctgctgcagaacctgtgctgcaggatcctgggcaggagcgaaggttcacgcaaagaatctgctccacaagttttgcttccag

SEQ ID NO: 386241 - DNA, 75 bp, Homo sapiens
cagatgttgtcaaggtggcctaccaggaggccaggggtgtcgccatgtatgaaggctatgaagtagagtcatctt

SEQ ID NO: 386242 - DNA, 82 bp, Homo sapiens
gggctcggccgcgcggactgaaggagactgaagccacataaagaagatccctaatagtcatttctcaacaattatatagtca

SEQ ID NO: 386243 - DNA, 88 bp, Homo sapiens
gccgctcacaacatgcacagcctggcgacggctgcgccttatttagtgtctctgacaaaaccggccttgtggaatttgcaagaaacct

SEQ ID NO: 386244 - DNA, 90 bp, Homo sapiens
caaagattgaacgacatgccatgtactgcaatggtctgatggaggaagatacaggatctcactggcatcgaatctatggatcagtgtcgc

SEQ ID NO: 386245 - DNA, 100 bp, Homo sapiens
atttgttaaggattccaagtaactcttatttgcttgtctgggttctatactgtgatctcatttgcctcgactacgatggaaacattttggatgcctgcac

SEQ ID NO: 386246 - DNA, 100 bp, Homo sapiens
gcgagggcgcggagttccaggtcgagcagttaggccgcgagcgactgcggcgccgagccggcttctcggccggcactgagtacatggacctgcagaatga

SEQ ID NO: 386247 - DNA, 101 bp, Homo sapiens
taaaggcgggactgccacgtccaagcaaaccgggaaaggagaggatcccggagccgggggccgaaggccagagaccaggatttggctacggaggcagagcg

SEQ ID NO: 386248 - DNA, 82 bp, Homo sapiens
accattgcagaaggaataaccttcatcaagttttatgctccatggtgtgatgaatgcagactctgctaccattttggctgtt

SEQ ID NO: 386249 - DNA, 75 bp, Homo sapiens
caagcaagcatgggacaccaagaaggaatctctgaaggaagaagatgaatcagatgatgataatatgtaacattt

SEQ ID NO: 386250 - DNA, 73 bp, Homo sapiens
tgaaggggaagaagctgaccttcgagtacagagtctccgagcatggggtcctgtcccagcaattcgtggagct

SEQ ID NO: 386251 - DNA, 100 bp, Homo sapiens
cacccatgctgtggcattcatttggtactattgcagcacttttacaggttcaggccattgctgcccagttggtgtcagccctgtactatctgcattccca

SEQ ID NO: 386252 - DNA, 100 bp, Homo sapiens
ggattttcgtctaaaaataacaagaatgggaggagaagggtgtgcaactgaggaacatggctcaagaaactaatcacagccaagtgcctatgctttgttc

SEQ ID NO: 386253 - DNA, 51 bp, Homo sapiens
actttaaagtcatgatctaccaggcacgtctgagaatggtggatgtggtgg

SEQ ID NO: 386254 - DNA, 96 bp, Homo sapiens
tgatgatcacgcagctggctggcttcagtggaccatgacctgaccaacggtgcagatgggatgctggccacaagctccaatgggtctcagtacagc

SEQ ID NO: 386255 - DNA, 75 bp, Homo sapiens
cagtttttcgtcgagagattcactatggaatcggtgcacaggtttcatattccagaaggttggaaagttggctgc

SEQ ID NO: 386256 - DNA, 73 bp, Homo sapiens
cagccacgcgggcgagcggctgtgtggatgtcggcgaagccgcgggcgagatgctgtgtgctgtggacccacc

SEQ ID NO: 386257 - DNA, 75 bp, Homo sapiens
cctcctttattgcagcaggaatttggccttcccttcttcttggtggtgttcttgagtaagataatctggactggc

SEQ ID NO: 386258 - DNA, 89 bp, Homo sapiens
gtcacggaaaccattgcacccaaaattgcaagacctttcatagagcttcctttgctccaataagctttgcaatcaaggccaaagaaaat

SEQ ID NO: 386259 - DNA, 75 bp, Homo sapiens
ggcctacgcagagctcatcgtccttggttcgtgctggccgtgggcagcgccgtctttgatgccatgttcaacggg

SEQ ID NO: 386260 - DNA, 96 bp, Homo sapiens
acccagaccacacccttgagcctgagcccgacattattcctgaggtaattgctctagcagatgcagtggaggaaaaccaaggcaatctgttccagt

SEQ ID NO: 386261 - DNA, 82 bp, Homo sapiens
aaagagtcaacagcagtggcaacaggatattagaaatggctactccccagtcaattttcatctttgcaatctgcattttaat

SEQ ID NO: 386262 - DNA, 89 bp, Homo sapiens
cctccttttgcgaaaaagtggatcaatattcggaagtcatatggaaatttttacaaggcaacagctgaacagatgcgtctcgctcaagt

SEQ ID NO: 386263 - DNA, 90 bp, Homo sapiens
cgcggagatctccaggaagcgcgagaccaggacggcgcgggaactctacgccaacgtggtgctgggattggtgctgaagacatggacggc

SEQ ID NO: 386264 - DNA, 100 bp, Homo sapiens
gtcctggtgactttgaacatgctggtgccgctagccaagctgtcctgcctgggtgggtttggaggatttgggacaacatctacaactgcaggttctgcat

SEQ ID NO: 386265 - DNA, 73 bp, Homo sapiens
attattcctcgcccacatctgtgccagatgggcggcccctctacgtgctcaggctggggcagatggacaccaa

SEQ ID NO: 386266 - DNA, 75 bp, Homo sapiens
gaactacttcctcatgattgtttcagatatgagggaaggcaccattggagatatggctatcctgggtataacaga

SEQ ID NO: 386267 - DNA, 51 bp, Homo sapiens
gcatggattgggagatactggagagaagaagaaggaggttcctgctgtgcc

SEQ ID NO: 386268 - DNA, 100 bp, Homo sapiens
ctcgcgagagtcgtctcctcgataccaacaattctgtggtgttcttggtcacacatttatggagtttctgaagggcagtggagattactgccaggcacag

SEQ ID NO: 386269 - DNA, 83 bp, Homo sapiens
ctggggaacccgttcagcacaccagtggggcagtgcctcggacgcgctccaggagatatataatcagaagggcatgtttccag

SEQ ID NO: 386270 - DNA, 90 bp, Homo sapiens
tatgagaaagctaggccatctgaataactttactaaggaaactagcagagttgttcacatcatggattttcaacgagggaaaaacttgag

SEQ ID NO: 386271 - DNA, 98 bp, Homo sapiens
gccatcatcacccaggtgaccaaccccaaggaggacgagggccggttgccgggcgcgggcgagaaaggtgccaccatggagtctgaccactgctgagc

SEQ ID NO: 386272 - DNA, 75 bp, Homo sapiens
attcaagaagttgaaaaacgcttttcacgtcacctggagagatgcacagatggcccactgcgtgaccttggttca

SEQ ID NO: 386273 - DNA, 100 bp, Homo sapiens
cggtgaagcacacagccatggtgtcctggggaggcgtcagcatccccaacagccccttcagggaaggattacggccaggagatacaaccagcactttctg

SEQ ID NO: 386274 - DNA, 75 bp, Homo sapiens
caaggaatctgcttttcaagtatgccaccaacagtgaagagtctccacaaaccggaggactacccccagactgca

SEQ ID NO: 386275 - DNA, 100 bp, Homo sapiens
tcagttaaacctactcaaactattgggccagaggtggaggctcatctcaggaagctgggcctgggctatcgtgcccgttacgtgagtgccagtgcccgag

SEQ ID NO: 386276 - DNA, 75 bp, Homo sapiens
caaagtcatgggagcagagctcagacatgttctcaccacccttgttattagaggaagtaacacaaggggatatga

SEQ ID NO: 386277 - DNA, 75 bp, Homo sapiens
gcggatgccctgcagtacctgcagaaggtctctggagacatcttcagcaggctgaaggtgatgtggccgccctca

SEQ ID NO: 386278 - DNA, 75 bp, Homo sapiens
actcggacacagaggacagcggcagcgacgagaacctggatcaggacctccggctagcctgtttcagccacctcg

SEQ ID NO: 386279 - DNA, 75 bp, Homo sapiens
tttcaagcagaattattgctgtatattcactctgaactgagagcttgtagattttcagtggaaactgggtatggc

SEQ ID NO: 386280 - DNA, 100 bp, Homo sapiens
ctccacgccctgctgggtcctacctgtcagagccccaagggatcaaggtggtcggacattgtgtggtgtaatgaggattggcctggttgcaaaaggcttg

SEQ ID NO: 386281 - DNA, 83 bp, Homo sapiens
tctcttcctgagcaagaaattaaaacactggaagaagatgaagaggaactttttaaaatatgtggacgagtgctcactagcag

SEQ ID NO: 386282 - DNA, 98 bp, Homo sapiens
agaaagagttaatgaagtgaaccagtttgctgccaaactcatacagtaggagagaagtttgctgaggaatgccttcaagcacaaagtgatgaatgact

SEQ ID NO: 386283 - DNA, 90 bp, Homo sapiens
cttctgtgtggcagttcagaatgatggatcaagctagatcagcattctctaacttgaggctgaggggatctggcggtggagcgctaggat

SEQ ID NO: 386284 - DNA, 116 bp, Homo sapiens
ccgccgccgccgccgccgctgccgctgccgctgccgcacctccgtagctgactcgacaatgcagatcttcgtgaagactctgactggtaagaccatcaccctcgaggttgagccca

SEQ ID NO: 386285 - DNA, 114 bp, Homo sapiens
gcagcccccgaagaccccagggcggctccgacgcgccctcaggagagccatcaggacttccggagcatcaaagcaaagttccaggcctctcagccggagcccagcgacctgccc

SEQ ID NO: 386286 - DNA, 101 bp, Homo sapiens
cgaggctataaaagcacagttttaagagaggaggactttcgactgcattttagaaatatttcaagaattatggattgtgttggttgttttaaatgtcgtct

SEQ ID NO: 386287 - DNA, 101 bp, Homo sapiens
gctggtgtggacagaggagggacaaagaggcagctgaacgtctttcaaaaacagtagatgaagcatgtctgttactagcagaatataacgggcgcctggca

SEQ ID NO: 386288 - DNA, 100 bp, Homo sapiens
ccagggccaagaaggcgcgggctgagatctgtgacttcctccgcggagccacagtccatagaatcctcggccagcaggtcccctatgccaccaagggcaa

SEQ ID NO: 386289 - DNA, 100 bp, Homo sapiens
ttgtgaggctcgtcgccaaaagattgaagagtatggtctctctggcagtgatgtcctggataatgtagcatatgctcgagcgttcaacacagaccaccag

SEQ ID NO: 386290 - DNA, 100 bp, Homo sapiens
cccagatggtggctcccggagtccaggttatgaagacagtatggagtttccagaccatagtagacatttgctacagtgtctgagcgagcagagacaccag

SEQ ID NO: 386291 - DNA, 100 bp, Homo sapiens
cgcgccgggccctgtcgcgaacctccggcgcgctgccccgccggaccgtgattattcttggagaaaccctgtctgtttactgtaaccttttgcactcaaa

SEQ ID NO: 386292 - DNA, 100 bp, Homo sapiens
agagaggcaccgggatcgtgaccgagaccgtgaccgagagcgtgaccgagagcgcgaatatcgtcatcgttagaaggaagcgggcagcaggtcaccccag

SEQ ID NO: 386293 - DNA, 75 bp, Homo sapiens
gtccgcatcgccacagctgaaggctgcgagggactaagagcagaattgacttgatgcacaacatcacaaaggcga

SEQ ID NO: 386294 - DNA, 74 bp, Homo sapiens
ctgtcttgtcccagaaccttttcactccaaaacaggaaattcaggaacaccagcctcgctccggcctcttgcag

SEQ ID NO: 386295 - DNA, 51 bp, Homo sapiens
cttagattctacagagctggatattgaggacatagatctgattgacatcct

SEQ ID NO: 386296 - DNA, 80 bp, Homo sapiens
tgagtcttccaaccagagcttgtgtagcgtcagatccttgagtgataaaggagtagagaccctagcacttttggaagaag

SEQ ID NO: 386297 - DNA, 90 bp, Homo sapiens
cgcagtggtcgcttcttctccttggtattcccggcgtttccacaagactctaaggcgcttggtgccagactccgatgtgcgcttcctcct

SEQ ID NO: 386298 - DNA, 74 bp, Homo sapiens
tgcacctcccgcgccgcacggtggacgaggacggggaggtttactgcatcgacgcgcggttctacgggaacgtc

SEQ ID NO: 386299 - DNA, 101 bp, Homo sapiens
ctggctcccagaggtgcaccaaacctgcacatcattgactcctgggcccaactgtgaccgatttaaactgcacataccatatgctggagagacattaaagt

SEQ ID NO: 386300 - DNA, 100 bp, Homo sapiens
gccagacatggggctggtggccctggaggctgaaggccaggagctcctgcttgagctggagaagaaccaacttggtggtggcagtcaacggggtctggat

SEQ ID NO: 386301 - DNA, 98 bp, Homo sapiens
cgccagtggagccgggaggcgcgtgcagcgccagcggaggaggaggatcccggagcccaaggtgaaatgacaatggatgctctgttggctcgattgaa

SEQ ID NO: 386302 - DNA, 98 bp, Homo sapiens
caacctcccggtcgaccatatctccttgatcctggctgtggactggctagtgaacgcggcaggcaaagatggcaaagagcgcttgggcggctcagtgc

SEQ ID NO: 386303 - DNA, 76 bp, Homo sapiens
tgccctgtctcctcgcagatgagattttaccaaatgttgcaagaactctggagttcttatggtagtaaaatgccgg

SEQ ID NO: 386304 - DNA, 90 bp, Homo sapiens
gaagagtatggctcctgaacctacacagcatctggcgaggccccaatgtgaactgcacagacagttcgggttacactgctttacaccacg

SEQ ID NO: 386305 - DNA, 74 bp, Homo sapiens
agtgtcaggcatgggagtcattgtccacatcatccctgcatcctgatgaacaacgtgcagcaactgagggtcca

SEQ ID NO: 386306 - DNA, 98 bp, Homo sapiens
acagcagcagcagcaaactaatggatagctcccagttgatccattgtcgggagcttgtggcacatcacctttctactctgcagtcttccctgcctctg

SEQ ID NO: 386307 - DNA, 50 bp, Homo sapiens
ttctcccggtgtggccacgagtcgggaagatgagaatgtgcctactgctc

SEQ ID NO: 386308 - DNA, 100 bp, Homo sapiens
ttccaccattcactgtcttctcaggctgcccaggtggagatgttacagccaaaaatatctggttggcagaaagtgttctggatatcctgacagagcaaag

SEQ ID NO: 386309 - DNA, 119 bp, Homo sapiens
cttgaagacagagatttattcgtaatgcgactcaaagctgcacggcagtctgtttatgagcttaacctggcttctcagtctgtattggaaggactcaatgcttgttttgaccaccgagg

SEQ ID NO: 386310 - DNA, 75 bp, Homo sapiens
tggaaagactcacaggcgtgagcatctcccagatcatggaggacacccaggctattgactgggatgttgaagaag

SEQ ID NO: 386311 - DNA, 87 bp, Homo sapiens
aattctccgtccctttccagggagggaacaaagcccacaagcaccgaacaaagatacttatgagcctttctgcaaggtccctgtgat

SEQ ID NO: 386312 - DNA, 101 bp, Homo sapiens
accgaaaaggcgaggagtatagtacggcaaaaaactgtcgatgcatagctctcttaggtcccttcgtaatagtgcagctaagaaaagagcaaaactgagtg

SEQ ID NO: 386313 - DNA, 50 bp, Homo sapiens
ggagcattgcttctcatacagtaagacctgtcatttactccatcctttat

SEQ ID NO: 386314 - DNA, 100 bp, Homo sapiens
cgacctcttgtgctgcagcttgttacttctaaagcagggaaaggcgtaggaggaggagcaggagttcttccagatcgccaagaacatcaaaaaccataaa

SEQ ID NO: 386315 - DNA, 74 bp, Homo sapiens
ctgtaaaagtgccttctgtttttaagcttctaattaaagaggcgcacatggcacagcactcaagcctacggccc

SEQ ID NO: 386316 - DNA, 100 bp, Homo sapiens
cacagtcagtggggatcgcattgttctggtgcagtctgtgcggcctgatcactttgggaagcagtgacatccaacctgtatcaagtcttctaatctgtga

SEQ ID NO: 386317 - DNA, 100 bp, Homo sapiens
gcaagggcgagatcctggcgagcctgcaggatggcgcggccgagtccccgtacggccacccggcgggatgaccgagtgggagacagcagcaccagcggtg

SEQ ID NO: 386318 - DNA, 73 bp, Homo sapiens
tcaagcttaggaccacccaccatgcctatccaggtaatttagcccaagctgaagcagttggaagagaggcact

SEQ ID NO: 386319 - DNA, 75 bp, Homo sapiens
gacttctcctggggatatggtgtatttgatgagagggcagctaactttgaaaaccattcaggaaagcttggtgct

SEQ ID NO: 386320 - DNA, 75 bp, Homo sapiens
cttggagcccagagccacgtcaaaccaacaagtcccaaatttggaaaagctgactcatatgaaaagctggaaaaa

SEQ ID NO: 386321 - DNA, 100 bp, Homo sapiens
gagagaaaggctggaagacgaggtgagccctattcccagaggcaggtggtgctgaccctgtaacccaaaggaggaaacagctggctaagctcatcattgt

SEQ ID NO: 386322 - DNA, 100 bp, Homo sapiens
aaaaggggacacggcggtgcttaggtgactgccaacagccagcccaatgtcgaatccagaaatgcaccacggacttcgtgtccctgacttctcacctgaa

SEQ ID NO: 386323 - DNA, 82 bp, Homo sapiens
tattcgagtgaccgagaccgcggccgggaccgagggttttgggatttgagattgacgcggtgaactctgtccagttttcaaa

SEQ ID NO: 386324 - DNA, 100 bp, Homo sapiens
caggctgggagcatccccttagcagcagcctctggggccttgggcaaagcacccagtaaagtgactgatgcccttccagagccagaacctccaggagcga

SEQ ID NO: 386325 - DNA, 73 bp, Homo sapiens
aatagtgatagctttgataagttcgtcacaaggcatcgcagaaggtttatgctatgaagcttcttagtaagtt

SEQ ID NO: 386326 - DNA, 88 bp, Homo sapiens
tggccatgggggacgtgctgtccacgcacctggacgacgcccggcgccagcacatcgcaggtgtgctgggcatcaaggtgaagatcat

SEQ ID NO: 386327 - DNA, 82 bp, Homo sapiens
cttgggagtatctccgtattctggagcagtatttcatgaagtctataagaaggagaaagctcgagtcatcactgaggaagag

SEQ ID NO: 386328 - DNA, 100 bp, Homo sapiens
ggactgagtcctgcaggacacagaatgtgaaaccaagggagagagtcaaaatacagacttgagtccgaagccattaatttcagagcaaacagtgattctg

SEQ ID NO: 386329 - DNA, 90 bp, Homo sapiens
gcgactccagtgctacctgcagtgcagacgaggtggatgaggccgagggcggcgacaagaaccgaactatgttgtgcttctggactccac

SEQ ID NO: 386330 - DNA, 100 bp, Homo sapiens
gggaaaattcaacttcattcagctgcagtattgaagtatgagaacaatgttatgaatatcaggcaattcaactgttctcctcatccatactggcttccaa

SEQ ID NO: 386331 - DNA, 97 bp, Homo sapiens
gaaaagtggaggggtgaatcagtatgttgtgcaagaggtactgtccatcaaacatcttccaccacagcttagaggtgccacaacagaagcagattgg

SEQ ID NO: 386332 - DNA, 100 bp, Homo sapiens
agaggtagcaagaaagaaaattagagtgaatgtagttgcaccagtctgcgggccaggcatcgacatccgcaacgactatcagcagctgaagcgcctggag

SEQ ID NO: 386333 - DNA, 99 bp, Homo sapiens
ggttggaatccttgctgtgctgaatcctggctgtgtgaccccaaattatgtttgagaccttcaacaccccggccatgtacgtggccatccaggccgtgc

SEQ ID NO: 386334 - DNA, 75 bp, Homo sapiens
tgggactcagcagccttggtgctcaggtgccagatgcaaaggcaacagcattattgagaaaagcccttacagaag

SEQ ID NO: 386335 - DNA, 100 bp, Homo sapiens
ggaagctgttttgctccttaagaaacttaaagcctggaatgatatcaaaaagcccagccgtacattgctatcgactgggagccagagatgaagaagcgtt

SEQ ID NO: 386336 - DNA, 80 bp, Homo sapiens
ggtctcggcaggctcttcgggaagggttttcctcctccaccaggcgctccacctccatctcttataccaacaatagaaag

SEQ ID NO: 386337 - DNA, 100 bp, Homo sapiens
acagcactgcacctgcagacaagcctgccagccctttctgaggcagatacccaggaactaacccagctgccactgcagagccccgccatggaagacacgc

SEQ ID NO: 386338 - DNA, 96 bp, Homo sapiens
cttggaaggagaacttgggatctttctgggaaccccccgccccggctggattggccgagcaagcctggaaaatggcctccggtgtggctgtctctg

SEQ ID NO: 386339 - DNA, 100 bp, Homo sapiens
agctatgcatgctgcttttgatgtctgacaacgtggatcgttgttttgaaacaccgcaacagatgaccaaggaagtttgggattatgttttcttcaagga

SEQ ID NO: 386340 - DNA, 90 bp, Homo sapiens
aatacctcgtgatgccacttattacagttaccagaacagtctgcagatctccaggggagcccaccagcctagtcaacatggcctcggaag

SEQ ID NO: 386341 - DNA, 98 bp, Homo sapiens
agaaaaggagaactataattctaggaagtggtcacaaaggaaaagctactattagaattgataagccaatggacacgtcagtgttatctgaagaagga

SEQ ID NO: 386342 - DNA, 74 bp, Homo sapiens
tttgagaaaatggacgctgacatcaatgtcacaaaagcggatgttgaaaagggtgtcggttggtggaaatatga

SEQ ID NO: 386343 - DNA, 74 bp, Homo sapiens
gacgcggcggcgctgaagaggcggaaagtgcagcttatcacacagactttcagccaccacaatcagctggcaca

SEQ ID NO: 386344 - DNA, 90 bp, Homo sapiens
caaaactaaaagaatgtcatgatagagaagtacaaggccaaacgtaccaagaaagtcgggatcgtcggtaaatacgggacccgctatggg

SEQ ID NO: 386345 - DNA, 97 bp, Homo sapiens
gcctgcaggacggcgcggcagagtccccgtacgcctacagtaacgtcgtggcattcctggtggctttccatcagaacaagcagctcatcggtgacag

SEQ ID NO: 386346 - DNA, 101 bp, Homo sapiens
atgtgacagaagtccttatacttcagttgttcagtcagattggaccctgtaaaagctgtaaaatgataacagaggagaactgtgtttatgaaactgtagtt

SEQ ID NO: 386347 - DNA, 74 bp, Homo sapiens
tgacatcaattgctgcaactgaacttgaagatgtggatgttcccaaggccttgattattgttgcagttcaatgt

SEQ ID NO: 386348 - DNA, 75 bp, Homo sapiens
gacagcagcaggaggcgtgctcccatctccgtggtcccaggctgcacccatggcagaaggaggagggcagaatca

SEQ ID NO: 386349 - DNA, 50 bp, Homo sapiens
gcctgggctgccggcacttcgcggcagtggcttttcatggcctgccactg

SEQ ID NO: 386350 - DNA, 51 bp, Homo sapiens
tccatctgtcttagcaaggctgtcatcacaatcgcagtggtcatgggctcc

SEQ ID NO: 386351 - DNA, 82 bp, Homo sapiens
gtcaaggccctcttcgccatctcctgtgctggagaatctggtaaaagcaccattgtgaagcagatgaggatcctgcatgtta

SEQ ID NO: 386352 - DNA, 90 bp, Homo sapiens
ctgcagccaccaccgccaccatgtcctaccaaggcaagaagaacatcccgcggatcacggaattgaatgatctggcacgggaccctccag

SEQ ID NO: 386353 - DNA, 100 bp, Homo sapiens
ctccgggctcttcgccgtcatcgtcctcatgctggcctgcctgtgctgtaagaagggcggtatcgggttcaaggaaagaccacagcaagattctttcatt

SEQ ID NO: 386354 - DNA, 100 bp, Homo sapiens
gtccggtggttgctgttgcttggcctggtgggcccagtcctcggtgcggcgcggccaggaatgaatctgaagtctgctgcagtaaaacacagaaggcttt

SEQ ID NO: 386355 - DNA, 75 bp, Homo sapiens
ccacctagaacagtttcaggcagatataaaaggtttcaagtgccccatttgctccaagtctgtggcttctgacga

SEQ ID NO: 386356 - DNA, 75 bp, Homo sapiens
ggataagcctcgacttagaagctaccgagttaccctaagaaaggttttgcgtgtgaagctgtgtggaaatgtgaa

SEQ ID NO: 386357 - DNA, 82 bp, Homo sapiens
gaagaatctgcttgtctatggcttcagataaaccagtcgatcattttctgtaactcctctcagcgagttgaattgctagcca

SEQ ID NO: 386358 - DNA, 80 bp, Homo sapiens
cctgcttgttgtccctggagcaagagggaaaacccctgatcctaaaatgaatgctaggacttacatggatgtaatgcgag

SEQ ID NO: 386359 - DNA, 100 bp, Homo sapiens
tgtggatcccaatgattcagatgtggaggagaatatatcctctaaatctgatgcatcctctggtatcacgattccaaaacccccaaagccaccagataag

SEQ ID NO: 386360 - DNA, 75 bp, Homo sapiens
tatcaagccatcgatgaggacactaacaaagctgcctcaaatgtcaattgtggctgtgcccatggtgctcagtgc

SEQ ID NO: 386361 - DNA, 51 bp, Homo sapiens
cgtagagcagaatgatatgctacggaaggacattagctgtcagcacgcagc

SEQ ID NO: 386362 - DNA, 100 bp, Homo sapiens
gcaaatggtctccgagtcaagtagtggactggatgaaagatatacatcaggggatgtgagagtgtgggacacccgcacctgggactacgtagcccccttc

SEQ ID NO: 386363 - DNA, 90 bp, Homo sapiens
agttcactgagctcacgcgcctgtacctcaccatccacagtgactgccaggaactgctaaaccagctagaccagcgctttccggagaacc

SEQ ID NO: 386364 - DNA, 75 bp, Homo sapiens
ccgtctgctcttctgcctcttgatctccgccaccgtcttcaggccaggtttgagcacaaaatgaacataattagg

SEQ ID NO: 386365 - DNA, 90 bp, Homo sapiens
cgacttgaggaagcccagtacatttcaagttggtcgcggcttgggctccgctttggggaggggcagcagaggagaagaagatgattcttt

SEQ ID NO: 386366 - DNA, 100 bp, Homo sapiens
gttataagctgcactgcatggttgctgctggatgtgttgtgttcctggcttccctctggatgctgacagaaacaagggggacaggcaaatggtatgaatt

SEQ ID NO: 386367 - DNA, 100 bp, Homo sapiens
ttggggaactgagaaagaaatagaaaatttgaagggtattgttccagatcttaacagtcttattgacatgtgtgtgcagaactgtggtccaagtttccag

SEQ ID NO: 386368 - DNA, 51 bp, Homo sapiens
aagcagagtgcacagaagaaagaatcagcatgattcttcagaggctcttca

SEQ ID NO: 386369 - DNA, 100 bp, Homo sapiens
ggagcccctgcgggtgctggagctatacagcggcgtgggcggcatgcaccacgcgctgagagctctatgatggaccacggcagatgggacgctactgtgg

SEQ ID NO: 386370 - DNA, 90 bp, Homo sapiens
caatgaagatgcagttaaagatatcaggtggctggttataagtcttttggaggacgaacaactggaggcatctccttggaaacaatgcca

SEQ ID NO: 386371 - DNA, 82 bp, Homo sapiens
ccgcttcgttccctggatcgcactgaacctaagccacaacccgagggggatcggtggctcatttgctgagtaaatatggagc

SEQ ID NO: 386372 - DNA, 100 bp, Homo sapiens
cttgcacgtgcgaggggcatttcaggagtttcctgtctgtcaggcgccaagcccatctttgtgtgcttgcatccaactgtgatgagcctatgtatgtcaa

SEQ ID NO: 386373 - DNA, 100 bp, Homo sapiens
cggcagtgctcgcctaaaggtggagaacgaggagtagaggagccgcaggccagagcctgtgagcagatatagccagtaccaacgtatgctgagcacgctg

SEQ ID NO: 386374 - DNA, 90 bp, Homo sapiens
tgagtggttgtgtggtcgcgtctcggaaaccggtagcgcttgcagcatggaagaaacatattgccgagtggatgccgccgcgcagcgtgt

SEQ ID NO: 386375 - DNA, 86 bp, Homo sapiens
ctcccaaagtgctgggattgcagggtactactgctaaagtgcagcagaggctgataggattcatgcgtcctgaaaacggaaatccc

SEQ ID NO: 386376 - DNA, 82 bp, Homo sapiens
ctcctctcccaggggctgtctctacctcaaagactggcacttgtgcagcctgattcggactccaccaaacactcaactccat

SEQ ID NO: 386377 - DNA, 97 bp, Homo sapiens
ccccacaacatggcctcctccgcctcctcctctcccgcgggcaccgaggactccgctcctgcccaggtgtgtgtctggggaagagacttacagaagt

SEQ ID NO: 386378 - DNA, 100 bp, Homo sapiens
ggcagcagtgcatggaggagctggtgagcctcatcacacaggatccgcccctggacatggaggagaaggtccgcttcaatcgtccctcatggaccttgct

SEQ ID NO: 386379 - DNA, 100 bp, Homo sapiens
tttggatgtggaggggaatagactccatctatccatatgagctccaactaccgtgaatgtaacacatcgtccagtaactcaggtgaccacaagactccct

SEQ ID NO: 386380 - DNA, 101 bp, Homo sapiens
gcacgtgataactttgaaggaggctgcctggctgagctgatcggatcacctagagactggaaatgctttctggagaagatggcgaattagaagatggtgaa

SEQ ID NO: 386381 - DNA, 100 bp, Homo sapiens
gccagcgagccacgggagcgagccaggaagatgttaccgagtacttcagtgaattccttagtgcaggggaacggagtcttgaattccagggatgcggcaa

SEQ ID NO: 386382 - DNA, 75 bp, Homo sapiens
caggatcctgttacatacatttcagaaacagggcagctgcaatgactctccgcacggtattattgtcattgcaag

SEQ ID NO: 386383 - DNA, 100 bp, Homo sapiens
aagacggcagtttggcgacatttctcggccgaagggccatttgcttttgcggagagggaagtggaatcccgattgcttgatgattgatggactggtttct

SEQ ID NO: 386384 - DNA, 51 bp, Homo sapiens
ctgcggagcagctaccgctcagcctggagatttgaaaaagagaattgaatc

SEQ ID NO: 386385 - DNA, 50 bp, Homo sapiens
ggacggcgctgcggtacatccaggaagcggggagaggtggtgagagatga

SEQ ID NO: 386386 - DNA, 101 bp, Homo sapiens
gatccaacccaagggcaagggcatcctgggaaagtgctgacggtggatgctcgtaaccacggtgacagcccccacagcccagacatgagctacgagatcat

SEQ ID NO: 386387 - DNA, 100 bp, Homo sapiens
cttgagcatgaccagaccatgttagataaacttgtggatggacttgctacctcttgggtgaactctagcaattacaagatggactcaccctgtcacccag

SEQ ID NO: 386388 - DNA, 100 bp, Homo sapiens
gaattccacagagggtgtgacccaaagcccctaacaacagactcgctgggaccccctagacttggcatggaggctgggtctgcaatgacatcgatgaatg

SEQ ID NO: 386389 - DNA, 74 bp, Homo sapiens
tggattacaggccaaattagcaaagacggtaaagaacaggtccaagaaaagctcaaagaaagcaaataccagca

SEQ ID NO: 386390 - DNA, 98 bp, Homo sapiens
aacaccaacatcgatgggcggcggaaaatagcctttgccatcactgccattaaggtgtgatccctcacatccacaaatctctgattggaaagaaggga

SEQ ID NO: 386391 - DNA, 83 bp, Homo sapiens
acaagagtacgggaaaagagaacaagattactatcactaatgacaaggactttctgctgctgaagtaatgcaatggtctcaat

SEQ ID NO: 386392 - DNA, 74 bp, Homo sapiens
agcactatcagatcaatgacatctacagctgcagctacagagggccggagctggagatgtggtctctgggagtc

SEQ ID NO: 386393 - DNA, 100 bp, Homo sapiens
gccgtcggctgcggcgccatcgggtgtccgcaatgttgccagtgtctgtctgcagattggctacccaactgttgcatcagtaccccattctatcatcaac

SEQ ID NO: 386394 - DNA, 88 bp, Homo sapiens
acaaaggacactgccaaccttgataagatggcttcggagggaatgaggcaagaagctcttctggctgccattagtgaaaaagacgcca

SEQ ID NO: 386395 - DNA, 90 bp, Homo sapiens
ggaattgatttgggaacaactggtcgtcttcagttaatggcaagacttgcagaggatttctcgaatgctggcagccaaaaccgttttggc

SEQ ID NO: 386396 - DNA, 126 bp, Homo sapiens
gaactggcatcaaatactcacaacatagctcaggatctgtcaaacaaaagttcttatggactcaaaggatggacacaaggactggatcttttccatcgcatggatcagcgacactatggcagtgtc

SEQ ID NO: 386397 - DNA, 73 bp, Homo sapiens
aggacattgccaactacaacaaggaggatgacattgtcccctgcctgtgcccttcaccaatggggagatacag

SEQ ID NO: 386398 - DNA, 74 bp, Homo sapiens
tttggagcccattttagaggcatctgttctatcttcccatcataaaaaagtctcattcaggaacgtcgcctgat

SEQ ID NO: 386399 - DNA, 100 bp, Homo sapiens
tgcgctatgccctgctgtagtcacaggagctgtagagaggaccccggtacatctgaaagccgggaaatggttaaaaatctgtaagagcctgattttagaa

SEQ ID NO: 386400 - DNA, 75 bp, Homo sapiens
catttcctcctgacggctgtacttgagcagtcacctggcacaggcgttggagaccagggccagccctggccacac

SEQ ID NO: 386401 - DNA, 75 bp, Homo sapiens
atgcctcgaactaaacaaattcatcccagaaatctaagaggtgtttgctgactagcactttggagagtgtatgct

SEQ ID NO: 386402 - DNA, 98 bp, Homo sapiens
cggggtttaagggccaggaaaggaagcattcagggaatttaggtgtagccagaagaaaatcaggtatctctcctaaatgtgtgatcaaggaattacca

SEQ ID NO: 386403 - DNA, 104 bp, Homo sapiens
agacctgcagggttcgtggataataaactcaagcagcgagtcatccagtgggtaattccagaattgattggccataccattgtcactgtattactgctcatgtc

SEQ ID NO: 386404 - DNA, 75 bp, Homo sapiens
cgtcgtgatccagaagtccagagctgaggactgcctgtttgcagcaattaccagctctggctgggtcgccacaac

SEQ ID NO: 386405 - DNA, 83 bp, Homo sapiens
tgatcaagccaacaacagtgacggaatgcctccatacatgagccatataacacacctctttgaaaatgaccgtcatttttctc

SEQ ID NO: 386406 - DNA, 101 bp, Homo sapiens
gcgggacggcgcggcagcagctgacctcgcagtggagttggatcacaggattgattttgaactcagagaaggccttgtggagagccgctattggtcagctg

SEQ ID NO: 386407 - DNA, 100 bp, Homo sapiens
aaactgtttaaccggatcccattgtacccagagtgcagagccgcctttccagcatgcaggggctgctcaggtatgttcgcaattcgtgctgatcatgatt

SEQ ID NO: 386408 - DNA, 101 bp, Homo sapiens
gtttggattttcactggacttccacaaggacagccatgggagaaatgtggatctgagagaatacttgtctgaagaagtacaagcagtacacaagaatacca

SEQ ID NO: 386409 - DNA, 75 bp, Homo sapiens
ctactacgatgagtttggtttccgtgtgtacaaggaagatggctctgagtaaatcaatgcatgcaagaaatagat

SEQ ID NO: 386410 - DNA, 75 bp, Homo sapiens
tgtgtgcattttccttcccaacgatgaatctctgaacatcatcataaatgaaatagctcgtctgctggccctgga

SEQ ID NO: 386411 - DNA, 50 bp, Homo sapiens
agaccacggagcccctgccaaactgattcttgctattccaaatcctcttc

SEQ ID NO: 386412 - DNA, 74 bp, Homo sapiens
cgtcacctgctatgcagcccacccagctatcagttgagggatttgcagttgataaaatggctggagaggttaag

SEQ ID NO: 386413 - DNA, 90 bp, Homo sapiens
caatggagagaagggcggcaggagctacgaagtgaagagtgtcctcggaaaggaagtggggttgttaaattgttttgtccagtccgtaac

SEQ ID NO: 386414 - DNA, 75 bp, Homo sapiens
cagaagccgagttcaacatcctcctggccaccgactcctacaagtctgcgctcctcagaccaccggcaggtgaac

SEQ ID NO: 386415 - DNA, 97 bp, Homo sapiens
ctttatgaagccaacggacaagctctgaactgtcccaagcaataaacagtggtacattgttatcaaaaccgtccccacccttaccacctaagagagg

SEQ ID NO: 386416 - DNA, 74 bp, Homo sapiens
gatgaggaggaggaaggtgaagaggaggacgtgagtggagaggaggaggaggatgaaggagaagatgactaaat

SEQ ID NO: 386417 - DNA, 96 bp, Homo sapiens
ggcttctgcgcagaatgcttctcagcagcaacatccccaaacagcggcgtttcacggtggcacatacatgcactgcctcctaaaccaccaaaacct

SEQ ID NO: 386418 - DNA, 100 bp, Homo sapiens
cgcacactgaagagtacgtcttcgggtctacccctaatcacatatatttttgccatcatggatcagtttggagatatattagaaggtgaagtggaccatt

SEQ ID NO: 386419 - DNA, 83 bp, Homo sapiens
ctcatgcttgttaccggctccatcaacacgctctcggcaaatgtactaatggtcacttgatgtgcgctggctgttttatccac

SEQ ID NO: 386420 - DNA, 90 bp, Homo sapiens
gagctccccagctggtggctggagcgaccccttgttctttggtggcgctgaaatgcactcggtgatggaaagagagccactattctgaag

SEQ ID NO: 386421 - DNA, 100 bp, Homo sapiens
gcccaactccagtccaacatcattgaggcgattaatgagctgctagtggagctggacaagttggatggcttgaggactggtactaaaaggaaacgtgact

SEQ ID NO: 386422 - DNA, 100 bp, Homo sapiens
aagaaaaataagaagaagaaaggagacagagtcaacaattcaattgtgccggtggtggtgtgcacattgagccccggtatagacagttcccccagctgac

SEQ ID NO: 386423 - DNA, 90 bp, Homo sapiens
aaaatccagatgctggatgacacccaggaggcatttgaagttccagtgaagtggatcctaaagagaggatagcacgccaacgaaaattat

SEQ ID NO: 386424 - DNA, 75 bp, Homo sapiens
tccagcacagaccctcgggcctcatcatggccaggaagaaatctgacccggtcgtctcgtaccgcgagacggtca

SEQ ID NO: 386425 - DNA, 51 bp, Homo sapiens
ctgctattgaaagagagtatgcacaggaggcccagaagattaacaatggct

SEQ ID NO: 386426 - DNA, 98 bp, Homo sapiens
ctcagcctcccgaatagctgggactacagagatggtgaccttgctctgtggcccaggctggtctcgaactcctggactcaagcgatcctcctgcctgg

SEQ ID NO: 386427 - DNA, 100 bp, Homo sapiens
ggaggaggcggctataataatagcaaacatcgatggcctactggggataacattcatgcagaacatcaggaattgaatgatctggcacgggaccctccag

SEQ ID NO: 386428 - DNA, 100 bp, Homo sapiens
ggaagcgcttcctggatgagaagagcggcagtttcgtgagcgacctcagcaggttttgggatttgagattgacgcggtgaactctgtccagttttcaaac

SEQ ID NO: 386429 - DNA, 82 bp, Homo sapiens
tctcatctcgctcggctgcgggaaatcgggctgaagcgactgagtccgcgatggaggcatacccagagtatcttatcactta

SEQ ID NO: 386430 - DNA, 102 bp, Homo sapiens
cggagacaacaacctgctgggcaccttcatctggaataaggatggtggatgtggggggccagcggtcggagcggaggaagtggatccactgctttgagaacg

SEQ ID NO: 386431 - DNA, 100 bp, Homo sapiens
ccagttggagttgcggcggcgggaacgattgggctgagcagaggacgacatgttgcttttcgtggagagaagctgctcgagaatgtcgcagaaagaagaa

SEQ ID NO: 386432 - DNA, 50 bp, Homo sapiens
gtgaccgaaggctccgctcacgcccgggggcaaccgctgtcatgagttac

SEQ ID NO: 386433 - DNA, 100 bp, Homo sapiens
cgcagtggtcgcttcttctccttgattggctctaccagtgcacctggacagggaggaatcctggctcagcgggagtttgacaggcgattctcccctcatt

SEQ ID NO: 386434 - DNA, 100 bp, Homo sapiens
gcgttctaaaggaaggcgtccgttggccttcgtacccgtcttgattgagatatttggtttccaggcaggactgacgtctttggattgcagtggatcttac

SEQ ID NO: 386435 - DNA, 80 bp, Homo sapiens
catcgccctgccggaccgcgcctcaggctcccccagtgaactttgaggcgctgatcatcaccatgtcggtagtcggggga

SEQ ID NO: 386436 - DNA, 100 bp, Homo sapiens
gtgcagcccctcagagtaccgcttggagatcctagagtggatgtgtacccgattgagtgccatctatggggggacatatatgctgaacaaacctgtggat

SEQ ID NO: 386437 - DNA, 50 bp, Homo sapiens
tgtggatcgctgtgatcgtcacttgattcaagtcaatctgaaagtcccag

SEQ ID NO: 386438 - DNA, 90 bp, Homo sapiens
cggaaagtgctcctgcggctgtatggagcgattttgcagatgtccttaatggatcagtactttgcccgaatgtgctccttgatgttaagt

SEQ ID NO: 386439 - DNA, 88 bp, Homo sapiens
gttggaataccggctctcagcggctgcctgctgcgggtcatctcaggggttcttcagctcggcaacatcgtcttcaagaaggagcgga

SEQ ID NO: 386440 - DNA, 50 bp, Homo sapiens
caagacagggatcagatttatagaatgagtccctggaacgccagatgcgt

SEQ ID NO: 386441 - DNA, 98 bp, Homo sapiens
gtggtggatgcggccaactccaatgggcctttccagcccgtggtccttctccatattcgagctaaaccatttacacagctggtgaaagaaatgcagct

SEQ ID NO: 386442 - DNA, 100 bp, Homo sapiens
gtaagcctttggtcataatcgctgaagatgttgatggagaagctctaagtacactcgtcttgaataggtttggaattggccgcttcactacagaggagga

SEQ ID NO: 386443 - DNA, 98 bp, Homo sapiens
ctccacaccccccgccgcagcagcaccggcgacagtactatactggcaattgctggagaagattttgcaattgttgcttctgatactcgattgagtga

SEQ ID NO: 386444 - DNA, 100 bp, Homo sapiens
ttgctcggccgatgaagtgcagaggtttttttctggaatgatgagaagacagcagctgattacaagattttaggtggttcagtccttcacctggtgttgg

SEQ ID NO: 386445 - DNA, 98 bp, Homo sapiens
caccacccacgcttgcccagcctttcttcacgcaatgagtctggaagtgttagttgcaaagatatgcatttacttctctggctacaaaaaagaataga

SEQ ID NO: 386446 - DNA, 100 bp, Homo sapiens
caaatgaccactggcagcctatgctcacattgtccctgtgtctagcagtttcagagctgtgtgttctcatttcacccaaaacctttggacagtgcagggc

SEQ ID NO: 386447 - DNA, 98 bp, Homo sapiens
gctgggaacactgaatcaacatgggcaatgagaacagcacctcggacaaccaggaatacttggacctcagccaacctctcgaacagtattcacctagt

SEQ ID NO: 386448 - DNA, 100 bp, Homo sapiens
acctgttgccattatagagctggaattaggcaaatatggacaggcacttaaggaaagcttcataaaagccattggtgttggactaggatttgaattgcag

SEQ ID NO: 386449 - DNA, 100 bp, Homo sapiens
atcgacaaatcttatgataaacccgcggtagatgatgatgatgaaggcatggagacctcatttaaatcaaacggtattgagatggattgggttatgaaac

SEQ ID NO: 386450 - DNA, 100 bp, Homo sapiens
tggtcacggtccagcggtcacctacccccagcaccacctccagcccctgcgcctcggttaaataggattgcgaatcaggtggccattcagcggaagaagc

SEQ ID NO: 386451 - DNA, 82 bp, Homo sapiens
agcatccttcagaaaaagcatccccgaggaggaagacgaatcgttaaacatcttaggtcagcccctggactttcaccttctg

SEQ ID NO: 386452 - DNA, 101 bp, Homo sapiens
caaaattccttcagccaagctattgaagcagccttcatgaaactggacacaccagctacttcagatcccctctctgttcactttatccaaatgcatagatg

SEQ ID NO: 386453 - DNA, 51 bp, Homo sapiens
gaaggcaaagaacctctggtgttgaaagaccatgaaacccttgggcacgcc

SEQ ID NO: 386454 - DNA, 75 bp, Homo sapiens
ctggctctgctgctgccgccggcgaaggaggaggcgttgccggaaatctccaaattggacatccagagcagcatt

SEQ ID NO: 386455 - DNA, 88 bp, Homo sapiens
agagtctaaactcatccttaaaggggtcatactgctggtgccactgattaatgaacttgaatcagcaatacatcagctgtacaaacag

SEQ ID NO: 386456 - DNA, 98 bp, Homo sapiens
ggaattttgccgatttcatgactaaccagttgcacagccagagaacaacacatcacacacaggaaacagttgtgctcatgtgatgggggcctcagcac

SEQ ID NO: 386457 - DNA, 95 bp, Homo sapiens
ccggggcctgtcgcggttgccaagcgctcggcgcttggcgctggcgctggccaaggcgctacccgtacagtgaggacgcccgccagggtgagcag

SEQ ID NO: 386458 - DNA, 83 bp, Homo sapiens
ggggcgcagtctccaccaccaagcccgtgtctgtctctggccaagtcctgtatctgccatgtctgtggcgtccacctcaacag

SEQ ID NO: 386459 - DNA, 75 bp, Homo sapiens
acttccgccacttcaagctctataaatacgtcttcacaccccaggccactcttcacctccaccatgagcctggac

SEQ ID NO: 386460 - DNA, 96 bp, Homo sapiens
cgcttcactgacctaccccctggacctggtcagagcgcggatggccgtaaccccgaaggaaatgtctggccagcatgacccagaacttagagccac

SEQ ID NO: 386461 - DNA, 102 bp, Homo sapiens
gaggcctccccagccatgtggaactcgtctccatctggagtgcggctggtggggggcctccaccgctgtgaagggcgggtggaggtggaacagaaaggccag

SEQ ID NO: 386462 - DNA, 83 bp, Homo sapiens
attgtgtctgcttggtgtggagccatgaagaatccacattcatctcaatggaaggatcctgccttaagtcaacttatttgttt

SEQ ID NO: 386463 - DNA, 75 bp, Homo sapiens
aacaggaccacagaggttacactctgggtgtgttaacagggcacaaccattatgtgatgtgtgctcagttccacc

SEQ ID NO: 386464 - DNA, 74 bp, Homo sapiens
atgacttgaagcgctgccagtatgtgaccgagaaggtatacactgaatatcctcgaagaaattggtggtggcca

SEQ ID NO: 386465 - DNA, 74 bp, Homo sapiens
gaagacggggcgctggtgtccaagctcctggagaccatgcatctgaccgaagaaagccagcttccctctacaag

SEQ ID NO: 386466 - DNA, 90 bp, Homo sapiens
aatgggtactctttcctcgtggaatttgaagattctacagataaatcaggttacctacctgggcaaagtctccaccactggcatgcagtt

SEQ ID NO: 386467 - DNA, 82 bp, Homo sapiens
tggacacgtcccagctctctctgggcatctggaaagataacgaaggaggcccaacttcattcaataaggagcctgacggatt

SEQ ID NO: 386468 - DNA, 83 bp, Homo sapiens
aagggaaagtgatgtccctctgaaaactgaggaatttgaagtgaccaaaacagcaggtgagttgctacagtggctggagagac

SEQ ID NO: 386469 - DNA, 82 bp, Homo sapiens
aaagagatcaccgacaagatcaccacggacgagatgatcaaacgcctgaaggttgcacactgggccacagaggatccagcaa

SEQ ID NO: 386470 - DNA, 82 bp, Homo sapiens
cgcggatctggggccgtcctcaggctgaccccgcactacatctacccaccagccatcgtgcagcccagcgtggtgatcccag

SEQ ID NO: 386471 - DNA, 96 bp, Homo sapiens
gttaggagactgaatcaaggtccagagaaggtggaggaatcctgatactgagcggtgcagcttcaagcttaggaccacccaccatgcctatccagg

SEQ ID NO: 386472 - DNA, 100 bp, Homo sapiens
tcagtccttcacacagttccctggaaatggggatatgagactttctactcggaatatcctgagtgttgcgtggatgtaaaacccatttcacaagagaaga

SEQ ID NO: 386473 - DNA, 74 bp, Homo sapiens
aaatggatggctgagatagaacgtgatgacatcgacatgttgaaagcagaattacctgattctaggacaaagga

SEQ ID NO: 386474 - DNA, 100 bp, Homo sapiens
attcggaaagacacctggccagcggtccagagctgatgcaggtgaaaggtgtagcagtcactcggcctacacccacagcatcgaccttgtgaacccagcg

SEQ ID NO: 386475 - DNA, 82 bp, Homo sapiens
tctcctgaaataattctggagtcatgcctgaaatgccagaggacatggagcaggaaatgctgtctatgatttcttcattggc

SEQ ID NO: 386476 - DNA, 101 bp, Homo sapiens
atggcactctggcgggcataccagcgggccctggccgctcacccgtggaaagtacaggtcctgacagctggcctggagctgctgaagactgctattgggaa

SEQ ID NO: 386477 - DNA, 90 bp, Homo sapiens
tcctaaggttcaatgttcaagagatttctgcacctaatgaatttgatgtcatgtttaaactggaagtccccagaattcaactagaagaat

SEQ ID NO: 386478 - DNA, 75 bp, Homo sapiens
ctgtacaagctttcaaagtcaatagaatctggacgaggctagagaacagaaagaaaagagtcctccagaccagcc

SEQ ID NO: 386479 - DNA, 75 bp, Homo sapiens
ttccaaataagcggcataaagcaattgagaattcaggttgctccttgagggcaggacagttcttatggctttatc

SEQ ID NO: 386480 - DNA, 75 bp, Homo sapiens
gttcaatattcctgacttaaaggaccttcttcagattcgatcgtatgtgtacgcagaagagccaaatattgacat

SEQ ID NO: 386481 - DNA, 96 bp, Homo sapiens
tggcggagtcttccaggccatcaagggtttccgcaatgcccctgttcaccttgggcctgagctgtggtgtcggcagtggcaactgcagcaacagca

SEQ ID NO: 386482 - DNA, 75 bp, Homo sapiens
cgactcggtgattgaggacaagaccatcgagctcatggtcagcccaaggccaaccccactgtcactctgttcccg

SEQ ID NO: 386483 - DNA, 75 bp, Homo sapiens
ggaggagcaagtccgatggagaggctaagcagattgtggacggcaacgcaaagatgaccctgggaatgatctgga

SEQ ID NO: 386484 - DNA, 60 bp, Homo sapiens
atagcagtgctatgttactgcaatggcatgaaaaggtagaagaaggctggtggagtggaa

SEQ ID NO: 386485 - DNA, 100 bp, Homo sapiens
gtctactctgatgtcaatcttgagggctaggtggatattccatctattataaccaagaaactattaaaagcagcaatgaagcatatagaagtgatagtta

SEQ ID NO: 386486 - DNA, 75 bp, Homo sapiens
cggatgccctgcagtacctgcagaaggtctctggagacatcttcagcagctgccttgaggtgcagtgttggggat

SEQ ID NO: 386487 - DNA, 102 bp, Homo sapiens
ctatggtgaaacaccactgaagcattgccaaggtcagacacattctatgtgaaaaacatggcaaaatcatggaagccatggaaaagttaaagtctgggatga

SEQ ID NO: 386488 - DNA, 75 bp, Homo sapiens
ctgagactcctgctcagtgtagcattaagattcttctactcaaaacaaaagagccaacagaacagaagaaaatgt

SEQ ID NO: 386489 - DNA, 83 bp, Homo sapiens
ctgactatgtacatggatttagtggacggcatctttttgaaccaaattatgctgcaaatcaggcgggtgaaaatgaaagccgg

SEQ ID NO: 386490 - DNA, 100 bp, Homo sapiens
cgagtcccgagcgcacctgggcgccctgctggcaagatacatccagcaggcccggaaagatggattaattgcctctgaaggagccataagtcccgatttc

SEQ ID NO: 386491 - DNA, 100 bp, Homo sapiens
agaaaaaatcatccagtctctgaagctttgcccaggtgtcatggagaaactccagctgggcccagagattctgcagcgggaaaatccaaggcttatttat

SEQ ID NO: 386492 - DNA, 75 bp, Homo sapiens
agaagagtactgggtgtgattttgcagtgctggagaatctggtaaaagcaccattgtgaagcagatgaggatcct

SEQ ID NO: 386493 - DNA, 51 bp, Homo sapiens
gtcatcgagaagaacgagagcgctaagaagaaatttcctgacttgtttgtc

SEQ ID NO: 386494 - DNA, 100 bp, Homo sapiens; identical to SEQ ID NO: 102263

SEQ ID NO: 386495 - DNA, 100 bp, Homo sapiens
atttgttaaggattccaagtaactcttatttgttctttatagctccaagctctacagattcttcaaatatattgagaatagggatgttgcaaaaacagtg

SEQ ID NO: 386496 - DNA, 82 bp, Homo sapiens
gcggccgccaccgagcgtgctgagcaaccgcagcctccgcggccgagagtgcagcgagaaaaccaattctgtgtcctcggag

SEQ ID NO: 386497 - DNA, 74 bp, Homo sapiens
gaagtccttaaaacagcaggaaagccacagacccctttgcttctgtttttgggaatgaatcatttggaggtgga

SEQ ID NO: 386498 - DNA, 76 bp, Homo sapiens
gcagaggatggaagttcaaaggaggaggatgatgcagcatccaacgttgatgttgaacagcacactttagccaagt

SEQ ID NO: 386499 - DNA, 88 bp, Homo sapiens
gcggggcatcgtgtctcgaccgcgtcttctgagtcaggacattctgagcatgtgagacctgaggactgcaaacagctataagaggctc

SEQ ID NO: 386500 - DNA, 100 bp, Homo sapiens
ccgcccgcgcccgggaccgacccctctgctcgcggccgcgcctttgaggttcatcctaagttccactataaacaggctcatgactcgggcacagacactt

SEQ ID NO: 386501 - DNA, 100 bp, Homo sapiens
atccaagctttgcaacttacgtaaccttcccccacaagccctcattgagcaccatgaggaggcagagctctcaaaggtctatggccctgtgttcactctg

SEQ ID NO: 386502 - DNA, 87 bp, Homo sapiens
tgagaatgccaagactggccaagccactgtggcttctggcatacctgctggctggatgttggagtcattcgttgcccagtttgcagc

SEQ ID NO: 386503 - DNA, 83 bp, Homo sapiens
atgaaaacatcgtggccctgtacgacttccagagcactgcagtttcctcctgaaggctggctccggctctccctcaataatgg

SEQ ID NO: 386504 - DNA, 100 bp, Homo sapiens
ccaagtccttggctgctgagtggtgacagtagcccagcccgccggccagatgtgtcttgctgaatcagggctctcttatccctgccatcgacttacagtg

SEQ ID NO: 386505 - DNA, 100 bp, Homo sapiens
attccggagaatcgcgaggcagagcgggagcgcgcagccaggtgtcatggagaaactccagctgggcccagagattctgcagcgggaaaatccaaggctt

SEQ ID NO: 386506 - DNA, 50 bp, Homo sapiens
gaaaagcagagcaagggaacccagggccagctcttccgaggctccagcct

SEQ ID NO: 386507 - DNA, 82 bp, Homo sapiens
tgggatcccggccaccagcaattgtccgactaatagggatgccaaaggaaaaatatgatcctccagatcctcgcagaattta

SEQ ID NO: 386508 - DNA, 100 bp, Homo sapiens
tacctgcagcgccgtgtggcacgacacaaaaatcaggaagtgagctcacaatgactcaagctgccacatagtgttgattgtgaaatgccagttgaagcat

SEQ ID NO: 386509 - DNA, 83 bp, Homo sapiens
ccatacaaggaggcctcatagctgcaatttccacatcaagagtgtagataatggcatcagctgctaaggaatttaaaatggac

SEQ ID NO: 386510 - DNA, 74 bp, Homo sapiens
ttctgggagacgcacagctaagatgccaggacatcctggaagctgggaaaagcccacagaattcttccagtccc

SEQ ID NO: 386511 - DNA, 75 bp, Homo sapiens
tagacattgccaaatcccaagatgctgagcatggaggagcaggacttggagcgaaggttcgagctgctgagccgc

SEQ ID NO: 386512 - DNA, 74 bp, Homo sapiens
caaacataggatgttttggcgagagatgtattcagtggaggaagctggccgggtgagagcaaaactttcagcac

SEQ ID NO: 386513 - DNA, 74 bp, Homo sapiens
cacgaaggcaccgacgtcatcatgctgaccaccaatcagatccgtaagaggacgggaggggcaagctgcggcca

SEQ ID NO: 386514 - DNA, 82 bp, Homo sapiens
ttgagaggtcatgtggttggactacgctattacacgggagtagaaggattacggccaggagatacaaccagcactttctgtg

SEQ ID NO: 386515 - DNA, 90 bp, Homo sapiens
cagcctcccgagtggctgggattacagggggttttgtgctgctggatggggagacgttcgaggtgaaggggacatgggagagacctgggg

SEQ ID NO: 386516 - DNA, 75 bp, Homo sapiens
acacgggaggcgctacgccaggaccgacgggaagatggtcagtaggacagaaggtaacattgatgactcgctcat

SEQ ID NO: 386517 - DNA, 74 bp, Homo sapiens
tgttcatcgtcgggaatgcgggcagcggcaaatctcagcacagccatgacagtgcagatcctgctgaagctgga

SEQ ID NO: 386518 - DNA, 49 bp, Homo sapiens
gcgaagtacagcttatggatgggttttgaacgaagaatgtgatcagaac

SEQ ID NO: 386519 - DNA, 100 bp, Homo sapiens
gaaagaactggcaaaagtcactatcaagaaggaagatctggagctaatatttaattggttggggtcagataagaagaggagtgacaatcaagccaacagt

SEQ ID NO: 386520 - DNA, 90 bp, Homo sapiens
caccagccttccagcccttacggcccacgccgtaatcctggtgaccgagaaggaggaagagcaagcaggccctgagggactataagaagg

SEQ ID NO: 386521 - DNA, 100 bp, Homo sapiens
aaagtacaagaatactgaccttttccttatctgtgtctccttcctttcagaatggaaaaaggccctcttcaagcctggggtcttgctcctcagaacaaac

SEQ ID NO: 386522 - DNA, 98 bp, Homo sapiens
gaacagctgcagccccttgaacaggactcagtggcctttgaagatgtggctgtgaacttcacacaagaggagtgggctttgctgggtccatcacagaa

SEQ ID NO: 386523 - DNA, 100 bp, Homo sapiens
gggggagcgcggggcgacgctggctgcagggacccggtgacagcgtgagaggttctgggccggagaaggggcgacgttcgggcaccccccgaatggacaa

SEQ ID NO: 386524 - DNA, 51 bp, Homo sapiens
gaactacagcaaccttgtctcagtggattttctctgtgggcagttcttttt

SEQ ID NO: 386525 - DNA, 87 bp, Homo sapiens
gccgcgctggtggagaagcgccttcgctatctcatggacacagattgtagctgtctgcagagaggcagctcttctggctctggaaga

SEQ ID NO: 386526 - DNA, 90 bp, Homo sapiens
caggaatccaggtgcacccaattcaaggcctgccgttggctatagcaaatgccccaggctgctgctggagtttgacctactgatcttcag

SEQ ID NO: 386527 - DNA, 76 bp, Homo sapiens
gcctgggtgcccccaggccttaagccggagcagggaattcggcaccggttgagaggtagtgccaatgctgtgagga

SEQ ID NO: 386528 - DNA, 100 bp, Homo sapiens
tgcaaccccaccatactgcacgtggtgttcgaaatccgcaccactgatgacctcactgaggcctggctccaagaaaagttgtctttctttcgttgatctc

SEQ ID NO: 386529 - DNA, 75 bp, Homo sapiens
ctggtggaagaggcgtacctgcaacggacagccaagacgtagatccatccaagacttgactgtaactggaacaga

SEQ ID NO: 386530 - DNA, 100 bp, Homo sapiens
cccacgctgaacgagagggacacggagcaggagtattcactacccacctgagactgcaagcatcatgttgatggctaggatggtggccacagtgaagcag

SEQ ID NO: 386531 - DNA, 75 bp, Homo sapiens
gaacaaggatttgaagctggcagtctggttccagcaagacttcaaggactgcattcgtaggcaaaggttgaccca

SEQ ID NO: 386532 - DNA, 96 bp, Homo sapiens
gaaggagaacaccccgagcgaggccaaccttcaggaggaggaggagtggctgtaaggtgaagaagcatgaaactcagtctctcgccctggatgcat

SEQ ID NO: 386533 - DNA, 83 bp, Homo sapiens
gctaccagcggcgatggttcgtgctgagcaacgggctcctgagctactacagtatcccttttactattcagcgactatgtgaa

SEQ ID NO: 386534 - DNA, 75 bp, Homo sapiens
gcaaagaccttttccaggaactcacccggcgctgatcccgctggccctggaaggcacggacgtggggcagacaaa

SEQ ID NO: 386535 - DNA, 90 bp, Homo sapiens
ccggacttggaaagtcacccaaagccgccccaagtgcagctgataggaagatgtcttcaggaaatgctaaaattgggcaccctgccccca

SEQ ID NO: 386536 - DNA, 90 bp, Homo sapiens
ctggctccaaagagcttgacaaactacttcaagagctcacaatgtctctctgcaccaagctccatgactcaggatttgcctggagttcct

SEQ ID NO: 386537 - DNA, 74 bp, Homo sapiens
aagcctgctctagagcgcttcctgcggagacttcagctgctacaggagctgagagaccctaccctcactttccg

SEQ ID NO: 386538 - DNA, 82 bp, Homo sapiens
gtggagcccaaagacccctggagacatggcccagctgagagccagcctggaggttacccagcagcaggccacccaggccgaa

SEQ ID NO: 386539 - DNA, 83 bp, Homo sapiens
ccgtgcgcgtgcgcctgggggcaccgctgccgttccgagcgggctgacgcacgaggcacacaggaaggaggtggagcaggtgt

SEQ ID NO: 386540 - DNA, 75 bp, Homo sapiens
caacagcatacagccatctctcttccaagaaacggtgggagcccagagtatatgagatgtcttcagaggctcatc

SEQ ID NO: 386541 - DNA, 75 bp, Homo sapiens
aatgagaagcaggcagaagattgcatcacacgaggaggtgtctgcaaggatagttcaagtagtcactgctgaggc

SEQ ID NO: 386542 - DNA, 100 bp, Homo sapiens
cgctacactggcggagaacgggctcggccttccggagcagtactacagcctcacctggttcctgagccccatccttggcctcatcttcacacctctcatt

SEQ ID NO: 386543 - DNA, 100 bp, Homo sapiens
cgctttgccaagaagatggacaagatggtgcagaagaagaacgcgaaggtgacctgctgagaaaagtggtacaaatactgggaaaaacctgctcttctgc

SEQ ID NO: 386544 - DNA, 51 bp, Homo sapiens
agcggaaagactagatgccgatccaaaagttatgggctcaaagaatttatt

SEQ ID NO: 386545 - DNA, 75 bp, Homo sapiens
caccgtggtgacattgtatcattggtgtgaatcttggaagcaaccagtaccttttctctgtcatagtggatccta

SEQ ID NO: 386546 - DNA, 75 bp, Homo sapiens
ggaattcagcctcagtgatgtccatgaggacacattggcgtgagacctgggagtacgttgtgccaaatcattgcc

SEQ ID NO: 386547 - DNA, 102 bp, Homo sapiens
gatggcgcgaggccgcagagctaaatgggggcctctccagggagtgctctgttcacggctccatcgctgttagacactggggttgggaaatcaagcatcgtg

SEQ ID NO: 386548 - DNA, 111 bp, Homo sapiens
gggtgaacaacccgttcttgcctcaggccagtcgcctccaggccaagagggatccttcacccgtgtctggctactgcagcactggggtgtcagttgttggtccgacccaga

SEQ ID NO: 386549 - DNA, 100 bp, Homo sapiens
ggacgacatgcttttctatgtgcgccggaagctggcgtactccggcagcgaaagcggtgcagacgggaggaagtcctcctccgcctcctcctctctgcat

SEQ ID NO: 386550 - DNA, 98 bp, Homo sapiens
aggaaatccatttggagtgttccacctctagatacagaacagttttggaatgaacattgccagtgctacaattgcactagtggggactgcttttctct

SEQ ID NO: 386551 - DNA, 101 bp, Homo sapiens
tttctacagagaagaaggaaacaaaaaatttcaggagaaagattacacaggagctgcagtgctgtactctaaggtgcccctgggcgctgggattgctctag

SEQ ID NO: 386552 - DNA, 97 bp, Homo sapiens
caagcaaccctgggatcccagacatcgtcgtgggagaaattagagaagaatctttctgataggcttggaatgggtaccacagaccatgtcatcgtcc

SEQ ID NO: 386553 - DNA, 89 bp, Homo sapiens
gattttcagtcaaccagttagatagtgaccactgggcacccattcattatgcatgctggtggataagattgtggaccagctgcagcagt

SEQ ID NO: 386554 - DNA, 75 bp, Homo sapiens
gtgacatctgatgctgtggaacttgcaaatcgaaggtgcaggtgatggtcctaccagtgtgtctgttgaggtcac

SEQ ID NO: 386555 - DNA, 98 bp, Homo sapiens
taatgttatacaggctctggaaaaacatgaagattttccagcaaataacattgtgaagttcctggtaggctttaccaacaagggtacagaagatttta

SEQ ID NO: 386556 - DNA, 100 bp, Homo sapiens
agcagttttctcagctgcctgctaacatagctgtttgcagttctaagaaaccaggaatggatctggcagacacctatattatgtttgttcggcaaaacca

SEQ ID NO: 386557 - DNA, 75 bp, Homo sapiens
acttcattgactgtctagtgaggggcaccaccacgaggcgatttgtgggccataccaaggatgtgctgagtgtgg

SEQ ID NO: 386558 - DNA, 75 bp, Homo sapiens
gaaacaatggcatttacagaaagagtcaacagcagtggcaacaggttcctcagtggtgtgctgaatattgtcttt

SEQ ID NO: 386559 - DNA, 100 bp, Homo sapiens
cattcaagcagcagaaggtggaggacttttatgacatcggagaggagctggggagtaaacaaatccgagctatgctgggccagttcagccaggcagaagc

SEQ ID NO: 386560 - DNA, 75 bp, Homo sapiens
ctagagaagtgctgtgccgctgcagatcctcatgaatgctatgccaaagtggtgacagatcagtcagtgaaagca

SEQ ID NO: 386561 - DNA, 75 bp, Homo sapiens
gattagatgatccaagtcaccaagaaattactgtctcaagtgatacgaagcaaaacggacaagtcggtttttaag

SEQ ID NO: 386562 - DNA, 75 bp, Homo sapiens
ggagaggccctcagcttgtctgcactggcagtgacgatggcacagttaaggaacgtcaaggtcgtgggaaataaa

SEQ ID NO: 386563 - DNA, 75 bp, Homo sapiens
agttctgcgttttgccagtcacctctcaactgtgtgccaaaggcatcctctggtatcacgattccaaaaccccca

SEQ ID NO: 386564 - DNA, 110 bp, Homo sapiens
cactcgggcctctggaggatctgctgcctggaaggctcttctcaaccatctgtgagtccaggggaaccgtctccaccatccatccatccaggaaaatcagacttaatagt

SEQ ID NO: 386565 - DNA, 74 bp, Homo sapiens
tggaaccagtaggggcaagaatgtttgtactgtcctggatgacaggttttacacacgctggaaagattgggaat

SEQ ID NO: 386566 - DNA, 83 bp, Homo sapiens
actccaggtccgacccgcgaacccctctgggatccccgccgctctgtctacaacccgaggctgaaggtgatgtggccgccctc

SEQ ID NO: 386567 - DNA, 75 bp, Homo sapiens
acacgggcgagaagccctacgagtgcaacatctgcaaggtccgcttcaccaggcaagtgaaccggagcaaacgac

SEQ ID NO: 386568 - DNA, 100 bp, Homo sapiens
tgacctgtaggtattgggagatccacagctaagatgccaggaccccctgggaagcctagaaaaatggtgtatggttgaagcctggaattttttgcggcaa

SEQ ID NO: 386569 - DNA, 82 bp, Homo sapiens
gtggccttagctgtgctcgcgctactctctctttctggcctggaggctatccagcctatccagtcagttcgctgctattccc

SEQ ID NO: 386570 - DNA, 75 bp, Homo sapiens
acaattcccctgcctcatacatcttccatcctgagaatgcagtggtaaaaccaagactgagaatgaggaaaaaac

SEQ ID NO: 386571 - DNA, 98 bp, Homo sapiens
tccgcaaggccgcccgggaactgctgacgcttgatgagaaggacccacggcgtctgttcgaaggtcttgaggaccggcccagctcaggctcctggggc

SEQ ID NO: 386572 - DNA, 100 bp, Homo sapiens
cacccagcggaccctggccaggccaggcccggagcctgccccagccacaggtctcctctgagcctccggcctccataagacccaaaacagatgacacctc

SEQ ID NO: 386573 - DNA, 98 bp, Homo sapiens
ttggatcatttgaagtggtgtctacacttataaaagctgcctctaagaatcaaacttcactcttgggagaaccaccaaaagaaattcggctcagtaaa

SEQ ID NO: 386574 - DNA, 100 bp, Homo sapiens
cagcatggctacttcatattttggaaagcagtttttaagacaagatcgcaaaagtggccgcacagccctgcatttggcagctgaagaagcaaatctggaa

SEQ ID NO: 386575 - DNA, 100 bp, Homo sapiens
aaaaatggaaacctacatcaaattggaaaagcttggagagatttctgctaacagtactcggcctgctcgctggtataccaaacttggattctttcctgac

SEQ ID NO: 386576 - DNA, 98 bp, Homo sapiens
agcaggagcggctgggcatcctcctgagactccggggtcagacgcccactccagatggagttcgctcttgttgcccaggctggaatgcaatggcatga

SEQ ID NO: 386577 - DNA, 75 bp, Homo sapiens
ctaccggactacatgtcggaggagaagctgcaggagaaagaacctttcagctcttggggcattggtgagtctcag

SEQ ID NO: 386578 - DNA, 75 bp, Homo sapiens
attgatggcatccaagccatatatgaaggaacccagccagccggcggaatgcaagcagcagtaggaagcggaggc

SEQ ID NO: 386579 - DNA, 100 bp, Homo sapiens
aaagccacatccagaccatcaccagcatcgtcaaaaaactcagccaaaatattgagactgttggcaagagtagcaagatgctgcagcacattgactatag

SEQ ID NO: 386580 - DNA, 97 bp, Homo sapiens
agctccccactataacagttgctgccgccggaagtacagacaacctcatcagccttgaaaggtgccatccagttaggcattacccacactgtgggga

SEQ ID NO: 386581 - DNA, 75 bp, Homo sapiens
agaagatcatcattaaggacggaggcacgattcatgaatcagcattacgagccaagaacagaagacaggtggaaa

SEQ ID NO: 386582 - DNA, 100 bp, Homo sapiens
gccaccgcttcctggagggcaaaatcaagctggttgtcttcttgcctgccctgtgtcgtaaaatgggggtcccttactgcattatcaagggaaaggcaag

SEQ ID NO: 386583 - DNA, 100 bp, Homo sapiens
gttccatggatcagaaggcagacaagcagcttttcagatgcaaatgtgggtaattccagaattgattggccataccattgtcactgtattactgctcatg

SEQ ID NO: 386584 - DNA, 74 bp, Homo sapiens
caccaccggcaaggaggacacgggcacctttgacaccgtcctgtgggccatagattccttacatggcttgacag

SEQ ID NO: 386585 - DNA, 100 bp, Homo sapiens
cgccgccgccgccgccttctcctcgtacgtgataatcagcaactgctgtgatgagatgctgcctttaatgctgctgcatgtggtcaaacctccactccca

SEQ ID NO: 386586 - DNA, 100 bp, Homo sapiens
gccctgaaacaggagggagcgcggaccgtataatagacgctggccccaaaggaaactactctcgatttatgaatcacagctgccagcccaactgtgagac

SEQ ID NO: 386587 - DNA, 100 bp, Homo sapiens
tcttacaaagctgccaggagaaatggaaaaacaaaaatgaatgaatcaagagtgatttgttaatttaactgcctgtatccatggatcagctgctcttcta

SEQ ID NO: 386588 - DNA, 98 bp, Homo sapiens
cgatgtgccaccgaggctgaggatgatggtagattgccaggagccttcacgtaaatgggtccagtcatgcctcccagtaagaagccagaaagctcagg

SEQ ID NO: 386589 - DNA, 75 bp, Homo sapiens
agagtaatatgctatgactgaggcggtgaggctgaagcaacagcggggcccactgaggcgctttgctttcctgag

SEQ ID NO: 386590 - DNA, 101 bp, Homo sapiens
ggacacgcaggatgagccccgcgaccactggcacattcttgctgacagtggccataaaatgcagtaaaaacaaatccagttcccaagaagctgtacaaatg

SEQ ID NO: 386591 - DNA, 90 bp, Homo sapiens
cttctgcagtccctcgtccagccacccccaggtccctttctagagataggagaagagagagatcgctgtctcgggagagaaatcacaagc

SEQ ID NO: 386592 - DNA, 100 bp, Homo sapiens
cgatggaggagctgagcgctgatgagatatcaacaagtttctttggatggtccggattggagggagcacagatacaggcaaacatatcaaggagaatgac

SEQ ID NO: 386593 - DNA, 90 bp, Homo sapiens
gtcagctgggccgcaggggcgcgcagcgcggggagctgccaggaggaaaagctgaccagcaagaagaacgtcggagacaaaagcagatga

SEQ ID NO: 386594 - DNA, 100 bp, Homo sapiens
ccctgcatatgattggctctttagctgaaatacttctgaagtggaatgcagtagccctctgggcctgggatattgtggttgataactgtgccatctgcag

SEQ ID NO: 386595 - DNA, 100 bp, Homo sapiens
ttcctcctcggctgcgccgcgtgtcctcggagcgcggtccctgtattggtctcctgctcctagaggtcgccactgggacactgtgaaccaggagtgagtc

SEQ ID NO: 386596 - DNA, 113 bp, Homo sapiens
cggaaatctggaaccgggatggcgacgtctacactgagtcggaggcgaagaatgtatgacaacatgtccacaatggtgtacataaaggaagacaagttggagaagcttacaca

SEQ ID NO: 386597 - DNA, 100 bp, Homo sapiens
gggagagtgagagctccccaggggagttctctgtgtctgtgaaggagaagaaatgggtgaccgttggtgacacatccctacgaatctacaaatgggtccc

SEQ ID NO: 386598 - DNA, 90 bp, Homo sapiens
atcttgaaaagctgccagaaaggtctgtttctgtcgactgtggaccacttatgtgcgatccgtggaccacttgcgtgcgatctgtcggcc

SEQ ID NO: 386599 - DNA, 100 bp, Homo sapiens
taagcaaagctgcctcgtgactttcgaagataattccaaatactgggtcctatggaaggacatacagcatggcaatgcggtgtgcagagggtgcttggtg

SEQ ID NO: 386600 - DNA, 103 bp, Homo sapiens
ggaaaccggtagcgcttgcagcatgaacccttaggagaaatcttgagagtggacagcaattgtgaagatcgccagagagttctgtgtttcatcaccgccgaaa

SEQ ID NO: 386601 - DNA, 46 bp, Homo sapiens
gacagttggaagctcagacatgaaattggagatattgctggtgttg

SEQ ID NO: 386602 - DNA, 83 bp, Homo sapiens
aggacatcaacttccggccgcagatgtcccaggtgatgtgtccaatctagatcccaacttctcatttgaaggcaccaaactgg

SEQ ID NO: 386603 - DNA, 80 bp, Homo sapiens
aagatggactggaaggtgcctgagcctgagggccaaacaagtcccaagagaaggaccatgaaaaagctgaatttgaggta

SEQ ID NO: 386604 - DNA, 98 bp, Homo sapiens
cggggcaagaagcacagcatcatcctaaggacgcagctgtctgtgagggtccatgcctgcatcggagtgcctgtgaagaaaacggggtattgccctga

SEQ ID NO: 386605 - DNA, 100 bp, Homo sapiens
agctgttactccagccaacactgatcttgcaaactcagatgcgctgaagctagctaaagaagttgatcctcaaggtatctttcagatgaaggcattgaag

SEQ ID NO: 386606 - DNA, 101 bp, Homo sapiens
ctcggcctcggcctccgacacggtactccaaagattcaggtttactcacgtcatccagcagagaatggaaagtcaaatttcctgaattgctatgtgtctgg

SEQ ID NO: 386607 - DNA, 87 bp, Homo sapiens
ggaggcgacgccggggacgcccgcgcgacgagcaggtggcggcggctgcaggtgtgttgtgctctccgaccccttgaaggactcttc

SEQ ID NO: 386608 - DNA, 100 bp, Homo sapiens
acagcggcgagcagaactacggcgagcggatctcacattcttgaaggtggcattgaagagcactaagatcggaagatgagtgagcttgaccagttacggc

SEQ ID NO: 386609 - DNA, 50 bp, Homo sapiens
gggccggaccgaccccaggcggcgcagacactcgcctatggggacatgaa

SEQ ID NO: 386610 - DNA, 100 bp, Homo sapiens
ctcttgagtaaatacctaaaagtgggcttgctggaactgctatgatcttctggtcagaaagaaaagacttattgttctcttcagccactggttacttcat

SEQ ID NO: 386611 - DNA, 101 bp, Homo sapiens
gtgaagctaaactcaatgctgctgtgtgggaagaagatttgtaaagaaaactcttagtggtagaagatgatgaagatgactttcctacaacgcgttctgat

SEQ ID NO: 386612 - DNA, 90 bp, Homo sapiens
cagtggcatctaccacatcaaccaggagatcttccgcatgtttcccaaggagtggaagctggacacactatgtgacttgtatgaaaccct

SEQ ID NO: 386613 - DNA, 83 bp, Homo sapiens
cccagacgcggcacagagagggcctgggagcttgctgcagcttcagctctccctgtccagccgcctgcagctgaccctgtacc

SEQ ID NO: 386614 - DNA, 82 bp, Homo sapiens
aaggagctaaagcagcgtgcgttcagccctgggagagaaaaggaacagttccgtaagctctttattggtggcttaagctttg

SEQ ID NO: 386615 - DNA, 50 bp, Homo sapiens
cggcgaaggaggaggcaagaggcggagacgaaaccagacagagggtcaag

SEQ ID NO: 386616 - DNA, 100 bp, Homo sapiens
tgcccaggctcgcctcgactccaaatggttgaaaacagatatacagaacacacatgcaggacttgaaagatgttactaataatgtccactatgagaacta

SEQ ID NO: 386617 - DNA, 96 bp, Homo sapiens
gaaaaatgaggaagatgttgcagagttgtcaatttctccttcagacaatgcagtggtcttaacaaggacctgttgcaatgagagtggcaaaattag

SEQ ID NO: 386618 - DNA, 103 bp, Homo sapiens
ggagcagcacttccacagccaagtgcgggagtccacgagctttcagcagaggccaaggcagcattgcttgaatttgaagaaagggagcgacagcataaacaag

SEQ ID NO: 386619 - DNA, 100 bp, Homo sapiens
caggcagtggagcgcgccaagcaggtcaccatgacggagctgaacgccatcatcgggggaagtttggcgtcatttgcttggaagacctcattcatgaaat

SEQ ID NO: 386620 - DNA, 83 bp, Homo sapiens
gccaaactcagctcgcccggtttctcggcgaatgacagcacaggtgctggagaatctggtaaaagcaccattgtgaagcagat

SEQ ID NO: 386621 - DNA, 75 bp, Homo sapiens
aacaagtgcttcaggaggcatatcgggtgctgaagcatggcctgtatgagaagaaaaagacctcaagaaagcaac

SEQ ID NO: 386622 - DNA, 75 bp, Homo sapiens
cccctattgtaagtgcagatggaacacaacaggtttgtgattcagacactatgcttgacccagcctcatctgtgg

SEQ ID NO: 386623 - DNA, 80 bp, Homo sapiens
tagtccacagtcttcctctataggtgttacacataatattgcattacttcgagaggtgataatcaactcacgctttgtaa

SEQ ID NO: 386624 - DNA, 139 bp, Homo sapiens
ggagttactgaaagatgagggactgcagtacttggagagactctatatgaaaaggaactccctgacatccttgatcttgtagaaaatttcagctgtagcccttggactagaagctgaaataacagaagctgtgtacgat

SEQ ID NO: 386625 - DNA, 83 bp, Homo sapiens
cacgttataatcagattttgaccaagcattttgtaaggacaaagcaggacctcataaggaaatctacccctatgtcatccagg

SEQ ID NO: 386626 - DNA, 86 bp, Homo sapiens
cggtttacagcgaagtccacccagcgtttccgagacaatgcagatcttcgtgaagactctgactggtaagaccatcaccctcgagg

SEQ ID NO: 386627 - DNA, 80 bp, Homo sapiens
gagctgcgccggcgagaagcggccgagccagcagcagaaatctcctgcaaagaagctgagccatgcaattagtaaatctt

SEQ ID NO: 386628 - DNA, 75 bp, Homo sapiens
cacagcagaatttatagaggaatgttatgaaaacctggccttcctggggtgtgactttgacagctgctattgggg

SEQ ID NO: 386629 - DNA, 75 bp, Homo sapiens
tgtgcgcagcacagaactgccaaaggccctgcaaggacaagacccactccggatacttctccagcctgtaccccc

SEQ ID NO: 386630 - DNA, 100 bp, Homo sapiens
agaacagctatctcgggagaaacaacaactgctacatctgttggaggagccaactagcatggaagtgcagctgcaagctttcttcctggtggcagatgac

SEQ ID NO: 386631 - DNA, 78 bp, Homo sapiens
ccgcagctgcgggtccgggattcccagccatggcagattcctccgggcagcaggggtctgcggaagagggagctgctg

SEQ ID NO: 386632 - DNA, 75 bp, Homo sapiens
gctaatggcacaactgtccacgtaggcattcaccccagcaagaatgtctacacaaggaagtacaggatttggctt

SEQ ID NO: 386633 - DNA, 75 bp, Homo sapiens
gatcacgtcgcagtcctaggaagtccactagcagcttctaaggggacccaaccagagcctggcctgggagccagg

SEQ ID NO: 386634 - DNA, 75 bp, Homo sapiens
caactgcaacgtctgggatgcactcaaagccgaccgggcagaccccaagctggagctgcaattccctaggacccc

SEQ ID NO: 386635 - DNA, 110 bp, Homo sapiens
cgggcccctcggactgtgccggcgccgcacccgaggctctcgccagcccggcgccccggtgctgaggtaagaatgattgatgttggctgatattggagtgctcattcaca

SEQ ID NO: 386636 - DNA, 75 bp, Homo sapiens
ctgggctgcaggctctcggctgcagcgctggaggctgacccgcggctgattgagtccctctcccagatgctgtcc

SEQ ID NO: 386637 - DNA, 100 bp, Homo sapiens
aactgcggcagagtctccgcagatttgcaaatacacacactgctccagccacagtggttcttgtgtcaagtacaggtttgcagattccgccagcagcaca

SEQ ID NO: 386638 - DNA, 152 bp, Homo sapiens
ggtgtctatggtgagatttggggaggatcccagaccttaacagccctttggttgaaacctctcacaatgtggcagggtgttcctgaaaagaaggtacttccaatcaccgtccccaagtcaccagcctttgcattgaagaacagaattcgaat

SEQ ID NO: 386639 - DNA, 60 bp, Homo sapiens
atgaatttgcaaaacttactgtagcatctggctattaagtgccactggactcagagggca

SEQ ID NO: 386640 - DNA, 88 bp, Homo sapiens
cggcgggagccctcgcgacgcgcccggcccggagcccccagcgcagcggccgcgacttaattcagtgcacaaatgagatgaatgtgaa

SEQ ID NO: 386641 - DNA, 82 bp, Homo sapiens
taagaaagaagatgttaactttcaggcagtgtgtgaagaaaccctgaaggtcgggcctcaagtaggtctctttctagatgca

SEQ ID NO: 386642 - DNA, 89 bp, Homo sapiens
gatgtgagcaacacgggaccgagagaagaagaaggaggttcctgctgtgccagaaacccttaagaaaaagcgaaggaatttcgcagagc

SEQ ID NO: 386643 - DNA, 100 bp, Homo sapiens
gagacacaccagaggagctatttggacaggtcatcagtgggctccacgctggccaggaggatgaaaggccccagctgggggctccttgccaccagtgctg

SEQ ID NO: 386644 - DNA, 98 bp, Homo sapiens
ccccgtacccatggctctgataatggaaccggtgagcaaatggtctccgagtcaagtagtggactggatgaaagccaaaattgaccaagaggcagagg

SEQ ID NO: 386645 - DNA, 100 bp, Homo sapiens
aaggtgctaatagtagctggccatcacaactggattgtagctgcatatgcccattttgctgtgtgttacaggggcaagattcttgccaagagaattaatg

SEQ ID NO: 386646 - DNA, 49 bp, Homo sapiens
cgacgcaagactgtcccggcccgggaatccagcactacgccctgccctc

SEQ ID NO: 386647 - DNA, 82 bp, Homo sapiens
aactgcccagcgtgaccagtggccacctctgcagtgtcttccacaacctggtaccccgagattttccttatgaagaggactc

SEQ ID NO: 386648 - DNA, 88 bp, Homo sapiens
cgagcaggcggcgcagtacaccaacgcggtgcgcgaccgggagctggacctccggggttgctgcttttgctcagaggacatccatgac

SEQ ID NO: 386649 - DNA, 56 bp, Homo sapiens
ccaggcagccgacattctgttgtacaagctcccaggccagtgccagtacttgggct

SEQ ID NO: 386650 - DNA, 101 bp, Homo sapiens
gggccggagcgcctccttcgcaggcttcagcagtgcacagagccggaggatcgcgtcgtagttcccccgctccctgggaaagcgtttttgcgtcagcttcc

SEQ ID NO: 386651 - DNA, 82 bp, Homo sapiens
agcgggagccgggaggagagctctcctgggaaggcctggacagcgagtccgcctccagcagcatccgcttcagcaaggcctg

SEQ ID NO: 386652 - DNA, 100 bp, Homo sapiens
gtctcagaactgttccttcagccaaagaaacaagccgtggaataggtgtatcaagtaatggtgcaaagcctgaaacttcacagagaatgcagttgtcttg

SEQ ID NO: 386653 - DNA, 51 bp, Homo sapiens
taaacgggaaagattgactagtttcacagatcttggcatcggaaatggaac

SEQ ID NO: 386654 - DNA, 100 bp, Homo sapiens
cgactgtgctcgctgctcagcgccgcacccggaagatgaggctcgccgtgggagccctgctggtctgcgccgtcctgggaggccactgtctgcagctccc

SEQ ID NO: 386655 - DNA, 50 bp, Homo sapiens
gccgccatccacctctatgtcaaagtccccatgtgagagcagcagaggcg

SEQ ID NO: 386656 - DNA, 100 bp, Homo sapiens
aaaagtagaaataaatgtcagtactgtcggtttcagaaatgccttgcagtggggatgtctcataatggtatcagcatagtgttgagtgggcagcagagct

SEQ ID NO: 386657 - DNA, 83 bp, Homo sapiens
tggacaccaaacatttcctgccgctcgggatgctgccttgggtctggaaactgttagaggaaaccccaagaggtgcaggcact

SEQ ID NO: 386658 - DNA, 50 bp, Homo sapiens
cctcccaggtagctgggattacaggatttagcatccagggaagatgtcgg

SEQ ID NO: 386659 - DNA, 98 bp, Homo sapiens
gtctgcggccaagactccgtcctgcaaggaaggagtgattggctgctggtcctgccctgtccgaggaggaggacggaacccacccaccaagctgtgga

SEQ ID NO: 386660 - DNA, 96 bp, Homo sapiens
gtcaaagagcagagcatcctggaactgggatctctcctggcaaagactggacaagctgcagaaagggagtttcgtgctccaactttggcatcccta

SEQ ID NO: 386661 - DNA, 74 bp, Homo sapiens
cccaaggagcgcctggctcttctccacaaagacacaagttccacctggtgccaagcatcaacaccatgagtggc

SEQ ID NO: 386662 - DNA, 89 bp, Homo sapiens
tagtcgcctctctttcagcagttacccagatgtcatcgcaacagataaagaagacgttgccttcaaagacctggatgtggccattcttg

SEQ ID NO: 386663 - DNA, 82 bp, Homo sapiens
cacaggccgtcgctatgagcgggaccaccctgggcacagcaggcatcggaggtgtcgtgaaaactacccctaaaagccaaaa

SEQ ID NO: 386664 - DNA, 96 bp, Homo sapiens
ccgctgtgcccgggcctgcaccatgagcgtcccggccttcatcgacatcagtgaagaagatcagaaatgcactcggtgatggaaagagagccacta

SEQ ID NO: 386665 - DNA, 130 bp, Homo sapiens
atttttccatctaattatgacctccttcgccacttacagtatgcaacacattttcctatacctctggtcagcccaaggccaaccccactgtcactctgttcccgccctcctctgaggagctccaagccaa

SEQ ID NO: 386666 - DNA, 90 bp, Homo sapiens
aggtccctggcgagccccttgcagagtgcctggaagagctgggatgtctggttgagtcctatggcatgaatgtttgccaaccaaccccag

SEQ ID NO: 386667 - DNA, 50 bp, Homo sapiens
taccttggtcccagagtcatcatgaagttgactatattgtggagtatgac

SEQ ID NO: 386668 - DNA, 83 bp, Homo sapiens
attttcagcagagctgagtaaaacttcaggttgttgatcattatgaaaatcctagaaacgtggggtcccttgacaagacatct

SEQ ID NO: 386669 - DNA, 101 bp, Homo sapiens
gagatggaagtgatgtaccatcatgggtagcctttgataaacagaaaaattgtatggcgacttcttgagctggaagctagaggaaacccttgcccagttcc

SEQ ID NO: 386670 - DNA, 82 bp, Homo sapiens
gggacattattgcgcgtggaacggctgcttttggaagggagtgcatccgccccaacccttttccccctcgtctcctgtgaga

SEQ ID NO: 386671 - DNA, 83 bp, Homo sapiens
ccaggacaatggggacccgggacgacgagtacgactacctattcaaaggtctctaattaacagaagatggcaaagcccagcca

SEQ ID NO: 386672 - DNA, 90 bp, Homo sapiens
ccaaactgcaagtgtatattgttcttggccccccagggcccgtcagtggcctgaggagatggttggatcattccaaacattgtctcagtg

SEQ ID NO: 386673 - DNA, 75 bp, Homo sapiens
ccgaagaagagaccatccatatttccagttctcagcacagatattctacacctcacgccttcacctttaacacct

SEQ ID NO: 386674 - DNA, 74 bp, Homo sapiens
gaccaactggtggaacccctggagacgagttgtactgctgtcacaggaaatggacgctggattacaagcatggc

SEQ ID NO: 386675 - DNA, 75 bp, Homo sapiens
gcccacccctcctgtaacccagcctgtttcacttcttggtgcctggaatacttattaagaaacgatgcaaatcca

SEQ ID NO: 386676 - DNA, 88 bp, Homo sapiens
cattctggccaatcatgcagatcctaacagctgtcggaaaaggtaacagaagatggaactcgaaatcccaatgaaaaacctacccagc

SEQ ID NO: 386677 - DNA, 75 bp, Homo sapiens
accgccctctggccgttgcctcaccggtgcctcagtgaaggagccctctctcctgatgggactgtgctggctact

SEQ ID NO: 386678 - DNA, 75 bp, Homo sapiens
gtcttcaatgacttccttatgctctctaatacccagttcattgagaattggatcatctccgaattggcttgttac

SEQ ID NO: 386679 - DNA, 100 bp, Homo sapiens
aatccggcagtgaccgtgtgtcagaacaatcttgaatcatgaagctactaaccagagccggctctttctcgaggctgaggggatctggcggtggagcgct

SEQ ID NO: 386680 - DNA, 111 bp, Homo sapiens
aagccagactacagctggttcttgaagctgctggtcctgggaactccaacaagggagcaaatcagagaaatgaacccaaactacacagaatttaaattccctcaaattaag

SEQ ID NO: 386681 - DNA, 100 bp, Homo sapiens
ttgtggctacacttctggccagtttgacctgggtggttgatttgctgagatatttttcctgggccgagccccagttgaaggcaatgaaagcattacagca

SEQ ID NO: 386682 - DNA, 100 bp, Homo sapiens
tagaagtggtgatgcaagaagtttctaggaaaggccggacaccaggcgtggtgaccaagatgaagatgcagaggaccattgtcatccgccgagactatct

SEQ ID NO: 386683 - DNA, 83 bp, Homo sapiens
atagcgacgacgagatggtggaggaggcggtggaaggattttttatcaagcagaaatgcatcgaacaacgagaatcaagatca

SEQ ID NO: 386684 - DNA, 100 bp, Homo sapiens
caagctgtcatcacaaaagagttgattgaaattatctctggtgctgcagctctcattagtgccagcagtagttcccaagggctgtctcagccatccaccc

SEQ ID NO: 386685 - DNA, 51 bp, Homo sapiens
cgcagtggtcgcttcttctccttgtgtctagttctggctcctaccagagag

SEQ ID NO: 386686 - DNA, 90 bp, Homo sapiens
tgaatgccaatgtgtggtccaatgtagtgatgaagaatgacaagttggatggcttgaggactggtactaaaaggaaacgtgactgggagg

SEQ ID NO: 386687 - DNA, 75 bp, Homo sapiens
aacctgcagaagaactggcttcgggaattttaccaggtgacgcggcgcacggcgcggatggtggccgagtggcag

SEQ ID NO: 386688 - DNA, 73 bp, Homo sapiens
ggaggaggtccagtgtaagcccagggacagccaggcagcttccatgaggcaggctgaacctgcagatatgcgc

SEQ ID NO: 386689 - DNA, 75 bp, Homo sapiens
ccagtatgcatctcaagatgtgactacatttggtcaattttgtggaacctgtgggcctcaattactccatgttta

SEQ ID NO: 386690 - DNA, 50 bp, Homo sapiens
atggcgccgtccacgccgctcttgacagggccgttgctccagggagaact

SEQ ID NO: 386691 - DNA, 75 bp, Homo sapiens
acagggcagaggaaaatgcaagaagactgatggagcaggcttgcaatattaaagaacagtaagaggaccttgtgc

SEQ ID NO: 386692 - DNA, 82 bp, Homo sapiens
gaagcttgaaagacttggtaatggcgacgggtttgggcgtgatggtgggcatgggtcagaaggattcctatgtgggcgacga

SEQ ID NO: 386693 - DNA, 100 bp, Homo sapiens
tcaccattctaagaatgaaaggccagcacgtactaaggctcgtacgtctgcatcgattatcttacgtggggcaaatgatttcatgtgtgatgagatggag

SEQ ID NO: 386694 - DNA, 82 bp, Homo sapiens
atcaaggacatggagaagatgttcaagcagcgccatgtcagaaccggctggggatgtccgtcagaacccatgcggcagcaag

SEQ ID NO: 386695 - DNA, 100 bp, Homo sapiens
tcaagcaggttttaaatcaagatttaacattccaacacataaaaattatttatccaacagctcctcccagatctgaaatagctcaactcagtcaagaaaa

SEQ ID NO: 386696 - DNA, 88 bp, Homo sapiens
actgtttgatgctgaacttcaccgttaagtatctggagtccatctttcaccatcttctcctgagattgtactggaccgtgaccactct

SEQ ID NO: 386697 - DNA, 100 bp, Homo sapiens
agtgtagcagcattggttttccaaaaaatgtgagactttttcttggacgaattcaggttttacacacgctggaaagattgggaatcatggtattctcaga

SEQ ID NO: 386698 - DNA, 82 bp, Homo sapiens
caatatccaggagctcaatgtctacagggcccttggaagaaaatcctcgctgtgtccaggctgaggcggggggctaatgaca

SEQ ID NO: 386699 - DNA, 100 bp, Homo sapiens
aatcttccaaactacggtcccttatatggtggagagaatctcaaaaaattatgctcttcaggatggccaggccatgttatgggatctcaacgaaggcaaa

SEQ ID NO: 386700 - DNA, 75 bp, Homo sapiens
cagcgttctgtggttgtcaacagacttcaggacttgacactccgagacctggagaagcaggaacgggaaaaagct

SEQ ID NO: 386701 - DNA, 82 bp, Homo sapiens
catcattccttggggcaaaatgtggacaaggctccctgtgctgtcaggaatctacaggacttggctcgtatttacattcgac

SEQ ID NO: 386702 - DNA, 82 bp, Homo sapiens
tgaaagcccaaatcacctgtacttggtcatgcagctcatttatgacattaacagagaacaggactatgtcaagaattctgag

SEQ ID NO: 386703 - DNA, 98 bp, Homo sapiens
gacgacgtttcttttctcatggaaggttgtgcaggaccagcgttccctgtgcaggcgccactgcgtttcctgcagattccgaccggcactgcaacgga

SEQ ID NO: 386704 - DNA, 100 bp, Homo sapiens
ggcttcaccagctacccctgggaccgggaaatctaagttaatgacagttcggactatcacaggaaatatctactatgcaaggtcaggaactaagattatt

SEQ ID NO: 386705 - DNA, 76 bp, Homo sapiens
cgatgtgatcgccaaccagcctgtcgtgatcgacaacgagttgcgggagcttcaggacgagaaggcagagctgcag

SEQ ID NO: 386706 - DNA, 60 bp, Homo sapiens
agaccaggcagctgcgctcttgacagccaggtaccaggacacagcattgttggttttgcc

SEQ ID NO: 386707 - DNA, 75 bp, Homo sapiens
gccttagctgtgctcgcgctactctctctttctggcctggaggctatccagcatcttgtagaaaatttcagctgt

SEQ ID NO: 386708 - DNA, 100 bp, Homo sapiens
cattttctacgtgtgtgttgagtgcaccatttgagaattgagaggatccagaatccagatctctggaatagctaccaggcaaagaaaaaaactatggatg

SEQ ID NO: 386709 - DNA, 75 bp, Homo sapiens
gcgggacacacagcaggtgaccaccctccagctacccccgggggggctgtcggggggctgttaggtgcctggatg

SEQ ID NO: 386710 - DNA, 75 bp, Homo sapiens
atccagcctgcggagcctgtggggcagatttttggaagtaccagcacagtgacgcttcctgaaaccttgttgttt

SEQ ID NO: 386711 - DNA, 82 bp, Homo sapiens
gaaaagtctagatcacagtggggctctaggagccacataaagaagatccctaatagtcatttctcaacaattatatagtcaa

SEQ ID NO: 386712 - DNA, 100 bp, Homo sapiens
tgttcttcgccattatattcaggttttgatgatgatggttcagaatttcatgaacatatatttctggagaaacacctggagagctttccaaaacaaggac

SEQ ID NO: 386713 - DNA, 89 bp, Homo sapiens
ggcagagtgatgatgatgaggacgaaggcgtgcctgccagctaccatacggtgtctttacaggcagcctggcatcctcgctacaacctc

SEQ ID NO: 386714 - DNA, 100 bp, Homo sapiens
ccacagcatcctccagcacctcaggttcgaattgagcaagtaatagttgctgaacctggggcagttttattatataaaatttctaatctcctcaaatttt

SEQ ID NO: 386715 - DNA, 74 bp, Homo sapiens
ttacccttacccccacagctttatcgtctgcaacaacatgttaagctctgagagagaccgaactctgcaggtgg

SEQ ID NO: 386716 - DNA, 100 bp, Homo sapiens
ggaggcttcccccgttgcgaaggccataggaaaaggatacagagtagagtttcatgaacctgaaacttggtggaaatttgatcctgaagaattagaaaag

SEQ ID NO: 386717 - DNA, 82 bp, Homo sapiens
cggacgaagatggcgaccgccatgtacttggagcactatctggacagtgccgccgccggacgggactttaagatgaagttat

SEQ ID NO: 386718 - DNA, 75 bp, Homo sapiens
cccgcctccctcccgcgcgtgctgcgggtctgctcgggggtctacttcgaggatcatcagctgtaaagcagagta

SEQ ID NO: 386719 - DNA, 100 bp, Homo sapiens
ggccaactccaatgggcctttccagcccgtggtccttctccatattcgaggcctcaggcccaggcccaaggccaagtgagagagcccaggccacaggaca

SEQ ID NO: 386720 - DNA, 75 bp, Homo sapiens
tcatcttcacctactacaccgcctgggtgattctcttgtaataactgagccagcaggcccagatttggggacccc

SEQ ID NO: 386721 - DNA, 97 bp, Homo sapiens
gattagtggctgctaaacttgaaccgaaaagggagaaaactggttgtcctggatgtttgaaaagttggtcgttgtcatggtgtgttacttcatccta

SEQ ID NO: 386722 - DNA, 75 bp, Homo sapiens
ttgaatcctcagcatgtgtatctaagtgtggaaactttattgtggtggaatgtgacagtgatgataacatgggtg

SEQ ID NO: 386723 - DNA, 89 bp, Homo sapiens
caggatgccgtccaggcggcgcggcggctcctcactcatcccagtgccggtggtggtgtgcacattgagccccggtatagacagttccc

SEQ ID NO: 386724 - DNA, 75 bp, Homo sapiens
aagctgtccatgaaaccccttggtgaaggccctccagacccaaaattgatatcagtaaatgccattatttagtgg

SEQ ID NO: 386725 - DNA, 75 bp, Homo sapiens
caatgcacagcgtcaacagatcaaagcagcatatctccaggaaacaggaaaggtgaagacattcagtgaagcttg

SEQ ID NO: 386726 - DNA, 100 bp, Homo sapiens
ccggctcccgccgcgcccccctccaccccggccgcgcccaagcgcaggggctcctcgggctcagtgggaaataatgcaaaaggtgtcccaaggctcctga

SEQ ID NO: 386727 - DNA, 100 bp, Homo sapiens
ttcgtcctcaccaagtccttcctgccagtggtgcaagacactaagggcgactaccagaaagcgctgctgtacctgtgtggtggagatgactgaagcccga

SEQ ID NO: 386728 - DNA, 80 bp, Homo sapiens
gtggaaccggatatttaagtacaatggtgggcttaattttaggtcagcccaaggccaaccccactgtcactctgttcccg

SEQ ID NO: 386729 - DNA, 75 bp, Homo sapiens
tcaaaatgtgaagcaatttgggacggtttttcgttggaatatacgttgcacatttatggcgattctgagtgtgag

SEQ ID NO: 386730 - DNA, 95 bp, Homo sapiens
cttccgtcccggacagagcccgtggtcgcgcagcctccaccaggcggtgtgaagatgcctaatgtacccaatacacaaccagcaataatgaaacc

SEQ ID NO: 386731 - DNA, 50 bp, Homo sapiens
cggcatcgccggcctcgctatgcaatacgagaattggagacccaaccagc

SEQ ID NO: 386732 - DNA, 100 bp, Homo sapiens
cctaactcgagtcctgccgcctcccgggagtgccgtgcgccgcagcccgggcccaggccccggcagcgcctgggacaagatggtgatgctcatggacccc

SEQ ID NO: 386733 - DNA, 100 bp, Homo sapiens
tcgaagcgagggtctgaagttcacgactactagaaggggaggggagtggaaaggctctcagtgaaaaagctgagtcagtgctgattctctcaaatagagc

SEQ ID NO: 386734 - DNA, 88 bp, Homo sapiens
ctgaacttaaaaagcagtctaaacctgtgaccacccctgaagaaattgcacaggtctccagaaatgctttgggttcatctttcattgc

SEQ ID NO: 386735 - DNA, 75 bp, Homo sapiens
agaaattgaaagagaagtgctcttagaaaaggaagaaaacaggcagattttggcgcggcaaaagtcaaactcaca

SEQ ID NO: 386736 - DNA, 100 bp, Homo sapiens
cggacggcgacgcagcccgcggcagaagatggggtcgaggatttggtcttttgggttccatttttggaaaggatggtgtattaaaccagccaaacagtgt

SEQ ID NO: 386737 - DNA, 100 bp, Homo sapiens
ccgcagtgtgcttgaggagacttcagaaacgagaactggtgctacctttttacccacacttaagtgacgcaaaatgcccttcaatggcgagaagcagtgt

SEQ ID NO: 386738 - DNA, 100 bp, Homo sapiens
tctttacacaggatatgaataatattcttctggattcattcaatgtgtcatgagtgtttaaatcaagaggaagctgcatgaatgtaatcaacattccaac

SEQ ID NO: 386739 - DNA, 98 bp, Homo sapiens
caccttgtgccagttgcccagataactgtgacgatggactatgcagtaatggtaactcgggatttgaaggacagagtcgctatgtaccatcctctgga

SEQ ID NO: 386740 - DNA, 100 bp, Homo sapiens
cggaaagcatgttgtggctgttccaatcgctcctgtttgtcttctgctttggcccagagctacttcctcagccgagcccagagcctgtgtggccccgagc

SEQ ID NO: 386741 - DNA, 82 bp, Homo sapiens
cttcgcagtctggaaagctttaggagttcacagtcaatctgaagaggatgtaagtcagtttgattccaagtttacacgtcag

SEQ ID NO: 386742 - DNA, 83 bp, Homo sapiens
ctgctactgcgaagacagctggcagggtgctttcttctgcgacctggtactcatctacctcatcaaaaagagagagttttacc

SEQ ID NO: 386743 - DNA, 50 bp, Homo sapiens
agacaacggccacacactgtggggaccaagaactatatttctttcatgaa

SEQ ID NO: 386744 - DNA, 83 bp, Homo sapiens
gagctgcccactctagaggagctgaaagtagatgaggggtctgaagactatgagactgctctatcaggaaaggaagccctttc

SEQ ID NO: 386745 - DNA, 100 bp, Homo sapiens
caacctatgttgccctgagttacataaatagcttcagtatcagacacagcacagcagccatctgaagagcaaagcaagtctcttgaaaaaccgaaacaaa

SEQ ID NO: 386746 - DNA, 82 bp, Homo sapiens
tgcccgggcctgcaccatgagcgtcccggccttcatcgacatcagtgaagaagatcaggaatacggggtgctttgcattcag

SEQ ID NO: 386747 - DNA, 100 bp, Homo sapiens
ttccatcactgggacagaaagggccaaagatgaagaggaagcctttctggattggagtgatgatgatgatgatgatgatgatggatttgatccaagcaca

SEQ ID NO: 386748 - DNA, 74 bp, Homo sapiens
ctgggatcacctgatcatttcatttcaccagtgatcattaaagaatgggcagcttacaaaggaaagtctcctca

SEQ ID NO: 386749 - DNA, 90 bp, Homo sapiens
gcagaccctcacaatgtcgttgttctacacaacaaggagtcagtggatcggtggggaaaatgctgcttaccctgggccctgggctgtaga

SEQ ID NO: 386750 - DNA, 139 bp, Homo sapiens
gcggatggtggtgatggaagcaggtggaattatgccctgttggttccaatgctgggattggctgcttttcggcagctggtggaatttttgaagaaaatggaatctcgaggccccctttcgtgcgacacggttctgaaga

SEQ ID NO: 386751 - DNA, 88 bp, Homo sapiens
ggggagccccagagcacttctgcttccagaacctcggaggcggggctttgctctctgtacatgatactgtggctcagaagaattacga

SEQ ID NO: 386752 - DNA, 75 bp, Homo sapiens
aacaaatgacattgttcgatacagggtgtatgagtgggcagatttgtccttcccattctgcaaccatggcaagcg

SEQ ID NO: 386753 - DNA, 90 bp, Homo sapiens
aaccttcgatctcctgacgaccctggtacctgacagtgtaaagaaggagctcctacaaagaataagaacattccttgctcagcatgccag

SEQ ID NO: 386754 - DNA, 90 bp, Homo sapiens
aatcgttgtcaacaatcctaaccagtcagtgtttctcttcattgacagacagcacttgcagccgtcatttcaccaagctgataatgttcg

SEQ ID NO: 386755 - DNA, 105 bp, Homo sapiens
cttagctgtgctcgcgctactctctctttctggcctggaggctatccagcgtgaggcggaaccaaccctcctggccatgggaggggccgtggtggacgagggccc

SEQ ID NO: 386756 - DNA, 75 bp, Homo sapiens
gttgaagactctgcctcctacaaatatgcggcttacagggagaacacagttggcctccaccgtttctgccccaca

SEQ ID NO: 386757 - DNA, 100 bp, Homo sapiens
ttcgcctggagaccaacctgcacttgttagagaaaagaaaccttgtttattccctgtgaaaatgagaagatttctaaacagctccacctttgttacaata

SEQ ID NO: 386758 - DNA, 100 bp, Homo sapiens
gacaaatatgaatgagattgttacacaaattgatgcacaaaataagctggaaaaatctgagcttttgcctctaatgacagagcagctacagtggatgcca

SEQ ID NO: 386759 - DNA, 49 bp, Homo sapiens
gggaggtcggcggccccaaaagataatttccagcagtgttataagcgag

SEQ ID NO: 386760 - DNA, 75 bp, Homo sapiens
gcgggccgggatgagggactgtggcggcgcggcccgcgcgcagccggccggaaacccctcctggagtttccccaa

SEQ ID NO: 386761 - DNA, 96 bp, Homo sapiens
tgttgagcagagggaaagggataggagaaggatgtggactgcagtgctgcagtgccagggcacacgtgtttcacgttgacaggtttgcttgggacg

SEQ ID NO: 386762 - DNA, 121 bp, Homo sapiens
ttctgtctccacagcaggacagccgaactggaatctggatgagcagctcaagcaggaactttatattgctgttggaatatctggagccatccaacatttagctgggatgaaagacagcaag

SEQ ID NO: 386763 - DNA, 88 bp, Homo sapiens
caggctctgtggttcaggactcccgacttgacacgatattttttgctaagcagggcacacgtgtttcacgttgacaggtttgcttggg

SEQ ID NO: 386764 - DNA, 101 bp, Homo sapiens
tcactgaaggagtttgtgcagtttgtgtgctcggatggctcgggccaggccaccggacaggtgggcaaacgcagaggcgggaacaaactagccctcaagac

SEQ ID NO: 386765 - DNA, 75 bp, Homo sapiens
gcaccaagccttgttgggcactatcagtaacaatgatgatgttatgttgatttctgtggaaagtcctaatttgac

SEQ ID NO: 386766 - DNA, 75 bp, Homo sapiens
gtcgagtgtcattacgctcaaacaagagtggttaagaaagtagctcaatacatggctgatgtattggaagatagc

SEQ ID NO: 386767 - DNA, 82 bp, Homo sapiens
ggtgttccagcccgtgacattgctgtggtctcgccatacaacctccagatattcaagagaagcttatgtggagttagttcac

SEQ ID NO: 386768 - DNA, 97 bp, Homo sapiens
ctcggtggccgtccgcccactccgcggcgttcggggaaatggctgcgagaccctagaggcctgcggcctgcggttcatcatgcctagtggcgtataa

SEQ ID NO: 386769 - DNA, 75 bp, Homo sapiens
agccagtcggatgctaactgaaagttacagctttgtttgcctcggacccaaggtgtgacacagtttaccgtaaat

SEQ ID NO: 386770 - DNA, 51 bp, Homo sapiens
gttatatcctccaggaatactggccagactaaaggagatagtccattacat

SEQ ID NO: 386771 - DNA, 85 bp, Homo sapiens
ctaaagttgatgagaactttgactgtgtagagatctggtctctggctattcttcttttgagtaagaaatataaacagcttcctca

SEQ ID NO: 386772 - DNA, 75 bp, Homo sapiens
tgcgggcaggagaggacctcggccacactcaccgtcagggcttcttcatattgacaaaagaagagaatatcttta

SEQ ID NO: 386773 - DNA, 83 bp, Homo sapiens
atcttcacagcacagttcctgggaaggtggagccaccagcctctccttggtgacttaagagattaaaattaatttggttgctg

SEQ ID NO: 386774 - DNA, 95 bp, Homo sapiens
cgggcgccgggagcgagctgggagggagccgcgcgcctttgtgcgcgcgccgagcatcaccaaatgccccaaaacttggacccatggagctggcc

SEQ ID NO: 386775 - DNA, 90 bp, Homo sapiens
gatggttccatcatggcgtcaatgcaggaaagaccacagcaagattctttcattcgtctcctcctagcctgggggaccaggctcgaactg

SEQ ID NO: 386776 - DNA, 122 bp, Homo sapiens
agatggcggagctgcgcgtgctcgtagctgtcaagagggtcatcgactacgccgtgaagactagacgcttgaagcaaagctgccatcccagaagacgacatgctctcagcaacccccctgta

SEQ ID NO: 386777 - DNA, 76 bp, Homo sapiens
atatctgggcgccaagccgcggagcctccagacgggagaggcagatgcgaaccagaacaatgggacctcctctcag

SEQ ID NO: 386778 - DNA, 100 bp, Homo sapiens
ctggctcaggacatctgtaggaccagttccagctccagtgggcaccgccagcacgcccagtaagactttgaccccgacgcaggcttcagtgattgccgcg

SEQ ID NO: 386779 - DNA, 88 bp, Homo sapiens
tgaagagatagaagaagacctttctgtggaaatagatgacatcaataccagtgataaggatcttttgccagaaatgagggcatactgg

SEQ ID NO: 386780 - DNA, 74 bp, Homo sapiens
cagcaactcccccatcgtatgaatctagacgctctcctggtctgtgttctgactctttggaaaagagcttaagg

SEQ ID NO: 386781 - DNA, 100 bp, Homo sapiens
tcaaggcaccaagacgcaggggggatatccacagttcgatcaaggcaacatcttcgtggtcagtctctctgtggccgatatgctggtggccatctaccca

SEQ ID NO: 386782 - DNA, 90 bp, Homo sapiens
gagatattcatagtgggacagcattaccgacaagcaagggtcttactgaagtaacacaaagcttaaaaatggaaaatgaagagtttaaga

SEQ ID NO: 386783 - DNA, 82 bp, Homo sapiens
tgccaggactgccggccctgcagctgccttctgccccaggtgtgatgaatgcagactctgctaccattttggctgtttggat

SEQ ID NO: 386784 - DNA, 101 bp, Homo sapiens
cagtccccagtgagggtgtacaaatacccctttgaattaattatggctgccgagacgcatccagagctttcgtgaccggggactgttctgaagcaggcctc

SEQ ID NO: 386785 - DNA, 82 bp, Homo sapiens
ggaattctaatttgaaccatgtttggattgaagccgcctctgtattacttaccagccttatgccagcctggaccatcttgga

SEQ ID NO: 386786 - DNA, 82 bp, Homo sapiens
agattatagctctgtatgagaaggacaacacctacttagtgtcaacagcatctccaccctggagcctgtgagccggtgccag

SEQ ID NO: 386787 - DNA, 100 bp, Homo sapiens
ctatggactacaaattttggaaaatgtgataaaaacaaggtggaagattcttccaaggaaccagtgcgaagggaagacatgtaaggaatttgcataagac

SEQ ID NO: 386788 - DNA, 82 bp, Homo sapiens
gcctgcctccccagcaaatcgagaaaaacctcagcgacctgatcgacctggtattagaaaactactcggatgctccaatgac

SEQ ID NO: 386789 - DNA, 75 bp, Homo sapiens
gcgccgctggttcgtgctgggcaatggtttgctctcttactacagttgttgacctcctgtactggagagacatta

SEQ ID NO: 386790 - DNA, 116 bp, Homo sapiens
ccgggatcctggagcactcggtcatgtacccggtggactcggtgaaggatcacacctcgacacccaacccctgaaccccacacactctgccatgcacacaggaggagagctggacc

SEQ ID NO: 386791 - DNA, 100 bp, Homo sapiens
tgcctgggtttggaggccgcacctgcagcgagtgccaggaactcttctggggagaccccgacgtggagtgccgaggatcgaatcatcaatttagttgttg

SEQ ID NO: 386792 - DNA, 74 bp, Homo sapiens
caggcgactgcctcatcttcaaggaattggtggagagaaggcgcaccatgatggaagatttccggaagtaccgg

SEQ ID NO: 386793 - DNA, 82 bp, Homo sapiens
gttccagttcgtggcctgttaccacgagctagtgttggagtgcaccaagaaatgagcatagcggcctgaccacaggggtggc

SEQ ID NO: 386794 - DNA, 89 bp, Homo sapiens
cgccgcccgggtgtccccgcggcgcaggaggcggtggagcgcagagcgggcgagcgcggtttttggattcaaagcataaaaaccattac

SEQ ID NO: 386795 - DNA, 74 bp, Homo sapiens
gtgaaaccctttgccatcgacatatttcctgtcaccaacaaagatttcagacatgcaagaaagcacttcagcca

SEQ ID NO: 386796 - DNA, 107 bp, Homo sapiens
agacgacaagcacacactatggcgctgaaacggattaataagactaatagggatgccaaaggaaaaatatgatcctccagatcctcgcagaatttataccatcatgt

SEQ ID NO: 386797 - DNA, 75 bp, Homo sapiens
tgagcactggccagagtgaccaggctgaccagcaccagccctgatccagggagtgcatccgccccaacccttttc

SEQ ID NO: 386798 - DNA, 90 bp, Homo sapiens
ggcgtggggaagtatgagttcaccgacccggggcaccccagaggtccatgctgccagacgtggtggatgactttcagctgcagcaccgtc

SEQ ID NO: 386799 - DNA, 100 bp, Homo sapiens
caggcgaggtggtcatcaaaatagctacaaaccatactaaattattccatttgcaacttatccccaacaggacaaggacacactcagcattcactacctc

SEQ ID NO: 386800 - DNA, 100 bp, Homo sapiens
ctgggtgacacgctgggggtcggcaccttcggcaaagtgaagggtgagccggcctcatcctagtgactaccccctcctgatcctctttgtggtaggtggg

SEQ ID NO: 386801 - DNA, 101 bp, Homo sapiens
ccaacccaaattaccttaattgatgccggaccagatctctgtctcggagttcatcgccgagaccaccgaggactacaactcgcccaccacgtccagcttca

SEQ ID NO: 386802 - DNA, 97 bp, Homo sapiens
gaggagctgtggtccagcctgcgcggcgggaagcggcggcggcggctccagcgtcctaagagtggaaaagcgagattgtctttgaccatttgctatg

SEQ ID NO: 386803 - DNA, 100 bp, Homo sapiens
caggccaagcaggaggagcttaagcggctgcatcgagcccagatgggagaatcctcagcacaagtgtctactactattggatggacagcggcagatgttc

SEQ ID NO: 386804 - DNA, 100 bp, Homo sapiens
tggccactgtggaggacgagggcaccccaaccctgtcggcctccccatggccacccatggaccagtcggcattcacttcctcccttctgcggcccataaa

SEQ ID NO: 386805 - DNA, 50 bp, Homo sapiens
caggaatggagttcagtctgaaaggctagcttgtcactttctgcaaaggt

SEQ ID NO: 386806 - DNA, 100 bp, Homo sapiens
cagagacacacctggaaatgctgcagaaggctcaggtctcctaccggaccccagagggagatgacctagaaaggagctgctaagccgcacatctcttgag

SEQ ID NO: 386807 - DNA, 83 bp, Homo sapiens
catatccttgggcaacccgaagaatgaaagaagaagctataaaaccccctttgaaagtattttcatctcagcctagtgacgat

SEQ ID NO: 386808 - DNA, 100 bp, Homo sapiens
aggaccagcactgcgagagcctgtccctggccagcaacatctcaggaatcccgttctgcttccagaagtggaagtgctcacggatcggggaaatctgcaa

SEQ ID NO: 386809 - DNA, 98 bp, Homo sapiens
gatagtcttgggacccttgcatggtgtttcaaagggtggtgaagaactaagaccgcaacagatgaccaaggaagtttgggattatgttttcttcaagg

SEQ ID NO: 386810 - DNA, 73 bp, Homo sapiens
gagggcggctacacctgcgagtgcttcgaggacttcactgggtgcttcaaggatgaccgcatcgtcttctgga

SEQ ID NO: 386811 - DNA, 100 bp, Homo sapiens
atactacagcatggaccagcgggggcagaagcctggagacctgtacagtcctgacagcagcccccaggccaacctgagtgagcagcagatagtatccaac

SEQ ID NO: 386812 - DNA, 100 bp, Homo sapiens
ccggaaccgcgattcggcgtgtcaggttagaaaatggatttctgactggaatctcaccactgaaaaaaagcacacccttttaagactactttatgaggca

SEQ ID NO: 386813 - DNA, 76 bp, Homo sapiens
gcggagttccgcgtccgaggtgtgaagctggggagaaaactggggaaacaaaggatatatcctcatggctcgaaat

SEQ ID NO: 386814 - DNA, 100 bp, Homo sapiens
tgaactctcagtggtcctacctggggatattatcaaatctactactgttcatggcaggttattttagtgtccgccaacaaattgactcgttatatagaac

SEQ ID NO: 386815 - DNA, 83 bp, Homo sapiens
tggcagccgcggatctcaccgccgctcaggatgatgccaggaaagaccaaagcagatgctgctgacccagcaccacttcccag

SEQ ID NO: 386816 - DNA, 101 bp, Homo sapiens
acagtccctaatttctgctgctatagaaccaggtgctggagaatctggtaaaagcaccattgtgaagcagatgaggatcctgcatgttaatgggtttaatg

SEQ ID NO: 386817 - DNA, 100 bp, Homo sapiens
gaagaaagtgcctgccattcttatcatttctaagcaggttcatgccagcccagaacagagaatcagtggtagtcgctcttctaaaacttttaaaccaaag

SEQ ID NO: 386818 - DNA, 96 bp, Homo sapiens
gaccaactgtatatgatcatgcgcaccttggccatgcttgtaattttacacagataccacatttagcaggaacagaacaaaactttcagcttgcaa

SEQ ID NO: 386819 - DNA, 101 bp, Homo sapiens
cacgtgggccggcggtccacggccggaatggcagcaagctcaggccatgctggagtatctgccaacatgatgaagaagaggacatcccacaagtaagcagt

SEQ ID NO: 386820 - DNA, 109 bp, Homo sapiens
gcaacttactagtttgttgcaaaataatgtaaacgtcaatgcacaaaatggatttggaaggactgcgctgcaggttcgagaacttgtcttggacaattgcaaatcaaat

SEQ ID NO: 386821 - DNA, 89 bp, Homo sapiens
ctggtgcaccattttctattgaagaggtagaagtggccccaccaaaggcaaaggaagttcgcataaagattgccaccaaggagccaatg

SEQ ID NO: 386822 - DNA, 78 bp, Homo sapiens
aaatacccgtctacatcagaagcagtggtcctgggatactgagaattggagcagggataaatggcaatgacagattta

SEQ ID NO: 386823 - DNA, 75 bp, Homo sapiens
tgacttggactatgactttcaacgggactattatgataggtcccgttcaagaagttcttccagttcgcagtcaag

SEQ ID NO: 386824 - DNA, 80 bp, Homo sapiens
cgtgaagtagcagagtgaattctctggatctttgtcaggtatctcttccaaatgcacaatgaaggagttctcatcaacag

SEQ ID NO: 386825 - DNA, 74 bp, Homo sapiens
tttattactttgaagtgaagattgtcagcaaaggaagagatggatcttgagccagatgattgtgcatccattta

SEQ ID NO: 386826 - DNA, 76 bp, Homo sapiens
cgagacattaccactattaaacttctcaatgaaactagagacatgttggaaaggaaattccacttacttggatgac

SEQ ID NO: 386827 - DNA, 75 bp, Homo sapiens
gcgcttccccatggggctggcctgcggcgcctgggcgctctgagcacagccatgacagtgcagatcctgctgaag

SEQ ID NO: 386828 - DNA, 50 bp, Homo sapiens
tgaggtctctgtgaacaaaaggagagctgcttttgcacattttcctgaac

SEQ ID NO: 386829 - DNA, 102 bp, Homo sapiens
aaattgtaaataacatcaggcgtttgatggatggagaagaacctttgccaatggcgcagttgtgtagcagttgagtaatgctggttagctgttaaggtggcg

SEQ ID NO: 386830 - DNA, 100 bp, Homo sapiens
taactgaggcgtttctgtacatggattatctggtgtggatgaggtcaccattgtcaacattttgaccaaccgcagcaatgcacagagacaggatattgcc

SEQ ID NO: 386831 - DNA, 75 bp, Homo sapiens
ccgggaggaaggaacgaggcaaggagctaaagcagcgtgcgttcagccctgggacttctgcctggtgtcgaaggt

SEQ ID NO: 386832 - DNA, 90 bp, Homo sapiens
cagggagccaactgtttctttgaacagtaaatcagggatgtcaagaaagcagagttgcatctgtctacagaaagggccaaagttgataat

SEQ ID NO: 386833 - DNA, 100 bp, Homo sapiens
ggtccgggcagcatgaggcgcgcggcgctctggctctggctgtgcgcgctggcgctgagcctgcagccggccctgccgtgctacctgggcgatgccttcc

SEQ ID NO: 386834 - DNA, 75 bp, Homo sapiens
tttgaattggtggaacttgttggaaatggaacatacgggcaagtttataagggccgttgctccagggagaactgc

SEQ ID NO: 386835 - DNA, 76 bp, Homo sapiens
atcttggtggaggctccgcactagatctagtgccgtgagcgatgtggagatgcaggaacactatgatgagtttttt

SEQ ID NO: 386836 - DNA, 100 bp, Homo sapiens
ccggcggcggctgcgggctgagcggcgagtttccgatttaaagctgagctgcgaggaaaatggcggcgggagaaactggcgatggaatatgagaggagcc

SEQ ID NO: 386837 - DNA, 75 bp, Homo sapiens
aatatcctcggaagagcgctcccaggagaaacaatctgcgctcctcagaccaccggcaggtgaacagcctgatgc

SEQ ID NO: 386838 - DNA, 100 bp, Homo sapiens
cgcgctgggcgtgaggggggccttagagggcctccccaggccgcctccgcccgtgaagcacgagctttcagatggagatctggatctggatcttgtttat

SEQ ID NO: 386839 - DNA, 100 bp, Homo sapiens
gggaaattgccaatatgtacaattgcagcaggtcaatggccagcaaggaggggggtccgagccggcggcggcggcggcagtggtggcagcgggagacaaa

SEQ ID NO: 386840 - DNA, 51 bp, Homo sapiens
agagttagagagagggatggtggggcttgcttctgacatgtctgatgagcg

SEQ ID NO: 386841 - DNA, 100 bp, Homo sapiens
ctgcagccctggccgcgcactcgcctcagctgagcctgggaaaggagatgtggcattactgaactgtacagccattgtgaataccagcaatgaaagtctc

SEQ ID NO: 386842 - DNA, 82 bp, Homo sapiens
ctccggggtgtcgagggatttattcccaagaactacatccgcgtcaagccccatcctgtactaatggtcacttgatgtgcgc

SEQ ID NO: 386843 - DNA, 100 bp, Homo sapiens
ctcaaccctcaggaagctcagcggtgggcagtcctagtccgaggtgccaccgtggaaggacagaatgcctgagaagccaggccccggcagcaaggacccc

SEQ ID NO: 386844 - DNA, 82 bp, Homo sapiens
agtatgaccaccactattaaataacagtgatggtgaaattgctagtgaatgtgaatgcgatagtgtctttaaccatttagag

SEQ ID NO: 386845 - DNA, 75 bp, Homo sapiens
aatagctctgtctctgaaggcatgtcagctgcaattttggaggagactgacaaactggaagatgagaaatctggg

SEQ ID NO: 386846 - DNA, 75 bp, Homo sapiens
ctagactacattaatggtggagagacagaccttccagaacttgatacaccagaatctgccagaataatagctttc

SEQ ID NO: 386847 - DNA, 83 bp, Homo sapiens
aaagaagatgatgaatggattcttgttgacttcatagcaggaaaaccgaaagcgccatggctctagtcgaagtgtagtagata

SEQ ID NO: 386848 - DNA, 82 bp, Homo sapiens
cagcacgctcgacttcatgctcggcgccaaagacctgcctagagctggaacgttacctccagagcgagccctgctatgtttc

SEQ ID NO: 386849 - DNA, 100 bp, Homo sapiens
ttttttcctgtatgaagcggttggcaccactgaagtgaccgaatgaggcacccagattggctgaaaacttctgtgtctgccatttagctactggggacat

SEQ ID NO: 386850 - DNA, 100 bp, Homo sapiens
ctcagattggctcctatgttcctgcagaagaagcgacaattgggattgtggatggcattttcacaagcatgtttccccctccaaggacatccggacagcc

SEQ ID NO: 386851 - DNA, 98 bp, Homo sapiens
ctccaactacgccaccactgtgcaagtgaaagagtgtggggcttcctatgcgcaggtgatgcggaccgtgggtatccatcccacatgctctgaggagg

SEQ ID NO: 386852 - DNA, 100 bp, Homo sapiens
ttaaaagatccaaaaaatgagacttctagcaaagattatttgccttatgttatgggctatttgtgtagcagaagaacacagatatgtagaactcttcttg

SEQ ID NO: 386853 - DNA, 100 bp, Homo sapiens
tggatatgaaactggaagacatcctggtatttcagttactaactgatctgaaagagcagcgtaaagaaagtggaaagaataaacacagctctgggcaaca

SEQ ID NO: 386854 - DNA, 75 bp, Homo sapiens
aggaaggactggggtggcaaaggctcatgcccccattttacagtttcggagcaacatcccctgtcacctggttga

SEQ ID NO: 386855 - DNA, 89 bp, Homo sapiens
acgagtggtgggagaaccagccgactggagcaggcagcagcccagatatgcaatatgatgaggatgatgatgaaatcaccccggatttg

SEQ ID NO: 386856 - DNA, 120 bp, Homo sapiens
tcaagcgaagccttgaaaaagctgccctgagacggtgtcccgccgaaaggtgattcaggtgtctggggattgaaaaaaaattttgctttattggagcttttggaacgactgcagaatggg

SEQ ID NO: 386857 - DNA, 95 bp, Homo sapiens
aggctcgcgggcggcgggcccggggctggtgaattaccatatctccgtcaagtgcagtaaccagttcaagttggaagtgtgtcttttgaaatcag

SEQ ID NO: 386858 - DNA, 100 bp, Homo sapiens
cagtaaatacagcgaatgcttaaagattaacaataaggaatgtgccatatatacaaacaggatgctgacagacagcaccaagaagtaattgcaatttatc

SEQ ID NO: 386859 - DNA, 74 bp, Homo sapiens
gacatcagtcagcaaggaggagctggagaaagtgcacagccaggctaaccggcctcctgcaaagctcaacctgc

SEQ ID NO: 386860 - DNA, 50 bp, Homo sapiens
cagccactccctagcactcacaggtttttgtctgatgaaaatagtctgga

SEQ ID NO: 386861 - DNA, 82 bp, Homo sapiens
aaaagctcaatgcctcagaaattcattggttcgtgctggccgtgggcagcgccgtctttgatgccatgttcaacgggggaat

SEQ ID NO: 386862 - DNA, 49 bp, Homo sapiens
cagcatagcacgactgaacaagcgcagggtatttaaaggatccacgata

SEQ ID NO: 386863 - DNA, 50 bp, Homo sapiens
aaaagcatccttttccaacaatctcagatgctggcatcaccatctacatc

SEQ ID NO: 386864 - DNA, 75 bp, Homo sapiens
ccgagctggggttggacgctgccagtttgcacagcagcaggcacacaagccatgccccctcttttctctttggga

SEQ ID NO: 386865 - DNA, 101 bp, Homo sapiens
tttggatttctttttaataatgtgtgacccttcacctttgatcccctgacctgcattaccttgcatattggagaattgggagaagtctctttggtttggaa

SEQ ID NO: 386866 - DNA, 83 bp, Homo sapiens
tcggggcagggcaagcacgggaagaagcagctggacccgctcaccatctacggcatccggtggcgaccattgacgaggtggag

SEQ ID NO: 386867 - DNA, 100 bp, Homo sapiens
gcgtttaagttggatttccttccagaaatgatggtggatcattgctctttgaattccagtcccgttcattgttaaagctaccaatggaccaagatatgtt

SEQ ID NO: 386868 - DNA, 107 bp, Homo sapiens
agcagaaaacctgaaaatcagcaatttcctgacactgagaatgaagagtatcacagagacggagtttcgtcatgttggccaggcccatttgagatctttgaagatat

SEQ ID NO: 386869 - DNA, 83 bp, Homo sapiens
cggagagactcgccggccgagggtggccctaggggcagcgagcaagacagcaagcaggagcaggccgggctctcgccatgggt

SEQ ID NO: 386870 - DNA, 88 bp, Homo sapiens
gagtgctacttctactccaagttcgccatcgactacagtgacagcgccatgctccaagctcagcagctgctcctggggctgggctctt

SEQ ID NO: 386871 - DNA, 83 bp, Homo sapiens
aagaaacatcccaagtcggagcttctcatgtaaggacagagcgggatgccaccagcttgtccaaagggaagttccaggagctc

SEQ ID NO: 386872 - DNA, 98 bp, Homo sapiens
gcttagtatcccagtgcttggcgcagactagttgttcacaagagtgagccatggagctacgtgtggggaacaagtaccgcctgggacggaagatcggg

SEQ ID NO: 386873 - DNA, 83 bp, Homo sapiens
gcagaaaccccgttgacaaggcactgctttttcatgacgactgtgccctgtccacggtgcctcctgcatgtcctgctgccctg

SEQ ID NO: 386874 - DNA, 83 bp, Homo sapiens
tggagaaccgggcccagcagcactgggcgtccgtctccaagagagtatgaagagagtgcgtctgtagggcagggaagatggcg

SEQ ID NO: 386875 - DNA, 100 bp, Homo sapiens
cttctgcaaggtccggctgctggatggaggggattttgtcagcttgtcgtcaagaccaggtgataggtttgatcgagacagaccgttgagaggacgtgga

SEQ ID NO: 386876 - DNA, 94 bp, Homo sapiens
ctgagattgttaagcagattacttccatcagtattgagccaggagttgaggttgggacagaagaaaatttggatttcaaagcgattattgatgg

SEQ ID NO: 386877 - DNA, 98 bp, Homo sapiens
agcttgtgtagcgtcagatccttgagtgataaaggagtagagccacctccatgtgtacggcagaacagttccgctgtcactcaggccgctgtgtccgc

SEQ ID NO: 386878 - DNA, 88 bp, Homo sapiens
taatgctggtggtctgcatcaccaccggatcaacttcgacaaatactacgagagtacaaggtagtgggtcgctgcctgcccaccccca

SEQ ID NO: 386879 - DNA, 114 bp, Homo sapiens
aaaggcaagagtaacagcagcgccgtcccgtccgacagccaggcccgggagaagtgacttaagagattaaaattaatttggttgctgttggttctgaacaaataatgagttctt

SEQ ID NO: 386880 - DNA, 74 bp, Homo sapiens
cagagggacacgctggtgcatctgtttgccggaggggtaagcttgatgattaccaggaacgaatgaacaaaggg

SEQ ID NO: 386881 - DNA, 75 bp, Homo sapiens
cgccgctctccagcccgcttgaacgatgacggtggatattccatgaattttaacatgagttcttccaggggacca

SEQ ID NO: 386882 - DNA, 75 bp, Homo sapiens
ccgcgccgccgctgccgccgccgcgcgcggtgggttgtcttctggcctcagagtatcccttatcagaaccttggg

SEQ ID NO: 386883 - DNA, 100 bp, Homo sapiens
aagcccactgacgctccaccgaaagcccgagatgatcggccactacctgggcgagttctccatcacctacaagcccgtaaagcatggccggcccggcatc

SEQ ID NO: 386884 - DNA, 100 bp, Homo sapiens
gaggagttgtgtctatcaaaggagtgtgtgctaaccgttacctggctatgaaggaagatggaagattactggcttctagacgaccttaagtggacagaga

SEQ ID NO: 386885 - DNA, 75 bp, Homo sapiens
gccatccaccccagcctggagatccccaccgctacatctgttacttttgttggtgttatgggaatgagatcctac

SEQ ID NO: 386886 - DNA, 107 bp, Homo sapiens
cctgagtgtctaccagaagtgcaaggacaagcaggctgctgctaacttcaaagaacccccgctcttgcttggtgttctgcatccaaatacgaagctgcgacaggcag

SEQ ID NO: 386887 - DNA, 83 bp, Homo sapiens
ctcctcggagtccttggggacggagcagcgcgtcgtggggcgagcggcagaaaccaaggtgtatgttggtaacctgggaactg

SEQ ID NO: 386888 - DNA, 98 bp, Homo sapiens
acctcaaggttgaagcagaagaataaggagaaggataagtcgaaggggaaggcgcctgaagaggacgaagatatgagggaaggcaccattggagatat

SEQ ID NO: 386889 - DNA, 100 bp, Homo sapiens
ggagatcgtctctctcatcgaggcccaaaccgccaagtggaaagaggcaaaacctgatgaattaatggattccaaattgagatgcgtatttgaaatgccc

SEQ ID NO: 386890 - DNA, 74 bp, Homo sapiens
ggggagacagatcctctgctcattgccatgaaggaactcaattccccattcccctaccgagctgggcagttagc

SEQ ID NO: 386891 - DNA, 83 bp, Homo sapiens
gaatattggggggctcggctgcagacttggccaaatggacgggactattaaggtttggtgcacctcgatttggaggaagtagg

SEQ ID NO: 386892 - DNA, 50 bp, Homo sapiens
ccgagggtcaacgagaaagagatcggttttaaaatcaaagatgggaaaat

SEQ ID NO: 386893 - DNA, 75 bp, Homo sapiens
ggcggcgctggaagggatgtcgtctcagcagtgctcgggcgcaggactgagcagggggaggaacatttaagctga

SEQ ID NO: 386894 - DNA, 100 bp, Homo sapiens
ggaccgagtgcacactggaggtcccagagcacgacgagcgcggaggaccgggaggctcccgggcttgcgtgggtgtatgtggaatttgatgatcttgaat

SEQ ID NO: 386895 - DNA, 100 bp, Homo sapiens
ctgtctttcgactgattgaagaggcctggagtcctcctgctgaaggtgaacaaactatgaatagactgacccagctggaaagactggatttgggaagtaa

SEQ ID NO: 386896 - DNA, 50 bp, Homo sapiens
gccccgaaactttcaccgcgagcgggttggacgtgataagtatgagcctg

SEQ ID NO: 386897 - DNA, 82 bp, Homo sapiens
gaagaatttcctctgaagcaccgtgcagggctcgcggcctggcaagaatgtacagctgacagagaacgagatccgcggtctg

SEQ ID NO: 386898 - DNA, 89 bp, Homo sapiens
ctacgctccttcatctaatccatggaaaggaaacattggcaaatttggagcgacagatctatgcttttgagggaagctacctggaagac

SEQ ID NO: 386899 - DNA, 80 bp, Homo sapiens
tgaaggaaacgctcagcctcactgtagatgccaagacagagactgcggtcttcaaaaggacaggtttcattaatcttgac

SEQ ID NO: 386900 - DNA, 50 bp, Homo sapiens
ggtgattagaagcttggaggctgcagtttgctggcctagacctgaactct

SEQ ID NO: 386901 - DNA, 100 bp, Homo sapiens
acggcgtgttccagaggcgcggggcgccgccgctgcagctgccgcgcgtacctgaaggaaaagattatgcccttcattggctagtgctggggactcatac

SEQ ID NO: 386902 - DNA, 75 bp, Homo sapiens
gaggtggtggccatggcccgcaagctccaggaagctgagaagtacaaagctgaagatgagaagcagagggacaag

SEQ ID NO: 386903 - DNA, 101 bp, Homo sapiens
cgacgacccctgctccggcggggaagtgagcaaggtccctgtgcgttttattgcgacctgccggtgggaactttgtctccgagtcggagcagcatggagcg

SEQ ID NO: 386904 - DNA, 116 bp, Homo sapiens
agccttcatagggacagccgcccctggtgcacacaccctcgtattctcctgcccttccccagaacatccagtcatggataaaaatgagctggttcagaaggccaaactggccgagc

SEQ ID NO: 386905 - DNA, 50 bp, Homo sapiens
cgatgcaggtcttccacagctaagcattatctgcatatcagagatattac

SEQ ID NO: 386906 - DNA, 75 bp, Homo sapiens
agtaacccgcgaaatgatgggatagcgttgcaaatccttaaaagagtcttaacgtgtgtgctgtatttgtgggcc

SEQ ID NO: 386907 - DNA, 75 bp, Homo sapiens
agtggagttgccatctatgttaatggatacacagaatatcctccgaatcctaaatctagagctccaaggatgctg

SEQ ID NO: 386908 - DNA, 51 bp, Homo sapiens
cgccagcaccgtgctctccaccacaggaacagcgcttaaagtttttgaaac

SEQ ID NO: 386909 - DNA, 50 bp, Homo sapiens
tttctcaagcactgtgatcttcaaatcgtgggcttcctctaatattacac

SEQ ID NO: 386910 - DNA, 101 bp, Homo sapiens
acgaggctgtcatcaccgccatgcccaagaataaaggactccatccccgtgtctacctccctccttggagacacttccgacacgacctctactggccttgc

SEQ ID NO: 386911 - DNA, 83 bp, Homo sapiens
caaactccacgaagccaacgcccagacaatgcagatcttcgtgaagactctgactggtaagaccatcaccctcgaggttgagc

SEQ ID NO: 386912 - DNA, 75 bp, Homo sapiens
ctcatcccaggttgccttggaaaatgccaacgccgtgtctgaagggctagtgccacgaggtttacttgactgttg

SEQ ID NO: 386913 - DNA, 80 bp, Homo sapiens
agctgccctgagacggtgtcccgccgaaaggagtccttcaataatgttaaacagtggctgcaggaaatagatcgttatgc

SEQ ID NO: 386914 - DNA, 114 bp, Homo sapiens
gaaaaatgcacaacagagggacaacaaaagcctcctacaagagtcctaccaaaatgtgctggaattgatgttcgtctgtgtgatgttggtgaggccatccaagaagttatggag

SEQ ID NO: 386915 - DNA, 74 bp, Homo sapiens
gggagaaagtttcatctgtggatggagtattgggcttttaaattttgacacagaattgtcaactaaagaaatga

SEQ ID NO: 386916 - DNA, 100 bp, Homo sapiens
cttgtacaaacaggacctgcctaattaccttcaaacctggattttttatcaagcagaaatgcatcgaacaacgagaatcaagatcactgagctaaatccc

SEQ ID NO: 386917 - DNA, 59 bp, Homo sapiens
ttttcttcccaggcagcaagtgcaattaacagtacttcagatagcagaccaaagagtag

SEQ ID NO: 386918 - DNA, 82 bp, Homo sapiens
ttgtgggccagctgccctctgaggagatggtcatgacagatgtgaagttcatttccaatccgccctccatggtggcagcggg

SEQ ID NO: 386919 - DNA, 96 bp, Homo sapiens
aagaaatccattctcatgaagcagctgcagcagcagcagcacagcgacaagacgcaaattgtggctactaatttgccccctgaagatcaagatggc

SEQ ID NO: 386920 - DNA, 75 bp, Homo sapiens
ggtccctggagtttctgcttcctccagagccagatgctgagatgaatcgtcacctgtgtgtttggctttttagac

SEQ ID NO: 386921 - DNA, 90 bp, Homo sapiens
gaattcaatcaattctttgtgactcctcgatcttcagttgaggctgatgaaaacttttacacttgtgcatggacctatgatagcaatacg

SEQ ID NO: 386922 - DNA, 98 bp, Homo sapiens
gtgcgtccggtcctggaagagcctagctagtgtccgatagatggtgcagtggcaaatgaaatggcgtaatcgaggaggccttacatcgggaacaaatg

SEQ ID NO: 386923 - DNA, 82 bp, Homo sapiens
atttgtcactgtgatctccctcttggtgtacaagctttacaggaagtatggtgctggcatctgcttggcttctagagagtct

SEQ ID NO: 386924 - DNA, 120 bp, Homo sapiens
agcccctgggaggccgaatgtgcaggatcaccgaggggaaagtgagcttgacagggacatcaaagacgtcagactggatggcgagtcccagtgaggcgatgtgggcagaggagctccgag

SEQ ID NO: 386925 - DNA, 100 bp, Homo sapiens
ttttagggtcctttatatagaagggagagtaggtggcagttaaaatgaagcagtacaaagatgaacttttggcctcttgtttgacctttcttctgtcctt

SEQ ID NO: 386926 - DNA, 73 bp, Homo sapiens
tctgatgaagaagttattcaagatggccagaagcggactcctagaagaggggagcagcaaggatggaatgaca

SEQ ID NO: 386927 - DNA, 115 bp, Homo sapiens
gcacgccagctggtagaaattgcagccagggatattgagaaacttctgagcaacagatctaaagccctggtgaagaagctcattcacacagaagacccatttaatgatgaacatc

SEQ ID NO: 386928 - DNA, 100 bp, Homo sapiens
agggagagcgggaacccacttcctgcaccggctttctctgagttcttcaggatgaattcgctctggtctaggtctctaattaacagaagatggcaaagcc

SEQ ID NO: 386929 - DNA, 50 bp, Homo sapiens
catcgaagtgttgtgtaaaggctacccttaaactaattctgaagcaagcc

SEQ ID NO: 386930 - DNA, 100 bp, Homo sapiens
gatcgctggagctaaactggagccgtccataggggtgaatggggcaagagtgagccatggagctacgtgtggggaacaagtaccgcctgggacggaagat

SEQ ID NO: 386931 - DNA, 75 bp, Homo sapiens
gctcaaccccatccactgccgcggccgtgggcccgaccgcggggacccatctcagaaaactgatcttcacaatga

SEQ ID NO: 386932 - DNA, 100 bp, Homo sapiens
catcttttcctcttctgaacatgcacccccagcagccaccagcaggagcatgcaagttgtccccttggacaaacagatcacaatcatagatagtccgagc

SEQ ID NO: 386933 - DNA, 100 bp, Homo sapiens
aagacggccgacggctggaagcgcttcctggatgagaagagcggcagtttcgtgagcgacctcagcaggtctcctctgagcctccggcctccataagacc

SEQ ID NO: 386934 - DNA, 100 bp, Homo sapiens
acatgggtccgtggtcgtttgtttctccaaggtttgaaaagcagctggcctgcaaggtgttggtgaaaatttgactgacccatctgtgataaaagcagaa

SEQ ID NO: 386935 - DNA, 89 bp, Homo sapiens
gtattatggataccaaggaagagaagaaggaacggaaacaaagttattttgctcgagaaagtttcattgtgcaaatctaacttcatggc

SEQ ID NO: 386936 - DNA, 51 bp, Homo sapiens
aaatccactggagcaccttgatagggaaaaggggtcgaggccggtcctgac

SEQ ID NO: 386937 - DNA, 100 bp, Homo sapiens
cttcccccgcagagaagagctgctcagtctggcatgcagaaagcgtggatacccatcaacgaagttttgatattggaattcagattggctatcagcgacg

SEQ ID NO: 386938 - DNA, 74 bp, Homo sapiens
tctgtcccaggctgttccctaagaaggtctgcccaggactcagcagcctcccgcgacgatgcccctcaacgtta

SEQ ID NO: 386939 - DNA, 75 bp, Homo sapiens
tgagatccagaggagtggaaggctcccccttgactaaagctaaccagacgtcctgggtcctctccagcatggcag

SEQ ID NO: 386940 - DNA, 75 bp, Homo sapiens
gccagctgctccggagatacggtcagcccaaggccaaccccactgtcactctgttcccgccctcctctgaggagc

SEQ ID NO: 386941 - DNA, 114 bp, Homo sapiens
agaccctggagcctcagttggaagcagccgatccagcctgcggagcctgtggggcaggctcttgtcaggatggtgaagctgttcatcggaaacctgccccgggaggctacagag

SEQ ID NO: 386942 - DNA, 126 bp, Homo sapiens
gaccctacagaagatgctgaagctgaggacacacccaggaaaagactcaggacggacaagcacagtcttcggaagcccatcgccgaagcaccattcaagttcgacatggaattggatgacttgcct

SEQ ID NO: 386943 - DNA, 97 bp, Homo sapiens
tgtcctgggttccgtggagaagggtcactggactgcacggggtggctcttccgcatggtcttgggtaaaggacatgttcagttttgaaattccagag

SEQ ID NO: 386944 - DNA, 82 bp, Homo sapiens
ttttaagaaaaggcattgaggaactcaatcaaaccagtattcttttcacacagttaccgaggagacactttgtgttggctta

SEQ ID NO: 386945 - DNA, 75 bp, Homo sapiens
gagtttggttcttggcaggaatatggaagacagacttaattcagtgcacaaatgagatgaatgtgaacatcccac

SEQ ID NO: 386946 - DNA, 90 bp, Homo sapiens
gacgtgcagcggaggagggcaaggactacccctttgccaggttcaataagggtcaaccggatgcacatcagtcccaacaatcgaaacgcc

SEQ ID NO: 386947 - DNA, 50 bp, Homo sapiens
caacccccaaattggctgggacagagaatagtgacagtggtacaggaaag

SEQ ID NO: 386948 - DNA, 100 bp, Homo sapiens
agggtggagattatacatctctcatcatttcagcaacaaggaaataaattagtggcagagtaagggtgacttgtgatgcggctgactaagcctactttat

SEQ ID NO: 386949 - DNA, 75 bp, Homo sapiens
cacgacgctgccaacaacgggcactacaaggagcgcagctcagctgggctggaactgccctcctggaactccccc

SEQ ID NO: 386950 - DNA, 74 bp, Homo sapiens
caggaaccaccagtgacagagaatgttccaaaccgttacacctttccttgtccttactgtcctgagaagaactt

SEQ ID NO: 386951 - DNA, 74 bp, Homo sapiens
agactgtggagtttgatgttgttgaaggagaaaagggttatgtggtccgaatcagtggtgggaacgacaaacaa

SEQ ID NO: 386952 - DNA, 97 bp, Homo sapiens
atttaattccttttcgaccttcaatccagttccaaggactccacggggtctttgaagaaactggttttgatatcaaagactatatttgtaaggatga

SEQ ID NO: 386953 - DNA, 97 bp, Homo sapiens
cagagaccctatgcaacgggcagctgggctgcagtgaccccgctttcctcacgcccagtgggatgaagctctcttgactatgagtaaaggagaaaag

SEQ ID NO: 386954 - DNA, 99 bp, Homo sapiens
cagctactccaacacgattctggctgtgaagctcaacaggcagaaaccgaccagagggcaaagtgttggagacagttggtgtgtttgaggtgccaaaac

SEQ ID NO: 386955 - DNA, 82 bp, Homo sapiens
ccgggctgggctttcctcacccggctatgtcttctcattacactgaagaccttttgccagaacagtgcatgcaagattcatt

SEQ ID NO: 386956 - DNA, 90 bp, Homo sapiens
ttcacaacaggtatccagcaatgaggacctgagatgcgacttgctctgttgtccagacttgagtgcagtagctcaatcatagctcactgc

SEQ ID NO: 386957 - DNA, 83 bp, Homo sapiens
aaatcggcagatgttacagctgctcatgaaccacttggcaaaacacagaatgttcagcttaacaaagaaatgacacttgccag

SEQ ID NO: 386958 - DNA, 80 bp, Homo sapiens
catggttatagctgtagtgaaaaattatccaaagctcagttgacaactccaatactgttggcactagtggcaggagaagc

SEQ ID NO: 386959 - DNA, 75 bp, Homo sapiens
tcctacagctccactcgaggcatctcacagactattgcagatatcatccgaacatgtttgggacccaagtccatg

SEQ ID NO: 386960 - DNA, 51 bp, Homo sapiens
gctctcttcgctggtggcaaactgatcaggagtgatacttcacagatcctg

SEQ ID NO: 386961 - DNA, 98 bp, Homo sapiens
ccaggccttggacctagttgatcgacagtccatcaccttaatctcatcacccagtggaaggcgtgtttaccagctgtttgcagacaaggtcccaaaga

SEQ ID NO: 386962 - DNA, 75 bp, Homo sapiens
tgcaattggaccaagagaacaatgggaaccagtctttcaaaatgtttggtgcacctcgatttggaggaagtaggg

SEQ ID NO: 386963 - DNA, 100 bp, Homo sapiens
cctgggcagctcttcggccgcatccccatgcgcttctcggtgctgacaatgcagatcttcgtgaagactctgactggtaagaccatcaccctcgaggttg

SEQ ID NO: 386964 - DNA, 100 bp, Homo sapiens
cgccgctctccagcccgcttgaacgctgttccaaagacctaatgcgcttgctgtccagcagttgacagctgctcagcagcagcagtatgcactggcagct

SEQ ID NO: 386965 - DNA, 100 bp, Homo sapiens
taagaagcagcaacccacccaagcagcggtacttacaatttcatcagaaattcctaaaagaattcgaagtgccttaaaaaatgcagaagaatcaaagcaa

SEQ ID NO: 386966 - DNA, 75 bp, Homo sapiens
gctgccctgctcaccaagcacacccgcaaggtcgtgcacgatgccaagtctcttccagttgcgcctcttctcctt

SEQ ID NO: 386967 - DNA, 100 bp, Homo sapiens
ctggaggctgagtgctaaactgtgtggggcgcggatgggatccagctgttagtcgggtaggcataggaggaagagttcatcgattggtggagcaaattct

SEQ ID NO: 386968 - DNA, 103 bp, Homo sapiens
ccagaacaccccgagatgagaggagaagagcccagcacaacgaagacaatgcagatcttcgtgaagactctgactggtaagaccatcaccctcgaggttgagc

SEQ ID NO: 386969 - DNA, 75 bp, Homo sapiens
cctaagagggcagccgcctgaaggaacgcgacggcggcgcccgcaggaagatgttaccgagtacttcagtgaatt

SEQ ID NO: 386970 - DNA, 82 bp, Homo sapiens
aagagattccttgcagagacagctcaacacggcacttccacaggtggtataagttgaaatccaaaccaggaaagaaggacaa

SEQ ID NO: 386971 - DNA, 50 bp, Homo sapiens
gccaggtgtccatccccgtgctgagatccctaaagaagtggctgacatct

SEQ ID NO: 386972 - DNA, 100 bp, Homo sapiens
ctttgccagggacctagtggcccagtggaagaagctggttcctgtggaacgcctgagaaatgccagtggcctgacagcagcagacattgcacaaacccag

SEQ ID NO: 386973 - DNA, 100 bp, Homo sapiens
atccgcagggttcggatgagaccagtaacaaatgtggcaattattttggatctatcacctgtcatcataactggcttctgcttgtcatccacacaacacc

SEQ ID NO: 386974 - DNA, 73 bp, Homo sapiens
ttttgatttgatcctgtttccctcaaacctgcagtcctgcgttaactgcggccgggaggctatgagcgagtgc

SEQ ID NO: 386975 - DNA, 100 bp, Homo sapiens
accgagagcgcgaatatcgtcatcgttagaagctccagggttccttgaaaagaaaacaggtagttaacctatctcctgccaacagcaagcgacccaatgg

SEQ ID NO: 386976 - DNA, 82 bp, Homo sapiens
gcggtcctgtactggctgctgctgccctgcgcgctgctggctggctgaggccaccatggagcagtgtgcgtgcgtggagaga

SEQ ID NO: 386977 - DNA, 74 bp, Homo sapiens
ctgtaacttcattttatgatatcccagaagactgggacatgttggatgttgatgaagatgaaaagctaactggt

SEQ ID NO: 386978 - DNA, 90 bp, Homo sapiens
aacttaggagaaagtatacagaattacagctggaaggagatgcacttatttacatggaaccagagaaacaagtgatgtccaggtcgtcag

SEQ ID NO: 386979 - DNA, 90 bp, Homo sapiens
cagagtggaggctgcagactgtggagccgggagccggcaggtgtgctgggcatcaaggtgaagatcatgctgccctgggacccaactggt

SEQ ID NO: 386980 - DNA, 101 bp, Homo sapiens
ctcaagccactttagccagtgtagccccagtatttactgtgggctctctgtcccgccgactcctgcccccattctgcgggcagacctggccgggatcttgg

SEQ ID NO: 386981 - DNA, 98 bp, Homo sapiens
gcttttcagcacctccaaattctttggtttctttttttgatgcatctctacctggaactttgccgcctagaacattccatattctgcttcacacacgg

SEQ ID NO: 386982 - DNA, 83 bp, Homo sapiens
ctcggagcgcggtccctgtattggtctcctgctcctagaggtgttgacttcaaaatcaaaactgtagagctaagaggaaagaa

SEQ ID NO: 386983 - DNA, 82 bp, Homo sapiens
cacgcagcccggcgggaggataaagaccaccacggacaactacacctttgcccaacctgggattcaaatgaaagtgaaaatg

SEQ ID NO: 386984 - DNA, 100 bp, Homo sapiens
caattctgttgcagtcatatgcggtggaatctgttcttcttttgcatcctacgtaaccagaccaagctgtgggtcgggaacatgccctgtgtgccgccgt

SEQ ID NO: 386985 - DNA, 75 bp, Homo sapiens
tcaccccagatgtcctcatcatcccgtcagagctgaggtacttcgtgaagccatgccagtgacggtaacccgcac

SEQ ID NO: 386986 - DNA, 100 bp, Homo sapiens
gggaggccgaatgtgcaggatcaccgaggggaaagtgagcttgacagacatttctcttgggaagttgtgcatctgacaggaatatagtactgtacgatat

SEQ ID NO: 386987 - DNA, 50 bp, Homo sapiens
cttccccttgtgacaagtggggatgagactggtcaaacaaatggatttta

SEQ ID NO: 386988 - DNA, 100 bp, Homo sapiens
gcccacctgcgccggcacacgggtgagaagcccttcgcctgcacctggccaggctgcggctggaggatgacccctccggcgaaggtgtcctgccctcggc

SEQ ID NO: 386989 - DNA, 75 bp, Homo sapiens
ggctattttgtccttgggctgcctgttttcaggttggagatgaagatcatcaagggctccagtggcaccccaaag

SEQ ID NO: 386990 - DNA, 90 bp, Homo sapiens
tcgagatggggaacaggctccgtgcagagctgggccgacccgaaaagtcctgtgagcacgtggtgtgcccgcggccacagtcgtgcgtcg

SEQ ID NO: 386991 - DNA, 110 bp, Homo sapiens
catgaccccagctacctccccaataggtgcatcagggacccagacagcgtggtcctctgcctcttggccattgacgaggaggaggaggatgacatcgccctgcaaatcca

SEQ ID NO: 386992 - DNA, 90 bp, Homo sapiens
gggctcccgctggccgcctcgatgcaggaggacgaacagataaactcatcctgaaagtcgctgttgttctcctgctgagcaagaatggag

SEQ ID NO: 386993 - DNA, 90 bp, Homo sapiens
cagcctcagaagttgctggaattacagagccttccgttccagaaaattcagcacagcatcaccgcgcaggaccatcagcccactccagat

SEQ ID NO: 386994 - DNA, 73 bp, Homo sapiens
agaaagtcttgacacagatagtcttcttattgctgatcatccaattatgatgggttttgaaccccttgtgaac

SEQ ID NO: 386995 - DNA, 100 bp, Homo sapiens
ggaagatccggcgcggggcacaggatccggagctggagcccccaggatcatgcggccagatgatgccaacgtggccggcaatgtccacggggggaccatc

SEQ ID NO: 386996 - DNA, 100 bp, Homo sapiens
gaaccggggtttggagggcagaaattcatggaagatatgatgccaaaggagccatgtgttcacatgtcatgtggaccagtatttaactgtggaaaccgcg

SEQ ID NO: 386997 - DNA, 82 bp, Homo sapiens
aagctggtgaccatgtttgacaagctctccaggcatccagggcattgtggatgcctaccgccaagccctgccccaagttcgc

SEQ ID NO: 386998 - DNA, 75 bp, Homo sapiens
ggcccaagagggaaccctggtgctcaagccaaatgggcggactgttgaagtggctgagggtgaagctgttcgaac

SEQ ID NO: 386999 - DNA, 50 bp, Homo sapiens
cgcgaatatcgtcatcgttagaaggtcatgtaatgtttgcagaaataaaa

SEQ ID NO: 387000 - DNA, 75 bp, Homo sapiens
gacaagagacgatcattctgcaagcaggcaacctgaatacagatgccagaggaacaagcattctgtgttttggtg

SEQ ID NO: 387001 - DNA, 75 bp, Homo sapiens
ctgccttacaccatggacgcgttcatgcttggcatggggatgctggtattttcatctcagcctagtgacgatgaa

SEQ ID NO: 387002 - DNA, 95 bp, Homo sapiens
ccctgcaaccccttctacagccatggggtgaagtggatcctaaagagaggatagcacgccaacgaaaattattacagaagaaacttggccttaat

SEQ ID NO: 387003 - DNA, 75 bp, Homo sapiens
ccaatttgtgccataactgcatcagataagatattgattgtggactactgttcgaagatttttggaagaatactg

SEQ ID NO: 387004 - DNA, 83 bp, Homo sapiens
caagagtcataggattagatgatccaagtcaccaagaaattactgtctcaagtgatacggaggatcagctgatttattcggag

SEQ ID NO: 387005 - DNA, 99 bp, Homo sapiens
cttcccgcgtccgccgattcctcctccttggtcgccgcgtccttggctggcgtaatctccggcctgtgaaactgtgaggggattcggccaagacgtcct

SEQ ID NO: 387006 - DNA, 73 bp, Homo sapiens
aggcgaccgccatggcgttcctcaaactccgtgaccagccactggctgccagaaactcattgaagtggacgat

SEQ ID NO: 387007 - DNA, 73 bp, Homo sapiens
tggccactcagctgcaggagaaacaccaccgcatctcattggagtacatgaagaagctgcacatgcaggagcg

SEQ ID NO: 387008 - DNA, 82 bp, Homo sapiens
acccctcagagcaggagaagctgagcctttctggacagaccaacctgtcagtgctgcaagaaataagatatgtggaacggag

SEQ ID NO: 387009 - DNA, 100 bp, Homo sapiens
ggaatgcactacaacaggaaaatcatattatagatggagtaaagcatcctccaggacaaatagcaaggaaatacagttcctgctccaccattttcctaga

SEQ ID NO: 387010 - DNA, 89 bp, Homo sapiens
cctcgtgcacgacttcgtcgtgggtcagcaagagggccccgctgaccaggtggctgcagaagccaagtacaagaagctggagaagcgat

SEQ ID NO: 387011 - DNA, 51 bp, Homo sapiens
ggagaaggcagcggacaaagagtttttgaagaatgccggccagtcatcgag

SEQ ID NO: 387012 - DNA, 82 bp, Homo sapiens
gggaagaagtacgaggcggacatgtgcgtgagggtttggaaatcccttgtctccaggttgctgggattgacttcttgctcaa

SEQ ID NO: 387013 - DNA, 83 bp, Homo sapiens
agtggatctgcgcacacgccagggggatatgagactttctactcggaatatcctgagtgttgcgtggatgtaaaacccatttc

SEQ ID NO: 387014 - DNA, 100 bp, Homo sapiens
gattttgaaaatgctgcacatcccttaatagtcatctacataggtgcacttacagagtgctacgatgaactggggaacagatatcagcttccagtgtatt

SEQ ID NO: 387015 - DNA, 100 bp, Homo sapiens
ttcttaagaaatgttacacataggcttgctattgacaagcgattccgagtgtttactaagcctgttgaccctgatgagtgtgttgtatcagcagcaaaat

SEQ ID NO: 387016 - DNA, 82 bp, Homo sapiens
gtgggaccagcagctcacctattaaagcaattttccccagcccaacttcactgatatctaactgattttgagccaattcaat

SEQ ID NO: 387017 - DNA, 100 bp, Homo sapiens
gattgtcatcctcattaccatagagtgagtgtgtccgcttgaaaccaactgacatacagcccgacatcttcagctatctcttacacttgatgtacactgg

SEQ ID NO: 387018 - DNA, 100 bp, Homo sapiens
cggcgtcgtcggatgttgtgttgcccgccaccatgagctacacagggtgcgctggctctggccctgcctgtgggttccggtgtggtgcagtcgctggcct

SEQ ID NO: 387019 - DNA, 100 bp, Homo sapiens
aaaacacagcagttgcaccctgttttgcaaaaaccatcagtgtttgggaatgattctgatgatgatgatgagaaatggaatctatttggaatttgcagaa

SEQ ID NO: 387020 - DNA, 75 bp, Homo sapiens
ggagaacctgaaggctgcgcaggaggagtatgtcaagcgagccctggtgtccctacctgcaccggacgacggggg

SEQ ID NO: 387021 - DNA, 75 bp, Homo sapiens
ccggggccgggacgccatgtccatggaggaccccttctttgtggtgaaagggcgaaaattttgaccagagtcctt

SEQ ID NO: 387022 - DNA, 100 bp, Homo sapiens
atttgtacacaactgtgatgctggagaattatcagaacctggtctggctgggctctggctccgctactgcatcgtgtgcttctgtccaagaggcagagag

SEQ ID NO: 387023 - DNA, 88 bp, Homo sapiens
gcgtgaggccggcatcgtctttccgtcctctgaggcgacggccgcggctgcacagcttttcctccgcaaccatgtctgacaaacccga

SEQ ID NO: 387024 - DNA, 76 bp, Homo sapiens
cccgctgggctggccctgcagggaccatggaatccagagctgacaattaccagctctggctgggtcgccacaactt

SEQ ID NO: 387025 - DNA, 100 bp, Homo sapiens
ccctcctcagcctgatcctggaagagactcggggccccccagcctccgccaacccaggatgagttccacccgttcatcgaggccctgctgcctcacgtcc

SEQ ID NO: 387026 - DNA, 101 bp, Homo sapiens
aagaaatggacatgattgcctaaatcagccaaacacaggtgcatacatagagacgtgaagccagaaaatatcctcatcacgaaacattccgtgattaagct

SEQ ID NO: 387027 - DNA, 83 bp, Homo sapiens
aggagacgtaccggctctggaaaatccgcaagaccatcatgcaggcctccggtgtggctgtctctgatggtgtcatcaaggtg

SEQ ID NO: 387028 - DNA, 75 bp, Homo sapiens
cttggctcttttaacctctctagggttcttttcctatgactccatcaattccagctaatcctcccatggctttca

SEQ ID NO: 387029 - DNA, 82 bp, Homo sapiens
gcttgcttggagatcaggacgcaaaggcatgtactggcattgaaaacattgacgaagctattacattgcttgaacaaaataa

SEQ ID NO: 387030 - DNA, 127 bp, Homo sapiens
cacagttcagcagctggaaggaagatggcgcctggtggacagcaaaggctttgatgaatacatgaaggagctagaaggacagaataacgggctcccagattcacaagccccaccaagaggatcaccc

SEQ ID NO: 387031 - DNA, 125 bp, Homo sapiens
cctacttctcatttaagctactcaagaaagagtgcccaattccaaatgtacagattaaatctcttgatgaacagtgtgtggttggcaaaatttccaagcactggactggaattttgagagaggca

SEQ ID NO: 387032 - DNA, 73 bp, Homo sapiens
tcatctggttatgcgtcagcaccacaatggctattcatatgaaaaggaagcaatggaaaattggatcagcaaa

SEQ ID NO: 387033 - DNA, 83 bp, Homo sapiens
gtatggaagagactctgatgcaaatagttttgcacagtaataagttgactcacacagacttaaagcctgaaaacatcttattt

SEQ ID NO: 387034 - DNA, 100 bp, Homo sapiens
agcggccggggcctggggctgcctgccgggcggccgggcgcggcgagcccaggcggggctggtttcccttctcctacacccgggtcttggacagcgatgg

SEQ ID NO: 387035 - DNA, 102 bp, Homo sapiens
atctagaggcataattaggataataaatcctataacaatgcagtgtataaagcttagcagtgtctgcaaaaacgaatcttttcctacaacctgttaactgac

SEQ ID NO: 387036 - DNA, 100 bp, Homo sapiens
cgccattactgggggcttcagtggaggaagtaatgctgagcctgcgaggcctgacatcacttaccaggttgatgctatgaaactgggagtaaaggaaatg

SEQ ID NO: 387037 - DNA, 82 bp, Homo sapiens
tcggggaaagaattgaaccttcaccatataaggaactgcaagcacatgttgaccagataactgaaatggcagcagtaatgag

SEQ ID NO: 387038 - DNA, 100 bp, Homo sapiens
gttggagctttgtctatcttcttccttaggaaaccagtcccagctagtccacagggaccagcagtgccatggaaggatttaacatgtctcagagcatccc

SEQ ID NO: 387039 - DNA, 100 bp, Homo sapiens
agccactcggcgtcagtttggacccacagaggaggaggaaataccagtgcttgagtatccaatgcagctcttttggaagaagaaagaaaagcctatcgaa

SEQ ID NO: 387040 - DNA, 90 bp, Homo sapiens
gccggtcgctggcagctgagcggcggaacccttcgctggcgggagcgcggttcggggccgcagaggtatttgtaggcaaaataccaaggg

SEQ ID NO: 387041 - DNA, 75 bp, Homo sapiens
ggcgcgcggaggggaaatggctgccgaaaacaagccggaaggtactggttttggattaggaattgttttctcact

SEQ ID NO: 387042 - DNA, 140 bp, Homo sapiens
acatctgacgacgtgaaggagcagatttacaaactggccaagaagggccttactccttcacagatcggtgtgatgaatgcagactctgctaccattttggctgtttggatcctcctttgaaaaagtctcctaaacagaca

SEQ ID NO: 387043 - DNA, 87 bp, Homo sapiens
agacaccagctccgaaatcaccaccaagatggtgggcagtggtggtgctggctgcgttcccctccctaggggcaggtggggagactc

SEQ ID NO: 387044 - DNA, 103 bp, Homo sapiens
aggattccaagtaactcttatttgatttcaggtatgctgctgaaagtgggaatcctctacattggtgggcagctggtgaccagtggggctgtaagcagtggga

SEQ ID NO: 387045 - DNA, 75 bp, Homo sapiens
aaagaagtcctttcaagtctctaggactggactcttcctaagcaagtccggggtattccctcagcggatactaca

SEQ ID NO: 387046 - DNA, 101 bp, Homo sapiens
gcaagaacttttaaatcaacgagtgtacctcacagccttctaggatctccagagtggacaggaatctcacttggagggaccatggagcagtatacagcaaa

SEQ ID NO: 387047 - DNA, 109 bp, Homo sapiens
tcgggaccggctgtatgattaggccacaatcttcaatgagtaaacatattcctagaggaggttcagatgagcccctgctgacttgagagagacagagagaccacgccga

SEQ ID NO: 387048 - DNA, 96 bp, Homo sapiens
agcacctaggattaaattggtttcctaaggtcgtggccagaacgccggccgggaccatctgcacaggcgctcgacagctccaagacgctgcggcca

SEQ ID NO: 387049 - DNA, 100 bp, Homo sapiens
ttaacatttgggagaaacacagccagaagcacttttccagccattaactccaggctctcgagaatttgaagatgttgtaaatattctccattcttcttac

SEQ ID NO: 387050 - DNA, 75 bp, Homo sapiens
ccgagcccgcaaaaccatgtccaaaccaggaaatggacagggtcgtctactcaatttgagctgctccacagttcc

SEQ ID NO: 387051 - DNA, 100 bp, Homo sapiens
tctggagtggcccagcctaactgcccagtggcttccagatgtaaccaggatttgcctctgaagcagggagtgtctgcattaaaaatgacctgtagttctc

SEQ ID NO: 387052 - DNA, 101 bp, Homo sapiens
agcgggcggcttcctggcctgggcgctccggtggcggcggaggtgaaagaaaatggcccgaaccaagcagactgctcgtaagtccaccggtgggaaagccc

SEQ ID NO: 387053 - DNA, 75 bp, Homo sapiens
cgctgcgcagccgacgcgggaatgaagcgggcgctgggcaggtcttggtggtaatatcagaatgtttctatgtgc

SEQ ID NO: 387054 - DNA, 87 bp, Homo sapiens
ctcattgtacagtcaaggcggcagggatcatagacggtatttctatgtaaacgaacagtcgggcgagtctcagtgggagtttccaga

SEQ ID NO: 387055 - DNA, 83 bp, Homo sapiens
ccggacccagtccctgagccgcccctacacccacaggctgaccccgcactacatctacccaccagccatcgtgcagcccagcg

SEQ ID NO: 387056 - DNA, 51 bp, Homo sapiens
ccacctccagcccctgcgcctcggaggcattgtggatggatggctgctgga

SEQ ID NO: 387057 - DNA, 100 bp, Homo sapiens
tgcaaaccataatcctgtcttaatactgcaaacaaatcatagtggaactaaggggaacttaatttactggaagaattttaaatcgtttctccaaagacat

SEQ ID NO: 387058 - DNA, 90 bp, Homo sapiens
cgcgtggccgaggcgggcggcggccagctgggctccacagcccaggggagaagatgtcaaccggacactagaaggtggaaggaaacctct

SEQ ID NO: 387059 - DNA, 75 bp, Homo sapiens
aaactctgtgcctcaacaaccatttctaagtgacaactgacatatatccacaagaagtgccatagtgaacctgat

SEQ ID NO: 387060 - DNA, 50 bp, Homo sapiens
cggaaaactcccaacttcctgacaaaaagccttggcatccacgggaggaa

SEQ ID NO: 387061 - DNA, 90 bp, Homo sapiens
ggctcatgtgcggaaacacatggttggttatttgctttccaaagtcgaagaaaaagttggctccccagaacgtccactctcagatctggg

SEQ ID NO: 387062 - DNA, 75 bp, Homo sapiens
ctactacgtggtgcttggaaaggctgccattggacctgtcaagtgcctgagtcatgtgataatgggctacattgc

SEQ ID NO: 387063 - DNA, 82 bp, Homo sapiens
cgacagcagcagcagcagccagtattcgggaaaggcagacaggggctttgttatgcacctaaagccatattggaagctccag

SEQ ID NO: 387064 - DNA, 75 bp, Homo sapiens
ctttggatcagacttttgtgttgcagttcggatcttcgtgaagactctgactggtaagaccatcaccctcgaggt

SEQ ID NO: 387065 - DNA, 100 bp, Homo sapiens
gccacgctgcgggcccgggccatggccgccgccgatgccgaggtcaaaatgcagatcttcgtgaaaacccttaccggcaagaccatcacccttgaggtgg

SEQ ID NO: 387066 - DNA, 78 bp, Homo sapiens
ccttctgcagtccctcgtccagccacccccagatgaggaaaccgaatgcagggagatgaagtcgcttgcccaaagtca

SEQ ID NO: 387067 - DNA, 100 bp, Homo sapiens
tacactggatcagaaacaggccatggagggacaggatccggaggcgccagctcaaccatcgcccaggaccacaccgcagcgtaactgcaggcctctcagc

SEQ ID NO: 387068 - DNA, 75 bp, Homo sapiens
tctgcctcggggacgaaagcaggtagcaaaccatgtgatttcttctgactctatttcctcttctgccagtagttt

SEQ ID NO: 387069 - DNA, 50 bp, Homo sapiens
cgggcagccttccaggtggacaggcatcattcttaacaaagaagttaaat

SEQ ID NO: 387070 - DNA, 100 bp, Homo sapiens
ggataattgggatgatgacaatgtagaggatgacttctctaatcagttacgcatcaagcttctagctgtgcaagaactgcttgacagagaggccttggaa

SEQ ID NO: 387071 - DNA, 97 bp, Homo sapiens
aacattccagttttttaagaagggacaaaagacgcagggtgatggtgaggattccaagggttagacaaaactggttaatctgaactaggtgactgtt

SEQ ID NO: 387072 - DNA, 75 bp, Homo sapiens
caatgatctctaccgatgggaagtccttattattggccctccagatacactttatactggtgcgataccagcggg

SEQ ID NO: 387073 - DNA, 100 bp, Homo sapiens
tttgagtaatactccccatgcatcagaagaatcttcaatggatgaggaacagtcaaaggagatgccaatagacaaattagcgaatacaaatttaagcttt

SEQ ID NO: 387074 - DNA, 98 bp, Homo sapiens
ttctcagtgattcttaatcagcgcactggcaagtgcagcgcctgtaatgtttggcgagtctggaacacatgattctgtgcagatttgcagaccagaca

SEQ ID NO: 387075 - DNA, 75 bp, Homo sapiens
gacgtggttagccagaccaggagctcaacctcatgtagaatccagggtcctctgaaggagttcaaagctgctggc

SEQ ID NO: 387076 - DNA, 89 bp, Homo sapiens
attaaccccacaaccatcacatccaccatgaaagctaagctgctgaagtgggctcgggatgagtttgaaggcctcttcaagcagccagc

SEQ ID NO: 387077 - DNA, 75 bp, Homo sapiens
atacaaacctgacaagggtaaagcagccgaatccagtggagcagcgttacatggagctcttagccttacgcgacg

SEQ ID NO: 387078 - DNA, 100 bp, Homo sapiens
attccctggaaacatgcaggcaagcaggacttccgggaggaccaggatgctgccttcttcaagctaacaggcctcacctcttccattccggagatgatcc

SEQ ID NO: 387079 - DNA, 75 bp, Homo sapiens
catcgtggtagttattgtaagtgactccccggacagctcaacaccaaagctttcgcgggcacagcggccgcagtc

SEQ ID NO: 387080 - DNA, 102 bp, Homo sapiens
gtcctctagtatgggcaagcgtacttctgaagcaaccaaaatgcatgctccacccattaatatggaaagacattgtatgcaaacctgttccattctttcttc

SEQ ID NO: 387081 - DNA, 74 bp, Homo sapiens
ccgaactccaggacagcatccaggcctcattggacagcattcgagttgccattacccagggaggagcaatacag

SEQ ID NO: 387082 - DNA, 83 bp, Homo sapiens
ccgggacccggtgtctgctcctgtcgccttcgcctcctaatccctagccactatggaagcgccgcggagccatcaacagcaag

SEQ ID NO: 387083 - DNA, 112 bp, Homo sapiens
ttttagccaagaagaggatgtacttattggttcaaggaacttccaccttccacaaagaaaccccattccagcgtctgctgcagagaccatgtctgccgacggggcagaggct

SEQ ID NO: 387084 - DNA, 100 bp, Homo sapiens
cctgtctcagcctctcaagtacctggaattacaggtcttgccaagaaatattgctgttccttactgccaactctccaagaaactggaactgcctcctatt

SEQ ID NO: 387085 - DNA, 75 bp, Homo sapiens
aacaagatggaagcaggtttaaaattttacataagaagttacctttttcaggccatgtttttggtatactgtgca

SEQ ID NO: 387086 - DNA, 76 bp, Homo sapiens
agcattcccactttctgaggacctggctcccagcagtcatcaagatccagtctattatcctcccagtccacaacgc

SEQ ID NO: 387087 - DNA, 96 bp, Homo sapiens
gctgcggaaagccgaggcggtggcgctcaagtaccagcagcaccaggagtccctctccgcccagttacaagatgtggaagatgtcaagtttgtgat

SEQ ID NO: 387088 - DNA, 100 bp, Homo sapiens
cttaacaagttggcgacgtccctgggcgcgtcagaacaggcgctgcggctgatcatctccatcttcctgggctgtggatcatatgctgatcccatcacag

SEQ ID NO: 387089 - DNA, 83 bp, Homo sapiens
ctcgctcggctgcgggaaatcgggctgaagcgactgagtccgcgatggaggtcagaatgaaggaacgatttccgtagttgaag

SEQ ID NO: 387090 - DNA, 99 bp, Homo sapiens
cgccatggcggagcagacctactcgtggatggatgacatccagctctgcaaggacatcatggacttgaagcaggagctgcagaacttggtcgccatccc

SEQ ID NO: 387091 - DNA, 100 bp, Homo sapiens
tgatgatgaagctgaagatgatgatgaaaccggtaccgggaagccagtgttgaagtgatggagataatgtctcgttttgctgtgattgaacgtgccagca

SEQ ID NO: 387092 - DNA, 75 bp, Homo sapiens
ccagcggtttctcggaaagtagcctcttctgcaagtggggcattcacacagtaatcactggccagcatcgaaatg

SEQ ID NO: 387093 - DNA, 51 bp, Homo sapiens
gcctcccgaatagctgggattacaggctggagtgtagtggcacgatctcgg

SEQ ID NO: 387094 - DNA, 75 bp, Homo sapiens
gtctccaaattcgcctccatctgtaccatggttgggtatctacagccattggttgctgttcaggtcagctttgct

SEQ ID NO: 387095 - DNA, 100 bp, Homo sapiens
aactcgaagaacagctgtggaaagaagttgcaaaacactgggaagacacgtttcagcagtatgtaagaccagagattaacacacagctgtctgatttctg

SEQ ID NO: 387096 - DNA, 110 bp, Homo sapiens
ttccctttccagaagatgattccaacgccaccaattccaacctgtgtctgctgcacagagctttacatccccgggagcctctacccccaattcagcagcatatttggaat

SEQ ID NO: 387097 - DNA, 83 bp, Homo sapiens
ccgcctgcagctggagctgagcaaagtgcgtgaggagtttaaggagctgaaagcgcgggggatatgagactttctactcggaa

SEQ ID NO: 387098 - DNA, 100 bp, Homo sapiens
gaaagtggagatttggggacggcacccgatgaggccgtgagggccccactggactgggcgctgccgctttctgaggatagcagtgagattcacttcaaag

SEQ ID NO: 387099 - DNA, 82 bp, Homo sapiens
agtctgaaacaattgaggattctagtaatcaagcagcagccagagaatgggaggttgttgatcattatgaaaatcctagaaa

SEQ ID NO: 387100 - DNA, 83 bp, Homo sapiens
tgggtgcccgcaggagcccggcaggacaatgcagatcttcgtgaagactctgactggtaagaccatcaccctcgaggttgagc

SEQ ID NO: 387101 - DNA, 98 bp, Homo sapiens
ggcattttgtgaaagcttatatgatccatatcggaattggagacatagaatttcaggatattgaaatggattccaggcgtgtgcctcgagacaagctg

SEQ ID NO: 387102 - DNA, 75 bp, Homo sapiens
catcctgtgccctgggggaccagcagctgcttccacccaggcataagatgcacatttttctgctctggagccggg

SEQ ID NO: 387103 - DNA, 73 bp, Homo sapiens
tggaagcagcagtccaggaatgcagtcagtctgttgatgaaactatggttctgagcaaggttcaaccagtcaa

SEQ ID NO: 387104 - DNA, 90 bp, Homo sapiens
gatgttctcagatatggtcttaaaaggttgtttacattcagagctctatcaataagaggaatacatattacagtgaattcgacaaccgca

SEQ ID NO: 387105 - DNA, 75 bp, Homo sapiens
cgaccgcgttcctatggacagacgcacagacacctgcagatatattcgactttatgggagaaaatttagcaaaga

SEQ ID NO: 387106 - DNA, 100 bp, Homo sapiens
agaaatgcttcagcagtgcttctgtattataggagagaaaaagttacagaagatgcttcctgatgtgttaaaggttaattggactcctgagattaacaaa

SEQ ID NO: 387107 - DNA, 74 bp, Homo sapiens
tgcagactcgggccgtggccgcctacaggagcccatgaaatcaagagcaccacagctacatttggaatacagat

SEQ ID NO: 387108 - DNA, 83 bp, Homo sapiens
aaccttctgataacctgcttcattattgttatgtacactgctatcttaaggcagcctgcttctgcaaagtggtacgatcgaag

SEQ ID NO: 387109 - DNA, 100 bp, Homo sapiens
gtgagttcaacatgatagagcagagtggaccaccccatgaacctcggtctgaagaactgttgcccaattcaacagtgccagcattccaactttgttaaac

SEQ ID NO: 387110 - DNA, 82 bp, Homo sapiens
ctcgggtggccgctgggactcagaggtcatggcgagcacggtggtgaagtacctgagcaaaatgatgcttcaacacccaggc

SEQ ID NO: 387111 - DNA, 119 bp, Homo sapiens
cggccgggctggcgatggaagatggaaggaaggagcgcagcgggaggacatgtatgcccaggactctatagagctactaacaacatctggtatccagtttaaaaaacatgaggaggaag

SEQ ID NO: 387112 - DNA, 98 bp, Homo sapiens
ttttactgaatacgcatactttagaaataagagctagcaatctagagaatagtacctatgacctgtacaccatccctaaagatgctgactcccagaat

SEQ ID NO: 387113 - DNA, 75 bp, Homo sapiens
ttgagaagtcagatacagctgctgatacttacgaaagcataacccctactgtagaactaaatgcactgtgcatga

SEQ ID NO: 387114 - DNA, 82 bp, Homo sapiens
ggggaggcagcgcgggatcccagcctcaggcgtgcgcggacggtgtgcgggccagaagcggactcctagaagaggggagcag

SEQ ID NO: 387115 - DNA, 101 bp, Homo sapiens
gtatgttggatggtgagatccccagtcagagccgtccaggtatcctgtggtctgaggccatcttcctcgaggcaaggccccagaggaggaccaagagcgtg

SEQ ID NO: 387116 - DNA, 75 bp, Homo sapiens
ttgtcagcacacagcgttcacaaggaattcctcctgatcagcagagactgatctttgctggcaagcagctggaag

SEQ ID NO: 387117 - DNA, 82 bp, Homo sapiens
gctgctatacaacacaattataaaatgtcagcttttaaggagtgaagttcccagaccctacgccccgctgtcaggcagcccg

SEQ ID NO: 387118 - DNA, 100 bp, Homo sapiens
cccgagccagcgaccgaagcagaagaaccacaccttcatcaagcggtccgaggtggaagaagtggattttgccggctggttgtgtaaaaccctgcggctg

SEQ ID NO: 387119 - DNA, 95 bp, Homo sapiens
aaacaagactgctgtattttgtaccattaggcttctcagctccaccagatggcctcccccaagtcccccacatggcatactgtgctctggaaaac

SEQ ID NO: 387120 - DNA, 74 bp, Homo sapiens
ggagccctggaagcagcagctcaccgaggacggggactcgcccaggaagtacacgagaagctccgaggatggct

SEQ ID NO: 387121 - DNA, 83 bp, Homo sapiens
ccagtcctcgtgcgaccgcgctgggtcggaagtgagcaggaaagagccagacttctcagaggtcagtctgttcaacaagtggg

SEQ ID NO: 387122 - DNA, 49 bp, Homo sapiens
agggcacaccaaactccatctggcaccaccaggaccagctgatcattcc

SEQ ID NO: 387123 - DNA, 113 bp, Homo sapiens
gaagactttgtgagaaacaagggtcaaggcacccgggctgttcaagagaaagagaccaaaatcaaggattttcccagattcatggaagaagtaaggaaaaggagagagctagt

SEQ ID NO: 387124 - DNA, 100 bp, Homo sapiens
agtgataaagtcatgattccacaagatgagtacccagaaatcaactttgtggggctgctcatcgggcccagagtacccagtactatgacatgcgctggtc

SEQ ID NO: 387125 - DNA, 90 bp, Homo sapiens
tgccccctggtgtgcggctcagccgtgggctggtctgggctgccacgacaggccactttggagttgtctaccacggagaatacatagacc

SEQ ID NO: 387126 - DNA, 74 bp, Homo sapiens
cgagaagtccccgaccgactggtaaaatgtcggttccaggaccttaccaggcggccactgggccttcctcagca

SEQ ID NO: 387127 - DNA, 97 bp, Homo sapiens
ttggtccaagtgtcccggcctgaggtgtcggccggatccctccttctcccggcgcctcaagcggaaggtgtcatggagaaactccagctgggcccag

SEQ ID NO: 387128 - DNA, 101 bp, Homo sapiens
catccgcggcgcgggagacgagccggccgtcccgggccgggggacccgcccgccatggccaccaagatgatgctgtgtatctggacaatgagaaagaaaga

SEQ ID NO: 387129 - DNA, 82 bp, Homo sapiens
ctgggcttgtccttgctggtgcatgcgtcgtcggcctctgggcagcaggtcagcgtttctcgcagcacacatcccacttttt

SEQ ID NO: 387130 - DNA, 82 bp, Homo sapiens
aggcatcccctgagcgcctgctgggtttttcgttggaatatacgttgcacatttatggcgattctgagtgtgagggcagact

SEQ ID NO: 387131 - DNA, 100 bp, Homo sapiens
cccctgtcccctacgtcctacatgagcgtccgtctccaagagagtatgaagagagtgcgtctgtagggcagggaagatggcggacaagcgcaaactccaa

SEQ ID NO: 387132 - DNA, 75 bp, Homo sapiens
gaaccacctgatggctaatggatttgacaatgtgcagtttatgctgacggtagggaaagtgtccagcggaatagg

SEQ ID NO: 387133 - DNA, 90 bp, Homo sapiens
caaagcctgaacaggcagggccagacccagatcaggatcctcatgaccagccaaagagaagaagaattaggaagcataaatcaaagaaaa

SEQ ID NO: 387134 - DNA, 75 bp, Homo sapiens
ctatgccgacatcgacgccgcctggcaggccctgcgcaccagggctgaagaagatgcagagcagcctgaagctgg

SEQ ID NO: 387135 - DNA, 100 bp, Homo sapiens
ccttttttggtcatgatatcactcctcagcttatccccaaatcacctgtttctggcccagcttattccagatgattccacactgcatggcccgattttta

SEQ ID NO: 387136 - DNA, 100 bp, Homo sapiens
cgcctcgggagctctgggagcccgggtgaccgcgtagcattatgccagtacatacaggcttctaaagccagggatggtgccagccctttcatttcaagta

SEQ ID NO: 387137 - DNA, 75 bp, Homo sapiens
gtgcccaagctcatcgagaagtgctggaccgaggacgaagtggtgctggagaatctggtaaaagcaccattgtga

SEQ ID NO: 387138 - DNA, 98 bp, Homo sapiens
gcgacgccaggagaccccaagctgcatcgccgagtggaaatgcatcttctgcagacaccgggttaagagggtctctggagcctgcatccagtgttcct

SEQ ID NO: 387139 - DNA, 107 bp, Homo sapiens
gccctgttccccgcgctgcggcctggcggcttccaggcgcactaccgcggttttaaaatcaaagatgggaaaatcggagaaaattgcccttccccatggccagcttg

SEQ ID NO: 387140 - DNA, 100 bp, Homo sapiens
cgccggcacgcgaagtggccgcatccgcaaggttggtcttcctgcaaaatctggagttgctgggggcattcttttagttgtccccaatgttatgggtatg

SEQ ID NO: 387141 - DNA, 83 bp, Homo sapiens
cccaaatattgaccaactggcatcccacagcctcctcttccagaatgcctttgcgcaggtttacaaaggaggaaaacgacttc

SEQ ID NO: 387142 - DNA, 75 bp, Homo sapiens
tttatgcagtcacaggcagctggtggaagtgggctaactggagctaaacttcaggactgtatgagccgagcagtt

SEQ ID NO: 387143 - DNA, 100 bp, Homo sapiens
atgcgattttagtggaggactacagagccggtgatatgatctgtcctgaatgtggcttggttgtagcttagcctgcgacgcttatgattagagccaacaa

SEQ ID NO: 387144 - DNA, 83 bp, Homo sapiens
gggaaatccttcggatggtgaactcattagaacaatgtctcaggctgtgcagacaaacggaactcaaccattaagcaaaacat

SEQ ID NO: 387145 - DNA, 100 bp, Homo sapiens
cttctggtggttgccactcacctgaggatagtgatgatgcgggtgtgctggttggtgagacaggacagccggcaccagcgaatcagacttccacatttgg

SEQ ID NO: 387146 - DNA, 98 bp, Homo sapiens
cgacggccacaggggcggcgacggcgcagtgcgaagcgaaacagcctagtgtgttaattgtaacctacaaggagcctgcaaaatcatctactcagttt

SEQ ID NO: 387147 - DNA, 83 bp, Homo sapiens
cggagcaagcggagctcccccaagagccggaaaggatgctggatgagtactttgaggagcagatgaaggagatcatccgaatg

SEQ ID NO: 387148 - DNA, 74 bp, Homo sapiens
ttaatcctcaatttaagcctgatctaacccctagaaacagtgctaggaaaagaatgtcagtgattgttcgcact

SEQ ID NO: 387149 - DNA, 49 bp, Homo sapiens
agcccatcgtgcttaaagaaggctcaccatggatgatgatatcgccgcg

SEQ ID NO: 387150 - DNA, 101 bp, Homo sapiens
aactttgattacccactgctacaaagatcttggattcatggatttcatttgcagtttggtgacaaaatctgtgaagggccagtgcctcagtttcaatccag

SEQ ID NO: 387151 - DNA, 96 bp, Homo sapiens
gttttttgctgtgagtgttgtttgcccagaaacaggtgacttaagagattaaaattaatttggttgctgttggttctgaacaaataatgagttctt

SEQ ID NO: 387152 - DNA, 75 bp, Homo sapiens
cgcgggtgcaggagcaggacttacggcagtgggggctgacagcaatcagccatgactgcctttgcactgtccatg

SEQ ID NO: 387153 - DNA, 97 bp, Homo sapiens
gctatgcagtatttctttggcatcactgcagctagtaatttgccttctggattaacatctgctcaaattaatgaccatgggggatatgaagacccca

SEQ ID NO: 387154 - DNA, 75 bp, Homo sapiens
gattctgcctggccctgggaagagaagcctagatatctgtgtgaagtgagggggtctctctccctccttctcctt

SEQ ID NO: 387155 - DNA, 82 bp, Homo sapiens
ccaaagaccaagcatctcagagaagaggaggaagaaggcgagaagcacagaacagaaactgttcatacttggtgcgctgtgg

SEQ ID NO: 387156 - DNA, 71 bp, Homo sapiens
acagagagggaagtggaatatttcaaaagagcagcccgacggccatggaggctgaagagacgatggaatgc

SEQ ID NO: 387157 - DNA, 100 bp, Homo sapiens
cgcgggtcttgcgagatatctggccgcctctgccgcagctggaggccttgttgctggtggcggccttggcgggcctgggcttgggcctgagcctcatttt

SEQ ID NO: 387158 - DNA, 75 bp, Homo sapiens
cggactcctcagatgccaccaacaactccatccagcagtttcttcaccaagactacagtggtagtggaggccgaa

SEQ ID NO: 387159 - DNA, 50 bp, Homo sapiens
ctctgctgcccgctgtgagggaaaaggtttggtgcacctcgatttggagg

SEQ ID NO: 387160 - DNA, 75 bp, Homo sapiens
gttggatcttgctcagtctctgtcagaggaagatcccttggcttctgggaacttggcagacgcagcttagagaga

SEQ ID NO: 387161 - DNA, 100 bp, Homo sapiens
tgtcatgagacctccaaacccctttggccctgtatcaggagcacaggactggcaacacatgcaatcaaaaggttgcttcttcttagaagaagatggtgaa

SEQ ID NO: 387162 - DNA, 100 bp, Homo sapiens
ctggaggcacccctcaagatctgcggtgacatgtacagccatgatgggaatactgatgagccagaatgggtaaagacagagcgagagcagtttgttgagt

SEQ ID NO: 387163 - DNA, 100 bp, Homo sapiens
ccccggagctctgtgcacctccactgaaacgcaaggagcagacagaacctacaccatccgtgagacacgttggtcgtcattgcctccgagcccactttag

SEQ ID NO: 387164 - DNA, 100 bp, Homo sapiens
gcgcgcgcgaagcgagcgagaaggcacggagtcgccgcggagcgcagatgacgtccggttgtttgccttcgtgcgcttcaccaccggggatgccatgagc

SEQ ID NO: 387165 - DNA, 82 bp, Homo sapiens
cgacaagccgctggcagccgcggatctcaccgccgctcagggttattcagcttctcaaggctggaaaagcgaaggaagtttc

SEQ ID NO: 387166 - DNA, 50 bp, Homo sapiens
cgttaaggaccgttacgtttcccggatttttgatcaccatactgaagagg

SEQ ID NO: 387167 - DNA, 90 bp, Homo sapiens
acctcaccgcgcccgtggccgccgtgcaggcggccgtcagcaacctcgtccggatttatgtgatcagtttggctgaaccccgtctgcccc

SEQ ID NO: 387168 - DNA, 90 bp, Homo sapiens
ctagagagagaaggaacattccagaaactttgggttattcagcttctcaaggctggaaaagcgaaggaagtttcctacaatgcactagcc

SEQ ID NO: 387169 - DNA, 100 bp, Homo sapiens
ggatactgttcattggggcccttattgggtccagcatctgtggccaagaaaaattttttgggttatgaagacagtatggagtttccagaccatagtagac

SEQ ID NO: 387170 - DNA, 100 bp, Homo sapiens
attacaggatcaacactgcttctgatggcaagccagagactgctgctactttgaaacgtacgatagaggccctgatggacagaggagcaatagtgaggga

SEQ ID NO: 387171 - DNA, 100 bp, Homo sapiens
gatgagacttatatgatgcaagatgtggcagaagaacaagaagttgagaccgagaatgtggaaacagggaaatcctcattgacgattcaatttgttgaag

SEQ ID NO: 387172 - DNA, 82 bp, Homo sapiens
gcgagtgggagcaccaggatctcgggctcggaacgagactgcacgttgttataccacatttgcataagttagccttggtgaa

SEQ ID NO: 387173 - DNA, 75 bp, Homo sapiens
agctgcagcaaggatgaaacagttttctgaaaatggtaaccagaagaatttgagaattctaagcttggagttgat

SEQ ID NO: 387174 - DNA, 98 bp, Homo sapiens
cgacggctacaagaagcgggccgcatgcctgtgtttccgcagcgagagcgaggaggaggatgaatttcacccattcatcgaggcacttcttccacatg

SEQ ID NO: 387175 - DNA, 51 bp, Homo sapiens
tttctcctgcaaaccagggtatcagagaaatgggatcttggttcctggcca

SEQ ID NO: 387176 - DNA, 83 bp, Homo sapiens
cctgcaccatgagctggggcaccgagctctgggcttgggcactgtttaaaggaaagttccgagaaggcatcgacaagccggac

SEQ ID NO: 387177 - DNA, 83 bp, Homo sapiens
atcatgtctgcgagccaggattcccgtaaaggcatgacttcctggcaccacagggaaaatcgggtgcaagcccagaaactatt

SEQ ID NO: 387178 - DNA, 100 bp, Homo sapiens
agccaaggaaggcttcgagaagattagcaaaggtgctaatccagtggaaatcaggagagacagctggaaatgatccctattgttttgtggagtttcatga

SEQ ID NO: 387179 - DNA, 90 bp, Homo sapiens
ccggaatgggtcattcactagtatcaacagtgaaggagagttcattccagagagcatggaccaaacatatctgaagagatggattaagaa

SEQ ID NO: 387180 - DNA, 100 bp, Homo sapiens
caagcatcccattacagatagaagagggtcatgatcagagttcgactcttgcccaacactctgttgaactgactttacccaatcatcatccatttcatag

SEQ ID NO: 387181 - DNA, 96 bp, Homo sapiens
acagcgctggaaagatggattacaagaattgagaactggcttagcaactgtagaagcacagacgctctgctgttgcccgtattcaggagttcttca

SEQ ID NO: 387182 - DNA, 98 bp, Homo sapiens
ctgaaacttgcgaaatccctggtgccaaaggctttagaaggttatatcacagatgatgaagaacgagagcttcaaatggatcctgcagactatggaaa

SEQ ID NO: 387183 - DNA, 83 bp, Homo sapiens
caacaaatggcaactttctgagttttgattcccaccatggccatcacccagtttcggttatttaaattttgtacctgcctagc

SEQ ID NO: 387184 - DNA, 74 bp, Homo sapiens
ctttgagtcagacctgtaggcctgatagactgattaaaccacagacttccttgccgtccaggaagggatttcga

SEQ ID NO: 387185 - DNA, 100 bp, Homo sapiens
ccgcgtccgccgattcctcctccttggtcgccgcgtccttggctggcgtcattgactgtgccggaatcctgaaactcagaaactccgacattgaacttcg

SEQ ID NO: 387186 - DNA, 74 bp, Homo sapiens
attcacaagcgcatccatggagtgaaatctgagaatgaagatgacagcgagtgggaagatgtggatgatgagaa

SEQ ID NO: 387187 - DNA, 98 bp, Homo sapiens
gcgagccccgtcctccttcgccgccgcgcacaaccgcacgtgcagttgttagagttggaagcttggcagttggcctcccttcttcccatggaggacgg

SEQ ID NO: 387188 - DNA, 87 bp, Homo sapiens
cttcccgcgtccgccgattcctcctccttggtcgccgcgtccttggctggcgtgaagcaggagctggccaacagctcggatgcgacc

SEQ ID NO: 387189 - DNA, 90 bp, Homo sapiens
cattttgtgcgcaccacttttgtgtccaggcataagaaatttgacgtgccggtggtggtgtgcacattgagccccggtatagacagttcc

SEQ ID NO: 387190 - DNA, 100 bp, Homo sapiens
gaatgaagccgcagaccctggcggttcattccagccaacaaatgaaatgatgcttaaattttatagcttctataagcaggcaactgaaggaccctgtaaa

SEQ ID NO: 387191 - DNA, 100 bp, Homo sapiens
acctggatctttgctagaaagagagaatgccgggacattctgcttcctgtcatcaccaaagagctgaaggagctgctggagcagaaggatgacatgcaac

SEQ ID NO: 387192 - DNA, 100 bp, Homo sapiens
gagattcagccgtgaagcaagtgcagatagatggccttattcaagatttatggaaagttacctcttatttctttacgaatctcagataaaaaactacaag

SEQ ID NO: 387193 - DNA, 100 bp, Homo sapiens
ccacctcgacctctggttctacttcacactgcagaactgggttctggactttgggcgtcccattgccatggtttaactatagatcaacacatcatcttgc

SEQ ID NO: 387194 - DNA, 90 bp, Homo sapiens
cttaaaggagtggacattgctagcaatgagctcccaaagccatccagcttcaacattgctttatggcatgtgtggtcgtttttcactcca

SEQ ID NO: 387195 - DNA, 74 bp, Homo sapiens
gctgagtggtttttcggatcatgtctggtggctccgcggattataacaggaacttgtaatagctggcatcgttg

SEQ ID NO: 387196 - DNA, 83 bp, Homo sapiens
ctcagtgcgaagaagctgcagccgcacctggccaaggtgcctccggagccagcgtggtggccatagacaacaagatcgaacag

SEQ ID NO: 387197 - DNA, 100 bp, Homo sapiens
gccaacccaaattaccttaattgctggtgcagtggtgtcatcttggctcagtgcagcctcgacttcctgggatccagcgatcctcccgcttcagcctcta

SEQ ID NO: 387198 - DNA, 100 bp, Homo sapiens
cgcggctggcgccgctgcgcgcatgggcctgttcctggcccgcagccgccacctacccagtgaccatgataggctgatcagctgaccgaagaacagattg

SEQ ID NO: 387199 - DNA, 100 bp, Homo sapiens
cgcgagccccgtcctccttcgccgccgcgcacaaccgcacgtgcagttttcggctttgtgagaaaccttaccatcaaacacgatggccagcaacgttacc

SEQ ID NO: 387200 - DNA, 75 bp, Homo sapiens
ccctaaaaatggcgattctgcaaccaagcacctgaaacagcagctgcataataaatgtgcttctcatctaaaacc

SEQ ID NO: 387201 - DNA, 75 bp, Homo sapiens
ccacagcagtgtttctcgggttggaaaagccattgataagtcccacagtgttttgttcgccccacggaggccaag

SEQ ID NO: 387202 - DNA, 98 bp, Homo sapiens
gcaaggccaagtacaggcagtgtcaagtaggtagcaagcaagagagaagacagaagtcaggtccagaaattcagagcagcccgacggccatggaggct

SEQ ID NO: 387203 - DNA, 98 bp, Homo sapiens
ttccatctatctctggaaactttcctcctccaccacctcttgatgaagaggctttcaaagtacagtgatgctattgctgagattagagccatttgtat

SEQ ID NO: 387204 - DNA, 82 bp, Homo sapiens
cggggctttcagcaaatcaaagccagccatgaagactttgaatttatttcaggaacacgaatgcgcaaacttgctcgagaag

SEQ ID NO: 387205 - DNA, 82 bp, Homo sapiens
cagaaaccccgttgacaaggcactgctttttcatgacggctgaggccaccatggagcagtgtgcgtgcgtggagagagagct

SEQ ID NO: 387206 - DNA, 99 bp, Homo sapiens
gtctttgtgtcctgagatcaaatggcacttcattggccacctacagaaacaaaatgtcaacaaattgatggctgactccactggaacccattctctgta

SEQ ID NO: 387207 - DNA, 74 bp, Homo sapiens
tctttgagaaaaacctgaaagatgtctcagaattgaatgatctggcacgggaccctccagcacagtgttcagca

SEQ ID NO: 387208 - DNA, 90 bp, Homo sapiens
cctacatccgtgtcctgggcatccaggtggacacagatggctctggggtctcctgctgccagctaagtgtgggagaacttgtgcacgtat

SEQ ID NO: 387209 - DNA, 87 bp, Homo sapiens
actcctgatattattatagcctcaatactgaggctgattgctctacattaatcatactcctccaccactgtccaagagtaaggagag

SEQ ID NO: 387210 - DNA, 75 bp, Homo sapiens
atgaccacactccaggaatgccagtgcatcttttgcacagctttgtatcacggactgattcaccgagcccaaccg

SEQ ID NO: 387211 - DNA, 75 bp, Homo sapiens
tttaaacaagagatttccacagaaggttccgagaagtaaagctttggaggtcacaaaattagcaatagaagctgg

SEQ ID NO: 387212 - DNA, 100 bp, Homo sapiens
ctggcaaccagtcacatgcttgaactcagcatacaggatgtacagattatcctcttgacttgaaccacagtgaaaccttcctgcaaactacaacatttct

SEQ ID NO: 387213 - DNA, 89 bp, Homo sapiens
agccctgtggctgggggcagagctcagatatccttggaacagaagatcttattgtggaagtgacttccaatgatgctgtgagattttat

SEQ ID NO: 387214 - DNA, 75 bp, Homo sapiens
ttgaagatagccatcagccgctacgtgactcttttctccaggtgggccttcaccttgatcatcatctcctcctac

SEQ ID NO: 387215 - DNA, 90 bp, Homo sapiens
gccgtccacgtgaaggggcccttctcggtggaggccgacccatccaggctcagctgtcgcaggccctggaggagctgggaggccagaaac

SEQ ID NO: 387216 - DNA, 74 bp, Homo sapiens
gcgttggaggccaccgtttccagcttgaaggcaggtccacgcctcctcctggaagccttcccttgactgactcc

SEQ ID NO: 387217 - DNA, 75 bp, Homo sapiens
tggttttggaggtggcccagcatttggcttagcagtgtctgcaaaaacgaatcttttcctacaacctgttaactg

SEQ ID NO: 387218 - DNA, 112 bp, Homo sapiens
attagtgtgatctcagctcaaggcaaaggtgggatatcatggcatctatctggttggatatgtcaagtgaccagatagctgccaatctgcaagcagttattaatgaagtttg

SEQ ID NO: 387219 - DNA, 90 bp, Homo sapiens
gcaaggagagacgtcgctgaggggcttgcctgaagcgaggggcacttctggatccagctgtgtgatagccgcactaggaaatacctggag

SEQ ID NO: 387220 - DNA, 74 bp, Homo sapiens
cggggcctccgcagcgacaacatggaggccgtgaagaccttcaatagcgagttagttgaatccatggacatgaa

SEQ ID NO: 387221 - DNA, 75 bp, Homo sapiens
gaggagagttctccaaacatgatcgtttactgcaaactacaagtgtattcatcagagtttggaggacaataatag

SEQ ID NO: 387222 - DNA, 99 bp, Homo sapiens
ccctgtttgctgggccaccagtcactgcacagaaaccagcctggacaccaagtctgtgtcagaaggccacctcaagaggaacatcgtggtgaagaccgt

SEQ ID NO: 387223 - DNA, 82 bp, Homo sapiens
aaaagccctggtggagctgaaggttgcaggagggtgaggacaaaatcttcttaatcaacaagcttcactccatctacgagag

SEQ ID NO: 387224 - DNA, 74 bp, Homo sapiens
gcagacatggacaccaaacatttcctgccgctcggggctttgttatgcacctaaagccatattggaagctccag

SEQ ID NO: 387225 - DNA, 97 bp, Homo sapiens
attatatgaagcagaaaaatcaaaaagggaatcctttgggaaattatttactaggtggaaaatttgcagccagaaataaaaactattgccaggcatc

SEQ ID NO: 387226 - DNA, 50 bp, Homo sapiens
ctcctgcacccgggaggactatgagtggcaatgagaagcacgaccttcat

SEQ ID NO: 387227 - DNA, 98 bp, Homo sapiens
cgcagctgaagctcatcatgaccttccagaattacgggcaagcgctgttcaaacccatgaaaagctccaccatgaggcgaggtggatggaggaagcga

SEQ ID NO: 387228 - DNA, 100 bp, Homo sapiens
ttgggtgcgccttcccggcgtctaggggagcgaaggctgaggtggcagcggcaggagagtccggccgcgacaggacgattcaaccctatgaaaagataaa

SEQ ID NO: 387229 - DNA, 74 bp, Homo sapiens
ggctcctgcagacccctggcttcctatttcgctgcctcatcacccacatctcccaatgcattgcctcctgctcg

SEQ ID NO: 387230 - DNA, 102 bp, Homo sapiens
tttcttatgcttataagagtggaacaggatttttttcccaggaagccatcccgtcagaggggttcaagtgatgaaagttggcaaactgcagctacatcaagg

SEQ ID NO: 387231 - DNA, 100 bp, Homo sapiens
ccatactgagtcagatatatacagatggtccaggagaagctttgaaggctgtgaagctcaccagtatccagttctcttataatactgatataactcagtt

SEQ ID NO: 387232 - DNA, 82 bp, Homo sapiens
aagagatgagagaccactctttccccaaatctggagcagcaaccatttgttccccagtgcagagaaagcgactcttttcctc

SEQ ID NO: 387233 - DNA, 100 bp, Homo sapiens
ccttcaggattgagacccggaaggcttcaaaggctgtcgcaaggaggaagacagcacccaagaaaacctcatttggctcgctgaaggatgaagaccggat

SEQ ID NO: 387234 - DNA, 96 bp, Homo sapiens
gtgagcccttggaggttacaaccaacacaggtgtcatggagaaactccagctgggcccagagattctgcagcgggaaaatccaaggcttatttatg

SEQ ID NO: 387235 - DNA, 82 bp, Homo sapiens
ctgaccaccaatcagatccgtaaggtcgcaatggaagaagagatcgccgcgctggtcattgacaatggctccggcatgtgca

SEQ ID NO: 387236 - DNA, 90 bp, Homo sapiens
cattaaagcgcttcagtcaaaccctgcaggttgctgctgactcagccattctagaagttcttcagtccaacattcagcatgtgctggtct

SEQ ID NO: 387237 - DNA, 100 bp, Homo sapiens
ccgagaagtactccttcatggccaccgtcaccaaggcgcccaagaagcaccagtttctggcagagatcctacagtggcgagcccaggcgactcctgacca

SEQ ID NO: 387238 - DNA, 116 bp, Homo sapiens
catgaatgctggctttcagagagaacagcgtttcagttttggtcatcggaagtggtgccttcagcacaggtgctggagaatctggtaaaagcaccattgtgaagcagatgaggatc

SEQ ID NO: 387239 - DNA, 50 bp, Homo sapiens
ctgagataagagtccacacagttgagaaacctctgcgccatgagagccaa

SEQ ID NO: 387240 - DNA, 98 bp, Homo sapiens
gggatacatccatgttgaaaccaacactgatggcagcagttccggtgaagaagaaaacattttctcgaaagaatcattcaaacttatggaaactcaac

SEQ ID NO: 387241 - DNA, 100 bp, Homo sapiens
tgcaaatccacctttcaaatctacagcaaggtttactctgaatcccaatcctacaggagttcaaaacccacacatgtctcctaaaaacccagaacagaag

SEQ ID NO: 387242 - DNA, 90 bp, Homo sapiens
caaaccccaagtcctccttgccaggccttcaaccactatctcagtgcaatggtgctacctgggcgatgccttccgctgtgccagctgccc

SEQ ID NO: 387243 - DNA, 75 bp, Homo sapiens
ccggcgaccacggatgagcccggcctcccttttcatcaggacgggaaggtcatggaaaatggaagatttgcaaaa

SEQ ID NO: 387244 - DNA, 90 bp, Homo sapiens
acacgcttcttctggaagaccagccaacaggattcagcaccatggcggaagacatggagaccaaaatcaagaactacaagaccgcccctt

SEQ ID NO: 387245 - DNA, 100 bp, Homo sapiens
aaaggcctgacgttcacggccacgggcatcctgacagtggtcgggacgaccctgggacagtctccactggggcagatccagctgaccatccggcacagct

SEQ ID NO: 387246 - DNA, 76 bp, Homo sapiens
tgccccccggagccgcgagcacccaagagtgtgaacatggctacgcctcttcattcccgtccatgccgagcccccg

SEQ ID NO: 387247 - DNA, 90 bp, Homo sapiens
cggaagggtctttgttccctgcagccctcccacggtgtgtgtggtttcagcgcagcatggctgtggtcatccgtttgcaaggtctcccaa

SEQ ID NO: 387248 - DNA, 49 bp, Homo sapiens
ttggcttctgaggcatctgacaagaagacttgcactatctgccagatgc

SEQ ID NO: 387249 - DNA, 91 bp, Homo sapiens
ctccttcggcagtccacccaccgccgccgcctcccagtgcagagcagagcgggcggaggaccccgggcgcgggcgcggacggcacgcgggg

SEQ ID NO: 387250 - DNA, 83 bp, Homo sapiens
tcccgctgcgctaggggaagcgggcagggtttggaaatcccttgtctccaggttgctgggattgacttcttgctcaattgaaa

SEQ ID NO: 387251 - DNA, 75 bp, Homo sapiens
agtcccacttcaaacattcgtctcggaaaccccgcctcttacagtcacgaggagccaggtgagaatttcaaggat

SEQ ID NO: 387252 - DNA, 100 bp, Homo sapiens
cggggcgcagcgtgacggctggcatcatcattgttggagatgagatccttaagtctctggctgatgaacttgctcttgtggatgttttggaagataagct

SEQ ID NO: 387253 - DNA, 49 bp, Homo sapiens
tgagcctcgggatttacccctattctcacaccattttgctggtacagcc

SEQ ID NO: 387254 - DNA, 98 bp, Homo sapiens
tacagaacagcacgtaccagaggtggaagtccaagtcaaacgcagaaggactgcctcactgagcaaccaagaggagagctggtgacggcctccaaggc

SEQ ID NO: 387255 - DNA, 75 bp, Homo sapiens
ggaaacctttccaacacagatgtccaagctgccaaggtaagggactgttctgaagaacctttccatttagtgatc

SEQ ID NO: 387256 - DNA, 50 bp, Homo sapiens
ggaactggcccggaaacaggaggacctcctggccactctgaatccacttc

SEQ ID NO: 387257 - DNA, 75 bp, Homo sapiens
cggagcctttgggaaagtgtacaaggaaatatatcctggacaattccagccatctctctgtcacaaattcatagc

SEQ ID NO: 387258 - DNA, 83 bp, Homo sapiens
cttgtttgtggatcgctgtgatcgtcacttgtcctgacacagctctccctgaggagcagccacattccagctcccagtgcgcc

SEQ ID NO: 387259 - DNA, 100 bp, Homo sapiens
ccatgtttctcctcgctgcccgcacatcctgctccacagggcagagggaggccaagaagacctctgcactggcctccctgtggagctcctgcgtggtgct

SEQ ID NO: 387260 - DNA, 90 bp, Homo sapiens
gatcactaatccatcttcagcttcaattacaagtatatgagtagaccagtgatgagtggcccaggactctatgaccctacaaccatcatg

SEQ ID NO: 387261 - DNA, 100 bp, Homo sapiens
agcctctgggttggactcgtcagggtgaaggtcaggcgttgactcgcattaacataaagagcgggaacagcaggtgctggccaaggcctctaaggtgatc

SEQ ID NO: 387262 - DNA, 100 bp, Homo sapiens
gggaggactggggaagactgtgaggcagcaaccatccgggagcggccaagctcggccatctacccctccgacagcttccggcagtccctcctgggctccc

SEQ ID NO: 387263 - DNA, 88 bp, Homo sapiens
tggaacaggagttccgatcgacccggtaccaagaaggggagtgcccgcggcagtttgtgtgtgttggtggaagcccctcccggatgaa

SEQ ID NO: 387264 - DNA, 98 bp, Homo sapiens
cactaacttctctctcagatgttgaaaagactaatagggatgccaaaggaaaaatatgatcctccagatcctcgcagaatttataccatcatgtcagc

SEQ ID NO: 387265 - DNA, 75 bp, Homo sapiens
ttgggggtgtttgacagagccgtgtgctgtgtgggcttctccaaatctgaagagtctaacctgtctctgcaagct

SEQ ID NO: 387266 - DNA, 100 bp, Homo sapiens
ggcacactgtgggggtgtcctggtgcacccccagtgggtgctcacagctgcccattgcctaaagaaagcctttgtggtagaaacccagccctgcatgccc

SEQ ID NO: 387267 - DNA, 100 bp, Homo sapiens
acgagctgtttctcatctttatactcttccaggtctcctggaacacggccgcaactggtcggccatcgcccggatggtgggctccaagactgtgtcgcag

SEQ ID NO: 387268 - DNA, 85 bp, Homo sapiens
accagtgcagcagaatatgatgaactcggcttcaggaccgcttggttttacatggattaaacattattgtacatatgataaggga

SEQ ID NO: 387269 - DNA, 100 bp, Homo sapiens
ggggaccgagcctgggaggccggccggtgccagcacctttcggcttctgagacggcggcagcagcggcattcaggagccaaaaacctgtatatcatctcc

SEQ ID NO: 387270 - DNA, 83 bp, Homo sapiens
taaaaacaatagctcaaggaaacctttccaacacagatgtccaagctgccaaaacagaggaagagttcctagatcaagtgaag

SEQ ID NO: 387271 - DNA, 100 bp, Homo sapiens
cacttctggtggttgccactcacctgaggatgatgaagtacattgagacagagctaaagaagaggaaagggatcgtggaacatgaggaacagaaagttaa

SEQ ID NO: 387272 - DNA, 50 bp, Homo sapiens
gcttaattggagtgccccaagggtttttgagttccagttgactgcagagg

SEQ ID NO: 387273 - DNA, 89 bp, Homo sapiens
attcgcgatttagaagttgtggagggaagtgctgctagatttgactgcaagattgaaggagctgtaaaccggatcaaagaaattatcac

SEQ ID NO: 387274 - DNA, 96 bp, Homo sapiens
gctcctctgtgtttgccgcctgggagtacaagcgcaagctagccagagtttccctggtgcgcaaagaactcaggtcccggatccagagcctgccag

SEQ ID NO: 387275 - DNA, 82 bp, Homo sapiens
cgaatccccatcctgcacttccgagccgcccggccacccttcgtcatctgcgtgaagctgaaagtttcctacactactgagg

SEQ ID NO: 387276 - DNA, 128 bp, Homo sapiens
cagggctgaggaaccatgtctccatccccgaccgccctcttctgtcttggatgtacagttacccagcacgtgtacctcctcctcctcctattgctcgggctgtagtgccctcgaaacgtcagcgtgta

SEQ ID NO: 387277 - DNA, 74 bp, Homo sapiens
cagaaacacaaagctgttcttttcaaaatgggattcttacagaagcagagattgatgctcaccttgttgctcta

SEQ ID NO: 387278 - DNA, 101 bp, Homo sapiens
ctcccatcacctacccgcagggcctggcactggccaaggagattggttctgggccggagaaggggcgacgttcgggcaccccccgaatggacaatctttcc

SEQ ID NO: 387279 - DNA, 100 bp, Homo sapiens
cgggcggaaggcggaggccgagaccagacgcggagccatggccgaggtgttgcggacgctggccggaaaaagaagtgtgactactggatcaggacttttg

SEQ ID NO: 387280 - DNA, 74 bp, Homo sapiens
cctgcctcccctgcgtcccgccaccggccgcttctgtcctcgatgtggaagatgtcaagtttgtgatcaactat

SEQ ID NO: 387281 - DNA, 75 bp, Homo sapiens
tcagcctcccctgtcccgaacgcagtgtgtggaaagaactgataaatttcaaacggaagagagtggcagcattta

SEQ ID NO: 387282 - DNA, 85 bp, Homo sapiens
gaatctattgccaacatccagattggtgacttagattctaccacatttggtaccataccaccacaccctccacctcccccaccgc

SEQ ID NO: 387283 - DNA, 75 bp, Homo sapiens
ttcgacacatctttacgattccaggacaagcttttgtccccaaaccagagcaaagccttctagacaagctcagtg

SEQ ID NO: 387284 - DNA, 100 bp, Homo sapiens
aagaaataaatatttccttcattccacatgaatctcaggtcacaagctacctaactaagaagtttgctgaactacgcagccccaatgagttcaaggtgta

SEQ ID NO: 387285 - DNA, 100 bp, Homo sapiens
acagctatatgggaacaacatacagtgacgcttcacagggcaatggacctcatcatgaccgttgctgtacttacaatgaaaacaacttggtggatggtgt

SEQ ID NO: 387286 - DNA, 51 bp, Homo sapiens
caatactacctttatttccaccataggtgtaccaacagtaccgttattgcc

SEQ ID NO: 387287 - DNA, 78 bp, Homo sapiens
ggagttctgcggagggggctccctgcaggagatttaccatgtcggtcctgaccgccagcctgtcgtacatggtgggga

SEQ ID NO: 387288 - DNA, 82 bp, Homo sapiens
aacgcattcatcgacaggaaggacagttactactccattcaccagataggtgtcgtgaaaactacccctaaaagccaaaatg

SEQ ID NO: 387289 - DNA, 75 bp, Homo sapiens
aagggggcatcattgtgagtggctccagggacaggacggccaagttgtggaagctgatcgaggaagcctaagcag

SEQ ID NO: 387290 - DNA, 101 bp, Homo sapiens
aagcagtattgggtctgcaactcatccgatgcaagtatttcatacacctactgtgatgttctcagtgcagctgagtcttggtgagcagacatgggaatccg

SEQ ID NO: 387291 - DNA, 75 bp, Homo sapiens
gaatggtgccgaccgcggccatcgcagttggaggctattttttggggggggttagcactctacgtatatgaatat

SEQ ID NO: 387292 - DNA, 85 bp, Homo sapiens
tgacgtggacatcggaggggagcgagttcatggcctcccacgggaacgacgccgcgagagccaggtttgagtccaaagtaccctc

SEQ ID NO: 387293 - DNA, 100 bp, Homo sapiens
agccctccggagcagaaagtggggatggtctctatctcctgaccttgtgatctgcctgcctcagcttcccaaagtgctgagatgacaggtgtgagccatc

SEQ ID NO: 387294 - DNA, 98 bp, Homo sapiens
ttgcccgtgaccgtcgctagaactcagttgtgcgttgcggccagtcgccactgctgggatgaccgctttggaagacgtgttgtcacgttcagctgctg

SEQ ID NO: 387295 - DNA, 75 bp, Homo sapiens
gaacaagccaggaaaaccccgaaaacgcaagaagcgtgttgtgcccacgtgcctcagggccttggtagaaatggc

SEQ ID NO: 387296 - DNA, 58 bp, Homo sapiens
ggctccttcggagacatctatctcgttgtcgccgtgatcctgaaggcgctgacctacg

SEQ ID NO: 387297 - DNA, 76 bp, Homo sapiens
agcgaaggcggctggagaccgagctagatgggctcaggaaaatgttggggcttttcaggaagcataataagattcc

SEQ ID NO: 387298 - DNA, 97 bp, Homo sapiens
agcccgggcccaggccccggcagcgcctgggacaaggtgtcatggagaaactccagctgggcccagagattctgcagcgggaaaatccaaggcttat

SEQ ID NO: 387299 - DNA, 75 bp, Homo sapiens
ttctatacttaatctttgcagctgttgaaggcgtgatgagagtcattgggggtcgacatgttaaaacgggtcagt

SEQ ID NO: 387300 - DNA, 109 bp, Homo sapiens
cgggacggctctgtaggaaggaacttggttccccctccctcagcttccgccccaaaaggaaattcgaaatgagtcccatgactatcctcatagagtggccaagtttcca

SEQ ID NO: 387301 - DNA, 98 bp, Homo sapiens
gcgcgaggactcacccgccgccaggagcctcagcctgcaggaagatgggaatttcttagccataggctcacatgacaactgcatctatatatatggcg

SEQ ID NO: 387302 - DNA, 100 bp, Homo sapiens
aaagcttctggcaagaggtgctgatatcaacacggtcaacgtggacggcttgacagccctgcaccagttcataaaccagaaaaggtcacatggacggaag

SEQ ID NO: 387303 - DNA, 51 bp, Homo sapiens
acagaaacaaaatgtcaacaaattgatggtatgtgaggaactgccctctcc

SEQ ID NO: 387304 - DNA, 82 bp, Homo sapiens
gccattaagaacatccatggagtcagacctgcctagagctggaacgttacctccagagcgagccctgctatgtttcagcctc

SEQ ID NO: 387305 - DNA, 75 bp, Homo sapiens
ggcgggcagctgtgcccgggcggcacggccagaatccagcaactatcacaagaatactccttagccacttcaatt

SEQ ID NO: 387306 - DNA, 100 bp, Homo sapiens
cggccgcggcctgctggtttcaggtggaagcagggaaaggcctggagatgaggaagctggttctctcggggttcttggccagcgaagagatctacattaa

SEQ ID NO: 387307 - DNA, 75 bp, Homo sapiens
agaggggacttgatgttaacaaatgtgagattgccaggccctttctggttactgtggctttatggcagccaacct

SEQ ID NO: 387308 - DNA, 75 bp, Homo sapiens
tgggaaaaataaagtgttgagtaaacagaccaagttgggatttgattgccttatgtgacaagcccaagatctgtg

SEQ ID NO: 387309 - DNA, 83 bp, Homo sapiens
cgctgccgctgccgcacctccgtagctgactcgcaattctgtggtgttcttggtcacacatttatggagtttctgaagggcag

SEQ ID NO: 387310 - DNA, 98 bp, Homo sapiens
gtacacctcatccctgtacgggtgcctggcctcgcttctgtcccaaaagctgtatgtgatggcttctgtgtttgtctgtctactcctttctggattgg

SEQ ID NO: 387311 - DNA, 100 bp, Homo sapiens
ataccgaattcacaatggacagaagttagtggttcctgggagctgaagtgggaatcagtacatcgagaatccacgcccggggaccagtaggacttgaggg

SEQ ID NO: 387312 - DNA, 116 bp, Homo sapiens
ggggatacagcctggaaggtgcgtgtggggctgggtctcggagtgggagacgtggagtgcagacggggcgggcaccatgaacaagttacggcagagcctgcggcggaggaagccag

SEQ ID NO: 387313 - DNA, 75 bp, Homo sapiens
gcaggtctctgtcgagcagcggacgccggtctctgttccgcaggatggttcaacagagtttggaaaagatttcta

SEQ ID NO: 387314 - DNA, 83 bp, Homo sapiens
gggagctggagccacctgcgaaggtgtcctcccatactggacccctacagctttctgtatgagcccaatagccaagggtacaa

SEQ ID NO: 387315 - DNA, 75 bp, Homo sapiens
gaggaggcgagctagccgggagttacaccgccaccgccaggtgtcagcgacggaggatgggaatgtcaccaagga

SEQ ID NO: 387316 - DNA, 75 bp, Homo sapiens
gatccagacgatccgaaatgctctgatccatcagttaaccacgttccagctgtgggaatgtggcagccatcttgg

SEQ ID NO: 387317 - DNA, 83 bp, Homo sapiens
aatctggatgccaaacgagattggggccatgccaaggactatgtggaggttagcatggcctcattgaaagaactagatcaaag

SEQ ID NO: 387318 - DNA, 90 bp, Homo sapiens
tataacaaccttgttaaggagaactacaaaaccctcatgtccctggaattaaacaaccaccatgtcgagcaaaaaggcaaagaccaagac

SEQ ID NO: 387319 - DNA, 87 bp, Homo sapiens
acgcctgccctcacacccacggagggagaagaagaagttgagcaagtccctgcagaaaccctctaccaaggcttgctccccagcctg

SEQ ID NO: 387320 - DNA, 98 bp, Homo sapiens
agcattgcaatccctctgggagtcaccacatcagatacatcctactcagatatggctgctggatcagaattatttgcaggtgtcttccctcgaatggc

SEQ ID NO: 387321 - DNA, 100 bp, Homo sapiens
ctgggcgtcagcgagccgtgagatgcgtggtccaccatcggtgacctcaccgcctcggttcgccctcagccgccccgctgcctccagtgccatccctcca

SEQ ID NO: 387322 - DNA, 100 bp, Homo sapiens
ggagaggagctgtggataacgggaggtgaatttccatgtcaacatagtcctgacttaattcagtgcacaaatgagatgaatgtgaacatcccacagttgg

SEQ ID NO: 387323 - DNA, 80 bp, Homo sapiens
ctgtaacttctcctttaagactaaagcccaccaagaaaacacattgtggagcgctatacagagttttatcatgtacccac

SEQ ID NO: 387324 - DNA, 98 bp, Homo sapiens
gtggacacctgtgtcagcatgtgggacctggttctctccatcgccttgtctgtggggtgcactggcgatcagtgggtgaccgcggctgcgagggactt

SEQ ID NO: 387325 - DNA, 82 bp, Homo sapiens
ggagaagctggagctcacggagaagaaggcctccgacctgatggtgagaccattctaaaaggcctccagtccattttccagg

SEQ ID NO: 387326 - DNA, 51 bp, Homo sapiens
tccgtttccagggttccgaccagtgtatcctactcagtacatgtatctgaa

SEQ ID NO: 387327 - DNA, 89 bp, Homo sapiens
ccagggtctgagctcatctgctgttttggagaaacttaaggagtacagctctatggaaggatttgaaatttccctgcccaagaatcaac

SEQ ID NO: 387328 - DNA, 80 bp, Homo sapiens
catgtctgcgagccaggattcccggccaagactaaggggctgcagagcggggtggacattggcgtcaagtactcggagaa

SEQ ID NO: 387329 - DNA, 100 bp, Homo sapiens
cagacattgagctcctccctgtgaactcagcattgctgcagctcgtgggtgctcaggaactagtccaggctagtgagcgattaaaaaaccaatccaaaga

SEQ ID NO: 387330 - DNA, 49 bp, Homo sapiens
tcgaggagatcatcctgcagtatctccagtctatgtgctgaagaagcag

SEQ ID NO: 387331 - DNA, 83 bp, Homo sapiens
caaaaagtttgtcattaaacccatcgacaagaaggcacctagaaacttgcccaggccaaagaagagaacgtgggcttacatca

SEQ ID NO: 387332 - DNA, 75 bp, Homo sapiens
tcaacgcgcagctggatgggatcatttcggacttcgaagacttcccaagtaagaagcggaagaggagccgctgga

SEQ ID NO: 387333 - DNA, 100 bp, Homo sapiens
ttgatcagatcctagactcggtgctggtgggccctgtgccagcagggagacacatgtttgtctttcagctctttccttcggggaacaagccgggcccttg

SEQ ID NO: 387334 - DNA, 98 bp, Homo sapiens
tcctacctaggtaatgtgtagttctcaatgcatcatgtcaggcagcttatgatgccaatttgtcccatgaaatgcactcggtgatggaaagagagcca

SEQ ID NO: 387335 - DNA, 96 bp, Homo sapiens
cgccactcactggggccacctctgactgcttggggaggcgcccggtgatgctgctgtgcctgggcggctaccacctggagtcactggcggagtcag

SEQ ID NO: 387336 - DNA, 100 bp, Homo sapiens
ttcgactggaacctggagcaggccggctgccaccttctgggctcctggggccctgcccaccacaaattgtgttcagtgtggacccctccgagggcagccc

SEQ ID NO: 387337 - DNA, 75 bp, Homo sapiens
aaagagccattgaagatgctgactggatcatgaacaaaaccgtacgcgtccagggcaatgacatctcacaccggc

SEQ ID NO: 387338 - DNA, 83 bp, Homo sapiens
atcgcaactttcatgttttcctggaatatgatcaggatacgctgaccggaaaggagattgagattgacattgaacctacagac

SEQ ID NO: 387339 - DNA, 100 bp, Homo sapiens
ctcttacaattaccaaacagaatggacaagcttaataaaataaccgtccccgccagtcagaagttgagcctttgacatggttcatgatccaatggcagct

SEQ ID NO: 387340 - DNA, 82 bp, Homo sapiens
cgtctctctgctgcggcgcggggaccgctgtgctctcgcaaaatgatgcttcaacacccaggccaggtctctgcctcggaag

SEQ ID NO: 387341 - DNA, 100 bp, Homo sapiens
caagtggatgaactgaatatctggatgaggacaagatctgtggggagagactgtaagtttaattggttggggtcagataagaagaggagtgacaatcaag

SEQ ID NO: 387342 - DNA, 82 bp, Homo sapiens
ctgcacagccgcggcggcagcagcagtgagagtagagacagggtttcaacgtgttagccaggatggtctcagtctccagacc

SEQ ID NO: 387343 - DNA, 100 bp, Homo sapiens
ggaggaggacctccgcagactgacccccctcaagcctgtgaagaaaaagaagcaccgctttgggctacccgagctgttcacccgctcactggctgagagc

SEQ ID NO: 387344 - DNA, 90 bp, Homo sapiens
cggaagtggccggcgagcccggtccccgccggcaccatgctggccctcgactatggaatcaagttcatggagaccagcgcgaaggccaac

SEQ ID NO: 387345 - DNA, 75 bp, Homo sapiens
cgcctgatgggtcgaggcggacgcgcggctgcgtcagggcgtctctggccgagcctctttttgtggaaaacgaca

SEQ ID NO: 387346 - DNA, 101 bp, Homo sapiens
cgggagtgtagagactcggaggccgaggccctgaagcgccagagctcgttgggcctttccttctttaacagcatcttggcccatggggacctacgcaacaa

SEQ ID NO: 387347 - DNA, 76 bp, Homo sapiens
agttccgcagtccttcctggcaaacaggtattatcgggggacccacggggtcattgtggtttacgacgtcaccagt

SEQ ID NO: 387348 - DNA, 100 bp, Homo sapiens
gtgaatgtgttgaatgacatgggagacacgccgcttcatcgagctgcctttacaggacgaaaggtcactcagctctatgtgccagcatccagacatgtgt

SEQ ID NO: 387349 - DNA, 74 bp, Homo sapiens
ttcaacaaataattgagtgctttcgatcaggaaaatgtctaatcaacaggagaagtatgaagctcagaatatag

SEQ ID NO: 387350 - DNA, 97 bp, Homo sapiens
cctccctgctgagatgcgcaaattcactccccagtacaaagggaaatcctcattgacgattcaatttgttgaaggccaatttgtggactcctacgat

SEQ ID NO: 387351 - DNA, 100 bp, Homo sapiens
cagattccctgaagctctgctgccccgcaggcaccttcgggccctcctgccttcggccaggaaggaatactgggagaatcttcggatagcctcaggccgg

SEQ ID NO: 387352 - DNA, 75 bp, Homo sapiens
catcgtcatcctgctgctgaagatctggaagacgcgctcctgcgccgggcgccctgcgtccggcagaggaggcga

SEQ ID NO: 387353 - DNA, 100 bp, Homo sapiens
gcaggacctggggccaaaagccaaggctttcaacagacctcacatctttcttcttatgaaattataactccttggagattaactagagaaagaagagaag

SEQ ID NO: 387354 - DNA, 83 bp, Homo sapiens
ccagctgccgccgtccatcctgctcaagaacactctggacctggaggaaactggcgaggctgtccagggcaatatcaacgccc

SEQ ID NO: 387355 - DNA, 82 bp, Homo sapiens
ctcacaccccagctgtgcatggtgcaagcaactggttaacacagaaatctgcctcctgggccatgccgcttctaaggcctgt

SEQ ID NO: 387356 - DNA, 116 bp, Homo sapiens
cagagaaattctcatgatagcttccaagggacaaggtgtcaacaatgtgccggttctccaaatgtcaactgtcaaggagcagctaattgagaagctaattgaggatgatgaaaact

SEQ ID NO: 387357 - DNA, 83 bp, Homo sapiens
cggaaccttgtttactaattcctcctgacaaggtgatccgggcgggccccgcaggaattttatcccctcaccggcctcacact

SEQ ID NO: 387358 - DNA, 82 bp, Homo sapiens
cataccaggactgcctgagacaagccacaagctggaggactggaatgaaattgaccccattaaaaagaaagaccttcatcac

SEQ ID NO: 387359 - DNA, 100 bp, Homo sapiens
caaacgatccagacggcagggagtgcatcaaaggtgtgaacacaggttccgagcctcactctatccctgtcctgagacaccacaggagaggaaggaaatg

SEQ ID NO: 387360 - DNA, 75 bp, Homo sapiens
caccgacatctgcctgctcaaagagcctggcagagagcaggtgtgtgatacacgtcgtcaggtgactgaccgagg

SEQ ID NO: 387361 - DNA, 151 bp, Homo sapiens
ctgggcgtcagcgagccgtgagatgcgtggtccaccatcggtgacctcaccgcctcggttcgccctcagccgccccggcaaatgctaaaattctcatcaatcactgtcacacaaatcggggactggcagcccaccggcatcttttcttaag

SEQ ID NO: 387362 - DNA, 96 bp, Homo sapiens
ctcagaactgagaagctgtcaccacaggtgacttcatggtcatgacgattttcttcaatgtgagcaggcggtttggctatgttgcctttcaaaact

SEQ ID NO: 387363 - DNA, 98 bp, Homo sapiens
tctcggtggccgtccgcccactccgcggcgttcggggaaatggctgcgagaccctagaggcctgcggcctgcgtgatgttacagcctttcgattatga

SEQ ID NO: 387364 - DNA, 90 bp, Homo sapiens
gtaagaccccgactcttcctggtgaagcatctgatgcacgttccatccggcgctcagctgggcttgagaccctggaagctgtcctgaatt

SEQ ID NO: 387365 - DNA, 75 bp, Homo sapiens
cctgcagtcctttaacgagatcactgctatggctcatccacctgcagacatggggcgcagaaagtcaaaacgaaa

SEQ ID NO: 387366 - DNA, 50 bp, Homo sapiens
ccggcagtcatctcgcggccgttcaggcccaaggcattgctcatgagaac

SEQ ID NO: 387367 - DNA, 75 bp, Homo sapiens
ccaatcagctctcatctgtcatcactactaaggagtctagtgcttatgaggtgatcaaactcaaaggctacacat

SEQ ID NO: 387368 - DNA, 100 bp, Homo sapiens
ttaatctcagggaactggatgtcagcaagaatgtggaaaggaccatgctagactttccccagcatgtatcctctgacaaagaagtacgagcagcaagtac

SEQ ID NO: 387369 - DNA, 98 bp, Homo sapiens
ctccattggatttaaaagacagtcctcgtcagcactgactttcagctatggaatcggcggagacagcagccaatcgcatctgcaaggtgttggccgtc

SEQ ID NO: 387370 - DNA, 75 bp, Homo sapiens
gcacgacctgctcctacagccggcgatccactcccggctgttcccccggaggctggagtgcagtggcgggatctc

SEQ ID NO: 387371 - DNA, 90 bp, Homo sapiens
accccttagcccagctccagtgggcgggtggcagtctccctttcctggtgatgatgaagaggaagtttttgacagtattgtaaatgatga

SEQ ID NO: 387372 - DNA, 96 bp, Homo sapiens
agcgatggcttcagacagcatatttgagtcatttccttcgtacccacagtgcttcatgagagatagcagaccccacgttagctgaaatgggaaaaa

SEQ ID NO: 387373 - DNA, 73 bp, Homo sapiens
cggcaggactcggaggacgaggaggaggatgaaaactttcggaagagaaagttgcctgtggtaagttcagttg

SEQ ID NO: 387374 - DNA, 82 bp, Homo sapiens
gaaagctttcctaggccaaaaagaggtgttggagagcacaatggctgaacaagtccttcctcaggctttgtatttgagcaat

SEQ ID NO: 387375 - DNA, 100 bp, Homo sapiens
agagaggagcagctggaagccgtggctgcgctctcttccctctgctgggcgtcctgttcttccaggccatcgacgagtacaagccccaggatgctaccac

SEQ ID NO: 387376 - DNA, 100 bp, Homo sapiens
gaccgaaagaggtttttgcacaccttattaagggatgaaaaaggaaaccttccttgtgaagacctcagaggacatatggtgggcaagccagtgcataagg

SEQ ID NO: 387377 - DNA, 101 bp, Homo sapiens
cgggaggaccgagcctaagagggcagccgcctgaaggaacgcgacggcggcgcccgcagtgccctctggtggtcagaagatgctgtgctgtctcgttagga

SEQ ID NO: 387378 - DNA, 83 bp, Homo sapiens
tctgggcccccacattaatgaggagatcgtcaacttcaactgccggaagctggtggcctccatgccgctgttcgccaacgccg

SEQ ID NO: 387379 - DNA, 50 bp, Homo sapiens
tctgtggtgatgactatgatgaagcagctgtgcggtcagagaagaaacgc

SEQ ID NO: 387380 - DNA, 88 bp, Homo sapiens
cttgaagcaagggaccttgttatagaagccttaaagacggtctggaaaatcccgaagcagaagcccgtattcatctaggcattcaaga

SEQ ID NO: 387381 - DNA, 100 bp, Homo sapiens
atcacttttgaagcatggttttcttgaagagttcattactcctattgtaaagcacagtggagaatttacagtctctctcagtgatgttttattgacatgg

SEQ ID NO: 387382 - DNA, 75 bp, Homo sapiens
tttttggtgtctcccagtgatcaaaaagagagtggttgtgtttgagttcatgatcgagtccatcctgtatgcccg

SEQ ID NO: 387383 - DNA, 88 bp, Homo sapiens
atcatttgggaccaagctgatgagcccttgaagcacagcaggatgaatattctatctttcctcagacatactccatagatattaatgg

SEQ ID NO: 387384 - DNA, 74 bp, Homo sapiens
ggattccaagtaactcttatttgttcccagtgacctgacagcagaggagcgtcaagaactggagaacatccgac

SEQ ID NO: 387385 - DNA, 100 bp, Homo sapiens
gagcccttggaccctgagcaagacctgcaggaagcggatatcctcacctacaattacgtcaagaagtttgagagcctttgtgtccctggtgatgttggaa

SEQ ID NO: 387386 - DNA, 75 bp, Homo sapiens
gatggctctgttccacttccagcagaagttcttgctggaggctgtgctatcagctgtactctgaactgtagttgc

SEQ ID NO: 387387 - DNA, 90 bp, Homo sapiens
ggagaaggggtccgagggcagtctgtgtcaaacgcagctccccaggtgtgtcctggtagacaactgctcccaggagctggcatagaagca

SEQ ID NO: 387388 - DNA, 96 bp, Homo sapiens
acattgcaggcacccacacccctgcagattgagaggtggcaggttttaagaagcaaatggcagatactggaaaactgaacacactgttgcagagag

SEQ ID NO: 387389 - DNA, 87 bp, Homo sapiens
tcaaatgaaagtgaaaatgttagaagaactcgtgagccggattgatgttggagtgcttagtgcagttggtgagagcgggagccacac

SEQ ID NO: 387390 - DNA, 74 bp, Homo sapiens
cagtacctgcccaggaaactgtgcaacaggtgatcgagaaccacatcctcaagctcttccagagcaacctggtg

SEQ ID NO: 387391 - DNA, 83 bp, Homo sapiens
ggtgaagcagatcgagagcaagccatggcaatgacaggctcaacaccttgctcatccatgagtaaccacacaaaggaaagggt

SEQ ID NO: 387392 - DNA, 50 bp, Homo sapiens
gccgctgccccggctgcctcctccctgagaacttggtcctgatgtctgac

SEQ ID NO: 387393 - DNA, 98 bp, Homo sapiens
aaacaactgatgagagcctgaggagccattttgagcaatggggaacgctcacggactgtgtgttaattggcatgctgctggcctgctgtctgtcccgg

SEQ ID NO: 387394 - DNA, 98 bp, Homo sapiens
tcctggcccccctggctatggatcacagggaattaaaattctgaagggagtggtaatggaagtgaagatgcttcaaaggacagtggagaaggttcctg

SEQ ID NO: 387395 - DNA, 90 bp, Homo sapiens
atgaggaggtggattatagcaaaatggaccagggcgtgatggtgggcatgggtcagaaggattcctatgtgggcgacgaggcccagagca

SEQ ID NO: 387396 - DNA, 74 bp, Homo sapiens
tccgacgcccgaggagaaggaggagtggattaagtgcattaaatgaagacagtcagtgttgccttagttttgtg

SEQ ID NO: 387397 - DNA, 98 bp, Homo sapiens
caagaccaacaccgtcatcaactggttccacaactacagtgctatgctggaaaatgagaagaagaagcgtgaaatggcagagaaggagaaagagaaga

SEQ ID NO: 387398 - DNA, 96 bp, Homo sapiens
ggcctccctcgtgagttgggcttggtaccgtgctgcccagaatgcccttcgggaggtgttggagcgggccggagagaagtagagtgggctgcgagg

SEQ ID NO: 387399 - DNA, 100 bp, Homo sapiens
atgaggcccaggctgatgggaaggagcacccaggagctgaaggttggatggcaagcatgtggtgtttggcaaagtgaaagaaggcatgaatattgtggag

SEQ ID NO: 387400 - DNA, 100 bp, Homo sapiens
cttgcctccagtccagcttcctcctccaccacccagtcctgagatactgatctcagtggttcaatagcatccccagatgtcaaattaaatcttggtggag

SEQ ID NO: 387401 - DNA, 50 bp, Homo sapiens
ctccacgcatttcccttcgtgaccaagatacttggtagtgaccgggtgaa

SEQ ID NO: 387402 - DNA, 100 bp, Homo sapiens
gctggagcagtggcgtttggaggagactcgtactatactggcaattgctggagaagattttgcaattgttgcttctgatactcgattgagtgaagggttt

SEQ ID NO: 387403 - DNA, 50 bp, Homo sapiens
atatcaagaggaggagttgttgcatgccaatgaagatgtggaaagaatgt

SEQ ID NO: 387404 - DNA, 75 bp, Homo sapiens
cgaccaccatcccggtcaccacgagctaactgccttctatgaaagcagtcattattcaaggtgatcgtattcttc

SEQ ID NO: 387405 - DNA, 100 bp, Homo sapiens
aaaaaagatcacaagcaactctggatgggattgcaaaatgggtctcactgtcacccaggctggaatgcagtgacgccatcagagctcacttcagcgtcca

SEQ ID NO: 387406 - DNA, 75 bp, Homo sapiens
aaacagtattccaaagaactcggagatgcctggaatacagtaaggaatgcccagaaagaggatcgtgttccagtg

SEQ ID NO: 387407 - DNA, 83 bp, Homo sapiens
ggagctcaaagtgtgccttctcggggcccgatgagagaaagggaaagttaaggatgctggagcagaacaatggatttctcttt

SEQ ID NO: 387408 - DNA, 51 bp, Homo sapiens
ctgtcaggtacctcaaagcgtaaaggccttcgaggaagaggcccacctcct

SEQ ID NO: 387409 - DNA, 135 bp, Homo sapiens
gtgaggcgccgcccgggtgtccccgcggcgcaggaggcggtggagcgcagagcgggcgagcgcggatgggtgctgcagacaatatatataaaggacagagtacatttatggaagaactgactgacacagcagaaa

SEQ ID NO: 387410 - DNA, 100 bp, Homo sapiens
ctgtccgtcagtccctaggtatccgcactgctcaggggtgccttcttcatcccctacctcgtcttcctctttacctgtggcattcctgtcttccttctgg

SEQ ID NO: 387411 - DNA, 75 bp, Homo sapiens
agcaggtggaattatgccctgttggttccaatgctgggattggctgcttttctacgaggatgtcgtccaggaaag

SEQ ID NO: 387412 - DNA, 136 bp, Homo sapiens
ccgacaggccgggtccagggactgcaacccagcgagggacgcgggcagccatggccgaagcggcgcctgcccgggggagccaggaagtgggacggaaagtgacacttctccagacttccacaatcaggaaaatgag

SEQ ID NO: 387413 - DNA, 75 bp, Homo sapiens
gatgactggtgtagaggaagtaacacaggcttttgcagaaatgctgaaagtgaacaaaactttgaagagcttaaa

SEQ ID NO: 387414 - DNA, 82 bp, Homo sapiens
cgacaagtggaggcgccgctctagcggccgggactctgaactatggcgccaccagtggtaaaaacagagatggtaacaattt

SEQ ID NO: 387415 - DNA, 82 bp, Homo sapiens
ggaagaatcctccagttttagctcctacttcaacagcatttccttagcagaagtcaattcatctggaaagactatctctgag

SEQ ID NO: 387416 - DNA, 100 bp, Homo sapiens
aggcttgtccatctgtaacttcattaaggcactggaacgaacagatgctggatatagcctgcaggcttattctgaatgaagtctcccttttgggctcggc

SEQ ID NO: 387417 - DNA, 100 bp, Homo sapiens
gcagcgcctagatggctttggtcacggtccagcggtcacctacccccagcaccacctccagcccctgcgcctcgctctgatccagtatatacggcctgtg

SEQ ID NO: 387418 - DNA, 83 bp, Homo sapiens
ccactccttggaccacctcaagctcatcaacagagcagacgagcagaccgtttattagctgcaggcaaatacgaagaggctat

SEQ ID NO: 387419 - DNA, 88 bp, Homo sapiens
tggctattggaaggaggagattctgaagataaggagggtgctggtatagaaatctaccctgggagtcagtgcaccctgagtgacaatg

SEQ ID NO: 387420 - DNA, 100 bp, Homo sapiens
cttgtggacggcagaggaagagtgagcgccaggttcggtggctcacccagcaaagcagccaccgtgagatcacgttttgacacaagggcgcatatcttca

SEQ ID NO: 387421 - DNA, 75 bp, Homo sapiens
cgctggcagccgcggatctcaccgccgctcaggcagttggaattgatcacaccttttcagttgtacttcaatcct

SEQ ID NO: 387422 - DNA, 152 bp, Homo sapiens
gtgaccagggccctgcagatgtcgccaggaaagtggtgatccaggcaggaccaggctgcactgaagggacagagtggaactgtcaccgctgttcccagacacacttattctgggtctggagatccgggtgaaggtctcagactatgtacaag

SEQ ID NO: 387423 - DNA, 76 bp, Homo sapiens
cagtgtcatcgtctgccatggcatggtgtacaaagctcaggccccggggcctccagcggcaccagcggagaccacg

SEQ ID NO: 387424 - DNA, 97 bp, Homo sapiens
tctgactccacctttacttttacctacgttggcggccccagaaggagcatttcctccctctgctatttatacacggaaagacttactacagcgatct

SEQ ID NO: 387425 - DNA, 100 bp, Homo sapiens
ctggaagccagaagcaggcctttctccaccaaggaaaaaacgagaagaccccaaaaccaggccgactgaaccaagctaactcctccggaagagagtccaa

SEQ ID NO: 387426 - DNA, 100 bp, Homo sapiens
agacagcaagagagagacaagcccgaggcctgacttctagcactcctgagtttgagccctatgagcagtggaacctaggattttggaagatggcaaagtt

SEQ ID NO: 387427 - DNA, 75 bp, Homo sapiens
cattaaacattcacaacagataggtgatagttgggaatggagaccatcaaagggacgagtgatccatatgtgaag

SEQ ID NO: 387428 - DNA, 100 bp, Homo sapiens
tgctggacggaccgcccaaccccaaaagagccaaactcagctcgcccggtttctcggcgaatgacagcacagcgggagatacagatgacccaccaagaat

SEQ ID NO: 387429 - DNA, 75 bp, Homo sapiens
ggagacggcctgggtgctggcgaagcggaggccggagatggcctactgccagcatattggggtggagttcatgtt

SEQ ID NO: 387430 - DNA, 102 bp, Homo sapiens
ctcaattgaagcaagagatttctgaatggtgcatgcctacatcatcagctacctgaagaaggagatgccaagtgtatttggaaaggaaaacaagaagagaga

SEQ ID NO: 387431 - DNA, 97 bp, Homo sapiens
tgaggacagcatggatgggctggagacaacagaaacagaaacgattgtggaaacaggcttcctgtttgatgaagatagcaacggaaaactcaaaatg

SEQ ID NO: 387432 - DNA, 90 bp, Homo sapiens
tatgatgagaatacttccatcatctttagacctaactcaaaggactctcacagaaggaggaagaggaggacacttttattgaagaacaac

SEQ ID NO: 387433 - DNA, 90 bp, Homo sapiens
gctctgcctccggggacaagaaactagagcaaataaccgttttgaaattttttcggctttgtgagaaaccttaccatcaaacacgatggc

SEQ ID NO: 387434 - DNA, 90 bp, Homo sapiens
aaactggacaaccaacggctcaagaatttcaagaacaaaggccgcgacttggagacaatgcagatcttcgtgaagactctgactggtaag

SEQ ID NO: 387435 - DNA, 96 bp, Homo sapiens
aaaagagccctggaatatgaagcaacatgagatggtggatgaacccacaggtgaagctttgttctaagaatatttgtttcatctagtttatgagtc

SEQ ID NO: 387436 - DNA, 100 bp, Homo sapiens
cggcggatctggacacccagcggtctgacatcgcgacgctgctcaaaacctcgctccggaaaggggacacctgacccaacatgagtgaagtttcctgcaa

SEQ ID NO: 387437 - DNA, 75 bp, Homo sapiens
agtcccttcctgctatggcggcataggtgcccctgtgagtcggcaaggtgctggagaatctggtaaaagcaccat

SEQ ID NO: 387438 - DNA, 90 bp, Homo sapiens
atagctgctacactgaagatgaagcaaggcccaatgacccaggcggtgttggggcgatgtttcctgactgtggtgcaagtccatttccag

SEQ ID NO: 387439 - DNA, 75 bp, Homo sapiens
caagcccggctcggcccggccctgctctgttctgcccggaggagccgcccgagaatggggtactaagagaaaagc

SEQ ID NO: 387440 - DNA, 83 bp, Homo sapiens
catgcggacatcggcttctgcctggtgctctgcgtcctcatcgggcttatgttcgaggtgtcccgacccaggctaagcttgag

SEQ ID NO: 387441 - DNA, 89 bp, Homo sapiens
gcagttcagaagagccaaggaataaacatgcaatgaacccaaaaggctgatttcatgccaatattgggaaccaacctaaatccagaatt

SEQ ID NO: 387442 - DNA, 90 bp, Homo sapiens
cagcaactggtctattatatcatttaaaccacatggctatctaaagaggaaagtgatgaagcattgggcccaacaatgatgagttggaat

SEQ ID NO: 387443 - DNA, 51 bp, Homo sapiens
atattctcttctgtgctgtcaagggtccccagtctatgtgaggatctcctg

SEQ ID NO: 387444 - DNA, 98 bp, Homo sapiens
ggcttgctgggaatggagttccggagccaggacccagcactttcgggggcacacgggggcggatgctatctgtgagcagcagttgataatgtgcataa

SEQ ID NO: 387445 - DNA, 100 bp, Homo sapiens
cattccagcactggactcatggaggctgagcatttattcagataaccctccttcctccacctcacaaaaactcacaagctgcaacccttctgatgtccac

SEQ ID NO: 387446 - DNA, 90 bp, Homo sapiens
ttcacagtctaccatgaattggaagggtaaccaggagccgacaacaactcctgacgcaatggttcagccttttactaccatcccatttcc

SEQ ID NO: 387447 - DNA, 101 bp, Homo sapiens
tgttgttgatgaagtaatacagaactgccccatcgatgtgcggcgcccgctgtataagcgggaatgcatatcagtccacgtgggccaagcgggagttcaga

SEQ ID NO: 387448 - DNA, 75 bp, Homo sapiens
actttatgagctaaacaaggattctgaactcttgattcatggtggaaccgtcccaaaatgtcccttgctcagaag

SEQ ID NO: 387449 - DNA, 88 bp, Homo sapiens
agctgcaggggctgagctggctgggcaagcgcgggccgcggaggaggtctcagggttgcatcataaatacaaaggactgaagttataa

SEQ ID NO: 387450 - DNA, 80 bp, Homo sapiens
gcagctccctgcgggacctctcggaagccgcagaagaagatctttacaatccaaggctgctacccggtgatccggtgtct

SEQ ID NO: 387451 - DNA, 100 bp, Homo sapiens
aaataaacgccactcctaaaggctggtcctgccactgggacaggtgtgatgaatgcagactctgctaccattttggctgtttggatcctcctttgaaaaa

SEQ ID NO: 387452 - DNA, 100 bp, Homo sapiens
ctcctcttcctcttcgcttgcagatacccccgagatcgacacctggatttcattagcatcatgacctacgattttcatggagcctggcgtgggaccacag

SEQ ID NO: 387453 - DNA, 98 bp, Homo sapiens
cagaaatgttacacacggagtatcaaactctgctgccaagatgctgcagttggagaagaaacttgaacgtgaacttgaggatgatgcacgagttattg

SEQ ID NO: 387454 - DNA, 76 bp, Homo sapiens
ccggcattcatttaaggcctaaggatgaaggcggacatgaaatctgctgtgatcacgccttgcagtcattttttcc

SEQ ID NO: 387455 - DNA, 98 bp, Homo sapiens
cggcttggacgaagatggggagaaggaagcgagactcatacgcaacctcaatgacttaattcagtgcacaaatgagatgaatgtgaacatcccacagt

SEQ ID NO: 387456 - DNA, 82 bp, Homo sapiens
caacaaaacgaccactgaaaacaatgccgataaagccaccaatccttccaaccgccaggaggactgggaatacataattggc

SEQ ID NO: 387457 - DNA, 100 bp, Homo sapiens
ggcagccaccccgtctgggaacccaataggggcacaaaacgtccccgggatgatgaagaggaggagcagaagatgcgtcggaaacaaactggtactcgag

SEQ ID NO: 387458 - DNA, 100 bp, Homo sapiens
ctcctgtgggacgccagtcaccagcaggagcagccaaccagcagcagccatcatggaggtcccaggtgtgacaccttcagcaggtctcagggaagatggc

SEQ ID NO: 387459 - DNA, 100 bp, Homo sapiens
gagaatcactgttataatgtacagcagaactgcatgatcagtacgcctgcctcacaccttgcgatgcgccaacatcaccatcattgagcaccagaagtgt

SEQ ID NO: 387460 - DNA, 100 bp, Homo sapiens
ggccagttatccaattgatgaactagtagatagagccaaacaatcttttcaaggcatctccttggaaacaatgccatctttgaatgtgagagataaacct

SEQ ID NO: 387461 - DNA, 101 bp, Homo sapiens
cgaagcacgagcagatcctggtcctcgatccgcccacagacctcaaattcaaaggtgctgatgtatggacagccgtatcgtgttaccttagagcttgagct

SEQ ID NO: 387462 - DNA, 100 bp, Homo sapiens
aggcttccagctggacccccacacgaaggcctgcaaggctgtgggctctgtgtgctccgggatggagcaggtgtgcagagggtgagaacccagctctggg

SEQ ID NO: 387463 - DNA, 100 bp, Homo sapiens
cgaaaacggaagcgcagggagaaggaagaggtgtttgaaaagggtgataaaagaaaatgtggctgaagttacccgaagttcagcttgcagtgtaattcag

SEQ ID NO: 387464 - DNA, 96 bp, Homo sapiens
tacaaagcctcagggataatccacaggtctctaattaacagaagatggcaaagcccagccacagcagctatgtccttcagcagctaaacaaccaaa

SEQ ID NO: 387465 - DNA, 83 bp, Homo sapiens
caacgaggctccctggagcccgacgcagagcagcgccctggccgggccaagcagcctgcagaattttcttcctgccccttgaa

SEQ ID NO: 387466 - DNA, 97 bp, Homo sapiens
aaggccaagtatccgccagtcaataggaagtacgagtgtaacacaagtggcaagacagccgggaacccctaccccatccccttattcagcacatgaa

SEQ ID NO: 387467 - DNA, 101 bp, Homo sapiens
cgacaggtgcgctaggtagagcgccgggacctgtgacagggctggtagcagcgcagaggaaaggcggcttttagccaggtttgggactgacaatagctgac

SEQ ID NO: 387468 - DNA, 90 bp, Homo sapiens
tgtgcaagctcagcttggagggtgatggaagcaaaggtgtctaccagtaccactggcaaagccacaatgtcaagcacagtggtgtggacg

SEQ ID NO: 387469 - DNA, 100 bp, Homo sapiens
ctcctttttacctttggttcacaacatcatcaaatggttgacctgacagttcaagaaaaggagaaatatcttaatgtgtctcgctggttttgtcacattc

SEQ ID NO: 387470 - DNA, 75 bp, Homo sapiens
gccttccaagcagctgggattacagtcctgatcctggaggccatcgagaaccacaacctcgcagacacggtgctc

SEQ ID NO: 387471 - DNA, 100 bp, Homo sapiens
cggacattttggtgccaagccgaaccgagccggggcgccgggagctattgggacctgcggcaaacagtgattgctgaccactcgctgagcgccagccaca

SEQ ID NO: 387472 - DNA, 75 bp, Homo sapiens
ggcgggtgttgtgagcgggaagcctttctgagaaaagtctacagcattctttctctgcaggttctcttaactaca

SEQ ID NO: 387473 - DNA, 96 bp, Homo sapiens
agccggctatagcctccggagtggccagcaggcctgcgagggccgcagccgtatcggacactcagggagtcagacagcgcggaaggcgacgaggca

SEQ ID NO: 387474 - DNA, 82 bp, Homo sapiens
cgagtcatcacttcccaggcaggaaaggggttaatgcatcacttgggagcatttcctgaagacgtagtcatgcagcacgtca

SEQ ID NO: 387475 - DNA, 82 bp, Homo sapiens
ctccatccttctggatctggccaacaccaccggcacagtgacggcttcagaggacaaaacttacctggggtccctacttatg

SEQ ID NO: 387476 - DNA, 75 bp, Homo sapiens
ctctcatctcagcctccaaaagtgctggcattacaggggacagagcacaggaaagggacccccacagtcacctgt

SEQ ID NO: 387477 - DNA, 75 bp, Homo sapiens
ctgtcaggtacctcaaagcgtaaactgcaataaggtcactgatcagtgcctgtccttcttcaaacgctgtggaaa

SEQ ID NO: 387478 - DNA, 96 bp, Homo sapiens
ggaaacatagcagttttcacatttcctgcatctctcagacaggacagccagtagaggtgacttcatgttttctgcggatcgtttggtaggtggggg

SEQ ID NO: 387479 - DNA, 100 bp, Homo sapiens
cgctgcacatcgtcctgtggacgcgtatcgccagcacgatcccaccgcacgttcagaagtcgggatatggtgcctgtcatagttgattactgccttctgc

SEQ ID NO: 387480 - DNA, 82 bp, Homo sapiens
gatcgagcctgcagacaagaaacattcgtttatgagatggtgtcagttgtacccgaggcgttctcagcagcagcaagtacct

SEQ ID NO: 387481 - DNA, 100 bp, Homo sapiens
aaagtaattgataagatgagattccccacaaaacaagaaagtcaactccgtaatgaagtggctattttacagatcacaaatcgggacaaaccgctgtcat

SEQ ID NO: 387482 - DNA, 82 bp, Homo sapiens
cacaggccaaaatcattgtattggtgccacacctccctggatgatccaagatgaagaatacattgctgggaaccaagaaata

SEQ ID NO: 387483 - DNA, 148 bp, Homo sapiens
aaacgtagggaccacatcaaagacagctttcacagtttgcgggactcagtcccatcactccaaggagagaaggttgctgcttttgctcagaggacatccatgaccctaatggtctttttgttcaagataaagtgattttttgcctttg

SEQ ID NO: 387484 - DNA, 55 bp, Homo sapiens
cttcctgagccccagcacccacattggaggctgagtgcccctagagggcagggac

SEQ ID NO: 387485 - DNA, 100 bp, Homo sapiens
cagctcgcggtcatgggcggctcagcctccagccagctggacgagggcaagtgcgcttacatccgaggtttttcgttggaatatacgttgcacatttatg

SEQ ID NO: 387486 - DNA, 83 bp, Homo sapiens
gggaccagcagttactgggaaggatgtacagttacccagcacgtgtacctcctcctcctcctattgctcgggctgtagtgccc

SEQ ID NO: 387487 - DNA, 75 bp, Homo sapiens
gctctatagcagtctggtgaagttccatgcccatccagagaggtatcgaatgataacagaaggcggagtcagcat

SEQ ID NO: 387488 - DNA, 50 bp, Homo sapiens
atggtttggctttcaaacataagtacaaagaggatggtgaagctttgcta

SEQ ID NO: 387489 - DNA, 75 bp, Homo sapiens
tcgcctgtctccgtcggaagggagcccaagctttgcagagcaacatgaaactttcctacctaatggagatcgtgc

SEQ ID NO: 387490 - DNA, 74 bp, Homo sapiens
ggaaaaattgccacccaactactccatgcattctgctgagcacacagatccaggtagtctctgctagtaatgag

SEQ ID NO: 387491 - DNA, 90 bp, Homo sapiens
cccgcgtccgccgattcctcctccttggtcgccgcgtccttggctggcgtgaagtcctgacggccacgctggatctggaggacgtccgga

SEQ ID NO: 387492 - DNA, 100 bp, Homo sapiens
atctggcctgccccgacgtcctgaacctgtccctaggagggctccccgaggactttctgaactccctggagaagatggaggacggcaagttgaaggtcac

SEQ ID NO: 387493 - DNA, 50 bp, Homo sapiens
agcatttgcatggaacacatggtacatgtcccagagcaagcacacggagg

SEQ ID NO: 387494 - DNA, 75 bp, Homo sapiens
ttggagccaagaaatgagtatagccctgtatgatgagattcgtcagtttcgcaaggcctgtggggaggctcatct

SEQ ID NO: 387495 - DNA, 83 bp, Homo sapiens
gtgatccagcaaggtcggcagagcaaggggcttacgcagaaggacctggccacggtgtggccgacgacgatgccctcgctgag

SEQ ID NO: 387496 - DNA, 100 bp, Homo sapiens
cagtgctgaagcctttaaatgcagcatctgcgatgtgaggaaaggcacctccaccagggcagcagaagaagcctttgtaaatgacattgacgagtcgtcc

SEQ ID NO: 387497 - DNA, 97 bp, Homo sapiens
ggaaggcgagtgccaggagggagagatcctggccacaggcagtacggcatggtgctcggtggacaagatcgaggaacttgatcaagaaaacgaagca

SEQ ID NO: 387498 - DNA, 83 bp, Homo sapiens
gatgcggacgcttttttccttcctaggagaaatcgaggagctgcggctctaccccccggagaaagctgtgtgaagagacaaag

SEQ ID NO: 387499 - DNA, 78 bp, Homo sapiens
ttcagcaagaacagcttcaaacagagacagggttttgccatgttgcccaagctggtcttgaactccggggctcaagtg

SEQ ID NO: 387500 - DNA, 83 bp, Homo sapiens
ttcttgtttgtggatcgctgtgatcgtcacttgatagcctgggctggaagctcttctacgtcacaggctgcctgtttgtggct

SEQ ID NO: 387501 - DNA, 100 bp, Homo sapiens
aactcgtctttggcgaggacggggcgccggcgccgccgcccccgggctcgcggcctgcagcccaataggggcacaaaacgtccccgggatgatgaagagg

SEQ ID NO: 387502 - DNA, 100 bp, Homo sapiens
aagactgtgaaagacgagggagaaatgttttgtttgactccagtgttaagagaagaaatgaggacatatcagtatcggagtctcagcagtccaattttgg

SEQ ID NO: 387503 - DNA, 100 bp, Homo sapiens
gtcagctgtgtgtccagaacgtgccatggagacgcttaacgatttcattcatacctgtgaaaagctctgccatgaaggagactgtggaccatgctctcgc

SEQ ID NO: 387504 - DNA, 75 bp, Homo sapiens
aggggacctcatgtccctgtgggacacaatgcccccaaggactccctggaggaaaagcggaagcggcagcggtct

SEQ ID NO: 387505 - DNA, 78 bp, Homo sapiens
gaacctactgtggggccgcggccggaccgagcgcctcgacctcggtctgagggtatttgaagtataccatacaactgt

SEQ ID NO: 387506 - DNA, 90 bp, Homo sapiens
cggcggactgcgagcaggaagagcgcagtggctctgccgacgccgcgttcagaaaggttggcgtgcagtggtgtgatctcagctcattgc

SEQ ID NO: 387507 - DNA, 100 bp, Homo sapiens
tagagattacaatttgactgaagaacagaaggcgatcaaggccaagtatccgccagtcaataggaagtacgagtaaatggtggagtcaatgaagaaagta

SEQ ID NO: 387508 - DNA, 101 bp, Homo sapiens
gacctgctgaatcatagcccacatgtccaggcaacctccaagtcccagatcatgtctctgtggggtctggtctccaagatgcccccagaaaaagtgcagcg

SEQ ID NO: 387509 - DNA, 100 bp, Homo sapiens
acctctgcccggccacgaccccgtctgggaggtatgctggtatcctcctgggcatcacaaatacatttgccactattccaggaatggttgggcccgtcat

SEQ ID NO: 387510 - DNA, 105 bp, Homo sapiens
ggttggcaagttctccatcaggctcgtgccgaacatgactcctgaagtcgtcggcgagcagttaagtgggcagaccaacatccacctcagcaaaaacttcttcct

SEQ ID NO: 387511 - DNA, 100 bp, Homo sapiens
aggctccgaggcgaccactcctgtgatcgttgcggctggggctggaggggaggaagaatcgatgatgcaaccaacttggtccagctgtatcacgtgctcc

SEQ ID NO: 387512 - DNA, 51 bp, Homo sapiens
cctgaatcttggtgtttggacataggagagcaagatgagacaggccttagg

SEQ ID NO: 387513 - DNA, 50 bp, Homo sapiens
acaggaccggctcggcatctacagctactcaagagtgagccatggagcta

SEQ ID NO: 387514 - DNA, 101 bp, Homo sapiens
atttgaaacttttatctcatctggcttggcgcctgaggttctcccattagcatcgagagtaaacatgaggttacgatcctgggaggacttaatgaatttgt

SEQ ID NO: 387515 - DNA, 98 bp, Homo sapiens
tggggttgttctcataataattcagatggagaatatatggctggacagctagctgcttatggctataaaattacagaaccttcaacaactagtactgc

SEQ ID NO: 387516 - DNA, 75 bp, Homo sapiens
ctcattgccacgcgcccccgacgaccgcccgacgtgcattcccggtatggcctcacaagtcttggtctacccacc

SEQ ID NO: 387517 - DNA, 98 bp, Homo sapiens
ctgagctatgacaagagaggaaacaaaaagttaaacaagcaagcctgccataagtgagaaggagtctaccatggctcaagaatctcccaaaaattcag

SEQ ID NO: 387518 - DNA, 74 bp, Homo sapiens
gggcccttctcggtggaggccgacccatccagtacacctccagcatgagagccaaatacctcgccacgagccag

SEQ ID NO: 387519 - DNA, 101 bp, Homo sapiens
aaggaaggaggagctaccaccaaagagtcagcaatggctgccatccggaagaaactggtgattgttggtgatggagcctgtggaaagacatgcttgctcat

SEQ ID NO: 387520 - DNA, 97 bp, Homo sapiens
tctgcccacccaacgcgaagacggtaacccgtgtgactttgactgggcaccactggatcataccagtgacaagtcacttctcgacgctaattttgag

SEQ ID NO: 387521 - DNA, 83 bp, Homo sapiens
caaggagatcgtctctctcatcgaggcccaaaccgccaaggctttatcctgtggataaacgcagagtgaacgagtttggggag

SEQ ID NO: 387522 - DNA, 50 bp, Homo sapiens
atttactaactgtgtgaccttagctgcctcagggtccagggaccagagcc

SEQ ID NO: 387523 - DNA, 82 bp, Homo sapiens
agccccttcgctggccactggttatggtgcatacttggctcagcttcagatggaaaataacggatgggtctcagttacaaat

SEQ ID NO: 387524 - DNA, 82 bp, Homo sapiens
cttcaagacgcggcccaaggtgtcccttggcggcgcgagcaggaagattcttctaacagagaaaatgccattgaggatgaag

SEQ ID NO: 387525 - DNA, 96 bp, Homo sapiens
gccgtggacacctgtgtcagcatgtgggacctggttctctccatcgccttgtctgtggggtgcactgggaccttcctggctgtgcctcggatcagg

SEQ ID NO: 387526 - DNA, 74 bp, Homo sapiens
caggcgccgagactgacaacgcggtcccacaggacatggtccggcgaggagagatcatcgacaatgacaccgag

SEQ ID NO: 387527 - DNA, 50 bp, Homo sapiens
cttgggtcctccgagagcagcagcgtcaggactggtggagtcaacacagt

SEQ ID NO: 387528 - DNA, 75 bp, Homo sapiens
aggacatcatctgcgacgtggggatgcagagacccgtgctgagtttgctgagagatcggtagccaagctggaaaa

SEQ ID NO: 387529 - DNA, 75 bp, Homo sapiens
tacagtcctccagggtatacttcgtggcctgcaccatcggtctctggacctctgactgacactgtgcctgcccag

SEQ ID NO: 387530 - DNA, 82 bp, Homo sapiens
ctcgagagtacgaacctcttggagagtgaagctcccagggactatttcctcaagtgccatgcacttggtgtaccgagccctg

SEQ ID NO: 387531 - DNA, 100 bp, Homo sapiens
gatctatgagtggaaaggtgaccaagcccaaagaggagaaagatgcttctaaggctcctcttccacatttgacttcagatgatgttgataaagccttaca

SEQ ID NO: 387532 - DNA, 108 bp, Homo sapiens
catggagtccacagccactgccgccgtcgccgcggagctggtttctgccgacaagttagctttatacgtctacgaatatttactgcacgtaggagcacagaaatctgc

SEQ ID NO: 387533 - DNA, 85 bp, Homo sapiens
tatgagacagagaggcaggcagacttcacagctgagaagtttccagatgaaaaagctatttatgaagaaattgatgctcaccagc

SEQ ID NO: 387534 - DNA, 51 bp, Homo sapiens
ctttgatcgtcttcctcttcagccatccagcctctcctcctcccagttctc

SEQ ID NO: 387535 - DNA, 75 bp, Homo sapiens
tcgggaacctcttccagttggaattgaagaatattcccaagtccttcacccgggcgcacggcggccctacaggag

SEQ ID NO: 387536 - DNA, 74 bp, Homo sapiens
gaggatggatctttataagagaggaattccccctgctagggcagcacattccccctgttcccaggtgggtccag

SEQ ID NO: 387537 - DNA, 90 bp, Homo sapiens
tggagttggaatttgtgcaatgtttagccaacccaaattaccttaattgtttggaaagaaatcccggcctgcaatgtatgatgtgagccc

SEQ ID NO: 387538 - DNA, 90 bp, Homo sapiens
actgcagaggtgctggagctggcagggtctcttgcctgctgtgtactgcttttactgccagaaatgttctcctcacctgggagccagttg

SEQ ID NO: 387539 - DNA, 48 bp, Homo sapiens
ggatggtgaactcattagaaaatttcacggtccctcatggtgtctcac

SEQ ID NO: 387540 - DNA, 80 bp, Homo sapiens
cagcctggtcaatttgtacctgcaggcctcctacacctacctctctctgttcatggcctcccacgggaacgacgccgcga

SEQ ID NO: 387541 - DNA, 100 bp, Homo sapiens
ttcaaatgaaagtgaaaatgttagaagaactcgtgagccggattgatgcacatgattaagtaccggtacatcccgttcacacatgggaagagaaggtaca

SEQ ID NO: 387542 - DNA, 74 bp, Homo sapiens
ctagacctggaatcgcccaagtccctctactcgcgaggatgatgacctggaagaaggtgaagtgaaggacccca

SEQ ID NO: 387543 - DNA, 96 bp, Homo sapiens
tgaaagaagtacagctcatgaatagactctcccatcccaacatccttaggcctggggaaccttcagccctggatgcagggccttatcgcggtggcc

SEQ ID NO: 387544 - DNA, 49 bp, Homo sapiens
cacaaatgcacgcgacaggaaccaggggatcatggaagctgataaagat

SEQ ID NO: 387545 - DNA, 102 bp, Homo sapiens
aggatatcgacgtcgtgatccagaagtccagagctgaggactgcctgtttgcaggcttgggcactgtttaaaggaaagttccgagaaggcatcgacaagccg

SEQ ID NO: 387546 - DNA, 75 bp, Homo sapiens
accttcaggcttctggtctctgtggatatgagatcctgactccaaactccattcccaagggtttcatggacggga

SEQ ID NO: 387547 - DNA, 73 bp, Homo sapiens
ttggacgacaaagatggcggcagggaccagcagttactgggaaggtatgataagtattatcagcaacataata

SEQ ID NO: 387548 - DNA, 90 bp, Homo sapiens
cctctaccgagatgtgatgttggagaactacaggaacatggtcttgctgggtcgttccaggggtagaggaggcatgaaggatgaccgtcg

SEQ ID NO: 387549 - DNA, 95 bp, Homo sapiens
agacagaggtgtgctgacgacctgctacaacagaatctaataaagttcctgtcgttcagcacccgcatcacatgcatccgctgactcccctcatc

SEQ ID NO: 387550 - DNA, 75 bp, Homo sapiens
ccacgcagaacgtcaacaccaagtgcatcaccatccccagctggtgaattctatagccaagacgtatgttggaac

SEQ ID NO: 387551 - DNA, 100 bp, Homo sapiens
gccctgcgctccatgcagaacagccccaggaggtgcttcccaaggaccgtagatgcctctctagagcatgagctcaggcaagagtgcccgctacaaccgc

SEQ ID NO: 387552 - DNA, 100 bp, Homo sapiens
aaaacaatcgcttcaatgatgggaaggtggatcccgccgggaggtactttgctgatcctgataacttaagtgactctctcttttccggtgatgaagaaaa

SEQ ID NO: 387553 - DNA, 100 bp, Homo sapiens
tttgttatgtttgccgtggtttttatcaccacacgactgggtatatttcctctctggatactgtcatgaagcagacacatgctgacacacctgttgatca

SEQ ID NO: 387554 - DNA, 75 bp, Homo sapiens
tagaaagccttcgaaagcagctaggccaggaccctttctttgatgaacgacaatctccttgagagctggagcgac

SEQ ID NO: 387555 - DNA, 97 bp, Homo sapiens
ctgctaacatggataagcatgccctgaaaaagtatcgtcgagaagcctatcatcggaacaagagtttgttcagaaacaacagcaagaattagatggc

SEQ ID NO: 387556 - DNA, 74 bp, Homo sapiens
ctaggcatcttattgatcctccagtcgagtgaagcccaagagccaaaggaatcaccaccaccttctaaaacgtc

SEQ ID NO: 387557 - DNA, 75 bp, Homo sapiens
gcgggtgctgcaggcgccgccgccggacgtcggcaacggagaagcatgctacaagtgaaaactgatgagaaactg

SEQ ID NO: 387558 - DNA, 75 bp, Homo sapiens
ggcggctgctgctgctgctgacgctgctgctgcccggcctcgggggcacagtcttttgctgagcgcctgcgcctg

SEQ ID NO: 387559 - DNA, 101 bp, Homo sapiens
atagaagaagttaatagtttaagaaagcaaagagcaggttcttcatcttcaaaaatgaacagtttggggccagatggcttacccatgcctggctgttggca

SEQ ID NO: 387560 - DNA, 100 bp, Homo sapiens
gaccgcgcgcagggcctgcagcgggagctggacggcgagcgcgagcggcgcgagaaacatttgacattgtgcagcaaagaaatggttatggagaagccca

SEQ ID NO: 387561 - DNA, 98 bp, Homo sapiens
ggaatgttcttaacccagaagtagctgaatgtgttactccattgctgaggagtgtgactgtcatgtggcatgggtctctgcccaagctcgtaatgaga

SEQ ID NO: 387562 - DNA, 75 bp, Homo sapiens
ggatgaatcccagtccctgttacgggttcctgatgttattagcagcataaggcaattatctaaagcggccatgaa

SEQ ID NO: 387563 - DNA, 83 bp, Homo sapiens
ttatacttcctggcgctgaccttctttgtcgcagcgttccatcttgaaaactatttttctagtctgaaaaacccaaaactcag

SEQ ID NO: 387564 - DNA, 101 bp, Homo sapiens
aagggaggagaagacaagctaaaaatgattcgggaatatcggcaaatgatttagcatgtagactgctggggcaatcaatggatgaaagtggattaccacag

SEQ ID NO: 387565 - DNA, 87 bp, Homo sapiens
actctgacctgaatcctgaattttccttgatggtcaaaagattaagcttcctgcctgacacagctcacttcaagaagtgcacaatgt

SEQ ID NO: 387566 - DNA, 100 bp, Homo sapiens
cctgacaaaaaaaagcagaaattgctagaagaaaacgttagtgctttcaaaacagaataatccagaatggctactctgatctatgttgataaggaaaatg

SEQ ID NO: 387567 - DNA, 98 bp, Homo sapiens
gaggatctcttcgggagcgacgccgacagcgaagctgagcgtaaagctggagaatgtcagaatattaataaacagtatatgatggtgaaatctgatgt

SEQ ID NO: 387568 - DNA, 74 bp, Homo sapiens
tgctgaagaactcgcaagctcctacgaaagaaagctcatcgagctctactgagatgaagaaagaaaaagaatac

SEQ ID NO: 387569 - DNA, 100 bp, Homo sapiens
accttcacagttctcaagcgctaccagaatctaaagcctattggctctggggctcagggcatagtttggtatgggctacgtgagttcgtggtgattgccc

SEQ ID NO: 387570 - DNA, 75 bp, Homo sapiens
gttccgaaagtggctctacaaacccaagcctcaaggagctggagtcccaggtgtcgggtctggagaaggaggcca

SEQ ID NO: 387571 - DNA, 100 bp, Homo sapiens
cacagagtacttaaaaacatcatggatcaatctcaaacaaaggagcctaaagaaccctcctggcctccagctcagccttctctcacctactatgtctgtc

SEQ ID NO: 387572 - DNA, 100 bp, Homo sapiens
aggctgtcattttataggcatgcctgaatgtgagacaacgactgaaagacctttcattcagaagctgtttcgtcctgtggctgcagatggacagttgcac

SEQ ID NO: 387573 - DNA, 100 bp, Homo sapiens
acgcgcagccgagaagatgtctccgacgccgccgctcttcagtttgcccgaagcgcggacgcggtttacgattggtccagaaaagggcgtggtgcacctg

SEQ ID NO: 387574 - DNA, 100 bp, Homo sapiens
atactgcacggccttggctggactctgcgggactatgtccgaggatacatccttcaggatatccgacatgaagccagtgacttcccatgtagagtggcca

SEQ ID NO: 387575 - DNA, 75 bp, Homo sapiens
tcctgctcctgggtgccgtggcatgtcgatttgtccttcactacagggtgatagcacactcagataagaatcgca

SEQ ID NO: 387576 - DNA, 98 bp, Homo sapiens
tctcctacagtgacacgggttcatccacaggcagccacggcacctccaccaccgtcagctcggccagggtgaacctgttctctgacccaccccagccc

SEQ ID NO: 387577 - DNA, 74 bp, Homo sapiens
tcaatgagcacatgaccagcttagcttctgtcctaaaggaaccatgcgaggccagcggagcctgctgctgggcc

SEQ ID NO: 387578 - DNA, 75 bp, Homo sapiens
ggacgcgaggacccgggctgggctttcctcacccggatgccagtgagagcaggtgccagcaggggaagacacaat

SEQ ID NO: 387579 - DNA, 50 bp, Homo sapiens
ggagaattatgggagcgcatttccccaggtcagccatcgctcccagcccc

SEQ ID NO: 387580 - DNA, 90 bp, Homo sapiens
ctgggttccagcaatcctcccacctcagcctccttagtaggcgtggctacagttcaaatctgaacatcaatgatgtactagggaactact

SEQ ID NO: 387581 - DNA, 75 bp, Homo sapiens
gggagctgaagctgctgcttttgggctctgaagagcggccattcctcagattcgaagctgaacacatctccaact

SEQ ID NO: 387582 - DNA, 100 bp, Homo sapiens
cggaaacctatcgattacacagttctggatgatgtgggccatggtgtcaagggtaaatgggaagttggtagctctgaaggtgatcaggctgcaggaagaa

SEQ ID NO: 387583 - DNA, 74 bp, Homo sapiens
caagccggacttgatggcttccctgctgccccagctgacaggaagcgccagctgtcaccccagtccaagagctc

SEQ ID NO: 387584 - DNA, 75 bp, Homo sapiens
gtcggttgagcggcggcgaacatgcgcttttgacacattggaggactttgcctcccgggccaaactggcagttca

SEQ ID NO: 387585 - DNA, 100 bp, Homo sapiens
ctgtggagacagccgctcattaccttgcagtatttttctctggaaatccttgtaatcttgaaggaatggacctcaaatgagaaagatcagtctaaagaaa

SEQ ID NO: 387586 - DNA, 80 bp, Homo sapiens
gccatgaggccaaaggcagttgtattggagccctgtaatggccggactgcccttcacctcgcagtggacctgcaaaatcc

SEQ ID NO: 387587 - DNA, 90 bp, Homo sapiens
ggagatttgggtagaagccctcatgctgaggctaccacatactgttgattgtgatgaaatgccagttgaagcacctgtcctgcgagctta

SEQ ID NO: 387588 - DNA, 75 bp, Homo sapiens
atgctggagaccttgacacttatatcctccctgggtgaaatggagacagaaagtcagcccaagagactcttccaa

SEQ ID NO: 387589 - DNA, 109 bp, Homo sapiens
cggctctcgtcagcctcccgccggccgtctccttaacaccgaacacccccgtggaccgggagcccgtggaccgggagccggtggtgtgccaccccgacctggaggagcg

SEQ ID NO: 387590 - DNA, 95 bp, Homo sapiens
gcggactcttcatctacgatgtcttctgggtcagtcaggagatcctagagctattaaatactacaacagccaaggaacaatccattgttgaaaaa

SEQ ID NO: 387591 - DNA, 82 bp, Homo sapiens
gcgcagcctcttcgagcgccgcggacgcgtcatcgagtgtgacgtggtgaaaggcttgggcactgtttaaaggaaagttccg

SEQ ID NO: 387592 - DNA, 50 bp, Homo sapiens
ctcctgagtggctgggactacagatccttcttagaaattcctaaggctca

SEQ ID NO: 387593 - DNA, 100 bp, Homo sapiens
gtgaccgagagcgtgaccgagagcgcgaatatcgtcatcgttagaagagaacacctgttcccagcgctgaagcattccgatggttcttttaaagcagtag

SEQ ID NO: 387594 - DNA, 50 bp, Homo sapiens
gatggaacacttcagtgcattcaagactccaagaatgaaaaggctctggg

SEQ ID NO: 387595 - DNA, 100 bp, Homo sapiens
tgcctgtttctcgagaaactaaggtaatagcctgcagctggtgttttgagaagccctactgctgaaaacttaacaattttgtgtaataaaaatggagaag

SEQ ID NO: 387596 - DNA, 85 bp, Homo sapiens
cccccgccttgcatcacctcgagacaggctttggaagtgataaagcagttaaaagagaaaatgaagatagaacgtgctcacatga

SEQ ID NO: 387597 - DNA, 100 bp, Homo sapiens
tgagaccagcctgaacaacatagagtgtttctcaggagctatcagaaactatcctcaccatggtagccaattgcagtaatgttatgaataaggccagaca

SEQ ID NO: 387598 - DNA, 144 bp, Homo sapiens
tgctttttgaccctatatcttcaaagcacataaaaacactttctgaagctcatgaagactgtgtaaataatatcagggacttcaaaatgagcgtccctgactacatgcagtgtgctgaggaccaccagacgctgctcgtggtgg

SEQ ID NO: 387599 - DNA, 90 bp, Homo sapiens
aagaagatatgacctatgcagttcgaaaactggataacactaagtttagatctcatgaggacttcagggccacaggtgctgccaagatgc

SEQ ID NO: 387600 - DNA, 50 bp, Homo sapiens
gcgagtatctccgtttcctggatgtgaactgccaggtggagctcaacagg

SEQ ID NO: 387601 - DNA, 75 bp, Homo sapiens
ctcatcggtttaaagatttgggagaagaaaatttcaaagcctttggtgggggaaaagtagctccagctcaaccat

SEQ ID NO: 387602 - DNA, 75 bp, Homo sapiens
tctccagccttggtctgagtggactgtcctgcaggtcagattgtcaagcatggagatatcaagtgtgtactaaat

SEQ ID NO: 387603 - DNA, 75 bp, Homo sapiens
tgagcgatctgctagaaaaacttaaatgggcgaaagatcacgatgaagagggcaagtgtccagagaatggctggg

SEQ ID NO: 387604 - DNA, 75 bp, Homo sapiens
aaggcctgtgtgctgcagaacccccagaccatcatgcgggaggcagcaccgggctcttgatggacttggcagcca

SEQ ID NO: 387605 - DNA, 100 bp, Homo sapiens
ctcaccaacaatggaagccatgcttgccaaactattcagattcctgccgtttgttcatcgttgtgcctaaagcatgtcgatgtggcgtcaagtacatcgt

SEQ ID NO: 387606 - DNA, 100 bp, Homo sapiens
agaattagtgtctccatcgtcatcagaaactgaaggcaactttgtctatcgcacagtgaaactggaacgccaagctgaagaagaacgaatacggaagcac

SEQ ID NO: 387607 - DNA, 100 bp, Homo sapiens
ctcaagctttcaaccacattgccaagttatgcagccttaaacgacttgttctctatcgaacaaaagtagagcctggatttgtggtatcatttctatcact

SEQ ID NO: 387608 - DNA, 74 bp, Homo sapiens
ctggatgtttgcgacatcccagagagcttccagagaaccagcagcacaaacactgttggggcaacagtgaacag

SEQ ID NO: 387609 - DNA, 83 bp, Homo sapiens
cttgggagatgggcatttggcgagaaggctggcgttagtgaagcgcgcccggcgtcacgaatgcgttgatatcaatgttactc

SEQ ID NO: 387610 - DNA, 51 bp, Homo sapiens
attgtactggcctgctgctggcccgcaggggcacctcaacacctttgcttc

SEQ ID NO: 387611 - DNA, 75 bp, Homo sapiens
ggggctctggtcccctcctcggttatatcttaagtgtggtgctgctaacattgcccaggcagcatctggttcagc

SEQ ID NO: 387612 - DNA, 82 bp, Homo sapiens
gccaccgcctccagcttgccaccaaagacctgcgactttgctcaggcctccaagcagcatcgtcttaaacgctaccacagcc

SEQ ID NO: 387613 - DNA, 119 bp, Homo sapiens
cccgttcttgcctcaggccagtcgcctccaggccaagagggatccttcacccgtgtctggagatggcgtctaccagaaggggatggacttcattttggagaagctcaaccatggggact

SEQ ID NO: 387614 - DNA, 96 bp, Homo sapiens
ggcgcgggaggtgttcgagaacgaccccgagacggttctgtggcctgatccccaggaggagctactctgggttaccatgagagagaccttggaggc

SEQ ID NO: 387615 - DNA, 74 bp, Homo sapiens
caaagctctggccagatccctcttggtcaacagaagtctgacctctctggatacatggactggacctgcctgga

SEQ ID NO: 387616 - DNA, 108 bp, Homo sapiens
taaagctgaagagtgttgtcactagcatttttggtgtgaaaaatacagagctggctgtcttccatgatgaaacaggtctgagaaacatcttacctattacaacagcaa

SEQ ID NO: 387617 - DNA, 83 bp, Homo sapiens
cgtggctctagcaggctccactaactggggctacgactctgatgggcagaaccacctggccgtgtttgcagcggtccacccgc

SEQ ID NO: 387618 - DNA, 98 bp, Homo sapiens
tcccgctggccctctgtctgcctgtgtccctgaccatggctccctgcagtaccctttaacggtcagcccaaggccaaccccactgtcactctgttccc

SEQ ID NO: 387619 - DNA, 90 bp, Homo sapiens
tagccacctcctaaccttcccttcttgaacccccagctttgcccgaagtttttacatacaaattctactagtcacacctggccattcagt

SEQ ID NO: 387620 - DNA, 75 bp, Homo sapiens
ggatgaataaaattggactcagagtttccattgacactgatatgcctgatgcctttaacagaaaactcagatgag

SEQ ID NO: 387621 - DNA, 100 bp, Homo sapiens
ccgcggtgcaccgcctgctgggagcgccgctcaagttatagctgaggtggtaccagtttaagaagtgagaacttcttcactgactgaaatttgcatatca

SEQ ID NO: 387622 - DNA, 96 bp, Homo sapiens
ccggacagagcccgtggtcgcgcagggaaacatgcacaattcttggattacaacaggtgaagattctggggtgggcgaaacctccaaaagaccatt

SEQ ID NO: 387623 - DNA, 100 bp, Homo sapiens
tgccatattcattcatccagtgatgatgaaattgactttaaagaaacgggtttctcacaggattcttctttgcagcaaattccaaattacagaaatgcag

SEQ ID NO: 387624 - DNA, 98 bp, Homo sapiens
aaaaattccgccgaaaaagagaagacgctttacccgactctttgggccgttatctcactaagactttgaccccgacgcaggcttcagtgattgccgcg

SEQ ID NO: 387625 - DNA, 100 bp, Homo sapiens
tgggttccagcccttcaaccaacatcttctgccctgggtcaagtgtacaaccgtcttcagatctcgatgttgcttcagagtgtgaagtcaaatgcatgcc

SEQ ID NO: 387626 - DNA, 82 bp, Homo sapiens
ccgggagctctttgggatccggccagatgattacttgaattttgtagccaccttggctaatgggatgagcctccagccgcct

SEQ ID NO: 387627 - DNA, 100 bp, Homo sapiens
atggatccatttctcctattgaggagtcaacgggcaagattcttgccaagagaattaatgtgcgtattgagcacattaagcactctaagagccgagatag

SEQ ID NO: 387628 - DNA, 82 bp, Homo sapiens
agatctgtgctgaccacaggaattggatctactagtgcagtttaattggttggggtcagataagaagaggagtgacaatcaa

SEQ ID NO: 387629 - DNA, 82 bp, Homo sapiens
aatcactaaattctgccgaaaggactgaggaacggtgcctggaaaagtttttcagaagaagtgaagtcaagatgaagaacca

SEQ ID NO: 387630 - DNA, 80 bp, Homo sapiens
gttggaagcagccgatccagcctgcggagcctgtggggcaggtccctggtgctgaaccgcctgcgtccagttgccagcgg

SEQ ID NO: 387631 - DNA, 99 bp, Homo sapiens
tagatcaggaagcctatgtcaactatggaacaacaacttgcagctcatctctattgatgagggaatctggaaaaattgcaatcaaaacatcatttctct

SEQ ID NO: 387632 - DNA, 100 bp, Homo sapiens
agaagtggaaacacccctaactctcccaggtgaaggaatctctctccagttactgggagtcagcaaagacagccgcccagaacctgtacgagaagacata

SEQ ID NO: 387633 - DNA, 52 bp, Homo sapiens
caaccttcgatctcctgacgatgggctcgggatgagtttgaaggcctcttca

SEQ ID NO: 387634 - DNA, 122 bp, Homo sapiens
tttgtgtcctgagatcaaatggcacttcattggccacctacagaaacaaaatgtcaacaaattgatgggtttggtgcacctcgatttggaggaagtagggcagggcccttatctggaaagaa

SEQ ID NO: 387635 - DNA, 132 bp, Homo sapiens
tgcaatgggaggaatgttcatggcgctcacctggcaaacccacctcctggctcttggctgtgtggtccatgctgtggacggcaccgccgagaacgggatccaccccctgagctcctccgaggtggacgaact

SEQ ID NO: 387636 - DNA, 100 bp, Homo sapiens
agcagcaggcggcctcggagcagcgcggccgccagcagcgggaacagccaatggagatcttcgtggatgatgagacgaagttgacgctgcatgggttgca

SEQ ID NO: 387637 - DNA, 95 bp, Homo sapiens
gacgaggccttccagcgctatcgtgacctgcttttcggttccgggtcttggccccgtccttacctcacagatgaagatgaagatggtgatcgaat

SEQ ID NO: 387638 - DNA, 75 bp, Homo sapiens
ttcagaggatcctgtagccataaagattgcaggaaactactttgcttcgcactttttcatgggaggagagaaatt

SEQ ID NO: 387639 - DNA, 74 bp, Homo sapiens
cactgcagatggacgcatggaatatttgcttgtgatggagtactatcccaatgcgagtgttgtgtataaaggaa

SEQ ID NO: 387640 - DNA, 83 bp, Homo sapiens
gcgagaccctagaggcctgcggttgtgaccgagattcccgacgagagagactgaggggaagagaggaaggaggggcgggctcc

SEQ ID NO: 387641 - DNA, 87 bp, Homo sapiens
catgagggaaatcgtgcacatccaggctggtcagtgtggcaaccagatcggtgccaaggaactgtggctgcaccatctgtcttcatc

SEQ ID NO: 387642 - DNA, 100 bp, Homo sapiens
agaaaaaagaaaagaaaaaagccaaaactgtggaacagactgcaacaaccacaaacaaaaagcctggccaggttttacgtaagaagaagaaaaaagtttc

SEQ ID NO: 387643 - DNA, 100 bp, Homo sapiens
gacgggcaatgccggggagtggtgcctcatggaaagcgaccccggggtcttcaccgagctcattaaaggattcggactcagcccaggagagtgttattac

SEQ ID NO: 387644 - DNA, 73 bp, Homo sapiens
aaataccgcaccatcaccgggatgtgcaacaacagacatgggtccctcggcttcctgcctcggaagcgcagca

SEQ ID NO: 387645 - DNA, 89 bp, Homo sapiens
ggatcgggatggaaacactctgacatactaccgaagaccttggaacgtggcttctttgatctatgaagagtggagtcaacatatcaatg

SEQ ID NO: 387646 - DNA, 82 bp, Homo sapiens
gaaataccagtccccagtgagggtgtacaaatacccctttgaattaattatggctgtgattgcccacagtgagtatcaaaag

SEQ ID NO: 387647 - DNA, 90 bp, Homo sapiens
gcgccggcggtggcgcctgcggacctaactagctccaggttaggccgagctttgcgggaaagcagcggccagcatccttcagaaaaagca

SEQ ID NO: 387648 - DNA, 95 bp, Homo sapiens
ggcctgggggaaccaaggccccctgatgttgaggatgttgagaaagagaaggaaacccacagttacctcagcaaagaggagatcaaagagaaagt

SEQ ID NO: 387649 - DNA, 90 bp, Homo sapiens
ccctcctcggtggaggcgtacatcactgtcgtctcatgggagaaagacactgtttcacttgtctcagacacccctgagagagtcttcggc

SEQ ID NO: 387650 - DNA, 98 bp, Homo sapiens
gtgcgcagtccgctgggcagaggcttgggccgccgagctggacccggaccggttttgggacaatggcgtctcttggccacatcttggttttctgtgtg

SEQ ID NO: 387651 - DNA, 83 bp, Homo sapiens
agagggtcccacggtggaagcgagagaggagggatgaaacgaggaggaagagatagtgaccgtaattcatcagaagaaggaac

SEQ ID NO: 387652 - DNA, 82 bp, Homo sapiens
tcccggccacgcgggtggaggtgtccgtgtcctgcaggttttaaaatcaaagatgggaaaatcggagaaaattgcccttccc

SEQ ID NO: 387653 - DNA, 51 bp, Homo sapiens
cctggatgatctccagagccgtggttgcacagccagagaacaacacatcac

SEQ ID NO: 387654 - DNA, 100 bp, Homo sapiens
ctaccttatgagctcggttttcttatgcttataagagtggaacaggactttccttatcccagttgattgtgcagaatacactgcctgtcgcttgtcttct

SEQ ID NO: 387655 - DNA, 78 bp, Homo sapiens
gcaagcctctgcaaatctgggacaaaaaggaagaggagcaggacttggatggtgagaaggggccatcatcggaagggc

SEQ ID NO: 387656 - DNA, 90 bp, Homo sapiens
cccagcagcccccgaaggccctatcaggacatggagtatgaaagacggtgaaggttgtggatgaacgaaggtaccggaaagtctttgaag

SEQ ID NO: 387657 - DNA, 90 bp, Homo sapiens
aagagaggccaaagagccagagcaacaggaactttatattgctgttggaatatctggagccatccaacatttagctgggatgaaagacag

SEQ ID NO: 387658 - DNA, 83 bp, Homo sapiens
cttgtggagccggagctgggcgcggattcgccgaggcaccgaggcactcagaggagatcctgctctctctcagccgcctgtgg

SEQ ID NO: 387659 - DNA, 100 bp, Homo sapiens
gtgtgctacatacgggctgaatgtggagagggtcttccaggacgacctcctgccccccgaggtctgcagtctcctgaacccagcagccatctacgccaac

SEQ ID NO: 387660 - DNA, 96 bp, Homo sapiens
gagcaacttaagaaccagattcgagatcagtggtcaattggtcaggacagggactacagaaattaggtccaaatttaccctgtgaagctgatattc

SEQ ID NO: 387661 - DNA, 90 bp, Homo sapiens
cagtttgaggatgcagatgttgatcactgaaaatgatttatgcaagtttaagataagaaaggaggtattcgaacttctggaaatgggagt

SEQ ID NO: 387662 - DNA, 140 bp, Homo sapiens
gtcaatatctgcttaggattcactgcacatcgaattaagagagcagaaggatgggaggaaggtcctcctacaggtaactaaatgaccatggaatctggagccgagaaccagcagagtggagatgcagctgtaacagaagc

SEQ ID NO: 387663 - DNA, 76 bp, Homo sapiens
tgacagcctggatctgagctgcgaggaggggaccccactcagtatcaccagcgctggagagcgaggtggcttcaat

SEQ ID NO: 387664 - DNA, 75 bp, Homo sapiens
gcgaatatcgtcatcgttagaagaaagaactggcatgaaacccattctgccttcaagttttgagatgcagagctt

SEQ ID NO: 387665 - DNA, 73 bp, Homo sapiens
tggggcagaggctgcagagccccaggaggagctgctgcccaaagggagcaaggaggaacagcgggattacgtc

SEQ ID NO: 387666 - DNA, 100 bp, Homo sapiens
cttagcttgtcggggacggtaaccgggacccggtgtctgctcctgtcgccttcgcctcctaatccctagccactatggtcttccacccttggccacctcc

SEQ ID NO: 387667 - DNA, 98 bp, Homo sapiens
ttcttgctatgttggagacaatactagtcttgctgtgtcgcccaggctggagtacaatggcatcatctcacctcacctcaacctccgcctcctgggtt

SEQ ID NO: 387668 - DNA, 75 bp, Homo sapiens
ctgaacttaaaaagcagtctaaacctgtgaccacccctgaagaaattgcacaggatcagttcttaagagcagccc

SEQ ID NO: 387669 - DNA, 83 bp, Homo sapiens
aagattgaatgccaagcagaaaattacctaaatgcactctttcgaaagaaagatggttcacaggcaccagccagaccccctaa

SEQ ID NO: 387670 - DNA, 82 bp, Homo sapiens
ggagatcccgctggtgaccctgccgctggcgagcgccaccgcatgggtgagaagccctaccactgcaactgggacggctgcg

SEQ ID NO: 387671 - DNA, 82 bp, Homo sapiens
cgggttgctttccaaaatggcgcgggtgctgaaggctgcagccgcgaatgccgtagacaatgcagatcttcgtgaagactct

SEQ ID NO: 387672 - DNA, 82 bp, Homo sapiens
gacgaggatctaaatgacaccaattacgatgagacatgaagagtatttctggagaagaatcatcccatggagtgattatgac

SEQ ID NO: 387673 - DNA, 96 bp, Homo sapiens
cgttaggcatctcccaggcgaccggctccgcagcaagatggcggacgagaaggacagggaaggctgccttggagttttcataagaaattgtccctg

SEQ ID NO: 387674 - DNA, 75 bp, Homo sapiens
aagcccaactcctatgagctcctctctggcagaacctgcacttgttgccaagtcttccatcttactagatgtgaa

SEQ ID NO: 387675 - DNA, 97 bp, Homo sapiens
gaagatcgggagcgggtccttcggagatatctacctggttttgatggcgacgactttgatgatgtggaggaggatgaagggctagatgacttggaga

SEQ ID NO: 387676 - DNA, 100 bp, Homo sapiens
cagagtctgtggaagaggtggttcgagccatgaaccagagaatcagtcagagtgctccagtgaaacagccaccacccctggctccccagagcccacaggg

SEQ ID NO: 387677 - DNA, 83 bp, Homo sapiens
ctacttttcaagacaccaagtgagaggccaaccagcacacgtcacatggagatgggcgtcaagaagttacctctcgtaccagc

SEQ ID NO: 387678 - DNA, 98 bp, Homo sapiens
tatcctctgtttctctgctgcaccgacctcgacgtcttgcctgtgtcccacttgttcgcggcctataggaaaagtacccagatgccgtgtacctctcg

SEQ ID NO: 387679 - DNA, 51 bp, Homo sapiens
gggtatatccaccctcaagtgtgttggttgaatctggcgatgtggaaccca

SEQ ID NO: 387680 - DNA, 82 bp, Homo sapiens
ccatgatccacccacagctcctcacccccgtgccgtccctcgtgttcacgagcactacaaacaccactggtttcccgaaaag

SEQ ID NO: 387681 - DNA, 75 bp, Homo sapiens
gcagctcgcacttgctcaacaagggcctgccgcttgggactttgaacatgtcggggatcgccctcagcagactcg

SEQ ID NO: 387682 - DNA, 100 bp, Homo sapiens
ctgtggataacgggaggtgaatttccatgtcaacatagtcctggagaagacagactgctgctttggacctgttggtaatgatggcctgagctaaacatct

SEQ ID NO: 387683 - DNA, 75 bp, Homo sapiens
ggactgaggaacggtgcctggaaaagtgctgacttgctcatcagttttgcacagtggcaattttgggactgattt

SEQ ID NO: 387684 - DNA, 100 bp, Homo sapiens
aggggcagtacaagcttacgtctctgctcttcagtacaatcctagaaagtggctcatgccaaagaagaaaaccttagtatgcatcagatgctggatcaga

SEQ ID NO: 387685 - DNA, 98 bp, Homo sapiens
ggcactcttcgtggccacctggaacatgcagggccagaaggaggggaagctggacaggagcagcccctacatccaggtactggaggaggactggcggc

SEQ ID NO: 387686 - DNA, 50 bp, Homo sapiens
cgcaaacttgacactcaccctgaccgtggagcccacagtgaccatctccc

SEQ ID NO: 387687 - DNA, 74 bp, Homo sapiens
ttgtttgtggatcgctgtgatcgtcacttggaacctacaagcagcaattggcgcctattatgactttgagagcc

SEQ ID NO: 387688 - DNA, 100 bp, Homo sapiens
tgtggaagagacaagccattttgtgcgcaccacttttgtgtccaggcataagaaatttgacggcagaatacttctatgaattcctgtccttgcgctccct

SEQ ID NO: 387689 - DNA, 75 bp, Homo sapiens
gggtggccctcgccctcctctggggatcgctgtgcgccgctgcatggctacttggagaatgagccgctgatgctg

SEQ ID NO: 387690 - DNA, 50 bp, Homo sapiens
caattcttcgacatactctccagcttcaaaacaagttgaaatcatcgcag

SEQ ID NO: 387691 - DNA, 110 bp, Homo sapiens
cccgctctacctcagcctgcgggactgctcggctcggcttctaggcgtttcagagactcctccactctctgggaatgacacggactccctctcctgcgacagtggcagtt

SEQ ID NO: 387692 - DNA, 82 bp, Homo sapiens
ctgccgtctatgaggccatgactgcaggccctgggaggagcggggacactgaggacctctctccaaattggcctctcaactc

SEQ ID NO: 387693 - DNA, 82 bp, Homo sapiens
ccccgcgggatacgcctcagcgcggtgagaagccctaccactgcaactgggacggctgcggctggaagtttgcgcgctcaga

SEQ ID NO: 387694 - DNA, 98 bp, Homo sapiens
ccaaggaccacatggtaaccagctccttctgctgccagagcgacggctgcaacagtgcctttttgtctggctgagctggctgaccgacccaatccccc

SEQ ID NO: 387695 - DNA, 83 bp, Homo sapiens
agcagcaagaaatcctggcggcgaagccctggactaaggagattagtccaaagagtgatattactgacactggcctggcacag

SEQ ID NO: 387696 - DNA, 100 bp, Homo sapiens
cgcgacggcgacccgggctctcccgctcattcccatcgtggtggagcagacggtagtttgagctccctaaaagaggaaggtggactctacagggacaaac

SEQ ID NO: 387697 - DNA, 97 bp, Homo sapiens
atccgagcgttctgcacaccgaggaaatgcgcttcctgagggagtgggtggagagggaagcgtgacagcaatgacagtgttttttcccctggataca

SEQ ID NO: 387698 - DNA, 100 bp, Homo sapiens
tcgactatggcaacaagtacaagcggcgggtgccccgggccctgctgctcctgggggccgccgccctggcctgcctcgccctggacctcctcttcctgct

SEQ ID NO: 387699 - DNA, 80 bp, Homo sapiens
cgcgcctagccggctcgcgaccgccaccggcacggccaggccagcatggtggaccacttacttccagtggacgagaactt

SEQ ID NO: 387700 - DNA, 100 bp, Homo sapiens
agatcgcacacaccaagaagctgttccgcaggaggagaaatgatcgaagactctatcaagaagaatatctaatccgtaccttgaacatacgccttcccag

SEQ ID NO: 387701 - DNA, 116 bp, Homo sapiens
cctactggttcctcttcagaaagaaaaaagaagaagtccccgagttcaccaaaattcagacattaaatgttcccactgccaggaggcaggcgccaccttgggctgctacaacaaag

SEQ ID NO: 387702 - DNA, 100 bp, Homo sapiens
gagcagtttactgttgcgttttgcagacaacactttctcagggtgcttcaaggatgaccgcatcgtcttctggacttggatgttctccacctacttcatg

SEQ ID NO: 387703 - DNA, 75 bp, Homo sapiens
gtccagcttcccttcctcaaataaggaaattgacacctggcgtgatgatcgtatccccttcctgatccactggag

SEQ ID NO: 387704 - DNA, 83 bp, Homo sapiens
acatcctggtggtgcccctcatcggccacgcccagatttcttctaccgctgcttccctgatgggctagcccattctgacttga

SEQ ID NO: 387705 - DNA, 90 bp, Homo sapiens
aaacgatgatgattttgaaccttacttgagtccacaggcaaggcccaacagaaactgttcatacttggtgcgctgtggactcttgtgata

SEQ ID NO: 387706 - DNA, 90 bp, Homo sapiens
gaaggtggcatctgagctcccccaggatgtgccagacaagagtgagaatggtgaggcatatcagagaaagaaggcggcagccactggcct

SEQ ID NO: 387707 - DNA, 51 bp, Homo sapiens
cgtgctctcgccccaacccgcgcgccagggctcctcgcacctaccccagca

SEQ ID NO: 387708 - DNA, 83 bp, Homo sapiens
ttggagtggtttaatgacccgagcctcagggataagatattggtcctgtcactgatgatccttcctctttgcctcagccaaat

SEQ ID NO: 387709 - DNA, 98 bp, Homo sapiens
gtcgtgtgggacctgttctggctgctccagccccaggaaggacccaggacacccggaagccggaaatgggatgtattcttggcctgggtagcctctag

SEQ ID NO: 387710 - DNA, 107 bp, Homo sapiens
cttgtgggtcctactgaggaaaggatatgatcgtgtgtctgtgatgcgtccacagccaggagacacggattcagaactggagtttcctgaaagactatgacccaatg

SEQ ID NO: 387711 - DNA, 50 bp, Homo sapiens
attgcctgctttgattccctaaaggaaaatacgctgctaacccccagtgg

SEQ ID NO: 387712 - DNA, 100 bp, Homo sapiens
ctgaaggccatgttcagcgggcgcatggaagtgctcaccgacagtgaaggattggaggctgttgtcattggagaagttcatgagaatgttactctgcact

SEQ ID NO: 387713 - DNA, 101 bp, Homo sapiens
gccccccaacatggactgtctctgtatagtgacaaccaaggctgaaggtgatgtggccgccctcaaccgacgcatccagctcgttgaggaggagttggaca

SEQ ID NO: 387714 - DNA, 74 bp, Homo sapiens
tatgacttgctaaacaatctgttggggcactatgaacgaagaggagcagtttgtaaacattgatttgaatgatg

SEQ ID NO: 387715 - DNA, 101 bp, Homo sapiens
ccgggggcccccagcccgcctctgtgccactttgcatcccacgccggaggaggcattaacgagaccgggggcctttatcatctgctggactcctggattgg

SEQ ID NO: 387716 - DNA, 85 bp, Homo sapiens
cgtcagttccacaccagtgcctcagaggtccatggcagtatcccagccaaatctcggtccttgaatgggcaagagggcacatgaa

SEQ ID NO: 387717 - DNA, 75 bp, Homo sapiens
gggaaaaagcggccaaagaagtgaagctgctgctactcggggatggagaagtttatgtttgggatgtgaactcaa

SEQ ID NO: 387718 - DNA, 75 bp, Homo sapiens
tggcggcagtcacttgtacagcgccggtcaacatcgcggtcatcaagtactgaatactcccccagttgcaagagg

SEQ ID NO: 387719 - DNA, 91 bp, Homo sapiens
ctgatctcgtatctcaggaacctcaggccctgcttgacagtgggaaatgtttcaacgtgcgcaagcgttgcggcggcgggcagaggactac

SEQ ID NO: 387720 - DNA, 98 bp, Homo sapiens
aaaaatgggcacgattctatactgcagaagtagttcttgcattggatgcaatccattccatgggttttattcacaggggaacgcccttttgcttgtga

SEQ ID NO: 387721 - DNA, 75 bp, Homo sapiens
ggagtttcaagcctgagtgtgaagattaaactggcgatggaatatgagaggagccctctggaaagaaaaggacag

SEQ ID NO: 387722 - DNA, 75 bp, Homo sapiens
cttggcctttgtatattctccatcgaagaatgccctctatgagactcagagccttggggcactgagggatgccag

SEQ ID NO: 387723 - DNA, 83 bp, Homo sapiens
agaacagatagctgaagaaggtgacgataatttggctagtgtctgctttttcaacgtgggagaaggagttgcacaagatagtt

SEQ ID NO: 387724 - DNA, 87 bp, Homo sapiens
tcggcgcggtcctgtactggctgctgctgccctgcgcgctgctggctggtgatgtgtccaatctagatcccaacttctcatttgaag

SEQ ID NO: 387725 - DNA, 75 bp, Homo sapiens
gcggaggagcgcggccgtcttagcctgcgccgcgaggtctgcggcctcgtgcaccaattccagctggacatcact

SEQ ID NO: 387726 - DNA, 97 bp, Homo sapiens
gggaaatggctgcgagaccctagaggcctgcggcctgcggcctcaggagtgcaagtagctgatgaagtatgtcgcattttttatgacatgaaagttc

SEQ ID NO: 387727 - DNA, 108 bp, Homo sapiens
tgaacctccaccctgccgtcagttccacaccagtgcctcagaggtccatggcagtatcccagccaaatctcgggatgactccgctgaggtggacgtgtacaacccgac

SEQ ID NO: 387728 - DNA, 97 bp, Homo sapiens
tgcaggatcaaggaagtttgctaaactcatcatggcaggaaactatgaagagcagagcagaggacaacttgtagaagacatgaccattaagagacat

SEQ ID NO: 387729 - DNA, 51 bp, Homo sapiens
gcctcctacaagagtcctaccaaaagtatgtttctataaaacctgataacc

SEQ ID NO: 387730 - DNA, 90 bp, Homo sapiens
agaatgaagaccacaataaaagagacctctacttagctcagcaattcttaccttccacaggtcaaggatgccaaagagagagggacagca

SEQ ID NO: 387731 - DNA, 90 bp, Homo sapiens
ctggccgggcagtaccttcttcaagagaaatggagcccttctccaaggttgatgataattagaagcatgctttccactgaacttcccgac

SEQ ID NO: 387732 - DNA, 82 bp, Homo sapiens
tcacctttgccaggaactggggggccgactatatcctgattgactggggcgactttggggtagaggcagtgtctgaggggac

SEQ ID NO: 387733 - DNA, 98 bp, Homo sapiens
gcactttttggatcggcatctagtctttccgcttcttgaatttctctctgtaaaggaggtgttggtaaatcatgcttattgctacagtttacagacaa

SEQ ID NO: 387734 - DNA, 90 bp, Homo sapiens
cactaaaccacaaatatacaacaaggccattttctcaaacgagagtcagcctttaacggaacaagactgccaatggagactgccgcagag

SEQ ID NO: 387735 - DNA, 83 bp, Homo sapiens
atccaggataacggaggctggatctgcttggctttgaggaagagtggcagtactgcctcactgcataagggatgggatcagag

SEQ ID NO: 387736 - DNA, 100 bp, Homo sapiens
tagccagccagctggagcgatgcaagctcggatccgagactggcagcatgagcagcatgagaccccttatccctctggacagaatgcaggtccaaccacg

SEQ ID NO: 387737 - DNA, 100 bp, Homo sapiens
aaacagcactgccaaatagcagaagaataccatgaggtcaaaaaggaaatcaccctgcttgagcaaaggaaccaacatcccatgcaccatcgtggagact

SEQ ID NO: 387738 - DNA, 74 bp, Homo sapiens
ccaatggcacggaggcctgcgtgggctgtttgcggggtggggtggggggttcgctatgtcggatgacgattcga

SEQ ID NO: 387739 - DNA, 125 bp, Homo sapiens
gcgtccccgagttacaggggctggtgaccgagcacgtcttcttactagacaagttaagactgaaaacgcaactgggcctgaagaacttggattgcccctgcagaggtcctacagcgaacacctgg

SEQ ID NO: 387740 - DNA, 100 bp, Homo sapiens
gctgtaattgctgaacttaaaaagcagtctaaacctgtgaccacccctgaagaaattgcacaggtagctgtagccatacctaatagacctcctgatgctg

SEQ ID NO: 387741 - DNA, 75 bp, Homo sapiens
aaaagactcaggacggacaagcacagtcttcggaaggtgatgcttgccgacaggaagggcacagaagaactgtat

SEQ ID NO: 387742 - DNA, 100 bp, Homo sapiens
gaaaaatccaagtcttcaggatcgtcacgatcaaagaggttgaaaggattgtagacaagaggaagaacaagaaaggaaaatgggagtatcttatccgatg

SEQ ID NO: 387743 - DNA, 50 bp, Homo sapiens
cgccttcacagggaggcaacttttgagtggttattaacttggtgatgctt

SEQ ID NO: 387744 - DNA, 82 bp, Homo sapiens
gcacgcagccgggaggccgaggactcggagttcacctgcaggaatggcatcaccagctgccggatgcggactgagagtgagc

SEQ ID NO: 387745 - DNA, 74 bp, Homo sapiens
ccgagatggggaagtcaaaagtgtggatgggatttccaagatcttcagtccttcagtgaatctacagacctatt

SEQ ID NO: 387746 - DNA, 75 bp, Homo sapiens
cggagctacatccagtgaataagtgatttaaatctaccacccagctgtagttgaatctacaatctgctcagggat

SEQ ID NO: 387747 - DNA, 100 bp, Homo sapiens
tcgtcgagaagcctatcatcgggaccagttactctccacaagaaaattcacacaaccacagtgctcttcatagttcaaattcacattcttctaatccaag

SEQ ID NO: 387748 - DNA, 100 bp, Homo sapiens
gaagaacaaagggaagttccgggtgccgaaaatcgctgaatttacgagctggtgatgctgctggagtggtggtcgggcacggaatgcaccatcttcacgg

SEQ ID NO: 387749 - DNA, 50 bp, Homo sapiens
caccgaggctcggccgccccgccgcgagatgaaggatttgggggcagagc

SEQ ID NO: 387750 - DNA, 83 bp, Homo sapiens
ggggtattcttgaaccaggtcatgctccaaatgtgtccgcaaatatggtaaagattttcaagctattgcagatgtaattggca

SEQ ID NO: 387751 - DNA, 100 bp, Homo sapiens
caccggccagtgcgtctgccccgccggctgggtgggcgagcaatgccagcactgcgggggccgcttcagggtgttgattgcctttgctcagtatcttcag

SEQ ID NO: 387752 - DNA, 50 bp, Homo sapiens
gcaatccacgccacggaatccccgaggtttggtgcacctcgatttggagg

SEQ ID NO: 387753 - DNA, 98 bp, Homo sapiens
gagagagggagagtgacagcagcgctcgtctgcgggccaggcatcgacatccgcaacgactatcagcagctgaagcgcctggagaactgcacggtgat

SEQ ID NO: 387754 - DNA, 98 bp, Homo sapiens
gtccctctacgcgttttggttcccggttggtgcttcctgttcgcagctgcggcagtctcggcgcggaagatggccggcggcgtggacggccccatcgg

SEQ ID NO: 387755 - DNA, 100 bp, Homo sapiens
ctctgcccacctctctcatgctgaatcacatccatgggaagagcctaggttccaggtgccttttcagttgctgacttctcttatggacatagattcactg

SEQ ID NO: 387756 - DNA, 100 bp, Homo sapiens
ccaaacaacgccgccccttccttccagtttattaaccccacaaccatcacatccaccatgaaagctaagctgctgaagttaagtgggcagaccaacatcc

SEQ ID NO: 387757 - DNA, 100 bp, Homo sapiens
cttctgtcctcagatcgactggatggttcctgtcacgttacaactgctagtttggacggagaaactaacctgaagatgatgaagaacgagagcttcaaat

SEQ ID NO: 387758 - DNA, 100 bp, Homo sapiens
cccccatggaggcgaggtagagttggggtcgcagatcacgatgatggctcctgtggagtccaaattttcccaatcaactggagatatagataaagtgaca

SEQ ID NO: 387759 - DNA, 50 bp, Homo sapiens
ggaggacgcgggtgcggtctaggaacttttacccagcacctgtccagtga

SEQ ID NO: 387760 - DNA, 80 bp, Homo sapiens
gttatgtggacgagctgttaaaccagcactgccagtgaaagatgtagaagataaacctgaacaacaaaccagaacaagag

SEQ ID NO: 387761 - DNA, 80 bp, Homo sapiens
aattgtgcttcatgtgctgcattgtttacattccctagcgattccttgagctgagagaagataatatcattttaattgaa

SEQ ID NO: 387762 - DNA, 100 bp, Homo sapiens
ccaggccccccgggactcccagggctccagggccctcctccggccccaggcctaccccagtcacggacggacgactgggtttggattcagaagaggatta

SEQ ID NO: 387763 - DNA, 90 bp, Homo sapiens
gaagatggcgccaggacgaaggccctactgggcaaggtgaaatgtatagatgttgttcaggcttatatcaacagaatcaaggacgtgaac

SEQ ID NO: 387764 - DNA, 100 bp, Homo sapiens
tgaacgtcatcaacgagggcggcattgacaagctgggcgaggatgtctggggagtgcaccagccaggtcactatctgtgagtatcaggggactttaggga

SEQ ID NO: 387765 - DNA, 100 bp, Homo sapiens
gaaacattaggtggttttccagtagaatttcttatccaagtggccaactgagctgcatttccttcccacctaaggaagagaagtacctccagcagattgt

SEQ ID NO: 387766 - DNA, 82 bp, Homo sapiens
cgacaagccgctggcagccgcggatctcaccgccgctcagggaacttggcattagaattcctcgaccactaggacagggacc

SEQ ID NO: 387767 - DNA, 98 bp, Homo sapiens
tcctgttccaccttcagagcgtcacggcgtacgccctcatggggaaaatctccccggtgactttcagaaaatgctgaaccagatctggacgacaatga

SEQ ID NO: 387768 - DNA, 82 bp, Homo sapiens
cttgtcacaattgtggagtgtggcccagttcttcttggccctcctcttgcagggaccagttactctccacaagaaaattcac

SEQ ID NO: 387769 - DNA, 75 bp, Homo sapiens
tactacaggactgcggacaagggctggcagaatcatttgctgtttcaaatagagaactgtgcgatgatgagaaag

SEQ ID NO: 387770 - DNA, 83 bp, Homo sapiens
gatgagagcattcgaagtgacctcagcagggcatccagatatcttgggaatattgaatatattcacagatggtagaatcggag

SEQ ID NO: 387771 - DNA, 50 bp, Homo sapiens
atggtcagcatcgatcaattattgctcctgttcgacacagtggagaccat

SEQ ID NO: 387772 - DNA, 96 bp, Homo sapiens
aaagacgttgaactctcagtggtcctacctggggatattatcaaatctactactgttcatggcaggtatggcatttcaaatatagatacaaccatt

SEQ ID NO: 387773 - DNA, 86 bp, Homo sapiens
ccaggattacagtgtccaaagaccaatcctcctgtaccacagcccgggtgacgttatattcctattcgaagaccaagagctcaaaa

SEQ ID NO: 387774 - DNA, 75 bp, Homo sapiens
cacatatatgttggcattgagtcaaaccatcttctcccaaggtttttgcaggcgggagacactatattcaatcgt

SEQ ID NO: 387775 - DNA, 83 bp, Homo sapiens
gtcctcatcgggcttatgttcgagcaggaggatgcattagcacaacaggcctttgaagaggctcggagaaggacacgcgaatt

SEQ ID NO: 387776 - DNA, 99 bp, Homo sapiens
gaatatccagtttgagccatcggatctaagatccaaaaggaagaggatcacctagcccgggtagaagaggcaatcacccgtatgcttgtgtgtgccctg

SEQ ID NO: 387777 - DNA, 101 bp, Homo sapiens
aaatgacggttataagaccatttatttctttggagacaaaactatgccacagcggaagatgtcggacagcgaggacagcaacttttccgaggaggaggaca

SEQ ID NO: 387778 - DNA, 100 bp, Homo sapiens
cccgcagctgcagccgcctgaccacggcgactggacttacgaggagcagtttaagcagataaggatgacattcggctgctgccgtcagcattgggtgtga

SEQ ID NO: 387779 - DNA, 75 bp, Homo sapiens
agccgtgggcagcggtggagcatgagtctggctgctgtaattctgcccccattgagcccctacttcaagtactcc

SEQ ID NO: 387780 - DNA, 75 bp, Homo sapiens
gtcaccattggagctcatcagactgaccgtgtcttacatcagttcagagaggtcatcatcagatttgaaatattt

SEQ ID NO: 387781 - DNA, 80 bp, Homo sapiens
ggaatccattatggtgtcattacatgtgaaggctgcaagctccagtgatccacaagctcagaaatacatcgcggaaagta

SEQ ID NO: 387782 - DNA, 100 bp, Homo sapiens
agacccgagtggaatctttagaatctcaaacaagacaacttgagctgaaagcgaaaaactatgctgaccagattgtcgccgtgatcctgaaggcgctgac

SEQ ID NO: 387783 - DNA, 73 bp, Homo sapiens
gaaagctggtcatcagtttggagttacatggcgtgagaaagatcagtctaaagaaaaggagaagaaagtgaaa

SEQ ID NO: 387784 - DNA, 109 bp, Homo sapiens
cagggacggcggcggcgcagctcggaacccgccagggtccagggtccaggttccagcgcccggcggcccaggtgctggagaatctggtaaaagcaccattgtgaagcag

SEQ ID NO: 387785 - DNA, 80 bp, Homo sapiens
gccccgcgcagccgccggcgtcgccgccatggacctagtatttgattttcatcaagcagctgatggtatccaggaacaac

SEQ ID NO: 387786 - DNA, 109 bp, Homo sapiens
attcgcaagaccttcaatatcaaaaatgactttactgaagaggaggaagcccagaagatggctgtgccacccacgtatgccgatcttggcaaatctgccagggatgtct

SEQ ID NO: 387787 - DNA, 100 bp, Homo sapiens
agatgatgaattctatcagcaggactcctagaagtaccccaccccacccctgctccttggaggacaacgtgatcactgtattcagctctgtcaagaatgg

SEQ ID NO: 387788 - DNA, 100 bp, Homo sapiens
tttctcttgagtaaatacctaaaagtgggcttgctggtcgggaacatgccctgtgtgccgccgtcatttcccacctgcggttattgaagcatctgcagct

SEQ ID NO: 387789 - DNA, 100 bp, Homo sapiens
gccctgggctggggcaggagccggaagcgttgttgacgaccatggacatcatccacgatggatttggattcatgctggcttttggagacttggtgtgggt

SEQ ID NO: 387790 - DNA, 122 bp, Homo sapiens
ttttcaacagccttctcaattttctttctcagaaagcagaggctcagagcttggagacagacgatgacaagagcacctcaaaggcagcagcctcaaggagcagccatggccccagacttgtc

SEQ ID NO: 387791 - DNA, 100 bp, Homo sapiens
cgtggccaccctgtgggcctggcgctggaggcagcggtgcacgtgcagctgctacaggagctgagagaccctaccctcactttccgtctgcttggctccc

SEQ ID NO: 387792 - DNA, 100 bp, Homo sapiens
aagaaatgtgttgtgccagcaggtccacctgttggcattgccccaaatacaatgttagcaaaagtatgcagtgataagaataaaccaaatggacaatacc

SEQ ID NO: 387793 - DNA, 75 bp, Homo sapiens
ttggaccccgcggcgcccctcggcctcggagcaacgagcgcagcgccggtttttctatatgagtggagaagacag

SEQ ID NO: 387794 - DNA, 76 bp, Homo sapiens
tgtacctggaaaacaatgcccagactcaatttagtgagttacagaatgtctgaaggggacagtgtgggagaatccg

SEQ ID NO: 387795 - DNA, 96 bp, Homo sapiens
tggagacagagctgagggagcaagaggtgtcggaggtctcatctttgaactactgccggagcttctgccaggggtcctactgggcaatagacacca

SEQ ID NO: 387796 - DNA, 51 bp, Homo sapiens
gatcaagatcctgatgaagaatgtgtggaaccatcagagaatctacaatcc

SEQ ID NO: 387797 - DNA, 111 bp, Homo sapiens
atgaacgagacttttctcagatgttggatatttgcttggaaaaacgtgtgggtacgaccttgatgatatcatcaagttgaatcgaaaggaagggaagaagcagaattttcc

SEQ ID NO: 387798 - DNA, 102 bp, Homo sapiens
cgccagtcaataggaagtacgagtaccaccaaatcccattgaatttctagcatcttatcttttaaaaaacaaggcacagtttgaagatcgaaactgacttaa

SEQ ID NO: 387799 - DNA, 75 bp, Homo sapiens
agagtcctcagctgtataatcaaacctccaatccacctggctctccggcggcttcaatgatccatcctaaagagg

SEQ ID NO: 387800 - DNA, 83 bp, Homo sapiens
gggaacccaggccccgccgaggcggccaggtgtggacactgccagcggctgcagccgacttggaatgacctgggagacaaata

SEQ ID NO: 387801 - DNA, 83 bp, Homo sapiens
ccggcacgcgactccccccgggcccaaagtgatgtgtccaatctagatcccaacttctcatttgaaggcaccaaactggatgt

SEQ ID NO: 387802 - DNA, 75 bp, Homo sapiens
gtgacatccgaggtgcctttctccaaaagactctcagcgttctcatctctcttccttcaccatgaagctgatgga

SEQ ID NO: 387803 - DNA, 75 bp, Homo sapiens
agtcaactgatattgatagtacattggccaacttcctagcggtgcacaaatggagtccagaggaggctgtaagag

SEQ ID NO: 387804 - DNA, 74 bp, Homo sapiens
tcatcgtttgactggacagtaaagctttggacaactaaggtacaagaaaattccccaggacacagagctggttt

SEQ ID NO: 387805 - DNA, 87 bp, Homo sapiens
cttcgtgctgtgcgggatcgacgcggacagcgggctggagcctgacgagctggcgggttgtctgcattcaaaagagcattctattaa

SEQ ID NO: 387806 - DNA, 100 bp, Homo sapiens
ctgagcccgtgcctgtcttcagatcttcacagcacagttcctgggaaggtggagccaccagcctctccctggttacgagaagtttctgagaagctgaaca

SEQ ID NO: 387807 - DNA, 82 bp, Homo sapiens
ggggagtggaaaggctctcagtgaaaaagcaggtgcagttaataaccaaagcaggccacaaagccacagcagtggagaattt

SEQ ID NO: 387808 - DNA, 96 bp, Homo sapiens
ctctttggtcaaaagatatggcgccatatcagggcctgtctcctccctcctacacatttccagctcctgctgcagttattcctacagaagctgcca

SEQ ID NO: 387809 - DNA, 90 bp, Homo sapiens
ctaagcactgcggtgaaggagttagtagaaaacagtctggatgctggtgccaccaatattggctctgtgtgctccgggatggagcaggtg

SEQ ID NO: 387810 - DNA, 100 bp, Homo sapiens
cggcagagacattgttcttgccggctccctacggtgccgtgtgtgcgtgagagaagaccagtctttcctctaggcaatcctttatcacaggatattctca

SEQ ID NO: 387811 - DNA, 83 bp, Homo sapiens
tctaatttgaaccatgtttggattgaagccgcctctgtattacttaccagagtcatcttagtgggatttggggaagcaacagg

SEQ ID NO: 387812 - DNA, 80 bp, Homo sapiens
cgtcacactacgacagtgagaaaggagccctaccacttatgtcttggatgaagatgaacctcgattccttgaagaagttg

SEQ ID NO: 387813 - DNA, 122 bp, Homo sapiens
gaagaccgcgcgcagggcctgcagcgggagctggacggcgagcgcgagcggcgcgagaaagtgcccgtggttgacacgagctgtgtccccagctgttcccgtctacaatggcatcatcttcc

SEQ ID NO: 387814 - DNA, 83 bp, Homo sapiens
agcgacagagccaaaatcagagctggaacctgaggagagagaaatcatgagtggaggatctcaagtccacattttttggggtg

SEQ ID NO: 387815 - DNA, 100 bp, Homo sapiens
ctgttagtgccacagcacctgggtatgacccagagacagtaactgtgaccgtgggtcctgcggaaccaacgttgagttcagcaagaccagcagattggaa

SEQ ID NO: 387816 - DNA, 100 bp, Homo sapiens
tcagttgtgcgttgcggccagtcgccactgctgctgaacaagctccaaacacttgtgaatgtcatgtttgtaagcaggaagcttctggactgacaccatc

SEQ ID NO: 387817 - DNA, 51 bp, Homo sapiens
aggagccagccccagctatggcccaggtgaagccatcagtgtctacagctt

SEQ ID NO: 387818 - DNA, 100 bp, Homo sapiens
aacaacacgcgaacacccgagatctcaggggatttggctgacgcctcacaaacctccacattggatggaggatgaagctgtcctggacagaggggcttcc

SEQ ID NO: 387819 - DNA, 90 bp, Homo sapiens
ccatgaagccagatttctcccaggaaatggaagttccagtattaccgaaaatctctctaccgatcaccagttcttcactgcctaccttta

SEQ ID NO: 387820 - DNA, 75 bp, Homo sapiens
cgagccgacaccatgcgatccaaggcgagggcgaggaagctagccaaaatcaggatggctaaaggtgaccccaag

SEQ ID NO: 387821 - DNA, 82 bp, Homo sapiens
ctcggggcgggcgccgcgggacctctccgggccatgggaatgtgtttactgtgaaaacaaggaaaaaggtaatatttgcata

SEQ ID NO: 387822 - DNA, 75 bp, Homo sapiens
aaatgacccaccaatggaagcagctggcttcactgctcaggttggcgtgggagccagcctagggcttcgggtcgc

SEQ ID NO: 387823 - DNA, 97 bp, Homo sapiens
cggatcaatccagatggcagccagtcagtggtggagagacagggtctcactctgtcgcccaagctggagtgcagcagtgctatcacagctcactgca

SEQ ID NO: 387824 - DNA, 100 bp, Homo sapiens
actattcagatcatccaagtggaggttcctacagagattcatatgagagttatggtctcagccttagatccaaggacagtccaaggaagtcctaagacca

SEQ ID NO: 387825 - DNA, 100 bp, Homo sapiens
aggtattcttgtggatattgggcttgacagctgcaaggagttactgaagaaaacttctgtgaagctatcagtaaacttcaagaaaattacattgcagcag

SEQ ID NO: 387826 - DNA, 105 bp, Homo sapiens
accgtgagagagcccattcccccgacacctactccggcttgcgttctggaaggtcagcccaaggccaaccccactgtcactctgttcccgccctcctctgaggag

SEQ ID NO: 387827 - DNA, 82 bp, Homo sapiens
ctcaccccgcggccgcaccttcccgccttctcaggtgacttaagagattaaaattaatttggttgctgttggttctgaacaa

SEQ ID NO: 387828 - DNA, 88 bp, Homo sapiens
tctgttggaaccggcggcgttgcgtctaaaaaggcgaaagccttgaggttgaaggtggtggaagctacaatgattttgggaattacaa

SEQ ID NO: 387829 - DNA, 75 bp, Homo sapiens
gacagaccgtttgtgtgcaatgccccgggctgtggacaggaagagagaagggcacagttacctaagtatcaacgt

SEQ ID NO: 387830 - DNA, 119 bp, Homo sapiens
gcaggagagacagatcacagccagagaaggggccagtcggaaatttgttgcccagcccaattgtcaacagctgctggcatctcgctggtacgatgagtttccaggctggaggagaagac

SEQ ID NO: 387831 - DNA, 100 bp, Homo sapiens
ccacaatgggattttcaccctttactcttacagttttttgctccactcaagcctgttagaatcaccatggaatacagctccagtgggaaggccactggag

SEQ ID NO: 387832 - DNA, 90 bp, Homo sapiens
agagccacctgtcctgcctgttcatggcagtgacccagaaagattcatcagtgggcgtttgatgaaggccggaacaactttgaaggggag

SEQ ID NO: 387833 - DNA, 97 bp, Homo sapiens
tggccatgtgagatacaaggctacacagagacagatcaaagcagctctagctttccacagccccaccaccaggatcaagaaggagccccagagtccc

SEQ ID NO: 387834 - DNA, 88 bp, Homo sapiens
tggacctcaggagcctcctaaaaccacagttaaacacagtgggaatatcacttttgatgagattgtcaacattgctcgacagatgcgg

SEQ ID NO: 387835 - DNA, 75 bp, Homo sapiens
atttcagaagactgtatccaccatgtactacctctggatgtgcctcccccagggaagaacttcactatgcctcgg

SEQ ID NO: 387836 - DNA, 99 bp, Homo sapiens
cagcctcccgagaagctgggattacaggtgagcagtaggtcatccagtcccagtgtcagaatgattactacctcaggaccaacctcagaaaagccaact

SEQ ID NO: 387837 - DNA, 100 bp, Homo sapiens
cccagaggcgccggagcccggaatcccgctcggagccagccagccgtcccgagctaccagcaggttcagaaaagagaccctcgtgactggactgcacagt

SEQ ID NO: 387838 - DNA, 51 bp, Homo sapiens
ctttgaaagaacttgccagacttaaacagctatctcacgtgagagggcagt

SEQ ID NO: 387839 - DNA, 100 bp, Homo sapiens
aagtttaagagaagaaatggacatgattgcctaaatcagccaaacacagggtaagtaaggaggtctctgtaccatggctcgtacaaagcagactgcccgc

SEQ ID NO: 387840 - DNA, 75 bp, Homo sapiens
agactatcctggagaattttttaaaggcagatggagttattgccatggtgttaggacaagctgattgtgttaaag

SEQ ID NO: 387841 - DNA, 83 bp, Homo sapiens
ctcagtgacctcctggacttcagcatggttgagaacttgttgcttagtaaccaagggaccattaagctgtgtgactttggcag

SEQ ID NO: 387842 - DNA, 98 bp, Homo sapiens
atgggcagtcatggtcccagaaacgtcactatcaagaagagggtacaccacccggactacaacaatgagttgacccagtttctgccccgaaccatcac

SEQ ID NO: 387843 - DNA, 50 bp, Homo sapiens
caaaaacgtcaacaacagttttacgtataatggaatgtgcttacaagggc

SEQ ID NO: 387844 - DNA, 100 bp, Homo sapiens
caaggatgtcatatctatgagtaccgcgagagcaacaaatagaagagtgatggatgtcatttctcgttcacagctttacttggatgatcttttttctgac

SEQ ID NO: 387845 - DNA, 82 bp, Homo sapiens
aatctagaaagaagatgcagcacaatgttctagtagcggagtcagagcaccataacatggtgtgggaagtgaagacaaatca

SEQ ID NO: 387846 - DNA, 101 bp, Homo sapiens
ttctattccagggctcccaggcagcagaatctgcccacagagttcggtttaagctatgaagaaggacatccctcacactctgaaacagatctccttcagag

SEQ ID NO: 387847 - DNA, 82 bp, Homo sapiens
ctgtgacgctgctgctggggtcaggaacgaatgcaggaatttgggaactgagctgtgcaagtgctgaagaaggagatttgtt

SEQ ID NO: 387848 - DNA, 98 bp, Homo sapiens
cgagcgcggcgcggggccaccatgggggcccagctcagcacggtttgtctacagattttgagcgttcgaagttgacccctgactaagtatactttgct

SEQ ID NO: 387849 - DNA, 90 bp, Homo sapiens
agaaacttcctcagtaaagcgtgtatgcaacagcgttattgcaacaggctaacgaaaacagacaaaattcaactggaaaagcatgttttg

SEQ ID NO: 387850 - DNA, 100 bp, Homo sapiens
tgagccagaacctgagcctgttaaagaagaaaaactttcgcctgagcctattttggaagagagaagggcacagttacctaagtatcaacgtaatcttcct

SEQ ID NO: 387851 - DNA, 100 bp, Homo sapiens
gtaaagctgctggacaacaccatggaaatatttgacattgagccaggtgactttatacacactttgggagatgcacatatttacctgaatcacatcgagc

SEQ ID NO: 387852 - DNA, 97 bp, Homo sapiens
gggatggcaagatagcggcgcgggagcgtaccgatgtacagttacccagcacgtgtacctcctcctcctcctattgctcgggctgtagtgccctcga

SEQ ID NO: 387853 - DNA, 98 bp, Homo sapiens
aacagtgagcctagagctggagactagcgttaaccggcggggcggccgatgggtcatcttactctggaagactatcagatctggagtgtgaaaaatgt

SEQ ID NO: 387854 - DNA, 74 bp, Homo sapiens
tcagaatccaagtcaagtcaggattcctgctcctctggacccttcccgctgcccagcgctggggacgccttcct

SEQ ID NO: 387855 - DNA, 114 bp, Homo sapiens
aggcagcagcccagacgcggcacagagagggcctgggagcttgctgcagcttcaggatgaaacaggcgcctatttaatcgacagagaccccacctactttgggcctgtgctgaa

SEQ ID NO: 387856 - DNA, 100 bp, Homo sapiens
gacaaaacccgaaagaggcgcagcgcttccagtggtagcagcagtaccaggtctgagtgtacggtttgcagatatgcctggaaaatcaaggaagaaaaag

SEQ ID NO: 387857 - DNA, 87 bp, Homo sapiens
cgaggcccagctggaccgcgagggtgacgccgggccggcatcctgaggttagcattacacttctcccagtggagcccatgacttctg

SEQ ID NO: 387858 - DNA, 90 bp, Homo sapiens
gtcctagatgacttcattgcactgctgcaactgccttctccagacctcttgccagaaataatagtgtaatccttgctgatgaaatgggcc

SEQ ID NO: 387859 - DNA, 82 bp, Homo sapiens
aaggaagtgttccccacggctgcgctcatgccagcaattctgtggtgttcttggtcacacatttatggagtttctgaagggc

SEQ ID NO: 387860 - DNA, 90 bp, Homo sapiens
ctcatactggggaagccaggagattcagctctgctccgaaggcccttcctgtctgcacagccatgtccattggagcccgttcccaatcag

SEQ ID NO: 387861 - DNA, 74 bp, Homo sapiens
ctgggccctgaggctgcaccaagtggcgaaggagccggctccaagagttcctatcagactgagattgggcagac

SEQ ID NO: 387862 - DNA, 74 bp, Homo sapiens
tatatcgcatcctatggctcaaagaaagatgattatggagcaccaagaactactgaaacaaatgaaggaaactg

SEQ ID NO: 387863 - DNA, 51 bp, Homo sapiens
caccccttcctggtcaatctgtgctgttccatttcctccaagtcaccggct

SEQ ID NO: 387864 - DNA, 80 bp, Homo sapiens
tgtctccttgctgtccatgcgcttattgatgtatggagggaaacaggaagagctaaagatggctgaatttctagatgacc

SEQ ID NO: 387865 - DNA, 100 bp, Homo sapiens
cctggagaccttcgagcaccccaacgtggtcagggatagttgctgttctcttctgtggagtcacacaagcacattatacctacaacaatctgtcttcgga

SEQ ID NO: 387866 - DNA, 87 bp, Homo sapiens
tcgatctaagatggcgactgtcgaaccggctggcgcccatgcggctctacacgctctccaagcgccactttgtcctcgtgtttgtcg

SEQ ID NO: 387867 - DNA, 75 bp, Homo sapiens
catcaagctggaggacaggacgtcaggtactccaaagattcaggtttactcacgtcatccagcagagaatggaaa

SEQ ID NO: 387868 - DNA, 100 bp, Homo sapiens
cgcaccatggagttctccgagaggaaaagaagcaggaaatcccagagcttcaaactggtgagccgagtgcacttggaggctcctcagctcttcatatccc

SEQ ID NO: 387869 - DNA, 90 bp, Homo sapiens
tgccaccaatcccttcgatcaggatgttggcatttgggcagtccttctccatccaccggaaggttgctgaagatggagagactcgggagg

SEQ ID NO: 387870 - DNA, 75 bp, Homo sapiens
ccgcaacagccccttcgtcccaagacaggacatccagcccaaaagagacctcacccgctttgtgaaatggccccg

SEQ ID NO: 387871 - DNA, 90 bp, Homo sapiens
tggaatccaagcttgggaagacaattgtcattaccaagacaacccctcaatctgagatgggaggtggcagctaatttgcagaaaattgtg

SEQ ID NO: 387872 - DNA, 100 bp, Homo sapiens
gttacttccaagtcatcaccagaaagcaaagaacagtctgaacttgatcaagatttggatgatgttgaagaagtagaagaagaggaaactggtgaagaaa

SEQ ID NO: 387873 - DNA, 82 bp, Homo sapiens
tcagcatggcccaggctcctgctgacccgggcagagaagctgcgtgagctggaggacaagtacgcagagtgcatggagatgc

SEQ ID NO: 387874 - DNA, 51 bp, Homo sapiens
ttcaagtgtttactcatttgcctatcctgataacttaagtgactctctctt

SEQ ID NO: 387875 - DNA, 89 bp, Homo sapiens
tctgcagcaccaatgccttcagactgtgaacaactctgctcatggtgattacatgcaaaataacgagagcagcttaatagagcaagctc

SEQ ID NO: 387876 - DNA, 96 bp, Homo sapiens
ccaggtcccggcctccgtaatgagagcccggaaccactctttgtgccgcagcttcgcagaggaatgttacggcatccggagtcatccctcagattt

SEQ ID NO: 387877 - DNA, 83 bp, Homo sapiens
cggctcaaacgctgtgtggacatcggcatgatgaaggagttgtggcaaaggagcagagaactttgacaagttcttcacacgag

SEQ ID NO: 387878 - DNA, 100 bp, Homo sapiens
catctacctccatcaggaccccagatgtctgacagccctgtgtgacaccaagataagtaacgttgctgttgaagaaatctggttgcagaacaccacggat

SEQ ID NO: 387879 - DNA, 100 bp, Homo sapiens
gatgtctgacaaactaaagaaagacttgtgttactaacgtgcctagtgttgggagcctagcagatccagactatctgaacacaccacagatgaacacacc

SEQ ID NO: 387880 - DNA, 100 bp, Homo sapiens
actccattctgcctgggtgacaatgccttggtttcaacactatcggaatggtatatctccatgaataacctaaatgatcccccaaattggaatatccggc

SEQ ID NO: 387881 - DNA, 100 bp, Homo sapiens
gcagctgttcccactggctctgctgaccttgtgccttgccagagactgctgctactttgaaacgtacgatagaggccctgatggacagaggagcaatagt

SEQ ID NO: 387882 - DNA, 82 bp, Homo sapiens
cttcgagtgacccgggtgccgaggagcgggaagagttgctggggactgcctccgggcctgccaggagcagatcgaagccctg

SEQ ID NO: 387883 - DNA, 88 bp, Homo sapiens
gattcaggcgatcgacgccaccgactcttgtatcatgagcattggatttgatcacatggatattgatgatgttaagaagttcaaaccg

SEQ ID NO: 387884 - DNA, 75 bp, Homo sapiens
ccggaccgggccgggcgcccgcagactgggccagtgccattcgcgtcgcagctctggactgcatggaagagaaga

SEQ ID NO: 387885 - DNA, 100 bp, Homo sapiens
cctggagatgaccgactggccctgggacttcttcatcaacctgagtgcggccgactaccccatcagtgacaagttcactagattttgtcagtggaaaaac

SEQ ID NO: 387886 - DNA, 100 bp, Homo sapiens
gcttatttataattttaggatatttgaaagaagatatggaagcagaaaatttgcaatcattgctgaaggtgccaatgggccaacaactccagaagctgac

SEQ ID NO: 387887 - DNA, 98 bp, Homo sapiens
agacatcatgagggccgttaccattacgatccatctccgattcctccattgcatatctgggcctgaactgatatctgaagagagaagtggagacagcg

SEQ ID NO: 387888 - DNA, 95 bp, Homo sapiens
ccgacccggcccggtcaggccccatactcaggtgacccatgggctgagggcatacgatggcttgtctctgcctgaggacatagagaccgtcacag

SEQ ID NO: 387889 - DNA, 100 bp, Homo sapiens
aagcacaacacatataaattgaaaagtcaaataaggaaatgaattacctcccttgacggctctaattttacttgtacatatccatttttaaggcaactgt

SEQ ID NO: 387890 - DNA, 100 bp, Homo sapiens
tagggccttgccccgggagcccgcgagggctgtaggttccatgaggacaggccttgagtctgtcctggtctctggaatcacggtgtctagtagaggccag

SEQ ID NO: 387891 - DNA, 83 bp, Homo sapiens
agaggcccgcccaccagttcgcccgtccccctgccccgttcacaataaaaatggctacaaacttcctagcacatgagaagatc

SEQ ID NO: 387892 - DNA, 100 bp, Homo sapiens
gatgtggagctctccttgcagatcggtgacacagttcacatcctggagatgtacgagggcttcacaggctgctcaagaagccgagatcaatgccagaaaa

SEQ ID NO: 387893 - DNA, 75 bp, Homo sapiens
aaaactgaggaatttgaagtgaccaaaacagcaggagccaaaaacctgtatatcatctccgtgaaggggatcaag

SEQ ID NO: 387894 - DNA, 101 bp, Homo sapiens
gcggggactgttggtctcggccctgcggaagttggcagatgcactacctgaacactcccctgccaaaacctctgctgtgagcaatacaaaacctggccaac

SEQ ID NO: 387895 - DNA, 51 bp, Homo sapiens
ggtgtccagatggacagagttgatcagaatgagtccctggaacgccagatg

SEQ ID NO: 387896 - DNA, 97 bp, Homo sapiens
caaagttcatgtggatcgtctacagtgtgtgctgtatttatggagtttaaagattaatcatcccaaaacattgtttctgcttcggggaaatcatgaa

SEQ ID NO: 387897 - DNA, 98 bp, Homo sapiens
ggatctacactttctcaagcactgtgatcttcaaatgtagaagaacggtcaaggctcaaccggcaaagttcccctgccatgcctcacaaggttgccaa

SEQ ID NO: 387898 - DNA, 80 bp, Homo sapiens
cgttctgcgacttataaaggaccagacaaatcaaattagtggttttggagattacctggggcaattgatgttatcggtca

SEQ ID NO: 387899 - DNA, 100 bp, Homo sapiens
gagtggaggaagcaatacatccagtatgagcgccatggctacttattctgccacatgtgccaacaatagccctgcacagggcatcaacatggccaacagc

SEQ ID NO: 387900 - DNA, 100 bp, Homo sapiens
taatgctgcagtgaacatgggagtacatacatctgtttgaggccccttcatggctgtgctctttgccaaactcgagaacatgctgcagaactccgtctat

SEQ ID NO: 387901 - DNA, 75 bp, Homo sapiens
ttgtcagtgtgatgaagattggcacccagagtctgtagaagaggcgacaccagggcttccaaatgaacaaccgaa

SEQ ID NO: 387902 - DNA, 72 bp, Homo sapiens
tccgggggaggcgccgctggttccggtgtactcggggaaggtaagatctcagagactacagcccggacctac

SEQ ID NO: 387903 - DNA, 90 bp, Homo sapiens
gttgaagcacaatgatccttttgctcctggtggaacagttgttgcagcaagcgattcagccaaaagaatgcaatggtgtaaagattccag

SEQ ID NO: 387904 - DNA, 100 bp, Homo sapiens
agagatgaaccagagcacattagccaaagaatgccctctctcccagctgtctgcgagcctggctgtggtgcacatggaacctgccatgaacccaacaaat

SEQ ID NO: 387905 - DNA, 80 bp, Homo sapiens
gatgagaaattaaggaaagaattttctccttttggatcaattaccagtgctaaggtgtttggaatggaactcgttggctg

SEQ ID NO: 387906 - DNA, 83 bp, Homo sapiens
ctttgacttggtgttgaaagtgaaatgtcatgcctctgaaaatgaaggtctctgaatattgtgtggcgacttactgcgggttt

SEQ ID NO: 387907 - DNA, 75 bp, Homo sapiens
ttaatacagcaagaaagaccatcaagtttaccaatgagattgtggggaacctgggtgaaggcacctttggcaagg

SEQ ID NO: 387908 - DNA, 75 bp, Homo sapiens
gtccagatttttcaacagatttcaattacaaacccccacagaacataccagaagaaaattaggtgcaagtgaagg

SEQ ID NO: 387909 - DNA, 75 bp, Homo sapiens
tggcggcgctggagagggggcgctgagctgttgggggggatatgagactttctactcggaatatcctgagtgttg

SEQ ID NO: 387910 - DNA, 75 bp, Homo sapiens
aaacgggcgtcccggagcctcgatggaggaatgtatcctgtcaggtataatgtcagtgaatggcaagaaagttct

SEQ ID NO: 387911 - DNA, 75 bp, Homo sapiens
gactccccggctcgaagcctggatgaaatagatctctcggctctgagggttgcagatattttattccaaactgcc

SEQ ID NO: 387912 - DNA, 87 bp, Homo sapiens
ggcgcgatggagcagcgaaaacgtggttgtagagttccgtgactcccaggcgcagacggggaagcggagccaacatgccagtggccc

SEQ ID NO: 387913 - DNA, 90 bp, Homo sapiens
gcggagcggcgccgcgtagcttccatccgccagctgccatgagcgagcgcctccgtcccaggtgacgaggccacccagagccaggcggtg

SEQ ID NO: 387914 - DNA, 82 bp, Homo sapiens
tccaacaagatcccccgtctgaggactgacctttttccggcaagcaagctccacatatgcggaacaaactggaaagctgacc

SEQ ID NO: 387915 - DNA, 98 bp, Homo sapiens
tgctgcagaaggctatcagaaaccaggcagaggtgtccaggacctgcctgctcacggttcgtgtcctgcaggcccatcgcctaccctctaaggaccta

SEQ ID NO: 387916 - DNA, 51 bp, Homo sapiens
ctggaggagtcccgctcgaagctagttctccaaggagaggcacatcatgga

SEQ ID NO: 387917 - DNA, 100 bp, Homo sapiens
atctttgagcttggacctcggggaattaggccagcgggagccctaggggcccggaccttgctcctggtgctatgcttacatttgaaaagatttcattgga

SEQ ID NO: 387918 - DNA, 75 bp, Homo sapiens
cacaaagggaccttcctagctctgactgaaccacggagctccgggattgtggagggctgcgggaggtggaggtga

SEQ ID NO: 387919 - DNA, 85 bp, Homo sapiens
gaactggctaaaaatgtcatttacaggcatgaaagaattactgatgtccttgatcaaaaaaattatgtggaagaacttaaccggc

SEQ ID NO: 387920 - DNA, 82 bp, Homo sapiens
ctcgcgcatcaggcatgaagaagaatatctatggcaatatcgaggacctgggaggagatatcaccaaacatgatggaacagg

SEQ ID NO: 387921 - DNA, 75 bp, Homo sapiens
cgctggcagccgcggatctcaccgccgctcagggtgtttgagaagtcccccctgcgggtgaagaacttcgggatc

SEQ ID NO: 387922 - DNA, 50 bp, Homo sapiens
ttgtggatggacttgattctgatgagagcctgaagcaggacattctaaat

SEQ ID NO: 387923 - DNA, 100 bp, Homo sapiens
gtcccgacgtggaactcagcagcggaggctggacgcttgcatggcgcttgaggaaaggagatgtggcattactgaactgtacagccattgtgaataccag

SEQ ID NO: 387924 - DNA, 111 bp, Homo sapiens
acctgggaaggtggtgcttgtcctggctggacgctactccggacgcaaagctgtcatcgtgaagctgtgatgaattccactggtggcagtagcagtggcggtggcattggg

SEQ ID NO: 387925 - DNA, 50 bp, Homo sapiens
acagtgcgcggggagcgttcctacaggtgtcacaacataatgaaagttgc

SEQ ID NO: 387926 - DNA, 100 bp, Homo sapiens
aagtatccagcgctcattgggaatttagttaaggagccagatgaccaggatgccccagatgagcatgagccctctccatcagaagatgccccattatatc

SEQ ID NO: 387927 - DNA, 83 bp, Homo sapiens
ggacctgggctgggaacccgcggtggagcgggacacgaacgtggtccgcgggagagctgtggggcttggtgagtgtttcgtgg

SEQ ID NO: 387928 - DNA, 98 bp, Homo sapiens
gctgaacgtcttgcaacagtggccgcacgcatagatgatctcaatgccacccaccaacactgtgttttggccggttcacaacctcggtttagttccac

SEQ ID NO: 387929 - DNA, 82 bp, Homo sapiens
catggagcccgactcggtgattgaggacaagaccatcgagctcatgcggagctggagtttgttcagatcatcatcatcgtgg

SEQ ID NO: 387930 - DNA, 75 bp, Homo sapiens
gggcctgaagtgagtgagaggcacatgaaggtggtgactctcaaaaggaaataggatcatggcagcagatgatga

SEQ ID NO: 387931 - DNA, 71 bp, Homo sapiens
tttatagctaagactccaggacacccctgaagccgagaaatgtgtaaacaggaacatcgataagtagtgta

SEQ ID NO: 387932 - DNA, 100 bp, Homo sapiens
ccttgtccgggactatggccaccgactcgtgggccctggcggtggacgagcaggaagcggctgtcaagtcgcatattgccaattatatctctgggatcca

SEQ ID NO: 387933 - DNA, 100 bp, Homo sapiens
tgcgcagctggtcatgggccccgcgggcagcgggaagaatgaagctgataggaccttgatatatataactctctacatttctgaatgtctgaagaaactg

SEQ ID NO: 387934 - DNA, 101 bp, Homo sapiens
ttgttggggagaagaggattggaggtgtcagtgttaaaggaacctctacaacgaaggtgaagccacggaagataaggcactctgatggttctaaaacatcc

SEQ ID NO: 387935 - DNA, 75 bp, Homo sapiens
cacgagcagatcctggtcctcgatccgcccacagacctcaaattcaaagcatgcagcagattggaataaatatga

SEQ ID NO: 387936 - DNA, 96 bp, Homo sapiens
agcagcctgcctttccagcccaagcagctttccctcaacagacagctttttctcaacagcccaatggtttattcttcagtccaaggaagcaattca

SEQ ID NO: 387937 - DNA, 83 bp, Homo sapiens
agagcctcgcctttgccgatccgccgcccgtccacacccgccgccagaactgccattggatgtccagaatcccctgtagttga

SEQ ID NO: 387938 - DNA, 100 bp, Homo sapiens
ctcacttccccggggtgtaataatgttaactgagtggcttttcatggcctgccactgaaaatcaagaaagaaccccacagtccatgttcagaaatcagct

SEQ ID NO: 387939 - DNA, 90 bp, Homo sapiens
tgcccttcgaaaaatgatcaactattgaccatataggagagcctgacaaggagctgaatcctaagaagaagatttgggagcagatccagc

SEQ ID NO: 387940 - DNA, 101 bp, Homo sapiens
tagaaaggctcaacgagaacaagctatcagggctgtgctgaagtttgctgctgccactggagccactccaattgctggccgcttcactcctggaaccttca

SEQ ID NO: 387941 - DNA, 88 bp, Homo sapiens
ttcagcctatgtagacagccacaaatgggaagcaagagaaaaagaacattactgtcttgggtgttgcaattaataacacctttctccc

SEQ ID NO: 387942 - DNA, 125 bp, Homo sapiens
gcacgctctatagccaaggaaggcttcgagaagattagcaaaggtgctaatccagtggaaatcaggagaggtcaaggtcagcatctcctcgacgatcaagatctatctctcttcgtagatcaaga

SEQ ID NO: 387943 - DNA, 75 bp, Homo sapiens
gatccagtgtgtgggagcaggaccagcagccggagcggttgcagggcacacattactcggtgcagtcggacatct

SEQ ID NO: 387944 - DNA, 100 bp, Homo sapiens
gaagataaaattggaaaagtgttgcccgttatgcatgagagtcaccatgctcaaagtgaatatattaagtattcagaggatatgaagcacaagaccactc

SEQ ID NO: 387945 - DNA, 74 bp, Homo sapiens
ggaatagtctacaaaggaagacttgtaacctggagaagagacaggtgatttggcttctgcacagttaggaggag

SEQ ID NO: 387946 - DNA, 100 bp, Homo sapiens
cgtcccctccagtccgctccgggcaggttgctgtgctgcttatggatacccagggtgcctttgatagccagtcaactatcaaagactgtgcaacggtgtt

SEQ ID NO: 387947 - DNA, 90 bp, Homo sapiens
ctcagcgccaaggaggacgccagcaaagaagacgtcatcttcttctaaaagggccgtgactcaagggctggccctggccttccacgacgg

SEQ ID NO: 387948 - DNA, 74 bp, Homo sapiens
tccagaatgtcagcatggaggctgctgggcaggtcatgagtcaccatgttttctgactcagaatgtgccaaaaa

SEQ ID NO: 387949 - DNA, 75 bp, Homo sapiens
atcaccctgcggaacctggaggaggtggagttctgtgtggaaggaatactcccccagttgcaagaggcgcaggac

SEQ ID NO: 387950 - DNA, 82 bp, Homo sapiens
gaggagcgcctgcctgaggagagcaggtgcactacatcctccaggaggtggtgatgggtgggatggtgttggaaacaaacat

SEQ ID NO: 387951 - DNA, 50 bp, Homo sapiens
ccagtatgcatctcaagatgtgaactctcagaaattgagcccaatgtatt

SEQ ID NO: 387952 - DNA, 82 bp, Homo sapiens
ctctccttttccctctccctttccctaaggccgccatggcatcagatgaaggcaaactttttgttggagggctgagttttga

SEQ ID NO: 387953 - DNA, 100 bp, Homo sapiens
cctccgcctcccaggtccaagcgattctcctgcctcagcctcctgagtagctggcattacaggtaaattcaactggaagggaactattaaagcaattctg

SEQ ID NO: 387954 - DNA, 83 bp, Homo sapiens
tcatcgaaggctaccgggcccagcacagccagcaccgcacgccctgcaagggagtcctcctgcatatgcccaagaggattggg

SEQ ID NO: 387955 - DNA, 80 bp, Homo sapiens
cagcacgagagccgcacctttgccgtgtacctcaatagcactggctaccggacaggtgctacaggctctgcagtgaaatc

SEQ ID NO: 387956 - DNA, 82 bp, Homo sapiens
gttgtcgtggccggagcggcccgcgcctgggctgccggcacttcgcggcagccggaaaactcaaatatatgtgaggtgtgca

SEQ ID NO: 387957 - DNA, 102 bp, Homo sapiens
aggtgcctgaccagaaaggaactcccaagcgactgcaggcagaagctgagacggctaagaggcgtagaggctccggtgttttttgtgccaattgcctgacca

SEQ ID NO: 387958 - DNA, 83 bp, Homo sapiens
cggacagcgggctggagcctgacgagctggcgggctactgcagcactggggtgtcagttgttggtccgacccagaacgcttca

SEQ ID NO: 387959 - DNA, 73 bp, Homo sapiens
ccgaaacgccgaatataatcccaagttatggctgcagcttcgattgccaatattgtaaaaagttctcttggtc

SEQ ID NO: 387960 - DNA, 100 bp, Homo sapiens
atgaaaagcatgcccatacgattaaacctgcgacatcggcagaaactagatgatcagaccaagcccgggagcttgtccttttccgagcggctcagtgaac

SEQ ID NO: 387961 - DNA, 82 bp, Homo sapiens
agccggcagcccagcactccgggggatatgagactttctactcggaatatcctgagtgttgcgtggatgtaaaacccatttc

SEQ ID NO: 387962 - DNA, 75 bp, Homo sapiens
tgacttcggccttgcccgcatctatagtttccagatggctctaacctcagtgatgggcttaggtcacgagcaagg

SEQ ID NO: 387963 - DNA, 121 bp, Homo sapiens
cgcatagccctatttggaggctctcaaccacagtcttgtagatattttaacccaaaggatggcagtcagtcaaaattaggaggagagacagtggacatggactgtacattggttagtgaaa

SEQ ID NO: 387964 - DNA, 75 bp, Homo sapiens
tcaaggataagggtgacagcaacagctcggcgggctggaagaaaaggcgacggcggattgacagaagtatgattg

SEQ ID NO: 387965 - DNA, 74 bp, Homo sapiens
tgacgccttagataacagccatcctattgaaattcatgatgttgctatcaaaagttgagaaattgtcagaagaa

SEQ ID NO: 387966 - DNA, 51 bp, Homo sapiens
gaatttccatgtcaacatagtcctggtcatcatcagatttgaaatatttaa

SEQ ID NO: 387967 - DNA, 74 bp, Homo sapiens
cagatgcgggccctgctggaccagctcatgggcacggctcgggacgctttcccatggtttggcatggacattgg

SEQ ID NO: 387968 - DNA, 80 bp, Homo sapiens
catggggaaaatctccccggtgactttcaggagcacgtgaattgcctctgcttacgttcaggccctgtcctaaacccagc

SEQ ID NO: 387969 - DNA, 95 bp, Homo sapiens
tcgaggttgcaggactctttctgttcaggccagaccctctgggagcttctcagccattttccacagatcagaggtggggctggtgtccgagcact

SEQ ID NO: 387970 - DNA, 51 bp, Homo sapiens
aggctgaggcgggcggatcacctgaggctggtctcgaactcccaacctcag

SEQ ID NO: 387971 - DNA, 75 bp, Homo sapiens
agaaccaacgaggtggccgaatcttccttcaggatatcaagattgtttgggatgaaaagaaaaaccagtgggtga

SEQ ID NO: 387972 - DNA, 100 bp, Homo sapiens
atttcgaggaggaacccacatcccccataggtcactgtgtggccatctaccactttgaagtgggaggatacccttgacaaatactgtgaccgggagtatg

SEQ ID NO: 387973 - DNA, 100 bp, Homo sapiens
agcataaagacttgttgggtaaaagatacattgaactcttcaggagcacagcagctgaagttcagcagggaaatgatcttcattggttagcatgtgcctt

SEQ ID NO: 387974 - DNA, 87 bp, Homo sapiens
tttgttcaccgccaaccccttcgagcaagacgtgggtaaagtcagtgataaatcttttgtttgctgcatatactggagatgtgtctg

SEQ ID NO: 387975 - DNA, 83 bp, Homo sapiens
cccgcgccggaccctgaggcagcgatatctggcaccaattctgacccagtcatttgtgatccctggctcttgtgatatgctga

SEQ ID NO: 387976 - DNA, 96 bp, Homo sapiens
ggatgaagaggtcgcgccccccaagcctcctctgcctggcattcgggtggttgataataggagccccatggcacctgcccagccccacctcagccc

SEQ ID NO: 387977 - DNA, 83 bp, Homo sapiens
aagctggtggaacagctacgcatagaagccgggattgagcgcatcaaggcctccaggcccaaggtcagcatcccactgtcagc

SEQ ID NO: 387978 - DNA, 75 bp, Homo sapiens
atgtgacacaaggaaagtattctacaggtacttgatgaagaagcagaagtttttatagtcaaaatgtggagatta

SEQ ID NO: 387979 - DNA, 75 bp, Homo sapiens
gctggagagggggcgctgagctgttgggattctgaagactactttgaggtcaacattccaacagacctacgagca

SEQ ID NO: 387980 - DNA, 124 bp, Homo sapiens
agatgcctttatcgcatttgccaatctcctgaataagccatgccagttggccttttttcgtgtggatcacagcatgttatttcaagtaccattggaagaggaaggacaacgtggtggacctatc

SEQ ID NO: 387981 - DNA, 100 bp, Homo sapiens
agagccacacacaccatcatggtcctgaggatctcccacagctgggagatttagccgtgtctgaggttggctgggatggcctcagactcaactggaccgc

SEQ ID NO: 387982 - DNA, 100 bp, Homo sapiens
tctatggagacgcagactacttggaagagaggcaccgccaccgatttgagggcagcaggatgggtgtggaagcagtgatggcacttttggaggggacccc

SEQ ID NO: 387983 - DNA, 75 bp, Homo sapiens
ctgggatccagcccttctggtgtcacctcccagggtgactcaactccagcatgcttttcacttccactgcatctc

SEQ ID NO: 387984 - DNA, 96 bp, Homo sapiens
taccggccgtggaagcggccaccgactactgtcagcagctgtgccagcagggagaaggttttaaggtgaaaacgaagaaagaaatccggcatgtgg

SEQ ID NO: 387985 - DNA, 100 bp, Homo sapiens
aggcaatgctggatagataccgaattcttatcacaaaggttgcttgggttacaagatctggcaaaaccgagctggcagaaccaattgccattcgtcctac

SEQ ID NO: 387986 - DNA, 98 bp, Homo sapiens
agaccctcgagctgggcctggagcctggtaaccaaggagcagtgaacagcagctactacagtagtggaagccgtgcatctatgggcgtgaacggaatg

SEQ ID NO: 387987 - DNA, 101 bp, Homo sapiens
aggccctatcaggacatggagtatgaaagacggaacacgatgaacctattctgaagcacttgaaagatattaaagtgaagttctcagatgctggccagcct

SEQ ID NO: 387988 - DNA, 101 bp, Homo sapiens
gagggacccacagggctgaaggaagctgccttgtacccacatctcccgccagaataccaggagcgatatggttctcgccccgtctgggctgactaccgccg

SEQ ID NO: 387989 - DNA, 83 bp, Homo sapiens
gtggccggagccgtgtggaccaggaggagcgcttccaaaagaaactcttccttcaaaacctgtgaagaaagagaaggaacaga

SEQ ID NO: 387990 - DNA, 80 bp, Homo sapiens
gacgtgttctccaaataccagctcgacaaagatggggttgtcctctttaagaagatatggctcgtggacagcagaaaatt

SEQ ID NO: 387991 - DNA, 51 bp, Homo sapiens
gtgaggcctccccagccatgtggaattgtaccagacgtgctccaacaatgg

SEQ ID NO: 387992 - DNA, 50 bp, Homo sapiens
gagggaagagacaggaagatggtgcccagatgctcctggagaggtggtac

SEQ ID NO: 387993 - DNA, 100 bp, Homo sapiens
tttcttcggtagctaccgaaacgctctgaaaatcgagccgtgttcacttggcaagaagagtgcttcaattagaaaaacaaaactcgctgattttaaaaga

SEQ ID NO: 387994 - DNA, 75 bp, Homo sapiens
ggatcccagcctcaggcgtgcgcggacggtgtgcggagagccaagactaagttacctcaagactatgtattcctc

SEQ ID NO: 387995 - DNA, 97 bp, Homo sapiens
gaacaggggcagaaaatagcacacttttactctacgcaactgttgctttttcatgaggtgtgctctgaacaagccgagacggggccgtgccgagcaa

SEQ ID NO: 387996 - DNA, 100 bp, Homo sapiens
gacacttctggatgtttcacagccaggcagtttatgatattaacagactagactccacaggctatgtatgtcaaaaaggatgttcctttgtggcaaaaac

SEQ ID NO: 387997 - DNA, 88 bp, Homo sapiens
ttcttccacttcctcagaatgtgaaggattatttactcgatgatggaactctggtggtttcaggaagatcagggagcagagaaacatg

SEQ ID NO: 387998 - DNA, 51 bp, Homo sapiens
aagaagaactcgcaaaagctcagagggtggctttttctcaagtatattttc

SEQ ID NO: 387999 - DNA, 75 bp, Homo sapiens
aacagatgagggaagccatttttctgcaatggaattaaatggccaagtgtgatgaatgcagactctgctaccatt

SEQ ID NO: 388000 - DNA, 100 bp, Homo sapiens
ctcagtccgaccgggctagctttggcgaggggacggagccggatcaggagccgccgccgccatatcaggccatggttgcttgttatccgggcaatggaac

SEQ ID NO: 388001 - DNA, 74 bp, Homo sapiens
tgatgttggagaactacagaaacctggtctccctaggtcacggtctagatcacattctcgatccagaggaaggc

SEQ ID NO: 388002 - DNA, 50 bp, Homo sapiens
ggaaccctggtcaccgtctcctcaggattatatgcgtcaggcaggagaag

SEQ ID NO: 388003 - DNA, 82 bp, Homo sapiens
caccgaggacatggacctgtacagcatcaactacctgcactttggggagcctaagtcctgtgcagggctcgcggcctggcaa

SEQ ID NO: 388004 - DNA, 82 bp, Homo sapiens
ctgagtggttgtgtggtcgcgtctcggaaaccggtagcgcttgcagcatgagagcgcctgctcgctgtgcccccgggttatg

SEQ ID NO: 388005 - DNA, 98 bp, Homo sapiens
ggacatcaagcccatgcgggaccagatcatccgcgtgaagcggtttatcatttaaaagtgcctgtgtgaagtcacttttgctggaaaactgcagcttg

SEQ ID NO: 388006 - DNA, 83 bp, Homo sapiens
gggaacccttgccgctgctgtcctgcgaccccaagcagggggaaatttgcagtggtgagaaaatgtataaagaaagattctgg

SEQ ID NO: 388007 - DNA, 50 bp, Homo sapiens
gttgcagtgttggagctaaaaggctgaggggatctggcggtggagcgcta

SEQ ID NO: 388008 - DNA, 75 bp, Homo sapiens
gaaaaatcctggatctgtatgctttgagcaagggagtgcatccgccccaacccttttccccctcgtctcctgtga

SEQ ID NO: 388009 - DNA, 87 bp, Homo sapiens
aagaccaaagaggatgagaaggacgacaagcccatccgaggtgctggagaatctggtaaaagcaccattgtgaagcagatgaggatc

SEQ ID NO: 388010 - DNA, 90 bp, Homo sapiens
gatggacaagagacgatcattctgcaagcaggcaacctgaatacaggttacaagcctgatgaagggaaacgaggggatgcctgtgaaggt

SEQ ID NO: 388011 - DNA, 51 bp, Homo sapiens
cggccctgggcgggcgccgcgagccggtttgcctgagaatacagatcaacc

SEQ ID NO: 388012 - DNA, 92 bp, Homo sapiens
acactagtcgcgggagccacgcagaggacgccggaacaccctggaagccgagaaatgacaatgcagatcttcgtgaagactctgactggtaa

SEQ ID NO: 388013 - DNA, 100 bp, Homo sapiens
ctggatcatggctgccgcgccgccgctacgggaccgcctgagctttctacaccggggccatgtgtccttcaagcccagcttagaccaacagcgttcatgc

SEQ ID NO: 388014 - DNA, 100 bp, Homo sapiens
gtattgacaaaaggaccattgagaagttcgagaaggaggcggctgagaaaaagcttgtggtgaaggggggcaaaaaaaagaagcaagttctgaagttcac

SEQ ID NO: 388015 - DNA, 109 bp, Homo sapiens
aaggcagccacagtgaaatcagacatctacagcttttctatgatcatgcaggagattttaacaggtgaaggtaggcaatgaagttgctacaggaacaggacctaataaa

SEQ ID NO: 388016 - DNA, 73 bp, Homo sapiens
ctgttgcagccatggtgcattgcagttgcgtgttgttcagaaagatgcctttgagtaatggacagatgggcca

SEQ ID NO: 388017 - DNA, 82 bp, Homo sapiens
caaggggcttacgcagaaggacctggccacgaattccagaagattgccatggcaacagcaataggatttgctataatgggat

SEQ ID NO: 388018 - DNA, 82 bp, Homo sapiens
ttgagtcatttccttcgtacccacagtgcttcatgagaggccccacatcaagaccatcttccaaggcattgctgcaaaagtg

SEQ ID NO: 388019 - DNA, 100 bp, Homo sapiens
gtattggacaatttgtagctaagactcccggataccctgaagtcgggaaatgacacgatgaggcgagtggtacgacagagcaagtttcggcatgtatttg

SEQ ID NO: 388020 - DNA, 99 bp, Homo sapiens
tcagaaggagctggcggacatcactttagaccctccacctaattgcagggtatttgaagtataccatacaactgttttgaaaatccagcgtggacaatg

SEQ ID NO: 388021 - DNA, 100 bp, Homo sapiens
cgggcgtctccgccggctactgccgcttcagttctcccggtgtggccacgagtcgggtattggctataaaactgccaaatgtcttgaagcactgggtatc

SEQ ID NO: 388022 - DNA, 100 bp, Homo sapiens
gagagcgcgaatatcgtcatcgttagaaggactggggttttaaggggtgtggcaggaggttttggactcgatgagtttccaccgaaatgtcggagaagtc

SEQ ID NO: 388023 - DNA, 78 bp, Homo sapiens
cagcaccacctccagcccctgcgcctcgatatgtacgaccaagtgctgaagtttggtgcttacattgtggatggcttg

SEQ ID NO: 388024 - DNA, 100 bp, Homo sapiens
aggcagagcgggacagccaggaggaagggcagcttggcagagcctcaggctcttgtcaggatggtgaagctgttcatcggaaacctgccccgggaggcta

SEQ ID NO: 388025 - DNA, 101 bp, Homo sapiens
agcaagaaacccctgcagtacttgaagatttgcataaagccaacattcgcaccgtcatggtcacagggggtgaatctctacattaagaacttggatgacac

SEQ ID NO: 388026 - DNA, 152 bp, Homo sapiens
ctgggaatctcaccggacggagggaaagcactgagaacaggaagctgcttcacccgagagttccttggtgccctttccctggaaaggcagctcatcatgcagagtgaaatgagggaaagacaaatggccatgcagattgcgtggtctcggga

SEQ ID NO: 388027 - DNA, 90 bp, Homo sapiens
caagagattcagtatcactcgctcccttgatgatcttgaggaagagcccgatgcccttggtttgactctactaagagcccctcagttgct

SEQ ID NO: 388028 - DNA, 93 bp, Homo sapiens
gtaggccgtctcgctctgggtctccaggcccgcgaccgtccgccagtcgtcccgaggtgcccgtggttgacacgagctgtgtccccagctgtt

SEQ ID NO: 388029 - DNA, 75 bp, Homo sapiens
tttggcctaccctccaaagaaaagaagctgagtatctatggtgacttggagtttatgaatgaacaaaagctaaac

SEQ ID NO: 388030 - DNA, 100 bp, Homo sapiens
ctgtgagcaggtgaacactgaccccaatgggggcaagattcttgccaagagaattaatgtgcgtattgagcacattaagcactctaagagccgagatagc

SEQ ID NO: 388031 - DNA, 100 bp, Homo sapiens
ccaggccttggtggaacatgtcaaggaggagtgtgaccgcctgggccctggcatggccgacataatgatgaggagtctgatgaggaagctgtgaagaaaa

SEQ ID NO: 388032 - DNA, 95 bp, Homo sapiens
aagttcaagtttactgcgaagtccacccagcgttccggaggggagccttctcggtggtgcgaaggtgtgtgaaggtgctggctggccaggagtat

SEQ ID NO: 388033 - DNA, 97 bp, Homo sapiens
taatgctcctatgttaccgccacctaaaaacaaagaggattttgagaaggttggcgtgcagtggtgtgatctcagctcattgcaacctctgcctccc

SEQ ID NO: 388034 - DNA, 74 bp, Homo sapiens
cgggagcttccgggagggcggctcgcagatcctgtgcttgatgctggaatacaacatcatcgacaacaacgaca

SEQ ID NO: 388035 - DNA, 100 bp, Homo sapiens
gtaacatacagcactttgtggagaaagtcgtcttccacttgcacgaaagctttcctaggccaaaaagaggattcaattactggacttgtcaactctgcca

SEQ ID NO: 388036 - DNA, 95 bp, Homo sapiens
gtactcagcccacatgcccgctcacctgcgctgtgatgcctgcagagctgtggcttaccaggccctgggctgcatcttgtacctgctgtgcttcc

SEQ ID NO: 388037 - DNA, 92 bp, Homo sapiens
ggagccgctgctcgagctgctgctggattgaactcagagaagccggggtgctggagaatctggtaaaagcaccattgtgaagcagatgagga

SEQ ID NO: 388038 - DNA, 74 bp, Homo sapiens
tggctgaagatggctactctggagttgaggtgctagtaattgagcctcaaaatgaagatggcacatggcccagg

SEQ ID NO: 388039 - DNA, 50 bp, Homo sapiens
ggaacgcagctgaaagcgtgaactgtaccctacagcttggggcctgggct

SEQ ID NO: 388040 - DNA, 100 bp, Homo sapiens
tttacagagaaatttggattttcttcccaggcagcaagtgcaattaacagttgtggacatcggatacccaaggagacgaagctgaagcaggagaaggagg

SEQ ID NO: 388041 - DNA, 49 bp, Homo sapiens
ctccggccgccggcgacgcggggaatgtatcctgtcaggtataatgtca

SEQ ID NO: 388042 - DNA, 90 bp, Homo sapiens
gagaaataaggacaaaagccaagaggaggacagttcgctacacagcaatgcatcgaggacagagcgggatgccaccagcttgtccaaagg

SEQ ID NO: 388043 - DNA, 90 bp, Homo sapiens
gagaagccttttccgttgccggtgccggcctagcgtcctggaattacttcaatcaagctcctggctggtgccccccgggagctcgctgtg

SEQ ID NO: 388044 - DNA, 100 bp, Homo sapiens
agcgagtgcagtgacagaggcagtgaaagctcagagtcgagagaaagaacttatgggtttcagcaaatcggtaaatgaagcacgttcaaagatggatgta

SEQ ID NO: 388045 - DNA, 100 bp, Homo sapiens
tcacaggtccagggcagaggaccaacatgggcattttgtttatgagcaagttctgatacaacaccccttttaaatggatcaagccaagacagaatgtttg

SEQ ID NO: 388046 - DNA, 82 bp, Homo sapiens
ctgggctgggatccggagcaagcgggcgagggcagcgccctaagcaggtgtttcccattaaacactaccaggacaaaatcag

SEQ ID NO: 388047 - DNA, 101 bp, Homo sapiens
cagtgaaatcagacatctacagcttttctatgatcatgcaggagattttaacaggccaagaagcttgagagaagaaaaatttcagaaaaattgtctcaatt

SEQ ID NO: 388048 - DNA, 89 bp, Homo sapiens
taacactccggattcctgagttccaggaaaaccttcccagagaaagggactggacctacagagacatctgggattttctgcgtcagctg

SEQ ID NO: 388049 - DNA, 100 bp, Homo sapiens
caaggtttgaaaagcagctggcctgcaaggtgaggaaaatagcagctgaatactatgacaacctccctcactacaattcctggataaaagtactgtatga

SEQ ID NO: 388050 - DNA, 82 bp, Homo sapiens
ggacagtggagtctggcatcttattgaaccagacgtcctgggtcctctccagcatggcagccctctactggagggtgaaagg

SEQ ID NO: 388051 - DNA, 75 bp, Homo sapiens
ggagattgctataagctgctttcatgtcgatactgcaagcaacttgaactctggtaaagaggaccactccgaaag

SEQ ID NO: 388052 - DNA, 50 bp, Homo sapiens
ggagacctgggtgccttcagcagagagagattaacaagcggatcacagag

SEQ ID NO: 388053 - DNA, 144 bp, Homo sapiens
agaacaagttcagcccaagaaaaaggagggaaaaatatccagcaaaaccgctgctaaattgtcaactagtgctaaaagtgctggtcccaaaggcgataacatctatgaatggagatcaaccattctagggcctccaggatccgt

SEQ ID NO: 388054 - DNA, 82 bp, Homo sapiens
ccagaaggagcgaactgaagaggttctacacaattgctgggacgatgccggagtgtgaaggagtttgagaagctgaaccgca

SEQ ID NO: 388055 - DNA, 75 bp, Homo sapiens
aagagaggcatcctccttgaagtatttggctgaggagttttcaatcccaccctgggcgctgcctatggcacagcc

SEQ ID NO: 388056 - DNA, 100 bp, Homo sapiens
ggcacgtttgtcaagctattgactgatcctttgaaatactccagccatgactaaaagagaagcagaggagctgatagaaattgagattgatggaacagag

SEQ ID NO: 388057 - DNA, 75 bp, Homo sapiens
cacgaggcggcgggctggagacatggaccgcggcgagcaaggtcatatgcaaacacagagctctccttttgctcg

SEQ ID NO: 388058 - DNA, 100 bp, Homo sapiens
caggtattggcgatccatagctaagacgccaggtcccccggaaacctagaaatgggccaattcctgtccccccagcagcatggcatcgtgtgctgaaccc

SEQ ID NO: 388059 - DNA, 73 bp, Homo sapiens
tcgaaaatctctgcccctggaggagaaatagaaggtgctggagaatctggtaaaagcaccattgtgaagcaga

SEQ ID NO: 388060 - DNA, 100 bp, Homo sapiens
agtgtatcaaagtgtggactgaggaaggcgcaatggcgaggaagttatctgtaatcttgatcctgacctttgccctctctgtcacaaatccccttcatga

SEQ ID NO: 388061 - DNA, 98 bp, Homo sapiens
gctaggcgcgccgtccccagccccgccgccggccctcggtgcgcccggccgcctgcacccccaggctgaaggggatgctaagggagataaagcaaagg

SEQ ID NO: 388062 - DNA, 96 bp, Homo sapiens
tacgccgcgcggcgcggacggcgcgtgcgttaatttggagtggcccctggagtcagtttcctacaccatccgaggccccacccagcacgagctaca

SEQ ID NO: 388063 - DNA, 75 bp, Homo sapiens
ggcgcaggttcgcaagcgcataacccaggtcagcttatttcggatcaagtggcagaaatcgtatctaaatacgac

SEQ ID NO: 388064 - DNA, 123 bp, Homo sapiens
ctgctgtgctgagggccgtcctgaaaggccagagcatcttcttcactgggagtgcagctttggagtttaacccttctgccaatccagaggcaagcacaatattccagaggaactctcaaacag

SEQ ID NO: 388065 - DNA, 51 bp, Homo sapiens
cagaaattctggaacacctatatgagaggccatttcaatcgaatatctcat

SEQ ID NO: 388066 - DNA, 74 bp, Homo sapiens
agaggcttcgcatttgtgcagctgtcctctgcaatgcgtgtgaaggcaaagaagaatgctgctccattcagaag

SEQ ID NO: 388067 - DNA, 100 bp, Homo sapiens
cgaggtccgtgtggccaacgagctcaacgccaggcgccgctcctttacaggagaggcagatgcgaaccagaacaatgggacctcctctcaggacacagcg

SEQ ID NO: 388068 - DNA, 90 bp, Homo sapiens
cagggcctgattgaggactgccagctggcgctgcaggagatctgcccaaggagaatccatatgaggatgtggacttaaagagccgaagag

SEQ ID NO: 388069 - DNA, 49 bp, Homo sapiens
ccaaaattgtggaaaagtcactctggaagggaaaaggccgaggcatcag

SEQ ID NO: 388070 - DNA, 75 bp, Homo sapiens
gaacaaccgttgtttaatggaagatttcgatcagttaggggattggccaggagcacttcttcaagaagatcgagg

SEQ ID NO: 388071 - DNA, 74 bp, Homo sapiens
aatgagaagagggtgctggagaagtggatcaacctgaagtgagcaggggtgagcgcagccactgcccaacgcaa

SEQ ID NO: 388072 - DNA, 90 bp, Homo sapiens
cactgtttcttggatcgctgcaaccatctccgccagaacgacaaagaggaggttaaagatcgaggtccggaagccactaggagatttttt

SEQ ID NO: 388073 - DNA, 75 bp, Homo sapiens
ccgcccagcagcacaacacagggaagcttggggagctttatcttcaagccaggatgaagggagactgggcaagac

SEQ ID NO: 388074 - DNA, 97 bp, Homo sapiens
cttggagattttccctgtggatctgcagaagaaagctggccggggcctgggcctgagcatcgttgggaaacggatgaaaactttcggaagagaaagt

SEQ ID NO: 388075 - DNA, 98 bp, Homo sapiens
cccggctggaccacacctggacagtcagtttcttttcaaaggaattgaatgatctggcacgggaccctccagcacagtgttcagcaggtcctgttgga

SEQ ID NO: 388076 - DNA, 90 bp, Homo sapiens
tttacttcatcctccaaggagttcaatcacttggcgtgacttcactacttttaagcaaaagaatccagacatttaatgtggatgcaccat

SEQ ID NO: 388077 - DNA, 75 bp, Homo sapiens
agcaacattttgacttggcttcaactactattacaaatattccaatgaagagacaggctcttgccatgttgcccg

SEQ ID NO: 388078 - DNA, 89 bp, Homo sapiens
atgattttgaagttattggaagataaaaatggagaggtacagaatttagctgtcaaatggcagtatttggcagtcgtattcagagataa

SEQ ID NO: 388079 - DNA, 90 bp, Homo sapiens
agaggatgcagtggaggccatcaggggccttgacaacacagagtttcaagactataatgtaactgcaaactccaagctggtcattatcac

SEQ ID NO: 388080 - DNA, 58 bp, Homo sapiens
gaccctgaggaagatgacgagtaactcccctcagggatacgacacatgcccatgatga

SEQ ID NO: 388081 - DNA, 100 bp, Homo sapiens
gaaaatgtcactgtcccattggccatattttagatgatacttgttgatgccactgttatcatcctcctagcagaagatagtcctactgagaaaatgagca

SEQ ID NO: 388082 - DNA, 99 bp, Homo sapiens
caccccccgccgacaaggaggagctggctttatgtgctggggcagaagagatccgatagctatgttctgctggagcattctgtgaagaaggcagtacat

SEQ ID NO: 388083 - DNA, 74 bp, Homo sapiens
gcccgggcctcccgctcctccgtacagtacgagtatgcgttgagacatttgtacgtgctggtcaacctttgtga

SEQ ID NO: 388084 - DNA, 82 bp, Homo sapiens
gcccgcccaccagttcgcccgtccccctgccccgttcacaatcatgacccatctgcctggcaccagcacctggggctgccag

SEQ ID NO: 388085 - DNA, 100 bp, Homo sapiens
tatcaaacggcaagatgtccagtaatgtcccggcggatatgcgttccaatccacatgctgcctatcccaaccctggaccaagcacatcacagccgcagag

SEQ ID NO: 388086 - DNA, 75 bp, Homo sapiens
aagtcaaaagcttcccaccacatttacccatattcttcctcacaagacgatggtggtcgagatatccagtctgac

SEQ ID NO: 388087 - DNA, 74 bp, Homo sapiens
tgcaagcagcagctcaaatccaagctctcctggaagaataaaggggagcatgttggcagataaattgaacatga

SEQ ID NO: 388088 - DNA, 75 bp, Homo sapiens
gcaacacagccttgtcccgggagcttaagacagtggagatgcaccctgcctacaccgaggaagagctgaggcgct

SEQ ID NO: 388089 - DNA, 100 bp, Homo sapiens
ccccatgttacccgccagagtcaggaggaccaacacaggagaaggaggaagaggagggcatctcgcaggagtcctcggaggaggagcagtgacccatgcg

SEQ ID NO: 388090 - DNA, 89 bp, Homo sapiens
cgtacttctgattttgaaacacctgggtctgggcttcccgggcgagcggtggaacatacatatgatagttgagaaagacacatattctg

SEQ ID NO: 388091 - DNA, 76 bp, Homo sapiens
ggccctctattgccaactgttaagggttcaactagatatagcttcacaatctctggatcaagaaattttattaaaa

SEQ ID NO: 388092 - DNA, 80 bp, Homo sapiens
taccaacgccatcaccgacctcatcagtgagctgtccctgctggaggagcgcttccgggaaacactgcgctaacttatgc

SEQ ID NO: 388093 - DNA, 86 bp, Homo sapiens
ttattaggactggctgataacgaagcagctattgtccagaaactgctctttgagcgcgggaaggaggccctggagtccgaatttcg

SEQ ID NO: 388094 - DNA, 82 bp, Homo sapiens
tgtcttgatgatgagaatgagtttcctcctgttcctaggagaatgttaacagtccagacctttttcactacatcaaccacgg

SEQ ID NO: 388095 - DNA, 97 bp, Homo sapiens
aaaagatcaatagattgcctacccccattgcaggactgtactatactggcaattgctggagaagattttgcaattgttgcttctgatactcgattga

SEQ ID NO: 388096 - DNA, 115 bp, Homo sapiens
gggatcgtgagctccggcccgggcgagcgggtgcgtctgccgcagagtcggcacctgaaggacatggaggaagtggacgttgtggtagcaccatgccaaggcctccggcccacag

SEQ ID NO: 388097 - DNA, 80 bp, Homo sapiens
gaaccgtaaaagccccaatcttagcaagtgcggggaagagctgggtcgactcaagagaggagctctaaattgggaagtaa

SEQ ID NO: 388098 - DNA, 101 bp, Homo sapiens
tcagggctcgttcccaagtctctttccagaggccaggctttatgggagcatgggttaccagcgacgcaccctacttggagctgatgtctgtgctgtcctcc

SEQ ID NO: 388099 - DNA, 100 bp, Homo sapiens
tctctggacaagatgaccacactccaggaatgccagtgcatcttttgcacagctattgcaacacctgctcggtataccgtgactttgggaggaacatctg

SEQ ID NO: 388100 - DNA, 100 bp, Homo sapiens
ctacagttcatcaacatcaactacgtccctctgaagaccagttcaaggagctgatcctcacactgtgcgatctcatccgccgaggccagctcacagcccc

SEQ ID NO: 388101 - DNA, 50 bp, Homo sapiens
gcggcgttggaggccaccgtttccaggatgactcactggttgtgtggaag

SEQ ID NO: 388102 - DNA, 101 bp, Homo sapiens
tggtgtttgaatattgtgaccacacagttctccatgagttggacagataccaaagaggggggaaatttgcagtggtgagaaaatgtataaagaaagattct

SEQ ID NO: 388103 - DNA, 98 bp, Homo sapiens
acccacctgagaagtccatccccatctgtaccctgaagaacttccctaatgccatcgagcacaccctgcagatatgttgggaaaacggattcgataac

SEQ ID NO: 388104 - DNA, 100 bp, Homo sapiens
cagaggtgccgacatggggcttaagatgtcctgcctgaaaggtgtttcccattaaacactaccaggacaaaatcaggccttacatccagctgccatcgca

SEQ ID NO: 388105 - DNA, 75 bp, Homo sapiens
gggacagccccaggatgccgtgggccgcagccactcaggactgtcaaaggtttacccaaggtccagcctagcccc

SEQ ID NO: 388106 - DNA, 74 bp, Homo sapiens
ggtgctggccatcatgctgcagagtggccgggctgagtactaccagtgaacgtcaaggtcgtgggaaataaaag

SEQ ID NO: 388107 - DNA, 75 bp, Homo sapiens
atcccacgccattttcacgatccactacacgcaggcctaccccttgctcaggttcaagaagacagtgaagaggct

SEQ ID NO: 388108 - DNA, 82 bp, Homo sapiens
cccacaacacgctgttcggctactcggtcgtgctgcacagccacggggcgaaccgatgcagccattgtttgatgtcctgtga

SEQ ID NO: 388109 - DNA, 141 bp, Homo sapiens
tggcttccgagccgcactcgccgatcctccaggcatgccccgctacgagctggctttaatcctgaaagccatgcagcggttcaaggagcagggacaagttacaggaatgttctccaagcagcaatccaaaagagtctcaag

SEQ ID NO: 388110 - DNA, 74 bp, Homo sapiens
caggacatcccggaagctgggaaatggttgactatagtcaatggggccaatggagccaagtgtatggaaaccca

SEQ ID NO: 388111 - DNA, 83 bp, Homo sapiens
gtaaagtcatcacctcctgggatcagatgtgcattgagttcaattttgtggggaaattgcttggaccaagaggaaactccttg

SEQ ID NO: 388112 - DNA, 95 bp, Homo sapiens
agctccactgttcagatgcaaagtgctacagcctgctgtcgaggccttctttctggtccatgccacagagcgggagagcaagcctcctgtccgag

SEQ ID NO: 388113 - DNA, 90 bp, Homo sapiens
cgttctgagacatacaaatacacaatgacagatttcctcaaggaccaccatctcagatgggttcacctatggggagtagaacaggttctg

SEQ ID NO: 388114 - DNA, 96 bp, Homo sapiens
gaggcctccccagccatgcagaacttgaatgagagccacaagtctgaatttatagagctgaggaagtggctgaaagctaggaagtttcaagattca

SEQ ID NO: 388115 - DNA, 107 bp, Homo sapiens
gtttccagggggatgttgacgaagatcttatctgccctatttgcagtggagtcttggaggagccagtacagcacttggctgctgttgaggaaaggaagatcaaatct

SEQ ID NO: 388116 - DNA, 104 bp, Homo sapiens
agagcgcggccctcaggagcaaggcgcactattcctgatcagagaactccagttgcttcaacacacagtatcagtagtgcagccaccccagatcgaatccgctt

SEQ ID NO: 388117 - DNA, 110 bp, Homo sapiens
cagaagaacaagccagaaaaacatttgagagagccatgaaactggaacaggagtttactgaacatttcacagggatgctgtgcaagattttcttcatgaaatatattttt

SEQ ID NO: 388118 - DNA, 75 bp, Homo sapiens
aaatgtcatccgatggcacaatcagagttgtctgctggttctcagcttgaagaagattctgcagtccttattgat

SEQ ID NO: 388119 - DNA, 100 bp, Homo sapiens
cgcagatcggcgcccagcaatcacagaagccgacaaggcgttcaagcgaaaacatgaccgctgagcccatgagtctatccttcactggagtctgatgatg

SEQ ID NO: 388120 - DNA, 74 bp, Homo sapiens
taacttcggcaaagggatggggagagtattcccggcaggagcaggaggaggagggccggaagcggtatgaagcc

SEQ ID NO: 388121 - DNA, 83 bp, Homo sapiens
cttaaagctgccagcaaggatgactcaatcatcactgttttaacagtccagaacacatattacataatggagccgggagacag

SEQ ID NO: 388122 - DNA, 87 bp, Homo sapiens
acagcctgaagaagggctccctcgtgaagaacctgaaggacacactagacctgcctagagctggaacgttacctccagagcgagccc

SEQ ID NO: 388123 - DNA, 105 bp, Homo sapiens
tgaccttgcagtacaacatctacaatgttggctcaagtatcccagtcgacatcagtgacagtgatatgatgctgaacatcatcaacagctctattactaccaaag

SEQ ID NO: 388124 - DNA, 96 bp, Homo sapiens
gggctcccactgattctacattatggtttcgacacagccccaactgctggtacctgagaaactggactatccacacctggattaggcagtgtctaa

SEQ ID NO: 388125 - DNA, 75 bp, Homo sapiens
attcgcagtggtcgcttcttctccttgcatcaacaacagcaacttgtgattggcggtgaccggatattcagttgc

SEQ ID NO: 388126 - DNA, 75 bp, Homo sapiens
cctgaagaagatgaacaagcgccagattccaaatggaaatacatcagagcttatttttaatgcagtgcatgtaaa

SEQ ID NO: 388127 - DNA, 82 bp, Homo sapiens
ctcacaggtattttaatggtggtcctcctgctgagacggacttcgggggagacaaatcttcccaaggctgcagacaccgacg

SEQ ID NO: 388128 - DNA, 118 bp, Homo sapiens
cgccgggtgatgaaaccacttctctacatcccatctcaatcagaattactagattttctctcaaactacgaggttagaaaggcagtggacgctctcttgacgcattgcaagtccagga

SEQ ID NO: 388129 - DNA, 74 bp, Homo sapiens
accagtactaccaaggacagcttttttcctgcaaggttaccttttcagccaagggcatctgacccgtgctattt

SEQ ID NO: 388130 - DNA, 75 bp, Homo sapiens
ccacacgagtatgtgccctgggtcaccgtcaatgggcgagcatgtttgcggtgggctgcagcatgggtcccttcc

SEQ ID NO: 388131 - DNA, 83 bp, Homo sapiens
cctcttgtttgtgttgtgtgtggaaatggcgaactcggcaaatacaaacaccgtgaggcagaagaggcctggaccttggcgca

SEQ ID NO: 388132 - DNA, 76 bp, Homo sapiens
gatgaagttgttcattgtttgtcaccacaaaaaggacaggcggagtacgtccagcttgttactgaacttcgaatga

SEQ ID NO: 388133 - DNA, 82 bp, Homo sapiens
aagaagctggtgaaggaggtcatcgccgtcagctgtgggcctgcacagtgccaggtgctcttacagcctgttccaagtgtgg

SEQ ID NO: 388134 - DNA, 75 bp, Homo sapiens
ttctttctcagaaagcagaggctcagagcttggagacagacggttacacttccaggggctccccactcagtcccc

SEQ ID NO: 388135 - DNA, 90 bp, Homo sapiens
gccaaggagacaggaacatgtggctgctcccagctctactccttctctgcctctcaggctccatctatgagatctctgggaatgagtgct

SEQ ID NO: 388136 - DNA, 100 bp, Homo sapiens
gcgaggacagctggccgccgatattcaccaagcgcttcgctacaagtgccgtggaggtcccagcccccgctgcggttctcggaggtccggagcccctgat

SEQ ID NO: 388137 - DNA, 75 bp, Homo sapiens
gccagtgtatgaagcccttcaccaacaaagatgcctatacttgtgcaaggtatacagggagctaccctgtgtttc

SEQ ID NO: 388138 - DNA, 90 bp, Homo sapiens
agcaggaatgcttactgttgcgtggttcgttattaacaggcatcagaacacaccatgatggctgtgacctaagaccctcaggaagccccg

SEQ ID NO: 388139 - DNA, 74 bp, Homo sapiens
cagcaggctccgggctgaagattgcttctcttctctcctccaagctttccccagacatggccaacaagggtcct

SEQ ID NO: 388140 - DNA, 82 bp, Homo sapiens
gggaaccctggtcaccgtctcctcagcaaacggggattcagcgtccgatcctttggaacagggactcacgtgaagcttccag

SEQ ID NO: 388141 - DNA, 75 bp, Homo sapiens
ggctgtgaataatatagctggtattgaagaggccatgtttttggtatactgtgcactggagaaagaacctgtgcc

SEQ ID NO: 388142 - DNA, 98 bp, Homo sapiens
tcctgcctcggcctcctgagtagctgggatttcagatgatgggaaatattgcagcagttgcagcttcctgtgccaataatgttccagctccagtctta

SEQ ID NO: 388143 - DNA, 75 bp, Homo sapiens
caaagctcgacttctcaatcccaagtggccaaaggcagatgtttggagcatgggcatactgttatatgttcttat

SEQ ID NO: 388144 - DNA, 82 bp, Homo sapiens
ttcaattcgatattgtgcttcctgctacagaattccttgatcagaacagagggagcaggaggagatgttaaagtaacccatc

SEQ ID NO: 388145 - DNA, 74 bp, Homo sapiens
aaccagcgctaccgggaagggaagtaccgagatgctgtgactccactggggccatgtcagagcgagaagagcgg

SEQ ID NO: 388146 - DNA, 76 bp, Homo sapiens
cgagctgatagagaccctagtaacatggctttgaaatttctgaaaaccagaagaggcaggctgcaatgactgtgag

SEQ ID NO: 388147 - DNA, 98 bp, Homo sapiens
aaagttctctcgatcagggcatacatctttcttcgacaaagggcagaatccagagaccacatttgaagtatatgttgaagtggcctatcccaggacag

SEQ ID NO: 388148 - DNA, 76 bp, Homo sapiens
ggaccagtttgccatcccaaggccgaaggatttcggctgaatgcgtcttcttggcccatgttccttttgaagacgc

SEQ ID NO: 388149 - DNA, 100 bp, Homo sapiens
cagaaaatgggattgcccaccacgataatgcagttcttattactaggatgtcacatgtacttcagtttgaggataaaagcagaaaagtgaaagatgcaag

SEQ ID NO: 388150 - DNA, 50 bp, Homo sapiens
atcatgcacctcatgatcaacaatgccataggaaaaggatacagagtaga

SEQ ID NO: 388151 - DNA, 90 bp, Homo sapiens
aggagatgcacacggcactcgagtgtgaggtactccaaagattcaggtttactcacgtcatccagcagagaatggaaagtcaaatttcct

SEQ ID NO: 388152 - DNA, 75 bp, Homo sapiens
accaaggccaagaacgggcacctggctgtgaattctcttctggcctgtgagtttctcctccagaacggggcgaac

SEQ ID NO: 388153 - DNA, 83 bp, Homo sapiens
ctccaacctgggagcagctggctctgggccttgaacattccgaaactgtcaagattggcaagagacaaggcagacagaacgca

SEQ ID NO: 388154 - DNA, 101 bp, Homo sapiens
aactgggatctctatgtcggcatgtagagaaatagcaaaagccaggaatctcaggatgaatcagtctagatcgagatcagatggtggcagtgaagaaacct

SEQ ID NO: 388155 - DNA, 90 bp, Homo sapiens
aggcctgcacgcggggcgcgggccccgaaggctctccatcgaaggcaacattgtgccgcagaatggaattcggcattgttcctacacagc

SEQ ID NO: 388156 - DNA, 100 bp, Homo sapiens
agataataaagagtttgctgagaagaaatttaaggaggtggccgaggcatatgaagtgctgtctgacaagccacccctgagtgacgacctgcagccttcc

SEQ ID NO: 388157 - DNA, 82 bp, Homo sapiens
tgcaccgacctcgacgtcttgcctgtgtcccacttgttcgcggcctataggcctgcattgatgagaacctggaggtggtgcg

SEQ ID NO: 388158 - DNA, 100 bp, Homo sapiens
attccataccagattctgtggcctgcaggtgacatgctgcctaagagaagcaggtaacctggatgaggacatcattgcagaagagaacatcgtttcccga

SEQ ID NO: 388159 - DNA, 82 bp, Homo sapiens
cctcaccagcatttggtgtggtcagtattttggattttcaccattctaataggttttaaaatcaaagatgggaaaatcggag

SEQ ID NO: 388160 - DNA, 100 bp, Homo sapiens
gtgccaggttagcagcaggaccgacggcagacccagcagccagagagtgaaagctctgaaatagaaaatgtctgcagacggcggaggcatccaggacacc

SEQ ID NO: 388161 - DNA, 100 bp, Homo sapiens
ttcaggatggcatacaagatgaaaaatattaccagatctgtgaaaggtcaaaagaaatagactggcaaccttattttactacacgcattgtagatgactt

SEQ ID NO: 388162 - DNA, 74 bp, Homo sapiens
ctgaggaccggcaacatggtgcggtcggggaataagaggctgggaggcggcagaatgcagccagaggagggcac

SEQ ID NO: 388163 - DNA, 74 bp, Homo sapiens
gtttgcattgttggtgacccaagtacagctaagagccaatttctcaacaccaaggatgacattgatcttgatgc

SEQ ID NO: 388164 - DNA, 100 bp, Homo sapiens
tgggaacccaggatggctgcggacactcacggagcccgcacccaggaacccgctcgtaacggaatgttgctcttgttgccgaggctggagtgccgtgatg

SEQ ID NO: 388165 - DNA, 89 bp, Homo sapiens
ggagaagaaatcagtcagccgcagccatgccctttgggttcccgagattttcgagagaaacagtgtgcagactttgacaatatgccttt

SEQ ID NO: 388166 - DNA, 90 bp, Homo sapiens
gttctggggagcgcctcgtcgacatgagtgatgtggaggaaaacaacttcgagggcagactgcatcttcctcccgtgaggctggccgagc

SEQ ID NO: 388167 - DNA, 100 bp, Homo sapiens
gccggcgccgccgcgtcttcccggtctcctttcccggccgcacaggccaaaagaatgcaatggtgtaaagattccagttgatgccagtaaacctaatcca

SEQ ID NO: 388168 - DNA, 98 bp, Homo sapiens
ttggagctgccgccgccgggactcccgtcccagcaggtgctggagaatctggtaaaagcaccattgtgaagcagatgaggatcctgcatgttaatggg

SEQ ID NO: 388169 - DNA, 75 bp, Homo sapiens
agtgaacaaccccattctgcggaagaggaagttacttggagtgttgcggagataggaacatgggagagaaacaat

SEQ ID NO: 388170 - DNA, 100 bp, Homo sapiens
aaaaactgatgaccaagagaatgtgtcagccgatgcaccgagtccagcccaggaaaatggagagaaaccagcctggacaccaagtctgtgtcagaaggcc

SEQ ID NO: 388171 - DNA, 75 bp, Homo sapiens
agacgcaagatggcggacagtgcggaactaaaggggagtaggttgcatctttgttgaaatgatccaaggagttgc

SEQ ID NO: 388172 - DNA, 50 bp, Homo sapiens
ctcaggagtcaatggagtcccacggatgataccatcggggaccttaagaa

SEQ ID NO: 388173 - DNA, 75 bp, Homo sapiens
gactcacctgcaagtactagctctgataacttgggttctttacaagaactgcaagcacatgttgaccagataact

SEQ ID NO: 388174 - DNA, 75 bp, Homo sapiens
tccccgccgctcccgggggccgtgacggctccataagacgttcagtcagctgccctcggtccatctctgctcaat

SEQ ID NO: 388175 - DNA, 74 bp, Homo sapiens
acaagactggggctgctcccatcattgatgtggtgcgatcggaacgggaggatgaaattgctactatggagtgc

SEQ ID NO: 388176 - DNA, 100 bp, Homo sapiens
atggcggctgcgctgttcgtgctgctgggattcgcgctgctgggcacccacggagcctccggggctgttgagccccatatgggggttggcaggcagcaga

SEQ ID NO: 388177 - DNA, 74 bp, Homo sapiens
ttgggagatccacagctaagacgccgggactccctggaaacctagaaatgaaaatggactgactccaaagaaaa

SEQ ID NO: 388178 - DNA, 75 bp, Homo sapiens
gttttccgagacaacaacggcaccgcggatttttagactctgaggagcagttggagctaatccacattatggaaa

SEQ ID NO: 388179 - DNA, 98 bp, Homo sapiens
ccaaccaaaaccagaagcagggccgcttccgcagcctggaggaagcactgaaagctctgattgggcagaaagtggcccatgctctggcagagggactc

SEQ ID NO: 388180 - DNA, 101 bp, Homo sapiens
ccagccgcggatggggagcgtgagtggcgagttgggatgaatgggttccggagagcagagtactcaaatacgtggacaccaatttgcagaaacagcgagaa

SEQ ID NO: 388181 - DNA, 112 bp, Homo sapiens
cccggcctatgcctacgtgctcacggtcaacgagcggggcaaccactgcgagtactgcttcaccaggtgtccctggccagtgtccttccacctgtccacaagcatggggaac

SEQ ID NO: 388182 - DNA, 98 bp, Homo sapiens
tcagaattctgggtgttgggcctgacgatcctgacctggtacgagcccggaacattcttcacaagaaaggcggcttacagggagaacacagttggcct

SEQ ID NO: 388183 - DNA, 98 bp, Homo sapiens
tgcagtcgcctgctgctgtcgtcgggagccatgactgacaatactaatgtcaactatgtgcggtacaagggtgattactacctctgcactgagaccaa

SEQ ID NO: 388184 - DNA, 97 bp, Homo sapiens
tcctggagaccctgggcaaaggcacctacgggaaggtgaagaaggcgcgggagagctcggggcgcctgggcctgtggaagtcaaagttcagccctga

SEQ ID NO: 388185 - DNA, 75 bp, Homo sapiens
gaaaagcacaaaaagcagctgatcctgtccctagttttgatgaaagcaggttcaaaactggtcaaatcaatggtg

SEQ ID NO: 388186 - DNA, 82 bp, Homo sapiens
cttggtaatggcgacgggtttggagaatggggtactaagagaaaagcacgaagctgtggatcatagttcccagcatgaggaa

SEQ ID NO: 388187 - DNA, 50 bp, Homo sapiens
tctcttgtcactccaagaaaagctggtgagcctggccagtgaagtccagg

SEQ ID NO: 388188 - DNA, 75 bp, Homo sapiens
gtcagcaagtggcaagcctatggactcaaaggctatcctggcaccacactgtaactcgaggcatcaccaaaggcg

SEQ ID NO: 388189 - DNA, 100 bp, Homo sapiens
ctgagaaaggagctcggggactcccccaaagacaagcggatgtgatgctggtacaacccagagtagaatttattctgtctttcattgaccacattgctgg

SEQ ID NO: 388190 - DNA, 98 bp, Homo sapiens
ccaccgacctcccgttagcccctgagagccgggtggaccctgaggtccttcacagcctgcagatcactaaggaggaagagcgagagaagaagttttct

SEQ ID NO: 388191 - DNA, 87 bp, Homo sapiens
gaactgcgaacttccccttacctcctctctctggctcgggagctggggttcaccagccagctgggagctgaggggaaaagccaacct

SEQ ID NO: 388192 - DNA, 74 bp, Homo sapiens
caacatcccctacaagatcgaggccgtgcagagtggttgaagatggatatgaattttttgcaaagaggcagttg

SEQ ID NO: 388193 - DNA, 89 bp, Homo sapiens
acggagccgcgggagccgcccgggctgatcttcaataagcatttgaagacatgctggagaacccactgaacagcacccagtggatgaat

SEQ ID NO: 388194 - DNA, 83 bp, Homo sapiens
tccagttactctaacaagtctggagtaaaattcagaagtactctccatctgaatctgcaaaagtatatgataaagcgataaac

SEQ ID NO: 388195 - DNA, 83 bp, Homo sapiens
cgacgtcttgcctgtgtcccacttgttcgcggcctatagatcccagtttctgacctgtagcatagtccctctctctgaagaac

SEQ ID NO: 388196 - DNA, 98 bp, Homo sapiens
accggatcaacttcgacaaataatggacgacgaagacacgttgttacctaggaagttacaggcagctctggagcaggctctggagaggaagaatgagc

SEQ ID NO: 388197 - DNA, 83 bp, Homo sapiens
ctttatgaaccagtgtatcccaagaggaagaacgtgcaaaacgtgaggagctagagcgaatactggaagagaataaccgaaaa

SEQ ID NO: 388198 - DNA, 129 bp, Homo sapiens
agtacctgaaccggcacctgcacacctggatccaggataacggaggctggccccagcatgagaccagatgtaagctctcctccatccagctcctcaacagcaacaacaggaccacctcccaaactctgc

SEQ ID NO: 388199 - DNA, 75 bp, Homo sapiens
agcacttcagtcggaaagttggaacctctgacaagaccaagtactaccttcaagttccagggtcacccccgagag

SEQ ID NO: 388200 - DNA, 73 bp, Homo sapiens
gcagctggacccgctcaccatctacggcatccggttctctgctttctatccgtcaagatgataaagtcgtgtg

SEQ ID NO: 388201 - DNA, 75 bp, Homo sapiens
aaaaagaacccaccaggcatggatgaccaactttggatgatcatgacgcagtcctgaggtttaatggggcaccca

SEQ ID NO: 388202 - DNA, 75 bp, Homo sapiens
actaccccgcagttcccggacatgatcctctccgcctctcgaggtgtgatgaatgcagactctgctaccattttg

SEQ ID NO: 388203 - DNA, 75 bp, Homo sapiens
gtcggcagcaagaacagagagagaggtggacagatctgagagatactgaggtgcagtggcgtgcagggccctgga

SEQ ID NO: 388204 - DNA, 82 bp, Homo sapiens
ggaagcaggtggaattatgccctgttggttccaatgctgggattggctgcttttcgcatatatggtgctggttgtctcatta

SEQ ID NO: 388205 - DNA, 73 bp, Homo sapiens
tgggaggagcgccggaacgccgaggcccagctaaagatgtgattaaagagattgaagactttgacagcttgga

SEQ ID NO: 388206 - DNA, 100 bp, Homo sapiens
aggcaacgtgttggaccttccggagcttctcagaagacagagggttttcttttgagcctcaaggaataggttctcctagtgtctatcatgcagttatcgt

SEQ ID NO: 388207 - DNA, 82 bp, Homo sapiens
gctggagtacgtggatgtggtgtttgccaaccgcccggaccccaacaccccgatggaaggtttggtgcacctcgatttggag

SEQ ID NO: 388208 - DNA, 100 bp, Homo sapiens
gagctcttggaaaagcaccaaagggagcttcaggagggaagatgccagaggaacaagcattctgtgttttggtgaaaatcatgtacgactatggtttgag

SEQ ID NO: 388209 - DNA, 74 bp, Homo sapiens
agaaaacataccaatattgttgcacagactagccgctggcccaacaggcaaaaatgaagaaaaaattcaggttc

SEQ ID NO: 388210 - DNA, 98 bp, Homo sapiens
tgaaaggagattccaacctacttcaggttatcaatactctggctgaccatcatcatcgtgggactgactttggtggaagtccttggttacatgtcatt

SEQ ID NO: 388211 - DNA, 98 bp, Homo sapiens
acagtgcagggaagcaactgcagagaataactgaagtgaagtgatggactccgatttggagagtagtaagacgtgaaaggaatacacttgtgtttaag

SEQ ID NO: 388212 - DNA, 100 bp, Homo sapiens
aaaccaacagccagtgatatgctatacatggttttcctttggaatatggataaatacaccatgatacggaaactagaaggacatcaccatgatgtggtag

SEQ ID NO: 388213 - DNA, 154 bp, Homo sapiens
ttatgtgacagatgaccacgacagagagttttcagtcgcagacctctcggttcagatattcacggttccttcacttgactgggaggtgctggtcctagggaagctcaagtgggacctggctgctgtgattgcacatgatttcctggccttcatt

SEQ ID NO: 388214 - DNA, 100 bp, Homo sapiens
gccgcccctcaccagacagatcgctgtcaaaaccctagaatgatgccaaggtcttggagcagcccgtggtggtgcagagcgtgggcacggatggacgtgt

SEQ ID NO: 388215 - DNA, 101 bp, Homo sapiens
acacgggctgcaacctgcagcacatcagcgaccgggagaacatagacggagaataaaggcagccccgttgatgactgaaaatgacaaagcatccacctaac

SEQ ID NO: 388216 - DNA, 98 bp, Homo sapiens
accgcacaatggaaggctttcaccaaacctgaagaagcctgcagcttcattttgagctgcaattctcattgcaagatcatcgcctccctggtttatag

SEQ ID NO: 388217 - DNA, 75 bp, Homo sapiens
tgccctgtcatcccacctgagaaccatgctcaccgaccctgcccgctacaacttcatccgaagcatggccgccta

SEQ ID NO: 388218 - DNA, 100 bp, Homo sapiens
aagagagctgagggaggcgcgagggcgcggagttccaggtcgagcagttaggccgcgagcgactgcggcgccgagccgggctgaaatctctttaatgatg

SEQ ID NO: 388219 - DNA, 50 bp, Homo sapiens
gtaaaaggctgagaagcttaagttcttcaaggcctttaccaagaacggct

SEQ ID NO: 388220 - DNA, 75 bp, Homo sapiens
tgcttaaaaatcaccagttactttaatgattcaaaaggtgatgacctatcaacagccattctcaaacagaagaac

SEQ ID NO: 388221 - DNA, 75 bp, Homo sapiens
agaatgtttttgaccagaaaaccgacaaccttcccagaaagtccaagctcgtgattgtaaaccatggctgtgtgg

SEQ ID NO: 388222 - DNA, 80 bp, Homo sapiens
gaattatgggcgtgagccactgtgcccaggacattttctacattgaaaaccaaaaggaatatgaaaataaaaaagctgct

SEQ ID NO: 388223 - DNA, 100 bp, Homo sapiens
tggcaaacagtgccctgatctccgttggctgcttggccatatttgtcactgtgatctccctcttggtgtacaagaagctgaatatggtgggcatgatcag

SEQ ID NO: 388224 - DNA, 100 bp, Homo sapiens
aggatccccaaccgcctgcgaaacccaagccgccgcgtaggagcgtgcgttcgggccctcttctcccacctgttcgggaaaccatctttgtatggcagcc

SEQ ID NO: 388225 - DNA, 75 bp, Homo sapiens
gcagcaaaaccatcttctctaagaagcctccccagctttctgaggatgatatctggctaaaaagcgagggagaca

SEQ ID NO: 388226 - DNA, 75 bp, Homo sapiens
ggagcagaagaagcaggaccgcggggagctgaagctgctgcttttgggtacaccaggggttggaaaaaccacact

SEQ ID NO: 388227 - DNA, 74 bp, Homo sapiens
aagcagggctacacatttttcatcccttccggagatgtcccaaacaggaaggaagaggaaccggaggaagtccc

SEQ ID NO: 388228 - DNA, 80 bp, Homo sapiens
gaggattccagggtcgaacactcggctcaccagctggattccctcctgggggcttcattcccaaaacggccaccacgccc

SEQ ID NO: 388229 - DNA, 98 bp, Homo sapiens
aagagccgcagtgagttgggcaggttcttggccaagcagatcaataagatggagtggtggagccgcttggtgtccagtgaccctgagatcaacaccaa

SEQ ID NO: 388230 - DNA, 74 bp, Homo sapiens
aacagagacccaagttcccagaagcctggaaagaaaatagcctggccctgtctcagcgggaccctcctcacaac

SEQ ID NO: 388231 - DNA, 100 bp, Homo sapiens
acaacctgactatgtacatggatttagtggacggcatctttttgaaccaaattatgctgcaaatgtaccgagcccctgaactgctgttgggaaccaccac

SEQ ID NO: 388232 - DNA, 101 bp, Homo sapiens
gtgcaactgaaaatgacattgctaatgtttgatatacgtttgatgaaagaaggtcgtatgaaaggacaagctttcattggacttcctaatgaaaaagcagc

SEQ ID NO: 388233 - DNA, 95 bp, Homo sapiens
agcaatggggataccattctggaagacttgcccatccaatctgggttacattccgaaaagcaaatgggagatggacacatctgaggcaaagctag

SEQ ID NO: 388234 - DNA, 73 bp, Homo sapiens
atgccaaggagaatggtactgatactgtccaggatgagagccactcagagtgggtgtcttgtgtccgcttctc

SEQ ID NO: 388235 - DNA, 98 bp, Homo sapiens
cccgggccacccagcccgcccaactcccagcggagagcaagctgttcgggggtcttgtctggattttggttgcctcctccaatgttcctctacctcta

SEQ ID NO: 388236 - DNA, 98 bp, Homo sapiens
cgaccagattattagaggcctcagagaatgtcaaaggtaccccaagaagctagtgcagacttattcagtgtttccctaccaggacgagatgagcgacg

SEQ ID NO: 388237 - DNA, 98 bp, Homo sapiens
aaaagccctcagtaccagagacagaagcagatggattcgtccttttaggttcatgcatgggagatctcagaccagttgttacagatccggcaggatgt

SEQ ID NO: 388238 - DNA, 100 bp, Homo sapiens
aatggatgcaataagtgcagaagggtttactgatattgatatagatgaagattatggaagagattcgggccctcccactaagaaaattcgatcatctccc

SEQ ID NO: 388239 - DNA, 90 bp, Homo sapiens
atgaagtccaagtactcagacatcaccatcatgtttgaggtcagaagagatcaattctacagaaatttccagtggttctgttgaggcttt

SEQ ID NO: 388240 - DNA, 75 bp, Homo sapiens
cttcctttgaccacgttatcaaggaggttggatggcaagcatgtggtgtttggcaaagtgaaagaaggcatgaat

SEQ ID NO: 388241 - DNA, 83 bp, Homo sapiens
gttacttttaccacacccctcccggatgtataggagtgcggtctatgcttgcttggtgcttatgctgacagtgatgacgatga

SEQ ID NO: 388242 - DNA, 51 bp, Homo sapiens
atcaactactcctgcgaggaaaaggcacttaagtattcatcgaagagtcac

SEQ ID NO: 388243 - DNA, 100 bp, Homo sapiens
aagatttaacattccaacacataaaaattatttatccaacagctcctcccaggtacgcatagctgctaaattcatcactcatgcacccccaggggaattt

SEQ ID NO: 388244 - DNA, 98 bp, Homo sapiens
cgccggctgctctagcgagcagttcgaggagtgaaggtggtgtttttaaggctcatcttactttcccaaaagattatcccctccgacctcctaaaatg

SEQ ID NO: 388245 - DNA, 100 bp, Homo sapiens
cacaacagacccactgatacgctgggactcgtacgagaacctcagtgcagatggagaaggcatgtacatggaccgccgctgtgtctactaccggaagcca

SEQ ID NO: 388246 - DNA, 75 bp, Homo sapiens
ggagagtctgccggcggagaatataagaatgtccgtctgtctgcccaggctggagtggcacgatctcagctcact

SEQ ID NO: 388247 - DNA, 60 bp, Homo sapiens
gaccatttatttctttggagacaaaactatgccagagatctattgggaaactgattataa

SEQ ID NO: 388248 - DNA, 100 bp, Homo sapiens
ccctttagccatgtggatacctacggagcacgagaaatacggcgtgggtttacaggtacatacattacacccctatttctacaaagcttggctattagag

SEQ ID NO: 388249 - DNA, 74 bp, Homo sapiens
cgcggaacggtcgtggagaagaagagctgctgatgaggactgggacagagagaagaagaaggaggttcctgctg

SEQ ID NO: 388250 - DNA, 99 bp, Homo sapiens
catagtggaactaaggggaacttaatttactggagtctcgctctcagtcaaaatctccaacgggaactcctgctcgtgtaaaatcggagagcaggtcag

SEQ ID NO: 388251 - DNA, 75 bp, Homo sapiens
ttctgccgggaagcaagaggcaaagagaatcggttgtttgaaattggcacaatggaagaagctggaatttgtggg

SEQ ID NO: 388252 - DNA, 73 bp, Homo sapiens
tccactctgcagtggctcttccgcttggacatcagggcaattgaaggaacagactaaaaatcgtgtcctggaa

SEQ ID NO: 388253 - DNA, 96 bp, Homo sapiens
gctctatttctacccaggctgctgtcgtcgtgggagccaacgggtcagcaatctgaagatggtcttacggagcctagtagagtactcccaggatgt

SEQ ID NO: 388254 - DNA, 75 bp, Homo sapiens
attaaaaccagggctccacagttaggaggcgataggaagaactatgcctctgccaagctttctgagttgctgcca

SEQ ID NO: 388255 - DNA, 100 bp, Homo sapiens
gattgctggttaccagtggccttccaggttgttatctgcaggtgtggcaggttgcagaggacagtggtgcagctcagtggaagatgatgacaaccagaag

SEQ ID NO: 388256 - DNA, 75 bp, Homo sapiens
gagatcctgctgacgccggctaggaatgaggaaaatggggagcaggaggctgacaatgaggtagacgaagaagag

SEQ ID NO: 388257 - DNA, 90 bp, Homo sapiens
ccgacatcaagagctgcgagatccaacagaggcgtggagctatttcctatgacagttctgatcagactgcattatacattcgtatgctag

SEQ ID NO: 388258 - DNA, 74 bp, Homo sapiens
gaaaaacagaaccggagactgctggtcccaaccaggtccacaacgttcgggacagagcgggatgccaccagctt

SEQ ID NO: 388259 - DNA, 71 bp, Homo sapiens
catcttcgtggggcgtgaggagtgtgagctcatgctacagatattttccacactcctgttcaatgctcgga

SEQ ID NO: 388260 - DNA, 75 bp, Homo sapiens
cacggagaaccattaatcatctctaagagatgtggtcttgctatgttgcccaagctgatcttcaactcctggcct

SEQ ID NO: 388261 - DNA, 100 bp, Homo sapiens
atcattgtgcccagtttctacaaataaaagatgggtggattattttctcgatggaggaaattgtatgctgctatgcatgaacctgatggagtggccggag

SEQ ID NO: 388262 - DNA, 101 bp, Homo sapiens
atgagagtggataatataatcaactcctctgcctggaacgtcaaggtcgtgggaaataaaaggcagttctacacagactgcagcaacggttgcatctgcat

SEQ ID NO: 388263 - DNA, 83 bp, Homo sapiens
gtccatgaggcagcgagcccctcacagaccgtccagcgagcggtgtctgtaaatcccgcggccctccaggcactgaagcgtaa

SEQ ID NO: 388264 - DNA, 74 bp, Homo sapiens
cgagaaaggggccatagtgaagtggtagctattcttcagtctccaggcctatatgaacccaatagcaatggcga

SEQ ID NO: 388265 - DNA, 82 bp, Homo sapiens
aaacaagccaatcccaggaggaaaaacgagagctggcggtcaccatggcaatgcgggagctggtggaggccgaatgcggggg

SEQ ID NO: 388266 - DNA, 100 bp, Homo sapiens
tgaagacgaagttgatggcctggagaagaaagatgttttgcctactgttgatccgactacaattatttgggacgcacatactggtgaagccaagcaacag

SEQ ID NO: 388267 - DNA, 100 bp, Homo sapiens
tgaagaccacaataaaagagacctctacttagctcagcaattcttaccttgtcccagcacacctggaaagttctgcaaggcctcagctacagaaagccca

SEQ ID NO: 388268 - DNA, 100 bp, Homo sapiens
cgctacaccaacctctcgtacatcggcgagggcgcctacggcatggtgtgagaagttgatgacgcctgagatgttttcagaaatcctctgtgacgatctg

SEQ ID NO: 388269 - DNA, 75 bp, Homo sapiens
aaggcctcgctggagatcgagtaccaacccatgactgaagagttgctgaaacaacaaaagctgaattcacatgag

SEQ ID NO: 388270 - DNA, 100 bp, Homo sapiens
tatcacccacacccacacgtgttcaatacacctcccacctgtcctcaggcatatcaaaggaattgcattttgtgaaaaaagaacaagaattttctgcaag

SEQ ID NO: 388271 - DNA, 100 bp, Homo sapiens
ggccgctggaggcgctcatggaggtgtctgtgtctggagctgctgctcttcctccagaacctgcccacagcccactgggatgatgaggacatcagcctgt

SEQ ID NO: 388272 - DNA, 90 bp, Homo sapiens
acaaggagaaaaattgactacatcacaactgaaattagtaaaacagaattctctttgggatttgtggggccctttgatcctttgtgtgac

SEQ ID NO: 388273 - DNA, 82 bp, Homo sapiens
gctgcatagtttcggtcatctaaaggaggttttaaacagtataacagacaatgcagatcttcgtgaagactctgactggtaa

SEQ ID NO: 388274 - DNA, 83 bp, Homo sapiens
gtcttttccgcccgcttcgatcgcctcgcgccggctgctctttccggtttttgaaatcatgaatcctgtttatagtcctggat

SEQ ID NO: 388275 - DNA, 82 bp, Homo sapiens
tggccatttatgaagttttaaaggatgatgaacgaaggcagagccagattctcctgaatataaagccgcttgcaaactctgg

SEQ ID NO: 388276 - DNA, 100 bp, Homo sapiens
gctacatactcatcatggggctcctgtacaagatgctgtgtgctgtggacccacctggggttcatggagtgggccacggggcccagccctaagcactgct

SEQ ID NO: 388277 - DNA, 95 bp, Homo sapiens
aaatattgcggcagttttatgtggccaatttcttattgtcgggaactcaaaggttattccattccttttatgggatctgatgtgtctgttgtaag

SEQ ID NO: 388278 - DNA, 75 bp, Homo sapiens
catgtatcagccgaggtggagctgcggggccctggcatgaaaggaaagaccacagcaagattctttcattcgtct

SEQ ID NO: 388279 - DNA, 97 bp, Homo sapiens
ttagctgtgctcgcgctactctctctttctggcctggaggctatccagcccgccgccatgtctgcgcatctgcaatggatggtcgtgcggaactgct

SEQ ID NO: 388280 - DNA, 98 bp, Homo sapiens
cagcatggaaccaaagcggatcagagagggctaccttgtgaagaagaaccacaccttcatcaagcggtccgaggtggaagaagtggattttgccggct

SEQ ID NO: 388281 - DNA, 100 bp, Homo sapiens
cggccctgctcactaccgcgcccacgtgtcctgttgtgcttcattcccacaggccgcataagggtctgaaaagccctcaagaaagcctcagtgatcttgg

SEQ ID NO: 388282 - DNA, 122 bp, Homo sapiens
cagaccaataaggacaaaatggaatgtgaagagcaaaaagtctcagatgagctcatgagtgaaagctagttgctacattgcctgatgatgttcagcctgggcctgatttttatggactgcca

SEQ ID NO: 388283 - DNA, 98 bp, Homo sapiens
tacagaaagttcaggagccctggaaaggagaaggaataagacggcaggaggaagagagagagaggatctcattcgtcggttcggatccaagccagttc

SEQ ID NO: 388284 - DNA, 101 bp, Homo sapiens
acgagatgatcaaacgcctgaaggttgagactgagctaaagttaatctgttgtgacattctggatgtactggacaaacacctcattccagcagctaacact

SEQ ID NO: 388285 - DNA, 50 bp, Homo sapiens
ccctctgctgcctcccgcccccgatgcctgaggaaacccagacccaagac

SEQ ID NO: 388286 - DNA, 101 bp, Homo sapiens
tgattgcagagcgcatcgaggataacgttctccagtccagcgtcccaggccccttcacagatgtagtcactacaaatcttaaattgcgaaatccatcggat

SEQ ID NO: 388287 - DNA, 100 bp, Homo sapiens
ttctcttcacggtggaaaacacagatccagagtgttactggcttacaaattggattgagaagattccggcagcgatgaagatttcctaatggaagatgat

SEQ ID NO: 388288 - DNA, 98 bp, Homo sapiens
acaaatttttttgccactagaaacatgtgcaacgagttactgccgataatgaaacctcatggaccctgctttctcggctgtgattcacgacaaactcc

SEQ ID NO: 388289 - DNA, 90 bp, Homo sapiens
ggaaagggagacggcgagacgcgcagcgccggcgcccgggagacccaggaggagcccgcagcttgccttgcgccatggactggcagccag

SEQ ID NO: 388290 - DNA, 50 bp, Homo sapiens
gtggatccaagatggcgacggcgatggtgtggacacctcaagatcgccag

SEQ ID NO: 388291 - DNA, 75 bp, Homo sapiens
agttgctgagtgtcctgatggtttgcagctcaccttgtgaagatgaaatatccaagaatctgtattctagatggt

SEQ ID NO: 388292 - DNA, 82 bp, Homo sapiens
gcaattgataatggtctagcatttccttttaaacatcctgatgaatggagagcatggcaagtgtccagagaatggctgggat

SEQ ID NO: 388293 - DNA, 90 bp, Homo sapiens
aggctctgcggctggtccaggccttccagtacacagacgagcatggggaagaagcttccacctgttctcaatttgcaagaattagaggcg

SEQ ID NO: 388294 - DNA, 95 bp, Homo sapiens
aacatatatcccagatttctgtggcagaagatgatgatgaaagtgaattagaaggtgacgaggagggagaagacgaggatgatgcggaaattaac

SEQ ID NO: 388295 - DNA, 80 bp, Homo sapiens
ccaggaccccctgggaagcctagaaaaatgagctgcagagagacaaggcggcggcggctgctgtgctgggtgcagtgagg

SEQ ID NO: 388296 - DNA, 88 bp, Homo sapiens
ctccccagctggtggctggagcgaccccttgttctttggtggcgctgtgctggcctacatgcagttgctggaggactactcggagccg

SEQ ID NO: 388297 - DNA, 78 bp, Homo sapiens
ggacctccaaggaagccacgtgcagacatctacaaccttcgatctcctgacgaactggcacagcctccaggttggcgg

SEQ ID NO: 388298 - DNA, 50 bp, Homo sapiens
ccgaaggctccgctcacgcccgggcctatggcatgtctgcgttaccttta

SEQ ID NO: 388299 - DNA, 74 bp, Homo sapiens
aactttgccgataccttaggatacaacatagaacctattatgctctatcaggccagaagctgggcttacagaga

SEQ ID NO: 388300 - DNA, 83 bp, Homo sapiens
cctaagccaactcgaaaaagccgtacaaaaaataagcaaaagcgtcccaggagttgtcactcagcccagtccatcagtttctc

SEQ ID NO: 388301 - DNA, 100 bp, Homo sapiens
atttctaccttgtatgcctcaatttgctggatttaagcactgctgcactttatgaggtgttttcacagtcctgtgtttggtatggagagtgtggaattgc

SEQ ID NO: 388302 - DNA, 90 bp, Homo sapiens
gacacttggaaattgaacaagcgtcacttgacaagcctatagaatcgggatcatagacggtatttctatgtaaacgaacagtcgggcgag

SEQ ID NO: 388303 - DNA, 89 bp, Homo sapiens
tccaggggaacaatgaggcctacgcagagctcatcgtccttgatgacttccggatcttctgtggggatctgggcaatgaggtgaacgat

SEQ ID NO: 388304 - DNA, 80 bp, Homo sapiens
tgatggggacccaaaccaccagtccaagaatttccttgtgcctggactcattaccagagaagctggctgtgcatgagaag

SEQ ID NO: 388305 - DNA, 83 bp, Homo sapiens
cgagaccattccgtatggagagccggggcttacggcaaccagctcctttttctgatgaaattgaagttgactttagtaagccc

SEQ ID NO: 388306 - DNA, 100 bp, Homo sapiens
cccagatggactccaacaggaagatgaatgccagcgagcgggagctggcagcctgccagctgctcatctcccaggttctgattggaactgattccatccc

SEQ ID NO: 388307 - DNA, 100 bp, Homo sapiens
ccccgaagtactgtttacagctcacgattcctgggggaactgtcttactgcagttaattggccttggtcctcacagctccaaaaagaaacaggatctcga

SEQ ID NO: 388308 - DNA, 98 bp, Homo sapiens
tagactgctgctagctgaataccatctgggagcataaaggtgacctgaaggtatgtcctctaccctctggatctgtacaacgacagcgcctactatgc

SEQ ID NO: 388309 - DNA, 105 bp, Homo sapiens
acaaaagaagcagctcaggaggctgttaaactggtggatattccatctattataaccaagaaactattaaaagcagcaatgaagcatatagaagtgatagttaaa

SEQ ID NO: 388310 - DNA, 50 bp, Homo sapiens
gctcctcagccacggaaatgagaggggactcagaagaagatccttgacat

SEQ ID NO: 388311 - DNA, 75 bp, Homo sapiens
ctttggaagacttcagaagatcaccaagggctcatatggaacagattaaaagggccaataaactgtttaccaatg

SEQ ID NO: 388312 - DNA, 75 bp, Homo sapiens
ctactggggccagggaaccctggtcaccgtctcctcagaaacgtgttcagttgatcatcaaatacttaaaggacc

SEQ ID NO: 388313 - DNA, 75 bp, Homo sapiens
gatgaagatggttatgaagaagaagaagatgagaacagtagacagtcggctttcatgagaaggacaagaagccat

SEQ ID NO: 388314 - DNA, 100 bp, Homo sapiens
gaggatggatggaccatggatgcggaagcagatcattcaggaggtgaccaaccacataactcgagacagggacagcgggaggctcaaacctgccctcgga

SEQ ID NO: 388315 - DNA, 100 bp, Homo sapiens
ggtcctgcatgccagtaaaactactcatgtcagctgttctgcaggatcccatgagaaggttgatgataattagaagcatgctttccactgaacttcccga

SEQ ID NO: 388316 - DNA, 82 bp, Homo sapiens
gcgcgtggaacggctgcttttggaaggtagtctgtagagaatgccaaatgagggaatcccccactcaagtcaaactcaggag

SEQ ID NO: 388317 - DNA, 95 bp, Homo sapiens
tgatggatttgccatgaccagctttgtcacttttgaagcgctggaggagaggagttcattacttcggaagtggtacaatttaatgatacaaaata

SEQ ID NO: 388318 - DNA, 50 bp, Homo sapiens
cagaccgcgggcactgccgccgctagagagcggaacaggcgaggaaaagt

SEQ ID NO: 388319 - DNA, 51 bp, Homo sapiens
tccagcgctgccggagccgcctgaggcagcctgcttctgcaaagtggtacg

SEQ ID NO: 388320 - DNA, 75 bp, Homo sapiens
attgctccttgtggagctattgccaacagcatgtttaatggtccctggctctgtcactgaatacaaggtcttggc

SEQ ID NO: 388321 - DNA, 98 bp, Homo sapiens
acggagctgggcgacgagctgaccctgggagacatcgacggttctggcctataggaacaagacattttcagtaatggaagaaggagcttccaggctgg

SEQ ID NO: 388322 - DNA, 74 bp, Homo sapiens
ccacatactatccgtttgttcaggaaccaccagtgacagagtggtccacaattagtgaaaatctgtttgcaacc

SEQ ID NO: 388323 - DNA, 75 bp, Homo sapiens
ctccatggcccactcgccggtggctgtccaagtgcctgggatgcagcactggaagaagtacgacatctatgagaa

SEQ ID NO: 388324 - DNA, 100 bp, Homo sapiens
tggatcagaactgtgttcgcaattcttacgatgtcttctctttgctacggaatacggggtgctttgcattcaggaatacagaaaaaacagcaaagtggag

SEQ ID NO: 388325 - DNA, 100 bp, Homo sapiens
ggactacgtcaaggtgaaggtggagccctcaggcatcacatgtggagacccccctgagaggttctgctcccatgtggcacaagaatggctcaactctcca

SEQ ID NO: 388326 - DNA, 74 bp, Homo sapiens
tggccttcaaccccgagccgctggtgctacagagcagcccgacggccatggaggctgaagagacgatggaatgc

SEQ ID NO: 388327 - DNA, 99 bp, Homo sapiens
tgggatcacctatgaagatattctgctacaggtttgatagaaaatcgccctcagtcaccagctacaggcagaacacctgtgtttgtgagccccactccc

SEQ ID NO: 388328 - DNA, 100 bp, Homo sapiens
cacctacggcccgagacacaccaggccggcaggctgagaaaagcgagaccgcgtgcgaggaccggttgcagagcctgaggcctgtgatcagatgtacgag

SEQ ID NO: 388329 - DNA, 100 bp, Homo sapiens
tagaagcacacccagtgcaaagatgcttcagaatccatctgagtttgcacagtcagtaaaatccttgctggaagcacagaagcagtccattgagtctggc

SEQ ID NO: 388330 - DNA, 100 bp, Homo sapiens
tttgcaaaggccttggagagcccagagcgacccttcctggccatcctgggcgggatcccttggttccagtaccccattatctatgacattcgggccagac

SEQ ID NO: 388331 - DNA, 100 bp, Homo sapiens
ttcatgggccatgcccggtgaccacttttggaccaaaggcctgtgtgctgcagaacccccagaccatcattggtgtccatgggctctggagaccatcagt

SEQ ID NO: 388332 - DNA, 97 bp, Homo sapiens
ggagaggtgttaccggaacggcggcgacaagggtgttcccgaactagagtggcaattctgtggtgttcttggtcacacatttatggagtttctgaag

SEQ ID NO: 388333 - DNA, 75 bp, Homo sapiens
gaagatgcctcgaactaaacaaattcatcccagaaatctaagagatcacaatgaggacctagggcatctgtctgc

SEQ ID NO: 388334 - DNA, 75 bp, Homo sapiens
agtagaaaaagcaggccctgagatggacaagagattagcaactgaaaccagaatccgggcaatggataaggatgc

SEQ ID NO: 388335 - DNA, 100 bp, Homo sapiens
ctgtcttctcttcctcctccaccgagtcgtgctctcgccccaacccgcgcgccagttggaatcgaagcctcttaaaatggcagatgacttggacttcgag

SEQ ID NO: 388336 - DNA, 95 bp, Homo sapiens
gagatgccccgcggcagccgcgctcggggctctaaggagttaaagttcctcgtaattttcgcttgttggaagaacttgaagaaggacaaaaagga

SEQ ID NO: 388337 - DNA, 100 bp, Homo sapiens
gttgtcccctcagcgagtggcagcagctgcctcaagaggagcagaattctgcttggtcagaatcgtgatggcattgtgttcagcactgatgactattttc

SEQ ID NO: 388338 - DNA, 98 bp, Homo sapiens
tccaatgcaatgctgtttgccctgaacatcatgaattcccaagaaggagcttgcccagtttcgacaaagaaaagctcagtcggatgggcagagtcctt

SEQ ID NO: 388339 - DNA, 82 bp, Homo sapiens
caccaagcatggtgaacgcattcttggtgttggatcatccagacttgaaacatatcgacccagtggttttaaaacattgtca
